United States Patent Application Publication US 2022/0098672 A1 - sequence listing, part 2

SEQ ID NO: 14730 - DNA, 380 bp, Homo sapiens
  chr17:45500865-45501245
  hyper
cgcaggtggctcctccttcgcttctcccgatccccggccgtgccaggcacggtgccggctgccgagggaacgcctttgtgcccggtcctgggaacccgcgacggccgccgcgcgccccggtccattgtttcgcttctctgggttccaggtaggtgcgggcggcgcgcggggtccgcacgacgtgtcaccccggcggttggggcgccgggacccgcgggcgccggcaggggcgttcccgggcgcacggcggcggtgcagcacctgaagcggtggtggtcggccagcggcggcctcctgcacctcaccctcctgcaccttaccctcctgctgagctttgctgggctccgtgtagacctagacctttacctgctactgccgcc

SEQ ID NO: 14731 - DNA, 619 bp, Homo sapiens
  chr17:45928211-45928830
  binary
cgcgttcggagtgcgttttttcgagacaatctccgtagcgctcacccctggccaccccgacccgcgctcctacctcgaggctgcggcgggctccgggcacggctggctggtgcgctactgacggtcgctcataggccctgtgcgccggcgagctctccagcggtaaggggcaggagcccagggcgagccagacccggcggctggcggcaggcggcaggcggcggaggtgagcgctggcgagagggcggaggacggagggcgggcaggagccagcgagcgaacaaggccagctccgcccgtgactcacccgcgctctctgccttcatcctctccccagcgctgctttttcccccggactcgcggccccgcccacctcacctgcggccgcctttaacccttgagggctcggctggaccggagcccagccagggccgcgaggagggggtgggcgggagtgggggaggaaagataactagggcgtgcgccgcccgctccctcgctcctccctggtcccctccactcccagggagaggggcccgggtggggtgattcccaggttctaagacccgccccgccgggtggaaaactgccctggagctagctcggtctagcagaggac

SEQ ID NO: 14732 - DNA, 299 bp, Homo sapiens
  chr17:46089283-46089582
  binary
tccagcggtcccctctcttccatcccgccatctctctgaggggcttgcgtctccctgatgcgctctggtgtctgtctgagccatccatcaaggatggcaggctgggggaaacatgaaaaagagcctatttggctattaacatcccctcccgctttgttgtctctctcctccccagtcccctaccagcccctcacccaacccctcccttttccccttttgcaggagacaaaaccagactgacaagctgaagactcaaacattaatcaaactgcgctccggaacaacctttccctcgcatt

SEQ ID NO: 14733 - DNA, 111 bp, Homo sapiens
  chr17:53343657-53343768
  hyper
tggcttgagccctttcttggtaagtcccaaaccttcccaagacaaccttggccttagcagtagaggaggggtacgtgtgatgaggccccaaacccggctaagtgatgccac

SEQ ID NO: 14734 - DNA, 298 bp, Homo sapiens
  chr17:54911482-54911780
  binary
cggatcggcgtgcgtgcggctggagccttaagcgtttcccccgcccggcttcatccctgctggcggcccagcgtcgttctcctcctgcgcgaggcggccaaggcctgctggcccggagccgcgcctccacccgcgcgaggtagggcttcgaggaccggcgcggcgcaggtctccggaggcctcccgagaggggctagggtcgccgggccgcgcgtgggagcgggtggggcccgggaggagacggcgccccggaggggagtgcgaggcctgggccgacggttacgggcgccgaccggcg

SEQ ID NO: 14735 - DNA, 515 bp, Homo sapiens
  chr17:54911874-54912389
  binary
gcggcggcagcagcagccgccttgggctcctggacgcgctcccgaggtggggcgggttggggagtggggattggagcgtgatggctggacgtcgccttctcggcgcggcaggtcccgggagacggggggacgaggcgcagtcccgccctcgggagagcggagccaccttcactgagggcgcccggtttggccccggaaaggcaggaagggggcggggaagggatggcgagctcggggtgcaccgcctgtttcttttctggttaggtatcgtccttggagaagatggaagcggagaggcggccggcgccgggctcgccctccgagggcctgtttgcggacgggcacctgatcttgtggacgctgtgctcggtcctgctgccggtgttcatcaccttctggtgtagcctccagcggtcgcgccggcagctgcaccgcagggacatcttccgcaagagcaagcacgggtggcgcgacacggacctgttcagccagcccacctactgctgcgtgtgcgc

SEQ ID NO: 14736 - DNA, 80 bp, Homo sapiens; identical to SEQ ID NO: 8121
  chr17:58498618-58498698
  hyper

SEQ ID NO: 14737 - DNA, 39 bp, Homo sapiens
  chr17:59475144-59475183
  hyper
gctatggatggactaatgaaatggactaatgtctaaaac

SEQ ID NO: 14738 - DNA, 310 bp, Homo sapiens
  chr17:59489181-59489491
  hyper
cgaaggccgcagctcccgggcccgcctccccagctgaccgcgaactcctgcgtggggtgctcctggggcgggaggggcgcgctcagcctcgctctccccgggactctcacgctcaagcgccccggcttgaggccgggaccccctatttcccggttatgggacggccccttgagggacagcctctacgagccctggatttataccccgagcctgccttcctccgctctgggaaggacccaaaatccagtcccgcttcctccccctccttcgctgtccttggccccgaggtgcggagcaccggcggtcaggc

SEQ ID NO: 14739 - DNA, 41 bp, Homo sapiens
  chr17:60885408-60885449
  binary
cggagcggcgggggcgagggggccgttacctgtgggtctgc

SEQ ID NO: 14740 - DNA, 308 bp, Homo sapiens
  chr17:60885548-60885856
  binary
gctcctcttcctcctcctctttttgcttcttcactccctacacctgcccctcttcctcctccttccccgaggctgctttccgcggcgccggccggccttgcctggggcggaggcggtgggggcggctaccgggcgtcctccggtttccctagcaaccgcgcctccccgcccccgcgcgaccaggtgcagccgccgagagcacggggcggggcggggcggggctgtggccccggggtcccaagccagtcgtgggcgcccgccggttgccgtgggaacgaggcgggctgcagtcggggagtcagagccac

SEQ ID NO: 14741 - DNA, 367 bp, Homo sapiens
  chr17:64716166-64716533
  hypo
cgagccgtgcgtgctcatcccagtggccgaagaaagtaacaaacaagtagagaaatacaggattggtaatgagaagagagggagggagtatgcaccacagaaaccggtgcagggacaatgtcagaaggagtagggagcctcggggctaaagcatcctttgagcagagatagaagggagtcccgtgcctatctgggtcagaggaagtgcccaactgcaaaggccctcaggcggcagcgtgcttggcgtgtcccagcagatgaagtattgagccagagaacagcggacattttatttactctaactgtgctacccaggaggctgtcatgcccattaagtagcatcattttaacctgttgccccgttacc

SEQ ID NO: 14742 - DNA, 409 bp, Homo sapiens
  chr17:6939640-6940049
  hyper
cggcgtccagaacccggctcctgcagaggctctgggtggcagcagccctgttaccgcttagatggcgcgcaggacagagccccccgacgggggctggggatgggtggtggtgctctcagcgttcttccagtcggcgcttgtgtttggggtgctccgctcctttggggtcttcttcgtggagtttgtggcggcgtttgaggagcaggcagcgcgcgtctcctggatcgcctccataggaatcgcggtgcagcagtttgggagtgagtgcggcgcctggatctggcggactgcgaccctcggaagggagagggaatgcggcgactgggaagtggaagggcgaggggcgggagatgctgggggggagacccctgagatcttctcgcagcgccccttccacttcctcaggccc

SEQ ID NO: 14743 - DNA, 564 bp, Homo sapiens
  chr17:7165743-7166307
  hyper
cgaggctgcggtgcgcagcagaggtggctcggaggtgagccagcaggtgcgggcggacaggtggggcgcacctgagtatatgtagggcgtcgggggcgcggcccgcgcgccccgggagcgcgggagggggaggcgggaccggaggggcggccgaggatgacctgacgtcaccgaagggacactcacctgaaccggaagtcgtggcccccacccctccttgcccaggtgaggaggaagaaacctgagcaccagggtcacgccccttcgcttgcccggttttgaccgccgctggggaggaggcggtggctccccaggagtcccaagctccgagtcagcccctccggactggatttccctcgaacaccgggaagccccttcctttcttcccaacaggtgcgcctgggacgctgcggggcgcccctgacaagcctcggcgccgccctttccccgccgggttctgtccaaagtgctctctcctcggccctgctttcgcccccacccgctgctctccttttttttcctgtctcctaccctggtcgatcccaccttcgggggccctggctc

SEQ ID NO: 14744 - DNA, 355 bp, Homo sapiens
  chr17:7166376-7166731
  hyper
cggcttagcgtggctccccaacagccccaccttcctgtgcccccattccaacccaacatgacttacagcctgaaccctttgcactcaacctccccacctaccactgtcccctccggcatcaaggctcctaactggaggaagaaaccactgggacctaaagccggccgagggtggggagcagggtgagggctaggtcagagtcttggccacacccatcgttcccctcccttagagtcttttcagacctatcctccacctttcccacccctcccccacactcgcccgtttctctttccctcccgggcctgggcttggactgccaattgctgtgcactctgtcacgcctcactgttcc

SEQ ID NO: 14745 - DNA, 70 bp, Homo sapiens
  chr17:7198346-7198416
  hyper
cgctcgcctccaccctcgagaccgaccttgcccgtatgctgccaggtgcagacgccttccggccaccacc

SEQ ID NO: 14746 - DNA, 162 bp, Homo sapiens
  chr17:74571597-74571759
  hypo
cgccagagctgggaaaaggcaggggaggctttcttcgagccttcggagggagcgtggccctgccagcaccttgattctgggcttctgggctccagaactgtgacgattcaatttctgtggatcgaagccccccaggctgtgatcatttgttccagcagccac

SEQ ID NO: 14747 - DNA, 47 bp, Homo sapiens; identical to SEQ ID NO: 12422
  chr17:77126804-77126851
  hypo

SEQ ID NO: 14748 - DNA, 245 bp, Homo sapiens; identical to SEQ ID NO: 12423
  chr17:77126880-77127125
  hypo

SEQ ID NO: 14749 - DNA, 295 bp, Homo sapiens; identical to SEQ ID NO: 12424
  chr17:77127177-77127472
  hypo

SEQ ID NO: 14750 - DNA, 336 bp, Homo sapiens
  chr17:77773692-77774028
  hyper
tgcaaacgtcggggaatcctgcaaagcttgtggcaaaggtggaactcgattcagaaggaaggaagaggtatagaatgatctgagggcagggagcctggctcttgtcagtagcagacgcgctcagtcccgccaaggaaggcaatccccaacggggcagagtgtgtctcatccctgcctggcgcaacccctgccccccaacccgtgagagagcagcgttgcagggggtgtgaaaacaggtcaccgggcaacctcattcctcgacagtttggagacaaagcgggaggtggcggtctgagaaatgggagcccacctcccgggctctggctgggtgggcgc

SEQ ID NO: 14751 - DNA, 125 bp, Homo sapiens
  chr17:77778310-77778435
  binary
cgatcggtttccccgcccttctgtaggaaatcaaattcagggaacatggtaccgtatttacccgcacaacttcctcccttgacattttgcactctcgaagttggggcagaagtaattatgcaaac

SEQ ID NO: 14752 - DNA, 258 bp, Homo sapiens
  chr17:77814493-77814751
  hyper
cggcccgaggggcaggggcaggggcgcgcctggcctggggtgtgtctgggccccggctccgggctcttgaaggaccgcgagcaggaggcttgcgcaatcccttggctgagcgtccacggagaaagaaaaagagcaaaagcagagcgagagtggagcgagggatgggggcgggcaaagagccatccgggtctccaccaccgccctgacacgcgacccggctgtctgttggggaccgcacgggggctcgggcgagcaggg

SEQ ID NO: 14753 - DNA, 222 bp, Homo sapiens
  chr17:77814929-77815151
  hyper
ggggtgtaggggtgacggttgtcttctggtgacagcagaggtgttgggtttgcgactgatctctaacgagcttgaggcgcaaacctaggattccctgagtgttggggtgcggcgggggggcaagcaaggtgggacgacgcctgcctggtttccctgactagttgcggggggtgggggccggctctcaggggccaccagaagctgggtgggtgtacaggaaaa

SEQ ID NO: 14754 - DNA, 51 bp, Homo sapiens
  chr17:77815935-77815986
  hyper
agaccacccctgccagccggtgtggggaggagctcaggtccgcgggagagc

SEQ ID NO: 14755 - DNA, 187 bp, Homo sapiens
  chr17:77816033-77816220
  hyper
cgccctggaagctcccctgatgccccagagggcccttcctgggaaacctcccgggggggtgccccataccatcccacccggctgtcttggcccctcccagggagccgcaggagaaactagccctacacctgggattcccagagccttctgctggggctcctgcccccgacttcggataaccagctcc

SEQ ID NO: 14756 - DNA, 397 bp, Homo sapiens
  chr17:77817078-77817475
  hyper
cgggccgcgcggcactgcagccgggggttcctgcggactggcccgacagggtgcgcggacggggacgcgggccccgagcaccgcgacgccagggtcctttggcagggcccaagcacccctcggggccacaccgccgcccgcagggccgcgcctccgcattgcggcacgctggggtcgcaggcgccgaagcgggacgcgctgttttctacgacgtccgtccctcccaacgtcagggcagccacctcaggcccgcccggagaagcccacccggcccccggcccccactcagtcgcgaggccccgccggcctggagatctgcgcccccgggatccatatttcaaatatgatctttggaacggcttccaccgcccgccgccgccgccgccgcgctcacaac

SEQ ID NO: 14757 - DNA, 369 bp, Homo sapiens
  chr17:77923306-77923675
  hypo
cgagccccgcagctccgaggcccgagtgcttggtttaatgactgcacttatcccaccctatcactcacgttcctgggagacccatttttgaaagaaactatgggtcacgaaacatattatcaatgctgaattgcacctcaaattgccttttcaaatgacattttcctccgcggctcggcggggtgggccgggctggccccggcggttaccttttctgctggatctcagagtactcctttcgcttctgcagccgcagcgcctcccgctcctccgacgtggactcgtggctgtaatagcgcagcaggaagggccagacctccccgcggattgacacatcaataccgccaaagaaaatggcctggaggaagc

SEQ ID NO: 14758 - DNA, 221 bp, Homo sapiens; identical to SEQ ID NO: 8144
  chr17:80186335-80186556
  binary

SEQ ID NO: 14759 - DNA, 517 bp, Homo sapiens; identical to SEQ ID NO: 8145
  chr17:80186618-80187135
  binary

SEQ ID NO: 14760 - DNA, 33 bp, Homo sapiens
  chr17:9719665-9719698
  hypo
cgtgcacgcgtatgcgtgtgtctgtgtgtgtgc

SEQ ID NO: 14761 - DNA, 141 bp, Homo sapiens
  chr18:12375127-12375268
  hypo
cgaaaaaggacctaccacacggcagcgtggcgtgaccatggcgaagaaattgatttaagactggcaagggagcctcaaggagtaaaaatcatgaatgcaggcactattattccccctccccacccccgctctttttttttt

SEQ ID NO: 14762 - DNA, 61 bp, Homo sapiens
  chr18:12375294-12375355
  hypo
tggagtacagcaatgcaatcaaaactcactggagcctcaacctcccgcgccaagcaacccg

SEQ ID NO: 14763 - DNA, 155 bp, Homo sapiens
  chr18:19748134-19748289
  hyper
cgaaaatagaaacaaaacaaaaaaccagagcctaaacgctttctaggagaccgaccttcagaaaatcatttacttggatttacctgggcggggggtagggggtggggtcggggtaaagtataaaaattcattctcacaaaaacaacgcctcttgt

SEQ ID NO: 14764 - DNA, 71 bp, Homo sapiens
  chr18:19748376-19748447
  hyper
ggctcctgcagcggacgagcctgcggccgcgcgagttgccgctgacagatcggcgctgataaccccgcgac

SEQ ID NO: 14765 - DNA, 213 bp, Homo sapiens
  chr18:21269740-21269953
  hyper
tgcggggcgaccgctcgggatcccggggccgcggccgggctcagccttcacccgacttacttcaacctggccgaggcggcgaggatttgggccaccgccacctgcggggagaggggacccggcgaggggaggccccagcccgagctctactgcaagttggtcgggggccccaccgccccaggcagcggccacaccatccaggtgagggcctcg

SEQ ID NO: 14766 - DNA, 174 bp, Homo sapiens
  chr18:21270135-21270309
  hyper
ggcccgaggcgaggagggggagcacgcgaggtgacatgaggctgtggtcaggttcgggctggtggaggggaaagtgtgaggctgcgctctaagagatgcaggcgcctcggcccttcccgcctccgtcacccacggagcgtcccgccaggcttgagtcctcgagggttcaggggc

SEQ ID NO: 14767 - DNA, 122 bp, Homo sapiens; identical to SEQ ID NO: 12437
  chr18:24130266-24130388
  hyper

SEQ ID NO: 14768 - DNA, 169 bp, Homo sapiens
  chr18:24235701-24235870
  hyper
cgacagtgcaagtgttcgaaagcacaaaggcagactgtctacccgcgacagttcgcaagttgcggtggcggggcggctgtgcggagcgcgcgtgcaggtaagggattcctgcacccaggtctgctttcctcttcctggatgttttggggctcgacctcacttttaacgc

SEQ ID NO: 14769 - DNA, 310 bp, Homo sapiens
  chr18:3360395-3360705
  hypo
cgacccctgctgtggaagagccctgcgtccttcagcagcaaagtagggccacgcccctcgggcccggcctctggcctccgtcacgctcccttctcactgccgctccaggcctcccggacccaggtcaccttcgcttggattataagaaccaatgccccttttaggcttccggggcaggctgacttccattgctctttatccccggaaatgaccgcacatcagccttcccagctctaagctgggaaagaaaatccttaagtgatttccccagtagaggctcttagccgggactgccgatctacagctggcc

SEQ ID NO: 14770 - DNA, 235 bp, Homo sapiens
  chr18:55470607-55470842
  hyper
cgggctcggccttctcccctccctttttccctccctagggcggagaggggctggactgcaagccccggggcggcccgaggcggcccaggtccagctcctgccccacgccctccgtgcgtcctggagtcaggtgggcacccctttcagtcttccgagcccagcctacgagcccttgcctcgcccagcctgagacccagttgctgcggctgctcttagctccccgggggccgcactc

SEQ ID NO: 14771 - DNA, 246 bp, Homo sapiens
  chr18:55470954-55471200
  hyper
cccgggacctgagctccctcggtaaggggagctgtgtcctcttgatgccaagtcatgtttggggaccggtcaccgaatgcgcgtcaaagttcgccgcgtggagggtgaagaaagaggctgcgcctcaagacttccagaaacgtatcctgtgattgcagccagcaggctttctgccgagtccaaacgctatcgagtttttttgggtttggagtcaaaaggagttaaggtgcggcccgtgaaccacgc

SEQ ID NO: 14772 - DNA, 649 bp, Homo sapiens
  chr18:59560572-59561221
  hyper
cgtttgcccctgtccgccacctcatcaagtcaccgccacctcatcaagtcaccgtcacctcatcaagtcaccgtcactctgctttggcgatttctctactctctccagacccaggcagcgctccccaagccatgccccgaccccaggcgggattggggaccgccgcttcccgagcagcgccccacgagtccagctggctttgtcctgccgctgtccttccaggagcaagcgccccaggcgcgtgtgtctgcacaaaagacccccaacatctggcccttcacagcgctctctaatcccgggaggggccctggggcaacttctagggctggagaaggcgcgagacaaggggaccgggagaagatgagccggggtgtgtgcgggccgggggcgcaactggggcgggcgcgcgcgcacgtgcacacccaggggcgcgcgcggcgcgggcacgaggaaagctccctcggaccggagctccagggggcatccgaggactcggccgagcagccgacagcgccgctccccgccgcggccgcccgcccaactccgccagctctcaggagacacgcaactcccgggaccacctcccccgtgccccgccagaccccgcgctcccctccccgggaccctgcggccccgccaccccctccgc

SEQ ID NO: 14773 - DNA, 704 bp, Homo sapiens
  chr18:74728317-74729021
  hypo
cgacctcaatcctatgattgtcgcagagcaacatgaagctagcagcactgactccaggaaaaaacgagcataacccagtgttgaaccccagcgtgtgggctgcagaggcaacatcagtcatcaagtccgcaagcacacaccaccagagaccctgagaatgtggctctctttctgcaacgcccatgtccaggcacccttagagatccagaattcagcatgtccttacattcctgagccacaccccggccaccatcccttgtgaggaaaagagggggtgagttaaacgaaaacgtcctaagcagccactcaggcccacactcttgggctcatatgcattctccagcacggaacgagaccttagacagcaagaggctacgtgccagttcttcctctaatggctgagttcacctactgatttctcctttgctttttccatttaaactaaaactcctctactcctcagagctcaccttgccagagccccgcttgggcgcacccctgtcaccgccaaagaagcgcccgatggagtcaaggatgcccgtgtctctgtgccttgggaggaagccatgcctggcatggtccatggtacttgctgtggccaggtacttggatccgtgcctctgggagggtctcttctgtgacgccatcacatccaggctctcggaggtggctgcactgtcttcttggatggtctggagctcgtc

SEQ ID NO: 14774 - DNA, 284 bp, Homo sapiens
  chr18:77126115-77126399
  hypo
cggacacctgggaggtgcagaactgtagggaagagacccgtccgtggtcgctaaaggtttgagtgtagagggtgaccggagaggcatcccgagggggtgtgggtgtggaagctgctctgtctggcgcggtggtggcggacacctgaccgtgcctctctcagagcccgctggacggcaccagcatggagctaagggaggaggaatgcagacagcggcccatgaaccgcagaaccacactgtgggctgggaagaaaggagctcttttcagtggccttgggaaaggc

SEQ ID NO: 14775 - DNA, 304 bp, Homo sapiens
  chr18:77156459-77156763
  hyper
cgaggtcggccgggtctgtgcgcccagggaggggcgcggcgcggaccgggaacggcgtcccccagctcccagcagcccggttccgagcgcgccttctgccaataggtgtctcctctgccccagcgctgagggcgcgaggcgaggccgccgcgggtcccgccgaggaagcggctcgcaggccggcgatttggggacgggcgaggctgggccgtcaggaccacagagggcacgtgggagggaggaagggaggcttccttgggagtgaaggatgccccgtgtcttcctgagcgaggcagagccaccc

SEQ ID NO: 14776 - DNA, 51 bp, Homo sapiens
  chr18:77156828-77156879
  hyper
gtctccctcgcgccgcgcccctgaattccccagggccgagcccgtcacgcc

SEQ ID NO: 14777 - DNA, 47 bp, Homo sapiens
  chr18:77313826-77313873
  hypo
cgggacttcagcagcacgcggagcctgaggctaaatgctgcaaaaca

SEQ ID NO: 14778 - DNA, 78 bp, Homo sapiens
  chr18:77314021-77314099
  hypo
tgacgttttggcgatgttggtgctggaacttcaaacctcggtgtggaaggaagggacgccgaggcccctggcctgccc

SEQ ID NO: 14779 - DNA, 411 bp, Homo sapiens
  chr18:77497998-77498409
  hypo
cggcctcccccgcaggtccccgcctccccccgcccgccctgctcaccgcccccgggagttgccttccccactctctggggtgttctctgtctctgcattttggtggagtacatctcccagaagcttcctgagaaagcgtctgtcctgtccatacgtccgcagtcagcgggctgcgtaaccccaggtggcagcatctccttgaggatttagaagcacggctcccgtcttcagctccggggctgctccgaggccgtccgaggtaacctcggaggctttgtcttgcccgcctgttagacaggatgtggccctccaggtcctgccgacatcctcagtacagacttgtgtcccgaggatttgccctgagaacttggtctccagagccttcttgcatctgctgcggggccgtgggcc

SEQ ID NO: 14780 - DNA, 177 bp, Homo sapiens
  chr19:11199850-11200027
  binary
cgagaaatttcaggaggatctttcagaagatgcgtttccaattttgagggggcgtcagctcttcaccggagacccaaatacaacaaatcaagtcgcctgccctggcgacactttcgaaggactggagtgggaatcagagcttcacgggttaaaaagccgatgtcacatcggccgttc

SEQ ID NO: 14781 - DNA, 109 bp, Homo sapiens
  chr19:12912808-12912917
  hyper
cgcgtgggtaatgcgcccgccgcagactccgcgcacgactccgcctgggagcgcgttgggggccgttggagtccagcatggcgcggaccccgggggcgctgctgctggc

SEQ ID NO: 14782 - DNA, 118 bp, Homo sapiens
  chr19:16756119-16756237
  hypo
cgcctcattgagacctccgcgccagtctgaataaggcaggaaggtttcttcacaccattcatctggcctgtgagggacccagccaagatcttggcgtgcctgttctgacagcgacacc

SEQ ID NO: 14783 - DNA, 661 bp, Homo sapiens
  chr19:16772102-16772763
  hyper
cgacctcagttacttcatcgtctccatcctctacctcaagtatgagccaggtgagccggggcggggggctggaggggaccggcagcgggtggcgcgggccggggcagctcgggggtcgcagagaggggaagcccgtgcgtggtggagggagcgagggacaggttcaaggattgcatcgtgggagtaggcaggcgctagaatcgtggggttctctcacgccggggtgagcccgggggagaagcccccaggacgatgaagctgggggaggggaaggagaggcgtgcgcgggtttagaggagggggaacaggtgcttggggtcggggctcctggttgggtcagagctgcaggaacttgggcaaggggcgccggctgtggcgagggtgcaggtgggggtcggtgcatctgttctggccgcgcgcaggtgtgacctccctccttgaccttggcacgcggattgagagcgccagcggagtgtctataagggccactgcgctgggggctgcggtcaggttcagcgaaagtgacaccggttctcctccccactgcaactgcccagcaccctccactcccctcccttcccccacggtgctgaatctccgagcccccacgggaattcttccagccctggctccagatcctttccacttacggagcagaacc

SEQ ID NO: 14784 - DNA, 133 bp, Homo sapiens; identical to SEQ ID NO: 8212
  chr19:17958343-17958476
  hyper

SEQ ID NO: 14785 - DNA, 51 bp, Homo sapiens; identical to SEQ ID NO: 12492
  chr19:19738572-19738623
  binary

SEQ ID NO: 14786 - DNA, 505 bp, Homo sapiens; identical to SEQ ID NO: 12493
  chr19:19738668-19739173
  binary

SEQ ID NO: 14787 - DNA, 122 bp, Homo sapiens
  chr19:35581628-35581750
  hyper
cgctgtcccaaccacttaatttattttaacttgcttaaccctcaaagtcagtttgaggtcagtactcttttcggagagatgggtacggagtcctggagaggttaagcaccacgacagagccg

SEQ ID NO: 14788 - DNA, 149 bp, Homo sapiens
  chr19:35581779-35581928
  hyper
gcaaatgtggcctgcagatcatgtttccttacccgcgctttttctcctccctgcatagccgccacgtgtcctaagcacagcagctaccagcaacgcttggacccgcgccgggtgcagctctgcgtccccgcggccgccctgcctgctcc

SEQ ID NO: 14789 - DNA, 219 bp, Homo sapiens
  chr19:3565322-3565541
  hypo
cgtgactcagtctttgccaggaccctcctggcctcaggtcctgttcagtatctggtctaccattgccagaaggagcgcattctgtgagtcttgtgatttacgttttaacgttgatgctggtcagtccttgcgctgagagcaaaacggggaggagctgtaacgaagcgcggtgacctcctggcacggcagggcctggaactcggagctttttgttgttgt

SEQ ID NO: 14790 - DNA, 390 bp, Homo sapiens; identical to SEQ ID NO: 12511
  chr19:38754883-38755273
  binary

SEQ ID NO: 14791 - DNA, 175 bp, Homo sapiens; identical to SEQ ID NO: 12512
  chr19:38755344-38755519
  binary

SEQ ID NO: 14792 - DNA, 669 bp, Homo sapiens
  chr19:39574122-39574791
  binary
cgactggaaatccgggcccccccagttcttccctgcttctctttttgtggcagccgctcctcacgttcaaacagattgcaaaggtttacaggggagaaccctaacttgttccctagacgtcagtttctggagttcctgcattaatacgattaaaaagaacagctgattcttatccagcccttactctgggccgggccctgttatcggcatgaaatttcatgcagcaactcgtttactcctcacaacagcccacggggtatatacgagcatcacctcctttttacaggtgaaaaaacccaaggtccagcgaggttgaataactcacctaggtcgcacagctcagaaagcccactgcaattccgggattctggttttgttttgaggttgccccgggcttctgaggaggggtcagtgggctcagcatggaaaggaaggaagccggaaggctggaggaagatgcagcgaggctggaaaggttggggatcccccggtcctgcacacctgggtacctggggatcgggcagggccaggataggggccggtgtccgtgccctggggctccccagctgatgagtgggcgcctgagggacgagcgcagggttacctgcctgggctctcacctggtggccggctcagaggtggcgcgccggagacgtatcataaccttcc

SEQ ID NO: 14793 - DNA, 45 bp, Homo sapiens
  chr19:39575044-39575089
  binary
gccggggtccgggagggcgtcccctttcccggatggtcccgaccc

SEQ ID NO: 14794 - DNA, 187 bp, Homo sapiens
  chr19:39989541-39989728
  hyper
cggggccattctctcagatataaggcttggaagccagcagctgcgactcccgagacccccccaccagaaggccatggtctccccacggatgtccgggctcctctcccagactgtgatcctagcgctcattttcctcccccaggtcagagccaggtgggaggtggcgtggaaagggatgaatgcggag

SEQ ID NO: 14795 - DNA, 53 bp, Homo sapiens; identical to SEQ ID NO: 10436
  chr19:407832-407885
  hypo

SEQ ID NO: 14796 - DNA, 109 bp, Homo sapiens
  chr19:44302742-44302851
  hyper
cgggtcgggtgctggcaagagagcgtagatgcacactcaggcagtggtaccctggcacagtcgtgcgggctgcgcactgcgccagagcccgcgcctagcacgtctcggg

SEQ ID NO: 14797 - DNA, 33 bp, Homo sapiens
  chr19:44303168-44303201
  hyper
gcttcccgaaacccttctccctccagtctcagc

SEQ ID NO: 14798 - DNA, 555 bp, Homo sapiens
  chr19:45579321-45579876
  hyper
cggggtgctcaccgggatagttcggggtcaacggcgtccacagggtccacgggttccgcgggccgagggcgaggagggcggccccggcgggcatggggccaggggagtggtggggttcgccgccgaaccgccccgccgaggacacctccttcggggagaagggccccagccttggggcctgttggggctgcgcgtctggctcgggcttgagttcgatgacgaggtcctgcatttccatctcgtcgtctgggttggcggcgggcgcgggctctactcggcggggcgcgctgccggccttgcggcgggacatgagtcgcgggccgggcgagcgagcgggcgggcaggcaggcaggcgggcgggcggaggacgcacgagcggaggacgcgcggaccgtgcgcgctcaggtgagtgactgcggcgacccgccgcgaactcttacacgtgctggccgggcccgtggctccgcctaccagggcggggctcatgggaggggaccgagccgccctgctggggccctgacggcggcctaactcaatctaggcagtgtcccgtgc

SEQ ID NO: 14799 - DNA, 201 bp, Homo sapiens; identical to SEQ ID NO: 7116
  chr19:45656461-45656662
  hyper

SEQ ID NO: 14800 - DNA, 62 bp, Homo sapiens
  chr19:45907705-45907767
  hyper
cgcccccatccccgagccgaaaagtcgggggagagccgggacacagcctccggagggacccc

SEQ ID NO: 14801 - DNA, 173 bp, Homo sapiens; identical to SEQ ID NO: 8255
  chr19:46180187-46180360
  hyper

SEQ ID NO: 14802 - DNA, 79 bp, Homo sapiens; identical to SEQ ID NO: 8256
  chr19:46180559-46180638
  hyper

SEQ ID NO: 14803 - DNA, 363 bp, Homo sapiens
  chr19:47501985-47502348
  hypo
cgttgggggaaaagggggtgcgtagttcctttggtgaagtgcataagaattcccccactgtttccatcagcccctccaacggggatgtgtggacggtccctgtgtctctaggaaaaggacagagccttggtctcatgaccgactgactccctccctcgaaggcctgttggcgtgggtgggtggcagcggccgcccgtctccatctggtcaggaagcaagcaggctttctgcgtagggatgcctgtctccaggggcaaccggatgagcaaagaatggtgttctttatggcggagtgtctccagattgttctgtcttgggtggtgggggccaggaagccccaggcacacagtgccgcccttcagc

SEQ ID NO: 14804 - DNA, 480 bp, Homo sapiens
  chr19:49199703-49200183
  hyper
cgcgcacagctggtggtgacccgactttcctgcctccaccctggggctcctcagaggcttcatggaacccaaactgctggtctcacctccgagccctgccgtcgcccagggagggcggctccgtccctcctgcactccctaatcccgctctgaatcaccgcttctgttctgggtcggagaataaaggtggggtttccaagtgatggccctacgttattgtctgaagctcccttctcctccccagggtggaagtgataatgccgggaatccgggaatcccggggaggtgcaggaagacagcgagctcgaggcagtggggtgcgactgagccggatgtgctgagctgcccggggcacggggcggttggggtagagaaaggctttcagagctgggggacaggacggggccccgggtgagcggagagctgggttatttcacgggaacagctggtgacaaagccggaggggtgtgcggggccggc

SEQ ID NO: 14805 - DNA, 142 bp, Homo sapiens; identical to SEQ ID NO: 10447
  chr19:49242393-49242535
  binary

SEQ ID NO: 14806 - DNA, 36 bp, Homo sapiens; identical to SEQ ID NO: 10448
  chr19:49242773-49242809
  binary

SEQ ID NO: 14807 - DNA, 619 bp, Homo sapiens
  chr19:49255778-49256397
  hyper
cgcttttcgtggccggagcgcaccctccgcaaaggcaggccacatccggccgcccctggaacgccaggcgtccggctatccggcccggcagccctcccctccgcgcagcctgtccggactggcagcgagggcttggggaggagaggaaggagagggcgcggccgggagtctcgcagcgtccgccctcccgggccgggcggatggctggaaggtggagccccgcccgtcacttggcgccgagccccagcgccaggggctaaggcgatggcccctgggcccaccgctccccagatcggggatgcaggggaccgcgccctgcccctccgccccgtcattgacctgcgcgaaggcttcacccagggcaggctacctggcttctgagcagccgcagcatcattgcgtggaccaggagacggagcgcccagttgcaatgctggagccgggaggtccaatccgccgccctctctcttccggtgccagggcttagagtcggcccccgacacctgggtgcttcgagcctggccacgccccagcggctgggcagggcccccgcacctggtcccggcgagtggagcgatcgtccgccctctgccgcgtcctcctgggggatggagaacct

SEQ ID NO: 14808 - DNA, 378 bp, Homo sapiens
  chr19:50708476-50708854
  hyper
cggggtttgaatcccgggaatcctcagccttctccgcggcgggccctcgacctttgccctccataagggggaggagcccctggcgccgccgccgccgccgcccacctggcaacaggctcaacccccgccttcccccggcccccgtcagaggccctgaagctccaggcccgccccgttcccagccgggcaggtgctgggtgacatcagagccgggctcccgccctgtgacgcgacggggccccgccctgcgctggaccgcggaggtcgctgcacctgaagagaacggggattcccgcgccctcaccccatctccccgctccggtcggcgcccccaggtagccccgaggatctgcgagttgagggggcggcgacacaggc

SEQ ID NO: 14809 - DNA, 193 bp, Homo sapiens
  chr19:56981677-56981870
  hypo
cgtgctcaggtgtgtgtgctgaatgtgctccatgcctgggcagcagcgtcacctcctcagttaatgacgatgagaatgaaagctgtgctggctcctttctatgcatcacaccatctcctttaaccttgaatggcaaatcaaccacccagggtcctcatcttccatcgcggggatgagagagggacgatgaccc

SEQ ID NO: 14810 - DNA, 162 bp, Homo sapiens
  chr19:59003731-59003893
  hypo
cgtcaccatctgagccatcgctacagcatctgcctgtatttctcacatgcttacatgaaaggcattatttattcacttggacaacaaaggctgcttttcgtgagagtcactggtcctcccatgagggcatccaccgatacttcaagaatccttcctggggcc

SEQ ID NO: 14811 - DNA, 538 bp, Homo sapiens; identical to SEQ ID NO: 8289
  chr19:59049765-59050303
  hyper

SEQ ID NO: 14812 - DNA, 150 bp, Homo sapiens
  chr19:6768009-6768159
  hyper
cggcagctgtgacgtaaggaggggtacgcttcctccagaccgccctcccggattttccggaaagaagccccatttaggtggcgggttttgtggagagacgtccgggaaaacgcgacagcttccttcagtgacagcacgctggagcggggc

SEQ ID NO: 14813 - DNA, 510 bp, Homo sapiens
  chr2:10512203-10512713
  hypo
cgttgcttacacgttgggtgcacagtgaatatgtatcagtccagcgcttttcaccatctggtctggttttagtgttgctttatttctggtcattcctcaatcggggctaaagatcagaaaaatcgcatctccaggtcctgagccatggcgaggaagctgggtggtgccctgtgctgtgtggctaaggtgggggacgagggttgtcggtgggggaagccccatgggggccccactggagtcataggagcgaatggagcacccactccatgccttctgtcaattacaaagcacctattatgtcccggatactgtgtccaacacagtggacacattgatgggtaaggcataatccccccccaggagctcccagttggattgaggaggcagacaggcgagcgtatggctgtgacacacccagcaactcccagttggatcggggaggcggacaggcgagcgtatggctgtgacacaggggggcaagtggcgtcaccaaggcagaacccagcagcc

SEQ ID NO: 14814 - DNA, 297 bp, Homo sapiens; identical to SEQ ID NO: 8300
  chr2:10588876-10589173
  binary

SEQ ID NO: 14815 - DNA, 197 bp, Homo sapiens; identical to SEQ ID NO: 8301
  chr2:10589298-10589495
  hyper

SEQ ID NO: 14816 - DNA, 265 bp, Homo sapiens; identical to SEQ ID NO: 7169
  chr2:111874622-111874887
  hyper

SEQ ID NO: 14817 - DNA, 205 bp, Homo sapiens; identical to SEQ ID NO: 6082
  chr2:111874987-111875192
  hyper

SEQ ID NO: 14818 - DNA, 71 bp, Homo sapiens
  chr2:112656507-112656578
  binary
cggtgccagaggagggggcgtaggcgaacctaccgtccactgaccgcggcgcctcaagcgtcccgagggca

SEQ ID NO: 14819 - DNA, 33 bp, Homo sapiens
  chr2:112657092-112657125
  binary
ggcttttttttttttaatttgagaccgagtctc

SEQ ID NO: 14820 - DNA, 147 bp, Homo sapiens
  chr2:134325872-134326019
  hyper
cgcggttggttatcctctgtttatttttgaagcattcaaaggccacgctaacagaacagactcggttttcctgaacatccacagcggctgggaagtcctgccgtgaatgcggagcaagtttgcggagacttgctccctgggctgcgg

SEQ ID NO: 14821 - DNA, 230 bp, Homo sapiens; identical to SEQ ID NO: 12567
  chr2:1488408-1488638
  hypo

SEQ ID NO: 14822 - DNA, 544 bp, Homo sapiens; identical to SEQ ID NO: 9480
  chr2:149634146-149634690
  hyper

SEQ ID NO: 14823 - DNA, 148 bp, Homo sapiens
  chr2:152954365-152954513
  hyper
cggagcttgacgatctctcccaagatccagacagataagagtattcaaattaggacaaaacagaagaaaccactaaatctcaactcgaatcaaaccaggtccccggccccgaggggtctggttactctaggtcgagttatacgaatta

SEQ ID NO: 14824 - DNA, 594 bp, Homo sapiens
  chr2:153192142-153192736
  binary
cgcagcagaccgatttcagggcgcacaacgtgcctttgaagctgccgatgccagagccaggtgaactggaggagcgatttgccatcgtgctggtaagtgcgcggcggcggtcgggcgcggggacccggggccccgggccgggcggcgcagctgacccccgcccctccccttcaccccgtgccgggagcgagcctccattcccgagggggaggctcccgctttcccctttgtggccccccagcactcctcttcacccccctggcagtcccccgcgctcagtctctcggggtcccgggatggggatgggggctcagggccggctgcccaaccagcctcgaacccattgtctggctggagaggcacctcacggcgcgtgtgcccgggaggtgcggcgtgggcgtgaagagaaggtggcgcgggctgggaggaggaggtggcgagccgcttaggctttttttttaaaaaaaacaaaacaaaacaaaacaaaacaaaacaccctgagcccctgcggaccatccctcgggcggccagcccgggacctgcgaagtccccggcagatggggcgcatgtggccggccgcgggcgccgcgccgg

SEQ ID NO: 14825 - DNA, 80 bp, Homo sapiens
  chr2:153192765-153192845
  hyper
cacgtcgcggcttggccaaggggagcttccccgaaagggaaagcggagacccacagcagtgcggcgccccggcccttggc

SEQ ID NO: 14826 - DNA, 98 bp, Homo sapiens
  chr2:162094194-162094292
  hyper
cgggagggcccccccggtgcagctttccccggaggctgaggctgctgccagcggggacatctgctttcttacactccagcctggctcaccccgccccc

SEQ ID NO: 14827 - DNA, 259 bp, Homo sapiens
  chr2:162094357-162094616
  hyper
ggggtggatagaagcttagaagattttcttcccactccccccacgtcccctcctttcgtcacatcttttaaccttcaaggtaaagacttaaggaaacaataagcgtgtccgctggctcgcaggcccgccggggttctcgggcgcggggccttgcccctctccatcctccctgagtccttccccgagtcgggccgtgcttcggcggttcggctgggcgcaggggccggccgggcgcgcccagcctgtggcgcctcctctc

SEQ ID NO: 14828 - DNA, 626 bp, Homo sapiens
  chr2:162271677-162272303
  binary
cgtacacacacacacacgttttcagtagcgattactgtgttgacaccacttccactctgtctccccagatcagcgcttctgacgagcccatttgcacggggactcggccctctcttttcctggcgaggcttttgaacctgtcgccaagccagtacctcagagagaaggaaatgcagagggacgagaaggatgcatggcgcctgcccccagttagatgttcttcagataatctgcaaccaagtgcgctgataaaatatttaataaagagccggtaaacatcactgcaaatacattaaggcatttcagcccgacagcttatgattatttcaaaacttaaaaaggagatcatagattgtcactgtttctgtactcaaccaagaaaccgaaccttcctgaggtgggtggattggtgggtgagttgctgcttttcgccccctctcctccccccttctgcttgtcgctgtggctctcagcagcagggatttatttatttatgtttgcagtttaaaaggtgggggtgggggcgccgaggacatgtaggatctgctcacaaagcaccagctcaggtgttgtgtgcttttgtattagctggaaaagacagactctggaacttttacagggcgaga

SEQ ID NO: 14829 - DNA, 91 bp, Homo sapiens
  chr2:162272334-162272425
  hyper
gcacttgaaatcgttacattcaactgaatatttggctcattcagatccgaaaagtctcctagcatcgtcgaattccctcctccgcccctcc

SEQ ID NO: 14830 - DNA, 95 bp, Homo sapiens; identical to SEQ ID NO: 9484
  chr2:162930102-162930197
  hyper

SEQ ID NO: 14831 - DNA, 263 bp, Homo sapiens; identical to SEQ ID NO: 9485
  chr2:162930659-162930922
  binary

SEQ ID NO: 14832 - DNA, 138 bp, Homo sapiens
  chr2:166649931-166650069
  hyper
cgaaacagagagagaggggtgtccgcgtcccggccacagagccctttccaaaccactcggaaaccatttaaatggctcggcggccgcggtttgcagcctagaactgtttggggtccccggctaggaaagttgcctggc

SEQ ID NO: 14833 - DNA, 38 bp, Homo sapiens
  chr2:166650106-166650144
  binary
ggcagagaggctggaggagacaggcaacctgctagccg

SEQ ID NO: 14834 - DNA, 723 bp, Homo sapiens
  chr2:166650508-166651231
  binary
cctgccgccggcttacctggcgggtgggcagggcagggtggcgggaagcggcggccgggcaggcgctggacgtgggctaggcgccaggtgcaggtggcggcggctgcgactccggttgctgtcgccacagttgcggctcagtagagctcctcctccgccgccgcctcctgccttcccgctgggcctcccgcgttgcctggagaggcagaaccgaggctcggcttccacttggagtctcccaggtgagctccagcctgcgacgtcggcaggggcgaggccccacttccgcgcctgcgcgccagcctcccgccccgccccagccctacctgagcgctccaggtgagaaccttggatcgcgcgcgcagggtgggggcgccgtccgggccaagcctggctgtcgcgcggcttctctctgagtggtcggcgaggctgctgctccgcgcaagttgtggctcccggcccatctacattggaggaatcctgcactgacctggtggcagtgatcaccttgtagccagaacacagtctgctgggtccttggggaaccagaagttctagatttcccccacacggttcctcccttcctcctcggttcgccaaaatgaaggggtgcgctgcctccgaggaccacttcgggagggcagcaactgctggctcatgtggtttcttcgggcagggttcagcagcttctgtcaccagttaggtttcgtgagcttccttccc

SEQ ID NO: 14835 - DNA, 128 bp, Homo sapiens; identical to SEQ ID NO: 13792
  chr2:172947590-172947718
  hyper

SEQ ID NO: 14836 - DNA, 170 bp, Homo sapiens
  chr2:172951779-172951949
  hyper
cgagctgcctgccgtccggccctctgtccctggacaatctgattagggcgcaggaaggatttccccagacgatttgtttgggaactcagaggtcacacgtgcctaaacaactggaacaatagactccgggcttaatccctcctttgcctttaaattgtgtgactaatcac

SEQ ID NO: 14837 - DNA, 86 bp, Homo sapiens; identical to SEQ ID NO: 6097
  chr2:173099596-173099682
  hyper

SEQ ID NO: 14838 - DNA, 165 bp, Homo sapiens
  chr2:173600371-173600536
  hyper
cggccaccggggtcgccacccccagtgtcccccagcagcgggaccgcggggtccccaccccggggcggaatccccacccacgggcgccgcagtgcagcggcgggcgggcgggcgactcggccctccccgcacccgcgtcccgccccccgggtcccctccctctcc

SEQ ID NO: 14839 - DNA, 42 bp, Homo sapiens; identical to SEQ ID NO: 7183
  chr2:175190730-175190772
  hyper

SEQ ID NO: 14840 - DNA, 67 bp, Homo sapiens
  chr2:183732106-183732173
  hyper
gaacccgtctttggccccagaaacgagcccctagcccctcactgaagagcccaccccaattccctac

SEQ ID NO: 14841 - DNA, 579 bp, Homo sapiens
  chr2:190445496-190446075
  hyper
cgccgccgccgccgccgccgtgggccgggcccagctcttataccgagtcgggggcggagctccctgcgacctccgactggggccgccccgtccccttcagggccgcccgggcgtccccgcggcgcgagacgagctcccgtcaaccttgcgcgccgggccgtccccgcgcccttgcccggaggagtcgcccaccccgggcgcaagcgtccaaccggccgcagacaccctgcgcggcttgcggggaccttcgcctcgacgcgttccactccccgggttttcctgctctccgggaagccgcgagggcaacctcggggggcggccgtggggctgggaaaaggaggaaggcgcgtggagccggcggggcggcgtagggagattctgcgcgaaactaagcgtcaggtgctggaagaaagcgctgcgcaccggctaccccgcagttcagggaaagggcggccgccggacggtcgcagtgcaaagctccagcgcgagcttggtgggtggggattccttttttaacgaaaataatttttaatacaggtatctaaataaatataattcatgccacagaggccgctttcc

SEQ ID NO: 14842 - DNA, 279 bp, Homo sapiens
  chr2:190446109-190446388
  hyper
atgcctttccttccccggactgcatagcagggcttccctcaaagaaccagaatcaaagggcaggaagggggcgcaaagatcagagtccatccctcttgagaggagcaaacggaggcttgcaaaggtgaagtcccgcagcgagttacagacctacccgtatccccaaactggggcctccaaatccgtcctggagacagaatgaggatgctgcagccccagcaaacccttcaccatcattccttctccctctgtaccctctcaccccgcccccacgcgcgc

SEQ ID NO: 14843 - DNA, 288 bp, Homo sapiens
  chr2:192015084-192015372
  hyper
cgttgcttctgaaaactcagtgcctgtctgtcctttttgcgtgcatttcctagaagatcccactaaaggggcattttgtcccaccgtctgtgagctggtggtgccgctttggctctgtggcctgtagcttgcaaaaggagatgacctgccctaaaatgtcactcgcgcccatcaaagccacagtcaccggctgccgtagctgcaagcttttttctgaaatccaggtacgctaatctaaagtcagacatcacagctctagagaagctggctaagaaagtgaagaggggc

SEQ ID NO: 14844 - DNA, 492 bp, Homo sapiens
  chr2:192015426-192015918
  hyper
ccccgcagggagattcgcccgggcaccgtggcgcgggcctgcggagcggtttccgcggagaacccgtgccagggcgcatctgtgggtcgtggagtcgggcgcttccttctataataagcctcctcaggaaggttaaaatgaagcaattgtcaaaacgccaagggaaagcaaagcttcagagtatcctgcataataagcatgtcctccttacaagaggcagccagaaggtgtggtctggccacttacctagcgctctctcagcacaggtcccaggcagtgctcaagtccaaagtcagaagcgcccctcacagtccctaggagaaagccgctgacgccatcatcagtaggggatttgcatttctcctcccacttgaggctttcctgtgcgtcagtgttcgagtctctgggactttacttgggtcagttcccacccactctattctagaaatgctaacacgcagaaactgccaggctggagccccttcaccgggc

SEQ ID NO: 14845 - DNA, 897 bp, Homo sapiens
  chr2:200320451-200321348
  binary
cgacgggggcattatttggcaacctggaattcacttcctgtaatcctacaccgcgacagcgcctaatcaacctgaaccctgacacccgggccattatcactgggccgcgggctgcgcgcctccctgctccgggctgttacctcccacggccttggccacggcgccgttgggcctcccgcgggctcccatggggctgccgttctgctccagccgggccaccttcactgggggaggccccttgacgtccgggctgccgctccgccggtcggggctgtcccgcagacacgggctctcgctccgccgctccatgctgctccgactcggagacaaagttcccaccggcaggtcgcaataaaacgcacagggacctagggagggggtggggggaggaagggggagggagaaaaaagagggaaaaccgctcatacacgtgatagacgttcaggccagtggcagagcgctgcaccacagccacacaaacttcctcccacgctgcccgaggggcccgagccgggaagccggtcccaaccttacactgggcggcccccaggaagcccagcgcctcggttcggcgactctgcccagtcgcagctccccagaagtcagccctcggggtcgcggccggggttggcacccaggggcgcctagaagtggtccattcattgggacggggttggcataaaccgttcctgggtgctacagcctagcccgtcccggggtcagggttgcggaataagtgaacttcagaaaaagacgttccacccacatgggaagggagttgggggtgtgcgcaagtccataaccgaattaaccacccggtaaatgcgctgtgaatggccaggcaggagccaaaggccgggcgaaagaaccccttgaatacccgctttttacctatac

SEQ ID NO: 14846 - DNA, 43 bp, Homo sapiens
  chr2:202897429-202897472
  hyper
cgagaacaaaagaacgtttgccaatcagaaaacgctacccgag

SEQ ID NO: 14847 - DNA, 580 bp, Homo sapiens
  chr2:202897603-202898183
  hyper
gaaagggcacacgccgcagaaccaaggcacacggggccactgagacgcccggcgcgtcgtacagagtgttcctgggcgctcggtctcaggttacttctagaaccagtctccccaacgccgtcttcgtttccttaaaacctcgctagagtcaccccagttccccagactccaggccgtgcgcgcgggcggggtggcctgagcccgggttccccgctctccctgcttcgggcccttcctccgaggggtccttcctcccgccgtcactcggccccctccgcccgactcgggtttctcctcggaggcggcccctcctcctttttataactcgggggaggggagaggggactgtggcctcgcgtggactctttgggtccggggggaaagaggcgatccgcaaggcgcacccccttctcgtcccgtcccaaaccccacattgaggacccggcgacccgaaagccccgccagagccagcctttgcagtcctaacgcgactcctggtcacgtctctccccgaaggggcgctgcgcggtcctcgctcccctcaaacgccgctggcgaaggcgcccctgctcaggaatgc

SEQ ID NO: 14848 - DNA, 58 bp, Homo sapiens
  chr2:207307406-207307464
  binary
cgtggttgacaaacaacggatttcccaagatagctgccacacacttggtttctaatct

SEQ ID NO: 14849 - DNA, 161 bp, Homo sapiens
  chr2:217556802-217556963
  hyper
cgcccagtggttgtccggctaaaacgccctttccaggagcgcccactcccatcccatctgttcgggaagaagatgtcggcaccagcagcggtggagcgccgccaacccgcaacagcagccggccgggcacctgccttcggcggggtggagtcggagaggag

SEQ ID NO: 14850 - DNA, 240 bp, Homo sapiens
  chr2:217557011-217557251
  hyper
gcactcagaaggtgggggttgagcaaggggcggcagggaattctacaggggatcttgcttgggactgaagtgtcgtgtgtgtgtgtgtgtgtgtgtgtgtgtgtgtgtgtgtgtgatgcgccctccgtgctcgcctagcaattgcgcgcgcgtgcgctctgcgtgtacacccttcacactagccacatcacactacacgcttggtaaataataagtggagccaggatgcggctgagtgac

SEQ ID NO: 14851 - DNA, 454 bp, Homo sapiens
  chr2:217557321-217557775
  hyper
tgttttccttctccgctaggcttttccaaatccacatcccccaagatgaaggcgggcaggaccgcctttgaaaagtggatcttaataaaaataatctcacaagccggtctctggggttcccagagcctgcacatcctccccttttcctctttttgcaggctgcaacctgcaaaaagatcgactttttgcaggtttggagatcgactacctcttgcaaagctagaggggctggcccctgcgccactcaaaccctgcagggtttgcggggactgaggctgaacacaggaagctctccggcctcctggcaagcgcggacgcactcctctcctgcactatagtgactgaaatttgcacttcagaaaactcatgttagggtgctcgtgagtaacggaaagggacagggagggagaaggggattgcccccgtaactaaactgtctccgtaactaaactac

SEQ ID NO: 14852 - DNA, 86 bp, Homo sapiens
  chr2:217558012-217558098
  hyper
cggcgcaacccgggggcggggcaagcggaggcgaggctcccagtgcgtggcttttctgtctccgccccctgaattttgcattctgc

SEQ ID NO: 14853 - DNA, 33 bp, Homo sapiens
  chr2:217558872-217558905
  hyper
cgaataagagctcagaatcagtattcggacaga

SEQ ID NO: 14854 - DNA, 411 bp, Homo sapiens
  chr2:217559556-217559967
  binary
aaaggggccaagagggcccccggagatttttttgtttttgtttttgttttaaaatttctggcaggtagagcaggtgccctcccccagacacttgcaaaaatgtagagagaggtggagggctggggtgcctgcgagcaggtcccagttgcaagaattaaagccttgcaacaggttgggggaagcagggcagcgccaggtgcacgcagtgagcggaggccggagaaaccctcaagcctgagcgggtcagaattataggggaaaaaaagccacaaaattgttcacccccaagcaaccaccgaaataatgagatcggatgcagtggagatggcgttgggggtgggagagaaaaatggatttatctttaaaatttttgcttaaaatctaaaatacaccccgctttctaaccctcag

SEQ ID NO: 14855 - DNA, 970 bp, Homo sapiens
  chr2:219866613-219867583
  hyper
agccaccctccgcccggctttcctggcccctccgcccggcccagcctagcttggcttcgtccccagcccacgccttggagcttgtcccggagcccgggctccgtgtgctcttatactgcctgttcagtccccgcccccagacacacacactcacacctgtccaggcgcccgtttgctcggggcaaatattgactcatggaggcggagcgctcccccctcccccgcccgggctctgagaccggagcttctccgaggccttggtggcgggggcggaggggagggtgctggggaccctgggcgcctctggaacaacaccagatgtcacttttccacccacctgcctctgggagggaggagccgagaagcagaggacagaagctcccgggcgggggttaggaggaaccgagaggtgggtatccatcctcgtctgaggactgattcacagtgggagtcgcttagcagggtctgtggcccgaaatccagtggtgacctcgacccgccccagcctagttcctggccctccgcggcgtgcctcagttcttcctccccagcctcttgggcactcggagctcggcaaatgctaaggggctggccctgggggtgctaagcctccgagcaggcgcggcgcggaaaggtgaggggtggccgccctgcccagtggacacctgcttcgctggccaggcctggcactcagttactgtgcaccaaggtgcgctggggcaaaggccagccaggccccgtccggagcgccctccactggccagacccggtccagcggccggcagctagcggccaggtctcagtccagctgcagtgtgggcggagaggtgcatcctcccgggccctaagttcccgccgcgcctctgcagtccgcccgggctgctccctgccatccttccctctcagagctcgcgcgcgcgttccccctcgtcggggaaataaagtcaaggtagatacagaaaaaagacta

SEQ ID NO: 14856 - DNA, 370 bp, Homo sapiens
  chr2:219922768-219923138
  hyper
cgcccggtccctctgtgcctccaaggcaggagggccagccagcggccgggagggaggagtggcagcagagccgactgcctgcggccggcctgcgaggcgtgcaaggcccgaggtgcccagtaggtgtcaccgcagcctcagggctgaggcctggggacgacaggctctggaggcgcggcaggtgcagagcgtctcggtagcttcagggggtgtgttggaggggaatcgccggcctgcctggatccctcgagcaccaccgaggattcccgccgggaccctcttataatcttaaaccggcccacaaccccgccagagatgacagggccagggaaccagaaaccggcggattagcgccagggccgcccaatgg

SEQ ID NO: 14857 - DNA, 221 bp, Homo sapiens
  chr2:219924173-219924394
  hyper
cgtccccaccaccaagcccaggaatcccctaagctcagtcccagagcccgaaggccccaataacccacccttccaccgcagtagcacccctcagctctccggacagacacgtgggctcgctgggcaggttccttttcccacctccgcctcccgattcaactcttcctcgctgttcttaaccccagacccagccgggacgctgctcctggaaggggcagccc

SEQ ID NO: 14858 - DNA, 129 bp, Homo sapiens
  chr2:219924438-219924567
  hyper
cgcacccagagattctttgcctcaggggtgccgaaaagtttcaaaatgaaaggggcacagctgtgcagaaggttaggccgggagggactgcgtgggtcctggaggcgcaggaggcagccgggtagaggt

SEQ ID NO: 14859 - DNA, 525 bp, Homo sapiens
  chr2:219924596-219925121
  hyper
ccagtactttggggcagaggagccgccgccaacctgctgggctgtggggcttggcagcggggagctcttctagcagtctcctccgggcttggggatgccgacactcctgcctggacccctggccagcccatcttgggcaggaggcagcggggcttggcgagaggggcaggtgccagggagcgtgccagccagtcgagaaaatgtgccagggggtgggtagggccgggcaggtggccgtgcttcggtggcggcgcgctggtagggcggatcgcgctcacctgggtcatgaggcggtcggcgcctgtgttctcctcgtccttgaagatgatgtctggattgtaattgggggtgagctccttgaagcgctcggagctgcgagcgatcttgccttcatagcgtccgctggcgcccagggtcttctcgggcacattggggctgaactgcttgtaggcgagcggcacgagtttgcgtggcggtcgccggcggctgcccaccacccgacccggcccgcagccccatgccgcc

SEQ ID NO: 14860 - DNA, 305 bp, Homo sapiens; identical to SEQ ID NO: 13817
  chr2:223166850-223167155
  hyper

SEQ ID NO: 14861 - DNA, 61 bp, Homo sapiens; identical to SEQ ID NO: 9506
  chr2:223170211-223170272
  hyper

SEQ ID NO: 14862 - DNA, 285 bp, Homo sapiens
  chr2:223171556-223171841
  hyper
cagtcttgtccgctgaaggcaggttaccctgggctttcaagggaaaacgccttggggcggggtgtcctgtgcgaccacctctctcagcaaagcagggtttgacctcttggcctgaccttgctccctagtcccaccctatactagtaggtcctaacctttctgcgctttgagcctggaccatcgtcccttcaagagattctactggataaaaaaaaattataaaagctggatcaagcttggcgtcggaggtctggccctcagctggttcccaccctaaaggactgg

SEQ ID NO: 14863 - DNA, 95 bp, Homo sapiens
  chr2:223185036-223185131
  binary
cggccttctcaacgcagctttcccagcagcttaggatatcggtttttgttggacttgaaattgggagttgagggcggcctggaggcgctcgggaa

SEQ ID NO: 14864 - DNA, 1340 bp, Homo sapiens
  chr2:223288948-223290288
  hyper
cgctcccattagtgttacgtctgccgggggaagaaggtggggtggggggttgggggcgccgggagaagagaggcgcagttcggagatcggcactcctccgtccagttacaggcggtcctgcccccgtggccgcccggggccgcccaagccctccgggacggagagaaagggggacgcgttgcgcaaggtggaggcagacacctgggcgggcgctaggacccgggcggcgcacctgttggctgggcccggggccccgcccgcccggcctccgcccggagtgcgggatcggcgggggcgaggcgggagtggcggtgccagcggagggcaccggcccggcgtggcagcggcggcggagcgcggccccgggcacaccatggccgagctgctgcggagcctgcaggattcccagctcgtcgcccgcttccagcgccgctgcgggctcttccccgctccggatgaaggcccccgggagaacggcgcggaccccacggagcgcgcggcgcgggtccccggggtcgagcatctccccgcagccaacggcaagggcggcgaggctccggccaacgggctgcgcagagccgcggcgccggaggtaaccatgggcaggtgttcgccgggtacggggagggggcggctgcggacgtgcgggtccctgcgactccgccacgcggggccggccgggccgagagggcgccgtccccggcagtgacccggctcccgccgctgcgagcggacggggaggcctggccttccagtaaccaggatgccaccctccaacgctgccaggggcaaccgggtctattgagatatccccagacgctttcaatgcagtccatttagagacttcccactttcaaaagtagttaaattcacgtagatgccagcaaatatgtaagagttacgtaatggaacggaggagcggggatgtccttggcacttccccggggagacgttcttagactcccccccacccccgtattcttgcatttccgcccatcccccttccctgatgcgcacaaatgcgggtgcagccgggctcagcgcgctcctcaccgcgctgcaccgccagctctgggcacagaacttggggctcacacagctcctagagagatttacaacctccctgcactacccccggcgatgatgtcttaacagcaactctcgcttgccctcccccagagtctgggggtccctcctgcctggtgggtcttttatggaccgacaccagtgacttctaacagatgcttctgggagggaagctcgctacgctcccgctaggtgttcaaagcgtggttatacaacccactgcggcttggggggaaccagcgtgcgtcgtcgtc

SEQ ID NO: 14865 - DNA, 163 bp, Homo sapiens
  chr2:224702626-224702789
  hyper
cgagagcgcgtggcccgctaggaactccctgcgcggggaactccctgcgcggagaacaccggggacttttcgcgattctgccgcgcgagtgtgtcctgtattccttccgcaaacgtttatcaaacctggcaaagatacttccgatacactcgcagaaagtgcc

SEQ ID NO: 14866 - DNA, 157 bp, Homo sapiens; identical to SEQ ID NO: 13821
  chr2:231902837-231902994
  hyper

SEQ ID NO: 14867 - DNA, 218 bp, Homo sapiens
  chr2:232790830-232791048
  hyper
cgcctctcccaggctcggcgtccccacgacagcacccaccttcggcggcgccccgggcttggcttcggagggccggagggagagcagcgtgagcagcagggcgcaggccagcagctgggagagatgcatggtgccgctggggtcgaggggcgcacacgggcggcagcgagggcgcgcaggtcggcgggcagaccagcagggggatgcggagcaggctg

SEQ ID NO: 14868 - DNA, 391 bp, Homo sapiens
  chr2:232791140-232791531
  hyper
acctgccgctgatgtcatcctcccgcccaccgggccgcccgggccaatgacaccacgcacgcggccgcgccgagggccgggagggggccgcgggggctcccctcccttatcccaccccggagggatcccgcggctcggcgggctcgctccaggctgcacttggagctgcagagctgagcgcacaggggaactccatttgcagcgagcgcgcgccctggcctgccgagcatcggtgcgcctggtgccctgtgcacccactaggtcctcatcgcactcactctacctggaagggatacgtagccctctttgcaggtgcaaagacaggctcagaggaatgaagtcacttgcccaaagtcatacaggcataaagttggcgctgcccgaaatccac

SEQ ID NO: 14869 - DNA, 221 bp, Homo sapiens; identical to SEQ ID NO: 8322
  chr2:233740556-233740777
  hyper

SEQ ID NO: 14870 - DNA, 168 bp, Homo sapiens; identical to SEQ ID NO: 8323
  chr2:233741586-233741754
  hyper

SEQ ID NO: 14871 - DNA, 250 bp, Homo sapiens
  chr2:23609647-23609897
  hyper
cgcggggctgggagccggggtaggtcggaggtggctcttagggcaggtcgcctctgcgttgcctggggaaggcggggacgcgctgcctgcctgcggccagccgtctcggaggagggggtggcggccacgcgcgagtctcggatgcctgggtccacccgctgagaagccagttgtcgtccctgggctgtggaaccaagcggcagacgcggtccgttggcgggccctcgcgcgggcccccagagatgctgat

SEQ ID NO: 14872 - DNA, 206 bp, Homo sapiens
  chr2:23610070-23610276
  hyper
gctgctgctgcctgcgaaacttccacttcggcagctcagcggcatcccggcccgctgctgcaggttccagcctctctccagtccagcaacgctgggattcggactcctcttgcaatgacagatctgtcctggttacggctgtatttatactagtttcagtctctttaaagtcatctgtctagtcactacagagtttcttcctcgcc

SEQ ID NO: 14873 - DNA, 375 bp, Homo sapiens
  chr2:237087637-237088012
  hyper
cgagcaatctcctggctttaaattccgaataaaagtctcaaatattcccgggtcatgggggcactgtctcattaaaaccactctcgtcctgaaactgcaatgcagacattaaagtgcagtatttttcaattagagctgacgaattcaatcaaaattccatagattaggatgaaatgaggcatgggtcatttacaggggaatttaattgccgagccattagacaaatagtatatttgccattcccgcgttatccatcattttcgacatcaataccggggccgcatctccccgtcccgcggccgcccggcgtcggctgtaaacactcccttccctgtatcttctgattatatctgatttcatttagggccatggggg

SEQ ID NO: 14874 - DNA, 223 bp, Homo sapiens
  chr2:237088239-237088462
  hyper
gaacccctcttgctgccagcgggtctggggagggtggggctgggctccgcaggctgtcggaaccccctcccacgccgcgcagccgcggggcgctcgtgtccctgaagcctgagctgggcgtggaggacaggccccgcgtgttcgcggatcgcgagtgggggccagccccgcacctcccgtcccggccgggcgctgcgggtagggggagcggagcggagggggc

SEQ ID NO: 14875 - DNA, 137 bp, Homo sapiens
  chr2:237999682-237999819
  hypo
cggtcacaggccatgtgccttttcccagtgttttacagcgggttgattggcaggactgggcttgggaactccttactcgttcagcaagcattctcttgtgcaccgtcgggtccgtagttttattccttcccggagcc

SEQ ID NO: 14876 - DNA, 477 bp, Homo sapiens
  chr2:242350123-242350600
  hypo
cgggagccatcgcccctggccaatttcttttttttattgttcacatcagagtgccttagtgtgttcagcacttcctttgcgctctcccatgtgtgtgactcagtctgctgagttggtttatcatctgaccttcacttggtgactgtttgtttcatgaaaggccttttgtgactttgctgtttcgtgaccgccttgcgttttgctcactgttgggtcactgccacttcccagggctcatttgctgtcttgctgtggagacatgtctatgttacattcagagaacatttggaattgatctctgtcttattttgaactctcttctagatacttgtttgccttgcaacttaagagagacctgctggaagagcgtttgacctgtgctgacaccacagcggcccttctcacgtcccatctcctgcagtgtgagtatctccccgccagcggggagcattcactgaccatggcacagatataccc

SEQ ID NO: 14877 - DNA, 101 bp, Homo sapiens
  chr2:242618731-242618832
  hypo
cgtccacgagaacctcccacagagcctgcggctctgtcagctgatccgcacagcaggaagaagcaaaggaatcatgagtcttgtcctccttattatacaac

SEQ ID NO: 14878 - DNA, 105 bp, Homo sapiens; identical to SEQ ID NO: 10524
  chr2:31457427-31457532
  hyper

SEQ ID NO: 14879 - DNA, 295 bp, Homo sapiens; identical to SEQ ID NO: 12622
  chr2:364121-364416
  hypo

SEQ ID NO: 14880 - DNA, 135 bp, Homo sapiens; identical to SEQ ID NO: 7210
  chr2:38303709-38303844
  hyper

SEQ ID NO: 14881 - DNA, 64 bp, Homo sapiens; identical to SEQ ID NO: 7212
  chr2:43019535-43019599
  hyper

SEQ ID NO: 14882 - DNA, 70 bp, Homo sapiens
  chr2:43020503-43020573
  hyper
cgcacgcagctatgggaggaatttggcagatgtggacaccggcctcagtgtcctagccctcgggaatctc

SEQ ID NO: 14883 - DNA, 1165 bp, Homo sapiens
  chr2:54784958-54786123
  hyper
cgaacttacacctcccctggctgtggcgctgcacagcgccctgagagtgactttgtctgacttcttcccggtggctcgccgggccgccgccgcgtggttggcgccagcgcactggggcagtcgcgcgcgcccaggtgcgggccgcgttacctcagcagacgctagagagtgaatgagccgcgcgggcccgggacccttggggctcttcactctccaggccgtcccgtgggcgcgctagccttttcaagtgatagtaatcggagacttttccgttacatgaggctcaacaaaagattgtaattccagcagctctgtttgggaaggcactaccgcggcgagtccagggcccggccgggggtcggcggctgccgggcggctggggcgaccgcggaccgtgcgggaccggtagggggtcgcgggccggctaggctcccccgcgcccctcctcgtggtatagcctgcatttctaatacaatgctgttatgctaatcaggtgacatcaccgcccagcacacggcgagtggctcctgataaaattacaaaccggcggccgccgcgggcagctgggaggaggtgtgcgcgctgcgcccgcgagctcccgggctcggcaaccgtggcatgcttaggattggccatatttaaaagttctgaagtagaacctgcgcctcctctctgcttctccctcctcctcagtaatttatttcgagcttccaggcaagggccacggaagaagggaaagcaagaaattagatgcctgtgtggtaactcctcgcggagctaaggtggactctcttgcagccaacttcccatcagatcaccctgctggacttgcagaccggaatggggctcgcctaaggagccgagcgctgcggaggctgctgcgtgttggatgggagtgggagggggctggagcgagatttccagggcgcagtcctccggggcgttacgccgggcataatggaattgcagaggacgtctagtatctccgggccgctgtcgccggcgtacacggggcaggtgccttacaactacaaccagctggaaggcagattcaagcagctgcaaggtaagccccctcccaaaggccgggcctgtcctgggtgccaacgggggttcttggaggctttatttgtgaccctaatgaagacgggcggcttcacagctc

SEQ ID NO: 14884 - DNA, 546 bp, Homo sapiens
  chr2:55509233-55509779
  hyper
cgcaggcgccgccccgcagcgaggcgcctgttgagagctcccgcaggccttcgcaagccggagccctcagcggacgatgttcagggactagcgggcgaggcgctcagacagggcggacccgccttcaccaggcaccagcactacgctgccggcgtcggccgagatccctctgggcagttccgcctcaggcttcggtctgcgcagccgcgggaagccgtgccgtttttccgcccatcgccacgatagcggctccacggcgggcgcggagttgggagcggcgctcgagcagcggctcggtgccctggccatccacactgaggtcgtggagcaccccgaggtgaggcccctagaagcgaccgccgagacaggcccagcggggtgggctgtgctgcacgtccgtcgggcgaggccgctgagatcaggtgtcccagggtcaatgtaccgtgagaacgtcgctcctggaatatttccccggtctcaaaatacgaaagtgaccctgcagggacagcagaggacttccatcttgggaccatgaggttactgcac

SEQ ID NO: 14885 - DNA, 74 bp, Homo sapiens
  chr2:69533984-69534058
  hyper
ctggcccgactgtggcccccgggaaagacgccggtcccgtgagcaccgccccttctgttgtctccagacgcccc

SEQ ID NO: 14886 - DNA, 271 bp, Homo sapiens
  chr2:7005163-7005434
  binary
cggcccgggcggcttcccggtccgggaagaccacggaactgggcaagtctggcaccaccgggtgcagcgggggctccgggacgggcacgacctgtgcgcagcccacctgcagccgcctgccgtcttgcacctcccagaggcgctgccacagctggccgcgcgggtcggcctcgaactcgcccaagtgcgggcgtggtgcctcctgacaggcgcccagcagctcgagcagcgcttgccgggtgtcagggtcatccagggggtcgcgcagcag

SEQ ID NO: 14887 - DNA, 728 bp, Homo sapiens
  chr2:7005469-7006197
  binary
ggcagtagcagagcagcctgagcagctggcaccgctggaaggggccgcggcgcagctggtgcagcaggcgctggtgcagccgcgccgcccggacccgggccccgcagccggcgtccggggtcacgggcacgcacagcgagtagctgcgctccgggggccccagcagcgccgccaggcgggggtcgggggcgtctgcgtcgccgggggcgtcggcgcctagggcgaagtgagccagggtgcagtcgggaagctccaggacgaagcggcgcggcggagccatggccccagcgcagaccccgcgccgcccgagcagcggccccgacagtggcccgcgcaggagccggcgggcgaaggccatgggcgcctcagcgacgccgccctcggccccgcctcggaaacgaaacctggcgggagccaggcgccggcgggaaacgaaacccggagggagccaggcgccagcgggaaacgaaagcgaagcgttgcggggaaacgaaagccggaggcccaggcggggcaggagccctggggctggggcgcccttccggcctctcctcctcgccgcgagatgtgcgcgataaacggccggcgctcgggagcagacgcttggccccggggccccaggtgcgcggctccgcgggcctgcgcggtccccaggcgccggctcccggggctgacaccgaatgaggccccgcgccgtcggccccaaggtagctccgtgtgcgttctgc

SEQ ID NO: 14888 - DNA, 247 bp, Homo sapiens
  chr2:7073094-7073341
  hypo
cgatgcatgcaaacagagaggtgctttattgaagcgggacaagacctctattcatagtaaagtcaaacaaaccacgcatgtgaaaacctccacttatagcggctgcataagcttaactgcgcagagctatactgctttttgaaatactaacttgcaagttcagcaacagctaagaaaacaatcctagacttggaaattgaaagattggaagagaagtggagggattcctttggaaccctttacgtac

SEQ ID NO: 14889 - DNA, 127 bp, Homo sapiens
  chr2:71680558-71680685
  hyper
cgtcctaccccgggcggtcgggttgagttctggagagactgctccaatccccgaggcggaaggaggcaaccgatttggcgcagcactcagccagggggtagaagctcaggggaggagccgagccttt

SEQ ID NO: 14890 - DNA, 236 bp, Homo sapiens; identical to SEQ ID NO: 5803
  chr2:74781700-74781936
  binary

SEQ ID NO: 14891 - DNA, 123 bp, Homo sapiens; identical to SEQ ID NO: 6112
  chr2:74782349-74782472
  hyper

SEQ ID NO: 14892 - DNA, 48 bp, Homo sapiens; identical to SEQ ID NO: 6113
  chr2:75147056-75147104
  hyper

SEQ ID NO: 14893 - DNA, 73 bp, Homo sapiens
  chr2:87034584-87034657
  hyper
cggtgcttccccacgctgctgtgcaatggataggagctatgtgaagctggcgtatgggtggggtttgcaggct

SEQ ID NO: 14894 - DNA, 622 bp, Homo sapiens
  chr2:87034689-87035311
  hyper
caccaattcctgttctgcaggtctcaccgcagaggggcacgccagccatgaggacagatgagggaacacgtgatgccacgatgggggtgccaggatgaggtgggtgcggtcgcggacaggcgcacgaggagcccagcggagcgccacccggagcaggcgcggaggagggctggggagggccaccaaggcgacgagagccggtgtgcctgaatcagcctaaaggagacggaggaggagtgtggtgggcgcaggggcagggagctgggggaagggcggggggctagcccaggctgaaggcaggcaggagcagggccgcgatgtcagacaagaaacggcagcagtgtgtttgggaacctagcaccaaccgcaccggtggagacagggtctgctgtagaggaggtggggccgggtcccagctaagtaaggcggtggatcttgcagcccttccatcctcagccgctcattctgcgcaaatctcggggccagccttggtggagccgtaaagcgtccaccagaacctggatccctccgccacctttcccatgaattcacctttctgtacacagcaagcgcctgagcggagacggccgacacgtttcccactgttaccccaggaaaccgc

SEQ ID NO: 14895 - DNA, 895 bp, Homo sapiens
  chr2:88315911-88316806
  hyper
cgatgcgtagactagatagagtaaactcttactccaactccccgttccaaaactgcgtttaatatagcgttcatcaaacagaagaacataccagatattaaactgataagaacacacactacactcaatcattaaccaaacagcaaaaaagagataccagttacccggggcctcccacgtcctcccttctttcatccaccttaaggtcacggtgagaaacctcaccttcggtaaacatctcacctgctttctgatgtaaatattatattgaaaacataggccctttgagacattttgtccgctccttgactcttagtgacttcgagctttgtcgccccttttccttggtcgcgagggccgttcatttgcatgtcccacccgctctgcgcccgggaggcgtggccaccaaggggccgggccctgcacagcgccctggggaagctggtttgaaagctctggagcgaccccaatgccgggtaaaggacaagatttgcccagacggaagggaatttggggtgaagtggccgtaaaagtgtgggacgaaactgtttcgggcagagcggtgggaactcacctgaggaaagcatgggggaggagtcactaataagaatgagtggcagggacagggcggccttgtaacgccctcggtgttggaagggaagaccgtacagcgcgatggggaccagggcggcgggccgcagccagggtgtgggtgggcgacggtcaaggtgccttgaagcggattctgtcctcgggagctgcggttcttcctcctccgccctcaccggcgggcgaccttaggcagggcgtgaaatgcaacgggagccctggagggagggtgaagccgcgcgtgcaggaggaacctccttttggcgagttcaggccccgcagctgc

SEQ ID NO: 14896 - DNA, 312 bp, Homo sapiens
  chr2:97651885-97652197
  hypo
aggcctggaccagccaggagtcccagggaagtcgagtgctctctgagcgctaaccacgcgcccctgcggttcctcggcctcagtttccttacctgtaaaatggagccgctgatcctgcctcctgagttgtggagcgaggcccgcacctggaagccttggccacatagggcgggaagggcagggctccggggtgagggagggtggcgggaattcgcacggcctcagaggacggggccagctagccgggaaaggaagcaggagcaggctccccaggcggcgcagtgggaggaccccaagagttgcgtccctaga

SEQ ID NO: 14897 - DNA, 84 bp, Homo sapiens
  chr2:97652405-97652489
  hypo
ggaagctcctgcccccaggcagtcctgggtcacgcgcacttgtagtagcttgcatttaccaagacagtgagacagtggcctggc

SEQ ID NO: 14898 - DNA, 148 bp, Homo sapiens; identical to SEQ ID NO: 11506
  chr20:20343543-20343691
  hyper

SEQ ID NO: 14899 - DNA, 79 bp, Homo sapiens; identical to SEQ ID NO: 7234
  chr20:20350750-20350829
  hyper

SEQ ID NO: 14900 - DNA, 206 bp, Homo sapiens; identical to SEQ ID NO: 6114
  chr20:21080357-21080563
  hyper

SEQ ID NO: 14901 - DNA, 439 bp, Homo sapiens
  chr20:25012790-25013229
  hypo
cgtccaccacgttgcctatgtctatggtgtgcgcatgcccttcctctctggccactctggggcctatcaccaggttcacccaccactcagggcgcatcatctctctgggcaagctgattggctcagggccgacacgtgacccaacctggtccagtcagagtcaaccatactcaactccgggaaaactgggagcaggcgagagccgccaacttgccggccatgcggtgcgaagtggaggaagtggaagcgatcccaaggttgtctttcctttcggcgcctcatccctctgaatctggacctggcaattgcattaaccactttcccactcttgctgtactgactttaattaattatttgcaataaaaagagctaacacagaacgaagaatgaggggaagccaaggccctttctctctgggcggggcagaccaccagcccgc

SEQ ID NO: 14902 - DNA, 1003 bp, Homo sapiens
  chr20:30192854-30193857
  binary
cggccctcgcctctacccgctgccctgcccggtgccctgccaccgacccacccttgctgttctgaaacccgggtcgtctttccacactgcgagcaggcactagacgagcaggaggctggacctaggagcgcgggtcacgcccccatgccgcccattggctgcttttgaacgttctgagcccgcccctccgggggccgtggcgtgtttataaaagacaagctgtggctccgcactctcattccacgttcttaactgttccattttccgtatctgcttcgggcttccacctcatttttttcgctttgcccattctgtttcagccagtcgccaagaatcatgaaagtcgccagtggcagcaccgccaccgccgccgcgggccccagctgcgcgctgaaggccggcaagacagcgagcggtgcgggcgaggtggtgcgctgtctgtctgagcagagcgtggccatctcgcgctgcgccgggggcgccggggcgcgcctgcctgccctgctggacgagcagcaggtaaacgtgctgctctacgacatgaacggctgttactcacgcctcaaggagctggtgcccaccctgccccagaaccgcaaggtgagcaaggtggagattctccagcacgtcatcgactacatcagggaccttcagttggagctgaactcggaatccgaagttggaacccccgggggccgagggctgccggtccgggctccgctcagcaccctcaacggcgagatcagcgccctgacggccgaggtgagatccagatccgaccactagatcatccttataccgacggggaaacggaggccagagagggcgtgggcgcttgcaccacttccgtcccatccttgcgggtacctggctatgcgggggtgcctaaggagcctggaaaaagcgctcccccgtcgtgcttcctggggaagggggcgttcgctgcgctcggagcggcgtcccttccaacccgccggtctcatttcttctcgttttcacaggc

SEQ ID NO: 14903 - DNA, 189 bp, Homo sapiens; identical to SEQ ID NO: 8368
  chr20:30193992-30194181
  binary

SEQ ID NO: 14904 - DNA, 110 bp, Homo sapiens
  chr20:32899337-32899447
  hyper
cggagagggggcggagggcgcacaagcctgccctttggccgcggggctttagcctgccctagcttcagcatccccgctcgcctcccggcggtcctgcgtctcactctgga

SEQ ID NO: 14905 - DNA, 339 bp, Homo sapiens
  chr20:32899515-32899854
  hyper
agccggattaagcagttctgtggagttcctcccttcttgtccaccccgctaggggtctctcctttcccgctgtatccacgcccctccctccaggccccctgggcccacctcgaagtcaccgctgggctggggagtacagaggtgggggacttcttagagaccctgggacagggcccccctctctccctcaatccttctcatcccacgcggctccgctgtgagtcgggcgtcccaggagctgccggcccacccatccgcgggtttcttccgttgggggagccctccagactcgtagaatataagagagcgcccctccctagccgcgggccatctctaagc

SEQ ID NO: 14906 - DNA, 390 bp, Homo sapiens; identical to SEQ ID NO: 8385
  chr20:37433723-37434113
  binary

SEQ ID NO: 14907 - DNA, 71 bp, Homo sapiens; identical to SEQ ID NO: 13886
  chr20:44453063-44453134
  hyper

SEQ ID NO: 14908 - DNA, 343 bp, Homo sapiens
  chr20:48504339-48504682
  hypo
cggcttggttgtgtctctcgacccaggacctgcaccacgggcgcatccagatgaaaactctcaccaacaagtggtacgaggaggtacgccagggcccctccggctccgaggacgacgagcaggagctgctctgacgccaggtgccaaggcttcaggcaggcaggcccaggatgggcgtttgctgcgcacagacactcagcaggggcctcgcagagatgcgtgcatccagcagccccttcaagacataagagggcggggcgaggtactggctgcagagtcgccttagtccagaacctgacaggcctctggagccaggcgacttcttgggaaactgtcatctccc

SEQ ID NO: 14909 - DNA, 139 bp, Homo sapiens; identical to SEQ ID NO: 8389
  chr20:48789173-48789312
  hyper

SEQ ID NO: 14910 - DNA, 952 bp, Homo sapiens
  chr20:50158723-50159675
  hyper
cgaccgccccctaagggtggcaggggccactgacgcctcccctccctggcacctgggtaggggcaccctccctccaggccccttaggaagggggacggctggagccaagaggactcctgtgcccagtccccaggcctgagcccctggcgggctcaggggccaggccaggggtagcctccaccgaccttcgttcggattcaaatactcatagtcgaagaggatggagaagtcaagctcgtcttgggggctgcccccaggctcgtggcctggggcgtccccgccgtcgggttggggctgccgctcgggggcgttcatggcgcgcagggcgggaaggctgcggggccgggggcgagggcgggcgcggctggctctgggacccctcgcagtggggctggcggaggcggctcgagcggcggggtccctttcctcgtagggacgcacgccgggtccggggacggcgcgcctggcgcagcgggtcctggacgcgcccggggaagctgagcggcggcggcgacggcggcgcgagcttcctgctccggaggcacctgttgcagcccggggaggcggggggggggggggcgtggaggcggggacagggcggccaggccggcgggggcggggccgccaccaggggaccggaggggaggggcgcgcggcctgggctggccggtgccgggaggaaggaggctgtccgcggacctgaccacactgtcccgggccaccgctgggcgctggggcggccgctgtctcccaccctccacgggtgagtgcgacacgcgctgcgcgaaccagggtctagacaagaaagctgccgccactaggacttttgccctaagggacccactggccccacactttttcctgcttttcttctccatggggtggaagggggtatccacccccttctattgcagacccgtgtctccaggcgtctccgtgtgcccacgggggc

SEQ ID NO: 14911 - DNA, 172 bp, Homo sapiens
  chr20:52789230-52789402
  hyper
cgcaggtgctgggtgcacagcacggcttttccgtggaccgactctaatctgtacaagagctcagggttgcgatggcacgggagaggggctttggtatccgccctacgtaagaagcttccaaccccagggaactctaactccgcctcttcacaatttccaggcgccgtcaggc

SEQ ID NO: 14912 - DNA, 276 bp, Homo sapiens
  chr20:55203829-55204105
  hyper
gggaactgggcgtctctggcgcactggggctccagctgcatgatcccagctcagaccttaagcctcagtggggtgtaggtgggatgggatgtgtttttaggagatgaggagaccccggttgttgagtcgctccccaaatgcgcagtttcttaactccaggtgacatccgtcttttggaggaacgagtgaaggccgtttaggcgaaagaggggtgggtttcagtatttggatcccttcccccagctctgccaatctcaggtgtgtttacggtggagg

SEQ ID NO: 14913 - DNA, 103 bp, Homo sapiens
  chr20:55588994-55589097
  hyper
ggatcccctatcagagatctccaaggaaggccccgcctccacctgcccctcccgcaggagagcgctgctgcagaatctgccgcctggccggtgttcacccagc

SEQ ID NO: 14914 - DNA, 285 bp, Homo sapiens
  chr20:55839319-55839604
  hyper
cgccccaggtgcccagcgtggggcttcagtatcattatttccatgttgacacagcgcccgtgggcgtgagtttgctgtcttgacttggttcgggttttcgcagcaagttacacaagtagaatgaaagcggctcaggaaacagcgctatcggggtgtgttatctcggaaaccaaatatttgatcatcagtcccgcagcgcgctggcgctgccggggggttagtttgagcaagtctggagaatgtgcgcgcacatatggagggggagctccccggccctcgctgcag

SEQ ID NO: 14915 - DNA, 535 bp, Homo sapiens; identical to SEQ ID NO: 9559
  chr20:55964187-55964722
  hyper

SEQ ID NO: 14916 - DNA, 113 bp, Homo sapiens; identical to SEQ ID NO: 8396
  chr20:57225466-57225579
  binary

SEQ ID NO: 14917 - DNA, 84 bp, Homo sapiens; identical to SEQ ID NO: 8403
  chr20:60544922-60545006
  hypo

SEQ ID NO: 14918 - DNA, 209 bp, Homo sapiens; identical to SEQ ID NO: 8404
  chr20:60545058-60545267
  hypo

SEQ ID NO: 14919 - DNA, 266 bp, Homo sapiens; identical to SEQ ID NO: 8405
  chr20:60545296-60545562
  hypo

SEQ ID NO: 14920 - DNA, 187 bp, Homo sapiens
  chr20:60868207-60868394
  hypo
cgcgcccggcctgttcattgtttttttaaagtgttaaaaaaaatatactgtgaaaataatgatcttttgtccttcgaagaaaatgtcttctcctttgtgagcgctgcccccaccccacccccaacactaaggacacccctcgggccctgagtgccagccgggggctgtggacggcggctgaaccagc

SEQ ID NO: 14921 - DNA, 161 bp, Homo sapiens; identical to SEQ ID NO: 8417
  chr20:62314955-62315116
  hypo

SEQ ID NO: 14922 - DNA, 127 bp, Homo sapiens; identical to SEQ ID NO: 11547
  chr20:9048369-9048496
  binary

SEQ ID NO: 14923 - DNA, 632 bp, Homo sapiens; identical to SEQ ID NO: 11548
  chr20:9048532-9049164
  binary

SEQ ID NO: 14924 - DNA, 35 bp, Homo sapiens
  chr20:9049238-9049273
  binary
gccctgcgggctcgcggcaactgggcggccggccc

SEQ ID NO: 14925 - DNA, 32 bp, Homo sapiens
  chr21:34401548-34401580
  hyper
gacgcgataccttgggaccggatttggggatc

SEQ ID NO: 14926 - DNA, 61 bp, Homo sapiens
  chr21:42688559-42688620
  hyper
cgccagcgacctcagagctcccgggcacagcccggggcacagccccgcgcacctgccccgc

SEQ ID NO: 14927 - DNA, 820 bp, Homo sapiens
  chr21:42879240-42880060
  hyper
ccggcacggagcgcaagcggaggagccagaccggctcctcccgggcgggttcctgccggtgccgggtgtccaggaggccccggccctgatcgccgccagcgggtcgccgcaacggggcctgagtcgcgagcagtccctccccgagactgactggccgttcgcacctcgcccgggggccctccagcagcctggcccagcggtccccgccgcgccggccgtatcgttcccggcatctcagcgagtttccagtttctccctacctcagtagggaaccaagaagcagaaggagttcaggtaacactgcgggactgcagagatttcccccaaacaaagaagccaaccgacagcactcccagtcctcctccccaaagagaaaaggcgcaccggtgctcccaggcgggggccgtggagggcaggcggactaggagccagctttggggaccccgggggactctcttccaccaactggctagggactcgcaggaccacctgccccaacctcgcgatgccaagccaacaggggcggcgagggctctcggccgtgcgcaaggggtcccaggcgcccagcactctcccagcaccccgggaggcgccctgcccggctggccccagcgctcgaccctcgggcgcactcacctgccgcgccgcgctcctcacacccgctttcacctccgggcggggcagggggcatcggcgggtcccaggcgcccaggttcccctccccagcccggaccccgagccgggaccctggtaccggcgccgctcacctgccgcgctccaggcggcgctccccgcccctcgccctccgcctccgcctccg

SEQ ID NO: 14928 - DNA, 41 bp, Homo sapiens
  chr21:42880104-42880145
  hyper
ctcgctttaatctcaggaggcggtgtcccagggtccagggc

SEQ ID NO: 14929 - DNA, 286 bp, Homo sapiens
  chr21:43188170-43188456
  hyper
cgcaacggtgagtgaaggcttatttttggccacaggagattaataatgaagacaggagggcggagctaaaggagagggtattttaacgacattaactgtgtttttgtgttagtaactcggaaagagagaggctgccccaagtcagcgcattgaaagccgcagacctagtgtctccaggctcccccttccaaacgggcgcggaccttctttcatagcctgtagcggggagccgcgtctccccactgcctccccactcccatccggccgctctttggagggaactcac

SEQ ID NO: 14930 - DNA, 603 bp, Homo sapiens
  chr21:43188777-43189380
  hyper
cggcacacagctccgcagctgggggtgactaagagcccacaccacgcaagtaataaaacgctccaatttcatttatttaatcatctgtgtgcttcatttgacaaatatttatggagtgtctgctgctagctcagtgcctggtgcctgggactgaagaccagagccccctggagaccaaaagagccagctcccagctgtgagcagatcgggtccaaagatcacgggctcggcggcaggaacctggtttggtatccggctcctctgcggactttgaagtgctttaccgattcacatgacaactggtaaaacgaaaacaaacacctttccaggaattgtgaattcgagttccagaccctctgggattccgggagcgcagctgctatttatgttaacagtcattggtcccaggctggtgaggttagaatttccaagtataaaagtaatttagtttcgttttaaatacattttagggccaaagaaaagtggaacgatttaaagaaaaagatgaaatgaataatagggcaagttgggaggtggctgtcctgaggtttcatgggacaacattaattaacctcatgaagtgcctgcatggacaacgtgccc

SEQ ID NO: 14931 - DNA, 35 bp, Homo sapiens
  chr21:46351619-46351654
  binary
cgcccagccggggcgatcctttggtcggacagtga

SEQ ID NO: 14932 - DNA, 323 bp, Homo sapiens
  chr21:46352279-46352602
  binary
cgctccgagcctggccgcctccctggggcgcgtgaagggagctttccttccccgggaaaggccggggccagagacccgcactcggaccaggcgggggctgcggggccagagtgggctggggagggctgggagggcgtctggggccggctcctccaggctgggggccgccagctccgggaaggcagtcctggcctgcggatggggccgcgcgtggggcccggcggggcggcctcgggaggcgtccaggctgcgggagcgggaggagcggccgtgcgggcgccagcgccgtgggtggaggtcgccgtccctcctgaggggcagcc

SEQ ID NO: 14933 - DNA, 289 bp, Homo sapiens
  chr22:18348544-18348833
  hypo
cggactgccactgcatttcgggccctccccgttcccaggagaggcaaggacgcaggggcatttgcaggttggccgcccccggcccatagccacactgctgcaacacccactgcttctcccccacttacaggagagtcaccattacctttccagacaggggagccactgccggtctcttcctttgtgcgtagccagagagtcgatagcagtagtgtggcttacagtagaatttacctgcagacagcaagaggcagggacagaggcgatgagccaggcacggatcctgaac

SEQ ID NO: 14934 - DNA, 134 bp, Homo sapiens
  chr22:22899978-22900112
  hypo
agttcaccacaccgcgaagttgctggaaggaaagaacgagacaatggctcagctaagcgccctagccgctgcgtggggcggggggggcggcggtgggggccggggggctgggcagcctggtctgaccaatcccc

SEQ ID NO: 14935 - DNA, 730 bp, Homo sapiens
  chr22:25959837-25960567
  hyper
cgagaccgaagatcaggaagctggaaattccccccagcttcggtgtttgggctgtatctcgcttttccacttccctaaatcaccctcgtggtgcgagtgtgctcgcagcagatgctccctaattgtctcttgtattgaccgtaaaaccctaacgacaggaatactctctctccttctatttctcaacaccatttcaacacccaaactaaaacctctcacctgagtgtaagggagtggtgaccttcttaagcggagagctcttccatcagagggctccctaagggcatctctgttcctagccggggagccgtcaccccactttgttctgcttagcctaagacacgcaactttttccagcttttactcttcgctgaattctcacggtggggttggggggatgttcaggctcaggagcgaggttgggggcccggcccgctgggcgctgttcaccggtagcccggaccagagcaggagtttcatcattacctgctgggataggtgggacacatgtatttccggggccaccccagacctcccggaggatgctgattgacactgtccagtttgagaactactgtgtccagggagcagaggcctccccataaccccttgggttgtggacgtctggcccagggcttctctgggtgagcggggcgggcatcagagcgcgtggaacctggggcgggaggtcggggcagtgaaggaggaggagaaggaggaggcggagacc

SEQ ID NO: 14936 - DNA, 253 bp, Homo sapiens
  chr22:28200773-28201026
  hyper
cgtgtatgcgccggcgtgtgcgcctccacagtgtgggcacccctgcgtgtgcctgtgtgtgctttcgcccgcaaggtcccgcagtgtttctttggaacagacacattgccccctagcgctcagatgaattcaaagtccccgcaggcgcagagccgggagcagtaggagcctcagggccctccacccgccagggctttctccatcctcctccctccccaggtccccctccgggggcactgagtgtgctggcaac

SEQ ID NO: 14937 - DNA, 124 bp, Homo sapiens; identical to SEQ ID NO: 6129
  chr22:28838056-28838180
  hyper

SEQ ID NO: 14938 - DNA, 61 bp, Homo sapiens; identical to SEQ ID NO: 6130
  chr22:28838449-28838510
  hyper

SEQ ID NO: 14939 - DNA, 244 bp, Homo sapiens; identical to SEQ ID NO: 6131
  chr22:28838551-28838795
  hyper

SEQ ID NO: 14940 - DNA, 125 bp, Homo sapiens
  chr22:28838844-28838969
  hyper
ggccccattcccctctccaggacacttaccttcttccggggctgccatttcatcatatttgtaaagccgatacgtggaacatcaagatgttggctgggggctgggggcagatgcagggcagcgac

SEQ ID NO: 14941 - DNA, 307 bp, Homo sapiens; identical to SEQ ID NO: 8443
  chr22:29467406-29467713
  hyper

SEQ ID NO: 14942 - DNA, 149 bp, Homo sapiens; identical to SEQ ID NO: 8444
  chr22:29467742-29467891
  hyper

SEQ ID NO: 14943 - DNA, 770 bp, Homo sapiens
  chr22:31090200-31090970
  hyper
cgaacgatgtcgtcactggcagcgaagcgccttggcatgaaccgtaggccagctggctcaggaggtggaggcggtgaggcggccacttggggccaccgcttctggcggccgcaggagcgacccacagacaggtaatggctgccatggggggcggggcgtcgtctttagcctttagcgcccctgtgcttcgtgcgcatttcgtggcctctgggtgccgtacctgcttcccacccggctttcctgggtggcggagagcgaacccaccccagcctgggttgggggagggggcgtcggcgcagggtcccgtgggcagagctgcgctgggagctggcgggctccgcattcatcattgttcctccagcgcctggcacggctgggccgaagcagagaccgtggcctgaagcgcgccatccccttcggagttgaccgaccaccaagctcttccgcccacaggtgttgtcagagctccttccaccggccggacctaggaaggacccagggtccaaacatggcccgaggctggccgagagcacaacagccggcgggcgctgacgggcacggagcgcacgggaccgcggaggaacccgcgcgcgcccccgcctcgcgccgcgcgcacgtgactgcgcccccggccccgcccccggcctgccccccgcccccactggccgctcggccgcgcgcgggtcggccggctctatggggaaagcggcggctccgagccgaggcggcggctgtggcggccgctcccgcgggctctcgtcgctgttcac

SEQ ID NO: 14944 - DNA, 172 bp, Homo sapiens
  chr22:36847902-36848074
  hyper
cgtcgtaagcctttgttccccaacagggggaagtgaaccagcacacaaggcccttccgtcctgcggagctcactgccttcctcagctcctggcccgcacttccgaccacacactggggacacaccctcgggggggccccaccccagcagctgcccatgttcacacctcttca

SEQ ID NO: 14945 - DNA, 96 bp, Homo sapiens; identical to SEQ ID NO: 6561
  chr22:36902565-36902661
  hypo

SEQ ID NO: 14946 - DNA, 290 bp, Homo sapiens
  chr22:38061005-38061295
  hypo
cgccagccgcgtgaattcctgcagcagtaaccacaactgctatttgttaagtgctgttccatttacaaagcacttgcccctgtgttgcccagcgcccgtttggaggtaggcattacttggattccgctttctcaggagtccggagaaacttggggtggttgagtggtttgtccaaaggtccacggctgtcagggtgaaatcgcgaacctcaggcaggactgaccgagccaggccctgtttacctgcagtagctccacgcatcctcacagtacccacatgagataagtgcc

SEQ ID NO: 14947 - DNA, 237 bp, Homo sapiens
  chr22:38363635-38363872
  hypo
cgaaagatccccatcatcattcgccgttacctgccagatgggagctatgaagactggggggtggacgagctcatcatcaccgactgagctggagtcatcttcctgcccttgccccatgcccaattttcattctcactttatatgtgtaaataataaaatattcaactttccaacccccttcccctctgcttatctgcaatgtcaccacctgttgcttccccgttaccgccatgctgc

SEQ ID NO: 14948 - DNA, 54 bp, Homo sapiens
  chr22:38365003-38365057
  hypo
cgcctttgtgctggcatccaggcagccgccccagagtgcgggggtcactttctc

SEQ ID NO: 14949 - DNA, 316 bp, Homo sapiens
  chr22:38369819-38370135
  hypo
cgcggtctctgtcttcacctgggctttggcatccacaccaggtggtgagaccgtgggcagagccacgcctggtggcttggagatccaggcggagtgtccactggccacggccagggcactgcccagcccatagccggctgctgagtagctgctcacatggcctgggtgcccattgggcggcaggtactggtccaactcagccacatcaaaggtctccatgttggacattacctcgtggctgatctcaccaatgtccacgttgccgaagtcgatgtgaggcttcccgccctcccccatggagcgcccgtcccgcttc

SEQ ID NO: 14950 - DNA, 271 bp, Homo sapiens
  chr22:38378835-38379106
  hypo
cgcagcagcagatttgtcccgcagttcttcatccctcactcttccaaagactctcatctgaattccgttttctttaaacctcccctgagttctccatctgactgcctcagtttccctgaatctccagccaaccctttggttctttccaagcgtttccctcgtatcctcctgaccacagcagctggtggcatagtgtgcgtatctgtgggcaggagttagtgaaggcctccttccctccctccaaagccccaggccccacggtctgccaccc

SEQ ID NO: 14951 - DNA, 54 bp, Homo sapiens
  chr22:38380268-38380322
  hypo
cggggtgtcgcctctctccacctcacagcagggtcccaggcctgggcgggccag

SEQ ID NO: 14952 - DNA, 136 bp, Homo sapiens
  chr22:38380437-38380573
  hypo
acgctggtgggctgggagggaggggcggggggccctgagcctcaggccacggcctcgttaggacggagcctgaatccttaccaccaaccaccctggccggacagcccgagactgactgagcgactgagcctgagcc

SEQ ID NO: 14953 - DNA, 230 bp, Homo sapiens
  chr22:38381994-38382224
  hypo
cgacgccacccccggcgctgccaaccctcctccccccgcctcccttctcttccctgtgcccagactcttgttcggggccttgaaacagtgagctgtctttgttcgaaatacaggtgaacggcaatcatgtgattaacacacacacacataaaaagctttttaacagcgcccgctcggcctcagaaccgcccggagaggagccgccctggatggacagagggacgagggac

SEQ ID NO: 14954 - DNA, 592 bp, Homo sapiens; identical to SEQ ID NO: 8453
  chr22:38434385-38434977
  hypo

SEQ ID NO: 14955 - DNA, 146 bp, Homo sapiens; identical to SEQ ID NO: 8454
  chr22:38435006-38435152
  hypo

SEQ ID NO: 14956 - DNA, 123 bp, Homo sapiens
  chr22:38966046-38966169
  binary
cccccctcgtacccacagtctccccgagattttcaaggtgaagcccctctgccccgcccgacctcctcagctgacaggattctaactcgggcctagaacacggagcctggagacccgcgcgcc

SEQ ID NO: 14957 - DNA, 210 bp, Homo sapiens; identical to SEQ ID NO: 12704
  chr22:43115852-43116062
  hyper

SEQ ID NO: 14958 - DNA, 107 bp, Homo sapiens; identical to SEQ ID NO: 12705
  chr22:43116269-43116376
  hyper

SEQ ID NO: 14959 - DNA, 173 bp, Homo sapiens
  chr22:43529312-43529485
  hypo
cgcgtggacgttggagtagacagaaaccagaggcttcttaatgtcgactgcctttaaagcttgcgtcaggggctccacggctggctccatgaggcgggtgtggaatgcgccactaaccggcaacatcctggtgcgtctgaaatgaaacttagaggaattcttctggagaaacc

SEQ ID NO: 14960 - DNA, 445 bp, Homo sapiens
  chr22:45148213-45148658
  hyper
cgtgcgggacggggacgcggcccagccgggaatcggggtgcccagggtgcgatgtgcgaggggctcctgagcgcgtgtgctccgcccgaccccgccctgtccccccgacacacaggtggacccagggtcagctcgtgcacctgggaaatggctcccgccgggtagcaggggcggaggggcggggctgggcggaggggcgggggggcggggcctgcccgggagccacgtccggggaggggccaggtgagcggcagacccggcacgcaggtgggggccggcggggtccgtggccaggtaaggcgggcggcggcgggagggagcgcgcagggaggaggccgtgctcggggtgggggggtgcgccgcgggggctcccagggcgtgtacggggacaaggggccgctggccgggtagggacgcccaggcgggcgcgacgccacgtgcggcc

SEQ ID NO: 14961 - DNA, 155 bp, Homo sapiens
  chr22:45148870-45149025
  hyper
tgttccttttttgcttccgtcctggggtctcaggttaggtcgggtcagcgcctgggggaggcacctcccccgcccccacacaccccaaacctacaaggtgggtgaggtcattcccgtttcatagatgagaaaacggaggccggggcaggtgctgc

SEQ ID NO: 14962 - DNA, 167 bp, Homo sapiens
  chr22:50982557-50982724
  hyper
cggcctcccacctcgaggcgatccgacacctcggcccaggtcgcacttttttgcccgttttgatcccatcctccaactgcggccacagccggaaatgtagagaaattcgcgctcctggggccggcggggctggcgctggctcacccgctccccgggccctcccagtc

SEQ ID NO: 14963 - DNA, 567 bp, Homo sapiens
  chr3:105087465-105088032
  hyper
cggcaagctcaggtcacagaagaggtttgaaagcctctgaatctctcccaggaactggcggggagaggggtttgggggccagagcctgaggaagagattacaagtgtttgcgagctgctgctgctgctgccgttgctgtgtgtgtgggcgggaggagtgccctctccagatctctttattaaagttacatttctgggtgaggtaatgagctcacctgatgtttctgaggctgagggaaaaaaaaggcgtctgcgttctctgacaaatctcgggctctggggcggggactgtgaaaccatagttcaaccggatttaaagcaggtgtcctagtgtaacaacgctggggaggtaggtggaaaggcgagacccccttgggcctggcacagtgtggatttcactttttcgagattccactgtccgatggaggaaaggacactttggagccagggaatgagccaagaagggaggacaagggtgatgtcggtttgtaacatgcaaacgtccacacgcccacagttggttttccgattaaccccctcgagacttggagaatgtaatctcaccctc

SEQ ID NO: 14964 - DNA, 459 bp, Homo sapiens
  chr3:105088087-105088546
  binary
cgggccacgtcgcaggataggtttttctacacatttaactgctaaaagggggaaagttccgctttcagacctccttcacggtggttcttttggcgccacaggctcgtgtgtccagggggcaccgagctgcgcgctttcggcgagcggctagccccggctcaccgcaaccagccaccgtgaatctgaggatccgatatcggccctggaccctcagatccgtggtttcggtgaattaccgagctggcattgccgaaattctcattgcagtatcagtgtgttttgaaaggaaaggttacagcactaaaggcgccgtgtctacactgaggaagcaagtcttggacagtaagtgcgccttcttcggagccctctgcatagcagagcccggtgggggcgcggtgccaaaggccggcttcatttgagcggggtaactgccttccctgccggccactcttcatttcc

SEQ ID NO: 14965 - DNA, 208 bp, Homo sapiens
  chr3:10541012-10541220
  hypo
cgtgacaaccgggaagatgggtgctcagctaacccttggtttacggaggagcaaactgaggcgaagtcactggttcaaccacacacaaccgaacgcacatgactgaataagcaattcccctcccacgcattacatgggaaaacaaaaagcatttgtaaagtgcttgcggacacattttagcgattagtactattatgatgaacatttc

SEQ ID NO: 14966 - DNA, 69 bp, Homo sapiens
  chr3:107520023-107520092
  hypo
cgaggtcggggagacgcggagcagtactccagaaatgcctgccgtgtctgcgttctttagcctcgctgc

SEQ ID NO: 14967 - DNA, 1176 bp, Homo sapiens
  chr3:113251180-113252356
  binary
cgtgatgacgtgagactctccatggagagtaggaggtaataaagaaataaaacaggtgtctgaggagaggttctattagagaggggagaatagagagtaattatcgttcagacaggcaagagttctctgcaggtagcagcctgggaaagcgaactcgcgcaccctcttgggggacgggctcttttgctttctatttcttctcctgcagccagggtgcacacgtatttgaaacagaccgaatttcctcctcgatgtggcgtcaggttgacttttcgagactagcgggtatttctttttaatgactccaatgcctttttattattgctgttattgaggttgagggagaagagatcggtctaaattctggctgggtaagtggggggattctcggcgatgagaaacgggggacttagaagccggaggaaaatcagcagccccacatctccacttctccagtccgccctactctccacccgtgacctccagtggagaccccaggcggcagcatcagtatttgatcggcccttcgtcagcacgctgccagccctggccggctgggttcgccaggcatcacccgctcggctctgaagcggacgcctggccctgcaccgggctttggaaggaccctctctgcgctcgccccctccccagggtggctccgctttcgagcccgggcgcggtgcccaccatgcgcggctgcctgcggctcgcgctgctctgcgcgctgccctggctcctgctggcggcgtcgcccgggcacccggcgaaatcccccaggcagcccccggcaccgcgccgcgaccccttcgacgctgccaggggcgccgatttcgatcatgtctacagcggggtggtgaacctcagcaccgagaacatctactctttcaactacaccagccagcccgaccaggtaagacactcgctcccctcgctcgactcctagaacttgccagatctcagagccccgtcgctgctttggagtcccctgggaattgaccttgggagacttcggggaccaggggactttctttccctttctcctccgaagcaatcgctgccctgccctagctgcctcaacacgcctcggggacaactctgcttcgcctcgcgcctctcctggcctggtcaagggcattgctgggctttgcagaggcaccagttccccgcaccgtctgc

SEQ ID NO: 14968 - DNA, 428 bp, Homo sapiens
  chr3:12329055-12329483
  hyper
cggtctccccagaccggccctggccgggggcatccccctaaacttcggatccctcctcggaaatgggaccctctctgggccgcctcccagcggtggtggcgaggagcaaacgacaccaggtagcctgccgcggggcagagagtggacgcgggaaagccggtggctcccgccgtgggccctactgtgcgcgggcggcggccgagcccgggccgctccctcccagtcgcgcgccgccgcccccgcccccgcccccgcccccgcccccacccccacccccacccccacccccagccggcgcccgcgcccgcccccgcgccgggcccggctcggcccgacccggctccgccgcgggcaggcggggcccagcgcactcggagcccgagcccgagccgcagccgccgcctggggcgcttgggtcggcctcgagg

SEQ ID NO: 14969 - DNA, 206 bp, Homo sapiens
  chr3:12330025-12330231
  hyper
gcagggtgtctggacccggggaagcgaagatccgcgtgcgtccgtcctgaggccgcgcggcacccctgctgaggaggaggtcccgttcgctgtccagagcccaggggcgaccgccgcttggggaccgggggaccgttcagcgaggggcgcgcttgtagctggccaggccctgtgccctgacgcgttgtgctggccctacgcccggc

SEQ ID NO: 14970 - DNA, 80 bp, Homo sapiens
  chr3:12330283-12330363
  hyper
cgcagccaggacccccagccgcaccccggggggctggaaaggcgaagtcgctgctttgtgggctcctgcaagtgccaggc

SEQ ID NO: 14971 - DNA, 94 bp, Homo sapiens
  chr3:12626586-12626680
  hypo
cgagttgggtcctttcgcaccagcacagacttacctgatctcggttgttgatgtgagaataaggaagctcccccgtcatcagttcatacaatac

SEQ ID NO: 14972 - DNA, 123 bp, Homo sapiens; identical to SEQ ID NO: 8482
  chr3:127794271-127794394
  binary

SEQ ID NO: 14973 - DNA, 289 bp, Homo sapiens; identical to SEQ ID NO: 8483
  chr3:127794860-127795149
  hyper

SEQ ID NO: 14974 - DNA, 44 bp, Homo sapiens; identical to SEQ ID NO: 8484
  chr3:127795229-127795273
  hyper

SEQ ID NO: 14975 - DNA, 49 bp, Homo sapiens; identical to SEQ ID NO: 6138
  chr3:129694299-129694348
  hyper

SEQ ID NO: 14976 - DNA, 1305 bp, Homo sapiens
  chr3:13460995-13462300
  hyper
cgccggcctgcctcgtctcacttcgcctctgtaaagcggcccctgggcttccctccaaaactcctttcctccagggtctccgttcctccccgcgacgctaggcgctgcgcttcgtttcacagactcacttcccacgccagggcgagggcggtcacagacaaacccgagctggggtcccagactcaagggaagtgcggcccagctgccccggcgccccctcccgggtcaggccggctcgggcccggccggcttgggccctgcggtcccagacgccgctccccaggccacccctcctcccgcacaacccagaacacgcgggtcacggccgccaggctgcgcccgctctgctcgcgcctcagcggcgcggaggcccggacggcgccatgacatgagcagtggtggcgacccacgcgcacccgccgctccgagtgctgcagcctagcgcccagcgagagcgcgccgcgcacctgccggctctgccggcctcccggcgcccgcccagcctctcagcgcgaaggcccagcccggcccacggcgcccgcccggcccggccgcgcgcctcaccagcggtagcagccctccgaggcctccagcgtgaagttaacgcgcgtggcccgcgtgaagggcagcagcactttggggatgttgagcttggccgcagcggcggaggggcccgccgccaacagcaccgacagcgtcagcagcagcagcccccggccccgcgccgccatcctcgccgcgcgtcacctcccgcgaccctgcgcccggccgcccgcgccgccccgttgccctccgctcccgcccgcgcgcgcgccaggccagcaggtgatgagcgcgggggcggggcgagggccgtcggcggccgccgcttcctgggcctgagcgcgggaactctgggggccgagctcgcggcgaccccacccccagcccggccctcgcgcagggacgcggggctgggggatgggcgcgcgcccgggcccccggagctgagggagaaggcttggggcgcgcccgcggggacccctggaccctagaagtcccaagggggagcccccggggcgccccgcagcacgcatcccgccctggtatttgcccctggcggtggagccaagccgccggctttggaccttgcgctctggcccggacccacggtcagcaaggaagggacacatgccccaggacatttgggatgcagaaaaccggcgcctgccttgtcccagcccatgcttcccagaagagggaccccgggctcgcaaagggaagccacctgctgaagcgctgaaggcccggggcccgctccccctc

SEQ ID NO: 14977 - DNA, 306 bp, Homo sapiens; identical to SEQ ID NO: 8491
  chr3:136538179-136538485
  hyper

SEQ ID NO: 14978 - DNA, 380 bp, Homo sapiens
  chr3:147086665-147087045
  hyper
cggtagcatgctctcttgtcaagaccgattgtgttttaggcaaacatttgcgcaaacataaaggcaaaggtcaaggactgttcagtcccagtatgtgctaattcacctagcgaaccaatggggcaaaagttgcattttatatgctcgcccccgccagacccaaagcaggagtcgctcctgctaatgaacaaaatcgcctctgatcagctcccttgtcaatttctcttcggctctctgatccatttctctgggcttcctcagaaatacaactggtaaagacgtgtttgccaacatctggatcagctccgcccaatttctggggcagcacatgtttattccacgtttctggtagcagaaagctaataataataaataaaatc

SEQ ID NO: 14979 - DNA, 123 bp, Homo sapiens
  chr3:156533976-156534099
  hyper
cgacggctgtggttactcaaactgatctcatcgcaggtcgtcacgacacgcgcttcccctcgcctgcacgcggcgtggcgtgagaggggccctggcagccggcgcgcccacccctgatccttc

SEQ ID NO: 14980 - DNA, 142 bp, Homo sapiens
  chr3:156534539-156534681
  hyper
cgccaaggaggccgagaggggcccaggggcgaggtcgactctcagcccgctgtccccttatcccacgtttcgcagcctgaggtgtttgttgtatatcgggaactgacacttttcggcgttaaaatgagggcgtcacctgctc

SEQ ID NO: 14981 - DNA, 523 bp, Homo sapiens
  chr3:157217201-157217724
  hyper
aggcgcccttgcagttactcagctgcatggtttgagactgggcgggagattcaggcaggctccgagggcacagcgagtggaatccgctcagctcagtgaacctgaagttgttcattgcggagccggtgccgggtggaagaattcaaggaatgcagcctgatgccaccggcagccccagagaccggtcaggtgacaggctgcacctcacccagcggagttacctcccagtgcaacgctctgtttcctgaggtgaaacacaaagcctgctccagtaaaggagagttgtttttaacagagaaaacagaactccctgtgttcgtgaaaatctatactttcccagggaagaatggggggcgggggcgagccacgcaggaaacaattttcaacagaactcaagcaggtgaacggaatggctgtagggagccacctctcagagctccaggggaggagaagagaactgcagcttcattaacacttccctctccctgagatctcacaaacgttttggaaacactgagtgttc

SEQ ID NO: 14982 - DNA, 259 bp, Homo sapiens
  chr3:157815399-157815658
  hyper
cgtttgtctttcgatttttttgtttgctcattttttcattgttaacaagatttttttttctatgcaagagtccatcgttgcagctttgcggtgagccaaactccgcggttccagcactcccctgtccagtctctctccagactcccccaaacccgctcctacaaaacccaattctaggccctcgagtaggaaaacgggcaggagccacggagcctgcgtgcctcgtgagatccctggtcctgcgtggagtctggctttc

SEQ ID NO: 14983 - DNA, 68 bp, Homo sapiens
  chr3:157815822-157815890
  hyper
cccagggctgcggcgtgctttttggctttcagtctgagatcggcgatgctggagttcttgctggtggt

SEQ ID NO: 14984 - DNA, 568 bp, Homo sapiens
  chr3:157815923-157816491
  hyper
ggcggaagccgaatccgcggccagcgtggcgagcggcagtccgaagggcggtgctgggaacatcatgtagggcgcgtgcgcggccaggtgcggatgcaggtggtggtgcgcgtgcgccacagcgctgtccagctgcagctgcgcctgaacctgaaaggacaagggcgtcacgttgcaatgactatcctagggtgacaacagaatagaaacagagcattaacggcgtccagcttggccagagagagagttgggttgtgtttgggcacggggagagggcatttggctgtgcatcttgttccgacagtgaccttctcagcctgttgctgaatctggggttccacatggatactccagtgtcccctgggtctccgaaactcgcttagggtaggcttatttccccggaccccgggaacccccttctgcaggaatgtggccgtctcccctgggaactgggctgaaatggtatattggaaagactgcgggtgaggacccttaccctcttctcttgatgctgccatgcatctcttaccccactaccaaaacaacggagtatcaacaagcaaactac

SEQ ID NO: 14985 - DNA, 140 bp, Homo sapiens; identical to SEQ ID NO: 6145
  chr3:157825408-157825548
  hyper

SEQ ID NO: 14986 - DNA, 80 bp, Homo sapiens; identical to SEQ ID NO: 8496
  chr3:159480852-159480932
  hyper

SEQ ID NO: 14987 - DNA, 943 bp, Homo sapiens
  chr3:159480975-159481918
  hyper
ggtggagggagaggaagcggcgaggaggaaggtggaagggaaatgatggtgcatgaccaccgagcacacgtcactcgggctcccacatgggcttgtgtatgtgcgtgtgtgaggggagggaggtccttcacagggtcactcgggcacttccgcgtggaataggaggcgccaggctcgtgctttgggatgccgggtggcttcggcggggtaacgagtcacgcagagacggcttgaggcaagccaagaaaatacgggtgtcggcgtgaaaatacaccactcttcccagcgcgccgcccttgctaactggctggacctgcgcccctaacgcccagtgcccccttcttttgggcctatcttggcccctccaaccccatcccagcctgcctcctgctccagcctgccgccgcgaaaaccgggactgcggactgcgccgcgcccggcagcctctgggcatgctcggtggcgggaccggctccaccgccaggagggcgcgtcctccctcccctagggcggtgacggcgcctgcagcgacttgccgccgcgccccggccaggcacaccttttggggaggcgggggaccaccctgcccggcgtgggccgagagcgccccccaccccgagccttccggcgggtgggaggaggggccggccagggagacgcggaggcgggagtgagacctccgactgccagcggttccttacaaagtaaagctcagctcgcgcgcggacccgggctcccagccgcgggcggggaaggggcggggcggggcggggccgggccgggccgggccggggcggggggtggtctcagcgcctagagcgagatgcgaaattagtagccgcccacccccttctcagttcccgcccccagggaattataatttcctgggaaagtgtctggttctcggagaatccttggggcggggtaaaggggcgcgcctggc

SEQ ID NO: 14988 - DNA, 370 bp, Homo sapiens; identical to SEQ ID NO: 8498
  chr3:16553609-16553979
  hyper

SEQ ID NO: 14989 - DNA, 78 bp, Homo sapiens; identical to SEQ ID NO: 9673
  chr3:16555426-16555504
  binary

SEQ ID NO: 14990 - DNA, 108 bp, Homo sapiens; identical to SEQ ID NO: 7344
  chr3:16925425-16925533
  binary

SEQ ID NO: 14991 - DNA, 74 bp, Homo sapiens; identical to SEQ ID NO: 7345
  chr3:16925583-16925657
  binary

SEQ ID NO: 14992 - DNA, 231 bp, Homo sapiens; identical to SEQ ID NO: 7346
  chr3:16925705-16925936
  binary

SEQ ID NO: 14993 - DNA, 256 bp, Homo sapiens; identical to SEQ ID NO: 7347
  chr3:16925965-16926221
  binary

SEQ ID NO: 14994 - DNA, 93 bp, Homo sapiens; identical to SEQ ID NO: 7348
  chr3:16926261-16926354
  hyper

SEQ ID NO: 14995 - DNA, 434 bp, Homo sapiens
  chr3:182880277-182880711
  hyper
cgcgccacacctccctacccgcagcccgtcctgtggcgcccgggactccagagtgcgtttagatgaaaggggaccgacacgtcagggccaccgcgggaagcgctgagggccactcaccggccagggacgcgaagagcgcggccgccgcgctgagctgccggggcatggtgggcgctgggcgaggttctgcagcgtgcggcgaagtccgggcaggccccgaatcggtgccagagaaacctacctgtgccggagaaacgaaaccacctgcttatgagaagcagccgaaaagcccgcccagggccgctgggcggggagggaaactccgccggccccctcctacccctacggagcagggaggggcggggactcggcgcagccgccggggcccgggcctctgggaccgtttaccgcacgcgcgtggtcccggcagcgcc

SEQ ID NO: 14996 - DNA, 50 bp, Homo sapiens
  chr3:182896562-182896612
  hyper
cgaagcaatcttggcactaacacgaacaccccatgaacgctcgcagggat

SEQ ID NO: 14997 - DNA, 253 bp, Homo sapiens; identical to SEQ ID NO: 9691
  chr3:184322331-184322584
  hyper

SEQ ID NO: 14998 - DNA, 292 bp, Homo sapiens
  chr3:184626085-184626377
  hypo
cggtcctttgccggacttgcagcaggggcaccctgtcttcttggcctgctgcgctcagccccttgtgggagggagcacatgagcaagccagtgtgggatccggctggccactccaagtgctgacacaggaacaagctccatgtgaggcccgcggtcttgaggggaatgcagcagcacccagacaagggtgcccacgaccctgaagccccagatggggtgttagtgtgctaattagctcttttagttttaccatccatagcctgatggacggcagcatgttagcagctcggtc

SEQ ID NO: 14999 - DNA, 112 bp, Homo sapiens; identical to SEQ ID NO: 8507
  chr3:193775965-193776077
  hyper

SEQ ID NO: 15000 - DNA, 147 bp, Homo sapiens; identical to SEQ ID NO: 10625
  chr3:194407289-194407436
  hyper

SEQ ID NO: 15001 - DNA, 154 bp, Homo sapiens; identical to SEQ ID NO: 10626
  chr3:194407836-194407990
  hyper

SEQ ID NO: 15002 - DNA, 102 bp, Homo sapiens; identical to SEQ ID NO: 10627
  chr3:194408028-194408130
  hyper

SEQ ID NO: 15003 - DNA, 105 bp, Homo sapiens; identical to SEQ ID NO: 7365
  chr3:196754412-196754517
  hypo

SEQ ID NO: 15004 - DNA, 118 bp, Homo sapiens; identical to SEQ ID NO: 7366
  chr3:196754758-196754876
  hypo

SEQ ID NO: 15005 - DNA, 643 bp, Homo sapiens
  chr3:197025639-197026282
  hyper
cgtcccttagtaataggcttggggggaggggtttcattacagaaggacatatgaaatagagacactggttaacttggcaagagtttgagggttatagtacaagatttttaagcctaactgattaattccgagtatggtatacttaagggtgggcagagaaggtttgttcattcattcgctcattcattcattcattcatttccctcaagcctgcgtccccgcccggtcagcatcgcaggtgttacccaaactctgacggtccctttaagaactcacccggagtcgcgccctccgaagctgagccgccctcggccagcgctgcaggtttgtttcgtgcgcacctccgggcggaattaccggccggctgggaccccgctcccggtctgagccacccaggttatagaaggggaatctcgggaagctttccaagtcactgcccacgtcttcgaacttcctcggggtgacgaggacctccctattaggaggtccagagagaatttgcccaaagttaccccgagtgagtgacagaactggaaacccggagatcctgtctttcaaaaccggaaggctcttcccagtaaacctgacggcctctgactgaggccgtatccattggctaccaaagggaaggccgaggaacctc

SEQ ID NO: 15006 - DNA, 989 bp, Homo sapiens
  chr3:24536360-24537349
  binary
cgcagtctccaccctcctccgccccctcctcccggcggcggggtcccggggagcgccggcgactgggcgtcgcgcgagtcctgcaaaatgtcaactccttgggcgaagagaggcggccgcagccagggccgcgccgcacctccccggtctctccacttttataggcgtaggaagctactgcggctggggcaccagagtccccgcctctccgggtcccccgcgtgcccggcccgccccggcccgcttcccgggcgctgtcttactccgggcccggggcgcctgctccgcgccgcgtctgcgaaccggtgacctggtttcccctccagccctcacggctgtccgacttgcgcggcggtggcggcggcggccaagagcaggcaaacccggctccgccaggggcgcagcgaggaaatggcctcctggcgcacaccccgccgccgccgccagccatcgccaccgccccgggctgcccagccggtacagacgccccctgccaggctccgggccagcgctccgacgcgctcacagcgcccggcttgccgaccccgaccccgaccccgagtcctacgcactcgaggtccccgggccggccgcctccgcacctgcctccccaggtgtgggcgctccccctcctcctaatcccggccgtgccctcccagggttggtgacggtgctgtgggtttggtggccgcgcgtccacccacccgattgcctgcgcgcataggtgcgggtttgggcgtcattactctagttggagaagaggaaagaatggggaacgagtgacaccgggaccggagggcgagtcttccaggagcacgtctcggccttctttgcccggcccgaccggcccgacccgtgccgcagcgctcctccctccgctcctaaaccacttgtggcgcgtgtcgggaatacagggcgctctggctcttcttggggcctccgctggtccgaccatctggcagctctcttaaccaccacggccaccccac

SEQ ID NO: 15007 - DNA, 222 bp, Homo sapiens; identical to SEQ ID NO: 10628
  chr3:25469458-25469680
  hyper

SEQ ID NO: 15008 - DNA, 130 bp, Homo sapiens; identical to SEQ ID NO: 10629
  chr3:25469874-25470004
  hyper

SEQ ID NO: 15009 - DNA, 413 bp, Homo sapiens
  chr3:27754928-27755341
  hyper
gcagaggagagggaagaccgtgagtctgctttcacctaggtttaaagcgaatcaaagacggctgtaaaaagggaaaccgggaccaaaaacagatttggagcctcgaaactctccattgaaggtttggaagatacgttgctgcagacttgaaaccggctccaaatccggcccaaacatgggctgaaaatatggcgcgctaatctgctgcttcccctcctcctcaagttctttctgactcttcccacctttcccagtttcccttccagacgtctgcggctccccactccacccccaggatagctactctacatcccgacaattcccagcttctacacccaggaggaggaattctggaaccacccagagcgaactcgtgccggggcggggtggggaccggaggaaggtcctgctcc

SEQ ID NO: 15010 - DNA, 275 bp, Homo sapiens
  chr3:27765542-27765817
  hyper
ctccgagaacgaggtccttaatgcacttagactctccagggcatttatcacggttttttttttcttttttgatgtgtgtgttcgcgcgctcgcgcgctcgcgtgtgtgtggtggtgaaacccaggagtgcgcgaagattttcagggtcaaggcacagccacaggggagggggcaagttgagactagtgggctggggcggtggccttgtaggtcctgggacagagtggccaggagcagatcgccagaaagctggtactgagcgcgttctgccctgc

SEQ ID NO: 15011 - DNA, 168 bp, Homo sapiens
  chr3:32279558-32279726
  binary
cgccctcaaagccaagcgattaagttggttcctcaaattgttcccgacaggaggggcaggaaataacaccgggctctggcggcggccgcagcaggagggggagaagagcgggccgtctcccgggcagtgctggcggcctctcatcgatctcgggtctaaggtccggcc

SEQ ID NO: 15012 - DNA, 217 bp, Homo sapiens
  chr3:40547367-40547584
  hyper
cgctgcaggacccctgcctggggccgcccgctcgggcccgtgttgtctcaggcagtagggacactggcgctgacggcgggggtaggaaaccacagagactggcaacttcccaggttcctagagaggaggggcatggaaaacgcacttccggcggagggtctcaagctttccccggtgtcggcggcaggtggaatttccacgctttatctgcgcctgc

SEQ ID NO: 15013 - DNA, 132 bp, Homo sapiens
  chr3:43935666-43935798
  hyper
cgtccggaaattgaagctaataagagcactgacttccctgggcggcggttgaaggctacctgtgtggatctgggcacagcgaagagcggagccttaacagggtgagcacgccggttgcgcgctctccagagc

SEQ ID NO: 15014 - DNA, 427 bp, Homo sapiens
  chr3:44038922-44039349
  hyper
tattacaaaggtcgtttgttgttgttgtttttttaaaacaccaagtaaccccccccccccccccccacggacttatactttgtttatgagatttctccaaccttggtggtttggagaaatgaggtgggggaggggaggaccaagggcagcaagacgtccactacgaaaataagatacttactaatttaatagggccgttcctttttacataagatgctcccccaccccccaccaatttacaataggtaaactttgagcttcctcaaagtttcgctatctagcgtttatgcccgaagctttacgaataaactccctttccaggtaaacctgcccaacccttgtcctatgcccagcgaagcccaggtacgatgggtcaaggacccctggcttccacattgtctgagtcacgttccagttggaaaggcca

SEQ ID NO: 15015 - DNA, 42 bp, Homo sapiens; identical to SEQ ID NO: 13993
  chr3:44063232-44063274
  hyper

SEQ ID NO: 15016 - DNA, 366 bp, Homo sapiens
  chr3:45186931-45187297
  hyper
cgtgttggtcccttcccccaaccgaaacaactcgaaattcacacatatccccggaacaacagcctcctgccctcaaagtccactgccaaaaagtgcgaggggcgcgggaatgtccagtctctgcggtggcgcagatgcctggcggctttctctgggaccccctaaaagaaatccgggcgctttcatttttgcaccaacgctcttcaactttaggagagggggaatgcagcgtgcggacgggaaaaaggggatctagtgggaaatgcggacgtgaaagcactttttttgcaccttctctctggaccaggcgaggaggtagagggcgagcctggagaggaaagatctcttcccacaccctgcctgggt

SEQ ID NO: 15017 - DNA, 485 bp, Homo sapiens
  chr3:49027062-49027547
  hyper
cggcctatgaaaccttgcacatcaggcagcttcttcctaaggcctgcctgactccggcgagacttcccgggagatccggaccgaccgcggaaccgagctccaagaatgcctgcgaggaggctgtgggtcctaccctatcgccgcttacgcagtcccagcctccgcggcgcccccaaatgccgcactgttgagtcatctcagcgctgcctcctccgcgctgcgctccccacccccgctcctggagcaagaagatgcagacgatacttttcccggaggcaagagggcgtcttcacgcaggcaccgagaagctcccactagtgtatgccttaatggtgccgctcttgtccgcgtctacgcttgggaccttggcttctgacttggagagtgtacagctctgcccgacggcaacccagcttgggaagagaagccccagcgtgggctggggctcaaggcgcaggaaggccgagcccggcgcggacgcaggc

SEQ ID NO: 15018 - DNA, 395 bp, Homo sapiens
  chr3:49027805-49028200
  hyper
cgacggcgaggacgcaccggtgcgtccgctgtgcaagccccgcggcatctgctcgcgcgcctacttcctggtgctgatggtgttcgtgcacctgtacctgggtaacgtgctggcgctgctgctcttcgtgcactacagcaacggcgacgaaagcagcgatcccgggccccaacaccgtgcccagggccccgggcccgagcccaccttaggtcccctcacccggctggagggcatcaaggtgaggacctccctgccccgccgcgctccaggccctgcacggctgagcccgagaggaccggcgctcagcccgggtccccacgctgcccccggcgctgctctgcgtcggtcccgcgcgctcccactcactcgcctgctgtcgctctccgggccggggc

SEQ ID NO: 15019 - DNA, 94 bp, Homo sapiens
  chr3:50243562-50243656
  hyper
ttcgattggccacagcaaatgcgtgcgtttgtttacacccaggcagggggaggccaggggagggacctgcggggacccgcccttttccccccac

SEQ ID NO: 15020 - DNA, 77 bp, Homo sapiens
  chr3:52415754-52415831
  hypo
cgcatcagccgcaccctacgccaggcgctgggcaatgcactcctgctgggcgtgggtggcagcggccgcagctccct

SEQ ID NO: 15021 - DNA, 572 bp, Homo sapiens
  chr3:53527829-53528401
  binary
cgagcggtttgaaagaccttggctttgacttccctgtacctgcctccaaacacacgtgggggcggggtggggtggggggagatattgccccccatccccgttgccttccgcgacgccaggccaggcgcagggcaggggagaagatggggggcgccctggattcgcggttccagctgcaggcagttacctggggtagtgagtgctctctacagacccgggctaccccaacccccccgattccagaaagggccggagaaaagcagggggcgcctgccccgctccggagcagccagggagcccggccgagccttgacgaggatgagctcggagaccgcagcagctaccgcccgctagcacctgagctcccagggggcggggcctcctccaggtgtgcgcagaggaggccggcgcggagtcggggccggcgcgggagcccgagctgtcccccagcccagaaatgcgcggggaggagcggttcatccgcaccccagcgccgcgggagacactggcgccgcctgcctcctccgggtcccggggggagagcgcaccgtgcggcgcggagggggttaacc

SEQ ID NO: 15022 - DNA, 247 bp, Homo sapiens
  chr3:53879786-53880033
  hyper
cttccgctttgggagccccaggtgttgctgtccgaactcacttggtggaaacagacatttaccagaaagcctggggtcgggcagcgggcactcctaccgctctaaccccgcgtagctgaaagaattcgctccctcaaaggagtcagtgagcttcggcagtctgcgttccacccgtttcgcttcgcgcggcggggcgattgtgtaaagcgggcccgggtctcggcgtccagcccggccccaaacctcc

SEQ ID NO: 15023 - DNA, 625 bp, Homo sapiens
  chr3:57994555-57995180
  hyper
cgtgagagcatcaagctcgtgtccatcggtgagttctctggccgggcccaggcgcccactgtggtgccgacccgcccccgcgcgtgcacccctgcggagggcgaggatttcccgcagcgcgcccccacctcggagataagggggagtcgtccccaggggtgggttatagggggcctagaccccctccccggtgtcttcccctgggatgggacctgttgtgatcgctccccgccatccgccccagcagtgcacctttggctggctaagggttgagggtttgggctggggtcacaggaggagaggtggagttgttgcatttctctacacctggggcgcccctatgggagctaggggactagaaaccctcgttcgctgtccccgggggcgggccctagggtcagatgctccgcggagtgctctccctgctgcgcccaggttggtgctctcagaggcagctgaatgggcgttggctcggaggccgggccgtgagacctgaggaggaaccgttctctgcgcctggggcctccctgcccaggtggagacagagacctggtaccttcccctgccgtcgctggaatgggtgtgggccccgaggttgcaagggtaggcgcgggtgtgtgtcctc

SEQ ID NO: 15024 - DNA, 783 bp, Homo sapiens
  chr3:66550318-66551101
  binary
cgcacgacgcgtgctggctaacccccaaatctctacgacccacgctcgctcgtctccagaccccacgaggcacgctcttcttctccaggctctctcgcacgcctactcccccggacctccacgcagaatctcccttccgccactccaacctgacagtcttccaacacgcacaagcacgcacaactccacacacacaacccagtccgcaccccctccctgagtacgaacccccgccgctccatccccaagtgacagagccccggggcgcagagagggcggaaagggcggcactcacaggctccgcgtccaggagggcaggtccccgggcaacgcagccagcccgcgcccaccgcagtccagcgagtccccagcgcaagtgcaggcggccgcgcagggcgcccgcgggccggccgcggcggtcaccggctccagccgaagcaaaagcagccagagaaggagaaggcaaggcgagcggcgcggggccccgagccctccccggaccggccgcgccatcttgtctggagcgcgctgcgaactccgggcgcggggactgtgaggacccgaacggccgcagacgcgggcgggcccgcggggcgctccgctcggctctagactccgcaccggggcatggcccccgccccaagttctctctgcggccgcggctccggcactcagcgtgcccccggtgcccgggccgctccggagcacccggcgggggccgcaaaccccgcgcccatccgggccggccggcccgcccgcgctagctgcgaactccgccgattc

SEQ ID NO: 15025 - DNA, 222 bp, Homo sapiens
  chr3:69434926-69435148
  binary
cgagtgcccggcatcctgctggggccctcgggtgccgcgcgctccagctcacctggtacacgtcctgcagcccgcaccacgtccgcagcacctggtggcaagcccgcagcctctccgtgtaccatctccgcagcgtggacacggtcaagttccatacgaagcggctgccgctgaacagcaggtcctccacgccacacatgaacaccgaagccatgcctcctc

SEQ ID NO: 15026 - DNA, 1710 bp, Homo sapiens
  chr3:71113110-71114820
  binary
cgtttccactgaccgtccttcatgcagttctgacagttgagttagctacattcagagccggttcagctgggagtaccccgtggcaattcctcagtctgctgcacgtccaaacccaaaccccgctcactacttaattaaccagccaagtaatgcaacagaggcttagaatccccaacctgccagagtgttccattcgctcgctcgcctgctccggtgtggggctctgtgcctctccctccccctttactgtgtgtgaactcgtcgaatttgaacagctaagctgaaaatagcctagacagatatagaaacaaactatcagaagcaaagaaacatccacatgggttacactgagatggaaggctccttgtatatttcacacgctctgaaagtgacagaaatcacaccccagatacgtcccccgaacggagtgatggcgagggcttcaccaaagtggctgcgtgaaggccagaccggcagaaaatgaatcgcaaacgaaaaagagagagagagaaacacacaagcaggacttcctccaactctcaactacaccccacccatgaacatttaaaaaaagagagcgagagtgtgagccaaagagcaaggggggtgggggggtatctctctccaggacccacaggcctgcagctcctttttcttgcccctccactccctccccgcctccacttccagagcgcaactcctacccaacttggtaaacagcgaggatgaggatgattttttaaaagactcaacttcagaaccctcgggctctcctgccttccccagcgaggcccccaggaagcgggcgccgcggagccgggggaaggagagcgaaaccggcaaagatcaatcagaaggaccaacctgacactctccatgtagccgccaggcgcgcggagccgggctcggggcgcccgcgcgggccgggcgtggggtccggcggcctcggcgtgcaggcggactgcacgcgcgcaggggcgctccggctcgcgggctgacaagacgcgccgcgccgcgcccacccgccccgccctgctccaccaatcacaacccgcctctaaacaccccgcgccgcgccgcgccgcgccgcgccccacacaatgggctccgcggcccgcgccccgcgcccgcgcgccccggccccctccgcgcggcaggtgaaatcacgctcgggtgccaccctgcttttgtctggagagcaactccacttaatagctgttaacccggtgacccgcctccggctgacgtctgggtcggccgggctcggcgcgcaccgctccctctggccggggctctgcggggccggggctgccggcggggcggcgtgtttgtttcgtctttgagactgacaaagagttgtcctaacctttccgagaaacccgggaggccgaagaggggcacccggcgctcgcggcgccaagccgactgctccgagcaactgttcggcttcgggagggtacgcaggtctcctaggcagcgcagaaaagcgcttttcctcgaaaacctccctgggaggagaactttcgcttcacgtcgggggtttcacagagccttggcctccccacacccctttctttcccagagtcggtctcgccaaagtgtgccagtgcgcaccgaggaaaactaagccgacgcggggtggaaataaataacaaccaaacgtgcctcgtcgctgaaccaggcgacttcccctctagaacgacagctgcc

SEQ ID NO: 15027 - DNA, 77 bp, Homo sapiens
  chr3:71187313-71187390
  hypo
cgcagaatggtgacgctgtctggagaacacacgtggaggaagaagcgaatgcttctaattgcctcaaaatgggattt

SEQ ID NO: 15028 - DNA, 123 bp, Homo sapiens
  chr3:71187419-71187542
  hypo
aaataagaacacttccaacatcctttataaataagcctttacaaaatattgttagctgttaataatacatcattatcaaaaatggaaagtcatgaatacagtgcatgtaacctttgtattcac

SEQ ID NO: 15029 - DNA, 1327 bp, Homo sapiens
  chr3:71630573-71631900
  binary
cgctcccggtgccttatcgctaggctcgcgccaccccggctggctctttggggacggagaacccctagtgccgcctggggctctccggtgtccctggaccccgcgcccgcggccgcctcgacttacccgcggagtccggggagggagtaggagcgccgccttcacgcccgcggaggaggcgccggcagcaccatggtccccggcgccgctgccgctgcccccggcccgctcgctcgctcgccgcgcgctctcttcctcttacaaactttcgggttctgcagtcgacaagaaaccggggcgaccctcagcaagtcttccccgtgcaggctggggggaactgaaggggacgggacgggtgagtaggccgaggggccaggacagagagggcagcgggctccgaggacccgcgagtgcgcgtggagggaagagaggatgcggctcagggaatccctgcaaggatccagagaccgggaaatcggcccgagccaaagtctcagcaccttccccaggatctcacaaagttgcaacaacaaaaaggaggggggaggaatagggagaagggggtgggatggggatacgatcacgggcgcaaggtttggagttacaactgtttatttagtccttattctcacagggggcgggagctgcgcgggaatggggggctgcaggcagcgatttcgaagcaaacacatgggaggggggcatgcgactttgtttccgggagcggagctccccagagcccgtgtgtgtcactgccagtctcccgggaccaaggcggagctcacaacaggtggggaggggggctcgtcgagggccaaaaagaagaaggaatctaagtttccgagcgcgacgttgtctgaaaaggagggaggcgggaggcgggggcgagggaaggcggaggcagcaaatgaccgcgaccccgcggcaactggcaaactcctcggctcccggcgccgccgccaccgccgtggtccccactcgaagcgcacgccgcctcggctcgctggctccagggagtcgtctcggcgggacaggaatagagcgcagggagctcgggaggaaggctgcgcgcaagcgagggacggagagccatcggccgccaggacagggccggagggacgaggcgacacgcgcgcgacgcaggacaaatcggagcttgggaaatctccccgtcccccaagcttcagaggggggtaaaatcagaaaatgtgtgtgatggtgggagagagatccgggcgcggcgactcctcgcagcgcatccggctcccgcacccacccgtggatctggccacggctgttgcggactcgtctcgggaaagcggaggcc

SEQ ID NO: 15030 - DNA, 102 bp, Homo sapiens; identical to SEQ ID NO: 8524
  chr3:99594790-99594892
  binary

SEQ ID NO: 15031 - DNA, 269 bp, Homo sapiens
  chr4:106067220-106067489
  binary
gatagagacgcgggcctctgagggtaaggtgggcgcaagcggaggtgtggtgcggggagaggtgccagtgggtggaggcgggggccagagcgagggcacgtgcgggtacactccggaggaggtgggtgcgcgcgggggcgtgtgcgcgggacctcgaagtggtggtggagtgcagaccagcaaaaagtttcaaagggaaatcttagatgtcacgtctttgtccaggcacccgtgccatcccaacctcccacctcgcccccaaccttcgc

SEQ ID NO: 15032 - DNA, 153 bp, Homo sapiens
  chr4:119809913-119810066
  hyper
cgaaggtgggccgagcaaaggagagtgacgcaagagtgggctgtgtcctggatgctgcgagcgcctctgcctccttgagaatgagcccattagccgcacaaattcgcagcaggcggctggggcggcggctggggcagcggctgcagcagcggc

SEQ ID NO: 15033 - DNA, 1537 bp, Homo sapiens
  chr4:124317751-124319288
  binary
cgaagttttaagaggatgtttattacacgagtctgtagggcaacatttccaagttggtacacataaacgaaagaggaaacgatagttaaggaaatcctgttccaggttttcgggcagcccgagtgattgacacatgatatcaccggaggcgtgtcctggagtggaggtggaggtggaggcaaggagctgaaattctgcgtagccggagtgagaccgctctgcaaaccactgcgtgctttgcagagtgattatcagcacagttccctgccctggataaggaacagctacagtcgctgttaaatgtgcctgaaaagcaatttgcaatctttgcattaggtaagtaccgtttccttccgtagacattttaggaaagataaggtgagaaatgttgacttttgcaaggaactgaacatttatttatttgaacttgctttccagctaaggttactggttgcatttcaaaacaccggtagcattcccactgctaaaactaatgctcttaaagtaaatgctaccgctaaaagaaaaagcagggtccctttcacctttccttaaccgaacagtagacgtttaaagtctgaaacgatcgaatttgtgaaacacagagccgttaatgcctttatgcgaagaggggctagcactcggtgtgtggaccaaatgcgtgtttgtttaggcattgttggcgaccgaatcccgagtgaagcattggtttaaaacctgaatttcccgtctctgtgtattgattcctaacgcgcagaggcgttgcttgaacgttgtttgaactcctaggcattccagggggcaaaagcacctcggcaaaaacgtgcaggactgcatgttactttggttcgcggctgacacgccgactgtgcgccggcctgtcaatcaccgggagcagcaacagggagcacatggcaacgggctgcgggcgagctggccagcggcccgcccggggtcccagcccttcgaagaaagggacattcacgagcttctatctctaattctctgtcgcaggcatttcggccgtggaaccccaggctcggaggactgggtgtgagcgctgcccgggagaggctgacctgccgggaccggagtgcccggggacgctgtgcccccacttgcccaacgtgcggaatcggctaagcgcgtcggcctgcgcggggcacaagggacgacgcccgcctttctctctccgagaaggatccccaaacctcactctcttcactcctccccgctaaaaaaaaaaaaaaaaagaaaagggtaaaaaaatccccctccccctcccggccgcggcagcctctgcctggcaggcgcgtgctccgaggtttcgccggggtactgcgcggctccgtgacccacccgccgacggcggttcgggccccgacccgggcgctgcggagtctcgaacgcccgtgacgtggatttttcgctcgtcaggaagccgccatcccttccttcgttccttgcgaggagcgactagaacccgagttctctgagcacaccgtgccgtcagctggcccgtcacgcactcgactcc

SEQ ID NO: 15034 - DNA, 137 bp, Homo sapiens
  chr4:140970253-140970390
  hyper
cgcatctgctgctctgtgattgcacaagagaagctaccactccttttcttcacaaagaaaaaaaaatggcatttatcgcaagtacagcaaggcatattaggattcacctcccccattctttcttccctcttcctcct

SEQ ID NO: 15035 - DNA, 212 bp, Homo sapiens
  chr4:140970419-140970631
  hyper
ttggaaaagaaaaggtgggagggagaggaggacccaccggtcacagacaacgctgtgggattctctttcttcagcttttaccagcctatgggggtcaggatgctattggttcagctttatgtgtgatatggtgcctctcacttagcaacagcgagcaggagaggcaggaagcaacgccacctggctcagcaagtgtgcggatggtttaaaac

SEQ ID NO: 15036 - DNA, 824 bp, Homo sapiens
  chr4:142557243-142558067
  binary
cgggtgtcttcttccaacatttcccctagttggacttcaaagtttccttcttgcagcctgtgcggggaccaagaggccggtctagagtagccgcccagcatccagatccgacatccttttccctttcctcaggaagacttggatgcgcgccagcccagcccgggtctccaggttcagctgcggaagcttcccacatggtgcccgtcgcttgggatgcggctatccttgtgccttctctgcaggtgtcccggcaggtagaggaggagaccggtggctggtgttcctgcagggcggggctggggctcctcgatgtccttgcgcttgccctgcaagttctgcgccccaggccccggcagggacggaaacaggccgggaagcagtgacacctggggcagtcagtcatccaggagccgccgccacccgccccacccccagtctccgcgggaggtgtttgtcttcgcctatgctcccggctctttctctttcacttttcttttcgccaggggttgggactccgggtggcaggcgcccgggggaatcccagctgactcgctcactgccttcgaagtccggcgccccccgggagggaactgggtggccgcaccctcccggctgcggtggctgtcgccccccaccctgcagccaggactcgatggaggtacagagctcggcttctttgccttgggaggggagtggtggtggttgaaagggcgatggaattttccccgaaagcctacgcccagggcccctcccagctccagcgttaccctccggtctatcctactggccgagctgccccgccttctcatggggaaaacttagcc

SEQ ID NO: 15037 - DNA, 332 bp, Homo sapiens
  chr4:143768278-143768610
  hyper
ctgaggagaccagcttagagcagccctcggccacccaccgccagttcccacgtcgcggcgggtgactgaggccgagatgctcccaactagcgtatgacatgcctttgatatcccgggtgcgtggggacaaatccgccctgaatgtgttggggtatcaggaaaacggggtatgtaagcaagcagtctggacggagactaaaactcccccacttcctagcccctaacaagcccacaggggaaagcacgcaccctggttattccgggctgtgtagggtgtggggcaaatgactctccccatctgcgctttacaggtgccacctggcggctctctc

SEQ ID NO: 15038 - DNA, 177 bp, Homo sapiens
  chr4:153856957-153857134
  hyper
cgcgtgcgtcggggggcgtgtgcgggtgtgtgtgtgtgtgtgcgcgcgtgtatataagagtgtgtgcgcgcccgtgtgcacaagagagggtgcctgggaggctgtcgcaaaggctcctttgtgaaaggcacttgcaggttcagaagccagcttggcgcctcctctcgcccgttcccc

SEQ ID NO: 15039 - DNA, 46 bp, Homo sapiens; identical to SEQ ID NO: 10647
  chr4:154143770-154143816
  hyper

SEQ ID NO: 15040 - DNA, 214 bp, Homo sapiens; identical to SEQ ID NO: 10648
  chr4:154144184-154144398
  hyper

SEQ ID NO: 15041 - DNA, 201 bp, Homo sapiens
  chr4:156587883-156588084
  hyper
cgattgggcggctgcagagaccaggactcagttcccctgccctagtctgagcctagtgggtgggactcagctcagagtcagttttccagaagcaggtttcagtgcagagttttcctacacttttcctgcgctagagcagcgagcagcctggaacagacccaggcggaggacacctgtgggggagggagcgcctggaggagc

SEQ ID NO: 15042 - DNA, 145 bp, Homo sapiens
  chr4:156588167-156588312
  hyper
gaggaggcgggcagaggtctgaaaaaatcgaatgccttatggaaaggaactgcaagggttcctttggggtgatcaaagagggagacacagacacagagagacaaaggcaaggaggactgtctgggagccacgcgggcgatacagt

SEQ ID NO: 15043 - DNA, 56 bp, Homo sapiens
  chr4:156588401-156588457
  hyper
tgcactcgcgcggggaccgacaggtgccactgcagggtcccctctcccgctcactg

SEQ ID NO: 15044 - DNA, 353 bp, Homo sapiens; identical to SEQ ID NO: 6166
  chr4:15780742-15781095
  hyper

SEQ ID NO: 15045 - DNA, 268 bp, Homo sapiens
  chr4:183839058-183839326
  hyper
cgcagcgtccccgtggggacccttggccggtggctgggtcacagtttcacacactggatggggcagggaactgggtccggcgggggcgctgtgcctcgaggctcagtgcctcgaagctagatttgcatttggctgcgcctgacaggctttcagtttctgctcaaattgtgcggaagggcctgaggtgtttgctaaagcctgccgcgccctgctcgacccgtatcaccgcacaggcaccccacctgcatgttacctcctggtaatgctc

SEQ ID NO: 15046 - DNA, 52 bp, Homo sapiens
  chr4:186050065-186050117
  hyper
aggggtgaccgagttacgccgcgggcgctgcctgagcaacgctttctaccgc

SEQ ID NO: 15047 - DNA, 194 bp, Homo sapiens; identical to SEQ ID NO: 8534
  chr4:187026475-187026669
  binary

SEQ ID NO: 15048 - DNA, 609 bp, Homo sapiens
  chr4:25863681-25864290
  binary
cggtaagcgtgttacagagaactagatttctttccggcatccgcaacttggctggagtgaccaaggaggagttgaagagcgctggagatgcgaggtgcgttggcagaaaactgtccgggccgggaggacccggtggaaactaaaaggagggtcgacgcgggtggcgggcgccgagagtaagaggcgaagttgggcacgggaaggaaaggagctgcgagaagattgagagggaagcccaggaggggtggggggttggggggtgctggagactgcgcgcggcggggcggggagcgaactccgggcggcgaggctcccgggtggagtcgaggacaagaaggggtctcgagggtaacccgacccgggtctagagagagtccaggagggaaaggaatgagcacgagcgagagagcagcttggcaagtccggtccaagcgcccctctccacgcccggggtacctatcccaggtgccgggaacgcccggggcgcagcgacgaggaagagagaaaactagcagcggcgtccccgccccgcgtggcgggtgtccccggccgcccccacccgcgtccccggggccccgcgcggaggggaagacccgggcagggtccggc

SEQ ID NO: 15049 - DNA, 650 bp, Homo sapiens
  chr4:41363167-41363817
  binary
tgcagtctagctgcgcgcgtgagggcaggaagggatcccctgcgcgtccatccttcctgcccgctggcctcgcaaatctcagctagcgccgcttccaggcgctgccaagggaagcgcagtgctagcaaagcgttgcaaaggcgcaggaagcgcgagcccccagagacttcaccggtgctcgcatttcggggtatcttgcttctggtcccacatttcgccccttgtccccctaccccgcacccttccggagcagagttggcagtgtcttcacggaggcgcatacccaccggagcctcttgctgtattcctggcaccgggtcaggtgtgaggctggcacagtgcgcagggcgggggtagcttgcaagacccacctgcgagcacgcatccgcatagacgctgcccagcctttggcaacccccgcccctctccatcccaaggactgcagggtcggttccgaagtacgggctacccggtctggttggcatatttcacttcttaaataactcgttggcaggccagggaaatcactggagctctcggctctcagtcccggaagcgctcactgggtgatcctgattcacgatgtctatcagtagatgcagcttggtagccccgagctcccgaaatgaactgtctgcggggttcaggac

SEQ ID NO: 15050 - DNA, 1067 bp, Homo sapiens
  chr4:42657902-42658969
  binary
cgatgatggcaagatagatttctgaaaaacatgttattccaccctctgcaggattcaagtacaggtttatgggagaggacaaacaaaccttgggatatttacagtcttggctttgacgcgagcaaaatcaaataatatttacagagtgcctgccacatggcaggcaggatgttgagggctcctcggagacgatgaagagtctgggccctcggaaagcttacttgcttctaccccggagcatctgttgctcagtgttgacaaccatggccattcaagagctggccccaggtggagcaaagaaaacagcttccacctggctgaaaagtcagctcagctggccgaagtgagggtttcgggcaaaagggaaacacaaaaacgaaacctcagacgcgagccggtgggactccgctgcaggaggcagaattgcagaagctgtaatgcagggaacccactcggcacccgaccccgatgaaggctccccgcgcttcgagagccaagggactacggatcaaaggatcctgcagccggggaaaagcaaactcgcttcgctgggagctcagatagggggttgcaaaacggtgggcgccggaggcaggggcggcgggctggggatctgctgagtggaaatcgaactggtggggagggaggtgggcagggcgagtgagctcagtgactgggacctaatggtcacactgcggtgcaaagcacgcctcggggctcccgcggagaacacccattcgagggtactggagcctggaaagggtctgcgagtacactgggggcagcgcggggggaagggtcccctaggggccgggcgcgacagtcggactgccgccggggaagaggtaggatgcggtctcttccaggataaacacacacgctcacacacacactcgcttcccgaccccgggctagccccgagcctcggcggccccttaccttcggcgcgcgagcggatctccgacacggtcctccgcatggtgggcatcgcggcggcggctgcaggtgggtcctcagcccggactctgcacctgtcacggcgtggtacacgcgggagacccggctgc

SEQ ID NO: 15051 - DNA, 78 bp, Homo sapiens
  chr4:4417408-4417486
  hypo
cgtttctgagccatctcgtatgccagccctgagcggggccgccactccacaggtgttggccgcatcaggtcttgcagg

SEQ ID NO: 15052 - DNA, 94 bp, Homo sapiens
  chr4:47839530-47839624
  hyper
aagtccactagatgcttggagggcaccgtgcggaggagggactctgcaggaaaggtggcatcacccccggcatggagaccggggtctccggatc

SEQ ID NO: 15053 - DNA, 375 bp, Homo sapiens
  chr4:47839675-47840050
  hyper
cggacgccgggcgaccggggtggtggtcgggaccagggccgtgcgcctgggaactgggtgcagggcgctgagcgcggaactgtcagagcgggagctcaccggcggctggggaaggaggtggcatcgggcggaggagaggacgggggcgggaggggctgaccctgaattcaccgggactaagaggccatcacacctggctgcggtaggacagcgaatcatcgatcttaccggctttggggacccggctctgcggcagcgctcttccggagcgagggcaggagactgtttcatggataaaaagtctcgcttattcttctgtccacttttatcttggtcgcttttctctcctctacgtgtcccccggggaggcactac

SEQ ID NO: 15054 - DNA, 186 bp, Homo sapiens
  chr4:4854484-4854670
  hyper
cgtgttctaggacggcagggatgaatcactataggctggctctctctagctcagcccggcctgctgcggcctggggccactgctcctgggtcctcaggactgcctgggggaaggtagtgcattgtgcagcgcgcggtccagaagtgaaaagggaggcgcggagataagctgccggcggaagttccc

SEQ ID NO: 15055 - DNA, 230 bp, Homo sapiens
  chr4:6058789-6059019
  hypo
cgcatgcggaaggctgacctcataccccgcagactggccagagccacactgacatgcttttgttcattccactctctctgcctgcgatgcccttcccacgtttctttgcctggtcgtatcctcttgcataagtcctgtgagcacacggcaccaagtccgtcttgtcgctgtggcaccctgagcctggcacagtgcctgtcacatggggacagggggactctgtgaatccc

SEQ ID NO: 15056 - DNA, 133 bp, Homo sapiens; identical to SEQ ID NO: 6184
  chr4:76555905-76556038
  hyper

SEQ ID NO: 15057 - DNA, 448 bp, Homo sapiens
  chr4:77610260-77610708
  hyper
cggggggaggttaattaaggcacctttctgattgaatgggcagagggactgagggtgtgtgcttcggtccggtccccttaataccgtaaggacccaaggaccgcggaggggcgagtggagcgcgacgcttccaccccagaatccgttttcaaaccttagggagccttctttgccattgaaatgcaaatccggtcctgagctcccgggccaatccgggaggcttcctgtgggattacctggtggcgagcgagcgccgagccagcgccgagccagcgcggcccctcgggtgcggcgggcgcggggtggactgagcgggcccgggcgggacgagaggtgggcgagcgccccgcaccctcggcgcgccgcgcgggatcagcgtcctccagccgcgctgccccggcccaccgtgcagctgtagccgcggcgcggtggcgcggtggcgcagggc

SEQ ID NO: 15058 - DNA, 51 bp, Homo sapiens
  chr4:83839357-83839408
  hypo
cgaaggaaagacttggcgctttggacagttcaacgtcagtatggtgtcagc

SEQ ID NO: 15059 - DNA, 48 bp, Homo sapiens
  chr4:84030839-84030887
  hyper
cgggcttcaggaggcggggagtgggtgggtgggcttcttaccttctct

SEQ ID NO: 15060 - DNA, 229 bp, Homo sapiens
  chr4:84030916-84031145
  hyper
agcggcagctgcgcgcggggctcttcgatcaaccctcaccccgccggattacgcctcccgccagcccagctctgggacccctgggtctcctctgctgggaccagacctgcctgccggtaaattcttaagagcagcccgcgcagaatctatcccaaggagaccgcccatttttgctggggcaatcagggaactgcgtctgcggatggctgccctcgggggaccattcgcc

SEQ ID NO: 15061 - DNA, 215 bp, Homo sapiens
  chr4:84457821-84458036
  hyper
cgctggttctcggcttcatccttttaccttcggtcttcggagtgtctctgggcatctccgagatctacatgaagatcctagtgaaaactttagaggtgagtgccgggagggatgcagccagccccacaccgctgcgggctgagaacccgggggtccagttctcaaggtcagtggtcgcgagtcaggggtgtgtgtgcgcgcgtgtgcatgcgtgc

SEQ ID NO: 15062 - DNA, 171 bp, Homo sapiens; identical to SEQ ID NO: 8556
  chr5:10564301-10564472
  binary

SEQ ID NO: 15063 - DNA, 738 bp, Homo sapiens
  chr5:110847638-110848376
  binary
cgcgaagcctggtgggacgcggctgcccctgcgctgtctgtgcacctcctaagaaccaggaagcgcggtgacctccaaagaacaggactgtcccaaatcaagcgggattaccaccgcccctctcccatttaacagctgaggacactgaggtctaatggattccaagtacttaaataggtgagcggcgcgcaggggcgagttgcaagccctgggatccttccagctcgccgcttcccctcccaggggctcaggtttctctttcatctgtgaggtcctctcccgcccggacgccggggcccgccatccccaacgtccaccgcgagctccccagatccatggtctggagcaggtccagaagacgcacctggcaggacgccccgggcgccacagtcgccctccacacgggccaccccaatcctgccgcggctccgtggctctccttacctttacctgaggtgaagcaaggacgtggaagcagctacggcgcgctaccaagcacctcacaccgctctcaacagtactgctcagcctcccggcccgccgatgcgcaggcgacagcagccaacttgtaagtcaccgctggtcgcagccaactggaaggcacccagcgcctcagggcaaggcgggccgagcccccagccccgccccctggcccgatcccgggggctccggggagggggggctgagaggaggtggccggaacaacgtgcgcttgttcggattggctggcgcgggagc

SEQ ID NO: 15064 - DNA, 58 bp, Homo sapiens; identical to SEQ ID NO: 6193
  chr5:114515671-114515729
  hyper

SEQ ID NO: 15065 - DNA, 132 bp, Homo sapiens; identical to SEQ ID NO: 6194
  chr5:114515769-114515901
  hyper

SEQ ID NO: 15066 - DNA, 44 bp, Homo sapiens; identical to SEQ ID NO: 6195
  chr5:114516274-114516318
  hyper

SEQ ID NO: 15067 - DNA, 218 bp, Homo sapiens; identical to SEQ ID NO: 7414
  chr5:132082800-132083018
  hyper

SEQ ID NO: 15068 - DNA, 219 bp, Homo sapiens
  chr5:134527185-134527404
  hyper
cgcgggcctcaggtgcgcgctccccgaagctctcctgccacctgttggccgccggtggtgctgacgctacggggagaagccacgcttcagtggcttgcctggaattcatgacttgtgcgctccacgtcctgggctggccgacctgctgagggtatctctgagagcaggagccaggccgtcccgggctctcctgcgacagtgcggtgggagagccttagc

SEQ ID NO: 15069 - DNA, 211 bp, Homo sapiens
  chr5:139113843-139114054
  hypo
cgaggggtatcccggggtgagtccgtgagtgtgcatttgggtgaggacgtgattctgggtgtgaggggtcttgcttgagcgcttgagcacatgagcagcccctagcctgctcagaacagagcactgctgtctctgctgcgccaacaacgaggcctctctgtctcagcgcataatgtcccctctgtattgtctgctgcatcgctgtggtgac

SEQ ID NO: 15070 - DNA, 335 bp, Homo sapiens
  chr5:139135589-139135924
  hyper
cgctagtgtccccgcggctgccgtccgccctcccgcgccccgccaggtgagcgcagcccccacccccagtcacgctgctctgggctgagcctcggtaatttccgagtcggcggcggctttgtgtgcaccggccgcggtctgggggcggggagggaagggagggttatttctcccccctcttcctttttattgggtcattaacaacggctcggactgccgctgcgccccccctttcatgtctgccgcgcctcccgccattatctgcctccgccgcgcggcgtaattcgatgccaatcaggttggggcgcagaggcagccggatcaaagccggggcc

SEQ ID NO: 15071 - DNA, 38 bp, Homo sapiens
  chr5:139525386-139525424
  hyper
cgtctctccccatgccttcaaaggcggcctgccttccc

SEQ ID NO: 15072 - DNA, 135 bp, Homo sapiens
  chr5:139525814-139525949
  hyper
ccaggggttcacccagctcccctccctcccctccgctgccctcctggcagctccagctctgctctcgcggctttccaggttttggggtgggtgattgagtaggccgcacctgggacactgtgactggaggacgcc

SEQ ID NO: 15073 - DNA, 193 bp, Homo sapiens
  chr5:140011830-140012023
  hyper
cgccgccagtgcggcgcacacgcctgtgggcgtctccattcctgtgttgcgcagcgctagattctggatggccgggaacttgtggggacagagagccgccatcagtccgcgttcgcccagtccaggattgtcagacaggtctaggctggtaagggccgggaaggcgcgaacctgttcgcaggaaaaggcaggc

SEQ ID NO: 15074 - DNA, 111 bp, Homo sapiens
  chr5:140012520-140012631
  hyper
gtgcaccagcggcagcagcagcagcaacaagcaggacgcgcgctcctggggagagagcagaggtctaggaggccccatccaacccctgtggctcccgagtggcacgcgttc

SEQ ID NO: 15075 - DNA, 102 bp, Homo sapiens
  chr5:149682691-149682793
  hyper
agcctctctgagtgccagccctggaaggaaagcccatcatttcctagtccaaccgggtcattctacagatggagaaactgaggcccggagatgagcctcaac

SEQ ID NO: 15076 - DNA, 434 bp, Homo sapiens
  chr5:150004280-150004714
  hyper
cggggtcccggagcagcccgctaggcggtggcggtggcggcggcgaggagggggcgtcgggcgcggagcctgggcctggcgcggggcgggggtggcggggacctcggggcggggcgcgctgacggacgcggccaggtgtgccgaggcggcggcgcccgggagctcggggaccgtgcgcagcggctggaggtgagtgaggggcgctggcctggcaggggtgcgggcaccgcgcgagcctcgccccttcccacctgcgctattcccggcgccgcccaggaggaggtggcacatctgggctccagtcctcgcacgcggggtgaccttggccaagtcgcttctacactttgggcctcagtttccccatctgtaggtggggggctggaggggtatcgaggctttcgagcagctgaggagcgggaggacgccctgacgcc

SEQ ID NO: 15077 - DNA, 495 bp, Homo sapiens
  chr5:150603058-150603553
  hyper
cgagtctgtggaacactcttcgagcagccctgagattatcagcctttaacccccggggggaggaagccgaaggcccagagaggtcaagtcacttgtccatggccacacagcgaacagccccagaccgaaagcagagggcacctgccacagacacacgacatctccccacccgaggcagcgggaatcagctgcctttccctggcccgggtgccgtgtttgtaaactcggctgcttggtgcggctcgggccggggtaaagggcgcctcccagcagagcctccctcgtctctgagctggcctctccaggttctccgtccggtatcccgggccgaccagagagagcccggggcgccgagtcctctgcggcggagcgattccgcactcccctctcctctgaaagcaaacttctccgccggcgccctttacctttttcgggggtttgcagctgctcagcctgctgtgtctgcagcccatcctcctccgggggctcccggac

SEQ ID NO: 15078 - DNA, 163 bp, Homo sapiens
  chr5:150603589-150603752
  hyper
cgatccgggccccgctgcccgctccgcgcccgccggctggggctgccggcgagaccctgaaactgaacctggaagcgctgtcttgagcctgagctggggcggccgcccgccgtaaatacccgaagagcggggcctcagtgtagcccgcagggccagcggcgcc

SEQ ID NO: 15079 - DNA, 66 bp, Homo sapiens
  chr5:179244342-179244408
  hyper
cccccttttccccactccgcggttgacgagggccgcccccaagtggccatgtcccccggcatggac

SEQ ID NO: 15080 - DNA, 901 bp, Homo sapiens
  chr5:1800443-1801344
  hyper
cgcttatccctgccttttcaggtatctacccgtaactccattcgccttcctttttgtgtgtgtccgggtgagttgcagacgtggctgcgtccactccgcgctccctgcaggccccaacgcttcatcgcagcgcccactttttccacctgacccggcgaacaccgggcgggccgctggagtttatcagctccaggacaaatctgcctctgaccaccacgtttgctgggacatctttgggaccggaggttttcatgtgcattcttgtttctcatgcctttcctcctctttatcatcttccccgccactcatccatctctagtgttttgttcttggagtcacgtggtcctcaggctctgaccacagcaaaagaaaagctggatgctggagcttaagctgggatttatacccaagtcaactctaagcaaaacgggcctttttagaggctgtatttgcatgctgtaaaatcagtcggtgtactaggctttgttgcagaaatccccaatatacgtttcctctgcggctccccgtaaccacacacaggaacgcttgccttgaacgaggagaatgcacttccagtctcgtctgctaagcagttgactccttcacccaataattttgatatttaaatgtctcatgattatcggttaccataagaatataaacaatgtattttcagtttacatcctcccctgcctgtccgctaaataagaaccactgggtactcctaatcgctgaaggtttcgcacaccattgcctgcctcatcagggccctagctctagcctgcggctgcaactgcatgaggctgcacctgccggcgcaacggggccgcttaacttttaggccattgatgaaaagtcaaacaagcgcacagtactcggtgtaatcaggggcatttttagc

SEQ ID NO: 15081 - DNA, 71 bp, Homo sapiens
  chr5:31410355-31410426
  hypo
cgttaactataataggattatttacaatgctgccagaccatatcggaaactgcaaaagacgacatttgtcc

SEQ ID NO: 15082 - DNA, 747 bp, Homo sapiens
  chr5:36744888-36745635
  hyper
cgtcccggcagctggcccctgggcacggcccccagcccggcgtcccagttccagccgcgctgcaggggcgcgagggtgcccggctcgcaggtgtccgcgcgcaccgcagggctgcccgagtgcggctggcggaatccctccccagctggggaggaaggcagttgttttcttcctggtggaacgttccacttgaaactgttccacaagggctgttctcgcctccgactccgggaggaactgtaattaacacagcaacaaacgcccacgacgctaactggcaaagggagtgtaacacgagccgctgctacaaccgaactgggccaattgctttcccttcttgcctcccatttggtctgttttggttccgcagtcatccaactgtagcgtttcttaaaacatgtcagtggctggtgtttgtgttttgggttgaacagtttcacacacgtcgctggagcccgtgctcgaccagctgctgtgctggggatttgctttctgcggctttgggagtgtcaggtagcaaaacgaagagagtagtcgactagaacggtggcggggaggaggaggagggattgtctgcagtggagtcgggagcctcctccggaccaggacaggtaaaaccggtctgccaggtctcagggggagcgggtggagacgtcccacctcacctggctgcgctccgactcaggctcagccggcaggttctggggcaatgggggaagggagaggggccgggcccttgtgggtccc

SEQ ID NO: 15083 - DNA, 337 bp, Homo sapiens; identical to SEQ ID NO: 8583
  chr5:40680627-40680964
  hyper

SEQ ID NO: 15084 - DNA, 99 bp, Homo sapiens; identical to SEQ ID NO: 6210
  chr5:42950747-42950846
  hyper

SEQ ID NO: 15085 - DNA, 1660 bp, Homo sapiens
  chr5:472600-474260
  binary
cgggcgacctccgcgccaggtgcgacagctcaggccggagacctcgtctgtggggacgggccgtgtccggggccgccaccctgagaccgggcgcgggcaggacggaacctgggggggaaacggggcaggtactggctttaggagtctaaatccccaaacgctgagcagacggaagacgttcctgccactttacctgcagttcaaagacctggcgagggcctggaaacggcgctcggcccaggccgcttgcgggcgctgggcctgcagccgctgcaggtcgggccctgagtcctggcgctcgggaggtccctgagtcggtccccgagtcagtccccgggcgcggggctcggttgggggggcccggaaccttgggctggtttcacgcaaatccgtttggggcgagcctcggtttcccggcagcggtgggaaagggcgcgagcggccagccatggcgcgcggacccttcccgccggcggcgtcacagcggcgtctcctcctgctccagcgcgtgcggcggtgcgtggcacgagggcggcagcgacgccagcttcagcagcgcggggcggcggcgcgcgcgaggccgctggaacgagcgccggctgtgcacgcggcgcgccgccgccgaacgcgcgtgcgcactcggcagccctcggcgctccggccccgcccccggcgcaggccccgcccccggctcgccctcgggcggctctgcgggcgcaggcgcggcactctcggagttctgcgcaggcgctggcgtgggcgaggcggggctcggggctcgcggtcgctgtagccgcgcggggatctggggtttctctgggacagcggcggcggcggtgggcggaccgtggcgcggggacgagcggccggttagcggcgtgtcggagccggtgtcacctgcgggagaggaaggcgtgagcggcgcgcggagcccgggcgctggggcgggaggggcgtccccgggggcctcagctgtccccgagcccggcggctctcgcctcccctcccgcggcgcaccccaggctcggcgtccgctggggcctcctcccaggacccgggttcgcggggcagaggcggaagcagcaacagcgaagccccagcccggccccgccacgtccccccgccgggggtcccgggacagcggcctcctcggcgcaggaaggtcccgccccaggccctgcagcgcgggaggtcaaggtccccaaggggacctgcttcctccatctcaaaccgccctggcgtcccccgggtgcctcccaggcccccagagggagctcagaaagcccagaccccacggcccgcccctctccctgctctgagctggaggcagagtccgggtctgcggggccggccctccctgtatccctgtgagagggtcggggacccggggcgtctgtctggcttcccccagccctgctctcagctccctgggagcgcaggatttggactcgcggactagctttcggagccacctaaaggaaatctcaggcggccctagtgccctcagctccgtgggagcagcagagacgccagagtatctctgtccgggctcctgagggaggtgcggccagcagggcgctagaggaggaagaggggctgctggagagagagagcgcgccaggttcaggtccagggaggagagagagcgagcgcgcgaggc

SEQ ID NO: 15086 - DNA, 319 bp, Homo sapiens
  chr5:52778284-52778603
  hyper
cgtcgcatcctgtttttgtcaggttctttaatctgctcttcgagtctctgcaggttatgaaatgggacgaataaaagtaaacagtctagtaaaagtcaatgcaagctgcacgtgttgtgtctgggtcactggtaactgacattgatatggctggggcgccctgtcttctccctctctccctccctccctctcgcccacctcccatctctgtgatcagggcttccccctccactgccttctttttccacccctccacccctttcgatttatttcctacttttctcccgcgtctctctcacttcccctcctccacgctcac

SEQ ID NO: 15087 - DNA, 135 bp, Homo sapiens
  chr5:52778741-52778876
  hyper
ggccgctgccaggtcctgtacaagaccgaactgagcaaggaggagtgctgcagcaccggccggctgagcacctcgtggaccgaggaggacgtgaatgacaacacactcttcaagtggatgattttcaacgggggc

SEQ ID NO: 15088 - DNA, 210 bp, Homo sapiens; identical to SEQ ID NO: 11752
  chr5:54526958-54527168
  hyper

SEQ ID NO: 15089 - DNA, 308 bp, Homo sapiens
  chr5:56110226-56110534
  hyper
cgtagagtccagggactaggaggactcacaacgcagcgatgggcagccaggccctgcaggagtggggacagagggaacccggccggtggcccgaccctgcagggaagaaggacgtgcggcgagaagcatcggattcggggagggccgggacctggccgagggtgacattaccgagcacttcctggcacagcgctggtcccctccccaaacgcgctatatgtggttctgtacgggactgcctttcccaaagacagccaaggaaaaactaaagatcgacggggacacccgcctcccttcctcgccccaac

SEQ ID NO: 15090 - DNA, 211 bp, Homo sapiens
  chr5:58335353-58335564
  hyper
ttctcaactcctcgggcggcaggcgcagcgcggctccaacgccgcagctttccgggaacactccccctcacgcccctctcggccctcggcgctgcctggctcctcctcaacccccttacgaaaagattccgaattgcaaaagcctgtccctgtccgtgccacccgccgcgtccttcccctcgagctctgccccgggggccccgccacctcg

SEQ ID NO: 15091 - DNA, 73 bp, Homo sapiens
  chr5:58335881-58335954
  hyper
aagtttcacaaacaaggttatttaggaccctcaaggtttctgagggtttaagttttagggtttctgggggttc

SEQ ID NO: 15092 - DNA, 161 bp, Homo sapiens
  chr5:60921444-60921605
  hyper
cgttctctgagatgtcgctgctattactgtctcaaatttccttttaaattttgctgtttgagtaaattagtgctggcctttcctgagctccgcagctccgaggtggcccgactgccgggcctccaccccttttccccggtcccgggtcggtttctccgggc

SEQ ID NO: 15093 - DNA, 49 bp, Homo sapiens
  chr5:60921662-60921711
  hyper
cggtcatgcgggcgggcgggcggtgttccccagagaccgcccatcccgc

SEQ ID NO: 15094 - DNA, 348 bp, Homo sapiens
  chr5:65220847-65221195
  hyper
cctgcgtcgcatcggagcgtacccatgtttcttctaacaaaggcacgatcttgaggccatttcgcgggcccttttcccactcccagcgccagctttgtctccccgccggtatgaggctgagacttggaggaggctgagctgcgccgctggggaacaagctcgaagggcgggcgtgggaagctgcaccgcgctgccgctgtggtttcctgcgacctgaccgtgccattagaggaagttggagtgctgcagctgcaagagatacctgctgccttcaaatcagggctggactccaacaacccctgtgcaccgattactgtcgtacaaagaaactccatcggccggcgcggc

SEQ ID NO: 15095 - DNA, 89 bp, Homo sapiens; identical to SEQ ID NO: 14104
  chr5:76939813-76939902
  hyper

SEQ ID NO: 15096 - DNA, 192 bp, Homo sapiens; identical to SEQ ID NO: 6216
  chr5:77148195-77148387
  hyper

SEQ ID NO: 15097 - DNA, 38 bp, Homo sapiens; identical to SEQ ID NO: 8593
  chr5:77268330-77268368
  binary

SEQ ID NO: 15098 - DNA, 342 bp, Homo sapiens
  chr5:77591388-77591730
  hyper
cgtttggagctgaagtggtgcgtcctattggcgtctagctaccaaaaataaaatggaccacctcgcgcgccagtcgtgttactcactaatatgcactagggagcctaggcgggatgcttgcctggccccagagtagctctctccgggtgctggcacccgagaaaacctctttcccggggtgccttcccccagcccgccttctcaggtgggtttcagcgccttccctctcttctccccagtgcctcccgtccaaggaaggcattaacacccaaagccctggcggccaggtactgaaactgtcaagggattctaccaggtagaacgcgaacctggaggccggcc

SEQ ID NO: 15099 - DNA, 240 bp, Homo sapiens
  chr5:79911325-79911565
  hypo
ggtctccaaacagacaattacccggttccacttaacagagtgactcaaggacggatctgagggctgggtcttgtgaacgcgggctgttgtcctgccctctcccagctctaacattgtgctgaaaagttaaaatacaaaacgccaaagctccccaatcccatcccacgcccctgcctgcgcagcctttcatgcattgaatgggcagcttcatgatgctgctgcgacaatagcgacaatagc

SEQ ID NO: 15100 - DNA, 50 bp, Homo sapiens; identical to SEQ ID NO: 14110
  chr5:87962917-87962967
  hyper

SEQ ID NO: 15101 - DNA, 389 bp, Homo sapiens; identical to SEQ ID NO: 14111
  chr5:87963002-87963391
  hyper

SEQ ID NO: 15102 - DNA, 287 bp, Homo sapiens; identical to SEQ ID NO: 6227
  chr5:89854237-89854524
  hyper

SEQ ID NO: 15103 - DNA, 169 bp, Homo sapiens
  chr6:100036494-100036663
  hyper
cgactacactgcgcttcctttggagagagacactggagaactaaaaccgacccaagcgctaagcgatctgcctaatagagggaacgccagctgagaccagcgcaaggcgggcgctgggtggcgtgcgcgactgcaaagtctggcatgcccaggttctgctccttgggct

SEQ ID NO: 15104 - DNA, 228 bp, Homo sapiens
  chr6:100036732-100036960
  hyper
ccctgaggatgcgccccaggcgttctgccctggctcccagccgcctcccggtgctccggggttcggcctcacacacctgtcgaccgcgtcggcccagctgcggcccaagcctgtgggactccggggagcgaggcgccccctgctccaggctgggaaccagaaatgcagcagggcctcaaaaagaaacaaaattctttccctcggggttgctgctgccgcacaacctta

SEQ ID NO: 15105 - DNA, 227 bp, Homo sapiens; identical to SEQ ID NO: 7442
  chr6:10417842-10418069
  hyper

SEQ ID NO: 15106 - DNA, 138 bp, Homo sapiens; identical to SEQ ID NO: 11779
  chr6:10418940-10419078
  hyper

SEQ ID NO: 15107 - DNA, 94 bp, Homo sapiens
  chr6:10420268-10420362
  hyper
gggcacggctggccttagcggatctgactctgccaaccccggggccacttcagcgttagattccacatgaaactgttgctcaataggtgaagac

SEQ ID NO: 15108 - DNA, 353 bp, Homo sapiens; identical to SEQ ID NO: 12871
  chr6:106533693-106534046
  binary

SEQ ID NO: 15109 - DNA, 388 bp, Homo sapiens; identical to SEQ ID NO: 12872
  chr6:106534075-106534463
  hyper

SEQ ID NO: 15110 - DNA, 105 bp, Homo sapiens; identical to SEQ ID NO: 7443
  chr6:106958136-106958241
  hyper

SEQ ID NO: 15111 - DNA, 404 bp, Homo sapiens; identical to SEQ ID NO: 7444
  chr6:106958337-106958741
  hyper

SEQ ID NO: 15112 - DNA, 334 bp, Homo sapiens; identical to SEQ ID NO: 7445
  chr6:106959606-106959940
  hyper

SEQ ID NO: 15113 - DNA, 263 bp, Homo sapiens; identical to SEQ ID NO: 7446
  chr6:106960046-106960309
  hyper

SEQ ID NO: 15114 - DNA, 155 bp, Homo sapiens; identical to SEQ ID NO: 7447
  chr6:106961023-106961178
  binary

SEQ ID NO: 15115 - DNA, 163 bp, Homo sapiens
  chr6:108455187-108455350
  binary
cgcagcttcccccagaggccggcgctattaactcccggggcctcctgcggcggcgaggcggtggcacggctcctcccgctccctcggcctccaggttcaataaggattacatcatggagcaagtatgcggggcagcctgagaatcaaagccgtcagcaccggc

SEQ ID NO: 15116 - DNA, 198 bp, Homo sapiens; identical to SEQ ID NO: 6228
  chr6:108478324-108478522
  hyper

SEQ ID NO: 15117 - DNA, 256 bp, Homo sapiens; identical to SEQ ID NO: 6229
  chr6:108478551-108478807
  hyper

SEQ ID NO: 15118 - DNA, 45 bp, Homo sapiens; identical to SEQ ID NO: 14128
  chr6:108484828-108484873
  hyper

SEQ ID NO: 15119 - DNA, 160 bp, Homo sapiens
  chr6:108496966-108497126
  hyper
gagagagagccccttcctctgcggcgcaggaagccggagggagcgtccaacctgttgaacttgtgtattgacaagttgtcaagctcggcaggccgaagattgccctgaattaatttgtttgtttaaactgttggtggtaattgtcacatctcccctgcct

SEQ ID NO: 15120 - DNA, 737 bp, Homo sapiens
  chr6:114176491-114177228
  hyper
cgataccaggcaaataggcgtaccagaaagaaaaggggggaaagctacacggcagcctggtaacaaaggagcaataaaagcagcccccaaatggagggctaaggacgcgtctgggagaaaatctgaaagcgagctagcagtcaccccaatttaaaataggagggggatgcggaggaaggggcatgattcacgttgggggtggggggaaatcaagagccttaaatgggcttttgggaatcgcctggatggtggtgtcggatcagcccagttggcttttcaagttggaactgctaatacaagggatttgcgtccatcctggcggctggggtcgtgggccaggccagcgggctctcttaagggtaataacacgtttgctggcaagatgcatttctacggaaacgtctttacatcagctctggggaatatgaccatggtcgaataatgcatctgaaggaactggacagtgagaagacgaagcttcacgtaacaatgttcagcttggtgatttttaaagcaacgcttgaacaaagagttactggcttgaaccaaccgtctttttcactcagagtgtgacctatttccctacaatgagcagaaaataaaactgtttgagaattcagagccagcaccaggagaaatgaaccattccctcgactgcttctcaccttcataagcgaaagattattccttgcaagatcaccaaatgtaaacgagaaaaggtggtctgattttgccac

SEQ ID NO: 15121 - DNA, 72 bp, Homo sapiens
  chr6:116691827-116691899
  hyper
cgggcgggggtgcgggtggagtccgggccgggtggcgtggaaggccgagcacagctgcgagcggcgagtccc

SEQ ID NO: 15122 - DNA, 312 bp, Homo sapiens
  chr6:127442338-127442650
  hyper
gggcccctgattctgaaggaagacacaggaaagaaagcttgtagtccttttgtgcccacctcccccagcgaggaccacggcgcaggaagctttccccgggcgctgcctcagggagctgtgggatgatgcacctctaggttgggccgagaggagtcaaaaggcaaactgcttttcgacctgccttaatcatctcaaggccaagtcaaaggagacctctgtttgtgttgaggggatgaaagaaggaatagtggaactgggttgcaattccaatttttctgtgggagtgggactgggagacagcacccacagcga

SEQ ID NO: 15123 - DNA, 37 bp, Homo sapiens
  chr6:127442699-127442736
  hyper
gtgcaatcctggtagaggggcgaccccttgcgtcctc

SEQ ID NO: 15124 - DNA, 704 bp, Homo sapiens
  chr6:1311068-1311772
  hyper
cggctccgtcgctttttgtgcaacaaaggcaggaaaaaggaggaaactcggcgtggcagggcagcgggctggaagtgcaccttcccggggccgaggcgcccgctccctggactaatgacgccgcgtggggatcacgccccgggcgccctggggtgaggaacggtcccccctttcgagattgtccgacactggtgccagtgaggtcacagcaaaagtcccaaaggaatattggaaagaaatggccgtgaaccggtttgttcttgcccccgcccccgggaacacgccctctccgtcgttcctgttgactgtcagatcccgggaaccaagcggcggagctcggcggcatctgaggcttccgcagggacacaagtgcaggcacagcccagcaccctgcgccagacacagccgccccaggggaagaggaggacgctgctgtcctcccgcaggagtcaccagccaggtaaagaaaaaggtaaagtaagacaaagaaaagtgaaagtcggagcccatttagtgagcaagagtaaaggtcatccaaaaaggcgcatacaatttcaagcccaggagtgcattcattaaaacaagaggaaaagacaagatggtccttgaaaggagctcataggaaggggcacagcacaaggctcccgaaagaggtcactgcaagtgtcctgcgcaatttctgttcagcacctctgcagtgacga

SEQ ID NO: 15125 - DNA, 224 bp, Homo sapiens
  chr6:1312096-1312320
  hyper
ttggcgggaggaggaaggcggggccggccgacccaaaacaaacaacctgcgccagcgactttgccgccgcgctgcagtgtggcctccgcctggtgcgcgcccgttggggagctggggaactggggagccgccaccacctcggccacctcgttcccccaccccttgccgtccgcgctcaggccccgcccccgcggagccgccgcagggttatattgggccggccc

SEQ ID NO: 15126 - DNA, 47 bp, Homo sapiens
  chr6:1312708-1312755
  hyper
tcctccctctccgccccatagtccacccaacacttgcagcccctcca

SEQ ID NO: 15127 - DNA, 109 bp, Homo sapiens
  chr6:1312784-1312893
  hyper
gaaaagtgactatctcggaagaccagggtagagctcccgggagaaaaaggcgaagatccccggccccggatcgccatccccttccctggcaccagcttctctaggctgc

SEQ ID NO: 15128 - DNA, 160 bp, Homo sapiens; identical to SEQ ID NO: 9843
  chr6:134639003-134639163
  hyper

SEQ ID NO: 15129 - DNA, 392 bp, Homo sapiens
  chr6:137112609-137113001
  hyper
cgctgggcggtgggtggatccataggtctatcgcacaagtacacacagactcttgcacaagcacacacgctctctccggagcggcgagcgacaggagcagtcacgcagcggcgctcgctgcccccaaagtggggcaagaagtaaatgcttcccgcccagaaaaatgaaatgccccgaagaccgccagattaaacgcgggtcccgaccgcgcgggatgggaaaggggtcacacacgcacctgcattgtaaaagcggtccagcacggtggtttctccaaagtcgagtttcccaaaatgcagggtttccagggtggcgcccactgtctcgcacgcctcccgcaagctctgcagggcctcgctctcggccaccaccagttgcccttggctcgcttc

SEQ ID NO: 15130 - DNA, 259 bp, Homo sapiens
  chr6:137365631-137365890
  hyper
cggcctccgcgcacctcgtcctctgcccgcccgaaagcgaaacctggccggcgggcaggaggggagagctcggcctcgagctctgcctggcggggccccggcctggaggcatccccgacccgcacctggcggcgcgacccacctacctgcccgtccccaaggcgccgccaggagcaacagcagcagcggcggcagcggcagcggccgcagggccgggcggccgggagcccgcatgggcggcggggctgggtcacatgtc

SEQ ID NO: 15131 - DNA, 499 bp, Homo sapiens
  chr6:138428812-138429311
  hyper
cgcgtgttttgtcttcctggcgcaccaacatatacacttgtttatctgcacagcgccagcctaatatctgacccctgatgtcgcatcgtggggcggtggtcagcagtgccatatctgagttttcagcagtgtgagatgggtgttctaattgcacctgtggataaaggctgcactcctttggacgcgtgcacccaaacccagaagcccgtccctgacccctgctgacacaggtgatcccttcctcctaggctccgcctttgcaccttggaccgtggctccccgggtactcttatctctttgcatgctgttctttcctgctgggttgccagattttggaaagcggaggcgatgctgaatttatctgtgtatccttagtgtccggcaccgtgtttggatctcaaggggagctcagtgaatttgatgaatgaacatgtaatttaacaaatgctcgcttcctttcggaaaggcttcatctggcttccccagataatttcatgtc

SEQ ID NO: 15132 - DNA, 256 bp, Homo sapiens
  chr6:139694249-139694505
  hyper
cgccggggtttcgatcgagtcaacagctcactctgctgggctgctgtttgcacacgaagtccgtcataaaatcaaactcgttttgccccagccagagttcgggcagctccttgatgcggtccaaacccatttctatcaccaaggacataagaacttcctcgtcgatgaaatcagtgtctatgacattgggcggcagcattgcagcggggacgtgggccacggaggcgggcatgttgccgctgccgctgccgccgcc

SEQ ID NO: 15133 - DNA, 292 bp, Homo sapiens
  chr6:150246875-150247167
  hyper
aagacccggaaggactcgccggtcgcggcaagggacaggcggttcctgagacaggaggagccaggaaatgcggggcctggtggggtgaggagcacggggttcctccttcatcctcgcggggactttgccaccggctcagtgtggaggcctcaccgtcccgcccggatccgtggggctccgacagtgtggcccctgcgaggaccccccccatcctcctcgccctggggctgctgcgggagggcgcccgggcagcactaggtcctgagtgtccagggtccggcaggggcttccc

SEQ ID NO: 15134 - DNA, 87 bp, Homo sapiens
  chr6:150284581-150284668
  hyper
gctttctttcttttctttttttttttttccagaagtcataaagggatatagaatatactcaaagaccacctcatgcttttagtggag

SEQ ID NO: 15135 - DNA, 147 bp, Homo sapiens
  chr6:157430380-157430527
  hypo
cggggggcgaattggtgatgatctttaggacactaatttttttctttattatttgtaattcttttgagcaatatgcctgactatgaagcagtgggtctgacggagtcagagcggttagcctgatccagccggggtcccaggaccacc

SEQ ID NO: 15136 - DNA, 447 bp, Homo sapiens
  chr6:17101827-17102274
  hyper
cgtgttggtttctgttcgtgcgaccgtctttctgaggtcgcttttgtgccactgccttctggtgctgtcggggccgcctccacaccgtcctccggccctcaacagccgtctctgcgactggacacctgcctcgcatgccacacgatcaccttcactacagacagtgtctaaaaacaaggatgtggtccaggcaccaggggtaggggcgtgtcacacacaccgtgtcttacaaagaggaaaaataagaggttcccgcaagatgcttgcgactctggtacttttcaaagtaacgcagccaggcagcgggctttcccccggcccctcgctctggatagggctgccatttgcatcctagctgtgatttagacacctccaaccttctagttttcagttacaagagtcccatctccgcccaggtcccaggtctgcatgacgtaatttattgtg

SEQ ID NO: 15137 - DNA, 192 bp, Homo sapiens
  chr6:17102346-17102538
  hyper
gcgggtggcgcccgagcgcagtagcaggggcgtagggcgcagggcgcaggagcgcgggaccaccggcgccggagcgcggcagggagcgctcgcgggggcgcacagcagccaagcccgcggaggaggagcgcgcgcgcgcagcatgggctgtggaccttcccaacctgctgaagaccggagacgtgtacgcgc

SEQ ID NO: 15138 - DNA, 74 bp, Homo sapiens
  chr6:20640178-20640252
  hypo
cgcgagccaccgcgccgaccattttcattggttttaagaagttatttttcaagttgtaccttaagggtgctttc

SEQ ID NO: 15139 - DNA, 432 bp, Homo sapiens
  chr6:21665191-21665623
  hyper
taatgcccctccccccgcaagccaacccaggacatagcccccaggtccccaaggttccgtctacctcatccttctacccccaaacttcaccaacccgaaaggattccaagtctgggatggggagaaaggaaagagggtggaggcaaaggtgcgcgacgggctggataccaactggagggtgggtgttcgcattgaaatgtttttttcttttgccctagaaattgcttccccatgcgggcccctactctctcccatttcccccacctccctgctttctttttcttcaattctagtggatctagaaggaaaacgagtgctgctctgagtcactcagcgagctaatgctatggcccgaagttgggatcagggtcgaggggtgggggaccatgtggatggggtcccaattctggaggttgagaatgactggaaggg

SEQ ID NO: 15140 - DNA, 269 bp, Homo sapiens
  chr6:21666189-21666458
  hyper
gggtgaatccgagaggaggaaggaggatgaagagcctagcctgcgccccacctctgattgtgtaagcgcctttatctagggttgaccccctaccctttgcattttgtctcttgggatgacgaaaaatggacagaaactcgacgcccaagtgaatgtttcacattgattggcagggaaagtgcaaacaaagaggtgcatctccgggaaacaatgattttggagatcccctgcccaccaccccagacttgtgcgcggtgcggagggggcca

SEQ ID NO: 15141 - DNA, 351 bp, Homo sapiens
  chr6:21666588-21666939
  hyper
gggagagggagggggcggggagggaggggagggagagaggaagaaggggtgagagggagaaacctgccgccgctcgccgcctctttgtctgctccgggacttggaacaaaagggggaactctgatgaactctctttcctcccctctcccccggacgccggggtatctccctctcgcaactttgccgccccgactttctctgctgtcaggccgggaaaaagtgtccgaacgcctcgtggactgcagcgggggaaatgtcccttaaaagtgcgacgaagtggggaagaaggtgagtggggactgttgtcttgtttacctctctcccctcaactcgccccgctccccgcccttc

SEQ ID NO: 15142 - DNA, 172 bp, Homo sapiens
  chr6:26215876-26216048
  hyper
cgtattcacatgttcctgcagtctctagcccgagagtttaagctatcctaccacctcagcctaccgagtaaatgatagtacagacgcaagccgtcacacctggttagcttcatttttttgcagagacgagttctatgttgcccaggcaaatctgttaactcctgagctgaag

SEQ ID NO: 15143 - DNA, 224 bp, Homo sapiens; identical to SEQ ID NO: 6232
  chr6:26216853-26217077
  hyper

SEQ ID NO: 15144 - DNA, 210 bp, Homo sapiens; identical to SEQ ID NO: 6233
  chr6:26217156-26217366
  hyper

SEQ ID NO: 15145 - DNA, 312 bp, Homo sapiens; identical to SEQ ID NO: 6234
  chr6:26217578-26217890
  hyper

SEQ ID NO: 15146 - DNA, 115 bp, Homo sapiens; identical to SEQ ID NO: 8620
  chr6:26233864-26233979
  hyper

SEQ ID NO: 15147 - DNA, 130 bp, Homo sapiens; identical to SEQ ID NO: 7461
  chr6:26271217-26271347
  hyper

SEQ ID NO: 15148 - DNA, 327 bp, Homo sapiens; identical to SEQ ID NO: 7462
  chr6:26272105-26272432
  hyper

SEQ ID NO: 15149 - DNA, 71 bp, Homo sapiens; identical to SEQ ID NO: 6238
  chr6:26331633-26331704
  hyper

SEQ ID NO: 15150 - DNA, 324 bp, Homo sapiens; identical to SEQ ID NO: 6239
  chr6:26331811-26332135
  hyper

SEQ ID NO: 15151 - DNA, 243 bp, Homo sapiens; identical to SEQ ID NO: 6240
  chr6:26332283-26332526
  hyper

SEQ ID NO: 15152 - DNA, 224 bp, Homo sapiens
  chr6:27125333-27125557
  hyper
cgagcgccgccggacatttcctgacggctcaggtgggcaggctgagtgcgcgagcgcctcactggcttctcataggtacctgggtcaggacgaagccacatagttcctcgtgatgagaaactcacttctggcacctgtcgagatgccagattccatgccaagcccccgaagattctgactagtttggcaaaaaatgggatctggcaggtccacttcaaagcagc

SEQ ID NO: 15153 - DNA, 217 bp, Homo sapiens
  chr6:27125812-27126029
  hyper
cgaaagactgcaccattctttagatgacaaaaacagacgtttctgggaaataagcaaaggaagagccccacaagcagcggcctctggtggcgtgccgtgatcgtatagtggttagtactctgcgttgtggccgcagcaacctcggttcgaatccgagtcacggcagtaccttgatgtcgcctcaatttctcaacgtactgagcagtaccttgacgtc

SEQ ID NO: 15154 - DNA, 361 bp, Homo sapiens
  chr6:27218591-27218952
  hyper
cgactcctccgggtgggctggggggagggaactcggactccagggccccagtctcagataataggaataccctcccaccacgcccctaccttcctcccgcgcccaaagaattttgcacaagctgtcctcacaagagcccgagattacacagcgagtaagtgacacagaggcagaaagatatgcgattccaacccctcagcccgcaggctgacggcgtctcctcccttagttcccccatctcattttcgcgtcggtcgcctcctccgccccggtgcgggccgtgctggatttctccgagtataatgacgtaaggatggcgggcagcaggtgcgggacggggaggggtcccagcgggcggagt

SEQ ID NO: 15155 - DNA, 447 bp, Homo sapiens
  chr6:27218980-27219427
  hyper
gcggtccgcccacaggtggtatcccgaagcctaatgagcaccgcgatcggcgggtccctggaggtaggaggtggggcctagtccgagggggactgggagggaaaagaggcctcggatgccagggaagaggaggccagagaagggcgaaacctgcaacgtggcggggtctaaggaaggtcggagctcgggggaatacgcaggttttggaagaaggcgggagctgacgaagaggaggggcaccaggaaaagaggcgctccccagagagggcggggtttgggcagggacaatcctatccggaggtgaggctcaaggtggggcggggccacaatggaggacggggcctgcagggaagacccgagaaggagggctgcgaggcaggggattgggggcgggggcctgggggcgggggcctgggccaagagctaggtctgcaccctctgagtccc

SEQ ID NO: 15156 - DNA, 488 bp, Homo sapiens
  chr6:27840617-27841105
  hyper
ttgggcgttgcggaccacagtgtcatagttacacagccctcgcattggtagcggtaaagtaatcgatacaagataaatgagaccggctgtttcattatgacttttgcaaaaaccagagaggcgttatagatttggccgtgtatcagagaagccggcacttttaaccactaagtaatgctgaaaggggcaccgaacctcaaacttcagcgactgcttatgtggaatcgctaatttgccaaaactgccatacgtttaagtgttcttaagaaattaactatctttagtctacagctctttcacagacttcatgggtggccctgagaagggcctttgaggaaccgtgtaagtaagtaaaacactcagccgccaaagccatacagggtgcggccctggcgcttgagcgcgtaaaccacgtccatggctgtgactgtcttgcgtttggcgtgctccgtgtaggtaactgcatcgcggattacattctccaaaaa

SEQ ID NO: 15157 - DNA, 139 bp, Homo sapiens
  chr6:27841257-27841396
  hyper
gacccttcccgcctttgccgcgcccagacatgtcttgtactaaacaaaatgcaacacggcaagcctcgcagcagtactttatatagtaataaatcggacctgattgggaactctccacaccagctgcatccggtcggcc

SEQ ID NO: 15158 - DNA, 51 bp, Homo sapiens; identical to SEQ ID NO: 7471
  chr6:27858740-27858791
  hyper

SEQ ID NO: 15159 - DNA, 156 bp, Homo sapiens; identical to SEQ ID NO: 6254
  chr6:2903557-2903713
  hyper

SEQ ID NO: 15160 - DNA, 559 bp, Homo sapiens
  chr6:3229632-3230191
  hyper
agggcgcccagactggagctcgccggccggtattccagacccggccggcgtgcccgggtgagggtggggtctaccgagaggcagagagcagcggagggtctgtccacatgccctgctctcccggtaccaaggtctcggggcctgacctccgagtttctaatccagatcctgcagatgccgaaacgtcgagggctagcaattcccaaggtcatacagcaagttgaggacagggctcggactggaatctcgtcttttgggcacaccagacctcagggaaagtgaccgcatctcggccaaaagggctgtggcaggtgtcagcctcgaggtggcggctctggtgggaccaagctgcgccggaaggaacagagctagggcggcacccgcgcggcgagtgtagacacactcggagcggtcaccccctcgctgcgagctcccaggagcaaccctgatgctcagcgctggggggtggggttgggggccgctcagctccatgctgagtaacttgagctggccgcctgcctccttcatctaaccaattcatttctcagcttctgtttcc

SEQ ID NO: 15161 - DNA, 31 bp, Homo sapiens
  chr6:34433449-34433480
  hyper
cgcaccaagggacgccgaggctcgggagagg

SEQ ID NO: 15162 - DNA, 464 bp, Homo sapiens
  chr6:36098070-36098534
  hyper
cggggtcccgctgggcagccccgaccccgtgcctgggccgcacctgccgcagtggctccgtcgggccgggcggaagcgcgggagcgcagggctggacaggcccgggcgtggcggccccggcgcacctgggcgagccggcaggtgggagcgtagcagcccggggcccccgccctcgcgcgggggaggagcgggcggcgcggggcgggcgcagcgggggtcggggcgctgggagcccgttgggccgcgaacgcagccgccacgctggggccgccgagatcgggtgcccgggatgagcctcatccggaaaaagggcttctacaagcaggacgtcaacaagacagcctgggagctgcccaagacctacgtgtccccgacgcacgtcggcagcggggcctatggctccgtgtggtgagacccctgggccgctggggggcggggggcgggcgccaggctctcccctttcc

SEQ ID NO: 15163 - DNA, 578 bp, Homo sapiens
  chr6:36354750-36355328
  hyper
cgccagccacggagctgctgaggatcagactcctgggtttcagcatggaggccagggaagggtctgataatgggtatgggtcctggcgagaggggagtggagaaaggccttggagtgggacggggcgccagctctgggggcagtctcgaggcacctagaaaaccggcgagtggggagaggctgctaaagaggggctccctgcgagaatgcgttcaccagctgtgaggacctggctggcgcacgaacttccaaagacctcacatctggttggtgtaggggcgaccagtggtaagggggctgcggaaagggcccgcaggggctgtgcgtgatgccttcagagctgtgtatgacaccgagagagtcaggggcggtgacccgcgtctggaggtggaaggggaagtgagtgagggatggatgtgaggtttaggaatgtgttggaaagagagattcccgccaggtaaaaggtctgataaaataggtttggaaatctaggtggtgaggaaaggatgcgggagcaggtggctctgcgtgcgcgctgcgtgttcagccgccaggctcttacctgcattacaggtgga

SEQ ID NO: 15164 - DNA, 407 bp, Homo sapiens
  chr6:36355357-36355764
  hyper
agcgctcccctggctgtggctgctggggccctaggcccgcgccccgcagtcctcctccgccaaacccctaacctggctccgagaactggaaggtcgcgtgggaggaaatctctttcgagaagcgccaaggcgtgtgcgcccgggtcctccgcaggcgggcaggcgcgcgaggcgctccggtaatcgctatccttccgggaaacgaaaacgaaagagcgggatgcggttccacttgcgccgctgcgggctaggagcagggcagggcagggcaggggccggccccgtgggagcgcagcaccggggcgctgcccgctcgctagcctgggaggcgtgggtcctgcacacagcctccagccggcggacagtccctctggcgacctggccttggctcccactggggcagagcc

SEQ ID NO: 15165 - DNA, 81 bp, Homo sapiens
  chr6:36807979-36808060
  hyper
cgcgcgcatcttcatttgcgcccgccccctctcaccacccctatctcccatcaggggtctccatcctgggggagggggagg

SEQ ID NO: 15166 - DNA, 370 bp, Homo sapiens
  chr6:37666475-37666845
  binary
cgcgcgagacgggccgcggctgtgggtctgcaaggctgtctgcccggctcgagaggcccccgcccctttccaggcgtctggtgctggggccgggccggagcagctggcggagaggtcgcgctgagagctcctgcccttgccgcggcccacaggttgccaacaggtttgctcgcacgacccctccgccagagcttccctaagtcaccccacattttcctcggctagccactcttcccatcttgcctcccctcgggacctcaggcgcccccaagcgccccgggggcacacctccttccggctgccgaacccgagccccgctccagcggcgggagtccggcactcgggtctcagccgcctcgaaggggccctc

SEQ ID NO: 15167 - DNA, 218 bp, Homo sapiens
  chr6:37666866-37667084
  binary
cgctcctcccaaacgcccgcggggaggggcgtaggctggcaagcgaggctggtggcctcccccgcgcctccgatcccgccccgcgcccaacccgggtcctgctaatctcacctgctccacctgtcgccgttatttatctcagcgtgtgcgcaagaattgttttaggtcggcccgtgggagcgcagacaatcgcagcagctaacaagcggggagactac

SEQ ID NO: 15168 - DNA, 309 bp, Homo sapiens
  chr6:42109904-42110213
  hyper
cggcggctgctctcggccagtccgcaggttccaacgtgtccctcccctccgcgcctccaggagacagcaccgccggccctgccccagcgccctccgtccccgccccagcgccctccgtccccggagtactcaccgaagcccccggtcccctcctccggggcctcctgggtgaagatccagggcggattggtggcgtagagggaggtgctgggggtcgtggtgtgcttcttcccgaagagtttgctgaaggtgccctgcaccgtctgcttctttttcatgctgccgcagcccgcgcgggcgccagggaag

SEQ ID NO: 15169 - DNA, 324 bp, Homo sapiens
  chr6:42110273-42110597
  hyper
actctaccaggccatgtcccccgccgtcctccccgcccgcgcaccgggcaacaggtgctgcgggcgccgccgcttgccgggaaatgcgagctacctggccaggtaaaaggcagccgcttggccgggccccgccccgccgccgcccagctccccaggccgcattccttcccgcctccttctacaacaggccattgttggcacggcccggtgggctggggacctcgcccggcccacgcccagcctgggagacgggccaccccctcccccaggttcctccctgcacgcctccttcaccccacttccccctagtccgggaaaggaggc

SEQ ID NO: 15170 - DNA, 254 bp, Homo sapiens
  chr6:45387325-45387579
  hyper
cgaaagcctggcttcccttcccggatcggccgcctgtgggactcgagagacctgtgcacgcaggggacgcggcggtgcccggggttagagctctcccctgtgaccgaaaagataattaaaaatcgcacgcgcaggagccagctcagctcctggctgcgcttccagttggtccggtctggctaaatgggttctcgcaccctggcggcgcccgggctgggaggccagtaggccgggcgcgaagagtaggttgggga

SEQ ID NO: 15171 - DNA, 262 bp, Homo sapiens
  chr6:45388098-45388360
  hyper
tgggagcaaagctctaaaaccagacagggagggtcgtggcaggtcgctacgagggtgagggaggcgtttgcactgagcaataaaaacacccagtaatgggtatgtgaattgctttaaataagatgggagggcgtgagagatgacccaaccatctttcttccttgatgcttcgagggggaggcattctaattcttcatttattttataaaatcacttgttactgtgtcagctactccactaggaatctttgaaactttggcaa

SEQ ID NO: 15172 - DNA, 320 bp, Homo sapiens
  chr6:45388397-45388717
  hyper
gaaggctttaaagagtttggtaataagcaagaaacgtagtagtacacaacgccgagggtaaaacggccctgtgcccccttcttggggtgtaatagcctcaagcggatttcccggcttctgcgggcgcagcacattgttttatttgttttgaaggctcagagtttgaggctggtcgtagacacccacgtgctctgactctcatcagcgtaatgatcgacttagccagagtcgtgtctatataaaccacaaaaacctaatcattagaaatcccagcctccaaaaaccacattttaggtaaaaagtgccgctttttttccgcg

SEQ ID NO: 15173 - DNA, 373 bp, Homo sapiens; identical to SEQ ID NO: 5842
  chr6:46097250-46097623
  binary

SEQ ID NO: 15174 - DNA, 521 bp, Homo sapiens; identical to SEQ ID NO: 5843
  chr6:46097694-46098215
  binary

SEQ ID NO: 15175 - DNA, 455 bp, Homo sapiens
  chr6:4775543-4775998
  binary
gttgggtcaggaagccccttctttcgccaccgatggggcacgtccagggcccggcaggtgtgccctggcagtagatcttccctgggaagtggagcgcgggccagccctcgctgttctgagcgagggcctgtcgtgtagtccacaccgttccgcgaaaggaaccaccattgacagcctcgttcgattagaacccggacctccctggaatccagactcggtcccttcccagctgcgcttcggaggaggcggacgctccgagaggaacccagaggcctggcgtggggggagctgcgggcagagcggaggcagccgcgccctcgcgccgccctccgccgcgcccggctcccgccccccggatcccacccccggcctgccgcggagccagcgtgccagccggagctcgccgggccaccccgcggggcgcgcggcccgggctccgggtcttggcggcggcc

SEQ ID NO: 15176 - DNA, 76 bp, Homo sapiens
  chr6:4776187-4776263
  binary
cgcatggttccctgccccatctcgggtccgtcgctgcccgtcctggtgtgcacaaccgcgctgcgcctcgaacctc

SEQ ID NO: 15177 - DNA, 230 bp, Homo sapiens; identical to SEQ ID NO: 8642
  chr6:5084683-5084913
  hyper

SEQ ID NO: 15178 - DNA, 665 bp, Homo sapiens; identical to SEQ ID NO: 8643
  chr6:5084942-5085607
  hyper

SEQ ID NO: 15179 - DNA, 249 bp, Homo sapiens; identical to SEQ ID NO: 8647
  chr6:56818408-56818657
  hyper

SEQ ID NO: 15180 - DNA, 394 bp, Homo sapiens
  chr6:710660-711054
  binary
cgtgctgacggggactggcttttcttcttcttcttgtagtttgaaatggaaacgctgcactgctgagaaaataccacggaaatagaacccactgcattccaggaaaataaataagcaaggccacccaaattttcaatgagtgctcctgcagaatgcaggaaatggcaggagatccgtccgaggcaccccaggccgggtcgtgggtagagagcagggacgagggctgggaggggacgcaggcacagggtgagggtggcccgtctccagggagaactgcgcgctcacaggcggggccggcttcccgcatcagcccggccgggctgcaggttctgagcgagggggcggccgtgcctcactctgggcgggacgcggcctggtgcagggacgctcactt

SEQ ID NO: 15181 - DNA, 141 bp, Homo sapiens
  chr6:711310-711451
  hyper
cccagagtgagtgtcagggaggaagccaggtcttccagggcgctgacaaggcagggccgggctccttccctccgttgtgtttctctgaaatgttcgaatcactggtgtgacgggagcacttaaagccgaaaaaggaaagac

SEQ ID NO: 15182 - DNA, 164 bp, Homo sapiens; identical to SEQ ID NO: 8652
  chr6:73329621-73329785
  hyper

SEQ ID NO: 15183 - DNA, 82 bp, Homo sapiens; identical to SEQ ID NO: 8653
  chr6:73330126-73330208
  hyper

SEQ ID NO: 15184 - DNA, 564 bp, Homo sapiens
  chr6:7542700-7543264
  hyper
cgtaatcaaagtaaaagaggaaaggagcggggccccggtcctgtctggtggccgagtggtgctcggggctccgcagtctctaccggctcacccccaatccccagtaaccccgagaccacgactgcaacgactcctggactcctcggccacccaaggacgtttgtatcaaggctgcgcgtcccggcggcgcggggtcctgtcccgaggaggcgcttcggcttcccctgtccgggaaacgaaacttccccgccggggcggctgccgggcccgggtctcgaagttcggccgggacgtgcctgttaccttcggtcgtccgcgccgcagcccccgcgggcgagcgcacctggggccctgcctctgagccttttgtttcctcctttttaaaaacaccggatgaaagaccccagtgtgccttggatcgcagagcgccggccgcatgtctgctttgatccagaatgtgtgggcaggggagtgggggggtgggagaggacgacgctgggggcccgccctggcctaggcgccccgggaagaccccccggtgagagggtcagcttctccggatcc

SEQ ID NO: 15185 - DNA, 107 bp, Homo sapiens
  chr6:7543350-7543457
  hyper
agatgcccacgtgagccgtgcgcgttttgcagcccgccccacctccccgccccctgctagttgttcccacgtcgggcttttgggaaagaggccctgagcgccgggac

SEQ ID NO: 15186 - DNA, 43 bp, Homo sapiens
  chr6:87861506-87861549
  hyper
cgaaatcaggcagcagtgcccgcgccacggcctctgcaggaca

SEQ ID NO: 15187 - DNA, 102 bp, Homo sapiens
  chr6:99276279-99276381
  hyper
cgaactgagctccgtgcctattcattattctctccctctgacctagggcgttaatatgatcaggcctatgactcggccgtgttctgttttcctattttgcat

SEQ ID NO: 15188 - DNA, 275 bp, Homo sapiens
  chr6:99276430-99276705
  hyper
aagacaagaggagccaggaggtctccctgctccaatctgcctaaggcttcctcttcctgcctcctcttccggccaacgtctgcccctatgttcccaggacccaaattctggaaacctgtctttaaaaatacaatcatctctaactttatgatgtccaaaagctgtctagaatgacagattcgaaactctgagacctagcagaagattttggcccacagttattacgactgtggttaactgctctccagaaaagcatctctcccgcccgtgcacca

SEQ ID NO: 15189 - DNA, 234 bp, Homo sapiens
  chr6:99276781-99277015
  hyper
gtgcacttgtacacttcagaaggatttgcattcgtgctgtgtgcaggcagaataagagaactgaagtccaacttcaaccaaatacgcctgtttatcccagggctggagcaacagccctagcccttgaaaatggcttcagtgaaatagctgagtacaccctcctcccacttccccagtccgcctctgtgcgcaggtgtatgttagtgcactcgtccctagcttgccttcctcttc

SEQ ID NO: 15190 - DNA, 152 bp, Homo sapiens
  chr7:100845050-100845202
  hyper
cggacaggcgaggccaggcggtggggcgcgcctccgtgaggaccaggtgtctgtcggcggggacaccatagcgcgcctggtgctcctcgaagagctgcgtgagtcgccccacgtagcgcgcttgcagcgtgtccacctgggccggactgggc

SEQ ID NO: 15191 - DNA, 46 bp, Homo sapiens
  chr7:100845248-100845294
  hyper
cgggaggcgatctgggctgggatccccggttctcctcctcttttcc

SEQ ID NO: 15192 - DNA, 487 bp, Homo sapiens
  chr7:101460542-101461029
  binary
cggcccccggtgacctgcggcgccgggtcccttccttgcgtcccctcggggcttctgccctctctgcagggcccgccatggagcgcgcggcgggtgcgctcggagatgccttctcgggccgggttctcgaaagcagagccccgggggcccgttgggaccgtggcatgccgggcggtggtccgcgcgcggagtccccggcgccgcggggggaccgtgccggggctccccggcccgcgcccgagtcgccgccgtgcccaaggggcgagtgcctgcctgccaccccccgcccggaggagcggcgcacccttagggtccgccccgcacgtgccagctcggcgcccgcggcgccgggacagccccgggactctgccaggtggatgttgtgcgtagccggagccaggttgaaggtgagcggcgtgtgggccagaagtcccgaggttgcaggcgcggagggaaccggggatgtcggggggtgcccgggtcccgc

SEQ ID NO: 15193 - DNA, 685 bp, Homo sapiens
  chr7:107641955-107642640
  hyper
cgggaggaggcgctagcagagcctcgaaccccgctctcagccctcacctgcaagtggctgacgatacagtagggttcgggcttgtgcagcccgcacgtcgaggtcaccgaaagcttctgtgctcggccgatgagaaggtcgcccgtggcgggatagcagctgccttctgcgcagccgtagctgaactcgggttcctgagcgcgcactcgggctctgcacagggctgcgggaaggacaggcaacagagttggggggacacaagcagggagtggagcccgaaaaaaacgaacaagcgggggcgggggagtgggtgcggagagaggacagtccattcggaagaaagcaaaatgcacagaaaagacaatggagagatgagcgcaggagaggctgggaaggcagggactccgaaaggagaaggacacggaaagaaacccacacacgtcatcaggtctgtccagcagcgagagcctccctcccgggaaacccaccgacgctcgcgcccaccctgatcagccccggggagcagctcccccaacaaagggtggatgtgtagaccctccacttcgacgtgtccggagcccggcgcagggaggctgacccccaaagggccacacacccacgcacgtgaacccgcgtgcacgcggcagcccgcgcatcctcggtgtgagtgtgcgcgtggagatct

SEQ ID NO: 15194 - DNA, 95 bp, Homo sapiens
  chr7:128509984-128510079
  binary
cgaggagcccctgctgcccggatacctcggcgcgcagggtcgctggcatctcggctccggctccgcgacctgggagccgccgccgggccgggggc

SEQ ID NO: 15195 - DNA, 397 bp, Homo sapiens
  chr7:129418755-129419152
  hyper
cgctcagagccggcctcagtgcccctgcccccggcgggtattactgtacacggtgtccgggagcccgggttggaagagcaaacgaatggctcagcctggaggacaccgtggaatcgggcgacccctgaccccgggtgacaccctcactgcccatagtcctgggatgcgctgaccggtgaggcgccagaggcaagccgtccagccgccgatcttggggaagggctgggaacctgggtgccactagcgctattaacaggaatggggcagttgagggcggggaacggtgtctcattcgcgtgcgccggggttcccgggatgagtggccgcgaagtggaggcacacgggaggtctgagagccgctttcccccagagactgggcggggcggctccgggccac

SEQ ID NO: 15196 - DNA, 236 bp, Homo sapiens
  chr7:129913007-129913243
  hyper
cgtgctcaaggtacacggtgcagggacggttcttcctctcgatgtttctagaatctccctcctcccaggctagccggcagtcccagcttgtgctacagagaggctcctttttattactttttttttcttttcctcctaaccggtccttgctggttttgagtatccactcccccacccccgcccccttctttttctttctctctgttcctgagcaagctgacgcaggtctgcaggag

SEQ ID NO: 15197 - DNA, 174 bp, Homo sapiens
  chr7:129913272-129913446
  hyper
gctcctggggaaccggggcaaatgcgccaataggagccgaggaagggggaggtgcgggccgggggaggttgggggctgggggctgtaattcaagctgggagttctctgcctcccctccccttctcttttttttctttcctctttaaacacacacacacacacacacatacacgc

SEQ ID NO: 15198 - DNA, 198 bp, Homo sapiens; identical to SEQ ID NO: 12920
  chr7:139929854-139930052
  hyper

SEQ ID NO: 15199 - DNA, 362 bp, Homo sapiens; identical to SEQ ID NO: 12921
  chr7:139930346-139930708
  binary

SEQ ID NO: 15200 - DNA, 209 bp, Homo sapiens
  chr7:140103670-140103879
  hyper
cgtatgggccagcactggtttaattcactggctgttccttcctgtgagggctttccgctaggccggcgaaggctggtgagaaagccggctctgcgccctgccctgtgctggccgccctcacctggcgctttgtaccctgaggcagctccggactcagggcaggtgggagggattgcactttcctttcactttctcaggacgccaaaccc

SEQ ID NO: 15201 - DNA, 311 bp, Homo sapiens
  chr7:140774419-140774730
  binary
accaacatgggcctctggaggaagtgccaccggcagggcttcgaccccgagatcgccgccctcattcggaaaggtaagcgccgggcgcaaggcgtggcgctgcggagagcccggcgcctttaggccccgcagcccctcgcgtctccttcccaggccacaggctatcaggtctctgggttccaggcggtccggttatccaggcctggctgagcctcggggccaggacttgcctcccaatagctgttaatgaagcttggtgcaggcttaactctctcccctgcctctcctttcgcgcgtctctgtcgggattc

SEQ ID NO: 15202 - DNA, 134 bp, Homo sapiens
  chr7:147354952-147355086
  hypo
cgggtttagaagtttcactgaaaggaaaagaaacttgacttgctgcctcaaattctagtagctgaaattatatgaggtgaagtttccaacgctgtctcttaagatagccgacctggccgggcgcggtggctcac

SEQ ID NO: 15203 - DNA, 127 bp, Homo sapiens; identical to SEQ ID NO: 10758
  chr7:150081308-150081435
  hypo

SEQ ID NO: 15204 - DNA, 271 bp, Homo sapiens
  chr7:151165408-151165679
  hypo
cggtcagctcagactcagcaggccaccatggcgccactgtacttcaactcccttccctaccaactgtcgctggcacggtgcccgcggccacaccgtaaacgctgcccagggaaaacacacaccgctcactgctgacctcacacccatgaccaggaacctggcgcagacacttggtgctgcctagccacccgcctgcatccctggatctgggcactccccagagaaagcatccacgccttgtcccttctcctcaaatgttccccgtgcttac

SEQ ID NO: 15205 - DNA, 45 bp, Homo sapiens
  chr7:155244370-155244415
  hyper
gcctgtgttaatgctccaaatggtgtcgagttgctcaactttgcc

SEQ ID NO: 15206 - DNA, 83 bp, Homo sapiens; identical to SEQ ID NO: 11844
  chr7:155257774-155257857
  hyper

SEQ ID NO: 15207 - DNA, 42 bp, Homo sapiens; identical to SEQ ID NO: 7515
  chr7:157262486-157262528
  hypo

SEQ ID NO: 15208 - DNA, 158 bp, Homo sapiens
  chr7:157370313-157370471
  hypo
cggaccccacttaaaggcttgttatatgggaccgggaccacgctgtgaggcgaatgttttttctactctgttatcatttggatttagaaaaatctaaaagataaaaaccacaccacactcccagggtctggttcatgagcacacagccgtgtgaacca

SEQ ID NO: 15209 - DNA, 116 bp, Homo sapiens
  chr7:157370789-157370905
  hypo
gtgtcagcatgacgatcaccacgcagccgctctcccacaccatctgcggacaaagaaggcccgtggccgcggtgtgactgtctcatcaccgcgtgacatgtgtaattactgcactc

SEQ ID NO: 15210 - DNA, 267 bp, Homo sapiens
  chr7:157446450-157446717
  hypo
cgtctggcccacttggttgctggactccacacgatgcccgctgctccccacacccaccccaactgcacacgacgcccgccactccccacacccaccccgactccacacgatgcccgctgatccccacacccaccccaactccacatgacgcccgtctctccccacacccaccccaactgcacacgatgcccgctgctccccacacccaccccgactccacaccatgcccgccgctccccacacccaccccgactccacacgacgccc

SEQ ID NO: 15211 - DNA, 203 bp, Homo sapiens; identical to SEQ ID NO: 8687
  chr7:157642963-157643166
  hypo

SEQ ID NO: 15212 - DNA, 38 bp, Homo sapiens
  chr7:157659219-157659257
  hypo
cgcatgtgcctctcagcccttgccatgacaaccatgag

SEQ ID NO: 15213 - DNA, 273 bp, Homo sapiens; identical to SEQ ID NO: 12947
  chr7:157738113-157738386
  hypo

SEQ ID NO: 15214 - DNA, 145 bp, Homo sapiens; identical to SEQ ID NO: 12948
  chr7:157744287-157744432
  hypo

SEQ ID NO: 15215 - DNA, 234 bp, Homo sapiens; identical to SEQ ID NO: 12953
  chr7:157929571-157929805
  hypo

SEQ ID NO: 15216 - DNA, 147 bp, Homo sapiens
  chr7:20836997-20837144
  hyper
cttcggaagtgctcctgcttccggtttcacgtatacctgggatgcgttgccatacaggtttgtcccgttttaatgctttgacccatctaagatacgaggacaggagactggagaagtaaacgaaaggcaatggccgaggggtaaggc

SEQ ID NO: 15217 - DNA, 141 bp, Homo sapiens; identical to SEQ ID NO: 8691
  chr7:22893437-22893578
  binary

SEQ ID NO: 15218 - DNA, 1088 bp, Homo sapiens; identical to SEQ ID NO: 8692
  chr7:22893607-22894695
  binary

SEQ ID NO: 15219 - DNA, 523 bp, Homo sapiens; identical to SEQ ID NO: 8696
  chr7:23507580-23508103
  hyper

SEQ ID NO: 15220 - DNA, 229 bp, Homo sapiens; identical to SEQ ID NO: 7528
  chr7:23513246-23513475
  binary

SEQ ID NO: 15221 - DNA, 221 bp, Homo sapiens
  chr7:23570157-23570378
  binary
cggaacgtgttgcatggggcttttgttttctttccagggtttcacacgaactcacttctactaactcacttctacaattccctatgtagggtaaactttggaaatgaaactcactgacaaacgttccagtacatttaagctggggatatcgtattctttgtgatgtttgtatttctccgaccccaaatatattaataaaaacttttttctgagccctcttc

SEQ ID NO: 15222 - DNA, 285 bp, Homo sapiens
  chr7:23570662-23570947
  hyper
cgtgacagcatttccacattcatttcgaagtgaaaggaaagtcgaagggacattaagggaaaagggctccttgcgtagtttcccctcacagctctcgtcttaagaacgcttaagggtcggtgcggtcgttgactaaccacttcattaggctcgtcccaccttcaacctcaaggctttcgcctttttagacgcaacgccgccggttccaacagagacgcggccgctcactgaaatagagagccaaggagacacaggccccagctagtcccacgccagcttctcccc

SEQ ID NO: 15223 - DNA, 99 bp, Homo sapiens
  chr7:25989912-25990011
  binary
cgaaccctcacctccctcggtagttatttaaacttttgccagcagctaactcactctaacttgtggcaactttttaccttcccatctggaaagctgggg

SEQ ID NO: 15224 - DNA, 585 bp, Homo sapiens
  chr7:25990228-25990813
  binary
ccatcccctccgttccacccacccactctttgggattctccctgccccattaggcagtgcttcccgcggaccccgttcgcgcacaaccttgcacacagtccccaagactgctcttctccccctcccggcacccccttttccctgcagcataagcgaccactctgtcccccatcctagcagaccccctccccccacataccgcacctgaacagctgttgcgcgcgtgcaacaggtctggaaagtgctttcccatcttcccccaaacccctcgccaccgttccatcccccgccacccctaagagacaaggccggaggggcagtgggctgcgtcccccgggccggggtgcacgggcggctggcggagtgcggggcgcccagaggctcccggggttgggggcggtggtcgcgctgggccgggacaccttcgcgagtggcccctcgtgcgcccgccgcaggctccccagcctgcccctccagcgccggccgccaggcattcccgggccggctcccccctcgcgctccgctccgctcccttccatcttgacttttgccgacgtggaaattttgggtttggagacgacctgc

SEQ ID NO: 15225 - DNA, 225 bp, Homo sapiens; identical to SEQ ID NO: 8705
  chr7:26192423-26192648
  hyper

SEQ ID NO: 15226 - DNA, 112 bp, Homo sapiens; identical to SEQ ID NO: 8706
  chr7:26192748-26192860
  hyper

SEQ ID NO: 15227 - DNA, 59 bp, Homo sapiens; identical to SEQ ID NO: 7531
  chr7:27233098-27233157
  hyper

SEQ ID NO: 15228 - DNA, 225 bp, Homo sapiens
  chr7:27238917-27239142
  hyper
cccccgaggcccggcaccactggcatatccaggtagccaggcatgggctgatggtggtggtaaggcccggctgcgtagccctggtggtagaaggcgaactccttagcgcgggagctgaactcctcggcagctgggccggcggtatccatgtacttgtccgcgaaggcggcggcggcggcggccgaggcgggctgcgcgcacgacttgatggcgttggggtgcggg

SEQ ID NO: 15229 - DNA, 263 bp, Homo sapiens
  chr7:27250231-27250494
  hyper
agcattcctctgtgaaagctggcttttccctttttttcctatactccccttcccgccctgcgctctaaatcctggctctggaaatccaccagaatcaaatgctggctccctgcgggcccgcgtcggagcggctcacgccattggaatctttttatgacctttgatgtgtttaaataacatggcaagtctgagcacacacctcggattaaactttaatcggctgcagtcaaggtcgcccaggtggtaaaagcgtttcctccgac

SEQ ID NO: 15230 - DNA, 293 bp, Homo sapiens
  chr7:29602717-29603010
  hyper
cggttcacttcctgcagtggctcagggctggatttacactgccctcgttgggtggctgtccatggacttccaggcctgaaagaaggaaattcacatcctcactgagtcgtgttaagagtctcagactggcaggttgtggtggttaagaccgtagaagctagagtcaggccccctgggttccaaccctgctctgccacgtaccagacaggcaaacctgagcaaccattttcccgtgctagggtttcctcgcctgtcgagtgagaataataataataacaatacctacctcctag

SEQ ID NO: 15231 - DNA, 66 bp, Homo sapiens
  chr7:29604726-29604792
  hyper
gcacagaaagtgggctgggagtctcgcttgctgtacccgcacctaagtgctcagaagcggcctttc

SEQ ID NO: 15232 - DNA, 54 bp, Homo sapiens; identical to SEQ ID NO: 8715
  chr7:30603338-30603392
  hypo

SEQ ID NO: 15233 - DNA, 110 bp, Homo sapiens; identical to SEQ ID NO: 8716
  chr7:30603436-30603546
  hypo

SEQ ID NO: 15234 - DNA, 249 bp, Homo sapiens
  chr7:373783-374032
  hypo
cgcgcacacatgcacacatgcacccacatgcacgcagaaacacacgcacaaacaaacgcgcacacatgcacacatgcatccacatgcatgcagaaacgcacacacaaacgcgcacacatgcacacatgcacccacatgcacgcagaaacacacacacaaacgtgcacacatgcacacatgcacacatgcacccacatgcacgcagaaacacacaaacgtgcacacatgcacacatgcacccacatgcac

SEQ ID NO: 15235 - DNA, 63 bp, Homo sapiens; identical to SEQ ID NO: 14279
  chr7:42267546-42267609
  hyper

SEQ ID NO: 15236 - DNA, 139 bp, Homo sapiens; identical to SEQ ID NO: 14280
  chr7:42267822-42267961
  hyper

SEQ ID NO: 15237 - DNA, 52 bp, Homo sapiens; identical to SEQ ID NO: 6279
  chr7:42927739-42927791
  hyper

SEQ ID NO: 15238 - DNA, 412 bp, Homo sapiens; identical to SEQ ID NO: 6280
  chr7:42928175-42928587
  hyper

SEQ ID NO: 15239 - DNA, 363 bp, Homo sapiens
  chr7:51383392-51383755
  hyper
cagcctgcaccgctggccgggatgagcacggcgcacctggctcggggtctgaataatgagcagggctgctcgtcctgtttgagggaaattactctttctgagagtcaaatcctgaatgtgacgtgtaatccctgcacgcaaggtgtggggatagcaaacagaaaccgggagaggtttgggcaaaagcggaatcgcgaagacagggatgggccgccagactcgcgggtccgctacggatgtctgcgcctcaggcctggccccactaggacgccccttccactgccaggggagaccctggaataaaggcagggagggagagctgctgccatgaaaccctccgggcaatccgaacaccttccgaga

SEQ ID NO: 15240 - DNA, 428 bp, Homo sapiens
  chr7:51383790-51384218
  hyper
ctcccctccacgctgccgggagagccgatcctggggctgccgccgaggccgggagagggaagacttgatgggaaccggccaggggcaagcccgcagggaagaggccggagtcaaaggccgggcgtcccctcgctccccgctccacccctacggcaaacacttggggggcctgaggaaagctcggagctgagtgggggctgtgctggcggggacccccataaggacgcctgcatacaaaccaccccgcgcgaaaagtgcgctccggccccggcccgacacggttacctgggcaacgacccgggtgcccaaagtacacagcacgcaccaccacccaacaccagcacccaacaccagcaccgcaccacctgctccaccactaccaccagcacccgctggggcggcagagagggcgccctgcccgggagcgc

SEQ ID NO: 15241 - DNA, 437 bp, Homo sapiens
  chr7:5458503-5458940
  hyper
cgggcttggctctgggcgttggcctggggtccgaggtctccttgcggctactcgaagtgggggagggggacagccagaaccagcaccggcccccacctttccctcccgggtgagcacggggttcaagggggcggcagctgtcctcctgctgtttcctccccgacctcagcctcggcgtgcagaagtcaggcagctcccagcgagcgcagaaggtgcgcagaggcagggctccgaggctacctcccgctgggcttccgaggctggtggcttggccttccctccacctcagcctcaccatccagcaaatgggcattaggccgtctgactgctgcgtcagattaggcgcggccctggcactgtgcatgcatgcatgagtagtagcttgttttcaccgcttcgcattagggcactttgccttgccaggccggagccagatc

SEQ ID NO: 15242 - DNA, 591 bp, Homo sapiens
  chr7:5466599-5467190
  hyper
cgccctccccagtatggcgggccacattgaaatgtaaaaaccaggcctgggcgctgtggccatagggcacaggccataggccaccaggtccagccgccatcttccgcgccccacccccattccatcccctccccctccccaccccctcatacttttgtttacccagcgggataggtggccaaaaactgtggacgcaattgagtgaaagtgcgtgtgtgtgtgtgtgtgtgtgtgtgtgcgcgcgcgcgcgcgcgtgtctgtgtgtgtgtgtgtttgactgggtagaaaatcggctgggggctgggggggtcttccttgtagccctaagccgcagctgcgggagaagctgccctggctagccgaggcccggcccagcgtgcttctccgcggccagcctgggccaccggagccgaggccttccctgtgttcctaggccgctggctccggcctccgctccctggacgcctcccgactgacaaaattctccgtctttgttttaaaaccaaaggacaggccaaccttgagcccggccgtcacccctgtcgcgcttttgttggcgcaggctcggccccctacaccgggctggtgcag

SEQ ID NO: 15243 - DNA, 107 bp, Homo sapiens
  chr7:5467905-5468012
  hyper
gctgctcacgccggggtgctccgggccggtctcgtgtcccgggccacgccgcgcaccctgctcaccccatcacggcctggggacccggagactgcgcagggaaccac

SEQ ID NO: 15244 - DNA, 145 bp, Homo sapiens
  chr7:55087803-55087948
  hyper
tcgttggcaaaaggcaggtggggtccgacccgccccttgggcgcagaccccggccgctcgcctcgcccggtgcgccctcgtcttgcctatccaagagtgccccccacctcccggggaccccagctccctcctgggcgcccgcgcc

SEQ ID NO: 15245 - DNA, 78 bp, Homo sapiens
  chr7:55087982-55088060
  hyper
cggagacgtccgggtctgctccacctgcagcccttcggtcgcgcctgggcttcgcggtggagcgggacgcggctgtcc

SEQ ID NO: 15246 - DNA, 158 bp, Homo sapiens
  chr7:55571348-55571506
  hypo
cggttaccaaggtgaagccctcgtgacagggttgggggtctctgtaagaagagccatgaagagggcttgctgcttgctccactccccaccacgtgaggatggaacaagacagtgcctacgaaccacggacagagccctcaacagacaccagagctgac

SEQ ID NO: 15247 - DNA, 392 bp, Homo sapiens
  chr7:55640395-55640787
  hyper
cgtcctgtcgccctagactaaacccaggaaggcttttaaaagaagcagagtctccgcggggggaagcttgttccctgagaggtggccgcagacgaacccactgctcagtctggcatcccgaagccgctccgctcctggctctccccgctgttcctgcgcgcagcgggggcagtgcccccacacccacgcgtgatgggaaggccggcctgggggtgggaaggcccaccgaaatagatggtccccacacctcactgcttccttggatgtggctattttttatgccagtgttctcctgctctgaccctacttgaacttgaccgcaaccggccccgccttgcaggccaccctcccgcagcagaaaactgtgcggagctcgcgctgtcctcgcctcc

SEQ ID NO: 15248 - DNA, 56 bp, Homo sapiens
  chr7:56075649-56075705
  hypo
cgtcacacggacaatcagccatgcctttctgagtccatcctagtgtaggcatgtgc

SEQ ID NO: 15249 - DNA, 470 bp, Homo sapiens
  chr7:65509043-65509513
  hyper
gagagaaggagggggcacattgaaaggcagccggacacggaggtgctcggccccgcaccccagacacaggttgtggaggttcggaggggcttgagtcccgttcgtccctgtccctatcccggggccctcccggacagggccagccagccccctgccctcacttccgtacgagggtcgcccagtccccacggctctcggctctcagaggtccaactgttaggctcctcgcgtaccaaaagggacgcgtccagactagagtctggacttccatgaggtccagactcgtcgcctctggctgccagcagacaaggaacttcacactctacagctctccccaccgtcgccaacagcgccaaagtgccagctccgcacgccaaggtgcaagccaggagcgccgcgcttcatgccgggagcttggcggactcggaacctcgcgccgcaggttctcctttctcgggggtgggggtgtt

SEQ ID NO: 15250 - DNA, 51 bp, Homo sapiens
  chr7:65509542-65509593
  hyper
ttcgcccaggccgacttcagactgctgagcgtttgcggacaggattatctc

SEQ ID NO: 15251 - DNA, 80 bp, Homo sapiens
  chr7:83277846-83277926
  hyper
cgcggatgccatgctgccgtgttcaccgtccaagccctcgctcctcactttaaggagggtctgagttttacttaggactt

SEQ ID NO: 15252 - DNA, 259 bp, Homo sapiens
  chr7:83277959-83278218
  hyper
gaaatcgaacgcgttgtcatcagaaagcacagttccgaagtgccatttgtcaggctgtatttggctatgtaaaacctttctttcctcgggacagttgtttataagccgggagcaagaggacattccaaagagtgagtcttcagagccatgtcctgtctagagcgctcttcagcaactacgccggtagattcaggaagaagctgtatttttcagtcacttgggcaaagctgttcattcagaaaaaaaaaaaaaaaagaga

SEQ ID NO: 15253 - DNA, 107 bp, Homo sapiens
  chr7:87936014-87936121
  hyper
cgatgggctggggagtggggtcctagcagcagggactggaggtgagctgaagcagataagggacgggagccttgtggcgaaaagtgacccacctgagggagaggcgc

SEQ ID NO: 15254 - DNA, 208 bp, Homo sapiens
  chr7:87936206-87936414
  hyper
gctgtggcttgtggctctcgctgctataagaagccagagaagggcgggacggtctgctggatttcgcaagagaagcggaaaagaacttgtttcctggaagagttcaagctgagaatcccagcagctggaaggaccggaacttctatactgcggtgctgctgatggtgccgctgacccccgggaagcggggattttaagggttacaccc

SEQ ID NO: 15255 - DNA, 101 bp, Homo sapiens
  chr7:95226207-95226308
  hyper
tgtcaagtactcctggccacaaactgtttccaagagtttggactccgcgtgctcattggtccttgctcagagcagggcttttacagtagccaacaagctgc

SEQ ID NO: 15256 - DNA, 216 bp, Homo sapiens
  chr7:98955444-98955660
  hypo
cgtttggttcatcttggtagctctagctcctaacacagtgcctggccgtcagcacagatctgtgtggtcacagccctctcggagctccggtgagcacaggcaaggagaaggtcctagcacaggtgtctgctgccaagtcatagtaacaggaagagctctaggagctaagagcagggagaagccactttaggcggaagtggcccgggaaagtggacc

SEQ ID NO: 15257 - DNA, 215 bp, Homo sapiens
  chr7:99084631-99084846
  hypo
cggcagctcgcgtatcttgttgaacataagaggattcacaccaaagaaaaaccttataaatgtagcaaatgtgaaaaaacgtttagtcagaattcaacccttattcgacatcaggtgatccatagtggagaaaaacgccataaatgccttgagtgtggaaaagcctttggccggcattcaacccttctatgtcatcaacagattcacagtaaacc

SEQ ID NO: 15258 - DNA, 154 bp, Homo sapiens
  chr7:99680237-99680391
  hyper
cgaggcggggatagtcaaggaagtgaccgtgtcctggagacgcggcaaccgtggtgaccgcagtcaacacagtaagccccagcattcgcattgtaattgagctcattcaagctgagcgctctccagtagggactttcccctgtagggagcatgc

SEQ ID NO: 15259 - DNA, 245 bp, Homo sapiens
  chr8:101661596-101661841
  hyper
cgtccctggtgagccgagggataagtgagcattgccaccggccccctccctgcccaccctgaccccagccctgggcgcaccacgtagcggccccccagcgcgtcggaccgctgctgggacaccgggatacagaaatgcatcttcatggctgagcggtgtcttgggagtagcgctgggaacccgacctgcggcggcgggcggtgcgcggctctgaactcggcagcggtggacgcagcgcggcctgc

SEQ ID NO: 15260 - DNA, 62 bp, Homo sapiens
  chr8:101661991-101662053
  hyper
gcatccacggccacccccaccccggacatcggccactgttggcattttctccaagaaggccc

SEQ ID NO: 15261 - DNA, 49 bp, Homo sapiens
  chr8:102092936-102092985
  hyper
cgggaggcttccctgcccgcctcggcctcgcttacaccgcaggtgctgt

SEQ ID NO: 15262 - DNA, 141 bp, Homo sapiens
  chr8:102093137-102093278
  hyper
ggcaggaggcctccgcccggcttctcgctccctcttccctctccccgaccccctcccgggctgtcagccgactgccaccgtcaccatggctacgcggctcccgctcagttccacagtcagcaggagtcgagcaggggaggc

SEQ ID NO: 15263 - DNA, 284 bp, Homo sapiens
  chr8:110552612-110552896
  hyper
cgtttcacgtcacgccgggcgccaggcgtcggcttgtataacctgaaaacgctcctgtttttctcatctgtgcagtgggtatgatttttttttcatcaacaaatttcacgtgggtaatctgaaatgaaaccacttaagttatgaaactctttccttttgagttattctggagaccttactccgccttcggaaccgccccagtggtgtcacatacttgagggcctgactctcggttgccagacatggcacagaatgttcgattttactaccagctctcacactcc

SEQ ID NO: 15264 - DNA, 125 bp, Homo sapiens; identical to SEQ ID NO: 11903
  chr8:121136702-121136827
  hyper

SEQ ID NO: 15265 - DNA, 107 bp, Homo sapiens; identical to SEQ ID NO: 8747
  chr8:128957492-128957599
  hypo

SEQ ID NO: 15266 - DNA, 107 bp, Homo sapiens; identical to SEQ ID NO: 8753
  chr8:142427489-142427596
  binary

SEQ ID NO: 15267 - DNA, 328 bp, Homo sapiens; identical to SEQ ID NO: 8754
  chr8:142427700-142428028
  binary

SEQ ID NO: 15268 - DNA, 77 bp, Homo sapiens; identical to SEQ ID NO: 7581
  chr8:145698674-145698751
  hyper

SEQ ID NO: 15269 - DNA, 1070 bp, Homo sapiens
  chr8:18870226-18871296
  binary
cgaacgcattgaggcatttgttgccagaatcccacttacagtaattttccagatctccgtcttccctacaccaacacctggacccactcaagagttattctggagcggaaatcctggatcccgctatcgggagaaccagtgtctagaaaatgaaatcgtggtgcccattccatcctctgcctagtgggcgtttaacatcctttgacatcgaggggaatggcaaaacgaaacatttattatttaggtcaccaacaacattctaaacccacgtcctctaatcggtgttaatgtgtttaaaaaaaaaattcagaacatcattcgccagaacggaaagctgaaaacggcggataaagttaaatgcatgtaaaacagaatgacttaaacatctgtaaaagctcctgggaattgcaccgaataatcttcccttgtccgtttgctcgctcaattcaagtttgtttagtttagtctttttttctttctttctgacagaaacgtgatagtccctaaatacaagctgaccgggcaaagaaagatcggcatacgaggtcctctttcatgttgccttcttttgatagcttttctccaaagtctgaggttttcaaagccgaggtatgaactaaaacccctaaaccttaacaccacaaagttgaccctgctgggctcctaaaaaacacaaagcaagcaagcgcgaagagaaaaatcgcaccctgcacctatccagacagcacaaacccaggtggccccgggatcctgggggacagagcggcgacaaagcaacacaaaccccacgtcgaacagcggcgccgcgtgcgcaccccgcgcccgcgccccggccccggagctcaccgctgcgctccttccttccatcttccatcgccagcccggccgcgcgccgaaaccgccgccgggcgctccggggccgcagcctcagggcgcgagtgccggcggccagcgccgcgtgctctttgttgagctcccgggactgccgagaggcggcggcccgcgcgcaccctggcggaggctggcgaggctgcgagcccgcggcagccgcccgcccggcccccagtaac

SEQ ID NO: 15270 - DNA, 382 bp, Homo sapiens
  chr8:18871577-18871959
  hyper
tgctttgtcttcttccttcacagttttcccaccctgagaaaagtgagaggtgctttccctggtgtttcctctcaggaagggccgtgtgactggagccgcgagttgggcgccgtctcgccggggctggaggtacgcgggcttcgggacacgcacctaggcgtccctcggggtcccggcctctctgaccgggctcccccggcaccgatccgcggccggagcgtttagtcccggggacccgtcgagccctgaaagggccatttccccctgaggcgagtccccccaggcgccccgcagcctggcctcgggactgcccccaccgacagtgcgtgcgcggggagaggtcacttaaaactgcattttcgaacattagtgccccggaccc

SEQ ID NO: 15271 - DNA, 998 bp, Homo sapiens
  chr8:19171057-19172055
  hyper
cgcagcctcgccgacgagtggccctggagagcctccaggcgcccgggtggggccgcgattgcgccccgccagtcaccccggcatgtgggcgcggcggggcggcgcgggcgggacggctacaagagctgttttgcgtccgggccggagtatttgctcagcccgcctgcgccgcttgggacgcctctgcctttccctccctcccttccccgacggcttctggcggccaagtggatgtggcgggtgatcgagccaccctgcccaggggcgcccagcactggtaggtgctgggggtggggcgaggctttggggagagtgtgcgtggggtgggagtagggggaagggaatttcctcggaggttgcatgggtgcatgggaggcgcaggggccagagcgggcgggcggaagcctcacccccgcctccaccccttcgcggcgcccggggcgggctcaggtgcggggttgggcggcgagagcggccgcggcgggtgtccggtgtccggtgtccggtgtccggtgtctggagccgctggctaggtgagcggcggtccccggggcctgggggcttgcagggggtggcgggggaacttcgagggagagggtctgccggggctgaggaccttcggggaagttctggaatccggcagggacacgcggcgcgtgcttccacccgcggggagtgcaggccccgggagggtccgggctggcctagagtttctagactcctagcaggagcacgtcctcgacttgcgcatggaaatcttccaggagggaagtcccgggaaacggtggcagctggcgcagcacccccgcagcacgttccccgcgcaccggcacccaggggcgcccccacgtggggtctgggagcgcgcggaggccagtgcagcgccgcctccctcgggctgcagcggcggggctggcccagacccagaccgggtgcccagtgcgctcagccaagcggcgcccctgcccgctcctggactcgggggtcacgcgggcacc

SEQ ID NO: 15272 - DNA, 518 bp, Homo sapiens
  chr8:21882027-21882545
  hyper
cacctgggaactggttagaactacaaattccctcggccccacccagaccgacgccaagggcagctgtggagtggggcgcggcaatgcgccccttaacagccctccaggtgattctgccgcgcagaggaggaaagaatgggagaagggaaggggagagggaggcggcttctttgcgactaattggacacctgcccttccccttcccaggcttcttagcccgggcttggacagccgccttccggccagaggggatgaggttgcgctgcgctccgggagcgccgatggcgtgactggccccgcgcggagcagcgacagtaaggctgtgtggggggagctgggacctaagccgcgcgcacacccctttctctgcgtctggtggaggtgcacagaggcttttgagtcaggcccaagcgcagccaggtgacctccccgcggcctttcaagcctgagctcggtggacagctccctctcccgtgagtcccgctgtcctgtacgcgcccggtcgagccccgggctgc

SEQ ID NO: 15273 - DNA, 51 bp, Homo sapiens
  chr8:22722458-22722509
  hyper
atgaggccccttcacggccactagggggcaggagtgcggggcgggcagcac

SEQ ID NO: 15274 - DNA, 127 bp, Homo sapiens; identical to SEQ ID NO: 8761
  chr8:23021590-23021717
  binary

SEQ ID NO: 15275 - DNA, 90 bp, Homo sapiens
  chr8:23082568-23082658
  hyper
cgccatcctgccaggtcaatccaagaagcagcgtgcttggctatgacaagacagaacttcgcattcggagttcagggcacccctgacccc

SEQ ID NO: 15276 - DNA, 169 bp, Homo sapiens
  chr8:23082729-23082898
  hyper
cgctctcagcttctgttcctcaaccacggccgccgcgtggatgccgctgcattcggagtcgttttgccacttggtcccagcgccaggcttctcggtcgggagttgacctcagcctttctgtgacccagttcctggcacccagcaggcgctcggtggacggatgggtggc

SEQ ID NO: 15277 - DNA, 173 bp, Homo sapiens; identical to SEQ ID NO: 8766
  chr8:56791852-56792025
  binary

SEQ ID NO: 15278 - DNA, 1176 bp, Homo sapiens; identical to SEQ ID NO: 8767
  chr8:56792065-56793241
  binary

SEQ ID NO: 15279 - DNA, 103 bp, Homo sapiens; identical to SEQ ID NO: 8768
  chr8:60030067-60030170
  hyper

SEQ ID NO: 15280 - DNA, 239 bp, Homo sapiens; identical to SEQ ID NO: 5853
  chr8:60030908-60031147
  binary

SEQ ID NO: 15281 - DNA, 120 bp, Homo sapiens; identical to SEQ ID NO: 13055
  chr8:61822259-61822379
  hyper

SEQ ID NO: 15282 - DNA, 144 bp, Homo sapiens; identical to SEQ ID NO: 13056
  chr8:61822883-61823027
  binary

SEQ ID NO: 15283 - DNA, 113 bp, Homo sapiens; identical to SEQ ID NO: 6310
  chr8:80695946-80696059
  hyper

SEQ ID NO: 15284 - DNA, 133 bp, Homo sapiens; identical to SEQ ID NO: 6311
  chr8:80696101-80696234
  hyper

SEQ ID NO: 15285 - DNA, 307 bp, Homo sapiens; identical to SEQ ID NO: 6312
  chr8:80696263-80696570
  hyper

SEQ ID NO: 15286 - DNA, 209 bp, Homo sapiens; identical to SEQ ID NO: 10821
  chr8:80803900-80804109
  binary

SEQ ID NO: 15287 - DNA, 261 bp, Homo sapiens; identical to SEQ ID NO: 6313
  chr8:95003763-95004024
  hyper

SEQ ID NO: 15288 - DNA, 72 bp, Homo sapiens
  chr8:95651655-95651727
  hyper
ggccttcgcccgctctcaggggacgagagctgccacctgtatcacgggaggccccgcctccgcctgcacctt

SEQ ID NO: 15289 - DNA, 176 bp, Homo sapiens
  chr8:95651845-95652021
  hyper
ccggatttgtacccggagtgggttctgcagggataggtgcatggttgcccgtttcacatcatgaatatgaacggggctggacacctagagccgaattattaatacttcagacagaattctgttcccaagaacaaatcgctttgagatataaaacccgagaaaacttcacctctggc

SEQ ID NO: 15290 - DNA, 224 bp, Homo sapiens
  chr8:95652591-95652815
  hyper
cggcccggagaagggggggctcgcaggatttctcctgctgtttgcactgaaagttgtgttggctcaggagctgcttttccggggatctgcagttgcccccgccacctcctggctgcggttggcaggtccctccctcagcagttcgtcctccgcctgcgccgcgccctgggcagctccgcgccccgggcctcacctctggcctcctttcgcctccctgcacctgg

SEQ ID NO: 15291 - DNA, 378 bp, Homo sapiens
  chr8:95652863-95653241
  hyper
gtattctccgagcccccctgcacctctcagttacctccagtgggaacccctccccccagcgactccgagccctttacctctctgagccctttccccgtctggcctcgtctaccctctgggtgtcaaccgcctcttccctgcccctcacgtctccccctcctcctcccctgccctcgcctctccattcatccagccattgtctcccgccccttcctccccctcccgaagcggcctcctcccccaccgctgccacgtcgtggtttgaaggagccaatgggccggcgccgccaggtgtctcttacctgcaccacgtgggggagggggaaggggcgggcaggtaaagccacatcccaaaacagaaaagctttcagccattgc

SEQ ID NO: 15292 - DNA, 53 bp, Homo sapiens
  chr8:95653290-95653343
  hyper
cgggcaactgaatacaaaaagggcaggcctcctgcgccctccttcccaccccc

SEQ ID NO: 15293 - DNA, 109 bp, Homo sapiens
  chr8:95653451-95653560
  hyper
tcttagaagagggtttagcacaggttttttcgttctcacttccacaccaccttaccgcctcccgaccccccctctccccctccccacctatcgtcatgacggcctctcc

SEQ ID NO: 15294 - DNA, 45 bp, Homo sapiens; identical to SEQ ID NO: 8784
  chr8:99077294-99077339
  hyper

SEQ ID NO: 15295 - DNA, 99 bp, Homo sapiens
  chr9:100263437-100263536
  hyper
cgattgcgtgttggaactacgtgtagacaaaacgatcgcggttaaagcttgcggctcagagcccacctggccgcgctgctgggaaacggacggagcggc

SEQ ID NO: 15296 - DNA, 111 bp, Homo sapiens
  chr9:100264589-100264700
  hyper
cgtggatcccaggttcgcgctgagagtgtttggggcaggtgaagtttcccaaactgggagagacaaggtttaaagcaccacgacacgcgctacgcggccaagtggagctgg

SEQ ID NO: 15297 - DNA, 108 bp, Homo sapiens
  chr9:100264871-100264979
  hyper
gcgctccccacacctgttcaccctctccgggcctgggacgctggggtcccagccgcgcacatgcggagacgctgcagaaatcggagactgactgccccagactcgatc

SEQ ID NO: 15298 - DNA, 395 bp, Homo sapiens
  chr9:116111663-116112058
  binary
cgcatacaatcgcgatttcattcaacaaggaatttaaagagacctgctgccccgggcgggatgggagcgcgggttgggtgggaggaggcgcagctgcggggcgcgctggcgcaccgggagggccgggggcggggtcagccaggccccgcccgccgccacctgcgacaggtggagcgcacggggcgggcgcacggccatgtccgccgagggcgcggagccggggccggggtccgggtccgggcccgggccggggccactctgccccgaacacggccaggctctgagctggttctgcggctccgagcgacggcccgtgtgcgccgcctgcgcggggttgggcggtcgctgccgggggcaccgcatccgccgggcggaggagcgcgccgaggagctgc

SEQ ID NO: 15299 - DNA, 168 bp, Homo sapiens
  chr9:124062292-124062460
  hyper
cggggggccccggggctcccggagtaactctctattgtaagttcttgcagatacagcgctaggaaaaggggagtaattcaggtctagaatggaaaaactgttttgttgctttgtaagtatctcttgctgcttccggggctctggctcgcagacgagggtgggagcctc

SEQ ID NO: 15300 - DNA, 253 bp, Homo sapiens
  chr9:126165468-126165721
  hypo
cggctccctggcctctggggcctcccactggtgtgacaaccagaccgagtaaaagatcaagtcctgttccctgaatgacccctttgtgaaacacccgctgggagccccggggaagcctcacaaaggccggggctacacgcttgggcttcgcaaagtgctggctccgcagacacagggttcttacagacagaggggagaggcacaatactcactgctcagggctcggcacagacgtcctccggccttccactgc

SEQ ID NO: 15301 - DNA, 43 bp, Homo sapiens
  chr9:130689378-130689421
  hyper
cgggccgcgagtttcggctgggatgggggcccaaacctgctta

SEQ ID NO: 15302 - DNA, 419 bp, Homo sapiens
  chr9:130689749-130690168
  hyper
gacccgatcccacccctaaacacagccccagtggtgccccgcccccacgtatggccccacccccatgccctacaaccccaaatccgcccatttgggccccgcccacataccccgccctccccaggtatatgatgacctaggacccgcccccaccgagccccgcccccagccaagtacccagcaaccgcgccagcagcgagtgcgggtgccgctgcaggtgctgcacgtagcggggcaggtgggcgagcagagcctgcacctctcggcgcccctgggtcttcaggaagaagcgctggtcgtggctggggggcaagagaaagaggtcactgcccaggcctggctggagcggctcccacccggcccccttccccgacctgtgcacgtggatctcgctcccaggtctcggcaccgcctctctc

SEQ ID NO: 15303 - DNA, 280 bp, Homo sapiens
  chr9:132145475-132145755
  binary
cgactggccgttggcctctcaggactgtcacttggaagttccttctccaagagatggctattgccaaagtcatctgtgcagtgaccactgcagggcctgggcgctcccgggagccgcagcgcagggacagtccgtgcagacgggtggcgggggaggcgggggagggcaaaggcctccactctgcaggtagcccgggcctggtgggcgaaaggactcaaacgccagagctctctgaccctcggccgccagggttcaaggctgggcccagccgcgctttgcc

SEQ ID NO: 15304 - DNA, 630 bp, Homo sapiens
  chr9:135286324-135286954
  binary
agcatcacgtcgaatgttcatttccgttcgatcatactaatttcttacccaaattacaaccctaagagaaaaaaagcataatctttggcctaggaggctccgcagacaagaatgagggagctgcggtttcgggctggatcactttcccttccattacacttccctcctccccacctttagcctcgcttcccgctgatgggaaaccaacactgctgtggcggccacaccttcccgggggccactggagaagtcaggctgaggcttgggggtcagggagcaagcctcgaggcgaatttatcttgcgccgctggagggcagtgcgcctttaaaaatgcgccccgcgtcccaggtgcgggagtggaaggcgcaggtggtaaccgtggattcaacaacaattatttgtgtgaccgccaggcgctgagtagagcccagaggtggtggtggcggtttgtttttgttttggggaaaagggaacccgtgctagaattaactgagttaattggctcctggcaaaacattgactccctcctcttgccttccctaaactcggtcctgagaggaggaaggatactgcctaggcgcaggctgcacctgggggaggctggcttcccacactcgtgcctttccatc

SEQ ID NO: 15305 - DNA, 208 bp, Homo sapiens; identical to SEQ ID NO: 7612
  chr9:135645005-135645213
  hyper

SEQ ID NO: 15306 - DNA, 452 bp, Homo sapiens; identical to SEQ ID NO: 7613
  chr9:135645250-135645702
  hyper

SEQ ID NO: 15307 - DNA, 520 bp, Homo sapiens
  chr9:139948370-139948890
  binary
cgcacagcagtaggaggccggcgaggcccgcggcggccagcagcagcggcggcagcagtgaccgcaccttcccggccatgggcgggcgggcgcgcgggaggacgatgcgtggacccggagagtgcggggagccggaggcggaggcgggcggggccgcgggaccgcggggtaggggccccggggcgggacgaggggcgggaggccgggcgggcccgcccatcaccggccacgcccacgggcggacaggtttcgcctccgctcccaagcttccgccgtccggcccgcgcaggtgagagacgcgggcgcggctgagtcaccagcaccgccccccggctcccgggtctgagcccgggcgccccgcggctatggcccaccttccccttcccgcccactcagcaaggggatcccccggccgtggaggcaggagacctggcgtgggggtgggcgggcgaggctggctcggagggtcctgtgctggagagccgcgcttttcccgggcccgggaaaggaggccagactc

SEQ ID NO: 15308 - DNA, 338 bp, Homo sapiens
  chr9:34380737-34381075
  hyper
cgagggcgggacacggcagggcctcgagagcgtgcagcgcggggctagagcaggctgggggcctgcacggaagctggccgggctggaagggggcggggttctggggcggggcttgtgtggggtggagcccggctgaggcgggcggagccctgcgaaccttacagtcggttgctcccggcaccaaggccgcaggcggcggtcggtgcagggcgccccgctggcgtagtagtccatcccgcgcagacagtagtggcggcccgagcaagcactttcgtaaccatggaagggcaggcggccgggcagcgggtccacgcacccgcatcggggcgtgatccgcg

SEQ ID NO: 15309 - DNA, 63 bp, Homo sapiens; identical to SEQ ID NO: 8817
  chr9:37034135-37034198
  hyper

SEQ ID NO: 15310 - DNA, 316 bp, Homo sapiens; identical to SEQ ID NO: 6326
  chr9:6644554-6644870
  hyper

SEQ ID NO: 15311 - DNA, 64 bp, Homo sapiens
  chr9:82188495-82188559
  binary
cgtgcgcgatgaccctcaccccccgctaacgccgcatagtaggttttctccgtctccctgcttc

SEQ ID NO: 15312 - DNA, 114 bp, Homo sapiens
  chr9:87285083-87285197
  hyper
cgaagagagagtgggcacactggtggctccagcggcgtcagtgccatcgcggggcaagttgattcctgggccggagctgggcactcatccatccacagtctccgggctggggtc

SEQ ID NO: 15313 - DNA, 545 bp, Homo sapiens; identical to SEQ ID NO: 11987
  chr9:93955385-93955930
  binary

SEQ ID NO: 15314 - DNA, 268 bp, Homo sapiens; identical to SEQ ID NO: 5859
  chr9:93956177-93956445
  binary

SEQ ID NO: 15315 - DNA, 178 bp, Homo sapiens
  chr9:99637706-99637884
  hyper
cgagaaacctcttacccggttcccgccctcgccccccgcttacaggtaataaagctggaatttatgcagctctttcggtctccacagctcggggtcttgccacagacacagcgcccacgagttctggcactttggtcaacgtttataaacgggctctcctctgccgccgcgggcatgc

SEQ ID NO: 15316 - DNA, 316 bp, Homo sapiens
  chr9:99638097-99638413
  hyper
cgcccgcgacacccaagggccccgggaccacctctcagccttagctaggcgtgaagcagcgagctaagcttgcacatgcgcagacgtcatccagaagaccctttcctagagtgtggcgcgcgagccattcggatttaagactacgtttcccagaaacctccacgccacgacttacttcgcagcgttttctctattggatgattggaagatgttcctgactgcctcgcctggccaggttctgccagagcccctagaggttatgggttaaatttgaactttgctgccgaatacggtgcgtggtcctccatcaaatccc

SEQ ID NO: 15317 - DNA, 622 bp, Homo sapiens
  chrX:2815904-2816526
  hyper
cgcgtcataaatcccagcccttatcttgaacaagagtcaaagaccggacttgaaggcatcccccaagataaaggtaggccctctgcagggcagctgtaagtcagctctcctccacccctctggctggccccctccttatccgagtcctgcttccttcctctttaaatctgcagacaatgctgcttctctgcaggtctctgcatattccctcagctcacagaccggctgcatacttggtattttcagggttaggtttgcaacacatgactggggaaatgcatgaaaaggaaatgatgcaagaattcaccgcggacacctttaggtgagaaggagatgtgacaaaaagtctctgcctggccaaaccgtagccaggctcctgaagcccctcccaggcccggtggtgcgtttccttatagaattagatttcagcaaagtaccggctaagtcagtttggcgagaagccaccattcttgatatcatgttcctcgtcgtccaccacccctggttgatgtttaacccccttggctggctttaacaagccaggttggtttagccaggacccgcttcacctctgatgtttccttttagtgctttgccatctgtacacccgctgcctgccccc

SEQ ID NO: 15318 - DNA, 145 bp, Homo sapiens; identical to SEQ ID NO: 10069
  chrX:40017447-40017592
  hyper

SEQ ID NO: 15319 - DNA, 32 bp, Homo sapiens; identical to SEQ ID NO: 10070
  chrX:40017968-40018000
  hyper

SEQ ID NO: 15320 - DNA, 70 bp, Homo sapiens
  chr1:10091914-10091984
  hypo
gatttatattttataaatatatatatacatacatatatatatattttttgagatggagtcgcgctctgtc

SEQ ID NO: 15321 - DNA, 120 bp, Homo sapiens
  chr1:11091195-11091315
  hypo
cgtccatgtggaggaagaggtgtgctgcctttcctagagaaagggaatttgaaaccacccagagctccttagcaccctcatgtcaaatataagaaagatctgcggccgggcgcgatggct

SEQ ID NO: 15322 - DNA, 32 bp, Homo sapiens
  chr1:1206802-1206834
  hypo
cgcaggtttaacgaaagttcatggacagccgc

SEQ ID NO: 15323 - DNA, 93 bp, Homo sapiens; identical to SEQ ID NO: 13104
  chr1:12251958-12252051
  hypo

SEQ ID NO: 15324 - DNA, 395 bp, Homo sapiens
  chr1:1234784-1235179
  hypo
cggctgccaactcctggtgactggtggacccgtccccaactcctggtgactggtggacccgtccccaactcctggggggctctcccctatcccaaaatagccactcctgcctgcagccaacctctgcccgggatggtggccggggctgctgtcccacaggcaagcaaaggccccgcaaggagccagtgactgaggccacagaggtgaccaccgcctcaaaaggagatcccagcagcggccccacccacacgtgcccctccactgcacacatcaaagggagcagccttggtcccctagagagggtgtgggcagggcaggtgggagacaggcaggaggaaggggcggggagggtgtgccgggcatggggtgaggacgcaggggcctcccaggcgcct

SEQ ID NO: 15325 - DNA, 153 bp, Homo sapiens
  chr1:12460147-12460300
  hypo
cgcattatgaggccccactcaagcgtaaaaatgaaaactgagccactggtctgtttttgtttttgctttgctacctttccatggccgtaggtggacaatcagctcattggtaccacgcagcccttcatgctctatgtgactcccctgagcaat

SEQ ID NO: 15326 - DNA, 607 bp, Homo sapiens
  chr1:1247740-1248347
  hypo
cggaagttctgtggggcagggacaggtcagtgagcgcagcagcggccctcccccctccagagaccgtcctggcactcacgctgtccttcatgatcagggtgccgtgcaggagccgaggcttcttggcctcagggagcagccctgcggaggaggtggcaggagccatcaatgtgagggccgctcccagccgcctgccccgagcaccctgccctgccctgcccagcccgcataccctgcgccatctcccgcttcagcagccccagcgagatgcctacggggatgctggggcttgtgggcagcgtcaccgtctcgccattggccggcatgtagcagttgacccctggaccccgggggaagagagagcctcagcccaggctgcccgtgctgacccgaggtgggccccacgccgcccgcccggctgcctacggagctcctgctcgatcttctgcttcaggaactccatcttcttggcctcgccatgcaccagcagcacgctctccggctctgcctggcccaccagctgcatgatgcccttggcgtccgcgtgtgcgctgaatgacatgtactccacctgcatcttgacctccagctacagaggccacggggc

SEQ ID NO: 15327 - DNA, 116 bp, Homo sapiens
  chr1:1253130-1253246
  hypo
cgttgtttgcaaagtgcagagacaaaatactgtcaacctaaaatcttacacacctaagggaaaaaaagtcctttaagaacgaggataaagtaaatccatttgcaggcaaataaatt

SEQ ID NO: 15328 - DNA, 84 bp, Homo sapiens; identical to SEQ ID NO: 7651
  chr1:150586185-150586269
  hyper

SEQ ID NO: 15329 - DNA, 179 bp, Homo sapiens
  chr1:154685569-154685748
  hypo
cgttaccgtctggtccttgctagcatgcttcacagccgtgcaaactcaagcccaacctcaggagtccctcaatgtgcagctcataaaatgacacggaaaaggtttagtcagctcattaatttcacgcagagacacacctgagcgatttcacttaagaaacaaacaccaagtttcaaaag

SEQ ID NO: 15330 - DNA, 78 bp, Homo sapiens
  chr1:154685777-154685855
  hypo
gaaacaaacttgagcctaggtatttttgaaccaagcagaaatttttctttgcttgcctggtcccgcgctgtccagtgc

SEQ ID NO: 15331 - DNA, 47 bp, Homo sapiens
  chr1:155162034-155162081
  hypo
ccacctggggtagagcttgcatgaccagaacccgtaacaactgttgc

SEQ ID NO: 15332 - DNA, 187 bp, Homo sapiens
  chr1:156553606-156553793
  hypo
cgagaacggctggtggccaagctggcagacaccgtgaggacgcgcttggcccaggtggggctggtccagactcacaccctggtgagatgacacctgagacaaggagatgggggtggagagaggttacccagagaaggggttggtggtaagcagagacgctgttccctgggatgctgcgcgcttggcc

SEQ ID NO: 15333 - DNA, 59 bp, Homo sapiens; identical to SEQ ID NO: 13113
  chr1:1566482-1566541
  hyper

SEQ ID NO: 15334 - DNA, 97 bp, Homo sapiens; identical to SEQ ID NO: 6661
  chr1:1566979-1567076
  hyper

SEQ ID NO: 15335 - DNA, 287 bp, Homo sapiens
  chr1:160953524-160953811
  hypo
cgattttttttccctttttttttttttaatgtagagtgtctcgctctatcgcccggtggtgcagtgccaaagatcataactcacggcaggctcaaactcctgggctccagcgggtctcccacttcggcctaccaaagtgctgggattacagtgcgaaccacggctccagggacaataactgcaatattaaagtaactgaagcttcaggcccccgtccaaggtcctgtacccaattttgtattttttcttaaagagatcctcaatcggtgccgggctcagtgactcac

SEQ ID NO: 15336 - DNA, 181 bp, Homo sapiens
  chr1:171570080-171570261
  hypo
cgggaaacgaggcagacaaaacctgggtagttaaggggctacccgaggcagccccttaggcggcttaggcctgctgtgtggagcatccctgcaggggactccagccagcctgagtgaagccatccgaagagcgatcccaggtagagaattgccccggtggaacgcctcgccagagcagtgc

SEQ ID NO: 15337 - DNA, 131 bp, Homo sapiens
  chr1:180235795-180235926
  hypo
gtgcccttctcatggcgtcccacctgcccatccctcagagccctactcatgcaccgccacctctgagaagcgtcccagatctccacactgagagtaaatgctgaacacctccccggccgttagcactcgcc

SEQ ID NO: 15338 - DNA, 203 bp, Homo sapiens; identical to SEQ ID NO: 12041
  chr1:181767556-181767759
  hypo

SEQ ID NO: 15339 - DNA, 85 bp, Homo sapiens; identical to SEQ ID NO: 12042
  chr1:181767807-181767892
  hypo

SEQ ID NO: 15340 - DNA, 119 bp, Homo sapiens
  chr1:184633170-184633289
  hyper
cggctcctctacactctgcagagctgttttcccccttcagagctcctctcctccgggagggcttgcctcgccccggtccaggatctctgccttcggttgaagcgcagcgcccccagccg

SEQ ID NO: 15341 - DNA, 81 bp, Homo sapiens
  chr1:184633350-184633431
  hyper
ggtggtctcctcttccccccatcgcggcccagcaacctgggggtccgcgtgacttctccctggccgggggatggaggatgc

SEQ ID NO: 15342 - DNA, 388 bp, Homo sapiens
  chr1:193149436-193149824
  hypo
cggtggcgatacctgcctgccttttcttttgctgcgttggcacaggcattgtgcttattttgttgtaaatggttccagtattttatcagttcactaggctggaactgatgagaggtaattaggtggctgtatttacagctcgaataagagactcgccagtgattgaacacaaactcattgggagggggtacaggatcaattctcaacttggcaagacagatccctacatatacatcttccaagtgcaaacggcggatacctaaagaaactttaaaaatcttttctgccagatctccagaaaaaacataaccagttccagaacagaagacaggataacgctcacttgggtagaggtctggtggcatgtaccacttgctatctttgtttc

SEQ ID NO: 15343 - DNA, 72 bp, Homo sapiens; identical to SEQ ID NO: 13129
  chr1:1974777-1974849
  hypo

SEQ ID NO: 15344 - DNA, 162 bp, Homo sapiens; identical to SEQ ID NO: 13130
  chr1:1974925-1975087
  hypo

SEQ ID NO: 15345 - DNA, 329 bp, Homo sapiens
  chr1:201194921-201195250
  hypo
cgtgacctccctctgccgtctctcctgaagcatgcccgcaggcccctgggcccatccacctgcaggagaacgtgcctgggacggtgacggccgagtgggaaccctctcctgacgaggcccaggatgtcccgctgcactacgcggtgttcacacgctcctcagcgcacggtccctggcacgaggcagccgaccgcatccacaccaaccgcttcaccctcctgggcatcctccccggccacgaataccacttcagggtggtggccaagaatgagctgggggccagcaaaccctcggacaccagccagccctggtgcatcccccggcagcgc

SEQ ID NO: 15346 - DNA, 292 bp, Homo sapiens
  chr1:205273331-205273623
  hypo
cgggacttcttgagcgaatgctggcgctccaggccaggggtggtgcttcccccaccaggtgcatgctgcttgaagaagctgcacaccttggccccattctccaggagggggcgggaggaacgccggagccagtcagccatggaggcgcgggcagagtcactgccagggtgcccaccctcatgcggagcctcctgctctcccactcgggtggcgtagccccagttgacccaccagtgactggccacatcctccagggtggcccggcgggtggggttcaccatcaacagccacc

SEQ ID NO: 15347 - DNA, 63 bp, Homo sapiens; identical to SEQ ID NO: 10889
  chr1:205400134-205400197
  hyper

SEQ ID NO: 15348 - DNA, 221 bp, Homo sapiens
  chr1:212330215-212330436
  hypo
cgggtattccggtttcctcccacatcccaaagctgtacccgtgatgctcattggtgtgcctcaatggtcccagtctgagtgagagtgggtgtgtgtgtgagtgtgtcctgcgataggatggtgtcctggccaggatgggttcctgccttgtaccccaagctgccgggatgggctctggcaaccagagatcctgaactggaataagcgggtaaatagtgatc

SEQ ID NO: 15349 - DNA, 205 bp, Homo sapiens
  chr1:214637813-214638018
  hypo
cgtgctaagaataacaggattcttataaacacatcgtcgcttaggccaaaaaacacaacagatgccaaaaaacagatggctggtcccttcggtgagttctccttcacatacccaacacgcatgcacgcgcacatgcgcacacagacacacccctcttacctctcgcagctccagcctctgggccacagcctccaggcattcttgc

SEQ ID NO: 15350 - DNA, 34 bp, Homo sapiens
  chr1:214638090-214638124
  hypo
ttcttgctcaggacgttgtagcgccgtgtccggc

SEQ ID NO: 15351 - DNA, 152 bp, Homo sapiens
  chr1:219347035-219347187
  hyper
ttagcaaaactaaactcagtacagttacaactgcctcaaacttgaccccaaagtattgaaagctcctcagagagcgggccagcagcgctgcgcatgcgcgctcccgggcgtgctcccgcgcgtgcctgcgtatttgcgtgcgcggccccgcg

SEQ ID NO: 15352 - DNA, 55 bp, Homo sapiens
  chr1:219347516-219347571
  binary
ttctatcgggcggtcactggtccaccaccctcgctttggggccttgtgtcccgcc

SEQ ID NO: 15353 - DNA, 273 bp, Homo sapiens
  chr1:230256241-230256514
  hypo
cggctttggggaacactgtgttccatgtctaagtggagtcccgggcctctcccctccagtgtcgcctgtgccagctggacacgaagcagcagatcagtcatgaaaatggctgctcagctccgatctgcccttccttccgcaggactcagggacgcacagctccccagggctggtcacccaaacaacagcattcctttctcctcggcctctccccaggctgcttgggagagaaaacttccctcatcctcctccgcacacactaaatgccctgcc

SEQ ID NO: 15354 - DNA, 262 bp, Homo sapiens
  chr1:230266303-230266565
  hypo
cgtgagtcacgtggtatcaggaacaccgggccctggggaccgacccctgtgtctcccctaagtaggatgctcccatgcaggagcagaaggacaagcagcccggagctgctgcccggctgtgcccaaagtgggatttctgctgatcaagagtctggaatttacactccagcaggtttggaagtctcggcgacagctcctgtatgttcagtcaagcttggctgaccatggctaaaccactttaatgagtttatgggacaccagc

SEQ ID NO: 15355 - DNA, 194 bp, Homo sapiens; identical to SEQ ID NO: 10124
  chr1:230404024-230404218
  hypo

SEQ ID NO: 15356 - DNA, 196 bp, Homo sapiens; identical to SEQ ID NO: 10125
  chr1:230404365-230404561
  hypo

SEQ ID NO: 15357 - DNA, 175 bp, Homo sapiens
  chr1:233085208-233085383
  hypo
cgtcattcgttggccggaacacttgcagtggtaaagtgagacggagaagctatttaattctttgcaagaggagatctttatacactttggtgtgaaagtaaagagggaaaactgggcgtcctatgcatggctgaggacgggaagcctgcctacaccagtggttctcaaccctagc

SEQ ID NO: 15358 - DNA, 48 bp, Homo sapiens; identical to SEQ ID NO: 10904
  chr1:2331316-2331364
  hypo

SEQ ID NO: 15359 - DNA, 183 bp, Homo sapiens; identical to SEQ ID NO: 10905
  chr1:2331437-2331620
  hypo

SEQ ID NO: 15360 - DNA, 128 bp, Homo sapiens
  chr1:237052581-237052709
  hypo
cggggcaagtacccgaatcgaggctttcccaagatatttaacgacaaaacagtaggttagtgcagtaagtccttcctttctgcctctgatattcaagctgtgggattgtgactttgaagaccggaatc

SEQ ID NO: 15361 - DNA, 45 bp, Homo sapiens
  chr1:244815271-244815316
  hypo
cgggatctggcctctgcctacctgcccagctcatctagtaccgtc

SEQ ID NO: 15362 - DNA, 443 bp, Homo sapiens
  chr1:245499151-245499594
  hypo
cgaagggaaaggagggtcccacgaagggaaaggagggtcccacgcagggaaagaagagtcccacgcggggagagccccatgcagggaaagagggtcccacgcagggaaaggagagtcccacgcagggaaaggagggtcccacgcagggaaaggagagtcccacgcagggagagtcccacgcagggaaaggagggtcccacgcagggaaaggagagtcccacgcagggaaaggagggtcccacgcagggaaaggagggtcccacgcagggaaagaagagtcccacgcagggagagtcccatgcagggaaagaaggtcccacgcagggaaaggagagtcccacgcagggattgctgttccactctgcatagccgctgggctttctgctgcacggatgccatctagaagaagcaccatccactgttctcagaaagaagagagagga

SEQ ID NO: 15363 - DNA, 129 bp, Homo sapiens
  chr1:245499775-245499904
  hypo
ctgctctggggagggatgctgttttgcctttcttcacgcacgtggaatcaggactagctggactggcaggaaaaggttctctctggaataatggtttgcttctctgcaggctcgtgcggcggctcgtgc

SEQ ID NO: 15364 - DNA, 105 bp, Homo sapiens
  chr1:246160284-246160389
  hypo
cgacgtcgctggtgcggaacaccatgacgtctgtgtctagggtatgcgcatatgctgcgtttttccgcaggtgcctcgcagtctgctctggctcttagggcttcc

SEQ ID NO: 15365 - DNA, 103 bp, Homo sapiens
  chr1:25919205-25919308
  hypo
cgctctatatccagcacctagaacagcgcctggcacctaagcaggcatttggtaaaactgtgccaaatgagtgagtgcggacagcgtcctagtccttcaccag

SEQ ID NO: 15366 - DNA, 120 bp, Homo sapiens
  chr1:25919337-25919457
  hypo
cagctgtgtctcccgcacgggccggcgggcgctgtgatggaggcagtgcaggatgccgtgtgagcccgaggaaggacttgcagccctgctgaggggacgaggcgaggcttcttggatgac

SEQ ID NO: 15367 - DNA, 140 bp, Homo sapiens
  chr1:27628429-27628569
  hypo
ctccaccacctgactgtgtggccttgaagaaagcacagcctctctacctacctgcacaaagagcacgaagccctgcccagctcccctcagtgtgctggagaatgaactgggccatcggagtgtggtctgtaaacgtgaac

SEQ ID NO: 15368 - DNA, 202 bp, Homo sapiens
  chr1:27921349-27921551
  hypo
cgtggggtgcaggcggagcacagaatgggtgcagggttgtgactagctgaggctgtctttgtgtacaggtgtggtatcggggtgtttggagaggtgtaggggtgtccctgggcccttaggtggctgaggaaaagtaccggagctgagactgtctgggaagcggtggggccgggccattaggactgcctgtcgaggaggtgcc

SEQ ID NO: 15369 - DNA, 428 bp, Homo sapiens
  chr1:3182342-3182770
  hypo
cgctctgtcctcaccgcccagaccctaggagcccccagaccctgcctcagtgggtcgtgcccaggtccttcgctctctatgatccctttacggtcgtgcagtgctccccagggctccgcactgctccccagggttccttggtgcgtgtctcataaagcccaggagggcgaggccaggcccagcccccaactcaagggccgccctccagcctagcgacgccacctggcccctctttccattaagtctccgtcgtcttgagtccatccagggcggtgtgcggccggtcgcttagtcagcaagaaccctgtgagctgcagtcatcataaatgcatatttaataactattttcttcctggggaaaatgtgctgcttcagaagttcagaaatgggcttcgctcttcagctggtaatgagaagttaataaaagt

SEQ ID NO: 15370 - DNA, 85 bp, Homo sapiens
  chr1:3182799-3182884
  hypo
atcttaatctttattaaagagacgtaaacttccacggatcgggcgggcctgcctggcacagccggacgccaggagagccgggcag

SEQ ID NO: 15371 - DNA, 100 bp, Homo sapiens
  chr1:3182917-3183017
  hypo
caccagagaacaatgcgcgccggagccttttcgccccgagagcccctcgcacttacctcagtagacgcgaattaattctctccccctgagagccccagag

SEQ ID NO: 15372 - DNA, 109 bp, Homo sapiens
  chr1:3183106-3183215
  hypo
gagagggccccaggggcaggagccactccctggatctcagacccgcttgtctcgcaggcgggaggcacgggcctgcaccctccgccgctcccacgctccagcagaccac

SEQ ID NO: 15373 - DNA, 473 bp, Homo sapiens
  chr1:3195292-3195765
  hypo
cgagaacttttccagtgtgactgctggcctctctggcagacgtgtccaaactcagaaaacctctgctgctctgaccacagggaacgtcagaggggacggggcagcggaacaaagcacaaagcgtccctgcgtcctctcaacgtggcccagctcctgcagacactcagcgagccgtggcctctcccatcctcccacgcttccctccggccggccctggagatccgtggagccacacggtgccgagcgcggcgctggccgtgtgctccgtgtctgtcatcgtcagccctgtccacctttggggcaggggcagctgggctggctccagtttctctccatgtcaactttgcaaaggaaggaggtggatgcagaagctgccaccaatagccacgtgggcagctgtggccccgagtccggggatgcagttggtcatcaggagcctcgaagcgtcgctcaccatgcctggaaagaccggc

SEQ ID NO: 15374 - DNA, 405 bp, Homo sapiens
  chr1:32742000-32742405
  hypo
cgtggtgggaggacgagtgggaggttcccagggagacgctgaagctggtggagcggctgggggctggacagttcggggaggtgtggatgggtgagtgtggcctccaggactgcctgggaagaggggaacgggaggggccgctgaggtgatgagagtcccaggacagctgcctggcgactttcccactccttcccttccccgacccagggtactacaacgggcacacgaaggtggcggtgaagagcctgaagcagggcagcatgtccccggacgccttcctggccgaggccaacctcatgaagcagctgcaacaccagcggctggttcggctctacgctgtggtcacccaggagcccatctacatcatcactgaatacatggagaatggtgggtgctacccgagtc

SEQ ID NO: 15375 - DNA, 207 bp, Homo sapiens
  chr1:3646542-3646749
  hypo
cgagccgttgcttctgagcaggagtcacctacagcccccgtcctacgggccggtcctctcgcccatgaacaaggtgcacgggggcatgaacaagctgccctccgtcaaccagctggtgggccagcctcccccgcacagttcggcagctacacccaacctggggcccgtgggtgagtcccttgggcagtgcgggcccacgggcagggc

SEQ ID NO: 15376 - DNA, 205 bp, Homo sapiens
  chr1:3680100-3680305
  hypo
gacgcccagacgctgcctgctctggtcagtgagctggagcaggggcaggtgtcggcagcctcacccaggctggcagagccctcccagctgccgcagtggcccggccctctccttctgtccctcactgcccctgcttgctcctgctcaccgcctctgcctctgtgcccaggagtgattgcgtctttacaacaacaagtggatttcc

SEQ ID NO: 15377 - DNA, 129 bp, Homo sapiens
  chr1:3680359-3680488
  hypo
tccgagagcggaggcagcagctacaagccatgaccgacaaggtggccgtgcgctcagtaccggcctccgctccatgagcatgggccccaggcttcattaacccccggcagctcggggcaggcgctgccc

SEQ ID NO: 15378 - DNA, 174 bp, Homo sapiens
  chr1:3700211-3700385
  hypo
cgcacggtatggataaaatgctgtgggttgggctggcatttatgtctgtttcctaatggctagtttatatcctgtcctgtcccatcctgagggccacccgccccctgtggaatggccaatacctccgctcctaacaccttccacttccctcacgtcagggccatctagatgaca

SEQ ID NO: 15379 - DNA, 609 bp, Homo sapiens
  chr1:3700414-3701023
  hypo
gagaatgctttctttgtaccctgttaagaagcttctgggttctggtagcattaggcggttcctgaggagcacagactaactcagctgaggccagcatgcggcactcccccgggcccggccccaccccaccaggcacgctgcccacctgtgcaggcccgacacactctgccgcttcttctgcttcctctgctcctcggcctccagctgcagctgccgcaccagctccttggccttggcttctttccgccccaaggggacaatctatcgggcagaaacccacaaactccactagggtcacagccacagaactcgcccatcgtgtcgattacggccttaagcctcaatgagccctcccgactcccgccctcattcatctctacagcaggcagggagcatcccacgggaccacgcagcaagaagctgcatgtgggctgccactgcagcgtcccggggagacctgacgcccaaacacaccgatcctactgaggcagggcttaaccttaaagccagctcatgcacaactgtttccagaggtctgccatcctcagaaggccaaaagaggagagaaaggctgagcagccgggacctcgtgcactccacagattcaac

SEQ ID NO: 15380 - DNA, 36 bp, Homo sapiens
  chr1:3701052-3701088
  hypo
ccctactgccaaccccacgcaaacggttttactatc

SEQ ID NO: 15381 - DNA, 70 bp, Homo sapiens
  chr1:41451907-41451977
  hypo
cggggagtctcccaagagaggccatttgagctgagaggccagtcacagcgagagtggaatgagaagtgcg

SEQ ID NO: 15382 - DNA, 141 bp, Homo sapiens; identical to SEQ ID NO: 10139
  chr1:44717932-44718073
  hypo

SEQ ID NO: 15383 - DNA, 138 bp, Homo sapiens; identical to SEQ ID NO: 10140
  chr1:44718164-44718302
  hypo

SEQ ID NO: 15384 - DNA, 335 bp, Homo sapiens
  chr1:45087586-45087921
  hypo
cgcgcatgaatgtgcgagcacagatgtggcaagcgtagtgggggcagcaggcagggagggacaggaacagggatattaatgtttctgaagtggatctgatttgatacgtcttgttccattgtcagcatctgtttagcagggatttgtaatactttgtggctctggatcactcatgcttagcgcaggatgtggccttgcataccaattttgttattaaacacagtcctcgcctcccccacagcccatccatcacctcccaccccagcccccgcctgctctgagccgcccaccatatttcagggcccagctcccgcctgcctgccgcgcccgatgcc

SEQ ID NO: 15385 - DNA, 1865 bp, Homo sapiens
  chr1:46767970-46769835
  hyper
cgcctgtccgtcattcgagcctccctcgcttgtttaagccgctccgggcccccctccactcgctctccggtccctcctcgccgctcgagccgatccgagtggcctccggcgctccctgtcctgcgggtcgcacggtcgctcggtcgcttagtcagtttggcacccgagaccccggttgtcggttcgctcccgtcagccctgggccgtcagacaggccgcggcgccccgaccctttcgttcggcctctccccctgccccattccctcgctctccaatctgctgtcctcccctccgcccatcggcttggcctccggaatctcgacccccgtggcgtgtcaggcagatgctggagccccggggccatcagtcaggttcggtggccccgggcctggcctggccttgccttaggccgggcctcctaacctcggcccctgccctagggcagccgggccatcgctgcccaccggttcgacatccgagactctcctgcccggcccagccgagtgtcagttcgcgcggcccacagccgcaatccagcctcagtcgcccgggcccagcctgcttcgctccagaccgggcctcctggcctcgccccccgcgcccccgagccaggccgcggtgcgggtcagcctgcccatttaggtctccgtctttactctgtccagccctgtcagtcacaaaattcattctccgatcctacgagctggctttcagcgccccaggctgggccttgccccgggcctcccggcctcgccccccgcgccccccggccgctgggccgccccttgctcttagccagaggtagcccctcaccccgcgacttaccccacaccccgctctccagaacccccatatgggcgctcaccgcccgcccgcacagctcgaacagggcggggggagcgttggggcccgaggccgagctcttcgctggcgccgcctcccgggacgtggcctccatggtcgttgccgccgctacctcacagaaccagcaactccgggcgcgccaggcctcgggcgccgccatcttggggaggtgcgcgagcccgagagtgtcgcccgcggaccgccatcttgaaaaggtcagcagttaggacggctccataagcgatatggggaagaatgtgaattattctaaagaaatttcgaagaaattagcacactttccaagtctcttaggagctactattttagataaactcctagatcaattatacttgggtgtggtatgactaaggggatgtttcttagcaaagcctcctcgggtgcaaacatcagctacccctaacctctgcctgcggctggtagtacatgccaatctgagcatgtgttcgcgaccacgatgagtgtgccgcacttccggccagatcgccggatttccgctgagtgacccttacaagtccttcttgatcctgaactgggttaggtgccgctgttgctgctcgtgttgaatctagaaccgtagccagacatgggactggaggacgagcaaaagatgcttaccgaatccggagatcctgaggaggtaaggcaaggcgatccactcggccctcttctctgccctgaagcccaggacctagcccgccaaaacacgcacggggccctcttagcccccagtttaccctctagggtttgcatagtcgggagctctagttccctcgacctttccccagaattcgtccggtgactttggacagatagatgactagtttttctctgggcctcggcttctgcattctgtgaatgtagtgaaggtttgagagcgaaaatgttttgtggactaaagtcttgtaaaaatatgacctatgtttgcagtcagtcagatgttctgaagcccgcgtttcacagatttggggagcaaacagacc

SEQ ID NO: 15386 - DNA, 209 bp, Homo sapiens
  chr1:46963465-46963674
  hypo
cgcctgtggcgggagatccgccgatctgcttgcttaatgaaatataaagattcttttaaccaatgtaagcacaattcgacagcttgtgaaacgcggccgcgccgtgatggatggctctcctggctcgccaggaattgcggggcggcaccttttaaatatataattgattctgtttggagtgtgcagtggactgagcccaggcagggccc

SEQ ID NO: 15387 - DNA, 98 bp, Homo sapiens
  chr1:47035276-47035374
  hypo
cgattcccgactagaaggcaaaagcctggcccaggccacgggaggcacttcactaaagaagaaaaacctgagctccagcaagctcagtaacttcatca

SEQ ID NO: 15388 - DNA, 233 bp, Homo sapiens
  chr1:47035403-47035636
  hypo
actcagtccaggctgcacaaattgagtagcactgctctgcagctcgctgcactaaaagtggaagatattttccattacagcaagtgctcccacagaaggatcacgagccacacacggagccttactctccaaataggcgcccatggcccagtcgtcccttagcctaagaactcagagagccaggctgtaataatggggctgccgtgtgagcacagcagccatcgagctgctcc

SEQ ID NO: 15389 - DNA, 148 bp, Homo sapiens
  chr1:55066953-55067101
  hypo
cgtgtgcgtggaggcctatcgccaggaggctgagacccaccggcgccacatcaacagtgcctttatgacctttgtggtcctggacgcagatgaccagccccagttgctgccctggattcggccccagcccggcgtaagtgggaccagc

SEQ ID NO: 15390 - DNA, 72 bp, Homo sapiens
  chr1:6148944-6149016
  hypo
cgactccacacggcatttgctgaccctgtttttgcgtctaacattgcatcgtaaacgttttttgggaggggc

SEQ ID NO: 15391 - DNA, 595 bp, Homo sapiens
  chr1:6149045-6149640
  hypo
acgcggtcggcctgttttccagggcggagacggagcggggcctgtccaggaagcacataatcgaaggtgaggacgcgctcgggcacctcagggcccccatacctgtgggatcatcctcggaggccaaagtgatggcagcacagggcccgacccccccagttaacccactgagggcccaatcccggggcacccggtgctctggcctgaccttctccttccacccaggtagcacagcgggacgctgcagagaacgagggcagcccggtggctgagcacagaccacagaccagcctgggtttcaatccaggtttggccccacactggctgagtgggtcttcagcaggggcaccctgccccatgcctctgccacagtatctgtgcaatagggacagtaagagcgcacccggcgagggtggctgggatgcctgcagcgcccaggagaaggtgccacacagcccggggctcagcactcgcaggcaccggagcaaggcaccggggtgtctggctcttgctgtatctttattgtcttcatgcctttcctgtccgtgttcattttcttcgaggtaatagatcattccattgaaaatcacctggc

SEQ ID NO: 15392 - DNA, 304 bp, Homo sapiens
  chr1:6345513-6345817
  hypo
cgtgctggccgtcacctgcccacggggcagcacagactgattccgcccttcctgctaattcctccatggcgcagccatgtgctgtcattcctcccactgggtcagagcctggaccatccaggctgccggccaaatcatgaccatgcccacaggtccctccaccaaatgtggaggcgggtgaggctggtcatgcatcagagagctgaagacagcgtgtccaggtggctctcgggagccctgaacctgacaggaaaggcagaggcagggcccgacaagcactgcctgcagacctggcgtgtcacac

SEQ ID NO: 15393 - DNA, 57 bp, Homo sapiens
  chr1:6391374-6391431
  hypo
cgggccctgagcccagtgacccgtactccggtaagcaggccgtgcgaagatggaggc

SEQ ID NO: 15394 - DNA, 94 bp, Homo sapiens
  chr1:6391541-6391635
  hypo
atacctttgcacttctggcctccagaactgtgacagaatcaacttctattgtttgagagctacccagtcagtggcactttgtcacagcagcccc

SEQ ID NO: 15395 - DNA, 107 bp, Homo sapiens
  chr1:6713808-6713915
  hypo
cggctgggaatgaagcgctttcttttttaagtggctaattgcatcctttcataaataaagatgagaaaaaccctgggcagactctcattccagctgcttggtgtgct

SEQ ID NO: 15396 - DNA, 308 bp, Homo sapiens
  chr1:6714041-6714349
  hypo
actcctcatcatagcgatcaaaaaggtcggtggcatctactccaacgctgatcgttccctggggcagaaaaacaagccgtcagcagaacgggtggtatttgtggaatgaaagacaatgctacacttcaacagccagctcgctttaattgaacaagtcatttgacttcagggttcactgggtttaggtaggacactccaccaggaagcccacaaagcatgaatgtcacagtccgaaccaaactgcagagcaccacagacgtccagagctagaaaacatcatttgaccaggagagccggtccgcatgtct

SEQ ID NO: 15397 - DNA, 438 bp, Homo sapiens; identical to SEQ ID NO: 13190
  chr1:90308855-90309293
  binary

SEQ ID NO: 15398 - DNA, 115 bp, Homo sapiens; identical to SEQ ID NO: 13191
  chr1:90309490-90309605
  hyper

SEQ ID NO: 15399 - DNA, 71 bp, Homo sapiens
  chr1:9795925-9795996
  hypo
cgagcgctcggtgttacctgcacgcctctgccactgtcttcgaggacctgcaggtccagcccctccttgca

SEQ ID NO: 15400 - DNA, 107 bp, Homo sapiens
  chr10:100171106-100171213
  hypo
cgccaacgtcccgtctcgcatggcagcatcagcatccaggggagtgctggtcatgtaggtagttgctatcaagcgcggcttgttttgtccacgtgtggttcacaatc

SEQ ID NO: 15401 - DNA, 258 bp, Homo sapiens
  chr10:102585797-102586055
  hyper
taaacagaatctagtgctgatgaggaaattacacttgtttcattagcgatggggaaggagatagctcagttcctcttggtcacagttgagctcagaagctcattatcctgctgcacgcatgctttccctcctcgtcaataaacaggctttccagtggctgcatcccccacccccaccccagctccctctcagagaggggccccttctcctctacttaacccgcggttagggatcactgtaaacagtctggggtcatca

SEQ ID NO: 15402 - DNA, 110 bp, Homo sapiens
  chr10:102587493-102587603
  hyper
ccccagcctcaccccatcccacgacccccgcaacccttcacatcacccccctcgaaggtcggacaggacgggtggagccgtgggcgggaccctcaggcccgggcccgccg

SEQ ID NO: 15403 - DNA, 164 bp, Homo sapiens; identical to SEQ ID NO: 8929
  chr10:102587906-102588070
  hyper

SEQ ID NO: 15404 - DNA, 78 bp, Homo sapiens; identical to SEQ ID NO: 8930
  chr10:102588175-102588253
  hyper

SEQ ID NO: 15405 - DNA, 43 bp, Homo sapiens
  chr10:103425908-103425951
  hypo
cgctcccacacacttagcctctccactccctgctggtctttcc

SEQ ID NO: 15406 - DNA, 357 bp, Homo sapiens
  chr10:1167479-1167836
  hypo
cgtaacccgtgctgctctcgttacccaggctgggcgtttgcttgtgtcctgccccgtgtgatgccgtggtttccagttgggcagtttccccccaggagacagtgtttgttgtcacccctggggaggggtctgctctagtttctaatgtgcctgggcagggcggctgctacatccacaggccaggatgctgcaccacagggaagggccccgaccagacatcaggtcctagcgggggaataagtgtcagcaatccacaccgcagctgtgggcaccacgaccaggcctttgagaatgcagacgtgaaaacggtcgccgccgcatcatcctgactgtgttccggggtctcggtgtcagagc

SEQ ID NO: 15407 - DNA, 483 bp, Homo sapiens
  chr10:119293799-119294282
  hyper
cgagaaggggaacctcaacatcaagtgtctggcagatgggagtgtgtgttaagcgagggctgttttcgttgggaacgcacagcacagctcccttcctcagagccacctccagacccctcggccctcccacgacccccagttcccgggtccgaggttctgggcgccagcggcggccaccgcgccgcgcgagcagcttttattcgcactctctttaactcgccctttctggttctcttcccttcgagcgccctgcagcggagtgttagacaagccctgttgtctgtgggctctcacctcagagtcaatattatctcagatgggcacaatagactggaatgaaaagctaatattgaatcaatgctgtccctgtccgcgccgctgcgatgccaccctttgttgcgcacgccgcccccggcaagctgctggcggccggggctaagcggagggcggccgcggtcgggcctctccgggtccacgccaggg

SEQ ID NO: 15408 - DNA, 69 bp, Homo sapiens
  chr10:119494306-119494375
  hyper
cgactctccccgggtcccccaccccagccaagagggaacctgccaatcaggctgcgccaccaccaggct

SEQ ID NO: 15409 - DNA, 296 bp, Homo sapiens
  chr10:131647424-131647720
  hypo
cggccgggactccgtccgactgcacacactgtgtttaacaagctttataaggagccatcgggctttattatggctctgcctgactccaacaaaaactgagcctggaggcccggggacacgagttaagatgaaaatacttattggagtacattacttcttgatgtagatggcgttttccgtggagtcactccacggtgcgtggcacaacataaatcagaggtttttcggagactaataagacctgccaccatctattcattactctgcctgcaatttgggccatcactcattagtaa

SEQ ID NO: 15410 - DNA, 261 bp, Homo sapiens
  chr10:131844765-131845026
  hypo
gttactgcagggaattcttcataaccgaagtgtgttttccccgaggagttatgctaccatttgatttaatttttaatttttacattttaatcaaaaatagatcaaatggtggtggtctctccggggaaacacacttcagataggaagccggccatgctcctttaaatatggaaactgccgtctccgcgctgcgggctgggcgtgtcctttctgggaggggccttgggccatgcacctgaggccaccagctcgcccacgccg

SEQ ID NO: 15411 - DNA, 362 bp, Homo sapiens
  chr10:133982448-133982810
  hypo
cgggcgcaagaagggaaccgcggggacggcctttcccctcccgccctgtgtggggacgctgcacgagccgtggaccaagaggctgacaggtaagggctgccatctgtccgcggggagggcctttgcaccctccctgcgaggtgagctccagcttcttcacacctctgtgtccccgtctgcacatgcgtgacgctgccaccccgtccactgctgacccgtcaagatcacctctcccgccactgacgggacagggcctgggggctggtgtggagcgtggcgtgagctgtcgctggggcagggtctgcagacatggtgctccacggggacctggcgtctggcagagctggtcctcctcccacttg

SEQ ID NO: 15412 - DNA, 479 bp, Homo sapiens
  chr10:133982961-133983440
  hypo
actctgggtgctcccagcagggagggagggaggtcaggactctgggcatgctccaccgtggagctttcctcgccagcggggttccctatgggagggtttgtggatccgttgtgtctgtgggactcagcggggccctggggcagggtgagccggttcttggggaggcagtggcagccccatggggggccgcccagggagcgctccatctcccccacctccgacccacaccgtgtctgagagccacctgtgtctcctgcagtgggcagcggctgtgggccacgggcactgttgttcccgggagatgctccctgcgtagaaaatgggagggggaggaggaggtgcgaccaccaccctggactcaggagagggcggcagctccatcttcacccttgactcaggaggggtccgcagcgaggaggaggtgcgaagggggcggcggctccgtcttgcaggtcccctggggcgcgttcttcaggtgc

SEQ ID NO: 15413 - DNA, 199 bp, Homo sapiens
  chr10:134477298-134477497
  hypo
cgctcctcttctgagccgtgagctgggcagggccgcgctcacatcattcctctccccctgtcgccgggtgggaaatccgtaacaggctctgtggcaaaggctgggccaaggtgcctcgtgggcagccgatccatcaggcggccgacaggcgtgatcgagtgccgtgtcacacgcagcccaggaaacaaacacgccgcgc

SEQ ID NO: 15414 - DNA, 267 bp, Homo sapiens
  chr10:134491114-134491381
  hypo
aggccatctcgttccatttcagttgctcctcaccgtggtaatcggaaatgttaacgggcgcactcgtctggtggaatttatcgtggccagcgagggcgattaagcggctggtatgtggcgtgtttaccctcgtgtcagcatgactggtgttccaccctggcagatgaaggcccggtccttcctgggctcctaattggggacactacatccaagagccgtgacagggttcagcaacccgcgtgcagaatgccggcttccacggggcac

SEQ ID NO: 15415 - DNA, 592 bp, Homo sapiens
  chr10:134527015-134527607
  hypo
cgggtatatggccttggctctcctctgcatctggcccttgctgagggccctgaggcgtggccccttatcccctctgaccgcccctgacctccgtctccagagtgatggagccctggtcccctgccactagcctggtcccggggagggtggcaactgcgaggcctgggtgctgctgtgctcgtggccacacactgaggccggccctcagccctgtgcacggccacaccctctgcaggggacctgtccggcctcccggatatctctggagctggcactgacaccgaggcagggatcggtctgagcctggggactgtgctctcaactgcccaccgtagggaagcagcacaggtgggggatgggggcctggggctttgtcagcgacaaagtgactgatgaccgcctgtgccctgggcgccctccctggacagcatgtcagtcgcccagggagaagggcctcacccacaggagcggcgcggttcttcctgcctgatcagccctcggcttgcaggcaccaagcgtctcggggacctcccacggagcccaggagcagggagggccctgccgtgtctgctgttgggtcttggtgacagcg

SEQ ID NO: 15416 - DNA, 345 bp, Homo sapiens
  chr10:134527839-134528184
  hypo
ccctttcaccgcggctgctaacctcttggcagccaccagcagaccacattctgctgtgcggatcgggcaggacaatgccgcgcggcctctgaatggacgctgccaccaacggggccccattcacggcgttgggaaccgggcgcacattgtctgccccgcagggagacagcgaggaggctcctgcagcctcttcctggtttaatctccccgcgcggcttcccaggtccatgtcccgtatcagctgcggggccggcagcaccaggcccaggagggagggcaggtcccagccctggaggaggatgcaggccaggttaaaacccagaggcaccgtaggaccttcgcacc

SEQ ID NO: 15417 - DNA, 418 bp, Homo sapiens
  chr10:134592912-134593330
  hypo
cgtcggaggtcacgcgagtgcagattggtgagcagcgcccaagggcagaaggctggcagggctgtggcctccccacattgtgctgccgctgccagggctccaccagctcagagcagggcagcgttgcagcccgttttccattcactcacagcctctcgggttctctggatccgggacttgacactttatgctcagggtgggggacagagcctcacaacacacacctggcggcctttgacagcccctgccttctggggctggagtttggacaggctctccccatggggccacccagtgggcagcgggtgtgcaggacaagcagacgggcgccgggcgcgctccgcagcctcatccatcatgacacgcgccgtcacctcgtcaccaagctccgttctgcctccggagccctaaaacacca

SEQ ID NO: 15418 - DNA, 134 bp, Homo sapiens
  chr10:134593416-134593550
  hypo
ccgtaatttgtttatctgtccaaagattatgcagttgaaaatccacaattttatgctgcctttgtaaattaccacgctgcgtttgatgaatgtttctccacttctgcggaggcgccgcttcacccgcgagaggc

SEQ ID NO: 15419 - DNA, 118 bp, Homo sapiens
  chr10:134607715-134607833
  hypo
cgccccctgctgatgggcacctcccgacaatggcgcctcccagtgatggacgcctccacaggtcctcggggccccttcccgtccaggtcttcacagaggccccggcactgggtgccca

SEQ ID NO: 15420 - DNA, 41 bp, Homo sapiens
  chr10:134610534-134610575
  hypo
cgtcaagcatgaacctggatgtgcctggcctggtcccgggc

SEQ ID NO: 15421 - DNA, 202 bp, Homo sapiens
  chr10:134664806-134665008
  hypo
caactgagggggtcaggcatgcctctgaagcatggaagcttctggtaagcctgaatctacatccccacaacttggatgaggcataaccgacgtaagaaactcataacaaactgcgcagatctacagtggaaaactgacacactttgatcacgaatacacccgtgaaaccatcaccaccttcgagataatgcagtagccctta

SEQ ID NO: 15422 - DNA, 165 bp, Homo sapiens
  chr10:134729798-134729963
  hypo
cgtttcctcgtagtaacagcaaactacgcctggggtcttgcgaggaacgacggctaaaaacaggagaggccacgtcaccccattttctctttcatggtctcagtcatttacgtgacgatggacacgtcccccacgcaagaagccggtgtccttacgaatgcaaag

SEQ ID NO: 15423 - DNA, 231 bp, Homo sapiens; identical to SEQ ID NO: 6735
  chr10:134733835-134734066
  hypo

SEQ ID NO: 15424 - DNA, 133 bp, Homo sapiens
  chr10:134796042-134796175
  hypo
tgatggtccagttgcctgcggaagtaggtctgtgcacagtggaccttttaaaagagacacgaaacctgggagggcctggccttccctctgtgcgctgctgctgtttgtctttttcctcagcttcccgttgttc

SEQ ID NO: 15425 - DNA, 121 bp, Homo sapiens; identical to SEQ ID NO: 12120
  chr10:134875690-134875811
  hypo

SEQ ID NO: 15426 - DNA, 558 bp, Homo sapiens; identical to SEQ ID NO: 13218
  chr10:134941895-134942453
  hypo

SEQ ID NO: 15427 - DNA, 44 bp, Homo sapiens
  chr10:134996909-134996953
  hypo
actggaacccaggctgagccaagacctcgaggcgctgctgagcc

SEQ ID NO: 15428 - DNA, 218 bp, Homo sapiens
  chr10:135002202-135002420
  hypo
ctgctgttccaccccccaccgccgtcccacacccccgccgtcccaccccccacaccgtcccacgcccccccactgtcccatcacccctgccgtcccatgcgtaactggcccccacctgaaccaagggacccaggggcagccaggacagtgtctccggtgaacggaacaggcggctcccgtctggagcaccttgtgggtgcctgctgggttgcagcacc

SEQ ID NO: 15429 - DNA, 235 bp, Homo sapiens
  chr10:135153722-135153957
  hypo
cgtcccctccgcctttgtgctgggtcagacccagctgggtttggctctcactcaccctgaggatggccctggcgcccgcatggtgcccagcacacagaaggcgctccataggcatttgcctgagtgcggctcccagctgtgggtggtcagcaatgacaggagcatgcgttggtgatgccttcgttttcattgctaaaccgtaacccattgttcccgctgttaactcatggacatg

SEQ ID NO: 15430 - DNA, 34 bp, Homo sapiens
  chr10:135154001-135154035
  hypo
ctttttgttttgttttgttttgtttttttgagac

SEQ ID NO: 15431 - DNA, 596 bp, Homo sapiens
  chr10:135269764-135270360
  hypo
cgtacagacacagcacgtgcgacggagtggtgttggtccgacaccacggggcatggggatacgtgtgcaaccaggagtggacgctggcagaggcctctgtcgtgtgcaggcagctgggctgcggccctgccgtgggcgcccccaagtatgtcccgctgcctggagagatggcccagccctggcttcacaacgtgtcctgccggggcaacgagtcctccctctgggagtgcagccttggctcatggtgccagagcccgtgcccccacgcatgggtggtggtcgcgctgtgctccagtaagtagggaggagtgaaggggacggggctgaggaggaggaggagtgggaggacgaggaggaggactgggaggacgcagaggaggactgggaggatggcgggtctcggagacgggcggggaggctgtgggtctggagctctctctgggaggggctcctctctgggcaccggggccatcctgactgtaagattcagctgtggaaaaaccaacgccagggagagtcagagattggaggaaggaagcagagtgcggcccaggcgtgggggaggcagcagccgagcgggggcggggtctgtggac

SEQ ID NO: 15432 - DNA, 276 bp, Homo sapiens
  chr10:13771131-13771407
  hypo
cgcatggaaagcgttcaggtccactcagactgtgctgcgatctgaaagaatgataacatacgagaaggccctttggtcctacactgtgaatgagtaaggggcagctgcaaaatgctaagaatgctgagtgcattaagtgaagtgtttctcccaggtgtgcacagggtgtggcttccaaggggaatgtggatgctggaatgagggaggcagccacctaggccggtcaagtcagaggcccagcaaggagaaagcgagccaaggcaaacgccgacagaa

SEQ ID NO: 15433 - DNA, 127 bp, Homo sapiens
  chr10:13771447-13771574
  hypo
cgcaccgcataatttagcggggcaatgccgccgggagtccacgccaagttaatggaatatttcctgtaaatattattttcccttcctgtctcatcatctcatttcattcaaaaatctttactaatcc

SEQ ID NO: 15434 - DNA, 102 bp, Homo sapiens; identical to SEQ ID NO: 13221
  chr10:1506151-1506253
  hypo

SEQ ID NO: 15435 - DNA, 52 bp, Homo sapiens; identical to SEQ ID NO: 13222
  chr10:1558541-1558593
  hypo

SEQ ID NO: 15436 - DNA, 46 bp, Homo sapiens; identical to SEQ ID NO: 13223
  chr10:1558836-1558882
  hypo

SEQ ID NO: 15437 - DNA, 277 bp, Homo sapiens
  chr10:22042735-22043012
  hypo
cgtaaactgaagaggaaagggagaaagtggttgggttggttctcatgagcaagacggcaagaacagaaaagcaagcacgggctacctgtggcggctgggcacggcatggggaggcctcctcagtgggcagggtgaggtggcttgggaggacacgggtctgggagtgggagaggagaaggggcacggtggggctgtcacgtggctggtggatgtgccacgtccccacatgcattcagcacattccctctcgaggatcctcgctctcctgctgtgaccc

SEQ ID NO: 15438 - DNA, 211 bp, Homo sapiens
  chr10:24841853-24842064
  hypo
aattcacattcagagacgagtcgtaccggggactcgaacgctgtgaatggctggtaatgtgacttttcccaaatagcgaatgacttggttgaaagctttgaacaaagcagaatacgactctccctcactttacacgttcctgaaaaattttattgcacattttgaggctgcaaaagtgtttaaatataaaataaaattggcctctacactc

SEQ ID NO: 15439 - DNA, 223 bp, Homo sapiens; identical to SEQ ID NO: 6743
  chr10:24863037-24863260
  hypo

SEQ ID NO: 15440 - DNA, 66 bp, Homo sapiens
  chr10:24908462-24908528
  hypo
ctccattctttttatgtggacctctcgacgtgcatcattgggcagccagcaggtagtgtctgaccc

SEQ ID NO: 15441 - DNA, 543 bp, Homo sapiens
  chr10:3121888-3122431
  hypo
cgccattgggtcttagttgtgctcctgcatcacctgcttcctagtgttggcacgggctgtgtttgatgggtaattcatccattagagtgaccatagcgtaaggtcctggaaccagagctgtgcgtccacccttcgagttgaagagtccaggcactgctgagcccagccatgggagagatgagcgaggaccttccacaggtgtgaggccaagggggcgggaggctctgtcctgccaggaataaatggaatcaggtgggaggctctgtcctgccacgaataaatggaatcaggtgggaggcaagccaggcccttttcctgggaggtgccagagccgaggaggagttggaggaggaagagcgtccgagcaagagcactggtgggactgctaccaaggttcaggaacaggagcctccgagtgctgccagacaggtgggaggtccctggggcatggccgggagctcaggggaacttgggttttcttccagtagccctgggaacctggaggaacgcggtcatattcgtgctttagaagagaacattgcc

SEQ ID NO: 15442 - DNA, 227 bp, Homo sapiens
  chr10:3194438-3194665
  hypo
cgtgctccccgccctgatggccatcagtgaagcggcttcacagtgctacaccgagccaagcaagtatacaaatgcatgattccacgactcccggggagggctgtgcccagttcccactttaactcagtccccgcagacagcactcctggtgtctgctgggctgacctcccccatgttccatttccaccttctgaagttccccgagagcgtgccacgcacttagacac

SEQ ID NO: 15443 - DNA, 115 bp, Homo sapiens
  chr10:3196890-3197005
  hypo
cgtttttcgtatattctgaatacaggcctttatcagacaccatttttgcaaatgttttttcccagaggccaaactacctttgagaatccatttgggtccccttctctcccgtggc

SEQ ID NO: 15444 - DNA, 294 bp, Homo sapiens
  chr10:3197113-3197407
  hypo
aggtgtctaattgcctctcagcagttttctccatccaatttctctatttttctgcaaaactatcctgaatgaggctgcagctacactgctcactgacccgacagttctcctgccttaatacatgaagcacccgtgtgctccccatcttccatacaggccctccccagagccacagggcacacctgtctcccccacacacgctgtcctccctccatgcccaccgctccaccatccctgtgtgcctcacgcctgtcccacagaatcctggtgctgctctgtggctggcacacaccc

SEQ ID NO: 15445 - DNA, 297 bp, Homo sapiens; identical to SEQ ID NO: 13227
  chr10:3678862-3679159
  hypo

SEQ ID NO: 15446 - DNA, 701 bp, Homo sapiens
  chr10:43892074-43892775
  hyper
cgcaaggtgggaggcccgggcgcgcggtaaacgtgttttggcgggaagcagcgccgaggccccgagacaaggtgacggcgacgttcccgcggcctgctcacggcactccagcagcctcggaccgcccggcccggcaggaaggtcggccccagggcctgcgcgggctcgggcgggagcttccgggcggggggcggagcgagcggcgcagcggggagagtgggggcagggacgggagggttcccggagggaagggcgcctcgcgggagggggaggggaggggaggggaggggagggggcccctggcgggcttccggggccctgagggcgagagcgagggcgacggcaaggtggggtgggggctgctccccggcccgccaagctagcgctgcctaggcgggagctcggggacccgcgggccgagcgcggctgaagggagggaagggaagaggcgctcgtaggtctgcgtccgtctccgagcgaccggggcggcggaaagggacctggggggggcggccgggactggagtggcggggccggggcgcccgcgcggcggctcaccacgccagggactggcccgtcggccccgaggaggcgcggggtccggagtccgggaagcggaggcctcgtgatccaagaccggcagccggacgtgggtcacggggtgcagaggaggaagtgccattgccgggcccgccaagatg

SEQ ID NO: 15447 - DNA, 171 bp, Homo sapiens; identical to SEQ ID NO: 6746
  chr10:43892970-43893141
  hyper

SEQ ID NO: 15448 - DNA, 217 bp, Homo sapiens
  chr10:44163386-44163603
  hypo
cgcgagtggggtgggccgcgagcgggaggaacacgcacgtcccggggcggccggaggggccccgcttgcgcagggggttgtcagaagactcgcacgcggcaggaggcctggccgtgggtgcagagttcccagtaggacgcccacgaaaaaaacctaactcccattatgttctgtaattctagtctagcccctatttcatgcttgatagagagcagtc

SEQ ID NO: 15449 - DNA, 70 bp, Homo sapiens; identical to SEQ ID NO: 6381
  chr10:5538706-5538776
  hypo

SEQ ID NO: 15450 - DNA, 192 bp, Homo sapiens; identical to SEQ ID NO: 6382
  chr10:5538938-5539130
  hypo

SEQ ID NO: 15451 - DNA, 146 bp, Homo sapiens
  chr10:6161993-6162139
  hypo
cgcctccacctccttgcttcttactgcctcttccactcagcccacacttgcagaatgaggactgcgtcgactacaaattagacctctgcttccaccaggcctccttgatagttcagctaagagccgtgcggtgagtctcctgacgt

SEQ ID NO: 15452 - DNA, 217 bp, Homo sapiens; identical to SEQ ID NO: 12153
  chr10:72765340-72765557
  hypo

SEQ ID NO: 15453 - DNA, 238 bp, Homo sapiens
  chr10:73514960-73515198
  hypo
cgcccagctcctggcgggaagtgcagctgctcccaactctcaaatgaaaaggaattgtgcctgcatcgtgcctttgcgaatcccaggggctgaactgggggctggagcaggtcactcgcaccgtccacccaccccaggcagggaggaatactcacggcggttggaggctgcctgcctttgcttgtagaccaggagcaggatgagggggaggcagaggattcctacgatgcaggcaccc

SEQ ID NO: 15454 - DNA, 297 bp, Homo sapiens
  chr10:7618377-7618674
  hypo
cgcgtcccccacacctggctggcacaggtgcctcgtacctggctgcgtgccagctcctcgcacgctctgcaccaccggttcgggtcccatggcagccgacatgccgtgggcctcctccaggccatccatgcgtgggaccggccccctcagcttcatggaggtgaagggagtgaggaagcggtagctcacagccagggcctgggcccgctgccgcagccgctccttctccggttcatcgtcactttgcagccaggagctcagcagctcctttgtggtgaggtagctccagagacgctc

SEQ ID NO: 15455 - DNA, 404 bp, Homo sapiens
  chr10:76998426-76998830
  hypo
cgggggcggctgtgatcttgttcccattttccagagcaggaaagctcagagaccaccgcccagaccctgcagccaacagaggaaacgcgcgtacctctcccttgaaccctgggacccagagggaacaggccttcttggctcctctgctgggacgagggcccagctcgagctggcctgagggccctgcgctcaggtggtgccgctgaccgctctctcccttcagcccgggggtccaggttgcagcaggcccccagctcacactgaaactccctcctacagcctggctttaggccggagcggtggaggttgagggggagcgggtggggaggggaggcatgtcaccatctatccccgtcagattaaaaaactaatttgaaaagattaatgtattccattcttgttac

SEQ ID NO: 15456 - DNA, 43 bp, Homo sapiens
  chr10:77892406-77892449
  hypo
cgtgtatgtttacatgtgtaggtgagcgcatgagtacgagtat

SEQ ID NO: 15457 - DNA, 113 bp, Homo sapiens
  chr10:77892478-77892591
  hypo
ctggagtccactagagagtgaaacttacagagtcttgaccattcatcattctgattctcagatttcaccagctgacaagcaccttcttttttggcggggggggtcagagtttc

SEQ ID NO: 15458 - DNA, 258 bp, Homo sapiens
  chr10:851928-852186
  hypo
cgacgagatggccgggctggactctcggaaggatctggggaagaaccaagactggcccaggatttgggcttgcctgtctgcgtcggggctgcccgtggagatggggttccggtgaggagcaggaggatccaggccggagggtgggtggtcccatctgaaatgtggactgactgcaggtggccacgccaaggacacagtgagacatgggctggaggctgagcaggctggggctgaggagctcgaatgtactgagtggac

SEQ ID NO: 15459 - DNA, 149 bp, Homo sapiens
  chr10:978663-978812
  hypo
cgaactcccgccccacacctgagacgaaggtcccggccccgaagtcccaaccccacacccgggaccaaggccccggcactgccccgaacccccgccccacacccctaaccaaggcctcggctcagccccggaatccccaaccccacacc

SEQ ID NO: 15460 - DNA, 137 bp, Homo sapiens
  chr11:1082528-1082665
  hypo
cgccgggccacactctgcctccctgcctcactgcccgtccaccttgctctgtcgcccagaggtgcaaatatgacacgtgtaactgtcagaacaatgaggactgcctgtgcgccgccctgtcctcctacgcgcgcgcc

SEQ ID NO: 15461 - DNA, 166 bp, Homo sapiens
  chr11:1082694-1082860
  hypo
ctggcgggagcatgtctgcagtgagtgccgtccccgtgggctgcatcctggggatggggtccgggctttgagctcctgggacggggctgggggccctgagcacgggtggtccagggagaggggtcggccccctgcagccacggaccaggctccagcttcgtcagcc

SEQ ID NO: 15462 - DNA, 171 bp, Homo sapiens
  chr11:110144196-110144367
  hypo
cgtgcaatcatggcacactgcaaccttgatctcctggacgcaaacctatactcccacctcaatctaccaagtagctaggagcacaggcgtgtgccgccaggcctagctccaaactctattttaaataataattttattgtgtaaatacctaatatctcaaaaacttaacac

SEQ ID NO: 15463 - DNA, 238 bp, Homo sapiens
  chr11:112370546-112370784
  hypo
cgtgcaggaagggtctcccaggtggccggagaacccacaggcgtgtacggacaaggtgccctgggtgccctggctgacccctggtcagcccggccaggggtagagaccttcccggaaggcgaagatcgcataggtaactgggaaagtgtgttttttgaggtgggggaaccccatgcagccaggtcagggctgcagggtaggccgcctgccccacaatcagagcactgcctcgttaccc

SEQ ID NO: 15464 - DNA, 151 bp, Homo sapiens
  chr11:120998452-120998603
  hypo
cgcgtcagtgtccacagtgcagtgcccgagcttcagccactactccgtgtgcacaagcagctgccccgacacatgctccgacctgacggcctcgcggaactgcgccacgccgtgcacagagggctgcgagtgcaaccagggcttcgtcctc

SEQ ID NO: 15465 - DNA, 210 bp, Homo sapiens
  chr11:120998833-120999043
  hypo
ccagaaccaggtgctgcacacctttgacggcgcctcctacgccttcccctccgagttctcctacaccctcctgaagacctgccctgagcgcccagagtacttggaaatcgacatcaacaagaagaagcccgatgcaggacctgcttggctgcggggacttcggatcctggtggccgaccaggaggtcaagataggaggcatcggggcttc

SEQ ID NO: 15466 - DNA, 124 bp, Homo sapiens
  chr11:130781427-130781551
  hypo
cggcattctcctccccgatccctcccataaaccaacaggccaatcagcgtggctcgacgtgggaagcaagcgggcagtaggggttggggaaactcctgacttttgatgaactttcgtagatctg

SEQ ID NO: 15467 - DNA, 185 bp, Homo sapiens
  chr11:133703500-133703685
  hypo
cgcggccgcgcggcgccctgatcgcgcgtctcaggccccgctggaacccggggcctccctgcccgctccactccttcccgcggcgcacccccgccctccgcctgcccctgccctgctggccccccgccaggcagcctctcccgcatcggagaccacccgcccggttttcatgtcccggtttggct

SEQ ID NO: 15468 - DNA, 139 bp, Homo sapiens
  chr11:133703714-133703853
  hypo
gacagagccccaccccacctcgcagtggacaccccaggacagtggcttggtcttcacaacactgggtgcggttcatggagcagcacctcgcattgctccctgcagtgacccacgcaggaggccgcctgccctggtggac

SEQ ID NO: 15469 - DNA, 351 bp, Homo sapiens
  chr11:1466353-1466704
  hypo
cgtggcctgcgctgggtgcggggtgcgggcaggacgcaggaggcctccccgggctgggcacagggagagtggcaggatgaagggccccaggtgagggcgggcgtcccaccctcgcagccgcccaggcccggccggagctgatgagcgggtggcccgtcctgtgtccacagagggggcaagaatgagcccgaaccagagcagcccattcctcgcaaggtgcagatccgctcgctgcccagcctggaggacatcgaccccgacgtgctggacagcatgcactcactgggctgcttccgagaccgcaacaagctgctgcaggacctgctgtccgaggagtgcgtctggggctgc

SEQ ID NO: 15470 - DNA, 302 bp, Homo sapiens
  chr11:30445742-30446044
  hypo
cggttactttgggtccttggaatatttataatagggggtgaagagaggttcaccgaaggaattgacaagctactaattaatgccatcactgctgcctggcacctctattaagcaaaactcagaaaccgggagccaattttcacatacgctttcttttctaaatggtagcccttctgaattgcaaccttcttcacgcctggcactcccagccgccatcggcccctctccgactgcacatcacaccaggtccaagagaagctaatttaaccaccgctggttaaaatcatactgcacttcacagc

SEQ ID NO: 15471 - DNA, 155 bp, Homo sapiens; identical to SEQ ID NO: 10205
  chr11:36476175-36476330
  hypo

SEQ ID NO: 15472 - DNA, 92 bp, Homo sapiens
  chr11:487212-487304
  hypo
cgtctggatggtgctcatggtgggcagggggcccctgctctctaggctgtcgtggacgtggtctccacaggccacggcagcacctgtgagtc

SEQ ID NO: 15473 - DNA, 280 bp, Homo sapiens
  chr11:487548-487828
  hypo
agttgagctcagggtgctctgagtgtggtgggagggtgtcgcactgcagccacccagaggttcgagaagccgtggggctcccggacctcccagaagccctgatcctggtcgggtccccgctccgtcctcagggtcggggcggtggaaagaggcggcagggcaggaagtcccgcccctgcctgggcttgggcactgccccatcccacttctgagggaccctgtgctacctatggggctaagagcagtgcctgcttgaccctgcagcccaccctggcagagt

SEQ ID NO: 15474 - DNA, 1000 bp, Homo sapiens
  chr11:487857-488857
  hypo
tgccttgtttgctgacagtcgtacatcgaggctgctggaggggcagccacccaccccacgctcaccctgagacctcactgggggccctgccagtgctgtcgactccaagaatgctgccagccggggtgggggctgcacgcacccgtgggcagggccgggcgtggcctgcgtcccatactctggctgccagccgggtgggggctgcacgcacccgtgggcagggccgggcgtggccggcgtcccatactctggctgccagccggggtgggggctgcacgcacccgtgggcagggccgggtgtggccggcgtcccatactctggctgaccctggcgcccacagaccctgatgatccgagactggtggatgtgcatgatcatcagcgtgatgttcgagttcctggagtacagcctggagcaccagctgcccaacttcagcgagtgctggtgggatcacgtaggtgccagcacagcccccggggcagtcggtgcaggctgaggggcattctcggaacccctgtgcccagcgcggcccctggaccccctcattctccccggggggcagtgggtgcaggctgaggggcattctcggttcccctgtgctcttccggggtcctcctcggggggctcgttacccctcacccctgcaacgagtgctggcccctccctgcagtggatcatggacgtgctcgtctgcaacgggctgggcatctactgcggcatgaagacccttgagtggctgtccctgaagacgtacaagtggcagggcctctggaacattccgacctacaagtacgtcgtgggggctgcgagggcagggccgggtgggggttacctggaggcagcctcagcgtccgtgctccagcagaccccgagcaccaggcccgtccagtgtgcggctcaggaggggtgaccgtggggctttgcctcctggaacctccctctgacctggtgtcactcaagcccggccgcccctcacagtggccatggcgtctgacccac

SEQ ID NO: 15475 - DNA, 344 bp, Homo sapiens
  chr11:561903-562247
  hypo
cggggtcaggcaggccgggcaggtagagctgaagtgggacctggtggtccagctccatggtctcccccaaggagagtggggctggttgctgatcctttttgttcttcccaactcttcaagccaggtggacagagagtcggggggacataggctgaccttctcctcttcttcccaggccagactggccgctttgtgcttgtgcagcggcttcgggagaaggagcggcagttgctgccacaagagtgtccagtgggcgcccaggccacctgcggacagtttgccagcgatgtccagtttgtcctgaggcgcacagggcccagcctagctgggaggccctcctcaga

SEQ ID NO: 15476 - DNA, 627 bp, Homo sapiens
  chr11:562884-563511
  hypo
ctgtcactcccccacccctgacgtgggcagatatgggggtcacagggtctgactcgggaggcaggtgagcccgcggacctgatcccctgtcactcccccacccctgacgtgggcagatacgggggtcacagggtcccactcgggaggcaggtgagcccggggacctgatcccctgtcactccccaacccctgacgtgggcagatatgggggtcacagggcccgaccagggaaagtgctccctccggagcacaagggctgtggagcccagtggctgtgcctcctaaggatctcatgtgtccccaggctcaggctcaggagctggaggagctgaaccgagagctccgtcagtgcaacctgcagcagttcatccagcagaccggggctgcgctgccaccgcccccacggcctgacaggggccctcctggcactcaggtcggagtggttctggggggaggctgggaggtgaggacctggcccagccccactccaagctgacttcccaacccacagggccctctgcctccagccagagaggagtccctcctgggcgctccctctgagtcccatgctggtgcccagcctaggccccgagggtatgtctgtgccccacctccccctggggcacc

SEQ ID NO: 15477 - DNA, 171 bp, Homo sapiens
  chr11:591108-591279
  hypo
cgcccccacgcctgtccttcctccctttattgttcttacttgtcactgagatgctacgcgttcatggagctgctctttcctccccgctagggctggcagctctgcagggaggcaaggctcgctgtgctccctccactgccgtgttgccagcagcttagtggagggcctggc

SEQ ID NO: 15478 - DNA, 156 bp, Homo sapiens
  chr11:5950927-5951083
  hypo
cgcaccgcccacttcctcacgggtccctccttcgccaatcacgccacctcctcctccacctccatcatctcctcctcctccaccactaccctcacctgcccctcccaagtcccctgtggccgcacacacccaggccaggccggcactccttgcccc

SEQ ID NO: 15479 - DNA, 197 bp, Homo sapiens
  chr11:63675233-63675430
  hypo
cgtagccacggcccctcctcctacagagattcaaagcattgcagcccctttcctccaaaaggactgcagtcctgagaccctagcgtgtggctccaaaaacgcactcacacctgcaacccccagaacagcgcgtgagccctggctgtgggggagcagcctcgtgccgggccgtgtgctcagtgtgctcagtgaagtgc

SEQ ID NO: 15480 - DNA, 95 bp, Homo sapiens
  chr11:63675675-63675770
  hypo
cggcggaaggagcgagagatcccagcactaaactctccctcgctctgttttttgaggaacctgaatgaacctgaaagcaaagaccgagtggagac

SEQ ID NO: 15481 - DNA, 390 bp, Homo sapiens; identical to SEQ ID NO: 6391
  chr11:64951346-64951736
  hypo

SEQ ID NO: 15482 - DNA, 190 bp, Homo sapiens; identical to SEQ ID NO: 6392
  chr11:64951894-64952084
  hypo

SEQ ID NO: 15483 - DNA, 443 bp, Homo sapiens
  chr11:65123957-65124400
  hypo
cgcagtgaggctctgcctgcctcctaccacccggacctgggcatcccctggttagagtggttggcacagtttgaccgggacatgggacagcagggccgacaggtggctttgctgctggctgcccgagtggtggaggagctggcaggcctgcctgggctctaccacgtgaagctcttgcctctggccgcctctagcaccacgcctcccctgcccagctcagtggtccgggcctttaaggcccattaccgacaccggctgttgggcaaactggctgccatccaaagcgagagggatggcacctcgctggccgaggccggggcaggcatcaccgtgctggacgccctgcacgtggcgtctgccgcctgggccaaggtgcctcctcagctcattttcagcagcttcattcaagaagggctggctcccggcaaaacgcccccgtcctc

SEQ ID NO: 15484 - DNA, 559 bp, Homo sapiens
  chr11:65386927-65387486
  hypo
cggaacaccgtccccaaccttactcccccagccttgtctgagcatctgtcacttacacttgggggcctctctctgggcagcggccgaggagactggcaggcgggaccgctcaagcagtgtgaggcggacccaggccattcggagacgccacaatgcaggcagcaaccccacccctccagcctctgtcatgggctcgccgcccaggtgagcaccttgccagctgtgccgaggggcaccgggggccggggagggcccgcaagctctagctggcgctgacctggggctgaccctctccagcagcctgcaggaagctcagcggggccgggctgcctcccactcccgggcgctgacgctgccctctgcgctgcatttcgcctcttcactgttgctcacccgggccggtgccaatgtgcatgaggcctgcacctttgatgacacttctgagggtgctgtgcactatttctacgatgagagcggtgagcctttcccaagcccggtggcccagtgcctccccgccttcccccaacagcctgagtcctcctagcagtggtgctcgctc

SEQ ID NO: 15485 - DNA, 893 bp, Homo sapiens
  chr11:65397153-65398046
  hypo
cgaggttggcaatggcctcgtcaccttccagctgcgtggccttgagttccggggtgagccgcaggaccaggctcgggtgggcaggcacagctcgggcctgatgtgggagctgtgttcaatagcacgtgcgaaggaggtccagtccagctctgtccaggctggcgggtggccttgggcaaggcactcctcctccctgggcctgcgtttcccagtctgagcaatgaggtggcagggtctcttggccaagccctgtgcctgccccaactttaggtcccagtgactctacaggtcactgcagtgagggcctgggcctggaggtctgagttctcacacccagcctgctctgtggtctcaggcttggcccatgggttgggcgccatgagtgagccagctccttcctctcaggaagacgtgtgtgttggatgcccgagagtgcagaggggccagaccgtgtccctgctccctcccgccctgcccttggatgctgggagttgggaggagaaaggcaggcgctctttcgtgaatcttggcatccaataaggttgactcccctggcgtccaagggggtgaatggcagcaggcctctgatgccatgttggtcactctcccaggacagggcaggtagggattgttctagcagcccctgactgcacacccctcctccacaggcacttactgccagcagcgcgaggtggaggctatcaccgagggtgtggaggaggacgagggctgttgctgctgtgaacctggccacctgccacgggtcctgtccttcaatgctgcctttgggcagcgctggctggcttgggaggtaacagccagcaagtacgtgctggagggctatagcattagtgacaataatgctgcctccatgctgcaggttttcgacctcc

SEQ ID NO: 15486 - DNA, 59 bp, Homo sapiens
  chr11:65511334-65511393
  hypo
cggcagcccgtcgggagctgcagctgccaagatgcaggctgcagcgtgggagtcgcaga

SEQ ID NO: 15487 - DNA, 168 bp, Homo sapiens
  chr11:65761126-65761294
  hypo
cgggagcagagatgacagagataaatgagagagcctgaggaattcatgctgctggcattggttcatccctgcccgatgcgcaccactcagagacctcaggtcaatgagccttgcttacttctcctaatttgagttcaattttgtcatttataagaaagtcccgcatac

SEQ ID NO: 15488 - DNA, 285 bp, Homo sapiens; identical to SEQ ID NO: 13275
  chr11:66633455-66633740
  hypo

SEQ ID NO: 15489 - DNA, 185 bp, Homo sapiens; identical to SEQ ID NO: 13276
  chr11:66633833-66634018
  hypo

SEQ ID NO: 15490 - DNA, 171 bp, Homo sapiens
  chr11:69206214-69206385
  hypo
cgggcgagctgaggaaaaggctcaggggctgacagatacagggactgagcgcggctaggatagccctactgagggagccagaggggccctggggagatgcctggcgggcccgtctcctagcgactgacgtcccgccaccccacgggccccttgtgctgggcactgcccacc

SEQ ID NO: 15491 - DNA, 299 bp, Homo sapiens
  chr11:69206414-69206713
  hypo
gctgttctgcatgaataagcgccaggcctcttgccaattgtccccctcttaaaaggcagccccggcgaaaggccttttcaagtgggatcgcacagtgccacccaggccgggcgggcattgttttggggagccagggtcctgcttggccgccggggtcggggggcccacaaagcatggtgatggcggctccacgcactcagcgcagcagccctgcttattaatctgcaaaactcacaccgatgcctttggaggggagattgagtgaaaacgatgtccttaggggagtggcctttgcaggc

SEQ ID NO: 15492 - DNA, 731 bp, Homo sapiens
  chr11:71725587-71726318
  hypo
cgcggcccgcagccgttccagctcattgcccatctgctctgcctcccgctccatagcctgcagcgctgcctgtgtgctgcagaactggcgtccctgttgctcttccagccactcgggctgtctgtctcctgccctcgcaggctccttgactaactcccgggaggctgtttcctgctgctcacctgccttgcgcaccaaggtctccaagcgggccacctctttgctggtggcagccatcttttcctgcagagtggagaggtcatctgcaagcttctgggccctgacttccttctcttggacctgctggagtgctctggccaggttggcatggagctcagctagttcgttctgctgccggcttatctggagctcgctgtgggattctatgcctgccaccttctcctttgcctcctgcagctcctggcgggccttctcacattcctccttcaaagtcatcagctgttcctggaacatggcgccatactgtgcctcctcttgctggctatcctcataccgctcacgccaggcagctacttctttgacgagctgctcacactcactctcagctgtgtgctgggcagccatggcctctgccagctcccgccgcaggacttcagtctcagcctgatgggcctccccaagctgctgtaatcgagcctccagccccttgcgcccagccctctcttcttccagctcctttcgttcccgcttatgctgctccaccaggcttc

SEQ ID NO: 15493 - DNA, 284 bp, Homo sapiens
  chr11:73685845-73686129
  hypo
tgtcaaatgtcaactccaccagcactgagacaatgagtagatgagaatgtagaaagagggaaggtggtaggtaaaggagcggaaggaagaggtggggaaagagggaaggagagaagggaaggagggaagagaaagaaggaagaaaaggaaagcatggcccggctagagacaaagccagaggtgatcaggtcagcagcaggagaggctcagaagggagcctctcgggaagtgcaggcagccatgagggctcgtttcagctgctcataggtgacgaacatcaccac

SEQ ID NO: 15494 - DNA, 111 bp, Homo sapiens; identical to SEQ ID NO: 13282
  chr11:763192-763303
  hypo

SEQ ID NO: 15495 - DNA, 510 bp, Homo sapiens; identical to SEQ ID NO: 5735
  chr11:76381512-76382022
  binary

SEQ ID NO: 15496 - DNA, 62 bp, Homo sapiens; identical to SEQ ID NO: 13283
  chr11:764018-764080
  hypo

SEQ ID NO: 15497 - DNA, 68 bp, Homo sapiens
  chr11:9548334-9548402
  hypo
cggcaggctgggagtacaggtgcacgctgccatgcgcagctaatttttgttttttgagacggagtctc

SEQ ID NO: 15498 - DNA, 86 bp, Homo sapiens
  chr12:108926063-108926149
  hypo
cggcccggtgcagagccttccggcagtgctgggtgtcaccatgagctctaaggcagaaaacaaaaagttgctgccaccaggacaca

SEQ ID NO: 15499 - DNA, 381 bp, Homo sapiens
  chr12:108926178-108926559
  hypo
tcttctcccaggtagaaactcactcttcagtaactctagcttctgagaagaccttagctttcagatctatccatgatgctttctccttccagagtctctacagtcacctacgaagtatttccctgaagcactctctccctcagccatgtaggggctactggaaagtgtacctgatattgtgatctgcaaccagcattctgcctttacagcattcacatgtgcggcacatggcgggggagtccaacagctctctgtaacctgatacagtccccagggaaattttactatggcgtcctactgacaggagagttatgaatccagggtagtgtcaaatttcatacccagagtcagatcttttttttttttttgaaagggagtctc

SEQ ID NO: 15500 - DNA, 86 bp, Homo sapiens
  chr12:112591890-112591976
  hypo
cagttctttgcagaggcaggtctctgaaaagaattatcctgagagaaaaaagcttcgtctgcatgcactcgcgcacacacacaaac

SEQ ID NO: 15501 - DNA, 555 bp, Homo sapiens; identical to SEQ ID NO: 13299
  chr12:114273212-114273767
  hypo

SEQ ID NO: 15502 - DNA, 134 bp, Homo sapiens; identical to SEQ ID NO: 13300
  chr12:114273850-114273984
  hypo

SEQ ID NO: 15503 - DNA, 154 bp, Homo sapiens
  chr12:116756230-116756384
  hypo
tttcactgttcctgctgaagccaaaggtgccagaaaagcctagacattgagctccgcgctccccagtcgtgactctgtgtctacgacgaactttctaaaggcagtggcttataaacgagcagtactgactccatggcggttccatctacttccc

SEQ ID NO: 15504 - DNA, 273 bp, Homo sapiens
  chr12:117407834-117408107
  hypo
cgaaggttctgagtaatgagcagatgctgctaatgcagggacggcggagaccttgccaggactccatctgctccgtgcttgcctgcctttggcctcgtgccacagcattagggaatggcagtgtgcttcgaaacccgctccctggtcaccgagtttgtcttgaaatctcgctctttggtgagaaatgagattacacacttcttaggtgcaaagaagtttttatttgtccccctcagtagagagaggagagacgcgatctggtgcatattagca

SEQ ID NO: 15505 - DNA, 50 bp, Homo sapiens
  chr12:117408136-117408186
  hypo
tcctctttatatggtgccatcaagcacggcaaagtggcttatccacctcc

SEQ ID NO: 15506 - DNA, 129 bp, Homo sapiens
  chr12:117408233-117408362
  hypo
cgggactgtggctgccctgggcggaggtgactatgatttctcatttactgacgtatcaacaatggacgggggtgggtctctccaagctgctttttagcggtgaacagtaggaccatgttttagttagac

SEQ ID NO: 15507 - DNA, 293 bp, Homo sapiens
  chr12:117599154-117599447
  hypo
cgggaggtggggagcatcaggcaagcagggccagaccgccgagaacctaaaagccacacggaggagagcaagtctggtcttcaaggcaacaggggagccaccctgaggggtttaagcagtgaagggacctaattgatattttgttaagattcctctggcctgcatacagagcgggttcacaggggctcagagtccagagagggaggacaagcaggaggccagggcactgcttcgggctgcagaagtgctggtctcagcgggtcgactttcacccgtctgggagacagagtcac

SEQ ID NO: 15508 - DNA, 328 bp, Homo sapiens
  chr12:117600052-117600380
  hypo
cgaaggtctggcagcaggaaggagaaggtgcctgtgtgctggcttcttcagaagcgctctggccttggcccactgtaccacgggatgccgcatggggtgggctagggcatcagcttgcctgcactgaactcctagtgccgtcacggcatgtgcaggagacctggctaagttatttaacttctccctgcctcagtttcattatttcccatatggcaaaaagaaaaataatatctaccctatagggctgctaagaagatggaaggaggcgttcagtcagtactcccgacttaaaatctcaccatcccgccctctctatgtccatacagcc

SEQ ID NO: 15509 - DNA, 397 bp, Homo sapiens; identical to SEQ ID NO: 6399
  chr12:120147746-120148143
  hypo

SEQ ID NO: 15510 - DNA, 336 bp, Homo sapiens; identical to SEQ ID NO: 13304
  chr12:120148396-120148732
  hypo

SEQ ID NO: 15511 - DNA, 70 bp, Homo sapiens
  chr12:120165264-120165334
  hypo
cgaggaggggagtgagggatgaaaaattacctatcgggtacgatatacactatttgcgtgacaggtacac

SEQ ID NO: 15512 - DNA, 496 bp, Homo sapiens
  chr12:122208807-122209303
  hypo
ccgagaattaaaggctggtgggtgtctcaccactacgtctccacattcctgtccggagtgatgctgacctggtgagtagcccctcgctgggcccctccagcctcccagggagtagagcctggggcccgggaatggggagggggctgatccagacagcggtggggggtgtgctccagggccaacttgggaaagaaagtatgagcctgcagctgcgccgggctgcgcgggccccacccagcccgtgaggggttctccagggaatggtttcgggtgtccctggccagggcagaggtagcggggctgcaaggctggagggagcgagtgaggctgggcactgaaggagactgcggaggacagaggggtcacagggagttagcgcttctgcacggccatgtggacccctgtgcttctagaaaggaagatgggatgacctcgcccagccccagggatagaagggcggaagtctggacctcagtttgactttatacaccttttc

SEQ ID NO: 15513 - DNA, 108 bp, Homo sapiens
  chr12:122213693-122213801
  hypo
cagccctctcaggcccgtggcatcgctgggagagggcccaggccctggtcccccagtggaccccagtggtctagaggaatgtgagccccgcctgtccgcacagtgtcc

SEQ ID NO: 15514 - DNA, 407 bp, Homo sapiens
  chr12:122480960-122481367
  hypo
cgtgtcccgtggaatatgccacctcccgctgtctctctctcccttttatttcctatcaagtggaactcagctccaggctggatgcagtcagacagaacgccttggcaatcccgcctcacggaccatgccgtgtcttctgtatcgcttccctgccagacacacaagacgtctggtttctacacccagaatgaggcctcaaatgtccccccaggattttaaatatgttaggccaccatccccagctggctgcctccagacgcagggtacagttggctcagtgtggggaaggtcaggccagtgccggaattctttgcctctctggacacatgggatggctgtggtgcttgggtgggtgggtgggtgggggtcagggggcgggagtgagctcaggggtcccaggaggaggc

SEQ ID NO: 15515 - DNA, 71 bp, Homo sapiens
  chr12:122602792-122602863
  hypo
cggtttaggatttatagattgtttatttctgcaactttccatgtaatattttcagacagcggttgatcatg

SEQ ID NO: 15516 - DNA, 220 bp, Homo sapiens
  chr12:124886252-124886472
  hypo
cgggaggctcagattgatcacctctgccttcccattcatcttcctgaaaggcccttgctggaagcgtctgggagacggggtgaggaagccagatgttctctgaagccaaattcctgagcccattacaggtacctggcgctaagtcgtgccgcccccctttctccagctggctgcactcctgcagcccctggcaggcacaggaggctgtcacggcccccgc

SEQ ID NO: 15517 - DNA, 178 bp, Homo sapiens
  chr12:124970986-124971164
  hypo
cgttcattcccgggctggaactcagacagcagggagggcctccgccgctggggctggatgatggagccgggcgacaggtgggaggcatagtcgcgggagtggtgctggtactccaggagcccgacgtcctgcaggaggggacagaggagtggtgagcgtgggcgggcacgggcatggc

SEQ ID NO: 15518 - DNA, 108 bp, Homo sapiens
  chr12:125092496-125092604
  hypo
agccatcccgtggccagggcgcagagtgacctcccagatctacgtttcatgtggcgtttctgccgtgtatttttaaacccggggacaaatgtatgcgtagtaaaggtc

SEQ ID NO: 15519 - DNA, 237 bp, Homo sapiens
  chr12:131272094-131272331
  hypo
cggacatgacgcttaggaccttaccttgctctccagctcagagcccggcccccatggccgggccagacctgccccggcctctcccctccgcctgagccacgccccggcttcctgctcaccaggcctgcgttagcatctgcagctgtgcttcttcaggccgccgcaacaccagccttcccgcactgctccaagacactgagcctggtgcatgctcaggaaattcaacaatttcaaaac

SEQ ID NO: 15520 - DNA, 1060 bp, Homo sapiens
  chr12:131272367-131273427
  hypo
tctactcacagggcaacctgctttagcaaactcaacgacacattaaaaagtacaatttgcaaaggagagctaccacctggctgggtgttctgcgcctagagactgggccccgggagagcgctccacagtgaacttgcgaaggatggaatttacataaagaaggcaccgtctttagtcctggaaaggcaccctgggattctctacctccgtccgtctttttcacaggcagggaactgaggtcccaggaggcccaggtcaccccacccaaggaggcagggcctcccctgcactctctggaacctctccctgccaagaagccagaggccctgttttctcaggcttaggaatctgcactctcttgttcaaagactgtgagtcagaagaggagggccaagtgccgccttgaatttctcttactgctcaaatggaaaacaatgaaacagggctgtccacatcacagcctgccacctgccagtcatttagagcctggcgcgcatttccatagctcctctgacgccaggacaatcagacccgtctccggagggctcctgcctctggatgtctaaatgttcttgccttaaacccggtgtgacgctccacccctcccacaccgcacacatacgaattttaacaaaatcttcaaagcagaacttaacaaaaggttgcgtggtaccaggtccatttggttccatgtgaaaccaactaggaagatccgcattaggctcttcctcagctgcgccgagggcctggtttctattcatttgagaagctgtgtgcgcccctgtatggtctgttctttcctttagggctcgcttttaacagtgagtgttgttgtggcaactaaaataaggagccggccagtgctcctagggaggaaaacctcggcaactccgcaggtgcaggcaccggccacagacccacgcctggggcactcgcgtttgcattagcagagcgcaggagtcagggagcgcgggcaggggcgggaggaggggtctgcgcactggccacggtgtgggggacccagccctaccccttcccggggctgagtgggactcgccac

SEQ ID NO: 15521 - DNA, 221 bp, Homo sapiens
  chr12:131314814-131315035
  hypo
cgccacgcttccctgtgaaagcaagctgctttcccatggtgaccgtcccatgctgtgtgatgcaccccccacagtggcgtggcgtaaacaaccagaggctcaaccctcctctcccatggtgaccgtcccatgctgcgcgatgcaccccccacagtggcgtggcgtcaatcctcctccactctgaacccacggcacgggcggatttttgttccaagtcattc

SEQ ID NO: 15522 - DNA, 136 bp, Homo sapiens
  chr12:133280443-133280579
  hypo
cgggaatttagagaaggaagcagagacaactgagaagacagactggccgggaacacggaggatctgggatggaagaggggagagctgggaagccgcgcctctgagtagcgtgggggcagagtcgccatcctaggtg

SEQ ID NO: 15523 - DNA, 95 bp, Homo sapiens
  chr12:2017667-2017762
  hypo
cggcctctcccacgcggtgttggagggcgtgctaggattgcctccggtggagccccggccccgtttcctccacacgaccgggttcacacctgaac

SEQ ID NO: 15524 - DNA, 214 bp, Homo sapiens
  chr12:2017874-2018088
  hypo
caactcccacgccggactgcgtcacggacatccccacgccaactcccacgccggactgcctcacggacatccccacgccaactcccacgccggacagcgttatggacatccccacgccaactcccacgccggactgcgtcacggacatccccacgccaactcccacgccggactgcgtcacggacatccccacgccaactcccacgccaggttc

SEQ ID NO: 15525 - DNA, 43 bp, Homo sapiens
  chr12:39298514-39298557
  hyper
cgccttggcctcccaaagtgctgggaatacaggcgtataaact

SEQ ID NO: 15526 - DNA, 222 bp, Homo sapiens
  chr12:39298687-39298909
  hyper
ccgaaatctctacctatcaggcaaaaggcaaaaagcccggaagggtcggggagaagcaagctggaaggctccaggaagtgggtggggaggaagctgccggggttggagccaaccctagcaacagcaggtttgcacacgcctagcagaggaagtcccgggcctaagcgtgcagcggtcacaagagcttttggcagtgctgtccccttcgattccggtcatcac

SEQ ID NO: 15527 - DNA, 221 bp, Homo sapiens
  chr12:49422776-49422997
  hypo
cgcctctcccccagcttcggacaacccaggtgaactgggcctggcccacatccagagtagcacatacctgggatgctggcccgaggaatgagggggatgacaggggagagggcccggtcctcttgctcccaccggcctgagcccagatgagggaaacgaggggcctcctcccccaagatgctctcaggggatgaagctggcacaatgctgtcaggagaatc

SEQ ID NO: 15528 - DNA, 104 bp, Homo sapiens
  chr12:50484317-50484421
  hypo
cggctccatgccttgcttatgccaccagaacctatcatcattaatcatgtcatcaggtaggcctgtgtgtgggaggcagtgctgtgccggagctgccttgtgcc

SEQ ID NO: 15529 - DNA, 37 bp, Homo sapiens; identical to SEQ ID NO: 6842
  chr12:51421646-51421683
  hypo

SEQ ID NO: 15530 - DNA, 70 bp, Homo sapiens
  chr12:51844685-51844755
  hypo
cggatgccgcttggccggcagagccatcggcatcaccgcactcatggccagaagcaccggagacgagggc

SEQ ID NO: 15531 - DNA, 136 bp, Homo sapiens
  chr12:56183329-56183465
  hypo
cggaagcacctttttcagaagacaacctataactactacccaactcgattctcttccctcctctttcttggaaaccttggtacatggacttgctactattgttaagaattatttagggccaggcgcggtggctcac

SEQ ID NO: 15532 - DNA, 360 bp, Homo sapiens
  chr12:56558022-56558382
  hypo
cgctcaccctccctccaggtggacccctctccctcacccttctcccctcttggccccttctcacctggcagtgggctggcactgggcaggaggttgccctgaacagctgccacaatggcagggctttgggctgcggcggatccgagccccggcccgagaggcaaggaagatggcatggtggtggtcgccggcaggttaggatgtagagggttcgccatggacacaggcaggttaggtggggggagagtgcccggggcgaacgggagatggtggtgatgcccatgcaggttaggaggagcggggaggttaatactgatggagtcagctagactaccaaatgggatgatggatggagcagga

SEQ ID NO: 15533 - DNA, 218 bp, Homo sapiens
  chr12:6391196-6391414
  hypo
cgggcatcttaaaaagccaaaacgatcacccaaagctccctcctttccacctccccctcactcacgactgcgccccgtttctctgctgtctttcagagcccagcttctccggagctgcctgctcacgaggctgcactccctctggcctctgccactccctcccggctgggctgaaactgctcttgtccaagtcaccaacagcctctgcgctgcctgcc

SEQ ID NO: 15534 - DNA, 73 bp, Homo sapiens; identical to SEQ ID NO: 13348
  chr12:6483496-6483569
  hypo

SEQ ID NO: 15535 - DNA, 134 bp, Homo sapiens; identical to SEQ ID NO: 7918
  chr12:708894-709028
  binary

SEQ ID NO: 15536 - DNA, 182 bp, Homo sapiens; identical to SEQ ID NO: 7919
  chr12:709062-709244
  binary

SEQ ID NO: 15537 - DNA, 267 bp, Homo sapiens
  chr12:7858581-7858848
  hypo
cggggctgctcgactccgtcgtgcccccttgggcttccactgcaggaatgcaaggcgggtaaccttcaaagccaggtggaaacgtccggtttgaaccgcacatatgctagggtggagagtgagaacgaatgcaaagagaggctagcgttggggtggggctgccggggcaaagggacaggcccgggggaggcccgggccgccacggttagaaagcatggaaagagcttaagtaaaatagctgcgtgtcggcagggcgcggtggctcac

SEQ ID NO: 15538 - DNA, 86 bp, Homo sapiens; identical to SEQ ID NO: 12261
  chr12:81102562-81102648
  hyper

SEQ ID NO: 15539 - DNA, 42 bp, Homo sapiens; identical to SEQ ID NO: 10280
  chr13:111363839-111363881
  hypo

SEQ ID NO: 15540 - DNA, 95 bp, Homo sapiens
  chr13:111978023-111978118
  hypo
cgtgcaggaaaataacggtgggtgtggagggaaaatgggacaccggaggaggcgcgggaggactgccgggattcgacggctgggcggtcagatgc

SEQ ID NO: 15541 - DNA, 193 bp, Homo sapiens
  chr13:113233687-113233880
  hypo
cgcggggccacggcatccctggggctctcgcacactgctgagtgccagcggggccacggcatccctgcagctctcccacactgctgagtgcccgcggggccacggcatccccggagctctcgcacactgctgagtgtcagggggccacggcatccctggagctctcccacactgctgagtgccggggggccac

SEQ ID NO: 15542 - DNA, 282 bp, Homo sapiens
  chr13:113291506-113291788
  hypo
cgtgcttctgtcagtcgacggtttttactccagcgagcagcatcacccttaaaaaggtggcagaaacatgggagatgggtgggaggagggcaacagagccaccgtctgctttcatcgcccaagcgcagcggctctgccacctggcagccgaggccatgcaagatttcgcaggaggagcccatggccgcggggaggaggagtgggcgcaggagcccacggaacaggccaggcaggagggaaggaggagtgggagacccaggccattctccttcccactttggc

SEQ ID NO: 15543 - DNA, 183 bp, Homo sapiens
  chr13:113461159-113461342
  hypo
cgtagagtcgcctattctaaacatttcgtactcacggctcataggcggtgttttgtgactggctctttcactcagcatgatgttttcaaggtttctctgcatctgagcaggcgtcagcgcttcattccgtctgatgaatgagtcacggtcccctgcacatacctggcattttgtgtatcacgc

SEQ ID NO: 15544 - DNA, 319 bp, Homo sapiens
  chr13:113627865-113628184
  hypo
cgccacggctcagtgcttcccaagagctcctgagaacgcagcgctcaggcctcccagctgggtgagtctgacgccctccatgcgaagacggcgcgagcacggcttcacctgtggaaccaggggcagacttatgagctcccgggggtttcagttccggcctgctctgaggacactggggggccggccctgtgtttgcttggagcgcccttcagggagacccgtggctccaggggctggcgctgagtgaccacaggcaaggtctcaggagtgagtgatgccaggcagcacctgagaaggggatgcctgcgaggtgtgttcc

SEQ ID NO: 15545 - DNA, 241 bp, Homo sapiens
  chr13:113796043-113796284
  hypo
cgaaggcggggcctaggcgtcacagctgcaccttgcacagcaaccccactcccactcatagctggcccgacccgcagcgttggcctcacccgggggcatattcgaagggcagagttccaggcccgccttttcaagagcctggtgacccagctcaccttccggcttcaggtgcggctcagcccccagaccgtgttctgcccccggctaccatgactgtcccctccagacacaggttactccc

SEQ ID NO: 15546 - DNA, 178 bp, Homo sapiens
  chr13:113797753-113797931
  hypo
cgcacacgcccagcacttgggttctcctgttggcatcctccggccagatgcattcatcccatttcgcccggcccgtttgtctctgtccatccgtcaagctttcttgacttcttggtgcattttcaggcaaaccgcagacgccaacactcccctcgctgcctgggttgctgcctggcgt

SEQ ID NO: 15547 - DNA, 112 bp, Homo sapiens
  chr13:113797960-113798072
  hypo
aggccaacgctcggacagctgcgctcacctgcagatccgacccctgccgacgacgtggggcctcgccctgcaagcccgctgcccctccgggtgcccctgcgctctgcctccc

SEQ ID NO: 15548 - DNA, 280 bp, Homo sapiens
  chr13:114055661-114055941
  hypo
cgtgtgcttcgtgagagaggggaccctgtcctcctagcaggggtccagcggcaccacagcaagacttctgtggccaagtacacgccatgctcagctctgcccccacccgcacccccggaccatcctgtgtgcagctgggctgccccgggacccacacgcgcgaggggcacccggtgctcaggagcctccacacacagcagctcgcacttagaacccacacgccaagcagaaacccctcgaagcgggctgggagcacggacccctgatttatagaggaggc

SEQ ID NO: 15549 - DNA, 358 bp, Homo sapiens
  chr13:114056151-114056509
  hypo
gccactggcgtctgccgggatggaccttccctggaaggagagacctcagccccgcgtgggtaggacgcgcctgctgaacgccctctcagggccgacactggaaaacaccttcctctaaaggaacatccgagtcagaaaacaggtgctcgcagcaggcaccaaagcgcctttgcgaacgcttagggctgtttcaggaaaccgctcagtagcaaaggcagaagatgccaagacaccttcaaaaagcaggaattaactttccacagggagggcaccaccaaaaacaagggtgcggggctgtagggcgacaggctgcatcggttcacgctgaaaatccagctgctccggggccactcaggca

SEQ ID NO: 15550 - DNA, 32 bp, Homo sapiens
  chr13:114056544-114056576
  hypo
accgagtggcctgggacgatggatcgcgacac

SEQ ID NO: 15551 - DNA, 163 bp, Homo sapiens; identical to SEQ ID NO: 7928
  chr13:114123291-114123454
  hypo

SEQ ID NO: 15552 - DNA, 162 bp, Homo sapiens; identical to SEQ ID NO: 13365
  chr13:114271763-114271925
  hypo

SEQ ID NO: 15553 - DNA, 62 bp, Homo sapiens
  chr13:114502726-114502788
  hypo
cgagaaacttctggatttccctgagccaccgacagcggcagtgtgacctcatttctctttcc

SEQ ID NO: 15554 - DNA, 74 bp, Homo sapiens
  chr13:114747445-114747519
  hypo
cggtacaaggatacgtcgtgctgtgtatttaaacggcgcttcccacacacctgccgtctgcatcccgggaggac

SEQ ID NO: 15555 - DNA, 139 bp, Homo sapiens; identical to SEQ ID NO: 6861
  chr13:114748186-114748325
  hypo

SEQ ID NO: 15556 - DNA, 98 bp, Homo sapiens
  chr13:114766173-114766271
  hypo
cgcggccccgggctctgcccgcagcactgaatccttcctcccctcagctctccccctgaaaaagcagactcagtcccagggcccagcacgctccagca

SEQ ID NO: 15557 - DNA, 82 bp, Homo sapiens
  chr13:114766300-114766382
  hypo
cctttgcttttgtggtaggtaaattcatggttggtcaagcgaaaccatctcttcttaaaattcttcatcccaaagcgcttcc

SEQ ID NO: 15558 - DNA, 126 bp, Homo sapiens
  chr13:28745545-28745671
  hypo
cggactccagaggttaagagctcagtcacgcaagactgctctccacttcagataccagtgacatgtagcgggtcctcagattatccacacttctatccgacttggctacaaattgggagttcccac

SEQ ID NO: 15559 - DNA, 100 bp, Homo sapiens
  chr13:30123381-30123481
  hypo
atgatcaaagaccaggagaaaaccgtacccgtggaccaggaggaagccagcgaagaacaaggcagcccaggatgcgggaccagtgccattccttcccacc

SEQ ID NO: 15560 - DNA, 86 bp, Homo sapiens
  chr13:37643604-37643690
  hypo
cggctgcagtggggaggtgcgaggggtggcagcaggaacggctgtgggagcagcagtggcggtggtgggtcccctgtgccccacgt

SEQ ID NO: 15561 - DNA, 73 bp, Homo sapiens; identical to SEQ ID NO: 6878
  chr13:96409644-96409717
  hypo

SEQ ID NO: 15562 - DNA, 82 bp, Homo sapiens
  chr13:99115936-99116018
  hypo
cgacttacgcgtcggaatcctcggagctcgagtcgtcatggctctgctcggccttccatctcttgtacctgtcgatgagctc

SEQ ID NO: 15563 - DNA, 119 bp, Homo sapiens
  chr14:102691860-102691979
  hypo
cgagatggcatcactcgagatggttagtcctagctctgcctcagcccagtctgtcacccttcgctggttctggaatgcagtttgcatttggccatcactgtactaacgctgtcagatac

SEQ ID NO: 15564 - DNA, 365 bp, Homo sapiens
  chr14:103409913-103410278
  hypo
cgccccgttctcggttcgccgagcccttctgcccaggggcctatgcccgccgacggggtcctctgctgaggcctctggaagaaccggccccatgtgctcagggagagaggttgctgagcccgcctactgctggtctgagacgtgagatctgaaccatgctctctgctgcgggctggcatggggcccacctctcccgatgctctgtgactactcaactaagggactggaagacaaaccaaagcaaaatcgaacacatgctgactgtcggtgggaaaagcagcaacagggatatgcaacagaaaacatatacatactacaggcgacaggagccgcaggccacatgagctcctgcgcgcgtgccctcc

SEQ ID NO: 15565 - DNA, 129 bp, Homo sapiens
  chr14:103417432-103417561
  hypo
cgtcttcagcatgcgcacagggaaagggcccatggcagaagcctgcttccatgctgtccctgccagcccgggccgcctcccacacgtgggagtttctacacggcaattcaggccagcggtcatggggac

SEQ ID NO: 15566 - DNA, 140 bp, Homo sapiens; identical to SEQ ID NO: 6893
  chr14:104641166-104641306
  hypo

SEQ ID NO: 15567 - DNA, 212 bp, Homo sapiens
  chr14:104642243-104642455
  hypo
tgtccctgggggcgcttgccggagctgggcggcccaccagcctggctagcttcgacagtgactgctccctgcgggccctggcctcggggtcccggccagtcagcatcatcagcagcatcaatgatgagtttgacgcctacacctctcaggcccctgagggggggcccctggagggggcagcctgggccggcagcagtcacggctcctccatc

SEQ ID NO: 15568 - DNA, 119 bp, Homo sapiens
  chr14:104642742-104642861
  hypo
ccactccagcctcccccggaaaccgaggactgcctctgccaccacccgtgtgggctgtgctcgcctgggccagagcccacctggccgtggaggcctgtttgaggacccatggctgctcc

SEQ ID NO: 15569 - DNA, 80 bp, Homo sapiens
  chr14:104645047-104645127
  hypo
cgccttcagcggccccgccccaccccgagggaggcccccacccaggtagggcctttggtgggctggggtctatgacccct

SEQ ID NO: 15570 - DNA, 164 bp, Homo sapiens
  chr14:104645553-104645717
  hypo
cgcccgccctgcctcccagggtctggcgtgcgtcagtacaaggctgcggctggcggagcgcaggcagcagcggctgcgggaggtgcaggccaagcacaagcacctgtgtgaggagctggccgagacccagggccggctgatgctggagcctggccgctggctgg

SEQ ID NO: 15571 - DNA, 244 bp, Homo sapiens; identical to SEQ ID NO: 6894
  chr14:105103508-105103752
  hypo

SEQ ID NO: 15572 - DNA, 65 bp, Homo sapiens
  chr14:105268589-105268654
  hypo
cgagcggacacactcgggtgagaagccctatacgtgtgtgcagtgtggcaaaagttttcagtact

SEQ ID NO: 15573 - DNA, 78 bp, Homo sapiens; identical to SEQ ID NO: 6897
  chr14:105512395-105512473
  hyper

SEQ ID NO: 15574 - DNA, 640 bp, Homo sapiens
  chr14:105687735-105688375
  hypo
cggtcccagtgagggtgacgagactcactgcattctggcgtcggcacacacccaattcttcacgccaggaccactgacgcccacacagccccattggggggactggtggtgccaccacccaagcccaccgcccgagaccaccacacctcccgacagaggatggcagcatccggctctccccatgagaggcacacgcctgaaagatctcccgatgacctcagcgtcccccagggccccatcagaactcactggggtcgctgctctgagaggagatgcattcgcggatggagtctgagatgcccaggctggctgcagtggggagggggtccagcagggaccccagggccggaggtctgccgccccactcggggcttcctgctgcttccgagctgccgggggcaccaccaaggagctcccggtataagtctttgttcaggtggctggccgcggcttccagctcctcgtcctctgtgtcctcctcgccacacaagctggacgcggtgtcctcggtggagcctaggtgtacacaatccacctgttaaccaggcagagggccagggtgcccgcttttgtgacaaaaaacaatgctaccaagctgccaggtaacccatagaacggctgtcagtgcacggtgcctggc

SEQ ID NO: 15575 - DNA, 423 bp, Homo sapiens; identical to SEQ ID NO: 13401
  chr14:105689521-105689944
  hypo

SEQ ID NO: 15576 - DNA, 56 bp, Homo sapiens; identical to SEQ ID NO: 9117
  chr14:32597657-32597713
  hypo

SEQ ID NO: 15577 - DNA, 86 bp, Homo sapiens
  chr14:53259056-53259142
  hypo
cgggaatactgcttcacgccttacagtgcgcaggacagcgccgcacaacaaagaattacctggcctgaaatgtctggagtgctgag

SEQ ID NO: 15578 - DNA, 297 bp, Homo sapiens; identical to SEQ ID NO: 7959
  chr14:55765714-55766011
  hypo

SEQ ID NO: 15579 - DNA, 55 bp, Homo sapiens; identical to SEQ ID NO: 7960
  chr14:55766084-55766139
  hypo

SEQ ID NO: 15580 - DNA, 211 bp, Homo sapiens
  chr14:69354686-69354897
  hypo
cgtttttcggcttcgcttccacttttgcaggaggtttaactgacaaccgcgccgatctcctcttgggcttttccttggcggctccttcagcagagctgaccttccccttgggcatcctggcggcagggagggcgcgtgccaggtgtctgcgggccgcggcatgctgacagcctttgcgaaactgtgctgcctggccgctgccactcctcac

SEQ ID NO: 15581 - DNA, 82 bp, Homo sapiens
  chr14:89291884-89291966
  hypo
cgtgagcggtacaattctggtgggcaggtggctcctggaataggcaaaaaaggagaaaatgggagaacagaagtagcgctgc

SEQ ID NO: 15582 - DNA, 857 bp, Homo sapiens; identical to SEQ ID NO: 6919
  chr14:91805557-91806414
  hypo

SEQ ID NO: 15583 - DNA, 523 bp, Homo sapiens
  chr14:93454179-93454702
  hypo
cggactgggggagggcactggcttccacacggcagacgccaggacggcagctcacgcagactcagaccagggctagccttggtcccagctgccgcctcatgccggcaacgcacctacccggcctggtctgcagctggcgcttagccgccccagggcaggggagccacaagcacaatcctgctctgcggagcctcccctgcactgaaagggcgggtctcagcctgggtggcagacaacagccgatgtgaaaacaaaaacagtggtgctcccacacatccctgaagtccaagaaagggaaccacaaaccaagcacctcccctgagagaccctacctccctggcaccctgtcctccctcattccagacccttcgatggggcacgctgtcccctcacctcagccctgtggtctgggcaggctgacactgggggaggcatgggcaggtgcacaccaaggggtcgctctgcccgatctggggtggggccaccagctgagacgcccactcagcacgtccgaggcactggc

SEQ ID NO: 15584 - DNA, 81 bp, Homo sapiens
  chr14:96054940-96055021
  hypo
cgtggcgcggaggtgggcatcagaaagcccgggaagggggaatctggctggcatcatcacacaaaggacgaccgagtcacc

SEQ ID NO: 15585 - DNA, 148 bp, Homo sapiens
  chr15:101464778-101464926
  hypo
cggcagtggcagtgacaacagcgggacctgcctttgaagatcggctgctgcaagggttgatggctggcatgtcgcaaagaccccccagcatgtactggtgtgtggggccggaggagtcagctgtgtgtccagaacgtgccatggagac

SEQ ID NO: 15586 - DNA, 152 bp, Homo sapiens
  chr15:102043329-102043481
  hypo
agctggggaactgcccacactgggaggggttgggaagcgtaggagggcacctgtcgcagacgttgaggaggggctgcctttcccctccaggggctgacctcccaggtgattcccagagccagaccacaattccagaattcagtgaaaacagc

SEQ ID NO: 15587 - DNA, 116 bp, Homo sapiens
  chr15:28516961-28517077
  hypo
cgcacgcctgctcctccctcagcttgttgtccacacctgttaaggcgggagctggtaccaaacagagtgacagctcaggtgacgtgccctgcacagagcccagtacataggaagga

SEQ ID NO: 15588 - DNA, 177 bp, Homo sapiens
  chr15:28517198-28517375
  hypo
aacaagtgacctcccacacctgtctcatctgactcgctgctattaccaccaaacacacacacgccagagaaaaacactgccgttgacatgcatgctagtcttgctttaaaagtaactagactcgagtgccacctaaacacaaagttccatcatgacactcacgtgcatgtcgccctc

SEQ ID NO: 15589 - DNA, 136 bp, Homo sapiens; identical to SEQ ID NO: 7975
  chr15:31571220-31571356
  hypo

SEQ ID NO: 15590 - DNA, 88 bp, Homo sapiens; identical to SEQ ID NO: 9152
  chr15:41091052-41091140
  hypo

SEQ ID NO: 15591 - DNA, 234 bp, Homo sapiens; identical to SEQ ID NO: 13455
  chr15:43020360-43020594
  hypo

SEQ ID NO: 15592 - DNA, 563 bp, Homo sapiens
  chr15:45444141-45444704
  hypo
cagacggtgcaacagttcaagcgcttcattgagaactaccggcgccacatcggctgcgtggccgtgttctacgccatcgctggggggcttttcctggagagggcctactgtgagtgactttacttaccacgagccctgtccctaggcttgcaatgagtgatcgccctgggggtggggcctgcgataagtgccagccctgggtagggtaagtggagcctgtctgagtgaagactgtgcgggggaggcctgttgtgagtggcagccggccagggcctaccgcccctaaccagctctctgtcctctgcactgaccctcgcttgcctgcctgggccccctccacagactacgcctttgccgcacatcacacgggcatcacagacaccacccgcgtgggaatcatcctgtcgcggggcacagcagccagcatctctttcatgttctcctacatcttgctcaccatgtgccgcaacctcatcaccttcctgcgagaaaccttcctcaaccgctacgtgcccttcgacgccgccgtggacttccatcgcctcattgcctccaccgccatc

SEQ ID NO: 15593 - DNA, 290 bp, Homo sapiens
  chr15:49698682-49698972
  hypo
cgtgatcactcagggtgggggagggtctgctgttctccatgcttagcttcactcccacagcagcagctttggcgggagggtggggtgctggccggggtggggctggctagctggctaagtgccggccaaggctccaactgcaatgatggttagtggtggggagtgccgtgggggagcggagtgcacttctgacccagcagtggcagggcagggtgcatacacagagacgtgcacacacacacacactggcagggcaaggaaagcaaaacccacccatacgcatgtgtgcc

SEQ ID NO: 15594 - DNA, 153 bp, Homo sapiens
  chr15:63066085-63066238
  hypo
cggcagcccagaacctggtgttaatgaattacctgcttaccgaggcgtttgcagtgtagcctctccctcactccattgagctcttctgcggtattctctaccccgcagagctcccttctccactcatccccaccccgcccaattcccttctgc

SEQ ID NO: 15595 - DNA, 102 bp, Homo sapiens
  chr15:68908928-68909030
  hypo
cgcggtcgaatgattctgacaagcggtgagtacggctgtgtcagcgcgtgggccccagcgcaagcaggcaatcccatgtcatctgcgagatctcccatgggc

SEQ ID NO: 15596 - DNA, 204 bp, Homo sapiens
  chr15:72462436-72462640
  hypo
cgcaggcagaggttctgggatggctgacggagtaggcgggtctcacacagcgtctttcccgaaagccagaagttctgcttatgcctaggctgggaggaaaatcaacctgtctacctcatctccagtgccaggcagctcgtaggccaggctgagtgaggcctctagccccacccttgaggaggcacactgagagggaggaccctg

SEQ ID NO: 15597 - DNA, 114 bp, Homo sapiens
  chr15:72462669-72462783
  hypo
ccaaagtacccgcgcagcatgactgtaaaccatcaggttccgggaaagtaggctgagcacaggaggccttatcaaagctcaggagctgatgcgctgaaggtgtgggaggtggac

SEQ ID NO: 15598 - DNA, 235 bp, Homo sapiens
  chr15:93179848-93180083
  hypo
cgcggagataggctgcatggggcttgagagtatagactggaagcaactcgggaaaatcacagggcatagtgagcacatatgacccctgagagggccagggggtgctccagctgagacctccccaacaggtcgccttgagtcatccctggtatgccctgctctgtcacccccactcactcccatccaagagccccactccacgcctcaccggagttcgcagccacttgactttagc

SEQ ID NO: 15599 - DNA, 351 bp, Homo sapiens; identical to SEQ ID NO: 12343
  chr15:94048797-94049148
  hypo

SEQ ID NO: 15600 - DNA, 353 bp, Homo sapiens
  chr15:94881658-94882011
  hypo
cgacgcacatgcatgtaacacacgcacaatacataattcatgtattatgtttgcaggcattttttttttttttttttttacttccattgatctgaaaaatgtggaggagggtctgccatcagcccttctttttgctttgggcggagtgactggagggacattattcatttcttttggcgtctgtttcaaagctcccagggaggagccgggcgggtcagcggtgtcagcactgaggccagctgagggcctggctgatgtggagttcagctgccctggctgagacaatgttggctgctttagtgcaggtgcggggacgcagcaaagaatggcaactttgtcaatttaatctctac

SEQ ID NO: 15601 - DNA, 86 bp, Homo sapiens; identical to SEQ ID NO: 12355
  chr15:99506062-99506148
  hypo

SEQ ID NO: 15602 - DNA, 50 bp, Homo sapiens
  chr16:1019685-1019735
  hypo
cggagccctctgggacggtgactgcccacgcgccccgctggctgcatctc

SEQ ID NO: 15603 - DNA, 226 bp, Homo sapiens
  chr16:1036850-1037076
  hypo
cgtctcccttggcaccgcgttcggaggacgcaccctcactcccctgctgccttcactcctttctgaccaagcaacgctaacttttgtacagatcgatttgataaaattaaacaaagtgctttttatggacgtgggctgcattttgtgtgttgctttgtgtgagcctggggctcccggggtaaagatgtccggcaaaggcaggatcaggccgtgccacgcggccgcc

SEQ ID NO: 15604 - DNA, 42 bp, Homo sapiens
  chr16:11037121-11037163
  hypo
cgcttaatcggaggtatacaaggcagtgtagtatgtatgtgc

SEQ ID NO: 15605 - DNA, 82 bp, Homo sapiens; identical to SEQ ID NO: 11142
  chr16:1154990-1155072
  hypo

SEQ ID NO: 15606 - DNA, 132 bp, Homo sapiens
  chr16:1248221-1248353
  hypo
cgagcccgagatgccacgtggtcagacctgccgcagccagttccctgcctcggccagtcccctgcctccactcctgcccctccacaccccagccctccaaaagcagcagacctgctgccctgggatggttgg

SEQ ID NO: 15607 - DNA, 88 bp, Homo sapiens
  chr16:1248922-1249010
  hypo
caccatgctgtctcccgcccccaccccccatcatggctccgcccagctggcagtcaccgccccacatggctccgcccacggtgcagtc

SEQ ID NO: 15608 - DNA, 62 bp, Homo sapiens
  chr16:1271094-1271156
  hypo
cgtcgtgagcagaaaggcccggggaggatgacggcccaggccctggttctctgcccagcgaa

SEQ ID NO: 15609 - DNA, 53 bp, Homo sapiens; identical to SEQ ID NO: 6945
  chr16:1472227-1472280
  hypo

SEQ ID NO: 15610 - DNA, 195 bp, Homo sapiens; identical to SEQ ID NO: 7998
  chr16:1730112-1730307
  hypo

SEQ ID NO: 15611 - DNA, 105 bp, Homo sapiens; identical to SEQ ID NO: 7999
  chr16:1730761-1730866
  hypo

SEQ ID NO: 15612 - DNA, 346 bp, Homo sapiens
  chr16:1812272-1812618
  hypo
cgtgtaggcaccccaggaggaagcaggtgtcacccggcctccgagggctggctgagcctctgtgcccctccctccgcaggacaaaatccccatggcccagcgccgccgcttcacgcgggtggagatggcccgtgtgctcatggagcggaaccagtacaaggagcggctgatggagctgcaggaggctgtgcggtggactgagatgatcaggtgggagttgcggccaccccaggaggggctgcgggatcatccctgacggcaggactgcggctccctcctctgcacctccctgtcttctggggggactgaagtgcgctgggtgcttcctggcgggagccagagagtc

SEQ ID NO: 15613 - DNA, 53 bp, Homo sapiens
  chr16:1812929-1812982
  hypo
cggcttcagccagcgccgcaaccatgccatgtgcccgatctcggcaggcagcc

SEQ ID NO: 15614 - DNA, 68 bp, Homo sapiens; identical to SEQ ID NO: 13482
  chr16:2106533-2106601
  hypo

SEQ ID NO: 15615 - DNA, 63 bp, Homo sapiens; identical to SEQ ID NO: 13483
  chr16:2106641-2106704
  hypo

SEQ ID NO: 15616 - DNA, 426 bp, Homo sapiens
  chr16:2107057-2107483
  hypo
gggcagggcttatgcctgccagcccctgacacgcattgtgtctcgcagctgatgcggaacctccttggcacccacctgggccacagcgccatctacaacatgtgccacctcatggaggacaggtgagtgtggtgggtggggcgcagggcagtggaggccagcacagccctcggggcagctccagtgtcccttgccaagcacacactggcttagagagtccttgtcctctcgggcagctgttccagaggctgccactagagcgaggcccatgacttctaggatccagcccctgtcctctccttcctctgtcagttcaacagaatatccacacccagctcagtgcctgccccatgctcggacgtcctccagcggtgctccccaactacttagcctgttacaaggcgaggctcggggtcttggcttgac

SEQ ID NO: 15617 - DNA, 440 bp, Homo sapiens
  chr16:2108531-2108971
  hypo
cgtggtcagcagtgatgggctgccgcctgtgcgcaggagtgaacaagagtgttactgctggcctctgttccctgcccttccccagcggtgctcctgccccccccaagcacagggacctctggggctgctgcaggagcctcggcaacctcacacatccatggcggaccctgggacagggccctgctcacattccgtctctctggggaacacttttagagcctacatggaggacgcgcccctgctgagaggagccgtgttttttgtgggcatggctctctggggagcccaccggctctattctctcaggaactcgccgacatctgtgttgccatcattttaccaggtaaggcggtttctgtgtgcagtgagctggcaggaacgggagagctcccctcacgcctgcccacccatcccactgggggtcctgctgcgggggctgc

SEQ ID NO: 15618 - DNA, 229 bp, Homo sapiens
  chr16:2131440-2131669
  hypo
cgtcagagcagcgctggctccgacatcgtggtcctgaggattgtgggagggagcatgagggcaaaaccagggcccaggccaggaggcccctggggggccagagatgggtaaggggaggtactggcctcaggccaaaggtgctgccgcctccgcagggaacaccagctggctgatgagcctggagaacccgctcagccctttctcctcggacatcaacaacatgcccctg

SEQ ID NO: 15619 - DNA, 169 bp, Homo sapiens
  chr16:2146195-2146364
  hypo
cgtagttacccaaacccagacaccgcagcccctgtgcatgcaggccctgtggtgtggcctgtggctccggggcaccgcacctgcactgcatgccactgcactgaatcctgcaggcagctgcagtgcaacggcagggccgtgtggacctcagcacacctgagcataggag

SEQ ID NO: 15620 - DNA, 41 bp, Homo sapiens
  chr16:21515452-21515493
  hypo
cggagggtagggagggagggagaagaagaaagagaaaacgc

SEQ ID NO: 15621 - DNA, 73 bp, Homo sapiens; identical to SEQ ID NO: 6951
  chr16:2278311-2278384
  hypo

SEQ ID NO: 15622 - DNA, 198 bp, Homo sapiens
  chr16:2477175-2477373
  hypo
cgggctccatcccgtggcctttctctctctgtggagttcactctgccccttgccacaggcccctcagctcctctctgggaagtgcagatgctggtctctgccccttctcagccaggactcaggaaagggtcatgcacaggccttgcctatggttcctgcaccccttgcccagaacaacggcgttgcacacccatggtc

SEQ ID NO: 15623 - DNA, 395 bp, Homo sapiens; identical to SEQ ID NO: 13494
  chr16:2540434-2540829
  hypo

SEQ ID NO: 15624 - DNA, 60 bp, Homo sapiens; identical to SEQ ID NO: 13495
  chr16:2540933-2540993
  hypo

SEQ ID NO: 15625 - DNA, 383 bp, Homo sapiens
  chr16:2642765-2643148
  hypo
cgctgtgctctagatgccgccagtggagctttgcccgcagtctctgtccatgcaccctgggccaccggggagtggaattgtccatttcattgtctctctcaggggatgctggcgcgggggtgggtggcgcctgtccgtggggcccttgcctgcctccccgtggtgctggcgtgttctgtcactgagccactctggggcttcagtgtccctggcatgggtgacactgctgggagtgcctctgggctccttgcctgtggcctttttttttctcaggatggatttctggaagcgaggctacttctcagtactatttccgaatcgcttcctcagtgagtcctccccaggctgcaggtgccgagcgggagcaccactcctgcacgccc

SEQ ID NO: 15626 - DNA, 34 bp, Homo sapiens
  chr16:30833291-30833325
  hypo
cgtggcctgccgcaaagcagatactcctccggac

SEQ ID NO: 15627 - DNA, 41 bp, Homo sapiens
  chr16:30833354-30833395
  hypo
ccatggatgccctccctgccacacagcgcctgctggacacc

SEQ ID NO: 15628 - DNA, 201 bp, Homo sapiens
  chr16:31487152-31487353
  hypo
cgcagctggaagacggaacacgggagctagatctccatcgcttacaggctgcgtgatctcgaacactggattctttattctgatcgctcagagaggactcgaaaaacgccgcgtaaatcttgcctcactgggcatgtggttgtcagagccgctctgacccgcctcacctcccactcgcaggtggtgacggctctgggccgc

SEQ ID NO: 15629 - DNA, 212 bp, Homo sapiens; identical to SEQ ID NO: 5982
  chr16:3222239-3222451
  hyper

SEQ ID NO: 15630 - DNA, 101 bp, Homo sapiens; identical to SEQ ID NO: 13512
  chr16:410895-410996
  hypo

SEQ ID NO: 15631 - DNA, 111 bp, Homo sapiens; identical to SEQ ID NO: 6962
  chr16:411606-411717
  hypo

SEQ ID NO: 15632 - DNA, 193 bp, Homo sapiens
  chr16:4203995-4204188
  hypo
atcgtgaacactggagattcaaacagcagagagaccacctcacaccattctgtcaacccgtgccaagtgcccaggcctgtgccaacgcttggcacacaatgattcaacagaggcagcctcatgcttcacggcccgatgctcgcttgttgtctatggccgtaggctaacctgcaaataaagaactggactgcac

SEQ ID NO: 15633 - DNA, 72 bp, Homo sapiens; identical to SEQ ID NO: 11186
  chr16:440413-440485
  hypo

SEQ ID NO: 15634 - DNA, 69 bp, Homo sapiens
  chr16:4430998-4431067
  hypo
cgccaggggaccacggtgccccgagacgtgccacccgacacggtggggctgtacgtctttgagaacggc

SEQ ID NO: 15635 - DNA, 299 bp, Homo sapiens
  chr16:4431189-4431488
  hypo
cctggacctgacagccaacaggctgcatgaaatcaccaatgagaccttccgtggcctgcggcgcctcgagcgcctctacctgggcaagaaccgcatccgccacatccagcctggtgccttcgacacgctcgaccgcctcctggagctcaagctgcaggacaacgagctgcgggcactgcccccgctgcgcctgccccgcctgctgctgctggacctcagccacaacagcctcctggccctggagcccggcatcctggacactgccaacgtggaggcgctgcggctggctggtctggggc

SEQ ID NO: 15636 - DNA, 313 bp, Homo sapiens
  chr16:4431516-4431829
  hypo
ccgcttgcgcaacctccacgacctggatgtgtccgacaaccagctggagcgagtgccacctgtgatccgaggcctccggggcctgacgcgcctgcggctggccggcaacacccgcattgcccagctgcggcccgaggacctggccggcctggctgccctgcaggagctggatgtgagcaacctaagcctgcaggccctgcctggcgacctctcgggcctcttcccccgcctgcggctgctggcagctgcccgcaaccccttcaactgcgtgtgccccctgagctggtttggcccctgggtgcgcgagagccac

SEQ ID NO: 15637 - DNA, 847 bp, Homo sapiens
  chr16:4431854-4432701
  hypo
cgcgctgccacttcccgcccaagaacgctggccggctgctcctggagcttgactacgccgactttggctgcccagccaccaccaccacagccacagtgcccaccacgaggcccgtggtgcgggagcccacagccttgtcttctagcttggctcctacctggcttagccccacagagccggccactgaggcccccagcccgccctccactgccccaccgactgtagggcctgtcccccagccccaggactgcccaccgtccacctgcctcaatgggggcacatgccacctggggacacggcaccacctggcgtgcttgtgccccgaaggcttcacgggcctgtactgtgagagccagatggggcaggggacacggcccagccctacaccagtcacgccgaggccaccacggtccctgaccctgggcatcgagccggtgagccccacctccctgcgcgtggggctgcagcgctacctccaggggagctccgtgcagctcaggagcctccgtctcacctatcgcaacctatcgggccctgataagcggctggtgacgctgcgactgcctgcctcgctcgctgagtacacggtcacccagctgcggcccaacgccacttactccgtctgtgtcatgcctttggggcccgggcgggtgccggagggcgaggaggcctgcggggaggcccatacacccccagccgtccactccaaccacgccccagtcacccaggcccgcgagggcaacctgccgctcctcattgcgcccgccctggccgcggtgctcctggccgcgctggctgcggtgggggcagcctactgtgtgcggcgggggcgggccatggcagcagc

SEQ ID NO: 15638 - DNA, 507 bp, Homo sapiens
  chr16:46683305-46683812
  hypo
cgagactgcgcagagatgaacttcaggggagaaaaaagaaacacatgtcacagtttttcttaaaccgtgagagaggaggagcaggaggagaagagaccagagcccctctcccaggcaccggggctttccttggatgtcctgagactcaagatttctcacctctgcaggtggacctgataatcctacgcagaagaaccgctacagggcagcgagaacgcctgcaatggcagcagacagccgagcctccccagcacggcgtctcccgggacaaatgagcgtccacgtcgcttgacgtcatggtgtgtgcatttgtcctgtgctgggctccctacactgctcgtgatcatcggagctgcctgccacgggtcacatgtccagcactttctctatgagacacgcttctggctccactggctgaattcggctatcagccctcttccgtactcattctgccacgagtttcagaaaagcattccatcaaaccgctgtgtcctggaaaggctgagc

SEQ ID NO: 15639 - DNA, 161 bp, Homo sapiens; identical to SEQ ID NO: 8034
  chr16:4845976-4846137
  hypo

SEQ ID NO: 15640 - DNA, 121 bp, Homo sapiens
  chr16:48663537-48663658
  hypo
cggaaccgcagcacagacctcactcaagagcttgttagaaatgcacagtgctggctgggcgcggtggctcacacctgtaatgggaggccgaggcgggcggatctcctgagctcagaagttc

SEQ ID NO: 15641 - DNA, 246 bp, Homo sapiens
  chr16:57559728-57559974
  hypo
cgtgagtctaatgttctgtgattctgagggcgttgtagcacggcctggccctggccctgccccctcccgcctcccacgactcactctcgctccttgagcagcaccttctgggactcatccagccgtagccgcagggcggtcaacttggaggcctcctcctccgtggcagctgtgtcctcccagggtagccggctgcgctcctggcggcctgagctgccccgcgggcccccagcccccaggctgcgc

SEQ ID NO: 15642 - DNA, 113 bp, Homo sapiens
  chr16:58192178-58192291
  hypo
cgtgatctctctatacgcgttaagacgtttgatttggttcttgttctgcttatggaaaagtgggagaaccgcaacagacctggggaaagagacgggaggagggaaagacgtca

SEQ ID NO: 15643 - DNA, 151 bp, Homo sapiens; identical to SEQ ID NO: 6965
  chr16:611800-611951
  hypo

SEQ ID NO: 15644 - DNA, 83 bp, Homo sapiens; identical to SEQ ID NO: 6966
  chr16:612320-612403
  hypo

SEQ ID NO: 15645 - DNA, 102 bp, Homo sapiens
  chr16:68504292-68504394
  hyper
atgtgacctttgtttaatacacgttcttatttgatcttcacaaccatgccacttggcaggtggggaaactgaggtgcagggcagggtagtcatttggccatc

SEQ ID NO: 15646 - DNA, 574 bp, Homo sapiens
  chr16:69354730-69355304
  hypo
cgcctgctgctggcagcccgggtgcagcctggccccttttccctggagtcttcccgtctgcctgccaagcagagccctttgtgaggctggcttgttgaggatgtgccgccagcatcactggcccatgaaatgcgtccgtttcactcaaatcttcgtgcctccccttccgtgaataccattccatcatccgctgtcaactcctgccgtgtgctgggctctctaggtttgaaaaacgaatttatatccccttgccggaggaagctgcccgcgcccagatgttccggttgcatctcgggagcactccccacaacctcacggatgcaaacatccacgagctggcccggaagacggaaggctactcgggcgcggacatcagcatcatcgtgcgggactctctcatgcagcccgtgaggaaggtgcagtcggccacacacttcaaaaaggtgagtgcccgcggccactgctgagaaaaatctcatagtaagagcgggatgttcggttttttttttcccagctcctggtcctgctccccggctgctcaggtgacacagtctctgaggcctcctggagagcc

SEQ ID NO: 15647 - DNA, 86 bp, Homo sapiens
  chr16:74984568-74984654
  hypo
cgaaaccaactggaagcctcgactgggaggcggctgtgcccttgggtaatgaactgtgacgcaggagctctgtaaccgctgctgcc

SEQ ID NO: 15648 - DNA, 61 bp, Homo sapiens; identical to SEQ ID NO: 6452
  chr16:75148493-75148554
  hypo

SEQ ID NO: 15649 - DNA, 136 bp, Homo sapiens; identical to SEQ ID NO: 6453
  chr16:75149151-75149287
  hypo

SEQ ID NO: 15650 - DNA, 341 bp, Homo sapiens; identical to SEQ ID NO: 13543
  chr16:810054-810395
  hypo

SEQ ID NO: 15651 - DNA, 109 bp, Homo sapiens
  chr16:84170884-84170993
  hypo
cggcaccgtcaagggtctggcctactcgggaaacattaggaagtcccccgcatgcacagcacaggctgtgctgtcctgtgtgacgccccatgtgtgcaggcgcacaggc

SEQ ID NO: 15652 - DNA, 127 bp, Homo sapiens; identical to SEQ ID NO: 8053
  chr16:845724-845851
  hypo

SEQ ID NO: 15653 - DNA, 175 bp, Homo sapiens
  chr16:85465108-85465283
  hypo
cgcgtctctgatccaacgcctgctgtccccagatctgatcctttgagcatcagggctggaaagtcgcctccggggtggtggccgtggcagcctcagaggtttctgcccgtgctccccgagacacttggccatggcacctgcctcccgccattggccttccgtcctccttcggagc

SEQ ID NO: 15654 - DNA, 50 bp, Homo sapiens; identical to SEQ ID NO: 13551
  chr16:85517169-85517219
  hypo

SEQ ID NO: 15655 - DNA, 137 bp, Homo sapiens; identical to SEQ ID NO: 13552
  chr16:85517620-85517757
  hypo

SEQ ID NO: 15656 - DNA, 105 bp, Homo sapiens
  chr16:87471750-87471855
  hypo
cgggcacgcgctccaatgctgtggtaccgcagcactgcgtggcacacagagcccactgcacaggaggaatgcacgccccgacccagccggctggacggcgtgcac

SEQ ID NO: 15657 - DNA, 88 bp, Homo sapiens
  chr16:88458615-88458703
  hypo
cgcgtgcgctctgcgcttgtaccgtgtcttgattctggccagcgatgtgcaaacgctccgtggccacgtatgcccgcagctgctgcac

SEQ ID NO: 15658 - DNA, 34 bp, Homo sapiens; identical to SEQ ID NO: 12379
  chr16:89109415-89109449
  hypo

SEQ ID NO: 15659 - DNA, 121 bp, Homo sapiens; identical to SEQ ID NO: 12380
  chr16:89109659-89109780
  hypo

SEQ ID NO: 15660 - DNA, 214 bp, Homo sapiens
  chr16:89141710-89141924
  hypo
cgggtacctgccgtagctatgtccagcccaggtcactgagtgtgtaaacacacctcacgtccgcgtcgagaaggcgtcaccagtgcctgctgaacaaagaaggtctggcccagtgtggctgcagccaggaggccaaggagaccagtgagagcaccgccctcgccactgacgctcttgctgggctcattgttgtgctgggcccagtggagcaaaa

SEQ ID NO: 15661 - DNA, 148 bp, Homo sapiens
  chr16:89141953-89142101
  hypo
caactctgcacccttgattgaaatgcaatgtctgcggctgacggccacgtgactgcaacccaccctcccggctgccgattaattttaccttttgtgctgccagctgcagtgggttcatggtgagagctgagttgatgcatgcgagtgc

SEQ ID NO: 15662 - DNA, 226 bp, Homo sapiens
  chr16:89219372-89219598
  hypo
ctggagagcgagagactgggctgggccgactcccacctctgtcgcgagaggcctacgggcaggggcaggtgggcagggggactgtgctgggtctctggccgcgtctggacggcaggcgacactttctccacaaaaagcgtcaagaaaccacgacacttggtttctggacttttccgcggaacagtaaccagaacaatcgccatgaaggttcgtttctgtcatggct

SEQ ID NO: 15663 - DNA, 310 bp, Homo sapiens
  chr17:1028640-1028950
  hypo
cgggggccccttctgctcctcattcccctctccgtcgtactcgtccgtcccgtagctgaagtctgagacaaggaacaagaaaggccactgagaatcctccaccagagctgccagggactggtagcgtagtgggcgccggcggcggcccccggcagccatggccccggccgcaccatccacgcctggcccgggcgggggctgtgcgggggcctgggcctggtgaggggcgggggagagccagcaggcaccgggccctgcccgctccggggctgctgggaggcggggaggagcggctctgctgttgctaccc

SEQ ID NO: 15664 - DNA, 194 bp, Homo sapiens
  chr17:1462644-1462838
  hypo
cgtggccggcaaagtctccgccagggccagaaccccacagaggtgccagggctagcagcacttctccaggtgccgtgcatgtgaaatgcagaccaagagccacccccagttcaaagctgtgaggcgggagagctaagacaaaaactcttggttttacccatacaagtccagccagtttccaagcttagacgttc

SEQ ID NO: 15665 - DNA, 49 bp, Homo sapiens
  chr17:16283879-16283928
  hyper
cgaaactccgtctcaagaaaaaaaaggaaagaccccccctccttctccc

SEQ ID NO: 15666 - DNA, 675 bp, Homo sapiens
  chr17:16283956-16284631
  binary
cgcctgtgcggcgcacgcgcgctcagttacttagcaacctcggcgctaagccaccccaggtggagcccagcaacaacagagccaccgcgtcccccaccaatcagcgccgacctcgccttcgcaggcctaaccaatcagtgccggcgctgcaaggaagtttccagagctttcgaggaaggtttcttcaactcaaattcatccgcctgataattttcttatattttcctaaagaaggaagagaagcgcatagaggagaagggaaataattttttaggagcctttcttacggctatgaggaatttggggctcagttgaaaagcctaaactgcctctcgggaggttgggcgcggcgaactactttcagcggcgcacggagacggcgtctacgtgaggggtgataagtgacgcaacactcgttgcataaatttgcgctccgccagcccggagcatttaggggcggttggctttgttgggtgagcttgtttgtgtccctgtgggtggacgtggttggtgattggcaggatcctggtatccgctaacaggtactggcccgcagccgtaacgaccttgggggggtgtgagaggggggaatgggtgaggtcaaggtggaggcttcttggggttgggtgggccgctgaggggagggcgtgggggaggggagggcgaggtgacgcg

SEQ ID NO: 15667 - DNA, 39 bp, Homo sapiens
  chr17:16285065-16285104
  binary
agccttgtaaaattgaggggaggcttgcggaatattaac

SEQ ID NO: 15668 - DNA, 208 bp, Homo sapiens; identical to SEQ ID NO: 9229
  chr17:17224346-17224554
  hypo

SEQ ID NO: 15669 - DNA, 77 bp, Homo sapiens
  chr17:17717893-17717970
  hypo
cgggaccaggcaggaggaacctgccgtgcactcactcagactcctgcagcacccggggcaggtgctccaccagcggg

SEQ ID NO: 15670 - DNA, 142 bp, Homo sapiens
  chr17:18083378-18083520
  hypo
cgcaggggccctgaggtgcgcattacttgtagcaggatctgagactgaagaggccggcaaagatggtttcgatagggcttctgggctacattaagaatttaggatttctgggccaggcgcagtggctcatgactgtaatccc

SEQ ID NO: 15671 - DNA, 121 bp, Homo sapiens
  chr17:29773391-29773512
  hypo
cggccgagcgtccacccttggcatctctcaaattgtggggaggcagccggccttggtactttctggctccaggaacacgccatgggccattgaacgtctgtgcgatgggtaacgtctgtgc

SEQ ID NO: 15672 - DNA, 73 bp, Homo sapiens
  chr17:36204375-36204448
  hyper
cgggtgtcagtaaccaggggggccgcctgaggcgtcgcatccaacccccgcccaggtttccgccccgggccag

SEQ ID NO: 15673 - DNA, 70 bp, Homo sapiens
  chr17:36204541-36204611
  hyper
ctgactgtccagccccgggtggtgcccatcctgcctgttgttccctctcaaaccaaataaacctcccgac

SEQ ID NO: 15674 - DNA, 93 bp, Homo sapiens
  chr17:36864049-36864142
  hypo
cgaggtgcaatttgccaacgtgctcaccatggagcccatcgtgctgcagtacgtgcctcatgatcgcttcaacaaggtcagcggccccccgcc

SEQ ID NO: 15675 - DNA, 593 bp, Homo sapiens
  chr17:3716199-3716792
  hypo
cgaagtagcaagagcggagggtgactgtgtgagcaggagcgagagggcgccagctcctgcgggggaggttcctactgcgcgccccaccctgtgcaagaatgtcaggctttagggcagctgccataggccccaggggcatcaggactctgcctctgaaccagagctgctttcccgactaacttcaatctggagagatggtaagttatctaaccggctcttcttttggcgagactgctctttctccttaatcagagccccccatgccctttgcagctcagagtcgtcttcctcagcgccaggcgccctgtgatccactttcttcgtattcttttctttggtcttgggtgcagatcctaggcgagtccataaattacctgtttggatgagatggcatttcactttcgcagtcagcgctaagaaccagggtagcactgagggggcagcagcactgccaacacctgctgtgcaggaaacgccagcagtctgtggagcctgccaccacagtgcagccttgggcaggcaaaatctcatttcccgggccgcagcccctgcccgcaaacggaagggtctggacccagcacgggattctcacc

SEQ ID NO: 15676 - DNA, 179 bp, Homo sapiens
  chr17:37819059-37819238
  hypo
cgcctgccccggtacctcatccaccagagcctcgcggccaccatgtttgaatttgcctttcacctgcgacagcgcatcagcgagctgggggcccgggcgtgactgtgccccctcccaccctgcgggccagggtcctgtcgccaccacttccagagccagaaagggtgccagttgggctc

SEQ ID NO: 15677 - DNA, 230 bp, Homo sapiens
  chr17:43180339-43180569
  hypo
cgaccaatggaaacaaaggacattccagtagtgcaccagctcctcaccaggtacttgaagcaatttcaccttacgcccgtcatgagccaggaggaggtggagcactggttctacccccaggagaatatcatcgacactttcgtggtggaggtgagtcagggagtggtgttccaggtctctaacacgttcccagagaggcacccccctgagtggccgggttcccagggctc

SEQ ID NO: 15678 - DNA, 336 bp, Homo sapiens
  chr17:4392128-4392464
  hypo
cgcagaggaacccacgcctatacagacacgggcgcagcggccccagaaccctgctgaggacttgagtggccgtgcagggatcctcctggcctgcccagttctgtagccccggtcttccctgggtccacgctctgaccccagcacagcgtatggggagggctggctctgcggggcccacgcttgccactgggttcagagcagctgggctcagcgggccctgtgggagatcgacagcttccaggcgggcagcagtggggaggcttgttctcatgttctttccgcctcccctggtgcccagccaggcgatcacttgctcactcaccgatggccaccttc

SEQ ID NO: 15679 - DNA, 37 bp, Homo sapiens; identical to SEQ ID NO: 8107
  chr17:4446272-4446309
  hypo

SEQ ID NO: 15680 - DNA, 138 bp, Homo sapiens; identical to SEQ ID NO: 8108
  chr17:4446376-4446514
  hypo

SEQ ID NO: 15681 - DNA, 507 bp, Homo sapiens
  chr17:4795549-4796056
  hypo
cgcctgggtgaggtctgagggcagcctagggagtagggggggcacagggactttaccagcctacccgcctgggggtgggaaagccccagccccatcacctcagcgcccccccgccgccccctcggcacccctgtgctcccttcacagacctcgcagcaactccgcctggcaaatctatctgcaaaggcgggcagagcggggcaccccaaagcctccagggccccctgctcagccccctggcccgcccaacgcctctaggtaatagagttgtcccccaactcactctcacctctcacttctgccacccgcttccctggtgatggctccctctgcagtgcagctcagcaccccagagaagggagcaccgtgcctccctgaccctgactctgcccccccaacagtaaccccgacctcaggaggagcgaccctggctgggaacgctcggacagcgtccttccagcctctcacgggcacctcccccaggctggctcactggagcggaaccgc

SEQ ID NO: 15682 - DNA, 48 bp, Homo sapiens; identical to SEQ ID NO: 7019
  chr17:57297129-57297177
  hypo

SEQ ID NO: 15683 - DNA, 80 bp, Homo sapiens; identical to SEQ ID NO: 8121
  chr17:58498618-58498698
  hyper

SEQ ID NO: 15684 - DNA, 235 bp, Homo sapiens
  chr17:59239030-59239265
  hypo
cggagggtagggtggttgctggtggaggggagtagccagcgcccctcccctcagcacacataccagcccccgcaattccagtttcatggtgcctgagttgctgtctggttggttgaactcattctcctcagcttatatttaactcgtcgcttgttctggaaaagtagtagtactgccttctctggcctttataaacatgattgctggacaaagatgagcagcacggatttgctgc

SEQ ID NO: 15685 - DNA, 112 bp, Homo sapiens; identical to SEQ ID NO: 7021
  chr17:61777761-61777873
  binary

SEQ ID NO: 15686 - DNA, 76 bp, Homo sapiens; identical to SEQ ID NO: 7022
  chr17:61778423-61778499
  binary

SEQ ID NO: 15687 - DNA, 707 bp, Homo sapiens
  chr17:6474321-6475028
  hypo
cgaggccccagcccggaatggggagcccactacgtgcccctccagaggctacaccacgatcaacatggagagaaagagcccaggcccccaggccctgcccagattgtcctcgcaaagacccagccaccctgttggccccgcgtctgtttcaaatcccatgcctgggatttctttttgacattaaagtaaatgttggccagagagccacctacaagggtgacgaaggctgccggcttctcattggagggctgggaggagactctgcaggtctctgaggactgccaagactccttcatcacactgagcagatataaaatccattaccaagggctaataaatgcggggaggccggcagaggacatgcccgccttgctgggagggcacacactcaggccaagaacagcaggctctccaggcacagccactcgccctccgatatttgcccctcctgcacgcacctctctcggagtcccattgttctccattcaatcatttgggcaccaattctgtttctctttgactataaaagcccatgcctgcagacctctctacacatttattgtgcggctggaatttatgacggattggatttcagaggagggattgattaaatacagatggagcacttgacaagggcctgggggtcccggtagactcccccatttagaaacagaataaagattagaaagcgtgagcaagggcaatcc

SEQ ID NO: 15688 - DNA, 206 bp, Homo sapiens
  chr17:66416586-66416792
  hypo
cgctgtcaagccgcataacagaccaatttttattccacgaggaggagtacctggaaattaggcaagtttgcttccaaatttcatttttaccctctttacaaacacacgctttagtttagtcttggagtttagttttggagttagccttgcatatcccttctgtatcctgtccctcctccacgccgacccgagagcagctgagctgc

SEQ ID NO: 15689 - DNA, 85 bp, Homo sapiens
  chr17:73090991-73091076
  hypo
cgttgggagcagggcagagggagggttctctgcagtcgccgtggacacagggacctgccctcagctcctgggagctctccaggga

SEQ ID NO: 15690 - DNA, 258 bp, Homo sapiens
  chr17:73091180-73091438
  hypo
ccccggctacctcctggctactccctccacttgccaccagcagcctgcctattattccaggtcctgccctcaaactgggagggaggtgaggctcggagaaagcgccaccctcctgggtgagctctgaatctgccacatggcctctggcctgcagggttggggcagggagtgggaatcccagagggctgcttctcacacaggcagagcagggttcctgggccaggggctaggaaccgggcacccggcggggaacctact

SEQ ID NO: 15691 - DNA, 48 bp, Homo sapiens
  chr17:73215386-73215434
  hypo
ttagagacagggtttcgctttgcggcctgggcgggagtgcagtgatgc

SEQ ID NO: 15692 - DNA, 104 bp, Homo sapiens
  chr17:73236302-73236406
  hypo
ttccccgctgcagctggcacgctctggagggaaggacagctaactgcagcccaggagacatgacgctggaaagtggaggtccttggcacagtagtgctgtcacc

SEQ ID NO: 15693 - DNA, 156 bp, Homo sapiens; identical to SEQ ID NO: 13615
  chr17:7369222-7369378
  hypo

SEQ ID NO: 15694 - DNA, 119 bp, Homo sapiens; identical to SEQ ID NO: 13616
  chr17:74390245-74390364
  hypo

SEQ ID NO: 15695 - DNA, 182 bp, Homo sapiens; identical to SEQ ID NO: 13617
  chr17:74390459-74390641
  hypo

SEQ ID NO: 15696 - DNA, 176 bp, Homo sapiens
  chr17:74858667-74858843
  hypo
cgtggcctctgcactcgaggtggctagtgtgtgagggccagttgtccccgcgcagtgccactgttgctgatttgtacgcggtgtcagtaaatgctgttatgacattattaatgctgcacactacggcaaaggacaatggcctattgcctcgtaatgtgctgtgtgctgctgcagtc

SEQ ID NO: 15697 - DNA, 689 bp, Homo sapiens; identical to SEQ ID NO: 10387
  chr17:75213347-75214036
  hypo

SEQ ID NO: 15698 - DNA, 281 bp, Homo sapiens
  chr17:75848787-75849068
  hypo
cgcagccctgcagtgaccccgtcgcatatgcttgaacaatattctagagcaccatgaaagactcaggagggtaaagcactagcgcatgtgccgactgagctcccggctggtggaggcagagaggcggcagggcagagccgcggcgtgggcaggagctggggtggaggggggccctgcaccgcgggcagcctggctcctgccctggtcacacagagggagtgcctcacctccgtgcccccaagcccagagtgctgctgccaaggcgaggcgaggaggagggc

SEQ ID NO: 15699 - DNA, 331 bp, Homo sapiens
  chr17:76187077-76187408
  hypo
cgatgggttgtccgactgggagcagaggaagccttgaggacctactcacagataggaattgaaggtactagtgtgacctctccgtggccgcattgggtgtccttaagcatgtggcagtgattcagaatgctgggggttgggggggctgtgctgcaccacctgggcctcgaggggcatttcccaaacaccaggcactttataaacctccctgctcaggggcaggtgcccaggaccccttgctgcagggactactggaggcaggagaggtccgggggaggtccacggctcagtcgaccatgcctggcctttcttgctcagccatccataccca

SEQ ID NO: 15700 - DNA, 443 bp, Homo sapiens
  chr17:76818622-76819065
  hypo
cggagtcagacgtgggcttcggggtcaggagccctgccctcattcatgtcccccgcaccgctcactaactgggatctgaggcactctgagctctggggcctcttctcacccggacccggggctgcctggcgcctcccacgcctacgtatccatatggtagctactcacgctggaaggttctgaaacaatacaccacatccagtctctgctcctggttctacttgcaacccactgcatctggtcctgactcactgctctggaactgccttcctcagagtcgcctaaggcctccaggcatgaggccagctgggtctgcaggccctttactaggaggctgcgcagtgcgccggtgcacccactccctccagaagagcttcccctctccccaggctctccagccccgtctccccagctgcttccccgactcctcactggcacaaagc

SEQ ID NO: 15701 - DNA, 399 bp, Homo sapiens
  chr17:78163400-78163799
  hypo
cgtggcttctctcctgcccggtgtagagtggcaagactgcatccgtccacacacctgaccgtgcagttgccgccatcttctcgggattctgcttgcctagggcaggcctctggggaagccagcaccccaggctgacctctctctgccccaggcggagaaggacattctggagcagagcctggacgaggcgcgggggagccgacaggagctggtggagcgcatccactcgctgcgggagcgggccgtggctgccgagaggcagcgagagcaggtgccgtgtgagcccttcctcccttgtgactctcctggggcttgtctcaggggtgcggacaggtctgtggggaagccagattccttcatccacgccgagctcacataattttgctgaacgaatctgtc

SEQ ID NO: 15702 - DNA, 195 bp, Homo sapiens
  chr17:79045500-79045695
  hypo
cgtccagctcccggcagactcagcgcgggggtcggatgccttctccgcaccatcccgcaccgccacgagctgctgtggctcacattctgccatccgagctctgtccaggaggcagccgagaattggagcagttcccacgccaagtagggccttgtgggtggccggtcccctcctccagcgtggcacggaggcgcc

SEQ ID NO: 15703 - DNA, 415 bp, Homo sapiens
  chr17:79175952-79176367
  hypo
cggaggtgtgagccccccagaccctgatgcctgcccacctctgtgttctaggctcaggcccccccccaccgccccaagatcggtcacctctcagcctcctcctccgtcacctccttccgcctgggcaagcccgtgctgcccccagtattgttccgggctgagtgggtggcactggagacattcttcggcagcttcccaaagccgctgctctcactgccctcacaggtggctgccttgatgatgttgctgacaggtaagaagaaaacaccctcgtctcaccgcccaggggaacagctctgcccacaggcagcaggtgcccactcccggaagtcccaggactgagcctggaagtggtgctggcaggctggcagccggggcagagggggacagcggcaggtgcgaggccggctctccc

SEQ ID NO: 15704 - DNA, 169 bp, Homo sapiens
  chr17:79887422-79887591
  hypo
cggctcctggccagctccccacggagagcccaggacacttgtccctggacacagtggtgcagccatgcttgggccaaaccatgaggccaccagaaccgcgaaaggctactgtactgagagggatactgcgagagaggcccacaggtttccaagcatccctctcactccg

SEQ ID NO: 15705 - DNA, 56 bp, Homo sapiens
  chr17:79887849-79887905
  hypo
ccaggctgcaccttctgtgggactgagccccgcaggcacttccccggcatcctccc

SEQ ID NO: 15706 - DNA, 113 bp, Homo sapiens
  chr17:80654614-80654727
  hypo
cgctcaatctccagccctgtcctccaggcgctcaatctccagccctgtcctccaggcgctcaatctccagggcagcgctggccctcggactttgccacagcgacatccgaact

SEQ ID NO: 15707 - DNA, 330 bp, Homo sapiens
  chr17:80712024-80712354
  hypo
cgcccggctggagttttattattactcagatcagtctccctgagaatttgagggccagggttttttagaggtaatctgggggaaagggtgggggtggctgattggttaggggtatacaatcataggggagtcggaaatgatcctccgtgatgtgctgaatcgcgtctgcgtggggccccaggagcagtgggcgggtccaggtggagctatcatgggtccgtggatcctagtgtaggtgtcagacatggaaacaatctgaaaagatatctttaaaggccagtctcaggttctgcaatagtgacatggtctgcaggagtaactggggaactc

SEQ ID NO: 15708 - DNA, 121 bp, Homo sapiens
  chr17:80749629-80749750
  hypo
cgtcccctaacaatgagggtagtcctgagaactgcgtcgttgggcagtgtcgtcgtgtgaacaccgtagcgtgcacttaaacatagatggtgtggcctgctgctcccaggccaggtggtgc

SEQ ID NO: 15709 - DNA, 33 bp, Homo sapiens; identical to SEQ ID NO: 6493
  chr17:80797632-80797665
  hypo

SEQ ID NO: 15710 - DNA, 141 bp, Homo sapiens; identical to SEQ ID NO: 14761
  chr18:12375127-12375268
  hypo

SEQ ID NO: 15711 - DNA, 61 bp, Homo sapiens; identical to SEQ ID NO: 14762
  chr18:12375294-12375355
  hypo

SEQ ID NO: 15712 - DNA, 115 bp, Homo sapiens
  chr18:12375778-12375893
  hypo
cgtgatccacccgcctgctgggattacagccgtgagctaccgcgcctggcctctccagaaactttttaaaaatcaaccacggtgctgtagtcccagatactccggaggctgaggc

SEQ ID NO: 15713 - DNA, 334 bp, Homo sapiens
  chr18:13131747-13132081
  hypo
cgacggtgcctaattgatacatacaaatcaatagtcttcctatacataaggaaataatgaacgaccagaaaacagcggaagacaaaacagcagaaataagtttagaaatgtgtgaagtgtatacaaaggaaactgtcaggttcctctggagcacatcggagacttgagtaggagtaacttaccggactgcactgggggccttcttccgtagcatgaacagcacccatgagtggggatggggctggggccgcaccagtccaggcagcatttcccccagtggagggggagctctgcaggtgcccagcctcccacgctgtttcagtagcttgttagg

SEQ ID NO: 15714 - DNA, 340 bp, Homo sapiens
  chr18:13442504-13442844
  hypo
cgcgtggggcacggctgagaaagtgggttgggcctagagagacagaagccaatgtataaggctgcacctcctgccctggtcctaggacgggccacctgctggccggccggctgcggggagcctgaggctggcatcccacttggtggacctgccacctcattgttcctgcccagccaagcacgtcctgtggtgctgtgtttccaaagccccttggccacatcttagtgggggacagcagcgttccttcgaccgtccagaagcgataattgagtggtctgtgcagcctggcaagtgccacgccctccgaaagccttggtgagcacagacccccgaagccagc

SEQ ID NO: 15715 - DNA, 52 bp, Homo sapiens
  chr18:3498992-3499044
  hyper
cgggtacgggaagtggggggctgaggggggcccggggggcggctcctgcgag

SEQ ID NO: 15716 - DNA, 69 bp, Homo sapiens
  chr18:3580264-3580333
  hypo
cgctccaggcaccagcaatggcgcaactgtctcttccaccaaaaggcacaagtccctttttcagtgcgc

SEQ ID NO: 15717 - DNA, 185 bp, Homo sapiens
  chr18:3580794-3580979
  hypo
cgaagcgtcttccacctgccgtgcggaccgtggaaaataaaaggctctgcccccggggtgagtgtggccggttgtaccctgcagtagcgtctgccctgagctgccagtgctgggtatcccccagccccaggaaatgtggggtcggccgggaccctcacagctctgaatttgcttctgttatttac

SEQ ID NO: 15718 - DNA, 241 bp, Homo sapiens
  chr18:3581880-3582121
  hypo
cgatagacaggcatcgatttttcttaaagtggtccttcttcctgtcctccgtggtgacggtggctatggtagtcgtggtggtgacggtggcagtgttattgcccatgtgttgactggcagggccatggatctgggcgtttgcagcttcgatggcggctgtcagagccttcatactgtccaggctctcggtggagttgctgagtccagactggctgataatatctcctcgctggccctgtcc

SEQ ID NO: 15719 - DNA, 141 bp, Homo sapiens; identical to SEQ ID NO: 13644
  chr18:47285293-47285434
  hypo

SEQ ID NO: 15720 - DNA, 133 bp, Homo sapiens
  chr18:59500732-59500865
  hyper
cgaaactcctctgcgtttccctctaatggaatatcaatgaaaccacagaaccacagacacacacaaacatgatttcctgaggaagtgattctagggctaacataactgaacacgagggccgtctgttagtctc

SEQ ID NO: 15721 - DNA, 128 bp, Homo sapiens; identical to SEQ ID NO: 13656
  chr18:72347372-72347500
  hypo

SEQ ID NO: 15722 - DNA, 74 bp, Homo sapiens; identical to SEQ ID NO: 13657
  chr18:72347576-72347650
  hypo

SEQ ID NO: 15723 - DNA, 161 bp, Homo sapiens; identical to SEQ ID NO: 13661
  chr18:77508739-77508900
  hypo

SEQ ID NO: 15724 - DNA, 399 bp, Homo sapiens; identical to SEQ ID NO: 13662
  chr18:77508946-77509345
  hypo

SEQ ID NO: 15725 - DNA, 116 bp, Homo sapiens; identical to SEQ ID NO: 13663
  chr18:77509679-77509795
  hypo

SEQ ID NO: 15726 - DNA, 42 bp, Homo sapiens
  chr18:77510442-77510484
  hypo
cgtttaaaacttggacggcaggtattagggcgtgcacttccc

SEQ ID NO: 15727 - DNA, 268 bp, Homo sapiens; identical to SEQ ID NO: 13664
  chr18:77535504-77535772
  hypo

SEQ ID NO: 15728 - DNA, 266 bp, Homo sapiens; identical to SEQ ID NO: 6497
  chr18:77542640-77542906
  hypo

SEQ ID NO: 15729 - DNA, 271 bp, Homo sapiens; identical to SEQ ID NO: 6498
  chr18:77542951-77543222
  hypo

SEQ ID NO: 15730 - DNA, 363 bp, Homo sapiens
  chr18:77627972-77628335
  hypo
cggctgctgcctgcagtctgggtgtctggcggccaggctgccttcccccgtcgtccccatgaggtccaggtcctgatcgtgcttccaaaaggtgctggagtgtttggctgtcctcggtcgaatatccaggagggaaaattcatttgtgtcacgttagagaataggagaagtttgggctgccccagctacagaagtcaccccaggaacaccagccctaacccttactgtggaccccaaaaccccagatcctctcagggacaaccctgggctccgtggcacccagcccttcacactcctggcacgcacccctaaattgcttgtccagttaagaagcagtcgccctccgcgtggggcctggtgacc

SEQ ID NO: 15731 - DNA, 122 bp, Homo sapiens
  chr18:77628470-77628592
  hypo
tgactgaccgaaggtctttttcggaagcgattcagttgtgtgggtgaagagccaagaaaaggtggttctcactcctgtcctaagagaatatttcaaagcatgagaattggcgtgttggtgac

SEQ ID NO: 15732 - DNA, 145 bp, Homo sapiens; identical to SEQ ID NO: 11308
  chr18:77644520-77644665
  hypo

SEQ ID NO: 15733 - DNA, 39 bp, Homo sapiens; identical to SEQ ID NO: 11309
  chr18:77644881-77644920
  hypo

SEQ ID NO: 15734 - DNA, 74 bp, Homo sapiens
  chr19:10687853-10687927
  hypo
cgccagtccctggtacttaccgggaaagacttaatactccaaatcacgacgtttctctccggcacatacttggc

SEQ ID NO: 15735 - DNA, 116 bp, Homo sapiens; identical to SEQ ID NO: 5769
  chr19:10691764-10691880
  binary

SEQ ID NO: 15736 - DNA, 328 bp, Homo sapiens; identical to SEQ ID NO: 10405
  chr19:10823276-10823604
  hypo

SEQ ID NO: 15737 - DNA, 46 bp, Homo sapiens; identical to SEQ ID NO: 10406
  chr19:10823633-10823679
  hypo

SEQ ID NO: 15738 - DNA, 192 bp, Homo sapiens; identical to SEQ ID NO: 10407
  chr19:10823721-10823913
  hypo

SEQ ID NO: 15739 - DNA, 522 bp, Homo sapiens
  chr19:11001603-11002125
  hypo
cgggccattgcactccagcctgggtgacagagggagaccaaaactgagtcagtgttcccaagcagtgtgtgaagctgattctctgtcagccacgtgccagatgggttgggtcccaggggtggccacctgggggacagggccagacacttgttctgggcccaatatggccttgtgtccagaactctctcggtggctccttctctcgaccctttgccttgagccggagcactgtggggacacaggaaccaagactggtgttttgtgccaatgccacactactgtgtgcccgtgggtcttgggccgggcatgggtgggttcgtcctcatggctacacagtgaaccatgtgttattttatttttctagacactaaagctgaggtgtcgggaggtgatggtcccttgcttgcaggtggcagagctcaggttcaaacctggatcttactgcacctggctcgtttgggaggcctcccttgctggaatgcaggtcagggagccccgatgcccttgggctgactgccccac

SEQ ID NO: 15740 - DNA, 177 bp, Homo sapiens; identical to SEQ ID NO: 6503
  chr19:11003087-11003264
  hypo

SEQ ID NO: 15741 - DNA, 444 bp, Homo sapiens
  chr19:11004773-11005217
  hypo
cgcctcctcccgagtctgcctggaatctgaattgggcctggtccgcatgcatcagcttccgtgctttccctcctctcagcgcttactgccagttcctgttgtccgtctcctcactgccctgctgggtgctgtctgcctcccactgtggactcccagcatgggagggccgggggtggctctctggttcaccgccaggtcctctgtgcctgcatgtggtccgggcagagcaggctgagcagagatgccagctgagtgggcttcagaaagcgtgtttttttttccgtgcctgtgggatgggagttggccacggggggtcggggtgtctccctctttttacctaactctcctcctttgatcgggaatattttcctctggaaggtgaagagcccatgttgtctttggcagcaggaggcgatttaatacaagacgtaccatttggacaac

SEQ ID NO: 15742 - DNA, 397 bp, Homo sapiens
  chr19:1312697-1313094
  hypo
cgtccgtgtcatcagcaacggccaaatgccgttcccagcactggatgggggtggagggcctgaggggtgtgggtgggggggagctccaggcgcccctgccccccgcccagccgtcagtcaggctggccgggcccccttcaagtcgtcacggcccagcagcggccacgggagggattattccggcctgtccagggtggactgaagtggaaccaaggctgacgagcggaacgcgcccccatggacccagcccgcccgcctttgtccgccgccagccccccacccgcctgccgtcacagaccccgcctcccgtgcctgagccccatttctctgggggccgggctgcctcgcgtggcccccgcctgactaaagccatgcagcttctcggccggctccatcc

SEQ ID NO: 15743 - DNA, 576 bp, Homo sapiens; identical to SEQ ID NO: 7077
  chr19:1333769-1334345
  hypo

SEQ ID NO: 15744 - DNA, 97 bp, Homo sapiens
  chr19:15382528-15382625
  hypo
cgtggcgcctcttctgcctccatacctttcctgagccatttcaagacccagacacgtactgccctgttctgattatcttcccccgagtgcttgacac

SEQ ID NO: 15745 - DNA, 67 bp, Homo sapiens; identical to SEQ ID NO: 8206
  chr19:16638602-16638669
  hypo

SEQ ID NO: 15746 - DNA, 149 bp, Homo sapiens
  chr19:17757928-17758077
  hypo
cgtgcacacacggagatgagatggaatgcacccgaccgagtgagtgcgcgctgcaaaggagagggaccaggccatgggacagggcatgagacaggtctcagagggtggagaaggaggggccctatggcggcccacgccccctcaccggt

SEQ ID NO: 15747 - DNA, 96 bp, Homo sapiens
  chr19:17758133-17758229
  hypo
ccttcatctgctgcgtgtgcgccgtcttggtcaccgcgaagatctcctggatgagctcgaagatctcgggcttgttgcgctcccggatcttcatgc

SEQ ID NO: 15748 - DNA, 1191 bp, Homo sapiens
  chr19:17837853-17839044
  hypo
cgaatgcccaggcggcacccaagccccgcaaagcgcccagcacgtcccactctggcttcccgccggtggcaaatggaccccgcagcccgcccagcctccgatgtggagaagccagcccccccagtgcagcctgcggctctccggcctcccagctggtggccacgcccagcctggagctggggccgatcccagccggggaggagaaggcactggagctgcctttggccgccagctcaatcccaaggccacgcacaccctcccctgagtcccaccggagccccgcagagggcagcgagcggctgtcgctgagcccactgcggggcggggaggccgggccagacgcctcacccacagtgaccacacccacggtgaccacgccctcactacccgcagaggtgggctccccgcactcgaccgaggtggacgagtccctgtcggtgtcctttgagcaggtgctgccgccatccgcccccaccagtgaggctgggctgagcctcccgctgcgtggcccccgggcgcggcgctcggcttccccacacgatgtggacctgtgcctggtgtcaccctgtgaatttgagcatcgcaaggcggtgccaatggcaccggcacctgcgtcccccggcagctcgaatgacagcagtgcccggtcacaggaacgggcaggtgggctgggggccgaggagacgccacccacatcggtcagcgagtccctgcccaccctgtctgactcggatcccgtgcccctggcccccggtgcggcagactcagacgaagacacagagggctttggagtccctcgccacgaccctttgcctgaccccctcaaggtccccccaccactgcctgacccatccagcatctgcatggtggaccccgagatgctgccccccaagacagcacggcaaacggagaacgtcagccgcacccggaagcccctggcccgccccaactcacgcgctgccgcccccaaagccactccagtggctgctgccaaaaccaaggggcttgctggtggggaccgtgccagccgaccactcagtgcccggagtgagcccagtgagaagggaggccgggcacccctgtccagaaagtcctcaacccccaagactgccactcgaggcccgtcgggtgagtactggagctggggccctgggctgggttagcagctgcttaggctggagagcatagctc

SEQ ID NO: 15749 - DNA, 48 bp, Homo sapiens
  chr19:18126529-18126577
  hypo
cgcggatggacatctgggttgtttccacggcttggctatagtgaatct

SEQ ID NO: 15750 - DNA, 41 bp, Homo sapiens
  chr19:18126606-18126647
  hypo
tactttgaaaacccacggagctgttaggtggccctagtggc

SEQ ID NO: 15751 - DNA, 369 bp, Homo sapiens
  chr19:18856011-18856380
  hypo
cggaaggcgcctgtacttggctctggtggtgcctggagtgcctggaggaggctgcgggggagggtgtgtgggggccgcgtctcaatcaagagcagccctgggctccacaaggaagcctcccaggaactcgcgcttggccaggtgggccccgaaacagtcctgggctggaagcccctgggctgtctcttggcaggcccctccagggatgacgtaggtgggggtaggaggccgtccaggcccggagagagagggcggaggcctgtctgcacctggtgagactggggaggagggctgcctaggccggctacatccctggcacccggcgggcgctggccccgagcttgtgccgctctgcctggcctgtgcatg

SEQ ID NO: 15752 - DNA, 329 bp, Homo sapiens
  chr19:18856409-18856738
  hypo
ggctcccgggaccccagctcacaccccctccctaccccccagtgcttggagagccagggagctggggctgaaggaagaagcccatcccaggctgtggagcgatggccgagggtgctccagagtggggggccctgcgatcagactctggggccagcgctggggccacagctggtaaccattgtttggatttctctctctctgtttccatctcctcctcccccagacccccttccaatcctcgggcctggacaccagccggaccacccggcaccatgggctggtggacagggtgtaccgggagcgtggccggctcggctccccacaccgcc

SEQ ID NO: 15753 - DNA, 243 bp, Homo sapiens; identical to SEQ ID NO: 6512
  chr19:1911845-1912088
  hypo

SEQ ID NO: 15754 - DNA, 659 bp, Homo sapiens; identical to SEQ ID NO: 6513
  chr19:1912446-1913105
  hypo

SEQ ID NO: 15755 - DNA, 270 bp, Homo sapiens
  chr19:19576172-19576442
  hypo
cgaacacggagtcagaaacgagcgcttgaacgggacccaacagaggacgatgtggagagcaagaaaataaaaatggagagaggattgttggcttcagatttaaacactgacggagacatgagggtgacacctgagccgggagcaggtccaacccaaggattgctgagggcaacagaggccacggccatggccatgggcagaggcgaagggctggtgggcgatgggcccgtggacatgcgcacctcacacaggtgagtgggaggagccagc

SEQ ID NO: 15756 - DNA, 149 bp, Homo sapiens
  chr19:19719325-19719474
  hypo
cgcgtgctcactccttacctggcaaggagttcaaggccatgcttggtcggacagcagctgaggcaggcagtcacccccgagtctcccttccaaggtcacgcccaccactcatgcccgatgggaccacaatgcatgccttcatgctccac

SEQ ID NO: 15757 - DNA, 164 bp, Homo sapiens
  chr19:32374316-32374480
  hypo
cgatgttttttcagtgattccgcaagagtcaaaaacccaacaaagcgcatcgccggcgctgtaaagggagcatgctgccggtgtctgtgaccactgtatgcaaagcttggcattagtcacagccgggccggctgtgacaggcctgaagtgagggagattaatgc

SEQ ID NO: 15758 - DNA, 144 bp, Homo sapiens
  chr19:32898192-32898336
  hypo
cgacgctccctgggatagcagctgccctgattggcacacccccgcagtcatcaccactgaggcgtattcctgaagctgccagtgtgaattgttttatagaacactggtgttaaaattcaggtacctgagacaaaacaatatttt

SEQ ID NO: 15759 - DNA, 219 bp, Homo sapiens
  chr19:32898490-32898709
  hypo
ggctcagggagggagaagatcagccggaactggaatgtcccaagatgttctggaagaaaagcagtggctcgtttgtgttgcttacctgtattcctgactcctggcagggcctgctgtagagcacatgcttcatgaataaatatgattgagttgaataaatatttgaattgtgttttgagtgtagctttgaaggccagcaacgatttagatggcaagatc

SEQ ID NO: 15760 - DNA, 248 bp, Homo sapiens
  chr19:33996157-33996405
  hypo
tgctctccacagaaggcagcggcatttgctctgcggtggaagccggcagccatctgaggatgttagctggtcagagacaaaagcagacctcgccacagtgacgcaggtgcctatgcccaaagaccactcccggagcaagcttcctcacaggggccacagagggaacagcgctgcccgggaggctggagaccaggtccagtgaccaggcctgcccagggtcagtgcctcaaaccacccgggcagcagcc

SEQ ID NO: 15761 - DNA, 407 bp, Homo sapiens
  chr19:3770610-3771017
  hypo
cggcaggctcaggctggcggccaggccctgtccagagcctgtgcatgttccttggccagcagccgcagggacgcctcctccagggcgaagccatctgcgaaggtgggagcaaaggcatgaggcccgaaggacgcttgcagccccgggcccgggcccaggaggcgggggaggcctggcacggccggcggtccggggcccaaccagggctccaggggcagcgacatggccggggggcgggcgaacggcagcgctggggcctcggggagtctcggagctgccacggcacccgagcctgactccagccgctcctggcggcgccacttggcccggcggttctggaaccacacctggagggtgcgagagggaaggggggttgctgtgagctcagccgctccccgccaatcctc

SEQ ID NO: 15762 - DNA, 73 bp, Homo sapiens; identical to SEQ ID NO: 13725
  chr19:38828044-38828117
  hypo

SEQ ID NO: 15763 - DNA, 133 bp, Homo sapiens
  chr19:38901796-38901929
  hypo
cggggggtcctgcatcgcccttggcccctggcctcttcttacattctaccttcacctggtctctgcagtgtttgtggcaacacagcccgcactctgggggaaggcagcggcaggggtccgatctgtgtcatcc

SEQ ID NO: 15764 - DNA, 326 bp, Homo sapiens
  chr19:3907947-3908273
  hypo
gctccagcccggcccactgggcaacagggggttcgtcagtgcccctctctgatgcacggggatgttaagccgtcaactcgcttcgggtggacggactgtgggcaaggcgtgcatggtcagggaggcgcactgggggcccctgatggtcgctgtcactcctcagcgaaggcagagactggctaaggggtcgccggctgctgtggctcggagccatgccctcccgagcgtgtgggcaccgggacgtggtgggtggtgcgcgggaggcagctcagggctgggagaggactctgacgttgccgatcggctgcctctcctcagggtactac

SEQ ID NO: 15765 - DNA, 54 bp, Homo sapiens; identical to SEQ ID NO: 8241
  chr19:403809-403863
  hypo

SEQ ID NO: 15766 - DNA, 53 bp, Homo sapiens; identical to SEQ ID NO: 10436
  chr19:407832-407885
  hypo

SEQ ID NO: 15767 - DNA, 805 bp, Homo sapiens; identical to SEQ ID NO: 11392
  chr19:418255-419060
  hypo

SEQ ID NO: 15768 - DNA, 43 bp, Homo sapiens
  chr19:4550330-4550373
  hypo
aaaggggcctgattcaccagaggtacccattgctttgcccaac

SEQ ID NO: 15769 - DNA, 75 bp, Homo sapiens; identical to SEQ ID NO: 13737
  chr19:45810267-45810342
  hypo

SEQ ID NO: 15770 - DNA, 59 bp, Homo sapiens; identical to SEQ ID NO: 8257
  chr19:46321120-46321179
  hypo

SEQ ID NO: 15771 - DNA, 110 bp, Homo sapiens; identical to SEQ ID NO: 8258
  chr19:46321422-46321532
  hypo

SEQ ID NO: 15772 - DNA, 369 bp, Homo sapiens
  chr19:46885301-46885670
  hypo
cgctctccagtctcgcccccacttctgtacctcaggaggtttctctgcacctcactccctcgcgcccaaccttccatgaagcccgtgtgagggagttggcagggggcagaggcgggctgtgctggggctccctggagtcctcatctgtcacgccagtccccacacggtcatgaacttccactcatttcccctcacgcagggcatcccgccctgctgcctcgcaccagggtgaaagctgtgggctccttccccaaggaagggctcgtcctgtctgcattttgattaatttaggtccctttgcattgccagctctcagatggctttacctttgattttgttgcttgtttggcttgttttcatctttagggc

SEQ ID NO: 15773 - DNA, 615 bp, Homo sapiens
  chr19:4816550-4817165
  hypo
cacctggcccccaaagggcattcgagccccatagggcgccccagtcccaaatgacatgtggctcccaaaagccacctggagctgctccatctgtgcctggtaggacaagtagctctggaggtaggctgagtaggctgcgttcagtgccgccgcctgcatccgctcaccgtccaggtgttggctctgttcccgcagggctcgggtgtcctgttccttcctccacatggcctttcgggcctgaagcctgtggggcttgaaggtgttggccaccttcctggcgaagatctgggagtgttcgtccagccgcaccagcccggagagcaggctggccgtgtcggagctgagctgggccggggagctctccaggggcaggaaggggatgacacagtctggcgacccctgtcgcgtgaggttgctcatcatggcttggttcacctggtgcaggctcaggcgacagtcgaagttggaggtgagaagtaggatgatgaaagctgagtggtctatggcgtcctgcaggcagctcagctccccgcgccccggcacctggaaatcctcgcagaaggtggccccgtcgggcacgccaagggcctccagcttctcccgaacccgcagggc

SEQ ID NO: 15774 - DNA, 586 bp, Homo sapiens
  chr19:4817473-4818059
  hypo
cggtgcactccactgggtagttggtgctggtttctggagctgcgggggtatcagggaggccagtggaggttgcatctggggccacttcgggaagcccaggaggtgggctgcttggcagctctggtgggctggcaatctcccccgatggcggccagctcatctcctcaggctcctggcagccaccggggacaggctcgggcaccaagctggcctgggggtcgtcacagagcttgctgggcccatgtgggctgcggtgcaggctgaggaagggcatggtaggggactggctgatttccaagttgctggccagggaggcagggctgccagtggatcgcagggagcacccttggctccagtccgaaacaccgtcaatggggcgtgggaggctcctggtcccagagggcaaagccgaggatggtgggaggcagcccagattggactggagcgtccggatgctccctggatccccagcaatgtcccacccacaccggtttcgggcctcatcctgaagttcccccagccggtggtcgtccctggagctgagggtgcggacggcttcctggtaggccacgtcccgcagcgaggc

SEQ ID NO: 15775 - DNA, 95 bp, Homo sapiens
  chr19:49012390-49012485
  hypo
cgggcccagaatccgatggacgcagggacggatggaaggatggacagacggacggacgcgtggagagccgggtggcgcggcggagtggtcaatgg

SEQ ID NO: 15776 - DNA, 233 bp, Homo sapiens
  chr19:53507269-53507502
  hypo
ctcctttgaaaacactaagaatgacatcactgcatcagtttttactagagccaatcacctgtcgtgcctggaacagggatcgtacccagattgccctcagtcctgataatcaggaagcgcacatctataagaagcatgggagccagcgagtgaaagctcgtgaactcagtgagcacaatggacatatcacaggcattcactgggctcccaagagcgaccgcatcgtcacttgc

SEQ ID NO: 15777 - DNA, 99 bp, Homo sapiens; identical to SEQ ID NO: 7131
  chr19:549193-549292
  hypo

SEQ ID NO: 15778 - DNA, 386 bp, Homo sapiens
  chr19:55990556-55990942
  hypo
cggagggcagtgagggagcgaggtatcccggaggccagggggaggcgggccacggacccagtgacaagtgggccattgcgggccacgcgccgcccaggccatggagtgggggcacccgcgtgggactgaaggggtttgcgctgggaaagagcgggctgacacttgagctgctctgctgtgaaggaatggagaaacgagtctgcagctggacagggaagtggagtgaagagctttttggtttttaaagatgggagacatagattgttggttctgcagatgggaacgtccaggagaggaggaaaagtggaggatgtgggtgggaaggcacagtccacgggcactgggtcaggcctgtggggaaggattgcgcagggtttctggacctc

SEQ ID NO: 15779 - DNA, 150 bp, Homo sapiens
  chr19:56201494-56201644
  hypo
cggtgactgaccaggctgccctgcggccacctcctgtggtcagcgctggccatcccccttcgggctgagcaccgtgagggccaccaccggccgccacagctgaatggggaggcccagaataggccaacagcctggcatggccacagggag

SEQ ID NO: 15780 - DNA, 54 bp, Homo sapiens; identical to SEQ ID NO: 8287
  chr19:58964127-58964181
  hypo

SEQ ID NO: 15781 - DNA, 292 bp, Homo sapiens; identical to SEQ ID NO: 8290
  chr19:5915130-5915422
  hypo

SEQ ID NO: 15782 - DNA, 406 bp, Homo sapiens; identical to SEQ ID NO: 8291
  chr19:5915520-5915926
  hypo

SEQ ID NO: 15783 - DNA, 324 bp, Homo sapiens; identical to SEQ ID NO: 8292
  chr19:5915969-5916293
  hypo

SEQ ID NO: 15784 - DNA, 92 bp, Homo sapiens
  chr19:7682222-7682314
  hypo
cgtcaggtctcatgtccccaagccgcctgcctggaagccgcgaacgggactgggaaaatggcagcaatgcctcctccccagcgtcagtgccc

SEQ ID NO: 15785 - DNA, 354 bp, Homo sapiens
  chr19:7991824-7992178
  hypo
cgccgggacccctgcagggcagagcaacagggcaggggttggccctgcgggggagtgtctccagctgccgcgcacccgcaacagcccgttgtcccctcccgggccagctggtcttgcagccgtcctggcagagctgggggcagagcccgcagtcttgttcccagaggtctggagttgccgcaggtggtgttgcggtgcctctgtgcctgatgacccaggccggggctacctggctccggcaccacactcagagaatctgctcggtgctggaggccgagatgtccaggagccgccaggccgcgtaggggttgagctcgtcctggtctcggcagagcgcccacacgtacagcatcc

SEQ ID NO: 15786 - DNA, 159 bp, Homo sapiens; identical to SEQ ID NO: 6528
  chr19:883424-883583
  hypo

SEQ ID NO: 15787 - DNA, 45 bp, Homo sapiens; identical to SEQ ID NO: 6529
  chr19:884311-884356
  hypo

SEQ ID NO: 15788 - DNA, 167 bp, Homo sapiens
  chr19:901066-901233
  hypo
ctctgtccactgaggggccgctgcttgtgtcgggccctgagctgagcgcagggaagcggggaaccggggtgggcccagctgtctcggggtgggggggattgaggtgaaacactcctgcaatcgttggagggttcccaaacgtgttgggcaggtgaatccaggagctc

SEQ ID NO: 15789 - DNA, 107 bp, Homo sapiens; identical to SEQ ID NO: 7155
  chr19:9129007-9129114
  hypo

SEQ ID NO: 15790 - DNA, 92 bp, Homo sapiens; identical to SEQ ID NO: 7156
  chr19:9129229-9129321
  hypo

SEQ ID NO: 15791 - DNA, 743 bp, Homo sapiens
  chr19:941824-942567
  binary
cgtatgtgtgtgtgcacgtcgaggctggagagtgtgtgtccaaaagcgtgcctgcttgggctcgccacgtgtgcgcacgtgtgcccgtgacagacgaccttcctgtgtgcctgagcatttgggagcctcgtgctggaccctgaagcatgaggtcgcggtggggcctattaaccattagacccccggggctgctagagagtggcgctgtctgtcttggtcagcagcgcgcgtcggccgcggggcacagatcagcgcctcccctgcccgccatgggctctggagccagcctagccgatgatggagccccagtggccaccgagctatggacagggccgctgggggtgcacccccaccctctccgaccccgaggagctgccggcagagccctgtccactcttgcctcagtttccctgctggacacaaagggctgaagtccaggtcccttcgatggcccaaattacctgactgtcgatcctgactggggcggtggcgacatggcccccgcagctgcccggcggtggcacccaggggcgtcacccacgagggacgcttgactcaaggtcctctccactggccgccgggagccgggccgggagccgctgcggtgccgacctggtgggtggcacacggggggcgggtgcggaccgcctcttctccgctctgccggctgcacatggccagaggacaattgggggtcacagggttaaacgctgactaatctggccattgaaggcccaagcgcc

SEQ ID NO: 15792 - DNA, 68 bp, Homo sapiens; identical to SEQ ID NO: 7159
  chr19:956638-956706
  hypo

SEQ ID NO: 15793 - DNA, 215 bp, Homo sapiens
  chr19:9960959-9961174
  hypo
cggccccaggggacctcccctcccccaagcgctgagtttctaataaaggccaagcctcataaacaatcacctgtgcccgctcccatctggctggcttcgggagcaatcgctcattcgcctgctgcctgcctgccggagcatttgtcattaggaaggtttaatgggtttcctctcagctccagagggctggggagagccggctgcatggatacacc

SEQ ID NO: 15794 - DNA, 63 bp, Homo sapiens; identical to SEQ ID NO: 7165
  chr2:10156251-10156314
  hypo

SEQ ID NO: 15795 - DNA, 614 bp, Homo sapiens
  chr2:10334473-10335087
  hypo
cggggctctgggggtaaggccttggtcctgccgtgcctcctcctggctcatctgtgacacagaaatgacagttcctactccccagcttgtgcgggcccaaatgggatggggtgtgtgtgtgaggactggggcctaggcctgtgcagggcaggttgtgttactaacgtccccccgtggctcctgggctaacggtgcacttctccgtcctgcttcactgccttatggcacgtgtccatttccccaaccaccggtgggccccgggtggcttggccggcctggtgtcccgtgcccagcatgggctctggcccaagttagcacttgctgcctaagtgcctctgccttttactcacctccatctggagcgggctcagtggggttcctgctggggctctacgggggcatccagactttgccctctgaccagccccactgtcctgtccttccctcccctgcgtcctcatctgtcactccttggtcacagccgccccctgactttcctccctgcctccttggcatggtgggaaacatgcgagttccatttctgaggctgccttgtgcctgatcttgggcaagttgcttgctagacctctcggcgtctccgttctcagcggtgc

SEQ ID NO: 15796 - DNA, 473 bp, Homo sapiens
  chr2:10566948-10567421
  hypo
cgagcggcccctggacagttgcagagaaacacaggcttgtcgtgccgtttaagctttgcttgcaagagtggatgccccgcaatcgttcctgctctcccgggccccgggcctggggcatgcgttgcacctgcccagcccggtggctgcgcctccctcctccacctgaccaacgcgacattcctcccctcacgcctggcccggtcccttccagggcaactcccagggatgtggtgacatgcagggttcaagtgttcttggttccaggcacctcccggctcacggggagctcagaggtccatgccgaggagaccaggcaggacctcccgaggctgcgccccggccggcccatgcgttttgtgatcccaagtgactctgtgggaagggtggggacgaggcgtcgggagggtatacagggagcccctcccgtgcatggctgcccccccgttcattttctccaccacagccgcttgcac

SEQ ID NO: 15797 - DNA, 80 bp, Homo sapiens
  chr2:10580386-10580466
  hypo
cgtctcacctgtcctcctacctgtgtgtgggtggacccactcattgttctctgagaatcagagcgagctatacgggattc

SEQ ID NO: 15798 - DNA, 55 bp, Homo sapiens; identical to SEQ ID NO: 7167
  chr2:10600813-10600868
  hypo

SEQ ID NO: 15799 - DNA, 73 bp, Homo sapiens
  chr2:109260013-109260086
  hypo
cggcctttagggcagacaccgagctagccagttttttttttcataccccagtggtagcgtttgagtttttttc

SEQ ID NO: 15800 - DNA, 187 bp, Homo sapiens
  chr2:110015134-110015321
  hypo
cggcgctgtggccagcgtggccccaagtcccactttaagcagctcaggggcggtcagtgcctttcagcggcgtgtggatggcaagaagaacaccaagaaacgccactccttcaccgcgctcagtgtgacgcacagatcctcccaggctgccagccacaggcattccatggaaattagtgctccagtg

SEQ ID NO: 15801 - DNA, 112 bp, Homo sapiens
  chr2:110015364-110015476
  hypo
accttgctcatctgtcgtgcgctgctcccacccaggtaacatcccgcgggccagggcaggcatccctgggttctctggggttctatcctcagctccgtgttcagtgtccccc

SEQ ID NO: 15802 - DNA, 121 bp, Homo sapiens
  chr2:111929192-111929313
  hypo
cggccccccagccaccagcaccccggggtcccgtctctgagctgcctgctggactatgcaacaggcgcccaccctccagcatgttctccttgtgctaaattagccagggctggtttctgtc

SEQ ID NO: 15803 - DNA, 682 bp, Homo sapiens
  chr2:114736479-114737161
  hypo
cgcagtaacgctgttccctgcattggatgaagtgctccccaccaaactctctcaccggagagggtgggatctgcgggctccctgggtggcttgatttcgacaccctgtgggctgccttccactctggtactttcctctgcctgctgatgcttgaaattccttgaaccggccacacacacctgctttctggaatcagaacactggaaaggcttcctgggacgggagaagagtgatttacattcctgccgaggtgtaaagctgcggatggcaggttctctcctgagaaccggcttcaactaggaggaggaggttggaagcaggaccccgagctgacctgttgaccaggagaggagtaagcagaagggaggcaggagcgggcggaggagagaaggccggggagccgggatgggggtcaccgcccccggggagccgggatgggggtcaccgcccccggggagcccggatgggggtcaccgcccccgcccccgtgatgccgagctgaaaaagacagtctccaggtaggataatccgtcacactagatgcatatagcttcatgcaagaagagcgactgttgcgctgtcttctaccccctttggccgcgatcccgtgacaatgccggcatccgggcaccaactggcttttgcgaaccgctctccgctccccgcccggattccgaagccc

SEQ ID NO: 15804 - DNA, 213 bp, Homo sapiens
  chr2:121549381-121549594
  hypo
cgtctgtgactttaatgcggtgtgcacgtgtgtgtgtggcctgcgtgcaggtgtatgcatgtgtgtggctgtgtatatggtttgtcggcgtatgttctgtgtgctgtgtgagtgtgtgagcctgcgtgtgtgtgtgcatccatgtgtgcctatgcgtgtgggtcctgggcacgcatgccgcacgactgagatcacagcagaggtgagaacacc

SEQ ID NO: 15805 - DNA, 174 bp, Homo sapiens
  chr2:132269055-132269229
  hypo
cggaggcgggtgctgcgctggcccgcggctgctgggactgcaattgtttggattttcactgaccgtgctttgtttttgtttttttctcctcactcctgggctcgttctcattgctttctttctctctccgcttccccctcccgtgtctggtcctatctctccccttccccaccc

SEQ ID NO: 15806 - DNA, 147 bp, Homo sapiens; identical to SEQ ID NO: 14820
  chr2:134325872-134326019
  hyper

SEQ ID NO: 15807 - DNA, 426 bp, Homo sapiens
  chr2:15307089-15307515
  hypo
cggcagatacacatgttgcttctgggaacagcattcaactccagatgctttttctgctaaggagcagggccacaggtggccctcacacccagtgctgtgctgcgcggagggctgtactgaaggttctgaaggcctggtgagtccccctcacggccagaaggagagacccggcttcggcttcatggccggcctcccgcaggtgtctgcccagctcctctgcatcccagcgcccttgctggaggctagccaagaggtggtcaacaatacgtggatagaagggagtggagacacacttcaccagcagcttggcatccaggagcagggaaagaagttcttggtcacaattggaatcattcaccttcaagaaataagacaggcacagcgtgagggggtgtttgctttgttcgcctcccccttggatccctc

SEQ ID NO: 15808 - DNA, 101 bp, Homo sapiens
  chr2:15783084-15783185
  hypo
cgtctttctgcccgtcccccgcctcccgactctcacctccttggaggcttacggggctctgtataagtttcccacaaaaaatccgtgctgctgggtggaac

SEQ ID NO: 15809 - DNA, 126 bp, Homo sapiens
  chr2:159994731-159994857
  hypo
cggtttcgcctgaaattaagaagcagggtatgttttcatttttgttaagtgtctcgggagcaggtgtagttcacgtctgtgggtgcatggtcttgcctgaagatagccatgatgttggtggatgcc

SEQ ID NO: 15810 - DNA, 431 bp, Homo sapiens
  chr2:16124561-16124992
  hypo
cgtctccatggcgacgggagcagctgctctgttctgggccttggctgggctgtgcggggcggcctgcccgcctgtctgcctgcccgcccgcctgcccggccgtgggagctgccagcgccttgccctcccgctgcccacaggccctgccaggctgggcgcaagaaagcgtgtttactaacaccatccacacggctccctgggcatggtggctctgcccagaagatgtcaggccgagggcaccgggaggtgggcctggagccaggctgtctgcagcccggagagacagtcccggccggctgctgccctggcctgccagtctctgggcgagcgcaggcactgggggttaagaggcccccatgaggccctttctgaagtgaacgttcccttcctggaatgccttgccagagcctctggaacgttccagccccagc

SEQ ID NO: 15811 - DNA, 83 bp, Homo sapiens
  chr2:170282893-170282976
  hypo
cgaacctgaagttgccagtgtgaagcccgtgagtgtgcagtgaaccgcagagaaagcttcttggtgagttgagtttgtggagt

SEQ ID NO: 15812 - DNA, 133 bp, Homo sapiens
  chr2:171730981-171731114
  hypo
cgaaagtcagcaaggaagcaaggacttcagacctaccgctgcgaggaactggattcggccagcaacctgaatgagcttggaggcacgtctcccagcgaagcctggcaatgggagcccggcctcgggagcatgc

SEQ ID NO: 15813 - DNA, 71 bp, Homo sapiens
  chr2:208635464-208635535
  hyper
cgcgcccggcccgtttacatcttaagacaagatctcactccttacaacaattctgaggcaggtacttccta

SEQ ID NO: 15814 - DNA, 188 bp, Homo sapiens
  chr2:209224972-209225160
  hypo
cgccccacttgttctcccgccttctgcgtgagcagcccctacggggtctcctactggtccctaggaactttcgccacacccggagcggcggcctccccgagcccctcggggccccttccctggcagctgggatgagggcagcgtgctcctcgcaggttacttggtcctgaggtcctccctcaggcgct

SEQ ID NO: 15815 - DNA, 479 bp, Homo sapiens
  chr2:209225393-209225872
  hypo
ggctgccttctgtggtgaaggtgggggccagggttgcaaggccctcctcttgttggcatcagccaggcacgcagtgctgtcgtggctgacccaggccgtgaggcacccgctgactgagaagccaacctgagcacccagccgcacctaccgctggcctcagacatcagcaccccaaagggtatgttggagtcccatggtggaggtgccggccgctcctccacgcacttgatgtataccgaggatcccatgcttgacgtcgcagggggcattagccaggagcacgttgctgggatgccagtccaggctgaggatggtggagccaatgggcttcttgatgtacttgcacacccaccagttattctcccgctggaaataacagatggcgatgacacacagctgccgcccacagcaaacttgtcctgtgggcccagcacacacagcaggcagtgggtgcgggcttaccctcctggcccgtcagc

SEQ ID NO: 15816 - DNA, 129 bp, Homo sapiens; identical to SEQ ID NO: 8316
  chr2:219735657-219735786
  hyper

SEQ ID NO: 15817 - DNA, 173 bp, Homo sapiens
  chr2:237542540-237542713
  hypo
cggaggcaggagcaccgccttataatagcagctcccaactaacatgcagggcgacttcgggctggcctcccaatttctctggtcgatgtcctcagctctgaggtcggggctggcggggcggcggccgggtcgatgtcttcagctctgaggtcggggctagcggggcggcagcc

SEQ ID NO: 15818 - DNA, 67 bp, Homo sapiens
  chr2:239082208-239082275
  hypo
cgggcacagaggtgacaccgcagcgcttgtactgcccgtccccaatggagcgtgacacctctagcac

SEQ ID NO: 15819 - DNA, 34 bp, Homo sapiens
  chr2:239096420-239096454
  hypo
cgtcatctcccgctcagcagggctgctcaaccgc

SEQ ID NO: 15820 - DNA, 448 bp, Homo sapiens
  chr2:239800534-239800982
  hypo
cgtgtgggaagattgggctatgtaggacaagctgtatttgtgcacctgcgcaaggcgggaccactgaaatttagccctggagttcgttcacggagccgctgaccacttatcccttcctcttcagcatgtgcttgccgctgagccatgcgggtgctgtgttctctgttatgtgccggtgtgtggactggaacccgcctgcagcagccactcccacctgccctcgggaccctgactgtacatgggctgagccaggcaaccaccggaagggtgagtccttccccaggactcagcgggtgagagactccggctcacctcacggcggaacgcagacacctgagagcccgcaagcctcaggacagagagaaacagaggtccaggtggaaatgcggaggcggcacgaggagggggccctggcctgggagcacgtgcgctgcaccacgtgttaccc

SEQ ID NO: 15821 - DNA, 121 bp, Homo sapiens
  chr2:240167455-240167576
  hypo
cgagcctgcccccaccttctattcaatatgtctttcctgagcatctgctgggtgatctacctaacttgttccttcacgaatatcccaacagtcttcagttcatccccagcccctatgtgtt

SEQ ID NO: 15822 - DNA, 310 bp, Homo sapiens
  chr2:240167605-240167915
  hypo
tcagcgagcaggccctgagcgtctgggaacgtgagagtgagcaacgcagaggcctggccccggcccagcagaaccggcaacccacactggctgcctgcgtccagtcccgccatggggtctgcctggtgccagcacctgcccagacacagggcagaggagactgcaggggggtgtccagctgctctcacgtgccaggccaggcttgctaacacctgtggcttagtcgggtgatagggacaaaacgtgcaaactgagcccgctggacacgcagactcagcaggcaggcagagcccggtggggaggcaaacgc

SEQ ID NO: 15823 - DNA, 288 bp, Homo sapiens; identical to SEQ ID NO: 8325
  chr2:240226690-240226978
  hypo

SEQ ID NO: 15824 - DNA, 154 bp, Homo sapiens; identical to SEQ ID NO: 8326
  chr2:240227007-240227161
  hypo

SEQ ID NO: 15825 - DNA, 80 bp, Homo sapiens
  chr2:240319796-240319876
  hypo
cggaggaaagcccggccacagcctgtcgccccgctgcctctcagcaacggcagttctctcggcctctgcggctccttcgc

SEQ ID NO: 15826 - DNA, 463 bp, Homo sapiens; identical to SEQ ID NO: 7200
  chr2:242004407-242004870
  hypo

SEQ ID NO: 15827 - DNA, 339 bp, Homo sapiens
  chr2:242169887-242170226
  hypo
cgcagcacgtactgtgcgctcttgcatgaaattcccacccacagaggacgagctcgccaggcagctgtcaaggagatgccctcctaatggccaccgtggcagtgcagcctcacacaggccgtcgcctgcactgacccgtggtgtccatgaggacagttccactgccagccctggggttgtggcctcatcatcttgaggggaaggccatgccctgctctttcttctggccagccaggtgcccccggtgagagaggattctcacccactgtgcttccagccggctcaccttgaattcgtccatgattttgcgaatggctttgccgcgggcaccaatgatgc

SEQ ID NO: 15828 - DNA, 47 bp, Homo sapiens; identical to SEQ ID NO: 11478
  chr2:242554503-242554550
  hypo

SEQ ID NO: 15829 - DNA, 54 bp, Homo sapiens; identical to SEQ ID NO: 11479
  chr2:242554624-242554678
  hypo

SEQ ID NO: 15830 - DNA, 180 bp, Homo sapiens
  chr2:242925676-242925856
  hypo
ggaaactgtaggagctggaaatatttcatatcttatttggggtgttgtttacaggggaacttgacaaactcatctaatggtacaatcgagacatctgtgtaaataaagtgtcaaaaatcatcctgctgacatccatgctccccgccccacggcacttcccggccctcagccctcccgtgc

SEQ ID NO: 15831 - DNA, 212 bp, Homo sapiens
  chr2:242933459-242933671
  hypo
tggaatctccagcgttgaaggcggggcctggtgggaggtgattggatcacggccggcgttcccacaaatggcttcgcaccgtcgcctccgtgacgccctcgtgacactgagtgagcaagttattgtgagacctggtcgtttgaaactgagttggggcccagctcagcgggcacgaccctgctctgggccacgcttacgcgcttgttcctaac

SEQ ID NO: 15832 - DNA, 135 bp, Homo sapiens
  chr2:27304246-27304381
  hyper
cgtggcctctggagaccgcaggtcccagcatgcagcagttcctgtggcttgccttccctcctgcgtgctgcacaccggatgtgctgtttccctgccccgagatagccttactataattatgcaaacaggaactcc

SEQ ID NO: 15833 - DNA, 228 bp, Homo sapiens
  chr2:2769802-2770030
  hypo
cgaagcgccacggagtccctcagtcaattcctggcatgtgagcaggaaaagggagcacagaggaggagatgcgggggagccattgcaagggcagcctctaaagcctttctcggttggagtccctgatgtcacgatgagtcgctggtgccattggataacaagagttccacgctcaaggaccgcccctccaggcctggtggaatcagcagtcacggctgactgccctgc

SEQ ID NO: 15834 - DNA, 225 bp, Homo sapiens
  chr2:28065720-28065945
  hypo
cgggatatcggaaatgctactcatgtttttttttttaccctgtttgcaaggttttctaacattatcaagaaccacaagactgtgaatctcacagatggaagaaagaatattttacgacagaaagagtattgctttgcttaacttaaaaggttaactttaattaagacagcgataaaagcttttatagaaagaatgacaaatatgtataattacctccactcctgc

SEQ ID NO: 15835 - DNA, 64 bp, Homo sapiens; identical to SEQ ID NO: 7212
  chr2:43019535-43019599
  hyper

SEQ ID NO: 15836 - DNA, 70 bp, Homo sapiens; identical to SEQ ID NO: 14882
  chr2:43020503-43020573
  hyper

SEQ ID NO: 15837 - DNA, 66 bp, Homo sapiens
  chr2:47200517-47200583
  hypo
cgagagccttccagccaccgcatggtgcagggaaacccttgctaccctcatttatcccccgtcagg

SEQ ID NO: 15838 - DNA, 397 bp, Homo sapiens
  chr2:54798152-54798549
  hyper
cgacttgctgtacaattcagtcttgcaatgacagagagattacacactatctgcaaacaactgccaagcagatgaaatcctggctgtgggaagtctgcggtgaagagtggtgggggtggtcaggagagcagtggaagggaagtggctcagaacattgtagtggtggtttggcgtgcctgtcaagggctgtgggacgttttctctctcatttcagaaacaagggtggtgggaaacacatgggccgtggatttgcataaaccaacagtcaaatcctagctctaccagtgacttcactgagcctcattttcttcagggggaaagaataaatagcccttggggtgattgtaaagcctaattaggtatgttataattgtattaagaggatgacgagttcacc

SEQ ID NO: 15839 - DNA, 45 bp, Homo sapiens
  chr2:62497691-62497736
  hypo
cgacagagcgagactccgtctcaaaaaaaaaaagaaaagaaatag

SEQ ID NO: 15840 - DNA, 123 bp, Homo sapiens; identical to SEQ ID NO: 7218
  chr2:69928507-69928630
  hypo

SEQ ID NO: 15841 - DNA, 346 bp, Homo sapiens; identical to SEQ ID NO: 7221
  chr2:72359340-72359686
  hypo

SEQ ID NO: 15842 - DNA, 100 bp, Homo sapiens
  chr2:80549811-80549911
  hyper
gggtgccagtgtcgccttgtccattatccaaaacccagtcgcttttgctggttcctcactcagcatgtgagagagattgtcttctcactcggtgccactc

SEQ ID NO: 15843 - DNA, 61 bp, Homo sapiens; identical to SEQ ID NO: 8357
  chr2:85280346-85280407
  hypo

SEQ ID NO: 15844 - DNA, 343 bp, Homo sapiens
  chr2:85890530-85890873
  hypo
cgctgctgttcccggcctgggtggtcacggacatgcagaggtggcactcagagtctcgcggcagccattctcctgtcggcgaccctggagatgtgagcattagggggaaagcaggcaaggccaccctacagaggtgtttggtttctgtcctccttggtgcattgcagtgggaccacagagggagagggtcatgcagtggcagggtagggggaggaggagagcaggcattgggctaaggagtgggcagtgggctcacttgggccagcgctgtcatccatggagcaccggaggacgaggcggcagaccagctggggcagcatgcggcccagcagcgtgtcgagca

SEQ ID NO: 15845 - DNA, 81 bp, Homo sapiens
  chr2:85890902-85890983
  hypo
tggcagatgccgcccgccaccagaggtaccacgcggcacacctgggccactgccacagctagcgcaccctggggcgggggc

SEQ ID NO: 15846 - DNA, 100 bp, Homo sapiens
  chr2:8736064-8736164
  hypo
tgcactagactccctacaggctcacagacacacaccagtgcacacactgcgcgttcctctctgctgacatctgagcgaggcaggttcacaagcagccagc

SEQ ID NO: 15847 - DNA, 60 bp, Homo sapiens; identical to SEQ ID NO: 9532
  chr2:8978298-8978358
  hypo

SEQ ID NO: 15848 - DNA, 372 bp, Homo sapiens
  chr2:9609477-9609849
  hypo
cggttaaacagccctattgtagaaggtgggtgttgctgaccagggacttgactacaatagttctgttggcggccctgttccctggggctctacaagaatagaaaacccgtgtggccctggactggccccgctctcccacgtgctgcagtcggggtgcagaatggaagttcacattgctgtggctggtcctcaggagccgtggggagggcagtctgcgggaggctgcggcccttccactggactttcactctggccttcttccctgtcctcctgacaccactcctcccgcctcccctccctctccctcacctcccacaaacacaccagaactattcaactctgaggaacaggagtatgagacagcttccattc

SEQ ID NO: 15849 - DNA, 185 bp, Homo sapiens; identical to SEQ ID NO: 8363
  chr2:97437985-97438170
  hypo

SEQ ID NO: 15850 - DNA, 113 bp, Homo sapiens
  chr20:30139516-30139629
  hypo
cgtggcgacaggcagtcgttgggggagactgggggagattccactcaggggatcaagaaacagctgtctttctcgtgactcactctaccactgcggacagcctttctccctgc

SEQ ID NO: 15851 - DNA, 62 bp, Homo sapiens; identical to SEQ ID NO: 6121
  chr20:30639044-30639106
  hyper

SEQ ID NO: 15852 - DNA, 139 bp, Homo sapiens; identical to SEQ ID NO: 6122
  chr20:30639494-30639633
  hyper

SEQ ID NO: 15853 - DNA, 35 bp, Homo sapiens
  chr20:30864847-30864882
  hypo
cgggagccaccgcacctggccgcatgatctgtttt

SEQ ID NO: 15854 - DNA, 266 bp, Homo sapiens; identical to SEQ ID NO: 9549
  chr20:3202153-3202419
  hypo

SEQ ID NO: 15855 - DNA, 71 bp, Homo sapiens
  chr20:32669113-32669184
  hypo
cgtactcctcctgctcctactttctctacctgggaaatagccgctcaggacgaagctgctgctgtggtgtc

SEQ ID NO: 15856 - DNA, 87 bp, Homo sapiens
  chr20:35441137-35441224
  hypo
cggtaaggcctgaagctccggctggggtcgggcttagagtccaagtcaccagtgcggaaagcctctcggatcctgggctcccattcc

SEQ ID NO: 15857 - DNA, 436 bp, Homo sapiens
  chr20:35443740-35444176
  hypo
cgctgttgtcgggggcctcatgcagccggaagtcagcacactcgttgtccagacacagccggaggccagccgtgaagccattggcatcagccaccaggacatcgatggccttactgaccagggcggcctgctctctcagcccaggcagcacctcggcctccctggctctgcagagtcggaccgcatgggactcgtgtgtctcgcccaggggagcaggcacacactgggcagagtccccggcctcggcgtccgtctccagcatgggccgcgtactctggcaggaggcgaggtcacagcgctggaggttggagaggagcacgcggttctcgtactgcagcttcttgaccttgccgctgagctcgccgatctgcagcttggcggccgccagctcctcctgtgaaggttcgctgagcacagaacaactgtcctccgacag

SEQ ID NO: 15858 - DNA, 381 bp, Homo sapiens
  chr20:35444205-35444586
  hypo
acttggccagctcgttcagcagcagcttgttctggtcctcgagctcggcagaggagcgccgcagcagctcggcctcctcttcgacaaactgcaggtgtcgccgcagctctgccaagctctccccgcactctccgccacccagcgcggagaaggccaggcgtgcctcaggacccccacagccacctccatgatccttcatgtcgtccatctcagcccgcaggcctcggttctccacctccagctccacgatgcggcggctcagcaggttggcttcctcctccaccagcttcaggtgcaccttcagctcggtctcccgcgagtggggggcatcggccagctcctcggctgacagcgcgctgtccaggtccccatagagcgagc

SEQ ID NO: 15859 - DNA, 138 bp, Homo sapiens
  chr20:37673303-37673441
  hypo
cggatggagatgcggcggcctctgtgcgcagctggtacggcagtcctggagagccacctgggactactcatgtgtgttcctgccccacagcccagaaactctgcttctgggggtgtgttcccaacaaaattctcaccc

SEQ ID NO: 15860 - DNA, 523 bp, Homo sapiens
  chr20:39990769-39991292
  hypo
cgctcctcgaggctctgcacgcgctcttccagcatggtcccaaagccgcccactccccacccccccatgtccaacctcagacagcatccccttgctccaccctctgtcccattgagcgtctccagaccctcaagcagcccgtccacacctccctcgagcatggcagcagagagcctcgtaagctcatccccggccggggcaccggggcccctttgggtctcggtgactgcctgcagggccctctcaaggccatccatacgggcattgatcaaggctagttgcccacagcagctgcccctgccagacacgctcaggccctgcagctggctgcccagctgtgacagctcctggcgcagggccagctcccggccatcaaggctctggtgcagcctccggctggcggcctgaccctcctcacattgccgccgtacctcctgcacccgcaggtcacactcactctggacgccttgcagcttctgctcaaagccatccagcaggctcccccagagtcggtgcagccgtc

SEQ ID NO: 15861 - DNA, 93 bp, Homo sapiens; identical to SEQ ID NO: 10547
  chr20:400189-400282
  hypo

SEQ ID NO: 15862 - DNA, 102 bp, Homo sapiens; identical to SEQ ID NO: 13883
  chr20:400915-401017
  hypo

SEQ ID NO: 15863 - DNA, 55 bp, Homo sapiens; identical to SEQ ID NO: 7245
  chr20:42833281-42833336
  hypo

SEQ ID NO: 15864 - DNA, 93 bp, Homo sapiens; identical to SEQ ID NO: 8386
  chr20:46823583-46823676
  hypo

SEQ ID NO: 15865 - DNA, 50 bp, Homo sapiens
  chr20:47766299-47766349
  hypo
cggaaaatggaaatgcagcgtaacaaaagaaaaacaaatcgctcctgtgc

SEQ ID NO: 15866 - DNA, 36 bp, Homo sapiens
  chr20:47837206-47837242
  hypo
tcagcccgctgcgtgggaggtcatgggccagtcccc

SEQ ID NO: 15867 - DNA, 165 bp, Homo sapiens
  chr20:48771177-48771342
  binary
cgtgccaggatcggggctggaacatggtagaagctcaataaatgcttgatgaatgaattaaggctcagccagatgcgtctaatacttcggcagataaatgacagcagcagggatttaccccaggtctaaccgacaacaaagtatgcaataatttctcatagaaat

SEQ ID NO: 15868 - DNA, 162 bp, Homo sapiens; identical to SEQ ID NO: 7250
  chr20:52214819-52214981
  hypo

SEQ ID NO: 15869 - DNA, 209 bp, Homo sapiens
  chr20:52234410-52234619
  hypo
cgaagatgccgaatcagctaaacgggaggtggcttgagtaggatttgctgccagctaaagcgtgagatgctattgcatgtgcaaggcaaggctttcttcagcggcatcatcttccaaaatagcccaggtatatctcaccagaattaaaccgggctgcaggtggcctttcctcatacttgaccaatgacgtgattaatttagatctgttc

SEQ ID NO: 15870 - DNA, 363 bp, Homo sapiens
  chr20:56126192-56126555
  hypo
cgattggaatgagtcgggccaggtggaaaacgaatctggccattcatcagagctgtcaggacgggtctctcaccagaagtgtttaccagtgttcaccatgagcttccgagttctgctaacgggagcttcgactgtaactcagaggacttggaaaacgacttgggtgacttagcgtacctatgttattgaattcgcctaagtgttgcgactcttgatgctgacacttacgagaatgcacagtgggacttccagaaaatttaacagtgcagttcagaaaaatgcctccgtgggggtggggggctttgaggaagtccaggtggcatgggactggggaggggaagaagcaaggagcacagcggcgtc

SEQ ID NO: 15871 - DNA, 91 bp, Homo sapiens; identical to SEQ ID NO: 9560
  chr20:56772299-56772390
  hypo

SEQ ID NO: 15872 - DNA, 214 bp, Homo sapiens
  chr20:56780225-56780439
  hypo
taagacgtcggttccaattcttcagcctctctgcctctgcccctcgccgtggcctcatcggagggaggcatcgctccctgaccctcgactttcagcttggccactcgactcgcttggcttcccacctacagccaggagtgacggcataacaggtctgcgcccgcccctgaagacgcctcccacgtccccgctccccacgtccgcgcccacacct

SEQ ID NO: 15873 - DNA, 61 bp, Homo sapiens
  chr20:56780951-56781012
  hypo
gcacctgaagacgcctcccacgtccccacgtctgcgcccgcacctgaagacgcctcccacg

SEQ ID NO: 15874 - DNA, 96 bp, Homo sapiens
  chr20:56781104-56781200
  hypo
ctcccacgtcgacgcctcctaggtctccacttcccacgtccctgcttgtggagcctgtgccccggccgacctgctggtgccaggacagtgagagac

SEQ ID NO: 15875 - DNA, 200 bp, Homo sapiens
  chr20:57154974-57155174
  hypo
cgtgagaattcagaggcgccaagccccctgcccgtccccatggagccttctgagggctgcaacgtggatattttccaggcaggaattaatcacggcttcgttggcgctccaagccagaccctacataataccttctataaagagccttattacaccggaaggttgtatattatattcttcactgcacaccagctacgtgc

SEQ ID NO: 15876 - DNA, 428 bp, Homo sapiens; identical to SEQ ID NO: 12671
  chr20:60226081-60226509
  hypo

SEQ ID NO: 15877 - DNA, 58 bp, Homo sapiens; identical to SEQ ID NO: 7254
  chr20:60470129-60470187
  hypo

SEQ ID NO: 15878 - DNA, 77 bp, Homo sapiens; identical to SEQ ID NO: 7255
  chr20:60470257-60470334
  hypo

SEQ ID NO: 15879 - DNA, 37 bp, Homo sapiens; identical to SEQ ID NO: 7256
  chr20:60502550-60502587
  hypo

SEQ ID NO: 15880 - DNA, 352 bp, Homo sapiens
  chr20:60511742-60512094
  hypo
cggggctgagacaacgcgtcctgcaccctaactctgtgtctgtgacccccagggactccgcgctgctgacaacgaccccacggcacccccctatgactccctgctggtcttcgactacgaggggagcggctccaccgcaggctccgtcagctccctgaactcatccagttccggggaccaagactacgattacctcaacgactgggggcccagattcaagaagctggcggacatgtatggaggtggtgaagaggattgactgacctcgcatcttcggaccgaagtgagagccgtgctcggacgccggaggagcaggactgagcagaggcggccggtcttcccgactccctgc

SEQ ID NO: 15881 - DNA, 271 bp, Homo sapiens
  chr20:60952110-60952381
  hypo
cgtcctaggctgcgagctccctgggcacagggctgtctgttccacgcaccaaggagcgcctgtacccagcacggggcttggaaatggcgggtggacatgacgggtgttctgtgctctacggttcccggcttctgatttgcaattgttcggtagaaaccgtacttccagtgcccacacaaccaatctgtttttctccttcttatagcattggacaaattacgtgaggcatttgatgcattattataaaggaggcttcgtgggggatgacttc

SEQ ID NO: 15882 - DNA, 124 bp, Homo sapiens; identical to SEQ ID NO: 8409
  chr20:61838301-61838425
  hypo

SEQ ID NO: 15883 - DNA, 31 bp, Homo sapiens
  chr20:61991069-61991100
  hypo
cagtggctcaggtgcaggcgggacaggagcc

SEQ ID NO: 15884 - DNA, 154 bp, Homo sapiens
  chr20:62137323-62137477
  hypo
cgggagtgtgggcgcctccaagcaccctctcggtcttgtgctgtcctcaccccactgcctgaagagagcagcgcacgaattttgtctggtctcagagtcgtttctggagggagacgtacctggcagcagctactcccccgcaactggaagcagc

SEQ ID NO: 15885 - DNA, 495 bp, Homo sapiens
  chr20:62248627-62249122
  hypo
cgaccgtgaccttctaagaagtgaaagagaaagatctttctctctccctccctctccatcatgaggacacagcaagaagtcggccatctgcaaggtagaaagcgagtcctcccaacagctgaacctggcagaccctgatcttggacttcagccttcagagctgtaagaaaataactctctgctgttcaggccacgcggtctacggcagcccgagcagactaagacacacgccatctggggagtcagaccagatcaggaagaaaggcctagagctcaggatactgaaggtcccaacccggtgctggaccagaccaccccggcagccgcggccacggagtcacggctcgggtgaggtgacctggacaccatcccggcagccgcggccacggagtcacggctcgggtgaggtgacctggacaccatcccggcagccgcggccacggtgtcacggctcggatgagatgactcggacaccaccccggcagccgcggccac

SEQ ID NO: 15886 - DNA, 130 bp, Homo sapiens
  chr20:62309958-62310088
  hypo
cgaacagcacacacactcccacgaacagcacacacactcccacggaacagcacacacacccacggaacggcacacacacccacggaacagcacacacactcccacggaacagcacacacacccacggaac

SEQ ID NO: 15887 - DNA, 269 bp, Homo sapiens; identical to SEQ ID NO: 10567
  chr20:62322022-62322291
  hypo

SEQ ID NO: 15888 - DNA, 142 bp, Homo sapiens
  chr20:62630932-62631074
  hypo
cgtgtgcactctccctctcatagtgatatcaagaaggcgcgactgctcctcaagtctgttcgggagacgaaccctcatcacccgccagcctggattgcatcagcccgcctggaagaagtcactgggaagctacaagtagctc

SEQ ID NO: 15889 - DNA, 172 bp, Homo sapiens
  chr20:926459-926631
  hypo
cgtccattcactcacggctctgctcccacgcatggctgcgctatgcacactgccctgcagcttcctttgtctgctgcacaatgggctctggacggagccctgttggcgcaatgagtgagccctacatcaagcttcgtcatcgctgcatcgctttgcaccgtgtggctgggcc

SEQ ID NO: 15890 - DNA, 211 bp, Homo sapiens
  chr20:9489214-9489425
  hyper
tcggcagaggcttcccggggcataagaacttcaaagaaagtctcagaggagccacgctaccaggaactttcgtcgccctttaaaattgtcagatagacaagtaaaaacagtaactaactaagggaacaatggactcttgtgacatgtgtaactcttccaggtaccccaacactaaagaccccgtggttcctgtcgccatggcctgaacgta

SEQ ID NO: 15891 - DNA, 66 bp, Homo sapiens
  chr20:9489716-9489782
  hyper
atactgagccatgagcaaccaggcccacctaccgccgcgccatccaaaggtaacaccacagaccac

SEQ ID NO: 15892 - DNA, 55 bp, Homo sapiens
  chr21:30294975-30295030
  hypo
cgacttaaaagaatgcaaccttttgcgtcttacctacttctaacggggccacttc

SEQ ID NO: 15893 - DNA, 130 bp, Homo sapiens
  chr21:36206762-36206892
  binary
cgagggttgggcgtgggggctgggtggtgtgggctgaccctcatggctgtgcgccgcagctgctccagttcactgagccgctcggaaaaggacaagctcccgggcttggtctgatcatctagtttctgcc

SEQ ID NO: 15894 - DNA, 316 bp, Homo sapiens
  chr21:37405019-37405335
  hypo
cgctgatgtgtgtgggggtcgctgttctattgtgggggccgctgatgtgtgtgggggtcgctgtcctattgtgggggccgctgatgtgtgtgggggttgctgtcctgttgtgagggccgctgatgtgtgggggtcgctgtcctgttgtggggcgctaatatgtgggggtcgctgtcctgttgtggggcgctgatgtgaggagtcgctgtcctgttgtggggcgctgatgtgtgtgggggtcgctgatctattgtgggggctgatgtgtgtgggggttgctgtcctattgtaggggccgctgatgtgtgggggtcac

SEQ ID NO: 15895 - DNA, 174 bp, Homo sapiens
  chr21:38176483-38176657
  hypo
cggggtccattagttcctcttggctggtccctgggttcaatgcaacgctcccagcaggtacggtaactgccactcatctgaaactcccaagttacactctgcctcactgacaagggcatggggcgctgcctcctattctgttttgtgggttctttgatcaccagaaggaatttc

SEQ ID NO: 15896 - DNA, 79 bp, Homo sapiens; identical to SEQ ID NO: 9587
  chr21:38918381-38918460
  hypo

SEQ ID NO: 15897 - DNA, 169 bp, Homo sapiens; identical to SEQ ID NO: 9588
  chr21:38918561-38918730
  hypo

SEQ ID NO: 15898 - DNA, 212 bp, Homo sapiens
  chr21:40891441-40891653
  hypo
cggcaatggctgaaccgaagctgagatatacctgtgtcccactccaaagccacgaacagccttcccaacaagccctttcctctcggtcctggaccacagtacggttcctctacggtgcctggctggccgtgggcagtgtgcgccttggccccagagcgcctcctccgcctggctttggtcctcgcattctgtcttcagactcgatgccgttc

SEQ ID NO: 15899 - DNA, 91 bp, Homo sapiens
  chr21:42613666-42613757
  hypo
cgcgtggcgtctacactgggtgacccatgtctacactgtgagtcctaagcgggtgcccctctctgtcgccctcccgcagccatcaagttct

SEQ ID NO: 15900 - DNA, 82 bp, Homo sapiens
  chr21:42613819-42613901
  hypo
gatgtgtggagccggcttgcccgttgctggatctgggaccaacggaggtagtcttgtgggtatcttttagtcttaaaggggc

SEQ ID NO: 15901 - DNA, 376 bp, Homo sapiens
  chr21:43239707-43240083
  hypo
cgctcacatcccctcccagcgccctgcagcagctgagcggcctggctgagcctggcccgtggccctggcgcctgtacccacctttcccacactcggcccgtggccccggcccccgcccccgccacacccaccttccccacactcccagttctcgctcatgtccccttccagcaccctgcagcagggtggcctggctgagcctggcccatgtccccagcacccgtacccacctttcccacactcggcacacaggtactcgcggacattgtcgtgcacacgcatgtgctccttcagcatgtccttcctggcaaaggacttcccacactgctcgcaggcgtggctcttcacacctgagaacacaggcatctgccactca

SEQ ID NO: 15902 - DNA, 243 bp, Homo sapiens
  chr21:43240112-43240355
  hypo
gcaaagaggatgcaccaaggagaggggcccagcctccccagcagctagaagcgcagtaacaggggtggggtcgcctcttcagcggcctccacagagccctcccggggatcctgtgactccagtagatccctgaggacctggaggggtgagggggctgggggcgctgggctgtgagtggcagggctgataaggacgggaaaagctggagaaacagaggaaggcatgggggaggcaaggtgcgac

SEQ ID NO: 15903 - DNA, 219 bp, Homo sapiens
  chr21:43273205-43273424
  hypo
cgtgggcgtgtggcctccagcactgcgggaggcacatttctgacgtgaaggcactgggttgctggtgttttatgggggcagcgcagcgccgggacactcccacacagcccattgtggacctgggattagggacaaccaggggcattttacaaagcctcaatcatactgacaaacaggacagaccagaaccttccaataagttaagaatcttaagctacc

SEQ ID NO: 15904 - DNA, 396 bp, Homo sapiens
  chr21:43547667-43548063
  hypo
cggagcctgtggaatctgcgagtgtcgtcagatgtagtcgtgagtaaactcatctgagaacaaggacagcggggctcgctgacaagcaaggagtcccatttcctctcttctcagctgccctgtgcccaacacatacaccaacgtgattgagaacggcaactccaataaggcccagttcaagctgaggatcttttcctttatcaacgactccatcgtctacctgcactgcaaactccgcgtctgcatggaatcccccggagccacgtgcaaaatcgtaagtgttttttggttttctaaacgtttggttggattcacgttccttattgttacggttcgaggctctgttaataaaaacctagggctcgagtggctcggggccaacctctgggaggagtc

SEQ ID NO: 15905 - DNA, 240 bp, Homo sapiens
  chr21:43991061-43991301
  hypo
cgcggagctgccgcgcccaccttgatggctgctgcgttacaccagaggcaggaccaggacctgactcctccaggctccactgcccatcagtgcctgctgcctgctcagtgaatggtcaccatggaaacggcgctcaggcctacccacccccaccaccacgccttggtcattgttccttccatgagtgagtgctgcccagcaagacaaagtacaggctccagtgggaaggccaccatgtca

SEQ ID NO: 15906 - DNA, 205 bp, Homo sapiens
  chr21:43991493-43991698
  hypo
ttctgtacatttcatgcagagcaattaaatagggcactgcatttttcttcaagttaatttttatttattaaagtaaaacataatgtaccttagaagctagacagtcctacaagcttattatgttgtacagcggcgttccgtccccctccccagccctctctttctagaggcagccaatttcagctgcctctctctgcttacctac

SEQ ID NO: 15907 - DNA, 119 bp, Homo sapiens; identical to SEQ ID NO: 8424
  chr21:44338552-44338671
  hypo

SEQ ID NO: 15908 - DNA, 209 bp, Homo sapiens
  chr21:44444714-44444923
  hypo
cgctgctgttatcgtcaccgctgaaccgttaaacgtggggggcggtctgccttggcctatgcactaaccagccactgcagcactaggacattcctgggacgaggagaaacactttgttcgtgagactacagttaggttttggctagaagcactgttgacgtgaccattattttctaatgattatgtaatgctcacattttgcctaaatc

SEQ ID NO: 15909 - DNA, 643 bp, Homo sapiens
  chr21:45400182-45400825
  hypo
cgagagagttgatggtgcccttcactacttcccaagcatcctagagtcccacgggctgccccgcccacgggcagtggctgcggagtgtctgctctatcaggcatggtgatttcctgccagcctgtgcctttgacattcccaccagaggcagaaccttctgcaggtggccctggccaggctcctctctcctcccagctcctcattagcctcctttgccaggctaggaaaccgaggtatgcgaggttaaggaactttccttgggccgtgcagctgagagtgcgctttgcagggatttgcatccaggccgcgggactcacacaggccacacctgccacccccactgcctctggctcgtgggaggtgtgggatgtggcgggtggccggggcagtgctgggcaggcaggtgttggtattcacaacgttgctttcttgaccgattattttcctgggagacttcctcagtcaaagggttgatatgcttgcgagctctcgatgcacgctatcagattctccaaaaacgtacagccagcttcgcctgcacctgcagcttctgtgatttgtgctcttaattgacgtggcgctttttttaggttgagtcgtttttcattgccaacaatcttctcctgcattgaaataatagctt

SEQ ID NO: 15910 - DNA, 278 bp, Homo sapiens
  chr21:45400854-45401132
  hypo
tgttgactcttctaggacgcgctccaggagatatataatcagaagggcatgtttccaggggagcagtttaagcctgcccggaggccgtggaccctcctgaacttcctgtcctgggccaccattctcctgtctcccctcttcagttttgtcttgggcgtctttgccagcggatcacctctcctgatcctgactttcttggggtttgtgggagcaggtaatggacactgtcgctaacagctcacactctgacgggcctcacagtatcagccacagggtcc

SEQ ID NO: 15911 - DNA, 246 bp, Homo sapiens
  chr21:45790621-45790867
  hypo
cggcggggtcggactggaccagctgttgggctttgtttgctctttttacgaattgaaaaactgaagccaggagcggctgggtgacgtcccaggtcactccttactttcctccccacgctgagctcagacgacttcccgtgacaccactgttggtggcggaatgggactgtggctgcttccgctcagccacgctccctctctgtggacggcggagggtgtgtgtcccagcccggctgccgccctccc

SEQ ID NO: 15912 - DNA, 58 bp, Homo sapiens
  chr21:45791167-45791225
  hypo
tctgcctccgtgtcccgtggccgcctccctccagtgtctgcctccgtgtcccgtggcc

SEQ ID NO: 15913 - DNA, 91 bp, Homo sapiens; identical to SEQ ID NO: 12695
  chr21:46035068-46035159
  hypo

SEQ ID NO: 15914 - DNA, 410 bp, Homo sapiens
  chr21:46841015-46841425
  hypo
cggtaccgggtcagctggtgcctgcctgtcctgccctgcactcctcaggctcctcaaggacagacggacagacaggcactctagagaagggaccttggccagacggctttgccgcccccacccccataggtgcttgctttgagccccttgcaaaggtgaagccagatctgggatcccagggcctggtgcggctggacatgggaggagggccacggtcacgcttgcacggggcagagactcccagaaccacaggcctcaggagagctgggaagggaaggagagggcactgcggtgcctggagagccagagtccgcccgtgtggaagtgttgggggctgtgttgcagtgacagccctggcgtctcaggagcggagcaggacaccgcgtttctggctgtgcaaggctccacgc

SEQ ID NO: 15915 - DNA, 539 bp, Homo sapiens
  chr21:47369859-47370398
  hypo
cgaaggcagcaccacccctgagcagacccgtctgcccctccgaccgtcatgcaccagcccctcccggtgccctgtgtcgtcacatgatgcttgttgaggagcccaggcgtccacccccgcgcctcctggcatgacgccgacctcactccttggcccccggaattcccacaggtgggaggtggtcacagaagctttgtcgattccgttctctttttggcaaggacacttccaggtgcctctgcacgggcactgacccacaggtgggcacagggccatgctcccagcctgggcctgacgggccggggtgcaaccaccgccagcatctaccatgctgtgagtgggcggcggtgacgcacccacctgggaatggcagcgagtgcccggagtgccggattccccccgagctttcacgtctaaggattacgaggaagacctggactacgtgcctttatgagatgcctcctgtgggtccctgaggccgtcaggtgccacctcacccctgcgtgtcctgcggaaactgtgacctgtgactccggggc

SEQ ID NO: 15916 - DNA, 426 bp, Homo sapiens; identical to SEQ ID NO: 13926
  chr22:18619428-18619854
  hypo

SEQ ID NO: 15917 - DNA, 232 bp, Homo sapiens
  chr22:20050754-20050986
  hypo
cggccactccccagagccagttaggccaccaggtgggctggggctagacccggctgcgggcgggccacagagggactaatggccaccacttctctccatcctgcaggcagctgccagacccggccatcgaggaccagggtggggagtacgtgcagcccatgctgagcaagtacgcggctgtgtgcgtgcgctgccctggctacggcaccaggtattgcagcaccgtgggtgc

SEQ ID NO: 15918 - DNA, 251 bp, Homo sapiens
  chr22:27007869-27008120
  hypo
agaacaattcctccctcttcagtttgatatgaggattggacataatgtatgtgccaggagtacgaacggccgcaggcacagagcagatgctggagaaatggcagctactgttgtgtggtcattttactgtggcagagagtgtgcccctccgccgcccagtactcacggtcccgcggagacaatgatgctgcgcacacggtcgaagccacggtctgccagatttgagcactcccccgagaattctgctcgac

SEQ ID NO: 15919 - DNA, 89 bp, Homo sapiens
  chr22:27019127-27019216
  hypo
cgagcccccaacctctcacccttcacgggactctgatgcggatctccaccttttttttttcctggcacagatggtggtgtgggatgagg

SEQ ID NO: 15920 - DNA, 112 bp, Homo sapiens; identical to SEQ ID NO: 6562
  chr22:36907702-36907814
  hypo

SEQ ID NO: 15921 - DNA, 176 bp, Homo sapiens
  chr22:45613836-45614012
  hypo
cgcgtgggaagtgagcactaagcctgggccgtccacaccccagtgcggtgtctgccacctctgaattgccactaactctcctcctggttctgcacgacgctggactggtggcatgacagcaccaagagctcaacagtgctggtttcaggagcgaggaacgtgatgacagctcgcgc

SEQ ID NO: 15922 - DNA, 154 bp, Homo sapiens
  chr22:45975280-45975434
  hypo
cgtcccggcagcgggcttctgggaacggaatgtggatgaggccacaaggacccagcggcttcccccggcacagttggtcacgggtgccctggtctttggaattctgggctggggctgcgtgggggagggccccagcctggcccttggaattgtc

SEQ ID NO: 15923 - DNA, 225 bp, Homo sapiens; identical to SEQ ID NO: 9628
  chr22:46929401-46929626
  hypo

SEQ ID NO: 15924 - DNA, 204 bp, Homo sapiens; identical to SEQ ID NO: 9629
  chr22:46929718-46929922
  hypo

SEQ ID NO: 15925 - DNA, 282 bp, Homo sapiens; identical to SEQ ID NO: 9630
  chr22:46931438-46931720
  hypo

SEQ ID NO: 15926 - DNA, 68 bp, Homo sapiens; identical to SEQ ID NO: 9631
  chr22:46932128-46932196
  hypo

SEQ ID NO: 15927 - DNA, 135 bp, Homo sapiens; identical to SEQ ID NO: 6574
  chr22:47022417-47022552
  hypo

SEQ ID NO: 15928 - DNA, 413 bp, Homo sapiens; identical to SEQ ID NO: 6575
  chr22:47022632-47023045
  hypo

SEQ ID NO: 15929 - DNA, 58 bp, Homo sapiens; identical to SEQ ID NO: 5813
  chr22:47023191-47023249
  hypo

SEQ ID NO: 15930 - DNA, 99 bp, Homo sapiens
  chr22:47441200-47441299
  hypo
cgctcctccgcggtttggaagtcccattaatgcgacttctctctgagaagtcaacctgggcctcctcactctgcagacgtccagctccctcccggaagc

SEQ ID NO: 15931 - DNA, 109 bp, Homo sapiens
  chr22:50864117-50864226
  hypo
cgtcatctgatgtgcgtgtggaacggtgtctccgtgtggctgatgctcgtcatctgatgtgcgtgtggaacagtgtctccgtgtgacaagtgatgtcgagcatcttctc

SEQ ID NO: 15932 - DNA, 413 bp, Homo sapiens; identical to SEQ ID NO: 8479
  chr3:10206343-10206756
  hyper

SEQ ID NO: 15933 - DNA, 94 bp, Homo sapiens
  chr3:126261836-126261930
  hypo
cgcccaccctggcaaggacagctgcggccaaggacgaaagccctcccttggctggcctcacgatggggccgtcccgggagccaggtgggagctg

SEQ ID NO: 15934 - DNA, 33 bp, Homo sapiens
  chr3:141664320-141664353
  hypo
cgtgaaggaactcagtactgaaacgtgatcccc

SEQ ID NO: 15935 - DNA, 43 bp, Homo sapiens
  chr3:142683691-142683734
  hypo
cgggcgcggtggctcacgcctgtactcccagcacacagatcac

SEQ ID NO: 15936 - DNA, 322 bp, Homo sapiens; identical to SEQ ID NO: 7339
  chr3:143316169-143316491
  hypo

SEQ ID NO: 15937 - DNA, 347 bp, Homo sapiens; identical to SEQ ID NO: 8495
  chr3:147138422-147138769
  hyper

SEQ ID NO: 15938 - DNA, 84 bp, Homo sapiens
  chr3:153840393-153840477
  hyper
gggccccagaaaagttcttcggaacaaaaactccccctccaaaggctgccctcccaggagaacgagctcctcgagaatccttcc

SEQ ID NO: 15939 - DNA, 54 bp, Homo sapiens; identical to SEQ ID NO: 7349
  chr3:169540679-169540733
  hypo

SEQ ID NO: 15940 - DNA, 217 bp, Homo sapiens
  chr3:183217407-183217624
  hypo
cgcatgcaaactccacccacttcttattctcactctccagctcatgctctgttagcgggagcttggccacctccaggcggctgcgcctcagggggtccaggcaggtcacctctgccacaaaccgttcatccttcgtgcagccgccaatgatcatgaacacctcagactggaactcatgcatcctgggcttggtgcgttccgaaatgatctggaaatc

SEQ ID NO: 15941 - DNA, 334 bp, Homo sapiens; identical to SEQ ID NO: 6585
  chr3:187443068-187443402
  hypo

SEQ ID NO: 15942 - DNA, 46 bp, Homo sapiens; identical to SEQ ID NO: 7356
  chr3:187455297-187455343
  binary

SEQ ID NO: 15943 - DNA, 447 bp, Homo sapiens; identical to SEQ ID NO: 7357
  chr3:187456666-187457113
  binary

SEQ ID NO: 15944 - DNA, 62 bp, Homo sapiens
  chr3:193419641-193419703
  hypo
tttcttatcctgttggtggagtgaggcatttggacctggatgctctccccattgggcgcccc

SEQ ID NO: 15945 - DNA, 275 bp, Homo sapiens
  chr3:193419732-193420007
  hypo
ctatgattggctggccttttgatgtgcaggtactacaagttggtcacaaacttgtgtacaatgggcctgttctggttcatgtgaaaatcaacatccttttttgtgttaccgggtgacaggatgctacaatactattagcatttgcaaagagtgtgctctgtccaagggtgtaaccacaggtcgtgtgctgctcactttgtgtttctctattatgtgagagacacaaagaagctgagggctcgcaaaggcctgtcaaatcttgtaatgtggcgctc

SEQ ID NO: 15946 - DNA, 324 bp, Homo sapiens; identical to SEQ ID NO: 13987
  chr3:194048948-194049272
  hypo

SEQ ID NO: 15947 - DNA, 363 bp, Homo sapiens; identical to SEQ ID NO: 13988
  chr3:195536308-195536671
  hypo

SEQ ID NO: 15948 - DNA, 583 bp, Homo sapiens
  chr3:195599104-195599687
  binary
cgagcggggccaggtcagcatccatccccgcccagtactcactcgtcaatcctgtccgggaagccccagcagtggcgggggtcactgtcgccatgccctgtgtggatgaagctgttctgcaggggctggctgatgtcctgggccgacaggccggccacggaggtcaccacgttgcgagggaagggccccacacacagcgtccgtgtgttctggccacgccaccagtagttctcggccctgcgcgacagagatggcacggtgaacgccaggcgtggcggggcagccccggcactgggaccctcctcacaccctggccactgtggcagaagggggatggagctcaggcctcaggaccaggctgtgtgccaccggccctcctccccaacagcccccgtgacccaccatgccccgtacaggcctgtttgcacacggccttacccacaactctctaggtgggtcaggcagctttccctatggtttgcaaataaggaggcacgctggaagctgctgcagcaggcaacatgacctgtccacggttaccagaaagatcccagcagacctgggacccaacgccagctttcag

SEQ ID NO: 15949 - DNA, 247 bp, Homo sapiens
  chr3:195599840-195600087
  hypo
gccttgcactaggctgggggccaggcctccagctacaacctgcctcccgaatgcagacgcgggagagtctaggagcactcgggcaactcagtccctccctccaccgcttcacctgcttccggagctttccaccacctcccggaaggcctgcgggagcctccccgtctcctcaggaggggctctacctgtgtccaaaagggaactcagctctcccacagtgaccagacagtagggctgccagtccccc

SEQ ID NO: 15950 - DNA, 49 bp, Homo sapiens
  chr3:195601363-195601412
  hypo
cctcgggatggcgcccacgcacactccgaggcacaagaaactccccctc

SEQ ID NO: 15951 - DNA, 78 bp, Homo sapiens; identical to SEQ ID NO: 11647
  chr3:196387781-196387859
  hypo

SEQ ID NO: 15952 - DNA, 211 bp, Homo sapiens
  chr3:197685522-197685733
  hypo
cgggggaaaacaaacggttgagactttaactcgagtaacttacatgtgcaatggcaaatgagactcaaaagcaaatacatgctcttccttactgagatgatgcagcatttgtaaataataaatgtatgtttttatgtttttctcctcccatatggaaattaagtcaaaagtactcaagtcaccgttgccaaaggaggagtcctgtggttta

SEQ ID NO: 15953 - DNA, 400 bp, Homo sapiens
  chr3:24160995-24161395
  hypo
cggttccttggaggctgagtctgtggggggcttagtgtcgaggaggggccagggcttgtacccctgttcatggaggagcaacaagaacggcgttgctggcacagagcgaaggcctggcagtccaccccaggcctgcactgcacactgaagagctgtcgcccggggcacaggtgaggggcttcgctgggctgaggcatcaacaggtcaagcgcgtcattgaggaccgaggctctagaaaaagctctgaggcggcacgtggtgttttgagcagaatcataaagaagaaaacatcttacttttttcattgtttctggaaatactgcacgtctaaattgagcaaagtacacttgagggtcacacacgcacgcgcatacactcacacgcacacacgccccacacc

SEQ ID NO: 15954 - DNA, 136 bp, Homo sapiens
  chr3:41289199-41289335
  hypo
gtgtgacagaaggaatgcgtttgaacttggcccacccctggctgagtctaggctagactagtggggccatgctgcgcccccgcacacagcaggcccagtgaggctggaaaggacaaactactggcagagcagcatc

SEQ ID NO: 15955 - DNA, 242 bp, Homo sapiens
  chr3:42190950-42191192
  hypo
cggggaggcatggcagcgttttacttgacgttgatggtgctgtgaagtccattctttcctctgcaagactactgactatgcagaaatttatcgaagcggattattatgaactagactggtattatgaagaatgctcggatggtaattatggcccctgcaaaacagagccgggatgtataggggtattgtctccttctgggtggggggtgtcctgaaacctttaggggagacaggcggctggc

SEQ ID NO: 15956 - DNA, 81 bp, Homo sapiens
  chr3:47239328-47239409
  hypo
cgagaccccgtctcaaaaagacaaaacaaaacaggcagggcacggtggctcacgcctgatcttgcggtgagctgagatcgc

SEQ ID NO: 15957 - DNA, 118 bp, Homo sapiens
  chr3:48731393-48731511
  hypo
cgtttcagcaggtgccgacgagcgccttacaaacgactggctgaacacctttcctcccaggcctctctgccccagcatcactcaatctgctcagtcctcgactgctgcaggggaatgc

SEQ ID NO: 15958 - DNA, 557 bp, Homo sapiens
  chr3:49720262-49720819
  hypo
cggtgtcttgcaggtgcgtggtggaggctggctttcctttcagcagtgactgcctgccagacctcagcgtgtgggctgagatgctggacaaatcgcccatcagatacatccctcaggtatgcagccccctccttgccctgtgtgctgcccatccatccagaatccagggcccagctcaacacagctccccactcttccccaaacacccaggtgaagacaccactgttactgatgttgggccaggaggaccggcgtgtgcccttcaagcagggcatggagtattaccgtgccctcaagacccggaatgtgcctgttcggtgagtgcagcatgaaggccctggcagctggtgggcaggtgagcacaggaggaccctccaaccttaaatgttgctgactaatccctacaggctcctgctctatcccaaaagcacccacgcattatcagaggtggaggtggagtcagacagcttcatgaatgctgtgctctggctacgcacacacttgggcagctgaagccctgccattctgcatgagctgatcagcctgtgccacacttc

SEQ ID NO: 15959 - DNA, 333 bp, Homo sapiens; identical to SEQ ID NO: 7372
  chr3:53032401-53032734
  hypo

SEQ ID NO: 15960 - DNA, 435 bp, Homo sapiens
  chr3:66452230-66452665
  hypo
cgacctgcgggagtcacctgtcaaacctcccatccatctcctggccaacccagccaacagctccaaaggcctggttagcgcttgccaaatcaagtggcaggtactgggggcaatgctcacatgggtccttgtactcatgtccttggaagtagccgcgacatgtgcactagcccccgcttcccacccacacacacaatgagttccactgcaggcccggcccccacataggcagggatggaggctgcgctcacatcagctctgcaagatcccccaaacatgccccttcccatgtgccctgtgtgggactctgcccctccctccgaggaatgccatggagccagctggaaccactgggcaggaagtcgcatacccaggtcactaactgctcctctctgcctgtaatttgggatccagaaattctcccttccctcccgc

SEQ ID NO: 15961 - DNA, 1017 bp, Homo sapiens
  chr4:100573606-100574623
  hypo
cgtctccacatgtttgatttccccctcgactttgctgaccacgaactccaaggccttggtctgagacttcttggactggatgtagagctggtcggcagtggcccgggccccactgcccttcctcagacctgcagccacagaggccgcgctgctcctgaggaggctctgctccaccctggccccaacacccccacattttaagtccaggaaagttgaccagcgcccaaagcccacttcggagagcgtggtggaggactcccgggagctgatgttcagagcctcaaagtaggggtaagccaggctccggaaggcccgggaggtcaggttacgcacctctttgtccgcatcgtccagttcgctcacggcactggaggctccgctggagtagtccaccagctccttcgcccggatggccccgcacctggtttgcaggcgagcaggtacagcaatgaatttctttgcatggtcctgagccactgctgcagccgggttttgcttcagcgaacttgaattgtgttcagcagctgtagagacgcggaggctcatgtcgccttcatgcttggcagcataaataatgttttgctttgcacgcacgttgctaggctcatttatagcccgggaagccggtttgattgataggaggatctggcttgctgcactcccacagctgcttgcggcggcggctgctgcccctgaagctgcctccggggtctcaggcaagggctcagtcaggggggcagtgccaggcccagtgggtgggggagtggggccactgtcagaggggccactgcccacttcggtgctgctggtgtcgcggccactgcggcctgcattggggcgggccaggtcgctgcttgtagggctgggcgtccgggtggtgttggtgctgggagtggtgctgaggtagcagctgttgtcgtcgtcctcttcggtcagactggtgatgtcccctggggtctcgtcgctgccaccaaaggaagcataatccacgaacgagtagatcacgttgttgtcctc

SEQ ID NO: 15962 - DNA, 168 bp, Homo sapiens
  chr4:103421142-103421310
  hypo
cgcacccggctcacagaatttcttaaaaagtcattgtgttcagtctttatggatcctctaaattccagctgctcagcctcccggagctaaatgagatcacttaaaggtcgactgttggggcctccaaggtcgcctcggagactcacctcataggcaatcaaatggatc

SEQ ID NO: 15963 - DNA, 69 bp, Homo sapiens
  chr4:1036539-1036608
  binary
cccacacacccaccccacacaccaacacacacccacccatccccgcacaccgacacacaacccaccccc

SEQ ID NO: 15964 - DNA, 74 bp, Homo sapiens
  chr4:1214821-1214895
  hypo
cggcctgagatattcgtaaacaagaaaaaacaaaaattttgaaattatgaaaatatccacaatgcatgtcgatc

SEQ ID NO: 15965 - DNA, 254 bp, Homo sapiens
  chr4:1215162-1215416
  hypo
ctctgggactcagaaattccactcctaggtacaaacccaagagacgtgagtctatgtgcacaaaaaagacgggcagaaatgtgttcacacaagttttgtttgtaatattagccaaaaacttacaaaatgcatcaccaagagtctggagaagcaaatcgtgctgtgttcacgtgatggaaccgttatcagaaactgctgggtcgtatgaaaacacaggtgagacccagaggcatcaccccgactgacgggaggcg

SEQ ID NO: 15966 - DNA, 73 bp, Homo sapiens
  chr4:1215451-1215524
  hypo
gcacagctggggaaggccctctgctctaggaagcgggacccgggtcctcgcagggtcgtcgcggggccgccac

SEQ ID NO: 15967 - DNA, 71 bp, Homo sapiens
  chr4:1282403-1282474
  hypo
cggagagtggcagacacgatgcgaaccgtgaaaggacgcaaagagtacagagtgcatgcttccatctctat

SEQ ID NO: 15968 - DNA, 136 bp, Homo sapiens
  chr4:1336902-1337038
  hypo
aagaccacggactagcgggtttaaacaatggacatttatttcttcacggttctagaggagatgctggcagggttggctcccggtgaggcctctcttcccggcttgcagacggcccccttctcactgtgtacctctc

SEQ ID NO: 15969 - DNA, 276 bp, Homo sapiens
  chr4:1541591-1541867
  hypo
cgggcggcagccgtggtggccctaggaggccaccctgcccgagcacccgcttggccctgcggccgccgtcaggcctcagatgtcttacatattaatttcccgctgcagaacatttgccgagcgcagctcaaacccagttagctggattgatgaaggtggcaaaaggatacgacacacgctgattccaccttttcagcttcgattagctccggccgggagtctgtccccgtcagagctccatcacgcggccggcggagaactggggagggaccggcc

SEQ ID NO: 15970 - DNA, 132 bp, Homo sapiens
  chr4:183808118-183808250
  hypo
cggggccaggttggcgaggcacactgcacattcaggaaaggatggctgcagaagatgggagcggcccaggtgtccattggtgcgtgaatggctaaacaaaaggcagtatgtgaacacaatgggcgattcttc

SEQ ID NO: 15971 - DNA, 57 bp, Homo sapiens; identical to SEQ ID NO: 8535
  chr4:1993659-1993716
  hypo

SEQ ID NO: 15972 - DNA, 411 bp, Homo sapiens
  chr4:1994335-1994746
  hypo
agccccaggccttcctgacacccactccctgcgtcaggcgccagagacccgtcctacgagggctgcggccatcacgtccccgcgagcgccgcctcctggtggcctctgagtgggaggaccttccagcgcttccctcactgtcctcatgggcttcctgccctgagggaagttggctcgaagggcagagatcagaggtcgtgccaggggagcctgcctgctgccaagcccctctgcatctgccctgcaggacacccagctgccctcaggagtcaagaaccccccgcgtggcccagccccttctgttccttgggcaaccagggagggtgtcgccccggccgctgaccctgcgccccgggccctcactcccgacgcccgcccgagctgagtgcgcgatgcggcagaagatgctac

SEQ ID NO: 15973 - DNA, 206 bp, Homo sapiens
  chr4:1994830-1995036
  hypo
agccccagggaaaccctacgcctgccaagaggcaagcgcgcggcattttataaaaatggtaaggataaaaaaagtcggggatgttaatttaaaacaaaaaggaccactgttgtggagtcaatgttttctctccagaacgcgcatgttgaagcctggctcgctctactggggcttcttgtaggaaaacgcttggctttcccgggcgc

SEQ ID NO: 15974 - DNA, 108 bp, Homo sapiens
  chr4:24534559-24534667
  hypo
cgacgaggcaaattaaatctgtccataattcgagatagctgctggcgtacattgtctgcggacatcagggacctgtagttaatgaagttgtcataacaccactgaacc

SEQ ID NO: 15975 - DNA, 65 bp, Homo sapiens
  chr4:25013897-25013962
  hypo
cgcgggcttgccgcaatgctgaaattagttcaacacatctgatcaaagccacaacacacctgtaa

SEQ ID NO: 15976 - DNA, 81 bp, Homo sapiens
  chr4:2672891-2672972
  hypo
cgtgaggtgtcctcagtgcatgcactgtgctctcctggtcagccagcgagttgtggacagcttaagaagcccttccgtggc

SEQ ID NO: 15977 - DNA, 242 bp, Homo sapiens
  chr4:3245192-3245434
  hypo
cgaggacactcgcttgccgggcctgggcctcctgggaaggagggagctgctcagaatgccgcatgacaactgaaggcaacctggaaggttcaggggccgctcttcccccatgtgcctgtcacgctctggtgcagtcaaaggaacgccttcccctcagttgtttctaagagcagagtctcccgctgcaatctgggtggtaactgccagccttggaggatcgtggccaacgtggacctgcctac

SEQ ID NO: 15978 - DNA, 527 bp, Homo sapiens
  chr4:3252217-3252744
  hypo
cggtgagggtcttgcagggtgtgaaggtcataggtgtgcggtgaaggtcacaggtgtggggtgatggttttgggtgtggggagggtcttgcacggagcgagggtggcagcaagagctggaagctgcagggggagaatggcagcagagagcacccggccctgtgggcggcctggacagggctgggcctggggctgccggagagcctgtcagcttccaggatgggagtggcctcactcagctgctccacctccgggtcaggcaggtgagcctggggcagagaggctgagagcacctgagccacttgtgggagaggccacccccactgcccccctcaggcgaggagccggcctccagcacagcagaagggaacccccagtccccagccctagtgggagtggggaagaggcccagcaaggccccggacagaccgccagcctgtgaggtctccgctttcagttgcgttgatttgattttttctgagccttgaaggaggggtccggggcctggccctgcccaaaggcccctag

SEQ ID NO: 15979 - DNA, 201 bp, Homo sapiens
  chr4:3252797-3252998
  hypo
agcggctggcttgcgacgtgagggctgaggtgtgagcctgggtatcttcagaggttcggtggacacaggcagctgcccgcggccccactgttcccgtggcctcctagtcctgctcaggcacctggtgaggaagggacgcagagggcagtgggaggtggccacgactgttccagcaggctcccctctgactcaggaattcac

SEQ ID NO: 15980 - DNA, 174 bp, Homo sapiens
  chr4:57777264-57777438
  hypo
cgaagaccaaaccctttcgctgtaagccatgccaatatgaagcagaatctgaagaacagtttgtgcatcacatcagagttcacagtgctaagaaattttttgtggaagagagtgcagagaagcaggcaaaagccagggaatctggctcttccactgcagaagagggagatttct

SEQ ID NO: 15981 - DNA, 32 bp, Homo sapiens
  chr4:619879-619911
  hypo
cgaggtgggtctgtgcggagcctcagggaggc

SEQ ID NO: 15982 - DNA, 44 bp, Homo sapiens; identical to SEQ ID NO: 7404
  chr4:628787-628831
  hypo

SEQ ID NO: 15983 - DNA, 421 bp, Homo sapiens; identical to SEQ ID NO: 7405
  chr4:628950-629371
  hypo

SEQ ID NO: 15984 - DNA, 161 bp, Homo sapiens
  chr4:738129-738290
  hypo
cgccggctccggctgccccgtctctgtctcctgtgctccccacgcctgcaccccacaggcccacacgcccgttctgcatcctggggagacccctgcagacactttgcggacggctttcctttgacgcttactccgctccgggggtccagagtctcttaatg

SEQ ID NO: 15985 - DNA, 298 bp, Homo sapiens
  chr4:8372577-8372875
  hypo
cgcagaaatgcccatcaacccttggggcactcccgtgaggccctgtcctccctttacctcgccgtcggctctgccaatcggtgagtccagaacaaagtcaggaggagcgatcacgtctaccagggcaactgcatcgtctttcagctgttggaaaacaaagcccagacacttggcacctcccgggaatttccatggtgaccaaagcataacagccccgtgtgtggttgccaggacccactagcaacgggtcacctgagcggcacgtgcggctctgctgcccatgcgtgatctcttcacc

SEQ ID NO: 15986 - DNA, 252 bp, Homo sapiens
  chr5:132607933-132608185
  hypo
cggccatttcttgaagccaacaaccaaaggaatgagtgtttgccaagaagcaatagctcttgtaacacttacactcactgcattcttaacgcattgtttgtctgtggaaaaagcagtttgcccagcgtggtggtaaggagggcatgatggaaagccggcgtggagggagagaggaggcacgcgcgtgcagcgccgtgacgtgcatttagttacacgacggcttctggaggcccacaactgattaatatacac

SEQ ID NO: 15987 - DNA, 625 bp, Homo sapiens; identical to SEQ ID NO: 8562
  chr5:142781875-142782500
  binary

SEQ ID NO: 15988 - DNA, 78 bp, Homo sapiens; identical to SEQ ID NO: 8563
  chr5:142782625-142782703
  binary

SEQ ID NO: 15989 - DNA, 453 bp, Homo sapiens; identical to SEQ ID NO: 11727
  chr5:14328256-14328709
  hypo

SEQ ID NO: 15990 - DNA, 373 bp, Homo sapiens
  chr5:1476334-1476707
  hypo
cggagcacaggtgctgggcttggaggtgggaatgcattcccctggctcggcgcctactcagctttttgtattgttcagagctgcctgtggtgggggttgagtggagctttgcgggacagagactgccgggcccatttctaccctcggacacatgctttgggagggagaggatgggaacgtgagggaacgggccgcccagctgaatcttcagggtgtcagcggagtgtgaacaaagtggctcggaggtcagagccaggcacactctgatgggcccggccgtggctgtgttcccctctgggctctctggagaggcgagttcccagccatgccccgacctgctgcagcaggagcctgggggtggggccggtggacc

SEQ ID NO: 15991 - DNA, 135 bp, Homo sapiens
  chr5:158139227-158139362
  hypo
cggcagagccgtatccgttcatgctcgtggtgacggagttatagttggtctgctggggagtggtgctcggcacgtacccgtgtggtgatacgctgcttgagttgcgggtgaaacctgaggggcgggggcaaaacc

SEQ ID NO: 15992 - DNA, 131 bp, Homo sapiens; identical to SEQ ID NO: 11728
  chr5:1641261-1641392
  hypo

SEQ ID NO: 15993 - DNA, 293 bp, Homo sapiens
  chr5:171478667-171478960
  hypo
cgagggacgttgcaaaggggctagtgacagagaagaaacccagcagaaggtgggcctaggaggacaaggcaggcgaggaagagagtgactggcagcactggctgccaccaggaggtcaagtccagccagccgtatccatgcgagtcagccaccaggatgttggtattgaccatgccagcagcggctgcagtgggctgagaaaggaatttctcagtgggtggaggaagaaattgtgacagggcttcgcagagaaagagagagacagggcagtaaagaaagatgtgggactgagc

SEQ ID NO: 15994 - DNA, 266 bp, Homo sapiens
  chr5:171523258-171523524
  hypo
cggcccacatgccatcttacgttacctgcagcgtgggagtctgcaacctctgagctggcaataaattgcctgagccagagtcctggccttccctgcccctcccacaccagcagggccagctgagatcctgtcctcccagcccccgctaagccccactctccctggccttacggaggcggcatccacggcgtcctcctcttccccctcatcccggccgtcttcgatctcttccatcacctcggccttggcctcagccaccagctccc

SEQ ID NO: 15995 - DNA, 174 bp, Homo sapiens
  chr5:171533446-171533620
  hypo
cgaagggcccgggggggctcagaaacgcctgaagacccccaggccccaacctctcctttggagctagcagcaccaggagaacgctaccactgcacctccccagccccgtccaccacatattccagccctaatcccggcgcaggcaccccggcaggtggccctgcccctgcccct

SEQ ID NO: 15996 - DNA, 259 bp, Homo sapiens
  chr5:172353785-172354044
  hypo
cggggcacagcagacgcacgcacgcagtggataccagctattaccattattgttgctctcatcacagccacatcatcatccttagttgaactaattacctaagatcccacagggagctatggcagaaccaggatctgttctgcctccaggtcgcaccgtgagaacaggtctgtgggtggcccagtcagctgtgaccacatggctgcctcccccacacctcactctcctcctgctcagactcctcccatcgatagtggct

SEQ ID NO: 15997 - DNA, 84 bp, Homo sapiens
  chr5:172354118-172354202
  hypo
gcagacaggagagcacgcatacctttcgtgcacaccaacacacatgagctcacatggccccagacacgtgcacagaatgggccc

SEQ ID NO: 15998 - DNA, 42 bp, Homo sapiens; identical to SEQ ID NO: 7429
  chr5:1729774-1729816
  hypo

SEQ ID NO: 15999 - DNA, 331 bp, Homo sapiens; identical to SEQ ID NO: 7430
  chr5:1729886-1730217
  hypo

SEQ ID NO: 16000 - DNA, 56 bp, Homo sapiens; identical to SEQ ID NO: 7431
  chr5:1730252-1730308
  hypo

SEQ ID NO: 16001 - DNA, 114 bp, Homo sapiens
  chr5:176225713-176225827
  hypo
cggggagccgcgcggggcaggagccaggcccacagacagcaagcagcgttctgcttggctgatccacgatgtcggggctgcggcatctccgcttccgcccggagagtgacggcg

SEQ ID NO: 16002 - DNA, 119 bp, Homo sapiens
  chr5:27523835-27523954
  hypo
cgcacctgctgaggatgagcccctcgaggagcggcgcggggtgtgtgggagaacaatcacgggctccggccaccgtgcacagccacgcacaccggctagcacagtggggagggcagctc

SEQ ID NO: 16003 - DNA, 52 bp, Homo sapiens; identical to SEQ ID NO: 14080
  chr5:3324702-3324754
  hypo

SEQ ID NO: 16004 - DNA, 283 bp, Homo sapiens; identical to SEQ ID NO: 14081
  chr5:3325333-3325616
  hypo

SEQ ID NO: 16005 - DNA, 114 bp, Homo sapiens; identical to SEQ ID NO: 12838
  chr5:3740590-3740704
  hypo

SEQ ID NO: 16006 - DNA, 89 bp, Homo sapiens
  chr5:40680875-40680964
  hyper
cgtatcgcgagcctggagattttggtggccgcagttggtaagtggctacaatccagaaagtaggatcgagttgctccccttgtcttatc

SEQ ID NO: 16007 - DNA, 352 bp, Homo sapiens
  chr5:488144-488496
  hypo
cgctctggggaccaggagggcgggatttcaacagcgccatcattaaccctgaagctatggagtgggcgggcagggcctgggaactgtggaagatacaaagaagcctcgcgaaagctgccagtcgttctgagctgggaggaaggaggtggagggacgggacgcccccgggaggggagtttgaggacagggtttcacgccctcctttgctgactgaccgatggggggtgagacggggcccaggcctcccacggctcgcccgctctggagcggtggctccgttgctcaccacggtgactgcgtcgttcagcagcgactccccgaagacgatgatgaacaggacctcgttgacatg

SEQ ID NO: 16008 - DNA, 52 bp, Homo sapiens
  chr5:488553-488605
  hypo
aaacaggaggaagtccagcagcccaatctgcaggtcgcctggaagacaagcc

SEQ ID NO: 16009 - DNA, 386 bp, Homo sapiens; identical to SEQ ID NO: 8590
  chr5:510026-510412
  hypo

SEQ ID NO: 16010 - DNA, 76 bp, Homo sapiens; identical to SEQ ID NO: 7437
  chr5:54518558-54518634
  hyper

SEQ ID NO: 16011 - DNA, 61 bp, Homo sapiens
  chr5:554571-554632
  hypo
tgacccgggggtgggtcacgggataaaccaggggtggggggctgggtcacgggatgaacgg

SEQ ID NO: 16012 - DNA, 61 bp, Homo sapiens
  chr5:554751-554812
  hypo
gatgaacggggggcgggtcacaggatgaaccgtgggtgggtcatgggataaaccagggtgg

SEQ ID NO: 16013 - DNA, 140 bp, Homo sapiens
  chr5:554931-555071
  hypo
acgggatgaacggggttgggggctgggtcacgggatgaacggggggtgggtcacgggatgaacagggggtgggtcacgggataaaccggggtggggggctgggtcatgggatgaacggggggtgggtcacgggatgaacc

SEQ ID NO: 16014 - DNA, 161 bp, Homo sapiens
  chr5:600977-601138
  hypo
cgcccaccatggcgttagggccacagcctcctgccccatgtgccaggcccggctctgcccagctccctgcagctgcgccagtgtgtgctgtgactcgtgctcctggtttgtcatctgcctctcagtagacaccacggccttcaagctttctccgctccgtg

SEQ ID NO: 16015 - DNA, 263 bp, Homo sapiens
  chr5:601222-601485
  hypo
agaagtgaacggcgcggccctccctgagttccggcctggctctggataccaaggagcaaggtggtcaggggtcaggggctggagtggggagattgcctgggagggggctggagggtgtggtggaactgcaggttctctccttgacatgcctgtgggggagcctttcccggccctctctccgctggttttcaccctttctccggtgcagccacactgggcatcccaccccagggatccaggaagggggcgtgtcggccgagtgc

SEQ ID NO: 16016 - DNA, 98 bp, Homo sapiens
  chr5:66511687-66511785
  hyper
cgtgcccttgccctgcttcagccccacagccccgcctgggttgctggtctgacccggctgggcagggtggctgtgagctgccggtgtggccccaggca

SEQ ID NO: 16017 - DNA, 240 bp, Homo sapiens; identical to SEQ ID NO: 15099
  chr5:79911325-79911565
  hypo

SEQ ID NO: 16018 - DNA, 81 bp, Homo sapiens; identical to SEQ ID NO: 14109
  chr5:87955380-87955461
  hyper

SEQ ID NO: 16019 - DNA, 132 bp, Homo sapiens
  chr5:96121466-96121598
  hypo
cgcgactttgtgcagcgtgtattacctgacgagctgaaatgcattgttaatgagactcgcccgatcattactgctgactgctgtgtgtgttccttttaaaaggccagtcaaagagtcccatccatcatcctc

SEQ ID NO: 16020 - DNA, 45 bp, Homo sapiens; identical to SEQ ID NO: 8596
  chr5:98200950-98200995
  hypo

SEQ ID NO: 16021 - DNA, 227 bp, Homo sapiens; identical to SEQ ID NO: 7442
  chr6:10417842-10418069
  hyper

SEQ ID NO: 16022 - DNA, 142 bp, Homo sapiens
  chr6:106456830-106456972
  hypo
cgcagcggtggccaggtccatggccaggcattgtctctgactcctaagaccccagcaactgaacacaggcccctcacggcagtggttatattctgccacgttctatgtctaccctttcgctcacgcccccttctgtcttagc

SEQ ID NO: 16023 - DNA, 334 bp, Homo sapiens; identical to SEQ ID NO: 7445
  chr6:106959606-106959940
  hyper

SEQ ID NO: 16024 - DNA, 263 bp, Homo sapiens; identical to SEQ ID NO: 7446
  chr6:106960046-106960309
  hyper

SEQ ID NO: 16025 - DNA, 155 bp, Homo sapiens; identical to SEQ ID NO: 7447
  chr6:106961023-106961178
  binary

SEQ ID NO: 16026 - DNA, 85 bp, Homo sapiens
  chr6:109053387-109053472
  hypo
cggagtgatggatgcggcaggagtgttcaagcagtgcctctcccatctgcagcttcgtccggtttccagtcaagcactactgcac

SEQ ID NO: 16027 - DNA, 93 bp, Homo sapiens
  chr6:110842285-110842378
  hypo
cgcaatcacacctcaccatcctagcctagtgccggctctcagccggtgtttaagggagttgttcagtaaaggggccctccccggcaccgcacc

SEQ ID NO: 16028 - DNA, 306 bp, Homo sapiens
  chr6:1523653-1523959
  hypo
cgccttgcttggtttccactcctcttgaaggaagaggtgctggcatctgcaccattcttagcgtcggcactgctttgcaccccccggctggccagcgcgggatgtgggtggggaaatagccactacagtccggagtctccccactccctccccaggcccacttccccgacgaagtttcactccattgttcctgggcatctccaggggtgtctagtttgaacaagaaaaggaatgttctggatggctggtcctgggcgctcaccgggaatgaacgtgagccactctttcgcacacaggccactctgc

SEQ ID NO: 16029 - DNA, 395 bp, Homo sapiens
  chr6:15513386-15513781
  hypo
cggtgtggggtgcgtgtgtcccctctgctggtgagcatggcaggccgtcactaaaggtgcgggccgtctcccgtgtctggcagggatacagagctgcggcagcgcaggcagctgttcgaggctggcctccactcctccgcacgctatggcagccacgatggcagcagcacggtggcggacgggaagaaaaagcctcgaaagtggctgcagttggagacgtcagagaggaggtgtcagatctgccagcacctgtgctacctgtccatggtgagcccgcctggccctgccggcgccctcgcatgtagtgcttggcctgagagctccggggttgcccccagaagagggagggcgctctctgcccaggagacctgctgtgctcccatctctggagccgg

SEQ ID NO: 16030 - DNA, 48 bp, Homo sapiens
  chr6:15513981-15514029
  hypo
cccattctttctgaggcagtgaggggcgggtttccagtactgggcagc

SEQ ID NO: 16031 - DNA, 62 bp, Homo sapiens
  chr6:158057907-158057969
  hypo
cggtgtgccactgacgcccctcccctcatcgatgctgtggttgcctaaaggttctgtgttcc

SEQ ID NO: 16032 - DNA, 85 bp, Homo sapiens
  chr6:167836474-167836559
  hypo
cggctccctcatacactgcggcttcccccccaacacatgacggctcacccacatctggcggctccccctctacacggctcccgtc

SEQ ID NO: 16033 - DNA, 305 bp, Homo sapiens
  chr6:167836629-167836934
  hypo
cagcagttcccacacacacactgcggctcccccgcacatggtggcttccccccaccacactggggttcccccccagggcagctcccacacacacgacggctccccccatactgtggcttccctgcacacgacagctccccccccacacaccatggttccccccacacggtggctccccctcacacagcagctcccccgctacacggcggctcccccgacacggtggctccccacacgtaagcagcagctccccccacacacggccctccccacacacacacacccggcggctccccccaccacac

SEQ ID NO: 16034 - DNA, 644 bp, Homo sapiens
  chr6:168378621-168379265
  hypo
cgaagccgggacagataaagttcttctagtcactgccctcttggagtataccgttgaatccgggaagtagatcaatgaaataaacacagaatggttgtaaaatacagaacgctgggaagtggaggtgcgtggtcttacccgtgtttataattcagccgtcgcctaacctgagaaatcaaggatttctgcgtcgtgcgcgtgcccgctgagctgagctctgctgggatggggagtccttctccggctggaggctgagggcaggagctctcggtgagaggctgcggccagcggtgctgtgagccgggcgggggtcagcgcgggcggccggggcgaggctgacagcacagcaggggccgagctcccccgggtcaggcgggaccaggaagggatcatccttcttttgagggcacggagccaccgtcggagggcctgtgagaagggtgggaagctgagattacattcctattctgaaaatgtcacactgtggagggcggtggttcaagcgcagtaatggccatggagggagaacaccgcccggggacacccggggtggcagggaccggagccccggaaacctgagcaaaacgcgcaaaatggggaaaaccacccaggttttaatggaaattgtgcgaacagctgtcaac

SEQ ID NO: 16035 - DNA, 176 bp, Homo sapiens
  chr6:1708438-1708614
  hypo
cgtgaaacaaaatgcggcatctgggtatatctcaaaggtagggaaggaaacaactcgaaggctgtaactttcccgacacttgagacgtcactcctttgcaaggcagcattcccagcaggcagcgaagcgtgtttggagaagctggagggcagatgaggagtggagggaaggcgggt

SEQ ID NO: 16036 - DNA, 96 bp, Homo sapiens
  chr6:1708643-1708739
  hypo
aggcgttgtcaatacagcaacagcaacgaggacaaacatgccacacggtgggtccaagtctgaactgcccggggctaagtcagtcaccgcacaatc

SEQ ID NO: 16037 - DNA, 551 bp, Homo sapiens
  chr6:2434643-2435194
  hypo
cggggccgcccctgcccctggtccttcagtgttgctcaaactagaaacagaagccatgctggaagacagagctgctgacctaagcccaaagcccaggtaaggtgcagacaacaggcaggcactggagtggcaaggaccatcacgtggttcctgggtccatgcgtgttctgcccgggcgacagctggcactctgaaacaccactcacagctccagtcctggccctgccgccacgttagcttgtgctctcatgcagtcactgaccctccccagacctccgtgtttttatcaggagaatgagaagctggatgtcatcgctcctttgcaatgattctgaggtactgcatttagggagaaaaccccaccacacacatgctcaatacaaaccctatttctgggggtagatttgatttaaaacgtcaccataaaccgtttaaagcatccagtaatttactaataatgcgtttcctgatgaggggagggaaggccgcggtttcaatctctcctactgattcagtgtgtgctgttccctaaaataaaaatcagcttcatc

SEQ ID NO: 16038 - DNA, 52 bp, Homo sapiens
  chr6:27173864-27173916
  hyper
aatgtttccgcctggtttcaaaccggggacctttcgcgtgtgaggcgaacgt

SEQ ID NO: 16039 - DNA, 104 bp, Homo sapiens
  chr6:27428748-27428852
  hypo
cgacataattctgtgtgcctagtcactgattaatgacgttattctgtgtgcccagtgcactgggacaagatgtaccaaactgtcaacatcgtttaaagaaacac

SEQ ID NO: 16040 - DNA, 266 bp, Homo sapiens; identical to SEQ ID NO: 8626
  chr6:3285535-3285801
  hypo

SEQ ID NO: 16041 - DNA, 114 bp, Homo sapiens
  chr6:3654816-3654930
  hypo
cgcacaccagcggtcaagtgacaatgcggggcaggtcgctccacgggccgctaggcatcttcctgtgacctcctctggccagagcccctgggtgccaccactgcacagaaacac

SEQ ID NO: 16042 - DNA, 314 bp, Homo sapiens; identical to SEQ ID NO: 7482
  chr6:37023826-37024140
  hypo

SEQ ID NO: 16043 - DNA, 70 bp, Homo sapiens
  chr6:37450290-37450360
  hypo
cgaagatggattaactccgcactcccctgggatcgccacatgaccacttcaagtccccaagccgcccttc

SEQ ID NO: 16044 - DNA, 116 bp, Homo sapiens
  chr6:44077041-44077157
  hypo
cgcacggggaggttggagcggaacggccttgggctcccacctgcacagtaggatctcacccccggattgaccccggccctggccctcctccacactcttgacacaggaggaggcac

SEQ ID NO: 16045 - DNA, 133 bp, Homo sapiens
  chr6:7204388-7204521
  hypo
tcctccacaccctgggagagctggtgtgacctgccttccggacaagcatgactgaacccatacaacacctgaattactagaaggtgcctctgtactttacaggtggggccacaccaggaattgctcagttgcc

SEQ ID NO: 16046 - DNA, 124 bp, Homo sapiens
  chr6:7920003-7920127
  hypo
cgaatgaataagaaggcagtacagaatgagaacactggcttttacgaatgagaagggaagtcatcggagggttttcagaagaaacacgacaggatctggcttccaattatttctacagcatggc

SEQ ID NO: 16047 - DNA, 343 bp, Homo sapiens
  chr7:100034752-100035095
  hypo
cgcacctggccataaatggggcagctttaaggtaacggtccagtgtgccctgacctcccactcagacctgcacagcatttccggtgttccgttgcctccaaactcggaccggagttggcctgtatgagtgcgggcgagggtcgccgaccccatcccggactcccttctgggacacagcaactcttgcagctttttgtgactacttttaccttcgagagttccctgaaatattaatttgtataaaaagtagatatctggcacgggtgcggtagcgcatacctgcaattccaactctgggaggccaaggcgggaagatgtcttgaaaccctgagctggagacaag

SEQ ID NO: 16048 - DNA, 42 bp, Homo sapiens
  chr7:100035124-100035166
  hypo
ccattcccaatctctaccaaaagaatttaattttagccgggc

SEQ ID NO: 16049 - DNA, 236 bp, Homo sapiens
  chr7:100064586-100064822
  hypo
cggagggcccattgggcgcagggggcccaagccgtgggacccccgaggagggcagctgagccagctgctccgggctggccagggcgcgcagcagcccattctcctgctccagcgcagcgttccgctccgccaattcccggatctgctccttcagcacctccacctcctcccggaccgcaaacatgaggtgggacttcaccaagtcctgggggccccgggacaggcacagcgtcaac

SEQ ID NO: 16050 - DNA, 333 bp, Homo sapiens
  chr7:1001822-1002155
  binary
cgatgtgggccgcgaccgtcccggcccgtgcaggaccactgtgggcgaggggctgtgaccgtcccggcccgtgaaggatcaatgtgggcgaggggccgtgaccgtcacggcccgtgcaggatcaatgtgggcgaggggccgtgaccgtcccggcccatgcaggatcaatgtgggcaaggggccgtgaccgtcccggcccgttcaggacagtggcctataacctctgacatggggtcacaggagaatgcggcttctgccttgcccctcgcccctgccccgcctccacatacacagctgggctcccctgcagcctccacgctgcagaggccacgc

SEQ ID NO: 16051 - DNA, 32 bp, Homo sapiens; identical to SEQ ID NO: 10749
  chr7:105279344-105279376
  hypo

SEQ ID NO: 16052 - DNA, 55 bp, Homo sapiens
  chr7:127991607-127991662
  hyper
cgatggcgctccccaggggctccttgtctgggggcccagtgacccagcctcccgg

SEQ ID NO: 16053 - DNA, 194 bp, Homo sapiens
  chr7:129470923-129471117
  hypo
cgcatgacagggccggctcccccttctcaaagggcttcctcccactcatcccatccctaacagaatcgccgaggtgttcacgggccagagaaagcacaaacatggattcagaagtccaaagaaatgcagttcgttgcgcccaatcagagatagatgatttcattcaacaaggctggaagcccagttgggaagtc

SEQ ID NO: 16054 - DNA, 140 bp, Homo sapiens; identical to SEQ ID NO: 7500
  chr7:1315705-1315845
  hypo

SEQ ID NO: 16055 - DNA, 128 bp, Homo sapiens
  chr7:134862682-134862810
  hypo
cgtgaactcggcagtgggcagaaggaagccatatgtgcgctccccactcctgtcacccggcgacaagtaagggagtttttaggggcagcaggcttttgctgtacttcaatgccaaacctttcactcac

SEQ ID NO: 16056 - DNA, 158 bp, Homo sapiens
  chr7:134880754-134880912
  hypo
cgactcccatgactctactgccatgactgtggccctcgtccaagcccccattctccgccatctcctgctggccacacctccacgtgtactgcctgaaaatctgagcttcccagggtttccttggccccaggcccaacccacctgcagtgcatgatgga

SEQ ID NO: 16057 - DNA, 211 bp, Homo sapiens
  chr7:134880941-134881152
  hypo
ccagcacaataaagggctgctcggggcggactcctccaccctcagggcctgccgaggatgcccgagtcagtggctccactggctccgtgtggagctctgggcagggctcagcctctgggccactggcttctggtttcttctctgcacactgtcacaagcagggtggggacaagtcagccaggaaagggtcccccacaccagggtgtacacc

SEQ ID NO: 16058 - DNA, 170 bp, Homo sapiens
  chr7:138042035-138042205
  hypo
cggccaggtttttttttttaacaaaagaatcaaccgatgcctcacaagaaacaaacgcagcgcctgcttcagtaccagtccaaggagtggtcctgtttacctttttgcccctccctgcctccctgcctgtgtctgctttttttgcaaggaaaaaaaaaatcaagacaaat

SEQ ID NO: 16059 - DNA, 112 bp, Homo sapiens
  chr7:150006790-150006902
  hypo
cgggaccccactggaaatcggactgtccaactaatatcacagccacttctagggcccctggagctctggatcaaagctctctggctgactgcttctcagatctcggctttgc

SEQ ID NO: 16060 - DNA, 211 bp, Homo sapiens
  chr7:151411325-151411536
  hypo
cggcctaacttacgtttgacttctaagccttgaggaaaatgtgtgccaaggtatgggggaggcggcagggcttccgagagagccgtcctcccatcccagccctgccatcctcccacacgcacgctgccgtcctcccatccgcgccccgccgtgcctaggtggagaggcggcagggcttcccggagagccgtcctcccatccgcgacccgcc

SEQ ID NO: 16061 - DNA, 532 bp, Homo sapiens
  chr7:1533923-1534455
  hypo
cggaaggccgcagtgaaggtgaacagagcgcccagggcacgaggtgggggcagggtgaactggcaggagccccaggcggggctggaggggagtgtagaccaagaacccacggggtcacccatggggcttgaagggggacagagctgtgaggccagccggctggggaaggacagtgtgcggctgtctggacagaagcaggggcagacggtgcatctgagactgcgtgaagggtggcgtgcccgtggacgccctggaagcaactggaaggcgggggtccgggggaggctgcggctggggcttggagtcacgtggacgcagacggcagctgaatccctacagtggcgctgggacgccagcatgggagtgggagaagggtggcacccaggattgtggaggaggagcaggatggtgctgtgaccatgggaacagccgcccaactcccactggcccttcctgccgcagccggcccggcaccccgcagccccgcccagcccggcacacaggagccccaggcggcagcgcactcacttgc

SEQ ID NO: 16062 - DNA, 39 bp, Homo sapiens; identical to SEQ ID NO: 6613
  chr7:155581980-155582019
  hypo

SEQ ID NO: 16063 - DNA, 180 bp, Homo sapiens
  chr7:156832501-156832681
  hypo
cgcgggaccatcttataaggacacagtcacatcgaattgggggcccatcctactcctgcacagctaatcactaaccacatcttgttccgcagtaaagtcccattccgagacactggggctaggacttccacctgtctcttggacacatttcaacccgcagcaccaccactgaggaaacgc

SEQ ID NO: 16064 - DNA, 141 bp, Homo sapiens; identical to SEQ ID NO: 14231
  chr7:157281193-157281334
  hypo

SEQ ID NO: 16065 - DNA, 413 bp, Homo sapiens
  chr7:158075395-158075808
  hypo
cggctgatccctcctcgtgctcccacatgcagcagccagacacagacggctcatccctcctcgtgctcccacacacagcagccggacagacagctgatccctcctcgtgctcccacacacacagcagccggacacagatggcttgtccctccctgtgctcccacacacagcagcgggacacagagggctcatccctcctcatgctcccacacagcagcgggatatagacggtggtccctcctcgtgctcccacgcagcagcaggacatagacggctcgtccctcctcatgctcccacacgcacagcagccggacacagatggctgatccctcctcgtgctcccacatgcaggggcctcagctctcaggaggaaaacactcttgagagaagagaactgaggaaaggtagcgctg

SEQ ID NO: 16066 - DNA, 201 bp, Homo sapiens
  chr7:158075851-158076052
  hypo
acttcttgttacgttcatgccatgcttttgtattcgccacaataagaaaaccaagcaagtacttcagtcaggcggcagccgtcacaggtaaacaaactcctatgtgggaaatgaaccgaggctgtgagcctcaggcagctccccagacccccaagaggagagggagcagtgaccgagcaggccccgtctgcagttcacacc

SEQ ID NO: 16067 - DNA, 479 bp, Homo sapiens; identical to SEQ ID NO: 12966
  chr7:158270795-158271274
  hypo

SEQ ID NO: 16068 - DNA, 515 bp, Homo sapiens; identical to SEQ ID NO: 12967
  chr7:158282327-158282842
  hypo

SEQ ID NO: 16069 - DNA, 162 bp, Homo sapiens; identical to SEQ ID NO: 12968
  chr7:158282873-158283035
  hypo

SEQ ID NO: 16070 - DNA, 70 bp, Homo sapiens; identical to SEQ ID NO: 7518
  chr7:158349387-158349457
  hypo

SEQ ID NO: 16071 - DNA, 361 bp, Homo sapiens; identical to SEQ ID NO: 7519
  chr7:158349747-158350108
  hypo

SEQ ID NO: 16072 - DNA, 36 bp, Homo sapiens; identical to SEQ ID NO: 14246
  chr7:1733131-1733167
  hypo

SEQ ID NO: 16073 - DNA, 324 bp, Homo sapiens
  chr7:2019121-2019445
  hypo
cgcactggatggggcagcgccaacacaggcaccaaagcggagcccggagctccacctgcatctgcctggaaacctcttgcctgaggaccctgatgggtccacaaggcgggggagaggcagagagctctagaaaagcagcccggcctgcagaccctgctctaggggcgccgtgtgcaagcaggagctggggtgagggtggcctaggacagtgcagtggcagagagctggcagcatgtctgaagcggagcccaagggctgctggacacgcctggctgctgcactgcctgggctctgctctgagccacactcccgtgcagccatctc

SEQ ID NO: 16074 - DNA, 109 bp, Homo sapiens
  chr7:2024704-2024813
  hypo
cggttcattccatgtgtccactggacaggacctggggtactcagatcaaaacactttctgggtgtgtctgggagggtttgtggatgagatcagcatttgaatcggggac

SEQ ID NO: 16075 - DNA, 384 bp, Homo sapiens
  chr7:2024842-2025226
  hypo
ggcctcctccaaccccttgaggccggaatgaaatgaaaactggaggaggcgaccgttcctcccttgcctgcctggtggcctgagcggggcagctcccgttttccgcccaggactggggctttcaccacaggctccgctggttctcaggcctgcagagcggactgggcacagcacaggctcttccaggtctgctgtgcacagatgcagaccacgggatcctggctccatggccaagagcgagggcctcacagtcactctctcgggatagaccagtctaccgcacctggtgctctagggagcctaacatgcagctcgatctgctctccccacctgatactacctttagatggtgtgtctgtgtcttcggctctcaacagcgaagcc

SEQ ID NO: 16076 - DNA, 147 bp, Homo sapiens
  chr7:2068947-2069094
  hypo
cgaaagattacacgctgcatggctccatttcacaacatttttaaatgggcagaactggcgtgtgagaatcgggaaggcagggctttgggggaggtggaggagccggcaggtgaacttgggagccctggtgacaccgtgttcccgacc

SEQ ID NO: 16077 - DNA, 109 bp, Homo sapiens
  chr7:2069789-2069898
  hypo
cgcggaacccagagctgtgtacaggtgcatgtccgctacgccccgccccgcgctccacggaaggtccacacacagcctgaggaggttcccccagcccacagtgacgccc

SEQ ID NO: 16078 - DNA, 142 bp, Homo sapiens
  chr7:2070150-2070292
  hypo
cgcgggcccctgaacagccttgatgtgcagaggcccctgggtaagccagggcgccagtgacaggtggccggaccccgcaggagtggaacctgcccatctgcgcttgacgaaaatgcctccaaaacaaaccagacgccgcccc

SEQ ID NO: 16079 - DNA, 253 bp, Homo sapiens
  chr7:2071776-2072029
  hypo
cgggacgcccggccccagtccctgtccagtgcctggaacagaacaggtgctcaggaactgtgtgttcaattaaaaaatgaacgagtgaaaccatcagccaatcagtcctcggaaccacctcctgaggcaggctggagtcctccctttcagatgaggacaaggctccaggggaaggcgcgcgccccaggtctccagcctccgtgaagccgagcctgggctcttggccatcatgctaacgggcaggtgggaaagc

SEQ ID NO: 16080 - DNA, 309 bp, Homo sapiens
  chr7:2102525-2102834
  hypo
cgctgcattcccagggacgaaggtcaaaaggataacgctaagataaaaacaaagagaagccacagaagcgtggctctatgtacagaaaacataaaaatgggaaaagcggagcaatgtttaaagatatacacacaattaaactagaaagaaaaatgagggaagggactgctctacgtttagagcacggctccgtctgacagcggaggctgttctgtttcttacactgggactgagacacgggaacttgctgtattctttgagctgtatgtatatgttctatatgatctttgcacacgcaatgtgtttcac

SEQ ID NO: 16081 - DNA, 327 bp, Homo sapiens; identical to SEQ ID NO: 6617
  chr7:2208344-2208671
  hypo

SEQ ID NO: 16082 - DNA, 91 bp, Homo sapiens; identical to SEQ ID NO: 6618
  chr7:2208844-2208935
  hypo

SEQ ID NO: 16083 - DNA, 199 bp, Homo sapiens
  chr7:2222256-2222455
  hypo
cgtgccatgtggtggaagggagcgctgatccgtgccacagggtagacgccccttgagaacgtgctgagaggaaagcgccagcacagaggccacctatggtgcgattccactgatacacaacgtccagaacaggtaaacccagagacaaagagcagaggagtgactgccaggggctggggaaaggagaacagggaacttc

SEQ ID NO: 16084 - DNA, 290 bp, Homo sapiens
  chr7:2265241-2265531
  hypo
tgagtgactcagtgcagcagacacactccctgaggacccattcccgcaggtcccgtgctaagtcttgatgtggcccagccactgggctccaggctggggaacaggggaggggcaggaaacgggaaggtgaaaaagcctgggaagaggaagacgtcttttgagatgacattaagcatattagtgaaggcaacggcctcgaatgccacccatttatttaccagccaacggctccgtgggtcggaagtccagacgtaggtggctgcattctctgaccagggtctcccagacta

SEQ ID NO: 16085 - DNA, 361 bp, Homo sapiens
  chr7:2751985-2752346
  hypo
cggtggtggggacgtggcccagccaggaggcgggggagccgtcagtgtgggaggacaccccgcctgccagcgccgactcgggcatgtgctgtgagagtgactcggagcccggcaccagtgtgtcggagcccctcacccctgatgccgggagtcacaccttcgcctcggggccagaggaagggctgagctacctggcagcctcagaggctccgctgccacctgggggccctgcggaggccatcaaggagcatgaacggtggctggccatgtgcatccaggccctgcagcgggaagtggcagaggaggacctggtgcaggtggacagagccgtggacgccctcgaccgctgggagatgttcac

SEQ ID NO: 16086 - DNA, 62 bp, Homo sapiens
  chr7:29390389-29390451
  hypo
cggacgttgtcccaagaatttcatatgcattgtctcatttaattcccacaatgcggccgggc

SEQ ID NO: 16087 - DNA, 46 bp, Homo sapiens
  chr7:345250-345296
  hypo
cgctgtttgtacagagaaaggggtgcacagagccgtggacctgcag

SEQ ID NO: 16088 - DNA, 147 bp, Homo sapiens
  chr7:345608-345755
  hypo
ctcacggaaccacggcaggacgtggaagaaattatgtggcttgtttgtgtgtctgcaatcgcgtcaagaccgatggtccctcggctctggacagacgcccccccagccagctgaggatgcgaatattcatggcctggtgccgggtcc

SEQ ID NO: 16089 - DNA, 254 bp, Homo sapiens
  chr7:36124398-36124652
  hypo
cgctggcggatggacaccgccatgctagatctgtgcggtcgcccggggagcaccgggccattcctaacaagcgtgcagtcgagatgcagacaggaaggccaagggagggagaagggggcttcagcacacggcagcgcgtggcccctgggcccgaccccttctccggcagcgcagcagtcctccaccttgtcttgctaattcccagccactgccccgcctcaggtcatcctcctggcggtcagagtgacctactc

SEQ ID NO: 16090 - DNA, 335 bp, Homo sapiens
  chr7:36352569-36352904
  hypo
cggggacctgaccgggtgagtagcagatggcatccccggaagaggggaccaggagggccggggtgtggagggaggacagcagtgatgtggctgctcctggcaagagcttaggacgagatatggagaggagactgacgggagccacaggccagctcttccaaggcaggctaaggatgttgaggtggttctgcggcgctggggagcattgcaggcttgtgtgggagtaggaacaggtagaggagggggcctgcatccgcagtgccgggagcggcgcaggtatcggggcagggatgggggatggctctcgttgccggcatattattgtgcggtccttc

SEQ ID NO: 16091 - DNA, 259 bp, Homo sapiens; identical to SEQ ID NO: 14278
  chr7:42237185-42237444
  hypo

SEQ ID NO: 16092 - DNA, 51 bp, Homo sapiens
  chr7:44740672-44740723
  hypo
ctgccctgggataccgcgggggtgggagtatggggtggaggcttgcagctc

SEQ ID NO: 16093 - DNA, 225 bp, Homo sapiens
  chr7:4856619-4856844
  hypo
cgtttcaaggcgagggaaagggagctgggatggttctagggcttctgtgcgacctgaggaggagcgggtgtggggggtgcagctgggcctgtgcagaacctgcagccactgctccctgatgaagtggagcttgtcacggtcccctccctcagccccccagaaggctccttaggagagccacaggcacaagcttgagccccacttgatcccaggagctgcctgagt

SEQ ID NO: 16094 - DNA, 100 bp, Homo sapiens
  chr7:4857296-4857396
  hypo
ccaactgcacccaacatagcaggtcctaactgcctccccacaggtcacctctcactcgcgacacgggtcacaggactctggcagcagcccctgagtggcc

SEQ ID NO: 16095 - DNA, 112 bp, Homo sapiens
  chr7:4857860-4857972
  hypo
cggcgcctggtgagccaggccaacactcaccccagcgcgggcctcccaggagcacaggcccccagctgcccctctgccgggcagactgcaccggaggccggcccactcatgg

SEQ ID NO: 16096 - DNA, 237 bp, Homo sapiens
  chr7:5230941-5231178
  hypo
cgtgcgcggccctccctgttctttttgggacatcaactttgatgtcttctccagcaagtaacaaacttagcaataaccttggcatctgacctagctagggagaaactgagccaagagaggcgttacggaccagtgccccaggagtctcagagctccagcgggtgggtcatcctcagggcaagagaaggccttaatgccagcccgtgcattcggaacgctgtttgtccccactgatac

SEQ ID NO: 16097 - DNA, 183 bp, Homo sapiens
  chr7:6222712-6222895
  hypo
cgaggacgctgcctgttttcacggactaagtgctccctcttgcttttcccacctggagacacaatcactgctagacacaaggtcaggagagcgtgaccagtctcgacgtccctcccacagtcctgttccctgaatgtacctcctctgcactcggggaactctgaagctgctcttgccgccccc

SEQ ID NO: 16098 - DNA, 245 bp, Homo sapiens
  chr7:65877904-65878149
  hypo
tacaccaagcgtgcaccacgcctggctaatttttgaaacttttctacagacggggttgcgtcacgttgcccagggcagtctcgaactccttagaccaagccatcctccccctcggcctcccaaagtgctgggattatagagtccagccagcctcatgttttctttaagcagtccctccctgttgcacagttggatagtttatttttttatttttttagacatggtttacctcagtctcgcaggac

SEQ ID NO: 16099 - DNA, 210 bp, Homo sapiens; identical to SEQ ID NO: 8732
  chr7:7605822-7606032
  hypo

SEQ ID NO: 16100 - DNA, 594 bp, Homo sapiens
  chr7:943355-943949
  hypo
cggctaccgtccacatctcctccccgtaggaccccagttccccccgaggtcccctctgggcattgtgggggcggtggatcctctagcccgagctggcagcccccactgacagggccaagctgggtggccccagagacagcgtggtgatccggctcctgggcagcccggccctgggaagctgccttcctgcacctgtcttcccatgctgcccggcgccagtgcccacactcccacacgtccaagcacccgccttcccacgctgcccagcccgacttcccgccttctcatgccgcctagctcaagtgcctaccctcccgtaccgtccaagcacccaccttcctgcgccacccgggcctgagggcccaccctcctgtgccacccgggcccgagtgctcgccagcacccaccttcccgtcctcatggtagatgaagatgttacgggtgctgttgtccttcaggtaggtgacctgcaggccgtgggggtggccgatcttggccggctggaaggtggcgttcaggtgctcgatcttcatcacggccttgggctccttggcctgagaaggggtggggtctaagcacctcacaggggccgtc

SEQ ID NO: 16101 - DNA, 473 bp, Homo sapiens
  chr7:95025593-95026066
  hyper
cgccaggaacatctccccgactaaggacaggccgacccccagcaggaccagcgccacgagcttccccatggtctcggggtgcccagcggcgactgcgcggcgccgagagctctcgggggcgcggcgggcggttcctgcctcgcgtacggattggggcccgctcggccccgcccgcacacgcctcctacttacctgagcggcccgggtgccgcagcagggcgctgacgagtcccgccgagccccgccgcccgggttcaaggccgccttcacgcccacgattccttgttttttgggcagaggtcaaggctcaacggagagggagcccgggaccgagttgtggtgggagtttgctcctaacacccgcgaaatcctacctcaattcctcagatggcctgagggagaaaccggagggcccgggaatggcggggagctccagttcagagccggaactccggacttctgcaaggccagac

SEQ ID NO: 16102 - DNA, 82 bp, Homo sapiens
  chr8:11708345-11708427
  hypo
cgcttccccgccagccagcagggccttacccagcaggagccacaggagccctggtctctgatctctttgatggtgggacact

SEQ ID NO: 16103 - DNA, 120 bp, Homo sapiens
  chr8:117631330-117631450
  hypo
cgggcgcgtcgtccatctcacggaagcaagaagctttaatgtgctcttggatgatgtggctctgcccctcgtgcttctgacctccatcatgagaagagtaggtcccaacgtgagaccacc

SEQ ID NO: 16104 - DNA, 149 bp, Homo sapiens
  chr8:123865814-123865963
  hypo
cgtctcagccacgctcagccaggctgctcctttcagccgtgcccttgctctggacctcacccctccgctcccctccttggaattcatactctcccacccttctctggctggcaatttccacccattcttcatggacgaggacaaacacc

SEQ ID NO: 16105 - DNA, 62 bp, Homo sapiens; identical to SEQ ID NO: 8745
  chr8:128888848-128888910
  hypo

SEQ ID NO: 16106 - DNA, 43 bp, Homo sapiens; identical to SEQ ID NO: 8746
  chr8:128889422-128889465
  hypo

SEQ ID NO: 16107 - DNA, 440 bp, Homo sapiens
  chr8:128893135-128893575
  hypo
cgctcagctttccagtcatttcttaagcgatgttgagttcccaagcactgtgccggacacgcatgggttgctggaggctggcagaacccgaatgtcagtattcctgaagaatggctctaagcaatgtaccttgcagagctcaagcagggctctgctgcatcatgcccatgaaggtgcctgctggtagaaggctggttctatactggctgcttgcctcctccttgtggagacccacattgtgtctggcaaagtgcagaaggaaatcaagcccttaataacattagggaactggactgggttcggtttgcatctcccgagtctgactcgtgggagtaaccaccataatagcagcgctgtgctgttgagggtgactttgactatctgcttgtgttgtgagcccactgtgtgccggagcactctctatacattcagtcttgtcc

SEQ ID NO: 16108 - DNA, 130 bp, Homo sapiens
  chr8:12959279-12959409
  hypo
cgcggcattcataaacactaaggaacgtctttgctgattatgcccgatttatgtacaggactcagggataagctgtcacacggactattgcatcttggccttttcggcaggatatcaaagggcacaattc

SEQ ID NO: 16109 - DNA, 641 bp, Homo sapiens
  chr8:140937017-140937658
  hypo
cgtccacctccttcgctcctggaccgtgaattctacagagtgagggaattacatcttactcatcttttacaggcctagaactcaagggctcattacatgtttgctgaatgagttactggaaacggccttagatcacctgaatgactttcatgagcaggggggtcagcggtgttcagtgtggccccagagggtagagccagagcagacggcctgcagcggccaccagcttcgtgttctccagcacgaggggccaccccactacaactcacgcctcccactgcctacaggggaaagctcccgaaaagcacacaaaaacagctccctgaggaatccgggagtaaaacaaaagcagcagaatgtggaggagtcgacacatggaatgagctcgcccacggggtggcggcgcctcccacttttccctcgacctttcctccacagtgtggaaaaaaatgccctgttacagagcatcaggcaacagcactggaggccgaaactctaacagaaatatcgcctttctgcccaggaaaaggggtggagtctttgtaggctgcagagttgcatatggaggtgggggaatcttagaggcgagagagctagagaagtggaccctttcattctgcatagaaacctgcagaaatctc

SEQ ID NO: 16110 - DNA, 147 bp, Homo sapiens; identical to SEQ ID NO: 14321
  chr8:140963396-140963543
  hypo

SEQ ID NO: 16111 - DNA, 139 bp, Homo sapiens
  chr8:141107001-141107140
  hypo
tgctgagaagtcaagaagaatgtgtcctcgcagctcctcctgcagcacctcacagtgcacaaccggctgggccagcccatccagcatagagatgtgaaaacctgtccaggtcgctggtgtatagccagaacaatggcac

SEQ ID NO: 16112 - DNA, 140 bp, Homo sapiens
  chr8:141249621-141249761
  hypo
ggagtgagaaggaccaaagtgcaggtgtgcttccctttgctcgggactcactggcacggaggccgcatccacctcctcacggccgtggaggggatgcgtgggaggcgcctggacacctacaccaacacaccgtgcactcc

SEQ ID NO: 16113 - DNA, 261 bp, Homo sapiens
  chr8:141458771-141459032
  hypo
cgacctggcaggtggccgccaagctgtgcacaccatacagcaacaccttatcagggatgactcccacagtgcctgctggctggacagcagtgtgcgctattcacgaggcacaggaggcgcagcagaaggcaacaaggtgaggtagaaaggccccgggcctcagagacagacctggtgcttatatcagctctgctgcttggtggctgcccgggtctctaaaccttgctgcctcagccccacatcagccagcacagcaacccc

SEQ ID NO: 16114 - DNA, 68 bp, Homo sapiens; identical to SEQ ID NO: 14327
  chr8:143558643-143558711
  hypo

SEQ ID NO: 16115 - DNA, 42 bp, Homo sapiens; identical to SEQ ID NO: 14328
  chr8:144292304-144292346
  hypo

SEQ ID NO: 16116 - DNA, 254 bp, Homo sapiens; identical to SEQ ID NO: 14329
  chr8:144292470-144292724
  hypo

SEQ ID NO: 16117 - DNA, 202 bp, Homo sapiens
  chr8:144293893-144294095
  hypo
tagagacaggtattcccagcctcaggcgctgtcctaagcccagcaggtactgacccttgatggtcacctcaccctatgagggagctgaggcctggggaacccaaggggctagtccagaacccacagccgggggaaggaggaaccgggtcttaaacccaggtagctcactccagaaccaactcaacctctgttacaggtggcc

SEQ ID NO: 16118 - DNA, 56 bp, Homo sapiens; identical to SEQ ID NO: 13042
  chr8:144328118-144328174
  hyper

SEQ ID NO: 16119 - DNA, 66 bp, Homo sapiens; identical to SEQ ID NO: 7574
  chr8:144343416-144343482
  hypo

SEQ ID NO: 16120 - DNA, 228 bp, Homo sapiens; identical to SEQ ID NO: 7575
  chr8:144343992-144344220
  hypo

SEQ ID NO: 16121 - DNA, 308 bp, Homo sapiens
  chr8:144380308-144380616
  hypo
cggttgcaggattcgcccatcctggtctgggtgtggcttgtgaccacctcctgcagttctctgcccaggtaaggactaattgggaagaattctgggtcctgagctggctgccgcttccaagacagtcgctttgagggctcttggcaccgattttgttaaaatgcatgagcttagggttgtgcagcctgtaggggcaggggtggtctcagaatggatttggtggccccaccgttaattaagctcctgacccctgggccggtggtgaggtgggaagatgagcctgtgtctcccatgctgagccaagatcc

SEQ ID NO: 16122 - DNA, 214 bp, Homo sapiens
  chr8:144380645-144380859
  hypo
ctccctgaaggaagcttacctggcttagcctcattcctgctcgtaagtcaggcattcagcttgcaaagatccccaagcacacaaggagagtcagctgactgagggccaacagaaacagcaggcagccgctgtcagccacaaagaaacgcagatcctgaaactgtcatcatacaggtgagaggatagttatgtgtgaggtgttcaaagaagtcgc

SEQ ID NO: 16123 - DNA, 129 bp, Homo sapiens
  chr8:144383407-144383536
  hypo
catgacgtgaaacatcagacagtccaggacatagagacgatctgaaagcgcagatcacacacacaggctgaggaataaatcccttcccaagggcagactggaagttagaaaatgacagaacaatgcttc

SEQ ID NO: 16124 - DNA, 167 bp, Homo sapiens
  chr8:26193961-26194128
  hypo
cgtggaatgtgccttcccaccccacccctcagtctcaaatctcaattgttttactgtaatgctgtccttactgacttaatcatctctaggttttacgtgttcagttcacttaaggaatattaaggtttcttccttattagaaattgagcccggctgggtatggtagc

SEQ ID NO: 16125 - DNA, 139 bp, Homo sapiens; identical to SEQ ID NO: 14336
  chr8:28938419-28938558
  hypo

SEQ ID NO: 16126 - DNA, 136 bp, Homo sapiens; identical to SEQ ID NO: 14337
  chr8:28938587-28938723
  hypo

SEQ ID NO: 16127 - DNA, 46 bp, Homo sapiens
  chr8:48044665-48044711
  hypo
cgacgaacgccaagccaagccgttacatacgcatgcgcagaacacc

SEQ ID NO: 16128 - DNA, 69 bp, Homo sapiens; identical to SEQ ID NO: 8764
  chr8:49334914-49334983
  hypo

SEQ ID NO: 16129 - DNA, 143 bp, Homo sapiens
  chr8:49496420-49496563
  hypo
agtcctcgcctgactggcctcttccctacatgctgttctccacgttgccttcccgtgagctttcctttttgcctaaacacatttttcagctccatgtttctgacagactggttactaaaatccaacccaacaacgtgtaggac

SEQ ID NO: 16130 - DNA, 110 bp, Homo sapiens
  chr8:70246389-70246499
  hypo
cgcgccaggtcctggggtgagcacacatggctgcccgtcccgccgtgtctctcctccgcactgggtcccggggtgcgtgtgcaggtgtgtctgtccctcctccgcgccac

SEQ ID NO: 16131 - DNA, 125 bp, Homo sapiens; identical to SEQ ID NO: 10000
  chr8:8748226-8748351
  hypo

SEQ ID NO: 16132 - DNA, 533 bp, Homo sapiens; identical to SEQ ID NO: 14348
  chr8:8749088-8749621
  hypo

SEQ ID NO: 16133 - DNA, 115 bp, Homo sapiens
  chr9:100267724-100267839
  hypo
gtgatgagttgtgaccactgcgttgttgctctccatgcccaaaggaatgaaggaaagcagaactgcctctgggcatccttcagcctccttcatagactcatcgctgctgcccatc

SEQ ID NO: 16134 - DNA, 321 bp, Homo sapiens
  chr9:110390680-110391001
  hypo
cggcttcccggggtggtcctttgattccagtaagagttatcacggataaagggagggtgcgtatcaggcaaagaatgcatggagtgtttggaggcgcggtgtgcagagcttgcaggaggcagtgtgcggtgagttgtggggactcctacgttgtctgatccctccttttctgctggatcctccccatcaacgtttacccgcactcaggtctctcatcttacagcaaaccctcactccacctcacatcttactccagctcctgactcatcaatttccctcccagccaaatttttcaaataaatgttctgtgctatgcgcatc

SEQ ID NO: 16135 - DNA, 153 bp, Homo sapiens
  chr9:114860736-114860889
  hypo
cgtctacacccacctgctgggggagttgctattgttatttgcactgagtgccgcttaggagatctcagcagggtcacattcaccgtataatcagtcgtagggtacagatccaaacacactacaggcacttgttccctcgttgtgaagttaaac

SEQ ID NO: 16136 - DNA, 43 bp, Homo sapiens
  chr9:116800647-116800690
  hypo
cggagtggagccgtgggctgctttgttctggttcagcgcagcc

SEQ ID NO: 16137 - DNA, 563 bp, Homo sapiens
  chr9:116800730-116801293
  hypo
aatcccagccacactgaatcgggattaaaggcttggctccatagagagaaattaagcatcatgagctgcgcagttcacagcgccgacgataaggaggatcagccttgaataacaccaatctcattatggagctgctgaatggcacagggtaattcccgctaataaacttcctttctgtgctgtaggaaaacctggcgtgccttggtgacgttggagaagcatgctttggcagtaataataccaaagatagctacaattttgtgagtgctttctatgcgtcacttgtggcactgagagctttacgcaggttatttcatcagatcttcctgattaggtagttgacgttttcatccccattatgcagatgatgaaaccgaggctcagagaacataatcactggcccaaagttgcacagctcctaaaaaaagtatccaatagcatttgagcttttacgtggcgccaggccttgttctaagacttttacatatattcacttatttaattctcggaacaaccctcagagttaagtgcccataacagttccacttcatagctaacgaaac

SEQ ID NO: 16138 - DNA, 213 bp, Homo sapiens
  chr9:123146246-123146459
  hypo
cgaggccagggcgaccttgttctcttatttccctgtgtctgcccacaccgtcggccagtgtcacacacgagctgggaccacatgctgttctgtttggaacgagaaagtggcattaatacaaacagagggtcgttttagacctgaaaccatgtaattaagctctcccgtgaatgcctgttaacaaggaggtgctttcgcatttgagagaagcac

SEQ ID NO: 16139 - DNA, 99 bp, Homo sapiens
  chr9:124816011-124816110
  hypo
cgcgtgcaaggactgctctgacagttcacacacttcacagtgcccttccctcctgcccgtgggctacattcctgtctcacctccgccaggttcctagtc

SEQ ID NO: 16140 - DNA, 166 bp, Homo sapiens
  chr9:126158115-126158281
  hypo
tgactgcaagccgcactctgccttcagattcctttgttcattcacccaggaaacatctcagagcagaggtctgggctcggatgtggtccaggagttggagagtcaaagctgaggaagagctcacagactactggtgtgcctggtgtgtgtgtgtgtgtgtgcacgc

SEQ ID NO: 16141 - DNA, 203 bp, Homo sapiens
  chr9:126180763-126180966
  hypo
cgcgttggaatagcaacttaattacctgggtggcatggatgagtgggcaccccgcacagggctgcagggtggaaaacgctcgacggccaggtggtgacttgggggcagagagcgcagtgtgtaggggaggagaggtggtgtccctgctgcctgggagccagcctgcctgtgctgtgggcagagccaaggcactttctgctgcc

SEQ ID NO: 16142 - DNA, 196 bp, Homo sapiens
  chr9:130496563-130496759
  hypo
cgcatccagcctaccttgtagcgctcgatgtggctggggtgggggaagtggaggacgggagaaaagtggtgcacgcgggggctgcggaggccgccctggaagaggtagtgcgccagcagggagctgacataggatttgccggtgccggtccagccgtgcagggagaggaccagcggcttggtgggggctgggtccc

SEQ ID NO: 16143 - DNA, 277 bp, Homo sapiens
  chr9:132633604-132633881
  hypo
cgttgcagcgtgtgtgtcggaatgccctgccttttgtatgctggttatttattgttccattgtgtggatggctggggcctttctgcttattcgttcatccgtcagtggacactcaggccgcttccctgttagctattgtgaggaatgctgctctgaccatgggtgtgcacacctctcttctttcatccctttgggtctatgcctatttttaatttctcgaggagccaccgtactgggttccacagtggccaccccatttcacattcccaccagtgac

SEQ ID NO: 16144 - DNA, 344 bp, Homo sapiens
  chr9:132881052-132881396
  hypo
cgatgattctgttgctcacccccattaagaaccattgctataaaggaattctcctccacatgaggaggtcgatgcctggagacagaggcagcaggccaagggcaggcacacccagctgagatggggcagggctggaaggcaggcctcctggatcctgcctggggccttgtctctctccccacactcattctttcaccgtatttgctgctcctcatggtgaggtcagaaatagcccgcccagccttggtgagccttcgctcccacaggagcccaacacccagcccgccacagtccggtgagcagcaggctgtcggtgttcctaagtcagggaaatctttggaaga

SEQ ID NO: 16145 - DNA, 35 bp, Homo sapiens
  chr9:132881495-132881530
  hypo
ctcggcatcctgactcatcctatgcatatggcagc

SEQ ID NO: 16146 - DNA, 102 bp, Homo sapiens
  chr9:134131797-134131899
  hyper
cgtggagctcggccagcaatgcctgttatgcaatttcctgctttggtgtctcagccccaggaggcaggatgtgagcgccgttggtttgctgcaacgtggaga

SEQ ID NO: 16147 - DNA, 52 bp, Homo sapiens
  chr9:138563280-138563332
  hypo
ctcctggcactgcagagcggatggcggatgcagatcccactttggggatggc

SEQ ID NO: 16148 - DNA, 51 bp, Homo sapiens; identical to SEQ ID NO: 14371
  chr9:138661962-138662013
  hypo

SEQ ID NO: 16149 - DNA, 37 bp, Homo sapiens; identical to SEQ ID NO: 11965
  chr9:139818622-139818659
  hypo

SEQ ID NO: 16150 - DNA, 216 bp, Homo sapiens
  chr9:139901954-139902170
  hypo
cgggactgacccagctccgcccacagcccgctctcggcatcagccttcatcgtaagagagaaaagctggttccgaggccgggcaggagaaaggccagcagtgcctggtccagccggcgtcgccttgggcggtgagcagtgccaggcaggggcgaggggccgggcagaccccgaggctttaaggcaaagcagggcaagggtgtacgcagcccgggcc

SEQ ID NO: 16151 - DNA, 32 bp, Homo sapiens
  chr9:140030217-140030249
  hypo
cgcgcccggctgggaggtgttctttctagacc

SEQ ID NO: 16152 - DNA, 613 bp, Homo sapiens
  chr9:140110575-140111188
  hypo
cgggagctggggtcgcttgtgtgggaactgctggaccgccagggtgcatacttctacctggcagggtgagctggcctgcgtgcagcaggagtgggcccagcccctgagtgccaggcctcattgcgccttctgcgacctgcccctctagcaacgccaagtccatgccagcggacgtctcggaagccctgatgtccatcttccaggaggagggtggactctgcagcccggacgcagccgcgtatctagccaggctccagcagacacggcgcttccagacagagacgtgggcctgaggcccgcggctgcccgtgccccctctgacagccatcctcctgggagcccaggaaggcatccacgagggagctcctggccagcagccgtcatcctctcggaccagccagctggtcctctgggaacagccagctcccgagcacagccgcactcctgttgaccctggatcccaccctttgagcctgaccccactgcagcctctgcccagccagccctgcgctcccccaccctgacagtgagctgtgtcctcgtccccccacccccttcccagtcaaggtggtggcctgggccgctccacctcaccggtgcagtgacccaggac

SEQ ID NO: 16153 - DNA, 374 bp, Homo sapiens
  chr9:140265361-140265735
  hypo
cgctgccctcgacatgaaatatcgcagcacattgagtcgtgagtcccagctaatccgagcggacaggcctgaatgcggcctctttcggccgggcgcggcggtgagcagtggagcatgcatcgcctgccgggcggccccgctcggggacaatggctttcttcgcagaaggggcctgtgcgggacaagaccccctttgtgtggggattcctgcctcggagcgcgagggaggcgcattcagccggccccagacagtctttgaaaggctctgtaacagaagacggcccgaaacactagcctgccttctgcctccctgcactctccgcaggcacggccgccattcagcgtcgcgccacatgagggggaccctccatcct

SEQ ID NO: 16154 - DNA, 183 bp, Homo sapiens
  chr9:140265902-140266085
  hypo
ggttccaatgcacctcctcacggtgaggggtcttgctgggaagaggaacccagggtgccatcgggacggcgtctcagcagcagggtcccacgtgggcaggcagcggggtggtggccttcacgctcggccctgaagtaagggggccctaatggggcggggagtggaccagtgcccctgagtgcc

SEQ ID NO: 16155 - DNA, 184 bp, Homo sapiens; identical to SEQ ID NO: 14383
  chr9:140400692-140400876
  hypo

SEQ ID NO: 16156 - DNA, 517 bp, Homo sapiens; identical to SEQ ID NO: 14384
  chr9:140400905-140401422
  hypo

SEQ ID NO: 16157 - DNA, 232 bp, Homo sapiens
  chr9:140645189-140645421
  hypo
cggagctcaggacgtggctgccggagggggcgcggctgccggaggggacgcttactcaggagcgctgaggcggttaatgagtgggacagggagcctgtgacatgtataaaggtcgattgtaagactggggtattaaatcagtggtcaaggggtcatgaactttttaataactatggttgggccagttgactaatattttgggaaaaggcagcctgcacttgtgtcagggcac

SEQ ID NO: 16158 - DNA, 189 bp, Homo sapiens
  chr9:140703858-140704047
  binary
cggcggccctgcgccctcggagggaggcggggcagagctcaaatggaagcagagcctgcggggtggagaccgcacccctgcaggggtctgccttgggccccgagcctcctcagccgccgcagcaaagcggtcagtcaggcggggcttggtttatggcatctgggaagatcgctgaccattcccgagggg

SEQ ID NO: 16159 - DNA, 327 bp, Homo sapiens
  chr9:140704131-140704458
  binary
gcaatcctgcctctgaggatgcatccttgagaaataatgtagaaaatgaaaagcactaaaatatttgctggcattgtattccagaaatataccaacagacataaaccaagtgttcagtaaaggaaaggtccggaagctgagtgactgtgggggaagggtccggaggcggttccgatgccgccctgtgtggaccgtcggtgatgggtccggaggcggttccgatgccgccctgtgtggaccgtcggtgatgggtccggaggtggttccgatgccgccctgtgtggaccgtcggtgatgggtccggaggcggttccgatgctgcccctc

SEQ ID NO: 16160 - DNA, 295 bp, Homo sapiens; identical to SEQ ID NO: 8816
  chr9:35711931-35712226
  hypo

SEQ ID NO: 16161 - DNA, 41 bp, Homo sapiens
  chr9:35712966-35713007
  hypo
cgtcagtgcagcgactcccctagcggcctgggccagtgacc

SEQ ID NO: 16162 - DNA, 201 bp, Homo sapiens
  chr9:6868324-6868525
  hypo
cgtgaagagagtttccgtaggtaacatagcattcatcccaggaaaccctgggaactttgaggtgtgccataaaaagcagtttgaaaatcggttaactggatcaccgatttgagccacccctcagtatccatgaactgttggttccaggttccattcacaataccaaaacctgtggctgctcacgtccctgatataaagtgc

SEQ ID NO: 16163 - DNA, 184 bp, Homo sapiens
  chr9:79629667-79629851
  hyper
cgcacagccagtaggtggcgaagctggagctcgagtatcgtctcctaaattcaaggccagtgctttttttctccaagaaataaatgcccctgacctcaggcttttcccttctgccctccaccctcgggcattccgaaaagtcaaatcgagcttatgcactcaaatccaagtagggcggagccaa

SEQ ID NO: 16164 - DNA, 55 bp, Homo sapiens
  chr9:79630437-79630492
  hyper
catggaaattgagatgtgcgcctaaacctttgccttttttctagcgctgtacgtc

SEQ ID NO: 16165 - DNA, 473 bp, Homo sapiens
  chr9:79630544-79631017
  binary
cgcagaagccgtgggaaggcctggcctagatccagcccaaggagcgcgtgagaccctccaggggctgggggcatggaggagaaagaatgaataaataaccgctcctaaagttccacatctttttttactcccctccatagagccaattaaacgcaataaaagcttgcatggaacccctcttcctagcatagcgtcgccaacaattgcctaaggggtaaaccaaatacgcctgagataattacactaagcccggggcaatgatttgcctgccagcgtcctgagcgccagccaatatttggatagtgcagtagttgtttaaaaacaacaaaaaaaaattactcgcggaaacttgaaaccgactggttggtgccagggtggttacacgatctgtttttcttgagagggggtctgcaggcagctggagcgcgcgcgttccggcccccgccggtgccactgagcgcctgcaaaacttg

SEQ ID NO: 16166 - DNA, 171 bp, Homo sapiens
  chr9:79632239-79632410
  hyper
aagccagaagctgaaaacacccgatctggtgtcaccaaggttgctagttagggggcagccccccaagcagctgggccgatggctttcttccaggttaggcgtgggaaaaccgagggagccatagtgtccaaatgctcctttctcctcaaatcgcctaacgggaaaggaccc

SEQ ID NO: 16167 - DNA, 292 bp, Homo sapiens
  chr9:79632921-79633213
  hyper
tgcctattctattaatttcttggttactgttcgtctcaccctctataccgcgatggtggagctcggatactgtctcctgtctccctgcacctggtgcctcacatgcagttggcgcgcaataaaactgagatgaatttggcatttggtgaaaacaccccatgctttcttccccatgagtttttccctccagccctctaatcatcggggtttcttgcagagaagaggccttgaggacacgatactctgaacttgacccagagtgtctagcccaggaaaaagggtttgtaaggag

SEQ ID NO: 16168 - DNA, 330 bp, Homo sapiens
  chr9:81892891-81893221
  hypo
cgaaggccgcgggcgagaaagctgttctaattgtacaaatcactgcacagctgaatcacaggcgcagtcccaagtaatctgtgcaaccatttgactgaactttcgcactagctgggggcgctccccggagtctcctgaggccagcgtctgacaatggacataaagcagccgccaaatgagatgcgggaacagttgtatgtcaagcggcagtgattcaattccgggccgtcagaacgcaggcagcccccggccgcggcgtgattggcagtgtgctgatgcaggctcccaaacctcgacctacccatcttgttaaaatggggccccggatgc

SEQ ID NO: 16169 - DNA, 280 bp, Homo sapiens
  chr9:96348822-96349102
  hypo
cgtacaggccggatgggaacagtctgtgaggcttttgtgccactcctggctgcgcttggcagctctgcatgtcacacatgaggaatcctgagtctcaaaatggcccaggaatccagcatgagctgtgctaggagtcaagaggtttgccacgactgggcttggttccttgttcatgagcgagcacgtccctcagtctgtccatctagctggtgacgtttcctgaacaccaggggagaccaggctctgttctaggcacgggcagcagtgaggaagactgcac

SEQ ID NO: 16170 - DNA, 262 bp, Homo sapiens
  chr9:99139238-99139500
  hypo
cggctcacaacactcaagagctgctcaagtgctgaaagaagcaagcagaagacaagtgcatgccaaagtgagaagaaaagagtctcacgtgtccctcctagagtggctctcagcggaccaagcagagaaacaatgccaggaggcacagtcacagcagcgagaagggactgaggaggaggcctggggaagccaagtgtggacagcctgcaggggagatctcggagaggtgcagttactcgtgttaccgctgatcatccgaaac

SEQ ID NO: 16171 - DNA, 724 bp, Homo sapiens
  chr9:99258639-99259363
  hypo
cgctggaaaagggaggagatggacagcgctgtacttaccaccaccaccaccaccacagggcctgtctcagggcttgagtttgtgtggacggcaaggactagcttcctgggccgctaactctcaaccgcaaggcaaacttgggttggggcccagaacggccgtcagccgttaccctccagcctggccagtgagtgctgagtggacactccgcggctacttaaggacacgccaaccgcggtcctgccggggcgctccgtgcgtctccctccggctgggtcccggctgaccccgcaatccaggcgcaggcaagggagaccccgctggctccaccgcccaggccaccctgaagtccccgctggaggaggtgcagcggacccgctcccggggagcccgtcccgcgccctccctccgagaagccccttcctccagctccttcctctgcccgccggcccgagagcaccgaggcggcttctctgtcctgtgtactgcccaggacaagcggcattggaagcgagtgagccgttcccagctgggggcagcaacagcccggggccagggaaacgcatgggggcctggaccgtccggtggcaccgagtaggcgggtgccaggacgccagacacgctgcattccccggagtcccacgccagggagaacggccccgcctgaaaagacgtcgtttaacacagagaaacacacccagggccaggagaaaccattgtcctc

SEQ ID NO: 16172 - DNA, 251 bp, Homo sapiens
  chr9:99259405-99259656
  hypo
gcggagtcgtctacccctttagaaacagacttggcccattagagcctccgcggccaggccggggcctccttacctggggatttaggtgtggacccagcacgcgtcgtccagaagcgtgtcaaagccatgcagacttgctgccaaagagtcaggcggggttagaggcggggaggcaggggcggggaggcagaggcgggaggccccccactcccacacaggccagggacccccgaggcgctggggaggaatcc

SEQ ID NO: 16173 - DNA, 289 bp, Homo sapiens; identical to SEQ ID NO: 5717
  chr1:101702081-101702370
  binary

SEQ ID NO: 16174 - DNA, 393 bp, Homo sapiens; identical to SEQ ID NO: 5718
  chr1:101702796-101703189
  binary

SEQ ID NO: 16175 - DNA, 306 bp, Homo sapiens; identical to SEQ ID NO: 5867
  chr1:108506290-108506596
  hyper

SEQ ID NO: 16176 - DNA, 53 bp, Homo sapiens; identical to SEQ ID NO: 12013
  chr1:11538821-11538874
  binary

SEQ ID NO: 16177 - DNA, 35 bp, Homo sapiens; identical to SEQ ID NO: 12014
  chr1:115632692-115632727
  hyper

SEQ ID NO: 16178 - DNA, 52 bp, Homo sapiens
  chr1:116214053-116214105
  hypo
caggccgggagcctcagactccagacttttcatggtgcgctccttcctgctt

SEQ ID NO: 16179 - DNA, 64 bp, Homo sapiens; identical to SEQ ID NO: 5719
  chr1:12123950-12124014
  binary

SEQ ID NO: 16180 - DNA, 265 bp, Homo sapiens
  chr1:13840257-13840522
  binary
cggactggggagccgggacagcagggatggagaggggaggggcggggagggaggggcgagggactcaccaaagggtttacccggacaggaaattaacccgctagaaaaatctcttgggagaggcgggagcggcaggggtggccgagtggccgtcgccaaaacgcggccccaccctggcagctgatttccgagatctggcagtaagacgccgcgcgcaccgggcgggctgcactcgacgtctaagttcagctaccaagcccaggag

SEQ ID NO: 16181 - DNA, 87 bp, Homo sapiens; identical to SEQ ID NO: 10100
  chr1:13910927-13911014
  hyper

SEQ ID NO: 16182 - DNA, 77 bp, Homo sapiens; identical to SEQ ID NO: 6657
  chr1:14125492-14125569
  hypo

SEQ ID NO: 16183 - DNA, 54 bp, Homo sapiens; identical to SEQ ID NO: 6658
  chr1:14125622-14125676
  hypo

SEQ ID NO: 16184 - DNA, 169 bp, Homo sapiens; identical to SEQ ID NO: 10103
  chr1:14926204-14926373
  hyper

SEQ ID NO: 16185 - DNA, 253 bp, Homo sapiens; identical to SEQ ID NO: 6660
  chr1:153540242-153540495
  hypo

SEQ ID NO: 16186 - DNA, 282 bp, Homo sapiens
  chr1:156047227-156047509
  hypo
cgcggtagggcacccgcacacggatggtcacctggccgggcagagcaggagccacaccaaaggcggcgcctgacttgttgcgggaggcacggatcatggagaagtgctccgctgctgagatgatttcccgccgggctgtggccacgtcctcccgtcgccctgtcaccatgaacactggttcctcgcccctcaccggtgtcttgatgtaggtgttggtcttggccctcaaggccttaatcttgcagcctgggatagggcggggaaggagagagacaaagaaac

SEQ ID NO: 16187 - DNA, 43 bp, Homo sapiens; identical to SEQ ID NO: 7658
  chr1:156390054-156390097
  hyper

SEQ ID NO: 16188 - DNA, 92 bp, Homo sapiens; identical to SEQ ID NO: 7659
  chr1:156432033-156432125
  hypo

SEQ ID NO: 16189 - DNA, 59 bp, Homo sapiens; identical to SEQ ID NO: 13113
  chr1:1566482-1566541
  hyper

SEQ ID NO: 16190 - DNA, 104 bp, Homo sapiens; identical to SEQ ID NO: 7660
  chr1:158083079-158083183
  hyper

SEQ ID NO: 16191 - DNA, 712 bp, Homo sapiens; identical to SEQ ID NO: 6664
  chr1:161409991-161410703
  binary

SEQ ID NO: 16192 - DNA, 109 bp, Homo sapiens; identical to SEQ ID NO: 12028
  chr1:161591364-161591473
  hyper

SEQ ID NO: 16193 - DNA, 83 bp, Homo sapiens; identical to SEQ ID NO: 12029
  chr1:161591546-161591629
  hyper

SEQ ID NO: 16194 - DNA, 170 bp, Homo sapiens
  chr1:16474862-16475032
  hypo
cgtcactcaccctggcaggcatcctccaccttctcgtagcctgcctggcacaggcactgcccaatgggcaccagccactcgccatccactgcacagtgcatacggggctcttcaccccccggtggcaccacggcatggtccacacaggtgccggccacagtggccaggga

SEQ ID NO: 16195 - DNA, 75 bp, Homo sapiens
  chr1:16475432-16475507
  hypo
cggtacacccagttggtgcggagccagttgtcctggtcgccagacatcacgttgcacacggagtacatgtagatc

SEQ ID NO: 16196 - DNA, 176 bp, Homo sapiens
  chr1:16534331-16534507
  hypo
cggcccaggcaccctgacggcctcaggcggccggtgagtgggcatcgcccacccccacccccacccggcatctggctgccctcagggcccatgggaggagctggtaccttcccgggctgctccggtgcctgacccagagatgagtgcccgggctgctgaattccgccccaggcgca

SEQ ID NO: 16197 - DNA, 530 bp, Homo sapiens; identical to SEQ ID NO: 14441
  chr1:17445328-17445858
  hyper

SEQ ID NO: 16198 - DNA, 144 bp, Homo sapiens; identical to SEQ ID NO: 14442
  chr1:17445943-17446087
  hyper

SEQ ID NO: 16199 - DNA, 250 bp, Homo sapiens; identical to SEQ ID NO: 6676
  chr1:182583799-182584049
  binary

SEQ ID NO: 16200 - DNA, 40 bp, Homo sapiens; identical to SEQ ID NO: 6677
  chr1:182584613-182584653
  binary

SEQ ID NO: 16201 - DNA, 57 bp, Homo sapiens; identical to SEQ ID NO: 13125
  chr1:18960805-18960862
  hyper

SEQ ID NO: 16202 - DNA, 263 bp, Homo sapiens
  chr1:19711526-19711789
  hypo
cgaggtgacggaaagagagaggagagttgtgtatctgacagagctgcgttcgtagatcccttaccacagagaccctcccagccctcaggatccccatcatatgcgcaccctgtacactgccctccgcaggactgaatgcaattataatagaacagttgtttttgaacaacatccctctcccgttagactggaagatccatgaaggcagggggcctttggtccgctgctctatctctcatgcttgtgggtggcactcttcaaac

SEQ ID NO: 16203 - DNA, 72 bp, Homo sapiens; identical to SEQ ID NO: 13129
  chr1:1974777-1974849
  hypo

SEQ ID NO: 16204 - DNA, 162 bp, Homo sapiens; identical to SEQ ID NO: 13130
  chr1:1974925-1975087
  hypo

SEQ ID NO: 16205 - DNA, 817 bp, Homo sapiens
  chr1:205631783-205632600
  hypo
cgcaagcagagatgttccacacccatgagaagccgtgtatgcagatggggtccatccccactttcctgacagagaagtcggggccaggatggagaggcaccagcccagacacagccccgagtgtcgtctctggtgggcggctcccacaccagcctctgctggctgccaaggccttaccttcatcatagtgtctccgggcctcggtgcccggctcagctctgggcacgccctggtacagcccctcgcccacgaaatccgtgtaaaacagcgtgaaggtcatgagtgccatccagctgcacagctcagccacgaagagccggcgcagggtgcggggcatgcggcagcacagctggtgcagccggggaagcagggcgcccaggttccggaaagccaagcgggcccggcatggacagcagtggggcgacaaggagggggccgacagcccttctgctggctcggtggggcccagcgctgcctcctcagccaccagcagtgtggctgctacgcaggtgaggaagatgagggtgagcaggccaaagaggcactcctcctgggtgcccaggtagggggccagggcactggtgtcccagtcaatggcaggcaggaggtagcccaggcagcccccaagactgatcatgaaggcatagacagagtaggcctggcgacagtggtccgggtcccggaagaggtcagagagcagggcctccagtggagtgaagcacacctggccacagaagtccagcagccccacgcccaggatgagcagtgccagctccaggggcctgggatccgggcacagcagccctgctagccagcc

SEQ ID NO: 16206 - DNA, 116 bp, Homo sapiens
  chr1:214156950-214157066
  hyper
tgtggatttgaaccaaagatggtgggcaagagtgttgtaaattgtgtaaattccactcgcgggaacccccagatacgtagggagagcacccctttctcgccgaaggcatcccctcc

SEQ ID NO: 16207 - DNA, 60 bp, Homo sapiens
  chr1:214159503-214159563
  hyper
cggttagaacacctgatacaacagtcaatagttggaggtgtgagtggtgcgtgtgcgctc

SEQ ID NO: 16208 - DNA, 411 bp, Homo sapiens
  chr1:214159697-214160108
  hyper
tctccttttcactgtttgaaattcgtgccaaaagtttcctgccgggatagactcggacatactaacatcgctattcttattcaaagggagggcttaatatcctctttacggtttggtgaatttgaggctgaaattgtaaattccctaggaaggagtgtgtgtgtgtgtgtgtcgcagaagacattggtagtgtttggccagtgtacttgtaacacacctcataaataccctgttgtcacgacacagcatgattcaacctttgatctgattaaatttgagggacacacgaagactacttgtcctcctcctacttacaaaaatgagtgtctaatagactatgtatgaatgtttctgcttcgcagctcttgcaagtcccagcttttataggatctttaggtcataaacgcggct

SEQ ID NO: 16209 - DNA, 158 bp, Homo sapiens; identical to SEQ ID NO: 8872
  chr1:214162300-214162458
  hyper

SEQ ID NO: 16210 - DNA, 593 bp, Homo sapiens
  chr1:220701523-220702116
  binary
cgctgctccgcgcgcagccggctcgggccgctcctcctgactgaggcgcggcggcggcggtggctgtgaccgcgcggaccgagccgagacattcgcgccgggggatcgggcgccgccgccgctgggccccgggcgcgtggatgcggctgggtcgggcggcgccgtacacctgaggcggagaacggggcgcggcgcgggtgacgctgtcagggccgcggttcctgacgcccaggcgctcgccaggacgagccaggcagtgatttgaggcaccggcttcaccttcacccatggtccggagagcctagcggggctcgccaccgcctcccggctccccttccacgcctcatcctgccagcctcgccgccccgccagcgccgggcaaccgcctcgcccgaagccctccctcgttactgtccgcataccccggcggcgccgccgcgggaagcggctccccctcctcttcctccgcgtcctcttccctctttcccccgccggggccgcttgttgcaccgccccgcggcctgcgggagccgctcgccccggccttgtgctcgcgtccgcacccctttcctgtcgccccccggggcccgcac

SEQ ID NO: 16211 - DNA, 54 bp, Homo sapiens
  chr1:226311830-226311884
  hypo
cggtgtgcggatgctgatcagcccaccgaatgctcaccactgaggggctgcagc

SEQ ID NO: 16212 - DNA, 35 bp, Homo sapiens; identical to SEQ ID NO: 6686
  chr1:226924738-226924773
  hyper

SEQ ID NO: 16213 - DNA, 359 bp, Homo sapiens; identical to SEQ ID NO: 6691
  chr1:228528433-228528792
  hypo

SEQ ID NO: 16214 - DNA, 50 bp, Homo sapiens; identical to SEQ ID NO: 6692
  chr1:228529382-228529432
  hypo

SEQ ID NO: 16215 - DNA, 248 bp, Homo sapiens
  chr1:230346868-230347116
  hypo
cggcagctcgcggcgtctcataaacatgcgccgctggcctcctgagattcttgtgacggaaccgctgctccatggtagagctggcccgagcacccactcctcccgcatcaatttgctgcccaactccaactctgtatgccgcaccacagggtcctggtggaggagatgggaggccacacggggtgtcacaggtggggacaggcgcttctctaggcttagctgttctggctttgttggcatttgtggcc

SEQ ID NO: 16216 - DNA, 223 bp, Homo sapiens
  chr1:230379488-230379711
  hypo
cgcctacagcttcgcagagtgcttagaacattgcccggcacctagcaagtgccatctcttgcagctcgcagagcggggcgtgctggggaagctgtccctggggccacctctctgctcttagtgagtagggcaggttagcccagcaggcttccaggctcctgtgggagagggttgtggctaggaagcatacagggaccggtggggttgtcagagggtgatccgc

SEQ ID NO: 16217 - DNA, 194 bp, Homo sapiens; identical to SEQ ID NO: 10124
  chr1:230404024-230404218
  hypo

SEQ ID NO: 16218 - DNA, 196 bp, Homo sapiens; identical to SEQ ID NO: 10125
  chr1:230404365-230404561
  hypo

SEQ ID NO: 16219 - DNA, 37 bp, Homo sapiens
  chr1:237205188-237205225
  binary
cctagcccagtccaggaggaaggggcgtcgtgccggc

SEQ ID NO: 16220 - DNA, 177 bp, Homo sapiens; identical to SEQ ID NO: 8895
  chr1:248406552-248406729
  hyper

SEQ ID NO: 16221 - DNA, 33 bp, Homo sapiens; identical to SEQ ID NO: 6699
  chr1:25255579-25255612
  binary

SEQ ID NO: 16222 - DNA, 238 bp, Homo sapiens
  chr1:27875852-27876090
  hypo
cgtcctggtgggaaggtctggcgcgcggacaggacaggctgaaaggaggggtccgccccagccccgctgctacccactgccactgggctggccttggctccccggctagggaaggtggccaggccccgctgggcaggcagggcactggtgggtggccctgcataggtgcccgatgccttccgggactctgggcgagaggctgagagggcaaagtccaagagatcggaggagtcatccg

SEQ ID NO: 16223 - DNA, 111 bp, Homo sapiens
  chr1:27876333-27876444
  hypo
ctgcctccccaaagcctgggccactgggcacctgctctgggaacagagtcccattcttccgggaccgtctcttgcgctttggcttcccagtcacagcgtctacctcccccc

SEQ ID NO: 16224 - DNA, 191 bp, Homo sapiens
  chr1:28293404-28293595
  hypo
tgacagcattctcctggtggccacctgggtgactcatagctcctggctgcccagcgggattccactgcagctgtggctgcctgtgggatgcggctgcttctttctgggcctggctctgcggcttgtgtactaccactggctgcaccctagctgctgctggaagcccgaccctgaccaggtagacggggccc

SEQ ID NO: 16225 - DNA, 130 bp, Homo sapiens; identical to SEQ ID NO: 6707
  chr1:32410105-32410235
  hyper

SEQ ID NO: 16226 - DNA, 87 bp, Homo sapiens
  chr1:3377848-3377935
  hypo
cggcaaggccttggtcactgcggcgcagacgcaggcctcacaccggccaggcctgttacacgctttgcacgctttacacttcccacc

SEQ ID NO: 16227 - DNA, 225 bp, Homo sapiens; identical to SEQ ID NO: 8901
  chr1:34629913-34630138
  binary

SEQ ID NO: 16228 - DNA, 121 bp, Homo sapiens
  chr1:35394922-35395043
  binary
cggggccgggagccgagcgccggagcccggggcgtgggcggcgccggggccgcagccgggccgtgcctggggggcgctgcagagggagccgcgagcgcggccccgtccccactcctccccg

SEQ ID NO: 16229 - DNA, 113 bp, Homo sapiens; identical to SEQ ID NO: 8903
  chr1:35396131-35396244
  hyper

SEQ ID NO: 16230 - DNA, 856 bp, Homo sapiens
  chr1:43888937-43889793
  hypo
cggccctgccttgtggtcctgcataagccactggacaaactgctcatcaggttggtacagaggtgtggaagggcgtggcttagcagggtatgagtggtacagaggtgtggagggcatggcttagcccggtgtgagtagtatagaggtgtggagtgcgtggcttagtggggtatgagtggtacaaaggtgtggaagggtgtggcttagcggggtgaggtgtggaagggcgtggcttagcagggtatgagtggtacggaggtgtggaagggcgtggcttagtggggtatgagtggtacagaggtgtggaagggcatggcttagcggggtatgagtggtacagaggtgtggagggcatggcttagcccggtgtgagtagtatagaggtgtggaagggtctggcctagtggggtatgagtggtacagagttgcagaagggcgtggcttagcggggtatgagtggtacagaggtgtggaagggcatggctcagcgaggaatgagtaggtcagaggtgtggaagggtgtgacttaggggggtatgagtgatacagaggtatggaagggcgtggcttagcgaggtatgagtaggtcagaggtgtggaagggtgtggcttagcggggtatgagtggtaaggagtgtggaagggtgtggcttagcagggtatcagtggtacagagatgtggaagggcatggtttagcagggtatgagtggtacagaggcatggaagggcgtggcttagccgggtatgagtggtacagaggtgtggaagggcgtggcttagccgggtatgagtggtacagaggtgtggaagggcgtggcttagccgggtatcagtggtacagaggtgtggaagggc

SEQ ID NO: 16231 - DNA, 106 bp, Homo sapiens; identical to SEQ ID NO: 8907
  chr1:44726788-44726894
  hypo

SEQ ID NO: 16232 - DNA, 255 bp, Homo sapiens; identical to SEQ ID NO: 7727
  chr1:46957171-46957426
  hyper

SEQ ID NO: 16233 - DNA, 362 bp, Homo sapiens
  chr1:6333795-6334157
  hypo
cgcacacgggcgcagcggtgcccatcccagggcgagtgcagaggctgcgcgcggccaccacacagtgcttccgcccactcttttgctagtgaaattctctgggagtaggtgcggcccctccctgccagcaggagcctgtggcaacggggtgtctaggatgtcgaggcagcagagaccctagggccctgccccgtgacaaaggccccacgtggggacctctttctctgtcctacatcctgggaccggacctctcttcttgtcctggtccggcctggacacggtcaggaatggccacctctgctcctgaggcttcttcgagaggaacggggcccatgcgaggaccccaggcccctctgcacacc

SEQ ID NO: 16234 - DNA, 120 bp, Homo sapiens; identical to SEQ ID NO: 5889
  chr1:77333644-77333764
  hyper

SEQ ID NO: 16235 - DNA, 142 bp, Homo sapiens; identical to SEQ ID NO: 7746
  chr1:92949466-92949608
  hyper

SEQ ID NO: 16236 - DNA, 426 bp, Homo sapiens; identical to SEQ ID NO: 8928
  chr1:9711649-9712075
  binary

SEQ ID NO: 16237 - DNA, 124 bp, Homo sapiens; identical to SEQ ID NO: 5893
  chr10:100994695-100994819
  hyper

SEQ ID NO: 16238 - DNA, 73 bp, Homo sapiens
  chr10:102475189-102475262
  hyper
cgtggagaagggcagagacagagaccaacgaagtggggtcgggtagaaagaggcggatataaaggcaggccag

SEQ ID NO: 16239 - DNA, 34 bp, Homo sapiens; identical to SEQ ID NO: 7753
  chr10:102995986-102996020
  hyper

SEQ ID NO: 16240 - DNA, 42 bp, Homo sapiens
  chr10:11060746-11060788
  binary
tctggtggccggggggaaagagctcttcttaccaaattaccc

SEQ ID NO: 16241 - DNA, 40 bp, Homo sapiens
  chr10:110671608-110671648
  hyper
cgcttcagctactccgttaggaggcgggcagttttgtctg

SEQ ID NO: 16242 - DNA, 101 bp, Homo sapiens; identical to SEQ ID NO: 8932
  chr10:11207330-11207431
  hyper

SEQ ID NO: 16243 - DNA, 156 bp, Homo sapiens; identical to SEQ ID NO: 10158
  chr10:11207724-11207880
  hyper

SEQ ID NO: 16244 - DNA, 240 bp, Homo sapiens; identical to SEQ ID NO: 6731
  chr10:118891774-118892014
  hyper

SEQ ID NO: 16245 - DNA, 93 bp, Homo sapiens; identical to SEQ ID NO: 13206
  chr10:119807131-119807224
  hypo

SEQ ID NO: 16246 - DNA, 229 bp, Homo sapiens
  chr10:126696804-126697033
  hypo
cgtgcctggccggctctggcctctttttttaaaacgcactagattttatggaagtttcctgacaccgtagcagtctcaagacaccagtgcctgagtcactccctgttcctgacaggggctacggctgcccaaggacagacactggccacataccccagggttgccccatgaagtccctgcaggttgcagtcttagagctgaccgagctatcacattcatgagaagaacc

SEQ ID NO: 16247 - DNA, 221 bp, Homo sapiens
  chr10:128076024-128076245
  hyper
gagtgacctggaagccaggaagaggggcagagaggaaactaaagaagtaggtaagagagtcagtttatgaaaatagagcctgctgtggagagcagcaggcacacctgcggaggagggggctgcctcacctgcggggccgctgcgcgcccccctaagtgtgttagcgggggaggcggggctggaaaggaaacctggtgaagggctggcccggagcctggggt

SEQ ID NO: 16248 - DNA, 106 bp, Homo sapiens
  chr10:131348408-131348514
  hypo
cgtacagttgagcgacattagttggtgccatctgtgagtgcacagtgcagcaactttagggggttcacaatgttccgcagccatcaccgccgcccagcactggcat

SEQ ID NO: 16249 - DNA, 89 bp, Homo sapiens
  chr10:133110981-133111070
  hyper
catcccgggtccacagcttcagtgcagcccctggcgacgcgcgctgacagctgggcagagacttccgtgcgctgtaaaccccttaggtc

SEQ ID NO: 16250 - DNA, 381 bp, Homo sapiens
  chr10:134212590-134212971
  hypo
cggttctctgcccttgtattccgagtcccagggctcctgtttccagccctgcctcggaccgcagggtgctgacctgccttccccaggtgccagtttctcatcagggcgtggtgcccgcccttatcccctgcatgtgacagtggaggcccagtccccaagtgtgggtgctgactcacagggaagagctgctgggagccctatgacaggtgtccgcccacctcagggaacctgtgggtcccagcacaaccggcgctgttgagcgcaggcggcgggcagccaggcacctgttcagagcaatcccacgggaatggcggccccgctcacacaggcgccgggatgcagggctgaggtgggcccagcagccagcgtttgttgtcggcc

SEQ ID NO: 16251 - DNA, 100 bp, Homo sapiens; identical to SEQ ID NO: 14503
  chr10:13933035-13933135
  hyper

SEQ ID NO: 16252 - DNA, 191 bp, Homo sapiens; identical to SEQ ID NO: 14504
  chr10:13933246-13933437
  binary

SEQ ID NO: 16253 - DNA, 209 bp, Homo sapiens; identical to SEQ ID NO: 5728
  chr10:17270445-17270654
  binary

SEQ ID NO: 16254 - DNA, 116 bp, Homo sapiens; identical to SEQ ID NO: 5896
  chr10:17272233-17272349
  hyper

SEQ ID NO: 16255 - DNA, 96 bp, Homo sapiens; identical to SEQ ID NO: 6738
  chr10:1780056-1780152
  hyper

SEQ ID NO: 16256 - DNA, 117 bp, Homo sapiens; identical to SEQ ID NO: 5897
  chr10:18429033-18429150
  hyper

SEQ ID NO: 16257 - DNA, 49 bp, Homo sapiens; identical to SEQ ID NO: 5898
  chr10:18430247-18430296
  hyper

SEQ ID NO: 16258 - DNA, 103 bp, Homo sapiens; identical to SEQ ID NO: 6739
  chr10:22517909-22518012
  hyper

SEQ ID NO: 16259 - DNA, 61 bp, Homo sapiens; identical to SEQ ID NO: 6740
  chr10:22518450-22518511
  hyper

SEQ ID NO: 16260 - DNA, 32 bp, Homo sapiens; identical to SEQ ID NO: 6742
  chr10:22626103-22626135
  hyper

SEQ ID NO: 16261 - DNA, 791 bp, Homo sapiens; identical to SEQ ID NO: 8945
  chr10:31607954-31608745
  binary

SEQ ID NO: 16262 - DNA, 162 bp, Homo sapiens; identical to SEQ ID NO: 10178
  chr10:3160827-3160989
  hypo

SEQ ID NO: 16263 - DNA, 125 bp, Homo sapiens; identical to SEQ ID NO: 10180
  chr10:3161171-3161296
  hypo

SEQ ID NO: 16264 - DNA, 94 bp, Homo sapiens; identical to SEQ ID NO: 8948
  chr10:50606762-50606856
  binary

SEQ ID NO: 16265 - DNA, 277 bp, Homo sapiens
  chr10:5638918-5639195
  hypo
cggtttcagccacccggagcggccgccccacccgcctcctgcaaagaggtgagctgcccctgcccactgctgctccagctcacacccgtcatccgtgagccattactgactacctacagggtgcgcccgccgtggtctgcatgtcccacagaaattacccagggctggcccagcggctcccagcagacggccaggcatgtgctcccaggggcactggtcctagacagatgaggacacatagggactgacacccctgaaaacgcctggggcagcaggc

SEQ ID NO: 16266 - DNA, 314 bp, Homo sapiens
  chr10:60935996-60936310
  hyper
ccaattcttggtaaacaacaaacatgctcgccctcgcctccccgtgcagacgcctcagggccaactcgggcttcgccaggcaccgagagcagacagaagacgccaaatggctatcaccaggagagagggcgaggcagccgcgcggcgtatagcgctcgcccttcccgcgcgctcggtcgcccgacgcctcacgcgcgaggttgccttggcagtggctggagggcaggtgggggcgcgtgcgcgcagaagggcgggggagggaccaccgcgcgccagcaggtgggcgcgttctcccgcgcgcgtgcgcgcgtcga

SEQ ID NO: 16267 - DNA, 73 bp, Homo sapiens; identical to SEQ ID NO: 10186
  chr10:64578688-64578761
  hyper

SEQ ID NO: 16268 - DNA, 134 bp, Homo sapiens
  chr10:73591528-73591662
  hypo
cggaatcacagctctcttaggaaccagtgcacgtgcccgtggctcaagcaccatccccactcaccgccgctcacctcagtggcattgtccttcagcatatcaccagctgcggtgacaacgtctttgcatatgtc

SEQ ID NO: 16269 - DNA, 57 bp, Homo sapiens; identical to SEQ ID NO: 10187
  chr10:7449898-7449955
  hyper

SEQ ID NO: 16270 - DNA, 61 bp, Homo sapiens; identical to SEQ ID NO: 10188
  chr10:7453036-7453097
  binary

SEQ ID NO: 16271 - DNA, 229 bp, Homo sapiens; identical to SEQ ID NO: 10189
  chr10:7454077-7454306
  hyper

SEQ ID NO: 16272 - DNA, 85 bp, Homo sapiens; identical to SEQ ID NO: 6755
  chr10:79396547-79396632
  hyper

SEQ ID NO: 16273 - DNA, 79 bp, Homo sapiens; identical to SEQ ID NO: 10985
  chr10:8095120-8095199
  hyper

SEQ ID NO: 16274 - DNA, 100 bp, Homo sapiens; identical to SEQ ID NO: 10986
  chr10:8095845-8095945
  hyper

SEQ ID NO: 16275 - DNA, 91 bp, Homo sapiens
  chr10:85954199-85954290
  hyper
cgccggcaaagggggcgtggcgggcggggagtcctcttgtcacgccctcctgcccccgcccgcggctgggagcctgtcgctccgctctgcg

SEQ ID NO: 16276 - DNA, 82 bp, Homo sapiens; identical to SEQ ID NO: 10192
  chr10:92617016-92617098
  binary

SEQ ID NO: 16277 - DNA, 278 bp, Homo sapiens; identical to SEQ ID NO: 10193
  chr10:92617539-92617817
  binary

SEQ ID NO: 16278 - DNA, 748 bp, Homo sapiens
  chr11:102962175-102962923
  hyper
cgatacgggagtaggggatcgagggtcggttgtggggtgggggtgggggtggggggaagcgcaatttacatatgcatctgttccccaccctgcagggcacgtagactcttaacgtgggcggctcttctagtctctccataaacgccagcgtgcacacactcgaacacgaggtcgggtcgggcgcggagactcgcggtgttcggcacctacagcctagctcgatcaaaggggcctcacctgtctccagccccagcccggcaggccgggcccgactccttttcctccagttgtccagcaaaggagggaggagggaagcttgaagggtggggggagatggtacctggagattttacactttttgaggcctccgtcttccgctactgctgctgccaccccaggggattttctcttcttcttcaccggcatcttccgccctccccggcagggtgggcaggggagccggggaagggggtccctgtccgctggaagcccctcagcgctggcacccagttcccagagacagcagcaagcggaggagcagagtcgccagcccgcaccggcgcggcccagcccggccgccgcccgctcccaggtatcctcgtcgtctttctctgaccgggacagggctggctcctcgccggtggacactgcggttcgttctcaccgggaggagataacgcggacagcgcggcagctccaccagtcacagcaagcaagaggctcagcctaacccggaggcgaatcgctg

SEQ ID NO: 16279 - DNA, 99 bp, Homo sapiens
  chr11:102963062-102963161
  hyper
ctgtccagggtatcctgacctttctcatgaagcttctaccgcgctctgatgctggcagtcaccgccaaaaagtgaaactactaatactttgcagttgac

SEQ ID NO: 16280 - DNA, 227 bp, Homo sapiens; identical to SEQ ID NO: 12165
  chr11:106889091-106889318
  binary

SEQ ID NO: 16281 - DNA, 168 bp, Homo sapiens; identical to SEQ ID NO: 8963
  chr11:107462735-107462903
  hyper

SEQ ID NO: 16282 - DNA, 79 bp, Homo sapiens
  chr11:119993701-119993780
  hypo
cggtgcactccactcacccccgaagctgttcgtgtagttgttcacatagcgatggtcaccacctaggaagcagagggtc

SEQ ID NO: 16283 - DNA, 240 bp, Homo sapiens
  chr11:124630133-124630373
  hyper
cggaagtcaccaactggtccgtttttttcggtcccagggtccacggagccactgggagagaaaaggagtctggttgggtctgatcgaaggacactgggacagcccaagaaagggacccttccggcccacagccctctccgaggccagagtgagggagccggcaggggccgaaggagagcgaaatgggcccgctccccggggctatttttagtctccctctttctctgagaaactcccccc

SEQ ID NO: 16284 - DNA, 141 bp, Homo sapiens
  chr11:124630410-124630551
  hyper
cgccgaggagcctactgagccggagagcctcctccagagcccagaagagcggagccgggcgcctgcacgttgcaccggggtcaccagtgccatttaaccctcgagtggctggcgggaactgggcaaccccccagggggacc

SEQ ID NO: 16285 - DNA, 129 bp, Homo sapiens; identical to SEQ ID NO: 10198
  chr11:128562635-128562764
  hyper

SEQ ID NO: 16286 - DNA, 145 bp, Homo sapiens
  chr11:132814249-132814394
  hyper
cggtgtgcgtgtccatcgcgctgcgaacggctccccgcccagccaagtccagccctgacggcgcgctgtcctgggcccgcgcagaggtggagtgcacccacctccgaggacccacctcggaaacgcccgtgcccctccactggac

SEQ ID NO: 16287 - DNA, 706 bp, Homo sapiens
  chr11:1535842-1536548
  hypo
cgggagcacccagggaacacaagtgcaccatgacgcggagcccttcatcaccgcaggccacggcgcttgtccttcccagaggcccccaaccacagctgctgagcgacacccacaccgcttctctcttcacacagcggactgatgaggagtcccgccaagcaggagctctgagccacagcacagagtgtgctggcccaagtccacgcctgcatgcaagctcagccatgcgtctaatggcaataaccgtggaatgagctcgtgaggttcggagagtcccaccccgacggggagagccacagggagccccaatctcggcagtgaccggctccaggtccccacgtaccgtgagagtggggacagcggtggacagcagcccttgagcagggcacaaccttcagagagacctcgacaagtgaacacttaaaccaaggtcgaccctgggggaaacgcagacctcctcccagtgcccccttcagaaaaggtactcaaacactggctcccatcatgagctgggcacggaaccaggcatgggtactacctgcctccagggcttggagctcgggaggggaaccaatcccgggccctcgacctgggaggtgccagaaggccctcacacaagactccagcactagggtggggaggttaaagtaaacaggacagaggggttcaactaagacaatacctttgctcacggtcagaggcgaag

SEQ ID NO: 16288 - DNA, 95 bp, Homo sapiens
  chr11:1536583-1536678
  hypo
cacaagctctcccgccgcggctgcaccacatgcctgataaagggacagccctggatgtctagttcctcaggcacgtgtgcacacatgtgtgctgc

SEQ ID NO: 16289 - DNA, 70 bp, Homo sapiens; identical to SEQ ID NO: 13256
  chr11:18512439-18512509
  hypo

SEQ ID NO: 16290 - DNA, 77 bp, Homo sapiens
  chr11:20179003-20179080
  binary
cacggaaacagagaaaacagcccccacaatagcctgtttcgtttttccattcagtggacttagggaaacaaacctgc

SEQ ID NO: 16291 - DNA, 38 bp, Homo sapiens; identical to SEQ ID NO: 10204
  chr11:20619974-20620012
  hyper

SEQ ID NO: 16292 - DNA, 94 bp, Homo sapiens
  chr11:2290844-2290938
  hyper
cgctcgggcctggcgctcggctccgcgggctcctgggggcgcgacccgccgggcctgcccaccccgtccctccaccccggcccccggccctccc

SEQ ID NO: 16293 - DNA, 34 bp, Homo sapiens
  chr11:2398443-2398477
  hyper
cggggccgggggcggggcgtgagctggccggggc

SEQ ID NO: 16294 - DNA, 565 bp, Homo sapiens; identical to SEQ ID NO: 8980
  chr11:2398759-2399324
  binary

SEQ ID NO: 16295 - DNA, 401 bp, Homo sapiens; identical to SEQ ID NO: 8981
  chr11:2399399-2399800
  binary

SEQ ID NO: 16296 - DNA, 312 bp, Homo sapiens
  chr11:2569208-2569520
  hypo
cggtgggggatgaggtcagggaggtggcaggacctggcgtgtgagggcttggggcgactctggggagttagggtttcgctctgcatgacaggagcctggggcctggcatggtgtgactcagacttaacgccgcccctctgactggtagaggccaggcccaggataaggtggcggcaggcaggtctctaagcagtggcagctcagacccgaggtcccagggtcatgcgtgtttgtcctgattgcacgagtcgtgtgagcacagaaacgtaggtggaaagatggtggcttcgtccagggaggtagactgggaac

SEQ ID NO: 16297 - DNA, 56 bp, Homo sapiens; identical to SEQ ID NO: 5916
  chr11:43599961-43600017
  hyper

SEQ ID NO: 16298 - DNA, 239 bp, Homo sapiens; identical to SEQ ID NO: 5917
  chr11:43600215-43600454
  hyper

SEQ ID NO: 16299 - DNA, 39 bp, Homo sapiens
  chr11:46777060-46777099
  hypo
ttaaatataaataactagtccttagggattcagtcattc

SEQ ID NO: 16300 - DNA, 106 bp, Homo sapiens; identical to SEQ ID NO: 6390
  chr11:47359237-47359343
  hypo

SEQ ID NO: 16301 - DNA, 344 bp, Homo sapiens; identical to SEQ ID NO: 15475
  chr11:561903-562247
  hypo

SEQ ID NO: 16302 - DNA, 244 bp, Homo sapiens
  chr11:562884-563128
  hypo
ctgtcactcccccacccctgacgtgggcagatatgggggtcacagggtctgactcgggaggcaggtgagcccgcggacctgatcccctgtcactcccccacccctgacgtgggcagatacgggggtcacagggtcccactcgggaggcaggtgagcccggggacctgatcccctgtcactccccaacccctgacgtgggcagatatgggggtcacagggcccgaccagggaaagtgctccctcc

SEQ ID NO: 16303 - DNA, 117 bp, Homo sapiens
  chr11:57071417-57071534
  hypo
cgccctgtccagcggccactccccaaaatgacacattcacattcatcaccatcacacacactcaggcagagagcttgtgcgctgtttgtcactcccccagatggacctcgcacccac

SEQ ID NO: 16304 - DNA, 237 bp, Homo sapiens
  chr11:61275825-61276062
  hyper
cggccgcacgccgctggacgtgaatggctcgcagtgaccgcgcccctcagcccctccttgtgagcctctagtccagagtctttgatccaccgccagcgtttccttcgccttcttggacccgcggctctggggcgcacacaaccgcacaccaaacagcgtcgggcgtcgggtctcagtgccaggcttggccggggcggggaatctctcggcttgtgcttgctccgcggtgggctggat

SEQ ID NO: 16305 - DNA, 316 bp, Homo sapiens; identical to SEQ ID NO: 12191
  chr11:61276101-61276417
  binary

SEQ ID NO: 16306 - DNA, 88 bp, Homo sapiens
  chr11:63779256-63779344
  hypo
actcctgtaggagggatgtccagggaccccacgggaagatgggtgtgtctgggcagagtcagatggggtctaacttgggcaggtaggc

SEQ ID NO: 16307 - DNA, 343 bp, Homo sapiens
  chr11:64124362-64124705
  hypo
cgctgagggaacagcaggcgtggtgcagctggaagcggggggtattggcaggtcgggggtgggcagaaggtgctcgagcctgtgggcctcctgggactctgggagtcctcctgagggaagcagatctcagctgagcctttccctctaggccctgaggtacaggaaccggagaaacgtcccctcaccccatccctcagccagtgacaccgtgggaacagcaggcttgggagtgcagccttctcggcactggagtgtcagcggaggccccaggcagcccaagagctcagggagccagggaccccaaggggagtccttggacaaggaggcctgggccctgagatcc

SEQ ID NO: 16308 - DNA, 381 bp, Homo sapiens
  chr11:64621795-64622176
  hypo
cgggcgccatcactcatgtctgcgcttggagggcggcaccaggtgcgggggcaggtcggcaggcagctcgtggccctccagcttgaccttgatgaggtggttggccagcgcgaactcctcgtcgtccagcagcccgtccttgtccacgtcggccagcttccagatcttccctagcacggtgttggggagcttggacttcaccatctccttcttggcgttggcgcccgtgatcttgccgttgacaggggacagcgtgtagaagatctcgtcgtaggtgggcttgtccttgcccaccacccactccacgtcgtcgatgccctcgccggccccctcgccgtagccgtgcccgaacggcccgttcatggtgccgtcaaaggcgcc

SEQ ID NO: 16309 - DNA, 298 bp, Homo sapiens; identical to SEQ ID NO: 13271
  chr11:64977165-64977463
  hypo

SEQ ID NO: 16310 - DNA, 52 bp, Homo sapiens; identical to SEQ ID NO: 13272
  chr11:64977534-64977586
  hypo

SEQ ID NO: 16311 - DNA, 95 bp, Homo sapiens; identical to SEQ ID NO: 10212
  chr11:66631185-66631280
  hypo

SEQ ID NO: 16312 - DNA, 39 bp, Homo sapiens; identical to SEQ ID NO: 10213
  chr11:66631852-66631891
  hypo

SEQ ID NO: 16313 - DNA, 78 bp, Homo sapiens
  chr11:68133213-68133291
  hypo
ctggcgggaatgggttgcggccgccgggggtgccccagaaggaacctcggcaaacccgttcgaaatgatccacttggc

SEQ ID NO: 16314 - DNA, 139 bp, Homo sapiens; identical to SEQ ID NO: 13280
  chr11:72475539-72475678
  hypo

SEQ ID NO: 16315 - DNA, 317 bp, Homo sapiens; identical to SEQ ID NO: 13281
  chr11:72475723-72476040
  hypo

SEQ ID NO: 16316 - DNA, 111 bp, Homo sapiens; identical to SEQ ID NO: 13282
  chr11:763192-763303
  hypo

SEQ ID NO: 16317 - DNA, 62 bp, Homo sapiens; identical to SEQ ID NO: 13283
  chr11:764018-764080
  hypo

SEQ ID NO: 16318 - DNA, 268 bp, Homo sapiens; identical to SEQ ID NO: 5923
  chr12:103351149-103351417
  hyper

SEQ ID NO: 16319 - DNA, 58 bp, Homo sapiens
  chr12:103890025-103890083
  hyper
tggaggtagtaatccccagaaatcctgaaattcccccttccacctactcatctgcctc

SEQ ID NO: 16320 - DNA, 292 bp, Homo sapiens; identical to SEQ ID NO: 6398
  chr12:113725566-113725858
  hypo

SEQ ID NO: 16321 - DNA, 214 bp, Homo sapiens
  chr12:115106003-115106217
  hyper
cgggaggcgctggggtgccgagccagctgcggcgacctggacgcattcgtagacgagacagataggtggcactcgaagcccagaaaaaaggcgaaggcgcctgccctgagtggcctctggggcggccgcagccaccataaagcctgcggcgagattgcgaccggcgccaggtgagtaataggcagcaaaatccagagagactgcgagccgttca

SEQ ID NO: 16322 - DNA, 219 bp, Homo sapiens
  chr12:115106246-115106465
  hyper
caggagttactcattaacatcacaatatacaaatgagatacacaggagattaaaaaaaaaaaaaaaaaaaaaagaggaacgccagtaagagaggctggacacaagtctgagcagggtccccaaatcgggggcggggggagagaagggaggaggtaagcaaatttggactgagaaagaagagaaaagcaaagcatttcttcccttttggaggctgagttc

SEQ ID NO: 16323 - DNA, 340 bp, Homo sapiens
  chr12:115106502-115106842
  hyper
accaccttctcagaggcgcggacaccgcgcgttgtcgctggatccagagctgcccccttcaggctgtagccgctgcgcagaaggagcgcgccctggaaatctcccagtcctcgggggagccccagcctcaaaggtccccagggcccgtctcagctcaggccctgccacccccgcagcgcaccccgcccctccccccccccgcgactccgcaccaacatactctggttgtctgtcttccctcccacccccggagacatcgcagaggaggctgtaggggtccccacgtgcctggccagagatggaaggggctttgccccgctctccaaaaggtctcgacctc

SEQ ID NO: 16324 - DNA, 805 bp, Homo sapiens
  chr12:115120701-115121506
  hyper
cgtcctccacctcttcttcgggctccatggtcttcaaaggcctcagatgcgcctggggccccagggaggagaacgggatgccggtctcggccgcccccaccaattgatccatgatcggcttggccagggcgcccggcagcgagagcgccgccgcgccgttgggaggcagcgtcagcgcggggaagaacggcggctggtgacccagcaccgcgctcatggcgaagtccggcgcccggtgaggtaggaacggatggtaggccatgcttgtcccaggaatgaccggatctctcatggagaggctcatccactccaggcggggcgctgggctccagccggggacaagtccgcagctgctgtgttttgttgtttttttgttgttgtttaacagcagcacataattcaaaaggggggaaaaagcaaaacaaaaaagaaagaaaaaagaaaaggaggcagaaatcacaactaatgcacttcaaagggaggaggggaagtgtcttttggagaatgggaggccgcttttaaagagggcaaggcgaaaaatcagcaaacatagtcgcgcgggtgaccgtccttgtgccttgcgtttttaaaaagccgctcctgaacgtcggtttcagaagcgagaggagcgagcagggtctcgactcgcgcccgagccctgccgctgagctcgaaatagacactccagccctgcgtcccaggaatctctctccagcccctaggtcttttgttgcaaatgtgaaaggttctcctagaagactttttacctttctttttcttcttcccccgccccctatctgtcttc

SEQ ID NO: 16325 - DNA, 342 bp, Homo sapiens
  chr12:115121544-115121886
  hyper
tagacccggctttaacagggagcgagagagcggaaaaagtctctctcctttaaaaaaaaaaaaatctgatttaaacccccttctaccagcgctatcaaaacttgaattgcaaactggcttccgttcgccgccctcctcctccttcctctgctccgagcctccggagggtgtctcggtttcaatccaaatcttgctgggctcttctcccgtgcctctctctcttccttgtcctaaaacgtgagcgaattcgcttcctaaatctgtgtccaggcgcgcagggcagggaggatttagagggggaaaaaatggaacagagggaaagagagggaggggagagagaga

SEQ ID NO: 16326 - DNA, 222 bp, Homo sapiens
  chr12:115122015-115122237
  hyper
gctgcggggagccggaggcctcttgattggctctttgacgctttcggaccaattgtgttgctgcataggcgtggttttcacaggtcgagtgctgggggatagagctgagttataaaaagaaggtgtcggaaactgtaacgtcgcagcgccgcatcggtactactgcctgtcctgtgaatatgtcaacatgatcagagggcgggcgggagccactggggagcg

SEQ ID NO: 16327 - DNA, 420 bp, Homo sapiens
  chr12:115122524-115122944
  hyper
ctctccttcttctccccgccccgggcgagccgggcgggtggccgagcctccccgcgagctgccatccggccactcggttctacaaaagccggcggcagccgagaagcgagcgccgagactccaggcttgcgtgctctccagccccacgtggagccaagctccgcccggccgccgctgaagggctcccgagctcgggtgtctcggtgctggtctcccctgcgtctgggctgggggagcacaaggatgcggccatatctcagcacacgcatgtgtgggcttcctctccactgcgccccacccgcagccatgtgcgggtacccaaacacccccggtgtatctgtactcgaacacgcgccaacacactgggactgaaacacacaccgaaaaacacgtacacacaaacacgtacacagcctgcgc

SEQ ID NO: 16328 - DNA, 143 bp, Homo sapiens
  chr12:115889561-115889704
  hyper
cgtcgtgacagtgccaatagccagcagtctcctgtccgcgtgggttgcgagccccgggcgtggacggagttgggagcggagggcggcaggtgccagcggggcccgcctctccctgcaggcggccccggcaagttcacggccgg

SEQ ID NO: 16329 - DNA, 70 bp, Homo sapiens
  chr12:115889776-115889846
  hyper
gcccccgcgcccctcgctcgcgccgtgcctgccgccgccacccgcccggccgccgggccggccactgagc

SEQ ID NO: 16330 - DNA, 336 bp, Homo sapiens; identical to SEQ ID NO: 13304
  chr12:120148396-120148732
  hypo

SEQ ID NO: 16331 - DNA, 96 bp, Homo sapiens
  chr12:120543024-120543120
  hypo
cgacatcccactcaaaagcaaatagctgaggatgatacgcaaccagaacacattcagaaaagcggccagcacccggggtcttccagccaggggaac

SEQ ID NO: 16332 - DNA, 137 bp, Homo sapiens
  chr12:120580310-120580447
  hypo
cgttctcttatctgcacacgtgctggccaggaaacccagcaggagcccaaagagagtgggtaggatctcacgcaaggtgcggggggtattggagacaacaatcttccagacatgcagggacgcctgccgcaccacca

SEQ ID NO: 16333 - DNA, 704 bp, Homo sapiens; identical to SEQ ID NO: 6401
  chr12:121687598-121688302
  hypo

SEQ ID NO: 16334 - DNA, 239 bp, Homo sapiens; identical to SEQ ID NO: 6402
  chr12:121688331-121688570
  hypo

SEQ ID NO: 16335 - DNA, 458 bp, Homo sapiens
  chr12:122614584-122615042
  hypo
cggaattcagcgacaccctcttctccacactttcttcacaccagccggtggcctggcccaatccccgggaaataggtaacccaaaccagggccttgggctttgaacagccagccgcttccttctctgccaggccccctctgggccagggttccttcagggccatctctgagctgctgcacgtcacggttgggggcaggcagtaaggaagggaaggatggctggcctcatttgacatccaggccgcacgtaccgagtgggtggggtctgcagagtgggcccactgggcagctgccattcccgtagtgccatggtgggaggacagcagcagggtctagtctgagtcattggcacatttcagataccgttctcttcacggggtacgtgtgccgtgcctaagccgaggcggccgggccgtgactcatgctaaagaaaatcagaagcactcccgggtgtgacc

SEQ ID NO: 16336 - DNA, 255 bp, Homo sapiens
  chr12:123434339-123434594
  hypo
cggttctcatcaaagaagcttgtctcctgggacaccagtgagcggaagagacagtttcgaaggcgaatgttcagtctggcaaatatgagggtaaaaatgccgccccgaatacctgcggcaaatgagctaattgcagataagagatattatagcacgatgtccttccagaccagtgaccacacccggctgccccctcccgctgccggcaggcctgggagccccaccgcagccccactccagggctggcatccctgc

SEQ ID NO: 16337 - DNA, 203 bp, Homo sapiens
  chr12:123434957-123435160
  hypo
cggggtgtgcggggcagggcgtgggggttgagccagctacctgccaatggccagcaggcacacgatgacgacagccgtgctgaactgatccatgcttttctggatgacgatgccatcaatggcgcggcccgtgtagtagggcaggaaggtctctcctgggggaggcagggcagcctcagggacgtctgcagccaggggaaccc

SEQ ID NO: 16338 - DNA, 171 bp, Homo sapiens
  chr12:124869706-124869877
  hypo
cgctggcgaggcgagcctgcaccttctgtgcttgtggaggagggaagggtctcagcctcccgtggcctgcctcaagccctccaggatgctggggctgagacgtccgcccccgcccccccagacctgtccctccccaaccacggcagccctaaagctgtgaggtcaaatggg

SEQ ID NO: 16339 - DNA, 326 bp, Homo sapiens
  chr12:124870152-124870478
  hypo
agaagctgagttctaacaaggcggcataatagcccctccctggcccatgcctcctggggtgcagagacatctcctgaggcagtctgggctcctctcccagcttcccagaggcgcggtgcagcgtgactgggggctcaccatcttcagcttgtgctgctgcaagatctcatcgaggttctgcctcttcttgtagttgaagtagaagttcttacactgcgacacagtcttggagcccaccatccgggcgatggccgaccagttgcggccgtgttccaggagacctgtctcaggagaggagggcagtgagaagaggccaggcccggcac

SEQ ID NO: 16340 - DNA, 406 bp, Homo sapiens; identical to SEQ ID NO: 11040
  chr12:128750713-128751119
  binary

SEQ ID NO: 16341 - DNA, 31 bp, Homo sapiens; identical to SEQ ID NO: 5928
  chr12:131400786-131400817
  hyper

SEQ ID NO: 16342 - DNA, 54 bp, Homo sapiens; identical to SEQ ID NO: 5929
  chr12:131400919-131400973
  hyper

SEQ ID NO: 16343 - DNA, 129 bp, Homo sapiens; identical to SEQ ID NO: 6823
  chr12:132222124-132222253
  hypo

SEQ ID NO: 16344 - DNA, 500 bp, Homo sapiens
  chr12:133121644-133122144
  hypo
cgcccagcatggggccgtgcggcacggagctcagggcctcgcccagtgtggggcagtgcggcacagagcgggcgtcttctttggagcctgagtcttggcctcctgaccatgcccagcatgtcccttcggggcctggggtctgtcctctgctcccaggcattcctgcctatcacaaacccacaccagggtgacgttccctgagcccccgagcccagccccggcgccgtgaatggtcgcctcactcgggcagcttccgagaggtggatgtgtctctccttttctcctcgccctgattaattgcctcattcaatgccgactccactgcagttaaacattaattcagtaggacttaataacacgaattcattcacgcccctgcctgcgcctggctgacagtgccgtgctatttggttaatgagaggatccatgcagcgtcctctggtgcgcttgctggaaagcacccctcagtgtctccttgctgttggatgcattaaaccctc

SEQ ID NO: 16345 - DNA, 1071 bp, Homo sapiens
  chr12:133353501-133354572
  hypo
cgtgagtccagccctgcaagtccagcccccgtgaaccgtcacctcttggtttcccacgggctgtttgctgagctgctcgtccagctgcttctgcaggagctggagctgtgcccgggcctcggccagctctgcttggaactgtgctatctcctgggaatgtttcccctcccgaatcctagcgtaaaaaaacaagaaagaagggaatcgccacgctcctccagtgtgctgtgccctcccgctgggaaatgctgcctgtggaaggcgttcgtcctggcaggccctctgctgtgcactgcgtgctgcagccatgcttggtgcccacagtgtgcactcgggcagtcctcacgaagcacctgagactcacacttcactggcacccctcacagatcccagagactcactttgccggcacccctcacagatcccagagagtgccggccccgagaccacagtgcatgggacccacagagccacagcatcagccccgcgccgggccgccccttcccgcctctgacctgaagctaagtactcctgctggggcgctttctctcttggggggaggacacggggcagtgagtgaggctcaggattctggagacggaggctgggtgccttctactcctatgattcactcaagtactcggcaatttgcaaaatatagatgaccctcgctgtgctgaaggtgtgaattagaccccgcccattgccaggacagccatgtttgagggctggcggggcccaggcactcactgaaggtcgtcggcctcggcctgcagcttctgcaccaggtgttccttggcctgcagctccttcttcacctcactcagctccaaggaggccgccttgaagtggcggcggttatgcccggcttccaccttggcagcagccacctaggaggaaggaagccacgttgtccatgccctgcgtgacacccacagctttatgacgtgccgggcgcagggggtgaatgcactcccggccccgtgcatgtcctggctgccggcgtgtgcttctccacaggcctgtcaagttccttgtaaagatgaaaccacctgacccggagctcggcac

SEQ ID NO: 16346 - DNA, 117 bp, Homo sapiens; identical to SEQ ID NO: 5738
  chr12:21681020-21681137
  binary

SEQ ID NO: 16347 - DNA, 118 bp, Homo sapiens; identical to SEQ ID NO: 9022
  chr12:22488705-22488823
  binary

SEQ ID NO: 16348 - DNA, 253 bp, Homo sapiens; identical to SEQ ID NO: 10250
  chr12:24715505-24715758
  binary

SEQ ID NO: 16349 - DNA, 144 bp, Homo sapiens
  chr12:29935696-29935840
  hyper
cggctggggccccagggtccctggagaagcctaggctctgcgttacctctctctgcaccttctaaagtctagatccagagaagtctggcagattggagagcctctgggagcagccaagggtgcaaggcgggggctggggggctc

SEQ ID NO: 16350 - DNA, 37 bp, Homo sapiens; identical to SEQ ID NO: 6833
  chr12:32831540-32831577
  hypo

SEQ ID NO: 16351 - DNA, 41 bp, Homo sapiens; identical to SEQ ID NO: 5931
  chr12:3602961-3603002
  hyper

SEQ ID NO: 16352 - DNA, 77 bp, Homo sapiens; identical to SEQ ID NO: 5740
  chr12:40618264-40618341
  binary

SEQ ID NO: 16353 - DNA, 35 bp, Homo sapiens; identical to SEQ ID NO: 5741
  chr12:40619048-40619083
  binary

SEQ ID NO: 16354 - DNA, 54 bp, Homo sapiens; identical to SEQ ID NO: 10256
  chr12:41086129-41086183
  hyper

SEQ ID NO: 16355 - DNA, 211 bp, Homo sapiens; identical to SEQ ID NO: 10257
  chr12:41086454-41086665
  hyper

SEQ ID NO: 16356 - DNA, 126 bp, Homo sapiens
  chr12:4273746-4273872
  hyper
cgtgagccgtccccttcgctaacccccaaccccgccttctcctgctcctcctctcttcactcttcctgcctctcggctccggggtctcctcgcttccccgcagtccccgccccccagttcccaaag

SEQ ID NO: 16357 - DNA, 86 bp, Homo sapiens; identical to SEQ ID NO: 5742
  chr12:4377809-4377895
  binary

SEQ ID NO: 16358 - DNA, 245 bp, Homo sapiens; identical to SEQ ID NO: 5743
  chr12:4378558-4378803
  binary

SEQ ID NO: 16359 - DNA, 247 bp, Homo sapiens; identical to SEQ ID NO: 7891
  chr12:4379920-4380167
  hyper

SEQ ID NO: 16360 - DNA, 285 bp, Homo sapiens; identical to SEQ ID NO: 7892
  chr12:4380196-4380481
  binary

SEQ ID NO: 16361 - DNA, 401 bp, Homo sapiens; identical to SEQ ID NO: 7893
  chr12:4381033-4381434
  hyper

SEQ ID NO: 16362 - DNA, 167 bp, Homo sapiens; identical to SEQ ID NO: 9032
  chr12:4382439-4382606
  hyper

SEQ ID NO: 16363 - DNA, 51 bp, Homo sapiens; identical to SEQ ID NO: 6838
  chr12:4382915-4382966
  hyper

SEQ ID NO: 16364 - DNA, 210 bp, Homo sapiens; identical to SEQ ID NO: 6839
  chr12:4382999-4383209
  hyper

SEQ ID NO: 16365 - DNA, 255 bp, Homo sapiens; identical to SEQ ID NO: 7894
  chr12:4384059-4384314
  hyper

SEQ ID NO: 16366 - DNA, 79 bp, Homo sapiens; identical to SEQ ID NO: 7895
  chr12:4384533-4384612
  hyper

SEQ ID NO: 16367 - DNA, 409 bp, Homo sapiens
  chr12:48577061-48577470
  binary
cgccatcctctgagaaaggaatgcgggctggaaaaatctttccagggcagtctcgctgggtctcataccccggctaggggagggacgatctctcccggacttggaggtttctgcagcagacggctctctcatacttccctattaaacattgcgaccacacgctctttccagccttggccgaagccactgtagcgtcccctctcctccccccaccccgctagtccagactccagagccccactgcagcttccagccatcctccctttttcttcgccacttcctggttaccatggagacacacgtcatttacgtgccgtgcgtcgccttggaaacagaggagcatccgcgacacccccgggagacccaccccagctgctgctgccacactcgcgggcgctgcccggtaatg

SEQ ID NO: 16368 - DNA, 61 bp, Homo sapiens
  chr12:49364178-49364239
  binary
caactctccccaccccgggtcggtgtttctatggcctgggagacaaggggaactgctcacc

SEQ ID NO: 16369 - DNA, 54 bp, Homo sapiens; identical to SEQ ID NO: 6843
  chr12:52401605-52401659
  hyper

SEQ ID NO: 16370 - DNA, 182 bp, Homo sapiens; identical to SEQ ID NO: 10262
  chr12:54366668-54366850
  hyper

SEQ ID NO: 16371 - DNA, 394 bp, Homo sapiens; identical to SEQ ID NO: 13341
  chr12:54378327-54378721
  hyper

SEQ ID NO: 16372 - DNA, 104 bp, Homo sapiens; identical to SEQ ID NO: 13342
  chr12:54393256-54393360
  binary

SEQ ID NO: 16373 - DNA, 323 bp, Homo sapiens
  chr12:5541693-5542016
  binary
ggccgaagcgcaaccgcagccaccccgctacacacacacacacacacacacacacacacacacacacacacacacacacagacacggacacccttctccacctcctcccctcttgtccctcggctgcccaagaagcttccctcaatctgggaaagtgatcaggtttaagggacctggattggaaagggtgggggcagaagaggggaaatggggacgacgaaagagcaggaaagagattcaacagaatcaaccacccaccactcccaaccgacccgcctgctcctccgagaaagctcctagcgcatcctataacaaaagggggt

SEQ ID NO: 16374 - DNA, 205 bp, Homo sapiens; identical to SEQ ID NO: 9055
  chr12:79257510-79257715
  hyper

SEQ ID NO: 16375 - DNA, 201 bp, Homo sapiens
  chr12:79258097-79258298
  hyper
ggcatgctcagtatcagggtaggttttgattgagagtaaaaaaaaaaaaaaaaaagctttgtattatgctctctttctcctgtgcatactgcttgctgaacagcttgtggggcattcctgagtctacctagaggttttatcagacgcccttgattgtgtctccttgggatctgttcccctcttacttcaccccctccccca

SEQ ID NO: 16376 - DNA, 57 bp, Homo sapiens; identical to SEQ ID NO: 9057
  chr12:85305601-85305658
  hyper

SEQ ID NO: 16377 - DNA, 255 bp, Homo sapiens; identical to SEQ ID NO: 9058
  chr12:85305980-85306235
  hyper

SEQ ID NO: 16378 - DNA, 265 bp, Homo sapiens; identical to SEQ ID NO: 14596
  chr12:93966037-93966302
  binary

SEQ ID NO: 16379 - DNA, 66 bp, Homo sapiens; identical to SEQ ID NO: 14597
  chr12:93967274-93967340
  hyper

SEQ ID NO: 16380 - DNA, 373 bp, Homo sapiens
  chr12:94542716-94543089
  binary
cgccctgcccgggggcggcccccccagccccatggaggtctcccggaggaaggcgccgccgcgccccccgcgccccgcagcgccactgcccctgctcgcctatctgctggcactggcggctcccggccggggcgcggacgagcccgtgtggcggtcggagcaagccatcggagccatcgcggcgagccaggaggacggcgtgtttgtggcgagcggcagctgcctggaccagctggactacagcctggagcacagcctctcgcgcctgtaccgggaccaagcgggcaactgcacagagccggtctcgctggcgccccccgcgcggccccggcccgggagcagcttcagcaagctgctgctgccctaccgcgag

SEQ ID NO: 16381 - DNA, 31 bp, Homo sapiens; identical to SEQ ID NO: 5744
  chr12:94543992-94544023
  binary

SEQ ID NO: 16382 - DNA, 86 bp, Homo sapiens; identical to SEQ ID NO: 5745
  chr12:94544052-94544138
  binary

SEQ ID NO: 16383 - DNA, 91 bp, Homo sapiens
  chr13:110960603-110960694
  hyper
caaggttctgagaaagcttgctcttccctcatcatgctttccacctttccttccccttgggttcccagcgtcaatcctgtgttttgcaagc

SEQ ID NO: 16384 - DNA, 401 bp, Homo sapiens; identical to SEQ ID NO: 10278
  chr13:111277855-111278256
  hypo

SEQ ID NO: 16385 - DNA, 278 bp, Homo sapiens; identical to SEQ ID NO: 10279
  chr13:111278426-111278704
  hypo

SEQ ID NO: 16386 - DNA, 270 bp, Homo sapiens
  chr13:111330283-111330553
  hypo
cggccaccccggtggaagcccctccagccgccagtgggcagcacgccccaggctgtgtctcttcgaaggagccttggcttctcgttcactcctgtttcacccacgtgagggacaggagcaccggcaacgctttcacctcagatgcaccagcgcacagggagagctgggcggccgggaacccacagaggctcatttctcaggaatgtactgtggaccaggtggggttttcccatttttccttattctgtcttacgagaaatactctgctta

SEQ ID NO: 16387 - DNA, 123 bp, Homo sapiens
  chr13:113244578-113244701
  hypo
cgcgcccggtccagccatctttcttaacgtgcatacacgatgtgactcactggagccctgataagattattgatttcttgaggagaacaatgttgtcggaaaccttctccaactgttgctcac

SEQ ID NO: 16388 - DNA, 137 bp, Homo sapiens
  chr13:113369414-113369551
  hypo
cgccgttcctttgcatggatataccacgttttgctcacacattcacctgttgaaggacacttgggttgtttcctgcggcagcttttcctgaccgaaagcttctcaaaaggactagccccctcaggtgccccaaactc

SEQ ID NO: 16389 - DNA, 251 bp, Homo sapiens
  chr13:113379254-113379505
  hypo
cggccatgcctgtggtcccctgtgtgggctgggctgtggccttggacctggtccccacgtcattttcttctcccttggggtggattgtctgtgggcccggtgtgggaccaacagctgatggccgacgcctcttgccgtaggttgccggccatgcatacctgggggaagacttgaactccatccctctgtcaaccctgttctgagtcacaagagacactgcaaaccccccttgtgggagctgactcaggctc

SEQ ID NO: 16390 - DNA, 45 bp, Homo sapiens; identical to SEQ ID NO: 6858
  chr13:113985425-113985470
  hypo

SEQ ID NO: 16391 - DNA, 87 bp, Homo sapiens; identical to SEQ ID NO: 12277
  chr13:114769900-114769987
  hypo

SEQ ID NO: 16392 - DNA, 168 bp, Homo sapiens; identical to SEQ ID NO: 12278
  chr13:20735265-20735433
  binary

SEQ ID NO: 16393 - DNA, 309 bp, Homo sapiens
  chr13:30707770-30708079
  hypo
gcgtgtttctttgagagccctcccctggaagctccctttcactccaccctgttgataaggcccaggacaaaaagcaagcaaccgctggaaacacacctgctggaaacacgcctccagtgccagcccaggaggtggtggccctgtcctgacgccccgtctagccaccgggccagagctgggagccccatagtggagtctgtgtccggcaggtgtctctggacagctgaggttcttgtaaccaaagaggttcgtttacctccttagatcacccagggacaagtgatgtgttttgtggcctcggatcgttcc

SEQ ID NO: 16394 - DNA, 112 bp, Homo sapiens
  chr13:43543227-43543339
  hypo
acctagccgtctgggcaccaggtgaaccggtttagctctgttctgctccttccacttctccaggttggccagctcctgctccgcaactaagccaggcgagaaatatcaaatc

SEQ ID NO: 16395 - DNA, 146 bp, Homo sapiens; identical to SEQ ID NO: 6872
  chr13:45926346-45926492
  hypo

SEQ ID NO: 16396 - DNA, 133 bp, Homo sapiens; identical to SEQ ID NO: 5939
  chr13:46960952-46961085
  hyper

SEQ ID NO: 16397 - DNA, 135 bp, Homo sapiens; identical to SEQ ID NO: 5940
  chr13:46961683-46961818
  hyper

SEQ ID NO: 16398 - DNA, 81 bp, Homo sapiens
  chr13:53422554-53422635
  hyper
cgcctcacaggactcatgcctccagcctcaagtgcgatccgaaaggctaaggaagtcttctctggtttccaggtcgggcgt

SEQ ID NO: 16399 - DNA, 232 bp, Homo sapiens
  chr13:53422885-53423117
  hyper
atccctttaatgtggaaaggcttagaggggaaaacaagaaaggaaaattagggaatctttcttttgtttaactccttttgctttttcccccttttcttgtcagcaccctgcatgtagaggagttggcacagggctccaggagtaaaaggagcggatggttttgttaattgtcgcctgcctccctccgtgccgcggctagaactaagtgcgaacacgctggggtttcacccca

SEQ ID NO: 16400 - DNA, 64 bp, Homo sapiens
  chr13:53423198-53423262
  hyper
gcagccccctacccacagacttgctctgctgaatgaggctctgctttccttctctcctagctac

SEQ ID NO: 16401 - DNA, 387 bp, Homo sapiens
  chr13:95360413-95360800
  binary
cttctgcacagtctaacttggcaggaggctctctgcaggcgcaaaacccgccaacttgttagcaagaccattggagtcagaatgggtgataaacgagtctgtggggcctgtggaggtcctcaaacagccgcacaatctgttggcgatatgacctcggtgctccccctcggcatcctcacccctcctcttacccatctttccagtcctcttctcattcatcaacaactccggagcgtttctcccagaaaacgctgatctttgggaaaaggggagggggcgggaggaggcggggagtcttcaggccgaggaggcggccgagctggaaggctcagggtggtaactaagatttagggctggggtgatttccagcgagccgcaggaagttcc

SEQ ID NO: 16402 - DNA, 129 bp, Homo sapiens; identical to SEQ ID NO: 10296
  chr14:100644271-100644400
  hypo

SEQ ID NO: 16403 - DNA, 34 bp, Homo sapiens
  chr14:101544235-101544269
  hyper
gagcaggtgtctgagcctttgacgtagacttccc

SEQ ID NO: 16404 - DNA, 492 bp, Homo sapiens
  chr14:102500550-102501042
  hypo
ggatgtgcgagcagtgtgaggcaagctggtgtttagtgcacagttagagtcttgagaacagtcccatctgtggctgtgaagaggaggaaaggtaacggccttgcctttcagttccgtacagatattgccaggacggaatacctttccaatgctgatgagcgtcttcgctggcaggccagctccttgcctgctgatgacctttgcacagaaaatgccatcatgctgaaacgattcaataggtatgagctcgggtgccaaggagaggcatgggaggaatgtgggtggtgatcttgaatttttttcaaaatacacccttgtttgaagagaggaatagaaaatggggcgtgggcatacagtgctggcagcttggtgctcctctgatggtggggcgtgtgctgttctcgttattgtcaagtgtctgagttattctgcagtgaatgcttcttgtaaccttctaaaatcgattggcaggggccaggcacagtggatcac

SEQ ID NO: 16405 - DNA, 323 bp, Homo sapiens
  chr14:103988832-103989155
  binary
cggcggcgggctgcggggagacgcggggtcagaggggaccggcacgccggggttcccgggctcccgcgtaccactcaggcccccgccgccgggccccccggcgccccccgggacgcggccaaggtcagcggggtccgcagcgcgcgcggggagcgccatcatcgccggggacccccggccggtccggcgcgcgctccaggcgacgcgccccctttgcacgcagcgcccctagcccgggcgcggacgcccccggcccccgggcccactcaccgggcggccgggcgggggcgggggcgctccgtccgtcggcagctcccggagcg

SEQ ID NO: 16406 - DNA, 124 bp, Homo sapiens; identical to SEQ ID NO: 6885
  chr14:103989597-103989721
  binary

SEQ ID NO: 16407 - DNA, 121 bp, Homo sapiens; identical to SEQ ID NO: 7943
  chr14:104159197-104159318
  hypo

SEQ ID NO: 16408 - DNA, 106 bp, Homo sapiens; identical to SEQ ID NO: 7944
  chr14:104159437-104159543
  hypo

SEQ ID NO: 16409 - DNA, 130 bp, Homo sapiens; identical to SEQ ID NO: 7945
  chr14:104159892-104160022
  hypo

SEQ ID NO: 16410 - DNA, 123 bp, Homo sapiens; identical to SEQ ID NO: 7946
  chr14:104160134-104160257
  hypo

SEQ ID NO: 16411 - DNA, 85 bp, Homo sapiens; identical to SEQ ID NO: 6896
  chr14:105472075-105472160
  hypo

SEQ ID NO: 16412 - DNA, 37 bp, Homo sapiens
  chr14:105715538-105715575
  hyper
cgtcgtggggcccccgggggcgaccaggacggtgccc

SEQ ID NO: 16413 - DNA, 113 bp, Homo sapiens; identical to SEQ ID NO: 5950
  chr14:21101056-21101169
  hyper

SEQ ID NO: 16414 - DNA, 78 bp, Homo sapiens
  chr14:23835314-23835392
  binary
cgggtcctgtggactcgcctgggctgggagtggggacactgagagggctgcgaaggctccgggggtcgcgcgtggccc

SEQ ID NO: 16415 - DNA, 56 bp, Homo sapiens; identical to SEQ ID NO: 9117
  chr14:32597657-32597713
  hypo

SEQ ID NO: 16416 - DNA, 150 bp, Homo sapiens
  chr14:36003293-36003443
  binary
cgggccagcccggggaggcccggcgggaccccggcccgcgtctcagctataaagatagccccggcatgacagccgcggcgaagctcttctagttcatctgctggccggctctcagtccccgtggcgccccctttcctcttgtcccagagc

SEQ ID NO: 16417 - DNA, 188 bp, Homo sapiens
  chr14:37130956-37131144
  hyper
cgctgtcgctcaccgacccgcaccaatcaccatgcagcttgccctcggacccgccccttttagggcgtgtccccagtgagtgatagacggagccgccctgccctgctcagcccagcccacgttgctgcttagattgaaatgcagaactcaagcctctttcatcggggcacagacttccttttacttct

SEQ ID NO: 16418 - DNA, 492 bp, Homo sapiens
  chr14:37131343-37131835
  hyper
ggagcgagcgggcaagggagggagggagggagggagcgcgagggcgcgcgccactaggcgctcacattctctattgactttgctcgtgttcctacaagttgtaggaacacgctaagggtcagcggcgcacagcagttcaatgtgaacgctggctactgggtggctgttgatgccattttctgattttaagagaagggagctgtggcatcagcgagcccctcagcccgagtagcaaaccaagttttgtttcacacgcgcgcacacatgcaaacaaaacaggaaaagaaaagaaaagaaaacaaacaacaacaaataaaacaccctctagcttcccctagactttgtttaactggccgggtctccagaaggaacgctggggatgggatgggtggagagagggagcggctcaaggactttagtgaggagcaggcgagaaggagcacgttcaggcgtcaagaccgatttctccccctgcttcgggagacttttgaa

SEQ ID NO: 16419 - DNA, 175 bp, Homo sapiens
  chr14:37131888-37132063
  hyper
cacggcaggaatgagggagggggtccgattggacagtgacggtttggggccgttcggctatgttcagggaccatatggtttggggacagccccagtagttagtaggggacgggtgcgttcgcccagtccccggatgcgtagggaggcccagtggcaggcagctgtcccaagcagc

SEQ ID NO: 16420 - DNA, 105 bp, Homo sapiens
  chr14:38057019-38057124
  hyper
cggtagcgttggtgggtccgagcgccaccggagctgtacacttgggtcaggaggaaggctttccctcctcgcccctcttcgccccctccctcccctccccgggga

SEQ ID NO: 16421 - DNA, 300 bp, Homo sapiens
  chr14:38057503-38057803
  hyper
gggctcaacaggagatttattcgctaggaagggaaaatgcccaaacaatgaagaactatctgcacttgtcacctcgagacgcttgctgtcctgctctgtccgccttccctggcaaccagctgtcctggccgccaacccgcgcgcgtcctaacgcgcgggtggcaggtcgcatcacccagaggtggcggagtgtgcggtctgagaactgcgagaagcccacaaagcaggggctgggcctgcaggctccccgcggtccagctcccgaggcaggtctccaaagtgcccccgtcccccgcataa

SEQ ID NO: 16422 - DNA, 155 bp, Homo sapiens
  chr14:38057832-38057987
  hyper
cgagagctaaggccaacttaagcttggtggggtgaaggcaaggcgctgatgtttctaatacgttgaaaaggagaaagggaacatcacagagaggacagcacagaagttaaacatcttagattcagtgggggcgggattccgaggcccaagcccac

SEQ ID NO: 16423 - DNA, 82 bp, Homo sapiens
  chr14:38060563-38060645
  hyper
cgggagctaggaagtgtttaggacgggtctggaatacacaccttggtagtacgccggctccagggctgagggctcgatgggg

SEQ ID NO: 16424 - DNA, 600 bp, Homo sapiens
  chr14:38061332-38061932
  hyper
cggatggagttctgccagcgctgctggttctgccggtaataggggaagaggtccatgatccactggtagatctcgctcagcgtgagcatcttgctgggcgcctgctggatggccatggtgatgagcgagatgtacgagtagggcggcttggcgtgcgggtagctgcgcttgaacgtcttggcgtcgccgccgccgcccgcgcggctgcggcccaggttggacggcgcgtacgccatggggctcatgcacgggttcatggcggccgcgtaggggcccaggccattcatggaggccgcctgctgcgcacccatggcgcccatgccgctcgggctcagcgccgtacccatggccgtcacgccggccgcagtcatgctgttcatggcgcccgccgagccccccggcatgccggctactgcgccgggactcaggccggcccctaggcccgggttggcataggacatgttgaaggacgccggggtcatgttgccgctcgtagtcatggtgttcatggtcatgtaggtgttcatggagttcatggagcccaggcctgagttcatgttgctgaccgggacggaggagtaggcctggagtggagacagc

SEQ ID NO: 16425 - DNA, 209 bp, Homo sapiens
  chr14:38062091-38062300
  hyper
tgcacggcagggggaaaatcctagcgcggcaggcatgaaagataaacgctcacagaaaatatgaccccaggaagatgtgtaatcgccttacacgccaggctcaggggctggcttccagggccccctcatcgcctcctccatccacgccaggcggtatcccaagtctccaccccaaccagcctcggcaaagcgccctttggggggaaatc

SEQ ID NO: 16426 - DNA, 243 bp, Homo sapiens
  chr14:42076386-42076629
  hyper
tcccttgaggatgtgaattgtttagcagctggctgctcccttaggatccttgactttggggagctctggctgtgaacacagcccacccatataatccattttgcacggtccgttatatcagaaaaaaaaagcgcaactggacgggggtggggcagaccaacgaaacctagacagacacacacacactcagaggagagaggaagaattgaaagacttgagaagactttgataacctccctgctg

SEQ ID NO: 16427 - DNA, 215 bp, Homo sapiens
  chr14:51562012-51562227
  binary
atagggcagtcttcgctcgcggctgcaagatctctgaagggggccggcgtgcggaggctaggggaccgggaaggaggagttaggcgggatgattcatcctcgcccggcttacttccgacctccggtgcagtctcccaggagctgggggcgtgagaaacccctccccgcagcgagtgggctgccggagggggctggggcttctcgccagcgtttgc

SEQ ID NO: 16428 - DNA, 167 bp, Homo sapiens; identical to SEQ ID NO: 6904
  chr14:61104864-61105031
  hyper

SEQ ID NO: 16429 - DNA, 182 bp, Homo sapiens; identical to SEQ ID NO: 12313
  chr14:61113933-61114115
  hyper

SEQ ID NO: 16430 - DNA, 33 bp, Homo sapiens
  chr14:61114722-61114755
  hyper
tcttaatttggggcgccggggagtaaatgcagc

SEQ ID NO: 16431 - DNA, 291 bp, Homo sapiens
  chr14:65233479-65233770
  hypo
tggagcctcccctgctgtctcgccttcctcctcttgaggcctaaggaagacacagtctctctttagaaacaagcacccctctgaggccagtgcctcctgcgaggcctggcttttcacctgcgcccacagggaggagcaccaaatagctccccctccagtcagccggcagcctggatggtgcttggcaaggagccgcccagcgacttcttcggaaaagccaaggcagattcttcagaagggagccaggttccaggcagaacggcctgtggggccccgtgttcaggtggctcc

SEQ ID NO: 16432 - DNA, 103 bp, Homo sapiens
  chr14:73967299-73967402
  hypo
cgccgaactgctgtgaagtcatcagagaagcagtgcaggaagcttgggagaagcttggcggtcataagcttgagctcacctatcaggtagagagcttccacac

SEQ ID NO: 16433 - DNA, 160 bp, Homo sapiens; identical to SEQ ID NO: 6920
  chr14:93154728-93154888
  hypo

SEQ ID NO: 16434 - DNA, 237 bp, Homo sapiens; identical to SEQ ID NO: 6921
  chr14:93706483-93706720
  hypo

SEQ ID NO: 16435 - DNA, 124 bp, Homo sapiens
  chr14:99849764-99849888
  hypo
cgaaggcaggggaagggacgacgcatttggaggaagcaccatccgagccacaccccgcacagaaaaaggacccaggcccacggcaaggcgcttcttggtcctttcggaagggccgctcctaaac

SEQ ID NO: 16436 - DNA, 286 bp, Homo sapiens
  chr14:99850063-99850349
  hypo
gctctgtagccggccagctgggtccccgtcacacactcacacgtgcacacatgcatgcatgcacacatcctcacacacattcatacgtgtgctctcacgctcacatgcacacattcacacacacgttcacacacccatgcgctcacatgcccatgcacgcacacgtttgcacatgtacgcgcacacacactaaacccgttgggcctcagcttactcatctgtcaagcggagaccatggcagtggctccgacaggtgcttggcacatggtaaatgcccaatacatac

SEQ ID NO: 16437 - DNA, 99 bp, Homo sapiens
  chr15:28341522-28341621
  hyper
cgtagccgtgtctcgggagcctggcggtgtccgcaggagcgatgctgtgaccgttgcatttgaagcattccttctagttcccggatcccagggaggggg

SEQ ID NO: 16438 - DNA, 47 bp, Homo sapiens; identical to SEQ ID NO: 12326
  chr15:34729898-34729945
  binary

SEQ ID NO: 16439 - DNA, 72 bp, Homo sapiens; identical to SEQ ID NO: 12327
  chr15:34730043-34730115
  hyper

SEQ ID NO: 16440 - DNA, 89 bp, Homo sapiens
  chr15:35046519-35046608
  binary
cggactggggattggagcgggagactcagtccaggtgtgagaagggactcccgggggccgcccgacggggccccctgaccgccggcttg

SEQ ID NO: 16441 - DNA, 182 bp, Homo sapiens
  chr15:35046689-35046871
  binary
cgctgtgcatccggaggcagcagacaaagactgggcagcaccgggcacgttcccgctcctggcccctccccgggccgcacttccagaatgggagtgaattgcctcccaattaaagaagcaattttttaaaaaatcctcgaatccccctttccttttattgtacttaaaagagaagaaatggg

SEQ ID NO: 16442 - DNA, 518 bp, Homo sapiens
  chr15:40631683-40632201
  hypo
cgagccctgtctcccagggtgaggcttacaccgggaacctggctgatggtaacggtgaggccatcaggctggaggagtgctggtgtggtcacagccatccccccctgctctgcctgccgacggtcctcctggatctcctgtgggagggctgggggtcagcacacgccatggccccccaggtgcacagagacatagatgctgataggcctacacagagagacaccagtgggacaccagggggcagaggcgccacatcacacatccccaggaccctcaccaagcctctaagagggaccatgcccaccctacccctggccccagccccagaggcgcattgctgagcctgcagggagaccaccacgtgtggggcacagggagcggcagccaagtggtttctcctggccctgtggcagcccactcacctggtacctgcggagcaaggcctggttcttcttgcgcagggcaactatcctccgatccagctctgcgtccttctcctgcctgctcatgggggactc

SEQ ID NO: 16443 - DNA, 88 bp, Homo sapiens; identical to SEQ ID NO: 9152
  chr15:41091052-41091140
  hypo

SEQ ID NO: 16444 - DNA, 89 bp, Homo sapiens
  chr15:45440539-45440628
  hypo
cgggagtcgggattccaggacaaggaggaactgacatgggaagattttcacttcatgctgcgggaccacaatagcgagctccgcttcac

SEQ ID NO: 16445 - DNA, 78 bp, Homo sapiens; identical to SEQ ID NO: 5755
  chr15:48936649-48936727
  binary

SEQ ID NO: 16446 - DNA, 186 bp, Homo sapiens
  chr15:52404388-52404574
  binary
cggctgcccgtcccgccccgtgtcccggtgtccgccgcgtgctcacccagccgccctgagcctgcagccaggcgcggtgctgccccatgagccgcgagctcagcaaggccaccaggcgctggcagtcccgggcgacgtcgccctcctgctcctttagccgcggctggaagccccacttcttccacc

SEQ ID NO: 16447 - DNA, 35 bp, Homo sapiens
  chr15:60298179-60298214
  hyper
cacctcactcgccttccctggctcccagtcctgcc

SEQ ID NO: 16448 - DNA, 201 bp, Homo sapiens
  chr15:62747468-62747669
  hypo
cgatggaggggacgtgatggggaactcaggaaggggttcctggaggtgcacttcagccgcgccttcagcaatctgcagaatgtcaaaaagccagtgggagagggtgttcgggatgggagagactgaataaaccaagacaaaaagatggtacagcgcagtaggagtcagatagcacaggggttggttaaagactggggcacc

SEQ ID NO: 16449 - DNA, 41 bp, Homo sapiens; identical to SEQ ID NO: 13466
  chr15:68125183-68125224
  hyper

SEQ ID NO: 16450 - DNA, 46 bp, Homo sapiens
  chr15:68126860-68126906
  hyper
cgtgactttcgtttttaataataataataataataataaaagatgt

SEQ ID NO: 16451 - DNA, 364 bp, Homo sapiens
  chr15:68127129-68127493
  hyper
cttgggcccggaatggaggaggggcattacgtcacggtccttagcgcagcggtcccgggctctttcctcaagagctcgaaggcgccgagggttcatccatgcccatttccacgcctgccacaccggggaagttacctccggggcgctcacagacagggcgccctgccgggaatcccaggttcaaccagaattgtccctttagatggcgcgggcaccgccggcctggcctggcctgggagcgctgcggcagggcggaggtctcagggagtaaggtggtctccgccgggcaggcttggaaaggaaggcgggacttggagagctcggtcacagacggcctcccgtctgccccgccgctacccgaaag

SEQ ID NO: 16452 - DNA, 93 bp, Homo sapiens
  chr15:68128502-68128595
  hyper
gcaaatgctccttcccacccttccttcccaactccccccaaagtggaaaagctcctaggcagctggggccctccggaagggacgccccatctg

SEQ ID NO: 16453 - DNA, 53 bp, Homo sapiens
  chr15:68723471-68723524
  hyper
cggggagcccggtgtgggacggccggggccagggtaccctagggcggagagct

SEQ ID NO: 16454 - DNA, 61 bp, Homo sapiens; identical to SEQ ID NO: 9167
  chr15:79383268-79383329
  hyper

SEQ ID NO: 16455 - DNA, 62 bp, Homo sapiens; identical to SEQ ID NO: 9168
  chr15:79384146-79384208
  hyper

SEQ ID NO: 16456 - DNA, 195 bp, Homo sapiens; identical to SEQ ID NO: 12337
  chr15:82339684-82339879
  binary

SEQ ID NO: 16457 - DNA, 43 bp, Homo sapiens
  chr15:83315393-83315436
  hyper
gcgtctgcctggcttttctcggtcacggggtcaacgcggggcc

SEQ ID NO: 16458 - DNA, 60 bp, Homo sapiens; identical to SEQ ID NO: 10320
  chr15:83951722-83951782
  hyper

SEQ ID NO: 16459 - DNA, 228 bp, Homo sapiens; identical to SEQ ID NO: 10321
  chr15:83952822-83953050
  hyper

SEQ ID NO: 16460 - DNA, 99 bp, Homo sapiens
  chr15:88801240-88801339
  hyper
gaagaaagggttaggggagtccgagcaggcagacacactacagcattcacacgcagaagaaagcagggttctccttcccgagcttggaggagggcaggc

SEQ ID NO: 16461 - DNA, 137 bp, Homo sapiens; identical to SEQ ID NO: 13473
  chr15:89921803-89921940
  hyper

SEQ ID NO: 16462 - DNA, 35 bp, Homo sapiens; identical to SEQ ID NO: 9169
  chr15:89942592-89942627
  hyper

SEQ ID NO: 16463 - DNA, 59 bp, Homo sapiens
  chr15:89943816-89943875
  hyper
cgaggcccagtaagatcgccggcctttcccaaaggcgtttggctcacccatctctcctc

SEQ ID NO: 16464 - DNA, 184 bp, Homo sapiens; identical to SEQ ID NO: 6416
  chr15:90755573-90755757
  hypo

SEQ ID NO: 16465 - DNA, 42 bp, Homo sapiens; identical to SEQ ID NO: 6417
  chr15:90756079-90756121
  hypo

SEQ ID NO: 16466 - DNA, 135 bp, Homo sapiens
  chr15:96960242-96960377
  hyper
cgtactatttgagtggcaggcgacgcctttccccactctcggtatttatgttgcaccgacggcacttaggagagcttagttttagatgcggcattaatcttcacttgttaagagatagtctgtcagcctttacca

SEQ ID NO: 16467 - DNA, 100 bp, Homo sapiens
  chr15:96960409-96960509
  hyper
cccagcgcgcggccacccccaagctggtcctcgcaaaggcgcgcggagccgcactgccgaggagaggagcccggggttaaactggggcaaggcgagcgag

SEQ ID NO: 16468 - DNA, 289 bp, Homo sapiens
  chr15:96960826-96961115
  hyper
ctcccttttaaattatttcctgcccagttatttttcccccaattaatccagaatagttttctcatctgctccagatgcacgcaaactgcagagctgaaatgaactgaactaagagcggaattgaaatacaccaggggtttccctgcaggaattgttccaacgaggtatccacgggtttcaagatccgttgaaatgcttcaggtgtggtttgcattctcaccgaccctcgggccagttccctcgcccccaaccgccgttatttgttccccccacctacttcaatagttgc

SEQ ID NO: 16469 - DNA, 233 bp, Homo sapiens
  chr16:1493342-1493575
  hypo
cgggtctggcacctgcccctggagtccacccagctccggcaccactggcccctgggagctctgggcctgggcagcaggggtgagctgggctccaggcccagaagcagctgcccccaacacccaggaaaggggcagctcgacctgtgggtgggggagccgctcacctccggcgcctccttttcgggggcctgggctgccggccgcgcctcctgctgcaactgcctcagctctga

SEQ ID NO: 16470 - DNA, 563 bp, Homo sapiens
  chr16:1493691-1494254
  hypo
ccaccctggccggggcgagagtgggcgagtctggcggtgcccgccgtggaggcggaggcggcggcgacgtggtcctcccccgccagcaccccctgcagggctcaccactgctccagctggttccagtgcttggcggtgtcctgctcggggacagaggccgtggatgtcggatggctggactcatacctctccgagagctcctccaggctcaagggctcggggctggccaggcctcctgccaggaggagccccaggtcttccagggtgacggctctcagctgggaaggggccgatgcccctgagggtccactgtcagccaactctacaaggaggcatcttgggagcttgccccttggggcccggcccccactggagcttacgggaacaaggccccaaacccccgcaggaccctcgcccaccacccagagctcaacgcgtctccttgggtcacacaggatccagacgggcttggctcagacaagtccagggccctgcctgaagacacacagcactgggcggcaggaacaagcgagctggagggagcccggggtcagaagcagagc

SEQ ID NO: 16471 - DNA, 263 bp, Homo sapiens; identical to SEQ ID NO: 10323
  chr16:15820563-15820826
  hypo

SEQ ID NO: 16472 - DNA, 107 bp, Homo sapiens
  chr16:1724902-1725009
  hypo
cgctaatatgattacagcgaagactttcctgataagttctcaaactcgatgtgtgactgtttggcacttgagacaaacctgcctttgcagggaaagtgtctctcacg

SEQ ID NO: 16473 - DNA, 366 bp, Homo sapiens
  chr16:1725038-1725404
  hypo
tgttcagtcccttgcatacctttgccttgagacttctgtgtctccttcccatttgggacacccaggtgagggcccagacatctggatgtggtcagacctcaccaaatatatgccttcgtggtggtctccctccttgcgccctcttgggtggccagcgttcctactgcagacggcccaacatccagtctttccccaggacagagctaacaagggcccctttgccttctcatcctcaggagttccaggcacatgagtcaccgtccatccacatccagtgtggcctggagctgctacagaggtgttgggcaggccatgcctgtgccgccatctctcccttcctgcctcatttcatcccccgcagcagcc

SEQ ID NO: 16474 - DNA, 868 bp, Homo sapiens
  chr16:1796052-1796920
  hypo
cggtgcgccctctgagagaccacgggaacccacccagcggctgcctgggacaggcacaggagccacctgggtgcctctgaggccttgcactttcccacacctcaaggagggccgggggccacgggcaagctctgccatagcgggtgatcaggtcagctaagacgagaacgtttggggctctttttctccagctggttcagtatctttgttaggaaagaccattggaaagaatgtttgtttcgcattccgcattagtcacatagaatgcgctcctccctagcgagcttcctgaggtagacggctggttgcggtttctcgtaatccgggctgcccccaccctccagaatgtcttggtggcgtccctttctgtgagcagggattgtggtttctttgcgcttgctcatgttcaggggtgagctctggtccagtcaagccacagggtcagcaccttctggtcactccctggccctgacctgagcccggggaggaacgtggggcaggcgcgggtgggcccagcctcgagctcttcagcacagtgatggtgacggggcagcggtggcggcacagccagcccttcttgggtccccagtcagagccctctgccctacctgggctggacttgtttctgaacagccacaagctacagggggctgccgctgtgtccctggcgaggcactggcccattacaagcaatcgtctggggagggcaccagtggaaagccccgttccaagccatttcaggagggtggccctgcttccgaggagccggagtcagtggccggataagcagagccactcgggagtggtgaggcccggaagggttagcccggtgggcggcagaggagctctggcccgcagggtgtcgggc

SEQ ID NO: 16475 - DNA, 95 bp, Homo sapiens; identical to SEQ ID NO: 9182
  chr16:18804320-18804415
  hypo

SEQ ID NO: 16476 - DNA, 48 bp, Homo sapiens; identical to SEQ ID NO: 8005
  chr16:2042503-2042551
  binary

SEQ ID NO: 16477 - DNA, 50 bp, Homo sapiens; identical to SEQ ID NO: 10328
  chr16:2141860-2141910
  hypo

SEQ ID NO: 16478 - DNA, 575 bp, Homo sapiens; identical to SEQ ID NO: 10329
  chr16:2141972-2142547
  hypo

SEQ ID NO: 16479 - DNA, 391 bp, Homo sapiens; identical to SEQ ID NO: 10330
  chr16:2142628-2143019
  hypo

SEQ ID NO: 16480 - DNA, 152 bp, Homo sapiens
  chr16:2235039-2235191
  hypo
caacccagaaaccccggcttgtcacctgctcccagccctggccaccctggccctggccactaccccacctaccttgacgccttcagagcccgcgtgtagggcgtgacccccgctgccccggccgccagccatgccgctaatgctgccgcttc

SEQ ID NO: 16481 - DNA, 305 bp, Homo sapiens; identical to SEQ ID NO: 5981
  chr16:3208795-3209100
  binary

SEQ ID NO: 16482 - DNA, 50 bp, Homo sapiens; identical to SEQ ID NO: 5983
  chr16:3238043-3238093
  hyper

SEQ ID NO: 16483 - DNA, 226 bp, Homo sapiens
  chr16:4513533-4513759
  hypo
cgttgacgatgaacgaatgaatttagatgtactgcccagaggtgtgggcagccctggacacaccctccctacgggagctagaaagccctgacaaggatgcctgagtcacctggggcgggaggcccaccttggcatcgtgcacgaccttgcgggtgtgcttggtgagcagggcagcgtactcctcggccgtgtgcctgcaagtgctcagcccgatgttctggccgac

SEQ ID NO: 16484 - DNA, 305 bp, Homo sapiens; identical to SEQ ID NO: 12364
  chr16:47176468-47176773
  binary

SEQ ID NO: 16485 - DNA, 161 bp, Homo sapiens; identical to SEQ ID NO: 8034
  chr16:4845976-4846137
  hypo

SEQ ID NO: 16486 - DNA, 400 bp, Homo sapiens
  chr16:50335368-50335768
  hypo
cgagcgaggccttcacagtgcgcctggcacgtcacagcattctatgtattctcgtcactcttggtttattttccatgaggtggttattaatctcccagatttccgagagacacactttcaaaacaagctttggatgaaactcaggaaagcagggagtggcctgggagccactgggcaggagcctctgagtgtcctgggtgctgactgcaggtcccctggtggctccaggaccccacggtggaggaggcagttccactgccctggccaggtggggcccgccttggcctgtctgctgcccgaccctggcctgcttcagggagtccggcacgtctggccacttctctgtgaatcatccatgaggcttgctcaagaatgtcggcccagccagcgagtggctcct

SEQ ID NO: 16487 - DNA, 190 bp, Homo sapiens
  chr16:50335818-50336008
  hypo
gggggaccaagggctggcctgtgagcctccctacacatctgctggcctcactctgcccccagcacccccagtgctgcaccatccatactgagccagcatctgggaaaacccctgccggtacctgtgtcccattccaccaccctcctagaatagggccctgatcctcgccctgtaccccggccctggcccc

SEQ ID NO: 16488 - DNA, 77 bp, Homo sapiens
  chr16:51184601-51184678
  hyper
cgaagtaaacttccttaccgctggcagcaaggccgggcggcggaggccgggccgggtgccctggggccggcgccggg

SEQ ID NO: 16489 - DNA, 281 bp, Homo sapiens
  chr16:54965796-54966077
  hyper
cgtaatcctatcttcgcaatccgatttgggagtattaaatttctgaaaagtcggtcgagctgcggtgcatccgggatttttcggccgggttgtaacttcggtctggggtagtatttttggagggtgggagtgcgtgggcatggctcagctttttgtttgcatttcttagctgttgaaaaaagaaaaaaagagccttgacttcccttgttttccccccttgcgcccaacgtgcgtccgctcccccgccgagcgcggagtcgcctcagttgcccaggcctcta

SEQ ID NO: 16490 - DNA, 107 bp, Homo sapiens; identical to SEQ ID NO: 6964
  chr16:54966659-54966766
  hyper

SEQ ID NO: 16491 - DNA, 114 bp, Homo sapiens
  chr16:55359125-55359239
  hyper
atcctcctcttgtgttctgggggaagccagaaggagcaaggaccagggtaatgtgtcacagcctcctctgacatccccagtccctaaatgagaacgtttcaccccggagtgcac

SEQ ID NO: 16492 - DNA, 61 bp, Homo sapiens
  chr16:56225663-56225724
  binary
gccgccgccgccgcctcctccacctcctcctccgccgccgccgcctcctcctcctccggca

SEQ ID NO: 16493 - DNA, 269 bp, Homo sapiens
  chr16:56225881-56226150
  binary
ctccggagccccagaccccggccaccctcgattcgacaaccccagacccctgccagctgccgcgagtctccgctgctggaatcttgttagcggctgtctttttggagggttctggtttcccgacatttttgtttccagcccaggagaggatatcgtgattttccccccttgagcccaggctctgctctctgggggggtggggggcgctccaagccggggagccgtgccagccgagtcgtgcgggctgtggcagggaaggggccaccatg

SEQ ID NO: 16494 - DNA, 86 bp, Homo sapiens; identical to SEQ ID NO: 10335
  chr16:56228284-56228370
  binary

SEQ ID NO: 16495 - DNA, 57 bp, Homo sapiens; identical to SEQ ID NO: 10336
  chr16:56228591-56228648
  binary

SEQ ID NO: 16496 - DNA, 61 bp, Homo sapiens; identical to SEQ ID NO: 8043
  chr16:56709754-56709815
  hyper

SEQ ID NO: 16497 - DNA, 300 bp, Homo sapiens; identical to SEQ ID NO: 10339
  chr16:67197294-67197594
  hyper

SEQ ID NO: 16498 - DNA, 134 bp, Homo sapiens; identical to SEQ ID NO: 8047
  chr16:68118915-68119049
  binary

SEQ ID NO: 16499 - DNA, 167 bp, Homo sapiens
  chr16:68386187-68386354
  hypo
gcctgctgccgtggcacaacctctacttctggtacgtgcggaccgctgtggaccagcacctggggccaggtgccatggtgatgccccaggcagcctcgctgcacgctgtggttgtggagttcagggtaggccacccaggggatgttggagaaaaaagcagaggaggc

SEQ ID NO: 16500 - DNA, 82 bp, Homo sapiens
  chr16:77246930-77247012
  binary
accgtggagcggggcggggcgtgctgggatctcgaggcggggcctctgccggacccctcccaccagtcgagccccgggcgcc

SEQ ID NO: 16501 - DNA, 205 bp, Homo sapiens; identical to SEQ ID NO: 9209
  chr16:77247511-77247716
  binary

SEQ ID NO: 16502 - DNA, 81 bp, Homo sapiens
  chr16:77469120-77469201
  binary
ggagtgatagggagggagggaccgaccgccatgagaaggaggggagcgcccagggtcaggcttggaaaacgtaatttaagc

SEQ ID NO: 16503 - DNA, 49 bp, Homo sapiens; identical to SEQ ID NO: 5986
  chr16:77822069-77822118
  binary

SEQ ID NO: 16504 - DNA, 68 bp, Homo sapiens; identical to SEQ ID NO: 9212
  chr16:80574541-80574609
  hyper

SEQ ID NO: 16505 - DNA, 72 bp, Homo sapiens; identical to SEQ ID NO: 9213
  chr16:80575052-80575124
  hyper

SEQ ID NO: 16506 - DNA, 261 bp, Homo sapiens; identical to SEQ ID NO: 6455
  chr16:81563939-81564200
  hypo

SEQ ID NO: 16507 - DNA, 163 bp, Homo sapiens; identical to SEQ ID NO: 6456
  chr16:81564229-81564392
  hypo

SEQ ID NO: 16508 - DNA, 240 bp, Homo sapiens; identical to SEQ ID NO: 6457
  chr16:81564541-81564781
  hypo

SEQ ID NO: 16509 - DNA, 276 bp, Homo sapiens
  chr16:82660904-82661180
  hyper
taggcaccccccacacacaggctcccactctggcgtgcgtgtgtgtgtgtgtgtgtgtgtgtgtgtgtgtgtgtgtgtgtgtacgttcgttaacgggaggaggagagagctcccagtccttttttgctagcaggggcgacattctcgcccacatcaagtggggtaactttggttccctcctccggaggctcggtgcattggagaaagactcagttagaggcgactccaacgagccgcggttttccccagcccaacgcccagcggccgaagcgctgc

SEQ ID NO: 16510 - DNA, 92 bp, Homo sapiens; identical to SEQ ID NO: 6977
  chr16:85033902-85033994
  hypo

SEQ ID NO: 16511 - DNA, 65 bp, Homo sapiens
  chr16:85464302-85464367
  hypo
gcggcggcagtctagggcattcgtctgaagggcaccgctggggaaatcctgacgtaggcacacac

SEQ ID NO: 16512 - DNA, 114 bp, Homo sapiens; identical to SEQ ID NO: 6981
  chr16:85679455-85679569
  hypo

SEQ ID NO: 16513 - DNA, 303 bp, Homo sapiens
  chr16:86665890-86666193
  hypo
cgcacaagcccatgactgtgacgttagccacgcagtgacggctaaggctaagccatcaaagacctccaaccggacatgttgcgatgctcacttttggaaagtagccaccgtgctgtgaggagggcacgctgccacacggaaaggccacctacaggtgtcctgatgcacgggaggtcccggccaacacgaaccagtagccaggagagtgaggggaccttcggatgattccagcttccagccttgaggagtccttgggtgacactgagtcaggcagagatgagctgtccctgcccggccccgccc

SEQ ID NO: 16514 - DNA, 60 bp, Homo sapiens; identical to SEQ ID NO: 12370
  chr16:87635912-87635972
  binary

SEQ ID NO: 16515 - DNA, 190 bp, Homo sapiens; identical to SEQ ID NO: 12371
  chr16:87636008-87636198
  binary

SEQ ID NO: 16516 - DNA, 83 bp, Homo sapiens
  chr16:87637320-87637403
  hyper
acagtgcccctgtgccagctgaagggtgttgggggctttccaggggcagagccaggcggggcccagcagagcctccgtgcgtc

SEQ ID NO: 16517 - DNA, 491 bp, Homo sapiens; identical to SEQ ID NO: 12372
  chr16:87902835-87903326
  binary

SEQ ID NO: 16518 - DNA, 126 bp, Homo sapiens
  chr16:87934247-87934373
  hypo
cgacactgttgtccccaccatcttttcgagctgcgctggatacagggaagcctatggatcgctgggcggagagctgcggtttgggcaggtttctctccgcccttgggcttggggtcggacagggac

SEQ ID NO: 16519 - DNA, 136 bp, Homo sapiens
  chr16:88048979-88049115
  hypo
cggaccacgctgggcgtgggcgcctgctttctgcccaggtgactgggccctgcttggttctccaccctctcctgtccctcgtctgccctatgttccctgctctggccacgctggttcccttaccttcctggagcac

SEQ ID NO: 16520 - DNA, 219 bp, Homo sapiens
  chr16:88892602-88892821
  hypo
cgggcaggggcggcgtgtgcccaggtacaggcaggcaacaggggtggggcaggcaggggtggcatgtgcccgggctgcaggcagggaacaggggtggggcggacaggggcggcgtgtgtctgggtacaggcagggaacaggggtgcggcggacaggggtggcgtgtgtctgggtacaggcagggaacaggggtggggcgggcaggggcggcatgtgccc

SEQ ID NO: 16521 - DNA, 400 bp, Homo sapiens; identical to SEQ ID NO: 12375
  chr16:89006909-89007309
  binary

SEQ ID NO: 16522 - DNA, 92 bp, Homo sapiens; identical to SEQ ID NO: 12376
  chr16:89007789-89007881
  binary

SEQ ID NO: 16523 - DNA, 374 bp, Homo sapiens; identical to SEQ ID NO: 12377
  chr16:89007995-89008369
  binary

SEQ ID NO: 16524 - DNA, 542 bp, Homo sapiens; identical to SEQ ID NO: 10347
  chr16:89169538-89170080
  hypo

SEQ ID NO: 16525 - DNA, 214 bp, Homo sapiens
  chr16:89713336-89713550
  hypo
cgcgggtggacatctttccacacctctgcatgcttgtctgccatccgagcctccccacaaggagccaggtgcctgcaggaggcccccgccgccctgcccaccctacctgtcagggtcctggcagggacccagcacagaggatgcttggtgacgtcagggagcaaccacaggtatgcagagacagcacgtcagcctgtgagccacccctcccgat

SEQ ID NO: 16526 - DNA, 489 bp, Homo sapiens; identical to SEQ ID NO: 8079
  chr16:89900815-89901304
  hypo

SEQ ID NO: 16527 - DNA, 65 bp, Homo sapiens; identical to SEQ ID NO: 10351
  chr16:9005277-9005342
  hypo

SEQ ID NO: 16528 - DNA, 209 bp, Homo sapiens; identical to SEQ ID NO: 6999
  chr17:16923475-16923684
  hypo

SEQ ID NO: 16529 - DNA, 310 bp, Homo sapiens; identical to SEQ ID NO: 7005
  chr17:25620264-25620574
  hypo

SEQ ID NO: 16530 - DNA, 62 bp, Homo sapiens; identical to SEQ ID NO: 7006
  chr17:25931759-25931821
  hypo

SEQ ID NO: 16531 - DNA, 74 bp, Homo sapiens; identical to SEQ ID NO: 10358
  chr17:28088056-28088130
  hyper

SEQ ID NO: 16532 - DNA, 308 bp, Homo sapiens; identical to SEQ ID NO: 10360
  chr17:33700165-33700473
  hyper

SEQ ID NO: 16533 - DNA, 207 bp, Homo sapiens; identical to SEQ ID NO: 10361
  chr17:33701376-33701583
  hyper

SEQ ID NO: 16534 - DNA, 168 bp, Homo sapiens; identical to SEQ ID NO: 10362
  chr17:33701612-33701780
  hyper

SEQ ID NO: 16535 - DNA, 122 bp, Homo sapiens; identical to SEQ ID NO: 8090
  chr17:35078956-35079078
  hyper

SEQ ID NO: 16536 - DNA, 122 bp, Homo sapiens; identical to SEQ ID NO: 12403
  chr17:42906461-42906583
  binary

SEQ ID NO: 16537 - DNA, 260 bp, Homo sapiens
  chr17:46621458-46621718
  hyper
ttgttcttcacccctcttcctccctagctctgaattcttcctcttctcctagagttggggcagaaaggaccgaatcttttctgcttctagggtctatcccagcaacaacatactcattcccctacacagatacgggtgaaaacctcaatcaaatcattttcttctagcagaaaaaaaggcgtttccccaaccagcttccaaaatcagccatagggagagaaagagagagagagacagaaaaaaaaaaagacgctgttagc

SEQ ID NO: 16538 - DNA, 182 bp, Homo sapiens; identical to SEQ ID NO: 8110
  chr17:46659093-46659275
  binary

SEQ ID NO: 16539 - DNA, 46 bp, Homo sapiens; identical to SEQ ID NO: 8111
  chr17:46659384-46659430
  binary

SEQ ID NO: 16540 - DNA, 64 bp, Homo sapiens; identical to SEQ ID NO: 11245
  chr17:46687527-46687591
  binary

SEQ ID NO: 16541 - DNA, 321 bp, Homo sapiens; identical to SEQ ID NO: 11246
  chr17:46688806-46689127
  hyper

SEQ ID NO: 16542 - DNA, 149 bp, Homo sapiens; identical to SEQ ID NO: 11247
  chr17:46690905-46691054
  hyper

SEQ ID NO: 16543 - DNA, 349 bp, Homo sapiens
  chr17:47073560-47073909
  binary
aggaacggcgggaggaggaggggagtggccgccgccccctcccctaagctcccgcccctcgcttccccgtgcgcggagcggaaattaccccctccccccgcgggtctgacctggggacgtgggcggggcttcccgcttagccccccgccctccgtccctctcccgccttcccgccaggatcggaatcctgcaccccaaacaaagttccgagacccgaacctagggcctagagagctgccagcagtgtcccgggtggtgcaggctctggaaactccacctgtctgtccccgactctgggagggaaaaggggaccattcaaatctccacccggtcactccctccctaagac

SEQ ID NO: 16544 - DNA, 153 bp, Homo sapiens
  chr17:47074409-47074562
  binary
atgaaaaataaccgtacattttaccctttaagacatgtgagatctgggctggaccatcctcccccagtttgggctggggtagggggatgggtgggggcggggcgcttccctaggggccaggttcttgcaaagggggaaggggcctgtagagct

SEQ ID NO: 16545 - DNA, 197 bp, Homo sapiens
  chr17:48776811-48777008
  hypo
cgctggtcctgcatacgtcccattttgaggctccagagacattggtggcttggacgggacagaagaaaacagggagcggctctgactcactggtggctgacaaacaggacccggttttgtgctttctggtgttctgagtatggcagagggggccgacacatcaccattctgaactagtgccaaagaggtgtggtccc

SEQ ID NO: 16546 - DNA, 216 bp, Homo sapiens; identical to SEQ ID NO: 9255
  chr17:56327007-56327223
  binary

SEQ ID NO: 16547 - DNA, 48 bp, Homo sapiens; identical to SEQ ID NO: 7019
  chr17:57297129-57297177
  hypo

SEQ ID NO: 16548 - DNA, 132 bp, Homo sapiens; identical to SEQ ID NO: 8122
  chr17:59532387-59532519
  hyper

SEQ ID NO: 16549 - DNA, 112 bp, Homo sapiens; identical to SEQ ID NO: 7021
  chr17:61777761-61777873
  binary

SEQ ID NO: 16550 - DNA, 76 bp, Homo sapiens; identical to SEQ ID NO: 7022
  chr17:61778423-61778499
  binary

SEQ ID NO: 16551 - DNA, 243 bp, Homo sapiens
  chr17:62783342-62783585
  hypo
cggggtaggcatgacactctcacctgccggaggtcagcaacacggaacctatgcggagactccaagagataattccggtggttgagccttcaaacaaaacacaagcgattctttagaaaagtttcgaagacccaggccagcccgtgttgtttattttcattcccctggcgctgctcaccaggcagacacctcccgcctgggcggggcagggcctaggagcacaattcagcctgcttgggaccc

SEQ ID NO: 16552 - DNA, 335 bp, Homo sapiens
  chr17:70713689-70714024
  hypo
cgtgtccctgtgtggccacggggcactgtcctctccgcatgtgtcatccctccttgttttataagggtacccagtcatgttggacttaggcccaccctaatccagtacgagctgatcttaactaattacatctgcaaagatcctaccgccaaataaggttacagtcacaggtcctggggattaagacttccatacctttctggggtgcatgacttcagcatcgctccttattctggaacttacaggacaggtcactcttgctctgtagctctccctcggagtgaccctgcacatcggctgtctaggaggtgaggctggagaagtgagtcatgacc

SEQ ID NO: 16553 - DNA, 93 bp, Homo sapiens
  chr17:7188345-7188438
  hypo
cgcggcccctcctacttcccgtgcccaaaaggctggggtcaagctccgactctccccgcaggtgttgttggtggagcgggcggggcgccggac

SEQ ID NO: 16554 - DNA, 81 bp, Homo sapiens; identical to SEQ ID NO: 7025
  chr17:73584287-73584368
  binary

SEQ ID NO: 16555 - DNA, 170 bp, Homo sapiens; identical to SEQ ID NO: 7026
  chr17:73584951-73585121
  binary

SEQ ID NO: 16556 - DNA, 271 bp, Homo sapiens; identical to SEQ ID NO: 10384
  chr17:73607997-73608268
  hypo

SEQ ID NO: 16557 - DNA, 212 bp, Homo sapiens
  chr17:73613151-73613363
  hypo
cgtatccccccagatgctgtcccccagcccaggaaagggccccccgccagctgtggctcctcgacccaaggccccgctacagcttgggccctctagctccatcaaggaaaagcaggggccccttctggacctgtttggccagaagctgcctattgcccacacacccccacctccaccagcgccaccactgcctctgcccgaggacccaggga

SEQ ID NO: 16558 - DNA, 527 bp, Homo sapiens; identical to SEQ ID NO: 10386
  chr17:73613424-73613951
  hypo

SEQ ID NO: 16559 - DNA, 104 bp, Homo sapiens
  chr17:74072105-74072209
  binary
cgggtatttcccctctccatcctctggaaaaacagagaggcgaggccagactgcccccacacctcctgtagccactgagcgcgaagtgcgttggttccgagcgc

SEQ ID NO: 16560 - DNA, 150 bp, Homo sapiens
  chr17:74391567-74391717
  hypo
cggccgagaaagtaattttttaaaggagggaggaaagaaagaaccatctggcctggacacacggctgagtcagccctcacctgactgagcctgtgaccgcccctgtaaaaggtgggtgggtgagtgtcctcgcaggtgccagtcagcccc

SEQ ID NO: 16561 - DNA, 346 bp, Homo sapiens
  chr17:74392164-74392510
  hypo
cgagaaggcgggggaaggcgaagaccaggcaagggctgactcacagggtgcaaactccagtacggagaagacctcgcccttggcgctggtgaaggtgacgccaggcttgccgccacactgctggcacagcaccggggtttcgctgggccactcagccttcacaggtgactgcccctcgggcttgtcctccttgcgctctacgtcgggcactgcttccatcttctcctcctctacaatggccacattgtccagggtcttcttgaggttttcctgtagcttcttgatgtcatccagaaacttcttctcccgagttggcttctcaggctccacagtcggagaggtgggc

SEQ ID NO: 16562 - DNA, 512 bp, Homo sapiens; identical to SEQ ID NO: 10388
  chr17:76991011-76991523
  hypo

SEQ ID NO: 16563 - DNA, 632 bp, Homo sapiens; identical to SEQ ID NO: 10389
  chr17:76992727-76993359
  hypo

SEQ ID NO: 16564 - DNA, 478 bp, Homo sapiens
  chr17:76993419-76993897
  hypo
gggagacagggggtaggtgtcattgtaccagttggcgggcgcctggccgagcctccagttgtgtgcattgtgggtggggggcctgccgggggccgggcggtgggagcagagcagccagaggatggcagcacccacaaagaacgtcaggatcaccttccagcgggggcggaagcgggggtccgcggccttggtcatggacgccagcacaggaaggccccccacactgatccggagggagtgcatagactcattccattccgggtgctcagacagctgcacgggcatcagcgtgacagacaggcgggacctgcacagccagggagggaggagaggagtcagcgcctccgcaagcccagtcacatcttagttccggaagctgcaggcgctggaggctgacttttccagaagaaacagtatttcactactctgtggccattcttactcccttggcttaatgaattcccgactctagattccc

SEQ ID NO: 16565 - DNA, 261 bp, Homo sapiens
  chr17:76998502-76998763
  hypo
cgtgggccaaatgcagtctcccgcctagtgtgtagatgcggcctgtgtggcctggtatgtggttgcagcttggtgtgtagactctgcctggtgtgtagacgcggcctgcgtagacgcggcctgctgtgtagtcacgtcctggtgtgtagatgtggctgattaaagccagctaggactcctccctggcatgctgagtctggctgcaccgttgagtggtcgcaacagactgtggaggctgaaaatactgactccctgtccctc

SEQ ID NO: 16566 - DNA, 557 bp, Homo sapiens
  chr17:77918873-77919430
  hypo
cgcgcaggtacagctgggggtgaggccgtcacgcgttagttagctccggtcccatgcggcctgctgcccaggaagcccactcccactggggcccttccctgggccaccccagcctggaaaagcacacccaggggcctctacctgctgcatgtgcctgcccccccaacgctccattccgccgctggaatcggctcacacctgcctctgccagttcctcccagatctgactgttccggaggctgtggtgtggtccagggtgaggcagagtgttgtgcccgggcgtggcaggacgctggcagccgctccatggccaggaaggctccccaccctcagtgcacacttgggggctgtttcccacgtccactcctcctggtgaggtgagtggatcatccagggagcccccccacccctcttcggctacgctcacccagatctatcatcttccagagctgttttagggcaggaaggggacgtatctgagccccaggatgctcgattcctgccattaaggtcatctcccaatgatgtgggacaagatcggggctatttctggcagc

SEQ ID NO: 16567 - DNA, 207 bp, Homo sapiens
  chr17:77919477-77919684
  hypo
ctccagcattcagtgagtcacccagccatgcgctgccatgagccgtcagaggcgaatggcgttggacactgtaactgcctccccaagcaatgtggacacccgacgtcacacacacccgttgatgcagagtgagcaggcttggctgggttcagccccccggcccaggtggagttagatcacagctggggggatcctggggcagagctc

SEQ ID NO: 16568 - DNA, 152 bp, Homo sapiens
  chr17:77923970-77924122
  hypo
cggtatccccccaaaccctcgagggaggtgttgtgttttgtttttttttttcaacgcagcagctttgattgctttatcggtgtgttcacagagagcctcacacaagaaaacggggccctcacgaggaggtggcccgtgggtgcgggcgggcg

SEQ ID NO: 16569 - DNA, 140 bp, Homo sapiens
  chr17:77976585-77976725
  hypo
cgtggtggccacacacagtggggcacaggcacaggaccgcgtgcactgcaggacgctctgctgacggcgctggcccaggcactgggaggaccctgtgaggaagcacccgggaacggtggcgcacgtagggaacaccacgc

SEQ ID NO: 16570 - DNA, 353 bp, Homo sapiens
  chr17:78041114-78041467
  hypo
cggcccgcagtcactagaaccccctcccaagacaagcaaaggcacctggttttctgggatcccctgcctaacttgtgtgcaattgcaagaaagcatatgcgttcacccggagtcttccttccctctcttgctccgtgggagcacaccacactcactgttctgcacctctttgctttttccatttaacagcgtgtccctagagcgcttcccaagtcaaaatataaacaccgctcgttcccgcctttctaccacatggcattccgctgggatacttctacggggaagcttcctgcccggggcatcgagggcgttcgcgtccgtctgttatggcggtgctgctgtagataaccgga

SEQ ID NO: 16571 - DNA, 200 bp, Homo sapiens
  chr17:78041496-78041696
  hypo
tatatagccttttttatattgcctatcaagcccggaatgtctgggtctagcgggtattgctaagtaggattgtgacagtcacgcccccggcagcggtgtttcaaagtcccctgacagctcagcatgttgtcacacttcaggactgtgccaatccgattgatgaagaaaatagataatcttgttttataaaacgtgcatgc

SEQ ID NO: 16572 - DNA, 117 bp, Homo sapiens; identical to SEQ ID NO: 8139
  chr17:78143796-78143913
  hypo

SEQ ID NO: 16573 - DNA, 472 bp, Homo sapiens
  chr17:79046033-79046505
  hypo
cgttgggagacctgcgcaggccccacctcagtccacaacaatgttccttgattccctccggcttcctgctccttcacctcctcctgcgcagcccggcctgacccatgtaatcagggaacaggaggggctctcctcagtgtccctatgtccatgccttgtggccacctgagcacttctcagggtccagtggaaaactctcctgccctgtttgacgcccacactcgtcagtttcaccttggtgccaagagcagacgatctgctccaggccccacttgggccacagcctcacagccgtctccacgtccccacccgaacctggcatttcctgaattcctggcccctgtccgagaaggaggctaaccctcctgggagagctctggcaggtgctgacccaagtccgtggggtcttcaacctttgcagacacctgcgcccagaggccacgcctcccactctgagcacaggcgggcggac

SEQ ID NO: 16574 - DNA, 196 bp, Homo sapiens; identical to SEQ ID NO: 11268
  chr17:79060680-79060876
  hypo

SEQ ID NO: 16575 - DNA, 516 bp, Homo sapiens
  chr17:79166571-79167087
  hypo
gccacctcactgtacagccgctgccgttgctgctgcagcgcccactgctcctgctccaggtgctgctggaacctgcgggacggtcaggactggctctcgggggccgggacgggcggtcccaggacccacccaccgcaggggcacgggccgaccacaggcctgactcacagctggagagcagccctccggggccctgcccctccccctcggcagtcaaggcccctcaaagccaccgcccgggggcaggcaaggccacgaggaacttgcccatcagccaagcgcagcaattccctgagctccaggccctcgtggcactttgggaagtggctgtggagccgcgtccaggcccccttttccctcagcccgtgtgccggcctcaccctgttcagcattgccccacgggcatggagggcgggaggcaggtgcctcgtggggccttatccacctcccctgcctccggcctgagggtgccaggtgcctggctccgtgacctgagcaagctcgcgccagggcctc

SEQ ID NO: 16576 - DNA, 309 bp, Homo sapiens
  chr17:79870549-79870858
  hypo
cccagctcgggaaagctgtctgcggtccctgccttcccatccccttccctcccgtgtcaactgcggcggggctctggttggcggcagcttcattgttaccaagctgcagaacggatgtgggagaggtcacctcttaggtggtgactcaaaggtcggcacccacactagctcggtctcctcaaaactccgtgtccttgtccaccactgagcggcgtgcacacacagggtggggcagcagtggccccagggctgcctccgtctccagggatgagtcactagcaactctgggccccaccttccacttgtacc

SEQ ID NO: 16577 - DNA, 70 bp, Homo sapiens; identical to SEQ ID NO: 7049
  chr17:80832134-80832204
  hypo

SEQ ID NO: 16578 - DNA, 86 bp, Homo sapiens; identical to SEQ ID NO: 7050
  chr17:80832796-80832882
  hypo

SEQ ID NO: 16579 - DNA, 99 bp, Homo sapiens
  chr17:80867234-80867333
  hypo
cgctgtcaggagcaggcggggcgggtgtgttcgcttccctctctgcctatgtgtgtttgggttgagcgggtgggtgtcacccggcccgctgtgggaggc

SEQ ID NO: 16580 - DNA, 308 bp, Homo sapiens
  chr17:80879354-80879662
  hypo
cgctaacttgattttttgacagatggttggcaatggctgataaatgacactttgagacatctccatctcatctcaagtcactcccgccagcagatgaaggtacagtgagcatgggcgttcccggccggcgctgtggcggtgttagtgtgttagtcacggatggtgtttgtgttggcgactgtgcatcatgaggctgtccctgcagtagcctgataactgacaaatgggggcataattctatttggaatcccggatggtagcgtctacacggtttataaccagaaaatccaatacagccattggaatcc

SEQ ID NO: 16581 - DNA, 79 bp, Homo sapiens; identical to SEQ ID NO: 12429
  chr17:81050575-81050654
  hypo

SEQ ID NO: 16582 - DNA, 206 bp, Homo sapiens; identical to SEQ ID NO: 12430
  chr17:81050716-81050922
  hypo

SEQ ID NO: 16583 - DNA, 122 bp, Homo sapiens; identical to SEQ ID NO: 12437
  chr18:24130266-24130388
  hyper

SEQ ID NO: 16584 - DNA, 456 bp, Homo sapiens
  chr18:25756040-25756496
  hyper
ccggactggagcaggtgcttcctgccgcggaggagcctcttagtagagattaaatgaaaaggctcgctggctctctcccgagggtatgaaaagtacggaaggctccaggcaaaggcgcccccggggcgcatatagggcacaggcagccggacagagaaaggagcagccgcgtaacggaacttctcgcccgggggagatactaggcgtgagaggccagactcgttctacaggcaggcgctgaccggcagagactcctccgggcaagagggccagattttctttccaggtgggacgaacacagaatattgtgagggcaagagaagaagaaaaggaggcaactccagactgggataaagacaataggacagtagagcccttgagcaccgggaggcgcacgggtgcagggtggggtaaggtggaggcaagtcccgtaactaagacaccagagtgagaatt

SEQ ID NO: 16585 - DNA, 238 bp, Homo sapiens; identical to SEQ ID NO: 8157
  chr18:2848166-2848404
  binary

SEQ ID NO: 16586 - DNA, 206 bp, Homo sapiens
  chr18:3214837-3215043
  hypo
cgaaccgaaacaaagcgagaagtaactgggagggttactcagagcacacgcctcttcctgaggttggaaggttggaggagggcgtccgacatacccatgggaggagccataatcgtaggctgaggctgccttccgactgacttcagagctcagggcgtgctgcgaggcctgctgctgggaggaggaggcggacgcccgacggaagg

SEQ ID NO: 16587 - DNA, 137 bp, Homo sapiens
  chr18:3215256-3215393
  hypo
aaaacaacactttttgagtgacttattaaggaacaaattccatagaccaagtcatctaaatcaatgtgtaaaaatcaatactcttggctgggtgcggtggttcatgcttgaaatcccaacgaggatctctcgaggcc

SEQ ID NO: 16588 - DNA, 80 bp, Homo sapiens; identical to SEQ ID NO: 6007
  chr18:44335955-44336035
  hyper

SEQ ID NO: 16589 - DNA, 47 bp, Homo sapiens
  chr18:4454645-4454692
  hyper
gacatgaccgggacaggggaccggtgttctcctcccctcccccttcc

SEQ ID NO: 16590 - DNA, 255 bp, Homo sapiens
  chr18:4454777-4455032
  binary
cgcccccgagatcccaggttacccggagggcccgggagtgcaccccgggcggctgaaagggtaaggagcgcggactctcgagccagcggccgggggagcccagcccgcagcccctccgcgggcgagggaagcggcgaccgcgcggcaggcagcagccaggagccacccagcgcgccgcgaccgccgccgccgcgcacgccccagccccgcggcgcagcccggcgttacctggccgcgtcccgcagtccggccctc

SEQ ID NO: 16591 - DNA, 52 bp, Homo sapiens; identical to SEQ ID NO: 8158
  chr18:46142611-46142663
  hypo

SEQ ID NO: 16592 - DNA, 70 bp, Homo sapiens
  chr18:52988851-52988921
  hyper
cgacaataaaacttgtcaaaaatccccctcgcagcccgcattcgcttaccgctttcccattatagtagta

SEQ ID NO: 16593 - DNA, 139 bp, Homo sapiens
  chr18:52989603-52989742
  hyper
cgcagctgcctgagaactcgactcggagaaaggggagggaaaggggagggaagaaaaaaaaaaaaaaaaaaaaaaaaacaccacgtctctgacctcgctcaaaaggagagagggggcagtgttttctgactgcttggtc

SEQ ID NO: 16594 - DNA, 448 bp, Homo sapiens
  chr18:53256017-53256465
  hyper
atactttctttcccctcccttttaagtcacagaatagtataactgcaaacttcgaaaaaaaaaaagggcaatttttgggggtggatgttgttttgtttttgcacttgagttcctaggcacgctaagtccctgttcgccagcactgtaagtttttaattcaacatttaccattataggccctgcatgctcttaaaacatactttttcacatcactttttaggataaaatttaagcttcataattctatcgtttcgtaataacaagcgtgctttatccggtatatgcaacataagctattttaacgtgtgtttgaaaaaaaaaacacacattctacaaatcctggtattgctagatgtgcgagtacatacacaaaatgcatgcacacactttttcccattggcaattatttaataggttgtcccttttgttttaataaaacatcgggatc

SEQ ID NO: 16595 - DNA, 53 bp, Homo sapiens; identical to SEQ ID NO: 8159
  chr18:53257322-53257375
  binary

SEQ ID NO: 16596 - DNA, 45 bp, Homo sapiens; identical to SEQ ID NO: 8160
  chr18:53446783-53446828
  hyper

SEQ ID NO: 16597 - DNA, 101 bp, Homo sapiens; identical to SEQ ID NO: 7067
  chr18:60985398-60985499
  hyper

SEQ ID NO: 16598 - DNA, 75 bp, Homo sapiens; identical to SEQ ID NO: 7068
  chr18:60985973-60986048
  hyper

SEQ ID NO: 16599 - DNA, 122 bp, Homo sapiens
  chr18:74163260-74163382
  hyper
cgggggcggggggggcaccgatgtcagcccgggatggatgtccgcgggtgcaggggggtgacagcccggtcctgcgcacatctccgctgacagggcattcctcaggaggggctggagtgaac

SEQ ID NO: 16600 - DNA, 273 bp, Homo sapiens; identical to SEQ ID NO: 10399
  chr18:7567478-7567751
  binary

SEQ ID NO: 16601 - DNA, 70 bp, Homo sapiens; identical to SEQ ID NO: 10400
  chr18:7568821-7568891
  hyper

SEQ ID NO: 16602 - DNA, 154 bp, Homo sapiens; identical to SEQ ID NO: 8177
  chr18:8612051-8612205
  hypo

SEQ ID NO: 16603 - DNA, 81 bp, Homo sapiens; identical to SEQ ID NO: 7073
  chr18:9514129-9514210
  hypo

SEQ ID NO: 16604 - DNA, 169 bp, Homo sapiens
  chr19:10207022-10207191
  hyper
cgtggcggccgacgcgcatgcgcagcgccgccagctcgctggcgttggcggcctcgggcgtcgcccgcgtggatgcggggccgctccagcacacagcgcccgtgaacttctgcgggggcagcacgaaggtgtaggtgcagcgcggggcgcccgcccgcgcccacgacgc

SEQ ID NO: 16605 - DNA, 128 bp, Homo sapiens; identical to SEQ ID NO: 8182
  chr19:1030225-1030353
  hypo

SEQ ID NO: 16606 - DNA, 61 bp, Homo sapiens; identical to SEQ ID NO: 11314
  chr19:10370250-10370311
  hypo

SEQ ID NO: 16607 - DNA, 88 bp, Homo sapiens; identical to SEQ ID NO: 11315
  chr19:10370575-10370663
  hypo

SEQ ID NO: 16608 - DNA, 215 bp, Homo sapiens; identical to SEQ ID NO: 10403
  chr19:10400761-10400976
  binary

SEQ ID NO: 16609 - DNA, 279 bp, Homo sapiens; identical to SEQ ID NO: 12476
  chr19:10401208-10401487
  hyper

SEQ ID NO: 16610 - DNA, 485 bp, Homo sapiens; identical to SEQ ID NO: 12477
  chr19:10529649-10530134
  binary

SEQ ID NO: 16611 - DNA, 111 bp, Homo sapiens; identical to SEQ ID NO: 12478
  chr19:10530526-10530637
  binary

SEQ ID NO: 16612 - DNA, 631 bp, Homo sapiens; identical to SEQ ID NO: 9301
  chr19:10530654-10531285
  binary

SEQ ID NO: 16613 - DNA, 348 bp, Homo sapiens; identical to SEQ ID NO: 13683
  chr19:11128636-11128984
  hypo

SEQ ID NO: 16614 - DNA, 267 bp, Homo sapiens
  chr19:11129453-11129720
  hypo
cgtcctcgccagtctctcttcctccctccctccctcagctgccctaaacacagtttctctgcccactcggagggctgtggccatgttggcctcgcccctgacagccagtggctatgggtttgcacagtgagccattgatgagagaccggcacttgactctcatttccttgttccatcagaacgctgtccaactgggcgtacgagtttgacaagtgggccccctccgtggtgaaggtgtcttacaaggtaggtcacagccactgaggt

SEQ ID NO: 16615 - DNA, 31 bp, Homo sapiens
  chr19:11129826-11129857
  hypo
ggacagcctggaactccagtcacatggatcc

SEQ ID NO: 16616 - DNA, 143 bp, Homo sapiens
  chr19:11152817-11152960
  hypo
cgctgtcctcacagacatgtcctatatacgaggcagcatgcggttccagctgtggccacggcccagcggcggatcataacgtgttggtggatcatgagtgccatttatatgtttttcatttactaatatccttttccgtgagc

SEQ ID NO: 16617 - DNA, 598 bp, Homo sapiens; identical to SEQ ID NO: 13685
  chr19:11491655-11492253
  hyper

SEQ ID NO: 16618 - DNA, 135 bp, Homo sapiens; identical to SEQ ID NO: 13686
  chr19:11492528-11492663
  hyper

SEQ ID NO: 16619 - DNA, 51 bp, Homo sapiens
  chr19:11531278-11531329
  hyper
cggtaacatttattgcgcaactctgaggccggggcggacccagctggggag

SEQ ID NO: 16620 - DNA, 38 bp, Homo sapiens
  chr19:11531888-11531926
  hyper
ggatgggaagcgagagaggaaggtgggcggggccaggg

SEQ ID NO: 16621 - DNA, 68 bp, Homo sapiens; identical to SEQ ID NO: 12481
  chr19:11592604-11592672
  binary

SEQ ID NO: 16622 - DNA, 189 bp, Homo sapiens; identical to SEQ ID NO: 10409
  chr19:11593453-11593642
  binary

SEQ ID NO: 16623 - DNA, 198 bp, Homo sapiens; identical to SEQ ID NO: 6504
  chr19:1226490-1226688
  hypo

SEQ ID NO: 16624 - DNA, 317 bp, Homo sapiens; identical to SEQ ID NO: 6505
  chr19:1226828-1227145
  hypo

SEQ ID NO: 16625 - DNA, 790 bp, Homo sapiens
  chr19:1254919-1255709
  hypo
cggccagcagcagtgccagtcctggtgccagcaccacgtctaccccaggggccagccctgccccccgctcccgaaaacccggcgccgtcatcgagagctttgtgaatcacgccccgggggtcttctcagggaccttctctggtaggtgtcacagcacatgtgtgagctcacgtgtgtcccgtgaccctgtgcatttggggtctacatccacccacaggcgactccacatattctgggcatacacaggctgtgtccgtctgctcacttcacatgtcccccaggaatcccccacacacacgcctggccctgcccggggggccgcgggtcaccaggcgcctgcatactggggacgtgtcccgctcccgccccgtggtccctcgtgcacatcagcccacatgtccacgccattgcctgagctcatgagctcacacccgtggacgcccgtcctggacatgcgggactgtgcccgtgccgggcactcacggccacctctgcccgcaggcacgctacaccccaactgccaagacagcagcgggcggccgcggcgtgacatcggcaccatcctgcagatcctgaacgacctcctgagcgccacccggcactaccagggcatgcccccttcgctggcccagctccgctgccacgcccagtgctccccggcctcaccggcccccgacctggcccccagaactacctcctgcgagaagctcacggctgccccctcagcctccctgctgcagggccagagccagatccgcatgtgcaagcccccgggtgagtggccaccctc

SEQ ID NO: 16626 - DNA, 221 bp, Homo sapiens; identical to SEQ ID NO: 7076
  chr19:12995851-12996072
  binary

SEQ ID NO: 16627 - DNA, 121 bp, Homo sapiens; identical to SEQ ID NO: 10410
  chr19:1449921-1450042
  binary

SEQ ID NO: 16628 - DNA, 162 bp, Homo sapiens; identical to SEQ ID NO: 7079
  chr19:16186802-16186964
  hyper

SEQ ID NO: 16629 - DNA, 621 bp, Homo sapiens; identical to SEQ ID NO: 7080
  chr19:16187000-16187621
  binary

SEQ ID NO: 16630 - DNA, 634 bp, Homo sapiens; identical to SEQ ID NO: 7081
  chr19:16187640-16188274
  binary

SEQ ID NO: 16631 - DNA, 106 bp, Homo sapiens; identical to SEQ ID NO: 10413
  chr19:17392397-17392503
  binary

SEQ ID NO: 16632 - DNA, 218 bp, Homo sapiens
  chr19:1751192-1751410
  hyper
cggagtccctgaccctcgtcttctctttcaaaatggatgctttccctgctagaaaagccacacacgcttgctattaaaatgaacacgatcatcaagctgtaaaaaatatatttaaaaggaagcctgcaaaatcccagctccctaggagctcccccacattggcatttgggggaacttccttccaccttgttatcctcccacccgtagagacccccagc

SEQ ID NO: 16633 - DNA, 112 bp, Homo sapiens
  chr19:1751497-1751609
  hyper
atctgtgattgttggagggtgagaatgaggagcgcaggctggggctctgtgcagccacatcccccccgccgagattcagcatctgcacggggagtggggtacgcgactgttc

SEQ ID NO: 16634 - DNA, 75 bp, Homo sapiens
  chr19:1761779-1761854
  hyper
cggcctcagttttccctctgccaagtaggtgctaatgtgagaggggctgagaaaccggcacccctcctgagtccc

SEQ ID NO: 16635 - DNA, 190 bp, Homo sapiens
  chr19:1761983-1762173
  hyper
cgtgcccgggtcacaagtgtagacgcacccggagacacgtgtgtagacgcctccgttcacactgggacgagtgcagactgacccaggacccccatccgccctctggcagtcttgagccagcaactcccctaagtggggtgcggggacatctggaagacgccccatctccccctggacgcagtggctgcgc

SEQ ID NO: 16636 - DNA, 47 bp, Homo sapiens
  chr19:1762820-1762867
  hyper
gccgtcctgggtgcgctcagctccagcgcagtgggaggacaagacac

SEQ ID NO: 16637 - DNA, 109 bp, Homo sapiens
  chr19:1765525-1765634
  hyper
cgccgcttcacgctgtcctgtgactgtgagtggaggccagctcctggagctgcctctctctggcctcacgcagcagctgctccctgaatggtgaatggatgagtcggtt

SEQ ID NO: 16638 - DNA, 339 bp, Homo sapiens
  chr19:1766024-1766363
  hyper
cgcccgtccaaggccccacaagctgatgccggttttcccgcccagaactggaacagctttcctaacggtcacaggtttcttagcttctcacttgggtggggtttggatgtgcaaggctgccgacccccatcgtggttgagcgcccgtgcaggcgccacccacccacccacagcacctcgctcagacttcgccctccaccccgccgggacatttgggaagcctcaggcagccccacgcgggcacacccgatggtggacggaggctggcaccctcagcccgcacgcggccaacgtcaggcgcgcgcagaggcacccacgggcccgccttcaggggcgaggc

SEQ ID NO: 16639 - DNA, 98 bp, Homo sapiens
  chr19:1768372-1768470
  hyper
agagaggcggctggtggtggatggggagagggaagcggctggaagagctcaggagcccaggaaggactggcctgcaccgggacatgcctgaagggggc

SEQ ID NO: 16640 - DNA, 69 bp, Homo sapiens
  chr19:1769669-1769738
  hyper
cggcccccctactccaactcacacctctgtcagcggctgtgggggatgggagcaatgacaaagctgctc

SEQ ID NO: 16641 - DNA, 240 bp, Homo sapiens; identical to SEQ ID NO: 12486
  chr19:17716539-17716779
  binary

SEQ ID NO: 16642 - DNA, 307 bp, Homo sapiens
  chr19:1775741-1776048
  hyper
cgcccagagggcctcgagaaaaaccagggctcactgtgttgtcccctaaagcgggtcaagaagcacatactagaaatataaaccgggtatttaaaaatggaattttaaagaataacccctcctccgtcagatcccctgccccaccgagggaggtagtagaaaacttccttcctccccacccgccccggccccctccccagggacctcagccctttccaaagtcgccaaaaacccacatcaagccggatccttacggtcccccaccctctccaaaaccaaccccacccgctggcaggacggcccctgc

SEQ ID NO: 16643 - DNA, 224 bp, Homo sapiens
  chr19:1776743-1776967
  hyper
cctcctccctgaaatccccccactcatcggctgcctcccagggaggaggcggcccccctaccccccttgaaaatgcaaaagacatttctagtgaaatgcccctcccctcccccaggtaaaggctacctcactcaagctcatgtctgtgattggaaaatcacgcctgataccaaagatttctcccaaggatttgtgctggatgacaggattccctggcctgggac

SEQ ID NO: 16644 - DNA, 161 bp, Homo sapiens
  chr19:17984912-17985073
  hyper
gactgtccaggtgacctcgagtccctccttgcagtacctggagatgcgcttcagccgcgcagtgcggctctgcgggactttgcagtacattgtagccacggtgagtggcctcggccccgccctccgctcagggccccgagagcgtcagccttcactagccc

SEQ ID NO: 16645 - DNA, 243 bp, Homo sapiens; identical to SEQ ID NO: 6512
  chr19:1911845-1912088
  hypo

SEQ ID NO: 16646 - DNA, 659 bp, Homo sapiens; identical to SEQ ID NO: 6513
  chr19:1912446-1913105
  hypo

SEQ ID NO: 16647 - DNA, 262 bp, Homo sapiens; identical to SEQ ID NO: 10420
  chr19:1969650-1969912
  hypo

SEQ ID NO: 16648 - DNA, 320 bp, Homo sapiens; identical to SEQ ID NO: 10421
  chr19:1970106-1970426
  hypo

SEQ ID NO: 16649 - DNA, 61 bp, Homo sapiens; identical to SEQ ID NO: 8229
  chr19:30718934-30718995
  binary

SEQ ID NO: 16650 - DNA, 378 bp, Homo sapiens
  chr19:35758216-35758594
  hyper
cgacctcaccccgccgagcaccgccgagtcagggagcaggtctcccacgagtaatggtgggagaagccgggcctacatgcccccgcggagccgcagccgggacgacctctatgaccaagacgactcgagggacttcccacgctcccgggacccccactacgacgacttcaggtctcgggagcgccctcctgccgaccccaggtcccaccaccaccgtacccgggaccctcgggacaacggctccaggtccggggacctcccctatgatgggcggctactggaggaggctgtgaggaagaaggggtcggaggagaggaggagaccccacaaggaggaggaggaagaggcctactacccgcccgcgccgcccccgtactc

SEQ ID NO: 16651 - DNA, 58 bp, Homo sapiens; identical to SEQ ID NO: 8232
  chr19:36222534-36222592
  hypo

SEQ ID NO: 16652 - DNA, 208 bp, Homo sapiens
  chr19:36351581-36351789
  hyper
cggcctgtgggtgtggtcaaaggtggccgtggctttcagggctgttgagggtcggggcctggaggggcggggccgggagagcgagcgtggggtattaggaggaggagagtgtggagctggggcatattcttgcgccctagagggtgtggtgtttctgtggggctggctgatcccaggtcagtggctgcattccgccccggccatgtga

SEQ ID NO: 16653 - DNA, 32 bp, Homo sapiens; identical to SEQ ID NO: 10424
  chr19:37095634-37095666
  hyper

SEQ ID NO: 16654 - DNA, 105 bp, Homo sapiens; identical to SEQ ID NO: 6042
  chr19:37096594-37096699
  hyper

SEQ ID NO: 16655 - DNA, 47 bp, Homo sapiens; identical to SEQ ID NO: 10427
  chr19:3785511-3785558
  binary

SEQ ID NO: 16656 - DNA, 38 bp, Homo sapiens; identical to SEQ ID NO: 6048
  chr19:38182720-38182758
  hyper

SEQ ID NO: 16657 - DNA, 87 bp, Homo sapiens
  chr19:39210557-39210644
  hypo
cggccagggcccagctggttcagcggcctccacacgtccctgccccacccctacctgactgggcatccacgcgggtctgcccatggc

SEQ ID NO: 16658 - DNA, 91 bp, Homo sapiens
  chr19:39221989-39222080
  hypo
cggcagggtgagtacaggctgatcccttcaatcctctgggcctgtttcctcatccatcaaacggactaagacagccccgaccccatagggt

SEQ ID NO: 16659 - DNA, 138 bp, Homo sapiens
  chr19:39222121-39222259
  hypo
tcgatgtgtgggtactgttactccttaaatcctgtggggctttctccttgccagtgggcactggaggatatttctgtgcagcaaaaaatatagtcaatcccatatggagtcagtttccttacagtctacctcagaggc

SEQ ID NO: 16660 - DNA, 57 bp, Homo sapiens; identical to SEQ ID NO: 6521
  chr19:39329516-39329573
  hypo

SEQ ID NO: 16661 - DNA, 100 bp, Homo sapiens; identical to SEQ ID NO: 10434
  chr19:3966587-3966687
  hypo

SEQ ID NO: 16662 - DNA, 183 bp, Homo sapiens; identical to SEQ ID NO: 10435
  chr19:3966755-3966938
  hypo

SEQ ID NO: 16663 - DNA, 68 bp, Homo sapiens
  chr19:39997621-39997689
  binary
cgggcaggtgggtccccggctcccggactgcgccctctgatgctcccttccccacaggcggactctgc

SEQ ID NO: 16664 - DNA, 266 bp, Homo sapiens
  chr19:4054040-4054306
  binary
agcttgccggcgccctggatgaccttctcgcagatggggcacttctggaaggccttggctcggatcttcttctccaccttctgcgaccaggccgggtagacgtcgccgtcgtgggcgccgctgaagtacttcaggtagtagtccatgacgcccttgtcgtcggcccgcgactcctcgtcgctgtcccccgccgcggcccccgcccggcccaccgatgacatcatctgctgcagcagcgtgctggccgccagcccgtccacgtcggg

SEQ ID NO: 16665 - DNA, 56 bp, Homo sapiens
  chr19:4054380-4054436
  binary
acagcgaggcggcctcctcctctccgccgcggccgtagtggccgttctgcgtggcg

SEQ ID NO: 16666 - DNA, 171 bp, Homo sapiens
  chr19:4054471-4054642
  binary
ggtgggggcgtcctcatcccgctctggccacagacccgggttgctgtcgccctcgtccccgtcccccgtcgggggccgctcggccggggggcccggcccatagaagtctaagccgttgcagtcgcccgcggccacggcggccacagcggcggccacggcctccttggtggc

SEQ ID NO: 16667 - DNA, 520 bp, Homo sapiens
  chr19:4054917-4055437
  binary
ccacgttggctgtgctgacggtgagcgtggccgtgtaggcgaagtccatgagcgcggtgagcgcctcggcgctgacgaagtcgatctcgtacacgttctgctggtccaccacggcgcccgacgtgaacagcttcttgaagtactggctgcaggcggccagcaccgagcggtgcgtggggaactcgcggccctccaccaggatcaccacgtcgcacagcaggccctgcgtccgctgctcgttcagcccactcaggatgtcgctgctgtggtcggggaacgggatcccgatggggccgtccacgccgccggccatcttccgcgccgagacctgcagcagtggggaaggagagggcgctcgtgagtgggggtgcgggggttcctgtgcccactgacaagggcccgaggcccttgagaagcagcgttccaccctgctcccccagcctcacattcccacctgcacgtgaaggcggtcagatgtcgcgcctttccagccccagcttccccagctgtgcaccaaagc

SEQ ID NO: 16668 - DNA, 356 bp, Homo sapiens
  chr19:4096061-4096417
  hypo
cgtgcccggccaaactgggtccacagttttaagcccaagcactggggagcctggcctgacacacgtccccggagcgggagtggccgtgtaagcggtgccagcagggcaggggcaggcctttcccgcgcaggggcaggggcgggaagaggcgggggagaggtcgggggatgtgctcactgggcatgggtgtggctgctaggtgcagggagagctgggtcaccagggccaccccacctggctccgtcatcatctcgccacccaaccccaggcctagcccagtctgcaggcagctcaaatgcccgtttctctgccccagctccaaagggccaccaaagacacagaaacccacagaaggc

SEQ ID NO: 16669 - DNA, 165 bp, Homo sapiens
  chr19:4096525-4096690
  hypo
cttgttttactcatctgggcggtggaaaccctcatactgtggctcactgggttgttatggggactgacggagcaggagccaccccgggacctacaggtccttctaggctctctgggcctccttccaagaggcaagggccattcctgtacctttctccgtggaagc

SEQ ID NO: 16670 - DNA, 58 bp, Homo sapiens; identical to SEQ ID NO: 10437
  chr19:41119120-41119178
  hyper

SEQ ID NO: 16671 - DNA, 68 bp, Homo sapiens; identical to SEQ ID NO: 10438
  chr19:41119735-41119803
  hyper

SEQ ID NO: 16672 - DNA, 157 bp, Homo sapiens; identical to SEQ ID NO: 10439
  chr19:42408960-42409117
  hypo

SEQ ID NO: 16673 - DNA, 33 bp, Homo sapiens; identical to SEQ ID NO: 12518
  chr19:4304684-4304717
  binary

SEQ ID NO: 16674 - DNA, 290 bp, Homo sapiens
  chr19:4361250-4361540
  hypo
ccccagaggaacattagtgtttctaagagcaccttagtgttgccccgcctcggccagctgggcgagaagttggggagcgggggaggaggctggcgccatggagtggggaagggagccgtcaccgttgggagtcagcgctagtgtaaacaggcatccccacccacccagataagcccccccacccaagtgtggggtcctgctcagggagtacctcaagggccggggcccaggtggcgccggcaggctcagacaccgccctggcagcaggggctccgtggaatgcaggagac

SEQ ID NO: 16675 - DNA, 179 bp, Homo sapiens
  chr19:4361700-4361879
  hypo
gcgtgatgacgtcgccctcatggaagcccagctccccgtcgttctcgggctcgaagtcgtacagcgccttgcagctcggctggtccaggggcgctgggggcgggagcgggctgtggggctggggctgctacgcctcaccccgcccagtctggggtctcagacctgctgtgacctggagc

SEQ ID NO: 16676 - DNA, 118 bp, Homo sapiens; identical to SEQ ID NO: 10442
  chr19:45656461-45656579
  hyper

SEQ ID NO: 16677 - DNA, 233 bp, Homo sapiens
  chr19:4714229-4714462
  hypo
gagtgcttctgcacctggaagcgggcggccgggtcatctgtggcggctgcgtcgcctcggtcggccgttggggtcccggtggtggccatcctctcagccccctcggaattcagcgagaagctgcggggaggaagcaaagactatgagaaaggagaactgttttacctacgagctgccccaatgctgccccttgcgaggcactcaggttcttccagacgagccccacccctgcc

SEQ ID NO: 16678 - DNA, 319 bp, Homo sapiens
  chr19:48857831-48858150
  hypo
tctgtaccttgttgctggtctcttcctcagtagaacagagcctgtgaggtacatctctcatgctgtccactgtctcccagagcctcaagccattccagagacacagtaggtgctcaataaatatttactgagcgaactcaatgaatgaatgaatcagcgaaaaaagatcagagagaggtcacccgccaaggtcacccgcaccactagtgaacaaccaagctattgtttgaaccgaggctatgctgcttctttccctgcccaggccacatcttcaaaggacttaagtcatcagcaaatggtcacccagcgggcctcaccc

SEQ ID NO: 16679 - DNA, 315 bp, Homo sapiens
  chr19:49179997-49180312
  hypo
cgacggcgagcgaggctgggaaatggggccttcccgtactgctggtggaaacggaaactggggcagccacctggcagctcccaaaacgattcaacgtagagttcaccctgtgacccagcacacaggttcgtggcagcactatttgcaacagccgaaaactggaaacaactccagtgcctatcacctgatgagtgaatacattgtggtctacctggacaatgggactttcagtcttgaaaggagtgaggcaattatctgggcgtggtggctgtacctgtagtcctacctgtagtcccagctactcgggaggctgac

SEQ ID NO: 16680 - DNA, 219 bp, Homo sapiens; identical to SEQ ID NO: 5779
  chr19:50553779-50553998
  binary

SEQ ID NO: 16681 - DNA, 446 bp, Homo sapiens; identical to SEQ ID NO: 8283
  chr19:50833970-50834416
  binary

SEQ ID NO: 16682 - DNA, 77 bp, Homo sapiens; identical to SEQ ID NO: 11402
  chr19:51111319-51111396
  binary

SEQ ID NO: 16683 - DNA, 96 bp, Homo sapiens
  chr19:51143111-51143207
  hyper
gccggctcggctcctcccctcgccactgtcgcaggtccgcggctcctccccctgcaccccctccttcccccactccgaacccgcggcaagaaagcc

SEQ ID NO: 16684 - DNA, 231 bp, Homo sapiens; identical to SEQ ID NO: 9401
  chr19:51161455-51161686
  hyper

SEQ ID NO: 16685 - DNA, 51 bp, Homo sapiens
  chr19:51198271-51198322
  hyper
cgccgccgaccgcagacaaagccatcgccgccgcggccccagccccggccc

SEQ ID NO: 16686 - DNA, 73 bp, Homo sapiens; identical to SEQ ID NO: 12532
  chr19:51228809-51228882
  binary

SEQ ID NO: 16687 - DNA, 274 bp, Homo sapiens
  chr19:52551831-52552105
  hyper
cgcccccgcctcccccaacccccgcgctacctccaccatatagcgccaccaacaacgcagacgccctcagaaagctccctcccaccacgtttccacgccctgacccacacactgacctgactctccttggaatcgccgcgacctcttaaaagctgaacttacttccctaaacttcttccacttctgggcccctcgcccaactccctccccctctaaacctccagagacggtcagccgcgtttccatggagagcggaatgcggccttccggcttt

SEQ ID NO: 16688 - DNA, 465 bp, Homo sapiens
  chr19:52552233-52552698
  hyper
gatttccagacacctcagccctggcagaaaatggagagcttatcagaggcttgagttcacacaggcagacacggcgtgggggtaaagtcctctgaacagacacggaacagaaataagttagtcttctcctcgcaggggacagtgaacggcgcaaacttctcaaaggccagaacccattattaccacaaaggcgcggcatcccttcttagcggttatgatggctgtgacgtctcagctcaatggaaaattaaagtcacctctgggcacctcagtcactattgtaaatgcgaagcgttttagaagccgtataaaaactgaagcaagagagactagaacaaaaaataagcgagcggtgcgttgcaggtaacggagccagagcccttaggggagagcatcatgggggcggccatcttaggggacgttcggtgtccgtacggcagaacatattctctctgagaagcttgc

SEQ ID NO: 16689 - DNA, 304 bp, Homo sapiens
  chr19:5293673-5293977
  hyper
gttcccctcccagtctgggtgggaccggaggcacggtgatgggggcggggggcgtcccctcttccccctcttagaccagagggtaggggagaggtgcgggcgcagaggcttccctcccgctgggggtccaggggaatgaatggggggacaccgtggcagaggcccccaccctcgccacaagcctgaggagggggcggagagcacagggccagattggaaacagatggggccgccgtgccaggcccgcgacaccggagcagagggagaggaggagggagagggaggggcagacctgtccgggcgg

SEQ ID NO: 16690 - DNA, 412 bp, Homo sapiens; identical to SEQ ID NO: 10455
  chr19:56199006-56199418
  hypo

SEQ ID NO: 16691 - DNA, 133 bp, Homo sapiens; identical to SEQ ID NO: 10456
  chr19:56199619-56199752
  hypo

SEQ ID NO: 16692 - DNA, 153 bp, Homo sapiens
  chr19:56988132-56988285
  binary
cgcaaagccactgacgctaagtggcagacagacgcccaggcaagtcacacagtaacccaaggctacaataaacgcccacatcagcctgacactgacacacgcacacactccagaaacacaaatcttcacagtcagcgtcacacacccactccc

SEQ ID NO: 16693 - DNA, 57 bp, Homo sapiens
  chr19:617561-617618
  hypo
cgccttactcagagcagaaccgcttgaccaggaatctggacaggtcctgcaggatgg

SEQ ID NO: 16694 - DNA, 808 bp, Homo sapiens
  chr19:617647-618455
  hypo
cggcacacctgggcaggagtcagaggatccccaggggtgatcaggcaggctctgggcaccacccctacccaacgccccagtgtgggggccccacccatgggtggactgaggctcagactacgggggcacctggttcatgacggagacatcagctgcgtgagtccagtaacagtcgtgcacagagacgaaggtcaggcccttcctgtggcagagcggaggactcctgaagggaggggagctcacagggccacccagtgaccagcatcctggccctgcgctcagccccctccacttgaggtccagggaagcccaccctcctgcaggcctcgccccacccctcgccccgcccctccccaaacatcctgggttaggtatcagtacagggggaggaaatgttcccagaagcctcctcgccccacccctgccgccccccacgctgctgtgggagcctcagctccgagggcggctacgaggtcccctcctgccagggccaccaccccgcatcctgagcattcccagctcccgtggccggtagattctgctggaacgacctccacgtgctccagatctaaccacacatcgcggtgccaagaaatgcccagcaggaaggggcagcgcccatgctcggctctccctgtcgggccacaggaggggagctgccaggaccacctacattcggggcacacagcctcagggcctctacacaggccccacagacacagcagatccactctgcccagtccctgcccccagctagacccagccttgccagctgtgccctgctagccagaagacgcccctgggaggc

SEQ ID NO: 16695 - DNA, 66 bp, Homo sapiens; identical to SEQ ID NO: 10472
  chr19:6590260-6590326
  hyper

SEQ ID NO: 16696 - DNA, 323 bp, Homo sapiens; identical to SEQ ID NO: 10473
  chr19:6590881-6591204
  binary

SEQ ID NO: 16697 - DNA, 73 bp, Homo sapiens; identical to SEQ ID NO: 12546
  chr19:8115163-8115236
  binary

SEQ ID NO: 16698 - DNA, 685 bp, Homo sapiens; identical to SEQ ID NO: 10475
  chr19:8274278-8274963
  binary

SEQ ID NO: 16699 - DNA, 159 bp, Homo sapiens; identical to SEQ ID NO: 6528
  chr19:883424-883583
  hypo

SEQ ID NO: 16700 - DNA, 544 bp, Homo sapiens; identical to SEQ ID NO: 7154
  chr19:884311-884855
  hypo

SEQ ID NO: 16701 - DNA, 107 bp, Homo sapiens; identical to SEQ ID NO: 7155
  chr19:9129007-9129114
  hypo

SEQ ID NO: 16702 - DNA, 92 bp, Homo sapiens; identical to SEQ ID NO: 7156
  chr19:9129229-9129321
  hypo

SEQ ID NO: 16703 - DNA, 241 bp, Homo sapiens
  chr19:939434-939675
  hypo
tccagaagtaacacttgacactcttcttgcagagaggaagaaaatggaacgtttacagggagccccgagtccctcccttgacctctagggcatgagccgcatgttctccaggcctttctctgcccactcacacccaggaatgtgacctgggaggtatctaacgtgtgatcttccgggcaggtcgggaggttcctcccgccgctgccttcgaggagctgtttatcttgggtgcgttcgcgtc

SEQ ID NO: 16704 - DNA, 63 bp, Homo sapiens; identical to SEQ ID NO: 7165
  chr2:10156251-10156314
  hypo

SEQ ID NO: 16705 - DNA, 144 bp, Homo sapiens; identical to SEQ ID NO: 5790
  chr2:105471069-105471213
  binary

SEQ ID NO: 16706 - DNA, 116 bp, Homo sapiens
  chr2:105719504-105719620
  hypo
cgatagctgattggctgcaggagagctgggggcgggtattcggtatgagatccacaggctgctgggaatgcaaagagccaggaagacaggaagaaaagttgatgggaggaggagga

SEQ ID NO: 16707 - DNA, 264 bp, Homo sapiens
  chr2:105719654-105719918
  hypo
cggggccacctcatatgagatgcttgaaataattggactgtgactcaggcgacgggtcagcctgctgacagatttgggaggctgctgcgtggaaggggaatttgaaacgtgggctggatcagcacggaggattgggcagggagaaggccaaggctcaagtggagaaacagccatcaagtttaaagtaggaaggagggaagagccagcaaagggggtggtgagcggtgataggaagacagcaagccaggcacagcggtcagggac

SEQ ID NO: 16708 - DNA, 455 bp, Homo sapiens
  chr2:105760109-105760564
  binary
cgaaagcgaggtgtgcgggcgggtggaaggaggaaggtgagggttcttcctagaggtgaccaggtgaggccgggagtcgagcattttcataagattgctcgcggacgcgggggtgggtggagagcatcacgattaagaaggaacacacgcacgcacacacacacctccttcctccttcccctcctcttcctctcaccccgccccccggggggcggtaccctagtctcccgggggaggttttggggcggaggaccgcggaggactgcgcccaggagggtggccggccgcgggaggaggacttggggtcgggctgctgcagctgggtggccagcgccgcggcggcccctcccccgctctccctggccgccgccccctcctcctcccgtcctcctcctcctctccctcctcccggtcccccatcctcctcccggcccccggcagctgcggctcgggga

SEQ ID NO: 16709 - DNA, 200 bp, Homo sapiens
  chr2:105987680-105987880
  hypo
cgtgaaggtgttttttagatgtgactaacatctaagtcagcaagcttcgagtgcagcacgttacccacgtatcagggccgggcttcatctaatcggtagtgggccttaggggcaaagactaaggtttccctaagggcaactaattcttctcaagactgcaatagacacaccctgcctgagtttccagcctgccgccctac

SEQ ID NO: 16710 - DNA, 34 bp, Homo sapiens; identical to SEQ ID NO: 11453
  chr2:114035443-114035477
  hyper

SEQ ID NO: 16711 - DNA, 31 bp, Homo sapiens; identical to SEQ ID NO: 6084
  chr2:118981062-118981093
  hyper

SEQ ID NO: 16712 - DNA, 261 bp, Homo sapiens
  chr2:121200130-121200391
  hyper
aatgattcggcctttggaggagttcggagggctgggggtggcagcaggaggctggggcgcagcgcagcgccaggggcgcgggacccagccaagctccccactctgcccccactgggacagagaggcgcaagagtccaccaacccctgccacttgtggcctttcctgactgcccagggcttccaacaatgtagaagagtgacagtaaatgtccaggtccctgcatataggtgtttctttaatctgcacaccaggccggaaag

SEQ ID NO: 16713 - DNA, 242 bp, Homo sapiens
  chr2:121200454-121200696
  hyper
ttgcccgaagtcccacggctggtcagtggcaagtggacagtggcaactgcgcctggaaaacgccgtccgtggcgcggtcgcggcgccaggggcatgcctgacagccaccttctctcccgtgaccgccgggctccgcatcagggcgagccactcggctcgggagagcaggaaactggggagggccgagcctccggccacgccttgtcagccccggagcctccaccaatcccgggcccggaaag

SEQ ID NO: 16714 - DNA, 56 bp, Homo sapiens
  chr2:121200731-121200787
  hyper
caggtagcgcgcgcaggcgaaccgcaggcccgggcttctggggcctcacgctgcgc

SEQ ID NO: 16715 - DNA, 213 bp, Homo sapiens; identical to SEQ ID NO: 15804
  chr2:121549381-121549594
  hypo

SEQ ID NO: 16716 - DNA, 317 bp, Homo sapiens
  chr2:122187647-122187964
  hypo
cgctgggactgtgaaaccactttagcgcgactgcggccccggttatcaggtgtagaggcgacgttggtggcactcccagagctttgccgtcttgtgcggatccgacctggaggacacagcaaaaacagtgtttcacaacatttccagtaagtgccacctcctcaagaaaagaagccatgccccaaaagaggggcactgaccagccaactacatggggagcaacagcttctgtgagcagatcctccacacgaggtctgccacgtctccctgtgtgtgcatgcgcacatgcgcatatgatccacgcacaactgttctac

SEQ ID NO: 16717 - DNA, 382 bp, Homo sapiens; identical to SEQ ID NO: 10487
  chr2:127413347-127413729
  binary

SEQ ID NO: 16718 - DNA, 255 bp, Homo sapiens; identical to SEQ ID NO: 10488
  chr2:127414108-127414363
  binary

SEQ ID NO: 16719 - DNA, 49 bp, Homo sapiens; identical to SEQ ID NO: 6085
  chr2:127782995-127783044
  hyper

SEQ ID NO: 16720 - DNA, 94 bp, Homo sapiens
  chr2:136874839-136874933
  binary
cgctgacctctgcacgaccccaaactctcgaactgcaggacccactcgcggccgtggggaagaggcgcgcttcggacggcgggaaggttttccc

SEQ ID NO: 16721 - DNA, 427 bp, Homo sapiens
  chr2:136875399-136875826
  binary
tttctcctcgactcacagagaaaaagattccaatcctgctccccccccacccacccgcactatataggcatggtcaagaaaactcctttcggtgacccttttttggagtacgggtacctccaatgtcctggccgcttctgcccgctcggagaggggctgcgctctaagttcaaacgtttgtacatttatgacaaagcaggttgaaactggacttacactgatcccctccatggtaaccgctggttctccagatgcggtggctactggagcactcaggccctcggcgtcactttgctacctgctgccgcagccaacaaactgaagtttctggccgcggccggacttttataaaaacacgctccgagcgcggcgcatgcgccgctggggcggggagggagaaggcggggtgggggagaggggcagacgc

SEQ ID NO: 16722 - DNA, 61 bp, Homo sapiens
  chr2:137523039-137523100
  binary
tgcgccgttccttcctcctcctcctcctcctccttctcttcctcctcctccttctcttcct

SEQ ID NO: 16723 - DNA, 102 bp, Homo sapiens
  chr2:137523676-137523778
  hyper
cgcccaaaatcgaaaggccgggagttgttctgcaggctttgcaaacaggttgactgagggtttcctttcccgtagcgctgactgcgaaatctgtgcataggc

SEQ ID NO: 16724 - DNA, 35 bp, Homo sapiens; identical to SEQ ID NO: 6088
  chr2:145275891-145275926
  hyper

SEQ ID NO: 16725 - DNA, 51 bp, Homo sapiens; identical to SEQ ID NO: 6089
  chr2:149632592-149632643
  binary

SEQ ID NO: 16726 - DNA, 238 bp, Homo sapiens; identical to SEQ ID NO: 10495
  chr2:149634146-149634384
  hyper

SEQ ID NO: 16727 - DNA, 109 bp, Homo sapiens; identical to SEQ ID NO: 6092
  chr2:154335663-154335772
  hyper

SEQ ID NO: 16728 - DNA, 128 bp, Homo sapiens; identical to SEQ ID NO: 13792
  chr2:172947590-172947718
  hyper

SEQ ID NO: 16729 - DNA, 231 bp, Homo sapiens; identical to SEQ ID NO: 9492
  chr2:172950233-172950464
  hyper

SEQ ID NO: 16730 - DNA, 233 bp, Homo sapiens; identical to SEQ ID NO: 9493
  chr2:172950493-172950726
  hyper

SEQ ID NO: 16731 - DNA, 42 bp, Homo sapiens; identical to SEQ ID NO: 7183
  chr2:175190730-175190772
  hyper

SEQ ID NO: 16732 - DNA, 351 bp, Homo sapiens; identical to SEQ ID NO: 7184
  chr2:175199018-175199369
  hyper

SEQ ID NO: 16733 - DNA, 206 bp, Homo sapiens; identical to SEQ ID NO: 12581
  chr2:175199935-175200141
  hyper

SEQ ID NO: 16734 - DNA, 274 bp, Homo sapiens
  chr2:176972103-176972377
  hyper
cggccagagcgcagccagcatgtacctgccgggctgcgcctactatgtggccccgtctgacttcgctagcaagccttcgttcctttcccaaccgtcgtcctgccagatgactttcccctactcttccaacctggctccgcacgtccagcccgtgcgcgaagtggccttccgcgactacggcctggagcgcgccaagtggccgtaccgcggcggcggcggcggcggcagcgcggggggcggcagcagcgggggcggccccggcgggggcggcggc

SEQ ID NO: 16735 - DNA, 61 bp, Homo sapiens; identical to SEQ ID NO: 12583
  chr2:176995668-176995729
  hyper

SEQ ID NO: 16736 - DNA, 41 bp, Homo sapiens; identical to SEQ ID NO: 12584
  chr2:177042492-177042533
  hyper

SEQ ID NO: 16737 - DNA, 220 bp, Homo sapiens
  chr2:177052744-177052964
  binary
tagtcaaaaagtgaaaattttgtcccgccctaggcacacagcactcacagcataagatgtagttccatgagtcctaggaaagggggaagaaaggaaaaaaccaaacatctgctctaggtttagaagagggataacatcagcgccaagcaaaccgaaagcgcagaggactcagaagaggggaagaggaataactttatctgtcctggaggtgggcgaagag

SEQ ID NO: 16738 - DNA, 420 bp, Homo sapiens
  chr2:18060198-18060618
  hyper
cgaccccgagggtctacggccgcagagcactttccgtccttctgggcgtctggcccgcggcgcccgcatcctctggtccccagagcccgccgtcgctggagccctaaggctccgcctgttgcgtgaactgcgggctgttgaagcggtggctgggttgatttgaaagcctcggggaaggtatttaggatcagctttcggggagtggggtgggctatggtcagggggaggaccacctggaggcgggagaatcgatgagccgaagaaaggcggcacctcgcgtaggggcatccccggggcgtttccttggccgggaagccgttccttcccttcctcgagaggaggcgctttcctggcgcttgtaaatgcttcccgggccgtctgctccgccttctttgtcattcctcccctcccctttgccct

SEQ ID NO: 16739 - DNA, 34 bp, Homo sapiens; identical to SEQ ID NO: 6099
  chr2:182323095-182323129
  hyper

SEQ ID NO: 16740 - DNA, 110 bp, Homo sapiens
  chr2:206896324-206896434
  hypo
cgcagcacttgcgggtgccccagatggcactttacccctaggactggcttaaaatagtggagtgatcatcatggccgatgagaggcaggactggattgcagctccaactc

SEQ ID NO: 16741 - DNA, 240 bp, Homo sapiens
  chr2:207308960-207309200
  binary
attcatcccagttcacttttggaagtccatttctgttgcattcgcgaaaaacccattccaattcttgttggttccactgggaggtgtttagtggatcctgggtccctcagcgatctctgtgcaacttgcggaggggcaaccagtggatgggaaatacagcgagggagcaagttgctacttgcgtggtggaaccttaatgtgaatgcggggaggatgtagtgataatagtggtaatgggct

SEQ ID NO: 16742 - DNA, 185 bp, Homo sapiens
  chr2:216274340-216274525
  hypo
cgacacggtgtcggaagctgagacccaggagaccacaaagctactggctgtgatttcggtcacagattcagaagtggccacaagaggagaaaagggagtcgtctctcctgtcacggtgttgcctagagagtcacagaaaggggaaagtcagccttcagtcatctagaaaatttaccgtcctcgtc

SEQ ID NO: 16743 - DNA, 33 bp, Homo sapiens; identical to SEQ ID NO: 14853
  chr2:217558872-217558905
  hyper

SEQ ID NO: 16744 - DNA, 237 bp, Homo sapiens; identical to SEQ ID NO: 10501
  chr2:225906168-225906405
  binary

SEQ ID NO: 16745 - DNA, 624 bp, Homo sapiens; identical to SEQ ID NO: 9509
  chr2:232790030-232790654
  binary

SEQ ID NO: 16746 - DNA, 264 bp, Homo sapiens; identical to SEQ ID NO: 5800
  chr2:232790784-232791048
  binary

SEQ ID NO: 16747 - DNA, 145 bp, Homo sapiens; identical to SEQ ID NO: 6107
  chr2:232791140-232791285
  hyper

SEQ ID NO: 16748 - DNA, 93 bp, Homo sapiens
  chr2:233367692-233367785
  hyper
cgggagggaggtttatccgtaggagtcagcccagttgggtcaaactaaggacccagtgcagaccccgaggcccagagacacaggtgtgcgcac

SEQ ID NO: 16749 - DNA, 627 bp, Homo sapiens
  chr2:234372729-234373356
  hypo
cggacctcacccccctgggcctcgcgctgatcagcagtgcacactctccatttctctctccctccctccgcctggagcagcagctggatccgcctcagaaggagcagctggggagtgctcttgccgagatggaccgacagctcaggaggctggcagacaccccgtggctctgccagtccgcagagcccggcgacgaagaggtatgtggctcatagggctgtgcctgggtctcccggacatggtggctctcgcctgaagtgcctgtgttccttgtgacccgtgtggctctgggatcaagatcgtgtcgctccggcagcccctgaggggccttctccagacttcgctattaaaatgctctttaaggcagggagggacagcaggtaggaaggagttctgggctgggattaagagtgccccttgaggaccagggacctgttgtcctctgaaacagaactgcagggcttcctggacagtgggtagaaggaaggctgagcccagccccacagcctcccccgagggtggagatgtatcatgggataaatggcagccttttgggatcccgctgtggacagggcgcagttggtgtgcgccactccccactcacactctcttcctgtgtgaacagaa

SEQ ID NO: 16750 - DNA, 339 bp, Homo sapiens
  chr2:234373385-234373724
  hypo
gacccgaggacgcagggcatagcggaccctggggtggagtcacattcttctgcagggagtgctggctgaaggagccctggagagggccgtgtctggacaaggacaaaccccagcctgtctcttggcttccctgcttcagagatagaacacagaggggccctgaggaaagctcatcttgggcagtacagttgcagaaggcaaataactgcaagacgccaaacctgggcacccctgcccagtggggtttgtgagacctgtgggcagcagtaaggcgaggggacagaggtgggcagctgcacaacagcaccctctttccggggccctggggcgttttttgac

SEQ ID NO: 16751 - DNA, 52 bp, Homo sapiens
  chr2:239006881-239006933
  hypo
cgtggccaggaacgcgctccggctcagcgtgggccgcagcaccaccagggcc

SEQ ID NO: 16752 - DNA, 121 bp, Homo sapiens; identical to SEQ ID NO: 15821
  chr2:240167455-240167576
  hypo

SEQ ID NO: 16753 - DNA, 310 bp, Homo sapiens; identical to SEQ ID NO: 15822
  chr2:240167605-240167915
  hypo

SEQ ID NO: 16754 - DNA, 49 bp, Homo sapiens; identical to SEQ ID NO: 13826
  chr2:240169135-240169184
  hypo

SEQ ID NO: 16755 - DNA, 172 bp, Homo sapiens
  chr2:241373330-241373502
  hypo
cgtagacagtgacggggtaactatagagcctcaggccgggttaacctcaagtccagcttcctaggcccaggcagccctgcctgatcccgcagtgcgtgagaccacacagagagagagcgggatcgtgggcccaggctcctgaccgtgctggataaggtgtgcaggcagccac

SEQ ID NO: 16756 - DNA, 360 bp, Homo sapiens; identical to SEQ ID NO: 6538
  chr2:241542357-241542717
  hypo

SEQ ID NO: 16757 - DNA, 241 bp, Homo sapiens; identical to SEQ ID NO: 10514
  chr2:242436503-242436744
  hypo

SEQ ID NO: 16758 - DNA, 146 bp, Homo sapiens; identical to SEQ ID NO: 13832
  chr2:242523762-242523908
  hypo

SEQ ID NO: 16759 - DNA, 223 bp, Homo sapiens; identical to SEQ ID NO: 13833
  chr2:242524147-242524370
  hypo

SEQ ID NO: 16760 - DNA, 38 bp, Homo sapiens; identical to SEQ ID NO: 7206
  chr2:30453530-30453568
  binary

SEQ ID NO: 16761 - DNA, 77 bp, Homo sapiens; identical to SEQ ID NO: 7211
  chr2:42720186-42720263
  hyper

SEQ ID NO: 16762 - DNA, 194 bp, Homo sapiens
  chr2:60777883-60778077
  hyper
cgagggagcagcctggactgcgcgccccggtctgtcctttgagcccccactgcatccttccgaagaagggcctgactttcccgagtcctgcgaacactgcccttccttcccgccggtacctggccgggctgtaacttcacaccgccgcgcgccgcgtctgatccgcatccggcgcggccgggggagttgggggc

SEQ ID NO: 16763 - DNA, 51 bp, Homo sapiens
  chr2:60780349-60780400
  hyper
cgcgagaattcccgtttgcttaagtgctggggtttgccttgcttgcggcga

SEQ ID NO: 16764 - DNA, 54 bp, Homo sapiens; identical to SEQ ID NO: 13852
  chr2:63287368-63287422
  hyper

SEQ ID NO: 16765 - DNA, 79 bp, Homo sapiens; identical to SEQ ID NO: 10529
  chr2:68547270-68547349
  hyper

SEQ ID NO: 16766 - DNA, 443 bp, Homo sapiens
  chr2:71453505-71453948
  hyper
cgaacgtctcccaggcaaatgaggcatgaagaatgagggctggagtcaagggggagatggagcaagtataaaaaggcagaggacgcgcaggggccgcgaataggggaagggcacgacgcgcaatccctcccgctccagcccggggagaggggcgggggatgccgcgcgggtcaatttgcctagcattgttgcacctgggtagaaatgggactcaggccaagaattcggttcgagtgttaggaggacgctgaggggagtcaggaacttgggtgggagtcggggggaaacagagcacctgtgcgggggggaaagggacgaaaaccccctattgctcccgaggggcaggggctgaccccagcggacgccccttttcgccgatggccgcgacgtgggaccccgcgcgctttccctccctacaggagctcgggcaggcgcgtgccgcc

SEQ ID NO: 16767 - DNA, 228 bp, Homo sapiens
  chr2:71454386-71454614
  hyper
aagtttcagcttctgattggttttaatgtctgtcttttctcttccttcattttttttttcctgtggtggaacacctccttgagggagatgccggctctgattggctgaaaggacgctacgctagcctgggataggcattgggccaaggatgcgcccggcccactcgtgggggaggagaccaaggcgccgcactctgggtttgtttacacaggctcttgctcccgcttc

SEQ ID NO: 16768 - DNA, 31 bp, Homo sapiens
  chr2:7164418-7164449
  hypo
cgatgcttccagcatagccagtgctcctggg

SEQ ID NO: 16769 - DNA, 121 bp, Homo sapiens; identical to SEQ ID NO: 7222
  chr2:73147029-73147150
  hyper

SEQ ID NO: 16770 - DNA, 75 bp, Homo sapiens; identical to SEQ ID NO: 7227
  chr2:85819578-85819653
  hypo

SEQ ID NO: 16771 - DNA, 255 bp, Homo sapiens; identical to SEQ ID NO: 7229
  chr2:8834468-8834723
  hypo

SEQ ID NO: 16772 - DNA, 121 bp, Homo sapiens; identical to SEQ ID NO: 7230
  chr2:8834896-8835017
  hypo

SEQ ID NO: 16773 - DNA, 147 bp, Homo sapiens; identical to SEQ ID NO: 13860
  chr2:8870193-8870340
  hypo

SEQ ID NO: 16774 - DNA, 144 bp, Homo sapiens; identical to SEQ ID NO: 12642
  chr2:88752878-88753022
  hyper

SEQ ID NO: 16775 - DNA, 106 bp, Homo sapiens
  chr2:945447-945553
  hyper
cgtggcctccgcgatgggcgctcgtgcctgggtcgaaggactggggggcggaggatttggaaagggagaaaaatacgggctggcttctttttaaaaaatgtgggta

SEQ ID NO: 16776 - DNA, 77 bp, Homo sapiens; identical to SEQ ID NO: 8361
  chr2:97427378-97427455
  hypo

SEQ ID NO: 16777 - DNA, 206 bp, Homo sapiens; identical to SEQ ID NO: 6114
  chr20:21080357-21080563
  hyper

SEQ ID NO: 16778 - DNA, 185 bp, Homo sapiens; identical to SEQ ID NO: 9536
  chr20:21086682-21086867
  hyper

SEQ ID NO: 16779 - DNA, 107 bp, Homo sapiens; identical to SEQ ID NO: 10534
  chr20:21087188-21087295
  hyper

SEQ ID NO: 16780 - DNA, 108 bp, Homo sapiens
  chr20:30555779-30555887
  binary
cgggggctgcccccccttcggccgcagctcaggcgggtgggggcggggcggggcggcgccgaggagaatgaataattgaagtggaggggaggaggaagaagaggagaa

SEQ ID NO: 16781 - DNA, 248 bp, Homo sapiens; identical to SEQ ID NO: 12657
  chr20:30556403-30556651
  binary

SEQ ID NO: 16782 - DNA, 139 bp, Homo sapiens; identical to SEQ ID NO: 6122
  chr20:30639494-30639633
  hyper

SEQ ID NO: 16783 - DNA, 266 bp, Homo sapiens; identical to SEQ ID NO: 9549
  chr20:3202153-3202419
  hypo

SEQ ID NO: 16784 - DNA, 60 bp, Homo sapiens; identical to SEQ ID NO: 7239
  chr20:34190072-34190132
  hyper

SEQ ID NO: 16785 - DNA, 100 bp, Homo sapiens; identical to SEQ ID NO: 10544
  chr20:37303401-37303501
  binary

SEQ ID NO: 16786 - DNA, 37 bp, Homo sapiens; identical to SEQ ID NO: 10545
  chr20:37358242-37358279
  hyper

SEQ ID NO: 16787 - DNA, 390 bp, Homo sapiens; identical to SEQ ID NO: 8385
  chr20:37433723-37434113
  binary

SEQ ID NO: 16788 - DNA, 102 bp, Homo sapiens; identical to SEQ ID NO: 13883
  chr20:400915-401017
  hypo

SEQ ID NO: 16789 - DNA, 55 bp, Homo sapiens; identical to SEQ ID NO: 7245
  chr20:42833281-42833336
  hypo

SEQ ID NO: 16790 - DNA, 192 bp, Homo sapiens; identical to SEQ ID NO: 7246
  chr20:45833348-45833540
  hypo

SEQ ID NO: 16791 - DNA, 51 bp, Homo sapiens; identical to SEQ ID NO: 9556
  chr20:47934774-47934825
  binary

SEQ ID NO: 16792 - DNA, 414 bp, Homo sapiens; identical to SEQ ID NO: 10552
  chr20:4804008-4804422
  binary

SEQ ID NO: 16793 - DNA, 62 bp, Homo sapiens; identical to SEQ ID NO: 10553
  chr20:49218808-49218870
  hypo

SEQ ID NO: 16794 - DNA, 217 bp, Homo sapiens
  chr20:55205088-55205305
  hyper
gaagcacgaaaacaaccgaagtttggctttcaaaagaagtgggggctggggagtggtggtgggggtgcccgaggccagatggggccgtaagagctcgcgagtgctccagcctgtcggacaggttgagctagagtttcggagagtgggagggaagaaggaggcggcgagcgggaagaggaagaagacgcaggcagcgctaggcgagctcaggggcgcc

SEQ ID NO: 16795 - DNA, 136 bp, Homo sapiens; identical to SEQ ID NO: 10558
  chr20:55206463-55206599
  binary

SEQ ID NO: 16796 - DNA, 95 bp, Homo sapiens; identical to SEQ ID NO: 10559
  chr20:55206774-55206869
  binary

SEQ ID NO: 16797 - DNA, 103 bp, Homo sapiens; identical to SEQ ID NO: 14913
  chr20:55588994-55589097
  hyper

SEQ ID NO: 16798 - DNA, 104 bp, Homo sapiens
  chr20:55841887-55841991
  hyper
cgggacgtcgcggggatgcggctggaggaatcggagccggccctgccctctcggcactcgcggtccggaccaggaaggcggcccgagcaggacgggtgggctgc

SEQ ID NO: 16799 - DNA, 285 bp, Homo sapiens
  chr20:60925541-60925826
  hypo
gaacctttgtcctgtctgagctccacccgcctccccacctcccctgtaaactggagcgtggacagagcagtaaggccccacagaaggcaagggcgggtcccaaatccaagcgcatgaaagttgggctgctcggttgcaggcactagatgagccctgccagctccctgctgggggtccaggagcctcgtcacacactcagcctcagctgcaccactctgagtggcttctgtccagccccatgcctgcactgccaccctagggtgttacaccctccgggcaccacgc

SEQ ID NO: 16800 - DNA, 111 bp, Homo sapiens
  chr20:60926049-60926160
  hypo
gaggactctgggtgaggcccaggaatgtgccggtgccagcaccagggctgctgcccatcctgtgaggggctcccgggaggtggatgctctgcagtgccctcggctgccccc

SEQ ID NO: 16801 - DNA, 269 bp, Homo sapiens; identical to SEQ ID NO: 10567
  chr20:62322022-62322291
  hypo

SEQ ID NO: 16802 - DNA, 123 bp, Homo sapiens; identical to SEQ ID NO: 9583
  chr21:27011487-27011610
  binary

SEQ ID NO: 16803 - DNA, 134 bp, Homo sapiens; identical to SEQ ID NO: 9584
  chr21:27011639-27011773
  binary

SEQ ID NO: 16804 - DNA, 153 bp, Homo sapiens; identical to SEQ ID NO: 9585
  chr21:27012725-27012878
  hyper

SEQ ID NO: 16805 - DNA, 157 bp, Homo sapiens
  chr21:38064301-38064458
  hyper
cggcgctcctcccacggcgacacctccgtgctctttttgcttgtatttattcaaaaattagatttgtcaataacgcagggcctggcaaataggaggacctctccaaaattaaatgcaagattgaacataggtctctcacatcataataaagcggttt

SEQ ID NO: 16806 - DNA, 284 bp, Homo sapiens
  chr21:38064683-38064967
  hyper
gtctttgtctatactcgcaggatgggaaggacgatggtgcaatcaccgagattattttgttttcgtcctctaaaaaatgaagaggggactggagtcgggaccaaaattattggcagaccgcacggtttgcagtcaccctgaagttaccagcagccgatgctgtgtccagggaaaatattcttgagctggaaaacgtgctaatttaaagtctttcgtttcacacgaaaatgtgctgcactctttgactgctcaggaatttgctctagcacctagaaggaattctg

SEQ ID NO: 16807 - DNA, 39 bp, Homo sapiens
  chr21:40032283-40032322
  binary
cgagccgtccctcccggcgctggacgccccacctgtccc

SEQ ID NO: 16808 - DNA, 159 bp, Homo sapiens
  chr21:40032367-40032526
  binary
cgctgccttcctccccgtccccgcagccgctgtagccagcgtgggagccgggcaggtcgcgtggggcgctggacttaccgagaggttagcgccgccgtcgggggagggcgtgtcccgcacgtgtgtgtccgcgcgtgtccgcgcccgcgtgtgccagcg

SEQ ID NO: 16809 - DNA, 65 bp, Homo sapiens
  chr21:40032848-40032913
  binary
gggccgcgcgggcaggtttggacactacgcgccctgctcgggtttaggacgcggctggcggctcc

SEQ ID NO: 16810 - DNA, 34 bp, Homo sapiens; identical to SEQ ID NO: 10588
  chr21:44847478-44847512
  binary

SEQ ID NO: 16811 - DNA, 56 bp, Homo sapiens; identical to SEQ ID NO: 10589
  chr21:44847864-44847920
  hyper

SEQ ID NO: 16812 - DNA, 31 bp, Homo sapiens
  chr21:45140801-45140832
  hypo
cgggatcccccagcaatgtcctttgttctcg

SEQ ID NO: 16813 - DNA, 132 bp, Homo sapiens
  chr21:45140928-45141060
  hypo
cacggcatccttacctgtgggctccacagggttccatgcaggcattttgctcccataccccgatgtccaagcccggctggacaaggagaagcaatgtgatgaccgaggggctgagatggctggagacccagc

SEQ ID NO: 16814 - DNA, 55 bp, Homo sapiens; identical to SEQ ID NO: 5809
  chr21:47062898-47062953
  binary

SEQ ID NO: 16815 - DNA, 143 bp, Homo sapiens; identical to SEQ ID NO: 5810
  chr21:47063290-47063433
  binary

SEQ ID NO: 16816 - DNA, 96 bp, Homo sapiens; identical to SEQ ID NO: 7298
  chr21:47565081-47565177
  hypo

SEQ ID NO: 16817 - DNA, 337 bp, Homo sapiens; identical to SEQ ID NO: 7299
  chr21:47565270-47565607
  hypo

SEQ ID NO: 16818 - DNA, 238 bp, Homo sapiens
  chr22:17849877-17850115
  hyper
ggaaagcacttcacttctctaggcttcatatttctagggtggacagcccgctcctgctccggctctgccctcggcatcaataataactgaactcccacacgtgcacgtttctgtctctagcccgaccgaaaggaccaccccgcgggccctttaaaaggacgcgaccactcaggccaagtgggggtgggagagctcctggccgtcctcccttgggaaagtgcttcaactccccagtccc

SEQ ID NO: 16819 - DNA, 119 bp, Homo sapiens
  chr22:18265358-18265477
  hypo
cgatctgaccccgtggcatccttcctttcctacaaactgcactgagacccaggtgtcatcgtgaagttcatgccagccagaggagccactgtggcgtttccggccataggcctgggcag

SEQ ID NO: 16820 - DNA, 196 bp, Homo sapiens
  chr22:18265523-18265719
  hypo
ggaagagatgcctgtatgggaccaactcaggcagccacagagggatggcccagcaccccacaaaacccaaagtgctcagcgtctaggatctgtttacggggcagagaagtggatgttcttttcctggttcaaaggtagaaacaggcttggagagccgcacccggcatcagccagccaggcagacgcctggtctagc

SEQ ID NO: 16821 - DNA, 119 bp, Homo sapiens
  chr22:20228961-20229080
  hypo
cgtcgtccgatatttttacacaagtaaaataaaatgcatatctctatataccgcgatctgggtgggaggcggcgttctggaacaaacgctgccgccgaaccctgtaaacatgatggggt

SEQ ID NO: 16822 - DNA, 155 bp, Homo sapiens
  chr22:20229239-20229394
  hypo
gggcccaagcactgtccacagcaccagcgccaggcccaggggggtgaggctgcaggtgaggctgggtagggcacctgagccttctgagtcaccagtcccgccacccccgctgcctgcctggcccagacggcagtggctgcgggtgcggttcttgc

SEQ ID NO: 16823 - DNA, 166 bp, Homo sapiens
  chr22:22006759-22006925
  hyper
ctctgctccactctgggcctccaggcagaagaatatgttagaaaagaatccagagtgtatctagtgcagggcaaggggccagggatggagtcgtcagctagaaggggcgcgtcgtcccggggtggggccgccctttttctcctggagccgcgggccgagtcagggc

SEQ ID NO: 16824 - DNA, 137 bp, Homo sapiens; identical to SEQ ID NO: 5811
  chr22:22862472-22862609
  binary

SEQ ID NO: 16825 - DNA, 46 bp, Homo sapiens
  chr22:26565120-26565166
  binary
cgtctggaaaatggtccgggtgctctccagcctggcctggccaggc

SEQ ID NO: 16826 - DNA, 284 bp, Homo sapiens
  chr22:26565999-26566283
  binary
tttgcagccaaagaggttctccttggagtggggtcgcctccaaaccccaaattcccggcgcttctctgcaaccgcacccggggctaggtgccagataattatcttcctctccgggagaggacaggaaggggggtgagaagctgacccaccctgcaactgaggactagactcaaacagtgcatttgccgctccccccgacaccacagaaacccttgactcctttggttcaggctaccccgagggtctgtgttcctggatcgatctcagccaagcgtcaggatacc

SEQ ID NO: 16827 - DNA, 135 bp, Homo sapiens; identical to SEQ ID NO: 9608
  chr22:35420072-35420207
  hyper

SEQ ID NO: 16828 - DNA, 73 bp, Homo sapiens; identical to SEQ ID NO: 9609
  chr22:35420315-35420388
  hyper

SEQ ID NO: 16829 - DNA, 102 bp, Homo sapiens
  chr22:35821646-35821748
  hypo
cgcgctgtgggttttgcatccaaggctgcatctccggttcctgctagcctttcatcttgctcaggtggggactcgcgtgcatctcaggcccaaggtcctccc

SEQ ID NO: 16830 - DNA, 269 bp, Homo sapiens; identical to SEQ ID NO: 13943
  chr22:35848670-35848939
  hypo

SEQ ID NO: 16831 - DNA, 208 bp, Homo sapiens
  chr22:38146528-38146736
  hypo
cgccctgggcagcctccgtctcaggtggaagacggggtgggcagaatacagagcagcgggacaaacgcagccccaggggttctcggccgtgagcagagcctgtgtctctcccttagacaggtatacagggaggggctgggatgccaacctactgggtcccccgactgtggctgtggaaggttctggatcttcagctgtcccaagcccc

SEQ ID NO: 16832 - DNA, 391 bp, Homo sapiens; identical to SEQ ID NO: 9611
  chr22:38694593-38694984
  hypo

SEQ ID NO: 16833 - DNA, 106 bp, Homo sapiens; identical to SEQ ID NO: 7311
  chr22:41634855-41634961
  hypo

SEQ ID NO: 16834 - DNA, 137 bp, Homo sapiens
  chr22:41973298-41973435
  hypo
cgacacacagatgtgggccccggtcacgcctcatgagctgtctctgggaagaaaatctcccggcatcgctgcaccgtgtcctgaggagacaccacgctgtggccaacagtccgggggtcggcaaagatctcaaagtc

SEQ ID NO: 16835 - DNA, 237 bp, Homo sapiens; identical to SEQ ID NO: 13953
  chr22:46367124-46367361
  hyper

SEQ ID NO: 16836 - DNA, 121 bp, Homo sapiens; identical to SEQ ID NO: 12710
  chr22:46367867-46367988
  hyper

SEQ ID NO: 16837 - DNA, 1272 bp, Homo sapiens
  chr22:50718718-50719990
  hypo
cgctggacaggaagggctagagtccggctttgagtttgtggccggggacaccacccctagaccgccccccaccaccagcgctggctggcacctgccggctcctgggggcccaacaggccgctgtgccacccgccaccagccccagagcccctgcggccgccccgcccgtggccccgctcgtggccccgcccatgtgcacctgcgcagcatcagcttggggttcttggccaccacgtactgctccaggagctccaggaagagcgtgtgcatgatgtccgtgtagtactccagtttcccgtgcagcgccaccgtcagcagggacgcgaagtagaccttggcgcgggccgagaactcccgctggttctccagggtgtggatgaactgtaggggccggcggtcaaagcctgcccggcgccacctgtgtgccctcccgcccgcccgacgcctggctcacattgatgaggaaagacttgctgttcagcaggttggagaactggtagagggcctgctccaccaccggccgccgcggctcagggatgtccagcttgccggtgatcatcacgtccttgtcgccgtccttggagggcaggaagaagacgcggtcggtgtaggtcttgtagtccagcacggggatgccggcctcgtgcacgtcgttggtctggtcctccatctcgatcatcaggtctggggggaggctggcgtgagacgtccctggccacgtggggccctgacccccacgctacacacagcatccccgccccaggaggcgccccagcaccagcccccaagcggtccctacctgtgaattccttcttgcagcggtcccgcacgctctcctccaggccctccagctgggacttgatcttctcatactctcgttcggcctgctggctcttcctcctgcaaggcacagcgggcctcctaggttctgccggggctggccgctcagctgcccggatgaggaggtggatctacacgcctgcctgtgcagggcggcggatgaggccagaggggccgaggcgggagggccgagggctcagggtgttggcacagccggggggcgggctcaccagtagcagtagacagacaccgcgatgacgaccaccatgggcacgatgaccagcggcaagatgaggctgagcggcacgtcgctcacccgtgtgtcgtactccacgcggcccagcacccactcgcgagagccgaacttcacctgtgtggggggccgggttcagcgcggtcccgtgggggcaccccccgccagtccccgctcac

SEQ ID NO: 16838 - DNA, 517 bp, Homo sapiens
  chr22:50885403-50885920
  hypo
cggccgggcggggcggggcggggacgggggctgtacacacaagtgctgggggctcggggcctcaatactgtcgagggccggggctgtaaacatggccggggcggccctgcccacccctagtggtcggtaacgaccggaagcagagcagccgggcagggctgggaggctcaggcgtccgacaggcagctctggatccggtccacccactgctgggccgagggcacgtcctgggcacagaagttgtaaacgcgacgcgttgtcttcacctggggaagggcgggttactgactccgcagcccccacaccgcagagcccctcccctctcccaagccccggccaaggctcacgtcaaagaaggccttctcgtccacagtcttaggggcacccatagtgggcgtgccaggtgccacagcctccacctccgccaagtcgatgacacccttgcactctgtgtccacacggtggtcgtagtagcgcagctggaggaggccacagagtcagcggagccccctccccc

SEQ ID NO: 16839 - DNA, 153 bp, Homo sapiens; identical to SEQ ID NO: 7319
  chr22:50899708-50899861
  hypo

SEQ ID NO: 16840 - DNA, 110 bp, Homo sapiens
  chr3:10131952-10132062
  hypo
cgcatgcttttcccgtcttctaggcatacttttgttgttttcttccgtgtgatgatggctgaactagagaagacggtgaaaaaaattgagcctggcacagcagcagactc

SEQ ID NO: 16841 - DNA, 187 bp, Homo sapiens
  chr3:126472179-126472366
  hypo
cggcagcaggagctgtgccgtccttttgcccacctggaggctgaggaggaggggcactgaggcactcgtagctgggtgcagatcattccaaagacattccaggagcatgctgcagcccgcctgcatgcctgccatagctgcggcttgtagaccggccttggggtggagttctctgtaaacattggac

SEQ ID NO: 16842 - DNA, 421 bp, Homo sapiens; identical to SEQ ID NO: 7325
  chr3:127394412-127394833
  hypo

SEQ ID NO: 16843 - DNA, 278 bp, Homo sapiens; identical to SEQ ID NO: 7326
  chr3:127394909-127395187
  hypo

SEQ ID NO: 16844 - DNA, 71 bp, Homo sapiens; identical to SEQ ID NO: 10611
  chr3:127534744-127534815
  hypo

SEQ ID NO: 16845 - DNA, 68 bp, Homo sapiens; identical to SEQ ID NO: 10612
  chr3:127534897-127534965
  hypo

SEQ ID NO: 16846 - DNA, 65 bp, Homo sapiens; identical to SEQ ID NO: 6139
  chr3:132757908-132757973
  hyper

SEQ ID NO: 16847 - DNA, 79 bp, Homo sapiens; identical to SEQ ID NO: 9662
  chr3:139655101-139655180
  hyper

SEQ ID NO: 16848 - DNA, 124 bp, Homo sapiens; identical to SEQ ID NO: 7337
  chr3:141174173-141174297
  hypo

SEQ ID NO: 16849 - DNA, 109 bp, Homo sapiens
  chr3:156543195-156543304
  hypo
tcatttaatcacttctctaaatctataggttcaattaattttctttgtatttacttaatcttattttattcaatagcaaaccagtctctttgcctgctacagagccatc

SEQ ID NO: 16850 - DNA, 370 bp, Homo sapiens; identical to SEQ ID NO: 8498
  chr3:16553609-16553979
  hyper

SEQ ID NO: 16851 - DNA, 78 bp, Homo sapiens; identical to SEQ ID NO: 9673
  chr3:16555426-16555504
  binary

SEQ ID NO: 16852 - DNA, 54 bp, Homo sapiens; identical to SEQ ID NO: 7349
  chr3:169540679-169540733
  hypo

SEQ ID NO: 16853 - DNA, 138 bp, Homo sapiens; identical to SEQ ID NO: 10622
  chr3:179169640-179169778
  hyper

SEQ ID NO: 16854 - DNA, 337 bp, Homo sapiens
  chr3:181429718-181430055
  hyper
tgtctattaacttgttcaaaaaagtatcaggagttgtcaaggcagagaagagagtgtttgcaaaagggggaaagtagtttgctgcctctttaagactaggactgagagaaagaagaggagagagaaagaaagggagagaagtttgagccccaggcttaagcctttccaaaaaataataataacaatcatcggcggcggcaggatcggccagaggaggagggaagcgctttttttgatcctgattccagtttgcctctctctttttttcccccaaattattcttcgcctgattttcctcgcggagccctgcgctcccgacacccccgcccgcctcccc

SEQ ID NO: 16855 - DNA, 37 bp, Homo sapiens; identical to SEQ ID NO: 12747
  chr3:181430331-181430368
  binary

SEQ ID NO: 16856 - DNA, 253 bp, Homo sapiens; identical to SEQ ID NO: 12748
  chr3:181430443-181430696
  binary

SEQ ID NO: 16857 - DNA, 48 bp, Homo sapiens; identical to SEQ ID NO: 7353
  chr3:181444767-181444815
  hyper

SEQ ID NO: 16858 - DNA, 131 bp, Homo sapiens; identical to SEQ ID NO: 13982
  chr3:184059893-184060024
  hypo

SEQ ID NO: 16859 - DNA, 291 bp, Homo sapiens; identical to SEQ ID NO: 5820
  chr3:186079331-186079622
  binary

SEQ ID NO: 16860 - DNA, 56 bp, Homo sapiens; identical to SEQ ID NO: 6150
  chr3:192128140-192128196
  hyper

SEQ ID NO: 16861 - DNA, 370 bp, Homo sapiens
  chr3:193586985-193587355
  hypo
cgctgcagcttgctagaggccttctaattaacctgcgaagaaccgtctgcaggcccccagtccggtgttcactcgttcattcattcgctcttcactgggtgccctggcactccaagcctccagcgcacacccagccctaaccttgaccagggtgctgagcacgaggagccccaccctgagccaggcctggagaggcgcctttaagcgcaggtcctgcggctgctgacaggtcatcagagctgggaccaaagacccgccgggaggctggcagcctaggtcgcttcccaagctctccgggcccttcccttcggcggctaatttccacttttcataaggatgtgttcattcaggggactaggagcagaggcgc

SEQ ID NO: 16862 - DNA, 54 bp, Homo sapiens
  chr3:195597381-195597435
  hypo
cggccagagggcagacactcctgtcccgcaggccacgatggagggcctaagaac

SEQ ID NO: 16863 - DNA, 393 bp, Homo sapiens
  chr3:195597835-195598228
  hypo
cgctgtgtggggttctggtgtgtgggggcccgctgtgtgggttctggtgtgtgggggcccgctgtgtggggttctggtgtgtggggcccggtgggtgaaggcccctgctttccacgcctctcagggcagaccagagtatcagaagtcagcaggagaagggctgcagaggccaggggcctggaatccccctgcggccagcagagaggcttggaggcctggcgcaagaagcttcggggggtggggggtggcatcccggaagtgactgattctgcgtgtccttcccagatgcccctcggtggccttatcctcttacataggagacagggcctctcccaggtatggagtgagctccgtagagtactgtgtggtggggaggcggagctgccacctaac

SEQ ID NO: 16864 - DNA, 583 bp, Homo sapiens; identical to SEQ ID NO: 15948
  chr3:195599104-195599687
  binary

SEQ ID NO: 16865 - DNA, 247 bp, Homo sapiens; identical to SEQ ID NO: 15949
  chr3:195599840-195600087
  hypo

SEQ ID NO: 16866 - DNA, 49 bp, Homo sapiens; identical to SEQ ID NO: 15950
  chr3:195601363-195601412
  hypo

SEQ ID NO: 16867 - DNA, 666 bp, Homo sapiens
  chr3:195602576-195603242
  hypo
gccagggctgctacccggccgtgactgaagcaggggcggatgaggacttcctgggggagcaggaaaagggcccaacacctccgcatgaaccttctacctcctgctgcccccgggcctctggtcaacatctctggggtagacaagatggaaaacagaggccggtgctgagaactgcctaaggctgccccagctctggaaatctcagcaccacgttcccgtccgggccgaaggtagtccagaaatggctcaactaatgccggacattctgttcaaaacgcccgcccgctcttctccctaggggtcccaggcgcccaggcctggagggataacccggatgcctggctcccacccaccacaggaagccgaggctccagggccagaccaggccaaggacccgcaatggattccaacacccgctctgtatgcggaacaaaagtgctgccagccaccccttcctccaaacgagcccctgggaaagaccagtcatcatttgtgtctccaaatctagacacagcacgaaacatctaggtgtctcccctctgcccacagcctggtaccctgagaaggactgagcctagactcagtcagagctgcggcaggtggcctcccagactccgcaccaggaaacaaatactggacacagcttcgcaagtgggaagccacggc

SEQ ID NO: 16868 - DNA, 340 bp, Homo sapiens; identical to SEQ ID NO: 11644
  chr3:195603923-195604263
  hypo

SEQ ID NO: 16869 - DNA, 159 bp, Homo sapiens; identical to SEQ ID NO: 11645
  chr3:195604388-195604547
  hypo

SEQ ID NO: 16870 - DNA, 105 bp, Homo sapiens; identical to SEQ ID NO: 7365
  chr3:196754412-196754517
  hypo

SEQ ID NO: 16871 - DNA, 118 bp, Homo sapiens; identical to SEQ ID NO: 7366
  chr3:196754758-196754876
  hypo

SEQ ID NO: 16872 - DNA, 99 bp, Homo sapiens
  chr3:42222621-42222720
  hypo
cgtttgtgtgctggaagccttccgcatccttcaggtgctctggcagtcccttgccatgcctgagccatcttcattattatgctgtgtgcttgatttgtt

SEQ ID NO: 16873 - DNA, 196 bp, Homo sapiens; identical to SEQ ID NO: 6155
  chr3:44038922-44039118
  hyper

SEQ ID NO: 16874 - DNA, 156 bp, Homo sapiens
  chr3:44039193-44039349
  hyper
cgctatctagcgtttatgcccgaagctttacgaataaactccctttccaggtaaacctgcccaacccttgtcctatgcccagcgaagcccaggtacgatgggtcaaggacccctggcttccacattgtctgagtcacgttccagttggaaaggcca

SEQ ID NO: 16875 - DNA, 82 bp, Homo sapiens; identical to SEQ ID NO: 7369
  chr3:50377892-50377974
  hyper

SEQ ID NO: 16876 - DNA, 167 bp, Homo sapiens; identical to SEQ ID NO: 7370
  chr3:50378002-50378169
  hyper

SEQ ID NO: 16877 - DNA, 333 bp, Homo sapiens; identical to SEQ ID NO: 7372
  chr3:53032401-53032734
  hypo

SEQ ID NO: 16878 - DNA, 202 bp, Homo sapiens; identical to SEQ ID NO: 9714
  chr3:54156155-54156357
  hyper

SEQ ID NO: 16879 - DNA, 44 bp, Homo sapiens; identical to SEQ ID NO: 10641
  chr4:10458329-10458373
  hyper

SEQ ID NO: 16880 - DNA, 62 bp, Homo sapiens
  chr4:1093475-1093537
  hypo
gtaacgaggatacatagttaaatctcacagcgtgactgaaggcctttgctgcgtctgacgtc

SEQ ID NO: 16881 - DNA, 233 bp, Homo sapiens; identical to SEQ ID NO: 11662
  chr4:111543735-111543968
  binary

SEQ ID NO: 16882 - DNA, 99 bp, Homo sapiens
  chr4:113430521-113430620
  hyper
cggtgagatgcggggccgaggaggagaaggagtgggaccgtgggcgtgcaggtgtttcaaggatcctcctcctttcccccttccatctctgattccatc

SEQ ID NO: 16883 - DNA, 352 bp, Homo sapiens
  chr4:113431158-113431510
  hyper
aactggggaaggaaaaacgcgttgggggcaaggagaaccgctcctgcagacctggcccctccttggccctaggggacccctgccgatgcccactcggtgccacgtggggcggccccaagggagatgcaccatcccccaaaccaagcgctttggaaaagaaactgcagagaataataagaagcatgggggggggggcggggggcggggtgtgtccgtggagtgatgagaaagctggtctttcatccctccttttttggacattccttaagtttaatcattaaagtggtccttaaaaaagaaggcagcagcttaacgctgctatttctgacaatctgccccacacactgtcagc

SEQ ID NO: 16884 - DNA, 300 bp, Homo sapiens; identical to SEQ ID NO: 12761
  chr4:113435475-113435775
  hyper

SEQ ID NO: 16885 - DNA, 243 bp, Homo sapiens; identical to SEQ ID NO: 12762
  chr4:113436585-113436828
  binary

SEQ ID NO: 16886 - DNA, 229 bp, Homo sapiens; identical to SEQ ID NO: 14003
  chr4:113438278-113438507
  binary

SEQ ID NO: 16887 - DNA, 157 bp, Homo sapiens; identical to SEQ ID NO: 6161
  chr4:113442552-113442709
  hyper

SEQ ID NO: 16888 - DNA, 81 bp, Homo sapiens; identical to SEQ ID NO: 7381
  chr4:113444864-113444945
  hyper

SEQ ID NO: 16889 - DNA, 115 bp, Homo sapiens; identical to SEQ ID NO: 7382
  chr4:113445444-113445559
  hyper

SEQ ID NO: 16890 - DNA, 308 bp, Homo sapiens
  chr4:1165683-1165991
  hyper
tgcttggggaaggccgtctggctccacttgcccgtgaaggtgatgctgtatttggccagggctctggcggaacagatggactctcccccaagaggctggccggcggcgccgagagtggccaggaggagagcgcagagggccttgcccagggcggcggccgggctggggttttccatcacctgggagcacagaggggagcagccgcgcgctggcaccgtcgtggcagcctcggggtggaaagccgagagggctgcggcactttgggctctgaggacggccccgagcacccgcgaccccctccctgctcc

SEQ ID NO: 16891 - DNA, 222 bp, Homo sapiens
  chr4:1166359-1166581
  hyper
cagcggtcgggtcccagccagagcccggagctcctatttaagcccgaggccggcgccccgggccggccaatgaggctccagttcctcctgtcttcgatgctgcacggcctggcctccagcgagaggcagataggacgtgggagaaaggaggagaaggggctgcgggggcggcgggggctgccgctttcccaactcgccctgcccagcgaccttccccgggtc

SEQ ID NO: 16892 - DNA, 55 bp, Homo sapiens
  chr4:1323674-1323729
  hypo
cgcaggagcttcccgtccacctctgaactcacggtccacatggcgctggagcgtc

SEQ ID NO: 16893 - DNA, 129 bp, Homo sapiens
  chr4:1326104-1326233
  hypo
cgcacctcccgccatcccagccccacccagcaggtcggcttggagtgaggcgattactttgtacctagactctgacataaaagctgttagctcagatttttcaacttaaaaatgcaggccgggtgcagc

SEQ ID NO: 16894 - DNA, 167 bp, Homo sapiens; identical to SEQ ID NO: 7385
  chr4:1326509-1326676
  hypo

SEQ ID NO: 16895 - DNA, 116 bp, Homo sapiens
  chr4:1330895-1331011
  hypo
cgagctcccgtgtgctgcacttgcgtggtgtctggatggtcggggtggggccgtgttgaggggcctcggatgcgtcgtgcagccttcactctgggaagtggcgcgcttcctctctc

SEQ ID NO: 16896 - DNA, 373 bp, Homo sapiens; identical to SEQ ID NO: 6591
  chr4:1331896-1332269
  hypo

SEQ ID NO: 16897 - DNA, 219 bp, Homo sapiens
  chr4:1332660-1332879
  binary
tagcttcgttcgaaatggatgaaggggtgggaaggacaggcgaggtggccccgggatttctttggcaggtgtgccttcgggaaggaactttgcctgagaggatgagtcattccctggtggttcattgtggggattttccatggaaatccgtgtgtacgttgtagtcgcttgccttaatgcattcccggttttatttttcagtctctgctttctatccgt

SEQ ID NO: 16898 - DNA, 520 bp, Homo sapiens
  chr4:1333183-1333703
  hypo
gcttctgaaaagtactttcaacttgcgaaggaaactcttctttaaagactgacctaaacaccgagggaaacttaagaacgtttaaaatataggagtccgtgatttccctgtgttttcagtttctttccttctgtgaacgatgagacttggagaacgggctggtccttcaccacttcctgttggccctggcctggccggggaaggtggcagcggcaccggactgacctgcagtgacccgcgatgccgcgccacgagggacacttatggcttcattcgagagctgctgccaaaacgcctggcgccgccaccgtcgggggctggcttcgaggacgcccgcctgcctcgcgggtcgtgtccgcgggactgtgttcgtacgtgcatagtttcgatatcacatcgcggggctgtgttcgtagctgcgtcgtttcgatatcacaccctctgtgtgccgccttacttcctgcttcgagaatgtataacgtggaaatccacgggaccaaatttctgcagaggccttgcc

SEQ ID NO: 16899 - DNA, 353 bp, Homo sapiens; identical to SEQ ID NO: 9736
  chr4:141293964-141294317
  hyper

SEQ ID NO: 16900 - DNA, 104 bp, Homo sapiens; identical to SEQ ID NO: 9737
  chr4:141294418-141294522
  hyper

SEQ ID NO: 16901 - DNA, 89 bp, Homo sapiens; identical to SEQ ID NO: 9738
  chr4:141294545-141294634
  hyper

SEQ ID NO: 16902 - DNA, 40 bp, Homo sapiens; identical to SEQ ID NO: 9739
  chr4:141295287-141295327
  hyper

SEQ ID NO: 16903 - DNA, 57 bp, Homo sapiens
  chr4:15780742-15780799
  hyper
cttaagtggtttgcaaagcctgtggtaggggaggagggtgtagaagggccaaaccac

SEQ ID NO: 16904 - DNA, 156 bp, Homo sapiens
  chr4:165304258-165304414
  hyper
cgtctctctgcctcgactggtcactccacttcctggagctccagaaactccctcagcacctggataactgcgacactcacccgtgagcgcaggaccctcctggcgtcttaagtcccagctctcagtcccgctggccgcaggaacacaatgacatct

SEQ ID NO: 16905 - DNA, 211 bp, Homo sapiens
  chr4:1791547-1791758
  hypo
cgccagggctgggctgggccgggccgtcagccgcacgcgccgcttgtctcggcccctgcctcccatactcaccttcaggggggacccctgggtatgggcctcaggaggtgggtgggggtgcagggggagtgggtagggaggtgtaaaccggagtccagcagatgggaagttcctgtccggccggcacctgcttggagcctcctgcacatgc

SEQ ID NO: 16906 - DNA, 57 bp, Homo sapiens; identical to SEQ ID NO: 8535
  chr4:1993659-1993716
  hypo

SEQ ID NO: 16907 - DNA, 197 bp, Homo sapiens; identical to SEQ ID NO: 8536
  chr4:1994335-1994532
  hypo

SEQ ID NO: 16908 - DNA, 381 bp, Homo sapiens
  chr4:20253129-20253510
  hyper
cgcgtggcaaaagctgcaggagaggcactggcagggctgtttatttatgagccgcgttcaaagccgacctcttcccattctcccactgcaaacgactatctccgagcccaggtcacctctggggccaaggagttgggggctggggctcgggtggctccttcttcgggccaagtttgcccgcgcgtgggagcgagggggcgagccagggcgcacgggaacgcgcgccgccagccgccgcctccgcccagcgctggcagccccggcctcacctctcccctctccccagcgaggtgcgggctcccagagcggagccagggggcgggcctgggcctcgaggggcggggtcagggggcggaggctcgggcggctatataaggcccg

SEQ ID NO: 16909 - DNA, 83 bp, Homo sapiens
  chr4:20253975-20254058
  hyper
cgacctcgctccctggagcgggaggccaggaaagcagcgggagaggggaaggggctagaaggagaaggactacccgggactgc

SEQ ID NO: 16910 - DNA, 196 bp, Homo sapiens
  chr4:20254323-20254519
  hyper
cgcacacactactgccattcagctgccgcctggctctgcctggagtagtggatcccacccgcccacctgccaccgagccattctccagtacgccccagcaggacgctgacacctccaaccttggcctttgcctttccactccttccggtctgcctggtttttaagtccgcccccagtcagtccccactcagtcttc

SEQ ID NO: 16911 - DNA, 82 bp, Homo sapiens; identical to SEQ ID NO: 14019
  chr4:2459899-2459981
  hypo

SEQ ID NO: 16912 - DNA, 88 bp, Homo sapiens; identical to SEQ ID NO: 10654
  chr4:5712804-5712892
  hyper

SEQ ID NO: 16913 - DNA, 57 bp, Homo sapiens; identical to SEQ ID NO: 10655
  chr4:5713393-5713450
  hyper

SEQ ID NO: 16914 - DNA, 94 bp, Homo sapiens; identical to SEQ ID NO: 9757
  chr4:57687545-57687639
  binary

SEQ ID NO: 16915 - DNA, 205 bp, Homo sapiens; identical to SEQ ID NO: 9758
  chr4:57687887-57688092
  hyper

SEQ ID NO: 16916 - DNA, 207 bp, Homo sapiens
  chr4:6201673-6201880
  hyper
ggggctgggggcgggaccgggagggggtgttgggggaagcgacgcagcggctgggagattttgcaagggggtctgaagaggagtgggggatgggtatggaagggtgggggaccactgaggtgggatgcgagagtggaagggggacccagagggggcgcgatggccggaggagggggagatggacgatggggcggggcggcaccggtc

SEQ ID NO: 16917 - DNA, 65 bp, Homo sapiens; identical to SEQ ID NO: 6183
  chr4:6202658-6202723
  hyper

SEQ ID NO: 16918 - DNA, 172 bp, Homo sapiens
  chr4:657350-657522
  binary
cgtcccaagccgacgatggagccgctggtggagagctgggcaccctgaggagggccctgagcagcaggcggattaggggtcccgcccaccgagggcccgagggcgggggcgtgagaggcacaggcagccgaggcggaaggggcggggtccccgggcaccctgagaggtggcc

SEQ ID NO: 16919 - DNA, 115 bp, Homo sapiens
  chr4:657552-657667
  binary
ccgcagaccctgaacatctaccagaacctgaaccggcggcagcacgagcacgtgatccacctgatggacatcgccatcatcgccacggacctggccctgtacttcaagtgcgcgc

SEQ ID NO: 16920 - DNA, 139 bp, Homo sapiens
  chr4:657712-657851
  binary
ccccggcagacacgggggcgcagcggcggcacagcccgggggacgcagccccggattccgtccctgcccgccggccccgcgcaccccggatggggcctcgctcgggctccgcgcctccctgcagacgggcgcttggggc

SEQ ID NO: 16921 - DNA, 178 bp, Homo sapiens
  chr4:7844888-7845066
  hypo
cgcagagcaacttggtccactggccgaaccgcttcttccgcagcaggaaggcgcagattttggcgtccttgaccaggtccatggaggcctcctcggagggccactggtgccgggttttcttccccttcccatcctcctcctcttcatcatacgactcataagagctgctcatcgcatc

SEQ ID NO: 16922 - DNA, 151 bp, Homo sapiens
  chr4:81124731-81124882
  binary
gccacctgcaggaataaacacgcgagaacatccaccgcttccttgcaccccgaaaccctgcacaaagacacatacattcaccgcccccccgcccccccaacgcgcacacacacgtcctctcctcccaggaacctcattcaaatatttaccc

SEQ ID NO: 16923 - DNA, 189 bp, Homo sapiens; identical to SEQ ID NO: 10659
  chr4:905682-905871
  hypo

SEQ ID NO: 16924 - DNA, 115 bp, Homo sapiens; identical to SEQ ID NO: 6187
  chr5:100236036-100236151
  hyper

SEQ ID NO: 16925 - DNA, 87 bp, Homo sapiens; identical to SEQ ID NO: 6188
  chr5:100238197-100238284
  hyper

SEQ ID NO: 16926 - DNA, 345 bp, Homo sapiens; identical to SEQ ID NO: 6189
  chr5:100239724-100240069
  hyper

SEQ ID NO: 16927 - DNA, 171 bp, Homo sapiens; identical to SEQ ID NO: 8556
  chr5:10564301-10564472
  binary

SEQ ID NO: 16928 - DNA, 147 bp, Homo sapiens
  chr5:11385588-11385735
  hyper
acctgtgtttgcttacatgtagatgttatttcggaaatagcagaagcatcgcattagtcacataaagatttttaaagccccaccccgacagggcaatcatgatctccctggtcgcaatcacaatctgtttgttttaatgagaaattc

SEQ ID NO: 16929 - DNA, 83 bp, Homo sapiens
  chr5:127537002-127537085
  hyper
cgataagagggaagcgaagaaaaaagcacgtgacttgaaaatgtttttctctttttaaagccacatctttctgcttcattttg

SEQ ID NO: 16930 - DNA, 65 bp, Homo sapiens
  chr5:127537230-127537295
  hyper
ggtagtgatgcgaataacatgctttgagaagtcagaaggctggcgtctcttcctccggagctcac

SEQ ID NO: 16931 - DNA, 391 bp, Homo sapiens; identical to SEQ ID NO: 7416
  chr5:135091190-135091581
  hypo

SEQ ID NO: 16932 - DNA, 156 bp, Homo sapiens; identical to SEQ ID NO: 7419
  chr5:141931151-141931307
  hyper

SEQ ID NO: 16933 - DNA, 32 bp, Homo sapiens; identical to SEQ ID NO: 14062
  chr5:142625544-142625576
  hypo

SEQ ID NO: 16934 - DNA, 42 bp, Homo sapiens
  chr5:15500076-15500118
  binary
cgttgcttcgctccgaagggttcgcgcgtagcgcgctgagcc

SEQ ID NO: 16935 - DNA, 177 bp, Homo sapiens
  chr5:155107908-155108085
  hyper
cgccctccatgctgcgggagctgcggccgccttccgctcagcctctggtcccaggcgagcctggcgagccggcgaagcaccggcggggaggaggactagaacaggaggaggggcacggcggattgaagcgagctgggctgtgagcaagggacacccacagcctggagaaacagcccc

SEQ ID NO: 16936 - DNA, 231 bp, Homo sapiens
  chr5:159414348-159414579
  hyper
cggcgtctccagcagagcgcagcaaagaagacgaagcctcctggggcctttcctcgccgcctggagcggggcatccttcctccttacgtgcagagactgggaagcagctctttagacactgcagtgaccgagcccgctccacgcccctttcccctgagcaggtgcttgacgtggggcaagctcggcgttgaggtggacccgcgcgccacccgctggccaacgcgcctaagc

SEQ ID NO: 16937 - DNA, 97 bp, Homo sapiens
  chr5:168727259-168727356
  hyper
cgggccctgcgtctggaaccctcacccctggagaggcactgctctttgcccatcgctgggggtttcgagacctctctttccagatctgaccaagcct

SEQ ID NO: 16938 - DNA, 303 bp, Homo sapiens; identical to SEQ ID NO: 12808
  chr5:17216361-17216664
  hyper

SEQ ID NO: 16939 - DNA, 53 bp, Homo sapiens; identical to SEQ ID NO: 12809
  chr5:17217629-17217682
  binary

SEQ ID NO: 16940 - DNA, 210 bp, Homo sapiens; identical to SEQ ID NO: 9798
  chr5:176057164-176057374
  binary

SEQ ID NO: 16941 - DNA, 842 bp, Homo sapiens
  chr5:176918897-176919739
  hypo
cgcggagggtccgcggcgggggcggaggcctgggcagagacacagccgggcagggcgggcgggcagggtaaggtgggggcctgggtggaagtggggcgcctgcagcagaggacagcggcagctccagccccccacccccaccccaccccctacatctatttggaggctacggggagaggacgactcaggtttcaaggggcccatttgggagtggcgatctcagtccacgcaggaccgagggctgaccgagtgcgggcgagcacgcagcgccggcggcgggaggcagcaggcggacagacaggcggacagacaggcggacatgcgtggtgccaggaccgtgcagcagcccctggctcaactccagggccctagacccgccttagctccggtttctgccctccactcccggccagggattggggtaccgagaatgtgccaggagggcgagcaggcctggccgtccaagcccacaccgcccaccgcccggatgtcccggccagcctcgtaccttctgcggtttgctctgaaccggctgggccctggaggagaaggaaagcgtgacagcgggccgggcccgcagggatccccactgccagcgcgggcgcacccatccatgtccacccgcatacctgctgaggcccaggctgaggcgctccccgcaggcccggatcttgttctgagcttcgatgtgtgtgaggctacccgcattctcgccatcgatgctcagcacccagtcacccacggccactccggcctgcgccgctttgcccccaggagtgagctgtggagagagaagcaaagtgaccgaggccctggaccctgcagacccaagccaggctgac

SEQ ID NO: 16942 - DNA, 95 bp, Homo sapiens
  chr5:177680780-177680875
  hypo
cgtgtttttatttttttaacatcatgccctgcatggactatggctgcccgctgcccatcaaactgagtcggcatctcagtctggcatccaaagtc

SEQ ID NO: 16943 - DNA, 117 bp, Homo sapiens; identical to SEQ ID NO: 10679
  chr5:178016455-178016572
  hyper

SEQ ID NO: 16944 - DNA, 184 bp, Homo sapiens; identical to SEQ ID NO: 9803
  chr5:178594471-178594655
  binary

SEQ ID NO: 16945 - DNA, 289 bp, Homo sapiens; identical to SEQ ID NO: 10680
  chr5:178770455-178770744
  binary

SEQ ID NO: 16946 - DNA, 197 bp, Homo sapiens
  chr5:179779452-179779649
  hyper
cgctccgggccgcggccgccctccccacggtcccgcagccacgcgggacagcgcgggagcgccgcgggaatcggacgcccggccccgctccccgccccggactccctctcgtggcttcgggccgaggttcgggcagtgactgcctcttccccgcgcaaagaggcggtaacgcggcagcgacccttctagggaccaga

SEQ ID NO: 16947 - DNA, 40 bp, Homo sapiens
  chr5:2743466-2743506
  hyper
cgggcgcgggaggcagcgcccgcgccggccgccgggcaag

SEQ ID NO: 16948 - DNA, 174 bp, Homo sapiens
  chr5:2753572-2753746
  hyper
cccaccactcttcctacaaaccacacccccatcctgcacacatcctcttcaggccatctcaacacacgcacacgcacacacacccacgaccacctctccctccacccacagacaccccgttcccacaggctgggccccctgcaacgacccagcggggggtttcaaccttgttgc

SEQ ID NO: 16949 - DNA, 99 bp, Homo sapiens; identical to SEQ ID NO: 6210
  chr5:42950747-42950846
  hyper

SEQ ID NO: 16950 - DNA, 338 bp, Homo sapiens; identical to SEQ ID NO: 8586
  chr5:43007481-43007819
  hyper

SEQ ID NO: 16951 - DNA, 388 bp, Homo sapiens; identical to SEQ ID NO: 8587
  chr5:43017314-43017702
  hyper

SEQ ID NO: 16952 - DNA, 304 bp, Homo sapiens; identical to SEQ ID NO: 8588
  chr5:43019347-43019651
  hyper

SEQ ID NO: 16953 - DNA, 260 bp, Homo sapiens; identical to SEQ ID NO: 8589
  chr5:43019887-43020147
  hyper

SEQ ID NO: 16954 - DNA, 76 bp, Homo sapiens; identical to SEQ ID NO: 7437
  chr5:54518558-54518634
  hyper

SEQ ID NO: 16955 - DNA, 161 bp, Homo sapiens; identical to SEQ ID NO: 16014
  chr5:600977-601138
  hypo

SEQ ID NO: 16956 - DNA, 263 bp, Homo sapiens; identical to SEQ ID NO: 16015
  chr5:601222-601485
  hypo

SEQ ID NO: 16957 - DNA, 33 bp, Homo sapiens; identical to SEQ ID NO: 8592
  chr5:6583144-6583177
  hyper

SEQ ID NO: 16958 - DNA, 270 bp, Homo sapiens; identical to SEQ ID NO: 14098
  chr5:72594501-72594771
  hyper

SEQ ID NO: 16959 - DNA, 199 bp, Homo sapiens; identical to SEQ ID NO: 14103
  chr5:76936815-76937014
  hyper

SEQ ID NO: 16960 - DNA, 51 bp, Homo sapiens
  chr5:76937347-76937398
  hyper
cgccgccagcaggcagagcgagaaaaacgacaatagcctggatgtaaaaag

SEQ ID NO: 16961 - DNA, 192 bp, Homo sapiens; identical to SEQ ID NO: 6216
  chr5:77148195-77148387
  hyper

SEQ ID NO: 16962 - DNA, 38 bp, Homo sapiens; identical to SEQ ID NO: 8593
  chr5:77268330-77268368
  binary

SEQ ID NO: 16963 - DNA, 123 bp, Homo sapiens
  chr5:83679447-83679570
  hyper
cgcagctaagctccaggcccctggggtcagactaggagaggcgggttcctggggtttgctgtaatcgatgctgctcctctgggatggggaggcaggagaaagctgaagtgacctgtgagactc

SEQ ID NO: 16964 - DNA, 75 bp, Homo sapiens
  chr5:83680369-83680444
  hyper
aagagaggagcctttcctccccttttgcctgcgctccggcgcgcggaggtgggtgagctccggggagccgccggc

SEQ ID NO: 16965 - DNA, 80 bp, Homo sapiens; identical to SEQ ID NO: 6218
  chr5:87957200-87957280
  hyper

SEQ ID NO: 16966 - DNA, 157 bp, Homo sapiens; identical to SEQ ID NO: 6219
  chr5:87969885-87970042
  hyper

SEQ ID NO: 16967 - DNA, 600 bp, Homo sapiens; identical to SEQ ID NO: 6220
  chr5:87970918-87971518
  hyper

SEQ ID NO: 16968 - DNA, 377 bp, Homo sapiens
  chr5:9545120-9545497
  hyper
gttccccaggcctctgcatcccccgccttagtgtctttcattaaccaaggcgcttggcggagttgagcccaagtcccattgcctcccggttcccctgtaaggaaagcaggaaaacctgcccaagccggtggggctgcgaggtggccgctcccgaaccgccaagtcccgacctccgtgtcccctgcccccggctcgcggcagtgcgagcctggaggcgcgccgggggcgggcacagaccagtgtgcgcacctttccgggtgttgggcaggggtcccgtctcgcccaccgcgacactccggctccttacctctccatgctcagacctcggcacaggcgggtacacaaacttccagcccgtgcactagctcaactgtggg

SEQ ID NO: 16969 - DNA, 85 bp, Homo sapiens
  chr5:9545851-9545936
  hyper
tgggggcaccggcttgggggccacgagcacggtccccgagcgcgcggccaaccggtgggtgggcaggttcgcgcccagcagagac

SEQ ID NO: 16970 - DNA, 91 bp, Homo sapiens
  chr5:98239940-98240031
  hypo
cgtcaacgatgtcactaggcacattgttttagctcagatttgagcggggggccggtagcaacatttttctctatgaaggaatctgtgtgtc

SEQ ID NO: 16971 - DNA, 227 bp, Homo sapiens; identical to SEQ ID NO: 7442
  chr6:10417842-10418069
  hyper

SEQ ID NO: 16972 - DNA, 59 bp, Homo sapiens
  chr6:105389710-105389769
  hyper
gatttgtactccaaaaactttttttaaaaattgcacgttggtaaatattgagtgttttc

SEQ ID NO: 16973 - DNA, 543 bp, Homo sapiens; identical to SEQ ID NO: 7448
  chr6:1080648-1081191
  hypo

SEQ ID NO: 16974 - DNA, 85 bp, Homo sapiens; identical to SEQ ID NO: 16026
  chr6:109053387-109053472
  hypo

SEQ ID NO: 16975 - DNA, 440 bp, Homo sapiens; identical to SEQ ID NO: 5838
  chr6:127836226-127836666
  binary

SEQ ID NO: 16976 - DNA, 31 bp, Homo sapiens; identical to SEQ ID NO: 5839
  chr6:127837749-127837780
  binary

SEQ ID NO: 16977 - DNA, 297 bp, Homo sapiens
  chr6:155568912-155569209
  hypo
atcctcggaagctcccagcactccagggctctgtcagggctgtgaggcggaatcccacgctgacagctgggtgcctgacccactgatgtgttggggttttcattaaagaatggcattaggaggactatagaaatagatgatctataaatgttaaaagagaaatgaagaatttaattcaccccactgtgctcttctgaggtcttttatccatctgcttgtagctaaaactgacaaagccttcaaggcttttctggacgcccggaaccccaccaagcagcattcctccacgctggagtc

SEQ ID NO: 16978 - DNA, 140 bp, Homo sapiens
  chr6:155569349-155569489
  hypo
acagggcggcgaggggctgccagccgtgccctgggcctgacagctcacctcttccccgcctagtggcacgtcctaagtcacttttcagttctgcgatggttaatcttaggtttcacgtgaatatgtgaaactagctaggc

SEQ ID NO: 16979 - DNA, 41 bp, Homo sapiens; identical to SEQ ID NO: 5840
  chr6:159591277-159591318
  binary

SEQ ID NO: 16980 - DNA, 166 bp, Homo sapiens; identical to SEQ ID NO: 12882
  chr6:1624812-1624978
  hyper

SEQ ID NO: 16981 - DNA, 52 bp, Homo sapiens; identical to SEQ ID NO: 10706
  chr6:1625068-1625120
  hyper

SEQ ID NO: 16982 - DNA, 106 bp, Homo sapiens; identical to SEQ ID NO: 10712
  chr6:167834910-167835016
  hypo

SEQ ID NO: 16983 - DNA, 327 bp, Homo sapiens
  chr6:26197520-26197847
  hyper
ctagcctttcgtacccgtatatataaagacacccctgttctgattggacaaggcagcctttcccctgcagctcgattggtggagacgcccactccctgacagaacatctcctgcatgtagaccaaatattaaaactttcctccgtccatctttaactgctggtgttttcaaccctttcccctctgtgccatgtttctagcttttatttaaaacgtactttggttttccttggcaaaattgtgtctagctactaggatgacgtgtcttaatttttttttaaatgttggcgctgaaactggctttgatcaacgttttaaaaagacgcgc

SEQ ID NO: 16984 - DNA, 87 bp, Homo sapiens
  chr6:26198488-26198575
  hyper
cgagccgctgcattgatcgatttaaattacatgtgacataaagtctctttgcattttaattagtttgcttttttgggtttttgtttg

SEQ ID NO: 16985 - DNA, 214 bp, Homo sapiens; identical to SEQ ID NO: 14147
  chr6:26198924-26199138
  binary

SEQ ID NO: 16986 - DNA, 368 bp, Homo sapiens; identical to SEQ ID NO: 14148
  chr6:26204318-26204686
  hyper

SEQ ID NO: 16987 - DNA, 205 bp, Homo sapiens; identical to SEQ ID NO: 14149
  chr6:26205298-26205503
  hyper

SEQ ID NO: 16988 - DNA, 55 bp, Homo sapiens; identical to SEQ ID NO: 14150
  chr6:26205712-26205767
  hyper

SEQ ID NO: 16989 - DNA, 42 bp, Homo sapiens
  chr6:26206006-26206048
  hyper
cgtccttatccctccctgatttcctgttttctcgcccttctc

SEQ ID NO: 16990 - DNA, 172 bp, Homo sapiens; identical to SEQ ID NO: 15142
  chr6:26215876-26216048
  hyper

SEQ ID NO: 16991 - DNA, 224 bp, Homo sapiens; identical to SEQ ID NO: 6232
  chr6:26216853-26217077
  hyper

SEQ ID NO: 16992 - DNA, 210 bp, Homo sapiens; identical to SEQ ID NO: 6233
  chr6:26217156-26217366
  hyper

SEQ ID NO: 16993 - DNA, 312 bp, Homo sapiens; identical to SEQ ID NO: 6234
  chr6:26217578-26217890
  hyper

SEQ ID NO: 16994 - DNA, 113 bp, Homo sapiens; identical to SEQ ID NO: 12886
  chr6:26250001-26250114
  hyper

SEQ ID NO: 16995 - DNA, 130 bp, Homo sapiens; identical to SEQ ID NO: 7461
  chr6:26271217-26271347
  hyper

SEQ ID NO: 16996 - DNA, 327 bp, Homo sapiens; identical to SEQ ID NO: 7462
  chr6:26272105-26272432
  hyper

SEQ ID NO: 16997 - DNA, 228 bp, Homo sapiens; identical to SEQ ID NO: 12889
  chr6:26272853-26273081
  hyper

SEQ ID NO: 16998 - DNA, 210 bp, Homo sapiens; identical to SEQ ID NO: 6237
  chr6:26322359-26322569
  hyper

SEQ ID NO: 16999 - DNA, 205 bp, Homo sapiens; identical to SEQ ID NO: 6247
  chr6:27560506-27560711
  hyper

SEQ ID NO: 17000 - DNA, 61 bp, Homo sapiens
  chr6:27635798-27635859
  hyper
cgccgattacatcagtgcttatgtttgtgacttcagagacactgagaaggcgcggctcttt

SEQ ID NO: 17001 - DNA, 93 bp, Homo sapiens; identical to SEQ ID NO: 6248
  chr6:27636531-27636624
  hyper

SEQ ID NO: 17002 - DNA, 351 bp, Homo sapiens
  chr6:27798705-27799056
  hyper
cgggaggctacagtgagccatgatgacactgcactacagtctgcgcgacggcccatgtcagtaagctctggagcacctgaaacaagttgtgttgggtattttatttactggagagcgattagtgactgatgcctacttacagcgactagagacgcatgctccgatagcagcacaaactcagcaggcgcgaacaaatggtaaagagaaactgggcaaacaagcatcacggctcctcagctgagaaagtgggggccctaaaaagggccttttgttgatagaaagggacgctcaaccaccgaaaccgtagagggtgcggccctggcgcttgagcgcgtagaccacatccatggc

SEQ ID NO: 17003 - DNA, 315 bp, Homo sapiens; identical to SEQ ID NO: 6252
  chr6:28456978-28457293
  hyper

SEQ ID NO: 17004 - DNA, 209 bp, Homo sapiens; identical to SEQ ID NO: 6253
  chr6:28457345-28457554
  hyper

SEQ ID NO: 17005 - DNA, 314 bp, Homo sapiens; identical to SEQ ID NO: 7482
  chr6:37023826-37024140
  hypo

SEQ ID NO: 17006 - DNA, 61 bp, Homo sapiens; identical to SEQ ID NO: 6255
  chr6:391113-391174
  hyper

SEQ ID NO: 17007 - DNA, 55 bp, Homo sapiens; identical to SEQ ID NO: 5841
  chr6:393764-393819
  binary

SEQ ID NO: 17008 - DNA, 57 bp, Homo sapiens; identical to SEQ ID NO: 14182
  chr6:43478745-43478802
  hypo

SEQ ID NO: 17009 - DNA, 358 bp, Homo sapiens; identical to SEQ ID NO: 7487
  chr6:47202003-47202361
  hypo

SEQ ID NO: 17010 - DNA, 155 bp, Homo sapiens; identical to SEQ ID NO: 7488
  chr6:47202453-47202608
  hypo

SEQ ID NO: 17011 - DNA, 194 bp, Homo sapiens; identical to SEQ ID NO: 8641
  chr6:50808438-50808632
  hyper

SEQ ID NO: 17012 - DNA, 73 bp, Homo sapiens; identical to SEQ ID NO: 7489
  chr6:52344303-52344376
  hypo

SEQ ID NO: 17013 - DNA, 159 bp, Homo sapiens; identical to SEQ ID NO: 7490
  chr6:52344405-52344564
  hypo

SEQ ID NO: 17014 - DNA, 249 bp, Homo sapiens; identical to SEQ ID NO: 8647
  chr6:56818408-56818657
  hyper

SEQ ID NO: 17015 - DNA, 620 bp, Homo sapiens
  chr6:57036954-57037574
  hyper
cgaagccgtcactgagcaatacacccacagcccgtcgaccgataggaaccttcgcgtggggggagttggttacttttaggttgcatgaagaggcggggcctcgcggggcggagctgggggtggtctgtgggtccgcgcgggcttcgggtagttcctgggtccggggagcagacgatccgctagccacattaggcgctcggtctctgcgtccgcccctcccgtgcctcagagacttgcgctccccaggcccgagcccctgtcggcccatcctcgagcccgtgtggctcgcgaacctctaactccagccgctgcagccccctcccaggcccggcgtccccgagccccgcgggcgccgcgcctgcccttctttggctacgctgcagccgcggtgtcggcgagtcctcccgggttgcccccgcgggcgtcagagggagggcgggcgcccgcgtggtgacggcgacgcctgcagcccaaggagcgctccactcgctgccgccggaggggccggtgacctcttggctaccccgcgtcggaggcttagatggctcaggcgaagatcaacgctaaagccaacgaggggcgcttctgccgctcctcctccatggctgaccgctccagcc

SEQ ID NO: 17016 - DNA, 80 bp, Homo sapiens; identical to SEQ ID NO: 5845
  chr6:6009552-6009632
  binary

SEQ ID NO: 17017 - DNA, 394 bp, Homo sapiens; identical to SEQ ID NO: 15180
  chr6:710660-711054
  binary

SEQ ID NO: 17018 - DNA, 141 bp, Homo sapiens; identical to SEQ ID NO: 15181
  chr6:711310-711451
  hyper

SEQ ID NO: 17019 - DNA, 227 bp, Homo sapiens; identical to SEQ ID NO: 6263
  chr6:72596315-72596542
  hyper

SEQ ID NO: 17020 - DNA, 372 bp, Homo sapiens; identical to SEQ ID NO: 10741
  chr6:91005702-91006074
  binary

SEQ ID NO: 17021 - DNA, 42 bp, Homo sapiens; identical to SEQ ID NO: 10742
  chr6:91320244-91320286
  hyper

SEQ ID NO: 17022 - DNA, 58 bp, Homo sapiens; identical to SEQ ID NO: 10743
  chr7:100254132-100254190
  hyper

SEQ ID NO: 17023 - DNA, 117 bp, Homo sapiens; identical to SEQ ID NO: 6609
  chr7:101475674-101475791
  hypo

SEQ ID NO: 17024 - DNA, 236 bp, Homo sapiens; identical to SEQ ID NO: 6610
  chr7:101475858-101476094
  hypo

SEQ ID NO: 17025 - DNA, 82 bp, Homo sapiens; identical to SEQ ID NO: 10746
  chr7:101627660-101627742
  hypo

SEQ ID NO: 17026 - DNA, 282 bp, Homo sapiens; identical to SEQ ID NO: 10747
  chr7:101627846-101628128
  hypo

SEQ ID NO: 17027 - DNA, 252 bp, Homo sapiens; identical to SEQ ID NO: 12914
  chr7:106684920-106685172
  binary

SEQ ID NO: 17028 - DNA, 221 bp, Homo sapiens; identical to SEQ ID NO: 9899
  chr7:106685920-106686141
  hyper

SEQ ID NO: 17029 - DNA, 115 bp, Homo sapiens
  chr7:1115608-1115723
  hypo
cggggctgccactctccagggcgccccactcccagctccagcggctgagtccaccaagccaggacaggcccaaggaccagagggcgaggtgattcacagtggagctcggaaagac

SEQ ID NO: 17030 - DNA, 183 bp, Homo sapiens
  chr7:112430003-112430186
  hyper
cgcccagttgagggggaacccttgcgaaatacggagaggcgctcccacaccctccaatctccaaccaccactgtcaactcctccagaggcaggtatcctaccccggccctgggaggccgactgggcggagcttggggtccggaccacgcggagccctggcagtgtctatgcctagatctcgcc

SEQ ID NO: 17031 - DNA, 143 bp, Homo sapiens
  chr7:112430224-112430367
  hyper
cgtcgccaccaacgcgctctcccaaccctcggagtcagttccaaaaccaaaccaaaaaggaggagagcagacaaggcttcagcctgcgactgagaacagggaggcggcacgccttggggaacgagggcccgaggccatacgcg

SEQ ID NO: 17032 - DNA, 408 bp, Homo sapiens
  chr7:113726962-113727370
  binary
cggatgatttttagtttggataatgcaaaatgttgcttcgtccggagagacctcggctggaggagaatgtgtgtcgaaacaccagatgtgtgtttgtttactctcttctttttaattgtttgttgtcttttccccttcctccccgcacccccacccccaacctcgggaggagaaacaacagtaaaaacatctggcggttagaagcacacactttattgatccaactgctgacctttatttactcagttgggcaagtgcacgcttctcgcgtctaagttgggcacttcagcgttcatctcagaagtacttctccaggaaggagagagatggaaaggggacactcctgtttctggagtcaagaaactcctgggccctactgacgcttcgggataaccgtgcacagggatg

SEQ ID NO: 17033 - DNA, 119 bp, Homo sapiens; identical to SEQ ID NO: 14207
  chr7:121942391-121942510
  hyper

SEQ ID NO: 17034 - DNA, 209 bp, Homo sapiens
  chr7:127671450-127671659
  binary
ggcgtcggccgctccgggccggcggcagctgattgcggtcgtgagctcgcggagcggcgagagttaagaggaggtgttcgcggcgccttcgccctccccagacacacaccccctttctcctcgcctcttctcggagggtggaagagacaaaaacggggggtcagttctccagtccgccggctgccggcacgcggggcggcgctccgtcc

SEQ ID NO: 17035 - DNA, 269 bp, Homo sapiens; identical to SEQ ID NO: 12919
  chr7:139168725-139168994
  hyper

SEQ ID NO: 17036 - DNA, 40 bp, Homo sapiens
  chr7:155301671-155301711
  hyper
cgaatctcttgaaagttctctccttcgtcacagggtcttc

SEQ ID NO: 17037 - DNA, 39 bp, Homo sapiens; identical to SEQ ID NO: 6613
  chr7:155581980-155582019
  hypo

SEQ ID NO: 17038 - DNA, 41 bp, Homo sapiens; identical to SEQ ID NO: 14224
  chr7:156796104-156796145
  hyper

SEQ ID NO: 17039 - DNA, 64 bp, Homo sapiens; identical to SEQ ID NO: 14225
  chr7:156796431-156796495
  hyper

SEQ ID NO: 17040 - DNA, 96 bp, Homo sapiens; identical to SEQ ID NO: 7513
  chr7:156799510-156799606
  hyper

SEQ ID NO: 17041 - DNA, 34 bp, Homo sapiens
  chr7:156870979-156871013
  hyper
cgggaagcgaacccacgaggtgcagagagcagag

SEQ ID NO: 17042 - DNA, 42 bp, Homo sapiens; identical to SEQ ID NO: 7515
  chr7:157262486-157262528
  hypo

SEQ ID NO: 17043 - DNA, 215 bp, Homo sapiens; identical to SEQ ID NO: 7516
  chr7:157263471-157263686
  hypo

SEQ ID NO: 17044 - DNA, 476 bp, Homo sapiens; identical to SEQ ID NO: 12929
  chr7:157347322-157347798
  hypo

SEQ ID NO: 17045 - DNA, 211 bp, Homo sapiens
  chr7:157361395-157361606
  hyper
cggcacgcagaggcaggtaacaaacgaccagcctcagaagcagatgtgcttgctgcaaaccaccttcctacggcccagcagaggcacaacaagcagcgaattttttccagggcctcccgtgaacacggcaccctacgttgccatagcgacgccatcccagctctgagccgcaacaaagcggcagtgtctgtgtctcacctttggccatctt

SEQ ID NO: 17046 - DNA, 53 bp, Homo sapiens
  chr7:157361751-157361804
  hyper
cgggggccggcgagaggaaaggatggcggatgtgagagggggaggaaggacgc

SEQ ID NO: 17047 - DNA, 217 bp, Homo sapiens; identical to SEQ ID NO: 9916
  chr7:157476655-157476872
  hyper

SEQ ID NO: 17048 - DNA, 234 bp, Homo sapiens
  chr7:1705153-1705387
  binary
agcggggcgggccaggaggagggggcgaggccgccactcggcttcccacgccgcccccgcggctggctccaacttcccctccggagcccccctccggccaccccccagcccaccgacgtgcgggcagcgaccccgccccccgcccctccggtcgcccccgccgcggcccccgccccctccccatccctccccgcgcgctctcccacatgaaaccttccatcacgctcagaaaga

SEQ ID NO: 17049 - DNA, 503 bp, Homo sapiens; identical to SEQ ID NO: 10765
  chr7:1705693-1706196
  binary

SEQ ID NO: 17050 - DNA, 60 bp, Homo sapiens; identical to SEQ ID NO: 7522
  chr7:19156644-19156704
  binary

SEQ ID NO: 17051 - DNA, 46 bp, Homo sapiens
  chr7:1970797-1970843
  hypo
cgcacggtcacaggagcgagggcgcgtcgtggggtccacgtcaagg

SEQ ID NO: 17052 - DNA, 88 bp, Homo sapiens
  chr7:1970921-1971009
  hypo
acgtcaagggtctgctgacactgcgggcacacccttgctcctcatctggagaatggggaggggacagccctctctggcagcaagcggc

SEQ ID NO: 17053 - DNA, 307 bp, Homo sapiens
  chr7:1997037-1997344
  hypo
cgtgtgggtggtgcgggccgcagaggactccagaggcagccagtgcaggcctgtcagcggcatggcctccctgccaggcaagggggtgcacatgggagggaggagagttcagacagacgagccagaaaacgggtgttctgtggcagcaggaaccacggtcgttcacgacgcccaaagaaatgagaggcccaggcagtgcctcacccagaggctgccccgccctcacctgcagagctcgccgctccagctgtgcctccagcatcctcttttcctcctccagccgactccgctcgccttccagctcctc

SEQ ID NO: 17054 - DNA, 120 bp, Homo sapiens
  chr7:20825260-20825380
  hyper
aagaagaggacgaggagcgtttccaggggtggaagcctttgccgaaggaagaagagctgtccgagagggaggagggagacgggctggggctgcctatcttattacaggtagcggcaagca

SEQ ID NO: 17055 - DNA, 298 bp, Homo sapiens
  chr7:20826202-20826500
  binary
gctgaaaaaaagtgactctgcccccttctccccctttttcttttctccaaactcacttgtatttaaagaaaaaaaaaaaaagctctcaatagagagactgatagcccgtggcctggccggggcgactttaaccccctccaatcggcaataaaaggaaactaattaaaccagcaagagaaaatcctgagactcacccctagaagtgaagttgccatcacacaaaagtgccctcctcctctcagaggatcttttttatattgataaatcagaggcagtgttttttttagaggtgtgcaat

SEQ ID NO: 17056 - DNA, 61 bp, Homo sapiens; identical to SEQ ID NO: 6274
  chr7:20827463-20827524
  hyper

SEQ ID NO: 17057 - DNA, 79 bp, Homo sapiens; identical to SEQ ID NO: 6275
  chr7:20827557-20827636
  hyper

SEQ ID NO: 17058 - DNA, 42 bp, Homo sapiens; identical to SEQ ID NO: 14249
  chr7:20830567-20830609
  hyper

SEQ ID NO: 17059 - DNA, 147 bp, Homo sapiens; identical to SEQ ID NO: 15216
  chr7:20836997-20837144
  hyper

SEQ ID NO: 17060 - DNA, 475 bp, Homo sapiens
  chr7:2264018-2264493
  hypo
cgccccacctctcagggaaaacagctctcaaagcagcaacggagccaaccctgaggcagtggcccccaccccagcggtgcctcagtctcactgagcccacacaacgcacaccgcagtcaggatctgcaggccaggggcaagcaatccaaccagcatcacaccccggaagacgtgagctatttttctagggcccaggagagtgtgtgaatacaccgcatgatgtcagggcggggctggacatccacccgccaagagagggcacggaggccagggagactttccgcccaatactctgcctgaaccttggcagcatttccacaactgatcagcactgactgaaaccctggcaaagtgctgttaatcagagcagaggggatccgcgcactcagtggaaacctaattccctccccaaggacagggtgttttccctgctgccctggggagccaggagcaacacagagccgccattgagacc

SEQ ID NO: 17061 - DNA, 290 bp, Homo sapiens; identical to SEQ ID NO: 16084
  chr7:2265241-2265531
  hypo

SEQ ID NO: 17062 - DNA, 107 bp, Homo sapiens; identical to SEQ ID NO: 12977
  chr7:23287654-23287761
  hyper

SEQ ID NO: 17063 - DNA, 254 bp, Homo sapiens
  chr7:2477361-2477615
  hypo
cgcgcgcacacacacacacacacacacactctctctcacacacacatcgggatatttttcttgtttccttcttccagagggtgtaggagttgtgttccaagtttgttcctgcaaaccctccgatgaggccagctgcattcatcggggcctggatggccgcacctctctctccccgccctgtctcctgcactcaggtgagaggctggcagggctgccgtaggggtggagagtgaacgcagggtggctaagccctc

SEQ ID NO: 17064 - DNA, 238 bp, Homo sapiens
  chr7:2566658-2566896
  hypo
tagaggtgtcccccggagtcctgcttgctcggggtggggccgccagtgttgtgggactgcaaatgggagctcagcacctgcctgccacccacgcagaccagcccctgctctgttcccacaggttccgctccatccactgccacctgtacccggacacaccctggtgtccccgcactgccatcttctagtggccatggctgagacccaatccctgggcgcccctggtatccaaagggcc

SEQ ID NO: 17065 - DNA, 195 bp, Homo sapiens
  chr7:2566939-2567134
  hypo
ccctagggccgtgcctgtgcgtgtgcgtgtgcgtgtgtgtgtgtgtgtactgcatgcccacccgggtagcaggctgctgggcagttctgctctgtggaggggcgggcaccagcgccacttatgtgcctctgctccgagggccagtgggctgcagggcctgcttggaggaaggatttgtgtgtcggaggccactcc

SEQ ID NO: 17066 - DNA, 196 bp, Homo sapiens; identical to SEQ ID NO: 8703
  chr7:25896938-25897134
  hyper

SEQ ID NO: 17067 - DNA, 109 bp, Homo sapiens; identical to SEQ ID NO: 8704
  chr7:25897246-25897355
  hyper

SEQ ID NO: 17068 - DNA, 296 bp, Homo sapiens; identical to SEQ ID NO: 9926
  chr7:25901811-25902107
  hyper

SEQ ID NO: 17069 - DNA, 208 bp, Homo sapiens; identical to SEQ ID NO: 9927
  chr7:25902138-25902346
  hyper

SEQ ID NO: 17070 - DNA, 91 bp, Homo sapiens; identical to SEQ ID NO: 8708
  chr7:27135176-27135267
  hyper

SEQ ID NO: 17071 - DNA, 142 bp, Homo sapiens; identical to SEQ ID NO: 8709
  chr7:27136790-27136932
  binary

SEQ ID NO: 17072 - DNA, 104 bp, Homo sapiens; identical to SEQ ID NO: 7530
  chr7:27204281-27204385
  hyper

SEQ ID NO: 17073 - DNA, 105 bp, Homo sapiens; identical to SEQ ID NO: 14266
  chr7:27223010-27223115
  hyper

SEQ ID NO: 17074 - DNA, 269 bp, Homo sapiens; identical to SEQ ID NO: 14267
  chr7:27223306-27223575
  hyper

SEQ ID NO: 17075 - DNA, 47 bp, Homo sapiens
  chr7:27225249-27225296
  hyper
gggtgggtgagggatgccctggactggggatagccaggtgggagtcc

SEQ ID NO: 17076 - DNA, 225 bp, Homo sapiens; identical to SEQ ID NO: 15228
  chr7:27238917-27239142
  hyper

SEQ ID NO: 17077 - DNA, 71 bp, Homo sapiens; identical to SEQ ID NO: 12988
  chr7:27245310-27245381
  hyper

SEQ ID NO: 17078 - DNA, 78 bp, Homo sapiens; identical to SEQ ID NO: 8710
  chr7:27281871-27281949
  hyper

SEQ ID NO: 17079 - DNA, 34 bp, Homo sapiens; identical to SEQ ID NO: 7535
  chr7:27686735-27686769
  hypo

SEQ ID NO: 17080 - DNA, 45 bp, Homo sapiens; identical to SEQ ID NO: 7536
  chr7:27686815-27686860
  hypo

SEQ ID NO: 17081 - DNA, 54 bp, Homo sapiens; identical to SEQ ID NO: 8715
  chr7:30603338-30603392
  hypo

SEQ ID NO: 17082 - DNA, 110 bp, Homo sapiens; identical to SEQ ID NO: 8716
  chr7:30603436-30603546
  hypo

SEQ ID NO: 17083 - DNA, 101 bp, Homo sapiens; identical to SEQ ID NO: 7546
  chr7:409502-409603
  hypo

SEQ ID NO: 17084 - DNA, 46 bp, Homo sapiens; identical to SEQ ID NO: 7547
  chr7:409781-409827
  hypo

SEQ ID NO: 17085 - DNA, 95 bp, Homo sapiens; identical to SEQ ID NO: 7548
  chr7:409892-409987
  hypo

SEQ ID NO: 17086 - DNA, 95 bp, Homo sapiens
  chr7:45615102-45615197
  hyper
cggtcttttgccgcacccatccccacagagggactgaaagtgggcgaggagagcagacccccagggcaagctccaaggccggctctgcgcgcagc

SEQ ID NO: 17087 - DNA, 102 bp, Homo sapiens; identical to SEQ ID NO: 7551
  chr7:50344738-50344840
  binary

SEQ ID NO: 17088 - DNA, 57 bp, Homo sapiens; identical to SEQ ID NO: 8726
  chr7:50560501-50560558
  hypo

SEQ ID NO: 17089 - DNA, 220 bp, Homo sapiens; identical to SEQ ID NO: 8727
  chr7:50560663-50560883
  hypo

SEQ ID NO: 17090 - DNA, 619 bp, Homo sapiens; identical to SEQ ID NO: 10786
  chr7:55145980-55146599
  hypo

SEQ ID NO: 17091 - DNA, 61 bp, Homo sapiens; identical to SEQ ID NO: 9943
  chr7:64974448-64974509
  binary

SEQ ID NO: 17092 - DNA, 62 bp, Homo sapiens; identical to SEQ ID NO: 13012
  chr7:6570393-6570455
  binary

SEQ ID NO: 17093 - DNA, 130 bp, Homo sapiens; identical to SEQ ID NO: 10789
  chr7:69064053-69064183
  binary

SEQ ID NO: 17094 - DNA, 200 bp, Homo sapiens; identical to SEQ ID NO: 10790
  chr7:69065161-69065361
  hyper

SEQ ID NO: 17095 - DNA, 210 bp, Homo sapiens; identical to SEQ ID NO: 8732
  chr7:7605822-7606032
  hypo

SEQ ID NO: 17096 - DNA, 164 bp, Homo sapiens; identical to SEQ ID NO: 13014
  chr7:77324199-77324363
  hypo

SEQ ID NO: 17097 - DNA, 137 bp, Homo sapiens
  chr7:808392-808529
  hypo
cgtcagcgtgcttctttttcccatcccaggagttggacttgacctgtggacatttggctgttttctttttgtttttaagccagaaacactgtcttgtttccagtttaagatgtagagagggtgaaacagtcagaaac

SEQ ID NO: 17098 - DNA, 242 bp, Homo sapiens
  chr7:808577-808819
  hypo
gactcgtgctctggcgggaggctcaagtcaggcgtcccagcagcttcggtgcaacgcctcctgcccggctgcgtggggaggccctccaagacaccagctggtctcaccgcgaggcctgacttcgagccagagcagcgagtacattgcgtctccgtgtggcaagggcaggtgcgggggtctcagtccactaccgagcagcctgctctgatgactggcggcgccagggagaaggctcacatcgc

SEQ ID NO: 17099 - DNA, 382 bp, Homo sapiens
  chr7:808848-809230
  hypo
cacagttgcttggataagccagtggacgctccctctacactggcccggggccagagcgcctccttctgcggccccaacccagtccccaccctgagccttcagctcctgggcctgcaggctgagcctggcaggagacgctgcagggactctcagagctgtccttgccctgtcattcatggagacttacagggaggcggggcggccctactgcagtggggaccccttggggcgtaggatgcacagtgcaggcgcccaagcctcgcgcccaccggagagcagccacggtgcaggagcttggccctgagtgtgggcggggtgagggctgcaacgctgagaagcagatattaaagaagttctttcactgaaacaattgattttggtc

SEQ ID NO: 17100 - DNA, 59 bp, Homo sapiens; identical to SEQ ID NO: 10791
  chr7:834245-834304
  hypo

SEQ ID NO: 17101 - DNA, 317 bp, Homo sapiens; identical to SEQ ID NO: 10792
  chr7:834873-835190
  hypo

SEQ ID NO: 17102 - DNA, 45 bp, Homo sapiens
  chr7:87258398-87258443
  binary
tgagcgcgcagctccttggacaggggcccgggtctggacaccgtc

SEQ ID NO: 17103 - DNA, 171 bp, Homo sapiens; identical to SEQ ID NO: 10795
  chr7:965802-965973
  hypo

SEQ ID NO: 17104 - DNA, 501 bp, Homo sapiens; identical to SEQ ID NO: 10796
  chr7:966009-966510
  hypo

SEQ ID NO: 17105 - DNA, 80 bp, Homo sapiens; identical to SEQ ID NO: 8735
  chr7:99155672-99155752
  hyper

SEQ ID NO: 17106 - DNA, 70 bp, Homo sapiens
  chr7:99723240-99723310
  hypo
caacatagtgaaaccccaattctacacacacacacacacacaaagaagactgcagggctggtggtgcagc

SEQ ID NO: 17107 - DNA, 430 bp, Homo sapiens; identical to SEQ ID NO: 13024
  chr8:104511554-104511984
  binary

SEQ ID NO: 17108 - DNA, 48 bp, Homo sapiens; identical to SEQ ID NO: 6287
  chr8:105236123-105236171
  hyper

SEQ ID NO: 17109 - DNA, 226 bp, Homo sapiens
  chr8:109799189-109799415
  binary
cgatttcctttgcagctccctaatccggggtttccattctcagtggagaatggataatcccaggggaccagctaaagactcttttcttccgtcctctccctctttttcctctgatctgcttaaaagcccagttaacgacattgcaccttaaagcgaggggacacgcactttccctcgtccatctgtcatcaattaaaagcattaatatttgctttaaactgacaca

SEQ ID NO: 17110 - DNA, 42 bp, Homo sapiens
  chr8:109799903-109799945
  binary
aggggcggtccctgcatccctcctgtctctgtctcctcccac

SEQ ID NO: 17111 - DNA, 100 bp, Homo sapiens; identical to SEQ ID NO: 6288
  chr8:110986113-110986213
  hyper

SEQ ID NO: 17112 - DNA, 174 bp, Homo sapiens; identical to SEQ ID NO: 6289
  chr8:110987222-110987396
  hyper

SEQ ID NO: 17113 - DNA, 151 bp, Homo sapiens
  chr8:11540276-11540427
  hyper
cgtagtagtccccgtttgtgcaaaaacacctcttggccgtggcgatgtggggagggagtgtggtccaatagtccttctcacttctcagaggttgacacagaatctaacagttaccctcttagaactactccggagaattcggtaggtagta

SEQ ID NO: 17114 - DNA, 275 bp, Homo sapiens
  chr8:11540456-11540731
  hyper
ttaaatgctatgggtgtggggacaagatactgggttcagagaaagttctgggaagagtcttgaggtggaaacagcctcggtgcgcgggggtttctcgacagctctctggtgtctcttaccccctaggttttcccagccttctcgccggattgccttggaaagctcttggtgtggtggccactggggtttgctccagcagagataatggaggggctcgctatctaatctggacagcagcaggaacaatccattagacctcagcatttatccggagc

SEQ ID NO: 17115 - DNA, 271 bp, Homo sapiens
  chr8:11540851-11541122
  hyper
cgtattatgcttgctgatgccggtaaatagtaattctacccattgtgactgttaggaagtagcagaatccttttgggttggaggtatcgttttttttcttttaagaagttcaatgagctttacattgtctcattcaaactcacccatcaaggggcgcggttcgattccaactttcaccgtattccttgagactaggtagactaaatccatccccccattctttcattcattcattcggcaaacatttaccaagctttcctctgcgctgggc

SEQ ID NO: 17116 - DNA, 155 bp, Homo sapiens; identical to SEQ ID NO: 13027
  chr8:11554731-11554886
  hyper

SEQ ID NO: 17117 - DNA, 55 bp, Homo sapiens; identical to SEQ ID NO: 13028
  chr8:11554915-11554970
  hyper

SEQ ID NO: 17118 - DNA, 141 bp, Homo sapiens; identical to SEQ ID NO: 13029
  chr8:11555521-11555662
  hyper

SEQ ID NO: 17119 - DNA, 541 bp, Homo sapiens; identical to SEQ ID NO: 7562
  chr8:121823361-121823902
  binary

SEQ ID NO: 17120 - DNA, 44 bp, Homo sapiens; identical to SEQ ID NO: 6624
  chr8:126044399-126044443
  hypo

SEQ ID NO: 17121 - DNA, 311 bp, Homo sapiens
  chr8:133493185-133493496
  binary
agcccggtgccagccgccctcccgcccgccagccacacgcgccgccgccgccgcctcctccctcctccgcgctcccacccgcgcccctccccgcccgttccagcctcagcctgtcagcagcagcagcagcgagcgcgccgcgggccgagagcacgccgcgtccctccctccctccttccccggggtggggccccattgtcccgccccgtcgcggcgggaggcccgggcggcggcgccccgcctcttcccgccgacccccaccgctgattgtctggggacccaggatcgcctgggctaccgccgcccccgtt

SEQ ID NO: 17122 - DNA, 840 bp, Homo sapiens
  chr8:142240180-142241020
  hypo
cggtaaatgaattacatgtcagaggccgcattagactattttccacaacacagccggcccggtgagtagactcttggaagtaggtttcccagaagctgaagaagcacaggcctctgtttctgcatcaccgactcaaataagacccactgtggctgtcagggctgggccctggaggtctttaaagttaaaggtgctgtcagagcaccccatctcaacaagggagggccgctcctgaagtccccgcccttccatcagaaagcctctcaggacagaaggcagagagggaagcggccgcaaagacccatgggtgccgagggttcccagcacggccaacagggccctgcacactcacaggacagtccttgtattggagacaaacagctgtgccggagaggggtcctgagacagcagctccggtggccacgtgaaggtctgaagccccaagcgtgcccagctccaggatggggtaagcagcgggggaggtagggccctggtggctggggggccgccaggagcagcgcccaggccagtgctgcctctgccgcccggccttgctgcccgagcgcacgctgtgtctggggacagtccggccgctgccccggcacctatacctgacactatcttcctgtggaattagccacctgaaaagtctcctgcccagggaagtgcaatgctgacactgtccattttctgaagaaatgaaaagaagagaaatgctgccagagagcatgtggcacaggcgtggtgagtgcattctgccagccaaattgggaacgtggcactgatgacggccccaacgacgcggaaccaggcctgccccacccggggatccaggaatgc

SEQ ID NO: 17123 - DNA, 121 bp, Homo sapiens; identical to SEQ ID NO: 9970
  chr8:143531858-143531979
  binary

SEQ ID NO: 17124 - DNA, 102 bp, Homo sapiens
  chr8:144512372-144512474
  binary
gaagctgggcgaggagggcacggaggagcagggcgtgctgagcggcgtcgaggacagcgagcctggcggcaggcggtggcagaagcgctcggcctcgggagg

SEQ ID NO: 17125 - DNA, 173 bp, Homo sapiens
  chr8:144656945-144657118
  hypo
aggacaagctgtggggaaaagtgagtgattcgtgttgtttccagtcagccccgctccgagtctcagggggactgccccgcacacagactgttcaccagggcctgcagcctctcggacagcaccacctgcagggagcagaggacaggagcggtgggcagggtgagggcgggggc

SEQ ID NO: 17126 - DNA, 214 bp, Homo sapiens
  chr8:144658291-144658505
  hypo
tgactacgatgaggactgactccagccagggcacctggaacctgccgcgtgggtggagaaagggtgggggccacccctcgggtcttcctgattcaccctggtgtccccctgctccccgccccgcctcagtcaaggacacctgtgctcaccttctgcttgggagctcctagggagccccaccacttacttccctgccacggcctgcagtatcacc

SEQ ID NO: 17127 - DNA, 92 bp, Homo sapiens
  chr8:23399632-23399724
  hypo
tccatatgtgatgagacagtgatcccatagattatagtggagctgaaaaattcctattacctaggggcatcacaacgcattgcatttcgccc

SEQ ID NO: 17128 - DNA, 172 bp, Homo sapiens
  chr8:24771632-24771804
  hyper
cgaccgctttgccggctacatagagaaggtgcactacctggagcagcagaataaggagattgaggcggagatccaggcgctgcggcagaagcaggcctcgcacgcccagctgggcgacgcgtacgaccaggagatccgcgagctgcgcgccaccctggagatggtgaaccac

SEQ ID NO: 17129 - DNA, 88 bp, Homo sapiens; identical to SEQ ID NO: 9979
  chr8:25904367-25904455
  hyper

SEQ ID NO: 17130 - DNA, 106 bp, Homo sapiens; identical to SEQ ID NO: 9980
  chr8:26267649-26267755
  hypo

SEQ ID NO: 17131 - DNA, 227 bp, Homo sapiens
  chr8:38326050-38326277
  binary
cctccgcgcgctgcggctgcaccggcgtcccggctcccgctagctgccgcccgccgccgaggacgccgcgcctgtggccgcaagagcgctccgagcgctatgcgccggcggggcgcgagggctcgctctctcactcccacccgcgctggtccctcctccgcctccgccccctgcagctgcctgctgggccttgtagttccccagccgcggccccaaaggacggggag

SEQ ID NO: 17132 - DNA, 294 bp, Homo sapiens
  chr8:42333256-42333550
  hypo
cgaccacattggatacaaggcaagcagaaacatggaggatgagtcaggagcccgctgcatggcttaggcatgagatgaggcatccgggaccaggctgtggacggtggtgggtgggagggaatacgatgatttaagagaactgcagcggcaaaatccaacaggaccagatggtggattaaacatgggggtggagagaggatacatggtttatggaaccgaagtgaaaaataaccgagtgggtttttcttctcttttgcattgtttttagttttgctttttggggctaggatgggg

SEQ ID NO: 17133 - DNA, 410 bp, Homo sapiens; identical to SEQ ID NO: 14340
  chr8:48292766-48293176
  hypo

SEQ ID NO: 17134 - DNA, 43 bp, Homo sapiens
  chr8:495481-495524
  binary
cgtggccacgtccgctcgggtcaccaaggcaacggccgggagc

SEQ ID NO: 17135 - DNA, 69 bp, Homo sapiens
  chr8:495635-495704
  binary
cggggcctgggcgccgggcatccgggactcatcccctccggcgcccgaggtcgcgggatagtgggggcg

SEQ ID NO: 17136 - DNA, 177 bp, Homo sapiens; identical to SEQ ID NO: 10812
  chr8:54795170-54795347
  hyper

SEQ ID NO: 17137 - DNA, 117 bp, Homo sapiens; identical to SEQ ID NO: 5852
  chr8:56014011-56014128
  binary

SEQ ID NO: 17138 - DNA, 261 bp, Homo sapiens
  chr8:65492407-65492668
  hyper
tataattctcgcccggaagggtaatttagcacaagctgagacagcagtggcgagggaagggcagtggggggtggggtgcggtgggtgggggcgtctgctttccacaggactcccaggcttcgccgccgatctacaatttgctgaaggagcaaagaacatcctcggctctaagtagggcttttagtgtgctcattgatgagtgaaagtcgccacacatgtcaagctaaaggcagttgttgggttactaacaggacccagcgc

SEQ ID NO: 17139 - DNA, 267 bp, Homo sapiens
  chr8:65494311-65494578
  binary
ccagctcggcggctgcagcggcagcagctgctgccctgcacccggcgctcggcgcctacgagcaggcagccggctacccgttcagcgccggactgcccccggctgcctcctgcccggagaagtgcgccctgtttaacagcgtctcctccagcctctgcaaacagtgcacggagaagccttaaacacacccccgaaaaacacaagaccgacccaaaatctagaggaaagcgaaaagctgctccccaccccctttattttggtcctctc

SEQ ID NO: 17140 - DNA, 38 bp, Homo sapiens
  chr8:69243994-69244032
  hyper
tttttcttttcttttctttccttctttttttttttttt

SEQ ID NO: 17141 - DNA, 32 bp, Homo sapiens
  chr8:71017208-71017240
  hypo
cgtgagccaccgcgcccagatgatttggcttc

SEQ ID NO: 17142 - DNA, 55 bp, Homo sapiens; identical to SEQ ID NO: 5856
  chr8:72756949-72757004
  binary

SEQ ID NO: 17143 - DNA, 181 bp, Homo sapiens; identical to SEQ ID NO: 10818
  chr8:73449197-73449378
  binary

SEQ ID NO: 17144 - DNA, 208 bp, Homo sapiens; identical to SEQ ID NO: 10819
  chr8:73449432-73449640
  binary

SEQ ID NO: 17145 - DNA, 77 bp, Homo sapiens; identical to SEQ ID NO: 6309
  chr8:75897394-75897471
  hyper

SEQ ID NO: 17146 - DNA, 172 bp, Homo sapiens
  chr8:76316995-76317167
  hyper
attgagcccgcgcggggaggtaaggactccggcgtgggtgccaccgcggttgcgaaaaatcgggttctgaacccggtcagcaggagtggcagcgccccagcagcacctaggcaggaagaggacacttcccgttcgcgtttggtgatggtttcatgtaccaggacatgggtgc

SEQ ID NO: 17147 - DNA, 99 bp, Homo sapiens; identical to SEQ ID NO: 8777
  chr8:82193698-82193797
  binary

SEQ ID NO: 17148 - DNA, 111 bp, Homo sapiens
  chr8:8560686-8560797
  hypo
cggtggacgtcctcgacggggaggggtgggagtcccaggacgctccctcgtgcagcacccacccctgcgacagctcgctgccctgcgactccgacctctagacgcttgtag

SEQ ID NO: 17149 - DNA, 42 bp, Homo sapiens
  chr8:8561032-8561074
  hypo
tttttgctgaagaatatatggaaagggtggcatttgcgtcac

SEQ ID NO: 17150 - DNA, 224 bp, Homo sapiens
  chr8:97167855-97168079
  hyper
ttccaaggctgttccctctttccggggaaataaagcctagattggaaccttctgcccagcttcctcatttggccgtctggtctgcattagtgtttttataagggactcaaacaaatcgaatacaaggtcaccaaataattaacagttgtgaattccctccgtccccattaaaatacttccctgcttatatttcattttcggtttgccaacgacaacagggtacc

SEQ ID NO: 17151 - DNA, 360 bp, Homo sapiens
  chr9:126771808-126772168
  hyper
cctcccgagagtggagttgcaccaaggacaaacactctagcgtcattacaaattttttctgccccttgggcgacctccagatgaaccctggtgactctcagattggattttcattccttactttctttgaaagaaagtgccccagatgcgtcaataaaacatgcctatgtattcgtgtaggcgtccgcatgcctgcgcgccggccgtgtgcaggcgccgaagcacacgtctgtgtgaacacacgggcacgcgcgtctttgggtttagtggtccttccctcgcgttggggcatctgtacacatgcagaatatacacatatgattgtaacttcaagttttttcaattatgcaaaacgacctc

SEQ ID NO: 17152 - DNA, 168 bp, Homo sapiens; identical to SEQ ID NO: 10830
  chr9:129485513-129485681
  hyper

SEQ ID NO: 17153 - DNA, 166 bp, Homo sapiens
  chr9:131821444-131821610
  hypo
cggaaggagtttgcagagaagctggagtccctgctgcaccgtgcctaccacctgcaggaggagttcggctccaccttccccgcagacagcatgctgctagacctcggtgagctgggcccagtgcaggtggggtgggcgtggagggtggcagggatggaggtgagga

SEQ ID NO: 17154 - DNA, 41 bp, Homo sapiens
  chr9:131821644-131821685
  hypo
gcgtccaatgaatcagaatccccagggctctccgacctcgc

SEQ ID NO: 17155 - DNA, 426 bp, Homo sapiens
  chr9:137017050-137017476
  hypo
cgcgtgagatcataacttgtctgcttacgcttttttgttctctttgcttcgaagtcgcatctgggacaccgcctcaggccagtgcctgaagacgctcatcggtgagtgtggctctgtgtgggggctgggtctgtggggagggcctcccctgctgggttcactgcccctgttcttcaccagctcctcctccctcctctgccctgggtccgcccctgcaggaggaaccttcctccgtgtccgaccgttccgccagctccccctgaccgcccgctggctctgttgctccttctggtgcagttttcctgccatggcctttctcttgggccagcctggggctcctccacctgtgctgtcggcctcactccggctgctcactggagtcctctgggcagccccattgcctcctggcttcgggcccctgctgtc

SEQ ID NO: 17156 - DNA, 99 bp, Homo sapiens; identical to SEQ ID NO: 6641
  chr9:138743599-138743698
  hypo

SEQ ID NO: 17157 - DNA, 142 bp, Homo sapiens
  chr9:138774077-138774219
  hypo
cgccttagtgcagcttcctcattcgacaggaatgacactctcttcaaccaccgcacggcacccgcagtctcaccgggaacgccatgggagcaaccaaacaaaggcagtgcaggaggcaccgagaatggccctgacccagaac

SEQ ID NO: 17158 - DNA, 292 bp, Homo sapiens; identical to SEQ ID NO: 10843
  chr9:139506149-139506441
  hypo

SEQ ID NO: 17159 - DNA, 140 bp, Homo sapiens
  chr9:139740877-139741017
  hyper
ggcgcaccgagaccatgttcaacgcctgcctctacttcaagtcctgccacagctgctacacctactactgctcgcgcctgtgccgccgcgaggactgggacgcccacaaggcgcgctgcgtgtacggccgcgtgggcagc

SEQ ID NO: 17160 - DNA, 31 bp, Homo sapiens
  chr9:139741046-139741077
  hyper
cgacagcggcccggtgcaccgcgctttctcg

SEQ ID NO: 17161 - DNA, 43 bp, Homo sapiens; identical to SEQ ID NO: 11964
  chr9:139809677-139809720
  hypo

SEQ ID NO: 17162 - DNA, 84 bp, Homo sapiens
  chr9:140107955-140108039
  hypo
cgaggccgcctgctcccacccacacaggctcattctctgcgagcagaggacctgctgcttggcaccctggcagctgccctggtc

SEQ ID NO: 17163 - DNA, 180 bp, Homo sapiens
  chr9:140108461-140108641
  hypo
agggttctggggctgtacccgccgcctccgggcctcactgagatccctcccggagtcccgtgagtgtgggccccgggtcacccacaggcgcagcagacccaacctggcctggggacctcgccctgggtccctcccgtgtgggtgggcggcccctggggagtgggtcctggtctgaccagc

SEQ ID NO: 17164 - DNA, 184 bp, Homo sapiens; identical to SEQ ID NO: 14383
  chr9:140400692-140400876
  hypo

SEQ ID NO: 17165 - DNA, 517 bp, Homo sapiens; identical to SEQ ID NO: 14384
  chr9:140400905-140401422
  hypo

SEQ ID NO: 17166 - DNA, 69 bp, Homo sapiens; identical to SEQ ID NO: 10849
  chr9:140682727-140682796
  hypo

SEQ ID NO: 17167 - DNA, 175 bp, Homo sapiens; identical to SEQ ID NO: 10850
  chr9:140682922-140683097
  hypo

SEQ ID NO: 17168 - DNA, 63 bp, Homo sapiens; identical to SEQ ID NO: 8817
  chr9:37034135-37034198
  hyper

SEQ ID NO: 17169 - DNA, 242 bp, Homo sapiens; identical to SEQ ID NO: 14395
  chr9:37035886-37036128
  binary

SEQ ID NO: 17170 - DNA, 316 bp, Homo sapiens; identical to SEQ ID NO: 6326
  chr9:6644554-6644870
  hyper

SEQ ID NO: 17171 - DNA, 102 bp, Homo sapiens; identical to SEQ ID NO: 10027
  chr9:77111662-77111764
  hyper

SEQ ID NO: 17172 - DNA, 168 bp, Homo sapiens
  chr9:80911724-80911892
  hyper
cggccagattgcgggctcaaggggcgaaggcaggttggcaggggcagcctcttcccgccgcccacaatcctcgggcgggcgcgcagccgagccggctcggctggctggcgcaatctcgcgcgctccttgcattgatcaaaaatgggggttgaaacagtaaacgcgagg

SEQ ID NO: 17173 - DNA, 444 bp, Homo sapiens
  chr9:80912036-80912480
  hyper
ggctgcagactctcaccgcagcggccaggaacgccagccgttcacgcgttcggtcctccttggctgactcaccgccctggccgccgcaccatggacgcccccaggcaggtggtcaactttgggcctggtcccgccaagctgccgcactcagtaagtccccgcgagcgggcgccgggagtgaggttcaggcgggagcacgcacgcgggtgggtttgcatccctgcgtgtggcagtcggattcccgctccctgccttgagtcccctaggcgctttgcatcagcgtgcacagcgggatcagcagctccggcaagcgggcttcgggaagaatgcagttggtgaggaagctcggcgaggcgtgcccgtgcagctgcccctggccctgactgctggtgcgaggcagtgcacgactcagctggccggggcctgctgtcccgccggtgccac

SEQ ID NO: 17174 - DNA, 244 bp, Homo sapiens; identical to SEQ ID NO: 10028
  chr9:87283766-87284010
  hyper

SEQ ID NO: 17175 - DNA, 949 bp, Homo sapiens
  chrY:16636193-16637142
  binary
cgttccaataggcacaccatccccacagccctagaaaaggcaaccaccacccgctccttcctcccgcaccatcccatctcaaggctctctgctgacccgggccgatttcatctggtctcttctcccccgcttcccacctcccaattcccgcgcagctcggctccgttccctcccactcccctaggcggaactgaaagcgaagatcagccaagagcacagtcggaggcggcagagacggtggcgggtgagctaggggctgtgagacgaagcagggagagagtgaacttcagccccgtcccctccccactgccacggctggggcaacccaacccgcgcctgaagcggcttggcttgacctgcggaagcgcgggccgggatggcgtggggagagggaggtaggtgccactgggctgcagatgacgagtgggttgggggcttgctgtgggacaagaggttcaggttccggcctgcgccttccactccgcggtggcgctctctgcctgcggttttccaggaggccgatctaccccagggacactctcatccttcaggcggtctcctggacgccctttcctccccttgcctcccagcctgacctggctctttcgcccctcggagaaccggtaggttggggtccctcggcgggggtctagtgagccgagtcgcgagctttgcgcccccggtatctaggccccgtgccgcgcgcaaatccgggcccaggcgtacagttctggagcctagtcgccgccagacacagggccctttgtacccggaggagcgggagcgggagcgggggcgtcagggcaacccttgcaccccagaggcctgcctaggaccaccctgggaacaaatgtctcgctcggaaaacgaggtgaacccggaggatgtcctacgcatcatacccctccccttcttgagaaggctttttctttttttctttttttttccc

SEQ ID NO: 17176 - DNA, 79 bp, Homo sapiens; identical to SEQ ID NO: 6342
  chr1:100928315-100928394
  hypo

SEQ ID NO: 17177 - DNA, 60 bp, Homo sapiens; identical to SEQ ID NO: 6343
  chr1:100928423-100928483
  hypo

SEQ ID NO: 17178 - DNA, 306 bp, Homo sapiens; identical to SEQ ID NO: 5867
  chr1:108506290-108506596
  hyper

SEQ ID NO: 17179 - DNA, 66 bp, Homo sapiens; identical to SEQ ID NO: 7639
  chr1:110672768-110672834
  hyper

SEQ ID NO: 17180 - DNA, 818 bp, Homo sapiens; identical to SEQ ID NO: 6654
  chr1:113498720-113499538
  binary

SEQ ID NO: 17181 - DNA, 47 bp, Homo sapiens; identical to SEQ ID NO: 14426
  chr1:116711292-116711339
  hyper

SEQ ID NO: 17182 - DNA, 76 bp, Homo sapiens; identical to SEQ ID NO: 6344
  chr1:1168275-1168351
  hypo

SEQ ID NO: 17183 - DNA, 462 bp, Homo sapiens; identical to SEQ ID NO: 6345
  chr1:1168984-1169446
  hypo

SEQ ID NO: 17184 - DNA, 517 bp, Homo sapiens; identical to SEQ ID NO: 7646
  chr1:12226892-12227409
  binary

SEQ ID NO: 17185 - DNA, 207 bp, Homo sapiens; identical to SEQ ID NO: 7647
  chr1:12227438-12227645
  binary

SEQ ID NO: 17186 - DNA, 79 bp, Homo sapiens; identical to SEQ ID NO: 7654
  chr1:151694406-151694485
  hyper

SEQ ID NO: 17187 - DNA, 674 bp, Homo sapiens
  chr1:154971706-154972380
  hyper
cgaccgtaacctcctagctggctgggttcgagaagccggggacctgcgcctcctggtggctgatcggaaggaggctgagtgcagaggggttgtcttgccttctctgggacgtggagttttggaaactgttcccctgagcttcctgaagctaaatttgcctcccccggccttggggggcgcagagatcccggcggcgattagcgctgcgcggcagccggctccaacccagaggcccggaataggcgcggagttataaatagtgccacccgcaggtgttggggggagtcggcgggaggggggtacccctggcggccacggccccttcaggtgggttgggcggtcgcggtgggagcgctggggggcggggggcgtggggggtctgcggtctgagcgcccccagcggtttcctgggcggcgggtttttcgagggaagcggaggcagcggaggatgggggggagcagcggagaagaggtgggcgcctggcgcatgctgacgctccgcttgcagctcagccccccacattccgaaacaggcccccagacccactcacgcaggaccccgcccaggcaaagcctcgcctttcttaacacctgaaggcctcattcccccaggttctgcaagcatctaacttctatgcttctacccttcggcgcacgtggcccggccagtccgc

SEQ ID NO: 17188 - DNA, 59 bp, Homo sapiens
  chr1:155311726-155311785
  hypo
cgagaaatcttttttgggagtgagcttcttggggaagtgatcaaaagcatagggtttgg

SEQ ID NO: 17189 - DNA, 467 bp, Homo sapiens
  chr1:156255276-156255743
  hypo
cgttcccggatccccctggctggcgggacattgaaccagagccccctgagtcagaaccacttaccaagctagaggagctgcccgaagacgatgccaacctgctgcctgagaaagcggcccgtgccttcgtgcctattgacctacagtgcattgagcggcagccccaagaagaccttatcgtgcgctgtgaggcaggcgagggcgagtgccgaaccttcatgcccccccgggtcacccaccccgaccccactgagcgcaagtgggctgaggcagtggtgaggccgcctggctgttcctgtgggggctgcgggagctgtggagaccgtgagtggctaagggctgtggcctccgtgggagccgcactcattctcttcccttgcctactatacggggcatatgccttcctgccgtttgatgtcccacggctgcccaccatgagttcccgcctgatctacacactgcgctgc

SEQ ID NO: 17190 - DNA, 916 bp, Homo sapiens
  chr1:159894399-159895315
  hyper
cgaccacaccctgggccgttacaacagatgagtcacccaccgccctcccgccgctggggtgacgcagtggtctgggcagcccgcccgtccgcccgcggccaccaccggctttcccagcagcagggggcacccggtgggggcagcggcgctcgggcagggtaaaagcagccaccaccacccccacaacctcacacagggcaccccggggcgcagtcagggctgcagcacccagacccccgaggtcaggggaccgtcatagagatgactggagcttcacagaaggtcaccgtgcgacccatgcagagccccctagccccagcccgtgacctcaagtccccagaatagcaagctagcaggaacaggaatgaaaagggcggcctcggggactcagagggcacgcagtgctcacacgtgctcctggaaccaggaagtgaagggtcgcgcgggaaagcccaggagcacgagctggcccagggccggcgccacgacccggggtcactcggggccagccagctaaagtccgacgcccttttttcccctcgccccagtgaggactcagcgatggagcccgcgggtggggctcagtccctgagtccctgctccagacggacgccctgtctatgcatgggctaacctcgcctgacctcatcgtccaacaatgtcgggtcagggcttggggacaggacctgacagcacggggcggggtaaagtagtcaccggacccttgcctggtaccagcccttgatccccgagctcgctggagcaagttcaaagcgctggcttcttgctttctacacagcacgcacatgtccccgacccccgtacccccgacctgctcaccgttcaagcgggctggagagcggcgcactgactcaaggcaagggctgcagctgcaagtggtgcgccctgcccagcc

SEQ ID NO: 17191 - DNA, 56 bp, Homo sapiens
  chr1:164637890-164637946
  hypo
cgccttaccttccccaggcgcagccaacacttgacatctttttatcagatgagctt

SEQ ID NO: 17192 - DNA, 198 bp, Homo sapiens
  chr1:164637985-164638183
  hypo
agccacagcccctcagcttgttagactgaaagaatgtgccgttttaattaatgatatgtaaatatccttgaatgggccgcatttgcatattaagagagatttgcggaatctgcggagtaatatattttaattaaggattaattaaaaataatgggaatttcatttcgcctggcagaatccgtttagattttagcacac

SEQ ID NO: 17193 - DNA, 148 bp, Homo sapiens
  chr1:16640899-16641047
  hypo
cgcctgaacgtgaatctttaatcctgcatttactatccgtgtaaataagttaactgtgtttcactcagttctgtcatctataaaatgcaggatcttctagtcagagtttgctgtgagaatgtaaagcagttacaatagtgcttgacac

SEQ ID NO: 17194 - DNA, 640 bp, Homo sapiens
  chr1:181059009-181059649
  hyper
cgtggccttctgagcccttggcccccctgcggggaggaggtggagcagcgggcgtccccgaagtgagggccaggcccttcccggctgcgaggacgcccagagaccgcgggcgctgagcgcgttgggcagactggttgcctctgggcatcgcaaactgcccccgggcgcatctggcttatctggagacctgggagcttgaggctcattggaagaggacgatcgttaacttttgtgtttgtgtatgtctgtgtatgtaagtttgtcttgtggcattaagactattttgctcttctggaatgcaccactccttccccagggtttaagagattgggggcagacagggactttcctctgccggctgcgtggagaaggaagcggctaaaaggtttgggccggggagttccccattcgttctccggggagggagggactttacacctacccctcaccggaaagctagacccgcttcagggccaggagtggcgtttccgcacaggatttcctaagacgagagggatttagccaagagcacagacttggattccttctgtccctccccacctttctctcccaatgaagaaacgtttatatcctgtgattactctaggaaaggggcgtattaacggtcctttgcttcccc

SEQ ID NO: 17195 - DNA, 307 bp, Homo sapiens
  chr1:19283560-19283867
  hyper
cgctcctctcccacgtcgcctgccgagagggctccgtttctctgtcctctctgcccgcaatgcccctggccccaaattccttcggatgtgcgcgaccgcggctggaagggctgggggaccacagtatccgaaggtgcatcggcaccccacccccactctagcctggggaggcccagatcgacctttcggggataagagggcgcccgtgccccacgctgcggacccgggggtgggctcctcgaatgctagctgcgggccttgtcctctcgagatcggcccgggcacagctaagcccgctggttccccc

SEQ ID NO: 17196 - DNA, 34 bp, Homo sapiens
  chr1:19518000-19518034
  hypo
cggcccctcgctctgacatctttttcttcacaac

SEQ ID NO: 17197 - DNA, 311 bp, Homo sapiens
  chr1:201228906-201229217
  hyper
cgcccagagagccgccctcttccgggaacctcctgctccggagccaggaagggctgccctttccccaccaggaggccaggcacgagctccaccagggtgtggacccccagggaaagtgcgccaggtgcctgggatgctcaatgggggacttgttccaggactgggaggctggcggggtgggggctgctgcttccctggagcagcacctgtcccccacccccacctcccgcgtcagtggagctgttggcgcttgcacccggcttcccaagcgatgagacacggctcccagccagccgccccaagccgctggc

SEQ ID NO: 17198 - DNA, 382 bp, Homo sapiens
  chr1:203595808-203596190
  hyper
cgaaccaggaagtaaccgcaagaatcgggccaccttaacagtagagtaatggtttggcctcgcgccaagtcccacctctgttccagctcctgctcctcccctctctcttcccgcactgcttggggagagctggtgagcaagagtctggcccgagttagctagagctgttgccatgacaagcattttcttaagaaagctctgctgttgagatcgtccaaagctgggggctgggagggggggcacgaacttcgtggggcaccatccctccgaagagagcaagatcagagacacccgcccagctctcctgcaccctttttctttcaggaacctgagaggtccttcccattggaggggcagggggaggagacccagcccactcccc

SEQ ID NO: 17199 - DNA, 72 bp, Homo sapiens
  chr1:203690606-203690678
  hypo
cgtgagagcaagtgcacaggtcaggaataagcgcagcttcacctcccagtgcttgctgtgctcccgctacac

SEQ ID NO: 17200 - DNA, 201 bp, Homo sapiens; identical to SEQ ID NO: 5872
  chr1:20512799-20513000
  hyper

SEQ ID NO: 17201 - DNA, 95 bp, Homo sapiens
  chr1:205631157-205631252
  hypo
cgagtgccgaatcgctgcaccagccggtccatgaccagagagaagaccagggagatggcgcactgcaggaacagccccaggctgcccatccgaac

SEQ ID NO: 17202 - DNA, 817 bp, Homo sapiens; identical to SEQ ID NO: 16205
  chr1:205631783-205632600
  hypo

SEQ ID NO: 17203 - DNA, 112 bp, Homo sapiens
  chr1:21690437-21690549
  hypo
cgattgttggatcatacgttaagagtatgtttgttttgtaagagactatcatactgtattccaaagaggctgtaccgtttcgcattcccatcagcaacgaatgagcattccc

SEQ ID NO: 17204 - DNA, 85 bp, Homo sapiens
  chr1:228225442-228225527
  hyper
cggccgactccccgccgcgtccggctgggagcacaatatcccagcgacggcgacaagattaagcacaaggggagagtgcaaatgc

SEQ ID NO: 17205 - DNA, 62 bp, Homo sapiens
  chr1:228225939-228226001
  hyper
aggtgggcagcccccgaggggaggcgcccgggcgtcggctccggcgggctccggcggggacc

SEQ ID NO: 17206 - DNA, 160 bp, Homo sapiens
  chr1:23411446-23411606
  hypo
cgcacagagtatacggaaacgagggagctttattggttacatattgtactgcagagccaacagagagcattcgcgccagaggatacatgcagacaggcagctccaatgatacacatgcacccaaggagccctgagccactgctttgccctggtttccagc

SEQ ID NO: 17207 - DNA, 46 bp, Homo sapiens
  chr1:244857971-244858017
  hypo
cgtgtgcgtcttattgcgacgctttccaaacgatgatgttgccttc

SEQ ID NO: 17208 - DNA, 195 bp, Homo sapiens; identical to SEQ ID NO: 14468
  chr1:2460612-2460807
  hyper

SEQ ID NO: 17209 - DNA, 414 bp, Homo sapiens; identical to SEQ ID NO: 14469
  chr1:2460898-2461312
  hyper

SEQ ID NO: 17210 - DNA, 443 bp, Homo sapiens; identical to SEQ ID NO: 7708
  chr1:2461988-2462431
  binary

SEQ ID NO: 17211 - DNA, 491 bp, Homo sapiens
  chr1:24648342-24648833
  hyper
gtcgcagcgctctgggtgcctggagcccgcagccctgggcagccccgggctaccgcagggcgcaagggatcctgggctgcggccgagggcgccggaagtcgccgccgaccgcctgggtctcgcaggaaaacagccggcgcccgcgagctgcccagcgtcgggttttcctgaaggtgcgtcggggcccccggggagctggagccgcaggcgacctccccggtgacctgttgttcccctctggagggccggccggcgctccaggcaggccccgttgacagcccaggaagggagagtttcgccgcaaaggggcttggcacacagtaggtctaaggcaccgaggcaggagcgtcccccgcggcctcgctccctgctctctgggccccaccgctgccgcctggagtctcccctcagcctcgcagagacgcgactcggttgggggaaggggactagaaccgtcgcagtcctgaccgcggccgccgccgccgttctat

SEQ ID NO: 17212 - DNA, 88 bp, Homo sapiens
  chr1:27058003-27058091
  hypo
cgacgctctcccagcaggctgcgtatcctcagccccagtctcagcagtcccagcaaactgcctattcccagcagcgcttccctccacc

SEQ ID NO: 17213 - DNA, 66 bp, Homo sapiens
  chr1:27113559-27113625
  hyper
cggcccctggcttcgtttggagggcagataactgaaaccacataaggctttggaatcctgagaaac

SEQ ID NO: 17214 - DNA, 530 bp, Homo sapiens
  chr1:27113714-27114244
  hyper
aactggccgctccccccaatagacggttttgttgagttcgcctctttttttttcttctttttttggccccacttcctatgagagaaactgcttgggtgagggaggtgaaaggagccctggagggtgttctctgaggttttcttcaccatcctcattagccacctgaggtggggctgaggactaaagtaggacagaaggtctctggtagatagaggaggggaaaatcagggggatcccccactttcttcacacccaggacgcagggtgccgctgccggccacagaaaccccaagaatgtttttctttggctattcagaggacatctattgtgtgtcaggccctgtgctgagctgttgttgcctgacagcaggaagagcgcggctctggtttctgtgaagaggctgcgggtcagcctccgactacaagagcctcggcccacaccgggaactcagtgaacgtcagcgggagctggggcaagagcactgactctgagacagcagcctccgctcactatttgaaggcggggtggc

SEQ ID NO: 17215 - DNA, 135 bp, Homo sapiens
  chr1:28198925-28199060
  hyper
cggggggcggggcttcggcggggcggggctgcagggctcccgcgggctggcggggcggcttcggcgtgcggggcggggcatcggcggggcggggctgcagggctcccggggaccgcccgcccgcccctcagtctg

SEQ ID NO: 17216 - DNA, 130 bp, Homo sapiens; identical to SEQ ID NO: 6707
  chr1:32410105-32410235
  hyper

SEQ ID NO: 17217 - DNA, 393 bp, Homo sapiens
  chr1:33937934-33938327
  hyper
cgacccctcagtagaactgggcccccttctgctcgagtgccctcccattgggcggtgctgttatccggaagcctatggaaaaggccaggatcgcaacaggtcccgcccccatgtgtcgcgcccgttccgatttgttccagtgccagggtccgttagaagatgacatatctattggctgaagacgtctgaaaggcagcaaacggagggggccgcccccggcgctcgcgcggttccttctgggaattgtggtctcagacgttccattcccagggtggcgccgctcggactccgcgtcccagcattccccgcacgagcccgggagcacttccgccctgttgtgaagtgggtgtctcggtgggtgagtccgggtggcggggcgggggcagctgagac

SEQ ID NO: 17218 - DNA, 138 bp, Homo sapiens
  chr1:35650183-35650321
  hypo
cgctcagtacgctattggaacagtaattaacagttcattataagtagttgatgtccatgtgtgttaagtaaatattttagaaggttccgtagtcaacgttcgtcgatacaatcaccaatgagtcgatccacaggtacc

SEQ ID NO: 17219 - DNA, 125 bp, Homo sapiens; identical to SEQ ID NO: 7722
  chr1:3697578-3697703
  hypo

SEQ ID NO: 17220 - DNA, 174 bp, Homo sapiens; identical to SEQ ID NO: 15378
  chr1:3700211-3700385
  hypo

SEQ ID NO: 17221 - DNA, 609 bp, Homo sapiens; identical to SEQ ID NO: 15379
  chr1:3700414-3701023
  hypo

SEQ ID NO: 17222 - DNA, 36 bp, Homo sapiens; identical to SEQ ID NO: 15380
  chr1:3701052-3701088
  hypo

SEQ ID NO: 17223 - DNA, 307 bp, Homo sapiens; identical to SEQ ID NO: 7723
  chr1:3705404-3705711
  hypo

SEQ ID NO: 17224 - DNA, 102 bp, Homo sapiens
  chr1:40781107-40781209
  hyper
cggcgtccttgtggtgcgggccggcgccgcctattggcgacgaggggcactacatctccgggcaccccgaagtccccacccccaccacagcgctcacaaagt

SEQ ID NO: 17225 - DNA, 39 bp, Homo sapiens
  chr1:41326952-41326991
  binary
cgagggggagaggacacgatccaagaaccagagtccgaa

SEQ ID NO: 17226 - DNA, 435 bp, Homo sapiens
  chr1:41327080-41327515
  binary
ctggagggacgccagggtcccagtccggtgccgggccctgcgcacacagccgccgcctccaccctcgcggagggcgcgcgcggggcccagtcgctgggtgcagggtccggcgggcagtcgggccctttctcctctccggcacgccgggcgggcgccggccgccctcagcagctcacggagccggcgggcggcgcggaccccaagtccgagaagcagtcgaactcgctctggcccaggaagagctcgggcagctcgcgcacgcggtgcagcccgagctccagctccagcgacgtcagcgcctcctcgtcgatgagttcggcgtccatgccgcccagggcgtgcgcgggcggcggcggggctgcggcgcttggcgccggctgcgggcccggggggcctcccggagcgttggggggcgcggccgcgcggccggggtac

SEQ ID NO: 17227 - DNA, 254 bp, Homo sapiens
  chr1:44170219-44170473
  hypo
cgagccatttctgggcacgtggcagcagtcgctgatctcccagctgaggggctgagcactggaatgctgtggctgcactggccccagtccatagaggggtcaactatgctggctggactggctgccttgttcctggcctaggacttagcttcataactatcacctgcaccgactaggctgaggtgctggtacttgccccaacccctacttttgtatttatatgtgtgtgtgtgtgtgcgtgcgtgcgtgcgtgc

SEQ ID NO: 17228 - DNA, 317 bp, Homo sapiens
  chr1:45284969-45285286
  hyper
cgctaacagctactgtctctgggaatagaacaaggagtttggttggcgcgatataccgcccctgaacctctagccacaataaggcttaattaatgaccggacgacttgaaagcgccttccactgtttatctcttaaatctgcaacgaaatgcaacaaaaacgcaagaaataaacaatagaagccagtcttactgcacactgcagaagccaataaaccccaaatgtagctcaaaacaaggtgtcacgcaaacttctgatttttttttgttttacactgaatctctgtcactctgactagagggcagtggcgcgatctc

SEQ ID NO: 17229 - DNA, 784 bp, Homo sapiens
  chr1:45285419-45286203
  hyper
cgccccagcttctccaataggtgggattgcaaacaggcaccaccacgcccgaataagtttgtgaacatttggtacaaataacaaatgaccaagttccttggttgtagttgcctaacttttaatacttaaaaatgtagcctcaggaaataagaggcctcaaaaaattgaataaaaactcacaactttctctccacggaaatctttagtaaaaggcgaaagatttatgcgctttgaagagaaacccgagtatattcgtgacttccgcttcgaacctcgcagggagaactaacacttaacacacttatggttgttggatgcctgcgtggtacgcactccctatatgtagtttatgcacacagatgcgtgtaagaggcatcatgctctaaaacagtgcagaaatgcgcgcacagagggagtgcaagcatcttgagggtatcttttcgtggtgcaccatgggtatgcaaatcacaggcggctccgggctgttccgcgccaccggggaagccatgggtcactgatctcctttgctctcctatgctcctctctgctggtcctcctgggacccgcaccccgtgggcggcgccgggtgcggagtcctttgcggagctggtgttcgtcccaggggttaaggtcctgtcccgccgtccttacccgcagtaagcctccgggcttagagagagggacggggaaacagacgggcacagacactcaggggcactgggacctcacaggaggcacgaccccacccctcctggaggagatggcatccgatccaattcacctc

SEQ ID NO: 17230 - DNA, 335 bp, Homo sapiens
  chr1:46908450-46908785
  hyper
cgagcccagagcgctgaagttcccagaaggaccgggagggggcgcccacccacattcttccccacctgagtctgcgctgacgatttcctgggcttatctggatcttcctgcagaaagtcagtcttatgtgaccctgtacaacctcctggactttcccgcgggcgtggtgcctgtcactatcgtgacactacaggacgaggaggaactggccttctacaaggggtgctacggagatagttctgacaaaaatttctcagaggtcagtttccttctccgagcctctcccggagcggggacaaaccagggctggttctctccgggttggggcccctgac

SEQ ID NO: 17231 - DNA, 189 bp, Homo sapiens; identical to SEQ ID NO: 14480
  chr1:46954676-46954865
  hyper

SEQ ID NO: 17232 - DNA, 392 bp, Homo sapiens; identical to SEQ ID NO: 14481
  chr1:46954904-46955296
  hyper

SEQ ID NO: 17233 - DNA, 836 bp, Homo sapiens
  chr1:48937304-48938140
  hyper
cgcgccgcgcacatacactctctctcactggaaagttaggagcgaggaaagaactctgaagtgatttgggaacgatctgaaagcgcgcaagttggaagtcgggttgaagccagcatagcggagcaggggtcaggcctctgcgtggccggagtgggagagcgcttctgagaacaagatggggcaggaccgaaggggcgtgaggtcgacgctccctagggatgattcggagggtgaaggaggtttgggggtggttccgggctctcggaggtgactgagggagtccctgagccaatgcccgggggtgggaggcgctaccggtactcactgagctgatctccagcgccagggcgcactgcagcgccttcaccttcggcatccgtgcggggaggggcggcggggagtgaccccggccacgggcccgagtgaggcggggagacctggggctgggcggggacggggaggagacgaggtggcggcggcggtggcagcagtggcccccaggccggggcccgcggtccagcctgggttccgccggagaagcagctgagcgcggggcgcagactcgttgtcatggcagccaggaggggcggggccggaagagaggccgcgcggggcactccagggctacccgcgctgggacgagcgctggaggcggagcttgacgaacgccgagcgaggcggagtcgggcagggggcggggcttccgaaggggcggggtgaggcaaggcagctcttctgtgacgtcaaactgcgcccaaagccggacgaaagggagctgctgtttgtataatgggacggtgctctgttcagggagttggagttcctgtaaggccgtc

SEQ ID NO: 17234 - DNA, 32 bp, Homo sapiens; identical to SEQ ID NO: 7729
  chr1:52194847-52194879
  hyper

SEQ ID NO: 17235 - DNA, 323 bp, Homo sapiens; identical to SEQ ID NO: 7730
  chr1:52194968-52195291
  binary

SEQ ID NO: 17236 - DNA, 387 bp, Homo sapiens; identical to SEQ ID NO: 7731
  chr1:52195348-52195735
  hyper

SEQ ID NO: 17237 - DNA, 64 bp, Homo sapiens
  chr1:59612305-59612369
  hyper
cggagaaacttcagagcggcaggtgccttcgtttcccgttacctgctgagtctagtcccttcca

SEQ ID NO: 17238 - DNA, 121 bp, Homo sapiens; identical to SEQ ID NO: 7733
  chr1:6046277-6046398
  hypo

SEQ ID NO: 17239 - DNA, 51 bp, Homo sapiens
  chr1:61716891-61716942
  hypo
cgtacaaataaaaatttcactggaaagggaactccgtgatctctttactac

SEQ ID NO: 17240 - DNA, 227 bp, Homo sapiens
  chr1:6474528-6474755
  hyper
cgagcccctgctccctgctgccccccaatggacctcgggtaacaagacaccacgtgtgtggggcgtgttctctagatccgttctcacgatcctgaaaccattattgagccttacagctgctttaagcgcccggggcttcatcagagcctttgaaaaccccaggtgaaactagttactcactgggaagcctcggtgtgtggctgccttctccctgatactgcatgccc

SEQ ID NO: 17241 - DNA, 220 bp, Homo sapiens; identical to SEQ ID NO: 7736
  chr1:6479997-6480217
  hyper

SEQ ID NO: 17242 - DNA, 293 bp, Homo sapiens; identical to SEQ ID NO: 8915
  chr1:65431047-65431340
  hyper

SEQ ID NO: 17243 - DNA, 41 bp, Homo sapiens; identical to SEQ ID NO: 14487
  chr1:65468262-65468303
  hyper

SEQ ID NO: 17244 - DNA, 336 bp, Homo sapiens; identical to SEQ ID NO: 14488
  chr1:65468660-65468996
  hyper

SEQ ID NO: 17245 - DNA, 45 bp, Homo sapiens; identical to SEQ ID NO: 14491
  chr1:70035044-70035089
  hyper

SEQ ID NO: 17246 - DNA, 92 bp, Homo sapiens; identical to SEQ ID NO: 14492
  chr1:70035537-70035629
  hyper

SEQ ID NO: 17247 - DNA, 34 bp, Homo sapiens; identical to SEQ ID NO: 7740
  chr1:70710406-70710440
  hypo

SEQ ID NO: 17248 - DNA, 62 bp, Homo sapiens
  chr1:78463737-78463799
  hypo
cgtgagccaccgcaccggcctctgtttgactatctttaaagctcttaaaacgatctcatttc

SEQ ID NO: 17249 - DNA, 155 bp, Homo sapiens
  chr1:85743342-85743497
  hypo
cgactatccccagaccgtattttaactactatggcgctgtgtaagaagcaacctgagaagtgtggatgaaaagctacaggtagagccctgggcccaagacggtggcttggacaacatgctaaataaactataaactagatggtatttgaagctac

SEQ ID NO: 17250 - DNA, 438 bp, Homo sapiens; identical to SEQ ID NO: 13190
  chr1:90308855-90309293
  binary

SEQ ID NO: 17251 - DNA, 115 bp, Homo sapiens; identical to SEQ ID NO: 13191
  chr1:90309490-90309605
  hyper

SEQ ID NO: 17252 - DNA, 768 bp, Homo sapiens
  chr10:102791390-102792158
  hyper
cgcagggtggggcagctggtcccaggaccggaagaatcctaagaatccttctgatgcacttgctcggatgcagaccgcgaggttcctggggtcgtctgcccctccacatctcaggggtggggctacggtctggggtgcagggctaggggttgggagcgtaaggagaccagggacacagtggagctaggggttacagagggggagcagggagagggctggggacatagaagaggcacaggcacgacaggaacggggctgtgaagtgatgcgaatgccgcgctgctacaagaggagcttgtggatactggggtaggagcccagggggacaagcaagccaaaggccattgccaaggcagccatcaagtaaacaagccaggcggtaacccgagtccctcccggcgcgccagcagaggaccgcccctccacaccgcccacctgcgcccggggctttctctctgggcacctagaccgcttgctgcagggctgggggtctgctgaggcccgccaggggactgtaaaccaagggagcagcgcccgcggctccagcccctcctccctttggctggggagggggccagaactgatccccgaggtgggattggctctgggaagcagcttagggcctggtccaggtggcccaggctgggggcatcgcctcgaatgacacccaccgccctcaggttctgccaatccccgtgcccaccgggtgggcgcggccgggaagctcctgcccctccctgctggtcggcgtcacgcgtgacgtcccgc

SEQ ID NO: 17253 - DNA, 225 bp, Homo sapiens
  chr10:1053566-1053791
  hypo
cgttacgctgtgtcttcatgttttactgcaaatgtgtctgcacttcaccatgtggtgttgacaacgttcctgtcccacagacgccttcctggtgtgtgctgcactgacgctggaggctgtgtccttccctctgtctttccttgtgtcctcggcgtggtcgggcactgactgtcagtcttgtgtaaagatgattttattgttgtgtgtttatgtaatgctgggtgc

SEQ ID NO: 17254 - DNA, 723 bp, Homo sapiens
  chr10:106097237-106097960
  binary
cggtggctttttttttctttttctttttctttttttaagagaaagcgttttggatggggagtcccgccccgggagtcttcaccaggcggccagaatggcaaagtcacagggatggggttgagggtggggttaggggtgaaggggcagagagttatttgcagcccaagagcaagtctgcacagcgtgaggtctggcccactaatagtcccgaaagaggaagcggcggggattttatccggcctgaagcagccccataacttcactaccatgaaccgagaaaaaaaaacttcacgcctattcctcccttacaggaagggagggaaggggaaggggaaaagggggcagcaaatgagcagggcgaaccggcttttctttcttcggtagcgctctgctcagatgtgagaagtaacgggtcacctggccactaggaacaaaaatgtggtcccgctctgggctccgaggctgcgcgcgcctcgaggaggagctgcccgcagccctggctggagcgagcgcccgggacgcatcccccgacgcggcgggaacaggatgcgggaccgcgaggagacaatacgcccgcctgggcacgcgcgctttaagggaagggggtctccaaagtcagcccccacccgggaggagcaggcgcccgcgctccccacaccctcctgcgccccctctgtcggcagccatctccgacacagctcctccgagctcgcgctctccatc

SEQ ID NO: 17255 - DNA, 165 bp, Homo sapiens
  chr10:106098025-106098190
  binary
cggtccccgccgcgggaggacggctccagcacaggctttgcgcgcaggtcgagggccgaggcgccgctgcttgcaggcggctgcggtggagcttgcggcccggcacttagaggggcgcgggcggcgatgcccccgctggctcccaccttctggcctgcagcggcc

SEQ ID NO: 17256 - DNA, 737 bp, Homo sapiens; identical to SEQ ID NO: 7757
  chr10:111767130-111767867
  binary

SEQ ID NO: 17257 - DNA, 164 bp, Homo sapiens; identical to SEQ ID NO: 7758
  chr10:114200406-114200570
  hypo

SEQ ID NO: 17258 - DNA, 208 bp, Homo sapiens
  chr10:114591706-114591914
  hypo
cggccgctgtacactcagcagccccgcgctcttgccggccgacaccacagtgtgggaatcgagaatatcggcttcggcttggaatttaaggaggaggagagaaaaaggatagctcggctggtcttcaatgattttcttgtaaaacttttacaagggagacttaggctgtttgatgtgttctagacaatcaaatgcccgccgagtctgc

SEQ ID NO: 17259 - DNA, 654 bp, Homo sapiens; identical to SEQ ID NO: 13204
  chr10:114708972-114709626
  hyper

SEQ ID NO: 17260 - DNA, 137 bp, Homo sapiens
  chr10:121702253-121702390
  hypo
cgtcagctatgttaacgtgctgtatgacaagaggaacctgctttctaagtctgctggacacgcgtgcttcttgaatccaaccagacaagcatgttttctcaaaaccacagtataagacaaggaaactgcacagattc

SEQ ID NO: 17261 - DNA, 125 bp, Homo sapiens
  chr10:12390701-12390826
  binary
cgaggggactgcggggcagacgatcacttctttccactgagtctctgggaggagacagggagatgccagaaggggccaagcgtgagccagggcaaccaggccggccaggcccgccggccgctcca

SEQ ID NO: 17262 - DNA, 681 bp, Homo sapiens
  chr10:12390995-12391676
  binary
cgaatgagctcccgcccgcctccgcctccatcccagccgccgccgccgcccgtcgccataacaaccggcccccaccccccccaccccacgccttgcccctcgggtcccccgggccacaggccacagcgcgggaaggcgccccgccctcggcgccccgcatccggccgccgcgcacccccgcccgcccggcgcttccgagccacgcagaggcgccccctcccgccggagacgggaaagccccggcgcccccagactgggctccgtttccagctcccggaggggctggggctctcccgcgtgcgccccgcacctgccgggggcccgtacccgccctcgccggggctccagggggcacgacggccgtggcccggcgctcttgggaggggagcgggacatccccgaaggcggcgcgctggaggcggggagcggccggggcgcacggagagggcggggagcccgcgggagggggaggagggggaggagggggaggaggcgcgaggtgggggggagcgcggcgggcggcagggagggagcgggagggaggcaagaaagtagcagaaagtgaggctggcaggcggcggcaaaggagccggcgcgcggcggcggcaggaagtctgtgcccgagaacagcagaaataagagccagggagggaccgcggccgcggcggcggcggcgagagc

SEQ ID NO: 17263 - DNA, 204 bp, Homo sapiens; identical to SEQ ID NO: 10163
  chr10:125851929-125852133
  hyper

SEQ ID NO: 17264 - DNA, 48 bp, Homo sapiens
  chr10:126190228-126190276
  hypo
cgacgttctgaatgtgctcgatgccagtgaattgaatactctggtcac

SEQ ID NO: 17265 - DNA, 143 bp, Homo sapiens
  chr10:127415629-127415772
  hypo
cgtattgtacaaataagtaaactaacgctcatcaaaagatgtttcacatggtcatacagctggcgaaactctcaggctagggcttaaacccagatctttctgcctgcagaggcctgttcctccagcagtactccactgtgtcc

SEQ ID NO: 17266 - DNA, 203 bp, Homo sapiens; identical to SEQ ID NO: 7765
  chr10:133783038-133783241
  hypo

SEQ ID NO: 17267 - DNA, 225 bp, Homo sapiens
  chr10:1651074-1651299
  hyper
cgcattgccggccctctgtcttgagcccctgcagggtgccggatggccatgccctattgtgcgtccctcttgcagcaacaccacattaaaccgtggcatcctcttgaggctgcccctgcggattgcacggctaatgcagaaggctagaaagaaggacccgaaacgcccaccaaactataaattaaggcgaagatctcaggagcaatgtgcctggtgcccggcgtc

SEQ ID NO: 17268 - DNA, 209 bp, Homo sapiens; identical to SEQ ID NO: 5728
  chr10:17270445-17270654
  binary

SEQ ID NO: 17269 - DNA, 116 bp, Homo sapiens; identical to SEQ ID NO: 5896
  chr10:17272233-17272349
  hyper

SEQ ID NO: 17270 - DNA, 87 bp, Homo sapiens
  chr10:22883126-22883213
  hypo
cgtaaagtctagcgtattaagtacattataattacagacttaccggcactcatgcctttcccattatattctctacacctctagttc

SEQ ID NO: 17271 - DNA, 54 bp, Homo sapiens; identical to SEQ ID NO: 7769
  chr10:27825982-27826036
  hypo

SEQ ID NO: 17272 - DNA, 185 bp, Homo sapiens
  chr10:31422647-31422832
  hyper
cggggagaagggcctcgtgggccagcgcagcttgctcctctgcagacccagaagcatttgtgcgtcccgggcgtggcaggcccggcgcccactccgccctcccgcccctcccccgcgccacgtcacccgggtcacgtgagtgaccaggctcctcaccccaacccccctccctactcccgccagac

SEQ ID NO: 17273 - DNA, 115 bp, Homo sapiens
  chr10:31423116-31423231
  hyper
gaaatgcggcagccgggggtgccggcagcttgagagaaaagtctgcgtggagggggggtgggggggatgaggggaggcccggggagacagagggcaggagaaaaaggccggcccc

SEQ ID NO: 17274 - DNA, 97 bp, Homo sapiens
  chr10:35152237-35152334
  hypo
cgttatcaaataacaaatacttaatttcttttctttttttttttttgagacggagtcttgccaccatacctggcctatttacaggcatcctgtttaa

SEQ ID NO: 17275 - DNA, 49 bp, Homo sapiens
  chr10:60026209-60026258
  hyper
cgtgacttcaggcacgtcattcttaaccagggttggccttagtcacctc

SEQ ID NO: 17276 - DNA, 139 bp, Homo sapiens
  chr10:70218986-70219125
  hypo
cggtacctgccaaaaatataatagtaaatagacttagacttaagcggtacctgccaaaaatatgatagcgaatatgaaagtataaatatgagaaaagtaaacgaggacaaaaaaatacatataagcaacccaactgttc

SEQ ID NO: 17277 - DNA, 147 bp, Homo sapiens; identical to SEQ ID NO: 7784
  chr10:73846836-73846983
  hyper

SEQ ID NO: 17278 - DNA, 164 bp, Homo sapiens; identical to SEQ ID NO: 7785
  chr10:73847427-73847591
  hyper

SEQ ID NO: 17279 - DNA, 377 bp, Homo sapiens
  chr10:74020611-74020988
  hyper
cgccggggccccaaatgctgagctcagcatctctgtggcctggctgccctcctcccgggcagtgggaggagcctccttcctcccgagggtgggcggggccagggccagccccgccctcctccccgttccccctctccctccatccccctcccgttcctcagtcgcacgttctccaagtcacgtcccccgcttcccctagtagggggtcgacggagattggacccttcccccagtcagctgctctgcatctgtcacctcggcggcagcgctcccttgaggtcgcacctccgctgtggagggaggcgagagcgagctgagtggggggtcttcccttcccccatcccgctggccccagacaagccaccgcagaccgcggc

SEQ ID NO: 17280 - DNA, 413 bp, Homo sapiens; identical to SEQ ID NO: 14515
  chr10:74079281-74079694
  binary

SEQ ID NO: 17281 - DNA, 179 bp, Homo sapiens; identical to SEQ ID NO: 14516
  chr10:74079752-74079931
  binary

SEQ ID NO: 17282 - DNA, 39 bp, Homo sapiens; identical to SEQ ID NO: 6753
  chr10:74451119-74451158
  hypo

SEQ ID NO: 17283 - DNA, 102 bp, Homo sapiens; identical to SEQ ID NO: 6754
  chr10:76287784-76287886
  hypo

SEQ ID NO: 17284 - DNA, 155 bp, Homo sapiens
  chr10:7871238-7871393
  hypo
cgtgactatggtacgtgtatcacaattaatgaacaatattgacatgttattattaagtgacgcccgcactgtattgacattccttagtttttactggatgtcctttttctgtttctggatcccatccaggatatcatattgtgtttggttgtcac

SEQ ID NO: 17285 - DNA, 76 bp, Homo sapiens
  chr10:79770259-79770335
  hypo
cggttccccattcctcggggttacaagatttgctttagtctgtaggaaaagtaagcgcagtcagttagctgttctc

SEQ ID NO: 17286 - DNA, 42 bp, Homo sapiens
  chr10:88731062-88731104
  hyper
cgctgccgcccggcggggtcccgccccgccactccccgggga

SEQ ID NO: 17287 - DNA, 177 bp, Homo sapiens
  chr10:88731133-88731310
  hyper
gagaacgaagcacggttgtggggggggcatgcacgtgcgcgctcgcgtgcgggagacccctcccttccacaccacttcctttcgggacaaaccggtaacctccggccctggaaggttttgtctagtgggttccggatggactggtgttcccagcacccccccggcacgtgtccacgc

SEQ ID NO: 17288 - DNA, 256 bp, Homo sapiens
  chr10:894796-895052
  hypo
cgccatgacatggacaaacacgtatgctgttttgcttgttacagtttcaatctcttttaaaaataactgacttttaaataaaaataaaaacatatattgtcagtttatagcataagtaactgcaaaaggcatgatgaccaaagcatccgggccacgagagaaacggcggcagactgccctgatgctgtgctctatgtgaagcagcacgcagccacctcaaggtagactgtgttagccggaggaagtggagcaaaac

SEQ ID NO: 17289 - DNA, 57 bp, Homo sapiens; identical to SEQ ID NO: 7798
  chr10:93647662-93647719
  binary

SEQ ID NO: 17290 - DNA, 179 bp, Homo sapiens
  chr10:94450726-94450905
  hyper
gttcatttcctctgtgtgggatgtgactttatggcagctaaaataaccagttgcttcctattttttttcgaggctgttttgcaccagtctgaagcctgacgcaagcaaaatctcgaaaaaacaatgctagctttcaaagcgttgaggtgcaggcctgcagacggacggacggaccgacc

SEQ ID NO: 17291 - DNA, 51 bp, Homo sapiens; identical to SEQ ID NO: 6388
  chr10:98292796-98292847
  hypo

SEQ ID NO: 17292 - DNA, 457 bp, Homo sapiens; identical to SEQ ID NO: 6764
  chr11:111169516-111169973
  hyper

SEQ ID NO: 17293 - DNA, 291 bp, Homo sapiens
  chr11:111412304-111412595
  hyper
gaggaggtaaagtgctctggcttctggcttctttcagttgttctgcatgtcggggggagaacatccgtgcccttttctcagatcctttttgcgggtgccaacagcttgaccaaacgggacagaggagactgggaacctcctctactctggcatcctggcttgcgaaactaatttaaagaatgtaaagttggtttcaggatgggggcggggcggcaaaagaggtgggaagctgaattgagctgcttgggttagggctgcgtgggctctgtccttggtcgcggggaacagaag

SEQ ID NO: 17294 - DNA, 48 bp, Homo sapiens
  chr11:111412624-111412672
  hyper
gagaagagaaggacacttcctgaaggcaggagaaccagataggcccgc

SEQ ID NO: 17295 - DNA, 326 bp, Homo sapiens; identical to SEQ ID NO: 7802
  chr11:121349234-121349560
  hypo

SEQ ID NO: 17296 - DNA, 365 bp, Homo sapiens
  chr11:125133244-125133609
  hyper
ggcgtgggagcaaatggaggggatctgctggcgggcctagtttaggcaaacagcagggactgctggcgacggctccagcccccactcccgcggtaacagctgcagtccagctgctggcatccctgctgggggagcgtgctaaacctctccggggtcagcactgtggtatgtcggtttccatagcaaccagccaacgggccactttctcagaacaattcccctactcagccgggttctggacttagctcagcccaagggcatgtggctgaggagcagcgcgggagggggagagctgccgagggccagactgggccccacagaacgtggctatctcagtccggtcttcgcacggagggcgtggagcc

SEQ ID NO: 17297 - DNA, 33 bp, Homo sapiens
  chr11:129243894-129243927
  hyper
cgacagagtgaggctcggtctcaaaaaaaaaag

SEQ ID NO: 17298 - DNA, 203 bp, Homo sapiens
  chr11:13300232-13300435
  binary
cgggcaggtgcgcgtcggcctggggatgtcgcccggagcccgggtgcgggccggccttggagtcccagagctccgcggagggcgcagcgagcctggctccagctccgggtttgacagatgtcagggaagaaaaggttcccgctcggctattgccgggcgttgacatcccagagagcttcccgtttgcttggaagaagacgagg

SEQ ID NO: 17299 - DNA, 108 bp, Homo sapiens; identical to SEQ ID NO: 14533
  chr11:17373019-17373127
  hyper

SEQ ID NO: 17300 - DNA, 167 bp, Homo sapiens; identical to SEQ ID NO: 14534
  chr11:17373405-17373572
  hyper

SEQ ID NO: 17301 - DNA, 116 bp, Homo sapiens; identical to SEQ ID NO: 14535
  chr11:17373642-17373758
  hyper

SEQ ID NO: 17302 - DNA, 126 bp, Homo sapiens
  chr11:17497697-17497823
  hyper
aaagcataggggttagctgggcctccatcccagactccaaagcacaggcttccctcttccctaggcccagctgcggctgacagggaggctgccttgcgggaggggtgacccggctccctaagctgc

SEQ ID NO: 17303 - DNA, 200 bp, Homo sapiens
  chr11:19256446-19256646
  hypo
cggcgtacttattctcctccccgatgctcttcaaggtgccaagggttttgttgagattgtgtcgcccgtgccaagtgtacctgtttttggcgaggcggctcaccatatgtaaactctctaggacgttcacgatatcgtaaatgcgtcgacgttcaacatctacaaagaatgtgcaattgtgtgttacagatttttgtaac

SEQ ID NO: 17304 - DNA, 929 bp, Homo sapiens
  chr11:32915113-32916042
  binary
cgggagtcgtggggctccgtcacctcttgggtcctgggctctcacatggtgaagtttgggctcgtggctgaactcgggatctgtgagacccaggattggcgccgggggtccgaagggggcgccggagagtttggggcagtggcgatccattgtattggaacctgggtggccgacaatgcggtcttggggactccggcgtgtgagggttgcggaggcgggagaggaagagtcgcggaaccgcgtcccggagacactggggggcccgggagggctgggctacgggagaatccccggggcgcagggcagaagagggggcccggcagggcgcgaacgcggctccagggccgggtgacatatgtttgcgctggtggccaagatttaggcgatttttcttccacgcgttcaaagttgctcttaggtttcctccccttttaacaacagcaggaagtaaggaatctttctttgccttctatgcctcggggtgactgagagttgggaagaaatggggcgggggttggggtgggggtagtgaaggccgtaaaggttgaagaaccaaagcatgcttctccatctcggcctttaaggtccgggtgcattatgtagcgtggggttcaagagttcatcttgcatgaccaagggaatctaaaattttgactcctacttgatatttaagctcgcgggaaatgtgtagtagtgccacactgtgaaacggtcccatttgaatgataactggaaggcgtggtctggtttggagaattggtgagcggggtgttttaaagccacctctcccgaacaatacagaatctggtaggtgcagcttctgattacatggaccagggaatcctgggttgctaatgacttcatcctcagctaccaacaggaagcttcgtggctttatgatctcatcagatttcttcattatttttcac

SEQ ID NO: 17305 - DNA, 763 bp, Homo sapiens
  chr11:35160310-35161073
  hyper
cggattcagagaaatttagcgggaaaggagaggccaaaggctgaacccaatggtgcaaggttttacggttcggtcatcctctgtcctgacgccgcggggccagcgggagaagaaagccagtgcgtctctgggcgcaggggccagtggggctcggaggcacaggcaccccgcgacactccaggttccccgacccacgtccctggcagccccgattatttacagcctcagcagagcacggggcgggggcagaggggcccgcccgggagggctgctacttcttaaaacctctgcgggctgcttagtcacagccccccttgcttgggtgtgtccttcgctcgctccctccctccgtcttaggtcactgttttcaacctcgaataaaaactgcagccaacttccgaggcagcctcattgcccagcggaccccagcctctgccaggttcggtccgccatcctcgtcccgtcctccgccggcccctgccccgcgcccagggatcctccagctcctttcgcccgcgccctccgttcgctccggacaccatggacaagttttggtggcacgcagcctggggactctgcctcgtgccgctgagcctggcgcagatcggtgagtgcccgccgcagcctgggcagcaagatgggtgcggggtgctcagcgcggacccggcggcagcccctccggctgagtcggccctgggggactggagtcaagtgagctgtctgcgaagtgcattgggctccggaaagcagggctgggatttgc

SEQ ID NO: 17306 - DNA, 623 bp, Homo sapiens
  chr11:35639806-35640429
  hyper
ctctccctctcggaaggagccatcgccgctttaagtggaagaggagaggaagggggcgggggagcggggggcggggagcggaggcggaggagggggagggggatccccctggctcccacgtggtccgggcgcctgtgaatcgcgcccaccggagggtctcacagcgaaatacaaaagcagctgggaagcggcggggactcgagttcccagcgccgggcggagcgccggacagagccccgcagcgccccgcggccgcgatggggccgaagcgcccgaagccccggagcccacaaactgccgggcccgcctcgccgccgggacccgggtgcctgggctcggcttgaagcggcggcggcgcaccggcacagccgcgggagcatgggcaggaggatgcggggcgccgccgccaccgcggggctctggctgctggcgctgggctcgctgctggcgctgtggggagggctcctgccgccgcggaccgagctgcccgcctcccggccgcccgaagaccgactcccacggcgcccggcccggagcggcggccccgcgcccgcgcctcgcttccctctgcccccgcccctggcgtgggacgcccgcggcggctccctgaaaactttccgggc

SEQ ID NO: 17307 - DNA, 87 bp, Homo sapiens; identical to SEQ ID NO: 6778
  chr11:47208495-47208582
  hyper

SEQ ID NO: 17308 - DNA, 203 bp, Homo sapiens
  chr11:48061631-48061834
  hypo
cgcctggccgcttttgccttttcttgacattgccaatgcatcctgtccccgagcgtctctgagttttaagtctcagatttgttttctttggagacaaactgcaggtaggtgttacttctcaccgaagttcccagatagcacaggctttgctaaacaacacagcaccaggaactccatcatagagaccgcaggatgctgtgtgc

SEQ ID NO: 17309 - DNA, 344 bp, Homo sapiens; identical to SEQ ID NO: 15475
  chr11:561903-562247
  hypo

SEQ ID NO: 17310 - DNA, 244 bp, Homo sapiens; identical to SEQ ID NO: 16302
  chr11:562884-563128
  hypo

SEQ ID NO: 17311 - DNA, 78 bp, Homo sapiens; identical to SEQ ID NO: 10210
  chr11:57194101-57194179
  hyper

SEQ ID NO: 17312 - DNA, 46 bp, Homo sapiens; identical to SEQ ID NO: 7820
  chr11:57235458-57235504
  hypo

SEQ ID NO: 17313 - DNA, 50 bp, Homo sapiens
  chr11:57334786-57334836
  hyper
cgaaattgaaaccagttttgggggagccggctcatcttcaccacgcgaac

SEQ ID NO: 17314 - DNA, 189 bp, Homo sapiens
  chr11:58940419-58940608
  hyper
cgattcactccgctgaatcctcgcaggatcctccctcccccttaaacatccatgcaaatagtatcagtgttgtggttttgcaaacccagcttcaacctagtcggtaacaatccactccccacccctttcatgcccccgcttttcagcagttggtggccctaagtctttctatgtagaaattctagggcc

SEQ ID NO: 17315 - DNA, 256 bp, Homo sapiens
  chr11:58940666-58940922
  hyper
cggccggcaccttggctgacctgaccctgttttgcttcaggcacgctggggcttgccacacgtcccctcacccccgatctcactgcctctgcgtctcctgtgtgggatgcctccccgcagctgggtcctgggtgtgggaactgggggaggaagaagggattccccggaggttctcgctacagtcgggtaagggaagcgccgggctccctgggaggagagactagggctggggtaccctggacgccgcggcattggc

SEQ ID NO: 17316 - DNA, 172 bp, Homo sapiens
  chr11:60648561-60648733
  hypo
cgctttgtgtcaacagagccttaggtttactaatgcagcagagaaggcagtcagaccatgcctttattcgataggtgtcaagtgtcagggaccaccatgaccttggcgacatgtgtcaatacagttaaatctcaaggacaatgccagtgcaggcagagcacggaagatgcac

SEQ ID NO: 17317 - DNA, 34 bp, Homo sapiens; identical to SEQ ID NO: 14550
  chr11:61596695-61596729
  binary

SEQ ID NO: 17318 - DNA, 199 bp, Homo sapiens
  chr11:63828227-63828426
  hyper
cggaaaatgcgagactttcatttctacctctcgaatgcccagtctttgagtcctgcagcccccgggtcgcccgggtcccggagccggcgggtgtgaacggggccaaagccctccaggccgggcgtgtcagccccgcccccgaggctctttgcatattcatgaccttggcgggcatgcgcaccgcggcggcggcggcggc

SEQ ID NO: 17319 - DNA, 211 bp, Homo sapiens; identical to SEQ ID NO: 13269
  chr11:63849170-63849381
  hypo

SEQ ID NO: 17320 - DNA, 61 bp, Homo sapiens; identical to SEQ ID NO: 13270
  chr11:63849634-63849695
  hypo

SEQ ID NO: 17321 - DNA, 550 bp, Homo sapiens; identical to SEQ ID NO: 7823
  chr11:64512349-64512899
  binary

SEQ ID NO: 17322 - DNA, 61 bp, Homo sapiens; identical to SEQ ID NO: 7824
  chr11:64513748-64513809
  hyper

SEQ ID NO: 17323 - DNA, 396 bp, Homo sapiens; identical to SEQ ID NO: 7825
  chr11:64875426-64875822
  hypo

SEQ ID NO: 17324 - DNA, 189 bp, Homo sapiens; identical to SEQ ID NO: 7826
  chr11:64876158-64876347
  hypo

SEQ ID NO: 17325 - DNA, 88 bp, Homo sapiens
  chr11:65420289-65420377
  hyper
cgctgaattttgggacgcgtcccgctgacgataactccttttcccctgctattgtcctcccgcgacggtgcgaagcccaaacgaagac

SEQ ID NO: 17326 - DNA, 112 bp, Homo sapiens
  chr11:66886029-66886141
  binary
gccctgggcaggcctgagccgggagcccaggtcccgcgggcccagcccggcggcttgaccccgggagaccctgctttgaggcgggtatcggttgccctggcccaggcctccc

SEQ ID NO: 17327 - DNA, 188 bp, Homo sapiens
  chr11:67850488-67850676
  hypo
cgtggccgcatcgttccttagactctgctttgcgggtcgcctcttccaagcagtctgtaaattcctaatgaatagggactgcgtcttttattgatgttagtcttctcccagagcaccaagcaaatctcgatgcccactacactttttaggctgcatgaataaatgaacactccggagtggtatagcac

SEQ ID NO: 17328 - DNA, 137 bp, Homo sapiens
  chr11:688396-688533
  hypo
cgacaatcagtgtcgctttttcggtgttcaggctgtccccgatctgaagggccgtcctaccagactagaaggaaaaaccgctccgtcaggtcacgtccgagagtgacaccaggcgtgtcactgagcccagctgggcc

SEQ ID NO: 17329 - DNA, 232 bp, Homo sapiens
  chr11:69451967-69452199
  hyper
cgcggggatgcggggtcctccccgcagtcttccggaaagggcgggggagggcgcggcaagttccggagtggggcatgccgtgggagcccacgagggcctcagcgcggatcctccgccggaaaaccggctcccgcgagccgccgccgcaggtttcctaggccccgcgagtcccgcagcgaagccctgcgtctccgtccgacgcgggggtctgctcagcctcgggtgggccgcg

SEQ ID NO: 17330 - DNA, 369 bp, Homo sapiens
  chr11:69452289-69452658
  hyper
tctcgatctgggcgcctactccccaccacttggtctgagaggggctggggccggaaggccagggaatctctggtggatttgggggttcatattgctcagggtaccagccgatgcgttttgaggggcgggagtcgaggaattagaatcgcctttaaccctcaagagttgcgccttcagcctcgggatcccagatgcgtcgttggagccagggccgcccccctacctgttgggtttgcgttttaactccagcgcacaccttgccggcagccctcggagctaggggaggggtctcgtttccccgcagcccgccggacagacgactggggcacgggaggggcggtggcagggtggtctgtgtgtggctgaaac

SEQ ID NO: 17331 - DNA, 31 bp, Homo sapiens; identical to SEQ ID NO: 7847
  chr11:75852075-75852106
  hypo

SEQ ID NO: 17332 - DNA, 76 bp, Homo sapiens; identical to SEQ ID NO: 7848
  chr11:76033216-76033292
  hyper

SEQ ID NO: 17333 - DNA, 129 bp, Homo sapiens; identical to SEQ ID NO: 5736
  chr11:8615887-8616016
  binary

SEQ ID NO: 17334 - DNA, 311 bp, Homo sapiens; identical to SEQ ID NO: 6799
  chr11:9554670-9554981
  hypo

SEQ ID NO: 17335 - DNA, 100 bp, Homo sapiens
  chr11:980551-980651
  hypo
cggtgacaggctgcccggtgctttggggaggactgcttgtgccctgggatctgaatctgttctcactgagggccaggaggagcggggagggaggactcgc

SEQ ID NO: 17336 - DNA, 324 bp, Homo sapiens
  chr12:102301906-102302230
  hypo
cggttcgatgttgacaaacccacccagagtaacacacatttatgactttttctccaggagttagctgtgccagtggttcatgacgggggcgctcttttggcctttgtctgtggtgtcgtgtacacgctcctacagtccatcatctcttacaaatcatgtccccagtggaacagtctctcgacatgccacatacggatggtcatctctgccgtttcttgcgcagctgtcatccccagtatcctttttcacatttgtgccttgttaaaggaataaaacattcagtgacacttgttaaagaagggtaatgaagactttatagggacc

SEQ ID NO: 17337 - DNA, 121 bp, Homo sapiens
  chr12:103311040-103311161
  hyper
cgtggtgcatctccgcacagtaacgcccctcgtgggcgttgtcctgacgcaggaggccagggcagcctgccggatgctccaggtcacctgcccaggacgggccggaggggaggggctgagg

SEQ ID NO: 17338 - DNA, 306 bp, Homo sapiens
  chr12:103311290-103311596
  hyper
cctgggaagcgagttctctgcaattggactaagcctgcgaccgtctggtataacaattatatgaataatccgccccccttacccccagctgaaacagtcaggattctcatttagatttttgttgttgttgttttcccttctgttaacctctaagcacactgccttgctgtgcgctgacttcagaaaactacagctagagggcacgtgaacgctgagcacagcaggtaaagagcaaatgtaagagcgatctgggtttaaatccagcctggtgttctccagctattcgcacaactgctcctgaagctc

SEQ ID NO: 17339 - DNA, 349 bp, Homo sapiens; identical to SEQ ID NO: 10236
  chr12:104851545-104851894
  binary

SEQ ID NO: 17340 - DNA, 635 bp, Homo sapiens; identical to SEQ ID NO: 6395
  chr12:110352780-110353415
  hypo

SEQ ID NO: 17341 - DNA, 321 bp, Homo sapiens; identical to SEQ ID NO: 7856
  chr12:111844290-111844611
  binary

SEQ ID NO: 17342 - DNA, 99 bp, Homo sapiens; identical to SEQ ID NO: 7857
  chr12:111844690-111844789
  hyper

SEQ ID NO: 17343 - DNA, 235 bp, Homo sapiens
  chr12:112743068-112743303
  hypo
cggtgtggatctaaagcgccgtggctcccagctgcttcttgccccaagccctcctcctctctctgcattccagccactctggcccactttttctccctaaaacatgctgcctcctgccacagacactttgcacgtgtggtatcctctttctggaatgttcttccctcacctactccccagcctcttcatctggtacatgactacttttccttcactaattacgattatctcgtgc

SEQ ID NO: 17344 - DNA, 40 bp, Homo sapiens; identical to SEQ ID NO: 7869
  chr12:122192684-122192724
  hypo

SEQ ID NO: 17345 - DNA, 117 bp, Homo sapiens; identical to SEQ ID NO: 7870
  chr12:122192843-122192960
  hypo

SEQ ID NO: 17346 - DNA, 45 bp, Homo sapiens; identical to SEQ ID NO: 7871
  chr12:122192989-122193034
  hypo

SEQ ID NO: 17347 - DNA, 158 bp, Homo sapiens
  chr12:124171347-124171505
  hypo
cggtcacagctcctgcctttatgtttgtcttccaggaatgctcatcaaatttaacaacgctgttcagacggtcctgcttcaccggcgtgtttggaggagacgtcaatcctccttttgatcagctctgctctgctgggacgacgacacgtggtgtcccc

SEQ ID NO: 17348 - DNA, 84 bp, Homo sapiens
  chr12:124832004-124832088
  hypo
cgcgagaacctgaaagagttctcggagctctccaagcctctcccaatcgcatgtgcctcaccaggatgttctgtaaaacgatac

SEQ ID NO: 17349 - DNA, 643 bp, Homo sapiens
  chr12:124832318-124832961
  hypo
cgtgactgtacacccgttgggggcaacgagggagcagggaacagggcagtaccttgtgtgatggacccgcggatgtggtgctgctctttgaggtggtgggggctgtgtcgctccggcgggatggcacggcccatgagacctgggtaggagagggtgaggccatcattccgtggctccctgagccgacactgggcagtgacaggggtcagtgtttacagccgccagtggtcatccccacgatgatggtggagtaggacccagcacgggaaggtccctgcgctacctccagatggagcctcagaaagcccagcctcggtttccccatctgtaaaacggggtcagccatccccccaccgcccaccagggggcaccgagagatgaagtctcctccctgctatcaccttcgatgctggctgaggagatggctctgcccacgcggccctccatcatgtcataggtgcgcttgggggcggccgtctcatgggggggtcctgagctgcttctgccgtcctccttggagcactgggtcacagacatgccacctggaaaccacacaaagcactcggtgaggagctgggcacgggcccaggaccacggtgggcaggcaggacaggcagagccggtaggcaggagccagcagtgc

SEQ ID NO: 17350 - DNA, 257 bp, Homo sapiens
  chr12:124832990-124833247
  hypo
cagccgaggcctccagagggagctggcagcctgcaggccctgggggcctgccagcaggacccaggagcttttccagggggttgcacggtgggagatgcagggcacgctgcctgcaccctgtaccctagccctccagggtgctctgtctgcaagcaagggtgtgcctgtgaccacatgagcacgtgagtctgtgtccacacccacgggtgccgacatggggcgtgaacaagtgcacacacatgcacgtgagcaaggac

SEQ ID NO: 17351 - DNA, 173 bp, Homo sapiens; identical to SEQ ID NO: 10242
  chr12:132423854-132424027
  hypo

SEQ ID NO: 17352 - DNA, 776 bp, Homo sapiens
  chr12:133353796-133354572
  hypo
cgtgctgcagccatgcttggtgcccacagtgtgcactcgggcagtcctcacgaagcacctgagactcacacttcactggcacccctcacagatcccagagactcactttgccggcacccctcacagatcccagagagtgccggccccgagaccacagtgcatgggacccacagagccacagcatcagccccgcgccgggccgccccttcccgcctctgacctgaagctaagtactcctgctggggcgctttctctcttggggggaggacacggggcagtgagtgaggctcaggattctggagacggaggctgggtgccttctactcctatgattcactcaagtactcggcaatttgcaaaatatagatgaccctcgctgtgctgaaggtgtgaattagaccccgcccattgccaggacagccatgtttgagggctggcggggcccaggcactcactgaaggtcgtcggcctcggcctgcagcttctgcaccaggtgttccttggcctgcagctccttcttcacctcactcagctccaaggaggccgccttgaagtggcggcggttatgcccggcttccaccttggcagcagccacctaggaggaaggaagccacgttgtccatgccctgcgtgacacccacagctttatgacgtgccgggcgcagggggtgaatgcactcccggccccgtgcatgtcctggctgccggcgtgtgcttctccacaggcctgtcaagttccttgtaaagatgaaaccacctgacccggagctcggcac

SEQ ID NO: 17353 - DNA, 235 bp, Homo sapiens; identical to SEQ ID NO: 6834
  chr12:417402-417637
  hypo

SEQ ID NO: 17354 - DNA, 86 bp, Homo sapiens; identical to SEQ ID NO: 5742
  chr12:4377809-4377895
  binary

SEQ ID NO: 17355 - DNA, 245 bp, Homo sapiens; identical to SEQ ID NO: 5743
  chr12:4378558-4378803
  binary

SEQ ID NO: 17356 - DNA, 335 bp, Homo sapiens; identical to SEQ ID NO: 14577
  chr12:46766939-46767274
  hyper

SEQ ID NO: 17357 - DNA, 939 bp, Homo sapiens; identical to SEQ ID NO: 11060
  chr12:48591606-48592545
  hyper

SEQ ID NO: 17358 - DNA, 61 bp, Homo sapiens; identical to SEQ ID NO: 16368
  chr12:49364178-49364239
  binary

SEQ ID NO: 17359 - DNA, 61 bp, Homo sapiens; identical to SEQ ID NO: 7901
  chr12:49392537-49392598
  hyper

SEQ ID NO: 17360 - DNA, 295 bp, Homo sapiens; identical to SEQ ID NO: 7902
  chr12:49392636-49392931
  hyper

SEQ ID NO: 17361 - DNA, 165 bp, Homo sapiens
  chr12:49416380-49416545
  hypo
cgtagattttctcccgccggttggccacctcgttccgaatgatggtgccaatgtactcgataaccattgtgtgcttttctaggtccttggctgcatagagccccaggccctggatacgggagcgagccaggtacacgttgttcttccattcggtgcgcagccgcc

SEQ ID NO: 17362 - DNA, 532 bp, Homo sapiens
  chr12:49658702-49659234
  hyper
cgccaatcagcgccgcgcgcccccactccgcgggtgcggccgggcgcaggccagggctcgaaggtggggccgcagcggcacggggcggggtctggggcccgccctcccgacacgtggccggggaccgggtatataaggcccttcggggccggccaccctttcactacttctcccccggactccttggtagtctgttagtgggagatccttgttgccgtcccttcgcctccttcaccgccgcagaccccttcaagttctagtcatggtgagtggggttccctcggggctggggaagagtgcgcgtcccaggggacggcgggcccggaaactactgcctgcacctcgggccgcgcccaggacagctccagactaccccgggcccctccggttaacctggcttgtggcggccgggctggaaggtcgagttcacttggcagacaccagttcgggccggaaaacctggcccgggtgcggccatcagtggaaatggaaagccctcttgatcctagtgagggctttccccgcagggccc

SEQ ID NO: 17363 - DNA, 300 bp, Homo sapiens
  chr12:50339307-50339607
  hyper
cgtcccgcttcgccccgactgtggatctacccgctcccttctccctcagtccccaaagcaccagactcacaggcctgctgtgtgacccacttttaccgacctttcggggagagtagagggcatttgtgactcagctcagagcaggaaacacatctcacgtcaactgtcagacagcgctgctccgaatcccatcacagtgctccagcagggggcgtcctcaccggccgcggccacagccacggctcaacccggcctagctcccagacaccctccttccaccgcctgttttccaccgtcccc

SEQ ID NO: 17364 - DNA, 54 bp, Homo sapiens; identical to SEQ ID NO: 6843
  chr12:52401605-52401659
  hyper

SEQ ID NO: 17365 - DNA, 311 bp, Homo sapiens
  chr12:53267978-53268289
  hyper
cgcgtcaggggtctctcggggcggctagaggccctgggaacctggaagcccgcggggcgcggcggggcggggcagagcgctagagccgggtggcggccgccgattggctgggcccgagcgctcccacggcggccgggggccccagggcggcgccggccgcgcccgctccgcggtgactcatccagcaccccacctctggagctggacgggcgcccggcctcttcccaccccagacccgcccgctaagccgggagagcctgactcagcagggggagcctggcctgccttccgcccccttcgcgtcctccccc

SEQ ID NO: 17366 - DNA, 194 bp, Homo sapiens
  chr12:53719360-53719554
  binary
cgggggcgggagtggcgtcagggtggggagggggctcgtaacccgagcccccccaggatcgccggccccctcccacccgtagcagcccctcttgcgacccgtgcggtggacagtccgacgcggggcgcagctgggagtcgggcccaggccggggggagcggcctgtgagccccctcagcccagcggggtaacct

SEQ ID NO: 17367 - DNA, 122 bp, Homo sapiens; identical to SEQ ID NO: 7908
  chr12:54088960-54089082
  hyper

SEQ ID NO: 17368 - DNA, 58 bp, Homo sapiens; identical to SEQ ID NO: 7909
  chr12:54144782-54144840
  binary

SEQ ID NO: 17369 - DNA, 321 bp, Homo sapiens; identical to SEQ ID NO: 14591
  chr12:54389321-54389642
  hyper

SEQ ID NO: 17370 - DNA, 104 bp, Homo sapiens; identical to SEQ ID NO: 11067
  chr12:54811879-54811983
  hyper

SEQ ID NO: 17371 - DNA, 36 bp, Homo sapiens
  chr12:5542974-5543010
  hyper
ctgtggacttgtttatgtgtgtgaagaggcgggggc

SEQ ID NO: 17372 - DNA, 74 bp, Homo sapiens
  chr12:56610588-56610662
  hypo
cggggtccagtagatttgaacatagctgggagggggaaagaaaaggacaagagaggccgggcgtggtggctcac

SEQ ID NO: 17373 - DNA, 184 bp, Homo sapiens; identical to SEQ ID NO: 5933
  chr12:63026256-63026440
  hyper

SEQ ID NO: 17374 - DNA, 95 bp, Homo sapiens; identical to SEQ ID NO: 13347
  chr12:6445038-6445133
  hyper

SEQ ID NO: 17375 - DNA, 55 bp, Homo sapiens
  chr12:72165436-72165491
  hypo
gacatagtttaagtattttattaagagaagattgaggccaggcacagtggctcac

SEQ ID NO: 17376 - DNA, 539 bp, Homo sapiens
  chr12:7260775-7261314
  hyper
cgccacttcccacaaccccgggaatctccctggccacagtcctggcgggaccccccccatccccagctcactgtgacagagtcccctgcacagtcctgggacggctccaggtcgaagtcctggaagacgagcctcacagcaaagccctctggagccttgatgtccgtgctgctctcttggcctttgccatacggctctgggtacccgggggatgtcagctgctggggtagctcttgggccaagaggacggagccccgggttgggcaagcctggaggactccccagagaagcagccaccacctgtgagttggggggagggcaaggtggggccgcgcagctatggccggaagcctgtgggtgtgggaggagcgggggagccgcgctaggactcagaggcctcgcgaggcagggctagaagctgtggcctcacccttgaggcccgggcacttcccgtctcctcccttgctccccttcctcaccccaatccctacagcctcccgcgcagcctgagctctaggattgtgggttttccatcctcc

SEQ ID NO: 17377 - DNA, 259 bp, Homo sapiens
  chr12:77216021-77216280
  hypo
cgtaataagaaacatgtaatgatgcaggtgtttttagtaatttacacaatgtcaaaacaacgttaatagggcagtaaattaatttttatagaagttctttaaaggtaactaagatagcctgcttttaaacttttaataggaatttcttctgtttatattatcagggcgaatcagcgcttgatttggcaaaacagagaaaaaatgtgtggatgatcaaccacttacaagaggcaaggcaagcaaaaggatatgacaatcc

SEQ ID NO: 17378 - DNA, 104 bp, Homo sapiens
  chr12:8113465-8113569
  hyper
cgcctgctggcgtcttgcttttgtaaaaggctgcgtaagcaagtgcagacgtgagttgcagatcatcttgaatctccggagcgacaagctccatcactcaaagc

SEQ ID NO: 17379 - DNA, 125 bp, Homo sapiens
  chr12:90025696-90025821
  hypo
cgtgctcggcctgaaggttatacaactattaaatgtcaaggcaaagattcagtccagctctgtcagaggataaagagtatattcttcttcagttataatgctgataagtctgcttacggttctcc

SEQ ID NO: 17380 - DNA, 393 bp, Homo sapiens
  chr12:90101352-90101745
  hyper
cgctctaacccaaagaaaaggtaaatatcagcctgtcgaggagggtcgagccctccaagtacctgcagacccctttaacccacccggacgccctgccctcccctccgagccaagcagcgcacagggtgcgagcactcccagcgctgcgagtcccgcagaaaactggtgaatgaaatgcgcacagagaccaacctggctggtgaccgcggcgcagaaccaggggtcgctaaccagcttagccacaggattctcccgcaggatgggataaagagagcacagcccccaccccacacccctgccactggaacgcggtcctcctacagactccttcctcaaaaagggaggtgggggcgcaggcttttttctcttaaactaagtgaataaacacgaatc

SEQ ID NO: 17381 - DNA, 209 bp, Homo sapiens
  chr12:939108-939317
  hypo
cggtgagtaacgtctgaagcttctgctcgcattgagtctgaatcgttcttttaatttaaggtaccccagagttcatggcccctgagatgtatgaggagaaatatgatgaatccgttgacgtttatgcttttgggatgtgcatgcttgagatggctacatctgaatatccttactcggagtgccaaaatgctgcacagatctaccgtcgc

SEQ ID NO: 17382 - DNA, 31 bp, Homo sapiens; identical to SEQ ID NO: 5744
  chr12:94543992-94544023
  binary

SEQ ID NO: 17383 - DNA, 86 bp, Homo sapiens; identical to SEQ ID NO: 5745
  chr12:94544052-94544138
  binary

SEQ ID NO: 17384 - DNA, 42 bp, Homo sapiens; identical to SEQ ID NO: 10280
  chr13:111363839-111363881
  hypo

SEQ ID NO: 17385 - DNA, 677 bp, Homo sapiens; identical to SEQ ID NO: 7929
  chr13:114293940-114294617
  hypo

SEQ ID NO: 17386 - DNA, 39 bp, Homo sapiens
  chr13:114294965-114295004
  hypo
cgcttatttgccgtgagtttggacggcacccctgctggc

SEQ ID NO: 17387 - DNA, 131 bp, Homo sapiens
  chr13:114295766-114295897
  hypo
cgcgcatgggcattttaaacaagctgtgtttctctaattcaggattattatctagaaatttgtctgtcttgttggttttactttatacttgagtgagaaagtaggttgttaggcccagacgcggtgggccc

SEQ ID NO: 17388 - DNA, 303 bp, Homo sapiens
  chr13:114565969-114566272
  binary
cggggccagcaccgtcgggctcctgaaagcacccgctgcctccaggagagcacctggcagaacggggccgcggagccgccctcccctcccgcatgcggccccgctcgattcctggaatcttatttttggacctgctgccgcaagcagttcccgccctcggccctttcaattcctctttcgggaggggactgctctccacccctctcaggaggacgaggcgcggcccgggggttcctcacctccagcccagcagagggagggccgcggggaagcggtttgggttttaaccattgtgtttctctc

SEQ ID NO: 17389 - DNA, 114 bp, Homo sapiens
  chr13:114566409-114566523
  binary
cgggccggggctcctgggaccctgaggccaggcctcgccgcgcggagctggggggcggcagcagcgctgcctctcgggagcggttggaggcgcgcgggcgccaggggttccccc

SEQ ID NO: 17390 - DNA, 168 bp, Homo sapiens; identical to SEQ ID NO: 12278
  chr13:20735265-20735433
  binary

SEQ ID NO: 17391 - DNA, 144 bp, Homo sapiens
  chr13:21407292-21407436
  hypo
cgaaaactgagctaatacttctgaacgggcttctttcaataattaaataataaatatataataataaatatttgctgagcatctgtgctagggctcaacaatgcagtgagcaaaagcatggcccatgctttcacggagcttcgc

SEQ ID NO: 17392 - DNA, 142 bp, Homo sapiens; identical to SEQ ID NO: 6867
  chr13:22243864-22244006
  binary

SEQ ID NO: 17393 - DNA, 536 bp, Homo sapiens
  chr13:22244073-22244609
  binary
cgccgccactggggatccgggcgcaggcaggctgtcccgggcgcagagcgcgccgcctccagtctctctggcgggcccggcccggcagggcccctggcggcccccggaggcgggtttctttgtccctgactcccgctgggcgcgaaggccgccggcggctaacagaaacccgagcccgcgcaacggagctcaggcttccacgtgcggccccgcagggcagagcaggaaggagcggctgcagccccggggcgccccgcaagcatccagtgcccggccctcccagctccgcggcgggcttcggacggtggagtgagacaccagaactcgcctttcgcttccccgagccgatgcacggcttgggatggcgccgctcgtcctaagcagcgtggtttgagggcgagaagacgcctactggagcgctcccctccacccagactcccgaagacgcgcgcccgagtcgaagtcggggacagagaaggttctctggcgcccccctgccgactgctttgcggccgccgggacccgagcagcggggc

SEQ ID NO: 17394 - DNA, 201 bp, Homo sapiens; identical to SEQ ID NO: 5748
  chr13:29292491-29292692
  binary

SEQ ID NO: 17395 - DNA, 242 bp, Homo sapiens; identical to SEQ ID NO: 5749
  chr13:29293342-29293584
  binary

SEQ ID NO: 17396 - DNA, 178 bp, Homo sapiens; identical to SEQ ID NO: 14606
  chr13:33000891-33001069
  binary

SEQ ID NO: 17397 - DNA, 204 bp, Homo sapiens; identical to SEQ ID NO: 14607
  chr13:33001228-33001432
  binary

SEQ ID NO: 17398 - DNA, 481 bp, Homo sapiens
  chr13:45491759-45492240
  hyper
cgggtgtatttcggcatgcgaccgcttggttcccccgctttccttcacctctgacctaatctctcacttcaaaaactgacttcaagctgttgccagatacgtcccttccgccgcctgccgcaggtggctagggtctgagcacacttgaacctcacacccgccccaggggtagctccttggttcccttcagccccgatgtgtccctcgtgctttgaaatggaattacagttttggttaaaaacatgccttttccgagttaggaagaatctaaatcgactgaacgccagtctaaaatttcggcgttcccacaccgggagtcgaacccgggccgcctgggtgaaaaccaggaatcctaaccgctagaccatgtgggagacggcaatagcgactccaagcctagacaaattgagtcttctcggtcggcttccgcccactccatcgcgttcatccgtaggcgtcaaacctgctcctgcgcctgcgc

SEQ ID NO: 17399 - DNA, 546 bp, Homo sapiens; identical to SEQ ID NO: 9091
  chr13:45492271-45492817
  hyper

SEQ ID NO: 17400 - DNA, 126 bp, Homo sapiens
  chr13:50027697-50027823
  hypo
cgctgggattacaggcatgaaccaccatgtcctgctcagttggctcttgtgtccctttgatataccgtcatcagtgtaggtattttttatttgtctttgttttatagcacttcccttttggcactc

SEQ ID NO: 17401 - DNA, 97 bp, Homo sapiens
  chr13:50050867-50050964
  hypo
cgaaacgtggaggaagtttttcgttacctgcttgagacagagtgtaactttttatttacagataacttttctttcaatacctatgttcagttggctc

SEQ ID NO: 17402 - DNA, 54 bp, Homo sapiens
  chr13:73324122-73324176
  hypo
cgtcacgtaatagccgctcattaaatatttgtgtaacaaaaacagaacgaatac

SEQ ID NO: 17403 - DNA, 139 bp, Homo sapiens; identical to SEQ ID NO: 5943
  chr13:74707123-74707262
  hyper

SEQ ID NO: 17404 - DNA, 212 bp, Homo sapiens; identical to SEQ ID NO: 5944
  chr13:74707414-74707626
  hyper

SEQ ID NO: 17405 - DNA, 915 bp, Homo sapiens
  chr13:74707668-74708583
  binary
aacagcatcgcccttccccggccccctcccgcttcccagcactttccccctttaagaacacagaccaaccaaaatgatttaacttgagcagatgacagaaggaaaataaaacacgttaagagaatacggtctgatttgggatggcaaaaaaaaaaaaaaaagaggagggggttgtttattttgataagaaacggaatcggcacagacctgaacagaagctgcagagcaggagaaattgttttctttccctcacacagagtccccctctctctctccctttctctctctcacacgcgcgcgcgcacacacacacacacactcgcacacacacggcgtcacccgcgcacacgcacacgcagagcctctcagcggctctctgcagttctcaggaaatgaatggggggcaacccggggaactgttgtacttgcaaatgacttacccggatcacatgatgcgctaaatgtagggtgggccggtgggtggaggctgccgagttgcgagccccggtctagtgtggggagcctcgccaggcccgcatcgaattaccccggggcccagccgagggggttgcaggacgccgcttctcctccctcgcagcccgcagctcaggaaaccggagaggcgcttggggtggggtggggtggggtgctgtgagggggggggccgaaaacaagaaacccccaaacaaaagagctccgggtcctcctccccagaaacaaagccccgccgctgccggcgagccccggggtggggccgagggcgggggcggcggcggggaggggctcgctcagcaggcgctaagtcgctttattgccataaaatggggcccccgagccgctccgcccgaggattaggaggcgggctctgagtgtgatggttgaaatcccctgtgggaaactaacccctccccgctc

SEQ ID NO: 17406 - DNA, 73 bp, Homo sapiens; identical to SEQ ID NO: 6878
  chr13:96409644-96409717
  hypo

SEQ ID NO: 17407 - DNA, 97 bp, Homo sapiens; identical to SEQ ID NO: 6879
  chr13:99851706-99851803
  hypo

SEQ ID NO: 17408 - DNA, 57 bp, Homo sapiens
  chr14:102335792-102335849
  hypo
cgctaggtgaatggtaagtgtgtgttgagctttctaaggaactgccaaaccgttttc

SEQ ID NO: 17409 - DNA, 142 bp, Homo sapiens
  chr14:103430237-103430379
  binary
cgcctgcctcatggcacagcagagctggcctggtttttatgaaactgacgttcattatcgtatcctcgtaaaaccagatctgcaaagaggagactctcagcaaatactgactgaatcactgctgtgtgaaaatggcgttctc

SEQ ID NO: 17410 - DNA, 265 bp, Homo sapiens
  chr14:104164986-104165251
  hypo
cggatgagaaagtggagccgctgccctggaagagctgtgtctgaaccaggctcccagctgtgccacggcccaggcagacgcgttttaaaggcccgagccccgtgtgtcggggcttctcaggcagggctgttgtgcagccgccaccgtgtcagtgggactgggtcccaggtgtccctcgcaccccttcggcactgatcgtgtaggaacaggaggaggggggcaggtggggggcagagagcacccgcagggtccgggctgggcagcc

SEQ ID NO: 17411 - DNA, 281 bp, Homo sapiens; identical to SEQ ID NO: 13397
  chr14:104194172-104194453
  hypo

SEQ ID NO: 17412 - DNA, 205 bp, Homo sapiens; identical to SEQ ID NO: 13398
  chr14:104194491-104194696
  hypo

SEQ ID NO: 17413 - DNA, 90 bp, Homo sapiens; identical to SEQ ID NO: 13399
  chr14:104194750-104194840
  hypo

SEQ ID NO: 17414 - DNA, 336 bp, Homo sapiens; identical to SEQ ID NO: 6889
  chr14:104202370-104202706
  hypo

SEQ ID NO: 17415 - DNA, 39 bp, Homo sapiens; identical to SEQ ID NO: 6895
  chr14:105214099-105214138
  hypo

SEQ ID NO: 17416 - DNA, 168 bp, Homo sapiens; identical to SEQ ID NO: 7949
  chr14:105240770-105240938
  hypo

SEQ ID NO: 17417 - DNA, 133 bp, Homo sapiens; identical to SEQ ID NO: 7950
  chr14:105241177-105241310
  hypo

SEQ ID NO: 17418 - DNA, 227 bp, Homo sapiens; identical to SEQ ID NO: 7951
  chr14:105241428-105241655
  hypo

SEQ ID NO: 17419 - DNA, 65 bp, Homo sapiens; identical to SEQ ID NO: 15572
  chr14:105268589-105268654
  hypo

SEQ ID NO: 17420 - DNA, 640 bp, Homo sapiens; identical to SEQ ID NO: 15574
  chr14:105687735-105688375
  hypo

SEQ ID NO: 17421 - DNA, 620 bp, Homo sapiens
  chr14:21539350-21539970
  hyper
cgctggacgctggagggtacgctaaggagaagcccacaccaacaggagtgaacactgccctgggaactttcactgcagagtactctgaagcaccgctgcgagagtgggcactgccagagagagcgcccactgcaaagagggcgggggcatggccaaggggccgctcgctgcagagtggaggagggggagaggccttgccagggggagctcaccgcagggagtggaggaggggcaggggcactactggggccgcccctctacggagggaagggcaccctctggcagggaggctggaggaaaaagaaagaggaactgggccagggagagctgactcagtctctctggtctcctctctggtccccgccggcaggaggctgggtctccgtgctcccgcccgccgcctccctccccagacccctcctcccctcctgccgcggccgtttcctgtggctgagactctcgctcagccatgagctcaccgcccctaatgggttgcagctgcctcgctgctcaagccctagctccgcactccctgccttggagcagacggccccactctgcctcacccccgcccatctccaccttccccccacccacgcgcactgcgtccgcctggtccc

SEQ ID NO: 17422 - DNA, 127 bp, Homo sapiens
  chr14:21689073-21689200
  hypo
cgtctctactaaaatacacaaaaaaagtcaggtatggtggcgcgccggtattcccaggaactcacaagaggctaaggcaggaggatcccttgaaaccgggaggcaaaaggtgcagtgagctgagatc

SEQ ID NO: 17423 - DNA, 68 bp, Homo sapiens
  chr14:21943040-21943108
  hypo
cagtttgatttgttttccatcaatgttgaccatacgagctccaaactccacacctgtcggtaaagacc

SEQ ID NO: 17424 - DNA, 78 bp, Homo sapiens; identical to SEQ ID NO: 16414
  chr14:23835314-23835392
  binary

SEQ ID NO: 17425 - DNA, 57 bp, Homo sapiens
  chr14:37116049-37116106
  hyper
cgggacaacttggagcctgcttctggggagccacacacgtcctctcccacttcttgc

SEQ ID NO: 17426 - DNA, 53 bp, Homo sapiens; identical to SEQ ID NO: 7954
  chr14:38725469-38725522
  hyper

SEQ ID NO: 17427 - DNA, 315 bp, Homo sapiens; identical to SEQ ID NO: 5958
  chr14:52781114-52781429
  hyper

SEQ ID NO: 17428 - DNA, 129 bp, Homo sapiens; identical to SEQ ID NO: 12307
  chr14:55595810-55595939
  hyper

SEQ ID NO: 17429 - DNA, 134 bp, Homo sapiens; identical to SEQ ID NO: 12308
  chr14:55595968-55596102
  hyper

SEQ ID NO: 17430 - DNA, 437 bp, Homo sapiens; identical to SEQ ID NO: 12309
  chr14:55596153-55596590
  hyper

SEQ ID NO: 17431 - DNA, 196 bp, Homo sapiens; identical to SEQ ID NO: 10301
  chr14:62105869-62106065
  binary

SEQ ID NO: 17432 - DNA, 241 bp, Homo sapiens
  chr14:69666624-69666865
  hypo
cgtttattgtcgttatcaggtatgtgctatacataattgcatgtgctatacttttatacgactggctgtgctgtaggttcgttaactccagcataattacacacatttgtgagtaacgcattgtgcagcaacgttaggacggttaggatggctatgatgtcactaggcaataggaatttttctgcaccattgtaatcttataattttgtagaactattgtatgtgtcatctgttgttgacc

SEQ ID NO: 17433 - DNA, 419 bp, Homo sapiens
  chr14:70236294-70236713
  hypo
tcttggttgggcctggttgactttgccagtcagctcctacagtgatcagttggccacctctagatctgtgtttgccggtctagacgttatcggtgcacttccttgaagtgccaggttgcagcgatcccagagcgttgataacgtgatctgatccctaagttgagacctgtcttcctgtaacgcttccgaataagaggtccggtcgaaaagagttgaaagatacgaaattaggtggtcgttggaatcctgatcgcagtaaagtggtccttggtaactgctcgagtagaacatgtctgcatccgccaatagtccgctaatagggagggctgtgcgattaaaggcttccatcgattgggtagtgtccttcaagtgggtggcgaagagccagtcgggcatatgtcatgaaggtttctccgacc

SEQ ID NO: 17434 - DNA, 619 bp, Homo sapiens
  chr14:73957523-73958142
  hyper
cgctgccgctacagcttgaagccaaacatttaatgaaagagagcgggaggggccgaatagaagaatgatgggcgtggccaaccccgaggtggctggaggccgcgcccccttcccagagtgcaccgcagccgctgcattcaggaaccgctttagcttcgcccccggccggccgggcggggaagactggtgtggtctggccatggatgggctccaggccagtgcagggccgttgaggcgcgggcggccgaagcgccggcgcaagccccagccacacagcgggtcggtcctggccctgcccttgaggtccaggaagatacgaaagcagctgcgaagtgttgtatcccgcatggcagcgctgaggacgcagacgctgcctagcgagaactcggaggaatcgagggtggagtcgacggccgacgacctgggggacgcgctacccggtggggcggcggtggcggcgtcccggacgcagcccggcgagagccatacggccacctggggcccgcagagctgctggaggcctcgcccgccgcgcgctccctgcagaccccgtcggcgcgcctggtgcccgcttccgcgccgcccgcgcgcctggtggaggtgcccgccgcgccggtcc

SEQ ID NO: 17435 - DNA, 150 bp, Homo sapiens
  chr14:73958379-73958529
  hyper
ggcgcctatgggagcgcgaggcggtgctggtgcggcggcaggaccacacctactaccagggacttttctctaccgctgacctggattcgatgctgcgcaacgaggaggtgcagttcggccagcatttggacgccgctcgctacatcaacg

SEQ ID NO: 17436 - DNA, 50 bp, Homo sapiens; identical to SEQ ID NO: 12316
  chr14:74208160-74208210
  hyper

SEQ ID NO: 17437 - DNA, 262 bp, Homo sapiens
  chr14:75567786-75568048
  hypo
cgcttcttgtagttcccaacgcccagctgcccacacttgttgcagccaaaggtcagcagccggcctcgctctgagagagaagcaaaaagaaataacaaggcacaaatgagtcctggaacccagagaagatgcagccaagcagacttcatggattagcttccggttgttagaatatacaaatataaaactagccacatgatcctggacctaggacaaatacagtatctaggcactataaccaattagatccagtcagcgactc

SEQ ID NO: 17438 - DNA, 129 bp, Homo sapiens
  chr14:75894282-75894411
  hyper
cgtgaaggggcttttgacttttcccccggctccggcctctcgcgtctctctcctagggctgcggctgctgctgcctggcgggcacaagccgggcggcggtgcgcggggggtgcgcttacataaccgctc

SEQ ID NO: 17439 - DNA, 333 bp, Homo sapiens
  chr14:77428133-77428466
  hyper
cggaaccttgaatgcaggggggcgggacagagaaaaaactagaaagctcgacttctgcctgcggggccggaagccccgctgcggccccagcccgcggttagcccctgtttgtcattttgcaaatctggtcaacccacctccggtgaaaactcccaacctcaccccagggggcaatgactaattacaaaacacattttctctcgttttcgtcaagctcgctgtcccgcccacacatcccccgcctatcccggcacccgtcggcttcctcaggagcctcactcaactgtgttgaatgaactcttggcctggtccctcccccagagacttcacacc

SEQ ID NO: 17440 - DNA, 144 bp, Homo sapiens
  chr14:89786296-89786440
  hypo
cggaagctcaaggatgacgctttgcatttcattactaagacaggtaaacatcagatctgctgcagaatcaaacacaattaaaactttaattaactgaaacctaactagcccccaacttcaaataaaaaacatttgcgggcagcc

SEQ ID NO: 17441 - DNA, 40 bp, Homo sapiens; identical to SEQ ID NO: 6914
  chr14:90849401-90849441
  hyper

SEQ ID NO: 17442 - DNA, 383 bp, Homo sapiens; identical to SEQ ID NO: 6915
  chr14:90849476-90849859
  binary

SEQ ID NO: 17443 - DNA, 54 bp, Homo sapiens; identical to SEQ ID NO: 6916
  chr14:90849897-90849951
  binary

SEQ ID NO: 17444 - DNA, 67 bp, Homo sapiens; identical to SEQ ID NO: 6917
  chr14:90850476-90850543
  hyper

SEQ ID NO: 17445 - DNA, 74 bp, Homo sapiens
  chr14:91580279-91580353
  hyper
cggggagagcaggttaactcttgcagggagaactgggcttgcagggtccagccagctgccagcagctctgcagc

SEQ ID NO: 17446 - DNA, 201 bp, Homo sapiens
  chr14:91580494-91580695
  hyper
aaccccccgtggcgcaggagagcagaagaaagggggcctttatgcccttttgagggaagcacacattctgcaaggccgtggaaacaaagggaggaactgtttgtagccctcgtccagacgccccaaacaaacagtaagtcagaagggaacagagcacagcacagtccctccctccgccccaggcagtatccaccttgcccc

SEQ ID NO: 17447 - DNA, 479 bp, Homo sapiens
  chr14:91581063-91581542
  hyper
cgcaggcacacaggccagagcttcgtggatacctgcagggcccaaaggtccctccctgttttgaagagtgagtgatggctatgaggtagcggccaggctgatcacccctgcgttggctggaggcagaattctgtaaatcctcgccaagtctttctccaggccactggttagctcatctcagcctcctctgggagcatcaacaccaacatggcacaggggactgcagtggtgtgctttggacctgtgtacccacccaaggctaaaggcagagccaggtgactttgcgggggtctcttctctaggattatctgtacttcccctctgtcctcttttactacgggagatcgagctagctataacccaccttctttcatgagaaccacactaaattgcaaaaattatcccagtgctggaggagggcagcaggttgagattatgttggcaggaagaatgttggcattgattggcacgcaggggac

SEQ ID NO: 17448 - DNA, 259 bp, Homo sapiens; identical to SEQ ID NO: 6918
  chr14:91757493-91757752
  hypo

SEQ ID NO: 17449 - DNA, 247 bp, Homo sapiens; identical to SEQ ID NO: 6922
  chr15:101938625-101938872
  hypo

SEQ ID NO: 17450 - DNA, 99 bp, Homo sapiens; identical to SEQ ID NO: 16437
  chr15:28341522-28341621
  hyper

SEQ ID NO: 17451 - DNA, 247 bp, Homo sapiens
  chr15:31620800-31621047
  binary
cggtgcggggcgggcggcacctgcaccagggcgggcgctgagcctccagcctggggatcaccgcccgcccccgccagcccagcggcaacagttcccacgcgcggcccgatactttgtagttgattcatctgtggcggttccctcccccctttttgtttcgtttttaacataaagatgaaaatattttaatggacggcaatccttccccattttggtgtaaagaattgtatgcttcctctgagctcac

SEQ ID NO: 17452 - DNA, 90 bp, Homo sapiens
  chr15:35014062-35014152
  hyper
cgcgcaactggagagggcccttctgcaggagagaagagggaatgtgctgaatgagttaaagtgccctttgtccaccccccccccccgccc

SEQ ID NO: 17453 - DNA, 110 bp, Homo sapiens
  chr15:35014287-35014397
  hyper
gggctggcgctcacgcaggccgccagcaccctgcgctccaccccaccctgctccctaatgagaagagaggagctgaacccagacagccgctccctgttgacgccttaggc

SEQ ID NO: 17454 - DNA, 103 bp, Homo sapiens; identical to SEQ ID NO: 7976
  chr15:40676583-40676686
  hypo

SEQ ID NO: 17455 - DNA, 385 bp, Homo sapiens; identical to SEQ ID NO: 11124
  chr15:41786420-41786805
  hyper

SEQ ID NO: 17456 - DNA, 213 bp, Homo sapiens; identical to SEQ ID NO: 7977
  chr15:41805862-41806075
  hyper

SEQ ID NO: 17457 - DNA, 42 bp, Homo sapiens
  chr15:43415157-43415199
  hyper
cgtaaatccttccagtttttggcgcccgggtatttgacttgc

SEQ ID NO: 17458 - DNA, 279 bp, Homo sapiens
  chr15:43415273-43415552
  hyper
cggctcctcacactcagtgtttaggaggtatcatcatatcatgggctgacaggaatgacgggagagaaaccttaacgcagagtgagtccccatggaaaccgcgccaaccccgaccgggggcgtcgccagcgggaaggggtgggtcccctctcgaataccccgcccggctccgggaacgtcaccgacgctctggggcttttgctaagaagcgctcgcccaggaggaggcagggcaaattggtgaacagggcggcgtgtccttatacgggcacgaactcgc

SEQ ID NO: 17459 - DNA, 92 bp, Homo sapiens
  chr15:45406361-45406453
  hyper
cgccagtgtgagcatctggacctagggctcaccctcctgccgtggaggtggggcccttatttgcacaacctcttccagctcagaccagcccc

SEQ ID NO: 17460 - DNA, 54 bp, Homo sapiens
  chr15:45406895-45406949
  hyper
tttggctctagcagcaagcttcctgctcatcttgccggggatccgtggccactc

SEQ ID NO: 17461 - DNA, 211 bp, Homo sapiens; identical to SEQ ID NO: 10309
  chr15:45669920-45670131
  hyper

SEQ ID NO: 17462 - DNA, 275 bp, Homo sapiens; identical to SEQ ID NO: 10310
  chr15:45670188-45670463
  binary

SEQ ID NO: 17463 - DNA, 344 bp, Homo sapiens; identical to SEQ ID NO: 11128
  chr15:51386268-51386612
  hyper

SEQ ID NO: 17464 - DNA, 76 bp, Homo sapiens; identical to SEQ ID NO: 7979
  chr15:63695768-63695844
  hypo

SEQ ID NO: 17465 - DNA, 53 bp, Homo sapiens; identical to SEQ ID NO: 16453
  chr15:68723471-68723524
  hyper

SEQ ID NO: 17466 - DNA, 110 bp, Homo sapiens
  chr15:68724333-68724443
  hyper
ggcagagggtgggcacctacctggccacaggctgagcgcccaggccaccaccaggcccctgggcaggtccatggcccgcggcacggcggctgggtccggtgtgcagcggc

SEQ ID NO: 17467 - DNA, 188 bp, Homo sapiens
  chr15:68724480-68724668
  hyper
cgcggcgcctgcagcctgcactgcgcggggcgccgggctccctgacagctgcggctcattcagaggaagtgggagggctcgagcggaggggaggggcgccggacaccactccggctcgggctctgggccagtctcggccgctctgccacctgggcaggcggcgcgctgcctcgacgcgcctgtgcagc

SEQ ID NO: 17468 - DNA, 331 bp, Homo sapiens
  chr15:72668400-72668731
  hyper
cgtgaccagaggcggctctgcgcctgcgaccccaggaggacccacaccctgccctttcacttccggcctggacctgaggctcctgctacgtgcagcggattgtgccgggcgtcggcaactgctcggctcgccagactgttcacgggcccagtagagcagtaaataaccggccacccctgcggccgtgccggccgtgatggaactagacagctcacccgactcgagaagaacggggtggggaggcgaggacgcagggcgacctggagaagaaagtttcccagatggctctagggtgaatcttgaatgttgtgatgcagctcgccaggcctac

SEQ ID NO: 17469 - DNA, 139 bp, Homo sapiens; identical to SEQ ID NO: 14674
  chr15:75470758-75470897
  hyper

SEQ ID NO: 17470 - DNA, 494 bp, Homo sapiens; identical to SEQ ID NO: 14680
  chr15:89437837-89438331
  hyper

SEQ ID NO: 17471 - DNA, 359 bp, Homo sapiens; identical to SEQ ID NO: 7985
  chr15:89438421-89438780
  hyper

SEQ ID NO: 17472 - DNA, 101 bp, Homo sapiens; identical to SEQ ID NO: 7986
  chr15:89438863-89438964
  hyper

SEQ ID NO: 17473 - DNA, 325 bp, Homo sapiens
  chr15:99090794-99091119
  hyper
cgtcatattcagccctgtttaattcccactgtcttgggtctagaatttaggcttttgagaaatctttattgaattaatgaaaactcaaagaccacgattctgcattcccccaaatcctgaagtgcagtaggagcccatgcagggcttgggacgggctttttgcctcagcagccaggacagcctctgcatccgtgaccacctccccgcccccctcgcattcccccccatcccctggtgatatccttctagcgcaggctcgtgctctggaggcggggtggggccgggattctgcagctgtaaccaactcccccgctgggggcatggg

SEQ ID NO: 17474 - DNA, 237 bp, Homo sapiens
  chr15:99091372-99091609
  hyper
actccgcataaactcccgttccagcccaaatcagaggcggtcgcagcagccgttcctcgtctccatcagcatccgcgttgccatttccccgtcctgagctgttgctcatatcaaatgtcactcggggatgactaagagccgatgttgatgaggagccttcagcgttacggtaaaggagctcgtgcaaacttagaccccagtcatctgacggtcacgtgggcgggcgtcgcggcccag

SEQ ID NO: 17475 - DNA, 77 bp, Homo sapiens
  chr16:11974709-11974786
  hypo
cgtaggttgccaaccccatgaattttttattgtaaaagtctggcctcttttttatttgatatttgagacggagtctc

SEQ ID NO: 17476 - DNA, 349 bp, Homo sapiens
  chr16:14396725-14397074
  binary
cgaggcggtggagcgtccgcgtccccgcccccaccccggaaagcccgctcgggaaactgactcgctgcgtgaccccgatctcaatgccgcgcgcggagcaggccggccgcgcccgccgctccacgtgcgcccgagccccgctggcatgggcggcggcgcctgcgggggccgggccccggggatcccggactagccgggaaccaccgtccccagagagttaccgccgccccctaaagttgtcagctccctccccccgagaagcaggcagccctggcgcgttggctttagcttctgcaggacgggggcaaaaaaactaggttccggggtgcggagcggggtgtctgtgccc

SEQ ID NO: 17477 - DNA, 53 bp, Homo sapiens; identical to SEQ ID NO: 6945
  chr16:1472227-1472280
  hypo

SEQ ID NO: 17478 - DNA, 195 bp, Homo sapiens; identical to SEQ ID NO: 7998
  chr16:1730112-1730307
  hypo

SEQ ID NO: 17479 - DNA, 105 bp, Homo sapiens; identical to SEQ ID NO: 7999
  chr16:1730761-1730866
  hypo

SEQ ID NO: 17480 - DNA, 73 bp, Homo sapiens; identical to SEQ ID NO: 6951
  chr16:2278311-2278384
  hypo

SEQ ID NO: 17481 - DNA, 156 bp, Homo sapiens
  chr16:23402123-23402279
  hypo
cggctgactcaggaagagctgcttcccagcaaaggtgccgccaggcacgtacttactcctttacaagtttatccataaaaccgtgagctccacttgactgtcagccaagagctgcaaagagcgggcccacagtctactaggacatttttgtttggc

SEQ ID NO: 17482 - DNA, 167 bp, Homo sapiens
  chr16:25704644-25704811
  hyper
gactccagcgaaaggtcactttatttcagggcgaggggaggaggtgtcaccctgccctgcctcccgcgctcctcatccaaggaggtgctgtctgaatctgcccagctccaagcctgggaacccccagccctcctgcctgctgggtgtttccgaaaccaggctcttgc

SEQ ID NO: 17483 - DNA, 43 bp, Homo sapiens
  chr16:27539990-27540033
  hypo
cggcgttcagcatatactggtacagacgcttaaacgtcctttc

SEQ ID NO: 17484 - DNA, 465 bp, Homo sapiens
  chr16:31213480-31213945
  hyper
cgactgaggaggggcctggatcccagctggcgcggctccagagcctggaaggatatgggccaagtgatccccttcccttcccttcccgccgtggggccggggtcccgttggtcggtaggccaagcgtggggagcctcctttccggtagagcagctttgtttaggggtaggaggaacagaaagcggaagagcccgcggggtaagcgctggtgtgggtggaggggaaagacggggtggaggggaacgggggcggctcaccctggtgcgtggccgcctgcagctgcccggccatctcctgcaggcccatgtcgcgcagcacgttagcggtgagctcggcgccgtaggtctccaggtagaagctgaccagcttgtcggtgaggtccaaggcgtccatggacagcagcgcgccccgcgggatgcgcccgtagccctcgcgcagcggcaccgacagcagcttcagcttgaa

SEQ ID NO: 17485 - DNA, 125 bp, Homo sapiens
  chr16:4092845-4092970
  hypo
gttttggtctgctaacttatcaactgtatgatttgggcaagttcctaaacttctctgtgcttcgtttctcccctttgtaaaacaggactaaaaatattaaaactcggccgggcgcagtggctcac

SEQ ID NO: 17486 - DNA, 176 bp, Homo sapiens; identical to SEQ ID NO: 6963
  chr16:4478626-4478802
  hypo

SEQ ID NO: 17487 - DNA, 59 bp, Homo sapiens; identical to SEQ ID NO: 8031
  chr16:4719497-4719556
  hypo

SEQ ID NO: 17488 - DNA, 69 bp, Homo sapiens
  chr16:49767035-49767104
  hypo
agccttcgatattgtaagtcatcatacaaccatggttacacagtcaagtgcccgtctccgaaattcctc

SEQ ID NO: 17489 - DNA, 163 bp, Homo sapiens
  chr16:53337696-53337859
  hypo
cgcattgaacttctaaggaaagtacgggaacaggcccttcgacatccacagttgtttgaacgcttgaagctttgccatccaaatccagatttaccagtctggtgggaatgtggccctcatgatagggatttgcttattggtgctgccaaacacggggtgagcc

SEQ ID NO: 17490 - DNA, 107 bp, Homo sapiens
  chr16:56782274-56782381
  hypo
cgggagagcgcctgcgttcccgtaccctaacacgcacgtcccaggagacggcagatgtcaaggcgtgagtactggtagggagacagcattagtactgggtggcttgc

SEQ ID NO: 17491 - DNA, 287 bp, Homo sapiens
  chr16:57519818-57520105
  hyper
cgaacaggaggccccggggaggagcaggaaggcagagagaaggttgggagctgccaggggctgggttatgccccttccgggggggcaggcccgggagcgcagggcctgggttgctcggatgaggtttgtgtgggtgcgggtgaggtcagctcgcgacctgggctcccccggagaggaaagctgcgggtggagagagcgcagggagtttcagggcccaggcactggcttttggggggcgggtctctaagctccccacccgagagtaggaaggtcccatgggacggagc

SEQ ID NO: 17492 - DNA, 72 bp, Homo sapiens
  chr16:58558309-58558381
  hypo
cgtgtttgtgagtctgtcacagtgacacgtttctctaaaggctgccgtccttttattgccgagctcttggac

SEQ ID NO: 17493 - DNA, 78 bp, Homo sapiens; identical to SEQ ID NO: 13528
  chr16:667407-667485
  hypo

SEQ ID NO: 17494 - DNA, 783 bp, Homo sapiens; identical to SEQ ID NO: 8044
  chr16:67204024-67204807
  hyper

SEQ ID NO: 17495 - DNA, 134 bp, Homo sapiens; identical to SEQ ID NO: 8047
  chr16:68118915-68119049
  binary

SEQ ID NO: 17496 - DNA, 111 bp, Homo sapiens
  chr16:69760293-69760404
  hyper
cgagagacgaccgccaagcaccccgccctttgcagcactcaccgaccatggctctggtgcagtccggggcgctgattggctgggctcgtggttgccggggcgaccctggcc

SEQ ID NO: 17497 - DNA, 310 bp, Homo sapiens
  chr16:70811523-70811833
  hypo
cggagcaagtgaagaggcacagatgaggggctgccctgactggaggtcctgtggttagaggaggagggagaagatgcggaggtggggcaggggtgcaaatatgcacacacacaaaggttcttgcccggaggtgtgccatgaggaacgtggtgctgtcggcggatcagcacaagtaaacaaagaaggccaggcatgaggtcctgtctccagccaggtggaccagagtgggaacagagggagcagagagggaagagtgagcaggagaggctgtgatgaacttgtccctgaccagcgaagctatctgtcctgc

SEQ ID NO: 17498 - DNA, 284 bp, Homo sapiens
  chr16:77227386-77227670
  hypo
cgccccagtcagaggccctgtcaagcacctctcggctctggagtcctgcagcccctgagaatagtcccacatgtagccctgagagtagctctggaggccagggcggggaccccagtgatgaggagtggcgcagccagcggaagcatgtgtttgtgctgagtgaggctggcaagcccatctactcgcggtatggtagtgtggaggcgctgtcggctaccatgggtgtaatgaccgccctggtgtcctttgtgcagagtgcgggagatgccatccgtgccatctac

SEQ ID NO: 17499 - DNA, 346 bp, Homo sapiens
  chr16:84813536-84813882
  hypo
cgtgtttctttgaatgcgaatgccttttcgggtaactgaaattcatgggggcatgagtttgcctgcagaattaaaatctgcccttcgatcagctcgacgtgtttgtggaagctgaaccaccactcaggttatgcttgtttagtattttcaaatggattagtgatttgggtacacgaagtttttgactcttcgattggcagaaaggaggaggttttctccccttcccctcctcatcccttgtttctatagcccaccgttttcagtatcaccaaaatagttgctgtaggtcaaggctaaatgctcttcagttgagtgccactggggcggctgagcggtgcctccagac

SEQ ID NO: 17500 - DNA, 465 bp, Homo sapiens; identical to SEQ ID NO: 8062
  chr16:87417704-87418169
  binary

SEQ ID NO: 17501 - DNA, 50 bp, Homo sapiens; identical to SEQ ID NO: 8063
  chr16:87418200-87418250
  binary

SEQ ID NO: 17502 - DNA, 171 bp, Homo sapiens; identical to SEQ ID NO: 8067
  chr16:88106152-88106323
  hypo

SEQ ID NO: 17503 - DNA, 96 bp, Homo sapiens; identical to SEQ ID NO: 8068
  chr16:88106398-88106494
  hypo

SEQ ID NO: 17504 - DNA, 328 bp, Homo sapiens; identical to SEQ ID NO: 8069
  chr16:88111298-88111626
  hypo

SEQ ID NO: 17505 - DNA, 414 bp, Homo sapiens
  chr16:8995963-8996377
  hypo
cgctccactagcagccagctcgggatcaactgtttccaggaatattgtccaagggttttcattatcactgagctcaatcatctatttccaaaagagacgctgattttagaagagtctaatggcttaggtgacagagcgaaaaactacagtcaagtattgaagaaaacgtccaattctagttaagtggaccaaaagggaaacaagctgcactaagtgcagaggactaacgccttctgcacggttccaaaccagatacgctattaacaatatttactgttttattgccgtcggcttcattatctaacattgctggtcgttttgttccattactccttgcttgcatgggccacaatcgaatttgatcttgtggaaatccctgaaaaaaatattaagagtagattaaaataaaaacac

SEQ ID NO: 17506 - DNA, 119 bp, Homo sapiens
  chr17:12032523-12032642
  hypo
cgtgaaaggagatcctccgcagctgagtaattctgaggaaagggaattctccccgagtttcatcaactttgtcaacttgtggtgagtacctgatttatgaatggtcgaacacgcatggc

SEQ ID NO: 17507 - DNA, 155 bp, Homo sapiens
  chr17:1241096-1241251
  hypo
cgatttatagatttaataaaatcataagcaaaatcccagcaggtttctgttgttgctggtctgttactgaaatcgacaaactgattcttaaatgtatgcggaaatgcaaaaaccaataaaatcttgaacagcaaacctggaggcctcacgttacc

SEQ ID NO: 17508 - DNA, 270 bp, Homo sapiens
  chr17:1407895-1408165
  hypo
cgtgcgatgaagaagcctgttactccttacttatatattctttgagactcagttgctttccttgtaaacaggcaataataacactgtttacctaacgaggacatggtaggaactgatacaggcaaagccttggcgcacacctgcacgccaatcacaatgagctgttatttggaaataggtgcgtgcctcctccttagcgggagtctgccttcctcaccgtgccatcctttttcctcttgctggcaaggatgaccatgaatcctgaggtac

SEQ ID NO: 17509 - DNA, 210 bp, Homo sapiens
  chr17:17104713-17104923
  hypo
cggagctatctgtatatgacacacacattataaacaaataacctggaacatttcacagtgtacgacacctgttctacctgggaatgcaaaccctgagctgcaaataagaacacagacgtgggagacaccacggcctgaagctgctctcctcttccccgctctcctctcctccggtcccgtgatgggttacgctgagccagcaatgtgcac

SEQ ID NO: 17510 - DNA, 226 bp, Homo sapiens
  chr17:17120248-17120474
  hypo
cgcccccagtggagaccgtgtggtgcacagcggttctgtgctgggcagtcggtgcaccttggcatccccacctgacgccaggcaccaggccaatactgccctgcgccgcacacctaaggaaaagatgttctcacccgaagtacttcaaaagctgactggacgaggtccacgtctctgcttttccagatcacctggttccccatgagaacgtgccaggccagcatgc

SEQ ID NO: 17511 - DNA, 112 bp, Homo sapiens; identical to SEQ ID NO: 7002
  chr17:19513145-19513257
  hypo

SEQ ID NO: 17512 - DNA, 226 bp, Homo sapiens
  chr17:20903670-20903896
  hypo
cgccgccgcctcctgtgagcagctcttcagcagcaggcatcaggtaactgcttagaacggcaatgccacagtggaataagggggactaacttggatacgaaagtttagaataatgcccaccaaaaatccatgtgactccatctctcttcccagttctaatgttctcagaacagcagccacccctgaatgcaagtggagacaggaaggggactaggggttggccggc

SEQ ID NO: 17513 - DNA, 232 bp, Homo sapiens; identical to SEQ ID NO: 6465
  chr17:21104115-21104347
  hypo

SEQ ID NO: 17514 - DNA, 356 bp, Homo sapiens; identical to SEQ ID NO: 8084
  chr17:27038294-27038650
  hyper

SEQ ID NO: 17515 - DNA, 126 bp, Homo sapiens
  chr17:30804383-30804509
  hypo
cggctcttcttcccgggcgtctgaagaagaacgatggtggggcgggttcttccttttggcagaagttgtgtggacacagcatactgcttatgagacttgggtaaatgttagtgtgcagaataaatc

SEQ ID NO: 17516 - DNA, 308 bp, Homo sapiens; identical to SEQ ID NO: 10360
  chr17:33700165-33700473
  hyper

SEQ ID NO: 17517 - DNA, 207 bp, Homo sapiens; identical to SEQ ID NO: 10361
  chr17:33701376-33701583
  hyper

SEQ ID NO: 17518 - DNA, 168 bp, Homo sapiens; identical to SEQ ID NO: 10362
  chr17:33701612-33701780
  hyper

SEQ ID NO: 17519 - DNA, 130 bp, Homo sapiens; identical to SEQ ID NO: 8091
  chr17:35545278-35545408
  hypo

SEQ ID NO: 17520 - DNA, 130 bp, Homo sapiens; identical to SEQ ID NO: 12395
  chr17:38478466-38478596
  hyper

SEQ ID NO: 17521 - DNA, 322 bp, Homo sapiens
  chr17:4048756-4049078
  hypo
cgttgcgctgccctgctgcgtgctgtgggagctgtcgttggatgtttgcacaagtgtgggcataaaaccttcgatgtctggagtgctttttatttttcagtgtgctctgctgtttactgagctcccgtgttctggtattcattgaccatctttatttaccactacctaccttgtgtcaggggctgtggaatccaagatgtctgcaacatgctccccaccgcccacacagtctagttgggaagcagttatgtccacgtattcgttcattcagtattttatttctcattgagatgtaattcacgtgatgtaaagtccttttaac

SEQ ID NO: 17522 - DNA, 213 bp, Homo sapiens
  chr17:40573874-40574087
  hyper
ctgtccacccactccaccagcccctcttgcactcctgacgcccactcttccccgcccagccccgcccgcttccaggaggcccagggtgccagcgcgccgcgggtgagggtgtcctcaagggcctgaaaatgcctggtggccaggagcagagagcagcgaggggacaggggtgggccgccgaggccgatgtgggggcgcgggggcgcagggtct

SEQ ID NO: 17523 - DNA, 63 bp, Homo sapiens
  chr17:42402710-42402773
  binary
cgtgagccgccgcgccggccttaacagcgcattttcaccagccccgccccggccgcgcgcggc

SEQ ID NO: 17524 - DNA, 192 bp, Homo sapiens
  chr17:42402917-42403109
  binary
ggctacccgccgagacttgaaaacttcgcggcgacttctctcgccggccttagcatcgcccccatttttcaggttacaggacaggcctgcaactgcaaaacgctttgtaaaccacagggccccgcgcgggtgtgcgccactgggttagctgagctgcagcccgggccgggcgggctgggacgtgagcaagcc

SEQ ID NO: 17525 - DNA, 59 bp, Homo sapiens
  chr17:45689891-45689950
  hypo
cgttagaagaagcccgtcgtcggtttaaggaccacgtggaaggaaaacagattctctcc

SEQ ID NO: 17526 - DNA, 325 bp, Homo sapiens; identical to SEQ ID NO: 8115
  chr17:46829655-46829980
  hyper

SEQ ID NO: 17527 - DNA, 45 bp, Homo sapiens; identical to SEQ ID NO: 8116
  chr17:46830655-46830700
  hyper

SEQ ID NO: 17528 - DNA, 132 bp, Homo sapiens
  chr17:46831595-46831727
  hyper
cgtggcacatgaaaaattcaggatgaacgccctggctgaaagctcttcctgggtttgggacatcagaagaccttcccgggatgggctcttgtctctgcagtagctatgacctgcacataaacctgtttccta

SEQ ID NO: 17529 - DNA, 55 bp, Homo sapiens; identical to SEQ ID NO: 8118
  chr17:46832887-46832942
  hyper

SEQ ID NO: 17530 - DNA, 205 bp, Homo sapiens
  chr17:48503201-48503406
  hyper
cagcacgtgacccgagggggcaggggatggatggatcttgaccttgccatctggcccctcacggatgtgctgctggctctccctctaggaaatcaacaaatttttgcgcttctaacatccaggcccctgaggatggtcgcgaggaagatctgtttcggactgcagctggggccttcggatccagaggaaaccagggctattcttc

SEQ ID NO: 17531 - DNA, 515 bp, Homo sapiens
  chr17:4853391-4853906
  binary
cggcgggggtgagtcaccgggcgcgcgctgccccggcgccgacgggaagggcctccgagtcgggccgaggcgccgtgtgtcccccgccggtcggctggtatggctgcagaggagctcggggcagaccccgcactggccccagagccggcaaagtggagatctctaccgagggcagagacctacctccccgcagtgctacaagtggggcgccggaagagccccaggcgtgcagaagctcacaaaaggccacccgtcctcggtccattcatttttgttcactgttgattcagccccattcattgatgggctggggccgtgcgctgagcgcccacagtcgatggggaaaggggctctgaccgacagtccccacgccgggcgacaagtgctgtcccagcgttatcagtcgggcgccttgccagccgaaagggcctgtctaaattcgtttcctgtcccctaactcatcccggcgctggctggcctggagagggtaggatggggcggcgccgagaatggcc

SEQ ID NO: 17532 - DNA, 267 bp, Homo sapiens
  chr17:49008887-49009154
  binary
atgaagtctatattctgggctacaggcacactaaaaacggcagcgccagggcccagcgccgctcgcgcgtgcaccacgcgccggctttttttggttcctccgaggcgcgggcagctctgcagccgcgggggccgcaggaggtgggggctggacccgcccggagctcgggagggcccgggatggccccggggagcgcaggtcccggcaggggccgagcgaacaagggccggcctggggcgcccagagacgcgggggaccgttctggtc

SEQ ID NO: 17533 - DNA, 134 bp, Homo sapiens
  chr17:49281042-49281176
  hypo
cggccatgcccggcctttaatttccatattactctaacattactatgtgtaaaatagcattaaagtacacatataaaaaaattacggtaagggtaaataaactacttacttctaggaggaacaagaggttttcc

SEQ ID NO: 17534 - DNA, 111 bp, Homo sapiens; identical to SEQ ID NO: 14733
  chr17:53343657-53343768
  hyper

SEQ ID NO: 17535 - DNA, 266 bp, Homo sapiens
  chr17:55917220-55917486
  hypo
cgttttcttccaacgcagtctgtggtctgacactcaagtgttcggatttccgggaaacgtgactacctccgtgttgcttaaaagaccagatttaagtatcacagagatgttatcattttcactcaattaattcgctaaagatatataactaggcacattctgtcactgagtgaaaaatttagcactaatatcttagatccaattctactataacaaatagtaaacatgattttaaaaagtctatagggccgggcgtggtggctcac

SEQ ID NO: 17536 - DNA, 40 bp, Homo sapiens
  chr17:57948205-57948245
  hypo
cggagcaactaactcagcaaataatcactgagcgtttacc

SEQ ID NO: 17537 - DNA, 80 bp, Homo sapiens; identical to SEQ ID NO: 8121
  chr17:58498618-58498698
  hyper

SEQ ID NO: 17538 - DNA, 41 bp, Homo sapiens; identical to SEQ ID NO: 14739
  chr17:60885408-60885449
  binary

SEQ ID NO: 17539 - DNA, 308 bp, Homo sapiens; identical to SEQ ID NO: 14740
  chr17:60885548-60885856
  binary

SEQ ID NO: 17540 - DNA, 154 bp, Homo sapiens
  chr17:61553834-61553988
  binary
cggccgccctgagcccctccagcacctcccggaggcgcctgcaagacacctaaggtccccgcctccctcctctcccccccgccacacccctacccccggcaggcgacgtccccgcccctcgaccatggcctggtgaagaagccggccaggcccg

SEQ ID NO: 17541 - DNA, 322 bp, Homo sapiens
  chr17:61554094-61554416
  binary
gagccggaggccgctaggctcccaggccccggccgaggctgcgcggccgcacggtgggcaggctcgggtgttccggcaaactgccgggtccccatcttctaaagagaggaggccctttctccagcttcctctgcgggagcccgacccagccccatcccgccacccccgggctgcacctcggcccctccccggcccgcgcccctgcccggggcgggccaggaacctcggcccgcgccgctggggactctggagcggaggaggaagcgcggcggggcgggggcgggggtgtgtcgggttttataacccgcagggcggccgcggc

SEQ ID NO: 17542 - DNA, 112 bp, Homo sapiens; identical to SEQ ID NO: 7021
  chr17:61777761-61777873
  binary

SEQ ID NO: 17543 - DNA, 76 bp, Homo sapiens; identical to SEQ ID NO: 7022
  chr17:61778423-61778499
  binary

SEQ ID NO: 17544 - DNA, 128 bp, Homo sapiens
  chr17:61817226-61817354
  hypo
cgggacggctgctccgacgaaggcccgggcctggggagatggaatcggtggcagagcgaggagtgactggctccggcagtgcaccaggcaccccgccaggcaggtacctgttcctggtttcaaactcc

SEQ ID NO: 17545 - DNA, 95 bp, Homo sapiens
  chr17:66426282-66426377
  hypo
cgaaggctcttctggtcgactagggagtaatgcacaggcaacgatgggactgggctgcaggccccacacgcacccaggaatctccacacccaagc

SEQ ID NO: 17546 - DNA, 425 bp, Homo sapiens; identical to SEQ ID NO: 6477
  chr17:66440125-66440550
  hypo

SEQ ID NO: 17547 - DNA, 409 bp, Homo sapiens; identical to SEQ ID NO: 14742
  chr17:6939640-6940049
  hyper

SEQ ID NO: 17548 - DNA, 201 bp, Homo sapiens
  chr17:71201650-71201851
  hypo
tcctctctcttcatgggtggggactgggaattcatttgcagaaagaaggtgcatttccagtcacccagaaccgggcgctgcagctgctttatgatctgcgttacctcaacattgttctgacagccaagggtgacgaggtgaagagtggccggagcaagccagactccaggtgtcgtatcctctagggagctatgtcaaggc

SEQ ID NO: 17549 - DNA, 497 bp, Homo sapiens
  chr17:72209877-72210374
  hyper
cgcagccacgcgcgccccaagtccccgcactaccccctctcccctcgagagcctgcactttcccacgtgcctctcagaccccttctctccccgcgcagccctttcccgtctcccctctccccttttcccccaccctcccaggcccgtggcccgcgtcccctcctgtctgggaacctgggggccgggaaaactgaagagatcagagtgaagcgagcgtggggaaggggaggaagggcgcaagaccgcctgcggggtgaggggctgaacgctgagcgggcagggcggcgcgggggaggggtaaggacaggggcattcgtctcggggtaatcctggcgcgcgaggtgcggggatgctgaggggtgccccgaagttttcgaccgtctgagattccaagatggggcgctctctttccggggctgagtggcctaggaaagtttggcagaaactgagtagagtctcccgagtcggtcttcgcagcacccctcctccccagcccc

SEQ ID NO: 17550 - DNA, 1419 bp, Homo sapiens
  chr17:73029792-73031211
  hyper
cgtcccagtgccgggggctgggggctggtgctcgctaagtaaggatgggggcaggtccctgcgcaccgcggtatcttcccgcccgctcaccaaaagtgcgcgcggcagggacggacccactccatggatcgcgcctctgtcaggccttctctaggaaaaggggacactcgcttatgaggggaagggatggcacggccacgtgccccaagccccagtggcctaatggataaggcactggcctcctaagccagggattgtgggttcgagtcccacctggggtagaggtgaaagttccttttacggaattttttatttcttttctcttcccttctcagggatgctggaatcgaccttggtctctagttcgactcccgtgcaacgtgttgaggaggagccacctcctccaagcgcctaaagccggtaagctcgggtcttgccaagcccttgaatgaacagctttcgtccgggtagggccccacaatttcgaagctggggaaactcgtaagaataaagttgcccaaagggttcccaggacaccccagctccacctggcggggcagccccggagaaccagaggtaaatgaccaccgcgactgcaaacagagggtcctgcaagagaaggcgaggggcgcaaacagggcagaggcaagcaggtagcgggcaggtggtggtggattctgaggtctctggctgccggcaccaaaagaaaccttgcgagcacagcccctctcgacaccccaggtgggactcgaacccacaatccctggcttaggaggccagtgccttatccattaggccactggggcgcggtaagacgctaaacccacgtgctccttgataggtgttcaaccatagtgcccaaacacggccctgctgtgggtcaccgcgctccaagcctgagaagccatggggacgacaggatgaaccgctggctgggcgcggcgtccccaccgggctacacaagagctccatgcggtgacgacgcgcggggaccaggagcccgcggtgccctgtaaccccgagaagaagtgctcggcgagcgcagaggccggtggagcatagctgggaggaatagggatggacgagggcggagggaagaacaaaccctcaaactatgctgggattcgggcaagggctgctcgctccaaaagagcccgaccacaaaggaaccctcaatcttatgatctgacgtcagacgcctcatcccttaggccacgcggtcgcaattcccagggaggctcagagactagtccaggtgccgctccgctcgggggtgactaggcgggcggctggggccagaggaagggtgagcgcttcgctcaacaggcggccagggtgcgagcagtgaagctgcggcacgccggagcgtttaatggccatcaaattggcctctctaggaggtagctgcagccggagacc

SEQ ID NO: 17551 - DNA, 81 bp, Homo sapiens; identical to SEQ ID NO: 7025
  chr17:73584287-73584368
  binary

SEQ ID NO: 17552 - DNA, 170 bp, Homo sapiens; identical to SEQ ID NO: 7026
  chr17:73584951-73585121
  binary

SEQ ID NO: 17553 - DNA, 92 bp, Homo sapiens; identical to SEQ ID NO: 8136
  chr17:74965156-74965248
  hyper

SEQ ID NO: 17554 - DNA, 84 bp, Homo sapiens
  chr17:76100954-76101038
  hypo
cgacccctcccgggacccctcccggctgggcggccccacagacccgctggaacccagcagcggccgcccttttgagtacctctg

SEQ ID NO: 17555 - DNA, 192 bp, Homo sapiens
  chr17:76355660-76355852
  hyper
cgaaggccccagccggagtattccgggaacctgggatctccggcttccatccgctctgcccctacctcgtcacctccctgccgggaatgacccgggaaggggaggggaaaccgggaaaagctcccgggactgagcgagacccctccccacgccgcgctcctccttcctacctggtcccgaatcgaagtctcc

SEQ ID NO: 17556 - DNA, 360 bp, Homo sapiens
  chr17:76588327-76588687
  hyper
cgcgcttctgttgacctttggtcctgtttgcaggaagctctcaagtttaactctgaacttgaagggaaggaagggagtgaaccacatggccctggggtcggggcctctggccgaagggcgctcagcttggtctgtaaaatgaaatgtgttttgaatgtcatgagtcaggaaaaaagaatttgagcgcagtctggaaatgaaatttcctgcctgtggtttgactcacgtctgtctgtctcgaaatctaccccaaggacatttattccactgtgacagggctcatctctgaggagcaccagactcctgcggtggggagggaagattatccgcgctgcagagactagctggcctccggaagcc

SEQ ID NO: 17557 - DNA, 632 bp, Homo sapiens; identical to SEQ ID NO: 10389
  chr17:76992727-76993359
  hypo

SEQ ID NO: 17558 - DNA, 478 bp, Homo sapiens; identical to SEQ ID NO: 16564
  chr17:76993419-76993897
  hypo

SEQ ID NO: 17559 - DNA, 286 bp, Homo sapiens
  chr17:76996197-76996483
  hypo
cgtcttagacatttcaagacacgagtcctgtgcagcttttccctcaagcctacttgctcctcgtctccccttgggaagggtagtggtgacgggtggccaccgtgtccacagtggtctggttcaagctctctcaggatcctgggagatgtgcttttctgtgtgaatatacacttcgataaaaacataaggcactgccaccacgaaaaacctgactggcctcatcctccgtcttccttcctcagcattgactccgtggacaggttctgtcctcttccatggcccttcc

SEQ ID NO: 17560 - DNA, 413 bp, Homo sapiens
  chr17:76996567-76996980
  hypo
ctgccagctgccccccaccaacatcccctgacactccctcgccacctgccatgaagtagcatccatcagatggcacactcccagcttcagcggcttcctcaggtcctggggtgaacccactctgctcccgctcagccctcacactgtaccatctcctctgcctgccggctggctacatagacctccttctgtcccctgaccacactggccctggcagagcctgcagttccccctgcctggaacagtcgggcctgctcttcgcaccagcagctcggtctctcctacggggcatcagctccctgggaagacttgcccactcgccctccctcccatgccgctccggctctcccaccgtccctgcctggctaggtgattatttctgctcctggggcagggatctggccactgtcaca

SEQ ID NO: 17561 - DNA, 531 bp, Homo sapiens
  chr17:76997041-76997572
  hypo
gaaagagatgccaggtgagccattagccacttcttcaacagcccctctgcactctaccgggggccccaccttaggcatattatgaacccacaacctggatcaagcaccccaaagatcgagctgctcagctgccacatctgagctgcaggcccgggaagacggtgcttgccagcacagaacaacggtgcctgcatagactgctgtcagacatcgtgaggtgtcgtcgtcaccagcccctggaacccccatgttcttccctgttcaactccctcagcactccggagagccactgtcctcaccttcaccattcctgtcaaatctccggcccacttctcccaggagaccactctgtggccaacttcagcagccgaggcccctgggtggggctcacacctgccactcaggtcagtccccccagccgccgggcacctgctcttctggttcctcccttccatccacaggctgccccaagtcgcccaccttgtcaccattttacctccagaccccacactcccacagacactcaactgc

SEQ ID NO: 17562 - DNA, 261 bp, Homo sapiens; identical to SEQ ID NO: 16565
  chr17:76998502-76998763
  hypo

SEQ ID NO: 17563 - DNA, 33 bp, Homo sapiens
  chr17:77020165-77020198
  hyper
cgcggcgcggggcacacacggttaatcctccgc

SEQ ID NO: 17564 - DNA, 83 bp, Homo sapiens
  chr17:77020426-77020509
  hyper
tcttctgcactgccgtcctccggaagaccttttcccctgctctgtttccttcaccgagtctgtgcatcgccccggacctggcc

SEQ ID NO: 17565 - DNA, 180 bp, Homo sapiens
  chr17:77786288-77786468
  hyper
cggccggcccggcccgctggggcctgggttcctttgggttggggaagtgggggtacgaacccacgcggctgtgccaaggggtcccaactccggagtccaaccccacccaccagtcctctgtgcgcacttttcgtttatttctcagcagtctcagtcctggagctcctggggcgatttcgt

SEQ ID NO: 17566 - DNA, 61 bp, Homo sapiens
  chr17:77786805-77786866
  hyper
tatttgttatttttttaatttttctgcggggagcatcggggctagcccgcccagctccaac

SEQ ID NO: 17567 - DNA, 50 bp, Homo sapiens; identical to SEQ ID NO: 8138
  chr17:77808028-77808078
  hypo

SEQ ID NO: 17568 - DNA, 353 bp, Homo sapiens; identical to SEQ ID NO: 16570
  chr17:78041114-78041467
  hypo

SEQ ID NO: 17569 - DNA, 200 bp, Homo sapiens; identical to SEQ ID NO: 16571
  chr17:78041496-78041696
  hypo

SEQ ID NO: 17570 - DNA, 101 bp, Homo sapiens
  chr17:7807194-7807295
  hypo
cgctcggctgttggaccggaaccaggatgcaactgaggacactgacgtgcagaacatgaatgagtatctcagctccttcaaggtggcacagtacgtcgtgc

SEQ ID NO: 17571 - DNA, 566 bp, Homo sapiens; identical to SEQ ID NO: 8140
  chr17:78271713-78272279
  hypo

SEQ ID NO: 17572 - DNA, 77 bp, Homo sapiens; identical to SEQ ID NO: 8141
  chr17:78272313-78272390
  hypo

SEQ ID NO: 17573 - DNA, 764 bp, Homo sapiens
  chr17:80019114-80019878
  hypo
cggacgtaggacagggggcaggggtgctcccgcacgatgtccagatactcctcggccagctcccacacggcagggctccggccctcgaacagggcggggttgtgcaggttgccctctgtgggaggaggagcggggaaggacacctcgtgggttgctccaggtggacggcacaggaaagcctgggacactcaggacacccttctgtgccacctcacaagggacaaggccagctcaggcccatcagagcagactgggattgatgaacaccatctgtgaacagcaccatggggagggcagtaggcagtgggaggcaccgacctgggcggtggtatcaggccgtgtgcatggggccctggctgctgtcctgggccctgcccacctgcgctcatgacgccctgcacacccgtgtcccggaggcagcgctccacgtcctgcaggcactggatgttcccgttagcaaacacagggatggccacagccttcctgttggcagagaaatgcctgtttccacccgcccggaacagcacccaggtgatgctgcccccagccacggccccctgggtggtcacgggcgtcaggcgtgccgagcaccctgaggtgtggagctgggacccccagcaaagccccaaggactgagggctgtgtcacccacacccactcaccgcacagccttgatatgctcccaggacgctgcacccgacaggggccccttctgctccttggtgcgtccgtgcaccgtcagcaactaggacagagcagtggtc

SEQ ID NO: 17574 - DNA, 863 bp, Homo sapiens
  chr17:80045799-80046662
  hypo
cgcagctcccgtgccaccggccctgcttaccactcactaccaggttgccgttctctgacacctcgaaggcacgggaggcctccaggagccgtacctccagggacactgtccctgcagagcgggagagttggagatcagagggcagcacccgccccccagctacccccgccttggtcctggggtacccctcaccagtcttgggcaggatggtggcctggtgcagcaccacatcctcaaacaccacaggcagctgctcgacgcccaggcccagggcgcgggccagcgtcttccacactatgctcaggtagccagtggcggggaagaggacgcgaccgtcgagggtgtggtccaccaggtagtggtcaggagactcggagctggtgtctgcgggagggcacaggcctcagcacagagcgggcgtctgtggggagggaagagtctgcccacccgccgggcccctgctcaccgatgttgtagatggcggctgagggggaacctgaaccgttggggaagtcctcggcggccggcacgtcccaggccaggctgtggtcccacttgatgagtggggagatgaggggagttcctcggggagctgggaactccacaggtgggaacaaggcattggggttggcgtcgatgctacggagaagggaggcatgggtagcacacccgtcaccggggtccaggggctctgggttcagcccacccactgcctgcggtggaccatccagggctgctgccaccggcctgggtcagtgaggggcccgcagccccgctcacccaccccacgccgtccccgactccgggagacgagacccgggctgggaagggacccaccctgagaggtgcagcctgccgatgcc

SEQ ID NO: 17575 - DNA, 161 bp, Homo sapiens
  chr17:80049199-80049360
  hypo
cggtggcggggacagccgcgatgtcgttcagcatgctcaggaaagccaggtcctggctgtgccggaggccctgctccagcagcttctgcacggcctcaggggtgcgtccgctggcccgcagcagacggggcagggtggcatgtggggcgggtgcggggggc

SEQ ID NO: 17576 - DNA, 940 bp, Homo sapiens
  chr17:80050751-80051691
  hypo
cggaaccccggcagagcccaccttgctccttgaagccatctgtattggtgccggcgttcaggatggtggcgtacacccgccgggccagggacttcttggtcagcaggacggccaccacaccctccgagcggcagtacccattccctgggtagagcagcacctcaggcccggggctcagccccacgccggcccccaccccaccaggaggagctctggggtgtggggtgggtgcttgggtgggggatccccggagctggcaggatcctgctcagcgtggggactgtgcggggggccgtcctgtgccactgtcccgcctgccctggccgcgcagccgcacactcacccgctgtgtcgaaggccttgcaggtgccctcggggctgagcatccccagcctcaagaactgcacggaggtgttgggcttcagcaggacattgatgccccccacgatggcggcagggcactgcccgctgtggatggcctggtaggcgttctgcagggccatcaggctggaggagcaggctgtgtccagtgcgatgctgggccctgcaaggaagggtgctgcggctcaggtggggctgtgagcacacgagacccctgagcacacctcctgccaccaggctggacacacactgcacggagtgagcccacgccacgtggtttctgctcagcatgtggggacctgaaggccacccacctccgcaggaggctgggcaggacccacctctgaagtcgaagaagaaggagagccggttggccatcatcgctcgctggcagcccaccatgctgtagcccacgagtgtctcggggtctcggctcagggcctccgaggtctcagagccgctcacgcccacccagacgccagtgtgtgttcctcggagtgaatctgggttgatgcctgccacaaacagtggtcaaggtgccacggccgggccccacagc

SEQ ID NO: 17577 - DNA, 230 bp, Homo sapiens; identical to SEQ ID NO: 8146
  chr17:80394871-80395101
  hypo

SEQ ID NO: 17578 - DNA, 82 bp, Homo sapiens; identical to SEQ ID NO: 8147
  chr17:80395146-80395228
  hypo

SEQ ID NO: 17579 - DNA, 223 bp, Homo sapiens
  chr17:80517124-80517347
  hypo
cggttttccactgagcttcagtctgaggttgcgcggttggtgctcgctgttcttcccatctctgctactggctggcgaccgtgcggactccacagctgcgctcagctcagagccagcttcgtgtgcagagcccagcagagatggcggagccacttggcatccaagcaccttgccctgtttgtgtccacctggttctgccgtgagaacccctgggttttaagcc

SEQ ID NO: 17580 - DNA, 278 bp, Homo sapiens; identical to SEQ ID NO: 12427
  chr17:81038567-81038845
  binary

SEQ ID NO: 17581 - DNA, 508 bp, Homo sapiens; identical to SEQ ID NO: 12428
  chr17:81038865-81039373
  binary

SEQ ID NO: 17582 - DNA, 563 bp, Homo sapiens
  chr18:11947488-11948051
  hyper
tttttaaaatcactcttcctggagatcttcaaaccagaagcaccgcgggccctccccaacgggcttctgcttacctccactacgtgatgcagtatggcccccgggaggccgcccccagattctagaggggcttaccccagacacacccgaaggaccacctcgtgacctcagaggaacagccctagacccaggagagactgccagacacccccgtggcagcccgccagggcccagctctacttgtcgcctggaggtgctgcctcccttccacgccgccccagggaatggccgcccctctggggctcctcccaatcccccttcccaggactgacaatggcccggcgccctgctttgggccaggatcggcctcgagccttcctcactagcggccaagagccggaaaccttgcgtctcagattccccgggtctgtgcacccccaccccaaccggtcttcccacccaggccccccctgatgccagctgcgggcctggacctagcccggggccctgcccctccgcccctctcgctggacagcccaggccggcgcccgagggataggctc

SEQ ID NO: 17583 - DNA, 165 bp, Homo sapiens
  chr18:13033480-13033645
  hypo
cgcgtctacctataatgacattgcagcatctagcaaagttacgcatgtactatcctgtaaccgagcagttctgcttctgggaatttattcttcagatacacttgcataaatgatacatggtgtatgtgcaggctcattacttgcagcattgtctgtgataacaac

SEQ ID NO: 17584 - DNA, 52 bp, Homo sapiens; identical to SEQ ID NO: 8154
  chr18:13826252-13826304
  hypo

SEQ ID NO: 17585 - DNA, 79 bp, Homo sapiens; identical to SEQ ID NO: 8155
  chr18:13826592-13826671
  hypo

SEQ ID NO: 17586 - DNA, 459 bp, Homo sapiens
  chr18:20716114-20716573
  binary
cggggttagccgctgggtccggcccctgcctcccacagccctcgtcgctgccgcccttgattcctggcggccatgcgaccgtgtccggccccggggtggcgcgggggttcgcgagtcccctgggcgccggccgggcgtcgggggagcagtggcagccgccccggccggcgcctctcgccgcctgtgcccaactgcagctgctcgacgggtccggggccgccgggcaggaggagttggaggaggacgatgcctttatcagcgtgcaggtgccggcggccgcctttttgggctccgggacccccgggagtgggagcggcagtcggggacgcctcaactcgttcactcagggaatcctgcccatcgccttctccaggccgacttcgcagaactactgctccctggagcagccaggccagggcggcagcaccagcgccttcgagcagctgcagaggtcccggt

SEQ ID NO: 17587 - DNA, 186 bp, Homo sapiens
  chr18:20716690-20716876
  binary
cctgtgctccgggcccgaatcccaaaccacgagggcacccaaaagagggggcgtccccagggagtgcggggttacacgtgtttgcacgagcccagcattcgcagaggagcaccgcgcttgtgcagtgggtcgggaattgggagttgcaggagcccagtagaaagcggcgtccgagcctccccacac

SEQ ID NO: 17588 - DNA, 284 bp, Homo sapiens; identical to SEQ ID NO: 5767
  chr18:46418923-46419207
  hypo

SEQ ID NO: 17589 - DNA, 196 bp, Homo sapiens; identical to SEQ ID NO: 7061
  chr18:47339411-47339607
  hyper

SEQ ID NO: 17590 - DNA, 401 bp, Homo sapiens; identical to SEQ ID NO: 6009
  chr18:47339758-47340159
  hyper

SEQ ID NO: 17591 - DNA, 115 bp, Homo sapiens; identical to SEQ ID NO: 8162
  chr18:55850987-55851102
  hypo

SEQ ID NO: 17592 - DNA, 79 bp, Homo sapiens
  chr18:59560090-59560169
  hyper
cgtttaggaggcaagaggctgacaggcaggaaacacaattgagactgagctttcttcagcctgcagtgaaatacatgca

SEQ ID NO: 17593 - DNA, 649 bp, Homo sapiens; identical to SEQ ID NO: 14772
  chr18:59560572-59561221
  hyper

SEQ ID NO: 17594 - DNA, 101 bp, Homo sapiens; identical to SEQ ID NO: 7067
  chr18:60985398-60985499
  hyper

SEQ ID NO: 17595 - DNA, 75 bp, Homo sapiens; identical to SEQ ID NO: 7068
  chr18:60985973-60986048
  hyper

SEQ ID NO: 17596 - DNA, 133 bp, Homo sapiens; identical to SEQ ID NO: 7069
  chr18:74113780-74113913
  hypo

SEQ ID NO: 17597 - DNA, 61 bp, Homo sapiens; identical to SEQ ID NO: 7070
  chr18:74113942-74114003
  hypo

SEQ ID NO: 17598 - DNA, 196 bp, Homo sapiens
  chr18:9569216-9569412
  hypo
cggagtcattgaagttggataaacttaataaacttaagttggtaaataataacatttaaacagaaagctggaagctgtaaagacgttaaacatttatcaaaagttgactatgcttgctgtgaacattctatagtcttttcctcccccacgcccgagacagagtcttgctgtcgcccaggctgcagtgcagtagtgc

SEQ ID NO: 17599 - DNA, 202 bp, Homo sapiens; identical to SEQ ID NO: 12474
  chr18:9709406-9709608
  hyper

SEQ ID NO: 17600 - DNA, 212 bp, Homo sapiens; identical to SEQ ID NO: 8181
  chr19:10197461-10197673
  binary

SEQ ID NO: 17601 - DNA, 154 bp, Homo sapiens; identical to SEQ ID NO: 8183
  chr19:11008216-11008370
  hypo

SEQ ID NO: 17602 - DNA, 385 bp, Homo sapiens; identical to SEQ ID NO: 13682
  chr19:11030249-11030634
  hypo

SEQ ID NO: 17603 - DNA, 125 bp, Homo sapiens
  chr19:11172767-11172892
  hypo
cgttgctggcagtactgttgcgccgcagtttggagtcactgtagttaagtgtggatgcatgtgcgtcaccgtccactcctcctactgtattttattggacaggtcagactcgccgggggcccggc

SEQ ID NO: 17604 - DNA, 164 bp, Homo sapiens; identical to SEQ ID NO: 8184
  chr19:11529251-11529415
  hyper

SEQ ID NO: 17605 - DNA, 51 bp, Homo sapiens; identical to SEQ ID NO: 16619
  chr19:11531278-11531329
  hyper

SEQ ID NO: 17606 - DNA, 38 bp, Homo sapiens; identical to SEQ ID NO: 16620
  chr19:11531888-11531926
  hyper

SEQ ID NO: 17607 - DNA, 58 bp, Homo sapiens
  chr19:11689628-11689686
  hyper
acccctcccacggggccgcccgcatctcacctgccgtcgcggggcgggcgttgcggcc

SEQ ID NO: 17608 - DNA, 610 bp, Homo sapiens
  chr19:12900128-12900738
  binary
cgtctgcacctcgccgcagcccttcccgggaaggggctctgggttccctcatattctccccttagattttcaggtcttctctgactcggggagggaagctctcagatgacagagctactctagggaaggaggggggctccctctaggtattctggatgatagtaggatgggacctgcagactaaaacgagagtggggcccctgactcacatgagtgagtggggggtgttggggacggagctccagatctcctggcagaagggaagggcaccccacccgagggaggaggcagccgccgttccagcccgcccaggcgccgggggcgcctcgaggcatcggcccgccctctccgcgccccgtcgggccgggggcgaagtccgacccaggcccgcgggcaggcggggacctgccgggctgggttgggccaggccgggcctggcaggacgcagccccaaagcggcggggtggggcggggccgggccaggcggccgtgggggccccgggggcggcggtcggggctggtcgggactagcagtctgggggcccaggcgcgccctgggacctggcagatagtcgggttccccgcttctggctcggggccccaggacagc

SEQ ID NO: 17609 - DNA, 645 bp, Homo sapiens
  chr19:13108022-13108667
  hypo
cgaggggtttgtcggggtgtgtgtcagctgtggctacaccacactcctgtatgcacaggtgagagtgtatgcaagtgtgaatcaatctagagtctgtgtgtagcccctgtgggccggccatgggcaggcctgcgtggcatggccgtgtgtgtggcccagggagcgggttttcctgtagaaagcaggcccaagtacgtgttggcgagggcgcaccggcatgcatacatgttgcagtgtgcatgcaggtgtgagcaggcaccctgagcaccatggcagtgtggggaacccccacatctgcacctccagttccacggccactccatgttgggcgcccctcacaacaactgcctacccagcggtgtctgagctgggcctctttggtgctacacttggctgggctgtgtggccgatgtttggggcctagtggaaccaagaccccacgctcaagcagccccttgcccaccaggctgccagcccggcctcccatgccaagcacgccagacatctgagcctgctcccccatggcttgggtgagacaccagcccctcagatttcacagcaccctgggagagaaaatgcctgtggatacgccggtgacatggctaggaaggggctggggcggctgcgagacccagggcgatggcc

SEQ ID NO: 17610 - DNA, 750 bp, Homo sapiens
  chr19:13109260-13110010
  hypo
cgagggggaagggcggggggaaaaatctccttctagaaaaagcatcgaaattcagggcggccgggtggggcggttcctggagctgctggagtccattgtagccacagtcctgagtctcaggcggagagaggggtggggggtggatggatggacccccatccccatcccaaccctgccaagaaacagagacacaaccaggatgtgaactcacgtacaccaccatcaccgccaagatggggatgtaagtgtcctgttcacaccgatgtccagacccacgaccatcgacgagcctacagacctacggacacaggaaaccgacgacttgtgttcacactgtcacacacacccattaacacacacgcacctcttgaaatgggacacgtatattggtgtaggcttagcgacacagcagtacctctttgacgcacgtatggacacaggaaactgtggacttgtgttcacaaccacccccagcgcacacataaacactcacaaacccctcgagatgatacagatagcgacgaaggcacatggagaccacgacacctcccagactcatggagccctgagcacatgcttggatacaggtagacacaaatgtgtgttcacccccacacatgctcacatggacccaaggacggacaggcggatggatggatacacatctttacacagagacataatgcagttggctcgctcaggtgtgtacacaaataacttttctttttctattttttttttttttgagac

SEQ ID NO: 17611 - DNA, 154 bp, Homo sapiens
  chr19:13110344-13110498
  hypo
cgtgcttccccctccttgccacagggataaaaaggcaaacatgccgacatttgctgacacacacaaagacatacatggccgcacacacggatacacccgctctcagacacgcagcgacctacgcccattttcctggccatacaagcagccgaac

SEQ ID NO: 17612 - DNA, 171 bp, Homo sapiens
  chr19:13110794-13110965
  hypo
cgtgagatgttttgatgctgggccgagctcagagccgagggctctgccgggaacagggtgctccagtctctctagggcctggaatgtcttgtgtagcctcaagagctcccagacggaggctgcgggagcggagtcaagggctaggctttgccgtcagacagaaatgggttc

SEQ ID NO: 17613 - DNA, 1257 bp, Homo sapiens
  chr19:13265772-13267029
  binary
cgtcaggggctggcagccgctcgctggggccccaagaaccggtctgaccggttaccacgtgggcgagagagggttgggcccccttttccttgcccgggcattccctaactggtggagccccgcctcccccagatttgggggttcccttgaaattgtcctacaactccgggacagggagatcggggctttctgagttgagacaatagtgctaaacacactgccccaagcggagctggggatcgattgcacgcactttgaagccttgaaaggtggtagatctcgcccccaccccctagaccaaactgaatcagctgtggccggggccctacagtatcaggtggagctgagcgggtgagctttgaagggctctttagtccccagttcccgtatcttcctcgaggaatcgttgtgtgtctcaggcagggacgtgcagcctcagtttcctcatctgtgaaatgggcctctaagcagcttctccacccggcattaggtttttaaaaatgcccattagagccctagttattttcttgggtcactccccagctctagaataaccaccccgaaacgagaaagccctttcaatataccccacgtaggtttaagagtggggttgtgggcgttgccccagggcgaagggagggggcctgtcgggaagacaaaggagtcgcaggtgcggggagtggtggcggcggcaggcgccgggaaagcgctcgccccgccccgccgacggctggctctgccgccgcaggcttcccatgaccccaggggaactgaccccgtggccacagggtagaaggaggggcaagccggcctcagaacgtctgctggtggaatctgggagctttggctcccctcccgcccaacccacaccccctttcctctcctgtgtggattgtgaaggagagcttctcaccgttctccagccaagctcgcccccacggctgcctgattccttcctgggaacacgtggggggacttttaaaaggcgccacctactccgagtcctgacccacccaactctcccaggggacgtgggggcactggagccccacaccgcaggcggtagctcaatgcacccgcgtcggagttcctcccccgcgagcgtggcaaggctcagggaagtcccgggcccctggggagggggccttgccgcgcatcctgtcgcaggaaccgccgggcccttccttccgcgggaagcggcttggccgacccccgcccccgcccgggcctcttgggggtttccggtgcccggccacc

SEQ ID NO: 17614 - DNA, 324 bp, Homo sapiens
  chr19:15235629-15235953
  binary
cggggctcgctttcccaccctgcacaatgagtgagctggaagcagcaccacgaggcccctccctctttgactgcccccagcccacctcccattctgtgccccgcaccttgtgcagcagctgatagaagagccccaggcggtgagcggcgcccagcaaggcggccaccagcgtcccgcaggccaggagcaggaaggaggggaataagctcccagcgggggcggcggccgcgggggtctccatgaggtggtacctaagagagaaagggcacttcccagacttgggcgcgacagggaacctctccggaagaaatcgcgccccttctc

SEQ ID NO: 17615 - DNA, 162 bp, Homo sapiens; identical to SEQ ID NO: 7079
  chr19:16186802-16186964
  hyper

SEQ ID NO: 17616 - DNA, 621 bp, Homo sapiens; identical to SEQ ID NO: 7080
  chr19:16187000-16187621
  binary

SEQ ID NO: 17617 - DNA, 634 bp, Homo sapiens; identical to SEQ ID NO: 7081
  chr19:16187640-16188274
  binary

SEQ ID NO: 17618 - DNA, 172 bp, Homo sapiens
  chr19:16763531-16763703
  hypo
cgcagactggacagcaaccccacattcggagtctcaatcactcaggacagacaactttttgtcctctctctttctgggggaagcatacagggatggacccacagaggccaagaacaccagattctcccgtcgtgtcttttcctaaatccatttacagcaaatctcacaattc

SEQ ID NO: 17619 - DNA, 215 bp, Homo sapiens; identical to SEQ ID NO: 8209
  chr19:17008145-17008360
  hyper

SEQ ID NO: 17620 - DNA, 31 bp, Homo sapiens; identical to SEQ ID NO: 8210
  chr19:17008820-17008851
  hyper

SEQ ID NO: 17621 - DNA, 376 bp, Homo sapiens; identical to SEQ ID NO: 7082
  chr19:17172577-17172953
  hypo

SEQ ID NO: 17622 - DNA, 133 bp, Homo sapiens; identical to SEQ ID NO: 8212
  chr19:17958343-17958476
  hyper

SEQ ID NO: 17623 - DNA, 41 bp, Homo sapiens; identical to SEQ ID NO: 7089
  chr19:18241264-18241305
  hypo

SEQ ID NO: 17624 - DNA, 124 bp, Homo sapiens; identical to SEQ ID NO: 7090
  chr19:18241355-18241479
  hypo

SEQ ID NO: 17625 - DNA, 109 bp, Homo sapiens; identical to SEQ ID NO: 7091
  chr19:1857456-1857565
  hyper

SEQ ID NO: 17626 - DNA, 237 bp, Homo sapiens
  chr19:19156738-19156975
  hypo
cgtgagccactatgcccggcctattatgctaaattcttaaaatatgttctcttaatctgtgctcagcccatcttgctggtgaggtatctgaggcttcccaaggatcagtgaccacgcccctgcaccccgaaaggtcagctggtgagaggcagagctggtacccggatccaggaagcaaagcactgaaaggccgttctaccagcagtacaggaaactccgtgtttgtttataacattc

SEQ ID NO: 17627 - DNA, 233 bp, Homo sapiens; identical to SEQ ID NO: 6516
  chr19:1978023-1978256
  hypo

SEQ ID NO: 17628 - DNA, 116 bp, Homo sapiens; identical to SEQ ID NO: 5770
  chr19:1979018-1979134
  binary

SEQ ID NO: 17629 - DNA, 435 bp, Homo sapiens
  chr19:2488689-2489124
  binary
agcagctcagcaaaagcgtgactcagtttccctcgtccataaaagggaaagccgaatcgccctcccacgtgtcgaggtgaaactagacagtgcactaaggcacttagcaaaacgcgctgccttgagaacccttattacgccttccttccttccacctcaccccctggccagacactctgggggtggagaggggcgctgacccaggccccagacgcccctcccgtccgccctccctagcaggcaggagtcccggctttcccgttccttaaattggataattggagacagaggcgggtgctcgagacggagaaatccccaagtgggcgaaaggcaaggggcctgtcctagtttccctgcactgggggcccccaccctcgccagcgctccctccggtgcgccctgggcgcgcagtctgtgcgctcgggagcccccagc

SEQ ID NO: 17630 - DNA, 324 bp, Homo sapiens
  chr19:2795325-2795649
  hypo
cgtgagctggcagggcctggcggcatggctgcgtgggctcctgctcccccggatgctcctcgcagtatgcagtggggcctttgctgttgatgtcacatgatcaggagagacccagagaccctcctgctgctgttcatcctcttaggcgaggacccctgggaatgtgctgatgtgtcccacagtctcaggatcatgcagccctagtgctttggtaaatccagatcagggtgacccatgatagccgtggattgttatttctttttatttaaatacagacagggtctcacaacgttgcccacgcttgtctcgaactcctgggcccac

SEQ ID NO: 17631 - DNA, 577 bp, Homo sapiens
  chr19:2796376-2796953
  hypo
cgtcccggggagtgctggactcagggagtgcttgggcacagggagtgctgggtgccgggagtgctgggtgtgaggagtgctcggtcccagggagcactgggcatggggagtactgagctcagggagtgcttgggcttggggagtgctgggtggggggagtgctcggtcccagggagtactgggtgtggggagtgctcagtctggggagtactcggcatggggagtactgggcacggggagtgctcagtcctggggagtgctcagttgcggggagtgctgggctcagggagtactgggtgcggggagtgctgggcgtggccagtggagcttctgtggccccctgcccctgcctcctcgggagcgtccccccttcagggctgacccccggcctgatgtccatctttcttctgcctgaggacctgaactctggcaaggcaggtccacacagacatggggcgcagaggctcggtaacgaggggagcccctccacccactgcccggtgtgcctgatgtgggcgtctcaggggtgacatgagttagttggtgcagagctgggagcgcagcgctgaagtcaagc

SEQ ID NO: 17632 - DNA, 38 bp, Homo sapiens; identical to SEQ ID NO: 8230
  chr19:32849484-32849522
  hypo

SEQ ID NO: 17633 - DNA, 158 bp, Homo sapiens; identical to SEQ ID NO: 7101
  chr19:32850587-32850745
  hypo

SEQ ID NO: 17634 - DNA, 557 bp, Homo sapiens
  chr19:34310910-34311467
  hyper
cggttcagggcccccgaggaagctgcggtttggggcgagccgattgcaccagcagggccgggctgctgctcccggggctgacgcgggccacgccctcctggacgcggacacacccccatttccccgggcccacagagccacgcctggccctgcagccaaacagcgggaaggcagattggtacgagtaggtacaaggccctggaattctcgcccggttgccacacactgcacggagcataattgggggaggttgtgcaactgcccgggaagccggggctcgcaacgagggctctctccaagtccccatcacaggcctccggggagcctcgggacagagcctgacgccaccttcgggtgacatcgatggcctcgctctggcagaggagtagtgtggctctgccgagaactggggagcccgggtccccgcagggccaaggggagggagggctggcggaaggggccgcgcccacagccccaggtggcagcagcggcggtggcggtcccgactggcagagcctaacgagaacagggcctatccccaggggccccgggctgga

SEQ ID NO: 17635 - DNA, 66 bp, Homo sapiens
  chr19:34311498-34311564
  hyper
aggcgcccgccagaggccggaggctgacagtgcctttcctatcctatgggtctattgtgggcccgc

SEQ ID NO: 17636 - DNA, 78 bp, Homo sapiens
  chr19:34949560-34949638
  hypo
cgggaatttttaagtcattttttattggatatctggtaaacgagattttagattgtatggcgtataaaattacagcac

SEQ ID NO: 17637 - DNA, 68 bp, Homo sapiens
  chr19:35169531-35169599
  binary
cgctccggcgagtgattaccagtgtgcttttccattaaggtgtgtgacaggtgccgcaagataagccc

SEQ ID NO: 17638 - DNA, 296 bp, Homo sapiens; identical to SEQ ID NO: 8234
  chr19:38701255-38701551
  hyper

SEQ ID NO: 17639 - DNA, 31 bp, Homo sapiens; identical to SEQ ID NO: 8235
  chr19:38702212-38702243
  hyper

SEQ ID NO: 17640 - DNA, 324 bp, Homo sapiens; identical to SEQ ID NO: 8236
  chr19:38781936-38782260
  hypo

SEQ ID NO: 17641 - DNA, 555 bp, Homo sapiens; identical to SEQ ID NO: 14798
  chr19:45579321-45579876
  hyper

SEQ ID NO: 17642 - DNA, 89 bp, Homo sapiens; identical to SEQ ID NO: 7118
  chr19:46519167-46519256
  binary

SEQ ID NO: 17643 - DNA, 421 bp, Homo sapiens; identical to SEQ ID NO: 7119
  chr19:46519582-46520003
  binary

SEQ ID NO: 17644 - DNA, 112 bp, Homo sapiens; identical to SEQ ID NO: 8263
  chr19:47646754-47646866
  hypo

SEQ ID NO: 17645 - DNA, 287 bp, Homo sapiens
  chr19:47729538-47729825
  hyper
cggccgcgggccacgggcgcgcagctccactcctcggcggcctagtccctggccctggccctggccctggctcgggctccggctatgccagccgcggcgcggagtccttgggcggctctgcgggcgcgcgattcccccccacccacttaccccccacctgcctgtccgcggagcgacccagccgcgcagggcagcagctgccgcacatctggcgggggccgcctgccgccccctcctccggcggaagtcccacctgccgtctaccccacccccagcactcacccgcc

SEQ ID NO: 17646 - DNA, 681 bp, Homo sapiens
  chr19:47729850-47730531
  binary
cgccatccgccgcagctgggccccgatctcccgggcccactgttcctcctccccgcggactcccggggccgcctgggtgggaccgcccgccagagcccccggggcgctgggcacgggcgactccaggtgctgctccgccagcgagagcgagggctgaggaccttggagaggcagaggggcgcggtcagcacccaccacccctccaggcctcgaggtgtctcggcctgctcccctctttcccagccactgctccccgcctcatttctagtgatcccatcgctagtgagtcaatttctcagcttctcctccacaggcaccagaaagcaagaagtacctggggacgccgctctggggtcacctgtctggccagctacgtccccacggcccttgtcagtgtggaaggtagacggccagagaggtgaccccgggggtggtcaggcttaacgacctctattttccaaaggggccacattttgccttttccatgtgacaggcagggaaactgaggcccgcccttagggagtatcccaaggtcacacagggatacagtgactgaccccacccagatcacaagcctcaggtctcctgccctctcgtgtccaaccacagggaagccacacctccggatgtggcagaggcctagagaccagaaggccagagactgtggcagcttcagagcgc

SEQ ID NO: 17647 - DNA, 287 bp, Homo sapiens
  chr19:47731303-47731590
  binary
cggctgggcccgccacctccccccgtcctctcccacttctccagttcctccgagtctccagccctctctcttcccggctcctatcaccccgggggcggggcgggcactcaccgtccgggcgcgggcctcggggccggctgcggggacccccaggccagcgggaaccccccagggcggcggtgacggcgggtggggcggtgggggcgcagaggtaggcagcgggcagcagggtgggggcggcgggggcggcagccaggccgggctcgcagaggccgcaggacactgcc

SEQ ID NO: 17648 - DNA, 202 bp, Homo sapiens; identical to SEQ ID NO: 8268
  chr19:48012665-48012867
  hypo

SEQ ID NO: 17649 - DNA, 480 bp, Homo sapiens; identical to SEQ ID NO: 14804
  chr19:49199703-49200183
  hyper

SEQ ID NO: 17650 - DNA, 122 bp, Homo sapiens
  chr19:4934661-4934783
  hypo
cgagtgatagtacgtgacgtgttgtctataaacacgagcatcttggcaacggcgttccaagtacaggtacagcaagcacgcagaggtcctgggctgggacatttatggtgcatctgtggccc

SEQ ID NO: 17651 - DNA, 550 bp, Homo sapiens; identical to SEQ ID NO: 8271
  chr19:49467064-49467614
  binary

SEQ ID NO: 17652 - DNA, 60 bp, Homo sapiens
  chr19:49703657-49703717
  hypo
tggggcccaagatcgtcatcgtgagcaagatggtgaggcaggggcggggccaaagtgggc

SEQ ID NO: 17653 - DNA, 133 bp, Homo sapiens
  chr19:49703923-49704056
  hypo
cgtggccacggaggggctcctgaggccacgggacagtgacttcccaagtatcctgcgccgcgtcttctaccgtccctacctgcagatcttcgggcagattccccaggaggacatggacggtaggggggatgac

SEQ ID NO: 17654 - DNA, 78 bp, Homo sapiens; identical to SEQ ID NO: 7126
  chr19:50320125-50320203
  hypo

SEQ ID NO: 17655 - DNA, 67 bp, Homo sapiens; identical to SEQ ID NO: 8277
  chr19:50365162-50365229
  hypo

SEQ ID NO: 17656 - DNA, 676 bp, Homo sapiens
  chr19:51303021-51303697
  hypo
cgggactagagatgcctgcagacaggcacatctgtggggttcagtgagaggacggggccaaacccttctgcttgggcctcccatgcctaacgggatacccctcaatcgcctctgctgcccccggcccagctcttctaagctgctctgacttcaccagaaccttctgtgacatggggaaggggcagctgcctctcactgggaccctggcaggataagttcagtttattctccgcaaaagcactaacactgtgggtgctcgctcagtgggtgctgctgtttaacaacctcagaaacaccaaaagccccattttgcatagaaatatgctttgtaggaagaggggggtccttgtttaaactaatcaaggaaaattaaaaacccagcccccagccacaaactagccacattccaggtgtccaagagccacccgtggccagtggctgccagactggacaaggcgaggaacatttctatctggacagtcgtaaggaaggcgccggcccagaatccacaaatgctacgtgtcccttctgtctccctatcccgcatcagctctgtcgtctcacctctcacacatccctacccaactggcaccgacaccactcatgtccccaagaatcccctctaagccagccatgacaaacgctcagctccattcactaccccacagaggatctc

SEQ ID NO: 17657 - DNA, 186 bp, Homo sapiens
  chr19:51324279-51324465
  hyper
cgggctccccaggggcaggtggcctggcctgaagtccaaggtcgaggcccccttcccttcccagcaccctcccgcgcgtttctcgccccgcctcctccttcctcctccctcagttgccccacccagctcccgctgaaaccagcccttccctgtgtctctccagagtggagggatatcctgtggggc

SEQ ID NO: 17658 - DNA, 339 bp, Homo sapiens
  chr19:51416002-51416341
  hyper
cgctctacggatcttgtggagacgcataggtgcgggaaggggggtggggggtgagagggtgccgtagaccgcggagggtgcacggaggggcaggccgaggtcaggactgccgagaaacagcggggactcatcaggggagaggtggtgtttacagccacgaggccgggtgagatcatccaaggagtgggtgggtgtagaccgcggagccggcgcgggtgagggatagtgcccgcaggtgaccgcgacgaggcaggaatgtctctgtgtctctctgtctctcctgggtctctaacactctttccttctccttccttacttctttcccccacagcccacccc

SEQ ID NO: 17659 - DNA, 242 bp, Homo sapiens
  chr19:51522935-51523177
  hyper
cctgtggtctgccgctggtatcctctgcccagggacccctggcgggaccttcccttttaaccccaaggagtccggaagcttctccaccctcccctacccccacccccgggctccctccctttccctctgtctaattgtaccgtgggtgaggctggcactcctgggtcccagattcctgctctgggaggggccctggaatacaggcttctcccagtgcccgaaacgcccccttttcatccctt

SEQ ID NO: 17660 - DNA, 36 bp, Homo sapiens
  chr19:51568027-51568063
  hyper
cgcgggaggggctgctgcgagggtattttgggaggt

SEQ ID NO: 17661 - DNA, 136 bp, Homo sapiens
  chr19:52406169-52406305
  hypo
cgacctactagagcgatgtgaaaataataaaagtgagatcgttcatggcaaagttatctcggggtaaatgctccagctgcaagcaccaaaggtgagtattctcagggcaaatgggaaaaggaataaaggatattac

SEQ ID NO: 17662 - DNA, 415 bp, Homo sapiens
  chr19:5269156-5269571
  hypo
cgtgggtacatgtgtgccgcatgtatgtgctcacgcttgcccgtgcccacgtgtccacacgtgagcaattcccgtgtgtatgtggccccgcaggggtccccataagcgtgtgtggacagcagccagccagggtgcagggggaggtctcggccgcctgacgctaccgagaacacctaattaaacaaaaacgtacatcgcgaaccacactctgcccagttcctcggagtttaattaaaacaacagtgcaggaggcgtgtgtggggtccacaatcagatggcagaggaggaggaaggcagggagtggccctggcagtccagatggtcccccaccaactgccagggactggccggaggtgcccggagctcagggctggtggcaaggtgggtgggatcgggtcagggtatccaaggcccc

SEQ ID NO: 17663 - DNA, 439 bp, Homo sapiens
  chr19:5608081-5608520
  binary
cgccctggaggctctgcatacttcagtcaagtagctgagtggtgtcctgcccctctggccttcctacgtccttctgtttttgtccagagctgagccccacaggtaaggccaactctgtcactcacgcctcagctgaatgtcacttcttcagcgagctctgctgaagctgcctcccaaatctaaacacggcctccccaacacactgacggcgtgctctaatattccttaatacgctcatcacaacacatcatatgtgtttatttcttaaatggtctttttcccgccagactaaaaaatctgtgatgacagtgaccacgtatgtttacctctgcttaatcatcagtgtccgagtgaagtcaacaaagtaactgaataaacaggttattcatggctataagaatttcctaagcccttgctgaacacacagactgttcagaga

SEQ ID NO: 17664 - DNA, 229 bp, Homo sapiens
  chr19:5608569-5608798
  hypo
gaaacattaaccaacacctgatcgggtgacacagacctagacaaaggaacggcttctgtagccagaaaactgtgtcagacagggcccactctgcctggaatcagggcaccctccagacactaaatggtccgaaccttgtcccttggaagccactccccagaggcacccaggagaccagggcagtgccaattgcttaccagaagactcttggctaggcgcggtggctcac

SEQ ID NO: 17665 - DNA, 84 bp, Homo sapiens
  chr19:5630448-5630532
  hypo
cgctttaaaaggacttctttgcttttaaattattaaaaatatgactgtaaggccaggtgcggtggcacacgtccgtaatcccac

SEQ ID NO: 17666 - DNA, 538 bp, Homo sapiens; identical to SEQ ID NO: 8289
  chr19:59049765-59050303
  hyper

SEQ ID NO: 17667 - DNA, 311 bp, Homo sapiens; identical to SEQ ID NO: 10471
  chr19:5938115-5938426
  hypo

SEQ ID NO: 17668 - DNA, 126 bp, Homo sapiens
  chr19:6020529-6020655
  hypo
cgcctcaccagcaggctgggagccacttatgcaccgggccttcccatccctcggtgctggagcccacacctggcggcacgtcagactgcggcaagcatcacaggtcagttccgtgaaaccgaccac

SEQ ID NO: 17669 - DNA, 271 bp, Homo sapiens; identical to SEQ ID NO: 8295
  chr19:7685308-7685579
  hypo

SEQ ID NO: 17670 - DNA, 134 bp, Homo sapiens
  chr2:101696603-101696737
  hypo
cgtaagcaaaatgactttatttaaaacagtaagagcctggtgacagtaactccataatagaaaagaaacgtgaaccgcagcaccccgagcgtgaccgaaaacaagtgtaacaactcgcatcgcctgacctcagc

SEQ ID NO: 17671 - DNA, 265 bp, Homo sapiens; identical to SEQ ID NO: 7169
  chr2:111874622-111874887
  hyper

SEQ ID NO: 17672 - DNA, 205 bp, Homo sapiens; identical to SEQ ID NO: 6082
  chr2:111874987-111875192
  hyper

SEQ ID NO: 17673 - DNA, 138 bp, Homo sapiens; identical to SEQ ID NO: 6083
  chr2:111875611-111875749
  hyper

SEQ ID NO: 17674 - DNA, 261 bp, Homo sapiens; identical to SEQ ID NO: 16712
  chr2:121200130-121200391
  hyper

SEQ ID NO: 17675 - DNA, 242 bp, Homo sapiens; identical to SEQ ID NO: 16713
  chr2:121200454-121200696
  hyper

SEQ ID NO: 17676 - DNA, 56 bp, Homo sapiens; identical to SEQ ID NO: 16714
  chr2:121200731-121200787
  hyper

SEQ ID NO: 17677 - DNA, 185 bp, Homo sapiens; identical to SEQ ID NO: 10491
  chr2:12857960-12858145
  binary

SEQ ID NO: 17678 - DNA, 169 bp, Homo sapiens
  chr2:149525294-149525463
  hypo
cgtgcttccgattttcctaacattagctttgtcttcctatgcctcagacttcttttgtcccctggaatctaccccggggaatcgtagttaggaggaaggggtgatagattttatacacagaatttctgagactttgtgacacttcctgtgtatatcttagaataggtac

SEQ ID NO: 17679 - DNA, 115 bp, Homo sapiens; identical to SEQ ID NO: 6090
  chr2:149645382-149645497
  hyper

SEQ ID NO: 17680 - DNA, 64 bp, Homo sapiens; identical to SEQ ID NO: 6091
  chr2:149645987-149646051
  hyper

SEQ ID NO: 17681 - DNA, 120 bp, Homo sapiens
  chr2:152681239-152681359
  hypo
cgaagttgtgtgcaaatgtgcgtgcgtgcatgtgtgtgtagaactaactctggcactagataatcttgttaaaatccaggtgtgtgtgcgtaggagaaataactccggcactacgtaatc

SEQ ID NO: 17682 - DNA, 362 bp, Homo sapiens; identical to SEQ ID NO: 13789
  chr2:171567970-171568332
  hyper

SEQ ID NO: 17683 - DNA, 273 bp, Homo sapiens; identical to SEQ ID NO: 13790
  chr2:171568711-171568984
  hyper

SEQ ID NO: 17684 - DNA, 121 bp, Homo sapiens
  chr2:171569927-171570048
  hyper
cgttgggggagaagggggcgtgcgagtgcaggatgtgcgagggacccattgtatttgggtcgcaagcagcccacccgtcttgagtacgatattctcattccgcaggcgcgccctgggcgtg

SEQ ID NO: 17685 - DNA, 116 bp, Homo sapiens
  chr2:172962017-172962133
  hyper
tcagcccaccccggagctgggagctcccgccctcccgactcccaggcttggctcatgccaaggcctgttgcgtgattccaacttgggctgacattccctgccccgggctctccagc

SEQ ID NO: 17686 - DNA, 66 bp, Homo sapiens
  chr2:172964092-172964158
  hyper
ccggcctgggcagcggcttgagctctgagcacgtgactgaccggaccctggcaccaagaaaaaagc

SEQ ID NO: 17687 - DNA, 63 bp, Homo sapiens; identical to SEQ ID NO: 8306
  chr2:172964685-172964748
  hyper

SEQ ID NO: 17688 - DNA, 460 bp, Homo sapiens
  chr2:17699502-17699962
  hyper
cgcctcagacaagcgaggcaccagaggcagtcgccagcccgccttaaagacacctccaggctcctcaagacagagccgcttgctactaggtggttgggaatccgggtcctcaggaggcgttaaagaggaggtaggctttctgagctcggccatccgcggcgtgggctgagggagagacatgacagcgaatggaaaggatctgtccgagtcccggcggggctccaatcccttaataggcggttccgggccgctctggtcacgcccctgacccgcccctcaagacctggccttagcctaatctcagggtttgccccaccccgaatccgcccctccacagccccagcctcagccccgccccgcctccctcagtccctcctctccctgcccccacccacgcgccccggttgtctcaccactgaaggtcggagcaccctgggccgttacattgtctatttttagc

SEQ ID NO: 17689 - DNA, 794 bp, Homo sapiens
  chr2:178257227-178258021
  binary
cgagggcggacgtggtttggctctcggtccagctggaccgggctgggccaaccgggagtcagctcgaactcacctgcttggcaggtgcgcgcttcccgaggcgtgacaagggagcgccggcgcggtgggtggggggcagagaatgtgaagctccagacgcatggcacccgccgccaagtcgccgcggtggctgccgggatgcgccgcagcgaatggtcgcgccgggcgccgctctgagtgacctttcacccgcgcccagcggttccgggcggcagcacaaggcggtagccatggcggaggcggcggctgcagcgggtgggactggcttgggcgcgggcgcgagctacgggtctgcagcggaccgggaccgggacccggacccggaccgcgccgggcggaggctgcgggttctctctggccatctgctgggccggccccgggaggctctgagtaccaatgagtgcaaagcgcggagagccgcgtcggcggccacggcagcgcccacggccactcccgccgcgcaggagtcgggcaccatcccaaagaagcggtgagtagcggtatgtggaaggagttagcgtcgagggaccaggccgggcctgtgctgcaggagggcacaggcgaggtgggaagggaagtgacacgggtgggcggaaggcatcccggtccctgaaagtagggacccacctctctttcgagagagtggactagaccctggattctgtcaggaagggggcgggatgggatggtggattttggtcactatgtgagggtaacaggcttgaagaactctc

SEQ ID NO: 17690 - DNA, 34 bp, Homo sapiens
  chr2:180725139-180725173
  hyper
cgcacataacagtggcgaaacagatggtcctccc

SEQ ID NO: 17691 - DNA, 34 bp, Homo sapiens; identical to SEQ ID NO: 6099
  chr2:182323095-182323129
  hyper

SEQ ID NO: 17692 - DNA, 87 bp, Homo sapiens
  chr2:191044988-191045075
  binary
cgcagaacccttagctgggaaggccgcggccaggctgcggggccccctgcaggcgggctcagtgccccggcccagcacctgttgtcc

SEQ ID NO: 17693 - DNA, 513 bp, Homo sapiens
  chr2:191045505-191046018
  binary
cgaggagcgcgcggcgggcgcggcggcgacggcaggaggaggggccgggagcccgggcgccgccgaaggacgccccgtcctccacatgctgccacttggctgagccgggcgccggcgagaaggcggcgccgctgccctggcagctggactgcactttgcccccgcccggcctcagctgccgcccgcccagacgccagcaagcccccctcccacgacagggctgctccgggagcttcggagacccgccccgggcctgagcgcaggctgcctccgggaccccacggctgtccggacgtgccatgggcgcgcagctgccgggcaacgtgttgtgtaagtgaacatctgggaggtgggtgactggtgaagggcgggtgtctgtcggtctttgcttgtcagctgtgccttttagatttttcaatggcagaaacccatgagttacaggaggctttaattaaacgagaccgttctcagccagctgccgtggatagagcctcacatctccgtcccctaatc

SEQ ID NO: 17694 - DNA, 171 bp, Homo sapiens
  chr2:191208170-191208341
  hyper
cgcagtcccctatgagagtacagatgaatggaggaggaagatttaaaagtgaattcgtgggcggcgacaaggaaacagcagccgtggccaagctgaccccagagcccttcccttcctggccctccctctgaatcatcgcgctccacttgtgacgtcgcggacgcccggctc

SEQ ID NO: 17695 - DNA, 361 bp, Homo sapiens
  chr2:191514839-191515200
  hyper
cggggaaagggatagttgagatggaatatacatttgtcgattctgcagaccaagctttgcagcgagtgatcgggaggaatcgtagacttgcatgtacttacacctcgctccctgagattcgggaggcacggaaaattttgggatggctgttaatttaaaatttcatctgaaagagtcgatttggagtaacttgtcactaccagttggtttgccagtgacgtgtctgccaactcaaagagtgcaaagatcagaagctgaaagaggaattctcagatcttgtttaaaaatattttggcagttttaatagataatatgagattgcataggaacagaggagccgaatttaaaatagattagtcac

SEQ ID NO: 17696 - DNA, 86 bp, Homo sapiens
  chr2:198276053-198276139
  hypo
cgtaagtattccacaggatgtgtaatgtactttatatatttgttttaaagttgggagctcttggccgggtgcggtggctcacaccc

SEQ ID NO: 17697 - DNA, 511 bp, Homo sapiens; identical to SEQ ID NO: 6106
  chr2:21022197-21022708
  hyper

SEQ ID NO: 17698 - DNA, 833 bp, Homo sapiens
  chr2:219845565-219846398
  binary
cggaagggagtgaggtgagctggggtcgcctggcagggtgggtatgaggcaaggcggctccctcgggctgagcccaccatccaggcctctcgctgcctgcgggcggcgcccaagcccgcgccaccctccttctcgggacgttttccttggcagttctctgctcaggcccgagatgagcctctccctgctttcccctaaccacgggttctggcgcagcaaagaacagagagagaggaggcagcggagagctcaggagctttaatggggctgaaagggtcagaaacacaccgggagtttctcctgggagtgtggggacaggaggaagggggccgtgtgtcacggaggacggtggctttcaccaaacctgctcaggtcccaggaaggaggaccgtgagaggcctccacgtgctgaggtgggagcagttccttggggaagagcaaaagtgggaaaagatttggcactcgttaaagagtagtgatattgaatggggcttctaggagccaggcggaaatgcactggagtggtggggagacaagagaggtccacaaatcccctccgggacctggagacctagaagaaaaaaagtgaaagagggcgcacatcgccctcctcaggggactgcggggtgggacaggagcaaatctagtaccagacaaggattgagggagcttcggtcccgtccccctgctaagtgcggcaggtggagtaaactctggattagaggacggttgacggaggctcccgggccctccccgggatgccgatgggatcgggcgagactctaggcgtgcgggcgaggccgcaggcacccgaccgccccgtctagtggtaa

SEQ ID NO: 17699 - DNA, 197 bp, Homo sapiens
  chr2:219847616-219847813
  hyper
cgaacagtggccccctatacgtgacaggaggggcaagctctcatgggctcactatcctagccaccttcgggtgcgcaggcctctgcgctggccctgagaatttggcctcttattttcggaacaggcgggattccctgcctacgaaggtgccatagttctcggggcctgatgaacaactctgaggaggggaacggacc

SEQ ID NO: 17700 - DNA, 34 bp, Homo sapiens
  chr2:231191894-231191928
  hyper
ggtcagggcagccacactgcacgcaggctgggcc

SEQ ID NO: 17701 - DNA, 131 bp, Homo sapiens; identical to SEQ ID NO: 8321
  chr2:231676894-231677025
  hypo

SEQ ID NO: 17702 - DNA, 168 bp, Homo sapiens
  chr2:232260775-232260943
  hyper
cggccccgcggccctggacaccgctccaggaccctggcggctgggaccccaggtcttgccggcagctgggtcccctctcccttccagacccctgagggccccctgcgtccgggccactctcctcctctcggggcttccttccgcgggacctcggaccgccgcccgccc

SEQ ID NO: 17703 - DNA, 41 bp, Homo sapiens
  chr2:232260984-232261025
  hyper
cggacccggcaggtggagcgcccgcagcccagggcctcgcc

SEQ ID NO: 17704 - DNA, 105 bp, Homo sapiens; identical to SEQ ID NO: 13822
  chr2:232479181-232479286
  binary

SEQ ID NO: 17705 - DNA, 227 bp, Homo sapiens; identical to SEQ ID NO: 13823
  chr2:232479454-232479681
  binary

SEQ ID NO: 17706 - DNA, 34 bp, Homo sapiens
  chr2:233499312-233499346
  hyper
aacttggccgctggcaccggtccggcgggggctc

SEQ ID NO: 17707 - DNA, 165 bp, Homo sapiens
  chr2:235404971-235405136
  hyper
ccgtgcagcggctgtaggacttccacagcggccgcagcttctcctggccgcccacgtcccagaagtggcagctgatgcccttggccgtgccgttgctcagcttgatcttctcggtgttgaagccgatggtgggcaccgtgttcacgaactcgttgaacttgagcc

SEQ ID NO: 17708 - DNA, 147 bp, Homo sapiens
  chr2:239079151-239079298
  hypo
cgtgctcctggccgcgcgccacccctcagtgccctatccgcaccaccatcacagtgacgttgtcggccgagccccgctgcaccgccttgttggccagcctgttgcaggctgcttcgtagcgggcgtcggctgcggacttcccttccc

SEQ ID NO: 17709 - DNA, 811 bp, Homo sapiens
  chr2:239973912-239974723
  hypo
cgccgggctgcagcccctggccccggagatgacggctggtgcccgtgcttgaggcgtcaggccagctcgcggtgccagcactgccaggctcggctggccacaggaaactgtcccaccgattcctgctgtttgttttttcttaaggcattgttcctcagacttcagaaaacccagccacaaaaatccaccagagcaataaaaaaaaaggcacaaactcgcatcttccgatggcttttgagaaactcaagccagctcccccagctcacattcctgtttctgtccagttttgttttctttaaaggtccctctgtcccccacccgggtgcagaccccccgccgcacaccgctatggttcacagaggcgggccacagccgtagaaaacgtcctctttaaaaaaaaataagctacaagatgagtcgagtggtttacacagagactgtggagttgtgggtaataaactttaagcaccagttttaatcaagtttgttttgtattattagatctttgatatttgttttctgtgcctcgtgtcaactgaattcggcagctcggccgcctgttgccacaggctcctttcttccacggcgtcccttgcgggacccgccagagtgtgcttggcttccgcgtgtccgtgtgtctgcgcgtcgccggcgtctgtcccgtgttccctgtgaggctgccacgcccaggcgtgcatgtgcgtctcgagacctgtgggcctgggcggcagaaaggcttcccgtggctgttgcacgctgggtgtccctgggtgctccaagagagccccacggtgggacgcaggcgtgacac

SEQ ID NO: 17710 - DNA, 134 bp, Homo sapiens
  chr2:242190662-242190796
  hypo
cgtgtcaggcctaaacaaacgctacagttaaccaaaaccaaaacaaaaccgtaaaagcaagtttatggtgtatgtgtggttcaagtagtgcgcaaaaaggtcactttgtgcctacagactctcgtcgctgtcac

SEQ ID NO: 17711 - DNA, 82 bp, Homo sapiens; identical to SEQ ID NO: 9512
  chr2:242269474-242269556
  binary

SEQ ID NO: 17712 - DNA, 173 bp, Homo sapiens
  chr2:242549677-242549850
  hyper
agcctccgccggccccgccccggaagcgcagccccgcctcaggcgccgcatctccgccctctcttgcgcctgcgggaccgggagggccgcgctcgccccccagcgccagggtcacgccaccgcgccctgtttggggagcggcagaggagtcagggcggaggctgggcggcgct

SEQ ID NO: 17713 - DNA, 51 bp, Homo sapiens
  chr2:242549957-242550008
  hyper
agaccacagcgaccgcgcccctcggcccggaggccccgccctccccactcc

SEQ ID NO: 17714 - DNA, 44 bp, Homo sapiens
  chr2:242602207-242602251
  hypo
cgggccgggcgcggtggctcacgcctataatcccaacttcaaaa

SEQ ID NO: 17715 - DNA, 39 bp, Homo sapiens
  chr2:242602349-242602388
  hypo
cttcaaaaccaataaagcgggccgggcgcggtggctcac

SEQ ID NO: 17716 - DNA, 131 bp, Homo sapiens; identical to SEQ ID NO: 8332
  chr2:242617764-242617895
  hypo

SEQ ID NO: 17717 - DNA, 531 bp, Homo sapiens; identical to SEQ ID NO: 8333
  chr2:242617924-242618455
  hypo

SEQ ID NO: 17718 - DNA, 80 bp, Homo sapiens; identical to SEQ ID NO: 13841
  chr2:26521880-26521960
  hyper

SEQ ID NO: 17719 - DNA, 374 bp, Homo sapiens; identical to SEQ ID NO: 13842
  chr2:26522127-26522501
  hyper

SEQ ID NO: 17720 - DNA, 59 bp, Homo sapiens; identical to SEQ ID NO: 8339
  chr2:27938267-27938326
  binary

SEQ ID NO: 17721 - DNA, 38 bp, Homo sapiens; identical to SEQ ID NO: 7206
  chr2:30453530-30453568
  binary

SEQ ID NO: 17722 - DNA, 250 bp, Homo sapiens
  chr2:39944194-39944444
  hypo
cgtatgatttgaaccggctcccaaagctaatttatagcctgcctgctgatgtggaacatggttacagctggtccatcttttgcgcctggtgcagtttaggctttattgtggcagctggaggtctctgcatcgcttatccgtttattagccggaccaagattgcacagctaaagtctggcagagactccacggtatgactgtcctcactgggcctgtccacagtgcgagcgactcctgaggggaacagcgc

SEQ ID NO: 17723 - DNA, 64 bp, Homo sapiens; identical to SEQ ID NO: 7212
  chr2:43019535-43019599
  hyper

SEQ ID NO: 17724 - DNA, 70 bp, Homo sapiens; identical to SEQ ID NO: 14882
  chr2:43020503-43020573
  hyper

SEQ ID NO: 17725 - DNA, 395 bp, Homo sapiens; identical to SEQ ID NO: 5801
  chr2:43452443-43452838
  binary

SEQ ID NO: 17726 - DNA, 84 bp, Homo sapiens
  chr2:44126131-44126215
  hypo
caattctaaagacatttctagtttgatctggcatctttaaaaccagtaacctaaaatctaccatccagtccttgtcctgcaacc

SEQ ID NO: 17727 - DNA, 73 bp, Homo sapiens
  chr2:47656947-47657020
  binary
cgtcgattcccagatcttaaccgacttgccaagaagtttcaaagacaagcagcaaacttacaagattgttacc

SEQ ID NO: 17728 - DNA, 61 bp, Homo sapiens
  chr2:55391637-55391698
  hypo
cgagctccttctaagcgcgtgtttacgatggctccgactcatgccttaaaaaaaaaaaatc

SEQ ID NO: 17729 - DNA, 61 bp, Homo sapiens; identical to SEQ ID NO: 8348
  chr2:56149749-56149810
  hyper

SEQ ID NO: 17730 - DNA, 90 bp, Homo sapiens; identical to SEQ ID NO: 8349
  chr2:56150447-56150537
  hyper

SEQ ID NO: 17731 - DNA, 354 bp, Homo sapiens; identical to SEQ ID NO: 13853
  chr2:64994400-64994754
  hyper

SEQ ID NO: 17732 - DNA, 205 bp, Homo sapiens
  chr2:70165952-70166157
  hypo
cgcccttcacaccgcgcatgctcattcccccgacgcgccgcgtgtggatgggagcagtatttctcactttaaaatggacaccttgatagtgtgtctctggggttgcacagctcatcaaagttccaaattgtttgttctcacaaacaaaacggtacaatctatttttgtgcgatgttcttgggacctcgctgtgttctgctatctc

SEQ ID NO: 17733 - DNA, 413 bp, Homo sapiens; identical to SEQ ID NO: 8352
  chr2:74729488-74729901
  hyper

SEQ ID NO: 17734 - DNA, 239 bp, Homo sapiens; identical to SEQ ID NO: 8353
  chr2:74729933-74730172
  hyper

SEQ ID NO: 17735 - DNA, 79 bp, Homo sapiens; identical to SEQ ID NO: 8354
  chr2:74730644-74730723
  hyper

SEQ ID NO: 17736 - DNA, 236 bp, Homo sapiens; identical to SEQ ID NO: 5803
  chr2:74781700-74781936
  binary

SEQ ID NO: 17737 - DNA, 123 bp, Homo sapiens; identical to SEQ ID NO: 6112
  chr2:74782349-74782472
  hyper

SEQ ID NO: 17738 - DNA, 104 bp, Homo sapiens
  chr2:85776352-85776456
  hypo
cgggcaaattattttacctctcagcctaatgtaataatgcaggtaacactgctcacgcggtgtgttgcacatagcaaacacttgggaacagttagctattcatc

SEQ ID NO: 17739 - DNA, 90 bp, Homo sapiens
  chr2:9135660-9135750
  hypo
cgttttggcgagtacatgttaatgtgttaaatataaacattttttaaaaatacattccattttttttttttttttttgagacggagtctc

SEQ ID NO: 17740 - DNA, 59 bp, Homo sapiens; identical to SEQ ID NO: 7233
  chr2:96991316-96991375
  hyper

SEQ ID NO: 17741 - DNA, 201 bp, Homo sapiens
  chr2:9720456-9720657
  hypo
cgatttcatgatgatcttgacatctacacagtggtgtcacttaacaggagtatgttctgaaaaacgcctcgttaggcgacttcatcgttgtgcaaatatcacaggatgtacttacacaagtacatggcagagcctactacacacctaggctatgtagtaaagcctatattcctaggctacaaacacgtacagcacgttacc

SEQ ID NO: 17742 - DNA, 206 bp, Homo sapiens; identical to SEQ ID NO: 6114
  chr20:21080357-21080563
  hyper

SEQ ID NO: 17743 - DNA, 121 bp, Homo sapiens; identical to SEQ ID NO: 6118
  chr20:2731109-2731230
  hyper

SEQ ID NO: 17744 - DNA, 226 bp, Homo sapiens; identical to SEQ ID NO: 6119
  chr20:2731391-2731617
  hyper

SEQ ID NO: 17745 - DNA, 331 bp, Homo sapiens; identical to SEQ ID NO: 6120
  chr20:2731675-2732006
  hyper

SEQ ID NO: 17746 - DNA, 585 bp, Homo sapiens; identical to SEQ ID NO: 8367
  chr20:30193272-30193857
  binary

SEQ ID NO: 17747 - DNA, 189 bp, Homo sapiens; identical to SEQ ID NO: 8368
  chr20:30193992-30194181
  binary

SEQ ID NO: 17748 - DNA, 35 bp, Homo sapiens; identical to SEQ ID NO: 7236
  chr20:30996055-30996090
  hypo

SEQ ID NO: 17749 - DNA, 32 bp, Homo sapiens; identical to SEQ ID NO: 13876
  chr20:32677630-32677662
  hypo

SEQ ID NO: 17750 - DNA, 205 bp, Homo sapiens; identical to SEQ ID NO: 13877
  chr20:32677691-32677896
  hypo

SEQ ID NO: 17751 - DNA, 102 bp, Homo sapiens; identical to SEQ ID NO: 13883
  chr20:400915-401017
  hypo

SEQ ID NO: 17752 - DNA, 173 bp, Homo sapiens; identical to SEQ ID NO: 7244
  chr20:42088459-42088632
  hypo

SEQ ID NO: 17753 - DNA, 129 bp, Homo sapiens
  chr20:47688836-47688965
  hypo
cggcttattggagctcttaaaatcccagatttgtgataatgccgcactctatgcacaaaagtacgatgaagaattccagcgatacctgcctcgttttgttacagccatctggaatttactagttacaac

SEQ ID NO: 17754 - DNA, 51 bp, Homo sapiens
  chr20:47713222-47713273
  hypo
cgttggtttgtgttgagcgtttgcacggtttggataatcttaaattttgac

SEQ ID NO: 17755 - DNA, 414 bp, Homo sapiens; identical to SEQ ID NO: 10552
  chr20:4804008-4804422
  binary

SEQ ID NO: 17756 - DNA, 246 bp, Homo sapiens; identical to SEQ ID NO: 8387
  chr20:48524519-48524765
  hypo

SEQ ID NO: 17757 - DNA, 373 bp, Homo sapiens; identical to SEQ ID NO: 8388
  chr20:48524818-48525191
  hypo

SEQ ID NO: 17758 - DNA, 174 bp, Homo sapiens; identical to SEQ ID NO: 7251
  chr20:52374073-52374247
  hypo

SEQ ID NO: 17759 - DNA, 276 bp, Homo sapiens; identical to SEQ ID NO: 14912
  chr20:55203829-55204105
  hyper

SEQ ID NO: 17760 - DNA, 613 bp, Homo sapiens
  chr20:62221442-62222055
  hypo
tacttccgctcgtggtcctctgccatggcagccacctcaatggtggccgtgtgctcctcaggcccgggggcagcccctgcgggcactgtcacaattgtgctggagccaggcgaggcctgggccacgttctgcagggtggggcccaggccaggcaacgtgagcagctgtagcgggctgaccaccttgaacaccgtgctaccgtcctgcacggcggccgtgctcaggaccgtgaggctggacgcgtccgggtggatctccactgtgctggggtaggtggagccggaagaggccaagactgtgtatcccccgagcagcggggaggccggggagctggcggggggcgcctgaagggaacccttgcccaggacggtggacggcagggtggacaccactttaccaaggggcacgctggtcagctgggggacgggcacgcccgggccaagcgccagctgggcagactgggtgagcacctgcgaggccatggcggccggtcctgatgtggcacgtgcaagccggggccgcttcacaggcggtggcagggagaccggcgtcagcgtcatgagcacgttgctgaggtgctgggacttgtgcttcagctccttggctcggcgac

SEQ ID NO: 17761 - DNA, 357 bp, Homo sapiens
  chr20:62252093-62252450
  hypo
cgatttcttgctatgaaaaaaaaaagtctacattctctgtgaaacttaaaacaagacctagagtccatagcacagtagtcaaagcatccagaacacgatcaaacttcctggcaaagggtagtctggttgattctcaaaggaacaaatacacaagagaagctggctcttgaacgcagaatccagagactttcaggtgctatcggaccagctccaagaggaaagcaaacattgtcaaccaagtggaaagaaaatcttggtatagaaacaggagttataaccaaacagaaatgtgaaaattaaaaacgacaaccaaaagaaaatacacaaagctgggatagtctcagctactcggaaggc

SEQ ID NO: 17762 - DNA, 44 bp, Homo sapiens; identical to SEQ ID NO: 12689
  chr20:62461248-62461292
  hyper

SEQ ID NO: 17763 - DNA, 264 bp, Homo sapiens; identical to SEQ ID NO: 12690
  chr20:62461639-62461903
  binary

SEQ ID NO: 17764 - DNA, 507 bp, Homo sapiens
  chr20:62550652-62551159
  hypo
cgaggcatgtgatcgatgcatcgtaactgttgagcaaatgaatgctgagctgtgatggcaccgacgtgtccggggagaggacgcacccggctgtgtggacatgtgcccagggcccaggacagcgccacggaagaggacacacccggctgtgtggacatgtgcccagggcccgggacagcgccacggaagaggacgcacccggctgtgtgcacatgtgcccagggcccgggacagcgccacggaagaggacgcacccggctgtgtgcacatgtgcccagggcccgggacagcgccacggaagaggacgcacccggctgtgtgcacatgtgcccagggcccgggacagcgccacggaagaggacgcacccggctgtgtggacatgtgcccagggcccgggacagcgccacggaagaggacgcacaggacagcgccacggaagaggacgcacccggctgtgtgcacatgtgcccagggcccgggacagcgccacggaagaggacgcaccc

SEQ ID NO: 17765 - DNA, 585 bp, Homo sapiens
  chr20:62551409-62551994
  hypo
cgggacagcgccacggaagaggacgcacccggctgtgtggacatgtgcccagggcccgggacagcgccacggaagaggacgcacaggacagcgccacggaagaggacgcacccggctgtgtggcaggggaggttcccaagagcaggctcagggctctggggtctgagtgagggctctccagccagcagggagcagggcagggtgttgaagagacggcaggtgcgtcaggggctgacgtgggacccggcactctgtgctctgtgtctgcccgggaacaggtagtcctgcgtcggaccgggaagtgtggtgggtgtggtgggggaaggggctggcgtcagcagggctctcgtccgccaacgtctggtggggatgcccgccatgcgggggcctcaggctacagccagggctgtgaaggagccgaggtcatagagtggctgccctggcgtagggagggaggacacgggtccccgccatttcagaagctcagcgtccctgcacgtgtgcggtcttgtctgcctaggcatgtgtgcgggccctggggctgctgccagcagaacggactgggatacgctggatttgtaaaac

SEQ ID NO: 17766 - DNA, 1158 bp, Homo sapiens
  chr20:62562220-62563378
  hypo
cggcctcctcacgtgctgctactgctgctgctgtctgtgctgctgcttcaactgctgctgcgggaagtgtaagcccaaggcgcctgaaggcgaggagacggagttctacgtgtcccccgaggatctggaggcacagctgcagtctgacgagaggggtgagtgcccgccccagggcccgtgtgtgtgtgtggggcagagccagaatgggccctgaatggtgtcaacctgtcttgtcaaacaggagggcactgacactgtgccgcgagtgtttgtggtggcagctgggactgttgaggtgtgaacgtggaccctgaggtaaagcaggcgcatagagctgtccccgccgtgacctgcggtagccgtagatcccagggactgcgaggcggggcagggcggcaggcagttggggcggggctgagggccgagggctggcggtgacccaaggcgacggaggaaagccgtgtggggtggaggtcagcgagtagcctctcccggtggagagtttgtccaggtgcccgaaagtcgctccacaggaccagcgttgggtgcgcgccaggctgtggccctcgtgcagtgccctgtgtgcttgcttttcagaggccacagacacgccgatcgtcatacagccggcatccgccaccgagaccacccagctcacagccgactcccaccccagctaccacactgacgggttcaactaaatccaggaggagctgtggtcagaggaggagccggcgcctggccacgccaaccttagaatcatgaactgtagtcacagagatgggaaggcagcctcctgcctgccctggccttgctggggcccctcctgcctccacgcccacccagcgtcgacccttgacccacgaagtgcgtagcatgcagtatttaaagcagtgtagctacggtcttctgtttttttcccttttttaatagcatgtatggggttctgttccatgtctgtgttgtggacattccgcggcatgaccgcgtgaactgcacggtggagctgcctcagggctgtcggtcaggttggtccagtgaggggtgactgcagccggtcaggtgggcgaggagaaggggggctgcccctttcctacctgtgcttgaggggccggaggcaggtgctgcctggcagagctgtgttaccgtcttggcctc

SEQ ID NO: 17767 - DNA, 292 bp, Homo sapiens
  chr21:18984005-18984297
  hyper
cgcacggtgacgtcatcctgggacctcgtcaccgcggcggctgctcctcaagttctactttgttccacaaggctcctctgctcacggctgcgtggataaaacccaaagggaatccagaatcaagctcggcctcgcaggagtttataacttttgtacttttccctcccttgtaacgaaaagctaatcgcaaacgtttctaggaacacatttttctcctgatagacgttcccaaggtggagggcgcgagaagactggcccgtggggtgaggagccccggcccgacctcagcggc

SEQ ID NO: 17768 - DNA, 161 bp, Homo sapiens
  chr21:30357072-30357233
  hypo
cgcttcaaatgcatcttttgctgcaaacgcagctggtgtgtaagtatcacactgagccattagccaatatcccattaaactttttaagtagggagccaactgtttctttactttaaggataagtttttcaaaagcttgttgtgtggcttctcggacgcgac

SEQ ID NO: 17769 - DNA, 42 bp, Homo sapiens; identical to SEQ ID NO: 8421
  chr21:37775172-37775214
  hypo

SEQ ID NO: 17770 - DNA, 34 bp, Homo sapiens; identical to SEQ ID NO: 10588
  chr21:44847478-44847512
  binary

SEQ ID NO: 17771 - DNA, 56 bp, Homo sapiens; identical to SEQ ID NO: 10589
  chr21:44847864-44847920
  hyper

SEQ ID NO: 17772 - DNA, 643 bp, Homo sapiens; identical to SEQ ID NO: 15909
  chr21:45400182-45400825
  hypo

SEQ ID NO: 17773 - DNA, 278 bp, Homo sapiens; identical to SEQ ID NO: 15910
  chr21:45400854-45401132
  hypo

SEQ ID NO: 17774 - DNA, 153 bp, Homo sapiens
  chr21:46645775-46645928
  hypo
cgtctctgccccctagcgtgttttgtgacaatctccctgggtgaggagtgggtgcacccagccccgaggccagtggttgctcggggccttccgtgtgagttctagtgttcacttgatgccggggaatagaattagagaaaactctgacctgcc

SEQ ID NO: 17775 - DNA, 60 bp, Homo sapiens; identical to SEQ ID NO: 8432
  chr21:46934012-46934072
  hypo

SEQ ID NO: 17776 - DNA, 106 bp, Homo sapiens; identical to SEQ ID NO: 7301
  chr22:18084157-18084263
  hypo

SEQ ID NO: 17777 - DNA, 353 bp, Homo sapiens; identical to SEQ ID NO: 11566
  chr22:19899693-19900046
  hypo

SEQ ID NO: 17778 - DNA, 91 bp, Homo sapiens; identical to SEQ ID NO: 7303
  chr22:19924393-19924484
  hypo

SEQ ID NO: 17779 - DNA, 730 bp, Homo sapiens; identical to SEQ ID NO: 14935
  chr22:25959837-25960567
  hyper

SEQ ID NO: 17780 - DNA, 124 bp, Homo sapiens; identical to SEQ ID NO: 6129
  chr22:28838056-28838180
  hyper

SEQ ID NO: 17781 - DNA, 61 bp, Homo sapiens; identical to SEQ ID NO: 6130
  chr22:28838449-28838510
  hyper

SEQ ID NO: 17782 - DNA, 244 bp, Homo sapiens; identical to SEQ ID NO: 6131
  chr22:28838551-28838795
  hyper

SEQ ID NO: 17783 - DNA, 125 bp, Homo sapiens; identical to SEQ ID NO: 14940
  chr22:28838844-28838969
  hyper

SEQ ID NO: 17784 - DNA, 139 bp, Homo sapiens
  chr22:29686357-29686496
  hypo
cgtggaaactttttaacatgctttgtcgcatttatatgctacaggttacaaagtgagagccttgtatacacttcaatacttaaaaagtacccgtactcagtactcagccggcagcataatgaaaagtgggactagacac

SEQ ID NO: 17785 - DNA, 120 bp, Homo sapiens
  chr22:29758124-29758244
  hypo
cgctcccacaggggaagcatgagccaaggtgcggcagccgctctacacacaaccggctttagccatcaggtgcgacagaggctgcacaccggtgacaaattagagaaatccaatctgcac

SEQ ID NO: 17786 - DNA, 132 bp, Homo sapiens
  chr22:32804860-32804992
  hypo
cgcggcaagtgtaggcactggacagaatgcactgtatgcaatatttactgtgctttactctttaccaaacactttcacgttaccttaagcacacagaaaacttcctatcaaagactacgagctgctcccatc

SEQ ID NO: 17787 - DNA, 69 bp, Homo sapiens; identical to SEQ ID NO: 8457
  chr22:41658279-41658348
  hypo

SEQ ID NO: 17788 - DNA, 141 bp, Homo sapiens; identical to SEQ ID NO: 7312
  chr22:43351254-43351395
  hypo

SEQ ID NO: 17789 - DNA, 78 bp, Homo sapiens; identical to SEQ ID NO: 8463
  chr22:45120758-45120836
  hypo

SEQ ID NO: 17790 - DNA, 239 bp, Homo sapiens; identical to SEQ ID NO: 8466
  chr22:45603946-45604185
  hypo

SEQ ID NO: 17791 - DNA, 55 bp, Homo sapiens; identical to SEQ ID NO: 8467
  chr22:45604387-45604442
  hypo

SEQ ID NO: 17792 - DNA, 1268 bp, Homo sapiens
  chr22:46933492-46934760
  hyper
cggctgctgcctgggcggtgcgcttggcccgcgcccactccgcccgcgctctccccgcccccggcccggccccgccccgcccccggcccagcggcgtattgttcggccccggggggagccggctcggaggtgcgcgccgagaggatcgctatggagacgcgagggcgcggccgggacggggactggggccctactccccggaggcctccccacccagcctcccggtggggcggggccgaggcaacagggccgggaaaggtggggctggggcccccggtggccgctacccgtggggcggtggctccgcacctcgggctcggggccgcggctcagagcctggctccccaccccggcagaacagatccacggagaccgccgccaggagtgccgcgcgggtaggacccgggggcggaggactggggccgagaggccggggagcccccccccacccattaaggactgcggaggctgtcgaggagggttacccattttacagcaagacgcacggaggctaaaatgcttcaccccgactaaaactccctggactttgaagcccaataggcagctaccggatctgcgtcccacttggtttaaagcgcaacttttaaatgaaagaagaaaaccccggttgacataagggatttggagaggacggcggaggcgcgctcatctcccgcgtgcggcccgacccgagcgttcgcggacgcatcgcggaatccccgagcgtccggctcctcccgaagcgggttgcggggaaggcggggggctgcgggtcctggaagctgcctggggcaagcaagcacccgcagggatttagagctgtgccacagcccctgcccagcctcctacggaggacagcggggggcggggggcagagaccttagagctttcagaaaagtgacacacacccccgcctcctgcggggaaccacggggggccgggggcagctttaggtttgcgtgacgggtacacctgcctccggatggggcacagggataaagggggtggaggcttaggacttggcgaccccccgcatgggcggggctttgggactgtgccaccagcggctgggaagggcgcgcactcccttggtggcgctcggggcgccggagtccagtgcagcccttaggcctcccagtggtcggggacggtaggtgggggtcgcctcttctctcctagaagggcttctcctggggccggtcggagcggtgggggtgggagtaatgcgcagtcacccctagaacgggtctttttggcaagggagggtc

SEQ ID NO: 17793 - DNA, 72 bp, Homo sapiens
  chr22:47465521-47465593
  hypo
cgctgttccctgtttggatggagtggagctgacttgacggttcccggctgttccctgttgtttggttggagc

SEQ ID NO: 17794 - DNA, 119 bp, Homo sapiens
  chr22:47465782-47465901
  hypo
cggagctgacttgacggttccagcgctgtcccctgttgtttggttggagcagagctgacctgacggtcccagcgctgtcccctgtttggttggagcggagctgacctgacggtcccagc

SEQ ID NO: 17795 - DNA, 89 bp, Homo sapiens
  chr22:47465973-47466062
  hypo
cgctgtcccctgttgtttggttggagcggagctgacttgatggttcgagactgttccctgttgtttggttggagcagggctgacctgac

SEQ ID NO: 17796 - DNA, 226 bp, Homo sapiens; identical to SEQ ID NO: 8474
  chr22:50191356-50191582
  hypo

SEQ ID NO: 17797 - DNA, 81 bp, Homo sapiens; identical to SEQ ID NO: 8475
  chr22:50191626-50191707
  hypo

SEQ ID NO: 17798 - DNA, 114 bp, Homo sapiens
  chr22:50192076-50192190
  hypo
cgttaaataaaaacgagaattaagaacacaagggatgtactctagccaatcacacgtttcccggtcaaacggcagcacaaatccacagtcacacatgcggcaggacagacgagc

SEQ ID NO: 17799 - DNA, 58 bp, Homo sapiens; identical to SEQ ID NO: 8478
  chr3:10011425-10011483
  hypo

SEQ ID NO: 17800 - DNA, 346 bp, Homo sapiens
  chr3:115377294-115377640
  binary
cgttccctcggcggctctgcagtgtgatctcatctctttgtttctccccggctgccgtcagtcaccggctctctgcgcccccacccgcgcgggctcgcggccgtgctgcgggcgtggcctcagccgctgagaccctggggaccgcagggcgtggcgcggcctccgcccgctgcacggagagccccccagaggcagcgacacggcgcttggggtccgcggggctcctcctccaactccgcagacctccggggaggcctcttgctccccgaacacccgggagttcgctttcatttttaacgaatctccacaatctcttgtttgggagataattgcttctttcaggggc

SEQ ID NO: 17801 - DNA, 166 bp, Homo sapiens; identical to SEQ ID NO: 7322
  chr3:11581157-11581323
  hypo

SEQ ID NO: 17802 - DNA, 438 bp, Homo sapiens; identical to SEQ ID NO: 8480
  chr3:124773932-124774370
  binary

SEQ ID NO: 17803 - DNA, 174 bp, Homo sapiens
  chr3:127326124-127326298
  hypo
cgctgccaaagcctctgatgttaaggtcttaggcacatgtaatgtgcctttgtacttgagcgtccctgtaaatgggctcatcgccatcgctgtggtggcgcccaggccccttgactgccttgctgctgtggctgttggctgtcctcttctcaccgctctgcagtgcagttctgc

SEQ ID NO: 17804 - DNA, 563 bp, Homo sapiens
  chr3:129345876-129346439
  hyper
cgtgctcgtcccgcctcgcttggagggagcaagggctccgagccctgggcccaggtcctgtgcctccgcttccccggctgcgggtacacccccagcttcccgagccccccgggccctcgctgctccacccagaagttgcggtgactgcggccccagcaccccgttccctggccgggcatcacttgcgcagcatgctgcccccagaggacagggctacagttagtcgcccacacctcattcacccccttgggcccttgagcgtcttagaagccgcagatgccaaggaggggacgctgcctcgcggatggtcacttgggagcaaagctggggactaaaggaaccagggacagagattcctgctctcgccaaattggccgctctgggccaggcactgaggacacaccgcgaagccggatagccaggtcctgtcctcagggccctgtccggaagaggactgggcagcctcgagtccgcggcaatgaatgaatgttcaattgcacagatggggaggcgaaggagggagggagggagggagggcagtcgcttgggcggtcattggaggc

SEQ ID NO: 17805 - DNA, 93 bp, Homo sapiens
  chr3:129346564-129346657
  hyper
ccagacttgaggggagtggctggagttgagactcaaatccaagaaggaaacggtggggcttggaccacttgcctactgagaaaaatggaagtc

SEQ ID NO: 17806 - DNA, 216 bp, Homo sapiens; identical to SEQ ID NO: 7334
  chr3:130424529-130424745
  hypo

SEQ ID NO: 17807 - DNA, 817 bp, Homo sapiens
  chr3:131753156-131753973
  hyper
caactccattcgccccaccccacctgggcgagttgggtggatgtcagaaggcgagaggtaggggatggaagtcccttcagattaaagacgttgcttgctgctgctttttaaaacaacaacagcaatgacaaacgtgcaaaggtgagcgagaaccagtgcatctcaaaagttggtcttgctacgcagcagctccaacagactttgcaatcacagcgccccaggaacacaggaatgaagagttggcatttacttacctgggtgtgccaatctcgaagagtggagagagaattcagcccgggacgaggtctgtcccgcccccaggatgcaaaatccggctttgaagtggaggtggttggtgtggtagttttgtactgatgtaaggggcgtcgcacctccttcccctctcgtcctccgaggtcagtttagcaacagcggctgggaaaggtgctgagagcagagttcggtctctccggaaaccctgactccattctcggtgatgggggtgggggaagagggtgaaaatgttggagatgtcaggtcggctctcagttaactcggagagtaaagaggagggtactgagaaaagagggagggagtggagtggagcgagggaggaaggaaaggagggtggcagaaagagaaggggacgagcgggtggcggggagatggcagcttctcacagagagatttccaccttctgacgaatcccatgcacccagcaacccggcaagagactggttccgaaacctccgcgcgagcgccccctgggggttgctgacggagacgagcattgccccgggaacccgagctcaggccc

SEQ ID NO: 17808 - DNA, 124 bp, Homo sapiens; identical to SEQ ID NO: 7337
  chr3:141174173-141174297
  hypo

SEQ ID NO: 17809 - DNA, 68 bp, Homo sapiens
  chr3:142103585-142103653
  hypo
cgataatcgtcaactatcgtaaactatcaactcataatcaagtgtgtaaataaactttaaataaatac

SEQ ID NO: 17810 - DNA, 80 bp, Homo sapiens; identical to SEQ ID NO: 8496
  chr3:159480852-159480932
  hyper

SEQ ID NO: 17811 - DNA, 660 bp, Homo sapiens; identical to SEQ ID NO: 8497
  chr3:159480975-159481635
  hyper

SEQ ID NO: 17812 - DNA, 370 bp, Homo sapiens; identical to SEQ ID NO: 8498
  chr3:16553609-16553979
  hyper

SEQ ID NO: 17813 - DNA, 78 bp, Homo sapiens; identical to SEQ ID NO: 9673
  chr3:16555426-16555504
  binary

SEQ ID NO: 17814 - DNA, 108 bp, Homo sapiens; identical to SEQ ID NO: 7344
  chr3:16925425-16925533
  binary

SEQ ID NO: 17815 - DNA, 74 bp, Homo sapiens; identical to SEQ ID NO: 7345
  chr3:16925583-16925657
  binary

SEQ ID NO: 17816 - DNA, 231 bp, Homo sapiens; identical to SEQ ID NO: 7346
  chr3:16925705-16925936
  binary

SEQ ID NO: 17817 - DNA, 256 bp, Homo sapiens; identical to SEQ ID NO: 7347
  chr3:16925965-16926221
  binary

SEQ ID NO: 17818 - DNA, 93 bp, Homo sapiens; identical to SEQ ID NO: 7348
  chr3:16926261-16926354
  hyper

SEQ ID NO: 17819 - DNA, 340 bp, Homo sapiens; identical to SEQ ID NO: 8499
  chr3:16926663-16927003
  binary

SEQ ID NO: 17820 - DNA, 271 bp, Homo sapiens; identical to SEQ ID NO: 9675
  chr3:169379645-169379916
  hyper

SEQ ID NO: 17821 - DNA, 114 bp, Homo sapiens
  chr3:182656917-182657031
  hypo
cgatacacgagttgggatgcctaggtataactcacacacataaagtaaatacccgccaggatggctgcaataaaaaagacaagtattggcaaggatgtgcagacacggcagtcc

SEQ ID NO: 17822 - DNA, 571 bp, Homo sapiens; identical to SEQ ID NO: 12751
  chr3:183542795-183543366
  hyper

SEQ ID NO: 17823 - DNA, 195 bp, Homo sapiens
  chr3:183703570-183703765
  hypo
cggcagtccccaccggcgtcaccaaaaccttggatcatcttggtgtataaatgtcagcatcagctggctggcaggtaaaaacaaacagaacacaacaacttgactgtgtttcatttgttctgattatggctaccaaggttcggtgaaacccgagcagggacaagaaataaaaatgccattttatttggggagccc

SEQ ID NO: 17824 - DNA, 107 bp, Homo sapiens
  chr3:183891953-183892060
  hypo
cggctcgttcatgaaaagctgtagctgacctccgggaagagtgtacagtcatggacttatttgtgaaaaggtttagtttcttccaagtagtcgcctccttcctcccc

SEQ ID NO: 17825 - DNA, 46 bp, Homo sapiens; identical to SEQ ID NO: 7356
  chr3:187455297-187455343
  binary

SEQ ID NO: 17826 - DNA, 447 bp, Homo sapiens; identical to SEQ ID NO: 7357
  chr3:187456666-187457113
  binary

SEQ ID NO: 17827 - DNA, 134 bp, Homo sapiens
  chr3:193391768-193391902
  hypo
cgcgaggtggcaacagctggcccttttactggagcttgtggggattagagagtcgggctcgcagcagcgtgctcggcctcttgcctctgttgactgttctttattgtttgatgcctgagcatctcccagacagc

SEQ ID NO: 17828 - DNA, 112 bp, Homo sapiens; identical to SEQ ID NO: 8507
  chr3:193775965-193776077
  hyper

SEQ ID NO: 17829 - DNA, 473 bp, Homo sapiens; identical to SEQ ID NO: 9699
  chr3:195750601-195751074
  hypo

SEQ ID NO: 17830 - DNA, 95 bp, Homo sapiens
  chr3:196755864-196755959
  hyper
cggggcgggggtggcggtggcttcatcgtttgcattgatgagtgcgtcgcctgcggccacagcggtgccacgaactccatcccctcggcggtcgc

SEQ ID NO: 17831 - DNA, 341 bp, Homo sapiens
  chr3:196756044-196756385
  hyper
aggggacccggcctccgtctccacctccatccctgcatgtgccagaaacccccgggcggactcccgcgcctgccggtcagtccctctgaatcttctcccgcgggggctcgggagaaagagctgctccgagcccccaaagtcttcctgagttcctgcgcccgtcgggaggggccgccctccgggagctcctctccacaccccgaggcctccccaccacgcctcagcccgcgcttctccttggagcgtcggaagcctcgggtgttcgaggccgcctcctccaagaagccttccagacttccccgtctgcgcttcagtgctagttccctccgccgtcctcactc

SEQ ID NO: 17832 - DNA, 222 bp, Homo sapiens; identical to SEQ ID NO: 10628
  chr3:25469458-25469680
  hyper

SEQ ID NO: 17833 - DNA, 130 bp, Homo sapiens; identical to SEQ ID NO: 10629
  chr3:25469874-25470004
  hyper

SEQ ID NO: 17834 - DNA, 125 bp, Homo sapiens
  chr3:33689123-33689248
  hypo
cgagtgcagttgtgcttcaataaaattttatatacaaaaacaggagggcagatggttttgatccgcaagcaacagtttgccaatctctgctctaggctaactactaaaagaagagtaagtaggcc

SEQ ID NO: 17835 - DNA, 175 bp, Homo sapiens
  chr3:33818922-33819097
  hypo
cggaggttgcagtgagccaagatcacgccactgcactccggccaaagtgcgactctgtctcaaaagaaaaaacaagtaataactaatatttattgagttatttaatgttccaggtactattataaacactttatgtaaacaattatgtaactttttttttttgagatggagtctc

SEQ ID NO: 17836 - DNA, 42 bp, Homo sapiens
  chr3:38070629-38070671
  hyper
cgttcttggatgctgtttccttccttcgccgcccctccgtgc

SEQ ID NO: 17837 - DNA, 99 bp, Homo sapiens; identical to SEQ ID NO: 16872
  chr3:42222621-42222720
  hypo

SEQ ID NO: 17838 - DNA, 159 bp, Homo sapiens; identical to SEQ ID NO: 8510
  chr3:42542869-42543028
  hyper

SEQ ID NO: 17839 - DNA, 129 bp, Homo sapiens; identical to SEQ ID NO: 8511
  chr3:42543580-42543709
  hyper

SEQ ID NO: 17840 - DNA, 114 bp, Homo sapiens
  chr3:45750569-45750683
  hypo
cgtcgtaaatttatgtgttttatttgtcgaagatagctatgctaacttagcagggctgttgtgaagattaaagggaatctttggaaaatacctggcacacagtaggtcataacc

SEQ ID NO: 17841 - DNA, 232 bp, Homo sapiens
  chr3:5018754-5018986
  binary
cgtggttttgacgcagccgtgacagcccttcatccttattaaaatcacacaatgaagcaggtcgcccaagattgaaagcgcgtttccagggcggaccccggtccccgcctttggccagcaaaagtacattctggcagggagggatctctgagccccgaagtgaggtcatgccagttagcagttagaaaaggaggcatttctcacacttgctaaagagtttgacgcttgtgaa

SEQ ID NO: 17842 - DNA, 143 bp, Homo sapiens
  chr3:5019132-5019275
  binary
tcgcccagtctcggcagtgaccccatttttttttcaatccttcccacagccaggtcactcagcagtggggtgactgacccgaagcgcagtgggaagggcttacagtcatctctcaactccccgaacttgcagggcaggggagc

SEQ ID NO: 17843 - DNA, 94 bp, Homo sapiens; identical to SEQ ID NO: 15019
  chr3:50243562-50243656
  hyper

SEQ ID NO: 17844 - DNA, 82 bp, Homo sapiens; identical to SEQ ID NO: 7369
  chr3:50377892-50377974
  hyper

SEQ ID NO: 17845 - DNA, 167 bp, Homo sapiens; identical to SEQ ID NO: 7370
  chr3:50378002-50378169
  hyper

SEQ ID NO: 17846 - DNA, 149 bp, Homo sapiens; identical to SEQ ID NO: 8519
  chr3:56718095-56718244
  hypo

SEQ ID NO: 17847 - DNA, 170 bp, Homo sapiens; identical to SEQ ID NO: 8520
  chr3:56718281-56718451
  hypo

SEQ ID NO: 17848 - DNA, 166 bp, Homo sapiens
  chr3:57198384-57198550
  hyper
cgcgcccatcgcccagacagtgtcaaaggagcgctcggttccacgaagacggctcaatgcacacggcgaaagtctgggcacctctccagtctcgtctcaggcacctcacccagatgacacccacgcggccctttggcggaaaaatatccgcaactcgaagcaggga

SEQ ID NO: 17849 - DNA, 568 bp, Homo sapiens
  chr3:57198581-57199149
  hyper
acgaagggctgaaccgggaggcgaagtttctcaggaggtcccggagtcagaggaggggtaggagtggggtgacggccccaggcgaggaggaacaaagctactagaagagcggggcgcatccctccccggtgctccaagtcccctctccggccgcccgggccttagcagggttgtggactgaaagtccgggagaatacccccttccctctccaaagcgcaacccggtccgggtggctcgggggatcccagcccgggacacgcagccctgggacgaaggaggtcccgggccaagaacaaagggtggggcgcccggcccagccccgccgcccctcacgcccgccctctgaatgggaccccggccggcggccgcacctcattagcaacacaaagccggggtcgggcagccgctttcatctcggccagggccggaggacacgcgtccggggagggaaaccaggaggatgcgcgggaggagtgagacccaggccggccgcggaccccgcgaagagcagacaggttggcgcgggctcgcctccccgcgagcacctgtgcgcgctgcgtcccccgc

SEQ ID NO: 17850 - DNA, 261 bp, Homo sapiens; identical to SEQ ID NO: 7373
  chr3:57679351-57679612
  hypo

SEQ ID NO: 17851 - DNA, 144 bp, Homo sapiens
  chr3:58136696-58136840
  hypo
cggagctgtcgactccgccttcttggctttagttaacaggttcttcttgtgtagtcacatcaacgtcgggtcacatgggaatgtggtaaagcctcattactgtagagttcagacatgatcacttaaaaagagctttattgggcc

SEQ ID NO: 17852 - DNA, 264 bp, Homo sapiens
  chr3:71036199-71036463
  hypo
cgctggtactaactatagattgtcaacgctcaattaattttcacacagtgactccaagcaaaatcaaataaaggcagtgtacctttaaattttacaaatcttaaaatcaagaagcaaagcactgtctccattttgaataatcagttaaagctactaggagaattttagaaacgtaagaggaatatgaccgttaaagagatcgatttattacaaggaaggaggtccaagacaaacttttaggttcagacacgatccttctgcttc

SEQ ID NO: 17853 - DNA, 153 bp, Homo sapiens; identical to SEQ ID NO: 8522
  chr3:72149806-72149959
  hyper

SEQ ID NO: 17854 - DNA, 96 bp, Homo sapiens; identical to SEQ ID NO: 8523
  chr3:72150077-72150173
  hyper

SEQ ID NO: 17855 - DNA, 161 bp, Homo sapiens
  chr3:72787779-72787940
  hyper
cgggtgccttcccccaacgaaagccactgatgtcgcccctctcctcccagcagcttccagaccgcgaccttctgtagctctgctcagaacttcacctggaacagcttcttacaattcttaaacagcccctcagtcgactgtgattaagcatacactccagc

SEQ ID NO: 17856 - DNA, 269 bp, Homo sapiens; identical to SEQ ID NO: 15031
  chr4:106067220-106067489
  binary

SEQ ID NO: 17857 - DNA, 501 bp, Homo sapiens
  chr4:110481822-110482323
  hyper
cgctgcggctgggggtgcctcacccgggccgagatagggtgcggggaccaccagacttcggcctgggagcagcagaataacctgggaggcagtttctgggctgcagctctcggtcaggagcaagtttccaaagccgctgcgccgcggggccggttccctcttggtgatcagtgcccgagcccctaaggagcccggaaacgatgaacggggcagtgaccgtcccgggtgtggacggtcgcaggagagtgaaatttccatcctgaaatctgcgagcacctccctttcccagaaggaagaaaaactcgcgttttgttcagacacccgagagacgggtgaatcatgagtgtgctggtgagtaacagttggcctgacaccgttgtattgtggtctgtggagaaccgtggcttggaggagtagagagtggatgtgcaccaaaaaagactagaagaaggggaaagcgctgagtttaaggaggattgcgatggagcctgacaggagccc

SEQ ID NO: 17858 - DNA, 493 bp, Homo sapiens
  chr4:1204224-1204717
  hypo
cggagagggcagggagcagaggcctcagtcatgaggtggggctgtcctcggcgtgggcctcgagactgggagccactgcccatacccaagagacctctgcgagcactggggtgcagagccaggtaggagggggcaccccaccaaaggcagcagcccccccccgcttctttctgctttatatggggcagggagcaaggggaggttgacacttggcggatgacgcggcagggtctggacacttggggtggcaggataacccacctgcatgcagggaaaggcttgggatggaaacatcccgaggggacccgggttccccagcacccgctgcagcccctcctcgtactacctggacccgctgcagcccctcctcgcaccgcctggacccgctgcagccccttctcataaatgagttgggactctgctgatttgcatggaccacgcttccaaaagcagctctgagaaaccaggaggctgggattttgaagaggacgcc

SEQ ID NO: 17859 - DNA, 305 bp, Homo sapiens
  chr4:120549993-120550298
  binary
cgccccgccccgcgcggttctacgggcgcccaggtgtggtgggcggggccaggcgcagctgctgcgccccccccacccggggtccggcagtgttccgctctcgcaggctcttcagtcccctggttcccaggaggcggcggcggcggcggcagcggcagcgcccggcgagctctccggaagccaagtggcggcggctggaaggaggccgcgcggccgctggggtgcgctgtgtgccaagccgacttctggggagcgcgctaggtgactgggtgtgttctcagagtgccccagggagggaaggtcgc

SEQ ID NO: 17860 - DNA, 130 bp, Homo sapiens
  chr4:1205845-1205975
  hypo
cgcccacaggacggacgacgacaagcgacacgaggcccagcgctgccccctcccgcctcctgacagcccggaccagtctctgcagtgccagggccaccacacagatgcctcctccacacactctggtccg

SEQ ID NO: 17861 - DNA, 269 bp, Homo sapiens
  chr4:1206025-1206294
  hypo
ggctacaactggtcactggcgtggtctctatccgcctcgggcttgacggtttggccaggagaaggggcgtggggcgggtgggccacagggggcaggccgtgggacagggacatggcgctggggacgataccttccacagcagctgggatgccagtgggggccacgcccaccacgcccggagggtacctgctgggagagggtccatccgtgaggcccacctgtaggcggcctggccaggccccacctgccctcctagcatcggcagcacc

SEQ ID NO: 17862 - DNA, 71 bp, Homo sapiens; identical to SEQ ID NO: 9732
  chr4:123747655-123747726
  hyper

SEQ ID NO: 17863 - DNA, 189 bp, Homo sapiens
  chr4:141007383-141007572
  hypo
cgcacataggcgctacctcacaaatgtgtctgggtaagaccctgccccatcagcgtcccctgaaacttctcttccttgaatctcactttgataagcacacatgcttggactcaaacaggtcatctccagtatccatttctttcattttcttttgtcccacaatagagttaaacaatacactgtctcgtc

SEQ ID NO: 17864 - DNA, 46 bp, Homo sapiens; identical to SEQ ID NO: 10647
  chr4:154143770-154143816
  hyper

SEQ ID NO: 17865 - DNA, 214 bp, Homo sapiens; identical to SEQ ID NO: 10648
  chr4:154144184-154144398
  hyper

SEQ ID NO: 17866 - DNA, 111 bp, Homo sapiens; identical to SEQ ID NO: 7388
  chr4:154421947-154422058
  hypo

SEQ ID NO: 17867 - DNA, 353 bp, Homo sapiens; identical to SEQ ID NO: 6166
  chr4:15780742-15781095
  hyper

SEQ ID NO: 17868 - DNA, 225 bp, Homo sapiens
  chr4:16084483-16084708
  hyper
ctacagccgtgaagctcctggtctgtccacgctcctctttgttgtccggtcggcgtgttctggcagggtgcgccttgagcaccccagttctccatctagcgatagccgcgggtccccgcgcatgcaagcagaagggccgtggagcgagaggctgggaaggtgcttcaagccaggggtgcatgctttctcccacggacgcggggagatggcctcgctttgtacccc

SEQ ID NO: 17869 - DNA, 212 bp, Homo sapiens
  chr4:1902464-1902676
  hypo
cggcagtgccaacgggaagactccgagctgcgaggtgaaccgcgagtgttctgtgttcctcagcaaagcccagctctccagtagcctgcaggagggggtcatgcagaagtttaacggccacgacgccctgccctttattccagccgacaagctgaaagatcttacttcccgggtgtttaatggagaacccggcgcacacgatgccaaactgc

SEQ ID NO: 17870 - DNA, 74 bp, Homo sapiens
  chr4:2638078-2638152
  hypo
cgtgccctgccaggaagaatattttaatagcctcttcaaatcctgatagatcttctctgagagtacaccaacgc

SEQ ID NO: 17871 - DNA, 211 bp, Homo sapiens
  chr4:2639936-2640147
  hypo
cgtaagtcaggtcactgcctactcttctgttccccgggaactcctggagagcagcggactattgtagcaggaggtagtcttcgtgtcctcgtacctggcacagggcctgggcagcatgggcttggcatttcacctgcttattattacaagcacatttgtgggttccagcctggggctgggtatcagttacctggccctggtctcctgccac

SEQ ID NO: 17872 - DNA, 124 bp, Homo sapiens
  chr4:26855445-26855569
  hypo
cgcgcctggccaagaaacaacttttaaaatctgatcttctttctttcgtatttacaataatgctctgggaatgtgctcatccgtaattcaaacatccacatttccagactttctgttttccttc

SEQ ID NO: 17873 - DNA, 184 bp, Homo sapiens
  chr4:37978665-37978849
  hyper
cggagagggaggaattcttagatttctgaaagttgtgcgaaacggaccccagaggcctggaaaggcgcgtccccagcctccagggtttcctgcgcagccctgggcatctcggaagggggcgaccccagcatgtcccaacttcccgccagcagcggagcgcgggggtgggcggggtcggctgcgc

SEQ ID NO: 17874 - DNA, 183 bp, Homo sapiens; identical to SEQ ID NO: 14027
  chr4:39047105-39047288
  hyper

SEQ ID NO: 17875 - DNA, 43 bp, Homo sapiens
  chr4:40261237-40261280
  hypo
cgcggcatcgtcttgggtaaatacccagggttcatcatcttgc

SEQ ID NO: 17876 - DNA, 145 bp, Homo sapiens
  chr4:48572780-48572925
  hypo
cgaaaagagattacgttctctaggatcattccagagttttaacaatgtgaatccaatactgacctgtgactaatgacaccagcatctgccagcagttcaaatattcgtaccagttgtactcgtaaaatgtctcgacgcctgcgcc

SEQ ID NO: 17877 - DNA, 173 bp, Homo sapiens
  chr4:54965627-54965800
  hyper
cgttggtctgagtggccccaggagggccccaagtacaaagacacttcagaccttgtcgaacatcagcatgaaaagcttgacggtttcttagctgggaggcctcacagttctgcgccggacagtcctgaactaaccacctgaatgacctctgccaagtccaaaagctgtggaca

SEQ ID NO: 17878 - DNA, 87 bp, Homo sapiens
  chr4:57093728-57093815
  hypo
cgaccaacttttataaagggccagatagtaaatattttaggctttacgggccacatagaccggctgcagctgttcaactccatcttc

SEQ ID NO: 17879 - DNA, 85 bp, Homo sapiens
  chr4:57896316-57896401
  hypo
cggtgtttataataaaaaataagtacaaagtaataatttttttctcttaacagtgatggtggcctgcgttttggagaaatggaac

SEQ ID NO: 17880 - DNA, 91 bp, Homo sapiens
  chr4:83718834-83718925
  hyper
agaactgcaaatgggcatagaagattgcggagggggcagggacaggggccttggagaggcaagaggggaaccggtatcttccatctggtgc

SEQ ID NO: 17881 - DNA, 369 bp, Homo sapiens
  chr4:83718966-83719335
  hyper
cggtccaactcccttacttgtcctcatctctgtccccaaggtccgtgacccgcggaggtgatgggggggataggagagccccagggaccgcagaggtgacacaatcgcccgcccgtcctccctcgctgggagccgattcagcctgtgccgagcctctcccttcgcgcgcctctgcgcacagcggtggcaccgcaggactccgggtcccccccggctctccatcgggaagccggcaaatgcgcttcctcaggcagaccgcggcggggtgggggcggggggggggcggaagttgaaatactgggacagaaacacctgcccgtcccaagggacggaaaactggatgccaagggggccgcggcgcgcagcggg

SEQ ID NO: 17882 - DNA, 400 bp, Homo sapiens; identical to SEQ ID NO: 9772
  chr5:101631635-101632035
  hyper

SEQ ID NO: 17883 - DNA, 222 bp, Homo sapiens; identical to SEQ ID NO: 6191
  chr5:101632074-101632296
  hyper

SEQ ID NO: 17884 - DNA, 171 bp, Homo sapiens; identical to SEQ ID NO: 8556
  chr5:10564301-10564472
  binary

SEQ ID NO: 17885 - DNA, 470 bp, Homo sapiens; identical to SEQ ID NO: 9776
  chr5:112629778-112630248
  hyper

SEQ ID NO: 17886 - DNA, 113 bp, Homo sapiens; identical to SEQ ID NO: 9777
  chr5:112630698-112630811
  hyper

SEQ ID NO: 17887 - DNA, 246 bp, Homo sapiens
  chr5:126213748-126213994
  hypo
cgccagcaatcgaaggtctgttttctaccgggcaggtgagatgtgttacagacaagaggaaaggcttgtgccagctgtgaggctgccagctccaaatggcctgaaccccagccacggcccatacttactagtgtccaaaagaggtaaatagtgaagagtgcgacagtgagtgcaatcagtccgacggcttccagccgactactaaagtgcaggtggtccacggcgccccgcaggcacagccagccc

SEQ ID NO: 17888 - DNA, 241 bp, Homo sapiens
  chr5:131831522-131831763
  binary
cgctgatggccgctgcggagcttcatttcttataaacaccgccgttgggaggaaagagaactcagccccctgtcagtcccatggggccccgaggccgggggaggctcctgggccaggcccagcggccgcgacctggagcggggcttgatgggatcagcactctcctcccccgcgccaatgggtgctgcagaacggcccacgcccactgccgttcgcccggggcgcccctggcaggcttctc

SEQ ID NO: 17889 - DNA, 805 bp, Homo sapiens
  chr5:132386973-132387778
  binary
cgtgtcacttgcctgtgttccttgttagggcctaccaccgggtaggtgcttggaatgtgctgtggattaaaggcttaaatcctgcgggcccctcaatctgatctaaggacatgagtggcttagagaacggcgcaacaaggctaagcgaaagaaaacaaagcggtgtggctgggagtgggctccttccctccgctggtgagggtgcgatcttagactcttgagagaacccgacataaaggccgcgttccaatggcggccttctcccctaccggccaacctgccccgaaaagagcagaaggcaccctgcgggatctgcagatcagcttgcgtctcattctggggcaccgacacggtggaatgcaagacaccccactaccggaagtttctttgatgttaagaaaaacggcggaagtaggccgcagcgcttcctcagtatagtgcctcgagctggctcgcctactttctacggtaaagggaggtgctccacatctctatgcagctgtgcagcgccgcaggttccatgcgcaggctcggttggctaaatgcgctttccagccatctttcagccacccagtcctttcccaggttctcgagccaggacgtgacgtattcagacgtactgggggcggggcctcaaggggaaaagcgcctgagccgggatatcgcgagaacatcccgttctttcgtagctctggtgctgcggctccgctctcgtcgcaacgagatctttcgagatcttctccgcccccgctaccggcgcctcctctgcggccactgagccggagccggcctgagcagcgctctc

SEQ ID NO: 17890 - DNA, 873 bp, Homo sapiens
  chr5:133862738-133863611
  binary
cggcttgtggcggaccccgtttgggacgcacacacctgactctcaaatgagtgacattgcagcccccgcccccacctagcgctgctgcagtccctttgccggatccccggccccgccccgcccccggcagtggcatcttcccggcctcacctccttcctccctctccctcccttcttcccacccactcgcctgcgcctgcggagcggcgcccgcccgcctcctccccgcctgggtgcagacttgtggctccccatggtttcttcccgcccatccctgggtcctgagacatcctctcctctcggccaagggacgagaggggtcaacttggcgattcgcagctgttctgccagaggatggggttgcctgcgagacagccaggaaggcttcactctagcttccagaggcccagccctgtcccctactacacacagctaccaccccacccgcccctggggctcggctgcccttcccggtgtctcttaaacccctcccccgacctgggtgttaagcccacccacctcccggcgccgcccccggtcgaacagcctcttgcccttccttcgcctgggccggagccccccgcagcctcctccggctcctcctcccggctccggcggtcggaatcacgccggcgcgcctccagcctgcggtcccgcggactgcctccaggggcgggctggaggcgcgcgcaactcccctcccaatcccctcagccactgccgctggcctgggcacttttttaccagcttggctgctggcctcttgctggaggctgggggaggtgaagggtcactgggtgtctttgccgtatgccgaaggcacactgcggccggcgattctggtctctgcagatttccaaacctcgccgctgc

SEQ ID NO: 17891 - DNA, 73 bp, Homo sapiens; identical to SEQ ID NO: 7415
  chr5:134880614-134880687
  hyper

SEQ ID NO: 17892 - DNA, 469 bp, Homo sapiens
  chr5:139088846-139089315
  binary
cggcggggcctcctcttcccctccccggggaggcaggtggagctgcgtcctcatctttgttcccatctggagcgcgtttggcgcggcgtggcgggggcggggctgcgcccccgcggtgcccggagagactggcccgcccgcttatctgatctgcggctaattgaaactccctgctcgcgaaggtcagctcggtcccctgacagctgccgagccgagccgggccggatggaaaacccgggctgtgcagggcccggcggggcgctgaggggaggggttgtggggggctgcctctgcggcaaagtagacaaaggcggcccctccctccctgtgcgcgctgctgggggtcgccagaggtagcggccttcgccctcaccctgcagggtgttccagccggggtcacatggcctaaggctacagaggaggggggcgcccttaatccctacgtgcccgcccaccccgctcccacgcc

SEQ ID NO: 17893 - DNA, 625 bp, Homo sapiens; identical to SEQ ID NO: 8562
  chr5:142781875-142782500
  binary

SEQ ID NO: 17894 - DNA, 78 bp, Homo sapiens; identical to SEQ ID NO: 8563
  chr5:142782625-142782703
  binary

SEQ ID NO: 17895 - DNA, 201 bp, Homo sapiens
  chr5:145887336-145887537
  hypo
cgcaggtcagtgtgtaatattatgtacctatgtgctgcagtttgactccctaagtaaaagtgagttgtatttatgttttttattcatgtcttttcaaagattaccttaacatccacgtggaaagaagtaaaaaaaatcattaaggaagatcctcgatgtattaagttctcctccagtgacagggtaagaggattttgtgtc

SEQ ID NO: 17896 - DNA, 112 bp, Homo sapiens
  chr5:14681608-14681720
  hypo
cggcgagtccgtggtgataattactgtgcactgagggccacgctgttccaggccatgagccaggctgtggggctgccgccctggctgcaggacccggagctcatgctggtac

SEQ ID NO: 17897 - DNA, 66 bp, Homo sapiens
  chr5:149375694-149375760
  hypo
cgctcctcatccttttccgctggggtcccacggatgcctcccgcaccttttcttcaaatttggtgc

SEQ ID NO: 17898 - DNA, 317 bp, Homo sapiens
  chr5:150536746-150537063
  hyper
cgcaggcagccctcccccgacaccacacacaagccattttataagcagctggagggtccaacgctcttgctctcagtcttgggcctcagccacacccttctctgcgggtcctttgactggcgtccagctgaccccaaccccggaccttcaaagtctcttgagcccccccaaattaaggccggcaggaccagcccctggctcagctccggcgcccaggaccctcaaccagaccctctgcagcaacgggactccctcccctccccctagccagggcgccctccgcccgcgcctctccgccccgaccccagatttgctcc

SEQ ID NO: 17899 - DNA, 98 bp, Homo sapiens; identical to SEQ ID NO: 8567
  chr5:151066500-151066598
  hyper

SEQ ID NO: 17900 - DNA, 250 bp, Homo sapiens
  chr5:171471000-171471250
  hypo
cgggggccagcacgcatcgcagcctggcagtacagcctgtgcttttccatgcctccggtgccaacaccccgcacgtgccacaccaactgctccacctaacatgctcagtggcacaggctcaggcagcaaacgtgttccaacccacctgggcagaagaggccaggccagcagaccaagtcctgtgtgtacgcgtatgtgtgtgcattcacacccatgtgcaggaagggggacgcgagatggcatgaaacac

SEQ ID NO: 17901 - DNA, 727 bp, Homo sapiens
  chr5:179245848-179246575
  binary
cgccgggccctggagggtgggaaggggccagtggacgcggggagcctgcggggtgggactgcatcgggaaaggggaaggagtcagaggcgagaagggggagagtgtctgtctggctccagccgctgcacgctcttcctgctcaggggactcacggtgaccccggagccactccccagcccagcctccaggtaagaggtcactgagatgggtggcagcaggggccggggatccccctattacgacagcggtcatgggacgctgactcactgccggccagaccacctgacctccgcggcgggaggagagggccctgccagggggttcccgccgcgccttgtttacctccgggaggcctcggcctcgcgtgggggcagggcggccgctggggccgcaaggcgtgcggggaagggccagagccgggtgtccaccccagcttcccaaagactccctcttctgtgcttccttctcccctccccgccccccccccagtctcttcacatgcccctagcccccgcggaaacttcccgcgatcccaaacgggccaaatggcgagaaagcaaaggagctccttcttgggggtgagtggggcgccttgagcgcttcctcaaagctatgttcccagagccacaggccttccttgtgtccctcaccctgctcagaccgggccatagccgggggctggggcaggaaagccggccctcggcgggggccacgtggctctcaggc

SEQ ID NO: 17902 - DNA, 108 bp, Homo sapiens
  chr5:179708846-179708954
  hypo
cgaggtgtgttagcgtgccagccagggagtgactccagtgacgccacagcgcttagatgctggacaaacagctgctcatacaacccgcaccgcaggagtctcagtccc

SEQ ID NO: 17903 - DNA, 127 bp, Homo sapiens
  chr5:180018679-180018806
  binary
tcctcttggcaggcgctggggccctctgagagcaggcaggcccggcctttgtctccgcgaggcccaccccggcccgcaccttcgctttgcggtctgaccccacgcgcccccctgcagggctgggccc

SEQ ID NO: 17904 - DNA, 287 bp, Homo sapiens; identical to SEQ ID NO: 8581
  chr5:1874606-1874893
  hyper

SEQ ID NO: 17905 - DNA, 32 bp, Homo sapiens
  chr5:33892023-33892055
  hyper
cgctcgcctgtggcccagcaggaagatgcagg

SEQ ID NO: 17906 - DNA, 337 bp, Homo sapiens; identical to SEQ ID NO: 8583
  chr5:40680627-40680964
  hyper

SEQ ID NO: 17907 - DNA, 99 bp, Homo sapiens; identical to SEQ ID NO: 6210
  chr5:42950747-42950846
  hyper

SEQ ID NO: 17908 - DNA, 215 bp, Homo sapiens
  chr5:43603571-43603786
  binary
cgcaggccgcaggcttaggtggggaagaagcaccgtgcctcttggtgtccctttctcgtctcctgctggggcgatgtcgaagggagtgggctggtggatttgggaactgggtccccgaagagggcagggaatgaggcggcagctgtgcaggtgcagatatttgcagctttgggggacagcgagagtcgtacggggtcatttcggccctcaagatc

SEQ ID NO: 17909 - DNA, 76 bp, Homo sapiens; identical to SEQ ID NO: 7437
  chr5:54518558-54518634
  hyper

SEQ ID NO: 17910 - DNA, 129 bp, Homo sapiens
  chr5:58334886-58335015
  hyper
cgccatgctcggatgcccggtgccggcacatgagggctgctccttcatattgcccagcccggcagtgcaacgggggcggaggctgtgctcgcggggcggccggcctcggggaggcacggtctctccagc

SEQ ID NO: 17911 - DNA, 211 bp, Homo sapiens; identical to SEQ ID NO: 15090
  chr5:58335353-58335564
  hyper

SEQ ID NO: 17912 - DNA, 73 bp, Homo sapiens; identical to SEQ ID NO: 15091
  chr5:58335881-58335954
  hyper

SEQ ID NO: 17913 - DNA, 33 bp, Homo sapiens; identical to SEQ ID NO: 8592
  chr5:6583144-6583177
  hyper

SEQ ID NO: 17914 - DNA, 82 bp, Homo sapiens; identical to SEQ ID NO: 14096
  chr5:72416165-72416247
  hyper

SEQ ID NO: 17915 - DNA, 62 bp, Homo sapiens; identical to SEQ ID NO: 7438
  chr5:74753672-74753734
  hypo

SEQ ID NO: 17916 - DNA, 35 bp, Homo sapiens
  chr5:77425063-77425098
  hypo
cggtctctgatgtcgtagttttgatcatacttgcc

SEQ ID NO: 17917 - DNA, 72 bp, Homo sapiens; identical to SEQ ID NO: 8594
  chr5:96114516-96114588
  hypo

SEQ ID NO: 17918 - DNA, 53 bp, Homo sapiens; identical to SEQ ID NO: 8595
  chr5:96114632-96114685
  hypo

SEQ ID NO: 17919 - DNA, 227 bp, Homo sapiens; identical to SEQ ID NO: 7442
  chr6:10417842-10418069
  hyper

SEQ ID NO: 17920 - DNA, 138 bp, Homo sapiens; identical to SEQ ID NO: 11779
  chr6:10418940-10419078
  hyper

SEQ ID NO: 17921 - DNA, 36 bp, Homo sapiens
  chr6:105750354-105750390
  hypo
cgggtacggccgctccttccgcggctgctgcttggt

SEQ ID NO: 17922 - DNA, 83 bp, Homo sapiens
  chr6:105750646-105750729
  hypo
gcagcaactctttctccttcccgtgaaggtcccgagacttgatcttagccattgctgcacaggccgcccccgccgcctgctcc

SEQ ID NO: 17923 - DNA, 315 bp, Homo sapiens; identical to SEQ ID NO: 8599
  chr6:107810308-107810623
  binary

SEQ ID NO: 17924 - DNA, 430 bp, Homo sapiens; identical to SEQ ID NO: 8600
  chr6:107810665-107811095
  binary

SEQ ID NO: 17925 - DNA, 265 bp, Homo sapiens
  chr6:111409052-111409317
  binary
cgggaccctcggacagccccgaggcggctgtcgagaaggtggaggtggagctggcggggccggcgaccgcggagccccatgagccccccgaaccccccgagggcggctggggctggctggtgatgctggcggccatgtggtgcaacgggtcggtgttcggcatccagaacgcttgcggggtgctcttcgtgtccatgctggaaaccttcggctccaaagacgatgacaagatggtctttaagacaggtgaggcgcggcgcccgcc

SEQ ID NO: 17926 - DNA, 274 bp, Homo sapiens; identical to SEQ ID NO: 8602
  chr6:111409368-111409642
  binary

SEQ ID NO: 17927 - DNA, 72 bp, Homo sapiens; identical to SEQ ID NO: 15121
  chr6:116691827-116691899
  hyper

SEQ ID NO: 17928 - DNA, 249 bp, Homo sapiens
  chr6:12338243-12338492
  hypo
cggtatataggcaatactgtaggcaattagaacaccgtgttaaggatttgtgtatctagacagagaaaaggtacggtaaaaatacagtatgaggatctcacaggactctcgtgtatgcggtcagcattgactgaaatatcacgtggcatctgaccgtatttacaataacgggaggcagtggacactatctgactcctgaaatcagatcacctaggtgactccttcaaaactgtggatgtttggctgggc

SEQ ID NO: 17929 - DNA, 365 bp, Homo sapiens
  chr6:131383375-131383740
  binary
cgatctagagaagcataactgatgtcccaccacagacctcaggctgctgggggcagcgtctgcgcctggggatggcgtccccagacgccgacttcaaccctgtcgcgctcctttaggttctcctcgcccttccccgctgctcacctaaaaatgctcccaaccctcggcccccaggcgcaggaggagaaaaaacaagccatctgtggtgagatggcctgggtgtgggaattgtaaggatcggagcacgaaacacgcgtccctctccgcagctcccagacggcgcaggcggcagctgggggcgcggacgcgagcctacagcgggcccgacccgcaccgcgcgtggggctggcgcgccgccctcgccc

SEQ ID NO: 17930 - DNA, 103 bp, Homo sapiens
  chr6:131455849-131455952
  hypo
agcctttacgccagctgttgtggctgtgtaggggtcttcttttcttccatccctattctacgatgcattcaacataagcgaagtgttattattcacgaaaggc

SEQ ID NO: 17931 - DNA, 41 bp, Homo sapiens
  chr6:136552688-136552729
  hypo
cgctcagagccaaggacaaaagtgaacgagacactctcagc

SEQ ID NO: 17932 - DNA, 176 bp, Homo sapiens
  chr6:136682773-136682949
  hypo
cggtccagcgagtgcatgagatccttccccagggtacagttgtgttcgtttgaagaacaattatattgacattcgtcttattaggcccagaagatgaccaattaaacaaactgtttctggaatactgcctggcaggcaatcatggggcatgtaaagatcccacctggctaccctcc

SEQ ID NO: 17933 - DNA, 135 bp, Homo sapiens; identical to SEQ ID NO: 7454
  chr6:136901469-136901604
  hypo

SEQ ID NO: 17934 - DNA, 217 bp, Homo sapiens; identical to SEQ ID NO: 8608
  chr6:137310942-137311159
  hyper

SEQ ID NO: 17935 - DNA, 249 bp, Homo sapiens
  chr6:138724531-138724780
  binary
cggctgcctcttctgttcacaggggcctactccccttcacccttgggggatgtcaccattgcttttcacgtggccaccctcctgtccgttggctttcgcgtggggagtgcctgctgcctctgcggcggtcacgtcgccccggagagcctcggagctctggctgcccacgatgggagtcctctggggggcgccggagccgtgccgggtccccgccgcaggggacagtaacgcggagtcggcctggccggc

SEQ ID NO: 17936 - DNA, 369 bp, Homo sapiens; identical to SEQ ID NO: 6230
  chr6:143247975-143248344
  hyper

SEQ ID NO: 17937 - DNA, 208 bp, Homo sapiens; identical to SEQ ID NO: 8610
  chr6:143248451-143248659
  hyper

SEQ ID NO: 17938 - DNA, 370 bp, Homo sapiens
  chr6:143268770-143269140
  hyper
cgcgacccggctttctggccggggttccccctgagcaggtgactccgtgggaggggtggaaatgagtctctggaattccgggccaaagacaataactgtggttctgcttttaaagcaggtatttcaccagcaactgcggaatgttttgtgtctccagtttcaaatttcgcggaaagggaccaaatgtgaggacatataaaatatccccttctcttttcattaaaaatgagtgcattacaaaggaagggcagccccttaatgcctgcgagaatagcgctgctggtttcgtttttgttttgttttgttttgtttttcattctgacccacaatcagtgtatttttgaggtccctatgcaatggcgacggtgcc

SEQ ID NO: 17939 - DNA, 761 bp, Homo sapiens
  chr6:146136035-146136796
  binary
cgcagcgtcgtggctagagtagggtctggagagagctcccactgtggcgagtcctgtcgttggattcccgcggcgccccgtaaggctccgccccggcggtgctaccaaaccctgttcgattttagaatcgtacattcccagagggaatcctagacccctcattttacagttgaggaaacaggcccaagtagcatgacttgttcgcgccgctagtcgaaggagcagcagccccgatcccttgactctggggcactgctttccctttagctcatttttggaggaaatgggtgcgcccttgctcgacctttggtgattgccgccacaggccttcccgccggctaactcagcgtgcccaagtcccgtgacttagtgccaggacggtgctgtgacccgttatcccctgtcgggttttacctccccccgggagagctcagccctggatcccggcgggcggcggagcctctctggagcccggacgggacagcccaccagggtctgcttctgtgaggggccgaggcgtcattccgcgaaggtaattagctggggaggggacttgaagccgcttttgcagtgtaccttacatatgactggggagtaaagaaatcccacagggctgtatcaaagaatggatggatgtccacgcccccgctaccaccaccaagccttggtctacggccgagggacagtgattccgagctctgggtgttgggagccgctcacccgcccccacccctctgtcggggactcctgcccaccccgtc

SEQ ID NO: 17940 - DNA, 45 bp, Homo sapiens
  chr6:151346267-151346312
  hypo
cggttaccctcaccgcaccccaggtttgccgtagaaggatgagat

SEQ ID NO: 17941 - DNA, 37 bp, Homo sapiens
  chr6:151346372-151346409
  hypo
ctccatgcccactgagcaggctcgtggacgtcggcac

SEQ ID NO: 17942 - DNA, 56 bp, Homo sapiens; identical to SEQ ID NO: 7457
  chr6:158321417-158321473
  hypo

SEQ ID NO: 17943 - DNA, 120 bp, Homo sapiens; identical to SEQ ID NO: 9849
  chr6:16322061-16322181
  hypo

SEQ ID NO: 17944 - DNA, 65 bp, Homo sapiens
  chr6:166742989-166743054
  hypo
cgtacctggctaacgcagcaagattgccgagggtataaaacactgcaaaaagctttatgccgccc

SEQ ID NO: 17945 - DNA, 316 bp, Homo sapiens
  chr6:170667214-170667530
  hypo
cgcctatacacacactcatagttaataactgagatcaatttgtaagaaatgtttaatttttcctgtagcctaacactggcctttctctgtccttttcaggtggacacgctttgcctggaggatttgcatgcgtttattgcgcaggccttgtgcctccaaggaaaatccacctcgcagcttgtaaatctacaggtacagacgtgaccagttagttgtcactgcccggaagacagctgtgcagtccagccttctctttcccattatagttgaagtttcacagaaaagatcaggaaggtattttagtcaggatcttttc

SEQ ID NO: 17946 - DNA, 148 bp, Homo sapiens
  chr6:170871281-170871429
  hypo
cgccagcttcggagagttctgggattgtaccgcagctgcagtgagtacttcgtgttttatgtttcctcccacttaggagtccctttgagttatgttcctgctctgttttcagatggatccttttattaagggagggagtggcactaac

SEQ ID NO: 17947 - DNA, 432 bp, Homo sapiens; identical to SEQ ID NO: 15139
  chr6:21665191-21665623
  hyper

SEQ ID NO: 17948 - DNA, 269 bp, Homo sapiens; identical to SEQ ID NO: 15140
  chr6:21666189-21666458
  hyper

SEQ ID NO: 17949 - DNA, 94 bp, Homo sapiens; identical to SEQ ID NO: 10715
  chr6:24662806-24662900
  hypo

SEQ ID NO: 17950 - DNA, 202 bp, Homo sapiens
  chr6:26087985-26088187
  hyper
acttttggaaccgcccactcccttcccccaactagaatgcttttaaataaatctcgtagttcctcacttgagctgagctaagcctggggctccttgaacctggaactcgggtttatttccaatgtcagctgtgcagttttttccccagtcatctccaaacaggaagttcttccctgagtgcttgccgagaaggctgagcaaa

SEQ ID NO: 17951 - DNA, 130 bp, Homo sapiens; identical to SEQ ID NO: 7461
  chr6:26271217-26271347
  hyper

SEQ ID NO: 17952 - DNA, 327 bp, Homo sapiens; identical to SEQ ID NO: 7462
  chr6:26272105-26272432
  hyper

SEQ ID NO: 17953 - DNA, 210 bp, Homo sapiens; identical to SEQ ID NO: 6237
  chr6:26322359-26322569
  hyper

SEQ ID NO: 17954 - DNA, 140 bp, Homo sapiens; identical to SEQ ID NO: 6242
  chr6:27059547-27059687
  hyper

SEQ ID NO: 17955 - DNA, 43 bp, Homo sapiens; identical to SEQ ID NO: 6243
  chr6:27059899-27059942
  hyper

SEQ ID NO: 17956 - DNA, 104 bp, Homo sapiens; identical to SEQ ID NO: 16039
  chr6:27428748-27428852
  hypo

SEQ ID NO: 17957 - DNA, 51 bp, Homo sapiens; identical to SEQ ID NO: 7471
  chr6:27858740-27858791
  hyper

SEQ ID NO: 17958 - DNA, 126 bp, Homo sapiens
  chr6:28327754-28327880
  hypo
cggcgccgcaggtagaaagaacaggtttagtatctgagcgctgtggcctgtttcctcctgaaatcccagatcagagtgaggggcattcctttaacatccaggagttcttcatctcttttttgtacc

SEQ ID NO: 17959 - DNA, 856 bp, Homo sapiens
  chr6:2841503-2842359
  hyper
cgatctccactctcagagccctgatttcccccgaggacaggcaaagaagaaccgtgctggctgctcggcatgtaagcacaaagctgatttctccttgttgtgaaatcgtctctagaatcgcacggggttcctcctctctctccctgcagctgcagataggagccgcggcctggccctgggctgcctggaaaccgtcacaaacagctctgggaggaagggaattcagggagaagggacaacattctgatctcaggtttcagtcttgccttccgcctgcatctgtcgtcctccctccctccctccctcgcgggctggcccggcctgtacccaggcgggggcgggggatcagaggtcgtctgtctccgtcggggcgcccggaagggatgggggcgcgaagctggcggggagggcgagcgcagggagctgcgggtctgaggggcctgagcctggggggtggggggtgccgggctggaagctgagcgagggagcctggcctctccccgcgcccgcccccgcgccaccgctccgaggcccggccttacccgacaggccgccgaggcacgctccgggctccgagctgggtgcgaggtcaggaaggaggcaccgagggccgctgctcttatagcaggcggaagcgtcacccgggccagcagccgcgggcggggcggcggcccttcccggtgactgcgtaggagtccgagctcccgaggtcgcctaagtgcaagcagaagtgagcgtggcttccgggcagcgccctcctcaggggcgcggcttctttctcagttcaaagcctttccccgaatctctggcaaggacctgaaaagctttttcttactaaggtgtgaatgactgagac

SEQ ID NO: 17960 - DNA, 315 bp, Homo sapiens; identical to SEQ ID NO: 6252
  chr6:28456978-28457293
  hyper

SEQ ID NO: 17961 - DNA, 209 bp, Homo sapiens; identical to SEQ ID NO: 6253
  chr6:28457345-28457554
  hyper

SEQ ID NO: 17962 - DNA, 143 bp, Homo sapiens; identical to SEQ ID NO: 7474
  chr6:28458192-28458335
  hyper

SEQ ID NO: 17963 - DNA, 156 bp, Homo sapiens; identical to SEQ ID NO: 6254
  chr6:2903557-2903713
  hyper

SEQ ID NO: 17964 - DNA, 73 bp, Homo sapiens; identical to SEQ ID NO: 8624
  chr6:3231938-3232011
  hyper

SEQ ID NO: 17965 - DNA, 70 bp, Homo sapiens; identical to SEQ ID NO: 8625
  chr6:3232260-3232330
  hyper

SEQ ID NO: 17966 - DNA, 699 bp, Homo sapiens
  chr6:3750702-3751401
  binary
cgcaattcttcccgtctcaattccagtccctctctcttgcgtcctcccggcttccaccccctcagcctggcctccaaaagaaagatcgggcagagcggtaggaaaagggaagccaccgcggtttctgaaaacaagaattcccgcgagccaggacggtcacgaggccggggaggaggcggcgcagctgatcaaacgcgaatggggaccagccctggcgggggtgcgggggggccctggctgtccgcggcagccgcgggcggggcggccgctccgaggagggacggaagggctgcgtggcacctcgcgctcgaagaccaggggcgcgccctccgcggggagaactcggggcggcggccagacccgacgcgacccccggctcggaccctgcagttaactgctcccagacgctttcccagtgcgcccgcccgccggccctcgggaggtaccgggcagggggctagggccgggccgaccctgtgagccgctcagccccgggcgcccccgccctcctcggaagtgactcgtcctcagggagagtccggcgcccgccctgccggcctcggcccctttcccgccccatttggctcctccgccgggggcgcccccaggctgggcaggctggctccccgtccccctaaccccgccgcccgggcacccctcgtctgcgggcgcggggtccaagtgtcccctgtccagggc

SEQ ID NO: 17967 - DNA, 49 bp, Homo sapiens; identical to SEQ ID NO: 7483
  chr6:38020529-38020578
  hypo

SEQ ID NO: 17968 - DNA, 126 bp, Homo sapiens
  chr6:4061573-4061699
  hypo
cgcgcttgatggatagagcgccttcagtgtactgtttcttattaactttactttttttaaatcaacttgctatagactttatatacattttgttaaatatagttcctagtgacatagaaacgatgc

SEQ ID NO: 17969 - DNA, 154 bp, Homo sapiens; identical to SEQ ID NO: 14176
  chr6:41339068-41339222
  binary

SEQ ID NO: 17970 - DNA, 360 bp, Homo sapiens
  chr6:41340027-41340387
  binary
ctgacacgcacacacacacacacacacactcgagacactgcagggccctgcccatcctcgagttcacaccagccccgccactattatgggcactgccggggctgtggacgctcaaagaatagatcctcattagcatcttgctttgaatatcatttgcattttattcatttcatgtcaaaacgctcagaactctccccagcccgcaccttccccagagcttgggagtcatgggtttccagctcaagccccttctctgtgggccccacgcttgctggctacccccaccccacctaccctgcgccacagcccccacaaaatgaattgacgtctcctaagcacttggcaagttccatctcctgc

SEQ ID NO: 17971 - DNA, 102 bp, Homo sapiens
  chr6:41472031-41472133
  hyper
cgcataggaaaggagggtgctgccgaggtggctgcctgggggcgggccctacaggggtcatttggggcatcccctgcctctaggcaaatccccacggagccc

SEQ ID NO: 17972 - DNA, 171 bp, Homo sapiens
  chr6:41827211-41827382
  hypo
cgagcacgtgtgtactttcccttattcagcatctaccatgctgtactgtaattgtctgtctgcttgactgtgtcccaactataacaaacctgaagaagacatcgtgccgagaacagagcaggaacctaataaattttgttgaattaaagaccgagtgaataaacaaataac

SEQ ID NO: 17973 - DNA, 85 bp, Homo sapiens
  chr6:43814642-43814727
  hypo
cgttggctgaaacatcattatgcggtacatgactgtataaaactaaataggtagtttcatgagagaaataatcagaagttactac

SEQ ID NO: 17974 - DNA, 46 bp, Homo sapiens
  chr6:44187030-44187076
  hyper
cggggctttctgcctgccacacgccgtccctgctcactaccccatc

SEQ ID NO: 17975 - DNA, 468 bp, Homo sapiens
  chr6:44187131-44187599
  hyper
cgacccagggggaggggcagagagaagggggtccgagcccttgggcccctaaccccgtccctttccggagcctcgggtgcccaaaggcgccggccgccagtcccaggcccgaagggcccctcccactgagtcggctctggtctccccgcccctgagccgcgaggactggacgcagctggctgcggagctctgggcgggcgctggggtcgcctgttgcagcctctcttccgcccggcggcccacaccggtcaggcccggcgcgggctgcgctctccagctgtggctatggccccagccccgagatgaggagggagagaactaggggcccgcaggcctgggaatttccgtcccccaccaagtccggatgctcactccaaagtctcagcaggtgcgcggggcggggccggggggcctggcggggcggggtggggtgggggcgaggtctgcgccgttctcacgctgccgggc

SEQ ID NO: 17976 - DNA, 434 bp, Homo sapiens
  chr6:49518143-49518577
  hyper
cgcctcagctccggagaaaaacgaaaggtgggtgggaaactaggatagaggtgaaaagtaagaggggactgaatcagcgaatgacaaagggagcagggctccggacaggggtaggaggaagaagaggagtgactggggcttgtgtcaagcttcttctgaatggctagacagccgccaggtgggagaggcggagggtgaagaggcgggttccgcacgcggttagcctggggctgatctagtcttcagctttcaccggctgggagtccggagctgcagcagaggccacacccagggcttggtggtcccgcgctttccggagctcagcaggcgcttgctgcttgaaccggtcaaagaaggaacgaatgaatgacccttttgccaggatggagacccgggggcctcagggagctgcgaatcccatggactcctcccgc

SEQ ID NO: 17977 - DNA, 278 bp, Homo sapiens
  chr6:49519000-49519278
  hyper
caggtaacacaagaagtgttgcagacctcctgggccaagggtcgcatgaccacgaggactgaggagcacttcgtgaccgcgctcacttttcgcagcagtagagagggacagcctggggaacgctggggccctgctgaatcccgggctctccaggcacgaacaggggcatcccgcgtccacgccgcggggaggagggtttcaccgtctccagggacttggctcgaggaaattaaactctaatgagtagctcgagaaatgttccgggatggtggatgagc

SEQ ID NO: 17978 - DNA, 44 bp, Homo sapiens; identical to SEQ ID NO: 8640
  chr6:50805695-50805739
  hyper

SEQ ID NO: 17979 - DNA, 123 bp, Homo sapiens
  chr6:5108225-5108348
  hypo
cgagactccatctcaaaaaaaaagactttatcctgaaatcaaaagttgtactgccaaatagaatggctacacgttacatctatttgaacgcatcattgcagcaaatctatgctctctaaaagc

SEQ ID NO: 17980 - DNA, 637 bp, Homo sapiens; identical to SEQ ID NO: 8644
  chr6:52227115-52227752
  binary

SEQ ID NO: 17981 - DNA, 133 bp, Homo sapiens; identical to SEQ ID NO: 8645
  chr6:52227876-52228009
  hyper

SEQ ID NO: 17982 - DNA, 249 bp, Homo sapiens; identical to SEQ ID NO: 8647
  chr6:56818408-56818657
  hyper

SEQ ID NO: 17983 - DNA, 394 bp, Homo sapiens; identical to SEQ ID NO: 15180
  chr6:710660-711054
  binary

SEQ ID NO: 17984 - DNA, 141 bp, Homo sapiens; identical to SEQ ID NO: 15181
  chr6:711310-711451
  hyper

SEQ ID NO: 17985 - DNA, 131 bp, Homo sapiens; identical to SEQ ID NO: 10735
  chr6:74161047-74161178
  hyper

SEQ ID NO: 17986 - DNA, 179 bp, Homo sapiens; identical to SEQ ID NO: 10736
  chr6:74161321-74161500
  binary

SEQ ID NO: 17987 - DNA, 66 bp, Homo sapiens
  chr6:75985974-75986040
  hypo
cgtaaataaagtgtttacctgagttctatgagccgctctagcaaataaagcaaactcaaggagggc

SEQ ID NO: 17988 - DNA, 750 bp, Homo sapiens
  chr7:120496826-120497576
  binary
cgtaagggagaagccccatcctttcaccacatcctactcccaagggcaaaacggcagcgatctgcagggggcgggggagagagaacacgggacatctcaccatcacgcttcccacagcctgcccgtccctcctccacccgccctcagcagggtccagagggtcccgaggcccagtgcattcgagacatcgcctcatcaaaaatcatttgttaaaatcataatggtaactaaactcccaaaagttccaaaccggcttcagataacacctgctgggaaaagaaaagagcaactatccggatgaatgaagtcgcacagtaaactcgcgttctcaggggacacgcggcggagccctgtgcattctgatgagacgctcttgaaaacctccctcactccacgcccctcctcgaggacagctgtgctcggcactgtcctgaaggtgagaaaccacactgccccctaccccggacacgtcagaggcgccaccggcaagcccgagagaatgagcgcccttctagttaggacagttcctgggcactccaactccgcacccctctaccccgtcccgcagctcgggtgtgaatgcaagggactggggcggcggggcgggggcgggggcgggggcgagggggcagcgcggagttgagattccgcccggctactagggtttctctgggagaacgtgagaaatgatgttttcggccccagaatgatggattagcctgggacagtgggcggggggcggggggcgcc

SEQ ID NO: 17989 - DNA, 88 bp, Homo sapiens; identical to SEQ ID NO: 8665
  chr7:127371042-127371130
  hypo

SEQ ID NO: 17990 - DNA, 252 bp, Homo sapiens; identical to SEQ ID NO: 8666
  chr7:127371249-127371501
  hypo

SEQ ID NO: 17991 - DNA, 209 bp, Homo sapiens; identical to SEQ ID NO: 17034
  chr7:127671450-127671659
  binary

SEQ ID NO: 17992 - DNA, 82 bp, Homo sapiens; identical to SEQ ID NO: 8669
  chr7:129421203-129421285
  hyper

SEQ ID NO: 17993 - DNA, 282 bp, Homo sapiens; identical to SEQ ID NO: 8670
  chr7:129421349-129421631
  hyper

SEQ ID NO: 17994 - DNA, 170 bp, Homo sapiens; identical to SEQ ID NO: 8671
  chr7:129424378-129424548
  hyper

SEQ ID NO: 17995 - DNA, 141 bp, Homo sapiens
  chr7:133630779-133630920
  hypo
cgtggtaattcctctctcgcttcagtatttacaagtttcaaatatttgttgactgttatcagacagttcctcctcagcctaccttacatgtttagtttctctaatcacctttctatggttagactttccgtgcccttcatc

SEQ ID NO: 17996 - DNA, 198 bp, Homo sapiens; identical to SEQ ID NO: 12920
  chr7:139929854-139930052
  hyper

SEQ ID NO: 17997 - DNA, 362 bp, Homo sapiens; identical to SEQ ID NO: 12921
  chr7:139930346-139930708
  binary

SEQ ID NO: 17998 - DNA, 357 bp, Homo sapiens
  chr7:141211599-141211956
  hyper
gatcctcctgcagagcagtagaaagtccgggaggggcccgtgcccatggctccaggaaaggagcggccaggtacctgccaggggagaccaggcacttccaggtgcgaccaggtacctcccaggtgcggccaggcgccgcctcatctctcggtgggcgagtgtatttattccaaacccagactgagaggtgacagcttcaagtctgctcgggaaggaaacacctcgcaggccaagcacaaaggggcttactcgtttcttttctgcagcggcagctttccccctccctcctgtttctccgctttccctcctttccctccaccattcctcgcccactcctgcccttcccgggtgggacac

SEQ ID NO: 17999 - DNA, 999 bp, Homo sapiens
  chr7:142985430-142986429
  binary
cgcaggcgcaggcgcagtgtgcgtccgcgtctgaggggagggatgtgggggaagcgacggcccccggtttgtttgggctgtgggcggtgcgcagcggagagcccgggaaaagcgggaaatggcggcgccgagcgcggggtcttggtccaccttccagcacaaggagctgatggccgctgacaggggacgcaggtaagtagggaacggtcttagggctccttaggggagcccagggaaggggagcgtggcccccaggcgtgcggccctgcagccccctcccctcggagccccggaaagcagccgtgtccgcgcttcctgccaagggtgggacgcccgcccgagccgctccgagcctgactccgcgcaagggcccgcgggcggacctcttggccttgtctctcgtgggaaaagactgccccagcctccctttgttcaacccacgagggttctaaaggggaggtctttgcagtcctgcccgctcttgggttctcttgaagattcttcatcctttcctctggctcccttatgagggaaactataaaaagaccatactctgtctccttaaaaatcgacgagaccttctgcagacctcggtgctctgcctgatgtgcatttgatttgtatcgattgtatcatgatctgcatggctttgcatagaatgaccagattttcaaagaagtcaatacagggtttggaaattgagtacttttggcagaacaagggggttcctgtggctccgagtgtccatgcctctgccccggtcattccatttcatggcagtcatcacccaggagaacattgtaatgcctcctgctcgagactgaagattaaggtcttcgcaaagggaacctgcagaaggacacagaattaagacgtaggaactccgtggtgcccttcgcccctcctccccttccagttgtgtcctgaaattctaaatgattggaaacttttataatgttcacgtttaagactctcatactacagagtagaggaaggagc

SEQ ID NO: 18000 - DNA, 163 bp, Homo sapiens; identical to SEQ ID NO: 7504
  chr7:148851234-148851397
  hypo

SEQ ID NO: 18001 - DNA, 351 bp, Homo sapiens; identical to SEQ ID NO: 8682
  chr7:150676178-150676529
  binary

SEQ ID NO: 18002 - DNA, 149 bp, Homo sapiens
  chr7:152152776-152152925
  hypo
cggtttattgttcgaacaatttgaacatttattaagtgccaacccttgtaaagaattacccagcaaccagaattcaacttggtcagcaggcaaggagtctcgatcagacaaactcgccattttgaaatatgaaaaattatgccgggcac

SEQ ID NO: 18003 - DNA, 194 bp, Homo sapiens
  chr7:155601495-155601689
  hyper
cgcctgagctcccgcctacctccctgatctgcgagccgcgccggcgagtgtcaccgccagcagccggtgggcttcccccagcgcgggggcgggggcgtcccagcttcaagacagccccagcccctaaacgcacctctctccactgtcctttcccccaagcttggtggaacagcccctccccaaccccatacctg

SEQ ID NO: 18004 - DNA, 801 bp, Homo sapiens
  chr7:155601951-155602752
  hyper
tgagggacttgggcggcagtcacattagagacccagagacagggagggagacagaagaagagggtcacgcacctggggcagagcctaggtggttatttaaaatgagggcggccgagcaggctccccaaacctcccgccggcctggggctcccctgccgcctcctgcaccccgcccctgccctcagcacccgagcctccgccttccccatcccttcctcccccacccttaactcctggaatcgggagaaggaaggtaggggagggatcaaccggggatacctcacagactgccagcccctacccccctcggttttaggggacctttgtggggtctgcctgataatcccggcctggctctcctcacccaacccccacttgggccgtccttccccctccttttgtgttgggaacgggaatagccactgcccaaggaaaaaagtatttgttttcgtttcgttcgtctgagggaagttgacagaaggtcagaagttcaaatgctgcctgtgcgcgcggcggcgagagtggccgggcgcggggccgctgggccctgcgtcccccggcagggcggacgggggtcggggggaggcccccgggctgggggctccggctgggacgcggaggcctagaggccaggcaggcggcggactggggatgggggcgcgtcccagggcaggccggcggagcccgcgatgcgccccggcccctgcgcgggcgcccccatctccgcgcccccgccgccggggacactacagcgagcccggcgctgctgttagctcctgcggtgcctgcgctcccgcgcgt

SEQ ID NO: 18005 - DNA, 103 bp, Homo sapiens
  chr7:156435920-156436023
  hypo
cgcagcaaagcggtagagttcaattggaactcaagttggtctgtccccatattctgtacttctgtgttctggacagactgaagttagccagtgttcctcttgc

SEQ ID NO: 18006 - DNA, 131 bp, Homo sapiens
  chr7:156974878-156975009
  hypo
cggcgcttgcagatgcgcagaccgttttcccttacgagccctttctgaatgcactgttgttaatagagagtagatgttcaagaaagagtggtggagcaccctggcttttctatttcgttttaactgttggc

SEQ ID NO: 18007 - DNA, 458 bp, Homo sapiens
  chr7:157052694-157053152
  hypo
cgacgccgttatgttctggaagtaatgaataataaagacgtataaacttaaacgtgttagtgaataccatcactcaatgatatcagtagaaatgataatcttccaaattgttggagagaaaaaataaccatgcaaataaaacaggacaaacagaaccaactctgtttaccagatatggggggtgggggtgggaagtaacattcagaatcgtaaaatagaaaacatagaatgagagaagcctgaatgttacaacagtgagtgcggagaaactgacgtaatgaaagaaaaagactttgagacagggccaggaaaacgctgccgcctacaagcaacacacctaaacggagtgacccagaagggtttagtggcacgtccaggttcgtgtgtgaagaaatagatgggtccccttcagagtttgaagcatgacccatgtgaccagataggagaatctctcgagc

SEQ ID NO: 18008 - DNA, 177 bp, Homo sapiens
  chr7:158451052-158451229
  hypo
cggcataaaggacattagcatgaataaagggatcttgcagcgatcatcctaaaagcgaaaaaagaaaaacaaaacaaagcatatgtaagcactataaattctgaaagtctctctacgtaaattcctgataacttactaccaaagttgctcaagaagaaccatggcagtcctttccac

SEQ ID NO: 18009 - DNA, 216 bp, Homo sapiens
  chr7:17339346-17339562
  hyper
cggtcttaattctcattcttcgtagagtttggtaaggcgagatgttttaaagagctaaacacatgctgacttttacgaaggggctgagtgcctctaaaggtactttttggtccccaccaactggctttgtgttgcgctcatatttacttatttggcagcaattttgtagcgctcatcgtgaccatatcggtaaagtggatagaagtggtagcaggt

SEQ ID NO: 18010 - DNA, 260 bp, Homo sapiens
  chr7:17339591-17339851
  hyper
ggaggatttgtattcttcagacatctttttcggaagcttgcttatcacttttggggtggctttagggtctgtaaaataaaagatttagaactgcatttgagagaggttttcattcttaacatctacctctaattcttttccccttcaaagttttcttctagttgagtgagtacaaacttgcttttgtcgttgtcggttgattttggtggaatatttgtgtgagatggccaattttttgtgtgtgtcagaaaaaactatcc

SEQ ID NO: 18011 - DNA, 147 bp, Homo sapiens; identical to SEQ ID NO: 16076
  chr7:2068947-2069094
  hypo

SEQ ID NO: 18012 - DNA, 382 bp, Homo sapiens
  chr7:2113550-2113932
  hypo
cgggcccgcgtcatcagggccacatccccaaggcctgatggctgacactgaaatcttctgaacaacagaactagactgtaaaaatccaacaccaagacgtgacaaggagacgacactgtggaatgctcgccaagaaccatgtccgggatgtttgccactcacacctgactggcaggcgagtctacccagtctgttcagcacacgggatgtgggtgaggacggccacatgccgttccaggcagcagagatggcagcacggaacaccgcagccagcctgggctcgctgggcctccattctactggggtgggaatctcaagcaaagaagccacgcgtgtggcatgagcagagaatctcacggcgggtgcaggtactgaggtcacc

SEQ ID NO: 18013 - DNA, 237 bp, Homo sapiens; identical to SEQ ID NO: 8690
  chr7:2233056-2233293
  hypo

SEQ ID NO: 18014 - DNA, 761 bp, Homo sapiens; identical to SEQ ID NO: 7527
  chr7:23510081-23510842
  binary

SEQ ID NO: 18015 - DNA, 229 bp, Homo sapiens; identical to SEQ ID NO: 7528
  chr7:23513246-23513475
  binary

SEQ ID NO: 18016 - DNA, 242 bp, Homo sapiens; identical to SEQ ID NO: 8699
  chr7:23514425-23514667
  hyper

SEQ ID NO: 18017 - DNA, 224 bp, Homo sapiens
  chr7:2558675-2558899
  hyper
ggcgagggaagtggcggccttcgtttctcctcgccatggggcgcctgaggatttcggggagccaaccctcccgacggagggccaggatcgaggaaatcagccagggaggaaggagtggaatttggttctggtgctttctcgttagaacctcgtgtccccacctgcggcacaggtggccaagctcttgctctgtacaaataacggctcccctgaaccgagcgctc

SEQ ID NO: 18018 - DNA, 225 bp, Homo sapiens; identical to SEQ ID NO: 8705
  chr7:26192423-26192648
  hyper

SEQ ID NO: 18019 - DNA, 112 bp, Homo sapiens; identical to SEQ ID NO: 8706
  chr7:26192748-26192860
  hyper

SEQ ID NO: 18020 - DNA, 126 bp, Homo sapiens; identical to SEQ ID NO: 7538
  chr7:27831654-27831780
  hypo

SEQ ID NO: 18021 - DNA, 162 bp, Homo sapiens
  chr7:29185654-29185816
  hyper
cgcgttgagggagtaagggaaagtgtcctgcacccgccaccctcccgcgctaagagcggcagaggaccccacagcttcgtacttccccggaggagctcctggagtaggagacggcttctagcctggaagaaccccgggtgcgacagttgtgccaggaaactt

SEQ ID NO: 18022 - DNA, 37 bp, Homo sapiens
  chr7:29186197-29186234
  binary
acatgacccagacccacagggcaaaaagtgcgtcgtc

SEQ ID NO: 18023 - DNA, 339 bp, Homo sapiens
  chr7:32981774-32982113
  binary
cgggagcgcaaggcctcccaagtcagggcccgaattccgcgtggtgccaaacggcagctggctccctgaatgcccaccctgaaccctggtaaaaaataaaaaaaacaacaacaaaattccctccaacccggagaaaacaagtccgcctctgttctacctagcagcgccgtggccagtccccgccgcccattctctcttcttccgggcctcgccacaccaacactgcaggacccgtgtcctcgtcccttctccgtagcagaggatgaaaagaacggggtttctccatgtcgcagtggcccagggaactcagaggtggagcgcgggggcagcgtgctcggt

SEQ ID NO: 18024 - DNA, 687 bp, Homo sapiens
  chr7:32982270-32982957
  binary
ggcccctccgtggccgggcgggcctcgctccccacccagtgaggactagaagtcccgtcgcaggcactaggttcctcacaggcccgcacccctgcctgggtcctgggggcttggaggacccagcccagcgcccaacacggcgccgggcgcccctgttcccagaaaacgggcggcgcgcggactgcggcccagacggctgctcgagactcacaaggactccaggcgcttgagctgctgcagctgctgggcgtcgtgccgccgccgcttctgctcccgggcccgctgcagttcctgatccagcggctcccgcggccaccacgcgcccccagccctcgcatcctcgcgccccggccaggacgacatcgcggcacctgcggcgcggctctggctgcggccaagagggcacttcctccgtgcggcgccccttcccgccgccgccccgcgactcgcccgggaggggccccgaagtcccggcctcggccgccagatgcccgcctgcccgcggccggccccaagtcagtgcgcagagccccagagcccagccgccggtgggcggggagcgcccgctggcggcggctggagccgaggcggggcggggccctggttgggagcctggggaagcttccaggagcttcagggttcccgccaggccacactcatctccctgcccctttgaggttcccgacc

SEQ ID NO: 18025 - DNA, 112 bp, Homo sapiens
  chr7:44611096-44611208
  hypo
cgcagtggaagctctccattgagcacacaggtggggatgctgaactgttccaagaacaggcgtagccggtaactccgttctagagtgttgacaaagagcagagacttgcccc

SEQ ID NO: 18026 - DNA, 102 bp, Homo sapiens; identical to SEQ ID NO: 7551
  chr7:50344738-50344840
  binary

SEQ ID NO: 18027 - DNA, 55 bp, Homo sapiens
  chr7:5240151-5240206
  hypo
cgtttgtgtgtgcgtaggttctgtgcagtcttttttgtttgtttttttttgagac

SEQ ID NO: 18028 - DNA, 145 bp, Homo sapiens
  chr7:6058662-6058807
  hypo
cgtgaagatgagcatgaaatcccaactgcgtaacattaattgtggaacaaacagactgtactgctggaataatttcacagccgcctccagcgtggggagtgtctgcttcaatctgcttcagacaccctgtgacgctaatcatctc

SEQ ID NO: 18029 - DNA, 68 bp, Homo sapiens; identical to SEQ ID NO: 14291
  chr7:6060523-6060591
  hypo

SEQ ID NO: 18030 - DNA, 105 bp, Homo sapiens; identical to SEQ ID NO: 14292
  chr7:6060612-6060717
  hypo

SEQ ID NO: 18031 - DNA, 71 bp, Homo sapiens; identical to SEQ ID NO: 14293
  chr7:6060772-6060843
  hypo

SEQ ID NO: 18032 - DNA, 76 bp, Homo sapiens
  chr7:7612745-7612821
  hypo
cggaatacaagccaaaagatgttcgtaaatacaaaagctgttcagggtgtgacggtagacccatatttccacgatc

SEQ ID NO: 18033 - DNA, 157 bp, Homo sapiens
  chr7:7613138-7613295
  hypo
cgaacaatgtcagacttcactgtttttgaaaggatatctcttgcctggagcccaattacatctttaatgtgggcttgtggtcgtcatttatatgaatgtacggaagaagaaaatgataattctttagaaaaagatatagcaacgaagatgcgtcttc

SEQ ID NO: 18034 - DNA, 90 bp, Homo sapiens
  chr7:778947-779037
  hypo
cgtcgtggcaggtgcggccgtggcaggtgtcgactgcattaaaccctgggctgtctctgctcgagacctgccggcgccatgggtgaagac

SEQ ID NO: 18035 - DNA, 176 bp, Homo sapiens; identical to SEQ ID NO: 8734
  chr7:920980-921156
  hypo

SEQ ID NO: 18036 - DNA, 352 bp, Homo sapiens
  chr7:97925221-97925573
  hypo
ctggaagccactcagtgttgggccaaccccgtgcacgcatgcctggggcccaacaatcctgctccctgtaggaacaagcagggcacacacccatgggcaccgagacactcgggcagccctggagaaacagcccagaccagaaacaccagacgcccgtcaatgggagagtcagaaccagcttctgtgcagacagcaggtcaccacacagcactgagcgactgtccctacggggccaccccagacagccatctctgtgccagggcttggggagtctggtgttggagaagggatggtcacggaggtgggccatgctgggtgatcgtgggggccgggaacgtcctgctgggtatac

SEQ ID NO: 18037 - DNA, 78 bp, Homo sapiens
  chr7:98971600-98971678
  binary
ggcagagggtcaggatgggaagactccggggaccacctagcccaagacccgcaatcaggcggctctgcaaggctaacc

SEQ ID NO: 18038 - DNA, 396 bp, Homo sapiens
  chr7:98971810-98972206
  binary
ggagggccaagggggcggggccgggctgccctggccacgcccggaccgcctgctccccgcccagggcctgcacagttggcgcccaccggcatcagcgtgaagggagctcctcgctggctgccgacggggctgcagggctcgctagccgctcacctgcgtgtgagcgcggagcccgcagtacccgccgtccgggctcagaggacgtgactccccgaccctgcgcccggcagtccccgggggccgtgcgcccggcccaggctcggaggtccagcccagcggcggctcaggctgcgcgcctggctcccagcctcagtttccccattggtaaagcattgacggtggttgcggacggcttctgcggacagagccttgggctccgacgtctgcgcgggtacc

SEQ ID NO: 18039 - DNA, 80 bp, Homo sapiens; identical to SEQ ID NO: 8735
  chr7:99155672-99155752
  hyper

SEQ ID NO: 18040 - DNA, 216 bp, Homo sapiens; identical to SEQ ID NO: 8736
  chr7:99156600-99156816
  binary

SEQ ID NO: 18041 - DNA, 77 bp, Homo sapiens; identical to SEQ ID NO: 8737
  chr7:99156982-99157059
  binary

SEQ ID NO: 18042 - DNA, 39 bp, Homo sapiens; identical to SEQ ID NO: 10801
  chr8:101717122-101717161
  hypo

SEQ ID NO: 18043 - DNA, 90 bp, Homo sapiens
  chr8:107281820-107281910
  hyper
cgctccaagctgccttgggtccctttctaggctgtcagacttcgccttcctttcctccttgtttttcccagcaaccaaagcatctgaaga

SEQ ID NO: 18044 - DNA, 218 bp, Homo sapiens
  chr8:107282895-107283113
  hyper
ggcggggaggctgggtttggggcgcgggagcccggccagggacagccgcagaaggaaagtgggggtgtcgccgggggatagagtgggagcagcgtgagagcagtgttgggggcgcagagtggagggcaagcgtgtcttgaacagaacggcaggaggatgggtggaaagtggggcgcgtggaaagcggatttggacgagagcaaaggacgccggtggaa

SEQ ID NO: 18045 - DNA, 221 bp, Homo sapiens; identical to SEQ ID NO: 7561
  chr8:118531602-118531823
  hypo

SEQ ID NO: 18046 - DNA, 90 bp, Homo sapiens
  chr8:119057056-119057146
  hypo
cgccccaccgcatgcttttgtaaacaaagttttattggaacatagctcatttgtttacatattgtctacagctgctatcctcttacaagc

SEQ ID NO: 18047 - DNA, 62 bp, Homo sapiens
  chr8:125498221-125498283
  hypo
cgtcagcttttggaattgagctgcttcctcgaaaaggtccctcgctgtggatggcacttatc

SEQ ID NO: 18048 - DNA, 49 bp, Homo sapiens
  chr8:125498538-125498587
  hypo
cgaatttacggattacagttattgatggaggacacatggaagaggattc

SEQ ID NO: 18049 - DNA, 200 bp, Homo sapiens
  chr8:126061282-126061482
  hypo
cgttgtaatttatgatacgagatacttcttcctgccaaatcttcagaccataaatgttgacatagtcctgtatgtattcaaaagaacgatggaatccatccatggtcgctcccaactctttcagcttgggcatcaattcacttggctgtggaaaaggggaaacataaagctcttacactggagtagattgtcaactattc

SEQ ID NO: 18050 - DNA, 106 bp, Homo sapiens
  chr8:131455079-131455185
  binary
cgctctcagaaaacgcagcaggtcccaaaatggtacaagcagaaaacacaagccacttcacggtccgcccaggagccaaccccaagctccaagtaggactcccccc

SEQ ID NO: 18051 - DNA, 123 bp, Homo sapiens
  chr8:134268431-134268554
  hypo
cggtgataaaaattctcacctcctagagttactatgaagattaactgagatcatgcacacacagcaacgtagaatgaaactagcacatggtaaactctcaatctacgttagctaattattatc

SEQ ID NO: 18052 - DNA, 66 bp, Homo sapiens
  chr8:135805728-135805794
  hypo
cggttttgggaagaaactgttccacctcaactcatcgggcattaattagattcttgtaaggagcac

SEQ ID NO: 18053 - DNA, 231 bp, Homo sapiens
  chr8:144575951-144576182
  hypo
cgaagggatcggtaagcataatttcagaggccagtaatattttatataatcgccgagtggtttaaattgaaaacccccaactgaatcaatatttactgcattgaaacgaaatgaatagtaataagtcactaagctccctgtcctgtttcataaaataaaaaattataaaaatgagcacaggcacagggaggccatcacattaacttttacagcacttggggagccgtaacc

SEQ ID NO: 18054 - DNA, 394 bp, Homo sapiens
  chr8:144640377-144640771
  binary
cgccaagccaaggttcctccggacgcgcgaggctggtgctccaggcgggctggcgggaagagggggcaggaagggggccggggcgggctctccgggacggttccgggagggcgtcctgggcgggccctgcgtcaggttgcagtttcacttttagctctgggcacctccagctcctgctcgccggacggctcccagggagagcagacgcgccagacgcgccaccctcggggcgccgacggtcacggtgagctgcgccccgccccctcccccggcctggctggagctcccgagtggggccggccgctggctcccgggtgggggatgctggccctgctgccccagcgttcgcccagaaggccccgcgccgcacacgggggcggaagctccaggcttc

SEQ ID NO: 18055 - DNA, 127 bp, Homo sapiens; identical to SEQ ID NO: 8761
  chr8:23021590-23021717
  binary

SEQ ID NO: 18056 - DNA, 197 bp, Homo sapiens; identical to SEQ ID NO: 6630
  chr8:23423722-23423919
  hypo

SEQ ID NO: 18057 - DNA, 166 bp, Homo sapiens
  chr8:48801168-48801334
  hypo
cgcgtcagggccatacaagttgacggcacaaagctcctcaatgctggccatgtgacaaaacagtaaattaggtgagctctgatctcgttaaattatcaagatacactgaaaaaaatgtttgcactgttatgaagcaaacagaggcaacatctaacaggatccacac

SEQ ID NO: 18058 - DNA, 103 bp, Homo sapiens; identical to SEQ ID NO: 8768
  chr8:60030067-60030170
  hyper

SEQ ID NO: 18059 - DNA, 239 bp, Homo sapiens; identical to SEQ ID NO: 5853
  chr8:60030908-60031147
  binary

SEQ ID NO: 18060 - DNA, 120 bp, Homo sapiens; identical to SEQ ID NO: 13055
  chr8:61822259-61822379
  hyper

SEQ ID NO: 18061 - DNA, 144 bp, Homo sapiens; identical to SEQ ID NO: 13056
  chr8:61822883-61823027
  binary

SEQ ID NO: 18062 - DNA, 95 bp, Homo sapiens; identical to SEQ ID NO: 8772
  chr8:6633002-6633097
  hypo

SEQ ID NO: 18063 - DNA, 55 bp, Homo sapiens; identical to SEQ ID NO: 5856
  chr8:72756949-72757004
  binary

SEQ ID NO: 18064 - DNA, 95 bp, Homo sapiens
  chr8:73448692-73448787
  binary
cggacccggctttaccctcaaacccaggaaagccgggtcacttggggctagggacggcccccgagcgagcggggctgcaggtgccgcgaggaaag

SEQ ID NO: 18065 - DNA, 253 bp, Homo sapiens
  chr8:73448832-73449085
  binary
aggaaaataatcctggcaccaccactcaggagccatctgtcttcgccccagttccccggggtcgagcagtcagcccagggtcagggtcctgctgtgggcgggcgggaggacagccctgcagttggaagcagaagggccgagggaatcccgcgaagccgccggagcgcgtcgcggcggggcctcccggggctttcccggccccgggtgcgcggcagccgcgggggctgcgtccctctagtccagtgcagccggg

SEQ ID NO: 18066 - DNA, 264 bp, Homo sapiens
  chr8:73449114-73449378
  binary
tggagccaggcccggggcagcaggagtggctggcgcgcggaagctgagggaggcaccccgccgaggtgtgggcggtgcctgcccgcgccccagccgcgccctgggcaccagagcgctgtccccggccgagcgcacagctccggcgccgcgaggcagagccccggcgtccccggcggtgcgctgccggctcgcgcagcccagccatcccgccccgccgcccaccttgacagccgggagcgctgaggaggaagagggggaggggga

SEQ ID NO: 18067 - DNA, 208 bp, Homo sapiens; identical to SEQ ID NO: 10819
  chr8:73449432-73449640
  binary

SEQ ID NO: 18068 - DNA, 209 bp, Homo sapiens; identical to SEQ ID NO: 10821
  chr8:80803900-80804109
  binary

SEQ ID NO: 18069 - DNA, 140 bp, Homo sapiens; identical to SEQ ID NO: 8779
  chr8:91014317-91014457
  hyper

SEQ ID NO: 18070 - DNA, 66 bp, Homo sapiens; identical to SEQ ID NO: 8782
  chr8:91996920-91996986
  hyper

SEQ ID NO: 18071 - DNA, 71 bp, Homo sapiens; identical to SEQ ID NO: 10824
  chr8:92120822-92120893
  hypo

SEQ ID NO: 18072 - DNA, 53 bp, Homo sapiens
  chr8:94712366-94712419
  hyper
cggacgcgtctggtacgagactacaagtcgcacaggcggagagggggcccccg

SEQ ID NO: 18073 - DNA, 249 bp, Homo sapiens
  chr8:94712881-94713130
  binary
aggcgcaccctggaaaaccggtaacagcccgagcccagctgcccagggccgcccacactggagggctggggtgagggaagtggaagcctctgtccatggggcctctgcgccgaattccgaccctgagtgggaggctgcacggtccccgctgtgacctggggcctaattccttgggctgcagccaccgccggcggcgaagaggagcccggggcccggccggctgccacccacccacgccaccgggtctcg

SEQ ID NO: 18074 - DNA, 60 bp, Homo sapiens
  chr8:94747749-94747809
  hypo
cgtcaatactgagggacagattttttaagtgaacataaaatccaagaggggaacgagaac

SEQ ID NO: 18075 - DNA, 59 bp, Homo sapiens
  chr8:95816370-95816429
  hypo
cgttttcatttatagccactgttagtaatgaggaaagacagcagaaaagaaagctcagt

SEQ ID NO: 18076 - DNA, 59 bp, Homo sapiens; identical to SEQ ID NO: 8785
  chr8:99953137-99953196
  hyper

SEQ ID NO: 18077 - DNA, 419 bp, Homo sapiens
  chr8:99954762-99955181
  binary
tctgcctacccctcgggaaaaccaaacggttctgcacccaacgtacacatacttaagggcgggaaaggtgtgaagcccgctgctggggagttgcctcccctttgatgaaaaggaagtgcgaagcgtaggaacgctcttcaggtcaccaccccgtgagtgggaggcttggggagtctgaaggaagagaaagctccctccaaatctcccaaactgagaaaagctgcaggaggaatgaggcagttggagagagaggaccgcaggcatcccgcagctgaggctcaggactgagctctaaaatgaaagcacccctatgggacccaccaggcaaaacgttaaaaaaaaaaaaaatctgaatgcttaggcattctgctgcttccattctgtgtgtcaaatctactttgaagcagttaagtactgca

SEQ ID NO: 18078 - DNA, 94 bp, Homo sapiens; identical to SEQ ID NO: 7606
  chr9:100503340-100503434
  hyper

SEQ ID NO: 18079 - DNA, 132 bp, Homo sapiens
  chr9:100843158-100843290
  hypo
cgatatctgtggccgcagtggctctgggggccaaggtgttggaacgtcacataactttggacaagacctggaaggggagtgaccactcggcctcgctggagcctggagaactggccgagctggtgcggtcag

SEQ ID NO: 18080 - DNA, 442 bp, Homo sapiens
  chr9:102586203-102586645
  hyper
cgcagaggagccccggtcacaatggtgcgtttcacggtttcctccacacacttcaccaccgggaggggaacacgggggtgttcctttcgtctgcccacgagaaagaaaggggctttgacagaggtagttatttcttcctaatttacaaccccaaggctctgtgctcccggccccggcggccgcaagcaggagcggcggaacgtgtttccaggcactgaggctttgcctaggtaaccggccgcttgtggggtggagagagcggcggggcgctgggctgggctggaggaaaggctgtgtgggtccctcccgcgaacgctgggcgctcgaggggaactccttcgttggggagaggcggtccccgcccacccgagttctgaggcctcctctcagagaacgactccgcttgaaaggccctcagggaatgcgggacgggaatgcgggc

SEQ ID NO: 18081 - DNA, 227 bp, Homo sapiens
  chr9:102586985-102587212
  hyper
ctcttcgagctgcgcccaccccgggcaaagggggcgctataggccggagtttgggcacccagttccttccctgaggcctgctgagctgcgctttcagctacaaagtttcgctgaggctgtgggctgagacgctggtcccggagctgcgctcggcgccctcaggaatgtgcccccgctaggccgctgggtggccaggagcctccaagccgcccaccctcgaagacacc

SEQ ID NO: 18082 - DNA, 299 bp, Homo sapiens; identical to SEQ ID NO: 14355
  chr9:110187439-110187738
  hyper

SEQ ID NO: 18083 - DNA, 957 bp, Homo sapiens
  chr9:116811431-116812388
  hypo
cggattgccgggtgagcacgtccgccttctccaaggccggcatgtgccttcgctgctcagcctgtgccttgaactcggtggtgcagagcgtgctgagcaagcggacactgcaggcccgcagcatgcacgaggtcatcgagctgctcaacgtgtgcgaggacctggcgggctccacgggcctggccaaggagaccttcgggtcgctggaggagacgtctccaccaccctgctggaactcggtgacggactcactgttgctggtgcatgagcgctatgagcagatctgcgagttctacagccgggccaagaagatgaacctcatccagagcctcaacaagcacctgctcagcaacctggcggccatcctgacgccggtgaagcaggcagtcatcgagctgagcaacgagagccagcccaccctgcagctggtgctgcccacctacgtcaggctggagaagctgttcacggccaaggccaacgacgcaggcactgtcagcaagctctgccacctcttcctggaggcgctcaaggagaacttcaaggtgcacccggcccacaaggtggccatgatcctggacccgcagcagaagctgcggcctgtgccaccctaccagcacgaggagatcatcggcaaggtctgtgagctcatcaacgaggtgaaggagtcctgggccgaggaggccgacttcgagcccgctgccaagaagccccgctctgctgccgtcgagaaccccgcagctcaggaagatgatcggctaggcaaaaatgaagtgtacgattacctgcaggagcccctcttccaggctacccctgatctcttccagtactggtcgtgcgttacccaaaagcacacaaaactcgccaagctcgccttctggctcctggcggttccggccgtgggcgccagaagcgggtgtgtaaatatgtgtgaacaagcgcttctaatcaaacggaggc

SEQ ID NO: 18084 - DNA, 301 bp, Homo sapiens
  chr9:116918462-116918763
  hyper
cgggcgagagttggcgaacgctgcccgccctgccgcgcctggcccggctgcccgatcccgttggggcgggggcagagccagcccgggggtcgggggtgggggtgggtggtggcgcctggagcggccggcggggtgcggaggggggctttttggatgcttgggggaggaggggggtctccgtttggggccgtctcggtgtgttccggtgtctcagtgtctgcaggtcccaagcctgtacgtctccgtttctatctgttcttgtgaaattgtccgcaagtttctaggtcaccaggtctcgggt

SEQ ID NO: 18085 - DNA, 398 bp, Homo sapiens
  chr9:123210124-123210522
  hypo
cgagccgtttgtctagctcacagggaatacatttttcttggtgcttaccattcagcaacgttttgtcgggcgttggcctcccctccatcactgcttcagccagaattaacttttggtgaagttgcttattacaagttttaaactccttcagctccccctgcagctccaagatctggctctgcagctgcgtcaccacctcctgggtggcagggagacgatacatatttcctaatgaccgggatggttttattaggattggcaagcgggacttcttagcctcctgaaaacacacatatgcaacaatgaatacactttgaacacacttcctttggttgcacagtcaacattctcatgccagccttataaaacggaattcgaactggctgcccagacttctc

SEQ ID NO: 18086 - DNA, 754 bp, Homo sapiens
  chr9:124132057-124132811
  binary
cggtccccgcctcgctggctgccagttccctctgcgtttcctagtccgcgtgcgtgacacgagatagtgcagccctggcatggggcttggcatctggcggccgcgagataaccagggcccgtgcgatgggaaacgtgccgttggcagcccgccacccctccatcgtgacctcagtctgccaaacagggttcgtgatgctcagtttactagggaggagccgcggctttgagatctcgcccagcccgaagcagcggagactggccaggagcccggctgtcagacctcggagcgcacgctgcgggcgggggctcggtccacgggggagggtcaggggacgcgggactcacccttgaaggagtcggggagccgctgggcttcggagtcccgtgtgtgccgcttctcggccatgctgcccgagacgcagtcgcactcccccgtcctcgttgccaaacccggagccgccgggaatgccctgaggagccagaggcacaagacccagattgccgccccgcccccaatcgaggtcccgccctcgtgagagttggccaatcaacgcccaggatcgaggaggacccacctcccaatccccgccctcctgtccctccacggcgcgactgcttcgcagtcacttcccgctagttctgtgggctgaggggcgtggcctgaggggcgtggcctgaggggcgagagcccccaaggctgtgggtatgaggccggggccctgcaccggaagggagggcggaagccacgggac

SEQ ID NO: 18087 - DNA, 179 bp, Homo sapiens
  chr9:126092355-126092534
  hypo
cgagcacccaaacaaggacaacgttccagaaccttgtttctaacaaatgtcggtaaaacaaaaacacccgctacagacccataaaatgtgaagaccaactccagtgataaaatatgttcgtttctatgtatttttatagctttccggataataaaaggaaccgtgttctaatcggatgc

SEQ ID NO: 18088 - DNA, 139 bp, Homo sapiens
  chr9:128274083-128274222
  hypo
cgcatgaagccgcataccctccatttcacagcagagaggaacacaaaaggaagattctgggaagcagttactctgcagcgacgggaaaacctgcttgggcattccaatgatgtatttattgcagtaataccatgtcacc

SEQ ID NO: 18089 - DNA, 116 bp, Homo sapiens
  chr9:129645183-129645299
  hypo
cgtgtgaactgctgcgctacacatcagtgttaactccctacagattacactctaatcccgctgctcccgaggagcggctttgctaaatcgggtatatagtatatgcctttttcctc

SEQ ID NO: 18090 - DNA, 224 bp, Homo sapiens
  chr9:135117797-135118021
  hyper
cggtgagccagagggtcgggagaaacgctgctcgccccacaccccgtcctgcctcccaccacacttacacacacgggactgtggccgacaccccctggcctgtgccaggctcacgggcggcggcggaccccgacctccagttgcctacaattccagtcgctgacttggtcctgttttctattctttatttttcctgcaacccaccagaccccaggcctcaccgg

SEQ ID NO: 18091 - DNA, 131 bp, Homo sapiens
  chr9:135118060-135118191
  hyper
gagagaaggaaggggtggggggcctggaaacttcgttctgtagagaactatttttgtttgtattcactgtcccctgcaagggggacggggcgggagcactggtcaccgcgggggccgatggtggagaatcc

SEQ ID NO: 18092 - DNA, 329 bp, Homo sapiens
  chr9:135267105-135267434
  hypo
cgggcacgaactgcgtgcctgcctccctcccaacgtgtcccgtgccactgcggggaagtgaccctccgcccaggctctcccaccaccagtttattggggtcctggtccacttggcagttatatttgcacggacagttactgaagtgtggtaaaaaccagcctagtgggtaaaggtcacatggcttcactaaacacacgaggaaaccaaacaaattagtatagagaacagcttaagaaacaaagctcttgcggaagacaggtctacggtgatttccgggcattggatcggttatggctgaaccaggcctgtcagggcttatttcttcagc

SEQ ID NO: 18093 - DNA, 231 bp, Homo sapiens
  chr9:135275329-135275560
  hypo
cgatctataaatctgaatcatccataaaagaaagttaggtgctagctctgcatacaggaagttcaacaaacactaaggccccacaagctcaccttgtgctttaaattccttaaaccgttccaagtcgtcccggtacatccgcttgattgtgctggtggccctgtccttgatgttaggaatgaactcctgaagctgtttcacggcagaacccaaatccgcatctgaatcatc

SEQ ID NO: 18094 - DNA, 141 bp, Homo sapiens; identical to SEQ ID NO: 10838
  chr9:135523845-135523986
  hypo

SEQ ID NO: 18095 - DNA, 58 bp, Homo sapiens
  chr9:136603465-136603523
  hyper
cggaactccaggcctcccccgccccccaccctcgctgccagccccatgtctccgccca

SEQ ID NO: 18096 - DNA, 185 bp, Homo sapiens
  chr9:138719269-138719454
  hypo
cgggtgcaggtagtgcctgtgacagccttccgccggcagctgcacggggggctgcagctcagccagggtccctgcagcagggctgcctaggaaactgcgtttggtcgcgttggagatcggtacaggaggccggctgctcttctggtgtaacactgttttcgctgcagaaatagcgtttttgcatc

SEQ ID NO: 18097 - DNA, 145 bp, Homo sapiens; identical to SEQ ID NO: 8808
  chr9:139317510-139317655
  hypo

SEQ ID NO: 18098 - DNA, 380 bp, Homo sapiens; identical to SEQ ID NO: 8809
  chr9:139317866-139318246
  hypo

SEQ ID NO: 18099 - DNA, 233 bp, Homo sapiens; identical to SEQ ID NO: 8810
  chr9:139374838-139375071
  hypo

SEQ ID NO: 18100 - DNA, 206 bp, Homo sapiens; identical to SEQ ID NO: 6644
  chr9:139698453-139698659
  hypo

SEQ ID NO: 18101 - DNA, 637 bp, Homo sapiens
  chr9:140196486-140197123
  binary
cggcgtccccgggccccgcacgccgcctctgggcgctccgggcgctcggggccgggggtcgccgccgcggggaccccgccgcatccagccgcgcccgggtgggcgacgggggcgcgcgctcggctcgcgggggccgggcccggccggggacggcggcgccgcgcggtcccggtccctactcggttcggctgcggctcccacgcggtcccaaggcgcctccccacgcgccgcagcactagctcgcccgccgcgccggggcgccttttaccttctttatatttgcataacaatggcagcccgtgacgcgcgcgccggcggccccgggattgggccgcgcccacatgggggcggggcgtgggcggtgccgtgcgcaggggtccgggggcgggtcccggcggcggcgcgcttcgcggcagggggcgctggtcgccggcagcgcctgggcgggggaggccaggtggccgccgggggggtccagctccgtcgccgccgccgtccgcgcgccccccgggcgctccgcgtctctttgcggtcgtcccgccccttctccctccggccacccggggaattccaagctccctcagcagccagacccaggccttgcccggtacccgagcgcgaccgccaggtggccccg

SEQ ID NO: 18102 - DNA, 155 bp, Homo sapiens
  chr9:140197263-140197418
  binary
ggccctgacgtggggccttcagccacgcgggtccttcccgcgcgcgggcagcctcatggccgccggctcagcctatgtgtgccccaaccgtactgatgcgaggggcctccggccggccaccgcggcttctatcgcctggcggtgaagggggttcc

SEQ ID NO: 18103 - DNA, 97 bp, Homo sapiens; identical to SEQ ID NO: 6321
  chr9:19127135-19127232
  hyper

SEQ ID NO: 18104 - DNA, 569 bp, Homo sapiens; identical to SEQ ID NO: 14392
  chr9:27528536-27529105
  binary

SEQ ID NO: 18105 - DNA, 750 bp, Homo sapiens; identical to SEQ ID NO: 14393
  chr9:27529157-27529907
  binary

SEQ ID NO: 18106 - DNA, 242 bp, Homo sapiens; identical to SEQ ID NO: 14395
  chr9:37035886-37036128
  binary

SEQ ID NO: 18107 - DNA, 375 bp, Homo sapiens
  chr9:4297365-4297740
  hyper
cgtctctggggctcggtttcctcatcaggtgaagccagggtccactctagctttaatagtctctcctcgagattcccggccccatactaaagggacctggtccactggggggagctgcagaacttccctcttctcacaaactccagggccctggggccccaactctcgggagatgctgaagtcttggaggaagttggttctgccggctcggggagagggtgcaagagcaaccctctttgtgaaacggggccgcgactccacgagtcctgtctctacggaccctactccctgtgattccggaagcacctccctaccccttccccaggtttacatgctccagagatgagggccaagcggataccggggcaaactagc

SEQ ID NO: 18108 - DNA, 878 bp, Homo sapiens; identical to SEQ ID NO: 13082
  chr9:503936-504814
  binary

SEQ ID NO: 18109 - DNA, 207 bp, Homo sapiens
  chr9:66458086-66458293
  hyper
cgcagttgggaagcacggagacaaaagggggaaagaaggagggagcgggaagccaaaagcctacggtaccgctattaccaggcggaatcccatccaagtactaaccagtcccgaccctgcttagcttcaacagatcagaggcgagccgggcgcgttcagggtggtgtggcctagacgccagcagcggcgcctggctgccccaagagc

SEQ ID NO: 18110 - DNA, 96 bp, Homo sapiens; identical to SEQ ID NO: 10856
  chr9:80007524-80007620
  hypo

SEQ ID NO: 18111 - DNA, 92 bp, Homo sapiens
  chr9:88661274-88661366
  hypo
cgcacggagcagaaggtgcatgctctatcggaggttacatctcagcttaatccccgcctcccaggtgccgtgcaccctgcactgtggcacgc

SEQ ID NO: 18112 - DNA, 545 bp, Homo sapiens; identical to SEQ ID NO: 11987
  chr9:93955385-93955930
  binary

SEQ ID NO: 18113 - DNA, 268 bp, Homo sapiens; identical to SEQ ID NO: 5859
  chr9:93956177-93956445
  binary

SEQ ID NO: 18114 - DNA, 74 bp, Homo sapiens; identical to SEQ ID NO: 7625
  chrX:44922889-44922963
  hypo

SEQ ID NO: 18115 - DNA, 241 bp, Homo sapiens; identical to SEQ ID NO: 11995
  chrY:14533316-14533557
  hyper

SEQ ID NO: 18116 - DNA, 41 bp, Homo sapiens; identical to SEQ ID NO: 11996
  chrY:14533613-14533654
  hyper

SEQ ID NO: 18117 - DNA, 431 bp, Homo sapiens
  chrY:14776368-14776799
  hypo
cgttaaactttaaaaatatacaccataaacttctacatttttcttagtttgctgctttaatcactgccattttcgtctctgcaaatgcgcaattgtttaaaagtgtaaggatttgtttttcaattagaaaactcattgatatgcttttaactttctcgcttcacatgcttttaacttctcgcttcaaactttattcttacagtttgggaagaaagaaaacctaaagtatttgccgttggtgattcaagggtgagttgggagtattttttatttcactgacttgaaaataagattgtgggattttaattatttcttgttgccgttttctgttaacggtgattgcgtgaatgtttactcttgtcaatcttgtcttactgttacaatatttctttttgtcggttggctttagtaatatatatgactgtgggtcc

SEQ ID NO: 18118 - DNA, 461 bp, Homo sapiens
  chrY:15863654-15864115
  hyper
cgccctcgcatccgatcggcagccatggtgcccgaggtgcccggcgcggtcctgaccctctgcctctggctggaggcctcggagggctgcctggcggccggccccggagcagctgctgctcagctgctggacgagtcgctgtctgccgggagcgtcctgcgcgcccgctgcgcctccaggtgcctaagcttgccaatcatacgcatctctgccttcttccagcacttccaggttagtggagactcccgcccgccccgggttctttctggtgctgcggccgcggcgggagtgcacccgggcgcgagagtgcacccgggcgcgcgccgaccagcctaggcgcgaaaagttttcggccagcgcagcgagctgacctggcttctcctgggcgtggatcttacagtcggggtgcttaaatcgtgttttccagcctcctcccggctcccgatacgaaaaagaagccc

SEQ ID NO: 18119 - DNA, 74 bp, Homo sapiens; identical to SEQ ID NO: 7627
  chrY:16635744-16635818
  hyper

SEQ ID NO: 18120 - DNA, 1082 bp, Homo sapiens; identical to SEQ ID NO: 7628
  chrY:16636060-16637142
  binary

SEQ ID NO: 18121 - DNA, 208 bp, Homo sapiens
  chrY:21205113-21205321
  hypo
tcctcgcagcctccactggaacaatagtttcccttgttgaggctgctaccctggaagcgaggagaggcggggacgaaggaggagccgagtgtccatcttgcgcatctggcctcccgcatctaggcacatgtttaagatgcttacacagcaggtgccatgctaactgctggcagaaggaatcccgccttcttgcatgcaggcactcgcc

SEQ ID NO: 18122 - DNA, 326 bp, Homo sapiens
  chrY:21208492-21208818
  hypo
cgccttggagcagggggcggcgctcgttggggaggctcaggccgcgctggagcggggagtggggggaactcaggcatggcgggttgcaggtgtggagccctgccctggggtaggcaactaaggcctggcgataaatcaagcgcagcgcggatgggccagcgctgctggggtagccggcgcacactccgcagttgctggcctgggtgctaagctcctcactgcccggggctggcagggccagccgctcccagtgcgggccctccaagcccaagtccactcggaactctagctcgccggcaagcgccgcgcgcagcccgggttcccgc

SEQ ID NO: 18123 - DNA, 122 bp, Homo sapiens; identical to SEQ ID NO: 14407
  chrY:22918582-22918704
  hypo

SEQ ID NO: 18124 - DNA, 90 bp, Homo sapiens; identical to SEQ ID NO: 7629
  chrY:2655227-2655317
  hyper

SEQ ID NO: 18125 - DNA, 596 bp, Homo sapiens; identical to SEQ ID NO: 7630
  chrY:2655346-2655942
  hyper

SEQ ID NO: 18126 - DNA, 52 bp, Homo sapiens; identical to SEQ ID NO: 12001
  chrY:4869596-4869648
  hyper

SEQ ID NO: 18127 - DNA, 49 bp, Homo sapiens; identical to SEQ ID NO: 12002
  chrY:4869714-4869763
  hyper

SEQ ID NO: 18128 - DNA, 246 bp, Homo sapiens; identical to SEQ ID NO: 12003
  chrY:7140850-7141096
  hyper

SEQ ID NO: 18129 - DNA, 584 bp, Homo sapiens; identical to SEQ ID NO: 14413
  AC211344.3_7702-13588:3943-4527
  hyper

SEQ ID NO: 18130 - DNA, 185 bp, Homo sapiens; identical to SEQ ID NO: 7634
  chr1:101774910-101775095
  hyper

SEQ ID NO: 18131 - DNA, 306 bp, Homo sapiens; identical to SEQ ID NO: 5867
  chr1:108506290-108506596
  hyper

SEQ ID NO: 18132 - DNA, 113 bp, Homo sapiens; identical to SEQ ID NO: 12007
  chr1:109204221-109204334
  binary

SEQ ID NO: 18133 - DNA, 122 bp, Homo sapiens; identical to SEQ ID NO: 12008
  chr1:109656099-109656221
  hyper

SEQ ID NO: 18134 - DNA, 204 bp, Homo sapiens; identical to SEQ ID NO: 12009
  chr1:109656291-109656495
  hyper

SEQ ID NO: 18135 - DNA, 116 bp, Homo sapiens; identical to SEQ ID NO: 12010
  chr1:109657070-109657186
  hyper

SEQ ID NO: 18136 - DNA, 229 bp, Homo sapiens
  chr1:110170726-110170955
  hypo
cgtcctgcatgaaccagaagcatctgctgcgcttcatcaagcgggcaatgaagcggcacctggaggagatcgtgcacgtggagcagggccgtgaacagacgctgcgggaggtctttgagagcatgaatctcacggcctacgacctgagtgtggacacgctggatgtgcatgcggtctgtgccagtggcgtgggctgtgggactgagtcagtcaggggaccaggagtcac

SEQ ID NO: 18137 - DNA, 144 bp, Homo sapiens
  chr1:117918966-117919110
  hypo
cgcttattatgtaaccatgtcatgtgaggcgcattaggtgatcacccatgtgagtgtgtgcttggcttggagccactatggtctgtgaaaggtctaattaccctgctaacgtggtacaaaaggctcgcgccaaggctcgctcac

SEQ ID NO: 18138 - DNA, 189 bp, Homo sapiens
  chr1:1200473-1200662
  hypo
cgaaaactgggaagaaatgaagaagtcatcctcttcctgagacagagcccagcagccttggggcggctgagagaagatgggatccacgtggcccatagcgcaccccacaggccttttctgggaaagcagtcttctctcggggaagggagagacacctgccgaggacctgccaggggctctcgcactgac

SEQ ID NO: 18139 - DNA, 64 bp, Homo sapiens; identical to SEQ ID NO: 5719
  chr1:12123950-12124014
  binary

SEQ ID NO: 18140 - DNA, 517 bp, Homo sapiens; identical to SEQ ID NO: 7646
  chr1:12226892-12227409
  binary

SEQ ID NO: 18141 - DNA, 207 bp, Homo sapiens; identical to SEQ ID NO: 7647
  chr1:12227438-12227645
  binary

SEQ ID NO: 18142 - DNA, 167 bp, Homo sapiens
  chr1:15178306-15178473
  hypo
cgccttctcatagcagtcatcacactgtgtagcgatcgctccactaaccacccctgcaactgcaggtcactgggggagggacctagtccagctcacccggaatcctcagggcctagacatggagacccaggtcctccggaagagtttgtgagaggaatgagaaatgc

SEQ ID NO: 18143 - DNA, 245 bp, Homo sapiens; identical to SEQ ID NO: 12021
  chr1:154474305-154474550
  binary

SEQ ID NO: 18144 - DNA, 674 bp, Homo sapiens; identical to SEQ ID NO: 17187
  chr1:154971706-154972380
  hyper

SEQ ID NO: 18145 - DNA, 73 bp, Homo sapiens
  chr1:165711421-165711494
  hypo
cgaacggcaatatgttcagaaactgaataatgccctaaaataaagaattgttcagccagagaccttaattatc

SEQ ID NO: 18146 - DNA, 39 bp, Homo sapiens
  chr1:169096476-169096515
  hypo
cgaaagaacgaggagactttaatcatgaacgaggagagc

SEQ ID NO: 18147 - DNA, 181 bp, Homo sapiens; identical to SEQ ID NO: 15336
  chr1:171570080-171570261
  hypo

SEQ ID NO: 18148 - DNA, 153 bp, Homo sapiens; identical to SEQ ID NO: 6672
  chr1:175375048-175375201
  hypo

SEQ ID NO: 18149 - DNA, 111 bp, Homo sapiens
  chr1:175957595-175957706
  hypo
cgaaactcatcactactaattagaggcaatgcagtttgctggttaagaatgcaggctctggagccagactgagttagcacgttcatctgtcggccaggcgtggtggctcac

SEQ ID NO: 18150 - DNA, 132 bp, Homo sapiens
  chr1:19436878-19437010
  hypo
cgtaaccggagctcccagcagctgtcctccttggagatagaatccgtcagcagcagcatttcatactgcaggctacttgcctagaaggcaatgggaagagacatgagtcaagagggtcagctccggtccagc

SEQ ID NO: 18151 - DNA, 110 bp, Homo sapiens
  chr1:19767182-19767292
  hypo
cgtgcacccaacgctactgacttactccagttcatcctgaagacagactattacagtaaaagccatgttttaaaaaagttatagctgctaggccgggcgcggtggctcac

SEQ ID NO: 18152 - DNA, 294 bp, Homo sapiens
  chr1:199998439-199998733
  hyper
gttgagctgggtcgggagaccacgcacgccgatccctcacagtctcccccacaccccatgggtgaattaaagagggtaaggtaggggaaagagacgctgttgcacttttctctgcaaccctggaagaactgtgtttccagctaccgcacgcgcaactcacatcgcaagggaccgaggcggtacactctgagcgtaaacagagaacacctgcagctctggaatcggtcccaccgcagagggctgggaaccggaggactgtcggtccagcccataaggggctgctggggactaaac

SEQ ID NO: 18153 - DNA, 218 bp, Homo sapiens
  chr1:200008298-200008516
  hyper
cggagaggaggggagagagaagggaggcgagagaaagaggagagagacccctgccgatcctgagccagagggcggtggagggaggggaaggagtcgcccgagccgtccgggagcagtggcagcggcacagccggggcggcaatagcagccccgcggtcgcctccgctgcccgccgggagctcggcggttcacggctccgcgccccgggcagctgcgtc

SEQ ID NO: 18154 - DNA, 355 bp, Homo sapiens
  chr1:200008691-200009046
  hyper
acgctccggcgaggcgagagggttgggttagcaggcatcccggtcgccccttccttcttttcgccggagttgaatctgtgctgcccgtgtccaggtgctgggcttccggaccgacacggatcccccatccccgcccgcggtcgccttgtcatgctgcccaaagtggagacggaagccctgggactggctcgatcgcatggggaacagggccagatgccggaaaacatgcaaggtaaggaggcgccgcgcggcgctccggctcccgctgcttccccacccccgggctcgccctgcaggcttcagcctcccgccccgcgcgggcgcgggagtagccccgctgggcgctcgcagccgc

SEQ ID NO: 18155 - DNA, 207 bp, Homo sapiens
  chr1:201368376-201368583
  hyper
cggctccctccggcgctcacctggacagcgcggaccagtccttcctgctgacagccatgctgcaggagccccgcgtggccgcccgcgccccgccggccgccgcctcacctggcgcccctccccttccagcccaggtgggatcacatggccgcttatctcacccccgcgcgccccggccgcgctccgatttgccgacccgggaatggc

SEQ ID NO: 18156 - DNA, 122 bp, Homo sapiens
  chr1:201368727-201368849
  hyper
ctgcccggggcgagggcgggagacttcctgctcagaaccagtccgaccagcttggcgctgggacgcctccccgcgctgtgccgcggcccggggtgccgaggagctgggctgggggcggggac

SEQ ID NO: 18157 - DNA, 44 bp, Homo sapiens
  chr1:202009839-202009883
  hypo
cgtaaaccaccgcgcccgaccttctttcacttttttcacacttc

SEQ ID NO: 18158 - DNA, 549 bp, Homo sapiens
  chr1:2025644-2026193
  hypo
cgggagctggaagggacgtggttccagtcctgctgtgccaagcctggtgacccgagggtaccctcggcctcccggcctgaactcttctcctaccatgatggtgcctgggatgctgtgtggtgcccgtgggcagtggcggaggcagtggccccggctcgttgaaccttgggcactgcccattctgaggcgcccgctgtgcccggctcgttgaaccttgggcgctgcccgttctgaggcacccgctgtgcccggctcgttgaaccttgggcgctgcccgttctgaggcgccctctgtgcccggctcgttgaaccttgggcgctgcccgttctgaggcgccctctgtgcccggctcgatgaaccttgggcgctgcccgttctgaggcgcccgctgtgcccggctcgatgaaccttgggcgctgcccgttctgaggcgcccgctgtgcccggctcgttgaaccttgggcgctgcccgttctgaggcgcccgctgtgcccggctcgttgaaccttgggcgctgcccgttctgaggcgcccgctgtgcccggctc

SEQ ID NO: 18159 - DNA, 456 bp, Homo sapiens
  chr1:213030005-213030461
  hypo
cggtgtctggcacataccattcaatacaagtttggtacctggaacccactgaatatgcatgtccagtaactattaactacatgtgttggtgcaagggagaaggtcgagcaaccggatctgctccatcatagcccgtctcagtcgcttcattcaagtcagcggggtgaggttgaggggattccaacttcacaagggcagatttctcatggactctctttctctggttgtactggaacactttctggcgttattcctctgctgggacagcatgaacttatgaaacgtggtcctgtctgccctaaagccagggtctcaccgacaaggacagcgatgctggggcgagaaataaagttcgtcctgggcctgcgtacggtacagcgcccttgggaagcccttgtggagttaagggtgatgcccacttctttgtctccctcattctgtttcggtggctctctc

SEQ ID NO: 18160 - DNA, 198 bp, Homo sapiens; identical to SEQ ID NO: 7686
  chr1:220700617-220700815
  hyper

SEQ ID NO: 18161 - DNA, 234 bp, Homo sapiens
  chr1:224345162-224345396
  hypo
cgtgactgttctcaggcgtgaaatttctgagcttcgcaccaaagtgcaagaacagcaaaaacagcttcaagaccaggaccagaaactgctagagcagacccagatcataggtgaacaaaatgcacggttggcagagctagaacgcaaactacgagaagtaatggaaagtgctgtaggaaattcctcagggtccgggcagaatgaggagtctcctcggaaacgaaaaaaggccac

SEQ ID NO: 18162 - DNA, 380 bp, Homo sapiens
  chr1:225597858-225598238
  hypo
cgtcctcctctcaagcagccttggaggcaggccatgctcccctcactttgtgtgcaagaagccgaggctctgacaggtcactcacccactcaaagccatctgactccaaggcctcggctcttaaaattaattacctcattccagagagcatccaccacatagagaagctggaaactattaactaaaatcatggccaaggatggaacagcgcggtcctgtattttcatttcagccaaaagcatcaccaagttaataaccacctgaaacaaaaggggaaagtatatagcctcaaagcacctccccagagaccttagcactacaaaggcatgagtgagcttcacagctgagacacctggcagacgccaccgtaactcctaccc

SEQ ID NO: 18163 - DNA, 917 bp, Homo sapiens
  chr1:226925659-226926576
  binary
cgaggtccaagtccttggctcctaagtatgctgtgtgcggggcgcggctgactcagctctcccgggctgaggacaccccagccaccgtctccgggtctccccagcctgagcaaacattggctatccagggcaacccggcagccctcgccctgggcttcagggtctccctgctccaccctctcggggcatcagagaccgaccggctcggagggaacctaagcgggacctgccttgcccgagccgctgccagcgcccggatctgggagggcgcccgcgtgcccgccgtttaccttcctgaccctagccttggggctgtgtctctcggcctacgaaggcctgggcgggcagcggggccgcagccgaagcatttttcagggctagccttgtcgcctatccctagacaagtgttttgtgagtgtgggcgcaccgaggttctacacgttctctttaccggaaccagtacttgctgcccccctgccgtcgtcccctatgggggggtgtctgtgagtgtgtgtgtatacacgcgtgtgtgtatacgccgcacgcgcgcggagcgagtccgctctcagcgcgccctgttgccgaggacgcgactgcccctgcgggctcccggacccgcgcccactcggaggaacttaggggcgtgcatggctgcagccgggcagcagccctaggtgcacagagcctctagctctgcaaacctcccaggagccggcgctctaacaccccagggcagcgccgcggagcgcagggcttctccgcatcccgggcagcctcgcccggcgccagcagagccgccccgagaccccagcctggggactcctggagcgcgctgagggaggcggcgcggagtgagcggcccggaaggcgggtaggagaaatgcggagacctcgtctctccctattttctccccacc

SEQ ID NO: 18164 - DNA, 273 bp, Homo sapiens; identical to SEQ ID NO: 15353
  chr1:230256241-230256514
  hypo

SEQ ID NO: 18165 - DNA, 262 bp, Homo sapiens; identical to SEQ ID NO: 15354
  chr1:230266303-230266565
  hypo

SEQ ID NO: 18166 - DNA, 588 bp, Homo sapiens; identical to SEQ ID NO: 7699
  chr1:231175062-231175650
  binary

SEQ ID NO: 18167 - DNA, 709 bp, Homo sapiens; identical to SEQ ID NO: 7700
  chr1:231175692-231176401
  binary

SEQ ID NO: 18168 - DNA, 32 bp, Homo sapiens
  chr1:235872558-235872590
  hypo
gttgacgtgattaacccgttcaccattctgac

SEQ ID NO: 18169 - DNA, 156 bp, Homo sapiens
  chr1:24434944-24435100
  hypo
cggggaccctgtggctcccacctgctgcggaaggtccgcctccgcacagaggagcccatgcgcaggctgtgctgccgctcctccttctgctcctcctcctgccggtgctccagcctgtgaacctccatggcctgggggggccgggggtcccccgca

SEQ ID NO: 18170 - DNA, 38 bp, Homo sapiens
  chr1:24435146-24435184
  hypo
gtgaaggccaaggtccacggtcattccaccaggtgccc

SEQ ID NO: 18171 - DNA, 209 bp, Homo sapiens
  chr1:247348636-247348845
  hypo
cgggatacaagggtacactgtggtcctgcaggaattcacccaccaattcatcttcagaagctactcccaaaggcttggagactgcctcagaggctggggctcggaggcggggcaggggtcaggcgtcaggccttagtgccttctgctggggtcggcgggtgttttctctttttactgtatttaactacattaatcgtgctcagtatttc

SEQ ID NO: 18172 - DNA, 33 bp, Homo sapiens; identical to SEQ ID NO: 6699
  chr1:25255579-25255612
  binary

SEQ ID NO: 18173 - DNA, 211 bp, Homo sapiens
  chr1:26087011-26087222
  hypo
cgcccgcaccctccaggggagctaatttggcctgcttcactgctcaccaccaggacagtcgagagtaacgcaggtacaagcacattcctgtccccgtaatggacttcgttaacataaatggatatgaaatctgacgtggcaaagccaagtgctgtcacctggaaaggaaggtctgcctgcagaaaggtggctctcccgcactcccggcccc

SEQ ID NO: 18174 - DNA, 261 bp, Homo sapiens
  chr1:27875550-27875811
  hypo
cggtaggcggtggggcatagccggcgctgtgggcgctgctgggtgaggcagggaggctgttgccactgccataggcgaagctgcagtccttgctgttagcgcagtcctggcctgtaaagggcttagttggggcgaatacgctttgtccggccccatagccgccgtactggggcaggtaggtgttggcaggcgggtgggtggtaggtgagcgggccatggctgagggcgggggcaccagcttggggaaggtctcggctgccc

SEQ ID NO: 18175 - DNA, 238 bp, Homo sapiens; identical to SEQ ID NO: 16222
  chr1:27875852-27876090
  hypo

SEQ ID NO: 18176 - DNA, 111 bp, Homo sapiens; identical to SEQ ID NO: 16223
  chr1:27876333-27876444
  hypo

SEQ ID NO: 18177 - DNA, 135 bp, Homo sapiens; identical to SEQ ID NO: 17215
  chr1:28198925-28199060
  hyper

SEQ ID NO: 18178 - DNA, 300 bp, Homo sapiens; identical to SEQ ID NO: 12077
  chr1:32930159-32930459
  hyper

SEQ ID NO: 18179 - DNA, 62 bp, Homo sapiens; identical to SEQ ID NO: 12078
  chr1:32930558-32930620
  hyper

SEQ ID NO: 18180 - DNA, 63 bp, Homo sapiens
  chr1:39043982-39044045
  binary
cggagatggaaggagccgaagggaccagagagagcgtggacgggaggaagacagacacgaaga

SEQ ID NO: 18181 - DNA, 66 bp, Homo sapiens
  chr1:39044466-39044532
  binary
gagcaaaagacagatcagcagaagcaaggcaggtggggcgggagcgggagcgtggacatccggcac

SEQ ID NO: 18182 - DNA, 237 bp, Homo sapiens; identical to SEQ ID NO: 7725
  chr1:41268046-41268283
  hyper

SEQ ID NO: 18183 - DNA, 166 bp, Homo sapiens
  chr1:43310153-43310319
  hypo
cggtggttattataaggaattggctcacgtgattatggaggcggttaaatcccaagatctgcaggataagtcagcaagatggagtcccatgagagctgatggtttagttccagtctgatggcagcaggcttgacgccaaggaagagatgatgtttaattcaagtcc

SEQ ID NO: 18184 - DNA, 1865 bp, Homo sapiens; identical to SEQ ID NO: 15385
  chr1:46767970-46769835
  hyper

SEQ ID NO: 18185 - DNA, 428 bp, Homo sapiens
  chr1:48459812-48460240
  hypo
cgagcacgggcacaccacggaagcgcacgtccctctctgtgagcgagtttaccatgagcatcacccagacgggcctcttgcgctcccagttgcccgcgatggcattgaataggtagtcagcatagagccccttgccccgctgagcgggcgtcatccaggagggcatcatcaacttcacgtagtccaggtggcgcttcaagcgccagtaaagctcgtggggcagcacgtcctgcaggttttccccgtgcggcagcagctggcagctggccagggccgagatggtgtaggggtctgtaaggtccagctcaaagtagacacgggtgctagcctggaaggctgccttggagttgtccgggatgaagtcccagacgcgggtgtaggggacgtgaatagtgccaaacaggtaggccggaggatcacgccgaatc

SEQ ID NO: 18186 - DNA, 32 bp, Homo sapiens
  chr1:54694462-54694494
  hypo
cgcccatcggaccgtccgagccgggacccatc

SEQ ID NO: 18187 - DNA, 148 bp, Homo sapiens; identical to SEQ ID NO: 15389
  chr1:55066953-55067101
  hypo

SEQ ID NO: 18188 - DNA, 33 bp, Homo sapiens
  chr1:6284796-6284829
  hypo
cgagtcctggttatcctttacttacactctggc

SEQ ID NO: 18189 - DNA, 280 bp, Homo sapiens
  chr1:6284858-6285138
  hypo
ctccccaggtaactctggagggcgctgtggaatattgctgtgatttgccccttactcgtctttcacccatgttccgccttgattcggcataaggacagactgctccagtggggccttgggtcctcaggccttctgaccgcttggtcttgagtgacattccagaagagtgactaatgacataaaacgattaagaaaatccatgtggcagcggccaaccggaaacagttttgtcccaggctgcacagggtcggaggccccaaggtcaccggggccactgccc

SEQ ID NO: 18190 - DNA, 362 bp, Homo sapiens; identical to SEQ ID NO: 16233
  chr1:6333795-6334157
  hypo

SEQ ID NO: 18191 - DNA, 304 bp, Homo sapiens; identical to SEQ ID NO: 15392
  chr1:6345513-6345817
  hypo

SEQ ID NO: 18192 - DNA, 220 bp, Homo sapiens; identical to SEQ ID NO: 7736
  chr1:6479997-6480217
  hyper

SEQ ID NO: 18193 - DNA, 54 bp, Homo sapiens; identical to SEQ ID NO: 7737
  chr1:6507073-6507127
  hyper

SEQ ID NO: 18194 - DNA, 318 bp, Homo sapiens
  chr1:6711983-6712301
  hypo
cggcgcagccccccgccacctgcagagcaccgactgcggtccggtgtgccccccacccccgcatgcactgccgactccttttcattttcatcctgcgccaaatgtctcccaggtcactggggcggtcctcaggagcctgatgttaaagcccagccgcggttccacacccgcacagccttggaagtcacagctgagcctggctgccgtgtttactagtctgggtgactttcaagcaactcttcaatgttaatttgatgcagctcaatttgctcggcagaactggctgttaaatggccaccaatcagtgaaccatcacgc

SEQ ID NO: 18195 - DNA, 107 bp, Homo sapiens; identical to SEQ ID NO: 15395
  chr1:6713808-6713915
  hypo

SEQ ID NO: 18196 - DNA, 308 bp, Homo sapiens; identical to SEQ ID NO: 15396
  chr1:6714041-6714349
  hypo

SEQ ID NO: 18197 - DNA, 105 bp, Homo sapiens
  chr1:6738127-6738232
  hypo
cgtctcccatcaaccccctgctccgcttgctcccgccccacacctgggttaaaaattactggttcggtccatccctcttccgttttacttgacaggttagggaac

SEQ ID NO: 18198 - DNA, 115 bp, Homo sapiens
  chr1:6750362-6750477
  hypo
cggcattcatttgacagtcgcatatccactgctatgtcaagcatttccatgcactcccacttcattcccacaaaagctctacgacagtaaaactgtctggattttctggatgaac

SEQ ID NO: 18199 - DNA, 536 bp, Homo sapiens
  chr1:85462747-85463283
  binary
cgtggagtgcggcgggcagttctcgggcggctgaaaggcggctctgtgtgcaccctgcaggatgcggcgcgtggccaggcgctcccgccccgcccccaaggggctgccccgccccgccccgccccgccgcctcctaccggggaccggagcttccccagttggggtcctaggggacttattccacgcttcagcggaccagcctccccgcgctcccggagaagggggtcggcgacgcggaggcggggtgggggccgtaggggatggaaccgaggcgcgcgcgagaagagccgaggaagtaagcagtcccaaaagggggcggcggtggggcccccagggaggcgtggggcacgccaagggcgccgtggggcactgacctgtggtgcggcccccaggacaggcccgaggcgcggttgcacaccggcaggtccagcacctccatgcctcgaggcatggcgcggccagggagcggcaggaggacacctagcgtgggacggctacacctgtctgggcgcaggcccgccgcccttgcactctcc

SEQ ID NO: 18200 - DNA, 61 bp, Homo sapiens; identical to SEQ ID NO: 7744
  chr1:91185065-91185126
  hyper

SEQ ID NO: 18201 - DNA, 171 bp, Homo sapiens; identical to SEQ ID NO: 7745
  chr1:92948154-92948325
  hyper

SEQ ID NO: 18202 - DNA, 226 bp, Homo sapiens; identical to SEQ ID NO: 5891
  chr1:92949466-92949692
  hyper

SEQ ID NO: 18203 - DNA, 228 bp, Homo sapiens; identical to SEQ ID NO: 5892
  chr1:92950207-92950435
  hyper

SEQ ID NO: 18204 - DNA, 426 bp, Homo sapiens; identical to SEQ ID NO: 8928
  chr1:9711649-9712075
  binary

SEQ ID NO: 18205 - DNA, 73 bp, Homo sapiens; identical to SEQ ID NO: 16238
  chr10:102475189-102475262
  hyper

SEQ ID NO: 18206 - DNA, 116 bp, Homo sapiens
  chr10:102501611-102501727
  hyper
cgcgctgtggggagcatttcctggggagatgcatttaatttcggaatttctaatcccctccctcagaccccggtcctagctcccctagccgctccccgggaagtggaaggaggaag

SEQ ID NO: 18207 - DNA, 258 bp, Homo sapiens; identical to SEQ ID NO: 15401
  chr10:102585797-102586055
  hyper

SEQ ID NO: 18208 - DNA, 110 bp, Homo sapiens; identical to SEQ ID NO: 15402
  chr10:102587493-102587603
  hyper

SEQ ID NO: 18209 - DNA, 164 bp, Homo sapiens; identical to SEQ ID NO: 8929
  chr10:102587906-102588070
  hyper

SEQ ID NO: 18210 - DNA, 78 bp, Homo sapiens; identical to SEQ ID NO: 8930
  chr10:102588175-102588253
  hyper

SEQ ID NO: 18211 - DNA, 161 bp, Homo sapiens
  chr10:102588941-102589102
  hyper
ctgtaattccgtgttttcgctttttcctccctgcccctctctccctctgcccctctctcctctccgcttctctccccctctgtctctgtctctctccgtctctgtcgctcttgtctgtctgtctctgctctttcctcggcctctctccccagacctggccc

SEQ ID NO: 18212 - DNA, 141 bp, Homo sapiens
  chr10:103372842-103372983
  hypo
cggggctagcacgcctccgtgatcacagcccccagcctgtggggctccagcctgctccccccaccctcaccccacccgggggccgagagcagattactgagaacaatttctttgtgactgtgtaattccctccgtgaccgc

SEQ ID NO: 18213 - DNA, 207 bp, Homo sapiens
  chr10:104001004-104001211
  hyper
ccaggtctcgttttagggattccaaggtccagcaatagctcctcggccccatgagcccctgtccttagaatggtcaaacactcacagtgcgtcctgcaacaggcagactcccagtagcggcggctgcggcggcgatctagagggcaggcaggggccaggggccgggcacccggccggagtgggggccgcccccctgctcccgggccg

SEQ ID NO: 18214 - DNA, 579 bp, Homo sapiens
  chr10:105253250-105253829
  hyper
cgcatccggggagctcggcgttctcgcggccctgctccccttgttttcaagtgcaagttccatgtttccgtgctgggaataaggccagccccgggtgccaccatactcgcctgatgtcttaccccgacccgcgccgccgagagcttgcggctacgggaacgcggcgcgccccggggccacatctggcctagcgggcgcgcgcgtgtcactaagacgctcattcaccggcgcagctgtcaccataacaaccggagcgagggaatcctggagactgccggggcggggggcgggggcggcggtcgcaggagggacccggcgcgggcgggaccgcggcggtcgggggacaccagctgcgtcggagcgcccagaacgccccgcgctccgccgagccccgctccacgcagacccgcgggcgggagggagccacgcacatcgccgccgcggccgtctccgcggggcggtaaccgagcctgcctcggagccgccgaacgcccacgccagcgaccctgactctatggccccgggggagcgcgccggagccgccgcgccgcccacccccagccggaaccctagcgtccc

SEQ ID NO: 18215 - DNA, 574 bp, Homo sapiens
  chr10:105253853-105254427
  hyper
cgtccccggccccggcccagggccctgcttgtggcccccgctcccgccacggggcatgggaggcaggtagcccagcctgcgccaggacacccgtggcgggcggaacccgccaaggaccgcgaagtccagagaaaggaagctgaggagctgcccgcccgcccccggctgcagccccagcagggccctcccccggtggcgcgcacccgcgcgcgcacactcgcacaccgcacctcagcgcctgcccggcctcgcccccacccgcgagcgccgaacctcctggggccggatgccatgggtaacaacttctccagtatcccctcgctgccccgaggaaacccgagccgcgcgccgcggggccacccccagaacctcaaaggtaggctccccggccgagcgctgctggaggactggggcgcaggtggagggccagggaggtgtggttggggagggcgggcagacgccacctgttgtgcgtgtctggaggccggagatgcacctctggccgtggagtgggctgggggtggagggcagccggcgatgatggtgatggaggatggcgtcccgcggggtctgc

SEQ ID NO: 18216 - DNA, 240 bp, Homo sapiens; identical to SEQ ID NO: 6731
  chr10:118891774-118892014
  hyper

SEQ ID NO: 18217 - DNA, 69 bp, Homo sapiens; identical to SEQ ID NO: 15408
  chr10:119494306-119494375
  hyper

SEQ ID NO: 18218 - DNA, 261 bp, Homo sapiens
  chr10:126767714-126767975
  hypo
cgaggaaaaaaaaaaaaaaaaaaaaaaggtggaaaaaccagcccctgatgggccaccaggagctttcgggagcctgcccgggatatcacccggctccaccatgtgtgacgctcctgctctaaagtacacggaggacacagggcacagcgcctttcacagccactggctcacatgccagtccacggttcccagcggtggcggcattcctctccagggaggaaaatgctacagaatattcaccaccggtcaattcatctgccc

SEQ ID NO: 18219 - DNA, 549 bp, Homo sapiens
  chr10:126771776-126772325
  hypo
cgtaagaccaccagggccagcacgcattctcaacatactttccaaagctggaaaaaagcacagccaagtcactcagaaaagcctctcttgatttggcttctggataaaaaagagtctccctgtcgtgccagatggggtcaactactcggtgaaaacagaggcccattccacaggcaccactgctgagcctctgagttcccaggacagggctgtccgaggacacaacactgacagccatgtgcagacccccgacctgggcgaggataccgccctctgagactcagtcgcctgtctacaaaaaaggaaaagataccacattaccgtgaccatctagtctaatgaaaatgccaccaggatcaaagaccataacgcaaagccctctgtttgcaccttagtccgaacaagcacccaggatacactcgctgttgtttgtttgtttgttttaaggcaggatctcactctgcctcccaggctggagtgcagtcttgacctcctggactccagccgtcctgccacgtcagcttctcaagtagctgtgactgtaggcac

SEQ ID NO: 18220 - DNA, 514 bp, Homo sapiens
  chr10:135120335-135120849
  hypo
cgtatctcttctagaaatagaagcacagatgcccgcacgtcatgagtgttcatcccatgaggagcctgctgctctccctgaatgtggggaccgggcctccaagagggcagcccgtactcgcacagagtccctccccccagaagacctttggaaaagtcctagggcaactctggggtgtcacggtcatggaagggtgctctcgctacttagagggcaagggcgggggatgctaatcatcaacagagctgtcccgccagaaatgcacagcgtcccactgaaaacacagctctgaggaacatctagccgtggctgcttcttggaggaacgtctagccatggccgctgacttggccttcttgatgctcctgaattcttactattaatcacacaaactgacaggcccagcaactgtgactgggagggactgacgtcctcctcacagaggctgtgagctaccgcagggacgcgtgctgagggaagcaatgcacgcatgtcacactccaccacggacaagc

SEQ ID NO: 18221 - DNA, 60 bp, Homo sapiens
  chr10:13711305-13711365
  hypo
cgcactctggcctcccaaagtgctgggattttgcagcgaaaggcgtgggccaccacgccc

SEQ ID NO: 18222 - DNA, 411 bp, Homo sapiens
  chr10:14816098-14816509
  hypo
cggctttaacacacttcttcgcactagtgagaacgcccgcaatgccttattcagtaaggttaaatgagtttgtttgctgaaacattcgccacatgatcccaacgctcctccagctccatcccgtctataatcgcagagcgaacactcactcaccttgggcgtgtcaataattgatggtctggggatggaagcgtgaaacaccactgcttcacagtccgccccatcatccagggacccgggcacatcttcaggcgtctccgcgggctgggccgcagtgcggtgacttgaattccgattcgcactgccatttctctctgcatgggtgctcgaatcttgccttttctctggagctccttctgcgcttgggtgtcttggctgtctgcctgctttggccacaggctgcacacggac

SEQ ID NO: 18223 - DNA, 105 bp, Homo sapiens
  chr10:31134746-31134851
  hypo
cgcatctgtcccaggcgagctaactcgtctttggttaccacagggacaggagcaatcacgtggaagagtcacgtaagagcgcgtgaagggcacgggaacaccctc

SEQ ID NO: 18224 - DNA, 162 bp, Homo sapiens; identical to SEQ ID NO: 10178
  chr10:3160827-3160989
  hypo

SEQ ID NO: 18225 - DNA, 125 bp, Homo sapiens; identical to SEQ ID NO: 10180
  chr10:3161171-3161296
  hypo

SEQ ID NO: 18226 - DNA, 68 bp, Homo sapiens
  chr10:35043989-35044057
  hypo
cgacattttcaatgaggcaaaggatgactgacagcttcaagaagaattgctgggccgaggctgggcgc

SEQ ID NO: 18227 - DNA, 479 bp, Homo sapiens
  chr10:425893-426372
  hypo
cgtgcagaagaggatgtccctagaagatggttaacacgcagaagaggctgtccctggatgatggttaacgcacagaagaggctgtccctggaagatggttaacacgcagaagaggctgtccctggaagacggttaaagcgcagaagaggctgtccctggaagatggttaacgtgcagaagaggctgtccctggatgatggttaacgcacagaagaggctgtccctggaaaatggttaacgtgcagaagaggctctccctggatgatggttaagacgaagaagaggctgtccctggaagatggttaacgtgcagaagaggctgtccctggatgatggttaacacgcagaagaggctgtccctggaagatggttaacgtgcagaagaggctgtccctggaagatggttaacgcgcagaagaggctgtccctggatgatggttaatgcgcagaagaggctgtccctggatgatgtttaacac

SEQ ID NO: 18228 - DNA, 217 bp, Homo sapiens; identical to SEQ ID NO: 15448
  chr10:44163386-44163603
  hypo

SEQ ID NO: 18229 - DNA, 74 bp, Homo sapiens
  chr10:44163716-44163790
  hypo
cggctcactgcagcctccgcacctccgactccagcgatcagattcgcctgggttgtccagctttcaagtccacc

SEQ ID NO: 18230 - DNA, 238 bp, Homo sapiens; identical to SEQ ID NO: 15453
  chr10:73514960-73515198
  hypo

SEQ ID NO: 18231 - DNA, 499 bp, Homo sapiens
  chr10:79601557-79602056
  hypo
cggacaccacgcactctgcagcccctcttcccgggatgctgtaggagaggctgaaagccagccaccggcccacccacctacctgccgcagcgcctccatctcctcattggccgccttcttctcagatgtgctgctcttgagcttggactcggccagctccacttcggtctgcagcttgtccagctcagagatgacctggtcacgctcactcatgatgagcttgtactcgctgtacacagcgtcccgctcctccctgtatttctccgactcctttgctgtcttcacctgcgtggttctcagctcggtcagctctgactgcagcagctccatctcccactgcaggtccttgttctgcgccgtggccttgttcagctcatggtggatcgcctcaaacctggcaagagaggtggcgagatgtgggaagggcgggggccctgcccggtcagtggccggctgcgctgctgcctcccgccagctctactgtgctggacagtcaagc

SEQ ID NO: 18232 - DNA, 57 bp, Homo sapiens; identical to SEQ ID NO: 7798
  chr10:93647662-93647719
  binary

SEQ ID NO: 18233 - DNA, 644 bp, Homo sapiens; identical to SEQ ID NO: 10194
  chr10:94450726-94451370
  hyper

SEQ ID NO: 18234 - DNA, 231 bp, Homo sapiens; identical to SEQ ID NO: 7799
  chr10:98272415-98272646
  hyper

SEQ ID NO: 18235 - DNA, 715 bp, Homo sapiens; identical to SEQ ID NO: 12162
  chr10:98272768-98273483
  hyper

SEQ ID NO: 18236 - DNA, 70 bp, Homo sapiens
  chr11:107931221-107931291
  hypo
cgaaatttgagcgaggtagaaataattatgcaaattgaataccactaaaagaagaatctggctggatgcc

SEQ ID NO: 18237 - DNA, 121 bp, Homo sapiens
  chr11:116821500-116821621
  hypo
cgttcttggctgcagtagcctggacgggaatttccaccttgctgaccagactttgtttcttaccgaatttgcacagatgttcttgaataatgttccttcattttctgcttactcttaggac

SEQ ID NO: 18238 - DNA, 257 bp, Homo sapiens
  chr11:119290824-119291081
  hypo
cgtgtaggtgccctcgtccttgctagtgaaggcggataagtagaggaccttcatgttgtatttgctggtgaagttggttcgggagcggtatgtgtgctcaggcacccccacagtgccaaagagcacgtgcttctttgtctcacgggtcaggctgaactcgtactggatgggtgaactgctggtattctcatggcggcagtccagacgaaggctctggtccactaggcaggccgttaggctggtcaccttctgccctc

SEQ ID NO: 18239 - DNA, 88 bp, Homo sapiens
  chr11:119293218-119293306
  hyper
cggcgggcctcatccttaatccatttccgtattccaatcctctcctttcccaaatgagtcccccttccccctctctcatccttttcca

SEQ ID NO: 18240 - DNA, 62 bp, Homo sapiens
  chr11:119294072-119294134
  hyper
accctgtggctggcaggcctggccagggacgggagggttcgggaccccggggatcagggtgc

SEQ ID NO: 18241 - DNA, 706 bp, Homo sapiens; identical to SEQ ID NO: 16287
  chr11:1535842-1536548
  hypo

SEQ ID NO: 18242 - DNA, 95 bp, Homo sapiens; identical to SEQ ID NO: 16288
  chr11:1536583-1536678
  hypo

SEQ ID NO: 18243 - DNA, 47 bp, Homo sapiens
  chr11:1919487-1919534
  hypo
cgagtctcgctccgtcggctggagtgcagcggcgccagccatgtctc

SEQ ID NO: 18244 - DNA, 158 bp, Homo sapiens; identical to SEQ ID NO: 12174
  chr11:2466019-2466177
  hyper

SEQ ID NO: 18245 - DNA, 251 bp, Homo sapiens; identical to SEQ ID NO: 12175
  chr11:2466191-2466442
  hyper

SEQ ID NO: 18246 - DNA, 130 bp, Homo sapiens
  chr11:3035029-3035159
  hypo
cggagattgcgctactgcactccagctgtggaaagaagagtttttgttcgctgagagctgctcacactcctatatccataactgaataatagctcagcggccacgacacagggcagggactggcatgggc

SEQ ID NO: 18247 - DNA, 302 bp, Homo sapiens; identical to SEQ ID NO: 15470
  chr11:30445742-30446044
  hypo

SEQ ID NO: 18248 - DNA, 805 bp, Homo sapiens
  chr11:33397688-33398493
  binary
cgcggcccgggaacccgagccggagccggggctggaacccgaagcccagcgaggagcgaggagcgaggagccaggacagcggggcgccgaggctgcagcggcggcgggagggagggacccgagcgcgccccgcggccgccacccccgttcccggcagcctcgccccctagttctgcaggagccggcccgggggagggggccccgggcggcgcccgtcccaccctcgccgccccaatcgcgccggcgcgcggcgacaggcaccgtgggaaccccggcccgcacccgccgcggctccatgcgggcccggcccctgcgcgggtgaagccgcggctccctggagcccgccccgggcgcggcaggacgagcgagccagtcgcgccgctcggcgccccctccctccggcgcccgggccgtggccggcgatgcccggtgaggaccggggcgccgagggctgggctccccggcgcggtgcagagcgaggcagcggcctggatgtgtgaagcgtccccatggctccgcaggaggccaagcctcagggctcaagggaagctgggcccgcgacgcgggggcgcgggggccggcccgtggcgcgtgggcttggtcgggctgcctggggagccgcgcgctgcacgggtgtgaggggccccggggccggcgcgtcccacgatgcgcccccgcggccaccgacgctgctgctgggacttctgctgctggcggccctcctggagcacggccaggccgacccgggtaagcgctcggcggcggggcgtccgcggaggtttctggaggagcggggcggcgggac

SEQ ID NO: 18249 - DNA, 324 bp, Homo sapiens
  chr11:33890633-33890957
  binary
gagcgtcccagtagcctggagtggcccgcagaggcgccgggccgacccctgtccctgccgcccgccgcccagtccctctcccagagcccccggaatcacccgggaggaaggaggagcccagcgctcggcacagggggccaagggcacgccgcgagcgcgcacctggagccccctcgcgggccgcccgggtccccccgacgctccgggacgcgaggccgtggacaccgggggtggcaggggcaggggggccgcacttactctgaagggtccaggctcttcctttcgatggccgaggacattggggagggaggcggggtgccgggc

SEQ ID NO: 18250 - DNA, 251 bp, Homo sapiens; identical to SEQ ID NO: 8983
  chr11:33891709-33891960
  hyper

SEQ ID NO: 18251 - DNA, 119 bp, Homo sapiens; identical to SEQ ID NO: 8984
  chr11:33892127-33892246
  hyper

SEQ ID NO: 18252 - DNA, 118 bp, Homo sapiens
  chr11:36245106-36245224
  hypo
cgtctttacaaaatatgcaaacattagctaggttgtgtgacgcacccttgtagtcccagccactgagacgggaaggtggctcgagcccaggaggttgaagctgttgaaccaagatcgc

SEQ ID NO: 18253 - DNA, 38 bp, Homo sapiens
  chr11:567195-567233
  hypo
cgggcagagggcagagccaggctgtatcgaggggcggc

SEQ ID NO: 18254 - DNA, 48 bp, Homo sapiens
  chr11:567262-567310
  hypo
ctcatccccagcacagaagtgctctgtagggccagctgaggacacccc

SEQ ID NO: 18255 - DNA, 316 bp, Homo sapiens; identical to SEQ ID NO: 12191
  chr11:61276101-61276417
  binary

SEQ ID NO: 18256 - DNA, 374 bp, Homo sapiens
  chr11:63908860-63909234
  hypo
cggggagcgggggcactgtggccaccacgtgctgctgcagccagaccccttcatatcctaggcacacagagtacccatccgttaaacgggcaggcaagccacggcctcctggggagccctgaaaccagctcggctgtgccttgccaaggaactggcggatcattccaggagagcgagccaagggctgcagatccagcccttttcatgcttggccaatttaatggtccccattaatttcaaaacacacacattcccacaagctccggcctcctcggctcagtgctcgggtggacagcacaccggggacgcaagcaggggcacaggtgcaggcgctgaggcctcaaggacaggaaggagccacagaggatgtgctc

SEQ ID NO: 18257 - DNA, 167 bp, Homo sapiens
  chr11:65685172-65685339
  hypo
gacctggcgcccaccctccttggcacgtgggctcaccttggccacctgaagctggccttcaaccacggcccgggcaatgccagcccaggcgtggtccagcttgaagcccggtgccagatgcataagccacttgcccgagagcacgtggtgggtgatggcgagctggc

SEQ ID NO: 18258 - DNA, 1101 bp, Homo sapiens; identical to SEQ ID NO: 7830
  chr11:66079395-66080496
  binary

SEQ ID NO: 18259 - DNA, 33 bp, Homo sapiens
  chr11:66658557-66658590
  hypo
cgctctgtcgcccaagcttgagtgcagtggcgc

SEQ ID NO: 18260 - DNA, 260 bp, Homo sapiens
  chr11:68822128-68822388
  hypo
cgggtcacggcccaccctgcatgcacccatgtcatgcctcatgtgacttttcgcttgtagtaccgctccatcaaccaccgggtggatgccagctcgatgtggctttaccgacggtattactcgaacgtatgccaacggtgagaacgcacccatgtggaactcagggttcctgccggcttgcgtggcaggggaggctggcccccacctggggatcacctggtctcagggtccaggcaggctccccactacatagatagggc

SEQ ID NO: 18261 - DNA, 255 bp, Homo sapiens
  chr11:70054500-70054755
  hypo
cgtgagccaccgcgcccggccttggacatggatttcttaaagcaacttgaaaaaacaaattctatgttcattttttttacaatcaggtagaatttgtgtttctggaaaaggtacgcacaaatcttgggcttacttgaaagctggaggtaacagccgtctcttgctctctgactcctttttcccctaagacagaagagggaagacaagtccaaacgtctgtgctttgcgggagacttcaggggaatttgatcaagc

SEQ ID NO: 18262 - DNA, 130 bp, Homo sapiens
  chr11:70189848-70189978
  hypo
cgagagtgatgctgacgtgtctgatggtgaagatgacagggacactctcctcagctcagttgacctgctatcgcccagcgggcaggccgacgcgcacacactagccatgatgcttcaggagcagctggac

SEQ ID NO: 18263 - DNA, 103 bp, Homo sapiens
  chr11:75380110-75380213
  binary
atgctgctcagcagtgagaaaaaaatccaggaacgatgctgactgaaagagtgctgcagaaaaaaacaaaacaaaacaaaaacacctgctgtcgtcagcttgc

SEQ ID NO: 18264 - DNA, 40 bp, Homo sapiens; identical to SEQ ID NO: 10217
  chr11:76164370-76164410
  hypo

SEQ ID NO: 18265 - DNA, 510 bp, Homo sapiens; identical to SEQ ID NO: 5735
  chr11:76381512-76382022
  binary

SEQ ID NO: 18266 - DNA, 290 bp, Homo sapiens; identical to SEQ ID NO: 8999
  chr11:79150336-79150626
  hyper

SEQ ID NO: 18267 - DNA, 364 bp, Homo sapiens
  chr11:799220-799584
  hypo
cgtccccacacactggagagacttgaaggtgggggctctgcccatccactggggaatatctgggccagcctaaaagtctgtggggcctaggcctgggcaggctctgggggctgtggagccgaggagccaggcagagcggggtccttgggggccaagcccatgcgtcggatgctgtcctggtacttgcggcggccgagctccaagactgcgcgcacctcttcagccacgtcctgccggtcactctgctccagggcctgcaccaggagccccacagcccctggctgcccagcctggcgctcagcccaggagaagagcatgtgacggatctgctcatccagatcatccctgcaggcagaggatgggc

SEQ ID NO: 18268 - DNA, 305 bp, Homo sapiens
  chr11:799826-800131
  hypo
cggatgcgctgcacctcccggtaggacacccccaggtgcagggccacggctggccagtccagacccagacgcccagccacactcagcaggttgctctgcgtcagaaagccggtctcggcatctcccagattcaagggtgccaaggagaggccagccccccgccgtggcccctcggaccctcgaagtctctgttggaaggaaaaagtgcattaagccctgggctccacccccaactccaccatgtcaccctggtcacccctgggcctcggtcctgccccgcccctctgctgtccctcagtcccacc

SEQ ID NO: 18269 - DNA, 126 bp, Homo sapiens
  chr11:8255472-8255598
  hypo
cgctccttcaggaaaggttttaaagcattacccagtaattactactcacccatgaaaacactgatatttcacaatggatgatgtttgcgccgacacgcacgcctgggcacacactcagatgcatgc

SEQ ID NO: 18270 - DNA, 129 bp, Homo sapiens; identical to SEQ ID NO: 5736
  chr11:8615887-8616016
  binary

SEQ ID NO: 18271 - DNA, 51 bp, Homo sapiens
  chr11:93425646-93425697
  hypo
cgccctttttttgctccgtcgcccaggctggagtacagtgacacgatcatc

SEQ ID NO: 18272 - DNA, 120 bp, Homo sapiens
  chr11:93476562-93476682
  hypo
cgtgggtcttgcggctgcggtgcctcacttacttagcccacggctctcaactcctcgcgggagggggggcgcgagtgaatgaggcgggaactggagtgctggaagccacgaactccagtc

SEQ ID NO: 18273 - DNA, 179 bp, Homo sapiens
  chr11:93476769-93476948
  hypo
gtaggagcgaactccatgcaggccctgcggctgtgtctaggggatgcccgcgacccctgaagacccacagcctgtcttacaacctgtcatggttgtgaaaagttttgagagaacgtctgcacagtgtctaacggtgtctggtatatagtgtgcactcaaatggtaaccagtttagttgc

SEQ ID NO: 18274 - DNA, 349 bp, Homo sapiens; identical to SEQ ID NO: 10236
  chr12:104851545-104851894
  binary

SEQ ID NO: 18275 - DNA, 72 bp, Homo sapiens
  chr12:110389844-110389916
  hypo
cggctctcactgagtgaaccaggtggcttccgggaagtctgcgcaggggtgtcccctgcatctgctaatgac

SEQ ID NO: 18276 - DNA, 285 bp, Homo sapiens; identical to SEQ ID NO: 11031
  chr12:114337479-114337764
  hypo

SEQ ID NO: 18277 - DNA, 147 bp, Homo sapiens; identical to SEQ ID NO: 11032
  chr12:114337793-114337940
  hypo

SEQ ID NO: 18278 - DNA, 238 bp, Homo sapiens
  chr12:117155351-117155589
  hypo
cgtgagcccggcctccggtttcatctttcccgaatgggactggctggaggggccaagctgctttacagaagagttccatctggtaagcccgggtggtgagcgaagccaaagatgacaacacgagaaggggtcaaagccaaggtttcctcacgctgcctttgtcttcttcctgcagcctggcccgatggctgaagctgggtcccaggaggcgagttcttcagcggggcctcctcaccca

SEQ ID NO: 18279 - DNA, 187 bp, Homo sapiens
  chr12:117155627-117155814
  hypo
agctcgggcgggctttctccatagcaatactttgctatggggtcccggtaggtgttctcatgctgcacgctctgttggcaaaaggaaaataagagcgcagtgagagcgagcacagcttcacacacctccctctcggaagagtgagagtggatcgggactgtcagactctccctgcagggggctggcc

SEQ ID NO: 18280 - DNA, 161 bp, Homo sapiens; identical to SEQ ID NO: 12202
  chr12:117316504-117316665
  hyper

SEQ ID NO: 18281 - DNA, 71 bp, Homo sapiens
  chr12:117316909-117316980
  binary
cggcccggagtcctcggcctcccgggaggggcacccgacatcccgcacgcctggtgccggaaggggagagc

SEQ ID NO: 18282 - DNA, 32 bp, Homo sapiens
  chr12:117317225-117317257
  binary
cgctttgggcttcgcgtctgtcgctcaacttc

SEQ ID NO: 18283 - DNA, 482 bp, Homo sapiens
  chr12:117317288-117317770
  binary
gttcttcctgtccctgggattgggcagcctcagcctggcccctttcagtcgcgggagcccctggcctctccaacaggagagagagaaggtagggagaagtggatgggacccccggcgcccgggagccgggcagagagcgccccgaagcgcgcatttctcttcgccagcgcccgggctgcgcgggcccacgcgacatctgtcgcctgcggtcccggctcacaccccgcgcacccccgcagctccctgggcgctgccaccccccacgctccggctgccgcctttccccgcgggcgcagacgctcgggcctcgccttcaggcgccgctccaacttcccagggtgtctgcggcgcgcggcggggctcgggggcggggacctaagggcggctggctatgtcaccttcgagcttcaccttccggccctagacccatctatggtgggctcagcctgattctctctccctcattctctgcagcgctcctc

SEQ ID NO: 18284 - DNA, 397 bp, Homo sapiens; identical to SEQ ID NO: 6399
  chr12:120147746-120148143
  hypo

SEQ ID NO: 18285 - DNA, 336 bp, Homo sapiens; identical to SEQ ID NO: 13304
  chr12:120148396-120148732
  hypo

SEQ ID NO: 18286 - DNA, 276 bp, Homo sapiens
  chr12:120186357-120186633
  hypo
cgatttcacatcttggctatcatgccgatggcttactaattaattaaacagagggcttgatatttatgtacgagaatgagaacgtgcactgactcatgattttaacaaatcaaagaggatgactttgggatcccatcatcacgctatgcagggagaaggattcctttcattagtgtctctagctttcaactcttgattattcaacattagtcacttgacagaatcggtaaaagaacagaggagtgaaaacacaaaatgtgttcatgaggcctggcc

SEQ ID NO: 18287 - DNA, 65 bp, Homo sapiens
  chr12:120189911-120189976
  hypo
cgcctggcgaagctggctctccagggccgcccgtgcagcctgcagggctgtcaactgtgactcgc

SEQ ID NO: 18288 - DNA, 723 bp, Homo sapiens
  chr12:120524652-120525375
  hyper
cgagcacttattccttggtgagcaaatgtcccaacggtgcagcgcgtggccaggattggaggtcgtccaggcagcccctgcctcagggcgttttttggcaaggaagggaaccccaccatgcccggcgctgcgccgcggctgtagccctgggcccatctgtccctcgccggcaacgttagtcagcacattcctggggctcccgctgctctcggcgccacctgccgggggacgccggaagctcaggaggctgtggctgtcgtggggcaccacgggttctgacgctactggaggggtgtccatggcaaccgatgccgcgtgaggatttccgctgtttgctgccagccaatagcagtgggtgtgacggaggcagccttcggcatctgagccctcagcatccattagacgggctcgggtcccgtcgctgccgcagtgggcggggctgacgcggtggctgagctgtctggagcggtttctctagggaaggcaggcgggccggcgggcggggcgcacttgcggtgtcggcacaggtgactaattgctcggtagacctgaagccaaagaagaagtgctggtcgcagcagtggcctgagcactttgcaagtgggatccacctgttcctttttctggccgcacttcggttagtgcggtcggtgttgtgaagctcgagctaggcggcctctgcaggcggatcctctagctgcccttgagccctgcacattagtc

SEQ ID NO: 18289 - DNA, 304 bp, Homo sapiens
  chr12:122212948-122213252
  hypo
cgcctgccttcctctccagttctggcagctctacaatgccgtcacgctgtttgagctctccagccacgaggaatgcagagaatggcaggtatggggggtgggggcatgctcgggggaggttcccgggagggctggggtggcagggatggggtgtatgtgtggcatgctggggtgcggattcctggggagggctgggatggcagatgtgggggtggggtgtgtgcgtgtgtgtggtgtgctgtggggaggttcctggggcgggctgggctggcaggtgtggggtgttgtggggggcctgcttggc

SEQ ID NO: 18290 - DNA, 108 bp, Homo sapiens; identical to SEQ ID NO: 15513
  chr12:122213693-122213801
  hypo

SEQ ID NO: 18291 - DNA, 407 bp, Homo sapiens; identical to SEQ ID NO: 15514
  chr12:122480960-122481367
  hypo

SEQ ID NO: 18292 - DNA, 376 bp, Homo sapiens
  chr12:122481628-122482004
  hypo
cgagatccgtctcaaaaaaaaaaaaaacggtaaccagacccctccccgggagagctgccatggggttccgggcattgaggcacagggatgctgagccctctgacctacccgtccttggcagctgtgggatttcatcctgtggttctgttcccaccccctacagacgataacagcaaccagagctccatcgcagatgcctcccccatcaaacaggagaacagcagcaactccagccccgctccagagcccaactcggctgtgcccagcgacggcaccgaggccaaggtggatgaggcccaggctgatgggaaggagcacccaggagctgaaggtatgtggcctctggaggtggggctctgacggcctccctgtaacc

SEQ ID NO: 18293 - DNA, 89 bp, Homo sapiens; identical to SEQ ID NO: 12203
  chr12:122667648-122667737
  hyper

SEQ ID NO: 18294 - DNA, 123 bp, Homo sapiens
  chr12:122970391-122970514
  hypo
cgacgacattcttactggcactcgggccaaaaacctgagtcactccgatgactcttttgctctcatattctgcgtccaattcatcaacacatttgatcagctctacttccccagtacatccac

SEQ ID NO: 18295 - DNA, 74 bp, Homo sapiens
  chr12:124893329-124893403
  hypo
cgaaggttacaagcactccaagggcattgcttcctgatcatctggctacatggagctacgaagtcatccgtgcc

SEQ ID NO: 18296 - DNA, 188 bp, Homo sapiens
  chr12:124893570-124893758
  hypo
acgcagcttccccctacagaaagctggttgttaaacatttaccagcactctacggcagaaagatgcgtgtcgacagaacgtgagcaacatttaacacgcacatggaagcctgttccgcctgtacagatgtgtgctgtgccagccgaggctctgttgtaaatcctaattcagatcccgacccgcaactc

SEQ ID NO: 18297 - DNA, 246 bp, Homo sapiens; identical to SEQ ID NO: 12224
  chr12:132313659-132313905
  hyper

SEQ ID NO: 18298 - DNA, 478 bp, Homo sapiens
  chr12:133101020-133101498
  hypo
caccctgtcagccacccagggaggcctgttgctgcaggaggtgcacagagcgggcctctggctgagccgaaggtcggcagggagccaggctcatggctgcagcgagccacaccagccagtcctgggacgggtttccccgggctggggcgtgctcctgacttggatgactcaaagtaaagaacctcaccaggggccctggcatgcgaggcctgggggcccagatgtgctggggcgtgtcactacaaggtgcagaattgttccagatccaagttggccagagagggagaccgctgggcttccacgtgagtctgggcgctggctgtgcaggggcgtccctgctgggcgctggccagcaggagctctggcctctcacttccctcagctttgtgcaggtttgaaattatttccaagtaaaaaaagtaaatacatgcagggctcggggtctggtccctgcatggtcacttaacctgtctgcgcc

SEQ ID NO: 18299 - DNA, 497 bp, Homo sapiens
  chr12:133101527-133102024
  hypo
aaaatagtttctactcggggccaccgtgtgagcaaatgtgtgagtgtgtgcaaagcgcccgggccaggccctggcacgcatcggcgcccatgttggctggtgtcaggggtggtggcggtgggcgtggggcgtgggggtggggtgaagggagtatgggtgctcccttcagcaggtgatgaaactgaggcacggggaggccgagcagtggcccaagggcccatggccagggtcaggcaggtcccaccaccacctcgctgcttgctctggcatggagccgaccgaaggaggtgctgtgggcacagccaggggacagtgggtggcactgaggctcgacctggaggtcatagccctgtacagccagatggggtggtgcgaaccagccagggtgtgggtggaggccctgcctgtggtccctagcacccccaggatgccttcaaagtcagcggcttgtggaaggggcggctccaagcacgtggcggttctcgtgtcactgagcc

SEQ ID NO: 18300 - DNA, 413 bp, Homo sapiens
  chr12:133111693-133112106
  hypo
cgggctgctgtgacacgggggttaggaattaatgttaacactgtttctggttaagactttttgtgttgataaataattcatgaggcagttagcactttgagcctgacaacacgagaatatattaatacggtcggctccaagaaaggtcagccacgtgcttggggccagggggccatcttttattcattccctgacacaggctcattaattattctggcccagccggagctgtgctcggagggacactaatgagaaaaaggagagtggatttgagatccacacgccatccgctgtggggacgtagagggagagatggaaagaaacactggtgaggcctctgaggcgggatggggcctgcagcctggctccctgacagtgctggttgggtgtgaagaggtgagcggagctgatcc

SEQ ID NO: 18301 - DNA, 500 bp, Homo sapiens; identical to SEQ ID NO: 16344
  chr12:133121644-133122144
  hypo

SEQ ID NO: 18302 - DNA, 542 bp, Homo sapiens; identical to SEQ ID NO: 6828
  chr12:1739048-1739590
  hyper

SEQ ID NO: 18303 - DNA, 57 bp, Homo sapiens; identical to SEQ ID NO: 6829
  chr12:1739775-1739832
  hyper

SEQ ID NO: 18304 - DNA, 46 bp, Homo sapiens
  chr12:25344059-25344105
  hypo
cgcaaagtagcctcacacggtggctcactcctgtaatagcattcgc

SEQ ID NO: 18305 - DNA, 72 bp, Homo sapiens
  chr12:2995019-2995091
  hypo
cgtgaaccaccgcgcccggcctactttgacttttactctgttaggttttccagaatgctgactcttctgccc

SEQ ID NO: 18306 - DNA, 86 bp, Homo sapiens; identical to SEQ ID NO: 5742
  chr12:4377809-4377895
  binary

SEQ ID NO: 18307 - DNA, 142 bp, Homo sapiens
  chr12:4378558-4378700
  binary
tcccagccccttcccccacgtgtggatgacgtcaaaattccgcgaaaaagccgcgtggtggctccccgagcggaggcgcgattccgccgcccagcggccccctcccgggggcgcctggagggggagaagggcggaggcggcc

SEQ ID NO: 18308 - DNA, 88 bp, Homo sapiens
  chr12:4378715-4378803
  binary
cgggaggcaggaccccccgacgccgaccgccggacgccccccgccccaaagcttattggaaaattcacttttgtaaagcaaatgtatt

SEQ ID NO: 18309 - DNA, 247 bp, Homo sapiens; identical to SEQ ID NO: 7891
  chr12:4379920-4380167
  hyper

SEQ ID NO: 18310 - DNA, 285 bp, Homo sapiens; identical to SEQ ID NO: 7892
  chr12:4380196-4380481
  binary

SEQ ID NO: 18311 - DNA, 401 bp, Homo sapiens; identical to SEQ ID NO: 7893
  chr12:4381033-4381434
  hyper

SEQ ID NO: 18312 - DNA, 155 bp, Homo sapiens; identical to SEQ ID NO: 6840
  chr12:4384059-4384214
  hyper

SEQ ID NO: 18313 - DNA, 182 bp, Homo sapiens
  chr12:4672181-4672363
  hypo
cggacagcatcaccaatattaattcaagcttcactgtccaggcttaagtggagactcggcaaaagcaggaggccatttagtggaaaagttcaaaccgtggaaacaacaaatgaaaatgtcctttgtcttgcttgagcgatttgatcacctacatgtggtcggtatgtaaaacctaggagttc

SEQ ID NO: 18314 - DNA, 494 bp, Homo sapiens; identical to SEQ ID NO: 9039
  chr12:48576976-48577470
  binary

SEQ ID NO: 18315 - DNA, 1393 bp, Homo sapiens
  chr12:49739246-49740639
  hyper
cggagccgacaggccgggccggccgggaaggggcgggtggcgggggggagaggcggcggggtgaggctggctcagcgctggcactcagtgggcgcgcaacgtatgtttgccgaattgaaaggctgggacaccgagcggcgcagggcagagggtcggagggcacaggcggggtaggagatggcccagaccgggtgagggcagaagcctcactcacgggggaagaaggcactcgaggtcgctctgaggaccgctgggctgggatagaccacccatcccccgccggggagacccgggtagtaaagaacaagacagaatgggacaggcaggacggtttggaccccacctacaagcgcctccaccaccccagcctccgatccttgtcacgctctgctggggaaaccgaggcagccgatgctgagaatagccaaaaagttaaaagcggggtcagcgacgaagctggggcagcaaccagaattcctgcgtgggttttttggattcctccgcccacgcggggccagtttgcgggtaaatgcaccaccgcgccccgcaccacagctcagaccctttcctctcgctgcagtttgtcagatccccccacctcccactctgcaccagtttatagaacaacaatttggggaaaacaatccgggcggagtgacggccccgtaattgtgacaaagtgagtgcgggcggctggagagagcgctaggccgggagcgctgcagggcgaggcggaggcaggggcgcctccccccgccctgccgccccctcgttcttattccggtcacctcccatccctctccttgactcttcaattcctcttctcccggccccttgcgccttccttcgcttgttcctccatcgctcttccctttcctcccggtaacagctcttctcccgctcccccgaccccgtcgcccctcccccggtgcgctttttcctcgctcacttctcccctctcctctgccctccactcgtttcttcagcttttcctcgcgcttacattgcccttgggcccctggctctccccgcacaatccgcttctctccctccccactcctcccttcctgagatcgaaccctgagccccttcccgacccccactctctgggccgccagcgcagccccgcatttctgggttcctcgggaagtaaacctgggggcgcgctgcggccccgggtgccccggcggccagccccttccctctcccttgtatggctgccgcccccgccccaccacctgagccgggagatagtttgtttgtccagcggcggccgccgccgcccacgctgtttgcaaagcttagcgcgccgtcgcgcagtgcgggcccaattaagtctcattcattattcagcgctcctgtccgcccccgccccccagcagtctgaggcgtc

SEQ ID NO: 18316 - DNA, 419 bp, Homo sapiens
  chr12:49931623-49932042
  binary
cgtctcgagggatgggggtgctgagcctaccgcttcgctcgttagggaacaaattgctgttttggccccggcggctcctctgggcgcgggcggcagccgcgctcgctggcaaatcgtgggagggaggaggagcggcgctggcaggcaagtccgggggaccgtcgcagcgcgggaggccaagaaaagacggccgccccgggcccggctccgccccgccgggaaggggctccctgcagccgccccagggcagcaccccgcgcggcgccgcgcggagctctccaggacgagctgcgtgaggcgcggggctcggccttcctcgctctcctggtgccaggacccgcacgcacaaggttcggaagttttttcgcagtgtctgacccctgccggtcccctgtatttaccacctgaccctctagcgc

SEQ ID NO: 18317 - DNA, 660 bp, Homo sapiens; identical to SEQ ID NO: 14589
  chr12:51785160-51785820
  hyper

SEQ ID NO: 18318 - DNA, 58 bp, Homo sapiens; identical to SEQ ID NO: 7909
  chr12:54144782-54144840
  binary

SEQ ID NO: 18319 - DNA, 206 bp, Homo sapiens; identical to SEQ ID NO: 7913
  chr12:54422141-54422347
  hyper

SEQ ID NO: 18320 - DNA, 56 bp, Homo sapiens; identical to SEQ ID NO: 7914
  chr12:54422376-54422432
  hyper

SEQ ID NO: 18321 - DNA, 404 bp, Homo sapiens; identical to SEQ ID NO: 7915
  chr12:54422525-54422929
  hyper

SEQ ID NO: 18322 - DNA, 572 bp, Homo sapiens
  chr12:54426536-54427108
  binary
cgctgtgggcttgttgtcccggctacccccaattccaagaacctttttttttttttccctcccccttccctctttctctctctcactccctctcccccttggttgggctttgccaacatatcgagatgcttttcgccggcttccatcactaacctcccggaggtcatcaagccaaatttatgagtggccgctcgagtcacgtgactctatttaaggctcccttatttgggaagagcgcataggataaagaaagagatatctccacctataaattgtccactttggagaacaaaaaacccctcaacttcaaagagtcacaaatcacccttaatcaaaaagggtgcagaaatttttttgggccctccccgccatgagctcctacgtagccaattcattctataagcagagccccaatatccctgcctataacatgcaaacttgtgggaactatggatcggcctcagaggtgcaggcatccaggtactgctacggcggattggacttaagcatcactttcccaccgcctgcgccttccaactctctccacggggtagacatggctgccaaccccc

SEQ ID NO: 18323 - DNA, 330 bp, Homo sapiens
  chr12:54427307-54427637
  binary
accggccccgccacagatttacccgtggatgaccaaactgcacatgagccacggtaaactttaggacttcattttgcgctctcgggtccgcctgggttttataggccatgcggggcaaataaagaaaaaaaacctgcggccataaattttacgatccaggcatcaatggctcgtaaaactgtccactaaaaggcttagaggctgtgtgcgcccaaatttacgacgacataattggatcataggaacaaaacgtgtataaaaggcaatattcaatttttgggggagagggagggagttaaaaaaatagagggatctgaagggtgaggagcg

SEQ ID NO: 18324 - DNA, 92 bp, Homo sapiens
  chr12:54427974-54428066
  hyper
cgggtgggggcctgggctggggtggggacgggggaacgctgcaagctattcaccccttcctggcttggggtggggtttatgttccagagacg

SEQ ID NO: 18325 - DNA, 57 bp, Homo sapiens
  chr12:54428083-54428140
  hyper
aaccagttacacgcgctaccagactctggaactcgagaaagaattccactttaaccg

SEQ ID NO: 18326 - DNA, 44 bp, Homo sapiens
  chr12:54428224-54428268
  hyper
caggatgaagtggaagaaagattccaaaatgaaaagcaaagagg

SEQ ID NO: 18327 - DNA, 206 bp, Homo sapiens
  chr12:54446894-54447100
  hyper
cgagacttctgaactctgcttttgccaaccacttcctgtctctcttcagcgggggctcaacccccagacctccagaaatgacgtcagaatcatttgcatcccgctgcctctacctgcctggtccagctgggaccctgcctcgccggccgcatggccagagggttgggtgagtgtgtatggggaagaggggctggactctggtatcc

SEQ ID NO: 18328 - DNA, 220 bp, Homo sapiens; identical to SEQ ID NO: 12256
  chr12:54447599-54447819
  hyper

SEQ ID NO: 18329 - DNA, 360 bp, Homo sapiens; identical to SEQ ID NO: 15532
  chr12:56558022-56558382
  hypo

SEQ ID NO: 18330 - DNA, 172 bp, Homo sapiens
  chr12:57625988-57626160
  hypo
cgcagtctcacccacggctacatgtctgacgtcaagcggatatcagccacgtccatcttcttcgagtctatgccctataagctcaacgtgagtgctctagggtgtggggaggggctcttggccctggtggtggtcctcccctggagaagctgagggcctggagcgccgggcc

SEQ ID NO: 18331 - DNA, 55 bp, Homo sapiens; identical to SEQ ID NO: 17375
  chr12:72165436-72165491
  hypo

SEQ ID NO: 18332 - DNA, 91 bp, Homo sapiens
  chr12:76878986-76879077
  hypo
cgcaccgtgcccggcctctcactacttttcaaacaacttttaacttctcaatatcaacaaaatttggaatagtaaatgactaagaccgggc

SEQ ID NO: 18333 - DNA, 32 bp, Homo sapiens
  chr12:76879282-76879314
  hypo
cggaggttgcggtgagcagagatcacgccacc

SEQ ID NO: 18334 - DNA, 86 bp, Homo sapiens; identical to SEQ ID NO: 12261
  chr12:81102562-81102648
  hyper

SEQ ID NO: 18335 - DNA, 105 bp, Homo sapiens; identical to SEQ ID NO: 9059
  chr12:94541793-94541898
  binary

SEQ ID NO: 18336 - DNA, 1132 bp, Homo sapiens; identical to SEQ ID NO: 9060
  chr12:94541957-94543089
  binary

SEQ ID NO: 18337 - DNA, 31 bp, Homo sapiens; identical to SEQ ID NO: 5744
  chr12:94543992-94544023
  binary

SEQ ID NO: 18338 - DNA, 86 bp, Homo sapiens; identical to SEQ ID NO: 5745
  chr12:94544052-94544138
  binary

SEQ ID NO: 18339 - DNA, 647 bp, Homo sapiens
  chr12:99287504-99288151
  hyper
tcttctcaaactcacacctcagttgctcagagaggagaaatgcagcgaggactcgccttcctggccagtctctgaaaacgcgaaaccttcctgagctgtccatttgttttaggggctgtttataaacggctggttttcttggaggaaaaataaacaaataaatacggggcgatggcagcatcctgataaacacaggaccttgtttggcttttggcaagttgtaacctggagtaaaatcacatccaagttacaagcacgcaaattggaatttcgctggaaacactgacccgaccttcaccgaagcagcaaatcgcagtctctgctgctctgctcctgctctccaaggcttaacattggaaagtccatgcccacgtccccctctaattaatcaatgtagaaagaaatacgagggaagagagagggagcacactccacaccaaccttgccagcttctattcttcctgctattccttaaaggcgatgcacagcgcacctggaaattacgtggacttggcatggctttttaatattaaagacaaacgacctttggaaaatatacactgttaaagtcaaaccatttggagagacacccagcaatttacctcctcaaactcctcggaaccccaagaatgaggaaaggaaatgga

SEQ ID NO: 18340 - DNA, 150 bp, Homo sapiens
  chr12:99289349-99289499
  hyper
ggcagtcctcaacttgtgtgcgccggtggccctctcctgtgggacttgcgttccagctgttctcagagcgggtatgatcggcctccagtagacttggagggtcacgggtgagattttgataaggttcaaatactcctcactcctgcctcc

SEQ ID NO: 18341 - DNA, 270 bp, Homo sapiens; identical to SEQ ID NO: 16386
  chr13:111330283-111330553
  hypo

SEQ ID NO: 18342 - DNA, 687 bp, Homo sapiens
  chr13:111880810-111881497
  hypo
cggcgggagcggatgaggcaggctcgatgctgaggactgctaacactgttaagagtctatacgtggtcattctctgtatgtttatgtatatttttaagtttctaaaagtttgggaaaaagtaatggcacaattataacattttcgaacaaagatcgagcgtcttagcagatcatcccttgaacaactcggaggacgtcacctgacaggagggtgcatgtggttcaggaaagcggcaggcagacactgctgagcacgggcagacacacacagacattgactctgtgaactctgagtgcgtgagtaacagccaacaaaccacgcacagagccccagcacagaaggtcggaagaggacgtgggaattccgagtttttcagggccatgtctgctctggtggttgaagccagcggtgatgattaactctggactttgctgggttggtgacacgtcacaaatgaaagcgtaaccactgaaacagagggaagcggctgggtggcttccagtcaagcggaagaggcaagtgaggactcacagaagtgtgttcttctcaaaagaggcagaaattcccagccctgtgatggtggagctgcctcggagtggggagggcattgcacctggctccccggacctggccctcgcccagctgtgcagcgttcctgtgtgtcttggtggactctggttttgctc

SEQ ID NO: 18343 - DNA, 91 bp, Homo sapiens
  chr13:113413685-113413776
  hypo
cggagacttctgaccgtcatgacggtgggggttgctcccaagaccctgctctgaagacttcctaacctgcgtgctctttcaacaatagcgc

SEQ ID NO: 18344 - DNA, 306 bp, Homo sapiens
  chr13:113477621-113477927
  hypo
cgtgtccgcatcatttctgatcatcgtatctttacaggcccttaggatcggaaaacctgctgcttagaggagctacactgaagaacactgagaaaatctttggtaaatatttaattaattattaaccattgcccctaacattaaggatgcatgaagcaaaagttaaaacccgcagcggaacccgagagcgtttcttggcaccttgaggtgctggaggctttctggccgcgcaagttctgccccactgagatttgatcagtgaataagtgcaatcctgaagcagcagcatcagagaatacggcttac

SEQ ID NO: 18345 - DNA, 535 bp, Homo sapiens
  chr13:113497181-113497716
  hypo
cgcccagcagcccgcacacctgagcctcccactccgtgggtccggctttctgtctttggggctgctgcggtagggggccggcctgagtgtctctcacagcagggcctcccctccccgtcagacgcgctaaagccgggcaacacgtggctggggtggacacgctccctcctgtcagacaccttaactccgggtgatgcgtggctgggtggacatgctccctcctgtgagaggtcctaacgccgagcgacgcatggttgggtggacgtgctctctcccgtcagatgtcctaacgccgagtgacgcacggctgagtgcacatgctccctcctgtgagatgccctaaagctacactgtgcgtggctggggtggacgcactccctcctgtcagacgtcctaaagctgggtgacgcatggccgggtgggcgcgttccctcccatcagatgccctaacgttgggtgatgcgtggctgggtggacgcgctccctctgctccccacgtggctgctttgtcccacggtgtctgcacccttctccc

SEQ ID NO: 18346 - DNA, 404 bp, Homo sapiens
  chr13:113622881-113623285
  hyper
cggccagccacggacccacgcatggacccagcgacccacggacctgcttacctgggcgcggcgcgggtggcatgcggccacacggaaggggcgcgctgggctgctgcggcctctgcagcttctacacctgccacggggcggccggaggtaaagggaggcggcggccaggcgcggccccgcggaggcagctgcactcgctcggtccactcgcggcttcgcggctgcccgcaaaccaggagggcgtggagacccggaaccggggggaagggcgggggcacttgtgcggcacccgcggggctcccaggggacctcggcggtgacacgaatttctaggtgaccttggcggtgacacgaatttctaggtgacctgtgtgatacactaggtgacctagtgacacaggtga

SEQ ID NO: 18347 - DNA, 634 bp, Homo sapiens
  chr13:113623348-113623982
  hyper
gggctccccgacgaccgcggcggtgacacgcggggctcccaggtgaccccggcggtgcactcacaggactcccaggtgacccgcggtggtgacacaccggggcgggcgcgcgccgcttccgcttccgccgagccgccccccgccccccgcggcgcagcgcgcgcccccctcccggtggcgcggaaccaatcctgggcagggaggcggcggctggaggctgaaagcgctgccgtggccccctccccgcctccgccgcgccccctccgcactcgcacggccccacccgcaggcgccccccgtgcggaggaagcggatctgccaggatcatttttgttgtgtcggaggatgaggttttggctgaggactgaagagatggccttggaagaaatggtgcagagattaaatgcggtttccaagcacacgggtaggaggagctgctggccgtcagtgatctgtgcttaagcttgacatcatgggctgaaatgtggggaaatgcgtctgatttttgtaagccgccctcgtgttcctttctagccgtggtagctgtgacatggggggcactggttggcagctggtgtgttttcagaggctgtcggcgatcgtatgctgcccgggatagtcaaaatgactgcac

SEQ ID NO: 18348 - DNA, 121 bp, Homo sapiens
  chr13:113825842-113825963
  hypo
cgtttgagcattatgtccccttgaaaatcagactgtaaagaactgacgattgttcatgatttcagattttaacagaacgagccaagacccgctgatgatcaagataacgcacgtccatgtg

SEQ ID NO: 18349 - DNA, 173 bp, Homo sapiens
  chr13:113825992-113826165
  hypo
gaatgacctgtcactgctggagctggagtggcccatccagtgcccaggtgcggggctccccgtgtgcacccctgagaaagacttcgctgagcacctcctcatcccacgcaccaggggcctcctcagcggctgggcacgcaatggcactgacctgggcaactcgctgaccacgc

SEQ ID NO: 18350 - DNA, 62 bp, Homo sapiens; identical to SEQ ID NO: 15553
  chr13:114502726-114502788
  hypo

SEQ ID NO: 18351 - DNA, 168 bp, Homo sapiens; identical to SEQ ID NO: 12278
  chr13:20735265-20735433
  binary

SEQ ID NO: 18352 - DNA, 190 bp, Homo sapiens
  chr13:25026495-25026685
  hypo
cgacctccccgtgggtctggactatgtgaccagctctctgagactcacccgataccgcaggcgaataacctggtgtgcgggcggctcctcttcacgagctgtaatgtcaggctctcatcctggaggtgcccatcagacaccaggaggatgttccgtgaccctcgagcagggtacaataagctaagatatc

SEQ ID NO: 18353 - DNA, 126 bp, Homo sapiens; identical to SEQ ID NO: 15558
  chr13:28745545-28745671
  hypo

SEQ ID NO: 18354 - DNA, 243 bp, Homo sapiens; identical to SEQ ID NO: 10291
  chr13:28745848-28746091
  hypo

SEQ ID NO: 18355 - DNA, 178 bp, Homo sapiens; identical to SEQ ID NO: 14606
  chr13:33000891-33001069
  binary

SEQ ID NO: 18356 - DNA, 204 bp, Homo sapiens; identical to SEQ ID NO: 14607
  chr13:33001228-33001432
  binary

SEQ ID NO: 18357 - DNA, 480 bp, Homo sapiens; identical to SEQ ID NO: 14609
  chr13:42032017-42032497
  binary

SEQ ID NO: 18358 - DNA, 109 bp, Homo sapiens; identical to SEQ ID NO: 14610
  chr13:42032649-42032758
  binary

SEQ ID NO: 18359 - DNA, 280 bp, Homo sapiens; identical to SEQ ID NO: 13382
  chr13:50704210-50704490
  hyper

SEQ ID NO: 18360 - DNA, 248 bp, Homo sapiens; identical to SEQ ID NO: 13383
  chr13:50704800-50705048
  hyper

SEQ ID NO: 18361 - DNA, 141 bp, Homo sapiens
  chr13:52335934-52336075
  hypo
cggtacatggaagctgtcacttgagccatcagaccggctcagcccatgtgaccggagctctgaagaggcacacacgcatgccccgcacaggctgttagcacttgtcgcctcgctgccctggtccagactacccttgcttgc

SEQ ID NO: 18362 - DNA, 438 bp, Homo sapiens
  chr13:96085837-96086275
  hypo
cgtctacgaaattttaataaatatccgtgtagaaaatcagaacgactctttcaggccatctttaaaatgtcattggtaaaccatacttgatcctaaattcctgtacttcctcaggccatccgagcatgaaacgctgtcacctacccacatccgctggctgtgacgcttgtcaaagtgttctctatcggctgcatgcctagaccaccaaagcgttctgaccggacagtgtcactggagaaggcggcgcgacatgtccagggcgcagatctgggctctggtgtctggtgtcggagggtttggagctctcgttgctgctaccacgtccaatgagtggaaagtgaccacgcgagcctcctcggtgataacagccacttgggtttaccagggtctgtggatgaactgcgcaggtaacgcgttgggttctttccattgccgacc

SEQ ID NO: 18363 - DNA, 110 bp, Homo sapiens
  chr13:96205363-96205473
  hyper
ggccttagggagccagggacgctcctggtgcccgccctctcctgatggctgtctcgcggggcgcctgttcgagcctgggaccccgggaggggggacacgcagacaggccc

SEQ ID NO: 18364 - DNA, 234 bp, Homo sapiens
  chr13:99034903-99035137
  hypo
cggtcatttgtggatggcgaaaatttggagtcacctgatgtgcattcccagtggaggtcaaacgaggcaaagctctgccttctgttttttttttctcgtactgttaataagtatccttttcatggtctatttagtgccacgcttttcgcatttttgtgcatgtttttggtgatttcactgtttaaagcagtccccaggcgttgtgctgaagcgctgtctgtcttgtgtccccgc

SEQ ID NO: 18365 - DNA, 73 bp, Homo sapiens
  chr14:102247600-102247673
  hyper
cgtatttcccgggaccctggcttctgtcctcagggaccccttcagaccttccccaccctccgaagcctcaacc

SEQ ID NO: 18366 - DNA, 50 bp, Homo sapiens
  chr14:102248214-102248264
  hyper
cggagcggcacccaggagcccgccctagcacccgctcccgctcccacctc

SEQ ID NO: 18367 - DNA, 119 bp, Homo sapiens; identical to SEQ ID NO: 15563
  chr14:102691860-102691979
  hypo

SEQ ID NO: 18368 - DNA, 257 bp, Homo sapiens
  chr14:102968257-102968514
  hypo
cgccctactggggaagccggtccgtacgtaggccttgcatctcgccacctccacttctgtcctcaagaacaagtcctaggtcaagggaaacagcacagcctgtttataattaggaaacacttaaaacagcctggcatttgggaacagccatgttaacgtgagcaaattcctctcatgaaatagcctgcagctattaagaagcacgtgtgtgcaggaagcggaggcgcaggacctcaccgcgccagcgtgaagttccc

SEQ ID NO: 18369 - DNA, 78 bp, Homo sapiens; identical to SEQ ID NO: 6897
  chr14:105512395-105512473
  hyper

SEQ ID NO: 18370 - DNA, 423 bp, Homo sapiens; identical to SEQ ID NO: 13401
  chr14:105689521-105689944
  hypo

SEQ ID NO: 18371 - DNA, 77 bp, Homo sapiens; identical to SEQ ID NO: 12298
  chr14:24808635-24808712
  hyper

SEQ ID NO: 18372 - DNA, 84 bp, Homo sapiens; identical to SEQ ID NO: 12299
  chr14:24808863-24808947
  hyper

SEQ ID NO: 18373 - DNA, 164 bp, Homo sapiens
  chr14:36002437-36002601
  hyper
cgccggcatttctcactcaatctactccatgctaaacaggccggttaggaattaagtcatactctgggtagtacaagtggaaagtgtgaacagagaaaccactttatgcgaggacagtggaaaatgagatcctcctttcctctccctactcctgctcctatcga

SEQ ID NO: 18374 - DNA, 439 bp, Homo sapiens; identical to SEQ ID NO: 12300
  chr14:36003004-36003443
  binary

SEQ ID NO: 18375 - DNA, 36 bp, Homo sapiens
  chr14:50287178-50287214
  hypo
aagtattgtatcaagagctaataatcggctgggcgc

SEQ ID NO: 18376 - DNA, 50 bp, Homo sapiens
  chr14:50574258-50574308
  hypo
cgacctcaggagatccgtctgcctcggcatacaggcgtgagccaccgcgc

SEQ ID NO: 18377 - DNA, 260 bp, Homo sapiens; identical to SEQ ID NO: 7958
  chr14:52327346-52327606
  hyper

SEQ ID NO: 18378 - DNA, 126 bp, Homo sapiens
  chr14:55522633-55522759
  hypo
cgagactccatctcaaaaacaaaacaaaaaacttacgaattatttatttctggaatttttcatttaatatgttcggaccttaggtaattaaaaccacagataaggggggatcaccctaacatgaac

SEQ ID NO: 18379 - DNA, 62 bp, Homo sapiens; identical to SEQ ID NO: 7961
  chr14:60794412-60794474
  hyper

SEQ ID NO: 18380 - DNA, 92 bp, Homo sapiens; identical to SEQ ID NO: 14632
  chr14:65016816-65016908
  hyper

SEQ ID NO: 18381 - DNA, 72 bp, Homo sapiens; identical to SEQ ID NO: 13429
  chr14:69245863-69245935
  hypo

SEQ ID NO: 18382 - DNA, 105 bp, Homo sapiens
  chr14:72399486-72399591
  hyper
aggctgtggggagcggcgcggagacggactagacttcccctccgcccccaagaggctgccggtccccggttccctgggcttctccagctttatcatgaacctggc

SEQ ID NO: 18383 - DNA, 274 bp, Homo sapiens
  chr14:81879122-81879396
  hypo
cgcgcaaagcagtcttcgcaaaggggaaaatatgattgctttgtgacctttaaaactttctgtcaaacattaaaagctttcttcttagaggcgccacggcttccatagcgatggcagctccagccgggcgatgcttagcacctccccaggagaccgttgcagtcagccagcccccttctccatgggtaaccatgtgcgaccaaaaggccgtgatcaaaaatgcggacatgtcggaagagacgcagcagaactcggtggagtgcgctcctcaggc

SEQ ID NO: 18384 - DNA, 438 bp, Homo sapiens
  chr14:89627945-89628383
  hypo
cgtgcacagggccaatcttcaggcttatggcttttggaacattttcttaatttaatagagaacagaattcaatgattagcaacatcactaaaaatttaccccatttcttctccatgagtcactgacacccgatgcgcatgaacagtccaacgtccacctcgtaagatgtcatcgggcttcagggttcagaagcatcgaggactggtggccggccctctgtgctcgccgtgtgacaattccagtggctttcctggcaccatcagatgcctggtgccacaagcttgggtctgctcctagggggacgaggggttcctcctcctcctcaattgctttatgtgccttcactcagtgaacccaatgggatggacaacctgactttttaaacctaagggttgggcctgaacgatgattactttgcccacgtgccttctaggtgcc

SEQ ID NO: 18385 - DNA, 67 bp, Homo sapiens; identical to SEQ ID NO: 5963
  chr14:89818034-89818101
  hyper

SEQ ID NO: 18386 - DNA, 136 bp, Homo sapiens; identical to SEQ ID NO: 13440
  chr14:90871545-90871681
  hypo

SEQ ID NO: 18387 - DNA, 267 bp, Homo sapiens
  chr14:91755357-91755624
  binary
cgttcctgcacacgtgtgcacagccaccggtgcgggacccttcaggacacccccttcctcacccgaccacggccaggacggccgcccctacctttccccacagacccgttgtgggcgtcgcgctcttctgcacagttggagcccagtgcgggggtgtcggggttctcggcctgtgatctgagcggctgagaggccgccggcgaggcggggtctgaggactccagctgccagggagggctgtccacggtggattttaagcgttccctc

SEQ ID NO: 18388 - DNA, 116 bp, Homo sapiens; identical to SEQ ID NO: 15587
  chr15:28516961-28517077
  hypo

SEQ ID NO: 18389 - DNA, 177 bp, Homo sapiens; identical to SEQ ID NO: 15588
  chr15:28517198-28517375
  hypo

SEQ ID NO: 18390 - DNA, 103 bp, Homo sapiens; identical to SEQ ID NO: 12325
  chr15:31188921-31189024
  hypo

SEQ ID NO: 18391 - DNA, 218 bp, Homo sapiens; identical to SEQ ID NO: 10308
  chr15:31668823-31669041
  hypo

SEQ ID NO: 18392 - DNA, 235 bp, Homo sapiens
  chr15:34806641-34806876
  hyper
gccaacagcccccaagcttacgccacgcgaggagtcggagagacgcgccctcccctctcctcccacccaagcctccggcagtcccgggccggggctgggccagttgcgggagaaaggggcggggaactggggcctctctggggaaggctcccctttgtcctgggactccgggcgccccctctctgccctcgccctgccccgcgaggccgccgccgggcgcctcacagtcatgttg

SEQ ID NO: 18393 - DNA, 77 bp, Homo sapiens
  chr15:41769434-41769511
  hypo
cgggcagaggccctggaccgccagcggaccaagaacatatccgctatcaggtgtgttatggagcctatttttggccc

SEQ ID NO: 18394 - DNA, 213 bp, Homo sapiens; identical to SEQ ID NO: 7977
  chr15:41805862-41806075
  hyper

SEQ ID NO: 18395 - DNA, 135 bp, Homo sapiens; identical to SEQ ID NO: 12330
  chr15:41953174-41953309
  hyper

SEQ ID NO: 18396 - DNA, 113 bp, Homo sapiens
  chr15:58839542-58839655
  hypo
cgtcgaaaacagcggcctcaaggagctgcagtgaagatgcaggcagtggaggagcggagggcacgcagcatacacagcctcctagtaggtgcccaaggaatgcagccgctagc

SEQ ID NO: 18397 - DNA, 153 bp, Homo sapiens; identical to SEQ ID NO: 15594
  chr15:63066085-63066238
  hypo

SEQ ID NO: 18398 - DNA, 1024 bp, Homo sapiens
  chr15:63132478-63133502
  hypo
cgtgttttcatggctcagctgggtcattagtctcaaaacccaaacagtgacagaggctggtcgccagagctaagaaagctgttccggatgtgctgcagtgtcccacggtcgcgggagccgtggagctcacatgagcagtggggtgggtcggagggttttctacaaagtgttaggtccatccagcttgttgctttctttctagatcatcgccgcccaggaagaaatgctaaagaaagagcgagaactggaagaagcaaggaaaaaactggcccaaatccgccagcagcagtataagtttttacccaccgagctgagggaagatgagggctaaaggtgcgagcccagatggcgagccccaggggatggccctggctgaactggacagacagtgttcctgagaggctgggcacttagctggaaaccgcccacctccctcccgggtgagcctggagccctgcgtgcttgttctcacatctctgtcccgtcggcactggctgcatgatcgtgatgtcacacggtacaatgtcctacccacaactcctctgccgcctcccctcatgcctcaccgtgtctcaggagagaggggtgcacgtttcatggactgttaccaacaaagaaaagtcagtattatgttgttctcagacactttggcttttgttggtccttctcttaggcctgctcctggacctctttatgatattgtgatagggaaaaaaatcattgacgtcatagaatattcttcttcctctcaggagaagacggaagctggagttggacatggttcataaaagccagaaacacaaacccgtgtggactccgggagggtgactcaggtcctccttccatgtcttgagcactggctcacccagggggtgaaaaattcccgcccctgtttgcacgctttcttgcctccgtgtgtaagctccttgtacaacccagacccatcttgtattttgtggcccagaaaactgaacgattattttgttcctccgtagtccaaagggcagagttgcggaaggccgtc

SEQ ID NO: 18399 - DNA, 206 bp, Homo sapiens
  chr15:63597968-63598174
  hypo
cgctccagataacctcagggaaccagcacttcccaaaccgcagactacatctttagaggaagcacaactgtgcctttttctgaaaatccctttttctggtggaattgagaaagaaataaaactatgcagatatgcgttccattcacttggctttcacacaactgctctccgaaaggggtgctcagtggtgtgcgtcctggctgcac

SEQ ID NO: 18400 - DNA, 68 bp, Homo sapiens
  chr15:64683087-64683155
  hypo
cgtctcaaaaaaaaaaaaaaattatattccgcctgggaaggaggtcagtgcccgtcggcatgtattac

SEQ ID NO: 18401 - DNA, 410 bp, Homo sapiens
  chr15:70352928-70353338
  hypo
cgcagagccccggtgcttctcactggcccggaggctttccgagggtgacacagagttattctggaaggaaaaagagggttcggggttaaaactttctgctgcgtgtaacaattcacacatccgcacacagctaagtgcaggtgacacggaggtcaggggagggaagagaagctgaactcctctctgccctgcagatcgtggctccatcagagccttgccagggaagccttccccactcccctgagactgagtccccggggagatgccctgggcgcatccccaattctcttttgcagctctgcactgctattaaataattaaccctgcagtaagccgtctgccttctggcctgtgggactacgctctgtgagggcgagggtcacctgggtctcattcaccacccatctcgc

SEQ ID NO: 18402 - DNA, 242 bp, Homo sapiens
  chr15:70354323-70354565
  hypo
cgtggctcaggggcaagggccacttggagggaacggggctgggcagtattcggtgggaatagtgcggcaaccagcctcagaacttaatttcctttcctaagccgggttctgggcagccctacccggccaagtttctgcccgaagcaaattaaaatggcagagttatcaagccttgaagaaaaaatggaggttataatggaactgcagctcaaccttccccacagccgtgcaggagcggtggc

SEQ ID NO: 18403 - DNA, 57 bp, Homo sapiens
  chr15:70355607-70355664
  hypo
cgcctatctaggcaaactgcctctccgaaaaaatgccactgttagaggatcagtacc

SEQ ID NO: 18404 - DNA, 247 bp, Homo sapiens; identical to SEQ ID NO: 12336
  chr15:75248843-75249090
  binary

SEQ ID NO: 18405 - DNA, 139 bp, Homo sapiens; identical to SEQ ID NO: 14674
  chr15:75470758-75470897
  hyper

SEQ ID NO: 18406 - DNA, 188 bp, Homo sapiens
  chr15:80471858-80472046
  hypo
cgtgcattgcatctgagcgtctcggtgggcacgtggtgccttggccccctctgcccacagcctgaccgcccacagctctccctcgctccttggcctgccctgacatcgtgtttgaatcgttcagctccattgcccagtgtccatcccaaggcccggcatgggagaatgggagcgagggctttgctcac

SEQ ID NO: 18407 - DNA, 305 bp, Homo sapiens
  chr15:86306299-86306604
  hypo
cgccttaaagggcctggagtacggggtgcccagtgggagagaaagagagagaaggagagaatgttcacagcaagatcacccttagtgggtaagcgggggcctcctgcagccgctggctgctatcccctaggctgtggatccaaccgcaacactggagcaaggggctgccctggaggtcgctcaggttccagctcagcaattccccgccgcttctggacggctgctggccaagcctgtgctctgtgccaggggcgcagacgtgaggatgcccgtggccagctccccagaggcgcctgcaggcaggc

SEQ ID NO: 18408 - DNA, 494 bp, Homo sapiens; identical to SEQ ID NO: 14680
  chr15:89437837-89438331
  hyper

SEQ ID NO: 18409 - DNA, 128 bp, Homo sapiens; identical to SEQ ID NO: 14681
  chr15:89438421-89438549
  hyper

SEQ ID NO: 18410 - DNA, 48 bp, Homo sapiens
  chr15:89876331-89876379
  hypo
cgagggggatatggccaccgccaatgtggggcaagttccctctgccaa

SEQ ID NO: 18411 - DNA, 110 bp, Homo sapiens; identical to SEQ ID NO: 12339
  chr15:91427360-91427470
  binary

SEQ ID NO: 18412 - DNA, 77 bp, Homo sapiens; identical to SEQ ID NO: 12340
  chr15:91427979-91428056
  binary

SEQ ID NO: 18413 - DNA, 67 bp, Homo sapiens
  chr15:93504252-93504319
  hypo
cgcatttgtgttttttattttaattaggattttagtctatagctttttgttttgttttgatgtttac

SEQ ID NO: 18414 - DNA, 310 bp, Homo sapiens
  chr16:11192863-11193173
  hypo
cggagagacagctgtgtgggaatgggctttctgtgtgctctgcagagagcgtggcggctaaggtgaggcatgggagtcataacccccaggctgagtgagccaagagtgcatgtggccagagcgccccattccttccaggtcagggagctccaaggccctgggccaggctgcttcatgccacccgggtttgccaggacaggtcattctcatgcacggctcatcggcagacgtggagcagagctgtttcccacggtcccacacagtggacagggtctcgttttcttccctctaacccttcgctgtccaacac

SEQ ID NO: 18415 - DNA, 199 bp, Homo sapiens
  chr16:12084484-12084683
  hypo
cgccgggcatcccagatgcccgccagtgtaactgagaatgaattctgcagtgacaacaggttgatgatgtccttgttccctgcaagactctgtatgtggggccttggttagagggcaagggaagatgggagcatgattatgatgcgggcctggtctacagcctgctggggaactctcacgtttaaccatctaaccgcac

SEQ ID NO: 18416 - DNA, 243 bp, Homo sapiens
  chr16:12609457-12609700
  hypo
cgaagtcacctcctcccaggtgccttcctgtcctagccacccaagccaagtccatctctgtgccagcactctttatgatgtattcacgtatctgcttgttggctctactggatctaagctccggagggcaggggtcacatctgtttgccaatacgttccttcaaggcacggtgccttggacatatgcaggcatgcggcagatagtcactgagtgaaccatgcaggagccagcacaattaacgc

SEQ ID NO: 18417 - DNA, 160 bp, Homo sapiens
  chr16:16103307-16103467
  hypo
cgccggagttgcagctagagatgagctgtgagctgagctcttgagtgttcaggcaccggggagcatggtgaccagacaaacagtcctgttggaggtagtggggcgtagcaggctgattacagaccatcacgtgccggcctggatgccagctcaccatacc

SEQ ID NO: 18418 - DNA, 183 bp, Homo sapiens
  chr16:16227979-16228162
  hypo
cgagtcattccttttgggagcctggcaaagggaagagagtccttcttgaccttcggccgaaacacccttaaaggagtgtctctgggcagcgcgcaagggagagggctgtcgagttgggttgaccagatgactgatgcctgaggtggggccgagatgagggcactttggggcagggacaagtcc

SEQ ID NO: 18419 - DNA, 195 bp, Homo sapiens; identical to SEQ ID NO: 7998
  chr16:1730112-1730307
  hypo

SEQ ID NO: 18420 - DNA, 105 bp, Homo sapiens; identical to SEQ ID NO: 7999
  chr16:1730761-1730866
  hypo

SEQ ID NO: 18421 - DNA, 728 bp, Homo sapiens; identical to SEQ ID NO: 8000
  chr16:1737575-1738303
  hypo

SEQ ID NO: 18422 - DNA, 346 bp, Homo sapiens; identical to SEQ ID NO: 15612
  chr16:1812272-1812618
  hypo

SEQ ID NO: 18423 - DNA, 53 bp, Homo sapiens; identical to SEQ ID NO: 15613
  chr16:1812929-1812982
  hypo

SEQ ID NO: 18424 - DNA, 48 bp, Homo sapiens; identical to SEQ ID NO: 8005
  chr16:2042503-2042551
  binary

SEQ ID NO: 18425 - DNA, 41 bp, Homo sapiens; identical to SEQ ID NO: 15620
  chr16:21515452-21515493
  hypo

SEQ ID NO: 18426 - DNA, 184 bp, Homo sapiens; identical to SEQ ID NO: 12359
  chr16:23193716-23193900
  binary

SEQ ID NO: 18427 - DNA, 239 bp, Homo sapiens
  chr16:23539152-23539391
  hypo
cgtgagtcaccgcgcccagcaaaggatgatcgttcttactgcatcatctctatgttcggaatgtttgtgttcccctaaattcatatgttgaaattttaacccccaaggggacagtattcacaggtgtgggctttgggaggtgaacaggtcatgcaggccgagcccttatgcacagatgagtgcctttataaaagacaccccagagagtccctcgtccctccaccacgtgaggatgcagc

SEQ ID NO: 18428 - DNA, 41 bp, Homo sapiens; identical to SEQ ID NO: 13489
  chr16:2497839-2497880
  hypo

SEQ ID NO: 18429 - DNA, 76 bp, Homo sapiens; identical to SEQ ID NO: 13490
  chr16:2498053-2498129
  hypo

SEQ ID NO: 18430 - DNA, 358 bp, Homo sapiens
  chr16:311205-311563
  hypo
cgagcacaggagtgccgccctcccctcctgttggcatctgctctgagtgtgcagtgagccgtgggctcacgagggtgatgcctcaacaggagcctgcctgtcacaggccttgcagttgccgggctgctgttgaaggggactcagggccacgttccgtgaccgtgtgcttgattctaggggaaaccctgtggaaccacagcagcagcttcagcgggaatgcgtccatcctgagccctctgctgcaggtgcctgatgtggacggcgatggggccccagacctgctggttctcacccaggagcgggaggaggtacatcccagcctggctctgctcccaagtcacgaggccacctgccacac

SEQ ID NO: 18431 - DNA, 367 bp, Homo sapiens
  chr16:350669-351036
  hypo
cggatgctggagcagagccgggggacaggtgggtggtgggcatcccctggcggatgcagctatgctgcctccctttccttggttttgtaggactaaagggcccgggcactctggggagaaatcttaaccgagggtcttcctagggactaaaagtgtttggagttttgatgccgttcactgccttggccgagctccacatcggcaggaattctatcatggggctgtgaaatgttacagattaacttaaccactcggctaatggtttttgttttcttctttgtgctttaatttcccaaatttcacaatgaaaataggttatttaaaaaatctggagttcacgcctgtaatcccagcactttgggaggcc

SEQ ID NO: 18432 - DNA, 362 bp, Homo sapiens
  chr16:3741902-3742264
  hypo
cggcagagcccagcgagggaggaaagcagccaatgtgtccccagccgcacgcagttcaccgacgcaggcccagaaaccagacactttcactccaacacaggactggaccgacccaacaccaacacccactgaccccagggaccacataccaggaccctgccttggtcagtagatttgcaatacgtgatggtgtcaaggatatgtggccagccagccacgccgtgtcaaagtctaagcctaaatgaaccgcatctaactgggagcctctcctgttcttcacaaatttgtaacaagtagaaaggaaagacaacagaatatccaggaatcaaggttttaaaaatcagcatatcagccaggggtgc

SEQ ID NO: 18433 - DNA, 69 bp, Homo sapiens; identical to SEQ ID NO: 15634
  chr16:4430998-4431067
  hypo

SEQ ID NO: 18434 - DNA, 299 bp, Homo sapiens; identical to SEQ ID NO: 15635
  chr16:4431189-4431488
  hypo

SEQ ID NO: 18435 - DNA, 313 bp, Homo sapiens; identical to SEQ ID NO: 15636
  chr16:4431516-4431829
  hypo

SEQ ID NO: 18436 - DNA, 103 bp, Homo sapiens
  chr16:4645033-4645136
  hypo
accagagagagggccgtggccacaggaccatggcctgtgacgaaggacgatgagctaggaaaggtgctgggctggtgccaagggacgccagtccacggaggac

SEQ ID NO: 18437 - DNA, 308 bp, Homo sapiens
  chr16:4779967-4780275
  hypo
cgagatctcttaccgctgcacacactccttcaccacttcatactggccaatggaagcagctgtgtgaagatccagggggacatccagctcctccccgctgacctgtgtcccgagcccgtgccacatggacaagctgcggttcaggagttccggctcgctggcttcatcgctgagctcggacatcactgaggaggaaggcccaagggttagatctttcctggctggttgttccagggcatgaaacaggctggtcctgcccctgctacaccactgcactagcagactgataacccagtgcagtcaacccc

SEQ ID NO: 18438 - DNA, 214 bp, Homo sapiens
  chr16:521925-522139
  hypo
ccggtctggagggttagattccaggagagccacgtggctgcagcagaaaatgcatgaagttgaacttgagcccttgggggccgccgggaaggtggaggtggcagccgccagtcctggtcagcctgctgccgagcaagggtaccagaagtggggctgagctgctggccggtagggcctgggcttctcatgtcagtcctctgagccctgactcctc

SEQ ID NO: 18439 - DNA, 309 bp, Homo sapiens
  chr16:524299-524608
  hypo
cgcagtgctcacaccggggtggtcgggtaaaatgtgcagttagtcatggccgagctagtgggtctgctggctcgcactgttttcccagggatcctttcagcaggcagcttataacgggaaagttgctgctatggtgtctgagtaagtggggagagtagaaggggatggactgtggcgccgctgagttcctgggcatggtgatgtctgaggatctgagcaggtggagcccagggggtggtggggctgtttgtcgggtttctggaagagcgaagggaaagtcagggagtgtaaggcgcatctcacagaatc

SEQ ID NO: 18440 - DNA, 128 bp, Homo sapiens
  chr16:533135-533263
  hypo
cgagctagttggggccggagtagagggacgggcagagtctgggagaaggtcagatgaaggaggtgtccagtggctcacgtggacctgctttccgtgttgcccctgctactggaaagtccgctcagcac

SEQ ID NO: 18441 - DNA, 345 bp, Homo sapiens
  chr16:56398009-56398354
  hypo
cgctcggtctggacacggggcaggaagcaaggaggcagctgtgagcacaggcctccctcctaagcaggttcctcacctacagggcaccccagacacggctgttctggacgcaaagagaaggctgctgccaagcagggaggcagaaactaggaaccacaagctacggataatggagcagcagcttccctgagggcaggcctgctgcctatggcttgagtagtactaagaacaggacctgactcacacagaatgttcggcatcagagggtaagtaaatgattaccagcatgaaaaacgtaagcaccttcaagctgcactcttagaatacgctaccaacacgacaacc

SEQ ID NO: 18442 - DNA, 246 bp, Homo sapiens; identical to SEQ ID NO: 15641
  chr16:57559728-57559974
  hypo

SEQ ID NO: 18443 - DNA, 109 bp, Homo sapiens; identical to SEQ ID NO: 9203
  chr16:67175573-67175682
  hypo

SEQ ID NO: 18444 - DNA, 71 bp, Homo sapiens
  chr16:677367-677438
  hypo
cgggccatcgtctcctgcacccccgtgcacctcatcgacaagcttccactgcccgtcaccatcaagagcca

SEQ ID NO: 18445 - DNA, 35 bp, Homo sapiens; identical to SEQ ID NO: 13534
  chr16:677803-677838
  hypo

SEQ ID NO: 18446 - DNA, 64 bp, Homo sapiens; identical to SEQ ID NO: 13535
  chr16:677909-677973
  hypo

SEQ ID NO: 18447 - DNA, 106 bp, Homo sapiens; identical to SEQ ID NO: 13536
  chr16:678084-678190
  hypo

SEQ ID NO: 18448 - DNA, 102 bp, Homo sapiens; identical to SEQ ID NO: 15645
  chr16:68504292-68504394
  hyper

SEQ ID NO: 18449 - DNA, 179 bp, Homo sapiens
  chr16:68679166-68679345
  hyper
cgctcacctggcctcctcccgctggctcccgggggctgcggtgctcaaaggggcaagagctgagcggaacaccggcccgccgtcgcggcagctgcttcacccctctctctgcagccatggggctccctcgtggacctctcgcgtctctcctccttctccaggtactccacagcctcgcc

SEQ ID NO: 18450 - DNA, 598 bp, Homo sapiens
  chr16:68679362-68679960
  hyper
cgctccctggggggcgggcggggtccgcatggggcagtggcgtcggggagagcgcggggctgcgctccctggggccaagggagtcccggaaggcccgtgaggaccctgcggtgtggggagtgcagggccgggcacgcctggacccagcctccttcactctctgccctcgggcgcaggtttgctggctgcagtgcgcggcctccgagccgtgccgggcggtcttcagggaggctgaagtgaccttggaggcgggaggcgcggagcaggagcccggccaggcgctggggaaaggtaagatcctcagggtggaaccgcagggtaggggccgcacgtgaccattttggtgtggaccgcgcgaggggtgttcgggccggggcaagggactcctggcgccacctcagttcccggggaggcgcagaacgcgcctcgggggctgggattgggggtggtggctgacggagaaggctgggcagcagagcgcctatgacatccagccccttgtccggtagccactgcttaccttgaccccctcctccgagatgccggatggctgagcccctcacccagtctcgacgtgggaagttctcccccgctggcc

SEQ ID NO: 18451 - DNA, 144 bp, Homo sapiens
  chr16:69383506-69383650
  hypo
cgtggcagcaacatgccggtcatgtgacatccccactgtccgctgaacctgccaagacacattaaataggtagcagaacccctgctacatcacgaggaagccagctgagtggtaagattgacgtcccacggtcatcagcacagc

SEQ ID NO: 18452 - DNA, 166 bp, Homo sapiens
  chr16:69921972-69922138
  hypo
cgaagaaccttccgttgttggtgtgacgtccccacctgctgcacccttgagtgtgaccccgaatcccaacacgacttctctccctgccccagccacaccggctgaaggagaggaacccagcacttcgggtacacagcagctcccagcggctgcccaggcccccgac

SEQ ID NO: 18453 - DNA, 111 bp, Homo sapiens
  chr16:69922460-69922571
  hypo
cgcctagatcctgcctagaaaacagcttttctctcttgaattttatcgtatcagcccacggaggagttgggttttaggctgtgaatattgctgtatgttattctcataatc

SEQ ID NO: 18454 - DNA, 352 bp, Homo sapiens
  chr16:70808012-70808364
  hypo
cgatacactaccattaactaaatgattaccctaatttgaacatcacgagtttttccattcctggccttttgttccaggatctcacactgcatttagctaaactgtcttctttgtctcctccaatctgttgcagcccctcaatctgtgtgtctttcataaacttgacacttttgaagcgctggtcactctgcagaatgtctccccgtttgggttggtctcacgttttctcacgagtagggagttgcgcatcattggagggatgtcacggaagtgctgcgcctcagtgcaccctatcgggggaacgtgttgtctgttagcctcattactggtgacgttaacctcatcgcctgac

SEQ ID NO: 18455 - DNA, 174 bp, Homo sapiens
  chr16:74659437-74659611
  binary
cgcaatggctcacgcctataatccaaccttttttcttctgccattgacttgttgtggaagccagatcagctgtcttatagaacgcccacaacccggacttgtgtatatgctttctgtgctatcattaaacttgttctcctctattccctgcaactccagtcaatgaaagttagc

SEQ ID NO: 18456 - DNA, 86 bp, Homo sapiens; identical to SEQ ID NO: 15647
  chr16:74984568-74984654
  hypo

SEQ ID NO: 18457 - DNA, 205 bp, Homo sapiens; identical to SEQ ID NO: 9209
  chr16:77247511-77247716
  binary

SEQ ID NO: 18458 - DNA, 315 bp, Homo sapiens
  chr16:78322882-78323197
  binary
cgcagtgggaaggttctgcttttctcacaaattctcggttaacacaaggcgtgccaacagctggtagagcgagagtcagggtgccaggctgaaatggagtggaaggcagccctggctggaagtcttgctgggaacctggagcgctgggaggtaaaactttacttggtgctggcagcgtcactatgccagtctgtttcttcccgagcttcaggccatgctgatgttcaagttgaataaatgagagctaatgattttttaaggcgtttttagtgaattgccgtgggaatgctaagttggcaagaataaaacctaggc

SEQ ID NO: 18459 - DNA, 606 bp, Homo sapiens
  chr16:81565589-81566195
  hypo
cgatttgatagcttccatttcatggcgcttcttctggatgtcaggcactaagtcgggcgctttattctgtagttctcctagcaatctggtgagctccactctacagataaggaaatcgaggccaaggacagctaaagaagcgaggtgcgcaaggtgcccaggtccgaagtgtttccgctgctttcagactgcagtcccagggctcaggagtccatgctttctgcgtatcttcacgctggccacggatcacctcatcattagatgtcgaagttgaacaagtggtgttcacattcggacgtgtgttaggtagaagtgtgtgtgcacctgcgtgtgcgtgtatgttccacacgctgatgcaggaggtatacgcacagatataattgtcttttagaagattgactatcactaattttgaaaaatttcctgaatgacctttcctgccaggccaatacattgagcccaacagataaatccctgaacttattcgcagtctctaagtacctttagaatcccgggggtcgccctgagcctccccagggactagcgctgttgccctcgctcagtctcgccaccacaggaggcctcggcttgcccagcagctgagtc

SEQ ID NO: 18460 - DNA, 140 bp, Homo sapiens
  chr16:81580491-81580631
  hypo
cgtagccacgcgtggcgaacagctcttgtactggagagtgccgatgtagaacattccctgcatcgcgagagctccctggatggtgctgggctgcaaaggccactcccccgggagtgcacagccttgcggtattaaagacc

SEQ ID NO: 18461 - DNA, 189 bp, Homo sapiens
  chr16:83934496-83934685
  hypo
cgaaaagctcttgctgatcacccaccctaatccagggttatttgcactacgctttatatcactgtcttaccgttaatcagatgtttattagaaactttcttttttggctacttagatgcataaaattgggcataattaagtatgggattaatgtcaagagtgacaacagtggccatgatttgattcccc

SEQ ID NO: 18462 - DNA, 133 bp, Homo sapiens
  chr16:85007919-85008052
  hypo
gtcacttgtcatgggcacaaaagcatttagagtttctggaaactgtttgggagtgaccttaacagcctggggctgggcccacgaagcacggaaaggcaccccctgaaaacaccaccatccaggaagaacgggc

SEQ ID NO: 18463 - DNA, 87 bp, Homo sapiens
  chr16:85453282-85453369
  hypo
cgggtgcagtcgtgtgcaacggtgaatgcacgttggaatcagctggggatctctaaaaacccctctgatgcctgcctcccccgcccc

SEQ ID NO: 18464 - DNA, 45 bp, Homo sapiens
  chr16:85683926-85683971
  hypo
cgactcaaacagctgaggctccttgcgccccactggtggggcctg

SEQ ID NO: 18465 - DNA, 105 bp, Homo sapiens; identical to SEQ ID NO: 15656
  chr16:87471750-87471855
  hypo

SEQ ID NO: 18466 - DNA, 400 bp, Homo sapiens; identical to SEQ ID NO: 12375
  chr16:89006909-89007309
  binary

SEQ ID NO: 18467 - DNA, 92 bp, Homo sapiens; identical to SEQ ID NO: 12376
  chr16:89007789-89007881
  binary

SEQ ID NO: 18468 - DNA, 374 bp, Homo sapiens; identical to SEQ ID NO: 12377
  chr16:89007995-89008369
  binary

SEQ ID NO: 18469 - DNA, 542 bp, Homo sapiens; identical to SEQ ID NO: 10347
  chr16:89169538-89170080
  hypo

SEQ ID NO: 18470 - DNA, 58 bp, Homo sapiens
  chr16:89446081-89446139
  hypo
cgcgagcgccccaagcagcacggaagagctccgtgcagtgcacggatttgcgaagaac

SEQ ID NO: 18471 - DNA, 99 bp, Homo sapiens; identical to SEQ ID NO: 8077
  chr16:89641257-89641356
  hyper

SEQ ID NO: 18472 - DNA, 123 bp, Homo sapiens; identical to SEQ ID NO: 8078
  chr16:89641704-89641827
  hyper

SEQ ID NO: 18473 - DNA, 98 bp, Homo sapiens
  chr16:89647563-89647661
  hypo
cgtcacccgtcacacggaacattccgtctcccgctgacacggaatatctgatcacccatcacatggaacatcccatcacccactcacacggaacatcc

SEQ ID NO: 18474 - DNA, 259 bp, Homo sapiens; identical to SEQ ID NO: 13575
  chr16:981471-981730
  hypo

SEQ ID NO: 18475 - DNA, 227 bp, Homo sapiens; identical to SEQ ID NO: 13576
  chr16:981843-982070
  hypo

SEQ ID NO: 18476 - DNA, 278 bp, Homo sapiens; identical to SEQ ID NO: 13577
  chr16:982099-982377
  hypo

SEQ ID NO: 18477 - DNA, 109 bp, Homo sapiens
  chr17:16257038-16257147
  binary
tgaatccagcgggctcttcgtaccttcccgacctggaggggcctgggttgggcctgaattcgcaggctcatccgagcgggcagcctggggtaacttcgtctccaaaaac

SEQ ID NO: 18478 - DNA, 1383 bp, Homo sapiens; identical to SEQ ID NO: 14712
  chr17:17685627-17687010
  hyper

SEQ ID NO: 18479 - DNA, 367 bp, Homo sapiens; identical to SEQ ID NO: 7001
  chr17:17687055-17687422
  hyper

SEQ ID NO: 18480 - DNA, 602 bp, Homo sapiens
  chr17:18854647-18855249
  hypo
cgccttcaatggctgcgtaatggcggatggccatttccttgactaggatgagacattgcctactctgcgtggctgctgtgagcgtgaaatgggatcatgtgcggaacagccacgcatggtccgtgaaatgggatcatgtgcagaacagccacgcatggtccttggtgtgtgacagatattgggtccctctgtggtcccaggcagacattgcccggggtgggggccgaatgcatggtcaagttgaggggcctgggactgtttcacgggtctagaaaaagaaagcagaaacgctggaagcaggactttattgtccgacatggggctgcctctgagcctgggctgtgttggctggacgtgagccataatgcaggtgtccccctcccaagccctgctcagtccactcacagcccgatggccaagggaggacatggctgcccgccacggcagtatcttcagaggtgaggcggttgtccctacgctctatgcttcttatacaaattagatataggtgaagccacccattaagcaacccagcctttctgggactatttgggctgcctccgggtccactaaatgcggttcattttccccaagccccctcc

SEQ ID NO: 18481 - DNA, 64 bp, Homo sapiens
  chr17:18855505-18855569
  hypo
cggcaggacagccatggccgccaactccaccagcgacctccacactcccgggacgcagctgagc

SEQ ID NO: 18482 - DNA, 811 bp, Homo sapiens
  chr17:18907431-18908242
  hyper
cgcgcgctcgggggcctctccgcggcctctgcttctctgcccatgagcaatctgcgggaaagacctgatgagcccggctcggcggggagggcgggccgcgcggggaggggcggcgggggcggggccgggaactcaggtgggcgtgggaaggacggggctggggctggggctgggaagatgaggtgggggcactggactgggatgggaagaaagtaagggatcggaacagcggtgagggagcggtgggccacgtcccagggctcagcgtgcctctacgtgcagggaacccatatcccagatttccggagctgcctgaagtcctcgcaacttctgagggaaactagggcagccggggaacttcccagtagcttcttagagtgggaggcggccccggcacagaggcgccccgcaaaccgagggcttccgggtaagggaggggtcttaaaatttccgggtgccggcaacccaggaggcctgcccggaggaggctggggctctgggaggggtccaggagacccagaaacgcggttgcggggcggcgacgccccgcgagacccgggatccggggggcgcggccgggacttgcttaccgagcgggcgctggcggagcggggcgcacacgcggcggctgcggcggcggcgcgaggctgggcgggggcgcgccggtgactcagggccgccccgcttaccccgccgccgccacctgcggtcacgtgccgcccggggcggggccggaagctgattcacccctcgacagacagacagacctggggcggacgcactgcccacggtcccctggtgcccgaattcc

SEQ ID NO: 18483 - DNA, 110 bp, Homo sapiens
  chr17:2289839-2289949
  hypo
cgaaggcggggcagggcgggggagaagtcagggagcgtgacgtccacatcgcactgatttccgagggtagggaggggaagcaggagcggcactggagctggcactgggcc

SEQ ID NO: 18484 - DNA, 200 bp, Homo sapiens
  chr17:25934818-25935018
  hypo
cgaggggctggagagagtccttgcaggcagacgggcacagttctccccatgggctccaccagggttggggtcaggccgcaccagccccagacttgtgcttgacccccaccaccctcgacagcttctgcaaggggcggacgttgcactcgtttgtgagggaccccaagacgtctctggacatcaacaagacgaggcaaatc

SEQ ID NO: 18485 - DNA, 317 bp, Homo sapiens
  chr17:25936178-25936495
  hypo
cgtcatcgttgcacatcttcactcctcctgatgtgtcctccagggcatgggatatcttcatgccaagggcatcgtacacaaagatctcaaatctaagaacgtcttctatgacaacggcaaggtggtcatcacagacttcgggctgtttgggatctcaggcgtggtccgagagggacggtgagttggtcttgagtgtctgggtgggttgtgggtgctggatggggaagagcagggctgaggtctgggcactttcactgtttgttgctgagctgcagccctccctgcagggaagcccaggtcgctttggtcctgccctc

SEQ ID NO: 18486 - DNA, 110 bp, Homo sapiens
  chr17:26594091-26594201
  hypo
cgtcactctcaggaaaacgaaacctaactaacgccgcccttgccccaccccgactccgcccctacatcacctagtgtccatataagcgtgctgcaactacaacacagtgc

SEQ ID NO: 18487 - DNA, 356 bp, Homo sapiens; identical to SEQ ID NO: 8084
  chr17:27038294-27038650
  hyper

SEQ ID NO: 18488 - DNA, 33 bp, Homo sapiens
  chr17:31099662-31099695
  hypo
cgtgcgtgcgtgcgtgcatgcgtgacatgttac

SEQ ID NO: 18489 - DNA, 122 bp, Homo sapiens; identical to SEQ ID NO: 8090
  chr17:35078956-35079078
  hyper

SEQ ID NO: 18490 - DNA, 115 bp, Homo sapiens
  chr17:35290220-35290335
  hyper
cggacaagcctcctaacttgggcctcctggccgggaaagtggagatagtacccttctcttccaccccccaccaccctcttgctatacggttcaggggagaccgtgatacaagctg

SEQ ID NO: 18491 - DNA, 100 bp, Homo sapiens
  chr17:35291109-35291209
  hyper
aatgtacaggtcctgggcggtgtaagtggctgtgggtctgtggaggacattgggtaggaaaacgcttgcgtagttgaggatgcagacaataaatgtggcc

SEQ ID NO: 18492 - DNA, 122 bp, Homo sapiens; identical to SEQ ID NO: 9235
  chr17:3599052-3599174
  binary

SEQ ID NO: 18493 - DNA, 392 bp, Homo sapiens; identical to SEQ ID NO: 9236
  chr17:3599244-3599636
  binary

SEQ ID NO: 18494 - DNA, 160 bp, Homo sapiens; identical to SEQ ID NO: 14720
  chr17:36829818-36829978
  hyper

SEQ ID NO: 18495 - DNA, 303 bp, Homo sapiens; identical to SEQ ID NO: 14721
  chr17:36830051-36830354
  hyper

SEQ ID NO: 18496 - DNA, 459 bp, Homo sapiens; identical to SEQ ID NO: 12396
  chr17:3867210-3867669
  binary

SEQ ID NO: 18497 - DNA, 201 bp, Homo sapiens; identical to SEQ ID NO: 12397
  chr17:3867893-3868094
  binary

SEQ ID NO: 18498 - DNA, 37 bp, Homo sapiens; identical to SEQ ID NO: 8098
  chr17:40332770-40332807
  binary

SEQ ID NO: 18499 - DNA, 176 bp, Homo sapiens
  chr17:41790849-41791025
  hyper
cgcaatttgtcaccaggggttttgactttccttattgcctcgtgggaggtggcagaggcagcacatctcagaccgagcctcggttcctccccctacctcccaccgctgcgcttgaagaaagatgctgcagcctccccagtccccatgccagcgctcccacttttctctgagctttc

SEQ ID NO: 18500 - DNA, 260 bp, Homo sapiens
  chr17:41791085-41791345
  hyper
cggtcaaatgaaaaaataccagctccgcccccacgcgggctggccggggcgcctggagcgccagggcggctgcagcgcgctctccgcggccgtcggccctgagctcatttcctggggcgcgcgcgccgggctatttcagcctggcgctgtgcaaacaggacaatttactgcggccaaaagggacccaaattacaatcgtatcacagacaaatatccgccacgccaggtctccaggggccaggaggggcctctctcccggc

SEQ ID NO: 18501 - DNA, 40 bp, Homo sapiens
  chr17:41791412-41791452
  hyper
cgtttgccaccgagctgtgcctgctctctgcaacaggaag

SEQ ID NO: 18502 - DNA, 405 bp, Homo sapiens; identical to SEQ ID NO: 8099
  chr17:41984572-41984977
  hyper

SEQ ID NO: 18503 - DNA, 265 bp, Homo sapiens; identical to SEQ ID NO: 8100
  chr17:41985015-41985280
  hyper

SEQ ID NO: 18504 - DNA, 336 bp, Homo sapiens; identical to SEQ ID NO: 15678
  chr17:4392128-4392464
  hypo

SEQ ID NO: 18505 - DNA, 39 bp, Homo sapiens
  chr17:45055681-45055720
  hyper
cgcgagcgaccgcagtcccaaattgcatctccataccca

SEQ ID NO: 18506 - DNA, 270 bp, Homo sapiens
  chr17:45056305-45056575
  hyper
gccccggcgccgccgcccacgccgtccacctcctccaagccgctgtggttcaggaaggtcgcgttcatcgccgcgcggcgccgggggtctcggcgcgcagtcccgggtgcactgggctgctcgccggggtccgcgctctcagggacgctccggacccctcggaccggctcctgcggtacggggaggggacgaaggcgggaggctggctgcctgcgcgctctcgggccgcctacccctgggcaccgggcgggaagcgaccgcccggaggag

SEQ ID NO: 18507 - DNA, 299 bp, Homo sapiens; identical to SEQ ID NO: 14732
  chr17:46089283-46089582
  binary

SEQ ID NO: 18508 - DNA, 31 bp, Homo sapiens
  chr17:46152418-46152449
  hypo
cgctccggctccaaacctcgagcaaagcctc

SEQ ID NO: 18509 - DNA, 349 bp, Homo sapiens; identical to SEQ ID NO: 8113
  chr17:46806440-46806789
  hyper

SEQ ID NO: 18510 - DNA, 325 bp, Homo sapiens; identical to SEQ ID NO: 8115
  chr17:46829655-46829980
  hyper

SEQ ID NO: 18511 - DNA, 45 bp, Homo sapiens; identical to SEQ ID NO: 8116
  chr17:46830655-46830700
  hyper

SEQ ID NO: 18512 - DNA, 132 bp, Homo sapiens; identical to SEQ ID NO: 17528
  chr17:46831595-46831727
  hyper

SEQ ID NO: 18513 - DNA, 507 bp, Homo sapiens; identical to SEQ ID NO: 15681
  chr17:4795549-4796056
  hypo

SEQ ID NO: 18514 - DNA, 267 bp, Homo sapiens; identical to SEQ ID NO: 17532
  chr17:49008887-49009154
  binary

SEQ ID NO: 18515 - DNA, 528 bp, Homo sapiens; identical to SEQ ID NO: 5996
  chr17:49021815-49022343
  hyper

SEQ ID NO: 18516 - DNA, 62 bp, Homo sapiens
  chr17:54756198-54756260
  hyper
gggggccccctccctcccccggctcccctcccccctcctccccgaaatttgcagacatctgc

SEQ ID NO: 18517 - DNA, 298 bp, Homo sapiens; identical to SEQ ID NO: 14734
  chr17:54911482-54911780
  binary

SEQ ID NO: 18518 - DNA, 515 bp, Homo sapiens; identical to SEQ ID NO: 14735
  chr17:54911874-54912389
  binary

SEQ ID NO: 18519 - DNA, 235 bp, Homo sapiens; identical to SEQ ID NO: 15684
  chr17:59239030-59239265
  hypo

SEQ ID NO: 18520 - DNA, 103 bp, Homo sapiens; identical to SEQ ID NO: 8123
  chr17:60766832-60766935
  hypo

SEQ ID NO: 18521 - DNA, 224 bp, Homo sapiens; identical to SEQ ID NO: 8124
  chr17:60767107-60767331
  hypo

SEQ ID NO: 18522 - DNA, 112 bp, Homo sapiens; identical to SEQ ID NO: 7021
  chr17:61777761-61777873
  binary

SEQ ID NO: 18523 - DNA, 76 bp, Homo sapiens; identical to SEQ ID NO: 7022
  chr17:61778423-61778499
  binary

SEQ ID NO: 18524 - DNA, 61 bp, Homo sapiens
  chr17:64961305-64961366
  hyper
acacacgcgcgcgcgcgcgcgcgcacacacacacacgcgcacacactgcccggcgcgcggg

SEQ ID NO: 18525 - DNA, 203 bp, Homo sapiens
  chr17:64961625-64961828
  hyper
aggtggaggctggcgagggggcgggaggaggctggggttggggggagcggacgggagggggggaggggttgcttggcaaccggtgtctgtgctattgctatgggaactggccatcctggggcggggccggccgggggcggggcgcgtcggtgccgctgggcgctttctacaggctcgggctgaggggtgggggcagaagtagg

SEQ ID NO: 18526 - DNA, 83 bp, Homo sapiens
  chr17:64962141-64962224
  hyper
cgacccccaaatgcgactggaggctgagtagtaggtgtcatgaggctggaatgctaggggaccaggatttcagccccgggacc

SEQ ID NO: 18527 - DNA, 133 bp, Homo sapiens
  chr17:70220156-70220289
  hypo
cgacggcaaagagaggttgccggaaggaaacaaaagtccatcaagggctggcaaaatattaatccggagctcacggatgggcagtgatgcgcaccctctgatggcgagcattcccttcatgttcatgctgccc

SEQ ID NO: 18528 - DNA, 46 bp, Homo sapiens
  chr17:71897934-71897980
  hyper
cgagtggagggaatgaggagggcctttcaagggaggcgggattgca

SEQ ID NO: 18529 - DNA, 569 bp, Homo sapiens
  chr17:7224752-7225321
  hypo
cgacgaacacccacacggctccccacctaggaccgaggtaggacaaggacggacgatgttcagcccacctctccctgccacctccactcccaacccctcccctgtccctggagccagccacttcacccccagcctctctaggttccggccatagttcatcctctggagctgcccatcacgcctcacttcacagctggataccatccaagtggtcttcgtccggagctctggcagggaaggaggcagccctgggccaccaccgcctgccccgggtcccatctcccccggtgctagtgtggtcagccccagccgcagggaacctgcccacttctcatctagctcttccactttcacctacgagacagagaaaacataagctggccctgtcgtgatgggcctcgcagcccctctgtcacatcactacggcctacctcaaagacttcctcagccctcagctccttggtactgaagacaaggccatgagcatagccagcggcacgcactgccctcgtgccatcctcctctagagtgacgttcttgccgcaagtactgtggaatcggtgagccac

SEQ ID NO: 18530 - DNA, 149 bp, Homo sapiens
  chr17:73635145-73635294
  hypo
cgcaggccaattgcagggtggagggccccgttcgatgaccttcacggtggttctaaaccagctctgccaaggcagcggcaccgggagtgactggcctcactgacgtagccatctcagcgagaaccggctgagacctgggacaaggcaac

SEQ ID NO: 18531 - DNA, 185 bp, Homo sapiens; identical to SEQ ID NO: 6483
  chr17:74042063-74042248
  hypo

SEQ ID NO: 18532 - DNA, 82 bp, Homo sapiens
  chr17:74388687-74388769
  hypo
cgaagtgagtttttatcttatcaggtgtttttcctcataaatcattactttaagactgtattccagctgggcgcggtggttc

SEQ ID NO: 18533 - DNA, 119 bp, Homo sapiens; identical to SEQ ID NO: 13616
  chr17:74390245-74390364
  hypo

SEQ ID NO: 18534 - DNA, 182 bp, Homo sapiens; identical to SEQ ID NO: 13617
  chr17:74390459-74390641
  hypo

SEQ ID NO: 18535 - DNA, 127 bp, Homo sapiens
  chr17:74435202-74435329
  hypo
cggcgtggtttggaggcgcttgcctggctttagcccaagcctttctgctcactgccttaacctctcctcctctgtgaagtaagaacacctacttcacggggttctccagtgactgtgcctagaacgc

SEQ ID NO: 18536 - DNA, 93 bp, Homo sapiens; identical to SEQ ID NO: 7031
  chr17:75447727-75447820
  hyper

SEQ ID NO: 18537 - DNA, 331 bp, Homo sapiens; identical to SEQ ID NO: 15699
  chr17:76187077-76187408
  hypo

SEQ ID NO: 18538 - DNA, 40 bp, Homo sapiens; identical to SEQ ID NO: 13620
  chr17:76254688-76254728
  hyper

SEQ ID NO: 18539 - DNA, 62 bp, Homo sapiens; identical to SEQ ID NO: 13621
  chr17:76254854-76254916
  hyper

SEQ ID NO: 18540 - DNA, 138 bp, Homo sapiens
  chr17:78338197-78338335
  hypo
cgagtgagtgagtgagtggcgccctcttttgacagagcccagtggagtcggattttctccaccgcactcttcgtggagcacgtgctcctaggaaccgagagccgcgtccccgagttacaggggctggtgaccgagcac

SEQ ID NO: 18541 - DNA, 522 bp, Homo sapiens
  chr17:78775515-78776037
  hypo
cgtctgccagtcactgctgagatgagtaacgaggcactagacgctgatttagaaatgaagaggtggaagcaaaacccgagagatcgccgagcgagggggaggtgagtgattggcggaaacgggggaccgccgccacctagcagatcacccctgcctgcccgagcacagccacctcagcgttcccgtgcgcgccacgccagggcgcacggtgctgcacgggggtccttatgcccgggcgcctctcattaaggtccccccacgggcagagggaagacgggcaccgggtccccttcgtgttcgatgtgcaccccagcaaggcctccttagctcatccggattggtaggggtggaggaggcttggttctgagatgaaattgcagacgtgcagccaagggggaatgtgagaggttcagaggccaccccagggaacctgcacacagcacggagatcttccgtttccttcacagtggtacccaaaccctggtatttgtcatcaaaacaaaggcctgcgccacagagcac

SEQ ID NO: 18542 - DNA, 158 bp, Homo sapiens
  chr17:78872481-78872639
  hypo
cgccgccccgactccccccgccccggctccccccgcacctgctcacccaacccctgctcaccccgcccctgctcaccccgccgtctccgtctagtgagttttgatgatgggcttttcacttgtgttcagcttcaagctttctttctacttccattgtg

SEQ ID NO: 18543 - DNA, 268 bp, Homo sapiens
  chr17:78872734-78873002
  hypo
caccgggcaaccctgtgggtgtgctcccagccttggccagctgctgccttgagcacctctggatagaacgagtccagagcttgcaccatgccctccagggtatggagaactgaaaggttcactacacaacaacccagacacgccagcttagcccagacacgccaacttgttaattttcattgagaaataacgttgcagctttgtgcatttggctgtccactaaaatatgccaagtgcccagaaagcgcagagttgactccgtatattc

SEQ ID NO: 18544 - DNA, 253 bp, Homo sapiens
  chr17:79648960-79649213
  hypo
cggacccccagctgcaccacctccctaccgagccatgcttccggctgtaacccgagggagcccccgcccccgctgtgctccctctcagctcagggacgcgtacattttattgaagagtatcagcaccgatgcttctgcaagttgttctgcagaaaggagacctaagagctgcacacaggatgcagagagctgggtggggtcagaggcgtccatcacaaactggggaaaaagaaaaagacagcagcaatgcccc

SEQ ID NO: 18545 - DNA, 73 bp, Homo sapiens
  chr17:79803018-79803091
  hypo
cgtcatcatcccctgccccatcctggccaccgctctccaggaatttcttaaaaccatccagcgtgcgttcccc

SEQ ID NO: 18546 - DNA, 96 bp, Homo sapiens
  chr17:79826882-79826978
  hypo
cgggggtcaggaactcgtactcctcggcccggggcccatagctgcctaccatgtagtcagtcttgtcaactgcggcacaaggaagagggcggtcag

SEQ ID NO: 18547 - DNA, 140 bp, Homo sapiens
  chr17:79827029-79827169
  hypo
tgcccggggccccactcactcttgacgcctttcctgtacgtatgctggatgtacttcatgccggacactatctctcggttaacctgcaggacccgaagcgaggatcagggaaggtcggtccggaccccagccccagcccc

SEQ ID NO: 18548 - DNA, 169 bp, Homo sapiens; identical to SEQ ID NO: 15704
  chr17:79887422-79887591
  hypo

SEQ ID NO: 18549 - DNA, 56 bp, Homo sapiens; identical to SEQ ID NO: 15705
  chr17:79887849-79887905
  hypo

SEQ ID NO: 18550 - DNA, 515 bp, Homo sapiens
  chr17:80201427-80201942
  hypo
cgcgcccaacagaaggtcacagcgcagactctactttctggccgtgaaggttctgggtccggttgggagagtcacctgctccttggcacctcagggtgggtccttctggcctgccggcttttctgagctagtcttggcacgtggcaaggacagccccgctcctggttttaagcacaggcattcatacagacggagtgccaatccgcacaggagcattgagtgctgagaaaatggactgagtgcaaaggcagcaaggcaacaaacactacagtaaccacctctcggttcacagtcctctcccaagggaccagaaacgcatcttccaccttgaatcctgggactcccaattgtcctgctagggtctcaaagcctctgcttccaagctctcagctgcctgcccacctcctggggaagaagcgcgcagtgctttgcctggtaacacccactgcacccctgccccgcggcagcctgcggtccctaactgctctccgagggcctcaagagttcctgacagc

SEQ ID NO: 18551 - DNA, 91 bp, Homo sapiens
  chr17:80201971-80202062
  hypo
tgagacgccaaaatcaggttgaagaggtcccaccacacacgggcacacacacacaccacggacttttgatgagaaatctcctctccaaagc

SEQ ID NO: 18552 - DNA, 121 bp, Homo sapiens; identical to SEQ ID NO: 15708
  chr17:80749629-80749750
  hypo

SEQ ID NO: 18553 - DNA, 192 bp, Homo sapiens
  chr18:11992166-11992358
  hypo
cgctccacgtagctcagtcaagttgacacataaaattaaccatcacaacacattcacttgtgttgcagtaaatctggaagcataaacatggggcgtgtcgtcaggtgcacacctccagtggccacatcttcctgacctgacagagggaaagacacatctcctattgaaactgcactctggcaaggctccggc

SEQ ID NO: 18554 - DNA, 160 bp, Homo sapiens
  chr18:11992771-11992931
  hypo
cgtggtaaaggggttcagcgggaccttacctggcaaccccatgtgctccctcgccctgtggacgtgatcctggctaaagggcagggctgtttgagtctcgcttactgattttagaaatacagcacttttcctcactttttctcttagcataggacaattc

SEQ ID NO: 18555 - DNA, 115 bp, Homo sapiens; identical to SEQ ID NO: 15712
  chr18:12375778-12375893
  hypo

SEQ ID NO: 18556 - DNA, 33 bp, Homo sapiens; identical to SEQ ID NO: 11284
  chr18:13036746-13036779
  hypo

SEQ ID NO: 18557 - DNA, 122 bp, Homo sapiens; identical to SEQ ID NO: 12437
  chr18:24130266-24130388
  hyper

SEQ ID NO: 18558 - DNA, 238 bp, Homo sapiens; identical to SEQ ID NO: 8157
  chr18:2848166-2848404
  binary

SEQ ID NO: 18559 - DNA, 86 bp, Homo sapiens
  chr18:44701012-44701098
  hypo
cggggggacagggtgagactccgtctcaaaaaaaaaaaaaaatgggtcttcccacatccactgctttcccttccaatctttcctcc

SEQ ID NO: 18560 - DNA, 142 bp, Homo sapiens
  chr18:59728812-59728954
  hypo
cgtgaataaaaagcatggaatggctgaaatcgctaattatactattaacacaaaggagtttaggaataaaattcgtcatgaaggggaaccagtgcaggagcacaattccaataaccccggcacctgtgaagggagctctgcc

SEQ ID NO: 18561 - DNA, 183 bp, Homo sapiens
  chr18:74195379-74195562
  hypo
cgcctccctgcccactcctgtgggaagctccctctcggcatctgtccgtcatcagcatctgtccgtcatcggcatctgtctgtcacgggtcatctgccgcaccacactgagaacccatgagtgccaaatgtcccccgtcagctggcccacccgcatttcatcttcctggcttaagaaggtgag

SEQ ID NO: 18562 - DNA, 441 bp, Homo sapiens; identical to SEQ ID NO: 12451
  chr18:76151089-76151530
  hypo

SEQ ID NO: 18563 - DNA, 271 bp, Homo sapiens
  chr18:76999776-77000047
  hypo
cgagagcattgttttgtgagggcggttgatcatcagttaattattacacggaggcgttactgaagaggcatctgaatgtggctgggagagcatggttcctgagggctaagcgttcccaaaggatgagcggagaggcttgctctgcctgcgtccccatcagcggtgaccagcagatcaccacgcctcaggggccccacacccgcggtctcttcctagagctgcagtcccaagcttgcctgcgctctctggaaccctccagagtgttctcagc

SEQ ID NO: 18564 - DNA, 143 bp, Homo sapiens
  chr18:77198679-77198822
  hypo
cgggtggtctgggatcctgcctcagccgcgcgggtgagaggggcgggcgggtcaggcgaagactcagagtcaggaggccagactggccccagggagggctcctggccataccccaagctcaggacgcagggtggggcgggccc

SEQ ID NO: 18565 - DNA, 363 bp, Homo sapiens; identical to SEQ ID NO: 15730
  chr18:77627972-77628335
  hypo

SEQ ID NO: 18566 - DNA, 122 bp, Homo sapiens; identical to SEQ ID NO: 15731
  chr18:77628470-77628592
  hypo

SEQ ID NO: 18567 - DNA, 533 bp, Homo sapiens
  chr18:8799980-8800513
  hypo
cgtggcggggtggggtccagacactcagacccaggtctgccaagtgggccagtgttcacagtagtgagtaaggagctcactaacgcatgcacaaccctctgtctgtccaaggacggaagatggacgagctctactgtaacgacagctggttctctgggagggaacattcccggttagaggatttgcctctctgtgactggcatgagtattagccaggcagctgggatgcaagagccagggtacgtgtctcacagagctgcacagagccgggccgttcccgaaacgccgagcacctcgcaaggcgattagtagcatgggaaacctagccaagccgttttcccaaggacaagttctcagtcacagtattcctcaggccttggtctttgctttgtgacatatggaacgttctcacaattgaactcaagtagatggcaacatttatcacgtccacagaggtttaaaaaaaactgcatataccgatcaaccttgggatggctcataacaaatcatcaggttggcaaacatttggctcc

SEQ ID NO: 18568 - DNA, 118 bp, Homo sapiens
  chr18:8800570-8800688
  hypo
cgctttagagccacagtgaatgctttcagtttccccagccatcctgaagagcagaggctgcgcacacgcaagagggaatcttacagttttccttgagctccaagactcacgccactgc

SEQ ID NO: 18569 - DNA, 392 bp, Homo sapiens
  chr18:9417386-9417778
  hypo
cgcccagagcaccgccacgccggccacccctggggccagtggcagggtgccaggcgtgttcacgctctgaggctccagaaattaatctgacctcttgaaagaacacattcctactgactaggaatcttgaatgaaattcaagcagtgcaggtgttcagcaattctgaagacaaaattcagacagcagagctgctgccttctctggcagatggaggagtgtccgtgaaggagggcccttcgcaccccatggagctcctgatgtccgtgcctttatcagagactctcctcctcctctctttgattgctcttttttttttttccttttttcccttttttaagagacagagtctcgctctgtcgcccaagcagctggactgccctggcctgatctc

SEQ ID NO: 18570 - DNA, 169 bp, Homo sapiens; identical to SEQ ID NO: 16604
  chr19:10207022-10207191
  hyper

SEQ ID NO: 18571 - DNA, 97 bp, Homo sapiens
  chr19:10464756-10464853
  hypo
cgtggtagagcgtgcgcagaatgtcaatctcctgcttccagcccgagcggtgctgggggccgcagtctgccttgagggctttcaccgccaccatctc

SEQ ID NO: 18572 - DNA, 56 bp, Homo sapiens
  chr19:10687570-10687626
  hypo
cggatgttagccgtctctatgttagccaggctgggatttcaggcgtgagccactgc

SEQ ID NO: 18573 - DNA, 74 bp, Homo sapiens; identical to SEQ ID NO: 15734
  chr19:10687853-10687927
  hypo

SEQ ID NO: 18574 - DNA, 123 bp, Homo sapiens; identical to SEQ ID NO: 10408
  chr19:10872413-10872536
  hypo

SEQ ID NO: 18575 - DNA, 372 bp, Homo sapiens
  chr19:10874575-10874947
  hypo
cgccaggcaagaggcaatgggggcctggccctggtggtgcgggcagatgccaggcagtctagactgtcttccaggcaaggcattaagcagcataggcacccttgctgggggaggtgggtgggaggtaggacgccttactaagaggagaggaaaatgaacacattgcgggcatcagtgattgctggggccggcggggccttgtggggtatacaccagaccacgtggctcctagggattggcagctggctctctgtgaccaaactcagaaccaggctgccaccctttactggcccgggacttgttaaagtgacttccctctctgtgccttggtagcttcatctgtaaaatgggggtgatggtggcgctgccatc

SEQ ID NO: 18576 - DNA, 83 bp, Homo sapiens
  chr19:10875524-10875607
  hypo
cgccctgttccctacctgccactgtctgctgctcacccgcacctggtcacttgccgccttcgttccccggtccccggcagcac

SEQ ID NO: 18577 - DNA, 177 bp, Homo sapiens; identical to SEQ ID NO: 14780
  chr19:11199850-11200027
  binary

SEQ ID NO: 18578 - DNA, 285 bp, Homo sapiens; identical to SEQ ID NO: 12480
  chr19:11532739-11533024
  hyper

SEQ ID NO: 18579 - DNA, 72 bp, Homo sapiens
  chr19:1156143-1156215
  hypo
cgcctgtgtccgagtcccctaggccagcacggtgctcctggcagctcctccctccctacggtctctgagccc

SEQ ID NO: 18580 - DNA, 242 bp, Homo sapiens
  chr19:1156283-1156525
  hypo
gagggcttcacacatggcatgtgacctggagtccatgccttggggacctggcagggtgtggagacctggaccgggaggggatgggggcaggagaacaatgcggacaccaggcacaaccaaccaagagtcagggcccaaaaccaggaggcggaggcggaggcggatcctcacacacggctgcttggcagtctgggattcctcaagaggctaacgctggagtcaccacaccaccgagcaattcc

SEQ ID NO: 18581 - DNA, 110 bp, Homo sapiens
  chr19:1156628-1156738
  hypo
gtggcgtggcccatccacgtgccagaacacgacacagccatgaacagcagcgaggccgacctaggccacagcgcagacgcaccttgaggacgtcacgctctgtgagagac

SEQ ID NO: 18582 - DNA, 58 bp, Homo sapiens; identical to SEQ ID NO: 17607
  chr19:11689628-11689686
  hyper

SEQ ID NO: 18583 - DNA, 68 bp, Homo sapiens
  chr19:1179335-1179403
  hypo
cgtgacgagtactttttgttgctgctgctgttgttgttcttgttgtttttgagacggagtctcgctcc

SEQ ID NO: 18584 - DNA, 221 bp, Homo sapiens; identical to SEQ ID NO: 7076
  chr19:12995851-12996072
  binary

SEQ ID NO: 18585 - DNA, 190 bp, Homo sapiens; identical to SEQ ID NO: 8186
  chr19:13213427-13213617
  binary

SEQ ID NO: 18586 - DNA, 112 bp, Homo sapiens; identical to SEQ ID NO: 8187
  chr19:13213834-13213946
  binary

SEQ ID NO: 18587 - DNA, 717 bp, Homo sapiens
  chr19:1370777-1371494
  hypo
cgctcgcgggccgcccgggaccgggccaaccagaagctggtggagtacattgtgaaggccaagggcgcggagagccacctgcgggccatcctaaagagcaggaagccatctcgctggctgcagaccttcctgagctccagccagtacgtgacctgtgtggagacctacctggaggatgaggggcagctggacctggtggtgaagtacctgcagggcgtctaccaggaggtgggggccaaggtgctccagcgcaccaacggcgaccggatccggttcattctggacgtgcttctgcccgaggtgagccgcggaccggcgtgtcacgtgggcagggaggggcctgcgctgggattttgcaactccgcacgaggaggctgccacggtcctcgcccctgctccctggccgttcggcggccaacggagcgtggaggcctcctgtgtttacatcctgtcagtgctgggaaatgcgagtgcgtgcgcttgaccctgtgcggagacggagccgcttacttgacccctgtgcagagatggagctgcttagaagctgtcagcaccagggggtgcgaactccctccctactgcgggcgcacagatgcttcccagcctcggtgggtcagtcctgggaaacccactgcgagttggaaattcccaagtcagaatcgcatttagtacccagataaacccactgtaagttgaaaaactgtaagtggataatgc

SEQ ID NO: 18588 - DNA, 203 bp, Homo sapiens
  chr19:13879644-13879847
  hypo
cgtgggagctgaccgcgtggttgccaacggcgacacagccaacaaggtgggcacctaccagctggccattgtcgccaagcaccatggcattcccttctacgtggctgcccccagctcttcatgtgacctccgtctggagaccggcaaggagatcattattgaagagcgaccgggccaggagctgaccgatgttaatggggtcc

SEQ ID NO: 18589 - DNA, 255 bp, Homo sapiens
  chr19:1423978-1424233
  hypo
cggagagacgctgcggcgctgcttagcgggtcctcccagagagtgtgtccccttcccttggcctttctgcatcttctgagacgggtctgtgtccccctccccgccacctcctccctcttcctctccactgactgaaggtcatggccatgtccctgtcagggaccccgcctgtgtctcgggcacacagtgtctgtgcgggtccctgcttggccctcccacgtctaccctcggcccgcccgctccagccgctgcctc

SEQ ID NO: 18590 - DNA, 108 bp, Homo sapiens
  chr19:1455104-1455212
  hyper
cggcgccgccctctgagcccgcccccgctgacttgctccccaggtgtttcctgctgaatgagattgagaaggaggagaaggagaagctctggtactactctcagctgc

SEQ ID NO: 18591 - DNA, 228 bp, Homo sapiens; identical to SEQ ID NO: 13689
  chr19:1577427-1577655
  hypo

SEQ ID NO: 18592 - DNA, 548 bp, Homo sapiens; identical to SEQ ID NO: 13690
  chr19:1577687-1578235
  hypo

SEQ ID NO: 18593 - DNA, 240 bp, Homo sapiens; identical to SEQ ID NO: 12486
  chr19:17716539-17716779
  binary

SEQ ID NO: 18594 - DNA, 106 bp, Homo sapiens
  chr19:18059933-18060039
  hyper
cgggccccgtcatcccctcccccagccatctgccgtcctcctggccttgaacaacagcctgaagtcgagtccgggctaggcaggggaaagcgcaaaggtgcagcac

SEQ ID NO: 18595 - DNA, 264 bp, Homo sapiens
  chr19:18722000-18722264
  binary
cgttttaagcaatgcccaaaggtcacctcccatcattggcagggctctgccggcttttctttgcttctctccctgtcacctggacagaaccactttgcagtctgagcatcagtttcctcacccatataaaagggcaacgctaccggtacctgtcttatacggttgttgcaagaaaaagtgtttcgttggaatgaatgaaagacagtaattgtggaggggttaggcgcgcgcgggcctctggaattagcatgtgtgggcttgaat

SEQ ID NO: 18596 - DNA, 65 bp, Homo sapiens
  chr19:18722425-18722490
  binary
ggaggccctcgccgccgggtcgcagcggcctagcatgggaggggaggggaggggcggggcggggc

SEQ ID NO: 18597 - DNA, 155 bp, Homo sapiens
  chr19:18722521-18722676
  binary
cggggtccgccaggcacagccgcgcctgattaagccacgtgggggccggccgggggccgctgagatgaaagcgcggccgcaggccagagtagggggtgcgccgggcccccacccgggacaccctcttcccaggccgaaacctgagccgccctcta

SEQ ID NO: 18598 - DNA, 188 bp, Homo sapiens
  chr19:18722768-18722956
  binary
cgccaggcatgccagcgaaagcgggggcatctttgcagaggatccgggtttagaggggcgtccccactcccttatctggcggagaggaagctgggggtaccctctaaccgagattcggctcctggggctacagtccatcgccctggggtgtgatggttatggaagtcagaagtgtcgctatttgcccc

SEQ ID NO: 18599 - DNA, 322 bp, Homo sapiens; identical to SEQ ID NO: 8220
  chr19:19391586-19391908
  hypo

SEQ ID NO: 18600 - DNA, 713 bp, Homo sapiens
  chr19:1960909-1961622
  hypo
cggacgtttcagccccctcttcctgtggatgctgagagggtttccagaagaaggagaatgtccccgtgctggtggctcatccaggtgtgggccggtgtgcggcggggcgtgggcagaggagaggcttcgggctccggtttcctctcctgtggatgcgtcgcccccgcatggtggtcctctgcggaagtccccctgtccgtcccgttggcagccgcagtggaaagacggatggacgggctgtgacagggacagcccagtgtgaccccagccctggccgtcgcggttgtggcattctcgctgtcagggggctgttcccgtggctctcatggctgtggaggggcgtggagggggcggtccccatggccagaacctggccgtggcgggtggaggacttgaggccggctcagtggtcagcgctgctgcttgttcccctacacagaggcgttgggtggagctgcctcaggtatccctcctggctggggtgtgtgcgtcaccctgagtctccagcccatgctgaggagcctcgcaggcagggcccagcagcctatactccaggccattgctgtccgtttctccagaaggccctgctggtgggtggtcccaggagctgggcctcagtgggggatcccaggacagtggagcctgggaggggccccagtgttgaggcgtgaggtactgtctggaactagggggtgcccccaaagcggcacggc

SEQ ID NO: 18601 - DNA, 116 bp, Homo sapiens
  chr19:19974498-19974614
  hypo
cggccactcatttctgcacagatgaggacaggtctcatgaagctttggcgcagtctggtaccctcagttttttgtaacgagttgtttggcaggaggtccagtcacgagggccttcc

SEQ ID NO: 18602 - DNA, 126 bp, Homo sapiens
  chr19:2244081-2244207
  hypo
cgcccggctgccccagcttagggcctgcagatgggcgggtctttgggtcttcagtgtagcccatttgcttttcttgtgcctgtgtctgccttgtgcctactgctggcgtggtggcgtgggcagtgg

SEQ ID NO: 18603 - DNA, 612 bp, Homo sapiens
  chr19:2244236-2244848
  hypo
gtgctgtcctggctgtgcctccctctgactcagaaccaccaggaaggtggtgtcgggggctccctgggaacccccactgctcgaagcctggcccacagccccaggtggtgacacccgtgctcacgaaggcctcccgctggatcccccgttttcagaaatgcttgaccactgtcagcggtagccatgcctctacagaaggggggttctgcctccatgcctctacagaaaggggatcccgcctctgagggccttgacggcagcaggccgcgatcttctgtctaacgggcccctgttcttcccctccaggacccgtacttcatgaagaaccacctgggctcctatgaatgcaaactctgcctgacacttcacaacaatgaggtgcggcctctgcctggctccgggcggctcgcggcgggctgagtggctgacgtcagggggacctgcctgtgtctgtccgcccggcctcgagtcatgcgtgtttcctttccactccaggggagctacctggcacatacgcaggggaagaagcaccagaccaacctgtgagtacctcatgtccctttgatgcctggtgctccagcagccgttggctcaagtctctgtgagcctcgc

SEQ ID NO: 18604 - DNA, 68 bp, Homo sapiens; identical to SEQ ID NO: 8228
  chr19:23598868-23598936
  hyper

SEQ ID NO: 18605 - DNA, 331 bp, Homo sapiens; identical to SEQ ID NO: 12498
  chr19:267237-267568
  hyper

SEQ ID NO: 18606 - DNA, 38 bp, Homo sapiens; identical to SEQ ID NO: 8230
  chr19:32849484-32849522
  hypo

SEQ ID NO: 18607 - DNA, 74 bp, Homo sapiens
  chr19:33585141-33585215
  hypo
cgagtaaagagacggccacgccgacagaaacctggtgtgtatgttaattgattaactgttatcactgctgcagc

SEQ ID NO: 18608 - DNA, 299 bp, Homo sapiens
  chr19:33791861-33792160
  binary
cgggaaggaggcaggaaacctccaaataaaatgacaaggcacgatttgctccccctactcagtaggcattggagcggtgagtttgcatttccaaggcacaaggttatcctaaatactagagttgccgggctcccagctcagccccaagaattctcccctcctcgcagggagaagccaccgcctggccccctcatcttagacgcaccaagtccggcgcagaggaagggaggggacacgcggagcaggccaggctttcaggaggcaccggaatctcctagtcctggctcgcacggctcggg

SEQ ID NO: 18609 - DNA, 197 bp, Homo sapiens
  chr19:33792630-33792827
  binary
cgtgggcggcggcgtggggtgaccgggctgcaggtgcatggtggtctggccgcagtgcgcgatctggaactgcaggtgcggggcggccaggtgcgcgggcggcgggtgcgggtgcgggtgcgagggcggcggcggcggcggcggctggtaagggaagaggccggccagcgccagctgcttggcttcatcctcctcgc

SEQ ID NO: 18610 - DNA, 557 bp, Homo sapiens; identical to SEQ ID NO: 17634
  chr19:34310910-34311467
  hyper

SEQ ID NO: 18611 - DNA, 66 bp, Homo sapiens; identical to SEQ ID NO: 17635
  chr19:34311498-34311564
  hyper

SEQ ID NO: 18612 - DNA, 130 bp, Homo sapiens
  chr19:36347680-36347810
  binary
cgggggatcccgccctgcgtcccccattcatccgcgtctcagccgcgggagtttctcaacgggaagagggcggagctcccggggggcggacccgggcggggcgagcgggatcgggccctcttggggtctc

SEQ ID NO: 18613 - DNA, 35 bp, Homo sapiens
  chr19:36348065-36348100
  binary
cttcagagggagagcaggtaccgcacgaggggagc

SEQ ID NO: 18614 - DNA, 63 bp, Homo sapiens; identical to SEQ ID NO: 12505
  chr19:36478303-36478366
  binary

SEQ ID NO: 18615 - DNA, 86 bp, Homo sapiens; identical to SEQ ID NO: 9382
  chr19:38719834-38719920
  hyper

SEQ ID NO: 18616 - DNA, 264 bp, Homo sapiens; identical to SEQ ID NO: 9383
  chr19:38719956-38720220
  binary

SEQ ID NO: 18617 - DNA, 187 bp, Homo sapiens; identical to SEQ ID NO: 9384
  chr19:38720439-38720626
  binary

SEQ ID NO: 18618 - DNA, 182 bp, Homo sapiens; identical to SEQ ID NO: 12513
  chr19:38852786-38852968
  binary

SEQ ID NO: 18619 - DNA, 291 bp, Homo sapiens; identical to SEQ ID NO: 12514
  chr19:38853193-38853484
  binary

SEQ ID NO: 18620 - DNA, 33 bp, Homo sapiens; identical to SEQ ID NO: 12518
  chr19:4304684-4304717
  binary

SEQ ID NO: 18621 - DNA, 281 bp, Homo sapiens
  chr19:44455341-44455622
  hyper
aggcaggcggatccggggaattctgggaaatgtagtccagacgctctgtggagtcgcgggagctacggctgcgggagttaccctttattctgtgatattttgagctgttctgcgtctcgcaggcccttctgaatttcctggacctactctcggaaccctcaacgagctagcgatagatttagaggaaaggaagcaccgtcggaaagcaaaggtttggaagggtgagggcggcggtttgcgatccccgcggcagagccttcttgcgtttagggctgtcctag

SEQ ID NO: 18622 - DNA, 72 bp, Homo sapiens
  chr19:44455667-44455739
  hyper
tttctggggctctcagctcgcccaatccgcatccctccactactggcgcggggccgattcccccggtacaac

SEQ ID NO: 18623 - DNA, 133 bp, Homo sapiens; identical to SEQ ID NO: 7114
  chr19:45603745-45603878
  hypo

SEQ ID NO: 18624 - DNA, 334 bp, Homo sapiens; identical to SEQ ID NO: 7115
  chr19:45603910-45604244
  hypo

SEQ ID NO: 18625 - DNA, 83 bp, Homo sapiens; identical to SEQ ID NO: 8264
  chr19:47676020-47676103
  binary

SEQ ID NO: 18626 - DNA, 312 bp, Homo sapiens; identical to SEQ ID NO: 12529
  chr19:48901504-48901816
  binary

SEQ ID NO: 18627 - DNA, 151 bp, Homo sapiens
  chr19:4986363-4986514
  hypo
cgatggcggagtaaacgggtgatggccactgagcgctggccgtggggactcttggtcctggctgccaagtagaagcttcaggggtgctcttcacagtcagctgactctgctgtccctgatagcagaagacagcgaaggcacctgccccctg

SEQ ID NO: 18628 - DNA, 191 bp, Homo sapiens
  chr19:4986633-4986824
  hypo
gagcctggattagggccctcgaggggcggcgctgctttagccgggggaacagggagggcctctcccagcaggtgacattcagtcagagacctctgagcgactcacacctgcccacctttgcaggatttgggacaagagtgctccaaagaagtgcaggcagcacgtgcggaggccccaaggcggaacgaggc

SEQ ID NO: 18629 - DNA, 57 bp, Homo sapiens
  chr19:50130742-50130799
  hypo
cgtgttctagaacaagaatgttaaaaatgtgcaggttggctgggcacggtggctcac

SEQ ID NO: 18630 - DNA, 253 bp, Homo sapiens; identical to SEQ ID NO: 8275
  chr19:50306223-50306476
  hypo

SEQ ID NO: 18631 - DNA, 89 bp, Homo sapiens
  chr19:50836203-50836292
  hyper
cggttccattcggagccttggtctctggacaccaaaggtgaaaatgtgaggactctctgcctacgatccttcgtcccctaaaaccctcc

SEQ ID NO: 18632 - DNA, 589 bp, Homo sapiens
  chr19:50836451-50837040
  hyper
tcgaggcgaggtggggatgggggaatccggggctcgagatggggggaggggtgacccagccccggcagctctgggcagcaagaggctgcagaggggggagtgacatcaccgccggaggaggggcagcaccgctcccccaacccaggggcttcaagctccgcctttatggcggaccccggggtcctggaatgccaaggcagagaggagaaacaggagacgaggtccgagggaacggtatccccgccccttagaacaggaactggtaaacccttaccaattacagccacccccgactgccacctgtggctgccgtcgcgacctgtcgcctcccacgcatgttgtggctgcgcccgcccccgtcagggcgtgaccacggcgtggactacaacgaccgtgatgctccacggagccaggagcctttgacgaaaggcagcgtaggcgagggccttcatgggactcgtagtacaaggcccatcacaagggtgcgccgtggagaaaaggggtgatacccttcgcctccctctcttcctcaactccgtgggtccatgcacaaagctttctcttcaaaaagtacgctctgaaaagaagc

SEQ ID NO: 18633 - DNA, 73 bp, Homo sapiens; identical to SEQ ID NO: 12532
  chr19:51228809-51228882
  binary

SEQ ID NO: 18634 - DNA, 486 bp, Homo sapiens
  chr19:55986223-55986709
  hypo
cgtgggcaggtaaatgaggggggctgagctgagggcccctttcactactgcagagaccaaaatggcccgaggcaagggggacggaagtgggatccgcacctctgggctttcctagcctggcagccagctgggcagtgcattcccatccacgtctccaccctgcatggcagccgctttgtgtggttaatgctgacgtgaaaggaatgttgggctgagctggatgccaagggtttttacacgcacgaatgcacggagacatcagcaccaagaccctgtaaggtaggggtgggtccacaccaccgcagatcagccctgagttccagcctgcttgtggacttgggaaacggtgtgggaggctggaaaaatccactcattcaacaaacaagtaccgtctgcttctccatcagggcccatgctggttgtttggaatacctgggcagcaaagacacgaaaggtcctcgctgtcatgggacatagataaatgtc

SEQ ID NO: 18635 - DNA, 439 bp, Homo sapiens; identical to SEQ ID NO: 17663
  chr19:5608081-5608520
  binary

SEQ ID NO: 18636 - DNA, 229 bp, Homo sapiens; identical to SEQ ID NO: 17664
  chr19:5608569-5608798
  hypo

SEQ ID NO: 18637 - DNA, 150 bp, Homo sapiens; identical to SEQ ID NO: 15779
  chr19:56201494-56201644
  hypo

SEQ ID NO: 18638 - DNA, 834 bp, Homo sapiens
  chr19:581325-582159
  hypo
cggctccgagagcaggttcttcgtgagttcctcgcagggccggtcagagctacacattgagaacctgaacatggaggccgaccccggccagtaccggtgcaacggcaccagctccaagggctccgaccaggccatcatcacgctccgcgtgcgcagccacctggccgccctctggcccttcctgggcatcgtggctgaggtgctggtgctggtcaccatcatcttcatctacgagaagcgccggaagcccgaggacgtcctggatggtgagccgtctgccctcctgcccacatgccctgctctcggggtggcccagggccactcctggtccgtccctgccagccccaccgctgacccagagcttggaactgaggagccccaggcagggagttgatgggaccccgaaagaaagtgtgggatggagggtctagccccgggcagctgcggctcagtgggcagcgggaccccgggaggaggaggcggcacctccgccccacagcctcacccggcccttccctcccgctcacttggctgcaagccagtgtcctccgtggtgagccggcccttgctgctctgcatgatcaggctcgggaacctgaggtcagccatgctgtgctccggcagcccctgcctgcctcctcgcggagcccttctgccccttgggctgcgtgtgccggggcgaggcctgtgtggggcctgtgatggcagctcctggaaaacgctgtggggcaggggtgaggcccacgaggccatggggacagctcaccatggggagcacacctgcaggtggggagggctgcctttccccacagcactcagaagatgcacgtggcc

SEQ ID NO: 18639 - DNA, 538 bp, Homo sapiens; identical to SEQ ID NO: 8289
  chr19:59049765-59050303
  hyper

SEQ ID NO: 18640 - DNA, 352 bp, Homo sapiens
  chr19:6744359-6744711
  hypo
cgcgtccccctctgagatccccctggccctgtgtctcttccccaaccacagtgggctggagtctctcttcccgactctgtcttcccctccagactggcttggggctggggccagcgtggagcgcgatcatatttgcagagtgaatcactgtgcttctagtccctctgttagcacccctgagccacccttgtccctgtccttacagaagctccaagacatggatgaacgcagggccacccgcctgggtgccgggtatgggctcctgtcggaggccgagctggaggtggtgcccataatagccaagtgcttggagggcatgaaggtggctgcaaatgctgtggatcccaagaac

SEQ ID NO: 18641 - DNA, 743 bp, Homo sapiens; identical to SEQ ID NO: 15791
  chr19:941824-942567
  binary

SEQ ID NO: 18642 - DNA, 405 bp, Homo sapiens
  chr19:9545915-9546320
  hyper
cggcaatcaccgtgtttgcaaaaatcgtgaggaagcgcccttacgacagatcccgaaacggctcctggcccagggccgtcgcagtgacaactcgagtggctttttgaacctggcggcgccaggaggacccgcgcggccccggcggacgcgagcggagcaggcaaggtctctctaaggaggcccctcggcggcctggggcaaaccggtactttcgccaccccttccaccgctggctcccacccgtcatccgacctcgccaaagctgtattaagcccaaacgccaccaggaagaaaacgggtttggcggcgcggagaaagcgccggaaaacacagcagcgctccgtgacgtcacttccgcctccagcctcaaacctggaggagcgctcgggaactgcaacctcagcc

SEQ ID NO: 18643 - DNA, 614 bp, Homo sapiens; identical to SEQ ID NO: 15795
  chr2:10334473-10335087
  hypo

SEQ ID NO: 18644 - DNA, 203 bp, Homo sapiens
  chr2:10517952-10518155
  hypo
cgaggggggccaggcacgggggagggtattcaagggcggcaagccaccaaggggacggggcaggcacagggagggcatttcagagagtgcaaggaggcggcgaagatgctggttgagggcacgggtgaggcggggaggcgtttcgactttggactgaaggccttaattgaccaaggcggtaatttccagtcctgtgacctcac

SEQ ID NO: 18645 - DNA, 86 bp, Homo sapiens
  chr2:106730126-106730212
  hypo
cgtatctaatgtttgatccactgcagaacaaacgtgcactttctgggcacctgagggcagggagcctggggcgtgaggacctgggc

SEQ ID NO: 18646 - DNA, 160 bp, Homo sapiens
  chr2:106730256-106730416
  hypo
gctcactgcccaggcctgccactgactcggtcgcagcaagactgggaaagaagcagtactcacctgaccgcctcagtgttctaagactgaagcacaggcccagtggctgtatttggtgccagttatcactaccagctgaaacagttcttttttcaatttc

SEQ ID NO: 18647 - DNA, 268 bp, Homo sapiens
  chr2:127895375-127895643
  hypo
cgacccattccttgaggccgcctcccatagagccactccgcacgcgtgggggtgtgggcacggcctaccctgctggccacaggacagagtgctgggcacatctcctcagccgcgctcgcagacagctgtcttccaagttcagggtgggacgcaggtcactggtcaccaccactcgcccagcagacaggctgagcctagttatgcagcagcaccagccagtgaggaggaacacctttgagaacatcctgtcatgaaccctcgcccaaac

SEQ ID NO: 18648 - DNA, 399 bp, Homo sapiens
  chr2:134023956-134024355
  hyper
cggaagcatacagtctgcggggacaaggactgaacggggtagtgggagccaggtgccgaagggctggggctagggtggcggcgcgcagggggcgcgcctgggcggggagtgggctggcgtctccttacctggccttcggtggagcatgctgctgcgggctgggggcggggtgggcgctgcgtccccaggggttgactccgcagcgccttcacttcgggggcagcaaggcgcgcgctgcagagccgggagttgccaaacttgccatgtccagagcgcggaggcagcctgggccacgcgctcaccgcagcccgggcacctcgcgctcctccgctttgttgtgttccgccgccagtccccctgcgcctgcctgccagtgtccccgagccctctcctgccgcg

SEQ ID NO: 18649 - DNA, 295 bp, Homo sapiens
  chr2:134024401-134024696
  hyper
actttcctcctggaggcgcgcgttaaagatctgcctgggagcgcccggcgggcggctcggcttgcgctctgatgaggaggctggggcccatcgattcccaccccctacccactccccctcccctcccctccgccgggcccccccatcagaagctgcttaggatcggcgctgtcaaatccagcccatctgctgcaatcataatcagtctcaaccgaacggttctgacaaatctccgcctggagctggagttggagaagctggagagtgaggggcggggaagggaggtgggggtgag

SEQ ID NO: 18650 - DNA, 51 bp, Homo sapiens; identical to SEQ ID NO: 6089
  chr2:149632592-149632643
  binary

SEQ ID NO: 18651 - DNA, 101 bp, Homo sapiens; identical to SEQ ID NO: 15808
  chr2:15783084-15783185
  hypo

SEQ ID NO: 18652 - DNA, 133 bp, Homo sapiens; identical to SEQ ID NO: 15812
  chr2:171730981-171731114
  hypo

SEQ ID NO: 18653 - DNA, 632 bp, Homo sapiens
  chr2:171822567-171823199
  hypo
cggcgactccaccccagtcagcgagaagcctgtttctgcggctgtggatgccaatgcttctgagtcaccttaactttgaaccattctttggaattggcgtggtatatttaaccacgggagcgtgtctggaaacgcaaactatcattaatttcatactagtttgtaccgtatctgtaggcatcctgtaaataattccaaggggaaaactaaacgaggacgtgggttgtatcctgccaggttgagtggggctcacacgctagggtgagatgtcagaaagcgcttgtattttaaacaaccaaaaagaattgtaagggtggcttgctgccaggcttgcactgccgttcctgggggtgtgcatcttcgggaaaggtggtggcggggcgtccactaggtttcctgtcccctgctgctccttccgtaagaaaatgaaatattctatgcctaatactcacacgcaacatttcttgtactttgtaagtcgtttgcgagaatgcagaccacctcactaaactgtaaacggtaaagagatttttacttttggtctccgtgagtcgcatctctactaaggtttacacaggaattccacctgaagacttgtgttaaagttctacagcgcgcactgttaactgaac

SEQ ID NO: 18654 - DNA, 834 bp, Homo sapiens
  chr2:174219533-174220367
  hyper
cgcgggaaagacagcccgagccccgcccctccgggcccgggtcggcgcgcccagcctgccagccgcgctgctgctgctcctcctgctgtgggaccgctgaccgcgcggctgctccgctctccccgctccaagcgccgatctgggcacccgccaccagcatggacgctcgccgcgtgccggtgagggctgggcgggcgaacccgaggggcgggcgcggtgggtgctggacgcaggcgggcgcgggccgaccctctccaactccgcagcctagcgctgccttaactggtggcctgcctaggcgttgcccgcttgggcaagcccctgattttgtgcacctgggataactgagggccatggggacgttcctgcgtggcgtgcgcacccgaagtgcgggcggcgtggagacttgagtcgtttgcaggatggctagcagcgctggaaagccctaggcacgtgcgtccgccaaaggccggacagcggccgggagcgctggccggtcccgattttgcctgccaggcagagccagcctgcctgccccctgggaggttgtcccgcagcggcccagccctttcccgcacacaactcggagccagtgcgtggctcgccgcgtctatacccgcgctcagtgggtggcccttgggcgcgcaccccgcccggcaagagacgcgtccgcttctaaccgctgagggccagcgcgtctgaggtttaaggtcttgcgaaccggtctcctagaacttgggctgcgcacgcagtgtgaagcgaccgtagtcccgggcggtggttaagtgcatttaaagggcttggtgggtcaaagcgttcgccgaccatttgctc

SEQ ID NO: 18655 - DNA, 34 bp, Homo sapiens; identical to SEQ ID NO: 6099
  chr2:182323095-182323129
  hyper

SEQ ID NO: 18656 - DNA, 204 bp, Homo sapiens
  chr2:191796737-191796941
  hypo
cgttttaatatttgttcgtcctaaattgaagtttaacttcttgcatactgtgtagatggatatgtaaatggaaaaggattatcatattagtgagagaccgtatgaagcctcaaaagttttataagtcactgtagatgaaatatttttttccaccgtgtttaatgcaatattcctaataatcttacggtcctatttgtttgttac

SEQ ID NO: 18657 - DNA, 297 bp, Homo sapiens; identical to SEQ ID NO: 13807
  chr2:19551656-19551953
  hyper

SEQ ID NO: 18658 - DNA, 134 bp, Homo sapiens; identical to SEQ ID NO: 12591
  chr2:200326735-200326869
  hyper

SEQ ID NO: 18659 - DNA, 280 bp, Homo sapiens; identical to SEQ ID NO: 12592
  chr2:200326960-200327240
  hyper

SEQ ID NO: 18660 - DNA, 197 bp, Homo sapiens; identical to SEQ ID NO: 11466
  chr2:200329745-200329942
  hyper

SEQ ID NO: 18661 - DNA, 93 bp, Homo sapiens
  chr2:20456228-20456321
  hypo
cttgctgtatttaaactgtcttcactgtgtaaatcatccgctaatatttatcgggcggtaactaacatgactaattcagaattacacacttcc

SEQ ID NO: 18662 - DNA, 433 bp, Homo sapiens
  chr2:219748345-219748778
  binary
cgtgtggcggcatgcagccgcgaactaatccccgcgggccgcggcagacggctcccggccccagccgcgccgctctcagagggcaaccccctccctgccccgctctcccgccccctcccgccccaccgccgcccgggcccctccagccgtccagaagcggctgcccgggacccccgggtcctgcccagctcgggccacacgctcctccctgtcccgccgcctgcgcgccgacacgaacggacgggcctctgcaccattcatgccccggctgggccgggccggcgctcaccgccgccgcgggcccgctcctaccctcgggtttctaggtcgtccgcgctgcccgcagccgcgtttcccttcggggccctcgggtaccccatgaggactccgtagccctggctttggtttctgcccgccggggactgggataggc

SEQ ID NO: 18663 - DNA, 42 bp, Homo sapiens
  chr2:219857682-219857724
  binary
cggtggaacccagcgcccctcaacccagcccagccgcggcca

SEQ ID NO: 18664 - DNA, 74 bp, Homo sapiens
  chr2:219858468-219858542
  hyper
ctggcctcccctgggcctcgggctaagaccgcgctgctgactcgctgagcggaagttcttcccagagtctaatc

SEQ ID NO: 18665 - DNA, 211 bp, Homo sapiens
  chr2:236949342-236949553
  hypo
cgtttctcccggggtgcttacgccttgtatttgtgtcttcctccgtgcccagtcccggctgacgagccagagcgaggccatggccctgcagtcgatccggaacatgcgcgggaactcccactgtgtggactgcgagacccagagtaagtgtgtgcggtggtagcaggggctggcgctgtgtagctggagaccacatggtcccactaggccc

SEQ ID NO: 18666 - DNA, 34 bp, Homo sapiens
  chr2:238934785-238934819
  hypo
cgccgcccccgcccccacccctgcccggctgccc

SEQ ID NO: 18667 - DNA, 121 bp, Homo sapiens; identical to SEQ ID NO: 15821
  chr2:240167455-240167576
  hypo

SEQ ID NO: 18668 - DNA, 310 bp, Homo sapiens; identical to SEQ ID NO: 15822
  chr2:240167605-240167915
  hypo

SEQ ID NO: 18669 - DNA, 49 bp, Homo sapiens; identical to SEQ ID NO: 13826
  chr2:240169135-240169184
  hypo

SEQ ID NO: 18670 - DNA, 206 bp, Homo sapiens; identical to SEQ ID NO: 8329
  chr2:241771771-241771977
  hyper

SEQ ID NO: 18671 - DNA, 463 bp, Homo sapiens; identical to SEQ ID NO: 7200
  chr2:242004407-242004870
  hypo

SEQ ID NO: 18672 - DNA, 339 bp, Homo sapiens; identical to SEQ ID NO: 15827
  chr2:242169887-242170226
  hypo

SEQ ID NO: 18673 - DNA, 276 bp, Homo sapiens
  chr2:242566832-242567108
  hypo
cgcgaacacgtggttcatagacgtgctaacaatgtaccctcaaggaatcgctgctggcggagaagaacactacgtccacagaacgccaccgggcactgcctctggagcgtggcttcaacccacctctgaagcccactggcccgcatccttcagtttggggaacctgcccaaaagcagacactggctagcgagctgaatagacaagtgtgcggcgctttccacataaatccctaaagaatgacccaaagagtctgtcactgaagaacaaatccacac

SEQ ID NO: 18674 - DNA, 80 bp, Homo sapiens; identical to SEQ ID NO: 13841
  chr2:26521880-26521960
  hyper

SEQ ID NO: 18675 - DNA, 374 bp, Homo sapiens; identical to SEQ ID NO: 13842
  chr2:26522127-26522501
  hyper

SEQ ID NO: 18676 - DNA, 59 bp, Homo sapiens; identical to SEQ ID NO: 8339
  chr2:27938267-27938326
  binary

SEQ ID NO: 18677 - DNA, 38 bp, Homo sapiens; identical to SEQ ID NO: 7206
  chr2:30453530-30453568
  binary

SEQ ID NO: 18678 - DNA, 462 bp, Homo sapiens; identical to SEQ ID NO: 8341
  chr2:30454942-30455404
  hyper

SEQ ID NO: 18679 - DNA, 488 bp, Homo sapiens
  chr2:3418350-3418838
  hypo
cgtgctctgccgtgtgtcggcccgtttcctgaatcctcaggcatcagtgcctcacagagctgtgtgccagcagtgtcctcacagagctgtcaagcgtgtccatgccgtgccgcttgtgcctctgccccgcgagggacaccattccccgtcgttgacgtgcattcctcttgttcatcgtgcgagactccccacccctgtgccaccggtctcggtgtctcccacactggagtgtccgtatttcataaacacacgtatgtgtgcatgtatgtatttcttatggacatcacgtacgttggcccttcatatctacaggttccgcatccacagattccaccacccgcagttgggaaacacagtgaggtatgcacagcaacctttcagctgtggttggttgaatccacgcgtgtggaacctgcagatacggaggaccaaccaaggacttgagcagtcatggatttggtatcccaggagtcctggaaccggtcccc

SEQ ID NO: 18680 - DNA, 686 bp, Homo sapiens
  chr2:44553759-44554445
  hypo
cgctgtgccagcccaaaaacatttttcttagagtagcctatggcttcacacctcccccattctataaacagtagagacagagcgtactcacctccaaagtcaccgctctcaccagctctggattagaattacacaatgctcctgcaagcacccctccagcactgaaagcagtcagggttgttagacttggctgagaaaagccttggccatgaagcgtcttaatgcaagcctctaaatcagcaaggccattgagttttttagttaggcggccatcagcgtgccactggaggcctaactcaccaccacctctgaaattgaagggcaaaaaagttttagtggaaaaaaaaagttaatactgtaggctggggtcagcgaactacacctggaggcctgttttttgtgtggccctggagctaagactggtttttgctttttaaaggttgagtgaaaacaaggaatgtgcaacagaaactgtacgcggcctgcaaagcttaaaatgtgactatgtagctctttagagaaaaaggtttgccaactcctgatatagacaatccagaattgattcaacgaatatattttgagtgcctgcccatttatcagggattaagtacagaccttaaaagtagaaacaaacgaaaatcccctaccgtggagaagacagtaattttgtggggtaagaaaacaac

SEQ ID NO: 18681 - DNA, 121 bp, Homo sapiens; identical to SEQ ID NO: 7222
  chr2:73147029-73147150
  hyper

SEQ ID NO: 18682 - DNA, 190 bp, Homo sapiens
  chr2:73150996-73151186
  hyper
cgaccagttaactgaaagcaaatcgttggggctggcggccagggcagcgcccctgggaaagggcggagaaagagcgccatggacttttcttccccaccccttggcctcttccgctgccccaggcattgtgaatgtgggtccacgcctcgtccggcctgccccatctcttggcttaacagagggatctgga

SEQ ID NO: 18683 - DNA, 36 bp, Homo sapiens
  chr2:73151849-73151885
  hyper
aggaggcagagtaaatgcaaactgtatcccgagccc

SEQ ID NO: 18684 - DNA, 286 bp, Homo sapiens
  chr2:73151946-73152232
  hyper
cgggcagcgcaggcagcaccgaggccactggagctggctccagccctggcattcctgcagcccttttcccgccactgtgtcggggcgctcatagtcctgcggggagccggtccgcactggctttgctgctgttcctgggcaaaactggcggggccttggctgcccaccagccaggagcgtctggggagaaagcccaggtgtcctcagactaccaacagaggggcttaaccagggaggggccagcccctgcttggggcccgagggttgctctgatccggcccaggcc

SEQ ID NO: 18685 - DNA, 46 bp, Homo sapiens
  chr2:73152264-73152310
  hyper
cgcgcagagcatctgagtggcctgggcctggtgggaaatagacccc

SEQ ID NO: 18686 - DNA, 276 bp, Homo sapiens; identical to SEQ ID NO: 12634
  chr2:74425444-74425720
  binary

SEQ ID NO: 18687 - DNA, 396 bp, Homo sapiens; identical to SEQ ID NO: 12635
  chr2:74425790-74426186
  binary

SEQ ID NO: 18688 - DNA, 228 bp, Homo sapiens; identical to SEQ ID NO: 12636
  chr2:74426214-74426442
  binary

SEQ ID NO: 18689 - DNA, 198 bp, Homo sapiens
  chr2:85871996-85872194
  hypo
cgtttgtgtaggacagtttccttaacctcacagcctttgtctgattattccggctttattttaaccattaacagaaatgtggatctgagagaatacttgtctgaagaagtacaagcagtacacaagaataccacctatgacctcattgccaacatcgtgcatgacggcaagccctccgagggctcctaccggatccac

SEQ ID NO: 18690 - DNA, 95 bp, Homo sapiens
  chr2:85878703-85878798
  hypo
cgtgcgtgcgtgcgtgtgtgtgtgtgtggtggtatgaggtacagccacctgtcttggagaggatattttgacataactctatactgttgacttcc

SEQ ID NO: 18691 - DNA, 73 bp, Homo sapiens; identical to SEQ ID NO: 14893
  chr2:87034584-87034657
  hyper

SEQ ID NO: 18692 - DNA, 622 bp, Homo sapiens; identical to SEQ ID NO: 14894
  chr2:87034689-87035311
  hyper

SEQ ID NO: 18693 - DNA, 144 bp, Homo sapiens; identical to SEQ ID NO: 12642
  chr2:88752878-88753022
  hyper

SEQ ID NO: 18694 - DNA, 251 bp, Homo sapiens; identical to SEQ ID NO: 10530
  chr2:96192254-96192505
  hyper

SEQ ID NO: 18695 - DNA, 193 bp, Homo sapiens; identical to SEQ ID NO: 10531
  chr2:96192624-96192817
  hyper

SEQ ID NO: 18696 - DNA, 59 bp, Homo sapiens; identical to SEQ ID NO: 7233
  chr2:96991316-96991375
  hyper

SEQ ID NO: 18697 - DNA, 43 bp, Homo sapiens; identical to SEQ ID NO: 12646
  chr2:97203334-97203377
  binary

SEQ ID NO: 18698 - DNA, 39 bp, Homo sapiens; identical to SEQ ID NO: 12647
  chr2:97203545-97203584
  binary

SEQ ID NO: 18699 - DNA, 213 bp, Homo sapiens; identical to SEQ ID NO: 12648
  chr2:98703022-98703235
  hyper

SEQ ID NO: 18700 - DNA, 201 bp, Homo sapiens; identical to SEQ ID NO: 12649
  chr2:98703475-98703676
  hyper

SEQ ID NO: 18701 - DNA, 77 bp, Homo sapiens; identical to SEQ ID NO: 12650
  chr2:98703736-98703813
  hyper

SEQ ID NO: 18702 - DNA, 127 bp, Homo sapiens
  chr20:13417399-13417526
  hypo
cgcagccaactcaagactaacgacctacttgagagacacccccaagaaaacgtgtcctcgacttagggtaagagcttcaagatgacaagtatgactcatacactaaaggtttttagttcggcttagc

SEQ ID NO: 18703 - DNA, 79 bp, Homo sapiens; identical to SEQ ID NO: 7234
  chr20:20350750-20350829
  hyper

SEQ ID NO: 18704 - DNA, 206 bp, Homo sapiens; identical to SEQ ID NO: 6114
  chr20:21080357-21080563
  hyper

SEQ ID NO: 18705 - DNA, 238 bp, Homo sapiens
  chr20:25320332-25320570
  hypo
cgtatcaggaaagagcggcctcctcaggcctcccgatccgtcttctgtgagacaactgcaggcaggcgtaggttacttattagctcctggtaggaagcacgtagaccaaggacatcaacagaacctgcctgaccaggtcctcagagagcaggaggctaagaactggcacggtgtgtccttgcatttacgcgtgggcgagcccctctgtacccacccaacagaggacccttttccaggc

SEQ ID NO: 18706 - DNA, 113 bp, Homo sapiens; identical to SEQ ID NO: 15850
  chr20:30139516-30139629
  hypo

SEQ ID NO: 18707 - DNA, 62 bp, Homo sapiens; identical to SEQ ID NO: 6121
  chr20:30639044-30639106
  hyper

SEQ ID NO: 18708 - DNA, 139 bp, Homo sapiens; identical to SEQ ID NO: 6122
  chr20:30639494-30639633
  hyper

SEQ ID NO: 18709 - DNA, 138 bp, Homo sapiens
  chr20:33183813-33183951
  hypo
cgatggagcgagaccctgtctcaaaaacaaaacaaaacaaaaaaagttacagtggagaaacctggcagacactaacgtcaccaagtgatcaaggtaaacattagcattgagaagatatggcaatatcatgaacccctc

SEQ ID NO: 18710 - DNA, 436 bp, Homo sapiens; identical to SEQ ID NO: 15857
  chr20:35443740-35444176
  hypo

SEQ ID NO: 18711 - DNA, 381 bp, Homo sapiens; identical to SEQ ID NO: 15858
  chr20:35444205-35444586
  hypo

SEQ ID NO: 18712 - DNA, 236 bp, Homo sapiens
  chr20:371973-372209
  hypo
cgcggctgcccccgcacaagcatgtggctcggcccactgaggtcctggctggtacccagctcctctacgcctttttcactcggacccatggggacatgcacagcctggtgcgaagccgccaccgtatccctgagcctgaggctgccgtgctcttccgccagatggccaccgccctggcgcactgtcaccagcacggtctggtcctgcgtgatctcaagctgtgtcgctttgtcttc

SEQ ID NO: 18713 - DNA, 37 bp, Homo sapiens; identical to SEQ ID NO: 10545
  chr20:37358242-37358279
  hyper

SEQ ID NO: 18714 - DNA, 390 bp, Homo sapiens; identical to SEQ ID NO: 8385
  chr20:37433723-37434113
  binary

SEQ ID NO: 18715 - DNA, 102 bp, Homo sapiens; identical to SEQ ID NO: 13883
  chr20:400915-401017
  hypo

SEQ ID NO: 18716 - DNA, 50 bp, Homo sapiens; identical to SEQ ID NO: 15865
  chr20:47766299-47766349
  hypo

SEQ ID NO: 18717 - DNA, 70 bp, Homo sapiens
  chr20:49284107-49284177
  hypo
cgtgagccaccgcgcccggccgctgctttaagttcttaacacgtcctcaccgcggctcagctcactgtac

SEQ ID NO: 18718 - DNA, 285 bp, Homo sapiens; identical to SEQ ID NO: 14914
  chr20:55839319-55839604
  hyper

SEQ ID NO: 18719 - DNA, 113 bp, Homo sapiens; identical to SEQ ID NO: 8396
  chr20:57225466-57225579
  binary

SEQ ID NO: 18720 - DNA, 119 bp, Homo sapiens; identical to SEQ ID NO: 8397
  chr20:57240808-57240927
  hypo

SEQ ID NO: 18721 - DNA, 433 bp, Homo sapiens
  chr20:57571504-57571937
  hypo
cggcagccgcgcatgtcagagaagggtctggccccaaaagccactcgcgcggtggctgagacagctggagcaaggaaccctctgtcaaggccccagtttttagctaaacgtaaacagaaccattcaagcgagaggagtaccaggacgtttttttctaggaatgaccttaagaaaatgaaaacatcttacccatggttcaccccatgaattccggacaatccagtactcagtcccatcactgatgccccacccagccacagaaacgacatggtttatatatgtggtgtcctggtattcggcatagatgcctccggtgtagttagccagtctttctgttgccattattccacagctgagagcaagcagttaaagaattaccacttttaaattgagagaatttaccgtcattagaaataatctgatatggctgggc

SEQ ID NO: 18722 - DNA, 71 bp, Homo sapiens; identical to SEQ ID NO: 8408
  chr20:61585229-61585300
  hyper

SEQ ID NO: 18723 - DNA, 84 bp, Homo sapiens
  chr20:61664570-61664654
  hyper
gcaggaacaagatgcacatcgtgcaggagccgcagagcacgcgtgcagaggtttcggtggctttgccccgcagctaacgtgtgc

SEQ ID NO: 18724 - DNA, 124 bp, Homo sapiens; identical to SEQ ID NO: 8409
  chr20:61838301-61838425
  hypo

SEQ ID NO: 18725 - DNA, 495 bp, Homo sapiens; identical to SEQ ID NO: 15885
  chr20:62248627-62249122
  hypo

SEQ ID NO: 18726 - DNA, 48 bp, Homo sapiens
  chr21:15588309-15588357
  binary
cgcccagccctacgccaggcgagggagcagtgcggtgggcggtacccc

SEQ ID NO: 18727 - DNA, 66 bp, Homo sapiens
  chr21:15588911-15588977
  binary
acagcctggtcactgttctccgtcaagtagtaagcacgcctgacatcccccaaaaggagaggggtc

SEQ ID NO: 18728 - DNA, 255 bp, Homo sapiens
  chr21:35258647-35258902
  hypo
cgatccaggacactctgaaccccaagtggaattccaactgccagttcttcatccgagacctggagcaggaagtcctctgcatcactgtgttcgagagggaccagttctcaccagatggtgagtggaacgcggccctgtggttattcctccttccctggcactcgtttgcgtgggttaatgttttcttacctggggacttggtgccaggattccttcggtttccctcctgagagatgaggctggctggcacaagac

SEQ ID NO: 18729 - DNA, 299 bp, Homo sapiens
  chr21:37617467-37617766
  hypo
cgtgaagccatttgggccgaagtggagaaggagcccgagaagtacccgctgcgaggcgagctgagcgaggaagagctgccctactacgtggagcttccagacaggacggcccacggcgccccggacagcagcgagcacaccgagtctgcagatacaagctcctgccacacggacagcgagaacacgtcctccttctcctccccttcccacgacctgcaggagctgagcaacgaagagaactgctgtgcacccatccccatggggggcagggcgtaccccaagcgctcggccctgctggc

SEQ ID NO: 18730 - DNA, 61 bp, Homo sapiens; identical to SEQ ID NO: 14926
  chr21:42688559-42688620
  hyper

SEQ ID NO: 18731 - DNA, 396 bp, Homo sapiens; identical to SEQ ID NO: 15904
  chr21:43547667-43548063
  hypo

SEQ ID NO: 18732 - DNA, 703 bp, Homo sapiens
  chr21:45345807-45346510
  hypo
cgccggcgccatgtagctgcctgcccaggagaagcggcgaggcccacgtgtgaggccctgagagctggaaataggtactggatttcagtgtccgatggagaagtctgtgatattttggatatgttggattaggtaaaacacatcgttaaagttaattccacttttctctgtgttttactgtggccactggagcattcagtggtacggtggctgcggcttgccttctcccgctgggtcagcaccagggtacaggtcatctgtagacttttgcctgagacacagacgcctgcttgggacatggactccagctcctcagccctgtcctccagcagcggtgaaatctggagtgttcttgagtaacgcactggcgccaagggggtgctgagccttcgctctgccgtccttggctgaacaagctgtttctctggggaccacgtcaggtaacacgtaggacagcggggtggtccagcagggagggcatgcgcatctgtgtggcaggactgggggtgattttatccgggatcccctggggtggcccagcgttggctcgggtgtttcattctcacagagaacaggcagcttcaggggccacgcgtgcacgagaggagcccccagcccccacggcgcgttcctgggtttccatgctgcggcatttaagaaaagagctctgtgtcgtgctgctggggtagcttccgtgagctac

SEQ ID NO: 18733 - DNA, 173 bp, Homo sapiens
  chr21:46270497-46270670
  hypo
cggggcacgtggcccagagccgggcctgtggacgggcctttctttcttcttggggtggaccccgtccccacgatccctaaatggccaccccccagacagcccaacaggcagcgagaggcctgcaggcactgaggatgccaacagggctggagagagctgcagcgtcctgcccc

SEQ ID NO: 18734 - DNA, 68 bp, Homo sapiens
  chr21:47689571-47689639
  hypo
cgctgtggccactacgggcttgtggcaaggaatcctggcagcctccttggagccgctgccagaatggg

SEQ ID NO: 18735 - DNA, 129 bp, Homo sapiens
  chr21:47689700-47689829
  hypo
tgcactgaacggaatcatgcagggcctagaacagcaggtgctacaggggctgctctgtcctcatccccaagttccgtggaagtggaacaaaataaccgactggaaaccccaagacacagtttactctgc

SEQ ID NO: 18736 - DNA, 221 bp, Homo sapiens
  chr21:47872870-47873091
  hypo
cggtcaggcgttccatctctgtcagagacaagtggcataccagaagacagatctacacccgcccgccccccaaatgcatacaattctctgctccaggtggcatgacagaatctctacattgcatcattctgcaccattaataacaccaaaaaaacacctgttggactatatggcccaggcaatagcattacttcatcacaacccggatctactgtacagac

SEQ ID NO: 18737 - DNA, 91 bp, Homo sapiens
  chr21:48087109-48087200
  binary
cgtgatgcaggtgagcaatgatgcagagggctctgtgcgcctggcgggctctgtttgcctgctgggctctgtgcgcctgctgggctctgtg

SEQ ID NO: 18738 - DNA, 542 bp, Homo sapiens
  chr22:18443260-18443802
  hypo
cgaacccagcatatgggaaggaaacatgcaccctggaacaccccgcccaggagtgtgtgtgggaaggagactccaggagctctgcgaactgttctggaactggacctgttcaggattggcaaggggctccgggaacagatcctgtgggtgtgagactgtgtccccgtccgcttagggaaggaccatgggggtgagagggtggggggaaggaggcagatttggaaacagacacccgccccggggtcagatttgacccaggggggcccgcaaagtggggaaggaggagaggaagcactaagctgtgccagggagattctgaggcgagcaggagcagagcaaggaccgaaggagccagcacggggtcactgggagtcctccaggcatggaaagagcacgagctcagcaggaggtgctgggtcatgaggtgagcagggcaacgagacggtgcgggacctggtaggccacctggcagctttggcattgactggggtgcgaggggaaccactgcaggagtctgagcagggaagaatgacatcgctacc

SEQ ID NO: 18739 - DNA, 68 bp, Homo sapiens; identical to SEQ ID NO: 9594
  chr22:21368234-21368302
  hyper

SEQ ID NO: 18740 - DNA, 94 bp, Homo sapiens; identical to SEQ ID NO: 9595
  chr22:21368697-21368791
  hyper

SEQ ID NO: 18741 - DNA, 66 bp, Homo sapiens
  chr22:22029114-22029180
  hypo
cggggtcacccgtgacggctcttctcagagcgtggtgggggtgccacataaacacaactgcccgac

SEQ ID NO: 18742 - DNA, 170 bp, Homo sapiens
  chr22:22037104-22037274
  hypo
cgtggcctgctgagtcaatcacctctgtggcttgtcccattctaaccagaggtcggcccacggctgcccacgttccggtccgatagctccctaacagcaatgaatgctcgttagccatgtgcctggaggaaggtcacagctcagccagcagctagcgaggctgcgtcccc

SEQ ID NO: 18743 - DNA, 137 bp, Homo sapiens; identical to SEQ ID NO: 5811
  chr22:22862472-22862609
  binary

SEQ ID NO: 18744 - DNA, 187 bp, Homo sapiens
  chr22:24552924-24553111
  binary
aattgcaggctttcccagcccttgtctgcagagagaatcattacctgtggatggcgcggggaatcccttgccctcagtagccccgcctggagagacaggaccgcgttgtggggggtggggtgtaggagtgggcggaggccagggcgcccctggtggcctgtgtacaaccctgcggccagagaggccc

SEQ ID NO: 18745 - DNA, 97 bp, Homo sapiens; identical to SEQ ID NO: 8441
  chr22:27053098-27053195
  hyper

SEQ ID NO: 18746 - DNA, 268 bp, Homo sapiens; identical to SEQ ID NO: 8442
  chr22:27053250-27053518
  hyper

SEQ ID NO: 18747 - DNA, 230 bp, Homo sapiens; identical to SEQ ID NO: 12703
  chr22:27054028-27054258
  hyper

SEQ ID NO: 18748 - DNA, 112 bp, Homo sapiens; identical to SEQ ID NO: 6562
  chr22:36907702-36907814
  hypo

SEQ ID NO: 18749 - DNA, 35 bp, Homo sapiens
  chr22:37731278-37731313
  hyper
tcggctcccctctcccgccagactcctgtctctgc

SEQ ID NO: 18750 - DNA, 190 bp, Homo sapiens
  chr22:41536192-41536382
  hypo
cggatggaaaacctagttgcatatgctcggaaagttgaaggggacatgtatgaatctgcaaacaatcgagtgagtgtctggtttttttctattaatagccaagattgaacctgttgtggttattttattcctctttagcatgtacaagtagtacatatgcttcagacgggggacacgctgtagctatccc

SEQ ID NO: 18751 - DNA, 550 bp, Homo sapiens
  chr22:41970751-41971301
  hypo
cgtgccagtggagggcgacgaggtgacctacaagatgtgccctatccctcccaagaaccagaagttccaggccgtggaggtggtgctcactcagctggccccccacactccccacgagacgtggtctggccaggtcgtgggctcctaggctgagtggttcacaggccagctggccgggggttggggagccacacagggtgaacgggcagcagccggctccatgccccactgccctggctgatgagtccttcggtggcctcagtgtgcacgtctgtctgtccgtctgtgcttgtggctatgagcgtgtgcctccacccaccccacgacccgtgactactgtgcaagctggccaggaggtaggtggagggcaaggccaccagacctggcttcgcgctgtccactgcctctctcctcccctccctgccgcagacacgcaggacccgctcgccctcctgcttacccgtccccacggtgactgagctgcgagagcctgcgctgggctcactccctggcctccgcccctgagctgtcccgtgtcagtccctggccc

SEQ ID NO: 18752 - DNA, 137 bp, Homo sapiens; identical to SEQ ID NO: 16834
  chr22:41973298-41973435
  hypo

SEQ ID NO: 18753 - DNA, 74 bp, Homo sapiens
  chr22:44500148-44500222
  hypo
cgtctcaaagcaggctggcagacattttccactcttgatcaatcattttccaaaataagcatagacacagcaac

SEQ ID NO: 18754 - DNA, 32 bp, Homo sapiens
  chr22:46585892-46585924
  hypo
cgcccagccgtgttcatctatttctgtgaacc

SEQ ID NO: 18755 - DNA, 110 bp, Homo sapiens; identical to SEQ ID NO: 16840
  chr3:10131952-10132062
  hypo

SEQ ID NO: 18756 - DNA, 234 bp, Homo sapiens
  chr3:10183473-10183707
  hyper
cgcgtccgacccgcggatcccgcggcgtccggcccgggtggtctggatcgcggagggaatgccccggagggcggagaactgggacgaggccgaggtaggcgcggaggaggcaggcgtcgaagagtacggccctgaagaagacggcggggaggagtcgggcgccgaggagtccggcccggaagagtccggcccggaggaactgggcgccgaggaggagatggaggccgggcggcc

SEQ ID NO: 18757 - DNA, 176 bp, Homo sapiens
  chr3:10183782-10183958
  hyper
gctgcccgtatggctcaacttcgacggcgagccgcagccctacccaacgctgccgcctggcacgggccgccgcatccacagctaccgaggtacgggcccggcgcttaggcccgacccagcagggacgatagcacggtctgaagcccctctaccgccccggggtccattttgcagac

SEQ ID NO: 18758 - DNA, 92 bp, Homo sapiens
  chr3:107530307-107530399
  hypo
cgccacttgggtgaacgcttctggggtgcgcttctgggactagtgatcagaacacaccatctttccctgaactgggacaaaactgtggaagc

SEQ ID NO: 18759 - DNA, 1176 bp, Homo sapiens; identical to SEQ ID NO: 14967
  chr3:113251180-113252356
  binary

SEQ ID NO: 18760 - DNA, 84 bp, Homo sapiens
  chr3:121500635-121500719
  hypo
cggcgtgcatcagtgagttcttggagtcctcgccaaggagcaaatagtttctttttcttacggcacttcgctaggaatttaagc

SEQ ID NO: 18761 - DNA, 35 bp, Homo sapiens
  chr3:141120999-141121034
  hyper
cgggcatggggccttacggggccctcacgggtccc

SEQ ID NO: 18762 - DNA, 163 bp, Homo sapiens
  chr3:14514245-14514408
  hypo
cgattcggagaagggacccacatttctgtgtgagctgatcattgtctgggccatcgtaataagttgcaagtgcccaggagaagcctacgccacactcaggattctgtgctccctggagcgtgcgaggggctgggcattggctccctcccgtgctttatacacc

SEQ ID NO: 18763 - DNA, 86 bp, Homo sapiens; identical to SEQ ID NO: 9666
  chr3:150802802-150802888
  binary

SEQ ID NO: 18764 - DNA, 191 bp, Homo sapiens; identical to SEQ ID NO: 6584
  chr3:171362739-171362930
  hypo

SEQ ID NO: 18765 - DNA, 83 bp, Homo sapiens
  chr3:171976039-171976122
  hypo
cgacatagactcacaggttctggttatgataccgaaagccagtgatgagggcattattcttgtgcatttgtctttcagagttc

SEQ ID NO: 18766 - DNA, 138 bp, Homo sapiens; identical to SEQ ID NO: 10622
  chr3:179169640-179169778
  hyper

SEQ ID NO: 18767 - DNA, 291 bp, Homo sapiens; identical to SEQ ID NO: 5820
  chr3:186079331-186079622
  binary

SEQ ID NO: 18768 - DNA, 324 bp, Homo sapiens; identical to SEQ ID NO: 13987
  chr3:194048948-194049272
  hypo

SEQ ID NO: 18769 - DNA, 147 bp, Homo sapiens; identical to SEQ ID NO: 10625
  chr3:194407289-194407436
  hyper

SEQ ID NO: 18770 - DNA, 154 bp, Homo sapiens; identical to SEQ ID NO: 10626
  chr3:194407836-194407990
  hyper

SEQ ID NO: 18771 - DNA, 102 bp, Homo sapiens; identical to SEQ ID NO: 10627
  chr3:194408028-194408130
  hyper

SEQ ID NO: 18772 - DNA, 49 bp, Homo sapiens; identical to SEQ ID NO: 15950
  chr3:195601363-195601412
  hypo

SEQ ID NO: 18773 - DNA, 68 bp, Homo sapiens
  chr3:196366368-196366436
  hyper
cgcccccagccctgccaaggcaccaacgcaagaaagccgggggagcctcggtcgcattgctggaagat

SEQ ID NO: 18774 - DNA, 132 bp, Homo sapiens; identical to SEQ ID NO: 15013
  chr3:43935666-43935798
  hyper

SEQ ID NO: 18775 - DNA, 427 bp, Homo sapiens; identical to SEQ ID NO: 15014
  chr3:44038922-44039349
  hyper

SEQ ID NO: 18776 - DNA, 557 bp, Homo sapiens; identical to SEQ ID NO: 15958
  chr3:49720262-49720819
  hypo

SEQ ID NO: 18777 - DNA, 234 bp, Homo sapiens; identical to SEQ ID NO: 5824
  chr3:49906737-49906971
  binary

SEQ ID NO: 18778 - DNA, 49 bp, Homo sapiens; identical to SEQ ID NO: 5825
  chr3:49907379-49907428
  binary

SEQ ID NO: 18779 - DNA, 82 bp, Homo sapiens; identical to SEQ ID NO: 7369
  chr3:50377892-50377974
  hyper

SEQ ID NO: 18780 - DNA, 167 bp, Homo sapiens; identical to SEQ ID NO: 7370
  chr3:50378002-50378169
  hyper

SEQ ID NO: 18781 - DNA, 168 bp, Homo sapiens; identical to SEQ ID NO: 15962
  chr4:103421142-103421310
  hypo

SEQ ID NO: 18782 - DNA, 693 bp, Homo sapiens
  chr4:103997179-103997872
  binary
cgccaacaccttacaacagtaaacagacacgcgcccgtcaccgggtgtacaaacagaaaaggctgggcccctcgctcgcgtctccggtccagcaggcctacagggtacccgccgctggcgctgggtttatttttacccttagtgtctctggggcctctcacctggcagtctccggcgaagtcgaccaggctccgtctgaacgattaggaaaggggctgtgggggaggcggcggagcccggtctagccaccgcgctctggggttcccgattcgcgcatcttcccaggctgagccgggaggctgcgttgactgcagataaacggtctcagggcgcggcaccgcgtgtagtcggccccgcctttcgcacgaacccgctgggcgacaccgcgcagggaggtccgacccgtcggcgccggtacaggctccggagtaagcatgggttggtccggggcccgcagcggcagccccgtgtgccctccgccgggtttcaggtccggcggcgcgggtgcagagccgcgtgcgatgcctggtgcgcgtggcttcccccggaaaggtggcgccaggccgaccatgggcccacgtcccggggcctcggagcggcaccgcgcggtctttcagctgcttatcctccctgggcgggtccgcaggcttctggggccaggaccagcgagctcccgggaaagcttcccggaaa

SEQ ID NO: 18783 - DNA, 667 bp, Homo sapiens
  chr4:1317011-1317678
  hypo
cgtgagccaccgtgcccggccgagtaccgacttttgtagagaccaaaagaagcttaagaaatggactcctaaaggacaaaatttaaacctgcttattaaaaggcattgtcaccctaggggcttgcagaaatgttttaacttatgttaacacttctgcctccattagcaaaacttttctgtcttctaaactgagcgctgctttaacctcaccctggctgagtttggcagggtgcacgcagttaccagccaggagtgacacactgccactcagggccgccaaaacaagcacgaagcaaagacgggacgaaaaagtagagcggctagtagctcccctaaagagagtttggaccttggtatggaaaccctaaaaggaaagccagaattggtatgtaacctgcggccccactacacagtgccagccccacactccctcccagagagccggcacacacctcacagtgggaactctgccagggctgtttcctgtggatgtcagagggaagataggttcttggtgctgccaggatattcctgcaagccctaattacctgccggacagtgttgctggagggtgttggaggcttgccacgagcacacgacctgtctgaagctgctgtggggacaggcagggccaggactcggggccctgaatgcatgcctgggggac

SEQ ID NO: 18784 - DNA, 129 bp, Homo sapiens; identical to SEQ ID NO: 16893
  chr4:1326104-1326233
  hypo

SEQ ID NO: 18785 - DNA, 167 bp, Homo sapiens; identical to SEQ ID NO: 7385
  chr4:1326509-1326676
  hypo

SEQ ID NO: 18786 - DNA, 191 bp, Homo sapiens; identical to SEQ ID NO: 12771
  chr4:153600941-153601132
  hyper

SEQ ID NO: 18787 - DNA, 261 bp, Homo sapiens; identical to SEQ ID NO: 12772
  chr4:153601161-153601422
  hyper

SEQ ID NO: 18788 - DNA, 144 bp, Homo sapiens
  chr4:170043204-170043348
  hypo
cgtttaaatgaacacataagcagtaacagacgacacgctcacttacacactggggcgagtctgcggccgtaaatgtgcaatctggtcagtggatcctgccatgggcctcggtcccattccagcagcagcagcagcggcggtggc

SEQ ID NO: 18789 - DNA, 365 bp, Homo sapiens
  chr4:185747631-185747996
  binary
cgggcgcggccccacagggtttcccccacgctccctggccggaagaccttttctgtctggtgtctgcagagcctgacgtgggcagcgcccgcagctcgcgccggtgcaggggagctgagggccgactgcgcgctgcaccacggcggccacctgctgtgcggttctgagggcttccgcggttctgagggcttccgcgtccctgccatgcccatcttggggcttcagaagccaacacgatggttttcgggctcacatcccaaaggctgctcttccttttagcacctgggacctaccaggaacctcaacctctaacaacattggtccccgttaccgtggagtttgcgcccagcgttcgctggagggcc

SEQ ID NO: 18790 - DNA, 57 bp, Homo sapiens; identical to SEQ ID NO: 8535
  chr4:1993659-1993716
  hypo

SEQ ID NO: 18791 - DNA, 197 bp, Homo sapiens; identical to SEQ ID NO: 8536
  chr4:1994335-1994532
  hypo

SEQ ID NO: 18792 - DNA, 180 bp, Homo sapiens
  chr4:40485408-40485588
  hypo
cggggtagcggaagcagagggagcgagacaggcaggggtcagatgggagcgttataacacccaggagaggacttcaagttctccttggctgattggaggattctgagcagagaagcgctgtgatctgcttttctgttttttaagatcactggtgtgcagccgggtgcattggctcacgcc

SEQ ID NO: 18793 - DNA, 328 bp, Homo sapiens; identical to SEQ ID NO: 8552
  chr4:759841-760169
  hypo

SEQ ID NO: 18794 - DNA, 642 bp, Homo sapiens
  chr4:82391851-82392493
  hyper
cgaattcatcagggaggatggacacatctacattccgaagagaaaatcgccgtctagacaatctccttgtgttatctgccacacttgtgccaccctcggcagtgtcagaggattaagctacgttgcttttgcctgaactgcgccgatttggttggggcaagacagcaagcagtattgaaatggtacgtccatacacacacacaaaggcgcgcgcaccccagcccccgtctcgcccttttccctggtgcagcacttaagttgttttcacagctcccttagaaagaacctcccttaagctgactgcccgcgaggctcctagatacctctagctcatctgagattccccaggcaggtgacccgaggcgactcaactgagctctggcaaaagcaaggcgactcagtgtctcccaagtttgccaggtgaacaccgaaggatgacagcacatcaccttgtcggtggcgagtatgtgacttctgttcccttgtcccttcctacgagtcagactttagattacatggcactgacaacaaaaataaacagctccccctacacacacacgcacacaaaactggtcaagaagtggaagaatcaacctaggtatgcacacgaaggaaagaagggatgaaaaaaatgatggacgc

SEQ ID NO: 18795 - DNA, 56 bp, Homo sapiens
  chr4:87946924-87946980
  hypo
cgctctgcaggtttcgcctagttcctatgcatggggatgtttgtgtttccgagagc

SEQ ID NO: 18796 - DNA, 90 bp, Homo sapiens
  chr4:87993079-87993169
  hypo
cgggtcaggagctctggattaaaggccaacgggaatcttttaaacttcttggttgtgtgtgtgtgtcggtgtgtgaagtcagaggcagac

SEQ ID NO: 18797 - DNA, 73 bp, Homo sapiens
  chr5:10702280-10702353
  hypo
cgcctggcacatggtctggtgcgcacacatactcaacaaatgctttgagcaccaaatgacatcaccggtcagc

SEQ ID NO: 18798 - DNA, 309 bp, Homo sapiens
  chr5:107703589-107703898
  hypo
cgccagtacttgcaaaccaatgatgcggaaaggcaacgctcatccagtgacaaattggaaaatatctgtgaataaaaaacggtaccatataatatgtgctaaacattttcaaggcacaggaaaaggtttttattagttagaaaaagttaactttgtaaaaagaaaaccttcttgaataaaagaggccattattgtaagtcaccgtaagagatcaccttaaagagaaactatgatacaggagctaaaaacggactgatgttatattttctgtaagaagaggaggggaagagaacaggcatgtactgacac

SEQ ID NO: 18799 - DNA, 58 bp, Homo sapiens; identical to SEQ ID NO: 6193
  chr5:114515671-114515729
  hyper

SEQ ID NO: 18800 - DNA, 132 bp, Homo sapiens; identical to SEQ ID NO: 6194
  chr5:114515769-114515901
  hyper

SEQ ID NO: 18801 - DNA, 44 bp, Homo sapiens; identical to SEQ ID NO: 6195
  chr5:114516274-114516318
  hyper

SEQ ID NO: 18802 - DNA, 497 bp, Homo sapiens
  chr5:115783187-115783684
  hypo
cgtgttgccgggagtggcgagcttgccgttgtgcatgagtggcgtgaggatggcctccggctttgggtctttggattgagtgtccccaaagaggccgctgagcttggtgacgctgctcatggagccccggcgcgagtgggtgagctccttctccttgcgctgcaccacagccacgtctttgcgccgatgatcacagacgcagtagacggtgatgcccgagaagacggcccccatgacgaaagccaggatgactgcaatggccaagagggtgacgggaaccagctggtcgtggcctttgaggtaactttcccgaatcactcctgcaatagacatcgcatatggcgttaagaaatgaaagcacaccccgaggcttgtttttgcttggcattcaccttgttaattaataacagtagtaagtgacaacagcacctctgcacaacttgtcttccaagctcagcttgccaaacattaaccaattaatcctccccaagcccctc

SEQ ID NO: 18803 - DNA, 160 bp, Homo sapiens
  chr5:131037398-131037558
  hypo
cgggtctacccacctctcgtctcttactccagtctcttcaaaacgcactaccaagtgctcgtttcagcagccatatacaaaacacactgccaagttaatctccccaaagtacaacttgcaaacagccttaaagacaaagtcagaactccctggcaagcac

SEQ ID NO: 18804 - DNA, 432 bp, Homo sapiens
  chr5:131607799-131608231
  hypo
cgtggttacttctttctggacgagcggctctactgtgagagccacgccaaggcgcgcgtgaagccgcccgagggctacgacgtggtggcggtgtaccccaatgccaaggtggaactcgtctgagctgggaccctgctcccacgcctgcttcttaaggtccctgctcggccggtgtaaatatgtttcaccctgtccctctaataaagctcctctgctccaccttgaacctgtcacctggcctgccaccctcctgcgcaggccatgcatggctcccgagtacagtagtatctgcttaggtgccaggcatgtcctaggctctgggtgcagtagtgagcaggacgggtaccatgctgccctgaagggggccacagcctgggtggaaggcagacctgaatcacaacgggccagctctagtaatacgaaggtgaggtc

SEQ ID NO: 18805 - DNA, 63 bp, Homo sapiens
  chr5:134273891-134273954
  hypo
cgatgtcgctgccttttggtatttatcataaggcatgtctccagatccgtcattgttgccatc

SEQ ID NO: 18806 - DNA, 128 bp, Homo sapiens
  chr5:134278947-134279075
  hypo
cgaagcacttgtgacttcggagcagtgtgatctgattttgaagtggttttgaaaactggggacggtatacataaggtgcaaagatcacggaaacatgaattagcaagtggggcctcagtctaggttac

SEQ ID NO: 18807 - DNA, 173 bp, Homo sapiens
  chr5:134370281-134370454
  binary
cgcctagaatcaactcccgtctcggccgcctcgaagtccccagccctggcgagaacagcccaggatgagtgaatgtttgccgaacaggatcgcaccgagcgggcgccttcgagccagcgccggggcgggggcagagcccggggcccgttccggcagctcccagcggtgtcctc

SEQ ID NO: 18808 - DNA, 38 bp, Homo sapiens
  chr5:134370508-134370546
  binary
cggctgagtgacagcagcctgcgctctaatgggccccc

SEQ ID NO: 18809 - DNA, 73 bp, Homo sapiens; identical to SEQ ID NO: 7415
  chr5:134880614-134880687
  hyper

SEQ ID NO: 18810 - DNA, 335 bp, Homo sapiens; identical to SEQ ID NO: 15070
  chr5:139135589-139135924
  hyper

SEQ ID NO: 18811 - DNA, 127 bp, Homo sapiens
  chr5:140905588-140905715
  hypo
cgtcttcactcctcacctgcattcatgtctatgagttgctctctcttctgctgcttctctagccgctccttctctgccttctccttggctagttttgctcgcctcatcttttcttctgtctcccgcc

SEQ ID NO: 18812 - DNA, 183 bp, Homo sapiens
  chr5:149681827-149682010
  hyper
cgccagcctccccgggcccgtcggccacgaagctcggcttggcccagtcccaggacaggtagccgaagctgagcaggctgaccagggagaagccagtgagggtgtgcatcgccaagccggcccgcgcgtcccggcgcgccgggctcctggggcctcaccacctcgcgcgcccagggcgcacca

SEQ ID NO: 18813 - DNA, 102 bp, Homo sapiens; identical to SEQ ID NO: 15075
  chr5:149682691-149682793
  hyper

SEQ ID NO: 18814 - DNA, 79 bp, Homo sapiens
  chr5:156485569-156485648
  hypo
cgtctcaaaaaacaaaacaaaaaaaaagaaaagaaaaggaaactggaagcagagaaccagcgtggctcaatggcagcac

SEQ ID NO: 18815 - DNA, 240 bp, Homo sapiens; identical to SEQ ID NO: 12804
  chr5:157098032-157098272
  hyper

SEQ ID NO: 18816 - DNA, 58 bp, Homo sapiens
  chr5:159659095-159659153
  hypo
cgggtccagggatctccagcgatgtaatcgaaaaggcccgcaacttcaagatcgtcac

SEQ ID NO: 18817 - DNA, 114 bp, Homo sapiens; identical to SEQ ID NO: 16001
  chr5:176225713-176225827
  hypo

SEQ ID NO: 18818 - DNA, 50 bp, Homo sapiens
  chr5:176663899-176663949
  hypo
cgaacacggttcactgcagccttgacctcctgggtttaagcaatgtttcc

SEQ ID NO: 18819 - DNA, 479 bp, Homo sapiens
  chr5:31854462-31854941
  binary
cgggagaaggtataaaggaaatgcttcagtcgtgcagtcaccggcgattgtaattcagcggtgttaactttggttactccagccgaaaggctctgaccggggatttctggaaagttccctgacatcctgccccatacgatggttgtgattttagctgggggctccacccctgtaagaactcaggctgccgcggattatgaaacggagtggtcatgaagtgaattgatgtgggaaggtggagcttcttgcaatggctcggagggagaacttttggtgcaaacgagggtctagggtagggcgctttttcctctaacctgctccaggtttgccccaggaagctcctgagccctcggtgtaaacaaaggtgtctggatgagaagccccaaactccctgaaatcctccccagggcggtttccttttcccggcgaggggagtgaccggggaggggatcttggaatgccgtggggttttgacaagt

SEQ ID NO: 18820 - DNA, 337 bp, Homo sapiens; identical to SEQ ID NO: 8583
  chr5:40680627-40680964
  hyper

SEQ ID NO: 18821 - DNA, 99 bp, Homo sapiens; identical to SEQ ID NO: 6210
  chr5:42950747-42950846
  hyper

SEQ ID NO: 18822 - DNA, 388 bp, Homo sapiens; identical to SEQ ID NO: 8587
  chr5:43017314-43017702
  hyper

SEQ ID NO: 18823 - DNA, 1660 bp, Homo sapiens; identical to SEQ ID NO: 15085
  chr5:472600-474260
  binary

SEQ ID NO: 18824 - DNA, 50 bp, Homo sapiens; identical to SEQ ID NO: 9814
  chr5:49737299-49737349
  binary

SEQ ID NO: 18825 - DNA, 129 bp, Homo sapiens; identical to SEQ ID NO: 17910
  chr5:58334886-58335015
  hyper

SEQ ID NO: 18826 - DNA, 211 bp, Homo sapiens; identical to SEQ ID NO: 15090
  chr5:58335353-58335564
  hyper

SEQ ID NO: 18827 - DNA, 73 bp, Homo sapiens; identical to SEQ ID NO: 15091
  chr5:58335881-58335954
  hyper

SEQ ID NO: 18828 - DNA, 1043 bp, Homo sapiens
  chr5:66299591-66300634
  hyper
cgtacttgaaggggcaatacttgtagcatttgccacataaatgccaggtagtgtctttccacatcggggctcaccattacctagatctgtagttgccggccatgaagccaaacaggtgtgcaccgtggtcattgatggaacagatgtaaactcataaatttagtttactgaggttttcggtgagtgtggcttcccgtccgcgtgcttttcctatacaaccagcggcgtcctggcggaggagtcactgtggacttccccggagcgttgtcactgccatccctcccgcggtgaatcacaggtcggcctcaggtgcgcgcagcacacacccggagcagccgcgggtttatttatttatttccgggacggatccattccgggctccggggagggggagcggcggcccaggctgcggggctgtcccggcaccggctggggtcgcgccgcggccgcctgctccctttcccgtgagcccccgctcctcaggcgcggccggggctggtggggggtgggggatgcaggaaagctgggggcgcggccaccaagctgtccagggacaaggccctgccgcctcctcccagccggaccctggaagggtccacaaaggtgtcaggttcaagtcctccaataggcccattttttaaaagtgcttttaagtttccgcttttttcaggaggggagggcaagagcagctttttctattcaaattcttttccttgtatgtagataccaaaaggaaactcggcactgggcatgttcggatgtgaatggttttgctgataagcaacagcctccggaaccaaagcctcaaaatagtcgtctcccccgcccctcgcagaagcggcgagtggtatctgccaaacagatgacaaagtacctccgactgaatcccacagacagcgctttgagcagaacgcacggctcaactcatgtaattactgtttatagctggccgagcctgactaggagagggcagacccgagaggaaatcagtttcccggacctttgagaggaggctgtgtgttaattaaaggctaggacgggac

SEQ ID NO: 18829 - DNA, 98 bp, Homo sapiens; identical to SEQ ID NO: 16016
  chr5:66511687-66511785
  hyper

SEQ ID NO: 18830 - DNA, 143 bp, Homo sapiens
  chr5:71714802-71714945
  hypo
cgtgcccggcccatgccaggttaatttttatactggttaatttttatatactggttatacaggttaatttttataccggggagggggagtctcgcagtgttgcccaggctggtctcgaactgctgagttcaagccatccgctc

SEQ ID NO: 18831 - DNA, 53 bp, Homo sapiens; identical to SEQ ID NO: 5835
  chr5:75698192-75698245
  binary

SEQ ID NO: 18832 - DNA, 916 bp, Homo sapiens; identical to SEQ ID NO: 14101
  chr5:75698274-75699190
  binary

SEQ ID NO: 18833 - DNA, 80 bp, Homo sapiens
  chr5:76327297-76327377
  hypo
cgtttatcatcttcggctttcttgtgtaagtagggacgatatataactgcttttgttggagacgttaagcagcttatttc

SEQ ID NO: 18834 - DNA, 44 bp, Homo sapiens
  chr5:78105396-78105440
  hypo
cggcacttcttgccttcagctgaagctgggagacccatcctacg

SEQ ID NO: 18835 - DNA, 70 bp, Homo sapiens
  chr5:78105545-78105615
  hypo
tcctgctctgaaaatcacgtcctggcaacctgcccatcggacctggagccagccttgccctctccactgc

SEQ ID NO: 18836 - DNA, 1266 bp, Homo sapiens
  chr5:78531956-78533222
  hyper
cgaatggcaacattgtggcgatgctgaggcgcagagtttaggagacgggttcatcagtcaggccggctccgggctttctgcagcagcaccaggggcgggggcggggatcttgacctgggcgagcgaccgggacgcatacagcgccggcctgaccccgcgggacccgcgcctcaccaccggagcgccgcagacgcagctccacggcctcgcgcggggggcggcgggcggccgcgaggcgctgcggcagcgcggagcttgtaaacagatccggccgcaggtgaccatgtgaactacctgctcccgggacgcttattgtccttctctcgatccgcgccacaaaggagctcggcggtcggggcgcggagggacaggcgaacgagccgggagagccggccggcgcactaagatggctgaaggcgcccggcgagggtgagcggggggcgcggcgcagccagcggggagtcctcgggcgggccgggccggcggcccttccccgcggcgagaagccggagccaccatgtcgttcgcgctggaggagacgctcgagtcggactgggtggctgtgcggccccatgtgttcgacgagcgcgagaaacacaaattcgtctttattgtggcctggaacgagattgagggcaagtttgccataacctgccacaaccggacggcccagaggcagaggagcggctcccgggagcaagcgggggcgcgagggggcgccgaggccggcggagctgcgtccgacgggagccgcgggcccggcagcccggcgggcaggggtcggcccgaggccactgcctctgcaactctggttaggagccccgggccccggcggagctcggcctgggcggagggcggctctcctcggagcactcgcagccttctgggggacccgcggctgcggagtcctggcagcaaaggggcggagagtcgtcttaggagcccagtgcgggccaaacccatcccgggtcagaaaacatctgaagccgacgatgcggcgggggcagccgctgcagcagcccggccggcgcccagagaggcccaggtgtcctctgtacggatagtgagcgcctctgggacggtctccgaggagatagaggtgctggaaatggtgaaggaggacgaggcacctctggcgctctcggacgcggagcagccgccgcccgccaccgagctggagtctccggccgaagagtgcagctgggccggactgttttctttccaggacctgcgcgccgtgcaccagcagctgtgctcggtgaactc

SEQ ID NO: 18837 - DNA, 102 bp, Homo sapiens
  chr5:90670755-90670857
  hypo
cgcggattatactacagtcgaggatagagggagaaactggtggaattttcagcaacttgccattccacgtctctgtctttccagatgataaggattccccac

SEQ ID NO: 18838 - DNA, 52 bp, Homo sapiens
  chr5:90672526-90672578
  hypo
cggctttcacccaatagcgcacactgccatgtcggccttcgaatgaggtagc

SEQ ID NO: 18839 - DNA, 72 bp, Homo sapiens
  chr5:96362713-96362785
  hypo
cgtggctacagactatttcatagcaaccatttagctatgcatattgaaaaatacctctgtatggccgggcgc

SEQ ID NO: 18840 - DNA, 61 bp, Homo sapiens; identical to SEQ ID NO: 14126
  chr6:106443120-106443181
  hyper

SEQ ID NO: 18841 - DNA, 71 bp, Homo sapiens
  chr6:108435964-108436035
  hyper
cggtttagtcatcattcctaataacaaggatgttgctaagaacagaaattttacatgattttcatacattc

SEQ ID NO: 18842 - DNA, 45 bp, Homo sapiens; identical to SEQ ID NO: 14128
  chr6:108484828-108484873
  hyper

SEQ ID NO: 18843 - DNA, 120 bp, Homo sapiens
  chr6:109647757-109647877
  hypo
cgatgcagcaaagcggacgccttcctccatggaatgtgctgatttcagacggggcatcagccaatgtagaaaacactaacattttttcttggaactggattgtgatgagaggtgcttgcc

SEQ ID NO: 18844 - DNA, 135 bp, Homo sapiens; identical to SEQ ID NO: 10696
  chr6:111766152-111766287
  hypo

SEQ ID NO: 18845 - DNA, 230 bp, Homo sapiens
  chr6:13318572-13318802
  hypo
cgtctgcctgaggctgcagtaaaggtgtctcagcttggaacacagacaagctgagtagcggtgaggcggaacctataccctgtcatctcaattcctaatctaatttaatttgatatataatttaagaacttgtgtagtactatcaacttcactttgccaataagtgaaatttaaagatgattgcttaaattattccaattattttttagggaccttctctctcgataaac

SEQ ID NO: 18846 - DNA, 455 bp, Homo sapiens
  chr6:149915200-149915655
  hypo
cgccacttgtgctgccgccatgtctctagtgatccctgaaaagtcccagcatattttgccgagtagtcaacaccaacattgatgggtggcggaaaatggcctttgccatcactgccgttaagggtgtgggccgaagatatgctcatgtggtgttgaggaaagcagacactgacctcaccaagagggcgggagaactcactgaggatgaggtggaacatgtgatcaccattatgcagaatccacactagtacaagatgccagcctggttcttgaacagacagaaggatgtaaaggatggaaaatatagccaggtcctagccaatggtctggacaacaagctctgtgaagacctggagcgactgaaaaagattcgggcccgtagagggctgcgtcacttctggggccttcgtgtccgaggccagcacaccaagaccacaggctgccgtggccgcatc

SEQ ID NO: 18847 - DNA, 173 bp, Homo sapiens; identical to SEQ ID NO: 8611
  chr6:150312215-150312388
  hyper

SEQ ID NO: 18848 - DNA, 210 bp, Homo sapiens
  chr6:157351875-157352085
  hypo
cgccttgaaattgtgtcttagagtactaagtttatcaaatgctttttgattgcatagatgtatttttcattgttaccaatatttattgggtccctgtatagagacaaggttttagttcatttccaatacattcagaggacggccgctgtactcagcagcacgaggctaccgtgcgtgttctttccactgctggctaacggtgcactgagc

SEQ ID NO: 18849 - DNA, 172 bp, Homo sapiens
  chr6:158651816-158651988
  hypo
cgcattcaaacatgaggcaactattcttggttcagttacttttaaattaatatttaattttcttgtgttagagccgggtttcgctatgctcaggctggagtccacaggcatgattatagctcactgcggcccccagctcctggtctccagggatccacccgcctcagcctcc

SEQ ID NO: 18850 - DNA, 200 bp, Homo sapiens
  chr6:159206098-159206298
  hypo
cgagaagtttgctatgccatgtcccacaggacacggccacgctttagtttccatgaggaatggcagctcgccttccctggctatgtttcaggtcgctggtcagtgacttaatgactagcatgaaggagcacttgacactggcgaagtccttgtgtttttaaactgtgcttctaaggcaatcacttctccctgccgaggac

SEQ ID NO: 18851 - DNA, 447 bp, Homo sapiens; identical to SEQ ID NO: 8618
  chr6:160679377-160679824
  hypo

SEQ ID NO: 18852 - DNA, 106 bp, Homo sapiens; identical to SEQ ID NO: 10712
  chr6:167834910-167835016
  hypo

SEQ ID NO: 18853 - DNA, 368 bp, Homo sapiens; identical to SEQ ID NO: 14148
  chr6:26204318-26204686
  hyper

SEQ ID NO: 18854 - DNA, 205 bp, Homo sapiens; identical to SEQ ID NO: 14149
  chr6:26205298-26205503
  hyper

SEQ ID NO: 18855 - DNA, 55 bp, Homo sapiens; identical to SEQ ID NO: 14150
  chr6:26205712-26205767
  hyper

SEQ ID NO: 18856 - DNA, 224 bp, Homo sapiens; identical to SEQ ID NO: 6232
  chr6:26216853-26217077
  hyper

SEQ ID NO: 18857 - DNA, 210 bp, Homo sapiens; identical to SEQ ID NO: 6233
  chr6:26217156-26217366
  hyper

SEQ ID NO: 18858 - DNA, 312 bp, Homo sapiens; identical to SEQ ID NO: 6234
  chr6:26217578-26217890
  hyper

SEQ ID NO: 18859 - DNA, 130 bp, Homo sapiens; identical to SEQ ID NO: 7461
  chr6:26271217-26271347
  hyper

SEQ ID NO: 18860 - DNA, 327 bp, Homo sapiens; identical to SEQ ID NO: 7462
  chr6:26272105-26272432
  hyper

SEQ ID NO: 18861 - DNA, 248 bp, Homo sapiens; identical to SEQ ID NO: 6241
  chr6:26577475-26577723
  hyper

SEQ ID NO: 18862 - DNA, 180 bp, Homo sapiens
  chr6:27099585-27099765
  hyper
cgctctatccaacgaaaactaattagaaataaatctccttcccgaaagcgataaaatactaaagaatgagaaactgacagtttactgagtttgtaaggaaggccaaataaaggcggggtttggattcctttggcgcacccaagccgaccgtggacttcctggatacaacaaccaatcagg

SEQ ID NO: 18863 - DNA, 61 bp, Homo sapiens; identical to SEQ ID NO: 12892
  chr6:27100389-27100450
  hyper

SEQ ID NO: 18864 - DNA, 61 bp, Homo sapiens; identical to SEQ ID NO: 12893
  chr6:27101049-27101110
  hyper

SEQ ID NO: 18865 - DNA, 87 bp, Homo sapiens; identical to SEQ ID NO: 12894
  chr6:27101206-27101293
  hyper

SEQ ID NO: 18866 - DNA, 104 bp, Homo sapiens; identical to SEQ ID NO: 16039
  chr6:27428748-27428852
  hypo

SEQ ID NO: 18867 - DNA, 110 bp, Homo sapiens
  chr6:27775595-27775705
  hyper
cgcttcttgccatccttcttctgggccttggtcaccgccttcttggagcccttcttcggggcgggagcagacttggccagctcgggcataatgaaacaatagtggcaaaa

SEQ ID NO: 18868 - DNA, 68 bp, Homo sapiens; identical to SEQ ID NO: 7466
  chr6:27777648-27777716
  hyper

SEQ ID NO: 18869 - DNA, 402 bp, Homo sapiens; identical to SEQ ID NO: 7467
  chr6:27778156-27778558
  hyper

SEQ ID NO: 18870 - DNA, 413 bp, Homo sapiens
  chr6:27840617-27841030
  hyper
ttgggcgttgcggaccacagtgtcatagttacacagccctcgcattggtagcggtaaagtaatcgatacaagataaatgagaccggctgtttcattatgacttttgcaaaaaccagagaggcgttatagatttggccgtgtatcagagaagccggcacttttaaccactaagtaatgctgaaaggggcaccgaacctcaaacttcagcgactgcttatgtggaatcgctaatttgccaaaactgccatacgtttaagtgttcttaagaaattaactatctttagtctacagctctttcacagacttcatgggtggccctgagaagggcctttgaggaaccgtgtaagtaagtaaaacactcagccgccaaagccatacagggtgcggccctggcgcttgagcgcgtaaaccac

SEQ ID NO: 18871 - DNA, 31 bp, Homo sapiens; identical to SEQ ID NO: 15161
  chr6:34433449-34433480
  hyper

SEQ ID NO: 18872 - DNA, 441 bp, Homo sapiens; identical to SEQ ID NO: 12897
  chr6:35744202-35744643
  hyper

SEQ ID NO: 18873 - DNA, 370 bp, Homo sapiens; identical to SEQ ID NO: 15166
  chr6:37666475-37666845
  binary

SEQ ID NO: 18874 - DNA, 218 bp, Homo sapiens; identical to SEQ ID NO: 15167
  chr6:37666866-37667084
  binary

SEQ ID NO: 18875 - DNA, 61 bp, Homo sapiens; identical to SEQ ID NO: 6255
  chr6:391113-391174
  hyper

SEQ ID NO: 18876 - DNA, 155 bp, Homo sapiens
  chr6:42947097-42947252
  hyper
cgctgcggttgcgtagcgtttacccatgcgccatttgaacttgtgcttaagggatttatctttgccttctacggaagtaatgttctcttaactatttttccccgtggcatgaacgtaacagtttattgactgataaatgaacagtcagcatgctc

SEQ ID NO: 18877 - DNA, 278 bp, Homo sapiens
  chr6:43745076-43745354
  hypo
cgttagattttggaaggacttgcctgattcggaagctccaaagagtggcattacagagctgggtggagagaggggctagccatcttttgtgtcgcccaccgggctcatgtgtcatcgcctctcatgcagtggtgaagttcatggatgtctatcagcgcagctactgccatccaatcgagaccctggtggacatcttccaggagtaccctgatgagatcgagtacatcttcaagccatcctgtgtgcccctgatgcgatgcgggggctgctgcaatgac

SEQ ID NO: 18878 - DNA, 174 bp, Homo sapiens; identical to SEQ ID NO: 8638
  chr6:43748290-43748464
  hypo

SEQ ID NO: 18879 - DNA, 126 bp, Homo sapiens
  chr6:43752469-43752595
  hypo
cgcagagcactttgggtccggagggcgagactccggcggaagcattcccgggcgggtgacccagcacggtccctcttggaattggattcgccattttatttttcttgctgctaaatcaccgagccc

SEQ ID NO: 18880 - DNA, 198 bp, Homo sapiens
  chr6:52141070-52141268
  hypo
cgtagacagggttggcagctgccaaaacactgcagcgggcattcagccgagcatggatgccagccttggcaatggtcactcgaccctgctccatcacttcatggatggctgtgcgatccatgtcagacattttgtcaaattcatcaatgcaaaccacgcctcggtcagccaggaccatggcccctgcttccagacggc

SEQ ID NO: 18881 - DNA, 164 bp, Homo sapiens; identical to SEQ ID NO: 8652
  chr6:73329621-73329785
  hyper

SEQ ID NO: 18882 - DNA, 82 bp, Homo sapiens; identical to SEQ ID NO: 8653
  chr6:73330126-73330208
  hyper

SEQ ID NO: 18883 - DNA, 348 bp, Homo sapiens
  chr6:7882630-7882978
  hypo
cgtgttaacatgaggaactaaagacatgtttcaccccgtgagaaacagaaggatcccctgaacagtaactgatttgacaagtatcgacacataaagttatggcatcagcattctcttactcaggcacggtcagaagtaacgctgctttcatcacggctaacctctcacactgagagaagtattcacagcaacagaagctccagcagcggccgtgaaggtatcttccagaggtgtgggtttttgcatttcaatctgctccatgctacggaccaacacagtattgagtcaactgtgaccttaagatcagaggaacgtcaatactgccacaaggccacctttccagaactc

SEQ ID NO: 18884 - DNA, 53 bp, Homo sapiens
  chr6:86325389-86325442
  hypo
cggtcatgcctgtaatcccagctatgcgggaggctgagtgaagcaggtgaatc

SEQ ID NO: 18885 - DNA, 280 bp, Homo sapiens
  chr6:88678327-88678607
  hyper
cgtgtgcttaacttgtaaatgtagttttcagtgctggtaagaatatttttgttttgaataacaatcgcgttcttttccacagcgcgaggctctctgctgagtagcaaggagcccctcccagccggaaggcttttgcggtgctagcagcgcctgtctcagagcccttctttatcaacactgggctgcagggccggtttctgaagtacgtagtaaacataattgttctcacattaaaaagaagaggaaaacaaacaaggcgcagatatgttccgcagttttc

SEQ ID NO: 18886 - DNA, 42 bp, Homo sapiens; identical to SEQ ID NO: 10742
  chr6:91320244-91320286
  hyper

SEQ ID NO: 18887 - DNA, 236 bp, Homo sapiens; identical to SEQ ID NO: 16049
  chr7:100064586-100064822
  hypo

SEQ ID NO: 18888 - DNA, 244 bp, Homo sapiens; identical to SEQ ID NO: 8658
  chr7:100167136-100167380
  hyper

SEQ ID NO: 18889 - DNA, 240 bp, Homo sapiens; identical to SEQ ID NO: 8659
  chr7:100167621-100167861
  hyper

SEQ ID NO: 18890 - DNA, 145 bp, Homo sapiens; identical to SEQ ID NO: 8660
  chr7:100168054-100168199
  hyper

SEQ ID NO: 18891 - DNA, 201 bp, Homo sapiens
  chr7:100849441-100849642
  hypo
cgcggaacatgaactcaggaagtggggagacagagagacccatcccccaactcccaggacgggggccaggccccctaaaaaggcacaatggcagggcaggtttggcagagtggttgagtgtcaggggtcgacaaaggacaccatgatgtagcgtgtgccccaggtcgttggcagcccctcgtggtagtgggtgaggcggcc

SEQ ID NO: 18892 - DNA, 132 bp, Homo sapiens
  chr7:101536683-101536815
  hypo
cgtgaaagatttgccttgtagacggaaagttctggaaacatcagctccaggctgtggtgtgaagctgtcgggctgatttgcctggtaagaagcgcgtttggggcacggagggtcaccttgccccctgcgagc

SEQ ID NO: 18893 - DNA, 332 bp, Homo sapiens
  chr7:101566736-101567068
  hypo
cgtcagtcggcccagtcctactccagaacgcttcttgggtgtctgtctgcaggactttgctcagttaatttttgtctcctctaaaacagaccccgttgctctgggaggagagccgagctgcggctcaggggccgtcactggtcatttttgccctgatgtatttttgcctctacatttcttgatctctggaacgttaatcccaacgatgcctggtctgcggtgctcacagtctgtgtctgtgctttctacacctgtcctgctcagatgcacatgatgtcacacccaggtctccatcctggctcttgttggctgcggcggcagccctgactgtc

SEQ ID NO: 18894 - DNA, 429 bp, Homo sapiens
  chr7:101649223-101649652
  hypo
cgaggagcgagcggccgcgtggatgaggttggccagagaaactggtttgttttggaagccgatggaagatgcgcttggaaggctaaggctgccgaggttgaagtccgtcattctcagtgcagaccctagggaggaagtagcaggaccccagtggggctgcaggcattcagaaagagagctgcctggggtttcccttcagaacctccctccttttaacccgggagtaaagagaaaaagacccgcggggtccactggctcggaagtcggtctctttcagtttggagcctccagttggaaacctgccttttaatggccaggctgatggtctagttactctttgaacagggaagcctcgtcaggctctctgctgaccacgcctcagtgctccctcgaaggacaactctggaatgccagtttttatctcatctc

SEQ ID NO: 18895 - DNA, 176 bp, Homo sapiens
  chr7:103086734-103086910
  binary
tgggacgccggggcgcgggcatccctgccgcctacggatctcttcccaagcacctagaactttccaaagcgtgcttggaatttaacaccttggtcgtcgatccccgcaaatatactctgatgagaccggctttcttcccataccgcccaggagtttctccaggtggcattcctgtc

SEQ ID NO: 18896 - DNA, 67 bp, Homo sapiens; identical to SEQ ID NO: 9898
  chr7:104917801-104917868
  hypo

SEQ ID NO: 18897 - DNA, 420 bp, Homo sapiens
  chr7:1202650-1203070
  hypo
cgagtgaacgggctgtgctaaggggaattgccaccttgggaaacctgtgtagttgcggcttttctgattaagtatcaataaaagtctgaccttgtgaaaaaagcaaacgtgagtggccctgcttatgtttcaccttgcgttgctcagtgatagttctgcaaagtcgcaggaaacctggaatcatctaattatcgtgagtgttggtgagtaacacccataggcactggctcccggggaaatacagagtcaggttcctccgagccgctggccacagcatttttgttaagcagttcatcgttaaccttgttgtacatgtctctctctcaaggttccttatttaataatgtctagttgattcattaacatggaattcatggccagtacctctgtcactcatgcctgactgaagttgatcagcac

SEQ ID NO: 18898 - DNA, 178 bp, Homo sapiens; identical to SEQ ID NO: 10753
  chr7:1333680-1333858
  hypo

SEQ ID NO: 18899 - DNA, 198 bp, Homo sapiens; identical to SEQ ID NO: 12920
  chr7:139929854-139930052
  hyper

SEQ ID NO: 18900 - DNA, 362 bp, Homo sapiens; identical to SEQ ID NO: 12921
  chr7:139930346-139930708
  binary

SEQ ID NO: 18901 - DNA, 32 bp, Homo sapiens; identical to SEQ ID NO: 10754
  chr7:140156493-140156525
  hypo

SEQ ID NO: 18902 - DNA, 88 bp, Homo sapiens
  chr7:140156968-140157056
  hypo
cggttttccatactgtttgttatttctggtttctacatgaggttaagaccctagttaaaacctgtcggaaaataagggtgacaggcac

SEQ ID NO: 18903 - DNA, 200 bp, Homo sapiens
  chr7:149119398-149119598
  hyper
cggggctgcggccgggcggctcccgcactgcgactaagggccagccggctggcaggcggggctggggctcggatgtcgggactagcgggtctctggcgcgaggcggccgccaccaccgagaaggccgcgcgcattcctagagcggccgccagcggccaggtgagggcgccgcggcctccggggcctcctcgcctctggcc

SEQ ID NO: 18904 - DNA, 208 bp, Homo sapiens
  chr7:149119682-149119890
  hyper
ggcacccagcagcgcgctcccgttctcatcagacgggagaaaaaacgcccaggcagaggaacgtctaaaagtcaagtcatcaaaattaatgtaatcgagaaaatgtgcatatttaaaatatggatagagacgcataaatacatctttaaaataaaaatataatcgtttgtgttaagtccttgctccattggctctcagctgcactcac

SEQ ID NO: 18905 - DNA, 52 bp, Homo sapiens
  chr7:149120073-149120125
  hyper
gggccagaggcctggcttggggaagggccccttcccggttccccaaggtccc

SEQ ID NO: 18906 - DNA, 135 bp, Homo sapiens
  chr7:149418013-149418148
  hypo
cgctatggacagccccgagagcgagagccggggagccagcctggatggagagagagcgagccccgagggtaagtcagacagtggggcagtgcacgcagcctcctctgcactccgcatgatgaagcacaagtccac

SEQ ID NO: 18907 - DNA, 137 bp, Homo sapiens
  chr7:151506379-151506516
  hypo
cgagacgggtgcagaatcagcagcggggatcatccagagactctcgcagtccacggcaggtgtcggagtgggcctcattccagagttgtggtggccgctccacctggcgagcttcgaggggactccggcaggcgctc

SEQ ID NO: 18908 - DNA, 195 bp, Homo sapiens
  chr7:151791364-151791559
  hypo
cgacctggacagttttgctttttgtttatttcaacttcagtgaagtgactcagccacttaagaatgtgcccgtcaaggggtctgggccccacggaccatctccaaaaaaattctatccccgtttcactcgaggcccaagtcgagtgctcgagccacagttcaaagcaaacaaaattgacgatgtgatagacagtc

SEQ ID NO: 18909 - DNA, 139 bp, Homo sapiens
  chr7:155502704-155502843
  hypo
cgtcttctttaccctcgttcatctcacactgctgtgaatgatcattttcctaccaaagagatcattcgtgatcccttattatacgtgttgtctctgtggcatagtaatggatcatttacttggaatttagaagccctcc

SEQ ID NO: 18910 - DNA, 39 bp, Homo sapiens; identical to SEQ ID NO: 6613
  chr7:155581980-155582019
  hypo

SEQ ID NO: 18911 - DNA, 53 bp, Homo sapiens
  chr7:157128236-157128289
  hypo
cgatcacgaattcataagcgttgttagttcagaaggtggctgagcaggccccc

SEQ ID NO: 18912 - DNA, 60 bp, Homo sapiens; identical to SEQ ID NO: 7522
  chr7:19156644-19156704
  binary

SEQ ID NO: 18913 - DNA, 253 bp, Homo sapiens; identical to SEQ ID NO: 16079
  chr7:2071776-2072029
  hypo

SEQ ID NO: 18914 - DNA, 324 bp, Homo sapiens
  chr7:212456-212780
  hypo
cgtctcaaaaaaaaaagttttctttagtaaaggactttgctctctgcgctcatcacggctcggtgagttcctagtacaacgtcgtgaattagagagcacagtgtttctcctccgaggtgctagatgtgcggtgagagggtgtaggtgaggggccggcggtgaggtgggggccagcctggggtgctgcacagcgtgtggggggcgggatcaccaggggaagttttagggtctccgtttctaatagtcgctgaaaagcacgtagccggcacatcaacccaagcgctcctgggtgcttttgctttagggttacgttaagatatttac

SEQ ID NO: 18915 - DNA, 327 bp, Homo sapiens; identical to SEQ ID NO: 6617
  chr7:2208344-2208671
  hypo

SEQ ID NO: 18916 - DNA, 91 bp, Homo sapiens; identical to SEQ ID NO: 6618
  chr7:2208844-2208935
  hypo

SEQ ID NO: 18917 - DNA, 290 bp, Homo sapiens; identical to SEQ ID NO: 16084
  chr7:2265241-2265531
  hypo

SEQ ID NO: 18918 - DNA, 761 bp, Homo sapiens; identical to SEQ ID NO: 7527
  chr7:23510081-23510842
  binary

SEQ ID NO: 18919 - DNA, 327 bp, Homo sapiens
  chr7:2679783-2680110
  hypo
cgtggctggaatggcagggtggtgggatcgtggccactgcctgtggctggggctggaggctgcatcgggccaaacttctcatcagagtccctgtgagcaccccccagtgggccagggcctcctcagcccagccacgcgccacggtagcccacaggttggtggcacagagcggcgtgtgggtccgtggcgcagggtagcggggtgggcagctgctcccaggcgtgtgcatgtagagcagccgcctgtgtgtgtgtggggggggacgtgtgttccataggccggccgtgacttgctgtgcaccctcccgagtggcatgcttcctcacac

SEQ ID NO: 18920 - DNA, 59 bp, Homo sapiens; identical to SEQ ID NO: 7531
  chr7:27233098-27233157
  hyper

SEQ ID NO: 18921 - DNA, 78 bp, Homo sapiens; identical to SEQ ID NO: 8710
  chr7:27281871-27281949
  hyper

SEQ ID NO: 18922 - DNA, 34 bp, Homo sapiens; identical to SEQ ID NO: 7535
  chr7:27686735-27686769
  hypo

SEQ ID NO: 18923 - DNA, 45 bp, Homo sapiens; identical to SEQ ID NO: 7536
  chr7:27686815-27686860
  hypo

SEQ ID NO: 18924 - DNA, 190 bp, Homo sapiens
  chr7:27907637-27907827
  hypo
cgcttggtgactcaggcaagacattcaattccatttgccattttcttctcttgctacagagcccacttcagaggattcaatgagtgaatacgacaacggtgcttggatcagtgcctgccatactgtcagcactagtcgttactattttcactggttgaacagacacgtgagttcacacatgacaccatct

SEQ ID NO: 18925 - DNA, 70 bp, Homo sapiens
  chr7:27908068-27908138
  hypo
cgcctcacgggggtttctcaccatccactctgaacaaggcgtggagttgcttgctccagcctggctggtc

SEQ ID NO: 18926 - DNA, 120 bp, Homo sapiens
  chr7:27914823-27914943
  hypo
cgctttctcttccagcctcatccaactcccatcggctctactccaaaacattccgagttcatccgcacttccctgctctgtgatcctcgtcccagccttacatcactttcctctttcctc

SEQ ID NO: 18927 - DNA, 89 bp, Homo sapiens
  chr7:32609681-32609770
  hypo
cgatgtcaccgttcgggggtttgttgctggagctactaacatcctttttcgacaacagaaacacctcagtgatgccattgtggaagtac

SEQ ID NO: 18928 - DNA, 254 bp, Homo sapiens; identical to SEQ ID NO: 16089
  chr7:36124398-36124652
  hypo

SEQ ID NO: 18929 - DNA, 51 bp, Homo sapiens; identical to SEQ ID NO: 16092
  chr7:44740672-44740723
  hypo

SEQ ID NO: 18930 - DNA, 438 bp, Homo sapiens
  chr7:47605259-47605697
  hypo
cgcttggccagttttttatttcttaaggtaataagccagtaggtgggggacaaagttaaatataaacaaatgctgaaaatacgcacaaatttacactagttaacaccaacctcgctttccaatttcgcactctgctggatttcttaatcttaggcaaaaattcacattgggggttcagggagctaaaaggagttctcctaagtatgagaactgtaaatgcagcttattcctcacacgggcgctgggaggctttggaagagcaaccagccacagtctgatggcatgatatgcgtggattactgcaaagccacatggaactttaaagacatctcaattaacagcttcactggggtttcagattagtatacatattggaaaaaagattaatccagatgagtggttctaaaccctgccgagccgcaacccaaagtgtctgac

SEQ ID NO: 18931 - DNA, 102 bp, Homo sapiens; identical to SEQ ID NO: 7551
  chr7:50344738-50344840
  binary

SEQ ID NO: 18932 - DNA, 462 bp, Homo sapiens
  chr7:51383790-51384252
  hyper
ctcccctccacgctgccgggagagccgatcctggggctgccgccgaggccgggagagggaagacttgatgggaaccggccaggggcaagcccgcagggaagaggccggagtcaaaggccgggcgtcccctcgctccccgctccacccctacggcaaacacttggggggcctgaggaaagctcggagctgagtgggggctgtgctggcggggacccccataaggacgcctgcatacaaaccaccccgcgcgaaaagtgcgctccggccccggcccgacacggttacctgggcaacgacccgggtgcccaaagtacacagcacgcaccaccacccaacaccagcacccaacaccagcaccgcaccacctgctccaccactaccaccagcacccgctggggcggcagagagggcgccctgcccgggagcgcgcggtgcggacgcgggcgtccgagcccagggaag

SEQ ID NO: 18933 - DNA, 237 bp, Homo sapiens; identical to SEQ ID NO: 16096
  chr7:5230941-5231178
  hypo

SEQ ID NO: 18934 - DNA, 237 bp, Homo sapiens; identical to SEQ ID NO: 13011
  chr7:6543240-6543477
  hyper

SEQ ID NO: 18935 - DNA, 62 bp, Homo sapiens; identical to SEQ ID NO: 13012
  chr7:6570393-6570455
  binary

SEQ ID NO: 18936 - DNA, 137 bp, Homo sapiens; identical to SEQ ID NO: 17097
  chr7:808392-808529
  hypo

SEQ ID NO: 18937 - DNA, 242 bp, Homo sapiens; identical to SEQ ID NO: 17098
  chr7:808577-808819
  hypo

SEQ ID NO: 18938 - DNA, 382 bp, Homo sapiens; identical to SEQ ID NO: 17099
  chr7:808848-809230
  hypo

SEQ ID NO: 18939 - DNA, 336 bp, Homo sapiens
  chr7:98598608-98598944
  hypo
cgtagactaagtggttcacatgtgtggtattcaaagaatctcctaaagactcattgtgtcctagatgacacagttaatattaagtcacataaaagaaaatcttcatctccttaatcggaaaggacactcaacagccatagctgtgaccagggttgcatcgaggttgcatccagctgaagtgtggcgtgtgccctgcagttgctccaggcagtctgggggcgcagctccctgttcgtgatgtgtgggttgggcttgccttaggtgaacccacagctgagggaggtgctctttgaaaagtgaagggcaagcccggtcctccccgtctatacgtgaagc

SEQ ID NO: 18940 - DNA, 170 bp, Homo sapiens
  chr7:98599246-98599416
  hypo
cgcacagccagagctcatccaccttccgctctcctgtacacaggggaggctgtttctgtctctttgtctgtgttccgttcgtggaatgcagtccgattctctagcagagctgcatgtgtgggctgccaaccacatgtctgtaaagaggtggaagaaagctcagaaatggc

SEQ ID NO: 18941 - DNA, 623 bp, Homo sapiens
  chr8:107669381-107670004
  binary
cgcaaactaaatccctcaataacgttgcctaaacaggactgggatcatagaatgtccaacactaacatgagttcataatggcacaacgaacttaaaatgttactattcatgttttaattatgattgcagtcttacgttgaaggtatctccgccgtccttaaacataaaaaaaaaaaaaggaaatacaagctgcaaaagttttatgtaatgcactccaccctcttttttccccaagccaacacacacccttcaaactttttgacagttattttcagacccctcctaggctcccgaactccatgcaactccagcagtctcccctgggccatttttagcctctgctctgacctggcgggaggctgggtgtccaccctttcccctgcagtcctgaaagtccggtccgagcgcggacggggcggggaggggctgggcgggccaggccagctccattggcgccaggcgggtgggggaatgcgctgagaggacccgtccagcttgcttaaaagccatcagttttctgaccccgcatcggttccaggaagaatacacctatgtgacaagctaagttctgcctcattttgcatttagaagccacaagaaaaacttttcgaaaacttttgtcc

SEQ ID NO: 18942 - DNA, 634 bp, Homo sapiens
  chr8:107670289-107670923
  hyper
gggggcggcggcgaagcccggcaggtgcgcttcgaagattacctgagggagccagcccagggggacctcgggtgcgggtccccgccccaccggcccccggcgccgtccagcccggagggacctggtgagcccacctttctttcgcctcccgcgcggccgacctgggctgagggctgtggggaggcggcggtcgtggcgccgggcgggggtcgctgcccggctctggcaggtgtgcctgggccggggcgggcaacgtggccggggtggcggccgccgggggcgaggaaggaaggactcgttcggctctggggagggaagactttcagctgcgtgccagctcttcctgctctgctcttcctgctttcctcacctagacttgattttctttccccgccaagtatttcaaggggacgatccattctctctttccctcccactgggaggtgaagactgaaccagttatgacgtccgtgttttcagtcttggattcttgaagagcgctgtgcctgctttggttttggtttgggtcagtctttccttaatatttctcagttgttaggattcacttcctaaccgaaaaataaaaagccagatacttctttgtaaaataaaacacttcattaacattggaagc

SEQ ID NO: 18943 - DNA, 105 bp, Homo sapiens
  chr8:107670978-107671083
  hyper
gcagaacctagaaactttctcagttcctgtttattttgtgttgtgttggccgatttttttcaccacagtggctttgtaccattctttaaaacagtcatttgtagc

SEQ ID NO: 18944 - DNA, 439 bp, Homo sapiens; identical to SEQ ID NO: 13026
  chr8:1132651-1133090
  hypo

SEQ ID NO: 18945 - DNA, 123 bp, Homo sapiens
  chr8:120846246-120846369
  hypo
cgaagccatcgtgtttgtatttcatgttcatgacaataaaacttgtaaacttcagtaacagttaaaccttctttaattatggattagccattaacatttttgaaacgtggaccatttaacctc

SEQ ID NO: 18946 - DNA, 42 bp, Homo sapiens
  chr8:125573965-125574007
  hypo
cgaccctttgccctctctgcttgtgagcagcacatatggttt

SEQ ID NO: 18947 - DNA, 165 bp, Homo sapiens
  chr8:125574036-125574201
  hypo
ccttacagaccaagccaagcaccccaggtgggacacgcactctcaagcactctcaaactatagccgtggctcttggctctgagtgcgtttaaaattgagtgtgtatccaaggaaggcagacagaggccacagtccccaggatggctgaaaaatgctaatgggagc

SEQ ID NO: 18948 - DNA, 132 bp, Homo sapiens; identical to SEQ ID NO: 9961
  chr8:126042734-126042866
  hypo

SEQ ID NO: 18949 - DNA, 44 bp, Homo sapiens; identical to SEQ ID NO: 6624
  chr8:126044399-126044443
  hypo

SEQ ID NO: 18950 - DNA, 354 bp, Homo sapiens
  chr8:128867892-128868246
  hypo
cggtgaactcccgtcatgtcaggcctcagcagactgagcgggaacccccaccagcgaggttgctcaggacagcgtttctcttgggcctgtgtttggaacaagtatcctttgaactaatcactaacctgtgaaaatggatagacctcgtgtgaaaatgaaaatgtctggcttcccttctgaggagcggaggcatgaaaggtgtggccggtaggggtgggggccccacacctgtgcagccgccctggccagagcccacaagcagcgtcccctggtcatgccccactcccttctccataatctcgcccctccctgaccaggccacctgacgttgccatttatattcaagttcattcc

SEQ ID NO: 18951 - DNA, 631 bp, Homo sapiens; identical to SEQ ID NO: 7564
  chr8:128871653-128872284
  hypo

SEQ ID NO: 18952 - DNA, 191 bp, Homo sapiens; identical to SEQ ID NO: 7565
  chr8:128872459-128872650
  hypo

SEQ ID NO: 18953 - DNA, 62 bp, Homo sapiens; identical to SEQ ID NO: 8745
  chr8:128888848-128888910
  hypo

SEQ ID NO: 18954 - DNA, 43 bp, Homo sapiens; identical to SEQ ID NO: 8746
  chr8:128889422-128889465
  hypo

SEQ ID NO: 18955 - DNA, 440 bp, Homo sapiens; identical to SEQ ID NO: 16107
  chr8:128893135-128893575
  hypo

SEQ ID NO: 18956 - DNA, 101 bp, Homo sapiens
  chr8:134254220-134254321
  hypo
cgacacatgccccgacccactgcacacggggaatgccatactcactgtatcccatgccctgcacgaagtacttgaaggcctcagcgagcttggccggctgc

SEQ ID NO: 18957 - DNA, 322 bp, Homo sapiens
  chr8:140799730-140800052
  hypo
cgggcctgcctggctctgtcctcccttctgccccgaccctgcagacgctttcaaagcctaatatggaaaaaggcctcaccgaaagcttaaatgtaaatgaaccaagctaaggacgctgatatacacagaatttctttctacatggttattaggttaatagttaaaaactggcgactattaactttcactttaaatttattgttcaagctaacaccactgtttttcaacgtccctgtccggggtcggtgctacctgccaatgagcacctgggtgtgtttctgtctagagaccactgggtgctcaccagaccccacaggaagac

SEQ ID NO: 18958 - DNA, 392 bp, Homo sapiens
  chr8:141147354-141147746
  hypo
cggtgctcctcactgggctgccagcgactccaaagcagagaccacatgctccagtgaccaccttggccccacacctggcactcaaggaggtctgcgtaattagtaagtgctggatctcatcatagagatgactgtccaagatcactcatcatagagatgagtgtccaaagtgctgtccaaagtccagatcactctggagcgggtagtgagctttccacggcagataacatggtggcgagcacgtcctgggtgcctaccgcagaccggccctgggcggcctcaccccacgctgcccactcactgtgacggtcggggtcaagccactgcggcaggatctcccacaccagccccaccccgcacctgctgaatcaggttttacattttaactagac

SEQ ID NO: 18959 - DNA, 297 bp, Homo sapiens; identical to SEQ ID NO: 8749
  chr8:141599879-141600176
  hypo

SEQ ID NO: 18960 - DNA, 50 bp, Homo sapiens; identical to SEQ ID NO: 8750
  chr8:141600284-141600334
  hypo

SEQ ID NO: 18961 - DNA, 89 bp, Homo sapiens; identical to SEQ ID NO: 10806
  chr8:142243860-142243949
  hypo

SEQ ID NO: 18962 - DNA, 66 bp, Homo sapiens; identical to SEQ ID NO: 10807
  chr8:142244214-142244280
  hypo

SEQ ID NO: 18963 - DNA, 63 bp, Homo sapiens
  chr8:146105109-146105172
  hypo
cgtttgcagctggctgctactagaaatggttctgattcggtttcaagaactgtatccttggcc

SEQ ID NO: 18964 - DNA, 128 bp, Homo sapiens
  chr8:28207473-28207601
  hypo
cgacctgtggccacgtgccccgtgcccaagggatggcctccagccctgggatgtgtgggagagccctcggccatacgaggccccagccgtgctgcccgcacactcaccggagagagagagcaggcggc

SEQ ID NO: 18965 - DNA, 89 bp, Homo sapiens
  chr8:28207908-28207997
  hypo
cgctggtctacgtgctagcctcatgacttaatcaccgcagaagatttaacttctcaactggatcacctaccaagaacatgccatggcac

SEQ ID NO: 18966 - DNA, 92 bp, Homo sapiens
  chr8:28237888-28237980
  hypo
cgactgaaccttgatttgtctgcaaaaccagcaattcctctcacttctgcgccactaacaaatctgatgagcgcgccttctctgtcttcacc

SEQ ID NO: 18967 - DNA, 130 bp, Homo sapiens
  chr8:2970523-2970653
  hyper
cgtttgcatttccccaagtggtggcgtctcactgagctccgcagagacgggggcctgtgatctgccactgcaggaagtgtgcgtgtctcggcaggaagcgtatcccccctgccttcctttccctgaaggc

SEQ ID NO: 18968 - DNA, 402 bp, Homo sapiens
  chr8:37702286-37702688
  hypo
cggtggctccttctctcgggtctccacttctgctgtcccatcccgaaaggcagagcggaccagtgactggcggtgctggagaaggtcaccgatgtgcttcaccacagaccgtttgtcaagtctcagaactcgtaaccaggccagctgctcagccatccgcagcagcacagccagcagctcctgcaggcgggaggacgccgggtagggcaggtccacatttgccaatttacaaaatcgggcaagggaacatgaaagccgatctgcaggctgcagcgactgccaagccaggaaagtcgcagcagtgatgacgggcaagggatgcctcccggtcaccagccacgtctcatttgccagctccaccaactgcattgttcgagacagcatcttctctttgtcttccac

SEQ ID NO: 18969 - DNA, 85 bp, Homo sapiens
  chr8:38697075-38697160
  hypo
cggtagccatccataataaccaacttggatatgacgtcaaaagtgatgggggcaccaccattgagggcaggggaggacgtgatgc

SEQ ID NO: 18970 - DNA, 260 bp, Homo sapiens
  chr8:591683-591943
  hypo
ggtacgctggcagcggagctcctcccggaggacccctccccctccccgccgattcctctcctgtctgcgttttccaggctcatctcagatgccgccttgtctatgaagctctctttggttcctgcccagacctcatcagaatcaacgccccggctctgtgctggccaaaaccccacggtgcctctggccgtatgcagtcctttcttctgaccccatctcgtcctccagtctccactggtctcaggtcaatagctttttcc

SEQ ID NO: 18971 - DNA, 293 bp, Homo sapiens; identical to SEQ ID NO: 5855
  chr8:61193765-61194058
  binary

SEQ ID NO: 18972 - DNA, 120 bp, Homo sapiens; identical to SEQ ID NO: 13055
  chr8:61822259-61822379
  hyper

SEQ ID NO: 18973 - DNA, 144 bp, Homo sapiens; identical to SEQ ID NO: 13056
  chr8:61822883-61823027
  binary

SEQ ID NO: 18974 - DNA, 142 bp, Homo sapiens; identical to SEQ ID NO: 8774
  chr8:81213177-81213319
  hypo

SEQ ID NO: 18975 - DNA, 327 bp, Homo sapiens; identical to SEQ ID NO: 8775
  chr8:81213356-81213683
  hypo

SEQ ID NO: 18976 - DNA, 78 bp, Homo sapiens
  chr8:95848311-95848389
  hypo
cggcaacagcgacagtaaaatctagtttccggggacagcacttgcaggagtgtagctgctgctttcagggtctggtcc

SEQ ID NO: 18977 - DNA, 209 bp, Homo sapiens
  chr8:9760527-9760736
  hyper
cggaggaaggtgttgacccacatacaatgagtcctgagcccagagaaaaatctgcacacacaagcactccgcaatgcgctcccaggcgaccccctccccacgcacaccgcatctgtgctgcacagatctgcttctgtcacagaatcagcttctgtttctctccctgagtctgtttgcatctctaagcccctgtctgtcacaggctgcac

SEQ ID NO: 18978 - DNA, 261 bp, Homo sapiens
  chr8:9761155-9761416
  binary
cagcatcctccccgccgcagctcccccaatcacacagacaatgagataacagcgacgtcttccaaaggctctttgttctcccccatcctttcgcatccaggctttttcctgcaaagcggagggggtggagggatgggggtgtgggtggaagtgggagacggaggggtgcctcccccgtgttaattaccccggctcccctcgcccctttccccgcgcctcgcctcccctgcagctccagacaatgaaaaaacaacatcgacc

SEQ ID NO: 18979 - DNA, 420 bp, Homo sapiens; identical to SEQ ID NO: 14351
  chr8:99956867-99957287
  binary

SEQ ID NO: 18980 - DNA, 51 bp, Homo sapiens; identical to SEQ ID NO: 13063
  chr8:99957709-99957760
  hyper

SEQ ID NO: 18981 - DNA, 202 bp, Homo sapiens; identical to SEQ ID NO: 6314
  chr9:100610480-100610682
  hyper

SEQ ID NO: 18982 - DNA, 442 bp, Homo sapiens; identical to SEQ ID NO: 18080
  chr9:102586203-102586645
  hyper

SEQ ID NO: 18983 - DNA, 191 bp, Homo sapiens
  chr9:116065600-116065791
  hypo
cgctcatccttgcaggcctctgttctgggtccgattgatctcctgccatcccctcggattccactgtcctctgtgcgctgacctgcctcgactcctggcttctgccgagatggatccttccctatgctgagtccctgtaaccaaaatacagatagctcttgcaaaatactgacaaaagcggccactaatac

SEQ ID NO: 18984 - DNA, 302 bp, Homo sapiens
  chr9:116065827-116066129
  hypo
ctgaagagccagggttctcaagcaaggcacacttctaggtcagagttcagccctcactgagaatccaaactccgtttaactaccgatggagacttgagcaaattaattaacttctgccagcctcagtttcctcacctgaaaatggccataataacctacctacttgatctgtagattaaatgaggtaatacgtgtcgagatcgcgtaataacacagggcctggcagacagtaactcgctaaatgttaaccagaactattattgttataaccggtctgttcacgtggcccatcttttgttccc

SEQ ID NO: 18985 - DNA, 43 bp, Homo sapiens; identical to SEQ ID NO: 16136
  chr9:116800647-116800690
  hypo

SEQ ID NO: 18986 - DNA, 563 bp, Homo sapiens; identical to SEQ ID NO: 16137
  chr9:116800730-116801293
  hypo

SEQ ID NO: 18987 - DNA, 90 bp, Homo sapiens
  chr9:124751515-124751605
  hypo
ctggtagaagactttgagctctggagtcagcgcgatgaccgtcttaatcaccacggagatgatgtcagaccagaccttcttgatgtcaac

SEQ ID NO: 18988 - DNA, 280 bp, Homo sapiens; identical to SEQ ID NO: 15303
  chr9:132145475-132145755
  binary

SEQ ID NO: 18989 - DNA, 344 bp, Homo sapiens; identical to SEQ ID NO: 16144
  chr9:132881052-132881396
  hypo

SEQ ID NO: 18990 - DNA, 35 bp, Homo sapiens; identical to SEQ ID NO: 16145
  chr9:132881495-132881530
  hypo

SEQ ID NO: 18991 - DNA, 144 bp, Homo sapiens
  chr9:133592887-133593031
  hypo
cgaacccagctgtgcaatctagtgagatcttacctctacagaaatttaaaaaattagccaagctcccactggagccaaagagtcgaggctgcggtgagccatgaacacagcactgcattccaatttgggcaatagagggagacc

SEQ ID NO: 18992 - DNA, 637 bp, Homo sapiens; identical to SEQ ID NO: 18101
  chr9:140196486-140197123
  binary

SEQ ID NO: 18993 - DNA, 155 bp, Homo sapiens; identical to SEQ ID NO: 18102
  chr9:140197263-140197418
  binary

SEQ ID NO: 18994 - DNA, 232 bp, Homo sapiens; identical to SEQ ID NO: 16157
  chr9:140645189-140645421
  hypo

SEQ ID NO: 18995 - DNA, 65 bp, Homo sapiens
  chr9:173878-173943
  hypo
cgtgctcatttaaaaattaaacttatagggaggccaaggcgggcggatcacgaggtcaggagacc

SEQ ID NO: 18996 - DNA, 44 bp, Homo sapiens
  chr9:19374763-19374807
  hypo
cgcagtgcacacctgtagttcccaggcggtcaaggctgcagtga

SEQ ID NO: 18997 - DNA, 238 bp, Homo sapiens; identical to SEQ ID NO: 13081
  chr9:37035890-37036128
  binary

SEQ ID NO: 18998 - DNA, 231 bp, Homo sapiens
  chr9:7028696-7028927
  hypo
cgcaccccagagtactctagcccgtggtggcaaggcttgctggaactgggatgtgtgatctccctctgacgtggactggttaaatattccctctgtgggcaggcgccaggtcagctcagccaggtttgctttctcttgtaactgggcagcacggaattcagtgcattctcttacaatttctgtgctctcctgtgccatgtgaccgttgccaggggataagggaggggcggc

SEQ ID NO: 18999 - DNA, 349 bp, Homo sapiens; identical to SEQ ID NO: 10025
  chr9:71320587-71320936
  hyper

SEQ ID NO: 19000 - DNA, 280 bp, Homo sapiens; identical to SEQ ID NO: 16169
  chr9:96348822-96349102
  hypo

SEQ ID NO: 19001 - DNA, 78 bp, Homo sapiens
  chrX:41331620-41331698
  hypo
cggtggctccaaagtgggtggccacacgcacaccctcgtgcaatgtgaagctcacctgatgactcaccatggccagca

SEQ ID NO: 19002 - DNA, 286 bp, Homo sapiens
  chrX:41331751-41332037
  hypo
tccaaggattcttgagctatggaacactcctggatttcaagaacctctgactacaggggggctctgcgtccatcaggggcaaagccacggctgagaccatcagggcctcggggcagccggagcacaggcacaggaaaggtcactggagcctgcattgtcttggcgaggtccgtggctactgtgcgcgcccccacttccgccggcaccccgcagtagaggccagggcaggccccgagccgcggagcctgggttccgcctgcgccaccgccaccaacccacgtgtcac

SEQ ID NO: 19003 - DNA, 461 bp, Homo sapiens; identical to SEQ ID NO: 18118
  chrY:15863654-15864115
  hyper

SEQ ID NO: 19004 - DNA, 74 bp, Homo sapiens; identical to SEQ ID NO: 7627
  chrY:16635744-16635818
  hyper

SEQ ID NO: 19005 - DNA, 1082 bp, Homo sapiens; identical to SEQ ID NO: 7628
  chrY:16636060-16637142
  binary

SEQ ID NO: 19006 - DNA, 208 bp, Homo sapiens; identical to SEQ ID NO: 18121
  chrY:21205113-21205321
  hypo

SEQ ID NO: 19007 - DNA, 122 bp, Homo sapiens; identical to SEQ ID NO: 14407
  chrY:22918582-22918704
  hypo

SEQ ID NO: 19008 - DNA, 90 bp, Homo sapiens; identical to SEQ ID NO: 7629
  chrY:2655227-2655317
  hyper

SEQ ID NO: 19009 - DNA, 596 bp, Homo sapiens; identical to SEQ ID NO: 7630
  chrY:2655346-2655942
  hyper

SEQ ID NO: 19010 - DNA, 185 bp, Homo sapiens; identical to SEQ ID NO: 7634
  chr1:101774910-101775095
  hyper

SEQ ID NO: 19011 - DNA, 71 bp, Homo sapiens
  chr1:10692421-10692492
  hypo
cgtggaggagaaacggacagaaacctgggcccggaggccttttgcccctgtgggtcctgagcaccgaattc

SEQ ID NO: 19012 - DNA, 182 bp, Homo sapiens
  chr1:10692798-10692980
  hypo
cgggggacagctgccctgacctcaccccggaccagctccctcggtccccggggtctgtcccggctcctccggtaactcgctggttctgccttgggcaggggcatctactttgggaaggacaggggacctcccttggtgtttgcgactcgcaggacaggccaggaggcgggggagttgccttc

SEQ ID NO: 19013 - DNA, 144 bp, Homo sapiens; identical to SEQ ID NO: 14422
  chr1:110186004-110186148
  hyper

SEQ ID NO: 19014 - DNA, 35 bp, Homo sapiens; identical to SEQ ID NO: 14423
  chr1:110186177-110186212
  hyper

SEQ ID NO: 19015 - DNA, 330 bp, Homo sapiens
  chr1:114522986-114523316
  hypo
cggcatgctgctgagctgcgggacttcaagaacaagatgctgccactgctggaggtggcagagaaggagcgggaggcactcagaactgaggccgacaccatctccgggagagtggatcgtctggagcgggaggtagactatctggagacccagaacccagctctgccctgtgtagagtttgatgagaaggtgactggaggccctgggaccaaaggcaagggaagaaggaatgagaagtacgatatggtgacaggtaaataatctgaaagcaggcccctaactcttctcagaaccgatattcttccttccttgcttcttactctttttttc

SEQ ID NO: 19016 - DNA, 53 bp, Homo sapiens; identical to SEQ ID NO: 12013
  chr1:11538821-11538874
  binary

SEQ ID NO: 19017 - DNA, 84 bp, Homo sapiens; identical to SEQ ID NO: 7651
  chr1:150586185-150586269
  hyper

SEQ ID NO: 19018 - DNA, 154 bp, Homo sapiens; identical to SEQ ID NO: 14436
  chr1:151566699-151566853
  hyper

SEQ ID NO: 19019 - DNA, 35 bp, Homo sapiens
  chr1:156036276-156036311
  hyper
cgagctgcacggatcgagagcgccccctcacttcc

SEQ ID NO: 19020 - DNA, 229 bp, Homo sapiens; identical to SEQ ID NO: 14437
  chr1:156326789-156327018
  hyper

SEQ ID NO: 19021 - DNA, 423 bp, Homo sapiens
  chr1:156593638-156594061
  hyper
cgaggtcattcactctcatcgtggggccacggccacgctgccctgcgtcctgggcaccacgcctcccagctacaaggtgcgctggagcaaggtggagcctggggagctccgggaaacgctgatcctcatcaccaacggactgcacgcccgggggtatgggcccctgggagggcgcgccaggatgcggagggggcatcgactagacgcctccctggtcatcgcgggcgtgcgcctggaggacgagggccggtaccgctgcgagctcatcaacggcatcgaggacgagagcgtggcgctgaccttgagcttggagggtgaggcccttccgctcccgccccattcctgtgtagcagcgggtccgcctcgcctgggtctcccagggctccttcccagtatctcctccgcacccctggggaccccagc

SEQ ID NO: 19022 - DNA, 203 bp, Homo sapiens
  chr1:156594227-156594430
  binary
acgcctggccacctactcccagctctaccagggtgagcggccgaacccagcacttcccaagccccgcggagctgtctcaggggcccgagagagggcgccaggcgagctcagtctggctcctgcctatgacgcctcttatccccgacctccgccgtctcccgccagcttggaccgagggtctggactggtgtaacgcgggctgg

SEQ ID NO: 19023 - DNA, 175 bp, Homo sapiens
  chr1:156662232-156662407
  hyper
cgagtggaaatggggacgggcaaggcactctagagggccaagtgtcacggaaagagaaggaagttagacaggagaggagggggagggggctcctaggtcccatccttccataaagagccgtgggtctgaccccgatgcaggggaaaccaagtgtaggcagcaaggatgtgtcctc

SEQ ID NO: 19024 - DNA, 274 bp, Homo sapiens
  chr1:15735867-15736141
  hyper
cggcgcccgccacggttcaccctaaacaggggtttctgctccccaggtccgcctcggaacccctgcaaccctcattgagaacgccagtgtttaacagcgagtcgtttccatagcaaccgacagggtgtcacagacacaggattatgacttcacggcgtggggattccggagaagggggtggggcggcgccccccctcgcttccccgccccccggcaagccccgctcctcacccaagccgcgggggaggagccctcttctttcccgcccggcccc

SEQ ID NO: 19025 - DNA, 396 bp, Homo sapiens
  chr1:160983499-160983895
  hyper
cgatcagctggctcgggtcctctgaggatggcagaaagtggtaatggcagggtaagacaggctcgctttcactccctggctccctcccgccctctctgcagaatttccggttctacctgctcagctcccccgccaccccatcttcccagtgcaagggaaggtcgagccttccagcgcaggacttacttcaggggcccagcacccacttcctgccagccagctgcttcctcctgttccgcccctacattgtgaaacaaatgacgcagccggactttagacagaaaccctgcttatcagggagtccaggcagatgaactctgggttctcaatgccaggaaaaccctagtgtgtatccactctcacagtatgtgttcactcatactgctttccacaacc

SEQ ID NO: 19026 - DNA, 935 bp, Homo sapiens
  chr1:160990384-160991319
  hyper
cggctgcgcagcggggttcgtggatgctgggtggccgttggaggggcaggctggcccttcccaggtgcgtgtggagcgcgcgctgggtagatgagtgtggaagggtccttggcccgacggccctctccagtgaggacgaggagtgtacctctggtgtgtgcagatgggtcagctccctcctggtggccgtgaggggtgcggtcacaactcaccagtgtgggggaggggagccagccactcacccagctgtgagagtggtgaaagagggaccagccaggggtggaaaagataattcgcagaacgatataggaaggtttctgagctcctcccctcccgcgggctaggggcgtggggagagccttcctccaacctctgacccgaccaaccgattcctcccgaaactctgggaacttacacaacaggatcgccaatatgaagaggcacaacagtttcctctcgacttgcgcctttgtccccatcgcgatcaggctcccgacacaacagccgccgaaggactcctgggaacagacacagctccgcgactacagcgaggggactgagagccagccgccaggtggaaccccgcccggccccgccctccgcgcctgattggccagctccccacccctgcacgttccgattggtgtaaggaaccgctgctcttcagaacgagtcacctcggccaggtgttaccccgccgccactccccgcctcggcgcactggcgcctttccccacaggagctgcctcagattggcccaggagactgtcgcgtcaggagacgaattccgcaccttcagcaggtgacggccccctgattggttggtgttcccgaagtagcgacttcctgactggctgggttctcagttggagctagagggctgagaagtacctctaaggaggaagtaggaaaggcagtcgtggtgtgggatttac

SEQ ID NO: 19027 - DNA, 205 bp, Homo sapiens
  chr1:165086756-165086961
  hyper
cgccggccgttctctccgcaggtgcccggcccctgcctccgagtgcgcctcgcggagcgcaaagcgctgtcacgactcggtggccgaggtgattaattagcggcgtggccgtgcgggggacgcgtgctggcctccacatctgccccgtgccagcaggggtcaatatgcggtgtcactgctttccctctcactccctccaaagcct

SEQ ID NO: 19028 - DNA, 60 bp, Homo sapiens
  chr1:165087027-165087087
  hyper
aggctgagggcaggttgacgggcctgtggagaatgtgtgctgcttcctgcaggcgaccac

SEQ ID NO: 19029 - DNA, 328 bp, Homo sapiens
  chr1:169074766-169075094
  hyper
cgccgccgaccgggcaccaagaaagtcctcggtggctgggtcacgtgcagatattgttgcctggggtctagactggcctgagtctcaattggtttctacgggacaactcactgcgggctaccgccctgggtgggtttggcaattgtcctgctcgaggtggttcaggccgcccacaaggggcacagccgggcagtcaggaaccggggctgccggctgggctggcctgcaaagaagagggaagggccggaactgcaaccgcagtggcggggagtgcgagggggcggcaggtgcaggagcgggaggcggggcggagctgggcagagtcctc

SEQ ID NO: 19030 - DNA, 129 bp, Homo sapiens
  chr1:170629412-170629541
  hyper
ccagggcttggtccctgcagctgaggcctacgggatatcccaggaaagagcagcctctccgtagtggtgaagagtctctcaagccttagcgctctggtgacctccgcgggattctgagaaaagcactgc

SEQ ID NO: 19031 - DNA, 101 bp, Homo sapiens
  chr1:170629569-170629670
  hyper
gcttcgcgccccccacccgcccggggaccgcgactaagtccccgacgcagctcttcccttttcctgaataccctgggactctgctcccgagttccagctcc

SEQ ID NO: 19032 - DNA, 227 bp, Homo sapiens; identical to SEQ ID NO: 14443
  chr1:175161560-175161787
  hyper

SEQ ID NO: 19033 - DNA, 78 bp, Homo sapiens; identical to SEQ ID NO: 13124
  chr1:182911469-182911547
  hyper

SEQ ID NO: 19034 - DNA, 151 bp, Homo sapiens
  chr1:184722819-184722970
  binary
cgttttaatctgcatctcctacgtttatggaggttgagtaacttttcatgtttatttaccacttccatttcctcttctggcttaaccgttcatgcctttctcccatttcctactggttcttcgcttttttcttattcatgtgtaggacctc

SEQ ID NO: 19035 - DNA, 307 bp, Homo sapiens; identical to SEQ ID NO: 17195
  chr1:19283560-19283867
  hyper

SEQ ID NO: 19036 - DNA, 100 bp, Homo sapiens
  chr1:197881313-197881413
  hyper
cgccgcctcccgccgagaaccgagttctagttggggaaacgtctgacatctggacatcaaggtaagaccctgatggagatattttagtcggagcagtttt

SEQ ID NO: 19037 - DNA, 176 bp, Homo sapiens
  chr1:197881604-197881780
  hyper
cttttctctgccagtgcaaccaccattacggcgtgatccactccttttcctctaagaatgctgaacggtaccactctagaggcaggtgagttatgtgccaggttccttctgatgttctctgccccttgggccagtgcgtataccatgtgagtgtgtgtgcgtgtgtgtgcgccttc

SEQ ID NO: 19038 - DNA, 1129 bp, Homo sapiens
  chr1:1981183-1982312
  binary
cgattgtccagatcaagcccctcgagtaaggcccgagaggctgtggcttcagaaatgaaggtcatgggcgactcgggccaatgccgcgtccttgacctgggcgaagtgagcggttgcactcacgagtgtggacggcccttccctacaggggaccttggattcgctgggggcggagtgggggctggggcccagagaacccgagtccggacgctcccgtccgtgaccctggccgggttctccgctcctcgcagcttcagtccgcaagtgtgagatgtcaggggacccctggacggcggggccctcgggctggcagcgcgcgccgcaggagtttcgattcggagggtctgggcgaaggccgagaactcgcgtttccagcgagttcccgggggcgccgctccgtcccagaggccggggcccctccggttgccgggcagagccgcgccgcgcgcggtcccattggcgcaggtgcgccgcgccccgcccaacaggtagccccgcccgacaggtagccccgcccgcgcctcgccattgggccgcggccgggtgtcccccgaggattggcccaggtggcggccccgcctcgccctcattggccgcaggtgccaccgcccgccccgggaccgcccgccccgcggattggccgctggctccacctcggtccgccatgttcggacaccgccccccgcccccgccggacggtcccgccccgcgcgccccccgctcccgccccgcgcgccgccggagttccgcggagttgaccgggtcggcgccgtcggtcctgagcgctgccttccgcgttccgccgcggccccacctggagcccccgccccgcgccatggccggagctcccggggcgcagcgctgacggcggcggggggagcgcgccatgcccagcaggaccggccccaagatggaagggagcggcggccgcgtccgcctcaaggcgcattacggggggtgagcggcggagagggcggggagcggcgcgggtgaggcagggagggcggggagggctcagccgtcggggctcctgcgcgagagggagagagggaaggggcggcgaggtcgctgcgggcccggggctgtcgcgggaggtcctcggtccccgcccgtgagcgtcacccgcgga

SEQ ID NO: 19039 - DNA, 198 bp, Homo sapiens
  chr1:1982427-1982625
  binary
cggggacgttccggccgcaaacctgtaaggactgaaagttttcatcaagttgtgaaaactcctggcgggtttcttaaaatcagcgtttcctaaacgttctccacgtttacccggtcgggggtctcgctttagccaaaatccggagacccggggcgcgggcgctgtggctccaatgcagcccccggcagggctcggggc

SEQ ID NO: 19040 - DNA, 255 bp, Homo sapiens
  chr1:200379717-200379972
  binary
cgcatatcctttgcatttatgggaggagcctgctttgaaaccgcaattagtggtaccgttgcaacaaaaaaaaaaaaaagaaaaagaaaaaaacttgtcttactgccaaccttcctgaaggctactggaagaggaaaccgagcgtaatccaggtgcagcagtcctgtaaaacacgcccacacacatacttcattatcattacatcttatttaaatgcccccgtaccttagcctggctaatcagtctgtttgccac

SEQ ID NO: 19041 - DNA, 579 bp, Homo sapiens
  chr1:201449645-201450224
  hyper
cgttcagaggcagccccagctgcggggcggggcggggcggggcggggcggggcggggcgcggagctgttggcagctaagtggttgaggttgagcggccgggtggaggccggcacctactaggaggctgggctggtccgcaggttctcaagcccggctgagcccgggcaagcgtcagagaatcaccagagcagcttgtcgaatacagattcccaggccccacccaggccaaccgaatcagaatctctaggggtggggctgggaatccatttttaaaggcttccccaatgattctcagaataaaggttgggcttggaggcggggccggggctgggcgtggcacggaggcgaggcgcggggagggccggaccttccagttgttaatccctgtgttcctcactccgccacactcacctccactgatctaagtcgggggatcgttcctcgctgggtgcccccctcacttgatcttagccaaaaggtcgagaagcgattgggagcccctctcgaataatttctgtggcccttgattcagggatcactcccacacttaatagcagctctaacgccccccaaccccc

SEQ ID NO: 19042 - DNA, 160 bp, Homo sapiens; identical to SEQ ID NO: 13135
  chr1:202112280-202112440
  hyper

SEQ ID NO: 19043 - DNA, 138 bp, Homo sapiens
  chr1:202531802-202531940
  hypo
cgaaatacttcttagaaaaggcgcaaactacccctgagcattaccttctccccactactttgttctcaaaaccaatttttatctttaatattatctcccacaggttggaatcgggaggtagtaatcctacaaccagtg

SEQ ID NO: 19044 - DNA, 80 bp, Homo sapiens
  chr1:202613545-202613625
  hyper
cactcctgtgcctcagtgtcacccttgggcctcaccctcaacccccaacctcacccgataagacctcggggccacagctc

SEQ ID NO: 19045 - DNA, 259 bp, Homo sapiens; identical to SEQ ID NO: 14453
  chr1:20810336-20810595
  hyper

SEQ ID NO: 19046 - DNA, 260 bp, Homo sapiens; identical to SEQ ID NO: 14454
  chr1:20810930-20811190
  hyper

SEQ ID NO: 19047 - DNA, 68 bp, Homo sapiens; identical to SEQ ID NO: 14455
  chr1:20811219-20811287
  hyper

SEQ ID NO: 19048 - DNA, 237 bp, Homo sapiens
  chr1:209979376-209979613
  hyper
cgtcttagccaaggggcgcctggctctacccaagtagggactgcaggttcctctccccgtcccgcaccagcccttacctgcccagcccaggtgcgccgagctcacgtcagcgcctcgccccaggacgccgcagccttcgcatccgcccggccacgcctcccaggtgtggccacgccccccggcgttcgggattggcgagttgcaagaaatatgacactccgcgtttctgggctgccc

SEQ ID NO: 19049 - DNA, 279 bp, Homo sapiens
  chr1:214453844-214454123
  binary
cgttcgcagcatgcctcagagactcggtgagctgggccggccaatgcatttcctcttccgtccatgtaattccactagaggagcagagggcaaactacgttcccattaaagccacaaggtttaaaaacctctaaccttggaaaagcacacttcaaccctctgcacaccaaacttctctactgtggtttcccctctgccgctttctccttggcgttccccgatcactgcctctagggtctttacaagggacagcgaacgtaaggtttcggagctggcttc

SEQ ID NO: 19050 - DNA, 42 bp, Homo sapiens
  chr1:220950193-220950235
  hyper
cgcggctgggtcggcttccattcctgggtccgcagcgccctc

SEQ ID NO: 19051 - DNA, 38 bp, Homo sapiens; identical to SEQ ID NO: 5876
  chr1:223936543-223936581
  hyper

SEQ ID NO: 19052 - DNA, 118 bp, Homo sapiens
  chr1:231046066-231046184
  hypo
cggaagagagcggtgctgcagccaaggcaaaccagggcagggcagggctagcactgcgcactgtgtatgctgccaagctcggcttaaacccatggttttcagaaggtgctggagagcc

SEQ ID NO: 19053 - DNA, 44 bp, Homo sapiens
  chr1:231053141-231053185
  hyper
cgttacttgctaataaaccgcctctagggggcgctgacatacac

SEQ ID NO: 19054 - DNA, 588 bp, Homo sapiens; identical to SEQ ID NO: 7699
  chr1:231175062-231175650
  binary

SEQ ID NO: 19055 - DNA, 286 bp, Homo sapiens
  chr1:231175692-231175978
  binary
cggcgtccaggttgggaggcttggcgggcagcgctgccgcccgggccccgccgccgcccgggcccccgcggctcagctcgtcctggatgcgcgacttctgcgcgtacagccgctccaggtgccgccagcccccagacgcgccgccgcccgacgccgagtgcagcagcccgctcaagctctttggcagcgggggcagcccgtccacccgcagcccccggaccgcgccgttgcccgcggccccgggcgccgcccgggccccactcatcgcgccgcggcccggccacgc

SEQ ID NO: 19056 - DNA, 53 bp, Homo sapiens
  chr1:233799555-233799608
  hypo
cgaatcgcttttcagttggctttttttttgcgggggggtggggacagagtctc

SEQ ID NO: 19057 - DNA, 175 bp, Homo sapiens; identical to SEQ ID NO: 13144
  chr1:234736252-234736427
  binary

SEQ ID NO: 19058 - DNA, 491 bp, Homo sapiens; identical to SEQ ID NO: 17211
  chr1:24648342-24648833
  hyper

SEQ ID NO: 19059 - DNA, 40 bp, Homo sapiens
  chr1:24739857-24739897
  hyper
cgcactcgcggagcctgagccagaagggtcggacgcccac

SEQ ID NO: 19060 - DNA, 234 bp, Homo sapiens; identical to SEQ ID NO: 14471
  chr1:24742017-24742251
  hyper

SEQ ID NO: 19061 - DNA, 82 bp, Homo sapiens
  chr1:31157913-31157995
  hyper
cggtgggcgcctcccgggcccagcagcctcttggctgggaaagagacagacgggggcccccttccccgggaactgactttcc

SEQ ID NO: 19062 - DNA, 226 bp, Homo sapiens
  chr1:31158226-31158452
  hyper
gtcacccacagcccccgacaccgccccctcccccggccctgggcttccagtccctgacagtccctgggacgccgccccacaacgcccgccctctctggaccctaggacggccccgggcacctgcatatgatgtgtggccacgcccccgccacagctaattggaccggggtggacacctgaacccagtcggaccaatcaactcctgggttgccccgagacccggacc

SEQ ID NO: 19063 - DNA, 132 bp, Homo sapiens
  chr1:40158183-40158315
  hyper
cttctaaggatctgtcgaaagtcggggcggacggctggggattggcctaatcggagcgcggacgctgaagagcagcggtgagaggcggggcttctgtccgcgcggcgaaggtagaggtgggctgggcggggc

SEQ ID NO: 19064 - DNA, 352 bp, Homo sapiens; identical to SEQ ID NO: 14478
  chr1:40782323-40782675
  hyper

SEQ ID NO: 19065 - DNA, 52 bp, Homo sapiens; identical to SEQ ID NO: 14479
  chr1:40782908-40782960
  hyper

SEQ ID NO: 19066 - DNA, 221 bp, Homo sapiens
  chr1:45112018-45112239
  hypo
cgttgtggttgatcagtttatctcggccggggccgcgagtgctgctggcatgatgtatgggccgcggcgcagggcccggctgcccatgaatcaccgcagctgctccgtgtcagcgccggagcgggccgtatgggttctgcgcaaccagcttgtggtggggaggaatgacgtatggatgtttatttaataattctctcctactccagctgagcagggcgggc

SEQ ID NO: 19067 - DNA, 189 bp, Homo sapiens; identical to SEQ ID NO: 14480
  chr1:46954676-46954865
  hyper

SEQ ID NO: 19068 - DNA, 392 bp, Homo sapiens; identical to SEQ ID NO: 14481
  chr1:46954904-46955296
  hyper

SEQ ID NO: 19069 - DNA, 264 bp, Homo sapiens; identical to SEQ ID NO: 8909
  chr1:46955978-46956242
  hyper

SEQ ID NO: 19070 - DNA, 255 bp, Homo sapiens; identical to SEQ ID NO: 7727
  chr1:46957171-46957426
  hyper

SEQ ID NO: 19071 - DNA, 135 bp, Homo sapiens
  chr1:48559554-48559689
  hyper
cggaaacgcaggtgcggcagctgcacaactggttctacgggtggatctgagcaccgggctcacctgggagatttctaataatacaaatccccaggctccgcccctgagattttgacgccgtgggtttggtgtggc

SEQ ID NO: 19072 - DNA, 268 bp, Homo sapiens
  chr1:51439584-51439852
  hypo
cgagattgccaggagactgctacttagaggtgctaatcccgatttgaaagaccgaactggtttcgctgtcattcatgatgcggccagagcaggtttcctggacactttacagactttgctggagtttcaagctgatgttaacatcgaggataatgaagggaacctgcccttgcacttggctgccaaagaaggccacctccgggtggtggagttcctggtgaagcacacggccagcaatgtggggcatcggaaccataagggggacacc

SEQ ID NO: 19073 - DNA, 32 bp, Homo sapiens; identical to SEQ ID NO: 7729
  chr1:52194847-52194879
  hyper

SEQ ID NO: 19074 - DNA, 323 bp, Homo sapiens; identical to SEQ ID NO: 7730
  chr1:52194968-52195291
  binary

SEQ ID NO: 19075 - DNA, 778 bp, Homo sapiens
  chr1:52195348-52196126
  hyper
cgccaatcgtctgcctctcacctcctacagcaggtgacccatggccaatcgccaggggtctctttgccaggagccgccagggccagccaatcggggcgacccctccgccggggaggggacgggaaaggggtggggggtgaagggggtgaagggggtgtcccgggggacgggctgaacctcagtcaggaccgcctgcaccgcagtccggggatcgggtcgaggggagaagaaaaaggggtgctcgggagcagcccccggctacctcccctggaggcacagagggcgggggccttggcgaatggctttcttgctggccacttgcggagtgagtagaccccgagggtctgggagaggggccggcccctacccctgagtccccggggtcccggccgccaggccggagcgcgaatgtcgtgctcaccctgcctccttcccgccgccccctggggtgagtaggacgacgtggctgcccgggcccctcttccttgggagttctcagttcctcagcctagatggggtggaggctgaggtcagggcctccagttccaccgagagggcattcgcccccaaatgagactttggaggaggtctctttttttctattcatttttgtggaactctgttttccttttgaaagctgtctcagaatatgattttaagcagaaaagttaagctttctcttatgtgaaagcttaattttgaccagttgcccattaatagaatctccagttgcaggccaagtgttttttggtggtggtttatttttggcacggtgttc

SEQ ID NO: 19076 - DNA, 949 bp, Homo sapiens
  chr1:53017742-53018691
  hyper
cggtatctaagatctcacgcaaaattcatctaagacttcgaaatcttctgaaaagaaaatgtgtaatcaacgttgttaatacaacagtaattcatcccattcaagtacgactagaaatcccgctgatgtgcttctttcaggtctaaacatctcattctttcgcaatccagataccaacaggagtctgaaacccttcgcagaggcgtgcaacacactaggagagcgctatctgtttacaaatacgaatctcagttacccacgtcaaaaccgcgcattaccacctttcgactggggggcgggggagagagaaggcgggcgagcaagaaacaaaatccacacagacacctctgccttctccctacaaggacgagcccggggaaacattcagtatgtattatatgcgtgtatacatttatatacattatgtagtcacctatgtctaagcaagggtgaaagaaaaaggtacacatgacagggaatcgtaactggacccaacagaaatgttcaaaccaatcccgttaactcaaaatccgccccgctggtctacaacaggtttcggtccgggaccgggagccccagccacagtgtggagttcgtccccaaagcgccccaatgccctcctcaggccgcccaggccgccgtccccacctcccttatctcagccttcccctgggacacccgaagcccgttccaggaaagaaagaagtgtcaggcccccagggggcggctgagacgctctcaggccaggcccccgacacctgcgaagcgcggcacctggggagggcgaaccgggggccgcccggccttcccgagcacaccccctcggtacccgacgctgccccgcggccggaacctcgtacctgcgaggcccgcgagctacaggcgcgcgcgacgcctcctcatctcagtggctcctgctctccctccgcctcctgctgccgccgccgtc

SEQ ID NO: 19077 - DNA, 137 bp, Homo sapiens; identical to SEQ ID NO: 5883
  chr1:53168691-53168828
  hyper

SEQ ID NO: 19078 - DNA, 435 bp, Homo sapiens
  chr1:59281487-59281922
  hyper
cgtcaccgagattgtaaaacttctaaccgggaagaatcaaatacatgcacaacgggttacaggttaacagacagatgggagcggaaagggacattccagcgcttccctgggcgtgtcgcacagggcaactccaaccacaggcgaattttcctgggtgacagttaaactcctttttgcatgaaaaaatacagattcttattaaaacaataatcgattagactataaaactctcaaagttatttcggatcaaaattattttcggctgtttccacacctttttttctcgattgtgcagaaattcttcacaccgtctgcacagatgggcaaactgagacccggacgagtcccattgagagagagaggcagagccggggttgggagaagactgagatttctgggatccggcttggggtgtttccgctgggtgggggcgcc

SEQ ID NO: 19079 - DNA, 216 bp, Homo sapiens; identical to SEQ ID NO: 7734
  chr1:60539399-60539615
  hyper

SEQ ID NO: 19080 - DNA, 36 bp, Homo sapiens
  chr1:6086224-6086260
  hyper
cgctgctcatccaggaaggtcggagatgtcgggccc

SEQ ID NO: 19081 - DNA, 88 bp, Homo sapiens
  chr1:6086291-6086379
  hyper
agagcaaaggccacgccccgacaccccacggggccctggcgcgccaggcttctcagccctgcggcggcagtgcatagctctggcacgc

SEQ ID NO: 19082 - DNA, 267 bp, Homo sapiens
  chr1:63793072-63793339
  hyper
tcaacactactgatatccactttttattccacttaagaaaaaaaaactaaaggaaggggggcagatttatttgcaataaaagaagaaagcgggttgatttttatggggaagattttagctttcggctacacacgcatttagacgtttctactttctctagcactcattcctagaaaaatcaatccagccctgaggcctgtggcccctagagcgttctcaggaccaaggtctgagttgggaccgcccgtatctagttcctcggagggg

SEQ ID NO: 19083 - DNA, 227 bp, Homo sapiens; identical to SEQ ID NO: 17240
  chr1:6474528-6474755
  hyper

SEQ ID NO: 19084 - DNA, 109 bp, Homo sapiens; identical to SEQ ID NO: 10934
  chr1:6545271-6545380
  hyper

SEQ ID NO: 19085 - DNA, 247 bp, Homo sapiens; identical to SEQ ID NO: 10935
  chr1:6545639-6545886
  hyper

SEQ ID NO: 19086 - DNA, 222 bp, Homo sapiens; identical to SEQ ID NO: 10936
  chr1:6545931-6546153
  hyper

SEQ ID NO: 19087 - DNA, 344 bp, Homo sapiens; identical to SEQ ID NO: 10937
  chr1:6546495-6546839
  hyper

SEQ ID NO: 19088 - DNA, 47 bp, Homo sapiens; identical to SEQ ID NO: 12093
  chr1:67773780-67773827
  binary

SEQ ID NO: 19089 - DNA, 135 bp, Homo sapiens
  chr1:999594-999729
  hyper
cgggcgcctgtctggcaaggaggctgagaagctgctgctgcagaaggggcatccgggcagcttcctggtgcacatgagtcagagcgatcctgggggcttcccgctgtcagcgctgacgcaagggtgggacgaggc

SEQ ID NO: 19090 - DNA, 331 bp, Homo sapiens; identical to SEQ ID NO: 7751
  chr10:102490316-102490647
  hyper

SEQ ID NO: 19091 - DNA, 414 bp, Homo sapiens; identical to SEQ ID NO: 7752
  chr10:102490715-102491129
  hyper

SEQ ID NO: 19092 - DNA, 261 bp, Homo sapiens
  chr10:104221426-104221687
  hyper
cgcagaaaggctctccgggggtctggaggaaagggatgcagtgggtcaaatagctccctggtggtctgggatcgagggatgcactggtcaggtcgggatccgtgccattagcataaaggcatttaaccctggtggcacttggggagctttgaaaaacaccgatgctgggcccgcccgaagagattccgatttaactgttctgggtgaggcctgggcctcggtattattgcacagctcctcaggtgattttaacgtgcaggc

SEQ ID NO: 19093 - DNA, 233 bp, Homo sapiens; identical to SEQ ID NO: 13203
  chr10:112403994-112404227
  binary

SEQ ID NO: 19094 - DNA, 654 bp, Homo sapiens; identical to SEQ ID NO: 13204
  chr10:114708972-114709626
  hyper

SEQ ID NO: 19095 - DNA, 542 bp, Homo sapiens
  chr10:119293016-119293558
  hyper
cgtgtcctctgaaatagcccaggtaccgatctgctccttgtcgccgagcaccagctcagtacaaggcgctggaggggaaggagggaagcacatcagcgtctcctcatagtgatgcagccaccccagccctcaccctatcccagttccccacgcgcccacgtgcctttggggtggatgaaaagatctcaaacgaccagctcctcattggggtaaaggagtgaagagattatctctgatagaggtcaaactccaattgggaggagggcaccaattctgtaaatgacacccgagggcacactcaccaggttcactgcaagccctgagcgttttgcgtttggtgccccgagtgtaagcctaagtattctgtctccgacacgtaaaacaacttaaagtgccattttccaacggaggcatttagaggcaatttgaaaattgaaacgaatctttatatgcaagactggaacgttccagaggccctttaaagctgcggttagaaaggcagttagggaactcaatgatgggctggaaggagacgattgaac

SEQ ID NO: 19096 - DNA, 203 bp, Homo sapiens
  chr10:124899352-124899555
  hyper
cgtcagctggttaacttcggtgggctctggttggagggaagaagggagtgagttcagagtttagctgcagccgtaggccgattgccaagtcaggctaggaaaggctgggccacaagaggacaaccccagggacagccagctcttgggacagcggctcccactaccaggagaggggaacttcctcaggtcttgcagagctgaga

SEQ ID NO: 19097 - DNA, 129 bp, Homo sapiens
  chr10:134209485-134209614
  binary
cgaggtcgacaggcgccagcgacccgacggtccccagtggcaccaggggcggtggtcctcaattcccaggctgggaggagccctgcccggcggcgctgggtcgccaggacaactacgcggtcccccgcc

SEQ ID NO: 19098 - DNA, 126 bp, Homo sapiens
  chr10:134209650-134209776
  binary
tcagaagcccggcccggggccaaggtcaccgcagcaggccgggcccctgcgttctgagccgggtgcggacgtgctggtgctcggggaagtcgggggctttgacgcctgaaggcgcgggagccgggc

SEQ ID NO: 19099 - DNA, 157 bp, Homo sapiens
  chr10:15828305-15828462
  hypo
cgaactgttctctccgtatcattatgtgtatagactggtgtctgcgtcatcttctgctgccctccccatcaaggcactgcgttaccgtattcgaacacacattccctctgtctgggaaggtttccatgtaacggtgttttctcagtctcatatctgc

SEQ ID NO: 19100 - DNA, 125 bp, Homo sapiens
  chr10:30509077-30509202
  hyper
cgctcttcccgggcagccccatgttccagggagccaaagcttgcagcgtgagagggtctctttttggaacaaaggtcggtgagtgaagtcaagtccaggcttggttttgagagatcacatgtcag

SEQ ID NO: 19101 - DNA, 157 bp, Homo sapiens; identical to SEQ ID NO: 14509
  chr10:31607149-31607306
  hyper

SEQ ID NO: 19102 - DNA, 701 bp, Homo sapiens; identical to SEQ ID NO: 15446
  chr10:43892074-43892775
  hyper

SEQ ID NO: 19103 - DNA, 171 bp, Homo sapiens; identical to SEQ ID NO: 6746
  chr10:43892970-43893141
  hyper

SEQ ID NO: 19104 - DNA, 49 bp, Homo sapiens; identical to SEQ ID NO: 17275
  chr10:60026209-60026258
  hyper

SEQ ID NO: 19105 - DNA, 256 bp, Homo sapiens; identical to SEQ ID NO: 14512
  chr10:62492589-62492845
  hyper

SEQ ID NO: 19106 - DNA, 667 bp, Homo sapiens; identical to SEQ ID NO: 7781
  chr10:6621854-6622521
  binary

SEQ ID NO: 19107 - DNA, 87 bp, Homo sapiens; identical to SEQ ID NO: 7782
  chr10:6622706-6622793
  binary

SEQ ID NO: 19108 - DNA, 66 bp, Homo sapiens
  chr10:71267698-71267764
  hyper
cggagttgcccacaggtccacctaccgcgctccctgcagccctcagtgtgcctaatggctgccgcg

SEQ ID NO: 19109 - DNA, 38 bp, Homo sapiens
  chr10:71267805-71267843
  hyper
atgccgggacttgcgtgcgtcagtccactcaaaccttc

SEQ ID NO: 19110 - DNA, 137 bp, Homo sapiens
  chr10:81142199-81142336
  hypo
cggagacgtcggagccttctccacgcaccttccgagctgggcccacgggttctgttttgtctttttagctggactcacacgtatggacagacacagacacggacggggtcaccgcatgggggcggaggaggtcggac

SEQ ID NO: 19111 - DNA, 418 bp, Homo sapiens; identical to SEQ ID NO: 14519
  chr10:89621342-89621760
  hyper

SEQ ID NO: 19112 - DNA, 1002 bp, Homo sapiens; identical to SEQ ID NO: 14520
  chr10:89621836-89622838
  hyper

SEQ ID NO: 19113 - DNA, 151 bp, Homo sapiens
  chr11:10519332-10519483
  hypo
cggaaatagctcacactcgtgcgtgcttctgcctggcctggtcagacgccacaacgtgatctcacctaagcctcacaattaccccgttactatcaccattttgttgttaacagtaagcggaattattatgtgcttggtgcgtgttggacac

SEQ ID NO: 19114 - DNA, 320 bp, Homo sapiens
  chr11:117073762-117074082
  hypo
cgcgaagtgcagtccaaaatcgagaagaagtatgacgaggagctggaggagcggctggtggagtggatcatagtgcagtgtggccctgatgtgggccgcccagaccgtgggcgcttgggcttccaggtctggctgaagaatggcgtggtgagtggcaccctgggctagggcgctggggggctggggtgtgccaccctgtgagtcctgggccaatccctgagctgactgctaagctgcgtcctatgccctatgcctggtagattctgagcaagctggtgaacagcctgtaccctgatggctccaagccggtgaaggtgccc

SEQ ID NO: 19115 - DNA, 126 bp, Homo sapiens
  chr11:117075032-117075158
  hypo
cggcatgacaggctacggacgacctcggcagatcatcagttagagcggagagggctagccctgagcccggccctcccccagctccttggctgcagccatcccgcttagcctgcctcacccacaccc

SEQ ID NO: 19116 - DNA, 206 bp, Homo sapiens
  chr11:117076092-117076298
  hypo
cgcaggattccctagtgaagcagctcaggcctgggggagccgtgtgtatcccagctgtgccggcagcatcataccaatcgtgggggtggtgaaggagccaggggttcattcatggttggtttctgatcaggcatcttgggaatggataatggaggcagccgctttcaggacaggcatgtccaggggctcctcccagcctctacccc

SEQ ID NO: 19117 - DNA, 191 bp, Homo sapiens
  chr11:124616924-124617115
  hyper
cgccgagcgcctgggaggctcggtaggaggagtcttccacggccccgccccgcccctgtcggtcccgccctcccccccgccgggctcctggggctgtggccgaaaggtttctgatctccgtgtgtgcatgtgactgtgctgggttggaatgtgaacaataaagaggaatgtccaagtgttcagagggtgcc

SEQ ID NO: 19118 - DNA, 71 bp, Homo sapiens
  chr11:124631910-124631981
  hyper
agttctccctcagggtcgaactcaccccatcccgcatcccaagtcccctccaggtccgggtttcactcacc

SEQ ID NO: 19119 - DNA, 317 bp, Homo sapiens
  chr11:12849699-12850016
  hyper
cgggctgagggtgctgccgtgccactgctgcaggatggagctctcttcctggtggagacttgattcacaaggacgctaattattcattcttcctccgtgcagcccgctgaaacaattgctgtgcttgttcggtgcacagtgtggcgtcggacagtcaggcctttttatgtaactgatggcgctgtatgttcatattgttctttatgtacttattttatagcttatgcagcagacattcgagtcaattagcttcttgtcttgcaaactgggcactgctgttctagaaccaagttagaagggtgtgttgagggcgaccc

SEQ ID NO: 19120 - DNA, 245 bp, Homo sapiens
  chr11:130183478-130183723
  hyper
cggtatcagccgatctccaaataaagcattaagaaaataagtggaagttatggagaatttcttcctgacttcaagagattatctacttacacgctgaaaaagaaattaagtttttgtcttcatttttgtaagttccaaaaaaaagcacacaattacggggttttattgtaaattctgcttggattcatagaactcacatggacgcaatttccttttaatcagttctaacgtacctgtcatttctc

SEQ ID NO: 19121 - DNA, 203 bp, Homo sapiens; identical to SEQ ID NO: 17298
  chr11:13300232-13300435
  binary

SEQ ID NO: 19122 - DNA, 156 bp, Homo sapiens
  chr11:13334715-13334871
  hypo
cgctttcttcagctctgctgagcgtgcctctcctgggtcggctcccggttctcctccagctgctgagattccagcctccacagcctgctctgctggttctctgttctttgtccttagcttctggtttggcttggtccctttcacgtcatccttaac

SEQ ID NO: 19123 - DNA, 706 bp, Homo sapiens; identical to SEQ ID NO: 16287
  chr11:1535842-1536548
  hypo

SEQ ID NO: 19124 - DNA, 95 bp, Homo sapiens; identical to SEQ ID NO: 16288
  chr11:1536583-1536678
  hypo

SEQ ID NO: 19125 - DNA, 87 bp, Homo sapiens; identical to SEQ ID NO: 13257
  chr11:20230312-20230399
  hyper

SEQ ID NO: 19126 - DNA, 53 bp, Homo sapiens; identical to SEQ ID NO: 13258
  chr11:20230510-20230563
  hyper

SEQ ID NO: 19127 - DNA, 197 bp, Homo sapiens; identical to SEQ ID NO: 14539
  chr11:20385084-20385281
  hyper

SEQ ID NO: 19128 - DNA, 238 bp, Homo sapiens; identical to SEQ ID NO: 14540
  chr11:20385481-20385719
  hyper

SEQ ID NO: 19129 - DNA, 474 bp, Homo sapiens
  chr11:31818829-31819303
  hyper
cgaagaaccccgccgatagcatgctctgctctcatttgcctctttgacattttcttaattttaaaacatggagattcacattcttatccatgttctgtctcacacaaacatacacacgggtttacacaggcagcacgcgatcgccgccaggccctgtgctgcctccagaactgacacttaagagagaaaagtcagcagggacagtagagctcaattttaaatctggaaaaaaaaaaaaaaaaaaaaaagatgggaagcggggattggaattccacagcaaaaagaaacctgtcgctgcaggatcccttctctaccccgcggggagagcggcacggagacagttcattactttagaagtggcaactgtttgcagccaggcggtgacctagcggctgctcttacataaaatgggtacatttccccccactttagtggatttgccttccactcttaaagcttttaacaaaataaaac

SEQ ID NO: 19130 - DNA, 225 bp, Homo sapiens; identical to SEQ ID NO: 13261
  chr11:31821778-31822003
  hyper

SEQ ID NO: 19131 - DNA, 44 bp, Homo sapiens
  chr11:31823122-31823166
  hyper
cgttggtacagaccccctcggacagtaatctgtctcggatttcc

SEQ ID NO: 19132 - DNA, 100 bp, Homo sapiens; identical to SEQ ID NO: 13262
  chr11:31842276-31842376
  hyper

SEQ ID NO: 19133 - DNA, 384 bp, Homo sapiens; identical to SEQ ID NO: 14542
  chr11:32851566-32851950
  binary

SEQ ID NO: 19134 - DNA, 59 bp, Homo sapiens
  chr11:45392759-45392818
  hyper
cgttagcaacgaccgttctctctacgccaagctcatttgtctgagcgtatcagcaacac

SEQ ID NO: 19135 - DNA, 432 bp, Homo sapiens
  chr11:57243735-57244167
  binary
ggaccggctgctgctgcacgggaaccggctgcagggcgtgcaccgcgcggccttccgcggcctcagccgcctcaccatcctctacctgttcaacaacagcctggcctcgctgcccggcgaggcgctcgccgacctgccctcgctcgagttcctgcggctcaacgctaacccctgggcgtgcgactgccgcgcgcggccgctctgggcctggttccagcgcgcgcgcgtgtccagctccgacgtgacctgcgccacccccccggagcgccagggccgagacctgcgcgcgctccgcgaggccgacttccaggcgtgtccgcccgcggcacccacgcggccgggcagccgcgcccgcggcaacagctcctccaaccacctgtacggggtggccgaggccggggcgcccccagccgatccctccaccctctaccg

SEQ ID NO: 19136 - DNA, 43 bp, Homo sapiens
  chr11:59323829-59323872
  hyper
cgcgaagggaaagaatgcggccacgtggcctattttcctgtgg

SEQ ID NO: 19137 - DNA, 61 bp, Homo sapiens
  chr11:59323899-59323960
  hyper
gggcccggatagctcagtcggtagagcatcagacttttaatctgagggtccggggttcaag

SEQ ID NO: 19138 - DNA, 187 bp, Homo sapiens
  chr11:59323987-59324174
  hyper
tttccaataaaatggatttgggcgaggctgagagaaaggaacgttatgtgaaacccgcttggggtgcctcctccttgagggaaaccagaacttgctagtgggttcttaccggaagaagtgaaacgtgtggaaaatgccaagaaactttatcttccaatagcaggcttttcttttccaacctttatac

SEQ ID NO: 19139 - DNA, 231 bp, Homo sapiens; identical to SEQ ID NO: 14548
  chr11:61062458-61062689
  binary

SEQ ID NO: 19140 - DNA, 176 bp, Homo sapiens
  chr11:61659371-61659547
  binary
cggaggcggagtcccggtctgtgagcagcggggcctggggggcttccagccgcgcgtcctgcaacgtcaaatccagtgcgcccagaggggggacgctgtctcggggtgcctgtgaacagccttcaaaccatgggccccaatctctgcggggcccccaccgccgctgcagctctctc

SEQ ID NO: 19141 - DNA, 231 bp, Homo sapiens
  chr11:63705659-63705890
  hyper
cggaagcgcccccggcggtttggattcgggtcacgtgcgggtcactccggtgtgctggggatgggttgaaattaaaactttccgggatgcctggtgttcacgctaacagcactgtccactctctcctaaacagtgcttacgtgcccgtctcccctctaaaccctgaggtgtggcgctgagatggcacctcgctcctctctgtgccccctgggctcagcaccgcgtagatgc

SEQ ID NO: 19142 - DNA, 374 bp, Homo sapiens; identical to SEQ ID NO: 18256
  chr11:63908860-63909234
  hypo

SEQ ID NO: 19143 - DNA, 83 bp, Homo sapiens
  chr11:64064539-64064622
  hyper
cggaggggtcccaggtggcccctagacttcctgcatcgcccctctgcccaggctatggcaatgtggccctgcgcacagatgcc

SEQ ID NO: 19144 - DNA, 369 bp, Homo sapiens
  chr11:64064662-64065031
  hyper
cgctgtttgggatcctactggcaggggtcggggaccggctgggctcctccctgcgccatggcatcggtcacattgaagccatcttcttggtgagctgctccatgccctgcctgcccttgtgctgggctccggctacccttccccatgtccctggcacatgagcgcgcccccaaagaccataagcctctcccacaggctcctgggggcgggagtggggagtatgggagtggggattgttggtgtctcctgggtcctgcctactgccccatcccgcagaagtggcacgtgccaccggagctagtaagagtgctgtcggcgatgcttttcctgctgatcggctgcctgctctttgtcctcacgcccacgttc

SEQ ID NO: 19145 - DNA, 626 bp, Homo sapiens
  chr11:64067396-64068022
  hyper
cgctgccccgggcgggtgtatccctcacagcacctcacgactgtgcctcaaagcctgcatcaataaatgaaaacggtctgcaccgctgcgggcgtgacgctcccggacgcgagtgggtgtggaattgctttcctcgggccaccgtgggggcacctctggcctcccgtgacccccaggccgagggtccccgggcacccaggtcggtcaagtctcggccctctcaggcccgcgtctctgcctggaggagactgtgtagggtccggcgtggggatcagccaggatgggctgcgcgtctccagcctctgcacacacattggcgggtggggtgcagggagggagaggcaggggagagagaatggcatctcgcgtggagggctgtcgtttgaactctcccagcgcgagagaccctgccccgcccccttcctggagcgttgactcccttctcgtctcgaggcctgtggcgtctgggtccgttggggcagaaccatggaggaaaagccttcgaaagtaagacgtctccctaggccccttaccctgtccgctccaacccacccttggtccgactcgggcccctggcgctatttcttactcagccttggctgcccgcagcccccacccaaccccac

SEQ ID NO: 19146 - DNA, 679 bp, Homo sapiens
  chr11:64068047-64068726
  hyper
cggctcagttccccagcccgctcttccttcccgctccagccatccgcgacccttggctccctccttgtatgtggcccacaggtgtcgctcaagtcttccgaccgccaaggctcggacgaggagagcgtgcatagcgacactcgggacctgtggaccacgaccacgctgtcccaggcacagctgaacatgccgctgtccgaggtctgcgagggcttcgacgaggagggccgcaacattagcaagacccgcgggtggcacagcccggggcggggctcgttggacgaggggtacaaggccagccacaagccggaggaactggacgagcacgcgctggtggagctggagttgcaccgcggcagctccatggaaatcaatctgggggagaaggacactgcatcccagatcgaggccggtcagtgtggcctcgccaggccgtgggcacccgcagggcaataagctggccagggactcaatttctggagctgtaaaatggggggaagctgatgggatccaagtttctaggattctctgggagaggcgcccgcgccaatctttcgccctttaaatccgccaggcattcttggagcgccccctcccgggcaggcgttgtaacaggcctttcggtcgtgacgcgcagagtccggggaaggacgcaccaaataaattgcgcaaagacccc

SEQ ID NO: 19147 - DNA, 87 bp, Homo sapiens
  chr11:64509676-64509763
  hyper
cgggtgcacgctcgaccccgcccacctcctgcttgcccaggactccgagagcaggaggcaaattagagaggaaaggtgtggtgggcg

SEQ ID NO: 19148 - DNA, 502 bp, Homo sapiens
  chr11:64509801-64510303
  hyper
cccgagccgcccatcgtccggaggggaaccagctggggcggaaggagcctgggttccccggggtcaagaatccagaggtcatttcctgagcgcttggggggaaggggcaccccttcaccagataagccgccccccattagccggaaacagctcccaggccggagatagcgagttcctccggattccccgggagacagataatgcccctcaagtgtcagagtccgggacccggccctcccttcgccgccgctggggaaggctagagaagggaaacctcatctgtctgaagggcgtgcatctctctgccctgcgttgcggaggaggctttcgttaaagagactgcacgctgcggagcagggtgggtccgggtcagggctgtgccctggactgtgcctgggaggcagggacccgggctcagactcggggctaggctcaggctccgtgtgccctcccgagccactcaccgaaggcttcgatgcacccgcggagcagctcctccacc

SEQ ID NO: 19149 - DNA, 330 bp, Homo sapiens
  chr11:66187467-66187797
  hyper
cccgcccgccgcagccgcggcagccgccggaggattcctgtcctaatatggagctgggattcccccggccccgcccccgcccccggcccgcggggagacagaggctggcagcagggcggggggaagcgctcgcttgggggccggcaacggggggaagggatgcctaagtgcagacccaggtcctcgccgtgcccccacgtccctgcctcagtttccccttcagtaaggttaattagctgagagggaaaccacgaatcactgcagactacagcgctgatgttggtttctattcttggctgtgggaaaacaggatcaacgccaaattcagct

SEQ ID NO: 19150 - DNA, 270 bp, Homo sapiens
  chr11:66187826-66188096
  hyper
cccatcctcgggacttagacccccatgaacaccccctgataagccgccaaggcccgatttgggaagcgggggcgggaatttgttctctaaaaatggccaagggaatcccaggttaaatagtccccagagaggaaccccagcagtgacctgtcccacggaggccaaggaaagtcctccttccctgcatgtgaacgtgaccttgtctgtcaagtaacgagggggatttgtagacaaccctgttcttccccattccctcaactcctcagaaaa

SEQ ID NO: 19151 - DNA, 162 bp, Homo sapiens
  chr11:66189149-66189311
  hyper
atggagctgcctgagcctaggggaacatagctactgtccgcggtgctgaaagggatctcctgtcgccttcggggcgctgcccatggtgctgacggctgcgccggccgtgtatggctctgtccatggttctgaacccacagtcggcttcggagctctgtccgc

SEQ ID NO: 19152 - DNA, 120 bp, Homo sapiens; identical to SEQ ID NO: 7833
  chr11:67232283-67232403
  hyper

SEQ ID NO: 19153 - DNA, 127 bp, Homo sapiens; identical to SEQ ID NO: 7834
  chr11:67232464-67232591
  hyper

SEQ ID NO: 19154 - DNA, 270 bp, Homo sapiens; identical to SEQ ID NO: 13279
  chr11:68095765-68096035
  hyper

SEQ ID NO: 19155 - DNA, 156 bp, Homo sapiens
  chr11:68611259-68611415
  hyper
cgcgcggctgcaccccacgagcccgggcggctctcgcgcgtgaggctctccttgcacgtgggccttcgcggtttgcactacggaagctggactgtcattctcaccgcaaatgcccttccctcctttccctggaacctcagccaccgacaggtcccc

SEQ ID NO: 19156 - DNA, 751 bp, Homo sapiens
  chr11:71724337-71725088
  hypo
cgctgggcccgcagcagctctgcccgcagtcccccagcggcctgcttgctctgctccagctcctcacggtggcgtttctcggcagcggcctgctcggcctgcagctgctggcagaggtgcttagctggcagcagctcactcaccagggcctgtgtgctggtgtgctcgagctgcagggtggagagggcctgctctttctggaagaacttctcctgccacgccttcaattcttggcccagctcctccgcacgctcagcctgtgaggtcagctcctgccgcaggttctctgaagccacccgctgtttctcagcctcctcccggaggctctgcacctcctcccgcagagcagagctgcgttctgcagctctggcactgttgctggctgtctctgcctgcagcaggcgcagcctctcctccagcttctggctcttctctgactcggccatcaccagccgcttcaactccttgctctccccctccttctccaggacctggcgattcaggatggacacctcctcctccaagctgctgatgaggctatttttcctctcagcctcttgccggccccgggccacctgggccttccactcatcttcagccttgctgtggtcttgtaccttggtgcggaaggcagccaactcccgttgggccgaggctaaggcactctgactgtgccctagctcctgggccttctcctctaactggccctgcagagtctccagagcactgtcccgctcagcccgggaggccc

SEQ ID NO: 19157 - DNA, 731 bp, Homo sapiens; identical to SEQ ID NO: 15492
  chr11:71725587-71726318
  hypo

SEQ ID NO: 19158 - DNA, 398 bp, Homo sapiens
  chr11:71951738-71952136
  hyper
cacaaactcagcctcccgggctccgggttttcaaagctgcagcgccggggtagggaaccccaggggtgctgactggcctgccccctctcctcctcagctcggccctgaggtcccctgggtctccccctctagcccctcggcctccctcctggcttctcaagcatcactcggaactttctgccctaagagggagacagagcggaggtagcctggagctaaacagatcgggtctcccaagggcctccaagtccgggccctgctgcctcccgtagctgcccaagcaccctgggaccgcgccctgccttcgggctgcatctgcctgtattcccctacccccaggtgttagacattaagctcccacacctccttccatgcgcactctcgtacacacacgtgca

SEQ ID NO: 19159 - DNA, 31 bp, Homo sapiens; identical to SEQ ID NO: 7847
  chr11:75852075-75852106
  hypo

SEQ ID NO: 19160 - DNA, 510 bp, Homo sapiens; identical to SEQ ID NO: 5735
  chr11:76381512-76382022
  binary

SEQ ID NO: 19161 - DNA, 118 bp, Homo sapiens; identical to SEQ ID NO: 10218
  chr11:77383112-77383230
  hypo

SEQ ID NO: 19162 - DNA, 501 bp, Homo sapiens
  chr11:84148462-84148963
  hyper
cgaacctgcgacccagcttcttagcataccagatagaggcaaacatagcgatgccaatggaaggaattcacaatgaagctgccgcacaatcaacttcccacctcggctcagagacgaacagaatcaggctggagctgtcacttgcaggctgttgctttctcagttcctctcatgctggttagctgagggagagggtgggaggagggaggggttgggggagaaaaggcagtcctgtttggccagtctgcaggtatatttacatcctgccagcaggaggtccgggtgaggcaggcgctgcctttgtagccagctcacacacatccagttggctaagtatttgtctgcagttcttcggcaccggcaccgtcgccaccaaactccatgtgtgtcaggaggaagggaagctgcagtcaagtccggaggcagctcacctccctctctaggcttgggcagttacaatcctcgctttggcttccctctatcttgacagtacgtgctggc

SEQ ID NO: 19163 - DNA, 258 bp, Homo sapiens; identical to SEQ ID NO: 11019
  chr11:859386-859644
  hypo

SEQ ID NO: 19164 - DNA, 110 bp, Homo sapiens
  chr12:102878329-102878439
  hyper
cgtcacgcttgccccacgttgcataaaatgtggggaaaagagacaccaacgccaaacttcaggggcaggacccacataaatgctttcttggggaataaaaaaatgtgcgc

SEQ ID NO: 19165 - DNA, 456 bp, Homo sapiens
  chr12:104235228-104235684
  hyper
cgcgggggtggccgtgtggtgtggtggcgcgcaggccacatgggatggaatgatgaggtacgaccccagcgccgcccgcccagctccgccgcaccttcgtcctgccttctgggactgacccccagctctggccacaaggacagcgcccctcccaccccagctgctctggccccggccctagaaggtgacctctctccgcattaatggcctctggcagtctaattaatggcagtctggacctcccctggatcgtggggcccctctgagacgtccccgatccccagcttaaatttatccaggaggacctgtgagtgggtggctgggccgaggttccactcatgggctgatgtcggctggaggatcccagccccttaagacctcagtaagtttgaagggccctcccattacacagcctggaaggccaatgcccgccccccgcctaggtttccgcctggc

SEQ ID NO: 19166 - DNA, 179 bp, Homo sapiens
  chr12:109162554-109162733
  hyper
cggtacacgacggggcgtcgcgcctccagggctaggccgggcggatggagggggtccccggagcccgggggaagtggcgcagtgggcgtctgcatcggcccgaaggcacttgcgcagaggtccggcaggcagcagagcaccttgtgggcgtggtcgctggaggcagcgcctggcacccc

SEQ ID NO: 19167 - DNA, 57 bp, Homo sapiens
  chr12:109162762-109162819
  hyper
ccctggggctgcggaggccacctccacgcccatttgccatccctgagccgcttctgc

SEQ ID NO: 19168 - DNA, 113 bp, Homo sapiens
  chr12:110258862-110258975
  hypo
tcatggaaaccctggcaaacatttgtcaaatcccatcctcctgattacgtgaccaaggaaagctgcttaaatctgggggcaagtttgggcatgcaaacctgctccgccccagc

SEQ ID NO: 19169 - DNA, 94 bp, Homo sapiens
  chr12:114282487-114282581
  hypo
ccgtcttccgccgcagggcctgcagggtcacctcggagtcggcccactccagcaccagcctccgcccgtacaagtgggtgctgtgacacagggc

SEQ ID NO: 19170 - DNA, 238 bp, Homo sapiens; identical to SEQ ID NO: 18278
  chr12:117155351-117155589
  hypo

SEQ ID NO: 19171 - DNA, 187 bp, Homo sapiens; identical to SEQ ID NO: 18279
  chr12:117155627-117155814
  hypo

SEQ ID NO: 19172 - DNA, 124 bp, Homo sapiens
  chr12:122179060-122179184
  hypo
cggcggtggtttacgaatgcctgcttgatagagaaaaagaacacacaggcaggcacacatacatgggggataaagcaaatacagcatgatggaacagctagtgaatctggtgaagaatagaggc

SEQ ID NO: 19173 - DNA, 94 bp, Homo sapiens
  chr12:122206347-122206441
  hypo
cgtcaagggaagagtgatggtttagatccagtctcgttcttacgatgtgcgtatgcgagaccctgcctggaaaaaaaagagaaagcacgtgggc

SEQ ID NO: 19174 - DNA, 185 bp, Homo sapiens
  chr12:122214111-122214296
  binary
cgcccaccccgccacgtggtgagggttattttaagttctcagagacccaccgcgtctgcctcgtgctcttcttgcccctggagcgctgggggcatcctgagtcaggctgtgagaagattcgccaccagagggcgccccgggccctgggtcgtccaaggggacaaggacgttcccgtctgtgcttc

SEQ ID NO: 19175 - DNA, 551 bp, Homo sapiens; identical to SEQ ID NO: 14563
  chr12:123258823-123259374
  binary

SEQ ID NO: 19176 - DNA, 173 bp, Homo sapiens
  chr12:125093646-125093819
  hyper
cgtatacgagactgaactgtgtgtgtacattttaaaataaaacaaaacgtgcttcctgttctgcggcctctgcccctcccctcggcagccctgaggcttggccagggtccaggaggaaggcgcggggaacaggttggcccagtcagctggctgggacttcaaaggaaagcgcc

SEQ ID NO: 19177 - DNA, 133 bp, Homo sapiens; identical to SEQ ID NO: 14567
  chr12:125477548-125477681
  hyper

SEQ ID NO: 19178 - DNA, 200 bp, Homo sapiens; identical to SEQ ID NO: 7878
  chr12:132250682-132250882
  hypo

SEQ ID NO: 19179 - DNA, 233 bp, Homo sapiens
  chr12:22778949-22779182
  hyper
cgatgtgctttcattgatgcctcacactgcgttttgtcttcccaaaccctagcgtactcaattcccaaagtaatgaccacgaccatgcatcgctaggtcggttcttaggcagcaccacacacattgttttgtttgagtcgatatttctgaattattaaagtcgtcttactgaaattaatacctgatactagaaggagcagtggcttgtgactgtttccttttcatgagacacc

SEQ ID NO: 19180 - DNA, 254 bp, Homo sapiens; identical to SEQ ID NO: 9023
  chr12:2692239-2692493
  hyper

SEQ ID NO: 19181 - DNA, 239 bp, Homo sapiens
  chr12:2800603-2800842
  hyper
gcctgccctctcccagctcgcaggccccgggcccggccgcgcctccgcggggagagcaccccggcttcccgcgcgccctcaccaaaaggaccctacagcaaacgggtgtctttcgactctgcttgtagaaaccatttgcacatattctgtacgagcctcgctgtctccctagagccagggccctgcggatttggagaagggagcggggcaggacttccaggaggaccccaacccggccc

SEQ ID NO: 19182 - DNA, 245 bp, Homo sapiens
  chr12:2801019-2801264
  hyper
gccggctccgcccaaccaggtggtgctgagcttccgctgagcgctcttttgttttgtggtttgacacttttcttgacagcatgttgcagtttcttttcggttttggttttttttaaatgttttattttgctttcccagcgggaggggaggaagaagagtgtttacaaagtcctgtagccccctcacctttctgttttcacttttgccaatgtacatcgggtttggttttcttgtattatttaaac

SEQ ID NO: 19183 - DNA, 142 bp, Homo sapiens
  chr12:3053936-3054078
  hyper
cggcagatggttccatggcgccacccactgtccaggaatgcatgttgcaggtgcgttaaacgggcagaccccgcacaggtgaggaagtcaccaggcgaaaacagcaagccgaccacatgaccatgcagttaccaagcacctc

SEQ ID NO: 19184 - DNA, 47 bp, Homo sapiens
  chr12:46663360-46663407
  hyper
cgggttggcgggaaggggaccgaagtggcaggggcggcggggagctc

SEQ ID NO: 19185 - DNA, 335 bp, Homo sapiens; identical to SEQ ID NO: 14577
  chr12:46766939-46767274
  hyper

SEQ ID NO: 19186 - DNA, 197 bp, Homo sapiens
  chr12:47497161-47497358
  hypo
cgggaaagatgcgcactgcagcagggcctggaatgtggctcccatctgcactgccagaagccatgatgaagtcacgagttgcacaacagtagtaattcgcagctatttatgaccattttaatagcaaaggtctagattagaaggctgtgtttacatgccatgtagcagaatagttcacgaatcattcccacagtaac

SEQ ID NO: 19187 - DNA, 61 bp, Homo sapiens; identical to SEQ ID NO: 7901
  chr12:49392537-49392598
  hyper

SEQ ID NO: 19188 - DNA, 295 bp, Homo sapiens; identical to SEQ ID NO: 7902
  chr12:49392636-49392931
  hyper

SEQ ID NO: 19189 - DNA, 156 bp, Homo sapiens
  chr12:49485561-49485717
  hyper
cgccccaggcaccggctcccctccctccgcctgattcatcttttgtttcattgccttccctggcaccgggcatcgcttccttccttccttcctcctcctcctttgggcccttagcattaaccccttcgtgctctgggtgccccccagagaggtgcc

SEQ ID NO: 19190 - DNA, 273 bp, Homo sapiens
  chr12:49485914-49486187
  hyper
aaagggcagaaagccgcgcccccaatccctgctccgtccgggtaggtcccctccccccgcgcgtccagtcttcccagttccagctaaggctctgccagtccggagagcccctatctctcccatctctgctctagatgcagcccagaagggcgtgggagtagcacctgagaataacggtctccttgtgcggatctggggagccccctgcagggtgagagcggagaagaggaaaagaagctgcggctggaagcctgcacctgggggagtgagacc

SEQ ID NO: 19191 - DNA, 300 bp, Homo sapiens; identical to SEQ ID NO: 17363
  chr12:50339307-50339607
  hyper

SEQ ID NO: 19192 - DNA, 172 bp, Homo sapiens
  chr12:53474309-53474481
  hypo
cgtcttgctttcgttattggagttacttgtgtgtgtagacccgtctctgctagactgtgagctccttcagaccccagactattctattcttatcacactaggtactctaacgtgttgagtgccaggaaagccatcagctcgcataccgtgaatagtgcccactcggcataac

SEQ ID NO: 19193 - DNA, 122 bp, Homo sapiens; identical to SEQ ID NO: 7908
  chr12:54088960-54089082
  hyper

SEQ ID NO: 19194 - DNA, 42 bp, Homo sapiens
  chr12:54132526-54132568
  hyper
ggctttctccaggtgggacccatcgcctaggcaggtttcccc

SEQ ID NO: 19195 - DNA, 194 bp, Homo sapiens; identical to SEQ ID NO: 9044
  chr12:54150983-54151177
  hyper

SEQ ID NO: 19196 - DNA, 101 bp, Homo sapiens
  chr12:54330575-54330676
  hyper
aggcgtctccacccacccacccccaccagccaggccttaggcaagggggccaacgtcatacaacccagtctagacttggccaggccctgtttgctctcctc

SEQ ID NO: 19197 - DNA, 65 bp, Homo sapiens; identical to SEQ ID NO: 7911
  chr12:54343505-54343570
  hyper

SEQ ID NO: 19198 - DNA, 333 bp, Homo sapiens
  chr12:54371976-54372309
  hyper
cgcagcactgcccgggaacaaaagatcctcgtctagacgctgccataaagcaccccctcacgtttctaaacccagtttcatttcgaccttaacgacccagtctggcctgtattagaaaccacttccgccctaaatagtaaacaaacctgtagtggagggtcttggctctcccaacacactcagacccccacctcctcagcccgttgccccacatttttcctcttttctccagcctttctcagctcccagcaccccagcccctttcctccccgccgcgcccaccccacccccccgccccagtaaataaacctgaggccgagttcaaagtttccc

SEQ ID NO: 19199 - DNA, 321 bp, Homo sapiens; identical to SEQ ID NO: 14591
  chr12:54389321-54389642
  hyper

SEQ ID NO: 19200 - DNA, 56 bp, Homo sapiens
  chr12:54391212-54391268
  hyper
cgagcaagtctcctgggaggggcaggagaggagccctcttccgcctttgtgtccag

SEQ ID NO: 19201 - DNA, 432 bp, Homo sapiens; identical to SEQ ID NO: 9046
  chr12:54400009-54400441
  binary

SEQ ID NO: 19202 - DNA, 229 bp, Homo sapiens
  chr12:54404856-54405085
  hyper
gttttcttctgtccagctccggggaggcgcagtggacggcaaacttacagccggtatcagaccttggaactagaaaaggagtttctctttaatccttatttgacacgaaaacgtcggattgaagtctctcatgccctgggactgaccgagagacaagtgaagatctggttccagaaccgaaggatgaagtggaaaaaggagaacaacaaggataaactgccgggagccc

SEQ ID NO: 19203 - DNA, 208 bp, Homo sapiens
  chr12:57635256-57635464
  hyper
cgcgcgcgcgcgcgctgagtagagtgggcagtggaggaggttggggtgccggttgtcttgtaccccagtaccggcccttcctcggatctgttttcaattcagtctgctccttggcccagacttatgacctttgcagcatgcggcagtatcatccatcacccaggcgccgtttagggggatggagggcgctgggagctcacatagggtc

SEQ ID NO: 19204 - DNA, 213 bp, Homo sapiens; identical to SEQ ID NO: 9047
  chr12:58015267-58015480
  hyper

SEQ ID NO: 19205 - DNA, 189 bp, Homo sapiens; identical to SEQ ID NO: 9048
  chr12:58015548-58015737
  hyper

SEQ ID NO: 19206 - DNA, 146 bp, Homo sapiens
  chr12:58262601-58262747
  hypo
cgttcaccacccactggcgatgccccattcacaagggggcccggctggccacgcgacccagcagcatccatttgaaggcagcaagcaacaagctggctccattcacaaaccctgtcctcctttgaaaaccaatcaccgtgcgaagc

SEQ ID NO: 19207 - DNA, 171 bp, Homo sapiens
  chr12:58263143-58263314
  hypo
cgccccagcagtcctgccgctgcctctcccatctcctactggcttcaccgcccaagtgggtgacatcagacttggagagtgcagctcgccttcctctgctgggaacatggatcctccgctcctgtgggcttcggtgtgatctttaagcccactaggtcttcctgcccatcc

SEQ ID NO: 19208 - DNA, 242 bp, Homo sapiens
  chr12:6472613-6472855
  hyper
ggaagccgatcttccagtccttccagtccacctgggggttgttgtcccgcaagctggaggccacgctacgggctcgacgggccccgtgaggcgggggcgggaccctcaggcgctgcaaggggtgcggcagagtcccccgcaggtcgcgacggctgcgggagccggccacgagagtggtgaaggagctgtatttgtacaggtcaaagagcgtctgctctgtgatgcggtccagctcctccagc

SEQ ID NO: 19209 - DNA, 95 bp, Homo sapiens
  chr12:6472900-6472995
  hyper
caggccaggggccctggagcgagtgtctggcccctccggggtcagggtcctcatctgtgccccgggaggccggtccatcccggagaagcctgggc

SEQ ID NO: 19210 - DNA, 499 bp, Homo sapiens
  chr12:68041644-68042143
  hyper
cgggtggggtgagaggaattcgaggtgtcgctccctcaccgcagagctgaaaggaaggtgtgtctctcccagtggccgcgcaggggaaaggctcggagttgtaaggaaataggagatgtctctgatgtttatttttgcctagcaacccacagccaactgcttccccagctgccgtccacacgcgcctctctgcctccccttgtcctagcgactggcgagcggtcacttggtgtcagtaaaccggggagggtgtgtggtggaggtgggagggcagccccctctttcgcccctgctcagggtcaacgagctcagcggccgcccctcccgggacttgcctctccgaggtgaccctcgcacaactaagttatctacatgatgaattggggagaggggagtggctaagtcgctgggaccaagaatggggggacggggaagcagtactgtctgtgagcagccattcagttcgaagagctgaaaatgcatttatgtttaggggtgc

SEQ ID NO: 19211 - DNA, 278 bp, Homo sapiens; identical to SEQ ID NO: 9050
  chr12:68758776-68759054
  hyper

SEQ ID NO: 19212 - DNA, 108 bp, Homo sapiens; identical to SEQ ID NO: 9051
  chr12:68759131-68759239
  hyper

SEQ ID NO: 19213 - DNA, 90 bp, Homo sapiens
  chr12:70759026-70759116
  hyper
cggcgctgtcgctttaagcagcgctcctggaaacctcatctacaaatcctggggcgggtcaggggtggcaagactcctaaggagggaaac

SEQ ID NO: 19214 - DNA, 489 bp, Homo sapiens
  chr12:71834301-71834790
  hyper
cgggaaagcgctgctgcgccgcagcttcccagtccagcgctagaaacatcgcagggcgaattcctgcaaatgcaggcatttgcgtgcggagtggacatttgtgacccagagcctggtacccaaaggcaggctgccatctggtccccgccccaaccgcctctctgcgtctagtcgcattccacgaaaagatggtctgtagaaagtttccccaaaggagaaacaacttgcccagctccaaagggtttttagtctgcatcccttgcactgtgacgtgatgtaacctttttggggttttttcctcttttcctcccttccttcctcccttcttccttccttccctccctcctttctttttattttctttcttttttaacggcgtgattaaaatgtggcaaccacaaaccccgattagagctgccagaacgttatctttacctttggctgcccgcgccgccctttgaagtgcccgcggccgctgtgtaatcttta

SEQ ID NO: 19215 - DNA, 539 bp, Homo sapiens; identical to SEQ ID NO: 17376
  chr12:7260775-7261314
  hyper

SEQ ID NO: 19216 - DNA, 393 bp, Homo sapiens; identical to SEQ ID NO: 17380
  chr12:90101352-90101745
  hyper

SEQ ID NO: 19217 - DNA, 74 bp, Homo sapiens; identical to SEQ ID NO: 14598
  chr12:96184964-96185038
  binary

SEQ ID NO: 19218 - DNA, 222 bp, Homo sapiens; identical to SEQ ID NO: 14599
  chr12:96185121-96185343
  binary

SEQ ID NO: 19219 - DNA, 647 bp, Homo sapiens; identical to SEQ ID NO: 18339
  chr12:99287504-99288151
  hyper

SEQ ID NO: 19220 - DNA, 535 bp, Homo sapiens; identical to SEQ ID NO: 18345
  chr13:113497181-113497716
  hypo

SEQ ID NO: 19221 - DNA, 129 bp, Homo sapiens; identical to SEQ ID NO: 7924
  chr13:113547249-113547378
  hyper

SEQ ID NO: 19222 - DNA, 137 bp, Homo sapiens
  chr13:114799639-114799776
  hypo
cgtggctatccacgggctaaaggagtggcctgaccaccaaagacaggagaaagtgcctgacccaagaataaccaagaatccccactgcttcatccccgttctcaaatgccgggcgcaaactctctcaggacagaagc

SEQ ID NO: 19223 - DNA, 168 bp, Homo sapiens; identical to SEQ ID NO: 12278
  chr13:20735265-20735433
  binary

SEQ ID NO: 19224 - DNA, 178 bp, Homo sapiens; identical to SEQ ID NO: 14606
  chr13:33000891-33001069
  binary

SEQ ID NO: 19225 - DNA, 204 bp, Homo sapiens; identical to SEQ ID NO: 14607
  chr13:33001228-33001432
  binary

SEQ ID NO: 19226 - DNA, 73 bp, Homo sapiens
  chr13:39610527-39610600
  hyper
cgtttcagtcaagggtcgtaaaggtatgcagctgacgaaagaataattgcccggaaggccgaaggaaagcacc

SEQ ID NO: 19227 - DNA, 334 bp, Homo sapiens
  chr13:39610814-39611148
  hyper
cggccaattcctaagaacgtgactttaaacttaatgccacacttaccatcaggacacgaattttgcatggccaacgcaacaaatatactctaccttatgcttagatttgaaaaccccatcataataactaccataaaagaaactttctgcgtattacctctcgttttcagtcactcttgtgttactgaaagatgaggcaataaactcaaaaatattaaaccccttacccaaaaagtacagagctattacggatttgtaaagccggctttggaaccgagggctttacaaatgtaattcccacgacaccgtgctgagtctcaaatttggcgttaac

SEQ ID NO: 19228 - DNA, 355 bp, Homo sapiens
  chr13:99104223-99104578
  hypo
gtgagcaagtgcgcaagcagtccagggcgctgacctgggcactcggcagctccaggcctggggacttctccctggagtcttccaaagtgtctcatcacacacacacagccacgagtacacacgcacggccacacatacacagcaggtgccctgtcctctgaagagtcacatttcaaggagtatgcaaaataagcgtgttataaaatttatttgtgtaagcattcagacatttttaggtgggaaagatgatatgcagaatccactacaaggtgcaacagaaaatcgtattggaaaggacggtacatctggcgcagaccagcagtggcacgattccaaacaaatgtcagacgagagc

SEQ ID NO: 19229 - DNA, 800 bp, Homo sapiens
  chr14:102516079-102516879
  hypo
cgtgcctgaggcgtacatcactgccaccaggcagtatgtggcccaggccaacagctggtccctggaggagctctgcctggaagtcaacgtcaccacctcacagggcgccacccttgacgcttgcagcttcggagtcacgggtgagtggagtctcacagaaaatactggctctttgcaggtgacctcggtggcctgagaccattgttcccagatacatgcacttagggtgaccggctggcagttgggtggagcctctgggcgccctgtgactggggtttgtgtagctgttgtgttcacctcagcctgggttttggcttccgcctcacaggtttgaaacttcaaggggccacgtgcaacaacaacaagctgtcactgtccaatgccatctcaaccgcccttcccctgacgcagctgcgctgggtcaagcagacaaacaccgagaagaaggccagtgtggtaaggaggcactgcctttcccaggcattctgcagggacccctgcggtaacaagggcagaggcggctcctcttctatgcctgggttccacttggaacgggaaatgaggttcacagaggaaatccatttcgcacctgtccaaacctctccttgccgggccccatcagctgtcccgggcagtcttccagttttcttacttttcccttaagccaccagtaaacccctctgcttctgcaggtaaccttacctgtctacctgaacttcacccgtgcagacctcatcttcaccgtggacttcgaaattgctacaaaggaggatcctcgcagcttctacgagcggggtgtc

SEQ ID NO: 19230 - DNA, 147 bp, Homo sapiens
  chr14:103986352-103986499
  hypo
cgcccaccgcagccgtgtccacaccgcctggggagacagcaagtcagggcggaggaaacagggctgcccaaaggccacgggaagccgcagcacctgccctgctcacctgtgcctcgcttctgaagtcgcagccgcttaagcacctcc

SEQ ID NO: 19231 - DNA, 138 bp, Homo sapiens
  chr14:104000003-104000141
  hypo
cgtggctcggggaacccgcgcctgcctctgggacctgtccctttccctgcgagctcccccttctgggtccaaaggctcctggctcattcatgggcccggcatctcctgccggccacgggagcccgctggggaggatgc

SEQ ID NO: 19232 - DNA, 734 bp, Homo sapiens
  chr14:104000403-104001137
  hypo
cggcagggaggggctgtcatgctcgggctctgcttcgagtaggcgcctcctgttcccgggagcagcgacagcctctaatttcctgtgacagcagcggcccccgcaccgccccacgctgccgtgctgtcagagctgctccgggcccagagctccagcagccctgtggaaggcaggagagcagtgcccgctgtgggccaagtgagacaatggcagcgcgggcttgacccggtgcctggcacatgggagggcctggcatggctaagctgggtgacatgaacagcggcgccaggccccatggggggctgtcagttgagggccaggcccctctgccctgcagtcccagctcttggagagcttgcagtctgtgttggggctgtcttaggctggcctcagaccctagggtgggagtccagggatgctagggccagacgggccaggctctgccacccctgccctctgaccctcgggtcctgtttcccacaggcgggcgcttctgctccttctcaccgtgcatcgagcaggtgcaacgcacatgccaggcgctggcagcgcgcggcttctcagagctgagcaccctggaggtgctgccacaggtctacaacgtgcgcactgtcagcctgccaccgcccgacctgggcacaggcacagatggccctgccggctccgacaccagccccttccgcagcggcacgcccatgaaggaggccgtgggccacaccggctacctgaccttc

SEQ ID NO: 19233 - DNA, 198 bp, Homo sapiens
  chr14:105189960-105190158
  binary
cgcgcccgggcgggacgcggggcccctgccgtggggcagaagtgcgggcagttgcggggacacaaagtcctcggagaggacgcgctgcgcggctcttcgcggccgccagggggcgcgcccgcgcccagggcactcggggttccacggggggcaggtgcgctcctcgagagtgcggaccctctaggtggggtgcaggac

SEQ ID NO: 19234 - DNA, 667 bp, Homo sapiens
  chr14:105293560-105294227
  hyper
cgggtccagctcaaaaacgccaggcccgcccccgccccgcaggtccgcgggaaggaaggaaaaggcgttggggatgcgtaggaggcagaggccttggtggtcgatccggtgtggagtggggcaggggctgcgaggagggcgcccaggactggtatcagtgaacagtgacggtggggcagggcggtgaccttagcaccagcgcttcggtgggggggaggaagcacctgagccgcggagaaaggcctgcgtgaggtgggcacaggctggcgttgaagccctggggtggactcacgtccaggggagggcggtgcttcacacgtcccaggcactgtcttgtgtggccccaagtgctgtctgaatctctcctgcgtcttgggccccagcaccaacagccgtcgccctggagccaggcagcagccttaagcttccctgggaggctgactggctgggagcagggaggtcccatcggggaagtaggggcgtgcagggggcttggcgcctgcagtcctggaggggcagggcagatgataaggctaagtacctcctgtcctttgctcagccagccactaggaggaggccgcagagaagaagccgccaggggctgggggaggccagggacggggcagggaggaggggctgggctgaatgcaggtgccccaggagctgc

SEQ ID NO: 19235 - DNA, 465 bp, Homo sapiens; identical to SEQ ID NO: 14622
  chr14:105330476-105330941
  hyper

SEQ ID NO: 19236 - DNA, 455 bp, Homo sapiens; identical to SEQ ID NO: 14623
  chr14:105330980-105331435
  binary

SEQ ID NO: 19237 - DNA, 108 bp, Homo sapiens
  chr14:24550913-24551021
  binary
cgcagtctgtttcggtccagagcccgccccaggccccgacgctccccgggccccccagctgaccgttgctccagtcaggcgggcgccccacggtgcagggccggccac

SEQ ID NO: 19238 - DNA, 207 bp, Homo sapiens
  chr14:25148242-25148449
  hyper
cgaactcctgaattgccgcctttcagttcctgcggctgctctgactgtctgcattgcgccctctagtgtccagactgagttcttttactgtctagactggggagtccagagcagattcttttacccgccacgtgagggagcaattcagggaaagtaaaactattagtaaaagacattattttattttcaaataatcgtaattttacc

SEQ ID NO: 19239 - DNA, 49 bp, Homo sapiens
  chr14:36979694-36979743
  hyper
cgaggttcgctttacacataggcatatccagttccttagacattgactg

SEQ ID NO: 19240 - DNA, 48 bp, Homo sapiens
  chr14:36979809-36979857
  hyper
cattatggtaattcacaggtttacttctgcgcgcgcgcactcagcccc

SEQ ID NO: 19241 - DNA, 105 bp, Homo sapiens; identical to SEQ ID NO: 16420
  chr14:38057019-38057124
  hyper

SEQ ID NO: 19242 - DNA, 300 bp, Homo sapiens; identical to SEQ ID NO: 16421
  chr14:38057503-38057803
  hyper

SEQ ID NO: 19243 - DNA, 155 bp, Homo sapiens; identical to SEQ ID NO: 16422
  chr14:38057832-38057987
  hyper

SEQ ID NO: 19244 - DNA, 53 bp, Homo sapiens; identical to SEQ ID NO: 7954
  chr14:38725469-38725522
  hyper

SEQ ID NO: 19245 - DNA, 315 bp, Homo sapiens; identical to SEQ ID NO: 5958
  chr14:52781114-52781429
  hyper

SEQ ID NO: 19246 - DNA, 80 bp, Homo sapiens; identical to SEQ ID NO: 5959
  chr14:52782046-52782126
  hyper

SEQ ID NO: 19247 - DNA, 166 bp, Homo sapiens
  chr14:55982010-55982176
  hypo
cgagatcgggctcgcagattgttaaacaccgatgtgcgctttgcatggggctcctctgggatacgcgtaatttaaattacgacatgagcatttcattttgtattggctggtacacagtaaatggagcaagcgggagccggctgatttccagagagacagaaaactc

SEQ ID NO: 19248 - DNA, 214 bp, Homo sapiens
  chr14:58862962-58863176
  binary
cgcgtgcctctggacgggcctcccagccagcatgtgccgtgttgtgttcgcagaaagaagagcagagcctcaaaaggctgaggagcagggcacgcaggtgcagtgctttcgatccgcacaggtagctcagtagacgcaggtccgggctcgctgggttgcttggctcctggcgggctcggcagcaggtagttagttccctcagccgcccgtgccc

SEQ ID NO: 19249 - DNA, 173 bp, Homo sapiens; identical to SEQ ID NO: 9125
  chr14:60043607-60043780
  hyper

SEQ ID NO: 19250 - DNA, 45 bp, Homo sapiens; identical to SEQ ID NO: 5960
  chr14:60798413-60798458
  hyper

SEQ ID NO: 19251 - DNA, 134 bp, Homo sapiens; identical to SEQ ID NO: 12311
  chr14:60982999-60983133
  hyper

SEQ ID NO: 19252 - DNA, 167 bp, Homo sapiens; identical to SEQ ID NO: 6904
  chr14:61104864-61105031
  hyper

SEQ ID NO: 19253 - DNA, 133 bp, Homo sapiens; identical to SEQ ID NO: 11108
  chr14:61116736-61116869
  hyper

SEQ ID NO: 19254 - DNA, 186 bp, Homo sapiens; identical to SEQ ID NO: 11109
  chr14:61117028-61117214
  hyper

SEQ ID NO: 19255 - DNA, 355 bp, Homo sapiens; identical to SEQ ID NO: 14629
  chr14:61123186-61123541
  binary

SEQ ID NO: 19256 - DNA, 460 bp, Homo sapiens; identical to SEQ ID NO: 14630
  chr14:61123681-61124141
  binary

SEQ ID NO: 19257 - DNA, 92 bp, Homo sapiens; identical to SEQ ID NO: 14632
  chr14:65016816-65016908
  hyper

SEQ ID NO: 19258 - DNA, 93 bp, Homo sapiens
  chr14:66869973-66870066
  hyper
cgtatagtacacatcctgaggcggagatattaggaacaaagctaaaaccctggcaggaaggaagtactccctggacgatttttttttaacctc

SEQ ID NO: 19259 - DNA, 50 bp, Homo sapiens; identical to SEQ ID NO: 12316
  chr14:74208160-74208210
  hyper

SEQ ID NO: 19260 - DNA, 98 bp, Homo sapiens
  chr14:74238704-74238802
  hyper
cgtgctcactgggctggttccatgaaaacgcaggtgtgaaaatcgtctggggccctgagccagctgggggctggaggcagagtccacgctgtgaaccc

SEQ ID NO: 19261 - DNA, 95 bp, Homo sapiens
  chr14:76446078-76446173
  hypo
cgctctcccgtgacacgcagacacaaagggcgccagcctcctctacgcatccacagccaaaacccgctctccccgtgcccaccggcctggagggc

SEQ ID NO: 19262 - DNA, 168 bp, Homo sapiens
  chr14:76597725-76597893
  hyper
gaagacagcgtgactgcggtctgatctacagtgacgagtaccaatgttaactgtcacctctcatctccaaactaaatcacacctggaattggaggagccgaggagctgatagagtcagcctcgcagaggcgacaagtcaatcagcgcggagatgcccgcggagacacc

SEQ ID NO: 19263 - DNA, 123 bp, Homo sapiens
  chr14:76603110-76603233
  hyper
cggttaataacacgattgctcccctccgcctccttccttcctctccttccccctccctttccctcgccctccacacaattctctcaattaacgataggcagaaattaatttttcccctcgatc

SEQ ID NO: 19264 - DNA, 166 bp, Homo sapiens; identical to SEQ ID NO: 13437
  chr14:89895069-89895235
  hypo

SEQ ID NO: 19265 - DNA, 870 bp, Homo sapiens
  chr14:91805132-91806002
  hypo
cgccactcaggtctccctccctgtgtgtggggcaggtaaggagaccccagcggcagctgtaccaccccacagccaggctccacaggtgacatccatcagctgcaggaaacctgggagaacaggctcaccagattggagggaaggaggggcacctcatccctccagccaagaaaacacatcaggtgtggtcgtcccggccccaagctggagctgagcgtggactggaggctgcttctgtggacaacttgcaccgtctggacgggaggaaaccctgaagaccgggaagaatccccgcccccatccctgtgcaggcctcagaaggggaggcagctagtccgaggtcaaagagtaagctcagggcagaccccagctgactccggggcacacgtcagagctgtgccattggcagcaccacacatgtgagtcgacaccacaccagaaacatgtctgcaacacacacaaaggtaggagaagcagccggggactcacagctcctgcctgacgcgccgcagcctggccttggtgtcggccagctctacggccaggtgctgcttgtcttcgctagagaggctgctggtggggctgggagtggagtcggcgctggaggacttgatggggctgggtggatgctgtgcctgcaggtagtcccgttcctgagtgaggtccacgatcagctgcagccgggcagagagggggatggaggagaacaaacggggttaaccagcacaacgcctgagcttgaacagggtgaagaaaccgccaaaagacagatatttcagcggagactaagaaacgaggaggaaggtgggaaaaggctggcatgggttttgaaaagaggtgaaatatttagtgaaacaaaagggagtgtac

SEQ ID NO: 19266 - DNA, 203 bp, Homo sapiens
  chr14:91808058-91808261
  hypo
cgccccctagggtgggcggcctccttagctgataccacctttgccaacatcaatggcaaagggccgggaaggtcaggcctcaaaggccaggggctcctcctcctccactccgctgacgctcagtgcagagccctcccggcccctcgctggggggcctgagttggggctgggccaagtctcccaaggcggtctttctgggactc

SEQ ID NO: 19267 - DNA, 551 bp, Homo sapiens
  chr14:92302201-92302752
  hyper
cgcgccgtcggaagcccgagcacggagcagggagccgggcgcccggcgcgcggccgtccccgcctgggctggggtctccaccgtccccggtcacgggtccccctaggcagagccgcccacctggccagcggggacctagcctcgccccgtcgcccacccctggtgccctccagaccaccgcgcttccagctgtcgcggggcctaaagctctctcaggcccccgcgacacaggcgtcgctgaggagacgtgggaacagcccctgggccccaccacggccccattttaaagaaagttaaagacaaaagagacagaactgacactcacctccagcccgcaaggcggggccgccctcacaggcaccccccacagccctgagcgagctgccaggtgggagaagcgcacctgagccaagccacgccgcgcctttccccgcccgggtcccgccgccctcctccgggtctccacgtcccacgcccgcgctgggccggcgccgcgcggccgcggccggttacctgctggaggcagtgggcgctctgctgtcgccgcctgc

SEQ ID NO: 19268 - DNA, 182 bp, Homo sapiens
  chr14:94406037-94406219
  binary
gcgcgggtgaggggagggtcggggtgtggacgggtagggccggccccgccagcaggagagctcgggcgccaggctcggctggtcgccctgaccgcgggctgcgacgcggatcccaccggcagggggcgccgcgggtcaaccattctcaccccactgggcagggtgggtcggctgccgtctcc

SEQ ID NO: 19269 - DNA, 47 bp, Homo sapiens
  chr14:95240181-95240228
  hyper
cggatttttcgtgtcatgtgcaaaaagccggtgtgtccttttcaagg

SEQ ID NO: 19270 - DNA, 120 bp, Homo sapiens
  chr14:95240610-95240730
  hyper
cgctccaaataaaagcacccgatcccctaaggacgaaataatcaaggtgttagggaagctcaacagaagagaagagacgagaagagaagagaagagaagaaggggctatcgaaaaatgac

SEQ ID NO: 19271 - DNA, 339 bp, Homo sapiens
  chr15:31621317-31621656
  hyper
cgctccaaaccacgtggcaggtgatggggtagagggtgagagcggggccatttctaggcattcggggtcagttaagggtgtgggggctcaggttgggggtgggagtcagtgtgggctcagagttcagctcgggacgcggctgcagggtgggtgtggccctgggggaggggccaggctaggctcagctcggctccaggtggatcctgagtatcgggtgggggcagcgattggggcgtggctggggttgagatccgctttgggggatgatgcccgtgctgggcaggatacttaatgtttgggaaatttttctacggcctctgtcagggtggcctgccactc

SEQ ID NO: 19272 - DNA, 95 bp, Homo sapiens
  chr15:37174944-37175039
  hyper
cgttccgcggtgtagattgacactcgttatgtgggggtctggttgcggttggaagacttatccgagtcagggctgcattgccagcgcctttccca

SEQ ID NO: 19273 - DNA, 240 bp, Homo sapiens
  chr15:37175296-37175536
  hyper
acttcagctaccttttccgtttccagcaaaattgagaagtacgaccccaaaaagaatagacacacccatggaaaagacgtgtgtgtgtgtgtgtgtgtgtgtgtgtgtgtgtgtgtgtgtgtagctatggtgacaacttttaaacactttttctgcttaaaaaaaaagattcggacagggtctggtattgctttgcgttgcaggaaagggtcattctggacaaggaaccgtctgaattcc

SEQ ID NO: 19274 - DNA, 111 bp, Homo sapiens; identical to SEQ ID NO: 14648
  chr15:38857279-38857390
  binary

SEQ ID NO: 19275 - DNA, 162 bp, Homo sapiens; identical to SEQ ID NO: 12328
  chr15:40575352-40575514
  binary

SEQ ID NO: 19276 - DNA, 417 bp, Homo sapiens; identical to SEQ ID NO: 14649
  chr15:41136701-41137118
  binary

SEQ ID NO: 19277 - DNA, 44 bp, Homo sapiens; identical to SEQ ID NO: 14650
  chr15:41137147-41137191
  binary

SEQ ID NO: 19278 - DNA, 385 bp, Homo sapiens; identical to SEQ ID NO: 11124
  chr15:41786420-41786805
  hyper

SEQ ID NO: 19279 - DNA, 43 bp, Homo sapiens; identical to SEQ ID NO: 13454
  chr15:41788242-41788285
  hyper

SEQ ID NO: 19280 - DNA, 447 bp, Homo sapiens; identical to SEQ ID NO: 14654
  chr15:42873450-42873897
  hyper

SEQ ID NO: 19281 - DNA, 258 bp, Homo sapiens
  chr15:43803503-43803761
  hyper
cgtctgcatctccatccctagtgtgcacttcctgagatctgcgcccttgtcacctgcatcttccatgccatgtgtccgtatcctctcgctctactaacatctcgcttgcccatccttactgcacactccatggcgttccgcagtctccctgaggcagcggagctctatgcagcccctggggcccctctggtcacaccctccaccgcagtgttttggaccaggtgtcctgaaagtcctcaccatccctggagaatccac

SEQ ID NO: 19282 - DNA, 133 bp, Homo sapiens
  chr15:43803825-43803958
  hyper
cgtacaaatctcaaatctctgaatgccagtagccaaccactaagtgaccttcgtggctaccagctcctaagtcctcacctccttccccagtgctgtgcctgtggctgtggtgcagtgctgcggagccacctgc

SEQ ID NO: 19283 - DNA, 379 bp, Homo sapiens
  chr15:57598802-57599181
  binary
cgcgcacagcccgaggaggcagagccccagacgggaatgggcttttcagaggtggggtgcgggcgaggggacgatgcattatttttaatatttgatttatttttccaactggacttcttcccggggctctttctgggcccagctgcctttgtgatcccgcgccccggtcctcggcctctcacctccagcgccggggcgccccctgctgtcggaagcggctgtgaccgggcagaggtgctatctgggactctgggttctcagcccggggacagcgaaccgaggggcagatgatccatcagaaaagagccggcactgcccagccccgcgcccctgcccctgcctttttccgggagcgcgccgcgccgcacccgctacggcc

SEQ ID NO: 19284 - DNA, 340 bp, Homo sapiens
  chr15:60298179-60298519
  hyper
cacctcactcgccttccctggctcccagtcctgccggcccccacctgggaccgccaccctaacttgttcatttcaccttcggccaacccgccttgccccaagagaactttgttttggacccaggagaccaaacacaaacttgcagatgggccgagaggcgcgtgggagttgtcctcgcccccacatcaaggaaggccggggccacctgagccgaaccatcccctccctgaggccccgaaaccccctcctatttgaccggcgggggaaaccctgtcaccccctcttcgccgagaaaagcgcgtcttccctccgcccagatcggcggagccccgaactctgc

SEQ ID NO: 19285 - DNA, 782 bp, Homo sapiens
  chr15:60884567-60885349
  binary
cggggcgcccgggctcacctttcatcgctgcgatcacaaaatacatcatttaagccgcggtgcggagagcgcagggagagcggatggtccgaccccggagccccctctgccgccgccgcgccgccgccgcccgagccacagcagcagctgccgcagctgcccgcccgccgagagccatcccgagccataagaggctccatgtgaccggctgacatcacggccgccgctctgtttacaccgcgcccctccgcttcctcccggggcgggaggcgggaggcgggaggcgggaggcaggcgcgccccagcgccgcgccccgccccgcccccgcgggcaggtgagtagcagcggcggctctgctggcccaccccggccgggcctgccctcccgcgccccgggccctcgcccgggcgcccgccttcccctcgccttcgggatcacctgtggccgccggtcgcttttctgcacgcagcgccccgcggaacgcgcctctgaccactttctgcccccactcggtggggcaagaggctcgcaacccgacgccactctcccgctggcttgccggagcactcgggggcgataaatgcgccagctcgttggtggaaaagacaggtttggtctggggagctacggtcacccgcatttcctagagtgccccagctctaatcggaaggtacggcccacttctgggccgtggagaacgaagccactgggaccgtccggggagtggagtaagctcctccgaagtctttctggagagactcggcctgggcgggggaactcc

SEQ ID NO: 19286 - DNA, 479 bp, Homo sapiens; identical to SEQ ID NO: 14665
  chr15:62359006-62359485
  hyper

SEQ ID NO: 19287 - DNA, 34 bp, Homo sapiens
  chr15:63779725-63779759
  hyper
agctctgcgcggaaggcccgagagaattggtccc

SEQ ID NO: 19288 - DNA, 218 bp, Homo sapiens
  chr15:63889834-63890052
  hypo
cgcgtgcaggtgtgcagcattgaggactggctcaagagtgccttccagagaagcatctgcagccggcacgagagcctggtcaatgatttcctcctccgggtgtgcgacaggtaggccaccttgcctcctgagcagtgctggccccgctagctctggcttccctcttggggggcagggaagagcaaattacgagaccaagatggctccaccttcggggc

SEQ ID NO: 19289 - DNA, 195 bp, Homo sapiens
  chr15:67357339-67357534
  hyper
cgcacacgttcccgaggctctcggccggtgtgatctcaccgactagagaataaaaacagcccaggggcgccggcgccggccaagggccttgacggggatcagcaagcgcgaggccaagtgcgggccccaacttcctgggcccgggccttccgcgcgccccctctcgggctcgggtcctctccagggtgcactcgc

SEQ ID NO: 19290 - DNA, 189 bp, Homo sapiens
  chr15:67357544-67357733
  hyper
cgcttacttgctgcgagtccaaccctctccggcccgcaactccaaccgagccgcccgagtgtggactccgagagcggacgccacgggccgcgctcagccctcccgcccgaggcccctctcgccgtgtttcccaggacttcctccccgcgcccgcccgacttcaggtcggggccgcgcagggtcccgcgc

SEQ ID NO: 19291 - DNA, 41 bp, Homo sapiens; identical to SEQ ID NO: 13466
  chr15:68125183-68125224
  hyper

SEQ ID NO: 19292 - DNA, 287 bp, Homo sapiens; identical to SEQ ID NO: 14672
  chr15:68347714-68348001
  hyper

SEQ ID NO: 19293 - DNA, 202 bp, Homo sapiens
  chr15:68821338-68821540
  hyper
cggtgcagactaatcctaaattagtctttctctttgcctcaacaactactagatatcttctgatctctgacactccaatgtttcctggacaaacaaagggagcgaagtacgtgggttgttcaataggaagtggcttgaaggtggtttggcaggctggggttttattccctgactctctgtgggtacattcttactgtggctc

SEQ ID NO: 19294 - DNA, 263 bp, Homo sapiens
  chr15:69114222-69114485
  hyper
cggcgcacggtttattctaatcgtccacctgagtcattcggttcggtttgggttgccaaggaggctctaactggagccctttctcctggtttttcggcgtggttgccttgggtatttttgaatcacattaagttttaagagaccttaaagccccgatgcccactgggttaccgacttacggcactaagttggctgcctgtggctgttaataaaccacggggattgttgtcaacgaggacagatacatccttacctttccacac

SEQ ID NO: 19295 - DNA, 242 bp, Homo sapiens; identical to SEQ ID NO: 18402
  chr15:70354323-70354565
  hypo

SEQ ID NO: 19296 - DNA, 457 bp, Homo sapiens; identical to SEQ ID NO: 13467
  chr15:75075794-75076251
  hyper

SEQ ID NO: 19297 - DNA, 191 bp, Homo sapiens; identical to SEQ ID NO: 14675
  chr15:75976190-75976381
  binary

SEQ ID NO: 19298 - DNA, 60 bp, Homo sapiens; identical to SEQ ID NO: 6933
  chr15:79208280-79208340
  hypo

SEQ ID NO: 19299 - DNA, 128 bp, Homo sapiens
  chr15:80352864-80352992
  hyper
cgctatgatttaccttcacatctcggaagttgtaaccagttgtgaggaagttaggaccttggggttacctaaagataatttatattaagttgttgggccataaaaactgggcagaattggccacgcgc

SEQ ID NO: 19300 - DNA, 195 bp, Homo sapiens; identical to SEQ ID NO: 12337
  chr15:82339684-82339879
  binary

SEQ ID NO: 19301 - DNA, 68 bp, Homo sapiens; identical to SEQ ID NO: 11135
  chr15:89913879-89913947
  hyper

SEQ ID NO: 19302 - DNA, 295 bp, Homo sapiens; identical to SEQ ID NO: 9170
  chr15:89949942-89950237
  hyper

SEQ ID NO: 19303 - DNA, 387 bp, Homo sapiens
  chr15:91503650-91504037
  hypo
cggcattactggatctccccatgggctcagatgcagtcaaggccagctgtggatcccggcacacagctgtggtgacacgtgagtggggctgggaggcactctgctccactcgagctggtgcctacggaagggggtgtggtcgacggaaaaacttctgtcttaaggcttctgtggctcatacagagcagctaccttgctcagtggataagccccaacccccttgttgtttcacagtagttccccagcctgtcaggcccagaagtttcttccttctggtgggaggctgatgctttctgtcctccctgcacggccacagacacattccctgcccgccgccgcctctgacagcagggactgtccagtctggcatggaagactgcggcgctc

SEQ ID NO: 19304 - DNA, 178 bp, Homo sapiens
  chr15:96959372-96959550
  hyper
aggggcctttcctcttgtcgctctcgctttattacattagcgcgggcttccccgcgccggcgtgggctcagaagccgaggcgccgggtcacccatgacaaatgtccccgtgtctcgccaacaggccccgcctggccctgccactccatctgcccaacaggaccccggagagtgcttgc

SEQ ID NO: 19305 - DNA, 177 bp, Homo sapiens
  chr15:99193738-99193915
  hyper
cgggccgggggatggaggggtactagggccgcatccgagtgtgcgttggtgggtgtgtggtcggagccgacgtgcattccgacacacgtgctcgcagcgcggggtgtagtcgccgcctcacggggacacctagacgcccgtccctggcgagaggtgtcgtacgctgtggtttcagcg

SEQ ID NO: 19306 - DNA, 372 bp, Homo sapiens
  chr15:99194186-99194558
  hyper
ttttattcttctgaaaaagttgaaagtgtggcttactggtacattcaagatggtagggtaatttgaacacgattaaaagtttaaatgtcgcagaactgggactgggaacggtgagggcgtgttggtgagtaatggttgccgagggtatgcaggtggtgccgattaactttgaaaaaatcacgactgagccttcacgagtgaggcggggaaggaggaggcagcggaggttgtatggccccatcaccggggcaattcagaaaggctgtttctataaacaaatccttaaacgtctggtaagaaatgagtccgcgacggaacgagagcagatcgtggttcgcgtgtttactgccgagtgggacgcggactggggcc

SEQ ID NO: 19307 - DNA, 226 bp, Homo sapiens
  chr15:99497132-99497358
  hypo
agccccagtaagctcactgaggcacacaggccccatgtccacagccgctcctggctgaggcgtggttcctaagacgacccttactgttgagggctgccaggagggagagacacattcagccccgcaggtcctctgggaatccggtgagcgtcggcaccgggctggggccgtgctgattcccggcagcgtgtgggaatgtgcgggtgcctcgtggcctgctgacatc

SEQ ID NO: 19308 - DNA, 130 bp, Homo sapiens
  chr16:11178526-11178656
  hypo
cgccggctatatgagtcatctccactgtggagggaggcaattttaaactggaaaggtcaatcgacatgtcagaatatctagtaaatcattcgcgttccacctggtgccccttccattcccctgaaaaagc

SEQ ID NO: 19309 - DNA, 620 bp, Homo sapiens
  chr16:11178685-11179305
  hypo
ctgtggagaaagaggtagccggggctgggtggtgatttacctcgaggaaaattaatatggtgccatcaattctgaaggcagaaagggcccatggccagaaggctgcacgcaggctggaataactcacggcccatgagggccctgagtttggggaggcctctccttggccctggatataaatcagcagcccttttgcagagagagagtcggagttttgtcaggcctgggggaagggagccagcaccagaagcccctcttccccaggagcctgtcgttgtctgaagggttgaaaggcacctctgtgccacccttctcggccagcaccaagcactggactcatttacagacgaggccatgaagcccccaccctgggttccaggaggatcacgggaagggggctttcagcctggctgtcagagaagaatgtgacaggcccattttcactccacaggccttaattggatggtcagagggcacatctgtggcttataagaaacagatggcgggatgggttagtgaaggagaaagcacgcttgcttcaggttgagtgcccgtggaggtgctggggcagcacgctggcaagcaggcagactcggccaagacccagctttgtcacgtgc

SEQ ID NO: 19310 - DNA, 430 bp, Homo sapiens; identical to SEQ ID NO: 5980
  chr16:12897365-12897795
  binary

SEQ ID NO: 19311 - DNA, 37 bp, Homo sapiens
  chr16:14164836-14164873
  hyper
cgagcactcaggacgggtggcagcggtcacctttgtc

SEQ ID NO: 19312 - DNA, 211 bp, Homo sapiens
  chr16:27791003-27791214
  hypo
cgagttggaaatgtgccttgcacccccagccgagtgaagcccagaacgcatctatatgcatcgatgtaacaagctcggatcagggacctaattggtttcccagtagtgggtaatttctcgttgcaaatattaatccgttgtttttctggcgcccagcccggcccgccgcagtactgtactcgaggtacgttcctatgcaaccgagagcccc

SEQ ID NO: 19313 - DNA, 43 bp, Homo sapiens
  chr16:28887802-28887845
  hypo
cgggtgtgagcctgagtccagcggagacggtgggtgctgggcc

SEQ ID NO: 19314 - DNA, 276 bp, Homo sapiens; identical to SEQ ID NO: 6956
  chr16:29170096-29170372
  hypo

SEQ ID NO: 19315 - DNA, 103 bp, Homo sapiens; identical to SEQ ID NO: 8021
  chr16:3078252-3078355
  hyper

SEQ ID NO: 19316 - DNA, 335 bp, Homo sapiens; identical to SEQ ID NO: 8022
  chr16:3078384-3078719
  hyper

SEQ ID NO: 19317 - DNA, 397 bp, Homo sapiens
  chr16:31712178-31712575
  binary
cggcagctgggaccccgggcgcctcgtcccgtccctgcgcgacgaccttggtcctgccttgagccctctctgggcagtttcgcgcccgcagccccgtgtctccccgcgttgtgcggtgatgacgggaggggccgtaggggagaaccccggctcggggttcgggcgtgggaggagctgtggtccgtggggtccgtagtcctttctttcttttgttaaaaattaaactgaggtttggttaaaacgttaaagattttatctgagcaaataacgacccgtgaatcaggaagccacaaccatggattgtggtttggggtccaccggaggggcttgaaggaaagggtttaataagatgcatgaggaagcaaagccaattcagtaattgattggctacaattac

SEQ ID NO: 19318 - DNA, 543 bp, Homo sapiens
  chr16:4233245-4233788
  binary
cgctaagggctgcccttcggttttcaattactggcggagagggcggttcgtttctggcggggaagggaggtgacattccggtaggagaatctcctaaaactcgcatttcctgtttgccctgggcgccggcctcaggtggaaacctcaccccgataactgagggcagcagtcggccttgggcgttcttccgtcacccaggtctccagaacctcccggactcaatggcaagtcactgcacaagttcagggccttttcggtcccgatcgaggatctggagatctcggggcttcccggtcgtctgccccacagcccacgaggcggaccgacctgcggggtgaggcaccgggagcgcatggcagccccggcctcggcctcctggcgccctcccagccacgcggtgaatgcctgagaggacagaggttcgcggccctccccatcccaccggcagcgaccgcaaagcccgggagctgagtccgcggcgtgaagcggcggaggtcagcagcgagggggcagggccggcgctggcggccacggagcttgcgc

SEQ ID NO: 19319 - DNA, 49 bp, Homo sapiens; identical to SEQ ID NO: 5984
  chr16:4363872-4363921
  hyper

SEQ ID NO: 19320 - DNA, 158 bp, Homo sapiens; identical to SEQ ID NO: 5985
  chr16:4364080-4364238
  hyper

SEQ ID NO: 19321 - DNA, 77 bp, Homo sapiens
  chr16:4438405-4438482
  hypo
cggcagcacagccaggccgtatatggacaggcctggaactggccctcagtcccccgcctcccattggtttcgtcccc

SEQ ID NO: 19322 - DNA, 507 bp, Homo sapiens; identical to SEQ ID NO: 15638
  chr16:46683305-46683812
  hypo

SEQ ID NO: 19323 - DNA, 890 bp, Homo sapiens; identical to SEQ ID NO: 14689
  chr16:4986642-4987532
  hyper

SEQ ID NO: 19324 - DNA, 107 bp, Homo sapiens; identical to SEQ ID NO: 6964
  chr16:54966659-54966766
  hyper

SEQ ID NO: 19325 - DNA, 218 bp, Homo sapiens
  chr16:56691542-56691760
  hyper
cgaaggaccggggcggggccggggggcggggcgaaggccaggatctccaggtacccggaaccccaaggggcgggtgtagcaggcaatcttggcgaaactgggaagggcgggcaggagggcagggaagccgctcacccaggcacaaagcgcctcccgcttgagcggactccaaagggacggtccgcggtgtgcagcgagctgcgctcaggggaccttgc

SEQ ID NO: 19326 - DNA, 271 bp, Homo sapiens; identical to SEQ ID NO: 6969
  chr16:67198282-67198553
  hyper

SEQ ID NO: 19327 - DNA, 60 bp, Homo sapiens; identical to SEQ ID NO: 13532
  chr16:67199532-67199592
  hyper

SEQ ID NO: 19328 - DNA, 256 bp, Homo sapiens; identical to SEQ ID NO: 8046
  chr16:67678786-67679042
  binary

SEQ ID NO: 19329 - DNA, 50 bp, Homo sapiens; identical to SEQ ID NO: 13540
  chr16:73100590-73100640
  hyper

SEQ ID NO: 19330 - DNA, 729 bp, Homo sapiens
  chr16:77756212-77756941
  hyper
cggccctaagtcccgccccgcgcctctccccacctcaagtcccgcctctggctataagccccgccccgccccgatcccggcctccgatcccagatctcgcaccgccccgccccctgtctccgccccagacaccaccccgcctcgtgctctaagccccgcccctctctctggctttaggccgctcccaagcccagagctgctctgcgcaagcgcgaccgaccgagcagctccgaggagtccgcccggaaacaaacattccccagggcaatgtcacgacttggtcttcccgaggagccagtcaggtaaaggctttccgggccctggcaccccgagcttggtcaggcccggccttgatcgtagcggaggccaccggggccttttggccgggactgattttgcagctcccgccagtccacctgcgagcgccggatgggggagcactcgcctccagcaacccgcagggtccccgaacctttgcactgctctggccaggaacagagccggcttaagccagtatggtttacatacacgctgctccccttcccagccggcttggctgttctgcaatccgcgtctccagagttggaccccaggacccccgacagtggcacagacccgcagcaggcagccccggattcaagtcccccggtggctactttcagttgtgaccttgggtctgtcagtttcgtaaactctctgagcctggaggtgaccctgtgatcacttgcc

SEQ ID NO: 19331 - DNA, 142 bp, Homo sapiens
  chr16:834381-834523
  hypo
cgtctcggctgagggcacggtggcagctgcctccagtcgggccccggtggggactccgggtctggaacccgcgtctcggctgaggacacggtggcagctgcctccggtctgggccccggtggggactccgggtctggaaccc

SEQ ID NO: 19332 - DNA, 246 bp, Homo sapiens
  chr16:86531701-86531947
  hyper
cggcccgcacccgaccaaattttaaaaattgggagggttttggggactgcaatggaaaatcagctggccccggccccagactccgtctacactggcacagacaggtggagtacaaagccggcttcctggatgattcaggccccaaatcgtaggtagaaatgtgcaagtaatggaccttcgatctgctttccctcccttagcacataatccgtagtattcgctgtttcccgttgcccctatagacac

SEQ ID NO: 19333 - DNA, 299 bp, Homo sapiens
  chr16:88096563-88096862
  hypo
cgtgacctcatttttgctgcttcacgtttaagatctgactgctgagttgtcctcatcaccaatttcaaatcaagcccaaatccacaaactatatctcagcctcctgtgtgttttaagaggctgcgccgtgcatggaggtgccctcagcctgcagcagcgcagccaagcggagggcgcaccgcggccttctgtgtgactgttctcagagcacgctgtgccttcatttctgcgtgtttcacggcgttgcccttgtggtatctgctgaccccggttcccttatttctaggcccagtgcctcg

SEQ ID NO: 19334 - DNA, 83 bp, Homo sapiens
  chr16:88292860-88292943
  hyper
cgcccccccgaagcgggccagagaggtgtcctcggtgggtcaggaagggtcgacgccccctccttccctcagccgcatcccgc

SEQ ID NO: 19335 - DNA, 32 bp, Homo sapiens
  chr16:89985145-89985177
  hyper
cctgggtcctgcacgccgcctggtggcaggcc

SEQ ID NO: 19336 - DNA, 173 bp, Homo sapiens
  chr16:9056313-9056486
  hyper
cggcagaaaaccgagttacctttcgagtcaggtttgattctgatgcaggcagccatgtgcggcagggctttcgcacggttgcaagcgcacacctggccggatgctggctgcaccacacactgccaagtacaaactccccgaaaaacaggtggattcggaaaccaacagcgccc

SEQ ID NO: 19337 - DNA, 267 bp, Homo sapiens
  chr17:15244586-15244853
  hyper
tgggcatcccttgaaaacccttgaaaagcatcagaaaggtaaattacgaggaaaccaacgtctgggtgggaggtgcctgtggatttgtacggtttttatttggaaggaaaagtgaagatcgcggggaggaattgcagggtgtccgcgacctcccgcgatcctgaggcgagaagttggagtcctggttggcgaagggggatcctttggggtagtcctagaggcaggctagagtcagcgagaccactcacctgtcggcggatgcccggc

SEQ ID NO: 19338 - DNA, 49 bp, Homo sapiens; identical to SEQ ID NO: 15665
  chr17:16283879-16283928
  hyper

SEQ ID NO: 19339 - DNA, 675 bp, Homo sapiens; identical to SEQ ID NO: 15666
  chr17:16283956-16284631
  binary

SEQ ID NO: 19340 - DNA, 39 bp, Homo sapiens; identical to SEQ ID NO: 15667
  chr17:16285065-16285104
  binary

SEQ ID NO: 19341 - DNA, 811 bp, Homo sapiens; identical to SEQ ID NO: 18482
  chr17:18907431-18908242
  hyper

SEQ ID NO: 19342 - DNA, 159 bp, Homo sapiens; identical to SEQ ID NO: 11228
  chr17:1901335-1901494
  hyper

SEQ ID NO: 19343 - DNA, 100 bp, Homo sapiens; identical to SEQ ID NO: 11229
  chr17:1901970-1902070
  hyper

SEQ ID NO: 19344 - DNA, 328 bp, Homo sapiens
  chr17:1954658-1954986
  binary
cggcggggtagggggagccgcgcccctgcccagccgacaaggggttaactttccggaaccgcgggcctggggccggggaggcggcgcggaggggcgcggcgggcccttcgagcttattcacgctctccttccggagccccgcggctcctgggggtcttcacgtggcagccccttccccctcctcagttcctggacctgacgtttctgccgtcacaccccgcaaggccactgcggtgtcgccaccctctcgtcctgcagggtgggcaggagaggaagctggactcccgtgggggcctggggcgcagcgagggctgtggcgtcgggggcc

SEQ ID NO: 19345 - DNA, 146 bp, Homo sapiens
  chr17:26903726-26903872
  hyper
cggagtcccaggtagcaggacgaggatggcaggggaagagccaaggaaatgaagcggagatgttgagtggctcccgccttgcctggccttacctgtgcgcagccagttagcagccgcagccacaagcacagctcgggttctgatcc

SEQ ID NO: 19346 - DNA, 218 bp, Homo sapiens
  chr17:26903937-26904155
  hyper
cgtgactcctccgggggcgtggcctgcatgccccgccctgaccacaccccctccccaggactggtgtccggggcaagaccacgccctcagaggcggggcggcgaggtggagtgagcgccccgccaggcatccgtggctgttagggactgccctcccacctcggggagcctggccatgaccttgcgttcatttctgccacaatccctttaccacgtgcc

SEQ ID NO: 19347 - DNA, 356 bp, Homo sapiens; identical to SEQ ID NO: 8084
  chr17:27038294-27038650
  hyper

SEQ ID NO: 19348 - DNA, 53 bp, Homo sapiens; identical to SEQ ID NO: 7010
  chr17:27940911-27940964
  hyper

SEQ ID NO: 19349 - DNA, 165 bp, Homo sapiens
  chr17:31264142-31264307
  hyper
cgacgtgcctgagcagagggtcggggccaggatgttttccacgtcagccacctggcccctccgcccacccgggagggcacctctgtatgcctgctgaaacaatggcactgctgtgagttccaggggcccacacgttccttgttgccatggccccaggtaaatcac

SEQ ID NO: 19350 - DNA, 585 bp, Homo sapiens
  chr17:37757285-37757870
  hyper
aagggacaggaatggagctcaacagtgaagggacagggagtaactgctttccttccctttcccgccagatgggcaaatggcctggactcggagatacctctttttctctgtcatcttccaaatgctggacttggaatggggtctggaaaatcaagaggaagatgtcctcctgattgaacttggatccagccgtcgggttcagcggcccaggggttgagctgagccggctggtggacgcttggagagcctgccgctgaggctagggcaagaagggcgtcctctctgtgccttctccccaggccaggcacagcgctggcccctttcctcctccctcccctgcttctgttcttggagcatctctgggtgtgtgtgcgcaggcgggagagcaagcaagagaaagagacctgcgaggggacgtttggggccgcttgtccgcgcacatcttcttctcctgctcatcacaccatctcgccagggaagttgagcactggggaggagggtgatgagaggctagagccagccagagtgcagggaatgtggggggaagggtcagaaatcgggaaaggggcgactggtgtggatgcc

SEQ ID NO: 19351 - DNA, 122 bp, Homo sapiens; identical to SEQ ID NO: 8096
  chr17:37760007-37760129
  hyper

SEQ ID NO: 19352 - DNA, 297 bp, Homo sapiens; identical to SEQ ID NO: 14722
  chr17:38020387-38020684
  hyper

SEQ ID NO: 19353 - DNA, 280 bp, Homo sapiens
  chr17:39683530-39683810
  binary
cgaatgggccccagggcgggagagtgggaggaggccaaagcctgagagggatgaacactagacccttccggccagagaaacggaatgcaggaggccctacgctgcggtggcagagggggcaagactggccccgggtggaccagatcaccaaagccaaactctcgcatcttcctgcggcagcgcggcccctggcctagacctctgggcactctacagccgggtcccatctcctcccactcttcaggcctcgctgacccgcgtcccttcttcgtcccggggc

SEQ ID NO: 19354 - DNA, 487 bp, Homo sapiens
  chr17:39683839-39684326
  binary
ccccacccacttatctgccctgcccagttctcctcccctttccaccaccccggcctctgcatccagccccgaggtcctgccccgcacgtctcctgtccccctttactcggccccacctgtggaccttcccacgtcctaacgggctcctgcccgccgccccgcctggaacctcgcccggcccgcggggctgggtttccgcggcaggtgcactgcacttcccgcggccgggcctccgcccaccttgtcccgcaggtcctggatggtcgtgtagtagtggctgtagtcgcgggagggcccaggcccctgcttctggtaccagtcgcggatcttcacctctagctcgccgttggccgcctccagggcgcgcaccttgtccaggtaggaggccaggcggtcgttgaggttctgcatggttagcttctcgttgcccgccagcagcccgtcggacgcggtcaggacgccgccgtagccgccgccgtaggccccc

SEQ ID NO: 19355 - DNA, 85 bp, Homo sapiens; identical to SEQ ID NO: 9238
  chr17:40558083-40558168
  hyper

SEQ ID NO: 19356 - DNA, 47 bp, Homo sapiens; identical to SEQ ID NO: 9239
  chr17:40558226-40558273
  hyper

SEQ ID NO: 19357 - DNA, 123 bp, Homo sapiens
  chr17:4137086-4137209
  hypo
cgggctccgtatggcagggactgtgttataatcatctcagtgttcctggcactgcgcatggaaaacagtaccttctcaactgacaaaccttctgaacaaagatataattcacacaatcacttc

SEQ ID NO: 19358 - DNA, 118 bp, Homo sapiens
  chr17:44849684-44849802
  hyper
cggtggtgacttaaaacgttcaacgcggagtgaatgggtagcgctcccagagccgctttcccctggctcttggccggagacgggaagagcgatcagaggtgactcgcttttggggagc

SEQ ID NO: 19359 - DNA, 80 bp, Homo sapiens
  chr17:44849831-44849911
  hyper
cgctacctggcccgaggaggggcaccggaaagcgctgagaccaacacaccgacaagaacgagtttgaaatgcaaaccgcc

SEQ ID NO: 19360 - DNA, 89 bp, Homo sapiens; identical to SEQ ID NO: 13595
  chr17:46675757-46675846
  hyper

SEQ ID NO: 19361 - DNA, 371 bp, Homo sapiens
  chr17:47439801-47440172
  hyper
cgctccgccgcccagataaccgccggctccccgcgccgcccccgccttctcccactccgcccactgccgggagcccaggtaaagacgagagctgcgcatgcgcggcgctctccgtgagtcggggggcgtggttgccgaaaggaagccaaagtgaagagtgcagggggttgtagcaggcgctgctgtgggattccacaaaataggcgcgggttaggatggggaaggtaaagtgaagaaacgggccaaagcagaaaagtgggtcgacgtgagatttggaagtaaaaagagactttgaataaaaacttaacgactgctgacctccttgttctccttggagggcagtgggagtgacggggggcagaaatcagctc

SEQ ID NO: 19362 - DNA, 96 bp, Homo sapiens
  chr17:48639236-48639332
  hyper
cgcgagcaggtctcgtcggtaacccgggcttaccccacctgcgtacacacacctcagtcttcctgggttgggggggtggggatccaggccaggaga

SEQ ID NO: 19363 - DNA, 299 bp, Homo sapiens
  chr17:56405995-56406294
  hyper
cttgctgggtggctgggctggtcctaaggaggcctgggtcgatgggctgcttgcctcatagtctcagcccctgctggcctctgctctggggactgcaggggtcccttacagtccaggagcctcgagatggtgggctccgaggagggctgagcctcagaattgggtgggggggtgagccgggaagagccagccctcccctcctcctcctcctcctcccctcccacccaccaataggaagtcggctgctggtttccatggtgatggcgctggactggtgggctgaaccggctgacagggtc

SEQ ID NO: 19364 - DNA, 80 bp, Homo sapiens
  chr17:56439864-56439944
  hypo
cgcacacgttcaccgccgccaaagaccccacactgctcaccggcctgctgtggcgggggcggcaccggatgcgcagcacc

SEQ ID NO: 19365 - DNA, 85 bp, Homo sapiens; identical to SEQ ID NO: 13602
  chr17:58228397-58228482
  hyper

SEQ ID NO: 19366 - DNA, 86 bp, Homo sapiens
  chr17:59475272-59475358
  hyper
cgcgcgcgcgcgactttgcgaatgtattcacggattcctaggccggtacctgggttcccggctaaggaaagctgccctggttatta

SEQ ID NO: 19367 - DNA, 132 bp, Homo sapiens; identical to SEQ ID NO: 8122
  chr17:59532387-59532519
  hyper

SEQ ID NO: 19368 - DNA, 41 bp, Homo sapiens; identical to SEQ ID NO: 14739
  chr17:60885408-60885449
  binary

SEQ ID NO: 19369 - DNA, 308 bp, Homo sapiens; identical to SEQ ID NO: 14740
  chr17:60885548-60885856
  binary

SEQ ID NO: 19370 - DNA, 406 bp, Homo sapiens
  chr17:65822956-65823362
  hyper
cgcacaaaaaaatgcgttttcacacccctagctgtggttttaaaattgtgttaaggaaacggatcatttgggttagtaggggaaccttatctggtcctgtgtgtttgtttttattcttcgagtgctaatgggcccgtgcaacagttgctgttaaatggctgattaaaaagcaacgcagaaagccaaacaagacccaaccaaatttggttattcatccgattcagaattattttggttaaatcaaaaataaaagtacaaaactacaggaacgcgcgtcttaactcatttgatcgctttgccttgcttgggaaatgcagtttcgtgtcacctgttgcagaagatatgtagttgatcatctagacataattgccgaagatgaacttctggaacaacttctaagtcacac

SEQ ID NO: 19371 - DNA, 409 bp, Homo sapiens; identical to SEQ ID NO: 14742
  chr17:6939640-6940049
  hyper

SEQ ID NO: 19372 - DNA, 70 bp, Homo sapiens; identical to SEQ ID NO: 14745
  chr17:7198346-7198416
  hyper

SEQ ID NO: 19373 - DNA, 52 bp, Homo sapiens
  chr17:76123746-76123798
  hyper
cgagtcctgccggcctctgccctggactcctcctgcgctcaccctcaggaac

SEQ ID NO: 19374 - DNA, 342 bp, Homo sapiens
  chr17:76123831-76124173
  hyper
tttcctcggacaggcaaagcccgggggcgccccgacagagcagctccttgcaggggtgccagtcacaggaccggacggcgccctccctcagtgtcctgggtgccatcttcgggcccaggccccacaccaccccctccctccagcaggagcaaagacgtgggaaaaccagcccagagctgggtccgaggcggccccacccagcctaacacgggacagctgccgaaagaggggctgaggacgccccacccagtccctagagctggaatcccttcctccagacaggcccttctaagctcagggaacccggggactcgggcacccagcgccccagcactccgcccc

SEQ ID NO: 19375 - DNA, 226 bp, Homo sapiens
  chr17:77216473-77216699
  hyper
caggtcctctctccctctccctgtgtctctgcctctcgctttatttccccaggttgctcagctccgtgcctgctctccgctcgcccatcgatggggtcctgcccggcactgccctgtcgcagtcactcctgctgcctggatctctgttcagagttgaactacagcgtcctgattccagcgctcatcaagcaggggacccaggggagggtgtgtgtgtgtgtgtgtc

SEQ ID NO: 19376 - DNA, 125 bp, Homo sapiens; identical to SEQ ID NO: 14751
  chr17:77778310-77778435
  binary

SEQ ID NO: 19377 - DNA, 42 bp, Homo sapiens; identical to SEQ ID NO: 13624
  chr17:77788305-77788347
  binary

SEQ ID NO: 19378 - DNA, 234 bp, Homo sapiens; identical to SEQ ID NO: 13625
  chr17:77788400-77788634
  binary

SEQ ID NO: 19379 - DNA, 446 bp, Homo sapiens
  chr17:78935167-78935613
  hypo
cgctgagcgtgccccctcccctacagccgcgtcatgacgtaccgggagcacacagcctgggtggtgaaggcctccctgcagaagcgtcccgacggccacatcgtgagtgtgaggtgaggagcgccgatatttagcagccgttctgctgtaaaaacattattttcccctccatttaaaatacgtccttggtatttaaacagctggaaggggatggcatttcgggcagtaattaactcctgccctggaactggccagaaagatcaggcgcagcccgtaggggcccaggggccacagctgctcccctgctgggggacacctgacctgcaggcgctttgggaactttcctgggctgccaactgcggagggttccggggggagttgggcagctgctctccctccacgggcaggggtggcagggtggcaggggcggcgcgtctgccaggcac

SEQ ID NO: 19380 - DNA, 1019 bp, Homo sapiens
  chr17:79007528-79008547
  binary
cgtctcccccaggggcctgactcgttgaaggaatgaatgaatgaatgattttgcagggatgggaggctgggagactgagaggtttcattaaacggaaacgctcagatctggtgtttcacaacgtaaaacaaataattcctctatgttagcctaatttatgtaaatatttctccacgggaattgtaccgggagacctgtgtgccaactcggccagcttccccggcagaatctccccttgggaggacccttaagcaggacccttcctaaaaattggaggcagctctgactcctccattcctcctacaaggttcccccaccccctagggctttccaccgcatgagagtcctccgggcccctcgtttcctactgccctcgacccttccttcccgagacctctctctctcagtaaactgcctccaacgagaatcttctgacggcaggagggtcctccccgtccctaagggtcgccctgtccccaggccttccagcaggacactcccctgtcccctctccagatcctccttcccagggccctcctccaagatcctcttccccaaccctcctctcccagggtcctcccctctccagaatcccggccccaagcccccaagcgctgtctgcctgtctggggtcctccccagagttcaccttctgcaggatcctccctccaagtcctctcctcacgatgctcccccgaaatcctccttctccaagtcgtcccccactccagggccgagctctctccagggtcctcctgcagcaccccctcccccagggttctcctctctgccccgaggggccggccggggggtcgccgcccgcccggcgggcttacctgcgaagcggcggggtcggggcctctcccacctgtaagcccggcccgcggcgtcctgcgtccgagccgctccccgccccgcagcgccaggccgcgacccggcgggccgcccgccccgaagtgccacttcgcgaagtgccgcctccacgcgcgctgccgccggcgccccccgctctcctcccc

SEQ ID NO: 19381 - DNA, 221 bp, Homo sapiens; identical to SEQ ID NO: 8144
  chr17:80186335-80186556
  binary

SEQ ID NO: 19382 - DNA, 517 bp, Homo sapiens; identical to SEQ ID NO: 8145
  chr17:80186618-80187135
  binary

SEQ ID NO: 19383 - DNA, 107 bp, Homo sapiens; identical to SEQ ID NO: 6000
  chr17:8901441-8901548
  hyper

SEQ ID NO: 19384 - DNA, 47 bp, Homo sapiens
  chr18:12277197-12277244
  hypo
cgggtgctggatgacaaggaagagcggccatccctccggtcacaagc

SEQ ID NO: 19385 - DNA, 111 bp, Homo sapiens
  chr18:12277273-12277384
  hypo
gcaggctgtcgccggctcttgagccaaacactgtgtttcgtttggctcaatgacgaatgttgaagatgcttttatgttctgagccacatgcacttggaggccgctggtcac

SEQ ID NO: 19386 - DNA, 435 bp, Homo sapiens
  chr18:12658128-12658563
  hyper
cgcctcgcgccgtccagcgccgcccagcgcccgccccttagggggccgcacgggccgggggatgcacgctctggaggtgaggaccaggcaggagggcctcgcctcgaggcgagatggccgcacggtctctagcccgcagggctctcagagtcgcaggcggtgacgcccggtcggggggcccggtcgcaagggacacacagctgggggcgcaatggtgagggcggcgacgcacggtccggaggggatgcgcggccgggtagggcgtgcagggttgtggggcgtgggggacacgcggggccgggcgcgcggtcggggggcgcaggggcaagagggtgtcgcatttatcagggaagtccccggccgactctggcggggaactgggcgcgccaacccgggtcaccgccctgcacagcgggagaagtcacccgcattgac

SEQ ID NO: 19387 - DNA, 48 bp, Homo sapiens
  chr18:19577719-19577767
  hyper
cgtcctgtttctacttcgtgagatggcactgactcaccactagtggtc

SEQ ID NO: 19388 - DNA, 142 bp, Homo sapiens
  chr18:29598295-29598437
  binary
cgatagcaccgtcttaggagacgcccaatcataggtcataggtcatttttgcagcttattgtgatgacaacagtggaggatggtcttccacttcaccttaaaagcggctgttctctgattatcattaagcatggccacgccc

SEQ ID NO: 19389 - DNA, 31 bp, Homo sapiens
  chr18:29599824-29599855
  hyper
taaaactcacagttggtgcaaagccgtggtc

SEQ ID NO: 19390 - DNA, 788 bp, Homo sapiens
  chr18:3246866-3247654
  hyper
cggattctgggcggaaaaagataaagtcggggaggactttctctttttaataagattcatcgttacgaattgttctaggcaagcagacctcaggagaaataggcccaagttttgattcctgttttcaccaagtcgcaagtcctaatcgtagcaagaggtgcggggaagagtcgccttccttcctgcatagtgggatccaagtcaggctgtccttgttagccagggtcaaaggggctctgccagggaaaaacgacggcaaatgtttttcaagaggaagtctccagccacttgtgacctgggaaatccgtctgggccaaaaagatagtggaggcttggctgagggccccagggacacacgtttcctcccgtatggagggggcgggactcttaataaaattacactgcacacagagctagcatcaagatccgctcccgggatacgcgcactgctccggggccctcaggcggagacccagaccccgcgcggggcgtcaagcgcaggcgcactaccgcccacaagctggagcccggcttcggggcggggcgagggtcagtcacgtgggcccgcagccctctcctcgatttccctacaaggacttgggccgacgggccccgcccttcgccgtgccctggaatgtgcggccaggcaaagccacaggacggacgcaaccatctgcggaaaggataggggggaggaagacttaacactgcaacaacaggtacaaaaaagaaggaaactcagtaacaggacccagaggaccattatatattgctctatattctaggtc

SEQ ID NO: 19391 - DNA, 556 bp, Homo sapiens
  chr18:46502500-46503056
  binary
cgccaggcttggccctcagcgggcgctgtcagagggcgggcccgcgggagcggggcggcggcggcggcggcagaggagcgcagggcgggcggagaccgtcggggtcacctctccagccccccgcggtggccgagccacccgcagttgcgctcgaggcgccgaggcggggtggccgagcgagacccgggccgggcgcggctcgggccgcacagccgcggcggcggctgcagacctgtaaaccttaatgacagcaatcttgcccgtctgcgcctctgactcacgtggtgacccagcctccagtcacccggcggccgccctccggcctcagtttcccccgccgccgaacaatgaagccactgtgtcgccgttcatttctgagcgccgtttcacacgcggagcgccgccgcctccctggggaagggaccgaggcgtccggcttttaattatccccggtgggcgggcgtggggaggccgcgctctgctggataattgaaccctgggactattccctcgtcagcccaagctctttatcttaagccgtcctttcctcttcatc

SEQ ID NO: 19392 - DNA, 34 bp, Homo sapiens; identical to SEQ ID NO: 11300
  chr18:57365422-57365456
  hyper

SEQ ID NO: 19393 - DNA, 125 bp, Homo sapiens
  chr18:60987974-60988099
  hyper
cgcctggaccttttctagccgtgtatgtgggagtgtgtgtgtcgcctggaccctttctagccgtgtatgagagtgtgtacacgcgcctacacacacacacgttgtgttaccggcgctcggccgcc

SEQ ID NO: 19394 - DNA, 460 bp, Homo sapiens
  chr18:74159178-74159638
  hypo
cgccatgggcggccgccccaattaggaggattattgggacgtcagcggccctgctggcacgacgggctgtgctttaaatcccgccaacccctgtaagccaggagggtttcgatgggatgcctcctccacctttatcctggtccctagtggggcgtgcctcacgtaggagcagcgccgtgtgataaagtgctacctacctcagttccagccgcagacatttccgtcctgggctgctctattccactttctcaaacgcacgccaaatacaagttgttccaactctccctgtaacacacgggcctggagataaccagccttataaaacttgtgcatgtgagcctgccacccaaaccacagggaatacggaaaggttctgcaacaacacagatgctcagagccaaggtggagggtacagcatgtgtccagctgacatgcaatatggcgcccacgcacctcggac

SEQ ID NO: 19395 - DNA, 367 bp, Homo sapiens
  chr18:74171117-74171484
  hypo
cgctgcagcagtaacggggcgccgggcccacctgctgcccctctcctgtgcatagggcgctctctccctgccccgagcttcggcttctcctccatgcacggtcactgctggaggcacactggacccagtgccagctcgggaaatcctgggccggtgacagccctgacccgtggccaccatccactcaacatcattgagccctcccacaggcacccaagctctctgaggacagccgtcctagcttccttcgtgggagaaaactctggccctccactgccggccagggaggcctcgcgtgccaagctggccctgagctcagcccaggatttgtgccattcaggacgtggcggccgtgtgcaccccatcg

SEQ ID NO: 19396 - DNA, 122 bp, Homo sapiens
  chr18:74171505-74171627
  hypo
gaatgtattccagcactgtctgccatgatgccaacagcaacacttctcaacaccaagcctttaaatgtccagcagctccacagcccgagtcagagtggcccagcctcccctggacctgatgc

SEQ ID NO: 19397 - DNA, 641 bp, Homo sapiens
  chr18:74323522-74324163
  hypo
cggtggagggggcgatgtgcctgcgtgtgtgcctgcgtgtgtgtgtgtgcctgcgtgtgtacctgcgtgtctgcctgcgtgtgtgcttgcggtggcgggggcggtgtgcctgcgtgtgtgtgtgtgtgcctgcgtgtgtacctgcgtgtctgcctgcgtgtgtgcctgcggtggcgggggcggtgtgcctgcgtgtgtgcctgcgtgtgtgtgtgcgtgcgtgtctgcctgcgtgtgtgcctgcggtggagggggcgatgtgcctgcgtgtgtgcgtgtgtgcgtgtctgcctgcgtgtgtgcctgcggtggagggggcgatgtgcctgcgtgtgtacctgcgtgtctgcctgcgtgtgtgcctgcggtggagggggcgatgtgcctgcgtgtgtacctgcgtgtgtgtgtgtgcctgcgtgtgtgcctgcggtggagggggcgatgtgcctgcgtgtgtacctgcgtgtctgcctgcgtgtgtgcctgcggtggcgggggcggtgtgcctgcgtggtgggctccctggagtgatgggcattagccttctcatgactgccgcctgggagactggttattccaaaggacctggcgcccaacgccagcacgaccgaagccttgaaggcgagcaggcaccctcc

SEQ ID NO: 19398 - DNA, 428 bp, Homo sapiens
  chr18:74770092-74770520
  hypo
cggcagaggacacccagggctgcaccggctcttcagggaccctccggggagaagaggcatcccctccccagccctggacgtccacctcaggggcggtggggatgcggggatgcggggatgccgagcgctcccaggctgggtcacagcaggcagtggctccgctctggcttcgactctcaggacccacctgggacccctgctccacgctgcggggaggccaaacctggagaacccagggcaccagttcaggctgacagcccggccggacccagccaacgccccgcacagctcgccagccacgggagggagcggcctccggcagaccccagccccaggcacgaccccaggcccgggcacgaccccagcccccaccggctgatgcgacgcccacaggggacgagctgttccagcaccacccccgcccccgc

SEQ ID NO: 19399 - DNA, 817 bp, Homo sapiens
  chr18:74844285-74845102
  binary
cgggtcagggaggccgccggctgctacctgctcggccacctgctccgctgcctaggttctccctgcgcgtccccagccaagaaagggacccggagtccgggcgtcgggatagctcctgtccccgatcttgcgcccccggctcccgcggggctccggtccggggtcccgcccaggtctccgcggtccccactcggaggggcacagagacaaaggcggcagagcagcccgcccgtccccgagggtcacccaccggcgctgcgctcgttgctccgaggccgaggggcgccgcggggtccaaggccctgctccgcctgcccaggcccgggcaggctggtctcggcttcaagcgcccacgcgcggggtccccgggcagcctgcttcgccttccggggtcgggagacaggggccgccggggccggaggctgcttctctctggcgcgcggcggcggtgactgacggcggcggctccgagggacgggcgcgcacccagctccccggccccgcctccccgggcttcctgcgagccaggtaaacacaggccgatcccgccgggcccgccccacctggacgcggccgccggcgccgccccgggagctcggaggaccccgggcccgctctgcccacgcggaacttggggggcgcacggggcccacgcgcagggtcagacctcggaggggcggcctggagcctcgcccgctgccgaactgggctccgaactgcggcccgtcgacccttcccgttcggaggcttggcctccgaacccaccccgaccccgacctcgacctcgcgggaggggtgccaggccgcatctccccgc

SEQ ID NO: 19400 - DNA, 584 bp, Homo sapiens; identical to SEQ ID NO: 12465
  chr18:77160022-77160606
  binary

SEQ ID NO: 19401 - DNA, 67 bp, Homo sapiens; identical to SEQ ID NO: 12466
  chr18:77160661-77160728
  hyper

SEQ ID NO: 19402 - DNA, 411 bp, Homo sapiens; identical to SEQ ID NO: 14779
  chr18:77497998-77498409
  hypo

SEQ ID NO: 19403 - DNA, 75 bp, Homo sapiens
  chr18:77724415-77724490
  hyper
cggtggcgcccacgggccctcttgagtaaggcggctccgcccaggccgtcccggggcctcggctcggctcggctc

SEQ ID NO: 19404 - DNA, 992 bp, Homo sapiens
  chr19:10381056-10382048
  binary
cgcctccgcggccaaggccgaaaggggaagcgaggaggccgccggggtgagtgccctcgggtgtagagagaggacgccgatttccccggacgtggtgagaccgcgcttcgtcactcccacggttagcggtcgccgggaggtgcctggctctgctctggccgcttctcgagaaatgcccgtgtcagctaggtgtggacgtgacctagggggaggggcatccctcagtggagggagcccggggaggattcctgggcccccacccaggcagggggctcatccactcgattaaagaggcctgcgtaagctggagagggaggacttgagttcggaccccctcgcagcctggagtctcagtttaccgctttgtgaaatggacacaataacagtctccactctccggggaagttggcagtatttaaaagtacttaataaaccgcttagcgcggtgtagaccgtgattcaagcttagcctggccgggaaacgggaggcgtggaggccgggagcagcccccggggtcatcgccctgccaccgccgcccgattgctttagcttggaaattccggagctgaagcggccagcgagggaggatgaccctctcggcccgggcaccctgtcagtccggaaataactgcagcatttgttccggaggggaaggcgcgaggtttccgggaaagcagcaccgccccttggcccccaggtggctagcgctataaaggatcacgcgccccagtcgacgctgagctcctctgctactcagagttgcaacctcagcctcgctatggctcccagcagcccccggcccgcgctgcccgcactcctggtcctgctcggggctctgttcccaggtgagtcggggtggggattgccgtcgggccagttctccgaagccccgggaggaccggctcccgggtcaggtcatgcatgcttaggtagctgtttatgggaaggaggggctagagacagcgattgaaaggcaacagccagtaggttc

SEQ ID NO: 19405 - DNA, 39 bp, Homo sapiens; identical to SEQ ID NO: 5768
  chr19:10616220-10616259
  binary

SEQ ID NO: 19406 - DNA, 444 bp, Homo sapiens; identical to SEQ ID NO: 15741
  chr19:11004773-11005217
  hypo

SEQ ID NO: 19407 - DNA, 98 bp, Homo sapiens
  chr19:11172428-11172526
  hypo
cgcacactctctcctcctgtcccctctccaggaccgctcaggaagtggcagcgaagaagactgagccccgacattccagtctcgaccccgagcccctc

SEQ ID NO: 19408 - DNA, 1111 bp, Homo sapiens
  chr19:11303560-11304671
  hypo
cgttgctggtagctgcagcgggcactgggcacattgtctccaccacctcctggctgcggaacacaggtgggctctcaggcctaccaggcattgccagggccctcagccctgtgccgtaaggctccaggctctgggcccgctgtgcgggggcgccagcggctgtgctggccaccacctccacctcccgtggcccttctaccacccggactgtatccacgcggaccgggctgtccggcggtggccaggcctggggctgggggtcagcctgccgggcctgagctgcctgcagctcctgcagcgccttcttgagctgggtctccagcacagcgaccttggcggcgagggcagcctccccatcaggcatgcccaagtcccgttctcgaacccaggtgcccacactccgggtctccagtgccactgggtcctctgggggatcggggaggtccaggcagagctcgctgcgaccccggcccgctgtggggtggcccaggaacttctggctcttaagttgtactgtgagctgccgcttttcctcctggagcaccgagagcttcacctggagcacagggatcagcttcacctgctcctccagctgccgcagcttccgcagggcacccgccatctgctcccgcacgtgggccaggtgcccggcactgggaggcaccggtgtggacagtcctgaactccgtggtgtcgggggtggcaaccccacgcccaccagggaggctgtcgagccggccgcactgggggtcagggagcccaggccggtgggtgtggccgcctggtcctcgagacggcgacgggcatccagcagcgtgcgctccacccgcggattgaagccaccgcgggtctccagagcaccatactgagggtagaagccacggccgcagtaggaataggctgagtggcggctgtccccactggcattggagcacagcgactcagtggacgtccaccaggagccagggccacggggcagcgagctcaggcgggggcggcgctgcactgccacgcgtcgcagcgtgtggcccttctcgatgtcatccacgtacttgaggaagtccaggtccaggcggtagccatagggggtctccacggagtagggtggatc

SEQ ID NO: 19409 - DNA, 285 bp, Homo sapiens; identical to SEQ ID NO: 12480
  chr19:11532739-11533024
  hyper

SEQ ID NO: 19410 - DNA, 433 bp, Homo sapiens
  chr19:11662248-11662681
  hypo
cgggactctaaaaggctgtgtccagggcctcaacctcctcacatttcagaggggaccctgttatccccgggaggagggagaggtccccaaccatcaggattccaaggaggagaggaggcagagaagcgaggagcgcggcacggagctgtcttctccccagggagggcaggagttgaggctggaacgtggagacctgcggaggcagacaccagaagacccgcgcacagacgcacgcagcccctggggcctcgtaaaccggattccaggcgcttttggcctggctaccgcaagtcctgctccccctgggccggcgcggggaagctatgctgaggaggatccgggcctggcccagggccctgcctcctcgggaaaacagcaccatattagcacttagcctgtgaggctggggtgggcgggcggcaggaagggcctc

SEQ ID NO: 19411 - DNA, 58 bp, Homo sapiens; identical to SEQ ID NO: 17607
  chr19:11689628-11689686
  hyper

SEQ ID NO: 19412 - DNA, 172 bp, Homo sapiens; identical to SEQ ID NO: 9311
  chr19:11999219-11999391
  hyper

SEQ ID NO: 19413 - DNA, 268 bp, Homo sapiens
  chr19:1223581-1223849
  hypo
cgtcgtccctgaggcctgcccgctggccctgatgccggccgcccttcttccctaggtggcgaggaggcgtctgaggcagggcttagagcggagcgcggcttgcagaagagcgagggctcagacctttcaggagaggaagcctctcggccggcgccgcagtagtgcctgaggaggagctcagggccttagcgtaggggcggcccacattggcagccagcccctccccgccatgctcccggcttggctgtgttcggcccagggctgggcc

SEQ ID NO: 19414 - DNA, 160 bp, Homo sapiens
  chr19:12946904-12947064
  hyper
cgaatgccctgtctgcagtgtcaactattaatcctgtgcgggagaagcggaatccacttggccgagcggctctgcagctgagattggaggtggcgtctgtttacactgacgccaaagacccgaacttccgccgctccagtttgaccctttcttcgtccct

SEQ ID NO: 19415 - DNA, 259 bp, Homo sapiens
  chr19:12947127-12947386
  hyper
agccctccaggggcttaccctccaaggccggttacccggatctggacaccctgggctctgtggccagaaaatccaggtcttgatttcgcttgggccattgcagacacgcagccaggtcgactggtcctcattcactccggtcatgcaaagacagagggaaaacctggtttggattatcggtcacccgtggctcgggagggcagggctgccctttggccccgcctatatgtttgtccgttgtacaacggggtgggaggac

SEQ ID NO: 19416 - DNA, 645 bp, Homo sapiens; identical to SEQ ID NO: 17609
  chr19:13108022-13108667
  hypo

SEQ ID NO: 19417 - DNA, 32 bp, Homo sapiens
  chr19:13112089-13112121
  hypo
cgtgtgtctgcccgggtccctctccatgcctc

SEQ ID NO: 19418 - DNA, 156 bp, Homo sapiens
  chr19:13112293-13112449
  hypo
attggtgtaccggtcaccatctttgtatctgcgctttgtatctggggtgacagtgtcccagcgacatgcgtcacatctacagcagtgtttttctgggtgtctgtgcgtcacggcaaagagtgtatccgtgtgtctcacacacgtgttggcctgtcc

SEQ ID NO: 19419 - DNA, 182 bp, Homo sapiens
  chr19:13114040-13114222
  hypo
cgtccccatacaaagaatcttgccctcactcacagacaccttgaggcacccggccacacccgaacacatcgatgcggcattacacactcagggacgtgcatgtgggtgcagacacacgggacacgcgcagtcacacgatcacatgccatgaagcacacagcacagacacaggctctgccacc

SEQ ID NO: 19420 - DNA, 61 bp, Homo sapiens
  chr19:13208370-13208431
  hyper
cggctggactgctccggccgcgggtctccccgggcgcccctccctggggcccagcacccct

SEQ ID NO: 19421 - DNA, 206 bp, Homo sapiens
  chr19:13208478-13208684
  hyper
gcccctcccccgcagaggtcaatgccaacgaacaaacgtcccctccctccctccctctccgccccgagcgcccttctttgagccagacgccaacttgaccctcaccagcattatcaggagcgcgctcagcaagttggtagtttcctcccccctttcccggcgcccctcccgcccccattcaacatctctcatcctatccccgaccc

SEQ ID NO: 19422 - DNA, 285 bp, Homo sapiens
  chr19:13208945-13209230
  hyper
acccaccactcccccaccctgaccgtgctgaacagacccccccacacgagagaaaataaaggagcaataaagtcacgagaactttcgtcccccaatcgagagcccgaggggcaccccagccccgcctctgctcccccccaccccacccaccctcggggcgcccccctccccccgcaagccagcctgggccagccccgcttcggcccctcccgggagatccgtgcgcccgaccagcaccagcatcgcggaccgcaaaggccgcccgtcccgtcaaacaagtttctt

SEQ ID NO: 19423 - DNA, 447 bp, Homo sapiens
  chr19:13209259-13209706
  hyper
tatctctatatatagtactaatggatttggtgtgcttcccccttagcgtccccctccctctgctcctcctccttcagcctggtctccccctcttctctgccctccacccccgtctctgcactgagatacataagaaacaagggtagtttactgtctgttttgttttctgggttttcagtgtcctagcggaatgcaagtaggcagccagcccgtctgttccctctccgccccgccccgccccgcccccgtcactgcgcttctgttataccatctttgcctgactctctccggcttctccattgaatggctaatgtgtatgtgaaataaagaaataaagaaaaacaaacgcgagagcgcctgacccttcgctaacgcgaccgtgcgggactgggtcggggtcggtagggtgcgtccccgacttggattctgcgcctctgtccaagcgcc

SEQ ID NO: 19424 - DNA, 1257 bp, Homo sapiens; identical to SEQ ID NO: 17613
  chr19:13265772-13267029
  binary

SEQ ID NO: 19425 - DNA, 150 bp, Homo sapiens
  chr19:14073146-14073296
  hypo
cgcacgggagggggcctgcctgcctgccccctggggtggtgggaggacggggctggggagaagacgctggggcctgggaggggggcggccaaggggccgagctggatgccccgcggggcacctgggcacgcggcgggttccttaaggcac

SEQ ID NO: 19426 - DNA, 1302 bp, Homo sapiens
  chr19:14073521-14074823
  binary
cgcctgcacgaagaggccgcgcgcgtcagtccgcgccagcttggccggcggctccagggtctccgggcccagcgcgggtgactcgccgccagccgccagtgagatgtcctgcggcagctcgtcctcgctctcctcctcctcttcttcctcctcgtctggaacacagggaccaagtccggctcggggcggggtggcaacgcccccgggctcctcctcctcccgagcccctccgttgtccgccacccccgggacccgcgccctgggtgggaacacgcctcgcctacctttgtcggggtccagggggttcagggaggtggccagattggcgaactggaggaagaagagaagaaaatgggtgagggtcccgccgcctggcgccccgcccgcgcccccagtggcccgcctcgcgcacctcgcccatgacggcgatgggggtctcgcccttggcctgggctacgcggtgctcgatcaggtagtacatgtactcgtcgtagagcagccggatgaggtggaaggaaccgaagctggcggcgctgcgcagggtcaggtcccggatcaccatggagctggggatggagacggagaggagaccgtcaggccccgtccggcccgaccccctctccccctccccgctgcgatgcgcccgggcctcgcgccagcccagtgactcaggctggatcccgcacagccttcccggcacatgagcccagggccccagcctgcccgcccagcctgcaggctcgggtcgtcgtagaagagcacctgagacccccagggacgcggggccttccctggtgccgcccggacccgatcccgccgcgcgcgcacctgtagaaggaccacttgaggaggaagagcttggcggccttggggaagccggcgctgccctggtagggcttgagcacctggctcaccacgccgtccagccaggccgcccactgctccagcgagttctgctgctgcagcgtcaccttgaagtcctgctccagccgctgcaccacgcggtcctcgcagcggcacacccacgaggcctgctcctggggcacagagggtgggcgggcgcccggggctcagccgccgtcacccccgcctggcccgccccgttaggctgcccctcattcgcccgccccgccccgccccgcgctcacctgcacgttggcgaagtccacgcggttgaggtcgctcagcatctggttgatctgtgcggtgttctgcagcacagcgcgcgccgcctgcgccaggtggttgagcgacgtgtagcgccgcagtgtctgcgcgaaggcgccagccgcggccacctgc

SEQ ID NO: 19427 - DNA, 153 bp, Homo sapiens
  chr19:1444961-1445114
  hyper
cggcgcttctcacatccccgcggcctcccccctggacggcagtttacactgaactcggcgccctcccctgacttctgaaggaggagtcctgggtggccccgaagcctccccggcagccgcacggctccgtccccgctccagggttcagctgag

SEQ ID NO: 19428 - DNA, 33 bp, Homo sapiens; identical to SEQ ID NO: 8193
  chr19:14584167-14584200
  hyper

SEQ ID NO: 19429 - DNA, 133 bp, Homo sapiens; identical to SEQ ID NO: 8212
  chr19:17958343-17958476
  hyper

SEQ ID NO: 19430 - DNA, 203 bp, Homo sapiens
  chr19:18337130-18337333
  hyper
accaaaagcttcctgaagagcccgggggagccgcgcggggatccccgaggggagccgggcccggggaccggggcgggcgcgggggggccctgcatcgccaggactgcgtggaggctggaccgagcgccggctgcgcgggaccttttctggacagctgcgggggcggggcccagcggggagggggcaaagggcgcatcggcccc

SEQ ID NO: 19431 - DNA, 318 bp, Homo sapiens
  chr19:1853369-1853687
  hyper
cgggccaggacccacctcttccaagcacccaggagaaggaggggaggccagggaagcagggccgggccaggctgcagcccaggcccggaagagcctgcaaccccggcgggcatgggctccacggccccacctgcaggccagggagggcagcgcagcccaacagccgcagtcgtcgttaagggagagttgattgtcacgtgataccgcaacggccaaagtcagcaaggcagggactggaggcccaagcccggtgccagcctcccctgcagcctctctcacccacccacccagagagggcgagctagggcccccacaccc

SEQ ID NO: 19432 - DNA, 109 bp, Homo sapiens; identical to SEQ ID NO: 7091
  chr19:1857456-1857565
  hyper

SEQ ID NO: 19433 - DNA, 343 bp, Homo sapiens
  chr19:1862256-1862599
  hyper
cggttcccctcgccgccccggggactgcgctaggaggggcgttggtgtagccgaagcgctccaactacgcgcaccttcccgaatcgcccgccaggtaggggtgaacaaacacgccagggaaatacagcagtgtggacccgagcccctcgagggtcctccaatactatgaagttcccccgcccagactcaggccccaacccgcgctcctagcctcgccctccccctcgttaaaatacagagaacgcagagaaaacgtgccgggctccccccatcctggccccacgccaggtgctctgccgacctctggggagaatccgcgcggccaccccggcggcggcgacgc

SEQ ID NO: 19434 - DNA, 91 bp, Homo sapiens
  chr19:18714365-18714456
  hyper
cggctggaagaagggactgcaggaggcaggggcagcccagcttcgcagagatggcagccaaggacagggtgatcctggcccccagggaggc

SEQ ID NO: 19435 - DNA, 68 bp, Homo sapiens
  chr19:18715135-18715203
  hyper
caatctcccacccccttagccccagccggtaaggtcagaaggacactttctcctcccgggatatgggc

SEQ ID NO: 19436 - DNA, 452 bp, Homo sapiens
  chr19:18715787-18716239
  hyper
cgggggtccccatctcccgtcccgctggtacctgcagacactttacgacccacccgcctgctggtcaggtgctaagacacaccgtaagtagaaacatattgccgaggtgtgagaatcttttatttaatttcttccccccttaaaggaaaaaacacacttacagtgcccccccaccccctacaccttcgcctgctgctctactggctgaaaacaaagcttggcgctcacagtggcactcacaggcgctgcccaccgcctggcagagccgtcaggggccctgggagggcccgaggtagcccctcacctgaaagccaggggagagccaggctttcagcaagtgcccctagaagatgcccggaccctgccccttcccggaggagccctacaggcagcccgcaaacagcccagcacagggtggatgagcctgggagcagtgtgtgcccggcgacccc

SEQ ID NO: 19437 - DNA, 453 bp, Homo sapiens
  chr19:18716283-18716736
  hyper
catctggggcgagtggtgcctgcctctgtgcccctgggtcgcctcccctgtgggatgtgtgtgaccgtgaatgtgtgtgtcggggatggaatgtgtgtgcgtccgcgatggtgcgcgaatgtgcacctgggatgcagtgtgcgcgagtttgagggcgagggtgacgggccacaagccagtgtgattctttgtgtgtctctgggtgtgtcccagagcgggtctgcatacggagacgtatccttgcgggggtgttccttggatggggggccccagagtgcctgaggccagaagtccctccagggcaggggtcttggcccgtagggcagcgggttcccagtgggccccctcaaagtttgggcccgctggtgcccggactcactggctcccgctccctctccctctcacccactcgctcacaaagattcctctcgctggaggctctccgcccgacgc

SEQ ID NO: 19438 - DNA, 350 bp, Homo sapiens
  chr19:18716847-18717197
  hyper
cccccgggaccccgggctgcgcgccaggcggccagagcggcccccctgcagccccgccctccccgtggggctcatccctccgcctgggggggcccgctgggggcccgcacccagcgcgccaaccgcgtgcgcccccgcctgggagcggtgccctgcagtcccaggggcccagagtccaccgaagcagacgcgtgcgcccgccacgtcctggcatgcagagggtctcaggccgcgatccccccagcccccgggggcctggcctggcgccctcggcccagctgcccaggtaacagggcctcgggcgcggaagcaggactctctggacagtggactgcggcgccgtgtgcccc

SEQ ID NO: 19439 - DNA, 68 bp, Homo sapiens
  chr19:18783006-18783074
  hypo
acttctggggcctctcagcaagtgagggccaagggggcctctggggagccgtgtgaggtgggaatccg

SEQ ID NO: 19440 - DNA, 35 bp, Homo sapiens
  chr19:18783151-18783186
  hypo
ggccctggagattcactttgcacggtgcagcctcg

SEQ ID NO: 19441 - DNA, 126 bp, Homo sapiens
  chr19:18783216-18783342
  hypo
tggatctcagcggcctggcgcctaacacagagcctggcaccgacggagcatagctcgaatgtttgctgcacaaaggagaggtgctggggcgggaaggtgagggcagccttcttcacactagtggcc

SEQ ID NO: 19442 - DNA, 301 bp, Homo sapiens
  chr19:18836823-18837124
  hypo
cgactcatgtaccgcgccctcgatcttctctggagttgaggccgggccctggaacaggctccagctccttgttctcccagctggtgatgcaggaacatctttgcgcataaatctgcgttctggatgatttccctcaggagagcttcccagaagtgggattaccaggttagagggcaggaacgttgctcaggcactcggcggacgctgccaaatggctcagccggcgctcccagccacctgcctctcagagccccatgcatttccagcaccgctgacgtgtgccggcctcgcttcacccctc

SEQ ID NO: 19443 - DNA, 298 bp, Homo sapiens
  chr19:19738875-19739173
  binary
cgcctcccgtccgtgcaggcctcacctgggcctccagtcacgccgcagacaaggcgggctcgcgggggttcggggcgggctcgaggcccatggcccggcgactgcggcgggagcggtagagcgtccgggtgcgccctgtgcgggttgctgagagggcgcgggaggcggggtctccccggcgccccgcccccaccacctgggggagccctgccccgccccgccacctgggggagccccgcctccacggccgcgtcgggggcggtgtcgcccggaaccgcagcccccctgtttcctcccc

SEQ ID NO: 19444 - DNA, 247 bp, Homo sapiens; identical to SEQ ID NO: 12494
  chr19:19739428-19739675
  binary

SEQ ID NO: 19445 - DNA, 75 bp, Homo sapiens
  chr19:35589864-35589939
  hypo
cgccctgcgctgcgcgttgcctgcccgcgtggcgagccagcctgggatgcagttacgtgctccttccctttcacc

SEQ ID NO: 19446 - DNA, 205 bp, Homo sapiens
  chr19:3669713-3669918
  hypo
cgcccctcggcccccatgggcactgtgctgctctcggtgggtgcacgggagacccacgtgtgtcccatccagaggctgcaccccggtgaccgccctgccgtctgaaaacacgtccaccgcgggcactgaaggcaactgaatgcgacttggtggagcagcccatagctttgctctgctgccgggtcagaactgccggagacaagac

SEQ ID NO: 19447 - DNA, 61 bp, Homo sapiens; identical to SEQ ID NO: 13720
  chr19:3747832-3747893
  hypo

SEQ ID NO: 19448 - DNA, 98 bp, Homo sapiens; identical to SEQ ID NO: 13721
  chr19:3748020-3748118
  hypo

SEQ ID NO: 19449 - DNA, 390 bp, Homo sapiens; identical to SEQ ID NO: 12511
  chr19:38754883-38755273
  binary

SEQ ID NO: 19450 - DNA, 175 bp, Homo sapiens; identical to SEQ ID NO: 12512
  chr19:38755344-38755519
  binary

SEQ ID NO: 19451 - DNA, 259 bp, Homo sapiens
  chr19:40323996-40324255
  hyper
cggcgctgaaaaggcgaccgcctgtctctggcccggccggccccgcggcggggagggcaagcgggacaggaggcccggtgggtgacaacagcagccgccactgccaccgggggcggggagaggaggggacaagggtcagcccagggcacgcgggggaagagtagagcaggtggacgggggaggggcgacacgccccaccctgagtgaccaccagcccctagggacccggcgtcccgccccccacccaggaggccctcct

SEQ ID NO: 19452 - DNA, 33 bp, Homo sapiens
  chr19:41060353-41060386
  hyper
gagggcctgggggcgctggagccgggggccgcc

SEQ ID NO: 19453 - DNA, 49 bp, Homo sapiens
  chr19:41105938-41105987
  hyper
cggtgacagcagcttttccgtcctctcccacccaggctccaggaggcca

SEQ ID NO: 19454 - DNA, 86 bp, Homo sapiens
  chr19:41106420-41106506
  hyper
ctgggcaccaaatgctcaagattgtggggcggctgggggccaaaggcctcctcctgtttcccgaatcttccccctgccctcctccc

SEQ ID NO: 19455 - DNA, 678 bp, Homo sapiens
  chr19:41111116-41111794
  hyper
cgcgacgacgagcacggtgaggaaagggtggccagagtcccctccgacccctgtcaagcatttcactttgcccctgaccctcatatttcccgccttcccgagcacctttgcccagctcgccctccccgccttgtctagccccaccccgtaagaacccgtgtagacatccgtttgcccggccgtgcctcccctaggcgtggcatctatggtgagcgtccacgtggagcacccgcaggaggcgtcggtggtggtgcaccaggtggagcgtgtgtctggcccttgggaggaggcggacgctgaggcggtggcgcgggcggaagcggcggcgcgggcggaggcggcagcgccctacacggtgttggcacagagcgcgccgcgggaggacggctactcagatgcctcgggcttcggttactgctttcgggagctgcgcggaggcgaagtgagaggaggcccgtggggaggggcccggagcttgcctccgcgcgggggcgcgctcacccaacacttccccgcagtgcgcgtccccgctgcccgggctccggacgcaggaggtctgctgccgaggggccggcttggcctggggcgttcacgactgtcagctgtgctccgagcgcctgggtaagccccaggacgtccccgaagtgctcggagctggggagtggtgacaacctcacc

SEQ ID NO: 19456 - DNA, 69 bp, Homo sapiens
  chr19:41115811-41115880
  hyper
cccagggtctcgctcctgctctcactccagagcctctccagccctcccacgcttcccctctcgggtccc

SEQ ID NO: 19457 - DNA, 272 bp, Homo sapiens
  chr19:45195351-45195623
  hyper
cgggaactaagacgccccccacgcccatccccggctcccaggctctctccacccaagttctgcccaccagggcacactgcttccctctgccacctcctcttcccacgagccctggtacaccctagattctcagggctgtggctccttgctttacaaatgagtaagttggtggcagggaaggaagtgggctgggccatgaccaagagtcactatgattcacggggaaaaccctgccctcccgattcaactctgtgtgcaaaaaggttttgtgc

SEQ ID NO: 19458 - DNA, 844 bp, Homo sapiens
  chr19:46144663-46145507
  hyper
cgtccagcttctaaaaactctggccacgcccctcaatattgactccgccctcccagaccttccactgttaccgtgccacctcaagattggtccctccaaggctctggcaccgtccccgcttttgaactagctggccccactctaggttacgacctcgtggcctggggcatgactacatttctcgaccatttcctccctatctctttctgcggcttgacgccgccccagtccttacccttcctttttggcgctacagttgctgctggaggatgtggtccggctgcgggggtcctcacggcgcaccgaggcgaggcgctctggtgacaagtagcggcggacactgctaaaagagagcacacaggtgggggcagagccttctaggccagcaggcgagtgccgtgagcaagcgagattctccctgcaccctctgctgctggagctcaggcaaacaaaccacctctgtctcccacgaggtcttggaagaggctgggggtcccggccttgtgccttacctgcgcccggaggtcgcctccttcttgggagaggatggggacgtggcatagccacccacgcgccgcgggggtcccgagccattaaggggcgtcctggtgggaaggcctttcaagagctgacacactggagggatggggttaggggacagaagagggtgagtataaggaccaggccccggtcctccccatcccacccctccagtctaacggggatacccgaggcagtggtgcctaagcgcggaggcgcccggcccttgggggtgccccgcgcgcgtagcgccgctccctgttcttcgcatgcccgcaggcgacgcagagcatccgccagcgcc

SEQ ID NO: 19459 - DNA, 73 bp, Homo sapiens
  chr19:46145557-46145630
  hyper
cgccgacacgcggtcgtccacttccataccgctcgtgcccgacaaattgtcatctggaagacgggggagtgcc

SEQ ID NO: 19460 - DNA, 109 bp, Homo sapiens
  chr19:4679454-4679563
  hypo
cgccttaggaaggagcctgctagggccttcagcactcagcggtttcttctacgcaatttctcagtttcaaataaagcccgtctgcggggcaatttcggtaagggttcct

SEQ ID NO: 19461 - DNA, 70 bp, Homo sapiens; identical to SEQ ID NO: 8259
  chr19:46907118-46907188
  hyper

SEQ ID NO: 19462 - DNA, 250 bp, Homo sapiens; identical to SEQ ID NO: 8260
  chr19:46907822-46908072
  hyper

SEQ ID NO: 19463 - DNA, 68 bp, Homo sapiens
  chr19:47040909-47040977
  hyper
cgtgtgttgatgactgcgtgtggagcgcccctgctggacaatcacagaacagcacgactgccctgacc

SEQ ID NO: 19464 - DNA, 586 bp, Homo sapiens
  chr19:47137785-47138371
  hyper
cgggccgacacagccccggacagaccgcaggcccagaacccccgccctattccccaccccgacccagcaccttcatgcggtcgatgttcacctccagcttcagctgttccaccgtcttgcgggcctcggcaatcttggccatgttgttggacatggttgcggcggggaaggggttaaaagacgcgcgggagtgggggctgtgggggtaggttaggatacgtctgggtcccgaggtgggggcgagagggcgggccccggtaacaggtgcgagggtggaagggcgcgtgaatggggtggccaggggctggtggagggagggacagatgaaggggacaggaacaagaggagcgatggaggggtgcacggatggaggtagctaaggcaggtggggagagagcagggaggggcgagggagggaaggaggggcgcacagatgggaggctgagacagaaggacagggccacaggtgctggatcagaatccaggtgtcctcacccccgggggcagagcgagagccaggaggggggcccctcccccaggccaattagcagtggctccagggagaactgggaattaagatcgcggc

SEQ ID NO: 19465 - DNA, 148 bp, Homo sapiens
  chr19:47922898-47923046
  hyper
cggtgggagtcggggaggggcaggctgtggggggaggagaggaagagaccgcggccctggtgcccccaggcccctcctctcctacccagggctggggttcctgctccgggtttctcagtctccctctttcccagtctctctctccttg

SEQ ID NO: 19466 - DNA, 261 bp, Homo sapiens
  chr19:47923084-47923345
  hyper
ctggctctctgttctccgagccccctggacacaccacggaccccctccctggccatctccaggggtcacgtgggaatctggagtctggtcccaccgtaggctctcccctctctgaggctcgattccccctctgcaggatgggcagtgcgctgggggcggcgggggtgggctgtggataacggagaaacagttaagctagagggtgccaggactcagggtcttggctgagtctgggggtccccatgccggcgggctctgccc

SEQ ID NO: 19467 - DNA, 94 bp, Homo sapiens; identical to SEQ ID NO: 8270
  chr19:49127280-49127374
  hyper

SEQ ID NO: 19468 - DNA, 485 bp, Homo sapiens
  chr19:49217005-49217490
  hyper
cgatgccccggttaggaagcaactgcggatggagaaatttggcgtgaactcgggactgcgacctggacctgactggagaaccctagccggattcaacccacaccctcttacctgcgccctccggatcgcttcctgcagctcctcctccagagtcagagccgctgagcccggccctgaggaaggggtcagggctggagctgcagcaggagccggagtgggagttggagccggagccgtccccggggtatccgcggcacgtggaagaggtggcctgtgagatgctgcgctgggcttgacctagagcagccaagagggcgagcgcccataagccatgcccacagggcgcaaccccacccactcgcaacgtgtggctccaccccttgatcctctcgcgacccctcgctcatcaacccctttggcctcgccccctattctttcattggctcctcttctctaaagatccgccccctgttagtctgaaccac

SEQ ID NO: 19469 - DNA, 43 bp, Homo sapiens
  chr19:49217526-49217569
  hyper
cgcccccacacttcattggctagttttttcgacaccccgcccc

SEQ ID NO: 19470 - DNA, 619 bp, Homo sapiens; identical to SEQ ID NO: 14807
  chr19:49255778-49256397
  hyper

SEQ ID NO: 19471 - DNA, 181 bp, Homo sapiens
  chr19:50353790-50353971
  binary
cgaatgagcgaatccacggaaggccggggagcgacgtgagtggcgagaagcttggagtcgccagggacggcgggcggagcctgggcgccggggctaatgggcggagcctccagggacagctggccccgcccaggccgcgcggggcccgctgggagttggagtcccttgcccacctcgccac

SEQ ID NO: 19472 - DNA, 330 bp, Homo sapiens
  chr19:50828897-50829227
  binary
cgcagagcgcatgcctagttccccgccccctccgagccgggcgcgcggcgctagctgcggcaccgcagtgggggcgggccagccgggccggggggcggggcgcacggcggccagtaccgcggacagctcccccgccgcagtgcgcagccgcagcggctaggggccgtcttaaccccttccgggccggagcctattcaacgcgcagccgcagtgttgctgctttccggcgggaggccaagggccaagagtctaattaactccttccctcccagggcacagggaaaggtgggcacccgccgcagtgcgcagctgcagaggctggacggcgtc

SEQ ID NO: 19473 - DNA, 89 bp, Homo sapiens; identical to SEQ ID NO: 18631
  chr19:50836203-50836292
  hyper

SEQ ID NO: 19474 - DNA, 589 bp, Homo sapiens; identical to SEQ ID NO: 18632
  chr19:50836451-50837040
  hyper

SEQ ID NO: 19475 - DNA, 88 bp, Homo sapiens
  chr19:50837389-50837477
  hyper
caggccgcaggaaccaccatttccctgggagtccgtgctctctccgcccccaaccccggggacaagaaatgtttctgtggccccttcc

SEQ ID NO: 19476 - DNA, 88 bp, Homo sapiens; identical to SEQ ID NO: 9402
  chr19:51925272-51925360
  hyper

SEQ ID NO: 19477 - DNA, 407 bp, Homo sapiens
  chr19:5686667-5687074
  hyper
cgtgggcggggtggagtctcattgcgtctgggggaagagctctgaacggggcctcgttgaatgggaaccaaaccttgctagatccagggtgtaaggccaaggctgggtgtctttgatcgtagtgggagttacctggggcggagctcgctggaccagcgctctgggtggagctaagctcgggggcggggtttgatcgtttccttggggaggggcctccggggctgaccggcgtttctgggccaggcgggctggactacctcgtgctgaaccacatcggcggcgccccggccggcacgcgagcccgcagcccccaggcaactcgctggctcatgcaggtgctccgctcctccgcggccccggcccgcccctctatctcagggaccggtggtccgttcccttcgcggtcc

SEQ ID NO: 19478 - DNA, 291 bp, Homo sapiens
  chr19:5961947-5962238
  hyper
cgcgtggttccccttgttttccatggccagtgcttactcctgcacagacaccatctccttcaggaagctcccactgtgagaggcgtgcctgccctgctgcactccctcccgagcaggccttatatcctgccacggggcacgcggagaccacggccacagcagctgaaacagcctatcacccagcgtacaccgcatcaacaccctgcaatgagtgtttgaactaggccctctctctgtcattcatctacacaacaccagctgctacgtactcacaaatatttactaagccct

SEQ ID NO: 19479 - DNA, 45 bp, Homo sapiens
  chr19:5962455-5962500
  hyper
tctcagtgccaaacacagagcctcacacttaacaggcactcaacc

SEQ ID NO: 19480 - DNA, 307 bp, Homo sapiens
  chr19:6530758-6531065
  hyper
cgggaaagagcggcagagagggagaaccagggcgatggagagacagcagggagaaaggaacctggagccgagcttggaaggccggaaacggaaaggagagcgaaaagcggagagagatccgagtggagaaaattccgcagagtcacggggacgaggggaaaggctctgggctgggaaggggcgtggccgcgggcggaggggcgtggccgcgggcggaggggcgtggcctccttttgtagccaagcagctataaaaagcggcgcgctgtgtcttcccgcagtctctcgtcatggaatacgcctctgac

SEQ ID NO: 19481 - DNA, 97 bp, Homo sapiens
  chr19:6531295-6531392
  hyper
cctcttggacctgcggcaggtgagacgtgccccgaccctcggtagctggtctcgcgggagacccctaccgcccctctgggactcccttctccctccc

SEQ ID NO: 19482 - DNA, 165 bp, Homo sapiens; identical to SEQ ID NO: 13754
  chr19:660994-661159
  hyper

SEQ ID NO: 19483 - DNA, 156 bp, Homo sapiens; identical to SEQ ID NO: 13755
  chr19:661431-661587
  hyper

SEQ ID NO: 19484 - DNA, 296 bp, Homo sapiens; identical to SEQ ID NO: 13756
  chr19:661720-662016
  hyper

SEQ ID NO: 19485 - DNA, 352 bp, Homo sapiens; identical to SEQ ID NO: 18640
  chr19:6744359-6744711
  hypo

SEQ ID NO: 19486 - DNA, 150 bp, Homo sapiens; identical to SEQ ID NO: 14812
  chr19:6768009-6768159
  hyper

SEQ ID NO: 19487 - DNA, 155 bp, Homo sapiens
  chr19:7543311-7543466
  hypo
ttagctccacaacgctggccccggacatacagtctgggacaggtgctgcatctcggataaacggcctgccctctccctgcccccacagtcccacaccctcctggctgtgcctcatgctcccggggactcatctctaacacggccccgtcccaccc

SEQ ID NO: 19488 - DNA, 112 bp, Homo sapiens
  chr19:7701796-7701908
  hyper
cgtgtcgtcgaggtgtgcacctccagcgacttcgtgctcggcagcgcggacgcacctgcccgtcctccccgccagggactcaacttcctgggcctgggcgagaaccgacggc

SEQ ID NO: 19489 - DNA, 117 bp, Homo sapiens
  chr19:7992986-7993103
  hypo
cgagaatggaactggagacccagtgccttggcctgctggatggggtgggccagctggctgtaagtctgcaatgagaggccgacacgcctgcgtgatgccacccagggtgggcaccac

SEQ ID NO: 19490 - DNA, 122 bp, Homo sapiens
  chr19:7997652-7997774
  hypo
cgggagttcggggggaaggccggggaccccgccccaccaccagcctgcgaggtccagggatgactcactcacccagcaagtcggtgaccttgtccgtaagggcccgggatgcccggatgaac

SEQ ID NO: 19491 - DNA, 58 bp, Homo sapiens
  chr2:102972750-102972808
  hyper
cggagatcgctgcttctcacctactttctgaacttggcctccgcagtcgcgacctggc

SEQ ID NO: 19492 - DNA, 699 bp, Homo sapiens
  chr2:111877567-111878266
  hyper
cgagggagctcctacgaggttatctgcgagcccagcaaatcttgggggtcctagccaaatgcagtgcgcaacgttctctctcacttggaggccgccattcacctcgtttttttttttcctaaaaggatttttttttctgagtgcttttttcatttccctattttacctgctttgcacatgcctcccgccctcacccgggaggcggcgaagacgcccactgggaccgcgcctggccgttttctgggcgcgtcctgcccccacggcctctgtctcttagggcgactgggcgcggaagaaaagctggagagcccctgcggggtggcaggaggagggtgcctgagtcccgcgagaggcccgggcgaggaagatgcgcagcctgctgatccgcgtcccgcccggcgccagggaccctcagagggaggagagctcaaagacctcgccccgcgccttcgcgaggaccaacccagtccccgcgcctgccccagagcggcttagaaactcagggcacagtgagagcgcagggcgcctcccgaggcttcacaccgccggccgggccagcggaggctgtgaccggagcgccccctctgtgccgcgcacgccgcggccgccgccgggttggggtaggtgagcgggaggctagggtacacttcggggtgggggatgggcgcgcacatggccgccagcaggcagagttactcc

SEQ ID NO: 19493 - DNA, 154 bp, Homo sapiens
  chr2:121834588-121834742
  hyper
cgctgagacggagtgaggggtgcaatagcgtaacggggagcaccacctgtaagaggagagggaagaagcaaggtgggcggggccggccatcctgatgcatcctccctgcacaacctgcacctgccagcagagggcgccggagcaaagcgcgccc

SEQ ID NO: 19494 - DNA, 550 bp, Homo sapiens
  chr2:128173501-128174051
  hyper
cggcttcctgggtggacctgaccgcgttcgggtgcacgtggggcgactcacacctgacaagtaaagcgggtgaggccgcgcctgtgaagggcgcctggctcctccgcaggagcggtgcggcgcggcgcccccggctggaaccaggtgtaactgcagagaccctgggatcgcaggaacggctggcggcaggactgtccctacctcgagaaggtgacggggtttcctgcgctgccagccgatgaggcggccgtgacgcagcccgccgtgcagagtccccgtcggccgacaggcgtgcagagctctgcagaggacccttccgccctctgggcagcctgccaagccgtggcacccccaacccccagcactgggcacttgggagcattgcagccgccctggctcgtaccggtgccggtgctttgggcacctgggctggtttggacatgggtgccccgggcagagtccatttatgcaggtcagaatcagtgtgtggagcctgcatagacttgccctggagcggctgcctgtgctggggtggggaggagtagagggc

SEQ ID NO: 19495 - DNA, 54 bp, Homo sapiens
  chr2:128421756-128421810
  hyper
cgacgccggggcagagcccacggcgtcggagggccccggtcgggtttccgaggg

SEQ ID NO: 19496 - DNA, 71 bp, Homo sapiens; identical to SEQ ID NO: 10489
  chr2:12856411-12856482
  hyper

SEQ ID NO: 19497 - DNA, 849 bp, Homo sapiens; identical to SEQ ID NO: 10490
  chr2:12856549-12857398
  hyper

SEQ ID NO: 19498 - DNA, 138 bp, Homo sapiens; identical to SEQ ID NO: 14832
  chr2:166649931-166650069
  hyper

SEQ ID NO: 19499 - DNA, 38 bp, Homo sapiens; identical to SEQ ID NO: 14833
  chr2:166650106-166650144
  binary

SEQ ID NO: 19500 - DNA, 313 bp, Homo sapiens
  chr2:166650508-166650821
  binary
cctgccgccggcttacctggcgggtgggcagggcagggtggcgggaagcggcggccgggcaggcgctggacgtgggctaggcgccaggtgcaggtggcggcggctgcgactccggttgctgtcgccacagttgcggctcagtagagctcctcctccgccgccgcctcctgccttcccgctgggcctcccgcgttgcctggagaggcagaaccgaggctcggcttccacttggagtctcccaggtgagctccagcctgcgacgtcggcaggggcgaggccccacttccgcgcctgcgcgccagcctcccgcccc

SEQ ID NO: 19501 - DNA, 359 bp, Homo sapiens
  chr2:16790115-16790474
  hyper
cgactcagaccaccacgtcagtgaagaggtgaagctgggtcctgaactgctgctgcgatgggatcattcacatggctattaatcatacaagagcccatttatgacaaacgcaggtcactccctttgcatgacaaggcacatgggtccacagagccccattatccaaaaaaaaacacagagcattgtgggcgatgcaggcgaaggcgagtgcacacacacaagcggacattgtaaggctgtttgcacaaccccgccgtgctcctcgcggatttcctgccaaggagacatttagatctcacagaggcggctgcagacatttgctcattcaacatggcttcaggcagtggctgcggaaaccc

SEQ ID NO: 19502 - DNA, 362 bp, Homo sapiens; identical to SEQ ID NO: 13789
  chr2:171567970-171568332
  hyper

SEQ ID NO: 19503 - DNA, 273 bp, Homo sapiens; identical to SEQ ID NO: 13790
  chr2:171568711-171568984
  hyper

SEQ ID NO: 19504 - DNA, 170 bp, Homo sapiens; identical to SEQ ID NO: 14836
  chr2:172951779-172951949
  hyper

SEQ ID NO: 19505 - DNA, 113 bp, Homo sapiens
  chr2:172955255-172955368
  hyper
cgcttgctcagattagtttcctccagaggaacacgggcttcaagggactagaaccagattggttcccttctcgtggccctgcgtcccagcccagccccaacccccaccccaga

SEQ ID NO: 19506 - DNA, 57 bp, Homo sapiens
  chr2:172955887-172955944
  hyper
tcctaggttcaatttcccctaggagatgtgactttgctagtgcgaagatttctgtcc

SEQ ID NO: 19507 - DNA, 651 bp, Homo sapiens
  chr2:175197265-175197916
  hyper
atggttggcttgaaaatgtcactagtgctaagtggcttttcggattgtcttatttattactttgtcaggtttccttaaggagagggtgtgttgggggtgggggaggaggtggactggggaaacctctgcgtttctcctcctcggctgcacagggtgagtaggaaacgcctcgctgccacttaacaatccctctattagtaaatctacgcggagactctatgggaagccgagaaccagtgtcttcttccagggcagaagtcacctgttgggaacggcccccgggtccccctgctgggctttccggctcttctaggcggcctgatttctcctcagccctccacccagcgtccctcagggacttttcacacctccccacccccatttccactacagtctcccagggcacagcacttcattgacagccacacgagccttctcgttctcttctcctctgttccttctctttctcttctcctctgttccttctctttctctgtcataatttccttggtgctttcgccaccttaaacaaaaaagagaaaaaaataaaataaaaaaaacccattctgagccaaagtattttaagatgaatccaagaaagcgacccacatagccctccccacccacggagtgcgccaagacgcacccagg

SEQ ID NO: 19508 - DNA, 455 bp, Homo sapiens; identical to SEQ ID NO: 13796
  chr2:175198064-175198519
  hyper

SEQ ID NO: 19509 - DNA, 351 bp, Homo sapiens; identical to SEQ ID NO: 7184
  chr2:175199018-175199369
  hyper

SEQ ID NO: 19510 - DNA, 76 bp, Homo sapiens; identical to SEQ ID NO: 12582
  chr2:175204013-175204089
  hyper

SEQ ID NO: 19511 - DNA, 543 bp, Homo sapiens
  chr2:176937692-176938235
  hyper
cgggtcaccgccgccctgaatcagctcctgccaaagggctcattaaatccccctccagagcccccatcccaggactaagtaagtcatttgctggtctggcttggatgaaccaaggatcgcaggaggctgcctgtgtgcctacccgtccccccgcccgagtcccctagtgggcgaacgctgggccgggcacggtatctccctggcgagcacagcctgaacccaaggctggttttgaggtggcagttaattactagcccggaaagccgaagccccggagccgatgtctgggctgacagggttccctcctcagcctcggggcagtcagacgattcctaacaacttctcccaaggaggtagatccctgtttatcaaccagcacaccccgtcggcccttttctttggtaaacactctttaaacaaacagcccatccgccctgttattgccaaagctgctcagagctttaataaaagcccagggaagatcagaacccgcgtccaaggctgctgcttaatccaatgaaggcaatttccgaggataattgc

SEQ ID NO: 19512 - DNA, 85 bp, Homo sapiens; identical to SEQ ID NO: 6098
  chr2:176975945-176976030
  hyper

SEQ ID NO: 19513 - DNA, 177 bp, Homo sapiens
  chr2:176983836-176984013
  hyper
aagagcgttaacctcaccgacaggcaggtcaagatttggtttcaaaaccgccgaatgaaactcaagaagatgagccgagagaaccggatccgagaactgaccgccaacctcacgttttcttaggtctgaggccggtctgaggccggtcagaggccaggattggagagggggcaccgc

SEQ ID NO: 19514 - DNA, 486 bp, Homo sapiens
  chr2:179343487-179343973
  hyper
cgctaaacccgcgtattttacagcaggtttcctcagggttcggtgacaacattcgcattttctaaaatgaaactggcataagacgaaataaacagcctgggatgtcgtagagtcagggaatatggttgtcatttctggaagcaaaaggcttctaagacccctagggaacgagcagatagatactggggggagggagaggcatgctggaaaaggagcgtaaaaaataggctggcggtggctttctgggtgcttcggaggtgtccttgaagcgcattctcaggtcggaatcttgcattcagaggttccaggctgagtcgcacaacctgaaggccagcccgatgcaacgaaactgcggtaccgcaactcctctgcctggctgcaggcgtttccgagagccgacctccacaattcagcatcctccgctggcttgcatttcttttccccgccactcggggccgcccttgattcgagggcctctggtagtgc

SEQ ID NO: 19515 - DNA, 34 bp, Homo sapiens; identical to SEQ ID NO: 17690
  chr2:180725139-180725173
  hyper

SEQ ID NO: 19516 - DNA, 72 bp, Homo sapiens; identical to SEQ ID NO: 6100
  chr2:182818959-182819031
  hyper

SEQ ID NO: 19517 - DNA, 297 bp, Homo sapiens; identical to SEQ ID NO: 13807
  chr2:19551656-19551953
  hyper

SEQ ID NO: 19518 - DNA, 142 bp, Homo sapiens
  chr2:19563170-19563312
  hyper
cgtccttgctctcagatggatgagggcttttgtttgtttgtttgtttgtttttaaataatccgaaattcctagcaactatctgccgccgttcgcttctggtcctgggaagacgatgagcaaagatctactgggaccccatcc

SEQ ID NO: 19519 - DNA, 67 bp, Homo sapiens
  chr2:19563433-19563500
  hyper
ggctttctgaagaagcgcgggaagaagagagagagtctgtttccgtgaatcgatttccctgaaacac

SEQ ID NO: 19520 - DNA, 897 bp, Homo sapiens; identical to SEQ ID NO: 14845
  chr2:200320451-200321348
  binary

SEQ ID NO: 19521 - DNA, 431 bp, Homo sapiens
  chr2:20425309-20425740
  hyper
cggggacccgggggcgatggggccttcaaccgacgggcaaacacacacagacacaccccggctgtcctccagctgcgatgcggctcgctgcgccccgccggcccagattctcccgtacgctcgcgttcttcctgcactccacaaagtgctggagacttggggccttagtttaaacagctgcacccgcacggaagggctgcaagaaaaagggggacgggggcggagttcgcagcgtttttctgtggaagacaacgccctctctcttcatctgagctaaaaggaaaaataagtaacttctttgttccccggtgacctcgggcacgcggatctgaggagcaccgtgcagttgctgctccttcgagatcccctgcgaggccctgggcctcagttcaaaaagctgtggaaggcctgcgggtgtaggggaaacggcc

SEQ ID NO: 19522 - DNA, 173 bp, Homo sapiens; identical to SEQ ID NO: 13812
  chr2:206750391-206750564
  hyper

SEQ ID NO: 19523 - DNA, 229 bp, Homo sapiens
  chr2:206948646-206948875
  hyper
cgcccacactggggactggcagtggggggtggcagggtctattaacatttcaatgtcaacactcaagaacaacaaggaggtaagcatagccacgggaaacatcctgtccctgaaaagcagaaaatcgagatttggaaatttatgtttatcactttttttttttttaacgttcagagctcagggcaccaaaatatagctaaaattgaatccatttaaacagaaaacatac

SEQ ID NO: 19524 - DNA, 325 bp, Homo sapiens; identical to SEQ ID NO: 5797
  chr2:219232221-219232546
  binary

SEQ ID NO: 19525 - DNA, 32 bp, Homo sapiens; identical to SEQ ID NO: 5798
  chr2:219232859-219232891
  binary

SEQ ID NO: 19526 - DNA, 113 bp, Homo sapiens
  chr2:220316370-220316483
  hypo
cgctgcgcagcgagggccgcctcctcctccgggctgagggtgagcggcacaccctgctgctcagggaggccagggcagcagatgccgggagctatatggccaccgccaccaac

SEQ ID NO: 19527 - DNA, 394 bp, Homo sapiens; identical to SEQ ID NO: 8319
  chr2:220348591-220348985
  hyper

SEQ ID NO: 19528 - DNA, 183 bp, Homo sapiens
  chr2:220361644-220361827
  hyper
ggacccattcatccgctggagtaaggacggcaaggagctacgtgacggtcccaagtaccgctacgtcttcgaggaccctgacgtggtggcactggtggtgcgcgacggcgagctggcagacctgggccagtacagcatcaacgtcaccaaccccttcggccagtgctccgactcggcgcgcat

SEQ ID NO: 19529 - DNA, 52 bp, Homo sapiens
  chr2:220362349-220362401
  hyper
ctgtatttagtgccgggtattagccggtgaggtgatgccctgcctcatctcc

SEQ ID NO: 19530 - DNA, 110 bp, Homo sapiens
  chr2:220362444-220362554
  hyper
cgacgaagattcaaaagggacccgacaacactaaggcgcgcaaaggcaccaccgtgacgctgactgcggagatcctgggagagcctgcgcccgacgtaggctggaccaag

SEQ ID NO: 19531 - DNA, 249 bp, Homo sapiens
  chr2:220377743-220377992
  hyper
cggggccaggcctgacgcagggggcggggtggccgttgggcagcgggtggacctcgggctctaatccccagcagctgccgtttccctcagatcgattcctttctcactttttttctcagctgctggttctgcggcttggatcgatggagccacctccccccgcccgtccacgcttcctctccctgctgctcattagcgccccgattaatcagcccccctttcctcccggggacaagggcttcctccccc

SEQ ID NO: 19532 - DNA, 99 bp, Homo sapiens
  chr2:220378995-220379094
  binary
cgcccgtgctgccggtgaaacgctgttgacatgtcctgaattattaagcgtggggagggctccggagcacatgctgagcggagcggctggggctgcgcg

SEQ ID NO: 19533 - DNA, 285 bp, Homo sapiens; identical to SEQ ID NO: 14862
  chr2:223171556-223171841
  hyper

SEQ ID NO: 19534 - DNA, 913 bp, Homo sapiens
  chr2:223289375-223290288
  hyper
cgccgctgcgggctcttccccgctccggatgaaggcccccgggagaacggcgcggaccccacggagcgcgcggcgcgggtccccggggtcgagcatctccccgcagccaacggcaagggcggcgaggctccggccaacgggctgcgcagagccgcggcgccggaggtaaccatgggcaggtgttcgccgggtacggggagggggcggctgcggacgtgcgggtccctgcgactccgccacgcggggccggccgggccgagagggcgccgtccccggcagtgacccggctcccgccgctgcgagcggacggggaggcctggccttccagtaaccaggatgccaccctccaacgctgccaggggcaaccgggtctattgagatatccccagacgctttcaatgcagtccatttagagacttcccactttcaaaagtagttaaattcacgtagatgccagcaaatatgtaagagttacgtaatggaacggaggagcggggatgtccttggcacttccccggggagacgttcttagactcccccccacccccgtattcttgcatttccgcccatcccccttccctgatgcgcacaaatgcgggtgcagccgggctcagcgcgctcctcaccgcgctgcaccgccagctctgggcacagaacttggggctcacacagctcctagagagatttacaacctccctgcactacccccggcgatgatgtcttaacagcaactctcgcttgccctcccccagagtctgggggtccctcctgcctggtgggtcttttatggaccgacaccagtgacttctaacagatgcttctgggagggaagctcgctacgctcccgctaggtgttcaaagcgtggttatacaacccactgcggcttggggggaaccagcgtgcgtcgtcgtc

SEQ ID NO: 19535 - DNA, 163 bp, Homo sapiens; identical to SEQ ID NO: 14865
  chr2:224702626-224702789
  hyper

SEQ ID NO: 19536 - DNA, 165 bp, Homo sapiens; identical to SEQ ID NO: 17707
  chr2:235404971-235405136
  hyper

SEQ ID NO: 19537 - DNA, 314 bp, Homo sapiens
  chr2:239949585-239949899
  hypo
cgaggaccggcacgcctatggaggggacgccataactccaggccaccaagcccttcccctcactgccccagaagagttttaatctttaggacaacgcaatcagaaccagatgttcccccaaacaggggccgggccaaggcgcgccctacacacagcgccgctgagccaacagagttgcgtcttttgtctggcgtggtggcccacgctgcgcgcacagccagggacccagctgccgacaccttgtttccccccaggcatgttgaccacaaggcacagagccacgctcgggtgggcccaggcgcagcatggggctc

SEQ ID NO: 19538 - DNA, 83 bp, Homo sapiens
  chr2:240270283-240270366
  hypo
cgtgggctttccgtccacactcccggtttcatgccagggactctggcttcaaggcagaggctctgtgtcctgacaaacgcatc

SEQ ID NO: 19539 - DNA, 516 bp, Homo sapiens
  chr2:240270511-240271027
  hypo
aaatcgttctttagagcaataaaatcccaacagttaagcagctttgacgtcagagaaccagggcctggctctggcaaagttcagcgggaacagcaataaaaccgtaacacaaaactcacccagcagcagaggactttcacagaacacaggagaggaaagccacacacactgcactagaagggcacttcatcagcagggcaaagccaagtcacatgacaaatgtgagagggggcccatgggcggctggactcccccagcccggcctgcccagggagtgagggcggcacgggcacccacaccaggccacacaggagcagggcccccatgccagatgggcaggcaagggtgagccaggcaggcaagagtgagccgggtgggcagggcgaaggacagggccagctagcagaggacggcacgagagacacacggagggaggggaggtgcagccaggtaggccccgaacaccacgttgccaggactcggctcctcggctcaaggaaaagggacagcggttcc

SEQ ID NO: 19540 - DNA, 296 bp, Homo sapiens
  chr2:240906462-240906758
  hypo
cgtcataaataacaccgatgtgccccctctagatttatgtgcttgagataaatttctagaaatggaactgcttgcttaaggaaaaacaataaacagagcaatagatgctgacgcagccatcggaatgggttgaatttaataacgccaagatgctgctccagatcattatgctgctgcttacacttcggggctgattcagagccttggtttctcgttatgaatttataccaggctcttggccttttactgcctcatgcatgggtcggcaaactgtagcccacagatcaaatctcgcc

SEQ ID NO: 19541 - DNA, 213 bp, Homo sapiens
  chr2:240930596-240930809
  hypo
cgggatccatgaatcatgcttccacagacagccacagagctgcgaacctgcggcaagctgaagatgagtggacggtaggtatagcgtcaggagcgtcctagtaaaaaccgcgtcgctcatacacggttagtgatccaataatgcaaatgcccctccaagaaactgctgccaggataacaatgatcgtttgctttcctaagtgtatttatgtgc

SEQ ID NO: 19542 - DNA, 112 bp, Homo sapiens
  chr2:241393469-241393581
  binary
gaaatggtggcgggggggcttcgggcagacggcaggggtgtggggaggggagggaagcacgatggggtgagtctgggggccgtggatgccgttgacgaggagctgagatgcc

SEQ ID NO: 19543 - DNA, 206 bp, Homo sapiens
  chr2:27303557-27303763
  hypo
cgtacagggaggaataaagaggcctccttctgcctctgccaggtaccgccgcttcctccgccctcgctaccgtgtggcctacaagacagtgaccgacatggagtggaggtgctgtcagggttatgggggcgatgactgtgctgagagtcccgctccagcgctggggcctgcgtcttccacaccacggcccctggcccagcctgccc

SEQ ID NO: 19544 - DNA, 89 bp, Homo sapiens; identical to SEQ ID NO: 8338
  chr2:27473102-27473191
  hyper

SEQ ID NO: 19545 - DNA, 134 bp, Homo sapiens
  chr2:38342446-38342580
  hyper
cggttaaaaatcactactattcacttcttaccatttgatctgttgacagtttcagccatcagtcactgccggctcccacttcatttagttaccatgtccctcactaacacaagatcgccgtctaggggccaatc

SEQ ID NO: 19546 - DNA, 104 bp, Homo sapiens
  chr2:45157711-45157815
  hyper
agtcttgtggccctggcagaggtgacaagggcatttgggaaagacagagaaaaataaattcgctccagtgactgtacacggggcatttgaggctgtgagaaaac

SEQ ID NO: 19547 - DNA, 48 bp, Homo sapiens
  chr2:45164561-45164609
  hyper
cggcggggctcattaggcagagcagggtgccgagaggtgcgcgtcgcc

SEQ ID NO: 19548 - DNA, 315 bp, Homo sapiens
  chr2:45165156-45165471
  hyper
gagcaaggccaagtgggtgcagctgccccaaccctccggatcctcgtctcccggaggcctgcagacccgttggctttccctgtaacccaaaacaaggagagagtgggaggtctctcgggcgttctccagatgtggttgagactttcccagtgctggggtggcgggtgacatttgtaaataaatgccagttggtccgggtacaaggagaacactatttaaaccccaaagacatcttttctccctgccccacctgaaggcgatattttagatcgccggggccaggattgaagcggggatgatggcagcaaatttgtt

SEQ ID NO: 19549 - DNA, 144 bp, Homo sapiens
  chr2:46689161-46689305
  hyper
cgagcagtgaaaatcaaaaattaggggagagaaggttcaattaagtgtcgtcaaatcgaaacttccaccacttccttcatccctgagtcagcaatgttgtcagtaggagactggtcatgtgtaagcttgcagggtgccttaaac

SEQ ID NO: 19550 - DNA, 462 bp, Homo sapiens; identical to SEQ ID NO: 6110
  chr2:47499350-47499812
  hyper

SEQ ID NO: 19551 - DNA, 1165 bp, Homo sapiens; identical to SEQ ID NO: 14883
  chr2:54784958-54786123
  hyper

SEQ ID NO: 19552 - DNA, 61 bp, Homo sapiens; identical to SEQ ID NO: 8348
  chr2:56149749-56149810
  hyper

SEQ ID NO: 19553 - DNA, 90 bp, Homo sapiens; identical to SEQ ID NO: 8349
  chr2:56150447-56150537
  hyper

SEQ ID NO: 19554 - DNA, 362 bp, Homo sapiens
  chr2:61109154-61109516
  hyper
cgtgcagaatccaagccacgctctgtaattcgatcctgttgtcatagcaggaaccttagaaattcccaacgacttgattttaggattagggaagtcataagcgaaccaaaggaggacgaagagttctcattaaaaatgtatatgtattgaagatggtggttttatgttttagaacaggaatgaggaaccttcagacctcgggcaagctctctccccctttttagtttaatttcatcaaatgcaaagaggtgatcccccttgtactgacagttgtacaaaatgtgtcacggctttaaaaatcatccgtggtattttaacacgaattagaaaatccgtggtattttaagtgttaatgttgcttc

SEQ ID NO: 19555 - DNA, 109 bp, Homo sapiens
  chr2:61110127-61110236
  hyper
cgggagagccggggcggggggataaatcaagtagcctggggtcgagttggtcttttaccaggattttggcaaggtgagtgggggacactttccagacagaggaagcagc

SEQ ID NO: 19556 - DNA, 204 bp, Homo sapiens; identical to SEQ ID NO: 12629
  chr2:63278430-63278634
  hyper

SEQ ID NO: 19557 - DNA, 282 bp, Homo sapiens; identical to SEQ ID NO: 12630
  chr2:63279141-63279423
  hyper

SEQ ID NO: 19558 - DNA, 92 bp, Homo sapiens; identical to SEQ ID NO: 9525
  chr2:64538788-64538880
  hypo

SEQ ID NO: 19559 - DNA, 81 bp, Homo sapiens
  chr2:66654136-66654217
  hyper
cgacctgccagtcaatgaagttatcctccgggagctgggaagaaggggcgcctcgcggggctgtgggctcggttgcgaacc

SEQ ID NO: 19560 - DNA, 228 bp, Homo sapiens
  chr2:74211299-74211527
  binary
cgcgacgcgcccgttccccctcctctgggaggcagggcgggggtatcggattagtctttgttttcgacgcgaaagaatcgagcgcggcgcgggggaggctggtgatggcagggccgtggggtccacctggacagggcattcggccgtgacccctgcgagggtgcccttagcctctgcccccgagcaaccccttcttgccggccaggctgactcggtacgcaaacgcgc

SEQ ID NO: 19561 - DNA, 413 bp, Homo sapiens; identical to SEQ ID NO: 8352
  chr2:74729488-74729901
  hyper

SEQ ID NO: 19562 - DNA, 239 bp, Homo sapiens; identical to SEQ ID NO: 8353
  chr2:74729933-74730172
  hyper

SEQ ID NO: 19563 - DNA, 79 bp, Homo sapiens; identical to SEQ ID NO: 8354
  chr2:74730644-74730723
  hyper

SEQ ID NO: 19564 - DNA, 73 bp, Homo sapiens; identical to SEQ ID NO: 14893
  chr2:87034584-87034657
  hyper

SEQ ID NO: 19565 - DNA, 622 bp, Homo sapiens; identical to SEQ ID NO: 14894
  chr2:87034689-87035311
  hyper

SEQ ID NO: 19566 - DNA, 895 bp, Homo sapiens; identical to SEQ ID NO: 14895
  chr2:88315911-88316806
  hyper

SEQ ID NO: 19567 - DNA, 187 bp, Homo sapiens
  chr2:97073215-97073402
  hyper
cgttctcaccaaatacaggcacttcctctgagaggacggcagagggcgcagatttagcttctgtcctgcgaatgaagcacgcagtacaaggttccaaactgcaagtcaacagcaagcacgaagcagccacactggaaatggggtgcctccatcgcctggggctgtgggctgccatcctctgccaagc

SEQ ID NO: 19568 - DNA, 163 bp, Homo sapiens; identical to SEQ ID NO: 8364
  chr2:99097200-99097363
  hypo

SEQ ID NO: 19569 - DNA, 104 bp, Homo sapiens
  chr2:99346429-99346533
  hyper
cgttttcgggtttacacgtgtgggttaaagaaatctatgtcaagataacctgttcatcaaactgttttttaaacattcagaaaaagaaacataaaccacaaaac

SEQ ID NO: 19570 - DNA, 244 bp, Homo sapiens
  chr2:99346574-99346818
  hyper
cgactgtcattatcttttatcaaataatctgtccaacagcaaaagcacaacagcaaaatacgtggaaagcattcaaagcatacattgtgcctgcttctattttccaatgcggaatgtaggcaatgaaaccgctccagagaaacacactgttgcgaggaataaaggcgggtgtgcaagtggctcgactgccagctcagaaaagctcgcctccgagatgtcacctggcacacttggtggagtcacc

SEQ ID NO: 19571 - DNA, 736 bp, Homo sapiens
  chr20:10415352-10416088
  hyper
cggagtttcgcagctcgtactcttcacagattagataattcacccggcatttccccatcctgcttctgggttccaggacaaaacttttattctcttttaacattaaaaaacatataggaagttatgttcaaacatggctatttttattaaaatttatccggcactgtgaaagctacctttcctttctcacaatctttcgcaccgaatatatgttccattcttgagctagtcattttccaatgttaagaaaacacaccacagaaaagcgtttttttttctctcggtcagttcaactgcctagcaccgtgagttaccatgatacgttatttgctaatgagagtcattggggtcccagcctttaaaaatagcctgcgtccggcgccatttttgttttgggcccactttgaaagccgcgatattctgaacagaggccatttttcttttgggcagattccacgggccatcgaagtgtttcgctgccatcttaaatcctggctgtggcctcaatcctgcagcgaagctgcccagatcattttgtgtttgggcggcggctgagttcccaaacgcgcgcggagaccctgggaaggaggaagtaagcgcgaaagtgcttcccttaagcttctgaaggttggctgcagttccggctacctgtgtagtccgagtttccacagccaggtactactccgccagtgaccctggacagtaacaaaacatataaagcccgagcccaaacccc

SEQ ID NO: 19572 - DNA, 95 bp, Homo sapiens
  chr20:17919868-17919963
  hyper
agcggatggtgcaaggtttccttccaaacggaaatcgcccttcacagagctgagcctgggaattaccacaaagaaacctcacaaagaaaaggtgc

SEQ ID NO: 19573 - DNA, 86 bp, Homo sapiens
  chr20:19186796-19186882
  hyper
catctggacccaatcattctgcagttctggggctggaaacctgggcgatgaactgagatgaggagatggacacagcactgtataac

SEQ ID NO: 19574 - DNA, 78 bp, Homo sapiens
  chr20:19673407-19673485
  hyper
cggcgcgctgaccgacgatgctgagaaattccaccaggtggcgctgcgtccgctgacgctttattatcgggcgaaaac

SEQ ID NO: 19575 - DNA, 148 bp, Homo sapiens; identical to SEQ ID NO: 11506
  chr20:20343543-20343691
  hyper

SEQ ID NO: 19576 - DNA, 79 bp, Homo sapiens; identical to SEQ ID NO: 7234
  chr20:20350750-20350829
  hyper

SEQ ID NO: 19577 - DNA, 206 bp, Homo sapiens; identical to SEQ ID NO: 6114
  chr20:21080357-21080563
  hyper

SEQ ID NO: 19578 - DNA, 121 bp, Homo sapiens; identical to SEQ ID NO: 6118
  chr20:2731109-2731230
  hyper

SEQ ID NO: 19579 - DNA, 226 bp, Homo sapiens; identical to SEQ ID NO: 6119
  chr20:2731391-2731617
  hyper

SEQ ID NO: 19580 - DNA, 744 bp, Homo sapiens
  chr20:2731675-2732419
  hyper
ggggaaggaggaggagaagggcgtggggagctgggtcagacgcgcatacacacacacaccccttgcacaacgccagggtaagcagtgaacacaacacacgtggagatgcaatgtagaatctggccgctggccggatcttctctacttccatcctcccgccccagcccaagccacccacttctccagttgcttccctggggtgcatgcaaacctctagccttcagatgctgcagagagtccacttgagccgtgataaatggagattgttaagttttttcttttttataataaactcctgatttgaccagatgaaaagagaaaactctccatcgagtcctgcccttaggactataactcatatgtgtatacggtttcccttttttctaatcacaaatgggtgcatgtgtgttcataccaagcgcctagggccgaggacagaggctggctcagtaaatatttgttgagtaaacaaacgaaagaactgaaacttccctgaatctcgctgccgggggtgcctggagttttccgggggacttgggctgggcctggtggagggggctgcagcgaggctctcggactgggcgctggcctgcttttggcgccctgcgtctcaccctgggagtggggggctgcgggggagacgtcctccaaacgccgcccccttccccagctctgaacgagcccaccattgactacggattccagaggctacagaaagtcattcccagacaccccggagacccc

SEQ ID NO: 19581 - DNA, 585 bp, Homo sapiens; identical to SEQ ID NO: 8367
  chr20:30193272-30193857
  binary

SEQ ID NO: 19582 - DNA, 189 bp, Homo sapiens; identical to SEQ ID NO: 8368
  chr20:30193992-30194181
  binary

SEQ ID NO: 19583 - DNA, 262 bp, Homo sapiens
  chr20:30196349-30196611
  hyper
cggctccgcggcggcctgggagcgtttccatcagctgggcccgaggaatgcggagctatttaacctgagcatccccaggtgtacggaggcgcctggctgtctggggcccgcagcctttggcacagccgcgctagacaaacagcgcgccgcccccgccctgcccctccgcccccagctgcagccgggcctgggaaccggcgggcgccggcggcttgcataagaggctccgggcctcgcagagggaggggggacagaggccacc

SEQ ID NO: 19584 - DNA, 110 bp, Homo sapiens; identical to SEQ ID NO: 14904
  chr20:32899337-32899447
  hyper

SEQ ID NO: 19585 - DNA, 339 bp, Homo sapiens; identical to SEQ ID NO: 14905
  chr20:32899515-32899854
  hyper

SEQ ID NO: 19586 - DNA, 534 bp, Homo sapiens
  chr20:34652354-34652888
  binary
cggagggtctgggtctctgtcacttcttgctgcgtcgccttctgtgagtccttcccagccccctaatcatgcccgcctgagcaagaggatgagaaaatgccgaccccgtagcggggactctgctgctgtgcggggcgcggttcgccgaacccactggccgcttctagagagtcggccccagggccaggacctccacttggcaggcgctggggcgcccaggggcagggccagcgcgggaaaggccgcgagtccttcgaccccctggcagtctgggagccggccgcggctgccatggcaacgcccggaagctgccgggaggggaggcaggcccagccgggacgaggccctgcctccagccaacgctccgcccagaacgaagccccgccccggaacgaagccccgcctccagcaactctctgcccggagagaggcccgacagctgcgacccgactggttctgtccgagcccgacgggccgcgctgacccagcgactgtgcctgactgaccacaggtgccgccaccgcctgataatac

SEQ ID NO: 19587 - DNA, 431 bp, Homo sapiens
  chr20:35155295-35155726
  hypo
cgccagcgacaagcagcgccaggaggcccgcaagagactcctggcggccaagcgggcagcttctgtgcggcagaactcagccaccgagagcgcagacagcatcgagatttatgtcccggaggcccagaccaggctctgagaccatgcaggaggaaagaaacgattttaaatcattaaaaacacaaaaactaagtgcgaacggaacagagttttctcaacctttgctatggttattctgtctagagaccctgagccaactttcaaattgacgcatacaagggctcacaatttggcttttttgggtccctcccagctttaggttatgaagattttactcacaaaaaaaatcaacaaaaatcacgaaactagaaaactttttttttcctcttgctggccgtggtggactagatagatggacgtcggcaactccc

SEQ ID NO: 19588 - DNA, 142 bp, Homo sapiens; identical to SEQ ID NO: 13878
  chr20:35201323-35201465
  hyper

SEQ ID NO: 19589 - DNA, 38 bp, Homo sapiens; identical to SEQ ID NO: 13879
  chr20:35201548-35201586
  hyper

SEQ ID NO: 19590 - DNA, 120 bp, Homo sapiens; identical to SEQ ID NO: 13880
  chr20:35201647-35201767
  hyper

SEQ ID NO: 19591 - DNA, 450 bp, Homo sapiens
  chr20:3653532-3653982
  hyper
cggaaacgggtgcctaccggcacggggagggcattgggcatggagggacagtcccccaacccccgcgcttctctgatccccacccctgggcttggctacagccgccagacgcgcagagcccagagaggggaagtaacccgcgcaaagtcacacaacaagcgggacaggggacgatgcggccccaatagtgagcagcccgggacccaaggtggaatcgcgacccgacggtgctcctcccggtgtaggagtaacctcgccaggttactcggaaaataatcttcataccgttgagaatccactttgcctgagcttcttccctttaagcctcataaaccaccctgaagcggacactatgatcattatccccattttacagaagaggaaactgagggacgaccaaagaaacgcagcggaggaagtccccaggactagccgccccgccgcagcccc

SEQ ID NO: 19592 - DNA, 106 bp, Homo sapiens
  chr20:37596775-37596881
  hypo
cgtgacatggagtgggcccttggtccatccttgctggtccttgctggaccacgatgaatgattggtagaggagttgtaagcgtgaaccctggcactgccggcagcc

SEQ ID NO: 19593 - DNA, 92 bp, Homo sapiens
  chr20:39318786-39318878
  hyper
cgccgcggagaggctcaaacaggcataaagtgcgaccccaagtggccactgtgcgcaaaggcgccgcgaccgcccggcccacggccggaagg

SEQ ID NO: 19594 - DNA, 184 bp, Homo sapiens
  chr20:42804035-42804219
  hypo
cggtgagcatttagactgcgttacatttttcccgtaacaatcccaaggccttgctctctggctcgcctgcaaggctggcaccaaagtcccttcccatggcttccaaatgccgctgtccatcaaatctccatagtctctggtttcctgggatcaccaacagacaacccgaagcggaggagctggc

SEQ ID NO: 19595 - DNA, 71 bp, Homo sapiens; identical to SEQ ID NO: 13886
  chr20:44453063-44453134
  hyper

SEQ ID NO: 19596 - DNA, 126 bp, Homo sapiens
  chr20:48098999-48099125
  hyper
cgtcatgcccgccggcatcgctgatccggccgcccccgccccccctgcccccccaggccgctgtcactcgacggcaaggcccgctgctgcgggggaggggggcagggagcgctgtgggctgctggg

SEQ ID NO: 19597 - DNA, 289 bp, Homo sapiens
  chr20:48099573-48099862
  hyper
gggggagctgcatgaaaactttctttctttatctttttctttctttcttcttcttctttccttcttttttttttttttaacgagttctcttcttttccttccccttctcgagataatcaagattttgggggtgggggaatggcagcgggcttttttccaaatcttaaaagatttgggggaattccgggggttccaggtgcccacctgtccgaggtcacaacagacggggtgtgcacaacagcccctctgtcctggagcgacccctcttcccaaacactggagcatctcc

SEQ ID NO: 19598 - DNA, 982 bp, Homo sapiens
  chr20:48598700-48599682
  binary
cgcctcttaacggtcgccgcgtcccgtctctcccccaccaaagcacacttccctttgcattgtaattatctgtttacttcgtctgtctccctcactggaccagaagctacccttcgggagaggctctgagtgttctgtccggggctgtgccctggccccaggtacagtgccccacacgtgctgggcgctccgtaaacactggataagggaaggaacgggtgctcttggctagctgggccaggctgctttgcaaaaaggccgtggcatttcaagccgccgagagccacgtgcggtgtccctttcctcgcttcctccccagtgatgtgcgtttccctcgtcaatgccacgctctccaggcgccagccgggcggaggaaatttccgccccctcccaagcccgaggcgggggcgggcgtcggaaggtcaggtgtcccggccggcgcgcagcgccagggggcgtcagaagcgctcagaccaccgggcgctgagccggtgggcgcgcggcgtcctgccggggtcccacctcgcagaggcctcgcttcgctcgacgtcccgccccggacagccccagcaccggggacgacccgcgctgcgccagcgaaccccgcctcggaggagtccccgcccgggctctcaccgccacgcggcgcgagcccggccagcagccggcgcacctgctcggggagtggccttcggcggagacgagcctccgattggcgcggaggtgacaaaggggcgtggcagataaggccccgcccctcccaccccccaccacccccccggagtacttaagggagttggcggcgctgctgcattcattgcgccgcggcacggcctagcgagtggttcttctgcgctactgctgcgcgaatcggcgaccccagtgcctcgaccactatgccgcgctctttcctcgtcaggaagccctccgaccccaatcggaagcctaactacagcgagctgcaggactctaatccaggtgc

SEQ ID NO: 19599 - DNA, 175 bp, Homo sapiens
  chr20:49197887-49198062
  hypo
cgtcactgcccgagaaggacgaggaccatgcactgagttactggaagcccttcctggtcaacatgtgcgtggctacggtcctcacggccggcgcttacctctgctacagggtatgtttccactgacagacgcgctggcgagatgctcgtgtgcagagagcactggccgctagccc

SEQ ID NO: 19600 - DNA, 952 bp, Homo sapiens; identical to SEQ ID NO: 14910
  chr20:50158723-50159675
  hyper

SEQ ID NO: 19601 - DNA, 571 bp, Homo sapiens
  chr20:50383675-50384246
  binary
cgccgcgtctcctgttccgagcaactgacgctgcaataagcggccgccaccgggaaatgcccagagaggaccagacgcccgaggaagggcggagcagagcggccgcaggccccgcccaacaccgcgctcagcctcccgcgggctccagcctcacctgcgcggcctgtggagctgcacatctccaggccccgccccccagaactctgattggcgggtctaggcgggggccgggaaatctgcatttgcaccagcgcccacccccgtccttcccacccccgcccctcacgcccaggtaagtctatggcaggcgatacgagagccccgcaaacctcaacgcgtcacgctgccatcctccgaacaggaagacggcgaggcgcaaaataccaacccgtcccctcttcccaaatgcagaaaaacccttgcctgttccgcgcctaagctgccctcggggtctcctactgcgggaagggcacagcaggtggcagcccctgtcccagccgtgggattccttccccgaaattgtggggggagaacacaaggggtagtgtcaccaagcggccagtaggagacc

SEQ ID NO: 19602 - DNA, 85 bp, Homo sapiens
  chr20:50384400-50384485
  hyper
tgagcatatctgggctcccgagtaatgctccaagcgcagagctcggtgtgacactgaccaaattgttacctcagatattaattac

SEQ ID NO: 19603 - DNA, 372 bp, Homo sapiens
  chr20:52259577-52259949
  hyper
cgtcactgttataaattagacaagggaagaaaaacctcatttctttgatgatttttttaaagagctttgttttcccacgcataattgttcttcctattcattatgcctttatgtagactttgctttttcctttaaagaatacacttcttatgtaatttgttttgcatttctggaatgaggaacttttctgctcatattgttgttaaaatctagacaacacgcccgtgtgatagatcaccctgagccttggaaggaaatgattcaccacaatactgtaactgaaagtcgtctaacaccagggctggaaggcaggctatgaaccgctgcattacctgcgtgcagcagcaatgggaggcagccagaggttccctc

SEQ ID NO: 19604 - DNA, 117 bp, Homo sapiens
  chr20:56725940-56726057
  hyper
ctggcaaccggtctcccaggagacgcgagacgctgagcccagggccagagcttgcggggcgcacagagcccccaggcctcatggcgcagaaacctctcagcaccgcggcggctgaac

SEQ ID NO: 19605 - DNA, 113 bp, Homo sapiens; identical to SEQ ID NO: 8396
  chr20:57225466-57225579
  binary

SEQ ID NO: 19606 - DNA, 304 bp, Homo sapiens
  chr20:57227604-57227908
  hyper
cgccggatcgtagacccaaatccttgcaaaatgaacgactccctcccctcaaagaggagggagttgtgttgttgttttgttttgttttgtttttccgcccgttttcttttaacggccccgcagccctctgtgtggccttgttccctgtgaataattgcctcactgttcttcctgggggcttgcgtttgtgagactcaaggtgctagcctcttcactttccatttcccagacaggaaattaagctttcctctccattcgaactttttaaaaaaagcctgaggaggtatatgtgaaaattaacccc

SEQ ID NO: 19607 - DNA, 218 bp, Homo sapiens
  chr20:62127516-62127734
  hyper
cgtcggggtcctgggacgccggccccctccgtcgggaccccacacccagaccctgccccccagggccggcctccgcacctgctccgaaatgggcgcggctacgcaggtccaccagcaggtggcgcaagggcctgggagtcgctcgctctacgagcgaagccgccagatgggataaacccctcccgggcgagggctcccctttatctgaagctgcggac

SEQ ID NO: 19608 - DNA, 390 bp, Homo sapiens
  chr20:62273399-62273789
  binary
cgccccggccccgccccggcccctgcccgctccgagctccgccccggccccgcccccgcaccttctcgcgcagccgctcgcgcagtgcggccaggtgtgcctcgcggatctccttgctgagctccatcttgtagttgagcttctcctccgcctggcggctgaagttgttattctcctccagcgccttgtgcagcacctcgcgctcgtgctcgcgccgctccgccagctgcttcagcacctgcgcctcctgcgtctgtgcggggccggcgggcgcgcgtgagcggcaaccccgggccctgcccggccggactcctccctgctctccgcctcccgcccagcgcccgctcgcctcacctggcgcctccacctgcccaggcctcggtgggcgcc

SEQ ID NO: 19609 - DNA, 291 bp, Homo sapiens
  chr20:62368779-62369070
  hyper
cgggagacgcaggagccccgcagccgcgggaggtgcagatttggggctgccaggtggcgccaggtccccttggccagcccccagcgcccctttcttctgtccccagggcctcggcttcacaggatggggctgccagtgtcctgggcccctcctgccctctgggttctagggtgctgcgccctgctcctctcgctgtgggcgctgtgcacagcctgccgcaggtaggtccctcagccgcgttctgtctggggcctcgctgcggctgccattcacagcccagcgcgggaaggg

SEQ ID NO: 19610 - DNA, 345 bp, Homo sapiens
  chr20:62495236-62495581
  binary
cgagagcaggctaaggccgtggtggtaagggactcgggcctgtgcaagagtaccaggaagacacctgtgggaggaggtggccgggtgaaggaaggggcagtgggaggagcttccatgcctagggaccagtaccaccccaggctggaagcccagagtggagtcctaggacatcagatcctaaagggcttgaataccgtttaaggcttttcttccgggagcaagtaggagccaaagaagggaagttgcgggacttgttttcgtggggccagttgcctggtggttacgcgcctctcctctgaagtcaggcatcctgttccagagtatcctggttgcgcttcaacttgc

SEQ ID NO: 19611 - DNA, 211 bp, Homo sapiens; identical to SEQ ID NO: 15890
  chr20:9489214-9489425
  hyper

SEQ ID NO: 19612 - DNA, 66 bp, Homo sapiens; identical to SEQ ID NO: 15891
  chr20:9489716-9489782
  hyper

SEQ ID NO: 19613 - DNA, 235 bp, Homo sapiens
  chr21:30670777-30671012
  binary
cgggcacgcggcgactcggctgaattagggcgtcctgcagctcccgaggcgaggaggcgcttggcctttccgttccgccctcagaagggagaggagaggtggtcctcgagtgggagtcagttcaggatgcgggctgtgccacgcgcggaggtccggggaccccaccgccgcctcctcgaggcccgccccgccccttacgacccgtccctgcaaccccccgcgtgggcttccggcc

SEQ ID NO: 19614 - DNA, 301 bp, Homo sapiens
  chr21:34602438-34602739
  hyper
cgcgagcgtcgggtcccagagccgggcgcggctggggcccgaggctagcatctctcgggagccgcaaggcgagagctgcaaaggtaacgcagcgtggcggggtcgcgggagcggagcgcgtggccagctgactggagggaaaacgccgcctccctgcagcggttcccggaatcccctccggttccctctcgctctccccgactcctcctcctcctcctgccctccctctgcgtcttgagtatgcggctagtgcgcccttcctctctcccggggccgcacctgcgaccccaggacccctccc

SEQ ID NO: 19615 - DNA, 613 bp, Homo sapiens
  chr21:34602763-34603376
  hyper
cgtcgcccctgctgggagtccgctttcgttgcacccctccgcgtcccaccccaccccaccaaggatgcccaggataccgggcatttgccactgcaagatgtgagtcgttgctaagtttgagggtcacattcctccaggtccaccccgccttgcaaaaccggctcaccagctgggtgctcaggttcgggatctccagcccgcccccttgaggtcccctgggattagcccccctcgacctgcgtcagggtcacagactgcagccggggctggagcggcctacacccctccggatccgctgcgtggaggcaggagggggaaggggcgaggggacgtggccgcggagacagaagggtgcaccctcccagggtcggagaggggagatactgggaagatactccgcgaatatggagaggcgatcggcacttgcatttcaaccctgagcaaatcaatccgttacacgcagtagcgagttgactccatcagcccgtttatttggttagcgatggttatattgactctgagtattcccacctcctttcttttaacatttttttttttatttccttgttttgtttagcaagaagtcttagaaacgaatatagcatgcttgggc

SEQ ID NO: 19616 - DNA, 293 bp, Homo sapiens
  chr21:38382182-38382475
  hyper
cgccaatcctcacccctagcccggagcccgctctttgcagagcccagctggttgcgcagagcgaccagcgccagtctgtgctctggtactgtgcaccgccctgggttccctgcagtccaccgacgagagctgcccagcgcagggaaggaacgcttcttgctcaacagcgccctcgcccgacaaagcaggacaattccccagctcccaagccctcttctgtatttctcaaaaatgccattggctggagtggcggtgaagaggactaacgcctggtgacctgtaccagggctccc

SEQ ID NO: 19617 - DNA, 76 bp, Homo sapiens
  chr21:40105869-40105945
  hyper
cgaaaatatctgtcatcgtcactttacagaaaatggaaaaggatgaggattgcacaaaaactagaaattccatccc

SEQ ID NO: 19618 - DNA, 342 bp, Homo sapiens
  chr21:40105997-40106339
  hyper
cggtggcgctcgaggcaaacggtgtcatgaaacggtcactggatgcactgaccctgaagatgctctcaaagcacgagtccgttcatcagagagtggacttgacacccatcagaaacattcccggagtgcgttggtgtgaaggtgcgaggagagtcggggaagcatcccgaagccctgctaggcgaatgggtactgctgagattacagggtcagcacaaagcagaatacaggacccgaaaataacagctgcaccggaagaatacttgaccactgtttaagaaggaatttgacgaagagcagtcaccgagtgcagccctgggccggctaaaggaaaagaaaaaa

SEQ ID NO: 19619 - DNA, 603 bp, Homo sapiens; identical to SEQ ID NO: 14930
  chr21:43188777-43189380
  hyper

SEQ ID NO: 19620 - DNA, 209 bp, Homo sapiens; identical to SEQ ID NO: 15908
  chr21:44444714-44444923
  hypo

SEQ ID NO: 19621 - DNA, 180 bp, Homo sapiens
  chr21:44840677-44840857
  hypo
cggggacggcaggcgcaaggcacaagcctgtgcagcaagggcacccgtccaccctcgaaatagggcactgagaaggcatccatgggctgggtttctcccgcagcccacagtaacctgggcctgattcccagactcaacaaggactcagaagccagccacgaaggggctgcaggagacaca

SEQ ID NO: 19622 - DNA, 81 bp, Homo sapiens
  chr21:44841527-44841608
  hypo
gatgtccatgttgccatccagcaggaggttctcggtcttgaggtcccggtggacgatgtgatggtcgtgacagtactccac

SEQ ID NO: 19623 - DNA, 307 bp, Homo sapiens
  chr21:47475683-47475990
  hypo
cgtggtgggagctgggccgagggtcaggcctggaggtggtgcccatcactgggtcccgctcaagagagaagaggctgggaagccaggtgcagctgtgtgcccacaggcgggtgagacaggactgggcctggatcccgcacccgctcgccgcgcagctcagcgcaagcggcctccgggggcctcctctctgcaaggggagcgcgcgcccggccctgaccctgcctgctgattctctggaaggttcatgtccgggactcctcggtgaccctgggcagagccacccacatgcgctgcctcccctcccacc

SEQ ID NO: 19624 - DNA, 273 bp, Homo sapiens
  chr21:47649460-47649733
  binary
cgccgcgtagcttcgccggggggagtggggtaggcgcggtgaggccgtgggcccccacacctggcggaccacaggggccagaagccctggagccccgccagggaagggctgcgtcgctggccaggaccgagcgcggtagagcctcagctgctcacggggtcgctggagttgggggtggccccaggagaaattaaaggtgaaaagccttagcagcagagggaagaggaagatggaggcagagcgagtgaccgaacttggaagggacagccgggc

SEQ ID NO: 19625 - DNA, 608 bp, Homo sapiens
  chr22:27299049-27299657
  hyper
tcctgagcggctattttgagagcgatggaggggagagggtattagattcctgaccttgaggtcggggaggggagggtgatgctagtggtggacgaaagacttgaagataatgagaaattgcatcaactttacccaggctgtttctgggtctagaagcaagcaaaaataaggcgggagcgggtggggggaagaaaaagaggcatttattttggagccgtatcggaagcacaagtgtcatgggctgaaaggccgccttctcctgcgggctaagggtgtgggcgacagctcgcacattcaaataagggagcgattacacggcgcttgcttctgaagacggatttcctggtagggggagcgggcgggggggctgggccggtgtaaaggggacggcaacattaggctttggcaagttaattagggttcaggagtccagcgagcgagcagggggagaggctggatttgcataaatccatttacataatgttcttcacaaattgtgcagccagaaggcagggagggggtggggagggaaagggctggggagggggaggtggttagacgcccgaggcagccgccgccaaagggggaagggcgaggcccgagatggg

SEQ ID NO: 19626 - DNA, 38 bp, Homo sapiens
  chr22:27299689-27299727
  hyper
ctgctcttgtctgcaccagggccacccctgcctatctc

SEQ ID NO: 19627 - DNA, 259 bp, Homo sapiens
  chr22:29426301-29426560
  hyper
cgccgcgacccggccgcggactccagcctctaaagtcgggtacctttaattaggagaaattaagtggggctgctacatattttgagaataagtaacactatttaaacttaggcagccttaaccactaacttaaccgctgaattctcgctgctacatgtctcctaaatagatcagcataatcttaactaggacttaaaatgcatcatcttcgttccggaactcagaacctgcagccgacgggagcctttggaggcttaat

SEQ ID NO: 19628 - DNA, 219 bp, Homo sapiens
  chr22:29426653-29426872
  hyper
ggcagcccgccccgaaagtcccggcccgctggattgggggttcgggggtggggggaacatagagaagcagggctggtggaggggaggagggaccctgcagggcggtacacgacgggtgggagtggggaggaggagggctcctggcgcggggaggagccgcgggaggggggatgttggccgcagggcctcggagttctgagctgtgtttgtggcttcagc

SEQ ID NO: 19629 - DNA, 410 bp, Homo sapiens
  chr22:31483882-31484292
  hypo
cgtgggcagctggtgccagccctccgcccctggcagccaaaatgacctgcctctcgcacccactgcagctggaggtcacagcagatctggcagagcggcggcgcatccgctcagccatccgggaactgcagcggcaggagctggagcgcgaggaggaggccctggcatccaagcgtttccgtgccgagcggcaggacaacaaggagaactggctgcagtgagtagcggggggtggaacatgcgggtgagaaggtgagtgtgagccctggctcagctcatgtgtgcaggcaggcgtgagcacaagtgtatctgtggattgcatgtgctaatggcagtacgtccacacacgcttctggaaaaacagagatgtttgtgggcatggagcatgtactgattgtggcgtcgcggcc

SEQ ID NO: 19630 - DNA, 212 bp, Homo sapiens
  chr22:31486794-31487006
  hypo
cgtggctggaccccgaccctgccaacgctccctgtcggtgctcagcccccgccaaccagcccagaaccgaggtactacctattctcaccctgcctaggatctgtgcagaccctgtcccacccagttgctgacagccctcctgttccttctagagtccaccccccttgccagcggaccttcctcattccagcgggctggctctgtgcgggatc

SEQ ID NO: 19631 - DNA, 425 bp, Homo sapiens
  chr22:31487263-31487688
  hypo
cggggcttggctgctaggccccttgaaaacagagcaggggggcctgtggcacgttcagaggagcctggtgccccgctgcccgtggccgtcggcactgccgagccagggggcagtatgaagaccacattcaccatcgagatcaaggacggccgtggccaggcctccacaggccgggtgctgctgcccacaggcaaccagagggcaggtaggcgccccccactgcctccccaatggggatgagtgcctgcaaccgcacttctgcatgcaggacaggtgctgcggccaggactcagggtgtctccaaagggtgtgctgggagcgagggcattatcaaccttgtctggcactgccctcactccacctgatcctcctgacagccacctttctccccactcagaactgacactggggctgcgggcgccccc

SEQ ID NO: 19632 - DNA, 345 bp, Homo sapiens
  chr22:31489493-31489838
  hypo
cgggcactggaggagctgcgggcggtggctgaagcaggccgggtggcagtgacccaggcagccgaggtagctgtagccaccgtggagccggtggcccgggcagctgaagagctgcgggcagagagagcagcactgagccggcggctggatgcactgagcaggcaggtggaggtgctgagcctacggctgggggtcccacttgtgtccggccttgagcctgagctggagcccagcgagctgctcctggctgccgccgaccccgaggccctctttcaggctgccgaggatgccgggacccccgtggcccacccacctgccttcagcacccgccgccgctcctccacc

SEQ ID NO: 19633 - DNA, 96 bp, Homo sapiens
  chr22:31495078-31495174
  hypo
cgatccaccagcttcggggtccccaacgccaacagcatcaagcagatgctgctggactggtgtcgagccaagactcgcggctacgaggtgagcccc

SEQ ID NO: 19634 - DNA, 365 bp, Homo sapiens
  chr22:32078028-32078393
  hypo
cgcagatcttaatgtacatggcattgattatgagacggaattccagcctggagacggagcgacggccgtgcattcattggctgcaccgcggccttggatctgctgctcccgtcctgtacgctccctgctgctcttggctcagtgggcaaggaaggagccacgggggaggtctcacgcccagatagtgggatctggaatggacctcaggttggctctggagcccgtgccaaagaccctttcaggcaaaattgtgacaaagtatcatgattttcacagctcttgaggagcgctgagttttgggattcacagcatgggtttctgggctcctcaggctccgaataaggcaaacgctacatgtcttcacc

SEQ ID NO: 19635 - DNA, 123 bp, Homo sapiens; identical to SEQ ID NO: 14956
  chr22:38966046-38966169
  binary

SEQ ID NO: 19636 - DNA, 332 bp, Homo sapiens
  chr22:41418641-41418973
  hyper
cgtgcccgcggtgggggcagggagggacgcgcagcggagtctccgggctgcacgtgcaaggcctcggggagggtggagctctggcttcccgagctgcgctcgctcccggcttccgccgaggtgcccggggcgccggcctggagcaggcgggggtctgggtgcctgggctgcggtcgggagcgcctccgaagaagcactcggtgcctgccccgctgggagcgcaagcattgttacctatcagcgccgcacttaacagttgttaatagcagtaagccctcactaaattgtcactgctggcagaccgcagtaactcggtctgacctcaagcaccc

SEQ ID NO: 19637 - DNA, 554 bp, Homo sapiens
  chr22:45097777-45098331
  binary
cgtgtgggcgcgaccgcagtgctgggcggggggcgggcgcttgggcttgggccctgcgtcctgtgcgtgttggtttcctgtgggcacgtggggccctcggaagaggggaggagggtgagcacgtcctcagagggcagacccagcgaggcgtcgtggcagctgcggccgcggagacgccggctccgcctcttgcacacgccccctcgcctgaggccccgccccgcccgcgatgcccccgcccccttccccgccccgccccccggggcgccgagacccgcccctgggcccgcccccgggtccgcccccggcctccgtttgcgccgggtctgtgctggccgcgcgcctggcgctccacgctgagcctctccgtgcaatgattaacccggcggggcggccggcgcgggacccgagacggaggcgcggggccggggcgggaccccgcaggaccgctcggcttcctgctctcgccggagtttccgcgtagagggcgcatcgccggcccggggcccttggtgcggcgtggcgcagggcgcggcgtggggcgcgcgtgggcg

SEQ ID NO: 19638 - DNA, 254 bp, Homo sapiens
  chr22:45098381-45098635
  binary
atgagttcgcccagcctcagtgacctgggcaagagagagccggccgccgccgcggacgagcggggcacgcagcagcgccgggcctgcgccaacgccacctggaacaggtaaggccgcgccctcccggccacccggaggccctggagccgggggaggggacccctgagccgtccgcgggctaggggccgccccgagccaggaacgctgccgaaggcggcgcggcgcttcacagtttgcaaagaacttgccccgcc

SEQ ID NO: 19639 - DNA, 342 bp, Homo sapiens
  chr22:45607771-45608113
  hypo
cgagagcagacaccacagggatgcttggggcacagacgcaggggcaggggccgggggtcactcaccttcctcccgtctgcaccgctttcgctgccggagtacgccagcttccggcgcacatagaaaagcatgtcgtcctgccggggagcccatttctccatgaagtaggtggagaacatccaagtccagaagacgatgcggtcatccttgaagcaccctgcagagggaggccagacaggagtgaggaaggacggccaccctggcccttgcagcatggccttggccaagctgcgcccatacccccacatttctggccagaaatttgcgagggctctgagatgc

SEQ ID NO: 19640 - DNA, 209 bp, Homo sapiens
  chr22:47075172-47075381
  hypo
cgtcgggtggtttagttcgagtcccttttgtggagaaagggagatgaaaactgaccacgtgccaggtgtggccgaagcccccagggagggccacattcggggagcggggggtcgggggagggccaccgactggctctgctgccagcacaggcccctccctggaagtcctcgggagcggagcgcggatcggcacgggctctgggctcccc

SEQ ID NO: 19641 - DNA, 221 bp, Homo sapiens
  chr22:47199299-47199520
  hyper
cggttttctctcctgtgggccttgttggagatctcgcttctgctgtgggagctggggcccggcccccaggagctgaggcggggagggcggttggttcttgcgacccggccgtcagcgttcagcgtcgccctctagtggccaggtgctgtctttgcagcctgggcttcatgaccacagcagggcacgttggccttgtgggtggggggtgcttacacttgcgc

SEQ ID NO: 19642 - DNA, 47 bp, Homo sapiens
  chr22:49943122-49943169
  hypo
cgcataggcagaggtggcttcacagcagcgggcaagtgggggaccct

SEQ ID NO: 19643 - DNA, 72 bp, Homo sapiens
  chr22:49943364-49943436
  hypo
tctgtcaccagccagcatgtctgaaatcactgcagagatgctgctgagggaacacggacagcgttctgagcc

SEQ ID NO: 19644 - DNA, 275 bp, Homo sapiens
  chr22:50690042-50690317
  hyper
cgaggggggcgaggggtctgcagggcaaaggccacgaggcgggaggagcccgcggggaggcaggtggcgctgcggccggctcagggcggtggtcgtggctgcatggaggcgcagcaccgcccccgaggtttaaggagggagtgagtccggttctagctccaagaagacccctggcccaagagcagagtcaaggtcggtggaggtggggacactggaccggggttgcggtagcatggtgggggactgaggaagataggaggcacgggcacagccac

SEQ ID NO: 19645 - DNA, 832 bp, Homo sapiens
  chr3:113251180-113252012
  binary
cgtgatgacgtgagactctccatggagagtaggaggtaataaagaaataaaacaggtgtctgaggagaggttctattagagaggggagaatagagagtaattatcgttcagacaggcaagagttctctgcaggtagcagcctgggaaagcgaactcgcgcaccctcttgggggacgggctcttttgctttctatttcttctcctgcagccagggtgcacacgtatttgaaacagaccgaatttcctcctcgatgtggcgtcaggttgacttttcgagactagcgggtatttctttttaatgactccaatgcctttttattattgctgttattgaggttgagggagaagagatcggtctaaattctggctgggtaagtggggggattctcggcgatgagaaacgggggacttagaagccggaggaaaatcagcagccccacatctccacttctccagtccgccctactctccacccgtgacctccagtggagaccccaggcggcagcatcagtatttgatcggcccttcgtcagcacgctgccagccctggccggctgggttcgccaggcatcacccgctcggctctgaagcggacgcctggccctgcaccgggctttggaaggaccctctctgcgctcgccccctccccagggtggctccgctttcgagcccgggcgcggtgcccaccatgcgcggctgcctgcggctcgcgctgctctgcgcgctgccctggctcctgctggcggcgtcgcccgggcacccggcgaaatcccccaggcagcccccggcaccgcgccgcgaccccttcgacgctgccaggggcgccgatttc

SEQ ID NO: 19646 - DNA, 343 bp, Homo sapiens
  chr3:123049661-123050004
  hypo
cggcaggtcagtcagtcgctcgggctgtggacagtcccagggagggagacggtacccggggggtggacacttacgagatggcctcgatcatgtccatgcccatctccacacagcagtgggcgtggtcagcccttgcttcaggcagccccgagacgcagtaataacaatccccaaggatcttaatacgtaaacagtgattctcctggaaagcaaattaattttacaaattaaaaatagtaggaaagagaagtgggagggaaagaaacgagaagcaaaaagattcaccccgtgcctggaataacttgccttttagggcagtgagcgcaggcccacgccggaactc

SEQ ID NO: 19647 - DNA, 103 bp, Homo sapiens
  chr3:124606483-124606586
  hyper
cgctcccgttgcttagccgcccgtcgccacgggaaaggggcggggcacgctgtattaggcgagccgagattacttgggccaaaggcggttgctagactgcgag

SEQ ID NO: 19648 - DNA, 154 bp, Homo sapiens
  chr3:127505560-127505714
  hypo
cgctcacccgtgaagtggggataatcctaacaccaccgacctcagagagcaatgtcgcgaggtaaataaggaaatgcggatggggcaggggtcttgcctgggctaatgaaagccccccatcgctgtccactaggaagccatttgctccgatggc

SEQ ID NO: 19649 - DNA, 99 bp, Homo sapiens
  chr3:13009355-13009454
  hyper
cgtggccacacggcgccgcggaagaagcacagggggcggggggtcaggggcggggcgtcaggggcggggctacgcgcaggggcggggccgagccgaggc

SEQ ID NO: 19650 - DNA, 51 bp, Homo sapiens
  chr3:13009475-13009526
  hyper
cggagtcccagacactgcatccaggtcccagcgcgcgaagcctctgttctg

SEQ ID NO: 19651 - DNA, 33 bp, Homo sapiens
  chr3:13367336-13367369
  hypo
cgtcacggatcccacggcccgggccacagccac

SEQ ID NO: 19652 - DNA, 156 bp, Homo sapiens
  chr3:13367420-13367576
  hypo
tcctgagaggcctggagaggaagcacaggtgtcagccccctttccatagctggacactccagtcaaagcccagctcacctggatgacaggccagcttcctcgctggctgccgctacccccatgggggctcactcagcagcctcaggagacagccac

SEQ ID NO: 19653 - DNA, 896 bp, Homo sapiens
  chr3:13461404-13462300
  hyper
cgcgcacccgccgctccgagtgctgcagcctagcgcccagcgagagcgcgccgcgcacctgccggctctgccggcctcccggcgcccgcccagcctctcagcgcgaaggcccagcccggcccacggcgcccgcccggcccggccgcgcgcctcaccagcggtagcagccctccgaggcctccagcgtgaagttaacgcgcgtggcccgcgtgaagggcagcagcactttggggatgttgagcttggccgcagcggcggaggggcccgccgccaacagcaccgacagcgtcagcagcagcagcccccggccccgcgccgccatcctcgccgcgcgtcacctcccgcgaccctgcgcccggccgcccgcgccgccccgttgccctccgctcccgcccgcgcgcgcgccaggccagcaggtgatgagcgcgggggcggggcgagggccgtcggcggccgccgcttcctgggcctgagcgcgggaactctgggggccgagctcgcggcgaccccacccccagcccggccctcgcgcagggacgcggggctgggggatgggcgcgcgcccgggcccccggagctgagggagaaggcttggggcgcgcccgcggggacccctggaccctagaagtcccaagggggagcccccggggcgccccgcagcacgcatcccgccctggtatttgcccctggcggtggagccaagccgccggctttggaccttgcgctctggcccggacccacggtcagcaaggaagggacacatgccccaggacatttgggatgcagaaaaccggcgcctgccttgtcccagcccatgcttcccagaagagggaccccgggctcgcaaagggaagccacctgctgaagcgctgaaggcccggggcccgctccccctc

SEQ ID NO: 19654 - DNA, 79 bp, Homo sapiens
  chr3:139352994-139353073
  hypo
cgtcgcggaggcacagtaaggaaggcgacccgggaaggttaagtgccgtcactgcagatgtaacgtgcaaatgctcatc

SEQ ID NO: 19655 - DNA, 61 bp, Homo sapiens
  chr3:147088567-147088628
  hyper
aaaaaaaaaaaaaaaaaaaaaaactcagggaaagtttgcttttgatgaattcaataaaagc

SEQ ID NO: 19656 - DNA, 100 bp, Homo sapiens
  chr3:147088653-147088753
  hyper
gctaaaattatacagcatggggcagagtttaaaacagccagatggccaaaggtagagggaccctctcggtttcaaaccccagatatagaattccaccggc

SEQ ID NO: 19657 - DNA, 148 bp, Homo sapiens
  chr3:147108619-147108767
  hyper
cggaggcggcggcggcagcagcagggccaggtggtagctcggggctgaggatcgcggcgggggcagccgctatggggcccaagccctgacacacgtaccattcgctcaagtcggcggtacgcgccgccaccgccgccgaggaggccac

SEQ ID NO: 19658 - DNA, 347 bp, Homo sapiens; identical to SEQ ID NO: 8495
  chr3:147138422-147138769
  hyper

SEQ ID NO: 19659 - DNA, 523 bp, Homo sapiens; identical to SEQ ID NO: 14981
  chr3:157217201-157217724
  hyper

SEQ ID NO: 19660 - DNA, 259 bp, Homo sapiens; identical to SEQ ID NO: 14982
  chr3:157815399-157815658
  hyper

SEQ ID NO: 19661 - DNA, 68 bp, Homo sapiens; identical to SEQ ID NO: 14983
  chr3:157815822-157815890
  hyper

SEQ ID NO: 19662 - DNA, 568 bp, Homo sapiens; identical to SEQ ID NO: 14984
  chr3:157815923-157816491
  hyper

SEQ ID NO: 19663 - DNA, 201 bp, Homo sapiens
  chr3:161089246-161089447
  hyper
cggcttaggtgagcgccgaggctttggctcctccccagctgctgcgagcttcccactgcgccgggcgcctgggagcctcccggagttaggtgttcggccccgccctcaggactcttgctaaaactcaaattctacctggctaattccggtgattaattattgacaaaaggaaaacactcctacgcaaacttgtgtccaacc

SEQ ID NO: 19664 - DNA, 124 bp, Homo sapiens
  chr3:184057066-184057190
  hypo
cggctgaaagcattatttgcaggtgacacttgagatgggccttaagtgatggcaagcattttttcacgtaaggatggcattcttggcccagaggaaagctgagttccttttcctggaggcaggc

SEQ ID NO: 19665 - DNA, 253 bp, Homo sapiens; identical to SEQ ID NO: 9691
  chr3:184322331-184322584
  hyper

SEQ ID NO: 19666 - DNA, 43 bp, Homo sapiens
  chr3:185977478-185977521
  hyper
cgggcccggggccggccagtagagggctctcgagcaccggccc

SEQ ID NO: 19667 - DNA, 59 bp, Homo sapiens
  chr3:190231330-190231389
  hyper
cggagatcgcatctacatcctgccgcgctctgtgccggcacagggtggttgcgaaaatc

SEQ ID NO: 19668 - DNA, 247 bp, Homo sapiens
  chr3:193858636-193858883
  binary
ctgatcgctcggggagataaggcacgactccaaactgcgtccggatgcgggccgcgggccccggctgccgcgcgcattagcctctcaatggagcccttccggggccccggccccccgccgtctccagcagcatccggagcgggaaaggcgccgaactggaagggggtgggggtgctcttcggtcaacacgagagccctctccaagcgcagaagcgcgactccggaggctcgcccctcctcgcgcccc

SEQ ID NO: 19669 - DNA, 261 bp, Homo sapiens
  chr3:193858949-193859210
  binary
cgtcccgggaaacctgtcattaaagtcaattaacttttcccacacccgttggccggtaacaacccgctcctagcttcctccccggctcctaagtgcaaccagatgggcggacgggctgcccccgccgcgcgcccgccggggcggcccgggggttccagggaggccgcccggggccctccgcccgggcgggagccggccagggcggccacgccgggccagccctggcggccctgcggccaaggtggttcgcttagcaggccc

SEQ ID NO: 19670 - DNA, 643 bp, Homo sapiens; identical to SEQ ID NO: 15005
  chr3:197025639-197026282
  hyper

SEQ ID NO: 19671 - DNA, 269 bp, Homo sapiens
  chr3:23957838-23958107
  binary
cggcatttcttctctaaaacattcacacctgccaaacaggtcttggcaaataaacattctgctcttctgaaaaactgtggttctcatgttagcaaatttgggacgaaatccgtatgcagaaaaagcgccgggccgcccgcaatccacccactccatgacccttttttaggacaaaatccctgggcgctggggcctgctggaggagcttcacgcagtctggagctgaagggacacagcgagcgccccgacccgcgacgccccgactccgc

SEQ ID NO: 19672 - DNA, 989 bp, Homo sapiens; identical to SEQ ID NO: 15006
  chr3:24536360-24537349
  binary

SEQ ID NO: 19673 - DNA, 220 bp, Homo sapiens
  chr3:26665682-26665902
  hyper
gaagcaaacaaacctccccgcgagaatctgaatgcgttggcatcttgggtggtgactgaatggtcagatcgtggactagggatgcttctccaagctctaagaggaccatagtctgctctcttctctggcacccgcttgcttctacgctccttcacctctgcagccaggtcggtagacccacgcccaccttccctgccaggcactcaggagtcaaggatgt

SEQ ID NO: 19674 - DNA, 215 bp, Homo sapiens
  chr3:27410391-27410606
  hyper
cgtcggagcagattggaagagacacattcaggctccatttaaccagaataattccgttatcaaaatggaagcgccaagaagcatcgttgatggcgctttcccaccatccatccgtccaacacaaacccacctgctttgaaaagactgcctcacgcagtgactcacttacccaccacagccgcattctctacctctgcctcttgtctagtgaagct

SEQ ID NO: 19675 - DNA, 61 bp, Homo sapiens
  chr3:27411079-27411140
  hyper
caagcttgcaagcagaagaggcagcaagtgatgctgaaggctgtgctgcagccacttcacc

SEQ ID NO: 19676 - DNA, 167 bp, Homo sapiens
  chr3:41240162-41240329
  binary
cgggcttggcgcccgttctacggagagttcacagccttcgtgagtggggacagaaggcggctcggcccggtgattcaggtcgaaattcaagctgaacagcctgctgagaggtgggatccaccatccggacagtggggggctttgggggtgctgtgagactgggctgc

SEQ ID NO: 19677 - DNA, 232 bp, Homo sapiens; identical to SEQ ID NO: 17841
  chr3:5018754-5018986
  binary

SEQ ID NO: 19678 - DNA, 143 bp, Homo sapiens; identical to SEQ ID NO: 17842
  chr3:5019132-5019275
  binary

SEQ ID NO: 19679 - DNA, 786 bp, Homo sapiens
  chr3:67048291-67049077
  binary
cggaagctagtcactggcaggaagtttacggaagaagaaaaaggtaaaaaaatgtgccgggggccaggagagaggcctaaaatggggaaattcgcacttgaagagctttccctaccccagcccctcagaatgacagttctcctccgccagaagactacctctcccggcaggcactgcgcgctcgacggccacaggctggccagctccctgctctccacctccatccgaatcagccaataggaattcccggcttgggcctccgcccgacccggaccacgcgggagccggggcaatcaaactacatttcccgacacgcatgtgctcgcgtcgtggccaatcagcgccaggaattcggaggctaggggtggagccagatgcacaggacaccccattggccaggggaagcttagaagagccggaacccgggagctagagaagcgaaatgacatttcctttttaaatagctggagtcggggccccatcgagaaatggccgcgtcggcaggtgggtcgtgtggtggccagggcggcgtggagggaggtgagggggaaggtgggccggggccggccacaggcagtgggatgaggacgtagcggtgcggagctagagggaaggatgaagcggtggaggggaatgagaagagggaggatgaatggtgcggagggcggtgggcggtccggcgggaccgggatggggaggctgggtacccgccggcgctgcgccccaggaggcagcgggaggcggcttgagggggcaccggcggccgccgttgttcgagcttccctc

SEQ ID NO: 19680 - DNA, 264 bp, Homo sapiens; identical to SEQ ID NO: 17852
  chr3:71036199-71036463
  hypo

SEQ ID NO: 19681 - DNA, 153 bp, Homo sapiens; identical to SEQ ID NO: 8522
  chr3:72149806-72149959
  hyper

SEQ ID NO: 19682 - DNA, 96 bp, Homo sapiens; identical to SEQ ID NO: 8523
  chr3:72150077-72150173
  hyper

SEQ ID NO: 19683 - DNA, 135 bp, Homo sapiens; identical to SEQ ID NO: 9727
  chr4:100729543-100729678
  hyper

SEQ ID NO: 19684 - DNA, 342 bp, Homo sapiens
  chr4:10087759-10088101
  hypo
cgaagccttactcacccgtgtacaatttctcaccatcccacttggaggcccactggagcatggtctcgacaagagccctcagctcccccaggcaacaacctcctcggccccatgctgtgcgtgccttcctttttatactcatcaccctgggctgtgagcccagcaaggaggcgctcccgattcccctctatcctcgaggccacgtctagtgaacctttatggttcagccttccccctctcagcagtgctgctgcccccactgccccggcacaaaggaaccgtgactctatgcatgagcgttgaggtgacctggtccgtaggagtcacacacacaacgttaac

SEQ ID NO: 19685 - DNA, 47 bp, Homo sapiens; identical to SEQ ID NO: 14002
  chr4:113432609-113432656
  hyper

SEQ ID NO: 19686 - DNA, 300 bp, Homo sapiens; identical to SEQ ID NO: 12761
  chr4:113435475-113435775
  hyper

SEQ ID NO: 19687 - DNA, 130 bp, Homo sapiens; identical to SEQ ID NO: 17860
  chr4:1205845-1205975
  hypo

SEQ ID NO: 19688 - DNA, 269 bp, Homo sapiens; identical to SEQ ID NO: 17861
  chr4:1206025-1206294
  hypo

SEQ ID NO: 19689 - DNA, 1233 bp, Homo sapiens
  chr4:124317751-124318984
  binary
cgaagttttaagaggatgtttattacacgagtctgtagggcaacatttccaagttggtacacataaacgaaagaggaaacgatagttaaggaaatcctgttccaggttttcgggcagcccgagtgattgacacatgatatcaccggaggcgtgtcctggagtggaggtggaggtggaggcaaggagctgaaattctgcgtagccggagtgagaccgctctgcaaaccactgcgtgctttgcagagtgattatcagcacagttccctgccctggataaggaacagctacagtcgctgttaaatgtgcctgaaaagcaatttgcaatctttgcattaggtaagtaccgtttccttccgtagacattttaggaaagataaggtgagaaatgttgacttttgcaaggaactgaacatttatttatttgaacttgctttccagctaaggttactggttgcatttcaaaacaccggtagcattcccactgctaaaactaatgctcttaaagtaaatgctaccgctaaaagaaaaagcagggtccctttcacctttccttaaccgaacagtagacgtttaaagtctgaaacgatcgaatttgtgaaacacagagccgttaatgcctttatgcgaagaggggctagcactcggtgtgtggaccaaatgcgtgtttgtttaggcattgttggcgaccgaatcccgagtgaagcattggtttaaaacctgaatttcccgtctctgtgtattgattcctaacgcgcagaggcgttgcttgaacgttgtttgaactcctaggcattccagggggcaaaagcacctcggcaaaaacgtgcaggactgcatgttactttggttcgcggctgacacgccgactgtgcgccggcctgtcaatcaccgggagcagcaacagggagcacatggcaacgggctgcgggcgagctggccagcggcccgcccggggtcccagcccttcgaagaaagggacattcacgagcttctatctctaattctctgtcgcaggcatttcggccgtggaaccccaggctcggaggactgggtgtgagcgctgcccgggagaggctgacctgccgggaccggagtgcccggggacgctgtgcccccacttgcccaacgtgcggaatcggctaagcgcgtcggcctgcgcggggcacaagggacgacgcccgcctttctctctccgagaaggatccccaaacctcactctcttcactcctcccc

SEQ ID NO: 19690 - DNA, 149 bp, Homo sapiens
  chr4:129210000-129210149
  hyper
cgcactcaactcgtttgacgaactcgtttgacgtgttctctcttgccctttgttgtctgttgtcttgagtctcatagaataggtttgaacctttcactgtcggttttgtaggagtcactgaggatattgacgaggcaagtgacagggtc

SEQ ID NO: 19691 - DNA, 824 bp, Homo sapiens; identical to SEQ ID NO: 15036
  chr4:142557243-142558067
  binary

SEQ ID NO: 19692 - DNA, 332 bp, Homo sapiens; identical to SEQ ID NO: 15037
  chr4:143768278-143768610
  hyper

SEQ ID NO: 19693 - DNA, 194 bp, Homo sapiens
  chr4:146098925-146099119
  hyper
cgagtctcctccccgtctttaaaaactgccacttagattatttactttgattccttcttagaaatgatgagtatttgtgattttataggagaaattgttggcaaaaaatataaattattggtacacattttaaaagggaagcctgacgctggtattacttcctttttcccacacacacacactttgcctttggc

SEQ ID NO: 19694 - DNA, 260 bp, Homo sapiens
  chr4:149362760-149363020
  hyper
cgtccccttctcccttgcccttaaaattccaactgatgccataggaagcgtagcctgtctcaagagtttcgcgaatgctagcgaacgggaaatgcacgaatttccagagccccttttatacaggatctattaggatctatatctccttcaactgcccttatgcgctacacctccggctgagatttgggagcgtccgcaattgataaaggaaagaaatattattcaaacgtcctttaaaaattgtacagggaaaatgatcc

SEQ ID NO: 19695 - DNA, 177 bp, Homo sapiens; identical to SEQ ID NO: 15038
  chr4:153856957-153857134
  hyper

SEQ ID NO: 19696 - DNA, 192 bp, Homo sapiens
  chr4:154714010-154714202
  binary
tgcccctcatcttaggaagagtctagtctgagaacaaacagtttgccaactcctaccccgagctcttgcgcgtatctccttaaatatttcaagggtctgggccccagatgggtgctcggaaagcaaacgaagggtccagggaggccgaggccaacgcggagctcagcgcccccttcttgcctgaaggggcgc

SEQ ID NO: 19697 - DNA, 141 bp, Homo sapiens
  chr4:16228990-16229131
  binary
cgagcgtggtgtcgagaccaccaccagctggggcggtgggagcgaaggtgccccaggctcggggaaggtggaaaccttttccccgctccccaagtgattgttgcgcgctccggtgaggggacagtggtacctcgatttccc

SEQ ID NO: 19698 - DNA, 273 bp, Homo sapiens
  chr4:16229202-16229475
  binary
cgaacactaagcttcctggaaacttccctagacctaaacttgagaaccgcatataaatgggccttgagggttctgtcgtcagtagcgggttacgtgattgcaaacgagcaagtttaaaacggagtgggctttgggctgcagagccgcctggcattctgacagctgagcaggaggcagaggtgagagtccaagatggactaaaaatgtcccagcagctgggagcccaacctcggcccaacctcgttgaaaggaggaacattcggtgcagccgtc

SEQ ID NO: 19699 - DNA, 43 bp, Homo sapiens; identical to SEQ ID NO: 14010
  chr4:174439755-174439798
  hyper

SEQ ID NO: 19700 - DNA, 271 bp, Homo sapiens; identical to SEQ ID NO: 14011
  chr4:174440348-174440619
  hyper

SEQ ID NO: 19701 - DNA, 169 bp, Homo sapiens
  chr4:174448150-174448319
  hyper
cgggatcccttaccacacgggagtgtcctcttcgtattaaaatatggaatgcttttcttcaaatatccactttttttttggagggggagacggggagcagatgcctcaaagggggtcaaagagaggggaaggaaattgcacataaataaaccggatgattccaaatgca

SEQ ID NO: 19702 - DNA, 355 bp, Homo sapiens
  chr4:174448663-174449018
  hyper
agcccctgcagagaagctaccaaggttagcgctaccctagccggcggggaggcctcggcgctgcagcgctcaacaaccggatccacaagtttataaacaaccgcccgttttcgagtcgtttatggaggagcggggggccttttctcttactccagatgtaggggcgggagctggagtcggcgctaagtctggtttctctgttttcattagcaatcctagatccacatctaggaaaaatagggcgaaggagcctctgtttcggcctgggcctctcggccagaggctctcggcctccagctcagcagtgcctctcctccaaggcttctgaaatctctggttattcgggaggtcactc

SEQ ID NO: 19703 - DNA, 127 bp, Homo sapiens
  chr4:174458996-174459123
  hyper
cgactctaggcaccccacgattagctgagtgatctagggcaaggacctaggcgtctctaagtcttagtttccccatctgaacaatgtggataatgacacgtacctggggtgggcaggctagagtaaa

SEQ ID NO: 19704 - DNA, 35 bp, Homo sapiens
  chr4:174460221-174460256
  hyper
catgttagcggtttgctggatttcccttctccctc

SEQ ID NO: 19705 - DNA, 112 bp, Homo sapiens
  chr4:25235368-25235480
  hyper
cgcttttggttgcaggagggcacctctttgaaaattactcaccttcccgccctccactgggagtaaagcgagctgtgcccagcttctccccgcgctcacggaagcaggtggc

SEQ ID NO: 19706 - DNA, 786 bp, Homo sapiens
  chr4:36245423-36246209
  binary
cggggcagcacagacacccgggcaaattcatgatctctaccgagtaaataacttggtgcctgaaactcactacagcttcttcttatttaaaggtaggggagaggaatggagggagtgtccagctgtctatccggatcctcaccctcccgggtcaaatcccagaagtggagttcttggatcacttaccggcttctggtttcctttcagacgcccacacgcgggagcgaaatccaaggggcggacaccagagccgagcactttgcgctgaggaaatttacccggtgaagtgtcgaaaagccccagcccctccagacagggtcctcccacccccgcgtgggccatcccggcccagccttcccgaggccccgggtactcgccttgcgctcgggtcgcggagttcgaaaagcgaggtgaggcggcgctgggaagctcagcgccggcgtctctcccagccttgggcgctcggtcctcgcccctctgccggaggcgccaggcctcctctttcccggtccccgccggctgtccgcagtcgcctctgctgcctggcggcggccgcgcgggcggcgctgttagtggggccggcgtgtcgcggccgccgcacctggaggcggggagcgcgggccgcggacccgcgctcagctccggaaacgccgagcccggcgcccgcgccttgctcaggtgctcccgcgcctcgcctcggccgccgcttcctctccgcccgcgggggcggggagcaggcgccccgcgcgggggaagccggagctcaacggcgggggcggcccagcc

SEQ ID NO: 19707 - DNA, 131 bp, Homo sapiens
  chr4:36246257-36246388
  binary
cgacttggccgcgcctggcaccctcgccacctggcgcacctcggcccggaggcgtcagaccccgctggggaagctgcgggggcgcgccctggagcccagagcgacaggggcattacccaccttcccgggac

SEQ ID NO: 19708 - DNA, 323 bp, Homo sapiens
  chr4:40632148-40632471
  hyper
cggccttgatggcagagattgggggacttgaccagacggacttctctccccgccccaaaagtcacatgcctttcagacacccagaagtggcacctgctccacctgggggcatctgtccgagtcagacgctcggcccccttcgggctgctccgagaaacccagccagaaccacgttggagaaattaggaacctgctgctgaatttcaagccgatcggaaccgccccgctccccttcttccccccataaacaagtcgctggacgaggtgggatctctgcgacccccgcgtgcccggggagagctcccggggcgagctcccggggc

SEQ ID NO: 19709 - DNA, 451 bp, Homo sapiens
  chr4:48271822-48272273
  hyper
cgccgcggagtccggagcctagcgccccagagtccagagcaaagcgccccgccccgccctctgatctccccgtcccgcccccaatcaccccgccccgccccgattgctggccccgtggacgccctaccccgcctctgatcctgcaggcccgcccagtcctcgatcgccccgccccggtcgcttgggccctgggtggcaggtttgcgcagccctgcggcgatttcaaggcaagtgaccggaatgggtcggaagcgcgtcccggtgagtttcagggagcgtcccttaggtttccgggggcggcgttgaacctccctagccccagtcttcccatcccaggagacccgcccctagtggctcgaacgcccctagccaggagagccccgagtagtgccacttgtggaagactacgtgcctgtcggaattaggaaccgcacctccccttccgctaagc

SEQ ID NO: 19710 - DNA, 112 bp, Homo sapiens
  chr4:4868273-4868385
  hyper
cgcaaaggactgcagctcagagaggtgacatggttttcccaaggttacacagttaatgaaggacatagcaggaattccaacacggattccactcgaggatccggtttttccc

SEQ ID NO: 19711 - DNA, 74 bp, Homo sapiens
  chr4:4868464-4868538
  hyper
cggagcgcagaatccgggaactagttctgaatttaactccttgcgctctaaccacgaacaggcactgtcccttg

SEQ ID NO: 19712 - DNA, 461 bp, Homo sapiens
  chr4:4870855-4871316
  hyper
cgcaccagcggggtgcaataaagatcggcctttgtgtgtgtgtggtgggggggaggagtggggggtaggtagttaaaagcgaattcaaaagcccgccctcaatttggggcctgattaggggcagatggaaggaagggtccccgaccctacgtggcagcctttgttgcacattttacaggcgaggagacagtggtgggatccaagcccgctgctgtgggacctcaggagttgctttctccttcaccagctgggtgcagattttgatgatgcacagggcgcggcctgacagtgcgtgtgtgcgcccaccgggcgctgctgccagagtttgcggggttcagggagcgggaggagggtctgagagaccccaaagcctcccctttgcgagaccactccttgcttcccccgcctggcgctttccataaccctctgcggcgccctgcctctttgttgccccttagatg

SEQ ID NO: 19713 - DNA, 265 bp, Homo sapiens
  chr4:4871384-4871649
  hyper
aaagaaaaccccgttccctctctgatgactctcgtggcacccgggtggcagcaggggcttctccaccggagaaacagccacatcgactaaaagggaatgtgtgaggcaggctgagaccttgggtggggccccccacctctcgagttttccaagactcaggttccatctctgttaaatggacacaatcctgacccctggcaggtcctgaaagagtagaagggaaggggttctccacgggctgtaccatcacttgcgtccccagttc

SEQ ID NO: 19714 - DNA, 978 bp, Homo sapiens
  chr4:4873696-4874674
  hyper
cgctcggcgtgcatggtgccccttaatcctcacaaaagtcgagcgacttagggaggaatattatcccattgcacacacgagcacactgctgcgcagaggcacgaaggtacctgcccagggtctcagctagtcccatttccaacccaggaaggcaagggagcaacccgggaagcaaaatgtaaggagacactttcagggttgtgcaagtgtggggtgggcacccggggagaagggaggagggatgaactatccagagaggaaggcacgcccggccccgacttatcggaataattgtctccattccgcttcggcggtgtctgttgtgtccattgaacagaagcagaacgtgagtccgtatctgcccctcgccaccgccaccagcacctgggatttgactcacacttcaattcctgccctaggaattgatgccagcgcccagtatggccccgcgtggggaatcgagcgccccatccctcggtgagggcttactctgagcctgagtctgtggcaggcccccccatagctactgtctgccttaatccacgccaaggcctctaaaggaaaacattgccttggttctttttcacagacgtgtcaactgtggaccagagatgtcaagccacgtgcccaaggtcaccaagcagtttctgggtgagccctcagggaatcctaaatcccgacccaaacccgggatttcccctcgccctcggggcctccaaggggagctgcgagaggcggggacgcaaggaggcgctgggaccagtttgctctgagtgctcctgctccggactgctccttggagaggcggggccttgggcagcagaatcccaagctcctcccggtgggaaatccggcagctcccgtctgagggtagggccagcagaccacctggcccagtaaactccaccggcttcgggggtggggagttggggcaggtgcgccccaggggctcggtatacaaagccatgcctgagccac

SEQ ID NO: 19715 - DNA, 173 bp, Homo sapiens; identical to SEQ ID NO: 17877
  chr4:54965627-54965800
  hyper

SEQ ID NO: 19716 - DNA, 94 bp, Homo sapiens; identical to SEQ ID NO: 9757
  chr4:57687545-57687639
  binary

SEQ ID NO: 19717 - DNA, 205 bp, Homo sapiens; identical to SEQ ID NO: 9758
  chr4:57687887-57688092
  hyper

SEQ ID NO: 19718 - DNA, 250 bp, Homo sapiens
  chr4:75230487-75230737
  hyper
aggcatgtatggggaacgccagccttggctaaaagactgattcaagttatgtccgtcaccctgagcaaccaaaaccacccactacagggcaggtgaccccacaaagcaaaccaagccatctggtccacgctccccacctcccggagggagatggaaaagtttcgggagtagtccccggccaatcggaaagacattttttcattcctcaaccactactctcaggtgctccagggagggaggatgacttcct

SEQ ID NO: 19719 - DNA, 133 bp, Homo sapiens; identical to SEQ ID NO: 6184
  chr4:76555905-76556038
  hyper

SEQ ID NO: 19720 - DNA, 276 bp, Homo sapiens
  chr4:77818885-77819161
  hyper
cgcgtcggggtctcggagaaagctcttgaagtggctcagcaaggcagcgttggtcacgcggcccccagcctggcacagaaagtccagtagtgcctcctggctcagctctcgggccatcgctgccttgtcctccgccccagaggtgtctgagtctcgccctcccggggctctccccagccagaggaaaccctggccgggcgagtgtcacctgcgcccggggcggcactagccgcccccatcagccgcggaggccagcgctgcccgcagcccgtgagc

SEQ ID NO: 19721 - DNA, 268 bp, Homo sapiens
  chr4:77819271-77819539
  hyper
cgcaacgagtcctcacagcgaaagttcccgggatagggccgagtcggtttcacctgcgccctggcggcacctcctccctgcctctgggggaagggtcaggcccgcctcctcgtgtccctccgccccctgaggtctcccccaccccctgccacccatcccagaagagtcaggccggagagccagccggtaggtgaggttggcggcgaaccgagccggcagcgaactgctctgcggccggggaagtggaaggcaggtaggcgaccggccg

SEQ ID NO: 19722 - DNA, 142 bp, Homo sapiens
  chr4:77819573-77819715
  hyper
cgatagaaggtccgttcctgtcctccggtgctttgatgagttcaggctgaagccgatgggggaggaggagaagctgcaagttaacaggcaatctgagttatctttctttattaacgctgtagaggagtacttcagatttctc

SEQ ID NO: 19723 - DNA, 89 bp, Homo sapiens; identical to SEQ ID NO: 14034
  chr4:8201024-8201113
  hyper

SEQ ID NO: 19724 - DNA, 39 bp, Homo sapiens; identical to SEQ ID NO: 14035
  chr4:8201450-8201489
  hyper

SEQ ID NO: 19725 - DNA, 400 bp, Homo sapiens; identical to SEQ ID NO: 9772
  chr5:101631635-101632035
  hyper

SEQ ID NO: 19726 - DNA, 146 bp, Homo sapiens
  chr5:101632074-101632220
  hyper
ctcctggccctccagcctccagcgcactctccgccaccgcctgaaccttcctactccagctcgcagctgtctggagcgcagagcgctgagcgggggcgttagcgccccagcctgtggctttggcgctcagctgtgcctcacccgtc

SEQ ID NO: 19727 - DNA, 468 bp, Homo sapiens
  chr5:10354870-10355338
  hyper
cggttatcgtgcaaatgcttttctactttaggtatatttatgggggtatgagcgtctttcaaccttatgggttgcgattttggcgattttaaacgaaaatgaattatcaaacgccgtcatggagtgcaataatgagtgaaaaaagtttgatattatctatgtaatgagttgataacgacttatttttttttaaagaagtcttgcctttaataaatacctcaactataacatgtggcacttgatgtacattcgcgttccatcttcgtaaaaagcctgtggaataggtaggtattatcttttatagatgtggaaatgtaggcttcgttattttaatagcttgtcgaagctttacacaggtagtaagaggcagatttgaacctaggcattctgattgcaagtaatttccctttcattatgccacagtgtgtttattatatacactgagtgtagctaatcgccactggagac

SEQ ID NO: 19728 - DNA, 96 bp, Homo sapiens
  chr5:10563418-10563514
  hyper
cgcccatccccggcgccaggactgacggggagagggcaaggccgggccagaggggctgtgggcctggactgcggctgtcgcccgcggccctgctct

SEQ ID NO: 19729 - DNA, 281 bp, Homo sapiens
  chr5:109024730-109025011
  binary
cgaagagaatgtgcaagccctcttctcttgcatttcctccagcccgtcaccaagtactcttccaggcacgccaggcccgagtgtcctaggataggaaacctgagcaacaaagggaagtggggtgtaagctcaacccctgttggacgtgggggtgctggcgcctgaacgcccccgaaggcctcaactcccagaaagctgcctgccaggtcacaagagccctgtgaggtcttcctatcgccgggacactgggaggcaggcgcggggcgggtccgccgggcgac

SEQ ID NO: 19730 - DNA, 113 bp, Homo sapiens
  chr5:122423762-122423875
  hyper
cggtatggccagaaccccggcgatgggaaagtacctcctgagtcggtcaatttcacacaccctgcctgtgccctctaccatctactaccgaaaatgccaggaagagctggggg

SEQ ID NO: 19731 - DNA, 332 bp, Homo sapiens
  chr5:122424105-122424437
  hyper
ttgtctccgggccccaagaaggagagggaaagagccctccagaagacaacccgagaaggggtcagcagagcgctgggtggagtgcagactccattgcagccgcctcccagccccacggccaagcttgagtccctccaggaccagctgctctcggtctcaggaccctcggtcctacgcctccctgcaccgacaagcctccctcctgggctgcagacagagggtttcactgcagcgcgcaacccgtcccgctccgcccccaacttttctccccggaggatttatgttagaggttgcgtggcgggcgagtggactctggcacccagaagcacttc

SEQ ID NO: 19732 - DNA, 288 bp, Homo sapiens
  chr5:122434876-122435164
  hyper
cgggctttttttcgcaatacaaggataaacacatcctgaaactccagatagaaacctcaggaatgggcgagagggtcagaaggaacgagagacagtagggaagagagagagagagacagagacagagggagagatgcagagagactgaaacgggaggaagaagcctggaactgtcggttccgtggagagcggacatgctatctgcgcccagatccgaaggctttttggggagcctagagtcctggcccggtaccaggcagatctgggtgcggcgaattccaagggagc

SEQ ID NO: 19733 - DNA, 103 bp, Homo sapiens
  chr5:122435201-122435304
  hyper
cggtgcccccaaggcatcaccttcctcgaaggtggcttacccaggcgggcggtgatgctgttgtctcgggagtttactcaaagatgggccgctcggggcggcc

SEQ ID NO: 19734 - DNA, 123 bp, Homo sapiens
  chr5:122435413-122435536
  hyper
cgccggcttgtgggcaccagcagcgctgcggccgccgcgcccccgccggagctgccggagtggctgcgggacctgcctcgcgaggtgtgcctctgcaccagtactgtgcccggcctggcctac

SEQ ID NO: 19735 - DNA, 186 bp, Homo sapiens; identical to SEQ ID NO: 12797
  chr5:134366533-134366719
  hyper

SEQ ID NO: 19736 - DNA, 124 bp, Homo sapiens; identical to SEQ ID NO: 12798
  chr5:134367305-134367429
  hyper

SEQ ID NO: 19737 - DNA, 173 bp, Homo sapiens; identical to SEQ ID NO: 18807
  chr5:134370281-134370454
  binary

SEQ ID NO: 19738 - DNA, 38 bp, Homo sapiens; identical to SEQ ID NO: 18808
  chr5:134370508-134370546
  binary

SEQ ID NO: 19739 - DNA, 84 bp, Homo sapiens; identical to SEQ ID NO: 14058
  chr5:134375851-134375935
  hyper

SEQ ID NO: 19740 - DNA, 257 bp, Homo sapiens
  chr5:134579620-134579877
  hypo
cgcttgtcatgcacagccccgtcagagccggctccctgggctgaggggctgccctgtgctcctctgagtccccggccgagcgcaccgaattatgtaatgctgctgagccaacatttacgcgtctcagccaatttgctggcctagagttacactgtgcagatgctctgccttacggcttgcttttgtctcggaggccgtaagcagatagcataaccctgcttaccattagacatttcgcaaatcatctaggctcgagc

SEQ ID NO: 19741 - DNA, 46 bp, Homo sapiens; identical to SEQ ID NO: 11722
  chr5:134827217-134827263
  hyper

SEQ ID NO: 19742 - DNA, 73 bp, Homo sapiens; identical to SEQ ID NO: 7415
  chr5:134880614-134880687
  hyper

SEQ ID NO: 19743 - DNA, 335 bp, Homo sapiens; identical to SEQ ID NO: 15070
  chr5:139135589-139135924
  hyper

SEQ ID NO: 19744 - DNA, 307 bp, Homo sapiens
  chr5:139175997-139176304
  hyper
cggcagccaccttcacgaggctgcagctttgaggatttatttctgtttccagtttcccaactttgacagccctgcttggcggccaggcctccccggctctgcagctagagcgggggctcgcacgggggcgtggcagtcagggctgaggaggcacataatggccgaggcggcagcgggagggaggggtcccaggagcgggctgctggggctgggtgcagagggagtccagactggggacaaccctgcccagcgggccccctcggaggaggaggtattcagctgttcctagaggatgcagggactcccc

SEQ ID NO: 19745 - DNA, 601 bp, Homo sapiens
  chr5:139487921-139488522
  hyper
cgcaccctccctcttggagacccaggcggtgcagcaacgttctctcccaccccccgcagcgagaaacgaatgaaccccctcctactttcaaaagagaacaaaataacacgccccttaagaaaagaggcgatcctacctccgcaggcgctggagaccaccagtgatgcgtttgcttagcaatccctgagccccatttcccctggccgccttcgccctggggcctgggactgtgcgctagacgtggctgacactccctgcacggcaaccctggaaggagggagaggaaggagagttctataacccaggcttcactgccaacccctcctctgttcggttccccccaccccactaccaccaaatgcatacacccgcccaggatgcgttgtaaaaacaaaacaaaaccaggaaaaaaaaaaaaaaaacctttggtgctgacatcgcagatgaagccgggcccaaagatgggtggcccgaacaaggcatttttactgccccacagcgctgggtcagctccacagctcctctgcctttgtccgagggcaaaaggaacggatgtgaagctgaggggtcttctctgtgagcggcggtgggccccggaggc

SEQ ID NO: 19746 - DNA, 276 bp, Homo sapiens
  chr5:139554306-139554582
  binary
cgctcaggtacagctcgggaagtaagcccccaaccctagttgggtctggaccaacaagacacgaggaggcagcagcccacagccgacccctcatgccacgcactgagcagggttccgcatggacgctggtcttgcctcccaggcgcctgaactagcggagttggggtatcgggtggagtctcggagaaccaatccaatctgagggggacgcctgtgggagtcctaagtatccagcgcagctgggaggcccacgttgggaagtcggagaccgacccc

SEQ ID NO: 19747 - DNA, 625 bp, Homo sapiens; identical to SEQ ID NO: 8562
  chr5:142781875-142782500
  binary

SEQ ID NO: 19748 - DNA, 78 bp, Homo sapiens; identical to SEQ ID NO: 8563
  chr5:142782625-142782703
  binary

SEQ ID NO: 19749 - DNA, 299 bp, Homo sapiens
  chr5:149381214-149381513
  hyper
cgtttttaaccttaaattgtcctgcctttttttgcattgctatactgctgcctcgagtctgataacaaacttgtactcaggcttagaacagggtaataaaacaaacaaaaccgtagggtgttgtcttcctgccctcagcccaaggtggctgtaatgagtgtttcctaacccgttttgcgcagggtgcttagtaccctatatgccattcattacagatgctctcctgcagttactgcccttctccacaaggctttcagccgcccagaagtcaattcagggcaaaaaagcgcagtccccac

SEQ ID NO: 19750 - DNA, 227 bp, Homo sapiens
  chr5:153854949-153855176
  hyper
cggcgtcggggcggatcatatggagggacaagagagaaagagccagatagggaaatggagatagggctgaggttctaaattcgctccaaaagggtggaagagtgcgtctttgagcccttgggttcgacagtccctccttcttgcatgttgccgccaagggccgccctcggttgggctgggggtggatatatatatatttctctttctcttaatgtattaaaaaaaat

SEQ ID NO: 19751 - DNA, 160 bp, Homo sapiens
  chr5:153900641-153900801
  hyper
cgagggcgctgagctcccggtatcctctaggtggcgcacaattctctggggaaaaggagaattccaggtgaactaattccacgggaagaagggttggtttgggaggggctaagccctgcctacgggctcctgtaggggaatcagctccccatccccctgc

SEQ ID NO: 19752 - DNA, 116 bp, Homo sapiens
  chr5:156811500-156811616
  hypo
cggaggacagaaggtggcctctcttctggcaaaacatggtaagtatttttggagcacgatgcaaagcctcatctgcacagacgtcatgctgaggaagccaccccagcccggccccc

SEQ ID NO: 19753 - DNA, 253 bp, Homo sapiens
  chr5:16934300-16934553
  hyper
cgctgtagcgcgttatcctgatgttccccccacttgcactagggggcagagttctccccaagggggagccacggacccctgtggtgctcagacaggctacaggaggagtgagatccgtgcaaactgaatacaaatttctatattttcatcagattttctaagggacccagaacacaaaaacaacaaagttaagaatcattgccctaggggcagggcctccgttttcttacagatgcaagcaattaaacaccgg

SEQ ID NO: 19754 - DNA, 43 bp, Homo sapiens
  chr5:16934582-16934625
  hyper
actggacaacgtgcaactcttgcagaaagttctggtgcctttc

SEQ ID NO: 19755 - DNA, 772 bp, Homo sapiens
  chr5:172198713-172199485
  hyper
cggggaaactgaggttccccaggcgaagcgactgacttgcccagaaccacactactggggtgggggcagcaaataggcgcctaagatgaagtttagagaaaaatgaacaactctgccgatagaaaagtcgtccctaccaagaccgactcgagcgagttggggcggagaggttcagggcaatgctttcctgtttcccagacttttctttaaggtggctttaaaatatctacatttgccatgaaagtgtgagcaagcaaactcccaccgggaaataatgctattcctagtcttgtggcccccggaagacttggagccaagggaggcaggtcagggggctgaaatcccggtgaggggtcgcaaggccccgcagtggattccagggtttggcgtttggaggggtgaggggcgacccgcagcgcgactcgacggcgccccccaggggccgcccgacacgtttctgtcaccttggctccagactgagcttctccatccctttctttattatacaaataggcagtatacacagtgagcgcccactaagcgctgggctgggggcctccaacccggaacagaagccggccacaaccctcgctccctgtcgtcgcggccgttataggccgaaagcaaaatccaatcccgggccattgtgggcggattgccaggacctggatcgcaacacttgggaagacccccgccccgcccagcgatctccgtgccctgagtcccagtgacggccccctggacagcggagcctgctgcagcgacgcgacgc

SEQ ID NO: 19756 - DNA, 251 bp, Homo sapiens
  chr5:172234246-172234497
  hyper
cgtcaattgatgccaggaatattctgccagccctccaagggtggtttcagcaggcttacttcctggtcataatcacttcctccatccccggcttctgtcatgctcagccctgacctcaccaccgacccgccctgcccctcccattagctgcgtcaccactgcctgcccccacgtttagcccagcccccagcccagatctcagccttgggtgaaaagtgtcagcccgcacactttctgttttacctccggcc

SEQ ID NO: 19757 - DNA, 152 bp, Homo sapiens
  chr5:172656561-172656713
  hyper
gggggtcgccatgtaaacacggggtgttgttactttaggatacttctgaccctgtcccggcctgagtcctcgctccctgactcagcatccacgcaggaaagcctcgccccagccaggcaagggcagtccctgccggctccttgagttctgcc

SEQ ID NO: 19758 - DNA, 181 bp, Homo sapiens
  chr5:172660254-172660435
  hyper
gcttgacctacggagcgcggccgcacagtaatggtaagggatcctcgtggaggccactgtgtcctgcctggagcgcccagctggctgcggctcactctgccaagtgcactgggagccaccgacacgtctcactcagcatttgtagaaagtcaggctggctcaaggcgctggagaacaaaac

SEQ ID NO: 19759 - DNA, 343 bp, Homo sapiens
  chr5:172663868-172664211
  hyper
tgagacgccgacgcaagtgaagtcaagcattggcctgatgttgggacttttcctgtccctcatcaaagccacactcccaggacctggggcctccatgctggggagagaggtgagccccgcagggcagcccaggaggcgcgcaacgccctgaccccggcttctaggcgccagccgtcagtaacaggcctgggctgccacgccgaaatcacgcctcgagtttctgagccagggactactgggggtctggaattgttagtctagtctgtggaggatgccttttcttaaatgtggggcgttcaaggcccaggaaacctcgtccccccacctcttcacctcccaaccc

SEQ ID NO: 19760 - DNA, 143 bp, Homo sapiens; identical to SEQ ID NO: 14066
  chr5:172665306-172665449
  binary

SEQ ID NO: 19761 - DNA, 297 bp, Homo sapiens; identical to SEQ ID NO: 14067
  chr5:172665949-172666246
  binary

SEQ ID NO: 19762 - DNA, 163 bp, Homo sapiens
  chr5:172756215-172756378
  hyper
cgccgcggagcatcgcgtgcccggaggccagagcttgaaaggcaactttacgcgtctccaaacacactcctgcattttctcaaagcgctgctcgccaccccgctccgggttcccttttactctccagtcatccgatggaagtggtgagaacaaaaacaaagac

SEQ ID NO: 19763 - DNA, 159 bp, Homo sapiens
  chr5:176239899-176240058
  hyper
cgtgacccgggctcctcccgcgctgccttttgcctccgttgcaacagcctccggtgaaaaatgtgtctgtgagccgctgagggagggatggccagcgggcagcagggggcgccgggggccagcgcgactgactgcagccgcttgctccccaggccacgc

SEQ ID NO: 19764 - DNA, 121 bp, Homo sapiens
  chr5:176911172-176911293
  hypo
tcagggcgtgcatgatctcctggaaggaggtcccagtcactcggcaggctcaggcccctcctgccctgccctgggtcacgggaacacaggagggctggccgcaagccctgttccttctcgc

SEQ ID NO: 19765 - DNA, 842 bp, Homo sapiens; identical to SEQ ID NO: 16941
  chr5:176918897-176919739
  hypo

SEQ ID NO: 19766 - DNA, 59 bp, Homo sapiens
  chr5:176922905-176922964
  hypo
cgccatgctgtgcctcaattccaatccctgcttcaccatggactcgatgagcgagcccc

SEQ ID NO: 19767 - DNA, 64 bp, Homo sapiens; identical to SEQ ID NO: 8579
  chr5:180632796-180632860
  hyper

SEQ ID NO: 19768 - DNA, 244 bp, Homo sapiens; identical to SEQ ID NO: 8580
  chr5:180633225-180633469
  hyper

SEQ ID NO: 19769 - DNA, 195 bp, Homo sapiens
  chr5:2007541-2007736
  hypo
cgaggaatgacaatgaatgttggagagcctctcccgcagatgggtggcacggcctcagcctgagggaaacgtgttcccatcccgctccgggggcaagtccccgccggctcggaccccagggaggtggaggcaggcaccgtccccttgtccgggtgaccctgtgtggcctccctgctaagcccgcagcctgggctg

SEQ ID NO: 19770 - DNA, 36 bp, Homo sapiens
  chr5:2007797-2007833
  hypo
gcaggcggggtcctccagtgacagctgatgtgtcgc

SEQ ID NO: 19771 - DNA, 89 bp, Homo sapiens; identical to SEQ ID NO: 16006
  chr5:40680875-40680964
  hyper

SEQ ID NO: 19772 - DNA, 304 bp, Homo sapiens; identical to SEQ ID NO: 8588
  chr5:43019347-43019651
  hyper

SEQ ID NO: 19773 - DNA, 260 bp, Homo sapiens; identical to SEQ ID NO: 8589
  chr5:43019887-43020147
  hyper

SEQ ID NO: 19774 - DNA, 349 bp, Homo sapiens
  chr5:43020294-43020643
  hyper
agccctagcggacagttttcaggtggcagtaatgctcatttcctggaacagatggttcgtggcccttgaagcgctgcgatctgtaaagctagttctctgcaaggtttgcttagtgtctgttttatttcggtttcttttcttgctatgtttatctgtcggaattacagtttgttttggttctatgtaatctctaaaatgttatcgtttttcttttgactactaatttttgtgcattcattactattgagtttcataatacctggcttgcctccgcccacggcctccggaaagcataaatgtccaggctaatgggagtgctgaaggctctgcctcgttgatcagcacaaac

SEQ ID NO: 19775 - DNA, 328 bp, Homo sapiens
  chr5:43557434-43557762
  binary
cgcttaccacaggcaggcccgacctactcggtagttctcaggagagacgtgcgagaccgacagttgacgcccgggaaataaaaacacggggggagggggcgtggaccctgcgccagggttcgctggcgcacaggtgtgttcaatgactcggctccggccgagacccgcggactgctgaggagtggtccctgggagactgtcacctgctccgttagcatcgggggaagggagtagaaacggaatcaaaatatgtgtcccctctttaattcaccctaggtgtttaccacagtaggtcacacctacgtttaacaagcttcgttctcttccc

SEQ ID NO: 19776 - DNA, 76 bp, Homo sapiens; identical to SEQ ID NO: 7437
  chr5:54518558-54518634
  hyper

SEQ ID NO: 19777 - DNA, 210 bp, Homo sapiens; identical to SEQ ID NO: 11752
  chr5:54526958-54527168
  hyper

SEQ ID NO: 19778 - DNA, 308 bp, Homo sapiens; identical to SEQ ID NO: 15089
  chr5:56110226-56110534
  hyper

SEQ ID NO: 19779 - DNA, 552 bp, Homo sapiens
  chr5:56112644-56113196
  binary
cgaactgcactgctaagtcacttgagtgacttctgtttggagtttgaatttggcctttgaagtttgcatttggcggagtggtgtaagagccaggaccggatgtgtcagccattcagtttcaaagcagtggtgactgctccccgcagcccctccggcttggcccggggactgcggcgcgggtgcagtgcttcctgctcggtgccctggcgcgggccgcccgctgaattccaggggccgcagtgcggtgggcttcggctcagatgcgtcttctggtgcatatgaagtacagtatgtgtaaggtaatttagaccagcggtttattggcctcgcccatttttggctactggaaatttttatgttaaaggaaattcttttaagtgtgacagctacatccttgtttgtttgttttttaaaaacctgattaacgtatgcaaagtacaaagtcttgatgggtattttgagttgctggaaatgtttttgtgatagtccctcgtggccctgtagaattccctgacctttattatgagaagaaagcgtgtcattttgtgagac

SEQ ID NO: 19780 - DNA, 98 bp, Homo sapiens; identical to SEQ ID NO: 16016
  chr5:66511687-66511785
  hyper

SEQ ID NO: 19781 - DNA, 115 bp, Homo sapiens; identical to SEQ ID NO: 14097
  chr5:72497779-72497894
  hyper

SEQ ID NO: 19782 - DNA, 301 bp, Homo sapiens
  chr5:72747520-72747821
  hyper
aggagcccctgcgcgggggtcacgtggattacgctaggtgagagccggagaggctgcgccaccgtcgggaggctccctgcctccgccctttgtcctttgcccctgaccatgagcgccccaagcccagggacctccttagggggatgaaggctggaagagacctgggggctcagacttacggggaaggaacctaggctattccttgtgcatcccaggattttacccatgaacgtgaacatgaacgtgttttcaaccccagcggttcccctggcgcctcgaccctcctttgaagagtcattct

SEQ ID NO: 19783 - DNA, 127 bp, Homo sapiens
  chr5:72747850-72747977
  hyper
ctgtcactgtgagccctgaaaagagacagaagaaaacgcgagtgcctggcctgagggtgctccgtcccgtgggtagccaggtaggtagttattctgcccgatgatgaggtcctcctgacgcccccgc

SEQ ID NO: 19784 - DNA, 53 bp, Homo sapiens; identical to SEQ ID NO: 5835
  chr5:75698192-75698245
  binary

SEQ ID NO: 19785 - DNA, 916 bp, Homo sapiens; identical to SEQ ID NO: 14101
  chr5:75698274-75699190
  binary

SEQ ID NO: 19786 - DNA, 173 bp, Homo sapiens
  chr5:77291967-77292140
  hypo
cgattatggtgtggtaatagtaatccagcgatggaggccgagtcggttggaaatggattgaggtaaaataactcccgcaccatgataaatgtgaacagcgctttgctgacagatgatctaacaggtgttcataacaactatataagaggatttatttatgaccagccacagcc

SEQ ID NO: 19787 - DNA, 44 bp, Homo sapiens; identical to SEQ ID NO: 18834
  chr5:78105396-78105440
  hypo

SEQ ID NO: 19788 - DNA, 70 bp, Homo sapiens; identical to SEQ ID NO: 18835
  chr5:78105545-78105615
  hypo

SEQ ID NO: 19789 - DNA, 546 bp, Homo sapiens
  chr5:92943283-92943829
  hyper
cgctgaagccctgggaatcatttcagcccaaggtgagcctttcaggcactgctctttgtccccatttggataagaaggtgcaaaactagttagacactaggctgattttggggaggtggtaggaggggatggagaagcggcctgttctaattaaagacaataagcaatcctgcgaggagctgtcctttagccttggctggaggcagaaacggtctgtctcacctcagttgttaggtttatttgagctggtcggtgaggcgaagagcagaaacttgcaggtagctctgggctcaggtgagactgggtggatggttaaatcacagcaagtgatctcgaagtccccctttacctccccatcccctgtccttctgtgctctgtgcttgactcaggcatactttgattctaactttgcttgctagatggcgctcggtgtctcaggactttctgtttcagaattaaagcggctttttagcaccgttgttctgaactatttgtgggcatttgatcagtacagtgctggtaatgttattattgcccttgttttc

SEQ ID NO: 19790 - DNA, 249 bp, Homo sapiens
  chr6:106808607-106808856
  hyper
cgctgggtgctggttctgcaacccgcggccgtccccccgcatccgcgacgagggggcggggtcccacggcgcgctgagaaaggcgggcgagctggcgctcaggtgtgttcttccatagggcccgggcggcagagaggaccgcgtcccggcagtcggagcgggaggaggacaagacgatgccgctgtccccgccagcccagggcgaccccggggagcccagcccgtgcaggccccctaagaagcacacca

SEQ ID NO: 19791 - DNA, 113 bp, Homo sapiens
  chr6:106809184-106809297
  hyper
cccacgcatgtggcctttagtatgactgcaaagttttcatgcaggagcctcccgcatcagcctgctaaccagagcggcggggagtgagggttgttaccgtcctaaatgatggc

SEQ ID NO: 19792 - DNA, 105 bp, Homo sapiens; identical to SEQ ID NO: 7443
  chr6:106958136-106958241
  hyper

SEQ ID NO: 19793 - DNA, 404 bp, Homo sapiens; identical to SEQ ID NO: 7444
  chr6:106958337-106958741
  hyper

SEQ ID NO: 19794 - DNA, 45 bp, Homo sapiens; identical to SEQ ID NO: 14128
  chr6:108484828-108484873
  hyper

SEQ ID NO: 19795 - DNA, 168 bp, Homo sapiens
  chr6:109330991-109331159
  hyper
cgcgaggtgagcgtgcactgtcaggaaggtgcagcacgagtcttcgggcttcagggacaggggaatctgccccctacacccctgctcggccatttacctagaaccaaacagcagccaacctcgagactgattctgacagcaccaggagtaatgaagttctctaaattc

SEQ ID NO: 19796 - DNA, 226 bp, Homo sapiens
  chr6:109331216-109331442
  hyper
cggcagcagaatgcaggactttggcctataatcaatgcaaaattcattttgctaagctacgtaaaagctataaatatcactcccctacacagataataaaccttggtagcctatctctgaatcgtcttttttcctctcaagtatattcgaaggctttacaatttctaatattccttcataagcgccctccctgggttataaagacagaatttcaatctctgaaatc

SEQ ID NO: 19797 - DNA, 265 bp, Homo sapiens; identical to SEQ ID NO: 17925
  chr6:111409052-111409317
  binary

SEQ ID NO: 19798 - DNA, 274 bp, Homo sapiens; identical to SEQ ID NO: 8602
  chr6:111409368-111409642
  binary

SEQ ID NO: 19799 - DNA, 132 bp, Homo sapiens
  chr6:142622583-142622715
  binary
cgggagcgtggcggggggacccgcgcggggactcgggtaggctgcaaacgctggggagatgccacaggagcgcctgccttcccagcttctcctttctctcgccgagggtctctggggttcagcgctcccggc

SEQ ID NO: 19800 - DNA, 486 bp, Homo sapiens
  chr6:142622963-142623449
  binary
acgccgccggggccgccgcacctgagcccagctccagtcacgccggaagcgcgggcggagcgcacgggtccggggagagtcgcctgcgcccgcgagggggacccaagtacctagggtggtggccgagtcccgcctcccgccagcgggggcgaggacctgcgacgcgcacccctgcctggcccggtctcctcagcaccagccccacgcacaccctacttcctcagcttctcgccctcaccctgccaacttccctgcgaggagggacctgccgccagcctgcttcctcgtccgcaggccctgcgctgaacgctgccgcgcccagggttcaccttgcgccgtcgggaaagcccatgaactctccagaaacggcgtaaaggagggtcccgccgcggcgcagggctggggcgcctgggttccccctgggtggagcagcggcagcagagcgggaaagtggtggaggatgatcttgcggccaaaggggacctc

SEQ ID NO: 19801 - DNA, 369 bp, Homo sapiens; identical to SEQ ID NO: 6230
  chr6:143247975-143248344
  hyper

SEQ ID NO: 19802 - DNA, 370 bp, Homo sapiens; identical to SEQ ID NO: 17938
  chr6:143268770-143269140
  hyper

SEQ ID NO: 19803 - DNA, 87 bp, Homo sapiens; identical to SEQ ID NO: 15134
  chr6:150284581-150284668
  hyper

SEQ ID NO: 19804 - DNA, 520 bp, Homo sapiens; identical to SEQ ID NO: 8616
  chr6:158402113-158402633
  binary

SEQ ID NO: 19805 - DNA, 241 bp, Homo sapiens
  chr6:159654657-159654898
  hyper
cgggcggccccgccccacgtcgcagggccgctcccactcctcctcggacccttacacggcgagctccagagggatgctccccacggccctccagaaccaggacgaggatgcccagggcagctacgacgacgacagcacagaagtcgaggcccaggatgtgcgggcccccgcgcacgccgcgcgcgccaaggaggcagctgcgtcccttcccaagcaccagcaggtggagtctcccacaggc

SEQ ID NO: 19806 - DNA, 63 bp, Homo sapiens
  chr6:159655003-159655066
  hyper
gcagcgccggggaagtcggagcctccttccaagcggcccctgtcctccaagtcccagcagtcg

SEQ ID NO: 19807 - DNA, 257 bp, Homo sapiens
  chr6:159655082-159655339
  hyper
acgaggaggaggacgcgggattttttaaaggcgggaaagaagaccttctgtcttcctctgtgccaaagtggccctcttcctccactcccaggggcggcaaagacgccgatgggagcctcgccaaggaagagagggagcctgccatcgcgcttgcccctcgcggagggagcctggctcctgtgaagcgacctctccccccacctccaggcagctcccccagggcctcccacgtcccttcccgactgccgcctcgcagc

SEQ ID NO: 19808 - DNA, 55 bp, Homo sapiens; identical to SEQ ID NO: 14140
  chr6:166268182-166268237
  hyper

SEQ ID NO: 19809 - DNA, 335 bp, Homo sapiens
  chr6:167039793-167040128
  hyper
cgaatctgtatcagcctcggcgctgcgaggatattgcatcaggctctttactcctgaacgccgttttagacgcctaagcagattgtgctgctgcctgttcttccccgttctgtgaattctacactgacttcaagtgcacgaatgagctacaagataaggtggaacctgccggccgggcacggcagacagcacctgatcagcgcctcggagggcggagctggggggcttctccactcgggactttgagggacccccgcggagcgctccgcgccactcggcggtctagctgcagagaaagcccctcctcacccggggctccctgtggcccacagggg

SEQ ID NO: 19810 - DNA, 423 bp, Homo sapiens
  chr6:167040325-167040748
  hyper
acccaggggtggcgaggcgggctcgggcgaccacggcccgctcagtgcccggcacctgcgcgccccgagggcggccgcattacctcgagccggctcaggctggagctcttggagcgcgacttcctgcgcaggtacacagagaagaacctgcgcacggcgaacttcttcatgctcaggtccatcgccccgcgcccagcccggagcagccgcagggccgggggacgcgcatccccggcatcccaggcgcggggctcaggtccgcgggcgggcacgcgtggccagggagcccggcacggcggccatgggcgcggggcgtggggcgcgagctgcggtcacaaagggcaggccgcgccggccaccgcggccggggccacaatcgctccctccgcctccttctccgcctcccctgcgagtaccagcgcc

SEQ ID NO: 19811 - DNA, 506 bp, Homo sapiens
  chr6:170124879-170125385
  binary
cggtcgccgctcctctcccgcctttgttctcgggtcgcccctctcgctggtggcgctccgagagagcagcggagccacctgcccaggccacgcttccccgagcatccgcagctgcacccgggggctgtcggcgcccgccccggagcgtgcgggaggcacagcgggaagaagtcgctgagattcggccctcgtggctttgcgtgcccgcgtggttgatgcctccgccgagaacgcggtcggccgggagccggggaggagcgtggacgccggcctggcaggtacccccgcgagaacgtgggagccggtgtatttcagctgcatttattactgatctcgggctgcaccagggcacttgtaggaccgcactaaaaacagcggaaagtgaggagccaagcctgggtccggggcggcccgccgtacagctggcctcacggattccactgcctgcgcctgcagatgacttgttctggagagtagagaatgttctcggatttaaagtacaatcc

SEQ ID NO: 19812 - DNA, 227 bp, Homo sapiens
  chr6:170339178-170339405
  hypo
cggggcctcccagcccttcacgcagcgctgacggggcctctgcccaccggccaccctggtctcaagacggagcccacgtctcctgcttgggctggatgagtgacccttccctgcggccatgaacagggagctttaaacgtgttgaggttggaccctgcccagcccggctgaaccccactctgtaggaggcgcaggcatcagacgccggggacgtcatggtggaggag

SEQ ID NO: 19813 - DNA, 229 bp, Homo sapiens
  chr6:170339543-170339772
  hypo
gaccaccctgagcctggtgacgtcacgggtggaggagaccgccccgagccctgtgacttcacggtggaggagaccaccctgagcccggtgacgtcacgggtggaggagaccgccccgagccctgtgacttcacggtggaggagtccaccccgagcctggtgacatcatggtggaggagaccgcccctgagcccgggtgcccctgatcccaggcactggatgggatcccc

SEQ ID NO: 19814 - DNA, 264 bp, Homo sapiens
  chr6:170598840-170599104
  hyper
cccttcttgttgacgaactcctgcagcttcagttcgaacaccccagagctccagacctgcacgggggagggcgggggcgtgaggacgcgggtcccgcccgagctagggggcgtgaggcctgggtggggggtgtgcggagagcctggaagggctcaggggccgagcgcgctcgctgcacggccggcgctggggtcgtcgcccccgggattcatcttccgggccgtggctggcgcggcccgtgccgctgtccgcccctccccgcgc

SEQ ID NO: 19815 - DNA, 447 bp, Homo sapiens; identical to SEQ ID NO: 15136
  chr6:17101827-17102274
  hyper

SEQ ID NO: 19816 - DNA, 192 bp, Homo sapiens; identical to SEQ ID NO: 15137
  chr6:17102346-17102538
  hyper

SEQ ID NO: 19817 - DNA, 201 bp, Homo sapiens
  chr6:26025540-26025741
  hypo
cgggattacaggcgtgagccaccttgccgggcctatatttcttaagctctatgtttcgttctgaagcttgaagtgggtggaagcaaactgatagaatttggagaggtggttaggcatcccgggaatgagaaacagcccgaagctgccactatcacaggctttggcattgctagaagttaacgtggcacttacagctaggcc

SEQ ID NO: 19818 - DNA, 214 bp, Homo sapiens; identical to SEQ ID NO: 14147
  chr6:26198924-26199138
  binary

SEQ ID NO: 19819 - DNA, 124 bp, Homo sapiens; identical to SEQ ID NO: 11792
  chr6:26330521-26330645
  hyper

SEQ ID NO: 19820 - DNA, 71 bp, Homo sapiens; identical to SEQ ID NO: 6238
  chr6:26331633-26331704
  hyper

SEQ ID NO: 19821 - DNA, 324 bp, Homo sapiens; identical to SEQ ID NO: 6239
  chr6:26331811-26332135
  hyper

SEQ ID NO: 19822 - DNA, 243 bp, Homo sapiens; identical to SEQ ID NO: 6240
  chr6:26332283-26332526
  hyper

SEQ ID NO: 19823 - DNA, 361 bp, Homo sapiens; identical to SEQ ID NO: 15154
  chr6:27218591-27218952
  hyper

SEQ ID NO: 19824 - DNA, 447 bp, Homo sapiens; identical to SEQ ID NO: 15155
  chr6:27218980-27219427
  hyper

SEQ ID NO: 19825 - DNA, 66 bp, Homo sapiens
  chr6:3228121-3228187
  hyper
cgtgcgcattgtctggggctgtggtgggggtctgggtatggggatatgggggaacagtgaagaaaa

SEQ ID NO: 19826 - DNA, 242 bp, Homo sapiens
  chr6:3228680-3228922
  hyper
ctgcccgaccctctccgggagtgcataacgcccctgctggtacccaggagccctctgccccgggggttgacttttgttgctcgctagtgatggagtgggagtggccggtggcgctgcactgaccgtccggagggcagaaagagggtggggtcccgggggcggggctgtcggcggaacaaagggctctcagaaacgtgggatacgctgtgtaacccagtatttaaaaccacacgacaggcgcc

SEQ ID NO: 19827 - DNA, 559 bp, Homo sapiens; identical to SEQ ID NO: 15160
  chr6:3229632-3230191
  hyper

SEQ ID NO: 19828 - DNA, 684 bp, Homo sapiens
  chr6:3457545-3458229
  binary
cgttgcccgtttcgcgccgggcggggcgggggaggaggagacgcgcgtagcaggggtcgccggccggcgacgggtcccggcaaagtcggcgtgcgctgagaacgtgtgggccgggtcttctctgaggctgggctcccgcagccgcgcgggccccccacccactccgcgcgcgccaggtctccgtgacctctgtctcttcagaggtgcccggcggtcccgctgcccgcgccccgctcccagtcccaagcccgagggtcttcagccttcgggaacaaccctctgcgctttttccaggagcgaataaggttgatttttgtgtccgtggagcagggtcaaggaggcgcctttgccaatttcaggtcgccagtcccccgcagtgtctggccacctgcgacccgccgcacccactcccaaatcgccatttcttcccccactcctaagtgcatgcgatgtaagcacgatgctgggatatatctccaacacaagttataatacacacagtataaacgtgatggcattccccaccccctccctaagatcttgtattcacgtttggaacgccgtgtgcacaggcgcacacatctatactctcacacaagaagacaaacctctccctcctctcctgctccagcgccaaccttgcccagccagcgctgtataaataacaccagccctgcggcaaac

SEQ ID NO: 19829 - DNA, 578 bp, Homo sapiens; identical to SEQ ID NO: 15163
  chr6:36354750-36355328
  hyper

SEQ ID NO: 19830 - DNA, 407 bp, Homo sapiens; identical to SEQ ID NO: 15164
  chr6:36355357-36355764
  hyper

SEQ ID NO: 19831 - DNA, 370 bp, Homo sapiens; identical to SEQ ID NO: 15166
  chr6:37666475-37666845
  binary

SEQ ID NO: 19832 - DNA, 218 bp, Homo sapiens; identical to SEQ ID NO: 15167
  chr6:37666866-37667084
  binary

SEQ ID NO: 19833 - DNA, 180 bp, Homo sapiens; identical to SEQ ID NO: 14180
  chr6:43243254-43243434
  hyper

SEQ ID NO: 19834 - DNA, 558 bp, Homo sapiens
  chr6:43243475-43244033
  hyper
cccaccactgagggccctgggggtcaccaaacatgcccccccatttccagctcttcccacacccccacccccgaaaataaaactcagggaccaacatctgcttcctttgcacttgctccgtcgaccccgctccccgctcggaggggcttccgtgggggagggggcggggctccgggccctcagagttctcagtgtcgagcgaggagaggggctggcccctgcccccggagaagcgggactggtaggagagagaaactcagcaccggggcccagctgagccccttcctgcgtaaggagacgccttctaattgcggggtgggggcggagtaggggagggataggaaggggattagcgagaggaccctcgcggaggtcctgagtcccagtcggtttattcctgagccttcccctcccatcgtaagtccttccctcgaccccccattttgtactgcaataatactgtattatacgcttgcactatttcccgaccctggccagcggaagcatgcacgaaaaactcaaaaccacacacacgctcacacgcacacacacgcacac

SEQ ID NO: 19835 - DNA, 293 bp, Homo sapiens
  chr6:43641288-43641581
  hypo
cgccacacggagcggccagctggcagggggtgggccgggtggcctccagccagctctttgggaacaccccagctctagcaagaaccaagtctctttcctaaaccagccccttcctacctctcctgaaggggcagcaggaggagcgacacagcagcagacaaagcatggctccgccaggccccagcggagcctgggcccatgcatggcagcattaaacgagactcccctgcaagggaatccatttccttcgtagcctgaactccccctcccgctcagcgtggccttttgcaacc

SEQ ID NO: 19836 - DNA, 402 bp, Homo sapiens; identical to SEQ ID NO: 9875
  chr6:4775543-4775945
  binary

SEQ ID NO: 19837 - DNA, 78 bp, Homo sapiens
  chr6:57085548-57085626
  hypo
cgggggagcgatagatttgttctacatccttactgtagtggtggttacatgagtctaaaattcgcagaactgtacatc

SEQ ID NO: 19838 - DNA, 82 bp, Homo sapiens
  chr6:5997308-5997390
  hyper
cgactcactgggtttgatttatgaactgttacactagcaattgtttacacattgcatttcagagcccgggcccaccctcccc

SEQ ID NO: 19839 - DNA, 113 bp, Homo sapiens; identical to SEQ ID NO: 6259
  chr6:5997401-5997514
  hyper

SEQ ID NO: 19840 - DNA, 162 bp, Homo sapiens
  chr6:5997899-5998061
  hyper
gggctccggcccgcctgaggcgggggcagacggccggccactggcattgtctgcctgtgcgagcaagcccagttcctctaaatctcaaacagaaagaatctctgctttgtaattaatttaaaaacaactttcattttctcttttttaaggaagcacggtttc

SEQ ID NO: 19841 - DNA, 127 bp, Homo sapiens
  chr6:7891513-7891640
  hypo
cgaacgtggacggtctccaagttcgtccagtgaacattctacaaggctctaccccatctctttgcagaacgggctctggggctgccaattcagatttggccatctcttcaaaataaacaaagcagcc

SEQ ID NO: 19842 - DNA, 94 bp, Homo sapiens
  chr6:7891873-7891967
  hypo
cggaatgttcaaggcccagagccagctgctcccaggttggagccagggctttgcagtgaccacaccacggagcgaagaacttgataaagtggtc

SEQ ID NO: 19843 - DNA, 124 bp, Homo sapiens
  chr6:85478295-85478419
  hyper
cgtgaacatcagcctacgctgagtcaccaggcagcgccgcacaaatgggctagggcttcccctttccgcgattcctgtccctactctttcccactctctttcttctctttgcacatacttttct

SEQ ID NO: 19844 - DNA, 59 bp, Homo sapiens
  chr6:85478456-85478515
  hyper
tttatcttgtacaagtttataaagcctacggtagtaaattcaggcgtcccagggctcaa

SEQ ID NO: 19845 - DNA, 102 bp, Homo sapiens; identical to SEQ ID NO: 15187
  chr6:99276279-99276381
  hyper

SEQ ID NO: 19846 - DNA, 275 bp, Homo sapiens; identical to SEQ ID NO: 15188
  chr6:99276430-99276705
  hyper

SEQ ID NO: 19847 - DNA, 400 bp, Homo sapiens
  chr6:99276781-99277181
  hyper
gtgcacttgtacacttcagaaggatttgcattcgtgctgtgtgcaggcagaataagagaactgaagtccaacttcaaccaaatacgcctgtttatcccagggctggagcaacagccctagcccttgaaaatggcttcagtgaaatagctgagtacaccctcctcccacttccccagtccgcctctgtgcgcaggtgtatgttagtgcactcgtccctagcttgccttcctcttcgaaaattgctccagaggatgagagaagccaggagctctagcaagagcttcatcccagtacatttccaaatgctttagagctaaggaggtttctgttgaaatcactttaatttatcaaagagttgtcatcccctactggtggccagccatccacctgctttaaggct

SEQ ID NO: 19848 - DNA, 61 bp, Homo sapiens; identical to SEQ ID NO: 14198
  chr6:99292143-99292204
  hyper

SEQ ID NO: 19849 - DNA, 109 bp, Homo sapiens; identical to SEQ ID NO: 14199
  chr6:99292521-99292630
  hyper

SEQ ID NO: 19850 - DNA, 754 bp, Homo sapiens
  chr7:100202089-100202843
  hyper
cgcgggtggaatgggcggcctggggttactgggacggtgagtaactgccggcccccgtccgcaatcgggctccctccgtcgggcgcgagggggcaccccagggctggggggactaggttcctccaaccccggggggcccctacacccagccctgggctcccgattgcggtcccatcaccccctcctggcggcagaagtctcccttgcaatgtttcaggcggggacctccctaaaggggtcctcgggggctgtgccccaagtcgaggacaccctctccagcctgaaaggggactctgctgcagggccggggagatgggatctcctaggggaagaggcgcggtgcggccgcgggtcggggaggggccagaagggggcgtccagccagttcctcctcccgcttccaccgcccgccagtgcgccctgcggccccagacttccccgagccgcgctcctcccggccgctctctgttaacctgcccccatcttacctccccttcttctcgtcccctcatcctgagccccagacatccgagctgcctgccggggctcccagcctagagttctcctgaagctgaccgagggtctccaccgccccccacccccgctcctctctcccctccccagagcaccaattttgcggggggcggctggagaaggcccagggaaccctgaccacgcccaactggcccgagtccgattaccccccgggcatcagctgttcctggcacatcatcgcgcccccggaccaggtacc

SEQ ID NO: 19851 - DNA, 278 bp, Homo sapiens
  chr7:100203058-100203336
  hyper
cgcgggcctgtcacttgtgagtgcgccaggacttgaccttgccaaccacgacgaccgacacccctgcagggtcccatgggtgtgtgtggtcctccgtgctgtggtgtgaacgccttcaggaggggggcccagaggacgcgggaggtgggagtgggagctgctgcaggcacccagtaggagatgaggtgcaggcgcccaggggtgtcccgccgcgcagtccccgcctccgcccgccgccaggtcatcgcgctgaccttcgagaagtttgacctggagcc

SEQ ID NO: 19852 - DNA, 106 bp, Homo sapiens
  chr7:100203366-100203472
  hyper
cgtgttcaacggagccgtgagcgacgactcccggaggctggggaagttctgcggcgacgcagtcccggggtgaggggcgggacctgggcgagtccgggagagagtc

SEQ ID NO: 19853 - DNA, 50 bp, Homo sapiens
  chr7:100203505-100203555
  hyper
cggggttcagctaaagggacgggatctgaaccccagggctccaaaccggc

SEQ ID NO: 19854 - DNA, 831 bp, Homo sapiens
  chr7:100402457-100403288
  hypo
cgagttgacacattgttaccgtgagagccgggcctggaatgcagatagatgcacaaagatagctagaagtgagaggcggaagcgcgatggcccagggctgtgatggcaggaggaggtgaggcgggcaggctggccccaaagagtccttgggtcctcagctccatggggctgtgactgctcctctggggcccttctaggcatggcatgagcgcagtgcaagaagacagcattggcacccgaagctgaccccaaaagcccctggagaccccgtgggcctgactccagctgccccgctctcccagccccactccagctcctgccactgcttactcagcagagatctggctgaccagctcgaaggagccaaagccagcggctgcgaaactttcttcgtatcttcccattttgatggcccgaagccactcgcccacagagccaaaagctgagtagtgaggctgccgctggtccaggagagggtgtgaggccctagggggcaaggatggggaggaatgctgagtaccaggcccaggtccgggggaggaggtggaacccagccttgcagaggcggacagaggccctcccacccaacaccaatgaacggacacttctgggcaaggagtgggggcagagagcgggaaggagggcccattctctgcagtcctcacccgccattctcccgggccacgattttgaggctggcggggttccggatcatcttgtccagggcgctgaccacctgggggaagcggggccgggcattccggtctttctgccaacagtccagcatgagctggtggagggaggtgggacagtctgggggcgggggcagcc

SEQ ID NO: 19855 - DNA, 487 bp, Homo sapiens; identical to SEQ ID NO: 15192
  chr7:101460542-101461029
  binary

SEQ ID NO: 19856 - DNA, 332 bp, Homo sapiens; identical to SEQ ID NO: 18893
  chr7:101566736-101567068
  hypo

SEQ ID NO: 19857 - DNA, 82 bp, Homo sapiens; identical to SEQ ID NO: 10746
  chr7:101627660-101627742
  hypo

SEQ ID NO: 19858 - DNA, 282 bp, Homo sapiens; identical to SEQ ID NO: 10747
  chr7:101627846-101628128
  hypo

SEQ ID NO: 19859 - DNA, 90 bp, Homo sapiens
  chr7:116759594-116759684
  hyper
cgcttatttttctgttctagatatttgaatggtggtattttcgcaaatacggaacttcattcattgaacaagtctcagtaagccacttgc

SEQ ID NO: 19860 - DNA, 274 bp, Homo sapiens
  chr7:120969353-120969627
  hyper
gggcggcgctcctgggactggcccgcttgtgcgcgctgtgggcagccctgctcgtgctgttcccctacggagcccaaggaaactggatgtgagtatggaggtggcagggaagcatcgggtaggtggcaaaaggggtgcccaatcctagggaactttcaactgaggctgggggagaagggcggggacccttagacgagtgacctaatttttcggaaaacatctggaattggggagcggcttaacgctacgggcggccgtgtcttacaggtggttg

SEQ ID NO: 19861 - DNA, 227 bp, Homo sapiens; identical to SEQ ID NO: 11837
  chr7:121946146-121946373
  hyper

SEQ ID NO: 19862 - DNA, 277 bp, Homo sapiens
  chr7:127291492-127291769
  hyper
cgaagaacgagggtcactctcccctgtatacgtggcatgtccttcctctgagacatttattcctcccaccaacaaacattaatggaacgcctcacaagtgctagaccccagcgacacaaacaagggcgaggcacactctctgactacaaaaagggcgcgcggccgcgtggcaggtcaaagcccacatcggtaggaggttccacaaagctctgattttccaagttctctccatacttttagccaaggtaaaatgtcggaagtcgagtggagcgggtac

SEQ ID NO: 19863 - DNA, 194 bp, Homo sapiens; identical to SEQ ID NO: 16053
  chr7:129470923-129471117
  hypo

SEQ ID NO: 19864 - DNA, 158 bp, Homo sapiens
  chr7:130741985-130742143
  hyper
cgttgttttctttgatctccttagactctctgcctcctagagaatctaatccacatgaactgcgctcctggatcttttacataactgtggtttttcacaaggttctttaaacaaaggtccacgtgatagatttctgctcaagcttagttccaggaaac

SEQ ID NO: 19865 - DNA, 101 bp, Homo sapiens
  chr7:131240439-131240540
  hyper
cgactctgtacctgccccagcacgggctcaaggagttgagcctgcacacattacttagaaaaaacctctgcaaacgggtaagtacatcgcccgcgtgggcc

SEQ ID NO: 19866 - DNA, 198 bp, Homo sapiens; identical to SEQ ID NO: 12920
  chr7:139929854-139930052
  hyper

SEQ ID NO: 19867 - DNA, 362 bp, Homo sapiens; identical to SEQ ID NO: 12921
  chr7:139930346-139930708
  binary

SEQ ID NO: 19868 - DNA, 209 bp, Homo sapiens; identical to SEQ ID NO: 15200
  chr7:140103670-140103879
  hyper

SEQ ID NO: 19869 - DNA, 94 bp, Homo sapiens
  chr7:143105734-143105828
  hyper
cggcttctgcaggggggtgctggccgggccccgggaaggggcggggcgcgggggttgggggcgcgggggcgggggtcggtaccttccttggcgc

SEQ ID NO: 19870 - DNA, 454 bp, Homo sapiens
  chr7:143105844-143106298
  hyper
cggggcgcagagcagcagcaccagccctagccccaggggccagcgccgctccatagctccgggccgggacctgggacagtggcccggatggcagcgccaggttgcaagggactaggagagccgggcgggccgggcgggggcggggggcggggccagcgccgggggcggagtcccggcctcacctggttcacctccttaaagggacagtagggcaggaaagaaacttgctagactggtaatcaaattcaagaaccggaggcgtcttgacccgaatgagactgcgggcgccgcctagtaggtgggattaagaattgacgaaccttttcccaattctaatcctaaactcaacccaatcttgatccagcttttaacctaattctacctctgacttgaattacactcctatattcctctttctgtctttgtgcaggccccagagctgggtaatagggcc

SEQ ID NO: 19871 - DNA, 298 bp, Homo sapiens
  chr7:148394984-148395282
  hyper
cgaagtacacgtgaaaacaatactattttatatcacgactcatgccatccgtatgtgtaatcaaagccttctaagtcttgatatgtccttacaaagacgaaggatagagtgaatgtcaaaatttgccaaacaggagttactgaaagtctgaaggggaaagcctagttaggttttatcttagaagtgatttttaaaacgaaacacgcagataagctcgagctttctggagccgattcctaaggccttgcaggtggtaagggggtcgagaattggctgaggttcctcggaagtccgcgcc

SEQ ID NO: 19872 - DNA, 437 bp, Homo sapiens
  chr7:150075217-150075654
  hyper
cgaatctcagtccccagttcctgctgtgctactgaggctaaaccgcagccgggcctgtggcaaatgtttaatcagctgttgactgaagaaaataaggtccgcctgcccaacagcaaccgtttgtagagtctcagaggcccagcttctgtctgtatctacctcatgccccagaggcagcttctagcagctccggagagcatcctgccagtgggagttgacccagctgcgccccctttgagggagaagtgtgaggaatttccttacaatggggtggggagttgcgaagatactccttcctgaaggtctggcagtctggaccggggtggcaactgggcggagatgattccgctcacgggaaccctacctagtaacccgacctagtaacgtaacctcagagccgttcctcagctagaaaacaaagggattaggccgggcgc

SEQ ID NO: 19873 - DNA, 846 bp, Homo sapiens; identical to SEQ ID NO: 9912
  chr7:150671471-150672317
  binary

SEQ ID NO: 19874 - DNA, 100 bp, Homo sapiens
  chr7:151136933-151137033
  hyper
cgaaggcggagccccactcggtttccttggggttgagggacgcactcaccttccccgagcgctgcgccatggtgcgccccgccccttccgcgggtccccg

SEQ ID NO: 19875 - DNA, 121 bp, Homo sapiens
  chr7:151137113-151137234
  hyper
gtcgggcgtgctaagcccgaggggccaccaggcggttgggacccgccgcggccaccctgtgccaccgcgagtgcagcccgccctgcccggggtctccctgtgctctccgcgtttagctccc

SEQ ID NO: 19876 - DNA, 772 bp, Homo sapiens
  chr7:156433208-156433980
  hyper
cgagcctcgacgggaacgcacctgcgtctagacgctgacgccgtgcgcggggcgggggccggcgagcatgcgcagtgtggtgtggacagggcgtggttggcaagcatgcgcaatgtgggccgggcggggctggcgagcatgcgcagtatggggcggggcggggcagggctggtgagcaagcccgcggggagcgagcgcggaggcgggcgttgctacggcaacggtgggcggccagggagttgcctgagggaaaaggggcagacgtccctgggttccggtgttcgcggaggagtcgaggcacggagaggcttcgggggagggacggaaagaagggtggcccgccaggcgggcggggtccatggattcggggtgagggccgtccgcggcctcgctttcgcctcctccgagccgggccggcgatggccgcagctgtgaggcgaggtcgggtcccgtagcggcgcgcagcctccttgggggactcggggtcctggttagtttccacagctccttctatctgaggggtacgaatttacggctgcctaaagccttagaacagtgatcccacgtcggtaattttagaacccggtaggaccggctgccatcaggggccccaggtgcagggtggtgtcagctttgagaggaattggagcctcgtcaccgcgcgcttcctgcatgagtggaacctcagaaaacggtcagcggggttcagaaggcaggagataacaccaagaccctacgtaggattgcatctttacgtcgtaggcttggtctc

SEQ ID NO: 19877 - DNA, 650 bp, Homo sapiens; identical to SEQ ID NO: 9915
  chr7:157202474-157203124
  hypo

SEQ ID NO: 19878 - DNA, 788 bp, Homo sapiens; identical to SEQ ID NO: 11847
  chr7:158066162-158066950
  hypo

SEQ ID NO: 19879 - DNA, 219 bp, Homo sapiens; identical to SEQ ID NO: 11848
  chr7:158067069-158067288
  hypo

SEQ ID NO: 19880 - DNA, 294 bp, Homo sapiens
  chr7:158277387-158277681
  hypo
cgtgacttttgtgactcggtttcttcctctgagcacggcgattcccaggttcctccgcgtcagtgtgccggtgcttcctgcctccctttccacggccggacagcactccaccatcacagacgtcctcggttcctggtggttttctgccctcttcagtggagaaagggcttggaatagaagaagctgcagttggagacgtgaaggctgtggctgtgacgccgccacggggagtcggctgcaggaggagcctccccaccatcagcgtggccggcggagtgagccacgagcgcaagg

SEQ ID NO: 19881 - DNA, 275 bp, Homo sapiens
  chr7:158277727-158278002
  hypo
cgggagggcacctgcggagggaaggcagacaccctgcaacggcccgcaggcccgtgtcacctgggccaccgagcgcagggcttgtgggtcgtcacagcataattcagccttgagccacgagacacggagccgacaggtgtgtagctgagccatcctcccccacctgtcagtcaccattcttccacctccctccaaacggagagcgcgacttgctcctcttgccctcctggacgtccgggatttccgcccctgggctccagcgctatggtgtggtc

SEQ ID NO: 19882 - DNA, 272 bp, Homo sapiens
  chr7:16793071-16793343
  binary
cgtcatctgccagggccaagaatccagaggtgctgtcatatttctccttgccagcgtggatctcctccgagccccgccctccctcctcacctgctcctggggaaactacaccaaggccgccgctctggcctggggctccctcccacacggccttggccctctccccctcgccccgggaccgctccgcccctcccggatcccggtcggcggagcgcatttatttgcatatttctacctttgttccctgccagcggccaatcagcgcgcggggc

SEQ ID NO: 19883 - DNA, 182 bp, Homo sapiens
  chr7:16793380-16793562
  binary
cggctcagctgcggcggccgcaggttccaaagcgggtccgagccgccgccgcgcgcgcgccgcgcactgcagccccaggccccggccccccacccacgtctgcgttgctgccccgcctgggccaggccccaaaggcaaggacaaagcagctgtcagggaacctccgccggagtcgaatttac

SEQ ID NO: 19884 - DNA, 148 bp, Homo sapiens
  chr7:1708913-1709061
  binary
cggcgagcggagagcgtgccgggggtactgaggccgggaaccagaggcgggcgggggacaggaagcggggagggggcgccggcggggacgcgcgggctgcgcggggactggagagggtccccaggcgccggccgttctgcgaacgcgg

SEQ ID NO: 19885 - DNA, 216 bp, Homo sapiens; identical to SEQ ID NO: 18009
  chr7:17339346-17339562
  hyper

SEQ ID NO: 19886 - DNA, 260 bp, Homo sapiens; identical to SEQ ID NO: 18010
  chr7:17339591-17339851
  hyper

SEQ ID NO: 19887 - DNA, 128 bp, Homo sapiens
  chr7:19183520-19183648
  hyper
cggtggctggtggcgaagctgcagggcgcccaaggccccctgcggcccaggagtgacccgagtgcactcgccccttactctggcctggggcctgaagaaggcactggaacacggaagctgatgctgca

SEQ ID NO: 19888 - DNA, 313 bp, Homo sapiens
  chr7:19183746-19184059
  hyper
aggtggcgaaggggagggagaaaggaagagagagggcttgcgcgcgggagagaggaagggacgggagggagagggaatggaagacaggaagggtgtcccttctcagaggtcgcactttgtcagcagttcctctcgactgctctgccttccatttttcctttcctcagttcctggacaagcctcggaggaccaggcagaaccctctggctagcagaaaagctcgcacccccgcacccttgcggcgtctgcttcagaccctccacgcaggcgcccgctggagcgcctgctggggatggcgtaccaccgacccttc

SEQ ID NO: 19889 - DNA, 46 bp, Homo sapiens; identical to SEQ ID NO: 17051
  chr7:1970797-1970843
  hypo

SEQ ID NO: 19890 - DNA, 88 bp, Homo sapiens; identical to SEQ ID NO: 17052
  chr7:1970921-1971009
  hypo

SEQ ID NO: 19891 - DNA, 276 bp, Homo sapiens
  chr7:20369119-20369395
  hyper
cgttgtgcggtccacacctgaaagggggagtttcgatgttgtggtttattaaccaggtactttccattcactcagtcaacagaaagaaagagagagaccgcgcctcctactttttttttttttttttttttaactacaaataaggagacggaaactattaaataagaaggggggaaactcccgcatatttcaccttgacctggctggactggtctgctgcctctaagaggcgggtgttgtattaaaatgagaggtcaaactcctcgaatgggaatc

SEQ ID NO: 19892 - DNA, 255 bp, Homo sapiens
  chr7:21293835-21294090
  hyper
cgtagcagagttccttggcaaacgacagagtgccctctgttgatggaaaaagtaatgcgcagcggaggatacagagagaagctttcctactagaagtcgcagagctgcccgttagccgatacacatttgtgatgtaaaaatcacattttaaattataaaaatattgatttaatgaatattgagagagtacagatgattgcaaattcagacacaattgttggaattatgtatttagatagatacacacataaacac

SEQ ID NO: 19893 - DNA, 197 bp, Homo sapiens
  chr7:229498-229695
  hypo
cgccgtcctcacgcaaacagtccagaccacagcggtggcacatcgtgagaatgacagatgggggatgagcaaggtgccaggggttttaaataagacggccgcgttttgccaaacacctaccccacggggctggaacaagtgacgcagaaatgggcaggaagcgtggaccgcgaactcggggaccaaaaggtcgtgcc

SEQ ID NO: 19894 - DNA, 523 bp, Homo sapiens; identical to SEQ ID NO: 8696
  chr7:23507580-23508103
  hyper

SEQ ID NO: 19895 - DNA, 290 bp, Homo sapiens; identical to SEQ ID NO: 6277
  chr7:2517249-2517539
  hyper

SEQ ID NO: 19896 - DNA, 189 bp, Homo sapiens; identical to SEQ ID NO: 11854
  chr7:25892243-25892432
  binary

SEQ ID NO: 19897 - DNA, 338 bp, Homo sapiens
  chr7:25894678-25895016
  hyper
cgtttatatagaccttgcagacgtctgtgcaatatccaccactgaacacgtgaggtcgtactcaagtctctctggcccctggtaatgtgactcccttcctttatttgcatgaatcgcctggattgggtgtcaggtttttaaaacgtcaaggtttacgcctattgttgtcaaccaatcagcatcctactttgacgtgattggcttctactgtaggtgtcaatcatccaaaatttgcatactactcctcaggccgccgggagcctgtcagtcggctgtggcagctggaagagaaggaatcggacggagaagaatgaaaaatcactttgctttcgcaaagc

SEQ ID NO: 19898 - DNA, 225 bp, Homo sapiens; identical to SEQ ID NO: 8705
  chr7:26192423-26192648
  hyper

SEQ ID NO: 19899 - DNA, 112 bp, Homo sapiens; identical to SEQ ID NO: 8706
  chr7:26192748-26192860
  hyper

SEQ ID NO: 19900 - DNA, 91 bp, Homo sapiens; identical to SEQ ID NO: 8708
  chr7:27135176-27135267
  hyper

SEQ ID NO: 19901 - DNA, 63 bp, Homo sapiens; identical to SEQ ID NO: 14279
  chr7:42267546-42267609
  hyper

SEQ ID NO: 19902 - DNA, 139 bp, Homo sapiens; identical to SEQ ID NO: 14280
  chr7:42267822-42267961
  hyper

SEQ ID NO: 19903 - DNA, 52 bp, Homo sapiens; identical to SEQ ID NO: 6279
  chr7:42927739-42927791
  hyper

SEQ ID NO: 19904 - DNA, 412 bp, Homo sapiens; identical to SEQ ID NO: 6280
  chr7:42928175-42928587
  hyper

SEQ ID NO: 19905 - DNA, 219 bp, Homo sapiens
  chr7:47621704-47621923
  binary
cgagtagcgcgcgggcgggcccgtcctcctggctggctgccggcgcccgcggcagggccccctcgaggcggcgcgggcaatcgccacggccggcccccgcgcccgcgccccgagcctggcgggtcacctggcctcatcaccctaacaatgcagcgcgcctccaggcgcccttcaccggggtcccccgccctgccgaggtgcgccctgggacctcccttc

SEQ ID NO: 19906 - DNA, 173 bp, Homo sapiens
  chr7:561245-561418
  hyper
ggggttagaggactcggtaagacggtgtggaaggcaaggaggaaggtcgcgttgtattggggatggggtacccgtccctcccagcttgagggatcctgggggtcctcgccgcctctgagggcctagatggctgcttccctcggctcccctgcccggcctggagctacgggtgc

SEQ ID NO: 19907 - DNA, 137 bp, Homo sapiens; identical to SEQ ID NO: 17097
  chr7:808392-808529
  hypo

SEQ ID NO: 19908 - DNA, 242 bp, Homo sapiens; identical to SEQ ID NO: 17098
  chr7:808577-808819
  hypo

SEQ ID NO: 19909 - DNA, 382 bp, Homo sapiens; identical to SEQ ID NO: 17099
  chr7:808848-809230
  hypo

SEQ ID NO: 19910 - DNA, 107 bp, Homo sapiens; identical to SEQ ID NO: 15253
  chr7:87936014-87936121
  hyper

SEQ ID NO: 19911 - DNA, 208 bp, Homo sapiens; identical to SEQ ID NO: 15254
  chr7:87936206-87936414
  hyper

SEQ ID NO: 19912 - DNA, 372 bp, Homo sapiens; identical to SEQ ID NO: 8733
  chr7:907709-908081
  hypo

SEQ ID NO: 19913 - DNA, 156 bp, Homo sapiens
  chr7:96632634-96632790
  hyper
cgatttgtaaacgtgtagatcgtgttactggttcgcgtgttaaagtgcacctcttgttaaaaggtggggaacagggcacgccacttaaaaatgaattcagagttactgaaccggctccccagactcaagaacttaagcgcaacgggctgggaaaag

SEQ ID NO: 19914 - DNA, 177 bp, Homo sapiens
  chr7:96632819-96632996
  hyper
cctgggaactcggaggaaactcgcgggcagcgagcttcaggtcttctgatacattgaaggaaagaaagaaagacagaaaaagaaaaaaacaaactgtcctggagatagctagacatccagggctgggagctgggaaaatcaattggcataagccgctgccggcgggcttcgcgcaac

SEQ ID NO: 19915 - DNA, 235 bp, Homo sapiens
  chr7:98030416-98030651
  binary
cgggcggccccacctgaggcgggcggggcagacgggggcggggccgcagggccggaggggcgtggcgtacccacctgaggcggcctggtgagcggggcccggccggggtgggcggggaggaggcggggccaggcagctggaatgggcgtggccagagggaagcgggccccccgagtgggcggggtcaccccacctgtggcggacagggcagcgaggccacggtgcgccccctcgc

SEQ ID NO: 19916 - DNA, 154 bp, Homo sapiens; identical to SEQ ID NO: 15258
  chr7:99680237-99680391
  hyper

SEQ ID NO: 19917 - DNA, 245 bp, Homo sapiens; identical to SEQ ID NO: 15259
  chr8:101661596-101661841
  hyper

SEQ ID NO: 19918 - DNA, 62 bp, Homo sapiens; identical to SEQ ID NO: 15260
  chr8:101661991-101662053
  hyper

SEQ ID NO: 19919 - DNA, 33 bp, Homo sapiens
  chr8:102504696-102504729
  hyper
ccactttctgctctgtgtctgcccattgccacg

SEQ ID NO: 19920 - DNA, 143 bp, Homo sapiens
  chr8:102504760-102504903
  hyper
tccgagctcgggccccatgtgaggggcccccccttatcccacctttccggctaggtgagggcgcgagcgggcgagcgagcgagagtggtgaggggggacggaaaagcagaattacctgtagctcttgttctgccatctcgggc

SEQ ID NO: 19921 - DNA, 41 bp, Homo sapiens
  chr8:102506365-102506406
  binary
ggagagggccggtgccccaaggccgcgggccgctgggcctg

SEQ ID NO: 19922 - DNA, 211 bp, Homo sapiens
  chr8:121824481-121824692
  binary
tccagccgccgcagcctcggcggtcacacgccacccgcccgcccagacctcccctcctctgtccccagagcgcacgacgccgcggggacagcttcccgagcgccttccccgtcccgcttctctccagcccaccgcagccccctttcttcccagctcccccactccgtgggcgcccacactgcaccttcgccgggtgcgtgcgtcccgcctc

SEQ ID NO: 19923 - DNA, 233 bp, Homo sapiens
  chr8:123830706-123830939
  hypo
cgatgctggacccgctccctcctccctctctgcctagtttctcgcccctcagattaggctctgtctgtggctagcttgaggggtggccatgaggcctaaatgagggcgtatctatatggagacagcacttggcctggggctctcccacattccctgttagtctctcacacaggcacaaaaccttgctttaaaaatgtgtcttacgatgaaacttggcatccaggacgcgcccc

SEQ ID NO: 19924 - DNA, 79 bp, Homo sapiens
  chr8:124778505-124778584
  hyper
cgtaaaggaaggacattattgctaaacgaaaaggtgaggtgctgtaatgagtgtcacatgtggagtcagtctagtgagc

SEQ ID NO: 19925 - DNA, 50 bp, Homo sapiens
  chr8:141559645-141559695
  hypo
cggctaacttgccaccgtaacacagcagcctttaaaccgcgctcacgctg

SEQ ID NO: 19926 - DNA, 35 bp, Homo sapiens
  chr8:141559724-141559759
  hypo
gatgcgatgctgtccccgtaaagctgctgagcagc

SEQ ID NO: 19927 - DNA, 172 bp, Homo sapiens
  chr8:141613224-141613396
  hypo
cggatggtgcgggttgactcaggcccccacggcggcgtggcggagattaaagatggggtctaatctggccctgtggacccggctcagcagacgatggaatcccagatctcatcgggaagtctgtcagccaaaaacacacacctcaaagcggagtgcgtggtgcctccacacc

SEQ ID NO: 19928 - DNA, 813 bp, Homo sapiens
  chr8:142139026-142139839
  binary
cggtcccccggcggtgaccccgcgcgcctgtggccggggatcgcgcccgagctcaggcaggtgccctggagcagcgccctgctcccctcccctcttctctcctctccccgcccggggcccttggtgtgagacatgtcttttgagagctgcgaacttggtccgccggccgggaatctgggggtgccgcccctcggagagtctctggggcctctctcttcagtcgctcccatcttgggcaggtgcttctgaaggtggggtgcaccagacaacgggcggaagccgccggagcctcacggtctagcgggcccagccctcgctgctgaaatgatttcattctttatgctgggatgtgttgtcccctgagtagtgggttttgcaccaggcacagaataacgagagagcaatcttagagttagccgccggcctcgcgtattctgcatgaacccctttgcgatgaagcctatagctatttttctcccttgcggtaccacccccacccccaacccttcctccatctctgcaccctcgcagccaaagtgacaacttcatctcccttctgctgggaaagcggcagttttggaaattctcgttttcctttttcttccccagcttttcttaattctgtaacgctggctttccctggaatccatctgtgtctctggtttcctcctggtccgcctgtctgtgacaccgtgactgggtcatgttacctagagatcccggcgtcactggccagccgtctgcacaggtccgttcatctctttgcagacaacagcatagaaaggcagagaggcttctgagtatttaaatgac

SEQ ID NO: 19929 - DNA, 69 bp, Homo sapiens
  chr8:143483659-143483728
  hyper
cgcgctgccccacacagccgccaccagacacgtgtggctactgagtgtcggacatgtgaccactggcac

SEQ ID NO: 19930 - DNA, 108 bp, Homo sapiens
  chr8:143509044-143509152
  hypo
cggttcttcccacgtgggatattctggctgtacgcgcgtgaccgtgactgtggggactggcccagggcttgactgtggggactggcccagggcttttcagggttggag

SEQ ID NO: 19931 - DNA, 296 bp, Homo sapiens
  chr8:143556722-143557018
  binary
cggcccctccccacccgggccggcctcggcgggcttagcacccccatgacttacccgtccaggccacgagcccctgccctgccctgatccccgccctctggtttccccccaggcggctggaagctgtggtccctgtggggcgaatgcacgcgggactgcgggggaggcctccagacgcggacgcgcacctgcctgcccgcgccgggcgtggagggcggcggctgcgagggggtgctggaggagggtcgccagtgcaaccgcgaggcctgcggccgtgagtgcgggcggggcggggc

SEQ ID NO: 19932 - DNA, 284 bp, Homo sapiens; identical to SEQ ID NO: 7577
  chr8:144359694-144359978
  hypo

SEQ ID NO: 19933 - DNA, 91 bp, Homo sapiens; identical to SEQ ID NO: 7578
  chr8:144360545-144360636
  hypo

SEQ ID NO: 19934 - DNA, 538 bp, Homo sapiens
  chr8:144461002-144461540
  hypo
cgggcggaggcaccctggggaggggaggcccagctgcgggaaccgtgggaactccacccagcctgacccaacactgcaggtacgactcgcttactggggtcccggcccagcagcgtgccctggccttcgagaagggcagcgttctcttcaacatcggtgccctccacacgcagattggggcgcgccaggaccgctcctgcaccgagggtgcccgccgcgctatggaggccttccagagggccgctggtgagggcggcccgggccgcggtggggcacggcgcggtgccagggtgttgcagagccccttttgcagggcaggagctggggagtggttaggacatcagtccctcaggtagggggagtgagcacatcaggtccatatgtgtcccaggagcatccctagctggccgccctgagtgctgcatggggcagagatgggcaggtacagggccctgcctgtgtgagcacccctccctccgcaggggccttcagcctcctgagggagaacttctcccatgcgccgagcccagacatgagc

SEQ ID NO: 19935 - DNA, 93 bp, Homo sapiens
  chr8:145692498-145692591
  hyper
cgcggcggagggggctgctggcaggtaccacctgccccggccttcctggctttcacagccctgctcggattcttgtctccttcgcagtctggc

SEQ ID NO: 19936 - DNA, 77 bp, Homo sapiens; identical to SEQ ID NO: 7581
  chr8:145698674-145698751
  hyper

SEQ ID NO: 19937 - DNA, 429 bp, Homo sapiens
  chr8:145733644-145734073
  binary
cggacaccgaagggcgtcacgggcagtggctggcggtgtccttctgagctaagctgggtcctgacctttcacacttccctcctaacttccatggctctgtcaccgccttacggaggagctgaagccacagacacagcaaggttggggtccgcaccggaagtatccagtggtagacggcggaacccttaagaaacggacgccttcatgcgggcggctggagaagcgggggctgggcactgcagcaaccacgcttcggctgacaccaggaaggaagcacgcctggagcggatccgaaactactgagaggggccagggctggccgtgggcgcaggccgatccttacattcgaggccggcccagctctgtagcttccccctctgggcctctcacccgcgcaggacctcggtgggagcgcgcacgtggcggggc

SEQ ID NO: 19938 - DNA, 287 bp, Homo sapiens
  chr8:17940762-17941049
  hyper
cgtcaagaggctcggacgttacgcatgttcagtaaacaacagtgtaacctctggctaaatattttctcactctaggtctacttcctcttctgtaaaatgaaagagtcacgctcgtccctcactgtctcttgcagttaggaagtccgtagccctgtgacttgctcgtgggaaagagccacgggacaggcgatcccatgacttgggtgcaaaaggccacagggggccctttggggcctgctctgggctgctcgcaccgcccaagcttgggaccactcagcgtttcccac

SEQ ID NO: 19939 - DNA, 414 bp, Homo sapiens
  chr8:22299385-22299799
  hyper
cgtataccatgtgccttttgacccgctttctctagatcattgcaagtcactgctattactggaataaacttagtatgaacaagtcagataaatccattatatgatgtttaaaataagtttacggagctcttgacagggtaatggtattttattttccctttggttataaagacttggagaatgacgttttctgattcatatgtgtacctgcgttagatttctgttgttgttataagaacaaaatgtaaagggctctttgctctctaaatcttgtagagttttaggttatagttgtttctccctttaaactaagaagatggattacacataaccactaatttatgtgctgcttttattcagccgtaagtcttaggcacaacccttctctctgagattaacaatcggtttgaaagc

SEQ ID NO: 19940 - DNA, 31 bp, Homo sapiens
  chr8:22436798-22436829
  hyper
cgcgcccctgtcggcgcggaaccctggcctc

SEQ ID NO: 19941 - DNA, 878 bp, Homo sapiens
  chr8:22436855-22437733
  binary
cgcatcagcgggggcgcccccgcgagctgcgctctccccggccggagcgctcctcctccagcccccagcccgcagggtactttgccctcggagcgaaggaggctccagaactggtagagccgggccatcgggctgggcacctccccgcggcgcccgcagcgcggagtccactgaccggctcaaaggtctgggaatctcggggcggccgcgagccggcctcggggactggggtgggggcggtgctgggaacagaggctaggcctgggcccaaggggaaggcagccggggatggagcggacagaccgctggtgctcttgatagattctcgcagcacttgcgtccccagggcagccccaggatgggtgctgggcagggtggtgcccagcctggcaccgcggcttcctgcctggattggctcctggctccagagctagaggctcaggaaatcccacaggggtctgtctgcaagggcacttccttgcccagcggaggggctgtggatgggaggcctgtcaccccggctgtctgtcgggcagcatcaggaatctgggggtgggtgtgtccagcttgacagatgaaccctggcctccttgccctggcagccggcccctgggggaggtggggagcccggtcttgcccgtgtgatccactttgccaagaacgaggtgggcagctaggaggcccatgtgaagactcggcctcaccccaccagtccttcacctggccagtgacttacacagtctgtactggtgccagcctgttccttgacccgtcactcctgcttcctgagccctgctctccctaggccactcaccagccctcccccagagtggagaggaagtaccgtgtgctgtgggttttggggacaggaagcaagc

SEQ ID NO: 19942 - DNA, 51 bp, Homo sapiens; identical to SEQ ID NO: 15273
  chr8:22722458-22722509
  hyper

SEQ ID NO: 19943 - DNA, 127 bp, Homo sapiens; identical to SEQ ID NO: 8761
  chr8:23021590-23021717
  binary

SEQ ID NO: 19944 - DNA, 90 bp, Homo sapiens; identical to SEQ ID NO: 15275
  chr8:23082568-23082658
  hyper

SEQ ID NO: 19945 - DNA, 169 bp, Homo sapiens; identical to SEQ ID NO: 15276
  chr8:23082729-23082898
  hyper

SEQ ID NO: 19946 - DNA, 67 bp, Homo sapiens
  chr8:24816325-24816392
  hyper
cgttttttttctttctttctttctttttttttttttttttttttctttttttccgcggctcctccct

SEQ ID NO: 19947 - DNA, 291 bp, Homo sapiens
  chr8:25908102-25908393
  hyper
ggggtcagctgcaaatatggcaccatctagaatttcattccatttagcactaggcaacctcctcctccaacacacacacgcactcgcacaccatcacgatcacctccacctacactggcacacctcactcaggtggcaagagagaaaatccaggaaagtcacttgcatagagtgcacggatttcaagaagtctttgacggtgcaaactggacttctaatcatgggatctctccaaacacagcccaaggcctagaaattccatttctggctcacggaaccttccacccccac

SEQ ID NO: 19948 - DNA, 251 bp, Homo sapiens
  chr8:25908517-25908768
  hyper
gcagctccataccaccctcgaagggggacacaacttccacttactcttttctcccaaaggagagcagatgggggtcacagggcttgggggtcactgcgttcagacagtcaccccgcgcggtaagtgcttagagcaacgtttatagggcaatgctggcctcgccgcgtaggggtcgctggactaaatgcccagaaaccctcacaacccgtgatgtccactttccgtggatctgaacccgggcaagttcggtc

SEQ ID NO: 19949 - DNA, 41 bp, Homo sapiens
  chr8:25910878-25910919
  hyper
cgttactgcctcctagtggcggatacggcggcaatagtggc

SEQ ID NO: 19950 - DNA, 311 bp, Homo sapiens
  chr8:26148757-26149068
  binary
cgccccagagccccggcgctagtgctcgaggctgggacactgctaggtgcacacagccgcggcctggcgcaggcggtgcggacagagggtatgccatggcgagacgctggcgcggcgcaggccctgccggccgggacacggagggcggggcacaggcgcagcaggaagggggcgtggccaagagccgcccggccgctcccccgcccctccccctccgctctccgccccagcccggcggctccgccccctaggtgacgtcactggccaggccagccggcgccattttgaaagtggagtcgcctgcccctgcc

SEQ ID NO: 19951 - DNA, 837 bp, Homo sapiens
  chr8:29205985-29206822
  binary
cgcggaaaaagaaagaaaaatcagcaaaatcgccttagcagttcaaccaaaggtcaacagcagcgtttccccagcagctgacaggtcaaatgggcaggaaacaactgcggggaacaaagccccccgctgtccggcaggggcgaacccggctcctccgcactgaacagttttgttgtgctttttggaggggagaggtttccgccccctttccagctcccttcctcccgggtggacaggtcggaagaggagcggaaaggaaaggaagggagggaggcggcgaaggcgcctgcgggggggaggagcggctctttgatgggtgtgggggggtctgaactgcctaccgggctcggaagcgcagaccctacccgcgcggaagaatgcgcggaatgcggcggcgggaggcggaggcgcagcgcggcggggggcgcccggaccccacgcgccctgcccgctccctagcccgagggccgcggacccaccctgccctgcaggtgtggcgggcgccaggtccctccagggactcggacagcacgcgatttttccaggatttccgactaccaaatgtgacaagacagtctcgccgccgagagtttcgccagggctcgctaaaatccggcacgcgccgccatcagatagtcgaaaatccgggctgaacaaaaggtgatcattctccgctgcccggatttgcaggcgctagaggaccggttccgcccggcgtcccccagatacccagtccttcagcctcccgctcccagagcctggatctagcccgggacggggattggccaccttccaagctgagcttggagttgggcagcgggaacgcagatacagatc

SEQ ID NO: 19952 - DNA, 402 bp, Homo sapiens; identical to SEQ ID NO: 18968
  chr8:37702286-37702688
  hypo

SEQ ID NO: 19953 - DNA, 218 bp, Homo sapiens
  chr8:37756358-37756576
  hyper
cgccccagatacggccccttcttccaagaagacccaaagctggcagagctgggcgggacagccgcagaaggggaagccaggtgagaacaccagcaccggccgagggctccgtcccgaaaggccttccccgctgctgcccggcttactctcgaagggtccagcgcccagaccgccctgccggaggggtccgcgcccccaggccgggccctcccctcccc

SEQ ID NO: 19954 - DNA, 728 bp, Homo sapiens
  chr8:37756610-37757338
  hyper
cgcggtgcagatcccgcaggtccacctcggcgcggcccaggaacttgtcgaggccgagcagcgcgcggtgcagcacggtgagctgcagggtggcggcggccgcgggtccggaggacagcagcgatggcagctcgaaggtggcctcctcgcgccacacgggcgcgcccaggctgcgctccgacacggaggtggcgtacttctccttgcccacctggatcaccgcgtacgcgtcgctcgtgcccccggggcccttggcccgcaggccccgcgcctgcagcaccgtcacctgcacgtgggttggggaccacacggcccccaggccccggccagccgagaccattagggacatggtgacgataacactccagaagcgaggagaagatcgccgcgactggcggcctccacggcccgccccggcgaccaggccactttaaggcttccggccacacccccgccaggccacgcccctcatggccaaggccacgcccctgcccgagccgcctgctccacctgctgcgccgcgccccgccccgccccgccccgccccgccggcctcagcagcgcgggcagctccgggcacccgggcgccggaggcggggctggcgcggccaggcaggcaggggatcacgtgcgcaggggcgggcgcatcgagaatctaatctgagaggtggtaggtgacggatggggtccccagctgccaaaggtcgcacggcgggaaggagctggcc

SEQ ID NO: 19955 - DNA, 234 bp, Homo sapiens
  chr8:41168659-41168893
  hyper
cggtgattccacggtgcacacaggaggcttctgcagatggatgacttctctgtcatttcgtggccaatggaagatgccttgacactcaaaaggtgacatggaggctggaaggaaaacacagagaagagagagcaagatcgggatggccaagggttaatcccaagacaattggtgaggccggcctgtggagctgaggaagacattcctcacagagaataagaccgcaggagaccc

SEQ ID NO: 19956 - DNA, 540 bp, Homo sapiens
  chr8:41685769-41686309
  hyper
cgctccgccccgctccgcccgtgctgggctgtggcctccacaccaagcagccgccctgggccgccttccttcgtctgtgcgtgcagcgccgcctccttcagcttaggcccgacactccatgaactctcattttccaccttctccgtctccagcttccaagctgcacagggccaggccgaggtacgtgatggcgggcactgaattacagatcccgtctgtggccgccagcctctgtgtcctgccacctcctccgagaggacatcaccgccaccaggtggagcgagtctcctcctcggcgctccaaccacgtgctgtttattactctgtggggattcccataccgaggcctcttcagttcctggaacagtagcactaaaaggctcctgagtgcctctgttaatttgattgttctggttcgcactacaatgaccgggctggagagggggcgctcgtaatgaaacaggaactgctcctcgcgcccgctccagagtcctttacatctttggggagagggcatacggggagctacatttcattttc

SEQ ID NO: 19957 - DNA, 112 bp, Homo sapiens
  chr8:49309646-49309758
  hyper
tttgattatttgtgttagcagttaatttagcaccgtggccacgtgtgccaaagctgcctccacttcctccgggctcccaacaaacggcacttttatgagatcctttcaaagc

SEQ ID NO: 19958 - DNA, 164 bp, Homo sapiens
  chr8:49309797-49309961
  hyper
cggtgcagactccatttctctgccctccgccctccaccggggcgccccctctgcacaggccttatggcagctgcgatctttcctgccgttgcaggaaaggagctatttctggcaactctgtccctccacccagggcactcagcctgatctaatggagatttacc

SEQ ID NO: 19959 - DNA, 117 bp, Homo sapiens; identical to SEQ ID NO: 5852
  chr8:56014011-56014128
  binary

SEQ ID NO: 19960 - DNA, 103 bp, Homo sapiens; identical to SEQ ID NO: 8768
  chr8:60030067-60030170
  hyper

SEQ ID NO: 19961 - DNA, 239 bp, Homo sapiens; identical to SEQ ID NO: 5853
  chr8:60030908-60031147
  binary

SEQ ID NO: 19962 - DNA, 85 bp, Homo sapiens; identical to SEQ ID NO: 11941
  chr8:65499649-65499734
  hyper

SEQ ID NO: 19963 - DNA, 108 bp, Homo sapiens
  chr8:6673921-6674029
  hyper
cggccaccaggtggcagccggagacgggagctcgcaggctgacaaaggagcctggccccgtggctgcagctggtcaaaatggcagatggtccagaaggctctttgtac

SEQ ID NO: 19964 - DNA, 43 bp, Homo sapiens; identical to SEQ ID NO: 6306
  chr8:69242761-69242804
  binary

SEQ ID NO: 19965 - DNA, 57 bp, Homo sapiens; identical to SEQ ID NO: 6307
  chr8:69243011-69243068
  binary

SEQ ID NO: 19966 - DNA, 311 bp, Homo sapiens
  chr8:71316520-71316831
  binary
cgactgggacgggcctgggccgctgagttagaggcagtggggcctgggggctgcagacggcagggacggtgccccaggacgaagatcggggagagccgagttccagggtcgccagcagaggaccctcgcgcccgtccggccggacccttcggccagcaccctgcaccccctcgggcgcacctcaccctacccaactcccggtcctgccgctgctccccggaggcgccccgcatccgtcaagtcccctacggctccaacagggagaggcttctcccattgcagtcctagctccagaggggatggagaggcgc

SEQ ID NO: 19967 - DNA, 142 bp, Homo sapiens; identical to SEQ ID NO: 8774
  chr8:81213177-81213319
  hypo

SEQ ID NO: 19968 - DNA, 327 bp, Homo sapiens; identical to SEQ ID NO: 8775
  chr8:81213356-81213683
  hypo

SEQ ID NO: 19969 - DNA, 55 bp, Homo sapiens
  chr8:97156910-97156965
  hyper
cggggtggagccggggtccatggagttcatcagcgtctggatgatggcgtggttg

SEQ ID NO: 19970 - DNA, 78 bp, Homo sapiens
  chr8:97166796-97166874
  hyper
cggcattccacacctcgagggctcggctcgattcagtcccctggtccaaagagtgtcgtttgacccgggttattcaat

SEQ ID NO: 19971 - DNA, 276 bp, Homo sapiens
  chr8:97166903-97167179
  hyper
ccttttacttaaaagcccccagggattactgttgatttgctctaagacctttggtgcacgcagtagtcctagcaggaaacaaaagttctcgttctgccctgtttctatcataccatcttcctccccacagtctccacctcattcccttcttccttctccgccaccgccccagaaagacgtcaccactttcgaggaggtgtgtaagaacctcaaggactccagctaagaaaaacatgtggtgttagggcctccgatgcagtgccctgcgttccccgc

SEQ ID NO: 19972 - DNA, 214 bp, Homo sapiens
  chr8:97167223-97167437
  hyper
tcaagtcctgattcaattggggggtggggagggtggagaagagggattcgccaggcctgtcgtgatctgtggtctgagtgacttttttcttttaatgcgcagaaaccacaaggatgtttgagcacgtttttagatcccctcccccatcggcaactccaccgcgcgaactcccagaggcccgagagcctcccgcgttgaggaaaacgctatgtcc

SEQ ID NO: 19973 - DNA, 99 bp, Homo sapiens; identical to SEQ ID NO: 15295
  chr9:100263437-100263536
  hyper

SEQ ID NO: 19974 - DNA, 183 bp, Homo sapiens
  chr9:102586462-102586645
  hyper
cggcggggcgctgggctgggctggaggaaaggctgtgtgggtccctcccgcgaacgctgggcgctcgaggggaactccttcgttggggagaggcggtccccgcccacccgagttctgaggcctcctctcagagaacgactccgcttgaaaggccctcagggaatgcgggacgggaatgcgggc

SEQ ID NO: 19975 - DNA, 227 bp, Homo sapiens; identical to SEQ ID NO: 18081
  chr9:102586985-102587212
  hyper

SEQ ID NO: 19976 - DNA, 58 bp, Homo sapiens
  chr9:110249882-110249940
  hyper
cgccaccaccaccgggtggctgccgtcagggctgcctttgctgacgctgatgaccgac

SEQ ID NO: 19977 - DNA, 123 bp, Homo sapiens
  chr9:110250497-110250620
  hyper
gggaagcactgggggaagtcgcttcatgtgggagagctcctcccgccagcgctgcggggacagggcgggagagacctgtcagtggtggtcccctgttgccacccgacatactgacgtgctggc

SEQ ID NO: 19978 - DNA, 202 bp, Homo sapiens
  chr9:110250630-110250832
  hyper
cgactgcaccgcccagacatggggactggtcaggcaggaagcacccgggaacccagggcgccagcgctgcaatctcggcccactcccgggtcgaagaagaggtgatgcgtctgtattgcgggtgttatgtcctgtctgcccaattgcgtgtgagcgagcgccgcggctggtccctccccctccaggtcccgtggacgtcccc

SEQ ID NO: 19979 - DNA, 61 bp, Homo sapiens
  chr9:112081274-112081335
  hyper
cgggaaggcctatatacttccttggaagtccgggtatgttatttcttcccttgacatcctc

SEQ ID NO: 19980 - DNA, 131 bp, Homo sapiens
  chr9:112081563-112081694
  binary
gggggtgcaaccacctgtgggcgggtgcccgggacgcaggcccaggcgccgccgccctgaggtgccccgccgaccccacgcacggtgcccaagggagaaagtcaggcgcgcctggccccccgggcaccccg

SEQ ID NO: 19981 - DNA, 860 bp, Homo sapiens
  chr9:112081773-112082633
  binary
ctcccaagtcaccctacccgctgcgaggaggctgcggggcagatggggctcagggaatgggaatggggtgtatccagaagggatcagcagagagcagaaatggtctaacccccgcctcccaaacttggggcgcctgccgagcagcaagcgaggggatctcctctctgctgtctcatcaaggcctgatggcgagtttgaggggggacaagctggacaccccaggacggcctcacattgatttgagattttctacccaataacccagtatcaggaagacccctgctggaagctagggacggaaggggagcgccggccacccacaccagggggggcggggtctcgggacttggggaccgtgtgtactggggagggggcgaggccccaaggactaggtgggcgccagagaaatcgcaaccccgcggcgcaatgtgccaaggagggggcacgggccaaaggtggggccccggaagagaccgggacggggtggcccaagaagaaaaagggttgaggagtgctcggagaagaggatgggggaggggatccccagggaggtgcaagggaagcgcccccgatgcaagcactgggggagggggagctgcctccaggggcgcgaggtgccagtgccccagactggccccgtcactcaccggcaggtccacgctcacttcggtcccgtcgagcaggaagacgcggcagtagagggtggccttggcggcgccggcggcggagatgtgcacggccgcgccgccggtgagcaggggcccgccgcccgccgggaacacgctgcccccgggcgcggcgggcagcgccgaggaggaggcggcggcggccgggcccccccgtggccccccatcgcgctc

SEQ ID NO: 19982 - DNA, 178 bp, Homo sapiens
  chr9:113017465-113017643
  binary
cgaggcgggcgaggacccgccctcctctgcttcccgcaggtagggaggggtaatcgcagggtaggcgctggcgaggggtcttctaccgttcgagcagtatcaatttcctccactcacttttctgacgctgcatttaacaaatatttctggagtggctacattggactagacactgcgc

SEQ ID NO: 19983 - DNA, 106 bp, Homo sapiens
  chr9:116299412-116299518
  hypo
cgacagagccaaattaagcgtggcccatcagttctgcactctgttcttcggtttgcctatggcaaggtttaattcgggctggcctccctgatgctgcctggcatgc

SEQ ID NO: 19984 - DNA, 301 bp, Homo sapiens; identical to SEQ ID NO: 18084
  chr9:116918462-116918763
  hyper

SEQ ID NO: 19985 - DNA, 268 bp, Homo sapiens
  chr9:124857529-124857797
  hyper
cgctcgacactacagggtgaaagaaacacagaagttgtcaaggaacgtggcccctcttcctctctcatctctccaggtgtcttgtttctttgctttagtccaggggtttcacttgctgaataaactgccttgaaatgtccaagtcataaacttaagagatccaaacctcctttttagcagcagagggcgctcgcatctgttcccttcatgactttgtttcagagtttctgtaagcatggtcgtctggccacttgcatgggaacaaccc

SEQ ID NO: 19986 - DNA, 360 bp, Homo sapiens; identical to SEQ ID NO: 17151
  chr9:126771808-126772168
  hyper

SEQ ID NO: 19987 - DNA, 227 bp, Homo sapiens
  chr9:126782445-126782672
  hyper
ctctaaaatgggaatagtcatagccacctctctgagaggtaatgatgtacagtgacatttgtaaagccaaacacacaccataggtgtctactacatgtttatttctgcctcggacttccttccccgtccactctgccgctctctgtggactgccgcagatctctgaacttccccgagcctaatttgctccacttgttcacggagaaacaatcatcttacagggtagc

SEQ ID NO: 19988 - DNA, 32 bp, Homo sapiens
  chr9:126783540-126783572
  hyper
gcagctcgcgcaaaagacgggcctcaccaagc

SEQ ID NO: 19989 - DNA, 43 bp, Homo sapiens; identical to SEQ ID NO: 15301
  chr9:130689378-130689421
  hyper

SEQ ID NO: 19990 - DNA, 419 bp, Homo sapiens; identical to SEQ ID NO: 15302
  chr9:130689749-130690168
  hyper

SEQ ID NO: 19991 - DNA, 644 bp, Homo sapiens
  chr9:132647794-132648438
  hyper
cgctcatcccgggtctcagagggcgctggcaacacagatccctgcctcccctatcgggaaagcgttttaggaccagggaaaaggaggcctcccccaggcgagtgcgcagagccagggaacccgtctggatggtggctctttcccaccatccttctctggcagcagcagttcaaagtggagcttccaggctgtcccatacatttcacgatttctgagtctttcgcttcaatttaaaaaaagctgggggcacgaccgaatcctgcctctgtccaccgccatctcgttcctcatcgcagggggcccttcttgctccctccactgctgcgctctgccgtctgctcccgccaggggtccccaccacctctgcggacggaggagccgcctcccaggcccgggcgtgcccagggcgggtggagggcgtggggcgggccggtatttcctgacccgctggaggagccggccccacaggcttgtggcctccccggagccggtgagtcaggaacttcctacttcaagaggcttccccagtgcagcagaaaacaaactagtcgcccccaatgctcccgacctctgtgatgtccacacccgcggaaatgggggccccaaaccagcaggctctgttctaggcttctcagcgctggtgc

SEQ ID NO: 19992 - DNA, 141 bp, Homo sapiens
  chr9:133308607-133308748
  binary
cgggagaaggacgggcagcgcgtgggcggaactgcaggggctggcagggaggtctgagttacgcggatgggccacgctccgaccgcacccccgagtccgcctgtccgtgtgtctgtgccgcccgcaggacgtgcttccggc

SEQ ID NO: 19993 - DNA, 68 bp, Homo sapiens
  chr9:133308769-133308837
  binary
cgggcggcccctctacgctgcagtaccggctgctgccgctgcccctgggcgtgcgcgcccaccacgac

SEQ ID NO: 19994 - DNA, 199 bp, Homo sapiens
  chr9:133309052-133309251
  hyper
catcgccgtgtccccctacccctactaaacgggagagggcattggcggccgccctggcgtgacccccgaggaaggggtcgaggagaagcttggtccacgccacctgctgtggcaagcggagcgtcatcgtctcccgccccgtgcgtcagcgagaccttgggtcaacacgaccctgcgcacagccttgacccccgacagc

SEQ ID NO: 19995 - DNA, 458 bp, Homo sapiens
  chr9:133760420-133760878
  hypo
cgcagagcccgagccaggaggcggccggggaggcagtcctgggcgcaaagacaaaagccacgagtctggttgatgctgtgaacagtgacgctgccaagcccagccagccgggagagggcctcaaaaagcccgtgctcccggccactccaaagccacagtccgccaagccgtcggggacccccatcagcccagcccccgttccctccacgttgccatcagcatcctcggccctggcaggggaccagccgtcttccaccgccttcatccctctcatatcaacccgagtgtctcttcggaaaacccgccagcctccagagcggatcgccagcggcgccatcaccaagggcgtggtcctggacagcaccgaggcgctgtgcctcgccatctctaggaactccgagcagatggccagccacagcgcagtgctggaggccggcaaaaacctctacacgttctgc

SEQ ID NO: 19996 - DNA, 630 bp, Homo sapiens; identical to SEQ ID NO: 15304
  chr9:135286324-135286954
  binary

SEQ ID NO: 19997 - DNA, 133 bp, Homo sapiens
  chr9:139703274-139703407
  hyper
cgccacacattctcgcctttttttttaaaagaagcgtttgtaagagacgtatctagaaaagctccagaaggcacgggctgacttgcgactgtaggagacatcccatttctcgtaggaaggaggagtcatttac

SEQ ID NO: 19998 - DNA, 520 bp, Homo sapiens; identical to SEQ ID NO: 15307
  chr9:139948370-139948890
  binary

SEQ ID NO: 19999 - DNA, 303 bp, Homo sapiens
  chr9:140107736-140108039
  hypo
gggaggccgctgccgacagcgttcccagggaggagcgtgacccagagccagtcatgcctcggaaccagagtgagaagagaaactgacccccgggaagatgcctggctctctccccagcacagagtttctcagctgaggagtgacccacatcttggctgggggcctggaggcctcagctgcctcaagtccctgcccagggatgagggcccatcagtgggacgaggccgcctgctcccacccacacaggctcattctctgcgagcagaggacctgctgcttggcaccctggcagctgccctggtc

SEQ ID NO: 20000 - DNA, 180 bp, Homo sapiens; identical to SEQ ID NO: 17163
  chr9:140108461-140108641
  hypo

SEQ ID NO: 20001 - DNA, 153 bp, Homo sapiens
  chr9:140333146-140333299
  hypo
aggaccactccccaggagccacgcctgccaggggtgccatgggcatcagagggccctgtgggaggggggcggggggcagcagaggcctcgtctggggacacagccccagcaggatccaagtagccccctcggaccccctcggatgggactcgc

SEQ ID NO: 20002 - DNA, 224 bp, Homo sapiens; identical to SEQ ID NO: 6320
  chr9:16133902-16134126
  hyper

SEQ ID NO: 20003 - DNA, 55 bp, Homo sapiens; identical to SEQ ID NO: 11976
  chr9:16154771-16154826
  hyper

SEQ ID NO: 20004 - DNA, 194 bp, Homo sapiens
  chr9:34379701-34379895
  hyper
cgggccggtgctcgtagggaggtacacatctggagaaggaggaagccgcgagcatggaggggttgggccttttgactctcatcccccgatttagaccaagcccctgggcggcgcttcaggtgtccgtcccaaggctcggaaatcctcctctccttcttcctcacccttcaaaacccccactgcagcaccgattc

SEQ ID NO: 20005 - DNA, 265 bp, Homo sapiens
  chr9:34591191-34591456
  binary
cggccagctaggacttcaggacacacagcaaactagctgcgccccgctgagggtcagcgcacagccgcccacacaaggtgtcctctccccgggctctctgggccgccggcctcctgcttcccgtgccgcagaccgggattagactgtggacgcggggaaggaagggggcgttgcgacgggatcttgaggggagcaggacttgcccctgcccctgcggcgaagctctaggccctggcaaggttcggtacaccgggggccgctcctc

SEQ ID NO: 20006 - DNA, 31 bp, Homo sapiens
  chr9:34591656-34591687
  binary
tgctgtcggcagagcagcagtccacggctgc

SEQ ID NO: 20007 - DNA, 894 bp, Homo sapiens; identical to SEQ ID NO: 6325
  chr9:35756575-35757469
  hyper

SEQ ID NO: 20008 - DNA, 31 bp, Homo sapiens
  chr9:71735700-71735731
  hyper
cgccctcacctattgtccgggtggaggaacc

SEQ ID NO: 20009 - DNA, 465 bp, Homo sapiens
  chr9:71735786-71736251
  hyper
cgggggaggggaacggaagcgggtcgtaaaagttaactttacactaaaatcattaacttttctcacaccccccaataaaagcagtcacctcccccccccaagagccccccacgcacccacagtggcccacaaccatgcttcccgggggctttgaagggtagaggagctgacatcctccttgcccagaccctggaaaggattaggaagcggacctgggcacgaatagagaaagaagcccagcaaattcctcttgcaccagctctgggaggaagctcagctgcagttctacgtagaagaaaagaggcggcaaagtaggcgcgcgggctccagtgacaaaggtctcccaggcagccgcggcccctgccccaccgctgagtggcgtgcgtgcaggcccaccctctccgcctttcccgacaccccaaagtagcgctgcgagcagctgcgtctccctcccggggctcgcgc

SEQ ID NO: 20010 - DNA, 247 bp, Homo sapiens
  chr9:79319779-79320026
  hyper
cggcaaataaacggactcagggtcttcacgaatatgcagcacagccagctgggatccaggcagtctgtttttggtctcagcctggtttccctcacttcttcgatcaggaagtgcagaaagcactatctctgctgctctgcatcccagagattcatcctctggagacccagcttcctctattgtttcagcactctgggcaggttctgtgagataagacaaatcaaagggaggtgtgtacggtgccagc

SEQ ID NO: 20011 - DNA, 473 bp, Homo sapiens; identical to SEQ ID NO: 16165
  chr9:79630544-79631017
  binary

SEQ ID NO: 20012 - DNA, 218 bp, Homo sapiens
  chr9:88355794-88356012
  binary
cgggaaatgggctttaaattatcaacattcacatcgattacactatgatgcatgaaaactccattctacaatgagtaaacgcccaagaaaggaacccaaccaactccaattgccctggtgctcgtaagaggtttataccgcacaaggggtaaaacaacggtagagtcgagcaagcctttgggttacaacagtccttgaacacttgcaattgagaaccc

SEQ ID NO: 20013 - DNA, 93 bp, Homo sapiens
  chr9:89517563-89517656
  hyper
cgtgaatgcggcccttccccaccacacacaggctctctcccaccccctgccagctatccctgctctgacctccccgggcctccctaaggggac

SEQ ID NO: 20014 - DNA, 183 bp, Homo sapiens
  chr9:89517860-89518043
  hyper
cgcggcaccaagacccccatttctatgcaccctggaaagggtgattaatttaaagtgagtggagtctgtttctttaagacaagctcataaatcgtgaaagatcaccacttcttttcaaaagcctctccacggtctgagtctcccttctgggtcagtaaagtcattgaagctttaacggcatgc

SEQ ID NO: 20015 - DNA, 156 bp, Homo sapiens; identical to SEQ ID NO: 5858
  chr9:93955774-93955930
  binary

SEQ ID NO: 20016 - DNA, 268 bp, Homo sapiens; identical to SEQ ID NO: 5859
  chr9:93956177-93956445
  binary

SEQ ID NO: 20017 - DNA, 396 bp, Homo sapiens
  chr9:98784377-98784773
  hyper
accaagtcctagagagaatttctccaaaatatttcctggatccccctgccaagggccctgtcccgcccttccagctcccaactggatgcctgcagacctctccccgggttccgaggctctggcctcctccctccctaatccattttccacaccgcttccccgggagcccgttaaaatacaccgggaccgcggcgggtgcaagcctcctgtatctccacatagcaggctaaggggaattgggtagggaataaaggctgcaggggacatcggctggcaggtatgaagcccgtattgtgtgtcgtttgttaaacacttccagtggattttctcgtttaatctgcccaacaacgcttctgggccggtattcgtattgttttatagagggagaaactgagg

SEQ ID NO: 20018 - DNA, 178 bp, Homo sapiens; identical to SEQ ID NO: 15315
  chr9:99637706-99637884
  hyper

SEQ ID NO: 20019 - DNA, 316 bp, Homo sapiens; identical to SEQ ID NO: 15316
  chr9:99638097-99638413
  hyper

SEQ ID NO: 20020 - DNA, 117 bp, Homo sapiens; identical to SEQ ID NO: 8820
  chrX:15755988-15756105
  hyper

SEQ ID NO: 20021 - DNA, 300 bp, Homo sapiens; identical to SEQ ID NO: 8821
  chrX:15756366-15756666
  hyper

SEQ ID NO: 20022 - DNA, 622 bp, Homo sapiens; identical to SEQ ID NO: 15317
  chrX:2815904-2816526
  hyper

SEQ ID NO: 20023 - DNA, 281 bp, Homo sapiens
  chrX:40033593-40033874
  hyper
cggcccctacaagacgctcccagccagcctccggaacaaacccgcagccctaaatcagaattccagttctcgagcgccacccggagagttcacatttcccctcctccgaggccgcgtggtgcgcaagaaagagcccgagggcggcggcagcacacgtctgggcagccccctccccgtacccagcagcgtgtacgcaggaaaagaaaaagccaagagaaaaacgtggactgtaaaagccaaaacgcagaaccatctactactaactaccgacaaccccaggc

SEQ ID NO: 20024 - DNA, 81 bp, Homo sapiens
  chr1:10591549-10591630
  hypo
cgtaggaacctttcacaggcaatttaatcttctgagcagcgcacgtggagcagtgcggcgctggaatggggtttcgggccc

SEQ ID NO: 20025 - DNA, 350 bp, Homo sapiens
  chr1:10676484-10676834
  hypo
cggccgtgttgtgacgttccttcccagagttcagaacgctgctgattttccctctccccctttctcccagatgagcagcacactgtgggggcgccttccggatagctctccactggtgctgtgatcgccttccccgctggtctgtgtcccacccacgcccctcctgatgacagatccttcggggggaggcagagcacccgccacgtggcctggagatggccgctccagaaaggtgttcgcagtggagacggggctctcccgcgtgccttggaggatcagatgaggttgtggacgtgggagcactttgtgaactgggcatgggaaagagtgaaggtggaaactctccccac

SEQ ID NO: 20026 - DNA, 378 bp, Homo sapiens
  chr1:10680904-10681282
  hypo
cggttcttctccctctgaactggtgcccccttcaaatcactgactgtatacaagcaccaagaagaatgtgacacgaacgccagagtcctcagatgaatgccctggctgtaatgagcagtaggcactgtcacatggccacccatggagggcctgtggcctgacgggagcgggagggcagctcggcagcccgccttagcgtgggcactcacacggagctgccacttgtagtttctacgaagctctgggctctccgctctgttttaaaaagaaaagaaacattgcaatatcagtcacaatggtaacaagagaatttctaaagcatctgctcagtttctcgaaattaaaaaaaaaaaaaaaaagaaatggtaaaaagccctc

SEQ ID NO: 20027 - DNA, 1313 bp, Homo sapiens
  chr1:10719300-10720613
  hypo
cgccttctcagccaaccacaggcctgcattcagcacccatggcagcaggtagagaaagcctgtcatgggcagatggggtgtgctgtcatgggcagtcccggtgtgcatgctagcaaaaggcagagcacacttgtgcctgggagtgtgggcgtgtgtgggtggcgtgtgtggggggcgtgtgcgaggtgcacgcgcaggtccaggagcgggggggcgctgcaggagggctcacgcatggttctgtaggtgcaagagtgaatgtgagtgcggcgcgcacctgtgtgtgtggaagcgcatggatgggagcctgagtgtgcacgcgcctggatgcacagtggatgtgtataaggtgtgagcggcaggtgtgtcctcaagcacgggcaaccctggtgaggaaggaggcctcctgtctagtctggctcctggctctgggcattgtggggtggggagcgccttacttgacagtggagacggtccccgtggtgatggagtctgttttggagaaggttgacttcaggtactcgggagtgttgaaggacagggaggcaggaggctctggccctggcccgggggcgctgggggcactgggcacgctggcgaggggtgcgggagccaggctgggggtgggcggaaccttggcggggcctggcttctggatgccccggacgtcgtacttggaagggcgccccaccttgcctgtcttgaaggcgatggccccgcccatgtcggggctgccctccccgggtttgaagaggtgcaggtacttgacattctccaggtcgtacttggatggcttcttgtaggtgctcccgttctggggccgcagattctcgccggtcttcagtttttggatgaagaagtcgtacttggaggcccgggctaccaggttctgcatctggacactgctgtgcgacggcaggggcaggatggtggccttggtctccaggtgggccgtgctgctgggcagccgcaggccgggcagggtgcccaccacctccttgcccacccgctcctcggtcttggtgctgggggccggccaggagagctgctcgccagccttgagcttgcggatgtactcctcatacttagagaaccgcgcccgcttgctgagggtatcctcggaggtgggcagcatggaggaggtggctgcctccggggtggagcccgcgtgcagcttctcaaagctgatcttcctggccagctcgtcccgcgtgttctggtcatcatagccaaacatgccgaggaactcggtcatggtggaggccgcgtagtcccgcagcgaggaggcctctcctgcagaggaggatgggggc

SEQ ID NO: 20028 - DNA, 143 bp, Homo sapiens
  chr1:10854232-10854375
  hyper
cgtgtgtgtgtgtgtgtgtgtgtgcgcgcgcgcgcgcgtcgtgggttgggcggggggacaccaagattatccggcgatctgttttccagtcccctcgtgcgctctcaccgcgcgcctgtaccagctcggagacgtcctaaatt

SEQ ID NO: 20029 - DNA, 386 bp, Homo sapiens
  chr1:10854661-10855047
  binary
aagctggggcagaggaacttgtgtggaggaagagggggtcccctgcctccctcagcgctccactagcctcccccaactccggacccgggtcggggatgacttggaagaagaatctgcgcccaccccttagagaaaaatctattattattatcttaatctacgcccccaaagtgtccctccagccgtgattgacggcgcatacacctgttcccttcgcggaggagcttccagcgccggggacagacattcgcccaaacgctccgcagcggcccagcaaccgcccgcccgcccgcgcccggccagcccccgccagcggccccagcgcgcctctgcccgcacctcgccaccccggcggccgccccctccccttccagacccggctgccc

SEQ ID NO: 20030 - DNA, 115 bp, Homo sapiens
  chr1:110305380-110305495
  hypo
cggtaacaggcctgaggtcacaaatgaacgtttaatagagagcaacccagatctgtccgattgcaagcttcgtgttttaatggtttataaacatgcctctgccgctgggctgtgc

SEQ ID NO: 20031 - DNA, 200 bp, Homo sapiens
  chr1:117630364-117630564
  hypo
cgaatgaaacgctttgcctccactccttctcccaggttaatttttttaaacctgcttcaagaatcttttctggaccactcccttcccaccttcccccggtttggttgaatgcctctgccagcaccttgtgcttacataagttatagcactttgtttcttcagcagacgttgagtatccactatgggtcaggtgctgtttc

SEQ ID NO: 20032 - DNA, 217 bp, Homo sapiens
  chr1:11856166-11856383
  hypo
cgaactcagcactccacccagagcccccagcctgtgcgaggacggtgcggtgagagtggggtggagggagcttatgggctctcctgggcccctcacctggatgggaaagatcccggggacgatggggcaagtgatgcccatgtcggtgcatgccttcacaaagcggaagaatgtgtcagcctcaaagaaaagctgcgtgatgatgaaatcggctccc

SEQ ID NO: 20033 - DNA, 153 bp, Homo sapiens; identical to SEQ ID NO: 15325
  chr1:12460147-12460300
  hypo

SEQ ID NO: 20034 - DNA, 174 bp, Homo sapiens
  chr1:12573235-12573409
  hypo
cgggaagtgatgctgatttggagagagagaaggtgcacgtagtcatgtagggtaacgggaaagggaataggccacagaagcatggtatgtttgccgggcgacattaaggacccatttgacgttgatgaccgtgaatgtacagtggaatcgggcagcctggctgtattcttgtcc

SEQ ID NO: 20035 - DNA, 183 bp, Homo sapiens
  chr1:1491949-1492132
  hypo
cgaatgcttttttggcaaagcacagaggctgcacaaacagaactcaggaacccctcgaaaaggtctcatggccatctctggagctgctgggcacccaactgtaaccgtggcctcaacacagagccacacaaggctcaggccagctctgggggggtccaccatggccttgcgactgcaggcacc

SEQ ID NO: 20036 - DNA, 140 bp, Homo sapiens
  chr1:1492373-1492513
  hypo
cgtaatttacattttaggcatgaatgattttctaaaacccacgatcagagtttctctgggaatcggcgtctggcttaggaacacattcatttgtttgacaaataccttcccaaaactattttaaaacacagctgctgggc

SEQ ID NO: 20037 - DNA, 49 bp, Homo sapiens
  chr1:150935078-150935127
  hypo
cgaaattacggttacaatccttctcctgtgaagcctgaaggacttcgcc

SEQ ID NO: 20038 - DNA, 223 bp, Homo sapiens
  chr1:154931252-154931475
  hypo
cgtcacccatcgttagcagccaccagctgccccatgccctcacggatgtagacagactggatctccttggtcttgaggcagagatcgcaggcccagacggcagaagcttcagtggtcagcagcccataggcgctctcagtcatgcctgtgcactcacggtggaaccatttctggcaggaggcctcacacagaatggcatcctggtcatcgttcacctcactcc

SEQ ID NO: 20039 - DNA, 145 bp, Homo sapiens
  chr1:157678824-157678969
  hypo
cgtcgacgaaggtctagttctgtgggtagaagaaggagctttagcctttccccaagccgccggagccacacccccagccgccagagaagatcaaagtctgtggtaagaagacgaagcttcagtatctcaccaatcagattaaggc

SEQ ID NO: 20040 - DNA, 129 bp, Homo sapiens
  chr1:16058899-16059028
  hypo
cggatgaccgcctctttacgtgccatgaggattgccagaccagcttcttccgctctttgggcacagccaagctgggcgacatcagcgccgtctccaccgagccgggcaaggagtactgcgtcttggtga

SEQ ID NO: 20041 - DNA, 200 bp, Homo sapiens
  chr1:167486836-167487036
  hypo
cgctgctcgtggtggtgacttaaccaggcacatcgtctcatctgccccgtgttctgtcaatgccgggccctctggctgggctagatggccgcctaaggggcaggctggggtgagtcacggagcctgggatggtgcgtcacccggcagtcccaggcgtgggtgtggggacagccatgacaaggctgagcctagacacggac

SEQ ID NO: 20042 - DNA, 80 bp, Homo sapiens
  chr1:1717283-1717363
  hypo
cgctacccaagcgtgtagagccgcgcgctgtactgcttccgatatgtgccacagagcagcaacgagaagtggacagagcc

SEQ ID NO: 20043 - DNA, 135 bp, Homo sapiens; identical to SEQ ID NO: 6669
  chr1:171811643-171811778
  hyper

SEQ ID NO: 20044 - DNA, 108 bp, Homo sapiens
  chr1:173683937-173684045
  hyper
cgaggataaacaacctctgaggttacctgaatgccccagcaaagggcacgactacttccggagccgcaccggaaccccttggcggattatgtgggttcctgcgggaac

SEQ ID NO: 20045 - DNA, 75 bp, Homo sapiens
  chr1:180892057-180892132
  hypo
cggaccaaccagctataaatcggggttcccactgttccttccttgggtttaattttataggacggctcacagaac

SEQ ID NO: 20046 - DNA, 388 bp, Homo sapiens; identical to SEQ ID NO: 15342
  chr1:193149436-193149824
  hypo

SEQ ID NO: 20047 - DNA, 120 bp, Homo sapiens
  chr1:19720405-19720525
  hypo
cgcctgccagggccacacacaagaggacacttccaggtccagcctctctcctctttaagaagtcacttggcgctgagggccatatttttttgttttgttttgtttttgagacgaagtctc

SEQ ID NO: 20048 - DNA, 205 bp, Homo sapiens; identical to SEQ ID NO: 15349
  chr1:214637813-214638018
  hypo

SEQ ID NO: 20049 - DNA, 34 bp, Homo sapiens; identical to SEQ ID NO: 15350
  chr1:214638090-214638124
  hypo

SEQ ID NO: 20050 - DNA, 249 bp, Homo sapiens
  chr1:226077130-226077379
  hypo
cgttctctgcaagaggctcagttcccccagctgctggtaagtggacctagagtcttgttccttgctgcaaccaaacaactgacaggaaccagaatggctcaggcaacgccagggctctaagggccaatccagtctgcagggatgagcatccgggcccgtgctcagagggtcccggggcctcatgagatcctgagctggtggtccccagttgtgaaaccagatttcccactgttctggggggaccttcct

SEQ ID NO: 20051 - DNA, 203 bp, Homo sapiens; identical to SEQ ID NO: 7694
  chr1:228361379-228361582
  hypo

SEQ ID NO: 20052 - DNA, 262 bp, Homo sapiens; identical to SEQ ID NO: 15354
  chr1:230266303-230266565
  hypo

SEQ ID NO: 20053 - DNA, 85 bp, Homo sapiens
  chr1:230272610-230272695
  hypo
cgaagagccggccgtctgtgcattttgcttttcccgcagttcagccgggactctgcttcacggatgctttcacctcacggacagc

SEQ ID NO: 20054 - DNA, 190 bp, Homo sapiens
  chr1:230529556-230529746
  hypo
cgagactccgtctcaaaaaaaaaaaaaaaaaaaataataggcccggggcccgccagtccacagcctgattagaaacatgtggcttcgcaaggctctccctcactggctccccgccctagagtccgccacacctgccccggcctggcatcctctgcaggcttccagctctcccactcttctggctcattcc

SEQ ID NO: 20055 - DNA, 184 bp, Homo sapiens
  chr1:231037680-231037864
  hypo
cgcatggcaaacacactaggcaacattcaagagctatgacaggcaagtcacttctcccacctgagcccgtttgtcacctaagtggggataatactagcacttatctcacaggcctcttcaaaggattaaatgagtgaaacaatgtacaacacttagaaaaaattggccaggcgccgtggctcac

SEQ ID NO: 20056 - DNA, 48 bp, Homo sapiens; identical to SEQ ID NO: 10904
  chr1:2331316-2331364
  hypo

SEQ ID NO: 20057 - DNA, 183 bp, Homo sapiens; identical to SEQ ID NO: 10905
  chr1:2331437-2331620
  hypo

SEQ ID NO: 20058 - DNA, 325 bp, Homo sapiens
  chr1:234845143-234845468
  hypo
tgaagagacctctttcaggcagagggaacaaaataagccacagtaagtatgcttggacctgcatagaagtagaaggaagatgaggggtgactgaaaggaagagcagtcaaagatgaggcggggaagcaagccgactgggtgtcaggagcaggctcagggacttgggcttggccggtgagcagtcaaggtgcacagagctgttcctgggtagcgcctctcatggtgccgctgactccaccggggtgaccgctgtgcccggggctgctggtcaggatgcaaaagcactttagagtgaaggtcacctcaggcaacaggcaaaacagac

SEQ ID NO: 20059 - DNA, 120 bp, Homo sapiens
  chr1:243479828-243479948
  hypo
cgcacagatgccgtcctgccacgaaggctcttagcctttctggctgctccgcccgccgctcgccaagtgaggacagagggtctttctctggggtgtgctttatttcatatgtgctcagcc

SEQ ID NO: 20060 - DNA, 650 bp, Homo sapiens
  chr1:243637544-243638194
  hypo
cgtgagcatggagttaatgaagctttcacccatctcctcctctcaaccgtcatcccggtttaatcctctccttctgccaaagtccagaggccctgcgagcccccgtggagtcgcctgagccagatgctccgcacccagcctccccaagccccggccggctgccctccaggtgcgggctccaggccctctcgcgcggcttcgggactcggccgagcccgggcctagtatccagagtcgaagcagccgccgggaggtctgggtgggcagggaggccgagaggacggtgcaccgcccggcagcgctgagacctggccgcctaggccaccctgcccggcgagggagaggggtgtctcctgcctggagcgctccgcggtggcccgagagcaggtgctggcgtgcgggaggcgcacgtggagccctgcggtctgttccacctgcagaggcacaattgcccagcgtggggtggaaggcaggctgggagctcccgggacgcggcgtggcagcgcagggctcggctagatgcgctcctcctcggactggttgagtaagggaggaggctcgtcctgaacgtgcacagccgctcctaactccgtcaacggaatttcactcaactccgagactgaagcattttattggcagcatttagaatc

SEQ ID NO: 20061 - DNA, 764 bp, Homo sapiens
  chr1:246310723-246311487
  hypo
cgtgaatcaggacgtgctcggtggttgtaattccatctattgatggcagctgctgctgcaacagggaggccggctagggctgcacactccatggaggcggtgggagcctcacccattctgggttggggcaggggctccgtgggtgccactgcagccacccaaatcgtggctgcagaccaggcttcctgctctatggagcaggcaggcgccccgccttcctgggtggggctacagctgcccaaactgatgctggagatcggagcttccctgtgctcttggtgggggccgggagcagacaggatctgccctccagggtagagctgcagcctccctgctgcggctgcagacctgggcttcgcgctcaatcgagcaggcaggagccagggacaagagggagccccacctttactgagttggtggagcgtgaactccgcaggtgcagacctggcatctctgcagcctgcaccctggagggcccgggaagacccgccccccacttcatccctgcaggctcgggggtgtctgctcccgcttcccagcccctctcctctccagatgcctgctctgatctccgaccggggttggggccgagcccggggcagcaggaggcagagagattcctgggtggaaggcggcagtccccgtaaggcccctccttcagaccagggagggcctgaaggctgggggccaggatgccagtccgggaccggagtggggacttgtggtgcctcgtctgggtgcacatggaggaccatgggccaatc

SEQ ID NO: 20062 - DNA, 88 bp, Homo sapiens
  chr1:2537671-2537759
  hypo
cggcgcggctcgtacgtagatgatgtgccggctggagttctggtcgtcgttccagatgaagaggtcgatgaggacgcgcctgttgaac

SEQ ID NO: 20063 - DNA, 473 bp, Homo sapiens; identical to SEQ ID NO: 15373
  chr1:3195292-3195765
  hypo

SEQ ID NO: 20064 - DNA, 93 bp, Homo sapiens
  chr1:40030094-40030187
  hypo
cgactctctgagtggtagtagggaggccacgagaggccggagcattaccagttggagccagatggcgaagagttggacgaggcccagactggc

SEQ ID NO: 20065 - DNA, 100 bp, Homo sapiens; identical to SEQ ID NO: 13166
  chr1:41485949-41486049
  hypo

SEQ ID NO: 20066 - DNA, 91 bp, Homo sapiens; identical to SEQ ID NO: 13167
  chr1:41486164-41486255
  hypo

SEQ ID NO: 20067 - DNA, 38 bp, Homo sapiens; identical to SEQ ID NO: 13168
  chr1:43842627-43842665
  hypo

SEQ ID NO: 20068 - DNA, 267 bp, Homo sapiens
  chr1:46500322-46500589
  hypo
cgccagtaccgctctccacggcgcaagtcagcaggcagcatcccactgtcaccactggcccacaccccttctcccccacccccaacagcttcacctcagcggtccccatcgcccctgtctggccatgtagcccaggcctttcccacaaagcttcacttgtcacctcccctgggcaggcaactctcacggcccaagagtgcggagccaccccgttcaccactactcaagagggtgcagtcggctgagaaactggcagcagcacttgcc

SEQ ID NO: 20069 - DNA, 206 bp, Homo sapiens
  chr1:54474577-54474783
  hypo
cgctaggatttgattttcatgtgaagggttatcagtgccattccagccagccttccatgctggcctgagtggcccactcagggtccgggacaggcatactcatcggaccagtcggagcagtgctgtacatggtcgcggcagagatgcctcggtatacagtcgcagtacttgaagaaggttgaaggacagcgccaccacccagggcc

SEQ ID NO: 20070 - DNA, 122 bp, Homo sapiens
  chr1:54694091-54694213
  hypo
cgccgccagggagaccgagtgcacactcacttttggaagtccgtctatgtcgcctgaccctggaaagaaaaaataatccaattcagtttcttgcttgctcttccacggaggggtctcccctc

SEQ ID NO: 20071 - DNA, 121 bp, Homo sapiens; identical to SEQ ID NO: 7733
  chr1:6046277-6046398
  hypo

SEQ ID NO: 20072 - DNA, 35 bp, Homo sapiens
  chr1:6707164-6707199
  hypo
cggagtttcgctcgtccaggctggagtgcagtagc

SEQ ID NO: 20073 - DNA, 438 bp, Homo sapiens; identical to SEQ ID NO: 13190
  chr1:90308855-90309293
  binary

SEQ ID NO: 20074 - DNA, 115 bp, Homo sapiens; identical to SEQ ID NO: 13191
  chr1:90309490-90309605
  hyper

SEQ ID NO: 20075 - DNA, 134 bp, Homo sapiens
  chr1:90400255-90400389
  hypo
cgtgaagttcactgatgtggctgaaattcctgcctgggtgtatttgctcaaaaaccttcgagagttgtacttaataggcaatttgaactctgaaaacaataagatgataggacttgaatctctccgagagttgc

SEQ ID NO: 20076 - DNA, 37 bp, Homo sapiens
  chr1:94354617-94354654
  hypo
cgaataccgcagtagccacagcggcacccactcgtgc

SEQ ID NO: 20077 - DNA, 723 bp, Homo sapiens; identical to SEQ ID NO: 17254
  chr10:106097237-106097960
  binary

SEQ ID NO: 20078 - DNA, 165 bp, Homo sapiens; identical to SEQ ID NO: 17255
  chr10:106098025-106098190
  binary

SEQ ID NO: 20079 - DNA, 50 bp, Homo sapiens; identical to SEQ ID NO: 13200
  chr10:1120729-1120779
  hypo

SEQ ID NO: 20080 - DNA, 457 bp, Homo sapiens; identical to SEQ ID NO: 14499
  chr10:114135846-114136303
  hyper

SEQ ID NO: 20081 - DNA, 79 bp, Homo sapiens
  chr10:120601836-120601915
  hypo
cgaaactgcagctgcagacctgggcctcgtgctccatggatcaggcaggagcccagcgcccccgggtgcagctgcagcc

SEQ ID NO: 20082 - DNA, 92 bp, Homo sapiens
  chr10:126775448-126775540
  hypo
cgcctctagaacacaagttcagtgggagcgcggccactgcacctgcggatcctgaggaacagtccacgacacacacgtgcgcccacacacac

SEQ ID NO: 20083 - DNA, 349 bp, Homo sapiens
  chr10:133920829-133921178
  hypo
cgccccgagggacacacgctccttgatggtcaacaggccaggcttgcgggctccccaggtgccggcaaggttccagggccggcgtctgagggctgcaacccagacccgctgggcaccctgcggggcatgtttagttgtacctggaggagaggatgtgctctcttggcacaacgtgcagaaggcaccggaggaaaggaatggagaagaagcctgtttgcctcagagctcctcatcctggacgccctcgccagagggttcatgttatggtttcctgcataagcgatctgagccctgcctcctcaagcgtaactgacagcatgctggatgcacaggcagcaactcccttttg

SEQ ID NO: 20084 - DNA, 163 bp, Homo sapiens
  chr10:133921207-133921370
  hypo
gttccacgtggaacagtgcagctggcacaagctcgtccatgttattcacatgccccaccgtggtgggcctgtcgacggcatccaggctgattcgattctcggctgatactgcagccctgtacctgggtcttggactacatgcaaaagaactcctgcaggagac

SEQ ID NO: 20085 - DNA, 51 bp, Homo sapiens; identical to SEQ ID NO: 13215
  chr10:134793882-134793933
  hypo

SEQ ID NO: 20086 - DNA, 144 bp, Homo sapiens; identical to SEQ ID NO: 13216
  chr10:134793968-134794112
  hypo

SEQ ID NO: 20087 - DNA, 66 bp, Homo sapiens
  chr10:134878532-134878598
  hypo
cgttccgctgggtgaacacacacacgcacttgagaaggtggcattccgctgtgtgcagggtccagc

SEQ ID NO: 20088 - DNA, 193 bp, Homo sapiens
  chr10:15254646-15254839
  hypo
cggatacgccgagtcctcggaaggacatctggacaccactttcagccacctccttgcaggggcgacatccgccaaagtcatcctttattccgagtaataactttaattcctttctaacatttacacggcaaacaggaatgcagtaaacgtccacgtccgtcccacggctgggctgccgttccgtttcctccac

SEQ ID NO: 20089 - DNA, 80 bp, Homo sapiens
  chr10:16806491-16806571
  hypo
cgatgttcggtggcaccactatggaaacaaaaatgctgagtgtgaatctgggaatggaactcctagcaagggatggcagc

SEQ ID NO: 20090 - DNA, 273 bp, Homo sapiens
  chr10:28968999-28969272
  hyper
cgttcagagagagggggaagaataaaggtaagggtgggaagaggtttgtaaaacagcagatcccggtgtttaatttcagagtggaggtttcggatcttcagacgggaaactggaagaggcgtgtgcattagtttagtttactcgctgtggcatgtgacagcgaccagggtccactaggtggatattgtattagtgagaacttgaagacccagattatttcaacgagaaactgatattaaagcctccaatcttgccctgcgacaaaatgtgaac

SEQ ID NO: 20091 - DNA, 111 bp, Homo sapiens
  chr10:29581547-29581658
  hypo
cgcgtggtgcagacgcggaaagctgaaggagaacaaccactgccatgtcgcctgctcaggtgaggctctgactttccagtgatgccatcctcaggactaggcgagaaagcc

SEQ ID NO: 20092 - DNA, 188 bp, Homo sapiens
  chr10:3954899-3955087
  hypo
cgcacccggccaatattcattcattctttctcacctcttcctccgctctttaaggttgagcttgcctggcccaaggcacagagttctgggaaggatggaagagaggggaagggagagcaccaacatcacggaccgcctttcacatcagcggcagcagcagtaaaacccccagaaaacctggggtaggc

SEQ ID NO: 20093 - DNA, 168 bp, Homo sapiens
  chr10:422180-422348
  hypo
cgacctcggcccccgacagagccggcagggagaaggacccaggcccacctcggcccccgacggagccggcagggagaaggacccaggcccacctcggcccccgacggagccggcacagagcaagaatgaggtggtgctcatcccacacacgacgttccctgtgctggc

SEQ ID NO: 20094 - DNA, 269 bp, Homo sapiens
  chr10:44874128-44874397
  hypo
cgggtcaatgcacacttgtctgttgttgttcttcagccgggctctgtgaaaacagaatggcaacagtgtgcggctgcacaggaggaaggcgcggctgcaacgtgtgcatccgctcccccaacacccatctagggccctcgctggcaccccgtgctccacttggtacgctcaggctccagaggtgctcgcggtgtgctggggaaagctcagcgctggcagtgcaggaagttccattgcagagacatggaaatgtgaacagaagtctttcc

SEQ ID NO: 20095 - DNA, 153 bp, Homo sapiens
  chr10:69834338-69834491
  hyper
cgtctttccctgaacgtgcacccagatcagctcatggggactgggaaagagaaatcatctgcacacacccaacctcgcagccaagcagacgactaccgcaaccggccgctcgcaacagcttcagaggccggcggccgaggcttggcagtgcgc

SEQ ID NO: 20096 - DNA, 238 bp, Homo sapiens; identical to SEQ ID NO: 15453
  chr10:73514960-73515198
  hypo

SEQ ID NO: 20097 - DNA, 73 bp, Homo sapiens
  chr10:76966489-76966562
  hypo
cgaaagagcgaaactctatctcctctgtctcaaaaaaaaaaaacaaaaagcaaaaaaaaaaaaacctggcgcc

SEQ ID NO: 20098 - DNA, 499 bp, Homo sapiens; identical to SEQ ID NO: 18231
  chr10:79601557-79602056
  hypo

SEQ ID NO: 20099 - DNA, 120 bp, Homo sapiens
  chr10:88857177-88857297
  hypo
cgtggtggggggcctacaaaaattagccaggcgtggtggcggggagggggttgggcagtgcttgtagttccagctacttgggagaaccacttgaaccagggagagaggttgcagtgagcc

SEQ ID NO: 20100 - DNA, 239 bp, Homo sapiens
  chr10:91403644-91403883
  hyper
cggctttctccggtgtacattacaattacaaaccctcaactcaacctcccccttcgttgaaaaaaaaaatccacctccaatcctcattggtccacatagttccggcccacatggtatcagtgggtgtgtccctcccaaaaaaccctctcattggccgtgaagaaacagcttctaataggctgtgattttggggggtagttaaactccacgcctccagacttgcgctctccaatagaccc

SEQ ID NO: 20101 - DNA, 314 bp, Homo sapiens
  chr10:94607767-94608081
  hyper
cgttcctaaaataaatcttactatcacatgcaattttgcttttcgtgagtgcatgttttcctttctctgactccccacgacccagagtacatcaggcccttgttaaatgtccccgtggctcttattacagattcagggtgatgatctgagtgtccaccttgctgattactacggtacccccgcgtgtggcacagggtgtggcacacacagaagacaaggagatatgttaaagcccaaaggccaggcacaagacgcccaggagggactagtcgcgagagagggcaggaggccagctgggtacccggccgccgccc

SEQ ID NO: 20102 - DNA, 32 bp, Homo sapiens
  chr10:98983004-98983036
  hypo
cgattcattacctgctcctttttttacggttc

SEQ ID NO: 20103 - DNA, 158 bp, Homo sapiens
  chr11:108031546-108031704
  hypo
cgctaatcactaaagcggaaaaaaaaggtgtggttttgaaattaaaactttcaaacttgccttaattttcttctttttcattggtattgatgaatttgtaagatttttactagaaggacgagagtttcgctcacgttcatctaattcctcaattttcc

SEQ ID NO: 20104 - DNA, 158 bp, Homo sapiens
  chr11:1095394-1095552
  hypo
cgcagcatgtccgggcagctgaggccccaggcaccacttcctgctggtcgtctgagggccgaggcctccagcaacccttgggtgcagggtctgccgagccctccacattttcaccgtgccccgctgtgcctggcgaggtggctggctgcagtgaggtc

SEQ ID NO: 20105 - DNA, 502 bp, Homo sapiens
  chr11:113345738-113346240
  hyper
tccctcctcctctccccgtgacactgagtcgcccgccgctccatccggccggtgcttaccttcaagccatagggcgcccgggggcagagacggcgccggctgcttgaggcttccagctcccgccgcatccacgcgcggccgcccctccggcagccgtccggggccgccactctcctcggccggtccctggctcccggccccgccgcgccgttcagagccccggcgggcagcagctcggccggctctggcccgcggggagcagtggacgggccgcggcggggcggggcggggcggggccgggcgcggggcgggcgggcaggagggagcgcggggacggggcggaggcggcgcggtgcgcgcgtgaggctgccggttcggcactgaagctggacagctctgcggcgcccgagcgcggggagcgcgggagggaggtgccccggtccccgcccctgagacaggccccgcccccgccccccaccaaaggagctgtacctcctcggcg

SEQ ID NO: 20106 - DNA, 66 bp, Homo sapiens
  chr11:119145611-119145677
  binary
cgtatgacgaagtgaaagctcggctccagaaattcattcacaaacctggcaggtcagttcaatgac

SEQ ID NO: 20107 - DNA, 301 bp, Homo sapiens
  chr11:119599011-119599312
  binary
cggcttctcaacctctttctccgccgtgccacctcccaccccctttacccaagccgtgacccaacttttctggctcctttcactccccacaatccagtcgtgcccgccatccggctcccagccccggggaggcattggatgggggtggggacagcagaggtgagcgctcttacctgggaggaagaatgcggtcaagccgagagcgagtccccaccagcgtccagcggcgcccgcaagccccatccgagccatcgggggccgggggtccggcgagaggggcggcgagggcagcgctcctcgc

SEQ ID NO: 20108 - DNA, 763 bp, Homo sapiens
  chr11:128760451-128761214
  hyper
cgcggaggacgccggctctgcccacgcctgggcaaggttgagctccgttccctccgggctgctcccgcctcctgtccgtgcagggcgcgtttccagccatcgccgcccagccgccgccgcacgccggggagagatcgtccggggtgagcagcgagcccggggacagctagcctgggtcctgtccctggacctactccccctgcagctggcggatcaggcccccggaccctcactccacggcgggaatcagagccgtcgggcgggggatgcagcgcccagactgtggctcccccgccttcccaaaggaatccccccatctgctccatccctctcgggaaacggcgaaatgctgccaaccgtccgcttagcgcaccgcggagcgactgagcagccccgccgaggctccgagccaagatttctgccctaatagtttctcccttctttctgtctgctccaccgcacccactaaatacgcggcgctcacacacggacacgcgtgacacgcggcgctcacacacaggcatgggacgctcacacgcgcgcgcgcgggtctccgtccctggcaccccgcagcaggggtgcagccgggggcagggggagccgggggagggcgcagggggccgcggggacgcgagcggagggctggatgcctgccgggctctctctccgccttcctcttccctcccagtcctgccgagctgacggcgtcccggatcacatggagcccccgccccaccccagcccgccccccgccgccaacgcc

SEQ ID NO: 20109 - DNA, 125 bp, Homo sapiens
  chr11:129803851-129803976
  hypo
cgcgagcatctccagttcaatccttccggtgctttcgtgcagctctgcatcactgccttgatgttctctccccttcttccacagcatacgctccaaggtcatccactggaaccactccctcgtgc

SEQ ID NO: 20110 - DNA, 39 bp, Homo sapiens
  chr11:130083134-130083173
  binary
cgacggccacacggtggcgatgttgcgccgttccagggc

SEQ ID NO: 20111 - DNA, 706 bp, Homo sapiens; identical to SEQ ID NO: 16287
  chr11:1535842-1536548
  hypo

SEQ ID NO: 20112 - DNA, 95 bp, Homo sapiens; identical to SEQ ID NO: 16288
  chr11:1536583-1536678
  hypo

SEQ ID NO: 20113 - DNA, 167 bp, Homo sapiens
  chr11:1552182-1552349
  hypo
cggccaagccggaggctgctgagccatgcccaagatcagagacgcacgcgtctggagcagcgcctgacacctgaccctggtggctgaccatgcggcctgcctggcagtcctgggcatgggatgcacacccgcaccctggcccacccaggggcagaagaggggaccac

SEQ ID NO: 20114 - DNA, 62 bp, Homo sapiens
  chr11:2225626-2225688
  hypo
cgtgcgtccctagcctggcggcaggtgctctgggccctctccctgggactatctgcctggac

SEQ ID NO: 20115 - DNA, 55 bp, Homo sapiens
  chr11:2987095-2987150
  hypo
cgtgtctgagatccaacttgcgggcaccatggaagagtgggcatcatggaagagc

SEQ ID NO: 20116 - DNA, 97 bp, Homo sapiens
  chr11:3181650-3181747
  hyper
cgacccacactccccgcgtcgcattcaccctaataggcgggcatacaaatgccgttgcctggagccgcagcccagcgaatgggacccacagcggcgc

SEQ ID NO: 20117 - DNA, 563 bp, Homo sapiens
  chr11:34516985-34517548
  hypo
cgaggcgctacgcgttcttgtcgtctcaagtttctcaggtcccctcaacaatcctatccagtaggtgtaattgggctattccacaaaaaaggaaatagaggctccccttaaaactcaaaggtcttccagagatctcttttaccaccgaagggtgggtggaggggcagttgatttattttatttaaaaattttcagaattttatatgcattaagatcaaagcgtcaatattgtgccagggtgcttgaggctgatgtcgtagcctctacctggcagataggaagagccagggagccggtgagaccgatgactcaggtcttgctcactggccactggctggagctggcttaccaggcccgtgggggctcttcagggcaggcaggggttcctggcagaacaaggggccattcctgagttcggcctgagctttcatctactgatttctggctttagtaaacctgaggggccttttggactttactggcgtcctgtgagagatgtttatgagccttgacatttttcagctgcgggccctgccctagatggccatcggtgtgcggccgtc

SEQ ID NO: 20118 - DNA, 174 bp, Homo sapiens
  chr11:44087366-44087540
  hyper
cgatgaaaggccataaggatgctcacacccgaatctaaaaagccctttgtgtgggccgcagccaagcatactttggcaagaaatttctgtggctctaacctcctttgaaaactggagaaccaaggccaggaggcagaaggaggtggcagacccggcccggcggcggcccagcac

SEQ ID NO: 20119 - DNA, 606 bp, Homo sapiens
  chr11:46391523-46392129
  hypo
cgacgccaggacggcaagtgtcggcactgtgggaaggtgagaggccctgcccgaggacatcgccacctgcacctgcggtcctgagcccaggccatgtggccggtgtggcctgccgatcactgaccacaccctggtgtgcagagtccggggctgaccctcagcctggctgcagtgccttcagttctcaagcaccctggcctgctcttggtctctgggcttagtaggagagcagggaggaaagttttcttcccatgtggcacacctggcctgctttgaagctgcaagtggccctttggagaatcgtatagacttactcattcggtgactccatggatacttgtgtgccgagcgccaagctgggcagcggtttcccaccctcctgaggacagtgtggcttgaagccaggctttccaggcgaccgcctaacccagtccacagttgtttggttcactttcttgtttgcttcttgcccgcctccctcagtaagtgcaggctctcaaagatggagaggcttgcttcactgattctcagcgcctggcccactgcaggcctttcataacagcctgtgtgatgaacagggaatgaatgtgataggtactcggaagc

SEQ ID NO: 20120 - DNA, 346 bp, Homo sapiens
  chr11:46867730-46868076
  hyper
cgagggcctcgcgggtggggcaggcccaccgaccactcacctcagctgggtcagaaccaagcggcctgctctaagccgtttgaaaccgcttgggccgccgcacaccccgcagtgtcctcgttctttattggtcctcgacggaccgcccatcggacttttattggtccatttgaaaggcctgtgggcacgcgccgcccgcagccttaaaggggccgcgcgcagccgtgtttccctctggaccagacgccgcctgcacgggtggggacgctggtcgctgccgggggcaagtctgccgactccagaaagaaaggcgaaagaatgtgtgtagacccgggcatccttggtc

SEQ ID NO: 20121 - DNA, 241 bp, Homo sapiens
  chr11:487587-487828
  hypo
cgcactgcagccacccagaggttcgagaagccgtggggctcccggacctcccagaagccctgatcctggtcgggtccccgctccgtcctcagggtcggggcggtggaaagaggcggcagggcaggaagtcccgcccctgcctgggcttgggcactgccccatcccacttctgagggaccctgtgctacctatggggctaagagcagtgcctgcttgaccctgcagcccaccctggcagagt

SEQ ID NO: 20122 - DNA, 649 bp, Homo sapiens
  chr11:487857-488506
  hypo
tgccttgtttgctgacagtcgtacatcgaggctgctggaggggcagccacccaccccacgctcaccctgagacctcactgggggccctgccagtgctgtcgactccaagaatgctgccagccggggtgggggctgcacgcacccgtgggcagggccgggcgtggcctgcgtcccatactctggctgccagccgggtgggggctgcacgcacccgtgggcagggccgggcgtggccggcgtcccatactctggctgccagccggggtgggggctgcacgcacccgtgggcagggccgggtgtggccggcgtcccatactctggctgaccctggcgcccacagaccctgatgatccgagactggtggatgtgcatgatcatcagcgtgatgttcgagttcctggagtacagcctggagcaccagctgcccaacttcagcgagtgctggtgggatcacgtaggtgccagcacagcccccggggcagtcggtgcaggctgaggggcattctcggaacccctgtgcccagcgcggcccctggaccccctcattctccccggggggcagtgggtgcaggctgaggggcattctcggttcccctgtgctcttccggggtcctcctcggggggctcgttacccctcacccctgcaac

SEQ ID NO: 20123 - DNA, 432 bp, Homo sapiens; identical to SEQ ID NO: 19135
  chr11:57243735-57244167
  binary

SEQ ID NO: 20124 - DNA, 139 bp, Homo sapiens
  chr11:61662946-61663085
  hypo
cgactttgcccaggtgcacagccccggcaggagttccatcaggacagtcttggcagactggaaagcatcctgcaggagtgaagcacgccagtgcgcagctggtctcggctcagcgcctccaccctcagaggccagagtc

SEQ ID NO: 20125 - DNA, 184 bp, Homo sapiens
  chr11:63562755-63562939
  hypo
cgcacgccaccacgcctgactaatttttgtatttttacaccatgttggccaggctggtaaatttggtgatttcttaagcgtatcttgggggaaaaaagtttctgagagcagtaagtataaacgtgtgtctaaaatgtgtgtccttttatttatttatttttttgagatggagtcttgctctgtc

SEQ ID NO: 20126 - DNA, 329 bp, Homo sapiens
  chr11:63676319-63676648
  hypo
cgtgacgcccgcctctgccctctccacagacctcacgtggtgggcagtggcggcaacgacaaagaaaaggaagaatttcgggaggccaagccccgctccctccgcttcacgtggagtatgaagaccacgagctccatggagcccaacgagatgatgcgggagatccgcaaggtgctggacgcgaacagctgccagagcgagctgcatgagaagtacatgctgctgtgcatgcacggcacgccgggccacgaggacttcgtgcagtgggagatggaggtgtgcaaactgccgcggctctctctcaacggggttcgatttaagcggatatc

SEQ ID NO: 20127 - DNA, 142 bp, Homo sapiens
  chr11:64774064-64774206
  hypo
cggtcaggaggctgctgcagcgatccaggtgagtgggtgggggggtctgtcatgcggagagaagagtggtacctgcctcttaggttccggagtgagggcacagcaggacacgggcaaccaggggcagcagctgcgctcctgc

SEQ ID NO: 20128 - DNA, 160 bp, Homo sapiens
  chr11:64950885-64951045
  hypo
cgcttccccccccggggcaggttggtagagcaggctaatgtgcatccctcctgccccaggggactgctggctcttggcggccatcgcctccctcactctcaacgacaccctcctgcaccgagtggttccgcacggccagagcttccagaatggctatgcc

SEQ ID NO: 20129 - DNA, 167 bp, Homo sapiens; identical to SEQ ID NO: 18257
  chr11:65685172-65685339
  hypo

SEQ ID NO: 20130 - DNA, 33 bp, Homo sapiens; identical to SEQ ID NO: 18259
  chr11:66658557-66658590
  hypo

SEQ ID NO: 20131 - DNA, 112 bp, Homo sapiens; identical to SEQ ID NO: 17326
  chr11:66886029-66886141
  binary

SEQ ID NO: 20132 - DNA, 179 bp, Homo sapiens
  chr11:68080751-68080930
  binary
cgggcgcggggcggcctggccggtggcgctgctcctgtgagccgcgtggctgtgggtttccaagcggactgacacctgccaggtgcccgggcgacccgaatgccccgtgtggccgccgggtccccagatagtgtccatccccgggtcggctacgcggaggtgacgtggtcccagatcgc

SEQ ID NO: 20133 - DNA, 98 bp, Homo sapiens
  chr11:68216755-68216853
  hypo
cgtgccctgtgtgcatttgagttgtgtgtccccgtggagggaatgccgacccccggaccaccatgagagtcctcctgcacccgggcgtccctctgtcc

SEQ ID NO: 20134 - DNA, 171 bp, Homo sapiens; identical to SEQ ID NO: 15490
  chr11:69206214-69206385
  hypo

SEQ ID NO: 20135 - DNA, 299 bp, Homo sapiens; identical to SEQ ID NO: 15491
  chr11:69206414-69206713
  hypo

SEQ ID NO: 20136 - DNA, 232 bp, Homo sapiens; identical to SEQ ID NO: 17329
  chr11:69451967-69452199
  hyper

SEQ ID NO: 20137 - DNA, 369 bp, Homo sapiens; identical to SEQ ID NO: 17330
  chr11:69452289-69452658
  hyper

SEQ ID NO: 20138 - DNA, 141 bp, Homo sapiens
  chr11:70164164-70164305
  hypo
cgcttacctggcagaaaccaccccattcagtccgttctccatgcccattcacctccactgacccgcagaggccctaagtgccgccagcatctctgttagtgcatcccgccctctttcttctacgcggcatgctgcctaccc

SEQ ID NO: 20139 - DNA, 31 bp, Homo sapiens; identical to SEQ ID NO: 7847
  chr11:75852075-75852106
  hypo

SEQ ID NO: 20140 - DNA, 366 bp, Homo sapiens; identical to SEQ ID NO: 13284
  chr11:78534109-78534475
  hypo

SEQ ID NO: 20141 - DNA, 80 bp, Homo sapiens
  chr11:94895741-94895821
  hypo
aaaaaaaaataggcatcccccaactctgggccacagctggagacctaagtgctgctgcactctggccaggttggacagcc

SEQ ID NO: 20142 - DNA, 336 bp, Homo sapiens
  chr12:104359142-104359478
  hyper
cggagagtggtttatgtagagctttacattttacatagcagctttacattcaccctcatttcacagataaggaaactgaggcccaagatggcacagtggcctcgacgcccaggttttccactttcaaagaccctccctcacatctcattacctgataatgcaacacagtctttaatcggggcgaatttcggggtggaaaggactagataatgctgataagcgtcatcatcccatatacacagcaccccaaggacagcaccctatcgcccacgcgtccaccagcccccgaaaatactggagacaaaagctgacgtcggcagagcgctcctagtcccc

SEQ ID NO: 20143 - DNA, 686 bp, Homo sapiens; identical to SEQ ID NO: 6800
  chr12:104682348-104683034
  hyper

SEQ ID NO: 20144 - DNA, 215 bp, Homo sapiens; identical to SEQ ID NO: 13288
  chr12:105392597-105392812
  hypo

SEQ ID NO: 20145 - DNA, 50 bp, Homo sapiens; identical to SEQ ID NO: 13289
  chr12:105392841-105392891
  hypo

SEQ ID NO: 20146 - DNA, 178 bp, Homo sapiens
  chr12:109050967-109051145
  hypo
cgtttagaaaactacactaagaatcccataatctacttactcactggaagacctgctcagaacagagagaaagctcaagtgaaagcaagtggaaagcctggggagggcgtaccggattccagagagccagctgccgctcgctcatgcggctgaacccagtggtgaagacattgccatc

SEQ ID NO: 20147 - DNA, 153 bp, Homo sapiens; identical to SEQ ID NO: 13290
  chr12:109488367-109488520
  hypo

SEQ ID NO: 20148 - DNA, 88 bp, Homo sapiens
  chr12:110518057-110518145
  hypo
cgctcccacccccgagatggagtctcgctctgttgccccggttgcagtgcagcggcgccacatcggctcactgcaaccttcccctctc

SEQ ID NO: 20149 - DNA, 175 bp, Homo sapiens
  chr12:112681200-112681375
  hypo
cgtcactcccccgactcgtacggcagctgtcagcaattcccgcatgtgcaccagtgcctgcttgcgagtgtttccccgccgccaccttgtctgtgcagccaaaaggaaactgctgctggacacctgaaacacacaaggagggacacctgactcctgctaactgccgcaagacccc

SEQ ID NO: 20150 - DNA, 73 bp, Homo sapiens
  chr12:112684738-112684811
  hypo
cgtgaggcccgactgggctgcgatggtgacatgcagcaacagctcggctcggttcattaaactcttcactaac

SEQ ID NO: 20151 - DNA, 788 bp, Homo sapiens
  chr12:113685206-113685994
  hypo
cgctttctgggcctgaaatgtcctcctcagaaagctgccgagccttcgagcataccttctgcgggaacaacgcagcactcggagtgggagcatatccattgtcccttcagccacttctgcaacctcttaagtggggaagagggttagacagcagacagggcaggggattagcactccacgaggtggcccagccccacccggcccctgccgtgccctcgtcttggctggtacagctgcactgctgcgtgaaggccacgtacaaaaggaacagaatggaactgtggctcctcgccttccatttgcaccctttctataatccctaaatatgtagcccagttgctcgtgccttgatgtgaaggaggccctttgcgatcacctgtggctttcttgaaaagtccctgagtggccagtgtcaccccaggccttccatccctctctccgtgtggagaaatgagcgatcatgctttgccttttgggaccacatgagcactccaagtcctgttttctgaggttgagtggttagaagcacagaacaaagtccgtcctgggagggggagaattcgctgttctttcaccttagctcttgagtcttattctcccctttccctttcaaggttctaccctgaattactcttaacacaaaacagcccctcttccgcagatccttaaaagaaaggtttttacaaatacaaacttaccacatcacaccccttcctaacaccctttggcgctgcccactgcaccccgggtggagcccgccctcttgcccgaggcctgccaggccccac

SEQ ID NO: 20152 - DNA, 140 bp, Homo sapiens
  chr12:117392984-117393124
  hypo
cgtgagcgccttctctggccctcgttcttgtctttctctgctgtcacttgaccacttagcaaggatatgcagcagcgcagaaaagacctgcaccagttgttttctttgttggagagataagtggacgtgccttcaactgc

SEQ ID NO: 20153 - DNA, 79 bp, Homo sapiens
  chr12:118461377-118461456
  hypo
cggcatcttgttctgccgagtgactgtcattctgggcagatccccatgtgagaacattgggtacctacagaatggaacc

SEQ ID NO: 20154 - DNA, 336 bp, Homo sapiens; identical to SEQ ID NO: 13304
  chr12:120148396-120148732
  hypo

SEQ ID NO: 20155 - DNA, 65 bp, Homo sapiens
  chr12:120172992-120173057
  hypo
cgttccgtgatctcccggcggagatggtccacttcacttcgcagttgtacaatctcgtcgttggc

SEQ ID NO: 20156 - DNA, 136 bp, Homo sapiens
  chr12:120173137-120173273
  hypo
gctgctcctccaggtctgtgattacctaaaagaggaaaggaatccagttacacgccaagcacattcatttcaaataagaaattgcttctagggctatggatttctgaacccacgtgacactggcaatcaacgtgcc

SEQ ID NO: 20157 - DNA, 143 bp, Homo sapiens
  chr12:120613510-120613653
  hypo
cgcctcaaccacccgcatggccaagaaggcttgctcacctccgaggatagcaaataggtgcttggtcagggattccatggccgaagagtcactgcactggcgtgccaggttccgcagtgccagcacagcttcatccatcaggc

SEQ ID NO: 20158 - DNA, 97 bp, Homo sapiens
  chr12:121200066-121200163
  hypo
cggacctaagtgtatcaggcagcggggagcaaacgagcactggaagggaagtctaatgtgtgctttaactgcagccacccactcaaccctccgagac

SEQ ID NO: 20159 - DNA, 200 bp, Homo sapiens; identical to SEQ ID NO: 7867
  chr12:121205162-121205362
  hypo

SEQ ID NO: 20160 - DNA, 124 bp, Homo sapiens
  chr12:121756071-121756195
  hypo
cggcttacctgcgcaaaagccaagttcagcactgtttcagaggccaagtactgtaaccggtactccttggagagggccagagcctgcaggagcatgggcagcgcgatggtaggggaggaagatc

SEQ ID NO: 20161 - DNA, 164 bp, Homo sapiens
  chr12:122623827-122623991
  hypo
cggtcctcgaagccacagggagggtgagtgccacccctgctgtgacaggcggaaaccaggactccctccactgagtggtagagcccaatttgaagcctaatggagcatgtccacctctaggggctctcgtgccaaggccaccttgcactcagccttccaggtgg

SEQ ID NO: 20162 - DNA, 203 bp, Homo sapiens
  chr12:123997867-123998070
  hypo
cgacatgccctgtcctggggcgccaggacccactcactcatttactccttgctggggctgccttggctccccgagaggtgggcgggaggcgagcatgaggagagaggggcggctgggtctatgtggaagcccagcagcctcatcaccttcctgggcggcagccgtaggagctatgagaccgaggcagaagcctggcgcctgac

SEQ ID NO: 20163 - DNA, 150 bp, Homo sapiens; identical to SEQ ID NO: 14568
  chr12:125500633-125500783
  hypo

SEQ ID NO: 20164 - DNA, 46 bp, Homo sapiens
  chr12:128489355-128489401
  hypo
cgcggctagtcctgctgcagtgcatctgggctaatgcccgaggttc

SEQ ID NO: 20165 - DNA, 129 bp, Homo sapiens; identical to SEQ ID NO: 6823
  chr12:132222124-132222253
  hypo

SEQ ID NO: 20166 - DNA, 176 bp, Homo sapiens
  chr12:132504709-132504885
  hypo
cgcttcgaggacggccgcccatcgccacgttctctgccaatccggaggcaaaaggtagacttcacgtagttgtctgctctccgccttatggaggtttttgtgggacaagttcatggcactttcttctcgcgcctctggatgcggtaattgtccctgagtgggaacaggcaccaccc

SEQ ID NO: 20167 - DNA, 816 bp, Homo sapiens
  chr12:132536813-132537629
  hypo
cggatttgggaggcttcctcgttctgtggccccctttccgcacagtagtggagtgatccttgtcagaaggagttggctcagggcccatctccgcaaacccccaggactccctactgcccacgctctgagtcgcctggccctggctttcagccccttggtgctccctgagtgtgctggcagccgcgccccagcccttcacttaactgccctcgtgagatgttttcagagcgcactgttgagaattgcagccccgccctgctgttttcctccatagcagccagtacgtcttcagacccactgcacattttacctgtttgtcgtctgatgtgagtgctgtgatcgctgggactctagcgtctgggagcacagacccatcatttgattgatgttgtcgattaaatgaagagttaattcaccctactaatatttatggaccgcgggcctgcgcggcgtggagcctgggcattctcgggggagcgagagaggcacagtcccgccctccctttacctccctggagaggaactcgagggcatcctcacagaaggaacagacagagattttcccaagtacagtgcagacacatgaggtgggctgtgcgtttgggggctgccacaagtacgctggggacgtgttcggagatacttttcctggagagtgggagagctcggcctcaaggaagaggactcagcgccaggctgaggatgaggtctaggtggctcgatctcctgcagggcacattgggcaccttgctttacgccctcatctcttgggctggagctgccccagcacctggcagcatggtgtttctagggtac

SEQ ID NO: 20168 - DNA, 136 bp, Homo sapiens
  chr12:133097814-133097950
  hypo
cgaggaggagggagcgcaggctgtggggctggggcaggggtgcgctgtgtccacactcatttccactcagacacggatggcggcagctccgcctctgcatacctgtgctccatttctgcaggggcgtcgcgttccc

SEQ ID NO: 20169 - DNA, 246 bp, Homo sapiens
  chr12:133393414-133393660
  hypo
cgctggaccaccatggctttaacaacaaggtgacgtcgcttttcagacatgcagctggagtaggagagaagaggatccagactcatgagcacggcactttctcatcccacaaaggcttcactctgagaggagcagcccatgggccccgtcccacaggcggggtggccaggataaggcccacagcccctctggtgtccacgtccttcctgtaaggtgaacctgccctccacacctccacactctaac

SEQ ID NO: 20170 - DNA, 58 bp, Homo sapiens
  chr12:19283146-19283204
  binary
cgcgccgcgggccccgggaggcggcgaggcggggcggaggccgggcgggagcggccgc

SEQ ID NO: 20171 - DNA, 250 bp, Homo sapiens
  chr12:19283425-19283675
  binary
ggtgacccccagctgccgtcttgccccccagcaatcttcaggcagtccttacccactcccctccctgcagccccggaccccgatcgcccgccgggataacgtaaccacatcctccccctcctcccaggagcgctgcctcctgccgtgcagcttcctcctcctaggtgggacttgtgggtaggtggctgatgaaggaggaggaggaggaggagaggagttcgggggtgctgcgatcctctctgtgacaggg

SEQ ID NO: 20172 - DNA, 226 bp, Homo sapiens
  chr12:19283783-19284009
  hyper
cgccagccgcacggaggttgcacagactgccaggaggcggtgggcgtgcgagggggtgtcccgtatgggggcacccgggccctgtttggagggagtccgtggggaagcggctctctcgggtggctttgggagcttgtttgaatgctaagtgtgagtggagctggaaaaggctcctcgtagtttctgtactggtctgggtttcttttatcattctttgtttacattc

SEQ ID NO: 20173 - DNA, 138 bp, Homo sapiens
  chr12:26398950-26399088
  hypo
cgaccaaatatgcaacttaaagctaacacacattggacgtgggagtccgtaggtacaacagaaataagcaccatcatcggccatgccgccggaacagttagaaacattcttcacctgctcaacctgaaaaaaggaccc

SEQ ID NO: 20174 - DNA, 194 bp, Homo sapiens
  chr12:2972300-2972494
  hypo
cgcgcctgtggtgggtgctactggcgtctagtggggaaaacaagggatactgctaaacacccttcagtgcacaggacagtccctcccacgcccaacaaagaattctccagctgtcaacgtgaatagtacttgagaaaccctgagttagtctgacccagtcactttactactgccaggtacgaactgcatttccc

SEQ ID NO: 20175 - DNA, 120 bp, Homo sapiens
  chr12:3030601-3030721
  hypo
cggcaagaactgttgttttctagatgccagatgaatgagtttagaatgacctatttgaggagctcttgattgttaaatcgtggcagaggtgaatcatgaagccgggaataggtagagagc

SEQ ID NO: 20176 - DNA, 48 bp, Homo sapiens
  chr12:32142934-32142982
  hypo
cgggttggaaggcagaaagccaaaaatgcgaaagatacaaatgggtac

SEQ ID NO: 20177 - DNA, 335 bp, Homo sapiens; identical to SEQ ID NO: 14577
  chr12:46766939-46767274
  hyper

SEQ ID NO: 20178 - DNA, 71 bp, Homo sapiens
  chr12:50322856-50322927
  hypo
cgtacccagctgagtttccaaatatttctgatttcaccagcgggggaagactggcaggctcctatatcctc

SEQ ID NO: 20179 - DNA, 171 bp, Homo sapiens
  chr12:54070830-54071001
  hyper
cgagaaagacgggaaaagctcaccaaaccccataaaaaataaaaaataaaaagaaagccgcggctgtaaataaaggcaaatccgccactctctgaggggccgtttgtcctcccctccttggccccgtccttcccgccgccccctcccggctcccgggccccgcggcgcccc

SEQ ID NO: 20180 - DNA, 98 bp, Homo sapiens
  chr12:54651346-54651444
  hypo
cgcgcctgtctagcaccttctccacaacatactcctcctcatcctctgaagaagaactgtcagctgtccgcttggttttctttcccatgtcgcacacc

SEQ ID NO: 20181 - DNA, 407 bp, Homo sapiens
  chr12:6492947-6493354
  binary
cggccttgcagtccccgcgccctgccctctccatgactgcccgtcctgggcccctcgctttccagatcccgcacccagctgtcccttgcgctctctggaactccctctgctctccctgcgaggcttgtccaagggctgaccccgggcccgccgcccttccctcggctgggccagggctgtccgcagtccgctctcccgatcgggcttccgaagaagggaggaggccggttccggccccgcggccctcacgtgctttcccggccgcccctcccgccccgcatcgaggcagacaagcctgttcctcttccctgggctgcgattgcgacaggccggcctggctcccagcgctccctgtccccgccccgcggccagctcgctccactcccacttcctgagctccgccatgg

SEQ ID NO: 20182 - DNA, 34 bp, Homo sapiens
  chr12:6493416-6493450
  binary
tcccaggctctgggctcgggcagccgccgccacc

SEQ ID NO: 20183 - DNA, 115 bp, Homo sapiens
  chr12:6493504-6493619
  binary
cgcctggccgagtggccgccatgctcctgccttgggccacctctgcccccggcctggcctgggggcctctggtgctgggcctcttcgggctcctggcagcatcgcagccccaggc

SEQ ID NO: 20184 - DNA, 99 bp, Homo sapiens
  chr12:6686943-6687042
  hypo
cgctcaccttaaaccttcgagctagaaatttattcttgatctctaagaaattgccacggttcatttcacccttgaaaggctcattgaggatggcatagc

SEQ ID NO: 20185 - DNA, 294 bp, Homo sapiens
  chr12:9216950-9217244
  binary
cggcggcggagcagctgcgggagccgcagtggctgctgtgggacatctgtgcctcgcgtcccctgtgccttgagaccccaaagcagccgactgcgccgccaccatcctcgcgttgccgggtggggcgacgtgctccccggccaggagcctccaccgctccggaccctggccctatgtcgccgctctcgcccgccgccgccgcggagtgggagtggggaggaggggaacagtccttggagccggccccgggagtactcccggagcctgccgccctggaagccgccacgatggacc

SEQ ID NO: 20186 - DNA, 124 bp, Homo sapiens
  chr12:95602750-95602874
  hypo
cgtatagccataataaatggcaagttctcgtactctggtatttcctcataatggcgtatattttcatactccggtgcacagaggcttgtaacagacttgtaaggtgcctgagatgatgactccc

SEQ ID NO: 20187 - DNA, 133 bp, Homo sapiens
  chr12:96566303-96566436
  hypo
cggagatgggaagttgggttgcccataaaattcgcccacaatctcatgaccgagacaagagcagttgactaaccctaatagaaactctagaagaagtgttatggtcggaacaaaatgtgctacttttgactgc

SEQ ID NO: 20188 - DNA, 105 bp, Homo sapiens
  chr13:100068654-100068759
  hypo
cggtagacatgaggacgcagggcactgacagctcccggactgtgctgcgcgggctgtggccccacacctgcccaaaggtgagctcctctgcaccccgtgttctgc

SEQ ID NO: 20189 - DNA, 670 bp, Homo sapiens
  chr13:100623230-100623900
  hyper
cggggccgggtgctggggggagccggtgccggaccgctgctcccctccgagcggggccccgtgcatggccgccgcgggggccgtggcggaaaggtccctccggaggacgaagtccctgctgtggcctttgccgctgctgccgccgccgccactgttggtggtggtgtagcccgagagggcaggaggaggaggaggcgggggagggggagggggtgaaggggtgggaggaagaggaggggctgggggcgggggcgcggagggctgcgcgccactgctgcccccgccgcaggggtagctgcccgcgccggggtgcgcgaccaaggctgcagcacgggcggcggctgccggagcctccgggtgtgccgggaacgcctgggagggagggctgaggcccagcgtgctcgcctgggccatgtgctcgggtccgagcggagtggtggccacgccggggtcagcgcccaggtcccgcaggcggaggtgcgcgacggcggcccggagttgggagtgggcgggcgggccggccagcgccgggaagcctgtcatattctgaagcggctggacctgagccgttgccaaatccgctaatctcagcgctggcgggttcctcttgctcaaagggggctccatcagaactacacaatcaggcccatagaccctcactggggggact

SEQ ID NO: 20190 - DNA, 195 bp, Homo sapiens
  chr13:112022971-112023166
  hypo
cggccaggagaagccgtgcaggctggttcccgagtctctcgggcacgtcgccatcattctccgaggatgttcctgctttgtgacaccacgcaacatcccacgtccttcccagccctggggttctccgtccctgcagggagccctggttcctgtcagtggtgcctcctttatccccaaatttgagacgctggctcc

SEQ ID NO: 20191 - DNA, 319 bp, Homo sapiens; identical to SEQ ID NO: 15544
  chr13:113627865-113628184
  hypo

SEQ ID NO: 20192 - DNA, 206 bp, Homo sapiens; identical to SEQ ID NO: 13367
  chr13:114302352-114302558
  hypo

SEQ ID NO: 20193 - DNA, 98 bp, Homo sapiens; identical to SEQ ID NO: 15556
  chr13:114766173-114766271
  hypo

SEQ ID NO: 20194 - DNA, 82 bp, Homo sapiens; identical to SEQ ID NO: 15557
  chr13:114766300-114766382
  hypo

SEQ ID NO: 20195 - DNA, 219 bp, Homo sapiens
  chr13:115052309-115052528
  hypo
cgtgatttttttagttaagatcattttaagttatgatgcttccgaatgagcagtgcagaagacacatgaatggtctgttcctgagcgtcagggaaggcatgttgtgtcacatagttgaagtcagtggtcacagacggatgcctcaagagcccataggaatgagatgttttgcttgcggtgaggtcatcttgctgcttcaacacaaatgccaggctcccc

SEQ ID NO: 20196 - DNA, 261 bp, Homo sapiens; identical to SEQ ID NO: 6865
  chr13:20392445-20392706
  hypo

SEQ ID NO: 20197 - DNA, 506 bp, Homo sapiens; identical to SEQ ID NO: 6408
  chr13:20979799-20980305
  hypo

SEQ ID NO: 20198 - DNA, 126 bp, Homo sapiens; identical to SEQ ID NO: 15558
  chr13:28745545-28745671
  hypo

SEQ ID NO: 20199 - DNA, 116 bp, Homo sapiens; identical to SEQ ID NO: 13380
  chr13:32983242-32983358
  hypo

SEQ ID NO: 20200 - DNA, 199 bp, Homo sapiens
  chr13:41364049-41364248
  binary
cggggctccgcgcctcaggggcgccagtgctgggcagcatggagccgcttgtgaatggagacttgctggctgcccaggagtgggcggctgggcaggggcggtgaacgtttagggtccggccaagaaagttggaagtcgtctccctgacctgttccttgcgaggcccgggaggagacgcgcctggccggtccttggcggc

SEQ ID NO: 20201 - DNA, 91 bp, Homo sapiens
  chr13:41453098-41453189
  hypo
cggcccttcgggggaactcctctaatagctgcagctagcagataggtgttttgccgggcttggcacttgctttctttgcggctctctctac

SEQ ID NO: 20202 - DNA, 284 bp, Homo sapiens
  chr13:44544261-44544545
  binary
cgtcattggccgcgctgcaggtgggcggacacggcgagcggctgacgcagtgtcgcgaggtggtgctcaccacatccaaggccatcccggtgcaggtggatggcgagccctgcaagcttgcagcctcacgcatccgcattgccctgcgcaaccaggccaccatggtgcagaaggccaagcggcggagcgccgcccccctgcacagcgaccagcagccggtgccagagcagttgcgcatccaggtgagacgcgtcagcatgcacgactatgaggccctgcactac

SEQ ID NO: 20203 - DNA, 141 bp, Homo sapiens; identical to SEQ ID NO: 18361
  chr13:52335934-52336075
  hypo

SEQ ID NO: 20204 - DNA, 131 bp, Homo sapiens
  chr13:76352658-76352789
  hypo
cgcccggccaatcgagtgccttttaacaatgcgcccttaagcagatgtaagcaccgtaaggcatattgagtttttttgaagtcaacacttgaaaatcattggcagtcgttccaggcgtttcacttaacttc

SEQ ID NO: 20205 - DNA, 601 bp, Homo sapiens
  chr13:96705328-96705929
  binary
cgctgcgagcacgaagaaagcgcggctgagggtggcagcgcgcccacacccgcccggacgagggcccggcccgcacccaccttgcctccagcagcagcggggtctcgggccacttcgcggccaagtgggcagtcaccgacttggacgcggcgaccgtcccggagccgagctgcgaaagccacagcgctgtggagcctagtagcagccgcaccacgttcgtggctttcgctggcgccatggcacggagagaaaagcgcgagtccctcggacccggtacccacagtctgtggccgccacgcttcggccggctcttcccgctgcgcggctgcccacttccggtgggaggagctcgagtccgttactgggtgccgggtccagaccggcgcatgcgtgtcccgctccggcgcggtttagtgggtgcggcctggagagcccacgccagccggacactgggccacgtcggagccgccggggcggcgccgggttgctgagcggcgtcacagatgctcccgcgggtccgctcccgcgggtccattcccaggactttgggttctcggacagaggccttaggacacggggcgggaagctggctctccagacc

SEQ ID NO: 20206 - DNA, 352 bp, Homo sapiens
  chr13:98869699-98870051
  hypo
cgtctacgaccgtcgtcgcaggaaatgatccttgtaactttctcgtgttgctgtcttgtcactgctgtactcgagcttttgtagctcctgagacttaagtagcattcatcctttgcctgaggatcaagtgtgggcttcgtagctcggggagcctgggagagagcaatgagcctccatggaggggccctgtacaccgggaggtgcctgggcaactcccatggctcatctcaaccacagtcctcggcggtttgttttctgcattagcttctcatgccagaacaccctcttatttgtttacctgcttagtgttggcctcttgcaggtagagtggccactccttggagggcaaggc

SEQ ID NO: 20207 - DNA, 220 bp, Homo sapiens
  chr13:98870098-98870318
  hypo
gcatgaaactgactggtgacagttctgctcggtcgtttaactatacgagagttggtgctgtcctagcataacaagggaaagagcaagtgggaagagcttctgagtcccttcctcgtgttttcacagcgtgaaggtggggctgggattggagtccggcccgccagaccctcaacttacccatcttctgggcactaagagccgcctcctttgtgagattcgc

SEQ ID NO: 20208 - DNA, 82 bp, Homo sapiens; identical to SEQ ID NO: 15562
  chr13:99115936-99116018
  hypo

SEQ ID NO: 20209 - DNA, 124 bp, Homo sapiens
  chr13:99404493-99404617
  hyper
cggtgtttctgccgcccctgccgtcacccgctgggtcccgtcccgctccaagcgcactcccggcccgcagggtgggaatacgaggattacagtgccccacgggcgggcgggccaggatcgcaac

SEQ ID NO: 20210 - DNA, 247 bp, Homo sapiens
  chr14:100747027-100747274
  hypo
cgcaatacctgtccgtgtttccaagcagagttcaagttcatgtcttcacaagtagatgagagtcacttccagtcgggggaagcccgcctgagcagtgttttgagagtgcgtacattggaggactgccccacgtccgtttgcactctgccttgcaaaacttactgtggagacgtgtcccagactggtctcagaccagagtttgtggcacaggaaaacctggccccctaaaaagaagttttggaattgg

SEQ ID NO: 20211 - DNA, 208 bp, Homo sapiens
  chr14:100748335-100748543
  hypo
cgttatcacccagtccccttgtaaaatctggaatggagcgtttaagctgagcgttagcatcaggtcagcaggcaaagcaaacctcccacaaactgggtgccgtaaggtgggaggtgacacatggagagcttcgtcctggccgagcaggcacccagccccatgtcccccgccagcattctggatgtcagaggagggtgcgtgtgatggc

SEQ ID NO: 20212 - DNA, 247 bp, Homo sapiens
  chr14:102230139-102230386
  hypo
cgccacttccattgcaagctgccaggcaactcagtggttagttctttttcttccatcaccttgttttccttcaaaccacctctgctactgacgtcctgggctagctccctatttctgttgacggtcccttggcctctttctccaataatgttggtatttgaaaaaatttacctagttttggtattttattattgttcacattgtgtgtgtgtgtgtgtgtgtgtgtgggcgcgcgcacttgcgcgtc

SEQ ID NO: 20213 - DNA, 72 bp, Homo sapiens
  chr14:102331847-102331919
  hypo
cgatagagtcaaggagcaagaattccccagaagggagggagtcgtgtgcttctctgggcagatgaaacggtc

SEQ ID NO: 20214 - DNA, 119 bp, Homo sapiens; identical to SEQ ID NO: 15563
  chr14:102691860-102691979
  hypo

SEQ ID NO: 20215 - DNA, 367 bp, Homo sapiens
  chr14:103369461-103369828
  hypo
cgcgggtggcaggcctcatacaggggcctctgactgttctgctcctagcctgtctgtatttgatggaaggtggtgcagcattttccgagtcctaactgtgttttgctttttaacacctttggtttggaagcgagtgatagacagccaagcagagaaactgaaggagcttgacaaggagatccggcccttccggcagaactgggaggaagcagacagcatgaagagcagcgtggagtccctccagaaccgcgtgaccgagctggagagcgtggacaagagcgcggggcaagtggctcggaacacaggtgaggcaggggccggggccgggccagcagtgtgcatctgggccccgggcgagtgctggggc

SEQ ID NO: 20216 - DNA, 279 bp, Homo sapiens
  chr14:103423623-103423902
  hypo
cgcctctgtctccatctctgctgcccactctccacagctgtgactcacacactcatggacagtactggctgtaaactcacttgctaccgggccctctactctgttaatgttacagaaagctaccgctttcctggccgcctccattcagtgatcaagcaccatctctggttctctggaatccacttattcctccccacagcagtgcccggctccgcagcaacgagagaggcaatgacttgtgcagaaacaggcttatcaaagatctggcgggcacttacc

SEQ ID NO: 20217 - DNA, 344 bp, Homo sapiens
  chr14:103977202-103977546
  hypo
cgaggcgagaccctccgagcggagtccggctggttaaagggcctgcacgggtctctcacagaagaaggaaagctggtcctgagggtggagccaggggaatctgggggccacttcagcattctttgttgccattggctttggttcagtaagctttgttgatttattttgttgttgttattgttgttagagtgatggggctgattgcttataagttctgaggttcttatttgcgtttccagctccctgggtattcattcatacctggtttctggctgtggtgaaatgtcttctgaccaagtgggttgataaacagggggcttcgctggagcgggggcagggggcgc

SEQ ID NO: 20218 - DNA, 37 bp, Homo sapiens; identical to SEQ ID NO: 13395
  chr14:103977769-103977806
  hypo

SEQ ID NO: 20219 - DNA, 89 bp, Homo sapiens; identical to SEQ ID NO: 13396
  chr14:103977835-103977924
  hypo

SEQ ID NO: 20220 - DNA, 76 bp, Homo sapiens
  chr14:105155749-105155825
  hyper
cgcgagggggcggccaggttattcacgggagtggggagaccccttaaagcgccctcagggaccggccacagtgggc

SEQ ID NO: 20221 - DNA, 168 bp, Homo sapiens; identical to SEQ ID NO: 7949
  chr14:105240770-105240938
  hypo

SEQ ID NO: 20222 - DNA, 133 bp, Homo sapiens; identical to SEQ ID NO: 7950
  chr14:105241177-105241310
  hypo

SEQ ID NO: 20223 - DNA, 227 bp, Homo sapiens; identical to SEQ ID NO: 7951
  chr14:105241428-105241655
  hypo

SEQ ID NO: 20224 - DNA, 127 bp, Homo sapiens
  chr14:105244222-105244349
  hypo
cggtgtgaagccccggcacacccacctcccactcgctcctggatggtccgatctgccccagtatgcaatccccagggccagagtctcgagcccactgccccggaaccgttccccggagaaaagcccc

SEQ ID NO: 20225 - DNA, 423 bp, Homo sapiens; identical to SEQ ID NO: 13401
  chr14:105689521-105689944
  hypo

SEQ ID NO: 20226 - DNA, 396 bp, Homo sapiens
  chr14:105728110-105728506
  hypo
cggacaccagcattcccggccccatgggactggagagggggactgcggcgcccacacggcgtgaggaccaaggagcgaaacccacaccttctggagaatgatgcccagcactgcaccggcccacggctcactgcccctacccagtgccactccccttctgcaggccccccctgctctgagtgctcctcaccggcagccaacaccacctggcacgggaacacacggcccggccgaagctccgtgtagagcagtagtgcccagccccaacccaccaagggcaaggccctggcagcactcagcatacagcactcagcggccgaccaagcacccacacaggagcccggcaggcagactgggcatcctcaggccccgcacatgcctggacggggctatgac

SEQ ID NO: 20227 - DNA, 528 bp, Homo sapiens
  chr14:21560027-21560555
  hypo
cgtggcggtcgatcttgcctgggccccagcagcagaggcagagtgccccggtccctcacccgggcgcgggtgcagggaagccagagagcccagcgacctgccccgggcccaggtttcctcctcggcctccaccacctcctcttcttcctcaggctcctccgcacggtgccggcgagcccgggccgggagagcagaggacagcgggcggaagcctccgaagctgcggccgggaccgggctcagcaccctcgccgttgggccggccctcgccagctcgcaggctcaggtagcccaagaggctcgggggctcacggcgctcggccggggtgggagccggggccaagaggagcgctgggcccaacggctcataggccagcaggccgaggtcaggaggctggggggcgcgggcaggcccggaggcaggccccggggcacgcagtgggcccagcttgctggcgtgcaccttcatgtggttcttaaggaaccagggctccttgaagcagcggccgcacaccggacacgcatgatc

SEQ ID NO: 20228 - DNA, 91 bp, Homo sapiens
  chr14:21969884-21969975
  hypo
cgacagggtcgatcagcatcactggctttcatgcactcctccttggttccatagtcacagaattcttgcacttgggcccgacctcgagagc

SEQ ID NO: 20229 - DNA, 77 bp, Homo sapiens; identical to SEQ ID NO: 11102
  chr14:50511831-50511908
  hyper

SEQ ID NO: 20230 - DNA, 459 bp, Homo sapiens
  chr14:51171654-51172113
  hypo
cggacgtcgctgcagaactcgcactcgaaaggcttctcccccagtgcacgatcatgtgccttttcaagtctgagctgattttgaacttggcgctacagagccagcactggaaggagatatccccagtgtgggatcgcaggtggacggtgagctggctggagttgcggctgacataggggcagagctggcatttgtatggctgctcgtccgagtggatccgtaggtgcttcttgaggctcctgctgtccacggcagcatagtcacacaggtaacactcgtgcggcatcacatgtgcatggtcaggttgtccttccgctgaagcacttgtcacagaactcacacttgagcggttcgtcacccgttgtggattctgagatagcggtccaagtctttcatgccatggagagttttgaagtggcaacctgggtagcaacagtcgaatgtcctctctccaagggc

SEQ ID NO: 20231 - DNA, 228 bp, Homo sapiens
  chr14:53417820-53418048
  hyper
ccgccccctctgtccgagcctggctgggctgggcgcgctggctccctccttcgccgcccgcagagctgccctgagcgggtccggccggcctcgcctctgcccccgccctcccggcgccgcgctcgggggagggggctgcgggtcccgggcggggcggggcggcgtggggcggggcggcgcgggggtggcggggggcgcggcggggcggcaatctcggccccgcggagc

SEQ ID NO: 20232 - DNA, 297 bp, Homo sapiens; identical to SEQ ID NO: 7959
  chr14:55765714-55766011
  hypo

SEQ ID NO: 20233 - DNA, 55 bp, Homo sapiens; identical to SEQ ID NO: 7960
  chr14:55766084-55766139
  hypo

SEQ ID NO: 20234 - DNA, 193 bp, Homo sapiens
  chr14:55817984-55818177
  hypo
cggcagggccagcgtgagcctgggagcctctcaaggaataacagcttccgtcgaaatgtgggcagagtattgcttgcaaatagcactcaggctgatgaaggcaaaacaaagaaaggcgtcttggaggcacctgacactcaggtgaatcctgtggggtctgtatctgtggattgtggcccttcaagagctgatc

SEQ ID NO: 20235 - DNA, 114 bp, Homo sapiens
  chr14:58332405-58332519
  hyper
cccgcctcgcgcagggcagccgcgcggcgtcttacttttctggctggagtaacctggataatagccatagtagccggtgatccgcaggatccggtcctcgatagtggccacccc

SEQ ID NO: 20236 - DNA, 48 bp, Homo sapiens
  chr14:58332593-58332641
  hyper
cggggcccgggagctggtgcaggtgccggagccgctggtgctgatctt

SEQ ID NO: 20237 - DNA, 164 bp, Homo sapiens
  chr14:58332908-58333072
  hyper
cgaaaactagacaccccaaccccacctgatgaaagggatgtttggtcagtggggcgcgagaggagaaggcgacggtggccaggggctcagagaagggtgttgggagtgggagaaacccaagagggactcatagctgttaatgcgaggcattaactctgtcgctc

SEQ ID NO: 20238 - DNA, 76 bp, Homo sapiens
  chr14:62161828-62161904
  binary
cgaaatcccttctcagcagcgcctcccaaagccgggcaccgccttccttcggagaaggcgcagagtccccagactc

SEQ ID NO: 20239 - DNA, 101 bp, Homo sapiens
  chr14:63857003-63857104
  hypo
cgcattctcgacacacacacacacacacacacacacacacacacacacacgcttgctctctacaaagcacagtgaatcttgtgaactcagcaccgggtgcc

SEQ ID NO: 20240 - DNA, 230 bp, Homo sapiens
  chr14:69278049-69278279
  hypo
cgggtggagcactggtcgggaaagccaaggacaggcactcgcagccagggcggctgtgtgggtgggaggacgcagggggctgcgctccagtctcccctaattagctcaacctggctacatccttaccattgcatgtgttcatccttatgtgaaacggagcccatattgacctagcacccagtatgtgcaaggcgctggctgaatagggagctgcagcgggagatttcagc

SEQ ID NO: 20241 - DNA, 148 bp, Homo sapiens
  chr14:69345646-69345794
  hypo
cgcattatttcttgccccagacgccacccctgagcgtgctccatgcaggaggcgagtacctgggggtcgttgccaatatcataacccaagctgatgaggcaggctttgaactcctcgggacccagtgtgccggagtgatcctggggcc

SEQ ID NO: 20242 - DNA, 67 bp, Homo sapiens; identical to SEQ ID NO: 5963
  chr14:89818034-89818101
  hyper

SEQ ID NO: 20243 - DNA, 132 bp, Homo sapiens
  chr14:99902515-99902647
  hypo
cgtggtgatcacgggaatgatggagattacaattcaagatgagatgggtggaaacacaaagcctaaccagatcaccaccgtacttccgccttccaagtgactcccgggaaagttcatcaaacagcttgtgtc

SEQ ID NO: 20244 - DNA, 162 bp, Homo sapiens
  chr15:28360064-28360226
  hypo
cgaggctgcaagtgcatggcacacaccaagatataagaggagcaacgagagagtacttcacccaaggagctgaacgaagaattcacaattcagccaaatgcttaaaactaaccaccgagaaagttacagcaactggctagcaagggttccctccctgcagcc

SEQ ID NO: 20245 - DNA, 116 bp, Homo sapiens; identical to SEQ ID NO: 15587
  chr15:28516961-28517077
  hypo

SEQ ID NO: 20246 - DNA, 177 bp, Homo sapiens; identical to SEQ ID NO: 15588
  chr15:28517198-28517375
  hypo

SEQ ID NO: 20247 - DNA, 250 bp, Homo sapiens; identical to SEQ ID NO: 10306
  chr15:31561317-31561567
  hypo

SEQ ID NO: 20248 - DNA, 225 bp, Homo sapiens
  chr15:34873206-34873431
  hypo
cgtttctctaaggaccaggctgaaacgcagggcatgtgatctctgccgaagacattgaagccacccagtgatgtgtgcagggcctcgatccccaccgaccgccagtcctgtcctcccctggacagtaaaggtttctccaagacttcagaccatggtgtcacctgaggcccacacctgttaagtcactggggcaggtatgcgtggcagaggacagcgaggagtgcc

SEQ ID NO: 20249 - DNA, 78 bp, Homo sapiens; identical to SEQ ID NO: 6926
  chr15:54191760-54191838
  hypo

SEQ ID NO: 20250 - DNA, 86 bp, Homo sapiens
  chr15:55965701-55965787
  hypo
cgtggtccccgggagctccagaacttggattgaattctcagtacttaggcggaaagacaagcgatacagcaccacttggccccgcc

SEQ ID NO: 20251 - DNA, 72 bp, Homo sapiens; identical to SEQ ID NO: 5974
  chr15:63795400-63795472
  hyper

SEQ ID NO: 20252 - DNA, 351 bp, Homo sapiens; identical to SEQ ID NO: 5757
  chr15:63795501-63795852
  binary

SEQ ID NO: 20253 - DNA, 338 bp, Homo sapiens; identical to SEQ ID NO: 5758
  chr15:63795894-63796232
  binary

SEQ ID NO: 20254 - DNA, 82 bp, Homo sapiens
  chr15:65242083-65242165
  hypo
cggccaccgaatgctgctcatttggctgcatggcgtggccacggctggtgagaaccccagcaaagcgctgttcgagggcctc

SEQ ID NO: 20255 - DNA, 505 bp, Homo sapiens
  chr15:90611268-90611773
  hypo
cgagaagtcctacacgtccaagtacaacctggtgacgcacatcctgggccacaacggcatcaagccacactcgtgcccacactgcagcaagctcttcaagcagcccagccacctgcagacgcacctgctgacgcaccagggcacccggccccacaagtgccaggtatgccacaaggccttcacgcagaccagccacctcaagcgccacatgctgctgcactcggaggtcaagccctacagctgccacttctgcggccgcggcttcgcctaccccagcgagctcaaggcccacgaagtgaagcatgagagtggccgctgccatgtctgcgtcgagtgcggcctggacttctccaccctgacccagctcaagcgccacctggcctcccaccagggccccaccctctaccagtgcctcgagtgtgacaagtccttccactaccgcagccagttgcagaaccacatgctcaagcaccagaacgtgcgacccttcgtgtgcactgaatgc

SEQ ID NO: 20256 - DNA, 364 bp, Homo sapiens
  chr15:90903993-90904357
  hypo
cgaacccacacgggagaacggcccttcaaatgcccggagtgcgggaagggcttcagagatagttctcattttgtagctcacatgagcactcattcaggagagaggcctttcagttgtcctgactgccacaaaagcttcagtcagagctcacatttggtcacgcaccaaagaacacacacaggtgagagaccttttaagtgcgaaaactgtgggaaaggattcgccgacagctccgccctcattaagcaccaacgaatccacaccggagaaagaccctacaaatgtggagagtgtgggaagagcttcaatcagagctcccactttattacccatcagcgaatccacttaggagacaggccctatc

SEQ ID NO: 20257 - DNA, 268 bp, Homo sapiens
  chr15:99482494-99482762
  hypo
cggcatggcatacctcaacgccaataagttcgtccacagagaccttgctgcccggaattgcatggtagccgaagatttcacagtcaaaatcggaggtgtgtccttagctttccaggtctgggcaagaactaaactcaggtgttttgaggactttgttggcattagtctgcccctggagaggttttctagtgtgtcccttgagtgcacggactccttcttgggaatgatgtgattgtctccagttgatggtcacaaacctggcacggtc

SEQ ID NO: 20258 - DNA, 42 bp, Homo sapiens; identical to SEQ ID NO: 15604
  chr16:11037121-11037163
  hypo

SEQ ID NO: 20259 - DNA, 180 bp, Homo sapiens; identical to SEQ ID NO: 13477
  chr16:142447-142627
  hypo

SEQ ID NO: 20260 - DNA, 53 bp, Homo sapiens; identical to SEQ ID NO: 6945
  chr16:1472227-1472280
  hypo

SEQ ID NO: 20261 - DNA, 66 bp, Homo sapiens
  chr16:16188327-16188393
  hypo
cgtgcatacctttgatggcctgggcgctttcaggagtgttctttttctttttcttttttttgagac

SEQ ID NO: 20262 - DNA, 135 bp, Homo sapiens
  chr16:1651481-1651616
  hypo
cgtctaagcatgtagggctgaagcatcgttatctgtgataaactcacaaatactcaggtaaaatacccacgtagctggagggaaagcagacctggcagtgggaacagcgggcgaatcgacatggagggtggatgc

SEQ ID NO: 20263 - DNA, 301 bp, Homo sapiens; identical to SEQ ID NO: 7994
  chr16:1652282-1652583
  hypo

SEQ ID NO: 20264 - DNA, 90 bp, Homo sapiens
  chr16:1677046-1677136
  hypo
cgtaagtaacgctgtggtgaacatcggtgtgcacgcttcatactttagactgcttctttggcatacagtattagaattaggttcgtgatc

SEQ ID NO: 20265 - DNA, 195 bp, Homo sapiens; identical to SEQ ID NO: 7998
  chr16:1730112-1730307
  hypo

SEQ ID NO: 20266 - DNA, 105 bp, Homo sapiens; identical to SEQ ID NO: 7999
  chr16:1730761-1730866
  hypo

SEQ ID NO: 20267 - DNA, 346 bp, Homo sapiens; identical to SEQ ID NO: 15612
  chr16:1812272-1812618
  hypo

SEQ ID NO: 20268 - DNA, 184 bp, Homo sapiens; identical to SEQ ID NO: 9179
  chr16:1813299-1813483
  hypo

SEQ ID NO: 20269 - DNA, 90 bp, Homo sapiens
  chr16:1814037-1814127
  hypo
gccctacctgtctcagatttctggagggatgggtaggagccagggttcgtgcccacggcgcctccctgctccctgcagctgagtcccaac

SEQ ID NO: 20270 - DNA, 56 bp, Homo sapiens
  chr16:21964488-21964544
  hyper
cgcaaaaagcagtgacgtacattattctctgcatatatttacttgggaaattgtgc

SEQ ID NO: 20271 - DNA, 389 bp, Homo sapiens; identical to SEQ ID NO: 6435
  chr16:2280815-2281204
  hypo

SEQ ID NO: 20272 - DNA, 238 bp, Homo sapiens; identical to SEQ ID NO: 6436
  chr16:2281402-2281640
  hypo

SEQ ID NO: 20273 - DNA, 61 bp, Homo sapiens; identical to SEQ ID NO: 6437
  chr16:2281702-2281763
  hypo

SEQ ID NO: 20274 - DNA, 810 bp, Homo sapiens
  chr16:2282326-2283136
  hypo
cgctatgtgtgtgcgctgtgccacaagaccttcaagacggtgagccggcgtgcggggagccagtgtgtgggtggcaggccccctcctgttcccccaggagggccctgagctgccacgccctcccccacagggcagcatcctcaaggcccacatggtcactcacagcagccgcaaggaccacgagtgcaagctctgtggggcctccttccgcaccaagggctcactcatccggcaccaccggcggcacacgggtgagctggccgcacctcgggctggagcccggtagcaccccgatggttggccctggggtgccccagcctcgcattccccagctttgggggatgaggcgggggcccctgcctgccttcgccttgtcaccttgtcgccagcctgctggggctgcccggggctgactaggttctctctgcagatgagcgcccctacaagtgctccaagtgtggaaagagcttccgggagtcgggtgcactgacccggcacctcaagtctctcaccccctgcacagagaaaatccgcttcagtgtgagcaaggacgtggttgtcagcaaagaggacgcacgtgcaggtcagcatggtgcgggcagctgcctggtcctgggggctggctgtggacgcagccgccactggggtgtgtgagggatcttcactccctcactccaccttgaaggttctggagctggagctgccggcttggggacagccacatcatcggtgacaggcgagcctatagagacttcacccgtgattcacctggtgacagatgccaagggcaccgtcatccacgaagtccac

SEQ ID NO: 20275 - DNA, 512 bp, Homo sapiens
  chr16:2358246-2358758
  hypo
cgtggagctgggcttccctcgcccggggccgtgtccagctatccagcccacactcagcgctgtatgcggatgctgctgccttcagtggtcccaactgcctgccaaccgtcccaggtggagccttgctgctggcggctcttgtggttgggtgctctcgaaggttactgattcggaaagaacaggctggacaaggcaaacactcacctttcgcctcaaatttcccaatgagctgggctcccattgccatggcgacattagacaggaggcaggagcagagcttctggctcagagtcatccagttgtaccgaggggccacgaagaagtaggggatgtaggtgaagaagtagaggaagcctccgaaggctgctgccatgttggctgcaggtgttggaagacccggggggcgtgagcgtcagtgccctcaaaaggggcttgggctccccgaggtacaggcaaccccctactcctggggccgagccacccaacctgctcctggcacttgccatctacac

SEQ ID NO: 20276 - DNA, 150 bp, Homo sapiens; identical to SEQ ID NO: 6952
  chr16:24739345-24739495
  hypo

SEQ ID NO: 20277 - DNA, 395 bp, Homo sapiens; identical to SEQ ID NO: 13494
  chr16:2540434-2540829
  hypo

SEQ ID NO: 20278 - DNA, 60 bp, Homo sapiens; identical to SEQ ID NO: 13495
  chr16:2540933-2540993
  hypo

SEQ ID NO: 20279 - DNA, 64 bp, Homo sapiens
  chr16:28183893-28183957
  hypo
cggtcggtttcaatttcgattacttctccaggagcctagaaagggtataaccaacccaccgcac

SEQ ID NO: 20280 - DNA, 358 bp, Homo sapiens; identical to SEQ ID NO: 18430
  chr16:311205-311563
  hypo

SEQ ID NO: 20281 - DNA, 284 bp, Homo sapiens
  chr16:31131573-31131857
  hypo
cgtgggctgtgagtggcttggcacatctgggcgtgggtgcagggagttggctgccctggcagcactcttatggcccatacttacagttaaccggcggctggacgagtgggtagacaagaaccggctggcgctgaccaagacagtgaaggatgctgtacagaagaactcagagaagtacctgagcgagctcgcagagcagcctgagcgcaagatcactcgcaaccaaaagcgcaagcatgatgagatcaaccatgtgcagaaggtccggatcccttcccatccac

SEQ ID NO: 20282 - DNA, 201 bp, Homo sapiens; identical to SEQ ID NO: 8023
  chr16:31138407-31138608
  hypo

SEQ ID NO: 20283 - DNA, 392 bp, Homo sapiens
  chr16:325107-325499
  binary
cggggccgcggaagcgggcgagggcgggacgagccgggcctcctctcccctatgtgctccccacccttgcacagcgcgctcagcagggctctgagaactgccagactccaggaaaacccaggcctaggccaccagcccagtgaccccagggcccagtgggaggcagggcgctcaccctcctccgagacgcagaacttctgggccaaccactgcacgacgtcgctgcctgcacgggagagacagaggtggagggaggccgaggcgcgcacgcacccccgccccggcgcgcctcacctgtcaccgcgtggggaatgacggtgaccagcaggcgctggctccgcatcttcacgccctggtcggggtcctgcatgctcacgaccacccgctccatc

SEQ ID NO: 20284 - DNA, 55 bp, Homo sapiens
  chr16:325546-325601
  binary
attccctggcaccggccgggatgccccggatccgggagcgcggagattaacgcgc

SEQ ID NO: 20285 - DNA, 147 bp, Homo sapiens
  chr16:3900217-3900364
  hypo
cgtggtcccattttacgcattactcggagggaaagcccgcggttaggtaggaagtattgaaagtgcttcagttcacttaccttggccatgcctcctgcctgtgcggtgttcagtcccgcgtgaccagtcatttgcggggaaacctgc

SEQ ID NO: 20286 - DNA, 116 bp, Homo sapiens
  chr16:4557910-4558026
  hypo
cgtggagcggatccactacatagggcagaacgagccggagctactggtggcccatgcatacacccgctacatgggggatctctcggggggccaggtgctgaagaaggtggcccagc

SEQ ID NO: 20287 - DNA, 568 bp, Homo sapiens
  chr16:4802468-4803036
  hypo
cggtgccccggcggaagccccggccacaggccgggcaggtgtagggcttctcacctgtgtgcgtccggcggtgggcgctgaagtgcgagctgttgttgaagcgcttcccgcactgggtgcaggcatagggccgctccccgctgtgtgtcctgcggtggatgaccaggctggagctctggctgaagcgcttcccacactcggggcacgggtagggcttctcgcctgtgtgcaccctctggtgcgtgctgaagttggagcggtcgctaaagcccttcccacagactaggcacttgtaaggccgctcgcccgtgtgtgtgcgctggtgcttggtcaagtgggacgtcttgctgaagcctttgccacattcggggcaggtgtacggcttgtcagccccatgggaagcccgtcttcctggtggggggccgcctcttggctgatcaggcctgaccaagcccctgactggggctggcctctgacctgggagcgggtggccaggcccctggcatcgtgccgagagcactcggtaccactccattctcaacggggcatcctccctgccatcaccgcc

SEQ ID NO: 20288 - DNA, 1300 bp, Homo sapiens; identical to SEQ ID NO: 13525
  chr16:58030214-58031514
  hypo

SEQ ID NO: 20289 - DNA, 161 bp, Homo sapiens
  chr16:67006210-67006371
  hypo
cgaatcaggccatgagtgcctaactcccatcccatcctttctctgtagattctggaagccctgtctttttctatgagttccagcatcgacccagttcttttgcgaagatcaaacctgcctgggtgaaggctgatcatggggccgagggtgcttttgtgttc

SEQ ID NO: 20290 - DNA, 80 bp, Homo sapiens
  chr16:672467-672547
  hypo
cgagcgcgcgtcctgactcatcccctagagcactcgctcgttcttttgttttgttttttgagacacggtctggctctgtc

SEQ ID NO: 20291 - DNA, 102 bp, Homo sapiens; identical to SEQ ID NO: 15645
  chr16:68504292-68504394
  hyper

SEQ ID NO: 20292 - DNA, 37 bp, Homo sapiens
  chr16:69334756-69334793
  hypo
cgaagccgattgtatttgtgttgcacacgtttttatc

SEQ ID NO: 20293 - DNA, 96 bp, Homo sapiens
  chr16:69906932-69907028
  hypo
cgcttggatgaattgtaggtagaggaatgcaggtgttgaaatttggtaagtgacgctgagatagttttctagtgctcgtgacagcagaggtgtggc

SEQ ID NO: 20294 - DNA, 364 bp, Homo sapiens; identical to SEQ ID NO: 13539
  chr16:70754664-70755028
  hypo

SEQ ID NO: 20295 - DNA, 116 bp, Homo sapiens
  chr16:71754757-71754873
  hypo
cggaaaaaaaaacaaaagacgaaaaaaaaaaaaacaatgtgaaatactcttaggtagaagatgtttctgcattcaaaactttaaaacaatatagactcatatctgggaatacacac

SEQ ID NO: 20296 - DNA, 477 bp, Homo sapiens
  chr16:72991953-72992430
  hypo
cggctccgggtgcttctccttcatgtgtgcctccagggtctgctggtacttatagtgccagttgcacttggggcacttgagtgtcttacacgagttacgagaatgcatcatggtcatgtggccgcccagcgagcgggaggagcccaggaccgtgtcgcatttggggcactccacgccactccccgaggggcactccccaaccccaagctcgcagagggagccagcgtgctggtgatggggaacgaagcccccatcgtcaccctctgtgctttcatttggttctggtgctgtggcattgtctttattggcactttcgtcagcgaagtccagcctcctgccgccctctgccacattggccctgacgccctcactgttaaagcttaaacgattcctcctgttcgcaccatcaaagacaacaaaggaagaagcagaattagaactagtagaagctgtgcccctcgacagggtctggagcac

SEQ ID NO: 20297 - DNA, 234 bp, Homo sapiens; identical to SEQ ID NO: 13541
  chr16:74908874-74909108
  hypo

SEQ ID NO: 20298 - DNA, 110 bp, Homo sapiens
  chr16:81700929-81701039
  hypo
cgccaaactgcgttctgaagaatgaccatgtatctctgtgcccccacgccactcggagtgttcttgtggcaaaggaggcgagaagacacggctgtggtccccagtggacc

SEQ ID NO: 20299 - DNA, 543 bp, Homo sapiens
  chr16:84132267-84132810
  hypo
cgaaatgcaaggaagaagcagacacaaggacgcgtctttcagcacgagaaggcggccgcagccttgaagtctgaaggctttgagatgaagctggcgaaaatcgcttccaacagaaacaaagatcactaccatctactactgcaaaccctcagattttcttctaccagaacagtacgaagtctctttttaaaaaataattctgcccccccaacaccgaccctgcgcactaaacaaaactaaactaaaaaattcctaccaggaaaatgttcacaattagcaaactagatggaaggatgcggatactcactgtactatttttcaactactctgcagtttgagattttcaaagtaaacagcagagagaaatttgcctacagtcacaatactcacattcagcatacttgagggaacgaaagacttttcgttggggcgtgacccgtttgatgtttggatgatcttcaagtgttagcagccccgctttctgtttttcttttatctgaatcacctcaaaatcactagggtagtcactggatggattgtttc

SEQ ID NO: 20300 - DNA, 109 bp, Homo sapiens; identical to SEQ ID NO: 15651
  chr16:84170884-84170993
  hypo

SEQ ID NO: 20301 - DNA, 133 bp, Homo sapiens; identical to SEQ ID NO: 18462
  chr16:85007919-85008052
  hypo

SEQ ID NO: 20302 - DNA, 260 bp, Homo sapiens
  chr16:85671775-85672035
  hypo
ctctcctctcattgtgtctcaagggtgtagtttaaaaattcaattcagacgaagctgtggcatgcgctgccctgggagaaaggctgggaaggagaggaagaggaggccctcgctgggatttatttttctggaggcgctgagacgtcttctcttcttcaaagctcagtcacccgcccaccagcgcgggccagacacccttccccagggccagcctgaccctttaacctactcacctactcactgccgaggctggggcgctt

SEQ ID NO: 20303 - DNA, 97 bp, Homo sapiens
  chr16:85672078-85672175
  hypo
cactttccttccttgctgtgtgatccgggcaggccgctttgcctctctgagcttccactttttcttgggtgaggagcaggtctctacctcatgaatc

SEQ ID NO: 20304 - DNA, 562 bp, Homo sapiens
  chr16:86532408-86532970
  hyper
cgttgcagctctggcgttcctggaccccgggcgctcaggcgcgcacccctcccctgggctggtgaaggtataataaacacggcgttcacgccggcaggacccatcattagcccaaaccgcggtggaaaggagcgctcggttgcagagctagaacagcagttaccagccggggctgcctggcaccctcccgccgccgccggcgccttcctggccgccgagctgcctcgcagccaggtcccaatgccgaccccaaggcgtgccgcccctggaacccgcgggggtcccaggtccacgccaaaagaaacgcgctctgcttctcccgggcgtcagatgcaccgcctcggccggacgccagccctggacaaatttttccgggaaggcgacgtaaagaatgtcagacttgcaaaaccagagtgcgcctcggttgcttaaaatggagagagagagagagagagagaagtcaggggcaggtgggcagcggtggaggggcggctgccctggagtcacggacttcagcagaggcggcttagcaaaaaacgcagaaaaacgtgggggcggcagc

SEQ ID NO: 20305 - DNA, 728 bp, Homo sapiens
  chr16:87739334-87740062
  hypo
cggccacacaatggcgtccatcttctggacaagggctggagccgcagagccgggcagggcctgggcgggggcgggggcgggggcgctgctgcctgcgctctggcttctcaaccctgtccgagcctcttccaaccagcttagctgagagtgtgaggaaaggaccttgattgcccagcactcagacaaagtgcccagaccggccgccaaagccggcgcaacgcaacacaagctgcagccctgtgcggggtcggtgcaacacaaacacaagctgcagctctcagggggttggcacaaggcaacacaacctgcagcctgaggggaggaggggtcggcggaacgcaaacacaagctgtagcccttgcggggggcgggcgggctgccggcgcaaaagcaaacacaagctgcagccctcgcgggggggtcagcgtaatgcaaacacaagctgcagccctcgggggggggtcagcgtaatgcaaacacaagctgcagccctcgggggggggtcagcgcaatgcaaacacaagctgcagcccttgagggggtcggtggcggggaggggggtgagctggcacaacccaaacacaagctgcagccctcggagagggggaagttggcgcaatgcaaacacaagctgcagcccttgggggggtcggcgtgggggggttggtcggcacaacacaacacaagctgcagcctccaggggggtcggcggagggggccggcacaac

SEQ ID NO: 20306 - DNA, 426 bp, Homo sapiens
  chr16:87744572-87744998
  hypo
cggggaggtcccgggcacctcagcccagggcaactggcttctgaggtagcagccccgccagcatccaggacagactaaggggaccgtgaccaagggctctccaagcctagtcacccaggacagtcagagacggaaccctcgcccctcttgagagagctcatgggctttgggggccccaataccaaaaggtgctggaggaaggcagtggtggcagggacccaagttagggctgcgcaccacggcgcatgctactcagaggttgcactaccttcagctgtccctcaaaccaacggttcctggtggcgtcgtagaagtacagatcgttgaagaactcgcccgacaggctctcctcctcttcctcgtcacagacacccccgaagaacagtgtctggtgattcggggccatggccacggaaaagccagacc

SEQ ID NO: 20307 - DNA, 151 bp, Homo sapiens
  chr16:87864425-87864576
  hypo
cgtgccgtcgagaggccgccggctccctgtatccttgaggcatgtccacgtcccagagcaggaggttggaacagaacggcatcccgaggacccctagccgaggcgggaaggtaagaggctgacgtcgtgcgtgggccccgccggccccagt

SEQ ID NO: 20308 - DNA, 353 bp, Homo sapiens
  chr16:88037900-88038253
  hypo
cgtcgtcccccagactacagtaatactcaacaatgatcggcagaacgccattgtagccaagatggaagaccccttgagcaacagggcaccggattccctggaaaatgtcattagcaagtcagtagcacggcaccaaccccacctttccctgccactgtgcggagtcccatgagaataagtcaacgtccctaagccagggcacagtccagcacacgcttcatctctgtggtcacagggttgagcctggcaggcaccgccccagctctctgaggtcggggagggcaggctgggcgatgctgaatgctgagtccagccacaccaggggcagctgccgccggggacttctgtgtctc

SEQ ID NO: 20309 - DNA, 254 bp, Homo sapiens
  chr16:89445385-89445639
  hypo
cggcacactggggagcgtcaagacgcctcctgcagtcgtagacaagccgggctgaggcattcactgtcgcttagaactgaaaacttagggtcgtccatgcccagaacgtcggcagtgcggaccagccccaggaaggcctttctcactggcttctagaaggtggggccggcccccatgcctgccccggcacacggccattctgggagctgctggcagccggcgggctagaaggggtgcacaccgtctgtatgtgc

SEQ ID NO: 20310 - DNA, 58 bp, Homo sapiens; identical to SEQ ID NO: 18470
  chr16:89446081-89446139
  hypo

SEQ ID NO: 20311 - DNA, 64 bp, Homo sapiens
  chr16:89577046-89577110
  hypo
cgcctcagctacttgggaggctgatctttttttattttagagacgggatctcgccctgttgcac

SEQ ID NO: 20312 - DNA, 312 bp, Homo sapiens
  chr16:89871397-89871709
  hypo
cgcgccactgtactccagcctgggcgacagaaggaagcagctgcggtcactctatgggaaaggtgaatggaaacacttaaactcatgtcaaggccgacttactagtatttccacatcagtcaagtaaaatgcaaccccacaacaggctgagactgggagtctgtcatgccaggttcccacggccacggagagacaggctgttctgcctcgcagagctcttgagagcagaaggcattatcacagatcaaaatgagttttacccaagaacccgcatcttgtcatgaacgcaccagaaagcatggccctggcgac

SEQ ID NO: 20313 - DNA, 209 bp, Homo sapiens; identical to SEQ ID NO: 6999
  chr17:16923475-16923684
  hypo

SEQ ID NO: 20314 - DNA, 203 bp, Homo sapiens; identical to SEQ ID NO: 13580
  chr17:17031200-17031403
  hypo

SEQ ID NO: 20315 - DNA, 56 bp, Homo sapiens
  chr17:17287170-17287226
  binary
cgacgcggggcgcggggcgatgcggcgcgccttggcttgccgggccttacgtctgc

SEQ ID NO: 20316 - DNA, 410 bp, Homo sapiens
  chr17:19282076-19282486
  binary
cgaaccagccgcgcgcttctgcccttgtcggtttaggaaactgggaagttccctggtcctgctccccagcccgcagaggggacactgaggcccacggtaggtggtcctctcctcacccgagtctccacacagacaccatggccgagcctctgaaggaggaagacggcgaggacggctctgcggagccccccgggcccgtgaaggccgaacccgcccacaccgctgcctctgtagcggccaagaacctggccctgcttaaagcccgctccttcgatgtgacctttgacgtgggcgacgagtacgagatcatcgagaccataggcaacggggcctatggagtggtgtcctccgcccgccgccgcctcaccggtgagcttcctgagccgtcgcctcccagatgtggcagcgtc

SEQ ID NO: 20317 - DNA, 64 bp, Homo sapiens
  chr17:19842333-19842397
  hypo
cgtgcccgaccacgaattactttttttacagagtaagaaaagttaaatgaaaagaataccatac

SEQ ID NO: 20318 - DNA, 261 bp, Homo sapiens
  chr17:33344328-33344589
  hypo
cgtctccactgtgacctcacaactccttataaatacactgaccgcttcactagttaacctggaacactaacactaaaccctaccccaaaaatataatttcggaagcactatcatcacacatttattctctctccactcgactctgctaagaggttccgaagaacaccagtgaaagaggaaaggtgaagacacagacccaagcagaggccccacctgggtctcatcctcagcaggtactctggccacgctctccaggtagac

SEQ ID NO: 20319 - DNA, 90 bp, Homo sapiens
  chr17:37183607-37183697
  hyper
ttggcaactactgtggctactagtccaggaggctcagcctctggagtgggtccaggaccggctccagccgacttccgaccctctggggcc

SEQ ID NO: 20320 - DNA, 138 bp, Homo sapiens
  chr17:3860438-3860576
  hypo
cgccagacaccctgctaactccttgcgtgccttattctcatgatccgcaaacaagctgggaaggaggatgccattgttatgcccattttacagagtacacaacagagaggttgagtgactagttcaccgtcacacagc

SEQ ID NO: 20321 - DNA, 841 bp, Homo sapiens
  chr17:41245464-41246305
  binary
cgctgtcatgtcttttacttgtctgttcatttggcttgttactcttcttggctccagttgcaggttctttaccttccatgagttgtaggtttctgctgtgcctgactggcatttggttgtacttttttttctttatctcttcactgctagaacaactatcaatttgcaattcagtacaattaggtgggcttagatttctactgactactagttcaagcgcatgaatatgcctggtagaagacttcctcctcagcctattctttttaggtgcttttgaattgtggatatttaattcgagttccatattgcttatactgctgcttataggttcagctttcgttttgaaagcagattctttttcgagtgattctattgggttaggatttttctcattctgaatagaatcaccttttgttttattctcatgaccactattagtaatattcatcacttgaccattctgctccgtttggttagttccctgatttatcatttcaggagtcttttgaactgccaaatctgctttcttgataaaatcctcaggatgaaggcctgatgtaggtctccttttacgctttaatttatttgtgaggggacgctcttgtattatctgtggctcagtaacaaatgctcctataattagattttcagttacatggcttaagttggggaggcttgccttcttccgataggttttcccaaatattttgtcttcaatattactctctactgatttggagtgaactctttcacttttacatattaaagcctcatgaggatcactggccagtaagtctattttctctgaagaaccagaatattcatctacctcatttagaac

SEQ ID NO: 20322 - DNA, 230 bp, Homo sapiens; identical to SEQ ID NO: 15677
  chr17:43180339-43180569
  hypo

SEQ ID NO: 20323 - DNA, 31 bp, Homo sapiens; identical to SEQ ID NO: 18508
  chr17:46152418-46152449
  hypo

SEQ ID NO: 20324 - DNA, 307 bp, Homo sapiens
  chr17:523549-523856
  binary
cgattcacccgcttcacctgctctgaggctggtctcatgggacaaagagggaattgcactgaagtctcagggttttaggaccagaagggtaggagctagagaaggtggcagaggtgaaggttgaacaagtgagtgggactccaggtacaagtcccagcctgcccccggcttcaaccacagtagctcagtttcacggtcttacacattagctccgtggcctggagtaagtttcaaatgagcacagcgcctacttcctatggctgatgaagcacagtgactgactgcaggtaaacgcacctaatatagc

SEQ ID NO: 20325 - DNA, 487 bp, Homo sapiens
  chr17:576348-576835
  binary
cgcaaaaaaaaaacaaaaacaaaaacaaaaaaaaaacaacggcagcatcatttcgaaagccaggaggtcctccagagagcagaaacatggatgagtgctaccacatctgataagccctacacggaagccctcaccacatccactgagggtggacaccaagggtcaagtcgcctctctttagagaaagtctcttcttttgttactgctgaccaccccggcatcactgagagctgttgctatggaaacgaggtatccccagctgaaacagaggtgcttcagccagcctcagcaatgctaacaatgcagcccgctctccacgacggtgctcaacagcagcagaggctgcgggactctcacacacccagcctcagcaatgccaacaacgcagcccactccccatgatggtgctcaacagcagcagaggctgtcggactctcacagccacagatggctgcacgtctacagctctttgcttccctacgtgtcc

SEQ ID NO: 20326 - DNA, 235 bp, Homo sapiens; identical to SEQ ID NO: 15684
  chr17:59239030-59239265
  hypo

SEQ ID NO: 20327 - DNA, 848 bp, Homo sapiens
  chr17:63555681-63556529
  binary
cggaaccgtcgcccccgtgcccccaacccacctcccggatccgcgaaacctacaaaactggatcaccagccgtctcacgccactactgcctgtgccaagaatcccaaactctactgatttcaagcctgtcttttttccaaagaaaaaagtcttatctaaccaataaacaagctgctttccctagcacggaaaagatcaaactaagaagggtaggggctgaacggggtgcaaccccgggcgagaagccagggaccccggatctgggatgggtgcacgctgaacccgaccagagcctcgagccgcggggctgggcggcgcggcccacggagaagtggggctgccgttggcaccgcgctacccgggcggtgggaggtggagcggccccgttacctggaagacgaaggccgccgaagccaggctctcatgtcctccgagcccctccggcccggtcccccggcccaaatgcaactgaacgcctccagagccctggcgggcacacctcgaggccggaaccccgggacacgccagcagcgccccgagcccgggcggggggtcggtccccggcgccgccgtttgcagaggcgcccgcagaaaaagcacagaaagcagcagcctagtccagaaatggcgacgcgcggagtctctgcctctccgcaaaaggggccggggcggccacgggcgaggggcccgggccgggaggagggacgcgagggacacgggcgccccggacttgggccggtcctgcgcgcagactgagcctccgccagcgctgtgggccccttagcgcggacccgcggcagggaggggaaaaggggagggggaagagaagtaggaggagaggatggggc

SEQ ID NO: 20328 - DNA, 675 bp, Homo sapiens
  chr17:64298985-64299660
  binary
cgggcaacgactccacggcgtctcaggacgtggccaaccgcttcgcccgcaaaggggcgctgaggcagaagaacgtgcacgaggtgaaggaccacaaattcatcgcgcgcttcttcaagcagcccaccttctgcagccactgcaccgacttcatctggtaggtgccgggccgggcactcctgccccgctcctccccgcctccgggtcccggcacccggcgctccggcgcgtccgccccggggctggctcactccgataacttggaaccggcgggagtccgaactcttcgcccggagtgacacgcgcgcccggccctgacaccggcgggcaggactcccgggacgtcgccgtcccgccacacacaccccctggcgcgagagggaggctggccccgtacggtggcgaaggggatccctctccgggccgggcccctcacctccccgggcgcgcccacccgcacgcacccagcggagcggccgcttgccggggtgtgagcccaggggacaggggaggaggagaggccctaagggggcaaaggttcccggagaaacgcgccccggagtaacgggggagcggcggcgattgcactgcgcgcggtccaagttgctggcgagccaggctgggcgcgttcggggtgggggggttgtgtttgtgcttcccatcgggctggactgc

SEQ ID NO: 20329 - DNA, 294 bp, Homo sapiens; identical to SEQ ID NO: 13610
  chr17:66420425-66420719
  hypo

SEQ ID NO: 20330 - DNA, 509 bp, Homo sapiens
  chr17:71281749-71282258
  hypo
cgggctgagccggggctgggggccgctgctgcccacccctcatcctccagagcatgggaggggagggagggcaagtctgggccagccttgccttcctgccttgccaggggaggggccgccacggcgtacgggggagcctgggtgatggtgccagcggcgccctcatcgccatggtaaccaccctccccctcctcggggtcccactcctccttgtccatgatgctgaggacgtcacccagcatggagggccccaggtcgatgtggaaggacatgatggactccgcatgcttcagcccgtacgtggccttgggcacgacaggcagatctgtcagatccccaaaggcctgctcatcgaggagggggtcaggggaatgtggacccgcggccccattccgacggggcactgcctcctccgtgcccgcctcctcatcgccgccctccccgtcattggccttcttcacggggctggatgacaggctcttgggcagcttactggtgcccttctccgc

SEQ ID NO: 20331 - DNA, 61 bp, Homo sapiens
  chr17:7187868-7187929
  hypo
cggaagctggagcgtgagcggccactgtccctgctccagctcctgggcagccgtacccacc

SEQ ID NO: 20332 - DNA, 207 bp, Homo sapiens
  chr17:72811689-72811896
  hypo
cgctccgtggtgcggttaaaggacataacacattgccagtcctgggctccttttgcatatgacacagaagcacgcagagtcggagcctttcttctgtaagtgccatgtgctgtagggttagaactggagaggagggaggcaggtggtggacacggcacagcctcagcaggcgtgagttgagcgttcttggtttaaagatccattctc

SEQ ID NO: 20333 - DNA, 79 bp, Homo sapiens
  chr17:72823386-72823465
  hypo
cggcactgccctgtctcactccaacccttcagcgtccctacagtcatctccttttttttttttttttagacagagtctc

SEQ ID NO: 20334 - DNA, 508 bp, Homo sapiens
  chr17:72824032-72824540
  hypo
cgcacccaccccttccgaggcccagctaaagccaagagagccctgcagcccggcaccttccaagggctaagtggtggtgaaggagggagctggcgccaagtcctcccctagtcctgttccccgcctggagtgccggtgcctgagctggtgatgggcacactgccggccatttgttatcattagccctggcatgttgattctctgcttggaaaagagagtgccgctcccagacagccaccgtgacggatggcctccacctcacagtgtcagagccagagccacacatggggagcagggaatggcacggggcttggggcgccctgacctcagggacatctggagccaggttcagaggtcagagagttgtgggagcagctctccaggaagcagccctgccaaggcacagctcagcactggcgtgtggaaaaggcctgggggcccatgcctggaggaagacccttcacccttggccctcagggtcatggctctgagtgtgtgtgcacaactc

SEQ ID NO: 20335 - DNA, 141 bp, Homo sapiens; identical to SEQ ID NO: 8132
  chr17:73242514-73242655
  hypo

SEQ ID NO: 20336 - DNA, 149 bp, Homo sapiens; identical to SEQ ID NO: 18530
  chr17:73635145-73635294
  hypo

SEQ ID NO: 20337 - DNA, 220 bp, Homo sapiens
  chr17:73821496-73821716
  hypo
cggaggggctccgtttgcattccttggtgctctctgagtgcagctggtgtcccgccctgttctgggcggacgcctgtgtgcgtgtgtgtgtgcctgtccagtgtatattgtgtcttagcttccattttaaaaattgttctgtacagagagagatgcagcaggggcgggagggcagagtgggcggaggggagcagccgcacccccagcaccgggtgtctgc

SEQ ID NO: 20338 - DNA, 264 bp, Homo sapiens
  chr17:74387398-74387662
  hypo
cgagctgctggccttgggcaccccgttgggcagtgcctgggccttctccagcagggcatgggtttccagccaggactcgatacggttcaccagccgccagccaccagtgctaaagtgttgcctgatctcctgctcaaagacctcggggggccgccgcaccagctgggtcatggactgcaccacgcggatcagcgccatctcattgtaacagcgactgttttcatagccttcctgcaggcctcggtcactgtcgaagccggcttc

SEQ ID NO: 20339 - DNA, 82 bp, Homo sapiens; identical to SEQ ID NO: 18532
  chr17:74388687-74388769
  hypo

SEQ ID NO: 20340 - DNA, 119 bp, Homo sapiens; identical to SEQ ID NO: 13616
  chr17:74390245-74390364
  hypo

SEQ ID NO: 20341 - DNA, 182 bp, Homo sapiens; identical to SEQ ID NO: 13617
  chr17:74390459-74390641
  hypo

SEQ ID NO: 20342 - DNA, 331 bp, Homo sapiens; identical to SEQ ID NO: 15699
  chr17:76187077-76187408
  hypo

SEQ ID NO: 20343 - DNA, 360 bp, Homo sapiens; identical to SEQ ID NO: 17556
  chr17:76588327-76588687
  hyper

SEQ ID NO: 20344 - DNA, 178 bp, Homo sapiens
  chr17:7806544-7806722
  hypo
cggccactcccctgacccacccgccactttctcttgcccctgcaggcctttagccgggctcatcggattggccaggccaacaaagtgatgatttaccggtttgtgactcgcgcgtcagtggaagagcgaatcacacaagtggccaagagaaagatgatgctgacacacctggttgtgc

SEQ ID NO: 20345 - DNA, 162 bp, Homo sapiens; identical to SEQ ID NO: 8142
  chr17:78590602-78590764
  hypo

SEQ ID NO: 20346 - DNA, 423 bp, Homo sapiens
  chr17:79542405-79542828
  hypo
cgtgagccacagcgcccagctgacacttggtttcttaaaagcaccacttagaaaatagtccagtccgtgtgcaacgactggatgcacacagaactggcagctggcatttctcaggggccagctgtgtgcacagagccacttcgtcctcacaaacacactggtcacaggcactactgctgtccaagacaggaagggttacaaagatgagtgaacctcctaaagcaatcggcaaggacagctggacagctgtgtagagactgggccccccacactacgtgcgcaggctccccgcctcccaagtcagtgccggtgctgcagggccagggcacacgcaggcctccctcctgcctttggggaaccttgaagttgaggctcggaccccaacagccgtctcacactgagtaagactctcccacctccacc

SEQ ID NO: 20347 - DNA, 524 bp, Homo sapiens
  chr17:80445750-80446274
  hypo
cgcctgagcccaggataaacttacctgtgtttatctttcaggatgcttaaatggcagaggccaagcccagactccagacggacatgcggataaggccctgctgcggcagatggaaggcatttacgctgacatccctgtgcggcgtccggagtccagtgcacacgtgcaggagctgtaccaggagtggctggaggggatcaactcccccaaggcccgagaggtgctgcataccacgtaccagagccaggagcgtggcacacacagcctggacatcaagtggtgaagtcaggccagggccttccagctgctcttggggccagagccaagagcctctcagtagagggaggggctgccctgagtggagtattaaagacacttaagaaaaccgctcaatggattactttggtttctccgagttccctgctaccccgtttattggaggcccctcaggcagtttcatgtggtgctatcttcataataggtgtgggattggaactttttttttctttttttttttttgagac

SEQ ID NO: 20348 - DNA, 478 bp, Homo sapiens
  chr17:80554494-80554972
  hypo
cgctcctccaactttgttctttttaaaaatcgcttcagccattctaggtccttggcatttccgcgtgaactgtaggattcctacaccaagcctgctggcgtcttgattgggacggtgttgaatccagagtgtgtggcagagctggcggagcccctctttctttgatctctgccgatctccttgatttcacgtttgttttattccacagaccaccccctccccatcttctcacctacttcaggttccatttcatggtaggaaattcctgtagtcctcccgggcttgctgaagtgctgctccaagttacagtccccgggttgtcaggcgtggcgagagccccttgtgctcagagctctcacggaacacagagcaagcctgtctacgagttcagccggtgaggggcaggggctggtgaaggcggcggcgcctctgggtgtgcccaggggcagggtcgcctccaggccccacgcgctaagcc

SEQ ID NO: 20349 - DNA, 295 bp, Homo sapiens
  chr17:80563218-80563513
  hypo
cgctaatgtctggaatcgtgatgacattatcagtactcaccccagggtagcagagggaagaaaccgtgctgaaaatgacacagaggcctttgggagctaaatgatgttcacggacagagagttcataacggagtgtttgttttattccttacactgatcccctaatttaaaacagttcatactggcataaaagaactgtttatcacgccctgcgagactgcctcttccagcaaagtgaagcagtcatttgtaatttgtttctgccaggtctgcgtctgcagtgcacccgggctgc

SEQ ID NO: 20350 - DNA, 96 bp, Homo sapiens
  chr17:80762951-80763047
  hypo
cggcccgccctgcactcacccttggcaggagcagctgtgtacgcgggggccttgctcagcgcagggctgggctgcacgccgagcgcagactctgac

SEQ ID NO: 20351 - DNA, 169 bp, Homo sapiens
  chr17:80968060-80968229
  hypo
cggctcttctccagcactgctgctgctgagccacgccccagggtccagagtcaccagcaccgggggcttcggccgccactcctgagcagcgatgttgaaggcgaaggtgaaggaggagcacccaggcctgacagcccgaactacagcccagcagagcccggaggcagcc

SEQ ID NO: 20352 - DNA, 32 bp, Homo sapiens
  chr17:9154702-9154734
  hypo
cgcttgcccagtatttaacgagtgtttaccac

SEQ ID NO: 20353 - DNA, 213 bp, Homo sapiens
  chr18:12253892-12254105
  binary
aaccagcggctcgctgagcctggggctgggctctgggggactccagagctggaggcaagtggcgctcacatccgtctcctcacctgccccacccgtggcctgggtttaaaatccacatacccgtctttccgcggccaaagtgatgctgccaggattggttatgaccccaactgccccgacccccagaagtgcaaaacgaacaggctggcaagt

SEQ ID NO: 20354 - DNA, 83 bp, Homo sapiens
  chr18:13233060-13233143
  hypo
cgatggcagaggatctgcttgtcgccacacacagtgcgttagggatggagcttgccaccagtggcgccacctctttgcaggcg

SEQ ID NO: 20355 - DNA, 58 bp, Homo sapiens
  chr18:13233182-13233240
  hypo
tctgcttggacacgggtcactggccgctaagaaggcaaatgccatgccgttcagatac

SEQ ID NO: 20356 - DNA, 311 bp, Homo sapiens; identical to SEQ ID NO: 9277
  chr18:20911034-20911345
  hypo

SEQ ID NO: 20357 - DNA, 995 bp, Homo sapiens; identical to SEQ ID NO: 7060
  chr18:3879130-3880125
  binary

SEQ ID NO: 20358 - DNA, 61 bp, Homo sapiens
  chr18:45353804-45353865
  hypo
cggttagaaaaaaagcacatccctctccctctcccgtctccccccgtctcccactttctac

SEQ ID NO: 20359 - DNA, 238 bp, Homo sapiens
  chr18:45534410-45534648
  hyper
cggccgggagtcgggtctctgccagcccagcgctcggaatggagctttgtggggctggggaagcaacctttgccaatgggaagggggtgtcacagcgcctcattccctcccagcttgcgctcctcggaataatctccaacagcgtgcctagaagcacagctgcttttgtttcgggcgtcggtgcttcccagaatcccggtgcccggacccagccgccgaaccgaccccgccccgccgc

SEQ ID NO: 20360 - DNA, 261 bp, Homo sapiens
  chr18:45534675-45534936
  hyper
cgagcggcggccacgcgggggcgctgggccgggggcgggggccagggctgggggtggggcgcgcccccgggccacctcccccgcccctcccggctcctccccgctcctcctcccatgccccggcccccgcctcgcagctgggctcggactcaggcttagccgcagtctgtgagcctcctccccgcacctggccggccaggccagcccagcctacttgtctcgctgcgcccggctgctgcctccgctccaggggtcggcgcc

SEQ ID NO: 20361 - DNA, 41 bp, Homo sapiens
  chr18:45534976-45535017
  hyper
cgcacacccgtggcgcgccctccaggggcggtttttctccc

SEQ ID NO: 20362 - DNA, 354 bp, Homo sapiens
  chr18:52495540-52495894
  hyper
cgagaggagtgtgtttctcactgcagcagttgagtcaccagcaagacttgcctgaggtgagctccgcacatccgcgttgggacttgcagacacgccttcttctcacacaaaccttacccagccccgccgccgcggcggactccgagggtggtgccaccagccctgccactcgcagtcctgacgggcaggggctgcggaccgcccggccttggacccatccggagccacaggttggaggagataagtagctgtccccgtgctcatcgccctgtggagcagatcctgtctccttgctgacggtggagcccgggagttccagggcttgggaaggggaaggaaacctctctgaaatct

SEQ ID NO: 20363 - DNA, 50 bp, Homo sapiens
  chr18:52496020-52496070
  hyper
ctctgtgtgtgtgtgtgtgcatgtgtgagtgcgtgtgcaccttcgatcgc

SEQ ID NO: 20364 - DNA, 66 bp, Homo sapiens
  chr18:60229150-60229216
  hypo
cgcttttctcttgctccgtcttccaagactccaaatccttgtatgttagatttttcaccatgtccc

SEQ ID NO: 20365 - DNA, 138 bp, Homo sapiens; identical to SEQ ID NO: 6013
  chr18:70210281-70210419
  hyper

SEQ ID NO: 20366 - DNA, 53 bp, Homo sapiens; identical to SEQ ID NO: 6014
  chr18:70210508-70210561
  hyper

SEQ ID NO: 20367 - DNA, 211 bp, Homo sapiens
  chr18:72226558-72226769
  hypo
cgctgaaggagtgggtggccatcgagagcgactctgtccagcctgtgcctcgcttcagacaagagctcttcagaatgatggccgtggctgcggacacgctgcagcgcctgggggcccgtgtggcctcggtggacatgggtcctcagcaggtgctgtacgattccctcccactgagggaggtgctacttctagacgtcagtcatgccttccc

SEQ ID NO: 20368 - DNA, 183 bp, Homo sapiens
  chr18:72670022-72670205
  hypo
cgtctcacttacactgtgaagtggtctaaaaatgttcgtcttcacctacgagactctggacgtctttgagtattcattccttcattctttcattatgtattaaggtccttattatagatgaggctgatgtaagtgcctgcgataaaacagtggaaaagatcagcaaaagagaacactgtcgtc

SEQ ID NO: 20369 - DNA, 227 bp, Homo sapiens
  chr18:72764607-72764834
  hypo
cgtcagccgcctgatagagctcgtttcttaggtacctgagtttggattacacataatgaattcagttttccacttgttcacgtcaccattcccacacaaagtgccttctgggggtgcctgtgcggcacccggtacacagctttgctactgctttcctgcacgtgcacccgggtggaaggacacatgtgcgtggatgtcactccctgatcagcgttcggacccatacc

SEQ ID NO: 20370 - DNA, 176 bp, Homo sapiens
  chr18:74426512-74426688
  hypo
cgtgacgaggtcagggccactaggcaacacttttcaggtaagggaaggctgggtatgtgctgggcacctgcatgctggtggtgggggttaaaccgcgtgaagctgaaggagccaccctcctgagtctgtctctgtcagggagaggagtgggctggagtcactatcttaggacatac

SEQ ID NO: 20371 - DNA, 770 bp, Homo sapiens
  chr18:77358223-77358993
  hypo
cggccctggtttgggatgacaccgcggctgtgatctcggcagccacaggcttccccgtccgactcggccgagaagcctctcctgccacctctgagctctaggcttggactctggagtggttgctggagtcacttcccaccgtgccgggcaagggctgcaggagggcacagcgtgcgggacgctggcaactcacagctgcctcccagccacaccccccacctcctgcaggctccagggccctttgtctctgagaacgagagctgcatcttgtccagtgggtttcacaggtctcaggactgggaatggcgctgggcgcgtggacaggtgaagtccattgttcctgctgctgccggtgtgagccgcagcccacgcccaccaccaaggaggcagaacggcggtgtgaatggagaaccactcatttgccaaatcatttaaatcagacttttcacagctgagaatgccaccgcaaagcacaaatgactttgttccagagagaaaagggagagcagggcaccgaggcagaccacgggaacacgagcagcgccttccacgctgtccgggcagggcaccgaggcagatcagactgcagcacagtgtctggggagccctctcgaccagtaaggaaagtggcacttgaggctgagaggaagagagcgattccaggtgaaaggactatttttaaagactccccagctagccggtctgtttcttcattaattttccttaaaagctccacttgtgagacaggcaaatgctcgccacctgccccc

SEQ ID NO: 20372 - DNA, 789 bp, Homo sapiens; identical to SEQ ID NO: 13666
  chr18:8659297-8660086
  hypo

SEQ ID NO: 20373 - DNA, 118 bp, Homo sapiens
  chr18:907197-907315
  hyper
cgcacgccccacgcatcctctcctttgctttctgggcctccccattcgggtcttcgcgtgggtcagcgcccggtctcccagggcctttctcgtccccgcccgttgctgctttggggag

SEQ ID NO: 20374 - DNA, 113 bp, Homo sapiens; identical to SEQ ID NO: 9297
  chr18:9196896-9197009
  hypo

SEQ ID NO: 20375 - DNA, 61 bp, Homo sapiens; identical to SEQ ID NO: 11314
  chr19:10370250-10370311
  hypo

SEQ ID NO: 20376 - DNA, 88 bp, Homo sapiens; identical to SEQ ID NO: 11315
  chr19:10370575-10370663
  hypo

SEQ ID NO: 20377 - DNA, 74 bp, Homo sapiens; identical to SEQ ID NO: 15734
  chr19:10687853-10687927
  hypo

SEQ ID NO: 20378 - DNA, 52 bp, Homo sapiens
  chr19:10941853-10941905
  hypo
cgctggccccggtccagggccggcccctgtgcctggctggacaccgcactgc

SEQ ID NO: 20379 - DNA, 68 bp, Homo sapiens; identical to SEQ ID NO: 18583
  chr19:1179335-1179403
  hypo

SEQ ID NO: 20380 - DNA, 461 bp, Homo sapiens
  chr19:14263414-14263875
  hypo
cgaattcggctctgggaacacaacccaaatgtgaggggatccttgggccacccaccctctggcgtctttctgagactgctcacctgatcatcacgatcagaaacctaggccaagccactccccacctctcaggctccaggttccaacactcagccccagggagtcctgtctggcccgatacctgggtccctgtgtagtagcgggtgttgcttcgcatggctgaggtcttgagggatccgtgagtgcccccgggtggggagcggatgcagcagtaggagtgacgcaggcacttgctgtactccttgtgcacctgggaggtggaggacagtcagctggctgggacactggcctcctctgtgatccagtctcccacagggctggtcacaagacaggcagccttgggaggccggagaccgagcttccaatgactgtgttcccctgttcagcgacttgcaggccac

SEQ ID NO: 20381 - DNA, 345 bp, Homo sapiens
  chr19:15073023-15073368
  hypo
cgagtgacattttccaggaagctggttccgttctccactgagaatggaggaggcatggaggcacccggctcagacccgttctctgtcctcaccatggtcctggttaccaccctcgtgctgtactgcgtcttgaactgaaatagagagagattgcgcccagattcaattcagcggatgcattagaatcgcctggagaaattccttgagaccactgattcccagttcccacaccctggaagatcgataagatcttcattatcgattatcactcattatcgactatcactcattcagcagatctgaatgagtgaatgaatgacttgaatagtgcatggaagaatgagc

SEQ ID NO: 20382 - DNA, 168 bp, Homo sapiens
  chr19:16661967-16662135
  hypo
cggtgaaggcacacggcaagttcttctgacaaataacaccctttgggattgactcttcacgttttacacagcaattgtctcagcttgggaccaaagtatttacaaagcaagcgaacaagagacgaagcaagagggacacttctgaggccggtggtgcggaaactcacc

SEQ ID NO: 20383 - DNA, 307 bp, Homo sapiens; identical to SEQ ID NO: 16642
  chr19:1775741-1776048
  hyper

SEQ ID NO: 20384 - DNA, 224 bp, Homo sapiens; identical to SEQ ID NO: 16643
  chr19:1776743-1776967
  hyper

SEQ ID NO: 20385 - DNA, 341 bp, Homo sapiens
  chr19:1874698-1875039
  hyper
cgggtcagccgagaaatggtattcagcaataaatgtgtcagagtcccaaaaaaaaaaaaaaaaaaaaaaaaaaaaaaacacttctactagacagaaagcgaattttcttaatctgtaaagtgcacctagaaaccaccaccatccacccaacagaaaaatgagccaagaagataaaatacaaatggcttttaaatagtcaaacgtttataataaacatattttccaatctcgaaacgactgtcagtggtaacaatgatcaacgtaacatagatgtaacaggaacatcacgacgttcgactatacttacaggaaacacaagctacagtgaaatactatctcac

SEQ ID NO: 20386 - DNA, 207 bp, Homo sapiens
  chr19:18757941-18758148
  hypo
cggcaggtcccaagagctctgggagtggaattgctctgaaagcactcacttcaacctgaatcgtgcagtgcgatcgtcacagctggactgtttccacctggtagctgtgacccccgggacggcctccttgtcgttgtccgtagttaccggggaagaaaggctttattaccctccgccataatcgcaccatctccagggagcccctgc

SEQ ID NO: 20387 - DNA, 301 bp, Homo sapiens; identical to SEQ ID NO: 19442
  chr19:18836823-18837124
  hypo

SEQ ID NO: 20388 - DNA, 165 bp, Homo sapiens; identical to SEQ ID NO: 6511
  chr19:18963604-18963769
  hypo

SEQ ID NO: 20389 - DNA, 270 bp, Homo sapiens; identical to SEQ ID NO: 15755
  chr19:19576172-19576442
  hypo

SEQ ID NO: 20390 - DNA, 259 bp, Homo sapiens
  chr19:19636907-19637166
  hypo
attgcagagtgggcagcgcctggagctgtggaggagggtgtctgggggcgggctggcccgctgagcagcgcctctcttcacaggctacagcatgctggccatagggattggaaccctgatctacgggcactggagcataatgaagtggaaccgtgagcgcaggtagggcccctggtgggcgttgtctgaaagtgcccccccggcgagttgtcggggtcctgtagcattccgctgttgtctgtgctggcgaggggtgaac

SEQ ID NO: 20391 - DNA, 149 bp, Homo sapiens; identical to SEQ ID NO: 15756
  chr19:19719325-19719474
  hypo

SEQ ID NO: 20392 - DNA, 343 bp, Homo sapiens
  chr19:2000558-2000901
  hypo
cgagcccctccctggagacacctgcatgggccttcaggattcgacccctgggcaccgctactgcctcctctgcccaccgtgagtccccagccccactcccggctgttccccccttcatgtatctgtaaccccttccccttccaaacaaatcgagaacacacggccacacaaaaacacatccacaattgctcacagcagcacgattcccaactccgaacgggggaaacaaccagcgtccattgacagacacggtgcgaccacccacgcactggaacacgacccagccacaaacaggaacgaggctctgatgcaggacccggtgcagatgcgccttgaagacgtc

SEQ ID NO: 20393 - DNA, 151 bp, Homo sapiens
  chr19:2041016-2041167
  hypo
cgcccgtgcggctggtactcaccccctgaacccaggggtgctgcaggacttgggcggcactcagcctctgcttggcgtcacggaccagcagcttggagatgaggtctttggcagcgcaggagatgtgggcccagtccttgtcggggaactc

SEQ ID NO: 20394 - DNA, 174 bp, Homo sapiens
  chr19:2236297-2236471
  hyper
cgctcaggctggggccggcgccaaaaatgtctcagggcgcagacacggaagcacccccagggctagtgcgcctgcgcaccttgggccagccatgccgcccgcctccgctgcgtggcgctggcgacccgtggctgctggcgtgggcggggtaccggttggtaggagagacggacc

SEQ ID NO: 20395 - DNA, 62 bp, Homo sapiens
  chr19:30502063-30502125
  hypo
cgtaaacgaaagaacagcactggcagtggccactctgcccaggagctgccgaccatcaggac

SEQ ID NO: 20396 - DNA, 783 bp, Homo sapiens
  chr19:3105574-3106357
  hypo
cgtggcggaagaagctgatcccgcctcccaacaccactgtcttaggggtgagaattttaacataggaatttggggggatcacagacattcattgctatgggtgggaccacttggtgcgttgcccttggggtggcggtgtggtcagtggtccattcctgcccagcgccgagcagcggtctgtgcgtggggtctttgcacccgtgcacctgctgaagggtctctggagctttggctttttggcttttacgagtaaagctgccgtggtgcttggtgtgcggtgaggagtggacagaaggctctgtcctggcaggtgccctgcagtggcctgagaccgggagatgagggccggcaaggggctgtggacgagtccagagtgaggcggcatctcggaggggctcacacattgtctcaggaggagtgggctggcatttctttccagtgggcagctgttgaagattttggagccaaaagagcgttccagctcagatgtctttcaggtggagtgtggctgcaggtggggcaggctgggtcagggtggagccatgtgggctgaggcccgagttggggctgtggctttggggccacatggctgccggtcgggtgggagcgagtctctgctgaccagggccctggatgttgagccccagccgcggggtgtgaggtctcaggcaggacccaggcattcagacattgggtccactgtgtgtggacccctgcgtcccagctccaagacgctgtgtgacgggaggcggcagcagctgagttggcgcggggagacagggc

SEQ ID NO: 20397 - DNA, 234 bp, Homo sapiens
  chr19:31841177-31841411
  binary
cccccaggacccgccgtagccacttcccccaattttttttccccggacaaactttcctgggcccgtcccgggggtcggtgtgggagggggttccttcaagtttcctctcctgactttgggatgatcagggtccctccaccccgcccctcgcccccgggagccgggccgcgccccccatccacggcgcgggccgatcctagggcgggacgggggcgggagaaggaaaccgggctc

SEQ ID NO: 20398 - DNA, 38 bp, Homo sapiens; identical to SEQ ID NO: 8230
  chr19:32849484-32849522
  hypo

SEQ ID NO: 20399 - DNA, 478 bp, Homo sapiens
  chr19:36042055-36042533
  hypo
cgtgatggaaatcaggatactgtgggtcaaagtaggtcagatgtcagcagcagcagggaggtgttctacacactgaacactggagtggcccgggcctctcagcaccacccctttagtgaaatgtggagggggccgtggggggagttattggccagttagaaaggtttttttggcatgtcaccatctggcactggcacccgctggcatttgccggctgttctaaaccacagtcaggatctgatgggagttgggaccaggggttggagggcaggaagagggccagccagggacacctgaagaagccttgctggaaggcagagagacggcgcgtcttgcggatgaggacatcggcgatctggcacacctcaatgctgatgaagaacacggtgtagcaggtgtactgctggtacaggcgctgcccgaatgtctgcaggccaggggcaaacggaaacagcctgagtccagcctgagtcccggc

SEQ ID NO: 20400 - DNA, 156 bp, Homo sapiens; identical to SEQ ID NO: 6043
  chr19:37329462-37329618
  hyper

SEQ ID NO: 20401 - DNA, 46 bp, Homo sapiens
  chr19:38145965-38146011
  hyper
cgttttgcaggggaccttcatcctggggcgttcacctctgacttcc

SEQ ID NO: 20402 - DNA, 193 bp, Homo sapiens; identical to SEQ ID NO: 10428
  chr19:39151314-39151507
  hypo

SEQ ID NO: 20403 - DNA, 244 bp, Homo sapiens; identical to SEQ ID NO: 10429
  chr19:39151540-39151784
  hypo

SEQ ID NO: 20404 - DNA, 301 bp, Homo sapiens
  chr19:40753417-40753718
  hypo
cgctgaaagctacacgagactcaggagggtaaagcagggaccctctctagggaaggctcatgggacacccagccagggagcccacgggaaaagcaaaggaagaactctcctcgtaagccatgatctgcacccgcttttcagagaggggcccccacccctgccactcaacagcagtcccaagaacaccttccacttgcagaggctggtaccactgtgcgttatggtggaggactcctgtcgccctcccagcaaccctgtgtagtaggtactgccattcacttcatgctaaaatgacaagacc

SEQ ID NO: 20405 - DNA, 1117 bp, Homo sapiens
  chr19:45647694-45648811
  binary
cgtgcctggttttcagtttttatgtggtgcttaaagcaagccactcaggtacagagactctcagggcgagcactcgtgtgctcaaaccccgggataagagttgccctccttgggggcttcagggcgctcaaggtccaggccctggccaggggcccaggctgtggggggtagggactgactgggtgcctggggagctgggagtggacgggggacctggcatttggggagacttcaggcacaggagggacttcaggccaggcctgcggcagggcaggacggcgccggtgttcacgcaggcgcgcgaaagaaaaggagcgcccgggcctggctctcttcccggcttctttcctgacttggcctcctgggtctcctccgccatcacggcctcctcctcaccctcacaccccctccctccagccgcacactcagagcctggagacgctgaacctgggccacaaccccatcgggaacgagggtgtgcggcacctcaagaacgggctcatcagcaaccgcagcgtgctgcgcctcgggctggcctccaccaagctcacgtgcgagggtagggtacggggccgggccagggtgcgggctggtgggctcagccgggcggccagccgggtgtggggcccgtggccagcccctgcggtgcccccccaggcgcggtggcggtggcggagttcatcgctgagagcccccgcctcctgagactggaccttcgggagaacgagatcaagacaggcgggctcatggcactgtcgttggccctcaaggtgaaccactcactgctgcgcctggacctcgaccgtgaacccaagaaagaggcggtgagcaggggacggtcctgcagccctggggcgggcggaaggccgggtggtggggccggcctgagagccctagccaggcgctcccgccacaggtgaagagcttcatcgagacgcagaaggcgctgctggccgagatccagaacggctgcaagcgcaacttggtgctggcgcgggagagggaggagaaggagcagccgccacagctgtcggcctccatgcctgagaccaccgccaccgagccccagcccgacgacgagcccgccgctggggtgcagaacggggcccccagcccc

SEQ ID NO: 20406 - DNA, 41 bp, Homo sapiens
  chr19:46307556-46307597
  hypo
cgaccagctccagcacggggatgccctcgaagtccgggttc

SEQ ID NO: 20407 - DNA, 39 bp, Homo sapiens
  chr19:46308096-46308135
  hypo
ggtagctgcgtttgattcccaggatcttgccccagaagc

SEQ ID NO: 20408 - DNA, 130 bp, Homo sapiens
  chr19:4675518-4675648
  hypo
cggctgggctggggaggggacagccgccactgaccagcagagcgtggaagttcggtgcgtttcagtgcctgcctgaaagcttggggacaggagggctgtccacaggtggtgccccccgcgggccctggcc

SEQ ID NO: 20409 - DNA, 642 bp, Homo sapiens
  chr19:4676075-4676717
  hypo
cgcccggcctgtcttttaaataattatgaaaaatatccccccaaacaaaacacaaacatcaagttggggaggctggccgggggggacaggcaattgcatgcttgggtgctggggacggtggctggccgggccaggggactgagaggtcacagggagccccaggcggaaggcagcccgctcctctgagtctcttctggcctctccagtgcccatcagcgtgtgacctcctcctcccagaaggcggggagaggaggggctggcccgagaccaccatctctctgtctcggcaaccaagaagcagcggacataaaacccaagagcgtttaaaaaaggataaaaggcgtcggggcggtgaaggcagcggctcctcggggctggccagcgctgggcgggacaaagtgcctcactggggcccgcgggccactcagtccctcccgcctggttccccgcggaggctgcagccacttgtgctgtgatgtggcggctcccggtgggcaggctcagaggtattcctgtagaaagtgcagcaacgtgacttcatagtgctcgcccgactcggggcagcgaatactgtgtctctcgttggggtagatctgcggggagacaggaggcagggctggggggcgtggccggaccaccccc

SEQ ID NO: 20410 - DNA, 68 bp, Homo sapiens; identical to SEQ ID NO: 19463
  chr19:47040909-47040977
  hyper

SEQ ID NO: 20411 - DNA, 112 bp, Homo sapiens; identical to SEQ ID NO: 8263
  chr19:47646754-47646866
  hypo

SEQ ID NO: 20412 - DNA, 83 bp, Homo sapiens; identical to SEQ ID NO: 8264
  chr19:47676020-47676103
  binary

SEQ ID NO: 20413 - DNA, 66 bp, Homo sapiens; identical to SEQ ID NO: 10446
  chr19:491540-491606
  hypo

SEQ ID NO: 20414 - DNA, 151 bp, Homo sapiens; identical to SEQ ID NO: 18627
  chr19:4986363-4986514
  hypo

SEQ ID NO: 20415 - DNA, 191 bp, Homo sapiens; identical to SEQ ID NO: 18628
  chr19:4986633-4986824
  hypo

SEQ ID NO: 20416 - DNA, 122 bp, Homo sapiens; identical to SEQ ID NO: 13742
  chr19:50129561-50129683
  hypo

SEQ ID NO: 20417 - DNA, 57 bp, Homo sapiens; identical to SEQ ID NO: 18629
  chr19:50130742-50130799
  hypo

SEQ ID NO: 20418 - DNA, 169 bp, Homo sapiens; identical to SEQ ID NO: 8273
  chr19:5023047-5023216
  hypo

SEQ ID NO: 20419 - DNA, 450 bp, Homo sapiens; identical to SEQ ID NO: 8274
  chr19:5023245-5023695
  hypo

SEQ ID NO: 20420 - DNA, 285 bp, Homo sapiens
  chr19:5064018-5064303
  hypo
cggcttgctctccttcccggcctgtgccagccacagggcagtgcgccagagccatcttgctgggtcacaggccggggccaccatagggctttgttgcgagggtggcggtcaccatggcttttccgttctgtttgcaacttggggtcccgggggcgccactggcgtttggatctgccgtggccctcctgggcttgcgtgggtggctcactctgccaggtggcctctgtccaacctgacacctggtctcgggtacttccagcgtgacgtgcacgggctctgcctccc

SEQ ID NO: 20421 - DNA, 203 bp, Homo sapiens
  chr19:5064332-5064535
  hypo
aaatggcgaaggcccgtctgcccaggcctgtgcagacactgtgaaattaactttctcaccctccagcacgcattgggctgtgccgacatctctgaagggctcttggtcggacctctgctcttggcacacattcctcggcggcgggggtggggggtagggaggagagcgttttcatccctggcacctaattgccgagagcttcc

SEQ ID NO: 20422 - DNA, 378 bp, Homo sapiens; identical to SEQ ID NO: 14808
  chr19:50708476-50708854
  hyper

SEQ ID NO: 20423 - DNA, 1262 bp, Homo sapiens
  chr19:51020756-51022018
  hypo
cggtcaggctgcgcccgggctgggacctgggtggggggctccacgcccctcgcccgcccggccccgccgcctcagatctgcgtctcttgcacgttctccttggagccgctcttgaagagcagaggttcgtggatggagttgaggccaggcgggcctttgcccccgcagcccccgccgctggggttgctgctgtagtgcgccttgaaggcggcagccacgtagtggtggtggttgaggtggtctcgctccagggcgggcagggccaggtggctgtccccgcccacaccacccccactggccacggcggccgcggcggccacggacacggccgaggcggcgggcagctcgtcctccacgttgatgatctccacggtgcgcgtgggcccgtggtgcttgtggagctggtgctgcttgcgcagcttgtagaaggccacgagcatcaccgcggccatgaacgtgatggccacgaagcagccgatgatgattttggtggtcttcatgacgtcgtccaggtccttgagggcgttctccgtcacatccgtgatgggcaccgtgaacgccttctccgtgggccgcgaggagcgcggggcgggtgccgtggtagaagacgaggcagggccggccgcgtccccaggccggcccccaccccagacaccgtctgtcgtgggccctggcggttccttctccgtcccccgcggctgcagggcctcctctccgggctgcgtctccagggtctccacggtcaccgtggtgaagtaggtgtagccgccactgccccctccaacaccaccactgcccccagggccgcccccgccgctgccggtgcccccggccgccacggggtccacggccgagacgttgagcgtggccgaggcggtggtgttgccggctgagttcgtcaccatgcacgtgtactggcccgtgtcctgcacggtgacgttggtgaagttaagcgtgccgtcatgcaggacggagatgcgcacgcggtaggagccgtgggtcatgagggtgccgttgggcgtcagccagttgacggaggtcatggaggtgcccgtgcggcatttgagctcggcagccatgccctcggtgacgttgaggtccgtgggcggctccacgatgacgggcgcatagcaggtgaaatgcgactggtccagctccccaatgtagcgccccttgaggccggcgggcgcatgacagcgggcgcagcacgtcgtgttgctgggcaccgtctccttgagccaccagctcagccagagcacgtc

SEQ ID NO: 20424 - DNA, 159 bp, Homo sapiens
  chr19:5102582-5102741
  hypo
cggggccggggtggcatctggggccactcccggtctcttgctgttggcgttgggagggatctcgcaccacagcagggaatcgaggccccggctcccctcaggctctcccttcaccggcaatgggcggcgggcgacgggtgacgggtgacgggtgatggg

SEQ ID NO: 20425 - DNA, 110 bp, Homo sapiens
  chr19:5102770-5102880
  hypo
cctggtccactgtggcctgtggatgccgcccctgacgtcagcatctctctctggcctccctgggagcagtctcagagcagtgaagagctcttcacgtccggtgctgtggc

SEQ ID NO: 20426 - DNA, 303 bp, Homo sapiens
  chr19:5132575-5132878
  hypo
cgcgtgggatcacagggcgggagctcccaggagtggaggaatcggcacggggacagaggaatgaccaggggcccccgcgggctggcttgggaaggggtcttgccttctacccaggtatccttccagaaggcatctctggggcctccgtggactcccccactccccacaccccactgtgaccctttggtgagaccggagcatttgcctgtgagaccatcacggccccagaaccccaggcattctggggttgtgagtgacagacgcagccagtggctctgttctcatccccagggcctcggggcc

SEQ ID NO: 20427 - DNA, 180 bp, Homo sapiens
  chr19:52956933-52957113
  hyper
ggatcttaaaatcctcccgccgttccctccatcctaggtatattaatacgtcgccaagaaattcggaggttaaaatcgcttggaggctgctggtcctttccctgagctctctgccttcgggccacgtagacgcttttcgtcccgtttacctgcttaaaaccctttactgaccactccttc

SEQ ID NO: 20428 - DNA, 264 bp, Homo sapiens; identical to SEQ ID NO: 6058
  chr19:53104083-53104347
  hyper

SEQ ID NO: 20429 - DNA, 386 bp, Homo sapiens; identical to SEQ ID NO: 15778
  chr19:55990556-55990942
  hypo

SEQ ID NO: 20430 - DNA, 70 bp, Homo sapiens
  chr19:56104277-56104347
  hypo
cgcggccgacgcaaagaaggtcccgcagtcgcactggtacagggtgtcttccgagggctcggcggccgcc

SEQ ID NO: 20431 - DNA, 202 bp, Homo sapiens
  chr19:6226077-6226279
  hypo
cggttcttctcccgcatggctgacggtgagtctgtgaggcagctggagagccctgcctgtcctgcctgggatggctgggcccacacgcagggcctggcagacaagtgaggtgaggagaaaggagaggaccggtggagagatgtgtgggtggcaggcaccgggcagctgccccgagggcccgtgccgctcagcctccaggaac

SEQ ID NO: 20432 - DNA, 87 bp, Homo sapiens
  chr19:8004774-8004861
  hypo
cgacagagtgagactctgtttcaaaaaaacaacagagaaacagtttaatgaatgatcatacaataatccaatcaggcggaaggggcc

SEQ ID NO: 20433 - DNA, 71 bp, Homo sapiens
  chr19:8463144-8463215
  hypo
cgactgggctcaggcccccgtccctgggtgctgttgcccacaaaccctcatctctgttctgtccacgctgc

SEQ ID NO: 20434 - DNA, 764 bp, Homo sapiens; identical to SEQ ID NO: 11446
  chr19:8576026-8576790
  hypo

SEQ ID NO: 20435 - DNA, 159 bp, Homo sapiens; identical to SEQ ID NO: 6528
  chr19:883424-883583
  hypo

SEQ ID NO: 20436 - DNA, 544 bp, Homo sapiens; identical to SEQ ID NO: 7154
  chr19:884311-884855
  hypo

SEQ ID NO: 20437 - DNA, 614 bp, Homo sapiens; identical to SEQ ID NO: 15795
  chr2:10334473-10335087
  hypo

SEQ ID NO: 20438 - DNA, 56 bp, Homo sapiens
  chr2:118736298-118736354
  hypo
cgcgctggctcacgcctgcaaagtgctgtaatcccagcactttgggaggctgaggc

SEQ ID NO: 20439 - DNA, 223 bp, Homo sapiens
  chr2:121108610-121108833
  hypo
cgtggacgtggcccctgcccactcacctgcccgcctgcccgcccgcccgcatagcacttgcagacctgcctgaacgcacatgacatagcacttgccgatctgcgtgtgtccagaagtggcccttggccgagcgccgaactcgctcgccctctagatgtccaagtgccacgtgaactatgcaatttaaagggttgacccacactagacgaaactggactcgtac

SEQ ID NO: 20440 - DNA, 248 bp, Homo sapiens
  chr2:122094622-122094870
  hypo
cgcaggcatgcaggggagcccggctgctctcagcggctctccagctcatctcgggattcgaggctgaggctttctcctgcttctacctttccggggagccactgttctcactgatcagttgaggaaatggagccgatgagggaggcccctgctcacatggcctccaggagcgtgggtgggattctagcccatgcgtctcacctcccaccttgtcaccgcacacacggcacagcaaccagctcccaggc

SEQ ID NO: 20441 - DNA, 155 bp, Homo sapiens
  chr2:128284482-128284637
  hyper
cgttactaactggcgcgatccacagcgcctcctctcccggcgtcttcctctctttcattctaaacaacgatttaatttccttgttaagaagccatttagccaacagtaagaagtacacgtctttgcttccagaagggttcccctgatgaaacacc

SEQ ID NO: 20442 - DNA, 174 bp, Homo sapiens; identical to SEQ ID NO: 15805
  chr2:132269055-132269229
  hypo

SEQ ID NO: 20443 - DNA, 268 bp, Homo sapiens
  chr2:132270135-132270403
  hypo
cgggggagacgggctgtgctcacagccagtgatctgtcccgttcacctgggaaggagcacacatgattgaacaggaatttgagcacaagatgagaaaatgtgttggccccttagcgctggtgggctggatggcggccacagcacacgggggcacctcattccgcaggagccactgcagaggagaggaggaacctgagggcttgtgccagggagggaggacagtgtccagaaagcatctggcaaaccccatggtgggaaggtgaccagc

SEQ ID NO: 20444 - DNA, 125 bp, Homo sapiens
  chr2:159528162-159528287
  hypo
cgctcttctctatgctgggcttgcagcagcagacaggtcgcatgacagccccacccgaggtagcttacgttccatgggtgaggtagacgcagacaaggtgccaaacgaacagaaacgcgtggagc

SEQ ID NO: 20445 - DNA, 133 bp, Homo sapiens; identical to SEQ ID NO: 15812
  chr2:171730981-171731114
  hypo

SEQ ID NO: 20446 - DNA, 81 bp, Homo sapiens
  chr2:175431799-175431880
  hypo
cggctttcgtttcttgccagtttgctgggataacttttggtcgtttgtacatatggctctggaggtggcaaatcggaaatc

SEQ ID NO: 20447 - DNA, 353 bp, Homo sapiens
  chr2:178483339-178483692
  hyper
cgcctcggcgtagcgggcatcgcggatgagccggtacactagcgcggtaaactccccgtcggggatctgcgcgccgctcagaccagccataaccaccacggctgttatgcgtgcggttaccacggcaacagggcaaccgggcaaccggaaacggaagacgacgggttactttgccacggaaggaatctgttaggaataaaaagggaccgttctcgttagtctctcaagttcggtttgatcttcaaatattctggactgcagcgtggcggcagtcagaaggggaaagacgactactccgggccgttcagagactgaatcttcccggtcccggcatgcatcgttcctgtggcgcc

SEQ ID NO: 20448 - DNA, 193 bp, Homo sapiens
  chr2:182756176-182756369
  hyper
cgactctttcaagtgtatgtttcagggtgcccaagcagacacttgttttctcgcgggggatgttttgtgagacttggcctccccacttacgttctatttttaggtgagggaggaggaggaggagaggaggaaagattattaacaaactaatcttgcccattccgcgggcagtagtcgggggctggcctgctcc

SEQ ID NO: 20449 - DNA, 302 bp, Homo sapiens
  chr2:219145053-219145355
  hypo
cgttcctcacgtgcatctgtggagggctcctgtgtgcccagcccacgccactgggggttcactggggggtcacgatgtagtggggaagccaggcaggagcaggtatgggcatccactggggcagccagccagggcagaacaggggatggggacagagggtaggagaaaaggagggcggcagagcgcagtttgtgcagcagcagggatagaggtgaagacagggatctgcatcagcctcacagaggcaggtgtgcaaagggtgtgcgtgactgtgcaggacccatgcgcagatccgcaccagc

SEQ ID NO: 20450 - DNA, 372 bp, Homo sapiens
  chr2:224808923-224809295
  binary
cgaaggcggctggagttcctcgcaaagaagcaagccccgggcaccagggtccgcagtgaccagccgccggtcctccacgcttccagaggagacgatttggaactgacccgggagggccaagaaacaccttccgagtaccaggctaaaccccgccagggagagagaccgggacgaaggtcccaggctagtgcgacaccgcaggtcggggttccctggttggaggagcgcggtgggctgggaggggcgcgttggtgcgcactggaacaggggtccccggcttgagcagcgcggtgagacagagttcccgcgctggaggggcgcggtgagacagaggtcctgggctggagaggtgcgttggggcgcactggaacc

SEQ ID NO: 20451 - DNA, 54 bp, Homo sapiens
  chr2:231977489-231977543
  hypo
cgtaagacgatttagaagaaaaaggatttcttttatacataatttctgaacatc

SEQ ID NO: 20452 - DNA, 168 bp, Homo sapiens
  chr2:236603384-236603552
  hypo
cggggcaagtcctgctgtcactgcacagctcaccttgtatatgtggggtgctcttctcctctcctgaggagttatgggtgattaggaagcaaacgcgtctcagacttggagatcaaatgaagagaggctgtgtaagcaccaggatgcatggggggttccggcttcttc

SEQ ID NO: 20453 - DNA, 34 bp, Homo sapiens; identical to SEQ ID NO: 18666
  chr2:238934785-238934819
  hypo

SEQ ID NO: 20454 - DNA, 270 bp, Homo sapiens
  chr2:239074309-239074579
  hypo
cgtcctgtacctgcaggtgagtgcggcaggcttgggcatcgaggggcaccgcctgggcatggccacgggtggctgggtgcagaagggtgctgttagatgctcaggatcactgggtcgggtgcagcaccctcagactccaggcctgggagagggtccaggacatgccaagttctcactttggtctgggcgcagccaggcttcaagtcctgatctccttcctccaaacacagcccttccccgagggcacctgcccgcttgagcagctgctcc

SEQ ID NO: 20455 - DNA, 67 bp, Homo sapiens; identical to SEQ ID NO: 15818
  chr2:239082208-239082275
  hypo

SEQ ID NO: 20456 - DNA, 43 bp, Homo sapiens
  chr2:239083093-239083136
  hypo
cgtgtgagagagcactccgcaaatgccacggctgcgcatgggc

SEQ ID NO: 20457 - DNA, 244 bp, Homo sapiens
  chr2:241286564-241286808
  hypo
cgccgccagccctaccggggattcaggtgagtggccaagagcctggctggacttcacggggtatccagccgcggcacaggcagtcaggcccgccatgaagtggcacttggggcaacccgcagagcccagccaaagaaagcacgtgtttcggtgagaagcgagtgtggttgttctgcagggaaagaaaccctcccgggcgtgcagagcagatgagctcactgaacaattcgggggtgatttcagc

SEQ ID NO: 20458 - DNA, 463 bp, Homo sapiens; identical to SEQ ID NO: 7200
  chr2:242004407-242004870
  hypo

SEQ ID NO: 20459 - DNA, 172 bp, Homo sapiens
  chr2:242009173-242009345
  hypo
cgtgccagcccacaccccgcctcggcactgtaccattctccataataaagaatctggcttccagcaaggctgcggcagcccatgtccggttctcaaaccgtgttcttgccagaagaccctgtgggcaccccctcacctctccctgctcctgcctcatccagggcccctgcct

SEQ ID NO: 20460 - DNA, 339 bp, Homo sapiens; identical to SEQ ID NO: 15827
  chr2:242169887-242170226
  hypo

SEQ ID NO: 20461 - DNA, 326 bp, Homo sapiens
  chr2:242440848-242441174
  hypo
cgggcacagcaccagcagggtccccgcctccccacaacaggcacctttaggtaggagccaaagtagcgggtgatgtaggggctgtcgcactgactgaggacagtgatctcctgctggatgtcctcgatctcatcctcggcctcctccaggtcgatgatcttgatggccaccacctcctttgtgtggttatcgatgcccttgtagacctccccaaacgagcccttgccaatgcggtcgagcttggtgaagagctcctcagggtccactcgagagtgctgtggggccagggcggggacagagggcagacagcgccggtcacaagaggc

SEQ ID NO: 20462 - DNA, 243 bp, Homo sapiens
  chr2:24714924-24715167
  binary
cggaatctcgcctgccgggaccgcgaaatgggggcgaccgcggcgtccctctccgtcggcgcagccctcgacggcgcttgggtttgaccccggcgcgcttgctcgccccttctcccgagaaggggtttcggaggtagacatgggatggatactggacatgttcctgtcgcggcccgggtttggtccccttcctgggattcagccgaaagggccgaggaagggaagcaaacatgttgacgaggc

SEQ ID NO: 20463 - DNA, 252 bp, Homo sapiens
  chr2:25075413-25075665
  hypo
cgtggcaaagcccggcctcagagcaggcatgagtggccaccgtgtactcagaaagtactcaactgggctgagcgtgagaggcctgatgccaggacagccccggacctcgacagaggcctgctgctccccaacacccccagcagacgcctgcctgcctctccacggccaggagccgctgcccgaggacccgagctgccaacgcccgcggaaacttgggttgccctcgtcactgccacacagagtggccgagcc

SEQ ID NO: 20464 - DNA, 35 bp, Homo sapiens
  chr2:26688538-26688573
  hypo
cgtggagtaggtctgggcgatgccgcaggtggcgc

SEQ ID NO: 20465 - DNA, 446 bp, Homo sapiens
  chr2:26986225-26986671
  hypo
cggaaggcacggatttttggagactggagaacccaagcgcaaatccctaccccactgctcaccagcaggttcttaagcaaatcactctgcttcgctgaatttactgtcctcagctataaaatggtgtcctcggcaactggagctagatgccttcgccactttgctgaaagatatgaactgtgcccaaggtgggcggtatcagataggagccccgaagtggaaacgtccagcgtgggaatctcctctctacagggtccccaaggaactcccggcaggcccacttcagggctcctttctgacaccgcccagctcaacctctcaaaacgattcacaaaatgctgtaatagccacgatgcaccctcactgcactgtcccatccgccccttttacaaataggaagacccaaagataaaaataagaaaccaaggccaggcgcggtggttcac

SEQ ID NO: 20466 - DNA, 94 bp, Homo sapiens
  chr2:3294552-3294646
  hypo
cgtcggtcatctgggtctttcgcgaatcaaccagcactaattgccatcagattgcatgtgtcagcacacacagacagcgcttccatcacggccc

SEQ ID NO: 20467 - DNA, 205 bp, Homo sapiens
  chr2:3352473-3352678
  hypo
cgatgcaggtaccgggcattttccagggaatcaacgactgaaaggagcgaggacctgaggcaacaccaggagctattaacccttcccagccaccactccccaggagagctggagctccagagtgagggatggcggcttccgactgtgcaggaggagaccagactccgttgtcacagaaggcaggggcagggctgcagtccacagc

SEQ ID NO: 20468 - DNA, 293 bp, Homo sapiens
  chr2:3352710-3353003
  hypo
gtgcacatgcgcacaggcgggctgctcgcagccggaaccatggggcccaggctgttcaggatggagctgtcctgattttcaggacatctcaccccagagacacggcatggcaacagcacgggtgcaccctttccacgtgtgtctgtacaaaagtgtacacttcaggtgcaagagcatacccatggcacatgcctcagagctgaactgcaaattcaaaggagagggaagcgagcagagagaggcagacatgcaggtttcagtcccgattctgccacgcaccagctccacactgc

SEQ ID NO: 20469 - DNA, 488 bp, Homo sapiens; identical to SEQ ID NO: 18679
  chr2:3418350-3418838
  hypo

SEQ ID NO: 20470 - DNA, 289 bp, Homo sapiens
  chr2:3469110-3469399
  hypo
cgcgacagcccccggtgacaggcaggaccccgccgttgcgatgcgcacagctcagaatcccggcccgactgcagtcgggagagcagccgccccctggcagccgagcaccgcgtgctggtttccagcttccccgccagctcctgcgtcagcgtgtcctctctctacaccgcgtctgtatacacttgtgctcttctacacgtgtgaaacccacagtgctgttctcagctctaaagtacgttgggtttttcttcccacaggattatgtgctggccgtggaggcgtatcattc

SEQ ID NO: 20471 - DNA, 204 bp, Homo sapiens
  chr2:38742658-38742862
  hypo
cgcaggcgcacacctccacttgttatataaactgtttgtgtaagttcatacttgacttggagccacagttgtctgtaaaaggtataactgccctgttaacactgcgcaccagacacatggctctggggctcggctcgcctgaaatggcttgtcatggtaggcgcgcaggcgcccagagaaagagcgagcgagtcagagctgtcc

SEQ ID NO: 20472 - DNA, 199 bp, Homo sapiens
  chr2:39663585-39663784
  binary
cgaggcctggtgggcagcagctcccaacctagagcggacgaccccaggttggcgtgaagcaggcaggtttgacaacaccagacccctgctgtccggttcgtcgcgctgaccctgccaacgcaacaaacgcccagaccttctctgcactatggatgagcagtgtggcctgctctcgttctgcccttccctggaaatgcgc

SEQ ID NO: 20473 - DNA, 686 bp, Homo sapiens; identical to SEQ ID NO: 18680
  chr2:44553759-44554445
  hypo

SEQ ID NO: 20474 - DNA, 537 bp, Homo sapiens
  chr2:47142873-47143410
  hyper
cgaagcagacgcgaagccctccaacgtgagcctcaccagcccccgtccccaaaacgctcttcctcggcttcgccccgccccccccccccccccgacctgccctgcgcacgcgcgctccctgccgcccgcccattggcgccgccgggcccctcccgctggcggcggcgggctgtgaggacggctcgcgtgagtccacgtgtaatcggcccgggcccagcactggcgggactgacgcagttcttctacctgctttcccaagggcgacactcggctccactccagttgggccgctggacgccctaggggcccggcagttgctaggcaacgccggaagccctcaggaacgtagttccacgggcgacgtaggatggcggatccggatggggcggaccccaaagctggctcccaactccgctcaccccctcctatacagggctcttggttcaggtctcttggttcgtcctgctgcaagttgggaagaaagataataggaatgctaattccttcttgatgaaacgaccacaacacgctggagcc

SEQ ID NO: 20475 - DNA, 74 bp, Homo sapiens
  chr2:5834133-5834207
  hyper
ggactggctggaggcgaacttctccgacctggtgttcacatattgaaaggcgcccgctgctcgctctttctctc

SEQ ID NO: 20476 - DNA, 203 bp, Homo sapiens
  chr2:62081268-62081471
  hyper
cggttgctatgggcgccgtaactggggacgctacaggagccgccagggaccaaaagtcacgcaaaatccactcaggctgccagagacccgagtcgggtgcttactggatcatggcagtcagtaccgagtctgttggctggttccgaaggttggcaggctgaacagggcacttattccactcctttgcgtctaaccgcctgaac

SEQ ID NO: 20477 - DNA, 77 bp, Homo sapiens; identical to SEQ ID NO: 10527
  chr2:66652787-66652864
  hyper

SEQ ID NO: 20478 - DNA, 60 bp, Homo sapiens; identical to SEQ ID NO: 10528
  chr2:66652963-66653023
  hyper

SEQ ID NO: 20479 - DNA, 218 bp, Homo sapiens
  chr2:74327579-74327797
  hypo
cgcagaaccacttcagctccttcaagtacagcggcaacgcggtggtggagagctactcggtgctgggcaactgccggccctccgacccttacagcatgaacagcgtgtactcctaccactcctactatgcacagcccagcctgacctccgtcaatggcttccactccaagtacgctctcccgtcttttagctactatggctttccatccagcaacccc

SEQ ID NO: 20480 - DNA, 104 bp, Homo sapiens
  chr2:85356682-85356786
  hypo
cgtgagccactgcgcctggcccttatgatctttttcaaccacttaaaaatgtaaaaaaagcggccgggcgacgtggctcacacctgtaaaaccagcacttgggc

SEQ ID NO: 20481 - DNA, 572 bp, Homo sapiens
  chr2:98408820-98409392
  hypo
cggatctccggcagtgggagatgattacctttgctttttggcaatggcgatggaggctgctctgtaaacacttctagggctggggagtcatggtggtcgaagtctttgtccatggcttctatgagactggtgatgtccgagtcctcggaactgtgcctcgcgctgctggcacgttctgggtgggaagggtgtgcgaggggggcgggagacagcctttcaggctgcggctcctggggctgaggcactggcggtggcagaggaggctgagggtgctgctccagcgggctgtgggcatggtgctggctgccgtgctggctctgctttgcccctttggactttctgcccgctgtatgaccttgagtcactgtgttcgaatctaagacaagggggcttgttttgttagcagactgtgaagaagctgcttgagcagaagtcctactagaggtacttgaactgtttttggctctgacgttttccacgtcagctgagtttctattgctgtgactgctgtgtgggtggaccgatgggccacactgcttatgactcccggcactgggtcgggatgatgaacc

SEQ ID NO: 20482 - DNA, 112 bp, Homo sapiens
  chr20:23969320-23969432
  hypo
gtttaaaaggcgcgttgcccggcagcagaagaaactgctggcttcgcctttggccgagttggcggctggacgaggacgcagagcccagctctcgagagttcaagcaaccgac

SEQ ID NO: 20483 - DNA, 121 bp, Homo sapiens; identical to SEQ ID NO: 6118
  chr20:2731109-2731230
  hyper

SEQ ID NO: 20484 - DNA, 226 bp, Homo sapiens; identical to SEQ ID NO: 6119
  chr20:2731391-2731617
  hyper

SEQ ID NO: 20485 - DNA, 744 bp, Homo sapiens; identical to SEQ ID NO: 19580
  chr20:2731675-2732419
  hyper

SEQ ID NO: 20486 - DNA, 237 bp, Homo sapiens
  chr20:32436267-32436504
  hypo
cgcagcggccctccaggcactgaagcgtaagaagaggtatgagaagcagctggcgcagatcgacggcacattatcaaccatcgagttccagcgggaggccctggagaatgccaacaccaacaccgaggtgctcaagaacatgggctatgccgccaaggccatgaaggcggcccatgacaacatgtacgtgtccacccgcccctgcgccacagggcagtgctagtcccggaatgcctc

SEQ ID NO: 20487 - DNA, 32 bp, Homo sapiens; identical to SEQ ID NO: 13876
  chr20:32677630-32677662
  hypo

SEQ ID NO: 20488 - DNA, 205 bp, Homo sapiens; identical to SEQ ID NO: 13877
  chr20:32677691-32677896
  hypo

SEQ ID NO: 20489 - DNA, 138 bp, Homo sapiens; identical to SEQ ID NO: 18709
  chr20:33183813-33183951
  hypo

SEQ ID NO: 20490 - DNA, 86 bp, Homo sapiens
  chr20:33876250-33876336
  hypo
cgtgcctgctcacctgtaactgcccgccaccacttgctcacagtcaatgaggacgaacttctccagggcctgccccgtgaagcggc

SEQ ID NO: 20491 - DNA, 436 bp, Homo sapiens; identical to SEQ ID NO: 15857
  chr20:35443740-35444176
  hypo

SEQ ID NO: 20492 - DNA, 381 bp, Homo sapiens; identical to SEQ ID NO: 15858
  chr20:35444205-35444586
  hypo

SEQ ID NO: 20493 - DNA, 234 bp, Homo sapiens; identical to SEQ ID NO: 11525
  chr20:40020340-40020574
  hypo

SEQ ID NO: 20494 - DNA, 57 bp, Homo sapiens
  chr20:43374349-43374406
  hyper
cgggcaggcgagtgggaggcggacaggggagcggttcttccggcccccacccgtggc

SEQ ID NO: 20495 - DNA, 67 bp, Homo sapiens
  chr20:47765244-47765311
  hypo
cggtgaaaactcagcccagaagaacatgtctacaacagccgctgccctcaggactgtgccaaccaac

SEQ ID NO: 20496 - DNA, 50 bp, Homo sapiens; identical to SEQ ID NO: 15865
  chr20:47766299-47766349
  hypo

SEQ ID NO: 20497 - DNA, 75 bp, Homo sapiens
  chr20:48350342-48350417
  hypo
cggccgtttacaatactttctaaaacaatgtaggtagagaagagggctaattataatcaaacaaacaaaggtaac

SEQ ID NO: 20498 - DNA, 522 bp, Homo sapiens
  chr20:48498752-48499274
  hypo
cgagtgagccgtgctcgctcattttctccacttcttcaccgcctgtccacggggctggaattggccttggcaggtcaccagtgacctcccgcagccagacctggaggggaggcgtccgcccccgtcctagcctacctccttcccactgcccctaccttctggcgaggaccacttcactctcttccccggcctctgggccatgctcctcctttctctcctttgacgtctccttgggctcgtcccccttcgctgacccctcaaatagtggcttcttcaggacttggccccagccccacttctgttcacgtgttctgcacttcactgagtgcgctcacccgtccactggccttcacttccacctagtcccaaagctgttcccgcgaacccagacctccctctgggatccgtactcctgtttccagctgcctgtttggatgccgtggggatgctgtcatccctatgcctttgcatcccccttgcccaagaaatcctactttgaattgcccggtggcctggctagcc

SEQ ID NO: 20499 - DNA, 242 bp, Homo sapiens; identical to SEQ ID NO: 13892
  chr20:49206898-49207140
  hypo

SEQ ID NO: 20500 - DNA, 161 bp, Homo sapiens
  chr20:55203944-55204105
  hyper
cggttgttgagtcgctccccaaatgcgcagtttcttaactccaggtgacatccgtcttttggaggaacgagtgaaggccgtttaggcgaaagaggggtgggtttcagtatttggatcccttcccccagctctgccaatctcaggtgtgtttacggtggagg

SEQ ID NO: 20501 - DNA, 64 bp, Homo sapiens
  chr20:56999390-56999454
  hypo
cgttgaaagcggcccatgtgacagtgcatagcagacagtggacgggctgggcaagaacaccacc

SEQ ID NO: 20502 - DNA, 305 bp, Homo sapiens
  chr20:57415535-57415840
  binary
cgagaccgagcctgagaccgcccccaccactgagcccgagaccgagcctgaagacgatcgcggcccggtggtgcccaagcactccaccttcggccagtccctcacccagcgtctgcacgctctcaagttgcgaagccccgacgcctccccaagtcgcgcgccgcccagcactcaggagccccagagccccagggaaggggaggagctcaagcccgaggacaaagatccaagggaccccgaagagtcgaaggagcccaaggaggagaagcagcggcgtcgctgcaagccaaagaagcccacccgcc

SEQ ID NO: 20503 - DNA, 128 bp, Homo sapiens; identical to SEQ ID NO: 13897
  chr20:60756218-60756346
  hypo

SEQ ID NO: 20504 - DNA, 227 bp, Homo sapiens
  chr20:62242319-62242546
  hypo
cggccagcccaccaatgcccggatatgcaagtgagcccagcctggaccccccggcgaggcccagcagcaccagcccaggcccgaaaaccttaagaaatgaccagtgtctgctgctttaagccaccaagctctgcggtggtttgttaggctgcaagcatggctaattcagaaactgccagaaacaagcactgctgtccccagcctgggacacacagcaccgcctctgc

SEQ ID NO: 20505 - DNA, 357 bp, Homo sapiens; identical to SEQ ID NO: 17761
  chr20:62252093-62252450
  hypo

SEQ ID NO: 20506 - DNA, 144 bp, Homo sapiens
  chr20:62371942-62372086
  hyper
cggagacaccggccccgacggaggccaggtcagggccccaggtttgtaattaccagccacccccaagctcttcagccctggaggagctgagcagaaatgatcgatgactgggagtccctacacctccctccaccgcagttcctc

SEQ ID NO: 20507 - DNA, 73 bp, Homo sapiens
  chr20:62639433-62639506
  hypo
cggcctaatttcttaacatcattaaatgtctactgcattcatatttttccagctgtcatgtcagtacctgcac

SEQ ID NO: 20508 - DNA, 67 bp, Homo sapiens
  chr21:22370943-22371010
  hyper
tgtggcgctttattgcatttactttccctcccccttccacccggccaagagaggcaaagagggaggc

SEQ ID NO: 20509 - DNA, 53 bp, Homo sapiens; identical to SEQ ID NO: 8419
  chr21:34033597-34033650
  hypo

SEQ ID NO: 20510 - DNA, 157 bp, Homo sapiens
  chr21:34350777-34350934
  hypo
cgctgttccccggcccgggcttgtgttttacaacaggggaggggcgggcgtgaatggtctgatgattggaacaatccccccgattcaggcctacaaacgcatcttctgttccacaccgaggggacagaaaggagaaaagtgacaaagaacgcggggc

SEQ ID NO: 20511 - DNA, 749 bp, Homo sapiens; identical to SEQ ID NO: 9589
  chr21:40316188-40316937
  hypo

SEQ ID NO: 20512 - DNA, 51 bp, Homo sapiens
  chr21:40580603-40580654
  hypo
cggttctcatgcctcgtgcctataggtgggattacaggcaagcgccaacac

SEQ ID NO: 20513 - DNA, 165 bp, Homo sapiens
  chr21:42780066-42780231
  hypo
cgctaccaagagaagaatccttaaggagagaatttaccggctcactcaggcgcgacacgcactctgtcaattctccagcaaagagatccactgaagggcggcgatgcctgtggttgttttcttgtgcgtactcattcattctaaggggagtcggtgcaggatgcc

SEQ ID NO: 20514 - DNA, 376 bp, Homo sapiens; identical to SEQ ID NO: 15901
  chr21:43239707-43240083
  hypo

SEQ ID NO: 20515 - DNA, 243 bp, Homo sapiens; identical to SEQ ID NO: 15902
  chr21:43240112-43240355
  hypo

SEQ ID NO: 20516 - DNA, 93 bp, Homo sapiens
  chr21:43430373-43430466
  hyper
cgaggcagacgccgggcccctttccgctcacactcggctcgcgcgcgccgcagccgccgctgccgctgtgattccatccatcttgaatttgac

SEQ ID NO: 20517 - DNA, 265 bp, Homo sapiens
  chr21:44441284-44441549
  hypo
cgtgcatgggcctcgactacaatcatttccctgtccgatccttggctgttttctccacctgcagttgtaagtacttggatatgtgagaatttcctatgctttctaatgttatttttcaactttaaaagcttcagttacagttaaaccaagatctcagcatcttgcatcaagatgatggttcatctaagaacaagaggggcgtcctgccaaagcatgccacgaacgtgatgcggtcctggctcttccagcacatcggggtaaggac

SEQ ID NO: 20518 - DNA, 330 bp, Homo sapiens
  chr21:44448081-44448411
  hypo
cgttctctgtggagtcttatcacaggcgtgagtgcctggtctgacagagtcgccagcgtctgtcggggatttcatcactgctggtgcctacgtgctgtgctggccacatgtctaggaccactggaggacttacgcctccagtcatctaagaaacagctcatcattgggaatggtttttgaaaagatgcagctcttgccttagatcgtgctttgtggtgaaacaagaggaggtggcagtcccattctctgatggctcagacacgttgccacccagaggctcggccccgttggtgatctggtgacgtccagacgagtgcagactgcccgatc

SEQ ID NO: 20519 - DNA, 128 bp, Homo sapiens
  chr21:44451419-44451547
  hypo
cgagggcacctcggcagcccccacgggttggctcctacgtttgcgtttgtggctggtctcctggtgtcagtgttctcttgtacgttgttgctttcgacttttcagagccctcctgctcacttgaccac

SEQ ID NO: 20520 - DNA, 703 bp, Homo sapiens; identical to SEQ ID NO: 18732
  chr21:45345807-45346510
  hypo

SEQ ID NO: 20521 - DNA, 105 bp, Homo sapiens; identical to SEQ ID NO: 13921
  chr21:45499846-45499951
  hypo

SEQ ID NO: 20522 - DNA, 326 bp, Homo sapiens
  chr21:45518831-45519157
  hypo
cgtctaccaaatacccaacactgaataactagcttccccagcgctcttgcaagtgaaaagggcgttctgtgaaaacagcggctatttcagctcgcagcaccgagcgctccccgtgtgctttccctgagccagctgtcattctgcagcagagacccagagaatgtcaagaacacaagcactcaagaatggaaataactcaaacgtccttcagctcgagagcggttaaactggcacatctgattcctcctcagcagtgaaacagaagggactgttgacacacgcagtgctgtggttggatctcaagggcattatactaagagaaaaac

SEQ ID NO: 20523 - DNA, 663 bp, Homo sapiens; identical to SEQ ID NO: 7280
  chr21:46323288-46323951
  hypo

SEQ ID NO: 20524 - DNA, 210 bp, Homo sapiens
  chr21:47856005-47856215
  hypo
cggctgctctctgccgcccggcttctcaccagcttcaccagccaggccgtggacaggtgtgcacccacgccacctggcgctcactggtcccttgcagccacccctctgtcccagacccggcccgagggctggggcgcgtctggtgtgaggcccctgctcctttgcacttaacgctctagtcctctttctgagactttgctgagggattcc

SEQ ID NO: 20525 - DNA, 45 bp, Homo sapiens; identical to SEQ ID NO: 11562
  chr22:18328049-18328094
  hypo

SEQ ID NO: 20526 - DNA, 537 bp, Homo sapiens; identical to SEQ ID NO: 6558
  chr22:18340868-18341405
  hypo

SEQ ID NO: 20527 - DNA, 388 bp, Homo sapiens
  chr22:19968748-19969136
  hypo
cgcccacactcaggcctcctccttgtggccgtgccatagtcaggctccagctcagggccaccctcgtcatcagcggccaggctgcgcgtgtcatcctccaagccatacggctctgcctggaagcgctcgggcagggagcggccacctggtggcccaggctcaggacccaccgggaaggcttcccggtggccaggcagtgtgaagcagccatcaccagggcctgggccaagggggccagcacgtgggggccgcatgcccagccctcgggacaggctgccatagctggggctgtcccggggctcggggccttcgggaaagccacccccactgctgaggtaggctcgagagagtgtggccactgggccaccaccacgcagcaggaaatgcc

SEQ ID NO: 20528 - DNA, 212 bp, Homo sapiens; identical to SEQ ID NO: 8437
  chr22:22036173-22036385
  hypo

SEQ ID NO: 20529 - DNA, 98 bp, Homo sapiens; identical to SEQ ID NO: 13930
  chr22:22057979-22058077
  hypo

SEQ ID NO: 20530 - DNA, 730 bp, Homo sapiens; identical to SEQ ID NO: 14935
  chr22:25959837-25960567
  hyper

SEQ ID NO: 20531 - DNA, 89 bp, Homo sapiens; identical to SEQ ID NO: 15919
  chr22:27019127-27019216
  hypo

SEQ ID NO: 20532 - DNA, 67 bp, Homo sapiens
  chr22:29076607-29076674
  hypo
cgcgcacggcctgtttctcctaaatataaggactcaatataataataagagaaagcctcagcaccgc

SEQ ID NO: 20533 - DNA, 80 bp, Homo sapiens; identical to SEQ ID NO: 7308
  chr22:30084279-30084359
  hypo

SEQ ID NO: 20534 - DNA, 120 bp, Homo sapiens; identical to SEQ ID NO: 7309
  chr22:30084388-30084508
  hypo

SEQ ID NO: 20535 - DNA, 567 bp, Homo sapiens
  chr22:31522433-31523000
  hypo
cggtggtgacgacagcgacggcgcagacatgatcgccatagggtgaggtggcagggcatgtggaccccctcctgagcccctcgggccttccgggccctccacccatggcaggggcttccagggcacctctccaatcccatggccaccctgcccccacccctccaggttgcaggaagtgaactccatgctcaacaagcgactcaaggacgccctcttcacggaccagtggagtgagctgttcatggatgcgctagggcccttcaacttcgtgctggtaacgcacccctcaccccctggacagccagagaccctgctgaattcctggctccagctgtaccctggctcactgtggggcccgctgggcctctgtggctgggtccgtgacatgggtgggtggaggagcagacctgaaggtgggcgcgagggcgggggagttgtgttctgtcccccagccacgtggcctcccgctgcaggtgagttcggtgaggatgcagggtgtcatcctgctgctgttcgccaagtactaccacctgcccttcctgcgagacgtgcagaccgactgcacgc

SEQ ID NO: 20536 - DNA, 269 bp, Homo sapiens; identical to SEQ ID NO: 13943
  chr22:35848670-35848939
  hypo

SEQ ID NO: 20537 - DNA, 228 bp, Homo sapiens
  chr22:38528855-38529083
  hypo
cggggtgttgccgtgctctccgcgggcatccgcgttggccccgtgggtcagcagcactatggcacagtcgaagcggttgcgcatcaccgccacgtgcagggccgtgttccccgcggagctggtgctgttcacgttgcagccccgtttcagcagcatgcgggccatctgcgggagacggtcaggctgagttagcacaggcactcggggagctgccgcaccccgggacac

SEQ ID NO: 20538 - DNA, 190 bp, Homo sapiens; identical to SEQ ID NO: 18750
  chr22:41536192-41536382
  hypo

SEQ ID NO: 20539 - DNA, 172 bp, Homo sapiens
  chr22:41593094-41593266
  hyper
cgacttctcccgcaccgcggccgcaatccagcccggacactctgagggctctctctgagctgggcacggtcctcgctgctcggccgagtgcagccccctcacctcagtgcgactgagacaaagcaagggtcccaccggcccctgtcccctccctaaggcgcgccctcagggc

SEQ ID NO: 20540 - DNA, 470 bp, Homo sapiens
  chr22:43659642-43660112
  hyper
ggtatgcagcaacacagaatagatttaagaacacaaacaccctgctagttgtaataaagacaaaaacgtctaaagttaaaaatcaaacaaacaaatggaaatgaggaagcctgcattttgcccggcactgtaactcctggtttcacctgattttgcgactcatatttcctcaccttgattttctcactaatcaatcaaattgttggaatgacgcagagtctaactaagcaacgagttagcacggaaagcgctttcatgctgctgccctgcacagaagctgcaagttcacacggaaagaccctttccgctggctcgattccaaaacagcatcagcgcctgagtcacacagatagtggcgtgcggtcaacgcttaacagccggcaggggtggaggctgatttgcagtatttaccaatttacgtgggataaatacgccagccacggctaatttcaaggtaccagggagatgtc

SEQ ID NO: 20541 - DNA, 961 bp, Homo sapiens
  chr22:47298524-47299485
  hypo
accagcccttccactgagctgactcttcgcctccactcagagtcccgttcaagtgggcacgttgttttcacctttcctgcgataactgcaagcaacacacctgcatttttgacacacaaagttgtaatggttgtgattcccgaagaacaccagcagacagacacccggtgggcacgtggggacacgaagactcagatgtctctgtcctcagcagcgcacagttgaagtgagggatgaagacagatgtgcgtgaaacccagagagatcatatacagttgtcaatgaaaccacagtttgtatcctgccgactgcattccagggtggctgaaagaattggagaagacagcccgaggaggggcagcgtatggggcagtccactctggagggtcatgcccaattgctggggccgcctcacgtctctgctctgtgatttcttctatttcctggcccggttgggccgtggatctctccctggtgcacctggagtctctgtggatctctttcctcaggggactctgcaacccagcctcacgccctgcagggggtcacagacctcagcctggtgggcgttcgggaccgagggctgagggccgagggttgaggtgaagtgcagtggcacagccatcccaggctgcaggcgaaggggctccccttcgagaacccacaggatggtagcagagcgaagttcagcctgcgggggcgtctgtactcggggaagctgtggaccaggcatggagccagcctgtttgccctccccgccctgatggctgctccggctggctaggcctcttctctgagattcttggcttagtacctctggcttttgccgcttgaatttggggacctgtcggctcttcctgtttcgcttcagtggacttccaccctagctctcgcctctggttgctgctctgagcgtgagtctagagggaccagcaaggtcctgagggagttgcgaggaatc

SEQ ID NO: 20542 - DNA, 398 bp, Homo sapiens
  chr22:47534595-47534993
  hypo
cgtgaggattttaaccgatggattgggggaaacacaaacgttccagccgtagcacgttatttggccgaaacccagaataccaggaggccagccctcgctctgcagccgtctcccctgagggcccagcctggattcaggccttttggcttggccaaagcccttctgagtcccaccctgagcctttgcgggagggtgacgtcatgtgctttattgctttgtttatgtgcttcagtcaccgttccgctcctgcagcgaccagtcaggcacagaacactgaggccgccaaagactggcccttggttccagttgcccgcacggaactgtgtgtctggggcccagttgctgaggaagtacctcagaggacaccgctgacacaagccacaggtgctgacgtggcc

SEQ ID NO: 20543 - DNA, 778 bp, Homo sapiens
  chr22:50894573-50895351
  hypo
cgtccacttggctctacccaaggggagggcccagcaccaaggcgggcagagggacggggcagtgcagagacctggatcagccactctgagtcctccagtgagcgcaggaaggaggctgggctgggctcagcagcggggcagcctgggacacatgctttcagcagcttcttgaagctagccttcacctgccgtgcctcgaatacctcaatgggcaccagctcccactgctgcagggggtctgaccgcacaccctgaaaagaatccggacaagtcccgtgagacacatgaggccccaagccccctgccgagcccccaccctcaccccccaccccccgcaccccagtcaccttgagctgggctttgtccccaaggatatagagggctgctcgctgcggacgcaggaagcccgggtcgggagggcccccgttggcctggggtggggccagcgcgtctctgccagctagccgggagcccacatcggtgccaaggccactgctgcgtccactggtccggacactgccccacttacctgtgaaggagatgccaggtaagcacccaaagggggccagggcaccacttacctggggctggctgggcccggcctccagggagggggctgagctcccagggcaggggtggttggcaggaccccagcagggccgtgcgagaggagggctggaacacacagattctgagacgtggggtggcagccagtgttagtttctagggcaggactcacgggtcagggaggtaaggactggggctcgggagacgggtc

SEQ ID NO: 20544 - DNA, 237 bp, Homo sapiens
  chr22:51112317-51112554
  binary
ctggaggtccccgtggtccgacccccaggcctggggcgggggggggtccccgccatctcctccaggcccgaagctgggggtcggtggagtgggggggagaagccgccacctccggaaattaattgtttttctttccccttctcgccctaccttggtcttcgtgccccgacgcggcccccaccccagctccgggaccccttcctccgccgcacccgccccggtggtccgcggatgccc

SEQ ID NO: 20545 - DNA, 546 bp, Homo sapiens
  chr3:11655438-11655984
  hypo
cgaatctgctccaccaggagccggcgacgtcatctcagagcagctgcctgactttctatgactgtttccacatgtgtgaaaatggtagtgtgaacccacacacaggctcagagcgatacccggcacggtgccgcctcctccccacacacactctggacttacaggctttcttccatgcacgtttctccctccctagaatgtgttcagaagccctctctgccaatgcatactcatctgcactttcaaaacccgacttgagtgcctcttgtcagcctcagccccaagagcaccccttttggtgccatctacctgggctgagctgcctggcagcgtcccttgtgacgtgctgctggctccaactcaaaaactactcatttctcagcaacaccattgtgtgctaccgccaaacaggcgatcttgctctctgcagtaggttccagtccagaccctgaggagtaagatggtggtcccggaaaccagttcaaatttctcactggcatacagagtgctgaaggaaggctgtgtataggccccccgattctgatc

SEQ ID NO: 20546 - DNA, 84 bp, Homo sapiens; identical to SEQ ID NO: 18760
  chr3:121500635-121500719
  hypo

SEQ ID NO: 20547 - DNA, 435 bp, Homo sapiens
  chr3:124716572-124717007
  hypo
cgacttgcactggcacagggcaacgccgtccaggtcagtgcagatggaggtgtctttgtcacattcgggactcttccgcttgcacaagctgcccgctggaatggaaaaacaagacagtgaaacaaaacaaaaccttctccacttcaaaccttaaaatctcctccacttcaaagctcatgtgtctgcatgaactctctatttcaagaggctgagaacagttttccgaaaagtctccacagagcaacactcctctcaggagtccatctgtactgccttctgccactccttctctgatcagccgcaggctgtgcaccagtgttccccgttgaaaacaccctcacagcgtgccacggacccactgagaaacgaaattggaataaacaggccctgttcactcctctggtgctcactgcaaatacagcccttaatggcccc

SEQ ID NO: 20548 - DNA, 79 bp, Homo sapiens
  chr3:12605281-12605360
  hypo
cggccagaatcacctttctttttaagcttgattgtatggatagaccacatcttgtttatgcattcgtccattagcgcac

SEQ ID NO: 20549 - DNA, 175 bp, Homo sapiens
  chr3:128340992-128341167
  hypo
cgcccgacacttactctgtcgcacagatcagagccctctgtcttcagcctggactgcagcagtgcaatctcactggtcaaggccttgtgttcagtctccaggctcttcttgccactgttgagggtggagatgtcccgggattgcttgtacctattgacggtctcgtcaaagtgac

SEQ ID NO: 20550 - DNA, 92 bp, Homo sapiens
  chr3:130460761-130460853
  hypo
cggtatcgatgggttcttggaaactgcaactttaagtacaacaacgtacaacaaaaccatttattttctcaccatttcattataatgaaaac

SEQ ID NO: 20551 - DNA, 475 bp, Homo sapiens; identical to SEQ ID NO: 8490
  chr3:131080684-131081159
  hyper

SEQ ID NO: 20552 - DNA, 53 bp, Homo sapiens
  chr3:15079942-15079995
  hypo
cgatgtcctttcttttttttccggccctttgccagtttccaagttttgttagc

SEQ ID NO: 20553 - DNA, 79 bp, Homo sapiens; identical to SEQ ID NO: 13975
  chr3:15123770-15123849
  hypo

SEQ ID NO: 20554 - DNA, 42 bp, Homo sapiens; identical to SEQ ID NO: 13976
  chr3:15123992-15124034
  hypo

SEQ ID NO: 20555 - DNA, 104 bp, Homo sapiens
  chr3:170588570-170588674
  hypo
cgagaccacccttggcagcgtaggcatagggagaacccgtctctacaaacaattttaaaaaaaatggcccgcgtggtggtgcgcgtctgtactcccagccactc

SEQ ID NO: 20556 - DNA, 52 bp, Homo sapiens
  chr3:184042674-184042726
  hypo
cgaggacgcctgaaggaagagctggaagaggctcgggacatagcccggcggc

SEQ ID NO: 20557 - DNA, 90 bp, Homo sapiens
  chr3:186442824-186442914
  hypo
cgaatgctgattgcgatcattaatgctgtgtttttgtctgctctttgttaagccgagggccctgtggtgacagcccagtacgactgcctc

SEQ ID NO: 20558 - DNA, 352 bp, Homo sapiens
  chr3:193852659-193853011
  binary
cgcagcgcgcgccaatgagcccgggccaggcgcagggggcggggttttcccaggctcgagcacagcagctgctatttaccttcttggcttctcccggggaccaggaaccggcccccgctctccgccgcccgtcgccgccccccgcctccctgcccccggggcgcgcgcacacacactcactcacacacgcacgcacacacacatcctcccggcccggccgcagccgcggcggcaataaaacatcctggcacgtgctccggctccaggcgcgcccacgccggccggctgatgtcaaactgcagctcggctggtgtagctcttaaagggcccgcgggcgccgggggccgaggcc

SEQ ID NO: 20559 - DNA, 296 bp, Homo sapiens
  chr3:193969977-193970273
  hypo
cgaaacacactgctacatggggctggcccatggatagccgcgcacctcagagtgagcagtgccagaagccaggtagattgggggtggagggctgggggagagacatgaggcaggaagcagttaggcaccaaagcaggagtttctagaccttcggtcaacaaaaattcaaggagcacctgcttgcgctaagtgctggaaatgcagtgatgcgtaaaacacagagcccgcttcgtggaacttagcatcaagagagaacacttgacatgcagacaggcaatgccagtgtcgtgggatgc

SEQ ID NO: 20560 - DNA, 363 bp, Homo sapiens; identical to SEQ ID NO: 13988
  chr3:195536308-195536671
  hypo

SEQ ID NO: 20561 - DNA, 583 bp, Homo sapiens; identical to SEQ ID NO: 15948
  chr3:195599104-195599687
  binary

SEQ ID NO: 20562 - DNA, 247 bp, Homo sapiens; identical to SEQ ID NO: 15949
  chr3:195599840-195600087
  hypo

SEQ ID NO: 20563 - DNA, 49 bp, Homo sapiens; identical to SEQ ID NO: 15950
  chr3:195601363-195601412
  hypo

SEQ ID NO: 20564 - DNA, 32 bp, Homo sapiens
  chr3:195709683-195709715
  hypo
cgcagaaagggaggcgccagacagcgctgccc

SEQ ID NO: 20565 - DNA, 79 bp, Homo sapiens
  chr3:197612493-197612572
  hypo
cgcgccccatctcgctccaccacaagcgcctttatatactcaatgatgggtggaggaaaagggcccaagggctcacacc

SEQ ID NO: 20566 - DNA, 328 bp, Homo sapiens
  chr3:33216338-33216666
  hypo
cgtgggcacgcgaaggtggcccatccctgggctgcttacctttcccacaggcctgcaccaggccgtaccactccccacagctgttacatagcaaggtgaaggcggtctcccggtggcccatgatgtggcctggggcacacacgtacagcagttcatcccccatttccaagccggtgcggccctgcaggatggtgtgtgggaacgaaggcgggtctccacacggcttctctgaggagaaggaatcacagttagcttttccaaactgtgcggaactttttcagcctatgagaaaacagacttaaaacacaactctcccctgccgcccacc

SEQ ID NO: 20567 - DNA, 92 bp, Homo sapiens
  chr3:33437677-33437769
  hypo
cgcttgcactgcttgcagcttgctgctgcccttgcagcactgtgctgcttggctgctcccggcagacatagatggttaaacggggtctaacc

SEQ ID NO: 20568 - DNA, 427 bp, Homo sapiens; identical to SEQ ID NO: 15014
  chr3:44038922-44039349
  hyper

SEQ ID NO: 20569 - DNA, 42 bp, Homo sapiens; identical to SEQ ID NO: 13993
  chr3:44063232-44063274
  hyper

SEQ ID NO: 20570 - DNA, 255 bp, Homo sapiens; identical to SEQ ID NO: 8514
  chr3:45719334-45719589
  hypo

SEQ ID NO: 20571 - DNA, 327 bp, Homo sapiens
  chr3:4909962-4910289
  binary
cgcggcctttgaggggaaagggccagggcctagacgttcccctcccgcgtggttttcccgtcagcagctttcgtctgcaagggaaagcggcggccccacccgcagacagctgcgaggcaccgcgccaagcgtatgcgcctgttcccaggcactccctcctccgccttcacccttttgccacctccgccctccacccagccccgccgtgcgcctgcgcgccccggcccgtgggccagcgggcagtctactcacgtgggcctccgcatggcccagcgccgccaagggcaaggcggagcctcgcgatcgccccgccccctccgtgccccg

SEQ ID NO: 20572 - DNA, 210 bp, Homo sapiens
  chr3:4910550-4910760
  binary
atcacaagatactgctccagattttcccattttatggctaaatccaaatgactcggaccccctgccccatcacatcaggaacttcagcagttccttccaccaaagctcaactattgctgcaagcgctttggtaatcacgagcattatctatgaagctactgctgtggtcagggccccagtcgtcctgctgagtagcagactttgaaagac

SEQ ID NO: 20573 - DNA, 97 bp, Homo sapiens
  chr3:49662414-49662511
  hypo
cggagactggaccccaaggaacccctgggtaaccagagagcagcttccccaactccgaagcaggcttctgctaccactcctggccatgagagccccc

SEQ ID NO: 20574 - DNA, 557 bp, Homo sapiens; identical to SEQ ID NO: 15958
  chr3:49720262-49720819
  hypo

SEQ ID NO: 20575 - DNA, 387 bp, Homo sapiens
  chr3:49893744-49894131
  hyper
cggtacccgggcaaacaccgggccccaacactgcagtcactcaccactgcaagtggaaggtgtggccgcagtggatggcggccacgtcgcgggagtgatcgaagaagtcggagcagatagtgcacagagcacggataggcatgatggctggactcaaggggcccaggcagccaaagaaactgctacaggtccggcttcgtagacgcgcccccgcgcctccgcttgcttcaaatttggctccgcagcacgacttcctggagcgggccggaagtgacaacacaaaactttgggcggagcgtgaatacttcgcctggattggacaaattctcggatgggcggaactatgggcggggcttagcggccccgaggccgtagagaatcctgggc

SEQ ID NO: 20576 - DNA, 143 bp, Homo sapiens
  chr3:50144939-50145082
  hypo
cgcgtcagcgctttctctgtagctagtacggctattgctgctgctcagtggtcatccacccaggtaagatcgaggatctttttgctcaaggtagtgtggtggtggtgcccagattcacagacgtgacctctcctgtggtactc

SEQ ID NO: 20577 - DNA, 62 bp, Homo sapiens
  chr3:51623983-51624045
  hypo
cggggaattcatgttcagcatttttttctttgtttttcttttggagagagtctcacctcgtc

SEQ ID NO: 20578 - DNA, 111 bp, Homo sapiens
  chr3:57679987-57680098
  hypo
cgaggtgtcacgcctgtagtcccaggttcttgggaagctgaggccggctaagttcaaggaggatcgcttgagcaggagttccaggctgcagcgcgctatgatcgcgcctgc

SEQ ID NO: 20579 - DNA, 349 bp, Homo sapiens
  chr3:64671307-64671656
  hyper
cgggggtcgacagagagtcggggaaccaacgtggattccctgctaaatgctatttggcagcgcaagaaggcggcctccccgccctgcctcagtccctagggaaacgtgcgccgcaggctccctctctccactccctggaacccgtgagtagtagaaaccccagaggaaccgaaatcacgtccggacagcctctccaggctgtctcccactatcccgtttctcccggccaccccgccagtagggtgcagagttggactgcgctgcacccccactctcggttccaccccaattcaaagcgtccggggtaggctccgccttctcccccgcccccagagccctcggcccaccc

SEQ ID NO: 20580 - DNA, 307 bp, Homo sapiens
  chr3:64671732-64672039
  hyper
tgagagaaagcggggactctagattacgcaccgccctccacaacacacactgaaggaactcccagtgccttgggcaggggatcctcagccccacatccccgatgcaaggcgcaccaataaggagtctggtccgccctgcgctcagcggctccgctcccgggtggccaagtttgctgcagggaaccgcaactccagtaactttctccgagtttggaaactgacttccaggccgcctcgcagcgttgggcaacgcgccgctgaaccgagtccaaactccagaaagctctgaaacatccagaagcccctg

SEQ ID NO: 20581 - DNA, 69 bp, Homo sapiens
  chr3:87297469-87297538
  hypo
cgtttcggtatacattttgtttctcagttaccttattctttttgagtgtctgatttttgagacagtctc

SEQ ID NO: 20582 - DNA, 342 bp, Homo sapiens; identical to SEQ ID NO: 19684
  chr4:10087759-10088101
  hypo

SEQ ID NO: 20583 - DNA, 413 bp, Homo sapiens
  chr4:10120458-10120871
  hypo
cgggtcacttagactccgttgtccgcctcccctcatctgtatcatctttgccttgggtactggcttcggagggtgttttcctgaaactcttacctgagatctacttggctgactcctgtgtccttcagaagtacttaattgctcaaatgttagttgatgagtgtcaccggtctcattttaaattgcaacttcaaccccttgcaaacactgcttctcattcccgcgttccctaactttaactctcaggaataaccctgacacctggaagatgctcctagggatgaccccactccccacccacaactgttaatcaggaaataacggatatgaaagtagctctgcgaactgaggagccgtggagaatgtacaaaacagattcctaaagtaagatacgcaggcccggcttgtaggcc

SEQ ID NO: 20584 - DNA, 58 bp, Homo sapiens
  chr4:10128984-10129042
  hypo
cgcagtctttgagatttgaaggggcggggttgcccctccacatccgtgggtgtttctc

SEQ ID NO: 20585 - DNA, 168 bp, Homo sapiens; identical to SEQ ID NO: 15962
  chr4:103421142-103421310
  hypo

SEQ ID NO: 20586 - DNA, 358 bp, Homo sapiens
  chr4:13600978-13601336
  hypo
cgtctgcccagacgtctgttctggtcctctcaggtgggcaggtgagttagcattcccctctaagccccttcctgctgaataacttgctgtgctactgccccctgctgtccctgtctctgggctcttatcttctttctgaagggagttcaacaatacattcttctcttctgcatttatgaggtgtaaagtgctctctttctgtcctcttcctgcaaatggtcctatttcggggcactccttgccatgcttctcttctttttccgcacaaacagcacttggatggccttgccctgcagagggcttgtggactgatggcccgttgtgcccctcctcggtgctcactgccaacacgggaccc

SEQ ID NO: 20587 - DNA, 137 bp, Homo sapiens; identical to SEQ ID NO: 15034
  chr4:140970253-140970390
  hyper

SEQ ID NO: 20588 - DNA, 212 bp, Homo sapiens; identical to SEQ ID NO: 15035
  chr4:140970419-140970631
  hyper

SEQ ID NO: 20589 - DNA, 194 bp, Homo sapiens; identical to SEQ ID NO: 19693
  chr4:146098925-146099119
  hyper

SEQ ID NO: 20590 - DNA, 373 bp, Homo sapiens; identical to SEQ ID NO: 14008
  chr4:153943334-153943707
  hypo

SEQ ID NO: 20591 - DNA, 227 bp, Homo sapiens
  chr4:154387493-154387720
  binary
cgccagcgagctagcggcgagcgcggcgagcaacggagaggagcgcgagcagcagcatggcggggctccgacgcccgcagcccggctgctactgccgcaccgcggcggccgtgaacctcctgctgggcgtcttccaggtcctgctgccctgctgtcgcccgggaggggctcagggacaaggtcagccttgcgccgctgggctcgctctgcctctccaccccgccccc

SEQ ID NO: 20592 - DNA, 329 bp, Homo sapiens
  chr4:1738699-1739028
  hypo
cgctcagcctgcagtgggtaatgaagcgtcaccgtgctctcccggaaggacaagcagccacgtgggatgggcaggtgagggaggggggcacggagcagcagagaggccgggcatgctggatgcgggtctgcgttttctaccactaccctgacttgagtggttttaaactaaaaagcaaagagcccggttagcttgtccacatggtcctctgtgtcctactcaacactgggagggcctagtgactgaggctgcctctgcttggtggcagcatgcacggtgcaaatgagactccctcaggacgtccgcgggaagccaagcttgtggagttc

SEQ ID NO: 20593 - DNA, 132 bp, Homo sapiens; identical to SEQ ID NO: 15970
  chr4:183808118-183808250
  hypo

SEQ ID NO: 20594 - DNA, 166 bp, Homo sapiens
  chr4:183809411-183809577
  hypo
cgatgaaatggctttagattcttccaacagttccgaaataaaagtcgagctagctaaaggtatctccagaacaattctggggcaccctgctctaaatgtgactcctgggcccagggttattttgccggcacctctgcagccagtaatccataactctagtcatcac

SEQ ID NO: 20595 - DNA, 290 bp, Homo sapiens
  chr4:183815970-183816260
  hypo
cggccaggacggccgaggtcaagtgccttccccaccctaagcgcagctccgcttcacggctccacaagaccctggggcatgaaagtgcccacctgagctggctcattggtgtgctgacacgcacacatggggaagttcaccgtggctgttaagagggctaggggattttaagagcaagagaatcaacaagtgacgaagctgagcgtgtccatcctgagggatctgctttaccacatcgtgctcagcccacatacgcacaaggaaaaacgccagcagccagactgggtctc

SEQ ID NO: 20596 - DNA, 211 bp, Homo sapiens; identical to SEQ ID NO: 17871
  chr4:2639936-2640147
  hypo

SEQ ID NO: 20597 - DNA, 118 bp, Homo sapiens
  chr4:2640614-2640732
  hypo
cgactcaggagacgtggagtagccaagcatgatgaagtgcagcttccagagctggcggttgttgaagtcaggaacattcacccaaagatgtaacgtgatctgaacacaagtagtgtcc

SEQ ID NO: 20598 - DNA, 409 bp, Homo sapiens
  chr4:2688489-2688898
  hypo
cggcacaatgggactgctgctcaaagctagcagtttggcatctgtcacgggcttctgccttttacaagaaggtcctcaagaccaagaagtcttctacttgttactttttgtcaattacttctcagcaaagcagctcttagcttatcgctgctttgtagaaatgggtatctattgaaatacgtttttttattttcctggctcttgtcccatggggctcccttaccaaaacaatgacttcaggccctttactgtatcctgggtggcccgtctggacctgtttattcctgctgttgagtcctgagtgtctgctctaccctcctctccccctttgccttcctgggcctgttccaggtcagtggactcgctgagctgtccagcagcccagaggggagtgcttcctctctgctcc

SEQ ID NO: 20599 - DNA, 527 bp, Homo sapiens; identical to SEQ ID NO: 15978
  chr4:3252217-3252744
  hypo

SEQ ID NO: 20600 - DNA, 201 bp, Homo sapiens; identical to SEQ ID NO: 15979
  chr4:3252797-3252998
  hypo

SEQ ID NO: 20601 - DNA, 70 bp, Homo sapiens
  chr4:48887296-48887366
  hypo
cgccatgccccgacatgttcttaaagagcagaaaaacatgtaacgcttagttcacttgaaagccttccac

SEQ ID NO: 20602 - DNA, 32 bp, Homo sapiens; identical to SEQ ID NO: 15981
  chr4:619879-619911
  hypo

SEQ ID NO: 20603 - DNA, 127 bp, Homo sapiens
  chr4:6717788-6717915
  binary
cggaaacaaaggtggatgcgcgtgaacagacgccctcgcaggccgccggaagcaaaggcgtgagcgcgcgtgcgtgcgtgtgcgggtgcgtgagcgtgagcgcgcggaggccggaagcgagcgctgc

SEQ ID NO: 20604 - DNA, 108 bp, Homo sapiens; identical to SEQ ID NO: 11694
  chr4:71857989-71858097
  hypo

SEQ ID NO: 20605 - DNA, 341 bp, Homo sapiens
  chr4:87813080-87813421
  hyper
cctgcacaggaaccacccgccccggcccgggcactttgagcagagcaatccttcccaggttttccctcattcaaaacactcagcaccactcccgcgtccccgcccttgcacgccgattcggggcgagtcccctacccttccccggacggacgcgcagggcccgggaggaactggttcccgggacgggtgggggcctcggccgcccacagagcccgcggagaagggaacggcctcagcctcggctccttcccacacctgggccccaccctgcctccgactcgccaggaatgcgctgtgtgcgcggggcttccagggtggcgggtccccgcgagccggcgccg

SEQ ID NO: 20606 - DNA, 313 bp, Homo sapiens
  chr4:87813512-87813825
  hyper
acacgcctcggggccgcgccgcaggcacacgcctccttcccgctcgccgcgggcgccgagtctggggctcctcgcgtcacacgggagcctcaacaaagggctttgtggggccctccccacccgccagggaggggacgccgggcccgggagacgcgccccgcggggtccgctctctggtaaccgggccggggcaggccgcgctctcggaatccagccaaccagccagagagggctgtaagccagacctttcctgggaaggacgctttccaatgtagggggctgcatccaagcgatctggacttcgtttgcgggc

SEQ ID NO: 20607 - DNA, 69 bp, Homo sapiens
  chr4:9602020-9602089
  hypo
cgagcaagaaacgccaccaggcgagagccgggttagctccgggcctgctgcgggctcccccggaaggac

SEQ ID NO: 20608 - DNA, 57 bp, Homo sapiens
  chr4:99936215-99936272
  hypo
cgtcgcatgtgaagaacacttaagtggaaaggggacaatctgggcctctggcttacc

SEQ ID NO: 20609 - DNA, 468 bp, Homo sapiens; identical to SEQ ID NO: 19727
  chr5:10354870-10355338
  hyper

SEQ ID NO: 20610 - DNA, 309 bp, Homo sapiens; identical to SEQ ID NO: 18798
  chr5:107703589-107703898
  hypo

SEQ ID NO: 20611 - DNA, 253 bp, Homo sapiens
  chr5:112823814-112824067
  hyper
ggccaacttttcccgcgagcttctgagcaacttgccgcaagttggggcgagggggcagagcaggggtcaagggcgcgcggagggactgatctcgctcctgtcggtttcctcgtacctccccgcgtacctgctgatgtatccgtccccgtcgccgtcgcacgtctggaagaggcgccgcatcctctcctcctcgccggtgctggacgtgtcgctgctgctgctgctgctgccgctgccgccgccgccgccgccg

SEQ ID NO: 20612 - DNA, 269 bp, Homo sapiens
  chr5:126250520-126250789
  hypo
cgtgcttcagtaaagctgtacagggcttgtgatccaggcataaaaacagacatcatttgctcattagagctaagttttcaggacgtgccccacttactgacctccactaacggcctgggtttgcgctcgactgcaaacctgaagtggcagagttcacagtagctggtgtttgaggatgacagccagtgctccaggcagctccgatgaattgtccccaaggtccctgtacattcacatggagagagcaagtcctcttggctgctgccctc

SEQ ID NO: 20613 - DNA, 362 bp, Homo sapiens
  chr5:131892939-131893301
  hyper
cgtgcacgccttgcttcggcctcagttaagcctttgtgggctccaggtccctggtgagattagaaacgtttgcaaacatgtcccggatcgaaaagatgagcattctgggcgtgcggagttttggaatagaggacaaagataagcaaattatcactttcttcagcccccttacaattttggttggacccaatggggcgggaaagacggtaagtcttcagtagccgccttcagtttacaggtcgctacatctttcggagaataaaatgggaagttgagaactctccttaggagcagaagcgtccctagggctccacaggtgtaggcccttaaagtgccttagggtgtggcctgcaggctacagc

SEQ ID NO: 20614 - DNA, 94 bp, Homo sapiens
  chr5:134240165-134240259
  hyper
cgggtttccacactttttggtccaggcaaacccagacgagccagctggctcaagaacttggcagctgcgtgatgactgaacagaggctgcgttc

SEQ ID NO: 20615 - DNA, 192 bp, Homo sapiens
  chr5:134524773-134524965
  hypo
cgaatgggaacatgcgccgatcaccagtcagtgacttgggaatttttcaggaggcatattttcttacgttaatgcttttgtagattccatcgatgttcagacatcaaagggcatgcaattaataatgggcatctggagggccgatcacatgtttccgatgttaaagtggtgaacgacaggaaaatcggccac

SEQ ID NO: 20616 - DNA, 102 bp, Homo sapiens
  chr5:136983271-136983373
  hypo
cggtccctcgggccagggcaggaagcgagagtctctcttaccctggtgcgtggggccgcagggctaacaccaacaattcatccgatggagcatgtcgaggtc

SEQ ID NO: 20617 - DNA, 196 bp, Homo sapiens
  chr5:137895663-137895859
  hypo
cgtgacatcgccggccaacacacctccctgaatggcagctccaatggccacagcctcatcaggattgacagctttacttggggctctgccaaaaagatcctgtacagtctgctgaacctgaacatcaaggaaaaagaacctgtcggcccacacttgggaactacctgagcagaacaaaagggagcacgtgtcctac

SEQ ID NO: 20618 - DNA, 125 bp, Homo sapiens
  chr5:14205146-14205271
  hyper
cgtggctgcagtagagacagaggccaacatttgtggtgcaaagggaagtgcccacggattcaggagggcacaggattttattgtcttaaatcattaactattgcccgaaaaatccacagaacatc

SEQ ID NO: 20619 - DNA, 625 bp, Homo sapiens; identical to SEQ ID NO: 8562
  chr5:142781875-142782500
  binary

SEQ ID NO: 20620 - DNA, 78 bp, Homo sapiens; identical to SEQ ID NO: 8563
  chr5:142782625-142782703
  binary

SEQ ID NO: 20621 - DNA, 225 bp, Homo sapiens
  chr5:156895577-156895802
  hypo
cgatcagactctccagggagagagcgtatggatcaagattttaaggaatgctggtctgggattctccagcttgttgcacacggaattattcgtctggaatggagatggtgcttctgcgccatgctagcctcttttctcccttcgtttcctagtggctgctggagaagttgccaactttggagcctacgcatttgcacctgcaacagtcgtcacgcctctgggagc

SEQ ID NO: 20622 - DNA, 398 bp, Homo sapiens; identical to SEQ ID NO: 10672
  chr5:159707402-159707800
  hypo

SEQ ID NO: 20623 - DNA, 108 bp, Homo sapiens
  chr5:172191069-172191177
  hypo
cgttgtctgatgcgcgcccagggtgtcactttggtgaggcagcccacttttgtgggcgctcaagcacgagcgcccctccggagcgctccagagccactccggaggggc

SEQ ID NO: 20624 - DNA, 291 bp, Homo sapiens
  chr5:172461494-172461785
  hypo
cgttaacagcacatttgaatgccttattctacaatgcagcgtgttttcctttgccttttttgcactttggtgaattacgtgcctccataacctgaactgtgccgactccacaaaacgattatgtactcttctgagatagaagatgctgttcttctgagagatacgttactctctccttggaatctgtggatttgaagatggctcctgccttctcacgtgggaatcagtgaagtgtttagaaactgctgcaagacaaacaagactccagtggggtggtcagtaggagagcac

SEQ ID NO: 20625 - DNA, 93 bp, Homo sapiens
  chr5:175578331-175578424
  hypo
cgctctgtcgccagtgctggagcgcagcagcacgatgctagctcactgcagcctggacctccggggccaccacgcctggctgatttttcaaac

SEQ ID NO: 20626 - DNA, 211 bp, Homo sapiens
  chr5:175777496-175777707
  hypo
cgggagcgagactaactccacagcccccaactaactgagctggtaacttcaaaaccacagccacatttcaagccatgaacactgaaggttttgttttttcaaagttcctaagagcttacgtggagtgcttcggccactcgaaggtacttggtctcctcggtggtgaggcccttgtggggtgtgtagccagcatctctcagccctgcctgtc

SEQ ID NO: 20627 - DNA, 59 bp, Homo sapiens
  chr5:176596473-176596532
  hypo
cgttgtcaacttcccatggccggctactactcctcatcttcaagggtctcgcctgcttc

SEQ ID NO: 20628 - DNA, 93 bp, Homo sapiens
  chr5:177543589-177543682
  hyper
cgtgaccgtctgcaccgtgtcctctaacatgggctctctgtgctgctgggtggggctgacatgtggcacaccgtggcgtgtgtggttgtatgc

SEQ ID NO: 20629 - DNA, 294 bp, Homo sapiens
  chr5:177650761-177651055
  hypo
cgccaacagtcttccctctgttgtcaccgtaggtaacacacctctctctcctatgtctgcgcctccactccatctccaccatactgcccccgtcaggcctccccacagctcacttggggcctgctggccacttcacggtcacctgacctcaagccgccgcattccaatccatcctccacatagccctggagtcagagagcagccccggccccaggtcttagcgctctcctgcttaagactctggtggttcccgggggcctccagggcagaactgctgccgcccagcatagttcc

SEQ ID NO: 20630 - DNA, 759 bp, Homo sapiens
  chr5:465064-465823
  hypo
cgctcctcctctgcggtgagatgccagagccgtggcggagcgaggaggagtgggctcagagcctccggggagccaccgggagccccagcctgggtttcaatgagggtgctcctggccgccagagccgtggagcctgccgctgaccgcgcgtgtctccccagaggatgacggccgaggcgcaccggcgcgtggtggtggagtacctgcgggcggtcatgcagaagcgcatttccttccggagcccggaggagcgcaaggagggtgccgagaagatggttagggaggcagagcagctgcgcttcctgttccggaagctggcgtccgtgagtgtcgcgcaggtccgggctggagaaggcctgtcgctccgcggccctgttcagcctccaccccgggactcgggccagtagatgggagtgtgtcgtgtgtttgtcaggcggggggagcctgggtccaggtcctgcctgaccttgtggttggacacgaatgtccacagaggtagacgcgccggccccgccggcttcccgaggccgcccacagctccctgacggacgcttcccagtctgtcctgcgctgcgaggtgctggctgcctcccacggtctcgccctcaccccagacccctggccctgtcactgagctttcagagtagatcctgaggagtcaggtgaagagggaggttcccagtcaggaaggggctcagccagaatccagctgctcccagcgccgcgggacagccgagggcggctcctcacattgctgct

SEQ ID NO: 20631 - DNA, 258 bp, Homo sapiens; identical to SEQ ID NO: 9812
  chr5:465852-466110
  hypo

SEQ ID NO: 20632 - DNA, 76 bp, Homo sapiens; identical to SEQ ID NO: 7437
  chr5:54518558-54518634
  hyper

SEQ ID NO: 20633 - DNA, 54 bp, Homo sapiens
  chr5:667302-667356
  hypo
cgaggcttgactgcaaagtggcagcgacgtgggcacgggcacgcggccagcccc

SEQ ID NO: 20634 - DNA, 112 bp, Homo sapiens
  chr5:67590957-67591069
  hypo
cgtttcttttgcctgcaggattatgcataattatgataagttgaagtctcgaatcagtgaaattattgacagtagaagaagattggaagaagacttgaagaagcaggcagct

SEQ ID NO: 20635 - DNA, 115 bp, Homo sapiens
  chr5:67591157-67591272
  hypo
tatttgaaatggaatcctatacatgaataattggtgattgctacaattcaggatgagttaatgcgttctcttttcaaaactgtttttcaggtggttgactcaaaaaggtgttcgg

SEQ ID NO: 20636 - DNA, 96 bp, Homo sapiens
  chr5:67717809-67717905
  hypo
cgagcgtttatgtgggagagcggtagagcataacgtgtctgtaaggagtcctcatgtctgtgcgagctgggctgtgttctaggctgaggagtttgc

SEQ ID NO: 20637 - DNA, 752 bp, Homo sapiens
  chr5:75698708-75699460
  binary
cgaagaagaagaacaaaagtcaacgtgaaatctccccagaggaaaaggaaccgcgctgtttgtccctcagtaactgagcaacaccccggacacgaagggctccctgtgacttctgcggtttttcttgcacttctccgcgttggttcacttccaccctcgaaactctccagaagcgagaaataaggcggggtggccgccacccccaggccaccagctgtgcgggggccccagctgcagggggtcccggcccagcgtccctctcggccccttccctctcccccgggggagaaggggcgggtccacgcggcctgggcgctgcgcccgacacgcggtaggggtcgctgcgtctcggcgcgcgctcccaccgcggtgaataacggggcctggctggaggagaaaggaaacctgctgcgggaggcggcggcgaccggccagggagcgagggaggagagttcacttttacttcagtgtcagcgcgcggcggccgtggctggctctggcgagagagcaccgagggagtgggtcgcagatcttcgggcggctaggggaaatcggcgagaggcgggatccgagcgcgccggcggggcgcagagcccgcgagcctggccagcgagggtagccgcggggggcgcgccccgggcgggcccccggagacgcgcaggatgccacacgaagagctgccgtcgctgcagagaccccgctatggctgtaagtgcgccgggcgcgcggggttcctgctggccttggggagc

SEQ ID NO: 20638 - DNA, 41 bp, Homo sapiens
  chr5:79598641-79598682
  hypo
cgagagcagtgatatcgtcatgcatggtgagctggcagcag

SEQ ID NO: 20639 - DNA, 423 bp, Homo sapiens; identical to SEQ ID NO: 6225
  chr5:88179429-88179852
  hyper

SEQ ID NO: 20640 - DNA, 66 bp, Homo sapiens
  chr6:112021634-112021700
  hypo
cgctccttaaacagcgctacaccagcagacgaccacacacacggtggaagatcagacgccacacac

SEQ ID NO: 20641 - DNA, 97 bp, Homo sapiens
  chr6:136980882-136980979
  hypo
cgtgtacagagttttaatttggaagataaaaaagttcgggaggtgaatagtggtgttggctgcgtaacagtgcgaatgttcttaatgccactgaagc

SEQ ID NO: 20642 - DNA, 120 bp, Homo sapiens
  chr6:138132663-138132783
  hyper
cgttcagtctactctggactttcccatctgtcgtcaggtgacttcctgctctgttagctgaccgtgagtcacgtcgttgctgcacagcacgttcagtgaggctgcctctgcgtgtgaggc

SEQ ID NO: 20643 - DNA, 42 bp, Homo sapiens; identical to SEQ ID NO: 14133
  chr6:150962790-150962832
  hyper

SEQ ID NO: 20644 - DNA, 182 bp, Homo sapiens; identical to SEQ ID NO: 14134
  chr6:152622733-152622915
  hyper

SEQ ID NO: 20645 - DNA, 63 bp, Homo sapiens
  chr6:157159632-157159695
  hypo
cgatagcgagagcgtacctgaaagcaagagctcttaaaacgctctaagtcaccgaagcctgtc

SEQ ID NO: 20646 - DNA, 62 bp, Homo sapiens; identical to SEQ ID NO: 16031
  chr6:158057907-158057969
  hypo

SEQ ID NO: 20647 - DNA, 433 bp, Homo sapiens
  chr6:159045072-159045505
  hypo
cgtgagccactgtacccggcagaaaagctctttaaaacaatgtttttactcccagtctttggtttgtggctgacgcagtttgaggccctgtcactgtggttctggtcggctgctcttccttcccagtcaggtgtcggggagaaccagccatgtgggctctggaacagaccccagggcccacgtctgttgctgaaggagacaccggagagcagagccttctcggtgctaaacacgctggtctagtccagtccctttgctttacgtaaggtcccagctaaagtcacttaggtgcttttgagaaaaatgatcccgattcctgctgtgctgtcctgtgctctgagccttgactgtaagaggggagctctggcgctgagaggacaggaaaggggtggggggatggcgtgggccggagccatcgaggagcggggactgc

SEQ ID NO: 20648 - DNA, 176 bp, Homo sapiens; identical to SEQ ID NO: 16035
  chr6:1708438-1708614
  hypo

SEQ ID NO: 20649 - DNA, 96 bp, Homo sapiens; identical to SEQ ID NO: 16036
  chr6:1708643-1708739
  hypo

SEQ ID NO: 20650 - DNA, 201 bp, Homo sapiens; identical to SEQ ID NO: 19817
  chr6:26025540-26025741
  hypo

SEQ ID NO: 20651 - DNA, 140 bp, Homo sapiens; identical to SEQ ID NO: 6242
  chr6:27059547-27059687
  hyper

SEQ ID NO: 20652 - DNA, 43 bp, Homo sapiens; identical to SEQ ID NO: 6243
  chr6:27059899-27059942
  hyper

SEQ ID NO: 20653 - DNA, 220 bp, Homo sapiens
  chr6:27300812-27301032
  hyper
cgcttccgctgcgccactctgctaagcggtttctgaagaccactgatcttaatttcaatcatcaaaatcacctttcagtaccgacaaaattttcattgtctaattatttcattttgtatctgatcgtttacactgtccctatctctgccaagcaagtcgaagattcgctacccgataatcagatggcctcaggtcataacctccagatctgtgcttttcc

SEQ ID NO: 20654 - DNA, 149 bp, Homo sapiens
  chr6:33914107-33914256
  hypo
cgctctacggtgtctcggcagaggttaacacacggaatacatctgaattgcgttccaagtttggacaggccaaactgccttgctttatcaggcaccgagccggagatgcgagcagtgacttccagggctcctcaggctgctgcctgcac

SEQ ID NO: 20655 - DNA, 97 bp, Homo sapiens
  chr6:36939067-36939164
  hypo
cggcagcctcacctcggcctttaagccacatacagaaaagcactcgaaaaacactttagacaaatctgttgactgctgttgttgctgatgtaagcac

SEQ ID NO: 20656 - DNA, 158 bp, Homo sapiens
  chr6:37450665-37450823
  hypo
cgtccaccctccgctagtcagaccatgacatttactcagcagacgggaacagctttgtgttctttattgcctctcccttgggctaagggagggaccagcaccatgtccttctggagacccggaaccccccagcaggccagggaggcaaggcctgggcc

SEQ ID NO: 20657 - DNA, 99 bp, Homo sapiens
  chr6:47382546-47382645
  hyper
cgcccgaggcatcagaagaatttatgtgaccccaagatcaccttgaaaccatattaccggtttatggtttcctaaaagctttttgtgtgattaggtttc

SEQ ID NO: 20658 - DNA, 37 bp, Homo sapiens; identical to SEQ ID NO: 14183
  chr6:4910947-4910984
  hypo

SEQ ID NO: 20659 - DNA, 95 bp, Homo sapiens
  chr6:6780570-6780665
  hypo
cgcaccccagatcgggtatttggacagcggacttacatgcgacaagaaagatgctgtgcccgctcagcgtacctggacctctttgtacagggctc

SEQ ID NO: 20660 - DNA, 164 bp, Homo sapiens; identical to SEQ ID NO: 8652
  chr6:73329621-73329785
  hyper

SEQ ID NO: 20661 - DNA, 82 bp, Homo sapiens; identical to SEQ ID NO: 8653
  chr6:73330126-73330208
  hyper

SEQ ID NO: 20662 - DNA, 236 bp, Homo sapiens; identical to SEQ ID NO: 16049
  chr7:100064586-100064822
  hypo

SEQ ID NO: 20663 - DNA, 206 bp, Homo sapiens
  chr7:111844265-111844471
  hyper
gcaagagaggaactaatcgataccagcaccccagctgtgacctggcacatgaagaaatcaagaaaataaatcccatccataatctgtataatttaacacttggaagaaagcaacatctgggatcgactccaagcaggacagttttgcctggatggatctgagcttcctgcactgagtgttaaagccgcttaggaggcgatgccctc

SEQ ID NO: 20664 - DNA, 209 bp, Homo sapiens; identical to SEQ ID NO: 17034
  chr7:127671450-127671659
  binary

SEQ ID NO: 20665 - DNA, 67 bp, Homo sapiens
  chr7:127673475-127673542
  hypo
cgtgtgatttctggcaggctcgcttgataaaccctcatcacctgcgcgtgggctgttgcttaagaac

SEQ ID NO: 20666 - DNA, 253 bp, Homo sapiens
  chr7:129782272-129782525
  hypo
cgcccctcctgggggccgaggactgtcaccatgtcactacggcactctccagctgctgaccaaagccctcgctaaccgcagccctgccatactctgggtctttcctctggagcaaggtgaagagactgcagcgaggcgtggaattgggaagctcttctggttttattaaaaactcgttccaccacaggagtcagcctggccactcaggtgtggggcgggtctctcctcatttagctttcacctgcgtgcccag

SEQ ID NO: 20667 - DNA, 379 bp, Homo sapiens
  chr7:129782554-129782933
  hypo
ttgtagggagtaagcatcctgccctggcaaagctgagtgaacgtgggtagcttcagcccagtgaagcagcagcagggacgcctgtggaaacctgggtggaggtgccttctgaccttggtttgtctgggccagggggcgaatgcttctggcagtggagcttccaggcccggaaaacccaggcctcttctcctcacgtgggccctcaggtgcttgtggactgcccggagacagaacagaactgagggtgggagggcctgcttttgcctgcagaacaccctgaaatgtcccatttacccagctctctccagggcccgcacagtccaaacttctctggcctcaactcctaccactgtgcctttgctcactctcgaccagccac

SEQ ID NO: 20668 - DNA, 58 bp, Homo sapiens
  chr7:132527738-132527796
  hypo
cgagtcctgcctgcagcaatgattactgtagtgttctgatggtacatagatttctttc

SEQ ID NO: 20669 - DNA, 163 bp, Homo sapiens
  chr7:134613459-134613622
  hypo
cgtggcaagtggcacgctcaagaggttgtctttgtaatgttgcagaatcgcctaccagaggaatgacgatgatgaagaggaggcagcccgggaacggcgccgccgagcccgacaggaacggctgcggcagaagcaggaggaagaatccttgggacaggtgacc

SEQ ID NO: 20670 - DNA, 74 bp, Homo sapiens
  chr7:134832843-134832917
  hyper
cgactgcgaaggcaagggggcaccagctcaggactgcatctgcctgccatttcccttccactcctcctttctgg

SEQ ID NO: 20671 - DNA, 32 bp, Homo sapiens; identical to SEQ ID NO: 10754
  chr7:140156493-140156525
  hypo

SEQ ID NO: 20672 - DNA, 202 bp, Homo sapiens
  chr7:148079472-148079674
  hypo
cgcagacagatacggctttgaaacaattgattttctgtggtgtcatagggaaacctgccctcctcaaagttgcgaaaactgtcagggaccctatgaaatggagcgggagtcacaagttttctacccagctctaaaagaggagacaaaactaacactggttcacaatagataacagaacggcttcagcaaagggcaagcaagc

SEQ ID NO: 20673 - DNA, 100 bp, Homo sapiens; identical to SEQ ID NO: 10755
  chr7:150069580-150069680
  hypo

SEQ ID NO: 20674 - DNA, 115 bp, Homo sapiens; identical to SEQ ID NO: 10756
  chr7:150069820-150069935
  hypo

SEQ ID NO: 20675 - DNA, 113 bp, Homo sapiens
  chr7:150714968-150715081
  binary
cgtggcgcttcacatccataagggcaaaggaacagatgtccccaaccccagccacatccacagtgaagtgatgaaaaaagtcgataatctccagggcacgagggcggaaccag

SEQ ID NO: 20676 - DNA, 296 bp, Homo sapiens
  chr7:150715323-150715619
  binary
tccgcgcagacagaccccacaacttcctcctcagcccgccgtcgcgcccaccctcaccgctcggtactgcagcagctgcgccatctgccggtaggcgcggtccctgccgccggggccgggctcctccgggaggtagtgcatgtgggccagggctgtctgcagcaggagctgcggcgcacgaccctggcactgctcttccggaatgaaagacctgaaaggcgggatccgtggggggaaggggcctgcgattaggaggacgcgcggtgggatgtagggctagagggccccagtggtgg

SEQ ID NO: 20677 - DNA, 341 bp, Homo sapiens; identical to SEQ ID NO: 14220
  chr7:150758626-150758967
  hypo

SEQ ID NO: 20678 - DNA, 139 bp, Homo sapiens
  chr7:1556123-1556262
  hypo
cggccgaactttcctttaaaaaaacaaaaaaaaaaaagccaatacatgtcccagggattccaacccatgtcctatcgcagttcccagatggcatttctttcactgagtcgtgccacaacaaactcacaccagatcatgc

SEQ ID NO: 20679 - DNA, 233 bp, Homo sapiens
  chr7:1563405-1563638
  hypo
cgccatgctcagggctcctgcctgtcttctccctgcagtagaattgatcctggtggtctccgtgtcccttcctttccccgacctcagccggggccacctgagtcccccgggttaccctgcatacctccaactctcaggaagaagcgagggtaggagggaccccacccctcccggggcgccccgggctcatggtgcaactggactcgtctccctgcaagaaccagccctgcacc

SEQ ID NO: 20680 - DNA, 33 bp, Homo sapiens
  chr7:158713060-158713093
  hypo
cgtgtggcctccgtcggggaacacgtgaagtgc

SEQ ID NO: 20681 - DNA, 234 bp, Homo sapiens
  chr7:1784457-1784691
  hypo
cagtacgcctcgctcagccgctttggcaacctcacgtacctcaacctcaccaagaacgagatcggctacatcgaggacggcgccttctcgggccagttcaacctgcaggtgctgcagctgggctacaaccggctgcgcaacctcacggagggcatgctgcgcggcctgggcaagctggagtacctgtacctgcaggccaacctcatcgaggtggtcatggccagcagcttctgg

SEQ ID NO: 20682 - DNA, 370 bp, Homo sapiens
  chr7:1784927-1785297
  hypo
gggccagggccgccgcggccaccgcagcatcctcagcaaactgcagtcagtctgcaccgaggactcgtacgcggctgaggtggtcgggcccccacgtccagcatccgggcgctcacagccgggccgctccccgccgcccccgcctccgccggagcccagtgacatgccctgtgccgatgatgagtgcttctccggggacggcaccacgccactggtggccctgcccacgctggccacgcaggccgaggcccgccccctcatcaaggtcaagcagctcactcagaactcggccaccatcaccgtccagctgcccagcccgttccaccggatgtacaccctggagcatttcaacaacagcaaggcctccacc

SEQ ID NO: 20683 - DNA, 224 bp, Homo sapiens
  chr7:192753-192977
  binary
cgcccggcgcctggagaggagcgcgctgaggatcgggacgcctgcggccgccgccaccgcccaggcccgtcgcgccccggccgggatggacccacacgcccgatgagccccgcgccggcggctgcgagcgccgagcctccccctgctgcggccccagccgccccccgcgcgcccggctccgcggaccaggacccctgggctccccggctgagggcgcggccgct

SEQ ID NO: 20684 - DNA, 512 bp, Homo sapiens
  chr7:193101-193613
  binary
gaccttgacccgcgaggcggcgccgcgctcgtgcccagctgcagctagaggggcgcgcgggcagaacgcgctccaggcccgggccggcccgcgcggccatgaagatgatgctggtgcgccggttccgcgtgctcatcctgatggtgttcctggtggcctgcgcgctgcacatcgccctggacctgctgcccaggctggagcgacgcggcgcgcggccctcgggggagcccggctgttcgtgcgcgcagcccgccgccgaggtggccgcgcccggctgggcccaggttcggggccgccccggggagcccccggccgcctcctccgccgccggcgacgcgggctggcccaacaagcacacgctccgcatcctgcaggacttcagctccgacccctcctccaacctctcgtcccactcgctggagaaactgccgcccgcggccgagccggccgagcgcgccttgcgggggcgggatcccggcgccctaagaccccacgaccccgcgcaccggccg

SEQ ID NO: 20685 - DNA, 34 bp, Homo sapiens
  chr7:193708-193742
  binary
ccgggtggcggttccgccgctcacggaggaggac

SEQ ID NO: 20686 - DNA, 156 bp, Homo sapiens
  chr7:2236075-2236231
  hypo
cgcaaaacgctcctgcggcatcttccaaaagattgcatctgaggaggcacccctgttgttttcattgtttaaagctgtctgtgtgtgtgcactacgtgggcagactgtgctgtgctcgtcacagcgtcgccagagccagcccaaagcctggcaaac

SEQ ID NO: 20687 - DNA, 114 bp, Homo sapiens
  chr7:2237109-2237223
  hypo
cgccccgacccacgcatcactccgccgacgcctggtacacacgacgtgcactgcacagccaccttctccctgcacacgggcccaagctcggacacaggcacgaccaggactggc

SEQ ID NO: 20688 - DNA, 137 bp, Homo sapiens; identical to SEQ ID NO: 14254
  chr7:2237982-2238119
  hypo

SEQ ID NO: 20689 - DNA, 261 bp, Homo sapiens
  chr7:2255762-2256023
  hypo
cggctgccccatcccccgcaacccctcaccgcaggtgcgcgctctcctcccgcagctgcttcagctcccgttccagcctagggagccgtaccagctcagacttcatgttcttcacaatcgctgcatcctgctcttgcagggacagcttctgctccagatcctgatggaggccagggacagagaagaagggaaaaatgagccacgaagagacctggagaaaatcacacgcacacggctaagagaaggaagccggtctgcaac

SEQ ID NO: 20690 - DNA, 141 bp, Homo sapiens; identical to SEQ ID NO: 8691
  chr7:22893437-22893578
  binary

SEQ ID NO: 20691 - DNA, 700 bp, Homo sapiens
  chr7:22893607-22894307
  binary
tcacagccagcgagagtttggggcagactccccagactcggaggccggggcaaagtgggagccggggccaagtgggagccggggccgtgtggggtgggggggggggcccaaggcggggaaggcccgggccgccgacagggggcgcgcgagggcctccgggccccgcgggcggggcgggtgctggacccggaggggccttccggcaactttttggttggtgccgccccgcccaggccccttttaaacttgatctccgcagtgccctcccttttcggccgcggcgcgtgactgggtaagtgggctcggaccttctggacgcaggagccgaccacgtggctccggggctaccccgtgcgcttcctaggcgcgcctctcgctgcccccacgccgaggcctcggctcggcgccgcggggaagcctccgttagggcccctcgggggtgggggcgtcctcgtggcgcttgggcccttcgtcccgggttaggacggcccgtgtccttgtgcgcttgaaggggccgccccctttcctcgaggatcccacccccactcagcagaagccgccaggcgcccgtcacctcccgtgcctgagtccctgccgtccacgcattcggcctacaggcagcttttagtcctttttcaattaaatgattgcattttgaggatcaaattccaaccgcaggcggaggcgccgagccccggac

SEQ ID NO: 20692 - DNA, 122 bp, Homo sapiens; identical to SEQ ID NO: 7526
  chr7:23507981-23508103
  hyper

SEQ ID NO: 20693 - DNA, 338 bp, Homo sapiens; identical to SEQ ID NO: 19897
  chr7:25894678-25895016
  hyper

SEQ ID NO: 20694 - DNA, 440 bp, Homo sapiens
  chr7:2643038-2643478
  hypo
cgggtgaggggatccgggctccttgtccgatcggccagtcagtggtgggtgccgtctccccatcctgcttctctccctggcgccccccatgcctcaggggcctcgtctctaagtaaagacagcagtgaggctgcctgtgtggggctgtggtgagcgtggggtttgccagtgtgtgcgcagtgtgtggcgtgacggagatgcgtgcccctctcacccctccggctggtgcagagcctcccgtacctggcagccactttaccggaagcttctgggcagcctccacatggtcaccacactctggcgggtcgttcaccgttaatagccggcgctgcctcgccctcctttgctgagctcttttcccaccctagctttaagacaaaacaaaggtgctttctgttccaacagcggcaagcctgctaaactcacgtggcatggggctc

SEQ ID NO: 20695 - DNA, 108 bp, Homo sapiens
  chr7:26667960-26668068
  hypo
cggggcagattaaaatatgcattttctcctaattgagcatagtgaaatcagccggcggtcctgtcacaagtgcaggaatgaattgtcacagcacgacacacacgactc

SEQ ID NO: 20696 - DNA, 145 bp, Homo sapiens
  chr7:2804422-2804567
  hypo
cgtgagccggcggaccctgaagggaacactgagactgaccacagctggacttgcgccgcctcgtcctcttagtgaatgaggtcctcagaggcttaagcacgcgttagttatccaaaatgcttctgttcaggtgaatgcacaaagc

SEQ ID NO: 20697 - DNA, 490 bp, Homo sapiens
  chr7:36338992-36339482
  hypo
cgtgccaggcgcgtaccccaccaggtgggcaaagcagaaacctgcggggagcggagacgccttttatctctggatgccacagacctgagcagcattgggctggctgtccgctgctgactggatggcagcacaaagacaatatgagcagagggaggagaagaaggggtgctcaggctgcgggccacagtccagcagcgccagaagcactcatttctgaccaccaggctatgacgttcctgctgcgcattacagaaagcttttaactgtgatcaggcactctgctcagatacattgagtggcgatttttagttttgttttgaaaaaataaacagattaacctgcctcgctgcagtgagagcatgggacaagtccgccacagccctcccccgcccccttcccccgccccccaacgcgcagtgtgtatttgcaccacggcaggtgcctctgtgtggagctagggtcaagccctgagcagcttcacttcccctgc

SEQ ID NO: 20698 - DNA, 173 bp, Homo sapiens
  chr7:43116313-43116486
  hypo
cggcaacctttccgggtccccttccaccacgtggaagctttattttcgctttaataagtcttgctaccgcacactcattgggtctgtgcgtttctctaatcaagctgtaacactcgccgctgcggtccacagcttcattccttgaagcccgtgagaccacgaacgcttcaatc

SEQ ID NO: 20699 - DNA, 51 bp, Homo sapiens; identical to SEQ ID NO: 16092
  chr7:44740672-44740723
  hypo

SEQ ID NO: 20700 - DNA, 367 bp, Homo sapiens
  chr7:44746549-44746916
  hypo
cgaagtctgagccaagctgttttgaaggctagcctggtgttacttgatacccagagctggccatgtctgctgtgtatttgttacacgtaacgtgcttttcaaagtgtgcctggtctgagcaaatacagggcatcagaggctggtgaaggggaagcatctctaacccttgaaagctgcgtctcctggcagcagtccctggcacagccctgggcccaggagagctctcagccacatacctgagagaaccagcctagccatgggaactctcttgtaggaacccacttccagcgggtgatcccagaagatggccctgcagctcagaacccagaaaatgtcaaaaggcttctcttctgcaccggcaaagtgt

SEQ ID NO: 20701 - DNA, 79 bp, Homo sapiens
  chr7:44746945-44747024
  hypo
cgcgacatggtggggcaggtggccatcacaaggattgagcaggtgagggcaggtggtgccatcagggtgtccccccagc

SEQ ID NO: 20702 - DNA, 150 bp, Homo sapiens
  chr7:45091549-45091699
  hypo
cgcctcggcctcccaaagtgctggggttacaggcgtgagggtattttataggacattgaattccgtgatcatgtgcctactgctgtacctcctttagcactaagtgagtcccttgatccaaggtgatgatggtacttgctgtcccacatc

SEQ ID NO: 20703 - DNA, 470 bp, Homo sapiens; identical to SEQ ID NO: 15249
  chr7:65509043-65509513
  hyper

SEQ ID NO: 20704 - DNA, 51 bp, Homo sapiens; identical to SEQ ID NO: 15250
  chr7:65509542-65509593
  hyper

SEQ ID NO: 20705 - DNA, 145 bp, Homo sapiens
  chr7:6682673-6682818
  hypo
cgaggatgatttgctgacggctgggtgtcaggtgagccgccctctccgtttggggcttgggtaacctgggcagggtttcccccggggcctcggcacctgctgtttggaggcgtctgttggcagcggccatggcactggagtcccc

SEQ ID NO: 20706 - DNA, 40 bp, Homo sapiens
  chr7:711727-711767
  hypo
cggagcctggcacacaatgaatcctctggaagtatttgtc

SEQ ID NO: 20707 - DNA, 237 bp, Homo sapiens
  chr7:80548021-80548258
  binary
cgcgtgtgttcttaagaaaatgtccaggcttgagcataccaatgtatgaaaaatcaatatacaggccaaaaaagttatactttgctaaatctgtaatgcggaaaatgaccaatttagcttaccgaggttgaaagaaatcagcacggaaaagtcatcagtttgctaccggggttggatgcgcttgtgtctccagtccttttcccagacgaccttattttctagcacgtcgcaaaggtg

SEQ ID NO: 20708 - DNA, 446 bp, Homo sapiens
  chr7:80548403-80548849
  binary
ttggtgtccgattacagcgccgcggcgcgcggctccggctgccccggcgcgccgccctgcaggctcgcatcaccaccgcgcagccccggccgcatctccgccagccgcgaggccccaccccgagcgcgcccgcgagagcctggcagggagccgcgggggcggaccgggcggggccgacccttagagctcgcggctggccagacgcaagaatgcgcggccgcaggctggagccctagctccgcaaccctgctcctttcgcagtccgcggcggagtgagcaacttgctgggtgcgctccacggtttttgttgccggcggctctcgaagacttacacaggctttgcctggccgtaaatatcaaagtgcaaagcagttgtggttttttatttttgccagggaaggatcactgcagccttttaaggcaaagagatgcgtttttaaaaggac

SEQ ID NO: 20709 - DNA, 42 bp, Homo sapiens
  chr7:819359-819401
  hypo
cgcagcagggcctgggccgcctccactctgttggctggggtt

SEQ ID NO: 20710 - DNA, 138 bp, Homo sapiens
  chr7:819698-819836
  hypo
tcagagcagtgtccagtacctgtaccgagagttgctggttcaccttgacgatccagagagggccatccaggatgcaattttaggtgagactccgacggcttggccttcgttccgatgcctgctttcggcgcctgccac

SEQ ID NO: 20711 - DNA, 43 bp, Homo sapiens
  chr7:852797-852840
  hyper
gaaagggatttacgggaggtggaggttgcagtgagccaagatc

SEQ ID NO: 20712 - DNA, 76 bp, Homo sapiens
  chr8:100851164-100851240
  hypo
cggctgtagcgccaaatgacagagggtcggagagagggctggtgaggcgatgagagaccaaacctggcaaggcccc

SEQ ID NO: 20713 - DNA, 160 bp, Homo sapiens
  chr8:102190390-102190550
  hypo
cgttttcttacgaataacagggcttatagtttcacttgagtaatttttccaccctcttaaactgcagtttaaggtcttgatgaggttaccaaatctctgacaagcatatattctttccagtcttcacagggcacgcttcggcccttgctaggagtccatc

SEQ ID NO: 20714 - DNA, 335 bp, Homo sapiens
  chr8:125985496-125985831
  binary
cggccccagcaaagccgccgggggagatgagggtaacttcctgtttctgccttccgggtttgagagtttaggaccctgggttggtggggtcagagggagagggggtaccttcctcccggaccgctgggggtgcagggcgccttgggtgtagcacccagaacagtgagttccttcttggggggaagggagccgagggttgcgggctagaggagtggaaacagccccgtccaggctgcagtggacgtccgggagagagttcccgctgctgccaggggcgaaggcccagcatctcccgccgacgggccaccgtcatccttgtccgcggggtcccttac

SEQ ID NO: 20715 - DNA, 62 bp, Homo sapiens; identical to SEQ ID NO: 8745
  chr8:128888848-128888910
  hypo

SEQ ID NO: 20716 - DNA, 43 bp, Homo sapiens; identical to SEQ ID NO: 8746
  chr8:128889422-128889465
  hypo

SEQ ID NO: 20717 - DNA, 159 bp, Homo sapiens
  chr8:131064030-131064189
  hypo
cgtgacagaagtgctgtccacacgacaacatgtaagcctcgtgcccctccaccctcttcttgccctgttcacatcaacgggcgcacaagtggacgtggtggaggtggaatgcggaaggtggaggacagaaaggggccgaaggcccacagtttgtaagcc

SEQ ID NO: 20718 - DNA, 482 bp, Homo sapiens
  chr8:140815079-140815561
  hypo
cgtgtgcatccgtatctgaaggtgcgtgtgtgtgtgctgttgtatgagtgctctgtgtgcatgttgtgtatgtcggtgtgtgttgtgtgcctccatgtgtgaatgtgtatgtgaagatgtgtgctgttgtgtgagtgcattgtgtgcgtgttatgtatgtcagtgtatgttgtgtgtgcatccgtagatgaacgtgtgtgtatgtgaaggtgtctgtgtgccgtcgtgtgactgtgctgcgtgcttgttgtgtatgtcattgtgtgtgcatccatgcgtgaatgtgtatgtgaaggtgtgtctgtgtgccgtcgtgtgagtgtgctgtgtgcgcgttgtgtatgtcattgtgtgtgcatccatgtgtgaatgtgtatgtgaaggtgtatgtctgtgtgctgttgagtgtgtgtgtgtcacaggctctcatcaggctcacagcctctcaggaaggcaacgtccgttggaaactctagagcggc

SEQ ID NO: 20719 - DNA, 48 bp, Homo sapiens
  chr8:141525521-141525569
  hypo
cgccacagacagccagagggaaagcgacccagacagcagcccctcctc

SEQ ID NO: 20720 - DNA, 107 bp, Homo sapiens
  chr8:141534525-141534632
  hypo
cgcaatgagaccgagtgcgtcccccgcggctccagactgcatggcatcacagtttacaagtcaggggctgaggagcggaaagaaagcttccaaggctggaggtccac

SEQ ID NO: 20721 - DNA, 50 bp, Homo sapiens; identical to SEQ ID NO: 19925
  chr8:141559645-141559695
  hypo

SEQ ID NO: 20722 - DNA, 35 bp, Homo sapiens; identical to SEQ ID NO: 19926
  chr8:141559724-141559759
  hypo

SEQ ID NO: 20723 - DNA, 62 bp, Homo sapiens
  chr8:141623736-141623798
  hypo
cggtaatactggcagaatcggcgacaaatggaactctatccacaagaccactgcagaaattc

SEQ ID NO: 20724 - DNA, 104 bp, Homo sapiens
  chr8:144417159-144417263
  hyper
cggtctaagcctgcacggggctgcggcagcaggaccactgactgtcctgccggcctccccctggtttccctgccttcgtggtccagcgccccttcacgctgggc

SEQ ID NO: 20725 - DNA, 270 bp, Homo sapiens
  chr8:145226085-145226355
  hypo
cgcaagccccaggtgtggcctgtgcttctgaccgacctgccatgaatcagggttttcacgaccccctcctcaggcttgatgaattgcagcagtggctcacagaatgcagggacagagtggcctgcgtttacccatttatgacacaggctgtgacgaagggtgcgggtgcccagcaggtggaggagacgcttgggcaggaatggggaggggcgcggagctcccgggccctcctgggaaccacctccaggcacctgcgtgggttccgctacc

SEQ ID NO: 20726 - DNA, 104 bp, Homo sapiens
  chr8:1724066-1724170
  hypo
cgattctcagtcttccgtaagtgggaatctgtgggaggcacatatgcatgtggtgcggcacacacgacagaagattctggaagctgaatctgtgaggggcacac

SEQ ID NO: 20727 - DNA, 287 bp, Homo sapiens
  chr8:22256736-22257023
  hypo
cgcgcggacccctgcccggcctccccgtcccagcggcgtcaacagctgtgtgtgtttccctcttctttctttcctctctaataccttttacaaaccttttccccgctaagaataacttgtagttaaaaagaagacaagactccactggagcagaaaactcccctttcatgcctgccaaaaggccggggtcacttggacttaagtgtcactcgcagctcctagatcctccccaacccttgcgggtgagtgcatgtctcaagcgctggccaggcaggggggctgtgctc

SEQ ID NO: 20728 - DNA, 127 bp, Homo sapiens; identical to SEQ ID NO: 8761
  chr8:23021590-23021717
  binary

SEQ ID NO: 20729 - DNA, 135 bp, Homo sapiens
  chr8:37595183-37595318
  hyper
cggctgtatccggagccagtgcttcctcagtgcggtgggggctctaattttacagttaaagaaaggggaacgttgactgagaacgaggaggaagcgagttgtagatctagccttgtgttcacacgacaccaggct

SEQ ID NO: 20730 - DNA, 198 bp, Homo sapiens
  chr8:48396539-48396737
  hypo
cgtgttaaaaaaaaaaaaatgtcgatgcatctttatcaagttagcaaacgatttctatgattgtctatttccagagtaatttgattgaacgggttctcaggtttccatagctggggttgtaggagtattctccacaagcgaagatagaccaagtgcttgacacgtgacctcaccgaaagaagtcacttaataaagtgc

SEQ ID NO: 20731 - DNA, 553 bp, Homo sapiens
  chr8:48744128-48744681
  hypo
cggctgatcccaggccggccacacttccacccgcggagagaactgggcgcactcctggacccccaccagagcgccatgagggctgcatccctgtgggggagccccaggaggctggtttggagcagtcccgcaacctggtttgcaggtgacattggaggcagtgtctggcaggaagcctgttcacttcgtctgtatcctgtgacagaaactgcatcgttctgatcaaattcttgacaagatacaaaccttctctcgtttttgctcagcaacgccttttctggcatacatcaaactgagcttctcctggtccctcataaaccgtctgcgcagtcgtagtaggtccgtccggccggccgcacctggagagggaaagcaggcccagttactccccgccgcccagacacttggctctgctggttcattttcacctcgggtttcctcaaagacaaaacctacaggtgccgcagaggcagcgaccgggagcaggagtgcaggggccacagctgcaactggaactgctcagcagtggattcagcaggcatgagcgctgaac

SEQ ID NO: 20732 - DNA, 106 bp, Homo sapiens; identical to SEQ ID NO: 14346
  chr8:8639980-8640086
  binary

SEQ ID NO: 20733 - DNA, 143 bp, Homo sapiens
  chr8:8780059-8780202
  hypo
cgcacccagccgggtgtttctttacagcaatcagaaaatagactaatacagggacaggtgcctgacatggaaggaacatccatcttggactacatggagtgaaaagcaagggctgaatacgatggaacaagaagacggaagac

SEQ ID NO: 20734 - DNA, 78 bp, Homo sapiens; identical to SEQ ID NO: 18976
  chr8:95848311-95848389
  hypo

SEQ ID NO: 20735 - DNA, 94 bp, Homo sapiens; identical to SEQ ID NO: 7606
  chr9:100503340-100503434
  hyper

SEQ ID NO: 20736 - DNA, 150 bp, Homo sapiens; identical to SEQ ID NO: 10003
  chr9:100849678-100849828
  hypo

SEQ ID NO: 20737 - DNA, 151 bp, Homo sapiens
  chr9:103493427-103493578
  hypo
cgtatatttctggccaataccacatctgacccgcgagcacagaaccccgcccttgccgctctgccgcccagtccacacccgccgccagctcaccatggatgatgatatcgccccacttgtcattgacaacggctcaggcatgtgcaaggcc

SEQ ID NO: 20738 - DNA, 121 bp, Homo sapiens
  chr9:126153103-126153224
  hypo
gaggctctccagtcgccctcacgtccaccttggttgcctttccgacacctatccaagcacgggcccccacctctggctctgacaagagagcacagatcacagcttgacacgttggtgcaac

SEQ ID NO: 20739 - DNA, 166 bp, Homo sapiens; identical to SEQ ID NO: 16140
  chr9:126158115-126158281
  hypo

SEQ ID NO: 20740 - DNA, 109 bp, Homo sapiens
  chr9:126321044-126321153
  hypo
cgcttcagagcacacctttcacgctgcgttccccataagaggaattgtgcgacgtggtgacctcgagttatccattcactcagcaaatatttattatttcctatgtacc

SEQ ID NO: 20741 - DNA, 90 bp, Homo sapiens
  chr9:127120340-127120430
  hypo
cggcgccttcccagtccacgagggcgtgagagtacatacacatgcaagtgcactccagcgctcacccaagcaacacccttggagaaacac

SEQ ID NO: 20742 - DNA, 445 bp, Homo sapiens
  chr9:128200066-128200511
  hypo
cgcaggagggacactgaagaggctgtcgaggactgcagaggcatctggtgtggccagaggcgtggtgtcaggggcatctgatcccttgcctgttcccacccagggagccggacggcacggacacaggtctccctccgctcacccctctccctgaaacgtgagaaacagcagctttccgcctgcttgaaaaaggaggcaggcgctgtaaggagaagaggaatggggaatgtggccccttccaaggcagcgaagcagagaacatgcaggtggaactgccagctgaaacctacacttgctacttaagaaacggaaagaccatgtctggctgggagtgcagcgtgcctgaggaccagccaccgcccctcctcctggcaccccacactgtccacgcagctcctgggctctgaggtcagaagctggggtgtgctgaaggggaaagtgacac

SEQ ID NO: 20743 - DNA, 210 bp, Homo sapiens
  chr9:130639769-130639979
  binary
cggatcacaaccacggatacacagccgcacagcccccagggagccccgcaccagcacgcccccgccctcccccggtgccgctgcccctccccgcagaggcgcccccccagacacgcgcgggcacgcactgacctggggaggggtgcgggtgggcgccggggccagtgcgtgccctgcccgtcctcgcggcggccggcaaaggcgactatt

SEQ ID NO: 20744 - DNA, 125 bp, Homo sapiens
  chr9:130640012-130640137
  binary
cggcgttcccgaaggcagggagggcgggaaggagggagggagagcggaccagggaccgggaagcggggcgggaccgagcccgagcccgggtgcgcggcgacaccgcacccggcaccgtgtgcccc

SEQ ID NO: 20745 - DNA, 233 bp, Homo sapiens
  chr9:130907031-130907264
  hypo
cggaacctattaccctgccccctgggctgggcacgctcctggactgtcctgggctctcgggagaaccagctttcaggagagccagaccggtcctctcacccagccacctctgatggtgccagcggaggcccagccaaggacctggagagcagggagcacgggagcatgtggggtaacgcaggggtggccgcagtggagatgcccctttcctggggtgctgggggctgcagtcc

SEQ ID NO: 20746 - DNA, 477 bp, Homo sapiens
  chr9:132874127-132874604
  hypo
cgcgtctttgtctctcctgtcacgcgcagtggcttctctcaggtcctcggtcactgagactcacagctgcactgcatcctccgagagggagcttaattgagtctcgcacagacacacctagcgctggctccactctgtctcgcctgctaagatttactggctctgactgcccttgagcccgcatccgcgttcccttctctttctccagtgtcattaccttataggactggcgtcgagatacacaccgtaaatttaattaacagtctctgctgctcaccatcctttttttgggccttgtgtttctgaggaaaagtcagaagatgtattctgaagagccttagctttcatgtgagcttcagaagtatttaaacaatcccggttggctggctgcagagttgatggaggaacggcttcattccgaggtgccgccgtgctctgaaaggagccgcgaccatgcgaggcatttgttagggcagc

SEQ ID NO: 20747 - DNA, 77 bp, Homo sapiens
  chr9:132874650-132874727
  hypo
cggtgtgagtctcttgtgctgttgacatttgcctgatggtgaaaagcaatgatgggtgaaattgccggcaccgtcac

SEQ ID NO: 20748 - DNA, 108 bp, Homo sapiens
  chr9:133484764-133484872
  hypo
cgtgacgaggcctgtggaggtaggaggctggatcctctccttcagatgcttatggtcttgggggtgggggggccggcgaggggggcaccagggggcgtctcctccccc

SEQ ID NO: 20749 - DNA, 133 bp, Homo sapiens
  chr9:133641518-133641651
  hypo
cgggccgtggcatgcgttggtgcgctctcaagaatgcggccatggcactcacagacacataccaagaagcctcggcccccagtgcccccgccagcctgctcaggggcatgcggatgactggagcctggaaggc

SEQ ID NO: 20750 - DNA, 102 bp, Homo sapiens; identical to SEQ ID NO: 16146
  chr9:134131797-134131899
  hyper

SEQ ID NO: 20751 - DNA, 211 bp, Homo sapiens
  chr9:136667535-136667746
  hypo
cgccccactccggctgactcctcccctggagaaagttgttcaggcgcaaatgatttctgtcctgatagaggacatggccccaaaggtctcagtgtggtcaccttgcaaggcacggcccgccgtgtccagcatcctgcccgacctcccctctctgctgacaaggtatgtggttcccttgctcgtgagttgacagacccgtggcccgagctcc

SEQ ID NO: 20752 - DNA, 217 bp, Homo sapiens
  chr9:139440686-139440903
  binary
cgtgggtcgggagcgggcgcctgggactacttctcgtttgaaagttttcagaggccaaaagtttgagccggggctgcggaaggatccggctctggcggttgccgcgctcggcgacaactggcgactgaaatttgcatgtgaataagcggaggagcccggggcggaatggggagggcgaggccgcggacagccgtgtgcaccgtgcgctgggccgggc

SEQ ID NO: 20753 - DNA, 216 bp, Homo sapiens; identical to SEQ ID NO: 16150
  chr9:139901954-139902170
  hypo

SEQ ID NO: 20754 - DNA, 233 bp, Homo sapiens
  chr9:140623363-140623596
  hypo
cgcccgctccagctgctctgccaccagccacctcgctccaggcgtgctcctcactctcctgggctggctgcttctatggccagttccgggagtggatgaacgtttgattccttaccggggaccttttgtgggaggtgctgggagggcaccgggacctcagagtgagcgctgcgtcagggctccctgggctttcaaacctcctcagcttctgggatgggatgtgtgcgtttggc

SEQ ID NO: 20755 - DNA, 232 bp, Homo sapiens; identical to SEQ ID NO: 16157
  chr9:140645189-140645421
  hypo

SEQ ID NO: 20756 - DNA, 480 bp, Homo sapiens; identical to SEQ ID NO: 6649
  chr9:140708213-140708693
  hypo

SEQ ID NO: 20757 - DNA, 216 bp, Homo sapiens; identical to SEQ ID NO: 6650
  chr9:140708771-140708987
  hypo

SEQ ID NO: 20758 - DNA, 76 bp, Homo sapiens
  chr9:23849766-23849842
  hyper
cgggtttctttttgttgttgtttaacgaccccctcctcccagcccccaaccctttgtgtgtgaggattccccttca

SEQ ID NO: 20759 - DNA, 209 bp, Homo sapiens
  chr9:37028510-37028719
  hyper
gggctaaggctttgggccaggttgcccaagcagagtggctggccctctttcctgcctcagatcaggaactgccagaggctttgggagctggtgttgcgcttctgtccaccggagaaattccgcacccggctcaaggcttcttgagaaccgaatgagccaagtcgcgtccagggctaataagggtccctgaagcgggcgggtggacaggc

SEQ ID NO: 20760 - DNA, 203 bp, Homo sapiens
  chr9:7172217-7172420
  hypo
cggctcacccagacacacgctgactgggggagaaactgttcaaaagagccagcagtccacctcagtgattgtgtggggttcttttccactcacttcagaagcagccccgttaccttttattgtctcacagaataaccatagcaacggtgcataattagctagagctcctggtaaatcggttttattattgtatttgagaggcc

SEQ ID NO: 20761 - DNA, 62 bp, Homo sapiens
  chr9:91996203-91996265
  hypo
aggccagcggggcctggaccacgcccgagttagagccagcatagacaaacctgttgccctgc

SEQ ID NO: 20762 - DNA, 280 bp, Homo sapiens; identical to SEQ ID NO: 16169
  chr9:96348822-96349102
  hypo

SEQ ID NO: 20763 - DNA, 140 bp, Homo sapiens
  chr9:96435988-96436128
  hypo
cgctggctgcccatggtgcccggaagaatgggggtggcagtggcaagagtgcaggcaaacgactgctgaagagggctgccaagaacagtgtcgacctggacgactacgaggaagagcaggaccacctggatgcctgcttc

SEQ ID NO: 20764 - DNA, 85 bp, Homo sapiens; identical to SEQ ID NO: 10038
  chrX:123094093-123094178
  binary

SEQ ID NO: 20765 - DNA, 87 bp, Homo sapiens; identical to SEQ ID NO: 10039
  chrX:123094335-123094422
  binary

SEQ ID NO: 20766 - DNA, 654 bp, Homo sapiens
  chrX:39953710-39954364
  hyper
cgggtcctctccagctccggccccccgcgctcccaccagcccggctgccggggcacagtcacagctccgcgcgctgggcagtcctatttttatcttgtctaatcctaaactgggcggggagcacaggcgtcgtgcttagagaacaagagataggcgcgggaggcggggaggagcagccaggcagcgacgcgagcgggagcgagttaaagacacagtggaggcgaccgcgggcaggaagaaagagcgggctgcgcgggcctcgaggcgccgcacgcaacgcgccgccccgcgaagttacactcgcttccccgccgtccctcgctaccggcccctccccacttcccagcggcgctccccgcagcctggacagcgaggccccggcctgtgtgggaggcggaggccaggacggccctgcaaagggctggagagaatcgctaatgagctgtgcagcccattgatccggagaacacttcctaattaactctcagtcacctactggtgacagcgcctcaaaggacagcgctggggccagccgagccccagccgcgacttgccggccgggcgcctgctgcccaaaacccgcgcgctcccctaaacaccccaaggcaattggtgtgcgtggcggtgtatacccgcacactgaaggccagcctc

SEQ ID NO: 20767 - DNA, 544 bp, Homo sapiens
  chrX:40013994-40014538
  hyper
cgcggcagaagagccaagggtccggatctttccctggcagcagcagggacgcagcgtgggtcacgctaacagggtacagtttacccattagggaaagtcggcggagacggccctgttattcctcttttgcagatggcagattaatccggcagcacccggcctcaaagggaccggctgctcggcaaagggttaacccgtcggccggtaatcgtggacacgcgcgcacacacacacacgcacgcgcgcgcgcgtcctctccgcctgcccgagcgcccgccgcggcccgcagtgcgcccggggctgggggagtagctgcgggaggggagggggtcgggggaggggcggggcgggcttaaccaggccgctcgactgagccggggccacctcgccgtctgtcacttaaatgattgtcctccgctccgctcagtgcggtcagtacgggctgttaacaggcagttgcaatcagtttccgaaaggtcagccaaggtcctccggctctcgcagacggaaggcattacgaaaccgcttttgtatctgcaggcac

SEQ ID NO: 20768 - DNA, 621 bp, Homo sapiens
  chrX:40014669-40015290
  binary
cggagtgacccagggcctccgggtttcggtggggaagcaggaagggggtggggagcaggcggcaagggaaggaggagtgggaggaagtgggagaggcgtcctggctcctctcctcacccagccaacagcccacacccggacccagacgggagcgggcggccttggacgcgaggagaccccactcggactctcaggccctcctggcgcctggaagtagggagggggtgtgggggggggaaagaccctcgccgagcgagcgagtcccagcgcggtgtctgaagacgctgctgccgccgccgctagaagtcgtccatcagcaaccagtccaacctgccagtgataatgtgcgatcaacaccaaatcacccccgccaggcgcgatccatcatcgcagcgcgccgcgggcccgcgtgaggctgactcgcggctggggtggggagggggggcgcgcggagcaggaggcggtcgcccagcacacccggactctccgcgcacctcgctgcccctcctggaggcctgcacccaggcgctcataactctccaagttccccagctacagagcgaaaacccagtggctccgagttctgggcacagctcacttaggaatccgcgcgtcctccgc

SEQ ID NO: 20769 - DNA, 563 bp, Homo sapiens; identical to SEQ ID NO: 6339
  chrX:71525281-71525844
  hyper

SEQ ID NO: 20770 - DNA, 181 bp, Homo sapiens; identical to SEQ ID NO: 6340
  chrX:71525998-71526179
  hyper

SEQ ID NO: 20771 - DNA, 62 bp, Homo sapiens
  NW_001839407.1_18933-24809:4240-4302
  hypo
cgccgcaggccttgacaccctgggacccttcagtggtggtgcgggctgtccgagggctcacc

SEQ ID NO: 20772 - DNA, 60 bp, Homo sapiens; identical to SEQ ID NO: 5864
  AC241851.2_88-34049:15074-15134
  hyper

SEQ ID NO: 20773 - DNA, 43 bp, Homo sapiens; identical to SEQ ID NO: 5865
  AC241851.2_88-34049:15553-15596
  hyper

SEQ ID NO: 20774 - DNA, 289 bp, Homo sapiens; identical to SEQ ID NO: 5717
  chr1:101702081-101702370
  binary

SEQ ID NO: 20775 - DNA, 393 bp, Homo sapiens; identical to SEQ ID NO: 5718
  chr1:101702796-101703189
  binary

SEQ ID NO: 20776 - DNA, 1046 bp, Homo sapiens
  chr1:107599205-107600251
  binary
cgcgccgccggccgggcgaccccgcaggaagtaggaaggacgagcgcgcactacaagtcccagaagcccccgtttcctggagcccgcgccgtgccgcgctacgcccgccgggagccgggcagagcggccaagatgtcgcagcccaagaaaagaaagcttgagtcggggggcggcggcgaaggaggggagggaactgaagaggaagatggcgcggagcgggaggcggccctggagcgaccccggaggactaagcgggaacgggaccagctgtactacgagtgctactcggacgtttcggtccacgaggagatgatcgcggaccgcgtccgcaccgatgcctaccgcctgggtatccttcggaactgggcagcactgcgaggcaagacggtactggacgtgggcgcgggcaccggcattctgagcatcttctgtgcccaggccggggcccggcgcgtgtacgcggtagaggccagcgccatctggcaacaggcccgggaggtggtgcggttcaacgggctggaggaccgggtgcacgtcctgccgggaccagtggagactgtagagttgccggaacaggtggatgccatcgtgagcgagtggatgggctacggactcctgcacgagtccatgctgagctccgtcctccacgcgcgaaccaagtggctgaaggagggcggtcttctcctgccggcctccgccgagctcttcatagcccccatcagcgaccagatgctggaatggcgcctgggcttctggagccaggtgaagcagcactatggtgtggacatgagctgcctggagggcttcgccacgcgctgtctcatgggccactcggagatcgttgtgcagggattgtccggcgaggacgtgctggcccggccgcagcgctttgctcagctagagctctcccgcgccggcttggagcaggagctggaggccggagtgggcgggcgcttccgctgcagctgctatggctcggcgcccatgcatggctttgccatctggttccaggtgaccttccctggaggggagtcggagaaacccct

SEQ ID NO: 20777 - DNA, 40 bp, Homo sapiens
  chr1:107600359-107600399
  hyper
cacgctgctgccctcccgggacaacccccgtcgcctgcgc

SEQ ID NO: 20778 - DNA, 49 bp, Homo sapiens; identical to SEQ ID NO: 10092
  chr1:107684495-107684544
  binary

SEQ ID NO: 20779 - DNA, 306 bp, Homo sapiens; identical to SEQ ID NO: 5867
  chr1:108506290-108506596
  hyper

SEQ ID NO: 20780 - DNA, 53 bp, Homo sapiens; identical to SEQ ID NO: 12013
  chr1:11538821-11538874
  binary

SEQ ID NO: 20781 - DNA, 64 bp, Homo sapiens; identical to SEQ ID NO: 5719
  chr1:12123950-12124014
  binary

SEQ ID NO: 20782 - DNA, 448 bp, Homo sapiens; identical to SEQ ID NO: 8846
  chr1:154297543-154297991
  binary

SEQ ID NO: 20783 - DNA, 73 bp, Homo sapiens; identical to SEQ ID NO: 8847
  chr1:154298038-154298111
  binary

SEQ ID NO: 20784 - DNA, 43 bp, Homo sapiens; identical to SEQ ID NO: 7658
  chr1:156390054-156390097
  hyper

SEQ ID NO: 20785 - DNA, 104 bp, Homo sapiens; identical to SEQ ID NO: 7660
  chr1:158083079-158083183
  hyper

SEQ ID NO: 20786 - DNA, 135 bp, Homo sapiens; identical to SEQ ID NO: 6669
  chr1:171811643-171811778
  hyper

SEQ ID NO: 20787 - DNA, 116 bp, Homo sapiens; identical to SEQ ID NO: 16206
  chr1:214156950-214157066
  hyper

SEQ ID NO: 20788 - DNA, 593 bp, Homo sapiens; identical to SEQ ID NO: 16210
  chr1:220701523-220702116
  binary

SEQ ID NO: 20789 - DNA, 166 bp, Homo sapiens
  chr1:225117651-225117817
  binary
ctccccacccagctgctgtgggagcgcctccgagtccccgcgcggaaccctcaccaggcagatgctggcgcatccaccaggcgccggcgccgccacgccggtagccccgaccgcaggagctctcaacgcgaggttcttcttagttgctctccctcaggcaggccgc

SEQ ID NO: 20790 - DNA, 45 bp, Homo sapiens; identical to SEQ ID NO: 8882
  chr1:226736488-226736533
  hyper

SEQ ID NO: 20791 - DNA, 35 bp, Homo sapiens; identical to SEQ ID NO: 6686
  chr1:226924738-226924773
  hyper

SEQ ID NO: 20792 - DNA, 359 bp, Homo sapiens; identical to SEQ ID NO: 6691
  chr1:228528433-228528792
  hypo

SEQ ID NO: 20793 - DNA, 50 bp, Homo sapiens; identical to SEQ ID NO: 6692
  chr1:228529382-228529432
  hypo

SEQ ID NO: 20794 - DNA, 248 bp, Homo sapiens; identical to SEQ ID NO: 16215
  chr1:230346868-230347116
  hypo

SEQ ID NO: 20795 - DNA, 618 bp, Homo sapiens; identical to SEQ ID NO: 8885
  chr1:230561973-230562591
  hyper

SEQ ID NO: 20796 - DNA, 184 bp, Homo sapiens; identical to SEQ ID NO: 14467
  chr1:235813161-235813345
  binary

SEQ ID NO: 20797 - DNA, 836 bp, Homo sapiens
  chr1:244012299-244013135
  binary
cggtattggaaaaacctggccccaacgagattctttatctctaggctaactgtagattcccgggaaatcccaaacaagggatggtgaccccgcctcggcgtcagggtcaacacagcaaccagctaggcttcaactttgggctctgaagggccccaccggcatcatggctgatgcggaccgatgcgccggaggaggtggacaaggaagaggctggtctgtttacttgcagccagagctgccgccgccgccagcagcgacagcatcactggatcagccaaacccagcatcttccgcacatttctattcttagcacacaactcccaagcggatcaaaaccccactactattaaaaacacagacaagcacgttacccacctcccacacacacacccccccccccaccccaccagtgccgtcttttcctgcgcgccagtggcggggaagggtgggggaaggaaggagaccccggggacgcctgtgcatcctcgccttcaccccaccccacgcgcagacagcctcagcgccagggcgcgcggcagacggctccctccccccaacccaaacacactgacaccggcgctccacgcgttatataacctcgccgccgcccccggtccaggcgggcgccccctccccacgccgcgcggcccgggcggggaggggcgaggggaaggagcgagagttgcgcagacagcaggcgccgggccggggcagcccagacacagacggtaccgctaggccgggaacacccctcccccggcccgctgcgcaccgccgccccccagctttccccggaaagcggggggtgtcggtgtcaaccgcgctgggcatccccc

SEQ ID NO: 20798 - DNA, 500 bp, Homo sapiens; identical to SEQ ID NO: 12062
  chr1:244013722-244014222
  hyper

SEQ ID NO: 20799 - DNA, 33 bp, Homo sapiens; identical to SEQ ID NO: 6699
  chr1:25255579-25255612
  binary

SEQ ID NO: 20800 - DNA, 225 bp, Homo sapiens; identical to SEQ ID NO: 8901
  chr1:34629913-34630138
  binary

SEQ ID NO: 20801 - DNA, 253 bp, Homo sapiens; identical to SEQ ID NO: 8902
  chr1:35394790-35395043
  binary

SEQ ID NO: 20802 - DNA, 113 bp, Homo sapiens; identical to SEQ ID NO: 8903
  chr1:35396131-35396244
  hyper

SEQ ID NO: 20803 - DNA, 39 bp, Homo sapiens; identical to SEQ ID NO: 6714
  chr1:3659512-3659551
  hypo

SEQ ID NO: 20804 - DNA, 424 bp, Homo sapiens
  chr1:38512641-38513065
  binary
cgtcgctcccggggtcccgcgcgccggccgtgctgattggccgctggggcttcattcacggcccccctaccgtccgcgtacacactcacgccccgggggcgcggccgccacgtggggagtggcgcgggggtggccctgggaccgcaccccctctcgtcctggctgtgtgggccccgctttcccccagcgctggagactccgagcccggccggtcccacattccacgcgagctgaattcccgcccgcatcccgcccgggcagcagggattgccggctccgggaggcgctcgggctccgagaagcggctcagccccgcgcccctccctcctcagtaccgctgccggcggaccaggattcccgcgggtcctggcggctgcgagcgcgaggcggcgcggattcgcggctcggttccggcgcgactgct

SEQ ID NO: 20805 - DNA, 91 bp, Homo sapiens
  chr1:38513154-38513245
  hyper
ttcctctagtcccagcgtcacaactccgccgacctcctctgccctgagagcgcgtccggtgcgggcggagtcggacggactctggcttcac

SEQ ID NO: 20806 - DNA, 106 bp, Homo sapiens; identical to SEQ ID NO: 8907
  chr1:44726788-44726894
  hypo

SEQ ID NO: 20807 - DNA, 121 bp, Homo sapiens
  chr1:57110528-57110649
  binary
cgctcccgacatgcgaggcccgtctcttcttccagtttgacttccaagtctttccattccctaggatcgggccccagtctcaccccctattttcacccccttcggttttcctcagaaaggg

SEQ ID NO: 20808 - DNA, 169 bp, Homo sapiens
  chr1:57110714-57110883
  binary
cggaccccgcgcatctggcgcagcccctcccgcactcccgcccagcgccccgcgtccccggcccccgctgtcgctgcttcgggttccgccgcaggagcctctcactcccgggagcgggcgcctcgcgctccctccctcggccccgccccgcccgccgctcgcccgttgc

SEQ ID NO: 20809 - DNA, 229 bp, Homo sapiens
  chr1:84543146-84543375
  hyper
cgaggacaacgtggtgggctgagcgaatacctcaatgtgcgagagaacgaaaagctcgaaccacgaccgtgcctagggaccaggcttttcctgtggccgatgcggggcagatgcagacccagaggccacccttgcgcgcgatctccaacccgacggtgcggctcctctcggacctggagctgtggggagaaggcagccttttagtgaggagccgccgcgtggcgggacg

SEQ ID NO: 20810 - DNA, 659 bp, Homo sapiens
  chr1:84543409-84544068
  hyper
cgcgactgcactccagggcaccgggaccgccagggtgaggagggactctgcgttctgcaaagctagcggttcccactccacctcccactatctcagcgatgggcacgcgagcgccagcccgggcgaccgcgggggaagaagcggtccacgccacctcaggcccccgccccaggctctgccagctgggggtccaccgcccgcccccggggtcccgggcctgcgcgtcacttccggcgcgcgcgcccgcctgcgaagatacagtcgggccagggcctggcctgggcgcgcggctgcccgggggcgcgcagagagggcggaccgcgcgaagggggagtgtctgcccgccgccgccactgctgctgccaccgccgtcgccgccgccgccgccgccgccgctgctgctgccggtgctaaggagttcgctggagccctttcctcagacccggcccggtcttcgcgcccggactcctggcgccagcgctaggcgcactcaccgctctgacgggtgcagacgcgggagttgtcccagactgtggagtggcgggcacggccccagccccccttcccttccctgaccccttcttgccatcgccccagacatggggaacgcggcgaccgccaagaaaggcagcgaggtggagagcggtgagttgaaggcc

SEQ ID NO: 20811 - DNA, 171 bp, Homo sapiens; identical to SEQ ID NO: 7745
  chr1:92948154-92948325
  hyper

SEQ ID NO: 20812 - DNA, 226 bp, Homo sapiens; identical to SEQ ID NO: 5891
  chr1:92949466-92949692
  hyper

SEQ ID NO: 20813 - DNA, 228 bp, Homo sapiens; identical to SEQ ID NO: 5892
  chr1:92950207-92950435
  hyper

SEQ ID NO: 20814 - DNA, 426 bp, Homo sapiens; identical to SEQ ID NO: 8928
  chr1:9711649-9712075
  binary

SEQ ID NO: 20815 - DNA, 142 bp, Homo sapiens
  chr10:101295603-101295745
  hyper
ggcttcggatcgcagctcactcgaggcctggggaaggggactcaggggcgaggaggatgactgggtccggtcgccaggactgtctctgaggcagaaacgccggctgggcgccggggaggacgatggccccgaccctggcagc

SEQ ID NO: 20816 - DNA, 42 bp, Homo sapiens; identical to SEQ ID NO: 16240
  chr10:11060746-11060788
  binary

SEQ ID NO: 20817 - DNA, 568 bp, Homo sapiens
  chr10:112257242-112257810
  hyper
ccctggccggctccctcggccctgctcagcgcggcgcgggcgggttctcagcccacgtccgtgaagctgaaggccggatcgtgcggcgccgccccgccccccacggcgcttcctcctcggtccgcaccgcgagggtcaccgcggccccggagcgcctgggacactcgaccggcagccgcgggtgatgcgcgagtgagtccctcagcgaagcgcggaagagagaacgaagaggcgccttccacttcctctcgctctaacgccggcacccgccccgcgcgtccctcgcccccgctgccccgccccctgcagggcgtggccacggcccgaggggcggggaaacacccatatttggccttatatgggcagccgcgtcacggacggcactcattcacataaaacgctgcgcggccggcggaatccccggcttctagggcggcgagcggccgggctggctatcgagcgagcggggcgggaacgcggagttgcgccgccgctcgggcgccgggctccgtcgcggccgcagccccgcgggtcgccctcccgtgcctcgcccgcggacaccctggcc

SEQ ID NO: 20818 - DNA, 354 bp, Homo sapiens
  chr10:112257978-112258332
  hyper
ttcgctgcctcgaacgtgcgcggctcgctcaacgtcaacctcaactcggtggtgctgcggcgggcccggggcggcgcggtgtcggcgcgctacgtgctgcccgacgaggcggcgcgcgcgcggctcctgcaggagggcggcggcggcgtcgcggccgtggtggtgctggaccagggcagccgccactggcagaagctgcgagaggagagcgccgcgcgtgtcgtcctcacctcgctactcgcttgcctacccgccggcccgcgggtctacttcctcaaaggtgagcgctcggggtccctgccacgctcgcccctccggcgcccccgggtcccctccctgcgccggggcgccctc

SEQ ID NO: 20819 - DNA, 184 bp, Homo sapiens
  chr10:112258408-112258592
  hyper
tgcaaatgtcagcactcagagctccccctcttccccacccgcgttcctcgaaagcgcccggcagcgggtctgcccggtggtctgggtggagttggttatgctgcgggggctgctgctgtttagcagtttgggggccgtcggctcgtgccgggcacgagccccctttccagacgcgagcttcgcc

SEQ ID NO: 20820 - DNA, 588 bp, Homo sapiens
  chr10:118608718-118609306
  hyper
aattcggagctaaggctgccgcgctccggcaaaacgcgcttgatgaggtcgttaaagatttccccctctggaaaatcgccagggaaaagtggtgaaaaacgaagccgggagggccctagtctcgggagtctaggaggagcccaacccccggacctaatgccgcagggagaaaagacagagcagcgagcgcaaataccatcctagctccaataaaagggaacgacttttaccgcaggaagaacctaggcctggaagccacgcgagatctgggggtcgggatcacgttgcgttgcctagcgacagcagggacgctcgtgggaccccaggctaaaccccgctgtagccttaaatctcctaccatggaggaagaaggcggcggccgcagctgtgggaccactagggagctgcagaagctgaagcagcaggcgatggagtactaccgggagaacgacgttccgcgcaggctggaagagctgctcaactccaccttctacctccagcctgccgacgtctacgggcacctggtagggacctgggacaagcgctctcctcccgccaacccctctccccccgccccgcgctgcggca

SEQ ID NO: 20821 - DNA, 240 bp, Homo sapiens; identical to SEQ ID NO: 6731
  chr10:118891774-118892014
  hyper

SEQ ID NO: 20822 - DNA, 138 bp, Homo sapiens; identical to SEQ ID NO: 7761
  chr10:122708760-122708898
  hyper

SEQ ID NO: 20823 - DNA, 694 bp, Homo sapiens
  chr10:12391177-12391871
  binary
cgcccggcgcttccgagccacgcagaggcgccccctcccgccggagacgggaaagccccggcgcccccagactgggctccgtttccagctcccggaggggctggggctctcccgcgtgcgccccgcacctgccgggggcccgtacccgccctcgccggggctccagggggcacgacggccgtggcccggcgctcttgggaggggagcgggacatccccgaaggcggcgcgctggaggcggggagcggccggggcgcacggagagggcggggagcccgcgggagggggaggagggggaggagggggaggaggcgcgaggtgggggggagcgcggcgggcggcagggagggagcgggagggaggcaagaaagtagcagaaagtgaggctggcaggcggcggcaaaggagccggcgcgcggcggcggcaggaagtctgtgcccgagaacagcagaaataagagccagggagggaccgcggccgcggcggcggcggcgagagcgaaagaggaaactgcagaggaggaagctgcgccgcagcccgagccgcccggcatccccgccgcctctgcgcccgcgccgcgcccccggcgccccctccccagcgcgcccccggccgctcctccgcgccgcgctcgtcggccatggcccgggagaacggcgagagcagctcctcctggaaaaagcaagctgaagac

SEQ ID NO: 20824 - DNA, 324 bp, Homo sapiens
  chr10:12392327-12392651
  binary
ccagtcgttcccatttctgtccttacatcatgtatttctatggaattggcatctgcacgtacgaggtgtaggcaagactttgggtggccacgcgaggatggaagggaagggcttcgcagtgctcagggtcacacgtgggcagagcctcaccggagggtctgtgcatttcacgcgggctcggccgcacgcgccggggagcgcgtctccaagggagggtctgtgcgcgtcgctgcgcgggcggtgctctctccgggctgcatcgagtcccatgctgatggctgtgtctcaagaaagcagaaataatccgaagtcgatggcaggaac

SEQ ID NO: 20825 - DNA, 95 bp, Homo sapiens
  chr10:124907174-124907269
  hyper
cgcagggcgccacggtcccaggagtgccggctttgcccgcccactggggctagaaggggtggagggctgggggaggatggtggagcagcctgtac

SEQ ID NO: 20826 - DNA, 85 bp, Homo sapiens
  chr10:13043901-13043986
  hyper
aattggggacagtggcccagcaatctcctggcgccccacgatggacgtggtccgagcttgccaggcgtaaagcctgtttgcaaac

SEQ ID NO: 20827 - DNA, 231 bp, Homo sapiens; identical to SEQ ID NO: 6735
  chr10:134733835-134734066
  hypo

SEQ ID NO: 20828 - DNA, 209 bp, Homo sapiens; identical to SEQ ID NO: 5728
  chr10:17270445-17270654
  binary

SEQ ID NO: 20829 - DNA, 116 bp, Homo sapiens; identical to SEQ ID NO: 5896
  chr10:17272233-17272349
  hyper

SEQ ID NO: 20830 - DNA, 260 bp, Homo sapiens; identical to SEQ ID NO: 12133
  chr10:17495133-17495393
  binary

SEQ ID NO: 20831 - DNA, 323 bp, Homo sapiens; identical to SEQ ID NO: 12134
  chr10:17495680-17496003
  binary

SEQ ID NO: 20832 - DNA, 96 bp, Homo sapiens; identical to SEQ ID NO: 6738
  chr10:1780056-1780152
  hyper

SEQ ID NO: 20833 - DNA, 117 bp, Homo sapiens; identical to SEQ ID NO: 5897
  chr10:18429033-18429150
  hyper

SEQ ID NO: 20834 - DNA, 49 bp, Homo sapiens; identical to SEQ ID NO: 5898
  chr10:18430247-18430296
  hyper

SEQ ID NO: 20835 - DNA, 265 bp, Homo sapiens
  chr10:20105154-20105419
  hyper
cgcgggggagcgtggcgacggcagcgcctcctccgccaccaaactcctggggctccgcgggggcttggggccacctcctcctgagcccggaggaaccctctcccgataggttccagcgtgactccctcccactccacccttttcctttcttcttcctcttttttttttttttttttaaacacatttttttcctggcttcggacctcagactgctgcagccctaaccttcccagggctcagctctttggagctgcccattcctccg

SEQ ID NO: 20836 - DNA, 449 bp, Homo sapiens
  chr10:20105655-20106104
  hyper
gtcaccgtccgcgggcaccgggttggcgctgcccgagtggaaccgacagtttgcgagcctcggctgcaagtggcctctcctccccgcggttgttgttcagtgtcgggtgagggctgcgagtgtggcaagttgcaaagagagcctcagaggtccgaagagcgctgcgctcctactcgcgttcgcttcttcctcttctcggttccctactgtgaaatcgcagcgacatttacaaaggcctccgggtcctaccgagaccgatccgcagcgtttggcccggtcgtgcctattgcatcgggagcccccgagcaccggcgaaggactggcgggtggggtagggaggtggcggcggcggcatggcgaggttcccgaaggccgacctggccgctgcaggagttatgttactttgccacttcttcacggaccagtttcagttcgccgatgggaaaccc

SEQ ID NO: 20837 - DNA, 32 bp, Homo sapiens; identical to SEQ ID NO: 6742
  chr10:22626103-22626135
  hyper

SEQ ID NO: 20838 - DNA, 210 bp, Homo sapiens
  chr10:28031105-28031315
  hyper
catcatgtaaggtaaaaagacctcaggaaaagcacattcaaagggggaggaggcagaggcagccaggagcctggagcgtggcctggggcgctgcgctccctcacgggtccgggaggtgtcgcgcgcggccgccagcgagcccagccgctccccgaggcttgcgcgcctgcgccggagcctcctgggtttctgcctctttaaacactttga

SEQ ID NO: 20839 - DNA, 226 bp, Homo sapiens
  chr10:28031638-28031864
  hyper
gccgcgctcacgcccgggactccctggcgggaggcgaccttcccgactccttgggccaggcgagccgcggggctctggcgaggggctcgagtgaccgaagagaagtccgcggagcctgagcctggactccccgactgctcggcttcgcctgtttctctgcaccgagctcagtcctttttcctcgccctcagccgcgcaccggcacccacagtccggagaggggcaa

SEQ ID NO: 20840 - DNA, 116 bp, Homo sapiens
  chr10:28032744-28032860
  hyper
cagtttgaatctgggagaggcatactccggactgcggagcgcgaccggcgtgaggccgcgcgtggttcttcaatcacagcagaagactaaagcctctaggaaccccaactcggggc

SEQ ID NO: 20841 - DNA, 791 bp, Homo sapiens; identical to SEQ ID NO: 8945
  chr10:31607954-31608745
  binary

SEQ ID NO: 20842 - DNA, 253 bp, Homo sapiens; identical to SEQ ID NO: 7771
  chr10:31609416-31609669
  binary

SEQ ID NO: 20843 - DNA, 174 bp, Homo sapiens
  chr10:44879650-44879824
  hyper
cgtgtgaggctcggagggtccctgggcctctctcaggtgaacccgagaagagacaggaagacagcggctggacgcgcgcccaggtccgcgtcgctgcggaccgcggagctgtgcagaagcgcggcctggcgggtggcacaagcccgacagctgcgccgcgcagcccgcccgcgc

SEQ ID NO: 20844 - DNA, 202 bp, Homo sapiens; identical to SEQ ID NO: 10182
  chr10:49731801-49732003
  hyper

SEQ ID NO: 20845 - DNA, 60 bp, Homo sapiens; identical to SEQ ID NO: 10183
  chr10:50323163-50323223
  hyper

SEQ ID NO: 20846 - DNA, 94 bp, Homo sapiens; identical to SEQ ID NO: 8948
  chr10:50606762-50606856
  binary

SEQ ID NO: 20847 - DNA, 194 bp, Homo sapiens; identical to SEQ ID NO: 5903
  chr10:60272362-60272556
  hyper

SEQ ID NO: 20848 - DNA, 212 bp, Homo sapiens; identical to SEQ ID NO: 5904
  chr10:60273346-60273558
  hyper

SEQ ID NO: 20849 - DNA, 314 bp, Homo sapiens; identical to SEQ ID NO: 16266
  chr10:60935996-60936310
  hyper

SEQ ID NO: 20850 - DNA, 73 bp, Homo sapiens; identical to SEQ ID NO: 10186
  chr10:64578688-64578761
  hyper

SEQ ID NO: 20851 - DNA, 667 bp, Homo sapiens; identical to SEQ ID NO: 7781
  chr10:6621854-6622521
  binary

SEQ ID NO: 20852 - DNA, 87 bp, Homo sapiens; identical to SEQ ID NO: 7782
  chr10:6622706-6622793
  binary

SEQ ID NO: 20853 - DNA, 490 bp, Homo sapiens
  chr10:71812611-71813101
  hyper
cgcttgccgccattgacacgcacagatagaacccaaagaaaggcaaagagtcctgcccggcaccggcgccgcgtgggccaaacctgcgcccgtggaggggcgcgcagagggcaccgggcgccgggagcaggcggcgcagcaccaggtgagcccgccatggcgatggcattattgtttagggtgctccggggtctggaaacaaaacgcgccgccggggcagtgcaggggccggagagaaccacctctgcctctcccccgagcccctgcgggcgcaccctcgatagccgacccaccctctgcaaaaacaaattcttaaatccagctgcccaacttgcttccttgggcgataaagggggggctgctaaagaagtggtcaaattcctgcggccagcgaggggccgggggcgtcgagggtactgagaggggaaggaggagggatgcgaggttcagcagcgggccccaggcgaggctggacccggaggaagcggag

SEQ ID NO: 20854 - DNA, 57 bp, Homo sapiens; identical to SEQ ID NO: 10187
  chr10:7449898-7449955
  hyper

SEQ ID NO: 20855 - DNA, 61 bp, Homo sapiens; identical to SEQ ID NO: 10188
  chr10:7453036-7453097
  binary

SEQ ID NO: 20856 - DNA, 85 bp, Homo sapiens; identical to SEQ ID NO: 6755
  chr10:79396547-79396632
  hyper

SEQ ID NO: 20857 - DNA, 103 bp, Homo sapiens; identical to SEQ ID NO: 5906
  chr10:83634159-83634262
  hyper

SEQ ID NO: 20858 - DNA, 47 bp, Homo sapiens; identical to SEQ ID NO: 5907
  chr10:83634499-83634546
  hyper

SEQ ID NO: 20859 - DNA, 91 bp, Homo sapiens; identical to SEQ ID NO: 16275
  chr10:85954199-85954290
  hyper

SEQ ID NO: 20860 - DNA, 54 bp, Homo sapiens
  chr10:90342577-90342631
  hyper
cgcggggtactcctgccgggcccccaccctcgcccccaccctcgccccttcttg

SEQ ID NO: 20861 - DNA, 82 bp, Homo sapiens; identical to SEQ ID NO: 10192
  chr10:92617016-92617098
  binary

SEQ ID NO: 20862 - DNA, 278 bp, Homo sapiens; identical to SEQ ID NO: 10193
  chr10:92617539-92617817
  binary

SEQ ID NO: 20863 - DNA, 385 bp, Homo sapiens
  chr10:94833649-94834034
  binary
gctggcggcggcggcaggtggcgcgggaggtcgcggcgcgccatggggctcccggcgctgctggccagtgcgctctgcaccttcgtgctgccgctgctgctcttcctggctgcgatcaagctctgggacctgtactgcgtgagcggccgcgaccgcagttgtgccctcccattgccccccgggactatgggcttccccttctttggggaaaccttgcagatggtactgcaggtaagggagggtggggcgggacaggctgcttccccggagcccggcgcggctctgggcttctgctgaagtcggggtaggcgcccccgggaggcatgctattgcggctaggagcagggctggcgggagcgcggcgctccccggcgccccctcatgc

SEQ ID NO: 20864 - DNA, 195 bp, Homo sapiens
  chr10:99530903-99531098
  binary
cgggggataattccggggacgctgggctgagctaggacagcgtgtgtgtgtgtgtgtgggcggagggggggagctgcacctcttggggggttcgcagagctgtgctaggggagctgcagggccgtcggagcgcgcggggacggcggcggcggcgctacctggaggcgcggtggcgggcaggtgcccgaactgcac

SEQ ID NO: 20865 - DNA, 227 bp, Homo sapiens; identical to SEQ ID NO: 12165
  chr11:106889091-106889318
  binary

SEQ ID NO: 20866 - DNA, 168 bp, Homo sapiens; identical to SEQ ID NO: 8963
  chr11:107462735-107462903
  hyper

SEQ ID NO: 20867 - DNA, 823 bp, Homo sapiens
  chr11:110166935-110167758
  hyper
caggcacgttcgggccgcggctcagccacgactcgggcagggcctcgcggcccctaccagccccgggaggagcctggccggccgggccgttaccacagtggcgcctcggccagctgggcgcgagcggaggcgcgccaagccctggcggcggcgccacggccgggcagcacgggccccgcaacttcgcgccgccaccttagcgtctccggaggaaccgggagcggggagtgggggaagggagggcgccgcgccttacccggagagcgggcggcttctgcccgccggcgtgtggctggggcgctgcgcggcggcgcggctgcgacagggagggagaagcggtggtgcgagcgctggcccgcgggagacgagaggcgccgccgccaccgcagacagctccgcaatatggccgctcggcgcctccgcgggaaaaggcggggctgcccggcgcccccccgcctccccctgccggccggccgtcctcgcgccgcggactgagcgccaacgccgccgctgggggccgcccccgccccgcccctcccgcaggctcgcagccgcaggcctggctccgggcgtggccgggggtcgcggtctggggccggccaacgcgaggtgggtggctgcgggctcgggagcgcccagggaaatagggcgaatgcgccggagggtcgagcccttccagagagcgctgggctccagctaaacctgcggtcgagggaagcggagccgcccagcccaaagctcggagtgtgcccgccgcctccccaacgagtggaaacttgaaactcccgctggtgccagcaaactcactgagggcgttgccgtc

SEQ ID NO: 20868 - DNA, 399 bp, Homo sapiens; identical to SEQ ID NO: 5732
  chr11:115375434-115375833
  binary

SEQ ID NO: 20869 - DNA, 301 bp, Homo sapiens; identical to SEQ ID NO: 5912
  chr11:115375894-115376195
  hyper

SEQ ID NO: 20870 - DNA, 350 bp, Homo sapiens
  chr11:11833053-11833403
  hypo
cgctgcggcacctaaagaggccgggcggcccagaggcccgcaagccacgcccccttccaggccccgcctccgtttggccactccccttgctgtcagctcttccaccagttcctgcccctgcccctttcctcccacgcatccgcacccgagcagccccacctgctaagccacgccccctgtcctgtgctgtcctgcactcccaggtgccccacgctttcccaccctcccagtcaaccggcgcagggagcctcatcattattagtgcgtggacaatcacatgtaacaaaatgagctaacgtgcagttatctaccaggtgccaggctctgtcctaagtgttctacacataaac

SEQ ID NO: 20871 - DNA, 160 bp, Homo sapiens; identical to SEQ ID NO: 8968
  chr11:120435049-120435209
  hyper

SEQ ID NO: 20872 - DNA, 167 bp, Homo sapiens
  chr11:120894634-120894801
  hyper
cgagaaagagcagatgaggtgtttgtggtaaagcctaagccagtgcagccatccccgtcgccatggcaaccccagcgcggttggggaggacccgctcctccggcgccccctcccattcacgcagcggacgtgacacgtgcggcggggtcacgtgttgttgttgggcc

SEQ ID NO: 20873 - DNA, 85 bp, Homo sapiens
  chr11:120895026-120895111
  hyper
tgccgggctctcgaggcccgaggcgttcccctctggagccgaggcgcggagggtcgctcctgcagggtgctgggataggacactc

SEQ ID NO: 20874 - DNA, 129 bp, Homo sapiens; identical to SEQ ID NO: 10198
  chr11:128562635-128562764
  hyper

SEQ ID NO: 20875 - DNA, 161 bp, Homo sapiens; identical to SEQ ID NO: 5733
  chr11:133939437-133939598
  binary

SEQ ID NO: 20876 - DNA, 172 bp, Homo sapiens
  chr11:17756064-17756236
  hyper
cgggcccagacgtctctcggagcccccgcccctggagtggcgttccccgagggcggaccgtgggcgggtcccccgggagcagcaggagccgcgcggggcgggcgcccccagcgccgaggttgagggaggccgggctcggtgcggggctgggaggggggcgcggaatcagggc

SEQ ID NO: 20877 - DNA, 183 bp, Homo sapiens
  chr11:17756666-17756849
  hyper
cagcaccgccgcgggagcccaagtccgagcgcagcccagcggaaccccagctcgagcccgggctcacggagagcagcgctcggcgttagccgcacgagcaacaccccgggtgcccctgcccagggggcccgccatctcctccaggaggcggggagaaggaacgaggagggcgggcgggcaggc

SEQ ID NO: 20878 - DNA, 174 bp, Homo sapiens; identical to SEQ ID NO: 12182
  chr11:43600280-43600454
  hyper

SEQ ID NO: 20879 - DNA, 231 bp, Homo sapiens; identical to SEQ ID NO: 12183
  chr11:43964015-43964246
  hyper

SEQ ID NO: 20880 - DNA, 61 bp, Homo sapiens; identical to SEQ ID NO: 8987
  chr11:43965299-43965360
  binary

SEQ ID NO: 20881 - DNA, 42 bp, Homo sapiens; identical to SEQ ID NO: 8988
  chr11:43965463-43965505
  binary

SEQ ID NO: 20882 - DNA, 141 bp, Homo sapiens; identical to SEQ ID NO: 8989
  chr11:43966061-43966202
  hyper

SEQ ID NO: 20883 - DNA, 106 bp, Homo sapiens; identical to SEQ ID NO: 6390
  chr11:47359237-47359343
  hypo

SEQ ID NO: 20884 - DNA, 237 bp, Homo sapiens; identical to SEQ ID NO: 16304
  chr11:61275825-61276062
  hyper

SEQ ID NO: 20885 - DNA, 316 bp, Homo sapiens; identical to SEQ ID NO: 12191
  chr11:61276101-61276417
  binary

SEQ ID NO: 20886 - DNA, 141 bp, Homo sapiens; identical to SEQ ID NO: 7831
  chr11:66513646-66513787
  hypo

SEQ ID NO: 20887 - DNA, 339 bp, Homo sapiens; identical to SEQ ID NO: 7832
  chr11:66626187-66626526
  hypo

SEQ ID NO: 20888 - DNA, 63 bp, Homo sapiens; identical to SEQ ID NO: 6789
  chr11:73073669-73073732
  hypo

SEQ ID NO: 20889 - DNA, 345 bp, Homo sapiens
  chr11:8041149-8041494
  binary
tagcgagctggcacctctgcccccaccccagctgccccgccagggtcgctccgccgggggaccccgagaaagggcgcggagggggcgccgggaggggcggggcaggggccggggtgggcccctggcgggcggggcgaggagggggcgccttcggctctgggatgcgcccgccggcgtctgcgccccgccggccctccgcagggaccgaggctggccccgggcggagtgtcccgctggctgccggggacccgcgagtcgctgcctgttccgcggggcgagatggcagcctgggccggctgtctgggcgcaggagcggcgctctcgagttgccaggctccgcgcccg

SEQ ID NO: 20890 - DNA, 61 bp, Homo sapiens; identical to SEQ ID NO: 10227
  chr11:9112971-9113032
  binary

SEQ ID NO: 20891 - DNA, 268 bp, Homo sapiens; identical to SEQ ID NO: 5923
  chr12:103351149-103351417
  hyper

SEQ ID NO: 20892 - DNA, 106 bp, Homo sapiens; identical to SEQ ID NO: 10235
  chr12:104850139-104850245
  hyper

SEQ ID NO: 20893 - DNA, 349 bp, Homo sapiens; identical to SEQ ID NO: 10236
  chr12:104851545-104851894
  binary

SEQ ID NO: 20894 - DNA, 52 bp, Homo sapiens; identical to SEQ ID NO: 10238
  chr12:111725459-111725511
  hypo

SEQ ID NO: 20895 - DNA, 63 bp, Homo sapiens; identical to SEQ ID NO: 10239
  chr12:111725564-111725627
  hypo

SEQ ID NO: 20896 - DNA, 83 bp, Homo sapiens; identical to SEQ ID NO: 10240
  chr12:113495127-113495210
  binary

SEQ ID NO: 20897 - DNA, 65 bp, Homo sapiens; identical to SEQ ID NO: 12204
  chr12:122688584-122688649
  binary

SEQ ID NO: 20898 - DNA, 173 bp, Homo sapiens; identical to SEQ ID NO: 10242
  chr12:132423854-132424027
  hypo

SEQ ID NO: 20899 - DNA, 134 bp, Homo sapiens
  chr12:133463975-133464109
  hyper
agactcggcgcccgccccaccccgcgggccccggcccggccgcccgcgcccacgcagccccgcagcccggcctggacgccggcgggcgccccctcccacggccgcaaccaggtcccccttcgccgcccgccgca

SEQ ID NO: 20900 - DNA, 238 bp, Homo sapiens; identical to SEQ ID NO: 10246
  chr12:133464166-133464404
  binary

SEQ ID NO: 20901 - DNA, 219 bp, Homo sapiens; identical to SEQ ID NO: 10247
  chr12:133464555-133464774
  binary

SEQ ID NO: 20902 - DNA, 235 bp, Homo sapiens; identical to SEQ ID NO: 10249
  chr12:1639655-1639890
  binary

SEQ ID NO: 20903 - DNA, 91 bp, Homo sapiens
  chr12:2161370-2161461
  binary
cgtgctcggctgcctccaaggaattattaaacctgggtctaggaatctgttcagacatctgggcaccgctgcctcgcctaccaggctccgc

SEQ ID NO: 20904 - DNA, 117 bp, Homo sapiens; identical to SEQ ID NO: 5738
  chr12:21681020-21681137
  binary

SEQ ID NO: 20905 - DNA, 38 bp, Homo sapiens
  chr12:21927952-21927990
  hyper
cagctcctttccagtagccgcgaccccctgccgccagc

SEQ ID NO: 20906 - DNA, 118 bp, Homo sapiens; identical to SEQ ID NO: 9022
  chr12:22488705-22488823
  binary

SEQ ID NO: 20907 - DNA, 253 bp, Homo sapiens; identical to SEQ ID NO: 10250
  chr12:24715505-24715758
  binary

SEQ ID NO: 20908 - DNA, 100 bp, Homo sapiens
  chr12:28122526-28122626
  hyper
gcccgctctcaaaaagcctcttcaacatcaagggcatctcccaagttgaaaagaaaaaaaatttctctggagcctctcagcacttacttatttagcaacc

SEQ ID NO: 20909 - DNA, 180 bp, Homo sapiens
  chr12:28122886-28123066
  hyper
cgaaccaggccctttcgttccagagccacttgtagcgaaacccacatatatatacatagctgtctgtctacctcctctggtgggctggttgcttccggaaagttgattccacacaccctgagaacaagtttcaagtgcgtgtgtcgtcgatcaggagggccaggtggcggcgagggcggg

SEQ ID NO: 20910 - DNA, 344 bp, Homo sapiens
  chr12:28123205-28123549
  binary
ggagaagtgagctagtcgcaaagaggtggcgccctaggaacgcgcgcggggcgagcgagggcgcaggcgggctggcgggcgggcgcgcggggggcgggggcggcgacgggcggcccgaacgggccccgcgccgcccgagcgagtggaggggagccccgagccgggaatgagcggcgagcggcggagctcccccctcccgcgctgccgaccccggagctgtcaggagctctgccgagccccaccccggagcccgggccctgtcgcgccatccccgtgccgggggcgtgggcgcatccgcttgctccctccaggcccggccggctcctgccggcgcggcggatccg

SEQ ID NO: 20911 - DNA, 37 bp, Homo sapiens; identical to SEQ ID NO: 6833
  chr12:32831540-32831577
  hypo

SEQ ID NO: 20912 - DNA, 77 bp, Homo sapiens; identical to SEQ ID NO: 5740
  chr12:40618264-40618341
  binary

SEQ ID NO: 20913 - DNA, 35 bp, Homo sapiens; identical to SEQ ID NO: 5741
  chr12:40619048-40619083
  binary

SEQ ID NO: 20914 - DNA, 54 bp, Homo sapiens; identical to SEQ ID NO: 10256
  chr12:41086129-41086183
  hyper

SEQ ID NO: 20915 - DNA, 211 bp, Homo sapiens; identical to SEQ ID NO: 10257
  chr12:41086454-41086665
  hyper

SEQ ID NO: 20916 - DNA, 126 bp, Homo sapiens; identical to SEQ ID NO: 16356
  chr12:4273746-4273872
  hyper

SEQ ID NO: 20917 - DNA, 86 bp, Homo sapiens; identical to SEQ ID NO: 5742
  chr12:4377809-4377895
  binary

SEQ ID NO: 20918 - DNA, 245 bp, Homo sapiens; identical to SEQ ID NO: 5743
  chr12:4378558-4378803
  binary

SEQ ID NO: 20919 - DNA, 247 bp, Homo sapiens; identical to SEQ ID NO: 7891
  chr12:4379920-4380167
  hyper

SEQ ID NO: 20920 - DNA, 202 bp, Homo sapiens; identical to SEQ ID NO: 6837
  chr12:4381232-4381434
  hyper

SEQ ID NO: 20921 - DNA, 167 bp, Homo sapiens; identical to SEQ ID NO: 9032
  chr12:4382439-4382606
  hyper

SEQ ID NO: 20922 - DNA, 51 bp, Homo sapiens; identical to SEQ ID NO: 6838
  chr12:4382915-4382966
  hyper

SEQ ID NO: 20923 - DNA, 210 bp, Homo sapiens; identical to SEQ ID NO: 6839
  chr12:4382999-4383209
  hyper

SEQ ID NO: 20924 - DNA, 255 bp, Homo sapiens; identical to SEQ ID NO: 7894
  chr12:4384059-4384314
  hyper

SEQ ID NO: 20925 - DNA, 79 bp, Homo sapiens; identical to SEQ ID NO: 7895
  chr12:4384533-4384612
  hyper

SEQ ID NO: 20926 - DNA, 293 bp, Homo sapiens; identical to SEQ ID NO: 5932
  chr12:45270086-45270379
  hyper

SEQ ID NO: 20927 - DNA, 409 bp, Homo sapiens; identical to SEQ ID NO: 16367
  chr12:48577061-48577470
  binary

SEQ ID NO: 20928 - DNA, 54 bp, Homo sapiens; identical to SEQ ID NO: 6843
  chr12:52401605-52401659
  hyper

SEQ ID NO: 20929 - DNA, 61 bp, Homo sapiens; identical to SEQ ID NO: 7912
  chr12:54402812-54402873
  hyper

SEQ ID NO: 20930 - DNA, 386 bp, Homo sapiens
  chr12:81330352-81330738
  binary
gggactagagggtgtcctcctctgcagagccgtaggactcgagcgccttcatcactggacgctggagccaggaaggaaacccacacactcagggacaggtataaccccacaggggtgcaccagtgaggccccgatcgcagcggaggactccatccctgagcttgtgagggcgtcctggggaggaagcgaacactttccccgttcaagtcagagagcaggactcactgggtggcaggtcagaagttgaattttaacccgacctgcgctttgtccccgcgccttccgcagcctgggcgccgcggtggcaccgagctgggagaggacacgagaggctggcgcgggagaagccgagagttgctatcgaccgggagctgccggcggcggga

SEQ ID NO: 20931 - DNA, 225 bp, Homo sapiens
  chr12:81331319-81331544
  hyper
cctgcctgagcgcgtcccatgtcccgttgggaattggcaggcggggaagggaggaggggagaggggacgcggtggcctggcgagcgagccgctcccttacctctgtccagggtgagcggctggaccactgtcaatgtcgccatgtctgccgtgggagccgaagtgacgctcggcttcagcatcagcaaccgctcgtagtgagaaaaaaaggaggagattgggggc

SEQ ID NO: 20932 - DNA, 752 bp, Homo sapiens; identical to SEQ ID NO: 12265
  chr12:8849750-8850502
  hyper

SEQ ID NO: 20933 - DNA, 311 bp, Homo sapiens; identical to SEQ ID NO: 12266
  chr12:8850744-8851055
  hyper

SEQ ID NO: 20934 - DNA, 113 bp, Homo sapiens; identical to SEQ ID NO: 12267
  chr12:8851275-8851388
  hyper

SEQ ID NO: 20935 - DNA, 851 bp, Homo sapiens
  chr12:94542238-94543089
  binary
cgaatcaagaggggaggggagatgggcgtggagggagggcgggcgggcgggcaggaggcggagggcggaggaggaagagaggatgaggaagggggccagttgcatcccactttcacaatgggaaagtgaaacgcacaagcgcacccaacctctccagccctccccgcccgcctcgctcctctccgcccgtcccctcccttcccctccgcgcctccccgcgagcgccagcgctgcacacaggaactctccggcgaaggagggcgaggaggaaacggtgccggagcgcgcagggcttgctgccgccaccgccgctgcacaggctgccggagcgagcctgccgcgcgccgccctccccgctctccttcctgggcgagctgcggggatggggcggccgcgggagcccgagcgcgcgcaggaaccgccgccgccgccgcccgcgtctccgttgccgcgcgcctgagccgccgtcgccgccgcgcgccctgcccgggggcggcccccccagccccatggaggtctcccggaggaaggcgccgccgcgccccccgcgccccgcagcgccactgcccctgctcgcctatctgctggcactggcggctcccggccggggcgcggacgagcccgtgtggcggtcggagcaagccatcggagccatcgcggcgagccaggaggacggcgtgtttgtggcgagcggcagctgcctggaccagctggactacagcctggagcacagcctctcgcgcctgtaccgggaccaagcgggcaactgcacagagccggtctcgctggcgccccccgcgcggccccggcccgggagcagcttcagcaagctgctgctgccctaccgcgag

SEQ ID NO: 20936 - DNA, 31 bp, Homo sapiens; identical to SEQ ID NO: 5744
  chr12:94543992-94544023
  binary

SEQ ID NO: 20937 - DNA, 86 bp, Homo sapiens; identical to SEQ ID NO: 5745
  chr12:94544052-94544138
  binary

SEQ ID NO: 20938 - DNA, 391 bp, Homo sapiens
  chr12:99287760-99288151
  hyper
cgcaaattggaatttcgctggaaacactgacccgaccttcaccgaagcagcaaatcgcagtctctgctgctctgctcctgctctccaaggcttaacattggaaagtccatgcccacgtccccctctaattaatcaatgtagaaagaaatacgagggaagagagagggagcacactccacaccaaccttgccagcttctattcttcctgctattccttaaaggcgatgcacagcgcacctggaaattacgtggacttggcatggctttttaatattaaagacaaacgacctttggaaaatatacactgttaaagtcaaaccatttggagagacacccagcaatttacctcctcaaactcctcggaaccccaagaatgaggaaaggaaatgga

SEQ ID NO: 20939 - DNA, 127 bp, Homo sapiens; identical to SEQ ID NO: 10271
  chr13:103046539-103046666
  binary

SEQ ID NO: 20940 - DNA, 223 bp, Homo sapiens; identical to SEQ ID NO: 6864
  chr13:114776788-114777011
  binary

SEQ ID NO: 20941 - DNA, 72 bp, Homo sapiens
  chr13:25592172-25592244
  hyper
cgcctcccgcctctcagcagaaacgcccaacagaaccgttagaaccagcgagcacgcgcaccttagccggcc

SEQ ID NO: 20942 - DNA, 71 bp, Homo sapiens; identical to SEQ ID NO: 9075
  chr13:27131483-27131554
  hyper

SEQ ID NO: 20943 - DNA, 309 bp, Homo sapiens; identical to SEQ ID NO: 16393
  chr13:30707770-30708079
  hypo

SEQ ID NO: 20944 - DNA, 319 bp, Homo sapiens
  chr13:44361226-44361545
  hyper
gcggggaaggaggatcgaacgcgtgtctcgcttggagaagctgcccacggggcggcagcagaggaggaggggaagtcagcgaggcgcgctagggctccggatcccagcccggcagagccgagcggagcgcgcagccaccgatgcagcagaggcggcgcccgcagcccacggtcgcgctgccccctctcgggaggggccgaggccgctcgctcccgccaccgccgccgcggtcgggactgctctactgggagcgggggaaccgagagagggaccgcacggttgctacggcgaccttggaggggccgggcccgctgaaggg

SEQ ID NO: 20945 - DNA, 62 bp, Homo sapiens
  chr13:44361578-44361640
  hyper
ccaggctggagcgggcgtgttacaggattgtgggcttggggtagacggtggaattgggccgc

SEQ ID NO: 20946 - DNA, 133 bp, Homo sapiens; identical to SEQ ID NO: 5939
  chr13:46960952-46961085
  hyper

SEQ ID NO: 20947 - DNA, 135 bp, Homo sapiens; identical to SEQ ID NO: 5940
  chr13:46961683-46961818
  hyper

SEQ ID NO: 20948 - DNA, 196 bp, Homo sapiens; identical to SEQ ID NO: 5942
  chr13:67805438-67805634
  hyper

SEQ ID NO: 20949 - DNA, 110 bp, Homo sapiens; identical to SEQ ID NO: 18363
  chr13:96205363-96205473
  hyper

SEQ ID NO: 20950 - DNA, 280 bp, Homo sapiens
  chr14:100259401-100259681
  hyper
cgcccgccgcgccccgcagcccctgagcccccgtgcgcggaggcggggcctggccaaggggacagcgggcggcagacgcgcccctgcggctcccaggccgcccgggccgcgctccccgcggggaaagaggccgcaggcgcggggaggctcggccccgccccgccacgtccccctcccggcccgggccccgcggccgccgaggccgccccctcgcgggcggagcgggcgctgggctcgcgcggctgcggcggcggcggcgggcccggggttgccatggtaa

SEQ ID NO: 20951 - DNA, 41 bp, Homo sapiens; identical to SEQ ID NO: 10295
  chr14:100438971-100439012
  hyper

SEQ ID NO: 20952 - DNA, 85 bp, Homo sapiens; identical to SEQ ID NO: 6896
  chr14:105472075-105472160
  hypo

SEQ ID NO: 20953 - DNA, 439 bp, Homo sapiens; identical to SEQ ID NO: 12300
  chr14:36003004-36003443
  binary

SEQ ID NO: 20954 - DNA, 243 bp, Homo sapiens; identical to SEQ ID NO: 16426
  chr14:42076386-42076629
  hyper

SEQ ID NO: 20955 - DNA, 224 bp, Homo sapiens; identical to SEQ ID NO: 9121
  chr14:51562012-51562236
  binary

SEQ ID NO: 20956 - DNA, 509 bp, Homo sapiens
  chr14:53417820-53418329
  hyper
ccgccccctctgtccgagcctggctgggctgggcgcgctggctccctccttcgccgcccgcagagctgccctgagcgggtccggccggcctcgcctctgcccccgccctcccggcgccgcgctcgggggagggggctgcgggtcccgggcggggcggggcggcgtggggcggggcggcgcgggggtggcggggggcgcggcggggcggcaatctcggccccgcggagcgctgcccttttatggaaatgaaggacccggctcaggaattgaatccaacatccgggctctaggcggcgggccctgaggagggggagcgggggagcgcgggcggcctttcccggggcgctggtggccggcggggcgtctagagctcaggctggactggggcccccgcggcgtgtgtccgcgctggcagcagggagagggggcttgtccgtgagaaacggccccaggaaattcccagggcaaggtcgttttcggagaacaaagtcctctcgccccctccccac

SEQ ID NO: 20957 - DNA, 50 bp, Homo sapiens; identical to SEQ ID NO: 6906
  chr14:65239794-65239844
  hypo

SEQ ID NO: 20958 - DNA, 188 bp, Homo sapiens
  chr14:92980770-92980958
  binary
cgctgggcgtggggtcggagacccggacccccgcaactttgggtgcccgcggcccaacagctgaccggccctcctggaccgagggtccactgggcccttttcccgccgcccctctgccctggccgtagacggtgaccttcggaccggccctggtcgagcctagtgcttgggtagggtccagggcgcac

SEQ ID NO: 20959 - DNA, 210 bp, Homo sapiens
  chr14:96505691-96505901
  binary
tggagccagaagcccagagacagccgagtgcgccgtgcggtctccggacgctcgctgctcagcccgatccccgccaactgtgcaggcggctgacccgcagcggcagcggcagcagcgaggactcgagcgctggctgcagcgacaccatggatctctcctttatggccgcgcaggtaacggggcgtcccccccacgcgccccgggccgcca

SEQ ID NO: 20960 - DNA, 291 bp, Homo sapiens
  chr14:96506053-96506344
  binary
ggggcgggctgcgcgccccgcacccccgcggctcgagctgttcccgcccgggcccctctcgttggcaggaaggctgcgaggagcctgggcagcccgagtcgcccccttctgcccatcccccactgctgtcccccttctggggtcccggagccctccaaggccgggccagctcagacccgcgcgaacgtggatgggcacacagtctcgcccttccccactctgttttcccgaggcgccagtaatctgtctcttgccggtgacctcgggcgccccctttgccgccgcctgagg

SEQ ID NO: 20961 - DNA, 78 bp, Homo sapiens; identical to SEQ ID NO: 10305
  chr15:28351681-28351759
  hyper

SEQ ID NO: 20962 - DNA, 61 bp, Homo sapiens; identical to SEQ ID NO: 5968
  chr15:29561185-29561246
  hyper

SEQ ID NO: 20963 - DNA, 1045 bp, Homo sapiens; identical to SEQ ID NO: 9148
  chr15:29561316-29562361
  hyper

SEQ ID NO: 20964 - DNA, 144 bp, Homo sapiens
  chr15:48009738-48009882
  hyper
cgagtttcaggattctatcaaggaagccaagacctaaggagacagagggatatctatttttacaatatttttctttattttctttcttccttgcgcgtggcaagcttttttttttctttttcttttttcttaccagcctccccc

SEQ ID NO: 20965 - DNA, 121 bp, Homo sapiens
  chr15:48009969-48010090
  hyper
gtgtgtgtgtgtgtgtgtgtgtgcgcgcggtgggggtcggaacctgagatcccgaatcgctgtgtgtgtgtgtgtgtgtgtgtgtgtgtgtgtgtgtgtgtgtgtgttgccactggacagt

SEQ ID NO: 20966 - DNA, 208 bp, Homo sapiens
  chr15:48010897-48011105
  hyper
gctcggtgctgagatgtgttacgttctcatctccccatcaattatggatggaaacaaataaggaagagtcaattttgctgagccccttctccggcaacgagaggcgttctgcagccgggagggagccgccgctcgcgccggcagccgctggcaggggcatggtgaggaggaaggtagggaaacttttatttcccgtcttgacagcggc

SEQ ID NO: 20967 - DNA, 119 bp, Homo sapiens; identical to SEQ ID NO: 5970
  chr15:48469946-48470065
  hyper

SEQ ID NO: 20968 - DNA, 53 bp, Homo sapiens; identical to SEQ ID NO: 5971
  chr15:48470094-48470147
  hyper

SEQ ID NO: 20969 - DNA, 159 bp, Homo sapiens; identical to SEQ ID NO: 5972
  chr15:48470215-48470374
  hyper

SEQ ID NO: 20970 - DNA, 78 bp, Homo sapiens; identical to SEQ ID NO: 5755
  chr15:48936649-48936727
  binary

SEQ ID NO: 20971 - DNA, 228 bp, Homo sapiens; identical to SEQ ID NO: 9158
  chr15:53078992-53079220
  hyper

SEQ ID NO: 20972 - DNA, 99 bp, Homo sapiens; identical to SEQ ID NO: 5973
  chr15:53080201-53080300
  hyper

SEQ ID NO: 20973 - DNA, 160 bp, Homo sapiens; identical to SEQ ID NO: 10313
  chr15:53082144-53082304
  hyper

SEQ ID NO: 20974 - DNA, 1270 bp, Homo sapiens
  chr15:60883782-60885052
  binary
cgcgactaacccgcgcccgtcggccctcaccacggtctaacctccgcccctgcccgcggatcccgtgggctgccgagttcctccccacctccatccaccagccaaagtgtcaagcggggtgcgccgcggctccctgggccgcccagagcgtcttggcacgctcgaggcgcccgtctcgctccggcccgcgcgctttcggaagtggccgcggcgggacacagcgcgggacacagcgcggacctgcggcacttgcccggccggcggccgctgaggcgctcggggacgcaggggcagggcgcaaggcctggggcgctgaccagtccccggggatgacatcgcgacaacgcgcacgcacggccctgcccggccgcggcgcctccccgacctaggccggagctgtcccgggtgcgggccctggggaccggccgcgggcgtccccggcttcctctgaactccgcagaccctccccttcctttccgaagcgcggcgactcccggcaaactttcttttgggagacccgcccggtgccaagcggacccaagagactgacaggagccggagggggcagcagagggggatccaccccgtgcgcctttgccccccaatcggaggcaggccgatcccgtggccgggctcaggtggcgccgcggcggtggcccagaaggccctggcagggcccccgcgccgagccccgggcagtacgtgcgttcgggcaggcgcgcccacccctccccctgcgcgccctcctccccgccccccggagccgccagcccacccggccccggcggggcgcccgggctcacctttcatcgctgcgatcacaaaatacatcatttaagccgcggtgcggagagcgcagggagagcggatggtccgaccccggagccccctctgccgccgccgcgccgccgccgcccgagccacagcagcagctgccgcagctgcccgcccgccgagagccatcccgagccataagaggctccatgtgaccggctgacatcacggccgccgctctgtttacaccgcgcccctccgcttcctcccggggcgggaggcgggaggcgggaggcgggaggcaggcgcgccccagcgccgcgccccgccccgcccccgcgggcaggtgagtagcagcggcggctctgctggcccaccccggccgggcctgccctcccgcgccccgggccctcgcccgggcgcccgccttcccctcgccttcgggatcacctgtggccgccggtcgcttttctgcacgcagcgccccgcggaacgc

SEQ ID NO: 20975 - DNA, 40 bp, Homo sapiens
  chr15:61520369-61520409
  hyper
cgagagggaaggattcccagagcagaaataagtttcggtg

SEQ ID NO: 20976 - DNA, 59 bp, Homo sapiens
  chr15:61520497-61520556
  hyper
ccagcctgggcgccgggctccgaacccccggtctgcaaacttgcgcatctcccctcgcc

SEQ ID NO: 20977 - DNA, 179 bp, Homo sapiens
  chr15:61520576-61520755
  hyper
cgaacagctcgcccgcccgcaccccgcttccttcggcccttccttcaaatcccaaacgcaccgccgtgctccaaagaaggtgtccacgtcgcccccagaccccggagcgccccctctccacccccgggacttcccaggtcgctcactcctcccgccccccgcccagatctgagagggac

SEQ ID NO: 20978 - DNA, 61 bp, Homo sapiens
  chr15:61521496-61521557
  hyper
ggtaccaaaaaaaaaaaaaaaaaaaaaaaaaaaaaaaaaaaaaaaaaaagaaggagaaggc

SEQ ID NO: 20979 - DNA, 44 bp, Homo sapiens
  chr15:61521578-61521622
  hyper
aaaagcaggcggcggcgggcgggcaagcaaaagcgcgagggagc

SEQ ID NO: 20980 - DNA, 376 bp, Homo sapiens
  chr15:74725128-74725504
  binary
cgaatcggactgggggcggggaggcatttgtgtgcaatgcaggggaggggagatcagttcctcgcggcagaaagcctcaaacccccgcctaaccggctttctgtcccatagtacagggtctaaactgaggtgccctgggggagactccagtcccccaggttcttattatctaccctggcctaaaggctgcacccccgccctagatccaccgcctgggggtcccaacggccgtgccccacccaacgggcactgccccccaacgctggagccgatttctggtgacaactgccacgtgcgggcaaggggggagcggccggtcccggcattgctgaggcagcgccctggtaccccaagccgccgcaccgcaccatgtccc

SEQ ID NO: 20981 - DNA, 675 bp, Homo sapiens
  chr15:74725548-74726223
  binary
cgggccggggcgggggcgggggcaggcggcggggtctttgttcccgctgccgaagcgcggcggcggcggcaaggggtccgcgccccccttgccggcccagcctgcgccccgcgcgccagcagagcccgcagctcaaaaggagggtacccgggttggggtcccaggcggggaaaggtcctccgccgaagcccccgagccagaggacccagagtggctcggggccgagagaggggcccgccccctcccctggcgcccgggcgttgcggctcctggctgccagggacttggtgcgacttagccggggctccggcccccgccgctcgctcgccgcagcgttacagccggctctggtgtgccagcgtgtacactcacacacactcacccaaacccacacgctccacgcggggacagcgcggggacagcccgggacccgcagagctgcgcgcacgcactccctccgggtgcagcacactccgcacccgccccgcgcagcgtctgatcccgcgcctgaccggccgcgcggcgccgcctacctttccagacggcgaagatgcggggtccgctccttaggtggccctgggcggaggcggcggccgcccagagcagcagcagcagccgcagccgcagcggaagccccaaccgagccggcgggccagggacgcgggcgcgcggtgc

SEQ ID NO: 20982 - DNA, 61 bp, Homo sapiens; identical to SEQ ID NO: 9167
  chr15:79383268-79383329
  hyper

SEQ ID NO: 20983 - DNA, 62 bp, Homo sapiens; identical to SEQ ID NO: 9168
  chr15:79384146-79384208
  hyper

SEQ ID NO: 20984 - DNA, 74 bp, Homo sapiens
  chr15:83377928-83378002
  binary
cgccttcctgaagaggccccaggctcaagctcaagttcgctgactcagacccctcccccacatttttgggaagc

SEQ ID NO: 20985 - DNA, 126 bp, Homo sapiens
  chr15:83378087-83378213
  binary
ctcgaaactgagctggcccatcccccgccagcccctatctgcccccctccgcgtcctaggccggcccctggagccggggtgccagcgctgcccgcgctgggccggggctccaggccgcaggagggg

SEQ ID NO: 20986 - DNA, 55 bp, Homo sapiens
  chr15:83620900-83620955
  hyper
cgtggagaacgacaaactgcttagactcacacaggccctggagttgactgcgccc

SEQ ID NO: 20987 - DNA, 319 bp, Homo sapiens
  chr15:83621407-83621726
  hyper
gccgctccattccgcggggctgcgcggctgccactgctgccactgccgccaccgccgccaggcgcgggcgggcgggggctgggcggccgcgctggggcggtgcccgccccgccctccccagccgctacccccgcccggctccttacgtaacctcgtggcccccgggccgcggcagcgagccaagaggcggggggcgcagcactgtgtgcaccgtcccccgcgcagccgcgcagtcgccgcttttctcccgggccacccagtcctcggtgccggccccgcgttggcgcgcccccgccccacgccgacccggggccctggc

SEQ ID NO: 20988 - DNA, 128 bp, Homo sapiens
  chr15:83875521-83875649
  hyper
cggggcaccgggaatcgcgctcagggaaaactcaacaagtctagaaggcaaagagatggatgaatgactgccaagaggctcccgctggcctctggatgaccactaccactttccaggatttactgccc

SEQ ID NO: 20989 - DNA, 60 bp, Homo sapiens; identical to SEQ ID NO: 10320
  chr15:83951722-83951782
  hyper

SEQ ID NO: 20990 - DNA, 228 bp, Homo sapiens; identical to SEQ ID NO: 10321
  chr15:83952822-83953050
  hyper

SEQ ID NO: 20991 - DNA, 35 bp, Homo sapiens; identical to SEQ ID NO: 9169
  chr15:89942592-89942627
  hyper

SEQ ID NO: 20992 - DNA, 135 bp, Homo sapiens; identical to SEQ ID NO: 16466
  chr15:96960242-96960377
  hyper

SEQ ID NO: 20993 - DNA, 100 bp, Homo sapiens; identical to SEQ ID NO: 16467
  chr15:96960409-96960509
  hyper

SEQ ID NO: 20994 - DNA, 289 bp, Homo sapiens; identical to SEQ ID NO: 16468
  chr15:96960826-96961115
  hyper

SEQ ID NO: 20995 - DNA, 451 bp, Homo sapiens; identical to SEQ ID NO: 10326
  chr16:19566591-19567042
  hyper

SEQ ID NO: 20996 - DNA, 400 bp, Homo sapiens
  chr16:25078047-25078447
  hyper
cgggcaggcggcgccgcaggaagtgaccgggcaagaacgggggtcgccgcccagctcggccttctggtctctgcgccctcggcctggggctccaggccacaaggggaggccgtgctgggcgggcccgaagggggtgggcggggccccggaagagacgtgggggcggggccaacggaccgcggaggcggagccgctacagtctgggcgctggagcggtgggagcagcgctcgtccgccgttggggcccccagcccgcgcgcgtgaagcagctagccgaccaagccccggaaggcgagtgccggagggggcgggacagctcctccggggccagcgggcaccaggcttgggggctgaggcccagcggcccgagaccaactgggctgaccgaggccgcctcccc

SEQ ID NO: 20997 - DNA, 167 bp, Homo sapiens; identical to SEQ ID NO: 17482
  chr16:25704644-25704811
  hyper

SEQ ID NO: 20998 - DNA, 54 bp, Homo sapiens; identical to SEQ ID NO: 6957
  chr16:30826509-30826563
  hypo

SEQ ID NO: 20999 - DNA, 66 bp, Homo sapiens
  chr16:49316711-49316777
  hyper
cttttctgttttgcacttaaaatttacattttgcatccgtactttttatttactgtgcacccttac

SEQ ID NO: 21000 - DNA, 156 bp, Homo sapiens
  chr16:49316844-49317000
  hyper
cgatttttcgagaataatttttaccctaagtggattttcgtgccacgcatggacttggaactacacacacgtagtccaaaacgtgaaagtcaaaatgcagctttgccaagtggcagggagaaaggagagctgagaagatgaggagaggaagggcgc

SEQ ID NO: 21001 - DNA, 61 bp, Homo sapiens; identical to SEQ ID NO: 16492
  chr16:56225663-56225724
  binary

SEQ ID NO: 21002 - DNA, 94 bp, Homo sapiens; identical to SEQ ID NO: 6449
  chr16:67313759-67313853
  hypo

SEQ ID NO: 21003 - DNA, 115 bp, Homo sapiens; identical to SEQ ID NO: 6450
  chr16:67313958-67314073
  hypo

SEQ ID NO: 21004 - DNA, 79 bp, Homo sapiens; identical to SEQ ID NO: 10341
  chr16:71715666-71715745
  hypo

SEQ ID NO: 21005 - DNA, 82 bp, Homo sapiens; identical to SEQ ID NO: 16500
  chr16:77246930-77247012
  binary

SEQ ID NO: 21006 - DNA, 729 bp, Homo sapiens; identical to SEQ ID NO: 19330
  chr16:77756212-77756941
  hyper

SEQ ID NO: 21007 - DNA, 49 bp, Homo sapiens; identical to SEQ ID NO: 5986
  chr16:77822069-77822118
  binary

SEQ ID NO: 21008 - DNA, 68 bp, Homo sapiens; identical to SEQ ID NO: 9212
  chr16:80574541-80574609
  hyper

SEQ ID NO: 21009 - DNA, 72 bp, Homo sapiens; identical to SEQ ID NO: 9213
  chr16:80575052-80575124
  hyper

SEQ ID NO: 21010 - DNA, 31 bp, Homo sapiens; identical to SEQ ID NO: 9214
  chr16:80837324-80837355
  binary

SEQ ID NO: 21011 - DNA, 539 bp, Homo sapiens; identical to SEQ ID NO: 9215
  chr16:80837424-80837963
  binary

SEQ ID NO: 21012 - DNA, 762 bp, Homo sapiens
  chr16:80838193-80838955
  hyper
tgttgagtaaactgtgtttttgcagaatgacaggcttgggggctgcctatgcgcagaatcagagcgggcggcggcggggctggcgtaaccggcagcagcggcggcggcggcggcggcggcacgagcgcgggcagcagcgacggccgcgcagcgcgcccgggaggcacggacgcggcccgagcgccgcggcccccgcgacccggcgacccggcggcggtggctgcagccggcaacggctcgccccggcgccgcctgcaggaagccgcccggcgcccgccgccggcccggacgctgctgccactgggcgagtccccgccccccgggagcccggcccggcccccggggcggggaggcgggggctgctgcccggccgcgccccgggggaccggtcccagagtcgactagcgctcgggcccgccccgccaccccgggccggcttcgggagcagctggcggggcccccggggggcggcgggccaggtgcccgccgggtgcgcccgatctggggccgcgaaggggcggccggggagccaggtagagggctgcggctgcagacctcagggaaggggccccagccgagccccgccggcccggggtccccacctacctcctccaccctcgaggggagtggacgccgcctgggagacctggcccctcggggctgcgcggcccctccctccaggctgggttgtaagatgtggaggccacagggaggaaggatgaaatggcccatccagaggcaccatggggatccaggacaggc

SEQ ID NO: 21013 - DNA, 246 bp, Homo sapiens
  chr16:86543378-86543624
  binary
cgcgtcggggaaggccccggcccagggagcgtttcccgccgcgccgcccgggcggggaaggcggggtccagcgcgcaccggggctgaaccgcgggcggagggcgcattaacacttgctcgccaggttggtggaggcggggcggattctgctggcggccgcggggcggcgagagtgggggctctttaagcgcccaccaacgcgggggcccgaggggggcagggacggagggagggaactccgggagg

SEQ ID NO: 21014 - DNA, 353 bp, Homo sapiens; identical to SEQ ID NO: 12369
  chr16:86543822-86544175
  binary

SEQ ID NO: 21015 - DNA, 67 bp, Homo sapiens
  chr16:87594891-87594958
  hypo
cgccttcatctttcgtcaacatctgtccaaatagtacctttaaaaatcattgccaaagcgtttgctc

SEQ ID NO: 21016 - DNA, 400 bp, Homo sapiens; identical to SEQ ID NO: 12375
  chr16:89006909-89007309
  binary

SEQ ID NO: 21017 - DNA, 92 bp, Homo sapiens; identical to SEQ ID NO: 12376
  chr16:89007789-89007881
  binary

SEQ ID NO: 21018 - DNA, 374 bp, Homo sapiens; identical to SEQ ID NO: 12377
  chr16:89007995-89008369
  binary

SEQ ID NO: 21019 - DNA, 489 bp, Homo sapiens; identical to SEQ ID NO: 8079
  chr16:89900815-89901304
  hypo

SEQ ID NO: 21020 - DNA, 153 bp, Homo sapiens
  chr17:14203859-14204012
  hyper
cgaatgagtccccggcgtgggttggggggggggttccagtgcctagtgcatctcctaccctgctctccctcctccaaccgcctccctactctgcaacacgtaagcatcacgaaacctcctgcgaaacatctggatggggactggtgtcccaac

SEQ ID NO: 21021 - DNA, 261 bp, Homo sapiens
  chr17:14204242-14204503
  binary
ccacaccccctcgtcctgggagcgggttggctgctgagctctcggagaagcgcctgtatttgcatggcgttcggggtttttggtaggtagagcagcccgtcactctggaaggccgggaccgcccactccacctcggtccacagctctcttcctgcgcagttcgcctctgcagcctctgcggggaagtgccggggctgctcgaggctcagttcttaggactgcaaggaggcagccccggcgtgcggcggtgcgcacagtcta

SEQ ID NO: 21022 - DNA, 169 bp, Homo sapiens
  chr17:14204834-14205003
  binary
catggggcagcgcctgagtggcggcagatcttgcctcgatgtccccggccggctcctaccgcagccgccgccgcccccgccgccggtgaggaggaagctcgcgctgctcttcgccatgctctgcgtctggctctatatgttcctgtactcgtgcgccggctcctgcgcc

SEQ ID NO: 21023 - DNA, 33 bp, Homo sapiens; identical to SEQ ID NO: 12387
  chr17:29718746-29718779
  binary

SEQ ID NO: 21024 - DNA, 64 bp, Homo sapiens; identical to SEQ ID NO: 9245
  chr17:45330951-45331015
  hyper

SEQ ID NO: 21025 - DNA, 120 bp, Homo sapiens; identical to SEQ ID NO: 9246
  chr17:45331313-45331433
  hyper

SEQ ID NO: 21026 - DNA, 90 bp, Homo sapiens; identical to SEQ ID NO: 9247
  chr17:45331675-45331765
  hyper

SEQ ID NO: 21027 - DNA, 61 bp, Homo sapiens
  chr17:47575254-47575315
  hyper
cagtctggctcaagcgcctcgcttcttccctgggggaccgcgtggggaggcgggaataatc

SEQ ID NO: 21028 - DNA, 216 bp, Homo sapiens; identical to SEQ ID NO: 9255
  chr17:56327007-56327223
  binary

SEQ ID NO: 21029 - DNA, 48 bp, Homo sapiens; identical to SEQ ID NO: 7019
  chr17:57297129-57297177
  hypo

SEQ ID NO: 21030 - DNA, 146 bp, Homo sapiens; identical to SEQ ID NO: 9258
  chr17:57787150-57787296
  hypo

SEQ ID NO: 21031 - DNA, 112 bp, Homo sapiens; identical to SEQ ID NO: 7021
  chr17:61777761-61777873
  binary

SEQ ID NO: 21032 - DNA, 76 bp, Homo sapiens; identical to SEQ ID NO: 7022
  chr17:61778423-61778499
  binary

SEQ ID NO: 21033 - DNA, 212 bp, Homo sapiens; identical to SEQ ID NO: 16557
  chr17:73613151-73613363
  hypo

SEQ ID NO: 21034 - DNA, 527 bp, Homo sapiens; identical to SEQ ID NO: 10386
  chr17:73613424-73613951
  hypo

SEQ ID NO: 21035 - DNA, 84 bp, Homo sapiens; identical to SEQ ID NO: 17554
  chr17:76100954-76101038
  hypo

SEQ ID NO: 21036 - DNA, 632 bp, Homo sapiens; identical to SEQ ID NO: 10389
  chr17:76992727-76993359
  hypo

SEQ ID NO: 21037 - DNA, 142 bp, Homo sapiens; identical to SEQ ID NO: 10390
  chr17:76993419-76993561
  hypo

SEQ ID NO: 21038 - DNA, 261 bp, Homo sapiens; identical to SEQ ID NO: 16565
  chr17:76998502-76998763
  hypo

SEQ ID NO: 21039 - DNA, 632 bp, Homo sapiens
  chr17:8533862-8534494
  hyper
gtcctccagagccgcccgggacccctcagcccaggagccattcctccctccacaaactgtcccccagccctgggccgtgcactcggacccgggtagccgcacctctcaccttcagccgaagatggtggcgcgggcgcacgtccccagccgcgaccacagatccagcgcctcagtcccaaacccaccgctgcctccgccgggctcctttagcactgctgctcggggctgccccacccacccctaccctcattgggccagctccacgcccatcaccgccgcccccagacccactggttggtttgcgcgcccatctccaagggaagacgttagcaacccgaacgaagctaccttcccgagtccggctccctccacccacctggaatgacgctcattggctcccgctcccagcccaggccacagaggccccaatctcatgggctggctcttacgcccgtcataggctccgggaggtgcggccggggcagtggcgcgggattggctggctcgtgcgtagatggacagctgaggctggctgaacgcccggcgatcccgcgaggctgcgggtgcgggccccgcggcggccggcgcgctgcgctgacattggctgtgcgggccgcggggcaggtgggccg

SEQ ID NO: 21040 - DNA, 350 bp, Homo sapiens
  chr17:8534582-8534932
  hyper
cccctgtgcttgcggcagccggcatgtaccgcagcgggacggggttccaccgcggagtcgcgggccctcagcgttgcctgcaggggcggggcggagcgcggtccagagtcctgacgtcacccccggggctgcgcggggttggggccgcggcgctgcgactcacctgcagtgggggaaggaacgcgggggagggcgctgctccgcccatgcgcacagggtttggcccgggacccggctgcgctccacgctgcggccactgtcccgaccccggccccaggcggactctgccgggatcggccgagcgccaggcgcaggacacggtcctccaaggtcgcagttttggtgttagc

SEQ ID NO: 21041 - DNA, 928 bp, Homo sapiens
  chr18:13217150-13218078
  binary
cgcccgactgcacgtctctaggcggctgcccgaggtcccgcggcccgtggtgcacacgcagcccgcgaggtactctgtgctggaacgcgcccccagcctcccgaaaccgcccccggcctgcgggcagcgagccggctcctccgggcgcccctgcagcgtactctgcgctcggcttggagttccccgtgcggccggcggtgggcgcgcgccacgcgggcccgagccctgggcgggagtgcggccccgggtcccgcggcctcggcgcccgcgcgcctcccccactgcccacccccggcctccgggcccgccccccgcaggggtcggcgcagcctgtgagccggggacccctgagcccccgccacggcggccccggtacccgcggcctggccgcgcgccgggtccccaccgcggagtgggaaggaggaggagagactggaggagttggagacagacacagccgcggcgcgcagtcacggctggagacagacggcggcgacggcggcgggaggcgggacactcccccctccggcgactggaggcgggacacctccccggcggccgcagcgccgcgtcccctctctccccgcgctgaggctgcggaccgggcccggcgggattagcaggcgagtgcgttggccctgcccgctccgcgcgccgccgcggccggccggggatcccctgcaagccactgagccgctgccgccgctgcagccagacaggctgcgggtgcctgggaaagtggaagcagggcggggagcgcgggggaggcccgggggtgaggtcctcagctcttaaagaaccccggcgcgccgcgctccccgccggcccgccgcgcgccccctgccgcgccccgcacagcgcccctccccctggccagcagggccggtggccgcggagccgcactgcgggcagtccccgcctccgctcc

SEQ ID NO: 21042 - DNA, 122 bp, Homo sapiens; identical to SEQ ID NO: 12437
  chr18:24130266-24130388
  hyper

SEQ ID NO: 21043 - DNA, 113 bp, Homo sapiens
  chr18:24764503-24764616
  hyper
cgatcgcacctggcctcccggtccccctaacttccctcccacctctcccgcagcctgcgcctgagcctgagccaggtcgcggagtttgagactgacgcaaaggaggcaccccc

SEQ ID NO: 21044 - DNA, 456 bp, Homo sapiens; identical to SEQ ID NO: 16584
  chr18:25756040-25756496
  hyper

SEQ ID NO: 21045 - DNA, 202 bp, Homo sapiens; identical to SEQ ID NO: 5763
  chr18:25756986-25757188
  binary

SEQ ID NO: 21046 - DNA, 238 bp, Homo sapiens; identical to SEQ ID NO: 8157
  chr18:2848166-2848404
  binary

SEQ ID NO: 21047 - DNA, 756 bp, Homo sapiens
  chr18:42258983-42259739
  binary
cgcccagtttcgagagcctatcacagctcacgtctgggcgcgcagtacccccccgacactgctcctgttgtgtcagatagtggcagtgttgagcccaggaatacgcgcggagcccgcggcgatccccgcggccgctcagtcttcgcggcggactccggcgcgcaggagccactgggccgcaagggcgccggggagcgggaggggcgctgggggcggcaaggggtcccagatcccaggccacgaactgttttccttttccccgggcaagagccccgctcccttcaactgacagaaattcactggggcaggggggcgagtggggagagaggtcgctcagggctcgctactggctgcgcctcccccggctctggtctgggaagcggctctgggccctccgggcgagcagcttgggcgccggcgccccctgcgaggaagatcgcggggtgacggtcggtacccgttcggctgggccgcgctgccgctccgatccacctcccttccgcgcccgcgccctcccccttcctttcactaggagtccgggattcggagagggcgcgggaggcaggcacacgggcccgaccccactccagcgctcaccggggacgcgggcgggcggcgacgggacgcggcgggggcgcggggcgggcgcggccatggagcagcagcggcggcggcggcggcggcggcggcaacactagcgaccgcgggcggacgagcgggcgggcagggccgccgggctcagcggaccgaactgca

SEQ ID NO: 21048 - DNA, 121 bp, Homo sapiens
  chr18:42259821-42259942
  binary
atcctttgaagaaaagcaaaaaaaaaaaaaaaaaaaaaaaaaaaagcaaaaaaagaaaaagcattgatcggagagacggggatatatatatatatatatatatatatatatatataaaatt

SEQ ID NO: 21049 - DNA, 1164 bp, Homo sapiens
  chr18:42260083-42261247
  binary
tgatatctctctccataaatcggtggcgcggcggaggcggcagagtcgggcgggaagcgcggggccggccggggcgcccgccgctcgccgccgcctccgcgcgcccgggggccccggcgccccccgagctagggcggccagctcgcggctcgccgtttgacagatgctcatcgccatggagttgccgcagcagcacctttgggggctcgggcgagcgacgggagccgggatctgagcgagcgccggggccagcggagccggagccgccgggacatgggtgagcacgcgcggcgaccttggcccgggagcccgggcgcccagcctccctccgcgccgcgggcccccgcactcccggaaccgggggcgacgtgtgtgccctgcatgcaaaagttcacgtcgccttgctgggtctttgactttgcacccggcgggaagggggagaccgggccgagggggcgggatgccggtccgggcgaggttgcaggagatgggcgcgattccggcgggccggcgggtgggcggcgatgctggctcaattggagtggctcgttggtggcggcgatggtggaagctttgggctggagggctgggagcttattgagtttcgcctaatctgatctaccccccctccgccccccgccttttgcaccctccctcggtcctgcagccggctggcggggctggcgggtttggcgttggtggagtggactcgggagggggagggggtaaggaaaggggtgggaaggcaggattttttttttctctctttgtaacttgcaggttaagtggagctagagagctacattgtaacctagttggatttttttggggggggaatgtatcagaatctaacgtgtcgttaatagaaagaagaacaggcaagaagtggtccagccggcgaaggttggtgtgtgcttgtgttgtgcctgtgtgttagtctttttcttaaaaatcttaatcaatggatttgagtctctttcttgtgctctctggttttgggactctgaaaagataggaattcccttaaaagcagacgaatgcctttttgaaagcacgcattgtgtgcgtttctagaggagccgtgggcttgggaatgaacggcaggcttccccgttcggtggtttccagtgggaaatcactccggaaagggaacccttcggtatc

SEQ ID NO: 21050 - DNA, 190 bp, Homo sapiens
  chr18:43914608-43914798
  binary
gatcgaaaggagaaagatacatgaccgtgtgtgtgtgtgtgtgtgtgtgtgtgtgtgtgtgtgtgtgtgtgagagagagagagagcgcgcgcgcgagagcatgcttggttttctgtggtttgctttttttgaggtatatgtgtgttttgtgttatgtgtgttttgtattcattttttgttcattagtacc

SEQ ID NO: 21051 - DNA, 80 bp, Homo sapiens; identical to SEQ ID NO: 6007
  chr18:44335955-44336035
  hyper

SEQ ID NO: 21052 - DNA, 448 bp, Homo sapiens; identical to SEQ ID NO: 16594
  chr18:53256017-53256465
  hyper

SEQ ID NO: 21053 - DNA, 53 bp, Homo sapiens; identical to SEQ ID NO: 8159
  chr18:53257322-53257375
  binary

SEQ ID NO: 21054 - DNA, 45 bp, Homo sapiens; identical to SEQ ID NO: 8160
  chr18:53446783-53446828
  hyper

SEQ ID NO: 21055 - DNA, 116 bp, Homo sapiens; identical to SEQ ID NO: 9292
  chr18:5896132-5896248
  hyper

SEQ ID NO: 21056 - DNA, 101 bp, Homo sapiens; identical to SEQ ID NO: 7067
  chr18:60985398-60985499
  hyper

SEQ ID NO: 21057 - DNA, 75 bp, Homo sapiens; identical to SEQ ID NO: 7068
  chr18:60985973-60986048
  hyper

SEQ ID NO: 21058 - DNA, 82 bp, Homo sapiens
  chr18:61603403-61603485
  hyper
cgagcgcaatgcagcgcgcgttcctcctcctgggcgcccatcctcggctgctgcctcttcctttcgggccccgggacctgac

SEQ ID NO: 21059 - DNA, 201 bp, Homo sapiens
  chr18:61603701-61603902
  hyper
ggtctccttagggtgtatgaggtgtcccttgacccttctctccccgaagtggacatcaaggtgatcctccccccatgacctcctacccgtggcatcctgcgacccccacccccgctgccagcccagtcctcccaggagccctcgaggggagcacggggttggctgaggggatgggggagcttccgcggacacagtccagcc

SEQ ID NO: 21060 - DNA, 208 bp, Homo sapiens
  chr18:61603985-61604193
  hyper
ggcgggcgagttcccgcaaggccagcgcggaagggaagaacacggtgtggggaggcaggggctcaggagggcgccatcagctggtgctcagagcccggaggaaggaactccccccggagttggggggggtggccctagggatgcctcaccggccccatctctccacggagctacgggtagcatcgcccatcgctcctacaccccacgc

SEQ ID NO: 21061 - DNA, 213 bp, Homo sapiens
  chr18:6729229-6729442
  hyper
cgctagcaggagccccaaaggatcccggccggtttccagtttcctagaagcggggatcacacctccccgcgcactcccgacacatgcgcgcgcacgcacacacaggcgcacacacacagacacacaggcgcgcgcacacaggcacacacatggacacacgggcgcgcacacacaggcacaaacacaggcgcacacataggcgcacacacacac

SEQ ID NO: 21062 - DNA, 233 bp, Homo sapiens
  chr18:6729720-6729953
  hyper
cgggccgcgccgcccagctgctgacagcctcccggcgcgccggtccatgctggtcccggtctttgttctggggccggcgccgagacatgcgcggctgacgatggaggtggaggactcgggcggcgtggtgctgaccgcctaccactcgtacgcgcgcgcccagccccccaacgccgagtcgcgctgcgcgccccgcgccgcagccagccacccgctcagcaggtacccggagc

SEQ ID NO: 21063 - DNA, 60 bp, Homo sapiens
  chr18:6730139-6730199
  hyper
cctgggctgaagtcgttggctagcagagattagcaagcagcaggattgcattcttgatac

SEQ ID NO: 21064 - DNA, 65 bp, Homo sapiens; identical to SEQ ID NO: 6015
  chr18:70211724-70211789
  hyper

SEQ ID NO: 21065 - DNA, 416 bp, Homo sapiens
  chr18:7567335-7567751
  binary
ccgcgcgcagccggcgcgggctcggtcatcggcgcgccgccgcccggggctgggcttggggctgcctgtggagaggcggcgggcggaacgcgcgcggccacggccacggccaccgccacggccacggccggcagctcgggtcccgggtcccgggcaggggaaggggagaggcggcgagctcagcaaccggaaccgagggaagattttggctccgcgggctcgccctccgctccctctgccagcggcgccagacgccgagtggggccagggacaggggaggaggacccaggaccctgtgcccgcgcccctggagccgctggagttcggacttctgcaactgttggcactttgggggcttggcttagcgctctgctgtttacccgtctctcctcgctgcctcggaaccaaagctcccg

SEQ ID NO: 21066 - DNA, 70 bp, Homo sapiens; identical to SEQ ID NO: 10400
  chr18:7568821-7568891
  hyper

SEQ ID NO: 21067 - DNA, 229 bp, Homo sapiens; identical to SEQ ID NO: 8179
  chr19:1004547-1004776
  hypo

SEQ ID NO: 21068 - DNA, 279 bp, Homo sapiens; identical to SEQ ID NO: 7074
  chr19:1005441-1005720
  hypo

SEQ ID NO: 21069 - DNA, 485 bp, Homo sapiens; identical to SEQ ID NO: 12477
  chr19:10529649-10530134
  binary

SEQ ID NO: 21070 - DNA, 111 bp, Homo sapiens; identical to SEQ ID NO: 12478
  chr19:10530526-10530637
  binary

SEQ ID NO: 21071 - DNA, 631 bp, Homo sapiens; identical to SEQ ID NO: 9301
  chr19:10530654-10531285
  binary

SEQ ID NO: 21072 - DNA, 189 bp, Homo sapiens; identical to SEQ ID NO: 10409
  chr19:11593453-11593642
  binary

SEQ ID NO: 21073 - DNA, 31 bp, Homo sapiens; identical to SEQ ID NO: 6023
  chr19:12163025-12163056
  hyper

SEQ ID NO: 21074 - DNA, 118 bp, Homo sapiens; identical to SEQ ID NO: 6024
  chr19:12163331-12163449
  hyper

SEQ ID NO: 21075 - DNA, 106 bp, Homo sapiens; identical to SEQ ID NO: 10413
  chr19:17392397-17392503
  binary

SEQ ID NO: 21076 - DNA, 233 bp, Homo sapiens; identical to SEQ ID NO: 6516
  chr19:1978023-1978256
  hypo

SEQ ID NO: 21077 - DNA, 116 bp, Homo sapiens; identical to SEQ ID NO: 5770
  chr19:1979018-1979134
  binary

SEQ ID NO: 21078 - DNA, 181 bp, Homo sapiens
  chr19:1993286-1993467
  hypo
caggacccaaacacccacatcaggttccccgaggaaccttccagaattagcccctgtccgttgccctctgacatagggacacgacttggcaaggtggtcacccatgaaaacgagcaagaggctgaacccatctacacagcacacacccggaagcgtctatatggcctgtcttgttctgccc

SEQ ID NO: 21079 - DNA, 118 bp, Homo sapiens; identical to SEQ ID NO: 6029
  chr19:20011652-20011770
  hyper

SEQ ID NO: 21080 - DNA, 61 bp, Homo sapiens; identical to SEQ ID NO: 6030
  chr19:22019028-22019089
  hyper

SEQ ID NO: 21081 - DNA, 102 bp, Homo sapiens; identical to SEQ ID NO: 9349
  chr19:23432614-23432716
  hyper

SEQ ID NO: 21082 - DNA, 130 bp, Homo sapiens; identical to SEQ ID NO: 6031
  chr19:23432833-23432963
  hyper

SEQ ID NO: 21083 - DNA, 121 bp, Homo sapiens; identical to SEQ ID NO: 6032
  chr19:23433023-23433144
  hyper

SEQ ID NO: 21084 - DNA, 118 bp, Homo sapiens; identical to SEQ ID NO: 6033
  chr19:23433296-23433414
  hyper

SEQ ID NO: 21085 - DNA, 106 bp, Homo sapiens; identical to SEQ ID NO: 6034
  chr19:23456510-23456616
  hyper

SEQ ID NO: 21086 - DNA, 216 bp, Homo sapiens; identical to SEQ ID NO: 6035
  chr19:23456881-23457097
  hyper

SEQ ID NO: 21087 - DNA, 702 bp, Homo sapiens; identical to SEQ ID NO: 6038
  chr19:24216103-24216805
  hyper

SEQ ID NO: 21088 - DNA, 61 bp, Homo sapiens; identical to SEQ ID NO: 8229
  chr19:30718934-30718995
  binary

SEQ ID NO: 21089 - DNA, 105 bp, Homo sapiens; identical to SEQ ID NO: 6042
  chr19:37096594-37096699
  hyper

SEQ ID NO: 21090 - DNA, 156 bp, Homo sapiens; identical to SEQ ID NO: 6043
  chr19:37329462-37329618
  hyper

SEQ ID NO: 21091 - DNA, 142 bp, Homo sapiens; identical to SEQ ID NO: 6044
  chr19:37342189-37342331
  hyper

SEQ ID NO: 21092 - DNA, 35 bp, Homo sapiens; identical to SEQ ID NO: 9373
  chr19:37406731-37406766
  hyper

SEQ ID NO: 21093 - DNA, 170 bp, Homo sapiens; identical to SEQ ID NO: 9374
  chr19:37407590-37407760
  hyper

SEQ ID NO: 21094 - DNA, 42 bp, Homo sapiens; identical to SEQ ID NO: 6045
  chr19:37463952-37463994
  hyper

SEQ ID NO: 21095 - DNA, 84 bp, Homo sapiens; identical to SEQ ID NO: 9378
  chr19:37957588-37957672
  hyper

SEQ ID NO: 21096 - DNA, 33 bp, Homo sapiens
  chr19:37998138-37998171
  hyper
atggattgggagtgtgtgggaatcaataaatgc

SEQ ID NO: 21097 - DNA, 425 bp, Homo sapiens
  chr19:38145586-38146011
  hyper
gaaacaaagcagcagcacgaactcacagggaaccggcttttagaagagcagcagcgattcgtttctccttctcaagcgccttctctggaaactggcagggctggggaagcaggcagagttcaggacaccccaggcttttcttgactcgattggaacccaccctccacgcttccctggccccaactaaccgccacctgcatgcacaaatggaaacgacagggcagagggtcagcagtcacccgcgtctgggttcgcagctccgggtacgctgtagttccgcacccggttgcccacgcccgggaccacccactgtgtcttttcggaactgtccagcgtgtcctcctagaccccagacacccaccccaaatctaggtcccagcgttttgcaggggaccttcatcctggggcgttcacctctgacttcc

SEQ ID NO: 21098 - DNA, 38 bp, Homo sapiens; identical to SEQ ID NO: 6048
  chr19:38182720-38182758
  hyper

SEQ ID NO: 21099 - DNA, 68 bp, Homo sapiens; identical to SEQ ID NO: 16663
  chr19:39997621-39997689
  binary

SEQ ID NO: 21100 - DNA, 118 bp, Homo sapiens; identical to SEQ ID NO: 10442
  chr19:45656461-45656579
  hyper

SEQ ID NO: 21101 - DNA, 57 bp, Homo sapiens; identical to SEQ ID NO: 6054
  chr19:46929939-46929996
  hyper

SEQ ID NO: 21102 - DNA, 333 bp, Homo sapiens; identical to SEQ ID NO: 10449
  chr19:50316721-50317054
  hyper

SEQ ID NO: 21103 - DNA, 219 bp, Homo sapiens; identical to SEQ ID NO: 5779
  chr19:50553779-50553998
  binary

SEQ ID NO: 21104 - DNA, 77 bp, Homo sapiens
  chr19:50816051-50816128
  hyper
aagaagttgaaccctttggcaatataatcagtccccaccccgtaccctggtgtctggagcccctagccctttgcccc

SEQ ID NO: 21105 - DNA, 96 bp, Homo sapiens; identical to SEQ ID NO: 16683
  chr19:51143111-51143207
  hyper

SEQ ID NO: 21106 - DNA, 71 bp, Homo sapiens; identical to SEQ ID NO: 10451
  chr19:51161615-51161686
  hyper

SEQ ID NO: 21107 - DNA, 73 bp, Homo sapiens; identical to SEQ ID NO: 12532
  chr19:51228809-51228882
  binary

SEQ ID NO: 21108 - DNA, 204 bp, Homo sapiens
  chr19:52074533-52074737
  hyper
gcgaccatttagcttctgttgttaagtggatctaagcctatgtcgcttactggacgctgaagtgattgggaatattagcagtgggggttctgtagggtcaggaaggggcggctggctttgggggagtgatgaggggcttgttgggggtgggggtgcgtgataaagggatttctcggctgaagacgaggctgtgaggtgagtgac

SEQ ID NO: 21109 - DNA, 57 bp, Homo sapiens; identical to SEQ ID NO: 12536
  chr19:53193139-53193196
  hyper

SEQ ID NO: 21110 - DNA, 542 bp, Homo sapiens
  chr19:5339897-5340439
  hyper
cgtgcgcgtctgcctgccagagcccctggggctgggggctgaggctcgcccctgggtggggaggctggaagggggcgccgaggccgcagaagggtggggcaatgcccgagtgccggaggggcgacctcccataaggcaacgacagggcccggagtgttccaggggagacggcgtagactagggggtctccaggggagggagacccggagagggaaggcggcgggcgcagcagccctggagccaccccgcctggagccacccgtcccggctcctctccgctccggggcgcccgcatgccccccatcccccggcacagcgccccctgcctccaggacccgcccggggacccgggccgggcgccgccggggccggcaccggctccgcacacacgcgcgcccccctccgcgcctctgccccgcccgcagcccggggtggtgcagccggcggcgctgggcagcttccaatgccgcgctctgggcgcttccagcccagccccctcccacgccgcggacgaagcccccccagcaccccctgccgagcgc

SEQ ID NO: 21111 - DNA, 140 bp, Homo sapiens; identical to SEQ ID NO: 5784
  chr19:53606073-53606213
  binary

SEQ ID NO: 21112 - DNA, 222 bp, Homo sapiens; identical to SEQ ID NO: 5785
  chr19:53606354-53606576
  binary

SEQ ID NO: 21113 - DNA, 428 bp, Homo sapiens; identical to SEQ ID NO: 6064
  chr19:53606605-53607033
  hyper

SEQ ID NO: 21114 - DNA, 111 bp, Homo sapiens; identical to SEQ ID NO: 6065
  chr19:53607111-53607222
  hyper

SEQ ID NO: 21115 - DNA, 84 bp, Homo sapiens; identical to SEQ ID NO: 9416
  chr19:53696029-53696113
  hyper

SEQ ID NO: 21116 - DNA, 114 bp, Homo sapiens
  chr19:53970643-53970757
  hyper
atggagaatagaaagggggaggatttctattttgttttgtgggccgtcagcatgaaatcgtaccttccgcccaggcagggctttgcatttcacattctagtttgcatccccgtt

SEQ ID NO: 21117 - DNA, 246 bp, Homo sapiens
  chr19:56159669-56159915
  binary
cctcggaccccgggcacccgcgggcgggggatggtggccgcgtttgcacccccgccctagtgcatgttcccgctggaatcgttccacgaccgctccccctcccacccgcgggacaaagggcgggggcggggggggcgcacccccacgcgtgacctttccccgtactgcgcacgcgcccagcccccaccaccgggggacggtccgcccgcccacgcgagtgcgggggaggggtgtgggggccccgaa

SEQ ID NO: 21118 - DNA, 68 bp, Homo sapiens
  chr19:56159950-56160018
  binary
cctaccctgggaagttggggcagtttccccctgcacctgcctcttccttaggcctggcagtggcccgc

SEQ ID NO: 21119 - DNA, 412 bp, Homo sapiens; identical to SEQ ID NO: 10455
  chr19:56199006-56199418
  hypo

SEQ ID NO: 21120 - DNA, 133 bp, Homo sapiens; identical to SEQ ID NO: 10456
  chr19:56199619-56199752
  hypo

SEQ ID NO: 21121 - DNA, 47 bp, Homo sapiens; identical to SEQ ID NO: 9425
  chr19:57079253-57079300
  hyper

SEQ ID NO: 21122 - DNA, 77 bp, Homo sapiens
  chr19:57106909-57106986
  hyper
gggaagctgaggggctaaggagaggctgactggaggctgaggggctgaggagaggccggggccagggagggagaggc

SEQ ID NO: 21123 - DNA, 31 bp, Homo sapiens; identical to SEQ ID NO: 5786
  chr19:58125385-58125416
  binary

SEQ ID NO: 21124 - DNA, 169 bp, Homo sapiens
  chr19:58665973-58666142
  binary
cgacacactcataagcagccccttcctcgtcctttttttccttctgagctcgggaacgtctgctgggggtgagggggactcgcagaccacccccccccccgccccaggcggaggtcgggggccgtcacctggccaggtgtccggggaacggctcgggcggctgacaccg

SEQ ID NO: 21125 - DNA, 227 bp, Homo sapiens
  chr19:58666733-58666960
  binary
tgggcagcggacagccaaaatcctgaaaccccgcggtgctccctgtgattcactttccagaggcccctcagtgccccgacgctggcccggagggcggtcgctgactgtcttgagactgaagctcactttcggatcctgggcgttcttgccaggttttttttattaatacagagaaaaccagtggctttgtgacagttagttttgaaactccctgaggagggccgagc

SEQ ID NO: 21126 - DNA, 344 bp, Homo sapiens; identical to SEQ ID NO: 9448
  chr19:58694209-58694553
  binary

SEQ ID NO: 21127 - DNA, 66 bp, Homo sapiens; identical to SEQ ID NO: 10472
  chr19:6590260-6590326
  hyper

SEQ ID NO: 21128 - DNA, 323 bp, Homo sapiens; identical to SEQ ID NO: 10473
  chr19:6590881-6591204
  binary

SEQ ID NO: 21129 - DNA, 291 bp, Homo sapiens; identical to SEQ ID NO: 7147
  chr19:813406-813697
  binary

SEQ ID NO: 21130 - DNA, 322 bp, Homo sapiens; identical to SEQ ID NO: 7149
  chr19:813830-814152
  binary

SEQ ID NO: 21131 - DNA, 685 bp, Homo sapiens; identical to SEQ ID NO: 10475
  chr19:8274278-8274963
  binary

SEQ ID NO: 21132 - DNA, 147 bp, Homo sapiens; identical to SEQ ID NO: 9457
  chr2:101033445-101033592
  binary

SEQ ID NO: 21133 - DNA, 91 bp, Homo sapiens; identical to SEQ ID NO: 7162
  chr2:10152958-10153049
  hypo

SEQ ID NO: 21134 - DNA, 93 bp, Homo sapiens; identical to SEQ ID NO: 7164
  chr2:10155172-10155265
  hypo

SEQ ID NO: 21135 - DNA, 166 bp, Homo sapiens; identical to SEQ ID NO: 10478
  chr2:10155780-10155946
  hypo

SEQ ID NO: 21136 - DNA, 63 bp, Homo sapiens; identical to SEQ ID NO: 7165
  chr2:10156251-10156314
  hypo

SEQ ID NO: 21137 - DNA, 144 bp, Homo sapiens; identical to SEQ ID NO: 5790
  chr2:105471069-105471213
  binary

SEQ ID NO: 21138 - DNA, 455 bp, Homo sapiens; identical to SEQ ID NO: 16708
  chr2:105760109-105760564
  binary

SEQ ID NO: 21139 - DNA, 164 bp, Homo sapiens
  chr2:109744585-109744749
  hyper
cgacgggaacgcaaagcggccacgagggggcagcgcacggcagggaatcttcgccgccgaccccagcccaccgccaaacttccctgctgctctcggtcctcctgtacgtacttccgttgctctgacgctcccagaagccggggcgtcgggaaggagagcgcgaa

SEQ ID NO: 21140 - DNA, 31 bp, Homo sapiens; identical to SEQ ID NO: 6084
  chr2:118981062-118981093
  hyper

SEQ ID NO: 21141 - DNA, 225 bp, Homo sapiens; identical to SEQ ID NO: 10485
  chr2:120281422-120281647
  hyper

SEQ ID NO: 21142 - DNA, 330 bp, Homo sapiens
  chr2:120974105-120974435
  hypo
ccgcctagcacctgcgcaggtgcagtctccacctcaagccagctgggccttatgatagtcaaaattggtattaatcagccacacctagcattccttcacatctgcatccacgccttttaaaaagctatattatttatatgttcaggctccattatccataacctcaatgatgaacaagatatccgtaaaataggaggactattcaagactttacccttcacttcctcttcccttattattggcagccttgcacctacagatatgcctttcctcacaggcttttactctaaagaccttatcatcgaaaccgcaaatacatcatacaccaac

SEQ ID NO: 21143 - DNA, 49 bp, Homo sapiens; identical to SEQ ID NO: 6085
  chr2:127782995-127783044
  hyper

SEQ ID NO: 21144 - DNA, 35 bp, Homo sapiens; identical to SEQ ID NO: 6088
  chr2:145275891-145275926
  hyper

SEQ ID NO: 21145 - DNA, 51 bp, Homo sapiens; identical to SEQ ID NO: 6089
  chr2:149632592-149632643
  binary

SEQ ID NO: 21146 - DNA, 238 bp, Homo sapiens; identical to SEQ ID NO: 10495
  chr2:149634146-149634384
  hyper

SEQ ID NO: 21147 - DNA, 109 bp, Homo sapiens; identical to SEQ ID NO: 6092
  chr2:154335663-154335772
  hyper

SEQ ID NO: 21148 - DNA, 101 bp, Homo sapiens; identical to SEQ ID NO: 5794
  chr2:168148871-168148972
  binary

SEQ ID NO: 21149 - DNA, 240 bp, Homo sapiens; identical to SEQ ID NO: 5795
  chr2:168149264-168149504
  binary

SEQ ID NO: 21150 - DNA, 221 bp, Homo sapiens; identical to SEQ ID NO: 5796
  chr2:168149556-168149777
  binary

SEQ ID NO: 21151 - DNA, 42 bp, Homo sapiens; identical to SEQ ID NO: 7183
  chr2:175190730-175190772
  hyper

SEQ ID NO: 21152 - DNA, 76 bp, Homo sapiens; identical to SEQ ID NO: 10498
  chr2:175546713-175546789
  hyper

SEQ ID NO: 21153 - DNA, 61 bp, Homo sapiens; identical to SEQ ID NO: 12583
  chr2:176995668-176995729
  hyper

SEQ ID NO: 21154 - DNA, 40 bp, Homo sapiens; identical to SEQ ID NO: 11463
  chr2:177005679-177005719
  hyper

SEQ ID NO: 21155 - DNA, 41 bp, Homo sapiens; identical to SEQ ID NO: 12584
  chr2:177042492-177042533
  hyper

SEQ ID NO: 21156 - DNA, 220 bp, Homo sapiens; identical to SEQ ID NO: 16737
  chr2:177052744-177052964
  binary

SEQ ID NO: 21157 - DNA, 56 bp, Homo sapiens
  chr2:177502170-177502226
  binary
cgcacccctctttacaaacctgagcggggctttcggggtaaggggaggcaagactt

SEQ ID NO: 21158 - DNA, 61 bp, Homo sapiens
  chr2:177502920-177502981
  binary
aaaaaaaaaaaaaaaaaaaaaaaaccctaactgtaaatattatttggaggtgggcgagggc

SEQ ID NO: 21159 - DNA, 34 bp, Homo sapiens; identical to SEQ ID NO: 6099
  chr2:182323095-182323129
  hyper

SEQ ID NO: 21160 - DNA, 138 bp, Homo sapiens; identical to SEQ ID NO: 6102
  chr2:19550409-19550547
  hyper

SEQ ID NO: 21161 - DNA, 274 bp, Homo sapiens; identical to SEQ ID NO: 6103
  chr2:19550611-19550885
  hyper

SEQ ID NO: 21162 - DNA, 518 bp, Homo sapiens
  chr2:198174828-198175346
  hyper
agcccggccacacaagagccgcattctgggcaggactcctgctaggtttggggaggggtcccagtctgcgatcctttctccctcttcgtgcagcgtcctcctccccggggcccgggccggcggcgcccacgcaacgcggcgcggtgcgagtcccgagagcacctcgagcccccggccccctccccagccccgccgggcccgcggccgccgcactcccgcacgccggctgcccagcgcccacgggccctgccccagactcgggcgcgcagttccgacggcccagggcggggacggcgcggcggaggggagctgccgccgcgggctctcggaggcaccggcggccgcacacagtcctccccttcgccgcgagtaaacagctcgcgggcgcgctccagccgcgcccccatccccccgccgggctccgcgccgccccgcgcccgcgcgtcccgcccgccggcgccgccgcccgctacctggtcggtgagtttgagcactgccattcttccgctccttcgcgc

SEQ ID NO: 21163 - DNA, 58 bp, Homo sapiens; identical to SEQ ID NO: 14848
  chr2:207307406-207307464
  binary

SEQ ID NO: 21164 - DNA, 240 bp, Homo sapiens; identical to SEQ ID NO: 16741
  chr2:207308960-207309200
  binary

SEQ ID NO: 21165 - DNA, 1169 bp, Homo sapiens
  chr2:208030665-208031834
  hyper
cgctgttcgctcctaatgcaatctttgctctttattttgggaggttgcatttttttctctcgcgatcgcttctcttccccccccttcccttccctccccaccccccaccccatccttgctagtttgtagtcttccccctcccttttctcctcctcctgctcttccccctccccaaactccctccctccgttcggttctccgcgcagccgtgggatctcgaggagggcgtccattaggccgcgtgtgaccatgtaaggtaaacagggggctcatgaagtcactgaggaccaatggggagcccggagcagagcctggggcggggcttggccctggcggcgggcgcggattggcacgctgcggatctccctgctgccttacaaggcggtgcgaggcgagctatttttagagggctatataagggggctgaggcggccgcccggcggccgggcagcgcgagcgcaagggacagggagggtcgtggcgacactcgcgccagctcccgggacggctgggctcgggctggtcgccgacctccgaccctccactagatgcctggcagagcccggcgcgtccggagcccgcgcccctcagagggaaggggtcgcgcgtcgccgcggcggccctgaggctgacggtcgggaggtgaaaggccggagtgcggggtcaggacgcctcctggagggggcgcggcgcagggggccgcggggaagccgccgagggcgcggagcgggaaggaaggacagtggccaccccgcctccgcctgggcacggggcagggacccgcgcgaggcggtgccggggaggtcctcacgtactcaaaaacaagcagaaaaggcatccagggccccttcccgaactccccacgggctgccagggtgcagagaagaagcgcctgaggaggaagtgccacacaatgggagagaacaaaggggagcggagcgagaccgcggcctgcgcccgccccccgcttgcgcacagtccccgccccgccccgcgggcgccgccgccgccgccctccctcccgcgcctccttctgaccccgagcgagagacctggtcgggagtccggcggctagagttgattgcaaggggcctgttgctcgactgtgcgttaaagaggctagagggagcctaggtagacgtggggcgcaagctggagccggcagcttg

SEQ ID NO: 21166 - DNA, 56 bp, Homo sapiens; identical to SEQ ID NO: 9503
  chr2:208031939-208031995
  hyper

SEQ ID NO: 21167 - DNA, 389 bp, Homo sapiens
  chr2:20866721-20867110
  hyper
cgcttggcgagggtgggggcgtagcgctgcggtgggaggaggcggctccggccctggtctccactctaggccggggtggggggcgcatagcggccgccggagctttcagcagggggcgctgctccgggcgttgggcgggggtggggtgggccaggagggggggccgcgggctggccgcgcacacttcccccattattaaacactatgttcaaaaggcgccgggggacttcccggagccacggagcccgcgccgcccgcccgcccggcccacggagcccatggacctgagcgccgccgccgcgctgtgcctttggctgctgagcgcctgccgcccccgcgacgggctggaagcggccgccgtgctgcgagcggcgggggctgggccggtc

SEQ ID NO: 21168 - DNA, 155 bp, Homo sapiens
  chr2:20867313-20867468
  hyper
cggggcagccgctgtctccgcctcgggccatggtcgcgcggacacgatcaccggcttcacagaccaggcgacccaaggtacttacgcctcttctgtgcccgcccatcccgtcaggtcctgggctgagaccagccccggagccgtgccgcagctcc

SEQ ID NO: 21169 - DNA, 323 bp, Homo sapiens
  chr2:208696085-208696408
  hypo
cgagcaccacgctgccggctgaggcctggccatcccagcgagagcatggagccatcgcatagggaaacgtagggcttccaatcagaacacctgtgtcaaaccacaaatcctttgtagctgagtgacagtgggcaagttactacttaagttcttggtgctttggttttctcatttgtaaaatgctgctcacggtgaaccccttcctattcactgggttgctgtgagactaaaatgagaaatatacttttaagtggaaggactacgcaaaggctgcgacgccgcccctcacaggtgactctagtacccgtctccttgacacaggc

SEQ ID NO: 21170 - DNA, 237 bp, Homo sapiens; identical to SEQ ID NO: 10501
  chr2:225906168-225906405
  binary

SEQ ID NO: 21171 - DNA, 353 bp, Homo sapiens
  chr2:230932495-230932848
  hyper
cgaaatggccgtccccggtctctcaccccatttcagcctctcttgaggagcctcaatcggaagcgctaagggggcccagcctctgcgcgccctgggtgcgggatcgtgcccgcggggtccggcctcgcgccccacccttcgagcgcccgcccccacccgcgctcggtgctcccgctcccttggcaccccgagaccacatccccacttcgggcaccccgcatccctcggcgcgttcggaagccagcagcccaccggggaagctgggccggctgcagcaccacagcctgtgcagagaggcatccgcaccccgcgaagtccctaggcgcagccccgggtcccccgctctgcgcctc

SEQ ID NO: 21172 - DNA, 147 bp, Homo sapiens
  chr2:230933064-230933211
  hyper
cccgcggcggccttggcactaccacctgccccggcacagtctcgccctccaccgcccgggcagcctttcccgagcctgccttgggctggggctgccccttcccgggggtccctgggggtgcagcggccatctgaaacctaggctccg

SEQ ID NO: 21173 - DNA, 218 bp, Homo sapiens; identical to SEQ ID NO: 14867
  chr2:232790830-232791048
  hyper

SEQ ID NO: 21174 - DNA, 391 bp, Homo sapiens; identical to SEQ ID NO: 14868
  chr2:232791140-232791531
  hyper

SEQ ID NO: 21175 - DNA, 209 bp, Homo sapiens; identical to SEQ ID NO: 10512
  chr2:241157300-241157509
  hypo

SEQ ID NO: 21176 - DNA, 241 bp, Homo sapiens; identical to SEQ ID NO: 10514
  chr2:242436503-242436744
  hypo

SEQ ID NO: 21177 - DNA, 146 bp, Homo sapiens; identical to SEQ ID NO: 13832
  chr2:242523762-242523908
  hypo

SEQ ID NO: 21178 - DNA, 223 bp, Homo sapiens; identical to SEQ ID NO: 13833
  chr2:242524147-242524370
  hypo

SEQ ID NO: 21179 - DNA, 69 bp, Homo sapiens; identical to SEQ ID NO: 10521
  chr2:31361021-31361090
  hyper

SEQ ID NO: 21180 - DNA, 69 bp, Homo sapiens; identical to SEQ ID NO: 10521
  chr2:31361021-31361090
  hypo

SEQ ID NO: 21181 - DNA, 179 bp, Homo sapiens; identical to SEQ ID NO: 10522
  chr2:31361118-31361297
  binary

SEQ ID NO: 21182 - DNA, 70 bp, Homo sapiens; identical to SEQ ID NO: 10523
  chr2:31361690-31361760
  binary

SEQ ID NO: 21183 - DNA, 105 bp, Homo sapiens; identical to SEQ ID NO: 10524
  chr2:31457427-31457532
  hyper

SEQ ID NO: 21184 - DNA, 77 bp, Homo sapiens; identical to SEQ ID NO: 7211
  chr2:42720186-42720263
  hyper

SEQ ID NO: 21185 - DNA, 54 bp, Homo sapiens
  chr2:56410764-56410818
  hyper
cgatccctccaaatacgaagcacctcgcatttgggtcagcagctgtttcccctg

SEQ ID NO: 21186 - DNA, 277 bp, Homo sapiens
  chr2:56411253-56411530
  hyper
ggaggcgccgcggtgcccggcgcgccctccaagctaggagaggggagaagccgggggctgcagctgggcaagggggaggaaagtgcgtgtgcgtgcacgcctgtgtgcagggcagagagtgcggggggcgacagtctcggcttagggcggaggagagggcaggggaacggcggtgcagctcccccgctgtccccgaggatttcccgcggcagccccgggctccccagtgcccctcaccatggacttgcgcggagttgggacgggcctcggcagcagc

SEQ ID NO: 21187 - DNA, 54 bp, Homo sapiens; identical to SEQ ID NO: 13852
  chr2:63287368-63287422
  hyper

SEQ ID NO: 21188 - DNA, 77 bp, Homo sapiens; identical to SEQ ID NO: 10527
  chr2:66652787-66652864
  hyper

SEQ ID NO: 21189 - DNA, 60 bp, Homo sapiens; identical to SEQ ID NO: 10528
  chr2:66652963-66653023
  hyper

SEQ ID NO: 21190 - DNA, 79 bp, Homo sapiens; identical to SEQ ID NO: 10529
  chr2:68547270-68547349
  hyper

SEQ ID NO: 21191 - DNA, 443 bp, Homo sapiens; identical to SEQ ID NO: 16766
  chr2:71453505-71453948
  hyper

SEQ ID NO: 21192 - DNA, 228 bp, Homo sapiens; identical to SEQ ID NO: 16767
  chr2:71454386-71454614
  hyper

SEQ ID NO: 21193 - DNA, 163 bp, Homo sapiens; identical to SEQ ID NO: 12640
  chr2:87018396-87018559
  binary

SEQ ID NO: 21194 - DNA, 144 bp, Homo sapiens; identical to SEQ ID NO: 12642
  chr2:88752878-88753022
  hyper

SEQ ID NO: 21195 - DNA, 158 bp, Homo sapiens
  chr20:1874963-1875121
  hyper
cggggagcagccgcgcggccggagtccggaggcgaggggaggtcggccgcaacttccccggtccaccttaagaggacgatgtagccagctcgcagcgctgaccttagaaaaacaagtttgcgcaaagtggagcggggacccggcctctgggcagcccc

SEQ ID NO: 21196 - DNA, 956 bp, Homo sapiens
  chr20:1875155-1876111
  hyper
cggcgcaggtccgggcccggcagggacggggaggggcagagcgggaccggtcggggctggggaccagccgcgcgggcttctgaacgggcacgctgtcggagccggaggctcgtctagtcccgagccccagcgggccgcggcggctcgcggggccgccttcccgggacagcagccggggcccgggcgccggcgcgggggaggacgctgccctccccggccgggcgcgcagctcgcagccctcgctccctcccccggggcgcgcaggcgggcgctcgctcgcagagaaggtgccggcggggccggagccccgaagcctccccgggcggcgggaagacgggaggaggggaaagggaaggagggagggggtcgggctgccgggagggcgggggcagcggccgggactgcgggccgggagcgagcccagccgcccgcgccgtgtggagcccgggcggggcaggtgggcagcggcgggggcggctccgcgcggccgggctcggccgtgctgcccctcgcccctgctcgcgcggtcctctctcccgcgcggtctgtcggtctgcgcgccgcctcgctcctcgctcctcgctctccccctctttctccccctctcgcctctccgtgtctctggctctctgcctggctcccttgggtctgtttctctctcctgccgcctctctctggccgcccctggctttatttctcgcgcgcttggggtctctcccagtctccgtctctccatttctcctggggggcggggagggggggtctccaaaaaccgcggcggcggcggcggccgctccaggcgcccgttccggagtcggggggaggcccagccgggaggggggaagggggggagccttagtcatttccccgctccagcctgctcccgcccgagcgcgcactcacggccgctctccctcctcgctccgcagccgcggcccatggagcccgccggcccg

SEQ ID NO: 21197 - DNA, 185 bp, Homo sapiens; identical to SEQ ID NO: 9536
  chr20:21086682-21086867
  hyper

SEQ ID NO: 21198 - DNA, 107 bp, Homo sapiens; identical to SEQ ID NO: 10534
  chr20:21087188-21087295
  hyper

SEQ ID NO: 21199 - DNA, 139 bp, Homo sapiens; identical to SEQ ID NO: 6122
  chr20:30639494-30639633
  hyper

SEQ ID NO: 21200 - DNA, 60 bp, Homo sapiens; identical to SEQ ID NO: 7239
  chr20:34190072-34190132
  hyper

SEQ ID NO: 21201 - DNA, 390 bp, Homo sapiens; identical to SEQ ID NO: 8385
  chr20:37433723-37434113
  binary

SEQ ID NO: 21202 - DNA, 218 bp, Homo sapiens
  chr20:39318166-39318384
  hyper
ccccacctctaggccaaatcaccgctttcccctcctcgcgcactctcctccctcagttccctttgcaccccacccccatcccgtgtcacccccaaggaggctcagaatgagcgccgggacaacgcctcctgggccctttgttcccaagcggcccccgcccagtgggcgacgctctgtgtgtcctcgcggcttctggccgtgtgtgtcgtgcgttcctg

SEQ ID NO: 21203 - DNA, 364 bp, Homo sapiens
  chr20:39318415-39318779
  hyper
gggagggcgggctcgaggctccgagagttgtgttcagacccaactcttaacctcaggggacctttctcaggccaagcgagggcccctcctggcgggtgcagtcgcagagccctgaggttcgactccactggccccgccgctccccgcgttcaccccaccgcacaatgttcacagtgaaggcgacgggaaaagcagcagcccaaaggctctgaattcctcttccccgccacacgcacggaatcctgagcccccggagcctcggggccgaggccggcccgggacggtgctccgagtagctctccactgctggggagccggccctgtttttgtttgaacgttttgtaacgattaagcagatcccggc

SEQ ID NO: 21204 - DNA, 102 bp, Homo sapiens; identical to SEQ ID NO: 13883
  chr20:400915-401017
  hypo

SEQ ID NO: 21205 - DNA, 414 bp, Homo sapiens; identical to SEQ ID NO: 10552
  chr20:4804008-4804422
  binary

SEQ ID NO: 21206 - DNA, 62 bp, Homo sapiens; identical to SEQ ID NO: 10553
  chr20:49218808-49218870
  hypo

SEQ ID NO: 21207 - DNA, 136 bp, Homo sapiens; identical to SEQ ID NO: 10558
  chr20:55206463-55206599
  binary

SEQ ID NO: 21208 - DNA, 95 bp, Homo sapiens; identical to SEQ ID NO: 10559
  chr20:55206774-55206869
  binary

SEQ ID NO: 21209 - DNA, 37 bp, Homo sapiens; identical to SEQ ID NO: 7256
  chr20:60502550-60502587
  hypo

SEQ ID NO: 21210 - DNA, 248 bp, Homo sapiens; identical to SEQ ID NO: 10564
  chr20:61810310-61810558
  binary

SEQ ID NO: 21211 - DNA, 59 bp, Homo sapiens; identical to SEQ ID NO: 10573
  chr20:62694227-62694286
  hyper

SEQ ID NO: 21212 - DNA, 252 bp, Homo sapiens; identical to SEQ ID NO: 10574
  chr20:62694767-62695019
  binary

SEQ ID NO: 21213 - DNA, 197 bp, Homo sapiens; identical to SEQ ID NO: 10575
  chr20:62695048-62695245
  binary

SEQ ID NO: 21214 - DNA, 123 bp, Homo sapiens; identical to SEQ ID NO: 9583
  chr21:27011487-27011610
  binary

SEQ ID NO: 21215 - DNA, 134 bp, Homo sapiens; identical to SEQ ID NO: 9584
  chr21:27011639-27011773
  binary

SEQ ID NO: 21216 - DNA, 153 bp, Homo sapiens; identical to SEQ ID NO: 9585
  chr21:27012725-27012878
  hyper

SEQ ID NO: 21217 - DNA, 181 bp, Homo sapiens
  chr21:33244741-33244922
  hyper
cgaagagaggcgagcgccggtccacctcctgcaatcacaggcatcatttcaatggaaggcaaagaaggtgtaagctacaagcagaggcagcaaacgccctggttcctacattgctgctgctactattactgctgtggctgcgcctcctccaacacagccaaccaggctgcgtgcgagcccg

SEQ ID NO: 21218 - DNA, 291 bp, Homo sapiens
  chr21:33245047-33245338
  hyper
ggagttcgagagccttcccccttccccccgccccgggtgggtgcggccagtgggggatttcaccgccgaaaggtccagaaaacccaagcccagaatccgggcaagaggcgcagccggaggcggcccgacctgggcggcccgggagcgcgcgcctccgaggccgcgcaggttctccctgtctggcgctcaggtggcttctccgtccactccgccgctcccctccccgggccctcccctctccagcgagggtcgagtttgactgtggcgcgcggggaaggaggggctactagg

SEQ ID NO: 21219 - DNA, 195 bp, Homo sapiens
  chr21:33245489-33245684
  hyper
ggagcggccgcccagcgcacggctaggagcgatcgcgggagcccgacccaagcccgtgcgggccagacggcggcggcgaggcggaggctgcggaggcacccgggctcccggacccaggcacccggaccccgggacccaggcgccgccggaccgcgccccaccccgcgcgcccgagcagggcgactgtcattagct

SEQ ID NO: 21220 - DNA, 76 bp, Homo sapiens
  chr21:33245718-33245794
  hyper
ctgaaaggggcccgggcgaccctaagaggaagaacttttgggggcggggtccccggtcccgcgtcccctgggcagc

SEQ ID NO: 21221 - DNA, 133 bp, Homo sapiens
  chr21:33245877-33246010
  hyper
ggctgggcccagggcggcggcgggagaagccggggaagccgaagagcctggggaggaggagctgcgagcgcgggagacgagcaggagccgcgcgggccgcggcgagcgcgatgccggcggcggcgggggacgg

SEQ ID NO: 21222 - DNA, 129 bp, Homo sapiens
  chr21:33246414-33246543
  hyper
agcctttcccgaaggcggcctgcggtccgctgcccgggggttgggggcttgggaggggacggccttgccccgggaagcgtcccgcgcggccgttctgctcgtggaagggcgccgcctggcgacactagc

SEQ ID NO: 21223 - DNA, 31 bp, Homo sapiens; identical to SEQ ID NO: 11551
  chr21:38119724-38119755
  hyper

SEQ ID NO: 21224 - DNA, 96 bp, Homo sapiens; identical to SEQ ID NO: 7298
  chr21:47565081-47565177
  hypo

SEQ ID NO: 21225 - DNA, 337 bp, Homo sapiens; identical to SEQ ID NO: 7299
  chr21:47565270-47565607
  hypo

SEQ ID NO: 21226 - DNA, 384 bp, Homo sapiens; identical to SEQ ID NO: 7300
  chr21:47602705-47603089
  hypo

SEQ ID NO: 21227 - DNA, 238 bp, Homo sapiens; identical to SEQ ID NO: 16818
  chr22:17849877-17850115
  hyper

SEQ ID NO: 21228 - DNA, 187 bp, Homo sapiens; identical to SEQ ID NO: 18744
  chr22:24552924-24553111
  binary

SEQ ID NO: 21229 - DNA, 945 bp, Homo sapiens
  chr22:25960137-25961082
  hyper
cggggagccgtcaccccactttgttctgcttagcctaagacacgcaactttttccagcttttactcttcgctgaattctcacggtggggttggggggatgttcaggctcaggagcgaggttgggggcccggcccgctgggcgctgttcaccggtagcccggaccagagcaggagtttcatcattacctgctgggataggtgggacacatgtatttccggggccaccccagacctcccggaggatgctgattgacactgtccagtttgagaactactgtgtccagggagcagaggcctccccataaccccttgggttgtggacgtctggcccagggcttctctgggtgagcggggcgggcatcagagcgcgtggaacctggggcgggaggtcggggcagtgaaggaggaggagaaggaggaggcggagaccgagggggagggaggggaggaggaagaggaggaggagtccctcgtggccaccccgaggggagggcgaccgtagagacttggtcgggaggcgccggcccagcgaggccgctgggactgtgcactgaggggcgctgaccgttggacgcgcgctccccgcagaccctcgctgaaggagcagggggcggcgcgcgtgcgcggggcgccgggcggcgcgcgagggggcggagcggggaggcgtgctgcgaccccggccggctacagcctgcggcgcgcgcagagcgctagtggggcgcgcggcgcgcgcgcggggcgggggcgcgcggaggggggggctgccccggggcggcccccccaggtcggggcgcggcgggcggcggcggcgggcgcgcgtcccgtccaggtccggagtaaccgccgccgccgccgccaaagctcgccaacatggcggacctggaggctgtgctggccgatgtcagttacctgatggccatggagaagagcaaggcgaccccggcc

SEQ ID NO: 21230 - DNA, 248 bp, Homo sapiens
  chr22:25961110-25961358
  hyper
cggagcccaggtaccagctgccccggccggcgccggccccaagccgccgccccctgcggccgccagctaccccctgcttcctggagggtcgggcgctgagcctccgctgccccggggcgggtgacacagcggagcgggcgatgcggggccggcctcgtcgttccagtctctgaaatggggcatcggagggccggtggggggcaccccgggagagagcgctccaaagtgcccggcgcggcgccctgcgc

SEQ ID NO: 21231 - DNA, 97 bp, Homo sapiens; identical to SEQ ID NO: 8441
  chr22:27053098-27053195
  hyper

SEQ ID NO: 21232 - DNA, 268 bp, Homo sapiens; identical to SEQ ID NO: 8442
  chr22:27053250-27053518
  hyper

SEQ ID NO: 21233 - DNA, 300 bp, Homo sapiens
  chr22:27068622-27068922
  binary
cgaggggggcgtatcccacgaggaaggcaggagggggcgtgcccctcaccggaaattagcagaggggcgtgtcccacaccggaagtcagaaagcggagcctttcttacaccggaagtcaatgaagcgggtctttcctacgctaaaaaccactgagtggagtatttagtacacaggaagtcggccagagaaacatttctcatatttgaaggccggaaagagggacatttctgacaccggaagtcagtgagaggactctttcccacacaggaagtcagctagagagccgtctcccctctctg

SEQ ID NO: 21234 - DNA, 64 bp, Homo sapiens
  chr22:29075343-29075407
  binary
cgacaccccccaccccggtgtgcgcaggccaacacccatacacaccctcacacacccacacaca

SEQ ID NO: 21235 - DNA, 321 bp, Homo sapiens
  chr22:39549067-39549388
  binary
cgaggcgcagcccctcgagttgcaggagagccgggacccaaaaggcttcccaccgtgtccggacgtcgcagggccgaggtctccctaatccggccttctccgcggcgcagtttggccagtgtctccacgtccgtccacccacccctccatccgcccttccatttgtccatccacccgaccctcggtggtcggtgcccagacgcacgggtcagacgcgggcgctgcctcgagggctcccgggccgggccctcgttcgcggcaggagcggccgcggtggagctgaggtcccccggggacggattttgccgccgcgctgcccca

SEQ ID NO: 21236 - DNA, 137 bp, Homo sapiens
  chr22:39549472-39549609
  binary
ccaccccccttcctttttcgctaacgcgcctccattcctcactgggagcccggcgtcgtccctgctccttcctgtactgaccccaacttctgtcgctccggcatcccctcggggactcgggtctgcctgccctcacc

SEQ ID NO: 21237 - DNA, 149 bp, Homo sapiens; identical to SEQ ID NO: 10602
  chr22:39852943-39853092
  hyper

SEQ ID NO: 21238 - DNA, 226 bp, Homo sapiens; identical to SEQ ID NO: 10603
  chr22:39853157-39853383
  hyper

SEQ ID NO: 21239 - DNA, 32 bp, Homo sapiens; identical to SEQ ID NO: 10604
  chr22:39853626-39853658
  binary

SEQ ID NO: 21240 - DNA, 210 bp, Homo sapiens; identical to SEQ ID NO: 10605
  chr22:39853690-39853900
  binary

SEQ ID NO: 21241 - DNA, 130 bp, Homo sapiens; identical to SEQ ID NO: 10606
  chr22:39853934-39854064
  binary

SEQ ID NO: 21242 - DNA, 33 bp, Homo sapiens; identical to SEQ ID NO: 6567
  chr22:42667137-42667170
  hypo

SEQ ID NO: 21243 - DNA, 177 bp, Homo sapiens; identical to SEQ ID NO: 12708
  chr22:45405768-45405945
  binary

SEQ ID NO: 21244 - DNA, 178 bp, Homo sapiens; identical to SEQ ID NO: 12709
  chr22:45406385-45406563
  binary

SEQ ID NO: 21245 - DNA, 129 bp, Homo sapiens; identical to SEQ ID NO: 9652
  chr3:120626737-120626866
  hyper

SEQ ID NO: 21246 - DNA, 60 bp, Homo sapiens; identical to SEQ ID NO: 9653
  chr3:120627258-120627318
  binary

SEQ ID NO: 21247 - DNA, 54 bp, Homo sapiens; identical to SEQ ID NO: 10610
  chr3:121902674-121902728
  hyper

SEQ ID NO: 21248 - DNA, 277 bp, Homo sapiens
  chr3:123168265-123168542
  binary
cggcccggagagctgtcgcgcccgcttcgcaagccccaagctcctcgtcgccggctgcgggcccaccgcggccggcgcggaacgactaggcggaggacggaatccggcgcagcgctgccgcggttctgccccgacgcaggcaggcttctcccggggagtaaggcatccagagatccagcgccggggctcagaagcagccggcccagaggggcccgcctgagagccgcggcgcccgagaggcgctccgggggggcccgcgggagcccggctcagggcg

SEQ ID NO: 21249 - DNA, 173 bp, Homo sapiens
  chr3:123168908-123169081
  hyper
cgcccccagtcctagctcccctcttttgtatccccctttaatccccctccccccatttaacccaacttcagccccggcgctgcgccccccttccctggcccggctcgattggccgcttccggagctgtcagactacagtccggcgctcttattgggcgattctctggcccggc

SEQ ID NO: 21250 - DNA, 125 bp, Homo sapiens
  chr3:12596394-12596519
  hypo
cgggaactaaattgacaggagactgagacttttcactttacgcttttaaaatatttgaacataataacgttcagatcgtgaatgtattccataaagaatgagataagctgaattttaaaaataag

SEQ ID NO: 21251 - DNA, 601 bp, Homo sapiens
  chr3:128336511-128337112
  hyper
cgcgccgcctttaaattagccccacgcatgcgcgacttttctagcccgagcccgccgtctgcgcctgcgatttcgcccatactccccggtgcccgcctcgtgacgtgccgcagtgttacgaagggacaccagggcgcaggcgcagctcgctcctcaggcctgcgagaggcccgccggcccagcagagggcgcccaccaatctgcacgcgggcccagcgagttatcttgatttcggccaagctttctgactgctccaaaaaacgaagaaaaagattcagggagagtaagaggatgaagagagctggtgaagcagctgaccaaatggcccgaggtggtatgcagccgcggtaaagcagggcccctccgtgaggcacagccgcccgggggttccctaggggaagcaggggctgcggcagacgcctctcgggcaggtcagggtatgcaccctcccgcaggggctcccaaggccgggcgtgcgtgaggccaggtccacgggcacaccactgtgaacactgattaaacgtggcctccacggcttccaacccccaggacaggaccaaccctctgcccccggctcaggccagagctcggcgagaccgtc

SEQ ID NO: 21252 - DNA, 49 bp, Homo sapiens; identical to SEQ ID NO: 6138
  chr3:129694299-129694348
  hyper

SEQ ID NO: 21253 - DNA, 902 bp, Homo sapiens
  chr3:13460995-13461897
  hyper
cgccggcctgcctcgtctcacttcgcctctgtaaagcggcccctgggcttccctccaaaactcctttcctccagggtctccgttcctccccgcgacgctaggcgctgcgcttcgtttcacagactcacttcccacgccagggcgagggcggtcacagacaaacccgagctggggtcccagactcaagggaagtgcggcccagctgccccggcgccccctcccgggtcaggccggctcgggcccggccggcttgggccctgcggtcccagacgccgctccccaggccacccctcctcccgcacaacccagaacacgcgggtcacggccgccaggctgcgcccgctctgctcgcgcctcagcggcgcggaggcccggacggcgccatgacatgagcagtggtggcgacccacgcgcacccgccgctccgagtgctgcagcctagcgcccagcgagagcgcgccgcgcacctgccggctctgccggcctcccggcgcccgcccagcctctcagcgcgaaggcccagcccggcccacggcgcccgcccggcccggccgcgcgcctcaccagcggtagcagccctccgaggcctccagcgtgaagttaacgcgcgtggcccgcgtgaagggcagcagcactttggggatgttgagcttggccgcagcggcggaggggcccgccgccaacagcaccgacagcgtcagcagcagcagcccccggccccgcgccgccatcctcgccgcgcgtcacctcccgcgaccctgcgcccggccgcccgcgccgccccgttgccctccgctcccgcccgcgcgcgcgccaggccagcaggtgatgagcgcgggggcggggcgagggccgtcggcggccgccgcttcctgggcctgagcgcgggaactctgggggcc

SEQ ID NO: 21254 - DNA, 248 bp, Homo sapiens
  chr3:137488090-137488338
  hyper
cgccggcgcggcaggagcagagttgtttgggttttacctaggtttgctttcttaaaccttggctgccatctggctcaggggtacactggctacatcttcagagagatgtggaattcttgacccctttccgcctctggcctccctcattccgagaactccgtcagcctttcatgcacttctcggttttggatctgactccaaaaatctttgattcccttccagtttccgagtttttctatttaaatatt

SEQ ID NO: 21255 - DNA, 267 bp, Homo sapiens; identical to SEQ ID NO: 10614
  chr3:139258672-139258939
  binary

SEQ ID NO: 21256 - DNA, 79 bp, Homo sapiens; identical to SEQ ID NO: 9662
  chr3:139655101-139655180
  hyper

SEQ ID NO: 21257 - DNA, 124 bp, Homo sapiens; identical to SEQ ID NO: 7337
  chr3:141174173-141174297
  hypo

SEQ ID NO: 21258 - DNA, 86 bp, Homo sapiens; identical to SEQ ID NO: 9666
  chr3:150802802-150802888
  binary

SEQ ID NO: 21259 - DNA, 70 bp, Homo sapiens
  chr3:150805097-150805167
  binary
ccgaaaccttgctcgctctcacccgtttctgcctgctttatttttcttcttgccgcttcggtaaatcgtc

SEQ ID NO: 21260 - DNA, 98 bp, Homo sapiens; identical to SEQ ID NO: 9667
  chr3:152553725-152553823
  hyper

SEQ ID NO: 21261 - DNA, 64 bp, Homo sapiens; identical to SEQ ID NO: 6142
  chr3:154797121-154797185
  hyper

SEQ ID NO: 21262 - DNA, 121 bp, Homo sapiens; identical to SEQ ID NO: 6143
  chr3:154797214-154797335
  hyper

SEQ ID NO: 21263 - DNA, 370 bp, Homo sapiens; identical to SEQ ID NO: 8498
  chr3:16553609-16553979
  hyper

SEQ ID NO: 21264 - DNA, 78 bp, Homo sapiens; identical to SEQ ID NO: 9673
  chr3:16555426-16555504
  binary

SEQ ID NO: 21265 - DNA, 309 bp, Homo sapiens
  chr3:167967629-167967938
  hyper
cgacaagcccaacttctgcgccgggttcggacttgcggagccggaacggcgcaccgcgcgcagcccgggcggcggccagggcggatcagcctcgccgagatgtcctcgcgactgtggctctggtgcttctgcctgggcggttgccggctggccgccaggaagcgccctacagctccggctgggcatgtaagtggcgcccgcgcgctccggaacgcttggagagagcagacaacagtatgccccgccccacctcggacctggtgcggacaccgcggcccgagcccgggaagggatggggggcaggaggtg

SEQ ID NO: 21266 - DNA, 99 bp, Homo sapiens
  chr3:167968382-167968481
  hyper
gggagatgagtatatgaaggattgagtgctcggccacttagctgctagtccccttattagagaactgaagagttagtaggaaggtgactcaaacgcatc

SEQ ID NO: 21267 - DNA, 54 bp, Homo sapiens; identical to SEQ ID NO: 7349
  chr3:169540679-169540733
  hypo

SEQ ID NO: 21268 - DNA, 138 bp, Homo sapiens; identical to SEQ ID NO: 10622
  chr3:179169640-179169778
  hyper

SEQ ID NO: 21269 - DNA, 291 bp, Homo sapiens; identical to SEQ ID NO: 5820
  chr3:186079331-186079622
  binary

SEQ ID NO: 21270 - DNA, 56 bp, Homo sapiens; identical to SEQ ID NO: 6150
  chr3:192128140-192128196
  hyper

SEQ ID NO: 21271 - DNA, 296 bp, Homo sapiens; identical to SEQ ID NO: 7361
  chr3:194786359-194786655
  hypo

SEQ ID NO: 21272 - DNA, 241 bp, Homo sapiens
  chr3:36985571-36985812
  binary
cgcaacgcgcctcccaggcaacagactccgagctccggttcggaaacgctccgaggcagaagcaagggcttctaagggctccgcttcccagccttgggtccctactactaccttccccctagactcggtgagcccaggctgatggaccgtgcagtccagtttgagccagcccagcagccctcaatcgggcgggcagggaagaaggcctcctactgccgggaagaggccagcgcgctccaag

SEQ ID NO: 21273 - DNA, 251 bp, Homo sapiens
  chr3:36986413-36986664
  hyper
gggcggcgcgatgcagaggcggcgttcgggggcccccagctgcctgcggctcggctacccagccgcgatcagagggggcgggggacgcaggaaccccggcgtccgggcggtgtgcagccgcagacctattccaagtttccacgtagttgcgagagcccaaaaactgtcacgtgcacgtcgctgctgagtgggaggaggtgtttgtcatcgcgttcaaaaggggcgtttcggtgtctcccgtcatgcaagca

SEQ ID NO: 21274 - DNA, 82 bp, Homo sapiens
  chr3:3840349-3840431
  hyper
cgcaggttcacgcgcagtttccgaagacctattccgtccccaccctcctccccttcctcggagacacctccacttaacactg

SEQ ID NO: 21275 - DNA, 132 bp, Homo sapiens; identical to SEQ ID NO: 15013
  chr3:43935666-43935798
  hyper

SEQ ID NO: 21276 - DNA, 196 bp, Homo sapiens; identical to SEQ ID NO: 6155
  chr3:44038922-44039118
  hyper

SEQ ID NO: 21277 - DNA, 71 bp, Homo sapiens
  chr3:44597031-44597102
  hyper
tcttgcagtaggaaactgtatgaactgtcatatttgggtcagacccaggctcagaatcgcaaacgtggagc

SEQ ID NO: 21278 - DNA, 333 bp, Homo sapiens; identical to SEQ ID NO: 7372
  chr3:53032401-53032734
  hypo

SEQ ID NO: 21279 - DNA, 202 bp, Homo sapiens; identical to SEQ ID NO: 9714
  chr3:54156155-54156357
  hyper

SEQ ID NO: 21280 - DNA, 347 bp, Homo sapiens; identical to SEQ ID NO: 9715
  chr3:55521390-55521737
  hyper

SEQ ID NO: 21281 - DNA, 36 bp, Homo sapiens
  chr3:55522560-55522596
  hyper
cgcatgcgtggtgaggccggcctatgacaaactctg

SEQ ID NO: 21282 - DNA, 325 bp, Homo sapiens
  chr3:96531754-96532079
  hyper
cgctcccctgacctcttgtcactgtgccatttccctcctgtgctttctgcccacttggaaaatatcgtatatcctttacaagaccgctactttctctcctctgttcacatttctccattaccatccacattttctcaaaacattccgacgggttttgaagtggggttttcaacctccctcgactgtgatagccgaagtcccttcaagaaagaaaaatgatgttggaaatactagtaacaaataaagtatcacggaaatccccacccaagcgatacggtttccttgacgcgcccttaaccaaggcgttaagtttagcctgacagca

SEQ ID NO: 21283 - DNA, 281 bp, Homo sapiens
  chr3:98619774-98620055
  binary
cgcgccaacttgggggacagacgggcaagaccttgcctttgcaactcaaccccgtgagtacccagccaggtccggccacgcacgaaagcgcaccgcgcctccctgcagcgtctgcagatttgttcaggggccaagagacccgcagccccgacggaggttcccccgccgctcactcccctgggaccactcaccttgctgggctccagcgtcctcgagcagcaggagcaggacaagtaagagcaggaggaacagaggcatggagaaggaggaggagttggagc

SEQ ID NO: 21284 - DNA, 58 bp, Homo sapiens
  chr3:98621126-98621184
  binary
gatgcagtgttcagtttttaatatatgtgttccctgttttctctgctctttttatggc

SEQ ID NO: 21285 - DNA, 44 bp, Homo sapiens; identical to SEQ ID NO: 10641
  chr4:10458329-10458373
  hyper

SEQ ID NO: 21286 - DNA, 207 bp, Homo sapiens; identical to SEQ ID NO: 12759
  chr4:109088463-109088670
  hyper

SEQ ID NO: 21287 - DNA, 443 bp, Homo sapiens
  chr4:109089314-109089757
  hyper
ctggagggagcacgcctccccaaagtgcagaggagggtccggcggcgcgtctccgcggaaaccctctccactgtagttaccccggatgccgacttagtagtttgttttccgagaaaagagaggggatctgggcagaagggccccgtttgccccaaaagaaggtgcaaggatcagaagataacgaaacgtccacttcctgaagggtgggaaaaaaagaaaaagaaaaaggagccacccacgctggagatgtccgttttagatcttcttattttcttccctttcgcttcggtttttcttctcgaggctcatttaatctgctagagaaggaggaggagcagaagatgggggccgaggaggaggggaagagaaagagaagtttgccaagaataaagtttttgccggcaagcgcggggactccgcagtggagggcactgcggagtctc

SEQ ID NO: 21288 - DNA, 233 bp, Homo sapiens; identical to SEQ ID NO: 11662
  chr4:111543735-111543968
  binary

SEQ ID NO: 21289 - DNA, 300 bp, Homo sapiens; identical to SEQ ID NO: 12761
  chr4:113435475-113435775
  hyper

SEQ ID NO: 21290 - DNA, 243 bp, Homo sapiens; identical to SEQ ID NO: 12762
  chr4:113436585-113436828
  binary

SEQ ID NO: 21291 - DNA, 229 bp, Homo sapiens; identical to SEQ ID NO: 14003
  chr4:113438278-113438507
  binary

SEQ ID NO: 21292 - DNA, 71 bp, Homo sapiens; identical to SEQ ID NO: 9732
  chr4:123747655-123747726
  hyper

SEQ ID NO: 21293 - DNA, 225 bp, Homo sapiens; identical to SEQ ID NO: 9733
  chr4:123748993-123749218
  hyper

SEQ ID NO: 21294 - DNA, 353 bp, Homo sapiens; identical to SEQ ID NO: 9736
  chr4:141293964-141294317
  hyper

SEQ ID NO: 21295 - DNA, 104 bp, Homo sapiens; identical to SEQ ID NO: 9737
  chr4:141294418-141294522
  hyper

SEQ ID NO: 21296 - DNA, 89 bp, Homo sapiens; identical to SEQ ID NO: 9738
  chr4:141294545-141294634
  hyper

SEQ ID NO: 21297 - DNA, 40 bp, Homo sapiens; identical to SEQ ID NO: 9739
  chr4:141295287-141295327
  hyper

SEQ ID NO: 21298 - DNA, 61 bp, Homo sapiens; identical to SEQ ID NO: 10644
  chr4:142054594-142054655
  binary

SEQ ID NO: 21299 - DNA, 155 bp, Homo sapiens; identical to SEQ ID NO: 10645
  chr4:142054757-142054912
  binary

SEQ ID NO: 21300 - DNA, 105 bp, Homo sapiens
  chr4:150999250-150999355
  hyper
cgcggttacgtttcccaggcggaggagcgcgcgtcgcggctgcgcccattaacgcgcggcgccgggcaggagccgtcaggcgggcggggctgcccgggacccgca

SEQ ID NO: 21301 - DNA, 553 bp, Homo sapiens
  chr4:150999589-151000142
  hyper
aggggccagacacggccctctcagccccgaacggcgcgcgctgcccggcgggcgggatccgggcgcggccgaggcggcggcgctgcaccccgggcctgggcccgcgcgactcccccgggggcctctcccacgctccgcgccccgccccacccttccttccttcctcccctcggcgctcccgggagcgctcggcagacgcccgagctttgtgggcgcccgcgggcccagcgcgagcctcgggcggcccaactttgcctctcccggtcggctcccgagcgggacttgtgaggcgtggccgggtggaggaggcgcttgcgggggcgtggggctccccggcaggcgggaggcacggagcaagtcgcactggacaatgacctgggcagctcggcgctgcggacacttttagctgagggcgcgggcgggtcggctcctccgcggctcctcggccccacctgcgcggagagggcgggatgccagagccaggtgtcccggcgcgttaagggccctcgcagtcagacgtccctgcaccggcgctcgcacccttagtcggccc

SEQ ID NO: 21302 - DNA, 124 bp, Homo sapiens; identical to SEQ ID NO: 12770
  chr4:151000581-151000705
  hyper

SEQ ID NO: 21303 - DNA, 244 bp, Homo sapiens
  chr4:166300444-166300688
  hyper
cgccgaagcccaggagcccggggcgcccgcggcgggcatgaggcggcgccggcggctgcagcaagaggacggcatctccttcgagtaccaccgctaccccgagctgcgcgaggcgctcgtgtccgtgtggctgcagtgcaccgccatcagcaggatttacacggtggggcgcagcttcgagggccgggagctcctggtcatcgagctgtccgacaaccctggcgtccatgagcctggtaagggc

SEQ ID NO: 21304 - DNA, 83 bp, Homo sapiens; identical to SEQ ID NO: 16909
  chr4:20253975-20254058
  hyper

SEQ ID NO: 21305 - DNA, 196 bp, Homo sapiens; identical to SEQ ID NO: 16910
  chr4:20254323-20254519
  hyper

SEQ ID NO: 21306 - DNA, 211 bp, Homo sapiens
  chr4:331352-331563
  hyper
cacaaggttaaaaaatgacccctgggctgtgccaggccaagcacgaagagaaagccccgcctgaaactgcctggaggccccccggctgtcactctcgccacattccgtggagtatgtggttgcaacttctgtcactcaaggtctgatggcggggagattggagccgtatccaatcagcgcactggagtgaaaactgcccaatcaggcacgc

SEQ ID NO: 21307 - DNA, 94 bp, Homo sapiens; identical to SEQ ID NO: 9757
  chr4:57687545-57687639
  binary

SEQ ID NO: 21308 - DNA, 205 bp, Homo sapiens; identical to SEQ ID NO: 9758
  chr4:57687887-57688092
  hyper

SEQ ID NO: 21309 - DNA, 428 bp, Homo sapiens; identical to SEQ ID NO: 9759
  chr4:58029764-58030192
  hyper

SEQ ID NO: 21310 - DNA, 207 bp, Homo sapiens; identical to SEQ ID NO: 16916
  chr4:6201673-6201880
  hyper

SEQ ID NO: 21311 - DNA, 65 bp, Homo sapiens; identical to SEQ ID NO: 6183
  chr4:6202658-6202723
  hyper

SEQ ID NO: 21312 - DNA, 120 bp, Homo sapiens
  chr4:7194882-7195002
  hyper
ccctacccgggacaccgcgggacacccgggcgggaccgccacggcccccaccccagatccccactatggtcatcaggggcgggttcttggcgacttgggcacttgggtcacctcggccgc

SEQ ID NO: 21313 - DNA, 231 bp, Homo sapiens
  chr4:75858228-75858459
  hyper
cgccgcggggcccgggtgggaggggtttggcagcggcaggcgcggcggcggcggcggaggcggaggcggccccgggctcgggcggctgggatggagcagaagagcgcggagcaccggagggcacgcagctgacggagctgcgctgcgttcgcctcgtttgcctcgcgccctccactggagctgttcgcgcctcccggctcccaccgcagcccacccggcagaggagtcgct

SEQ ID NO: 21314 - DNA, 50 bp, Homo sapiens
  chr4:75858524-75858574
  hyper
ataccaggctaccatggtctacaagactctcttcgctctttgcatcttaa

SEQ ID NO: 21315 - DNA, 291 bp, Homo sapiens
  chr4:75858629-75858920
  hyper
tagctagcgcgtggtcggggctgaagctaggagatccggcagtgagtcgccgcgcgcctccgggtgagtgcgcaggtgtgtgcgcacttagatttggggtgacgtgcacctttggcggtcccgaaccgtactgagggaggggacgatggggtccttcctgccgcagcccgcgcccgcacaaactccagctttgtagaacaggtggctgtcttagctgcgtgttcgaacccagagtgggcaacacggactgcgcctcaaggcttctctttcttcaccagggtttcggagcgc

SEQ ID NO: 21316 - DNA, 366 bp, Homo sapiens
  chr4:75858998-75859364
  hyper
gggaggttcgcatctgggaaggcttcagcagcggctgcgcgcctggcggggctggtttgctttctcgagtcttggcggtctctgatctccggcgtcccttcctagttatgcttaggatgatgtggcactaacagcagcggcccggccttggtcaggctcgcaatcgtcactgggggtagcaaggctaccttctgccccagaactccccaaaaacgtatcccatagaagaaactattaacttggctaaactagcatcctctcccctccccctgcaccacctctgaaaggcttcgtaggagccactctcgggtttcgggaccacagacggcgacgacctctggcagcggggatggggaagaggggagc

SEQ ID NO: 21317 - DNA, 144 bp, Homo sapiens
  chr4:75859428-75859572
  hyper
gttcaggtacctattttttccagaaaacgtctcccgaaaagggacaactggctgtggatatggtgctgctgggaaaagtagcccgactgcgcggccactggcattttcagtttaaatgtgacccaaagtcacatagcgcaaacc

SEQ ID NO: 21318 - DNA, 184 bp, Homo sapiens
  chr4:87515033-87515217
  hyper
cgaagagtaagggaggagccagcacttacgcatttttcactctcctcctcactccctagggtcatagttttgattctgaagttagaagtgtgggggtcgtcggctgcattttcaacttggcctaaaagttggagttcaccacactgcaggcgctaggaactctgccgctcggtcaccaacctga

SEQ ID NO: 21319 - DNA, 115 bp, Homo sapiens; identical to SEQ ID NO: 6187
  chr5:100236036-100236151
  hyper

SEQ ID NO: 21320 - DNA, 87 bp, Homo sapiens; identical to SEQ ID NO: 6188
  chr5:100238197-100238284
  hyper

SEQ ID NO: 21321 - DNA, 345 bp, Homo sapiens; identical to SEQ ID NO: 6189
  chr5:100239724-100240069
  hyper

SEQ ID NO: 21322 - DNA, 171 bp, Homo sapiens; identical to SEQ ID NO: 8556
  chr5:10564301-10564472
  binary

SEQ ID NO: 21323 - DNA, 219 bp, Homo sapiens; identical to SEQ ID NO: 6192
  chr5:113696733-113696952
  hyper

SEQ ID NO: 21324 - DNA, 98 bp, Homo sapiens; identical to SEQ ID NO: 11706
  chr5:113698167-113698265
  hyper

SEQ ID NO: 21325 - DNA, 57 bp, Homo sapiens
  chr5:113698330-113698387
  hyper
cgccgccagccccacgggcagcctcggcagtctgggctccgggcccccgctctcgca

SEQ ID NO: 21326 - DNA, 391 bp, Homo sapiens; identical to SEQ ID NO: 7416
  chr5:135091190-135091581
  hypo

SEQ ID NO: 21327 - DNA, 213 bp, Homo sapiens; identical to SEQ ID NO: 6205
  chr5:140855386-140855599
  hyper

SEQ ID NO: 21328 - DNA, 156 bp, Homo sapiens; identical to SEQ ID NO: 7419
  chr5:141931151-141931307
  hyper

SEQ ID NO: 21329 - DNA, 283 bp, Homo sapiens
  chr5:142782217-142782500
  binary
cggccgcagtctccaagttgcgggctgtcagccccccgcgtgtgcaccctcacgcgccccgcacgccctcctcaagccaggcgccgccggggcctccccggagcccgggctcgcgctcgggcgcgccggggtggcgtgcaaatattcgggcgagtaaaattcagacgcggcttagcgttcaccacgaaaacgggtgtcgggcgacccccttggagggaaaggggacactagggggagaaaagaggccaggattcccgcgaggaatgagaggctcgaagccccc

SEQ ID NO: 21330 - DNA, 125 bp, Homo sapiens; identical to SEQ ID NO: 10668
  chr5:142782625-142782750
  binary

SEQ ID NO: 21331 - DNA, 410 bp, Homo sapiens; identical to SEQ ID NO: 10669
  chr5:142782794-142783204
  binary

SEQ ID NO: 21332 - DNA, 718 bp, Homo sapiens; identical to SEQ ID NO: 7420
  chr5:142783958-142784676
  binary

SEQ ID NO: 21333 - DNA, 32 bp, Homo sapiens; identical to SEQ ID NO: 7421
  chr5:142785272-142785304
  hyper

SEQ ID NO: 21334 - DNA, 241 bp, Homo sapiens
  chr5:157001858-157002099
  hyper
gaaactgaggaccaaagaaggcggccgtcgggttggcgtggaaagagagccctggtttccagtgccaccgcggacctcaacccgtggcgtggccttgggcaagtcctttcccttttgtgggcctcggtttccccatctgtgaaatgggtgcgtttgacttggccttcagtagggctcctgccagctcggggatccgaagtgtgtggctgcagatacccagcgagccatcccctagccaagg

SEQ ID NO: 21335 - DNA, 244 bp, Homo sapiens
  chr5:157002204-157002448
  hyper
ggatgctcggcgttggcgagtgcagcgggcggtagagagaaagacagagagagaggcggagcggacacgagggaccgtgagaaaacggaggaggataagccccgagaacggcggaaagagaagccaaaagcagaaaaacagaggaaggagaaggcgagaagggaaggctagccagtgagcggaccggctgttttctggctgcgccgggtttccccgacctctgccacctcccagggcgcagaac

SEQ ID NO: 21336 - DNA, 290 bp, Homo sapiens
  chr5:157002817-157003107
  binary
ggctcccagccctctgccgagacgctccgcctccagccccgcgggcctccgccaggggatggaggaggggaggctccagcccggagggggctggagggaggggccggggaggagctggcgagactcgggggagcggggctggctcaggtgagggagaccgcggggaagggagaatccgagccccccaggaggagggatttgtggtggacgcggcctgtagagggtcggggactcgggcttctaggagttaaactggacccctctccgcacagcggcccgtttactgtccc

SEQ ID NO: 21337 - DNA, 303 bp, Homo sapiens; identical to SEQ ID NO: 12808
  chr5:17216361-17216664
  hyper

SEQ ID NO: 21338 - DNA, 53 bp, Homo sapiens; identical to SEQ ID NO: 12809
  chr5:17217629-17217682
  binary

SEQ ID NO: 21339 - DNA, 210 bp, Homo sapiens; identical to SEQ ID NO: 9798
  chr5:176057164-176057374
  binary

SEQ ID NO: 21340 - DNA, 117 bp, Homo sapiens; identical to SEQ ID NO: 10679
  chr5:178016455-178016572
  hyper

SEQ ID NO: 21341 - DNA, 205 bp, Homo sapiens; identical to SEQ ID NO: 8578
  chr5:179448886-179449091
  hypo

SEQ ID NO: 21342 - DNA, 244 bp, Homo sapiens
  chr5:179498011-179498255
  binary
cggcacgtttttatattagaaaagggccgcatccttccagatctagcgcagccttaagtccgtgatttgaggaacctgccgcttccaaaatacaggctgagacgtcctccccatgaagtagttttgcgctcttgcaccacctcctttgtctacgctgtccctgcaaactcctagctcaatgccctccagcaaacgagctgcctgaacgcaaagatgaccgttccaagtcttttttaaaagaagg

SEQ ID NO: 21343 - DNA, 505 bp, Homo sapiens
  chr5:179498363-179498868
  binary
agccagggccagagccggggccgggaaccctagtcccgccgcctacgcgggatgcagcgaccaccgcccgccgcccccgggccggcactcacctccgtggaggggcagcggcgccagcacctggccgcggacctcggccttgggggagtcaagcccgtagcgcccgcggtcgatgcgaaacgtgagcggggcgccgcggccgggctcctgcaccgtcacgttgatgagcgccgtgtagtactcctggctcgcgttgtctgcccgtgccggccacaggctgcaggtcagcagggcgagcgcggcgagccgggcagggcccgcccgccccgcgcagctcatcgtccctccggcagccgccgctgctcgcggaccgggctccggggccggcgcctagaggcggggcgggcgcggcccgggcggcggcgggagcgcgcgcgcgcggcctgcgcggggccgagcccgagcgcggccctcctggacgccgcggccccgccgctcgccgccc

SEQ ID NO: 21344 - DNA, 197 bp, Homo sapiens; identical to SEQ ID NO: 16946
  chr5:179779452-179779649
  hyper

SEQ ID NO: 21345 - DNA, 786 bp, Homo sapiens
  chr5:37248996-37249782
  hyper
cgttctattcctccggatcctgctcgagaagctgggggactcgggtccggtgccgaggtgtggcccgagcctggcaccacccacgccggccgggtgaccccggccccttggggctcccgcgctccgtcagcaggcgacgctgggaggctggggtaggcccagagcgaggacgggcccggactgggtagtggggatgtaccagggccgggtgcggcgggagacggcccgggaggcggaaggtcgcggacctgcccgacagaagagtagatgaggggagaccgaggacgcccgggtccggggagcttacgaggaggccaggatcgcggggtaaggaatccgcgggcagttacctccgccaggggcagggtccggccagtcaggcgcgagaaggctaggcgaggccgactgcgcggggtgaagacgccaggccgacagctgcgggccctaccgccagccctgacgcgagcctgcgtcctggcgacggcggagggcgggcagggggcgcgggcgctgccacggcgcctgctcagaaccggccgggaacgccgcgggcgggtctccccggtcctccgcccctccagccctgctctcaggcctccgcccgggccctctaagctgccagccgcgcccgcctccgggctcctcgcccctcctcccgcgcgctcccctcctcagcggccgccggaccccctcagttcacttctcccagttaacgcgttcctcggacgctgctagtttgagcgcacaggcattgggcggggctcacgggggagccgcttaataacc

SEQ ID NO: 21346 - DNA, 278 bp, Homo sapiens
  chr5:42424338-42424616
  binary
cggcagggagttgcgggcgacagacgaaccatcacactctggcgtctgctctggcccgcgagtagtgtacgtggaggggtttactccggagacagttttgttaaagtcataaaagttttgctagtgtgtttctgtttgccatcatctgcctggctgcggcaggaactgccgaggctgctgctgttgcgcggggaagaatccccggcagcgcgactggagagactggggaggtcgagctgtgcgcgtggacacagcgcgcagagcgcgcggtcttttgc

SEQ ID NO: 21347 - DNA, 99 bp, Homo sapiens; identical to SEQ ID NO: 6210
  chr5:42950747-42950846
  hyper

SEQ ID NO: 21348 - DNA, 388 bp, Homo sapiens; identical to SEQ ID NO: 8587
  chr5:43017314-43017702
  hyper

SEQ ID NO: 21349 - DNA, 1660 bp, Homo sapiens; identical to SEQ ID NO: 15085
  chr5:472600-474260
  binary

SEQ ID NO: 21350 - DNA, 161 bp, Homo sapiens; identical to SEQ ID NO: 16014
  chr5:600977-601138
  hypo

SEQ ID NO: 21351 - DNA, 263 bp, Homo sapiens; identical to SEQ ID NO: 16015
  chr5:601222-601485
  hypo

SEQ ID NO: 21352 - DNA, 117 bp, Homo sapiens; identical to SEQ ID NO: 10688
  chr5:76506029-76506146
  binary

SEQ ID NO: 21353 - DNA, 96 bp, Homo sapiens; identical to SEQ ID NO: 10689
  chr5:76507202-76507298
  binary

SEQ ID NO: 21354 - DNA, 192 bp, Homo sapiens; identical to SEQ ID NO: 6216
  chr5:77148195-77148387
  hyper

SEQ ID NO: 21355 - DNA, 38 bp, Homo sapiens; identical to SEQ ID NO: 8593
  chr5:77268330-77268368
  binary

SEQ ID NO: 21356 - DNA, 42 bp, Homo sapiens; identical to SEQ ID NO: 12860
  chr5:79865662-79865704
  binary

SEQ ID NO: 21357 - DNA, 91 bp, Homo sapiens; identical to SEQ ID NO: 12861
  chr5:79865744-79865835
  binary

SEQ ID NO: 21358 - DNA, 225 bp, Homo sapiens
  chr5:80256566-80256791
  hyper
agcgtgcgctacaacgaggggcacgccctgtacctggcctttctggcgcgcaaggagggcaccaagcgcggcttcctgagtaagaagacggccgaggcgagccgctggcacgagaagtggttcgccctctaccagaatgtgctcttctacttcgagggcgagcagagctgccgcccggcgggcatgtacctcctggagggctgcagctgcgaacgaacgcccgcg

SEQ ID NO: 21359 - DNA, 542 bp, Homo sapiens; identical to SEQ ID NO: 9822
  chr5:82769369-82769911
  hyper

SEQ ID NO: 21360 - DNA, 246 bp, Homo sapiens; identical to SEQ ID NO: 9823
  chr5:82770318-82770564
  hyper

SEQ ID NO: 21361 - DNA, 80 bp, Homo sapiens; identical to SEQ ID NO: 6218
  chr5:87957200-87957280
  hyper

SEQ ID NO: 21362 - DNA, 157 bp, Homo sapiens; identical to SEQ ID NO: 6219
  chr5:87969885-87970042
  hyper

SEQ ID NO: 21363 - DNA, 600 bp, Homo sapiens; identical to SEQ ID NO: 6220
  chr5:87970918-87971518
  hyper

SEQ ID NO: 21364 - DNA, 423 bp, Homo sapiens; identical to SEQ ID NO: 6225
  chr5:88179429-88179852
  hyper

SEQ ID NO: 21365 - DNA, 42 bp, Homo sapiens; identical to SEQ ID NO: 6226
  chr5:88180346-88180388
  hyper

SEQ ID NO: 21366 - DNA, 287 bp, Homo sapiens; identical to SEQ ID NO: 6227
  chr5:89854237-89854524
  hyper

SEQ ID NO: 21367 - DNA, 78 bp, Homo sapiens; identical to SEQ ID NO: 10695
  chr6:11043624-11043702
  binary

SEQ ID NO: 21368 - DNA, 222 bp, Homo sapiens
  chr6:124125086-124125308
  hyper
cactgcccgcggcgcggcgtgtgcaccgagcgagtgaaggtatgtgtggcgggcgcggctggagctgccgccgccgccgccgccgcgccagcaggtcctaatgcctgtcacttcccaggacgctggcagcagcagcagcccggagcccccgagccctcggcaggtttgcgtgtccttccccgcgatctgattggataaagtgggggctcgacggtggccgac

SEQ ID NO: 21369 - DNA, 59 bp, Homo sapiens
  chr6:126068722-126068781
  hyper
cgtttggacgcgcccgctaattgcccgtgtggcaaacatgagttgcacctgcaggcatt

SEQ ID NO: 21370 - DNA, 155 bp, Homo sapiens
  chr6:126069942-126070097
  hyper
atgcccgcgtcattgatctagtctttcctaccatcagagctgacacagctccagtccacgggcttctccgcggggtctaggatccacagtccctgggggctgaagacccaatggaagtaactgatggatcgcaaattggaaatcgtaacgtggcc

SEQ ID NO: 21371 - DNA, 440 bp, Homo sapiens; identical to SEQ ID NO: 5838
  chr6:127836226-127836666
  binary

SEQ ID NO: 21372 - DNA, 31 bp, Homo sapiens; identical to SEQ ID NO: 5839
  chr6:127837749-127837780
  binary

SEQ ID NO: 21373 - DNA, 69 bp, Homo sapiens; identical to SEQ ID NO: 10698
  chr6:151562596-151562665
  binary

SEQ ID NO: 21374 - DNA, 182 bp, Homo sapiens; identical to SEQ ID NO: 14134
  chr6:152622733-152622915
  hyper

SEQ ID NO: 21375 - DNA, 42 bp, Homo sapiens
  chr6:153452827-153452869
  hyper
agcagcctgcctgctccgggtcccggaggaagcattccctgc

SEQ ID NO: 21376 - DNA, 229 bp, Homo sapiens; identical to SEQ ID NO: 10701
  chr6:159589682-159589911
  hyper

SEQ ID NO: 21377 - DNA, 41 bp, Homo sapiens; identical to SEQ ID NO: 5840
  chr6:159591277-159591318
  binary

SEQ ID NO: 21378 - DNA, 166 bp, Homo sapiens; identical to SEQ ID NO: 12882
  chr6:1624812-1624978
  hyper

SEQ ID NO: 21379 - DNA, 52 bp, Homo sapiens; identical to SEQ ID NO: 10706
  chr6:1625068-1625120
  hyper

SEQ ID NO: 21380 - DNA, 109 bp, Homo sapiens; identical to SEQ ID NO: 10707
  chr6:163834157-163834266
  hyper

SEQ ID NO: 21381 - DNA, 97 bp, Homo sapiens; identical to SEQ ID NO: 10708
  chr6:163834987-163835084
  hyper

SEQ ID NO: 21382 - DNA, 667 bp, Homo sapiens; identical to SEQ ID NO: 10709
  chr6:163835131-163835798
  hyper

SEQ ID NO: 21383 - DNA, 292 bp, Homo sapiens; identical to SEQ ID NO: 10710
  chr6:163835906-163836198
  hyper

SEQ ID NO: 21384 - DNA, 239 bp, Homo sapiens; identical to SEQ ID NO: 10711
  chr6:163837231-163837470
  binary

SEQ ID NO: 21385 - DNA, 106 bp, Homo sapiens; identical to SEQ ID NO: 10712
  chr6:167834910-167835016
  hypo

SEQ ID NO: 21386 - DNA, 85 bp, Homo sapiens; identical to SEQ ID NO: 16032
  chr6:167836474-167836559
  hypo

SEQ ID NO: 21387 - DNA, 305 bp, Homo sapiens; identical to SEQ ID NO: 16033
  chr6:167836629-167836934
  hypo

SEQ ID NO: 21388 - DNA, 52 bp, Homo sapiens
  chr6:34170817-34170869
  hypo
cgatccgcagccacagtttgggtggctgtagccccgcccaagagggcggggc

SEQ ID NO: 21389 - DNA, 462 bp, Homo sapiens
  chr6:37665241-37665703
  binary
agccgagccgccgataaacccgggggaagaatagcagcccggcgccccgcgggaatctggagagcaattccaggcaagaagggccccagaaaacggggaaaggaggaaagtttgagtcttttgaaaaatattcgcgctctcgcccaggccggggctgcggcgcgggcgccgctcgccgcctccgctcgccgcgctcctctcccgccgtctggccgcggccgtagccctcccgggctccgagctctcgggagagcggggctacgccgcgccccaagttggtcgtccccgcccccgcccggcggccttggcctgcgggggcccagagcgggcggggccgggccgggctccggggcgcggcggccgctcggctccgggccgcgggagcgctccgctcgctcagcaacttgggctttgctgtgctgctttttcgcccctccgagcttttcattccgcgctcctccc

SEQ ID NO: 21390 - DNA, 61 bp, Homo sapiens; identical to SEQ ID NO: 6255
  chr6:391113-391174
  hyper

SEQ ID NO: 21391 - DNA, 55 bp, Homo sapiens; identical to SEQ ID NO: 5841
  chr6:393764-393819
  binary

SEQ ID NO: 21392 - DNA, 334 bp, Homo sapiens; identical to SEQ ID NO: 6256
  chr6:46138265-46138599
  hyper

SEQ ID NO: 21393 - DNA, 162 bp, Homo sapiens; identical to SEQ ID NO: 6257
  chr6:46138801-46138963
  hyper

SEQ ID NO: 21394 - DNA, 194 bp, Homo sapiens; identical to SEQ ID NO: 8641
  chr6:50808438-50808632
  hyper

SEQ ID NO: 21395 - DNA, 230 bp, Homo sapiens; identical to SEQ ID NO: 8642
  chr6:5084683-5084913
  hyper

SEQ ID NO: 21396 - DNA, 696 bp, Homo sapiens
  chr6:5084942-5085638
  hyper
cccggctttcggaagagcagagcggagcgcgcctgaccgagtcaggcttccgagtgggattggaacccggggcgccctgaagtttggggaaagcaggagcagaagggaagggatgcgctccccgctctccggcggcgcggaatgggcctccttccagcctctgcgtaggcaagatttccccagttgcgcgctgcaccggggactccccagcccgtgaggcagccaagaggagagcgctcagtgaccctctgggggcagagccgtcaggccaagttcatgggcaggaagactttgtgcacgtgggggtctctgaaggttgagcgcgagctctgcacccccacttcgaggcactcaagaagcggaacagacgcgagccccgccgggggtgcgggtgagggctgcagggagcccgcgaacgacagaaagtcgccccccgcattccaccggagcactcgggaacacggcttccaggtgtcccagcggccgcgcctccccgcccccggccctcccccgtcgcgggcaggttcaaccgggaggcggcgtggccccggagccggccccaggcccgcatcctcctcccacttcgccctgggcagccgcagctaaaagccggaggctccaaagtggaactacgttgtcttgtcgagcctggggcgactcgcctcggggagggcgagcctgaactgcagccctgcg

SEQ ID NO: 21397 - DNA, 120 bp, Homo sapiens
  chr6:53212372-53212492
  hyper
cgtacaattctatgaagcacttcctgccacgggtcccgctatttaaaacaaattaggctgctcgctccccacaaatcccatctagcacctctcggttcctcagtctagctaataaaccat

SEQ ID NO: 21398 - DNA, 216 bp, Homo sapiens
  chr6:53213970-53214186
  hyper
tttttttcccctttcttcctaataagcctgcgtggaacgcagagcctgcgcaatagccccggtgaagttgtcgatgccctgaactctggtttttttactgccaggcgtggcaggagtctgtggccgcatttgggtggcagaagcccaccctcgttacggtctcctctatgagttatgtcatgctgaaggggatccacttcatcgttaaagctgaaa

SEQ ID NO: 21399 - DNA, 249 bp, Homo sapiens; identical to SEQ ID NO: 8647
  chr6:56818408-56818657
  hyper

SEQ ID NO: 21400 - DNA, 120 bp, Homo sapiens
  chr6:6546401-6546521
  binary
cgggtccttaacagctcccgccccagaagctgccttcggatgaacagccgggtgaatcgccatgaaaaattaatcagcctccgcctgtccgcggcctagatgggcgcaaagcagatgacc

SEQ ID NO: 21401 - DNA, 90 bp, Homo sapiens
  chr6:6547222-6547312
  binary
cagcgccggctccccagtttctctgcattgtgaagtcattttcttaaactcgggctttaaataaccaccgatgacttgcctacgggccac

SEQ ID NO: 21402 - DNA, 208 bp, Homo sapiens; identical to SEQ ID NO: 6260
  chr6:69344116-69344324
  hyper

SEQ ID NO: 21403 - DNA, 295 bp, Homo sapiens; identical to SEQ ID NO: 5846
  chr6:69344649-69344944
  binary

SEQ ID NO: 21404 - DNA, 72 bp, Homo sapiens; identical to SEQ ID NO: 6261
  chr6:69346042-69346114
  hyper

SEQ ID NO: 21405 - DNA, 575 bp, Homo sapiens
  chr6:70576385-70576960
  hyper
cgcggagtgggagggtcacactgggagagactaataagggcagagatgcgtcccccttccccactcgcagggagctcactcctcggcggtgccgcagccctgtccggactccactgcgcctctgaggggctcaaatacgaattcaaggtaagctgcgcggctttgcgaccggctctgcacttgccctctcacacatgcccgggctatgtcatctgctcgtgttcctagttatctgtgtgcatctgcttttcaagaaaatgtaaaaactgtgctacacatggaaatatgtttaggtggataaataatgcacacctgcatacgtttccataggggccttaaggatgggaccaaaaacgtttggcaggagacggccactctcatgtggtacataccatgtagttcgtgttcctatgttcacatgatgcaggcttcatgcgttacacctaagttctaggtggtttttctggctatgtgtgtctgtgaagcggaactatggagcactgctgatgcgggtagggacagacatcaaatacattacaaaaaaaatggggggttaaaggagtaaaacaaactca

SEQ ID NO: 21406 - DNA, 299 bp, Homo sapiens
  chr6:70576997-70577296
  hyper
tttttgacggtgttagccctggaagcgaggcagccagttaagcggcgtaagctaagagacgcggggttccggtgcggtgccctccggcccggggttacctactccacatgtgggtgtttttcccaagtgcggcttctggggggcggcgcgggcgcgggcggggattcccggactccagccccaccacgttccggagcgtccggccctgttccttaattaccctgcagcatgcgcagcgcggtcggccacagcgccgccgccgtccccgcagtcctccctgcagccaccgccgccgccgc

SEQ ID NO: 21407 - DNA, 55 bp, Homo sapiens; identical to SEQ ID NO: 9882
  chr6:71665452-71665507
  hyper

SEQ ID NO: 21408 - DNA, 223 bp, Homo sapiens; identical to SEQ ID NO: 9883
  chr6:71665723-71665946
  binary

SEQ ID NO: 21409 - DNA, 227 bp, Homo sapiens; identical to SEQ ID NO: 6263
  chr6:72596315-72596542
  hyper

SEQ ID NO: 21410 - DNA, 83 bp, Homo sapiens; identical to SEQ ID NO: 9887
  chr6:80657600-80657683
  binary

SEQ ID NO: 21411 - DNA, 305 bp, Homo sapiens
  chr6:90121293-90121598
  binary
cagaagcgcgcgctcctccagcccagacgcttactccctccttccccttttccaccgatcctggttgcccctccgccaccagcaccgcgctccctcatttggcagctcgaggtcgggcttttggcgtccctccccaccccaaaccctcaactggacccgctcccctggaccccctccaagtcggtggctcgcgcacggccgggctgggggcgggaaggcgccaaggggaggaaaggggcgcgagccgaggacgcgggggccgggcgctcacctccctcctctgtgccgctgtccggatcggcgtc

SEQ ID NO: 21412 - DNA, 710 bp, Homo sapiens
  chr6:90121684-90122394
  hyper
gctgcggcttccccagcacctggctcatcgtgcccaccggccggccggcccggggacggcgggggtcccggggtgggggccaagcctcctagccggccgcccgcagcctatttctgaagcggaggtttgtctagagctcagcggggcccggcggaagcgggggccgcgcgtcccccggcgggcggcgcccaggtccgggtcccgcggttcccagcgcgcccgaagccccctcccccgccccgcccgccggcggaggagtcagccggagcgcggcagttcctcccggaggagggagagagagagagactgcgtgacccgagtcacctgacacacactgtcacatactcacatacacaccccgcacgggcgcgcgcgcgctcgcccggccgcgggcaccactcggcggggcgctgggccgaggacacacatgcacacgcacacgcacacgcacgaggagaccggggaggcgcggggcccctgcaccctcccagactcacaccgacacacgccccgtacacggggcccccgggacgccggccgtcacccaccgcggctgcgcgccaggggcccccacgcgcctctccttcacgtggtccccgcacaggcaggggagggggcgccgcacaccctcaatgtcccccccgccgtcccactcccacacgcccgcagagcgtctaccgtgggcggatgcctcctgcttacagtcctga

SEQ ID NO: 21413 - DNA, 74 bp, Homo sapiens
  chr6:90122423-90122497
  hyper
cactgtggcgcccagatcccccaccccagagcagcgtgcccaggacaccctgtggacgctcaagagccccaggc

SEQ ID NO: 21414 - DNA, 256 bp, Homo sapiens; identical to SEQ ID NO: 10740
  chr6:90142647-90142903
  binary

SEQ ID NO: 21415 - DNA, 1052 bp, Homo sapiens
  chr6:91005702-91006754
  binary
gagggttaaggaggaggccgcccggcctggagctgggatcgcaggctgggggccgggacacccgggcctcgccgggccgggggcagggccgcgggtctgacagctgctgcggctcgcgcggacgcgcgcctcctgcagcccgccctccccatgcctgacttattactctctgctcctcctccctctgctgttccaaaacacccttcgacgccagcaaaatacaatgcgcctcggccgccgtaaacagccgggagggagagcacacattcggcgcggcgcggccgccggctcggctcccacccccttcccgttcctagaaaatgccataaaagcgggcagggcgcggggagggcggctgcgcgcccggcggccggggctcccttcccgcgccgtttccccacgcctccccgcccgccccgcgcgcccgctccccccgcaaacttgccccgccaccccgcccagcggcggggcccggggcccggggcccgggactcacctcgccggagaactttgcgtccttttccgcctcctcttccccgcgtcttcccggctcgcagccccctcccggcagccggcgaggtgggcagttcgtgggtcaccgaaagctcgcggaggggacgcgcatcacatggcagctcgttcccagccccccgagtgcgccgggaagggggaggggaaggggcgaggggaggccggggggaaagcgagagcggggcggcggcgggagtgggcaggcggggtggcgagggcggcggccgctcacgttagcgctgtgcgaccgcagcccgggcgtgcacggccgctgctgccgctgctgctgctgctgctgctgctgaggcggcggcggctcggcgctgtttgctccgcgccgcgcggcttgcgctctccccggaacgcccacactctcaatcgctacattgttgacattcggcgctgacgtcacccgctccccattcacaataactttacgggagccgggcagcgcacctccccggccgctggggcgcggtacgcccggcgactagcgtaagccgctccgcgaatggcgctcc

SEQ ID NO: 21416 - DNA, 97 bp, Homo sapiens
  chr6:91006779-91006876
  hyper
cgggggcgggcgcgcgcgctccgctggctcgcgggagggggcgcgcctcatgccgccgcagcagcagatctccccgctttgtgcggccgcgcggccc

SEQ ID NO: 21417 - DNA, 42 bp, Homo sapiens; identical to SEQ ID NO: 10742
  chr6:91320244-91320286
  hyper

SEQ ID NO: 21418 - DNA, 252 bp, Homo sapiens; identical to SEQ ID NO: 12914
  chr7:106684920-106685172
  binary

SEQ ID NO: 21419 - DNA, 221 bp, Homo sapiens; identical to SEQ ID NO: 9899
  chr7:106685920-106686141
  hyper

SEQ ID NO: 21420 - DNA, 153 bp, Homo sapiens
  chr7:113724594-113724747
  hyper
cggtgtgtttaccgacgtgggtgccagggctgcttcctccctgggagagccgcgggttctgaaggaaagggttggtgccaagtgtgtgtgtgagctcgcgactgccctttagagaaagggcgcgctgctctttcaggaaaggaaagattcaaa

SEQ ID NO: 21421 - DNA, 230 bp, Homo sapiens; identical to SEQ ID NO: 9901
  chr7:113725472-113725702
  hyper

SEQ ID NO: 21422 - DNA, 230 bp, Homo sapiens; identical to SEQ ID NO: 9902
  chr7:113725858-113726088
  hyper

SEQ ID NO: 21423 - DNA, 408 bp, Homo sapiens; identical to SEQ ID NO: 17032
  chr7:113726962-113727370
  binary

SEQ ID NO: 21424 - DNA, 55 bp, Homo sapiens
  chr7:124404307-124404362
  hyper
cgtgctgtttccccggcggggacccccaggctcatggattccttcacccaaggat

SEQ ID NO: 21425 - DNA, 52 bp, Homo sapiens; identical to SEQ ID NO: 14210
  chr7:126891155-126891207
  binary

SEQ ID NO: 21426 - DNA, 205 bp, Homo sapiens
  chr7:126893238-126893443
  hyper
gccctggcgcgggcagggagggggaccctcggcccgcggatccccctccgctcttcagcctgaagcgacgaggagaccagaaatgtcaatagttctgatttttaaaaatcatccccccttccccgcccccaagaaaaaggggaggacccaactacagagtgagagggtgggaagaagcgggagcggtagaagaaggaatatggtt

SEQ ID NO: 21427 - DNA, 588 bp, Homo sapiens
  chr7:126893489-126894077
  hyper
cgcggggaggcgcgacgcccgcccgagcacagcgggcagcacccgcgagcccgggtccccggtgaacacagctccagaaagcgtcaccgagaataacacatggtagatgacaagtgtcccgccacatgctttcttttcgggaatgcttaaagtagagccggcaagccgcgcggttcccttgcaaagtttgcctggcgccgcgcggcggttccgccatttgtcccgccccgcggctctggcgattgtctccccactccccgcccccgagggtctgagggacgcgtgcaacagagtccccagggctcgaggtaccacacagcgcggtccgctgcgggcactgcgcaggaaggggcatgggtggctaccgggacggtcattttattgagatgattcaaggagccgcagacgcggggcaggaaactccgggggagccgtgctcgggttctgcagggaaacctcgggattcccttcgcatgccgcatgcggaaacctgccgggctcgacgtgcacagtccagcgctcctccccactagttactgcccaggccccccgatcctgcacccgccggaatgagagaaagtagcccct

SEQ ID NO: 21428 - DNA, 65 bp, Homo sapiens
  chr7:126894197-126894262
  hyper
ggggcgcggggggagagggggcagcccaggagataaggaggatggagaaggacgggagagacccc

SEQ ID NO: 21429 - DNA, 265 bp, Homo sapiens
  chr7:128828640-128828905
  binary
gcggggcggggaggtggctttaatggtgggagagggaatggggctggggattgggggcccaggggtctcctagggctgaagacaacttggattgcgaggctagggcttggggagtcgtgcatcccgttccgggcctccgcagcccaacatgggccccgggttccaaagtttgcgaagttgggcgccgaggggccggggcgcgcggagcgtccgggggggcccgggcccggattctctgggcgcacaggtcgcctgagccgcctcc

SEQ ID NO: 21430 - DNA, 1023 bp, Homo sapiens
  chr7:149570406-149571429
  hyper
tcccgccgggtccctgaacgccggcccggccggtccaacctcattccgcttcccgccatcgaaacgcgaagcccccgccttcccccaaacgtctcagcgccgctggggcctttctggctgcgccgcctccgaccccaggccccggtccgcgcccgccgctcgctagtcctgggagtgaggagaacgcgtgctgaggacccggccagagggacagcggggaccgccctcccgctgcgtctctgaaagcgaggccgttcctcccgcgtccgacccccgcggggccgtcaggttcggggcggcccaggctgcgggtccgcagggcgcttcgggccgagccggcgcggcgcgtgaagggcaggggacgccccgaaagaccgctggggtgggaccccaagctccaggggtctttggaaataagaatgcggcgtgacgttggctgtgcgggcgcggggctgacgcggaccctataacccatcgccgaaaccgggcggccgcgcccctattcctcggcatttctctctgtccgcggccctgctcagccaatcagcgagtgggctcctaggcaggtcctgagtgacagcgcggcgggctggatcaggagatgcgcgtgcgcggcccggcccggctgatcgcttcgggtgctcgactcctgttgcgcatgctcagcgcgctgcccggctggggacccgcgcacctgcagcgcccgctgctcggccctgcatcctgcctgggcatcctgcgcccggccatgacggcgcactcattcgccctcccggtcatcatcttcaccacgttctggggcctcgtcggcatcgccgggccctggttcgtgccgaagggacccaaccgcgggtaaggaaagcgcgcaggccctgcagacctctccaccccggccccctggcccggctcgcccctccgccccggggcggcggcttcctgctctgcagcgagcgtccgcaggagggacgccaggaccccggacgccacctctgaggtctctctgcacctgggtctctgacagcc

SEQ ID NO: 21431 - DNA, 89 bp, Homo sapiens
  chr7:149745487-149745576
  hyper
cggagagggcacggggtcgcacaaaaagggtgcgagggtgcgtgaagagggtggaggggcggggaccacgcgggtcgtgggtgcggggg

SEQ ID NO: 21432 - DNA, 39 bp, Homo sapiens; identical to SEQ ID NO: 6613
  chr7:155581980-155582019
  hypo

SEQ ID NO: 21433 - DNA, 42 bp, Homo sapiens; identical to SEQ ID NO: 7515
  chr7:157262486-157262528
  hypo

SEQ ID NO: 21434 - DNA, 215 bp, Homo sapiens; identical to SEQ ID NO: 7516
  chr7:157263471-157263686
  hypo

SEQ ID NO: 21435 - DNA, 234 bp, Homo sapiens; identical to SEQ ID NO: 17048
  chr7:1705153-1705387
  binary

SEQ ID NO: 21436 - DNA, 503 bp, Homo sapiens; identical to SEQ ID NO: 10765
  chr7:1705693-1706196
  binary

SEQ ID NO: 21437 - DNA, 77 bp, Homo sapiens; identical to SEQ ID NO: 9919
  chr7:19146849-19146926
  hyper

SEQ ID NO: 21438 - DNA, 60 bp, Homo sapiens; identical to SEQ ID NO: 7522
  chr7:19156644-19156704
  binary

SEQ ID NO: 21439 - DNA, 86 bp, Homo sapiens
  chr7:20817295-20817381
  binary
cgctgcactttgacgtcgctggggagaggaggcgggtgcgagtgaacacaaagcagtttggccaagaaaagagcacaggaggtgaa

SEQ ID NO: 21440 - DNA, 128 bp, Homo sapiens
  chr7:20817410-20817538
  binary
agagaaagctgaacaagttcaggaagaagaatctgagtctgtccacgccgcagcagcctccggtggcacgggcagaaagatcaagcgcggcaccccgtgacaggatgggacagattccccgggctccg

SEQ ID NO: 21441 - DNA, 120 bp, Homo sapiens; identical to SEQ ID NO: 17054
  chr7:20825260-20825380
  hyper

SEQ ID NO: 21442 - DNA, 460 bp, Homo sapiens
  chr7:20825559-20826019
  hyper
aactcacctggcacccccaacagccccggcgcccggccgcttcctactctacaggaggggacaagtttggctgccggcgtctgattcgggagcaagcaccacgctaaagaagagtttgacaagtattctcacctaaaacaacactctcttgcacacaaagccccagacacttcgtaacaaacaagcaaaaagtccagattggagaggaaggaagttttctttgccgagaagcctgggggaaaaccattggattgcttttaagagcgcttccctgtaatccggagagctttgaaaaacctgttcgggtccccagaaacccatcctgggttgtttctcccaggccaaaagaaatcaaactgtagggctcactctttcttcctgcttttctttctttctttttttaaaagcatatctacagtagtaaaaacgagacgagttcaacgtacctgcgagacaaggc

SEQ ID NO: 21443 - DNA, 42 bp, Homo sapiens; identical to SEQ ID NO: 14249
  chr7:20830567-20830609
  hyper

SEQ ID NO: 21444 - DNA, 50 bp, Homo sapiens; identical to SEQ ID NO: 10767
  chr7:21582471-21582521
  hyper

SEQ ID NO: 21445 - DNA, 176 bp, Homo sapiens; identical to SEQ ID NO: 10768
  chr7:21583452-21583628
  hyper

SEQ ID NO: 21446 - DNA, 210 bp, Homo sapiens; identical to SEQ ID NO: 8693
  chr7:23052818-23053028
  binary

SEQ ID NO: 21447 - DNA, 714 bp, Homo sapiens; identical to SEQ ID NO: 8694
  chr7:23053080-23053794
  binary

SEQ ID NO: 21448 - DNA, 246 bp, Homo sapiens; identical to SEQ ID NO: 8695
  chr7:23053819-23054065
  binary

SEQ ID NO: 21449 - DNA, 107 bp, Homo sapiens; identical to SEQ ID NO: 12977
  chr7:23287654-23287761
  hyper

SEQ ID NO: 21450 - DNA, 134 bp, Homo sapiens
  chr7:23749573-23749707
  hypo
cgtgaacagattaggaaagaccacgaaatcctacgtcacctctaaagtcacagcttgaagccttgcgaaaggaactggccctagaccccaccccggcctataaatcaccagggcgcagcctcagtgcctggggg

SEQ ID NO: 21451 - DNA, 364 bp, Homo sapiens
  chr7:23749829-23750193
  hypo
gggcccttgcggtcgaagctcacgcggtaagccgctgcacgtgtgctacggcgggcggagggccgaaagtccagtatgtgggtccagggtcactcttctagagcttccgcaacggaaagtgtgaggtcagtagtagtttttgtggtacgtgcagtggtggccgcttcaaggactattttcgtcgctgcttgcgttttaagtctccaatcctgggacgaggcccatttcagggttttctgtcaccttctagccgcccgccaccccagaggggtgccagatgccccagtttttgagtgcatgcaggcaggcgaaagtggctcgaaaagacctccggcctgaatgatctccatgaagacgcggtcac

SEQ ID NO: 21452 - DNA, 868 bp, Homo sapiens
  chr7:24613119-24613987
  hyper
cggcggcgcctgtggctgagggagagcagcggcggcggggagcgaccgggagcggcggcagcggcggcgcggaggcggctgaggtgcgagccggtgagttaactggacccccacgccgctcgggtaacggtcgcgccgcgcgccgggccggccgggggcgccctgttgctcggcgcggcgcgccacgcggggaccctggcccgccccgcccccctcggcacctgggcttcggcgggcgcggggaagagggaccggcaggcggcggcggcggcgccgcggtcggggaggctgctggccgcccccagcccggcccgcgcggaaggggcgctcggccgggctcctgcctctctggctgcgggcggctgggcgggccggagctcggcaacgtgtctggcccatgctgcttgccgccgctccccacgcgctccccggcgcggccccgactggggctagggccgcagacgcgcggggccccttcgggcgcggggcttgggtgcctacacctctgcggcgggagtcgcggtggagcctgaatggagagccggcctgggggcggcgttgctgtgactgacacctccggggtctgtcccgagagggggtgattccgccggctcccggttctctcccgagctcggagttggtaggggaggaggctttctccaactaccgccgctacttccgaggtacgagactccagttgtttggccaaagtggctgtgggccgagcacaggctgccgcgggggcgttcgctgctgagatcgtgctcgcggattctcggtacgtttgtctgaaaccaaataggtgctggggcttttttattttggctgggtggagggtcagcaggggagtcgattgaggtatccgacc

SEQ ID NO: 21453 - DNA, 196 bp, Homo sapiens; identical to SEQ ID NO: 8703
  chr7:25896938-25897134
  hyper

SEQ ID NO: 21454 - DNA, 109 bp, Homo sapiens; identical to SEQ ID NO: 8704
  chr7:25897246-25897355
  hyper

SEQ ID NO: 21455 - DNA, 48 bp, Homo sapiens
  chr7:2686911-2686959
  hypo
aggagcactcttgctgctccggagccccacgtctgcgcgaggacgggc

SEQ ID NO: 21456 - DNA, 104 bp, Homo sapiens; identical to SEQ ID NO: 7530
  chr7:27204281-27204385
  hyper

SEQ ID NO: 21457 - DNA, 78 bp, Homo sapiens; identical to SEQ ID NO: 8710
  chr7:27281871-27281949
  hyper

SEQ ID NO: 21458 - DNA, 372 bp, Homo sapiens; identical to SEQ ID NO: 10773
  chr7:28450240-28450612
  hyper

SEQ ID NO: 21459 - DNA, 168 bp, Homo sapiens; identical to SEQ ID NO: 5848
  chr7:37960958-37961126
  binary

SEQ ID NO: 21460 - DNA, 409 bp, Homo sapiens
  chr7:42276904-42277313
  binary
cacaagccctgagtgacagttctgatttggttcaaccgcgggagggaggggaaagagaaagaaagaaacccccagccgtacgcctctcctggcatccaatcgactttctggaaaaaggtcccatcccggcctggtgccccgtgctgggtggagaagccccccgccccgacctggcaccgcctgcactactcacggggtggaaaagttgtccctcggctccgcgctcccctcccgcgcgctccctccttcccttctctcctcctcttcctcctcctccccgcgctcctcctcccccaagttttaacagatgttgccggactctcctcgctccctcgcactctctcttcctccgccccggcccccgcccagtcccttttctttcagccactctcgggctcggaggggacgc

SEQ ID NO: 21461 - DNA, 61 bp, Homo sapiens
  chr7:42277588-42277649
  binary
cgccgccgccgccgcctcctcctcctcctcctccttctcctcctcctcctcctcctccgcc

SEQ ID NO: 21462 - DNA, 39 bp, Homo sapiens; identical to SEQ ID NO: 10781
  chr7:44364447-44364486
  binary

SEQ ID NO: 21463 - DNA, 369 bp, Homo sapiens; identical to SEQ ID NO: 10782
  chr7:44365258-44365627
  binary

SEQ ID NO: 21464 - DNA, 102 bp, Homo sapiens; identical to SEQ ID NO: 7551
  chr7:50344738-50344840
  binary

SEQ ID NO: 21465 - DNA, 57 bp, Homo sapiens; identical to SEQ ID NO: 8726
  chr7:50560501-50560558
  hypo

SEQ ID NO: 21466 - DNA, 220 bp, Homo sapiens; identical to SEQ ID NO: 8727
  chr7:50560663-50560883
  hypo

SEQ ID NO: 21467 - DNA, 619 bp, Homo sapiens; identical to SEQ ID NO: 10786
  chr7:55145980-55146599
  hypo

SEQ ID NO: 21468 - DNA, 65 bp, Homo sapiens; identical to SEQ ID NO: 6282
  chr7:63767198-63767263
  hyper

SEQ ID NO: 21469 - DNA, 61 bp, Homo sapiens; identical to SEQ ID NO: 9943
  chr7:64974448-64974509
  binary

SEQ ID NO: 21470 - DNA, 63 bp, Homo sapiens
  chr7:6655356-6655419
  binary
cggcccaggccgcccgcaggctccgggcacctgtagcccccgaggacccgcgtcgcctggccg

SEQ ID NO: 21471 - DNA, 221 bp, Homo sapiens
  chr7:6655448-6655669
  binary
gtgccgaccccgggcgccggcctggatcccgctgcccgcgatggtcccggggggccggccctgagccccgcgcgggattcggggccctgcctcccgccccagcccccgccggagagtctccaccaacttctgctcggccgctcctctcagccccttcccttggcccagggcgacctcggcagcccagagggcgtggaccctccggagtgcccagaaagccc

SEQ ID NO: 21472 - DNA, 153 bp, Homo sapiens
  chr7:6655854-6656007
  binary
gacgcgtcccttgagagagtttggactggatggcacgagtcggcctgtttaggggagaggggccagctctgcacgggccagggtggactctcaggagcgcctgggcacagggccaggccgtgggtgacagtgctctggacacctgccttgccc

SEQ ID NO: 21473 - DNA, 157 bp, Homo sapiens
  chr7:69062203-69062360
  binary
cgcacagctattttacccagagaggctggtcgcttttgttgatcgattctcggctgcagtcagctctttaatacaactttttatgagcatcagccacattgcggcgggaggaggggctgtggtggaaaaagcagggaaaccgccccccactcccaaa

SEQ ID NO: 21474 - DNA, 422 bp, Homo sapiens; identical to SEQ ID NO: 10788
  chr7:69063038-69063460
  binary

SEQ ID NO: 21475 - DNA, 319 bp, Homo sapiens
  chr7:69063552-69063871
  binary
cgttagcggcggcggcgagagcagcgttcccggctgcgcttctccctcaggcggggcggcgagagaagcggcggcggcggcggcggcacaccggtgtctctcccgctggagatttctttctgctttcctcatcgactgactgactcaccccctcccttttttgaggaagggtgacctcttctctgggactggaaaaaatatttttgtgaggaggggggcgggtggcagcgacagggtttgcttcttctcttctttcatctccctctcctcccccctcgaagaccgaaaagcaaaccccacaactgctccagcagcatcc

SEQ ID NO: 21476 - DNA, 283 bp, Homo sapiens
  chr7:69063900-69064183
  binary
ccgccgctcgcagtttcgccctctcttccgctaatgattgcattattatgctcccctctctggggggtctcgcccctcttgggtcgctccggagccccggcctcccctggctgcatttcttaaaaatttgggagcctgggagtgagttttctccgaggcgtgtgtgagaggcggcgggggtgttttcctgcgcgaggggcgggtgaagttcattgcccccacttttcccgcgacctttttcggacccgattttggatcgagttgaggggggcgcgggcgtttt

SEQ ID NO: 21477 - DNA, 200 bp, Homo sapiens; identical to SEQ ID NO: 10790
  chr7:69065161-69065361
  hyper

SEQ ID NO: 21478 - DNA, 164 bp, Homo sapiens; identical to SEQ ID NO: 13014
  chr7:77324199-77324363
  hypo

SEQ ID NO: 21479 - DNA, 59 bp, Homo sapiens; identical to SEQ ID NO: 10791
  chr7:834245-834304
  hypo

SEQ ID NO: 21480 - DNA, 317 bp, Homo sapiens; identical to SEQ ID NO: 10792
  chr7:834873-835190
  hypo

SEQ ID NO: 21481 - DNA, 45 bp, Homo sapiens; identical to SEQ ID NO: 17102
  chr7:87258398-87258443
  binary

SEQ ID NO: 21482 - DNA, 168 bp, Homo sapiens; identical to SEQ ID NO: 9950
  chr7:87563203-87563371
  hyper

SEQ ID NO: 21483 - DNA, 216 bp, Homo sapiens; identical to SEQ ID NO: 9951
  chr7:87563614-87563830
  binary

SEQ ID NO: 21484 - DNA, 176 bp, Homo sapiens
  chr7:87563890-87564066
  hyper
tgggccataccatttcccgggaatctttggagccctcaggcgtattgaaaagggggcatccccatttcccgagtgcgcggggagattttttttttttttttttttaattcgggagggtggtgagaagtggagcaaaaatatatgtgtggaggcgcgcagatgcactggaagccttc

SEQ ID NO: 21485 - DNA, 637 bp, Homo sapiens
  chr7:90225109-90225746
  binary
cgtggaaggagaaaaccgctcaaacaactggactcggcccgtttcctttcggtaacctccccacagcccaacacgctgtccccagacgctgcccgctcccaccccggtcccttcgtgatcctcccgcgcgcgggcggggcgggggaggagcgcgggggcggccgggaggggcgcggccgggagggggcgccgccggggcgcgagccagacacagagggccgcggaggacgcgggaggcgagcggggagccgaggtcgtgctaggatcccgcgcccaggggccttcgtcgagggaggggcgtggcggcggcagcaggagggcagcaggagctgtcaggctggcggttccgcgccgcggctccttctgcgctgcgcccgcaactctgggctgagaacttctcccgccggcccactcgccctcgccccgcgcactcggcgccaggcgactcccgcaccttgtacccggcccgccccgcctcctccttcggccgcaccactccccctgccggccgcgcttctctccgttacaaaggagggaaaatgagccgggcggcggcggcgcggcgcggggccaccacggcggcggcgagcgcggccgcccccggcaccacgtaaaccgcccccgcccgcccagctgc

SEQ ID NO: 21486 - DNA, 212 bp, Homo sapiens; identical to SEQ ID NO: 10794
  chr7:90226057-90226269
  binary

SEQ ID NO: 21487 - DNA, 473 bp, Homo sapiens; identical to SEQ ID NO: 16101
  chr7:95025593-95026066
  hyper

SEQ ID NO: 21488 - DNA, 80 bp, Homo sapiens; identical to SEQ ID NO: 8735
  chr7:99155672-99155752
  hyper

SEQ ID NO: 21489 - DNA, 216 bp, Homo sapiens; identical to SEQ ID NO: 8736
  chr7:99156600-99156816
  binary

SEQ ID NO: 21490 - DNA, 77 bp, Homo sapiens; identical to SEQ ID NO: 8737
  chr7:99156982-99157059
  binary

SEQ ID NO: 21491 - DNA, 430 bp, Homo sapiens; identical to SEQ ID NO: 13024
  chr8:104511554-104511984
  binary

SEQ ID NO: 21492 - DNA, 38 bp, Homo sapiens
  chr8:105600489-105600527
  hyper
cgcccggattcggcagagcccttgcccccgaggtggag

SEQ ID NO: 21493 - DNA, 330 bp, Homo sapiens
  chr8:105600681-105601011
  hyper
tctcacagtcaagcatctttgtgtgtggattgtgccaggctacgggtcctggagcaactggccgcgggggccctcgaacccaggtcgggaagtccgcccgccaccccctcgctccgccggggccctcccggccgggccccccagcccctctccaccacccgagggtctggaggtggacgagtggagaaaagcatctccgtgtggggacacccgttccgccacatccaccccctcaccggtctttgtcccgccggtagccagggtctccgcgggagtctccaggggaacccccgtcctggaggcctcggggcccgggtcgcctcagctttg

SEQ ID NO: 21494 - DNA, 148 bp, Homo sapiens
  chr8:105601687-105601835
  hyper
agcacggtcgctgtccgagggctgggctctggcccagcgggtggggggagggggggtgggataccagctgggaggctgaaggtggttccgtgttgggggaggcgtggatggtctgaagctgacaacttgggagttccttcctctatcc

SEQ ID NO: 21495 - DNA, 304 bp, Homo sapiens
  chr8:10873138-10873442
  hyper
cggggctggctgcgttcgggacccagcgccccccaggccctccaaagactggttgagctcagaaccagaaggagcgagggagcagagaaagccgggggcgggctcggggtaagacaggaagggagtgagattaaggtgagaagtgggaggggaaggagggaaaccgagaggaattgagggtgggctcggcgtatctagagcagtccgcggaggacgctgaggctcgccggggaagtgctgtgcccgaggcgccccaaaggtgggcggcggtgccagctcagacccacgcctctgtccaagtccc

SEQ ID NO: 21496 - DNA, 241 bp, Homo sapiens
  chr8:10873649-10873890
  binary
gggtgcagctcccctggcacagcccgacggtgggagagggcggccagctggactaaaagccccgtccccgggcgggaccttcctccccgcaccctgacgcggaggttggccgggggcctctgcgtccctctgccccgcgccctggatggggagggtctgggctccgcgccgcgaggcagcgcgacggctgcgggcgacttggcgtgcggtgctgaggaccctgggggagtgtgcgccgcgg

SEQ ID NO: 21497 - DNA, 259 bp, Homo sapiens
  chr8:10874042-10874301
  hyper
catccctgcctggctgccacccggaagtccccgtccgcgccccgacagcgccgccctccggctggctgcagcgcgggccctcggtagggggcgttccaaggccccgcctcctcgtcactgccacggatgacgacgccccaggcccccggccccgcctccgcctctgcctccgcggccagcactggggagcgtcctggcctgcgcttgctccccaacccctccttgccccgctctgagccggcgcgtccttgctccccca

SEQ ID NO: 21498 - DNA, 226 bp, Homo sapiens; identical to SEQ ID NO: 17109
  chr8:109799189-109799415
  binary

SEQ ID NO: 21499 - DNA, 42 bp, Homo sapiens; identical to SEQ ID NO: 17110
  chr8:109799903-109799945
  binary

SEQ ID NO: 21500 - DNA, 377 bp, Homo sapiens
  chr8:11058799-11059176
  binary
gctgagcgaagcccacccccacgccaccgccatcggatttcgccgccatcttgactctcttcccagctccggaggttgggggggagggacggcggggggggggggaagaaggcagggaacggggagggggggaaacgaatggagaggaaggggggcggggaggaagcgggggagcaaacgaacgaggggggagtgggccagggaaccccctccgcttccgggtagttggcgtcacttccgggcgagccccccaatcgcacggcgcccgcagctccccagccctaccctcccggccaagatggccgccctcctgtgcctcagctgctgggcgggggaccggggggttctccccgccagggctccccttcccctcttcc

SEQ ID NO: 21501 - DNA, 158 bp, Homo sapiens
  chr8:11059210-11059368
  hyper
cgtttcagaatccggctggcccgagtgaggcggtccaaagtgatccctggagggggcagtgccagacgttttggggtccccttcctcagcgtcgcagctcacagctttcctcctggagaaacgccccctaacaccctcccggctgctggtggaggggc

SEQ ID NO: 21502 - DNA, 100 bp, Homo sapiens; identical to SEQ ID NO: 6288
  chr8:110986113-110986213
  hyper

SEQ ID NO: 21503 - DNA, 174 bp, Homo sapiens; identical to SEQ ID NO: 6289
  chr8:110987222-110987396
  hyper

SEQ ID NO: 21504 - DNA, 221 bp, Homo sapiens; identical to SEQ ID NO: 7561
  chr8:118531602-118531823
  hypo

SEQ ID NO: 21505 - DNA, 541 bp, Homo sapiens; identical to SEQ ID NO: 7562
  chr8:121823361-121823902
  binary

SEQ ID NO: 21506 - DNA, 106 bp, Homo sapiens; identical to SEQ ID NO: 18050
  chr8:131455079-131455185
  binary

SEQ ID NO: 21507 - DNA, 72 bp, Homo sapiens
  chr8:131456212-131456284
  hyper
gggtgggatttatccacagaaaaccctggacgcggaaggtgcctttctaaggccgggacagcggcaaaggac

SEQ ID NO: 21508 - DNA, 189 bp, Homo sapiens
  chr8:133491923-133492112
  binary
cgcacccctcccatccccaactaaactcagtggcgatcccaacagaagggatccacccgaaacagaaacacagagctcacgggaggacccgctttatcctcttcaaccctcacattaattggaaaaacccacataattattttaagcttccaaaccaacacccctagaagatgtcataaatgtgcaccc

SEQ ID NO: 21509 - DNA, 65 bp, Homo sapiens
  chr8:133492127-133492192
  binary
cgcccaaatcagcaggggaaccacgcttcgttttttaagcccctagtgtggaacacccggagagc

SEQ ID NO: 21510 - DNA, 311 bp, Homo sapiens; identical to SEQ ID NO: 17121
  chr8:133493185-133493496
  binary

SEQ ID NO: 21511 - DNA, 938 bp, Homo sapiens; identical to SEQ ID NO: 10804
  chr8:134582236-134583174
  binary

SEQ ID NO: 21512 - DNA, 926 bp, Homo sapiens; identical to SEQ ID NO: 10805
  chr8:134583293-134584219
  binary

SEQ ID NO: 21513 - DNA, 64 bp, Homo sapiens; identical to SEQ ID NO: 10808
  chr8:143531771-143531835
  binary

SEQ ID NO: 21514 - DNA, 154 bp, Homo sapiens
  chr8:38324508-38324662
  hyper
cgcaaacatgggtcgtagcctcacttttctcccaaccccaaacataacggtaggggaagcgaggtgcagaggggtctgggccagagaagcatacgcatcgctgccgagtgaaccacaccggacaaaaaccctcatcccttcccccacctctagg

SEQ ID NO: 21515 - DNA, 216 bp, Homo sapiens
  chr8:38324861-38325077
  hyper
acctattccaagagaagctaacctagccctccacgtcctccgcagttcatctcccaccccatccgaccccaacccgcaccccaggctttcccgggggtggaaaaggacttaggaatgccccggatttttagcgttgagcccaaagctacctgctgaattgggggtgaatccccaaaaggggaccaaaaagacatggagtggaatgcaacacacaca

SEQ ID NO: 21516 - DNA, 227 bp, Homo sapiens; identical to SEQ ID NO: 17131
  chr8:38326050-38326277
  binary

SEQ ID NO: 21517 - DNA, 540 bp, Homo sapiens; identical to SEQ ID NO: 19956
  chr8:41685769-41686309
  hyper

SEQ ID NO: 21518 - DNA, 43 bp, Homo sapiens; identical to SEQ ID NO: 17134
  chr8:495481-495524
  binary

SEQ ID NO: 21519 - DNA, 69 bp, Homo sapiens; identical to SEQ ID NO: 17135
  chr8:495635-495704
  binary

SEQ ID NO: 21520 - DNA, 113 bp, Homo sapiens; identical to SEQ ID NO: 9985
  chr8:49834207-49834320
  hyper

SEQ ID NO: 21521 - DNA, 128 bp, Homo sapiens
  chr8:53853387-53853515
  binary
cgccttcctggacgccagcttccgcaggaacctccgccagctgataacttgccgcgcggcagcctgactcccccagcgtccggctccgcaactgcccgccactcctggccagcgagggaggagccggc

SEQ ID NO: 21522 - DNA, 261 bp, Homo sapiens; identical to SEQ ID NO: 17138
  chr8:65492407-65492668
  hyper

SEQ ID NO: 21523 - DNA, 267 bp, Homo sapiens; identical to SEQ ID NO: 17139
  chr8:65494311-65494578
  binary

SEQ ID NO: 21524 - DNA, 203 bp, Homo sapiens
  chr8:6691849-6692052
  hyper
cgcggggtccgggctcaggcagcccttagcgcccaggctgggtccggctgtcaccaccccgagcgtcctgcggcagcctcccttgcacgaaaagccttcggtgctgcagggctggggaatgctgacacccagtccgtgcccagctggagggcaagggaggacacctggggtgggtgccgacccccgcaggtcctgtctcagcc

SEQ ID NO: 21525 - DNA, 225 bp, Homo sapiens
  chr8:6692462-6692687
  hyper
ctccccccgccaccccttctgcgagcggcctccaagtcgcagggtccccctggacggccgggggtcgggggagagcccgggcgcccccagacttgcgctcagcacatcttggcatcgcagcactttgcaaagcttgtgatggaaggaagggcggatacatctcccctgcttctgcgaggggatcttgcatgcgtggggcggggggatcgtgcatgggcgggagga

SEQ ID NO: 21526 - DNA, 209 bp, Homo sapiens
  chr8:6693170-6693379
  hyper
gggagggagggaggatgcttggggtttctggcttccagggtgggtggggacgaggtggtggagtccagctcaggtccgggctcctgataagggcagaagcgggttctgcgctgcccccaaccctgtaaccgccaggaaagcgcttggtgagcgtcgggactgcgcaggttcctcgggaggtggctaaactggccaccgcctctggggcc

SEQ ID NO: 21527 - DNA, 55 bp, Homo sapiens; identical to SEQ ID NO: 5856
  chr8:72756949-72757004
  binary

SEQ ID NO: 21528 - DNA, 77 bp, Homo sapiens; identical to SEQ ID NO: 6309
  chr8:75897394-75897471
  hyper

SEQ ID NO: 21529 - DNA, 186 bp, Homo sapiens
  chr8:81397833-81398019
  hyper
cggggcggtgcattttctgtgaaatgactactgtccggggcccgaggtgctgcctcgcacaatgcatcaaaggaggttgtgtccgtggtcgtaacctcttcgcgtgaaaggcaccgcctggtccagtctttgtgaaggaacaaaataagttcacttccttgggcaccgccacccaccctcagcaaa

SEQ ID NO: 21530 - DNA, 274 bp, Homo sapiens
  chr8:81398155-81398429
  binary
actcgccagctgtttgtcctccgcgtagcccggccccggccgcacacgcccgccccctccctgagacccccagcccgccgcccggccttttgtccccaacccctcggccgacttccttccccgcggccgcacccccgcccccaggccggaggcgcagcccagcccctttcccggtcccctggcgcccccaccccaccccagcccagccccaagcccagcccccctcccccagcccggcccccaccctttccccctccagcggttactgctaccc

SEQ ID NO: 21531 - DNA, 602 bp, Homo sapiens
  chr8:81399496-81400098
  hyper
ggcatttcaatgggcgagggccggcgactgtggatctggagctggacgcgctggaggggaaggagttgatgcaggacggcgcgtccctgagcgacagcaccgaggacgaggaggagggggcgagcctgggcgacggcagcggggcggaaggcggcagctgcagcagcagcaggcggtcgggcggcgatggcggggacgaagtggagggcagcggtgtgggagctggcgaaggagagactgtccagcacttcccgctcgcgcggcccaagtctctaatgcagaagctccaatgctccttccagacctcctggctcaaggactttccctggctgcgctattccaaggatactggtcttatgtcttgcggctggtgccaaaagacccctgcagatgggggaagcgtggaccttcccccagtggggcatgatgagctttcgcgagggacccgcaactacaagaaaaccctcctcctgaggcaccacgtctctaccgagcacaaactccacgaagccaacgcccaggtacagtatatcctgctcctacttttttgagatcttttagggaaaggtttatcagcactcccttcacccccacccaccccc

SEQ ID NO: 21532 - DNA, 111 bp, Homo sapiens; identical to SEQ ID NO: 17148
  chr8:8560686-8560797
  hypo

SEQ ID NO: 21533 - DNA, 42 bp, Homo sapiens; identical to SEQ ID NO: 17149
  chr8:8561032-8561074
  hypo

SEQ ID NO: 21534 - DNA, 106 bp, Homo sapiens; identical to SEQ ID NO: 14346
  chr8:8639980-8640086
  binary

SEQ ID NO: 21535 - DNA, 66 bp, Homo sapiens; identical to SEQ ID NO: 8782
  chr8:91996920-91996986
  hyper

SEQ ID NO: 21536 - DNA, 55 bp, Homo sapiens; identical to SEQ ID NO: 19969
  chr8:97156910-97156965
  hyper

SEQ ID NO: 21537 - DNA, 80 bp, Homo sapiens; identical to SEQ ID NO: 10825
  chr8:97507728-97507808
  hyper

SEQ ID NO: 21538 - DNA, 59 bp, Homo sapiens; identical to SEQ ID NO: 8785
  chr8:99953137-99953196
  hyper

SEQ ID NO: 21539 - DNA, 240 bp, Homo sapiens
  chr9:100000500-100000740
  hyper
agaacgtgttggcccgggcctccataaccatggctgctaggggcggggactgggagcgcgggtcccgggactgggagcgcgggtcccaggccagggtgcgggctgggaagactcggtcctccactgccccagcaggccacgcgcccgcgcgtagcctcccgccccgctagcagcacgctgcgtggctgctcgttggctacttacgacggaagctcggttggggtttctgcagaagtttcc

SEQ ID NO: 21540 - DNA, 69 bp, Homo sapiens
  chr9:108418403-108418472
  binary
cggaagccagggcgcggagagtggggaggaaacggtgggagtccccgtcgggaaggggcccccgggccc

SEQ ID NO: 21541 - DNA, 171 bp, Homo sapiens
  chr9:108418947-108419118
  binary
tagatgctttcctggactccctaaatacttaatcattaggcaaggcaatggtttgcaagggggagcaaaagttataaaaagaaaaagggaaaggcctggaagcgaagcgggcaagggaagaagcttgggcagagtattcgagatgcgtccaggctgcacggtgcaggggtc

SEQ ID NO: 21542 - DNA, 60 bp, Homo sapiens
  chr9:112402440-112402500
  hyper
cgggaacacgcagaatttggagtgaaacggaaaggggcatggggtcgccaaggtggtgaa

SEQ ID NO: 21543 - DNA, 52 bp, Homo sapiens
  chr9:126773180-126773232
  hyper
cgaaccctggcctttctgagttcctaaagccatgctcgcccccactcttcca

SEQ ID NO: 21544 - DNA, 61 bp, Homo sapiens
  chr9:126773978-126774039
  hyper
tcctcctcttttttctcctcctccacctcctcctccgcctcctcctcctcctcttcctcct

SEQ ID NO: 21545 - DNA, 113 bp, Homo sapiens
  chr9:132804293-132804406
  binary
cgggccgccgcactgcccatcccctgcccagtgatttccccaggaatccggggacggcaggaaaagagctccatccacagccagcccctcgcctttccggggacggccctcag

SEQ ID NO: 21546 - DNA, 208 bp, Homo sapiens
  chr9:132804455-132804663
  binary
gcaaggcgcccctcaccgccaactttccccactggaaactattctccgagcaaccgttaaagatcattgaccccgcgaacgcctcttcctgaggtagatcacgtaagatctctccctaactcccactttcccctccagaccagacgtcgcagtgcccacatcccactcaggattgagctaccccgaaagaacaagtgcgcccggagcc

SEQ ID NO: 21547 - DNA, 104 bp, Homo sapiens
  chr9:132804693-132804797
  hyper
cgaagaccgcactctcgccccagcaccccaaaacccgacccccggcgctcgccccggccgccccgctcccggggaagtgcccgatccgccagcgcctccgcgga

SEQ ID NO: 21548 - DNA, 291 bp, Homo sapiens
  chr9:132805028-132805319
  hyper
cgaaggacaagccggcccgcacctcctgctcgggccaaggcggacgaggggcattggaaccccgcctcctccccaggccgcgaggaccccgaccagcgcgccctcgcctccgcccagcagcgcggcccgcgccccctccccaggccgcggggaaacgcagcgcgcgccccgcatctgcccgcgggcccagcccctcactcacccagagctcggtgccccagctcatggtgcaggggacgcgaaggggcgctccgcgcggcgggcgcggctctctggtccccctccccggcg

SEQ ID NO: 21549 - DNA, 293 bp, Homo sapiens
  chr9:132805445-132805738
  binary
tggcccgaggaagcagcagccgcggccgccgcagcgcccgcccgccctacacccggagagcgggggaggggcgggaggggaggggcggggccggtctgacagctcgcgcacgcgcgcccgccccaccccggcccggccccctcccccgggctcccccggccgggtccgcgtcgccctggggtccggaaggacgcggagggaggtgtgagggacggcgggacccggatccctaggactccccctgccaatctggtaatgacttcttagtgaccactgtctgctcgcagtactag

SEQ ID NO: 21550 - DNA, 55 bp, Homo sapiens
  chr9:132805893-132805948
  hyper
ccaccgcccgagggaagcccgagagtcccgcaggctggcgcggtgggagtggggc

SEQ ID NO: 21551 - DNA, 307 bp, Homo sapiens
  chr9:133814911-133815218
  binary
tcgcgcccgcggtcggaaagcccacacgacgcccccttgcccgggcggcccgtgggcgaaatgggggtccccaccactgccacagccgccggcgctgtggtcgcgagtaccagccgctccgcgctcggccgcgctcccggccgatcgcccgcgctccccggcgcgccccgcgtggtcccagcccccgccttctcctccgccgggaggggatttgtgccaggagggggcttcttagttgccccttcccaccagcagcacttttaaaagcatttaatccgcccggagcggccttcggaggtaattgaca

SEQ ID NO: 21552 - DNA, 191 bp, Homo sapiens
  chr9:133815287-133815478
  hyper
acgccgcgctcccctcccgccgccccgccgagcccgccggccgcccctcctccgcccctttctgcgtccccatctttttctgctcccccagctccagacagacccccgttccccgcccccgcttctccccaaagctgttttccggctcccggggcgccttggccgccgcgctgttccctggcaccgtctcc

SEQ ID NO: 21553 - DNA, 144 bp, Homo sapiens
  chr9:133815528-133815672
  hyper
cgatccctctacgcgtccggcactggcggggcagactggttgggggtgggggccgcgtccagcctgggctggggcactccctggaccccggagcgggggaccctgtggcccggtgccatccgaggagactgccacccgccaggc

SEQ ID NO: 21554 - DNA, 292 bp, Homo sapiens; identical to SEQ ID NO: 10843
  chr9:139506149-139506441
  hypo

SEQ ID NO: 21555 - DNA, 252 bp, Homo sapiens; identical to SEQ ID NO: 7615
  chr9:139611146-139611398
  hypo

SEQ ID NO: 21556 - DNA, 93 bp, Homo sapiens
  chr9:214559-214652
  binary
cgacttgcctacattccctggcagcctcgcagcttcgggcagatggagcttccggcctgcgcgcagtggtcgcctgtcgtccgcccgcgctcc

SEQ ID NO: 21557 - DNA, 169 bp, Homo sapiens
  chr9:215348-215517
  hyper
tgataggcgcctgggtaaccgtgttgggcgcgccacggagtgtctcataaacggctccttcctttgaggcaagtctgagcgcggggggaagaagtgaagtggctgaaattagagttgcgtttgaggcaggctgcaagccttctgtcgtcctgagcaaggctccgtcctc

SEQ ID NO: 21558 - DNA, 63 bp, Homo sapiens; identical to SEQ ID NO: 8817
  chr9:37034135-37034198
  hyper

SEQ ID NO: 21559 - DNA, 114 bp, Homo sapiens; identical to SEQ ID NO: 10853
  chr9:6644756-6644870
  hyper

SEQ ID NO: 21560 - DNA, 150 bp, Homo sapiens
  chr9:74061513-74061663
  binary
cgcgtgcgaagggagaaaagaaagcaaagactggggctctcccccggccactcaccggcgtctgctgcgacgggagtcccgagcgtttggtggacccctgcttggaacttaaccttttccacgactcggcaaacctgccccggctggcgc

SEQ ID NO: 21561 - DNA, 102 bp, Homo sapiens; identical to SEQ ID NO: 10027
  chr9:77111662-77111764
  hyper

SEQ ID NO: 21562 - DNA, 38 bp, Homo sapiens
  chr9:8857406-8857444
  hyper
cgggtctgaggtttcaggcgagaagtgaacccagcagg

SEQ ID NO: 21563 - DNA, 41 bp, Homo sapiens; identical to SEQ ID NO: 10034
  chr9:99984107-99984148
  binary

SEQ ID NO: 21564 - DNA, 949 bp, Homo sapiens; identical to SEQ ID NO: 17175
  chrY:16636193-16637142
  binary

SEQ ID NO: 21565 - DNA, 244 bp, Homo sapiens; identical to SEQ ID NO: 5866
  chr1:103574168-103574412
  hyper

SEQ ID NO: 21566 - DNA, 367 bp, Homo sapiens
  chr1:10495109-10495476
  hypo
cgcccctctgcggagggagctgcagcgtgtccacggtggtaattgcttgcaggtgtacacagaatggcaggcaggggttttcatttgccgcatttgttccgagtaagacgcactccttggaaagtgggtgacttgctttcagctgctaaagcctcagcttttacaggtgatttatgctccgctcttcaattagtaccgcaggtaattgaaaacaattgcaccaaattgcttttatgaagcaatttgaatgacgaaggcctgaaagggcgaaagtgttctaatttgctgccacttggattcggtgccagcctctcccacaccccttacttttcaccttgttcccgttagctctttgtttctcgggtgc

SEQ ID NO: 21567 - DNA, 113 bp, Homo sapiens; identical to SEQ ID NO: 12007
  chr1:109204221-109204334
  binary

SEQ ID NO: 21568 - DNA, 365 bp, Homo sapiens; identical to SEQ ID NO: 10095
  chr1:110753530-110753895
  binary

SEQ ID NO: 21569 - DNA, 47 bp, Homo sapiens; identical to SEQ ID NO: 10096
  chr1:110753957-110754004
  binary

SEQ ID NO: 21570 - DNA, 360 bp, Homo sapiens; identical to SEQ ID NO: 5868
  chr1:111506646-111507006
  hyper

SEQ ID NO: 21571 - DNA, 118 bp, Homo sapiens; identical to SEQ ID NO: 13098
  chr1:116219361-116219479
  hypo

SEQ ID NO: 21572 - DNA, 142 bp, Homo sapiens; identical to SEQ ID NO: 13102
  chr1:119548917-119549059
  hyper

SEQ ID NO: 21573 - DNA, 517 bp, Homo sapiens; identical to SEQ ID NO: 7646
  chr1:12226892-12227409
  binary

SEQ ID NO: 21574 - DNA, 207 bp, Homo sapiens; identical to SEQ ID NO: 7647
  chr1:12227438-12227645
  binary

SEQ ID NO: 21575 - DNA, 93 bp, Homo sapiens; identical to SEQ ID NO: 13104
  chr1:12251958-12252051
  hypo

SEQ ID NO: 21576 - DNA, 153 bp, Homo sapiens; identical to SEQ ID NO: 15325
  chr1:12460147-12460300
  hypo

SEQ ID NO: 21577 - DNA, 121 bp, Homo sapiens
  chr1:14114676-14114797
  hypo
cggcgtctactcagcccacctggcgtctgttcacttgtttctatttgacagtaactgaatatgtgctcattccagttggatttctatgtagagggtggacgtgtagtcagacaacggtgcc

SEQ ID NO: 21578 - DNA, 77 bp, Homo sapiens; identical to SEQ ID NO: 6657
  chr1:14125492-14125569
  hypo

SEQ ID NO: 21579 - DNA, 54 bp, Homo sapiens; identical to SEQ ID NO: 6658
  chr1:14125622-14125676
  hypo

SEQ ID NO: 21580 - DNA, 84 bp, Homo sapiens; identical to SEQ ID NO: 7651
  chr1:150586185-150586269
  hyper

SEQ ID NO: 21581 - DNA, 43 bp, Homo sapiens; identical to SEQ ID NO: 7658
  chr1:156390054-156390097
  hyper

SEQ ID NO: 21582 - DNA, 287 bp, Homo sapiens; identical to SEQ ID NO: 15335
  chr1:160953524-160953811
  hypo

SEQ ID NO: 21583 - DNA, 367 bp, Homo sapiens
  chr1:161195526-161195893
  hyper
cgctcacaagtttttttccgaccttggagaggcctagtgatctaaagccttccacttaagtctaaggggccaccaatcaagtcctgcccgcctctgcagctccagggttgaagctcttgggccgtcagacctgccactcattttcttcctcccttcccattggcccatggtaaatagcgaggcttttttttttttttttttttttcattgattgggcggggcccaatcagggttgggttgggtctttgacagctttctttgccagattcaaagatggcgcttacggccacgctaagaatgcagcgtgaagctgcagttctgccatcactcaagatggctgcccccatcaagatgaccggggtgtgcc

SEQ ID NO: 21584 - DNA, 187 bp, Homo sapiens
  chr1:161196150-161196337
  hyper
cgtcggaccatgtggaagtttctgaggctggggagccggataatggggggtggggcccgttggggggtaaaggggcaatagcgtcctttcacaggctaacctcggctcttcccagtcctctggactaaaatggggaacacattgggcctggcaccaatggggactttgccccgccggagcccccgcc

SEQ ID NO: 21585 - DNA, 93 bp, Homo sapiens; identical to SEQ ID NO: 7665
  chr1:161276123-161276216
  hyper

SEQ ID NO: 21586 - DNA, 805 bp, Homo sapiens
  chr1:165737832-165738637
  hyper
cgcgatctttcccctggtggcacaggggaccccggggcccttcctcccggggactgatcaaacgtctgagaaatacccgctctcaccctctgcgagcagagccgtgcacacagagataaaaacgatgaggagagtgtccgcgaacatagtgctcatctcgcaccttcgtctctgcactctcacccgccagggggaaagcgctctacagccaggaaaagtgaagcgaaaacggcttccgtagactccgccaccaccgagtaacagaccaactctgacagcccgaagatcgcacttccgcttccggggcatagcaccggaaaggctcgtatcggagaacggtgtggccacgagagtctagaggaaaccaacccgcaactcactggagctgaagggctggtagtcaggccgaatctcgcgagaattggaactatttcagagccagaggaggatagtggcggcggcgaactttgcccggtagattttactgactggggtgctggcgcgcgcctttttctcggccagaatccagttattgggatagtcttgacttctacctcagcccaacttctgtggtcgtaatattagtttagcttgggtttgccgtgaagtaagaagactgacttccgcaaaggtactgaacgactgggtgtaggtgccagggcatggacgtgaagctggaaccgcgaaatgagttagttgtgggccgctggcctcaaggagcgaacgtcagcgcgaagaggagaagcttgtgcatacgctctgataagggttttaatagaggtattaccacagtgctgcgtgacac

SEQ ID NO: 21587 - DNA, 181 bp, Homo sapiens; identical to SEQ ID NO: 15336
  chr1:171570080-171570261
  hypo

SEQ ID NO: 21588 - DNA, 426 bp, Homo sapiens
  chr1:172357766-172358192
  hypo
cgcaaggcccacatccggccgaggaccagctcctgccattccctctcctggcccccactctggggctcctccagtcccattccgtccaggcccattacctcctttccccagcagcagtgactccttcggagcccctccacaagttccatctaggcctacgagggccccgcccagtgtcccaaggtaaggcatggagcagaaattgggggggtagtgcgccttggttctcttctcatagaatgacagacaaaatttatttgaaagagaaaattgcaaagatcttatcgtacgtgtttgcagttttcacaatgaacagagactataggaaaattgccaaccctgttatgccatttaaaaatcacttgtgatcattgaaatttctcatttatcaattggcacagactaaataggactaaagaacactcc

SEQ ID NO: 21589 - DNA, 153 bp, Homo sapiens; identical to SEQ ID NO: 6672
  chr1:175375048-175375201
  hypo

SEQ ID NO: 21590 - DNA, 131 bp, Homo sapiens; identical to SEQ ID NO: 15337
  chr1:180235795-180235926
  hypo

SEQ ID NO: 21591 - DNA, 192 bp, Homo sapiens
  chr1:180945775-180945967
  hypo
cgccgatctggaaggcaggacatggggattagctctcacagggactccacattccccaagatacagttatatggaatttatggcaccctttgaagcagaaaaggggcagaacgtgcaaatgacggggccatgatcttacacctgcctaggtgcctgatgctctaatgctgctctgttcttggcctgcacttc

SEQ ID NO: 21592 - DNA, 205 bp, Homo sapiens; identical to SEQ ID NO: 8862
  chr1:18434105-18434310
  binary

SEQ ID NO: 21593 - DNA, 37 bp, Homo sapiens; identical to SEQ ID NO: 8863
  chr1:18434816-18434853
  binary

SEQ ID NO: 21594 - DNA, 119 bp, Homo sapiens; identical to SEQ ID NO: 15340
  chr1:184633170-184633289
  hyper

SEQ ID NO: 21595 - DNA, 81 bp, Homo sapiens; identical to SEQ ID NO: 15341
  chr1:184633350-184633431
  hyper

SEQ ID NO: 21596 - DNA, 388 bp, Homo sapiens; identical to SEQ ID NO: 15342
  chr1:193149436-193149824
  hypo

SEQ ID NO: 21597 - DNA, 94 bp, Homo sapiens; identical to SEQ ID NO: 8865
  chr1:196577278-196577372
  hyper

SEQ ID NO: 21598 - DNA, 194 bp, Homo sapiens; identical to SEQ ID NO: 8866
  chr1:196577435-196577629
  hyper

SEQ ID NO: 21599 - DNA, 368 bp, Homo sapiens
  chr1:205038784-205039152
  hypo
cgcggataacttcctgtcccccttccacgcacccgctgccccttacgcgaatccacgctgcaggcgtaggcgtccagggccgctactcttggcaaaggttgggtggggccagggaacgggcagggacacatgccgcggaccctcgcccatgccatgctcttgcccctcagcccatgtcacgggagtaccagaacggagacggcttcggctacctgctgtccttccgcaggcagggcagcactcactggcagaccgcccgggtgcctggcgccgatgcccagtactttgtctacagcaacgagagcgtccggccctacacgccctttgaggtcaagatccgcagctacaaccgccgcggggatgggccc

SEQ ID NO: 21600 - DNA, 92 bp, Homo sapiens; identical to SEQ ID NO: 10111
  chr1:207240948-207241040
  hypo

SEQ ID NO: 21601 - DNA, 152 bp, Homo sapiens; identical to SEQ ID NO: 15351
  chr1:219347035-219347187
  hyper

SEQ ID NO: 21602 - DNA, 55 bp, Homo sapiens; identical to SEQ ID NO: 15352
  chr1:219347516-219347571
  binary

SEQ ID NO: 21603 - DNA, 262 bp, Homo sapiens; identical to SEQ ID NO: 15354
  chr1:230266303-230266565
  hypo

SEQ ID NO: 21604 - DNA, 175 bp, Homo sapiens; identical to SEQ ID NO: 15357
  chr1:233085208-233085383
  hypo

SEQ ID NO: 21605 - DNA, 48 bp, Homo sapiens; identical to SEQ ID NO: 10904
  chr1:2331316-2331364
  hypo

SEQ ID NO: 21606 - DNA, 183 bp, Homo sapiens; identical to SEQ ID NO: 10905
  chr1:2331437-2331620
  hypo

SEQ ID NO: 21607 - DNA, 694 bp, Homo sapiens
  chr1:236444211-236444905
  binary
cgaaaggatctggtcagctaagcctcagatttctagcacactgagaacacttgtaatcatcgcttcacatcaacaaccagccagcacctcacgactgccagagccagagcctccatccacgagccacaacgccccactcagacccccccagtctcgtattgggacttacctggcgatgccacttggcagacacagctcagctgggtaaaaataaagcaatcttgagcaagggaaggtgctcgaggaagagtaaaagcccagaaagctctagtccgacagttcgagtgaagtcttgccccctcccaatcccctgcgcctggcggggcctcgggggtctgcggagtgcccccaactctcagtctccctccctcactaactcctgaagggaaggacgtcaccgtttctctgggcgctcgctcccttcgcaagacagccgaggtggttcatgcccgtcccatctcccgccacactcccagccgcttaacacatccgagaggaaaaaacgaaaacagctcagggggaccgtcaccatcttcctcttttgactgccattacccggagtgtcgccgtccccccaccctgcgggcggttcgcagatgtttcccgcactggacggtcaggtctctgctccccgggttttctgctcgccagaaatcacctcttttctggcccggccctgcccggccctccccgc

SEQ ID NO: 21608 - DNA, 37 bp, Homo sapiens; identical to SEQ ID NO: 16219
  chr1:237205188-237205225
  binary

SEQ ID NO: 21609 - DNA, 205 bp, Homo sapiens
  chr1:2377210-2377415
  hypo
cggcacacacggattgccgtaagccgcagcagccaggtctgacaatacgagttgtaattggattttaatttttaatgtccacaacacatgaagagcttcggaccaatttgtgtatcttctgttactctgcgcctaataggaccgcttcattagctgctgtcgcacccacagtgccgtctgtccgggaacggagggagcctggccc

SEQ ID NO: 21610 - DNA, 169 bp, Homo sapiens
  chr1:244080795-244080964
  binary
tgtcatcaaggggcaggctgctcaggatgcaaggtaaccagagctttcctcggactgcttcagtctttggggacgtggggtcaccctaatccttcctgtttatattgtgaacgcgtaggcagcgagacttaagctctgcgtcggtcaataagcatcacgacgcaggcat

SEQ ID NO: 21611 - DNA, 105 bp, Homo sapiens; identical to SEQ ID NO: 15364
  chr1:246160284-246160389
  hypo

SEQ ID NO: 21612 - DNA, 216 bp, Homo sapiens
  chr1:246310269-246310485
  hypo
cgttttcttgttaatcggcaggcaggcgtgacagtgttcggcagaggacaatctgttcgagaataattagattccccctcgcttcttgcgttggtggcggaagcacccggagtatttacaatacaccattttgcttccatccgagtccatatgttcgctggtcaggttaaaactgaggctgcatggcacatttttcactgtaaacaacgctgcccc

SEQ ID NO: 21613 - DNA, 103 bp, Homo sapiens; identical to SEQ ID NO: 15365
  chr1:25919205-25919308
  hypo

SEQ ID NO: 21614 - DNA, 120 bp, Homo sapiens; identical to SEQ ID NO: 15366
  chr1:25919337-25919457
  hypo

SEQ ID NO: 21615 - DNA, 130 bp, Homo sapiens; identical to SEQ ID NO: 6707
  chr1:32410105-32410235
  hyper

SEQ ID NO: 21616 - DNA, 62 bp, Homo sapiens
  chr1:33016544-33016606
  hypo
cgagactccgtctcaaaaaaaaaaaaaaaaagccacaaattaccaccgtacacacccagtac

SEQ ID NO: 21617 - DNA, 141 bp, Homo sapiens; identical to SEQ ID NO: 10139
  chr1:44717932-44718073
  hypo

SEQ ID NO: 21618 - DNA, 138 bp, Homo sapiens; identical to SEQ ID NO: 10140
  chr1:44718164-44718302
  hypo

SEQ ID NO: 21619 - DNA, 361 bp, Homo sapiens
  chr1:44971165-44971526
  hypo
cggctggcccgcagcagggaagccctcttgcctagctctgcatggactgctcgcttgcctgagtttgcattatttatttaatgtcttgtaccgtaaataatggtaactttatggttattaggaacgggttaaggtacatgcgggtagcaccaggctgccttcaaaaggaacagtcctggcataaaatgttgcgataattgcttcactgctgagtgttggtctttattttgtgtctgatttgtcccttaagccagcgtaacattctccccacggcaggagaatgcagagagcaaattgaagggctgagcatgaacaatgcgacatggcgcactgctgggtttttcttttttcctctttcttc

SEQ ID NO: 21620 - DNA, 93 bp, Homo sapiens
  chr1:46111798-46111891
  hypo
cggcgtttccctctcttttcggcattggtgatactcttgagagcaacaggtaggatgttcacacacaccattgtggcagcgcgaaacaatgcc

SEQ ID NO: 21621 - DNA, 1865 bp, Homo sapiens; identical to SEQ ID NO: 15385
  chr1:46767970-46769835
  hyper

SEQ ID NO: 21622 - DNA, 42 bp, Homo sapiens
  chr1:46921731-46921773
  hypo
cgcagccaggcccccgagtgtgcgccgtgtaaagtgacacat

SEQ ID NO: 21623 - DNA, 209 bp, Homo sapiens; identical to SEQ ID NO: 15386
  chr1:46963465-46963674
  hypo

SEQ ID NO: 21624 - DNA, 233 bp, Homo sapiens
  chr1:47041011-47041244
  hypo
cgactggaagcaattgcggctaataacactgaatactaggtgtgtgtcctggaggcaagcagcaaataattacttgccctccctcttgcccataaatcacggggcagtatttacattgcctggagaaaatggaaacatctgtcaaatggacttggggcctaacatgggcaccgctagaccctaactgctaagcgctgcttaatgaaacggccgcgttcctggccactgtagca

SEQ ID NO: 21625 - DNA, 37 bp, Homo sapiens
  chr1:47041273-47041310
  hypo
gtctgcccgagtatttcagtgctctgccaacaaggtc

SEQ ID NO: 21626 - DNA, 391 bp, Homo sapiens
  chr1:61913163-61913554
  hypo
cgcgaaaccccgtcgccactgcattttccgcagcagagccatccactgcactgtctgggctccacccagaaaatccggcagtgccatcatgaccaaatagataggaactctggacaatttcatcgggtcattgtccccttaatctccacgctgcacctcagatctcaagcagcttccgtggcgcaggctcaatttaatggatagaatctatttttcatgaaaaagcaggaaataagctgtctctttcataaaaagatttacaaaatgtaatcattgttgaaatattccctttgaactgccgtgtccacgggggtctccggctcccagagtcgtgcttcattagaaccccgtcataagcggctccagaagggcaggtacgctggtggtgccc

SEQ ID NO: 21627 - DNA, 57 bp, Homo sapiens; identical to SEQ ID NO: 15393
  chr1:6391374-6391431
  hypo

SEQ ID NO: 21628 - DNA, 94 bp, Homo sapiens; identical to SEQ ID NO: 15394
  chr1:6391541-6391635
  hypo

SEQ ID NO: 21629 - DNA, 61 bp, Homo sapiens; identical to SEQ ID NO: 7738
  chr1:66999412-66999473
  hyper

SEQ ID NO: 21630 - DNA, 36 bp, Homo sapiens; identical to SEQ ID NO: 7739
  chr1:66999673-66999709
  hyper

SEQ ID NO: 21631 - DNA, 107 bp, Homo sapiens; identical to SEQ ID NO: 15395
  chr1:6713808-6713915
  hypo

SEQ ID NO: 21632 - DNA, 308 bp, Homo sapiens; identical to SEQ ID NO: 15396
  chr1:6714041-6714349
  hypo

SEQ ID NO: 21633 - DNA, 248 bp, Homo sapiens
  chr1:8014160-8014408
  hyper
cgcgacgctctaaaggaagtgacctttaggggctgttactctcagaccaggcccagcagcacccggcgcatttacgtcggatctgacccctgcaagcaccggcgcgaccgcgctagcggctgggaacacgcgacggtcccgcccactgcgacctgactcggccaatcccgggtggcgcatgctgcggccgccggaagtggacctacgtcatgcaggtcagtcggtaggtttccggcgcccagcgcccc

SEQ ID NO: 21634 - DNA, 77 bp, Homo sapiens
  chr1:86277780-86277857
  hypo
cgctctcgttctctgttttgcccattatgaactcggtaataatcgaattcactgaaccataaaattgaatgtatacc

SEQ ID NO: 21635 - DNA, 438 bp, Homo sapiens; identical to SEQ ID NO: 13190
  chr1:90308855-90309293
  binary

SEQ ID NO: 21636 - DNA, 115 bp, Homo sapiens; identical to SEQ ID NO: 13191
  chr1:90309490-90309605
  hyper

SEQ ID NO: 21637 - DNA, 61 bp, Homo sapiens; identical to SEQ ID NO: 7744
  chr1:91185065-91185126
  hyper

SEQ ID NO: 21638 - DNA, 124 bp, Homo sapiens; identical to SEQ ID NO: 5893
  chr10:100994695-100994819
  hyper

SEQ ID NO: 21639 - DNA, 57 bp, Homo sapiens; identical to SEQ ID NO: 10154
  chr10:101089476-101089533
  hyper

SEQ ID NO: 21640 - DNA, 237 bp, Homo sapiens; identical to SEQ ID NO: 10155
  chr10:101089565-101089802
  hyper

SEQ ID NO: 21641 - DNA, 110 bp, Homo sapiens; identical to SEQ ID NO: 15402
  chr10:102587493-102587603
  hyper

SEQ ID NO: 21642 - DNA, 164 bp, Homo sapiens; identical to SEQ ID NO: 8929
  chr10:102587906-102588070
  hyper

SEQ ID NO: 21643 - DNA, 78 bp, Homo sapiens; identical to SEQ ID NO: 8930
  chr10:102588175-102588253
  hyper

SEQ ID NO: 21644 - DNA, 168 bp, Homo sapiens
  chr10:103817648-103817816
  hypo
cgccagtgcctgggaaggcacctgttacttagcagacgggcctttccctgaggaagttagagaacactctgcttcaccacctcttgttggaagcctgacatcagccaggcctacccgcagccaaccggaggcttaaacctctccgagatgctgtgcttcagcggtcac

SEQ ID NO: 21645 - DNA, 293 bp, Homo sapiens; identical to SEQ ID NO: 5894
  chr10:106398982-106399275
  hyper

SEQ ID NO: 21646 - DNA, 82 bp, Homo sapiens
  chr10:108924881-108924963
  hyper
ttctagttgaggagatagggatgggtgggcttctgctccttccctctcttatgcttcctgagttggcatcttgaccttaccc

SEQ ID NO: 21647 - DNA, 40 bp, Homo sapiens; identical to SEQ ID NO: 16241
  chr10:110671608-110671648
  hyper

SEQ ID NO: 21648 - DNA, 45 bp, Homo sapiens
  chr10:114343145-114343190
  hypo
cgctttatcaggaatgcggttgcattcaggtctgttgtcctaagc

SEQ ID NO: 21649 - DNA, 185 bp, Homo sapiens
  chr10:118031118-118031303
  hyper
cgggaaaaacttttctcttccaagtttgctctcccggccccaatgctccccaactccacctgcccgccgcggctccgcgagctcccagagactctctgggggtgcagggccctgggctggagggcttcttagtcccccgccaagttgggtcattaaaaaccacaggaaatcaaaaccaagcccga

SEQ ID NO: 21650 - DNA, 240 bp, Homo sapiens; identical to SEQ ID NO: 6731
  chr10:118891774-118892014
  hyper

SEQ ID NO: 21651 - DNA, 112 bp, Homo sapiens
  chr10:119294170-119294282
  hyper
cgcgccgctgcgatgccaccctttgttgcgcacgccgcccccggcaagctgctggcggccggggctaagcggagggcggccgcggtcgggcctctccgggtccacgccaggg

SEQ ID NO: 21652 - DNA, 117 bp, Homo sapiens
  chr10:119296211-119296328
  hyper
gtcctaggctttcatttgaaggcagctgagggagaaagaaactgcaaacccctttggttctgtttccttgctttcaataatgaatcgagacagcgtgtgtgtggtgagggagtgacg

SEQ ID NO: 21653 - DNA, 53 bp, Homo sapiens
  chr10:119296362-119296415
  hyper
gtggggtcctgccagtggctccatgcgtcactgaaacattgggtctcaaaacg

SEQ ID NO: 21654 - DNA, 63 bp, Homo sapiens
  chr10:119296567-119296630
  hyper
ccttgctatgacacgggtttccagtgaagcccaagcggattccacggccccacatcaccggag

SEQ ID NO: 21655 - DNA, 69 bp, Homo sapiens; identical to SEQ ID NO: 15408
  chr10:119494306-119494375
  hyper

SEQ ID NO: 21656 - DNA, 138 bp, Homo sapiens; identical to SEQ ID NO: 7761
  chr10:122708760-122708898
  hyper

SEQ ID NO: 21657 - DNA, 69 bp, Homo sapiens
  chr10:124639064-124639133
  hyper
cgtcgaaaaaccgccgtggtgcccgcgcacagtgcaccgcgcctgcgcatggtctccaaaggctgagcg

SEQ ID NO: 21658 - DNA, 163 bp, Homo sapiens
  chr10:124639526-124639689
  hyper
ggtgcgccgggccgccggcgaccgggtcgctgcgctcggcgactgccgcgctcctcggggaacgtgagggtctgagtccgggatccaggagagcagttggtgtcgggtctctgcgggggagcggggctgcgaggtggaggcgaggaccggggtgggcggaggc

SEQ ID NO: 21659 - DNA, 134 bp, Homo sapiens
  chr10:125017540-125017674
  hypo
cgggaaaacattaaggtatacaaagagttcttaataaatagaaataaatagtgcagggtttgcgccatggtgattttcgatggttatctgccctcgccgctgctgctccagctgcatcttccgcggggctcagc

SEQ ID NO: 21660 - DNA, 358 bp, Homo sapiens
  chr10:126296075-126296433
  hypo
cggacgccattcggctaggtacacgtgcggagtggggctggccggattctcattacaaagcgtcatcttctatggggagacctcttgttccctctcggggctggttgcttttgcctggacaataagcctggccccagggcacctggggaaggtgtccaaggagggggtcctgggggccagtcccccgggggctcggatgatgaatcatgggcggtgtttgctggaagaatttttgttccgcttcgggcaacaaggaacccaaacctctcactgttgtggggagaaaagttggaaatcagatgggaactggctgcggtaccagagaggacgtcagacccgggccgcggcctcagccccc

SEQ ID NO: 21661 - DNA, 296 bp, Homo sapiens; identical to SEQ ID NO: 15409
  chr10:131647424-131647720
  hypo

SEQ ID NO: 21662 - DNA, 261 bp, Homo sapiens; identical to SEQ ID NO: 15410
  chr10:131844765-131845026
  hypo

SEQ ID NO: 21663 - DNA, 199 bp, Homo sapiens; identical to SEQ ID NO: 15413
  chr10:134477298-134477497
  hypo

SEQ ID NO: 21664 - DNA, 267 bp, Homo sapiens; identical to SEQ ID NO: 15414
  chr10:134491114-134491381
  hypo

SEQ ID NO: 21665 - DNA, 592 bp, Homo sapiens; identical to SEQ ID NO: 15415
  chr10:134527015-134527607
  hypo

SEQ ID NO: 21666 - DNA, 529 bp, Homo sapiens
  chr10:134529092-134529621
  hypo
cgctcaaagagcccccaacctaaatgtttctctttagacgttcccagaacttgccttgctgtgcagccagtaaagaaaagctgctgcgtctccaggcaaaggcaaactcggcattaaagatctgggtcaccctgagcgctcctggccacagggctggttctcgcgctcctcacactcccgctggcctcggagaacagctcacaggctcttgctggtcgtgggctcgtcccaatcaggctttctcagactcggagacctcagggtggccgaggtcatgtgtctgtggagcccaccaggcaccctgtggtgtccctccgcatgcccgggactcctggcagcacaagcccgtgccctctgccgttccgctgccgtgaagcccgctgcctctgtgtcgccttagcctctccagggcgtggtcggtccactgctgcccggcaggaggggctcctttcgcctgtgcctcagctgatccatggctgcgatcttcattttgttgaacatggagtcaagagccaagaaaggtggtgcc

SEQ ID NO: 21667 - DNA, 418 bp, Homo sapiens; identical to SEQ ID NO: 15417
  chr10:134592912-134593330
  hypo

SEQ ID NO: 21668 - DNA, 134 bp, Homo sapiens; identical to SEQ ID NO: 15418
  chr10:134593416-134593550
  hypo

SEQ ID NO: 21669 - DNA, 41 bp, Homo sapiens; identical to SEQ ID NO: 15420
  chr10:134610534-134610575
  hypo

SEQ ID NO: 21670 - DNA, 243 bp, Homo sapiens; identical to SEQ ID NO: 13212
  chr10:134699406-134699649
  hypo

SEQ ID NO: 21671 - DNA, 231 bp, Homo sapiens; identical to SEQ ID NO: 6735
  chr10:134733835-134734066
  hypo

SEQ ID NO: 21672 - DNA, 133 bp, Homo sapiens; identical to SEQ ID NO: 15424
  chr10:134796042-134796175
  hypo

SEQ ID NO: 21673 - DNA, 306 bp, Homo sapiens
  chr10:134942147-134942453
  hypo
cggggcgctggcggtgtcacagggccacttcctggacatggtcttcagctgcctgtacggcgccttctgcgtgaccctgggactcttcgtgctcatccaccactgcgccaagcgtgaggacgtgtggcagtgctggtgggcatgctgcccgccccgcaaggacgcccaccccgcacttgacgccaacggggccgcgctgggccgcgccgcctgcctgcactcgccgggactgggccagccacggggcttcgcgcacccaccgggcccctgcaagatgaccaacctgcaggccgcgcagggccacgc

SEQ ID NO: 21674 - DNA, 55 bp, Homo sapiens
  chr10:135016995-135017050
  hypo
cgcacacggtgcagcgagggccgttctctggggcggctggagcagccggtgggca

SEQ ID NO: 21675 - DNA, 361 bp, Homo sapiens
  chr10:135017612-135017973
  hypo
ggccccatggtgcaggccatgggggaacgtggccaccaccatcctcagaagccaggaccaggtgccccggcagcagaacacagctccatggggacacctgcgtttaccaacctcaacctgcccagcccggtaggtccttccttgatgatggaatgttctagacgctgtccaccgggtagccaacagccacgtgtggctactgagctctggaaacatggcccacgtgactgaggacctgatgttttaatttcactgcactttaggcagccacggcagcctgcagctcagtgtgggaggcagggtcgcacttggctgggtggcagcggggtccggagggcttggggaacctggcttagtggcc

SEQ ID NO: 21676 - DNA, 86 bp, Homo sapiens
  chr10:135022978-135023064
  hypo
cgcgtgtgtggtgtgcgcgtctggttgtggagttctgtgtggctttgtgcatgtgtgtggtgtgcgcgtctggttgtcgagttctg

SEQ ID NO: 21677 - DNA, 235 bp, Homo sapiens; identical to SEQ ID NO: 15429
  chr10:135153722-135153957
  hypo

SEQ ID NO: 21678 - DNA, 34 bp, Homo sapiens; identical to SEQ ID NO: 15430
  chr10:135154001-135154035
  hypo

SEQ ID NO: 21679 - DNA, 154 bp, Homo sapiens
  chr10:135192037-135192191
  hyper
cgctcaacttcccgggcgagggacgtttctgcacttgccctcggcttctgaactttgtactttgcgagtgtactttgtactttggtcctgtgtccctgcagccctgtgactacacgcgcacacgcaggcgcgcgcacacgcgaactgacggctc

SEQ ID NO: 21680 - DNA, 41 bp, Homo sapiens
  chr10:15484072-15484113
  hypo
cgtctcaaaaataaaacgaaacaaaacaaaattctggcttg

SEQ ID NO: 21681 - DNA, 247 bp, Homo sapiens
  chr10:15484142-15484389
  hypo
tttctagcgtcatggctccacactgcgtttccttatctgggaatcccagccttactgaactttcagcttctgcagccagccacgctctttctggcctccggctttgctgtgtgctgtttctccagcctggcgatttgctctgtccccagcccctgcactcctttacctgatctgctccgattgatcctgcagtcctccgcggctgagtcacttccttctgcagggaagccgtcctgggttctcctcc

SEQ ID NO: 21682 - DNA, 96 bp, Homo sapiens; identical to SEQ ID NO: 6738
  chr10:1780056-1780152
  hyper

SEQ ID NO: 21683 - DNA, 458 bp, Homo sapiens
  chr10:21797632-21798090
  hypo
cggagcctgctctgccccgcagaccctgcggtctccaggcccggtaggctttttcaggttccgcaggcctggccgaaccggccagatcccgcgttccaagcgtctggagaactggagacaaagcccaagatccaatcccaccgcagagcggctcaagccggcgcccgggacccgcgggcctaggcgcgacccccagcagcctgtgaccgaagaggggagcccgggacccctccgcctctccgcagccctctcgggcggggtcccccaggcccgcccggttccccctgccgcactcagccagctgcttttggaggcctgcgagttccaaacacgccttcccattaattaaaacctggaaagcctggccactttcttctcaggccgaggcagcatctccagaggtccccgcggcactctcggccggcaacggctcccgcgcggggccttggaggccgagc

SEQ ID NO: 21684 - DNA, 87 bp, Homo sapiens; identical to SEQ ID NO: 17270
  chr10:22883126-22883213
  hypo

SEQ ID NO: 21685 - DNA, 223 bp, Homo sapiens; identical to SEQ ID NO: 6743
  chr10:24863037-24863260
  hypo

SEQ ID NO: 21686 - DNA, 47 bp, Homo sapiens
  chr10:26222946-26222993
  hyper
cggccggagtcccgggaagcccctcggcagccagccaagggccctgc

SEQ ID NO: 21687 - DNA, 64 bp, Homo sapiens
  chr10:26503630-26503694
  hyper
cggagttgttattgtggtgacctagagtgtcagagccaggagagcaagaaagaggagccaaact

SEQ ID NO: 21688 - DNA, 91 bp, Homo sapiens; identical to SEQ ID NO: 10174
  chr10:26726986-26727077
  hyper

SEQ ID NO: 21689 - DNA, 171 bp, Homo sapiens
  chr10:373939-374110
  hypo
cgagccgtgaatgtctgcgtcttggagtggaacccagagctgctaagggggcggccaccaaaaccccaaccgtcaggccctgcgaaccctttcaaggcagcctcggcacacggacaaccgacaagggtcctgagcaaggaggacgcacagctcgagctggctttgacattc

SEQ ID NO: 21690 - DNA, 136 bp, Homo sapiens; identical to SEQ ID NO: 7773
  chr10:43697752-43697888
  hyper

SEQ ID NO: 21691 - DNA, 125 bp, Homo sapiens; identical to SEQ ID NO: 7774
  chr10:43698155-43698280
  hyper

SEQ ID NO: 21692 - DNA, 398 bp, Homo sapiens; identical to SEQ ID NO: 6745
  chr10:43892377-43892775
  hyper

SEQ ID NO: 21693 - DNA, 171 bp, Homo sapiens; identical to SEQ ID NO: 6746
  chr10:43892970-43893141
  hyper

SEQ ID NO: 21694 - DNA, 107 bp, Homo sapiens; identical to SEQ ID NO: 5901
  chr10:44806674-44806781
  hyper

SEQ ID NO: 21695 - DNA, 174 bp, Homo sapiens; identical to SEQ ID NO: 20843
  chr10:44879650-44879824
  hyper

SEQ ID NO: 21696 - DNA, 198 bp, Homo sapiens; identical to SEQ ID NO: 5902
  chr10:44882100-44882298
  hyper

SEQ ID NO: 21697 - DNA, 250 bp, Homo sapiens
  chr10:482039-482289
  hypo
cgaattcagttcagaccgggcgcacttcatgtactcagccaccacgtgtggtgagtgacagagatcatcttgcatgtgtgtccacattttactgcctttttcttgaccacagattctacctccggtttctctgtgtatgcagtgattgtttgcttaatattgcacattgtgggtaacgtgttgagcacgctcaggatcccataagcttcttcggaagctttccagctcttgttttagcaggcagcgcagg

SEQ ID NO: 21698 - DNA, 137 bp, Homo sapiens
  chr10:482318-482455
  hypo
gcttggattgatttgctgctggtgtggatgggtggagagctccagtcctgcacccactccgatctccgcctcctggacttggcagggtggcatgctccgcccacaccagagctctctccgagctccgcctcctggac

SEQ ID NO: 21699 - DNA, 136 bp, Homo sapiens
  chr10:5898121-5898257
  hypo
cgtgttgggtgcacgtgctgggccaagcatcatgcacgctgtaaggtatatagatgtgatttggtcaaggtagagaccgaggcggatatacaggcctgcacggctcagtgagtttggtgcgcaggcgcacacctcc

SEQ ID NO: 21700 - DNA, 130 bp, Homo sapiens; identical to SEQ ID NO: 6750
  chr10:6023448-6023578
  hypo

SEQ ID NO: 21701 - DNA, 99 bp, Homo sapiens; identical to SEQ ID NO: 8957
  chr10:71333132-71333231
  hyper

SEQ ID NO: 21702 - DNA, 162 bp, Homo sapiens
  chr10:73445891-73446053
  hypo
cgagccgctgatttagaactaatagcgaatgcagcgccaagatccggggaaatatcaccgctaataagtttctgcctcatgctctgtcactgacattctccacaccgtttcgtgcagccaagcagaagcttaaatgtataagtatatggggcgctcgcaccc

SEQ ID NO: 21703 - DNA, 238 bp, Homo sapiens; identical to SEQ ID NO: 15453
  chr10:73514960-73515198
  hypo

SEQ ID NO: 21704 - DNA, 147 bp, Homo sapiens; identical to SEQ ID NO: 7784
  chr10:73846836-73846983
  hyper

SEQ ID NO: 21705 - DNA, 262 bp, Homo sapiens; identical to SEQ ID NO: 14514
  chr10:73847427-73847689
  hyper

SEQ ID NO: 21706 - DNA, 57 bp, Homo sapiens; identical to SEQ ID NO: 10187
  chr10:7449898-7449955
  hyper

SEQ ID NO: 21707 - DNA, 61 bp, Homo sapiens; identical to SEQ ID NO: 10188
  chr10:7453036-7453097
  binary

SEQ ID NO: 21708 - DNA, 229 bp, Homo sapiens; identical to SEQ ID NO: 10189
  chr10:7454077-7454306
  hyper

SEQ ID NO: 21709 - DNA, 168 bp, Homo sapiens
  chr10:76524062-76524230
  hypo
cgaggaaaagaaagatgaaagatcagagaggcgacaccagttgaaacaggctgctgaattattacagcgagtgaccatgggacgatggagccgggggcggccaccccctgctggctcagtaggtcaagtcagtgcggtgtcccagcagaggcggcttgaacttaaggc

SEQ ID NO: 21710 - DNA, 52 bp, Homo sapiens; identical to SEQ ID NO: 12156
  chr10:8097537-8097589
  binary

SEQ ID NO: 21711 - DNA, 416 bp, Homo sapiens
  chr10:83635818-83636234
  hyper
ctggaccctgtctccctttcaggatgctgcctcctcttcttcctcttcttcctcctccgctaccaccaccacaccagaaactagcaccagccccaaatttcgtaagtaaacactgtgtctcaactatgatttactactgagtttcccttctgccctcctgctgtctttttccctcgccgcctgttttctagcaagccccctcccccatcccaggtttggggcagagtgagagctgattaaaactggccaccagcggggaagaaggtgccagcctgctctggttctgggggggtgggggcgtgtaggaacgggagggagattgtcaggctccactggccccactttagcgggtcccaagtgagaacagatctcccaactcccttcaaagggttaacgcgagtgcgatccctcctcac

SEQ ID NO: 21712 - DNA, 64 bp, Homo sapiens
  chr10:83636388-83636452
  hyper
ggaagttatgtccttgtgtggggtgacgagttgatggagataatggtagaatgttgctgaggac

SEQ ID NO: 21713 - DNA, 258 bp, Homo sapiens; identical to SEQ ID NO: 15458
  chr10:851928-852186
  hypo

SEQ ID NO: 21714 - DNA, 54 bp, Homo sapiens; identical to SEQ ID NO: 20860
  chr10:90342577-90342631
  hyper

SEQ ID NO: 21715 - DNA, 51 bp, Homo sapiens; identical to SEQ ID NO: 6388
  chr10:98292796-98292847
  hypo

SEQ ID NO: 21716 - DNA, 499 bp, Homo sapiens; identical to SEQ ID NO: 14529
  chr11:1103476-1103975
  hypo

SEQ ID NO: 21717 - DNA, 313 bp, Homo sapiens; identical to SEQ ID NO: 14530
  chr11:1104214-1104527
  hypo

SEQ ID NO: 21718 - DNA, 45 bp, Homo sapiens
  chr11:112108650-112108695
  hypo
cgaacgatcatttgtattacctcaattgaggtaggaactaccagc

SEQ ID NO: 21719 - DNA, 81 bp, Homo sapiens; identical to SEQ ID NO: 14531
  chr11:114115648-114115729
  hypo

SEQ ID NO: 21720 - DNA, 54 bp, Homo sapiens
  chr11:120367550-120367604
  hypo
cgattaaactccgctttgtttcagagatgatcataatttggccagcttcatttc

SEQ ID NO: 21721 - DNA, 67 bp, Homo sapiens
  chr11:120367696-120367763
  hypo
gcttttcccttagtctgaaatgtactttggaaacttccaagatgagtattaaaagtaatagctggcc

SEQ ID NO: 21722 - DNA, 54 bp, Homo sapiens
  chr11:121593326-121593380
  hyper
cgtggtcccgccaaacaaaggaacatgtgtgctgcaaaccatccccctatcacg

SEQ ID NO: 21723 - DNA, 223 bp, Homo sapiens
  chr11:121593636-121593859
  hyper
actctcccgggatgctgtcgtgggggagggggcccggcactgtatacagctgtcaaaacgtctccgacaggagacgaaggcacatctgcacaagcctgtctcaggctgcggggcacacagggagcgcctcaaacctatcagtgtaatgccgagcggtaattgcattaggattagttatctcctgtgctctgctcattagcccggaggatggctcgcatccagc

SEQ ID NO: 21724 - DNA, 129 bp, Homo sapiens; identical to SEQ ID NO: 10198
  chr11:128562635-128562764
  hyper

SEQ ID NO: 21725 - DNA, 161 bp, Homo sapiens; identical to SEQ ID NO: 5733
  chr11:133939437-133939598
  binary

SEQ ID NO: 21726 - DNA, 351 bp, Homo sapiens; identical to SEQ ID NO: 15469
  chr11:1466353-1466704
  hypo

SEQ ID NO: 21727 - DNA, 108 bp, Homo sapiens; identical to SEQ ID NO: 14533
  chr11:17373019-17373127
  hyper

SEQ ID NO: 21728 - DNA, 167 bp, Homo sapiens; identical to SEQ ID NO: 14534
  chr11:17373405-17373572
  hyper

SEQ ID NO: 21729 - DNA, 116 bp, Homo sapiens; identical to SEQ ID NO: 14535
  chr11:17373642-17373758
  hyper

SEQ ID NO: 21730 - DNA, 203 bp, Homo sapiens
  chr11:17374000-17374203
  hyper
cgtgagcccccgcgcccggcctgggggctctattttcaagcgtccctcctttgtgagaagcggagtccccgatgcaacaggtttacattgaaggcctgccctgtgcagggtcgacacctgtgagagcggaaacggtgcttccttggatgtcgcgcgtttggtgcctcggtatttggcgcctctctcgcatcatccgaggggcc

SEQ ID NO: 21731 - DNA, 35 bp, Homo sapiens
  chr11:1824257-1824292
  hypo
atgacgttgatcttcatcgtgccaggcgccagggc

SEQ ID NO: 21732 - DNA, 917 bp, Homo sapiens; identical to SEQ ID NO: 14537
  chr11:19798519-19799436
  hyper

SEQ ID NO: 21733 - DNA, 171 bp, Homo sapiens
  chr11:40314522-40314693
  hyper
cgaagaatttggggagcaacttcccccccactctccatccttccggccggccccttcgccaaagatctgattagatttctcatcacaacccagtgcgcaattgaatttttgatttcagccacccggccagccaccttcccctctcccctccaaactccggttatatcctgt

SEQ ID NO: 21734 - DNA, 362 bp, Homo sapiens
  chr11:40314923-40315285
  hyper
aggtgttgcagaactccgcggtcggggccgggatcacgggggagacgcaggatgcggtccctcgccggtggcccctgccagcccccgggtccccttctcctccatcagccggtagtggctccgggagcgccgaggtgatggaagttgagactggggcttttatttcaaatggggagggcgaagtgaggggacagacagggtggtaggcaaattaaaaaaaacacacacgaaaaaagaaagaaaaaaagaaaaagaagaaaaaaagaaaaaggaagaaaacgggtaaaaaaaaaattccctaatcgctggctcttctcatccttctcaaatgcaactgcagctttgatctcatttccagctgc

SEQ ID NO: 21735 - DNA, 78 bp, Homo sapiens; identical to SEQ ID NO: 10210
  chr11:57194101-57194179
  hyper

SEQ ID NO: 21736 - DNA, 50 bp, Homo sapiens; identical to SEQ ID NO: 17313
  chr11:57334786-57334836
  hyper

SEQ ID NO: 21737 - DNA, 120 bp, Homo sapiens
  chr11:63431997-63432117
  hypo
cgaaactctgtcttttaaaaaaaagcgtactgagcaatgtgaatgtaatgagcaatatcaatgtaatgacacacagcacatacaataagctattgtttttttgttttttttttttgagac

SEQ ID NO: 21738 - DNA, 197 bp, Homo sapiens; identical to SEQ ID NO: 15479
  chr11:63675233-63675430
  hypo

SEQ ID NO: 21739 - DNA, 63 bp, Homo sapiens
  chr11:63860763-63860826
  hypo
cgatcgagtcagctgctggtgttgtcactgctgcggacacagtccttacccgtaagagctcac

SEQ ID NO: 21740 - DNA, 550 bp, Homo sapiens; identical to SEQ ID NO: 7823
  chr11:64512349-64512899
  binary

SEQ ID NO: 21741 - DNA, 190 bp, Homo sapiens
  chr11:65192973-65193163
  hyper
acttaggtggttgatttgaaactgtgaaggtgtgattttttcaggagctggaagtcttagaaaagccttgtaaatgcctatattgtgggcttttaacgtatttaagggaccacttaagacgagattagatgggctcttctggatttgttcctcatttgtcacaggtgtcttgtgattgaaaatcatgagc

SEQ ID NO: 21742 - DNA, 79 bp, Homo sapiens
  chr11:66410904-66410983
  hypo
cgtctgtttcttcaaggcaaacgaatgcacgtgcagttgtccaccagccggcttaggactgcgcccgggatgggagacc

SEQ ID NO: 21743 - DNA, 357 bp, Homo sapiens
  chr11:66411012-66411369
  hypo
gggcactggtccaaagagtgtccgatagatcgttcaggccgcgtggcagacttgaccgagcaatataatgagcaatacggagcagtgcgtacgccttacaccatgagctatggggattcattgtattacaacaacgcgtacggagcgctcgatgcctactacaagcgctgccgtgctgcccggtcctatgaggcagtggcagctgcagctgcctccgtgtataattacgcagagcagaccctgtcccagctgccacaagtccagaatacagccatggccagtcacctcacctccacctctctcgatccctacgatagacacctgttgccgacctcaggagctgctgccacagctgct

SEQ ID NO: 21744 - DNA, 33 bp, Homo sapiens; identical to SEQ ID NO: 18259
  chr11:66658557-66658590
  hypo

SEQ ID NO: 21745 - DNA, 112 bp, Homo sapiens; identical to SEQ ID NO: 17326
  chr11:66886029-66886141
  binary

SEQ ID NO: 21746 - DNA, 56 bp, Homo sapiens
  chr11:73492566-73492622
  hypo
cgttaacaatgtacggcagaacaatgaaatctaagaccattataggacccgtgacc

SEQ ID NO: 21747 - DNA, 76 bp, Homo sapiens; identical to SEQ ID NO: 7848
  chr11:76033216-76033292
  hyper

SEQ ID NO: 21748 - DNA, 118 bp, Homo sapiens; identical to SEQ ID NO: 10218
  chr11:77383112-77383230
  hypo

SEQ ID NO: 21749 - DNA, 290 bp, Homo sapiens; identical to SEQ ID NO: 8999
  chr11:79150336-79150626
  hyper

SEQ ID NO: 21750 - DNA, 345 bp, Homo sapiens; identical to SEQ ID NO: 20889
  chr11:8041149-8041494
  binary

SEQ ID NO: 21751 - DNA, 103 bp, Homo sapiens; identical to SEQ ID NO: 13285
  chr11:850444-850547
  hypo

SEQ ID NO: 21752 - DNA, 246 bp, Homo sapiens
  chr11:91959654-91959900
  hyper
cgggatgagaggaacaggggtgctcccggggtgtgggtgtgctggcggtgacatcctgaggctgcagctcgctggaataatgggctcaaaccaggcggtggagaggggtccccggaatggacgtcgggggcggggaggctgcggagaccctgcgaggtctccgtgaaggactaggaggggctcccgggagggagtggcgcctgcggcccggagcgtgggcggccggtggctctggcacgcggaatc

SEQ ID NO: 21753 - DNA, 256 bp, Homo sapiens
  chr11:91960114-91960370
  hyper
ttggatcccacttccatttacaagtgtcagacaaacccgcgagaacctcccccaacccgccccggccccagccagactagggagggcgcccagggggagggggcgagctgtctgggcagtgcctggggaggtgcgacgcgcccacccggggcttgagcggctggggttcctgtgcgtgggtccttaatgtttaaaagatacacatgaacagcaacaaaacccaaaccactcgtggccacttgttttctgccgcttt

SEQ ID NO: 21754 - DNA, 676 bp, Homo sapiens
  chr11:92930674-92931350
  binary
cgccccactcaacacacacactcacccacacgcgcgcgcgcaaacacacacacacatattttaacgccctattcaggcctgggcttcgtctgaccaagttctcggggtcagataaccggttcctttgcggatgctgaccacggggtcagttagcaatcgggcctcaactcaggccaagcgcggggcccctggaggtgtgggcgcacccgactcccgcacagacccccgcccacgtcagccccggctccctgcccacgcacaacaccgacctagctcctcgcgcctcgccgccccggcagccgccggcgtcgccgccgcttccatctctcgcgggtctccaggacgccgccgcccgagtgctcactctcccgccgctgcgtggccggcgtcaggcccaggcctacctcccctgcccggagggacccgcgcctggtgcccgcctccctgccccggcgctccccaaccgcgcggcgaggagcatgcgcagtgggacagcccggctcggcgggcaccgccggcgaggggcgggaggggccgaagacccgaggactgctgcgaggccgggttgggtaacccgagaggagggttgggtaacctgagatcagcgagggtgggaccttagagctagccgagacccgggcccatagctccctgggggttttaaagatgacggcga

SEQ ID NO: 21755 - DNA, 47 bp, Homo sapiens
  chr11:92931379-92931426
  hyper
aaggcgttagcgttctgtaagtcaccttggagaatgcgaagaaggac

SEQ ID NO: 21756 - DNA, 68 bp, Homo sapiens; identical to SEQ ID NO: 15497
  chr11:9548334-9548402
  hypo

SEQ ID NO: 21757 - DNA, 229 bp, Homo sapiens
  chr12:101674003-101674232
  hyper
cggttgcatcccttcgacactcccgaggccgtcgcgggccactggccctctgcagccatgaagacaaagcccgtttcccacaagaccgagaacacctaccgggtgagcgcgggagcttaggcagggagccgcgggtctccgctgcctcagtcgtgagacaggctctgagcgagactccaggggcctcagacttctgggccgagtgtgtcactttcctggaggctccggc

SEQ ID NO: 21758 - DNA, 349 bp, Homo sapiens; identical to SEQ ID NO: 10236
  chr12:104851545-104851894
  binary

SEQ ID NO: 21759 - DNA, 211 bp, Homo sapiens
  chr12:105472684-105472895
  hypo
cgtgtccaatactgggagttaaggagtggtgacaagcgacaccgtagcaagagacattatggagcgctttgtgtcaaataattgggaccttattgtgaagacaatgagattcactgagccgctttaagcaggagagttaattgaaaccaggagagtctagtttctatgctaatagactgcttaggtaactctggaggcatgaactagctcc

SEQ ID NO: 21760 - DNA, 321 bp, Homo sapiens; identical to SEQ ID NO: 7856
  chr12:111844290-111844611
  binary

SEQ ID NO: 21761 - DNA, 99 bp, Homo sapiens; identical to SEQ ID NO: 7857
  chr12:111844690-111844789
  hyper

SEQ ID NO: 21762 - DNA, 555 bp, Homo sapiens; identical to SEQ ID NO: 13299
  chr12:114273212-114273767
  hypo

SEQ ID NO: 21763 - DNA, 134 bp, Homo sapiens; identical to SEQ ID NO: 13300
  chr12:114273850-114273984
  hypo

SEQ ID NO: 21764 - DNA, 169 bp, Homo sapiens; identical to SEQ ID NO: 7862
  chr12:116394813-116394982
  hypo

SEQ ID NO: 21765 - DNA, 123 bp, Homo sapiens; identical to SEQ ID NO: 18294
  chr12:122970391-122970514
  hypo

SEQ ID NO: 21766 - DNA, 112 bp, Homo sapiens
  chr12:123986845-123986957
  hypo
cggccactgccgggcagacgtcgtagcagaagtctttttgtgtaaggttacaaaggcctttgtgcaaagctgtcgtttttccagagtcttttttgttatcgggcatgcaagc

SEQ ID NO: 21767 - DNA, 84 bp, Homo sapiens; identical to SEQ ID NO: 17348
  chr12:124832004-124832088
  hypo

SEQ ID NO: 21768 - DNA, 156 bp, Homo sapiens
  chr12:12605374-12605530
  hypo
cgcggtttcccatgattgttaagattaggatcgccttgatcgtggctgggtcgggcccaccgggtaggcactgggggccagggtgcgggccggcgcgcaagcctcgcctcgtgatcttgccggcgatccttccccacccactccctcccgcacgcc

SEQ ID NO: 21769 - DNA, 183 bp, Homo sapiens
  chr12:130493339-130493522
  hypo
cgctttttcttaaaaacgtcctaaaggaactaagctccggccagcaccaccacctggagctgcaccgtgtctcccgcggcaggacaggagtccagaactccccttgtccctttgcccagttcccatcacgagaggggctggggtgggcaagcagtgggtatagcagcaggtgcggctaccctc

SEQ ID NO: 21770 - DNA, 210 bp, Homo sapiens
  chr12:132983184-132983394
  hypo
cgccgccctcgacatccccagcacagacgccgccgtcgacgttcccagtgcagacaccgccctcgacgttttcccagccaggacgccgccctcaacattcccagaggggacgccgccctcgacattcccagcaggcgcagctcaggagcaccttgccatctgcagctccctgggggacgagaagaaacagcagccacccctttctcgggc

SEQ ID NO: 21771 - DNA, 224 bp, Homo sapiens
  chr12:132983766-132983990
  hypo
ccgtctcccacctccctcctcttacctccccccacctccccagggcacgcactccctggctcctgcgcgatgcccagcagggtccaaaatgcacctggatgcccgggagccgtcgtccgccccacaggcagccccaggagccatcgcccgccccaaaggcccccccgggagccgtcacctgccccacaggcccccccaggagccgtcgtgcgctcagtcgggtc

SEQ ID NO: 21772 - DNA, 178 bp, Homo sapiens; identical to SEQ ID NO: 10243
  chr12:132986274-132986452
  hypo

SEQ ID NO: 21773 - DNA, 268 bp, Homo sapiens; identical to SEQ ID NO: 10244
  chr12:132986701-132986969
  hypo

SEQ ID NO: 21774 - DNA, 500 bp, Homo sapiens; identical to SEQ ID NO: 16344
  chr12:133121644-133122144
  hypo

SEQ ID NO: 21775 - DNA, 107 bp, Homo sapiens; identical to SEQ ID NO: 5930
  chr12:14928211-14928318
  hyper

SEQ ID NO: 21776 - DNA, 146 bp, Homo sapiens
  chr12:1905625-1905771
  hyper
cggtcataagcgggggagcgcagagccagttttcaattcaggagtgtctactctgaagccctcgcttcactccggagcccgctggctctatcctcgcaccgagcctttgcgacaagtgcacagggaacgctaaccccagccctcaa

SEQ ID NO: 21777 - DNA, 205 bp, Homo sapiens
  chr12:1905826-1906031
  hyper
agaagggagccccgatgccagcgccgcaggtgccgcactgttaaatggtgtgccacgggcccgggggtctagggaccgcctggcgagcggcacgtctggctgaggcgaccctcgaggaggccgccgcattcccagcgtgggggtcctcccgggcttgggtgcggggggtcagcaggagagacccttccgcgcggcctccctgcct

SEQ ID NO: 21778 - DNA, 115 bp, Homo sapiens
  chr12:1906322-1906437
  hyper
ggcctcgggaccacctctccccatcccggctgtcccggtccccagccgtcctgcccgcctcagaccgtccgcctcctgcgtgtctcctccactgaggacggcgggggaagacccc

SEQ ID NO: 21779 - DNA, 99 bp, Homo sapiens
  chr12:1906476-1906575
  hyper
cggctgtggagccgtttcccgggggttccggggccctgcccgcacttccgccttgccgagggcgggaggagtgtggcgggacgggcggcgccgccctgc

SEQ ID NO: 21780 - DNA, 84 bp, Homo sapiens; identical to SEQ ID NO: 6832
  chr12:29373882-29373966
  hypo

SEQ ID NO: 21781 - DNA, 72 bp, Homo sapiens
  chr12:34260770-34260842
  hyper
cgcctggctaggggcaggggcgccgccctcccgcggctccggagctggccaggggaagcgcccgcggggtcc

SEQ ID NO: 21782 - DNA, 136 bp, Homo sapiens
  chr12:34260905-34261041
  hyper
cgctccgccggaccctgtcctccagcgtggctgcggccccatggcctgcgacagccgccccgtccggaattcggcgccctccccggggcagaggccgcggcgtcctcaggctgtagcgccggcctgcgacccccac

SEQ ID NO: 21783 - DNA, 126 bp, Homo sapiens; identical to SEQ ID NO: 16356
  chr12:4273746-4273872
  hyper

SEQ ID NO: 21784 - DNA, 245 bp, Homo sapiens; identical to SEQ ID NO: 5743
  chr12:4378558-4378803
  binary

SEQ ID NO: 21785 - DNA, 51 bp, Homo sapiens; identical to SEQ ID NO: 6838
  chr12:4382915-4382966
  hyper

SEQ ID NO: 21786 - DNA, 210 bp, Homo sapiens; identical to SEQ ID NO: 6839
  chr12:4382999-4383209
  hyper

SEQ ID NO: 21787 - DNA, 255 bp, Homo sapiens; identical to SEQ ID NO: 7894
  chr12:4384059-4384314
  hyper

SEQ ID NO: 21788 - DNA, 79 bp, Homo sapiens; identical to SEQ ID NO: 7895
  chr12:4384533-4384612
  hyper

SEQ ID NO: 21789 - DNA, 70 bp, Homo sapiens; identical to SEQ ID NO: 11059
  chr12:43944719-43944789
  hyper

SEQ ID NO: 21790 - DNA, 182 bp, Homo sapiens; identical to SEQ ID NO: 18313
  chr12:4672181-4672363
  hypo

SEQ ID NO: 21791 - DNA, 43 bp, Homo sapiens
  chr12:49989816-49989859
  hypo
acttagagaaacaggccattaggaatccattctcactgtgttc

SEQ ID NO: 21792 - DNA, 180 bp, Homo sapiens; identical to SEQ ID NO: 10259
  chr12:5020472-5020652
  hyper

SEQ ID NO: 21793 - DNA, 37 bp, Homo sapiens; identical to SEQ ID NO: 6842
  chr12:51421646-51421683
  hypo

SEQ ID NO: 21794 - DNA, 114 bp, Homo sapiens; identical to SEQ ID NO: 13340
  chr12:54122178-54122292
  hypo

SEQ ID NO: 21795 - DNA, 194 bp, Homo sapiens; identical to SEQ ID NO: 9044
  chr12:54150983-54151177
  hyper

SEQ ID NO: 21796 - DNA, 136 bp, Homo sapiens; identical to SEQ ID NO: 15531
  chr12:56183329-56183465
  hypo

SEQ ID NO: 21797 - DNA, 166 bp, Homo sapiens
  chr12:56604107-56604273
  hypo
cgcttcgggttgtgctcacagtcgctgaggtgagacatgaggttgtcaagccggacaacggcactacagccgaacacagcgttgtcacaggcaatctgcagctttgacaacatgttccgcatgatccgaggtactgggcgcagatgggcgaccgtcacaacactac

SEQ ID NO: 21798 - DNA, 179 bp, Homo sapiens
  chr12:64797272-64797451
  hypo
cggagtggcagtcaagtcgaggcagcctaagcctacactgcctctatgttgcattaataaattaataaatctgtgaccaaataaatgaagtgacatttagtagcatcgaaagatcccgtgagtaggacttcctaagaatgctctccttcttttcatggacaaaattttagtctgtttaa

SEQ ID NO: 21799 - DNA, 73 bp, Homo sapiens; identical to SEQ ID NO: 13348
  chr12:6483496-6483569
  hypo

SEQ ID NO: 21800 - DNA, 112 bp, Homo sapiens; identical to SEQ ID NO: 6848
  chr12:69999239-69999351
  hypo

SEQ ID NO: 21801 - DNA, 255 bp, Homo sapiens; identical to SEQ ID NO: 6849
  chr12:79842637-79842892
  hypo

SEQ ID NO: 21802 - DNA, 46 bp, Homo sapiens
  chr12:85430024-85430070
  hyper
cgttcgtttcaatttagaatcgagattgtttgtccttctagagcac

SEQ ID NO: 21803 - DNA, 237 bp, Homo sapiens
  chr12:85430099-85430336
  hyper
gtgattggctgttgccatggatacgctttgtgtagcggctatgggcgctgtcttacaacaaagccaaggaatctcgctgctgaggggtgagccggggtcttaagactgggattcccgttgagggaggtgaacagctgtgggagctcaggccgagccgggactctctctgcctggccagacttccagcaaagggagagaccgcgggtcaggggatggctgtgcgactctgcgaagctc

SEQ ID NO: 21804 - DNA, 265 bp, Homo sapiens; identical to SEQ ID NO: 14596
  chr12:93966037-93966302
  binary

SEQ ID NO: 21805 - DNA, 66 bp, Homo sapiens; identical to SEQ ID NO: 14597
  chr12:93967274-93967340
  hyper

SEQ ID NO: 21806 - DNA, 127 bp, Homo sapiens; identical to SEQ ID NO: 10271
  chr13:103046539-103046666
  binary

SEQ ID NO: 21807 - DNA, 181 bp, Homo sapiens
  chr13:110008382-110008563
  hypo
cgggcatgctggcaccatggcggggcacgggagagcgcacgggagggcacggtactagagaagggtttctgctacattacccaggaagcctgcccttcacgcgtgtccctgccattgtgctgctccgaaaccgcacggctctcgaatgttaatgcctacctaattatatattttggcttcc

SEQ ID NO: 21808 - DNA, 42 bp, Homo sapiens; identical to SEQ ID NO: 10280
  chr13:111363839-111363881
  hypo

SEQ ID NO: 21809 - DNA, 95 bp, Homo sapiens; identical to SEQ ID NO: 15540
  chr13:111978023-111978118
  hypo

SEQ ID NO: 21810 - DNA, 178 bp, Homo sapiens; identical to SEQ ID NO: 15546
  chr13:113797753-113797931
  hypo

SEQ ID NO: 21811 - DNA, 112 bp, Homo sapiens; identical to SEQ ID NO: 15547
  chr13:113797960-113798072
  hypo

SEQ ID NO: 21812 - DNA, 163 bp, Homo sapiens; identical to SEQ ID NO: 7928
  chr13:114123291-114123454
  hypo

SEQ ID NO: 21813 - DNA, 189 bp, Homo sapiens
  chr13:114193080-114193269
  hypo
cggtgtcagccgtgcgtcatccggaaggctgccataagcctgcgtttcgcagagctgcgctgaggctcccgtgtcgcggccgtccggccggcgcgctgatgtggctgcaaacctgggtatcagatcagccgccgtggacacgccgatgcttctcgctggcttcgtgccctcccggggctgttgcttgtc

SEQ ID NO: 21814 - DNA, 162 bp, Homo sapiens; identical to SEQ ID NO: 13365
  chr13:114271763-114271925
  hypo

SEQ ID NO: 21815 - DNA, 139 bp, Homo sapiens; identical to SEQ ID NO: 6861
  chr13:114748186-114748325
  hypo

SEQ ID NO: 21816 - DNA, 223 bp, Homo sapiens; identical to SEQ ID NO: 6864
  chr13:114776788-114777011
  binary

SEQ ID NO: 21817 - DNA, 130 bp, Homo sapiens
  chr13:114777587-114777717
  hypo
cggatgatacgccgatcatcaatactccatatgtgatgggcaggggaggagagcagggcggtgaccagcagctaaaaccctggacaaaccgtccactgcttttgtgacactgtctcgactcccccagaac

SEQ ID NO: 21818 - DNA, 77 bp, Homo sapiens
  chr13:114778731-114778808
  hypo
agagagaagcagggtgaccgttttcctcgggcacaatggcctcgtggggacaccatgccccggccccctgagggtcc

SEQ ID NO: 21819 - DNA, 63 bp, Homo sapiens; identical to SEQ ID NO: 10287
  chr13:114917508-114917571
  hypo

SEQ ID NO: 21820 - DNA, 96 bp, Homo sapiens; identical to SEQ ID NO: 10288
  chr13:114917600-114917696
  hypo

SEQ ID NO: 21821 - DNA, 261 bp, Homo sapiens; identical to SEQ ID NO: 6865
  chr13:20392445-20392706
  hypo

SEQ ID NO: 21822 - DNA, 126 bp, Homo sapiens; identical to SEQ ID NO: 15558
  chr13:28745545-28745671
  hypo

SEQ ID NO: 21823 - DNA, 100 bp, Homo sapiens; identical to SEQ ID NO: 15559
  chr13:30123381-30123481
  hypo

SEQ ID NO: 21824 - DNA, 242 bp, Homo sapiens
  chr13:31002082-31002324
  hypo
cgttaccacgatgcattctgggaaagaagcagcaccaaatccaagatggcggccagcaggaggctgatgaaggagcttgaagaaatccgcaaatgtggaatggaaaacttccgtaacatccaggttgatgaagctaatttattgacttggcaagggcttattgttcctgacaaccctccgtataataagggggccttcagaatcgaaatcaactttccagcagagtacccattcaaaccacc

SEQ ID NO: 21825 - DNA, 116 bp, Homo sapiens; identical to SEQ ID NO: 13380
  chr13:32983242-32983358
  hypo

SEQ ID NO: 21826 - DNA, 178 bp, Homo sapiens; identical to SEQ ID NO: 14606
  chr13:33000891-33001069
  binary

SEQ ID NO: 21827 - DNA, 204 bp, Homo sapiens; identical to SEQ ID NO: 14607
  chr13:33001228-33001432
  binary

SEQ ID NO: 21828 - DNA, 86 bp, Homo sapiens; identical to SEQ ID NO: 15560
  chr13:37643604-37643690
  hypo

SEQ ID NO: 21829 - DNA, 86 bp, Homo sapiens; identical to SEQ ID NO: 10292
  chr13:43620991-43621077
  hypo

SEQ ID NO: 21830 - DNA, 298 bp, Homo sapiens
  chr13:49879457-49879755
  hypo
cgagttcgcactcgctgttaccagctggcgctcatcatcccaccctccctcattgttccccctccaggcccggctccagagctctcccccaccagacacacaggtgttcaggtcacttcctgaataaaggccagccgccttaatgatggcgtcagacccttagctgggcatttaaggctccctcccggccctctcacatccccacatgccccggacaaagcgcacacgcctcgtcattttccagccatgcttcgtgcccacggccctccctgcagcgggaatctctcgctctggtgac

SEQ ID NO: 21831 - DNA, 73 bp, Homo sapiens
  chr13:60267291-60267364
  hypo
cgtgaaggcctccggtggaaggcgcttatgactggaaagtagtgaccaaagagaagagtgactggactgagac

SEQ ID NO: 21832 - DNA, 37 bp, Homo sapiens
  chr13:84455524-84455561
  hyper
cgtgtaggtccccttctatctcattgcaggaacagat

SEQ ID NO: 21833 - DNA, 438 bp, Homo sapiens; identical to SEQ ID NO: 18362
  chr13:96085837-96086275
  hypo

SEQ ID NO: 21834 - DNA, 73 bp, Homo sapiens; identical to SEQ ID NO: 6878
  chr13:96409644-96409717
  hypo

SEQ ID NO: 21835 - DNA, 206 bp, Homo sapiens
  chr14:100751380-100751586
  binary
cgggggggggcggggtagctagggagggagaggaggcaaggaggcaggacggggtctgagcacgcccctcaggtgtttgcatggcttcttcttggcctgccacgtgcgtctgtaccggaccctaggaatatcccgggagctggtggccagccctagcccctgcccgcctggcctttggccagcacttagcgcgggcagccctgccc

SEQ ID NO: 21836 - DNA, 365 bp, Homo sapiens; identical to SEQ ID NO: 15564
  chr14:103409913-103410278
  hypo

SEQ ID NO: 21837 - DNA, 35 bp, Homo sapiens
  chr14:103739884-103739919
  hyper
gggctgcagagactgggccgggcggaggagacccc

SEQ ID NO: 21838 - DNA, 84 bp, Homo sapiens
  chr14:103740611-103740695
  hyper
ccaggcctctgtcttcacacaggaggaactccaggccctcgtttaggactccaggccaaaggctgtgtcagccgcgggtccccc

SEQ ID NO: 21839 - DNA, 130 bp, Homo sapiens; identical to SEQ ID NO: 7945
  chr14:104159892-104160022
  hypo

SEQ ID NO: 21840 - DNA, 123 bp, Homo sapiens; identical to SEQ ID NO: 7946
  chr14:104160134-104160257
  hypo

SEQ ID NO: 21841 - DNA, 237 bp, Homo sapiens; identical to SEQ ID NO: 6890
  chr14:104618440-104618677
  hypo

SEQ ID NO: 21842 - DNA, 140 bp, Homo sapiens; identical to SEQ ID NO: 6893
  chr14:104641166-104641306
  hypo

SEQ ID NO: 21843 - DNA, 212 bp, Homo sapiens; identical to SEQ ID NO: 15567
  chr14:104642243-104642455
  hypo

SEQ ID NO: 21844 - DNA, 119 bp, Homo sapiens; identical to SEQ ID NO: 15568
  chr14:104642742-104642861
  hypo

SEQ ID NO: 21845 - DNA, 164 bp, Homo sapiens; identical to SEQ ID NO: 15570
  chr14:104645553-104645717
  hypo

SEQ ID NO: 21846 - DNA, 78 bp, Homo sapiens; identical to SEQ ID NO: 6897
  chr14:105512395-105512473
  hyper

SEQ ID NO: 21847 - DNA, 640 bp, Homo sapiens; identical to SEQ ID NO: 15574
  chr14:105687735-105688375
  hypo

SEQ ID NO: 21848 - DNA, 423 bp, Homo sapiens; identical to SEQ ID NO: 13401
  chr14:105689521-105689944
  hypo

SEQ ID NO: 21849 - DNA, 78 bp, Homo sapiens; identical to SEQ ID NO: 16414
  chr14:23835314-23835392
  hyper

SEQ ID NO: 21850 - DNA, 78 bp, Homo sapiens; identical to SEQ ID NO: 16414
  chr14:23835314-23835392
  hypo

SEQ ID NO: 21851 - DNA, 82 bp, Homo sapiens; identical to SEQ ID NO: 16423
  chr14:38060563-38060645
  hyper

SEQ ID NO: 21852 - DNA, 99 bp, Homo sapiens
  chr14:38061332-38061431
  hyper
cggatggagttctgccagcgctgctggttctgccggtaataggggaagaggtccatgatccactggtagatctcgctcagcgtgagcatcttgctgggc

SEQ ID NO: 21853 - DNA, 160 bp, Homo sapiens
  chr14:38677154-38677314
  hyper
cggaaaaactcgaatgtcgccctgccgttcctggggttggtgacaggtctggtcatcgcacggcggcagctcctcacctggatttagaagagctggcgtccccgcccgcccaagcctttaaactctcgtctgccagaacccgccaactctccagggtaca

SEQ ID NO: 21854 - DNA, 32 bp, Homo sapiens
  chr14:38677488-38677520
  hyper
agacacggggggctctgagcgctacgagcttt

SEQ ID NO: 21855 - DNA, 214 bp, Homo sapiens
  chr14:38677548-38677762
  hyper
ggtccctgaacactcccaatagcctaagctgcctgctgtgttatagcgcagaagcccctaacgcacggtggttgtcctttcttctcataacgctcgcagcttagggccagtttccgcgattctaagagtaattgcgtgggcacctgtgctggggccaggcgcaaagaagggagttggtctgcgcgaagatcgtcaacctgctaacagaccgcac

SEQ ID NO: 21856 - DNA, 383 bp, Homo sapiens
  chr14:38677790-38678173
  binary
cagtctggaggttgcgcactttgggtaaggagggcccggaacttccctggcgggtctgagctgcaaggcaagcgagggtgggaagagggaatttagggttctggactgcgggacgggagagaagctggggtctccagagaaaagggcagcaatggagggaaactgagatgaactccagacatccatgttcatggatccgtttgagtctttgctttgggtaggagaggagtggaatgagacagaatctatacctttggttcccacccgccctccagtaaggccgaggaactctcttggttcctctgagagcaagaggcagatggtgctgcgagggaaccccggaaggagccactaaagttgagcagagtgcaggactgggaagg

SEQ ID NO: 21857 - DNA, 284 bp, Homo sapiens
  chr14:38678202-38678486
  binary
acctatgtgctctcctccctttctccaccccacccccttttttcgtagctgctgacgcgctggtggtgcctattaatcatttaccagtccagagccgcgccagttaatggctgtgccgtgcggtgctcccacatcctggcctctcctctccacggtcgcctgtgcccgggcaccccggagctgcaaactgcagagcccaggcaaccgctgggctgtgcgccccgccggcgccggtaggagccgcgctccccgcagcggttgcgctctacccggaggcgctgggc

SEQ ID NO: 21858 - DNA, 53 bp, Homo sapiens; identical to SEQ ID NO: 7954
  chr14:38725469-38725522
  hyper

SEQ ID NO: 21859 - DNA, 317 bp, Homo sapiens
  chr14:39648098-39648415
  hypo
cgccctgttaatttttttgtgtttttagtagagatggtggtgttggcttctgacttcagatgatctacctgcctctaatgtttcacgtaattagtatgtgtaataactttttatcataattgaactgaaatcatatataccttttgttgtaactatttcaacacgtaagtattaaagcaggctacttaacttttagcaaaagcggcgccaggaaattgaacaaaaacttgaagttcaggcagaagaagagagaaagcaggttgaaaatgaaaggagagaactgtttgaagagaggcgtgctaaacagacagaactgc

SEQ ID NO: 21860 - DNA, 201 bp, Homo sapiens
  chr14:45431382-45431583
  binary
cggtttggtcacgtggtgcccttggttacgcccggtggcagctgtggggtctagggctcagacgggggccattttgccagaggctgcctcccggagttgggggcggcctggcggcaggctgaagctgttcttttgcctcttctgcagcttggggcttggagaggatctggaagtctgggctccatcgagccctttggagac

SEQ ID NO: 21861 - DNA, 215 bp, Homo sapiens; identical to SEQ ID NO: 16427
  chr14:51562012-51562227
  binary

SEQ ID NO: 21862 - DNA, 95 bp, Homo sapiens
  chr14:53564384-53564479
  hypo
cgtgaaccaattccatattattaaatattaaacgagaacgaaatgggaaatgtatggaccatttgaccatgttttaaaattatgtaaacgctttc

SEQ ID NO: 21863 - DNA, 538 bp, Homo sapiens
  chr14:54420542-54421080
  hyper
cgggagcgaggtcgggaaagtctcacccgcccaaagcctcaccaccgagaggcacttaaaaaggaaagcgcagagggaccctgcccacgcgcgtgtacacacacacccccccacacacacacaagcaaacacgagctccccgccacttcctccccagggtctcctcaaggccaaatattgctcccaatgacagccagtcaccccttggcgaacgcctgctaaggctccgaagagccgggccaccgatctagctcccggctgaaagcagccgaccttgtcacgcgcggggccgggaatgggagggagggtgttagagggtgatcgctgtgggaaagtgagagggagcggctgttagtcattgctccgggtccattaccgagaatccccaaacctagtccgccgctgcgtggcccctctccccatgcaaagcagacccccgaagaagccatgccaggctgagggacagacgccggggctcgaagctccgggcagattcagaaagaggcgtcgctgcagaaaggacgcatcacagttttca

SEQ ID NO: 21864 - DNA, 229 bp, Homo sapiens
  chr14:54421301-54421530
  hyper
agagtcgcacgcagcaaatactccttcaagaattttacctacctacagttcaagcagttactgggatgtcctgactaatcgaagatgctgccgcgcgcgtgggtcgctctgcgcaagggcctcttcgaaaacccgactaggcgcaactcagcgttcagcagggccgggagcgccaggtcgtccccggggcccgggccccatgactcctgccccaaagcccactccaccc

SEQ ID NO: 21865 - DNA, 150 bp, Homo sapiens
  chr14:54421572-54421722
  hyper
cgctccggagctcaagaactcgggttgcctgccgccccactctccacgcacatacttggttttcttcttaggggcattggcaggtagactttgaggaagaaaagtaaaggatcgaacagctcagccctccctcccgaccgtggatgcccg

SEQ ID NO: 21866 - DNA, 511 bp, Homo sapiens
  chr14:54421831-54422342
  hyper
cgctggggcgggctgcgaaagggttgggaagagcaaagggtttttttgttttgttttgagacgcagaagccctttaaaaagcccggcgaggagaggtccagaagtagagaaagcagacggaggcaagctgtgcccgcggggcaaagggacagtagaaggggcgggcgcccgggttccccggaaaaccctcggccccaaggaatctcctggggcgggagagcgcggttctaaaaccgagaggataggaaggggaagggggagttgtgtttcaatttcggattcaccaggattcatctctagtcacatttttcttctcaaatttttaaatcgaaaagataaaagccaaaagaactttcatccccagagctttttattgggggaaaggaatgtaactcggggtggttgtccttcacttccctactcgaatcttctcctaatgccgaaatgtgtttacaggtagcctcagtttaccaagtatgtatcttttgggggtttaacctctcacaaagcc

SEQ ID NO: 21867 - DNA, 297 bp, Homo sapiens; identical to SEQ ID NO: 7959
  chr14:55765714-55766011
  hypo

SEQ ID NO: 21868 - DNA, 55 bp, Homo sapiens; identical to SEQ ID NO: 7960
  chr14:55766084-55766139
  hypo

SEQ ID NO: 21869 - DNA, 45 bp, Homo sapiens; identical to SEQ ID NO: 5753
  chr14:60385935-60385980
  binary

SEQ ID NO: 21870 - DNA, 114 bp, Homo sapiens; identical to SEQ ID NO: 9129
  chr14:62584399-62584513
  hyper

SEQ ID NO: 21871 - DNA, 536 bp, Homo sapiens; identical to SEQ ID NO: 5961
  chr14:65006776-65007312
  hyper

SEQ ID NO: 21872 - DNA, 50 bp, Homo sapiens; identical to SEQ ID NO: 6906
  chr14:65239794-65239844
  hypo

SEQ ID NO: 21873 - DNA, 619 bp, Homo sapiens; identical to SEQ ID NO: 17434
  chr14:73957523-73958142
  hyper

SEQ ID NO: 21874 - DNA, 150 bp, Homo sapiens; identical to SEQ ID NO: 17435
  chr14:73958379-73958529
  hyper

SEQ ID NO: 21875 - DNA, 164 bp, Homo sapiens
  chr14:88458964-88459128
  binary
atctccgcgatgaagacagcctgtgccccactgcctgggacgagggttccagccccggctacttcactacttagacctgtcactttactctctgcacctatactctctggacctccggatcctcatttgttcaaacctaactgcctgtctggttcgtgttaaac

SEQ ID NO: 21876 - DNA, 240 bp, Homo sapiens
  chr14:88459170-88459410
  binary
cgcctgctgactggcaccctaggggaatgcggcggagagtggagccggtggaaacgcagggcaacgccgcgggggcttgtggggctggccccacggggcgggctcttgccgccccccgcgtatccccgcagcttgccgctcaccccgccgccgctgaccgcgccgatgccgtcgaactcccggcccagcccgtcggagtcgtcgagcacgtacgcgccgccgggcgccagcagcgcacac

SEQ ID NO: 21877 - DNA, 57 bp, Homo sapiens
  chr14:88459631-88459688
  binary
tgacgcagctggcggagtgttgagaaaagaagcagcgagctttttcttatcgctcgc

SEQ ID NO: 21878 - DNA, 82 bp, Homo sapiens; identical to SEQ ID NO: 15581
  chr14:89291884-89291966
  hypo

SEQ ID NO: 21879 - DNA, 40 bp, Homo sapiens; identical to SEQ ID NO: 6914
  chr14:90849401-90849441
  hyper

SEQ ID NO: 21880 - DNA, 383 bp, Homo sapiens; identical to SEQ ID NO: 6915
  chr14:90849476-90849859
  binary

SEQ ID NO: 21881 - DNA, 54 bp, Homo sapiens; identical to SEQ ID NO: 6916
  chr14:90849897-90849951
  binary

SEQ ID NO: 21882 - DNA, 67 bp, Homo sapiens; identical to SEQ ID NO: 6917
  chr14:90850476-90850543
  hyper

SEQ ID NO: 21883 - DNA, 145 bp, Homo sapiens
  chr14:91750824-91750969
  hypo
cgggacaggtcatcctacaggtgaagctaaaatgaggatccacaggggaggcagagatgagtgaacagttagcatgagcagcgaacagagaaagcacaattccaacagcatgcgcggaaggcaggtctggaggacccggcaccac

SEQ ID NO: 21884 - DNA, 76 bp, Homo sapiens
  chr14:99736040-99736116
  hyper
cggctctcggccgcccggcagccagtcctctgcggtgactgggcgcgcagccctctcgagctccgcgcgggcagcc

SEQ ID NO: 21885 - DNA, 61 bp, Homo sapiens
  chr14:99736213-99736274
  hyper
aaaaaaaaaaaaaaaaaaaaaaaaaaaaaaaaaaggaacggcgacccaggcaccgcgagag

SEQ ID NO: 21886 - DNA, 128 bp, Homo sapiens
  chr14:99736431-99736559
  hyper
ttcccctctgctaaataaacccaacagggacggtggaagctgctgcttgtcttgccccgctgcctgactttgcccgcccagccacatgcttgaaatcgacacgatttcagccggtggatttccactgc

SEQ ID NO: 21887 - DNA, 148 bp, Homo sapiens; identical to SEQ ID NO: 15585
  chr15:101464778-101464926
  hypo

SEQ ID NO: 21888 - DNA, 235 bp, Homo sapiens; identical to SEQ ID NO: 18392
  chr15:34806641-34806876
  hyper

SEQ ID NO: 21889 - DNA, 197 bp, Homo sapiens
  chr15:40423149-40423346
  hypo
cgattgttaataataattattaatattattcctgatatccagggggtcgaggatgacattgcttcctatacctcagaacacgtacacccccatgtgatgttgttcctaataaccagggggtagaggatgacgttactccaaatatcgccgtgggtgtacatcccttctgcgatcttgttgctaatacccaggcgggg

SEQ ID NO: 21890 - DNA, 385 bp, Homo sapiens; identical to SEQ ID NO: 11124
  chr15:41786420-41786805
  hyper

SEQ ID NO: 21891 - DNA, 43 bp, Homo sapiens; identical to SEQ ID NO: 13454
  chr15:41788242-41788285
  hyper

SEQ ID NO: 21892 - DNA, 353 bp, Homo sapiens
  chr15:43622635-43622988
  hyper
cgttggtgttctgtaccgcgcctgcccgacgctcacggctccgggggcccatggccagaagagactcaggaatggcagtctgtcacggttgtgagccgccccttggttagcacacacctcacggacctcggtagggggaaaaaaaccacccatgctcctggacttccccttccgccggcacttgtgcgtcacttccgggaagagcgcatctcgccaaccagaattgaggagggtgtagccagtgctaagttcgcttgcggctgacctttctttggaatgtcgtgagttccatttgtcccagaatacggtccgctaccgctgtgacatgagtgttagggaaggcgggttgtcac

SEQ ID NO: 21893 - DNA, 464 bp, Homo sapiens; identical to SEQ ID NO: 9153
  chr15:45722474-45722938
  binary

SEQ ID NO: 21894 - DNA, 228 bp, Homo sapiens; identical to SEQ ID NO: 9158
  chr15:53078992-53079220
  hyper

SEQ ID NO: 21895 - DNA, 108 bp, Homo sapiens; identical to SEQ ID NO: 13459
  chr15:53080082-53080190
  hyper

SEQ ID NO: 21896 - DNA, 153 bp, Homo sapiens; identical to SEQ ID NO: 15594
  chr15:63066085-63066238
  hypo

SEQ ID NO: 21897 - DNA, 179 bp, Homo sapiens
  chr15:64674712-64674891
  hypo
cgaaacgaaacgaaaagaccctgccaaatgtggtaagaccacatcgctgtcacacagtgagcataactctaggataaagggtcataatttttttctatctttatgcttaccttctaattactcacaacacccctggggagtgattttcactctctaaataccatacataaaacagaatc

SEQ ID NO: 21898 - DNA, 839 bp, Homo sapiens
  chr15:80215691-80216530
  binary
cggcgaaccgcgatggagccggggcccagcacagcgcgagcggctcctcggctgttcgtgctgcttccccagcttcttcaccggcacctgcagcttccgcacctcctggtccgcgttcacgttagagttaacgtcctccatcccggccccgctgcctccgccgcccgcggccctctcgctctcgcagcaacaagggaagagccggaggaaagaggcgtccacgccgctcactccagccgaggcccccgcatatagcagggccaggccccgtcgccagggttcccccagcgcgggtcccgaagcaccgctggccacagatgaaccgcctcctcagcgcaggtccgggattcggggaggcagcgccaatatccggtctctgcagccatcttccctccgtccctccgcccaccgagggtcggccctgtaggtgacctcagagcgtcggggatgggcgtggccccgtcgggcgctaagaagacctagcgcagagaggaccgccgagctcccgacggggcggggccaggtgtgtgaggggcggggattggacccggaggggcgtgtctggactgccggcggaagtggaacgcggcctgacctgcgacggaaagccactgcaagcccggaggcgaacagaaggcattccgcgagccgggctgagttggtgaacacggtcctcgttcaccccgcctattggtctgggcgtgtggggtattctccacccacttatacggcgtgtgggaccgacgggcccgtcctgcccggctccggtccggatctcgagtaggcgctcaatgggattcggggagacgtagtttactttgttcagcaaatatttaacc

SEQ ID NO: 21899 - DNA, 99 bp, Homo sapiens; identical to SEQ ID NO: 16460
  chr15:88801240-88801339
  hyper

SEQ ID NO: 21900 - DNA, 757 bp, Homo sapiens
  chr15:94774574-94775331
  binary
cgccttctctacgcccagccagtgcccagcaccaagcatagcgcctccttgcaacacccggccgagctcccggcggcagcgcgggcgcttgggtcggaggctgctcaaaggtgacgcgcggccgcctcctcccctttaggcggggctcgcaagggcggtgggggggcccgaggaagtccgggggccctcggtgatgcccccgcccccgccgcgtcagggttgctccctgcgcttccgagtggcgactgcagcgggtccggtgcaggtgaggggcgcgcgcctgcccagctttgcagcccccgaacgcggcctcgcacaggtgagggcggtgccgggttcacctggcagcgcgcgtgggccgggcagcacggtcgccgcctgggggtgggcgtcttctctcaaccgaagctgggagttggggagctggagggtccaggatgagaattcagtggcgctactaccccggagctgcttgtggttcagagatcagaaaggtgtcctgaggactggaggcagaaatccaggcgtggcgtactggaaggcgcactaggggagggcagcctggcccagaatttctttgcattttaaaggccacacattcagtctccccggggcgctacggaggtagtcaccgccacatccaggactccttccacagaggtcagttcctcagctgggtgggctttaatacgctctcttcgtagagacccggaggttcaactttaattctttgcgctgacatttgctcaacgacacc

SEQ ID NO: 21901 - DNA, 322 bp, Homo sapiens; identical to SEQ ID NO: 12351
  chr15:99459893-99460215
  hypo

SEQ ID NO: 21902 - DNA, 86 bp, Homo sapiens; identical to SEQ ID NO: 12355
  chr15:99506062-99506148
  hypo

SEQ ID NO: 21903 - DNA, 60 bp, Homo sapiens
  chr16:1113830-1113890
  hypo
cggtgagccggcgtcgtggccacagccttcacactcccagccgctgcaggtccccgtttc

SEQ ID NO: 21904 - DNA, 82 bp, Homo sapiens; identical to SEQ ID NO: 11142
  chr16:1154990-1155072
  hypo

SEQ ID NO: 21905 - DNA, 147 bp, Homo sapiens; identical to SEQ ID NO: 7989
  chr16:12132253-12132400
  hypo

SEQ ID NO: 21906 - DNA, 376 bp, Homo sapiens; identical to SEQ ID NO: 7990
  chr16:12132450-12132826
  hypo

SEQ ID NO: 21907 - DNA, 132 bp, Homo sapiens; identical to SEQ ID NO: 15606
  chr16:1248221-1248353
  hypo

SEQ ID NO: 21908 - DNA, 88 bp, Homo sapiens; identical to SEQ ID NO: 15607
  chr16:1248922-1249010
  hypo

SEQ ID NO: 21909 - DNA, 189 bp, Homo sapiens; identical to SEQ ID NO: 6944
  chr16:1250534-1250723
  hypo

SEQ ID NO: 21910 - DNA, 319 bp, Homo sapiens
  chr16:1251835-1252154
  hypo
gtacgtgggccacatattccgcaaggtcaagcggcgcagcttgcgcctctacgcccgctggcagagccgctggcgcaagaaggtggaccccagtgctgtgcaaggccagggtcccgggcaccgccagcgccgggcaggcaggcacacagcctcggtgcaccacctggtctaccaccaccatcaccaccaccaccaccactaccatttcagccatggcagcccccgcaggcccggccccgagccaggcgcctgcgacaccaggctggtccgagctggcgcgcccccctcgccaccttccccaggccgcggaccccccgac

SEQ ID NO: 21911 - DNA, 182 bp, Homo sapiens
  chr16:1253116-1253298
  hypo
tgccgggatgctgtgtgccctcatgcgctggtacccagggcgtgcagacgagtgtcgggcgcatgctcctagcccttgaattgtgggagtccagccgctgtgtgttataagaggcacacgggctccaaagacagcacgaaaacatcacaggacggctcgatggtcattttcatgtcagtttc

SEQ ID NO: 21912 - DNA, 133 bp, Homo sapiens
  chr16:1270065-1270198
  hypo
cggtgaggccggtgacccaggggggctccctgcagtccccaccacgctccccacggcccgccagcgtccgcactcgtaagcataccttcggacagcgctgcgtctccagccggccggcggccccaggcggaga

SEQ ID NO: 21913 - DNA, 332 bp, Homo sapiens
  chr16:1270449-1270781
  hypo
ctgaggccgagcccgctctgggtgcgcgcagaaagaagaagatgagccccccctgcatctcggtggaaccccctgcggaggacgagggctctgcgcggccctccgcggcagagggcggcagcaccacactgaggcgcaggaccccgtcctgtgaggccacgcctcacagggactccctggagcccacagagggctcaggcgccgggggggaccctgcagccaagggggagcgctggggccaggcctcctgccgggctgagcacctgaccgtccccagctttgcctttgagccgctggacctcggggtccccagtggagaccctttcttggac

SEQ ID NO: 21914 - DNA, 195 bp, Homo sapiens; identical to SEQ ID NO: 7998
  chr16:1730112-1730307
  hypo

SEQ ID NO: 21915 - DNA, 105 bp, Homo sapiens; identical to SEQ ID NO: 7999
  chr16:1730761-1730866
  hypo

SEQ ID NO: 21916 - DNA, 121 bp, Homo sapiens; identical to SEQ ID NO: 6947
  chr16:189550-189671
  hypo

SEQ ID NO: 21917 - DNA, 48 bp, Homo sapiens; identical to SEQ ID NO: 8005
  chr16:2042503-2042551
  binary

SEQ ID NO: 21918 - DNA, 68 bp, Homo sapiens; identical to SEQ ID NO: 13482
  chr16:2106533-2106601
  hypo

SEQ ID NO: 21919 - DNA, 63 bp, Homo sapiens; identical to SEQ ID NO: 13483
  chr16:2106641-2106704
  hypo

SEQ ID NO: 21920 - DNA, 426 bp, Homo sapiens; identical to SEQ ID NO: 15616
  chr16:2107057-2107483
  hypo

SEQ ID NO: 21921 - DNA, 440 bp, Homo sapiens; identical to SEQ ID NO: 15617
  chr16:2108531-2108971
  hypo

SEQ ID NO: 21922 - DNA, 594 bp, Homo sapiens
  chr16:27780854-27781448
  hypo
cgcctgagtccatgcccttgacctccatctcatgccgccccaggccgctgcagctgttgaggtgggcgaggccttggccaagtcacgtgccacccctgaaagccgtggaccagtgtccgctgtagcagggggctcgcctgtcttgtcctctgctacctgcccagcgcccacacagcacctgatatgggaaatggacctcggtcaggtggctctgcgaaaggctccccatggtgagcacagctgccagcagctccggtcacgtcagcaccgcttctgtccccacatggcctgcctcccttcagtcatgttatttcttttgtttgccaggccaagattgtccacgtctccctggatggcctgtgcgtctccccgccagagggctttctcatccggaaggggccaggcaactgccactttgattttgctcaagaaatcctcttcgtggactacctacgggctcagctgctgccccagccggccaggaggtgaggagaaagtgggcgccacacacagcccctcccggcccctgggcccgcttgctttgcaagttgctctgatgtacattccgaaagggttttgaaacgatgatcaaac

SEQ ID NO: 21923 - DNA, 201 bp, Homo sapiens; identical to SEQ ID NO: 8023
  chr16:31138407-31138608
  hypo

SEQ ID NO: 21924 - DNA, 212 bp, Homo sapiens; identical to SEQ ID NO: 5982
  chr16:3222239-3222451
  hyper

SEQ ID NO: 21925 - DNA, 179 bp, Homo sapiens; identical to SEQ ID NO: 8027
  chr16:3811586-3811765
  hypo

SEQ ID NO: 21926 - DNA, 101 bp, Homo sapiens; identical to SEQ ID NO: 13512
  chr16:410895-410996
  hypo

SEQ ID NO: 21927 - DNA, 111 bp, Homo sapiens; identical to SEQ ID NO: 6962
  chr16:411606-411717
  hypo

SEQ ID NO: 21928 - DNA, 193 bp, Homo sapiens; identical to SEQ ID NO: 15632
  chr16:4203995-4204188
  hypo

SEQ ID NO: 21929 - DNA, 72 bp, Homo sapiens; identical to SEQ ID NO: 11186
  chr16:440413-440485
  hypo

SEQ ID NO: 21930 - DNA, 507 bp, Homo sapiens; identical to SEQ ID NO: 15638
  chr16:46683305-46683812
  hypo

SEQ ID NO: 21931 - DNA, 281 bp, Homo sapiens; identical to SEQ ID NO: 16489
  chr16:54965796-54966077
  hyper

SEQ ID NO: 21932 - DNA, 107 bp, Homo sapiens; identical to SEQ ID NO: 6964
  chr16:54966659-54966766
  hyper

SEQ ID NO: 21933 - DNA, 57 bp, Homo sapiens
  chr16:58633220-58633277
  hypo
cgagagcgagtcaagattcattgctggttggggcggaagcaggcggccgagcccggc

SEQ ID NO: 21934 - DNA, 121 bp, Homo sapiens
  chr16:62068832-62068953
  hyper
cgctggtggaggcaaacggctagtccttgacatgccgccggctccgtgcctgcgggggaagggtcaaccgcaaggaaactttgaggattctgccagactgggtgggggaaggctctggtgt

SEQ ID NO: 21935 - DNA, 359 bp, Homo sapiens
  chr16:62069435-62069794
  hyper
agctgagccttggcccgcagccctgccgcgggggtcgccctccctcgcctcggagatgaggcggtgcagaaaaccagccatagaccactcgggccccctcgcctccttttttccctggcttgcaccctccgcacagcgggctgcaggtgcttcccattcaccgcacggaccccgcagtgaaggcgcgcggctgcagccgcgcctgcctgcgttgggaagcggcgaaatagccaagtcgccgcagggaaggaaaccggcaggaaaactggaggggcacagcctggagcttgctactctctaggatctgttgtcaaagcagtttgcaaaaacagtcaggcaaaaccttgaggcgtacgtac

SEQ ID NO: 21936 - DNA, 111 bp, Homo sapiens; identical to SEQ ID NO: 18453
  chr16:69922460-69922571
  hypo

SEQ ID NO: 21937 - DNA, 86 bp, Homo sapiens; identical to SEQ ID NO: 15647
  chr16:74984568-74984654
  hypo

SEQ ID NO: 21938 - DNA, 61 bp, Homo sapiens; identical to SEQ ID NO: 6452
  chr16:75148493-75148554
  hypo

SEQ ID NO: 21939 - DNA, 136 bp, Homo sapiens; identical to SEQ ID NO: 6453
  chr16:75149151-75149287
  hypo

SEQ ID NO: 21940 - DNA, 68 bp, Homo sapiens; identical to SEQ ID NO: 9212
  chr16:80574541-80574609
  hyper

SEQ ID NO: 21941 - DNA, 72 bp, Homo sapiens; identical to SEQ ID NO: 9213
  chr16:80575052-80575124
  hyper

SEQ ID NO: 21942 - DNA, 61 bp, Homo sapiens; identical to SEQ ID NO: 5987
  chr16:81779788-81779849
  hyper

SEQ ID NO: 21943 - DNA, 123 bp, Homo sapiens; identical to SEQ ID NO: 5988
  chr16:81780013-81780136
  hyper

SEQ ID NO: 21944 - DNA, 50 bp, Homo sapiens; identical to SEQ ID NO: 13551
  chr16:85517169-85517219
  hypo

SEQ ID NO: 21945 - DNA, 137 bp, Homo sapiens; identical to SEQ ID NO: 13552
  chr16:85517620-85517757
  hypo

SEQ ID NO: 21946 - DNA, 67 bp, Homo sapiens; identical to SEQ ID NO: 13553
  chr16:85617682-85617749
  hypo

SEQ ID NO: 21947 - DNA, 143 bp, Homo sapiens; identical to SEQ ID NO: 13554
  chr16:85618063-85618206
  hypo

SEQ ID NO: 21948 - DNA, 45 bp, Homo sapiens; identical to SEQ ID NO: 18464
  chr16:85683926-85683971
  hypo

SEQ ID NO: 21949 - DNA, 178 bp, Homo sapiens; identical to SEQ ID NO: 5759
  chr16:85932121-85932299
  binary

SEQ ID NO: 21950 - DNA, 67 bp, Homo sapiens; identical to SEQ ID NO: 21015
  chr16:87594891-87594958
  hypo

SEQ ID NO: 21951 - DNA, 104 bp, Homo sapiens
  chr16:88791422-88791526
  hypo
cgtggtccagccagggccgccaccactgcctccgtggcggggaggagccccctggactgtcgggccctgtggaggggcagggtgagcatgaggcagcagtcaag

SEQ ID NO: 21952 - DNA, 354 bp, Homo sapiens
  chr16:88791819-88792173
  hypo
tcacctggctccaggccggggtccttggggcccagggtgtcctgggggcgactgcggtccacccggccctgcctgtgcttctcctgcttggcacggatacgctccatcctgtggtggggaaaggtggggtatgctgagcattggggggaggagccggggagtccccgccccagaggcacctactgtcttttcagctgggccagggacttctcctctatcctgcggtgaaagtcaatgctcttgaggttggcagcgttgtagagggcgaagcccctgtagggaggcggggatggggtgtgagcaccaggcactcgaccccagcaacatgggcagccgccgctccccgctcagccc

SEQ ID NO: 21953 - DNA, 518 bp, Homo sapiens; identical to SEQ ID NO: 13561
  chr16:88792758-88793276
  hypo

SEQ ID NO: 21954 - DNA, 340 bp, Homo sapiens; identical to SEQ ID NO: 13562
  chr16:88793673-88794013
  hypo

SEQ ID NO: 21955 - DNA, 395 bp, Homo sapiens; identical to SEQ ID NO: 13563
  chr16:88797394-88797789
  hypo

SEQ ID NO: 21956 - DNA, 287 bp, Homo sapiens
  chr16:88802345-88802632
  hypo
cgtgccaacacaaggttgtctgtttattcagtcaacaaacgctcactgagaagctactctgggctggctctgggtgggcagaaggggacagacagacacatctgccttcttggcgctgccactcccccgggcaagtggacattgaacaggacgacaaccctgatgggtctgcgcacccaggcacccccggatgtggtggtgcacactcaccatggcaccaaggtccagacaggggtagcgggtgtgctccagccccagctggcgcaggctgacggggcccagggtgg

SEQ ID NO: 21957 - DNA, 582 bp, Homo sapiens
  chr16:88802685-88803267
  hypo
gtcatcccatacagcaggatgcagggcgagcacagcatggccagttggtggcggctgcgcaccgtccagatgaggcaggcccagagcagcagtacgaaggtcagccagctgtggtaggtgatgctccatacctgcgcggcagagagggctgcacagctgcccagcgcaccccacccaggcgatgccccacacctgcgcggcagagggggctgcacagctgcccagcgcaccccacccaggcgatgccccacacctgcgcggcagagggggctgcacagctgcccagcgcaccccacccaggcgatgccccacacctgcgcggcagagggggccgcccaccccaacccccacagccgcctaccatcatggcaatgagcgcgcacacatagctctggtccatgatgaggtggcccaggctgtggagcggagacgcctccctgggctcagcccgcttgggccgcactgcaggtggggacagcggtcagcttcggcaggttgatctgcaggcctccccaccctgactatgccctaaaatctgggccctgggcaagcacacagcaggagagacaggcccccggtggg

SEQ ID NO: 21958 - DNA, 64 bp, Homo sapiens
  chr16:88970534-88970598
  hypo
tgctcgtgacactctggatcccgaagctagagcagacagtgccctgccggcgccctgagcagtc

SEQ ID NO: 21959 - DNA, 79 bp, Homo sapiens; identical to SEQ ID NO: 6989
  chr16:89254530-89254609
  hypo

SEQ ID NO: 21960 - DNA, 144 bp, Homo sapiens; identical to SEQ ID NO: 6990
  chr16:89254764-89254908
  hypo

SEQ ID NO: 21961 - DNA, 401 bp, Homo sapiens; identical to SEQ ID NO: 10348
  chr16:89409913-89410314
  hypo

SEQ ID NO: 21962 - DNA, 107 bp, Homo sapiens
  chr16:89442354-89442461
  hypo
cgtgacacgccgcagcctgtgctctgctgtggatgcttttcaaaatcgataaatccagcagaagggccatcacaaaaaaagaacaggacatccgtgaagccatcacc

SEQ ID NO: 21963 - DNA, 294 bp, Homo sapiens
  chr16:894572-894866
  hypo
cgagctccaacatgtccacgggtgaacatcagcgtggccaccaccaggtccagagcacagtagaccctgtgccgccagtgtccgtcgccttccacacgtggccgcagttctgtgcatggggccgcccgccatcctgccgcctctgacctgggctgtgggctcgtgacacgtgtctgagctttccagtcgtggccgtgacgctctgtgcggaggctccgtccgcgtgctgcctccgtcccctctgccctggacggccactcactacctttgtctctcaccctgggggtttcatga

SEQ ID NO: 21964 - DNA, 494 bp, Homo sapiens
  chr16:89468462-89468956
  hypo
cggcagccccgaaagacccccacaccaagtttcactctctgtccatggacctctttaatggaaatcctgacttttccataaggcactgaatctgtgtaacttttagagtaaggaggacgacctacagttcactgcatgaaagcacagcccttccaacaaaggcaggcgaaatgtggaaccaattatatctgggtgcctacacgtgacgtacgccagttctttgtagaaagaacgaggcttgtctcagcgatactaatgtacagttcacatgaactcctaaccttagccagccacaataaggtatctgggattgagcgcttatttaaatcggtaggcacatcaatttaaatttaggtagtagctcagcctgtacctaacacatgaggaagccgaggcgggaagatcggttgactccaagagttcaagagcatcctgggaatgacagggagaccccgcctctagaaaaacatttaaaaattgctgcgtatggtgcc

SEQ ID NO: 21965 - DNA, 172 bp, Homo sapiens
  chr16:89770184-89770356
  hypo
cggactaacacaccctcagaacccagccactagagtgagaaggccacggccgtgtgcagagcttttggcctgcaacttcgacctgcgactcacattcacctgcagcctattcttgggacttttttggaaatagtttttccagacaaaaatcaagatgagtttgttctgggcc

SEQ ID NO: 21966 - DNA, 65 bp, Homo sapiens
  chr17:1244981-1245046
  hypo
cgcttacgtgtgagattccagacattgcttagtaacgagcacagtgcctggtgcaaagctggtac

SEQ ID NO: 21967 - DNA, 194 bp, Homo sapiens; identical to SEQ ID NO: 15664
  chr17:1462644-1462838
  hypo

SEQ ID NO: 21968 - DNA, 265 bp, Homo sapiens
  chr17:15848879-15849144
  hyper
catctgtgtcccgctcaggtgaggcgctcggcgtcgcccgaactcggggccccgtcggagctccgaaatgggtcgtcttctccaggccggggttcctccctcgggggccccagacgggccaggctgggggcgcgcggggcgcttggagggctggttcccagcctggccaccccgcaacgctagaccagtgcgcccgggcacccaagacatcccagatgcgcgtcgctctaaggagatctgcgtagggacagctctagggggtccg

SEQ ID NO: 21969 - DNA, 198 bp, Homo sapiens
  chr17:15849211-15849409
  hyper
aagcgtcacccccgtgggcgggtggagcccggggcgcgggagttttggtgatcacatctccactcctgccacgaaggccgttcctaacactcgcccgcagcggcggtgcagcggcagtcccgtgagtgctgcggctcccggaggcccgggaggttcccactaagggcaaggcaactttggacgctgggcattcgcacc

SEQ ID NO: 21970 - DNA, 49 bp, Homo sapiens; identical to SEQ ID NO: 15665
  chr17:16283879-16283928
  hyper

SEQ ID NO: 21971 - DNA, 675 bp, Homo sapiens; identical to SEQ ID NO: 15666
  chr17:16283956-16284631
  binary

SEQ ID NO: 21972 - DNA, 39 bp, Homo sapiens; identical to SEQ ID NO: 15667
  chr17:16285065-16285104
  binary

SEQ ID NO: 21973 - DNA, 121 bp, Homo sapiens
  chr17:17488209-17488330
  hypo
cgccaggaggattaaatgagaaagtgcaaggaaagcactcagcgcagtgcctggcggggggcatggctagacagacgctggctgtgacaactgtgtcatcgagtcctggtgacaaccctgc

SEQ ID NO: 21974 - DNA, 363 bp, Homo sapiens
  chr17:18218758-18219121
  hyper
cgggggcttttgctgtcgcagtgggttccggagagtgcaggtgatttcgcagcaggtttcttgtgctggccgcgctcgccggacgaagaagagaagggcagttgggcctgcggccttggcgttcatgaggcctcagagagctccggaggagctacaactgtgagggggctgctagagttcttctcctcgggtgtgtgagaagcagcctaggaccccgggttcggggagtcgcaaagaaggccgtaagggcttcacttccttctccggaggcctgccttctgcgcgtcgattaacaccgcattctttcccacttcctctcaatgttttcttcatatatctggaaatatgatcagcgcccctgac

SEQ ID NO: 21975 - DNA, 128 bp, Homo sapiens
  chr17:1957353-1957481
  hyper
cggggcggaggcggagcgtgggccgcggagatccggcgttcgcaggaggcttggtgcgcggcggggctgcacggggccacttccggagtagtactgcgagcagcggcgcgacagtgcggggtcccctt

SEQ ID NO: 21976 - DNA, 119 bp, Homo sapiens
  chr17:1957595-1957714
  hyper
agaagtccacgcgggattcttcaaaacggcgtacagggggattctagggccccatggttacttctttggaccccccggaggcgctgtccagccacttccagtcgccctgatgactcgtc

SEQ ID NO: 21977 - DNA, 111 bp, Homo sapiens
  chr17:27411553-27411664
  hypo
cgtcaaatacaatttatgtccgggctcatgtgctattagttaacggggagccgaatcacgggggaacaaacaaacggagacagaacggcgggggatattaattgtgtgtga

SEQ ID NO: 21978 - DNA, 299 bp, Homo sapiens
  chr17:27411693-27411992
  hypo
gttacacactattacatttatcattagctctcactgagtcctgtgcgctgccaccagcccatcctggccaggggagggggtccatcaggcgagagagagtgggggaagaaacccaatgccatgctaaaaaaaaaagacctctaaaaaacaaccctgtcgaacttgatggaggatcagcccgctctgcctgaaggcctgcgcatctgcatccgctgtccagctcccacccagaaagcgggaaaagagagggctggatttcctgggcttcctgccacctgacagtaccagcacaagcgccc

SEQ ID NO: 21979 - DNA, 228 bp, Homo sapiens
  chr17:28299376-28299604
  hypo
ttaaatggattcctggctccttttaaaatggggatcactcacttgtgagctaggagtgctcataaatattgtgtagtcattgtttctaggcccttcaggactaaaacatataatttttagagtcaatgacccgtgaccagacatcacctgcagcctcttcaggcgtgccaccgctgccgggcctgctgtacgacccgcgggctctgggccatgcctgctcttgcgccc

SEQ ID NO: 21980 - DNA, 31 bp, Homo sapiens
  chr17:29112371-29112402
  hypo
cgtgatccaccgcgcccggcctctggctagc

SEQ ID NO: 21981 - DNA, 121 bp, Homo sapiens; identical to SEQ ID NO: 15671
  chr17:29773391-29773512
  hypo

SEQ ID NO: 21982 - DNA, 112 bp, Homo sapiens
  chr17:32483881-32483993
  hyper
cgccactagagacaagattaaaagcgagagcgagagagaaaatgcttaaaacaagtcgctgagcagctcggagcctgttaaccagcgcataatgccccatgttaaccatcct

SEQ ID NO: 21983 - DNA, 34 bp, Homo sapiens; identical to SEQ ID NO: 10363
  chr17:33775294-33775328
  hyper

SEQ ID NO: 21984 - DNA, 912 bp, Homo sapiens
  chr17:37618442-37619354
  hyper
cgaagcacaagcggcataagtccaaacactccaaagacatggggttggtgacccccgaagcagcatccctgggcacagttatcaaacctttggtggagtatgatgatatcagctctgattccgacaccttctccgatgacatggccttcaaactagaccgaagggagaacgacgaacgtcgtggatcagatcggagcgaccgcctgcacaaacatcgtcaccaccagcacaggcgttcccgggacttactaaaagctaaacagaccgaaaaagaaaaaagccaagaagtctccagcaagtcgggatcgatgaaggaccggatatcgggaagttcaaagcgttcgaatgaggagactgatgactatgggaaggcgcaggtagccaaaagcagcagcaaggaatccaggtcatccaagctccacaaggagaagaccaggaaagaacgggagctgaagtctgggcacaaagaccggagtaaaagtcatcgaaaaagggaaacacccaaaagttacaaaacagtggacagcccaaaacggagatccaggagcccccacaggaagtggtctgacagctccaaacaagatgatagcccctcgggagcttcttatggccaagattatgaccttagtccctcacgatctcatacctcgagcaattatgactcctacaagaaaagtcctggaagtacctcgagaaggcagtcggtcagtcccccttacaaggagccttcggcctaccagtccagcacccggtcaccgagcccctacagtaggcgacagagatctgtcagtccctatagcaggagacggtcgtccagctacgaaagaagtggctcttacagcgggcgatcgcccagtccctatggtcgaaggcggtccagcagccctttcctgagcaagcggtctctgagtc

SEQ ID NO: 21985 - DNA, 100 bp, Homo sapiens
  chr17:41672281-41672381
  hypo
cgtctcaaaaaaaaaaaaaagaaactaaatgaataaagaatggatactgcataggcagagcggcggcatgagttgcttgactgagtatgcttattgttcc

SEQ ID NO: 21986 - DNA, 85 bp, Homo sapiens
  chr17:42030245-42030330
  binary
cgggtttctggggtcgggagtgcgtatgcaaatgacgtgggcgtggttggcagatctcccaggaggcctcaggggtcctcaccac

SEQ ID NO: 21987 - DNA, 78 bp, Homo sapiens
  chr17:42030794-42030872
  hyper
gagcagggccagaagcactgtggtcaaggcgggccacggcctgcgcacgaacaccatctgggaaggcgacattgggac

SEQ ID NO: 21988 - DNA, 231 bp, Homo sapiens; identical to SEQ ID NO: 8101
  chr17:42081919-42082150
  hyper

SEQ ID NO: 21989 - DNA, 321 bp, Homo sapiens
  chr17:42083719-42084040
  hyper
gcctaagggagtataggggaggagttcagccctgggtgcccagatctgcgccctccctggctaaggactccgggcggaagtaaggataaaggggtcagagaaaagagaggtccgtgggggtaggggggcagtccgtgccggctgtgggccaggctcacccgctgactccggacacaggtcctgagtaacgtgaacctgcccgccgacctggacctggtgtgcaacgccgagtgggtgagcacaaaagaacggcagcagatgcggctcatcgtggacgtgctcagccgcctgccccaccactcctcggccgtcatcaccgcc

SEQ ID NO: 21990 - DNA, 268 bp, Homo sapiens; identical to SEQ ID NO: 8102
  chr17:42091861-42092129
  hyper

SEQ ID NO: 21991 - DNA, 170 bp, Homo sapiens; identical to SEQ ID NO: 8103
  chr17:42092357-42092527
  binary

SEQ ID NO: 21992 - DNA, 326 bp, Homo sapiens
  chr17:42097490-42097816
  hypo
cgtcaccagggagtccggcgcattcataaccagcaatgtttgtaagcatctagattactggggagagaaatattatcccagatggtgaatggaattaatggccacccccaagtgtgtctccccgtccaagcaggtattgccacctgtaggattcgcatacctagagggccccccagggaacaggaagagttctcctataattgtatcgctgtaatgtgtaattgaagtaacaaaggtgctgtgttttgtttgggcaagggcaaaaatagactgtttggttaaaagaagtccaggttggatttcaagtgttatcccgggccaggcgc

SEQ ID NO: 21993 - DNA, 172 bp, Homo sapiens; identical to SEQ ID NO: 9248
  chr17:46801836-46802008
  hyper

SEQ ID NO: 21994 - DNA, 325 bp, Homo sapiens; identical to SEQ ID NO: 8115
  chr17:46829655-46829980
  hyper

SEQ ID NO: 21995 - DNA, 45 bp, Homo sapiens; identical to SEQ ID NO: 8116
  chr17:46830655-46830700
  hyper

SEQ ID NO: 21996 - DNA, 34 bp, Homo sapiens
  chr17:4981985-4982019
  binary
gaccttgaagtttatgcctccctccattcccccc

SEQ ID NO: 21997 - DNA, 48 bp, Homo sapiens; identical to SEQ ID NO: 7019
  chr17:57297129-57297177
  hypo

SEQ ID NO: 21998 - DNA, 80 bp, Homo sapiens; identical to SEQ ID NO: 8121
  chr17:58498618-58498698
  hyper

SEQ ID NO: 21999 - DNA, 132 bp, Homo sapiens; identical to SEQ ID NO: 8122
  chr17:59532387-59532519
  hyper

SEQ ID NO: 22000 - DNA, 112 bp, Homo sapiens; identical to SEQ ID NO: 7021
  chr17:61777761-61777873
  binary

SEQ ID NO: 22001 - DNA, 76 bp, Homo sapiens; identical to SEQ ID NO: 7022
  chr17:61778423-61778499
  binary

SEQ ID NO: 22002 - DNA, 201 bp, Homo sapiens; identical to SEQ ID NO: 17548
  chr17:71201650-71201851
  hypo

SEQ ID NO: 22003 - DNA, 32 bp, Homo sapiens
  chr17:71202346-71202378
  hypo
cgttttcacgccacacctcaacagcaaccttc

SEQ ID NO: 22004 - DNA, 120 bp, Homo sapiens
  chr17:71202407-71202527
  hypo
caaatcaaaaacatgcttagtgcgaacgaagcgatacaggctcaaataacaaaattaacctgctcaagcacgtaatactccaggatgcagcatagggaggggaataagacacaaatagcc

SEQ ID NO: 22005 - DNA, 253 bp, Homo sapiens
  chr17:72277763-72278016
  hypo
cggcactcaggatttttttttaatgcggatgcagcttctggacaaattcctaggatctccccaccaccccttgcttcctgccccaaccagattgagaacctggagctgtcctggcaggacctgtggagatagggaaggggccggtggggtccctcaccccacaccctccctctgccccccagcagccggcaccatggagattgtgtacgtgtacgtcaagaagcgcagcgagttcgggaagcagtgcaatttc

SEQ ID NO: 22006 - DNA, 61 bp, Homo sapiens
  chr17:72278143-72278204
  hypo
gtccctgccccaagggccctggcctgtcaggtgtggccaggcagggcggccagctggggcc

SEQ ID NO: 22007 - DNA, 81 bp, Homo sapiens; identical to SEQ ID NO: 7025
  chr17:73584287-73584368
  binary

SEQ ID NO: 22008 - DNA, 170 bp, Homo sapiens; identical to SEQ ID NO: 7026
  chr17:73584951-73585121
  binary

SEQ ID NO: 22009 - DNA, 193 bp, Homo sapiens; identical to SEQ ID NO: 7027
  chr17:73615737-73615930
  hypo

SEQ ID NO: 22010 - DNA, 109 bp, Homo sapiens; identical to SEQ ID NO: 7028
  chr17:73616587-73616696
  hypo

SEQ ID NO: 22011 - DNA, 264 bp, Homo sapiens; identical to SEQ ID NO: 20338
  chr17:74387398-74387662
  hypo

SEQ ID NO: 22012 - DNA, 136 bp, Homo sapiens; identical to SEQ ID NO: 9265
  chr17:74620111-74620247
  hyper

SEQ ID NO: 22013 - DNA, 226 bp, Homo sapiens; identical to SEQ ID NO: 19375
  chr17:77216473-77216699
  hyper

SEQ ID NO: 22014 - DNA, 180 bp, Homo sapiens; identical to SEQ ID NO: 17565
  chr17:77786288-77786468
  hyper

SEQ ID NO: 22015 - DNA, 61 bp, Homo sapiens; identical to SEQ ID NO: 17566
  chr17:77786805-77786866
  hyper

SEQ ID NO: 22016 - DNA, 69 bp, Homo sapiens; identical to SEQ ID NO: 7045
  chr17:8055823-8055892
  hyper

SEQ ID NO: 22017 - DNA, 82 bp, Homo sapiens
  chr17:80600131-80600213
  hypo
cgacagatcagcggcagcatacgattctcacagaagcatgaaccccactgtgaacggcacacgcgagggatggaggctgcac

SEQ ID NO: 22018 - DNA, 188 bp, Homo sapiens; identical to SEQ ID NO: 7051
  chr17:81062393-81062581
  hypo

SEQ ID NO: 22019 - DNA, 439 bp, Homo sapiens
  chr17:8197565-8198004
  hypo
cgtgtccatcagatgggtgtgtatagggcagatcagaagactccgaagcctaccagcactttcctgatgcctttccctgcttgcagtggggcagcactctgccacctatgcccttgggaaagaacagctcctatcctacaacgaggatctgccctgaaggtcccaggcaagagccctcttcttaccatgtagatggggctccccaagtaggctcccatgaccccagccatggccccagctgctgcgctgcgggcaggactgtgggtgccttcggctgtgtgcaggtagcccccagcctcagccagcccataggtgcccagtcggatgccattcatcaggaactggtacaagagggcgggggccaggcctttctgcagggcagcaaggccatccaccttgccgatggtgatgaaggcatggaagacatttcggtagtgcc

SEQ ID NO: 22020 - DNA, 226 bp, Homo sapiens
  chr17:8731961-8732187
  hypo
cgggacacgccgggcagcatttccccatccccactgggccggcctgtcctccggtgcagccctgggggcccgtcccagctgccaggcatcaagaagtccaggggccatgcacgcttcttgatgccccctttgcgctgcagcccggctcgctccatctcagggctgccgggtgcaggcagctcatcagcccccgtgggaaggtcccgctcaatgccgctgtcagtgg

SEQ ID NO: 22021 - DNA, 57 bp, Homo sapiens; identical to SEQ ID NO: 13634
  chr17:9143010-9143067
  hyper

SEQ ID NO: 22022 - DNA, 187 bp, Homo sapiens; identical to SEQ ID NO: 13635
  chr17:9143110-9143297
  hyper

SEQ ID NO: 22023 - DNA, 90 bp, Homo sapiens; identical to SEQ ID NO: 13636
  chr17:9143376-9143466
  hyper

SEQ ID NO: 22024 - DNA, 34 bp, Homo sapiens; identical to SEQ ID NO: 13637
  chr17:9143504-9143538
  hyper

SEQ ID NO: 22025 - DNA, 184 bp, Homo sapiens; identical to SEQ ID NO: 13638
  chr17:9143607-9143791
  hyper

SEQ ID NO: 22026 - DNA, 190 bp, Homo sapiens
  chr18:11148436-11148626
  hyper
cagagcccttcactttgttaagaagtcccccacccaggcgcccccctcgtcctcctcaagtgccctcggaaagcggaccagactcacctactgccaggcagatgggcagcagcagcctgaagatgagcccgcacaccacttctgaggccatcgcgtcggtccggcgagtcggagcagaggggcgaggctc

SEQ ID NO: 22027 - DNA, 201 bp, Homo sapiens
  chr18:11149298-11149499
  hyper
cggggctcgccttgtgggtccggtgcgcgggcggcgctgcgagtccctccctcactcgaaggaacggcgcgagcgtggggagaaatggagaccagagcgcatatcgggtgagtgggtctcccactccctcctccaccgcctcaatttaaaactcaagagaaaaaccagcgccgtcccgtcgcccagcgcgaccaccgcctg

SEQ ID NO: 22028 - DNA, 110 bp, Homo sapiens; identical to SEQ ID NO: 8152
  chr18:13135194-13135304
  hypo

SEQ ID NO: 22029 - DNA, 340 bp, Homo sapiens; identical to SEQ ID NO: 15714
  chr18:13442504-13442844
  hypo

SEQ ID NO: 22030 - DNA, 311 bp, Homo sapiens; identical to SEQ ID NO: 9277
  chr18:20911034-20911345
  hypo

SEQ ID NO: 22031 - DNA, 145 bp, Homo sapiens
  chr18:28622129-28622274
  hyper
gagggggcagcccctaaatcccttttcaagtctgtgctttgagctctcagggatcctctccacccaaaggcgccctccaaccaccatcaccaccagctccaccacctggggagaagcgtgaatcccaaccccctgcccaacccgc

SEQ ID NO: 22032 - DNA, 96 bp, Homo sapiens
  chr18:32074337-32074433
  hyper
cgggggcgggtgggcacgggggtgagtgtcttcggcttttatagcctgttgcccacttcgaagttttctgctggacagagggcaggcgggaggttc

SEQ ID NO: 22033 - DNA, 291 bp, Homo sapiens
  chr18:32557542-32557833
  binary
cgcgctggcgctcgcgcgcttgggagcatcccctggaccccgggcacttccccttcggcagccaccactctcccactccgacgccggccaccatccgcgctcccgggactcaggagccgggtgggtgcaaaaggaagcgggttgttattctgcgcccaagcatctcttctgcagggagccccgggagcgcagggcgagggctactcagcgacttcgcactcggcttagtgggaaattcttcggtctacccttagaagggctatgcggaagccagaaatcccacaaagagcc

SEQ ID NO: 22034 - DNA, 65 bp, Homo sapiens; identical to SEQ ID NO: 5766
  chr18:32557864-32557929
  binary

SEQ ID NO: 22035 - DNA, 445 bp, Homo sapiens; identical to SEQ ID NO: 6006
  chr18:32558003-32558448
  hyper

SEQ ID NO: 22036 - DNA, 412 bp, Homo sapiens
  chr18:35146241-35146653
  binary
gaggcgctgagattccgggcccggcggccgcggggagcgggtgtccgtgaggagccgggcagccggcctcctctctttgccttttgggggttctttttgtaatagcagcaggtgcaactttttgtattttaaaaatagtgatttttattttcgtgtgggtatgtaggggggctttatccaccaagctatgctctattagggcgccaggcgggcgaagcaaaggcagggatggcgggcggggcggcggcggaggtggaatgggcgcttttttcttccatctggctttatttatttatttagactagaaaagcgagccggcttggagggagtccgcccggggatccgagcgcgcattcatcagtgtcgagagaaaaaaagctacataaatatatattatgtggataaatctata

SEQ ID NO: 22037 - DNA, 185 bp, Homo sapiens; identical to SEQ ID NO: 15717
  chr18:3580794-3580979
  hypo

SEQ ID NO: 22038 - DNA, 241 bp, Homo sapiens; identical to SEQ ID NO: 15718
  chr18:3581880-3582121
  hypo

SEQ ID NO: 22039 - DNA, 80 bp, Homo sapiens; identical to SEQ ID NO: 6007
  chr18:44335955-44336035
  hyper

SEQ ID NO: 22040 - DNA, 401 bp, Homo sapiens
  chr18:44787851-44788252
  hyper
catcaccccacccttcacccctccatgcccagtggtcgaaggaggacagatatgaggcgagggctggaggcctagtaattgaagtaggaccaggggcaggagggagcaatccgccctgggggcgcgcagcctgggccggcagcttgaactcccttgccagaagggttgtcccaggacgcgcaggtgcgcttctcctgtgccgccctagggcagtccactaggagggggcaccatttccacactttcccggggaacgaccacctgaggtgagatgagaacctattgtgcgtctccaggaggggagctgggaagattggatacggaagactgagcccttctcagcatctccaggaaggaaagctttagggccaaacataggctgctttaaaaaaaaaaaaaaa

SEQ ID NO: 22041 - DNA, 257 bp, Homo sapiens
  chr18:44788281-44788538
  hyper
acgaagtgtcagactgcgtgtcagggagaccgcgggccaggggttccagttggagcccagcgttccaggaggggatgaagaccgagttcggtaaaacagcgtggtattacaaagtttgcctttcaggctccggcctagctccttccttggcaactttgcaagtgccggcaaccctcactggatcatcctacccttggaacttcttgggaagcctcggtttagccttgggtccaccaagacttcggcgaaatggaggc

SEQ ID NO: 22042 - DNA, 52 bp, Homo sapiens; identical to SEQ ID NO: 8158
  chr18:46142611-46142663
  hypo

SEQ ID NO: 22043 - DNA, 141 bp, Homo sapiens; identical to SEQ ID NO: 13644
  chr18:47285293-47285434
  hypo

SEQ ID NO: 22044 - DNA, 196 bp, Homo sapiens; identical to SEQ ID NO: 7061
  chr18:47339411-47339607
  hyper

SEQ ID NO: 22045 - DNA, 401 bp, Homo sapiens; identical to SEQ ID NO: 6009
  chr18:47339758-47340159
  hyper

SEQ ID NO: 22046 - DNA, 209 bp, Homo sapiens
  chr18:49868091-49868300
  hyper
cggagctggcggcttcgacggccaaaagaatagaaaagagcaaaatgactcatgataaggtccacttgttttgcgggacctcaccgcaagtgtagatgggcactggggtacagtgagcggtcctggcaaagaaggagaggagagcggctggatgagcattcagagagcccttcggaaacgacctttttccaaatccaaaggaaaaacag

SEQ ID NO: 22047 - DNA, 316 bp, Homo sapiens
  chr18:49868356-49868672
  hyper
aacagggaatggcacatcaatcgcggccaagcccccagcctccccggagtccgcagctccggctttctcttctctgctaagtgctgcatggccaagggttgcgaacgcgagcagaaaatgcgcctctcactgtcgcgagggattcagacagtcaagcgccaaggcagcccgaggctccccaaagcctcgctcggccgcacgcgggcaggaatctgcgcttgcactcgggctcagctcctcatcttcctttggccagagacagagagagcaggcaggaggggtgtgtgtgtgtgcgtgtgtgtgtgtgtgtgtgtgc

SEQ ID NO: 22048 - DNA, 585 bp, Homo sapiens; identical to SEQ ID NO: 7063
  chr18:5237294-5237879
  hyper

SEQ ID NO: 22049 - DNA, 537 bp, Homo sapiens; identical to SEQ ID NO: 7064
  chr18:5238247-5238784
  hyper

SEQ ID NO: 22050 - DNA, 45 bp, Homo sapiens; identical to SEQ ID NO: 8160
  chr18:53446783-53446828
  hyper

SEQ ID NO: 22051 - DNA, 172 bp, Homo sapiens
  chr18:56008826-56008998
  hypo
cgttgttgtttgggttcgcgctcctaatcacacacaccgggagatcctcctatgaagctaacttgtttttgcctccaaaatagcttgcagaagatggtgcgtccggatcagccacaaacagtaacaaccatctaatcgagcctcagatccgccggcctcgtagcctcagctc

SEQ ID NO: 22052 - DNA, 82 bp, Homo sapiens; identical to SEQ ID NO: 21058
  chr18:61603403-61603485
  hyper

SEQ ID NO: 22053 - DNA, 201 bp, Homo sapiens; identical to SEQ ID NO: 21059
  chr18:61603701-61603902
  hyper

SEQ ID NO: 22054 - DNA, 208 bp, Homo sapiens; identical to SEQ ID NO: 21060
  chr18:61603985-61604193
  hyper

SEQ ID NO: 22055 - DNA, 138 bp, Homo sapiens; identical to SEQ ID NO: 6013
  chr18:70210281-70210419
  hyper

SEQ ID NO: 22056 - DNA, 53 bp, Homo sapiens; identical to SEQ ID NO: 6014
  chr18:70210508-70210561
  hyper

SEQ ID NO: 22057 - DNA, 128 bp, Homo sapiens; identical to SEQ ID NO: 13656
  chr18:72347372-72347500
  hypo

SEQ ID NO: 22058 - DNA, 74 bp, Homo sapiens; identical to SEQ ID NO: 13657
  chr18:72347576-72347650
  hypo

SEQ ID NO: 22059 - DNA, 874 bp, Homo sapiens
  chr18:74096607-74097481
  hypo
cggtggccctgatcctgaaacggaagaactcggctagagaagtgtccggggagggggctccagctccctggttgaggaaatgcctggttccgtggctcccatgccacacagggagaaagtctgcaagaaaaagcacttctgctcctcagtccccaccaatctgacagcccctgggtggcagtgctcaccgggcactttattagaattgaaggaaagagaacggtgctgatttgagcatggcgtggccctgcatagatggctgcctctaaccctgaccgcagtgccgagggcacacaccagagagggaaggctggctcagaaaggcctggcagcggccctgtgcagagggagcaggatctccaacactcaccccatgctctccgggtgcacggaagcacgtgccaggaggaggcagccgggtccgagcagccctagagaaggcgcacgtcgctcccaaccccacgagtgtgcacacgcgtgccacagacggtgactatggctgctctgtcctcggctcaaacacaccaggggctcccgggttcctttctaagcaggaccttcctagatgtgtcttggaaacacaaacatggattaggtcttgggtgacttcactgcgtcccaagctggccctggcctggctggtgccgcacaccgccgacaagcatgtttcacacggggcccagggagtggcagacttgcactgtctgaagtccctgaggcaacatcttcaacacacacaaccgccctcaaaagcacagaaatgcggtgagggcactttgtataaagttactcccctttcacttaaaatattttttattactgtagtaaaatatacataacaaaaaagtctgcagccacgcagccacgctgaggc

SEQ ID NO: 22060 - DNA, 133 bp, Homo sapiens; identical to SEQ ID NO: 7069
  chr18:74113780-74113913
  hypo

SEQ ID NO: 22061 - DNA, 61 bp, Homo sapiens; identical to SEQ ID NO: 7070
  chr18:74113942-74114003
  hypo

SEQ ID NO: 22062 - DNA, 168 bp, Homo sapiens
  chr18:74134219-74134387
  hypo
cgcagaagagcctgcggagagcgggccggtccctcggcactccctgcactgcggcagtaagaagcagaccacggtctccaggggcctgacggatgatgaccatgtactcatacactcaggctatggagcagagctgcacctgcaaacacgtgactgccctaactttcc

SEQ ID NO: 22063 - DNA, 1787 bp, Homo sapiens
  chr18:74153251-74155038
  hypo
cggccaggccagagcccggggagtcagcagcggcacaggcggagccagggctgctgggctgggaggccgagtcaccctcactgagtgatccgcagcgggcccgcgccgccctgtccccgtcactgtccctctcgcggcgcgcgcggcgatgcacgcgtgagtgcagcaccatctgatgataggtgcggaagatcttgccgcactcgaagcactcggaggacttgccctggccggtggtggctgcggccctgcggttggggcgcgcggccgagcggggatcgaggtggccggcgggcgcggggtccccaggcccgctcgcgcgcttccgcgggggcccctgcgcggctggtgcatcctgctcacgcttgcgcttctcctggctcaccaggacgtactcgcgcctgtccttgtcgaaggccacgtccccggccagcgcctcgtcccaggccccgtacttgaggtactcggccggctcggccaccttaccccgcgtggccagctgccaggcctggtagctgttgaccgggtccagctcagccacccgccgtccggcctgcgtgccagggcacgagtcgccggccgccgacggcctcaggttcaggcactggaggaagaactgcttggtgtccgagggcccctccgccccctcctcggccggggcgcgcgtgcggctggcctcgactctgcggtggatggcattgtgggcgttcaagctgtccaggtttgtaaacaggttcccgcacttggcgcagacctcgtagaggctcaggccggcgacgatcacctcctcctggaccacgttgttgatggtggcgatggggtccagctcactcttgggcctgttcttgctgcccgtcttggggccgtgcgccttcatgtggttcttgaggaaccagggctccttgaacctacggccgcagatgtggcagccgtggtcgaaggagccccggtgcttcttcatgtgcgccttcaggaaccaggtctggctgaaggcctggccacacacctcgcacgggaactccccggggctcagctcgggcttgccgttctccacgcaggcctcgccgctgccgggcccctgcgcggtgatgtggtccctctcgatgtggctcagcagcgactcctcccgcagcgtcgcgtagctgcacagcctgcacttgaacggcttgtgcgcctggtgcacgtgcagctccaggtccttcttacgctcgaactggctcttgcagaaggagcactggaccgctgccttggcctcccccggggcgcatgcggacccctctgcccccttcttgctgctccgcagcaggactctgccgctgtcggcctgcgaggccccgttcaggaccctggcgccgtcggcctgcgaggccccgttcagcagccggttgcaggccgaggcgctcttggtggggctggcgcaggcgtccaggccctcggaggcgcgcatctcacccagcggcgcctcgcccgcctccggctcgtgtccctgaatcagagtccccgtgcggtggctccggatgtgaatcttcaggttgcccttctgggaagcccggtggtcgcagtagggacacttgtagggcttctcgcccgtgtgcttgcgcatgtgctgcgaaagcgagctctggaaggggaagctcttgccgcagatgcagcaggtgtggcaggtagccttgtccccatccacctcgtggccccggccggccctggtggggctggggcctcgcctcagctccatctcggcctctctgttgcgatccatccgaaggacgggcgcggccggtggtggc

SEQ ID NO: 22064 - DNA, 246 bp, Homo sapiens
  chr18:74325503-74325749
  hypo
cggtctcgtgcaagccccgcctctcccttactagcaaagttgtgaggacagcgcctgcacgcaacacttgcttactaacttgtaactgttattacagaaagcgtggagccaaacagatggcagaggcccaaggaagagcgcgctaaacccgaagtagatctgatttcacatcttgacttggcgattgtttagctgggtcagggtaaatgcctcactgttcctcgtctgtaaatgaacacgggtgct

SEQ ID NO: 22065 - DNA, 173 bp, Homo sapiens
  chr18:74325938-74326111
  hypo
gacaggggacactggaacaggggagacgacatggaagaaatctgggggagccaaaagccgccatgccgagaagggggtcggaggaggcgcgggagagaaaagcccagggctgtacactcgcatccctctgctgccggcccttcgggtacattcaaatactgggcatgagtccc

SEQ ID NO: 22066 - DNA, 101 bp, Homo sapiens
  chr18:74419743-74419844
  hypo
cgtcttgcagaaatctcggtctcccttttaaggcattgttttcaatgtaagatggcaaaggcaaatccagtaaaaggttgtggctaataccggacatttac

SEQ ID NO: 22067 - DNA, 56 bp, Homo sapiens; identical to SEQ ID NO: 12461
  chr18:76653387-76653443
  hypo

SEQ ID NO: 22068 - DNA, 150 bp, Homo sapiens
  chr18:77270851-77271001
  hypo
cggggcatcctctgccggggcatcttccgccggggcatcctccgccgggacatcctccaccgggggctcctccgccggggcatcctgctccggggcatcgttcgccggtcttgtcgctgcggtggaagtgtcgtgttcccagccaggctg

SEQ ID NO: 22069 - DNA, 338 bp, Homo sapiens
  chr18:77271089-77271427
  hypo
gagagtccaccaacggcaattacaggaacctaatggccttcctgccgcaccgctccgtggcacccggctcgctgtgatgaattgctcattatgtgcagtgttggaatagcctccacaagattaataattggataatcaatacagaaattcaatcttggggtgtttttttcactccggggtcaatatgtcctgaagattacaaggcccgactctgcctcccccctccccgctgcttccgcgttgggagtttggccagcacctcgccacacgatgggtcatggtgcgttgtctccgtacctccgtgacttttctattctttgcaaacagcaggttctgcc

SEQ ID NO: 22070 - DNA, 161 bp, Homo sapiens; identical to SEQ ID NO: 13661
  chr18:77508739-77508900
  hypo

SEQ ID NO: 22071 - DNA, 399 bp, Homo sapiens; identical to SEQ ID NO: 13662
  chr18:77508946-77509345
  hypo

SEQ ID NO: 22072 - DNA, 116 bp, Homo sapiens; identical to SEQ ID NO: 13663
  chr18:77509679-77509795
  hypo

SEQ ID NO: 22073 - DNA, 268 bp, Homo sapiens; identical to SEQ ID NO: 13664
  chr18:77535504-77535772
  hypo

SEQ ID NO: 22074 - DNA, 266 bp, Homo sapiens; identical to SEQ ID NO: 6497
  chr18:77542640-77542906
  hypo

SEQ ID NO: 22075 - DNA, 271 bp, Homo sapiens; identical to SEQ ID NO: 6498
  chr18:77542951-77543222
  hypo

SEQ ID NO: 22076 - DNA, 136 bp, Homo sapiens
  chr18:77609451-77609587
  hypo
cgtccgacctcatccggggcaaggtcgtccgcgtgcaggagccgcatctggacaggccgcacctgccttccctccccgccttgctctgcgtcagcctaggagcctcctgtcctggccgcgggttacaccaagcgcg

SEQ ID NO: 22077 - DNA, 474 bp, Homo sapiens
  chr18:77609678-77610152
  hypo
tcggctggaggcagagcggaggctggggccaccggaagccttgttcttgcgtggctgggggctgatgctggctgccggccgccctgggtggcgtgggagcaggagcgcgtggaagacccagcctctctgagagccccccacgtaatcacacagtgagaggtccgctgtggtttagtgggaggaacccgagactccacccaggctgagtgggagggaggcgagaccccacctggccgtgggaggaacccgagaccccacccaggctcagtgggagggaacggagaccccacctggccgtaggaggagtgtcccgcgcacctaaagggctgacagggccgtgtgaaaacccgccggggtcgctggtcctggctctcctgaccttctgcctccccgctaccctcatccatgtacccagcacacacgtgcacacatacgtggataaatggaataaacataaacttcacccagacagcc

SEQ ID NO: 22078 - DNA, 363 bp, Homo sapiens; identical to SEQ ID NO: 15730
  chr18:77627972-77628335
  hypo

SEQ ID NO: 22079 - DNA, 122 bp, Homo sapiens; identical to SEQ ID NO: 15731
  chr18:77628470-77628592
  hypo

SEQ ID NO: 22080 - DNA, 118 bp, Homo sapiens; identical to SEQ ID NO: 20373
  chr18:907197-907315
  hyper

SEQ ID NO: 22081 - DNA, 202 bp, Homo sapiens; identical to SEQ ID NO: 12474
  chr18:9709406-9709608
  hyper

SEQ ID NO: 22082 - DNA, 229 bp, Homo sapiens; identical to SEQ ID NO: 8179
  chr19:1004547-1004776
  hypo

SEQ ID NO: 22083 - DNA, 279 bp, Homo sapiens; identical to SEQ ID NO: 7074
  chr19:1005441-1005720
  hypo

SEQ ID NO: 22084 - DNA, 212 bp, Homo sapiens; identical to SEQ ID NO: 8181
  chr19:10197461-10197673
  binary

SEQ ID NO: 22085 - DNA, 116 bp, Homo sapiens; identical to SEQ ID NO: 5769
  chr19:10691764-10691880
  binary

SEQ ID NO: 22086 - DNA, 986 bp, Homo sapiens
  chr19:1079725-1080711
  hypo
cgcacctgcgtggccgacgcgaagacgcagaagcaggagctggaggataccaaggtgacggcgctgcggcagatccaggaggtcatccggcagagcgaccaaaccatcaagtcggtgcgtggggtgctccggccgcccgggcggggatggtggaccgggcggcctcctcctgacccctccgctctccggtgccgcccgcaggccacgatctcctactaccagatgatgcatatgcagacggcgccgctgcccgtgcacttccagatgctgtgtgagagcagcaagctgtatgacccaggccagcagtacgcctcccacgtgcgccagctgcagcgggaccaggagcccgatgtgcactacgactttgagccccacgtctccgccaacgcctggtaccgccacccagctgccctgtccccggcgcacaaggccctgcctgggagccgggcttccctctgtcgggggcatgaagatgaagctgtcttgccccccatcacctcccctccttttcccggtttcttccactaggtcccccgtcatgcgtgcccggaagagcagcttcaacgtgagtgatgtggcgcggccggaggctgccgggagccccccagaagaaggcgggtgcactgagggcacacctgccaaggaccacaggggtgagtgtccggcggggcccaggggcggacgctggctccctgcgacccaccctggcccttcaccagagacgcctctttctccagccgggcgaggacaccaggttcacaagtcatggccgctctcgatctcagactcggacagtgggctggaccccggccctggcgcaggtgagggaggctctctggcgggctggggtgtggagctgcctcctctcctgagcctcagggtttcatcacccaccggggtgatggagggggcccccctggctgggggagtctgaacagtcctgattcccgcccaggggactttaagaagttcgagcggacgtcatc

SEQ ID NO: 22087 - DNA, 177 bp, Homo sapiens; identical to SEQ ID NO: 6503
  chr19:11003087-11003264
  hypo

SEQ ID NO: 22088 - DNA, 261 bp, Homo sapiens
  chr19:12807005-12807266
  binary
cgcgcgtacgcggcgtagcgcgcgtagcctccaggtgacatggtcagacacgaggtcgcggagcgcgtggcacacccgcgacaggacgtggagcacgaggcgggcgtccaggtaggagcagatctcgagcagcagctccgggggaaggctcagaaggcccggctcacttacggccgaaaccctggacgcggcccgaggctccgaagcgctcggggacgcggcgggtgtggatagctgcgaggggcgcgagaacgccagccc

SEQ ID NO: 22089 - DNA, 65 bp, Homo sapiens
  chr19:1308081-1308146
  hypo
aaaccaccgccagcggctccccgtctatttgtctgtgcacattcctgggctcagacggtggcttc

SEQ ID NO: 22090 - DNA, 35 bp, Homo sapiens
  chr19:13201116-13201151
  hypo
cgcaacgacaggcgcctcctctgccaaccggtttg

SEQ ID NO: 22091 - DNA, 190 bp, Homo sapiens; identical to SEQ ID NO: 8186
  chr19:13213427-13213617
  binary

SEQ ID NO: 22092 - DNA, 112 bp, Homo sapiens; identical to SEQ ID NO: 8187
  chr19:13213834-13213946
  hyper

SEQ ID NO: 22093 - DNA, 112 bp, Homo sapiens; identical to SEQ ID NO: 8187
  chr19:13213834-13213946
  hypo

SEQ ID NO: 22094 - DNA, 576 bp, Homo sapiens; identical to SEQ ID NO: 7077
  chr19:1333769-1334345
  hypo

SEQ ID NO: 22095 - DNA, 224 bp, Homo sapiens; identical to SEQ ID NO: 8189
  chr19:13983612-13983836
  hyper

SEQ ID NO: 22096 - DNA, 434 bp, Homo sapiens; identical to SEQ ID NO: 8190
  chr19:13983865-13984299
  hyper

SEQ ID NO: 22097 - DNA, 31 bp, Homo sapiens
  chr19:1494971-1495002
  hypo
cgcgcccggctgcaaacacttcactgggcag

SEQ ID NO: 22098 - DNA, 164 bp, Homo sapiens
  chr19:1495400-1495564
  hypo
ggctgcccacgcggggggttctgggggctccctggcagcccctgaccctgctgcaccctccctgcagaatcaaagctatcgagagcccaagcaaggacgacgacactgtgtggctcacctactgggtggtgtacgccctgtttgggctggccgagttcttcagc

SEQ ID NO: 22099 - DNA, 241 bp, Homo sapiens
  chr19:1506026-1506267
  hypo
cgccgggcagtcaggcgtatgcggctgtcctccgcagggctccagggccgggcgtagccggcgtggggcagcagcagctggtcctgtgtgccgtcggggctgacaagacgctggacagccatcaggtagtcccggtggggtgccagcatcgggcaggggcagtggcctggcgcccacacgtactcgcgtgcccgcagtggcgagcggttcttgtagacgagctggatgcgcacctcatagc

SEQ ID NO: 22100 - DNA, 106 bp, Homo sapiens; identical to SEQ ID NO: 10413
  chr19:17392397-17392503
  binary

SEQ ID NO: 22101 - DNA, 149 bp, Homo sapiens; identical to SEQ ID NO: 15746
  chr19:17757928-17758077
  hypo

SEQ ID NO: 22102 - DNA, 96 bp, Homo sapiens; identical to SEQ ID NO: 15747
  chr19:17758133-17758229
  hypo

SEQ ID NO: 22103 - DNA, 133 bp, Homo sapiens; identical to SEQ ID NO: 8212
  chr19:17958343-17958476
  hyper

SEQ ID NO: 22104 - DNA, 90 bp, Homo sapiens; identical to SEQ ID NO: 7084
  chr19:18092401-18092491
  hypo

SEQ ID NO: 22105 - DNA, 62 bp, Homo sapiens; identical to SEQ ID NO: 7085
  chr19:18092885-18092947
  hypo

SEQ ID NO: 22106 - DNA, 109 bp, Homo sapiens; identical to SEQ ID NO: 7091
  chr19:1857456-1857565
  hyper

SEQ ID NO: 22107 - DNA, 160 bp, Homo sapiens; identical to SEQ ID NO: 8219
  chr19:18808024-18808184
  hypo

SEQ ID NO: 22108 - DNA, 233 bp, Homo sapiens; identical to SEQ ID NO: 6516
  chr19:1978023-1978256
  hypo

SEQ ID NO: 22109 - DNA, 116 bp, Homo sapiens; identical to SEQ ID NO: 5770
  chr19:1979018-1979134
  binary

SEQ ID NO: 22110 - DNA, 75 bp, Homo sapiens; identical to SEQ ID NO: 9334
  chr19:19932106-19932181
  hyper

SEQ ID NO: 22111 - DNA, 181 bp, Homo sapiens; identical to SEQ ID NO: 21078
  chr19:1993286-1993467
  hypo

SEQ ID NO: 22112 - DNA, 694 bp, Homo sapiens; identical to SEQ ID NO: 6027
  chr19:19976556-19977250
  hyper

SEQ ID NO: 22113 - DNA, 35 bp, Homo sapiens; identical to SEQ ID NO: 6028
  chr19:19977294-19977329
  hyper

SEQ ID NO: 22114 - DNA, 68 bp, Homo sapiens; identical to SEQ ID NO: 8228
  chr19:23598868-23598936
  hyper

SEQ ID NO: 22115 - DNA, 113 bp, Homo sapiens
  chr19:2573883-2573996
  hypo
cgtggtcatatgcgaacgggtgaattaaattctttctggaagaggctggaaaggcactgcatgaatgggacataccgtgggtgccacggaccagctgctgcgaggtacggccg

SEQ ID NO: 22116 - DNA, 153 bp, Homo sapiens
  chr19:2574044-2574197
  hypo
tgccttctcaccttgggtgcctgggtctggcccagagcccgtcacacctgggctggtgcagtccaggtgaaacccgccctgccagccacccccaccatctcccggggtgtccctgctgggcctgcattctgacatcacgccttcaaactcaac

SEQ ID NO: 22117 - DNA, 248 bp, Homo sapiens; identical to SEQ ID NO: 15760
  chr19:33996157-33996405
  hypo

SEQ ID NO: 22118 - DNA, 39 bp, Homo sapiens
  chr19:35168869-35168908
  binary
cgcggggtgatgacggcgccgacctcttggcactgttgt

SEQ ID NO: 22119 - DNA, 97 bp, Homo sapiens
  chr19:35168992-35169089
  binary
aaccttgaacaaatgggttcagtatctcggaatttcagttttgtcttcattttaaaaaataaatctggtttagaactcgacctcaagcgatccgccc

SEQ ID NO: 22120 - DNA, 154 bp, Homo sapiens
  chr19:379979-380133
  hypo
cggcaggcggtttcgggcgctggcctgtgacgccgtcctgggcaggcgcgtgcatctgaatgctttttacctggtctctcgactgttgcgttgggtaactcccatccatatcaccagtttcacaccaggttccagggacgaggatgtggacacc

SEQ ID NO: 22121 - DNA, 86 bp, Homo sapiens; identical to SEQ ID NO: 9382
  chr19:38719834-38719920
  hyper

SEQ ID NO: 22122 - DNA, 264 bp, Homo sapiens; identical to SEQ ID NO: 9383
  chr19:38719956-38720220
  binary

SEQ ID NO: 22123 - DNA, 187 bp, Homo sapiens; identical to SEQ ID NO: 9384
  chr19:38720439-38720626
  binary

SEQ ID NO: 22124 - DNA, 86 bp, Homo sapiens; identical to SEQ ID NO: 7107
  chr19:39289891-39289977
  hypo

SEQ ID NO: 22125 - DNA, 369 bp, Homo sapiens
  chr19:39435437-39435806
  hypo
cgatatgtaagcgtcttgacacagggcttgggatgtaagaagggctcgatacttcttagctgttatgattatagatatccaggagtgacagaagggaaaccgagcagacgagaggctgggcgtgtgtgcctttagcgggtcggggggagctggaagctagtctggacccacctgtcggcagcccctctcagtccactgaaggaccgggtcaggtgaggctgagaacttgaccacttccttttcatacacatccagaaggcggacccggagctggtagacgcagccgcagttctctcgagcgccccacctgccaggcagcagtcagcctctatgcccccgtcacccagccagctctctgggtttcggggc

SEQ ID NO: 22126 - DNA, 54 bp, Homo sapiens; identical to SEQ ID NO: 8241
  chr19:403809-403863
  hypo

SEQ ID NO: 22127 - DNA, 109 bp, Homo sapiens
  chr19:40474764-40474873
  hypo
cgctgctgtctgctgccatggcagctgtggcagacctgccgctgacttccacccctccggatccgggtgtccactgcacttctgatccagcgaggcggcacccattgcc

SEQ ID NO: 22128 - DNA, 311 bp, Homo sapiens; identical to SEQ ID NO: 8244
  chr19:407832-408143
  hypo

SEQ ID NO: 22129 - DNA, 805 bp, Homo sapiens; identical to SEQ ID NO: 11392
  chr19:418255-419060
  hypo

SEQ ID NO: 22130 - DNA, 92 bp, Homo sapiens
  chr19:44405817-44405909
  hyper
cgccccgttcacgccctgggtcttctggtcttcagcgcctctcatcctcaccgccggttccattccaaccagggactgtggaagcctccgct

SEQ ID NO: 22131 - DNA, 48 bp, Homo sapiens
  chr19:44406123-44406171
  hyper
tctattaagggctatgatttcaggtcgtcctgcgtgtttagaggaggc

SEQ ID NO: 22132 - DNA, 68 bp, Homo sapiens; identical to SEQ ID NO: 6053
  chr19:44711963-44712031
  hyper

SEQ ID NO: 22133 - DNA, 201 bp, Homo sapiens; identical to SEQ ID NO: 7116
  chr19:45656461-45656662
  hyper

SEQ ID NO: 22134 - DNA, 75 bp, Homo sapiens; identical to SEQ ID NO: 13737
  chr19:45810267-45810342
  hypo

SEQ ID NO: 22135 - DNA, 41 bp, Homo sapiens; identical to SEQ ID NO: 20406
  chr19:46307556-46307597
  hypo

SEQ ID NO: 22136 - DNA, 39 bp, Homo sapiens; identical to SEQ ID NO: 20407
  chr19:46308096-46308135
  hypo

SEQ ID NO: 22137 - DNA, 32 bp, Homo sapiens; identical to SEQ ID NO: 7120
  chr19:47116867-47116899
  hypo

SEQ ID NO: 22138 - DNA, 112 bp, Homo sapiens; identical to SEQ ID NO: 8263
  chr19:47646754-47646866
  hypo

SEQ ID NO: 22139 - DNA, 144 bp, Homo sapiens
  chr19:49997398-49997542
  hypo
ttttttttattaagatgttctatagctgcactaactgatacacaatacacaagccactaaccccacttgtggctcctgagcacttaaatatgaatagagtgaggctgggtgcagtctcacctgttcccggaactttgggaggcc

SEQ ID NO: 22140 - DNA, 78 bp, Homo sapiens; identical to SEQ ID NO: 7126
  chr19:50320125-50320203
  hypo

SEQ ID NO: 22141 - DNA, 67 bp, Homo sapiens; identical to SEQ ID NO: 8277
  chr19:50365162-50365229
  hypo

SEQ ID NO: 22142 - DNA, 89 bp, Homo sapiens; identical to SEQ ID NO: 18631
  chr19:50836203-50836292
  hyper

SEQ ID NO: 22143 - DNA, 589 bp, Homo sapiens; identical to SEQ ID NO: 18632
  chr19:50836451-50837040
  hyper

SEQ ID NO: 22144 - DNA, 88 bp, Homo sapiens; identical to SEQ ID NO: 19475
  chr19:50837389-50837477
  hyper

SEQ ID NO: 22145 - DNA, 233 bp, Homo sapiens; identical to SEQ ID NO: 15776
  chr19:53507269-53507502
  hypo

SEQ ID NO: 22146 - DNA, 99 bp, Homo sapiens; identical to SEQ ID NO: 7131
  chr19:549193-549292
  hypo

SEQ ID NO: 22147 - DNA, 96 bp, Homo sapiens
  chr19:557942-558038
  hypo
cgtgagccaccacgcctggccccttattgaacttgatggtttctccttcgtatctcagaagtcacaagctggaggatttaggtttgaagaatcacg

SEQ ID NO: 22148 - DNA, 108 bp, Homo sapiens; identical to SEQ ID NO: 13750
  chr19:55976235-55976343
  hypo

SEQ ID NO: 22149 - DNA, 146 bp, Homo sapiens; identical to SEQ ID NO: 7135
  chr19:56688223-56688369
  hypo

SEQ ID NO: 22150 - DNA, 38 bp, Homo sapiens; identical to SEQ ID NO: 9438
  chr19:58094924-58094962
  hyper

SEQ ID NO: 22151 - DNA, 146 bp, Homo sapiens; identical to SEQ ID NO: 6078
  chr19:58280766-58280912
  hyper

SEQ ID NO: 22152 - DNA, 176 bp, Homo sapiens; identical to SEQ ID NO: 6079
  chr19:58281371-58281547
  hyper

SEQ ID NO: 22153 - DNA, 44 bp, Homo sapiens
  chr19:58739694-58739738
  hyper
cgactgagcgatcacctaggacgaatcgcctccagttagcgtgc

SEQ ID NO: 22154 - DNA, 54 bp, Homo sapiens; identical to SEQ ID NO: 8287
  chr19:58964127-58964181
  hypo

SEQ ID NO: 22155 - DNA, 337 bp, Homo sapiens
  chr19:5896616-5896953
  hypo
cgagacgggcacagcaggagcctcttgggcgctcactgccagtgtctggatggagagagatgccacgagtcggctgctcgctgtgcatggcagcctcctggccccagtcctggagctgttctcctgggcctccccaccctacatgtattcctgataaaggaacaccccactttctccggatggccagcactgtggacacgggctggggagtcagagagaagaggcagccgtcaaatgtgctctgagagctggggctgtgccaggagagggcccagccatgcccagcccagcgtgctcacctgcagtgaacgtgtattgtccaaccttagccactcct

SEQ ID NO: 22156 - DNA, 259 bp, Homo sapiens; identical to SEQ ID NO: 8288
  chr19:5897319-5897578
  hypo

SEQ ID NO: 22157 - DNA, 292 bp, Homo sapiens; identical to SEQ ID NO: 8290
  chr19:5915130-5915422
  hypo

SEQ ID NO: 22158 - DNA, 406 bp, Homo sapiens; identical to SEQ ID NO: 8291
  chr19:5915520-5915926
  hypo

SEQ ID NO: 22159 - DNA, 324 bp, Homo sapiens; identical to SEQ ID NO: 8292
  chr19:5915969-5916293
  hypo

SEQ ID NO: 22160 - DNA, 406 bp, Homo sapiens; identical to SEQ ID NO: 7139
  chr19:603411-603817
  binary

SEQ ID NO: 22161 - DNA, 159 bp, Homo sapiens; identical to SEQ ID NO: 7140
  chr19:603846-604005
  binary

SEQ ID NO: 22162 - DNA, 216 bp, Homo sapiens
  chr19:629609-629825
  hypo
ccgtggtggacgaccagcaggtggtgggcgaggggcagctggtcagtgagcaggcagcacttgaagaaggccaggagcctctgctgctgacctgagagctgggcctgcgagtgctgccccgacggggcctgctccacatcgaggctcagcttcccaggggcctcctgcagcagccgggccagctgctcctcccaggggctctcgggggcctggcgc

SEQ ID NO: 22163 - DNA, 66 bp, Homo sapiens; identical to SEQ ID NO: 10472
  chr19:6590260-6590326
  hyper

SEQ ID NO: 22164 - DNA, 323 bp, Homo sapiens; identical to SEQ ID NO: 10473
  chr19:6590881-6591204
  binary

SEQ ID NO: 22165 - DNA, 131 bp, Homo sapiens
  chr19:8526882-8527013
  hypo
cggggctctgtacaattgcacgagttgctcacctgtgaagctggccctgcggccgtgtgtgcctgtgagcttataccttcgcatacgtgcgtccttgtatttatagcatgtgagctcagcccgatggcatc

SEQ ID NO: 22166 - DNA, 62 bp, Homo sapiens
  chr19:8535026-8535088
  hypo
cggccatttcggaggcttgacttcaaagccttcagtgctttgggagagtaagtcaccgtggc

SEQ ID NO: 22167 - DNA, 159 bp, Homo sapiens; identical to SEQ ID NO: 6528
  chr19:883424-883583
  hypo

SEQ ID NO: 22168 - DNA, 45 bp, Homo sapiens; identical to SEQ ID NO: 6529
  chr19:884311-884356
  hypo

SEQ ID NO: 22169 - DNA, 614 bp, Homo sapiens; identical to SEQ ID NO: 15795
  chr2:10334473-10335087
  hypo

SEQ ID NO: 22170 - DNA, 297 bp, Homo sapiens; identical to SEQ ID NO: 8300
  chr2:10588876-10589173
  binary

SEQ ID NO: 22171 - DNA, 197 bp, Homo sapiens; identical to SEQ ID NO: 8301
  chr2:10589298-10589495
  hyper

SEQ ID NO: 22172 - DNA, 86 bp, Homo sapiens; identical to SEQ ID NO: 18645
  chr2:106730126-106730212
  hypo

SEQ ID NO: 22173 - DNA, 160 bp, Homo sapiens; identical to SEQ ID NO: 18646
  chr2:106730256-106730416
  hypo

SEQ ID NO: 22174 - DNA, 209 bp, Homo sapiens; identical to SEQ ID NO: 7172
  chr2:113103038-113103247
  hypo

SEQ ID NO: 22175 - DNA, 89 bp, Homo sapiens; identical to SEQ ID NO: 7173
  chr2:113103431-113103520
  hypo

SEQ ID NO: 22176 - DNA, 554 bp, Homo sapiens
  chr2:113341898-113342452
  hyper
cattctctttggacccgaggcaccaccatactttccattgcttacttccgttaaaccccgagcgctgccatggcaagccggaaatagggatgaagcaatttagccagaagagggcggaagtggctactcagggcgccgccatgacgagccgggccggaagaagaggtagggcgccgccgtgacagattagtcctaaagggaacggggttgttagttcaattggctaccggaaaaaaccaggctgggctgggcgccgccatgacaaccgataccggaaaaggcgggtcgttccccccggacagccctacgccggcaaaggtctcgagatgtgagtagtgagagcgcctaccccatacgtgctgccgctccccttcttttacccagtgatctagacctagtctaggacctcgggaactaggaccagcctccctccttcttggagatctgaccctcaggattcagcgccttcgctcacgagctccaaccctccgcatgcccaagccccgccctctaagcgtttaggcctcgccccctctcgcgctgcttaggacttc

SEQ ID NO: 22177 - DNA, 31 bp, Homo sapiens; identical to SEQ ID NO: 6084
  chr2:118981062-118981093
  hyper

SEQ ID NO: 22178 - DNA, 154 bp, Homo sapiens; identical to SEQ ID NO: 19493
  chr2:121834588-121834742
  hyper

SEQ ID NO: 22179 - DNA, 49 bp, Homo sapiens; identical to SEQ ID NO: 6085
  chr2:127782995-127783044
  hyper

SEQ ID NO: 22180 - DNA, 154 bp, Homo sapiens; identical to SEQ ID NO: 12561
  chr2:130512142-130512296
  hypo

SEQ ID NO: 22181 - DNA, 69 bp, Homo sapiens; identical to SEQ ID NO: 5793
  chr2:139538166-139538235
  binary

SEQ ID NO: 22182 - DNA, 691 bp, Homo sapiens
  chr2:159825046-159825737
  hyper
cgcgagaggaaggtgccttcgggaacacgcgcaagggcggggattcgcgctgccaatgaggccccggtgtgggccgagcaaggcggggggacgggccggagcggaggctttgctgtggcagctgctggagcggcggccgcctcgggagccggaggagaggcagccgcggagcgccgagctggcctcgccccgaggcccggccctgggtgtggggaaccgcgctgaggagctggaaactttcccggcaggtaactcccgcagcccggactccgccgcgggcctgcgagcgccccgggcatggccagctgccagtgtgcggagaggtcgagagggacccggggtggagagggtgatgggagaagggaaaggcgtgtgggaaagtttctggagcgccccctcctccgccgggcacacccgggagctttccgggaataggcacagacatgttgggcgccccgggccttggtctctcggcggctttggggagtccgcaccttccttgcgcggttcccccgcgccggaccgagccggcctcccctggaaccggtgtggtgggaaccgggaacgcttggggcacgctcgagttctgggaccacccccgcccggcgcgcccgctcgccccctttcccgccttctctgtagccctcgggcttggcaagggcctgggctacgcctggtacctggcgcgggg

SEQ ID NO: 22183 - DNA, 83 bp, Homo sapiens; identical to SEQ ID NO: 15811
  chr2:170282893-170282976
  hypo

SEQ ID NO: 22184 - DNA, 244 bp, Homo sapiens
  chr2:171570957-171571201
  hyper
ggtcgccttgggtgtcctgccgagctcagctttgagggtatgcgcggcgcgggtgtttttcccaggtccactctgcaaaagttgtggcctgaggaaaacttccaggtcgccagcaggaacgtcacaggagagccccggtcgctcgtcaggcgggcggccctggagcgtgcgcgccacccaacgccgcgctgggcggccgcccggccccgccccaggtcacagccctgccctcggccccaccgcg

SEQ ID NO: 22185 - DNA, 178 bp, Homo sapiens; identical to SEQ ID NO: 11460
  chr2:171671978-171672156
  hyper

SEQ ID NO: 22186 - DNA, 133 bp, Homo sapiens; identical to SEQ ID NO: 15812
  chr2:171730981-171731114
  hypo

SEQ ID NO: 22187 - DNA, 353 bp, Homo sapiens; identical to SEQ ID NO: 20447
  chr2:178483339-178483692
  hyper

SEQ ID NO: 22188 - DNA, 486 bp, Homo sapiens; identical to SEQ ID NO: 19514
  chr2:179343487-179343973
  hyper

SEQ ID NO: 22189 - DNA, 31 bp, Homo sapiens
  chr2:190368120-190368151
  hypo
cgccgggattacaggcgtgagccaccacgcc

SEQ ID NO: 22190 - DNA, 142 bp, Homo sapiens; identical to SEQ ID NO: 19518
  chr2:19563170-19563312
  hyper

SEQ ID NO: 22191 - DNA, 67 bp, Homo sapiens; identical to SEQ ID NO: 19519
  chr2:19563433-19563500
  hyper

SEQ ID NO: 22192 - DNA, 64 bp, Homo sapiens
  chr2:196411561-196411625
  hypo
cggcaagcagtagcaagatttattgcaagaagcgaaacaacaaaccttccacaacgtggaagac

SEQ ID NO: 22193 - DNA, 111 bp, Homo sapiens
  chr2:201727391-201727502
  hyper
cgtgaaacacacgtcattctccccgtttaaacgtgtaccagaaactagtctccaactcaaatgcaatcataaatgttcctcaccaacaccgcattactgattactgcaaac

SEQ ID NO: 22194 - DNA, 511 bp, Homo sapiens; identical to SEQ ID NO: 6106
  chr2:21022197-21022708
  hyper

SEQ ID NO: 22195 - DNA, 237 bp, Homo sapiens; identical to SEQ ID NO: 10501
  chr2:225906168-225906405
  binary

SEQ ID NO: 22196 - DNA, 210 bp, Homo sapiens
  chr2:227700369-227700579
  hyper
cgtccgttgggtaggcggccgcgacccgctcgctgcttctcccctagtcttcgggtcccttgaacgcaggtcgcttgtttgccttacgcgtagtcagcggccagtggctatttatggcagtaaggaatattatccacatttcacatggagcttagaggacagggcgagggtccacactctccttactgcgctctgccgcggtcctgcccc

SEQ ID NO: 22197 - DNA, 337 bp, Homo sapiens; identical to SEQ ID NO: 13819
  chr2:227841945-227842282
  hypo

SEQ ID NO: 22198 - DNA, 131 bp, Homo sapiens; identical to SEQ ID NO: 8321
  chr2:231676894-231677025
  hypo

SEQ ID NO: 22199 - DNA, 157 bp, Homo sapiens; identical to SEQ ID NO: 13821
  chr2:231902837-231902994
  hyper

SEQ ID NO: 22200 - DNA, 121 bp, Homo sapiens; identical to SEQ ID NO: 15821
  chr2:240167455-240167576
  hypo

SEQ ID NO: 22201 - DNA, 310 bp, Homo sapiens; identical to SEQ ID NO: 15822
  chr2:240167605-240167915
  hypo

SEQ ID NO: 22202 - DNA, 80 bp, Homo sapiens; identical to SEQ ID NO: 15825
  chr2:240319796-240319876
  hypo

SEQ ID NO: 22203 - DNA, 209 bp, Homo sapiens; identical to SEQ ID NO: 10512
  chr2:241157300-241157509
  hypo

SEQ ID NO: 22204 - DNA, 116 bp, Homo sapiens
  chr2:241262542-241262658
  hypo
cgggagacgaaatgacggggcatccaataagccccaagtcggcccgcccctccctaccggagggcagtggaggccccgccgggagtccaggctccgccaccgccatcagacccgac

SEQ ID NO: 22205 - DNA, 196 bp, Homo sapiens
  chr2:241989264-241989460
  hypo
cttcaacggaggctcctgcgatgcccatgacgactcctacacctgcgagtgcccgcgcgggttccacggcaagcactgcgagaaaggtatggcgggcaggggcgtccgggccggcgtcagcaccctggagagcgcccgcggtccgccgtcctgcttctctgctgtctctctccttgtttcgcgaattgctgacctc

SEQ ID NO: 22206 - DNA, 463 bp, Homo sapiens; identical to SEQ ID NO: 7200
  chr2:242004407-242004870
  hypo

SEQ ID NO: 22207 - DNA, 47 bp, Homo sapiens; identical to SEQ ID NO: 11478
  chr2:242554503-242554550
  hypo

SEQ ID NO: 22208 - DNA, 54 bp, Homo sapiens; identical to SEQ ID NO: 11479
  chr2:242554624-242554678
  hypo

SEQ ID NO: 22209 - DNA, 225 bp, Homo sapiens
  chr2:242599560-242599785
  hypo
cgccactgcactccagcctggccacagagcgagaatccgtcccccgccccccaaaaaaaagacctcattcagagccacagccgtaactgcgcacagattcacagtgggagtgggtcctgccctgtgactgtgggtgtgccaggtcaccacacaggtgtgtgctgggtcacagacacgccccttccctgcctctccattctgtttcttcatcgtctggccatcctc

SEQ ID NO: 22210 - DNA, 69 bp, Homo sapiens
  chr2:242766046-242766115
  hypo
cgacgttctctttgtctgactttctgctcctgccgcgtgcgcagaggggcgaggaggaagcatttgcgc

SEQ ID NO: 22211 - DNA, 275 bp, Homo sapiens
  chr2:242766213-242766488
  hypo
gatgtggagatcaaggcccggcaagtcctctgttgttgacggttctcaggtggtagaaacgatctcgcagcgcacctgcgtggcttccgaaaccgttgtctcaagcgtgttccacttgatgtgattaaaaaagttctcgtggccccaagcacctgctttacctgctcagaccagagtgtcgttccgtcccattcattccgcagctttccccgaacgcacacaagtgaaatgtaaatgtcagtgtgtgtgtatctatctcccgtttctcccaaagc

SEQ ID NO: 22212 - DNA, 212 bp, Homo sapiens; identical to SEQ ID NO: 15831
  chr2:242933459-242933671
  hypo

SEQ ID NO: 22213 - DNA, 225 bp, Homo sapiens; identical to SEQ ID NO: 15834
  chr2:28065720-28065945
  hypo

SEQ ID NO: 22214 - DNA, 52 bp, Homo sapiens; identical to SEQ ID NO: 12617
  chr2:29033285-29033337
  binary

SEQ ID NO: 22215 - DNA, 77 bp, Homo sapiens; identical to SEQ ID NO: 7211
  chr2:42720186-42720263
  hyper

SEQ ID NO: 22216 - DNA, 64 bp, Homo sapiens; identical to SEQ ID NO: 7212
  chr2:43019535-43019599
  hyper

SEQ ID NO: 22217 - DNA, 70 bp, Homo sapiens; identical to SEQ ID NO: 14882
  chr2:43020503-43020573
  hyper

SEQ ID NO: 22218 - DNA, 368 bp, Homo sapiens
  chr2:43864730-43865098
  hyper
gatgtcgccgggagaggtgggcagggggcggtggccggcggtccctcgcgcccgtgggctcccgtgacgttctgtttggaaacactgggcccgggcttctggcgcggcgcgagcggtcccgggggcgcagcggggcagcccagggtccccgagccgagggacccgcgcggtcagggatgccgcgctcgccttaggcttcgggagatccaccaggatctccggggcgaaactttaaactcaaaactttaaagaagcattttgtacacctcgagttgctggcacgtcaaagcaccctaaggtgacctacccggaaaccactgtccccgaagttagtggggcactttttaaaggacaacactttttacccg

SEQ ID NO: 22219 - DNA, 183 bp, Homo sapiens
  chr2:50573865-50574048
  hyper
tgcaataggcactgaatgatgcttgctgctgccatggaaatggtggatgtggtgcgctcccaaactggatgccccccacgccactcctaggaggccgctgagggtgagcgggactatccaaagcagggccaggcgcccccctgcgccgccgccgccgccgccgccgccgccgcccccgggcga

SEQ ID NO: 22220 - DNA, 213 bp, Homo sapiens
  chr2:67624288-67624501
  hyper
cgcggacctgactactacccgaacaacccccaccagtctggaggattttgagcctagacactcctccagagcaggctcctgtcccggctgcggaagtgcgcgcgccctcggcaccttaacagttccgcccctctcccggacccagccaatcagcggccgcctcttgcgcgcgccccaccgaccaaaatggcggctgccgttggtgcggggtgc

SEQ ID NO: 22221 - DNA, 163 bp, Homo sapiens
  chr2:68486689-68486852
  hypo
cgtttgcatgtcctttacttctgttgtttccacgagaagaaaatactctgaacattgcgctattgtttttgagcaagcctgttctctcttttgcctgactctggacactgcataattgtttaatggcgtaaatggaatagcttaattctaaaagatccttggc

SEQ ID NO: 22222 - DNA, 100 bp, Homo sapiens; identical to SEQ ID NO: 15842
  chr2:80549811-80549911
  hyper

SEQ ID NO: 22223 - DNA, 61 bp, Homo sapiens; identical to SEQ ID NO: 8357
  chr2:85280346-85280407
  hypo

SEQ ID NO: 22224 - DNA, 87 bp, Homo sapiens; identical to SEQ ID NO: 7231
  chr2:88591077-88591164
  hypo

SEQ ID NO: 22225 - DNA, 221 bp, Homo sapiens
  chr2:9481652-9481873
  hypo
cgctctgattaatatgcgcggcacgaacagtgttagcggtgttgtcacatgatttcaccacttactttgtgcagggctttttttctcccccaaatcaatagacgtatttcttggttgtgcagttgagtctcctgacaggtttatttttagtctttcacagagacgctgtacaggtgagcagtatttctccacattccttccacagcattgttctcagcaac

SEQ ID NO: 22226 - DNA, 251 bp, Homo sapiens; identical to SEQ ID NO: 10530
  chr2:96192254-96192505
  hyper

SEQ ID NO: 22227 - DNA, 193 bp, Homo sapiens; identical to SEQ ID NO: 10531
  chr2:96192624-96192817
  hyper

SEQ ID NO: 22228 - DNA, 316 bp, Homo sapiens
  chr2:98377004-98377320
  hypo
cgacttgagaagccttccgtctttctagcggttagtggtggtctaccgtacctgtctgagccatcgctgtcaacaggagcgtgtgaaatgccaaggctgctggagaaacctgttttgtttgaagaaactttagcaaagccattcccacctgtaacaatggacgttcaatcaatggaaggcacattaggacagaggtcattccaccaggcctggcgcctggcgtggcaggtctctgaagcaaaggcactgacctgggctcttgtcgtagccagccgtgactgcagcaaaagtggggttgccgttcttgcccgggagc

SEQ ID NO: 22229 - DNA, 206 bp, Homo sapiens; identical to SEQ ID NO: 6114
  chr20:21080357-21080563
  hyper

SEQ ID NO: 22230 - DNA, 185 bp, Homo sapiens; identical to SEQ ID NO: 9536
  chr20:21086682-21086867
  hyper

SEQ ID NO: 22231 - DNA, 205 bp, Homo sapiens
  chr20:25065526-25065731
  hyper
atctgtcttcatcagccaggattacccgggatttaactaatgaataaaggttcctcagctcattattttctaaggaagatttccagcccctctgtcgccgaccgcgaatgtgccttggcagcgccaggctgaggttggacctgctgtgagtggctcagcaggcacccctcttgggcttctcagagccgcggctggccaggctggc

SEQ ID NO: 22232 - DNA, 68 bp, Homo sapiens; identical to SEQ ID NO: 9542
  chr20:3052452-3052520
  hyper

SEQ ID NO: 22233 - DNA, 62 bp, Homo sapiens; identical to SEQ ID NO: 6121
  chr20:30639044-30639106
  hyper

SEQ ID NO: 22234 - DNA, 139 bp, Homo sapiens; identical to SEQ ID NO: 6122
  chr20:30639494-30639633
  hyper

SEQ ID NO: 22235 - DNA, 270 bp, Homo sapiens
  chr20:30772699-30772969
  hypo
cgttaaccacgccgcacattttcccatccagtgccttcgctcatgttgttcgctctgccaggaattcccttctctggctccactttccaaactactgcctattctttaacacccagctcgtgacccaacttcagagaagtctccgccctctggtcccacatcatcacatacctggtgaactataagccacgttgaacacagttgggttttgtctccttggatgaccgttggataccagttacacctcttgccccggtgtaattattagtc

SEQ ID NO: 22236 - DNA, 436 bp, Homo sapiens; identical to SEQ ID NO: 15857
  chr20:35443740-35444176
  hypo

SEQ ID NO: 22237 - DNA, 381 bp, Homo sapiens; identical to SEQ ID NO: 15858
  chr20:35444205-35444586
  hypo

SEQ ID NO: 22238 - DNA, 161 bp, Homo sapiens; identical to SEQ ID NO: 7242
  chr20:36802873-36803034
  hypo

SEQ ID NO: 22239 - DNA, 63 bp, Homo sapiens; identical to SEQ ID NO: 9555
  chr20:44602364-44602427
  hypo

SEQ ID NO: 22240 - DNA, 455 bp, Homo sapiens; identical to SEQ ID NO: 13887
  chr20:46234984-46235439
  hypo

SEQ ID NO: 22241 - DNA, 93 bp, Homo sapiens; identical to SEQ ID NO: 8386
  chr20:46823583-46823676
  hypo

SEQ ID NO: 22242 - DNA, 50 bp, Homo sapiens; identical to SEQ ID NO: 15865
  chr20:47766299-47766349
  hypo

SEQ ID NO: 22243 - DNA, 75 bp, Homo sapiens; identical to SEQ ID NO: 20497
  chr20:48350342-48350417
  hypo

SEQ ID NO: 22244 - DNA, 165 bp, Homo sapiens; identical to SEQ ID NO: 15867
  chr20:48771177-48771342
  binary

SEQ ID NO: 22245 - DNA, 316 bp, Homo sapiens; identical to SEQ ID NO: 8390
  chr20:50158039-50158355
  hyper

SEQ ID NO: 22246 - DNA, 297 bp, Homo sapiens; identical to SEQ ID NO: 8392
  chr20:50722302-50722599
  hyper

SEQ ID NO: 22247 - DNA, 148 bp, Homo sapiens
  chr20:54578794-54578942
  hyper
acccaggcatatttgggaaggcgagtgctttacatgattccccatttcccaatcggaccagcttagcctgggcaggcagcctcgtgctgaggtgcctggagaccgcccaccccctaggtgctcgcttccccccgggtctgacctgatc

SEQ ID NO: 22248 - DNA, 136 bp, Homo sapiens; identical to SEQ ID NO: 10558
  chr20:55206463-55206599
  binary

SEQ ID NO: 22249 - DNA, 95 bp, Homo sapiens; identical to SEQ ID NO: 10559
  chr20:55206774-55206869
  binary

SEQ ID NO: 22250 - DNA, 91 bp, Homo sapiens; identical to SEQ ID NO: 9560
  chr20:56772299-56772390
  hypo

SEQ ID NO: 22251 - DNA, 307 bp, Homo sapiens; identical to SEQ ID NO: 9562
  chr20:56941603-56941910
  hypo

SEQ ID NO: 22252 - DNA, 174 bp, Homo sapiens
  chr20:57090173-57090347
  hyper
gatgcgctccttgcgtcaaagcgcacccctagccaggccgttccctggaagggcaagcggggcggggagttcctctaagccccgccagtcctgggacccctgaagtttctattcaggtcttccagctactcctggaaaagtcgcgtcaacttggatcccagcaaacccagaagc

SEQ ID NO: 22253 - DNA, 113 bp, Homo sapiens; identical to SEQ ID NO: 8396
  chr20:57225466-57225579
  binary

SEQ ID NO: 22254 - DNA, 150 bp, Homo sapiens
  chr20:61314706-61314856
  hypo
ctggaggtggcgaggacgggcttttccatcactctcggtgggggcacctgctccaggggcagctccatgggcgcttggcgggacggaagctgcgggaatagttgatgttgaggttgacggcgacagtgaggactgcaagaatacagtcac

SEQ ID NO: 22255 - DNA, 31 bp, Homo sapiens; identical to SEQ ID NO: 15883
  chr20:61991069-61991100
  hypo

SEQ ID NO: 22256 - DNA, 379 bp, Homo sapiens
  chr20:62384600-62384979
  binary
cgtggtgtccgatcagacgcctccctggaggcagagaagaaacaaacactgtggagtaatacggacccaaaagtgtgcaggcgaaatgggagatgtgggtgcaactcaaagtcctgggctcttcttgctggacgccggagaagcagccagacccatttaatcaagttcttttcccccaaccctgagacccaacgtcactcagtggcaggaactccacaccaccatctccatggtgcgtgccctggggccaggctcaaaaacctgggggaccctcagcacgcccagtgccgttatgctactcaggcccagataccagcacgtcagacctgggcatgggccactgagagagcccggagcagccacgtccacgggaccctac

SEQ ID NO: 22257 - DNA, 204 bp, Homo sapiens
  chr20:62868769-62868973
  hypo
ggctctttgcccacccaacccaaacattcgtcttggggacagtgaggcatccgtcggcactcatcaaggttgctgtcagggctgagctgacggacagcgcagtggctggcacacaggcacacttaggacgtgctggccgctcacaatgcggagtccgtgaagtcacactgtgagtgccagtgggccgccggagctggttgtccc

SEQ ID NO: 22258 - DNA, 56 bp, Homo sapiens
  chr20:688354-688410
  hypo
ctgggcattgccgaacacgcgtcctttttttcttttcttctttcattattatgatc

SEQ ID NO: 22259 - DNA, 55 bp, Homo sapiens; identical to SEQ ID NO: 15892
  chr21:30294975-30295030
  hypo

SEQ ID NO: 22260 - DNA, 466 bp, Homo sapiens
  chr21:30374936-30375402
  hyper
cgccccaaagcagcatctggctggcctgcgagatgcccactggggaggcgagtccgcagcttaggactcaagcccggggtcggaagctattgccgaaatccgaaacgcagcgctcgcagctgcagtgacgcgacctgctcataagtccccgtgctcacagcatcccggcaacttacgagctagtgcttccgggtcaccccggcccaggaaggcgcacgcgcgaagcatagcgagcttcactccgcactcttaggctgcgtgtgaggcctgcgagtgctcgggagctgccgcggtcacaagagaaagcctagctgtcaatgacagccccagagcatctgggcgccttgcgatacccgggtgtctgtaggcagccaggagacacttccaagctgatctggaatctttcctcgcccagctctgtccctcgcagggatggcaaaggacattacgacctacatcccttccc

SEQ ID NO: 22261 - DNA, 176 bp, Homo sapiens
  chr21:36437239-36437415
  hypo
cgggtccaggcgaactcgctgtggtattgttcttctctgctcggtttccaaaggagagcccaggcgcgttaattgctgggtggcagctacactaaatgcaagtggacgacagctgggtgccgggctcgctctgcaagagaaggtttgggtttccattgtagtccgcatcataatcc

SEQ ID NO: 22262 - DNA, 174 bp, Homo sapiens; identical to SEQ ID NO: 15895
  chr21:38176483-38176657
  hypo

SEQ ID NO: 22263 - DNA, 211 bp, Homo sapiens; identical to SEQ ID NO: 7268
  chr21:38592864-38593075
  hyper

SEQ ID NO: 22264 - DNA, 259 bp, Homo sapiens; identical to SEQ ID NO: 7269
  chr21:38593104-38593363
  hyper

SEQ ID NO: 22265 - DNA, 38 bp, Homo sapiens; identical to SEQ ID NO: 7270
  chr21:38593729-38593767
  hyper

SEQ ID NO: 22266 - DNA, 79 bp, Homo sapiens; identical to SEQ ID NO: 9587
  chr21:38918381-38918460
  hypo

SEQ ID NO: 22267 - DNA, 169 bp, Homo sapiens; identical to SEQ ID NO: 9588
  chr21:38918561-38918730
  hypo

SEQ ID NO: 22268 - DNA, 141 bp, Homo sapiens
  chr21:38936049-38936190
  hyper
cgggggccgcgagccgccggcgtaggccgctccagctggaagaccccaccgctagggttccagggggctgcggacgcttccgaggggcccaaggcgaaagaacgcagcccgcttgtcggccacgtgaccgtccccgtccgc

SEQ ID NO: 22269 - DNA, 144 bp, Homo sapiens
  chr21:38936266-38936410
  hyper
ccccgggcttcggggggcggtgctgctgcggttgccatggcgtcttccgagcgcgcaggcgtgggcccagagtagcttttcgggtatttgctaccggctctcggtagggctggtcacctttgcttgctgagcttcgcgccctgc

SEQ ID NO: 22270 - DNA, 820 bp, Homo sapiens; identical to SEQ ID NO: 14927
  chr21:42879240-42880060
  hyper

SEQ ID NO: 22271 - DNA, 41 bp, Homo sapiens; identical to SEQ ID NO: 14928
  chr21:42880104-42880145
  hyper

SEQ ID NO: 22272 - DNA, 396 bp, Homo sapiens; identical to SEQ ID NO: 15904
  chr21:43547667-43548063
  hypo

SEQ ID NO: 22273 - DNA, 240 bp, Homo sapiens; identical to SEQ ID NO: 15905
  chr21:43991061-43991301
  hypo

SEQ ID NO: 22274 - DNA, 205 bp, Homo sapiens; identical to SEQ ID NO: 15906
  chr21:43991493-43991698
  hypo

SEQ ID NO: 22275 - DNA, 209 bp, Homo sapiens; identical to SEQ ID NO: 15908
  chr21:44444714-44444923
  hypo

SEQ ID NO: 22276 - DNA, 217 bp, Homo sapiens
  chr21:46351437-46351654
  binary
ggaaattcattatgggaatgtgcgcgttgtggagatgctcagaccgcgaacagtactgcgggaacccaaacgatcatttttaaccccagacgtccctgaaccaaagccaaagtctacaggtcactggggcagaggccgcccgaaaccagctgtcccctcccggcctaggcgcgccaggtccccgcccagccggggcgatcctttggtcggacagtga

SEQ ID NO: 22277 - DNA, 395 bp, Homo sapiens; identical to SEQ ID NO: 8431
  chr21:46352279-46352674
  binary

SEQ ID NO: 22278 - DNA, 384 bp, Homo sapiens; identical to SEQ ID NO: 7300
  chr21:47602705-47603089
  hypo

SEQ ID NO: 22279 - DNA, 406 bp, Homo sapiens
  chr22:19830509-19830915
  hypo
cgtttggcgattcggagtcaaaggcgcacttcatagctcctttccaaatcccgtgcattgtcaggccctgttcccctttgaagcctcgctgagtgattgaagcgtctactttctgaggggcagatagcaccgggctggtaatctgactctaagccacgggataaaggtagtttgtttcctctcagcccgtctgtcaacacctcctcagtaattagccctaattattacagagggccagcctcccattcggttattaaatcagaaatagtatcacggctgggcatctgtcaacgccccgactggcgaccttcgattcattgaatcctctgtcagtatccgcctttggaagcgcccaggcgggcagggaggcagcggcttcaaagatgcagatcccaggaagaattcc

SEQ ID NO: 22280 - DNA, 201 bp, Homo sapiens; identical to SEQ ID NO: 8436
  chr22:21977477-21977678
  hypo

SEQ ID NO: 22281 - DNA, 134 bp, Homo sapiens; identical to SEQ ID NO: 14934
  chr22:22899978-22900112
  hypo

SEQ ID NO: 22282 - DNA, 187 bp, Homo sapiens; identical to SEQ ID NO: 18744
  chr22:24552924-24553111
  binary

SEQ ID NO: 22283 - DNA, 97 bp, Homo sapiens; identical to SEQ ID NO: 8441
  chr22:27053098-27053195
  hyper

SEQ ID NO: 22284 - DNA, 268 bp, Homo sapiens; identical to SEQ ID NO: 8442
  chr22:27053250-27053518
  hyper

SEQ ID NO: 22285 - DNA, 230 bp, Homo sapiens; identical to SEQ ID NO: 12703
  chr22:27054028-27054258
  hyper

SEQ ID NO: 22286 - DNA, 300 bp, Homo sapiens; identical to SEQ ID NO: 21233
  chr22:27068622-27068922
  binary

SEQ ID NO: 22287 - DNA, 791 bp, Homo sapiens
  chr22:34316250-34317041
  binary
cgagccaggggcgccccgcatgggcaggggcctgggtcagcctcgggttgggtccagggagcgaccgccggggccgactccacctcccgcgctccaagccgattcgtcccttcagggcagggcctgcccgcgaacagcccggcgagacgagcgcggccgcgcccccagcttcgggcgcccgggctccggcgcggcggcggggcaggagcagactggccgggccgggcgccgaacgcggcggcgcggggggggctgcaaccggccgcggcgcgctctcccccagggcctgcgccgcccgcccgcggctccgcgggaaagaagcgccggaaaaggcctcgccccggcctggggcgcggggccgggggcgcggggctaggggaggcgccccgggaaggtcacgggagcggaggcgcggcgagtggatcgcggcgcggtgggtgcggggagccgaggcgggcggcccccgccgccgggagcgctcgccggccttggccgccgccgccgcctccgagatgcgccggcttcccggagcgcccggcgctcggagctgggcggccgctgcagccgccgcgggcagccgggcgccgctggccggagccggcgcgcgatccccgcctcccgcgcccggccaggagtgggccgccgcgcgggaaccggcaggggcgggcgctggggtccgggctccgggctggccccgccgcctccgcgtgcccagagcgccggactcgctcagcagctgcagtgactgtgtgtctgtgtcatgtctgtgcagccgggggggaccgcgagcc

SEQ ID NO: 22288 - DNA, 123 bp, Homo sapiens
  chr22:45581821-45581944
  hypo
cgcgtgtgtgttctgatcttcagtgcgtagcacattctccatttagaaaagagtggtcagaataattgtggacggtacagtggctttttaaaactacagtctttaggtgtaaggtttggcgcc

SEQ ID NO: 22289 - DNA, 61 bp, Homo sapiens
  chr22:47441113-47441174
  hypo
cgtggcacctggctgcacacgcggctgtgtgttcactgtccctcggactctgcgggaaaac

SEQ ID NO: 22290 - DNA, 99 bp, Homo sapiens; identical to SEQ ID NO: 15930
  chr22:47441200-47441299
  hypo

SEQ ID NO: 22291 - DNA, 398 bp, Homo sapiens; identical to SEQ ID NO: 20542
  chr22:47534595-47534993
  hypo

SEQ ID NO: 22292 - DNA, 434 bp, Homo sapiens
  chr3:100120034-100120468
  hyper
cgggttaagggaaagcgtgggtgtgagtaggagtcttcggaaaccctttttctttcttttcgccccgctgctgttcgggagatggacttctggagtccccgtcgtagctggtgttgtcccctctaccttcaggaaagaagggcagatggccctcttgcctactgaagccgaggaggggcgcgtatacagcgggctaagggcgctcaagagatccgagtggaagaaaaagcagcggcacagcactggaatgggcgggagtggcagaagagttgtgaaggctattggctagcaagggtggtgggcggggcgtagaccgagctacccagtttactggtcgatttcggatccagttttccagttatagccacgttggcacctcttgaacctctgtggccgttagcacggttttctgcccgcgtgcccgagaaaccaac

SEQ ID NO: 22293 - DNA, 413 bp, Homo sapiens; identical to SEQ ID NO: 8479
  chr3:10206343-10206756
  hyper

SEQ ID NO: 22294 - DNA, 79 bp, Homo sapiens; identical to SEQ ID NO: 20548
  chr3:12605281-12605360
  hypo

SEQ ID NO: 22295 - DNA, 289 bp, Homo sapiens; identical to SEQ ID NO: 8483
  chr3:127794860-127795149
  hyper

SEQ ID NO: 22296 - DNA, 44 bp, Homo sapiens; identical to SEQ ID NO: 8484
  chr3:127795229-127795273
  hyper

SEQ ID NO: 22297 - DNA, 334 bp, Homo sapiens; identical to SEQ ID NO: 7330
  chr3:128216313-128216647
  hyper

SEQ ID NO: 22298 - DNA, 378 bp, Homo sapiens; identical to SEQ ID NO: 7331
  chr3:128216713-128217091
  hyper

SEQ ID NO: 22299 - DNA, 49 bp, Homo sapiens; identical to SEQ ID NO: 6138
  chr3:129694299-129694348
  hyper

SEQ ID NO: 22300 - DNA, 271 bp, Homo sapiens; identical to SEQ ID NO: 7335
  chr3:13611739-13612010
  hypo

SEQ ID NO: 22301 - DNA, 186 bp, Homo sapiens; identical to SEQ ID NO: 7336
  chr3:13612341-13612527
  hypo

SEQ ID NO: 22302 - DNA, 192 bp, Homo sapiens; identical to SEQ ID NO: 9660
  chr3:137480764-137480956
  hyper

SEQ ID NO: 22303 - DNA, 33 bp, Homo sapiens; identical to SEQ ID NO: 15934
  chr3:141664320-141664353
  hypo

SEQ ID NO: 22304 - DNA, 185 bp, Homo sapiens
  chr3:141868994-141869179
  hypo
cgcggaaactgcacacaccccaaatacccgtacacttggttccatatgaaaagattttgttcattcgttcgtgccgaagttaaaaaccccgtgtgaacagcgcattaaaacgattagatctttctcattttactccagtcaaatcttatagatcttctatatgccactttgtttgtttttgagac

SEQ ID NO: 22305 - DNA, 130 bp, Homo sapiens
  chr3:147075091-147075221
  hyper
ttgccatcggatttgtcctcggcaaatgtctcaccaagctgtagatggatgaatggatagatacatgataggtagatcgatcgatagatagttagagaggtagacagacggatagatccccgaagcttgc

SEQ ID NO: 22306 - DNA, 380 bp, Homo sapiens; identical to SEQ ID NO: 14978
  chr3:147086665-147087045
  hyper

SEQ ID NO: 22307 - DNA, 61 bp, Homo sapiens; identical to SEQ ID NO: 19655
  chr3:147088567-147088628
  hyper

SEQ ID NO: 22308 - DNA, 100 bp, Homo sapiens; identical to SEQ ID NO: 19656
  chr3:147088653-147088753
  hyper

SEQ ID NO: 22309 - DNA, 97 bp, Homo sapiens
  chr3:147111702-147111799
  hyper
gccttcaaagccaggccccggattcaggtcagggagaatctcagctcctgagaaatttgctcctgtttgccgcttctgctactcgaggaaatgaaac

SEQ ID NO: 22310 - DNA, 347 bp, Homo sapiens; identical to SEQ ID NO: 8495
  chr3:147138422-147138769
  hyper

SEQ ID NO: 22311 - DNA, 106 bp, Homo sapiens
  chr3:149360184-149360290
  hypo
cgacaagcaaaactctgtcacacacacacacacacacacacgaaagtacgaatacccaaatataagttggatgatataattttgtaagagaaatccggccgggcac

SEQ ID NO: 22312 - DNA, 84 bp, Homo sapiens; identical to SEQ ID NO: 15938
  chr3:153840393-153840477
  hyper

SEQ ID NO: 22313 - DNA, 64 bp, Homo sapiens; identical to SEQ ID NO: 6142
  chr3:154797121-154797185
  hyper

SEQ ID NO: 22314 - DNA, 121 bp, Homo sapiens; identical to SEQ ID NO: 6143
  chr3:154797214-154797335
  hyper

SEQ ID NO: 22315 - DNA, 52 bp, Homo sapiens
  chr3:156396583-156396635
  hypo
cggacaatgaaagttttacgatttgaacaattcatatgtcagttcaacgtgc

SEQ ID NO: 22316 - DNA, 185 bp, Homo sapiens
  chr3:157260928-157261113
  hyper
cgaggcggggtgggggaggtcgtgtcccagggttctgacagtggagccaggacgtccgggagctgacaatctaaacgcgacctgggaaggggcggtagcgggagtggctgcttcctgggaggtggtgctcgcaaacctggcagctgactgggtggggcgtgccttccctggcagtcgcggagggg

SEQ ID NO: 22317 - DNA, 31 bp, Homo sapiens
  chr3:157828149-157828180
  hyper
cgtgcgcagtgtcaccgtgcgcatgcgtccc

SEQ ID NO: 22318 - DNA, 173 bp, Homo sapiens
  chr3:158289012-158289185
  hyper
ctcttgtcgcggccgcggcgagttaacatcgtttttccaatctgtccgcggctgccgccacccaagacagagccagaatgttcaggatgctgaacagcagttttgaggatgaccccttcttctcgtgagttacgggagccaggagtccggggtcgcgcgggaattaaggtatc

SEQ ID NO: 22319 - DNA, 370 bp, Homo sapiens; identical to SEQ ID NO: 8498
  chr3:16553609-16553979
  hyper

SEQ ID NO: 22320 - DNA, 78 bp, Homo sapiens; identical to SEQ ID NO: 9673
  chr3:16555426-16555504
  binary

SEQ ID NO: 22321 - DNA, 228 bp, Homo sapiens
  chr3:169482182-169482410
  hyper
cggaagacgggagaacccacgcaggaacggctccaggcaaccccggctcactgcccattcattttggccgactttggaggtgccttcacgtctcctgccaatttgcagcacactggcccagtcagtcaggtttgggggttcacaagcccccattgccggcgaggggtgacggatgcgcacgatcggcgttccccccaccaacaggaaagcgaactgcatgtgtgagcc

SEQ ID NO: 22322 - DNA, 242 bp, Homo sapiens
  chr3:169482439-169482681
  binary
ggaatcgcgccgcgcgcggggactcgctccgttcctcttcctgcggcctgaaaggcctgaacctcgccctcgcccccgagagacccgcggctgacagagcccaactcttcgcggtggcagtgggtgcctccggagaagccccgggccgaccgcggcctccaggcggggttcgggggctgggcaggcgacccgccgcaggtccccgggaggggcgaacgggccagcagctgacattttttgtt

SEQ ID NO: 22323 - DNA, 54 bp, Homo sapiens; identical to SEQ ID NO: 7349
  chr3:169540679-169540733
  hypo

SEQ ID NO: 22324 - DNA, 283 bp, Homo sapiens; identical to SEQ ID NO: 5816
  chr3:170626174-170626457
  binary

SEQ ID NO: 22325 - DNA, 508 bp, Homo sapiens; identical to SEQ ID NO: 5817
  chr3:170626710-170627218
  binary

SEQ ID NO: 22326 - DNA, 97 bp, Homo sapiens; identical to SEQ ID NO: 9679
  chr3:179377859-179377956
  hypo

SEQ ID NO: 22327 - DNA, 135 bp, Homo sapiens; identical to SEQ ID NO: 9681
  chr3:180319921-180320056
  hyper

SEQ ID NO: 22328 - DNA, 170 bp, Homo sapiens; identical to SEQ ID NO: 9682
  chr3:180320087-180320257
  hyper

SEQ ID NO: 22329 - DNA, 98 bp, Homo sapiens; identical to SEQ ID NO: 9683
  chr3:180320294-180320392
  hyper

SEQ ID NO: 22330 - DNA, 207 bp, Homo sapiens; identical to SEQ ID NO: 5818
  chr3:180397104-180397311
  binary

SEQ ID NO: 22331 - DNA, 337 bp, Homo sapiens; identical to SEQ ID NO: 16854
  chr3:181429718-181430055
  hyper

SEQ ID NO: 22332 - DNA, 37 bp, Homo sapiens; identical to SEQ ID NO: 12747
  chr3:181430331-181430368
  binary

SEQ ID NO: 22333 - DNA, 253 bp, Homo sapiens; identical to SEQ ID NO: 12748
  chr3:181430443-181430696
  binary

SEQ ID NO: 22334 - DNA, 217 bp, Homo sapiens; identical to SEQ ID NO: 15940
  chr3:183217407-183217624
  hypo

SEQ ID NO: 22335 - DNA, 133 bp, Homo sapiens
  chr3:186079331-186079464
  binary
aaaagcatctcctgcttctcggactgcctggagcgcgaactggatatcaaggagccaaggttaagtccagaagaagaaggaaatccgaccagttgctttagcaaactgcctggagcaaggccgcctcccaccc

SEQ ID NO: 22336 - DNA, 334 bp, Homo sapiens; identical to SEQ ID NO: 6585
  chr3:187443068-187443402
  hypo

SEQ ID NO: 22337 - DNA, 46 bp, Homo sapiens; identical to SEQ ID NO: 7356
  chr3:187455297-187455343
  binary

SEQ ID NO: 22338 - DNA, 447 bp, Homo sapiens; identical to SEQ ID NO: 7357
  chr3:187456666-187457113
  binary

SEQ ID NO: 22339 - DNA, 509 bp, Homo sapiens; identical to SEQ ID NO: 7358
  chr3:187457654-187458163
  hyper

SEQ ID NO: 22340 - DNA, 90 bp, Homo sapiens
  chr3:19190216-19190306
  hyper
ggttatgaaaggattactggcgccgcaaaacaccttcctggacaccatcgccacccgttttgacggaacacgtaagtcttacacttgaac

SEQ ID NO: 22341 - DNA, 346 bp, Homo sapiens
  chr3:193455077-193455423
  hypo
cgcgctgttggcaggaatgtttctttcctgggtgtcaatacaagcccagggtcatttttcagcatttgccaatcgctgtaattgcacaggcccgagtggctctccagagaattcctgccgttcctcattctctcctcctggactgtgctctatagatgcaccccaggccatggatcatgtttttcacataacccgttaattactaaagaaaacaacccagctttcaacctgattagcccagattaatggccagcagcgggtttcacgcgcctgcacaatttatcactgaaaagaactgtgtctttaatgatttagctacctggccgggcagggcttactccaggcc

SEQ ID NO: 22342 - DNA, 112 bp, Homo sapiens; identical to SEQ ID NO: 8507
  chr3:193775965-193776077
  hyper

SEQ ID NO: 22343 - DNA, 74 bp, Homo sapiens
  chr3:193903180-193903254
  hypo
cgctgaggcgcgatgaatgagcaaccagccctttccctgcctcttgccccagagatggcactgcaggcggtacc

SEQ ID NO: 22344 - DNA, 296 bp, Homo sapiens; identical to SEQ ID NO: 20559
  chr3:193969977-193970273
  hypo

SEQ ID NO: 22345 - DNA, 110 bp, Homo sapiens
  chr3:2139600-2139710
  hyper
cggttaccccgaggtgtggagttgcggcgaagggagccacttctgcaaggaaacagtagattcataatgtagaatgaccgtggcaacgtcgttcaaagcacattctttcg

SEQ ID NO: 22346 - DNA, 55 bp, Homo sapiens
  chr3:2141396-2141451
  hyper
ctggggggtttccagtttctttcgagaggcaagacaaccgccccgtcccctcccc

SEQ ID NO: 22347 - DNA, 244 bp, Homo sapiens
  chr3:2141539-2141783
  hyper
cgtgcattttctctcttgtgcttcgtgtatatgttttactatttatgaagggtgtggaggtgagggtaggaggacgtgggctcctgaatccctctgaaccagccagagagtcggctgcatggaaacatttcgcagcgaagctcctgcgaggaggcggcttcgcgcgtcgggaagatcaggcggttgcttgctggccagggtctgcagattcggtgcgaagaagctggcggaggttgtgtagggc

SEQ ID NO: 22348 - DNA, 64 bp, Homo sapiens; identical to SEQ ID NO: 6153
  chr3:35681641-35681705
  hyper

SEQ ID NO: 22349 - DNA, 1420 bp, Homo sapiens
  chr3:37033979-37035399
  binary
cgcggataaagaccaggaggtagttctcataggccacaaaagcctggtcgtccaaggcaagagaataggctttaaagtccctggctcggttaaaaagctggttgcgtagattcctgtcaatgctcaggatcctctgccttgtgatatctggagataagtcaacgccttgcaggacgcttacatgctcgggcagtacctctctcagcaacacctccatgcactggtatacaaagtccccctcaccccagccgcgacccttcaaggccaagaggcggcagagcccgaggcctgcacgagcagctctctcttcaggagtgaaggaggccacgggcaagtcgccctgacgcagacgctccaccagggccgcgcgctcgccgtccgccacataccgctcgtagtattcgtgctcagcctcgtagtggcgcctgacgtcgcgttcgcgggtagctacgatgaggcggcgacagaccaggcacagggccccatcgccctccggaggctccaccaccaaataacgctgggtccactcgggccggaaaactagagcctcgtcgacttccatcttgcttcttttgggcgtcatccacattctgcgggaggccacaagagcagggccaacgttagaaaggccgcaaggggagaggaggagcctgagaagcgccaagcacctcctccgctctgcgccagatcacctcagcagaggcacacaagcccggttccggcatctctgctcctattggctggatatttcgtattccccgagctcctaaaaacgaaccaataggaagagcggacagcgatctctaacgcgcaagcgcatatccttctaggtagcgggcagtagccgcttcagggagggacgaagagacccagcaacccacagagttgagaaatttgactggcattcaagctgtccaatcaatagctgccgctgaagggtggggctggatggcgtaagctacagctgaaggaagaacgtgagcacgaggcactgaggtgattggctgaaggcacttccgttgagcatctagacgtttccttggctcttctggcgccaaaatgtcgttcgtggcaggggttattcggcggctggacgagacagtggtgaaccgcatcgcggcgggggaagttatccagcggccagctaatgctatcaaagagatgattgagaactggtacggagggagtcgagccgggctcacttaagggctacgacttaacgggccgcgtcactcaatggcgcggacacgcctctttgcccgggcagaggcatgtacagcgcatgcccacaacggcggaggccgccgggttccctgacgtgccagtcaggccttctccttttccgcagaccgtgtgtttctttaccgctctcccccgagaccttttaagggttgtttggagtgtaagtggaggaatatac

SEQ ID NO: 22350 - DNA, 119 bp, Homo sapiens
  chr3:37438337-37438456
  hypo
cgtgcccggccttcaaacttattttattagtcccataaactctaccatccctcctgtttctgtagttgaatccaatgctgttatctgaagccagcgcctcacttttctacggagtctgc

SEQ ID NO: 22351 - DNA, 82 bp, Homo sapiens; identical to SEQ ID NO: 21274
  chr3:3840349-3840431
  hyper

SEQ ID NO: 22352 - DNA, 87 bp, Homo sapiens
  chr3:42947961-42948048
  hyper
gtcttggccctgccctgggttctaggcccggagacggggtggtgcggcggctgggaaatgggggtacaacccagagtgaggggcctc

SEQ ID NO: 22353 - DNA, 156 bp, Homo sapiens; identical to SEQ ID NO: 16874
  chr3:44039193-44039349
  hyper

SEQ ID NO: 22354 - DNA, 71 bp, Homo sapiens; identical to SEQ ID NO: 21277
  chr3:44597031-44597102
  hyper

SEQ ID NO: 22355 - DNA, 550 bp, Homo sapiens
  chr3:44666348-44666898
  hyper
cggtctgaaacagcggccagttcttgttcgatgtaaggaacactagtacccaagggctcaggagttccgcctctcttccccagttctgggaaaagaaacgaaccatagagatgtggcttcctagagatccgggatgaggggcggggtgcaaccggaagtcgcagtattctcggctcggccattattctgtgcctcggctgccggaagggctcgttcctgtgtcatctcctagcggcctggcgccgaggcggcggtacgcaaggctggagccgcagcgggagcccccggtgagcggggtgggctcgggggcgggtgggcgtgcagggaaggcggcccgggacgcgggcctgagcttgctgggactgcacagccctcggtagcctctcccgggccctgacccccggcatggtccgtcgccagcttcgtgttggggttcgacgtcgtggcctcggctgggcaggcagccggcccgagggaagtactgaggacagcagctccgagtctgtgtgtgtttgtggaccggtgctcctgtctaacggactctgctggc

SEQ ID NO: 22356 - DNA, 157 bp, Homo sapiens
  chr3:44771093-44771250
  hyper
tgacgtcacgccggctgggcgcgtccgggacttactcctttccgcagggcagcacccagggacctgagtgttgcaaggtgcgagaggggagcgccgcggggagcgccgcgggaagcgcatggtgagcggtttctgctgtgcccggctgccgcgggtc

SEQ ID NO: 22357 - DNA, 122 bp, Homo sapiens
  chr3:48703720-48703842
  hypo
cggcctgccctgttcttcttagacaaacttgctgggctaaaatctaaccccgttaaaatagactatttacgtattgtttgcctctagcgcagcagaacattgctggagaaaaacaaacaacc

SEQ ID NO: 22358 - DNA, 82 bp, Homo sapiens; identical to SEQ ID NO: 7369
  chr3:50377892-50377974
  hyper

SEQ ID NO: 22359 - DNA, 167 bp, Homo sapiens; identical to SEQ ID NO: 7370
  chr3:50378002-50378169
  hyper

SEQ ID NO: 22360 - DNA, 552 bp, Homo sapiens; identical to SEQ ID NO: 13998
  chr3:52899918-52900470
  hypo

SEQ ID NO: 22361 - DNA, 216 bp, Homo sapiens; identical to SEQ ID NO: 13999
  chr3:52900499-52900715
  hypo

SEQ ID NO: 22362 - DNA, 333 bp, Homo sapiens; identical to SEQ ID NO: 7372
  chr3:53032401-53032734
  hypo

SEQ ID NO: 22363 - DNA, 447 bp, Homo sapiens; identical to SEQ ID NO: 6156
  chr3:62859445-62859892
  hyper

SEQ ID NO: 22364 - DNA, 206 bp, Homo sapiens; identical to SEQ ID NO: 6157
  chr3:62859964-62860170
  hyper

SEQ ID NO: 22365 - DNA, 225 bp, Homo sapiens; identical to SEQ ID NO: 11660
  chr3:62861325-62861550
  hyper

SEQ ID NO: 22366 - DNA, 191 bp, Homo sapiens
  chr3:6902672-6902863
  hyper
cagtggggagggctggcgctgggaagggtggggagagaaggagagccagcgagggagggagggagtgggaggaggaggagagggagccgaacgaccatttaaagcgatagcagtccctgccctctccccagtgctgggctgttggagagagcgagcagcaagccggtgagcgcgagcgcggcgcgccggcc

SEQ ID NO: 22367 - DNA, 41 bp, Homo sapiens
  chr3:6902929-6902970
  hyper
cgcccctccccggattcccccaccctccgtgcctgcaggag

SEQ ID NO: 22368 - DNA, 76 bp, Homo sapiens
  chr3:6903188-6903264
  binary
cgccccgcactcaatccggatcgagggggacgtcaccctcggggggctgttccccgtgcacgccaagggtcccagc

SEQ ID NO: 22369 - DNA, 83 bp, Homo sapiens
  chr3:69937621-69937704
  hypo
cggtgccttaattagccacatgttctttttacctcctgggaaataagtacgggataaaattggggatcaagccgtagacgtac

SEQ ID NO: 22370 - DNA, 45 bp, Homo sapiens
  chr3:72420279-72420324
  hypo
cgcgacaccacgacacgattaatggcattaacagcgccggaggcc

SEQ ID NO: 22371 - DNA, 267 bp, Homo sapiens
  chr3:87841792-87842059
  hyper
ggggcgtccgcccacccgcaggcgccccggacccgcaagggcggcgcaagacttccccagcgcgcagtcagcgtcgcggccccgaaagctggcgacaggcgctgctgtcttcccgccccgtggggtcgcccctgccctcccgcgccccggggctgggggcgccaccttgccagctccgactgctgcagggagcgccaggggtgagtgtgcggatcagcgctgagcccgggagtgcgggtcacgcccgcagctggcgcgcaggtgggg

SEQ ID NO: 22372 - DNA, 113 bp, Homo sapiens; identical to SEQ ID NO: 7378
  chr4:100555198-100555311
  hypo

SEQ ID NO: 22373 - DNA, 1017 bp, Homo sapiens; identical to SEQ ID NO: 15961
  chr4:100573606-100574623
  hypo

SEQ ID NO: 22374 - DNA, 136 bp, Homo sapiens; identical to SEQ ID NO: 15968
  chr4:1336902-1337038
  hypo

SEQ ID NO: 22375 - DNA, 104 bp, Homo sapiens
  chr4:1396923-1397027
  hyper
gggcagccccgtgccaggcccggcccccggtcccggtccgcccccgccgccggtcggagcgctggtgtcggcgcccgggttctgcttcttccacttggttcggc

SEQ ID NO: 22376 - DNA, 109 bp, Homo sapiens
  chr4:1397780-1397889
  hyper
ggcctgtccttccctcccgccgcccgcgtctcctctcggtcccttgcttgtttctttctatggagagggtccccctcgccccgcgctgcccgttctcgcggcgccgggc

SEQ ID NO: 22377 - DNA, 271 bp, Homo sapiens; identical to SEQ ID NO: 10646
  chr4:147560617-147560888
  hyper

SEQ ID NO: 22378 - DNA, 46 bp, Homo sapiens; identical to SEQ ID NO: 10647
  chr4:154143770-154143816
  hyper

SEQ ID NO: 22379 - DNA, 214 bp, Homo sapiens; identical to SEQ ID NO: 10648
  chr4:154144184-154144398
  hyper

SEQ ID NO: 22380 - DNA, 276 bp, Homo sapiens; identical to SEQ ID NO: 15969
  chr4:1541591-1541867
  hypo

SEQ ID NO: 22381 - DNA, 157 bp, Homo sapiens
  chr4:156680543-156680700
  hyper
cgggaaggggaggtgcggcggaggcgtggggtcttcccggctctggccggccccaccagtgtgggaggctgagcgccagcggaagggaaggctccgggttcgcgtccccgcgctgcccccgatgcccagcctctcccggagcggtgacaggtgagga

SEQ ID NO: 22382 - DNA, 217 bp, Homo sapiens
  chr4:156680970-156681187
  hyper
ggtgatccgcaattacggccccgaggtgtgggaagacatcaagtaagtggccggctaccctggctgtggcccaggtcggcgcccagtgtgggaggccccccgcgcctcgcctggtcctcagcctgctggccgggtcgcgggcgcgcatccttggaggtgcctccgcgcctcgctcccggctcgctgcagctgcgctcccacgctccgggactggaac

SEQ ID NO: 22383 - DNA, 507 bp, Homo sapiens
  chr4:1578103-1578610
  hypo
cataaccgtgatttgaggggacagcccagagcaccccacagctgcctgcagcacagcgacgtgtcctgataaaacatccttcccaatttacggggccgcgcttgactaatctgcctccgcgcgcacactgtctaatcatgccatcagcaccgcgagaaggggctcaattgggactccaatgaaaggagattggaaaactaccctcaattgaaattacatttgtaaatgaggcagagttttctgttcagagtgtgaacgttacggtaaatctgctccagaaagtcgaagaggcggcagcggtgggcaggccggggacgccgcaggggcgactgggactgtgccccggctggggccagggtccacattctggagaggtgcccggcaccatgctggcccctggggacagccccaggagaggagaggggctgtggcggaagcccggagagttgggcctagtttgtcagacatcagacttcacttcccactctgtaaaatggggcgcagggc

SEQ ID NO: 22384 - DNA, 156 bp, Homo sapiens; identical to SEQ ID NO: 16904
  chr4:165304258-165304414
  hyper

SEQ ID NO: 22385 - DNA, 678 bp, Homo sapiens
  chr4:169752829-169753507
  hyper
cgctgccctggagtcgcgtttattggacactctttagtctgtaaaggaaaaaaacacaaacaccggaggagaatcatcctaacaagccgacaacatatctatgggcctaaaaaacttaaattctttcccgttattagcacttctcgatcgttccaggaaagcccgatttgtagcttggctgccccaggaaggggcctgcgaccagaaagatgcaaagggcgggacaaggttacgagtgggtgcggggaagcctccctaacctgggggccgcgtcccagagctgcgagccacgcctcctctctcccgcccgccgcgccgccggactcttattttgaagggcggcgggtgaaggctcggagcctcctgagtcacccggcgggcgaggtataaagcccgatacctgccccgcgcccggtccgcggagcccgctgcagctcccgctcgctccggacgcggaatcgggcagcagcgggaggcggcccggagagccgaggtaggcgcggggaatcggccctgaggctggtggaagaaatgtgtgaattaaagggagtgcagcgtgcagggtgggccgcgagtcgggagtgcagggctcgggacagggtgggggcggggaggacaagagactcgtcagcgcactttccacccggccggttccttcccgagccctctccctccccc

SEQ ID NO: 22386 - DNA, 440 bp, Homo sapiens
  chr4:169753535-169753975
  hyper
cggagctccagataggaatgtctgcatcatcttggcagggcccagacgggagaagatgctctgctgccacggacgatccctcccgctctcctaactcttctctgaacacctcgcacccccacggccccccgcccctctcttaatcttggccacgctccctgaggggtcagacctggggtgggagagcagagaaagcggggctggcagagacaggggtgagggccgggagaggcgatgacatcattccctggcagctggcggggagagggtggggacggaggggtccccccgacctgagccgagccctcccttcccaagcccatcctcctttctttgggatggttcaccccacctgggcgccattcaaaggaagtttgcgcgtaactcggggcgtcctttccccggccgggtgctgtgcccggcccgcagtcggtgtttct

SEQ ID NO: 22387 - DNA, 273 bp, Homo sapiens
  chr4:169754143-169754416
  hyper
gggtcccgtgagcagccaggctggccctccccgggcctgggtgagctcccaaagctggagcgcagggctctaggccggccccgccccggggctgggggcttcccgcccgtttgtctcattttaacttttgggggcagctctgtcccgaatggtgagtggtccagactctagaaaggggtttggtcgcttgagcccggattgaggcttgggacctttgctctcttgctggggacggaagggggcgcgctgggcaggagagggggcgtctcggtc

SEQ ID NO: 22388 - DNA, 127 bp, Homo sapiens; identical to SEQ ID NO: 11669
  chr4:174443425-174443552
  hyper

SEQ ID NO: 22389 - DNA, 71 bp, Homo sapiens; identical to SEQ ID NO: 9746
  chr4:175750738-175750809
  hyper

SEQ ID NO: 22390 - DNA, 69 bp, Homo sapiens; identical to SEQ ID NO: 6173
  chr4:176922585-176922654
  hyper

SEQ ID NO: 22391 - DNA, 43 bp, Homo sapiens; identical to SEQ ID NO: 6174
  chr4:176986744-176986787
  hyper

SEQ ID NO: 22392 - DNA, 125 bp, Homo sapiens; identical to SEQ ID NO: 8533
  chr4:184667665-184667790
  hypo

SEQ ID NO: 22393 - DNA, 57 bp, Homo sapiens; identical to SEQ ID NO: 8535
  chr4:1993659-1993716
  hypo

SEQ ID NO: 22394 - DNA, 197 bp, Homo sapiens; identical to SEQ ID NO: 8536
  chr4:1994335-1994532
  hypo

SEQ ID NO: 22395 - DNA, 65 bp, Homo sapiens; identical to SEQ ID NO: 15975
  chr4:25013897-25013962
  hypo

SEQ ID NO: 22396 - DNA, 211 bp, Homo sapiens; identical to SEQ ID NO: 17871
  chr4:2639936-2640147
  hypo

SEQ ID NO: 22397 - DNA, 81 bp, Homo sapiens; identical to SEQ ID NO: 15976
  chr4:2672891-2672972
  hypo

SEQ ID NO: 22398 - DNA, 855 bp, Homo sapiens
  chr4:2704088-2704943
  hypo
cgatgctccgggctcatctcgtgtcttctctctcccagccctgaaccagccatttctccaaggagccctcctctttcttcaacagtggtgttcagaaacccagacctggacactgccatatggcattgcttttaggccctctcagtcagcagagcaggaggagtgggggtgtgagcatgtgcacacgagcgcctgccacctacacacactaattgctatgtacaagccgtgagttcccacagatatcccagccccactcctgtgctacagtgagcgttctcccttccccgtccacctttgtaactccttagacagtaagaacctggaccccatcatccatggtgcctttactgacttgctgagtcctacaacacaggtaaagggttcagaagtccctgcccttacccgatggaaaactccgggcatgctttcggtatttgttcagttctttttgtctttagcctcagggtgtggtgattacactgaatttacaaatgacttaaattagttcttttcacctttagtacaattacgttattgattgaaaacacacctgattgcgtttttccatttgtgttccatttgttttctcccctacccagttcctctttttttttaatctgttcccacccactccctgtaggtaactaatcagtttcttatttgcttttcttttttacataaaaggtagtgtattatagacataatagtgacttctgggttcttttctacttcatatattctgggaatcactgcacatcagttcgtagagattgtcctcattctttctgcagcgacacggtactccatttaaagtgtacgatgatttctgcagtcactcttctttgtgcgagc

SEQ ID NO: 22399 - DNA, 55 bp, Homo sapiens; identical to SEQ ID NO: 8541
  chr4:2926396-2926451
  hypo

SEQ ID NO: 22400 - DNA, 309 bp, Homo sapiens; identical to SEQ ID NO: 7399
  chr4:39447953-39448262
  hypo

SEQ ID NO: 22401 - DNA, 438 bp, Homo sapiens
  chr4:4509159-4509597
  hypo
cggctagtatgcgaactggagaaaaagttcagtggaaagcatattatctttatcgctcagaggagaattctgcctaagccaattcgaaaaagccgcacaaaaaataagcaaaagcgtcccaggagtgcactctgacagctgtgcacgacgcaagccttgaggacttgatcttcccaagcgaaattgtgggcaagagaattcacgtgaactggatggcagccggctcataaaggttcgtttggacaaagcccagcagaacaacgtggaacacagactgaaactttttctggtgtctctaagaagctcacgggcaaggatgttaattttgaattcccagagtttcaattgtaaacaaaaatgactaaataaaatatattcacagtaaaaaaaaaaaaaaaaaaaaaagttaaaaagcggcagctagctagaaaaatatac

SEQ ID NO: 22402 - DNA, 105 bp, Homo sapiens; identical to SEQ ID NO: 11685
  chr4:47033907-47034012
  hyper

SEQ ID NO: 22403 - DNA, 133 bp, Homo sapiens
  chr4:4871183-4871316
  hyper
cggggttcagggagcgggaggagggtctgagagaccccaaagcctcccctttgcgagaccactccttgcttcccccgcctggcgctttccataaccctctgcggcgccctgcctctttgttgccccttagatg

SEQ ID NO: 22404 - DNA, 371 bp, Homo sapiens
  chr4:4871384-4871755
  hyper
aaagaaaaccccgttccctctctgatgactctcgtggcacccgggtggcagcaggggcttctccaccggagaaacagccacatcgactaaaagggaatgtgtgaggcaggctgagaccttgggtggggccccccacctctcgagttttccaagactcaggttccatctctgttaaatggacacaatcctgacccctggcaggtcctgaaagagtagaagggaaggggttctccacgggctgtaccatcacttgcgtccccagttcggtgatggtggtgaggtcatcacagttgttccgcctgcggtgactgcagctgacatgtatgcgcgcttgcctatggatcacaacccttagaatctaagttttccac

SEQ ID NO: 22405 - DNA, 243 bp, Homo sapiens
  chr4:4872215-4872458
  hyper
ggagagtgttcttgctcttggaaagtgtcagaaagtgcctgtgcgccactctggacccggaattaagacaccttcacctcttttaatcttctccctatgacgcaggcactcttattaatctgtttcaagtgagaaaaccgaggcacagagagcgtatgtgacttgccaaatgtcacataggtgtctaagacccggcctgtatttcccaccaacctctgccgctgcttctggcatgaatgcaga

SEQ ID NO: 22406 - DNA, 1146 bp, Homo sapiens
  chr4:4873528-4874674
  hyper
aggtgcgtgccagctgtaggagcctgctccgcctgccctcctggaacgcagtcatcctccaggccctgcccgcgcccatttcgcggcccaggaaactgaggtgtggaagcctgtgaagggagggactgctacctatcgattcgtaccggatccagaccctgtgctaaacgctcggcgtgcatggtgccccttaatcctcacaaaagtcgagcgacttagggaggaatattatcccattgcacacacgagcacactgctgcgcagaggcacgaaggtacctgcccagggtctcagctagtcccatttccaacccaggaaggcaagggagcaacccgggaagcaaaatgtaaggagacactttcagggttgtgcaagtgtggggtgggcacccggggagaagggaggagggatgaactatccagagaggaaggcacgcccggccccgacttatcggaataattgtctccattccgcttcggcggtgtctgttgtgtccattgaacagaagcagaacgtgagtccgtatctgcccctcgccaccgccaccagcacctgggatttgactcacacttcaattcctgccctaggaattgatgccagcgcccagtatggccccgcgtggggaatcgagcgccccatccctcggtgagggcttactctgagcctgagtctgtggcaggcccccccatagctactgtctgccttaatccacgccaaggcctctaaaggaaaacattgccttggttctttttcacagacgtgtcaactgtggaccagagatgtcaagccacgtgcccaaggtcaccaagcagtttctgggtgagccctcagggaatcctaaatcccgacccaaacccgggatttcccctcgccctcggggcctccaaggggagctgcgagaggcggggacgcaaggaggcgctgggaccagtttgctctgagtgctcctgctccggactgctccttggagaggcggggccttgggcagcagaatcccaagctcctcccggtgggaaatccggcagctcccgtctgagggtagggccagcagaccacctggcccagtaaactccaccggcttcgggggtggggagttggggcaggtgcgccccaggggctcggtatacaaagccatgcctgagccac

SEQ ID NO: 22407 - DNA, 76 bp, Homo sapiens; identical to SEQ ID NO: 7402
  chr4:56222936-56223012
  hypo

SEQ ID NO: 22408 - DNA, 32 bp, Homo sapiens; identical to SEQ ID NO: 15981
  chr4:619879-619911
  hypo

SEQ ID NO: 22409 - DNA, 44 bp, Homo sapiens; identical to SEQ ID NO: 7404
  chr4:628787-628831
  hypo

SEQ ID NO: 22410 - DNA, 421 bp, Homo sapiens; identical to SEQ ID NO: 7405
  chr4:628950-629371
  hypo

SEQ ID NO: 22411 - DNA, 175 bp, Homo sapiens
  chr4:757757-757932
  hypo
cgtgcgactccagctctgcagcatggcgcactggaaaaggcagaaccatccggaggctgcaggggcttgaggagggtagtaggagtgggcgggcacagggctcctgggcggcgatgctgctgtttgtccacctgtggctgtgccaccagggcgacctgacatccgctctggactc

SEQ ID NO: 22412 - DNA, 310 bp, Homo sapiens; identical to SEQ ID NO: 8554
  chr4:99399725-99400035
  hypo

SEQ ID NO: 22413 - DNA, 87 bp, Homo sapiens; identical to SEQ ID NO: 6188
  chr5:100238197-100238284
  hyper

SEQ ID NO: 22414 - DNA, 345 bp, Homo sapiens; identical to SEQ ID NO: 6189
  chr5:100239724-100240069
  hyper

SEQ ID NO: 22415 - DNA, 470 bp, Homo sapiens; identical to SEQ ID NO: 9776
  chr5:112629778-112630248
  hyper

SEQ ID NO: 22416 - DNA, 113 bp, Homo sapiens; identical to SEQ ID NO: 9777
  chr5:112630698-112630811
  hyper

SEQ ID NO: 22417 - DNA, 218 bp, Homo sapiens; identical to SEQ ID NO: 7414
  chr5:132082800-132083018
  hyper

SEQ ID NO: 22418 - DNA, 46 bp, Homo sapiens; identical to SEQ ID NO: 11722
  chr5:134827217-134827263
  hyper

SEQ ID NO: 22419 - DNA, 73 bp, Homo sapiens; identical to SEQ ID NO: 7415
  chr5:134880614-134880687
  hyper

SEQ ID NO: 22420 - DNA, 625 bp, Homo sapiens; identical to SEQ ID NO: 8562
  chr5:142781875-142782500
  hyper

SEQ ID NO: 22421 - DNA, 625 bp, Homo sapiens; identical to SEQ ID NO: 8562
  chr5:142781875-142782500
  hypo

SEQ ID NO: 22422 - DNA, 125 bp, Homo sapiens; identical to SEQ ID NO: 10668
  chr5:142782625-142782750
  binary

SEQ ID NO: 22423 - DNA, 410 bp, Homo sapiens; identical to SEQ ID NO: 10669
  chr5:142782794-142783204
  binary

SEQ ID NO: 22424 - DNA, 1070 bp, Homo sapiens; identical to SEQ ID NO: 10670
  chr5:142783606-142784676
  binary

SEQ ID NO: 22425 - DNA, 32 bp, Homo sapiens; identical to SEQ ID NO: 7421
  chr5:142785272-142785304
  hyper

SEQ ID NO: 22426 - DNA, 453 bp, Homo sapiens; identical to SEQ ID NO: 11727
  chr5:14328256-14328709
  hypo

SEQ ID NO: 22427 - DNA, 127 bp, Homo sapiens
  chr5:148520933-148521060
  hyper
cgtccatctcacaaggcctcgtccatctcccatcacaccctagggcccaggcagaagcccggcggggcggggcctcggacacgcgccggtgcgtccagcaggtggcagcagcgagcggccgcgcccc

SEQ ID NO: 22428 - DNA, 45 bp, Homo sapiens
  chr5:148521331-148521376
  hyper
gtccggggtgcgcgcgagcaggcgctgccaaccccacttctgccc

SEQ ID NO: 22429 - DNA, 253 bp, Homo sapiens
  chr5:148650971-148651224
  binary
cgcggcgaatggagaagacaagcccaaagccaggaaatgggtggcggctgcagggaagggggttttgattccctaggataaaaacgcgctccaacagtctccgcattccggcatggagccggctgaggggtgcggtggtaagaccccatcgctagcggagtgcaagcaaagccgcacacctcctgggtccgggctggggcaggccgcgcgggcgcgggaacgaacgcgtgcggacggggaaaagggtcctcca

SEQ ID NO: 22430 - DNA, 98 bp, Homo sapiens; identical to SEQ ID NO: 8567
  chr5:151066500-151066598
  hyper

SEQ ID NO: 22431 - DNA, 240 bp, Homo sapiens; identical to SEQ ID NO: 12804
  chr5:157098032-157098272
  hyper

SEQ ID NO: 22432 - DNA, 335 bp, Homo sapiens; identical to SEQ ID NO: 6207
  chr5:160973804-160974139
  hyper

SEQ ID NO: 22433 - DNA, 73 bp, Homo sapiens
  chr5:160974540-160974613
  binary
cgttcctgacccgctagtccgggttatttatagcaggaggggaggggggcgaggggagcagaaaggcaatgct

SEQ ID NO: 22434 - DNA, 211 bp, Homo sapiens
  chr5:160974861-160975072
  binary
gcgcactccccacccgccgccatccctccttacctcgcaggcccgcgctcgccgcccactcccgcggcgtgcggagctggcgcccccggcccctcgtccgggacaggggacggggactcccggctgttcaggggctgtacctctggatacaagaagccggagcggtccctagaaggcaggcaaaatgaggaagagcccctcacctccggag

SEQ ID NO: 22435 - DNA, 244 bp, Homo sapiens; identical to SEQ ID NO: 9796
  chr5:170171140-170171384
  binary

SEQ ID NO: 22436 - DNA, 388 bp, Homo sapiens; identical to SEQ ID NO: 9797
  chr5:170171413-170171801
  binary

SEQ ID NO: 22437 - DNA, 476 bp, Homo sapiens; identical to SEQ ID NO: 8573
  chr5:174119512-174119988
  hyper

SEQ ID NO: 22438 - DNA, 77 bp, Homo sapiens
  chr5:174120134-174120211
  hyper
ctcaagtctcagggcgaagtcctgctgctttgagacgtttacagctttgattgaggaaagctattcagggctggggc

SEQ ID NO: 22439 - DNA, 114 bp, Homo sapiens; identical to SEQ ID NO: 16001
  chr5:176225713-176225827
  hypo

SEQ ID NO: 22440 - DNA, 561 bp, Homo sapiens
  chr5:180257880-180258441
  hyper
cgcagggagggagagacggcgggtgggggttgaacaaagtggagattcacaaaagcagactagggcgggcgacgtgatcagatgacctgtgcgggcggcagcctcctgccctcctccccttcgtgcgccggctggagcgaagagttcttttgacagccgtgagcttccccgccaggaacttactggggctgcatcaccctagaaacgtggctttgggctgtggaaacgctgcctctgtggaagtctctcctcgcgggggtggacgggtcgctgcgcgcccagcgttcttctgcggttctcacagcccgccgccgccgccgcctcggggacctttgcggggaggcctcaggtcagcgccgcccttgcgatggcgggagagcagagcggccccagggcctctgagctccggccccggcacgtcccgccctctcctccgcttgcgggagccggggcgcctcggagggaaaccttccggacacaggccgggagaagaggggccgtggcgccatcgcgcagcttcctggtttcggccatgtttttttttttttgagacggagtttc

SEQ ID NO: 22441 - DNA, 457 bp, Homo sapiens
  chr5:180258503-180258960
  hyper
cgggttgaagggactctccggcctcaggccgcggtgttcttgtaaattagaaccggcctatgcgccaagcgcgggtctcgcggctgcggagagaggcccagcagggggcggggacgccgggaggcggggcctggccgagctgcgcacacccgggtggttctggctacgggtacccggacctgcccaacgaccgttctccattcccgacctccgcaccctacccggtccgcagggcaccttcctcctctctctcaggcacgtcctcgacctcagttgccacgtgcacatgctggtgccttccaggtcggtctttctccaccagactccacctggaactttcttccttttcgtcctgtgctggcctaacccctgctcggcctcggccctcagctgccggctctaacaaagcctctgtctttcccagacccctgtgaccaggtcaggctctgctccctgc

SEQ ID NO: 22442 - DNA, 188 bp, Homo sapiens; identical to SEQ ID NO: 6208
  chr5:22853256-22853444
  hyper

SEQ ID NO: 22443 - DNA, 100 bp, Homo sapiens; identical to SEQ ID NO: 6209
  chr5:22853569-22853669
  hyper

SEQ ID NO: 22444 - DNA, 71 bp, Homo sapiens; identical to SEQ ID NO: 15081
  chr5:31410355-31410426
  hypo

SEQ ID NO: 22445 - DNA, 52 bp, Homo sapiens; identical to SEQ ID NO: 14080
  chr5:3324702-3324754
  hypo

SEQ ID NO: 22446 - DNA, 283 bp, Homo sapiens; identical to SEQ ID NO: 14081
  chr5:3325333-3325616
  hypo

SEQ ID NO: 22447 - DNA, 130 bp, Homo sapiens
  chr5:3326328-3326458
  hypo
cgcgccgcggcgggcgctgcgtcttaattcaatgttccggcttcagagcagccgtggaagccgggccctgaagtgtgtgcacatggtcgataaactgtaataaactttacgggttcggtaacgaggctgc

SEQ ID NO: 22448 - DNA, 337 bp, Homo sapiens; identical to SEQ ID NO: 8583
  chr5:40680627-40680964
  hyper

SEQ ID NO: 22449 - DNA, 99 bp, Homo sapiens; identical to SEQ ID NO: 6210
  chr5:42950747-42950846
  hyper

SEQ ID NO: 22450 - DNA, 175 bp, Homo sapiens; identical to SEQ ID NO: 7436
  chr5:42995428-42995603
  hyper

SEQ ID NO: 22451 - DNA, 338 bp, Homo sapiens; identical to SEQ ID NO: 8586
  chr5:43007481-43007819
  hyper

SEQ ID NO: 22452 - DNA, 330 bp, Homo sapiens
  chr5:490894-491224
  binary
cgcccacgtgacgggcctgccatccatgagcctgtctgtgccctcggcagctttccctgggctgcacctggtgggtgatgctggacggcagggactacagggaggggtgagaaggcgccaaggaaccacgtgctgggtgaggcggccccaacccgggagctcctctttctccatgcgtctccttggtctcaggtttcagccccttgattcccatggagaggccgggccgtgctctctcttgaaccagacggaaaatcgccaattcttgtgagtctggttcagctggtggatttgtttgaggctgagttctcagaccggtgagggcggcag

SEQ ID NO: 22453 - DNA, 50 bp, Homo sapiens; identical to SEQ ID NO: 9814
  chr5:49737299-49737349
  binary

SEQ ID NO: 22454 - DNA, 76 bp, Homo sapiens; identical to SEQ ID NO: 7437
  chr5:54518558-54518634
  hyper

SEQ ID NO: 22455 - DNA, 210 bp, Homo sapiens; identical to SEQ ID NO: 11752
  chr5:54526958-54527168
  hyper

SEQ ID NO: 22456 - DNA, 38 bp, Homo sapiens; identical to SEQ ID NO: 6211
  chr5:57878673-57878711
  hyper

SEQ ID NO: 22457 - DNA, 159 bp, Homo sapiens; identical to SEQ ID NO: 6212
  chr5:57878752-57878911
  hyper

SEQ ID NO: 22458 - DNA, 227 bp, Homo sapiens; identical to SEQ ID NO: 6213
  chr5:57879190-57879417
  hyper

SEQ ID NO: 22459 - DNA, 489 bp, Homo sapiens
  chr5:64398796-64399285
  hyper
cgcctccggcaaccccggtgcttcagtgctcccgacctttctctgccgcccctcgcctcggcggccgccgggagcggctgtggggtgcgccggtcgccccgggcccgagcgggaggagagtcccgccccgccgcgccccgcctccgggcgccccgacgctgccggcgcggacgccattgctgcggccgctgtttgttattaaactgcccagagaaagggcttcgagtaaaaacaccaactttccagtcggggcggcgcaggtccccgggccctggaaagttctgggacggccgaggtctccccggacacccgcacccacgcccccgtcgtgccctttctggcttttggcttcctctcctcgatttcccttttgtgcggccccgggcagcttcctcaggccccgccgcccccacctggccgccctgggagctgttcctcccccagcagcaggagcatccagctcgggttttattacctcccgagacactc

SEQ ID NO: 22460 - DNA, 112 bp, Homo sapiens; identical to SEQ ID NO: 20634
  chr5:67590957-67591069
  hypo

SEQ ID NO: 22461 - DNA, 115 bp, Homo sapiens; identical to SEQ ID NO: 20635
  chr5:67591157-67591272
  hypo

SEQ ID NO: 22462 - DNA, 203 bp, Homo sapiens
  chr5:72594568-72594771
  hyper
cgttctctgtgcagcttcaaaaaactcagtaatttcgttagaaaacgttgaaatccgaccccaaagtattcagcccaaatgtttagttaaagtaaccccgtgggttaataaactaaacaaaggcaacccatgcaaaaccggagcaatgaaaaccaggctacataaacgaagggaagtttataagaactctttgggaggaaaaa

SEQ ID NO: 22463 - DNA, 173 bp, Homo sapiens; identical to SEQ ID NO: 19786
  chr5:77291967-77292140
  hypo

SEQ ID NO: 22464 - DNA, 112 bp, Homo sapiens
  chr5:86672217-86672329
  hypo
cgctgccagttgagccgattacagaaagggcatgccacagatgaatggtttctgctcagctcccatataccattaaaaggtattgaaccagggtccctgcgtgttcgagcac

SEQ ID NO: 22465 - DNA, 81 bp, Homo sapiens; identical to SEQ ID NO: 14109
  chr5:87955380-87955461
  hyper

SEQ ID NO: 22466 - DNA, 326 bp, Homo sapiens
  chr5:87979367-87979693
  hyper
cgaggctctagctttcccctcctcctttcttgatctcggcaaacaaaaccattctaccacttgagccatctgccgcaggtgtaatggatggcagggggccgacctaaccacactccagtctcttctaggtcgtcaccgctctgcaccaaacaaatgagtcctgtttcaccactagggtgccgaggtggatggtggatgctggcccccgcccctggcagcgctcagcccttagaaaccagagccagctgacaacacgcgaaacacacaggcacagcgaaaacgccgagccgacgctcattccctctgccccctccctctgctctctg

SEQ ID NO: 22467 - DNA, 35 bp, Homo sapiens
  chr5:87979860-87979895
  hyper
cgcgcgcgcacgcgtgaatgtgcatgtgtgtttaa

SEQ ID NO: 22468 - DNA, 158 bp, Homo sapiens
  chr5:87979985-87980143
  hyper
ttttaaagaaaaatggaaaactattaattttctgcgcaagtctagggttcccagtttaggttccagagaacagcagatctgcgcagcccccgccttaccaaactttccttttctagggtttgaaagaggctcacattctcacttcatgacagagcagc

SEQ ID NO: 22469 - DNA, 148 bp, Homo sapiens
  chr5:87980250-87980398
  hyper
aggcacaaggtgcccaggggcaagagcccggggtccaagcttccaggcgcacatcatcctctgggccccgggccctccggctggagcactccctcacccgcatcccatccccgttccattttgatcattatttgaatagcccaggtaa

SEQ ID NO: 22470 - DNA, 138 bp, Homo sapiens; identical to SEQ ID NO: 9831
  chr5:87982673-87982811
  hyper

SEQ ID NO: 22471 - DNA, 241 bp, Homo sapiens
  chr5:87983395-87983636
  hyper
tgctttaaggttatcagtcttataagcaccacgtgattagacaggaaaggtaacttgaaaacacaacctgattctgagcgaaatcattttgtcctgttggcatgaaaatgtagttacacctccaagttctgctcaggaacagacggctgcgtgtgggggctggtccctacccagatcagtacaggatcttcagctggcagacgagatccagcaaatggaattcacgaagaaactcatgtgc

SEQ ID NO: 22472 - DNA, 108 bp, Homo sapiens
  chr5:87984851-87984959
  hyper
cgtcccctgcgcctgaaattcaggtcgcctgcagctacggcctcaggtgagtggctcagggaagggtcgctgaggctcttcccagggcccccgggcctctcttgggcc

SEQ ID NO: 22473 - DNA, 446 bp, Homo sapiens
  chr5:96111437-96111883
  hypo
cggagctaagaccctcaggggaggccagcccgaggcatcccgcaagggaatcagggaagaacacctccacctactacctcctccgaccccagctccagctctccggctccccactgaccaacatccaaagggcaagaaagcttgatgacttggcctttacaagtcagcccctgggcatggagcaaggaagagggatgggcagcgggtctggaggggtgagccgggagagctttaacccagtcatcgtccggcttagtctcagatccaggtgttcattgttcagtagtcgactattcagagtctttcgaggagactgatgaaacagtttatgaatgataaacatggggtacagggttttggacacgggtgcttaagcataaactataaaatgagaagaataaggtactttattcttctgtggcagggaacccaacacttgggtttac

SEQ ID NO: 22474 - DNA, 132 bp, Homo sapiens; identical to SEQ ID NO: 16019
  chr5:96121466-96121598
  hypo

SEQ ID NO: 22475 - DNA, 227 bp, Homo sapiens; identical to SEQ ID NO: 7442
  chr6:10417842-10418069
  hyper

SEQ ID NO: 22476 - DNA, 138 bp, Homo sapiens; identical to SEQ ID NO: 11779
  chr6:10418940-10419078
  hyper

SEQ ID NO: 22477 - DNA, 334 bp, Homo sapiens; identical to SEQ ID NO: 7445
  chr6:106959606-106959940
  hyper

SEQ ID NO: 22478 - DNA, 263 bp, Homo sapiens; identical to SEQ ID NO: 7446
  chr6:106960046-106960309
  hyper

SEQ ID NO: 22479 - DNA, 155 bp, Homo sapiens; identical to SEQ ID NO: 7447
  chr6:106961023-106961178
  binary

SEQ ID NO: 22480 - DNA, 184 bp, Homo sapiens
  chr6:111751880-111752064
  hypo
cgccttcaagagtcccagcaaagaaaataaaaagaaagacaaagacatgcttgaagataagtttaaaagcaataatttagagagagcgcaggagcagcttgaccgcatcgtgaaggaatctggaggaaagctgaccaggcggcttgtgaacagtcagtgcaaattggaaagaagaaaaccagac

SEQ ID NO: 22481 - DNA, 135 bp, Homo sapiens; identical to SEQ ID NO: 10696
  chr6:111766152-111766287
  hypo

SEQ ID NO: 22482 - DNA, 291 bp, Homo sapiens; identical to SEQ ID NO: 9841
  chr6:130088466-130088757
  hyper

SEQ ID NO: 22483 - DNA, 47 bp, Homo sapiens; identical to SEQ ID NO: 9844
  chr6:137808706-137808753
  hyper

SEQ ID NO: 22484 - DNA, 259 bp, Homo sapiens; identical to SEQ ID NO: 12877
  chr6:149068930-149069189
  hyper

SEQ ID NO: 22485 - DNA, 224 bp, Homo sapiens; identical to SEQ ID NO: 12878
  chr6:149069508-149069732
  hyper

SEQ ID NO: 22486 - DNA, 59 bp, Homo sapiens; identical to SEQ ID NO: 12879
  chr6:149069769-149069828
  hyper

SEQ ID NO: 22487 - DNA, 56 bp, Homo sapiens; identical to SEQ ID NO: 7457
  chr6:158321417-158321473
  hypo

SEQ ID NO: 22488 - DNA, 520 bp, Homo sapiens; identical to SEQ ID NO: 8616
  chr6:158402113-158402633
  binary

SEQ ID NO: 22489 - DNA, 52 bp, Homo sapiens; identical to SEQ ID NO: 10706
  chr6:1625068-1625120
  hyper

SEQ ID NO: 22490 - DNA, 1797 bp, Homo sapiens
  chr6:167314272-167316069
  hypo
cgcacaggagagagaacgcaacctgaacacacggtgggggctggaggaagaacgtcgggagatcacacagggaggagaacgccaggtgaacgcacaagagaaaacgcctggtgaacgcgcaaagaaaggagaaagccaggtgaacgcacagggagaacgccgcacaaccgcacaggtaggagaaagccatgtgaacgcacaaagaaaggagaacgctgagtgaacgcacacagggccgagaacgccaggggaacgcacacagtaaagagaacaccgagaacgccgtgggaacgcacaggagagagaacgccacgtgaacacacgagggagaacgccgcgggaacacacagaagggcgaatgcccggcgaacgcacagaggggagaacgccaggggaacacgcacgggggagaacgctgcgcgatcacacagcggggagaacaccgggtaaacacacactggggaaaacaccgcgtgaacgcatagaggggagaaccccgggtgaacacacagaggggagagctccgtgtgaacacaaagggaggagaacgcctggtgagcacacacggggagagaacaccgcgcggacccacaagggggagaatgcctggtgaacgtacagcgggaggggagaacgctggtgaacgcacagcggggaaaacgccatgtgaacgcacaaaggaaggagaacgccaggtgaactcatacagggggtaggaacgccagaggaaagcacacagtaaagagaaggccgtgggaacgcgcaggggagagaacgccgggagaacacagagggaggaaaatgccaggtgaacgcacaagggggaaaacgcctggtgaacgcacaaaggagaaagccaggtgaacgcacaagcagcagaacgccaagtgaacgcacgaggggagaatgctgcgccaacacacacgggaaacacaaccgcgcgagcacgcagtggggagaacggcacgcgaacgctcagcaagaagaacgtaagttgaacggacagcggggagaacgccgccctaacacacgcgggaaataacgacgcgtgaacacacagcagggagaacgccgcgtgaaagcacaggggggagaacgccgcgtgaatgcacacacgggaaataacgccgtgtgaacacacagcggggagaacgccgcgtgaacgcacacaggggaaataacgccgcgcgaacacacagggggaagaacgtcacagggacgcacagtggggaaacgccatgtgaacgcacaaagaaagaacgccacgtgaactcgcacacgcggggagaacgccggggaaacgcacacagtaaagagaacgcagtttgaacgcacaggggagagaacgccacgtgaacacacagaagggagaatgcagtgcgaacacacagaagggagaacacctggtgaaggcacagaggggagaacgccgagcgaacgcacagggtggagaatgccatgtgaacgcacaaagaaaggagaacccctggtgaacgcacacaggagaaagaatgccgaggaacgcacagagtaaagagaccgccgtgggaacacacaggggagagaacgccacgtgaacacatggggagaacgccgcgggaacacacagaagggcgaccgcctggtggatgcacagaggggagaacgccaggggaacacacacaggggagaacgctgggcgatcacacagggtggagaacgccgggtaaatacacactggggaaaacgctgtgcaatcgcatagagggaagaacgccgggtgaacacacagggtgcgttcttccatcatgcggctgc

SEQ ID NO: 22491 - DNA, 341 bp, Homo sapiens; identical to SEQ ID NO: 11788
  chr6:167764611-167764952
  hyper

SEQ ID NO: 22492 - DNA, 85 bp, Homo sapiens; identical to SEQ ID NO: 16032
  chr6:167836474-167836559
  hypo

SEQ ID NO: 22493 - DNA, 305 bp, Homo sapiens; identical to SEQ ID NO: 16033
  chr6:167836629-167836934
  hypo

SEQ ID NO: 22494 - DNA, 272 bp, Homo sapiens
  chr6:170474572-170474844
  hypo
cgcccgccatcctcctgcattagcatactcctaattgattaagtggatgattgattattggacccgtgcggtctgctttccagacccgttggctgggaatggaaagccacgctcggccctcggatgcagcagaagccccctgccccgtccgctccaggctgcagagccgaggtgattggcgccaggctgcccaccccgcctgccccagcaagtgcgtcgcgcccccatggtttctgctgtttgcatgtcaggtcccggcaggaagctgcagt

SEQ ID NO: 22495 - DNA, 163 bp, Homo sapiens
  chr6:170531590-170531753
  hypo
cgagtggctgtctggcacaccaggcatcgatctccgcaaaacgaactggaaaatgctcttccccagaagcgcagcacctgagcgtgtgacgtgcacatgtttgtgtggaaggcccgagacgccatccaaccccgtggctctcaaaccgggtctccagaaccac

SEQ ID NO: 22496 - DNA, 176 bp, Homo sapiens; identical to SEQ ID NO: 16035
  chr6:1708438-1708614
  hypo

SEQ ID NO: 22497 - DNA, 96 bp, Homo sapiens; identical to SEQ ID NO: 16036
  chr6:1708643-1708739
  hypo

SEQ ID NO: 22498 - DNA, 162 bp, Homo sapiens; identical to SEQ ID NO: 14144
  chr6:21202340-21202502
  hypo

SEQ ID NO: 22499 - DNA, 126 bp, Homo sapiens; identical to SEQ ID NO: 14154
  chr6:26241269-26241395
  binary

SEQ ID NO: 22500 - DNA, 248 bp, Homo sapiens; identical to SEQ ID NO: 6241
  chr6:26577475-26577723
  hyper

SEQ ID NO: 22501 - DNA, 72 bp, Homo sapiens; identical to SEQ ID NO: 7470
  chr6:27833292-27833364
  hyper

SEQ ID NO: 22502 - DNA, 191 bp, Homo sapiens; identical to SEQ ID NO: 11803
  chr6:28303261-28303452
  hyper

SEQ ID NO: 22503 - DNA, 74 bp, Homo sapiens; identical to SEQ ID NO: 11804
  chr6:28303489-28303563
  hyper

SEQ ID NO: 22504 - DNA, 209 bp, Homo sapiens; identical to SEQ ID NO: 11805
  chr6:28303607-28303816
  hyper

SEQ ID NO: 22505 - DNA, 266 bp, Homo sapiens; identical to SEQ ID NO: 8626
  chr6:3285535-3285801
  hypo

SEQ ID NO: 22506 - DNA, 53 bp, Homo sapiens
  chr6:34518788-34518841
  hypo
cgggccctcccagctggggcagccagcattattcccacttgacggacaagggc

SEQ ID NO: 22507 - DNA, 70 bp, Homo sapiens
  chr6:34518870-34518940
  hypo
tgcgtgagtgagcagggactcgaactcaagactcggctccaccctcctttctgctggtgctggcagaccc

SEQ ID NO: 22508 - DNA, 61 bp, Homo sapiens; identical to SEQ ID NO: 6255
  chr6:391113-391174
  hyper

SEQ ID NO: 22509 - DNA, 55 bp, Homo sapiens; identical to SEQ ID NO: 5841
  chr6:393764-393819
  binary

SEQ ID NO: 22510 - DNA, 97 bp, Homo sapiens; identical to SEQ ID NO: 7486
  chr6:42762779-42762876
  hypo

SEQ ID NO: 22511 - DNA, 198 bp, Homo sapiens; identical to SEQ ID NO: 18880
  chr6:52141070-52141268
  hypo

SEQ ID NO: 22512 - DNA, 131 bp, Homo sapiens
  chr6:5851329-5851460
  hyper
cgggggacattcctctgctgaccccaaagttcagcaggtgcgggagagggaggggcggactcttctgtctgcacagggcttggggaggcatctcctcctcggggctcgcagacagggcttctcgtgccaac

SEQ ID NO: 22513 - DNA, 76 bp, Homo sapiens
  chr6:5851836-5851912
  hyper
gagcgagcctgcctccagggcagcctcaccgcctggatcctgggcaggagacctcccaggtaataaccgtgatcac

SEQ ID NO: 22514 - DNA, 145 bp, Homo sapiens
  chr6:71666986-71667131
  hyper
gggaggagcgtccccgcggggctgcacgacctcctggagggggtgatgctcgttcacctctcttcagctttgtgaaataccgcaaggtctttggagatgagccaggaaaatccattcacgtgcggaaatttgccgggctacgcgc

SEQ ID NO: 22515 - DNA, 41 bp, Homo sapiens; identical to SEQ ID NO: 7494
  chr6:74019373-74019414
  binary

SEQ ID NO: 22516 - DNA, 102 bp, Homo sapiens; identical to SEQ ID NO: 7495
  chr6:74020094-74020196
  binary

SEQ ID NO: 22517 - DNA, 129 bp, Homo sapiens
  chr6:89554102-89554231
  hypo
cggcttatttctgacgctaaatggttcctgtgttttgtcaatgagcccagtcttcattttttcgtgtcgaggacttataatttctcgttctatacactgcagacgaacattaaaatcacaatctccaac

SEQ ID NO: 22518 - DNA, 706 bp, Homo sapiens
  chr6:90121688-90122394
  hyper
cggcttccccagcacctggctcatcgtgcccaccggccggccggcccggggacggcgggggtcccggggtgggggccaagcctcctagccggccgcccgcagcctatttctgaagcggaggtttgtctagagctcagcggggcccggcggaagcgggggccgcgcgtcccccggcgggcggcgcccaggtccgggtcccgcggttcccagcgcgcccgaagccccctcccccgccccgcccgccggcggaggagtcagccggagcgcggcagttcctcccggaggagggagagagagagagactgcgtgacccgagtcacctgacacacactgtcacatactcacatacacaccccgcacgggcgcgcgcgcgctcgcccggccgcgggcaccactcggcggggcgctgggccgaggacacacatgcacacgcacacgcacacgcacgaggagaccggggaggcgcggggcccctgcaccctcccagactcacaccgacacacgccccgtacacggggcccccgggacgccggccgtcacccaccgcggctgcgcgccaggggcccccacgcgcctctccttcacgtggtccccgcacaggcaggggagggggcgccgcacaccctcaatgtcccccccgccgtcccactcccacacgcccgcagagcgtctaccgtgggcggatgcctcctgcttacagtcctga

SEQ ID NO: 22519 - DNA, 74 bp, Homo sapiens; identical to SEQ ID NO: 21413
  chr6:90122423-90122497
  hyper

SEQ ID NO: 22520 - DNA, 236 bp, Homo sapiens; identical to SEQ ID NO: 16049
  chr7:100064586-100064822
  hypo

SEQ ID NO: 22521 - DNA, 333 bp, Homo sapiens; identical to SEQ ID NO: 16050
  chr7:1001822-1002155
  binary

SEQ ID NO: 22522 - DNA, 132 bp, Homo sapiens; identical to SEQ ID NO: 18892
  chr7:101536683-101536815
  hypo

SEQ ID NO: 22523 - DNA, 82 bp, Homo sapiens; identical to SEQ ID NO: 10746
  chr7:101627660-101627742
  hypo

SEQ ID NO: 22524 - DNA, 282 bp, Homo sapiens; identical to SEQ ID NO: 10747
  chr7:101627846-101628128
  hypo

SEQ ID NO: 22525 - DNA, 92 bp, Homo sapiens; identical to SEQ ID NO: 11836
  chr7:1029909-1030001
  hypo

SEQ ID NO: 22526 - DNA, 32 bp, Homo sapiens; identical to SEQ ID NO: 10749
  chr7:105279344-105279376
  hypo

SEQ ID NO: 22527 - DNA, 148 bp, Homo sapiens; identical to SEQ ID NO: 12913
  chr7:106622687-106622835
  hypo

SEQ ID NO: 22528 - DNA, 408 bp, Homo sapiens; identical to SEQ ID NO: 17032
  chr7:113726962-113727370
  binary

SEQ ID NO: 22529 - DNA, 52 bp, Homo sapiens; identical to SEQ ID NO: 14210
  chr7:126891155-126891207
  binary

SEQ ID NO: 22530 - DNA, 76 bp, Homo sapiens
  chr7:1303350-1303426
  hypo
cgattaccccgctccccgcctgggaacatgtggcctggcatatgtggggccaacctcagcagaaatccacgtgcac

SEQ ID NO: 22531 - DNA, 124 bp, Homo sapiens; identical to SEQ ID NO: 7499
  chr7:1308164-1308288
  hypo

SEQ ID NO: 22532 - DNA, 140 bp, Homo sapiens; identical to SEQ ID NO: 7500
  chr7:1315705-1315845
  hypo

SEQ ID NO: 22533 - DNA, 178 bp, Homo sapiens; identical to SEQ ID NO: 10753
  chr7:1333680-1333858
  hypo

SEQ ID NO: 22534 - DNA, 165 bp, Homo sapiens
  chr7:135611103-135611268
  hypo
cgtagttgagtttgggaaatgcagatctccaagaaatgtggagcaacttagatgagcaatgaaaggatcagaggtttaaccacgactccattttcttcaagccccctgaagatcctgacgatctgggatgtgctggctacaccctgctccccgtcaaccaggagc

SEQ ID NO: 22535 - DNA, 423 bp, Homo sapiens
  chr7:1370055-1370478
  hypo
cgtgatggctcaggtgcgtcttccacgcagatcactctggcagggagcgcggatggagacccgaggctggggcctgctggctttgcccctctacgcgaacagaatggcctctgccctgcaggaatcttgagtccaggagaggagagtttccctggaggtggaggtcaggcccggcagtcagcaggccaagctccttcgggccagggcaagccggagggcttcccagagcgggcacagtggacagctgagcaggccagactctgacatgaggtctggacaggcccttccgcccttccggatgccagtccccctgcttgtctgaccactggcccgcctgcccacggggcggctgagatgctggcgtgtgcgtgcgcatgtgcacgtgtgtttgtgtgcgcgtggggctttctgacagccgataat

SEQ ID NO: 22536 - DNA, 241 bp, Homo sapiens
  chr7:139690720-139690961
  hypo
cgacggtgcaggcacgggggcacagaggcagcaggacattgcaggagcagagacacgaagacaaaagaaacaaatgattccttaagatccatggccaaaacaaattgccgcaattaacacgtgccactgccacgatctatgggctgaaacgtggctggaacgacgcagaagcagaaaccacagagagcgtgcgctccaataaaacggcactaaatggcacggctgtgatggaactcgtttc

SEQ ID NO: 22537 - DNA, 32 bp, Homo sapiens; identical to SEQ ID NO: 10754
  chr7:140156493-140156525
  hypo

SEQ ID NO: 22538 - DNA, 102 bp, Homo sapiens; identical to SEQ ID NO: 7503
  chr7:1460672-1460774
  hypo

SEQ ID NO: 22539 - DNA, 98 bp, Homo sapiens
  chr7:148907697-148907795
  hypo
cgcaggatgcgtcctcccaggtgaagcgtgaggacaccctgtgtgtccggggtcagcggggcctggaggaaagagccatccctacggaatccattacc

SEQ ID NO: 22540 - DNA, 200 bp, Homo sapiens; identical to SEQ ID NO: 18903
  chr7:149119398-149119598
  hyper

SEQ ID NO: 22541 - DNA, 208 bp, Homo sapiens; identical to SEQ ID NO: 18904
  chr7:149119682-149119890
  hyper

SEQ ID NO: 22542 - DNA, 52 bp, Homo sapiens; identical to SEQ ID NO: 18905
  chr7:149120073-149120125
  hyper

SEQ ID NO: 22543 - DNA, 117 bp, Homo sapiens
  chr7:150006604-150006721
  hypo
cgcctgctgtaagacaaaccccagccatgccttcagcacacaaaaacttcagaacaaccaaaccacagcctccagctactcctttaaatcctcctcatggaccttgattcaagtgcc

SEQ ID NO: 22544 - DNA, 112 bp, Homo sapiens; identical to SEQ ID NO: 16059
  chr7:150006790-150006902
  hypo

SEQ ID NO: 22545 - DNA, 313 bp, Homo sapiens
  chr7:152273159-152273472
  hypo
cgtacttatgttcagctgcaatttactcagcagagtgattaatccattaattattccattcagtgaactattcgaaagcatttgcgagtgtttaccatatgctctcttattgttggagggtcggactattcgaaagcatttgcgagtgtttaccatacgccctcgtatcgttggagggtcggagcagccgggagttgggaggcctgtgatgaaagagatctgaacagctgcagagacacgtttgcaagtgggcctggggcccacctcaggactgggggccggtcgggcaccctgcctctcacccccaaacaac

SEQ ID NO: 22546 - DNA, 39 bp, Homo sapiens; identical to SEQ ID NO: 6613
  chr7:155581980-155582019
  hypo

SEQ ID NO: 22547 - DNA, 805 bp, Homo sapiens; identical to SEQ ID NO: 7511
  chr7:156433175-156433980
  hyper

SEQ ID NO: 22548 - DNA, 96 bp, Homo sapiens; identical to SEQ ID NO: 7513
  chr7:156799510-156799606
  hyper

SEQ ID NO: 22549 - DNA, 180 bp, Homo sapiens; identical to SEQ ID NO: 16063
  chr7:156832501-156832681
  hypo

SEQ ID NO: 22550 - DNA, 426 bp, Homo sapiens; identical to SEQ ID NO: 6614
  chr7:157890859-157891285
  hypo

SEQ ID NO: 22551 - DNA, 98 bp, Homo sapiens; identical to SEQ ID NO: 6615
  chr7:157891519-157891617
  hypo

SEQ ID NO: 22552 - DNA, 421 bp, Homo sapiens; identical to SEQ ID NO: 7520
  chr7:1641978-1642399
  hypo

SEQ ID NO: 22553 - DNA, 216 bp, Homo sapiens; identical to SEQ ID NO: 18009
  chr7:17339346-17339562
  hyper

SEQ ID NO: 22554 - DNA, 260 bp, Homo sapiens; identical to SEQ ID NO: 18010
  chr7:17339591-17339851
  hyper

SEQ ID NO: 22555 - DNA, 253 bp, Homo sapiens; identical to SEQ ID NO: 16079
  chr7:2071776-2072029
  hypo

SEQ ID NO: 22556 - DNA, 107 bp, Homo sapiens; identical to SEQ ID NO: 12977
  chr7:23287654-23287761
  hyper

SEQ ID NO: 22557 - DNA, 42 bp, Homo sapiens
  chr7:23719658-23719700
  hyper
ggcgccggcagccagtaggggcgcgcgtcctgcgcagttgcc

SEQ ID NO: 22558 - DNA, 91 bp, Homo sapiens; identical to SEQ ID NO: 8708
  chr7:27135176-27135267
  hyper

SEQ ID NO: 22559 - DNA, 142 bp, Homo sapiens; identical to SEQ ID NO: 8709
  chr7:27136790-27136932
  binary

SEQ ID NO: 22560 - DNA, 456 bp, Homo sapiens; identical to SEQ ID NO: 8711
  chr7:27531253-27531709
  hypo

SEQ ID NO: 22561 - DNA, 88 bp, Homo sapiens; identical to SEQ ID NO: 9928
  chr7:27651058-27651146
  hypo

SEQ ID NO: 22562 - DNA, 551 bp, Homo sapiens; identical to SEQ ID NO: 7539
  chr7:287728-288279
  hypo

SEQ ID NO: 22563 - DNA, 468 bp, Homo sapiens; identical to SEQ ID NO: 7540
  chr7:288328-288796
  hypo

SEQ ID NO: 22564 - DNA, 62 bp, Homo sapiens; identical to SEQ ID NO: 16086
  chr7:29390389-29390451
  hypo

SEQ ID NO: 22565 - DNA, 396 bp, Homo sapiens; identical to SEQ ID NO: 6278
  chr7:3082731-3083127
  hyper

SEQ ID NO: 22566 - DNA, 84 bp, Homo sapiens; identical to SEQ ID NO: 5847
  chr7:3083602-3083686
  binary

SEQ ID NO: 22567 - DNA, 46 bp, Homo sapiens; identical to SEQ ID NO: 16087
  chr7:345250-345296
  hypo

SEQ ID NO: 22568 - DNA, 147 bp, Homo sapiens; identical to SEQ ID NO: 16088
  chr7:345608-345755
  hypo

SEQ ID NO: 22569 - DNA, 254 bp, Homo sapiens; identical to SEQ ID NO: 16089
  chr7:36124398-36124652
  hypo

SEQ ID NO: 22570 - DNA, 46 bp, Homo sapiens; identical to SEQ ID NO: 9932
  chr7:39454304-39454350
  hyper

SEQ ID NO: 22571 - DNA, 259 bp, Homo sapiens; identical to SEQ ID NO: 14278
  chr7:42237185-42237444
  hypo

SEQ ID NO: 22572 - DNA, 51 bp, Homo sapiens; identical to SEQ ID NO: 16092
  chr7:44740672-44740723
  hypo

SEQ ID NO: 22573 - DNA, 168 bp, Homo sapiens
  chr7:45299683-45299851
  binary
cgcgcgcaatcagatccgggttagcaggatgcatctttgaggtccccaaaccaagccacctgcacggacccaatatctctggcgcgtcccgaacgccgtggattggcgtctgccgccccctgccggcggcgcgctgcactgcagacactgaactcgcccaatgggtgc

SEQ ID NO: 22574 - DNA, 225 bp, Homo sapiens; identical to SEQ ID NO: 16093
  chr7:4856619-4856844
  hypo

SEQ ID NO: 22575 - DNA, 100 bp, Homo sapiens; identical to SEQ ID NO: 16094
  chr7:4857296-4857396
  hypo

SEQ ID NO: 22576 - DNA, 545 bp, Homo sapiens
  chr7:5428491-5429036
  hypo
cgtgcgccgcagcagccgcgcgccctcgtcctgccgggcagcctccttggcacccccgcgccccgcttcggccaccagcgcgggcagccccacgtccccggcgccgccgttgcacatggtcagtaccgacggctgcagcgccgcattcttggtcttggactcagccaggaagggcgacaggcgctcagccaggcgcgggggcccccggtcctggcggccctcggcgcgcgcctcctgggtcaggtccaccacgccccgtggccccgaggcctcctcgccccgggcgcgcgggtccttcttgccgaaaagcggaggcggctccccgccgcggcccgcccgctccttggctggaccgtcccgcgacgacgagcctttggccggggcgcccgaggagtggccgccgccaggggtccgggccgagggcgcgtgagagtgcagggagcccggagcccccgcggtgggcaggtagaaaccgtctgcggagaagggaacagcaggcagtgagcgagcgccacctcccctcccacccctgcctgggcggaggc

SEQ ID NO: 22577 - DNA, 145 bp, Homo sapiens; identical to SEQ ID NO: 18028
  chr7:6058662-6058807
  hypo

SEQ ID NO: 22578 - DNA, 473 bp, Homo sapiens
  chr7:617508-617981
  hypo
cgctcccgctaggcagtgcgctgagggtagcagctcagggcgcttttgcagtcccatttatacccactttaaattatgtgcacattaaggggtgggttatacacagctctctggttaagggtggtaattttccgggtcatcagaccacattgccatggaaaggggcgggagcgcccgggtgttgtcatggcaacggtaaactgacaatggtgcacgggtgggcgtggcttacggagagtggcttgcaccctggccctgttttagccagtcctcaattaggtccagtgtcccagccccacctctggagtcgagtcccacctgctaactctcaggcacggagtccctcgccggcacccggaatgggagttcacacgcgaattcctgccgtgtcctcaggacagctgctcggcccacccaacagtctgcgtgcggccaccacggactgcggccccagcacatcccgggagctccac

SEQ ID NO: 22579 - DNA, 54 bp, Homo sapiens
  chr7:65562589-65562643
  hypo
cgcgcccagctgtgccattactttcaatggcaaaaccggcaattacttttggac

SEQ ID NO: 22580 - DNA, 87 bp, Homo sapiens
  chr7:77309610-77309697
  hypo
gatagatggattctttttttttttttttttttttgagcaaattgagctacttgagcctcggcctcccaaagtgctgggattactggc

SEQ ID NO: 22581 - DNA, 132 bp, Homo sapiens
  chr7:79081892-79082024
  hyper
cttctcttcccagacccgctggtgatgccgctgcaccctgaagttgctccttccttctttccctcccttcctcccattctttctttcttttcttccttcctcccttccccaaaagctcttcatccgcttcgg

SEQ ID NO: 22582 - DNA, 442 bp, Homo sapiens
  chr7:79082579-79083021
  binary
gacactctcatggactttgctagtccagtggcttttctttttcaagcttttggacatggcagtggggcgagtcgcctcagttcctgggctccttggggttaggggggctggtggtgagagaatgaggatggaggagcaagggggcccagggggaagaacagcagactttgccttcgcccccctctattcggtgctttccctcttctttggatggagtgtggacgaggaatggggaggatgagagggacggctgggcagaggtaggagagcttggatgaggttgtgctgtcccttgaatgacactcaaggctgtggccccgcagcagaggaagcagtggtggtggcgtcggcggcggcggcggcggcagccggagcgagcagtagccgagctggtgagcgggtgtggtgggggtggggaaggagggtagggatgccgggggcc

SEQ ID NO: 22583 - DNA, 116 bp, Homo sapiens; identical to SEQ ID NO: 6284
  chr7:79084011-79084127
  hyper

SEQ ID NO: 22584 - DNA, 245 bp, Homo sapiens; identical to SEQ ID NO: 14304
  chr7:818254-818499
  hypo

SEQ ID NO: 22585 - DNA, 473 bp, Homo sapiens; identical to SEQ ID NO: 16101
  chr7:95025593-95026066
  hyper

SEQ ID NO: 22586 - DNA, 80 bp, Homo sapiens; identical to SEQ ID NO: 8735
  chr7:99155672-99155752
  hyper

SEQ ID NO: 22587 - DNA, 377 bp, Homo sapiens; identical to SEQ ID NO: 21500
  chr8:11058799-11059176
  binary

SEQ ID NO: 22588 - DNA, 158 bp, Homo sapiens; identical to SEQ ID NO: 21501
  chr8:11059210-11059368
  hyper

SEQ ID NO: 22589 - DNA, 100 bp, Homo sapiens; identical to SEQ ID NO: 6288
  chr8:110986113-110986213
  hyper

SEQ ID NO: 22590 - DNA, 174 bp, Homo sapiens; identical to SEQ ID NO: 6289
  chr8:110987222-110987396
  hyper

SEQ ID NO: 22591 - DNA, 82 bp, Homo sapiens; identical to SEQ ID NO: 16102
  chr8:11708345-11708427
  hypo

SEQ ID NO: 22592 - DNA, 303 bp, Homo sapiens
  chr8:124186923-124187226
  hypo
cggtgccttcgacgtgccagccccaaactgggataggcacttggagttccaagaagctaagtcatgcctgaccccacccccaccccaaattgctcacagcctaaaggaggagattcccgcttaaaccagcagttacagacaaacgcaatccaggctctgtcatggggcccttaaggaatttacttaacctccctgtgcctcagtttcctcatctagaaaaacattaccgggctgcgccaggatgcagagtatatgcaacaggactatccgtccctgctgctgccctttctacccgccctgccc

SEQ ID NO: 22593 - DNA, 440 bp, Homo sapiens; identical to SEQ ID NO: 16107
  chr8:128893135-128893575
  hypo

SEQ ID NO: 22594 - DNA, 131 bp, Homo sapiens
  chr8:140932087-140932218
  hypo
cggtctccatgctccctggttttacccttcatgacccgctcagactccaggcgcggcatggcactgcccggacccttccgcctagtgctggaaccatttcaacactcttccagatttgttctgtctgtaac

SEQ ID NO: 22595 - DNA, 110 bp, Homo sapiens
  chr8:140950018-140950128
  hypo
cggaaatgcggacgcaaatgtcacgtattattaccgctgccgccacggtttctaatcgcgttaaacatgggtaatgaagccttctctggccagcgcttgacaaagccatc

SEQ ID NO: 22596 - DNA, 68 bp, Homo sapiens; identical to SEQ ID NO: 14327
  chr8:143558643-143558711
  hypo

SEQ ID NO: 22597 - DNA, 129 bp, Homo sapiens; identical to SEQ ID NO: 16123
  chr8:144383407-144383536
  hypo

SEQ ID NO: 22598 - DNA, 85 bp, Homo sapiens; identical to SEQ ID NO: 9974
  chr8:16884239-16884324
  binary

SEQ ID NO: 22599 - DNA, 78 bp, Homo sapiens
  chr8:18541368-18541446
  hypo
cgggagtatttcacggaacctgaggtcctcacccgtaccttgctggcactctggacactattcacgccaatcattttc

SEQ ID NO: 22600 - DNA, 124 bp, Homo sapiens
  chr8:22960460-22960584
  hyper
cgcgcacgaactcagccaacgatttctgatagatttttgggagtttgaccagagatgcaaggggtgaaggagcgcttcctaccgttagggaactctggggacagagcgccccggccgcctgatg

SEQ ID NO: 22601 - DNA, 127 bp, Homo sapiens; identical to SEQ ID NO: 8761
  chr8:23021590-23021717
  binary

SEQ ID NO: 22602 - DNA, 197 bp, Homo sapiens; identical to SEQ ID NO: 6630
  chr8:23423722-23423919
  hypo

SEQ ID NO: 22603 - DNA, 305 bp, Homo sapiens
  chr8:24812836-24813141
  hyper
ccacccctcccacacagtggccaaggagccaagccctatccctaagagctgcgtgcagccgcaccacccctggtctccactttctgggcgcaccaactcccccccttgctcgagtcccccgcccccctgtgtttctggccgtgccgcacctgcatagcgctgatgtcggcgttctgcttgtcctccagctcctgcagctgcttctccagcgcttcattcatgccccggcatgcttcgatttccagggtcttggccttgagcagacgacggctctcggacacctcgtccttggcggcgcgcacggc

SEQ ID NO: 22604 - DNA, 146 bp, Homo sapiens
  chr8:26481184-26481330
  hypo
cggtaatgagagagcaggtaatgcccgggaacttttgaaaggcccggtccgtgtggctctgctccagcaccttcaagttccctgccgtctggcggggggcgtctcataagctgctttcaacacaaagaagggtttggctgctcccc

SEQ ID NO: 22605 - DNA, 191 bp, Homo sapiens
  chr8:27315867-27316058
  hypo
cggctggcacagcagaacgccgtgacctccctaagtgaggagtgcaagaggcagatgctgacggcttcacacaccctggctgtggacgccaagaacctgctcgacgctgtggaccaggccaaggttctggccaatctggcccacccacctgcagagtgacggagggtgggggccacctgcctgcgtcttcc

SEQ ID NO: 22606 - DNA, 139 bp, Homo sapiens; identical to SEQ ID NO: 14336
  chr8:28938419-28938558
  hypo

SEQ ID NO: 22607 - DNA, 136 bp, Homo sapiens; identical to SEQ ID NO: 14337
  chr8:28938587-28938723
  hypo

SEQ ID NO: 22608 - DNA, 398 bp, Homo sapiens; identical to SEQ ID NO: 11936
  chr8:4849835-4850233
  hyper

SEQ ID NO: 22609 - DNA, 260 bp, Homo sapiens; identical to SEQ ID NO: 18970
  chr8:591683-591943
  hypo

SEQ ID NO: 22610 - DNA, 174 bp, Homo sapiens
  chr8:6434512-6434686
  hypo
ctgctgcctgctgtgaggaggccccctttgccacggaacctgaaattcctgccactggaattacgctctggacaagcggcaagatactcctttcagtcccagccactgggttcctgctgcacaggaggccagggtgctgtgaacctgctctcagccccgggcaaagggaatctc

SEQ ID NO: 22611 - DNA, 293 bp, Homo sapiens
  chr8:65488369-65488662
  hyper
gtgaggaccagtatgttttctgtaaaatagatacagacaaggaaaatcttttcgaaagaacgctatacgaacaagtttcaactttcccacagtcgaaatttttggaattgccaagcaacttggaaagactagcaagacggggggcccttggctcactgccaggaatgcgccagctcgcgctagtcccccagcgtcgtcaccctcgctgtcctcctcctcatgagcccacacatgtggacccagtctctctgaagtgagctttgtaggactcggcggcgaaggggacgagaaaa

SEQ ID NO: 22612 - DNA, 220 bp, Homo sapiens
  chr8:65489646-65489866
  hyper
cggcctcgataagccaaccagcccagaaccaggggcgctgggctgggtgttcctcggggacggcgcccactgcccgcttggtccctggagtgtcccgagctgcctcccatacccctgctgcggacagagtgggggcagtcctctgcctctgtttcccaactgctttggtaactcagtgactctctgtgaaactgcagagtcagaggacttcccttccgta

SEQ ID NO: 22613 - DNA, 188 bp, Homo sapiens
  chr8:65490182-65490370
  hyper
gcgacgattaaaccaagtaacgagacaccgggcagatgtgttttcattgccctgtaagataaatgcagtgttaagtgcctgacaacttcccagaagcaatcagcaaaagtttacgagtgcataaacctcaaagaccattccctatcggttgttataaggccggtatttagagcttccataaattcttc

SEQ ID NO: 22614 - DNA, 261 bp, Homo sapiens; identical to SEQ ID NO: 17138
  chr8:65492407-65492668
  hyper

SEQ ID NO: 22615 - DNA, 267 bp, Homo sapiens; identical to SEQ ID NO: 17139
  chr8:65494311-65494578
  binary

SEQ ID NO: 22616 - DNA, 105 bp, Homo sapiens
  chr8:65710834-65710939
  hyper
cgcgtatgtgtgggaaaaagacagaagaagcctttgttattacaaagtcccaaaggaagccagtaccccgcagcaagttctgactgtctgcactggaaatcatgg

SEQ ID NO: 22617 - DNA, 55 bp, Homo sapiens; identical to SEQ ID NO: 5856
  chr8:72756949-72757004
  binary

SEQ ID NO: 22618 - DNA, 195 bp, Homo sapiens; identical to SEQ ID NO: 5857
  chr8:77589904-77590099
  binary

SEQ ID NO: 22619 - DNA, 416 bp, Homo sapiens
  chr8:8731310-8731726
  hypo
cgttcttaattatatttcattgatttcttacatggacagaacatcattcttgctgccactgttttattttgatcagcggtatatctatctgtaaacatgtacaatttgtaattattgctatgtctaaacactgcatcacgtgtaatggctgaattaagctgtgaaatgcgtaattatgctgaaaacaatggtgttccaatacacatcaccaaagccaatttaaaaaaattaccttgtttcaaatcacaaagcgaagccttcataaccctcgaggctttttttaggtcccaccactttgatttagagatttgtctttttctaattgcatctcaagagtgttccgagcacagagagggattattaaccctgaaggaaataaaactgagtatttcttacacctctggaaggtggagaac

SEQ ID NO: 22620 - DNA, 125 bp, Homo sapiens; identical to SEQ ID NO: 10000
  chr8:8748226-8748351
  hypo

SEQ ID NO: 22621 - DNA, 533 bp, Homo sapiens; identical to SEQ ID NO: 14348
  chr8:8749088-8749621
  hypo

SEQ ID NO: 22622 - DNA, 101 bp, Homo sapiens; identical to SEQ ID NO: 8778
  chr8:8898512-8898613
  hypo

SEQ ID NO: 22623 - DNA, 244 bp, Homo sapiens; identical to SEQ ID NO: 8780
  chr8:91657148-91657392
  hyper

SEQ ID NO: 22624 - DNA, 245 bp, Homo sapiens; identical to SEQ ID NO: 8781
  chr8:91657421-91657666
  binary

SEQ ID NO: 22625 - DNA, 66 bp, Homo sapiens; identical to SEQ ID NO: 8782
  chr8:91996920-91996986
  hyper

SEQ ID NO: 22626 - DNA, 202 bp, Homo sapiens; identical to SEQ ID NO: 6314
  chr9:100610480-100610682
  hyper

SEQ ID NO: 22627 - DNA, 149 bp, Homo sapiens; identical to SEQ ID NO: 8787
  chr9:104248697-104248846
  binary

SEQ ID NO: 22628 - DNA, 500 bp, Homo sapiens
  chr9:104248975-104249475
  binary
ctggggacccctgcggggtcctcgcaatcctccggcaggaagcggtcggagctgcgggcagggccgctaggcaacccgcctgcccgaggcgcactgcccggggcacaggccctctgcgatgactctccccaacccccagctgccctgcttgtgccagctgtggccacccctaatccttgtcccctcgctctagtgtccagggctccgaccaccgcgccagaagggctgggcagatcgtgcgcaacagaaacctacccggttggggcgaccagctcggtcccctgcgcgcgccgagggccgcctctggtattgcccaggctggctagctcatcccggtggaggcgccatctccggggcccggaaggagcgggcgcagcgcggtttgggtgtgcgccggagcctcacctcctcccgcctcgcagctcaggcgcagggctccccttgctcaggcgggccatgtgacccgcgagctgcggagagaccgcggcccccaaagcggc

SEQ ID NO: 22629 - DNA, 203 bp, Homo sapiens; identical to SEQ ID NO: 16141
  chr9:126180763-126180966
  hypo

SEQ ID NO: 22630 - DNA, 109 bp, Homo sapiens; identical to SEQ ID NO: 20740
  chr9:126321044-126321153
  hypo

SEQ ID NO: 22631 - DNA, 138 bp, Homo sapiens; identical to SEQ ID NO: 6638
  chr9:126348901-126349039
  hypo

SEQ ID NO: 22632 - DNA, 41 bp, Homo sapiens; identical to SEQ ID NO: 6639
  chr9:126349104-126349145
  hypo

SEQ ID NO: 22633 - DNA, 277 bp, Homo sapiens; identical to SEQ ID NO: 16143
  chr9:132633604-132633881
  hypo

SEQ ID NO: 22634 - DNA, 477 bp, Homo sapiens; identical to SEQ ID NO: 20746
  chr9:132874127-132874604
  hypo

SEQ ID NO: 22635 - DNA, 344 bp, Homo sapiens
  chr9:133366650-133366994
  hypo
gattttagttacaaagtgagagagtcattaagacgtggcggaggagagagcacctggccgggctgctccggggcctccacggaggctgatcccaccgtggccgcggccacggctgccacttatcctgccatcttgctgctaggctctgagctgggcacctgatggggtattatctaatattagctgcgcagaggtgaggaaacggaggcccccaggtgaagacactcacccaggctctcctggctggtgatgggcagctttgagccggggacaggccagctgtagcggccaagttcccagttactccaacagattccaggatgctcgtgatcaaggggcacggc

SEQ ID NO: 22636 - DNA, 64 bp, Homo sapiens
  chr9:133799052-133799116
  hypo
cggaatgcccgggttcaggtacacagcctcacggtccccggtgcctgccctgccgcccgcccag

SEQ ID NO: 22637 - DNA, 399 bp, Homo sapiens
  chr9:133799196-133799595
  hypo
aaagacagagtagacgccatcgtcctgctgtccgcttaggaggacgtccagacagtctcggggccgggagcctgagggaggcaaggctgtcagggtggctgcggccccagcacgttcctgcccagccccctggccaaactgtctgtccatcgataatgcatgtggggtcccatggggttgagagagcactggccttggagtccgaccttggctctgccactccctgctgtggctgggtgagagaatcaccctctctgggacttactctcctcatctggagaatggaccgagagggcttcagcgcaggccacatggaagtagggtcgggccctggagtctcatggctggggaaccctcaccccaacttccccgctccccagagctgggacccgaggcacc

SEQ ID NO: 22638 - DNA, 208 bp, Homo sapiens; identical to SEQ ID NO: 7612
  chr9:135645005-135645213
  hyper

SEQ ID NO: 22639 - DNA, 452 bp, Homo sapiens; identical to SEQ ID NO: 7613
  chr9:135645250-135645702
  hyper

SEQ ID NO: 22640 - DNA, 33 bp, Homo sapiens; identical to SEQ ID NO: 14370
  chr9:135865230-135865263
  hypo

SEQ ID NO: 22641 - DNA, 113 bp, Homo sapiens
  chr9:135908551-135908664
  hypo
cgcagctatttgattacaagccttaaattcatcaggtacccctcggggaactccagtggcatctgtataaacacgagggtcaaaggaaccacggggggcatctcttactctac

SEQ ID NO: 22642 - DNA, 51 bp, Homo sapiens; identical to SEQ ID NO: 14371
  chr9:138661962-138662013
  hypo

SEQ ID NO: 22643 - DNA, 376 bp, Homo sapiens
  chr9:140024237-140024613
  binary
cgcctgcactgagagctcacggcttgcggcgcctgcgtctaccccgcgcgcagtcgccacggcaacagggcgggccttggttctgcttcgggcgtggtcggtgcatggtcctccagcactgttcgccccgcgggtctggtcctgggttcctttcgcctcctgtcgtcggacggcaccggctttgcccacggcctcgcggggagacgcagacacccgggacccggggaggcgcccgggcgccgccgccatgttgtcagggagcgcccgctcccagctcttcggttccgggacccgcggcgcggggatggggctgggccgcccttggtagccgtcctgggctgggggccaccctggccgcgtggtcaccggcaagaag

SEQ ID NO: 22644 - DNA, 32 bp, Homo sapiens; identical to SEQ ID NO: 16151
  chr9:140030217-140030249
  hypo

SEQ ID NO: 22645 - DNA, 374 bp, Homo sapiens; identical to SEQ ID NO: 16153
  chr9:140265361-140265735
  hypo

SEQ ID NO: 22646 - DNA, 183 bp, Homo sapiens; identical to SEQ ID NO: 16154
  chr9:140265902-140266085
  hypo

SEQ ID NO: 22647 - DNA, 422 bp, Homo sapiens
  chr9:140267962-140268384
  hypo
cgctggccccggcagctctccagcatgtccagaagcccggccagggggtcgtccaaggcagcaaacccccgccaggcttcctcccggagctgtggagacacaaaaccacactggcactttgtcttgcactcaaagcctcctggcaaggcctccccaccgcagagaggttttttaaaatttaatccattcagaaggtagctgtggccattcagccgccatctgcgcctccgtgacttttcatgccgccgttctggtccgctgcaccccaggcccccaggggcggtggtcattgtctgcactaattatcccataaagacagagggcctgttctccaggcagacagagggccgctggcctgggaggcaaccgtagcccgagccacaggttcacaagtcactttacctgcggcactcgcgggacac

SEQ ID NO: 22648 - DNA, 407 bp, Homo sapiens
  chr9:140400469-140400876
  hypo
agtgcaggaagaccctggcacggtcacatgccatccccagatcagaagtggcactgcctgggccccctacacacagaggggacactcaggacacggttcgctaggccactgacacaaacgtccgcggtgtgggctgagcacaccctgcagtctaaccacacagaccccggcagctccctcgagggagtcgggccctgagatccctccacaccctgctttctttcggcatctgcctcaatggctctgtgacccaccagctacaggttttctccgcagcttaaacccacacggtgccttcaacatttctgggcactgataaaggtagcccggtcggtacctaaaacacggaaggaaaccagccctggtcctgagccaaattcctcaaaccttgccatgcgtgccacacc

SEQ ID NO: 22649 - DNA, 235 bp, Homo sapiens
  chr9:140400905-140401140
  hypo
agagcaccctttctcttgctgtccatctcagggatgctgccgccctctgtatgtgagctcccctaacgggtgccctgggccgtcacgctggtgctttgggcttggctctttgcagtcccagccccatctcagaggttcgctcttcgcagtccagccccatcttggagggagggggttgaggcaccccctccaaagagctcccctgttgctgcttttgggcggcctcgggctgagc

SEQ ID NO: 22650 - DNA, 232 bp, Homo sapiens; identical to SEQ ID NO: 16157
  chr9:140645189-140645421
  hypo

SEQ ID NO: 22651 - DNA, 71 bp, Homo sapiens
  chr9:17905988-17906059
  hyper
cgtgcctacccagctgtcgtgggtccccgtcactcccgggcgcatgttgcaaaacaaatcaactccatggg

SEQ ID NO: 22652 - DNA, 258 bp, Homo sapiens
  chr9:17906726-17906984
  hyper
gcctgccggccgccgccgcggagccaccgcaatcagcgcaggaggcggccacctcttcgagggaggggtctcgcctgagactccccttggtccccgccatggggaccatggcacgactggaggcgccccagtgccccgggttcctggcccgcctcctcggtggcacctggtgcctgctctgtatcgccggacaggtagggtagcctgtgcgtcttgcgtccctcccggggactctgcttctaaagcctgtgctacagc

SEQ ID NO: 22653 - DNA, 93 bp, Homo sapiens; identical to SEQ ID NO: 21556
  chr9:214559-214652
  binary

SEQ ID NO: 22654 - DNA, 169 bp, Homo sapiens; identical to SEQ ID NO: 21557
  chr9:215348-215517
  hyper

SEQ ID NO: 22655 - DNA, 135 bp, Homo sapiens
  chr9:23831484-23831619
  hyper
aagaagactgaggcccggggagacacagcggctagagaaacagctgtcttatcagcccgctgcagagatggagatggcttgagaggtcctcaacagataatcacttgaataggtttgcaatgcgccaaacttcac

SEQ ID NO: 22656 - DNA, 41 bp, Homo sapiens; identical to SEQ ID NO: 8815
  chr9:35676180-35676221
  hyper

SEQ ID NO: 22657 - DNA, 167 bp, Homo sapiens; identical to SEQ ID NO: 7619
  chr9:4864421-4864588
  hypo

SEQ ID NO: 22658 - DNA, 70 bp, Homo sapiens; identical to SEQ ID NO: 10852
  chr9:6412900-6412970
  binary

SEQ ID NO: 22659 - DNA, 62 bp, Homo sapiens
  chr9:71760295-71760357
  hypo
cggcctcaaagatttatgtgcggattaattggagtgtacattagatcgccgtgtttaaaacc

SEQ ID NO: 22660 - DNA, 45 bp, Homo sapiens; identical to SEQ ID NO: 6327
  chr9:71789757-71789802
  hyper

SEQ ID NO: 22661 - DNA, 102 bp, Homo sapiens; identical to SEQ ID NO: 10027
  chr9:77111662-77111764
  hyper

SEQ ID NO: 22662 - DNA, 330 bp, Homo sapiens; identical to SEQ ID NO: 16168
  chr9:81892891-81893221
  hypo

SEQ ID NO: 22663 - DNA, 167 bp, Homo sapiens
  chr9:82185179-82185346
  hyper
cgcatagaaataaacgtctaaaacccagcctgttacattagccaacactcttcttgactttttccgaattttttccctgtccccaagattagccgctcgctagaaaagactgcgagcctcagcagcctccccttgaactggggcgctgcctccagctggacacggac

SEQ ID NO: 22664 - DNA, 261 bp, Homo sapiens
  chr9:82185383-82185644
  binary
tttcccaggcccctccctaggggtgcccctcctcagccatggctgcccctttctctcctcctccagcatctgcccctggggccacccccacctttccgccatctctcgggcccgcgtggcaccctgctctgtttttaacggggataaacttgacttgcttctccaaagagcgggaaaaagaggcgcagtcttggtactgatctgggggagggaacgtcccagggcgcgcaggggcgttttctacccgtgccccgtcggcct

SEQ ID NO: 22665 - DNA, 469 bp, Homo sapiens
  chr9:82185703-82186172
  binary
ggaggtccagcgtctctgattcccggatcttcagccccacccggagcccccacggttactgccccccgcgacccccgatggagcgtcgggatgcgctttctctccgagtgcctccgggggtggagggagggaggcctgtttcggaactaaatggcaatcacagcccccgcggggcttggagggacgagctccccgcccaccccgcggccccggccccagccagcatctcgcgactccatttctggctctaaacaagaacggggaccgagtcgcgttcacacggaaaattatgccggctccagcggcgcgtaaaattgatgtgaaccgaacgaagtaagatcagcgtgatcctccccctcttgtctcaacaggggtttcggcgcgttacacaaggccgagcttgtctctttaaggagacattggaccctaattagtccgcattcctggcgcggctgcggagcgaggggcc

SEQ ID NO: 22666 - DNA, 396 bp, Homo sapiens
  chr9:86590191-86590587
  hypo
cgtttgggtgggcaactcacggtaaaagttcagtgacaaaaagacttaatggggaaaataagacagaaacttgaaaaacaatacaccgtctaaaggggatactatttaattatataaaaggcaggtaataaaatacatttctctctttctaatcaggcagtgaggcataaactgttgggacataccgctcggggccactgctgtctgggactgaaacactggcattgtactgcattggtcattggcgttcgtggatgttggcattgggcatgggcattcaatcagaagttgtcaagtatggtacccgtttggcaacgagcacatttttgggcatagccaaccagggttttcacatgggcgttcaggggcggatgggccaacgtcatggtgggcaac

SEQ ID NO: 22667 - DNA, 146 bp, Homo sapiens
  chr9:95381233-95381379
  hypo
cgaattcccagaaacagaggggactggacaaaactagtgacattagggagaggggcggcacataggctggttattcagaagaggaagcagaatgaatgcgcgcctcacaggctttcaaatgactgtggtggtaaaaaggcaggtgc

SEQ ID NO: 22668 - DNA, 393 bp, Homo sapiens; identical to SEQ ID NO: 10035
  chrX:102862914-102863307
  hyper

SEQ ID NO: 22669 - DNA, 84 bp, Homo sapiens; identical to SEQ ID NO: 10036
  chrX:110924337-110924421
  hyper

SEQ ID NO: 22670 - DNA, 157 bp, Homo sapiens; identical to SEQ ID NO: 10037
  chrX:110924466-110924623
  hyper

SEQ ID NO: 22671 - DNA, 85 bp, Homo sapiens; identical to SEQ ID NO: 10038
  chrX:123094093-123094178
  binary

SEQ ID NO: 22672 - DNA, 87 bp, Homo sapiens; identical to SEQ ID NO: 10039
  chrX:123094335-123094422
  binary

SEQ ID NO: 22673 - DNA, 198 bp, Homo sapiens
  chrX:123094505-123094703
  binary
cgccggatccgaccgccactttcaaaaccccccaccgctctagaaccgcgggagcttccgtccctgagtagaattcgagggtgtaaagaagaggaaggggaaaaatatcttgtaccagcccaggggtgaagaagcccccggcctgagaaagaaggaggagtgggggaggcgaacagtctcgttgctgcctctgtgtac

SEQ ID NO: 22674 - DNA, 856 bp, Homo sapiens
  chrX:129146935-129147791
  binary
cggcagttggaagtggcagcaatgcccggggggcagacccagatggcagtgctacagaaaaacttgggcacaagtcagaagacaagcctgacgatccccagccaaaaatggactacgctgggaacgtggcagaggctgagggcttcttggtgcccctgagcagcccaggagacgggctcaagcttcccgcatctgacagcgccgaggccagcaacagcagggccgactgctcctggactccactcaacacccaaatgagcaaacaggttgactgctcacccgccggagtaaaggctttggactctcggcaaggtgttggagagaagaatactttcattttggcaactctgggaactggagtccctgtggaggggaccctgcccctggttaccactaacttcagtcctctgccagcccctatctgtccccctgctcccggttcggcctctgtgccccactctgttccagatgcattccaggttcccctctccgtccctgccccagtcccccattcagggcttgttccagtccaagttgccacttcggttccagctccttcccctcccttagcacctgtcccggctctggctccagcgccaccgtcagtgcccacgctcatctctgactcgaaccccctttctgtttcggcctcagtcttggtgcctgtgccagcttctgctcccccttcaggcccggttcccttgtcggctccagctcctgccccgctttcagtcccagtttcagctcctcccttggctctcatccaggctcctgtgcccccttcagctccgaccttggttctcgctcccgtccccactccggttctggctcccatgccagcatccacgcctccagc

SEQ ID NO: 22675 - DNA, 116 bp, Homo sapiens; identical to SEQ ID NO: 10040
  chrX:129171389-129171505
  binary

SEQ ID NO: 22676 - DNA, 158 bp, Homo sapiens; identical to SEQ ID NO: 10041
  chrX:133507338-133507496
  binary

SEQ ID NO: 22677 - DNA, 305 bp, Homo sapiens; identical to SEQ ID NO: 6329
  chrX:13706949-13707254
  hyper

SEQ ID NO: 22678 - DNA, 562 bp, Homo sapiens; identical to SEQ ID NO: 6330
  chrX:13707434-13707996
  hyper

SEQ ID NO: 22679 - DNA, 958 bp, Homo sapiens; identical to SEQ ID NO: 10044
  chrX:13752377-13753335
  hyper

SEQ ID NO: 22680 - DNA, 97 bp, Homo sapiens
  chrX:14048211-14048308
  hyper
tgcaccgggcggggcactgggactgtggcgggcacccgcgccgggggtcggacggtgcttctgcaccggcgagataagggtcgcttctgcaccgccc

SEQ ID NO: 22681 - DNA, 132 bp, Homo sapiens; identical to SEQ ID NO: 6331
  chrX:15511311-15511443
  hyper

SEQ ID NO: 22682 - DNA, 140 bp, Homo sapiens; identical to SEQ ID NO: 6332
  chrX:15511544-15511684
  hyper

SEQ ID NO: 22683 - DNA, 117 bp, Homo sapiens; identical to SEQ ID NO: 8820
  chrX:15755988-15756105
  hyper

SEQ ID NO: 22684 - DNA, 300 bp, Homo sapiens; identical to SEQ ID NO: 8821
  chrX:15756366-15756666
  hyper

SEQ ID NO: 22685 - DNA, 225 bp, Homo sapiens; identical to SEQ ID NO: 5860
  chrX:16730628-16730853
  binary

SEQ ID NO: 22686 - DNA, 35 bp, Homo sapiens; identical to SEQ ID NO: 5861
  chrX:16730902-16730937
  binary

SEQ ID NO: 22687 - DNA, 328 bp, Homo sapiens; identical to SEQ ID NO: 6334
  chrX:16888225-16888553
  hyper

SEQ ID NO: 22688 - DNA, 187 bp, Homo sapiens; identical to SEQ ID NO: 8822
  chrX:23801086-23801273
  binary

SEQ ID NO: 22689 - DNA, 129 bp, Homo sapiens
  chrX:2846679-2846808
  binary
cggggaacacggccgtgctggaaggcatcgagctggggggttgggggcgggacggggtgcctcttaggaagtggggcgggcaaggctacgcttcgggggatggagccttggggcgggacggggcgcgtc

SEQ ID NO: 22690 - DNA, 220 bp, Homo sapiens
  chrX:2846856-2847076
  binary
ctttgaaggccgaatccgggcagcggtgtagctgggcgtggaaggcggaggacccagcagggcgtgaccggcccagtttccgctccctccgggtcccggccagccttcctccgccctcccttcccttcctcctttgttctctttccctgcccttccgccttcccttcagttcggtctcctccacccgcccttcgtcccctcagtcgccccccatccctgg

SEQ ID NO: 22691 - DNA, 314 bp, Homo sapiens
  chrX:2847196-2847510
  binary
tcgccgtgctcgcgaccccctccccaggcccccaccctaggccttagtatgggccgcgtcccggggtcccaggcacctggcggcgggcgcggcgcgtcccctccgcgcggcggatcgcatggccgagcgctggcccagagcgcaggaccttgccctgcgcactccgcgcccgggcgccgctagtgccaaggcttccgccctctcagctgcgggatctgggccgggcgcccgcccctccttcatccgcgtcatctcctggctctcgggacctccgggacctgcgcgtggaaacaggttttcccaggtcgtcacac

SEQ ID NO: 22692 - DNA, 363 bp, Homo sapiens
  chrX:39680202-39680565
  hyper
cgcacggcttggagcgggcgtataaattaaccgggggccgcagagtgaatacattgcacgcggtatttattatgcggccggacctccgaggggttctccggctcccggacgtggcaaatcttgtccggagcgccgctggccgcgctgccaagggctaggacgagaggacccgtggcggggggcggggggcttctcctccagtcctcgggagccccggggcagcccgcttacagcggcggcagcggggagggtttaggcgaggagagacgcggccccgggcgccgctcgggctaggggccgggcggggagggcggggcggtgggagcgggcggcgcgcccggccccttagcattccgccggcgc

SEQ ID NO: 22693 - DNA, 172 bp, Homo sapiens
  chrX:39680630-39680802
  hyper
cgcttttgtgctcgccgggcggtgggtgcggggaggcagttctaatagttgtcattagggccgggggaggcggggcgccgggggctgagggtgggagcgcgggggtgggggaggcccgccattccctcgctggctcgcttgttcgctggcggtcccaggcggcgcgcaggcc

SEQ ID NO: 22694 - DNA, 100 bp, Homo sapiens; identical to SEQ ID NO: 10052
  chrX:39871661-39871761
  hyper

SEQ ID NO: 22695 - DNA, 187 bp, Homo sapiens; identical to SEQ ID NO: 10053
  chrX:39871778-39871965
  hyper

SEQ ID NO: 22696 - DNA, 510 bp, Homo sapiens; identical to SEQ ID NO: 10054
  chrX:39873113-39873623
  hyper

SEQ ID NO: 22697 - DNA, 794 bp, Homo sapiens
  chrX:39873679-39874473
  hyper
cgcgcgcgcgcgcgcgctcgagtgccgggagggcagttgcgaaacgggctcttggctgcagcgcggcataatggaggtggctggaacaatgcgcgctttgtgcgcgcggggagttgttttccacccgcctcgccccccttgctcgggccgtatggcactttaatctccgccacgactcggcacaaatgcacttgtgtcctgcgggtcactgggggccgtgcggctggagccgcccccaccccgacccccgcggaacccaccgccggctgccccatcttccttcctgagcaccccccaccaccacctcaattcccggcgtgggccggtgagctggcgtggaagcttccgggcccgccggccacttttattttccgtgaagacggcccctcccccgctccacgagcgcgcgcgcgcacacacacacacacacacacacacacgccgcccgcaggccccacactcaccgccctctctcgcctagcctctcctcggcccgcctccgcccccgcccccgcccccgccccgcgctccggactcctgcgaacaatagtaaatgtcaacagattccgcgcggcgagtgtctgactcggccgagataagggtgcgcggttggccccgcgctcctcgtcgccgcggggggagcccaccctgaccccggctggaaggaaccggctgtgactaaacccgtgccgggagaggggggcgggagggcagggcaccagtcccagctcggtggggcagcctcgccaggagaccaggccctgccccgcccccaccccacttaacccgttgcc

SEQ ID NO: 22698 - DNA, 223 bp, Homo sapiens
  chrX:39921413-39921636
  binary
cgctgcagaagggtctcgccagcgttcttattgacaataagtctccgtgcttccggcggcatagggcgagactgggtggtctcctgaggggaacttgagcatggcagctgtgtggactgggaggctggtagcagttgctgcaagcggtcgaagggctttggctcctgcttggctggtgacagatcatagtccgaactgggctccggccgctttctgaatctcc

SEQ ID NO: 22699 - DNA, 301 bp, Homo sapiens
  chrX:39922006-39922307
  binary
cggcattctccacgtagtattcccctgtcagtggcaatccccgcctggactcctgagggatcaagtgtttggttttgcacagtctcttcccggatggcttctcgctgttgtcggtgtatttctgcagcagggaggcagcctggcaatcctcttcttcgtctgcacacagcacatctgtcttctggttttctttaattttctgctgtttggcaggcggcctggaggctggtgcgcagcttggctgagcctgctttttgccgcctgcactggtggatgaaagactcttcatgggcggagagcc

SEQ ID NO: 22700 - DNA, 863 bp, Homo sapiens; identical to SEQ ID NO: 10055
  chrX:39931611-39932474
  binary

SEQ ID NO: 22701 - DNA, 892 bp, Homo sapiens; identical to SEQ ID NO: 8823
  chrX:39933533-39934425
  binary

SEQ ID NO: 22702 - DNA, 928 bp, Homo sapiens; identical to SEQ ID NO: 10056
  chrX:39953710-39954638
  hyper

SEQ ID NO: 22703 - DNA, 1939 bp, Homo sapiens; identical to SEQ ID NO: 10057
  chrX:39954918-39956857
  binary

SEQ ID NO: 22704 - DNA, 879 bp, Homo sapiens; identical to SEQ ID NO: 8826
  chrX:39957026-39957905
  hyper

SEQ ID NO: 22705 - DNA, 514 bp, Homo sapiens; identical to SEQ ID NO: 8827
  chrX:39958064-39958578
  hyper

SEQ ID NO: 22706 - DNA, 634 bp, Homo sapiens; identical to SEQ ID NO: 10060
  chrX:39963967-39964601
  hyper

SEQ ID NO: 22707 - DNA, 285 bp, Homo sapiens; identical to SEQ ID NO: 10061
  chrX:39964630-39964915
  hyper

SEQ ID NO: 22708 - DNA, 1317 bp, Homo sapiens; identical to SEQ ID NO: 10062
  chrX:39965255-39966572
  hyper

SEQ ID NO: 22709 - DNA, 622 bp, Homo sapiens; identical to SEQ ID NO: 10063
  chrX:39968299-39968921
  hyper

SEQ ID NO: 22710 - DNA, 247 bp, Homo sapiens; identical to SEQ ID NO: 10064
  chrX:39968950-39969197
  hyper

SEQ ID NO: 22711 - DNA, 2389 bp, Homo sapiens
  chrX:40012149-40014538
  hyper
cgagagggcgggaggagacagggagacttccgcgggaggccgatggtcaaagtggggggtgaaaccgctcagggtgaccgggctggagacccaggaacccgattcggcgcgaaggtgccgcgcgagttccagcgagcagcctgcccggccaagtggcgcctgcccagccgtcggccgtgccagcttcctgccctgcccaggaccgcggagcagtcggggacgccgccgcaggctggcccggaatcgcaggacagcggcggggggagggggtagccaggccgcaagtaaactcgcactagagctttctgcacacctccgccctagagagggggcccggacccccggtctgtgaggcgtcggctttggccttccaaccttggggtgcgcgaggaagcaaagacccagggggcacccccaccctcgcccaaggcccgagggtgggggacagctgaaatgtctttggtcttgtttgatgaccgcttggcggatctgctcccatccgggttctgccgttccgagagtgccgggtcagtgatacccaggccggtctgagcaggcatgtggatgagcaaaagcaaatctgtcgctcctccgaccgccacccctcacttaacctttcctgcatccaaggaaggggagggcacccagactctgccccaccccccgcggggcgctccctctgcctcggaagctgagactaagagcgagggttttccccctttcccctgggctcgctgggtttctaacttcctctaaacctccctcctcgctccgaaaagccccgaggagaggagctgagaggaagcacgccgctagtgtgcaaaatgaagaccatgtgtgaggacggcggcatcagagtgcagccgcgggggttagggggtggcaaaggcccccgcgcggccggaggctcggggccgcagcagccagtgcctctgctctgcgttggggactcggagccgcagcgagaggcagtggagaggcagggctggcctcgtggcgggaggcgaggagggggtgcgagggctgccgcgccgtggggggcagggggcggggacgcagccccggcttcctgggccgcagctgcgaccgagggcgcaagagcagatcgtgctctgcggcggtggcggctcgggcccgccgctctagcagctgagaatcaacaaagggaggcggcgggggaggggcgccaccgagcgttcgctggctgctctggaataataaaaaataattaataatgataataagagaaaaatcccccggctttcatggctctgggtttccgtgtggctgcagcgggaagcgcgctgtccttgaggcggcctctctcgcctggcctgcccgcccctccccctcctcgccccctcccctccccaggaaccgggaagagaaaggtctgcagctgacaaatattatccattctccccatcgatcgcggagtgtacagatgtgagcgcttgatgtgcccgcggagcggcggatcctccctgctcgctcgctctcgcccaggctccgctcgccgtccccctcctccccctttgttctcctcccctttccctctctttaaatagatttcagggcgctgcctgttggagagcagctggcgatctctcccgagagagggagcgagcgaagcccgaggtgccctgtcaccagcctcccctcccccacctcggcttttctctacgtcccccccaccccacctttctccagtttccaaaatagaaaacaccgggaacacccacgtccactgcaccgcgagcccctgggagcctttggacccctcgtgctgttccttgtgtctgtgtctgtgcagaggaagggcagtgcagggaggggacccagggccgcggcagaagagccaagggtccggatctttccctggcagcagcagggacgcagcgtgggtcacgctaacagggtacagtttacccattagggaaagtcggcggagacggccctgttattcctcttttgcagatggcagattaatccggcagcacccggcctcaaagggaccggctgctcggcaaagggttaacccgtcggccggtaatcgtggacacgcgcgcacacacacacacgcacgcgcgcgcgcgtcctctccgcctgcccgagcgcccgccgcggcccgcagtgcgcccggggctgggggagtagctgcgggaggggagggggtcgggggaggggcggggcgggcttaaccaggccgctcgactgagccggggccacctcgccgtctgtcacttaaatgattgtcctccgctccgctcagtgcggtcagtacgggctgttaacaggcagttgcaatcagtttccgaaaggtcagccaaggtcctccggctctcgcagacggaaggcattacgaaaccgcttttgtatctgcaggcac

SEQ ID NO: 22712 - DNA, 298 bp, Homo sapiens; identical to SEQ ID NO: 10068
  chrX:40014669-40014967
  hyper

SEQ ID NO: 22713 - DNA, 145 bp, Homo sapiens; identical to SEQ ID NO: 10069
  chrX:40017447-40017592
  hyper

SEQ ID NO: 22714 - DNA, 32 bp, Homo sapiens; identical to SEQ ID NO: 10070
  chrX:40017968-40018000
  hyper

SEQ ID NO: 22715 - DNA, 227 bp, Homo sapiens
  chrX:40030835-40031062
  hyper
cggatggaaaccgaggcacgcagccctcgaccccggccaggcgtggagtaggggagcagggggtgccccgcgtgggcgcaccctaagaaaccagtgcggacatggcgagcgagaccagagcgcagttgtgtgtggtttttccccaggtttttattcttccagccctgtggaaaggaggagagccgcaacccggagagggagccggaaagaaacacttaatcaccggc

SEQ ID NO: 22716 - DNA, 216 bp, Homo sapiens
  chrX:40031175-40031391
  hyper
cggcggccggctccggctcacagagcctctctcaacgccggcaagtgcagccgggccgcccagcccccaggccagcctggccccctctgggcctggggttggcgagggcagctgggcgtctgcgctgcccagcccagccgcggatccatggggtttcgcgagctgaaagtaaaggcttgagggagtggggacacccacaccgacccgcggcacgca

SEQ ID NO: 22717 - DNA, 662 bp, Homo sapiens
  chrX:40031434-40032096
  hyper
actactagcggtggccggaggctcagccaccttcgcgggagaggggatttaccgccaccctcatccacgcgcaggccccaccgcccggtcctctcctctgatccccgggccattgcgaaacacggagcgaacaggtcctcgccagcagccgtcatttcccgggaagatgggaacccacaagcctgactgtgcttcctaaggatactagcgtgcgcgcagaccttggggggaaagagggcagcgcggtctccccgacccggactcttccctggcgcagcacacaaccgccacgggcttccgaagcgcccgagcggggaggaggaaggaaaagcggaggcccgggaggcgggctgcgcgcttggaagccgtgtgtgtttatgtgtctgcgcgcgcgccctggccggacgggtgttgaggggagagtgatcgtgagcaacccggaaccagcagtcccaacctggactgacgaactgggctctccagtcctgggccgtggggctccatgcctcgggctggcgggacaagcggcggggagcccggagcttcggagccgccgccgggcatctagccagctccgcgggagaagcccgggggcgcgtcgggagccaggggactggtgtgaactagccgcccccgcaggcggacgtttagctccggcaccc

SEQ ID NO: 22718 - DNA, 187 bp, Homo sapiens; identical to SEQ ID NO: 8828
  chrX:40034239-40034426
  hyper

SEQ ID NO: 22719 - DNA, 668 bp, Homo sapiens; identical to SEQ ID NO: 8829
  chrX:40035057-40035725
  binary

SEQ ID NO: 22720 - DNA, 721 bp, Homo sapiens; identical to SEQ ID NO: 8830
  chrX:40035852-40036573
  binary

SEQ ID NO: 22721 - DNA, 61 bp, Homo sapiens; identical to SEQ ID NO: 6336
  chrX:40126403-40126464
  hyper

SEQ ID NO: 22722 - DNA, 205 bp, Homo sapiens; identical to SEQ ID NO: 6337
  chrX:40506434-40506639
  hyper

SEQ ID NO: 22723 - DNA, 76 bp, Homo sapiens; identical to SEQ ID NO: 8831
  chrX:68758240-68758316
  hyper

SEQ ID NO: 22724 - DNA, 563 bp, Homo sapiens; identical to SEQ ID NO: 6339
  chrX:71525281-71525844
  hyper

SEQ ID NO: 22725 - DNA, 886 bp, Homo sapiens
  chrX:71525998-71526884
  hyper
cagatgcggtccgggagattagcaaagtcggtggaagccaagctggagaaagcgcgggcgcagggagaaaaggtgctgccgtctccccgggagaagcgggcacccggccccgctggccggcaggggggcgcgctggcaagcgaacccgagcgctggcgggcgggcgggcgggcggcccctcgcccccagcagagcagctttccaacagaaagcaagtctccccagaaccctccggcccgcctggcggccgcccactccccatacccgctccacgggagtcctcggccccgccgcccagcccggcgcccagcccggcggcccggcttacctctgagaagccgcctgccctggagagagggaagcgcggagctcggtgagccgcaagagaggcggcggagcccccagcccctggcacgcacgccgccgccaccgctaccgcgaaccggtcgcgctcagcgcccgcggccgcgccgttggccacccgaccccggggcgcctgggaaaagcccgcaccgcgccgcgccgccgctgcaccgcacagtgccgcgccaagcagcccctgaccgagctggtgcccgcccgcccgcccgcagcttcggcgccggactccggggcggtggcggtggcggccaccgcgctcccttcccggcgctggggacccggctctcaagcccccattgccgcccggagagccctgacgcacacgcacacggcagcagactggcctcggctaggaatcccaggaaggacagaccctttttttccctttttttttctcccctcaatttccacgtctttataaccggcttagggcattattagcacatgtcctggctcgtgggcgagttggtggcaaaatctgaactggatactcacggagggcccg

SEQ ID NO: 22726 - DNA, 249 bp, Homo sapiens; identical to SEQ ID NO: 10078
  chrX:71526917-71527166
  hyper

SEQ ID NO: 22727 - DNA, 214 bp, Homo sapiens; identical to SEQ ID NO: 10079
  chrX:8699223-8699437
  hyper

SEQ ID NO: 22728 - DNA, 99 bp, Homo sapiens; identical to SEQ ID NO: 10080
  chrX:8699940-8700039
  hyper

SEQ ID NO: 22729 - DNA, 597 bp, Homo sapiens; identical to SEQ ID NO: 10082
  chrX:9432830-9433427
  binary

SEQ ID NO: 22730 - DNA, 242 bp, Homo sapiens; identical to SEQ ID NO: 10083
  chrX:9433471-9433713
  binary

SEQ ID NO: 22731 - DNA, 284 bp, Homo sapiens
  chrX:9433838-9434122
  hyper
tgccgattcaggggcttgctgggcaaacctgcgccaccgcgggctccggggaccggggtggagggcggtggcgggatttccccgctgttggggagaagagccccattcatacccgggacgcgggccggccctcccggacccgggtggaagcgcagcctcgcggagtggggcaagcggcgggcgaggtggcgcgggccccgtgtctgctcagtttctgacgcgcagaaactgtcaaggaagtcgggagccccagtcctccgcccatctccccggcctgagcgcac

SEQ ID NO: 22732 - DNA, 245 bp, Homo sapiens; identical to SEQ ID NO: 10085
  chrX:95940048-95940293
  hyper

SEQ ID NO: 22733 - DNA, 147 bp, Homo sapiens; identical to SEQ ID NO: 10086
  chrX:9753679-9753826
  hyper

SEQ ID NO: 22734 - DNA, 300 bp, Homo sapiens; identical to SEQ ID NO: 10087
  chrX:9753862-9754162
  hyper

SEQ ID NO: 22735 - DNA, 1247 bp, Homo sapiens
  chr1:101702006-101703253
  binary
cgatcctcctagggctgcggggggtgtgggaccagggcggtgcgctacgagactccgggccgtcctctgcctcctcagacttttcgagagaaaagttttcaaagtctctccaccttttttttttttcaggggctcgggagaatcctctccacagccagggatcagcgtctatctgggcgagggcagtgatttatacagtagaatccaggggttaccgggctccgccccttctctctctctctttttttctttcatttgttgtttggggaggaggggttcttttttttttttttttttttttttttgcttctgccccagatctttcctggacagtgcgtctcagcagttcagatccgggggcccccagctgacagagggcgtggggggttaaggcattaacccctcccagcctcttcctgaagaaaccacccagccttggcgcggcgctgggtgacttcgcgtagcaggcagggaactggccgcggcgagcgggactggccattggagtgctccgctgcggagggaggggaccccgactcgagtaagtttgcgagagcactacgcagtcagtcgggggcagcagcaagatgcgaagcgagccgtacagatcccgggctctccgaacgcaacttcgccctgcttgagcgaggtagggggcggcgaatggcgggggtcgcgggcgcggggagcccggttgtggtagggcttaggtgtcagaaacgaatttttaagtcgaacgaggcaaacaaaaacttagaaaacatgcatctccgggcgctgaaaatttgcatctctgggctactaaggagcccatctcgatcagattgttcttgggcacttgtgatttatggagttcagaaaaaaggttaattcccaactgtggaacctacgggtgtaggggcagtgaaaattgcagttggtcggaggaataggagggaaggcgttaaattttggaaatcctatagacaaagaatatggtgggtggtgtggagcgtgggtaatggcttaaattagtactgcccaggagcagggtataaaattagttgggggaaaatgcggagcttcttggcttgagcagcctctgctgttcgcggagttgctgggattgttctcatctctattacctcattttattgcattgctgcattaccttgaaatatttaagcaacttagaagtagacttctgctgaccagtgccgtcttagaaagtttctttgtaactttctagtcctaggagaggagtcaac

SEQ ID NO: 22736 - DNA, 2283 bp, Homo sapiens
  chr1:108506290-108508573
  binary
cgtcatagaggattagtgctgaaatgtgtcagggagagggctctgtcctctcccttttaagttgaaagcagtttggttttttgttttgttttaacattctgaaagagaaagaggctctgaaccgagtttaacatccttctgtacaaaaattttccgacaggacaaataaactactcttccactgaactgtgacttttgagctgactctagggtgcacccaaccttccagaggtgtctggcttaaccctcaaagaggcagctccagccccaggagccgaccggcaccacagcacctgagcagggcactgcaggaaggaaagcggaatctctagtgaaacttctcatttcctgtcgctgctgagagaggctggactcgctccttctcacatggcttaggaagagctgtaaacgggagcttgccggctggccaccagctcaggggccctgggggcggcctccgggttctgctccctgttcttccctttgaccaatgtcactcctggacagataacgggaccaaacgcccttcacttcctcgagtcctcatgtatgtcatggttcctcttttaggaaaacatgagtacaagacgcaaagcaaaagaagagactaaaggcaaattaccccatcacctcgtttcgtccctccccttcgttattatagaagagcttgatcaaattccctttgtcgcgccacacacacgcagagtaggtgaagggcaccctaagacaacttatttctttcccgcctcacagaaagcctttacgaaatcctcacaccatctccggacgcaaagctttcgcattcagcttgaggagctaaaccatttcaagccaaggtaggaaacgccaaagtggtgccgaagtggtcccaaagcagaaggctgggaagcagggcaagctcagcgcacctagacgtttgcatttacacaaagaaattagccgcatgattaatgggagctgccggctggaggcggggcgcccgtgccggcctcctcacctgggacatctgcggcctcaggttgatctccttcaggttgatggagtgcgcccggaggttgttaagcagctggcagagcaggactccatcgcggagggtctgcgcaaggtcgaacacctgagccgagtcccaggtcacccggtggttggtgggcagcaccttgcaatggatgagccactgcgcgcactgcttccacggctccatgcccgacggctccgggacgcggctgggccggggcgggcggcaaggatgcggccgccgccgccgccgccgcggttcctccgcgccccgccgacgccaacagccgccggccctttccccgcgcgggatcgagggagcaggagccgcggctgacgggtcgcgggcgccgcgctaggctcggctccggtcccggcccgggtgcgccgcgacccggccgccgctgcagcgagtcccgcgcgctctccgtgcgccccggccggctcggcggcggctgccgcgcacaggcttccgactccagcgcccggcccgccactgagcatgcccagcacgccggccggtctcgctgcggtccgcaagtccccagacgcgcgggtgggagcgcgccggcggccggggctggggtctgtggccgagggcggggcgcgggggaggggccggcggaggggggcggcggccagaaaggggatcccgcgcccccgcctgcagccttgcggggctcacgcagcccccggcgtcctggggtcttctctcggggcggcttcccggctttgcggggagtgtggctgaatactgtaatacgatggggtcccccaggaccccctaaacaacaaatgctcaaaggagcgacggattaattggggcacccagactccccagagcaatgaaaaaagtgcctagagcatcagtagagcacggcgctgaaagttttagagatcgtcgccccctcgccccttgcagctctatcccctccattctctatagctgattcctcagcctattcctcctagttgcccctagtggtgttttggcaccctcaaagtgagtgagagtgcgtgtgtggagacgcctgcggaaaccgccccgatccctgagcctatttcctcgcgaggtgattttcacttggagctggtttgcccctgcactgtcaggctcggaactgtttgccgttgctgttctggcccttttgctgaccccacaaaaacctgcttgagaaaggcctgtgccacggtgctagactgcgcatgcgtcggcgactggcggccgggtttgagagcaaagcgcgttagccctgggcagctcctgcc

SEQ ID NO: 22737 - DNA, 1344 bp, Homo sapiens
  chr1:111216710-111218054
  binary
cggacacgatggcgatgccccgggccggcccggagctctcggggtactcgaagagcagccacacctggcgctggaagtcgcggcggggcaagggccgctcctcctcccgcaggaagccctcgtcctcgcggaacttctccatggcctcctcgcccagctggtagaagcggatctcctcggagaaaatgtcgatgggcacgttgaccggccggcggatgcggcccccggactgatagtagtagaggatggcgtcgaagctgggccggttgcggtcgaagaagtactcgttgcggagcgggtcgaagtacctcatgcgccgcttggggtcgcccagcagcgtctcggggaactggcaaagggtcttcagctgcgtctcgaagcgcagcccggagatgttgatgaccacgcgctccccgcagcagtcctgctcgcccgcggccggcagtgagggcggcagcggctcgtagcggtcgcagccgccgccgccacagccgccttgaggcggggcccctccaccatcggccacctccggctccagcaggtggtccccgggcaccacggtcatgtcgggcggcagctcgcggcctgcggcgggctccgcgtagccgtggttcaccagcgtgtgggcaccgccgctgctcgctgggcgctgaggagggtgggcgcggtggcgggctgagggcggcggcggcgagcgcagaaggctgaggcgctcgtccatgcggcggggaagaggcggcagcggtgaggccaggtcgctcctcctcgcgctccccgccctttcgccgcctccgcccccgagccgagcccaccgcctgttgcagccaaagccgcgatgctctgtctgggtctggcgcggtcagccgggctcccgcacggggacgcctcctccctccttctcgcgctctccgccccctcccctgcggggcgcgcgcccgcctccgcgtccccttaggattcccgcccaccgcgcgggcgcgcgtcccgctctcgggggcagccgccgggcctgcatttcttgcagccctcaaggcccctcggtgtcagcgaaagagccctcatgttgtacctcggcgccccgcgggaatgcccacccagcagagccggcccacggggagtcaggctgccggcccgggcccctaggctccgcccgcttctggtcagcgcccctcgcccccggcccgcctggccgcgtcccagtcgccagggttttcggcccgtgggccgggagagctcccgccgcggccccgcgggcgccggccccctggcctccacacccctaggtacagcccggggagggcaggcgggcccagtgtccagggagggagtgcaggccaggcgggc

SEQ ID NO: 22738 - DNA, 877 bp, Homo sapiens
  chr1:12123137-12124014
  binary
cgtttcttggggcaggagtggaggtgggggcattggaacccccttggggcctcctaatatcctgtgagtccccacctccagggccagaagctgcctgcctccgctccccgcagcccaggtgcggcgggcagcacactccctagagccaggaccactagttccgtcaaatccggggcgggccattcaaacagctaagggaggcgtctcctagtgtgccttttcctgagtcatctctgcacgtgtttgcccccttttttcttcgctgcttgtagctaagtgttcctggaaccaatttgatacgggagaactaaggctgaaacctcggaggaacaaccacttttgaagtgacttcgcggcgtgcgttgggtgcggactaggtggccgcggcgggagtgtgctggagcctgaagtccacgcgcgcggctgagaaccgccgggaccgcacgtgggcgccgcgcgcttcccccgcttcccaggtgggcgccggccgccaggccacctcacgtccggccccggggatgcgcgtcctcctcgccgcgctgggactgctgttcctgggggcgctacgagccttcccacaggtaagcgggtgacgggcgcctggggaggtgccggcggtccagagcccggacagtgtggggtgcgtgggacgcaagggaggacactcctcaccccgttccctgcccagctggagtgagggggcgcgggtgacaagcaggaacaccggaatatgctagcacccacaggtgggaggctggctgaagggctagtggtggggggcgcctccttctcaccccgcgatggctgggactgattcattcattcagtgtgaattggactgagagcactgccatacgcgggaggcgctctttagccc

SEQ ID NO: 22739 - DNA, 1264 bp, Homo sapiens
  chr1:166134181-166135445
  binary
cgttgccacctgctcagagtctagttctgaaaggaggcgggtgcggagttatgaaaatttggtaaatataaaagtcccggacgcgaccgcccgtagcctgcggcccctggcggttgaggagccgcggcgatccttggtcttcaccgcagcagccaagcccggcgcgcaccaaccggcgctgctgaaagttggagagctcccagctcgccgatagaattcggcggtgggcgccaggggaatcccttccagtgccgcaattaggaaagttttaaaaagtaaggaccctagacagacaagagatccatcctttcctttagcataagaaacaccccgcgccgcgccagccgaacgctgctcgcacaaggctatccgcccttcttggccgggacgcactcggtgccttccagctccccaccagaactggtccagggggcgcggaaacagagaggcaactgtgtccggcttgtggttccagacggaaacgcctccgggctccctggcccgggggacaagggttcgaaacttcaacagtcgcgagggcaaggacagaactaccaactcccgctcggatgcccgggacctgctcttccaagcccgctccggtttctccaaaggacgcgcggcacagcccatgcgcccccggcactccactccactcctctatggtttcccccaaactcttcccggggagccccacaaagcacagacggcgccctgaaactcgccaggcactcgccagccatccccacctccgcctctcgaaccctccttgtcgcgttcttcccgccccgcacctttctcctcgcgtttctgggaagtcagaagcaaaccacgagaaaatgccttcgcaaggagcctccctacacccgccctgtcactgaaacaaaagcgtagggaggagggaggtgggagaggaggcgggaggaaggtttagaaagacgatggggacagcagtaggaaggagctggggaggggggtcaaggtggcaagcagagctgggggcccagagtccgctcccgtgccgcgcggcgagtcgcttacatgcccaggtcgctgtaggtgttgaagaactccatctgattgcacgcctgaatccagcccaccacccaggtctcgtggcgggggatggggggcatgaccacgcgggcggaggctttgaagtagggggtcttgtagcgcaggacgatgggcgaggtctcctcgatgcgcgtggggcactggtcgatggtggcgcacacatcgtacaccacgatgttctcgcgcc

SEQ ID NO: 22740 - DNA, 772 bp, Homo sapiens
  chr1:171810215-171810987
  binary
cgcggattctggagaagggcgtgacagaggagatttcctttcgggaagtgtagtctggcagcggtgccccggtggtggcggcggcggtgctgctgttgctggtgatcgtgtggtggtgttagcggcgatagtgctttccactgggctttggcttggtagccgctgaaagagaacaacgctgccgctgctgctgatttcatgccatttcctgacccggcgctgtaacttggcctctgagccttggccacagaacgcagaggccgtggcatctggccgcagctgggctgcagtgcgtgcgcgcctggcctggtggtccgatgggaagcccggggcggggcagccgcggggcgggggcggggcgtcgcggagataggccacgcccctgcccgcccgcgcaggcgcgctgcgggtcgttagctgtcagagccaagcggcgggctggcggcgggctccgacgtctgcgccaggacctggctggctgagcccggcgcagcagcagcagccagggcagcgcggcccctactccctgtcaggtcgtagaggcgagcagggaccagctggtcgccggcccctcgggcaagatggggaaccgggagatggaggagctgatcccgctggtgaaccgtctgcaggacgcgttttcggcgctgggacagagctgcctgctggagctgccgcagatcgccgtggtgggcggccagagcgccggcaagagctcggtgctcgagaacttcgtgggcaggtaagcgcgcagggcgcggagtaaggatgc

SEQ ID NO: 22741 - DNA, 932 bp, Homo sapiens
  chr1:197887294-197888226
  binary
cggtcgtttttctgaatcgaaatgtctgcagctggctatcctccgtcgcagctgattccgaaagagcagggagaggaactgggaggaggtgggatggggggtggtggcattctcttctacagacctcaaggttcccttgattccggggcaggcgtctccccggcgaggatccgcagctccgagggcaagctgggcataagcaataggaggacggcgcgctgccgaggcgtccgagccaagcaggagcccaggtggccttagtctctgggcctgatgaccggacctgtggagtagattccgacgcgactgggtcatttccagttctctagacgctcggggcttgggacccctaaccgagagaatctcagggtttctggcatcccgactcagtccctctaaggagacagcactacgtttagcgccaggacccggcgggtgtcatgtgtagggggaaatcaaataaaacatacggaggagcgcggcacccagtcgaaacgcatgaactttataaccaacccttaaacaagctaatcaaccaccactgtttctactatccataataataaagtcatgtcctcttaataaagaaaactaattacttatctaagcgcttccctttccagattactaacggggggggggggggactacagaagtctccggaaattatttcggccaaacatagctgtgtagatcctttggtaccacagtaggacttgtagcccaaactaatcaggagactgctctagcccttatcagctgggttttgggtccggccaagtagcccaactggtgaacgtgtctatatttgtaacactcattcagtgccggggcccctggtcggagtaaagggctaaactttactttttcaggcccgctgaagtttcgtggggaagatcaacccatttctgctagtcgtgagggaaatgtcc

SEQ ID NO: 22742 - DNA, 829 bp, Homo sapiens
  chr1:207669273-207670102
  binary
cgagctgccatcatccaccgcctttgtctggaagcgcagggcctcacacgcgggatccatcggaagcccgagcattgtcaagctctgctgctgcacctgggtcagcaaggtgggctctgccagcgaaactcgttagaaacaatgcaaatggggagtaaacatgacctcgcccatgaaggggaagctgtggtcaaaagcattttgtcccggaaccccgcagccctccccacactctgggcgcggagcacaatgattggtcactcctattttcgctgagcttttcctcttatttcagttttcttcgagatcaaatctggtttgtagatgtgcttggggagaatgggggcctcttctccaagaagcccggagcctgtcgggccgccggcgcccggtctccccttctgctgcggaggatccctgctggcggttgtggtgctgcttgcgctgccggtggcctggggtgagaggcgggcgggcgtggggaggcgcccgggcggacgaggaacccggggccccgcagagaactcgcgtgcagcgctgagctgcgctgctctgcgcgcccgggtccgaaggcagcgcgatgggtgggctgagcgcgcgacccggcagggcggcgggtgtaggatccttctgcgcactggagaccctcgctgcttctgggtaagcgtggagttcccaggtgcaggggcttaagtcgtgacgagcgcagtggaaggcgcagatgctgagcgggtgccgcacgaaattccttgcctttgtgtattcacagcctcggctggctatagccaagacgtggcgttgatcctagtgaaagggaacttggggatcc

SEQ ID NO: 22743 - DNA, 1082 bp, Homo sapiens
  chr1:220101064-220102146
  binary
cgtggggtgagaagaaagggaccgggtgggaggaggaaggaagggccaagcggtccaaaggatgcaaccgaaaggcacctgctacgtttgcgaacacggtcgcccccttctcccgcttcctttccaccgaggtcccccggagggttacggccgagtccgagcctggggctgtcgggtccgccgcgcgccgcgggtcctccgcgccctgaggccccccgaaagcgccggggacacagccctccgccagctgctgccgctgctgcaggcggcgactgcgtccccggaggcagcacgcgaaccaggcggcgcagtcctggaagatgagcagccccaccacgttgaccaacagccccaggacgccgacgatgagcaccagctcggggtcatcgatgcgctcgggccgggccaggcgcagcacggcctccacgaagatggtgaagcagagcgcggtgaggaagaccgcgttgctcagcgcgcccaccacctcggcgcgggcgtagccgtaggtggcgctgaagccccgggtggggcgccgggcgatgtagccggcgctcaggcccacgcacagcgagatcaggtcggagagcatgttgaaggagtcggagagcagcgcgatggagttgcccaggtagccggagaccagctccgccacgaagaaggcgacggtgagcaccagcatgaagagcagccggcacgtcttgccagagtagcggcccatctcgccaccagccccgggcgcccggcgccgcccaggggagcgcagcccaccccgcgcgcagccacaggtggggggcgcggcgcggatccgtgaggcccggtacccgcctcccagattgtctcgccggccctgccccaccgctttttataacgcgaggccgagcgccaccagtccccgcacgtccagagtctaaaggagtggcgggggcagtatctgaacagcccgtgcaccgcctcccgcggcccttttcccctccctcgcggcctgggcctgacttggcaggtggccacgagccgatgtctctctttgtgggacaggactgtgcagagaggggcgctgcggaggagagggggcgtgtctggac

SEQ ID NO: 22744 - DNA, 2014 bp, Homo sapiens
  chr1:221051890-221053904
  binary
cgaaccccacgtgatccggagatgtggtggaggggtgaggctaacatttcctacaacctcctgcaaaggatggaagcgcgtgccgctctcccgggtttcgggaggcagcctgttttgtagcctctgaggctccggggaaaggtttggctgcgtctaagagagacgtttggagccatccgtcttattttgtttgaaaagtcactcgttcaatttgtcactgtgtgacagctcagaataaaaccaatttgcggccgcccctcctcctcgcttcccggaggatctcctgggaggcacgaggcggacgcggtgctgagttgggccgggactcagggcggcaacatttgggcaagggcccaggaaagatgaggggctttgccgaggacacggactcctggaataaaagcagaatgaggtcaagagaagggaagcaaaggggccaaagcgcgctccgctctccaccgggaggcgggctttgcagagccctaaagagtgagattaccgtcccttccccacgcccccaactcgccccgggtgacaagcgcttcaggaaagctcctgtgatcaaccctccttgccccgtggcggttcggagctgcagaagttagaagagagtcagagccctccggagcggctgcctggcccctacgcagagtagcaagaagcactgcgatgtgcgctactaagcccacgcggccgcagcaaaaactttggcgtggccggggcgtggctagggtccggccaggcccccttgttcctaattcccctccactccccgctcccattggtcacgaggatgaccaatgagcgctcggatcgaggtcctaccccgggcctgactcgaaagctcctgccaaaactttgggagtttttagagacgagtttttttttttttctattacttttccccccccctaactaacggactattattgttgttgttttaaatttagctcttagggcttagctatttgggttttcttgcggtgtccggctcccgtctccctggctcccccgcccgccctgcggccccagcgcccctcgctctcatccagcccgcgaggagtgcgggcgccgcgccgcctttaaagcgaggccagggagcgaggcggtgaccggccgagatccggccctcgcctcctccctcggtggcgctagggctcccggcctctcttcctcagtgcgggcggagaagcgaaagcggatcgtcctcggctgccgccgccttctccgggactcgcgcgcccctccccgcgcgcccacccacccagtccggctggactgcggcagccgcgcggctcaccccggcaggatgttcgcagccgggctggctcccttctacgcctccaacttcagcctctggtcggccgcttactgctcctcggccggcccaggcggctgctccttccccttggaccccgccgccgtcaaaaagccctccttctgcatcgcagacattctgcacgccggcgtgggggatctgggggcggccccggagggcctggcaggggcctcggccgccgccctcaccgcgcacttgggctcggttcacccgcacgcctctttccaagcggcggccagatccccgcttcgacccaccccagtggtggcgccctccgaagtcccggctggcttcccgcagcggctgtctccgctctcagccgcctaccaccaccatcacccgcaacaacaacagcagcagcaacagccgcagcagcaacagcctccgcctccgccccgggctggcgccctgcagcccccggcctcggggacgcgagtggttccgaacccccaccacagtggctctgccccggccccctccagcaaagacctcaaatttggaattgaccgcattttatctgcagaatttgacccaaaagtcaaagaaggcaacacgctgagaggtaggtcttgggcgggaggctgcaggcctctgaccactgacccactccccggaccccgggctggcttggggtgcctttgagtgtttttacaattaaggacaaatcggtaaaac

SEQ ID NO: 22745 - DNA, 653 bp, Homo sapiens
  chr1:223936543-223937196
  binary
cggcgttcaagcatttgaacggggtaggaaaggttctccaagtgcaagaaagcgcagccctgagcctcccaccccaggcctcggccgctgcgctagtgcgtccggcggtcccgcccggcagtaggacagagggagcgagggagtccgggaggaagggagagcgggtgcggccagtctgacggttgctgtgtttgcagatcaccagcgccgcggactcggaggccatcacgtttcagaagctggtgaaggggcacgcgtactcggtcaccggagccgaggaggtaacggccggcgcggatgtgcaggggtcctgctgtcctgacacgatggccacaggcacagtttgtggtgatgcccaggggcccgcgcggccccacggtggtccagtttacactcgggccccgcactcctgaagttccgcgcgggaggagaagggcgtccctttcgcagctcgggcgccgggtgcgccgcgctgccacctggtggccgcagtggccggcgccaggggccctggttttacttgttttagatgttaccctgttttacagttacaaccttactattttgataagctaaaaataataaaacaatgcatcttcatagtgttttatactctataaggtgctttctcttttgatctcgtaaaagtattc

SEQ ID NO: 22746 - DNA, 978 bp, Homo sapiens
  chr1:231297736-231298714
  binary
cgagcccttattcgctgagctgaagcctcctcccccctcctccccattactctctgctctggaaattacaactcctcggcgcgccgcgcggggaggcagcggcagcggcgggagggaggcggggaggggattcccgagccagccggacgctcgccctccgcccgccggctgcagcgtcgcgcggcccaaggtcagaggcgccgcaggagcagcagctgggaaccagggaagcgggtcaatcccggccgcagggagaaagccccagggcgcagtcagccggcgtccacagccgcccaggagtagggtgagcggctgtctccgggccggtcgggtcccgccgaggtggccgcggccccagcgacccggcgggtggcggcccaggggtcggcgagcaggcagctggagccccaccttcggctcccgggcgctgtccgccgcctcgtggtgctgatcccagccccacggctgagcggccttcgcacctgcctgtctcacctcgctatcaccccgataaggagttgggccggggcagaaggggggcctcggggtagccgcccaccggagccaggggctgaagcagcgagcgcacagcagcccggccgctggtcctggggtggagaggaggcgcgcgctgcagccggcggcggcgctggtgctgattcatcacctaaagctcctcgcaggccaccgcgagggcagccgaccggctccggaatctggccgcaggttgaagccgctggtgcgggaccctcgggcaggaggtgaggaccccctcccttctctcgcccctcaatcatcttagggcggtggctacaggacagagagaggggcgtgcccctcggctgtgaagtgggcatgcccgtgtgatgcccccgcccgtcgtctcaccggggcgcaccgcgctggtcctcctccgccagtctcccgagctccggccattcatccccagcgcagagcagcgctggcagccggcgccgc

SEQ ID NO: 22747 - DNA, 1272 bp, Homo sapiens
  chr1:237205449-237206721
  binary
cgctgcactaaccccggctcagctggctccgcgcacttgctcggaggagccggggccgagcggaccgccggctgcaggcagcgagcgcggctgggctgcggggctgcttccccgcgtcctccgggcccgggccgccctcctcccgcacagtgcggagcagggaggccccgcgcctcgaccacccgcgcccgagcgtccgcgcctcctcctccgctctgcaggcggggaccgcccggcgctcggcacccggcagcgcggccccctccagcccccggctcccggcagcagaagcagaaggcagcgccaggggccgccgccgccgccgagctccgcggggctcgggagccggccccggcgaggaggcgcggaaccatggccgatgggggcgagggcgaagacgagatccagttcctgcgaactgtaagcgccgtgcgtcgcgtgtgctgtcaggggaagggggcgtcagggcatccactagcggggtccgggcagagtgacagcgggcagcggggactcgcgggcggggcgagggggtgccccctgaggatgcgggaggagcgggcatcaccaagtgtgtgcaggtgtgcgtgttggggcgagggaaggcaagggcgcgtgtctgtgcgcgcgtgtggaaagctagaggatggagcgcggctagccggcggcaggcgcccgggctcggacccggggcaccggggacaggagcgtcggagctgcgggaaccgggagaggaggggacggccggtccggcctgcctggtggcacggctgggacctcccgggcggccgggggcagggtgcagagcagggtggcccgtgggggcgcggggagcggcgggaactcgggctgtttctgggaataccgccgccgggaggtttcttgggctttcgggctggacccgcgcgttgtcacggagcgaagacgttggttcgcttactccgtgtagcgtgcggcgcagctgaccgggggcgggggtgatggtgcaggacgctgcgcggaggtttcccccaagtcaaggtgctgcgaaagcggaggaggagtcgcctccgtggtccccgcggttcccggggctggtgccatccgtggtggtgctgtgaccgcttgcaaagcgtggaaggcatgggaagcgagcgtgtgtttgcgtgtgtgcgcgcgcgcgggtggtggtggggagaacatcgtgaacgtgtcgttctctaaatgctggcttattgcatgccaagtgaagcaaagtgtgtgtgtgtaagtgtaagggcagggtggctgccc

SEQ ID NO: 22748 - DNA, 807 bp, Homo sapiens
  chr1:2374848-2375655
  binary
cgcctgggcaaacgcccagcctggagatgggaagcgctctcggccccgcccccttcccggtcccgccggctggggccacggggagccggagggaggcggagggggaggtgtggggagcggaaggccgcaggagcatctttgcggagaaagtactttggctgcggcgggcgcagggcgggccggctagccccgcgccccacctgttctgtgcgtcgcgctcgcccggttgcgcccgatctgcctccagcccggtgcccgccgcggagcccgcgcccccggccccctcccggcgcggggcgggcagggggtgtggtgcgggcggcacgagtgacagcgcgctcctcgcgcggcgcctccacggggcgcagtgtcaccgcgcacagcccgccgcgggccgcccgagctggcggggcgatgccgcgggagccggagccccagcccgagcccgagcccggccgctgactgcgcctcccggcccgcagcccccgcccccgccgccctcgctgccctcgctgcagccgccacggagacaatggacgcgggagccgccccgcagaagcacagtaggtgccgctcctgccgctgcgccgctgccaaccgggatgcgcgggtggacgcgcgggggcgccgcagccctggtgcgggtcggggctgagccgcctgggcttcagactcgggagcggaggctcggatcgcggtggcacgggcaggggtgcgggcgcgggactgtgggcgggacgggcggagcggtcttgagctctccggatggcctcaggtgcggggtgagggatctgggggccgcccctc

SEQ ID NO: 22749 - DNA, 1229 bp, Homo sapiens
  chr1:241519651-241520880
  binary
cgggtctcccacacagagccggagtatatgcttcgcctactttcacctgcctgcgctgccagccaccggctgctctcctttctccccacttcgcttcggaagtccggaggtaatcctgcctaatttttgcaagaagacaccagaatatgtcccggcaacaagaactagtgggaggtcaagccttcaggccattttacccgggtcaccgtgggtaaaagcctaactgcagaagcctccagagcaaccagccaaagaggagaaaacaggcaagcccctgctccccttgctcgctctcacggcagcagcaaatggcaggcgagcctgtgccccgcgccgcggcggccgccggagccgggcagcagtttcagcaccgtggaccgcggggtgcgcgcggcgcccgtagcccagccccggcgcggggctcccgggggcggccgccctgcgcccgcggacgctcccgctgcgcagagcgagggctgggtgcgggccgggggccgggagggctctgggtggcgctgcctcctccccgcccgccttccctatttacctcctccgccaaggtcacggccccgcggcgtctcccctcccgggcgggctgggtgcaggcggtgtcagctggcggcaagcggagcagcgaggcagggtagcttcatcacactcgcggcggatgcggattccgcgccgccccggctctagctgctcaggcgaccgccaccctcgcctcgccgccgcccgtgcacaggcggctccggcagccgccactcgcgcccgctcccctgggccgcctcgctggctctctccctcctccgcttcttctcccggggactgggaccagccgagcgcgcgcgggagtcgagacgcccggcccgtgcgcgcgactgggaggagggaggaggggacagtcacgtgggacaggggcgtccgaaggtgccggctcggatgggctcggctcggccgccgccacaccgcccgggcctcccgggcctccccggcctcccgccctcgcgcccctcgggaggctgtagtcctgcccccggcgcggccagcccgcgctcccgcacaccccgcccgctcgcccgcgcgtgtgtacgtgcgccggaggcctggagagaccggagtttaacgcccagtgtaagccggaaagggaggaaggctgtgcgatgggtgggtgggtggtaggtgggtgggtggtctagtgaatggatggacagatggacggacggatgcac

SEQ ID NO: 22750 - DNA, 696 bp, Homo sapiens
  chr1:247170868-247171564
  binary
cgggagtcgggactctcccgacaacccctccgtcatcacagcacaatccagggaagacgcggcgctgcgggcgcggggctgccccgggagggctctgggccgtgccgaagtcaccaggcagagaccggacagtcacccagcggccgggatcccgctgccggcccggcccccacctgcgcgggacgggactgagggccgagctgcgccagcgggactcggccgcacactccggagccgaccgccgggaggcccggggccgccagcgctggttccagccaattccaaccgattccaaccaccccctctcccttctcgggacaccctgctccgcacactcaccatttcccagcttttgggggtcccagcgtcctccctataaatctcgcaatacctgcaggccacagggcgatggagcctgcggcagtcacccgggactctccgagaggcagcagacgggaacccagcaccccgccggccgcaaggagacaaaggccccgccagatccccaaggccgccccttcctctctggctgcacgcctgattggacagttctcacgctagcgccgctgactggatggggctccaggccccaccccctcaggtcttgagtgacaggaggtgcgatcagacactgggccgaatgaaacaagagtgacaggtttttgggtgcagcccttttgaagcgacattcctcac

SEQ ID NO: 22751 - DNA, 955 bp, Homo sapiens
  chr1:50798667-50799622
  binary
cgccagacgactcgccctgccccgtcgacgccccagacggtgttgccgacctccgccccgcagcgctggtgtgggcgcggccggacctcactcagcctgcactgccccgcgccgctcgccgcgtccacactgtccttgggaggacgcgcggggaagccgcgcacgatgcggcagcgccccctgccgggctccgggcgctccgctcccagccggctcggcgagtgctccgggaaaggggtccggaccccacacgcactgggttccaggacaggctctcgctcgggctgggccgactctggcccgcctaggccccgggcacgctgcagtgaaggcggtaccctcaccacagtcacagaacgtgtcggctgcccgcgcgtcctcccaaggacagtggacgggagctggggctggagagggtaacgacctgcccaaggtcacacagcaccgcagtggcacagccaggactggcacccacacctcccgcggaaccttgcaggggcccaaaccacctgggttctagagctccttgaactggcctcttgggctttagggaagagctggggacgagggaatggggtggggccacaccacattagcacggacccttgggtgacttgggcggaagacggggcgtcagggccgcctgcgcgcgcgtgacctccaagggtccttctggcgctcctccggcgctgcgtgcggcgctgggctgcggctcacccgacacaccggcggcagccgcggctgccccctactggcggaaggaagagtcgccgctccggggcccttggcggccgccgctcttcgcgcctccttggcctggctgccacccttccaccctcgggggagaccccgcgctctgtgctcactcggggaagagaggctcaatcacggcctggaccagcactagggacctaaacgctcttctcagtgtgcgtgaagccaggtcctcaaatcc

SEQ ID NO: 22752 - DNA, 795 bp, Homo sapiens
  chr1:58715168-58715963
  binary
cgtccggatggcgggagggttaaaattacagtctttgggtaagacccctggccagcttgcctggtttctagatacataagtggacagaaaagaaatgaagagaacgcggactgagcgaggaaatgctcaagaccacaggactgaaccccccggaagtctcgacgctgcccagccagccagagtccagtcgtcgacgcggatgaagttgtttccccgggacaggaagggttaaatggctgcgcgtcaactcggcctcgactggggtgtcagggagcaagagccgcttgtctcgggggattccgcttggggggttcccaggggtcgccctggcgctccggccacaacttgggcggctctgtgcggcggccctcgcctgcgcctttgcgcgccacccaaaactttgcgcacactgcagccgccgccttcccgctcttcgcggtgagacgcgcgccgccaagtgccgcaggcagccctccacagccgccgcggcagccgctgcctggcttctggctccagacttttcccccactgcctccagttcccacccaggaggctccctcgcggccgcgagagctcggcgcccgacccacagtaggcagtgcgggcacagtgttgcagaccaccacctcgccaggtccgggcagcgcccactagacggacaggcgcccgcggccgcccctaccccggcgcgcccacctcgagcctctcacgccgcggcgggcgggcgcaacatattctcctacctccagccgccgaggaccacactctccgctcagccctctcgactcatcctcc

SEQ ID NO: 22753 - DNA, 3475 bp, Homo sapiens
  chr1:92949133-92952608
  binary
cggaggagacctgagagggaaagaaaaccaggtggagacgtgggtcagtactctccggtgcggcggactgggcacccaggcggagggagagcgcgggccagggaggcgcgcagagggcccacgggaggaggggcttgaccctgctgcgccgcgcttaccaggtggcacttggacaggtggcgcgaacccgccgtcgttgccgccgccgccactgacacagctcagcggtaaaacctgtcccggggccctgtctcaggcccctttcctcctccctgcccacgccccccagctcctcccctttcctagcgaagctcgctccggcaatcaaactccctggagagctgtagttcccatcgggtgggttaccccaactcagctactcatcgcctgcctggctgtgctttacggctggcgagggagggcggggacacgcggatcggtttaggggccggggatgcccagtggtcgaggacccggaaggggcaaggagccaagacctccaagagccagctaccaactggagtgaaaggaccggggggaggggggaacagaacacaagataaaactgtggggcggcgggaggacagcagcagagggattggggacagcagaggccagagaaaggaggtgggagagcaaagggacaggaaagtgaggggaacaacagacgaccaacccccgccccaggagaaactcgcatctgggtgatcccactcgcccctcactagtgccccacgtaggagaaactttgcccttggactcccggctgcggcgggcaccggtcgaggctgcggcgagccatcccagaccatggagacctaacctcgggaatcaggtcccgggaaaaaagcactttccgttctgctcaccaaaaaatcttgtcctagggaggtggagcccgatccacgaacgttgactgggaaatgctaggtgtcccgagtcggtagtgcaccgacaatttagcagacaaaaaagacaggacgccagagcgcgcaggctgcattagcagagagcgggggtcgggcccgggcccgggagggaactagctgcccggggcgtcgctctcattaacccccaatcagttcacctaataccaggtcgaaatctgagcgcagcgggagggcgtggctgcgcctgccgctaggctccagccggctccgggggcggtaccccacagtcgaggtggtctggagtaaacgaatctgccttcctcccggggtgaaggcgatggtgaccgggttcacacgtgagctgcagtacagcagttctccgtggcctcggctggttcagaaacgagggtgctgggaactctgggccggggcaggacctgcagtcctccggcttcgcgctgtttccactgccggactaggagcccctcggcttcctaggcaagatgcaggccacacagtctacgtctgtccgttggcgctctcagctcaaacgagtcctacaggccttggtccctgtagggtgcaggccccctgctccagatccccagccccattgtgtccccttctccggaggaatgggaatagacctgggagaaaagacgcctgggacgtgtcgcggggctcccgcgaagtttcccgctacccaagcgccagaatgcccctaggggtgagagtgccatccgcctccctccggggtggctcctagggctagagctttgtcgcttcctgcacttctcgtccgtacaattagacgccacaaaccccaaacccaattctttaaacagccacgaaactcggaagaaaagaaaaacggagtggcgttgtcccgagggtcccgctgcagcttggacccacgttggctgggagcgggacagatgggggcggggtaactgtcagcgccggagctgggtctgggctggcgccaccagagaccaggcggacgcggaggccgcctccccacccgggctgtaagcccacgcctctctcgcaccccggcccgctttgctggttcctgtggggagcgacagagtttggaggagataggggccccggggcctgggccgagcgcgtgggaaggcaaccccgcgctgcagctggcgcgggaggtggggcggcccctccgcgcgctcaggcctctcctcaccgtccgggcccaggaaggagggagccgagggcgctaagggggcgtcctcccgagcgcagctgccgccgcctccccaccagatgtttccttccctggtggatttggctcccctgccgaaccaccagaccgcctgctgcgcgcccccagctccagatttccagtcacactgcgcgggtcgcgccctaacccagctgccggagctctctgggctcccgcacggcggtccgcagcaggtgggaaaccgcccgcgccctctgatcgcccccgcagtgccagtgctctgcgagtccccgcggccgcccccaccagggcaggaggcgcagaacaggctcggcggacctacctgcggagtcacggcgcgggcaccgcgctaggagagttttcaaacggaatcttgctttcgggagagaccgctctatctctctgacttaaaaaaaaaaaaaattctccttccgagctcagcccccaaaaccacaagcttcacttcctgagcgttactgagtcgctcgcatagccctcccagacctgctcccaacccccgtcgggcggccgggcgcgctcctttgcgcaagtggccaggcggtggggggcctggcctttccagcccgtcccgcgcgccccttagtagtcctcccagttctctccctgtgggtcggcaggggatgggggaaattggaggtccggacacttaggcactagaaatgacttgaaagaaaatgaactattcttggctccagggagacttccgcagcgagagaagccacagattgaggacacagattgactggcgagagaggggtggggggcgccccgctccgaggaccctccccgcccctcaggcctcggtcacccgccccccccacccccgaccccgccgcctcctagggctgcaccacccccgggtcgggaccgtgaatcaccggcccgcggtgccgccggcctggagcccggcgagtggccacggcgtccgcagagcgaaacctgccccgcaggccccgaaatagcttgttgtggaaacacttggggataaatacgcccaacgaggctgaaaataccttgacacccaatccgagaggtttgctcatttcccttcggatttaggtaatggttaaatttggaagaggtgggcgagcgccgagcccccggcggagagggccctggcggcgcgtcccgcgggcgcccggcgggaccggtgggcgcaccctccctgcgcggagctcgccggctctcgaccgggtccgctcagccttcgactaatttccggtggtcggagctgcaaaattaaaggccgcgcgggggcagcgccggcggctgctaggctgactccgccctgccggggcaagccagggagagcgggacctcgcacgcgggctctgccacc

SEQ ID NO: 22754 - DNA, 439 bp, Homo sapiens
  chr10:102430697-102431136
  binary
cgccgggggcacggctgcgagataaccattagcgcagccgccgataaagcggggaggctgcatttccaaaggctccgcggccattacgggaaagttagtgtgaaacatgttaaattatccccaaagtggagggagcgggggaggcggcgggggagcgggcgcccgagagagccacgagacccgccgcctccgccggggccgggtgactgcgccgtgcccgacacgccgacgtccaccagggggcggccgcgtgcggcccgagcctcggtctgcgggtccggaggatgggctggcggcccgagccttcctcgcacctgcgggcgcggacccacccgaggccgccggctccggctccggctccctgcctggcccctctgcccagcaggagcagcccggcacccccggagagcgatagagaggcgggggcctgggtggggtc

SEQ ID NO: 22755 - DNA, 590 bp, Homo sapiens
  chr10:112431835-112432425
  binary
cgatgacggctctcggaggctcctggttttgatgtctggcattgcttttacccggtgggcttcagggagccgtccctgccgcgctttgcgtttctccgcgcacttggacagggttctgccacgagggaggcgatgcctggcgccgcgggtgggggcagtggtgagacttcggcccctggtggccggagaggtcgcagcacttgtcagtttatggctccctcggctttccccttcttaatccgctttctgctgagctctccgaataattcaaccctcgtgtttgaaaactagaagcctgagaggtctcagcgagacagtcaaaggggaggctcccctcgccgagtgtcacccgggaccctgcgtccccgctctgcagagaccttctctccgggctgctgccgtcctccctcgcccggcggagcttccgtgatcgtcagccaaagcccccggggcggtgcgccgcaggcggtcttcccgggtgttcgcggaagctgcgcgctcgcgcccccacggttctccagcgacccctgaagatgcttccgtccgcggataggggacgtttcagacctggggtgggcacagcggtcccc

SEQ ID NO: 22756 - DNA, 1978 bp, Homo sapiens
  chr10:17270371-17272349
  binary
cgaccgcacacagcaaggcgatggcccagctgtaagttggtagcactgagaactagcagcgcgcgcggagcccgctgagacttgaatcaatctggtctaacggtttcccctaaaccgctaggagccctcaatcggcgggacagcagggcgcggtgagtcaccgccggtgactaagcgaccccacccctctccctcgggctttcctctgccaccgccgtctcgcaactcccgccgtccgaagctggactgagcccgttaggtccctcgacagaacctcccctccccccaacatctctccgccaaggcaagtcgatggacagaggcgcgggccggagcagcccccctttccaagcgggcggcgcgcgaggctgcggcgaggcctgagccctgcgttcctgcgctgtgcgcgcccccaccccgcgttccaatctcaggcgctctttgtttctttctccgcgacttcagatctgagggattccttactctttcctcttcccgctcctttgcccgcgggtctccccgcctgaccgcagccccgagaccgccgcgcacctcctcccacgcccctttggcgtggtgccaccggacccctctggttcagtcccaggcggacccccccctcaccgcgcgaccccgcctttttcagcaccccagggtgagcccagctcagactatcatccggaaagcccccaaaagtcccagcccagcgctgaagtaacgggaccatgcccagtcccaggccccggagcaggaaggctcgagggcgcccccaccccacccgcccaccctccccgcttctcgctaggtccctattggctggcgcgctccgcggctgggatggcagtgggaggggaccctctttcctaacggggttataaaaacagcgccctcggcggggtccagtcctctgccactctcgctccgaggtccccgcgccagagacgcagccgcgctcccaccacccacacccaccgcgccctcgttcgcctcttctccgggagccagtccgcgccaccgccgccgcccaggccatcgccaccctccgcagccatgtccaccaggtccgtgtcctcgtcctcctaccgcaggatgttcggcggcccgggcaccgcgagccggccgagctccagccggagctacgtgactacgtccacccgcacctacagcctgggcagcgcgctgcgccccagcaccagccgcagcctctacgcctcgtccccgggcggcgtgtatgccacgcgctcctctgccgtgcgcctgcggagcagcgtgcccggggtgcggctcctgcaggactcggtggacttctcgctggccgacgccatcaacaccgagttcaagaacacccgcaccaacgagaaggtggagctgcaggagctgaatgaccgcttcgccaactacatcgacaaggtgcgcttcctggagcagcagaataagatcctgctggccgagctcgagcagctcaagggccaaggcaagtcgcgcctgggggacctctacgaggaggagatgcgggagctgcgccggcaggtggaccagctaaccaacgacaaagcccgcgtcgaggtggagcgcgacaacctggccgaggacatcatgcgcctccgggagaagtaaggctgcgcccatgcaagtagctgggcctcgggagggggctggagggagaggggaacgcccccccggcccccgcgagagctgccacgcccttggggatgtggccggggggaggcctgccagggagacagcggagagcggggctgtggctgtggtggcgcagccccgcccagaacccagaccttgcagttcgcatttcctcctctgtccccacacattgcccaaggacgctccgtttcaagttacagatttcttaaaactaccactttgtgtgcagttgaaggcccttgggcacaatgagagccagtcctccaaactttcagaaagtttcctgccccttctggcaggctgccaatcaccgggc

SEQ ID NO: 22757 - DNA, 1263 bp, Homo sapiens
  chr10:18429033-18430296
  binary
cgtcgtccttcccctccaaagttaagagatctgctctaagggttcctgaggggtggtctggggccatgggaacaggatcaaggccccctgagcgccgggcctggcttctgtggcttcgcaaacttttcagcctgtgtgccacggcgacgcgcagcggctgagtcggagcccacgcggcgcgcgcctcccgcgaggaacttttcggcttgtaggctgcttgtcactctcgctttccgacgcgcctccccctggctcgcgctcccggagttccctcccctcctggcgaggacctttcccggcgcccgcggctccgatccccgccgcgctgcgcccgctctcccggccccggctgccccgctgagggctcccctctcccaggcaccgcagccgcgcccccgcgtcccgcctcccgagcggctcgcttcgcccgatgccccggccccgtcccgcgcactgagcgcctggcagcagggcgccgagtcccggggcgctgcggggcgctgcgccgagaacggccgggcctgagccctgggcggcccccagagccgatcagagcgcggggaggcgggggcgaggaggaggggacccgccgccgggggctggctgcttcgctccgagccgacttttcgccaatggtccaaagggacatgtccaagtcgcctcccacagcggcggcggcggtggcgcaggagatccagatggaactgctagagaacgtggctcccgcgggggcgctcggagccgccgcacaggtagcgagagcgcggcgccttctccttcctttgtgagccgccgggcagggcaccgacctcgggttctcccggcgcctccactgcagggatctctagcctcgcacctcctcccctcgtcgcctgcccaccctctgctcctctcctggcgccggggaccctgcccctttgcgccttttcctggctctgcctcggcttccatttttctctgcttccgaaaagccagtggggaagggcgggggagacctgccagtcctcccagacttctcccgggttgctccagctggccctcctcgccccttcccgggagaggcacatggagagacatgaatcaggggagtggactggacctgctgaagatcgtgagtccgggtgggcgggagggggcccgcttcccgcagcgctttctacgatgccgactctcctggccacgctccgagccggggtgggcgtgggtgtgaggatgatggggtgcaggtgggcaggaggggagcgaatatgggggtgccctgcc

SEQ ID NO: 22758 - DNA, 773 bp, Homo sapiens
  chr10:22634000-22634773
  binary
cggattgtacaatgtgacgtgtgagatttctcgggaccgtcgaagctcagacaactccagggctgcaatttactcgtctggctgccctcgaaccaggctcccttggcgcgtggggctctcccggcgcttggtcccgacccgcgccgcagtcaggataccacggcaatctggggtcgctttgtaaggagctccgacctccgggcagtgcagggatactcgacggcgcgcgatgtcccggcggctccgcgagcctggcgcgctgagagccccagcagtccgagtcctcgagctcgggcgtcttcgcgccgccgccccgctcagtgcgcccaggcaccgcggccgtgacgtcacgcccgggactggccgttgcagcaagacggccgcgttccggttccggtaggttgcccgggagacgcgggtacacagagaagcggctcccgtcggaggccgagtcgtcgccacgatcgcccccttggtggactcgcaggccgagcggcttccccgcagagctcgaggagggcagacggcggcgggggcgccatgagtcagaggcaggtgctgcaaggtagggccgaggcgggcaggtgccctaactagctggcgccgaggagacccgggtgcggtgggctccaccgactctctctcccgcagtgttcgagcaataccagaaggccaggacccagttcgtgcagatggtggcggagctggcgactagaccccaaaacatcgagacgctgcagaacgcgggtgagcccggagcccgaacccccgtc

SEQ ID NO: 22759 - DNA, 1457 bp, Homo sapiens
  chr10:23461640-23463097
  binary
cgcagagccccagcttccccagctccctcctggattaatgcttggtgccagggagaagcgcagggctctttccgcctcctccccaagtgcacccgggcgcgcttccatctgattagaatgtttcttccatcttattagaatgacagtagctttcaagtcattcattatgagaagaattttagtcttaaaagaaaaaagggagtcccactgtaattgtgagttgtaataaatgcaaacttctggtgccttcctctgcagcatggaagacagtaaaaaatgtgtctcgtccaaacgcaccccctctccaagcccattgtgaagtcagtcgccaacaaaggggacgtgtgaatattcaacaccgactctttcacttgttttttccggaatccctgagtcgactcaccccctctcctttttttttttttttaaatgggcgaatacctgtttaagttttaaaagcacatggaaattgcccgcgagcgaccatataatttgatttgccaggcaatctgcagagcgatcgcacgtcatttataatgttcattgagcattttgcctaattgtgtctgtctctgaaagggcagcgcaccccctcccgaccgctagcagcacaagtggcgacattcccatggagcggccgcgccgcagcttgccgcattcagcgcggacggcctggccgcgcgcttccccgcccggacgaccgggcgcgcctgacactaatagctcgcggctcaggtacgagcgggcgccgcatttgactcaattcaattcacaaccggccgcgcttgcaggtgtcgccttttgaaaccgccattcaggcggccgctgttcacttctcgctgcgccgcgggttctgtagaagcgcaagaatggggctgattattccggtgcccacatgccgcccccacacgcccccacccccgtccggcgcaagacttcccttggccaaaagaggcgtttaattagttctggggccgcggagagccagcgtggccgacaaagcccggctccccaggtaacccgggttccctgcggacccgggagggggcgcgcggggccggagcaccggccttgggctgcgcgctccctccggcgacactgccgtccccctggcctccggcccggtcccccgcaggccaaaggctcatctgccgggcttgggtggcccgggccagcgccgcctgcggtccccgagtgcggctggctctaaggccggcgccctctccccggctttcagtgctcagagccaggccagcgggaaagaaggcagcatggtccgcaaaagacaggtggcagtggcagtcttgcatgatacttgtccttcttccctgttccccattttggggaaacactggaaacacttttctctttatgcgcattcgcgtctcagcaccgagtgctccaagccctgcgcgcagcgccgggcttggaaggcggcgaatggctgcctagccgcc

SEQ ID NO: 22760 - DNA, 995 bp, Homo sapiens
  chr10:50605507-50606502
  binary
cggggcgccatttccgccagggccaccgactccgagagtccaggcagccggcccgggaggagcggctagcaggtcccgaaggcgggtgaggtggcaggcaggggccggcagggcagccgagggcctttcctacgtcatgccaagagggctgggagcccctagagctgatcctcccttagcccaggtcaagagactggctcgcgcgcgctgtctctctccctgtctccctcagagggcccctgctctctggagctcttgacaagagcccgaggctcctcttgccgcctaggtctgccgaaagtcccctcgggttccctcctgccctaggcagcagttccctgcctgtgcgctttgggaacccggtggccgtgaagtgaggtgcggacagcttctgggccgcctcggccaagatgctcaggcgcacctgggggtgtgtgcgggaaccctcagcggcagcagcccagcccggggtgcagtgttggccccagaaaccaatgaggtccaaacgccagtctcagttccccatccctgacatcgaccgaggcaagttcctattaaggcccagagatgaccccgggacgagacaggctcatccggcgcggatgagacaggctcagacctgcgcggtctgaggacggcgcgctcgccgagcaacccggcaggtcagaaccctggacagcggcgccggtttccgcacccccacccacccccggctgctgcggagaaagaagccgtaccgggggcccagccggggcccctcgctgctcaggggtgggatccgcccggccggaccccaggcgtccggggaccgaccccaatcctctcccagtccaaacctgcgaaagttactccggacatgcgctcagcgctggcaacagagacaaaactcccttctccgcagtaccacgcgccgctcctacccggccgctgcagccggaaaccatctcgcggcccccgaggagagtccggccgcctcactgactagataaccagcc

SEQ ID NO: 22761 - DNA, 923 bp, Homo sapiens
  chr10:50969681-50970604
  binary
cggttcggcgaatgcgtactgcagcctgctgtggcctcgggattaccccgtccccctcccacatctcccggggggcggaagaagcgcatcccatgcaagcagcgacctcaggccatgccgccctctctcaggcctcagttttctcatctgtaatcggagaccgcggttaaaaccgtctattaggctccttggtagtccgaagctgcctatgggtcccgccaggtgcacagcgctgaccctccccatcccccgcacagccctcgcagctccgggccctcccctggccacggaaggcgcggggcagtctgaagtcctcgggctggagaaacccaccgcgagcacccgctcctctgcgcaggaccctggactagccgggtggtacgcgcgcgatgggctgggggtcccgggggaggccacggccagccaaggtcagagccaaggtcacagtctgttcctcctccccctccccccggcggggccagactcagggctgcgggcagcggcgccccaggacccaggagagaggagctgtggggccggtccccaggacggcaggagaagcagcggcgcagggaccgggagggggcgggccgccgcgctcaccgggcgggcgggccgggtccgcgctgcagcgaggtccggaggctgcaggtcagggggctgcgcggaaggggtgcgcgcgcgccgtgccaattacctgggtcacgtgacgcagccgcccacgggcgcgcgcccctgagactccgcgcgtcgtgacgtctccatggatgccccgccccgctcctggcgctgtccacggtgctggcggcccaggcccgaggtcgcccacggccgaaggggggactcctctctgagaccgcagaacggggctgaggccctgaaccccgtgtgctcgtcctaaaactaggacgaatgtaccagac

SEQ ID NO: 22762 - DNA, 1497 bp, Homo sapiens
  chr10:7450674-7452171
  binary
cgcattccggtggctctcacccgagctcgcgtttgctggctttccctctggctcctctgcctgaccccgattttgtctccgaactccactcccagatcctccccgccctggaacgccgacctttcccccgcacttcgccgcccactcacatcccccggcgactgcccggcctccatgcccgccaagacaagaagatgcccctctccgatgcgccgagagggttcctaagccgagcaagggacaatttcttccccaaacgctgtccccatcccccaccttccctagagcgcgaaacccaaaagtaaggaaggcaacccctcgcctcgaccctacgtgcttgtctcccagagccgcgcgctcccgcccttctgccccaccccaccaccaccaccaccactttggtcttctccaagcttcggtcccggtcccccacctcccaccccagagcggcgtggaggaaagcaggagcccactattaagtgcagcgcgccccctgcacacacgaaatccggctggcgtctgcagcccgattgcacccaatacccgggacagttagtccttttaataagcacctcctcgccccacctactcggggatctacccgcgcaggatccagcacacacaaggcgagagctagctcgtctcctagaaagacaaaataaatcactccctctgccctcatgtactttacaccacgtgtccgcagtttgtcacgtcaaatcatggcagggtctggttccaagacgcacacacacattcggggtggttctctttgacacacacacccaaaaaaactgcgcacacgcaggcctgcacactaatccacaggcacacacgacagttgcgtttcggtgccctggtccgggccaggggcacttctccatccctttcccccctagcaatggacttgacacacagactctaaccacggaaaaaaaaaaccggacagcccattccttctttttttccccacttaattcgctaaagcgcttcctggggtagccaaagagagtcgaaactaaggggtggaaacttcagctgggttttttcccacctcaaaacctttattttcagtttttaaaagccaccttagcccgccatattgaaactggcacggtttctaaagactccttccccgcagttgtggcgcttccaagaaaacacgagtacggatcaggctctggatgagtgtccggccaccgagaatcagccacttcccaccctccaggatcccccagctccctccagccccttcccaccgcccctggtcaaaatcaataaatacatctcgcagttcctacagttgcattttggcggatttctgcaaaacatacacacacatacacatacccacgcacgcatattaaaaaataaactccagaaccagctcaagtcagcaattttgaaagggggtcgaataagaggagacaaccggaaagcccctaagtgacaggatattactttaaagagaaaataatgaacaaaaagaccatcctc

SEQ ID NO: 22763 - DNA, 1297 bp, Homo sapiens
  chr10:79397345-79398642
  binary
cgccgccgccgccgccgccgctgctgccgccgccgccgccgccaccatttgccatagctagcaacgggcagccggcgcaggggctcgggggagctcctcccgccgccagcgccaccccaaacacccatcaacagccatattgctgctactgctgccgccgccgccgccgccgcggagcgcgggaggggggcggggaggcgcctgggctcggggcgctgtgcgcgacctggcggggtgcgccgagatatatacagcgagccgccgccgcccgcccgggggggagggggatggagtgcgcgggcagctccccctccccggcccgcgccccgctcgccccgggctgcgctggccccgagcgccgagagccagggggcgccgcgggccgcccgcgcccggggtctgcgccgcccccgggcccgccccggctccgcgcgcggtcccgggtgtcctcggcgccgcgccgcccgccgtgcgccacgggtgtgcgctgcgctcggccggtgacccccttccccgagcgcctcccgcgcggctaacgagccgctctccgcttattaggtggtaactcgttaataatggataatcggccccctccgcccgggcgcccctgcgccagccctcctcccccggctgcgctcggctccggctcgccgcgccagtgcgcgcccggccgcggcaggttcaccgcgtccggccgccggcccgtggccgcctgctagcccatgttctcgggaccccctagtcctgtcgccacgccgctgagcccctcggcctccgctcgctcttcctccttgccgcctccgactcctcctcgtccccgtcctcgccgcccaagcctcttcggcgcgcgccccgcgctccccgcagccgccagcagcagcagctgcagcaactggagcgggcgcggactcaggacgacccaggcgggaggggaggaggctcgccgcgctggctcgcctgggctccgggctgggcaggggtgggcagggcccctcggcagcggcccggcaagcgcccctgacccccagggcgcaaggtagagcgcccccagcccaggcgcggggccaggcgcctctctccaaggtgctgcgcccccagccgagagcggtggggtacactgggaggacggcggggcgccccggtcaggccgtttttttccccaaagagcccccagtggggaggggaggagtggccagctgtcaactggattccacaggctgagctccccaggaccctcgggcttcgggagtgaggaggaccccacgccaggatacacacagctacccacccctacttc

SEQ ID NO: 22764 - DNA, 571 bp, Homo sapiens
  chr10:94448826-94449397
  binary
cgtgcaaaaccagagagccagactgcgcacagctgcgaccctcaagagccagcagaaaagacacggagcggcccccactggattgaagactgcacagcctctgcccggcgctgtaggacccgggcctccccttgattgctgctcgcagcggcttctgccagcatcctcgcggaagtggcttgagtccgaggcctccaaatgaaaccaggtggagcggccaagagtccgcagcacctgaactccagccatccgaatcccgccgggccgcagctaagggccgccgagcagccctaggaacccagggcactgtcccgctctgagctcgggaaacggccggtgtgacagccagcgccactgttaatccagggagcgcacccaccgaggaggcgtcttaggccagcggcctctgctcccgccgagtcccgctgctccccgcctggaaacagctgctgccaccccgggcccaggcctggacggcgcccccgaatttcggcagaggtgcctcggggccgcggacagggccgctggagcccgcactccagaaggcggtcttcctcgcgcctcccccgac

SEQ ID NO: 22765 - DNA, 1147 bp, Homo sapiens
  chr11:104034057-104035204
  binary
cgcacgatttctcctctcactcgtaaaaataaataaataaataaataaaatttaaataaacgtctatcacccagggaaagctactcttgactccttccacctatcaaaattgcctaagaaaggttgagtctgaccaaggggcggcgcagcttgcaactttcgccaactccgggatgaggcaccgcatcctggtaccagaggcttggacaccaaaatgacttctctagggtgcagcaaggtgagccacctggcttatcctatccccatcagcacgcgtcccacacctctcagtcccattccggaaatggagctctctcaggactggatacaggcaggagacctccctccccaaacaatgcattcagcccgagttcacattcaagattcaaaaagaaaggggaaaaacatagaaagaacaataacaatagcaaacatgatttttttttcagttaaaaaataaaatgagtctcttaccatctcgcctgaggttggcgttgcgcaaagctttgatggatgcgctctgcggggttgcagaagtgtcccgacagctgcaaaagtttgcgcagattagagtgtagacaaagatgagccggtgcatttgggatcagcgactagagacagcgtcgctccaagaaaaagccgggttctgctcccgggaccgacgccgcgccgccctgcgctctcgccgcctgcgctcgccctgcgctggcccgggtcgctgtgctaatcgccgagctctccccaaacttcctgcatgctgaactttccgagcgcgtgtgggtgccgcacttccttgtggtgctgagctgataaatggtgacgggacaaacaacaggttgacgtttgtttgttcgccccctccggtggccggcagctgcagcacaggctgcagggggcgggcagcgccgaatctagcggggcaggcgagcggagcagcagcgttctccagccccggccgcggcccctgagaggcgcgcactcgggctcagagcggcggcgcgagcacctcagctccccagtttcccaggccgggcctaaacctgctctgccactgagcatgcccagtttaatcgccggccgggactcttcccaccgccctgggctttaccctcctggttggacctgtaagggctcaggaaacaaactc

SEQ ID NO: 22766 - DNA, 961 bp, Homo sapiens
  chr11:115373363-115374324
  binary
cgctggaattgacgctgctgccagacgccccccaataggtttcccaagccgagctcctttgcaagcctattttgggggcaagcagccaacccggcgtcccccaaatctcaagctagcacccccacacatcccccgtctcctacagcgtgtctcctgcggtgtttacataactgtgtgtcctctagcgtgtaaacaaaaggcacagcccaagcggagaggcgcccctgaagcagcaccgtggccccaacgctgtgcccgcccgggcctggggctccgcaggtgggggctgagctctcggcgtcctccgccacttgttgctcccgggtcctgcagctctggagctgcaaggaggggctttgcaggctcagagccctgctgcatcccctcctgcatcgccgctcgcaccccgcggccccgtgccactcggtcccggcgcccgcctggagcctgcagcaggggccagaggacgccgcgcggctgccaagcgcggcgaggtggcgggaagggaggctgggtgcagcacagccggcctctccgctgaggaagagctccggctcccttttgttagcaaaagcaaacactgccctcttctttcccgaccgcgccaacgcgcccggcacacgggcagccacacatcgggctccagccgagtgctcggtgtcttcagggaaggcaccgggcgtgcagagccgcccctgggcaaattcccaagactgctcttcacgcagggagcgcgcggaggcccgcagggtgcccgcctggccgcagaggccgcgacgccccctccgccaccctcgggccgccgaaagaacgggcagccgggaaatcccgtgtccccactcgtggcagaggacgctgtggggcgggcgggctgcgggctcccggcgccttcccgcagaggcggcgacagcggccgccccccccgcggggccgggccggggaactttccccgcctggagcc

SEQ ID NO: 22767 - DNA, 855 bp, Homo sapiens
  chr11:115375340-115376195
  binary
cgtatgcaaatatgtttatgttaaaattcgggttttgctttccccggatcaaggaaaaagtgttctcccgggcgcctggcgtgcaaggactcgggctccagggggcgggtctagcttcttgtacacctttattaggaatgtttatagcaatcgctgtatcagaccgacgactggagaatctcccttaagagggtcctctgtcccgcacaccgagtgcatctggcctagcgaaccagacgttgcaaatttccgtcactcaccttgcaccgaaggaatagatctttgggaacgggggctgtgcgggagtggagagtaagaaggcaggtccccggattgacaaaacaatctgggagaagtgcatgcgtgctttgcacgtccggcggagcgggagagcccgctcaacagcctagcggtagactcggggatagttggagaaggcagccgtagagtcgggttctgagattttccagtcggtctttttgcggcagaatctcgggaaaggtagatcgaggagggtatgctcaggctcctccgcttgtcgagggtctcctccctggttttaatatataggtgtgtgttgaatatatgtgtgaaatatttgtaatattagatatttaagattacacaacaacggaaaaaattagtcaaggcttcaggtgaagagcgggggtggtgggagttggggagagggagtgtggtgaaggcagggtctgccgtgttcctccttcggggctcaaaccctctcactcctcctctgcgcccccagcccttcctaaggaagctggggaccaacaggtgctccgagcttcccctgtctctgggagagcctctcctgctaaagcgacttgcatctcc

SEQ ID NO: 22768 - DNA, 939 bp, Homo sapiens
  chr11:123228638-123229577
  binary
cgtgaagatcctccgggtcacctatgcactcctgctaatctctgccatttgccttcttacaccctttccataccttcccgtggaacacggtaatctggtttccagatgggctaatgtctcctcctagctgcaaggcagcggcgcttctggcgttggtttccgcactaaacttgatggtctgattttaaaggttgattttaaagaaactgtctggttgtatgtccccgagttacactgcagtgctaaatgttggagcgaggcaataccgggagaatccaggctgcaggcttcacccagagagggagggtgaggggaggagagagacggagagaggagagagggggaatgaaaggggagagagagggaccaagaccggcgagcgggagacaggagcggaaaccacagaggtagagtcagggccgacactgaagaaacgtagatgcacagggaggggccaatattagtgtacagagagaaagagggaacacggtgcggtgacacctagcctcggagacagtgggagctccgagcccacggagagcgggggagttccgcttcctcccgccccagcggctcccgccccgcctgggcgcagccggccgtcccggctccgagggtgcagcgcgcccgggcgcagcgcgagtgcgtggagccgggctccagcacgaccccgccgctcgggtttgggtgtcctcaggctccgcgctcctcctcccctcctccagatgggactggctctcctctttgcaaagccaggctcgcggggagacgtggtgagcagtagccagcagctggtgtgccgtggacgccgctgaccgccgcgcgcccgaaccgggtgtccacatgagtgcctctcccagcagatccaggtaagaacttcctgaccttcctgagccctaggaggaacacacatggatgccgagtgatggtgagggatcc

SEQ ID NO: 22769 - DNA, 1291 bp, Homo sapiens
  chr11:123300826-123302117
  binary
cgagtccctccccgagggaatccgtgtacagttacactagcggtcgctgccagtgctagcccattcaggatagcccccctcaccccgcccccagcccccgctcctcctcctccttttttgtttttatccagtgtctcgcttcctctctctctctctctctctgtctctctctccctttccctcctaccactgcctcttcctcccgctctctacctccctgcagcgccaagccggctccccaacctggtctgctgaacgcaaaccgctgagagtttgctgcaccgccccctggggcccctggctgccgagtcccgctaaggcaaagacgccagcaagcgaggaagcgcagcggaagaaaaacaagcgggcgcgcgaggggagccccaggagggctgccgagtggctggcaggcggctcccgcccctcccgggtggcctcgccggcggctgacggcccggaggacgcgcgctccgaaaagttagactccgggcggcggcgcgctacgccgcgtcccctcgcgtcccttcctcgctgcgctccgggaaaggaacttgttccttcggccccaggattggggagtgtgccgcggggccgagggtggggaacagccagagggagacgcgaaccaggccgctggcggagggctcagggggagcgcagaggcgacggcccccatgccggcggccaacatgatggagaaccggccgctgcccgccctgcaggtgcccgagccgcagggtgcgcccgagggcagcccggtctggtccagttcgtcgacccccacgcttcgccgccggcgcttcaagatgcgccgcatgaagaacgtacaggagcagagcctggaggccgggctggcccgggacctgcccgccgtcttggcccccggcaaggagttcctgcagctgccgtccatcgagatcacgccctccagcgacgaggacaccccgtggtccaactgctccacacccagcgcgtccccgcgccgaaaacgcttcctcctccgcaagtggctgagggtgagggagcggaaggagtgcagtgaaagcaggtacgtccccgttccgcccgtctccttcccttccctcccgtcctctccagagccgtccagggccccggggcattctgggggaaacgtcctgggggagaacaggagcccgtcaccagaggcgcttctggagggcgctgcgcctggtcccagggatggtggcattcagcttccacgcgtgccacccgctccccaactcagggtgaggggcttcatgttgcacgacacgtttacgtggggctttac

SEQ ID NO: 22770 - DNA, 1308 bp, Homo sapiens
  chr11:128564211-128565519
  binary
cggggaggcgaagcggcgggcgggtaggtgcggggcccgcgtcccggaagacgtggcctctctcccttccctccgcgccccggcttcgcgccggctcctccggcgctcgggtggcgagtcctactcgcgggccagccggccaggcgcccgcattgagggcgaccctcccccgaaatcccagcccccaaagtggagccccggcccccctcccacctcgctgcccgccggggctgcaggaggggacggcgggaaaccgggggaccccagggtacggaacggagtcaagggcgagagacctcggggtccaccactcccaccgacacccggggctcccgtggccccagcgctaggcactgggcttcctctccgcagaggcggaacacggcgggggcgggggctgcagtcgcccgggctcgggtccctgcctggtgggccctggggtgggtaagtggcctcgttgcacgagggtaggggtgcaagtgagtgtgtcgggggatctatctgagcgggctcctccagatggaagcccctgtttacatgtcagcgctttcccttcctctcggcactcagtcgcccggctctaggcgctggagagccgccggctccgcgggactcctgggccggcctcgccgcctctccggcggggaaccttccccagcccccgtccgcacagatccctagcgccccgagcccccgcccttcgcgcctaggcgtgcgccggctccaggaccagggctcctggagctgtcgcctccgaaagggtcctgcgtccttcggagccgcctccgttgcaggggccggctgtgagcccgcgccccgcgcccgcccggccattcccaccccagccgccgccgccaagcctgggtctaggttgcaaagtgcaacccaggcggaaaggtgagggtttgggttcgcgtctcacttcagaaaagttgactgctgtctctgaaagggttcgccaagtagggccaggagcagagaggagggacaccccctaacgtgacgggccttagaggacctaggggaatgaatgggaccaggggttagcttcgaggctgccgcgcaacaccaagcgggagtctgtctggaaaaactattaggctggcgaggtggggactggcagagcccgccattccccagaacccgaaagaatcgactccctgctcagggctcagcaagagaaggctaagatgttgggctcagagaattcaagagatttttatcttctgggtggggtcgtggtttttattttctaagttttttttatgaaagtttgaaatatgctgacttaggtaaaagacaccaacc

SEQ ID NO: 22771 - DNA, 842 bp, Homo sapiens
  chr11:133938756-133939598
  binary
cgccaagttcattgaaagagaacccatgtgccggtccagagcatcgctgcatccgtaagcagctagacctcagcttcctctgtcaccatggtgccggctcggctgggcccggcggtcgccatggtaactggggcgggtcgcagggtcctggcaggctgggcgcatgcgcgcggggactacaagccgcgccgcgctgccgctggcccctcagcaaccctcgacatggcgctgaggcggccaccgcgactccggctctgcgctcggctgcctgacttcttcctgctgctgcttttcaggggtgagtttgcgcgtttccgctgttgggagactagggtctgggggcgacggaagcagagcgggccgaagctgctggagccggtccgggcgaggatagcggtcctggctccgagggctcccggggtcccgggccggaggggcggcgcgcgcccgcgtccccgcagccagggctgggactcgggcctggctagggcgggggccctgggacgcccggcagttggaccggggcggggagctaatttgggatggggggcccgtcccaggcagtgagtcggtcccggacagccgtcggaccccgggggcgggctcttctcgggcggggtcctgtgctgggcggtgggctcatcccccgggtgggctcctcccaggcggggtcctgtgctgggcggtgggctcatcccccgggtgggctcctcccaggcggggtcctgtgctgggcggtgggctcgtccccggggtggacccctcccgggcggtgggcacggccctctggagggagcgcggcagctgcggcgtgggcgctggaacttgctggaagaccctgc

SEQ ID NO: 22772 - DNA, 970 bp, Homo sapiens
  chr11:31819792-31820762
  binary
cgtgatccctaaaaccaccaaatcgccggagaattggggctggatagagttgtctcttgttgttgtcagcccacgtcgtcgcgattttattcaccgccgcatggcgttgatcagatggaaaccatatttgtctccctctgagacctaacccccgccttatgcttttggagtatggactctttaaaacccaagaaaggcttcctgggctgggaaagggggctagggagggagggggaccctcttagcaccaaaaagtctgaggattccccgggaacgtgaagcgaagctcaccaccggtgcccgctacccccacgccggcaactctgtgcttcgtttggcccacgtgtcctccccacgcaactaggggcgacggtcctgtgcctgaggtgacaatcaccccccaaaaacctcacttgcgggtgggggggtggtgattgccagttgacccagaattttctagcaactaggcgcgttaaagtgaaaagcccctggactagctccacctccggccccaaccatcacaggcggaccctagctgatttgactctcacttcccgccctcagactgccggcgacgaaaatccgcccgaatcgggcgccacctctggtggaagctgctgtcctcggcttctgcccaactccaagaagcggaaggggggtgtatcctgcgccccaagctcatgggagcccacgcaccggggagagcccggagtggaggctctgggctcagccctcccaggcctaggccaccgtgccctgagtccctccccaagacttctcggactaagtgggccagactcttgtcaggggagggatcaccaggacctcagattgctgggggcggaggggtggacgctcgtgagtgcgaagttcgggtgtcacttgggtgtgtccagtgtctacaagtgggaatcctacggtttcaaaagtcaggcagggatggggttgcctacactcggtggggtcaatc

SEQ ID NO: 22773 - DNA, 1622 bp, Homo sapiens
  chr11:43599961-43601583
  binary
cgtccctctctcggaaggttccctgactgagactgaatattcaactcataatagtaacaagggcttttaccgatgtgcagaataacacaaataacgctgcaacccacactttgtcttgacaattcagttcaaaccaaagctgctcacagcctctcggcccaccccgcggcctcctcgtcattcactgggacctactggttccctttcccaagcctcgcccctctcagccctgcaagttgcgtggttgtgtttacaaattctgccacaattgcaaaggaaataggggtggggggagcggtcggggcgggagtggtggtagcgccaataaagcacttgcaacacgtggagcggtggttggggggaggtgtccaagagtcaagaagggggcggagggacaccccatggcctcatttccacctccccattcttccccaccccttctcattgcttggcacaatgcacaagtttaccccccgaactggatcctattaaataattcaatggtagcggtgtaattttggttggaaccagcacggattcccaagtcgtgactgcaaaaagtgagtaatgcgcgctggctgcgtcatggctctagtcacagttcattccgaactgagaaggaatcgtgacttcgcctggagacgtcccctacatgggagatggggggcgggggggcaccaaatcagtggggacgggggtgggggggaagacctatccaatgaaaaccgctgccaggggggcatttgaactccgtcgcttgctgtctcgctgtcccctctctgccccgcgcacctcgctccccctcccggccggcgctcgcagtggcgcgcctgctcgctctcccgctaagcgacgagtcttcaacaagttggaggaaggcaggaacgcaggggttaagctcggaaagccgcaattaccaagatcgtgaccctcccacacagtacagtaacttatatacttacctggaagaacccgctttgccgccgggcaaacacccgtggggggcggggaggggccggagggagcgggccggcaggagaggggctgcttccagctggctgcagtgcggacgggaccggcgcgctcccgtggcccccagaccgaggtaaggagcagggagtcggcgcccgggtcggctggtggtcggtcggctcactggtagtcggtcggctcacgggtagtctgagcagaacttttttttcccagttgccccgcgccgcggcggcggcgggcgcagaccgcggagcccctctggcgcggcgggcgcgcagacgctcggagggtgtgtgcttgcgtctgtcagtcccggagccgaggggatgccgtgggagggtgagtgggtcgcggagctgcaggagggtgatggatgggcgaagggggtgggtcgacagggacttgaagacagtgcctccaccgtcgagagacgttttctccgggcgtgctgggcgagggtgggagtgtgtgtgcgcgcgcgcgcgcccgcccgcacgtcgattccagggtgccaaagaacaaatatggcaactttccccccaagttcttgcaatgtttgcagtaacccatcctgggtgaggtttcccccactgggggactatactgctagggagggagatagtcaggac

SEQ ID NO: 22774 - DNA, 33 bp, Homo sapiens; identical to SEQ ID NO: 5734
  chr11:65307510-65307543
  binary

SEQ ID NO: 22775 - DNA, 782 bp, Homo sapiens
  chr11:76381512-76382294
  binary
cggctccacgcgcgcagtggggatggcgggaggggagtgtttggggggcgtcccttgggaccagcccccgccttgcgctcgctagaggcgcgcgacagtgcgccccccgagggccggccagcctcgcctgcccggcggctcctacctggctcagcgcggccgcagctcctctcccgggcagtctcggcacattttgcgcaaacccgcccccgggtcccaccccgcgccagaccccggggtcacggcccgaggaggagcaggccgctcagctgccccaccggagcccccgcgctccggctgcaatttaaatacctctcccgccggcccgccccgccacgcccccctctggcgaggccgtggggtcctagcgcctggccccgtgcctcggtttatccggagccggcgggggcggagtggggtggggcggcgaagcatcttcaccaccctgggacctcggccgggaaggggcgggggcccagtgtggggggatgagagggcgggagggagaggggttgcagaggaagcgccgtgggagcgaggcccatcccagcggccgccgcacgtgcagttcgcggccccgcggggtccggaggggggcgcggtggctctaggagccgcaggtccacagaggaaatccggcctggccccgatttcccagctgctggcgccgccgcacttaacgcgggggcaaacaggcgaggtgacggcggggctgaatgcggaaggaaatgacccttcgctggccctggggcggccgcggagggggttccccgcaccaagcc

SEQ ID NO: 22776 - DNA, 713 bp, Homo sapiens
  chr11:8615303-8616016
  binary
cgcttctaaactttcaaaaagtttcacgtcccaagatggggtgaaggtgagacggtggagatgaaccggggcagacagagaccaccccaaataccggacccgggggaaatggggtaccaacggctgggccccaggagacactcggaggggtccgcgggctcggcccggtccctccgctggggggttaccagccggccggcagcgagatacccagaggcccgtttttccaccgcgttgccatagcaacggcctggccggctgcgccccgggccgcccgccccatcccgcgggcccgccctgagccagtgactccagggaccactcaccgcggccggcggactggcgggtctccgacaggtgcgcacactcggcgcaggctgtcgctgagcccggaattctgcaccgggagaaacttttcagcccgcagagcaaccgcagggcagtggacgggggccgcgcgaggacaaacagcggcggcgggtgcaaagccccttctccaagccgcggggttggccgggaggtgccggctgcacaacggcgcccacgtgacccaggtgcagccccaggcgcgcccaagggcagctcgccttagagaaggacctaaaaccccgtctggggcacagaggagcagccacgtgttacgtaaaataaagctttgtagcaggaatatcacagtactgaggtgattgatgctcaggccactcttctcactc

SEQ ID NO: 22777 - DNA, 1674 bp, Homo sapiens
  chr12:103351149-103352823
  binary
cgccccgagcgcgccgcctgtttattcagccgggagtccggcacgcgccaggcgcacgcactgcaacaacaaacccagctgaatggagagtttgcaaggagcgggagaaaggaacgggagggggggagaggagaggaggagggggagtttagggagtgggtgggaggaagaggtaagaggaggggggggagtgggggctgcagccgctcgctgcagcagcggggagtggggggcgaggcggggccagggctgcgcgtggggctgggtgtcccattgaaaaggcggacgcactccggcagcccagcactctctcacttctggccagggaacgtggaaggcgcaccgacagggatccggccagggagggcgagtgaaagaaggaaatcagaaaggaagggagttaacaaaataataaaaacagcctgagccacggctggagagaccgagacccggcgcaagagagcgcagccttagtaggagaggaacgcgagacgcggcagagcgcgttcagcactgacttttgctgctgcttctgcttttttttttcttagaaacaagaaggcgccagcggcagcctcacacgcgagcgccacgcgaggctcccgaagccaacccgcgaagggaggaggggagggaggaggaggcggcgtgcagggaggagaaaaagcattttcactttttttgctcccactctaagaagtctcccggggattttgtatatattttttaacttccgtcagggctcccgcttcatatttccttttctttccctctctgttcctgcacccaagttctctctgtgtccccctcgcgggccccgcacctcgcgtcccggatcgctctgattccgcgactccttggccgccgctgcgcatggaaagctctgccaagatggagagcggcggcgccggccagcagccccagccgcagccccagcagcccttcctgccgcccgcagcctgtttctttgccacggccgcagccgcggcggccgcagccgccgcagcggcagcgcagagcgcgcagcagcagcagcagcagcagcagcagcagcagcaggcgccgcagctgagaccggcggccgacggccagccctcagggggcggtcacaagtcagcgcccaagcaagtcaagcgacagcgctcgtcttcgcccgaactgatgcgctgcaaacgccggctcaacttcagcggctttggctacagcctgccgcagcagcagccggccgccgtggcgcgccgcaacgagcgcgagcgcaaccgcgtcaagttggtcaacctgggctttgccacccttcgggagcacgtccccaacggcgcggccaacaagaagatgagtaaggtggagacactgcgctcggcggtcgagtacatccgcgcgctgcagcagctgctggacgagcatgacgcggtgagcgccgccttccaggcaggcgtcctgtcgcccaccatctcccccaactactccaacgacttgaactccatggccggctcgccggtctcatcctactcgtcggacgagggctcttacgacccgctcagccccgaggagcaggagcttctcgacttcaccaactggttctgaggggctcggcctggtcaggccctggtgcgaatggactttggaagcaggtaggttgcattttggggtgggcaggggggtattcttgccttc

SEQ ID NO: 22778 - DNA, 534 bp, Homo sapiens
  chr12:111284508-111285042
  binary
cgattgcatggcgttggccgagggaggggctaagactgttgattgactcaagaagtcacttagcgtcatgagggtccgggtagtctggtaaggggtcgctggagagtgtgtcgcccctctcccccaaccaaaagcttccctccaaccagctgctcttgtcctctcctcccgagggccctgtgccctcccagcggacttgcaggggagaacgtccatgtttgtgcgagtcacaaaggcgcccgttccaggggtcccagaacgcccgggcgtggggctgggggtgtggcgcagcgaggccgcgcagcaagcagtcctcccggcaccgtcggaagcgcagttgcagcagccgtcggacaagcggccggagcagccacggacaagcagtccgggccccgccactggtaagtttcgccgcccgcccggccgcgcctgctgcgccacagctccccctgccagggaaaaggaaagagcggtcgcggtccccagtccattcatatctcgctgccctaagcgttgaaagtatcagggtctccc

SEQ ID NO: 22779 - DNA, 492 bp, Homo sapiens
  chr12:114029373-114029865
  binary
cgtcacgccctgtcgccctcccctgagctcccggaagcccatggggccgcggccaagtttccccgcctcccgaggagagacagagaagccacgagtcgccgggtgggcgcggcgctcctgggctcaccggggcgcattggcactggcggcggctgcgcgggctcggccggccccaccatcaattaagcgaccgcggggtccggcgagcggcagcgtgtgtggaaattaccttttgatttcttaattacattgtcctcacctgcagctcaacccgcctaggagaggcgctcgccgagctcgattctccgggtgccataaattaggacgccagtcgccggcgaacgctgggggcttccagtataccttccagcgcagcccgcaggctatttttatctccctcagcacctcggcacctcggaggagcttctgctaattcactaccccgacaccgtctcatctcccctgcaaccaaacccaagtctattcccaggc

SEQ ID NO: 22780 - DNA, 998 bp, Homo sapiens
  chr12:14133936-14134934
  binary
cgcacggggcttcacctgcaacgtgtcgattggacggatgggctcggcgcgtgggtccggcccggggcgccgctgccctgcccctctgctaggtgaagggatgaaaccccccaaaagaccagagacagccctacccagtcacagcaccccctcccccacaaaaaaaaaaaacctttaaaaaagccacgtccaaattagcaagtgccgggttctgctggatttcagagctttacctcatgccagattcgttcacgatttcacggcttcgaccctttatctgcctgacacccccaaacccctacattcaaaggagagactccaaagcccatctttacgtaccggctccgagcgcctccgcggttgcagtctgcggagaggggtggccggtggctgggaatggagggttttcctttcctgcaaagcaggattaatgatccgtctcgggggttttgaagttcatgactcttctttgcaaggcaaaaggatatgcattcggacgccagcactactggatggtggtgatcaagaatcacccttgacgagcactctcgatagagcgaagccccgagatttcctagaggtgaagaagccggaggaagtggtttttgaaagggggtggggggaaccttcctttctcaaaaagaggtggggggtggagaggcaggagcccagattccagttggtgaggatcggagccgggggaagggaagcgggcgggggcaggctgtgcaagtcaaccgcgcggcagccggagagggagagcaggaggggaggaggggagcgtcagaaaaatgggtattaatcaccggggacggggggaggcgcggggaacgcaggttgcctggtctggatttgggtctcacactcaaaaacgtgccgcgcacacacacacagacacacacacaccccctacctcgcacaccctgactccggggggaggagaaacccacgaagctggggaagatactgcttctgctcccaggggcgggtgtgagcgc

SEQ ID NO: 22781 - DNA, 758 bp, Homo sapiens
  chr12:21680379-21681137
  binary
cgggttgcctgggaaatatctcagtaacccgacctccgctccaaagcgcccttgcggcgtccggtcaggcgcggggctttcctccagagctccagggcccctggctcagcccggggttgcgctgggagcgctggaaactcggcagccccgcgcgaccctatcctggagcaacctgccccctccccacgcccggggactgcgctgtgccgggaggagctgaggtttaagcccgggttgtcccgggccaggctgtcgctgagccccaggtctcgtttttgcagagggtcgccgcttcatctccgaccagagccggagaaaggacctctccgaccggccactgccgggtgagtgaccaagggtgcaagggcgctagtcctgcgcttttggaataggatggggcgggcagggcttgctccgcgctggtgccgaaagaaagcgtctcctcaccggaaagacgcggctctgaggcgccctcagatacagtccgcccgagggcagcccgggttggcagcagcagcagctggatgccgagcgccggagctgggagctcgcgcgtccagccccgcgccaatggtggcaagggcggcccaggctggcgctgcggctccccaagccttattggcttgcggctgttcagccagccctctggctgccagggtgtgcagaggtccccagggagttaggacctgaggtgcagctcagaggggtaaggcgagataggaagaactatgcaaatgcttctagaaatgtatctgcgc

SEQ ID NO: 22782 - DNA, 921 bp, Homo sapiens
  chr12:25101390-25102311
  binary
cgttctccctcccctctccacccgggtcaactcttccagccgctccctcctgcatcacgaacacacgctgcaggaaagcgcatttacagcccgggacatccccagacctcctctccaaaattccccacctcctgtgcataggagaaactgagagaagccctcacttcctttccaaacttcacaagcaggggagggagctgtagcagactttcacctccgttcccaaaagcgaatgtgaaaaagtccgagaaggcacgtcctgcgagtggaggttaaaccgaaatctgaacagaatgcacggtccccgcaaactacgattgataaagaagatactgagacgtttgcgggggatataagccatggttgtctcgccttcctcccctccctgccaactatgtttcttggagaaatcgccggttcgattcacgcacacatttttgtaaaacacggacaaaaccataagtagttaccttcattgttccgtcggccacgagggaagctcgagctgagcggagggcagatcccaagggtcgtagcccctggccgtgtggaccgggtctgcggctgcagagcgcggtcccggctgcagcaagacctggggcagtgcccgaggcggcggcgagtacacgtggcgggctggattgcagaccggccctctcgcggcggagactcgcgacctagcggattgcatcagcaggaagacactaaggctgctcccccaggccgcccccagatggtggagtctctcccagcccgaagattcggagccagcgcccagacccgagcctcactcactgctcactcccggggtgcagggcagaggtgccagtgttgcaagcaaatgacacggttacccccgaatcagccactgtgggtgcgtatccgagtgtggggatgcccgtgtaacatttatatggagac

SEQ ID NO: 22783 - DNA, 1426 bp, Homo sapiens
  chr12:3601576-3603002
  binary
cgagcctgcgcggactgtgggggctgcgcgccgccggctgcagtgagaaatgggtctgcagccacccgtcccgcaagggcttttgaggaggtcgctctagctccgcaaattgtgttctcggcccccgccttcggcagcctttttctctactctccagctggccctgagccgcagagagccctgctgggctttgcgtcccgagactcgaggctgtgatccctcgcctccctctgaccccgctgtcattacaacaaccggactattccgtaggctctgggcacctgtagtcacgaaggggatcagcgtgggcagcccccttaccttcctggagaaacggtgcgccgagatgggggcggagtggggcatgtgtgtgaagatcatcccttactcagtggcaggaaaaagacacagagagcaaactcccaggctctattaatagctgggtgtctggtggggctgccgcacatttcacatatggttacccatatgcagcggggggcggggatgggggtgtggcgcggggattgtccctctgtcttgccggaatgcaaaaaggtagagagacccttcctggtcttcttccctcgagttcttaactctgcgctaaaacccctaccccacggcgtaggcagcaaagctttataaatcccccttctctgagagactagaagcagcatgcatctgacaattgtcaatttcaaaacaaacacgctccgggacttgaacgcagcggggcattcagtagcgaatgctgtctccttgagttagggcaaagcctgcgtgcccgccgtcccctcaccacttcctcttccccagcccccacctgagagcagacattcggaatgatgtgtagtgcgaggcggctagcctcccagcagaaagccatccttaccattcccctcaccctccgccctctgatcgcccacccgccgaaagggtttctaaaaatagcccagggcttcaaggccgcgcttctgtgaagtgtggagcgagcgggcacgtagcggtctctgccaggtggctggagccctggaagcgagaaggcgcttcctccctgcatttccacctcaccccacccccggctcatttttctaagaaaaagtttttgcggttccctttgcctcctacccccgctgccgcgcggggtctgggtgcagacccctgccaggttccgcagtgtgcagcggcggctgctgcgctctcccagcctcggcgagggttaaaggcgtccggagcaggcagagcgccgcgcgccagtctatttttacttgcttcccccgccgctccgcgctcccccttctcagcagttgcacatgccagctctgctgaaggcatcaatgaaaacagcagtaggggcggccgggctcctgcgaacaacaacaaaacaaacaaacaaaaaaccacgtcgcgtgcggggcaccaaggc

SEQ ID NO: 22784 - DNA, 819 bp, Homo sapiens
  chr12:40618264-40619083
  binary
cggtgtcctcttttcccagcgccctgatttctattcttagatctggagataggcggctttcatttttcctgctcccagttcccagaccttccgtggggccgcaggatccccggctggcgggtcgcggagggtggccggccgggctgcgcactgcgcgcctccgctgcggggctccgggcctgtggactcagcggagtccgctgagtcagtttcttcccgcgcgactcccggccgcgccgccgctgcggtggaatctggtcccaggaggcggcgtccgcccggggtccggtctaggcgtgcgtgggggccacggtcacggtcatcccagccaggcccggctccagcagccccacggccgccgccagagttctgcgcggcccgtcgcctcggcggagcctctggcaggcccctgagctcgtttttggggcctgagtgggggaggaggaagccgagcaggagggctccggagagggagggcaacgcggggcggggagctgcctccttcctcataaacaggcgggcgtgggcgccgatggggcccgcggggagcgctggctgcgggcggtgagctgagctcgcccccggggagctgtggccggcgcccctgccggttccctgagcagcggacgttcatgctgggagggcggcgggttggaagcaggtgccaccatggctagtggcagctgtcaggggtgcgaagaggacgaggaaactctgaagaagttgatagtcaggctgaacaatgtccaggaaggaaaacagatagaaacgctggtccaaatcctggaggatctgctggtgttcacgtactccgagcgc

SEQ ID NO: 22785 - DNA, 1396 bp, Homo sapiens
  chr12:4377809-4379205
  binary
cgtgggctcactctgcagctgcagttttcagcccttgcagtttagaagattctgcatgagcacggatgccacgagggtatccagcgagtgggaagggagtcgccctacatgttttcacatcgatttgtaaaactgttttgaaagggtatttctagatccatttgttccaaatgcagcaaaattcatccgatatcgctcacaatgcatgcacgggttatcttacatgtaatagccatcgtattaaccaacccagctgatactgagatggtgaatggggcgggggagcagggaggaatatgtcgcgcatgaaaaactccgggtgtaaaagtcaatgcagaactcactccccgaggaaccgaaaaagacattcacgactctcaagtggagagaggatagaaagtcaagtggcgggggtcgcgaccagtgatcgggatttcagtctgatctcagtacccagcggaacaggaccataacctaaagaaatgagctttttccggagcaaagagcggccccgatttcaaagtagaaaaaataaactgcttgggggtggaagatggcgaggggcggggggcggggagggaggcgggtcgcggcgctggctccggggtccgcggcacggcctcctctgccgcgctgcccagggcccggaccctgcccggcgctgcgcccaccgcgagggtgccagacccgccgcgccgccgccgcgctctcccagccgcggccccctcccccgccgcttcctcttgctctcccagccccttcccccacgtgtggatgacgtcaaaattccgcgaaaaagccgcgtggtggctccccgagcggaggcgcgattccgccgcccagcggccccctcccgggggcgcctggagggggagaagggcggaggcggccggttccttctcctcccgggaggcaggaccccccgacgccgaccgccggacgccccccgccccaaagcttattggaaaattcacttttgtaaagcaaatgtatttccagagctattttcggccgcgtgaggcgtgtcctaagctgaatcagacaggaagagggggaagttcgggtcttttaattttttttttttccgaagggaggggagtgagatgctaggtgggtgacagacggcaggcgctcgccttcttaactcacgcctgtcgcatctgccgcctcagtaatccagccccgtccaagccgaaattcgccgaagggagtgcggatgcacaggcctggcggactctgcccccctccagaacgcagcggcccagcgccccggcgggcgcggctgcgaccagagggtcccggaagcgagtgaacacctgcaatcgcactgcccgtccccacccaccctgctcccccgtgctctccgcttcccgacgttttcctcttctccttgtcc

SEQ ID NO: 22786 - DNA, 563 bp, Homo sapiens
  chr12:8171309-8171872
  binary
cgccgccgccgcgcccggcagtgacagcgaccgcgccgctgcgctcccgccggccccgcccgcagccgctgggacccactaactgcctcgaaaagcctaggattcgactttgaatggtccgttaatgtggtcgcaaaacgtgactcggttcatcgggcgctccctgtaagcaagacaagcacccacctgcggtcagagcaggggtccggctcgcggtcggggttgtccaggccctcccggcttctcacctgcgcaccacacggtccagccctggcggctgcaggggatccctccgagcgccccctcaggcgtcttcctgcgaccggggagagggaaccctttacggggaaacagttttggggcccaccacccttggcgccgccgttaggagggtgtgaacatttctgctttaagagatacccgagcccctcaccgcctgcggcagggaggtggtgccccggctatcgccgcgggctggccggctgggctgggaagaaggctcagggtgagatcaggcaaagagttctttcggactcacgagctctttttggatgaaaagcccc

SEQ ID NO: 22787 - DNA, 919 bp, Homo sapiens
  chr12:94543219-94544138
  binary
cgcagggctcgacggccggcgtggtgtaccgcgcgggccggaacaaccgctggtacctggcggtggccgccacctacgtgctgcctgagccggagacggcgagccgctgcaaccccgcggcatccgaccacgacacggccatcgcgctcaaggacacggaggggcgcagcctggccacgcaggagctggggcgcctcaagctgtgcgagggcgcgggcagcctgcacttcgtggacgcctttctctggaacggcagcatctacttcccctactacccctacaactacacgagcggcgctgccaccggctggcccagcatggcgcgcatcgcgcagagcaccgaggtgctgttccagggccaggcatccctcgactgcggccacggccaccccgacggccgccgcctgctcctctcctccagcctagtggaggccctggacgtctgggcgggagtgttcagcgcggccgctggagagggccaggagcggcgctcccccaccaccacggcgctctgcctcttcagaatgagtgagatccaggcgcgcgccaagagggtcagctgggacttcaagacggccgagagccactgcgtaagtcctgcccccggggcgccgcggagagcgctgctgccggggagccgccgccgccgccgaggcagaacgagctgggggcgagcggcggggcgggggtacagccgggtgacatttaccaggtctcaggttcacaccgcgggcggccgtccgaaggctcctctcggacggtccccgagacctggagcacggcctgaggtccccaaagggagagtgtaaaaaggggggcggggagggttggagttagactcaaaactctagtggctgcatcccattgccatccttccctgtccaaacggggacgcttgtttggggctgagtctcctcgc

SEQ ID NO: 22788 - DNA, 984 bp, Homo sapiens
  chr13:108519639-108520623
  binary
cgctctaagtgctgccgccgccgccgccgccgccgccgctgccgcagggccgcccgcgggcgccgccgccggggctccgactgctgacgccgcctcccgcggagctccgggccgaatcgcctgggctgggcctcccgagagccacagtcatcttcagtccgcgggctaagttgccgccatcttcgtcctggagaaacacttttttggggggagcgctggcttttgcgtcatctcctcccgcgccgagctcgctccatcctggcgcagtggcgccggctcggcccgggaggagggagaaggcgcgcgggggcgggcggcggcggggccgcggggcccgggggcccccgcccggctccccgggctcaggcgcctgctctttcctttctgtccccctgtccacgatattttgttttaatcactgaagagaaaaataaaagtcagactgcggacggcatggccggtgaggctcctcgcggccgcgccgcccgcacgctctggctccgggaagcgtccgagttgcaggcgcccgggcagaggtctctactggtgcgagggtctgggcagagtcctctcaactaaggaccgagccacttcggatggaaggtgggggtccgcggaggaagctcgaattggctagaggagggatgaggtgacatttggtctctgaatgcgtctcggatcccggaccgcgagatccatcgctcccagtgcgtgcagttattccgtcctgctgtgtgacacgggagaatggcgcgcacgcctgtgcacctgcatcgaccgtgtagctgcctgggtgacagccacccatttgtctatgttttctttcctattctaaagtaaacgattagaagtggcctcatagagtcttaggaagaaacagtaagccctgtgccacccggggtcactgcctagccctgccctccgcgcgcaccgtccgcgtctccgagggctcctcctcggacctggaccctctggagcggcttc

SEQ ID NO: 22789 - DNA, 855 bp, Homo sapiens
  chr13:28673915-28674770
  binary
cggagtccttgaaaacccctttggggtttatgccaggataagaagagactagaagaaagggacagctagtattttaatatgtaaatctgtttgcataatatttcctaggtaaactattcgttgatccaaccaaaattcggcggggctggggggtatcgttattgaggatgactcgctctaggggagaacgcggacgcattttcccatcagagttccctccataaatcaaaacctcaaaagaagagttaaagacgacacccaggtgtctacagtatccaagggccgggccaggagaggtccttggccacctggcgccgagttcgcggccgcagactcccacggacggcccagcacccgagcgcgcgggccgagctgccccagacccggcgcagcgcctcggcgaggccgtctgcgaagtccgggccgccactcgggaccgcggcccgagccagaggagagacttcggagaagagggaagaggacgcggggtgggaaacgccggggccgcaggcaagtagtgggcgagtccggagggcgcgaaagaggggaggggcgcgggaggcaatggaaggagcgagcgcggggaggagcgaggcggctgggccggaggaggcgcgcgcccgggtccacactgcggggtgggggctgagggaccgcgaggggctgcgagcgagcgagcggggccttaccgagcagcggcagctggccgccgtcgcgcgccaacgccggcatggcctccggagcccggggtccccaggccgcgccggcccagccctgcgatgccgcctggagcggcgcgcctcgcgctgcaggtggctctcttaaggatgcgcgtcaccgaccgcaaattccctc

SEQ ID NO: 22790 - DNA, 2118 bp, Homo sapiens
  chr13:29067770-29069888
  binary
cgatgcttaaaagaaaggcgctccgaaatctggctctctgcgcccaggggaacgaggcacaaatctccgccactcagccccactgagcagagactgcgagtccgaaccctcaagttcctcggggctttgacccctcaatggcggcggtctaactgctggtaaaacccccggcccctgactgttccaccgcccgtctcccaaacgcccagcgaaggctgacttaggtggcgggcggacctcatcgattcctcaaaccacatcgtttggtcaaaatcgcccgccctctcttcgctcggattttaaaggctaggcttgtaagtcagtaagttaacggtatttgggccctgggctgcccttgtgggtcagggtcactgatgtccgcgacacggactggaccgcgcaccacgcctgctcccggcagaggccccacccgggtggctgagcgcagcgcactggggccccgcggtccgagagcggcggggaggagcgggcgctcgccgagcgttccccgggacagtccggcttggggactcaagcgggtcatgggatgccggcgctggccctctcctgagatcctcctgctcccccgcaggcacgagtcccctccaaatcggctcccctcctacactctcgtgacgcgaggtcgcggccagtgcccaatatcaccaaagtcccggcctcagcccagccccgggcagcctggcaggctttcaggagcctctgctcccggctccgggggaccctgcgtacctgccccaggtcctctgggaatgggctctgggtgccaggcaggtcccggtgcgtgctgctcctagtgcccagggcctcggcagtgagaccccaacccgacagctggataagggatcagcgatcctgtcgcaaacggacagccccagcgcggacccggtctgagcgctgatgctcgcgggtccaggccagccactcctcgaggcgctccctcggagaaagggcgcagcggccccaagcgtgcccgctgcaactagtgtcccaggttctcgccgtagccagcttctccgggctacagcctcgtctccccgcgtgcaccccgccctggcctcggaggctctgccctccggccgccccatcgcagcccgcctcaggccccggcccccagccgcgcctcacctgtgagaagcagacagctgagcagcgcgcacagcaggaccccggtgtcccagtagctgaccatggtgagcgcgacgcggcctgctcgcccggtgcccgcgctccccgcggccaacgacccggccgccagagtccgtcctctcgttcgccgccgccggccccgcgccctgagcgcccgtctcgcggctccagccaggagacaaccacttccccgggtaatcctcgccgccaggcgcccgctggccgctgcacccgagccccggagcccgctccgagccgccgccgctgccggggaggagccgagaggagtgtccgcctggcgcgctccgagcctcccgcggacctcgatgaagagcagccgagggcgggggcgatttataacctttccccagcccacttcctaccccggcacctccttctggtgacgtcaaggggtcccccacccctcatccgcctccccacctaccctcttcttcctcccaggctcgcttccctgcggctacggagaggggcgggggccgacgagggcgggtggcccggggccgagcgcgcgtggggaggtgctggcgacgcgggcccgggagcgcggccccggcaggttcagggtctttgctccgcgccctcttgcccttgcccctcctcctgcccatcgcgctcaggaaatccttgcagactccctccacccggcttactcagctctgggggccgcccgaaactggggaagggacaaggctgaagctccgccgcctggccctaggggcggaaagtccgatccaagggaagctggccgcgcctccgcgacggtgttcttggcacggaggactgaggcgcagtccggctgtctccccttgcctgctcttcccgcgctgtcccgccgctcctgaccccttcagactgtcccgagaagtctaggaaggcaccggagaccctcggcacaaggcactgaacctggagcgcctgaggggaactgac

SEQ ID NO: 22791 - DNA, 1093 bp, Homo sapiens
  chr13:29292491-29293584
  binary
cgtaagttcaacaatgaggttccttttgggaagcgacagttgcacaattgttattgttattttgctgcgtattaaaaacggacagggagggggcgttttaaaaagcagctcccaatcgaaagggccttatttttaactcaccccacgattacagtcttcctgccaggctgggtacaggtcgggccgtgccaggggctgtcgcctcggatgccctgcgctcgtgcgcgcccgggttcaagggcagcctctggactggggcaacagaggacgcgccggggacagtaacctcggactacgcggccggcgctggggtggggagagtactttcccgtcgaactcgaccaaattacgcttgtcggggagtctcaagcgtattgtaaagcaaacctcggcaagcgcacttccgcgtcccgagtgacacctgcagggttctccggcagccctcggcttccccgcggccctgcggacctcggcctcagcgcggcgcggcggggcgcggagcagctgctccttctgcgcagtggacaatcggccaatcggcgcctccgtcggtcggtcagcggccctgccagcgctaggcgatgactcggccgcagccagctgagcatcgctgtccgccgaggaggcggggtcggctgccgcggcgctgtcactgttctacccggctctcctgcgattgggcccagcggtcggtgccccagcggcgattggtccacccggacgtcactctcccctggagagtggctagtggatcgtgcacccaccctcggaggcccggagtggatcccgcgcgaccgagcagccactcagcaccgctgttgagtggtgggccgcgccgcaggctcaacagctctggagttgcaaagcatttctgaatccgaatatcctttctcatagaaacacataaaacaacagttggaaaagtaacatgtttgggctgtagcccccagcaggatcccggtcggcccgcagaagaggggaatgggcgcaggtggagggcataggaaagagagtgctcaatgcagagttagcggagggttggaatgtggtcgctggcttttcctggggaggggaggggggacttgggcaaatc

SEQ ID NO: 22792 - DNA, 907 bp, Homo sapiens
  chr13:29394053-29394960
  binary
cgcggggcgcggagcgcgggccgggaggaggcgcctgggtctcggcgagtgcgtctccgggcggccgggagggggtgcgcgcatcagctgccccgcgccgcctaccgctcgggcccgctcgccgcccggccactgtcaccgcggacggcacctcgcgggcgaggcgcgccggctgcgtggcgcgctgcgaaggttgggctgggcggccgccggccccgcggcttctctttgtccaggcgaggcggctggaggagcagccgcggccgcggcggagccgggagcgcctgggcgtcgtgcgggcggctccggtccccggctgcgccccggccctcgagcgggggcggcggcctgggcggtgcctgcgccgaggtgagtgcgggggcgcggagcggagcgcagccgcggcgcgggcgtgggcgggcagaggtgatagcgagcgccggcggctccaggtgcgggggcgcccctcgcgctccacctgcgccgccgccgccggctctcagggcaagtttatctccccccttctgcggaaacccttgaccgcttagcggagtacagacctgtcggtaaatagaaaactcgagctggagaggaggaggaagcagcgtggcggaacccggcccgagatgagcgtctccgtgagggcagtggtggcctcttggacattacatctttcttggctctttttgacccaggtgagcgaatcctctgctgcgcggtccggtggggtcggctggctctgctgccgccctctggacccgccggagacaggtgagcggagttggggagcgcgcagccgggctcggggcagcgccgggctggttcggcttctcgtctccagagcgctgatgcttcctgcccacatcacctgctctggcttagggactgcagctcttttggcaccttc

SEQ ID NO: 22793 - DNA, 1420 bp, Homo sapiens
  chr13:37005451-37006871
  binary
cgattatttcacctggcttgtcagtcacctatgcaggcgtctgagcccccgggtttccaggagccccccgtataaggaccccagggactcctctccccacgcggccgggccgcccgcccggcccccagcccggagagctgccaccgaccccctcaacgtcccaagccccagctctgtcgcccgcgttccttcctcttcctgggccacaatcttggctttcccgggccggcttcacgcagttgcgcaggagcccgcgggggaagacctctcgtggggacctcgagcacgacgtgcgaccctaaatccccacatctcctctgccgcctcgcaggccacatgcaccgggagccgggcggggcaggcgcggcccgcaaggacccccgcgatggagacgcaacactgccgcgactgcacttggggcagccccgccgcgtcccagccgcctcccggcaggaagcgtaggtgtgtgagccgacccggagcgagccgcgccctcgggccagcgtgggcagggcgccgcagcctgcgcagccccgaggaccccgcgtcgctctcccgagccagggttctcaggagcgggccgcgcaggagacgttagagggggttgttagcggctgttgggagaacgggtcacggaaacagtcccttccaaagccggggccatcgtggggtgggcgagtccgccctcccaggccgggggcgcggaccagaggggacgtgtgcagacggccgcggtcagccccacctcgcccgggcggagacgcacagctggagctggagggccgtcgcccgttgggccctcaggggcctgaacgcccaggggtcgcggcgagtccacccggagcgagtcaggtgagcaggtcgccatggcgatgcggccccggagagcgcacgcctgccgcggtcggcatggaaacgctcccgctaggtccgggggcgccgctgattggccgattcaacagacgcgggtgggcagctcagccgcatcgctaagcccggccgcctcccaggctggaatccctcgacacttggtccttcccgccccgcccttccgtgccctgcccttccctgcccttccccgccctgccccgcccggcccggcccggccctgcccaaccctgccccgccctgccccgcccagccggccacctcttaaccgcgatcctccagtgcacttgccagttgttccggacacatagaaagataacgacgggaagagcggggcccgctttggggtccaggcaggttttggggcctcctgtctggtgggaggaggccgcagcgcagcaccctgctcgtcacttgggatggagaccggctttcccgcaatcatgtaccctggatcttttattgggggctggggagaagagtatctcagctgggaaggaccggggctcccagatttcgtcttccaggtaac

SEQ ID NO: 22794 - DNA, 1613 bp, Homo sapiens
  chr13:88323357-88324970
  binary
cgagacagcagcattctgaatggcaggaggaaggcaggcgatcagcacagggctggaatcatctgttcctgaccaccagcaagcctggcactgccggggttatttccactcctccctttcccaatccgagaattgcacagtcccacgctcgaattacacacatggtccaagacttctctctcttcctacgaatgtgacatccaagggggccccggttgcgccgccctagcccagggacgccttcgccctcggctgccatctatcggccaccgagcgcccgcttcgccccgggcccatcatgtctgctgcagcttggctcgcaccagaggcgcgacaataaacaagtgcactggactgggccctgcacccgctccggagcagctgtctcagagacccggtgttgcttaccgcgttgccacctcctcggcgcccgggaggaagacgcaactttctcggagttttttttagagccaccgggctgccaggacaagccacaggcatagaacgacgcggttgctgcccgccccccccttcccccagaaaccccaaaggatgtcggtgatagagagttccaactaatgacgattgtgcgccgcatctggggaagggatacagaaaaaaaccctgcaaacaccgtgaggatgaaactgccaaagggatgcaagagcctctcaaatactaattaggggccgcggcggcggcgggctcggcgcggagacagcgtcggcgggatcccagcgcggtggtcgccgctgcgctggggggcggaggacagcgcaggagctgcagccgccgccttcgctggagcagccgaggggccggtgccacctttgctcgccccctcactaccatgtacagtgtgcgctgcaagaagaaggcgggagatgcatgcacacccccgcgacccgctccctctggctcgtcccccggcgtgcgccactgaccaggggggaatgtggtgaagacggcgaggaggagagccgaggggggaggggagggccggccggcgcgaacccaggccggagggtgcgaggagccagaggaggctggagggggcggcggccacagctgggtcggagaaagttgccccctatgcagatggcaactgtgagtacccctgtgggggggagggtgcagcgaaggctgccagggaccccgcgatcgcgccttaacacgtattggagcgagtgtgcgagtgatcatgagtgtgagcgggtgcgagcgctcggcggggctgaccgtcacgttggcggggccggcggggccaggcagtcttctccgcgtccccctcctcccgctccgtgcctcccctcccagcagctccccctccccgccccgcccggctccggctcccggcccctaccgcgaggcgcctctccagccggacctccgccgccccctcccgccgcctccctatcccgccgctgcagaacgccccccgctctccaccccccaaccctgctgcccgctccgactaccgcggagagcaccggggagagccttttggggagccccggaacccgcggtcgccaccgcggcggcggccccaggctggaggcgtccgggcgcctctttcctccagcctctgggactgcgctgctcgcagtctcctc

SEQ ID NO: 22795 - DNA, 364 bp, Homo sapiens
  chr14:21769015-21769379
  binary
cggtagatgaatacatattatagatcaattcgtgattatatgtcccaaataacccgtagaaataataactgtcatgaaaggagaagccacgtgctctatttgtccacaggctgaggaccaccttgctgcggttgaccgctgctggccgggacctgcgggtcgcggaggaggcggcgccgctctcggagaccgcaaggcgcgggcagaaggcgggatggcggcagcgcctctccatgcaccagcgcccccagatgcaccgactgcaagggcatttccactgcgtcggccctgccagcccccgccgcgcccagcctcgcgtccaagtgggacacagacagctccacacagccggtgcaccggtgcc

SEQ ID NO: 22796 - DNA, 185 bp, Homo sapiens
  chr14:23355352-23355537
  binary
cgggctgggaggccgcaccacgacctacccgttatcctcgttggaaacaagagcgacttggcccgctcccgggaggtatcactggagggtgtgtatcctgaacagattccatacttgcgatctcaggggaatgctctcccttccaagtcacctcttctccctaaggcctttttaccatcgcggac

SEQ ID NO: 22797 - DNA, 837 bp, Homo sapiens
  chr14:42075093-42075930
  binary
cgaaggtgctctcagtgtccgaagaccacgtgctggtgaacccacaatgagaagcgaaagggtttcaggactctagcagaaaggaagagcaagatttcactcagggtttcttagaagaaagagttaactttgctcactggcttttccaggatggagggagtggggatagggtcggggagagaagcattgggagtcttgtcggagtctcaagcaaaaccaggcgagggctccgggcagatccattcccgcagggccctgtctaacctcctttccagtcgcacctctttcctgctttagaccctgcgtctgtgccggtgaccttagagactaggtctggcttatgaagactgttgggctccctttctgcccttcacatagtaaaatgtgaccaactgcagtattcgtaatgtctgatgctgagctgagttgattcccaaatataaatgttcttttcagaatccgctcccatctgattagtaagcaaatcaccacccacaactaaggggacagcggaagccagcctcagatgactgaaacccccaagtcagtagctctcctcaaaatttccggcgggttattatagataatgacttttcccaccgccctaagcagccgaagcttgactcagtgatgattctctctatcccgtaactgcgaggaagtgggcgatcagcaaattgcccttttgcaggaggctggggacgcccctggaagttcgctttcattctccaggttttctgccttttcccttcccccttcctgcaacgcccccgcgcctcctcagcctggggatttcctggcgcttcgccggccctctccgcaaccccctgataaatc

SEQ ID NO: 22798 - DNA, 928 bp, Homo sapiens
  chr14:51560302-51561230
  binary
cgggctcatcagtattccgcctgcggcgtctccccgaccctccgccgtgcctcaccaggtccgcctatccagcagcgacagactcccgccgtccgcgcgaccccaccgcccccatcccagtccctccccgagggttcgcagcccgccctgccctcgagcgtgcctagcggccctgggcactggcgcggctctacccagctatgcagtgctttcccacacactggccgcggccactggctgcagacccgccgcggaaagggggcgccctgagtcccgctcgcaggcagcgcgccccgagagacccgctctaaggcatccccgcaacaactctgtgggggcattcaactcccccgtgcgccggttaagattcccccatgcctcctgcaatgcaccagaccagggaggtaaacatcgaaggcacctgcattgcgcccccactgggatgcgctgtgcgcaagagacggggaccgtctgctgcaaaaccggatgatcggagacgcagggagttaggagtgggttttcttaggactcaccttatgtagtttccacatggcccccagagccttgacttcgtggctggagtgtttgccctcctccaagcactggtagcacacgggcatcttgcattgcacgcagtacatgctgtggttctccagctcgtggtctgtgcaggtggagaccttgcgtgggctcagcctccggctcacacgaccctgggccgggggcaccaggcggtgcttggctaggggcccccggggcgggtggcagcgcaggcggcacggatcgcagtagaagacatcgcactgttcgcacatgacggtggcttccttgggcgccttctcgcagagctggcacttgagggccgcggctttgctctgctggtagcggtcaattaccccttccagtacgcgattcttggggaagccgc

SEQ ID NO: 22799 - DNA, 544 bp, Homo sapiens
  chr14:60097114-60097658
  binary
cgggtttcccgtgcgcctcaggcatgcactactgaaataaagagaataccctgacttttccagttgctccacacacagtccatcttggtggaatcggcagtggcctgcatcgtgcgggctttgggggctcgccgtggctctcctcgggggcgccgagcgtgcactcaagcgttggtgcccggctgctgcggctgggctcgcagtggccgcgcggctgcggagagactgaggctgcaccaggcggcgcgcggtgaggggcgggagcgtcgctggcgccgcagtctgcgcggccggcagcgaatcagcgcggcgcggccccggagccgcctgcgcgcatggggatgcgggcgccgctccacgcgacagcgttggctgggctgcccaagggtgctaccctggagacgggtaaagcggttctggccgcgaaggcgctgacgcggacagtgggtgggaggtttgggaggaggggaaaaagggctgacggtgggggtgagaggaggaggacttgggctgttcctgggagttcttgactcccagaatatgc

SEQ ID NO: 22800 - DNA, 893 bp, Homo sapiens
  chr14:60385935-60386828
  binary
cgtaccttacagcacatgtcaatttggacaagccacatttcaagcgatcatgggccctgcgagtctgtgggtagcggctcaccctgctggactgcgcagatccagagaacgacacgagacctgcggttgctttggtttgccttttactaagttcatttctcagcctctctgcccactctgaaaagtctcccctttccccccttttaattctactctattttgtaaattactgttgtctcctgaaaattttggaatgcttaaaaggcactcaaaagcctgtccgagatcgactagaagaccctcggaaggtccctctcttctctggacctcactgggcgttcgtttgcccgcgccgtccttccattcggcttgccgggcgcgcagcggcttgcggctgtggtcagccaccttcccgggaggcggtggtcgctggccgcgggaaggatgccgcgctgggggtcggggttcgtcccggctgtcacgccaccttgtgacatcacagggccatgccctcggggctcaaggccagagaggctccgcgcttccaggacccgagagctaaagataatgaatgggagagagcgagactggaggaggtaacgaataagtccccaccaccttgcccataacgcgttgctttcagtcacgttccgcgaactggcgaaggtaagtgaaaagataagcgcaggtacagaaaaacctgccagcgagaagctcccgccgtttcccaggagccccaggtggggtcttccggttggacccctgcttccgctgattggttggaggtcgccaccacgtgatgcaaacccgggtcggcctccgcttcccccccacccttttatccccctccccgccccttttctcctcctccccacccggaggtcgccggaggc

SEQ ID NO: 22801 - DNA, 1366 bp, Homo sapiens
  chr14:70654750-70656116
  binary
cgctaccaacccagcatgctcacgatccaactgtacccacctgcccaggcatctctctctgcccctccccacccggcggcaccctcctgtagacacccactctgccagatctgcccccccaacactgcatacacaatgtacactttccggggcaccctcaccccacttctcctggcactaaatccacaggaaggcggttcatatgaatgatcttgagaaataacttaaccccgttactcacaatcagggatcctcttaggggcatcccaagccccccaacctctacctcccatgtctcggctgcccgctaagggggaagggcaggaggctcaccccattactcaccgtttcctctcggcctcccgagcggagtgggcaagggaggggggtgaggaaggtacgcgatgcccccgccgcccggcgcctcaccggtcgcagcggctcatcgcccccgcgggctgcccgccggccgcagccgcgtccggggcatgtcagtccgccgccgccgccctcccgccggggttcgtgggctcgcagctgtcagggagctgcggggcagcgcatctggagcgcggggtctgggagggagggtgtctggggccagggcgaggggccccgggaggggtccttccgcacggatttcagaaagagggaaaccccgacccagagcggtgactggaatctacgcccgggagaggcccggagtcccggccgcgggcggcgggggattcctgcaggaaggggcaggaaggcaagcagcccggcgcgccctggcggctccgagggacctgggctcgggcttgcggtcgcgtcgcctgggctttccctgggctgggagcgcgccgggtctccgccttgcacgctgtcaccgcgggagacgtctcggcctcgccgcgcgcagaggggacgcgcggagaggctggtttctgggcgagcggagagctttgcccattaagctgccggaagaagccaaatcaaaaagccaatctccaagcctccaaacggaacgtcaccctatcagctgggagacagcgccgcactgactgacaagccgcgcatatttatcctcgcgcgcggaggggagactctcagaacgctcctcgaccagcagcgaggaagtcgagcccgcatcccgcatcccgcatcccgcatccagagcccccgagggacgaattcagatccaacccctgccccgcggccacccaccctagtcgttggagcctggcgcccgcgcctcccggccggcagcacgtcaaaacggcggcgcgtcctgacctggattccgccgagttgggagctccaggcagcaggcgggcgcgcggcaccggctttccccttgtcctcaggagacgctgcctgcaattcc

SEQ ID NO: 22802 - DNA, 507 bp, Homo sapiens; identical to SEQ ID NO: 5754
  chr15:31774606-31775113
  binary

SEQ ID NO: 22803 - DNA, 946 bp, Homo sapiens
  chr15:48936649-48937595
  binary
cgaacggggtggggactaaacaaccctagcacctctaaggtgcccccaggaggtcttgccaaggagtcttccacagggagagtcatcctgcccgttgttctggatcttgaaacttgggagacccacaccaaaggagggaaccggttcctttaccctttaagcgcgtcgtgtcctccaccgcctcttctcttggcccgactggctctggtttccttcacgttcccagcctccaaattggcgtccgccccatggctcgtgtaggacgctaaaagcacggtaaatcccagggcgatctccagcagacgccctcgacgcatgatgccgagccgccaccggctcccgccgcctcttgccgcgcccggggctcggtctgcggccgccgctgcgccctgaagcgcaccgcgccgccggggtcccgctatcccgccgcccgtcccccgggccgggctcctcccgccttctccaggcgctgctcccacttcaggcggcccctgccagctgcaacacagagacaaatccccgaggcggggagactttcagggcatcgggatgctgaagcctcgcggtccccattcccaagcccaacccgtgcgccgcctgcgcgtggcgcagttaatttgggtaagggaagaccgtttggtccacagctggctggaaagcccaggcccccggcggcagcagccccggccgatccctcggcctcccgggccccgccagaagagcgcggcgcaaagtacccatatccccagcggtcctaagccccgggcgagctctctgggtttattttttttagcggcacgaattgcgcgcgatgcgcgctctgaacgccccactcctcagcctgccctctccgccaggctggaagccagccgcgccgtccccgccgactccgggcgatgccaccgccccccgaacatctgacgcggagcccggcaccaagagcccc

SEQ ID NO: 22804 - DNA, 406 bp, Homo sapiens
  chr15:60289235-60289641
  binary
cgtcggtaagtccttggggcaacctggttttcccctgctgacaagctgtgtcagttaactgcaacccaccaagagtcagccaacagcccccgcgctgctagagcgcccaaagcagaggccggccgcgaggagggccagagtgcaccgcgggggggtttgcaccgcgctggggttggcaccgcgcgctaggacccacgaagcggcgcgctagtcccaggtgagcacgaaatgagcggaaggactctgccgcggaggggcggcgagcgcctggctgcgctgcaggccccgccaagccccgccccctagccattcttagctgggggaggccagcacggatcagccgctttctttcttttctctctttctttttcaaacccgctttgtgggtggcaactcagcgggggac

SEQ ID NO: 22805 - DNA, 832 bp, Homo sapiens
  chr15:63795400-63796232
  binary
cggtgggtggataccattaggcagaggtctatgcggaagaggccgacttgtggcgtgggaggtagggaggagtaagaagtgattgacggggcgtccctggctgctctaggactgcattgcggggaggtgcccggctctaaccactgcccggcccggttaatcatttcctgaccttccttcctcctctcgctctggccgcaggattgccacatcagtcttccccctcctcctgctcgccttctggccccgaggctccttcgccgggttttacaaggagccccaacttggaagcaatatttgtaatagccccggacgtcctcaagtgccccagtgagatcgcaggctcgatccagggtatgccggcccaagcggccccttgaggcttgccctcttctctaatccctcactaaaaagaggtcagagggtcagggatccaatctccatacagatcaacaagttacagactcggtttccccctgcggtaaaaaggggatggtaacagctggtagggtgttgcgaggcttaaatgcggtatgggaagtgcctggctgggagaccttaggtatctaacaaatgctagatcccttcccttcttatcgcctggtaatggggagtttagcttgcccagcaatcccaggctacgtttatctcacttgaacttcctggcttgaaagtcctacgatgtgctggaggtaacgcagatggtgagtcacagtgacaggatttgaacgtgggttcatgggcgcccctgcgggcccacccacgcagcatctaggtggctggctaacgccacgtgttcagaacctagaaagggctacggatcgcacctgcc

SEQ ID NO: 22806 - DNA, 523 bp, Homo sapiens
  chr16:12897365-12897888
  binary
cgctctctcggcctcgcctctcaactgcgcccctggaatccctaagagcaggctttgatgcagctatggcggctcccaggccccggtgcagccccggatggtgtccgactggcggagcgcacacctgaacaaaaggttcccccggcggaaggttccgcagccccagagtcccctccccgggtgaggggcgggcagtacctgcgggaaacgcggccagggtcctgcccctggctctgtggaaaacaccccccgcctctgcagccgacatggcgagcgagtttctggccttcacttagaacactgcgtgggtggaagccgcgcgacttcacacagaacaaccgctggacctgtcccgctttgggcgacgccctttgatctcggggcgggactggggcgggacggggaggggcccggtggctcggggcgccactagtgctgcctgggcggagcggaggcgccagcggcccctctgggatcgacctgcgcgcctggcgagtggagactgtctagggcacgcgtgggc

SEQ ID NO: 22807 - DNA, 1768 bp, Homo sapiens
  chr16:23846783-23848551
  binary
cgctcctcccctacctctgcagaacgtgtgtgtgtatgtgtgtgtaagtgtgtgcggccacaagcctttccgaatgagtgacagcgggagcccatccctccaggagacgcgtgcagaatgaccaatgggatggatgggggtggatgggtaccagtctccgcagaggccggggtggaattcgctgcgccccaccccttccacccgctccccttcgccccgtaggtctttccactctcgctcctcccctgggcacatctcctgaacgcagccccgggggccgaggacggggtggggtggggggcgaggctcgggtccgacgaccccgggctgcggtcccggcgctgcagagctgcggctgtgcacgcttagccgcgaggcccgcggtagcccgggcgccgatatgtaaagcagctggcagcgctgggcggggcctgggcgcgatgcaaatgaggagggcggggctggcccggggctccgcctccctcccccgcagctggggccagcggtgccaagcgcagctggacgagcggcagcagctgggcgagtgacagccccggctccgcgcgccgcggccgccagagccggcgcaggggaagcgcccgcggccccgggtgcagcagcggccgccgcctcccgcgcctccccggcccgcagcccgcggtcccgcggccccggggccggcacctctcgggctccggctccccgcgcgcaagatggctgacccggctgcggggccgccgccgagcgagggcgaggagagcaccgtgcgcttcgcccgcaaaggcgccctccggcagaagaacgtgcatgaggtcaagaaccacaaattcaccgcccgcttcttcaagcagcccaccttctgcagccactgcaccgacttcatctggtgagcgcgcgcgcgcagggcaccttcccgggcccccgagggcagcgccgcgccagggaccccctctccgcgccctctgcgccctccgcgccctccgcaccctgggaccccgcgtctccggactcccggctccggaccctgctgcccgggactcccggatggacagtcctgccgttgccctgtccccaccctggtcccagacgggccgccgcggggcgcctcctgccctctcctgctctcaggcgcctctagagcgcccaggggcggcgtcgcgggagcctttgctccacctgactaggagcgcgcggggtctgtgcctgccctggagggcagcgcctcgggtgctctccgacccggggttccctatctctccgcctgcttccgggcgcgaggagccctcgccccccaccccttgtttccggggggggcggcgccctgggtgtccttctctatctccctgcgggcatgggacatcctttctcactcctctgtgcctccgggcagcgccctgtgttatctcccattgcccctccccgagggcctgggttcccctttccactcctcggtcacatcactgcgggcccctttcttccccagtccctccagtagtggggcatcctttcctccttcccagtccccctcccagaggacaccaccgccgcggggtcactctcgccctccctctgaatgcgtctttatctcttctcttttcccgagggtgctcggggcatctatgggtacatctgtcgcctgccttcagcccctaccccgacggaaacgctccccactatcccgccacctggtggtcgcagcctcctctcttctgcaggagtgaaggcagatgggggttacagccgagctcccacctacccccacaaaggc

SEQ ID NO: 22808 - DNA, 640 bp, Homo sapiens
  chr16:3208795-3209435
  binary
cgggacccgggcggggaggggtaggggtggagtgaaggcggggtctgggggggtgcgcgtggacggggagagtggaaccgcgggtgtggacctccaagtacagacgtcagagaacgtttgtcgtcctggctcgttggtctaggggtatgattctcgctttgggtgcgagaggtcccgggttcaaatcccggacgagcccgcttttttttttttttctgaacaccatcattttctcgcggtgaagattgaggagcttcacggagtctcggccgcagggaacttggtctctccgtggcagctgcaggcgccggggccgatccgacttcccgcttccgtccggcttgcggcccctcgccttgcccggctacaggaaggactcgcctgcgcctcctgactggagccttccacctgggagttctgagtgcgcctaaggcctggcgctgaggcagtggaccccagatccgggacccgaaaggagggcaaacacctccaccgccgcgtctgcctctgcggacgtggccctagatcccgggtggccatggaacttggtctgggcgtgtagttttcctttgagtgggtcggttctaagtttaaatttccgacgagcccagggtttcgaacttccttccttttttccttc

SEQ ID NO: 22809 - DNA, 917 bp, Homo sapiens
  chr16:3232535-3233452
  binary
cgaaggactcgggctgcgctgacctgtcagagctgtctggatctctgatcttcatctaaagtaggaaagggtagaaaccgatattttggaccaaaaaccgggctcgtccgggatttgaacccgggacctctcgcaccctaagcgagaatcatacccctagaccaacgagccacacgccccgtagcctccggcttgtctttgtggccttcgtggagtcctcgtggccagaggtggggacccagcagagcagagctaggaggagactccgatttcctgaagtctggaagagacaagttcaagcgcgggtggacgcggagggagccctgagcccccgcttctccctgcgccgcacaaaatggggagcatcccctgtgcccccacaatccggggccccccgggccctcgcccgcctccgcctctcagccctgggctggggatccgcgcgtcacgccgcgtcgcgtagtgaggagctccagctccggcgggacatgggaacctctcaagagctggcagcggctgcgcggagggtccgcgaaccgcgaccactggacgcccgccttggaaacgctgcagcccggcggcgtggtgcagatgggtggtcagtagaggcctcgccagtgcaccaggaaccagccaccaggccccctacctcgacgcgccccacgcttctcccgctccggtcctctcttctcccccagggaagccaaaacccagaaggtgagcttcccacgtggaacctcaattcaagaggctgacactgagcgtcgcttcgctccaccagacccgcggcgcccgccggagtcagcgatgtacccccttccctttcactgggggaactggcggaacctccggtcaccaggacgtggggaagcagaggccgcttggggcagcagaggccgcgtccaggtgtcggttcc

SEQ ID NO: 22810 - DNA, 937 bp, Homo sapiens
  chr16:3233501-3234438
  binary
cggagcccgagaattcggcaggtctggactgaaaacgtctccccatcccctccggatccaagcctcgaatttcctggctcagtgggaaggcctcggggtctgggcgtggagacggggcccgagacccccaccccgccagggcccactaaagtgctgccagctgagccccggccttcgcccctccttcgtctctccctcattcccctccctctgacaccccgccacatacattactccccgcaataccatgcaattttaagctagggtagggctcacctgagactggagccgccataccgtcgaaccctacgaaaaatttatgcccgtaaataaacaagcccggcgcattcttccttattctaaataacttcttcctgctgcacggggtcgtctcctttaaccacggctaccgcagttggtagtgctggatcccatttcagggtgatgggatgctggatcccatttcagggtgataggaccgaccgcaaggcgaacgattcaggcccgtccgtctgcgtcccgggaccccgggaggtctccactgacgccctgccagcagcaggctccctccgccttcctagtctcctgtccttgctgaaaatgcgaaatgggaaaaaagagaaggaaaagggggctcgtccgggatttgaacccgggacctctcgcacccaaagcgagaatcatacccctagaccaacgagccgccgcttcccctctgttttgttgttgttgttgttgttttttgacacgtccttccgcccctgacgcagagcgagactctctccatcgccccaatagctcagtccttagcgcgcgcacctgcgaatctgggcttttgggttcgcggccaccctcagatttgcgaggcaggctttactgctgctggataaaccaaccaggttatccgttgaggttatgagctggtggtttcaatgtc

SEQ ID NO: 22811 - DNA, 1237 bp, Homo sapiens
  chr16:77822069-77823306
  binary
cgacccaatttcccgactatcccgcccagcctcgaagatgggagggagagagggcaaccttgtcgcggtaaggcatcctccaggcccagacattagtctcggtccatttcaaggcacccgagcctgtgccgtatataaccaagtactgggcccacaggaagggggatgacagggtggtctctctaggctcgttttagtcacagatcttcggcaaatttgggtttagggccgcgatcccgaccctaacttgggactatttcaggaactggagttgaggcttcgttgggacaggaaagaagggtggggcgggggtgaagcgcttagggcacggctcttgtgaggattacggcggaggctgtggaccgcggcggcgctcgcagaggctgcagccattgcacagccgagcatcccacattcaacaggaggaacccgcgggagaggagccccactcccccagcgccgcagccaccgcagccaccgcagcccgtgcgccccgcgccctcgagcgccatggccaaggaaggcgtggagaaggcggaggagacggagcaaatgatcgagaaggaggcaggcaaggagccggcggagggcggcggcggcgacggctcgcaccgcctcggggacgcccaggagatgcgcgcggtggtgctggctggcttcggggggctcaacaagctgcggctcttcaggaaggccatgcccgagcctcaggacggcgagctcaagatccgcgtcaaagcctggtccagtatccgcgcctttctcgctttctctctttttgcgcgctgggcgctggggagggggtgggaaagctgcggctgggatgctgcccgggtagaaccgccgcgcgcaccccctccgcgccctcacccgggtctcagagcctccccgggccaaagctggggaggatgcagaggggcggcctccccaagccagatctaggggtgacgggaggagaatgtgagctcctgggcgcggggagaatgctggcgcccaggcaccccgggtctggaagattgcgctacgggagttctccgtctgagaggacaactcagctttcgcacgggagggttgatgcttaacagaattaaaaatatatgtattaagaaccgcaagcccactgtgtgccagccgccgttggtagttttacacgtgcgatcttatttaatacttcctgggacctaatgagtcaggtgccatcatgatccgtttacaggtaagaaagccgccgctcagc

SEQ ID NO: 22812 - DNA, 910 bp, Homo sapiens
  chr16:85932121-85933031
  binary
cgcctagcaccttcgatgctcctgtttcagtcgcggtctcagcgggcagtggcctcctttgaagctgggattctcctgcccctcccgggcagcgcaggccaccggtgacccgggacggtctgtaaacgaccttcgcgtccccgtccccgtggaataacgcgcggcgggcatcactgcccaatatccagcgctcgtgaaggcggagaccggcggggcagctagtttctggctgtggattctgattaatgggccgcaggcgcacggtctgcaccgtccggctcgttgctagtggctcgctcgggagccgccgcactcccggggctgtccgcccgagccggcctggaaggcggaggacgcctccaggtcgctccgcggggcctccggaattcctgggaaagcccccctgcagcgccgcccctggaccccaggtgtgaggagcggggctcggccagcggctccagaagaggcccggaccccactgccgtggctgccgggggcgggaaagtgatttctcggaaagcagagcacttcgaagaaggcgggccgcgcgagccaagctgacgctattggtcggtgtggccgtcgctctgcgcaccgcccgtcccccccacgaccctttttaaggccgcgcgaccgctggcgcatcgcctggagcgcggcagcaagcgtgggaacgcgggcggcgagacggcggcaggacggcggcaggtaggcacagtgggcgggtagggcgcccgtgtcccgcgcggtccggtcccgcggggtccccgacgccaggcggggcgtgggggtggaactacctaccgtaatgtccccgggcgcagctcagtggccacccgtgtccctctctgctttttgcctattttccagccacctaagtccaatctgaatgcccaagtcgttgattgtc

SEQ ID NO: 22813 - DNA, 2889 bp, Homo sapiens
  chr17:36102841-36105730
  binary
cggggcgcctggctgggtgcgcgctgggagcggcgagcagccccgcgcccgcgttttgatctccttcccccctctaagccgcgtttacaacttcaccaatgaataacccgcctctcttttcaacctaatcacggctctttgtgtatctttctgttgatgatttatagaaataaattaataacaccccaactccacgtgctgcagtttatgttacgtctcagctgcggccagcccggcgcggggctgggtgcggaggggcgccccaggtccttccagcgccgcgctagaaagcgggcgcctgcggccgggtgggagggcctaggccctgtggcccccggtggccggcggtgggagcctggttcatccgccaggtcctgagcgacctccccggcagccctggcgccccagccgctcctaggggccactctctcgacccctcttagcctccgcgactcacaccttccgcctcgcggaactctcttgcaggagttctctcccggtaggggagaaatcacctccgggcgggagagcgacgagggaagaacctcaaacctatgaattataccaaagtgtgtttggggaaaaaaaatctacaagttcccctgattgttttggctagagggcaaaccgccaggccctcggagcacaaattcaaatgcaaggtcatatcccaccccaaaccgccgctgcggacgtgcggccaaggctcagccccgaaatcgcggcgcttcagtgtccgaagccacgcgatgggctctgtcctaaagcggagtggcccgggagcgacgtgctgtctcagggaaccgctcggctccttagataattagtaaccagctgtcaaagtctagggcggtcggggaggacccacaaacgatcccggccctggggatacactgccagccggcctgaactcccggggagaggccgggggtgggcagcgaggtctggaaacgccctcctttctcagactgagaccagatcctctgcgaactgaggtctgagacgcgttcgcccccacaccaccgcgcttcgtttctttggccccgcgcgtgtccacccggaccctgcatggaacatgccctttgcaaatctaaacccgcgttggggatcccggataattccgggccttgcatgggcgcggctaacaagagtgcccaccagggaactcgcctcccagatcccggctccggatgccgcctgtccttcggcaaagaactgcaggtcatcatgcaggtcaatgtgtccgaggccgacatgcggctttccagacccgaggcagcgcgcaggaaaaatgcgcggcctggggcttgcagcggcgcgaggctctgctcccgggaagtcgcagcggtttcactgcacccactcgcaccttcagtcgcgtgggcaaacctcccggcaaagggctccacagctccagttctccccggcccagccccagccccgcggggaaaagcccttgggtctcggacgctggcctgggcctggggagaagaagcccggtgggccgcagggtcgtcccgctaagggattgggaagggtccgggtgttgggagagaagcagagcgccccccgggggacttctctggtgggaaacgggcttggcgagtgtggtcgggcgcagtgtcactcaggcccggggccggggctccaggggttcgggtgggtcccctccacctcgctctgcgcctacctgagcatccggtccacctccgcccgctgctccgccgcctcctcggtgttgagcgcctgcagctccttgaggatgggaggtgtgtcatagtcgtcgccgtcctcggagccctcgtcgccggacaagcggcccttggcgtggccgttggtgagagtatggaagaccggcttggtgtcgggctcggccccgctgccaggggacaggggcagcgtctccagcttcaccccgaagttcggggatggcagcaactcctccaaggcctgaaccagcacctccttggtgaccccggagctcagcagggcgctcaggagttcttgctggagcgacgtgagcttggacaccattttccaaggacggaaaaagaagggggtgagggggtgggtgggtgcgagagaggagggtggaggggagtttcacaagcaaaccccaaatccaggaacccctccacccttcagcctccagacacctgttactccccggggtcccggaggctcctccgaaaggagtcagaaaacttctaacttgccatgatcgccaccattaggccatataagatatgcaaattagtgggaagggcccagctttcggctggatgcaaatgatggtggggagggggaaacccggagagagggagagccggaggggcagacctggagagcagaagacctgggccgggagcggggctttgccagggtccattgtactcacgctggggggctagagaccttcttttactggttctgcttatcagccaaacttcacctaacctttggacttgttaagccagtgccttgcagcctaggcgcggggcttttccaccggttctcagttccgctttagtccagagagaagacactacgcttcggggttcaggtgagagccagaggaagctggggtgctcgtggaagaaggggacgcaggaggaagcgaagagtagagaccctggatgcgtcccggccgacgcaggtggtgggccaggagagcccgcagggcggaagagaaactgaccacttaggaaggggcgccgaggccacgggggaggtgaggcagcgttaggtgtggtgagcatgccctggagggactccatttatttctacctcggttactacctccaggccccagaacctccctggcctggtctggcggtttgggtttgcagaactgcccgccagagagcgtaggcgagggtgaaggagtcc

SEQ ID NO: 22814 - DNA, 932 bp, Homo sapiens
  chr17:56832961-56833893
  binary
cgggcgagtggagtgtcctttagactccgcggactcgacgggagggaccctgcaatgcttaattagaaccggttgccatggcgacagtctctaggcagcgtgggctgagctctccgtaggaataaagggtgggccgccgctggaccctgcgcgcgcccgccaccaactttccctccagatccgagaggggcggcgcgctccgcccccgggccgcgcacgtcggtgctcggcggcgcgcacgcctgcgggagccctctccaggcaacctagtgctgatcgctcgtgccggtgcggccgttaaccgcccttgccggagccctaggctcaaaagcagccccttacccttcctgggcttcccccaacccctttcccggtctgccctggggcatgagcagcgatggccggctgcatccctgaggagaaaacttaccggcgcttcctggagctattcctgggcgagtttcgcggaccgtgcggcggcggcgagccggagccggaacccgaacccgaacccgaacccgaacccgagtccgagcccgagcccgaacctgaactggtagaagctgaggcggccgaggcttcggtagaggaacccggggaggaggcggccacggtagccgcgacggaggagggggaccaggagcaagacccggagcccgaggaggaggcggcggttgagggtgaggaggaggaggagggcgcggcgacggcggcggcagccccggggcactcggccgtgccgccgccgccgccccagctgccgcctttgcccccgctcccgcgaccgctgtcagagcgcatcacccgcgaggaggtggagggcgaaagcctggacctgtgcctgcagcagctctacaaatagttaagtagctgggcttggctggtggtgggcccgcggtccccaccgcgccggcctcggacgcggctccctc

SEQ ID NO: 22815 - DNA, 924 bp, Homo sapiens
  chr17:58216260-58217184
  binary
cgaactcaggagatggggcgttgtgtataggcaagtcgctaaccgggagccccgcgcctcattccgactggatcagggggccccgcctgtccacggtccccatgcgcggtgcgctccccctcctagggccgtaattgccgcagccatccctacgcgtctccagcccccgtcgtctttgtccattcggttccgaggccgcgcttggactggggcgcccacgactgaccccggaggcacagcgaacggggcagctgcagggactccctgtcctgcaggcgactgggctcccgcgaggcagcaggtgccgaggactagcagcagatctggtgtgcagaaccctggattcgagtcccggcttcagagaccctcggctgtgtgacgtggaggcgtcggccgccctctgagagccttcgtggatgacagctgatgcttgggcctaccttcctcggctgctgagaggctcagaagggaccgcgtgtaaaacgccttggaatcttaaatctacttaattccatttacctgcttcccagaaacggtccatggcttccgtcccggtcatagcgctgcgcagcgggaccgttctgccccgctgccctcgaacagcccgtccgcgctccattgcccctccaggtgccgttattttgccttttaacctggggcgggaggttttagacgaggctgcaagtctgggccagcggggacctgagggtcccttgcaaccagcacccgcgacggtgtctacactggaattccaaggaaaagagggctccaggggcgcgaccaaggtttggtcttctgctgagcgctgctggatgaatcgccagccttcgcccgcggccccctcctcctcatccctgaccccaactcgacaagatcccccgagcgcaggcccaaactccgcacagcttgtgggccgtgaggtcc

SEQ ID NO: 22816 - DNA, 870 bp, Homo sapiens
  chr17:8868587-8869457
  binary
cgacacagggcgtcctgtgtcagaggcaggaggctgaggacacagctgcgcagagccgcccagcagaggttacccggataacgataagtggtccccgcgacgccccttaagtctctggggttatctggagcgcaggtttgcagacccgctgcccccgcggtgggccaggtccacggggccggaagatagcaggatctgtccagccctcgggctgcggcggctgctcgcggagcccactctccccgacggtccccagcttgctccagctctgcctggagctcccatgcgtgccctccgcatccgccctggccgcccagtcacacacctgcagtccccgccgggcgccgagcccctctccagcggcgactccctgcgattcgggtgaccgtcgggaccaccgcgccccagctggagccgcgcggcgagccgcagcatctgcccagcctgggctcctccggcgggcggggcggagcctgtcagggggcggggcctaatggggcggggctgaccgcggagccggcctctccagccacctggcggcccggcagcgtcagccaggtgcgcgcccggccccacatcctctgggtcacgcccccgaggccgcaaggcgtctgagaagcagccccggctctgacccgccagccctcggaagaagcagaccctggccggtccatggcagtggcccgaggggcaccagcgcggagcaccagcgacccccaaggagtaaggggaggttaggcccccgcgtcggaagcgcggctttggccccgcaggagggctgggcggagcaggggggcaggtctggggtaggggcttaggggaaagacgagaaagaggaagctccgacgagctgcttccttctctcactgc

SEQ ID NO: 22817 - DNA, 340 bp, Homo sapiens
  chr18:13823932-13824272
  binary
cgaccgacccaccgacccgaccgaccaaccaaccaaccaagcaaccatccaaccattcaagagtgtgttcggggggattttcgctcggggctgacgcggttctctggccgctgtgccgtgctgggccactaggtggcagcggaggccgcccggagcgacagccggcggtgcggaggcgggcccggcgcgggcaggcaggaggcttaaagccccgcagagccgcagccgcctagctgggggagaggcccgtccggggctggctctgagcgccgcacggccgtcggatcccggggacgccgggggcccgggctgagcgccgcggcccgcgaggaggagcacc

SEQ ID NO: 22818 - DNA, 926 bp, Homo sapiens
  chr18:22928980-22929906
  binary
cgagtgaacaaaactgccaatcgtgcaaactttaataaacttttttttttttgaaaagaaaaatccctcccaaattccttcacggggtttcagaagcttcttggagccctttccaccggacaggcactaaccgctatcctacttcaactcggaaagttcttctttccaagtgactaggaagaggtttgtcctggtacttcgctcagcgttactttcaagaaagccggggtctcgggcaagtctcgccggcgcgagcctggtccaccgttaccctgacacccgcgcacgcccgtggcgtttcttttttcactgtcgacacttggatctttcaggccctgggtctaggtttcccccagaaaaatgaggggcccatgtgacggaaaccaccagacacactgtgtggagacacatgccaatgattcacctcgttcccgaactaaaacttctgcgctttaggaaaaaagcaagcgttccaatctgcgaggccctcccccaccccgtcccttcccaggagaagaaagaaagggctttgtgtgtgcggtgagggctccgttcatcgagttcaaaaatgcacagcggccgggggccgggaggcgtggggcgccgggccctgcccaccccttttccccgggccggcggcgagtcgggaagctggtgcgggaaccggggccacggggcgccgcggcccggcagccaggaggaagaggatgctgcgccgccggggaccagagggcggggccgggccgcgcggacctcggcgggacccagcgggcccgggcgggcgcaccagccgccctttgtcctccgcctccgggtcgcgggggccgcggccgcctccagcgctggccccctggccctcgccccggttccccgtcctgcccgcgcgcccctcctccggccctcgcgctccgccgcccgccctcccc

SEQ ID NO: 22819 - DNA, 2355 bp, Homo sapiens
  chr18:25756118-25758473
  binary
cgagggtatgaaaagtacggaaggctccaggcaaaggcgcccccggggcgcatatagggcacaggcagccggacagagaaaggagcagccgcgtaacggaacttctcgcccgggggagatactaggcgtgagaggccagactcgttctacaggcaggcgctgaccggcagagactcctccgggcaagagggccagattttctttccaggtgggacgaacacagaatattgtgagggcaagagaagaagaaaaggaggcaactccagactgggataaagacaataggacagtagagcccttgagcaccgggaggcgcacgggtgcagggtggggtaaggtggaggcaagtcccgtaactaagacaccagagtgagaattcctactgtaaactcgcgacccatccctgcagaaataaacaaaaaaattggagcaaagtactatgcgaggggcgaaaggcacagaaaactgcaaaacctgggagttatcctgcctcaccctcctgctgcctggggacaccccccgcgagcttgctcggccccgaagaaggagcagaggggacccgcaatccagcccctagagccccgccaggaaaggcgcgagagacctactggccccggcaaccctgccccggcgcccggacggagcccgatgcctgcgcagctaccggccgcgcggcgcggcgcggcgcggcgtggcacctcccttcccgggtgcgcagcccggccccgcagcggcgcggggaacaaagggacccggcgccgcccgccccaccccgcccgtggcccggcccgcggggaccgccgcgtacctgaagcagggccgccagcagcggcagcagggtccgcagcgctcccgctatccggcacatggaggcggagaggggccgagcgaagagccggaggaggcggcggcggcggcggcggcggcggaggaggaggaggcagcggcagcaccaacagcggcgcggagaaacggctccaggcagtttccacccccttcccttcccctcccctccccacccccttcttcgctgctctccgctccccgccaatggagagcgagctgatgacaaatagcgggccgcggagtccgcgggactcgcaccaggagtaataaaacagacccagagatcaaggagctggggagggggcgggggaacagggagggagagcgtgtgagcgtctgcgagtgtgtggaggcggctgctgtggcagcgcaggcggctcggctccggcccggagcgcagcggaagccgcgagggatgcagcggcggggaccttggccggtggaggatgtggaggtggaagtggagcggatggcgctccccaagagctccgccacgcgaggtttcgggctcgtggttttgcttcctccgggtccccgctccagggccgctcggcgcgacgaagacgccggggacagcgccgcggggagggcgctccgggtcgtgcgtgctgcacccacaaagagcagcagtcccgccactccgcgcctccgctgcgtgggggccgaggggcgcttctcggctcctctttccggtcccccggcgagttggagactgttctccggcctcggccgcaagggggtgaggcgaggggccggcgcggtctctcccgccgcggctccgtcccgcgcagctgctgccgcagccgcccctgctgcccgcgcaccggcacccgcccgccggtcctcgccctgcgccgctcactcgcgcgcgccgccctccgtcgccgaccgcgcaccccgctcggcctccgctgcgcgacctgggcgagccgccgccgctctccccgcgctcgccccacgcgctgcctggctgcgcggcccgctcccctctcctattcctcccgccgccgccgccgccctcgcccccgcctccctcctccgccgagcctccccgcccgcgtcgtggccaatcggaggccaccaagctgcggctgtagccggccggatccgcggcagccgcccgcccccgccccgccgaagcgccccgtattttgctgcagcccgcggggggtcgccggagggaagcctagagtgcgccgagcaccgccccggcaggtggaggggctgcgggaaataaaataacttgggcaggaacttgattggtagcaggttcatctttggtccgcggtagggaatctaatggagatgaagaatggtggggaagggggggcggtgtctccttgggagcctaacgtacgcttctttattttgtcattctttggagatgggtaatctttcctggcaggggcagacacagcaaactaaggacgcaggccaagctcatcctagctattgttgtctgaggcgctcgccgggagccacctgcgggcgggggagggcggaggccgc

SEQ ID NO: 22820 - DNA, 1472 bp, Homo sapiens
  chr18:30349724-30351196
  binary
cgctccaccagctccggggccgggatgagggcgaagcggaggcgcttcatgaggtcaggcgcatactgcatgcgggtctcgcggtcgtgctccagccacagcacggacatctggaagagcgccagctccgactccacggggggcggcagcgagtccagcagggcgcgcatctcctcgaagttgagcagcagcacatcctccaccaggtacttgttggccagcttcttggtctcctccaggccgtgcagcgcggcgatcttgcacacctgcttgtagttctgcaccgagatctggtcgttgaggaactgcacgcagagcttggtgacctgggggatgtgcaggatcttgctgaccgacagcacctcctccaccgtgtccagggacagggtcacgttggccgtgtagaggtactcgagcaccaggcgcagcccgatggacgagcagccctgcagcaccaggttgttgatggcccgggggctggtcagcagcttgtcgtcgggggaggaagaaggagtcccgggctcctcctgcggcggcggctgctgctgctgtgacggctgctgctgcggcggctgctgctggtccttgggggcccccaggccgtcctggccgccgacccctcccccgagaggggggtggctggagaagagcgatcggaagtactgcgagcaggaggccagcacggccttgtggcaatggaactgctggccctgggccgtcagggtcacgtcgcaaaacagctgcttcctccacagcaggttgaggccgtgcagcaggttgtcgctgtggctggggtcgaaggtggaggtcctgtccccggatctggacatggcgagctgactcggtgcacctggctttaaaccctcctccaacctggcagacaggggtgggggatgggagggaggggagcagggtggtggagcgggtggggtgtggtcggggtggggaagggtgtggaggggaggggagggcgaagaacaagaatcaaggctcagcttgactccctcctggcgcgctccggaccccgaccctaggaggaaagtccgaagacgctggatccgtgagcgccaccagaagggccctgtctggggtcccggcgccggttctgcgccctgcggctcctctcgccacctcccacacacttcgtccctcactttcctaaaaccaaccacctcagctcggctgttggcagcaacagcagtggcagcagcgacggcaaagtggcggctgaggccgaggcacctcgtgggctcgtgtccatgccgggccagatgaagggaaaggccgggaagtggggagccgggggtgccctgaaagctcagaggcgaccgacggcgaaggttccaggtcaacttgtgcccgaagctttgcttttcgcagttggcccagtttgggggagggggtaggaacaggggcccgaccagcgtgcggggtgtgcgaatcttagctctccaaaagctgggacccccttc

SEQ ID NO: 22821 - DNA, 1823 bp, Homo sapiens
  chr18:32556625-32558448
  binary
cgtttgcaggtaattaattcacagtgtggcggcgccttttcaagccccctctgcaagccgcgccggcctcctccctctcgagcggggtcaaaccacttagtttatttcacccgctggcactttcttccctgtcacgaattcagcctggcttcctttggcctgagacagcgtcttcaggcgggtcggctcggacctgcccagtggggcgcccacctgcacccgcacccgcacccgcacccgcgggaaggggcggcgctggccggactctctcgggtggactcccggagcggcggcggcggcggcggtggcagactgcgagtcacgtgcgacagaggaggcggagcacggcggccgggtgggtggagaaaacaaagcccccagctgtcagcagaggaaggaggcgacagcgccggagcaggtgagtcaagtgcatttaaagcggtaccgccctggcgcaccccgacaccccctgcactgaagcagtccctcccaggccaggggctggctgcgcctcctcctgccgctgaggtctgcagcccgcggggctcggagcaaccggaaccgggggtccagagtctagcaagaagttgtgcaagggtcggctaggcggtctccgggtgtgcaccccgccgctctcccgcgggccacatctctggttcggtgccccagctctgtgcaccccaggaaagtggagggagggagttggggctgccacgctggcagaagcgaagtggactggttctgaggggtgaggctggggctgtccagggtaggaacacggcgttggtgaaggaggggggctcgcgactgcgcgaccgcggcgcacgaccctccaggctctagctggggcgccggcactgagagagctgggggctctggcaggggctgcgcgcttgggggcagatcaggaagtgcagcgcgctggcgctcgcgcgcttgggagcatcccctggaccccgggcacttccccttcggcagccaccactctcccactccgacgccggccaccatccgcgctcccgggactcaggagccgggtgggtgcaaaaggaagcgggttgttattctgcgcccaagcatctcttctgcagggagccccgggagcgcagggcgagggctactcagcgacttcgcactcggcttagtgggaaattcttcggtctacccttagaagggctatgcggaagccagaaatcccacaaagagccaggagaggggtggacgcggaaagcggtcccctctgaacctggggcgctcgataaagctgattttcagaccccaaaagggctagtgggtttggtcactcctccagtgacttcgtcaatacagtgccaagggcagagccgtaacctcggagaaggggcgctgcagccatttgatcaggagaagcctttgtcttaacccccaagcccctcctgctagtcctcgctgggtcagtagcgctgggagtaattaatattacgaacattagcctttccttcacctccgcaccagccaacactgctgtcccctccctgattgtcttctctatcacttgttcacatctccttttccaaaaaaagaagaacaaaaggaaaatagtgtagacccgctaggcaggaagaggtcactaaaaatactatcgtgctgtcaatgtagaatgaagggttaagcgctcaaacccgcgcccgcgcgcaccgaaacggaagaacttccttgattagcatagtatcgaccctggggccgcgctgcgaggcggaggttcggtcccagctggggtgaagtgtgcagaccggttgcgattgtggtcagacgcagcacctacttctaatctgaggacccgc

SEQ ID NO: 22822 - DNA, 1197 bp, Homo sapiens
  chr18:44335955-44337152
  binary
cgatacgattttgagccctccgaccccggagtccaaacaaatggccatagaactgtgggtctggaggacaccgctccgatccatgcggtctctccgggtattaaatggatttatcgtcagcctggttgcttggaattctattctgtccttcatttttcacagcggaacaaagttgtctggaccctccagccagcgctgggcagaagcaagcaaggatgctcttggaaacgcggtggcccaagcctaagcggccatgctcggggctaggagcggaccccacggccactcaccccggggcgctgcgaccgaagctgccgcggccactgccacccgggggctcgccggccggctccgcgcatcccgccctctcaatggactttcttacctcttaatgtagttcctgccatacaggatctgttgcagcaaggtcaccaaggcaaaggcgcagatgaagatgaagagcaaagttcggctccccaacaaatcccggttggccgaggggtccgcgtagcgcatcctggctaccgggcgccgcgggcgcggggtacggggcggccaggcaatgactcgcggggttccggggccccggggggcgcgcggccgacttggcgcctcacggtgcggtcaggcaggcgggggacttcgaggggcaaagtttctggttggcgcggccggagctgggggcatccaagcgtcgcaggcgctggggcggcaagcaggacagggccggtggcagggagctctgccgcggccaggggccttccccacccccgggtacctttacctccaggcgccggtgccgggtagccgccgatttccccgcggaggggagacgccaggtgccacgagccggaggcggcccctcccgccgaggtggcggccaatggggagcaagacccgggctccgtcccctgtgcgccccagcgcgccgcgcatcgacccctccagtccggcgccggatcgcggttgcccagcgcgctgtgccctgccgggggcgggccacgtttgatctccgggcccgcagcaagggatcgcgaaggttggcctccggttctgccgatagggacggggggagggggcgtacaaaacacccgcgcagtctggctaatgataggcgggccgtggggagggggaggggcggagcgcaaaacgccgggtttgaatcttggaattaaaaagagggcaggggctgggcgc

SEQ ID NO: 22823 - DNA, 298 bp, Homo sapiens
  chr19:10616220-10616518
  binary
cgcgagactacgtctcgaaaggaaaagaaaaaaaaaaaagatagatgggatttcgccatgtaagtgaataataaatggaaactctaggcccctggagcctccagggtgaatttgaaagattgaacgtcctggctcagggtctggaaggaatcacgtgtagggctacgttggagttaccccgctaccccaaatccttgttgcgtgtagatgcagttccagacagctcctcaggggggcggcctagatagtccgtgaacacgctgagtggccgaggttgtaaccagcgccttcctggcac

SEQ ID NO: 22824 - DNA, 292 bp, Homo sapiens
  chr19:10691764-10692056
  binary
cgctcaatcatgaaacagcctttgcagtcagccaatggctgcaatactggccgtgatcagcagatggtgagcgagcgcttatttcaaaacgggctgcgattctcttaagtccccacgtggggcgggtttgcgactcccctgtgcatttctcagaagaaaggtcccctaaatgcttacggccagtgagctcgaagagcacgcggtcattgaggcccagccgcagctctggcattcctgacagaaacaccttgagcttgatggtaccgacgatttcgctcagaaggacgctgcc

SEQ ID NO: 22825 - DNA, 941 bp, Homo sapiens
  chr19:11959378-11960319
  binary
cgagtgcaggaagcagctcgtgtaagcttagagaagctgttgctagaatctgtcagtctggctccgcagggcctgatacccagggcttccgctgtcacttagacgtggggggcggggccgaacattccatccaatcagaggcactggctcggggccctgcccactgtgcatccaggcacggaggatgttgcattcctgccgtcacctttgtcgctgcgagggcggcggttgggatctggcctttccagccccgagagggacctagtgcctctacccagatttctgtcgctctgtcacctgcgctatgccctgctttactcacaggagctgtagagaggaccccggtacatctgaaagccgggaaatggtgcgtgtgctggccgggagtggtgcgatgggggaggggctgcctggaactggcgggacccgggcctccctgtgggcgactccggggtctgggaccgagtcctcctagagctgctcggccctcggtccccgcggccgctggatgtgggtgggccggcagccgggactccgggcgtcctgtcccgtccctgcccgtcgactgcggccttggccccgaagcccttttgtgcagctccgcgcccgcagcccgacgccccagcttgtgcgggggccacgggagggtcatgcgcggatttcgactcgggtgtggatttcgtccgtaggaggagcagcggtctgtggggcccacagcctccactttctcctgttaaaaattatactgaggtacgttaacaaaaagttcatttgaggaaacagccattcacgaatgagaaacacccggtcctggcttgtggtttgtcaacggaaaaaaaacagactatgtaaaatacagaagtgtattcagagccgagtaggagagaccttggccgagggaaacacaaccccaagcagcctggagtaagtggtccggaggc

SEQ ID NO: 22826 - DNA, 1111 bp, Homo sapiens
  chr19:1978023-1979134
  binary
cgcttctgtcctgggctagggaggtgggggggcgggggaggaggagtggcagacactgaggcggtgaccacacgggcagggtgcaggtgtcgggatgacttggcaggccatggtgcagtgctctggcaggctgggcccaggccctgctgctgggcagtggtgtcatttggagggtggtccttcagggaccccctcctgcctcctgcctcgggggtgggctggggaggtcggggctaggtgggccctgcgctggcggtgctgatggtctctgtccccgcaggaaagaatctctatacaaatgaatacgtggctatcaaattggtgagtcggcccctccaccccacccccgctgacgtgccccccagggatttcagggcagcgacccggtcccctggtgactcgctcttgtgcccccaggagccgatcaagtcccgggccccgcagctgcacctggagtaccggttctacaagcagctcagcgccacaggtaccgggcggcccgcgggtggggcgggggctgcgcaggggcagggagggggctgccgccgcacgcccgtgcgtctgtcctccgccgcagagggcgtccctcaggtctactacttcggtccgtgcgggaagtacaacgccatggtgctggagctgctggggcccagcctggaggacctgttcgacctgtgcgaccggaccttcacgctcaagacggtgctgatgatcgccatccagctggtgcgcggcgggcggggcggggcggggctcggagggaagagggtggccctggaggggagcgcgtgggacggggaggggcccggccgacaccgccgtgcccccctgcagatcacgcgcatggagtatgtgcacaccaagagcctaatctaccgggacgtgaagcccgagaacttcctggtgggccgcccggggaccaagcggcagcatgccatccacatcatcgacttcgggctggccaaggagtacatcgaccccgagaccaagaagcacatcccgtaccgcgagcacaagagcctgacgggcacggcgcgctacatgagcatcaacacgcacctgggcaagggtgagctgcgcgcgcgcggcggggggcgggcgcccggacccc

SEQ ID NO: 22827 - DNA, 776 bp, Homo sapiens
  chr19:19843315-19844091
  binary
cgtttgaacagccacaggaacctgaccccggcagcaaggacctagccaggcttcggttctcacaagtgaggaaacgcacccgtggattcatcgtaaggtttccaaccaagtggtttcttaaacgcacaaaccccacagaccgagatgggatctccccaggaccctcccgctgtcaccgaacaatccggggagacgcggggctgcgggcgcagagctgcccatagagggctccaggaccgggggccgaggtcgccccgcggggacgggacaggacgctggggctcccggctgcgggtccagctcccacagagaggaccgagggccgaactgcgcccgcggtggcccccgggtctgcaaaccccggagttgactgcaaggaggtccccggcctcggccacagacggttccaaccagaaacctcccctcggacactggccccgcacactcaccatttcccagcgtccgggaagtcacggtgtcctccctacggatctgtcagtacctgcaggtcacggcgcgacaaaggatgcgctagagccaccttcggccttcaggagcaggtgaaacgcaatcttcccatgggccaggaatggcgacgtccgcactgcgcaggcccagcgtggcgccgctcacatcttttcagctgaggtcctgattggacagatccaatggccccgcctctttatcactgagtgacagcggagcaggaaggggcgtggttgagctggcctggcttcagtccggcttgtccccgccaggacgtttgcgtttaaacc

SEQ ID NO: 22828 - DNA, 561 bp, Homo sapiens
  chr19:2702445-2703006
  binary
cgaccccctaagcgcagccccgtccccaattccaaccccagcctccagttgcagcccgggtccccagacccagcccccctcctcagccgactccgacccccaactcggtccgcagccgaatccgagctgtcccagtcccctctccgggacgccggccgcgccctcacttcccctggcccggttcgcgggcgcccttacctgcgctcgggccccgcggccgcctcagccccgccgcgcagccgaaccctccgccccggcccgcgagcgctcgctcccctctgcgggggcggggccgacactcggggggcgggccctggcgtcccggcaaggccaatcgcgagccccggctgcgggaggccggagcgggggcggggcgcggggcaggcagcggggtaggctgcgcccaggagagtggggcggggctccgggcgcgggcggggccgggggcggggcgaagagcggctttccagggtgacttcgtgacgtcaggaaggcgcgagtagtttcgcgagttcgaatcccgcgctaggtgagctggttcgaatcctgcatgccagctcc

SEQ ID NO: 22829 - DNA, 1323 bp, Homo sapiens
  chr19:30015587-30016910
  binary
cgaggaaactgaaaggcaggcactggaggcaagaagggctggccccgggcacccgctggcgaggacagccttggagagggcctgcagctcctcccctctgagctgtgctgcgctggccgcctggaccagggtggctgctggagagtgttttccctctgggtttccttctccttggctcccagggaatcctctggcggtgcctccgggaggctggtagccggggaagcaggcacgtgaatccaccgggctgccccaccccaacctgaggtcagagctgaggcgtaggggccggggtaggggcagaggtgccgaaacgcactagctggggactcccgggggaaggagataggagagacccaaggcgagccttaggactcgcccctatgactatgactacgcgctgcgtccgaaccacatgtccaccccgcatttgccttcggggaccagaccgcgctccctcagatggctggggagggagcagactccgggtgaaggctgggggaggtaccgggatgccgagtacgccagagcaggcgggggatgggttccggcttcctgccgcctcggcatctcgctttgcaccgggcaaagaaggggccacgaccggcgaagagcgcgtggagacacagggacccgcgatccaggggcaggaaccccgccccctcccggaaacctcccgggccctgagtcgtgcccggcgctccccaccccaccccacccccgccgcccctgccgtcactcacggccgctgcgggctggctagcgtgtgcgctctccgcgccgcaggcacctgctcgctgggcgctgtgcgctcacttctccctcgcgcactgcagactcccggcgctgccgccgccacccagcgtagtctccggctgggcacagcgttccgcccttctcgcggccccgggcgcccacccatccgtcatggcccaggcctgggccaaacagcggggcagctggttgcccaaactggggtaaggagttgagggctgggagctgcagagaggaccgagggacacacggggagcagggatgagcggccgtctcgagccgtgcagactgggaagaagccagggagagtttgggtgggaggactcccaacccaagcgggtgcggggcggggctgtactccaaccagaaagacggtggtccctccgagcgacccccgaggagagagggggagcgctctggggcgggggcggggcgggctgtggcaggagaggggagggcgggggcgatgcagcggtggaggcggcttggcgcccagccactgaccgccccctcccttcccctcccctccccctctccccgcctctctcc

SEQ ID NO: 22830 - DNA, 874 bp, Homo sapiens
  chr19:30019101-30019975
  binary
cggcaggtgtgcaccagggcagccacccgttggtcaggcaccatgctagctccaaagcccgcttcctcctgggaaactcttggaaagccggacgtcctttgtgccctcaacccccatcccccgggcggtttcggtcctagcctgccggaggagggtgcccttgcctaaaggcggatccgagttcccctagccagaaggccgcgagcctcacgtctctctctccctctttgcattttaggtaacaaataaggatgcaactaaaatcagcgtaagtgtggagcccagcgcgggccgcgggagaccccttctggccgcctcgggtcccgcagctccctcccttagcaagccgcggcggccgcgcatgtggggccgcgcaagtagggcagcgatcgcagccttgcatcggtggctgctcggcgtgtccgggcgccatctgtcgccggttgcagggtcgggttctcttttgtgtaaatcaagggtccaaggcttgagtcccctaattcggctcggcgctgacctgtaaaactccccttggtcggactgcgcgcttagggcctctcgcgcctgccagcctccgctctgcgggcattcctcctagcaccgggagcgcgcggctgctcgccctcgccgcgaccgtggcgccagcttcccgccccctctgccccgccctgagcatctgctctgcgccctccgctgcaaccctttatcctccgcctggattgcgggtctgggtgcggggtgttgcaggcttgcaggggacggggtagggggtggttgtgccaggctgcgaggggcccgggtcatggggttgctaactctgggaggagatgcgcccaagcttcccacctggagcgtagaaaggcctggagatgac

SEQ ID NO: 22831 - DNA, 883 bp, Homo sapiens
  chr19:30719148-30720031
  binary
cgacttaaagagacgaaagagaggaaaaaggggtgagagacggagagaggaaaaagaggggggcggccagaagagggaaggagaggcgtggggacagggcccccgcccccgccggggtcgggtttgatggtgaaatagtaaacccacgcacggagggtcgccaggaaagtggacattaccgctttaattaacttcgagatgctccggcggcgggacctggcgtagccgtgacgcgcccccataaatctgcccggcccggggctgctccgagaactcgtacagtagcggcgtcagatccatcccgcgcctcccagtccggagtccatttgcataattggattttttttttttgcctccttctttctccctgaaacttgtttgaaaacccaagtgaaaaccgcgacgatctgcacactcaaaagcaagtgccaagtaagtgccctgcggtggcctcggcgcgccccggggtgagcgcgcaaagccgggagcgaggtgccgcgagctgcgcgccgccccgggccggcctcgcgtgtgggcggctgggcggctgggcggcgggaggacggcctccgcgggctccgggactgcccggctggctgctcgcacaactttttttttttcccccgtctgctgacttttcgggccaggtgaagtgtttgggccacgcgtgtacctgtggcgagactcgggaggcgatcttggggggcgcgcggtcgcagttgggcatcttgcctgggtcgggggcgggcagtcggtcccagtggccgccgctgagggcagagctgcgagcgagcggggccggctgctggtcgcgccgcgccgtaaatgcaagcctgtagccaaatgcttcccccattattctaaggtttgtgtctgcgtgtgc

SEQ ID NO: 22832 - DNA, 856 bp, Homo sapiens
  chr19:36909065-36909921
  binary
cgcctcgctctcccagagctctgggattacagatgtgagccacctggtccggcctagtctgcgcgtttctgctgggagtctttggcgtgcagaaactgaccgagggccatttctctgcagctgggcccggtgtgggcagaggatgctggggtcagtcacgcactccacggccacaacaaccttcgctcatacaatagtctctgcacccaagtcagccgcacagactccgtcacgtcccagccccggccccgtcacgcccacgacacacacacccgggcctgaggcgcgggctcccgcccctctgcgatactgcagtggccccgcttacctctctttaccccctgggccgcagcgcttttcctacagattaccaggaccgacgctccgggccaggactgctcactcggggcgcgaacccgaggcacagcgatgcccgaacggaggaagccgctgccgggtcacgccacaatccccggggcctaacgggctgcgcgcggaggctgctgggagggccgggcgcgctcacggagtgcgcaggcgcggccagtctcaagggtccgctcgctggtgcagcccctgctctgcgtgaacccggagccggagctaggtccgtcccagcgaggctgcgcttcgagtcccttagcgcctggggacggcgcggcagggcctggaggggagcggggacagatggctggcgcgttaaagaggggcgcccgcgaccgcctctctatagtgccaactagggagccctgtgagcgaggacggcgctgcgagtctgtccctggcgcgctcctgggtgggattctttcactgggtgtggctgttgggatttgagaccgtgtgactccggagattc

SEQ ID NO: 22833 - DNA, 742 bp, Homo sapiens
  chr19:37568994-37569736
  binary
cgcacctgcctggccggcgggtcccaccctctctcctgccaggggtagaccctgggaccactcagctcgctctcgcaggccctgagcgtctgacgcctgcgcactgagcgcgggcgggcgggcactcccagaaacctccggggcgctgcaggcgggacaagcaggttccacaggccgagcccacgagcccctcgaggggtgagcggcccgggcctcctggcgttctggccggctagccaagcgctggactacatttcccagaggcacggcgtccggagcgctggactacatttcccagaggcaccgctcccggagcgtagcttcatttccgttagtttgcgagatttggaggcctcgcgtggggagagggccgcgtctgtggaggagcttggctccgcacctgctgggctggcgaacccgaaattgggcttggaacccgggagccagatcttggaccctgaactgcacctctgtcaaggtaggagtgtccgggatgccggagcggacacgcgcggagaaagcgtcgctggggttactcgtgtggccgtgtctccggttttgtgtgcaggctacagcctgcctggtattggcgactgcctgtgcatacacgactggacgtgtgtggctgtggttttgtgtatgagcatttgtatgagtgtgagttgtgactctgagggtgtttgtgactgtttgcttacctggctgggatatacttatgtgactgtgattttatgtgtgccgc

SEQ ID NO: 22834 - DNA, 762 bp, Homo sapiens
  chr19:37959780-37960542
  binary
cgctcccctcccaatttttttcgggtatccagcacaattctaggaattcgcctcccacccattttgagtagacgcgccactagcgcgttcccacgcacaaaccttttccctgcggccaacctgcgattctcaactccccgccctggttgctaagggaggcgcgcagagcgcttgtgcctgcgcacttccacaccagcccgtgtagtgtgacgctgggccccgtccctgtgaccgggccaggctcggagctgcagggaatccggactttcgggctctctggaaggccggggagaggccagtgtgggaggacctggtggggaggaggccgtgttacaaaccctgcgcggagctgcaccgctgctgccagacactgcgacgccgcgaccttttctactccggactacgtttcccagcggaccccgcgggagttgggccggcggcccctttgtgtcctccgggggcggaggcagctgaggcgcttctttccgggcccgtaagggctgggttccatccaactaagggtagcggtgagacccgagtgcagattccccgagccttcggggcaggaaggagatcttccaccagttctgttctgcaggtcgggagtgggctgaggagtggcgtgtgggtctccggaagctcgtcgcaggccatctgtgtgactccggtgcgagtggaggttggtaccgttcagtgcgaggctgtcaccccgtgtgcctgtccacgtcctgtgtgactgggtgcgaggaagtcaatggcacc

SEQ ID NO: 22835 - DNA, 740 bp, Homo sapiens
  chr19:38182720-38183460
  binary
cgagtaaactgacgtcctggaagaagcacccttattttcaccattttacagtcgaagaagggaagataagaggcggtgaatccgagactttcattcaggtgacgatccctcgcgggcactcactctcgctcacactacaatcagatcctccatgcggctttcatatactctgtcacactcgcagccagaatcccctcggatggactcttgcaaacctccagccccatcccgggatccgtgcgtcttctacagccaccacttgggccagcgtccaggacgcccaagcgtaacctccccactctaaaccgttaggaatcagtggctggactcaccgcgtcataaaagcataaactgtgacccgatgagtccgcgcactcggaaaacaagagaacgctcccacgtctccgggcgcagcttgtgccagcgactactaggtcagggggcgcagctgagagaattcaagcaacctccccgcaaccggttccgccgcgtttgtgggctggtagcccggaatacatttcccagaggccttcgcggccgacgtgcttcgcgcaggaacgcagccgcctcccgactggaggacgcggtagcggagctgctcaaagcgaggtgctcagccctgggaggctcagggctgcccgaggggcttagtcccagagccagtgctgtcaggggctgagcatgtgaatagggcagtcggaagaccatgtgtgtctgtggcttttaaatacaccccgaac

SEQ ID NO: 22836 - DNA, 907 bp, Homo sapiens
  chr19:38210032-38210939
  binary
cgtactaggctgaggaaggcacaggaagcagcagggaacctggagccaagggtcaatagaccccacagagcccagcgaagcacgctttacaaaggacacacacggcatgtacaggtcacacaaggtcgactacgcacccctcacagtcccgcaactgcacccacgtcacacaggcaagccggtcctgtcgccgctgcgcggtctctcacgctccccgcctgtctcctagagacgggcccctcctccgcagctccagcaccctagggcctgaggaggcgggagactcgcccggcccgcctgggggcctccgcgctctgagcgcctcctgcagccccactctcaccgccacgcagggtaccacgcgggcggcgggctggggctgcagaggctcccgcagtgacctgcgccgccttcttcaggtggaaccaaaaggtcccggaaccggagccaggggtccaagttttctccgttgcctttgtaatatgtagtccaagccagaacagtcaggaccgcaggtaccggtgagaaatggagtccagaatcctaaaaacctacgagaaatacggcagcgaccacttggaccgcgcctcccacccaccgctcgagccccggagacttctgggagtggccgccttgcctcgagtgcgcatgcgcagatcggccactactgggcccctggcctgaggcttagggtggagttagtgcgttcttagggccagtaggaggcgagtctgagtagaaactgatccaggtagcctcggaagggatcacctgctggatgggtgtgagctcctcagggtggggcgccgaaaccctcatggctcctgaggtagagccggcctccttggtaacacatgggactgggacttttaataccacccgacaggcccagcttgtctcgtcaagc

SEQ ID NO: 22837 - DNA, 359 bp, Homo sapiens; identical to SEQ ID NO: 5776
  chr19:41190162-41190521
  binary

SEQ ID NO: 22838 - DNA, 441 bp, Homo sapiens
  chr19:42028298-42028739
  binary
cgaggctgccaacctgtgagatagttggtccacttgtacaaaaccccctccatgcttcagagccccacaccgctcatcctcccggcccggcgccggccgcggtgatggggtaggcgcggggcctggggcagcctttcccggcccgcccgggccccctccgccggcacgaagccgctttctgcctgcgcgcgccgcagggacgtggcggcccttagaggccgggacagcgggcgcagcgtggagcttgggggccgcgaggcgcgggctcagacatccccgggtaagcctcggcggcggcggccgcgacaacggcaaaaatgcgactgcgaccgcgaccggtctcgtgctcgcgcttccgcggcccggctgctccctccggcgccccggcgctgcctcttcctcgcctgccttccttccccctgggctccccgtttgtttttc

SEQ ID NO: 22839 - DNA, 759 bp, Homo sapiens
  chr19:42927302-42928061
  binary
cgggaaccctggtccacgaagctcgcattccggactctgctcccaagccgatccgggcgtcagctagtccctgtgccagggtgggcctctcggctgtcacatcacccccttctcacaatggatcatcccgttgtccccgcaagcggcaatgggccagtccgcggacccccccaactccctgtggcagtgggccagtccacgctgtccccactgccccgtaggatgtacgaggttccttccgggctgctgccggtctccgcgcgctcacctttggccttgtcttttcgccaccgccggcgaccgtggctccttgagccctctttggcattcttcgaggccggggccatagcggcctcggcgggctccgttcccccggccaactccatcaattccccgcggtcctcccgcgggggccaattccagccgcgaggccctgcccggagggccaatcctcgctacacactactgtcgggcccccctattacccaatcccgagcttgctcttctctgggtccagctccctaaccaattctggtctccctccgctgccgtgctccgcccccaaccgccagaatttaagatctggctccgccccctaccgcgcattaaagggctcgcggccaacaaaaaggcaaccccgggggtggcgaaaagcgtccttcgggcaggactagtgcggagccccgcggggagcaccccagcagggaagtcccgatcttcccacgtgctgggaagcctcccatgtgctggctcagtctc

SEQ ID NO: 22840 - DNA, 712 bp, Homo sapiens
  chr19:50553779-50554491
  binary
cggctcctggccacgccctaaccccacccccgctgcctctaaacccgtccccacccctgcagcctcacaggctgccgtcagattctcaagcccctattcctctcggtggcctaaatccccaactgctcggggccacttttcaggccaaaatgggcccaaaatggggagggcaagtgatgaatgtcactagacagtggggccctcaaggacctggcaaatgggggcttggacctcggatcggcctcccacgcgaagcttgctccccaccagcatccccacgttggtggcgacgctgccccggccccacggatacttccgcgcctgtcagactccctgatgaactacccttcccagagtaccgcgggagctcgggctcctgagggcgacggtcctctgatggcagatgcgggagaaactctggcgtcaggcggccctcgcgtggagcacacgaagtcgtggcttattctggcttcagtatgtggggtggagaaggcgatccacgcagctgcgtctatttcctgtggatcaatcgcaaaatacgttctgtaagccccgcccccactgcgtgcgggcggcttttgtctccacggcaaccgtcaactctggaaacgcctgtctttctccatggcaactgtctacgccgcaggctggagctgcccattaccggagcccgtaagcagtatgggtgctggacaaacagcgtgatcgggtc

SEQ ID NO: 22841 - DNA, 810 bp, Homo sapiens
  chr19:52531282-52532092
  binary
cgtaaagggtgactcacaagggccccagacccagacagagtcggactcgtcgctgatttcctcagactcttcatccctacagccaaaggacccgtcattaacgccccgcttcctcagcgactgcgttcaaatacagccccaatcaggacgctccacgcaccatcggtacacagacccacaggccgcgagtccatgcccagaactcgactcacccgagcccgaacctctccagacaccactggcagcgacaaaacgccgcatccacgtccgaaaacgcttcctattcagacgcgctcctgcgcggactccgggaagctgagcggtaaagaccgtgaagcgaggcgaggaccacggagcctgcccgggatcgcgagttcagactgcgggcgccgctctatgaggtcacagggctgcgcccatcgcagcgtttctgacaggagcggccataatggctgtgggaatcactcttagtcacctcagtgcctttctctcttcgttgcaagggacactcaagagtcgggtgcccagccaaggccaacacggcgcagtggcattctattcagcctgctgtggaaaaaagatggcggcgccctttgtgcccattatagctgagagtggagccttagctggagcaccatgggcacggccatcttagaggaaggcagcagccgtacggcagagaagatgctcatatccaggacaatttggaaaaataaacaaggtttgaagaagtcacggtgctggccaggaagcggtcacagagttgccaaaaccagtggtcactgaaagtgttagatttggggatagggc

SEQ ID NO: 22842 - DNA, 833 bp, Homo sapiens
  chr19:53237625-53238458
  binary
cggaggagcgcattttccacgccctggagctccgcaggcaagaataccccgtgccgcaggacaggcccctgggacctccccagtgcaggttcaatgaaagcggtgactgcggaggggagacctggggagcagcaggccccggcatgaggaggaaggtgcggggcggggggggggggcgcgacggcgccttaggaccaggatggggtctgcaggatcccaggacctggcagaggactcggcctccccgggactggggctgcggcgcggcgctcccggggctgaggagggggaggctgggaggcgccctgggcaagaatccacatcgcgggtgaagactttaaaaagcgcggggcgcgaggagtcagaacaaggttttcagcaggaaaactacgcaacagaaagtgtatacattgacctatagcagaaagaccggggacgagaccagcctcaggacgactttaaacccaaaaggaagcgaccctcgggctctcacggggatgtctcaatttgctctgggcaaaggaagacgccggagaatttccaggtctgtggggaccccacgtcccagggacagaagccctgggaacctagttagcgcagacttaatacaacacagagcaaaactcaccgcggcgatatgacctacactccacccgatccgcttccgggtttgcgttaatctgcgcgcgcaggacaaaagccaggcctgggcgggaagtgggaggtaggcggggcctgggcgaggtaggggcggggcgcgaggcggagagaccttgccttttagaaccggcagagggcagggccggggcgggatctgcgcgtctctcagcctc

SEQ ID NO: 22843 - DNA, 694 bp, Homo sapiens
  chr19:53445359-53446053
  binary
cgcgggctcaggagaaacggtgattacggagggaagacctggggagcataagggcccggcacgaggagggaggtggggggcgacggcgccttaagacaagactgggaggcgcccagggcgggaatccgcctcgcggtaaggactttaaaaagtgcgggttgggaggagtcagaaaaaagttttgagcaggaaaactacgcgatgggaagtgtatacgttaccctatagcagaaagattcgggacgggaccggtctatggtgactttaaacccaaaaggaagcgacccccagactctcacggggacttctcaatttgctctgggtaaagaaagacggaggagaacttccaggtctatgaggaccccacgtcccaggtacagaagcgcctgggacccgggaagcgcagacttaacacaacacagagcaaaactcacccccgcggtgggaccgtcactccacgcgacccgcttccgggtttgtgcgaatctgctctctggggacagaagccaggcctgggcgggacccgcggggaggtaggcggggcctgagcgaggtaggggcggggcgcgaggcggagagaccttgcccttcagaacagacagagggcggggcgggggcggggccggggcgggacctgtgcgtctctcagcctggctcccagagcctcaatttttcgggttttggaggcgagacc

SEQ ID NO: 22844 - DNA, 1149 bp, Homo sapiens
  chr19:53606073-53607222
  binary
cgggccccgggcacctccccaacgagggctcaagggaagcggtgactgcgaaggggaggcctggggagcagcagggcccggcacgaggaggagggaggtggggggcgacggcgccttaggacaggggtgggatgtgcaggatcccaggaccaggcggaggcgcggcctccccgggactgggtcggcggcgctgcgctccaggggccgacgagagcgaggctgggaggcgcccagggcaggcggtgaggactttaagcgatgcggggcgggaggaggagtcagtaaaggattttaagcaggaaaatcctgcttaaacgtttaaaaaaccgggaaaggccgtgtttacttggcccaaggcagaaagaccgggggcagggaccagcctcagggcgactttaacccaaaaggaagcgtctccgggcccacacagcaaggcctatttacctgaggtggagggtgcggtgcggagattttaagtccgtagcgacccccgggcatcgggtgtgcgaatgggggacggcgaggcgcaggttgagtctacacagaggaacactcatacgccatggtgtgatgcttgctccgcacgatccacttccgggtctgtgggcaactgcgcgaaggaaagcgaccgagcggcccggggcggggtccgagatgggcggaaccggaaaagggcggggcgttgagagagccgggctgaagcaggggccgccaggcagggaccccagggaaggaacggggaggagccaccggggaggggtggggagtgaccaagtggagggacccgggggcgggccggggaggagccgccggggaagggcggggaggaaccgcgggaagggaccgcgggggaggaaggcgaagggaccgcgggggagggaggcagagggaccgccaggaagggacccgggggagaggcggggctggacgggacacgttagggtctgcgatttcgtgtgatgcccacagcccagcgcccagagccatctgtagtgtcttgtggaacggcgtagatgtttcaaacggtttcaagttaaaagcacagttgtgtaggttattttggaaaccaaactgctttcctcttagaatggaggcggtttatgttgaaagcattttttgctagcgcgtttacccagtaatgttattgac

SEQ ID NO: 22845 - DNA, 134 bp, Homo sapiens; identical to SEQ ID NO: 6067
  chr19:56112791-56112925
  binary

SEQ ID NO: 22846 - DNA, 600 bp, Homo sapiens
  chr19:56879394-56879994
  binary
cgcttcagccctcagaaggcaaccgcttgattctctgcgcaggcgcagcgttctcaacaccgccaacgggcacaaagccacgcccccacggccgaactcacgcctacgtactcagtcaccagcggaaccctctccaccaggctccgcgtcgaggccctacggggcgtcaatacgcacgcgtactttgtgtcccaggtagctcgtctcttagccatgtacgcctctgcattccggtcactgggagcggggccgtgggggctgcacatgcgcactgcgagtcctcgcctactcccagaaaccacccgggcgcatacgcggtgcggccgctgcttcaggtcggcgggctccagggagacctgggtgggcagcgtcgccgtttctcctttcttgggcagtatttttcccagcgccacgcggaggctgggccattatgaggtttgtgttgcgtcggggcggtccgtctcagaggcgctccggggaggagtgggcggctgaatggccagaggcccagggatccgttcaggtcagcgctggcgtccgggcctgagtttggaggtggcgggtgccttacaagaatgctcgcgtgatcagtgtgttggc

SEQ ID NO: 22847 - DNA, 828 bp, Homo sapiens
  chr19:56904526-56905354
  binary
cgcataacagtgaatgcaaaacatccgcaatttcagggggtcggagacccctgcgcacccacctaaggggtccatgcacctgggctatgaggctggaagcagaaagggggcgccagaaagcgcacgccgcgagggccggcgggaaatgtagtctcacgccggtaaagccacagagcgacgatgaggcgagacgtctgcgttcttctcaggcctgagacccaaccggcccgggcaccagctcctgctggaccccagagcgcctggaaagctccggaacctctcacctgccgcctcctcgggtccaagtgccaccgcggccgcgcccccggcagcccagggcgcgcttccaccacggtaccggtggattcgccgtgcgcagccggaagatggcgcagacgcacaaagcacaccgatgctgcgccatgatagggccggcgccgcagtgtcttccgggaaacatagtctttaggcgtaaaggcagcagcccggccttgaagccggatctcgcgatgtttcagggtgagccggacgcaggcgtgcctgcgcagtgcgcggaggagtgctgttcgtgtgttcgagtccctgggttgcttcctggggtctgtggtgctgggtgtgctatctgcgtgtgattctctagcgagagattgtgggcgagtgaccgagtgggcaaggggccgtcactgtgtgtgcgtgattttgacagtgtgtggtggtagcttctgactccgcgtgggtcgttgaatgtatgactgggaccgtttagcggtggatacacaactgtgtgcggctgtggaagattgcctcatccgttacgttcccatttcc

SEQ ID NO: 22848 - DNA, 806 bp, Homo sapiens
  chr19:56915147-56915953
  binary
cgacagtgcccgatacagcaggcgctcaataagtggcgaatgaaagacagggcaaggcggagagagaagaaacagaaagggaaagagaaagcccgggccgccagagcgcttaatcacacgtacatcctaccgggcccctctccagctggctcaggctccacactggtcctccagctcccttttctcagcgatggactcacagccccacccggagcgctggagcgcggacgcggtcactgcgcgtgcgcctcaccgcgctggcaccccggcctggcagcctttggggacctgaaccagctgcgcctgcgcaggtggaacgggtggaacgggtgggggagcggacagtcgaacggcctgagagggctcagctggtccgggtgggattctgaaggccagcggaggtgggcttactagggaaaggggcgcagcagtaactacccgcaactgagcggcgggatctgcggccgcccggggccctcggccaacatcccagcatcctctgcgccgcgccggccccggactccatttcccagcggcccctgcggcctgccctagggctgcggcgcctttgtgagcgcggccgccggccaggatcgagccctggcccgggccctggcccagccccggcctccaaggaccgcgccgaaggaggtgcccactggagggaggaggcggtgaggagcgcgggatggagctgacgccgggagcggccatgccaccatgtgtgggaccgtgtgtgacagtgtgtgagaatgtgtgagacattaaggaaccgtgtgtgacaatgtgtttgacagtgtggaatc

SEQ ID NO: 22849 - DNA, 869 bp, Homo sapiens
  chr19:57831543-57832412
  binary
cggggcgaatatccccgcctcctgacctcaattttcctaagctagaaaggacctttcgaccctccgacttgtgcccatagtaaagcggcggccctaagacgacgcgggggtccttgtgcgcacttaaatggagtcggctgcgcttggtgagttcccacacccggtagatgtgagggaaaaactgccttactcagaaggcaccaccccttgcgtcggccgcggactctaggccaatgacgggccaggacacgggcgatttctgcgggccagggcggcggaggtgggacttccgcttcgtcgcgtgacgtcatctccgtgagcaggattggccctggaacagtgtggggcctggaccgctgggtaggcgcgtccagcggcctgagcaggggagggtaatgaggctgttacgcgccttctccgcatcttggcgggagcctgacgccccgcttcttccctaacggggtgttccaccggcgcctgccgaggcctaggcctccgcagccgccctccgtctcctcagccccgacgctgcgcccgctttgtgcgcatttttctctggggaaactgaggctccgagtgcgaaagtcagccgaggtcgccccgcccaggacagagaagggctgggggtcggctgagccgcggcattcccgggccccgctagggctgcagggtctcaggatggcagcctcggcgcaggtgagtggacgaggttttggccttgctgctgctctgctacttctggaggcctcgtgggcaggcagaagccaagacagccacaggatgtttctttgtcgccgtcgtttatttaagagaagtggccgtagcttgtcatttcctttatccgcagtcctgcaatagtgttggcctcc

SEQ ID NO: 22850 - DNA, 706 bp, Homo sapiens
  chr19:58038572-58039278
  binary
cgcggcggactgcggcgtggtaggaactacaccacccagaatactgtgcgccgagcgtgccggggccttagaccaatcattgcccaggaaaggggcacctccgtaagtgcgcaatacgccagaatcttccggcgtctttccggtggtggtcgtttttgctgcctgcgagcgcgtccgcgggctgggcgtttccggctcgctgggtccgggccaggtaactggagccggaaaccggtggaggtggtgtccgcccgcagaggagcttgcctggtctcggtctgagcgtcgcccagcgatttgccaccgcacgcacgccggatcccgggctttaccgcccgcctttccaggccccgccccgcctaaagtcccatggccgaggcagcgctagtgattacgccgcaggtgagagcggagtcctcggatcctcacctgggtcctgaggccccggactggggtcacctgcgtgggtctctgcagttcaggcctcttctccaggacagcgaggagttctgggtggggtcctcagagctgacgggcggtgaggtgaagaagggagagcgttgcgtaccgtgggggctgcacgcgcagagcctgggaggtgcgccggggtcgcgagcattcggaaacttgggggcggacctgtgtctgcagggagcagagagaatgaggagaagaaggcacggctgccatggcagcctgagcaacc

SEQ ID NO: 22851 - DNA, 790 bp, Homo sapiens
  chr19:58125385-58126175
  binary
cgaagccacgccctgacctcagagtctcagggcataatttctcagcgcccctcgcagtaccatttggcctttgcccagcgtgcaggggagttagccgtcaccacggccaagtgcacatgagaactgcattgcccagaaacctgtgcgccgcccggcggcggcactcttaggggcgtctccctgcggacggaagctctctgggcgggacttccggtatcttcctcgcggtggacatcttgtcggctcttaggtggaaccatcggagcagaagctcggggttgctgggcggttccgaggtgacggaagcgggagggtgcgggagaagtcgctgttcgctctgcggagtggctcgccagcgaagaccccgcctgcgcccccggggacggacgaccgcggtgccagggtcccgcgacctgggaccccctcgcggctccgggtggtctacgaactgtgatggcggcggccgcggtgatgggcccggcgcaggtgggtgctgcctttcccagactttcgcccgccccaaatcctgaagttccaaatgaggagcgcctgtctgagtccctgcagcgcaggccccagtgtccaaggcagcggggcgctggtgggtgggggcgagtgtgactggcagaggggcagcctgagcataggtttggagctggactgagcccgtagcagtcgggagcgtgtgtgaaccgtagtcaggcctgcaatgtcgaggggagaagttgctccttcattgcgaggacgataggagccatggcgggttttgaatggtggagggaagggatcc

SEQ ID NO: 22852 - DNA, 881 bp, Homo sapiens
  chr19:58238341-58239222
  binary
cggtctcctcgtatccatcctcgcagtccccaccccaaactaatgttctcccctgagcaaatttcgagacacttaaaatcccagctaagatcacgtccttctattcaaaaccctcagttaatctcaacgccctcagaatgaagcgacaacttctcagcctgccattccagtcacagttcctcaaactctgctctgtgttgatgagaaccctgtctcccaaatgtttgggggtcagcagcacccccgagcctttacctgcgccgtcccctccgcccgtaactctcccacacccacccacaccgagataggaccccgccccaagagtgcgtcgctgtcctgggacacaggggctgcaggcactttacgattcggagtcggagaaagggtgactgagggcccggaggacgcagcacccacccgcgcggagtccgttagctccgccataggaccgtgggcgcggacagctgccgggagcggcaggcgtctcgatcggggacgcaggcacttccgtccctgcagagcatcagacgcgtctcgggacactggggacaacatctcctccgcgctttcccaacacctccacctgcggcccacacaagcgttacagaaccccggccagggacagcctgacagaaacaaaatgtccgctacaaggaggagccggaagtcccgcccacgcaccccccgcaggcactgaaacacccctctcctgggccctcattgggtatgcaacgtataggtttgtgggtagagtgtggttcccactgagctatccttcaaggcaggggattctcggcctgggctcttgggaaaactcgaagtaggagggccaagttgtttgggaaaagtaacccgagtttcaaagggctgacaggacttcc

SEQ ID NO: 22853 - DNA, 775 bp, Homo sapiens
  chr19:58951083-58951858
  binary
cggaatcccagcgggtgagggcctggggcacactccacttacctgcgccgggcccatcagcaacgctggcaaccccattagaacctgtgggctgggcagggccataacaggaggcccagggctagccctgccgctgggccgaaccctcacacttccgctgggtgacggtcgcactcaggacctgtcttcccaaatgcaaaatgcgcgcaaggcctctgggcaccgcagggacgaaggctgggtatggagaccctggagacgcgtggcgctggctccactttcgggaacaccttggctcataaaagcagagtaattagccgggcactatggtgcgtgtgaaggcgcggtgacggtccctgcacccactcccgtgccctggtgtggctccagaggcctgctgtagcccaacccaccagcagcaaaatgaggaccgcaatggcggcgccggaagtcccgcctctcaatgacagctcggacttgccactggtccgagctttcattggctcaaggatccccgccgtctatgacgctatttccctatgcccgtcacgctactgctaggtcgttgccaaggtgattgaggaatggcgtttattgcgtcgctgctcaggcaacgcaaactacattatccagaaggaccctcgcggtgcctcagggctggccattggcagccgaggagacaggcacttccgggcggagtgtaagacgctggccaatcacagcctggcagcgggacttccgtcgtcgtcctcggaccatcactttggcatttctc

SEQ ID NO: 22854 - DNA, 526 bp, Homo sapiens
  chr19:59010484-59011010
  binary
cgcacctggcacgcacacgccatacacgttaacctgttgcaagaagtccacctgcgacaacacgccctccacctcgtgcgtggacacgttctcgcccttccatctgcaaggagggagccggcgcttgtgaccacgcccccgggaaggagaggccccgcctcttgcccccgccccgccccttttggggatcaggaggcccagtcagccccgccccctcgaaaatcgagaagccccgccttcgcgtgagaagtcctgactccaagttccgccctcttacgacaggaaagtcccgcctcttcagcctgactccctctaggatctgaaagcgtccgtggccccgcgccagccccgccccgagaaaccctgcctcggaccggaaggtgtccccgaggcggtcgcggaagtagaggaagccttcgcggtccatggccagtacgtccccggtgttgtagtaaacgtcgcccgattgccgcacgttgcgcaccagcttccgttccgacagctctcgggggccgcggtagcccac

SEQ ID NO: 22855 - DNA, 2746 bp, Homo sapiens
  chr2:105468467-105471213
  binary
cggcaggaaaggaaaacacggggtgctggcaccgactattcaaacgtctgcacctggagatctcagattgattcaatgaaatctgtgttccatcttttatatatacatatacgcatacgtaaatataaaaagcaacctttgggggccgcagaggaaaaaaatccgttctgtttggggtttggttaccaccgcctttggtatctataccttggcaataatggctttgctaaaacctacctacgatggtatctcacccggcaagcaggagctggacaagagcctacataaattctacgcgtctagtgttaatcttgagatcacgcgggggctgcctggctgcggctgggcaggagaactcctgctttcactgagttcacttaactgcgctcggcagaggcacgatacagcgggagagaagggcaggcccgttcacattttaatcggagcgcaccggcggccgctcctcggctgcgtcctgggctgccgctcgggctcgggactgccagatgcaggctctggctgggggcggcgggcgcaagcgggcgcacccgcagctaggggtgcggggtgcacgcacacgcacgctcattaagagccatgtatttattgaatgtccgagttgggttagttcattggaaatccccgaggagggctcaatttgcccttgttttcgttgccactttctcttttttcttggttcgctgaggttcctctgtgcagcgtttccgcttggccgcgtccccccaccccaccccaccccacccccgcttctctcgcctaccgggtgcactccccctcccatcccccttaactctttcagctgggttagagctgagaaagcatttgtcgccgccagccccatccaccacgcaaatccatctgagacagaaaggaaagaaaaaaaagcaccaccatgcctaagaatagagagcgagcaaacccccccaccgctaatcacacacacacacacacacacacacacacacacacacgaggaagcggtggagcagagaagggcgcggctagccgatcccggttctttcgcccggctcctgctgccacagggaattcctaaagccattggggtcgaatacacttacgatgaatctatgggggaaggtcggactgattgcttttcaaatacatcgcacggctccgctgaccggcaccctccaaactcacaagggcacgcacgctacttgcacgaatcccagaggagggaggagggaggaagggagggagagcgaaggagggagagagggggtggaggagccagggagcggcggcagcgagcggtccgtctcgcacgcgcgggcaccgcgctggtcctgggctgcaggtttcccagatgatggcatccgagaacttaaacaaagggggctgccgccggcgcgcaacggctgcggaaagttgcggtggcggatttccaaggagcgtggccacgaccagagctcttggcgatgcgagcccccgcttcccacccccgccgatcagagaagggggccggctggtgaagggaagaggaaactttgaaaccactggggacacatctgtctataggtattagcttgaatggtacatccgtgccgcgcgctttacaaatctctggcggggcgggggtaagggggtgagcaacccgacgcgtactaggtggggtgggcaggttgctatttttcatgtttcccccttcgttttccttctgattctcttcccccctctcgtccctccctcccttttatctcccctttcttccccccgcccagacctattgcgaacgcccagagccgccgagggaacgccaacgtctgggccggacactaagagttaagatgtggcggagggggcggcgggggaggggcggggaggggaaagtggtgagggggagggaggctggaggacgacagatttccagcttctacgacgctctgcctaaattaaaaagcaaccaatcggaacggccggaaggggggcctcgcgtcctgagccagtcattccgagcctgccaatcacccagcgggtagccaatcagcgggggccctggtgctcgacttccttgtatttgggaaagtgtggtggtgggtgcgcgctcgcggcggagggtaaacattcgacagtccccgctctgagagggagggacagagagcgaactgtcagatcggagcgagagcgggcgcccgagagagggagagagagagagggagggagaggaaaagtgagagagggaaagagagcgcgaacgagggcgcagagcgagctcctgctgcaactctgctccagcacggccagcgccagcgcccgccgtcggtgcactctacgagccgtgcagcgtgcccactggagttgttgtgtatcaaggatcgatcccctatatgcacacacacacctccacctccaccaatgcactcttcttcctcctccttctccagacaactgctgggaaaaaaataaaacaccaaccccaaccgtcagcaacaaggtaacagagcgattcgacatcattttttttcctgttcaattttttccttgttatatttgtttcctaatttctgcccaaaaggaaagatgtcgcatcagactgtgactgttgcgaggagaatgaaaaaggactcttgtttcagaggcaaccaagagctccggcaatagcaacttcagagaaatgcaccatcgcaagaagttttcctaggacagaacaaaacttgaaacgagaggaccagagggggagagcaggagccagcctcccctctcc

SEQ ID NO: 22856 - DNA, 846 bp, Homo sapiens
  chr2:119613031-119613877
  binary
cgaggaggctgcagggacgcgcatggaagagccggtgcgtgggagggtttgcgggggggacatcgcgccccctaggggtgaccccagtgggtcccgtgtgctctccgcggagccggcggagccttgtcctctgcacccggcgcgcagcggccccttaaacagtggaaccgtgaggccgctctaagccgaagggctggaatctgggtttctcgggttttattttagaccattcggcaccaagcccgagctcccccgccgcaccgcttccagtcccctttctttccatagagcgacccgaagccggcggtggcgcagggagccgagtctgatgagctcgcgggcggctgaaggccggcttccctgtggggaacgcgccacctgtcggcgccagtgagaactgcgtctgtgtggcgccctcggggtattcggggctgcggggagatgtgtgcctgaagccctgcgcttgcggtggggacgtccggcctctttcctggcaattgacccctgaggcgggagagacaacggaattcccacaaagggatccttctcgggatctccccacctcaagacagctaaagctggaggaaaagcccctccggggggtggggggtgcgggtttgccctgcgattccgaaagcagaaaatacccgagccacacagggacgggcgccgcgttggtagtcggggctacgttcctactccctctacctcccccgcgctgtgtgaccctgggcggaaccccgctgctctctgggcctcagtgttcttattcgtaaactgagggcgttggatgagattggtcctctcccaactctgaccttgaaactgatactgaatctgagcagc

SEQ ID NO: 22857 - DNA, 951 bp, Homo sapiens
  chr2:119915856-119916807
  binary
cgccgacggccgccaggcaggcacgccgccgccgctgccacagccgggaggcgaccgccaccagctcctccttgccgcccggggaggtaatggtggggcggcgcgggcggccccgctccccgcgctcggggaccggctccgcgggtcctggccgcgcccccgacgtggcgacccccagccccggctacccaactacttcagcgagaggcgccgggacctctgagcctgggcccaccgcgctggggctggtcgggagagccgcggacgcccgcgcgcatgacgtggggcacacaagacgaatccggcgccccgagggtccggcgccggccagggagtgcttgcgctggccggggagtctgcttgcggcgtccggcgctggctccgcggcgctgcctcccgccaggctccgctccgctgggtttagtggggctcctagcgcagtgagggcgccccggctccgcggcgcgctctgctgtgctctctcgctgttcgctggctcccgcgcggaggggggaccccgctaccctgacgtaaggagtccggggctgagcggcggaggcggcgaagcagcgcgcgctgccatcactcgggagacggagccctcatgtcatcagcctcctatctggcggcgtcctcggcagaggcggtgaaggcgcggttccccctggcggctcccaggagccacaagtgggcgcagcgggcgcggtcccaagccggggcacatcggacacacccacccgcggccacactcacgcgccccccaccgataacacacacagacacccacgcacgcagtggcggggcacgcacagccacccccacatggccacgaaagcagctggaatccaggtgtcagcagggctcctctggggtcacctaatccatcccctggcctgcaaagaggatcaaacctcaacccaccgagtccaggagagtcccgtgaggtccagc

SEQ ID NO: 22858 - DNA, 492 bp, Homo sapiens
  chr2:130737151-130737643
  binary
cgcaccattgtttttagtacatatgttttgtgtatttaaaaaactgtgttgaggcgccctggctcgccctgcgccagaggctcgcgcactcagcaggttgggctgcggcggcggcggctggggaagccgaagcgccgcgcgtgagagatcccggatacatctgcggtttgggctccgccaccctccgtctctctcccgcaggtctctgagccgggtgcggaaggagggaacggccctagccttgggaagccaaagcacacccctggctcctgccgacaccgccctccttcccttcccagccgcgggcctcgctccgtgctcggctactctgccgggaggcggcggcggctgccagtctgtggcgagccctgctgccctccagccgggctcctccagccgggctcctccaccggcccttgcaggggcgcagagagctcggcgcccgcccttccgctcgcctttttcgtcagccggctggaggagcatcggtcc

SEQ ID NO: 22859 - DNA, 1453 bp, Homo sapiens
  chr2:135475603-135477056
  binary
cgcgccctccggaaacatcaggtttcagtggcatccatccagatgaggttggtggcccaaatccaaatgtcccattcctctgccccatcatgagacgacggggcagggacccactgtgacccgcgtccgcgattagaatcggggactgcccgagaccagaggccgcccgagtcccggctcgctcccctccttgcgcccttcgccggggcgggcagccgggcggccgccgagggacatctcgcggctacacccgcagagggaagttctcccaggcagccggcggagccgcaggggactacggaaaggaggatgcaacgagcctgggtccctccgagctgagtagggcccggagtggcccagaagcgctcgactccgaacgcaaaaaatgcctcccgcaaacttttcccgtgggcgccggagggcctggagctggcggagaggagggcgcgagtccaggcggggtcggcctgaaggcagctggggtctgggcttcgagggaaggaaccgcagccgaggcggtgccggccgcagaaggtggggctgccgctctcggctagcggcgttctcgccgggaagtcggggctccgcgcccccgcgcgctccgagccccgcgcctcgcccagcgcggcccgcgagtggggagaggcgggccccgagcagccaccccggtcgccggccgggtcgggcagctcgcgctcacctcggtcctccagcccgtcgctgaactggccgctctcgctgatccgcacctgccgctcctcctccagctggggcggctcgcgcaccggggagctcagcggggccgggccgggggcggcagccggtggcgcgtggccccggggcggcggcgggacggtgggcccctgggagctgcggcgctggatgcccgcggccggctccatggcgcggggctgcggatcccggcggcggcgacgacaagcgcggcggggactcgagtcagaagtgcgaggcgccgcggctctggcgggggcaggagcggacggactggccgcgtggacagggagggagggcgggcgggcgccgcggagtggaggtgcacgggcgggggcggggacgagcggagagccgctcggctccgcggccggtggcggaggctggggccgcgttgttgccgccgcgctccgcccctgggggcaggtgcgggcggcagggacccgccccaaggcccgggcgcgggagccggcgcaccgaggcggacgagagggaggaaccagcgtgaggacccacaggcggccctggcagagcttggctagggcgtagcggggacccgccccacctgcgccgcgggatggtgcccagaggggacccctcccactggattcctctggggtccgcgaagcccgcggccgcgcgtgggtagcagacagcgcccctaatttggcatctttctcttctggagctgcacaggcttcagaggctgtacagggtcttc

SEQ ID NO: 22860 - DNA, 1968 bp, Homo sapiens
  chr2:136875336-136877304
  binary
cgccgcgcgcggcgggactcaagggggagacacatgcagccactggaacgctctttccagtcgtttctcctcgactcacagagaaaaagattccaatcctgctccccccccacccacccgcactatataggcatggtcaagaaaactcctttcggtgacccttttttggagtacgggtacctccaatgtcctggccgcttctgcccgctcggagaggggctgcgctctaagttcaaacgtttgtacatttatgacaaagcaggttgaaactggacttacactgatcccctccatggtaaccgctggttctccagatgcggtggctactggagcactcaggccctcggcgtcactttgctacctgctgccgcagccaacaaactgaagtttctggccgcggccggacttttataaaaacacgctccgagcgcggcgcatgcgccgctggggcggggagggagaaggcggggtgggggagaggggcagacgcgaggaaggagggcgcaggggcggggcggagaggtgcgcggcttgggaagcccaggggaccctgctgtttgcgggtggtcggtagtgagtccggagccggacaggacctcccagaggcatttcctaagtttgagggaagcgggatgcgcctgaagacaggtgggaagcgcgggctaggaacgcgtctctctgtggcgcgtccatccttgctaaagtggatggaattccagacctgggaatgctacagtagagacactgaggcccagggaaggggagtgacttgctggagtaacccaaccagtaggcggcaatgctggaagtagggccaagcttccaacgccattccccgcgctttcagcagacgcagcccattcaggaggtaaaaggagtaaagatccttccttcggaggatgtagctatacttgcacattcacagcatcactagggtcaggtgcagataattaggagatactttcagaagaaggtaggatttggcataattctggagactgatcagatgtagatatgtattgctcagtaatttcataatagcggtaaccaattcgcgaatagtgctttattatcctaaaagtatgctttattataagagtaatttagcgaccagtactttttgtaacagatcactaggaacttgcacagaatcactcattcattctcacaacaccgtgtgggtattaccatcacagagatgcatttagtccgatatttatagaaggacgaactgcgtgccacgcactgttctaggcgttggggatccagcgtgaaccagacaaggcccgcattcggagaaaccagcaaataagcccggagagatgaaatgccagggatgggcagggattccaagccgggcttgaacccaggtcttcggtccccatactcggcgtcttccacgattttgagcagaggacaagctttggcacgaatcagaaattaggttgaagaactgggcggggcggagtgggggtgggggtcagacgtttaaagcgatctcagactggctgaggtttgcagtgggcgcgcagacagtgctttccccctcgcgccacttccctccggcgcggagactgggtggggcgggggagcgagtgtggggcggggccgagaaactgcgtccgcaggcggggtggccgctgcggagatagctgggaccgaggcgcgtgcgtcgcgacacggaccccagaggcccccaccccgaaatggtcccgaggagagggattgcccagactgcactctacacacgatccctcttttctatatcaaaagaggaaacatttcagtctggagtgttccagaggtagttcggaggcagggaaccttttctctacagagcatgactttccccctttgtctgggacccctccctaatgttggtggttaaaggttctcatctactctgcactttcactgacacaggaaagatgatatccgggccgggagatgggactctcagaaacgaac

SEQ ID NO: 22861 - DNA, 878 bp, Homo sapiens
  chr2:139537357-139538235
  binary
cgtgaaaaataaacaccaccaagcctctcaaactgtgaacaggaggaaggtctttctgccccttctcatcctatcaatttactttccttcctctccttgaccgcttatcaataaaccgcttccttctcccggacctacttcccggccaccttctgcctactttaccccagcgctcaagtcccaacccgtgctaagcccctgagtcgcctgtagatcccgtctattccgttcttcaattcttccctttcgacctctaaggcaacccaaaactccttgccctccgcgcgcccccaaccccacttcccaagcaggcccaggctgggctccaagtcagccgcctgcgcggttttcccgccgaaacgcgtccccggcgtgtgggacggcgcgcgggccgggcactcaccagctgcagcaagccagggaccaccacgaggggcagcggccgcaggcgcatggtgccggctggcgcggcttttcacgagctgcgcgccctcgcctgcctctcgcgcatctccacttcgcggggcaggactgaggacgccagggacacagcgcggcgcttccctcccggaatccgagcgctgcgccgtgccgcgcagctctggccgggtgggcgggcagggaagggggagggtgggcggaccggaggtgcctctcccggccccccgcgcgcccctcctcggagggggccggcaaagagcctgcggggcagctcgagctccggcacgcggcggggggcttcagtcgcgccttggactctcccgcttggccgggcttggggtgagcgcgtggggcgcctgcgggagggaggcggcggctcgggcgcttgggtgatgggttcagtgcgaggctgccctccagatccgatcccgccgggc

SEQ ID NO: 22862 - DNA, 2594 bp, Homo sapiens
  chr2:145273332-145275926
  binary
cgcacacacacgcgtacacacacacaaaacctagagagagagagagagagagagaaaagcatcatttgtctctaatcaaaattctctcgtctttgtgttttgctccttccagcacctcacactgcgcccccagccgccccctccccgcgccgcgcagctctggggcaggccgggggcgcgcacaattgtcttctctagaggaaagttgctccaagtgggcccgggcggtccccgcgaggcgcgggctggggctgcggaggccgggaggccgggtgggcgctgcgtcccagcgcctgcctcgggagcgtctacgcggccccgcgccgggtgatcgggctgagagcgaggggagcgagaagtttcctttccgagtctgggctggcgctcgttcgcttgtttgttttcgggggttggtttctttctttttaaactcagttatcctccgtcagctcccccacccccccccggcaccctcgctagtccccagccctctcccctcccccaggcgccttccgcgctcttgccaatcacttttctcttttattcccacgattttgtttggggtaatacctagggggtctctctctcactctcttcctctctctctgtttctctctgtccccccgcgtcccttctctggctgtctccaaaacggacctaccaaactctcacccccccctttaatatcccacctctgatctgcgtgtgcccctcgaacccccatctcctttctccttcctccttcctgactcagcctggataacgggctcctccagaccatgtagaaactgccgggaaaagtctcgctgcgccctgcgactccttcagtccccggcctgggggcagagcctgctggagaggagtcatccgtccccgagccatcatcgaccccaccggaccccgcgcggggccggccgactccctcccaccccggggtctgggcgcgatgggccgggccccgctgcccgcggaccgttacttggcgcaccgagaagcggccgggcgactccggcaagaaactttaagcctcgctgaggcgcagacccggttcccctctcctgccttcgcagtctctctgccacccccgcccccgccccgggatcctgcgcgatccagcgcctgggcccccgccctgccccaggcggacgctcccgaagcccggccggagacccggcgggccgggcgcgagcggagcgggaggcggaggcggagggagggcggaggcaggggctcgaggggggcagcggggctgggggcgcggggccccggccggacccccgcgctcggacccccgggtgcctgacgctcactttgcccggcacttccccaacaccccccggtccagccgccgcgcgcgccgggctccggcgccggccgcggagggaggctcgccctagagccctgggcgccgccgccgccgccgcctcggttccttttccctttccccctccttctccctgggtctcgagccgcgtagtggcccggaaaagtttggttcgggctgcttcttaccgtttttcctcctgggattggcttgtttgcgcctcttgcaccgggggccatccgccatgatcggctgcttcattgataagagcggatcagatggcagttcgcatggactcggcgccctgcttcggcagcacgcaggctcgatctagcaaccaaacacagcgacaatgtgggcatcgcccgcgcccattgaaacgcgcgcgggccgcccaggggagccgggccagggccccggcgagcacccatccgcgccccccaacgccaaagcgaaacttcggcggccccctccccgccccccacccccagccttggccccgaggcgctttgtgtttgttactgtttggtgtgttgcacccgcgaggggatcagagagacaagaattacatcttcaaaatgagtcataactcctgaccgtatgagggaatgcacacggcggtacagtaagaccgcttgactcagggctaggcggaccctttccttcgaaaagtcctcagcccccggctcgggaacttggggtgaggcgaggttttcttttcgttctcatcttttctcatccccccaccccccaattcccagaggaaacaaacaaacaaacaacgcgaaacagcccctggatgaagcacactcgggcaaattgataatagtaattataggaagcccactcgcccagcgccccctcccctccccttttggagtttatcgaggcactgtctcttcctccccccaccctcgcccccaaattaagatttcccgttttacgccgcaatgataaatataattataagcctctttggacactgtcctttaccccaccccccctcgccactttgacaatatttacttaagtatttccccccacctcactcacacacatgctcccccacactggttcccttaaatagttccagtagaattttttttttcccttaagaaaggaaagagaaagtccaaccactacggcaatacttttaagctctactaaatgatcgtatcctttctggcttcgaaacttttgtacctaaaaatcgagagaggcgctgcattttttcagttgaaactgtcaaaacttggagaagggggacctc

SEQ ID NO: 22863 - DNA, 776 bp, Homo sapiens
  chr2:145281217-145281993
  binary
cgaccttgtgttgtgactcaggaggtgggcaacttcttttggagttgcaagcaaagggtgataaaggggacccctggactgggtgtgtgtggaggaggtggggggcggcaggggtccaagccaagccaaacggttttctcacgtgcagactcgcaatccaatccattcggagttgagcctaggataggaggggaaagtctattaaaaaaaaaaaaaatcaggagcatctctctgagaagccctttcaaacaaaaccaaaacaggaccagagaagctcagaccgtccctaacatccctgctgcgagacccgcaggctgtggaatctcgcacgtcacctggccccagcagggcggccagctgaggggttgattttattttatttttttgaagtaaaggctgaatctcggcttcagggcttttgccaacgtctccactgacaggaaccagcaaacttcaggacccaaatgagcatcttaatttattgatgctaaacaggtctggttgttgtccccaattttccgcgcgctctgccactcccccccccacacaccccgccccaacccccgccgccagcttcggtccctgcatttgatctccaggaagggccccgctgcacaggcggaggagcgcgtcgcgggggggggcggtgttcggccccctcccaccagaccgccctcccccagacctgtccccgcccgggatcctgcgacccccgcccgccgcccggtcagctgacctggctcgctcgcctgctccccgcccgccgccctgtttcc

SEQ ID NO: 22864 - DNA, 793 bp, Homo sapiens
  chr2:149632592-149633385
  binary
cggttccggcttgggcagccagaccggacttgcaggctcttggaggtcgcatcctgtccttcccccggcaggtagagtgactacaagtcccgggatgcgcagcgctcggagtcgggcgggggccgggcggacctctacggtgacgtcaccgtcccggggcgggccaggggagggcggggcggaggggcgggtctcaaggcggcagagcgcgctggtgctgatgcaggatggctgagcgcgcaggagcccgggaggtctgagccgggcgaggctcgctccctgcgcatcgcctcctccgcccgccgcgtggtcgcgggcaggtgggccggggggcgctgggcaggggcggggcagggccagggcaggccggtctgcagccggaggggccggagcggagaagctgcccaccttcccgggctcggagcggccggggctgctcagccggccgggctcgcgatgacctgctgagaagcgtcgtcggaggctgcaggaggcggcctagctgtgggcggtgcagctcgcggcctcctccctcgtcgttcccggccccggccccccacccatccccgtgccccctccctaccgccggccgagatggcggatccagccgaatgcagcatcaaagtgatgtgccggttccggcccctcaacgaagcggagatcctccgcggggacaaattcatccccaaatttaaaggcgatgagaccgtggtgatcggggtaagtggctggggcgtctgccttccctgctgctccgcgccgcagctgggcgccccgacgccccagacgcagc

SEQ ID NO: 22865 - DNA, 751 bp, Homo sapiens
  chr2:155553956-155554707
  binary
cggaggtgcaattcaggctggtggagcagcgggggaaggcagggacaggcggggctagcgcggctctgcagctgatcacacgcaccaccacacacaccacattcctgctgccccggcttgcgcctcgcatcttccacccggggccaccgaggcgctgacaaggagtgggggaccgaagaaggaagaggcagaggaaaagctagagcggcgctactgtttaacctgaaagtctgaccggcagcccaaggctcgaaccccgtccagcagcaccgctgtcgcctggaaggagggcacagcgccaaggaacccacgagcccccgctcgagtcattctgtgctctgtgcgccaaggatctttctggcagggacagcgcggtgccctcagggaggtgcggagcttgggggacctgcattggcgcccatcgtggtacaccaggaaaagtgggaacgaggaaaacagccgtgagcgcagagtgcgaggccaggctgccgctaccgcccgctgcgccgcctcctgccctctcccgctgggtgagtgcccaggcttcgcgcactgccgtgtctcagctgagcgcgggggcggcctgcgggcccttgagggtccgccggagggccccggtggcgcccgcggaaactcggcggtcgggggacgccaggcggacaggtctctggagtccggaacccgggaatctgagcccggagggcgtgggtagggggcgttgcaccagtgcccggcagacatgcctttgggc

SEQ ID NO: 22866 - DNA, 1335 bp, Homo sapiens
  chr2:168148871-168150206
  binary
cgtttatttggagggaagacggggaaggtccactctgcctacaactccgacatttctccgtgtgcctctttgctagctggggacacttcgtggctgattactatgaggagtggttcgaagcctaagaagtagtactcttttcagctgccaaagggagaaggacgggggcgctgtctggtgactgttcgcgtgattccttcaaggcggcgaccacctcctgggattcgctctccagccgcgccgttcgtactcgggtcccgcgacccctccccgctcccccctcgccccagcgatgccaagacgctgaaccgcagggacgaggctctggggacaaagtcaccccgcggcgccctttcctgccaagccgcgggctcctggcggtcagaaagcgccccaggcccacccctgcgggcccggctttccctcctcacctaaggctccggggccacgagtcccccatcctgcgcccctcccgcgcctcccccatcccaaaccccagcagcgtcgctgcctctcccggaaacaagcccgctgagcaaaggcggaggaaaaccttgggccttccgctctgattggtctccccccgccgagcggggcgaggcagcgattggctgccgggcgttgtcagtcgccgaggccagagccatcgccggggaagcgcagccgggctcgggtgcttcggctgccgccgcggctgctcggctagtgcagctgggcgagctcgcgcgggcgccgccgccgcctctgctgctgcccaccccgccgcgccgccggcgctgccggtcttgcaggcggccgccggggaggggcggccgagagagcggagcacgaggaggcgggggcggcagagaagtgatgctggcgccggggatcggggcagcggcagcggagcagcagcatcttcgggaccctggctgcagcgtccctgtggcccgcgcgccagcccagcggccggagaccacgcgccccgcgggtaaggttctgtccggcagcgcccgcgacgcccccgggacggctggcgtggtctttgggggttacgaggcgcgtggtggccggggcatcccgacgaaggtgttgggacccggactgcgtgtcccgacgctgggctgtgctactgcccgcgcccgtgcggctccagctggtgcgttctcccttccgcgctcacagactttgacagcgcggggatggcattgtgtgagtgtggatgtggatgcgtgtgtgcgcgcgcgcggcttggggcactttgcagcgagaacagtgggtcccctctgcgtggcccgacgtccttcaaggacccaagctgggctggagtgagtaggatgctgttggctcggc

SEQ ID NO: 22867 - DNA, 834 bp, Homo sapiens
  chr2:168150217-168151051
  binary
cgcacggagcgcacgggaaagtccaccgtggctcgtaaagagccgagcaaattgaactttattgcggtgattaaaaggagctgtggacctggcgcgccaggggagaggcgcgttccacgaggctccccaaagtcccactttgccccggggacttcggaggggaagggaagagagggaaaagtaactgttggtccacattgctgaagaaaaggaggaaagagaagttgggggtgggggtgggggtggaggttactcttgggggagtggcgacttttaggtgtctgaagccccgcgtgggaggcttgctacacttttctggagcgcagacttgaggatggagagtcccactctgaggtactggtagcggctcctcctgcctggtggcggcgtagggcgcagcgggacagcttggtggaggcagagcggggctccgacgcccgacggcccggcgtccaggtggggccactgcctccccaggccgctttggcccgctgacctcccaggttgagacccggcctggtgcgcctctggcagctgccaaatgcctggcggctccgctttccgacaaagttcaggcccgctggggtctggtccatcagacctaggacacgttaaccacgcagagtaaccaggttagggtacccagctgcctccagagcgtttttgtttcatattagattatcttatttgataaagctgttgagagttccacccgtgctgcaaagccttccgcagaaggcgaattctttgcgctgctgcaaatggatggtgctactgggccagatccgaatctccgtagttcagtgcagtgggttctccatccctgctcaggac

SEQ ID NO: 22868 - DNA, 1776 bp, Homo sapiens
  chr2:182321353-182323129
  binary
cgtggcaactgagtgggtgcgtgaaaaggggggatcatcaattaccagctggagcaatccgaatcggttaaagtgaatcaagtcacagtgcttccttaacccaacctctctgttggggtcagccacagcctaaaccgcctgccgttcagcctgagaggctgctgctagcctgctcacgcatgcagcccgggctgcagaggaagtgtggggaggaaggaagtgggtatagaagggtgctgagatgtgggtcttgaagagaatagccataacgtctttgtcactaaaatgttccccaggggccttcggcgagtctttttgtttggttttttgtttttaatctgtggctcttgataatttatctagtggttgcctacacctgaaaaacaagacacagtgtttaactatcaacgaaagaactggacggctccccgccgcagtcccactccccgagtttgtggctggcatttgggccacgccgggctgggcggtcacagcgaggggcgcgcagtttggggtcacacagctccgcttctaggccccaaccaccgttaaaaggggaagcccgtgccccatcaggtccgctcttgctgagcccagagccatcccgcgctctgcgggctgggaggcccgggccaggacgcgagtcctgcgcagccgaggttccccagcgccccctgcagccgcgcgtaggcagagacggagcccggccctgcgcctccgcaccacgcccgggaccccacccagcggcccgtacccggagaagcagcgcgagcacccgaagctcccggctggcggcagaaaccgggagtggggccgggcgagtgcgcggcatcccaggccggcccgaacgctccgcccgcggtgggccgacttcccctcctcttccctctctccttcctttagcccgctggcgccggacacgctgcgcctcatctcttggggcgttcttccccgttggccaaccgtcgcatcccgtgcaactttggggtagtggccgtttagtgttgaatgttccccaccgagagcgcatggcttgggaagcgaggcgcgaacccggcccccgaagggccgccgtccgggagacggtgatgctgttgctgtgcctgggggtcccgaccggccgcccctacaacgtggacactgagagcgcgctgctttaccagggcccccacaacacgctgttcggctactcggtcgtgctgcacagccacggggcgaaccgatggtgagtagagttggactgatgcgccctcagcagctcagagcggcgtgagaatggcgccctagggattccctgcccgattcaaactttcctccctcccaaggaggcaggagggaaacgctgcgagagccagctcgctggaaatctgccagggaaactaacttatcttggggcggcagcgccccgggtgcgttatggtgcaaggtcttggagcttcgagtcgggggtggtgggcggaggaggaggtggggaagctgccctgctgcggactgcacatctgtggcgacagggagctcagtgggcagcacagctcacgtctgagcgcacgtgcacgtgtctcgctttaggctcctagtgggtgcgcccactgccaactggctcgccaacgcttcagtgatcaatcccggggcgatttacagatgcaggatcggaaagaatcccggccagacgtgcgaacagctccagctgggtgagttgggtatgggaccaggagttagtgacctcccgaccccccatgtggaccccaccatagggcaagtcctggaaagattcac

SEQ ID NO: 22869 - DNA, 1535 bp, Homo sapiens
  chr2:185462268-185463803
  binary
cgggctgatggctgccttggacccttgaaaaccaaccagaaagtctgtctccagggaatgctgcagacccggttccctactttccgtgacaaacccattagttcgtgtgcagatttttccattcaggtcgcttctagggcgaacgcttttgttcgctaccactctgtagtgcgagaggaactagagaggcatgtaaagcaagcttgaggcagcagcgcctttgccgcaaagcatccctttcccctcagctttagcaatttaggaagaactgaggttctcaggggaggtggggtgagaggattgccaggaggagggacatataaatcaggagtccctgcttttaccctctactcacttgtactcgcatcgccacaactaccctcccccgaaactatcatcaacacaagcacttacggtatctacaaatgtgtgggagcaggggtgggtggggggcatattttctttcctcgcctttccctaagactgaacagggtaccagcctccataccaaacacacattaaataacaaaatcaaataagccaaacccagtggatagcaattatcttgagaaagaagccgctgctggcaccggcctggattcgctgcagtcggaagcgggtggctttcggtattgaattattaatttatttatccccctcgcccccacccccacgccgactgccaggcaagaaatcgcggcctcttcgcttcctctccgcccccaccttccaggagtctcccacttggcggtggccgtcgcgtccccggccctctgcggcagcggcgccgcgcggggcgctcccactcgcgctcgggctggcgcggccgcgggtcccggcggcggggtgggcgggggaggcagcgggtgacagatgtactcctctgacagctctcagtatcagcccagtggctccctgccattggctcagtgcaatggaccggcaacgccgctcactataataacactcatgcctgccagcagcagcaactccgagtgcaggcgccgagcgcgggggatgctgccgccgccgccgcttctgctgccgcgcgggcggctcccgcagccccgctccgcccggccaccgcgcgggcactgactcccgctcggttccgtttcgccggcccggccccctcctaggctggaatcctcccgcggggctcgtcgtcccgacgcgaatctgaggagaaacaggagcgagagactgaggggagagcgcggcgagcatgcggaggcgggggagcctcggcgctcaccacagaggggtgcagtgagccagtctccagaggacgtgccgggggtggctgcgtgccctcgtggcgggttcccagcccaccgtcgccggccccggcgcgctgcggctgtgggcgcggggtgcgtggaagcggcggctgcggcggaggaggcggcggctgccccatggagtgttactacattgtcatcagctccacgcatctcagcaacggacactttcgcaacatcaagggagttttccggggccctctcagcaagaacgggaacaaaactctggtaatc

SEQ ID NO: 22870 - DNA, 1753 bp, Homo sapiens
  chr2:20865462-20867215
  binary
cgccgcgtctccgcggtggccgagagggcaatggctgaggagttcgtttgggacgaagcagtggagcaggggaactggggagcctgggccgggcctctctgtgggtcccagcgcagcgcagccaggcaggcgtcgggacctaggcggctttggattcggcgggcgacctcgctttgaagctgatcacccgctcaaggtgatcacgacgtgccgacccagtctagattttgagttctgcagaaaatgcaattttaaaggaaaaggacccgcctgcccttcttcggcagttcgtttggcccaggccttcgatcagctgaaagtttccgatctagggggatgtccaggctgccggcggagcagagccgataacccccctctcctgcgcgttcccctgagacttggcctccgcaacctgtcccagccgcggagcaaactgctctgcggcccgcgcgagtgcgccccagggcttcgccgctgccgggcgtcccctccatccacctcgggacccgcgccatcaccgcggcggggtaagaagctcggaggcgccatcccggggctctgcgccgtccgctctcccggctcctggccgctcacgcacacagccggtagctggttttcgttagccgctgccctcgcccagaaggcgggtggaaggtcgccagttggacgcacagccaaactcttagcgcactcccgcgcgagatcccccatcacccggggctgccgtcctcatttcgagctctttctagagcttggctcccgctgaagcgcaacttccgcgcccaaaccttgcttttacgacgggcggtccgcgtccaaaggtctcttacaggcctgccctttcagctcctcgccctcccttcctcccctaccggccccctcccctgctctggccgcccgctgcaatcctttggggtctgtggctgagtggggaaccgccgacccgcgatccggaacgcgactttgaggccgccgggagcatcctgtggcctctctctgcgcggccacccggccgcggcgcgaagcggtctggagggcgagcccttccgcggccccaactctgccgccccgttcccggcattgggaaccagggcagggagggggcgggtgtttctctgcgggggagtggggaggaagctgggcgggtgcgcgcggtgccccgagcctggaaccacggagggcgcgttggtcttgggcggatggagggggtgtcgcactgccgcggggaggcgtgtcgggaggctggggccagtggcagtcgcttggcgagggtgggggcgtagcgctgcggtgggaggaggcggctccggccctggtctccactctaggccggggtggggggcgcatagcggccgccggagctttcagcagggggcgctgctccgggcgttgggcgggggtggggtgggccaggagggggggccgcgggctggccgcgcacacttcccccattattaaacactatgttcaaaaggcgccgggggacttcccggagccacggagcccgcgccgcccgcccgcccggcccacggagcccatggacctgagcgccgccgccgcgctgtgcctttggctgctgagcgcctgccgcccccgcgacgggctggaagcggccgccgtgctgcgagcggcgggggctgggccggtccggagcccagggggcggcggcggcggcggcggcggcgggcggactcttgcccaggctgcgggcgccgcggctgtcccggccgccgcggttccccgggcccgcgcc

SEQ ID NO: 22871 - DNA, 845 bp, Homo sapiens
  chr2:21022197-21023042
  binary
cggccaggactatcaactcttgtgtttggtacacaggacacaaagcaggtgtccggtaactacttgcgagggaagatacgaattaaccaaggaataaagtgttccaatctgcattctgtcttgcgtggggaacaaaaccaaactaagacccaaggatgagggtttacggttaaggtcttcagcgtgaataaaaggcggcgtgagcactaaacgccgggggcaaagaacactcccggcccagagtttgacccctcctagcgagttcttcccggccagctgcccaactttttggcctctactcctccgcgggggcaccataagactccctacaggtgggctacacttaggggttcaaatgctgcattaccgcgctcgggtgagcgactgcccggcctgcaactcaagggactcccaggccaagtggctccgaactcgcgagctgtcggaacagtattatttttgctgctacgggccatctggcccagggcaacaggggctctgcgaggaaccatagagaagaaggggcgccagatcccgcgtgcctgcccacccgtccttcctttgggcagtcaccctgagctcggcaagctgtacctcacctgtccacctggaaggctgcccgctctccctgagggtcctgggaaggcggcacgagaccggaagtgcccccctcaggtgacgtcacagtaccgcgccggagctgatccgggaagccgatgtcagcctggcgcgcggcgcacagctggctgggagatttcttactggcttggagccggtggtccagatcagagagacctcttggagggtgtcggggttttcctttctttttcatttgaattttatcc

SEQ ID NO: 22872 - DNA, 670 bp, Homo sapiens
  chr2:219232221-219232891
  binary
cgaagttcctggaccggaaggtgaggggaggctccaccagcctggggttcccattcccccatgggccttaaattcattactgatctctgcacctgattgaaatgcacacccgtaggggctagaaggctccagcgccccttagctctccttggagcgagcggctgggggctcctggggcgcgggggtcccgtccggctgaggctcgggctctgtcccctgccaggaggagctccggctcggccacgccagctatctgcggcagcaccccgaagcccacgcgctcatctccgacttcctgctcttcctgctgctgcgccagccggaggacgtggtcaccttcgccgccgagttcttcggccccttcgacccgtggcgtccgtcgtcaccggccttgggctcctcccaccggcccaaccctttccgctccctggagccggagggagacgcccgctcgggggcggcctaagcggggcccaggcccggacagggcaggaaaccaggggtcgggctgggacgcgggcgggacgcgccggggcgggtgcgctttccgggctgcggttttgggggaataaatggggccctcccgcttctctgcagcgcccgtcgacagcgtccctggctagcgtctagtgtctcgggctagaaataggaaccgttaccgtcgtacctc

SEQ ID NO: 22873 - DNA, 973 bp, Homo sapiens
  chr2:232790312-232791285
  binary
cggtcgcccttgagattggcgcccccgcccccgggagccttgtcgcccttcttctgaccgccgcccgcagcctgcggctcggccagctcctctgccggcggggttcgcgggacctgtccgaggaaagagcgggcaggtgaagggacacgcggctgcagcacgggggactctgatgctccagccccacgcgcccgccggcgcggggtgtccctcccaagcccagagccgcccccaccgatgccggccagcttggccccgcatccacctgccacgcggccgccttcgccgctccctccggaagccccctgccctccctttgctgctcgccgggcaggccacactggggtagggggctgcgcatgggccgatgttctccggaggctggagaagtggacccccgaatccgcgcttcgagggctccccggctctcgcccacgcgcatctcggaggagacagccgcctgccttccctctctcctgggtcctgcgcgccgcattctccaagcccccagcctcccacgcctctcccaggctcggcgtccccacgacagcacccaccttcggcggcgccccgggcttggcttcggagggccggagggagagcagcgtgagcagcagggcgcaggccagcagctgggagagatgcatggtgccgctggggtcgaggggcgcacacgggcggcagcgagggcgcgcaggtcggcgggcagaccagcagggggatgcggagcaggctggctgggctgcagggcgagcagggtcccagtgctgcgcggcgccggctgggtgcgctctgagcccgtgactctgctcgcgcctttataatccaacctgccgctgatgtcatcctcccgcccaccgggccgcccgggccaatgacaccacgcacgcggccgcgccgagggccgggagggggccgcgggggctcccctcccttatcccaccccggagggatcccgcggctcggcgggctc

SEQ ID NO: 22874 - DNA, 761 bp, Homo sapiens
  chr2:40678936-40679697
  binary
cgctcgtttgccaaagcagagggaagtgtagccttatgagcagcaaatggaaaatagttcttggtctctgactaaatgccttctgcctgtccatcataagatcctacctggtttggggagtgtgaatggattcttcctccgttcctccacgctagtagaaaatacggcgcactccctccttttaaacagctcccgatcaggaagaggtcgctcccatcttctgtgggaagcacaaagcaggcggcggcggcgggctgactaccgtgcagcgccggcgcgagcgggagccgcggcagcgggcagcggtgcgcgcgggcgggaggcaggcgcggaggccgggaggctgggagggccggggcccgggcgcgcgcgcgctccccctccctcccgcgcacactcgcccgcccgccgcccgcagcctcgcactcgctcacacgcgcgctcggccccgcggctgccgggcgccccggggccccctgcgcgccccttgggctccccaggcgatcgcgtcggggcaaagccggcgcgtttctggagcaccgagcgggtggggagcccttccagcctcccagcctctgccggcgagcagctttttcgatttcctgccggctctcggccccgcagtgcgttgtggccgcgcgctagcgctgtctctcgcacccagcccatcgatgacacgcgcacacaggcgctgcaacttttcttttgaaccctcttcttctcttccgcagacagaaccctgacccccaattcgcctaccc

SEQ ID NO: 22875 - DNA, 934 bp, Homo sapiens
  chr2:43451904-43452838
  binary
cggcgccagcaggtcctcggcgcccccggtgccgtacagcagagcggccgcagccgcggccgccgcggaggcgcagcatgtcggggcgcccgagggcgtggaggccgcggaggccgaggaacaggaggaggcggaggaggagcaggacgaggccgaagagcaggagggcggcggcggcgtgcgcgacgtggggctgtcgagcagcagcggcgactcgaggccgcccgggggctgatggtggcccgacgggaagcccgagaagctgaggctgtggtgcaacttgggccgcggctcccgcgggaagcccaggtgcaacgcatcgcgcgtgccaaaggcacgcaggtccccggaggcgccccccgacggcgcgggccgccgctcgtccgcgttgtggatgaagtggcagcgcggcccataggggcagaagccgatggtatgaaaggtgcggcacagctcggtcttgtacttcggatggcgagtcaggctgcgcagctcgtggaagccatgcgcgaactggcacttttcgccgtacttgcacgtgccgctctcctcgaagggccggcacagctcggtcttgtagcgcgtggagttgatctgggagccgccgccccccttctgctgctgctgcaggtgcaggaggtgctggctgcgatcgccgttctcgctaaacgagcggtcccggaatttgttctccttgttgagcagggctgtgccgccgccccccgacggctccttaagggtgccgtaggaggtcggaccgccggccgccgcgctgccgcagctgctgccgttagcggcgcccgggaacttgggcgagcagctgccggggctgggcgcggggtgggcgagtgcatgcaggttgctggccgagtgccgtcggaggaatcccggcgcgaagcccgagctgggggcggcggccacaggcgtccccacc

SEQ ID NO: 22876 - DNA, 2459 bp, Homo sapiens
  chr2:47796765-47799224
  binary
cggtagcccttggcacgtattcttagaggagaaaacggaggctcacaaaggtcagatcacagagccggccagtgttggagcacaggcggcccggggtgagcgccagaggtgggctttcttccctcactgaaagccgggagggagagagagagagagaacgggggccggcggagaagagggcgagacgaaagtaagcaaagggacattagaagggaaggcagagccgagggacgcggaccgagcggccgagcagtggaaagggcggcaggtgaaaggcacagagaggaaagatgcgcgggggacgcgccgctcacctatggttgacaccacggtgcccacgaagtagaaggcgccggggaagtcccagcgcgggcgcagcgcgtcggcgcggacgccggcggccagcgcggcctcgtagtgccggaggaaggcgcgcagctctggctcggccacgccgtgcgcagcgctgaagttgcgcagcgtggcgccccagcgcgcccgcgcctccgcctcgccggggctctcgagcgccgagaagactgtggcacccgccaccaggtagaggccgatgagcgccgccagcagcacgaagcggccggtgtcctcgttgaggtgcgaacggcggcagcagcagcagcagcaggaggggcgcggcaggcggcggcggctacggcggggcgggggccgggggctgcgggaggacatggtccggagctcagccccggggccggggcggcgctcggggcccgggccacgacatccccccggcgggagcaggagcgtgaggatggtggccaggggtccggggccgccgcggagcccctcgccgccttcgcagagcccctcgtcgccttcccagagcccggacagaggggcgcctccgcctcctccccggcgctcaggccacacgcgagtcccgtggcccagcgggtgcccgggcaggggcgctcctctgcgcgccccgacgcctcgccggctcccgcggctccttacccgccgctctcgggcgcggggctccgcagctaggcccctgccgcccggtggccggcgtccgcggggccccgggcctcatactcctctccagacaggccgcgggctgcgggcggggtgggccgtggatcccgggcgcctaggaccgggacgcggcagcaaggcgtggagagagcccccgggggcgtcccatgaggcgttcgggatcggcgcctcctaggtgcgggctgtgcgggcagtcctgctcccgcccccggggctgagctggcggcgtcggcttcagagcctcggagccgagccgagtccggggaagcgctcctttctcagctccagccgaagagccgcccggcagggagaggcggagtcactggcgcccggggcggggtgttggggaggggtgagtagggacaggagggagggggtggagagttgggctgctgcgacgcctcccggtggctctggcggcaccaatgcggggcaccggagcaggtgtccgactgcggtgcgggctaccactccgccggggaacctcgtcttgctcctccctgcgcttcgcctctggaatctctcccttatctcatgccgcggtgaaactttgctcaagttggtggtgctctgaggtctccagggctggaggccgcgcgacgcgaatcgccgacactggattctcgggcgttagtccgaagtttaagttcccttcgttcactcctttgccctggatcgaaccgcagccccaggacgcagcgggttccactggaaacggggaatcggggagaggcggtcgctgggctccgggcgacctgggaacgagggcgtttgctccccctcccgaccgagcgggcggccggcgtcagcaccgcggacagcgcatcggtgccgcagccgcgggcgggcgccgctagggctgccaggggtccgaggcgcgggcaaggctgctcaccccgctgtgctgtgcaccccaaaccttccctgttttcctttctacctcccgtgtgcacccccctacccgccacccgaggcaggtgcggtcgctgaagcaggctgctgacagggcggggacgctgcggaatagagacgggggaggagtcaagcgcgggtagggggccaaggtgccacagggagaaagagcccaggcccggcggactgccgggctcctcgcgccaccccagctcaccgacccctctagcccggggcggggaataacaccctgggtgcggtagagagtagaggaatagaggaggtgtaggggaagctcactggcagctcccctgaggccggcgcggggaacggtgtgctatggaacgcccctgggaaatggtcgcccccctacgccccaccgcggcaggaaaagacgacggatgccccgcgcggctgcgggtgctcctctgctggacacaagccggctttgccggggccacaaaagttctggcgtggaacaccctcagtacaggcggaaaatcatcctcttc

SEQ ID NO: 22877 - DNA, 1067 bp, Homo sapiens
  chr2:60783811-60784878
  binary
cgacgattccccgacatatatttaatttcaccatcataatatgcccagggtgaaatgggaagtgccctccgctcccgcccctcccccagccagatttcacccagtccagaaaaccacggctgtgtgtcggcatttgatccctcctggtcgtcgacccccctccccggcccctggtgccctcccctagggcgacaacccctccctcagcactgctggatgctcgctaaagagcccgaaagtgggggaggggagggtttgtatgtgtgtttaaagaaagatgtgtcgttttaagagattttaaaatattacgtaagtattgattaatgatgcaggtggttttgtagagggggtgaaaggtcactttaaatgcgcacacttggatacacaataagtatatttacctttccagaagtggcttttagaaagtaataaattatgacaacgttaaaattattttctggccgttcagttaacttcgtttggggctgtagagctgttgctgctcccattgaaagggtaattacgttccgtgggctctttcccaaacctttggtgacgacactgcgtgtaaactccaggccagcagacgacccctccccttccctcctccccctttttatcttgcccgcggaggagacgccccaggacttcctgcagtatatattctgcctctgatctccgtacttaatagccaagtcctagtttatgctttataatgtgttgacaagttttctaacagactttctgaaataatgcacatatattcacgtcggttagaaacccaccgtatttttagagttgagtagatctataccctaatgcagtgagagagtgtaaatcatacaggatttcatagtcctttcagtagttttcggtatgaagtatgagccgcgtggcctccagacgtaaccttttagaaaaaaaaaaagacagtgcttttattttatggtgtaaagtgcttttagctcaagggctctgaacgtgaatgtggtcaacaaacagctcgaagagggagacttaatacagtcccagccctcggaccgaggatcgcctggcgcgaggaactc

SEQ ID NO: 22878 - DNA, 788 bp, Homo sapiens
  chr2:74781700-74782488
  binary
cggctaatccgggggtctccaccattccttctcgctcctctccctcaccccaccgcgacccccccagcggctgccggcgggggccggggaggggcggaaactcctccagggaacccggccccgcctcccgccccgcctcccgccgcagggccaggaagcgcggaaggaaccgccgggggccatggacggagcagtgatggaagggccgctttttttgcagagtcagcgctttgggaccaaggtagtctggcgcatggatgccgaaccttatccgggctagtagtgggtgagagagcccagaaacagggagaggtgggcagcgggctggagagcggcgccgggagttggagagcctgtgactttcccgtgaagttgctttgcacactcccgggaagcgtctgtagtctaggggttctggtcctggggagacggagtggcatcgtccttgggaaacttcgcccccaaccccgtttggaagccccagatcccaaatcgacttgcgccgcaacctccttccccgtcgggacccgggccgcctgcgcacgccactccctctcgagcactctctctctctccctagaggtggaggaagacctgggccgtgctctacccggccagtccccacggcgtagcgcggctcgagttctttgaccataaggggtcgagctctgggggtggccgagggagctcgcgccgcctggactgcaaagtgatccgtctggctgagtgtgtgagtgtggcccccgtcaccgtggagaccccccctgagcccggcgccactgccttcc

SEQ ID NO: 22879 - DNA, 857 bp, Homo sapiens
  chr2:95690749-95691606
  binary
cgtcccttcctgtcgcatggattcaaggccgacctgccccagcaccaccaccagcagccttctgctggggccggcacagctgggagcaacctcctactctcaggcagacgcgcagcaccaagcagagaggcccggtgcaggatcccagcgccgaaccagcgccggctcagtggacgcggaaggggccggcggccgcggccggtcccatcccccactgcagacccccagcctgtggcggtggtccagttccgccaggaaaccgccgcctggagctgtgggtcgcgcacattaacgcatccagcggaaaaatgaaggagacccaaattcaaagttaaagtaatggtgacccgagaggtgccttgatgagaaggtttggggtcccggttactgatggttatcattcttacgagatgctggtcacctacgaagggagaaaggcacgaggagcgcctgaccaaagtggttttgccctgcttcccgcaagaggtggcacccacggctggaacgcaggagtcagacccacagtccccagctctggacgcccgcagcggggcctcgaagaggttcagggcggtgcccgcggcgctcgggccgggtctcccggggcgtggggcggggggcggggttgggcggcggccggggctcctccctcttctgccccgggctcccctgctcttaacccgcgcgcgggggcgcccaggccactgggctccgcggagccagcgagaggtctgcgcggagtctgagcggcgctcgtcccgtcccaaggccgacgccagcacgccgtcatggcccccgcagcggcgacggggggcagcaccctgcccagtggcttctcggtcttcaccaccttgccc

SEQ ID NO: 22880 - DNA, 1292 bp, Homo sapiens
  chr20:21686199-21687491
  binary
cggggaggggggcgctggggcgcagtgacgggaaccaatgagctgccaactcgcgcgtctccggcgtgactgccgagattgacgtggaggacacgtcaaattgattcccgcacgctgcagcctcccggtcagacgaatttctcccaatcggatgaagttcaccctgggcctggggtcgcgggcgtggagagtgtcctgggagggggcagcagcggcggcggcaggccctggagcgggcggcagcgcgctccgctgccgcgcacagcgcgtctccagcccgcggctgggccgccgcggctctcggctctcgggcgccctccctctatgcctctcacgcggcggcggcggcgcccaagctctcccggactgcgccgggcccagccccggccaccccggccaccccggcgccaggcagctggccggcccgctcgctatgggtaaggggcgggcgacaggcagggctcgggagggctgatgaggtgggtcgggtccgcctgcctcccttccctctcgtccgctttccctgggcgacccagtcctgggtcctggagaagctgcattctcctctgatccccagccttcagggggcagttgagcaagtctgggaagggagtgttccaagtagacgcgctaaaagtcgcgaaagggcacggagggctacaatgcgccgcgctccactccgcggctcctctgcgcccttgcccactccaagccagacccaggcggtttgcccttggactccgagctgtctggggacccacaggtcacctttggaagtgcgcctgggtgcagtccctcgctccgcgtggggacccttggctaacccgccgggtgttttctccccctccggctcactcttgtctggcgcatccgcagagcagacgtatggcgaggtgaaccagctgggcggtgtgttcgtcaacggccgccccctgcccaacgccatccgcttgcgcattgtggagctggcgcagctgggcatccgaccctgtgacatcagtcggcagctccgcgtatcccacggctgcgtgagcaagatcctggcgcgctacaacgagaccggctccattctgcccggggccatcggggggagcaagccccgcgtcaccactcccaacgtggtcaagcacatccgggactacaagcaaggagaccctggcatctttgcctgggagatccgcgaccggctgctggccgacggcgtctgtgacaagtacaatgtgccttcggtgagctccatcagccgcatcctgcgcaacaagatcggcagcctggcgcagcccggaccgtac

SEQ ID NO: 22881 - DNA, 549 bp, Homo sapiens
  chr20:2820455-2821004
  binary
cgaacttgttgtgtagcagctgctggacttccgaggcctggaagtggaccatgtcgcttcgcagcgggcggcgcggctcctcgctcgacagacagaagaccatgccgccaccagcaacgacaggctgcagggagaggccactaagcagcgcgatggtggggactctgggcaggtcagcctcagggctagcccctccggggctgctcaatgctaaagggaggaggtgacggcagcagagccatggtggcgccagccttggtcacacttggtaccagaggcagggggtcgtccagccagcaggcctccagggcactggggagcttcccgcgcggcgccgccctgcgcctcgccacgtgcccgccgccgtcccgcgcatgcgcgcacccgctcgcgccaattaccaagtcccggggctccgcggtgttcacccgcgacccgggtatgcctgcgcaccgcgcgcctggcccgcagcgggctcctagccaagcctcatgttcccgcgccccagtcggccagtcggttctgcaaagctcccgccccgcagagacc

SEQ ID NO: 22882 - DNA, 833 bp, Homo sapiens
  chr20:30639044-30639877
  binary
cgactcctcccctcccccgaccacctcccccagcttgggagtcctctgagctgccaggaagccagggtggttccttcgggcagggaactttgcatggccatggtggttccttcgagagaggaactttgcatggtgtctgaatggagcaggcctgcggaagagaaaccgctgaccacagacctgcctggaagtctcgggccgcggagttggggagggccgggccagaagggaggggtcggagtggtggggaaaagagatcacgatgcttccggggtagggtaaggcctttccagggtgggttggaatctttgaagactgtggcaggaatcccttgataggtggggttaggatctctgaagggcagggttggaatctttggaccggcggtatagacccctgggtattaaaactcttaggcggcgggaggttagatcgcgcaggagcaggagcggtattggaaccctggggtttgtgttctaaatcttagggcagggttagaatccactgaagtgagagttcggatccttccactgggcagattagaatctttgggggcaagttgagtttaaaaatccttcagaggtgggattaaaaatcctttggcggggcggggttagtatcttgggagccttggagcgggtgctggggttcttagacgggcgggttcgaatccctaggagtgggatttgggatcctttggagactggggtaggacgctgggcggtgggatggggaggtgttagggaaagtggagcggaagggatgggggttcgcatccttggtggacgcgttagaagcctcctatggatggtgctaatattttttttctcttc

SEQ ID NO: 22883 - DNA, 790 bp, Homo sapiens
  chr20:37302417-37303207
  binary
cggtgatagttaagctgacacctgaagaagccagtcatgcaaagagtgggtcaacagctttccaaggcagagggaatcaggaaagcgatgggcttgtctgaggaacagaaaggacaacgaacgtgtgagtcacactaaggggcgccgtggtgcggcatgaggctggagcctgatcactcggggtcttactggccacggtgaggagtcagggtttcatgcgcccctgcagtcagaaagcatggcccaaccccagtgccctaagtccggaaacattcaaagctggacccagggtagcgggatccggggcctctggggacccgagagggacgttaagttcagggcttcagggtgcagccctggggtcggtacccccagcctccaacccagagctggcagcgctcgcccccttctccgcgcgggccctcagctcagctccctcttcgctccccgtgtccccgcgagcgggagggaggggatgctaggacgccctgtcggcgtcgtcgccgctttccgccattgtttagtcgtgatgctctcattttctctgaatcaacaattttctgctcggctccgcgccgaccggcgaacgcggggcttttcctcgcccgcctgatgacagcagagcggcgcggagcagctggtccggaaggaagcgccaggcgcctgcccggtcccaggcgtccgctgccgcccacccacaccagaccccgcccccgcgcgtcaagccccgcccatccataccaagtcccgcccccacaccctcacccacacaccaggccgtccccacccc

SEQ ID NO: 22884 - DNA, 273 bp, Homo sapiens
  chr20:57978801-57979074
  binary
cggggcccgaggaagaaggggccagcgggctgttccccacgctgcacccccactctggcgcagcgaagtctgcagatctctgggccccggcgctgccgaagcctcccccacgcgccgcgctcactcgctgcacaacagcgccaccacgaggccgcgggcggaactgccggcagcacagcggtcgcaccccccgggccccccgccggctgtgcggatcccgaatccctgcttggctcggagctgccaggtctaagccgaccctcagagacgcac

SEQ ID NO: 22885 - DNA, 474 bp, Homo sapiens
  chr20:58514041-58514515
  binary
cgcagcttaggtgtggaggctccaggtggccggtccccgcgcggctcagatgaagtggatccagctctcttcgcactccccgcgaggcatgtgcagcgcgtggttgcgacatgtgaggctgtagtctcggtggtcgttgttgtcccagtactcggcacccgccacttggtagcgcaccgcgaagtgcacgcgggagccgagctccagcaggaagggcggtactggaaagccgaaggtgaaaacgtcctccgtgccctcggggcctgcgggcccgcgccaccgcgccaccgcctcgtgggtactgcgccagcccgagaaagtgtagcgcacagccacctgcttctcgaaggccacgttgcacacgcgcaccgtaccgctgatgccaaggtccgagcaagtgacacgctccaggcacacgagctgccgctgcaggcgctcgccaaagtcggcggcctcgacgggcggcgggaaatc

SEQ ID NO: 22886 - DNA, 109 bp, Homo sapiens; identical to SEQ ID NO: 5808
  chr20:58515463-58515572
  binary

SEQ ID NO: 22887 - DNA, 805 bp, Homo sapiens
  chr21:47062148-47062953
  binary
cggtgacccggcagcccctggcgctcgcgggaggcgggcgggcgcggaccccaggctttagggcgcgattcctgcagctggctgccggcccgaggttctggggtgtctgaggtctcgggcggggcgaggacgtttctccggctcagcccccccacctcctgccctgccgccccccacacccagctccccacggacgccaagaggcgcctcccaccccggcgaggacccgcggggaaacggggcccaggcgcggcgactgcggaggacgcgcctcggccccagcgccctggtcctcggggcgtccggctgcccttgcccgaggccggggcgggcgctcagcgccgcggaagaaacgcccgggcggggacgcacagcgaggcgggctccgcgggaagtaccgggaaaacggcgcggagcggaacagcccggagccagcccagagaaagggcggcctccccctgcagcccccggggcccagcaacgccccgccccaggccacggcacgcgaacgccgggcgggcggaggggacagggcggcgggaccagcgcggggcgggcagcgtctgggcacaggctcacgagccgctcggggcccctgcccgccgggcgctgcggccccagcctccgggccggggccaggcccacagagaacgggaagcgggcgctgcagggggaccttcggggttgcggcacggctgggaattcaacggccattcccgtcccgtcgggcccacccgcccgcccgccaaatccccgcccaccgcggatccgccccgtccaccaaggtctcgctcaccaacggccc

SEQ ID NO: 22888 - DNA, 1174 bp, Homo sapiens
  chr21:47063290-47064464
  binary
cgcccactactagtgaccggcccgcccgttcgaggccccgcctcctccccgcccaatgctcggccccgccccgcgcgtcattgggccaggtccccgccccgcccccagccccacccccgcccctttgactggagttggctttttccagagaactttccgggctcggattggccgcgccggttgatgttccgccctttcattggcccgcggcgcccgctttcgcgagcctgcccttgggcgggggcggggccggcggcggcgcgcggcgctagattggttagcggcgcagaggggcgggcccgcgccgcgcgcagcgctcgggctggagcgcctgaagccgcgaccgccgcctcagccgcctcagccgcggtcgccgccgcttcggctgacttaggctccgccgccgcctcctcacccgcctcgccccgaccccgcccgggcctcccggcctctccccgccggcccgcgggctcgccgtccggcgcagggcaggtgagtgagcggtggcgggcggggtcggggtcgggcgcccttgcgggttacggggacccagtccccgacggaggccgagtgacggggcgaccccgggccgcggcaaacttcgcccgagccggggcgggcgggggtcccgggctgggtcgcgccgtccccgaccgccgccggcgcctgcggcggcccggggcagcgaggggactcgcgctccctcaaggtgcggtcgccaggcctggcccgcccgcctccgccccctccccaaattcggaagttgcggcgggaagccgagaacgtctcggatgtgggtcagaaaacgtctggactacttgaggcttcagtttcaaaacggcacaaatttcatctcttgattgagaagagatctggggaacaccccggagcggccgcggcggctggagggcggcggggcggggcgcggggcctcctccccctggacggccgccgggagagcgcggcctcacccctcggtgaccctgcggagagccgcgcgcgggcggtggggcgcgcgcaggtctctcttgttgctcgctgtgttttattttaattttgggggtggttagaacgtgtttcttattgtccccacacgtgttctaattggaagtcttgtttcgtgaaagagtttttttcttttttttgcctggtgatgttttccaattccctccgc

SEQ ID NO: 22889 - DNA, 821 bp, Homo sapiens
  chr22:22862472-22863293
  binary
cgacagcgacgcagtaaatgagacaagacgctgcggtaggggagagagacccatacattcaaatgccttaaggggtctgggcctacaggtctccagaactggggagggcctggggttacaaagcagttttcagatttttaaatacattgagcgccaaaagagaccccgcgggggcgatgggggaggggagcgcactgggagccaggaaaggccccttctccaggaggcccgggcccagcccgggggtgggggcgtctgcgtgagggagtggaggctgatgtaaaagtggcgcccgctgagattagggaagggggtgtgcgtgaggggatcgtgggacctggttctgccctgcactcccccacagaaagcggctgtattgcaaaggccgctccggcagcgcacggccaagcgcggtgtcgcgacccgcagggctgcggctcgccatgaaatccctcaagtctcccctcagggaacgctgaagccgcgccacgcccccgtccttaccagtccggatcagctgctgttcgcgagctgccggccacgcaccagccccggaggcgctcccggggcacagccggcggcgactacgcctcctcaggcccccggcgccgccgacgcgcacgcctccacacgcgcgcgtccagtggagacctgcgattggctgccaggtgccggcgcgagatcggcgcggctccgagctaggagcatgcgcgcgctctgacgcccctggtggcgacggctggacgcggggttaaattgagaaggaggagggcagcagcaatacccctgaggccttgaaaggatcttgggttccggatcac

SEQ ID NO: 22890 - DNA, 1265 bp, Homo sapiens
  chr22:25678186-25679451
  binary
cgaggttgggggcccggcccgctgggcgctgttcacaggtagcttggaccagagcaggggcttcatcattacctgcggggacaggtgggacacatgcatttccggggtcatcccagacctcctggaggatgctgattgatgctgtcccgtttgagaactactgtgtccaggtagcagaggcctccccgatgccccttgagtagtgggcacggggcccagggcttctctggatgagctgggcgggcatgagaacgcatggagctgggggcaggaggtcggagcagcgaacgaggaggagaaggagtaggcggaggccgaaggagaggtgggggaggaagaagaggaggaggaggagtcccttgtggccaccccgaagggagggagggctaccgtagagacttggtcgagaggcgcgggacaagcctggccgctgggactgtgcgctgaggtgcaccgaccgtcgggccgcgagctccccgcagaccctcgcggaatgagctggggggcggcgcgcgaggcggcggagcggaaggcgcactgcgaccccggcgggctacagcctgcggcgcttgcagggcgctggtggggcgcgccgagcaggggctgccctggggctgccccagtcccaccaggtcggggctcagctggcggcggcggcggcggtggcggcagcgcgtcccatccgggtccgagtaaccgccgccgccgccaaaactcgccaacgtggcggacccggaggctgtgctggcagatgccagttacctgatggccatggagaagagcaaggcgactccggccgcccgcgccagcaagaggaccgtcctgcccgatcccaggtaccagctgccccggcccgcgctggtccccacgccgccgtccccaagcggccgtcagcgacctcctgcgtccgggagggtcgggcattgagtcgtcgctgtcctgggtgcgggtgacaccgcggaactggcgatgcggggccggcctccccgttccagtctctgaaatggggcatcggatggccggtgggggggactccgggagagagcgctccaaagtgcccagcgcggcgccctgcgcgcagcgagcgccccagggaggggctggttatgacttggctggaccagctccatccctgtcgccccctccccccggccctgtcctgtcctgtcccatccccgtggttcttcctgttgcattggtgtggtccctgtgggctcgttgcctgtcactcctttgcgctccttcttggtcgctgcttcttcccc

SEQ ID NO: 22891 - DNA, 850 bp, Homo sapiens
  chr22:36901811-36902661
  binary
cgtcttaaaaaaaaaaaaaagcgaaataccctttttcgtccattcctcccatacctactggccaatcaaggtgtgtggttcgtgtggggaaggtcccagcttccgcaggtgagctctggcaccggccttacctgcactgatgcacctggcccttctggtcagttaggatgaagtagtggccattccaggcctgtcggtccttgtccagagtgacgtgggcgatggtggtgttgtactggacacggagccccagcgtgtccgcgaagtcacccaggtagcgcaccatgtcgcgggcgtcggggaagtaggcacgcgagtagtgtctgaagagcagccgggggtcgtggctgagcagagagttccagtcgtggcggaggttgaactcggcgttagccttgcccgtgtaccgcttgttgatgctgatgagcttgcggtgccgcgggtagcgtgtgaagaagctgccgggccgcggggcccgctcgaacactgcgtagtcgcgtccagcgcgctgcaggaagtaggccatctgcaggcccgcgggcccagcgcccagcacgcagtagtcccggcgcgggggcaccgacagcgctgggtgcagggcgatggccaggagcagccccgggggaccccacaacggggccgcagcggagaggcccatcctgcagcagatcagaggggtaaggcctcgcacccggcccggcggctgggagacacgaggcccagaaagaggcggggcctgcgggaactctcactgcaatctgggtcacggccaggcccagaagccgtcctcagagctcatttgcccggactccaccgtttcaagctgggacttggggctccccggaatccc

SEQ ID NO: 22892 - DNA, 425 bp, Homo sapiens
  chr22:50170525-50170950
  binary
cggtgtgtgatgaacccttccccgggaggttggccagggtggggctccacacagggcaccatgctccctgagccggagtccagtccccagcagtcgagccctaagacgctaaccaggaggtgtggagagccatggaggcaggtccgggcgactcaccggctgcgatcctggccgccttggcgtagttcccattctcgatgcaggagatcagctcactgcggtcctccagcgtgtgccgtcgcacaagagccggtttgccccgcccacatttgggcgcattaaagcttcgggaggaagagcagagggagtcaggcgccccgcccctgccttcagcctcactcgggcttcgtcccgtgagctgtccgccaccaagctggccacgcatcctgcctgacacccccgcggccagacgggcctgtgggtgc

SEQ ID NO: 22893 - DNA, 981 bp, Homo sapiens
  chr3:123167275-123168256
  binary
cgcgcgggaatcggcctcgccccacgcagagcggtgttcggggcctccccggggcgccggcgccgcagtcttctgcgccgcgtagcccggggggctcacgcttttggagccggacatccccccctcggcctcgtcgtctccttcctcctcccccggaagccgggccgggggtctccaaggggagggcggacggccgagcagggggaccaggctagggtcacacgtcgggggcggcccggggccctgcgctgcagcggggcatcttggcacccccgtcctgagcggaggaggagggcacagccccgaggtgagaagtagctgaggatccgcgtcagaagtcccaggtccgaaatggagttgcctccgaggtggggtcgcagggactggtctggctgctgctgcgccgcacgcggagagacgtccgggatcctggctcgcgtcgagctcgacgagggccggagttgcggacgagacgggacggagtggtgtccttgcgggcggtgcctcctcgggccggcagtgcccgggcgcggcgctcgctgattccgcctaagcggagcccagctgctctcggggctcggcggcggcgagggcggctcggcgggggtcccggcgaagagacactgcgggtgcgctttcctcgcagcggactgggagcgactgggaggtgcgggcgccagccagcattattttcttacgaggggtggggaggtgggatgggaggtggagaggacgggggagggggcgacgggcggagcaacagctccggagccccgggggggagggtcctggagcccgggggggccgttgcccgcatcccccacctctcgcggcgagagtggatgcgtggccccggcgaaagccgagccgagccttcggcgcgtccgcgcagggggcggggtccgggtcagggaccggctcctgcggtgcggcccttcccctctcgcctctccctttcccgcaaacggagcggggccggcc

SEQ ID NO: 22894 - DNA, 1269 bp, Homo sapiens
  chr3:129693123-129694392
  binary
cgcccgtctgcgttctacattggttctgcggccgtgtccctttcgtgtgtgtctgccctgtgtttctccgtcgtctccgtgtggatctcggtctttgtctcgccctctagctctctcgtgcgcctgtgtttaatcgtgcgcttctctcaatctctctgtccctccctttgccccctacacgcgtgttctcgtcaacagatctccagaggtggtgcagaaacgaccccgcgccggcgccccatcctgcggccagtgcctccgcgccccggctccggtccccaccgtccccgccccagatttccggaggagcaggcgggcggggtcccgcggggccggctgccgtcagcgccccttcccggcggccgcgacccctccccgctgacctcactcgagccgccgcctggcgcagatataagcggcggcccatctgaagagggctcggcaggcgcccggggtcctcagcgctgcagactcctgacctgccgactgcggatcccgagtccccggatcccggacccatcctgtggagcccactcctggcaggtaaccgccccaacccctctccttccgcagacggtgtccgggagcactggaaagggagccctctcggcccgccctcaccttcggttctctgagagcttcctggagaacagggccggtgcacaggcgggcgctgtgctcgcacccccgggtcctccccgagcgcaggccggggacccgacgggaggcacggcgcgggcacatcggaggctctcgctgctgggcactcaggtcgccagagtccgcagcgcggggtgggagctccgcggcaccccctgcctgggtgccgccggacagagctgggtattcagggcgtcggcctgagaacctgggagttcgaatcccaatctcaacgctagaaatagaattttagcgttgaagttaggattttagcgttagaatcagattcctggcttagtcatgaaagcttagcattagaaatagaatcttagctttgcaaatagactttgagctttagaacctgaatcttagcgatagaaatgggatcttcgcgttggaatgaggacgtcggccacggagcttggagttagaacgtggcgatggggacctttgggggagtcttggcggggacgcaaccgttagcgtcgcggctgtgcctggcgctgcaatctcaatggttgcactcccggcgaggcagtcccagcgttggcttccccagttccgcgtcacattgaagggtggcggtggcgctggcgatggggttcctac

SEQ ID NO: 22895 - DNA, 412 bp, Homo sapiens
  chr3:130064466-130064878
  binary
cggcggcttctctgaaacaaagccagcaaacagctggagcgtctctggacactcacattaaaacttgtgaagagttaaaagccccagggaagagccaggccaagggcacgggtcagcgccggcttaaaagaccctctcagggcacgaggcgttcgctgcgggaatccacctgcagctgtgcggcgcggaccagggcgtgcggcgcggaccagggcttccggcgcgcgctctatccaactgcgccgcgggcgcccgagaggcgcgcgtttactgcgctcaggagctcggtgcagcctcttctggagagttgggggcggtttccagggtccggagtgtcccctgaccccgggaaagctgggtaagtatgcggtgcggggacttggggcctgaggcaggcgggggaggaaacctc

SEQ ID NO: 22896 - DNA, 752 bp, Homo sapiens
  chr3:132757221-132757973
  binary
cgcgagcggtggggctttctcctgagccgtcggagggagccggagcgcttctcccgaggtaagcggcgctccggggcgtccccccagtccttcccatgctgggtcccggcaagcgggttaggctgggctgggcggggctcggggaggtgtggggtcagcttgccccgggagcccagcttcagggaggatgcagccccggttgccttggtttcccttttcctatcctctcaggcaccttcccatcctccccactgcgtgacgggtctgcccgaggggagttgcccacctggcagccctgcctccgcctttgtttcccgcctggagggttgctggcatgaaccccctccccaggtggagggtgcgggtgatggggcgcgggcgtcaggagcgctggacctgggctggggccgaggaggaggtggctttaatgcagggggacctgtcacatggggaaacgaagaagaagaaatgtagtgtcactttggccagcccgagggactcgaactaatcctgcggccgcgagcggagccgaattcctagcgcagctgtgcgaagagccctcctgcctaggtgccggcggcctcgccggggacggagcctccgtgctgcccgggaggttgctctgccggctggacctggcggttttcaccccagagttgcagcgaaattgaacgctttgagcctgctggaggaatccagagattggttcaggggctatttttttttttaagcagttgggcaccggtggagcc

SEQ ID NO: 22897 - DNA, 1387 bp, Homo sapiens
  chr3:170625831-170627218
  binary
cgcagaggagctcgctgagggtggggacacccgccctgggcgctcctccgtgctggaaacagcaggttgcggcccccatcgccccaccgcagaagccggcgaccttcccccgccgcccagccctcggccgccgccccgaaccctactgcgggggacccagcccaggccgcaggtccccgcgaaggatgcggggtaacagaacctggccagcagcacccggccctctgctagctggcgcgcaccccgccctccacccttcaacgtcgccgccgcggccgcacaggcgccccctgttctgccggcatccagggctcagctcggcccggcccggccccactagggcctgagccccggcgggtcccgcgctcgcctctgttcccccatccattctccttctttctctcggtcagcgctcagttctgggcgccttccccggccctgcctcactctggccccatccccaccagcttttccccaccagcttttccccaggtcttcacctttcagctggcaaagagcgcctttcgtctgcgcacccgcgctggtcccctacagcagcggcgccggcagcggcggtggcggccgcggcagttccaagagacggggcggggccgccacactttccacaccccagcctccccgcccttacccgcccccactcagccctatttccgggataggccccggagcgtcacaggcaccgccctctcgggctaccattggctaccagattcccgaggctccgcccagtcacgtgaagagcgccctggcaaccccacgtgctgcggattagtgcacttccggcgtggagcgcactttcagcagtctggttgccgagggtgagctcgctggcagaggaacttgcgccttccaactcttaggtttgttgcgttcgggtcgcagtcgactttaatgggaaccaagcaaagcacccaatggcccctgccatcaggtgcgtggcagttatcacatgacgatcgtcagaactcgcgaggcgcgcagattcagcgagtgccagtgtggctggctgtgaagcgaactttgggttcgagcttctggttcagcttgcagcctttcttggggttcgaacctcctcctggtccttaaagaagaattcaggtgcagtattttattacccagctcggcaccgcaggtcctgaggaccccccattcaccccttggtgagatttttggcagcgactgccgccggatgcccctgtagagtcagcactgctccctggggtgggaactcccgaagcgtccgccagctaacaagccagcagtgaaatgaattaacccacttctcacaccaaaggctgttgggaagttgtggaggcgaagggtgtctgactcctacggcattgtgggtccagagaggtgttctgcc

SEQ ID NO: 22898 - DNA, 1266 bp, Homo sapiens
  chr3:179754092-179755358
  binary
cgattccttgatcctgtttaaagaaacaggctcagggaatgcacagaaaacaaacttccccaatcgaagttctgaggtcttccctccccttctcccaccttcggaaaccggtctagttttcccggcagcaccggacagaaatgtcacggtcatgttgcatcacttcacttgttgagctgtgcgaaggcagcacttgaccacagaaacttggtgaaccgccttgctcttaaattagcccccaagaattctctccagccctatagaaatgtcttacctgcatgtgtccctggtacattctgcttcggtttcttcagggctccctgaggccaccggatgcttttcccccgtgcttacttgcccaccaaaagaggggaaaaggtgggtgcacagcgggttctcagagggtgctcctgagccccctggagctccgggtactcggccggccggcggccactcggcagcgctgcgggctgccgggaactgttctccgctcggggtgctgaaagcggacgcgggagagcgcgcagagaaggcgaggagccgggtcggccaggctctcctgcaggcgcgggtcctgctcgcggggcgtctctagaactcactccttcttcgccgaactctttctcgcttcctgccaggttgcctcatgtctctctctctctgagctgcgaaccccctcctcccagccctgacgtgagcgcctacaccagccgccgccgcagctgccgagcggggcgcgcgccgttctcccagccgcgtgcctgccgagaggccgcgggaccgggcacgcgcgcgcgttcccaggggcctgggagcggcccgagggcggccccgggcggtgcgcgctccccgagcgcgtcctcggggctgcgcgcgcgcggcggcaaggcgaggtgccggcaggcggtggtcgcgctggtgtacaacgcccgcagcagcgcggcgttcaggtgcggcgtcggcgggcagggcgattctagcggagaggatggccggccggaagaaaggcgggaagacatgcatcgtctctccgggggccatccaccgcggctgagcctgttatcctacagacattataggctgagtgcaggggttgccgaagagtttacttcggttctgattcagctctcgaaagttacgtccgtatcacccgttaaataaagactccccgctcccctcatccccagttcatcgccgagcattctatttaaaacggcaaaccctagtccctgaggatctggcatgttttatttttttccctagcac

SEQ ID NO: 22899 - DNA, 924 bp, Homo sapiens
  chr3:180397104-180398028
  binary
cgttcgccaccgggatggcgaacccatcctcccagtgcagctcagccaggaattcgctactcatgactgcaaacggatagagaagatacagagcaaagatccgccttcttgtacagcgggtgagcagcacccgcgtcaagcccaggcacctgcacagtgccgcggcaattgccgggggagccctagcaaccttcccgcgtccttagttaccaaacaggaaacgctccagcccgaaggcgaaacttccggttgagaactccctgcctgcaggccgaagaatctttttcttaccttgagcactgagggatgagcagcaacttgcccctcccgacgttcccgggggttgccaggcggcagcgtaactttccacgaaaaggcggctctcggatcgctcccggagcgtgtgaaaactgtggcccccggagctggctggaggaccacggggcagctggctggaagtaaaccacacgatcctccgattgcctgggggaagacgggagccaacagggattataaactaagtttcttttcaaggtgtgtttgctgtgttgtgtagatttcagctactacagtaggtgaaagtagaccgaagtgaactggtgtttggaaacaactctctctctggcatcactgggatgttctgatcgtcgcctgtttcagtcggccagccttcctcaccgcactcaccggccccatcgcggatgtcccagtcgatcacagacgcggaccgcgcggaggccgcacacttgtggcgcggtgtggtggtccctccggcaccactcccatacttgcatttttctttgcatttttgtttgctaacatttaaagtgtggaatttcgcataaacgtctgtatttcctctgcttgaaaaagggtaggtgacacaatccccattatcaaaaggcaatgttccgctggagaggc

SEQ ID NO: 22900 - DNA, 809 bp, Homo sapiens; identical to SEQ ID NO: 5819
  chr3:183165024-183165833
  binary

SEQ ID NO: 22901 - DNA, 1571 bp, Homo sapiens
  chr3:186078710-186080281
  binary
cgtatgctaatgaagtccgaggaggcagcggcgcagcgcgggagagcgcgcccacgggttcacagcgctcccgggcaccactgcggcgcagccacagatcgcttcgcgctgcagcagacgctcccgccgcggggggcgactgggggaggggtctcgaccgccaccctgagttccgcagctcatccctcccatctgggaggtggttctagctctagtcccaagctttccactgcagtgatggtggggatgggggcagcacgtcaaatcacctgtagggctttttagaactccacagccccctcccctaattctattccactagttcaaacgaagaaaatctcagactaggcaaggggaggtggaccggtggagtctgcgaaagcaccacaggtgactccgggtacgcactcctcaggacacaagcacacacacggacacatcttgtgactctgagactacacagatcaacctcagattcgacccttccctcctttattctctgaggtgtccgtgttcgcttcagcttccctttaagtcgccctgcgcaggggctttgtggagtgcccccaaagtcctagaaccccgcgggacggtcggaggctttggcggccagacattaggaaaagcatctcctgcttctcggactgcctggagcgcgaactggatatcaaggagccaaggttaagtccagaagaagaaggaaatccgaccagttgctttagcaaactgcctggagcaaggccgcctcccacccgcacagctttgaggcttgagggggcctctcagtcgcagagagagccgagccccaccctgtgcgttccccaagcctgcacccctcgagcggggcatcccttcctgcagggctttgtggcaggtggaactgtcggggtgggcgccgtggctttggctgcagccccttccctggccgcgggaccggctcccgctttgccctcctttaccaagttgctgcaccgggtgctccctgagccggggaccccctccgccgcgccggccgccgtcttacctcaccaggcaacacttggttgcgcggtggcccggggcgctccttcttcgcggtttattcccttacttgggaggaaagaggaaccgagagacagaagggggaccgaagctggcctctgggcgtcttcccgcctgcgcagccctctcgggggagggggatgcagccccagtgggtgccgcggagaccaggctgccaggctgtggttggtagcgccggggtcttcaccctgtgctcggagttcagcagctccaaagctgtctatctccgtggcccgctactacggcactgcggctctgtgccctgcccctcgcagcctggcaagtccagctgccactctcactgcggagccctgcccccgggcgcagagcccgcccccgccacacacaccggcgcgcgcgcgtacacacacggcacacacagacacgcgcttccacacatgcacacgcgtgcgcacacacgaatgtggatccgctcgatgggaacctgaccccctttggtgcaactagggcgcgggcatcattaggacgctttttactgacagggcttc

SEQ ID NO: 22902 - DNA, 1949 bp, Homo sapiens
  chr3:192126247-192128196
  binary
cggggggcggggcggggcggtcccaggccctcttgcgaagtagacgtttgcaccccaaacttgcaccccaaggcgatcggcgtccaaggggcagtggggagtttagtcacactgcgttcggggtaccaagtggaaggggaagaacgatgcccaaaataacaagacgtgcctctgttggagaggcgcaagcgttgtaaggtgtccaaagtatacctacacatacatacatagaaaacccgtttacaaagcagagtctggacccaggcgggtagcgcgcccccggtagaaaatactaaaaagtgaataaaacgttcctttagaaaacaagccaccaaccgcacgagagaaggagaggaaggcagcaatttaactccctgcggcccgcggttctgaagattaggaggtccgtcccagcagggtgaggtctacagaatgcatcgcgccggctgcggctttccaggggccggccacccgagttctggaattccgagaggcgcgaagtgggagcggttacccggagtctgggtaggggcgcggggcgggggcagctgtttccagctgcggtgagagcaactcccggccagcagcactgcaaagagagcgggaggcgagggaggggggagggcgcgagggagggagggagatcctcgagggccaagcacccctcggggagaaaccagcgagaggcgatctgcggggtcccaagagtgggcgctctttctctttccgcttgctttccggcacgagacgggcacagttggtgattatttagggaatcctaaatctggaatgactcagtagtttaaataagccccctcaaaaggcagcgatgccgaaggtgtcctctccagctcggcgcccacacgcctttaactggagctccccgccatggtccacccggggccgccgcaccgagctggtctccgcacaggctcagagggagcgagggaagggagggaaggaaggggcgccctggcgggctcgggatcaggtcatcgccgcgctgctgcccgtgccccctaggctcgcgcgccccggcagtcagcagctcacaggcagcagatcagatggggattacccgccggacgcaaggccgatcactcagtcccgcgccgcccatcccggccgaggaaggaagtgacccgcgcgctgcgaatacccgcgcgtccgctcgggtggggcgggggctggctgcaggcgatgttggctcgcggcggctgaggctcctggccggagctgcccaccatggtctggcgccaggggcgcaggcggggcccctaggcctcctggggctacctcgcgaggcagccgagggcgcaacccgggcgcttggggccggaggcggaatcaggggccggggccaggaggcaggtgcaggcggctgccaactcgcccaacttgctgcgcgggtggccgctcagagccgcgggcttgcggggcgccccccgccgccgcgccgccgcctccccaggcccgggagggggcgctcagggtggagtcccattcatgggctgaggctctgggcgcgcggagccgccgccgcccctccggctggctcagctggagtgctagctccgcaggaaactcggggcccgggcgagagccaccgagatggcaggtgggacgcagagcccgcggcagccagagttcctcccgcacggcccgccgacccacggaagagcgaaagagcgcccaggtggggccgagctgggggccgggcccctggagcgctgggaagcacagcgcgctctagtcaggttccctttcctggagccctccgcttccagactcccttctttcctccctccctcccgccacccctctccctcctctctgtgtcttctgtctctccccttttctcctctctacgcaatcctacgtgattgaggtttggatgagaaattctcagaggcagagcgagggaactgcagcttgggtctgctccgtcc

SEQ ID NO: 22903 - DNA, 962 bp, Homo sapiens
  chr3:192232553-192233515
  binary
cgcgtgtgtggggttggtcaactccccgcccacctgcgctagtagtccaaccaacaggcggcctgtcttcggaagccgggtcccgagtccatcgcgcgcgcccaggtggaggggagtttgcacatggagccggagggagcccgggcgccggcagggggcgggccgggacgcggaagtgccggtccgccgggggcagccctccgagagcccgaggcgctgccacccctcggtgggctcgagcacggccccttgagaccttccggaggcggtggctggtctgaggacgacgcggaggacgtcactgcgggtcggtgcttccttacaggtgccttctggaccggggtccttggcacctcccctgctcctgccctcggtgccggaccctgtgccctgggagcccgactacctcggtgtcccagccgtcccgggcttgaggcgctgagagggctgcgcggcttccagcccggaaggcagcggtcccgcgggctgcgcgcggccaagggcgactccggtgtgggaatccggcggaagggaagcacccgcagggagggctggaccccggaggctgcagagcgtcagaagcgactctagggaactagggggtggggtagggaggcggggacgtggaataaagaaagctcctgggtgccggctatgagaagtcaggtgtgcgtaggcgtggacagagtgccgatgtgggagtctggacacctggattttctggtcggggctctgtgtccttgggtaagtcacttaccaccctgggcgtctccccgtcaatctgggtggggaagagggtgtgagatagaggattggcagcggcgtgcttgtttgtccccgtgcctttcaggctcctagaaaagcttagcataggtgcagtgggaagtggagctagaagggacagagggagaggaggcaggtgaggcgagaaatctgaagacaaaagagcgcttcgctttggc

SEQ ID NO: 22904 - DNA, 485 bp, Homo sapiens
  chr3:194208086-194208571
  binary
cgttgcccagagtcatggtcatggaggaagcttgtgctagaatggtggagaggaaaccagagcccagctcctaatgcaaggctctttcattcctttagccaccctcgcccccgccaaaacaaacagacaaaaaactgtcattctcatatgaccacggactctgcgccccggccgcaggcggaggacagggaggagcgcacacgagaaagctcccacgcgcccgcgcctcgcctccgacgggaaggcgcctcttccgaccgtcctggatgcaaattaaatacttccctccgcagaagacttatctcggggtagggccgcagccggatttccaaatcgcgggtttgattttcgctgcgtcctctccgcgacgcgcgcagggagcgcgcccggccacctgcagcctctggctgcggccatctttccgcctggggccacctggcctgcgccctttgtgcccggcccgctccgtgactgttcttcttgcc

SEQ ID NO: 22905 - DNA, 1797 bp, Homo sapiens
  chr3:27762351-27764148
  binary
cgcgcaccgaacccgagccaggtctggctccagggcagatctaaccacctactccgaccgagcttccgaggccggcgctctagccttcatgcccacctcccggagacgccccgtggagaccctggcgcctaaaactgcgggagcccatctactgcgctcaggtggccagctcttgagccttccctatccgtggctccttgccggcatgcaggcatgcacaagcataccgccgagcaggaggatctaacgaatccagcttgtggacatgccctaatttccatttccgcctcctccaggtctgttcaggtgaggatgatgggagggaaaagcggtgtacagccgtaacattggcaccctgcaagagccgccggggcactgacacagagggacaccgcattggagatgcggtgtctacggagatttattgcgcgcggtgaaacactctaagcaccgcgcggaacaactgggttcagctccctcatcccggaccttccccaggaccacacgtcaccctttatccccgaacccaggggcccctccacgctgcgctcacctgccctgtttcgtaatgatcatctcagtttggtggcggtggaatttgagccacagaggccggttgcacaggtagacgtgggcacggaagccagaacctggaacccccaggccccccagtcctccgcaagatcccgccgctgcggctccagggtacggcccgtagagcggagccccctggctgtactgataggtgcccgggccgccgcccccgccgctgctaccgcccgcgccactgcccgcaccggctcctgggccgaactgcgccctcccgggtgggcacacagccgcggggaagccgccggggggcagcatggagccgtaggggtagcgcgccccgttaggagccgggtacacaggtccgtggggcgccccagccgccgcctggtacgggaagagtgagcagggcgcagccagctccgacccctgaggaccgggggactggaggtagtaccgctcggagctcaggctgtccatggagtagcgcgcagtggccgcagccgcggcggcggcggcggcggcggctgcagcggcggagggcagctcctcctccccgcagggggagcccttgcggccgtccgggggccccggcttggccactgccgcagcgctggcaaatgcgtccccggcgtcggtgtcactaagcatggccgcgggggcccctgcgctggcggctgcgggctccccgctcaccgcctcgcaggagagactgccggaaaacttcttggacgctttgtctaagtccaacttctgaggagagggggccgcgctggggaggtggccagcgctcccgccgctgccgcctcgcgcactctccagcgggtagaagtgcgcgccaggcaggttcactgagctcaccaagagctgctcccctaactgcatgctttgcaaagcgcagacggcagctggctgcttcctctcctccggtggccttattataaaggcaggatgggggagccagcgccctcttccgaggggaaggtaacttccccttcctcccgcgccggggctacccacctgccgactcgcgggccgctactgcgcgtactggcgcgccctgaatccagcgtcctttccggaaggaaagcgccgtgagttggaaagcaggaggtggaaactaacccagaagccctctccttttccttcctcgtacctcttgctcctcaggacccccaccctcctcccaggctcacacgctggaagaaggtgacttagatctttgtccccatccacccactagcccgc

SEQ ID NO: 22906 - DNA, 1095 bp, Homo sapiens
  chr3:32433054-32434149
  binary
cgcagccgcacccacacaaaatcccaggaggctcagtaccagctgtggtccgggccttgcccacctcggagaggccacgacccaaggcatccggtttcctctcgctccagtctaacttccgcgcatctacgagggccgggactgccgctacctttctggaaggcgccggccggccagtcaccggagggatcccgccagaggcggctccgcgtctccagcagcggggcagggacccgggcgccccgccctcgccagcgcccgcccccgcccgcccccggcccgccctctgtatctggcccctgggcagctgcccggggaggcggccagcgagctggggccgcgcaatgtcgcacggagccgggctcgtccgcaccacgtgcagcagcggcagcgcgctcggacccggggccggcgcggcccagcccagcgcgagccccttggaggggctgctggacctcagctacccccgcacccacgcggccctgctgaaagtggcgcaaatggtaagtgagcgcggggcgcgaggccgaggttctacagggcgtcccgggaaagcaggggtccgggagcggacgcgccgggcgtctggacccggccggagcccagggagcatcgcgcagcgggcggggcaccgcgtcgctaaagttcgcggcaggcttcctccgggaaagttgctgccgcagcccccgcgctggagctcagtccccagagccgccccggcccttgctcccgcggacccaggtcgccagggtcgcaagtttctccggccacccccctgcgaagcctgacccgcctactgactgaaaccacgggcaaagttccttttcgtctttcttcctcttctctgggccgcgccgcttcgaacccgagccgggggtggaagagtcgcccaggcggcggcgctgagggagcgaaacccgacctcttccccgtccacggcctcctctttcctccgaacccagcgcggcagggcttccctgctctgtgtgcagtttcgctcgaaggaggaggtcagagggtcttgtgttccatagtggggaaaaagaactgggaccgttgagacggccgtcctggtcccctgcgccctcaagttcc

SEQ ID NO: 22907 - DNA, 957 bp, Homo sapiens
  chr3:44038161-44039118
  binary
cggcaaaacccgcctgcccttgtctagtctctctgccccaccacaccactgcccttcactgcggactgcgccgtgtgcgctccgggaccgcccctgcacctttgcccacagcttcccattaccaaggcagccggaggaagacctttccgagttacctgtctcacgtcagcagccacaccgaggcggtccccctcgcaccactccccaagtgcagagcccctgaaagtccgaggctcctgtgccacgcaccctcccccctgcggggcgaccccgcgtatgcgtgtgtgtgtcacgcgtttaatcgcacagagtaattcccagacgtgcaagacaaagcatttcaagcaaagatggtccagagttcaaattggaaagcacatctcgaggcgctgaatctgttctcgccgtctgcctcggtctctggggcgtcgcatccaggagaagggttttaactccctgccagatccgctcggaattagctcttctggcggtgcagcaacaagtggccccgccgcctcccttgtgcactcggagggactacatcctcctcctctcccagcccctagtccaaacgggagtaggtaatggcggggaaagggggaggtgacgagagcggggagaaggaagtacatattttttaattgtgaaattgtctgtctgcgtgctgtgctctgggattctcttgtctcaatcaacttcaattttaacgtggccgtaacgttaagattaagacctagaaatgaaaacgtacccacctttcttattacaaaggtcgtttgttgttgttgtttttttaaaacaccaagtaaccccccccccccccccccacggacttatactttgtttatgagatttctccaaccttggtggtttggagaaatgaggtgggggaggggaggaccaagggcagcaagacgtccactacgaaaataagatacttactaatttaatagggcc

SEQ ID NO: 22908 - DNA, 691 bp, Homo sapiens
  chr3:49906737-49907428
  binary
cgcggcagccccgcccagccccctccgggttgtcgcccataaagaactctccgttgtcatggaaattagtgactgctaagcgggagggaaggggcccggggacagttgggaggggctggaggcggctctgggaacggggagggacggctcagctctcggcccctatcctcacgggggaccacgaatcttcgagggttaatcttttcacaattccgagccgcagaagcttccccccagaacccccaagccgtccgaggtaatggggaactttagcccgaccccgcactccctcccccaaatctgcaaagcccgcgcgctctgaccccgccaggacctcgagccctcgctgcgcccccgcgcactctgcatcccgcacctcgagccagggaaacaatcccccaaggccccacaacctgcgttcgggaagcgcccccagcccggcccgccccgcacctgcagcgccggttggtcacagggaggaagtgatcgcgggctcagcggggcgccgagggctccggggacggcgggcagaatccgctccgagcacgcggggcagacgcggcgccagatgcagccgcttcggctagcgaacctccagcatcgccagccgcttgccggcaccggattcgcaccccgggccgggggcgggctgggggcggggcctcccaaccggccccgccccgaccctggc

SEQ ID NO: 22909 - DNA, 1485 bp, Homo sapiens
  chr4:122871204-122872689
  binary
cggggaagtgagctggtggcgctttcatcccaaaggatataccttccctccatttcctgggccgtttccattccacgcttatcttcagcaataactgaaccacatcgggatgcgtcgctcatttaaaatcagaactcttccctatgggatctactcccagccactgattgtgttcctgtgttctaccggcaggtccagcctgaccaggcgcagactctgcgcgcgcggagcagcgcgcgatcctggggatgcaggggtcatcccggaggtctcggcctcgggcggtgggcctctcgccggcagcagggggcgctgcagaacctcggtccccatcctggagaaccacctccccggctcagccggtctgcgccgcccgccaccatccgaccccaagttctctacctagttctgagcgttcttcctaaaaaagacagtaaaccctgcggcactcccagtgttacgtgacagaaaaaatacagagcatctcaccctgtgaaaccgatcaccctctttttatcttctctgcgtctcgcactgattaaaagctgtctccaagattggaaattaagaaaagttgctctttctcatgcattagcgcgccgaccgctccttcgtttagaaagagagagagggaaagaaagaaagagaaaaagagagcccgcgcgccggggcgcgagccgctgaccctgcaccgcctgggaaccgcagtcaaagttatcactaaagcggttccccggctgcccgatgcccactctctccctcaggggaccctatagggcttcggttccagttttaccccaaatgtgactgaaccacagagagacgaggcgcctgggcaaaccttcaacccacaccctgtatcgcactgtcccctccctactccccacttctctgcccccgcccccgacgtcccagagcgtcggaggggacccaagtccacgctgggacgcccgggaggagttcagggttcaagtgcgcgcctgggtctgtgcacatcttccccttcctcggcctccctgggtaagctcgggaccccggggtccgtcttccaaggggtgcccagccctggcagcagtcgtgcgagctcctcggctctaatacagggagtggctgctcgccaggatgcttgtctgaagtcagtgtgcccgcctgcgggctgttccgtgtgcttgagcctggacagagcccctgccacgcactcggcagcccctgtgtccctccaccgcgcgggaccgagggggcgagcctccggccgaggtctgtcccctccaaatcactccaaatcgaactgcctggccgtaccatgtgggtctcggaggtcccgggctcgacgtggagccgcccggcgcgcgccttcccgccccccgcccggcaccgccctccgaggcgcgggccgcggccgggcccggtactcacaggtccggcccgtgggagaagggcggcgggcagtagccgtgcggctcccgctgcgagggcgccgagcgc

SEQ ID NO: 22910 - DNA, 755 bp, Homo sapiens
  chr4:1331690-1332445
  binary
cgcctatgaatgtctttcatgtgacctgcctcaggcccagagggcagtgagtgtttcgcgattgctgctggtacctggctgtgccggggtatgaatgagactcaggccccctcccttgtcccctctttgtggaactctgggcgagagggctggcgtgcttgcccactgcctgttcctaggtgccagcagaacgtccctgctgggtggctcttgtcctgcctggagaggttgcgtggccggggagagggcggcgggcgacggagccactctgtgcctgtggtcctggtgctggaggccggggtgagaaggcgcaggcttcttgtctccaccgaggcctcagtggggctgtttagctgtcgagtgcagcacttcctgtgcctcgaaagacagccccgtgtagtcagcatggcgcccacatagccagaagggcacgcagcccagggcagagtggccacagggggctgggctcaccccggctgccctgagtggcccccaacccttccttgacccgatgctcagacagtgctacaaggaggacggcagctccaagagccctgactgccctgtgtgcagccgctccctgaacaagctggcgcagcccctgcccatggcccactgtgccaactcccgcctggtctgcaagatttctggcgacgtgatgaacgagaacaatccgcccatgatgctgcccaacggctacgtctacggctacaatgtgaggggggcagggcaggggggccaggctggcacgcatc

SEQ ID NO: 22911 - DNA, 711 bp, Homo sapiens
  chr4:156297402-156298113
  binary
cgtcttatttaaaaggccatcaaaaggatcgtcggcgtaaaaattatgagcaccaccaccaaaaaaaaaatgtatctatatatttgcatacagcgctattcaaagaaaaagatcgtaatgctaacccgcaaacagccagcgagatgtattgcaagccaatttttcctctcacaaaagtgttaaagagagccagacaaaacgacgaagctttcgcgatgagccgcattaaaatcgcggtttcccgtactcggagcagaggcctggcagggccgcccatagcgttgtgcgccccgggttccgttccctaccaggccaggtgacgtccgggtgctcgccgctcctcaccgcgccgtatgctgagcaccagcgaacgccaggcccgtgcacgtccaagcgcggtctctgtccggatcccccatggcccccaggtcccgctttctgttcccggccccggacgcccgcggccagttctccgcgaccctgagaatcaagagccaagcatcgggtaggagctgctcaccttggtctgggcctggcggcgcccgcagagccggtcctggaccgagcgaggaggaggggctaataacagaggcggagggcggttgctaggaaacagcgtcttcgggaggaagtgacttccccaccgccgggtctctcgggtacccaacaccgctcttcggcccaacgtgtcgctggggcaaccacccagac

SEQ ID NO: 22912 - DNA, 740 bp, Homo sapiens
  chr4:37246687-37247427
  binary
cgatgtggccggccggcgcgggcaccaagctgccctgtccccgagactctgcgctccggcgggcggctttctctgggaacctcacggccctgccctctcacctcgtgcccgccggccgcagcgtccgggtcttcatcagcgccaaccctgaaggtacgtccctcgctcgggtttgcccgtccgtccttctgtccgtcagcgctgcgggagctggagagtgtgtgtccgccccacagcccggtgcgccctgcgctcccttcctccagctaaagccgtggccgccctgagcgcgtgggaatttaatttgaatcactttttttctcccctcgctggccggttttgcctgcacacttctattaggacacccattctccaccccgggttattcccctgggtcaatccaagaaacatccaaggcattagccggcccttctggaagctccattctgccgccgccgccaccaccacctcctgtcccccgcccttttttttttttttaaagcggtttcttctccgagatgaccgcaaacacaaacagtagctctcctccccgaggcgggttcctgagtgcggggctacctccttggccactttttccagctgaggcgaggtgagttccttgagactctcctcctgcaggtgcgatggtgccctttgcagaggccaagcagacttttgtgaaccggaggtcgagggggacaccctctgtgggtcccggaacaggcttcgcggtggggcgc

SEQ ID NO: 22913 - DNA, 940 bp, Homo sapiens
  chr4:85503845-85504785
  binary
cgctcacttccagcccgcgctggccccgcctccgcctcccagctcctcagcctcctcccgccccaccgctcccaccttttctcaggcccccacctgccagcacgcagaggcgggggcggggtcgcgggccgggctcctgacgtcacctcacggggaggcggggctgtgggaaccgcagtgcagcgcagaggggcggggcctgcggcgcgagacctggtgcgggaggcccgggcagggagaagtgtgcggggccgggacaagccggctccgagtccggctccggggggcggggcgggaggggcctgcgcggcggcgggagcccagagccgcgctaaagcgggtcaagcgtcctccttttctccccgccccttctcctcctcctacctgggcctctgcgtggagacgcgcacctggcaaccggaggccgcgtctccgccttctctgctcgcgcctggcgcccggagcctgcccgggacctccgccggagccgcgctcgctgcaggcggcctcgagcgctctctcgttgatgccgttttggaggtgaccggcgcggcggccgctctatggtggggccgcgttagtggctgcggctccgcgggactccagggcgcggctgcgaggtggcggggcgccccgcctgcagaaccctgcttgcagctcaggtttcggggtgcttgaggaggccgccacggcagcgcgggagcggaagatgttggagctgaggcaccggggaagctgccccggccccagggaagcggtgtcgccgccacaccgcgagggagaggcggccggcggcgaccacgaaaccgagagcaccagcgacaaagtaagtggagccgagagaggcggacgccgcgccctggctgggtcctggttggaagcgggacacttgagagcaagggtggggcccgtccagcgtcaggtgaggctgcacgctgcc

SEQ ID NO: 22914 - DNA, 960 bp, Homo sapiens
  chr4:8861937-8862897
  binary
cgccccctggcctttcctatacccggggccaaaaccgctgggaccgatatactgcaggagtccgggcacaggctgaggggaccggcccgtgcgttgagcgcctcggaggtgctccgggtcatggtgggtgctgagcgggaacacggaaggctgtgtacacagcagcaagcaatgcacccgcgctcccgtcattacatcgcgccgccttcacccccgctacgatgaccactccgcagatgggcaagacgggctcagagagatgaagtgactttcccaaagccacacagcgggccagtgaaggcaccgcgcacggtccaggaatctaacccttcctggggagtggggagggaagggctcgacccgaaggggccaggcggcagagagccccgcgtcccccgccacgggctaagacgcaaggcggcccgccgtgtctccacctgcgcgcctcgagcttcgctccgctctagccttcgggttaacaccgcttccttccagaagcctaaggaggcccgggcggatcagacgcctcccttctccgcagccccatgccctgcccgcagcttgagctcaccgcccttctcggggtggcggtgcggagaccggacggctccactgtgcagaccccgaggggtaaggggccgggtaggggaggggagcgagaagtggcgaggtgagaactgaggggcgaggctgaaggctgagccagacttccagacgccagagagacgccaggtgagccgggcgggggcgggggcgagggcgggggagggggcggggccggaaccgcggggagggggcggggcgcccgggagggccgcgagctgggaaggtcccgggcggccggagacggtgaagaggcggggccgagtcgcgtccgcggggtcccggacacagcggagctggcgccactgtcggggttccgttccatctaggtcgggcagccccgcgggtccgggcgcc

SEQ ID NO: 22915 - DNA, 1887 bp, Homo sapiens
  chr5:100238197-100240084
  binary
cgtttggtgaataaagacatttctcttgagttctgcccacagattaaaaggacaaggacacacgttctttgttgacacttctgcagtgacttctcctttggcgagagagcacccagggccaacacaactgtcaccacaaccacacagagcaagttgaactcatactgggaacagcttagagaagcacgcacatctcaacaacagcctttgttatttaattcatgacactaaccacgcgcaagctcaaacaaacacacatgctatcctaaccatcactctaccctctatattcacatttcatttatggcttgactttttgtcatatcctgaaatgaagctttgcatttacccgatgagttgcgtctcctggtgctcctcagttcttgctatttcttttgtcttataaaagatcaggagcagacttattgtgcagatcgtccacctcttcctaatggagcgcatcttgggtgcccgagaaagtcctggttgccccagctcccgcaccttctcttgatataaaggctccgttttggggagatagtcgcgggggtgaaatctgtaaaatgcgaggagagcttggagccgggatcccgggatcagatcactggggtcttctgtggccgagctccctctggtcctcgaacgctgcccagcgacctctcgccctgtttgcgccagctctgccagggtcgctccgcgccgcctccctggggctcaggtttcttttcagatgagacaccttgtgcattggaggtggcggcagcttctgcagctgggttcgggggcgtcactggcccttccctcttgctaggagataaacgctgcgcaaagccaatcaccaggctgagggggcggaggctgcttggagagtaacgtccccggctctgcctgctctgtgccgggagaggaagctcacagtgctacgcgcctgcgagctcgcgcacatacacatatacatacatacacacatacatacatatgcacacacacgtacacgcagaatcacacacactctcctgggacatcaaagcatcagctctctggacctgggagctccaagatagtctatccgcatctaggtgagagggcacctcgcctggggacagattacaaaagcgtcccgccagaggaatgcttcaggtagagctaggggtggattgcaagaagagtaccttctttcaatcgcttttgctaaacacacaccctcacacgcaaaaacacgccctccaaggtggagtgaaacggggtgcgggggtggggacggcggtggaaggaagaagacttttattactcaatctggaaagtgcaaatacacacatgaacctgttagccgatgggcccactctgcatgggtggtggacgacgaccctggctcaggattctgcaggaaacaagtgatgatagaggtgtcattaggaactttatggatatttatgcgcctccctttcattgccatttggaaactcctcacgcagaagtcaaggaaactccaatcccacttaaacttcattgcggagaaacagagttctgaaaaaaaagcagctaccatggacctctcttttaaacgcaagtacacccacacacattcggataccaaggaaggaaggaaagaaagaaaggaaagaaaagggaggggaggaaggaagagcaaagtcctctctaaaagtctcaattatatatatagcctctgattgtcacctctcctccgtcccaccatttttcgtacttgtattgggtggcagggacacttttcaagagttctgtgttcgattgttcactctgagtacctctccaccatcctccagtcgttgccctcattgggagagatgcttgctactctgctagtaccacgccttggttccggtctttactgttggctggtaggtc

SEQ ID NO: 22916 - DNA, 204 bp, Homo sapiens
  chr5:124084158-124084362
  binary
cgcacattcccctgcatgaagtccccgctaagtgctatatagagacacaccacgcaaccgtacttacggtctgtattggatcgagttgaccttttccttctaactgcattgaatgtgtttggttgcagccgctttattttggaaattataatctcttcaacaaatttattattaaagaagatggaccatcaaatgtcacagacc

SEQ ID NO: 22917 - DNA, 381 bp, Homo sapiens
  chr5:124084660-124085041
  binary
cgtataaaacacacactgagagcgggtgggggtgctgtggggggtggttgtggagacaaagcgttttattttccaaccagattggggttgaggaacctcccgcagtaagaaggcaaaaaaatggtgcgcccctttcaattactacatcattcacataaaacacttatttattaaaacaaatctcaaacaggctgcgaggagaggatgtcggtaaatacaagtttgattgtgttatcttgggggaaataatgtatgtgatcgctcggtggcagagagaagccaaacgagccgctagcgcgtagcgaagagaaaagggaggctggctgtgtggaactgactgcgagcattttgccggcttcccttccttgttccaaggacttc

SEQ ID NO: 22918 - DNA, 1985 bp, Homo sapiens
  chr5:128795471-128797456
  binary
cgtgtcttcccatctccctactcattccctcccgcgccgctgcgggtgagagccttcagcggtgcgtcctaaggagcgtgaggagtgtgcggagcttggcacaccaagttgctgagactgtgacaccagcctccgcccgttccgcgcgggtgcaggcggcgagcctcggctcggacaccacagctctcctgcccgcgccgggcagtcctctgcctgtccagaggcagcactcccggctctcggctggctgtgggtctgtcttgtggggctccagcactagcctgctcggcctcggaaactcctgcagcgtccagaacacagaaaatagactcatctcctaattcgccagggagctcgagggctgcggggccgcggggctgcctcccccgctcctcccccaacccgaccccaccccacccccgccagggcttcggcggcctcccggagtcacacagcctacccccccaccccaacaccccctcccccggcagacaaagggcctgggcaaattcgccgcccggcctcctagcgctccggggaggccgctgcgccccggagtggatcgcgctggaggcgtgcgccgggcgagaagccgcggccgcgggagcgcagtatggggaagaaccgcgagatgcgcctgactcacatctgctgctgctgcctcctttaccagctggggttcctgtcgaatgggatcgtttcaggtaagttcttccgtgactttctcgcttcctttccagccatcccagcggagaccgcgaacgtacgggtcggcagggctggtgcaaccggtgcgtggagagcagggctcagtgggtagcaataaaaatgagcttgaggtgcaggttaaggggtcaagttcggaaatgaagcacacttctgccggcctcgttttaaccgtatgtggaatagtttccttctaattagagcaataatatttgcaaaggtacgtttacagcacctggaggaaaattagaacgtacctaagttgatagcaacgctctgctctagcatacacttcagaaatcgtttactcgtgctggagtctttgcatcggttttcttttcaacaatgaagtgcggtcaccaaactttgattccccctcccccgcccctaatataatcgtacttttactctgaaaatgctggggtctgtaatctgatcgcaaggcttctggggttgcagagtttcagggtctagacgggtggtctccattgcattcaacgcgagcgccctgtatctatggactgtgagcttggaaatgtttgtgctactggaaccgcggcactttaagccccgcacttctgtctgccccgcccgcagagctgcagttcgcccccgaccgcgaggagtgggaagtcgtgtttcctgcgctctggcgccgggagccggtggacccggctggcggcagcgggggcagcgcggacccgggctgggtgcgcggcgttgggggcggcggaagcgcccgggcgcaggctgccggcagctcacgcgaggtgcgctctgtggctccggtgcctttggaggagcccgtggagggccgatcagagtcccggctccggcccccgccgccgtcggagggtgaggaggacgaggagctcgagtcgcaggagctgccgcggggatccagcggggctgccgccttgtccccgggcgccccggcctcgtggcagccgccgcctcccccgcagccgcccccgtccccgcccccggcccagcatgccgagccggatggcgacgaagtgttgctgcggatcccggccttctctcgggacctgtacctgctgctccggagagacggccgcttcctggcgccgcgcttcgcagtggaacagcggccaaatcccggccccggccccacgggggcagcatccgccccgcaacctcccgcgccaccagacgcaggctgcttctacaccggagctgtgctgcggcaccctggctcgctggcttctttcagcacctgtggaggtggcctggtaagc

SEQ ID NO: 22919 - DNA, 876 bp, Homo sapiens
  chr5:14142657-14143533
  binary
cgtagccggggcataggcgttttgaactagaatattcgtccagcgctggtttgacacggatcttccgcaaaggaacatttcttttggcctccccagaccccgtcatcttccccattcattctggcggagtaaggactgagaaaccgtgaacccgaggttcagcagccgaaagtcccctgggagatggggatacaccgagaggaatcccattttacaggagagctttgtacccttaggagtaccgtggcctccgggactggagcagataacctgttttcgggccctctatgttcactcaacaactattaagaagccccctccccgagccagggccagcgctgagcccactagggaggcacccgccccggcccgcgtcaccccgccttgcgggctagacgacgaaacgcctcggcgctcaggggaccgcgcaccggtgcaggagccagcgccccggttgggggcgcaatgccgggcctgggaaggtccgccccggctggtcagagctttcctgcgccttccaaggcttggagctgccccggggaagcagaccgaaccaaaccgaacgttcctgcagcctccccgccagccctgcgggagcccatccgcccaacgcggccccgcccctcccccaggctccgcccaccgccgagcccaggctcggcccttgacgaagttcgccggaaattaccgaagcccctcttttttttccttcctctccgttccctgttctcccttttcctttcacccgggttccctcggccgtgatttccccctcccccctccttccttccccattgaaatcaagatggaggctcgcggcagccgccggcgcccgtgatcccggaggtctcgccggccacgggcccccgccctcgc

SEQ ID NO: 22920 - DNA, 750 bp, Homo sapiens
  chr5:158527374-158528124
  binary
cggggcccgcgcatcgaggccccgccccttcatttgcataacgtcatctttccgcccaccgcagccaatcgcggcccgggagccggctcgctggcggcgccaggccacgctctctcattaacatcccgctcccggtggcgcaggggagccggccaaagttcctcgcaaagtggcgagcgaaggagcgctgagcactgacgtctgggctggggaggagcgggtccgagcgaggacggagaggggacagagggaaagggaggcgggtgtcttcctcaggaatttgagctggggatctgcatcctggccattgcagtcctttagcatcctcgccgcgccctgagcgcgctggaggctcgcaggctgcgccctcccagggctgatgccgcgtcctgctccgccgttctgggacgtcggggacaaaagtggaggagacgggagagcccgggcagaaaaagcaggacgcgcgtcccaggtgcccacctcttcgctttgaggcgggggcggtgggatggaatatgggtgcgcgaggtcggggctggtaactctcggaggggcacggcctccacgctgggagggatgaatggacgctgggccccggcaaatgaggcgctgtgggtccccaggaagtggggtaccaggctctactcccaccccggcctctgaaacgcttctctctcggccgctagcctagaggctgccagggttgggcactgttctcactcacacgctcacctctctcgggcagtcctc

SEQ ID NO: 22921 - DNA, 795 bp, Homo sapiens
  chr5:169063996-169064791
  binary
cggcaatcaggaaactctctgcacttgcggtggtggtctggcgagccccaggtggggactggcctctgctccctcgcctggggaggagacaaagtgggagtggtccccaagttttgcgtgaagtggggtggggtggcgtgtcttagcctacggggcaccagccttctagtgtgcccctgcccaacgggagggaggagggagcggggagccccggcgagggaggagagggcgggccctgagaggagtttgaaaagaggaaggaagtggggccctgcggcgcccagccaccccctgacggcttccccacgggaggacgcgaggccccggcccagccatggccccctggcgcaaagctgacaaggagcggcacggcgtgggtaggtgcgggccccagggcgcggcagggagcgggacaggtggcgggagagccgcgagcaggaggatgctgcggggccggcggcgcggggtgggcagggcgcgctgcctgcaggtcagagggcgcagcctgcggcggggcctcggggcgggaaagccgaggctcggggagaggacggcgggaccccaccccgcaggctaagcacagccctcgccctctcgcctgctgagggaaccttagacatttccgagatagggtcaagacctgcgcttgacaactcagttcttcgcgccaaactcggcgtccccaggagtgccccagctcgccgcgtgggagacttggccttgtagagggagctccactctcccctggctcagccttggcctgcccaccatgcatacttccaccccctccaaagc

SEQ ID NO: 22922 - DNA, 550 bp, Homo sapiens
  chr5:2038439-2038989
  binary
cggcatttgcccaggcgtttcctctttacagacgagtcagtgtctttgccgtttggaaccttgtcttcactatgggatggcacttgatcgaggcggccccgcagcctgttccgcggtgctggcgtctccctctccctggcgaggctgccccgaacccctctgcaccctccctccaggtaccgcccctgggaggtccggtggggaccacggcccgcgacggccgccgcacagccacctcccggcgcgtgcagtgcgggcccggagccaacaggtggcacaaacgcatttgacttgggcatcgatcgccgcgcccgcccggggccgcacctccgccgccagcgtccctccagcccggccccgatgccgcgcaggcgcagtgctcttctctccgcgggccgggccgggtcagggtcaggatctgacccgagtctgggtcaagccatggcgggcggcaggcagcggacggcggcgcccaggcagtgcgccctctgctggccactcgtgtacacgctggctccagccagtgctgcactcctggcagacaggggcc

SEQ ID NO: 22923 - DNA, 761 bp, Homo sapiens
  chr5:33936135-33936896
  binary
cgggtgggctttgcctgcagctcaactctccctcgcggcgcgggcgcggctgggttcagcacctcggaaagcgcccctcgcggcgccccgggattacgcatgctccttggggcccgccgccttggccgtgcaagtgccaccgtaactggtgagagccgctggcaacccacccggagttgacaaccgcggagagacgcagacacccactgacctccaggaagctgagcgtggtggatggaactctacgatctctttctctccaaggacggaaacctcatccaagcagtcccagaggaaacggataaaggtatttgaaagggagcgagcggccccaaatcgcacaattgagcggctgggggagttatgcgccagtgccccagtgaccgcgggacacggagaggggaagtctgcgttgtacataaggacctagggactccgagcttggcctgagaacccttggacgccgagtgcttgccttacgggctgcactcctcaactctgctccaaagcagccgctgagctcaactcctgcgtccagggcgttcgctgcgcgccaggacgcgcttagtacccagttcctgggctctctcttcagtagctgctttgaaagctcccacgcacgtcccgcaggctagcctggcaacaaaactggggtaaaccgtgttatcttaggtcttgtcccccagaacatgacctagaggtacctgcgcatgcagatggccgatgcagccacgatagccaccatgaataaggcagcaggc

SEQ ID NO: 22924 - DNA, 1959 bp, Homo sapiens
  chr5:75378574-75380533
  binary
cgaagttttcttctgtttgctcttgctgtgcccaagtttcctctggacttgtcttccagcgtcggggtgggggctgggggaagtaggcaacctagctctgcctggttgctccctggaagccaagtcgaagtgaacaagtcagtcccaggcccggaaatagaatacaaaccctctttttgtccggtgctaacagagtccagcagtcagaactccctcgcgtctcacgctggacctgacccggggcgccgccaagtgcgcaacgcacagtcacagttggtgactaattaaggactgccgcccctctccttcacctgctacaaactcagagccctgacttctccagaagtacctaccacttggaggtggctctccttccccgccccctgccccagtcccacaccgcagcagcgcctcagcaccgcgacttgccggagcaccgcgagtggcgcgcgggtcccgcctcccccgcgcgccgtgactccctgcgcaccgctggtactctcgccacgccgccgcccggcactgcagcaccagggggaggaggcaggcggaggagaggaggaggaccgcagcgtgcaagccgggagccactttcccgcccctcctctcgccgctgacacgctcagaggagtcaccactccgcgcgctgcaggcgagagtggcagacggaggcagcccggggaagcgagccggagcggcgcccgcactgaggcggctgcagtgctgacaccactcagggcaagggtgtccgacggctggagcggtgagtgggggaggtgaagcgggcatccgcggggagactttcccccgctgctggatttctcttcccgactggtggccgggcgctgcagcctggggaagtttttgcagcctttcggaagcgcaactttgccccgcctgcccccggggaagcggctgcaggtgcccgctgctttgtaggcgcctttgttggagagggaccaggaaagtaggggtaaaatagatgcagtgaccccagggttcgctagggtaggtctggggactgggtcgcactttatctgggattcccagaggaggtgggtgggcagcagcggggatgcaggggccgcatctgcagcgaccgccacgctcttttttgcttgtgtggtttgaccggcagggataggcagattcaaatctagcagcctagagccccgggctgggtacctggacctataccttcatagctgccttaggctcaacttttcggcggggatccctctgcagacgtgcaggtggcgggagagcagaggtagccgcagtaagtgctgagagagcctgaaagaaacaccatgaattttcaaactctcccacatacattcccgaagcgcctgtctggcgtctaagagagagcaagagagggctggagagcaggggagcccgcggggctgaggctctttgtcagcgcctgcacttcctacgttacaacgccttcattcagcaaaaaccttttgggcgcctgctgtgcgccaggccaggcgaagcagacccgaggctgtgaagctcagaggggagagggaccaatcgcagtaaataagctaccgaggtaatcttagatggcgatgagggcagcaaaagccatcagccgaccctctgaccctttctcttagtgggcttttccccttccgcctgggttctagaactgggaagacttttctccagagcgtcgcggggagcgccccgggctgggcccacggggactgcggaatacggggatgaacttggcttggggcagccagcaccccacggcagatgaacaatcgggagcagatctgtgggcgtgcggggaccttaggcggcgcgcgggggcggggggaggggctgagccacgggggctagaggtgccgcctggacggcctgagctgggggcgctcgcgtcaccttctacgtgtgcgagtgatgcaaatgcagacccgcgaggggcgggcgggggtggcgggc

SEQ ID NO: 22925 - DNA, 2000 bp, Homo sapiens
  chr5:75698192-75700192
  binary
cgtgagccgccgcgcccggctctaaataatttcttatcgccctccctcagtttgtttttcctgttatcgggtcacccacacattccacaattgtcaaataggtgagggcacaggtacggaagcgtcccgcattccctccagattttatcacgctgagacacaaagagaaaaatagctcctggcgaccgcatgaaaaccccgatttcaaaacagccacatgcagtttaatttccttaaaagcttagccggaaaaggtttctgtggcttgcgaccccagctgggcttgagagaaggctctgcacactggggcgggggcgggcacaaggtgatcggagggagggggatgactcgcagttgtgttttgagtggttgccttgggttatcttgttcctccagcacacacacactcagtttcttgtcataaggggaaccctgttattttgtagacaaaaagtgacagaagcaactttcgaagcaaaaaaaaaaaaaaaacaaaaaaaaacaaaaccaaaaagacgaagaagaagaacaaaagtcaacgtgaaatctccccagaggaaaaggaaccgcgctgtttgtccctcagtaactgagcaacaccccggacacgaagggctccctgtgacttctgcggtttttcttgcacttctccgcgttggttcacttccaccctcgaaactctccagaagcgagaaataaggcggggtggccgccacccccaggccaccagctgtgcgggggccccagctgcagggggtcccggcccagcgtccctctcggccccttccctctcccccgggggagaaggggcgggtccacgcggcctgggcgctgcgcccgacacgcggtaggggtcgctgcgtctcggcgcgcgctcccaccgcggtgaataacggggcctggctggaggagaaaggaaacctgctgcgggaggcggcggcgaccggccagggagcgagggaggagagttcacttttacttcagtgtcagcgcgcggcggccgtggctggctctggcgagagagcaccgagggagtgggtcgcagatcttcgggcggctaggggaaatcggcgagaggcgggatccgagcgcgccggcggggcgcagagcccgcgagcctggccagcgagggtagccgcggggggcgcgccccgggcgggcccccggagacgcgcaggatgccacacgaagagctgccgtcgctgcagagaccccgctatggctgtaagtgcgccgggcgcgcggggttcctgctggccttggggagctccctccccgaggacggcgttggagaagccgagggagccggttgcgcggcgcagaggaaattggaaggcagcaactgcgcggctggcaaagttgggagctggagttgcaaagggcagtgaatcgcgtccccccgctcctcccgccccccaattcctaatatccagctggcaacccagaccctccactccgcatacccaaacggggtgcgcgggcagtgcggggattgcgctctgggacagaccaggttgggattttaggggtatcaggtgaggagtccgcggagctccgggtcgccgccggcttgggccagggggtggcgtaaggcaccggattcttccaacccagaaggggaggaaagtttgtttgctgtggctacaggtgggcaccgcaagtagggcgccggcgcactctgctagtgcaaagccggcttgactggaagggcgggagtctcctcctgtcccgcgccctcgaacttcacctgacccgctagagccattggcctcacaggtgtaagtccctcccctctgaaaccccccaacccctttcccccccgctcccctcgcgcgggaggattgctgtgtggagaggacgcggcactaggctccggggaatccggcgggagcccgcgtgacttgaacgagatggtgtcgattacccagccaggggctgccctcggaaataggttgctttggccgatcgtgagtggatggagccagattaacaccaaccac

SEQ ID NO: 22926 - DNA, 955 bp, Homo sapiens
  chr5:87436549-87437504
  binary
cggatcttgttttttcttttcttttcatgggtccccgtttgcgctcttagtcggcttacccgtcctgttccaggagccgacagggaacagcccacctggagcaggtcttgggccaccactcgccccgccccccgtctctactcctcactcgctctccccgctcctattaagcagccaacgctgggtgatctcctctccagttcttcgtggtttcattgtagccttgatatacaagacaaatgcacactttactctgggcttaaaaaaccatctatcatcatcctttgggcatgacaaatacattgtgtgtttcagagaaattaatctggtatttagggggagaaaggcatttccaaccagtctccgtgcagaaccttcccgcaaaccctgtagcggcatttttcgacacttttctcctcctttcggcaagcctcaaacttgaccttcgagaggattttaagggtagagccttcctccctttccctcgtctgctccaagagctcacgtaggccttcttctgggaaacagcggctcaggaccagagctcggagaactgcgcgtccaggagcgcgggcgcggccggggaaaagggaggaggcggcaggagggggcaggaggtggagggaggaggaggatcggtctgaatatgcatgaggcacccagcactgccctcttccccggcagctgctcgggcgggggcgaaggagggaaggggaggggaggggaggaaatgaggctggggcggggtggccagagcagccgcagaggctgacgcgggtttggagaacggaagagatgatttgcatggcgcctggtgattggctgatggccgggggctgggtctgagaggcggcccctgaatggtttaacggaggaaattacaagattcattcgactaaagaaagccggggcgggcctggtcggcgcaatatgcagcctgtccgcaagggggcgc

SEQ ID NO: 22927 - DNA, 1197 bp, Homo sapiens
  chr5:88179191-88180388
  binary
cggccggtcggattaaaagtaaccagactcgtccagaaaactgcgtccaggaaggaagtgacagaagacgaatgggaaaaggagaacagctcacagcgtttgaaacatcgcgtaaaaaagactgggggtggtgggggcgggggggattgaaggatactgggaggggaggcgggggtggtagggaagacggagcacgaatggttggggttctaagcagcacgtccgatgaaatgtcttttgcctccttttttccccctttatttaattttgtccttgcctttgcttcgcgctgcctttttctctccgtctctctctcccccacaatcccaaaccgttgactctttcctcgcgagctggagaaatcatcagtttcactcttgcaaaaggggggcgggactagacctcggagcattttaataaaacaaacatacagcagctccctcctcacccctccagtctcaactagattgataaattactccactacactactttaattatgtatatggtatgcagaataaatcactgaacatcagtacctcaatcaagcacttttaaatgataattgcatcttggtgaatcaatctttccattcctgacattttgctaattttagttttacggtggggtaatagcacatgccatacgcaaacctaatgacaattctttattgcacgaaatgaagacaacacggcgagctgcggctccctgctcctctcgcggcgcctctgcggaggacgctcggagagaacctagtctcccgctgcggcgcgctcgcttgctctccggggacgctgcgagccagccagcaggaaagtccttctaaagtcgggatctttcctctgaccaataggagcgcgaccctaatagttgctcttgtgacttttcccccttttggacacgcgttagccacttctctcttccaccggtcggtgcgctcctccgttactcacgcgtaaaaaccacggtccaggatgtctgcagcactcgattccagcgtgcttttcctgcacgcccagaagtcgcggttttcaccctgagaggttggagcgctagaaagcgagccgaaaggtttctctaatgttagtaatgtacgaaataataaaataattaccagtatttgagatctcgacttcatcgcggggccatgaactttctaatcagtttggaaatatttaccgaggaagcagcttcctc

SEQ ID NO: 22928 - DNA, 899 bp, Homo sapiens
  chr6:118228010-118228909
  binary
cgaatgtagtaggagcaacatctaggattctccgtttgggtttctaatccggggccggcacctgtctcggcgtcctgccgctgtcccaggccggtggtgctggattccgcggcgcttgggcagaaacgaggaatccccgccaactccacagggaggatctattcccagcccccttatccccctaaaaaacacccaaaccaaaacaatcaccacaacctagaccgtgggcctctgcggacggggcagtagagggtcgggggcaacaaggcacctcggcagcgccctctggcgagaggagagcgcgcaggtcccccgcccgcgccccgctctgccgccgccgccgccgccgccgccgccgccgccggcgcccccgcccggctctccgggttcaccctcggtctctcactccgtgagacacagacggtagctttccgaccgagcggggcacaggctgaggcggcgccagcacaactgccgccgcgcgccccgaggagacccgggcacgaggaaacaaggagaaatcaggactccttccccggaaccgaccggcagctccgcgcccccgcgcgacacccttcgcagccacttcgcggggcgggccaggacttggggacgcggctcgggaagagccggggcgggcggcggcggcggcggcacgggcgcgagggtgcgcgcactgggactggagaggagtgagtggcgggctgggcggcggcggccgtagccgcgggtgcctccccgcctcaccgcttcgcaggcagcaccgcctcccgggccgcggccgcccggccgggtcctctgcgcgttcccgggcccggaaccggcacacgatgcacccggctgcgttctgatcgccgccgcgcctcagcctctgccgcgatgatcccccctgagcagcc

SEQ ID NO: 22929 - DNA, 891 bp, Homo sapiens
  chr6:127440346-127441237
  binary
cgactgatttcttggctttttatcattttgaactttatggaatacatcggcagccaaaacgcctcccggggaaggcgccagcgaagaagtaagtgcagggttttttacgcgtttgctccctcccgccgcgttcacctgtcgggtcgctttgcctgtccggagccggctcccaactgcagcggtcctcccgccctgcgcctcgcagaggagatgcaggttcgggctttgggggtatggacggcgtctttcacccttgcctctcggcgcccctgccttccgcagcatcctagccggtgcgaggggcgggcggacgcggcgctaaggtggctcccgccccatggtaacttcaggttcgcgggaaagttcggtcctgggttagactcgcacccgggatttgtgctttccttttgaggatcggacaggggcacccagccgaaggcacttgggactcccagacgcaggatgcctctgaccgctgagtaaatgacaagggaggcgcggccgcggtacccgctcacctagcgcaaccgcctcgcgcggggagacctcggctgggcccttaggctggactccggtagccgaacgcccgctacccggccaggaagccagggagcgagcgcctgcgcggccgcatccccgacacgcaccagcggagccaaagggcgcgcgaggcgatggggttcgcgtgtctgcgcgtttgcagagctgccggacgtcccccgcccgagggttgaagacagcaaaaccccagctgtggggagccggaggtgcggagtttccaggttctctcttgtcacatgtgagcgtctgtaccatctctggccctttcaagtgtgtcccctgggacacacacgtacagagagtggggtctccctaaagattcgcctcctc

SEQ ID NO: 22930 - DNA, 1766 bp, Homo sapiens
  chr6:127836014-127837780
  binary
cggtctgggcgtagcggagccttttgcgctcggctttgcggaggcggtactgcaggatccggcagtttttgttggctctctccaactcgtggcgcatttcctgcagttgacaggcatcctcctcgaagaaagtgtccctcatctcgtccatctcggttctcagctcatcgatctcgttctgaggcggtgacaggccgcgtgtcaaaatcaaactcgcttccagcccttccgacacacaccgtacacaccccattccaattccaaattctcagctttaattgccctctctctccacgagacaggagtgacaaggagctgagtacagaagaggaaactgggggaaaaaggcccactttaggccctctctcgttctcttactctacctctctccaggaagaagtgtgacaaaccattataattagagaaacggaggcccagatttgaatttaaatgaaaacctcgcgttactgagagcagattcaaattccggcaaggcctaggaaaccccctccctcctttcttgttctcctccctcttcaaggctccctaacaggttagcagcctctgatccctgccggtacacgccctaatcctcccaggcccactcttcccatcccccagccgggtccccccaccctcctcaccttgagagtctcgttttcctctcgcagcttctccatctcctcttgcatttcttcctgctcttggagctgctgcgggtgcggctgcgacgaagggggcgctgccgcctgcatgcccccgccgctcgcgctgccctctgcgctctgctgggggccctccgccgccgccgccattggggaggcggaggcgacggccagggtctcgcaaacggcaggggggccagacaccggggagctgcggctactgctgccgccgccgttcttagcgtgcatctgagccgcggccgccgccgctgccgcccgctccttcttgagatggaactggatgagctcagactgcagacatccttctttccagtagctccctccaccaccgctgccgccccccgcaacgccgcttccggagtttctgctgccggttcctggggttttgcccgcagaagaggaggatggagaaggggaggccccctccccgccgctgccgcccctctgctgagcgcgtacgcctttccctcgccagcccctgggcggcggcggctgcggagcgcccccctccctttccccggagccgccgccggctcctcctccttccccgccccctcctcccccttctccgagcggagggggttccccgagtttcgagggcacggactctagctcccgaggcggctcctcgggcggtccgggcctcctgccgcccaaagcggccagggtcgcggcgggggccgcttcagcaccagccacaggctggacagctcccggagcggcccctttgggcgccaggggcgtcgccttctcggccccacctccgcctcctcggatgctggcgggcggccccgtgcggctcccggtcttgttaccctgctgttgctgctgctgcagctgctgctgccgaacagaattgagtttagtgccggcccccactggggaccgggtggccgcgattgtctgtcgcagcgaactgtccctcggtctagcgggtgactgagctcgctgctgctttctgctgctgccctccgggtgcagacgagcctcagtggctgcagcggcgggagaagctgctgctgtggcaggggcagcgcccccgattggtggctgactcatggctatgaacctaccagatgc

SEQ ID NO: 22931 - DNA, 747 bp, Homo sapiens
  chr6:130687170-130687917
  binary
cgagcagaaaacttttcccctcccgttcccggtcccttttgtctttcttggacgcggtggcggcgccgcctgagcggcgactccctctcccctgcccggcttgctgcgcccggtgccctccgagggcaggcgcgcctggactctgcgcccggatggcggcggccctctgtgagcaccggcagcggcgcatcccctgccccgaggcctccggtgcccccccggcgcgggcataggggcgcccccaccctccgtccgcttgcaccccttgccacccgccccctcgcctgactcatccgcccgcggtggccgcccgagccctgggatggggagggagaccgcggctgcccgcggcggccgagattcccgctgacgcccccgaccctgccgccttcttcgtccgcctccagaggcgcccgacgtcccgacagctcctggagtgagaccaggactgagaacagggagaggcgacccgacccccagggcccggtgctcaggacaggtgaggggaaggaaagggtgctgacgggagtggggaggtgggtgggcggccaccgcagccgaaaccgggcacttcttcagccctctgccctcccctcccctccgctacagcctccagagttaggtaaacgctgtctctcctaaagtttgggaaataaaccaagtccgccatcaggtccagactccccagtcccgggagcgcgagagaagccgtgcggggcagcctccaagaacccggagtactggagc

SEQ ID NO: 22932 - DNA, 817 bp, Homo sapiens
  chr6:159590501-159591318
  binary
cgcagagcgcgcagaacagacggacggcggcggggacccgacggcggcgcctcggcactccccagactccggccagcgcccccctgccagccgcaagcacccagccccggcccaccccgggctctcgatggcccccgaggccggggcgaccctgcgcgcgccgcgccggctgtcctgggcggcgctgctgctcttggccgcgctgctccccgtcgcctcctcggcggcggcctcaggtacgcgccgcgcccgggcccccggcgctcctcagctccccgcgcaccctcctgcgctcgggccccgtcgtcccgctcagtgctggctacgggtcgtgtcactagcctgtgcgtcctcgtcactcgcgggtcggggcacttggcgccctgtgtgggtggcgggagcggggacgcctcggtgcccggggaccgcagcgcgctggcgtttaactttgccgtcgcccgccttggagtcgggaggctccagccgtctaagtgtcccgggagattcaggcacagcggggaaaaaaggaaaagaaaggcgactttcagcgtgcggactggggtaatgcctttctttgcccagaatttctcgggagcgtaggtggtcatcctactttctccgcgttcacctctcgcgaggcaggatgacgggcgcactcgggagaccggagggaggcagagcagggctgttctagaaggtcgtgggggaaaggctgcgagctgccgcagggcgtcgggtgcctctgcgctccagaggagaagcgctccagtgccagctcggctccaggcggcaggaggcccgcgcgcccggggggaac

SEQ ID NO: 22933 - DNA, 966 bp, Homo sapiens
  chr6:166580595-166581561
  binary
cgcggggacaggcggggaccagggcgcgcctcgcgggtcccgggatgcctccgaggtcgggacaccgaagtgcgcgttcctcctccccaagcttccgcggagaaagccccagaagaggggcttgtagaaatgcactcgagggagttaaccagagcgggaacaaacacaaagccctcctccaggagaaaaagggttcgacctccgggaacttgccaggtcccccaggctgcccaggcgctggagagcgcggcgcgcgcgggctccggacgcgcacccacctgccgttcttggtcacgatcatctcattggtgagctccttgaagcgcagccacagctcgctctcctccaggcccacgcgcagttcgcgctctgtggggtcgcccttctcgctgcccgcctgcagctcattctccacggcgctcagcaggtggtccactcggtactgcaggctctttcccgcgctctcggtgccaggggagctcatcctcccgtccggctcccctccccgccgtccccgaagcccagactcgctacctgagatccaccttccctgctcttggccgccgcccttccgagaaaaggggccccttggaccgagacctgcgacggctcccgggtcccgggtcccggcacagacccgggaggagggcgcggaccaagacttggggggaggggacgggggcagaggggtggggagaagttattccacttgaactccccaaggctctactagtgtaggtctctggggaccgaaattcagtgccctccccataaatagagccgcggcggcagcgctggggtgctcggcggattgggccgcgcacgctttgaagtgccgggcagcctcccattggccgagagcggccatatcagacccagccgggcgggtctgggaggccgggggccaacaatgggctcccgcacgcctgtttcatgtaaatccggggccccagccctgcgagcccc

SEQ ID NO: 22934 - DNA, 2706 bp, Homo sapiens
  chr6:391113-393819
  binary
cgcagagacagtatttgaatcaagcttaatagctcaagggagctgggccatttcctattttctttttagtgagtgcgatgttctctaaacaccgcggagaggcagggttcccggtgatggccttgccgagggtgctcccgcaacctccacctccagttctctttggaccattcctccgtcttccgttacacgctctgcaaagcgaagtccccttcgcaccagattcccgctactacacgccccccatttcccgccctggccacatcgctgcagtttagtgattgactggcctcctgaggtcctggcgcaaaggcgagattcgcatttcgcacctcgcccttcgcgggaaacggccccagtgacagtccccgaagcggcgcgcgcccggctggaggtgcgctctccgggcgcggcgcgcggagggtcgccaagggcgcgggaaccccaccccggccgcggcagcccccagccttcacgccggccctgaggctcgcccgcccggccggccccggctctcggcttgcaaagtccctctccccagtccaacccccggcccccacaggcctcggcgccccgccccgccccaggccccgccccagagagttctataaagttcctctttcccacctcgcactctcagtttcaccgctcgatcttgggacccaccgctgccctcagctccgagtccagggcgaggtaagggctggagtcgggcaggaggaggggtgtgaggctgataccagagaggacccggagcgcgaaccagaggttcgacctccagggcagcgcagggtaccccggcttcggagcgggaagggagcgcgccccgtcctggagctccgactcccaccccatctgcgctgagccggaggcgctggtttgggctccaaggcccgcctccttggctctgcccgagcctccccgcctgccctccgcgctcctgcgacggggtcgccacaagctggacgggatgagctaaccggactgtcggggccccaggagtggctgaggcggggccgtccaaggcacccacacaagacggcacaactgcctgcgagaaacaggcccggccctgtggaccccaatccgaggctccttcccctgctcttcgttcctaaggggcccaagctcacggcggcctccggcgcggtgctcacccgctggcgcaggaggaggaggagctccacatttgggtcgctccgagccttgcgtgcggtggcctagccggcctggcgcggtccctgcctcccaggctccgcagctgtcgtcgccctctcccgcgccctccccgcctccgctctcccgggcctgctccggggtccggcggacgctctgcgcgcggaatcccccgtactggggctgcagcccccgcgtctgcgccacttgtcgtttgcagagcccacttagtgcgcgctagctgggcagggataggggtcctattcggggcgaagggtctggatgcgagcagagaaagcggagggtggaggaacccggggctgcgcccctggaacgcccggccgcaggcgaggtcctccgcgcgtggaggccgccaggggagtggaaactgacagagtcgcggggaaggggcgagaagcgggttgggagtgagcgaaggcaagcgagagctgcgagtgagtgcggaaggagggccaggaggggtggcggctgggtggggagagagggtgcaagacgagcggcgcgtgtcgggagcctttgggctgcgggtgcgttacaggagagcaggcgggtaggagccttcgcgggggccgagctcggaaggcggacggctgtgcccgcccaggggatgcgcccgggccggccgcgaaggtgccttcttccgggggcccggacgaccctgacacggcacgcgcgcgcttcgcagcctcaaagactccggggcctcgtggtcactggcgcaggggatcggggcggggtgcccggagtgcggtgcctcgtggctgaagggcagctcttctccccgcagtgcagagcagagcgggcggaggaccccgggcgcgggcgcggacggcacgcggggcatgaacctggagggcggcggccgaggcggagagttcggcatgagcgcggtgagctgcggcaacgggaagctccgccagtggctgatcgaccagatcgacagcggcaagtaccccgggctggtgtgggagaacgaggagaagagcatcttccgcatcccctggaagcacgcgggcaagcaggactacaaccgcgaggaggacgccgcgctcttcaaggtctccggcctcgggagccggcgggggcgcgccggggagggcccagagacagagcccggggtccccggcgccgcctccgaggcgagcccaggggaccgcgcggggcggacgggcgggcggcggaggcatcaggtggcgtcgccggagccgcaggaggaggaaaggaggcctcggctctcagcgggaccgcgggggccgggagccgggtcctgggcgcgtggaggctgcagggaaaccgctgaaggcccggccgggcccggggaagggcggccaaaggcttgaggggttttgcgcgttcgtccgtgcgttctcgtttccacgcaagcctcccgcccttcctccgggctcccgtctgccgcctccgtccgtgggtccccctcgccctctccgtgcgtccgcgcctgtgccggcggctgttttcgtctctcaccgcgtctctgtttctcttttc

SEQ ID NO: 22935 - DNA, 965 bp, Homo sapiens
  chr6:46097250-46098215
  binary
cggtaaaggtgctcgcttatccagtaagacggacagacgtctatggtagatccacgtttcatttatcccaactcactggaactggctgaagcttctccagacttgtgccggaccttggtgcagccaaagttgctttctccgcggccacctaagctgccaggtgcacattaactaagtggcagaaggccatcggcttggcaattgcctgaggcctttccgggactcgctggtttttaggttccatgaagggcatccagatctaggatgatacgaaaagtgcgtggtgggagagtggaatcaacctctactcttaggtccgatacaacccctccaagcacctgtctaaccaatcggaaagaaagttacattcaacgctggttctagcatccaatccaaggacgtgtttcagactctgctgcccggtcccagccagccctgagctggcgccttagacgctcgcctggcagctgcgcacactcggagcgccccgagcggcgcagatagggacgttggggctgtgccccgcggcgcggcgcctgccactgcgcaggcgcctcaggaagagctcggcatcgcccctcttcctccaggtcccccttccccgcaacttcccacgagtgccaggtgccgcgagcgccgagttccgcgcattggaaagaagcgaccgcggcggctggtgagtacgcgcctcgcgcgctcggcgttctggggggcaatgtcaccccctctccagtcccctaggggctttgaaaatagagatggtgagaccagaccctatgacccactctcccccactacacgcacatcccctggggcgcggcggggacgtccacgaagggactcaaagagccagggaggtggcgggccgaggcggaggccaggaagggaagaggaaagaaaaattagcaggtgctggggaaggcaacctgtggtgttaagtgtgaagggagggaagtcagccgaac

SEQ ID NO: 22936 - DNA, 465 bp, Homo sapiens; identical to SEQ ID NO: 5844
  chr6:4948996-4949461
  binary

SEQ ID NO: 22937 - DNA, 928 bp, Homo sapiens
  chr6:6008704-6009632
  binary
cgtccccatactcagatatttggagatgcatagacaaagggggagaaaggtgcaaaataacgggggtaggacaggctgtggagggtagggggccgaggggaagctgcgggggtcctactgcagcacttggtgacgtgaggtgtctgcaatgtgcggcccctaactcacgtcccgcgggagcctcagactcccatgcagccttcctggccctgggggcggagtcatgtctccccgcccctggttatgtcaccggcctgcgggcggggcggttgggggctcgccttccggtgtccaggggcacggtggcggccccgggtgtttcctttccccgagctcggaggctccgggaagaaccgaaaacgtgggcggacaaggggtggggcgggggctggtggcgagaggggggcgtttctcggaccctcccccgacgtcttccaatggcagggcgggaggctttccgaggggcggggcctcaggggggttgccacgcggcccggcccacggctccgcccctcgctcggggttccgcgtggggccggcccagctttcccggaccaggccaccagctgcgggcccccaacctcgctcagactcgtgcagagcccaggcttgggagtggcttaaggttttttgccctcaacgtccttgccttcctcctgcttatccacctgggatcttcacagcatcattttctgggatcctctccaacccctcccctgtaactctgagcgtggggcgctggggatgtggagtaggcagggctgagggcctcaatgaagcgggtgaacccacgcgcgtgcgcacagccgcccgcgccgcgccccgggccgatccggttcttgcccttgggacgtggctgcgcctcaccgccctaccccgggagggaacccccgctgactttttcctctcttcattttcctccccaggc

SEQ ID NO: 22938 - DNA, 915 bp, Homo sapiens
  chr6:62995371-62996286
  binary
cgatctgtagctacgaagctcttagaacactacattgatcaccatttacttccaaactgctttcccttccctctgcgaagtgaaaatgtccctgtagaccgcgttacatacactttatggtttctctatcaatgatcctaacaggtcacatcgccactgccattagatctccgtagctttggtcttctccaaattaagacgtggagaaggagcactgctgtccgccccaagaacggggtctgtccgcccgagctctaaggcgagcatcttcagggggacagtttctgcgaaggcggggagaggagtccctccccaacttcactcccctaatcaagccgcgggtgagataggcagccggcggtttgtgcccatctgtgggggcaagtcctaccttctgccaaaaggcgcgacgcatgcacaaaagatggatccaggctatctttctctgccatcagctcaggcaaatatttctcctcttccatagcgcggacttcggattgtccccgggcgaagcgcgaggttccgctcgctcggacgcaggcagggtcttggggcagcgcctggctcccgcgctgctcctcctccgcgcggcgagggatctctgtgcgtcctcactggcccatgcacccagcacctgcgactcccgccgtcgggctgcgtggccccgcgcccacacctgcccgtcccttccgtcgtccctcgctcgcgcagagccccggctcacaccagcggccttaactggagaggcgggaacaggacgcggcccacctccgccaaccactcattggtggtggtgccaggagaggcggggcgctggcagaaggccgcgggctctcattgggcggtagcgcaagtcgggtggcctgactggcaggaggcagctgcagaggggaagggagctcggaagatgcaaac

SEQ ID NO: 22939 - DNA, 1998 bp, Homo sapiens
  chr6:69344116-69346114
  binary
cgtcagccaactgtccaggaggcaaaatgactatctatgatgatagatagacagacagatagatagttagattaaaaggtggggaaacatcccttttccctttttcctttctatataatctggttttttctcttcaccccttttctcgcttcttcccaccccgtccccaaacctgttactagggaaacttgaaaaagaatcagatacattaagactacaaaacgaaacaaaagtttagaccccgaaaccatgattccattgccaagcacaaagcaatgcaagagcccaacgtcggtcgccgcaccgcgatcctgacaaagcctgtatggagccagaacaaataagatgttaattgcagcctcgcagagaaaaaaatactattgttccagccagagacactcagcagctcggtagctgggatgtgccccctccgctgcggactggatcaattctgaatcccggtactgaaatgacagctctctggctgcgacaggtctgcgctgaaagaaagagaaagacgatcaagtccagcattcacttcccacccttcagagtcgccttcccatcctccgcacccccctgcctcgcctcccagtgagtttctcttacagttggtcgccgccagccccagcggtgggaactgaggatgcaaaaacctcccagacgcagaaaataccgctttcgggacgtgcttgggtttgagtagccgtgacgtgcaggcgaaccgcggccctggctggagctccgtggagcccccctcccgccagcctctcccccgccctcccgccgggactccctcctctcccaccccgcggctcccttcgccttctctctcacacacccgcccgcgcccccggcaggcagaactccaggaagtcgcagcggccgcgccgcgcgagccgagcctctggcgggcggcggggcgcaccgcagctgtgcataagaagggcgcgcggcacccgggacgcgcgcgcacacgagcacgcgggaggccgccgcgcggacgcgctcccgggacacgcgcaccccccgcgcgcgcgcccaagggagagcgagcactgcgcgccggcgcgcacacccgagacagagctttactatctcgctccctctcgcgcctccctcctcgctgggcattcaaacagctttccgacatcaccagccaaggatttttttccccgctctccttagtcgccgtccgtccatcagtacctgcaggggggaggaggaggagggaggaaagcggaaagaggaaaaagcataagcttgagccttccgatccgaccacgaatactcctgtaataaacccaccgccccaacaaatctgccatagcagccgccgccgccgccggtcacttctcgtctcagcgctttctttgcttcttggtttgttgggggtagcttttatgaaacaaatctttgctattaagccacttacattttggggggttccttagagtctcccttgggggggcttctccctccctttagcccccctcggtttggaggttggattcagttggatacggcgcaaggttctgggctcctgctggcttttttttcctctctctcatcgacccccctttggttcccaccccccaccttttgcttttcgtatgtatgcatttttaaaaataaatcctgattttggaagctgagccggggaaaatgggcaacggtgattgggaccgaaggggagtctctccgtcactgttgctgggacgcgtgcctgtgctggtgtcttagagcaagagcctccctgagctttcggagtggaaggtaaggaagggggtccaggggtcaccttttctctgccgggggtcgccaccgtggagctttgggcttaatgtttgagaagggaggaaaatgaaaggaaaggctgttgctggcggatggggaggctgtgagcagatccgactgtctgcatttacttaaacgccgcagttgaaaagttagagaagtctggttttcaagagatgtgctgggtcagaaggaataagc

SEQ ID NO: 22940 - DNA, 1276 bp, Homo sapiens
  chr7:145813030-145814306
  binary
cgcggacagcatcacctcccgcccagggagaggcgcgcgcctccttgctccgcccccgccccagctgatggaccccggccggtcggctcagtctcccttttgctttcaaacgaggccagggcagggcagaagggttttgacagccagaggggtacggtaaggaggaggaagaggaggaggaggcggaggaggaggaggagccgaggagggaaccgagaagggaagagaagggagggcttccctccgcctcgctcgccgcccgggctcacaggagctggcggcggcggcggcggcggcggcgtctcctgctctccgcggctgttgctgctgctcgcgctccgccgcccgggagatgcttcctcgcgcggcgcagcgctgaggccgtgcgtgcgccccggctgcgctgcgcgctccccacatacacaagctctccatgtgagctgacaggcgagtggaaacccctcgagtcacgctgcccggcggcggagggagcgctcgcccgcagtggcaacagctgcaccaccgtccccgtcgctctgccttcctcttctgcagcctctgctcttctgattacctccctcccccgtcctttggtgatttttttttttcaagaaggagagggcggggtaggtgtccgttccctcccctcttccccctcctttgccttcttggtttgaatttcctcccccggcgttgcactggcacacagtgcaagaggcaatacccgcacggagggagaacgaaggctgagactcccctgccgctccaagcccggaagaactggagcctggaggggggtgaggggagaagaggaagcgggaggggcttggcttcctcgcgtatttgaggacagcccatctcccttcaagaaccctacggagagtcggactgcatctccgcagcgagctcttggagcgccgccggccgggaggcgaaggatgcaggcggctccgcgcgccggctgcggggcagcgctcctgctgtggattgtcagcagctgcctctgcagagcctggacggctccctccacgtcccgtaagtagccgtctcctcgctctgctctggagcagtttcagtgcggcattgatgtttggcaccagggtatcaactccgaagtgcatcgcagtgctggcaccctgatgtgtttgtgtctccgctgtcacacacttgcagccactgcagtagacaaactcgaaacccagcgtttctgttttggaagagacagggttgtgacgctggtgatgtttctggaaagttgttcctggtcttggtgatc

SEQ ID NO: 22941 - DNA, 939 bp, Homo sapiens
  chr7:155247258-155248197
  binary
cgtccgtgtcctgaagcgcacggcgtctggaagctgctttcctgctcgccctctccgaggcccctctttgtgcagcgagcctgagaaatatggaggaccgtcctccgcaagcgggtggtcgcgggcgctctccgattcctgggtgaagctagagggaaaacggggttcccgggtcagtgccccactttccatcccgggagaaactaatgtccggagagggctcgtctgatccgcacagaaaggccgaccttgagggcggcggtcgttcgggggagaaagcggaggctctgggctcgcgggagcgcggcagccggggctggcatcgcagaggagagacacgccactgccccgcatccccagaaagcgcgaggcgccgtcccagctggggcaggcggccgaggccggtcctcatgcgcgcttctcgaagcttcctgaaacaccttgcggagttccgtgtgtatagaactcagcaccgcccagcccctgggcagctcaactttctgcagccccatcccagcttccccggccctttgaacggtgacccctcttaccgctttcccagagttgtttcgtgtttgggtccactctggggggcccggtaccctctagttatctctctcttcatttatttctctttctcctattcctccctccacctctcaccttcctcctttccaggagagcgacccacgaattcctcttcctccagccaaccccagggcccagcccgcagaccctgcgagggcaggtctctgcccaccggcccgccaggcgccctggaggtgacgctctgcttcccagagtctctgttgcagccacgaattggggtctgggtcgcaggaaagcacagggctgaagcccagcgtcttggggccatttatactgaggcagtcagaggcaaagagtcccaagaattcagaaaatacttctcaggaagcc

SEQ ID NO: 22942 - DNA, 1960 bp, Homo sapiens
  chr7:155258739-155260699
  binary
cgctgagtttttttttttttttttactcctatgtttattacattttaatccaacagcatataatctaagctgctccctcatggagagccgcggctgtgccacctgcctgctttcgccatggagaccggagtcaggcctgcagggaagtcggtgcgcctttcccaagtcctctgcccgctggttcctctcgggcctcccgggctctgcgtgccgcggatctggacccggactgcagacaccgccccacgactgggcccccggccagactgttaccccacaggaggagggttccctaagtgtgcagaagaggaaagctcatttataaagtccttgctccttcgagctgaacgacccccgcgcccgaggcctagctgtgtccccgccgggcccaggctgagcttactccacactgctccatagccgggcagagactccgcgagggtctgggagtcctggcctcggaggacccgccgccctgcaggcctgcccaagcaggcgcccccgcgagagtgcgggacagagagggcctggcggggctccttggcgctgagagccctccttctccgctgcacccagctctgccaacggggctggatgagtgggggctggagtcagaatcccagggtctacacccgccgacagcagcaatgccgacccgccctgcctttctcctaaggagcggagggaaggagccatgtgaatgaccccagcctgaccaccaagagggcgccagcatttctgttttcctagagtgaaaaggtcaaatcgatgggggctcctacaccgctggacacaggtgcgcccgggcgtccagtgcgcgcaacacacgcccagacactctatatgcaaatatgcctgccgccgcggagccggccgggaggcagcgtttgttcgctggggttctgctagaagtcattctgtctcccgctggtttaatatccgccctctgcggtctccgctcgcctcggcggctcccgaagcgcccccgggagggtcccggctccgccgaaaactgcagcctgccaggctgagccgccgcgcgctgggaggttaatagcgactgacgacaaagggccaaggtgcaattcctaaagcggggattcgccgggtgaggcagaaatcagcctccggggagatgggtccccccttcccgacgcgcccctgcacacactgctgccccggcgccgggcctccgggcggggacccctcttccgggcatcgcggccccattcggcggagagctaggccctctccaggcctccaagtagggagcggacgtgggtggtggggaagggaagccgccggcgggacggagagtggggtcccccggaccctgggtcgggcaggcctggcgctggcagctctgttgcacagatttgtgagcgatgctggtggccgcattgccgcgcggcgcgaaccccaagtagaccattcatgtttttattaataatctcaaacacttcattatatttatgctgcctgcccagagaaaataaaaggccattcttgaaatcgcctgaaatgtaataatattcattaaagcgcctcctaattatgtgatttaatcaagcgtggtgcgcccgcgctctcggctctcgctggaaaggctggcgatgacggttattattactgctgttgttagtggcctcgtgatagcagccggccagctcttcagtccaggcccagtttcctcagagagactcggggagccccactttgagggatggggttccccggaacgactccgaagtcccggagaccaggcgcggcccaggccctctgcccttctccagccccagccccagccccagccccagccccgggcaaactcttccaggccgagggcaggactttctccagacccttggggccctctgtgtcccctggggacgcccgacccggctttctaggagggggaactccgggtcctgagcccgggccccgccccgttggctgttcc

SEQ ID NO: 22943 - DNA, 863 bp, Homo sapiens
  chr7:30721581-30722444
  binary
cgagggctccggcagcgctgcggggccagcacgttccgatctggtccaaggtcgtgttgcagtaggagtagggacctggcggcgggagagagcgcagtagggctcagaggggcccgcagggacgcggggctctcggagcgcggggtcaggggcgcacccagcgcgcgagagaaggagcccgcgcagcctccgaccgctcgcctcccgcctaccctcggggtccaggggtggcccccagccgtccaagagcagctcttcagccagcgccaggctgcagttggcctccagcaggctgtggagcagtgccgcgtccatcgcgtcccgcagccgcgtgcggagagggagtgggagtgcgcgcccggcgtgactgcgagggagtggacgcgagagtgagcggccgagagggcgcggggtcctggcccccgccagcccagccccgatctcccgggcagcctttgggcgccacctccggtcgcccagagctgtcaagtggggaccttcccggagaggagccgccgagtgcacggagctgcgggtacagccgctccgccgcggccaatggctgcgccggggggcggggccgggcggctcctctcggaggggctcagtctccagcccccgggccctccaccctgcccaaagtacggcttctcagttcgcagctctcttccactcgcggcgtccagaggagggcggtgggctggagagcgtgggcctggggtgacggaatgctctgtgcggggatcgcaggcccccgagctgcagggggcagcaaagcgcgcccacctgcccgcctgcccgaggagaacaccgcagctctgctaatcgagggacagccgcaacccaaagttcggcagctttcc

SEQ ID NO: 22944 - DNA, 955 bp, Homo sapiens
  chr7:3082731-3083686
  binary
cgcggggggctgtcctctcccatctcccagctccacacccacttttggtgcggctgcccttcctccctgagccaggccccaccttcccaggagcctctgagtcaggctgggctgtggtctgcaaacttccgggcctttcaggtgtcagaaaagtttctcttcctccctctggggcaggtgcaccaaggggctgcagcctcctgacccccgattttttcctgtccagtaggaggaggtgggggctttgctgggcggtgatactcagagacgctcaaagagacacggaggagaggcacacgaggtggaaagtgagggagaaaaagggttggaagggaaaaaggggagaggagagtgagagagagaaggggggcagggggacagagatggagagggaaggatacccccagcatcgcgggaccagcgggagccactcccatcccccgacgccccccccgccaccgtgtcatctcactgatgccccccatctcctccccgtgccctcttctcttcccccaactccccgcctcgtgctccccctccgccagctcccccatccccgctgcgcctacctggggcgctcatgctccgccagccagctgcgcggggcgcctcctccacgcaggcctccggcttcctccaggcgaccaggccctccgtccccccgggcccggagccgtcctccgaggggcgccgcccgcccaggggctgcagggccgggagggggctgcgggcggcgcgggcaggagtccgaaggccagaggaggcaggagagaaaaaaggagagaaagtatgtcataggctgggaggggcgggggagggaaatgcaaaacccgacaggaaatgagactaaaaaatgcgaaaggttagaaaaagataaggaagagagggagggggcggagtcggtgcttcgggaggagggcggcaaggaggtgggggtgggagtggggacagggcc

SEQ ID NO: 22945 - DNA, 1809 bp, Homo sapiens
  chr7:37487365-37489174
  binary
cgctcgcggcacagcaccgacttcccaaccccaaacacacgcgcgcacccccgggacagctgagttctgtatttcctcttcctcaaagcgactccggcgatcgcagtcgccactctccgctccgattcccgggccccctggcatgccgccgcccccttctctgaaggcgcgcccggtgcgtcccctctccgaagccgagatttccacgaagctccacaaagctccccgccgcctctctcggtctcggcggagaccccggtgtgtccccgggaggagagtatttactaaccagaacctcaggggctcccggctgcccagaccgccctctccggccctcctggcccccattcctctggcccatcaccgccccctcccacgagcgcgctcgccgggggattccctcccatccccgagtgcaggagaagacgccgagtctgagccgcagccgcttctctagctctataggaatcttgactccaagatcccagccccacatcccccgtccccagtaaccccgcgccagcgtcgcaaccctcccgcgccccccctcccgcagaccctggtcgaaatgtctcggcgggctcccgggccccgggccctgcgcttcatccgcgggcgccgcacctccagcgccccctccctccgctcccactcccactcccgccatccccggagctcagacttccccaactgcagagcgccccgacgcgcccgcagccctcaccctgccgagcgcggcggccacccccgcccgagccgcggcgcccccagggaggaaacaaaagtgtctccgcggcgcccggagtcccccggagcaggacgcctcctcccggccccagtcccggccccctcccctgccgcgccgaggtcagcgagtcggggcgcggcgccagcccaggaaactttacgaacctgcttggggtcgcaggacagcagcggcaagggttcccggcgatcagagctccggcgacccgccaccattgaaggggaactggaggctctgtcgcccagcgtggggccgcggcggcgtgggtggctctgcctctatcctgtgcccatcctcgcccgctcccgctcgccccagcacacgcacttacactctgggtcggccggctgctgcaccgccggctgccgctgctctcacttcctcttccttcctcctgctggccagagacacattttgcatctgcaaggcatccggagatcagccgcgaactctcctcccgagcggacgctgcggagttgcagccgccgcccccggcacctgcgccaggacactcgtggtctgcgcgttcgccttgcgcccgcaccctgcctggtccctgcccactgcactttgcctagggggatgcccacgactttttgaagtccccctacttaaaagacagaaatgtcaaacaccatgcatgcctcagatctgctataaataatatgtgtgcagagcatgacttcgatgagctcacacacggcgtttggaggcactaattaactccgtcaccctcatagcgccatctccgggaggccaaaagcgagtagcatcttttcacatccttttttaatttttggcaaccggttccggatattaaggggaaacttcggtgggctgtttgaacgctactttaagacgtgtttgttttgacgctgtgcctctacccttggacagagtggcaaaaaaaaaaaaaaaaagtttcctccctctccgtcgacatctatgtatttactaaccctgcaattgaaactacaagatgtatttctaaccaattaagccagggacttcctaattttgcataactttgcataaggcaagac

SEQ ID NO: 22946 - DNA, 947 bp, Homo sapiens
  chr7:37960179-37961126
  binary
cgatgcctcccaggatgctagtggcaccactgccactgcatttcctgttggcagcagtgagcagtgaaaaccgaagcggcagaaggcagtggcagcaggcagtggcagcaggcagtggcccaggcagaaatagctcccgcgcgattcactggagccttccccgggccctggtcccggctaccgggactcgcgcgtccggatctcaaaagcggcagaggccaccgaagggacaggaagcactttggtccagaccacactcccggcacagtgcggaaagagccggcgggagccactctgatcccggacgcctcagcgcccccttgggcttgggcttgccctcgggccggggaaggctgaccgcgatgccaggacgcgctcccctccgcaccgtcccgggcgccctgggtgcctggctgctgggcggcctctgggcctggaccctgtgcggcctgtgcagcctgggggcggtgggagccccgcgcccgtgccaggcgccgcagcagtgggaggggcgccaggttatgtaccagcaaagtagcgggcgcaacagccgcgccctgctctcctacgacgggctcaaccagcgcgtgcgggtgctggacgagaggaaggcgctgatcccctgcaagaggtacaggtcatcggcccgcggggcgggagtagggagccgcgcgggcatggggagggcgaggtcgcagaggcctgcgccctgtaactctttccggccccttgcagctcctcccttctcccagagagatctttcgcgaggagggtctcttggggatagcatggtccgggactgggaggggcgctgcgcccaccgagggcggcctgctggcgggggactcagtaacacccagcgaggcggtggcaggtaaagaagggacccatccagggcgggatcaagctgcagagtgccccatgcccaggttcgcccctgttctcac

SEQ ID NO: 22947 - DNA, 843 bp, Homo sapiens
  chr7:43151985-43152828
  binary
cgaggagccagggttggtgttggatatgcccagtacgcgtgctgggtgttggaaggatggggccggcggtaacaagaatcgatatatatttaccgcgggggcgggggtgggggtgcgcggaggctgcagggcggggcagcgctaatgagagcaagcccggcttgtggttggttctggagtctggtacccacagaggagcaggcagggagggaggggatgcaagcgggaggataaagcgatgaagtgtgctgcgttaccgcgcatcaggcgctgttgttggagccggaacaccgtgcgactctgaccgaaccggccccctcctcgcgcacacactcgccgagccgcgcgcgcccctccgccgtgacagtggccgtggcctccgctctctcggggcacccggcagccagagcgcagcgagagcgggcggtcgccagggtcccctccccagccagtcccaggcgcccggtgcactatgcggggcacgtgcgccccccagctctaatctgcgcgctgacaggagcatgatctgtgcccaggccagggctgccaaggtaagcgggcgtagcgcggggacactgtctgccgccccttcccccccgcccttctctgggcggcttccccgccgcacgcgaggccccggcagcgccctcccttctcggggccgagatccaccctcctccccaccctctcgcttctcccgcgaggttcaattgtcagcctgggtcgcgccgccgcccggtccgggccggcatccccgggtggcgaccccggcttgggtactgcaggcgcacccggccctcctgcggggtacggagagaaacaaagaagcccccaagcgggttc

SEQ ID NO: 22948 - DNA, 484 bp, Homo sapiens
  chr7:63767582-63768066
  binary
cgaaaaccaccgcgccctgccgccctgccgccctgccgccctgcctctctttctaaagctatgcccaaaccccgagcccggagcatgccgggattgtagtcctgcagtcctgcaacctagggactgcgagaggttaagagactacatctctcagcatgtctagctaggcgcgcaccgccgtgtccccagggcttcgcaccgcccccagacttgcgcatgctgggattgtaatactgtcgccttgccaccaacgggctacgagcggttaagagactacagctcccaggatgtacggtgatggcacccgtttggactccgcccctctgcgcgtctagagctgttctcccgtgcggaggggatcctggctgttcccaaatctcgcctgcctgcgaggagccagcgtggcccgggcagctgatctcaacctgtgattgtgacatcacccctacctgaggaagcctcttccagcctgctcaaggttgcc

SEQ ID NO: 22949 - DNA, 976 bp, Homo sapiens
  chr7:71801464-71802440
  binary
cggaaggcaaggtggccggcgcggcccccagcccgcggggtgggtgccccagtgtcggagccaacaggtacgggaggcgctgtctgccaaccatctgcccactctgagcaccagggcccgcgacagcccgggggtttggacaccctagagagaagcgaggaccgagggaagaagaaaagagagcgcgcgcgcgggtaagctagggagccggcggcggcactcacctcttgctgggccggggctccgcagcccggcagccgaggcgcctccgcacagcgcggggggcttcctccgaggcccgcagggagggggcggtgcggaatggatgcgccgagcgggcagcgctcagcctctcgctcacacccccagcaggcagccgcgtccccgtgccggcatcctcgctgccgccggctccctcggcgcccccgggccgctccccacgcgcgcgccgggacctgcacgagccccctcgtcgactcggagcgcgatctgggcgcgtgcctccctgtccttgtcctctgctctcgtctggggacgtgtgccccgcaccccctgcaccgcgcgctcctctacccctcccgctcccgctggccgcgcgggttcagcccatgtgcgcggctgcctcgctgcgccccggagcccagtggccgaggccccgctggagttgcgcgccctagaaactccatgcagctccggcctcctccccagctcctccccagcggatcccccagggccttgccgccgacagcaccacactcctcgctctgccggcgcccgcgttcaggagccgggcttctgggctcgccttggccgcctgcgccccagctcctccgagggtcggggagcccccaccccccaacctccgcctctccaatggctccctcggtttccaagcagcgcaacctgaggaacgcctcggcgcgcgcgcactcacactcgcgcgcacacacacacacacacacgcatgcacatgcac

SEQ ID NO: 22950 - DNA, 1301 bp, Homo sapiens
  chr7:79082826-79084127
  binary
cggctgggcagaggtaggagagcttggatgaggttgtgctgtcccttgaatgacactcaaggctgtggccccgcagcagaggaagcagtggtggtggcgtcggcggcggcggcggcggcagccggagcgagcagtagccgagctggtgagcgggtgtggtgggggtggggaaggagggtagggatgccgggggccactcctgcgtggtgcgagtgggaacgcgcgcgcgcgcctgggtgtgtgttgttagctgatatccatggcagctgcagtggcagggtgcgtgtgcgtgtgtgtgtgtgtgtgtgtgtgtactagttctactgtactggcagacgggaggaggcaggggaggaggggcgcgcgcgccgggtggggagccacggagggcttcgccgctgcctccctccctccctccgcagcttgacccggtagtgaaggcagagagagaggcaggctgggtccgcctggcagcctacgggaggaggcgggagccgggaaggaggggagcctaggcccggcgtggggaggccggcaggaagggcctcgagcccagtgcggacctttcttcagcctctgtgcgaccgagccgcgcgccaggctcctgtgcgaggaggacgcgctgactccctccgacctgggctccgatggagcagaaatagcgggacctggacttgtggcgcgcctggtgccacatctcgggctctgcgagcgtcctggcgcgggatcctgccgtgagaaggagttggggcgggggacccggcggggcattgcgggagaaggcctgggatccctgggagccttgtagcgtgggggagttcactgtgtagagaggtttcatgtcttcatctatatagtcacttatttgtcttaaagttctcgaaattccctcttagagaaggagaaagttagagaactggaggctgcgtaccctgattacgcagaagggaagcagcctcgcattccccggggcaggcccccgcccgcgcgtcccgccagtaggggaatttagcggacggctgcggttgtctggtgaaaggctatccaaggataaggggcttcacttttcccaagtaggggaaagagaaggggtctacagggctaggggtggagggagcggatgcagtgagcagcctccgcagagaaattgacaatttaaccagggacctgcggcagagacaaggcggagacactcccttgcccaggaaagccgccagagtccggcttgtacctggggaagaatccttaagacggtctggcccaacactcctttgctcacagagaaaggggagaagactccc

SEQ ID NO: 22951 - DNA, 969 bp, Homo sapiens
  chr7:87256927-87257896
  binary
cggtgggtagtgagaagctctaggaagggggcgcttccgaacacgcgcgtcgaggagggcgttccaggactctgagggagcagcccagctggaccgaggccgcgtcgttcctgggcttactattcccagacccggactcccgattccggagtcacggcccaggacgcgaaaagactctacactggcaccacgctcctccttaggcgggccgtcagtcccgggtgcgggctgcgctggaggctgaggtgggagcgacatggtgtggaggggcaagaaatgtcggcactagacgcgccaagaaggagattctacgagcaattcccccctcgggccattgtgttgctgtttattagcccctgggagggcgtcaggacaaaaggaaccctcctcccttcttagtacttaggcccaaggtcgggtgtgggagccggcgcgctgctttctaggcaggcactgaagctacggcagccacgcaaataggtatcagccgttaaagcttggctacaggcaaggggggggcaataggcccctggcgctgtggggccccgcatcccacaatccccgcggctagcctgtgtggctactggcggcagctagcgggctgcgaaagcgagcccagcgtccttgacagcagcccacgcgtcggggcggggcttgagcccgctgctttaaaaggtccgcgcggccggccccgcccctctggtgccgcgattggatccggcgggggtagcgttgatttgataggcgcagagagggtggggctgcgcacgcgaggccgggggccttgccgctgcctcccgggctggggcacgagtggctgcggagtgtgggtggttgggcgtgaggggccgacgggctcgcgcgcgcgccgtctgctgaggtccctcgggaaggaggagagcgcctgacgccgacccgcaggcgcagcccggcagtcggcggcgcgccgagggcggaggtggtgcgtgc

SEQ ID NO: 22952 - DNA, 847 bp, Homo sapiens
  chr8:11204494-11205341
  binary
cggagtttgagaaccagcgccttggacccagcttcttaagctactgcgcgcaccggcgtcccgctgggggcgcgcgagccccacccccagagatgctgactcagcaagtcgggaggggttgggggtgggacctgccaatctgcatttccaaccggcgcccaggtgacgctgactctgctggtctaccgtcttgggggtcacctaatttttcagcgatgcctcccagctggggaggccaagaagtgcctcgctcaaggtcttccaacacccgacctccagaccctcaatcctgggccagctacaccgcaaacctttccagctgtctctcctgcgccctgcgtttcttccccacgtcacttgccagggagccgctaaacagcaagaccgcgcgctctgcggctccagagtgcggatttcggtcgcgtgcggctctgaccgcgtcgccccatccctggcggggccacgcacggacgccatggctggcgccgcggagccgggcgatgcgcgcggactctcccggggccctgactgtccctgagtcctccctgcggggggcgtgcgcggcccgccccccgcggcgccacgcggcccctcctcggccggggattggtgcgccgggcggggcggggcggggcgggataaaggcgcggggtctggctgcgcggggtctgcgggcagctccaactctgggttcgtagtttgcgctgggtgcgcaggaaggtcagtgtgggggtcgcccgacatttcccccccgcggaggtgggagccgagccacatcttggagtggggactggccgcggagcgggttgcccagggccggccgaggtcggggcgagccctgcgcggc

SEQ ID NO: 22953 - DNA, 686 bp, Homo sapiens
  chr8:11550022-11550708
  binary
cgtgaaactatgctcatgcggatctagattgaatctgatccttcgggccgcggcggctccgcctgggagggcgtggcccccgcgctggggcgggaaccggcttctggggacccgcggcctctgcgcctcagccgacctccaccgcgggtgcgtgcgggggtgcgggggtgaggggtgcggggctgctccgtcgggaggctgggagggagagcaggcgccgggacccacgcgagggcgcggacggacggggggcgggaagcgaggctgccgaggggaggaagcggggccggcgcagcgggcgccaggccgggcagaggcgggggcggccggccgggggctgaccccgagcgccgccgagtttgcgccgcccgccgccccgcgctcgcctccagccgcctggggttccgcggcggccgtcagcgcgcacctcatcaataaggcctgccaggcgccggccccgcggccatccatcacccgggctgcacccccggccgcgcaccgaggcttctgccagcgcctgcggggcctctgcgtggagtgggccggcagcgtttttctacccggcaacaaatacatggctttattccacttcttaatcccagtgtctgttaacgatgtggtgttcatttgttcctaaagagctgtaaggaagcttagaaatgattcggcaagctgggcgcggtggc

SEQ ID NO: 22954 - DNA, 980 bp, Homo sapiens
  chr8:132052356-132053336
  binary
cgccgcccgcagggtccgaggctttgcccgagcctccactcccgctgccgctgcctccccggtgcccgtgaatgaagcgctgctccgtgatgtgtcgcaccgccgtctgccacagcagccgctgcggccgggaggcgctcctgccgtcgccggccgggggcgtcgggtggatggtgtagagttcctcgctgcctgtaaggcagcgcacatcggagagctccatggctctgggccgcagggaaggaggcccagaaccttggggaggcagccggaggaggggttcctaaagactcaaaggcggcctggtaggagcttggcaaggatcctttttatcctaggctgccccgttgcaggagccctgcgctagggctccctgtaggtcgggtcatactgtgcccaggggcaaagggcacctggaagatcgcggcggacctcggcgtccttgcgtgctgctctcccgccagccggcgcagcttgggtacgcagcggcagtggctatttgtcctcaggagccgcagcgctgtgagccacgcagccccttcctgggctcaggctccttggttgattctaggctcagcgttttggcgcagcctttgctctccaagagacgcctaagcgcctgggcgccgtgcttctgctgcgcgtcgggcgggtcctggctgctgcactgggctttggacgcccactgctccgcggctgcagggggcctggccggcggtgaccggcggcagcgatgggtgcgaagttagcagatgtggctggaatcatcgcccttcggagaactccattgcgccgggatggggagcaggggcggagctgggggcgggggcaaagaaggaggaggagggggtcacggtgaggtggcggggcgccccgcgacagggttggagaggtggtagcctcggcgctaacaattcaccaaatagttaatttggaggaaggggtatgctgaggctccctcctaggctctttcctagttc

SEQ ID NO: 22955 - DNA, 640 bp, Homo sapiens
  chr8:33371797-33372437
  binary
cgttttaaagcctgtagccacaagcgtttgaaaattcaaattctagcgtcaaggtagaagcccccagctggcgtctggggcagccctgagggaggtgggtcgtcgggttggcggatccggcttgggcccgccccgccagtgtcggcgccgggtgcgcagggacagcagagcgctgtcttgggcatgggtcgcaggcggcgcccggaacgggccaggggagctggaggctgcagactcgggctcggcgggtgtaggaaccagtggtgtttgcttgggttttgagaaggcgcgagaagggtcgcgcctgtgcgaccgccctgtgttgggtcccccacgccgcgtcggcattgcttgttccctcttcctgcgctttcctggagggtagaattgcgtccgattggccttcagttcccgaggagctgcttccatttaggaccttgtgactctcatagcttccacggtttcgcaggagcccgaggaggcaaacttcatttgtgccactgcacaggcgggagcttcggaccctgggaggggtggcgcgagagagacgtgtcgccagctgctcggagagggactcttattcagcctctaaggcgtcaattgcgcctccagggttccaggagtccagagaaagcccttc

SEQ ID NO: 22956 - DNA, 1259 bp, Homo sapiens
  chr8:55366368-55367627
  binary
cggtcatcgggggtaacgcgcgtccccaaatcccctctcgctgtcgccctttttttcagtcctcacggggagaggccggcgcagcagtggagcaccgcaggggctggatcggacccgcactgcagcatctgcagggctccgacctggtgcgggcctccaaggcagggggcgcgcggcggcacagccggtggccgcgattttccgggccactccttccccccttacactcccctcccgcccgcgaccttcgacctccatcctggacccacggggtactggcccggggacaaggaggagacgttaaaggtatcaaggggcgcggcaccgccgcctagacggcgccgggacgcgaggtgcgaatcggcggcgtccggctgcgctgccctacctgggaggtgcgggaccctcggccgcgctccaccgccgcgcgccacctcgtgctggcctccgggaggcagccgcccgcgcacgatttataaatgcaaaggccttattgttgttctttgttcagggataccattgtctagtcatccacgggcagcctggagttttcccagggtttgcggcgcgcactcccctcccccgcccccacagacttgctctccagcgccaacccggatctgcctaggtgcccacgggtccttcccgatcgacttgagtgtccttcctccagcccctgctttcccagcatcgaaaacacaaaagcctgccggaaatcacccagcctttgcctggtcactcaggggcccacggataagcgtggctctgattcctccaggtcagccccacggttcgccacctacccgagttaatttctgcgcccgctgaccaaaggccccaactggcaacgggcacagcttcttggtgcgctagtcgcttccttgcccagcctttagagcctcgggtccggcccaaggacccggggacgtgagcgcaattagtagccaggagccctgcgaccctggaccgtgcagtgctaacgcacccgaacggctatgcgagcggtgtactcggctcttacttgtgaaagttgtttcccccaaccccctgcgtaaatctcttgtgttgagaaaagcaaggcttgcaggaagccactccggatgtttgctgctttacatgtggcatctgtggctggctctgataacgtcccggggcaccacgtattaaagtgaagagactgaaatagaaggctccacacaccgcgcgcgggtcagcgacgtcgccgccctccacactgccccccgaaatataagacaagc

SEQ ID NO: 22957 - DNA, 946 bp, Homo sapiens
  chr8:55371623-55372569
  binary
cgtggaaggcgctgacgctggcggagaagcggcccttcgtggaggaggcagagcggctgcgcgtgcagcacatgcaggaccaccccaactacaagtaccggccgcggcggcgcaagcaggtgaagcggctgaagcgggtggagggcggcttcctgcacggcctggctgagccgcaggcggccgcgctgggccccgagggcggccgcgtggccatggacggcctgggcctccagttccccgagcagggcttccccgccggcccgccgctgctgcctccgcacatgggcggccactaccgcgactgccagagtctgggcgcgcctccgctcgacggctacccgttgcccacgcccgacacgtccccgctggacggcgtggaccccgacccggctttcttcgccgccccgatgcccggggactgcccggcggccggcacctacagctacgcgcaggtctcggactacgctggccccccggagcctcccgccggtcccatgcacccccgactcggcccagagcccgcgggtccctcgattccgggcctcctggcgccacccagcgcccttcacgtgtactacggcgcgatgggctcgcccggggcgggcggcgggcgcggcttccagatgcagccgcaacaccagcaccagcaccagcaccagcaccaccccccgggccccggacagccgtcgccccctccggaggcactgccctgccgggacggcacggaccccagtcagcccgccgagctcctcggggaggtggaccgcacggaatttgaacagtatctgcacttcgtgtgcaagcctgagatgggcctcccctaccaggggcatgactccggtgtgaatctccccgacagccacggggccatttcctcggtggtgtccgacgccagctccgcggtatattactgcaactatcctgacgtgtgacaggtccctgatcc

SEQ ID NO: 22958 - DNA, 550 bp, Homo sapiens
  chr8:55382673-55383223
  binary
cgggaggcggcgcagcgcggggatcttgcgggaccaggccagagaccaggaccgtcccccaaccgttcgcggccgcgtagccctgggcggcctgggcctgcccttccccgcgcagggctttccctcctgccggtcgctgccccgcacatggctctggtcgtactcccgctccactgccaccactgcccacgccctgcgtccccgtttgaccgcgtggagccggaccccgccttcctcgccccgcgctgccccaggcctgccccgcaccagcagctaagcgcaggtctctactgcaagcccgcagccccctcatcgctgggcctactggcgacccccggcgccatgcgcgtgaactgtgggcgacgggctcgcccttggcgggcggcgcgcgcggtttccagatgcagccgccgcgccggggcagctgacgccgcctccaaagacgcgccctgctggacggcgctgaccccacgcagccagcggagtctcctgggaacagcccaggcgccggtgccgacttcaacctctctgctcaggcctcttgagttgc

SEQ ID NO: 22959 - DNA, 2250 bp, Homo sapiens
  chr8:56013535-56015785
  binary
cgatcacagatttaatttttcgagtcatttctggagttgtgggaccacacagctagtttgcaatccctatagctttaagagaaggtatttctagttttggagtaaggagtaagggaggtggcgcctgctccgggctccgccactccccgcccgcgggccgggggtggggtggcactcggtttcccgcggctgccggccgcgccccgcgccgccgccaggggtgctgcgcttcccacctgccgcaggacgcctcgagggccggtgcggtgcccactgggctgccgctcctcccggctcagagctttccagccgccgagaacgtgcgagggaccccggcgtcgggcaggggcctgggccgcgaagggcgggagcgcctccgcacctgcctgagctcaggcacccccgcccgccggagaagccgggagccctcggaatgccggctgcctccaccgagggcgctggctcggggctcccagcggacccgcccgccctcagctgccggcgcggcaccaggctccgcgctccgagccccgtacgcctttctctcccctgcactctctggcaaggccgggcacgcccactgccgctgctggcctccgagcccgggcgcccgagttacacccattctccccaccatcgtcggccagagccgcgctcccagcccttctccaggtgctggcggctccgaccggaatacaaagaggcctgctcctccctggcccttgctgccgccacacccgtccgtgcccactctccgccgtcctccgcgagggctgcacgcagggacccctcctctcagcgcgctcctccccctcccccagtgtcgctcaaatccacccagcgttccgaaatcccgggagtgggggccttcgactgtcaccctcaggcccccttggccgctcctcccggcccttgggacccgccagggcagtcccccaacccccgcccgccgctcctctcggtcccggcccctcctccgggtccctcctcctccctcgcccctcccgagccagggtgggagcgacggcagctggaagagaagggatgaggtcatcctctccctcggagtcagctggtggaggagaggaagcgggaggagggagcgcgcgcgaggggaggagaggaatgtgcaggtccgaggagcgccgcggcggccgctgctgctcctgctgctggcggcggcggcggctcgggcggcagcagcgaagccgggacggcgaggagcgcgggcggcgggcaggggcgcgcgcggggcgccgcgagcagcttggctccgcgcaggcagccaggcggcgctcctgccggccccaggcgcgccgctagcccggcccagcgcccagcccggcgggcggcgggcggcggcggacggcaggcgagccgacgcaggagcaggaggagggggagccgcaccgcctgggagggaagccggggcgaggcgaggaggtggcgggaggaggagacagcggggaaaggtgtcagataaaggagggctctcctccggtgtggaggcatcatggccgctaaatcagacgggaggctgaaaatgaagaaaagcagcgacgtggcgttcaccccgctgcagaactcggaccactcgggctcggtgcagggattggctccaggcttgccgtcggggtcgggagccgaggacgaggaggcggccgggggcggctgctgcccggacggcggcggctgctcgcgctgctgctgctgctgcgccgggagtggcggctccgcgggctcgggcggctccggcggcgtcgccggcccgggcggcggcggggcgggctcggctgcgctgtgcctgcgcctgggcagggagcagcggcgctactcactgtgggactgcctctggatcctggccgccgtggccgtgtacttcgcggacgtgggcacagacgtctggctcgccgtggactactacctgcgcggccagcgctggtggttcgggctcacgctcttcttcgtggtgctcggctctctgtcggtgcaagtgttcagcttccgctggtttgtgcacgatttcagcaccgaggacagcgccacggccgctgctgcctccagctgcccgcagcctggagccgattgcaagacggtggtcggcggtgggtctgcagccggggaaggcgaggctcgtccttccacgccgcaaaggcaagcatctaacgccagcaagagcaacatcgccgcggccaacagcggcagcaacagcagcggggctacccgggccagtggcaagcacaggtctgc

SEQ ID NO: 22960 - DNA, 353 bp, Homo sapiens
  chr8:57360555-57360908
  binary
cgccctctgcaaagggctgatttctacagtcgctaggacctgcagcggcgctgctcccgcggggctccggccgcgctgcatgtcccattatagtcgctagagggcagcgctctcctgcgtaggctgggcttgcggggactggggtctcagttctccgcaggcctcaatgtgcgggcttgacacgcagccctcggattagccccgaagctgcacccgagcaccgcctgcctcccggccggggcatcacggtagcaaggtcgggaaagcagagccctggagtggggctggagaaccccggacatagccctagggagccagcattaccctctgagcaggaaaacacaatgtttccc

SEQ ID NO: 22961 - DNA, 2330 bp, Homo sapiens
  chr8:60030415-60032745
  binary
cgggactgcttagacacgtccaactagccctaggcgtgggcagtcgtgcccctgcgaccactctgggggaccggtccctgcgtgtcctccctctctgggatgagagagttcgagaagccgggagagtaaccccctccctcgtaccccctgactgtcctataggtggacccagccgaactccgcagcagcccaggccagcgccccacctccgggtcaccggcatgatccgcctctccccgggcccccgcggccctggcacccgaggtcagcgggccgtgggtacagctcagccgcggaccctgctccgcgagtgcgggagctttggacttgaacgcgacgtgctcgcccggctcccaacaaacttgcaatttccgcgcgcaccccttaaacaggaactgttccccaaaccttgacccagctaccccgctgtgctctggcccgcggacctgtgtccgaacccgggctcggctgccggaaccggtttgagaaaacaaaagagttgtggggcagttttccctgtggggggcaggggcgcctcccaggtccctgcaccccgactcccggctgctcccctggcaactaatccggagaagggaagtggtgccacgagcccccactgcccggggagggagggagagagaagggggaactgggaaataaactgaattctcttactctgcctccgttcctggaccccagacacacccccaaagtattccacggttttctcttattatttttttaaacgccccccggcaaacctaggcagggatccttagccgcgaacagcaggaaggaaagaatccgagcaaatcgtgtcactttccgcacaatcgcggtgtttggcaagcccccggagctactccacaatatttactacccaagcgcacgcaggctgcagcgggctgcgagccgagcgcgcccgggaccggcctccgccaagccggccccgccgcggcccggccaccgccgctcccctcccaggatcaagcagcaagaacacggtggaaacaaaagcagagcgttcaccttgttgcaatagtaggggtccaggcagggagaaggtcccagacagggagcgtcgggcgcagcggcgggctgggctggaggtggataaaatcttacgtccatttcactctcacatcaagcaactccttttctttttccttttttaaaaaaaagtgttcagcaaaacaagcttagacggaacagagtgaggtgtctgggctcaggagtaaaagaaacaccttccttccctcacatccgtttgtggtttgtttaagaagaagaggaaaaaaaaaaaaaagaggggggaaaagcgctcaactctcccccaagccgcggcgcgcacccgtcggcgccgagcgcgcagcctgctccaccgccgcctcttggtcccgccgccgccgctgccgccgccgccgggcaggtaacttcatgcgctcattgtcccccccgcccgcccccccatccccgcctcccgcgcccctcgcagcccggcacacgcgctcgggctctaggtactgggcgttttattggagattctgagttgttctgcttgtagtttattttctccaccttggaggcccgggatgtggggggtgggggggtggggcggggatccagaagggacagggcgggaggggggcgagcgtcccgggccgggcggggtagggagcgcggccggacgcgggctcgtcaaggcccaatggctgctgttcggaaccagaggccggggaccggagaaaggaggagcggagaaggagaaggaggagagcacggcctggctgggacagaagcggtgggaccctgggaggcctccgctgtgcccgtgccgcgctcctcgggaccagcgcgtcgcacacaaaggggctgccgagccagagccaccagcggcctcagggcaccgtggggagcgcgcagctagggggcgctgtggcgcaccccgccccgcagccccgcccccggccctccccggccccaccccactcccaccgccctctccgcggccgtccccacccctatctccgcgacccccactcctcctcggctgttccccaaccctgtcactgtgctcccctccctactcccggcccgtagtggaggtgactttcctgcgcagcgccgcttctgagggcggagaacccacagggagtgcgacccctttgcacgctgtgagtgggcaactgtccgagggactcgagccgatcgaagggtgaggaccagctcgcctgggggtggacggcctggaaaagccgcccctctttggcttccctctgccgcctgcagcccgcacccctccgagattcgtgccccactggacggtttgc

SEQ ID NO: 22962 - DNA, 1018 bp, Homo sapiens
  chr8:61193218-61194236
  binary
cgaattcttcacgctaacactgtcttcctcaggtgtttagtaaaatgtaccgctgctcttcttgactactcagaagacataaaaggtacagccacggcttggaggctagcccgccctccggaccgcagcaggtgcgaacgccagccctgcggaaggctcccgggtgagagcgcaggcggcggaagagcgcaggcggcgagcacgcctccctggagcgcctcccgcccgaaacgcaccaggggagtgggaaagtggcagagacccccgtgggaaagagggggcgtgggggtgctcggagcgcgcagcggcagcaggactcgagtcccgcgctcggcgagacactgacgccgccgcgggaccccggacaccccgactcgcggccacttaccttcctcgtagccccactccacaccctcctcttcttcctcctcatcctcttccttctcggggaaggcgacggtatcttcgatgaagctcaggtccgccatgggaaggccgcggggcccctcggcgctctcggcagcagtgcctgcgccttcgctgggcgcggggctggagccggagcggagcgcgcgtgggggagtgtgagcacgcgtgagcggcagtgtgagtgcgagagcgcctccgggtgtgaaccgcagtgtgagtgcaagcaggcgtgcgttcggaccgagtgttccagagacccgcgtgggaagcgcgtccggaggccccagcagagcgagggagcggctgtggcctggggagcgagcgcctggcgaattttatacccgaccggggcgtgtctggtacgcgaggatccgcccccttctctctctggccgttggggccaggggagccgacagttagaatgcgcctcggggcgactagtcccaagtcacggaaacctcggcgcatccccgcccgcccttcccccggggtcgcccccgccgcctcctggcgcttcctcgctgcggcgactcctgcttggccgcccgagccttccttccagaagcccgcaagtctcccaaggtcactc

SEQ ID NO: 22963 - DNA, 1501 bp, Homo sapiens
  chr8:67024920-67026421
  binary
cggtggaaccagctctgtctacagaaccccgggcttcagtggcgtcttcctaacccggcttgcctgccgggggcgttccgagaccctcggggccttcccttcaccccgcgggagttggaccggtggcgctggtaaggcctcccgggctcaaagtgcaacggacactgcagaaatccaaactgctggcattcgcggtttggggacgccagaggaggtaatgatttctggtttgttaacctcaagtgacaataatgccgagccaggcaggagctggacctacaatcttctgatgcgtggtcagacacgttatcccttgcgccactggcctaccacgctactccttcagtcgccgttggattactgtgtgttgagaacacactcggcaaccactttaaaggacaacgcaggctggtaaaggaaaagtacgacaagggggggcggtggaatcgcagggtcttggcatcgcggaccccagacacctgggttgagggcctttcccgggtcagtcaggctagcgagccggagcgttctgtctttctgcgcacgcgtagagcacacaggccggctctggggctctgcgctcctcggattacgcatgctcagtgcaatcttcggttgcctggactagcgctccggtttttctgtgctgaacctcaggggacgccgacacacgtacacgtcccttcgatagctcagctggtagagcggaggactgtagctacttcctcagcaggagacatccttaggtcgctggttcgattccggctcgaaggagacaagtgcggtttttttctccagctcccgatgacttatggcactttccttgggtgccttcagtgacacattgcattccaacgagcagtttgaaagtctagcgctttctccccattttgggcctcccagcctgcacggtaattctttttagccattcgccctgcgggaacgtgtccgggcaggttcccagcgcagctgtgggtctgcgcttggccgagcgactgccgggtcacgacttctgcgtcttcttaacccgtctttggcattgcccgggccccgagtcacacaggaggcagcgccggctccagggggccaggcggggaccttctcctcagagccccgggcagcttctgcgacccgagggctcgcaacggctgccgtgaggaggtggggggtccgcgggaagaggtatctggcgctcccggaacctgggaatcagaaagagagaacacaatactaaaaacacgaagcctaaaaatgacacaatgttatggagacaaggcggcacccgggaagctgtgcccgctcccttcgatagctcagctggtagagcggaggactgtaggcgcgcgcccgtggccatccttaggtcgctggttcgattccggctcgaaggagagacacccccccccccattattttgttgctttgaaccaaaaaagtctgtcttcagcgctcaatgttctgacccttctctaaaggaacagataataagccgtgcccagcc

SEQ ID NO: 22964 - DNA, 841 bp, Homo sapiens
  chr8:69242761-69243602
  binary
cgctagagtaggcagggcagaaggtgctgaggagaggctcagaaggggcggtggggacgatcccctttcgaactgcatttgtagctgccaaggagtagccaacaagcaccagatttatgtgcactttgaaagaagcaccttcaccattggctttttaagcggcgctgtcgctagggagcggctggtagggcgagcagcctcggggagcagcccgggctgtttgttccgtcaccggggaaaggaggtacacacagtcgcgcgcgcacggacacacacacacacgcacgcacgcacacacaccggtggcgagttcgagccccgcggcccctgtccgcccgcgtgcgcccctcgacacagctcgcctcccgccccctgattcctgctgctgccgcccagaggagaaaggaacctctgcctcgaatttccccactgcgccgggcgctgcggagagcggcgagggtgggcgcgaggcggagaacgcgatgaatgagttctcccctcgcctcggagttgtctgagttggcggcgctgcgcccaggcttccggctctcagcgccccacgcgcgcgtggctccccgggctgccacccacgcccgcggccggggccgagccagccacgcagggcagccgaggctccggagctcctgtcccggccccagtccgggtaaaaggagggttgtccccagcggaggcgcacagccgcgcgttctccctgcactctcttcgcggtcccatctgttccccatggcgtctcatccgcaaacccggatccaggcttacctggagaagaacaagatcggtcccctgtttgaggtaaggcgctgtggaggagggcagtccc

SEQ ID NO: 22965 - DNA, 1465 bp, Homo sapiens
  chr8:70744818-70746283
  binary
cggctcgcacctctcttggacagcttctgcagtggccggcgcctccagctgctctcccgccccgggctgcagtccagtgccttcgtccatggcgcttagaattcagatttgatagctgatggcacccaagcactccggcacgtttcatccaccggcacgaggggccgaagccgggcccagtcagtcttgcccacctgggactggggctgggggcgcagggccgcgcagcagggcatcctcaccagctgcgaggcgcccagtgcatcctgatcacagacacggcttcaaggctccgcagccgcgtgccacagggggcaggggtccgcgcggtactgcgatgagccctactcggcgtccctctccgggcggtagcttgaggcaggcgcctcgcgcgtcccgggctcatcccctccgccgccgccgccgccgccgccgctgggcccgcggccaggagcgagtgcaccctgcgccgggggtgggggggcacttagcgctgctgtccgtacagcatcccacctcgctgcgccaggggtaccgggtgttcgccgcctgggctcgcggcaccctcgggagtgaagctgccgacctgcaaagcagaaagagggcggtcagcgaagagcggctgcggcttggggctagcgtcccagcgccccggggaccagggttaggtgaccccgaaccgtccctagagggacggaggagctagtcaggagcggagccccggaggactaggcagcagccggctgcagtctccagtcccggaacaataagcagcaggcggtcggcggagactctccctcattgtctgccgcggacctgcccccgtcccgccccttctgccttaaacattgcgtttgcttttatatgttaataattatcaacctggcagctctgactcagaggcagtgtcttttaatcgagtgaactaactgcagcctttccgtactcctactccattactcaaaatagaaaatgcccaaaagaacaaaggaaactttttcacagacacacaatgtattccctgtcccaatttttctaaaaggaaaaaagaaggtgggggtaaactacgtgtgtagaaatgtgtgtgcacactggtgtgcgttggcacgtgtgcgcgactagatttgaatctgtctgctccaccagagacacacattcaaagccgaaggcagcagcaaaaaggtcaacatgcttgcctctttattcccaacaccaaaaataaccccctgaccgaaagaactcttcaattacaaataccaggggcattcgaggctgtggcccgcactaagtcccagagcgcggtatcaaacgaaaccgaaaatccgtctgctttgccgagagctagggaagccacaaccaaacaaagagatcccggcacgctgtcagagagcgcgcgaggagcccacggagccggctgggcgcacgcgggccggcggggaggtgtgctattgactgagcgcacccc

SEQ ID NO: 22966 - DNA, 958 bp, Homo sapiens
  chr8:72459564-72460522
  binary
cgtcccccgacgtcccaatcagttaccacctccccgaaggaaaacaaaccggcccttgacacatccctccacgtgcagcgcccgacgccacgggccttgggcggctgcacctctcccctgccggccacggctcaaggccccattattgcgcgcacccagctcccttccaggtgactttcgcgtacctggcggcggcgccctaggcctcggaggctgcccgggcgggctggggctcgggcggcgctcgctgagagtcgcggcgcccctcagccgcttcccgggcgccgatcgccgccctcctgccccggggtggggcccaggggcatcagcagccgcgggctctcggccgccgcctgggaactcagggtcagatttagtttcacaacaacgtctcctcgtcacggcaacccaactggaggcagaagccggcggggcggccgagcggggcggggcgggagcgcggccgccgcgagccacggtggggagcgggcgcgggggaccctggcgggccccgggcagcgcggctgcacttacttgtgtcacaactgcggcgacggggggctgaggaaccggttcttccaaaagcaaaccgaaaatgggtaacagagaggccggggcagcgctaagaggggttctgcctcggtgtttagggcaaaaaacccggctccggcttccagaaattcgagccagcggtggctttttctttctttcctctctaaacgctcctgtgcctccgggtcgaggggcgcccttcgcgcggctccgagtgcacagcgacaccagggctggcgctggagaggggagccctcttcccagcacccctcgggtctcccccgtacccccacccacagcccctttcctgggcccgacgcccctccgctctgcagccggagcctgggcctggtgcccactgccccgcggggtgtctcggacgcctggcccctgcagcgttttctac

SEQ ID NO: 22967 - DNA, 1631 bp, Homo sapiens
  chr8:72755373-72757004
  binary
cgggagagctggcagatcagagagggactttccagataaatcccatctggggaaacgttactatcttccacaagcaatttttctaaaaatgcaaatgctcttttatagagctcggccttccctcctttaagaaagggcttgccgattcaaacctgcccgactcagctggattaagttgggcaagggagatttgccgtcagtctgcaacctggtggcagatggagatggaaccaagatttaccctggaagtaggatattagtcaatggctgtcactggggtacaatgttcagaacgatgcaaacagacacggagggttgattcttcttcagggaaatggctggccactcccttgatttgggagaaactaaactggccttctcgttcccagtcccagaacctccacccctttcgaattcttcccaacgggctgaccctgcccggcgcccaggagcgccctgggtatctcctggctgctctcccgaatccttgcgcgccgcgcccctaccaggttcactgggtgcacgtagccgttctcatagcggtcctcctgcaacagctgccgcaggtgagcgatgtaactggaagccagccggagcgtgtccagcttggagagcttagtgtcggggggcacccagggcaggctggtcttgagcctggagaaggctttgctcagcacgcgcatccgggcacgctcacgggcgttggccgcgttccgctgcgactgcttgcactctgcggctgagcccttggccgggaggggcttcttgccaccaccgcccgcgctaccacctgcgccgccgcccccagccacacggggccgcttcctcttgcagccttccgcgctgccggctgtgcccagagcgcagcgctcctcctcgccgtcggggtcctcctcctctgccgacgagttgtcactgggcgaggcgtagctgcgctctacgccgcggaggggcggcctcttggaggcggggaccgggtactcccgctgcagcccccgaagctccatctcctccggatcactcaccgagcccgtggacatcccgttgtcccccttgcccacacgcgtcctctttcctcccccctggccagtctcgctgtctccgccttccgctccctggcggaggcggaggccagagagcgctccaaggaagactaaaaacccaggccgggaagcgcggggtgagaaagcgaggtgggtggcgagagcgtgagcgcccctctgctgaccccggggagcgtggactacgagttggcgcccaagtccagaatccgcgcgcaccgcggtaagctgcgccttttgaaaaggctatctgtactccttggaacaaaccaccccgggcaaagaagagggggttgtaaagggggccaagaggtggggcaggggcgtggaaggggtggggaccgcttttctgcatgccgaagagcggttggtggaggcgggggaaggggacgtctctgcagagccgagatttgggctctgaagcccgacggcccttcaacatgtctgcgcaggataagtgagctttcggggagtgaaggggcacatcttgttcctaccgacggtgcttctacccccaggtaatcttagcagtggcaaagattaccagacacttagaaacgacgggattcc

SEQ ID NO: 22968 - DNA, 943 bp, Homo sapiens
  chr8:75896528-75897471
  binary
cgggcttgggtctcgggagcccaaagcacgcccacaaaggccgagcgccctggcttcgctgcgttccggagaagcagggcgggctgcttctcccggatctggcgggcctctggccacggctggttggaggtgggggtgggcgaggaggggcgctcaagtcacgtgcccgcgctggggccgcaataaatgctcgcgaacgcgagagagcgacggaagcgctaggcgcctggttctgcgcgtactggctgtacggagcaggagcaagaggtcgccgccagcctccgccgccgagcctcgttcgtgtccccgcccctcgctcctgcagctactgctcagaaacgctggggcgcccaccctggcagactaacgaagcagctcccttcccaccccaactgcaggtctaattttggacgctttgcctgccatttcttccaggttgagggagccgcagaggcggaggctcgcgtattcctgcagtcagcacccacgtcgcccccggacgctcggtgctcaggcccttcgcgagcggggctctccgtctgcggtcccttgtgaaggctctgggcggctgcagaggccggccgtccggtttggctcacctctcccaggaaacttcacactggagaggtaagggcgattctaaaatgcatcgctgagtcgtcaagctgccaccctttcctatctccctttgccttcttaaactgtacttaaaaaaaaaaaaaagccaactgtacagagtggttgggcgcgatgggtgggtgggctacccggaaagcagcgacgatagaaattagcgggagctctagttcttgtaagtgactttgttggtttcacctactttctctgtcgcgcgctttccatttgagttcagagaaagaacagtgtgtgccttcacacttgagaggaaaagctctcaagttgccggggagctgctggcttcttc

SEQ ID NO: 22969 - DNA, 801 bp, Homo sapiens
  chr8:77589904-77590705
  binary
cgccgaagaaaaagtctagaagtggaaattaccttttgtctcaatgttaattactccttgcctccaacactcaacacctaaccacctggtagtcctttttggttctcccctaactcggtgctcaatgtcagggtccgagtgctctgcagtggatgtggctgggctggggttgccctgtaaagtgttgaagaggatctagggaaagttctcggagcggcagggaaacctctactcctttcactttgaaataaaaagtggcccaacgttccgtgagggcggcggcgggttcgcgcagagtttagggacagtggaatgggggtggggcagggagtgggagtcagggtcaaaggcgtccgcggagacccgagaggagcagctgggtttcctggcgctgggagcccagaagtagggcgcaagcggccgcggcacagcggagcagccaggtccagccgctcggatcgcgctcgcgccccatagcggcccgcgggctgggctcgggctcgcccgcctccccgctcccctgccagcggcgccgcgctccgcgccccggggcccaccccacgcagtcccgccgccgcttcagcccaacagccctcctcacgctggcgcgctccgaggccaagccctggaggaaactcttgactctgcgctagaacctctctgccccttccctcagcccattaacccccgaccctcacctccagcctctcttcttagggaaaaggtgaaagaaaacgagaaagagatggtaaacaacaacaacaacaacaacaacaacacacacacgttaggagaattctc

SEQ ID NO: 22970 - DNA, 919 bp, Homo sapiens
  chr8:9763158-9764077
  binary
cgtgccggagggactgcactgctggcggcggcggccgggggaaggagagcggcgcaggaggcaaaggttgaggaggcagcaccctcggatgaataataacaccgcgccgcgcaagttgcggagccgcctggaaatccagcccttcgcgtgaactcgcgtcgagcgcggattgcaggggatgaggaagaagggggaggggaggggagggtggaggagggagggggaggggtagaggggaaggcagagagggacagagagaattgggagccttttaatttttccttaccaagccctaatctcgtgcgccgtcctctttggctgaggtcgagctcctttttaaaaattattactcctttaaaggattattcaggtaaaggaagccgcatctgctgacggttccgaaaacaagaggattaggagcccgtccacagatccaggcccgcagacccccaccccctctgcaccagcacacgtcattctcactgcccccgggtacctccctctccttcgtgctcggggagagctgtgccaaggaaaatgcggatttggggaaagtgagaagtgggagagctcggaagagcgggaaagccaaggccggaggtggcgattcgcacccccacactcacacgcgcttccgtttatccgtttctatcccgggaaaagggggcgcctgcccgagcccacgcgcgccgccgcatctgcagcggtcggcgccccacgctccctgaacgccccccaggcggcaccagtgccgggcagagtcccctcggcggccgcgggcgtcaaatcgacacctgactccacagctcccttccctctcctcttcttccacctccccgggggtccaggcaccgccgtgcgtccactcccggtctccacggcttaggcagacggagtgggggactccggggacccgcgc

SEQ ID NO: 22971 - DNA, 982 bp, Homo sapiens
  chr8:9764090-9765072
  binary
cggccctggcgggaggagccgggctggggtttccgcgggccgcggcgcgttttagggctgccggggactgcggcggatgcggttgacatcactgcggcggctgccgggccgctgcggcgacctgagcgccggtgcagcctcccccaccccgcctgggcgggcgtctgggcaggacagctgcggggggttgggagaggagtcggggagagggggacgatcgccccatcccccgcccccccgcagtcaaggtgaacatgaaggagagccggcgcgcgtgcccgcgcctgggaggcgcgcggccccgcccctcccggagccctccagcgcgcccgggccagatggacgcccgagattagaggcgcagaagtgcgctccacgacgggcccacccgtcccgcggacatcagacctacttcggggaggcgccttttgttgtggtggccgtggcggtgtttgtgtctttccgggagcacagggtgagcttggccttcaggaatgactcagaatgaatccgcctataagagccaaactaaagacgaccccccgccccagccccccaaccataacccaacgcctgccatgagaaaccttcggactttccaaggggtcagtgcctcagccacgaggggcagccctgacccgcgcggttcacgcacacgcagggcccatctgcttcccctactccggcttttcttctctgatgacttaaaagagagtgagtgagggagagagggagagagagagagaggtctaagtgtttcttgggcactgctggattcagggcaactagagatggggagaacaagccccgccagctaaaagcagccctgctgaaaccacacagcccgcgagggtcgcagcagaggcgcccacccagcaggagtggctgcacgaagggtgacccgggcgaggcccttctcgcttcgaggccatttcggctcttgtcaattattgggtgtttgtcccaatataagtagaatggc

SEQ ID NO: 22972 - DNA, 1264 bp, Homo sapiens
  chr9:100610054-100611318
  binary
cgtatgggcaactggaacccggctggagtgtgcagctggccccctcacttccagcccgcaggctgccgcgggggtgactcccgggagatgcgcctagagaggcaggacacctgcacgcatattcgtaacagaggcagaaatactgacggcgaaacctagagagacttgcactccaggcccggggggtgggggggcgggggagaagccttagggagagtggggaggaggccagaggagagctggctgctctctcgtgttgaggttcaagtgtcttccagctccccgcgccccctcctcaccgtgccaccgcccacctcatgctttgggcgccaagcagccaagcaaccgggttgcgttgtagggggaggcaatcagccctgttacccctcctcaggcggccggactgagctgcgggatgggatccctacagagactggcctgggtaaggggaaaaaatcactgcctcttcctgtgcctctagtggttgaactagaatcctggctagctcatctcgcttttgaagggggaaggggagtaatcatcggctcttttgagattgtcttgcaaaccatggactctctccccagaaatgaacacccacaatctagtgtgtaaatttcaggtttccaagtgttccaaagccgcgcacaaatttcggaaccagaccaagaatcctggactctagacgttgcctgggggccgatcctgcgcccagggtcccagaatctaactgaaatgcgcctgcgggccgccaccttcgccccgggccacggctttgccaggaatgcccgccgccacagctgaactcccgcccgcccgcctgggtcggatcagacgcgggtagtggcttgcgcttcgtggtcctcgggtccggaacgcagggaaagcgcgtggagccaacctagagcgggagcagggtctggcttgactctgtccccgattcgttgtgcgcagtgggacaagtccgcgccgtccggagccgacttccccttctcgttgtggccgtaaagctgctggacctccaagccggctcctgcgctccccgctgctctgagaacactgagtgtcccgggcccgcgcagactgggttgggagagggctctgtgggagggcttgcggggagcggggtaagaaaggctaggtgcttcttacctacgtaagaaacgttggtggcgggatctaagcaaacggggaggtgggaagcagaaggttccccttcctgggccccagttcctccatcctgtcccctgggtgacagtgattc

SEQ ID NO: 22973 - DNA, 808 bp, Homo sapiens
  chr9:101469196-101470004
  binary
cgagggcgataggaatgtcattcggaaatgatttcacaccgggttagccctgcacagccagccagcttgcatcctctggggcagaggacgcctctccgcctgcagcagcctgcgcgtaccgctgccaactgccaccggttccttcaccttttatttacagcgcagagcaagctggttcaccggtgaagcgggggaggcagggaataagatacaatctagattctgctctttctctggggacataaagagggtccgaccaaggaggaggggaagcccagattgcaccaccagagcagtagcgcgaccctcctcccaaaagggttctgcacctggactccagcagaagcgcccggagagtcccaggaagccaggatcaagcccagcgcctcggccccgttccgcgcgatggaagaggcgccaaccgagcgtactgcacaggaaatcactgcccccttcaggccgcgtctcagacgctgcggtcggagcacaggggctcgctcggtccggaaaaactcgcaaacccgaccttgcgcggccagcgatcgctcctccagacccgctccgcgcgctccagccccggcctggcggtgaaggtccgctctggggcttcaggcagaacccaaaccgagggcgtggggaggggtcttgggatggaaagcccttggctctctggctccgctccggactgctctccaagtctgtgctccggctgctaggtcggatgcttcaagcctgagccgtgagaaactgcctgcagccgcccggccaacagcagcggcgcggccggacaccactgcacgtccgggac

SEQ ID NO: 22974 - DNA, 958 bp, Homo sapiens
  chr9:29213757-29214715
  binary
cggattgccggcaggcagttcctcgccgcacgccgttaagtccgttgggccacctctccgttctctgccctgtctggcatttcaactccctagctcttttcttgaagccagttacaccccctcgacacccagcgagaggccaccagactaaagatgagccccgttcccatcgccaccctccaggggccacctccgccccttctgtagtggagaattgaagtggctgcagcagctctcctgggagctgaggggctccccgaggtccttcgaatagaggagcctacacatcgcttcgtgaacataatcccctcgcatcccgtctttacctgcccactcccttcgtaacatttcccccaaggagctcccgaaagtcgcttagatgttttgaaaatgaatttcttagggaattgtagtgcctagcttttggaactgggttaatttaggtgctacgcttatattgtaaactggacggtagcaggtgaacggctcagctggagaaaggggagggattaggagtctggagacccaacccctttagcagccatttccaaggttttgcaccaggagtagctgtccgggtctctggctagctcctgtcccaacttctttttcttccctcgacggtcgggagggatcactgggtgctacaccgctggggcgtcccaggcaggagagacttcgctctcagaagcgcccccgtgtcatccacaactcccacgaaaggagcttcccaagaggagtttgttttacccggaatgggctgcaggaattaattgcttacagagagtaaacttttgcccgttgtttttttgttttttgtgctttttttaaccaaagcttgcatttgtgctccgcgtagtttctattgcaacagagcgctactctgccttttcaactgtgagacagaggattgctgaggatttctgccctctggggcttcgcgaatatctatggcttc

SEQ ID NO: 22975 - DNA, 935 bp, Homo sapiens
  chr9:79633227-79634162
  binary
cgagtagatgaaaacagggaagggtaaaaggaagggggcggaagagggagatgccagagagaagagaagcaagaaggcagtgtcctgttccccctccaccgtgcttggtggcccgggtggggcgcagctgcgggaaatgcacccggagctgtgccccctcccggcgaacagcctgcgccacccgccgcaccgggaggtggctgggggctgccgagcgagtggtgaacgcgatgggtggagagcgcccgaaacgaggtggaaaagggggcgggggcgaggcacggcgccttcttgccccttcttcagctacagacgcggcggcggcggctgagtccctcagcctcggtcatgtgatagtctcgaagcgctagctgcgggggtctcggcgtctcggggaccattacaaaacgcagccaggagagcgcgtcgctgccactgccgtcgcctctcctcctcaagacaagcccgggagaaaggcggcagctgcggcgcggacggctgagcctccccggccagcactcacccagcattcgcagacgccctctccagcccgccgctcgctcccagagtcctgcgccccacactcctcagcagaacctgcgggcgctgccgcttcagaaaccaccaaagttttttctcctcagcgacagcctagggctgcgcgtctcttctaaccccggcgacgctgcgagcctcggagaaaagagaggcgccctagaagccaatcttctctctccttaccctgatttttcactccaggaaaaggagaactccagcgcggtctggctaagtgcctggccaggggcctgcgtccagggcactggaagtcctgctgtcactggcctccaggacagcaggcgcaaactcagatttaaagggccagagtctctactgcccagaccttcctcccagccatcttggtctgggtttccctc

SEQ ID NO: 22976 - DNA, 875 bp, Homo sapiens
  chr9:93955774-93956649
  binary
cggcacggggctcgggcactcggggacacacggtggtcgtcgctgtgtctcagcaggaccctgtgcgctggagagcttggggccgcgagtcgcgcagcaaggaggcttctggcttctctatttttagcctctgaacgttttccaaaataattaccaaaaggaaatacacacgcacacatggacctaacacacaaaacgtccttctgcgggaagccagcactaggaaagaaaaaaaaaaaaatccgaagtgaaattatgacacagggttttgtaacccgcggtggcgcgcttctgaaacccgagcccggcagcggcttcttatctgcaccgcgttccaggaagcagccggcgtttcggccgcgcaagggcagccgccgcacgtaggcagcgtcccccagcccgggacccgcaggaatgcgaggggcaagacagatcgccggaggagcaggggtcagaagtcagtgtttaaccactcactggctttcggtgaagccagaatgttagcagcgagtcgcggtcgggggccttggggttgcacacgcttgctccaagcaccgaggctcagctgagcacatgcacaaccctctcgatgcagcggaaagtcgtgtggcttagggccgcaccccgaatttcgccgcacccgccgctgtgccatttacaaccccccaccccgccactgctgtcacgtagcaatcaagagtaaaggttatcacaaagtctgttcttcgaaggaaagagttggaatcaaggacttcggacgggaggaagttggtaagttaccgcttcctccctcctgttttcctctccttgtttaacttctcacaagaacatgtggcagcgctgcaggttaactcatcttacataacttcggggcc

SEQ ID NO: 22977 - DNA, 1012 bp, Homo sapiens
  chrX:16729925-16730937
  binary
cgtagttcggcactatgcgccctaaccatctagtacggggaaaacgcgggggtcgttgtttaaggggtgcactgggaccggggagaggacagaaaggccatgttaccggcgctgatcaccagcctcgcagacccccgctcggggcttcacttccgccaacgccatctcagggctctcctggctcccgagggccgggagaagtggggatccgggtgcgggcgctggcgcgggcggaggcgggaagaagcgcgtcccggggacgcgcgggacaggctccaaccgcactgggcacgggccagcgttccccagtccccgcgccacacccggcagccgaggtctgcgagcgcggggctggcggccggacccgactcagcgctgggcagggagccggcgccatcagagagcggacaaaggagcccggccccacaagtgcaccggggctgggggtgcagggcggagaggccctggggacgagggatggcccgggcgccgaggccctgggggtctgggacaggcccagaagggaagttacctgcgcggtggtggtagcaccggggagggtggccggtgggcacggcgggctccaccccgcggctggcctggcgctcacctgtcgggctggggaaggggtcgctgccggggctgtccaaagccgcccccgggatcttcccaccgcccacacgggcctcggggtgcgcggcgccctcctcgcccaccttcccctctcctccctgctgctggcccagctcactcacgctggtgagcttggggtttgcacccgggtttgtgcaatggtccaaaacaagcgcctaaaaagtgattcctccagcacaggcagctcccgtcaccctccgctctggacgcactgggccccaggcctcgcccagcccggggaccgctcctccctcccgtggctcactttgcaaaggcacttcgagtgcgcgggtgaactccacgcttcccggggaaccccggcttcctggcaagccgagaccctcgctcgggtcctccc

SEQ ID NO: 22978 - DNA, 264 bp, Homo sapiens; identical to SEQ ID NO: 5862
  chrX:41112874-41113138
  binary

SEQ ID NO: 22979 - DNA, 788 bp, Homo sapiens
  chrX:9433633-9434421
  binary
cgccaactgtccccgcggcgctcggactggggtgcggcgcgctcccaggagcctgaacaataccccgaggtggccgctccccgaagtgccggcgcgccttgcggggagagacggaggtcggcggggggctcctttgttttggggagggggaagtggccggtaagtttagggaagcgctcggcttttcctccggtgcccctttgtctgccgattcaggggcttgctgggcaaacctgcgccaccgcgggctccggggaccggggtggagggcggtggcgggatttccccgctgttggggagaagagccccattcatacccgggacgcgggccggccctcccggacccgggtggaagcgcagcctcgcggagtggggcaagcggcgggcgaggtggcgcgggccccgtgtctgctcagtttctgacgcgcagaaactgtcaaggaagtcgggagccccagtcctccgcccatctccccggcctgagcgcacggctgggctgggggcacccttggcccgtcgagggtctgcagagcgccgcccggggagagcgcagacctgttgctgctcctgggctctgacggggcgggtggggtgggtctcgcagatcctgggccccggccttgctatccagggggaccttccctaacgatgggaccggtgctcggagtggagtatggggagtgcgccttcgggagtcggcgctggccggatatgtgacaactgtgggtcgctggaggcccgcctgcgctgggatagggcctggacttcacgtgcgtcgcctgtgttcc

SEQ ID NO: 22980 - DNA, 522 bp, Homo sapiens
  AC241851.2_88-34049:15074-15596
  hyper
cggcgccgcggctttttgcggctttttgccgccgcgggtttttcctgccgcggcttcttgcccccaccgcccgggctttttgcgccgcggctttttgctgctatttgtccctgccaccgcggcgttttgcccccgcagccgcggctccttgccccctacgcggcttcctgcctccgccaccgtggctttttatcaccccagccgctttttgaaccccccgccgcgggtttttgccgccgcggcttcttgcccccctcgccgcggctttttacccccacagcggcggctttctgcccctgcctctgagggtttttgcggctttatgtccccgctgtcgtggctttttgccgccgcggcttttggccccctccgccgcggctttttgcggcttttggcacccaacgccgcggctttttggggcttttggtccccgccaccggggcttttttcccccaccgccgcaggtttttcccgcccctgctttttgcccccgccaccgcggcttcttacccccgccaccgc

SEQ ID NO: 22981 - DNA, 993 bp, Homo sapiens
  chr1:103573419-103574412
  hyper
cgtctccctttattgtcccgcctacattcatctctttctccagtttccaattccaacctggtagcagctacaatctggattgtatttaagggaattgcttttttttttttttcttgaagagcggggaggaagggtaaagtggggggaggggcgcagaagcagtaggaccgacggcaatctcccacctccccaaatccattttttcttacctcctctgacctctctagcttggaagaggaaggtcaatgcgagggttgttacggtgaaatcccagagccaccgtttcgttttccacctagaggaccacggctccatctccgagccccgcactcacaactgtgaactcaacccacgaaattgcgactgcagaccaacttcgtcctttccaaggtatcgccagggatgtttgctacacagccattggggagggagagggggaaaaagtcaaagggctttttcttctaaatttgatggtttgcgttcttcgtgtctctagccctttcctctccctctgagttggccccaccggccgggaccctccggccgcgaccctctgatccttcctctgccgggccctgccttcagaatgaaggcagatgaggggcttccaccaacaagctgagagtactgtgtgcccctaaaggcttcatgccgtcagtgggctggacgagtggctccgggcagccccctcctccgcccactcccctccctgctcccagctccccctcccagggcgaaactgacaagcaggctgagggtcagacccaatcacacgactctggggcggccccaagcccgcccccgcctccctcagcccaagaatgaggactccgagcaggcccagcccaccaaccaccccccatctccccactcctctcctccctcctcgcctaccaaatccccgagaaaaaatgggagggagttacgggggacgcgtgcttggctccagcactttgggaatgaaaggaattgcaggagagccccggagcacac

SEQ ID NO: 22982 - DNA, 1060 bp, Homo sapiens
  chr1:111505946-111507006
  hyper
cgtcggccatcttggttttcatctcccgtggagatctactcggtccgcctattaaacttgagacgctggggtcccgcggagccgctgtgtcaggctctaaagaggttttacatttcccagaggaaagcgctctatgggctttaagcgccgcggagacaagcgcttcccgcctgggtggcgcactctgcgggctccaactcctctcaactacacagcgtccggaaacgacggccgactccacatccctaagacggacagaggggcagccgtggggaggattcgaaaccggtacttaccaacgcgaggcgttgcctgaattttcctctgcgggtttcaggaagaccctccgtaggttatttgacattttagtggggagaaaggggacacctcatccagaaaagtgggaagcgtggggccgagtttcccaatggggcgagaaccagagcgagggaatgttgggctggagttgcccacagcaactgtgaggggttcgaccttaacggagggcgacagcgggctctcgagagggtgtatccccaggcttcgggacgaggtcgcgcaccgcgcagaaaccggaaggctcctggcggtggactgcgccctcacagccctacgctgagagagaatcggcgtgagtctccgccctcagagcctacgacaactctccagactccgccggagcaggcgcagggggcgtggccttggtggcaccacccccaacagagcctggtcagtgctgaagactgcgtcagtctggctctgccgccccgcccactgaagccgatagctggagcaaagctcggtcgggcgtcttccggggtcgtcacgtccggttgccaaggtgactggctcgctaaagcccaacccttatgatgcaatccaatggcaagtgatatttgctatcttttcttccggatcaaggaacaaatcgcaaaagaaagctctcccgacacctacgcaaaataaaatgtttccggggtcaatcataaattttctgcttctgtgctcgccgctagcgtacgtttttctctcccgtcagtgcattaaaagacatcggcgc

SEQ ID NO: 22983 - DNA, 791 bp, Homo sapiens
  chr1:1475540-1476331
  hyper
cggggaggggagcgcaggccggggaggggagcgcaggccgcacgggcggtaaacaaggcgcgggaggtgggccaggcggcgcgcgcgggcggggagcagggggcgcgcgcgggaagcccctccgctcaccatcacgaccgacgcccccagaatcatgaagatcatggtgttcgcgctcatggacatcgggcggggccgggccgggccggagcgccgccccccggccccggcgcccccccggccccggcccgatgctgagcccccgccgcctccgcagaggtcagcgcttccctggatcgtccgccgccgctcgctgcaaccccggcaccggccggggggaggaggcgcgggggggggggcgccggggagggacgcggggcctttctggggtctctcggcccggcccgccgcgctccgctccgccctcgggtcctccctgcgatgcgctcggctcggctcgactcggctccgctcggctccggccccctccctgcctcctcctccctcctcccccctccctccccgccgccttcctccgcctctcgggagggaccgcgcagaccgcaggccgccccgtgccagcgccgggaggagaccgccatcccccggacgccggccgggacccctccccgggagcctcggcttcgcgtcccgccccagtctggtcagacccagccccggtggcctgtccggtgaccctggacgccagtcctccggtcctggaggggcgccgaggcccttcccgccccactgctccgccctacgtcctggactcccaggtcgccgggtgc

SEQ ID NO: 22984 - DNA, 571 bp, Homo sapiens
  chr1:161368929-161369500
  hyper
cggcaatcagcgcaaagcgagataatcaccagcgcactcttggatctgtatacaggtttgtaaactatgtggaggaaaccgacccatcgcagtctcggccgaagaggccggagccggagccagagccagagcctgagcagggtctgaaaaaaggaccggccgttcaggactaggccctgaactacaacttgctcctcaggggtccgggtcggaagtgacgacttcattcactgagcagccatttccggttcccagtgtgtccgaagttccttctgggtgtcagaaaagacacaaaaactgacagggcggaaccgcgacacggtgcctgatgatatcaaaaggtctcacggctccggagggacccagtcgcccacagccgccaggggcgccgccggctccgagcccgttgtcgagagccgctcggctgctggggtctgcccttcagtccttccaactctcctcggacctagagttccgggatctcactgcgatctgggcgaattcttacgtagaattcgaaaggatatggggaaggaaaaaaacaaaaacgggaaccactttgtttccgccc

SEQ ID NO: 22985 - DNA, 530 bp, Homo sapiens
  chr1:165414053-165414583
  hyper
cgcagtgaagcccaagggagatacttacctccatagcctgcgggaaacttcatgaagtgagaataatttccatacatgtttactcgtcagttcatgttcctctcctgtgcagcttctaaatattaccgcctctctcggctcccaggcacagcccggctttcttcaacttgggctaacaagagtggtcatcgcttcctagcagcccggggagcacaggctgggccagccctctgggattagtcaggaatctgcctctagatcggagagtccacatagtgcgtttgagacggctgtggcggcagcagctggtgcctgtcagtaatcacgcataatgctgccgccgccgccgccgccgccgtcaccgctactcttgccaccgccgtcgctgctgcttgagatcctgttgctagtttgattaactcagggttgggctgctgcgtgcgactcttccagctcccggcgcgtccccagaggtccctaccgggtggcacgatctattatctaggaagccaatcgatgtatgaccgccc

SEQ ID NO: 22986 - DNA, 398 bp, Homo sapiens
  chr1:200009765-200010163
  hyper
cggtgctcttccatcctcgccccttccagggtgcaggatgtgcgggccggcgggcctgtgatcccggaacgcttcctgccatccccttgcgcgaacttgaaaggactgggaggtgttgagagcagagttcagggctggtgcactctgcggtgctgagtgggcggcgcgcccgggcgctcaggccgggggacctgtagtcgccctaccgcggaggggaaaatacgtagctggagggcgtgcgccgtgcgggttgtgatccgttaccccatcggtcatcctggggtctccccaagcctctaggtagggctgtgagagtcccctagagctgaagccccggaggctgacctgtgggtctggctgctatgggaacccggttggtccaaagaagcctttcttcc

SEQ ID NO: 22987 - DNA, 244 bp, Homo sapiens
  chr1:203086951-203087195
  hyper
cgcagtgctccgccaggcgctataatgctgagcccagctatggctcctccttcttctcccttccgcgggaacccagcacctagcgcggcggagcagggaactcaggctgcgggactggggtctggccctgcccagctcctcgcccacgcccaggcttccgttaggccagcagggggaccccgagccccggacaacagccctgagctgggcggctgcttctggctctagatcccgctgctcagcc

SEQ ID NO: 22988 - DNA, 640 bp, Homo sapiens
  chr1:20512360-20513000
  hyper
cggtgacgctaggaagaggaggagagaaggaggccgcgggtccctgtcgcctccaggccaggcaatccactccaggctcgcaatccaccgacctggagttcacggcctccgccctcctggcccagcggcccccacccgaccccacccgaccccacccgacccaggccggttccggtcacgccggaagcacgtggccccccaccctgcggcgttgcccgggagaccagggttgtttaccagcaggacagagcccgggcgcaggcggcggatggagcggaacggctaggtgagagcggctgcccgatcccgcggcctgcccttggcctccgccaggcctggaaggggccgggggaggccagtccccgagaccccagcacatcacccgggagggcctccccagacccagcccgggggacgcaaaccccgggagacaggcgaggagcctggagaaaagtctgctcccgaggcaaagcaagcctggccagagctcacctttaccaaaatagggtgactcccgggctctgcagaaaccgagggacctatgcaaccgctgggccatgccctccaggctgggatgtagcgacggggacacagacccagggagagaaaaggatgtcccagtctccggcagggcagagac

SEQ ID NO: 22989 - DNA, 907 bp, Homo sapiens
  chr1:214155737-214156644
  hyper
cgtccttctcttttcgctgcgtcaggcaggcacctacttatttctagcccactcctcaccctgaataaaagcttctggtaagatggacaatatggaaaacttcagtcctatcaccaaagcccctgaaaatggagcacccccgaattcacatccttgacgtgaaagaccaaagagagggaagctgggagtaacggccaaacatccttagagtaattgacaaaagaaagggggtgggcagaaagggagatttccatcccttcaaacgtgcacgcccctcccgcggtcccgggagggagtcccccctcccaggtcgagcgcgtccaccggctgtccccacagcaacaggcgggcggcgggggaggagaggccgcgggggcagcgcaggcctggcggcggccgaaatcccccggccaccacgacgttccccggctctgcggcgcgccgggagcaggtggttgccctctgcgtccagggcgtgtactgagcccaggctagctgagcgaggctgcagcccctgcgatggcccgggaagaggcaagtgccgcggggccagagcgaggagggaccagcagggcggcctggacccccacttggccgcgcaggcaggaggggcgcgccctctgcggagcgcggcgccgcggcagccgcagcatctggcgctcgctctctctggccggagaggccgcgacacctagcgcggggccgaggctaggaagggcgggccggggagggaggagggcactgggaggaagccgcgggcgaggaagccccgctcctgccgagtgcctggagaggagattcccagccttcctgcccaacccgaaacttttccaacacacgcaggcgtattcctcgcaggattcggcggtcccgagtcgcagtcagggaggaggctcgggaagcacac

SEQ ID NO: 22990 - DNA, 155 bp, Homo sapiens; identical to SEQ ID NO: 5873
  chr1:214161233-214161388
  hyper

SEQ ID NO: 22991 - DNA, 203 bp, Homo sapiens
  chr1:214387644-214387847
  hyper
cgagctccagagtagaaactgcaattgtgtatttgaaattctccagtcaccaaatccaagaaaggtgaagaggaactgccccagtggcgtctgcgaggcgtttcctctataaagctgtcgtccctagctctggtcagtgctgaccaagtcaccctggcctcctccccggcccctttttctactgcaggaaaggctggagcttc

SEQ ID NO: 22992 - DNA, 632 bp, Homo sapiens
  chr1:22140678-22141310
  hyper
cgaataagggattgtagatttgaattaaattaaattaaatcatttaatccttacaatcattctgagattgattaatcatccccattttaccgatgaggaaaatgaggctcagagagggcgagtaactcgcttgggatcacacagcgggcaggggacagagtagagttcggggtcgcgccgcgcggctccagtttccgtgccttccgctgcagccgacctggcggaactgtgcgggcagacgtggcagggggacgggctgctgctgcgctcgcacgccgcatcgcgcaggttctacttcgtggctccggacaccgactgcgggctctgggtgcaggcggcagcccccggcgaccggatccgcttccagttccgcttcttcctggtctacagcctgacccccgcgcccccggcgctcaacacctcctccccggccccggccgacccgtgcgcccccggctcctacctgcagttctacgagggcccgccgggggcgccccggcccctggggtccccactgtgcggcctgaacatcccggtgcctgtggcatcctccggaccctttctaggcctgcgcctggtcacgagaggccgccagccccgcgtggacttcgtgggcgaagtcacctctttcc

SEQ ID NO: 22993 - DNA, 162 bp, Homo sapiens; identical to SEQ ID NO: 5877
  chr1:234812061-234812223
  hyper

SEQ ID NO: 22994 - DNA, 533 bp, Homo sapiens
  chr1:240774935-240775468
  hyper
cgatcacggtcaagtttgaaggtccttatgttacacccacgcataattcaataggtgaataaaccttgtggcccccagacacacgccaacagcttgaattacccggggtgaaaccggcgagacgtccactcagggctttcggtcctgaccagccacggaacaaacaacgtcaattcattctaagtgcctggtgaaggtagaaatcagaaaccgtgtctgtgtcacgttagtcgtgacaagctgcgtacctgcaatgacgtgatggaagcctcctcctcgggtcccttctctctctctctctccctctccctctgccttctctgagttctctagtccacagcggggtctaagtttggtctcccgccgccgctttcagttcgaccgcagccagactgcagcagacgcccataagagaagcgcgccggctgagggtgcaggagaggcgagagcgcgccccgcgccgcgcggtcccaggctggctgctcctgcagatgtgaaaggagcccggagacttagctctgaatcctctcggc

SEQ ID NO: 22995 - DNA, 819 bp, Homo sapiens; identical to SEQ ID NO: 5879
  chr1:247267064-247267883
  hyper

SEQ ID NO: 22996 - DNA, 574 bp, Homo sapiens
  chr1:26551673-26552247
  hyper
cgcttctcgaccagcgatacactgtacctgcacggccgagtgaccctgtgtgacacgcgggcaagacgcccatgccaaccagtgagtgggcagccccgggacctcctgcgcagccgccgcagccttgcctgcaaagcagttcctgccgggcaggctgggtagccggactcccagctgcgccgtcttcacggaagcggtgctgatgcgggacctgggggactgcggtgctggggactggccagtcctaccgggggcggggcttgtggaagactgggcgggattttgaagacctaggtcttgtggatggtgaactcacttggggcggggagggaggtggggctaccctggggtcttgggcaaagtcctcgcctggccggcttcgctacccttgtgcttgcgttgcccacaagcttgtagtcagaagaactcgcctgggagggatcgctcctgggagatccgaacgcgggagggcctggagcgcggcggcagctggatagcattcgggcccatccgaataagcggtaaatggatcatttctggggcctccctgactcctcttccagagcctcctacc

SEQ ID NO: 22997 - DNA, 1248 bp, Homo sapiens
  chr1:32180269-32181517
  hyper
cggagtgatgccgggccatcgaggcgtcctcagcccccgaggtgggaggtggtgggggggcggggaggagaagaagaaggctctcccgacacggtgactcaggcctccttgacccgctcctgggtgggcacgttcctgcgccccggtctatttttagagccggctctgggcctgagcgcagactgaagggaaggggggcctcgtggggggcgcaggcgcctgaccagctcctccagctcggggctcaagccccaggccctccagctgtctacttggaaaagggtggaagcacatggagggtgggtgtcagggtgtgcggcgcaggcccagagaatgcgccccccttccccacaaggcctggcagttccagagaactgggcgcggcctcccaaataacgacctctgttaagtgggaccaggagcctcccgatggtcgctgtgtctgcccattggaccaggggccagggcgggcggggctttgggcgacagaactggctagggtgggagaggagaggaagctgccaggttctggggatcccgaccccaccccgccgacagccacgcctccagcccactctggccacgccactggtctgcctttggaccacactcatggccgggtgccttccctgactccgccctaggccctgcctcctatctggctccgcccagccctggccaaccttagaacctgtcccaaggtccagagaggcctagatgaggggtagcctgcctctgagaggcatggagccctcctcccgcgtggggtcagggaatagaagggcgtcgagggtggcgggtgagggaacgttcctggcgccgcgaacgggaagcctccaggctgcaggacgtagctgcggggacccggcagtctgcgaggctggagtggccgaggccgccccgagcatagaaacagccctgtatacgtgggcacagaaaggcccagggaggcgcctgggcagaagtgtctaggacgatgcctctgccacggagccctggagtgggggcagctgatggctcaagacacatgagctctggtggcgagtacagggacgcggggtttggggaggcccaagtcaaggtccatccttctgggatgaggggcggaggatgggaggcggagcccggtctccagggcaccagccctccacctagcgggaagcttgggaatcgcggagtgcagaggtggggtgcggaaagggttccaccgcgcctgggctcctttttctccttggaggtcccactggc

SEQ ID NO: 22998 - DNA, 863 bp, Homo sapiens
  chr1:36042841-36043704
  hyper
cggcggcgaggcaggtgggctccttgctccctggagccgcccctccccacacctgccctcggcgcccccagcagttttcaccttggccctccgcggtcactgcgggattcggcgttgccgccagcccagtggggagtgaattagcgccctccttcgtcctcggcccttccgacggcacgaggaactcctgtcctgccccacagaccttcggcctccgccgagtgcggtactggagcctgccccgccagggccctggaatcagagaaagtcgctctttggccacctgaagcgtcggatccctacagtgcctcccagcctgggcgggagcggcggctgcgtcgctgaaggttggggtccttggtgcgaaagggaggcagctgcagcctcagccccaccccagaagcggccttcgcatcgctgcggtgggcgttctcgggcttcgacttcgccagcgccgcggggcagaggcacctggagctcgcagggcccagacctgggttggaaaagcttcgctgactgcaggcaagcgtccgggaggggcggccaggcgaagccccggcgctttaccacacacttccgggtcccatgccagttgcatccgcggtattgggcaggaaatggcagggctgaggccgaccctaggagtataagggagccctccatttcctgcccacatttgtcacctccagttttgcaacctatcccagacacacagaaagcaagcaggactggtggggagacggagcttaacaggaatattttccagcagtgagcaggggctgtatgggacgcgggaggagctcagaggaggcgcggagagtgcccgaggttgggtgagtgcctagaggggagatagttgaacc

SEQ ID NO: 22999 - DNA, 913 bp, Homo sapiens; identical to SEQ ID NO: 5881
  chr1:43389625-43390538
  hyper

SEQ ID NO: 23000 - DNA, 686 bp, Homo sapiens
  chr1:47009445-47010131
  hyper
cgtcccctcagccccctcccgccagcgtcccccagctccttcacttgcctgagcccgtccgtggacactcccctgcgggtccgaccaggctgacccttgagcaccctgggtcagcaggaaggaaagaccccgagagcgcaggaccaccaagagaggccgggccacctcctccgccgtccgctgacttctaggggctgggccggcgcacagcaagggggttggaggtggggtcgccctctcccacgcggctgggtttccaggcggtgtcctgggccgagccgcttggagatcctagatcagcatgtgggtgggaaagggcgccccgtcctgggcccccccgcccctgcgcgcagagcagagacgcgcagacccgctcccactccgcttggctcccttggagcagccccggcggcggcagcgatgggctgggaggggccggcacgctggcctgcgcgggtccccagccgcctcccgccacccggaacccctctccttcaagcgttgaccgccgacccacagctccccttcaacccggggcgagcggggttcttaccatacacctcccctctccgctcggttccatccttctcccgttctcctctaggcttcacggtttgcaagcacccttgcaaataactcctagcccacccacaccgtctcgtccgcactttccgagagccaggcac

SEQ ID NO: 23001 - DNA, 911 bp, Homo sapiens
  chr1:50885965-50886876
  hyper
cggatccctcctttccctcaacggctctggcctaatttcttccctccccacaaaaagccacgggggtccagaaaaagagggtggtgctaggcaggcagtaggaagcgaagaggaaaagacataggaaagcagacctgagaaaccagggagggtgcggaagaaactagaaggagggagggcgcagcaagcggttgtccagagggcgttaggaacgcgagaaggggaaaagaaactagggcgtctcagaacctagggcgtctcaaaacctagggtgtcagttaaagggggggggattccttaagggagttgggaaggagcagagggaaagggcctgtggagaagcgcagagcgaacgaagatgcgcaggtttccacctggggagaagacgaagcaaagaagcagggacctgcctgcgtttgggtagaggcgagtaaaaaaattaaagcgtgtacatttcggcccgatgcaggagaaaggggtaaagtgcaaatgctccagaagcgggagaaaggagagtttctgtacccacgctccatacccgaggctgggcgagcggtgaaccctagcagtcgcggcgactggacacgggggttctactctttctgaaccgagacaagcccctgggccccgtgccccagagctacgatcctgctgcccctacctgcggcctggccgcgctctcacctgagccccctgcgccagctgctccgcctccggtccccgcgggcgctcccgctccaggtcccccgccgtcggcggcgcacactgaaccgaagacctcgtaggcgggcctcggggggatgatgccgttggcggcggccagcgccagcccctcggcagtgccgtagagcagctgcagctcgcgcgcctcgttctcctcctgcgcctgctgcctgcgcagcgccacctgc

SEQ ID NO: 23002 - DNA, 869 bp, Homo sapiens
  chr1:50890601-50891470
  hyper
cgaacctccaggccggcgggaatctgggcgcgcagactcggcccgggtcgtcgcggcctcaggacgcagcccattccgcctggcacgactactgggccgcgtcttgtcagtctatcagcttctgagcccaggaatgggggtgggggaaggacggtgcgactaacgggcccccacccgaagaccgcagaacctggcgccccggaagagccctggaagatgcccaccgggaggctgaggctggagggaggagtgggtgggggtgattcgctggaggaccgggcggagagcttccagaaagttcaccaggccccggcgcgagggcgctccgacacggacaaggtctatgatagcgataaaaagctggttactcgctcccagaaaatgccacttgctggagtctgtgaatgggtttaggagagagaagggtgtcagcccccgcgagggtctcccgcgtgaagtgaggataagggagtgcttcagggataatatgtcctctaggagcgcaggacccagaccccaccttccaacacctggaggttccgaggccaagtatgtctagccccggctgcacctgggtaggtgagccatggggtcgggggaagagcgccgacaaccgccggattccgcgcaggggccgccaggcgcctgctcccagagctcctttggacaaagttttcgggaaattctattaaaccgaaaacgaaataaactatacaaatctgcctagcttttgagggggcggtggcccaggtatccttctcgcttgaggccaggtcaccgtgagatttccccactccggaccggggatcccgcagaagccaagggtgtagccacgaggactcgggaacccgaggcggcccagcagatgc

SEQ ID NO: 23003 - DNA, 1823 bp, Homo sapiens
  chr1:50892168-50893991
  hyper
cggtgatagcacacgccgacaggagcacattcttacgcaggtatgccctggtttatgcgcggagctccagtcttacttctacagttgggccccgggcagaaaaagccaaaaccctccgggacaaatgaggcggctgagagcagagggtcttcctcacacatccacacgcgtactcttagctcagaatcatttgctgacgcctctgctgtgccaggggctgggggcccgggtgagagggcccagccaagaaaatccaccccatccctattcgcccccggccccatcccccacgcccacgcccaggaactggtggcgtccaaagggactgcgttggggtgaggccggggttgagggcctagggcgcagagccggctggagacgcggcgtggggaagggggccgagggtgagtagtgtagctctgagtaaaagagccaggggcgccgatgggggacccgggaggcattgacttttgcgctgtttgcccgcggcctcggagcaagcagacgccatctgtttgccggctgcgacgcgtcccgtttaattaccctcccggcagcctaatagagatgatattaaactaaatctttctgacattaaaagtaattatccccaaaccggtggctccgggacggaatggcccctcccgcacccaccccttccctggccgcgccggattccgttagtttggctgatactctccgcccgggaatggggcgcagaggaaagggggaaagtgcctttgggagaaggaatctccacgggttgccctacacgcgttttcccgcacaaccacagactctcctgttcctatgtgaacacacgcacgtgtacacacagacacgtagcgacattttcctccagatcaactcatgagtcatgctgatgaagaccctcagccgcgcacaccctctgtggacagggagacgcgcagcttggtttcctgtccccgtcctctgacaccgctaaaatggtcattttccgtggtcatagccacggatctatgccacgacctgggaccgggcataatttcggagccagaaagtactcctgtggtggcgccgggtttctcaggcgctcttccagctaagggccaggagcccagcgatttccctacagttgcttactgaagtcgcaccattctctgcgaggcaggtccgattattccacttgtcaggtgagaaaacagactcggagaggtgagatgacttgttccacattatcacaattagtgagtaacagtgcaaaaatcaaacccgggagtaccctcatccaaagccaggtctgtctgcacagtgcaggcgcagcgggcgctgcgaatcggctcctggcccaatgcacccctccacacccgttggccgggaacccgctggtgctcagcttctatccggaccccggacctaaaggccgggcagaacaaccaactgaaggtggaggagcgagggcactggtgctgattgagcggcaggagcccccgaggcggagtcccagcggctgcagccctcctttggatcaagccctcgcgtcttccgggcaggcggaagggaggcgtctgcccagtgtcgccaggcttctcacgattttctggttgggagcatctaagcctgagacaaacgcatggagagcggtgttcaccgccccactatttgtttctatttgtgagcgtctactgagtacagccactctgataaacactcggtgtgtgctctcttgcttggcacgcagtccttgggggaagatgcgatgttccacatttcagacacgaggtagccaaagttcaacaaggcgacataacttgcctggggccagagtgctgccgaacttc

SEQ ID NO: 23004 - DNA, 490 bp, Homo sapiens
  chr1:53168691-53169181
  hyper
cgttggtaaaggagccgccccgtgagagagaccggaccaatcacgtttgctgtgaggtcactttggaggcctgagattggtgctcgtgtctaaacggacccgatctttctgagtggctggtgcagctgagggaggttccaggtggcttgctcgggggctgcccagctcgccgtcctctgcagatcccctcgggactctcagcattttgtgggttagccgtggagacgccctgcccttcctgctttggccagtcaaccccctcaagcccgtgcccgtagagcctgcagcccttcctcacctcatcactccccatccccccaagatatagaaaggccgtgacagctgccagccctgcacatgctcttgtttcaacagcggcgattgcacatcacgtagtccccacgtgacctgtcgggcctagggcaagcgcaaagctttcggaaacccgaattattgcaaccttgacttcctgcctgtctctgaggctccc

SEQ ID NO: 23005 - DNA, 768 bp, Homo sapiens
  chr1:63792564-63793332
  hyper
cgctcatatttccgcgcatagcagcaataccggccgagcctgcgccagcagcgtgacactcagccacaagccaccgccggagactcgcagggctttttccagcgctacattcattaggcggcggggtgaacgggagagacctgccggcaactttccttccagccagttcttacccttgaacgacggcctaaagatggtccccttcctttatgtcgtggaaggcaggaaactctcggacccagaccctcaagctgccagcggttgtttaaagtcctggcagatgtcaggaagatgggcccggccgtcgcaccctcaaaagctctttttcgtttaagctttttaaacctcgaagatttagcacaaaatgggaaatgcaaatatcatagacaatgatcgcaagcacttagtggtggggctgggggaagcctgaaacccttgtttgatgttatggaacgcaggcacctgcgacaaacggcactggaaacagctctctcgttgagatttaaagtcaacactactgatatccactttttattccacttaagaaaaaaaaactaaaggaaggggggcagatttatttgcaataaaagaagaaagcgggttgatttttatggggaagattttagctttcggctacacacgcatttagacgtttctactttctctagcactcattcctagaaaaatcaatccagccctgaggcctgtggcccctagagcgttctcaggaccaaggtctgagttgggaccgcccgtatctagttcctc

SEQ ID NO: 23006 - DNA, 776 bp, Homo sapiens
  chr1:63795363-63796139
  hyper
cgcgccgggccggtggaactcagctccgggaaggctgtggacctggaccctggggctccccgctgcctgggcgcctctagcccggcgatgagtggttctgcggggaccgacggccccatttccttcttgcctcgtgatgtgggagggaagaaagaaggcggcaactgcaggcccgaagctcccctcgcccagcggcccaaccacagtgctgtcgtgtcggggatcggtccccaagggagcccccaaccccctgcccacgccgagatcacccccgtgccaacctcgagggctcggcctgcgggactccagctgcccctgcctggagggagggaagggagaagagaatacgaattaattacgaaggaaacccaggtgtgaaaggcacccgccgcggagctgggcgtgcagcggggcgcgcggtgggacctctgctcccgtccccgtcccgcggctactcagttgcccgctcatgggaggctcgcgacggaaaataaatcccctcagagtgaacctgggaggccgagaggacccagcctgggatctctgggggaaataggggcaagtttaccacggtttaattaagccacagccctagcacgaggaccccggcgacccatccgggctgggggatggactggagtgccccccaccccaggccgcgaaccggcagcgagaagcacactctccgccatccccggccccgccgcttccgcctctgcggactccgcgtttgccatgctccttcccggggtccagggaccggagctgcggtgcac

SEQ ID NO: 23007 - DNA, 349 bp, Homo sapiens
  chr1:67217980-67218329
  hyper
cgccgccaacccaggacgcagcccggctcagagtgacccccagtgggcagtgaagatgagatcctctacatccttagggcagctcagagggccactcagcggccaagtccggccggggagggccgagggctctgtttgaggtcaccctggagaccggcctcagagtccagggagagtgcgcgggcggccgccggctgaatgaagcctgggacgcgggagccgcgccgcgcgcagtgtctgcagtgccggaggtctgggaggctccgggcgaagcctccctgctgcaggtagggtcgcctctctctgcagcgcgtctggaccccaaaggaaggatagggggcaagggatc

SEQ ID NO: 23008 - DNA, 1845 bp, Homo sapiens
  chr1:72748833-72750678
  hyper
cgaaaaaaaaaataggaggaactgtatcacaattatgcaaactaagggggaaagagaggcaccttagaatgaaggctctccttactgtcgtaagcgctagagggattctttgctagaaaagtctccgtgtcagggctggggtgaagagagctgaggggcgctttgccttccctcaccggtgcgttttacctctcgaggcaccgtaagtttgaagtcctccaagttgtggtcggcgccatcatgacgccggcgactgtgagttgtttttttgtttattttcttctaatcttgcctgggtggctacgctgcagttagcgagcagccaactagttctctctgcgttttctcgggaataggtagggacggtggcggggcgctgcttttttgcggggacacgaggaggtgcaaggccttgcggcagagcagcttgcgtgtttgtggcggtcggcccgtatggattgcaggacgcccctcttttatctgtgggtgttgacactaagttgtgtgtgtgagtaggggattgtttatggtcaacatggagtgtgtgtgtgatagagagcgtgtcgtgcgcgcgggggcctgtgcacgcgcggcacgcaggcgcgctgggagggacggggcgggtcatgctgggatgtagagtcgggaaaagactgcaatcaagtgttttaattgtgtagagcccaggcggtccagttatgtaagaggcagtttaacccatttgagcctatcaggccgaataatcggcgcatccgagtcaaggcagggcagagttaaggggtttaacgagtcgcagggttgtatttcttaacagcctccacaccgcgttaacaggcttgctcctccgcggtgcagagcggtaacctccgcttccccacgcagcagcccctccgcagctcgccgggctgttttcagccctgccctggcccaaggcagaaggagatactaggcgtggggccacccctactcttttttcttctttccttcttgaactcatttccagattcaagatccttaagcttttccgggccatttgcaaatcaatgcgagaaccgaggctgagtcgttagcagttacaccaatcaatcttgttcagcgaggagtttgggaagcagagcggggaagtgaaaatggaaaataagtaattaaaaaataagctccctccccctcacacactttttcccttcctccaccccatccccctttagcagtgtttgaagaagatattctttgccagatcccagttcttcttttggaggaaatgaagcaaaacctcacacgtccgtaactcgttttccataatgctagcagggtcatttggcaaagcgcaccgaagcaagactctctgcaggggtcagcatccggctgcctccgcagactgagctctttacgaggcaggcagggagtcgttttgcttggtggtagcagtgttcagagtgatttttatcgccatgcacggggatatatggggaaagggaagggttcccatcacctgtgaccacccagactggcttacagacgaatccttaactagcaacacctccctgctgaactggcactccaaggctgggcagctaacggagacatttgcgtcaggagtcactgatgttagtattctgccttaactctcaaaaccgactcggaaactgagagtgcaatagtttcaaccgcattttgaaacatcaataaaatgttagtcatttgcggatgaatgaaaacattttctttaccgtctggtatgctagggaaataattgtgaaatgacagactctcactaatatcgatgccaaatacctaagtaacactgtcatcttgttaactgcatttttctatcttgcgtggcac

SEQ ID NO: 23009 - DNA, 1291 bp, Homo sapiens
  chr1:75600123-75601414
  hyper
cggttcatcagaaagtggtcaggccacagcggcctctttggacgaagacacacttgtagcattatccttctcggcatcagcttttattagtggatcggggcgggggaggggggagatcggcagacacggacagcctctgaccctctggagttggtatgtgataagcagccctagcagtgccatgtattggaagaacgatcagatgtttgtgtgtaaactagtagcaaaggacgtgccggagctggcagttccccctgagaaggtgagcgagccgacgcctggccagaccagctgaatcgcagtgtccttgaaactcgagttgtttgggctcctaaacaaggttcagaaactacctgtaacggcctcatcttcagacctggcaattttttttttttattacgtagtagcgttagtcagtaatcattgcactccctccccaaaagctcacttaacctgagacatggagactgtaatttgggagatgaagcctcgagcctaaggcgctctcaggtccatgtgagtcgtgcttttgttctatttgctgtggtgatcgtggcggtccgggagagtgggtcgggaggactgggcggctgtcgggtggaaccggagacctggctcgtttcgttcggctgcccgcggacacttgcctgccctgaggcacacctccctctgcggggctccagaaaggcctccgggatccctgggcttgccgggagagccattttacctaaaatgccaaaagaaaaccgcagggcacaaaacgagtcacgcggtttgtctgagtagactggggaagctgacaagctctcacctcactcgggaggcaggacctgtgggtatttggtgttttaagtttgaaatcatctgcagcctgtctgagggcctcagcaggacgcgcgcggggcgcccctgactatttctttgctccgaagccggttggggacaccaggcgaaagcggagctgttctgtttaaacgccctttgtgtgtgaggacgcggcctcagtgcagctacgctgggtcccgcgtagggagcgcaccccagaaagggagggtctcggccgacggtccgggaggcccccaggttggtatcttgcctggtgcttccagagggagggagaaggggaggcgaacagtcagaaatgcagaagtgcgagccgctcgagttcggggtacccacccgcccccgagctagagtttttggaaacgaaagcggtctaagcccagggacgctgcgttttcgtttaagaacaaaactccagcaaatacttggaaacacttgagtaacgcgc

SEQ ID NO: 23010 - DNA, 887 bp, Homo sapiens
  chr1:76080152-76081039
  hyper
cgctttccagtaagtgctttgagtactccggagcaattaaaaagcaagctgacgcgccaagataaagttgtgtccccctagtgacctctagagcggagctaagctcccacaagccagacttgggaggaaaagcaaaaagcacgccaaagcctgagcgctgctgtagtccaagccaatgtattcagtaatacccttcacccctcagttctcatctgagttcctgtccttttttatataaccccaaaggctcagtaagtcgctgcctcccaggtcattgggcccattgtgttgaaatccaacttcgaacgacgccccttccttgccaccatcctcaggtccagttcccccgcgcacagccttcctcaccgcgcatggtgtcgagcccacttccacctctctgcagtgctgcagacaacctctagggctctgcgagtcccccagcgagagctagggagccgacaagctgcgacctctgcgagtccgcgctgcgggagcgggtggcttgcacctgctccccgcgcgccggctctgcgacccctaggcaagacgcagcccaggaggctccctcccgagtcgcgccccggaccacgccgcaatgcctcgtcaccccagcaacaagctcttccttgtcctccccgccatcgcttctctccgcgaactttccaactttggaagcccgggttccaaaggagcaacagggagactgcttagccggagccactgcccgtctcgacaggttggggagcaggaagtagcctgcagggactcggccggtagcaagtccccttgaccgcagggaaaaggagaggcagccagctccaatctcctcctgaggatggaggttggggaaatggatgcagaacttgtcaccctagggacgaaggggc

SEQ ID NO: 23011 - DNA, 772 bp, Homo sapiens
  chr1:76081592-76082364
  hyper
cggaccccccacgcgcttcctccggctgccgcgcagctcccaggcgagccctcgccgcggctctcagctcagcgagctctttgttgctgtgatggcatctgcgagcagcagcggcggccgggctgcgcgctcagctcggctcggctcggctggggcgggcgccgccgcccctctgctctcggccgcgccgctggcccccctcttgcgctgctgtggacgcggtggctgctgcggcggcggcggctgctgtgctgctcctgctgctggagggggcagcgctgggtcccctgagcgcccgcccagcgctgacctcccccttctccacaccctccctcccccacgcccccacccccggtgtcccgtctgagccgccagcccccatccaaccggctaccgcgccgtcatccagcagcctctactggaaagacaacggtggcggcggcggggagctgctggggggcgcggagagaccgcggccatctggggccgggaaggagaaagccaggcagagtctgatggagtctgcctccggcctgccttcctctgggccttcgaagccccctctcaaaaggccaggacgcgctgggcccaagaaagacacccgtcttcacaggccaaccagaactctggccacctgcgggaggacggcactgtcccttgcgacccggcccaggagccgtcctcctccacagcctcctcgaggatagcgagcccgaattccacgcgggcgatgagccccgaagcgcgcggttgcctctgcccctcccgaacc

SEQ ID NO: 23012 - DNA, 912 bp, Homo sapiens
  chr1:77333644-77334556
  hyper
cgatggaggagtgggcagattgctcaagggatgggggtgcccaaaagcaacagcctgccaaaaactaagagggacggggaggggggacctttgcagactttcttcgttttcttagatttcaaacttgcaaggatcgcaaggatccagggccccaggaaaggaggggtgtgaaggactcaaaattccagcagcttggctggggtggctgcgccagacgggcccttccccaaagtgcaaacccacccctgtcctcggccccggcgcgctccctccctcagcccggggccgtacaccacctgccctctaccgagagatctgggcggcggcggccgaaagcagcgacgcgcccggagcatcccttgcgatacgctaggggacggtgctttctctgtcccagttgcgtgcggcggggctggggcccaggccgccccaaatctcccccactagagtgaccaccgcacagttgtccccgctgggcgcgctcctccggtgtctgcgctcagccgctctcctcttctctctcccgcccgcccgcagcgccatggtctggcagtgtgtttagcgctcaccaccatgtgcaccagcttgttgctagtgtacagcagcctcggcggccagaaggagcggcccccgcagcagcagcagcagcagcagcaacagcagcagcaggcgtcggccaccggcagctcgcagccggcggcggagagcagcacccagcagcgccccggggtccccgcgggaccgcggccactggacggatacctcggagtggcggaccacaaggtgacagcatgcccgccagcccgctcgccactcagcctggggatcccgcacacctgagccttccccctttcccggggctgggaggcgctgtgagtaggtgccgttcgaaggctggaggggagtggaccc

SEQ ID NO: 23013 - DNA, 909 bp, Homo sapiens
  chr1:77747314-77748223
  hyper
cggagacccggaggtaaccgtgtatgtgcgtgcgagtgtgtctgtgtgcgtacaaggtccggagaagcgaaacggtcgcaggttcctacagaccccgaccctgttcccttggccacctggtccccggtagctgcatccctgggcggcgcacgcagtgaagcgtcgcgctctggcgccggtgccgcaccgaggggtatgactacgaccccttgcgcgtgcccgcccccacctccgcacctcgcgccagcccgcgcagcgtgaccggcagccgccgcagacccggctcggggaggcgcggagcgcggcgcgctgaaccggagaggcgggccggctgctgccttgcgttcgccacgctgtcctccctcctccgctccctgcgccccacccctggcggccgcgctgcctggcagcccgggaagccgcggcacagctgctcggcgcctgcagctccggctcgggggctggaaccgaagcgggggcggcgggagcgcggagaccacagcccccggggagaggcggagggggtccctggcctgggcggagaggctgagctgagtgcgcgtgagaaagagggctgcaccgctgctcggcgcggactctgccagccccagcttcagccccggctcaggtcgccgcagcccgggagcctccccgcttgcgccccaaggcacgcgcggcacagccatgaacaccaacgatgccaaggagtatctggcccggagggaaatccctcagctttttgaggtagggctagagctggccgacgggcggtagcatccggggactgcatctcaggggttcgggttgaggcagccgcgccccgtcccaccttccccacacggggcatgtaatgaaggggcttgtagaagcgcactcgcccgctcccccgagggtagtcgcctttcccgc

SEQ ID NO: 23014 - DNA, 970 bp, Homo sapiens
  chr1:78956569-78957539
  hyper
cgagcacggtgccctcttctctcccagtactgctctgtgcccatggaaaagggggcggaggcgagagagaagaggaagaggcggaggtcactcgcgcgccccatccctcccaggctgccagcgcagctaggtgcagagggatcccaggagccgcgcgcgccccgcagtttccgcgctaagggaacgagtgcgcggaggggacgagcggctggaccacagccggcgcccgatcaggatctccgcgctgggatcggtggaacttgaggcagcggcggcgcggggcgccatggcacaccgagcggctccgtcttctgctcctcagagagcccggctggcggcctgggatgacaaggtaccatccctccagaggctgatcccaatgcatcggcttcgcttatctagacccagatttaatcaactcaccccctgagacacccagccacagcttctgctggctgagcctgacactgagtttggaccagattccccaagctagggagacgcatagagaaagaagggtactcgagctaacccatccccattctgagctgctctgcgggggattgggtagaaagggtctcagaagagggaaatcggcacagattccgcttctcgccgttgcggggttccctgcgggcggcactgcgagttcctcacccgggcacgtcctcactccccgtgcccgggatgagggagaaaacagccctttggcgtttgagcaattgcagaaagtttcagcgagttcgttagtttggagggaatgttgcgaggccaggccgaagggcgggggggatagtaacgggcgaaagtcgaactgtgagtaagacctggagaaggcgaccgtcctgggggtagcctaggcagttccactcgggctgggcgcaggaaaggctggctccggaattcccagcctccgggaaagctagctgctcgggaaacgccaatcgaattagctcagagaagagtggcc

SEQ ID NO: 23015 - DNA, 1167 bp, Homo sapiens
  chr1:91316222-91317389
  hyper
cgtgacagagactaaaaagctaagaaccgccgtgcgatggccggctttgggcaccgggggtgggggctacgctacgcgtgaagggcctcagtcctcgggctttagttcaggaagaaaatgaaagctggaggtctcgtgggcgggactggaggcggccagataggcaagaacccgcaacaggagtagggacattttttcttcaaattccaatcccatccagcgatagacaggcgcgtgggtctccctcctccacgaccaccacacaatggcacacacttttgctggaaactgaaatcgaagtctctgaggcaggctggggcccaggccggcagcggggaggggcagggtccagccacctcggcgtggccttggcgagcgctccggggtcagaggccgtcgttctcgccgcgctccacagcgcgtcacccgctgccctagcgacccccgggcgaccccggcatcgcctggctgcgccgtcccggcgggccggccctctccacgccctctcctggggtttgcggtgggcacagctccctccagactgggtctctccactagcctcctccccaactgcaacgtgggaaccagagctatccgagtcacgagccccaagtgcacacaaagcccccaacggggccacggcgcctccacgcctcgctacctccagctccaggagcgcagaacgcagcgccctgggtcaccgcgtctgccctgcggagcagccccactgaggggaagcctcgggcaggaggtgagaccccgcgcacgcaagcacccccgccccaagcagggccctctgcccgagggagactctcacctcaaataaacgggcgctgccgcctccagggggaggacagcgggcggagaatactcacgctgggcccagccgcgcggggacttcgctgggaaccacgcgcgggctcccgccggggagcggagccccagcctgcagtcctgcgcccgccccagcaccgcctcctcggaagggaggcctctaccgtccggcggcggacctgcagccgccgcgggagacgctgccccgccccccggccccgcccttcggcccatccccgccccgctggcctccttttcccctgccccctccctccgctcctcaacgcccgccgggtgcaatctgctctctccgggagacgaacgcgaagcgac

SEQ ID NO: 23016 - DNA, 1351 bp, Homo sapiens
  chr10:100993468-100994819
  hyper
cgtggctaccccagggtcttgtaaccagaatggtcgtttggcagaagtctccgggaccgcactccaggacaggcacagtcagggcgtcgcgtgggcctactgtggcaaaggagacgtccgcgcgaatccggtcctggggaaagggcagttccaacaacctttcatccagaagcctgcacagccaatgcgaatgcgccccgccaggacttcttccccgaaaatctgccttccagactcttttctgaggcaggaaagcattaggcgaacaggcagattttttaaaaaaagaaagaaagctggtgggggaaagggggtctgcgcagctgaaggagttcaatgaaagtgggacaagcgttgcggaaaactccgttgcaccctacattcggacgagctcatagacgcgctctgctgcacgaaagagctttcgaagaggaagctgggccgcgcggagctggctgttccgccctcgcggcaaccgcaccaacaggaaccgaaacggcctcggcaagggcagctacagcctctcagtcctccggctacctttcctccacgtggaaggagcgctccacgtggcgcctcccgctacctgccgcgtccgcagacccgacccgggccagggggacaaccccaagagctgagaggcgggcgcacctcaagaagcaaaactcgaatttcgcaaggagtgaaaaatacgaaggacgcacaacggacctggcctcggggcaaagtgggactgagagcgctgagggctcttcgaggggaacccacagctgaggctccaacttgtagggaatttttaaaaactcaacacttggattcgacattgcagaggatttatttcttattttacactgcaactctgtccctgatgggaagggatcgcagttgcctaactgccaaactgcaacaacccgggaagagtgtgagcccaattagattacaagccctagagcaaaggggatcacaaacctccgggtttgctaatctgctggtgcggagttcagatctccgaagcctccctggagtatttctaggactcttaccgcttcccttataacgctgtgaccccagcgaggattttttttttcctttaaagaaaagctaaactgtgcagttaccgcaggagatttaaggaggaggaactggcggggggaggggggcattccgtctataaaaagcgccttacaaagtcctgaagtctggaaatgacagcggaggatataaaataaaaaattttaactccgatccaacttgcccaccactcaagcctctgcttaaattcgttttctgagagtgggagagaactgacgaaacgatctttccgtggaaaattccagtttcgtgcaatccc

SEQ ID NO: 23017 - DNA, 1674 bp, Homo sapiens
  chr10:101292301-101293975
  hyper
cgtggatccagcgcccagtatttacccgccaggaagttttcctgccccgcgcagcagctgaaaaaaacacactcctggggcatccttccctggcgttggttcgtggacagcaagcctcccagaactggcctaggtcgggaaggtgcagccacgcgggaatcaatggttcaggaaccggatctgtgcagcctcgcccgcagcgtctcggacttcaggactctatactagtccttgtctatttctggtagagccgcaacatcccactcgcagagagcagggggcgtggcccacatgagccagaacctatagggagggaggttggggcgccagccccgcccccccaacgtgacgcaaatctcccggacagaggcttaggagcccgggccccagtccctgcagtggctgtaacaaaacccagacccccaggtcccggccaatggaggcgatttagactggagtgggaccgcgtctgtcaaaagcccgactcggcagcagcggcggagtccaggaggagagctggagccgccgcgctgcctccccgcccccgccgggatttattatttggactggacaattaagtggccctgatgatgttaccaagcccggtcacctccacccctttctcagtcaaagacattttgaatctggagcagcagcaccagcacttccatggtgcgcacttgcaggcggacttggagcaccacttccactctgcgccctgcatgctggccgccgctgaggggacgcaattttctgacggaggggaggaggacgaggaagacgagggcgagaaattgtcctatttgaactcactagccgcagcagacggccacggggattcagggctgtgtccccagggctatgtccacacggtcctgcgagactcgtgcagcgagcccaaggaacatgaagaggagcccgaggtcgtgagggaccggagccaaagtgagtagagggggaaagaaaacgcacccgcacacctggagcaatggcagagcgcacacaaacagcccacagaccttgccagcgcagctgcccatccctttaccctttggctggggccatgcctccgccctggtcaccgacagctccacaaagcgcaggtacctgcaagggagccggggtggagagacaaggacgaggtgaccctgacaactactccccccaaaagggggaaatgagggaagggaaggtggttactgctgccctgatgctgagaggcgacgtgggctcagcgcctgggtcctcataactggcagtatttttgctcttccccccgccccaaaaggctcttcccccaaaaagggcaggagcctggacctttttcgttttccctctagggtgagatgagttctcttagcccagggcagccaccccttcttctccgaaaagacagcccaagcagcctgtgtctctcgcacccgcaggggcaggaactttggtggaggccagctgggcggtttcctcccttctctgcttggagctcagcgtccttgaacccgtggcactcggtagagagagaggagatgatcggaaagtgcgtgggaacaatgtctattccgcgcgaccatagctctcacatccctaaggcgccagccttttttgaaaatccgtaacgttttgctttgtgtcccaggctgcgggcctaatagaaaacgcgccgaacttgagtcc

SEQ ID NO: 23018 - DNA, 601 bp, Homo sapiens
  chr10:102998293-102998894
  hyper
cgggtcctcctcctgcagggcagcagagtggaagccagggcctgggaccctctggctgggcaaggagggactggagtccggctcccggtgaccccgtccccagtgccagcggtggggtcgcctgtggcggcccggacaggccacgggtccctctccccaagtcccattacgttgtatttatgtttcattttatagtttttttttcctcctcccttattattgtctcactctgggggaggcaaaggatataatatattcatctttattataccaaatctgtgtgaagcatttaataaaacgctgtttccacacagccagggatattagtgtgagctatccttaagttaatgctcctggactgagggcgccgctgccacagcgcctgctgccggcgggtcgcgggaagcgtaggccctggccgccgcgctccccgcgcgggtccaacgccctgggtgcccttctcgcctgcgccttgaagcccccacgcccatcctagcgcgtctctctgtgacctctcggccgccagcctgggaggaggggtttggaagagccgaattcaagcacccttcctctcccctgccacaccctgcatttcgaatcc

SEQ ID NO: 23019 - DNA, 708 bp, Homo sapiens
  chr10:106398567-106399275
  hyper
cgcgggaagctgcggggactggatggtgcacctccccagtgcgcataggacttgggagaccacactcctccgggctgtgtgagcctcgggtccgcccagatctcttatactgtggcacctccgcccagagcctgaagagaagagcagcaccgcgtccctcccgaaccccgagcttcggctcgggctgcagcgccgggcctcctccggcaggggcgctgggaactcgcggatggccggctctcgtccagcgcccgatcccgcgcccacctgggcctgcggcgctggaacttttcttaggaatacccgctactccctgtctttggaaacccacagatgccaggacccgcaccattctgggccggacgttgtcgctggcttggttctttggcccagcctcccccgctgctaattgccattttggcaccgggtggaaaggcaagttcaagagggcgggggctctcgggaatcgctggatgtcttcttccttggccagcttagattctcagtcgcctcttctgcctcctccatccctcttggctcttacctggcgccctttcgcctcctcttctatctccctcttccttttgcaccattctctcgccccttttctccttcatcttgtctttcctctctccccttttccctctattttctccttcattccttcctctcacctttctttcctctccgcgcattcccctccctctc

SEQ ID NO: 23020 - DNA, 991 bp, Homo sapiens
  chr10:106401820-106402811
  hyper
cgcctcgacttttcgagataacaggtttgtccgattccccccacgcccccaacaggttaacggagtttgttgttagacgctgtgtgtgtttgtttactggagaccctaggcttcggccgccgggaggggagtggaggaaggggcttcttaaagatgagtgggggagggatctgtgctcactttctccaatacttggcttggagggtcagttttcctgtttgcggggtgcttgaattcttggatgagaaaaagggctgacttggggcgggagccgctgaacagaccgattcctgcggctgccgggctccccctacccccaccccacccccaccccccctcccgtcacgcgaaagggaacccggaaggccattcggactcccagcctcctgctcgcctcggggtcgctgctatccgctccaggcgcgcagtcctccagcccaagagggaggctcggccaagtcggcccccagccttggccttcaggtaaccccggttcctccttcaaagtccagggagcggccctggaaagccgtagcagaggccgtaaaaaaaagtttaaagcgtgaagcgaaattccacacccatccagcgctcatgccacaccgctcgccctcacgcacgcacaggcacacggaagtcgctcagcagaaaactctcgacttcaccattgcgtcctgcgccacaaacggctccctgagcggagttgggtgcctgagcttcctgcacacctctccacccgcttttccccgccaccgggttctcctggacaaggatgtaccgagaggtggcgtcgttgagcccggtctggcctactccggcattccgaactgggcgcccgactgagcatcgcgcctgcctggcagctgcagcggcccgcagcgcgtgcccggaggggctccccctacctcgccggcacccagcgctgtgcagccaagcaaagaaaaggcgggggacaggttcccaccatctccccgacttccctccctcccgc

SEQ ID NO: 23021 - DNA, 957 bp, Homo sapiens
  chr10:118893223-118894180
  hyper
cggggtcagggcatcaggttgactaactcgggcatttttcccaattctttggatcgctcctggattcagaaggaagttgggggttggggaggaatctcagaggaaaggtagtagaaaaaaaaaatagcccgaatgagatgaaattggtagcagagtctagtgggaaaggagagctgtcagaggcctggtgggagccaggagcccagcgcaggagctctgggcacctaatgcgcgtgagtccataaatatcaccacaatagatactataaatataaatacagggaaacacttaaaatcagtccagcgcttttttctcggccccttctttattgttggtccgggagtaaggctcgaaggccgaggagctcagatatcgggcggagagttcttgcaaattcccagctagcgaaccagccattgttaacggggcggaggacaggcggctggcgacggagccgagcagcgagggcaccggcaggctgaagaggctgtggcccgcggccggggcgcctgcgtgcaatccccccggcccggcgggcccgggacctggagcaccgcccacagccggcgggtgcggggatgcagcgcccgctgggcccggggcggcggcggcggctgcggcggccgagcctgcagcggcgcccgcgcccagggccggcaagctgggcccgcgcagcgctgagccgagagcgcccgtggcgcaaggcggcagcagcgcaggcaggccgggcggcgacaacaggcggccctgctccagcagccgtagcacgctgcacgtggccgcggtctccgacaccaccgagcgtagctccgagtccttgccctggtccttcttctgcttggtgcgccggttctggaaccagaccttcacctgcgcgccggggtgcggggagagttggagagaggggcagggaagaccagcgtcaaaggaagcgagctcccggggcgcgcggctcc

SEQ ID NO: 23022 - DNA, 744 bp, Homo sapiens
  chr10:118927281-118928025
  hyper
cgggaaggaagccctcctccccttctcctgtggcttagctcagcgatcagggaggagccagttaagaagtcacagtcgaagccatgactgctgtgtcccggggaggcagtggaaggcgaggagcacggagcggggataccgccggacaacccctccccgccgccccgtcggcgtcctcgctgcgcaggggctcccttgctgccccaatctaaaaggaagccgtcgcggcccagggcacggtaactaaaaggccgtcggggagggagacgggaatgagtgggcttggacttgaggtttccgagccagctgctccctagagccgttcctgagctcgtcagccagcacgtatttaatgaatggccactgggtgctaggccttgcacgcaaccctttcgtcctcccccggggctgagccgagggtgacccaacactagtcggaacgagcctggagacatggcgccggggctgcgctctgcaggcctggcctggtcgctctccacgcacccctctctctgtagctgccgccccgcccggctctgcctgtgggcgccccctggcggcaggaagccgagcgcgcaccacgccctcggggctccatccccactcaccccggcgcctctagccgctccacccgcacccccagttcgcgctgcggcggccagcctcttccccgacggccgaccgaatgtccctcagagctttccgtgaccggccagggcgcgtggctgtccggagcccctccac

SEQ ID NO: 23023 - DNA, 997 bp, Homo sapiens
  chr10:44185124-44186121
  hyper
cggcgaggtccactgggccagaccctggcccgaggtggccccggagctgtgagcgggaggaagagggaagggcggagtctggagccctcacgccttccgccttgtgcgcggtgcaggctgccgagagcccggccgggcaagcctttccgccgtggtcagtgactcgtttgcacaaggactttttagggaagagagaagccaggccttcgctgtgggcctagcccctcaaaccgcaagctctcccccttggggtcctcgtcgtgaacgcccttctcgtctcccgccgggctcactctttcgcattttgctgcgaaagtttactggaaataggtccattcactggtcgattcagagggacactagaaacgcgatgcccatatctaacacatcctggccttttgaagagggataaaaaataatacccactagagccccgtgcctccggagagtggggcttcgcatttgcgcgtccgaggcccggcagggagagcttctgggtcctgggggcgcgcacatccggcgcgcgctgtgtcggggagcggcgctctgggctgggccggcagagggcgctgcggggcggccgtggaacaagcaggggagagcgtcaggggacccagcacagcctgcctgctgcgccctgctgccggccgcgccctcctccgtgctgcgttctcctgctcgacgctgcgtcctcatccaacactggcaccgcgcgctccttccagggtcggaggcccacagacccctcacgttcgcttctgtcaggagtagcggcagaatttcgataatttatgtctttgatggagactgggaaggtagcctggccgctgcgcaggagagctgcgcggggtccaggaggggagcgcggagtgggagcagtcgactcgggctgcgcagtgcgtgtcggctgtcacgggacaccggtgaggaccctgcacccagagtcgggggtccaggctgttgctggaacaggaggcagctcggtgtccacggttcc

SEQ ID NO: 23024 - DNA, 425 bp, Homo sapiens
  chr10:44806356-44806781
  hyper
cggggcggtgatgctgcacgcccctgggggactgcatggagaaggggagggtgcgcggggccggctggtccagtgcactccggcgcggccccggcacccgtgggcaccgccatgtccttcgctcagctccgccgcggctacctgcggggtctgcgcggctgcggtggccaggtgaggacgtctctgcccttgcgcggcctgcgctgtatgcttcctgcctggcccgcgcttcccctgcctgcatcacccgctgcccgcgcggctcggagcgcgccctctgctggaccggccacggccggcgggcggctgcctccaggctccaccacaggagggggagcacgcgccctgctgaccgcacgcccacgtgatatcgccttctgccatcgcagaaagcagcggttcagcctctctgcctgcacacttgc

SEQ ID NO: 23025 - DNA, 290 bp, Homo sapiens
  chr10:44882100-44882390
  hyper
cgtcgggcgtccccaggcctttgctgggctgggccggggagcctggccgctcaccggccgcagcgctggggctccggcgccctctggtggcggcgcctccctccccgctcccagagctctggccagctccattcctgcgcagctgatgaaacccgggagggcgaaggggtccgcgggaaatctacacccgggtggaggggcgccctggagctcggagatccgaccctgcgggagccgcgcgcagcctcgcttgcccttaaatctggccaaagcaaacgccatcgcctctc

SEQ ID NO: 23026 - DNA, 1247 bp, Homo sapiens
  chr10:60272362-60273609
  hyper
cgtggatactccatgtgcgttcaggagtgtgtgtgtttgaggagctatgaaagtgcatgtatggaaaggatttatacgtgtaagtgcagaaagtggcagtgtgtacgtggtgtgtgtgtgcgcgcgcgagtgtgtgagcgccaggggccgcccgcccgccgcggctccccgtgggctggccgggccaatgagcgcgcggctgtaggggcggcgggcggggagggggcgccgagccctgcggatggaggcgcgggcagcgcggcgcgctcattccgcgcgggcgttgctggcggggggcggcgcagccactggacccggaccggggccgcgacccggggtggcgggtggcgtgggcggcgcccggggctgggatgcgccgggggctcagtggcggcggcggcgttggcggtggcgtcggcggctgcagggggacgagctagcgccgcggcgctgggagccagttgagcccggccggcgagcggaggcggcagcgcaggcagagcggcggcggcagcgggagcccgagcgctgcgcgcccaccatggccgcccagggagagcccggctacctggcggcgcagtcggaccccggctccaacagcgagcgcagcaccgactccccagtgcccggctccgaggacgacttggtcgccggggcgaccctgcacagcccggagtggagcgaggagcgcttccgcgtggacaggaagaaacttgaggccatgttacaaggtaggcatccctcgtgttctcggactctccgactgagcctctaactccttttcggacatccccaccgcgcgctccggcgcccgctactccagcctacggccggccggtttagctccaggcccgctcccccgcggagccggaggacacccagggactggagacttcgcgggactccccacccttccacgcctctcagatttccaggcgctgggggccctgtgcgaacttgactggcttcagaaaagccgaaggccgagtttgtactggcgcgcccaagttgcgttctggactttggagatgccaactttagcccggacacctgggctgtgccatccggaccactcgggccgcacagagtatgcgtgaccctccccattccctggcagcctcgagttctgtctctctccgtctgtttcactctctccccttgtcagtatccacttcctccagctgaggggccttgtctcactattgggaaacgctctgcagatgtcaaggcttaagacaggagctccc

SEQ ID NO: 23027 - DNA, 42 bp, Homo sapiens; identical to SEQ ID NO: 5905
  chr10:68685841-68685883
  hyper

SEQ ID NO: 23028 - DNA, 883 bp, Homo sapiens
  chr10:70320036-70320919
  hyper
cgcgttttgtctctcgctcaactgtgcagggtccagcgaaggcagagccccagcttcactccctgaggtctgtcctggggagacactgctgctccggggggctgacctggcggggagtggccgcgcagtctgctccggcgccgctttgtgcgcgcagccgctggcccctctactcccgggtctgccccccgggacacccctctgcctcgcccaagtcatgcagccctacctgcctctccactgtggacctttgggaaccgactcctcacctcgggggctcgggccttgactgtgctgggagccggtaggcgtcctccgcgacccgcccgcgcccctcgcgcccgccggggccccgggctccaaagttgtggggaccggcgcgagttggaaagtttgcccgagggctggtgcaggcttggagctgggggccgtgcgctgccctgggaatgtgacccggccagcggtgagttggggccggggcagagggcaggggtgcggggagcgaggactccgacgccgaggcccgaggggggtccgggaggcggcgctcggcgcgggctggatgtggccggggctctgcgtccttggctctcccgctgcctcaggggtgggctcgttccccgcctcgaccccccaccccgggacgctcgggacgcttttgttgccggagataaacaatgcccccggccggaggtatcggccacccgctccggaggccccgccacagcgccgggttgggggcagcgggggcgcctggggctctgaccccgggctgcggtggaagcggggctgggggagggcaagtgtggcgtgggggagatggctgaatataccagcggttggttccctggcccctttggggagttggaggtcggggcgcctc

SEQ ID NO: 23029 - DNA, 882 bp, Homo sapiens
  chr10:83633664-83634546
  hyper
cgtgtgtacctgtgcgtacatttacaggtaaagacaatattttaaggcaagttcacataaatggcttggagatatctgacaggtctgattatacaaaggtcttctgctccacctgcatctctcaggaactcaggcaaaggtggccttccatccagccgcaccgccatccggcaggggagggcacaggcaccctcccacccgcatccgcccccgccccctcgcccagcagcgtcagtctctgaccccactggatccgtacaggagacgactcacaatcggtcggaagctgcttttgcccccccaccccaccgcaaacgggggtttgcttggatcatttatctatcttgtgtgcattaagaaaccagcattagctgctagtgggaggcgctactctgcccgaatcccagcccgccgcggcgattctgcacacacacacgcaccagcctggcagccagagcccgtctggagacgccctcagcccggggtctgcgttccccgggacccccgacgcagtctcccgcttccgtcccccacgctcaaccgggcagggcgccggggcgtgatttccgatcctctgcctgcttgttgggtccctcggaggcgggtcagaccgcacccgccgcgggcgcccggtgcgcccccagcccctggctcgcggcggcgacagcggcgctgttcgctggagtttgactctccggcggcggcggcagcggcgcgcagcagcgaacggctggagcaaggcgagccgggccgctagccctccgcgctgcgctgggattggtctctccagaagagtgctggccgagggttggctgcgggccggctgaagaacaggtgcacctcaccgcccgggctcgcggagcagccgccgaagatcgcggc

SEQ ID NO: 23030 - DNA, 931 bp, Homo sapiens
  chr10:94831380-94832311
  hyper
cgaaagcttggcgagattcctagatcaaagttcctattggcctggtaatttattgaccccccaccccccgccctgcccccctacaagatgttctttaatgatcgttcactctcacatttaatcctttcctgccggacgcccccgccggcctcgatgtacagatagattaaaacgtttttttccctgcggcaatttccagcgtgcaggccccgctcatcttgtgacccggcttgagctgaacttggcgaggtggccccgcagagttcactcggatgtcacggtccggcctgcaggggtcacaggcgggtcaggcccgaggattgggaatgggccccaggtcacgtccccattcgtcggctttgcacaccggccggaggcgctgtccagaaaggggcggacccgggatttctgagaattacctccagcgcgattggcctggcttcctgcagtggccagaggttggttcgccgtgtttacagccaccaaatcgtttgccggagactgaaaccctgcccagagcctctgaaacactgggcaggttatggggaaacgctgaccccccgaaacactccctgtggcggcgactctggcttggagagtcgctaggattgtgcgggtccctccgacctctgcagatatttcctgatacctccgggtttggggactaccgcgagaagggcaacgcatttaaactctcaggagcagagttttccacctccaagggacgccttccaaggcgtgcggcgtgcttctgccagagacagtgttcagttttaaacaaatgcaggtcattctgtttcattttcggcgccgcaggtgcgttcagcgcccaaacccaggtagcgtgtgaccctgactggtcccgagccgggaagctccggcaggtggagagcagagagagcaggtgcgcgtcccgcagcgtctgagctcc

SEQ ID NO: 23031 - DNA, 852 bp, Homo sapiens; identical to SEQ ID NO: 5909
  chr10:97802911-97803763
  hyper

SEQ ID NO: 23032 - DNA, 874 bp, Homo sapiens
  chr11:101452974-101453848
  hyper
cgaaagggcaccgcagcagggcttgaggctgggcagccctgacacagcacccatctatcaggagggtctgccaggcgcctatggggtggaatcctccctccaactaaagctgtttatagagctgagaacctcgggaaaccgcttgcgggtggatgtgacaagtcaggaaacttgactacccaatcacccaaaggggcaatgggacagaaatgctatctgcccgctgcacatgtggtcacagcggtgtcggggaagcggagtcttttcttctggagtccactctgcttactccctacctcccctcccgccacccacccagctaaaaaaaaaaataccctagattcataaacaaaagcttgcagttacccacagcccaatacaaacgacccgacgccctcacttctatagcccgtgagtctcccagcccctaacaggctcgtctccccagacgccccgggtgaaaaggttcgcgccgccggtggagagtcctattggttctatttctgtcttcactccaaggccccaggaccggggagaggtcctggtctaactttggctgtcccacggtccaaggacctcagcgctcagcccgaaacgctaagccaagcgtggagaccgccgggcgcacccagcacccaggcagctccaacccttggagttctagtcatctctcccccacataggctaagagtcacccgggcgcacatctgaatcagccccctgttcagatcccgcctgttacgtagcgatcctgtctcttgtagagcgcaggatgaaggggtctggagaaatcgaccacccatctaatcacctgcaatggtggtgttactatgcggtctcactctcgtgggcaaacatatccatgcgtacctac

SEQ ID NO: 23033 - DNA, 756 bp, Homo sapiens
  chr11:111383135-111383891
  hyper
cgccccgtctcgcgcccgccccgcccctcggcccgcggggttccaaggacggttggtcgcccccgccacagtcactcggccgctcagagcggcggggcgcacggggtcgagagagccagctctagggtttggggctgggaactgaagcctggcgtgaaggaagtgggagcccgggccgaggaggcgaaggggaaaggaaaagcgaggggaacctgagcgggagggccctgagaggagcgggaggctgcgggaaggggaggcctggcactcctgggggtcatgggggtcggggcgcggctcccggcctgggagggcgcgggtcctccccggcagcgccgcccgctggcccagctacgcgtgttgtgcgctgcgaggccggcgggggtcccgctgggcccgggggtgtcctcgggggccgcttgcgcccagccatggtagggcgtcccccggtgaaatggggtccgaggcgggccccgaccccgcgtcggcgctgcggaccgtccgggagctgcagccgcgggtgcccggtgctcggtttgtaggcagtgtcattagctgattgtactgtggtggttacaatcactaactccactgccatcaaaacaaggcacagcatcaccgccgcccggccgggaagaagacgccggctcgggcagcccgcagccttcgagagaagatgcctgagaagcgcggcgtcggcgtgggtcctgcgcagcctgccccgcgagcgcccgctgcaagtgcgaggaaacccgc

SEQ ID NO: 23034 - DNA, 69 bp, Homo sapiens
  chr11:131558034-131558103
  hyper
cgcctgcagctccccagaacggccaccggagggcacccgcgccccccgagccgcgaggctgcctccacc

SEQ ID NO: 23035 - DNA, 457 bp, Homo sapiens
  chr11:16635541-16635998
  hyper
cgggctgacaggagtgagagctaaaacttccaactagctgaaaccaatagccgggaatcgagcgaaggcgaactctcccagcaaagtataaagcttcgggccaaagagtctgcagctccaagtcaggggctgcggctccgaaactccaaacactaactcccagggcagtggcagagggtgggggcagcttcgaagaggcataccaactgctccggtcctggccgaagaccgagctcccttctgcggtgacctcggctcagagctgactccgtactccctgggactcatctcccgcttcctctccaccttcggaacagtagacaaagggactcagggacgcggccagacccaaggtcacaaacggaggtctccgagacgagaattgcgtgcaagagaaggacgttcaggcagcccggccgcctgctgcgagagctgaacatttcccagctctatagtc

SEQ ID NO: 23036 - DNA, 100 bp, Homo sapiens; identical to SEQ ID NO: 5915
  chr11:22647396-22647496
  hyper

SEQ ID NO: 23037 - DNA, 960 bp, Homo sapiens
  chr11:31825604-31826564
  hyper
cgccaggagcctgagcttcttagcaataaataagctccaaatatagaagaggggggaaaatatgatgagcctctctgacatttgtctttaaaataaaactagctgcacgtcaagtttgagcttaatttctggaaataggcggaagtcgctccggatcatgcatggaaggctaattgaaaagatcagtcggggcgcttgtggcagccttgtcactttgtgacagtgctccgctccgggaaattgcatcgtcacgacaaacgggaccgtgataaaacgaccctttccgtccttatttgtagatcactcagacgagattgaactgcacttgtttccccttcgaggggagccgcgttttcagggtagccgaaggcttggggctgagggggggccctcaccaaggcgcgggtgggggccggagcctcaactcgatgagaagtgacaggcgtttgggggatctgggctccggccgggaccagcgcaagcagggactttgcggggacaccgcttctccaacagagcaaggcctggcccacgtttccggtttctcctaacttccttttattgccttcctttgcttcgcaagttccatctacccctccagctacagagccccacctctaggcacaggaagcttcccggaaaaagaaaggctgtcccagaaagagaccgagagagactttccaaacttcgggcatagccacggcaattcccagtctgctaatgccaaggcgggcgcgtaaggccgcctaaatctagacctccctcctcactcatttcaaaaaataacaacgtgccagccacctccgcagataccgccggctggtgcttgcccaggagacgccagggccagagcgccactcccagcatcgaaatggcagagagaaagcgcagctccaaattccccttcagaggttaagcctcaatcattgtgtcccttccctagggactgctggcgctctc

SEQ ID NO: 23038 - DNA, 351 bp, Homo sapiens
  chr11:45376873-45377224
  hyper
cggagacggttagtctagcctctctgtggggcctctctgctggtacccagatgctgagcgctgaaattctcatccgccacacacaacatggcggcttcctggacccgcgcccaattttcgcttccgggatggaagctacgtcatttccccctctgttgccctagcgccccttggaagccaagaatatgaggaagtcttcttccttcgcgccttcttcttccttacgctccagggcagcctgacagagccgctcgaaggctctgctggccgcggctagccggtgaggagggtggggggaggggccgtcccgcgtgtgggggagtctgaaggcgaccaacgagagggagggcc

SEQ ID NO: 23039 - DNA, 524 bp, Homo sapiens
  chr11:59333339-59333863
  hyper
cggtccttgttacggtttaaaaagctggacaaagcccgtgcgccgaacgctttcgaggacttctttggccaagagggggcccgggctgtcaccattcccggcaagcccgcgaccaagcaggcagcggaggcggcgcaggccgagagctcccgcccctctgacagtgagagaagggtcgcagcgcccacggctgcctagaacccgaaagaagaggagcggggtgcggggacacagggttgctcaagaaagtgagctatgcgcagtgctccggaagagcttgtctcaaaccaggtcccaagtgagggcagaggcgtaacttcgtactgggcagtttaaaaggtaagacatatgtccccagtatcctccctcccaggggaaaatgacgataaggtttcccttaactgccccagcccgcgtgagaacccacagggtgttgaccctgttaactgcagaaagaccctgttaactgcagaaatcacatgtagtgatgactaacgcctaaaacggaagcgctgccgaaaccc

SEQ ID NO: 23040 - DNA, 408 bp, Homo sapiens
  chr11:84431917-84432325
  hyper
cgatttggtaaaaagccagtggcttgctgcaatccagagtcactgtggggagcgctggccgggcaagtggggtgggaggaaggggctgagaaagggaggaagcgctgtgcttgccagactggccctgcctttgggcgctcttggtgccacgaaggagtccccagcgtgggagcgcgggacctccccgcgctgacgtgaccccgagactgcatttggcccccaccgctacagccacccgagggtagaagacctccgaggccgacttcccgggaaggggaggcccgctcggagcgcggcagggaacttcctcccagccctttgacaacagcatgccttgccgggggcagagggccagcaaagaaatctggggtagaaaacaggctcaaaatgatttcgctggtgccctac

SEQ ID NO: 23041 - DNA, 989 bp, Homo sapiens
  chr11:94501274-94502263
  hyper
cggcaggggacaaaggaagggatgctgtcgccctcctaagtctcagggagacacgtcagcttgagctctgggcaatttcagcctggcagtctcgcggcccggggaggggcggcgggtgtctgcagacgggctctagggcccagcggccgggcgccacggcgggggtggagtgtagggttctagtgacgagcccgggcgaccctccccggcccgcgcgcggggagcggggagcgcggacggcggcgggagcgcgcgagaagctctaggacccagcagcggttgtcgggtttggggctggaggtgaagccctgtgtgaatggggttgattgtccggcgccacttccccgcgctgcccggcagccgtcttccccagccgagggactgaactagccatgatcgcctcatgtggagggcaaagttgcgccggggaacttgtgagcctgcggtgaaaggtaaccagcccccactcgaggtgccgggagggcgtctccgagtctcccacgcgaagaacccagtcgccccgggctccccgggcccctgctgctcacggaagggggcagcttctgggggcccggggctgagatcccagattgttgtttttaagcgggttcccttgccccgctccaggtccagttgcctgcgggccgggcctcagcgtcttgccgccccgcgacccacgttgactgaagttgtggccccggggtttgggccccggggtgctgcgcgcccgacgcggggctggcctttcctgaggggcgcagccatatggccagacactccgaggcgcgcccgcgcccgcgcgcgggtctcgcggcgagggaggggacggaagggggtgtccggtgcagctttccccggcgcgagacaaaggcgcgcgcaccggcccgcccgacgggctctggcgctgtggactggaccctttctgcccgccggccagacccggctctggcgggtgggggcgacgaaagggtcgcaccccagccccagac

SEQ ID NO: 23042 - DNA, 847 bp, Homo sapiens
  chr12:101110836-101111683
  hyper
cgtcccgagaggctgtggcgcgcctgggactccccgacccttgccacgacatccctgccaccccttttggcgtgaacccaccggggatcccgcccgacgccggctgcgctgggccaaatccgcggcgcgcctctgccgggcacctcccacctccagcttcgcccctcccctctcccggccgcgcgtcctccgcggctggttcaatccccgcggggacccggagcgcggctgccggtctacgccctctctcctgccgctctcgcggcgcagcccggccgggggcccccgcgcgccggcagctctaggggcgagcgcggcgcgctgactgggcgtgctcagccgcggagcgcccgggcgccgctagagccaagcgcatgcactcgccgggccgggccgtccaggggcgcagcgcgcagggggccgctctagccgacgccctggccagtctgggcaggacgcgggccaggatggcctccctcaccgcatacggtaactggggccgtcgcgggttcctggggcggcggggcggaagggaggggcccagggagccgtcgaaacacccggggaaacttcggggttcgcctctgcggaggggtctggaagggagggagacggcggccgtgcgcgccgctcctgaggggccgatgttccgcggggtttcgggccgcgggtaacccgggaaccgggtgtctgcgggaaaaacgcttcaaaatttgggaggatctgggagcttcgggactctagaaacattcccctcgcttccgaccactcaggggaagggacgcgggtgttaagtcctcctctagcggggtgaggcttggagttgggagatgtgcgttcagccagc

SEQ ID NO: 23043 - DNA, 899 bp, Homo sapiens
  chr12:113900180-113901079
  hyper
cgccccacccagggggagagcaggatgtgtgcgtgttcgagtccggcctgctccctcgggctcaacataaacgtcaaagtaaggaagagcgggagctggacccggctggccacttcctgacccacagccctattcctagagaagctgaccttgagcctcaagattggccaccagggagcgccagcgtgcaggtggctcggtctccctctcggtggctcccggttcacgcgagttcctcgctcgctctccgtcttctccctctggctgacgctgtctctccatctcctcctcatcttgccccctttcctctccctctctttcaatctctctccttttcttatcatctttttttttaaagacggggaaagcacagcgagaaataagattacaaaatgccactcggattgcagagagagggaaaaacaccgtctccgccccttggcctcaccctctctcagtccaaagaggtggcggtggctgggtgggtgggtgggggcccggggaaagtctagagcgtgctcgaaatctcttgaccctccggagtattgactttggtcccaagaaattgctcgcggttgctgggagagtactggcggtgggctgaggctcctggagagcccgcggggtggagatgggggtcggccccccctcggcgcccagccgaggagcagctgccagttgagtgcggacccgagagagaacccccgagggacacccacgtctcccaccgcgtctgcgtcgggcgttttggtttcaggaggctgcttcggggcggggcccccgggggccgagcgcggggggcggcccggcggccttaccacacggcggcttcgttgagctcggggttgggatgcgacaggggtccgctgtagccgctggtgccgctcattgggaagggc

SEQ ID NO: 23044 - DNA, 953 bp, Homo sapiens
  chr12:113901089-113902042
  hyper
cgccgctgaatacctcgccgggcatggggtgcagcgtgcccggcaggcctggctcggggctcggtgtgtccgggtgcgagatcatgtcggtgaacctggggttgtccgcggcgtgcgggccggcgagcggcggttccagcgctcccagcggcgtcgagccggggccagaggccgccaggaagctggagtcggccggggactgcgcctgcgaaggcgggccgtgcgcgaagaagtcgtagttgcttcccggcgcgtagtagtcgccttggtagtctgcggagggggagcgggaaggagacagggcgcggtgagagaaggcgaagtaggcgggggacccgggacccggggaggggacccgggcgggcgagagaggggagcgcgcgacaccgacccaaggttagagagacctgcggaggccggcgccccttgagacggtggacgtcgcaggctcacggggagggttggggagagagacaatgagagatctcgaaagggcaagagactcagactgccagagaccacacacagagacgggagagactccgagaccgtgggggacacacgcggcaaaaactcggagacttcagtcacaggttccctgacacctagagatggagagagacagaggcggccagagacgcagagacagacaatgattcctaagtgtcttagggtcggtgagagacacagagatgcgggacagcgagagacagacggagagatcggcagaggggcagagagaaaggcggaaaagagacccagagacgcggagtccgcggctgagacccgaaagcccgagacatcggagggtcgcggaggagtcgaggagacgcagagagaggaaagacggccgcggttagagacacgcgtggaaacccccgggggcggcagcgagggagtcaggagtgagcccgaagatggagagaagtcgatgcgcccagagaacgcaagac

SEQ ID NO: 23045 - DNA, 752 bp, Homo sapiens; identical to SEQ ID NO: 5924
  chr12:117536636-117537388
  hyper

SEQ ID NO: 23046 - DNA, 275 bp, Homo sapiens
  chr12:127865668-127865943
  hyper
cgggaaggcctggaaatcgcaggtcctgaggacgcggcgagttcacggagaggacctgccgggcaggggctctgggagcctccgcggggaggggagggcgcgcggccggcgcggccacaacccggtctgcggcgccatctagcgggcgcgccgggaccgtcgcccactaggcccttttccggaggagaagctgatgccaatcaaaacgccatctctactccttgtcaaagtcaagtcatttagcgaaaggcctaatgagctctgcaatcagctac

SEQ ID NO: 23047 - DNA, 288 bp, Homo sapiens
  chr12:130498574-130498862
  hyper
cggaaagagggcaaggagagtggcggggtgcgagcggggcgctgcggaggaggctgcagcggcagcggtgcgggcaggagctctgatgcgatgcgatgcgatgcgatgctgcccccctgtgtccttcgacgatattgctgcgggaagctttctgtgctcaagacctcgtccatccctccatcagctcagaccttctctgcgaatagctctccgggtggtaaagagatgcatcacatttaaaacttcgagacgtcctggattcacttagaaagatgggaagaggctcac

SEQ ID NO: 23048 - DNA, 187 bp, Homo sapiens
  chr12:131400786-131400973
  hyper
cgcctgactgtctaatgcacctccgcatccccggcacgcaggacccggccgggctgccgcctctcagaatcgctgtgcaattggcgattgcgacattcatggaataaattccccttcgcgacacatggggacgctcacgctccacgctgtggccacactcttacgcgcctttgttcaaatggtccgc

SEQ ID NO: 23049 - DNA, 1267 bp, Homo sapiens
  chr12:14927051-14928318
  hyper
cgagtttatgtgcttggaagcgagcgtggtcgtggaaaacccgtaaccgctaaattcatctgggtccccaaagactgagccggctggcctcgttatttatgtgagcggctatgtaaatgaggattcggagattgctctattgattggagagagctggaggaggcggtctctcttccagagcgctagttgggagcggagcctgcctgtcattggtcaccagagccaatggaaaggggctgccgcgcggccgtaaagagtttgtagaggcagttcgggtgcggtacgttgcattccggtaccggacgccgagagcggtttgtctccgtctctggagttgtaggcgagaggtgatcatgtccggtcgcgggaaacagggcggcaaagtgcgagcaaaggccaaatcccgctcctcccgcgcgggcctgcagttcccggtgggccgagtgcacagactgctgcgcaaagggaactacgcggagcgagtgggcgccggggcgccggtgtacctggcggcggtgttggagtaccttacggcggagatcctggagctggctggcaacgccgcgcgtgacaacaagaagaccaggataattccccgccacctgcagctcgccatccgcaacgacgaggagttaaacaagctgctgggcaaagtgaccatcgctcagggcggcgtcctgcccaacatccaggccgtgctgctgcccaagaagacggagagtcagaagacgaagagcaaatgaccctgacgccgccctcagggagctggctcccccagcaaaggcccttttcatggtcgtcccgcaatgcttttgaatgtgctggatgtcatggagggccggtgacatctagcggggaggtgggcggcgagggtcccggcgggagccaataaagttggtgaaaatcgtttggtcgagagagctgtgtagtcgcggggacatgtcggatggccccaggggaggggggcgaccgggaaacccctggagcaggcactggtgggtgggcttgagccactctggacggctttagtccgcaggtcaccctcgaggcgtcaggggagggtggcctggaggtgggcagggtggaagccacctcgctgtcagtagggcaaaggggaggcagagtcggtgcggtgaggcctccttcggaattatttttacttccctttcacagagccttcgctctcctgccagtttgtgagcactcaggaccaagttctgggaagataccgtcggatcgagctgagctcggggcaggaagtgtctgc

SEQ ID NO: 23050 - DNA, 975 bp, Homo sapiens
  chr12:45269924-45270899
  hyper
cggactcgccccggcgcggctccgtcggggaattagctcccgagccgaataaaagcagccaaagactcgcacacccggtagaaggggggcggccccaagaaagcccgggctggggcggccccgcacccccccgtcttccccgccgcccgaacctgttgtaaaggcagagacaatggagaaagctccgggagacgcgcggagagactgctcctccggggagggaggggcgggccgggggaggcggggtaaggaggagggaggggccgccgagggcgaggccggcgctcagcgtcggtctcccgcacggtctcctggatgccaaacccggtctagggagcccaggagccgttgcagcctcagctcttctccctccctctctcgatgacccgggcaatgccaacctcctttcgggattgaaagctctaaatccaaggtgctaagttgatgggcggtctttgctctcacccctcgatttcgggcgcgtgtcttgaaagacaggagagaaaaaagaccacccagctgcaggaggcaaggctggagcgagtagcgctcgcctgccctttaagcaaaggagggaagcccatgtgcactcgtgcactgggctccggagcagccccggggtgcagggcactccccctccagggcgtgcggaggaaggccaccaaaacacgctgcactgccgaggtggagctgggcaaagtaggtagagactggtggggacggatggcgagcctgggaagccccgggtgtcctggtggagaggttccctgccgggggcggggcgctggagagcttccccggcgcggagagcttcccgggcgcggagagcgcagagaacttggccaggaggtgctggacagctccggaacccgcgcgccccctgccaaataaagcgtggagacccggactcgggctctctgggaccagcatacagcagaaggcaaggggaactgagccagggcgtctgttcacgcc

SEQ ID NO: 23051 - DNA, 956 bp, Homo sapiens
  chr12:54379055-54380011
  hyper
cgcaatgtaactccgaactcgtacgcggagcccttggctgcgcccggcggaggagagcgctatagccggagcgcaggcatgtatatgcagtctgggagtgacttcaattgcggggtgatgaggggctgcgggctcgcgccctcgctctccaagagggacgagggcagcagccccagcctcgccctcaacacctatccgtcctacctctcgcagctggactcctggggcgaccccaaagccgcctatcgcctggaacaacctgttggcaggccgctgtcctcctgctcctacccacctagtgtcaaggaggagaatgtctgctgcatgtacagcgcagagaagcgggcgaaaagtggccccgaggcagctctctactcccaccccttgccggagtcctgccttggggagcacgaggtacccgtgcccagctactaccgcgccagcccgagctactccgcgctggacaagacgccccactgttctggggccaacgacttcgaagcccctttcgagcagcgggccagtctcaacccgcgcgccgaacatctggaatcgcctcagctggggggcaaagtgagtttccctgagacccccaagtccgacagccagacccccagccccaatgaaatcaagacggagcagagcctggcgggccctaaagggagcccctcggagagcgaaaaggagagggccaaagctgccgactccagcccagacacctcggataacgaagcgaaaggtaaggccgcctgggccgcgggcgccactgggacgttccggcacttggtcttcgcggccggggaggggggcaggggagagggttgggcccaggaggccccagaccatttcgggaatgcgaccctggctttcgactagcgtccgctgagctccaggctggtggcgcgtcacttagctggggaaggtaagcggcgacgtggaggtgtcggccctgcccc

SEQ ID NO: 23052 - DNA, 852 bp, Homo sapiens
  chr12:63025588-63026440
  hyper
cgccgtccctcccaaggacaccgcagactgagattattctgtcggccgcactcggcccccaaggagtagcactgcgagggtggagggtcctccagcgcgggggcgggggtgtaggccccgagtgatttcctgccacagtgccggagcgggactggcgctgcctcccgggtccaggttccagccgctcccagctgttggcggcgctgctgagatgatggcctggatcccccaggttccgggactccccaggtggctccccgaggctatttacagctgaggttcggccggtgattgctgggacggaaaactcatttctcagcctggcttttatttacactcttattaaggaggctttcattcgtgttggaatggcagcgagaggctgcgggccaggcggccgaatgggtcgtgcccgagcgacagcggccgcctgcgccgcgaccttgagggcagaggagcgtgggcggcgtgcggggacaaaggcgcgcggggagcctgggtcacggctctgcagcagacacgggacctccacgtttctaccaccccggaaagttgagcgccttgggggctgcatttctccctttattggtagctggttcggctcgcccctttgcccgaccacacgctctttgtaaatacagaataggacaaaacggaaagagtgatgtgctgtcccctccgtctaaaaccctaagtaaatacccagtcctcccccagactcttctccacctgtggttcaggtgtctgggaagaaggccctgcacgcccgtccgcgcctcccctgcccgggggagccccgggtaggcagtggccaaagactctgtagaacaactcccgggagggcaggctcgc

SEQ ID NO: 23053 - DNA, 871 bp, Homo sapiens
  chr12:63545150-63546021
  hyper
cgagtcatgccttttctgggctcgtagccgtttccacaagcttccctcactagccttcctcgctagcctccttaaccatgcatttgacttcaacaggcacgctaagcgcggtacctggaaacctccagtccacgcaccggcgtccacgcatctagctcctgcacctgaacctggctctcgacctcacctcctccagtccgggtttcttccttctcaccgagctcacccgtgcagcagtctggcaaattttattccccaggcaaattttcccggggcaaacatttctccccgctcgtgacttaaagagctatctcttcctagtaacgtctttgatgcatgctatttattaccctatgtttgcgacgggaagaacgcactcatcactttgcagccccagtggctgctgtgcctgtattcacagcggggtttggggggagtgtctcctggttttctctatggagactagggacttaaggagttttctctagattcctggggttttctgcgggaaaagcctgattcccacagcggggatggcggaaatttggccgcagtggtccgtggggaccgtctggttactactgagtcgtggggacatctttttgggtggacaaagagcagctgccggacagcggccatccaggcagtgctgtccagggcaagggacagaaaacccgcccggctcctgtgctcaggagtaagaaagaggcaatctcaaagagaggaaagaggccctgggaaggaggggaaacaaccacctacctagtaatccgttactctgaacagctggagcccctctgcagggcgggagggaggcagaaatgcgatctccctcagctctgttttaacgttggtgaagatatgcctcgac

SEQ ID NO: 23054 - DNA, 975 bp, Homo sapiens
  chr12:85673619-85674594
  hyper
cggcggcaatgaatctgggtgtcaggggctcgtctctcctggcatttgtctgaaatggagctgtctgtctgtctatcctaggcctggacgccctctgcccgggtaagtggggaaaatgggggtggggtaggggcggagggggacctggggtggagttagtcgcccgcctattttcatattcattagaactgggaggctgcccgaggaggccagctgagtttcaagatataaaagcaacttcgggtgctccttttccagccgggacgtattaaagggaccggagcggggcagttcccgacgccgcagcgctcgctttcccttccctcctctctggccctccctcctcccacccactggctccctcccccagcgctctccagtttctgtgccccaggagctacgcgacagtcttccaggattatggagtttctgagcgagaagtttgccctcaagagccctccgagtaaaaacagtgacttttacatgggcgcaggaggtcctctggagcacgttatggagacgctggacaatgagtccttttacagcaaagcgtctgcaggcaaatgcgtgcaggccttcggacccctgccccgcgccgagcatcacgtgcgcttggagaggacctcgccctgtcaggacagcagcggtgagtcgctagcgccccagccggagccgccgcagcccttccgcaatcgaaaatgcaggatcggtctgatcaggcagggagggagaaaggagaaaagtgggagcgagggacctggaaggtggaggaaggtagtggaaggtgctcgctttatgaagcggtgttactgctgctgcagcctttgggggcggagggcggagggagggagagatccagcaccgggttgcctctgagcgattctcctttcgctgtagggtctggtcgcctacggatccctgagtccttctgtaatattggttcctggagtaaactgatagggcgctaaatagagc

SEQ ID NO: 23055 - DNA, 994 bp, Homo sapiens
  chr13:25320293-25321287
  hyper
cgccaccaccaccgcagccgcccgtcgcggtggtcaggggcgctccgcggagaccgagaccaggccccggcccgcagctccgcgcgttcccaggcgcagctcctgatgccaagttcacttggaccccggctgagattagagaggcctggcgaggtgtgggggtgcgcagggagaatgggctgtggtcgccatggtgcgtgttggtcttgtggagatggatgctcctccgggtcaatctctgccttctcggggtcgccctcagtgtcgctgctgaaaaggcctccgtcctcctggtccttgctgtgcgctccccacgtcaccgcgttctccttgaggggccggcgggcgttggcgaaggtggtggggactgtcgtgaggatcatcatgggcagggaagggcgcgcggcagtggcctcgagccctgggtcttctccttcctgaatttgcaaagccaggcgaaggccctcgtgctctcccagagagctgcgctccacccgcgggcctgcctgcgcgtggggagagcggggaggcggggacaggagacctgagcccctgggcgcccctaccacgtgtcccccgtcccaacactggacctcttcagattccttgccgagaggggcctcgtcccaaggctggatgcgccgcgcagcggtgaaagccgccctcgcagcccgcaggcgaccagtgggtgctgttggctttcgccccggggagggaacgggcttgggggcactggcggcggcggagcgcggcggggaagctgtgggggtcgtgcgatggttatggagagtgctccatccgccaggcctgggctctgggcgagctgaggagaccggagtttttccccaggagggagccgcgcaggccggcgacctcttcccaaggctctactgctggaccgcgcccgcggcgccgctcccgccccccttcagcgcactctgcgcctctcgctgggtatggccagctcgcagtgcgcgtttatgctgcggtaaac

SEQ ID NO: 23056 - DNA, 1051 bp, Homo sapiens
  chr13:28491488-28492539
  hyper
cgggaaggtgctcgcctaatggctcggtatcgctgccgggcctgttgtgggcgaggcggcttggagggggcgcaggcgtcagcggggattcagagcggaaacgcatttcgcctgtaatggactcggcgattttacgataccaggagctagatccacggggaagtacaacacacgaccttactaagcggagggttccgcttgatgcgttttttatacggctgtacgtgataaaattccagataactttgtttcatctaataataataataacaataataaatggttgtttgacctttgctccctgggtcccttctataggtcgcaggcagcagaaaatgctaattgtgaaagtgagaacgcgcctccatggaatacccccggcgatcccctcctcctcccccacagccgcgggtacccgggtttttgccggcgaccgcaaccggcggatttgctttctgctgagagcctcttttctttctgcagggccgagcaaaaatattaaatggaagcaaatgaagcatcgaaatggagaccaatttacagaaatgtgcaattagttgagaagtgcaaagtaaacactccgggggtggcaggcgaggcagggagcaggggagggagagtggggcgcagactgagtccagagtgggtgtaggggtgcccagggaggaggggaagggggaggaaaaggagggggaggggaaaagtggccgatctttgtcctgagcggagcttgccgtccgctcataaccgcgtcgccaagtcaaccctcggcgactcggcagattatctccaagggtcaacacgccgcggccaggcaaccccctccagcctgccctcctgatcgatgtggtcactcgcggccagggtgatagggtagagttctccgcggccgcagacaatggactcattgacgcgggcgcacagagattaggtgcccgggccccacggcctttcactctctgcccccaccaaaactgcaggtggcacttttccctgaagaaatcaccgaaactctccccgcccgccgccgtgcttcccttggcctgtcttc

SEQ ID NO: 23057 - DNA, 291 bp, Homo sapiens
  chr13:29393559-29393850
  hyper
cgcctgccttttgcgcaaatcttttcagagactggctttgggctcctatgaatcaggcaccctagcgtcctccaaagttcttcccgatgctgaaccccaatgcctcctgctgcgcctaattcgaagcggctccctcttctgttctgagcggaaaacagcggaacccattcctggaggcctgccctggaacggccaactcattcttactcctttctcctggggtccgatgctagggcaccacggtgaccagccgcgcagcgggcagcggcccgcgccgcgcccaccgcctgc

SEQ ID NO: 23058 - DNA, 866 bp, Homo sapiens
  chr13:46960952-46961818
  hyper
cgccctgcgtaaaagtgtcctgaggtcccgcttctgcgcccttcccggcccaagccgaacacagggtcaacctcactctacaaagtcaaccggatagaaatccgccaccccgcgaggagccccttcctactgtctccaaggggtccccgacactgctctgagcgaccctaagatacctgggtgtctctgctgggcacaaacctctctggcgccacttccaccatccaacctctcccgcggccctcccttccctttctccaaccaccctctccaccccgcgccgctcccatctcgcccccggccccgccagcctcacccagccaaacccgagcggtggaacgctgcgctgggtaaacgccgcgcgtcgggtcctccctcgcgcggctccgggcagcgttccgtggccaccgcgctcccggtaacagcagaaaggggagggaggagagctaccgaggaggggacagcgacgccccgacgccgccacgccccccgcctcccacacgggggccaccgtagctctctagaagctcctcagggaagcaaagcgccgttcccgccgcaggcaccgagacgtcgcccagatggaagaaactctggagatgcgcgctcctacaccggtgccgcggcgcccgggcccagcaccacgcacctatgcgcgcctctgccggtcctcctagaaatcccgccctgcctacccgcggcgcgagacgcaacgacgctttcaggggtcaaagacctggcagaaatgacttcccaaccccagatgcccccagcagcagtatttagcagtcatacaattgcctgaaatgaagaatgagtaatctggatgagtcggccctgaaatcgacctgcaacttacccggaac

SEQ ID NO: 23059 - DNA, 804 bp, Homo sapiens
  chr13:53312858-53313662
  hyper
cgtgccttccccacggtcgcgccactgcttagtgggagatgagccgagaacggcctttctcggaccgtccactacattctcccctactctacgcttcaatcttctcccgtgaaaccttcacttgcttttctacaacgttgacctaaggcggaaagccgcgtgccagagtgggatgggagaggggagctcacgctgggcccgaggggcccgccggcagccgcgcgcccctcgccggcccgcgctcgggctccccctaggggcaccatgggcgacacgggggtccccgcgcgccgccctctggacttacgtgactgtcgctccccttccagaagtagaaggccccgatggccccaaagagcagcagcacagctcccgaaatgaggaccacggctcccaccttgagcagccgcgcggggctggagggcttcaccgtcagcgtagcgtacgcctgcgggccggggcgggagagggaccgtcgcgtttgtgccgccagcacctgcggcccccagcgcacccgggccccacgcggtagcccccagggagtggggagtcgggcgggaaacagctcgcccgggctcctacgggtgcccctttcgccgcgctccctcccgagggtcctttgcagtcgggcgtggaagtgggatgagcaaaccccgcagcacagggccttcgccccaggacctgcaccctctaccggccacgggacgtccctccgcacccgcctgtggatgccgtgacccctgcacactcatacgcgtggggcgacatcccacccacacatttgggacccaaatttatcccccc

SEQ ID NO: 23060 - DNA, 1884 bp, Homo sapiens
  chr13:67803750-67805634
  hyper
cgcgattagttccggcagagtgatgcaggtagggatgcagatacagccgagtaggtgagctctgccccaaccgtctacccaattacaagcatctttcgcctacactgaggacacatctaaacacagaatttacaattgtgcatgcgaaactttacacttacgttagttgcctcaacctttcccctttcccagtatgctgcagttaggaatgatttgttccaacacatagaaagccatgcatctggtagcaccagtttggggagaaatcagaagcagcaaaatgtttcctccttgtaaaatgtgttgcttcgggctggcaaattagcaactccagagaacaaattcacggatttgtcgttagtcattctctccacatttcgtctctcttacccactgggtctgggttcttctgggcatttagcacacacaacacatagttgcacttcttcagctcagggatattttccacagcagcatgcataccatttccatccgatgccaatactgcttaagtctctaacttcttgtaggaaacgtcagagttgcggtgatgatgattctctgacagctatccgggtgacagttgcccgaaaaattcctaatcggttatctcttgcgtgcttcagagactctgaggcgctcctttccgtctcgcgtgctctccctctctcccttcccctctgcccctctctccttctccctctcctctctctgaactgaatttcttgatataactctcaataagcccagagggagggcgtgactgcccaggccccgcccccgggctctgattggcctgcatcttgcggcgcgggcggccgcagcccggcgcgagggagggagcgcggaacaaggcgctgactgtctcccagcctcccctcctccgcgccccctcggcagcagcgaaaacccggaaatctgatcctggccccaggagagccgggttccatgaggtgcactgagcatgctctgcagggtccggcgtgggagggacgcgctggcgctccccaggcccgggcggaagcggcgctcgcaggcgctgaaagcgagcgaccctctgagcccgggtggtccggcgggcaagggcggcgcgggagacccgcagggcgcgggcgcggatccggggaaccagggccaccgctgcgggcggatgggggtcaccgaggcggctcgtctccaggcgcacacttcgcacatctctttgctaagtgaaggggccaaaatgcacagatgggggagtctacccaggaacagaggcgcgagacgtatagccacccctgggttgggagcacgagccagcagatccccggagcgcgttaaacggacaacatgcccggtgctgcaaatagaggcttttgctggcagggacattggaaagaagggcggagagggagtacagcgaaaggtggggaccgcagaatttggaatctctgcggagaccggaaagaaaattaatcggagcacttcctacatgcagagccacggaaactgccttggaaagagaaagtggcagcgtctgggtcccctcggtcagcccgggccagtcggctgcgcgtgcgaagtctcctctagcggagcgggaccggccgcggcggtggatcgtggcggtccctgcacttctgctccagccgcgcctggaaacctgagcccggactcgcggctgctgcaaaacccgcttccagcccacctcactgcgaactttgcttccgaggggctggaaggagtcccaggcagctgtttcccaagctgtggaacacttcctttcccctaggcactttctgctgattccaactttctttcctgtgattttcgtcttttcccgtgcatttcatttctccgactccagctctgtactaaatcctcacaagtttctcgttttcatac

SEQ ID NO: 23061 - DNA, 955 bp, Homo sapiens
  chr13:74707123-74708078
  hyper
cggctctgcgggttcccggcccgggtggacgtacaaagttgccccttgtcaactccggccaggtcccccgtaattgaaaataacagccaccggccagcccctggctacttgcatggaccaggcactgtagcaagtgacagttacacatcattacgaccagagacaataatgaatgtagcaccaggagcactattcatgccagcagtgtcatctccgccttaaccccttcccctccactctctccagcgcgcacacacagcccacacggtcccggtgcggagctattcatccaccccgctcgaggccggggggccaactacttccacgagccccccctcccccccaagttcagccctggggttttatttcacatccttggcaactgtcaggcaaacactgcaaccaacaattccactaggggtagaaaaacacttgcttaattcacgttacttgataacttcttctggaaaaaaaaaattaggggaggtggggaagaaacctccttctttcttctccacgaatccgaccgacgctacttgctttgcaacagcatcgcccttccccggccccctcccgcttcccagcactttccccctttaagaacacagaccaaccaaaatgatttaacttgagcagatgacagaaggaaaataaaacacgttaagagaatacggtctgatttgggatggcaaaaaaaaaaaaaaaagaggagggggttgtttattttgataagaaacggaatcggcacagacctgaacagaagctgcagagcaggagaaattgttttctttccctcacacagagtccccctctctctctccctttctctctctcacacgcgcgcgcgcacacacacacacacactcgcacacacacggcgtcacccgcgcacacgcacacgcagagcctctcagcggctctctgcagttctcaggaaatgaatggggggcaaccc

SEQ ID NO: 23062 - DNA, 885 bp, Homo sapiens
  chr13:78493125-78494010
  hyper
cgcggaattaaggcacctagaggccaagggcttgtgtcaagctctgcattttgccccgcaggggaacctctataccccgcgattgaactcgaaagactcctcccggcggatgaaagccgctactccctggctggctgagctacagctcccgcagcgcgcccaggagtgcgccggagattcggaaacccgcagagacttctcaagtcagcaggaacttggaaaccgctgttccctccaaacggcttcaaacactcgcgctccttcctttacccaacctaattttaatttgccctctctataggcttaatttttatttttttaaaatcccaaactagtaagccaaaccgaagccccagaataaggttcaatcaatgattttaattcaacaccaagcccgaatgtttacctctcggatctgacaaaccagatgcagagcgacgaatggagaccaccttcccgggaggcggaacccagctgggttccagcctgctctgggagaggagcacgcctcccttgagctgcaggcgggtccggctctgacgaaacgctgcgagaatgccagacagtgtagcctccaccgtttgctcggggtctctgctgccatcagacaagtacttttattcattcatcccttcccatcaatcaccgccagactcctcccgcgccttccgaccccgctgcaacctttccccttgggcgatgcctggacagcatcagtagtagttgcccgagggaggggggcagtcctcgtccggggacaggtcccaaaaggctgtttatttgttagagttctacgctcttcaaatgaacccaaatcaagggcaagttatcacgcaccatgtgacacccggcagctccagactagaacaaggctctgcactgaac

SEQ ID NO: 23063 - DNA, 966 bp, Homo sapiens
  chr13:92050674-92051640
  hyper
cggactgggagagcgaggtccgggtttccttctatttatttgcatcgatgtcgctccgagtcttcagcactgggccgcgtatgacagcatcttagtgggtgcggagcgggacagcgcgccgggggcgtggcaggggcgtggcctgtccgcggggcggggagtgcggggcggggcttccgcggagcgcagcgagcgggcacatcccaggttagctgctgcgagccgagccgggcggcggaggcggcggcggcggcggcagtggcggcagtggcggcagtggcggcagcggcagcagttgcagcagtggtggccagagcggatgcttgcgggctccctgcggctccactagttttcttcgccccgcccagccgcccactcttctcggctagggaagaagaccagagggtgctcagctggaaaactctggtgtctcagcttagggcctcctccgggaagagctaactgctcccaggtgaagccggtgcccgcgggcggtccgtacaccccgcagccggctcgcaccgctcgagagcctcggccgctgtgtcttccacgtctgcagctcagccagggcgcgcagggcgagtggggtccactggcgggtaaaggggaccaggacggcgaggatggacgcacagacctggcccgtgggctttcgctgcctcctccttctggccctggttgggtccgcccgcagcgagggcgtgcagacctgcgaagaagttcggaaacttttccagtggcggctgctgggagctgtcagggggctgccggattcgccgcgggcaggtaaggggcaatgagggggtctctggactggcggcgtccgagcccggccttcgctcccccaggctcccttggtggcactcgtgggaagatgacctttcgggccctgcagccgcgcagggtgaatcccggggaggcttccggggatgcttggtgcgggtagcctgagtgcagcgcagc

SEQ ID NO: 23064 - DNA, 725 bp, Homo sapiens
  chr14:21098618-21099343
  hyper
cgtagttggaaattcttagagtcctccgctctaccaggtgagctatcggaaagtgtctgtgacattcgttagcgtagatttttgtgcattgagtagcggctggtgagactcctgacttctttgcatttgggctcagattactgttcaagaagttccagagagccaggtctatagttaactgagtcccgggagcagccttgaggcagtaggaagtgagatctgagtcggaggtagtgagaatggaaacagagcagaagccaccggcttggggtgaatctgcatagcttctgaactaggctgccctcagagtaatctgcgagccagttttcgccccaggagcgcaggaagggaccaccaggcaggctacaagtggagaagtgcgcaggactccgggagtcatggctatcagcagattagattagatctgttccccacaaacacagaggtatggaccaagtgtaacatttttctcccagagacgtgaacagtctagtttcttcctcgcttactgcagcgtacaaacacctattttcccagtatcgttcataggatcccgacgctgtactttttcgtctcaaatccaggatctggctttcatggaaagatcataaaatgcttcctttcttcactagtttgtttcagcgttgaaaaggctaaaaagctcctgctcttttgcttgggaaaagtattcctacagccgaggccccagcgagatttgaactcgc

SEQ ID NO: 23065 - DNA, 686 bp, Homo sapiens; identical to SEQ ID NO: 5949
  chr14:21099793-21100479
  hyper

SEQ ID NO: 23066 - DNA, 528 bp, Homo sapiens
  chr14:21100641-21101169
  hyper
cgacggcacctcctgggcgcccttgaaagacgccttaaatctaaacctataatacataggtaatcaactaaagctgaaagggaatggccaaagcacccacgtggagtgctgggtgctgtaggcgagaggtctgaggtagtggcttttagagctcaacatcttggtaatgttggttcgaccttttcccctgccagtcccgcggtgacctttatctttcggtgagtgaaatcggtcgttcgtgtttttcgtgggtcttccaaccacaggccgcctgagatggttctagtccctttgagtatacagacccttcctgtgcattgaccgacacagctcggcccggatcccgaaatgaacgtttctaccttcggaacgctgcgtctcggatccttctgaacccgcacgttgactttcctggagtctggagaaaatcactagattctaaaggaatcaaaactgttcaagtgttgtgctacaactaaaaaaataaatgaacactcttaaagaatagaatctctccagttctggctc

SEQ ID NO: 23067 - DNA, 885 bp, Homo sapiens
  chr14:27067019-27067904
  hyper
cgcgagggctggcggggcgcggggagaagccgaggaggaggggagagtgagggaaagagtgaatgagcaggaggaggggaaggaggtggatgccgagagaggagcgagcggcagaggagggcaggagccgggaaggagcgcggcggtccccgcgccgcgctagcgttgcgctcgctcccgctgctggtgctgccgccgccgccgctgccggagcggttctgccgttgcctgggctgctcggcgctgctgctgctgccgcccggtctcgctcattatttctcccgcttgttggggggggctggcggggagggaggggggtggctgtgaggggagggtagagaggggttgagttcgtagactcccacacacttcgcgctcgggtccctgcctctcagcagcgccgccgcctcccagcgccgatgcttcagccggcggggcggctgaggggtgagggggaactccgcgggcgggggcgagggagcgtgtgtgcgcgagcgtgtgcgcgcgcgaggggagcgcgtgcgcggtgaggacgcgcgccggcggttggggcgggggcgggggccggggcgctcctgtgggaagggaggggtgaaaggtcgctggtccccggcaacacggctcaggcaaacgtaagcggcttgtcgcagaaaccaaggggtccacgaaacgcgctaggctagaaggcgggaaggagagattactgacagccgtgccagccaataaaatagaaatgtgagaaaggttcttcgggccccttcccaatcaggaaacttgggtgatgaggggcagcgaaggggtggggtgggatcttggtccagctggtactggagcggcgacaattttggctagtctaagaagggcattcgagtgaccgttgacaac

SEQ ID NO: 23068 - DNA, 213 bp, Homo sapiens
  chr14:30739859-30740072
  hyper
cggaacacaagcgttttgcttggtcactaagcctagacaaatgtaagtttccccgccccagctcccctcagcctgtcacacaaaagcgttcacatcagcagtcgtcagcggcgatgtcaggcgccgtgtcgttcttcaaacccttgggaaagctttagcttctcaagccaattgcactgcattgtcagtaggggtgtccgtgagctccccctc

SEQ ID NO: 23069 - DNA, 195 bp, Homo sapiens
  chr14:32671357-32671552
  hyper
cgcggttcaacgaaggtcgttgggcaagatacggtggtgttcctagaggttgttcaagatctctcggggcctgcattttcctgctcgcgagcttggcccagtagacacctacgatgctgtccgggcctcccaccagtcctgtcgcacagtgggcacacttcctcgacagcctccatcttcgaggcgcctagttac

SEQ ID NO: 23070 - DNA, 946 bp, Homo sapiens
  chr14:42076491-42077437
  hyper
cggtccgttatatcagaaaaaaaaagcgcaactggacgggggtggggcagaccaacgaaacctagacagacacacacacactcagaggagagaggaagaattgaaagacttgagaagactttgataacctccctgctggcccttctgtgttccggaaagatcctggatgttggctaccttttcaagtcatcttggcatgtctctagtgttttgtaagccgctttccagctagctgcgtgtgtgtgtgcgcgcgcgtgtgtacgcgcgcgcctatctgatgcatttgactgtcttttatccaactgcccagaagcaaatgtgttaactcggcgatgccccttcatgcccgggttcttgcagagctctgaggacgcccagacccattttcctggctggatttggagcggctgctgggctgtggacccaggtgtgtggatcgctttacccagaagcttggaaagcgccaatattaacctgcttccaggtacatcacaaggtcaagagagtgtcttgcagccctcttgtttccgtgtatctacaccttcttctcttggccagaaggatatttacgttttggttcacagcatttgaagccaaaagttcagcccttcgaactggtttgctatacaaaacaaaacaaaacaaataaggtaatgaggattgcttattaaactgcttaacaaaatccccgactcttcctcagccctttctcggctccctcctccccaccaaaatgtcaccagctcttgaattacgtggattcgggttggaggagaacttgaaggaaacgtgattaaagggctatgcgagaacgctctctttgctgcccgcggtccggtgggcttcgaagccaatcgtgagaaggaccggttccctccgtgctgcttcctccccgtgcagtgctgggtgtgcgtgtgcgagtgtgagtgcaagtgcgcgcgcgccc

SEQ ID NO: 23071 - DNA, 781 bp, Homo sapiens
  chr14:52534581-52535362
  hyper
cgagggcagcgccccgcgcttgacctcctcgtaagcgcctacctgctcccaggtggccaggaaggcgtgggtgggggtaaagcgcgcagagcgcgggaagccagcgcgcacatagcgggcggccaggcccagcactgcgggggaggtgtcctctcggtacaggactcggcctctgccgtggctcgtgtcgatgtccgccagaaaaggggcgatggccgggaagtcggtggggaaatcatagtccacatactgcgtttccctggggaagtcctgagtggagatgatgccgttggtgcccacctgggagaggagagggacaaaaaggtgacagtcgctcaagcccaaggacgctaccctttcgcgcagggagggaagggaactgacttaggcaaaaagcctctctctccttccccactggccagggagtctggattcagggaaacaagcgcaacttttgcgactgtcccagctccgcgctgcagtaggtccaggggccctaaaactcgttcacctatcttctcactcccctcacaaccccggagccccatgtcctcggagaggaagcctccaggtctgaagagggaacaccccagctccgcagacgggcacagccttctcgcggtcctaactgcaaagcccgctggccgccctagcaacgccaccttttctgcctgggacgcgtacgtggctgcgaacaattcttgctctcccctccaggtcattcttgctcccctacagcagcggggcaggcagcggcatcgctctctggccgggtaccacc

SEQ ID NO: 23072 - DNA, 1076 bp, Homo sapiens
  chr14:52781114-52782190
  hyper
cgccgtcggcgcgctgggtgcgggaagggggctctggatttcggtccctcccctttttcctctgagtctcggaacgctccggctctcagaccctcttcctcccaggtaaaggccgggagaggagggcgcatctcttttccaggcaccccaccatgggcaatgcctccaatgactcccagtctgaggactgcgagacgcgacagtggcttcccccaggcgaaagcccagccatcagctccgtcatgttctcggccggggtgctggggaacctcatagcactggcgctgctggcgcgccgctggcggggggacgtggggtgcagcgccggccgcaggagctccctctccttgttccacgtgctggtgaccgagctggtgttcaccgacctgctcgggacctgcctcatcagcccagtggtactggcttcgtacgcgcggaaccagaccctggtggcactggcgcccgagagccgcgcgtgcacctacttcgctttcgccatgaccttcttcagcctggccacgatgctcatgctcttcgccatggccctggagcgctacctctcgatcgggcacccctacttctaccagcgccgcgtctcgcgctccgggggcctggccgtgctgcctgtcatctatgcagtctccctgctcttctgctcgctgccgctgctggactatgggcagtacgtccagtactgccccgggacctggtgcttcatccggcacgggcggaccgcttacctgcagctgtacgccaccctgctgctgcttctcattgtctcggtgctcgcctgcaacttcagtgtcattctcaacctcatccgcatgcaccgccgaagccggagaagccgctgcggaccttccctgggcagtggccggggcggccccggggcccgcaggagaggggaaagggtgtccatggcggaggagacggaccacctcattctcctggctatcatgaccatcaccttcgccgtctgctccttgcctttcacggtaagtcactccctacgtttccacagcccggctctgctcagccttctcatgctctcccctgacgcctccaccctttccacc

SEQ ID NO: 23073 - DNA, 910 bp, Homo sapiens
  chr14:57261312-57262222
  hyper
cgcctctgagcgcggaggcacgatgttctggggctcgagccttcgcatccaccgggccagcgctaaccaccggccgccgccctggaggggacccggcggccccgccacgtgcggctgcgagtttcagacccgcttccggggggcggcggccgtcggaggcctgggttggggggtcgtgagccggatgttccccgcagctggccagaaagctgcctctgagcctcttgagcaactccctgcctcctccggtagtctctctggactctccaagtgacttgctgggggcaccgggcgcggggagggcaggcccccggggtgacgcaggtgtgtactttacagccagagaaggcctagctttcagggacattggcttagtttgttgggtgagacgtgggggtggagaatgggagcactgtctctttgccaaattttccagagaaaccccgggactagctctgtccctggtgccccggctactgccagcgggtccttagcgctgtcgattgcgcgcaccggagcccgaagtcttccccaccgctggcaggagagccccgcgagctctcccggacgtgtcgggtcctaaaggggagagctgagcagccacttcagggattgcactccgaggtggccgaggcagggaggagcgctggccccgcgaaggaggcctcaaccttaggacaacccgggcgtcccgggcgaaggtctcgatctgccggagccactgcctttcaggcatcgctccattaaagccagggaggagagggtcattggccagcgacccgccctccttacgtccggaggtcaccccacgcctacaggcaggtttttctgtctcctttgcagaacactatgcgtttgttacaacgattaaatgaagaacacagaagtctctggctctgccgggcagaac

SEQ ID NO: 23074 - DNA, 990 bp, Homo sapiens
  chr14:57278285-57279275
  hyper
cgacccccagcccaacttttttgcctggcatagaaagcagggaccggacaggtttcaaacggatccgagtccctagaaaagcaaaaacagactgggcggagtgtggggtggggggtggctagtggaactggtgagtgtgtgtgaataagctgggtgggggtgggagcagaagacagctcttgcttcacaacacccagtgcaggaaaagaaaaataaaatctcttcctaaataccccaccccccgccacccacccaccaccaactaccatcaccaccacggccagtgggcccaaagaaacagctcgctgcctttaatttggggacctatgttaatgaagttggtaattaattcgtcgctttgttgtcggttcttatactgtatgtgtactcaaatgtggccgtccttgggatttacagcaattaacgaattacgggagtgcgcacgaggcagcaagctctcggcagccgggctccggctcgggctcggcctggggctggggactccgcggcagcggcccctgtcacaggtgtccctagagctttgggccctggcggcccctcgagcccccgaggggcccggagcccgcccagctccttcccggccctctgcagcagctccagtccggagacccgctggctgtcgcgttcccaggagtcaagagtttctaggggcccgggcgggggggagggtgagtaccgaccttttttctcaccccacccccactgtactgaaacacctggcggccgcccccgaagcctttaatggggatggtggtgaggagggggtaacaaatgccccgggcgttatgaccctcgtggcgctggctgtcggaggcactggttgggtgcgcttggtcagagtcatgatgctttcgatgaaggaaaggcaaatccacctcgatcacctgaagcagagtctccttcctacccctagaaaagacaacgtttcccccagtttgatcacaatgatgtttaaagcataaaagagcc

SEQ ID NO: 23075 - DNA, 60 bp, Homo sapiens
  chr14:60798413-60798473
  hyper
cgctttgtcacccgtgccggaagctcacaggccccggagatcccgccttctgactgcatc

SEQ ID NO: 23076 - DNA, 882 bp, Homo sapiens
  chr14:65006715-65007597
  hyper
cgagcgctcacaaccactgagacgcagtgaagcacccaccataaaatcccaggaggccgaccgccggttcagactttttcttttctttaatccccgtccaagggatccgccctcaccccccaccccagccaccccaattccctattccctccccttggacggcgccggggaaaacaagctgctcgagctttatttcttcggtgcaaccaactcagaatgaattcctccgcccctgcgtgctcagtgagtcggcaccctagcagtgaactgcatttaaaacctcaggaattgagcgaactctcccagtggctctcctcaccgggatccccttccacgcctcctccccgtgccgcgcctcagtccgcactgctcattggccgcgtgccctgccaatccgatgcacgtcggctagggcaaagaccgcgaaaaagcgcgtacacctggctctgggagcgcgcgcctaacgccagccagcagcaggaggcgcgcgaggcaccacggcctggcggccgagagtcagggaggaacctcatttacataacggccgcccctctgtctcctggcgggggccggagtcccgcccctcgtccaacttgaaatctgttgggtcacgggccagtcactccgacctaggcaagcctgtggtggagctggaagagtttgtgagggcggtcccgggagcggattgggtctgggagttcccagaggcggctataagaaccgggaactgggcgcggggagctgagttgctggtagtgcccgtggtgcttggttcgaggtggccgttagttgactccgcggagttcatctccctggttttcccgtcctaacgtcgctcgcctttcagtcaggatgtctgcccgtggcccggctatcggcatc

SEQ ID NO: 23077 - DNA, 278 bp, Homo sapiens
  chr14:76819100-76819378
  hyper
cggccccggttgctctgagctagctgattggaaagccctaaccctcgaactccgggctttctgggaacgcgggctctctcccctctttccctccgcccccacgcgcacacaggcgagcaccgtccgcccttcctagttcccaccgcgcgcccctcgctgagcgctccgcacactctgagatccagcgcgccctctggtggcacacggccccgaatcgccgcgctcctgcgggccgcgcgcagggtcgccgggtaggcacaggcacgtcccgtggccac

SEQ ID NO: 23078 - DNA, 246 bp, Homo sapiens
  chr14:89817855-89818101
  hyper
cgttctgtggagagagggaggcttcctgtgaggcccacttcctgtgaagcgtttggtctatggacagcctatttttaaaaatgtaagtccttcctttgaggccccccggaactggcagcaggccgacgggcaatcgttcctctggccgcacactttcaagtgaccgaatgtacccaaactgtttgataaggtcatttgtaaatatttactgatttgcagagaaaagaagttaaattacataaaccc

SEQ ID NO: 23079 - DNA, 315 bp, Homo sapiens
  chr14:92414008-92414323
  hyper
cgctcggctgcgagcgcccgggcagaaggcgaggggcgggcgcgcgcaggggtgcgggggctgggagggcccgggccccttgaccttcccacccaggggcggggcggggctggcagcgcggcccggcggggaggggcgtgcacgcccgcgctgcgtggcaaggggacccgcgagaacgttgtcgcctccggaaggaaagggacttgaactcacgacccacgcagctccagggactagaaactcacgatcgattgggaaaccagaacctacgaagcagaggcttggggcgagcgacgggagagtcgcgatcttccc

SEQ ID NO: 23080 - DNA, 146 bp, Homo sapiens
  chr14:94889871-94890017
  hyper
cgctctctttcctcactttacagccccggtcttcaagagcggctcggaccttaccctcacaatgggccacaggaatttatatgtcccttgaaagacctgaaatgacacggcagtgtctgaacacacgggggcgcgctaatcacctc

SEQ ID NO: 23081 - DNA, 578 bp, Homo sapiens; identical to SEQ ID NO: 5965
  chr15:26095523-26096101
  hyper

SEQ ID NO: 23082 - DNA, 409 bp, Homo sapiens; identical to SEQ ID NO: 5966
  chr15:26178877-26179286
  hyper

SEQ ID NO: 23083 - DNA, 145 bp, Homo sapiens; identical to SEQ ID NO: 5967
  chr15:29432142-29432287
  hyper

SEQ ID NO: 23084 - DNA, 831 bp, Homo sapiens
  chr15:29561185-29562016
  hyper
cggtgtggggtatccgccggtattccaggtaacgctgtcgcacaaagtcctcagtaatgagtttctttggatctccgaaaattaaatgcttcttggtggggtagacccctaagcgccgcagaaagtcccaggcttcagtttccttgatggtgttgcccttcataaagatgagccctaagacgatcatcaggaggcccgtagtgggcgtgccttggtcacccctcatctcggcatcctcctccacaggctccagggtgttgatgaggatgtaagtgttgctcttgggttcaagttccaccagcttatacccgaagacgtactggaggcgctcggcggcccgtttgaagaggtcggggaagatgtccttgtagtccccgatgacgtgcttcagtatgtcggcccgcttgatcggaatcttcttctggtctttaatcagcaagaactgcaccagctcggacactttcagctccagctgcttctggctcctgggccccacggcgggggcggcctgggcccggcgggcgccctgaggcgaggggccctgcgacccctgcgagccgcccggcccgcgggacgtgctcggggcctcctcggcaaagccgtctctgagaacccgggcgtcttccccggcccgcgaagccccggggtttccgctatggctccagtctctgtccctctcggcctggccgccagagcggccccggttcctcggtttttgcaacatgtctccggcggcaggtgccggcgcacactccggtaggcaagcagccgcggcggggattgcgggtcggcgacccgctaacgccggtgcctggaggcgcgcgcagtgtc

SEQ ID NO: 23085 - DNA, 681 bp, Homo sapiens
  chr15:48469946-48470627
  hyper
cgtggcggtcgctgagctttgctcaaagattctttaaccaaagtcagggaagaggggtgttcgctgtctcgggctagaaatcagggaagagcgctggtccccgggcccccagccccggctcccagaccacaggcggccaggcctggggcgggcggggaagggcctgggagcggcccagctgcacctgctcctcaggaagccgatggcccgggggcgggccggggtctgggggtggttgtcccccatcggggcacagcccggcctctagccgcccggtagactccccgccccccacctcgccccggttcccggaggaaaagacaatacattttaacgccattggagctgctgctgtgctgcggctgctgcttctccgcctccgcggggtgcggctctcgccgcggctcgcccggcggctctgcgggctgcaggtgcgggctgtcgccaccagtggccccgggcacctcggccttgttggcgtccgccatcccgccgccgctgcctccgcctcggccgcctgagctgaggggctccgagcgcgacaatggcggctgccggggaagcggtaacggatcccgatttgaaaaggccccgagcgctcagtaacccggatctcgcgagaaccggtcgagactgggtgactgggagatggtgtgtgccgggtgcggggggtgggagtgc

SEQ ID NO: 23086 - DNA, 922 bp, Homo sapiens
  chr15:53075376-53076298
  hyper
cgttttagcttaatgatccaacccctgtcacacccacagggacgcgaattccgattttataagcaggtgtgcacgtgcactcagatactcacacaaagccgcgtggagggacgaaaagatcaaccacccgatcgacgaggataggtttgatcttttcgattacctcagtgtgccagtgtatattcccggctgggcctagcgccctaagaaacttcggaactttagctgttaatttttgttttcttactatgacttcccaaagacattctatctgcctaccggggcgaagagaaatgggaccaggcgtcagggcggtgggaccctgtccagggtcctgactccgcgccagggctccagaccagtcggcctccgaaggccctttcacccaccccacacaagaggaaacaaagacttctcagctcaaggcctcagggctgcctcctgactccggtcagtttgcaggaagaggaaacaacaaaacaaaggaaccgccaatccgccgggtattatatccctcagctccaacctccgacttcggaccgccagggtcaccttctctacgctgaccccgcttttcttaaatgaaaacacgccaacaaaagcatacttcggatacaaaatccaagtacgcatcttttttggggaggttagagctgaggtgtacttcggaagatgagaattttgttttcatgaattgggtaacacccaggcattgttaggtaccccgacagaccctctagatatccttctcttcctccttcacactttcttcctatcaaaatagttattgttttgaaattcactagaacaacgacgttctaaaaacaaaggcgcagcaagcatccctttcttcgctgccgcgggctgaaccacggacgctcgcgggtcgcccagccccgacggcccgcagggggcgcgcgcc

SEQ ID NO: 23087 - DNA, 1479 bp, Homo sapiens
  chr15:53076303-53077782
  hyper
cgcagcacagcccggctacccccagaaagggagccgaatggagggaagcagggagcgcggagggctcgaggcttgcagataaggagaggcgcatcctgggatttgggtcctctgctgctacaacacaaccgtgctattgttggcactgtccgacccaagtgtcggtggtaagcggcgatgtcggggctgggtctctagcaaccgctgtgccctgggtcaggctggtcgccccagctaccgggatccctctccggatgcttccagggcgataggtgctgcacccattgacgggatagccgcatacctccgaacaggtagtggagttcgtctctggcaggcatcctagctgcgctgacaccaaggtcgccacacaatagccatcagccccccttaagccccagaagtaggtttcccctgccccagccatagcggttccagtcgtcgccacgagcccacttcttatccccaagcgcacctccctctcctcacccgggtttatgcccgttacacagagagaactacacagggggaactatggtcctacaccctcgaggggacagacaccggccgtgagacaggcaccacgcagagccttctggtgactgtccgcaggagcgagaccttttttggttttgcagtcggctaggtgtgtgtgtgtgagggtccccagttgactaccgggatgcactgccacttttcggcctggcgggctctgggactccttggtctccgtaggaggccatcctaggccttcggaggaggcgctcccagctggcggcgcccctcgccccgggctcagaggcggacacggtcggtcgcgccctgctggccctttgttcgcgccgcagcgggctgggagcagctgcgcgacaccagacccacagcgccaagacgcgaagcgcgaggaaaccgctgcgcttgactccttctcccccaactcttggacccaggaacgcttccagctcctgcgtcccacacgcccagtcctggcttctctcccggcccagaagtcttcaaggattgaagggctctgcctagggccccgcactcctgcctgactcccatggcccagaaaagcagggggacatttgaaatgtcaccccgggataaatattaacaaaaaagcaaatggacttgtgcaggggccagttatcaatcaaccaggccgcaaggccactcagggcaaacacagcccaggttgggctgggcgagactttctcatggccgccccccgaccgaacccctccccccttggctcaggtccttcttaggtcgttctggggcaaacaccggacgggaagggggcgccgccaactcccccgcggggtttggaggtttcctcgcctccaagtcccgcagggcagggtcggagtgcccaacacccacccccgcccgaacctcgggcctgcgcgccgccttcccctgggtccgcggtgctgcgcttgctgttgggtgtgtgtcgctgtctctttccgagcc

SEQ ID NO: 23088 - DNA, 987 bp, Homo sapiens
  chr15:53080201-53081188
  hyper
cgaaaatcgcgaagaggaataataaaacaaaatgcaaagtcctcagggagtcggcagcggagtcggtcccaggacatggctattgctttgcagctctcactgggaccttgggacggtcagcctccctctcctttccacagccaattccatgcgcagagagcgtcctaacccttacaactcgtctgtgctacacacccaccgcccaatggctctgaaactttttgcccatactcttagattgaggtcaccccagccagcgccaaaagaatgagcgcgggagggggtcacagcagccagttcggccaaacatcgacgctgctccggcacgctccagcccagcgcctgggatgtgtcagaggtacctgcgaggaacatttgcgtgcgattccacgcacgcgttgcatccctcttcccaaacccggatcgctgaactgagaggtggcgcagagtgtctcaccaggtgcggggatttctctccgcctcaggccgtacgagcttccctcgctgtccctgagcgcaaatgagcctcttcagtcgccgaggcccggccgcttagctctcggagccttccacagcccaacaccctgagccctggagtaggcaatttgctcccacagccctgtgctggcccttccaggcacagggagtcccccttctaggggtaggggcgggcgggatgaagcgcacccagccctctctcctacccttcctcctttggtcccttcggctttcgtgtaccttatctcccgcgcgcccagctccttggccggctcacctgctaagcggagcgcggacatgcgctggaactccggctcctgcagccacttccacatcctccggaaggtctcccggccggatttgagtttgctccagggtttggggttgcgcagcaggtccgagagggtcccctgggagcggcagagcaccctctgcgcgaagatggcctgtgggatgctgtagcgcttgagctcggtggtgatacgctgc

SEQ ID NO: 23089 - DNA, 646 bp, Homo sapiens
  chr15:65713774-65714420
  hyper
cgagacccagcctcgcggcggcctccagcttaatccgctgttggggctggaaaggggcgtgtctttgtagggacagaaggggtccgaggagttcccggcactttcccacccgctgtttggttttcctggagatgggcctggggctggccaggcggaggctccttccccccgcctccctcccacgtggcctggctgagtctctctggaaagccgcagcagctggagagaaatccccctccccacccccacctccaagtccctccccgactctccccggacacatcctcagctcccccctccgcggggaaggcaagaactaggcgaacaaagcggccagcccatccccctcccagccctgccacctacactccccatgagccgcccccaaacgcacaccggacaggaagcgacagagctgtgggtggaagccgcagccctagacacacacccttggggacttcgctatcccctccccagccctttctccagcttggacaactctgacttaccccgtacccactccgcactgggctgcggactggatgaggccctgctgacctcgtccacgcttccctggtcggtccctggggggtggggccggggtgacacgcgtcccatcgtgagaacaagcgctggacatgtccac

SEQ ID NO: 23090 - DNA, 931 bp, Homo sapiens
  chr15:68125637-68126568
  hyper
cggccgtgctgtcgactgaatgaatgaatagtgggactagtgaggaaggccacgatccacgtggatcaggatctgtgagggagaaaagtgggaactgattttaacgggaagattattctaggatggtgggggtaaaaagaaagagccccttgggctttggacgtcagaaaaatctgccttctattaccaattctggctttgagcaggttgactcctctcttactgtgcctcagtttccttttctgtaaaatggggctactgaaccagagcagtggttctgaatcaccagcttttgtcctaccctcctgcctcctcctgatccgctcggttgagattccctgaccccaaagggttggtaaggccggggaggggaaagggtggactgcgcggtgaggtgagcctggagaggcgcccagagtgaccctcgcgactgtctccccagaagcccacgacgccctgcaccatttctcctgcaagatgctgacgccccgccactgcactggcaactgctccttcaagccaccgctgttgccctagggccggcctggccgcacccctgcgccctcaagccatgctgctccttgtaaatacccgctgctgcggtggccctgagcgaggaacaagccattcggacccgaccgatgtaaatacagccgcccgtccgcccgccttcctcccgggctccccggccttgcccgccccctcccgggcgtccctgtccagggccccggcttggtttccaagtgtaaataccgcctcgcgcctcaaatccccctaccccgtgtgaactctagggcatcggacctcaaggggttaactggacagacggggggcgggaggggagagcgccccctcccattgtatagccttgaacccgattgtgaatacaatgtagcaacttcgctggcgcctgccccgcactccccgtccc

SEQ ID NO: 23091 - DNA, 773 bp, Homo sapiens; identical to SEQ ID NO: 5977
  chr15:72523255-72524028
  hyper

SEQ ID NO: 23092 - DNA, 864 bp, Homo sapiens
  chr15:76628342-76629206
  hyper
cggcagcagcagcaaggatggagtcaggacccgtcccagtcccgggtgagcgcttttggatctgggttctggctcaacccacgtaatgccccaatctaaagttttctacgtgtgtgtggataggaaagtctaaatagagtttatcagaacccaggtggtcattctctacactctctctagcttggacccgaagaacaaaggcacatgagaggagaaaggtgaccagctggacgatgacggtcacgtccaaacggatcccccttgtcctcggctctctcgtcctgagagtgggtttaatttttttttttttaatttatataagaagggagctcttaaaggagagccatctccaccctcaggtatccatcacccagctccagcgcgcctgggaaaaccgccccgaaagtccaagaggaagctcagagttgtaacggccgcggagccagctcggcggtgacgcaaggtccagtccagattgccaggcccggggcatgagagaggatccttgtaggtttcggaggtgggggggctgcactccattgttcactccgggccaatcagggttggcccacttcctcccagccaatctcccttcacccccagcctccaacccaacccaccccgcccatcagcccctggatccccatcacctcccccgcatccccggcagttctggggaagcttcgtgacgccacaggtcccgcccccagctccggcccggggctagtgcgtgttgacgtcatgctgcgtgcgggccggtgcggaatcgctccttcaactccgcggggcagtaggagttagttagcaaagagccgaggccgggcgcgcgaccctcgtccttctgcccctggccgcacactttgc

SEQ ID NO: 23093 - DNA, 40 bp, Homo sapiens; identical to SEQ ID NO: 5978
  chr15:90016187-90016227
  hyper

SEQ ID NO: 23094 - DNA, 1840 bp, Homo sapiens
  chr16:10274229-10276069
  hyper
cggcagcaccagcagggtccaatagcccactctgcccatagtcgccactgacggtccctgcaaggtgaagagtgagaggcagggccgcggtgagcaaggcgaccagaagaaagggattaccaacttggcttcctgctctaggagccaggcatggaactcagcagcaggataggctgctgggatcacggactccattccgagtccccgacgccatccacatccctcgatccatctctaactctatccacaactccaattcgagctaattctccatcccccagccccttctcgcatccagcttcctcatcccctgtctccaggcacttccccatccccatctctgtccatatcccccaccgcattccccaagttcgccgcgggccacagaccctaagcgccgcgcgtgttctgtaccccaccaagctcctaggtgcacagaataaaccctccatccaacccctcccacctgggatagagaggaccaagttatcaaccccgccccctgctggcgcggagcgaactacagaccccgcagggcgtgcggaggcggcacccagaccccgcgtcccagcttgagagctcagctagttggctgaccccgccccctacgagcccgtcgtgtgcaccacacactttgctctacgcccagccccaactacagacccggctcctctcagtcagagtacaccccaagtgcttgggagtgaggacgctgcctggtgggcccaggctccgctgtgcctggggaacttggggctcgccccacctcgagccaaggggccgtggagagtccttcacccctacacgcgcgcgtgcacacacacgtgcacacacacacgcacacacacatgttcacacacacacaccctctctcacgcgcgccgtgtgcaatgctgaattctggagagtaggcgcgtccccccgcgggccagcgcgtaggagctggcaaagaacgtgcgtagggggaaaggtaggctcccaagaagctcccagacggacgtggactgtacagcccctccctagcctttctactgcgggcgctgttgccaagtcctaggtgcacgtgggcagtgggccgcacacgctcataggcacgcgcgcttttctgcgcacttcctcagactgctgtagcggtgcccacggccagccggagtcctcacatgtcctcaggtggtgcacacgcatgaactgcggcaggtgcacagccctgcgtacctgcaaataccagcacggtcgtgcacgcgtgccctgacgcgcgcctctcgggacggacgctgctggagccgggggaagttgaggcgaactccaagaggcctcgacgttcctgggtaagcgccgcggagcgcggagccgcagcgccccctggtgcccctcctgcacttcgccgctgggctccctcccgctttccctctccctctctagcctgatccctctcccgctctccctccggtcgagtctccctcctccccggcccaaggagccctgatctccctctgggacgtacctgtagcccgagaaggtcgaggatgcagtggggcgcgctgcgcgcacgagcatctcggccgcctcagcagccaccgggtttagcgggttcccgcatgctgcggccccagcgcgctcccctggctgtcccgcgctgtccgcatcgcccccacggggggcggctatcccagccggaggctctgcagcagggctctaacggggcggaggagagaaggagaggcagggtcagcccaccaacgaggggagggagggttgaggggaaggctgcagtctgcagtgctcacaagcccccctatgcgcccaggggggctagacaagaggggggaagctgaagccc

SEQ ID NO: 23095 - DNA, 2168 bp, Homo sapiens
  chr16:3220283-3222451
  hyper
cggccgacttgttcttttttaaagaattaaaatatggtctgggtcttttactttggaagaggggtgttaacttcagaactgtcctaggttcagttcagatccccgcgagggaaggggattaaagagagaaggaagttgagcctctgagcccattgcgccccggaatctgggaggcggcgtgaccaggtgcccgggttccatccgctggggctgggcagcccccctgcccccgcccagtacagaggctcctgccgggggaggcgtccatcgcgttcgcttacttctctagaccaacaagcgagggacgcggagactgagttggctgcggccaccgggtccccggacaccgtcttcattcactcccaccctcagtcaagcacctgtacccgcagtcctttcctaaaagaagaaaaacggccggtcgcgcgctgtccagagtactcagtcctggatccaggaggtggctggcggtgagctgatttccgggttcttaaacccgggcccggggcccaaggccccgcctggtggggtctcatcctgcagtttgagaaaccgaagaaggtaggagagggaggaagcgccggctttgcctgtgaaagattctttcattcgctccattcttgttcttgcgcgctggatttaccaggctaacaaacaacagctgatcacggcaggctgggctcctctgggactcgcaccggggcctctcgcacccaaagcgagaatcatacctctagaccaacaggcctcggtggcgggaagcaccatctttgctcctccactccctcacccccctcccgccccgcgccttatctttctggaacccaagacttcgtattctccgctctccataaacgtcgatgccagctctaggagcgtggccgggagcccacgatcgcggcagcgagaagcccaaccagaggggaggagggagtccccggagtgggacagcgctcaggtctggggtggggttgatctagggcaaaatagggcgggcggcctgtggcgatgggcaggaccctctcgcccaccacacgcggaactcgctggatcctctccacatccaggccgcgtccactggctttccaacctgctcaggtccttaaagaaggattcaaaaggtgttgcggtattggcccaacaggatttgaccctgaggcccactctcaccctaatcataaccgcaaaaccacagcgcctggagagagagtgagagagaaacagaaacggagcgagtgtgtgtcgctgtgatgccctttgccgtcgctgctcatccccagtgacctcctggaactttttcagctcttgctgacagaggaagacacgggggcagagctaacgtctgagtcagggcagaggcgctgggctccatccgagggaggctatgggggcgcctctgggatggagccaaccaccggcgcagtcggatgaaaggtgggctggccgctcagccatcctcctagggcaaggccttgggtatgagtcagcagccccaggtgtgagcgcagacccggtaaccccggcgcaggggaaaatacagcggggagccccaggctgcaggcctgaccctgagcatcccctaccaagcccagtgtggatgggctctgtctccaaggggctggttcaccagggtctccccgcagcgaccccagaattctgccaatcacttggggacggcgatgagctctatccacttcggaatcagccgatttgtgccggattggtggcaggtgtctgaaatgtcagcggaaatacacgcacgggaggctcgttggtctaggggtatgattctcgcttcgggtgcgagaggtcccgggttcaaatcccggacgagccctagaagtggttacttttcccttgtcattttagagaatatagagctagaaaatcggggaccgagcctgaagcctcaactaccagtcgcgttgctccgcttcaggtcggtccaggtctgtgcctcagctacaagggacaaggatgctcctgaggctggcctggtcggcacttgcctcagcctcgagggagtcccgcgcccttctccttcccaaccccagaccagagaagctgtaccctctgcagcccgggtcgctcagctccacatgggctccgggtatggtggaggccggtggttgggttctgagtgatcgagtagtgtgcacggtctgggc

SEQ ID NO: 23096 - DNA, 370 bp, Homo sapiens
  chr16:3237723-3238093
  hyper
cgttttaaaaccttggataaaatctgtgtatttcctttatgatttctgacatctctatcctgcctggaaatccttttaccttagtaataggcaaatgcacctatatatcataccagcacgacattgaaaccaccagctcataacctcagcgggtaaccttgttggtttacccagcaggagtaaagcctgcctcggaaatctgagggtggccgcgaacccacaagtcaagattcgcaggtgcgcgcgctaaggactgagctattggggcgatggagagagtctcgctctgcgtcagggacggaaggacgtgtcccccaccagaaaaaggaaaaaaaaaaaaaaaaaaagaaaaaagaaaaaaggaagcggc

SEQ ID NO: 23097 - DNA, 1770 bp, Homo sapiens
  chr16:3238154-3239924
  hyper
cggacgagcccccttttccttctcttttttcccatttcgcattttcagcaaggacaggagactaggaaggcggagggaggctgctattggcagggcctcagtggagacctcccggggtcccgggacgcagacggacgggcctgaatcgctcgccttggtgaaatgggatccagcgctgccaactgcggcaactgcggttaaaggagacgaccccgtgcagcaggaggaggttatttagaataaggaagaatgcgccgggctcattggtcgctacaggggcataaattttttctaggattccagagtatggctgctccagtcccaggtgagccctcctccgcttaaaattccagtttattcggagaaggggagaataccggaagcgggggagaagggaggggagtgagtgagaggagggaggcggggaagaccgggcatccgcgggcagcacttcagtcggccctggcggggtgggggtctcggcccttgtccccacccccagaccccggggccttcccactgagagcgagggaattcgcggctttgatctggaggggacagggagccccttttagcccagatctgctggattctcgggagtcaggtgaaatctggatacagggaagggcagagtgacagtaaagggtgccccggaaccgatgcccgacgcctgctgccccacggccttcattcttgctcctcctcacgtcctggggactggaggtcccgccagctccccccagtgaagggcaagggggcgcatcgcagaatcgcccctggtgcgcagcgtagttggtggcctaagccgtcttctccgagagctcagccatcctgggcacttgaggccaggcaggcgctgcggggctggttcagtcgatggagaaaagagactctcagcgtcagcctttagggttcgaggcccacgtgggaaactcgctttctgggttttggcttccctggggagaagggaggaccggagccggagaagcgtgaggtgcggcgaggtagggtgcctggtagctggtgtctcgtgcactccgtcaggcctttattgaacacccattggtgccacgctgagggactgcagcgtttccaaggcgagcttgcagtgatcgaggctcgcagaccctcagcgcagccgctgcctgctattgggaggttcccatgtcctgcggaagctggagctcctcactgcgcgcctcggagacgccgaatccccaactcaaggccgagtggcggtggcgggcgaggacccagggcccttctggattgtggtagcgccagggctgctccccattttgtgcgtcgcggaggaggggccggggctctgggcttccgccacacccatcctcacttgaaattgccccttccaggcgggtctgaaataagattctactcactgggtcctgctgggtccgccccagccgcccccaggatgctaggacgcccacaaagataaccttaatgcgtaaatcgtgtggctcgttggtctaggggtatgattctcgcttagggtgcgagaggtcccgggttcaaatcccggacgagcccggcttttggtgcagggtaaaagtcgtttcctgctcttttttagattcggctcgacttacagacctcagcgcaggacgtggacgccctgcaaaggtaatttgtacaaaggtctcaagctatgttgacgccgcctactatcccactacctcttcttaaaattcatctagagtcctgtcaccagtgttgccagagcccttttgacaagctattttttttgtc

SEQ ID NO: 23098 - DNA, 366 bp, Homo sapiens
  chr16:4363872-4364238
  hyper
cgtctcctgtaccttttttctacacacctcgaccccagggctgcagttctgcctgcctgaggtcggatgcggtcggctgcagggcagggctccgggctgaagcgcagcgattcccgccgccgtgagggggcgctctgcgggcctcggcctcggcccttccggacgcccgcacaggtcgccggacccagagagtcggcccttaatagccccctcctggaagcgctaggtcccgaaactggccttcccccggggcccatctcccggctaatgtttaacccggccacactccacattatccacactcaggagaccggggtgaggtgagggtggaggctgggggaggtcacctccaaatcgccaacttcc

SEQ ID NO: 23099 - DNA, 348 bp, Homo sapiens
  chr16:81779788-81780136
  hyper
cggcctgctggataaagggaggtagaaacgctttcagccctccccggtgcttcccggtttataacttcatctactcgtgacacgtgggggtccgccgccgccactggcagggtgccttgagtgcttgagttttcgcccccagcacaggtggagaacccaactcccagaaaacatctggggcggaaacggaagcatggccgcagcggtgaacgcactgcattctgggaaatgtagtcgaaacggccgctggggcagagtgagcacccacagtggtgccttctggggagggtcgttttcacgtagtccaagagccaggggtgggaaccgcggggctctcaccccagcgcc

SEQ ID NO: 23100 - DNA, 911 bp, Homo sapiens
  chr17:12568526-12569437
  hyper
cgccgtgtcacatttgtccccccaaaaagcatatcctagaaaatgaaagcctttccatttccccgtggaaatgcatctaagtccagtattggagctgcgagatacagaatcgtctctgccagtgccctgagcccctcaaaccgaggggaatgcgtgggcttcggtccgtcggaagcttttcttctcaggggtccagcttatttccaaattgccccgcgtgaactgtcccgcgggcgcgcacgccctttcgcgcagcctttgcagccggctggcgggagatcccggccgcttccctttcgccggcagaagcccggccggggaagccccggctgcgcacgcccatccccaggacctcggagctcccagcggctgccgcagccccgcgaaccacctgcaagccccgcggcgtcgcagcccttccttctttcctccgggcatccgctctttagctcgcgcccctctcccagattcccgacccctggccctgctcccgccctctgtgcctcggcggctgcggggcccgccgcaaagagttaagagccggttcccgagacggcttcggcggctccgggtccccagaccccgctcgccgctcctgattggctgagcgcctgtcagtagtaaagggtatcagatggcaaagttgggaccttcataaaggcgtggtggcgattctccgcaatcgccggcagcctatgacatcagacaggaacgcctgggatgccgcgctgctcctggccaacctccgaggaggaggagggtcccgccggctaagagttaattagccccgcacggcgaggggggaggcgccagttttctggggacactggctgccactgtactcctacccaggggagctcacggagagttggatgaattctgggttgttagctgcggtcagctgggctccc

SEQ ID NO: 23101 - DNA, 954 bp, Homo sapiens
  chr17:12692672-12693626
  hyper
cgctgccttctcccacctccgcactccactgtccttgcaaactttggacagaggaaaggtgggcacggggcgcgaaactacaagtcccggcatgcacggcgttctccgcacaggcgcacggggaccgccgggccagccggccagccagcctgcggagactcccgggtccccgcgccggactgggactgggagcaggcagcccgggcggagcgggccggtgccgaggacggccccaggcattgctctgccccgggcattgcgcggcgcgcgtgagggggatgcggcaggaggcggcgcggcgggaggagtaggcggcggcgccctcgggagggagctgcgcgcgggccagacggcgcccggaggctccgcagtgccgccgccgtcgcccgggaggctccgcgcgggagccatgtaaccctgcggcgggctccgggctgctccgtccttccccagctcccgggctagcgcggcagcggggccacgatgaagaagcagttcaatcgcatgcgccagctggccaaccagacggtgggcaggtaggtcacccgcgggcaccgctgtcggtgcgcgcccgcgaggctgcatccgcaggggcgcgcaggtgatggagcccgcccagcctccagtcctccttgcctcagtcctttcccctgcaccagctccctccaggcgccgctcgcaggcgcgacccctcctccctaacttcccagaccccggagctcttctcactcgccgccttctgctccgggctccggttgccaagcgcaaagtgtgacgcatcctttacctgcgtccccggctgccccttcgcttcgtcctccctgcctttccccgggactcccttctccctctggccgcctgtcttcctggaaacaggtgtttgctctgattgtgctggaggcagccgaaccgcagtcggtctccggagatctcttccctcccctcccctgcgcc

SEQ ID NO: 23102 - DNA, 362 bp, Homo sapiens; identical to SEQ ID NO: 5994
  chr17:16290077-16290439
  hyper

SEQ ID NO: 23103 - DNA, 233 bp, Homo sapiens
  chr17:1956930-1957163
  hyper
cggactcaggcagcggcgggaatcaggcggactcgtttggaccgaagcctccgccaggcaccgaagccgtgaagtcgcctgcgcagcaaagggagcctccggggggcgcccgagaccttggtgtcgctcgggggccgctggtagccgcgcccgctgcccctcgcccggtgactcagccggtacctctggcggggccatgggggccagaggacagcgcggggggcggcgagcgc

SEQ ID NO: 23104 - DNA, 727 bp, Homo sapiens
  chr17:37321167-37321894
  hyper
cgaggagccgcagtactaggaaggtccaagcagcgtgcccaatcgctcctccggactacagaggagcccgggaacccagggaagagctccagtgattggtccccctgcctgtcagtctggtgggaggcccagctctctaccctccccgcccgagagtcacttacaaccggtagagaatggtggtctttccttcattgtccagtcccacgatgatgaccgtgtgctctggaagcgtcggaggaagggcagcgtcagggccaaacccgaagaccaagggactgtgtgcccccaccagacctcccaggaaggagatagcgctccccgcaggctggggacctctgcccaccgtaccgcgtctgcttcccacccagctccgacacctgccccactccgggacggtggaaaagacagctgagcccccacctcccttcacattccagaaaagtgtctgaaaggcccggggcgcttcggggcttgccaagagacggtgtttagagaaagagcataacgcgaagtcacaatcgcaggaaactcgcagcagccccccatccccgccgctggctccgtttagcggggagaaaggagggtcgcccagctttgcgtcctggggcgcaccgaagcgccgggacccaagaggagcaggcagggacgggggcaggggaggccgcggggcagtcgaggagcgcccatatacgaccctcggagcccgaggtccccccgtgcgtcc

SEQ ID NO: 23105 - DNA, 471 bp, Homo sapiens
  chr17:46713841-46714312
  hyper
cggagaattcagaggtgccagaagccgagttcctagaccccagctggattttttttttttttttttttttttttccaatttctggcggcgggcggctggggaagcagctctgtggtctcccggcgggtgaggccgagacagagaccaacctctaggcggcgccctggcgttgagtccgcgctgaacaagattctctcgcagctctgcgtcccgcgccgggtgaaggggcgtgttcctgcaggcgctcggggctcggcctggagctggcggccggcacgtcgcctttggcgccctctgccaaccaagagaaacacggttaaatgagtgcgctgggacagaaatccacagctaatcaaggccccatccgctcccaccccctggcccttacctcctaactccatctccgacgctagggagccttccacagcccgaatctcctttgatgtccccagcagccggctagagggcagc

SEQ ID NO: 23106 - DNA, 543 bp, Homo sapiens
  chr17:49021800-49022343
  hyper
cggtgctccagggtccccgcagagggcagggaagccctggacctggtctgaccttgcgcgctagccccagaggtcgccgtgctctgctgtcggcgttcaggtgcccgcggtcgggccggggagggcagtaatcaagccggcccggcggctggcgaggggcgcgggtccagcgcgctgccctcggccgccgccctgagcggttatttataaccgcgggtcgcgttacctcctgaccttaagctggggcgggcgatccgcagcgattagcatctatctcctccccgccgcccgctgcgaacaaacacccctctgtgcgccctcccccgcccgccccgcgggaggccctgcaggaagcaggatgttgacccggagcctccctgcgctcctgcggcggccccgccacatgtgagtggcgggcggtggagtgcgggtgggggggaagcggggagcaggagctactcgtgtttgatggcttcccgagttgccaatgtcctggtctattctgagtgaccgccttatttacaatatagggctccccagccc

SEQ ID NO: 23107 - DNA, 761 bp, Homo sapiens
  chr17:59539230-59539991
  hyper
cgagaaagtcggggctgcagcggggttggggcttgggggaccctccaggtggagagaatctaggggtatcccctagtctctgtccctttccccaggaaaggggctgagagtaagcgccttgaatttggccaccgctttggccggggagctcccgcggctctcgcagcgcagctagaacttgcgtgttccctcagcagtgagttcgcagttacgggtttgttgccagaattaaaaaagccccaaacccttgccccgcgccccgcgcgcctccaacaccgagaaacgtccgaggaagcttatcttagcagttcattctaaagccatttccgagtatgaatagataaaggctccagctccgcaccctttcagagcctgtttcatgatcagaggagaagccccgggctttcatctcctcccgggccggcgagcaggcggcttgtttattcccctggcggagccgtttccgcgtgtgccgtggggagggcgggggagcccccatctgtctgggggcgcgggagcccgacggcgcgaggggaactgggggagcatggagagggcgcttggggcgcggagagaaggtgcggggcacgtggaaagcgtgccgaggggctgggaagagggagggacaggaggacggggtgggagcagggagagggtagggggcatagggagagggtgcagggaggggagagggggagcgcgcaaggagggggctggctggggcggacccagaggtagagcgcagagtgcccgggacaggc

SEQ ID NO: 23108 - DNA, 999 bp, Homo sapiens
  chr17:70215682-70216681
  hyper
cgctctcccaaaggggcggacacagacgtcctcacaccgcggcccgaccggccgcacattaatccgggtggatttggccatcttgtgacatagccaatcagttcgagggaggggacggcaggaacgcctctcctttcacgccacaaaaggattttcgtcccttgagagcacaatgaaaaaaaaaaaaaaaaaaagccaatcaaggcgggatcagctgtgggctggtcgctgcagatctgtctctcccagaggggggtgggggcacatattggtccgtgtgggaaacccagagcctcagcttctcacacattgttctcctcctcttcaactgcaccccctccccaccagcccggaccctcccctctcccctccccaaagccgttattgccacaaaagatactttccccattgtgccccggacagctgagaggtccgagttagccatacacagctccgcgtcctctccagggagaaaggggatggaccctgcaagtggagagcgggatgcttatcatacaaaggaattaaacccacttgggctctctcgccatccaggactgtggggggttaaatacggttacattttcattaggtgctaatagcagaagggcagccccgggcagcacggaccagacattgttatgaagaacgtccccgacaagggaaggtcagggcaggtggggtgggaggtggggagagggacatgccagcgtcaaagccgggtccagggaaggggggcatgccatgggcgtattgttggcctgcgagttccgtcaatgggaaaagtcatgtttcctccgaaggaaacaagtggaaattgtcggggaggggaagggctggtgggtggctgggaagcagagctcggccagttgctactaaggctgccttcgaactgtccctccccactgccagtttctgcaaatgggcaagtctggtccttctggaaggcagttctggggaggggcagtggaagggaacgttttaatatcaggaagaacc

SEQ ID NO: 23109 - DNA, 315 bp, Homo sapiens
  chr17:7554512-7554827
  hyper
cgttttgtttctagacggtttggtggggggtgaagctgcattcataccccttcctcttgttattctcccctgctctgacagcaccccttttcatcgcagttggggggcctaggatcggtgcatcttccgccgcgctgccagcaccccgcagcgcgtggtcgtgcaccccggaatctgcagcagctgcatatctgaggggggtctcctttgcccgcgccgccttcgctccccgtgcttttgggtgtgtggagggcttcagcgcgcggcgcccccgcttctccgcaaccccccgccccgcgcccggactcgccccgc

SEQ ID NO: 23110 - DNA, 107 bp, Homo sapiens; identical to SEQ ID NO: 6000
  chr17:8901441-8901548
  hyper

SEQ ID NO: 23111 - DNA, 784 bp, Homo sapiens
  chr18:13868532-13869316
  hyper
cgggcaaccgcacaagcaagaatgcagcacggagcggagtccaggatgctcagcgtgggcctcggagtctgtgtgcgatcagctggagtccaggatgctcagcgtggacctcggagaccgtgtgggctctgcgctctgcagctgagacacagtcacccgcccgatgggcggagaaaggggcagctttgaaaacaagcgcaaggagatgcatccaaaagacaaccgaacccatcagggtaaggagcgcagcggtggagtgtgagggggaaccagaagggcggccagggccggcggcatgccatgccaggcagccccgcgccaccccggaacactgggacactctcatattcccaaagggacttctccatgcggcgctctgaccaggcatcgccgcaggacgcataacagagagagcgagcgcagggcacccggcccatcagctcttccttcacctgaactgccccggcctcgctgagacgcggattttaaaaccgccctgcacctatgtgctggcagccaggccctgggaacttcctccaaacactcccatgagttcgggatgactagcatcagttttcagctggagagcagacggcaactgaacgctgcgaagtcccacgatggggatgagaggaccagagccccgaggccagtcgcccccctcccgcccatccgcccgcccgcccgccacgcagggctgctctagcgcctgcctcttcctcttccatagaaacagggttggggagagaaatgttatgttgctggcccaggattggcattgagc

SEQ ID NO: 23112 - DNA, 982 bp, Homo sapiens
  chr18:18822154-18823136
  hyper
cgccccggggaactgagcgcgcggaccgcgcgcctgccagagagacgccagccgccggcggcgctagcacctcggagtcgggcggccggagcagcggagcgcagcgcggcgcagggaacggcactgggggtggggagaccagcccggccgagccgagggccaccccctggtcctctgccctcgcgccccgctagggccaggtgagcggccgcggggactccggggcgcgggcaggaggtgagaggtcgcgaaccgggcgcgggagctcgcctgtgaccggcaggagctgccctttggcgggctggacgccctggccgcgcggggaagcgccgcagcggacttttccggagggatgggaagctcagcgggggtgtgagcggagcgcgtgcgggtggcgagggagcgccagtgccaacctgggagccgtgcctgccttccctgccgcctcgcgtcgcccaccgaagggacccggccgtgctgtccgcgcccagaggccgaaggcctgtcaccgggctctactcgctgcctttgtggcgggagcgagacggcccgggggtgggacgagggagctgcggcgcgccgagtagcgcggggtcccccggcggaggcggcgagggggcacctggttcgtctccccgagcccaggggcagtgagggggtgccgggcaggcgggcgggcgacaggtagggcgccgcggaggtggcggggagaggatggatggagttcagcctgggaaagttgagaacgtccagaggtggctgggcgctcgctcggcgtctgtgggtttttttcctcaacaccaaatgtcacttcgtcacgagcgggcgcgcgtgtcttccggccagcatgtccatttttctgtgcatggctgaggaccactcttattccgaatgagacacaaagagttgtgttgacagctgaccctgacacaagcagacagcgagtgaggtgcgccctggccggggagggtgagggagactc

SEQ ID NO: 23113 - DNA, 160 bp, Homo sapiens; identical to SEQ ID NO: 6002
  chr18:3012406-3012566
  hyper

SEQ ID NO: 23114 - DNA, 875 bp, Homo sapiens
  chr18:31802067-31802942
  hyper
cgacgctgctgcggctccccagccccactggcttctgcagcgtgaggctgagatgcattgggctctcaatgccagtgcctcgcggcgcctgggctagagctttgtggccatgagactagagccaccccagaaaaaggaacaaatacacacaccattcgatagcgcctaaacccatctttctttgttgttcatcttctagctgcggctttatttgtggaagagggaagtgaggaagggaatgggggggcggggaggaggaatctccaggaccttatctacaatctcaacagtcgcggcaacgatctctgggagtgatcgaggcattcgggctgccccgtgcctcccgggcagcgatctaacgataaaacctgacagtgtcctggggaaaaccccacatccaccgctagcgctacattcgggctttatgccaataaggagacactgtagactatcgatcagactcgtctgctctcagagcgtgcggccgggcttccagcctggcctttaggcgcggtggcggcggtgggacacgcgccaggcgcccagagaaggacatgggacaatggcccagcccgaggacgccagacgccgccgcccgacccggggaaggaagctcctgcagccggtccgggaacccgaggcggggagggaggccagctctggaggtgcgctgccgctttaaaataaaggaccacaaagactgtacagtggggaaaacgcgcctggctaatgcgagtggggacgacttggggagggggttgaggaaggtagggggcacacgagccaacggcggctcacggctccccctctctcccgcctctctccttcctccctccccgccgggctgctccggcagacaaataacagaggaaggc

SEQ ID NO: 23115 - DNA, 629 bp, Homo sapiens
  chr18:31804522-31805151
  hyper
cgaggcccgcgcccgtcccggggagcggctctgccaggaaaacggcccgaccagtgcccggcgcctgggctgcgtccgagcccaccttcttccctcgtcgtcgtctcccagactaaatcccggaaagggaaagcgggatgtttgcgcccaccgcgctgtagctggtcctgacacttgcaaaatggtcagtggctcctgctcggccaggctgagtgtgtgcgtgtgtgtgagcaagggagcgagggtgtgcggtgtgcagggggtgcgctgtgtgtgcgcgcgtctccgggaaggtctcgcggcggctggagccgggactgacagcccgggcggagcgcaggcagctccacacgctaaacctctcgcctctcccctcacccccacccctcccactcccctctccttcccccaccctccccggccccttccaagctctctgattggccaatgggacaaaagtttctgtggagacggctgggcgctgacgtcacgggcagaattgtcccatttagggatcccgggggcagtgcgcatgctgcaggctgcaggttagaggcagaaggaggtagcagcgggcccggcggcagccaggtggcagaaaggagcacgcagcatccaggtggggggac

SEQ ID NO: 23116 - DNA, 188 bp, Homo sapiens
  chr18:31902687-31902875
  hyper
cgcagagaggaggtagagaaaacattaaaaagaatatttattttctaggaccatggaaagctgagtagtgaattttatttttaacttcattttttgatcaacccttttcttgaaaagaaaacgctagcgatttcacttaaggcacaaccagagcgccaccatgtggtgcagtctttatggacgcacgc

SEQ ID NO: 23117 - DNA, 620 bp, Homo sapiens
  chr18:44337479-44338099
  hyper
cggagctggacttgatggaagggagcatttgcgtgcggcgcgcagggcactgagtcaccatcgtggccgcgtcctcgcgctctcctagcgatttctccggagaaagcggagcaaggtcagccgggcagcccttcaaggacggcgcgccgctcctgcatgctgatggcctgcggggctgcctgcccgtgccccggcgcccaactcctacaaggaagaaattcaggggctccccgcccccgccacagtcctcttccccctccccagctgcaactcggcagccgttcgtcaaagaccctgttgtcaccgagacactgggaccttgtctcatccttggaaccactcgtaaatcttaggtcaggcagccggcagccttcggggaccacagtccccccaaagctttaggaagccagttactacatccggaaagattcgtgcttcagaacgcaagccagggagaataatcacagaaacgcaatgcgaatgtcgtgcctctcagaaattcttagcctgaaataccgtccccaccccccaacccggccaggcgacagtcctgtcatcctaacaccgcagaggctccaagcgctgggagtcgtgtgcccgcggcgctcgccactgaggcc

SEQ ID NO: 23118 - DNA, 701 bp, Homo sapiens
  chr18:44777611-44778312
  hyper
cgactcccaaaccagtcaccacggaagcccaccgctgcccctcaacctaacgcggaaaatcctaccgctggggatctcaaataggtgcccagcaagctgtgtgccggattggggcggccggttccggcaatacctggtaacctctgggtgtctttaggcgtgtggctgccggcccatcttccgagggcgctcggaggcgaagcatccaagcgggtcctcgtatccagcgggcgggactctggcgggctccgcgcgaagatccgggctctggcccgagcgaatggcgctcaaaccccggcctggggagaatgacggcctgaattgcggcggggcgtcccctccaccgcagaaagtgtgggtacgcagaaacccgcggcaggagagccccaagtggagcgcagtctgacagcgtctgtctctgaactcgtgtcggaccgaggggacgccacccagcgggcagggtgacgtcaccgtctccctgacactccacattaaagggctggcatgttacagggagggagggggagagcgaaagccagcgcgagcaacagagagatcctttctcagcaggcacgaaagctaccaacctaaccaactcgcaattgacaacaacctcctcagccccggagtaaactgcagcaatggtgctggagccgcagatctgatttaggagtggaaagcgaacagtctgcctgcatccc

SEQ ID NO: 23119 - DNA, 609 bp, Homo sapiens
  chr18:44780634-44781243
  hyper
cgacggtggcgagaggaggctggtcgagcccgagttaatcaatgctttcctcttcgagctgacatgcattttacacgtcaggactctcctcagccggctaattgattcaaattgttttattggttaaactggtgtcacccattttcatgatctatcaccacatggaggagagcatttccactcccatctccgttccgggcggctgcggttcacccaggccaaggacaggtaaaggagcccagacgcgggacccagaggaaaaccacaaaccgagctggcctcctcataactggagaggcgacgtctggaagtaagaggaggaggccggcacagcagcgcatatgggcttccagctacaaatttaaactggttgaagagaacccacgctcagccgggcctgggcccagtttcctccacctgggacacagtcggtttccgagccggcgttgaactccgcggtataggaggccacaacaaaacccgggtgggaactgtccgcggtgctgacgagatgcatcgttccaaagcacagcgaatcctactgtgttcaagtcgggaagaagcctcccagcatgtaattgagccctagattcggctctgggcgggctc

SEQ ID NO: 23120 - DNA, 282 bp, Homo sapiens
  chr18:45275529-45275811
  hyper
cggtgtaattgctctaaattaccctcctaacagagaacggcgctcggagccgggaacgcagctgccgccgcccagccctgagccccgcgcttcgcgcccgcggccctgagctctgctgacccctggcggccgccgcgcgccgcgccgtctggactgcgaagggcagccgcgcgaaacccgacgctctggcgccccctggtgtccgcgatgccgcactgacccgcggacggacgggaggcctacggatccaggatggctccttcgactctccccacgcccccc

SEQ ID NO: 23121 - DNA, 800 bp, Homo sapiens
  chr18:47339411-47340211
  hyper
cgattcacccggggagccctgaccaccgaggccgagcggcgggctcctgtgcgcagctgccccgcagcaggcgcccgcggcctatggcgccgccccattttttctaatacttggactcgaactagtggggtcactgttaggcgaagaaaggaatgacctccaaggtcacatgcaagcaaactttggtctcaactaaacaggaaattgcaccgaaatcgctgtcgctagcgccttacaagtaagggttttctccttaacccaaacaagcctttcgggctgggtttttatcacgtccgctccaaaaccgaggaggttgagtgaacttcaccccacgaccccgactctccgcggcggccggaagcggaggcctggcctggggagggcaggaccccgaggggcgaggagaggaggagggggctgcgctcacctcggagcagagccatggcggctgctgggtcgtcggcggcgcgggtctgtggtgtgggggacgctgagcggccgctcgcaatcacccagatttcaagagcgtgggtggcgccccgagagccacgcccctgccctttcacctacttcctggggctccttggcggggtcccagcgtaagatggtcctaccccacgcgtagcgctgcccgcctcaccccagcccgagggagcccaggggacggggctcggatagaccacaacgcgccttgagagcggactctttcctcacatcctcatttttagattttctccgtttccaaaccgagagaatttggtttgacacctctcacccatcatatcctagccccgacaggc

SEQ ID NO: 23122 - DNA, 1388 bp, Homo sapiens
  chr18:55104759-55106147
  hyper
cgcggggaaccggcggccaggatacaacagcgctcctggagcccatctctggccttggcgttggcgcagggactttctgaccgggcttgaggggctcgggccagctccaatgtcactacctacagcgagggcagggtgtaaggttgagaaggtcacattcaccgctttgggaggacgtgggagaagagactgaggtggaaagcgctttgccttgctcaccggccgtccttgccccggtcccagcgtttgctgggatttgccaggatttgccggggctccgggagaccctgagcactcgcaggaagaggtgctgagaaattaaaaattcaggttagttaatgcatccctgccgccggctgcaggctccgcctttgcattaagcgggcgctgattgtgcgcgcctggcgaccgcggggaggactggcggcccgcgggaggggacgggtagaggcgcgggttacattgttctggagccggctcggctctttgtgcctcctctagcggccaagctgcgaggtacagccctctattgttctaggagcacagaaacctcctgtgtgggcggcgggtgcgcgagctagagggaaagatgcagtagttactgcgactggcacgcagttgcgcgcttttgtgcgcacggaccccgcgcggtgtgcgtggcgactgcgctgcccctaggagcaagccacgggcccagaggggcaaaatgtccaggtcccccgctgggaaggacacactataccctatggcaagccagggtgggcgacttcccatggatcgggtggaggggggtatctttcaggatcggcgggcggtctaggggaacaattcgtggtggcgatgatttgcatagcgcgggtcttgggatgcgcgcggttccgagccagcctcgcacagctcgcttccggagctgcgagctcaggtttccacccccgatcccccgggctttcctcgcaccgctgagcccagcttgtggggtgcactcgaccaacgcccgacagggctggggaatgtgacaggcagcaggttcacccgggcttggggagggggagtttccgctttgacagcattttcctttgccgtctgctggtggattcctattcccagtcggtaatcgccccgcagtgttgatctaagaaggtaaagaaaactaggtttccctgcaaagagcctcccccaaatcggcggactccggatactttgagtggatttagaaatttatgtaatctttctcctttagtttatttttcatcctctcctacagttttctctgatttgctgttggttcggggcaagataaagcagccagtagagagcgataataatagcggcgggaaatgaactggagactggctgacagttcttaacattttgtcatagatcccccc

SEQ ID NO: 23123 - DNA, 866 bp, Homo sapiens
  chr18:56931556-56932422
  hyper
cgccaaggctctcgggtccgcacccagggtgccctcaccgtacgccgaccgtgtggggaacacgctctctggaagctgagttgggggtcctggtctctcttgccgccccctgcccccagcttcctgcgcgtgggctccagcggtctccgcaaagactttcagctagcctgtgaatttggactagagagggagcaattggcattccctctaccgtcaccagattctagattaactggggcggggtggggaacaggcagggattgtctccactagtttgacaattcccattccccaaacactgaatatgtatttagggtaaataaatttagcagggtggtcccagtttagttggtgacctctggtcaaagcccgcccctcttgggggttctcttccagtccctccaccccatcccaccctgaccagcccggatcaccctcctgagcagcgcaggtgggggctcggaccggcaggggacagaaccgtgttcggaactaggaaatccactagggatacacagcctggaccggtccagggccgcagtgcctaaccccaggacaccgagcgagggcgcctccgcggtcctacgggaacctcaggacactgagcgagggcgcctccgccatcctacagctgttctcttaacgtcgagcctctggagcccagcaatccagagaggccgagccctcagtcccctgcgtccgtgcaggaaagaaattgggctgcgagcatcgccaacagaagccgggagccgtggcgcgcattatggacacgccgccctcgcgcgcagagactgctccagaaagggaaaaacgcaaaacttaaaacgcggtggctcacgcctgtaatcccaacactttgggagttc

SEQ ID NO: 23124 - DNA, 413 bp, Homo sapiens
  chr18:56932689-56933102
  hyper
cgtggggctggctgatggtggccacggggtcgcgggggaggtccgctcccggcaggctccagctctctgggtcagcggaggtaccccgaggctcaaagagcggtcagctccccacctccccaaaagtgcctgactccgcccttctctcggcgcggtccaattcgcggcgtccttcccctccccgccttcgctatctgagagccccgcccaggccccgcccaacctggttcgcaagagcagaagaggatcccggtctacagacccgcttgctttcctcctagggcgggtcagagcagacgtcgtcggggtttgggaaggaagcatctccagacctcttgaattgactgaagccaatagaggcttgccctaggtctgtgcttggagcagcacggtgccttttcttctggaacctc

SEQ ID NO: 23125 - DNA, 1508 bp, Homo sapiens
  chr18:70210281-70211789
  hyper
cgaaggaccgattccaacgacggaatcccaggcttgggttattctccagctctggtttccagaccacggggattctctctttctcagcggggcggcagcccctgcaggtttctgcgaacttacgcgcccgtctgcacttttgccccgtccccgctcctcccaggaaagcagacaggccatttcaataccagcccagagacacgcagagaagccgccccctcgccgcccacagcctcccattaactcttccagtattctttctaagaacagagaagttggctcttgataaatatccgctgtccgcagccccgatcctacatgatttcccttctctctctccacctcctccacccctcgatctggaccagggagagtcttcgttaaaatccacgcagaaggcgcttgcatgcggaggggagggcaggtcgggggtggttacctggaacatccatgctgggcgagctccgctgtccgcgaagttgctctgcttagagaaaatgaggcgagtgggagctgtcgggaggaggacacggagcgcgaccctgctcccagcgcgtggccaataaccgcgccgccccgccctgccgctttcccgcgccagcctgcgccgcttcaggggtgcaccacgccccgcgcgcccgcttaggcgccgcgcccgggaccgggaaccccgcgtctcgcccggctcagcgccccgcgctgtgcgcccaggtgcctccaacccctgggcttcgcgcccgcaccgctgcctggggcccctcgagctcccgcgctcagcgcgtccgcagcgcggctccctcgcgggtcccctcggccccgcagccccgccagtctccagagggcatagccgagcgctgccgcctccctaggactcggaaccttccctgctcccaagcccgccgcaccctccaacgccccggtcctgctcacccaaacgcccagagcaaaatactcccagacgtctcttttgaaaattagacacccttaaaagcaccggtcgcttctcttcttttagattctttcttttctttccccaattccctccaagtcttaatattgaatggcgtgaccactttcataatgacaggagcgaaaaaaacaataagttaaaaaaaaaaaaaagaagaagaagactgggatggctgggacgaagagagggaaaaaaaaagcttgagaatttgatgatttaggagctgtggttccagagtcccagttggggaactgtccggttcccgcagggctagaagaggggcctccggcccgggtctgtgtgtctgctcctctggacctcggactggtggagcggctggcgcttgcgcttatttattaaattgcggtgtccgcgctcgctcaaaggacccggggagacgcgctgggtttcccagctgcgcctggagctcggctgagggcgcaaacacggacgtggggcgccacctgcgggtgcccgggcctccctgccgcaggctgcggaccggcggactccgacagaagacgggggagtcctggcc

SEQ ID NO: 23126 - DNA, 283 bp, Homo sapiens
  chr18:75362799-75363082
  hyper
cgccgtactttccttcccaatgtttgtgtggagagcacacggttcctgcgtcaggaccctgcaggacgcgggccgaggctcccagctgccggccatgccctcggctcctctcccgacacgcgccagcactgccccctgctggcctcccgggagcactgcccgctgccgcggcgggaggagacccgggaagaagccgggaccgcgagcagctggacgctttctccctggggctcagccacacattttagtcacagttacagactacgggggatttgaagccttc

SEQ ID NO: 23127 - DNA, 183 bp, Homo sapiens; identical to SEQ ID NO: 6016
  chr19:10443523-10443706
  hyper

SEQ ID NO: 23128 - DNA, 705 bp, Homo sapiens
  chr19:11805261-11805966
  hyper
cggaccgtagctccttccacgcatgaaccccgcacacgagtcgggattccccccatgaccctcccgtggcccccgcacaatctggagagacgcggggctgcgggcgcggagctgcccagagaggactcctgcccgggcccgcagtcgccgcgaagggacgggacaggacgcccggggtcccggctgccagcccagccccaccctgcggccgaggggaccgagggccgagctccgccagcggtactccggtccacagagcccggagtcgctggctgggaggccggggacccgccacggccagttccaaccagcccctcctcccgtctcgggatccctggcccctcacgctcaccattttccgaattcctccgtgtcccgggggcctctctgcggctcccacgaccagtgcaggtccctgtgtgacagaggctgccgcagactctccagagtgcctctcagcgacagagacaggagcccagcgaagtggcgtgtagaagacgccgcgggctttttcaatctcgcaccctcttagctgaagtgcgcctgattgacagttcccacgaccccgccccacggccctgattggatagtgcgacagatcccgccccctgacgactgagttacagaagcgatctcacgctggggagtggagactgatgaacgagttcttgacacagcccttggcagggcgggcttcttccctgc

SEQ ID NO: 23129 - DNA, 785 bp, Homo sapiens
  chr19:11909173-11909958
  hyper
cgaccagggcgcagggagtgagcttagccttagaaaggctgtagctaggattaatcagccgggctctgcagggctccgttacccagggcttaccctgtcactcagggctgaggggcggagcctggaaccccatccaatcaggggccctgggacggggccctgccaactgtcaatccggggaagcagaaggccgcactcagagtctctgcactcctttgttgctggggtccgttgcgttctgcatccagtccttgctgctccgagaggccccaggtgcctccgccacggctcctgtgacgctgtcacctgcgctgtgacctgctccggagtcataaagaggacgccgggacaccaagaagcagggaaatggtaaagtgcccggcctagcgtccagatacgtggaagaggggctgggtggaaccaacaggatcctgctgtggcgggacccaggcctccgctcgggcgaccccggcgattgggacccgcgtcccccatggcgtggcttggccctcggtccgctcggccgccaggtggggctgggcccgcagctgggaccccgggcgtcctgtcccgtccctacgcggcgactgcggccccggccccggagtcctctctgggcagctccgcgcccgcagcccggcgtcttcccagattgtgcgggggccacgggagggtcatggggggtcggatgtgtcccgcctttcttctgctaaaaattaaactgaggctctgttaacagttaaagagtttgttggagcaacagcgattccgagtgagaaacaccc

SEQ ID NO: 23130 - DNA, 617 bp, Homo sapiens
  chr19:12075748-12076365
  hyper
cgctgtcactcagaagtgaggggcggggcctagcattccatccaatcagaggtgccggggcagggccctgcccattgtttatccaggcacagagtgggtcgcattcctgtcctcacctttgtccttgcgcagccggtggttgatatccgctgtatccatccccgagagggacctggtacctctacccaggtttctatcgctctgtctcctgcgctgtgcccttctgtagtcacaggagctgtagagaggaccccaggacatctgaaagccaggaaatggtgcgtgtgcatagccggttgtcccgagacggggtagaggctgcctggaaccggccggaaccggctgcggcgggacccgggcctccctgcgggcgactccagggtctgggaccgagtcctcctggagctgctcggccctcggtcccctcggccgctggatggggctgggctggcagccgggaccccgggtgtcctgtcctgtccctgcgcggtgactgcggccccgccccggagccctctctgggcagttccgcgcccgcagccccgcgtctccccagattatgcggaagccacgagagggtcatgggggaaatcctgactcgtgtgtagggttcgtgc

SEQ ID NO: 23131 - DNA, 988 bp, Homo sapiens
  chr19:12163025-12164013
  hyper
cgggattgcttactccagacttcgcggggttgtgtttccctcagccgaggtctctcctattcggctcagaataaacttattctacacgatttgggtttttccgttaccaaaccacaagccaggactgggagtttctcattcattaatcgctgtttgctaaaataaactctcattttttaacagtgcctcagtttaatttttaactggaaaaaaaaaggaactggggaccccacagcccacagctcctcccacacgaaccccacacccgaggcaggatcccccatgacccttccatggtcaccgcacaatctggggagacgcggggctgcgggcgcggagctgctcagagagggagccggggccggggccgcagtcgccgcgcagggaccggacaggacgcccggggtcccggctgccggcccagctccacccagcggccgaggggaccgagggccgagctgcgctagggggactgtgtctggagcccagagtcgctgcaggggggcccgggccccgccacagcgggttcctctcggttccacccagtccctcctttcgccttgggactccccagcaccgcatgctcaccatttcctggcttccaggtattctggcgtcctctctaaaggtcccgtgaacagtgcaggtcacagcgcagtcgacagagcaacagcagctacggcggaagtaactggtccctctcggagcaagaaagccccagaccttaactagcgcgagcagccctaggagtgaagagagcgggaatgcaacctccccttccctggaggacagtggcagggccccgccctagcgcccctgattggataggggtctagactccgcccccttccctgagtgacagcagaagccccgggtaactgggcgctgcagagccgaagcgactggttctggccacactttccaaggtcagctccctccctccctcccacctttacttcgaatatttgccttcggccaaacttgctcc

SEQ ID NO: 23132 - DNA, 644 bp, Homo sapiens
  chr19:12203028-12203672
  hyper
cgaggcggggagcacggtccaatcaggagcgccggggcggggccctgccaacttttttcggggaaggagacggctgcaagcccgcggtctcttgttgctgtgctaacgaccgttggaaccctctttctggctcttggaacgctcggctctgagaggctccaggtttctccgccagagctcctgtcgctctgtcagttgcgctgtgttcctctctagtcacaagagccttggggaagacagttggaagctcagacatggtgagtgtgtggggccaggcgtcctgagacgggggcgaagggcttcttagaacctgctggaaccggctgtggcgggacccgggcctccccgcggcgactccggggtctgtggggctgggccggcagccgggacccggggcatcctgtctcgtcccttcgcagcgaccgcggccccggacccggagccctctttgggcagctccgcgtcttcagccgcgggtctcctcagattgtgctgggccatgaggaggatcatggggggaatcccgtctcgggtgtagggttcttgcgtcagaaaagcggtggtctgtggagtccccagtcgtcttttctcctcttaaaagttaaaatggccgggcgcggtggctcacctgaggtcaggagttc

SEQ ID NO: 23133 - DNA, 678 bp, Homo sapiens
  chr19:12551198-12551876
  hyper
cgccaaccaggttgaagaccccacgagggagccctctcagcagaatgcggtttcttcacctcctgtcccaggattcacccctcacttccccaccaaccaaggacgctacacccagccgcccccgtccagaccccaaatccctcagggaggcggatctggggtgtcctcccctctcctcctgttaaaccgtttctgctgcagccctcggcgtctcggtgcagtgagtcgggccgcgaacctgtgttggttacagccgcacaatctggggagacccggggctgcgggctcggagctgcccagagagggcgccggggccgcagtcgccgcgcaggaacgggacaggacgcccggggtcccggctgcatgcccagccccaccctgcggccgagggccgacctacgccagggggacccgggtccgtagatcccgaagtcgcccttggggaggcccgggtccagccacagccgattacggccggttccacctaacccctcccccgcctcgggacgccggcccagcacacgcaccatttcccgacttccgcggtgtcccaggtcctaccgacagctcccgctgccaatgcgtgttccagccagacaaaggctgcctcagaacttccaggtcgtctctcagctacagaacccagagccgagcgcaggtgggtggagcagacgccgc

SEQ ID NO: 23134 - DNA, 355 bp, Homo sapiens
  chr19:12750846-12751201
  hyper
cggccaagctcagggcaccctactccgctcacctgcgacggcagcagccagtccccacgggcggaggggacctcatgcgacattcagcccgcgagattctcagagactgctcgcccgcaacacgcagtaacgatctcaggagagcccatgatggggcggcgcgtgtcgtagccgagaagactctgtcatcgccggcgacctcctggaactctctcttgcggtttgcagccagatcacttcccatacacgcggcagccaagctcaggggatggcatcagactgaccctaggtggcgctcgaacacccgccggacctcaccagacaggcactttccccagtctacaccgcctggttc

SEQ ID NO: 23135 - DNA, 773 bp, Homo sapiens
  chr19:19976556-19977329
  hyper
cggctggggaggcggggccttaggcattatccaatgagggacgctgggccggaaaccgtccaatcaggcacgcagctggagcgaaccacatggtttctgggggcctttgtttctcgctgcagcgggagctccaggtttatcctcagtgttctgtgtcctgtgcttatagaggcccgtcctctgtggccgtgtgacctgcaagtattgggagagccacagctaaaccccgggacccctggaagcctagaaatggtgagtgccgggtccaacgtcccgagagaggggagaggctgtttggaacggtgggaagtggctctggcgggactctgcttcctcacagtcagctccacaatctgccgccggagttctccctgcccagctcggcctcagtccccttcagccataagatggcggctgcggtgacatccggggcccggcacagtgattgtgccctggcctggagccctctttcagcagctctgcacccgcagcaccgcgtctctcccagatcatgcaaggaccacgggagggtcgtcaggggagaatcctgactcggttccctgcgggttcatgaatgggaagagctttggtccgtgaggttgttagaaacaagcgcttggtgccgcaaaacaacacaaaacaaaaaactacccagcacttagaaaatttcacaggaaggcatatttacttctgaagaagagtgctgctcgcgtccgacctgatcgcaagagcacacagaagaaaggaaggaaggttttttttttttttgaggc

SEQ ID NO: 23136 - DNA, 118 bp, Homo sapiens; identical to SEQ ID NO: 6029
  chr19:20011652-20011770
  hyper

SEQ ID NO: 23137 - DNA, 291 bp, Homo sapiens
  chr19:20011910-20012201
  hyper
cggtccgacatcccaagcgacggggaggggctggttggaaccggtggaaagtgacggtggcgggactcaggtatccccttagtcagctccacaatctgcgccggagttcttgcccagctcggcctcggttcccttcagccataagatggcggctgcgcttatagcgcagcccccaggcgtcctgtctcttcactgtgcggtgactgtgccctggcttggagccctcgctgggcagctgcgcacccgcagagccgcttctctcccagattgtgcagagaccacgggagagtc

SEQ ID NO: 23138 - DNA, 293 bp, Homo sapiens
  chr19:22018435-22018728
  hyper
cgtgacccaccgcgcccggccgactctcctgtttctaatagaccaaaagagggactagaaatgccacggaccaaagctcttcctattcatgaaactgcatcacgagtcaggattctctcctgacgaccctcctgtggcccctgcacaatttgggagagacgccgcgttgcggctgcagagctgcccacagagggctgcaggccgggacacagtcactgcgcagagaagagacaggacgcccggggctgcctcccagagcagccgccatcttatggctgaaggggattgaggcc

SEQ ID NO: 23139 - DNA, 272 bp, Homo sapiens
  chr19:22018891-22019163
  hyper
cgcaggtcacagagccacagaggctggacctctagcagcagaggacacagaagaacgaagacgagacgcagagctccaactgcagccagagacaaaggccccgccacatcccggaagccgccctgtcctctcctgccccgtgcctgattggacggtttccagcccagcgtccctgattggataacttctaaggtcctgcccccgcaaaccctgaatgaaagatgtgatcagacgctgggctgaaagaagaaagaatgacagcctaggctgcc

SEQ ID NO: 23140 - DNA, 581 bp, Homo sapiens
  chr19:23432833-23433414
  hyper
cggggaagagacaagacgcccgggggccggctgtcagcgaagccgccatcttatggctgaaggggactgaggcccagctgggcaaggagaactcagggcgcagtttgtggagatgactgcggggaggcccgagtccgccacagccacttcccacaggtttcaaccagcccctccctctctctccggatgtcggagccgccactctcaccatttctaggcttccaggggaggccctggcgtcttagctgtggatctcccaatgcttgcaggtcagagggccacagaggctgggcctctaagagcaggggacacaaagcagggaagacgagaccaagcgctccagctgcagcgagagacaaaggccccgccaaatcccggaagccgccctgtccgctccagttgcgtgcctgattggacggtccccagctcagggtccctgattggaaaacgtctaaggcccagccccttcaggccttaagtgacagaagacctgaccaaacgctggactgaatgaagaaagagtgacagcctaagctgcagcgttttcaggcagggcttcctccctgagcttagcccacccc

SEQ ID NO: 23141 - DNA, 587 bp, Homo sapiens
  chr19:23456510-23457097
  hyper
cgtctcaaacaaacaaacatgtttaacaagagactgggagtctcacctgccacagctccttctacgcacacacgagtcggaattctgccctaatgacccgcctggcatccctgaacaatccgggaaatactcggcgctgcgtgcagagctgcccagggagctccagacacggcgccgcagggtccgggcgggacgccggggtcccggctgcgggcccagccgccatcttacggcgagaggggtctggggcggagctccgccagcggagactcaggttggcgacccgggagcggactgtggggaggccggtcccgccggtttcacagctcgctctcccctctcgggatgcccagccccgcacactcaccttttcccagcttccaggatgtcctggcatcttagctgtgcgtctcccagaacctgcagatcacagggcaagaggctgtgacagtcaccgggggctcccgaggtggaggacgtaaaacagcagagaccgatcccaagctgtggcgggagtgagatacaaaggccccaccaaatgccggaagccacgccctcctctccaactgggcggttcctgcgctagc

SEQ ID NO: 23142 - DNA, 120 bp, Homo sapiens
  chr19:23577711-23577831
  hyper
cgcggtgacgcccataaatttttaatagaaaaaaagaggccctgggaaccccacggactaaagtgcttcctattcatgagccagcacctccagtcaggattctcccctgacgaccctccc

SEQ ID NO: 23143 - DNA, 137 bp, Homo sapiens
  chr19:23577972-23578109
  hyper
cgctgaaggggactgaggccgagctgggcaaggagaacccgggcacggattgtggagctgactgaaggaaggcctgaggctcgccacagccgcatcccaccggtttcaacgagccccgttccctctctcgggacgtc

SEQ ID NO: 23144 - DNA, 68 bp, Homo sapiens; identical to SEQ ID NO: 6037
  chr19:23578240-23578308
  hyper

SEQ ID NO: 23145 - DNA, 702 bp, Homo sapiens; identical to SEQ ID NO: 6038
  chr19:24216103-24216805
  hyper

SEQ ID NO: 23146 - DNA, 601 bp, Homo sapiens; identical to SEQ ID NO: 6039
  chr19:2461998-2462599
  hyper

SEQ ID NO: 23147 - DNA, 770 bp, Homo sapiens; identical to SEQ ID NO: 6041
  chr19:28284358-28285128
  hyper

SEQ ID NO: 23148 - DNA, 742 bp, Homo sapiens
  chr19:37095957-37096699
  hyper
cgcgtcccatgaacccaggtcccctgccgtgagctcttctcgcatccagacccgggtcacctcaactcaccacatggaaaacgaacaccaggtcaacggaaaagggagccggggtcctggcagaagcgtagtgccagccgcaatagggcggccgtgggtgcaaacggaggggagcgccggcagctagcaccgcgcggcgactaacgggccgccccggagactcctgggagctcaggcccacgcgcgagtgcgcaggcgcagacgactcaccctgggccgggggtgaggcttggtgggtgccaggggtgctgaggaggccaaggagggcactgggagctccgttccgggagagctgtctaaggacgcggaaccgggtggggaggccagggaggtaaccaagagtccgagccgggcctggaaattctgaggaggaaaccgggaccgcggtatccagacgctccgatctgtacgagccgggcctcgggcgtggtccatgggcgtgaccttgagggtgacccggagcgagctccgcgaagggggattttgcccgttctgatcccgcggaagcgccatcgctggcggcgggtccccgcgcggagcgggcgctgtgtgttcgcgcgcgcgggcgcgcgctgaataggggtggcctcctgcgcccaacctgctgcattttaggtgcttgcctctctttgggatgttgtggccgattgtgtgtgaaaagtgaacggagtagtgttgctgc

SEQ ID NO: 23149 - DNA, 604 bp, Homo sapiens
  chr19:37288206-37288810
  hyper
cgtgagccgccgcgctcggccggccccaaacacttcttattggctaatctggagcaaacctgcatatccattggctgaaagctccgtctattttagggtgactgagagcgtctcttccttctgtgttgcctggaaacggactgttcgcctagtaacatctgatcacgtttcccattggtcaccgtttccggaagcccgctctcccgtttccggaatccccgcaggcgctgggtctgcagatggcgtccaggtacacagtggcgagtgtgattccgcagtcttgggctgtttggccaagcgcccgccggacatggtacgccgaagggtcatcggcgtggagtcctcgctttcagcgtccgcggctgggaaatcggccatcgctacggcgggaactgggactcgggctgcgtcccggcccttccacatcggtccaccgcactcgtgggcgcccgcattggtgctgacataatttcctgacctctgacccgtattgtctcgcgattaaaggtaaaaaacggggctttttcatcccactggggtaaaacgcccttttatttctagccaggtgttctgttgcagaacgcctcgaagggagggagtgacc

SEQ ID NO: 23150 - DNA, 529 bp, Homo sapiens
  chr19:37329089-37329618
  hyper
cgcatccactgctcccatcgcgatcgctcgcccccacgctccctcgccggcaaagccaccaactccaaagacattagcacctcactcccctcagccccggcctcgggccctccggagtcattcggcttctgtgtctcggaatcactcacccggccctgcggtcccttgatggtggaaggttccgcgatctttctattaaccctaaagggacagagggctgacaggaagttgcccggggaacggtgcactctgggaaatgtagtccggagcctgggccgtctttaactgccccggacaccgcggtcaccattaacggaccctgcatttgagccccatcccctcgctgggcaaagaccatcgcccacacaccgctcacatctgctgccgagagcttccagaattccaggccgcgtttaggaagcttcagcggaggcatgcaggctgccctacctctgcaaaaggctcccagccctgggaacaggacagtaagcccaggccatcttaggctggaagtaaccttggtcccgac

SEQ ID NO: 23151 - DNA, 523 bp, Homo sapiens
  chr19:37340738-37341261
  hyper
cgcccaaagctgcacacatcttgacctcacttctctcacacacacaccaatctgacccgcacgcggtttctttcactcaactacccagacacccctcatcccaccagcacaagcaggcccaccgcggtctcacacacactcgagccttcctttgcccagtctcacatgcatgactgggatcgcggatttgtccccttccgactccccatgctggttcggtcccagacgctcaggtgccacattggggtgcgctctcccggctcctccacacgctacgcagctgcccgcctcaagagcgtctgcgtgcttccagcgttaagtggaattccaagcagcctccggggcacagttagtctggtcactgcggccagactgccgcctcaggacccagagaacgcagcacactttagttgggcccatctatccccggcgaggcttggactacgtttcccaggagaccctgcggtccagtatgtctcccgaggaggggcggaagcccgggagccgccctctgaggctgggc

SEQ ID NO: 23152 - DNA, 847 bp, Homo sapiens
  chr19:37341484-37342331
  hyper
cgcaggctatggaggaggcctggccaagcaaaaagggctcagaggagcctgactaaagcttggtctagggactccttgtcaggtgagactcccggaaggctccgatgggcagctcacctcaaagagatagttttgttggtgccagagtccgcgccaggggaatcgggatggctgggctgtagctttcggcaacctgtcgctttctggactacacttcccagaagcctctaggcccagggcactctcccgcgataactagattgtctcttgaggagtgggcgggatcttcccgcggatttgggcaagcggccttggggctttgtgagatagctagggtcgacttgtgtggattctagtagaacggagctgaccctatccgaacaggcgtaagtgaggcggctcggagcctggcgcgacaggaactcccgacctgtgtgggctgcgtggggaacaggctaaggagcgattgtgaggagtgtgtacggttgtgactgggggcgtgtgtctgtgcgaccgtgtatggaactgtgagggcggggaggaggactttttgtttatgtttgtgcgggtgtgagtagagtttaattgtgaccgggttgggcactgtgtttgcgagtgtgaggttcctggaccgcggttgtgactgtatgtccccttggggtgtgtgtgtgtgtgtttactaccatttgccgaactgtgtgtagtatgccttaattttgaggtttgtggctgcttccgtgtgtgtgtgtgcgcgcgcgttggtgatattgttgatggagggtgcgtgtgaatttgttgtcattgtgaccccaaggtgtatgtcactgggaatttgagagatgcccac

SEQ ID NO: 23153 - DNA, 799 bp, Homo sapiens
  chr19:37463952-37464751
  hyper
cggcttcactggaggcggggaactggacatgactgtgagcgccagtgaccgtggtgcggtccaggccccgggtggcgcacccacctctggactacatttcccagggggccccgcggccaaccttttccggccgaagaaggctagtcacctttccttggcgggtgttggaaagcaaagggctggaacgtcccgggctgcggagctcgctgggttgggatggactcgttcagacctgagtgctaggacgccgaagggggcggtgaggcgtcccggcgaggagctggggtcgtctggagtttaaaagacaggtggctctcggagatgtgcgggctgcatgcccacgcttcaccgctaggggaggtcagggctgtgcgatggggaaggaagagagtgtcggggcggtgcagtcgggatgggagaagggtgtcagggccactggcccccagctcggcagagggcagtgtcgggccgcgcgcaggcagggagtgggtgtggtgtgaggctggcgctggagcggtctgggaatgttaggaggtctagggtatcgcggccctgcgtcctcttgtctggactaaaagtccgggcagttctccccggacctggattgtgggcccagcgacaggtgcttggcgatctgtgcccgctgtgcctgcggggctgtggtgggagtcctgtctgcacggtattctgtgtggctgtgcatgtaagtgtgagcgtgtgccgggtcatcgaccccatctttgggaggcctgggagggggcgggacaccctcgctgtacattctggggatacgctgggc

SEQ ID NO: 23154 - DNA, 462 bp, Homo sapiens
  chr19:37663394-37663856
  hyper
cgtcacaatcaacaacggacgccacagaaccccatcaccgaagcctgaaaccgcaatcactaactccacaggcaacctcgacaccccctattactggctccacagaaaccccaatcgtgatcaaccaaaatcacctcaaagatttatcggtattggaatatgaaaatactcctgacaccagcggcaaaaaagccttggaagaccacttccacttccggtccgacttctagcacctcccctttgtaggctgttgatatggcgcatgctctgaataaacttggaagccagtttcctcgaacagtcaacagggcgcagacacagcgcacaggttccgtaatgtggcgctgtccggcagagaacatggccgcgcccttatggtgtttattcgcgtgggccgccattttgaaagcatatccattccgtagagcagaggaattggccgctggcagggtttcctagagc

SEQ ID NO: 23155 - DNA, 719 bp, Homo sapiens
  chr19:37957873-37958592
  hyper
cgccccgcccggcgtcctcctccaaagattggggcaccaggaccgcgggcccccactcccacccagcacaaagagtccggcgctcagagctagcggtttcccgaggactcaccaccaagcccgcggacacaggccccgattccacacttaacgctgccaaagtggcagagccggcgcgggctgggacagaggcggcactgaggccggcgctgtcggtggctgagagcgccacaagtctcggtccgttacaccaggggcgacgcttcccagaggcccccgcggctcacccgggcgggactggcttcactgtttgcgcgtcctgagaagcagaccacggtgttccagggctcacagctccgcgcaggggagctcagcctaggttttgcacgagcggcctcccgcgagcccagctctgagagattgggagcgcaacttggtgctgagaagaatcgaatcgttccgctgcttcctgcgccgaactacatttcccagaggccttcgcggccctacttccccgaccccacctgcaaaaaggcacttccttcttacagtcggctggagctgcaggttcgcaaggtccgtgaaggaagcccggctcagtgtgtttagttccgtctttttgggtctctacctgaggctagaatacagcggggtgaaggtggtgagagctccagggccagtgaaggccgggtcagctggagccttaaggtcctgacagc

SEQ ID NO: 23156 - DNA, 989 bp, Homo sapiens; identical to SEQ ID NO: 6050
  chr19:40561486-40562475
  hyper

SEQ ID NO: 23157 - DNA, 497 bp, Homo sapiens
  chr19:44488115-44488612
  hyper
cgaaacgcctgcgggagtctaattgcccggtcgatgcgcaggaaatttggctcccgcaggcgtttcgcgagtagcttgggaggcgtgggaattttggcccaggcaggaggacctgtgaattctgggaagtggagtccatttgctctgtggagtcgtgggaactttggctcaggcaggcggattcgggggattctgggaagtgtagtccagacgcctgtggcatcatcgacacttccggtctccgagcaggacactgctacttaacaaggtggtttgagccaagtatgtgtcttgcgggtctttgcgaaagtgaaccagttattaggggcgcctaacgacctggggggtcaactaagggggtaagaagccctggagaagacctgaggtttggagatgcgaggggtgggagggaagtttcgttgccgtcgatggagccttctggcgttgggggctgtactcaggtccaccggaggagtcgtcgggggttcggggggggc

SEQ ID NO: 23158 - DNA, 429 bp, Homo sapiens
  chr19:44529393-44529822
  hyper
cgcgggccctttgtctcacacgggcgagtccggggaattctgggaagtggagtccacacgctctgtggaggctcgagcacttccggtccccaactgtgacgttgctatttcatttaccacagtagtttgagtcatttccacatcttgcgagtccttccgaacgagtctcctttccttggggctcgcaaccacccaatgatcgattcaggagaaaagaagcctgggcggagagcagaggtttggaggggcgcgggcggggattgccgttccagtcagctgagccttctggcgtcggggggctctgctagggtctcagggagtgggattggcgcggcccggtgtgccctactttgacctcgcttagtccgcctccctcctccctacgtgtgcagcccctttcagtgtggtgtggagtgtcacttaatgtcc

SEQ ID NO: 23159 - DNA, 501 bp, Homo sapiens
  chr19:44711530-44712031
  hyper
cggaagctcaggttactcggaagtatttccgctccaaggagcggaactatggccggtttcccctggggcattctgggaagtgtagtcaggggcccgcgtagcctggggcacttccgcttttggatggcggagctagggaattgtgggaagtgatccggggtttctctttagttgctgggaagttttttcgctctaggagggcgaaaacaagtgtttggatccgctgggaccctccaagttttctcagcctcgtcagggagcaagcggggccctggccctcgtctggaggaaggctagagaagctgtggccagctgggaggctggagttgggagcagtttgtgttctttcctctcggctgagcctcacgtttggagcagttcttgcgtccccgggttgggagcgtcctggatcggttgtcgcttggttagagggtctcctggcgttccgcagccagcctctcccacctacttgccagctctgccacttactagtgttataac

SEQ ID NO: 23160 - DNA, 247 bp, Homo sapiens
  chr19:46929939-46930186
  hyper
cgttcctcctgggtctgcgtgagttttcttcaactccagtaagagatctgcaaaaccttggaatccaggaccgtttccacctcctccattttctgcaaagggcgcaggcgcctggggtcagcctgtggtctccatagcaacggtcggacgcgctgctaggttctggctctgactgcgcctgcgcggctggtcccgcggggtctcccgagtagcggaagatatttgtgggtctttgagacccttcctc

SEQ ID NO: 23161 - DNA, 626 bp, Homo sapiens
  chr19:52800378-52801004
  hyper
cgcccccgcccccgccccgctcggacccctccgctgcgcgcgcagtttcccacaaacccggaagcggatcgcgtggagtgaaggtcacgccgcggcgcgtgagtttccctttgtgtaaattaatctgcgcttcccaactcccccgcgcttctgtacccgggatctgaggggccacacagaccttgaaatcctcgcaccgctccctctaccccgaccaaattcaggcgtctccgtgagagtcaggcggtcgcttccctgtgtgtttaaatcgctcggcggcgggtcctgtcccccgtccttctgccacagggccatgtagtcacctcctgtcgcggagttttcctgtttcaagtccttcagtgatgcttacatccgccccgcacagcgtaaagtcctcccccgctaggcggattccggtctatgcggtcccccaagcctcgcctttgttggccctggagcacagcgctccaatctcaatccaggagaagccgcgtcttctgcccagtgctgggattctgcagacgccacccatctcttgatccagaccctacctttaccctccttgatacggggccccgctactccccaggcctcctcttcccagacaccgcttctcctaaccctgc

SEQ ID NO: 23162 - DNA, 675 bp, Homo sapiens
  chr19:52839404-52840079
  hyper
cggaaaacagaggcactggaggcgtggcctagggaagccccgccccgtcccgtcccggtccgctctctatgctgcgcgcgcgcagttttttgcagacccggaagcggatcgcgtgggtagaaggtcacaccgcagcgcgtcagtttccctttgtttagattcaatctgggcttcccagctcccccgcgcttctgtacccgggatctgagagtcaacacagaccttgaaatccccgcaccgctccctccaccccgtgtaaattcaggcgtctccgtgagagtccggcgctcgcttccctgtgtgttaaaatcgctcggcgacgggtcctgtccccgctcgttctgccttgggccaggtaaacacggattttcgagactcctttccgcttaaaactctttactgacccaacgtcctgccccgcgcttttaaaagtccttaccgcaaggtggattcccgcccggggagcctcccaacctcgcccccggcccctgaagcgcagcgccgcagccccagtcccggcgggggaggccgcgtcctgtactgggtcctgggacccttgagaccccacacttctaataattcagccccacccttttcctccttgatccgggccttcctactccccaggcctccccttcgcagccatcgctactcccgacccccgggtgtggggac

SEQ ID NO: 23163 - DNA, 897 bp, Homo sapiens
  chr19:53073241-53074138
  hyper
cgcccaggcagggctttgcattttacattcttgtttgcatccccgttccagacaattccagggctttcgaatcgtgcttcagccttcctgaccgctctcgcctccaaagcccgaaaaatagagtcgctgggagcgaggctgagagacgcacaggtcccgccccggccccgccctctgccggttctaaagggcaaggtctctccgcctggggccccgcctctacctcgatcaggccccgcccaccttctcgttggctccacccaggcctggctttagtcctgtgcgcacacatccgcgcagaccaggaagcggatcccgtggagtgaaggtcgcaccgcggcggtgagttttgctctgtgttgtattaagtctgcactccccatatccccggcacttccgtacctgggacgtggggtcaccacagacctgtaaattctcgcccatcttccttcaaccagagcaaatgcagacgttcccctgggaatccggaagtcgcttccttttgtgtttaaagtcgccctgaggctgttcccgtctccagtctttctgctacagggcgctgtatacacttcctatcgcgtagtttctgtgctcaaaaccgttttttaactcctccctccccgcgcttttcaaagtcctcacccgagatgtgtatttccgcctgggcgcctcccagtctcaacctttaggcgcctgaagcgcaaacgtcgcgatcccagtctcagggaggccgagttctctgcctggtgctgggatcttgtggaccccaccgaaggcgtcgtcgcaccccacctcccgcctcatgctgggccttgctgcaccccaagtctccccttagcagtcaccactttccttgagccagcgttggggaggtgccaggggccagtcctgtgacac

SEQ ID NO: 23164 - DNA, 1065 bp, Homo sapiens
  chr19:53104083-53105148
  hyper
cgctcctccctggcctgagcactccgtcccgcatcccaggcggtggccctagggaagtctctgaagctgagcacagggtggactctgcccccaccgccgacccgccctccccgaccccgagtgaatggagaatagaaagggagaggatttctgttctgtcctgtgggccctcagtatgaaatcgtagttctgcccaggcaggactttgcatttcacattctagtttgcatccccgttccagacaattccagggcttttgactcatgcctcagccttcccggccagtctcccttccaaaacccgaaaaacggaggcgctgggctcaagactgactctgtcccgccccggccccgccctctgccggttctaaagggcaaagtctctccgcctcgcgccccgcttccgcctgcccaggccccgcccacctcctcctggaccccgcccaggcctggcttctgtcctgcgcgagcagatcagcgcgaacctggaagcggagagcgtggagtgaaggtcccacggcagcgcgtgagtttctctctgttttatattaagtctgtgcgtcccaggtccccggcgcgtctgtacctgggacgtggggtccccacagacctggaaattctcgcccgtcttcacccagagcaaattgagacttccctttgagagtccggggttcacttccttttgggtttaaaatcgccttgaagctggtgcggtctctggtcttgctgctatagggcaatgtatacactttgtattgggtagttttcctgctcaaaacctttttctaactcctcccgccccgcgctttttaaagtccttacaggtgaggtggattcccgccctgggcgcctcccaccctcgccttcgacggcccctcgagtgcagcgccgtgcccccagtcccgcggaggctgcgtcctctgcctggtcctgagatccttcagaccccaccattgtcttaaggcgccgtcgtcccccacctcccttctcgtgccgggccctgctgctccccaggtctcctctccgccgtcaccgcttcccctgagcccgcgttgggaaggtgtcc

SEQ ID NO: 23165 - DNA, 892 bp, Homo sapiens
  chr19:53140914-53141806
  hyper
cgacacaatcacaggagggtttggataagacgcctgcatcccggaggagctcgttttccgggggctggagctgggcaggcaagaacaccccgtgtcacaggacaggccccgggtacctccccaacgcgggttcaggggaagaggtgactgtggaggagagacctgtggagcagcagggcccgccacgaggagggaggtgggggggagacggcgccttaagacaaggttggggtctgcaggattccaggaccaggcaaagtacgcggcctccctgggactggggccctggcgctgcgctccagtggcctacgaaggcgagggtgggaggcgcccagggcgggaatccagctctcgggtgaggactttaaaaagcgaggggcgggaggagtcagaaaacagttttgagcaggaaaactacgcgacaggaagtgtatacatcgccctacagcagaaagaccggggacagcccagcctcagggcgactttaaacccaaaaggaagcgatatccggactctcatggggacgtctcaatttgtcctgggtgaaggaagaagggagagaatttccaggtctgtggggaccccacgtctcaggtacagcagcgccggggacctggtaagcgcagacttaatagaagagcgaaactcaccgccacggtgtaactttcactccacataatccgcttccgggtttgcgcgcatgtgcgcgcgcagtacagaagccaggtctgggcggggcccgcgaggtgggcggggcctggatgaggtaggggcggggtgggaagccgagagactttcccctttagaaccagcagtgggcggggccagggcgggacctgtgagtctctcagcatcgttcccagcgcagaggcatttttcgggttttggaggc

SEQ ID NO: 23166 - DNA, 661 bp, Homo sapiens
  chr19:53400404-53401065
  hyper
cgttttccaggagttggaactaggtagcaacaccgcacaaggagggaggtggggagcgacggagccttcggacaggggtggcgtctgcaggatcttaggaccaggcagaggacgcggcctcccgggaaccggggttgaggcgcggcgctcctgaagccgccgagagcgacggtgggaggcgcctagggctggaatccagctcgcgggtgaggacttgaaacagcgcgaggcgggaggacaggtcaggaagggttttgagaaggaaaattccgcgataggaggtgtctgcacgaccccactgcagaaagaccgaggacgggacctgcctcagggccactttaaactcgaagggactcacggactctcacccggacgtctcaatttgctctgggttgagaaagaggggccgcaatttccaggtctgtggggactcaacgtccccggtatagcagcaccacaggactgggaagcacacataaaacagagcgaaactcacgcgctgtggtgtgaccttcagtccctgccatccgcttccgggtctatgccaatcagcgcaggacagaggccaggcctgggcgggacccccgagaaggtaggcggggcctggactaggccgggatgagacgcgaagaggtgggcggggcctgaacaaggccggggc

SEQ ID NO: 23167 - DNA, 1063 bp, Homo sapiens
  chr19:53465713-53466776
  hyper
cggccaccctggggctgcggggctgcaacgctgcgctccaggggccgactagagcgaggctgggaagcgctcttgcccagggcaagaatccagctccgggtgaggacttgaaacagcgcgaggcgggaggacgcgtcagaaagggttttgctaaggaaagtttcgcgacaggaggtgtctgcacggccccactgcagaaagaccggggacgggaccagcctcagggcaactttaaactcaaaaggaagcgactcacggactctcacccggacgtttcaatttgctctgggttgagaaaagaggggccggaacctgcaggtctgtggggaccccacgtcccctatatagcagcaccagacaactaggaaacgcacacgccgccgtgcaactttcagtccacgccatccgcttccgggtctgtgccaatcggcgcaggacagaagcgggacctgggccagatccccgagaggtgggcggggcctgggcgaggccggggcggggtgcaaaggacaaggggcccggcgcggaagagaagagtcttgggctgggaggagtccgcgggggcgggaaaggggcggggcctgagcttttctccatctcgctctccgcgcctctgttttcaaggttttagaggtgaaacccgccagtgaggctggagcagctcagcagtcagggaaatagtacctccctgagaagtcgccgtgtggcggtaattggatccgggaaagttccttgctattgaaatttattttagcaatttaattccaaagcctggaagttgtctacggcaggaatgcaaactagaatgcgaaatgcaaagccttgcctgagcgaaaggtacaatttcatgctgacggtccacagaacagaatagaaatcctctccctttcaattctccattcactggagtgggagagtccacactgtgctcagctcctgagacttccctagggccaccgtctggggtgcggagcagaggagtgtgcttaaacacagcagggatgcgggcggggtggcaggagtctggggtccccgctactcaggaagcaggggcgagaggatc

SEQ ID NO: 23168 - DNA, 458 bp, Homo sapiens
  chr19:53661430-53661888
  hyper
cgggcacctccccagcgcgggctcaggagaagcggggactgcgaaggggaggcctggggagcagcagggcccggcacgaggaggagggaggtggcggggcgacggcgccttagaagaggggtggggtctgcaggatgccaggaccaggcagaggacgcggcctcgccggtaccggggctgaggagctgcgctccaggggccgacgagggcgaggctgggaggcacccagggcgggaatccacctcgcgggcgaggactttaaaaagcccggggcgggaggaggggtcaggaaagggttttaagcgggaggaagacgcgaaaggccggggacagggagaagcctcagagctacttcaacccaaagagaagcgactccgaacccacaccgcgagtcagctggggtggagggcgcggtgcggggatcttaaggtctgtagctgccgggcgcagtggctcac

SEQ ID NO: 23169 - DNA, 93 bp, Homo sapiens; identical to SEQ ID NO: 6066
  chr19:53934941-53935034
  hyper

SEQ ID NO: 23170 - DNA, 728 bp, Homo sapiens
  chr19:57702696-57703424
  hyper
cgccgtgaagcgttcctcccgttgttgaacacatgaggaaaactacactacttagaaggctgtgcattatgcgtacggcgggagctgggccaacgacggcctaggacggggacgtttccgacggctcacgccggtgggggcgggacttccgggttgctcgctgcggacgccattttcttctgcacttctgtctggagaggtctgtagccactgagggccccggtcggggccgctttgcaggtccctagtcaggaccgagcaggggagtaggataggaatccccgccgcacctttgtacgagcctgaccccttccgtgggtttgttcctgggtcgccgtcaagctgcggtctctcctcccccgcccttcagccccgcggtctccaggggcggcgccctgggtctggaacgcggttgccaccgaggaggcggcggccctgcgtctggaacgccgttgccaccgaggaggcggcggccccgagcgcgcctggaagccccgggcaaccggccagggtcgggcacaggtggggtccgtcaggccgcccggggctcctctgtcccagctctgcggcccagggggtgacgtgatggcggcagcggtgctgacggaccgggcccaggtgagtggacggtggcttcgcggttgccgcttccttgccagcgctgaggcggtttccgaagtgggtgggagcccaggtatcccctggatttgtcttcgcagtcgtcgttc

SEQ ID NO: 23171 - DNA, 834 bp, Homo sapiens
  chr19:57862401-57863235
  hyper
cgagatatcgttttcccagtcttttctccccctccctgcacgacgcctcttggcagacatccgggagaacccgaaaggcgctcgttgcctggttggatgcagggtacaaactacgttacccagaaatctgtgcccagctcattgttagccggcgtgcagccaatgacagcccagaaactgggcgtttcctgctgctctgggctgcaggggcgagacttctggcgtcgccgtcgtgacgtatttttcctatgcccggtccgtgcattctggttgtgaaggctgagttctagagatcgggtcggctttctacgcggctctcgtggaacctagcaaagaaagacagtgaagactgcaggaccttccttcgcgcttttgttacaatccatgacccctgtcgtgggacgggcggcctctcgcggaggtgtctgccggggctgggctcttaccgaggcctccacacacgtcctcttgtccttgtctcccccagaagcagccgccttagtcttgtgagcgtttttacaccgggtagattgagacttggagtgctacactcagcccgagggcgtccagcgcggtggaggcgtggggtttcggctgagcccacagggcacagactgttcatccgcttctcatggcagcggcggtgctgatggaccgggttcaggtgagtgggggcatccctcaagcgcaccccggcctggttggtgtgtcctgggatgttcgctctcatcgcgcacttcagggtgctcactccgtcgcattatgtggaggggttccgctcccctcatcagtggcataaggtgtggaacggactcgaaggcgcaggggcagttc

SEQ ID NO: 23172 - DNA, 883 bp, Homo sapiens
  chr19:57874412-57875295
  hyper
cggtgtagccgttgagaacttgctgtgcttcacaatccgatatcataggtccctcacatttctgtgagtatcctagaccttacttcaagaaaatctggttatgtcgcctttaagagcaacccaagccccgtcctgtccgtggagtccggcactctgtttaccagctcccctgacggtgccactgagcctctatccgccatataaggactgaccaacgctctaaggcaagtccagaagcggtgtcgaaacttcataacccagaagacactgcggttctcggcagcgcgactgacccaatgaatgtgcaggaaggaacctttgcgtgcgtgcgtgcgtgcgtgcgtccgtcctcgtgctcgcgcatcgtaggagggcgggacttccggcgtcctcttgccgtggttgatttgattttctctggtgttttcactagttccggcctttggcgctctatgacgtcaccgaagtgacggagcggaaaagcgcgagaagcggcttggttccttgtacgcagaggcggtagtgacacaggcacaactgacagtggcagaagctcagctgacaaggactggggacggcggtgtccttgtcttgcctttgtcgcccccgcccctctcttccctggctggacttgcggagtccccgccgaagaacccgaggtgggtgccccgtcccaggcccccccccacctccgcccgacccctccttccagtgctgaagcccatagaaggggccctgcaggtcaggccccttgtctcgaagagaggggcgttcctgtgtggggtccccgtatcagctggtttgatgcagcctcagagctcccttcggggatctcaggttcagagcatggaggtgctgccaagtgggccgcgtcggggagccc

SEQ ID NO: 23173 - DNA, 472 bp, Homo sapiens
  chr19:57998890-57999362
  hyper
cgttatctccatctccatcatcatctccatctccgtctccatctccatcatcatctatcatctccaatctccatctccgaagttatgcccacttcctggaagtttggaggcacgggaactacattgcccaaaaggcgcagcgccgcgaggcggcgatccctgaccaatgaaaagaggtctgcccgagcgtgcgacacgcaatgggcgggacttccggcgtctcgtttggtattcactttcgcgactcaggtgaactaacctgcgagaagctggttgtgcgctgaggcgaccagcgccggaaggcacggtggcgactcacgctgttctcgccgctcagaggcgggtctgaggctcggtggcggcgcccagggtggcccgggccctttcctcggtcattgtctcccctccagctctactcacaggctccgatggcggcggccgccctgagggaccccgctcaggtgagcgccgc

SEQ ID NO: 23174 - DNA, 465 bp, Homo sapiens
  chr19:58011085-58011550
  hyper
cgtctccaatctccatctccgaagttatgcccacttcctcgaagtttggagccacgcgaactacactgcccagaaggcgccgcgccgtgagccgcgatgcttggccaatgaaaagaggtctacccgagagtgcgacgcgcaatgggcgggacttccggcgtctcccctcggcggttgctttcgctgccctcaagagaactcagcttgccggaagctggttgttcgctgcggcgaccagctccggaaagcgcggtggggacgcgctgtgttctcgcagctcagaggcgggtctgaggctcggtggcggcgcccagggtggcccgggccctttcctcggtcgttgtctcaccgccacaggctccgatggcggcggccacgctgagggaccccgctcaggtgagcgccgcgtcctcccggcctcccccgaatcctaaagccctgtgagggccgcctgctcaggtcccc

SEQ ID NO: 23175 - DNA, 757 bp, Homo sapiens
  chr19:58111093-58111850
  hyper
cggggtcattcctccctgaggtccaggagaagggcgacctctgccagcccaagaagcggtgagaactacattacccagaggcccgtgagccaggttcttggcgtggagccaatgaggctcaggggagggacatttccgctctgtccaacttgtcggagcggaacttccggcgtcctccctgtggcgggcactttggcttgtgtcagttccatccgcgggtgccggatctggacctaggtgctgacagcgagaaggcgcgaggagagtcgttttctcagctgcacagccggggcctgacggtcgccggcggtggtgacagctttgctcttgtctccgcccggatcgtccaccgctcccggcccgctccgcccagagtccgatggcggcggcactgagggccccgacccaggtgagcgctgcgtcctcccggcctcctctgccctccccacccgaaactgagggacgcgtgaagggttttctgcagcccggaccgcactgtccggcacagtgaggcgctggtgctggatctcgtttctggtagtgtggcagggagcgggagagcgacacggtcagggggctgcgcgggcaacagcttggagctgcgcctgagccgggaggctggggagacccaggccggcctcacgcgtgcaggtagcagagggtggggcagcgccgcgctgcattggccccactgagtttcaccagcacactgagggccacagcgcgtaggacagaagaggggcacggccccagtcac

SEQ ID NO: 23176 - DNA, 797 bp, Homo sapiens
  chr19:58144201-58144998
  hyper
cggggagctggaagaggcaggaaaaggagcacactcgaagtaacgtttattggggaaaaaaaacgcctacgtgtaaatggacccgcacagctcaaacctgtgttgttcaagtgtcaacctacttaagacctcaaacaccgaagcccctcagtcgccctggaaggcagcagacgcagcttcctagcgctcccagctgtctgcacacaaggcgccctccgtcgcagcctgggggagactacattacccagaaagccttgcgtcgagcggcagtactttgatccaatgaaaatccaagacaggggcatttccgtgtgggtctacccccgccccccccagggcgggacttgtggcgtcttcgcagcggtcattttggctgccctcccggaggtccgttctgtctgtcagccgctttggtacgctgcatcgggatcgaagtgacggaccgtgaaggcgcgagagtcaggtctgagggtcgggggcagagccgcccgcgaggccggcctggggatagcgatgctcgggttccccccgggtcgcccgcagctcccggtccagctccgcccacagactcggatggcgaccgcactgagggacccggcttcggtgagcgctgcgatctccgggcctcccccggccgagattcttaagtcccaagtgagaggcaccagctcacgtctctgtagcacagggtcggggacactgaggctcgtgggtggggcccctatttctgacatccgatgtggtgggcagggggacaagggacaggaccggcgcgtgcagggcttggacgggcaacc

SEQ ID NO: 23177 - DNA, 627 bp, Homo sapiens; identical to SEQ ID NO: 6077
  chr19:58258088-58258715
  hyper

SEQ ID NO: 23178 - DNA, 781 bp, Homo sapiens
  chr19:58280766-58281547
  hyper
cgtatggcctcttctaagatgggagaccctcctccgcatctggacctggagtcgccatttcctagcgcccctcgcagtggagcttgcccctttcttcggaaagtcggaagaaagccaccttaagcgctgcccatgtctgggaactacattacccagaatccgccctgcgaaatggtaacgtggctgagccaatgaagcttcagagaagccgtgccattgccggggcacgtaaagtcaagccaggacttccggcgtcctagccgtggcagccattttggcctgtcaggtccatccggcgatgctgggtctggacgagctcgggaggagtggttgtggccattgcacacaggcggatctgaggttcggcgacgccgctggtcgcgacccgggacaggacaacgacaggaacaccgccgagcccgcgttccccccccgcccagagtcatggcggcagcagccgctctgagggcgcctgctcaggtgagcgctgcgacctccgggccttacccaccctacccacccagaccctgaggcccctgatcgtgagggccgcctcctcgcgtccctgcagcccaggcctctgtcagggacggagaggcgccggcgggtgggatccctgtttccgacacccagttgatgcggtcggcagagcgagactggcggagggcaaaggcctgcaggcgcgactgaggcaggaggatgcggaacacggggacatcgtgtgtctactgggaaagaagtgtgatacggagttatttctttttttttttttttttgagac

SEQ ID NO: 23179 - DNA, 939 bp, Homo sapiens
  chr2:100938223-100939162
  hyper
cggtcgcgcaggcccacggcgcgcaccaggccgcccgccagctcttccagctcctccggccgcagcgccccgagccgcgcggcgccgcggaacgcgcccagggcttcggggaggcggccggcgcgggccagcgcgtcccccagcctcaggcacaggccgcggtccggctgcgccagcccggctagcatggagcgaaagagctcggctgccatctcgtagtcgcccgcgcggaaggcctcgtcgccctcctctaagcgctgggcgatcggctccgcgcggtcgcagccaggacactggggcggcggcggcggcgggaccggctcggggctcatcaccgcggggctgcgacgacgcgggtccggagcgaaggcgcggagcagggaggatgcgctgctgctgggaactggccggcgggagcgcggtctcagccctcgccagcagccacgcgcgtctgggggcggcgcgctgcgagcggctgagaccgcgggcgggggcgggcgcctggcttgggcagcgtcctcagcgcggtgtgggcggcgagccccgcagggctgcaatcgttccggggtgggggccgggacaggcaccgcgggcgcaatctgagcccctgcccacgcgcagcggcctctcagtcccgccggcttaggtaacccaggtcgctgcggtaacgcagtgaccgcgctccaggtccgcgtctcttgcgatgcttcccccactcgcctgagggctcctgcgcgactgcgcgcgcgtcctctgcctgccgcctccccgcagaggtgccggggccctgggagcaggtggccttggccgcgggctgctggcgcgccggcaccgcggcacctgctcttccccagaggcctggccgcccccacaacctgtggctccgcttaagcaagaacccaggaaaagtcaccaaacgcatcacgcatctctagcttc

SEQ ID NO: 23180 - DNA, 1851 bp, Homo sapiens
  chr2:105488296-105490147
  hyper
cgaacgcagaaagaactcaacaactgaaccgccagtggaatccagtatctgggcaagttcactttattccttcgcaggaagagggtcagcgacggccagcgaaagtttcccccgctctttgaagagggaggtgacaagacctgccagaccttcccacgcgcgggccgcctgggttctggggctttcgtgacgtcttccctcatcgcgctccccacccccgaacacacacacacagacacacacacacacacactcttccttgctcgggaaacttggcttcaacctggctccccctttcaaaaccccctggagaacttcccctgcagggatgccctgcgcccgccggctgcgccctccctctcctcagccctgctcctcctgtccgctccccggcgttctggactcacccggcacggtccttccattccacatacagacaggaaaccggcctcttcgggacaacatttgaaaccacattttatcaacatcatcaaagaccagagcacacacttcgggctctgagctctggagcccgcttcttgcagaaaaccgggtatgggggaagggctgcaggggcgagaaatcctgcttccaactgcgatttcagctttcttatggaaatgaacgcgacggcccgttcgccccgagcctccctcccgttcccagcccctcttcagcttaccctttcctcccgctaacccccgccctcccggtccccgagttcccgcggcggccaggctggtggggacgcactcgctctgcgcccgggtctcggcgcgcgcggaaacccaggccgcgggctcccctccgccccgccggcccgcgtgcagcattaaatattcatagggatgctactttcttaaaggagaacctaccgcgcgggaaagttcacagccaaggagaggcacaaaagaaggtctccgcgctggttctcaagggcgaggagacgcatcccttcttgacagtgcgcctccagactggcattaaggagaggactagggaatgggatcacctatcgtcaagtcacttattttagaggggtttggagaagaggtgaacttggtggtggagagaaagcgcgctccctaatcacctgttaaacagttattttaaaattagctgtcgcatctgacgccctagggtccccaagggccttttcataagggagtctgtttaacttcactggctttgggagcgagaaagtttgccctttgtttctggaaacacgcccacgcagtacgcttaggtaaccttacactgaacaatttccttggagcggctaaaaccgcaacaaccaaacttgcacctgcgccattctcttaaaaacagggcagcggctgtgagcgctgggccggtaagtaagggcagagaaaggggctgtcgtgtgcgtcccagctctccgacccgcacgtccgggacccctttccgcccgcgcaccgcggtcacttgcagccggcgctggctgcttgagcccgcggccgggtcgcccggcttctctccgggagagtggccagggcctaggcgctcgctcaagagggagagcgaagggaaaagaagaaagttctccgccggccgcgcgcagctcctcccgtgagcgcgccccagccctgggccggcccgacccgacccgcgacggggccacgcgtagtgccaggcaactcctgtgccctgtggccagccccgcgcgcgcactcgcactcacacacactcatactcacaccccacggttctttttgttccgggccaggagcactttcacaagtggttagaaagtcttgggcgccatctaacgggagcagcaaaaagttgacgctgggtggaggttaggcccgacaggagcccaggatgggc

SEQ ID NO: 23181 - DNA, 807 bp, Homo sapiens
  chr2:111874942-111875749
  hyper
cgtccacgcccacccccttacgggaaaagccggggtttccactgggctaggtgtcagagttgggaatgtctaaaacaaaaaaggcttccgagggttattcatggccaacagtttccacaggagaatccaaagggaaactagtttccggggccgctgtgtgtgcgggtgcttggtgggctgaaagctgctgtcactagatggctgtaagtgtgccaacatctgacctgtcccattgtgttgtgttttgcagttgctggatttgtgcgactcggtgaaggatgatgcccggagggtgatctcgacctttaacattccacacacctacctccacgcaccaatcgccggaatctccaacccgcgggccgcgtgggctttctaccctgcaccgctgcagccgcggccacgggaagaggcgcgctcccggcggcccaagctgggagccaagctctaacgggtgtggcgggaagtgtggtggcccgccagcagctgccacgacgctcgctccaccgacgcccagagctgtggccgaggccgggggctggcacccgctgggccgccactctcggggattttggtggcaaagcggaggtcccgccgaggctggcgaggtgcgcggctggctgctaggaaagagatccagacggtcgcctggtgcgctggatccctgtgccctttccctgaaacccagcctggcctgactgcaacctctcccaacttcagtgccggatcccctagacaatcagggtgggctccccgctgcgagcgcgccccacagccgggtgccgccaaaggtctcctgctgttagc

SEQ ID NO: 23182 - DNA, 1446 bp, Homo sapiens
  chr2:118981062-118982508
  hyper
cgcctggcgtgaaaagaaccaagaacactgaacccagggcagcagcgaatcccacgccccacgctccctcttcccaaacctcaatatcgttgcttaaaatcttccgggcttattgtgaagccaagggcgcttggcatgggaagagagccgctcgtgatttatttgggagagggatggggttttggaaaggaaattggggggtttacaaggaggacgggtgggttttactcaacaacttattcttgggcgttttcgtggactggagaggagtttcgatcccgtctcgggctcacctgggaagccccctcctggcgcccgctttgtttggcgttcctttaaagcccggtgttggcagagcgacccacaatgaaacaaattctcattttatgacgtctttccccccgtaggagtccgaacaatgtctgggggcttggcacgcatgaagataaaagaattttattttaaatgcgatacatgtcaggattagacagcgtttcctttcagctaaactacagagcgaatcttcatttcctgtttcactgcttcccccgaaagaaacttttctttttctttttctttttctttttttttcttttctttctctcccccagcagagagtccgagagaaaagtgctgggcacagagctccccacgaggtccccggaaagcagacttagctcctgatcgttgtcaatctttgggcaacccggggcctcgcaacggctcgggtttagtgtgatctggggaggctgcagcccagttccggctaccgtgggcgcctgagcagagccggggcgagttgtaaacctcagagaaaggcacttgtccccagcaaaacgcttggagaggaccgtgcacgctgtgctgcccccgccccgagacgcgccgggccgccgggtcaccggttttccgaaagggacccggcagagacaaagtgccttcgccgctgcgataggttggttttactttgcaataaacagcccctaatgggaccgggcgccgggcggagagctcggcccggggcgcggcctttgccgcctggctctgcgggccgccccgccgggcgccaggttttggggggtggcccggccccgcgtccgccactgcaggccgctctcctccttcccgcgcacacagcggagaaaaaaggacgcaaacagcattttacacttttcccactttagcgggaatcggaggagccgggcgagaaagcccgaaaagggaggcggttatttacgaccggcgggttggagtctggcaccagatggtgggggtctgtcaggcccggccgccccgcccagcgccccgcaaacagcgcccggttggcagcgtcgcctgagcagcccccatcttcgcttccagcccctcccgtatattttctcccgtccaagtcgatcaaagacggactttaaaaattactcgcaattagacccaaaaaagtcattc

SEQ ID NO: 23183 - DNA, 572 bp, Homo sapiens
  chr2:127782995-127783567
  hyper
cgaactccacgacatgggaggcaggggcgggccttttgcaggggaaggactcccccagcaggacgtttactgaatctggagggagtcgccctgcagatatcccgcggaagccggaggagacccaggtgcgccccaccggctagctgcgcctgcgggtgcccaaattggtgtccgggccatcctcaccgcagtgactcctccgcagcgccaacgcactccattttccttccaccctgccggtggggggcgtttgcttgttctcactctgcagccgcagccagtggcgccgctaccaaggtccccgcctcgccatccgggtcctgcctgagcatccttattggtgctcagggctaggcgtgcattgctgctaggggcgcggaaaggtttatcgtgggtggatgctgcccggggcttgagtggtttttagaggtcttgagtggctcactctccaatcagcgctttctagagacagcgtggtcagcgtacttgcttactttcaggattgcgagacgtctttaacccttgctgatcggctgacgctgcagcttcctgtggcttcctgctcatttccc

SEQ ID NO: 23184 - DNA, 776 bp, Homo sapiens
  chr2:131484816-131485592
  hyper
cgagtttccctctcccagggaatctgcattctaagaccccaaaggccggcgagggtcgttgtgctgggctggacagcagagagaggctcggccttggccctcagccctgcagcacacagggcacccgcgcagagagcgtggcctgcgaatggctctgctgcctctcccggcctggggccgattagaccggtcagagcatctgtaaagtacaaggggcccctagggagtgcaggccagggcagctggggcagggaggcggggtccgccccatggcatcgcggtttctctggaaggggtgatgggctttctcagaaccacctttagtttctgtaccgtaatcggccaaaaaggcgcaggcgctgctgctcctggcagctgcgtaacaggctctcagaggaggacgcggttccgggctgcggcgggcgtggtccggggctgttctgggcgtggtctttggctgtgatgggcgtggccttgggctatggagggcgtggtcccagggctgcgatgatggtggtccggggctgtggtgggcgtggccccgggctgcggcgggcgtggtccccgggctgcggcggacgtggtcaggggcggttctgggcgtggtccctgggctgcggtggacgtggtctcgggctgtgacgagcatggtccctgggcagcagtggacgtggtctcacacccagagtctgaaatttctgcctcttcctggccctaaaaatatcctgcctgttcccacgcggctcctgccttctggagcagtctgccaggccggc

SEQ ID NO: 23185 - DNA, 75 bp, Homo sapiens
  chr2:137181225-137181300
  hyper
cgcagccaagggcgtgcgcagcccgcggccggaagcgtcccggcagatcgcagacggggtgttgagggaccccgc

SEQ ID NO: 23186 - DNA, 669 bp, Homo sapiens
  chr2:149645382-149646051
  hyper
cgccctccccacgctagtagtacgcttcggttactttgcacttctccgtagctgctttacatgtttgcgttttgaatgttgttgaggaaagatgcgaaaaagaatgtgtgctggaggctggaccctccccgcccctatcactaccccttacccccgcagcaagggctgcgaccccgcgggtccccgctgagcaccgcagcaattaagtacgtgcaagccatttgcggcagcgggtttgagatgcgttcgtagtgggtgacattgagaacccccagaggcgacacgggcgcctggtctctgagaggtggcatgctgcctgccgccctggtgcctggctgccccggaaggggcccccagtcgccggccccgggaaggtgctccaggctcgcggctcctcgggggtcgcctctgcaggcggcctgtttccaatttccaggcgaggagcgacgccgtgatgcaaatctgccacttaccttctgtcaccattctgtcgctaacgctaggaatgatgaaacctcctgttctggaaatgcatttccctttagcaccagcgccttctaatgaggtccctctgccccgcaggacaaaagcgcccattagggggccctgtggtgggaggcggccactccgcttggcgccgtgagggaaaccaaggaaaccgtctttgtc

SEQ ID NO: 23187 - DNA, 967 bp, Homo sapiens
  chr2:154334805-154335772
  hyper
cgaggaagttgatcatgccctcggacttgatgagcagattgcagccgaggaagaagatgccgaagaccacggtgagtgagagcacgcacatgaccgcgatctgcaccacgcgcattatgtacaggctacgctcgtccgggcctccctccgcgaagccgtcgtcggtcaccacggacgcctgggtgcagcagcgcacggctcgctccagcgcctcgctgctgttggccaggaacaggcccgccacgtccgtctggttgcctagggccggattcatcgcaggaacgggcgggcgccgcgagcggcgcgggtccgaggggtgggaaggcggcggcgctggaggaacaggtgccgggctgagcgctcactcgcagactagcgcgtgcgagggctcctcgctctgctttcgaaagtccctgggccgtgggagtttcccaggagcctctccgacgcgcgcagcagctaggctcttctaaagccgtccgctccagccctggtggtgctcgttcccggcgctcgctcgagggggggctgttggaacttggcggggctggaccagcccggccgtgggaggtgcgggccgcggcggctgcagcggcggggtggctgcgctgagcaaacagcggccccttccggccgcaccgccgcgctgcgcgctgctcttgggaggtggaggaagcaaaggggcgaacctggtcttgctttttattgcttgcttcttttgcaaactccaaaggccaggcagaggtcactgtactcttctagcttgatggatgattaaagagtttgtcgggggagggtgcggtcagctgaaagtttcagaggaactgggacacacgagctctgcgtgtcctttgcctgctgcccccctgacctctgggcgaatggaaagtggcgatgaatcgcaggtgccagatggtgccggctgaggcacccgcccactgcctgtgcttgactccgactcgcctgc

SEQ ID NO: 23188 - DNA, 205 bp, Homo sapiens; identical to SEQ ID NO: 6095
  chr2:165873413-165873618
  hyper

SEQ ID NO: 23189 - DNA, 820 bp, Homo sapiens
  chr2:173099596-173100416
  hyper
cgggggacactggggggagcagcggcgggcatctggaggcatcgggggacagcgggggacattgaggggcagtgagggcggccgagttgtcggcggtgggcggcgccgggggagccgcgctcggggacagctggcggctcaacggcagcatcggcagcatcgagaaaggtgacgagttctgcaaataacagctgcggagcaatcgttatgtttggacaacgtgggaagggccattgttcacaaattgttctcttcaacaacacctgcatgcacagataataatccattgtcggtctccggcttcaaagacaaaaggcagccgcggagggaggagtcagcagagcctggagataacaggaccactttgcaaccggggagagtgcaaacgaggactccaagtcgcgtcccgggtctgccgcgacggtcgctcaccgcaggggtctccttcctcttctggcagcgagtgcgacctcttttatcctagcaggccaccaccttcgcggcaacaaacatcatttcctatgcagttgcaaagcatgctcccttgcaatcagcgatcaatactggcaaagtggctccaggataggaaaggtcgcacgtgtgttggtaaatggaaaggtttatgaggcgcaggtggtcgtgctccgcggagattgtggtattagcatgtcaaagacaaaacggaaccaaggtatacaggcacagagtctcttcctggggctccgggaaagcttggcacgaccctcttgagccttcagtttaaaatgaaacgctggcgccagatgtggccaccacattgctgataagtccagtaccttcc

SEQ ID NO: 23190 - DNA, 381 bp, Homo sapiens
  chr2:176975945-176976326
  hyper
cggttaaaatgtcagtgccctaatagtgtgatcgttccatgagcttaaaactgttttttttctttctgtttccatctattttttaaaactgcatctaaacgtagcaagcttgtgtgcccaccacccaaggcaagccgaacccgagataccattttccgtttgcaggggcctggagatccacacgagggcgcgctcacgttccagaagccgcgtttgaccaagaggccgcggtaccttgtctgtccaacactggattctaataggcgacctcaaccccttagaaacaggcggcagctaaggtgtttgctagtttatttgttctaagcagccatgaggtgtgagaagttgtatagagacagaaaacggagcaactagattcac

SEQ ID NO: 23191 - DNA, 301 bp, Homo sapiens
  chr2:18011874-18012175
  hyper
cgttcagtcactggctgcagatcccgcaaccctcgggtgttcaagtgcgcggggtggtgcgggcgctcccgcagtccgcgcttggctcgtgggaggcctcgggcgccccctccaggattccgtgctaactgcaaacgatcgcgctcgcagggaggcccccagtgcttggaaaactccaggaatcccttcagagcactttatttccaggccagcacgcggcgctctgcagacctagtactgggctgtggataaggaagagcagagcggatgggttacgccgaggatgcccaggctgagcctc

SEQ ID NO: 23192 - DNA, 376 bp, Homo sapiens
  chr2:182818959-182819335
  hyper
cgcgccccactacccgctaaccgcctcccgccacacacacacacacacacacacacacacacaccccgcgcgcgcgcacacacacacaccccaccccaccaccccgacctccacatacattcccccgaccccctccagcagtgaagtctaagagcaccgcgaagtaatttaaattttcgagggaaagcacagcgccatctgtcggacatcatgccaattactcttgttaagttcctacctgacggttactttatactttgaactgctaggtactccttttggcctaaggacacagtgaaaaatgtaccgagaccttggagagccacgaaccaagaaacttcagaaacctctgatatctgatcaagagttaagagac

SEQ ID NO: 23193 - DNA, 182 bp, Homo sapiens
  chr2:188418970-188419152
  hyper
cggagttgaggttattttgtttttccttccaggtattgaagacaggatttatcttctctacttcttcttttagaagcagatcaagaaactggcgattgaagagtaactgaaagaaacgcaatctgatcttactagcagtgaaagagcgaggtaagaatttgactattatccagcctaaagtc

SEQ ID NO: 23194 - DNA, 862 bp, Homo sapiens
  chr2:19550023-19550885
  hyper
cgcccctccagggctggccagcagggggcagcgtggctctgagcgtggaggccagggctggtccgcgccggcagggccagcctccagtgcccagttgggttcccgggcctcgaagttctagcccgcacaggactcaggagcgttcccggaggaggtggggatggggtggtgaaagcccagagcgttttaacttctgcatcccctgccgctttctcagccagcagggcccggcttgaggctgggatttttggtgcctgcagcagggaagcttatagtccagttgtcatccgcggccgccgcgctccgggcgctgaagctggagaggccatcctgcgcttgggaaaggccgcgggcgccaccgcctgcgcggtcccgcggtcagggcgctggagctggggggagccccgccttgccccaaggagaagagccccggcggcctggcttctaactgtgggaaaactagacaccccagggaaggttcagcttatggaaggcggactcgaatttttcctcctaagcgtcccgggcctcccagggcgcccgcccccaccattcctgacaaggctttaaaattgtagggaatcttcgcgggtgcagagcctcgatcctaggaggggacaagtcccaagcagagaattgtgtctgagggaccctaagggagggagtgatgttggtttggggttccggggaggcagcggtcattgtgtatttgcacccgagtgttgagacccggggaacgggaaatattacagctctgaggctctgtgagggcgggtccttcccaccccaaagccagaggccaggagggaggccttcggttagggtggggaaagacattctcttctcttcttgcaccctaagc

SEQ ID NO: 23195 - DNA, 282 bp, Homo sapiens
  chr2:200524001-200524283
  hyper
cgcggcgccccggccgccgcagagccgagccgagccaggcgagcccccgcggcgcccaagcgcgggccccccagccgccgccgggcgcggcatttttattcaagcgagataacggagcccggccgcgcccggtgcattgtgggaacggcccgcggcccgttttcgggaggaggcggagggcgcgaagcgagctggtggatccgtaaagaacccagccaacccccagagggaggggaggggctgagctgtgaggagagcggggcacaagaaccatgtgtacgc

SEQ ID NO: 23196 - DNA, 785 bp, Homo sapiens
  chr2:234474820-234475605
  hyper
cggagggcggggaagactgccactaaaattatcaagcctaaaggccttccagtatgtatccactaatcccatcgttagccctgggggcctaggtgacttccccaaggtttcacatcgagtgtggcggagggtcacttggagatgagaaacgtaaagcgcctagcataggtaccaaatgacaggaagcgctgaaatgcaattatttttcttttcctcagaagaaaactaaaaaaacacaactcgagagtctagcctcgagctcgttgtctgcattcctgaattcccaactcctacggccggccgaggccctccaagccaccacaggcccaggggcgcaaaaaggcagaggtccccgtggcccgaaaccactgccccgactccaggagagcgccgcgtcctcaggcaggcctgggcagcctctcgcctcgccctcctcagactgggccaccaacactgtccctacgcttcccacgtccctcccaggatccccgggcgccagccgcacttactgcctaaagcccagacccccgccctggccaaaacgcgaagcgaacgaacccgccccaactgggcgccgccatgttggcgagggcgggtctccagaaagtgatttatggatcgtggactatgcttcccaggatgccccgctggagcgccggcccctcgcacggggccttatgggaaatgtaactcttctgctccaagagtttgggaactggagcgggagcgggagcgggcaaggtgagctcgcttacaagtccgctggtgagttcgcgggtccactc

SEQ ID NO: 23197 - DNA, 670 bp, Homo sapiens
  chr2:40678194-40678864
  hyper
cgcctgggcggatttggtttctttggccggctgtccagctataagaccgccctcttcttcattaaggaggagccaaaaaggatatcttcacatctcagaacacagaccatttcccccaagagccagcaaagctccagaggcagagaatgcagctgcaaagttcccttccaatctcttggggaaagatgcctgtgtgtgcagaatccccaaagcacaccacggcacagtgcccagagacgtggaccccgcagcccactccctgctaccccctacatttcttcctcgtctgtctctgccccgccacacctccctcctctccgcagtccgtggtgaatgagcacccaacgcccgctggaaaacagggggctcggaaatgtggccttggggaaagaccccagggattaccggaaggagggatgtccgcggagaagagtccagtgggtggggacgcctggatccccagcagctctgcattcggggtggacttagctcttcgcgccctgaatcctcagagcccagcgcggtgcagggtgcagcatctctccttagcagccctttcttcctccggcagcctgcactggcaggcaggcaggcaccctcacgcccagacgcaccagcccgagcaatttcactctgggaagcgcggacacccagaaaaatgtgcaggcgc

SEQ ID NO: 23198 - DNA, 462 bp, Homo sapiens; identical to SEQ ID NO: 6110
  chr2:47499350-47499812
  hyper

SEQ ID NO: 23199 - DNA, 605 bp, Homo sapiens
  chr2:60796723-60797328
  hyper
cggtctacgacgattttttccttttctttccctttcaaaaaattttccgacaaaatcaggcagtatttgctgccctgcctcggattatctgagacaagaggcgcccaggatgagctcatgtaatccccaggatgggaacctcaagccccttatgataaagaaaaaagaaaaagaccaggatactcattccttaccccagcccccactccaccctcgaggagttcccttagcaaacttaaaagactatcagaagcaacttgtgccatgcagtgccatggagagcgctggatggctagccagaagaaaagggaaggttgtagtggaaatctacgtgggtttgcaggttcctgcttttcttgtgtagagcctccggtgccctccacctaaccctgccccaatgcctcgggtcttttttgaactaatgctgtgcgtctccgcaatctgcaattactttggatatttctcaggagctaaacgcagcctgaatttcgtggcgcgtgcaaaaaaaaaaaaaaaggcgaaattaacaaaaccccaccaccgcgctgttgtttttttctggagtttttttttttttttttttttagttcggttcagaagcaaac

SEQ ID NO: 23200 - DNA, 826 bp, Homo sapiens
  chr2:63274633-63275459
  hyper
cgctcccgaagccgctcccaatcggccaactgacaacccttccctcgccccagatttgctaggatggtctgggaccgccgggcggcccctctacctgccccttcagctttagtcccgagcctctcggggtttcaatttgggctgctcggtggcgcccgaacgcccctcagcggcggtggagcgtggactccggcgcctggcggggtaaggcccgcggcaagggcgctgcatccggacatcgctgcgtggtgcccagacgctggctcccgagaacgggcacgagcccagcacgccggaggacccggaactcgaaagcccgcgctgcgggaaaagagactatcggtccgagggtcgcagaggagcaggggcgttggcagcgggcttgcttgggcacagtctgcgggccggagcagaacttccgcccctggtcagatccctcggcctcagatccaaagccctccccttgtcccaagtgtcctccagagcctggccgggcctggaggtcacctggatgctggatccttgtctccacacccagctccctcgccccttcccggctcgagggccttgagctggacggcttcacctcctccagtggtgtccccacttccccttcccgcaccgcggccgatgctggaacggtcatggcttctggcccagcatctcccacctggacatttgcctagcgacggccgcctcaatcctctgcgctgctttcaagaaactttcatcccagtctctctccctctccactctcctccctctccccctctcctctttcttttcttaatcctggggttttatgggctgagcgttaagaaaattc

SEQ ID NO: 23201 - DNA, 260 bp, Homo sapiens
  chr2:75146970-75147230
  hyper
cgctccaggcctcgataaatgtttaatgaataaaacgatgaaaggacccgtcgcctcctaaatgcagatctcgagggagcctccaggtggcgctcgccgctcggagaagcagggagtcggtgcgccgcagctccggcaggcgtctgggaggtggtcgcctcctcacctgcccaggcggccgtcccccgggagcgggtggcggtgacctcaggactgacgcactgcctcctccgggcgggtgcgcagcctgcgtcaggggc

SEQ ID NO: 23202 - DNA, 848 bp, Homo sapiens
  chr20:10198135-10198983
  hyper
cgaggcacgacttctaatcgcatccttcccggaaaagtacaaacagttcctcagacgaggtcccccacctcccacgcgctccccagccctccctccctgcggagagccccgcgacagcctccccaacacctgtgaatcatccgggaggctgccaccgccgagcgatccgcgcaccacccccttcccgggcccgggcacggccagggaggacagttagggttgttgctttataattatcacttttaatctctaatacgaccagcacaagtagcctttgtctccccgccctgatttgagcatccgagggccccccgaggcagcctgcacgggtaccccggggtttgcgcactgagtgaacccccagattcggccgtgtcccagccgtccttgctctgaatcccccacctcctcccggccgtttggacggttccctcggggcgtctgtgcctccgtggggtacccctaagacacccagcatgaaaccccagcaccgactgcaaattccaccgaaagcagagtcatccgtttttgccctcggcaaacaactcaacttcaagcctcgagtccttgcaaacccacgctggctgggctaactccgcttcccttctccttcccccgactcctgcaacagctcagagagcctggctctgacgtagttcaaaataacgtgcgccagcctcgctgcccggctgaccacagcaacgagagccacaagccctcgacgctgcttcgataacatgaagcaatcactcataaaaatagcaacccacgtagcctggccatatatggagctggcgagggtggacggggatgcccctacggaccctcttcggagaaaacaaatcgcc

SEQ ID NO: 23203 - DNA, 859 bp, Homo sapiens
  chr20:21080357-21081216
  hyper
cgttgtcgtctgctgatgtttaaaagataagaagacatttgtcagggcgggtgcttgaggctctcagaggactccgggagacactgccaaaacgtttccaaactgaatagtcattgggctgccagataattcagaaactatctgtatgagctgtttatcaaattattaaccgcacagatgttgtttggctgaagagcagctgaatcccctctctggcagccgcggagacaaaggtctccaggaataattggagatgtgcatggaatattaaattaatttactgctcttaattcttatgcaaattctgacctccgatggcgcctatcaattaccccgcccgcagtgaaagcgaaagcgacagtttcttctcttcgcttttttttcttttttaagaactcgaaaaaggaaatatttgcaataagcaggcggtagtagcacttcgtagctggaattatttaattgaatcttcaagtttttagggatgcccgtagaggataaaaccccagtgctcagcggagagggtgggaggggtacagggggcggaggaatctgttggtttgactgtacacctgcgggcggcggcaaaatacagccacgagccgggaccagtaatgtcaaataaaacattggcttgtagacggacgcgggccttgggaatcgcgcgagcccagcgttagcccggggtttcaccgaagccggcgattcgaagggagtggcgtttccgcaaactgcatcgctaggggcccggcgtggaagcgcctctgcgcaactttcctccaccgctgcctacaagggaggctctggcttccgtttacttattttttaggagttttaacctttggttcctgcttttacaacc

SEQ ID NO: 23204 - DNA, 952 bp, Homo sapiens
  chr20:21081736-21082688
  hyper
cgagcaaaactccgcggttcaacagctaaagagcaatttgatggggctgggatggggaaattacttgattagcgtccatcggaggagaacacggttacagcccctcggccgggaatccgacaggggaacaaaacgcgctggtaaacgcggcgacgtacagggagcgcgagcgagggagggagcgccggcgagggagggagcgcgggggccgacatcgagaggcaatcggggtgggggcagaaataggggctgacccgctagcccccgccaaaccgcgaccaccctcacctagggctcccgggcggactcaagacttcacccagcgctggaggtcgaccttaatttagagcgctgccccggctctggcccggaaagagagtgacagaggcgcgtgcgggggaaaggcccacccacgctgtccctggagtcccctccagtgtccccagggacgcagtccgcggccgccagctccaggggctcgggccccaggttggagtagccacgctagcggctaggccgttccaccgggtagctccgcccttccttttgctcaggcagctaactttggagccgggcaagacgtgttttcccgctccttcgaatttaaccgcccagtgcctgcctcctggaaaagctgtcacgattgggcttgggcttgggcttggccttggtcaagaaaggtttcctcggctgcgccaccgtggggatggaggtgggagttggaacacagccccctagctgagtgcaggggccagaggctggcgggggcacgcgggggtggttgggggcggagtgcggcgaggggtgagggcgcgaccgccttggggcaggggcggcgatggagtagctccgggctctccacggactcgattggacagccccaggccggctttggatccttggaggcggatacgcaaggccagacctggtggcgtggccagttgggcatcgc

SEQ ID NO: 23205 - DNA, 1362 bp, Homo sapiens
  chr20:21485932-21487294
  hyper
cgcggagacatctcgagtcccgcaggtgtctgagctgcgctgcgcgccccagccgggaagccttttcttatccaaccgcgccgccccgcggaaagcctgggtactgcagacgccctcaccggcccaccgacagctggttttgaagcgggggcttagaaaagtaaaggggacagtgtttggagccacgatgcctttgatgtgaggcggttccacccaacaatcaacgaatcaagctggaactgcaggccctacttttgttggggggaggaccttaaggaatgtcacccccttgtcccctaccctctgccccacgcccagcctctcagaaggcaccaggcgtgagtagagtgcgaggcgtccacaccctcgtgtcccttccattcccggacacctttgcaccctagccgaggcctcagcacggagtgagggttgcctggggtgccctgctgtgtgtggggcgttcttgcctcccgggccctgaccccacggtctgggtcggcgaggcgtctctccctggcgtctggactgtgcgcctgccccgcttccaggcgacgaacggcaggagccgggggtccggcgggacccggatccagggcgggcggaaggcgagggtctctccttcccggaacccccgccccggaaacctgcaaccaaaccgggtccctcctccgcatcgctcccgcgctcccgggccgcctccccacgcgggcacccactctccgggccctcgcagcaccgccctctccgcgtccacccgcgcggccgacgccgccaggggccctgagatcgcggagacagcgcgccctggcgcctggtggggccctcccagtggccagagcgctcctggaccagtcggctgtggtctgtgcccaaacacgatggaaaccggggctgggacgggcggtggtacgcacgtggaggagaagaggcatggcgggaaaaccacagccgaacacaggtcgactcgcacctcccaggcacccgccgccgtctgactcgcggctctccccaaggttccgactcgccgccacctcttggcaccactcaccgggctccgacccgggccgcgagtccgctgatgcgcagctgcctccggcggctcccgggctctgcccggacccgcgcgcagagacgctcgggaacgctgggctcgggcgcctcctggcggcggcagcacgcggcacacgctcggttctccggcccgagggggcgcgtggagcgtacgcgggatccgcgcgcgggcctgggctgctggcccacatttccccgcttgctcggatggcggcgctgaggcctattcgcctctttattaataacgatgcctcgggagggaaaaaatagagcctttaaaaatcagagtgc

SEQ ID NO: 23206 - DNA, 972 bp, Homo sapiens
  chr20:22557951-22558923
  hyper
cgaagtctggtgactgcggcgcagatgggaaaagctttccggtcgggggtggtgggcaatttccatgtgccagttccctgtcgcatcagaccaaagacccaaagtaacccagccaggcacgggcctctcacagtgcctgctacccaggcgtttaaagaaaagaccccagagagaatgtggatctggcgtgggggcagggattgggggggggcgctggtagacacctggggaaatacaactttatgaggtttcaaggggcagcagcagaactactatttttccgaggtccacgcctttccgcaggcggcggaaagacgcggctggttctgttgggtcctacaaactcgcgtcctccggaattcccgagggcaagcccggcacgcgcgagcgtgctcctgcccgtggaaggggggaaatcggcgactgggttgcagggagaatgcgatgataaatggccctgcgtctgctttctgactttctctcctggacccagctcgtaaccccagaggctccccaacctgcctgccgccaagcacggctgtgcgcaaaaggccaccagccgcttcctgcagccagagctaaggttcactcgcctcttagaaaggcgcggcccctcccctgctgctgcttgatgacgatccccatcgtctcctcggcctgcctgtgtccgagaaagagttgagactggactcgaacccctgcgcgccaaggggagggcgtcaccatgctccggcctcagcctcttcaaactcccatgcaccacgcacatcattttctgctgacccccacactagattctggggccaagggggttccccacaccccaccctccactgttctctggaaacatgctgctctcagatcgaatccccagacccgagccgctcgaggggcctgtgtggcttcctcggggccctaccaaactcctctaactgagctcagagcctaagcggtctgagtttgcaactctac

SEQ ID NO: 23207 - DNA, 488 bp, Homo sapiens
  chr20:22567354-22567842
  hyper
cgcaggagaagggggcgctacacttccaaggagcggactttggaagcccccacctccaccacagcactattggtggccggggtcagggacaccagagagcgctcggcgggggcttccacagtgacagggcgccccctgtcggccgccaggcccgcgggaccgacccgagtcctcatttacccccgcgatcccaaccccgcagctccggcaccggagcaccttctcccccgctctcccagtctctccgaaaacgccttcggggggactcggcctttttggagccccaacccctaggttctgcgcgaacccaaaacggcctcctgcaccctggcgaggttctgggagctccggtagggtagggctggatgacgcctcctagagtctcggagcagccgctcccgcaccctcccggcacgcctgcccatgggaatgcgagcggggtctacggttagctttaggtagctgggagcgggacaccaacgggctgc

SEQ ID NO: 23208 - DNA, 751 bp, Homo sapiens
  chr20:24451420-24452171
  hyper
cgttgcacgcagaggcttgggcgcttggcacccagacttcaggtgcgcacagtcctcctgcgacgtcagatgcgctggcgccgcggcgctcctggctcggaccgatgcctgcgccttccctggccacgtcctggtgtttagtgcagcagacaccggccgaaggcttggctgattgggggtgtcgaggggaggggggctgggcgttacacagtggctccgttttctggttggaatcagttggtgaggcgtgcgcgcgcgagtccgtgtatctgtccgtctccctcctacagcccagcgtgtttggtctgagtccaaagaaggaggtggtgtgtgtgctgcgtagacctgcgcctgtggggtgagcagcctcatagcccccagagccggccaacttctccgtgctaggctgcgacctcaagggctgccgcgtcggggatcggaagtggtcttcaaagaggggtctaggtcgcgaaatcctggcagcagccgaagtgaaaaggagctgctaggaggcgggcggggggcagtctgatgtccgttctggcgcggacaggaagaaactgaagtcgaatttttagttgaattgcgtgctctgtgtttggcggtggtgtggcccgttcttttggaggtccacaccacaggtatgaggcctgtgggccctgaggaagcgcgatccccttaattcctccctcccctctctctccaccgcccgcccctttgcaaggagcaagcctgacagtagctgatcggc

SEQ ID NO: 23209 - DNA, 897 bp, Homo sapiens
  chr20:2731109-2732006
  hyper
cgagcagtgaacacacgtggagaggcagtgtagaaccccccagcctggctctatttggccgctggccgagtcttctccatttccatcctcccgccccgccccagctgagccacccacttctcctctccaccccaccgcagtccccaccatcgcgcagccccccgcaccgatgctcatcgagcccttcgagggacactcggtagtgaccctacttagcctccccggagctccagtctaacgcggaaaggctgagcagagaaccgcatggggtgggtggggtcacgcggtcaaggggctgacaatcaaggaaaacctttggtagggagtgcctgctgagcccggctcaaccgaaacccgagggctgagtggggaggttgacctggggaaggaagggtggttgcagaaggaatgataaggaccgatccccagaagtgagtgctttctctttgccgggaaactaaaggaaatccactaagtcaggatcagaggtgaaggtagggctctgagactggtggattaggtcggggccaggctatctgaaaagggcggtgcggggatcaggaaaaggggaaggaggaggagaagggcgtggggagctgggtcagacgcgcatacacacacacaccccttgcacaacgccagggtaagcagtgaacacaacacacgtggagatgcaatgtagaatctggccgctggccggatcttctctacttccatcctcccgccccagcccaagccacccacttctccagttgcttccctggggtgcatgcaaacctctagccttcagatgctgcagagagtccacttgagccgtgataaatggagattgttaagttttttcttttttataataaactcctgatttgaccagatgaaaagagaaaactctccatc

SEQ ID NO: 23210 - DNA, 313 bp, Homo sapiens
  chr20:291046-291359
  hyper
cgccggcccccaaatccaggccgccctgccccctccggaaaggggagttgggggcgagcgccgaaatctgagtggctctttcaagcctccgttgccatagaaaccggccgcacaggccgatgctgtccattacaccatcctctagcctcgcagccaatggactccgagctccatcgccagaggccccgccccccagctctggggagtccaccaatcagcaggtcccgtgacttagagccctgccctcggcccagggacaccaccaatgcgcttcgaccctgccctccttctcttcggtgtaacaagaagactc

SEQ ID NO: 23211 - DNA, 751 bp, Homo sapiens
  chr20:9496745-9497496
  hyper
cgcgcatatgcactcaaaatgctctttgtaaaggtaactccgagcccagcgggcagaggggccgcaggctccgcgtgggtgtgggaagtggcggcccctaggtttaagaacccagacgctgcggggacgattgaagcgcacctccccggctcaacaggaaagccacaacatgtccaagggacctgaggcgacttggaggctgagcaaagtgcagtttgtctacgactcctcggagaaaacccacttcaaagacgcagtcagtggtgagtggaggctggcatggctggggagggagcctgggaactcgcagaacaggcttggagagagaattcctcaaggttttggaaaccgtcccacgctttgaggtcccaggccaagtcttccctcggcttgctctttagggcggaagaggcgggagcgcccatgagtcttctgggtctcaggccttgtagatccgccaggaaccgcaggcgtggggacccaaacgtcacccgtggcctgatcctagataagaagtcccttgaaggcctgtcgttccctggtgcttcaaaacgacctcttatgatttggcctttgaaggaccacggagaagggcaaagctgcattttaattttcttccgcatcctggttttgtttcttatgcgctaaaactgcaagggggcagtgcgactttccttttcagtcaggatgtgatggccttcagtgtctttttgcgcatggcagcatggctcgcacgggatattcagtcatc

SEQ ID NO: 23212 - DNA, 758 bp, Homo sapiens
  chr20:9819102-9819860
  hyper
cggggttctcctccacgccctcccgcccagcaaaatggaaccatcctttatttggttggtagagagcccaggctggatagtagcgcatgggttgagggtgggcggtcccctatccctaccctccaggcagcaggtccctagcctttgcatctcctaggagatgcaggatcgcgctgtcacagtggtcctcttcgcatcctctcccggcaaagagagatgctccggttaccagcggcgcgcatccccgcaggcgcctctcctctcgccgatacccacccaggcagtcccgacaggcgcgcctgcctacctggtggccggctgtcagcgaagcggcggtgcctcagccccttctcagctgctacagcgctcccagcgccatgttcccggtctccccgggcgcacgctggggaactactactggctgggtaggggcaaggggggcgggggccagcgggagggggtgagaggcagagccacagctttctactctccacccaaacctcccccagctactgagcatgcccagctgcccggcttcgcccctcggaggactgtccatgagcgtacgcagctgctccgggttttcgtggcagccggcgggaggcaggctgtagcggcggccgggggtggaggtgagggggagggtcggggggcgtgtctacactcagggtgcaggagccaggagccgggagctggagcaggcgaccaatccaatcacgtttactcccagtcgtccccggcgggggcagctcctgcac

SEQ ID NO: 23213 - DNA, 467 bp, Homo sapiens
  chr22:21399942-21400409
  hyper
cgatgctggaaccgcctaggggaggcagggggataaacgcagcaaggcgcccaatccggtgcatggtctgtggcgcatgcagtgtatcagcccgggcgaggagcctcagcacaagccggccacagtttctacggcaaccgacaacaccgggttgccggggcgaccgccgcgggagagcgcgtcgctattggctgtggggggtgcctgttgctggacggcacattcggttggtcagcgcagccgcagactccgcccacaatcccgggccgcgctctgggcgcggggtcaagctgtctccgactcagtgtctgagactgcgagagggtcgtaaccatgaggggttcctgtgagaggtctggggaggatgaagagcagaaagaagaggctatggtggcctgtgggcgtctttcaggggtccccgaggccgagcagggtcccgaggccaattgggactccgacctggagac

SEQ ID NO: 23214 - DNA, 1336 bp, Homo sapiens
  chr22:28838056-28839392
  hyper
cgttatttctgggaccaatagcaatttattttgatagaaccgctggatttttttttttcttgagttctcaacaaaggagccatattaggaaataatctcgcaaaaagcaaagtgccccctcccccttttccccatgatcgattcacacacgctggtgcacgctgacacgcacagacacacgcccgtgcacaatggccagcgcaggcaatcgcacgggcccacgaggcctcaggagccccgcaggctgaaggcccggctatggccagccccaggcgctcaggcaggaggcctctcggcccgccgccccggaaccagctgctgggctggtgtgctggggctgctcgccccccagcggggccctggggaaacggctgccagcggctcagagccttttaaccccttggggaaataggtgttataacaccacctgcggggcctgtgtcaggggtgcagcctcaaatccactcccgccccacgccccgccatggggcaacacctagtaggtcttggctggctcctgcaaagctaatcgtgtcgctgtctgcacaggacttctaaagcaaacgggtgcttccgagctgtcacccctggggctccaggcatatcatgaaggaaaaacttaaagggcagtggatgcagaccagatttggtaactcgtccctaagggactgatgcaagtcccaaaggaaccagggctgtttggaccagctggcccagcaaactacggaaggggtggagagacctgaaggtaaccgccccgtgttacccttccccgggttgggctttggggccccattcccctctccaggacacttaccttcttccggggctgccatttcatcatatttgtaaagccgatacgtggaacatcaagatgttggctgggggctgggggcagatgcagggcagcgacgactgcaagtcatgctgcctccctcccaccccctaattctttcccatattcactgcgaagggaaaagccccaggagagtccagtcttttcgccttcagttcaatgaaaagtatccccaaaccacgaacacacttcccaccaggctaggaagtcccagcagccaccggcgtactcctgccagagcggggcattttcccggccggcgcctgcaaaaggagcctgtagcagggggtctccaagctggctgcagagaccctccctcagagaagagactgagaacgcgggctgctacagaatcccagccgggcttctaccatccaaaccccttttggcgaattctcctcttctcaaaaaagattagacaagcaatcaaaccctcacgcgcagcctggagcaattcccacaattctgggtgtatttctc

SEQ ID NO: 23215 - DNA, 212 bp, Homo sapiens
  chr22:29550509-29550721
  hyper
cgcccgcccagctcccgctgcggcagagcccccagccgccgcctcctgccgccctcgcctttcctgcaggagccgtcccagcgcaggcttgctcaccagcgccgccccgtggtaagactgcagatctgcggaagaaggccagccctgaaccgcaactgctctcaagcccttccattacagttacacggattttttgcccagcgcggtgatgc

SEQ ID NO: 23216 - DNA, 104 bp, Homo sapiens; identical to SEQ ID NO: 6135
  chr22:37252563-37252667
  hyper

SEQ ID NO: 23217 - DNA, 450 bp, Homo sapiens
  chr22:42353588-42354038
  hyper
cgggctctgtgaagcctgaaggtctccctctgggtgggcgggacagggagcacctctgctggccctcaccacgctgtgtctccgcagccaaggccgccgcgatgccgcacttcctggactggttcgtgccggtctacttggtcatctcggtcctcattctggtgggcttcggcgcctgcatctactacttcgagccgggcctgcaggaggcgcacaagtggcgcatgcagcgccccctggtggaccgcgacctccgcaagacgctaatggtgcgcgacaacctggccttcggcggcccggaggtctgagccgacttgcaaaggggataggcgggcggcaccgggcgccctcccccagcccgccccgcccgcccagcccggagacccccaaggcagagggaggccggcctgttggccctccacgctatccctctgcagcctgggccctccc

SEQ ID NO: 23218 - DNA, 794 bp, Homo sapiens
  chr22:42679388-42680182
  hyper
cggaggggacgggggcgcggctggatctggaccggaggggacgggggcgggcactcggcccctgggactgtgacccggggccctgcccttcacgcccctgctgctgccgcgctccccgagcagccccctcgggcccctcctctcccggccaccctcctgggcactgctctgaacatcccccgcctccccgccctccatcgctctttatggcagtttcaaagctacagccgccactcgagcagctgcggcctttgatggggacaaggcagtaaaggccgcccgggaggcccctgcccagccctgccctggcccggcgcggcccctgcccgcccccggggagcctcgggccagggcagcgcggcgcggcggagcacccggcgggcacgcctcgcacgccagagcaaactttcacgaccgcgggagaggcaccgcgcacaccgttacctttgcagccgcatccttccctggcccttgccccagaccccttgccagcccggcgaccacgggggaggaaaacaactcctgagccgaggcgggggaggaggggaaagggaaaaaaggagaaggaaaaggaaaggggggcagtttctcggctctcagcctcctcgcggctcctcctgcccaagccggcaagtgaagtcacagggccggggcggtgacatcagctgagcctctgacatcacggcccctgccgatctcacctctgcagggtggagatggaggagcagcggggaggagggatggatggatggaggagggaggggagcacccgatcccccctcgccttcaactgc

SEQ ID NO: 23219 - DNA, 73 bp, Homo sapiens
  chr3:10547178-10547251
  hyper
cggtttcccggcgggcagccccgtaatcgcggtgcggcagctggtgccgcggctgagcccagccagcgtgccc

SEQ ID NO: 23220 - DNA, 364 bp, Homo sapiens
  chr3:115231437-115231801
  hyper
cgcagctcctctggaccgagccacacctctgcctgggaatcctgggctggggctgcagaagcccgctgcgcgcctcctggtttctatggagaccctgcttgatgtcaatggcggctccggagcgcagggaaacctaagcgtttgtatttaaatgagggaaagtgggggaaggggaagtaaaagaggaagggaacagaagagaggatggtagaggtgagcgggcgggtgttgaactctggggactagaaaaatccagctgcgttactcagtcatctcatgctcgcggagaaatcagaggaagcagcagcgggcagaggggtgtttatttcttgcgtgagaaatatccgacttctttctgacatcc

SEQ ID NO: 23221 - DNA, 610 bp, Homo sapiens
  chr3:116163681-116164291
  hyper
cgtgtagacgcgcgcagcagaaaagttgcccgaaagccctacctgaggatggctgtgtccccctgcctcacggtgatgttgtccgtgcctcggttaaaatccacgctgcgaacaggcagtcctgtgggaagaaggcagagcaatctcagtaggaccagtggcaactgtttccgatccggctgaactctcctgaccatggtggccacgccgaggtgcgggtccgcggggtgctctggaggggtgcgcgctgctcgcgaggagaggcttcaccaacacggggctttcatccacagcgagcgcagagcgggctttgccagtttatggtcctttccactttgcctctctctttccctcgctcagtctcttttccctctaagacttaacaaagccctcataaaacccaagcagaagggtgaaaagtaaaagcaacacaatttcaaaagagagagtgcaaatagcaagccctctggaagagctgaagaggaagccaaaggaaagggttcttgtttggtctctctgtgactggatgctcctctgccagtgtctgagctgagctccttcgctctgtaacccactttcccaggctggcgggcgggcgggcgagggagcc

SEQ ID NO: 23222 - DNA, 871 bp, Homo sapiens
  chr3:117715822-117716693
  hyper
cgatgttgcagcaagtctgtccgcacaatcccgcacgcctcaggacccagcctgggcgcagagctggcagggcagggagcgcaccgcaggacttgtaaataaaccctgttccatccagaaccggagcgcttcttactccaccgaccaccccggagcccggcggcagggaggagggggcgcaaggggtcagggaatcctccccctaccttgcaatgagaagagggacaggaaaaagcccagcacccagacgctgtgcagccagtaggtcctcatgtctccgctgcgctcgatgctccctcgcgcgctcctgctctcgcctcttccgctcgcgctctctctagtaaaacgcgccgctcctttccctcggtttccctctgggttctcctggttccggcaacccggacagacaagcctcttgccgcacgacggccggatcccagaacagccttgctctcctcttcgggagcgcaagccaggggccgggatggacgctcgtagcccgtgcctggtgtaaacacaccgagcccccttgtccctcgagctctcccgctttcctgcttcctatcctcctctccctcactcccctgcagcttcaactaaatgcgatgtacttaaacaagcagcgccttataggaccgcgaaccgagccgaaagggccccgctactgccatctagtgctcacagaacggcatcgccgcggctcttcttcgctgtgtgtctgtgccaagtctatccaacgccgccaaagtcccctctgctctcagcaaacacaggtgaagctcttgccttcttaaatccttgacttgaccttgctgtcccataagtcctgaatttctccttttcacgaggaagctcttggaacatgctagcc

SEQ ID NO: 23223 - DNA, 614 bp, Homo sapiens
  chr3:120003757-120004371
  hyper
cggttccaaacaaactgcccagattctggaaagggagagaaagcccctccccctttccactttcacttaataattaagtgtttgaagttttgtggatccttaaggtcgctgtgctcacctcatcagcgtcggaccgccgagaagcgccaagcccgctgctatgtgcaggacgcccacggtcccccggcgtctcgcgcgttcgcggggctggaaggggcgggaaggggcgggccggggcagagacaggggcccgcgcccatcgccgcgccgggagcctggcgtggaggcggcgggacggcggcgcaggcctctgaggtgtgcgcggggcgccgggcgcctctggccggggcactggctgagccacgcctgcccgcccctccctggcgccgcccgcgtggcgcgcctcgaccctgctctcccgcgagggccgggagggctccgggaccttgcagactccacgcgcctcacggctcctccagctcctcggatctttctccttgcgtcgccgccgagtcccctggggcggccccgcctccggccgtctcctcagagaccttccctggggggcgccttcccctcagcgccccttcccgggcctcgagccagcggctgcc

SEQ ID NO: 23224 - DNA, 553 bp, Homo sapiens
  chr3:128417071-128417624
  hyper
cgcccttccccgctcccgcctcggtgacaaacaggcttcccagggcccagaaggctgtacgcagacgccaccaccctggcccctgcactcctgcgtgagcgacttccattcgggacggctcagccgcccgctaccgcagccttcccgcctgggtctcccacaggcctcccggggcacctagaactgcgtgcctcacgcgggccccgctgggctcctcacccgctcagccactgccacctgcctgggaccctccccctgcggagcgggatgtttggcggggagaaatgcggaggggaaccctaggctggcggctttcctccttccgcagaacccacggtcctgatctccggccgcctccttctgacccggggttctggccccctcctcccccaggacctcagcgcggcaccccacccaccaccccccgcccccaacccaggccagctgtctctttttcctcaggggtcgggctcccagcctctgccctccacaaccacccgcctgcctcaccagggcccagcctggcccctgggagcggccacagcgccgagcc

SEQ ID NO: 23225 - DNA, 454 bp, Homo sapiens
  chr3:136751341-136751795
  hyper
cgtcctcttcccggatacttggagacagcagcgtcagtggcattgtttggcgtctctgaacgcggctttggcagagccctccggagccagctgtagttcccggagacgccactaggtgacaatgtaggtcttggttggtcaactgcaggctacggttgatttggttgggtcccagcggagccttagcgtcctctccggcaaaataacaaatgtccgtcgtgcagggcactttcttcgggaaggactcctgggagctcaggagtttgcatacgaagccgagggagcgaggggcttctgataatgatattcagcgtcgaacagagtcgctcatatgcagagccggagtctctcccagctttgatatatgagattattatggagagtaatgcaggccgagtgatgcttgctcggcaggctgtggatgtggattcctatgtggattgcgaggccgggc

SEQ ID NO: 23226 - DNA, 275 bp, Homo sapiens
  chr3:137486531-137486806
  hyper
cgggcgctgaataggagaggacgcctataaataatagatagataaataaatgagcgatcaggcgaaggtaaacaaaggcgggctgagggaggtgtagggggagtccgggctggctgcgccacgcttacttagcattacaaaacccttttacaaatcgagacaattaggaagtgacttgcctctggtggccgtccggtctgggggcctgggcgcttagggaaggcccctcctcccgccccctaggaagcccaggaggcctgggacggagacgccac

SEQ ID NO: 23227 - DNA, 905 bp, Homo sapiens
  chr3:137490259-137491164
  hyper
cggggaggcggcgaggggggaggggagggcttcagattttttattacaccctctagccttatctgccgctgtaaattatgaggatcctccattgagcggcatatggagattatatacttttttgaatatcgtttcccaaagcctgcagattttcactttgaaatgaaacaatcctccgctggttcccccggggacaggcgtctcctgcgttcccccgcgcggcctgggggacccttctcgcagagcaggcgcgcaccccaatgccgtggccggcgcccagtggagacttctttcacagggtctagaataatcttccgcggaacacccatccatatgcagtgtttgagaactaaggcagctcccttgctctgttttcctgcgcctagcccccggacttttgtgccgtttgcagctctttttcatttcgaatacccgcatagacgcgagcccacttctgccctcttcctacgctgggcggctccaaacccgccgcgagggctgaggtgttcacacctgcccacggcagcctgcctcgccctcaagcgcctcaaagcttcctaagcgcttacattggtcttgggacagccgactttggcttctttgtttgtttgagggaccgcggaagtggcggggaatgtgcccccgcttgagaccgcttattgtgagccctcaacggaaatcctgcacggaaggcaaccgcctccccgctcgcggtaagcaggatccacccgagtagcggggaccgaatcccatctttcttatctctcgaagactcctttcaggctgagatcagagagggagggaaaaagaagagagaatcattgttcttctttttttaatttaatataccaagccaccagctcaggtcatttatatgcttaatttagtgataaaagtcaataagc

SEQ ID NO: 23228 - DNA, 1489 bp, Homo sapiens
  chr3:138657617-138659106
  hyper
cgattccatttctggggatcgggtccggtggggagccactgtccctaacgcctccagagactttaagtaggacaatataatgctggtaggagcaaggtgcaaggaatttagcggcagaagcctttcgggggggtggggaaaggcagatccgtgcctcgtctgagcctgggggtggggacagcccctggccttgtagcccctgttccggggatcagctgggcccacctaacccccctacatggggttgaaaggggccaatgggacggccccgccgcccctccctcgggattccacagggccctgacccggcctttatctctgcacggtcagcagtcgcgggggcttcaggaaggaggacaaaggcccggtgtcaccgcgggcgggggctcggtttcctggctctctgctcacactcacagcctttagcggttgttgggggaagatttttaaaaatatgtgtcgaatttcctttttttctcttctagaaacaaacaaacaaaaaaggcaaaaggcgaattccccttcactcctcgtccatagagattaaagtttcctgggatcctgccctttttttttctttgactgcctagaaatacttgttctcccttgtacatagaggaaaatgcggggaaaggttttttaaaactcggtttcatactattattattactaaggacaaccgggcaggctgaggtcccaacgtggatgatccgagttggcctcgcgccggggctctgcagccactgccctgtgcgctcagcacctctgggggcgatcagggcccctgcgcttccgcccgccgcccggcagtcgagagcaccctgtgcccagactggccgactcattctcccccgaattttgtttagagctggcaagggggacttagctcgcgccccaagacctgggcttgcagcgccgccaacaggcccggggacacgaggcgctccaggccggggtcttcccggctgctggcccctctcgctccccacccgctggcggcgcctcggtcgcccgcaattgacccaacccgcttcctgcgtttgcccctcaggtttcccgtttctccacaaaggcctaggggagcctcgcccacaggctgaccctgcaacctctggcccggtggctaccttctgcttttctgaaaaagaaaaggaaaaaaaaaaaaaaaaagaaaaaatcaaccagtcgagggaggcgcgtgaggactggaggcgccagccggacagcctatgagtaggtccctgggtcggtgccgcttcgcgggtcagcacggcctttctcagagaaaacctcctaaacgtgtgaagaccgctttgggggaagcgagagggaggttggaggagccccgggcggggtctcagcgcccaccagctgtgccttcagggcttgggtgttcgctgcaacggcaaccgcgtgagcctcactcccacggccaaggggctagggcagggtggatgcaatcgcgtgcgcctggccccggaaggtgctc

SEQ ID NO: 23229 - DNA, 97 bp, Homo sapiens
  chr3:147072559-147072656
  hyper
cggcccccaacggcggttttcaggtggctgagagacccgccgccttccgagcgcgagtgatgaaaaggggagggaggccgcgccgggcgggccggcc

SEQ ID NO: 23230 - DNA, 739 bp, Homo sapiens
  chr3:148415317-148416056
  hyper
cgagttactcataggaaagagaaagaagttctctaattcgtccttaaaagttttccaagttcagaaaaaaaaaatgttgaagaacacgaatctccgcaggaaatgatactcctgtacccccagctcgctctccctcacgacccctcgctaggcggggttcgggaccaggtgaacgctgatctgatagttgacacgggacgactgtggcatcatccttgctgccgtcaatatcccgagagggaggaggttgggccgggagggtctcccggggcggggcggaggaggagggaatgcaaaacagagcctcgtccccggaacccaagaagcagcaacgcccctcactataaattcggagctgcctcctcgccaatgattccagcgcctgacagccaggaccccaggcagcagcgagtgacaggacgtctggaccggcgcgccgctagcagctctgccgggccgcggcggtgatcgatggggagcggctggagcggacccagcgagtgagggcgcacagccgggacgccgaggcggcgggcgggagacccgcaccagcgcagccggccctcggcgggacgtgacgcagcgcccggggcgcgggtgagtccgcgcggaccgccaggcatgcttgggggacttcaagggcggggtgctaagtttcatgtcacggtgtcctaactgctggctctatactgggaagctctcggggaccaaggaaagagcgaccgtagttctggtcagc

SEQ ID NO: 23231 - DNA, 269 bp, Homo sapiens; identical to SEQ ID NO: 6141
  chr3:150481645-150481914
  hyper

SEQ ID NO: 23232 - DNA, 44 bp, Homo sapiens
  chr3:150505729-150505773
  hyper
cggtgccaccactaggggtcaggcgacgtcctgataaaggaagc

SEQ ID NO: 23233 - DNA, 1056 bp, Homo sapiens
  chr3:154797121-154798177
  hyper
cggtccacaggggagagatggagccccctcaggactagagaatcccgaagagcccgtgtattgttttcttgaaagccccgaagctaagcaattctaaaaatgtttagcaaagcccttttgggaatggtgagatggggggtggggaggatgggacattttcattgccaccgcccgccccccgtctccccggccccctcacatgaagtgactggatttgggagacctagcggaaaccttcaggtcacccagggaactgctcctctctctggtcctgcagcggcgaggcggggtagggggtggggggggtgggccgtgagagcgccgagacgcgcggggcgcggagatgtgcaagtggcgaagcttgaccgagagcaggctggagcagccgcccaactcctggcgcgggatctgctgaggggtcacggtgagtctctgtgggtgcgggtcggagggatgcccaggtgcctcgtcgccccacggcccgggcggaggcgggtccggaacctcccccaagtccggcctcagcctggagcccgcgcgccttgggcggatgcacggactgagaggcgcttggctgggctctcagcccgccactgccacccggccccgtgcgctcattggtcgggatgtgtcggctcagcagcctccaacttctcccgaatcccactggtgagtcccaggagagcgagctgagggagaaaggtccaaagggcgcgagcgcccagggcgctgggagcccgtgggacgggcacggggagggcagagccagccgaggggagcggctgccgggaggtgcgctgagcagggtccgcagctaaggtccagcgcgatccgagcgcccaggaccctgcggccgtggaggaggcgtgccctgggaaggagccgctactgggacctgaagagtgaggggagggagaggggcccagagggtgacctggaggagggctctggaagtcacgtcaggttggctcttcaggttcatttccatagttccctgcggcctctgccttggggagttatgttttgttaccgagatccgcgctaccagattgcacc

SEQ ID NO: 23234 - DNA, 886 bp, Homo sapiens
  chr3:156009039-156009925
  hyper
cgctcgagaatgagtggggaggggtcttgaggagcccccacgtcctcccggagcggaggcgggagggagctgacagccggagtggatggagaccaccagtccgaggggacccgcttgcgattagctgcttcttgggatgctccgcgcgccagttgagcatcctgcctgtggtccaggggatgctggcggcgcatcttgcggtaagcctgcgctgatttgagccatcgcccagaagcgagcccgcattcagacaccgcggaccggctccgcgaagggctgcgtgcagtcaccatgaatgctcagctctaggcttctgtaaaaacctcccccactgcatggatttggctgtttaatcagccgagattacagcccgggaagatttgcaaacctgattctccctccagctgctgtgacaacttcggggccgtctgtttacttctctgggtccccggggactctttcctgcatcgcagccccttgtgccactttgtgggcttggctcgaaagtcagccgccaggactcctctgacggcatccccaggaagggggagcaaggagggcttaaaagaaaagcagaaatccccgcaactgctcaacctctcgtgactgcctgtgttctggggttctgagagggaccgtgcgctgcctggggaagcaatgcaagtctccatagcctgcacagagcacaatttgaagagtcggaatggtgaggaccgacttctgagcaagcagagctccaccgcccccaatgtggtgaacgcagcccgggccaaattccgcacggtcgctatcatcgcgcgcagcctggggacgttcacgcctcagcatcacatttctctcaaagagtccaccgcaaagcagactggcatgaaatataggtatgcac

SEQ ID NO: 23235 - DNA, 1006 bp, Homo sapiens
  chr3:157822854-157823860
  hyper
cgaaacgcctcgcccgggagaagcagcgtagcctggacctcagctttcgttggcttccttctaccttgaaagagaatgggaagttttggcccctaagatccaaagattcaggggctctgcggagttcgaggggtcttggcggccccaaacacctaggcgaccggagggttaagctttccacctctgccccttctccctcccggcaaactctgcgctagaggctagctttagtcccgccgtctggttcagcaccccctcctgcagcccggccccgcgaacttccacgtccgcctgcgggccatccgggctgcgggcccatcctcccgctggtgaaaaatgcatttcggtggaatgggaacatctgggaagggcgcgcacaaaccccacacgcttccccccacgccacccccacaacacactaggaccccacccatgaccgagcataccaccggacccccacccttccactatcactctagctgacaaagctggggtccagggccctctccgtgtccctctcccctccccgctgggcctcggagtcctctcccgcccgagaggagtccggaaggcgggaaggggaaccgctgccgggggtcagtcaggtcgttaccctccgtcagtcgcgggctgcccggctccctgcttctctcggcggcgcccatgtccagctcccggacgggagagcgccctcctccagctcctccgcctgctcctcctcctcctacacctcctccgcctcctccgccgccgcctccgcctcctccgccgccgcctccgccggccgcccggactgccgggctgctgcggtcgtcgcggcccgcctcggtgcagccggtcggctccttggccccgcgcagcggcccgctctccagcacctcccggtacgtgatcgcctccttcttctccttcactttctggtcaaaagacttggagacgaacgccgtaagttcttccatcgccgccgcacgtcagcccggcgctcaacctctgccagcagagcccc

SEQ ID NO: 23236 - DNA, 229 bp, Homo sapiens
  chr3:157824101-157824330
  hyper
cgggggctgccggagggaaatgggaactgatgcttccctgccggagcgcgcttgttcaatgttaagatctttgacaattcttcctgcggagagttcagatctgatagcgacgctgcgcttgaagtcccactatttatacttcctaacggcggcctcttgttttgagtaaattacctcccctcgcaactcggagtgagcccccttcccgggtagcagtcgcgcctctacc

SEQ ID NO: 23237 - DNA, 1115 bp, Homo sapiens
  chr3:157824433-157825548
  hyper
cgggcgggctggggctggagtggtagggcagcacagggggaccggagggggcggggagagaaggccggtccccggccgctcaggttttcagatagcccctgccgcctgtgctcttggccattaatccaggattgacaagaatccctaattaatttaattaggcgtggattttgcgttggtgtcacgacttagttaaacactggggagctggatagaccccgcggggtggggccaagaggaaactgacaagtgcgcagctcttagagtcagtcaggtatcccgacactgcatccttccctacagccttgcttcgagtcagggtgcctcgcaatgctcagcttcgcattgcttttcctcgtccctgccctgcatcaaccgcccagcagtttacaggccccgcatcccattcccgcatcctgaccccgcatcccaattctgcatccccgcctctccctcacaatcccacccctgccggccgtagctccaccgcccagcatcatcctgcccagagacagggttgcctgcaccttctccgacccgcgcagcttctcttaggagcttcccggctcgcaggcaggctgagtccgggtcttctccaagctcctcgcccctcggtccgtgttattcgctctattattcgtgtcctggagcccagctgactcctctatggacagaccccgctaaaagggaccagtcgatttaacaagtttccccagcagctgttagctgacagatctcattttaaagtgtttccttagcgcccggtcaaggacagctcgacttcgttcgtttcctctctgaggtctcagaactcccacccttctcccttactctctgcactcggacccctctatggtgaattacaggacttcttctttagcatcttgggaaacatccgagtttatttactaatttgaaaaacaagagattatccctcttcgagtctgaaaaaaaaatcgacgttaagtttgtaccccctctaatttcatttattacggagagctaaaaaagagacgctcgccaggagtaaaggtctctctgcctaccccccccaccaccccgcttacgatttaaaattctatttctgggctattttcatcggaacggtttgttac

SEQ ID NO: 23238 - DNA, 273 bp, Homo sapiens
  chr3:164912391-164912664
  hyper
cggcacccgcaccctcccccccatcccccgcccagcactttgggtacccaatgtgcagaggcggtgactatttatcgggtgttatcggaacccatgatgtgatggaatcgatgggtaacccggaggctgccctgagcttccagatgacggtaaatgttgtctcggcaatgaagtctctgttatttcttgaactaaaaccccttacgttctggacctgggctgtgtcctaaaggctatctcacctttttccttttctttagctcaggatagcgc

SEQ ID NO: 23239 - DNA, 774 bp, Homo sapiens
  chr3:173115000-173115774
  hyper
cgccttccgtttctgcataaaaccaatacattttacttggagggtaatttgccagagttgagcgagacgaagccgtgtctaaataagtacatgacactaaatttccttttaaatccaccttttacaccatggccagtcgcttgtttaactcccgttcaagggacacggttttcaaacgtgaccttttggggagatgtgggaacttcccctcatttcttcttctgtgccgctaacctctttcctcctccgcgcggcatctccagccccggcagtttgtaaattgcccgttttgcccaccctcctggtgggcgttctctcccccactccactcctgccccctctgtcctttcttcattggcgtcttcggagcagatgcatcttctttcttcttggcctcactctcccgttcccccgtcagtccccccacccgcggctccccacttgccccagctctcctcgccgctcctccccgcctccccgcggagggttgacccttcaattcggagtcccggcctgtgggcgggcgggggagcgccgcggctgtaagccgaggatcaggcggcggcgcggagagcgcgcccgggcggccagcgccgagcgcgcggagctggcgtggggagacacggcaggaaaggcgagtcggagtgggtgatgagaggccgggagagcccgtccgagccggagagaccggagagaagggagcgagcgactgtgcggcgctcacgctgccagagcccgggcggagtgcagtcgcctccaaagccttagagcggc

SEQ ID NO: 23240 - DNA, 596 bp, Homo sapiens
  chr3:181419943-181420539
  hyper
cgaagactaaagctctgtactcgaccccgcgagcggctctcgccttccggggctggaacccgactcagatgtgaagcggcactgagccgctgcgcaggttcgtgcccagcgccccctgttggacacagtaggagctgcgcagcgccagtcccagaaatcgctggaatcctgctctggggttagagaaaactcttttattgccctccaaaaaagaaacgggatgcgaaaacaaatttttatatccttgaaaaataatataatattaactcaataaaaaactaaagaggcgatactacaattttaattcaataaaaaataaagactgtcctcctcacatcccagccatcccccacccggtttggttttgtaactcttttgaaaggttctgcgatggtaaaacaggtaaagaaaagtgacgaaaaacaaagcatttttctgtagccgtggagaatcaagcaaagtatacttcctccgttttgtccacatttcaaaaaattaaacggaagatgctgctgcttgctgttttgacgttgtcagcagcgtcttgaatgccctcagaggtcctgcaagtatcgtaactgagccttcgagtaaac

SEQ ID NO: 23241 - DNA, 1219 bp, Homo sapiens
  chr3:181421152-181422371
  hyper
cggaaatcggcttaatttttcataaaagaatggctttttaaaatattgaatactatggctatgcaaggtttatgatacctttatgtttattcttcccacctcccaaaattagcgaattcgagataacatttcaaggggaattgctatttagtgcgatgagagatgacttctccatctggttccagaattagatctcggcttaggttttttagtaagtaggttcagatgcaatggaaggagagaagaatcaagccttttgataaaatctctaccccgaattctatggaaaagacaggcaagcgggattccagccacagcacccccaccttttgctctaccaaaaggcttgtccccattacagaaataatatagtcggtgctagttttgtgaacccgcgccaaccgataaggtaagaaacggtgcgctgacagccgaggtccgaaggctgctcagtggttcccgcagcccgtggggtagggaggccaaagccagcaaaatgttggaggcgacgccagaaagagagtatatgcctgctattcggaagtgatgtcgaacgtgcaatagcagagtcctggagatttccaccccgttccgcacccagggatcccagcctgtggggtagcaggttgttgggtgaaggcaggagggagaagccgcacctggctgagggcgggtgggcgtgccgggagcgagtgcccaactttctagggcccatggagaaagcataacccctagttgaggaaagagagctaaacaagtgggtggcccaggcctgggaatgccacccagctctcccgacgcagtgttatttctgtggtcccagggggccccagcacctgcccgaatcccactccccaaggccgccagcaggaaggcagcccctccatctttgagggctgaggagggggcagcgagtgacttgattccttagtagcagggaaaaccgcagcggctggcaacgggccgcgtttctccgcggcggcaaagcgccctttaggggcggggcgggcatttttggtctcctgtcccagcgtccaggcctgagcccgcgcgggttggctgggcgccctgctttgtaagtaaccaatcttgctggattctgaggactatccaggcggatgggcccacttagcttaggcccactgagaccctgccaactcctcagacccttttccccttcatccctcacacctttcatgatgaacccaggaaagaaccc

SEQ ID NO: 23242 - DNA, 823 bp, Homo sapiens
  chr3:181440800-181441623
  hyper
cgttttacatttgttgaagcccaggccttggtgcctcaagttttaaatggaattactcaaggggggcacactactagacaaactattctagccaattccttcatccccgacccagtccctactcctctctgcccccgcccacttcgccacttcttagtcccggatctgaacattttagctgaaagagggaggggtgaggaaagggccaggacagttccctcagtgccaccactgcgggcaaggacagttccctcagtgccaccactgcgcctggagagatccccgcggccctgccgctggctgattctcccctgtgccttgacttgctgaaacatctctctggggaaaattactccctacttgcttacatgtgtgtattaaaaaacacatgtagccatacacatgtttcatcacggcaacaaaaaatatcaacattctagccccaggagcaaaacgtatcaatcattcgcctaaatattgttcagtagatgggggcgggaataggtagacctcctaggagagcggtcacaagtcccctctcctccgcatggacaccaggaatgcggggtctggcggtgctgggcgcagggcgagaagatttgatgtgcagggtaagtaaaggacaagttatttaaaacctcaacacaggaaaagatggtaagagtgctgtgtagccctttgcttgcttgtgactacgagtcgctaggtggcccgcgtttagagtatgcctacggcgcctactaacgtctagacctaggagaggcgtctcccgcccctcgacccacagccagccgccacttgatagctaacgcgtcttccggcc

SEQ ID NO: 23243 - DNA, 989 bp, Homo sapiens
  chr3:181443142-181444131
  hyper
cggagtcctttgcaaatgaagagcccccaccatttggaattcgggtcaaggagaaagactctgagcctgcagcagtttttgtttttgcgtgtgcccgcctctccattttattcaacttcttctgcctgtcgggaagcagaacaatcgctccccacccacccccctccgccccgtttctaagataaacaggaggtgcaaaatgctttgcctgcacacgcgccctcgtggcccagtcttcctgcaacccccagcgcaccggccatgcatctgtctcccaaccagacgtgggagaagacatccccccttcactcttcccacctgcatttaaaaaccatcacattgactgctctagagtcaggttcacatttttggccctccatgccaccttccagtttcttcccggtccactctctttctcaggacctaaaaagtgacggggagagggtgaagaattggagaaagcagcggattttcaaaacgtatcccccccgcccccccatcttttaaagtagtatgttaccacaaggagtgcatttgggaaactttccctaacaggagctgggcgcagtgttattcttctccatgggtctgctggcctccccgcccccgctggacaatgcgtgctttgagactcggtggcctgcaggcagcgggagacgaggggactgggcagccttcctccaaggggcccgcagctgggggagcgccaggcagggagcagggacaaggaggcgagccacgcaggaaggaaaaccataaaagtgccattttttcccttagccctgcacagaggcaggctttgaggacctaggggcagggcagctggggcggggtggggtgggggtgttgagaggttttgcgtgttctttttaccccctttccccccactgaaacattttatttcggcacataattatgcactgcagattctccagcctcctcgccctcaatcttggtaacctggtctttggttaataatatcgcaactc

SEQ ID NO: 23244 - DNA, 826 bp, Homo sapiens
  chr3:197807427-197808253
  hyper
cgcggctcctcgtggcctttccactaaccctaaccccaaacccgagatgtagctcagaatccgcgacccggccgggtccaccacagccttcagcagcgacactcgcagcctctgacctctcagcccgcgaagccgttaggcgcgcgcctgcagctcagcgcccgcgcggactccggaagccgctcccaagcccgcgctgccggcagggggcggctgcggctcgggcgcaggcgccgctggcttgcgggttctcctgggctcgcccgggacgtcccgtagtcgcaggcgcgcaacccgcccggcctgagggcccgcctggccgtgacccccgccccgctcctcctccgaagagagatcggggccgctggcaggggccctccgcagccaccagggatggggctgtggggcagttcccgccccggtgcagccgccgccgggcagaccgcctggcttggctgcagccgcggcatctggctccggttctgcgaggctgggagctccagcgagcttgggagctgccaggcggctgctgcgagcaggcagagggcgcctggagcttgggccctcaggcggcggagcatggcctgggcggcctctggatcgcgagtgcacctggcctgagagcctgccaggccctgcccccgctcggctcctcctctgccggagctccggaccgctagccaggggccctctgcagccaccgggaatggggctgagggcgggttcccgcccctgtgcagccgccccagggccgactgcctggctcggccgcagccactggtacatctggctccggttctgagatgttgggagtgcgggcgggctc

SEQ ID NO: 23245 - DNA, 222 bp, Homo sapiens
  chr3:29322332-29322554
  hyper
cggcagcagcgttgctgcaaaaatcgcttgctattcgagatagccagcagagggaatcggaactttgcttgcagcaggggttgaagcagcctttttttttttttttcttggaggaaatactgcagccttctggactgcgtacgctgctccctggagaggctctctcggttccacccaccggctggaaggaggggaagtgaatgaaaggacaggacaagcccc

SEQ ID NO: 23246 - DNA, 983 bp, Homo sapiens
  chr3:35680722-35681705
  hyper
cgcgggcgcccggcgcacccagcaggtgccatcactctggatgggccagttctggatgctcccagtggcgcagaggcggcgacactggcaggcgtccggctgccgccacctcccgggtgtggcgggtctggggcccggggtctccggccagagcagctgtggagccacgtgcaacacgcgcgttgccctcagcccgggcggggaccggacgcatccggagctgcggggaggagccgggcgccgcccccggcggcagtgccagccgcgtgggagggcacggaccggcggaggggcagacgacggaggcggccaagctggaggaacgggaccgagggatcgaccgaggctggctggctaggggtgggactggcagagctacggacaggtgggagcagtcagacagcctgagagagggagaccagaacgcaaagagagcgagagcattaagtaggcagggagaggcacacagaaagatagacagcaacactcgcgtgctccctccctccacacgccctcctcttaccgagcgaagcggccaggggcacagagtgggagaggactgtgggcacagaagaccggaagagggacgctgcattgctggtgggacggagggattcggacggacggacagaccagcgcacagactggcagcctgcgagagtggcagctttgagagcagagcgcagcaaagcgagaatcccgcgccgagctgctagtcggacccacagacggtcggactgacagacgtgcagacggacagaagagcagacaggaggcgggggcgcgttcactcccggcggccagccggccagagaaggcggcggtggcaccttctgagcgcgtccggagcagagaccagcagcagcaggggcagcggggacacaagccgcgaccgagccgccgccgcagccctggctgccacagctgtgtgggatcccagccgacactgcagaaagctccttttactagcagttaaataaatc

SEQ ID NO: 23247 - DNA, 50 bp, Homo sapiens; identical to SEQ ID NO: 6154
  chr3:39250115-39250165
  hyper

SEQ ID NO: 23248 - DNA, 783 bp, Homo sapiens
  chr3:62859445-62860228
  hyper
cgagccagaaggtggcggcgaagtcaccttgggaagaggagaatagggtcaaagacaggacggcggaggggctgacccggacggaaggaccagagggcgtgcccctgctctggggtcagtgaggaagggtcagggggactggtgagaactccagccataaggaagcagtgcccgaggacactttggcgacgctagtcggtgatcagctgacccgggcagggagaggagggtgcccttcgcagagtcacgggaagcttcgccttctgggcttgctttctcccgcctgcccctgcggttgctctctgccccagcgagcggagcgctgctccaagacgctcttctccctccacctcggcgcccccacctgccgttgcccccgcccgccgaacgcacgcccaggagggcgggcccggagttgagcgcagccgcccgccgctggagagcgctgggagccctgcaagcgagcaaggcctctctgggcgccgcgggcagcaaatcactccccgagcctctcggtccacaaagcgggacctgcctgcctcgctcaccaacgctcccgggctgggggggctcgagcaagcggcgctgcgctccgcggccctcgccggtcccagtcagctccaggagcgctccaggctgggttgggctgggcctgggcgagcccggccgctgggagggggcctcgtagccctttccccagggcgcggtctccacctctcctgctcctcctcgccagctgcgccgccagctcccattgttcaccccgcccgcctggcgacgtcc

SEQ ID NO: 23249 - DNA, 863 bp, Homo sapiens
  chr3:68981171-68982034
  hyper
cggagtgccccttccaacttcgggttgcacgccgacctcagcacaggcactctccccggcgccccagagagccgggatgaggggagctgcaccgagctgagttaactcggtaccagccgagaggcagcggctgcccacgagacagcacctaaatacagggtccaaatccacccccaccccatcctctcgcccctccttatcccttccaacccttcttactcgactagagccggcatccaagtcggaccggcgcgtccggaactaggtactgatcgccgcaccggagcccgaggacgctcaccgtgccgcctccccgcgggagccccgggagcggcccatcacctctgcagcctcgccaggagaagaaaagttcccacgtctctaccaggagaagcccgaagctcctgcgggagaagcctgaagctgctgctggagaagcggcagctgaggcaggactcccgatgtttgcccgcagccgcgcgcgcagtcggtgcgccccgtccagggcggcgcgcagctagcagtgcggagccgagcccagctagcgcgctgaccaggaggggccgggcccgccgcggaacgcgctgattggccgggccgcccggctgctcctgtccctgcctggccccgcggtccacgtgggccggccttctccccgccccgcacccctgctcaggcggcgcgcccccactgccggcctccaggcgcctctcccgagcgcctcgctgtggccaccactccgcaggtgctgagcaaaaggtattcttcctgaatacctgagagtcgcgttgagctccacataaggaagacggatttagggttcggctctcactcgaaaccattctccacgcaggacccaaagc

SEQ ID NO: 23250 - DNA, 616 bp, Homo sapiens
  chr3:73673919-73674535
  hyper
cgcgcacttcaggtccgggtccacgtcgccgtcgaagcggtccagctcgaagcccatggtggcggccaggccccggggtcgccgccgggcggccgggcgccccctccctccccacgaggcggcccagacaggccggctacgccgcccgcgcgctcgctggctctccccggactgagcctaattgatccagacttcctcggaaaatgcccgaggaacaggactcctccggccgtatttgcgcgagcgcgagcgcacatacatcgtgccttggatgcctcccgccagccccccgaaaaagggaggaggctggaaggcagaagcgcgtgggaggacactgaggctcgccagaagggacgggccagcccaggacgccagcctgaatcttctcgggaaactcctttctgttctcttacagtctacgctataggagacaaaacgccagccgagaaaagctcgctgagtttggagctgaggctactgctttctcccaagggttctcttcgagccccttcccgaacggatcaaaacttttttactcccttctccctcccccttcctctagtggctgattgcagaggactaaaaatatcttggggcccgctatctcagcacttac

SEQ ID NO: 23251 - DNA, 1260 bp, Homo sapiens
  chr3:85007731-85008991
  hyper
cgcagaagaacctcgcacccaggacctggcccaggcaccacgaattccagaacatgctggggacacggctaaccccgccccctcgcggtggcgattggctgaacccttcctgagtgcaaagcgctgattaatgaaggcagttgtctcgcctgcaagttcgggcgagacatctctaaagaggtaagatccgccaggggtgctgaatgggggcttcagttcttcctgcccgaagggtccttgagaagcctgtttgtttttcccggcgcttgtctccacccatccccttctctcattggccagacctggtgggcgggggagtttccattggccggggggcggtgtctgtccctggccggggtgggggcggggcctccgccgctctgagcttgcccttgtgtctggtgcttcgtagagctgccgccgtcgccgctgccgctgccgccacagccgccgctgcagccggagcatccgggagccgccactgccgccgccgctgccgctgctaccgccactagcgctgcttccactgcttctacctcccctcccaggaccccgagacaccccgggcgcgagcggcagtgctgcttgcttgctcctcctctcccccagcccttcccctccgtgacctacccactccttgcagccctcgcccgcaccttctccaacaccccggcatccctgcaccacctgctcgggcagccccggcgggctctgggacttgctgtgcgcgccgagaggaaggcaagctccaaacccctgcctggaagacgggctgtcgcggctgcaccaccagcaggaggaggaggagaagaaactatttcgcgataccccattctgcgggtgctttgccgctgccgcttctgctgccgccgatccgagtccgcgggttcgaacaccgcagcggtggggacggtgggtccggcgggcgccgggaggaggacaccagcggagccctgcactctcgtgccccgctcaccagcatctacttgccccctcgttccttccccagccctttagagaagggaccatgatttggaaacgcagcgccgttctccgcttctacagtgtctgcgggctcctgctacaaggtaatccccgccccggcgcagggaacatcaacttctcgcccattccccatcttccccattccaccccatatttccactctcccctcccagtctccctgtccccagcgatttccaccccctccccctactctctggtgcggcagggggcagtggcagtttgcaccagcccctc

SEQ ID NO: 23252 - DNA, 426 bp, Homo sapiens
  chr4:102711772-102712198
  hyper
cggccttttgagaagggatgtaagagcaggcccctgagcagtttcacttcctctgggcgcccagcagagcggagccctggccttgcgggcatgagccccggggctgcgtttcctgagacctggccgcagcctccgcgggtggcaagcgggctggggagagccgagggccaaaggaagagaaaatcgcggggagtctctggccgggagagtccaggtagcgctcggcgggcagcagtgcgcaggcccctcggcttcaaccgccacaatgctgccagcagcgccaggcaaggggcttgggagcccggaccccgccccctgcggcccagcgcccccaggtgggtagtcgcgcattcggaggggcttgacgccgaggccgggctacggggctctgcggagaccacgggccatcgttagacaactgcactc

SEQ ID NO: 23253 - DNA, 728 bp, Homo sapiens
  chr4:107956429-107957157
  hyper
cgctccgaatgttgcaagatgcaatggcaaaccgctagcccaagagagctggcccctgcctcttctgtctgaagaatgtgtttgggggttttcctacctgccccaggtttttgcccttcttactgccgccgaatgccagtccttggtacatgcccgcagatcgattggcggcctgaccaggcgtctccccgcccagagaggacttgatggagttgagtttggcccgcgaactgccgatctgtgagctctccaccatcagcaccgcggccagtaggagcaggcagcaggacgaatccttgctccgcatcaacgcggccatctcccggcgagggggtccccaggaagacgcaaagcccggaggggtgggaatgcaaagggagggaggaccccaacacggggcccctcacttgggtcgcgggggcttgcagattgtgttccctcaacccttcctggttcggggacccaggaccctatgaactcagtctcacgcctcaggacagaaattagcggaacccaagcgagacccgcttctccaccaggacaggaagttctgcaataactggaagcaatcaaatgcgaggcgctttctcgccaaggaggcgtgacccaaggtgcaagaaaacccagccctgtggatcgcaccgcttccgttccttcttgccccgcacctccttggtcccgccgggatctcggcggtttaactctcctcttaattgatcaggaggccc

SEQ ID NO: 23254 - DNA, 970 bp, Homo sapiens
  chr4:111552929-111553899
  hyper
cgcgtcgacaggggcaaacctccattctaccctgggctgctaagcacagtggctgccctccagctcttcagggatgttgtcggccccccgcccctcccccaaccagccaaagcaaaccttcgccaactcaagtttcccttgcttgcctcccgcgatgaaccgcgcacccacaagtctgggtggggcgtggctgagagcctgagtgactgagtgggccctggtggtgctgcgcgcagcgggatataacgagcgacagaggtcgctgttggaccacttttccacgccagcctagacgccgaggtttgctggagcgtgcgcaggggatcagaccacagggagcgagcgagagggagagagaggtgttgggtctcaggagtgcagtataatttggggaaaggaattaacgtccctgggacggctgcttcccgtcccacccagaggcggagtgtctaagttcaagcagcaggcgcgtcaggtctggcggcctcgccttcttgcgcttcgcccgaggcccagagtcccggaggcgggtgcccagcgcgcggcctgcgcttccctcccggccttaccattggcgccaggatgctgccgcgggaagaacttgctgctggctgcctcttttcggctctcaggagagtccgtgaactcgacctttttgatttcggagtctttggagaagagacattcaacggccgccggctgcacgcctgggccacgcgcgcgcccgccccacgtgcggagagaggcgtcccggaccgcggccgaaaggagccggggacgggaggagggggaggggcgaggcaggccggaggagaaagagggacaaagagcaaagacccagttagaggaaagagctgacggcatccccgtcccccggaccctctggcaacccggggcaggatggcgtactctttctgcgcctccccggttgccggcggttccagccgggaggagtaggctggggggcttc

SEQ ID NO: 23255 - DNA, 1594 bp, Homo sapiens
  chr4:111557643-111559237
  hyper
cgaggatttgttcctgcagtgttggcaccgagatttaagggaagatacctcgttttaaatgccagccacggtctggcttccctctcgacttcagcaccctgtagattgttagtgtctgtggcgggggacgaaaggaacagggctttgcaaggtctgtttgccgactgcgttaccttgggcgaaacttagccccaaaagccacaaatcacctacggtgaagattctccgaagtggaacaaatttccagactcgcattatctcacatccctgcgggatagatggcctccacttaccggctaccgggagagagctgctgtctccgcgtcccactgcttcccggggcgatttccagcgagccgagcctccggctgcacggcaagcgcccgaaagccgggcctgagaggactgcagggctcctgagggtgccaagttccgaaggagtccacgggtgcactggggcctccgaaatctagccgccactggcagtttctttctgctcctctccagctttctcgctcggtctcgcactctctctcctctccctccctctcatccctctctcttccctctgctcctactccgtgtggggagtgacgtgacgtcagcagagattccaccaaactccactgcacagtggcgcgcgggcggccggccgagcccggctgcgcggctggcgatccaggagcgagcacagcgcccgggcgagcgccggggggagcgagcaggggcgacgagaaacgaggcaggggagggaagcagatgccagcgggccgaagagtcgggagccggagccgggagagcgaaaggagaggggacctggcggggcacttaggagccaaccgaggagcaggagcacggactcccactgtggaaaggaggaccagaagggaggatgggatggaagagaagaaaaagcaatctgcgccaacccggcagccctaataaatcaaagggggagcgccagggcagcggggagacagaaacgtacttttggggagcaaatcaggacgggctgggaggaagcgacagggaaagtggcccaagagacggaacaaaggacaatgttcatggggttgtttgggacgaggcgtgtggagtgtgggtgtgagcgtgcgtgtgtgaccttctttcaggcctgcagagttgaggaaagaggtcacagcaaagagggactgcggagggaggaaagtgagagaccggtagagggcgggagtggaggtgggcgcggtggggatgggagaggatgagtgaagagaaatctagaagaatggagtgagctagtgggagagggtgggagggccacagccgggagcgaacgagctaggcttgtcagctggggaaggccgggacgctgggcccagcttagctgggacaccgcgcccgaggtcaaggcgggtggaccaggcatgctgagagtgtcggcgcacaggtgggcacggccacgcactgacccagtgttcacgaagggtttgcactggacaaggctcagacgctcatagagtctagaatttcctctgctgtacctacattcaacaagttcaccctgggtcacggatatctcattttttaaaatgacgaggttaaggttcctggc

SEQ ID NO: 23256 - DNA, 831 bp, Homo sapiens
  chr4:113441878-113442709
  hyper
cgctgcaggctagaaacgcagcttccagagcaggagagcctggtatggaaacaattagctttctccgcagagcaccccttgcaacgctaggattcgttattgatagtggtgagcgctgggaatgagtgtgaattcggagtttctgacggtcccctatccgggagccaaggaagccaaggagaaaacaatgtaaattcgccccgatccccagttactgcatcccacatggtattctcggtctcccccacgttttccccttgaatcctgtccggggaggattcggcttgaacctagccctggagaggtcccggccaggtcactgaactgcgcttcactgcgccagcccctccccttcagtattttcatcgcgtccgaggaatcggcatccaccacagcagacagaaggcagggaagatcatcccccaggccccaagccccactctagagaccctggccccaagcccgcacgacgtgctctggtgcctccaagccaaacattccgggattcggcttgacacacaaggtcagtcagcttgctagcgcggaatcggccccgcaggtgctaggaggctcacttccttcttcgcagacgctataccctatccccacctgctctggggaaggcaaagctccgcagacttcttatccctgaggcaacccgctacccaaatgtccctcttctttcccacgaaggaaagaaattaccgtaggagattttgccaatccatgccagctttctgattgttttcttcaggtaaggggaaaagaacagccagcgcgtgaatggagagctgagggcccactagggagagaacctcttccccacccttc

SEQ ID NO: 23257 - DNA, 442 bp, Homo sapiens
  chr4:113443992-113444434
  hyper
cgtgtctacagaaaaaaattgttttatatatcagaaaaggatacgtgtatgtaacaataaaactgtgtaatgcaatagtgttgggagacgggggtatggtttattttcagggatctaaagatatactttagaatctaaaacattgggggttgacacttattgctgatttatccattctttctttccccccgaagtatttctcgagcgcctaccgagtgccaggcgcctagcgaggcgcagcgttagcaccaggcgcgaaccagacagctgtggcctgcctggtagaaacgaccctgcgataacgcagttgctagtacagctctcggcggaggagccagggccgggtctccaggccgggagggggcggccgcggtgcgcccgggcagcgctccctgcgcaagtagttcttctatgtctttacacgcacttccaaaaaaacttc

SEQ ID NO: 23258 - DNA, 872 bp, Homo sapiens
  chr4:121992978-121993850
  hyper
cggatagggcgcccttgagaagcttcttgggccttgaagatttgggggcgcgtgcctcgagcccccatctcggatgacccttcgggcgtgaacgctccttgtgctaggtctcagggtggcgggctaaggcgtcgggtctctggggcattgctttcctctccccacttaccttaaaaagatctgtttttcgtagggaaaatagaaaaaaatccctccccgtggtgtggtgtgcgaaatagtccacgtccccggaccctgccaagatgctaagcaccaatatccaggaacgagaagcctggagggcggggacggaggcagataaaagagaaaaattcaatccgctgaagtgtcccaactttgcggtcggcacagcaaacttcaaaggcgggcgagggcgggcggcgcgcggtcgccgaagttgctgcgaagtggagtagggagccgcgcggggctggggaatcccggggcagcgccgagaagcggcgggaggtccttttaaactgcagggagcgtgcgggggctgggcggcgggaggatgccgcagcgacccgcggggctggcgcgggcttcgccggccgccgctagtcgcacaggcgcctggctggagcgccgcgcggggtgctgggagagccgggcgcacggggcggcagcggccgtggcgggtgcgctgctcagttagctccactctctcgcggctggaagtggggagtgtgtgttcgctcccgagtgtcactgctgaagcccggagtctcttcccctcccagccctaacccctcccgcctcaccgctgcccgcccgccccctccctcctctgcccgttgcctccccctccgtccctccttctctccctcccgctgcgcgccagcgcgcac

SEQ ID NO: 23259 - DNA, 936 bp, Homo sapiens
  chr4:13548957-13549893
  hyper
cgggctcagctgtgagctccaggaactctgcaacctcccgacgggcgccacgctccggcttgggccggcccgggagttggcggagctgcgcggcccggccgggcggccggtgaggctttcgagaggcaccgggctcgctcagcgtccgcgcctctctaccccgccgcgccccctccgcgcccacgggcccattttttcctagtcttctgcctctcttccttcttcctccctcccctcctcctccacacctttgtcttcttcctcctccctcctcctgcttctcctccgcagtttggatcctacgggccccctacgtgccgcgcccttcggtccccggaaccgcccgggctgggggtgctgctgcgcggtgagacttccgcgggcggcgggcggagagcgggatttgactgcgaaagccaagggggcggggaaggggaagccccggccctcgggggcgcgcagtaaactgctgcacacgtgcccgcgctcccgaggggggcgcccagtgggctcgggatttcctggctgcgccaccgcgcgcctcgcccccgacgcccgccacctgtgccctgggccgccttccctgacgccagcggccggaggtcgcgcgcgccgggtgctgcccagcaacgaaaggccatgcggggttcgtccctcagatgccggtgaccttgattgaagtcacctgccttctctagcttccagtcctttaaaacgagggtttggacccggtgccttctgaacccggtgcttcactgagtgagcaagtgaagggtgtgtgtgtgtgtttggggtgggggcgggggcgaggggagggaggggcagcgttgccggctccccagagccaggtccaggcagaggtcgcgcccagcactgaccgtcggtcccaatccgcagactcccgagggcgatccaaaccgcctaagcatcccaagc

SEQ ID NO: 23260 - DNA, 815 bp, Homo sapiens
  chr4:155665017-155665832
  hyper
cgggatcccgcgtcctccccgccgctagcgcagcgcgccagcggcgcccaatcagtgagctttccgggtctgtgacggccttcggctccgccccctcgacggccataaaaagtcgcagcgaagcctgcacctccgagcaccgcgcgcggccctgcccccggcacggcccccaggtgcgctccttctccggctgcttgtagcactggtctcactgtccccgccgtcagccaccggttccttatccgtctcattccccattgtggcttggctgagccggtcgccaggcctcgctgtcctcctttgccttcctctctcctcagcggccgtactttgcgccgtacctcacctggcctgcaggtgagcagcagcgcagcacccctgcccggcgagcttaacttgcccagcccggcccctgccggagtggcaccggcacctctccaagacgccctcttccctgcaggatgaagaaccccatgctggaggtggtgtctttactactggagaagctgctcctcatctccaacttcacgctctttagttcgggcgccgcgggcgaagacaaagggaggaacagtttttatgaaaccagctctttccaccgaggcgacgtgctggaggtgccccggacccacctgacccactatggcatctacctaggagacaaccgtgttgcccacatgatgcccgacatcctgttggccctgacagacgacatggggcgcacgcagaaggtggtctccaacaagcgtctcatcctgggcgttattgtcaaagtggccagcatccgcgtggacacagtggaggacttcgcctac

SEQ ID NO: 23261 - DNA, 773 bp, Homo sapiens
  chr4:15780322-15781095
  hyper
cgcgcgcagggaagccgcccggatcgcccggaaccgggcatcttccgtggcgggtcagccgagagcccgccgggtggtgctgagtagggagtcccgggctcggggctccgcgggccgctttcaggagcagctggccttggcaccgagcgtgcccgcgggaggcgggggggggcgctgctcggtggctctgctgcgtagccggtgaacacttggcaccgatgcccgccttctgggcaaggtgccctgagcccagcccctcgccgggctgcagcccaccctcggcgcgctcagcccgcttcaccgcttcagggacggaatagaactcgcagatgcagggtgtcgctgacattttcaactttttctgcggtttccgcccgctgtctctgacccgaaagtgcccccggacggttacagaggacacttaagtggtttgcaaagcctgtggtaggggaggagggtgtagaagggccaaaccacggaacttagttttattcatttatataaagcagcactccgattctttttgcgcggcctgaaatgcatgtgaccagagaagtaattaacaaaacaatgtcaacttctaaaaccgagacattacttagatgataaggcgcagcaactcggtgaatctgtacaaaccttggaaaaaaaacacattagtctatgggaccttccagttttctcatgctcctttccagctactaacctctcctaaagggaacaaccactttttggatttgattcccaggcctcgctttcaccgggaaattatc

SEQ ID NO: 23262 - DNA, 762 bp, Homo sapiens
  chr4:158142705-158143467
  hyper
cggcctattcgcgtgaataagagactcttggatttttgggcgctagcgcgcgcccctcctttccctcccggggcactgacactgttctcttgcttgctgtttgttctttgcaggggggctatttcctaggggcgccgatcaagaatacagtgcatttcgagtagggatggttcagttttccacttcggagttcagactgacaccccacatcgacaatttggaggtggcaaacagcttcgcagtcactaatgcttgtaagtaatgaatattcatgcctttcgggtgctgcacgcggaaggccagcgagtgtgagtgtgtgtgtgcgtttctggggtggtgtgtgtgcgtttctgtgtgtcagtgtgtgggtgtgagtgactgcacacacgcgtgcgtgtgaccgtgtagagagaaggtggctgtaatctcagggacccccgctggctggagagggctgaagagagagggaaaggacgtcaagagtgtgcgcattagggagccggggtgagggttggagccagggagggcggctttcttgggttcaaggggttttcgctcatcttgagtgcttcaggagaagccctcccacctcgctccccatcgagcgcctgttggcaccctgcccacagagaacacgttgttccccagggcgcgcagtcgggctgttggacaaatcccacgagggactgccggagcccagtggcctcctgccccagcagctgccgctctcgcccgctgcccccagtttagatccgcagcacc

SEQ ID NO: 23263 - DNA, 649 bp, Homo sapiens
  chr4:163085074-163085723
  hyper
cgctcgcgtctcaggttcagcaccgacagcacagtggacagtaccagctcctttcacctccagtttgtctcagtcactgaaccaggctgattctcgctcctcctccctaggcaggagctgctgccactcaacccgggggtgccccgcccccaccatctgacgtaactattttgcatatcaactcgccgagaggtgaggggccgcccccttgactgggcttctgctagagtcagctgcggcaatcggggcaacaaaattcaggcttaacgtcagcgtgggcatctttggacttcaggatgtattctcaaccagtccagtagaaactaaacgctttgacggtgctggagcctttgccttcgcggggactgccgtttctgcgcactctaagatcgctgcgggcacagctctggaaggaagacggggcggagagagggggcagtggagcacggagaggaccgagtgggaggcgggtggggaggagacggagaaatagaatgaatctattcaaccattcttgaaaacatctccaatccttttcatcttcctgcccaaactttgctgcctctccctgccatttggttatttgaacggatccgtatttggtgttcctactcccttccctcggttcacggagcctctggagggagtc

SEQ ID NO: 23264 - DNA, 868 bp, Homo sapiens
  chr4:164253272-164254140
  hyper
cgggtgtgggataggcgaactcgggcgccttcccagtgcctcggccttttaaagagaaccggggtaaaggaaaacttggatccccatccagaaattccccgggagcaggtggtgggaaagcccgaactccgcgtagggtaccctctcctttcacccgcgtcgtccccatacccttcggcaggagcccgcgaacggtccggtgatttggagcaacctgcgacctgcctgcactggagaccccaccttggtcccccagagccagtttcggacactcgcatcgtttttcttcccctctcatccttcaccttgtcaatgagagatttcgcagaagtctctggaaaggcataaactcgcaacttaccctctttggaatttgtctttttcgctcctgcttattaaagaaggaagggtgggaatggaagggagcagagtggggaagatccgctggtatttctcctgctcagatcctaaagattgatgaagctaggaagagacgcctccttaaagccgaactccacctcatcccggatcacgtgacggcgtcccgcgagtagcgcctgaagctcccccaaccccacaaacacctcacaaaggtgcacacctcggggaagcattgcctaggaattttggaaagaaaagcaatccaacagaagccacacattattcgacacagacctcccgcgcaggggaaaggaagccctaatccccacagtcctcgactccggggaaggcagggcagtttcccgaggcttgaaaaagtcggtgccactgtgcttttctttgtttgcaggtcagtgccatcttgtggccgaagtcatacccggctggagagctcgagcgccagcccaaaccaggaatcaaagggctc

SEQ ID NO: 23265 - DNA, 823 bp, Homo sapiens
  chr4:164264685-164265508
  hyper
cgaagcttgttctcaggaatactaagaacttaggggcacagccatcctcacaccagtccaagacttctcagagttcactacacagggttgagggctggaccggcaaaactcgatttgcccatcaagttaacttggtcggcctgggacccgaggccagggtgaagggacgacatcccggggccctgtggcttctccctagagcgcccaaacagcggcgtaggtctgggacgcccccggcccccggctttggaagaggctggcgcggagcaggcgccttggagcagggtctcgggggtccccggaacagtcacgtgttctcgagacgccgttaaacccccgccccctcttccccaccgccgcctccaggtcctgctcccgctgctgccgccaccgccggggtgcaggagcgatcgcgctgggccgcgctcccgggagcccagggcctgcagcggccggggcgccccgaggtacgggctcccgcccctccctgccaacccctttcgcgccgggtaggcctgcaccgaggggccgtggcgggtccccgcgcgggctgcgagtctgcgcaggtccctgggagcccgcacccgtctctggtgccagggcgttgtcgggggtcccaagagagcggggtggggaaggtgaagggagcgcggctggaaaaatggggattagggtggcggaacaggcacttgtcaggagtgaagagacagcggagagggtactgggctgaattctttcgtgccgagcaggtccctccggttcccaactcacccgggtggagcaggcgcgggccgaacccgggaggagagtgtcggggatccgc

SEQ ID NO: 23266 - DNA, 934 bp, Homo sapiens
  chr4:166793770-166794704
  hyper
cgcccacgtgagccatagcgccagcccatcggcaaggtctcagcgtttcctgctgctgcaatctgtaactcgattttggattttttttttaattgcagttctgaggatcttagttcttagcaaaactttgttggttaggagaccaacagtagtctgtttattttcttaccaaaatcgtgaagactcgcacacttttcctccattcctgcgctgctctaaggttaaacagcagcaaaggaaagaaatacacactcgctgtttatttggggggaggggaaatatggatttgcagctaagttatcacgatccttcgctccacccccggtctggcactctcaactgacacgtacatcatctattaattgctgtttgcgtacacagatacataatatattcatttttatctttggtaaaatataaatggaattgtcagcgcgctcctgtctgtttgtttgtctaaggctatcaaaagaagtcaagagaggaggctgtggtccggatcctgaccctgattgtatgaataagtaagcaggatgcaagtgattgggttagatggtgcgaatatttttttttttcaagttaggaagagggtaaaaagacaggctggcggggggaaggcaaacagtgcatccccaaatcctcacacttttgctctcttgcagtcagttgctttgctggcttctgcaggcttttaaggtctcgcggcgtagaaatgcctggcccccacccccttcctcggtctcccctttcaattcagatgtgctgatgtgcagaccggattcatcttctcggagctgcggcggcggctttgggctcaggcggcggcggctcgcgctcggccgcggagtcctggcagcagcggggacgcggcgcgggagtccgagctctggtggcagctgagcccgcggggcgccgctcgccgagccgcggccgc

SEQ ID NO: 23267 - DNA, 1090 bp, Homo sapiens
  chr4:176922585-176923675
  hyper
cgctcttcgaggtgactcgtgggaccctgcgtcctagtgctgggtgtgaatcggctatttcacacccagttcttcctcccctccgccacacgcagtcacattcctggagctattccaagctgcctccgctaagcaccgaataagcggaccctgcctggaaacttgagcgaagctgaactgcgccgaactccaccgtccagtgacccgagccagtgtggacgcccttttaatcacgctgtttacccaggtggaatttaggaagaatcagccttcagcctcaacctcaaaccttttgtgcaaatgggcacttcgtttggaaagggactagaaattgtccccagtctggccctgcaccagcaccttcctctgctcaaacctgtacaaagtggaagttttaggaagtttccatttctcgtgccccgtttcaacttgctccccaaagagaacatgaaaacgtgggaactcgggaggacagagatctccctgtaatcgcctcgctattcggatcctgggtctcttagtctttctttatttcccaaataccgcccccagcacggtagaccggacccccaggcttgggtcctggggccggcgcagaggatcagcgcccaagcgcagccccccaccctcccgacccactgtaaacagtcgggcaccctccctcgcctccaggtgccaccccatcgccatcgcctctctcccagaaaaaaaagtccggagacaagagggcggggggcgggggacgccaggcgcggggggaacagagctgggaaggacgcagtctgaggccgaggaacattcattttctttctataatgcccattcccgaggccgagcctttgggcgaggtgtacgcgcccgcccgcgcactcacccatggcccgaggtcctgcttctctgcagtccccagaggagagcgagtgaccagacgctgcgcggggccaagttctccaagccgcgctgaggctcctcgcgccctggcaagtgacagcctcgcccctcccagcggagacaactcgcagggcgcctggcgactctgcgggcgcacagacccctccctctttccacctgcctcctctgcgagaagccc

SEQ ID NO: 23268 - DNA, 615 bp, Homo sapiens
  chr4:176986744-176987359
  hyper
cgctataaaatgtgttaggtggtgagaacgctgatggttcaccgttttcctccactttcagcctcagtgcaaaccctctgcccaaagcctcgctccagtacggaggagctgcgccttcaacacactttctctgttgccaggtaaccacttctccctcagcctagtctccaagggtcacgagccacttccgcctccccctctcgggcgctccaatcagcgacctgtgtagctgtcacgtgggcctctggggcagaccctggagatcgggctcgcggcgccttccatcgtggctccgcgctggggcttgcggagcacgcttcccgcccctcggagcccgcgggcccggccgccccgcccccgggcgccctgagcgagcaggcggggagggcggggagggtccgcgcgttggtggtgctcgcctcgcagctgcgcccgccggcttcagcaccttccgctgtccgccgctgcagccgcctcctcctccaggtaagaagccggtggggccgcagagataccaaggcaagctcaggattgatgtgggtgatgctggaactgtcgcggcgtcatgcgagaggggctctgacctccctgtgatcgcggaccagggtaatgtac

SEQ ID NO: 23269 - DNA, 504 bp, Homo sapiens; identical to SEQ ID NO: 6175
  chr4:177116437-177116941
  hyper

SEQ ID NO: 23270 - DNA, 985 bp, Homo sapiens
  chr4:180979285-180980270
  hyper
cgccctggctcttgtaggtgggtctggagtgtcacgtaggcaccccaactcgcgccgggggccgtggtccgcagactcccacttcattgccccggaggcctgagcccgccccgcccggctgtggctgcacctttcccgagagtcggggcagcggcggctcgaaagtggaggcagcctaaccgcgtagcgctgaaaccaccattcacaaatgcaaacccctgtcttctgtggataaacggtggcggcgcgcgtccgagcgtccccgaggggctgtggggagcccccggggagagcaggaaaggaagcggggtggcggtggctaggaagcgactgagccttctcgcccggccggcggaagagggagccgggtcccggcgcgccgagccagccgcccctcgcgcagttcctcggccgcggcgcggggttcgccccgcttctccccggcagcagccggctgggtgcccccggcacagcacagtgcggcaggcggcagcgtcctcccctcgcctcccccacattccctcacctcagccaaggcggcagccccggcgtccccgcccgcccggccccgcgcccccgcccggagcgcccccacccgttgcgcccccgccgggtcccgccgcgcagccccgccacgctgcagctggagcgaccgccgcggccggccccgcagaccggggaggaggaggaggaggggaagccggagagggaggcgcggggaggagggatggagccgggaggaggaaataaataaataaaacaatcacctccgcgccaataagagcgagggagagagcaagacgcgaccagagagccaccggggcccgctcgcgcgcctctgagaggctgtccgcgcgcgcgcgtgtgtgcgtgagtgtggatttgccgggactggagctggaaagttcaaactaaacgtgttgctctcgccgagtgccgaggccgcggcggaggctgcccaacttccccgggccaagtgagtggc

SEQ ID NO: 23271 - DNA, 360 bp, Homo sapiens
  chr4:183727549-183727909
  hyper
cggcttctgcggacatggaaaagccgtcccaacatccggcggccccgtgggcaggggtcctgggacgccccctcctgcatccccgggcgggccctgcaggggatggcggcgatttcaggaagggctccggcgccccctagtgacgcgcggctgtggtagggaaagtcctgcacgccaaaagggcagttcccgggccagaaaccgaggtgaaaccgaagagaaggcgccgccgctcgccgctcgccactctccaccccaaccgcggcggggccggctctctgaccctctcttccccacctctgctctgccctccgagtttcacacttaaagcggagacttctgcttcagcaccgccgcacc

SEQ ID NO: 23272 - DNA, 324 bp, Homo sapiens
  chr4:185089657-185089981
  hyper
cgggggtgaaagttacaggcagacactgcccgcggggctccggacagcaaggagcgagccctctgagcctggccacgctggcccgccactgccctctgctggcggctgcggtcttcaccaccgcccgcagccgtccccgtagtccgccgagaggcgccaggctgggccagccttgaattctgggtttgcttctcccggtttgaaggccacccccaggattcgcaggaatctgacagctgcttgtgactgtgctgaagatgccgagaatgtaggcagagcccgggcagggccggcgggcaggcggccacgcgctgcagcaaacgc

SEQ ID NO: 23273 - DNA, 964 bp, Homo sapiens
  chr4:46391693-46392657
  hyper
cgcgaggcaaagacaaacaggaaagtgtctctatcgggaccaacgtgtgcgaccctacctgaaacggcaagcagaattcggtgttttcttccttttgccctgatcttgacgagataggaaacttgggagagagagagagagagagagagagagagagagagagagagagagagagagagagagagaccgagactgcagcagccaagagagcgtggagcgatgggctggtggaagccggagaggagcgctaggagccgcggcggcggcgcgaggtgtagaaggaggcgaaggcgttcgtagtggcggtgatgggcggaggaggaggaagaggaggaggaggaagaggaggagggggaaaacgatgacaggagctggggccggggggggaaattggggggacgcgggcggaggcgcggtgcgcgccggcggtggcgggcacgagccccgcgcctggaggaggaggagtcaggccgggtaggagggctaaggaggttcccgggaaggcagggccccccctcccccccctcccccccccccacacacacacactcccctgcctcgatccctcgatccctggtaactgaccgtcgcccgcctggcactagcagcggcgcagacccgggcggcgtcgggcgcctgggtgcgctcggagcgccgctcccctcgcccacacctcgccggaggagcggagcccacgcgcagcctcgggctgctccccgaggccgcttgctggggctcccgagaggccccaaggttcctgacagagctgctgttgggtgttggtgtaaagccgggaatgtagtgtggcggtgatgccctagatccctggggccgcgccctgccgcccgtcccccaacatcaccctactgtggagcgacgtggctgctaagaggtaaagaggttccgctcctgctggagggcaaggggactaatcacgcctttacttagtcatcaacgcatccac

SEQ ID NO: 23274 - DNA, 748 bp, Homo sapiens
  chr4:47034214-47034962
  hyper
cggaggcgaccttctcccgggccgacacaccctctgcatagtcactgcatcacgcgtgtgcccacacctgttttcccaggcagtcccctgaaaggggtggtggggggagcagggagggagcccgttaagaatggagtaagggctgggaagcccccagaccctccccagcctgctgtcactgagagaatctgttcctaatgtggcccacctccccggcagggccccccgtcgacgttgggatgcggatcgatgtcgccagcatagacatggtctccgaagtgaatatggtgagtggcctcccgaggggcccggcggttcggcttacgcagatgggaaatggacaggtccctttgccctctgcgtttcattggcggtcacctcgcccctggcccctgaggtcccactccgcacccgctccccgctccggcacacacacccggtcgcccctggtttgtaatttcgacacacacgggctactgcggtgttccaggggaaacgtgctcggcactattttgggaaggacgagtgactgttgcgccgtggatctgctggggcggagtctgagcgttactttagctgggtttccctgcgtgtttggatgaggagggcaccatctgctggcagccgggcggcctgcactagggtccccggaccggtggtcggcagccatcacctccccaggcgcggtgctggcaatccccatggccctcgcagtccgcgagcccggatgcaccaaggccctgccacc

SEQ ID NO: 23275 - DNA, 433 bp, Homo sapiens
  chr4:55094321-55094754
  hyper
cgatgaaggtgaacgcgctcccctcccccgctgtcgctgggaagccccactctgcccaggtctggttcctggagcatcagcgccccctttccctcgccggcaggatcgtttcctcccgacactggcctctcgccttgggcgcagggtttggggctcagctgtcaattccaaggaattcgtagggttcgacccacgcggcgggagggaacggagggagaatcaaaaggcatcctcccccacgacgcggaggcggtggtacgattcctcaaacgcccaagcttgagctttttttgtatgcgagatagaagccagggcaacctcgcccagataaccccgaaaacaaaggcacgaccagataagtgacttcaagggagtaaaggtcgttctatcggagaacgttccaaacctacacagaccctcttttctttgtacc

SEQ ID NO: 23276 - DNA, 923 bp, Homo sapiens
  chr4:6201800-6202723
  hyper
cgagagtggaagggggacccagagggggcgcgatggccggaggagggggagatggacgatggggcggggcggcaccggtcgccgcgtcccttgccgccaggtccgcccctcggtcgccgggtccacgggttccctctggccagcgctcgcctcccgccccccggcgcacctgtacccacctgctcggcgctcaggcccgagccgggcagcagcagcggacgtagcgagcgcagccccgcgccgcatcctccggccgccccctccccgctgcgagcttacgccgctgtcgccgccgccaccgccttaaaaaggacaaaacggaacagaaaatgaatgcatgcacaaaaaaaatcgtaaaaagcaattgaggaggatggcagtcgcgcgcgcggctcggcggggcgggagtcgagaggccgcggcactggtggccgcgatccgggcaggcggccggcgcgtgccgcacgcgggtggctgcagctccctcggtcgcccgcgcccggctcaggcacggcaccgcccctccccccggggagcccctccgattggtctgtcttcctgccagtcaggcaggagggcgcggcgcccgccccgccccgcccccgcccccgccccgggcagatgccgggagctctcctgccgccgtgggagggggagctgagctgccggagcgtgcgcactgggccagcgggcggccggggcagggctggggtcccggcgctgagcgcccccagccgcgccgggcagcctggcgcctcgctgagtcggagcaacccccggcaggagctttcaggctctggtcaagcctcgggacccgggaagctatccctgccctcgggggctcgagcctggagtggggcttgcaggtaaagcggggctggggccgtcctggccgtcagtggtcaggaagacgcagcgacccc

SEQ ID NO: 23277 - DNA, 692 bp, Homo sapiens
  chr4:76555346-76556038
  hyper
cgctgttgtgatttcttctgcggacgcagtcacgagtccagggcgaagcaggcagggaggcaggtgggcctcggtccgccgcaagctcacacttaggaggaccacgggccgcatgctgtcgtcgtcaaggcaacgacctcactctgtccccaaccataggcacaaagtcttgggagacagatacggcccaggtcagaatgcgttcacggcaggcaccaacacctgtgaaggccaagggctagagagcaattagctgggtgagaggcaccacctcccagctcgtaaggcgcccagtacctggagcctgggaacctgcaccgctccaactacccctgggcgaaggcgttggccgcggagctgcaagggggggcggtttctcacccgccccgagagcgccaggcctcccttcttctgattggccgagccgagtcgtcacgagccatgattggctcagggccaaccaccccgccccttcacctagggctcggcccaggttctgctccctgacacgcagaggccctgcgtccccacacgccttggttctcgtcaggaggcgcctttctgccttccccagcgggaggaggcgattgtgatgcccacgcgaagggtaaaggtggcggttatgtaggactgcgaagactatgcaaaatgcgatacggtttccctcatagcatcgccgctggggcaggggc

SEQ ID NO: 23278 - DNA, 477 bp, Homo sapiens
  chr4:87281183-87281660
  hyper
cgtgatgctgcctgtaccattgtggaacctaccagaggagacggacagagggcttggggaatggggttgctatggcaaccgaaaggagcacacatgacgtcaaagcccagagaggtctagggagggggatgagggggaaacagaaagaggaagcgtctatgtgcagctacagctactgtgttttccggtgaaatgaggaccaggcaaatgtaaaggaataaggttcgtcggcagccaacatcagcaactacgacatcaaggcagccagcctgcacaacctgaagaaaagatccattcgatgcagttctggccctttgcacagcagcacggaggagcaaataccagcagagcaaaacaccactggaaatgcaacctctgcttttcaactatctcttgtagtatctctaaacgtcaaacaagtaagagatggtaataacctcagaggagaagcaggcatttgagtgtcgcctgaacccc

SEQ ID NO: 23279 - DNA, 616 bp, Homo sapiens; identical to SEQ ID NO: 6185
  chr4:90228673-90229289
  hyper

SEQ ID NO: 23280 - DNA, 840 bp, Homo sapiens
  chr4:96470377-96471217
  hyper
cgcctgtgaggaacacacacagacaccgggggtgggggtgggggtgggggttgaagtggggggagttggaggaggagggaacggagggaggaagcttgggcaccgtcaggcgctctggtctccaatctcagtgttctcacgccggcggagagatgtcccggctgtcgctgctgggtggccaaggaggttcacatcctagagtagggcgcacgggtgcgcgaaggcgctcgccaaggaggcgtagagggcgcagcacaactcctctggggggtaaccgggggcgggagcacgcccgcccgccttatgtaagcaaggattgcagggagatcagcgcccaggagaccagctgtgggtttgcccgctgaagccgaggcgagacagaccaggggacgaagcggctgcggagagtggcagcgcgcctgcctcccgcggtgcgccagacctggacgccgggagtgcagcgggcgcgccccgggccactaggctgtgtccagtggagctcagcctgccgcctgccaccttcttcgccgcgccggcaaagcctcagccgaattccctaggactggactcggtctacgacttcgggtctcgcggttgacgaagccggtgcgggctcgaactgaagtccttcttggttggggaagaaggcatgaagcttttgcactgccccagccggctgctgtcctggggttgtcagcgccagtcagactgctttatgttctgagcgcgtatgacccctttgcagtggaacagaaactaaaagctcgacggaaactcattctgcaacagtgctttctttgcgtgcatgttggtggctgacaagggtggtgatgcgatacc

SEQ ID NO: 23281 - DNA, 1830 bp, Homo sapiens
  chr5:100236036-100237866
  hyper
cgggatctggagccgaacctccattccagtttactcaaaactcaaaactggcctctccacgtggcttgggtagaaagacagtcaatgagatgatttgatggttttatgagtcaactcctccaccagaagcgctgtttgggagttgaaacgaaataatgagctcgggtcacaagcttttccacgaacctttcatcctggagaaaaaggaaagtgctcagggagcctagctgccctcgcattgttcctggcagctccaactccttgcacagtcttggtctctcaggagaccaaggcagtcaggacgctacagggcacgggtgtaagcgcgacgttcgcggccagccctctgccttgccccactgtaattgcgggttttgattaagaaggaggagccagttgccgactgagctttgaaagtgactttgggtggggggtgggggtggggtgggggtggaaggaggggagggaccaaaagagcctgagtcctgcaataaaggtttccccctatcttctcactcattctttccccctcgccgccggcgctctggcagcaggggataaccccggtgcgcgcctctcttcctgtttggtttactcaagcgcctgccccaacgccttctcagtcaagctgggaggaaactgcttcagcttgaaaaggatgcgggcaaaagcccagcccgactagctcaaccgccgcgccagtgcccgcctcctcttccttaacgcctagggctgcgcccaccagccggcaacgtccaggaaagggccacaggagaaatgacacccgtgcaatgcggagtgtcccggctccgcttccccgcagggactcgaggtgcgctccttttcctggccacggtttagggaggctcggagatggacacctcggcagtatctggcgaccctcttctcactcgctccgcccactcctgctctccagggtcccagccaagggcccgaaccctcggagtcctagtgagccttggccgctttgtctgggatcaggcttatcctcctagcccacggcccgggagggaacaaagagcctcgaccctcaagctctagcctctgcctctcatcggagccccatgcgcccattcatcacctttctaaagacccctttgtctgcctggcaagcacaggtctgcaagggatgcccacgcccctgcccaaagtcctgcttttctaacaactgagctagattggattttcaagccacccagtcttgtgtaaacgacctcataccggtcttttttaccccctcagaatagaccatgtatagattcgttgatgcatgacgaccattccagcccattccttgctagctttttcattctcttccagtccgctttgactgtgctactgttttcctggttttctacagaatagcaagtccttctgtaaggatcaacctgcatcttgctcgcttaaataaatgcttattacctagggagcaggaatattaagaaatggagtgcaggaagtttaagagcatgtgtgtgtgttagcagtcccatctctctctctctcacacacacatacacacacacgcaagggctgttttctttgttttaatcaatgtcagagaaaaatataaactgggcaggcatctctgctggtgtgtagtttctgatagaggacgcctccaaaccggaacagggaggatttccgaaacaggactttgaatagagttgacaatcaggttcacatcctcagaaaaagccttccaagctatgtcagcaacacaaagttgcaccacctcctgggtaaacttcaaagacacagaggccagcgggtggaaggaagtgtgatatttagagaacttagtggggc

SEQ ID NO: 23282 - DNA, 779 bp, Homo sapiens
  chr5:101631722-101632501
  hyper
cggacagcgacagtgaccggagcttctcttcggagacattgggaggggctgaaggcagagatggctctggtgacttctggggctcctggggcttctgaagctcctgtggctgagaattctctctttgggggtcagaggacaaggcagagacttcgatttgggagggcgacgcagacaagcggcgcaggatgtctgggctggaggggacaaaagccaagttctcaatacctttggcgctcttcatgtctggatgggttctcccgactccggtgcttcagagcagcagagccaggtccctctctggctcctcccacaggcaggtgacagcgcccccgtgcgggaagcttcccgcctcctggccctccagcctccagcgcactctccgccaccgcctgaaccttcctactccagctcgcagctgtctggagcgcagagcgctgagcgggggcgttagcgccccagcctgtggctttggcgctcagctgtgcctcacccgtcgcctcaaggaccaaccggaaggcgcggcgtgggcgtgccacccggcggcggccgagtagagggggcgagagttctcaccccacagccttcgaccggagtccgcctccgcccaagcccctgcggttctgacctgagccttcagcccgcagcgcgcctcccttgagcccaagcactgggaacacacagagactgtgggagtctctggccataagctccccttgggtgctgacatgaaacctgtaaacagttgcatcaggagattgttcaggaaactatcttgc

SEQ ID NO: 23283 - DNA, 815 bp, Homo sapiens
  chr5:113391392-113392207
  hyper
cggttaacacccgaaattcggccttagaatacacacacacgatggaatttgttccatatctttttttttaaccttcgataggcataaatccaaacctaaaattaaaatcatccccaaatttggttttgggaatcatgttggttttcacccttgagcggcgttccctccccagtgccgcatgctgcttaaggactgttactttcttggggagggaagtatcaaatggaaacggtgtgtgtgtgcgcgcgcgcgtttatttttggcgcatgcacacccctcggtagcctcaaggtcggcgataccctgagcattcgggcccccgcctgcaggactcgctcctgccagccaaggactcaagaaggagggagtccccagtcccggcggggcgcctgggattcggttcaatatttagcacagtcagtaccgaagcaggggcagccaggtgggagctgggcgcccaaaagttggaccccaatcagcagcgagtgggcagcgggggcctggctcgcccgcgcccgcgccccggagctctccggctggctctctgctccccgaagctggggagccgggggcgctctcccgggccgcaagcaggcacggaatttgacgcccgagaggcagatggtcctggctaggactcctgattcttctcagatggaaacagtttctcccggtgaacctgccggaattctcagtggactcgatcttcagctttgtccactggcgcatttcaccaaggccgcatttaccgctttgaggcaaatttgagcttcaaatggagcgggactcctggttgcagaacgaggtaaggtcgc

SEQ ID NO: 23284 - DNA, 872 bp, Homo sapiens
  chr5:113696433-113697305
  hyper
cgaactccaacaaaactccagcactgtccgtgggcagcgactattcagcccaagctatcattcttaatttccctgccaggctgcgactaccggggtgaatcagcccgcgccaggcccctttcccacccgccgctgcagttaggacttggcaaagatgctcgatatttgcgtatttgtgaccggtctttgctttgtgtctgcgctgcaggtgaggaggaggaagagaagcagaagagcagctggaggccggcggtggctgagcagcccccacacctttgagcgagccgcctgcctctccaccggcaaggaagccctgggacctccggattcgggctgccggagggcctgagcgccagagcccaggacccggcggccgggggcgccatcccctcatgttctggagaaggcgcaaatgtgagctggcggtagcggggaaagccctccgcccccgccaggggggacccgggaagcccggccggctctgtcggcagactgcggggatcccctcctccggccccgcccccacccacccccggccggggtgccgaggcggttaaccctacccgcgccgcagcgcacttgggctagagcgccgcgcacccaatccagattccagagcctgccggctgggaaagatccggtctcggggtcggctatgatcccgcagcggccaaggcagggctcaggccccgggattctccccacacgctgctgcactggcgcagccggtcgccaaactttttctccccaaagccagtgcccccgcagttacttggcgggcagccggcagcccactctcggcgggatgatctgggagaagcgggcgtgggacgagggggctgctgttttgcagccctgcgaggcgtgcagtc

SEQ ID NO: 23285 - DNA, 958 bp, Homo sapiens
  chr5:114515360-114516318
  hyper
cgccctcctctccatcttccgacgctgggctctcgcccttcggcgtccgagagcccctattgctgcccagctggccccaaaagcgtccgaaagtcccctcttggcttatttcagagatgccacgcaataaagaaaaggcggctactttgcattccgcagctgctgggacgcccgggctgcgagcgcggctcctggattccagcctcccgcccttcccaggcgctggaatggacacggacgcccacagtggcgggccaggtagtgccggagtcgggggcccaggccgcggcgccccgcgcctcatcacttaccttgcctttagctatcaattccatgatgtagccaaattcactcatctccccagactccgacatgtttacaccccttcacaaactctggaggaccgacgcgggtgtatcgaatttgtcctttcttttctctttttctgtttttagtctgagttttgccgagctccccgcccataagctgttaaccaggaaaagaggggaagcgccggggaaagcaagaagcgggcttgggtgaaatgaaggccatcgagggctcccgggcagcctcgcccggcttgctaggatccgggtgcagcggtcggggctgcgcgatctaacggaacaaacgagggcggcggcggcggcagcagaggccgtgaaaccctcaccaggcggagccgggcgcgcggaggccccgcctcctcgggggtcgcggcagcggttcggaccgcagcggagacaaacaaacgcgcacacaaagcgggtccgcactcggctcagcgcggccccagctagacattccccggcctttatcgcatgccggcaggttggccgtccccggctctcggcgcgaagatctggaaaaaagccccatctcactgtctggaggtgcgagggcagacagaaacgaatacagaggaggcgcaacaaaggggctggctgccagcgcc

SEQ ID NO: 23286 - DNA, 1335 bp, Homo sapiens
  chr5:115151516-115152851
  hyper
cggtctctccgcatctccgcgcccggggttaacgatggcttgggagtgtgggcattgctcccgaggccaggggcaggaggactggtggtttagaagcagaggggtttgcgggagagaagagaacagaaaatctcgcagacgcgcggtggcctcccttcccggcgcctgtccgccgttcccggccggaggtcagcaaggccagtaggatccaccttccgcctgcgctgtggccgcggagccccaagcgagtcgtgccagccccgcggctggccagcgagggggcgagcggcggacgcagcgcggcccgagcttcccgagccagtcactttgggctgcgtcccccacgtccattcctcctcagacggggcgagtgggcgccgcctggcattgaagctgcagcgcgctcacctgtactggtcgaacttggcgtacattgcccactcggtggggtcgctctcgtaggcttccatgatggcctgcacctcctctacattgacctcatcgccggcaaagagctggtgcaggatgcggatcagatcagccagggtccgtggcttcagcacttcggtctgttccatctcgtggggagctggctgcgcgcgcgtctcactgctgggctgcggtggaggagctgagcgagccaaggagctgggggcgagggagcctaacagcccgctagaccgctaagcagacacacacgcacaaacccagcattagagtgccgaaacgtaaggatgtcgtcgcagagacagcaagagacccacccccaggcccctggcagcgcagtggatccgggatcgctggagacgcggtgcacacacaaatcaggttcagatctgtggggttcatcctcccgggccccttttaagcgcttggagtcactaggaatgtaccaacggccctcggagggaggacgaggcggagagccacccaagaaaggtggcggaggcggggagaccctgcgggcacggctcacgcgcacatccccggcttccccgggctccgcgccttcccaagagccccgttgtctccggcgtcccagggatcgcgtgggctccgcgcaatctctcccccactttaacggcgcgttttagccgcccggcctaacgcctctccccgctccacctccgccgctgtggttcgcgacgctgggacgtagacaaaaagggtcggaggagatggctgcggggactgacgctgagtaaaggaggaaaagaaaagggaaggagagggacacttcttccaaatagagaattgtgaggagcctgcgaaaattgaggatggattccactcctaggccagagagtgcctgttttgtcgattgaaactatccac

SEQ ID NO: 23287 - DNA, 303 bp, Homo sapiens
  chr5:115910923-115911226
  hyper
cgtagtgcaggagcgagttacaagaaaggttttgttcatcgattttcttaaatggaaaagttttaaaggatgagggtaagtgaacggcgagcttttctgattctgattactgttatcaagaggtagattccagaagcgatggacgctctacgtagttagatgaattggatagaagccggtgcggttaaaaatacacttggaagataagaacacagctattaattacgcacatacacacgttaataaagcatgtgaagtaagcaaataaactacagtgcagagaatggcgtttttaacgacggc

SEQ ID NO: 23288 - DNA, 228 bp, Homo sapiens
  chr5:115911467-115911695
  hyper
cgtcgggccacaccacgttcccctccccctgccgctgcgccccgaaatcaactgcgcgccgcggctcttgctccccaagggggcttcgcagatggtacggatcctagtcgcaacctttaaacaaagtaacatcgggcggcccagcagttctcggagagatatttactagtcatggagttggctgagaaaagcaagtgcggagatcggggtctcagtcccacttaggcc

SEQ ID NO: 23289 - DNA, 266 bp, Homo sapiens
  chr5:115911850-115912116
  hyper
cgcaccactaccaccacctggaaaaggtagggagaatggtaggaaaaaaagaaaaaatcagtacccctgctgttctccagagctgtcagcaggggccgctatccccacctttctcgggcaaaggcctctatagacctggggtagtggggggcgcggccctaggtgcgcgcgcagcccccgcggcttcaagagccagcctcgggagggggttggggagtgtggggcggtgggtaggattgcgctttcccgcgggttgggtgggggcc

SEQ ID NO: 23290 - DNA, 836 bp, Homo sapiens
  chr5:11904142-11904978
  hyper
cggctcccgacgcgagtgcgcagcgcccggcccggcggcccctccgagctcggcgagcgcagcgccccctgcccggctccgcgggctccacgggctcctgcgggctcctcggggctccgggcgccgccgccagccggccgggctgagagagcagccgccgcgcccgcagctccgctcagccggctgtcgccgcgggcgcgagcctggggccgccgcggcgcccggcgccgagcgctcccgagctgcgccccgcgcgcggcccgcgccacctgtgccgccgccgcctcagccgccgagggcgaggctcctcccgcggcgcgcggcagcctcagcctccacctaaacctcggcggccggcccgggcgcccggctagtgagggagcgtccgccccgccgccgaaaccggccccgggtgcggagcatgcccagtgccgccgcgagagcggcgcttcgccgcgcgcgttccacttctcctggttttcgcggcagcagcggcagccgcgggagagaggggaggaggccgcgggttgggagagggccgagcatccttgggaacgcacgccctggacctgagatgggtggatgctccggagctaggcgaaagctggaagggacccgggaagggatggaaccccaggttactccgcttccctaattcacgtgcaaggcgctgacagttgactctggtggggcagatgtcagcctgcaacaaaggaccagggtgcgaggggtcctagagtggccaggtgggttgggggagggaggctggcggaacgtgctggtgagcgcaggtagatgctcttgcagatcctgtgattccagagctaaggaggcac

SEQ ID NO: 23291 - DNA, 1713 bp, Homo sapiens
  chr5:119799821-119801534
  hyper
cgaagggcaacgtcgaggggactgcaagcgtcaaccctggcgcggcagcacggcgcccctctccgcgggcggggagcgagcgcgtgtgcgcgagagcgccgggcggcggcgggaggaggcgcaggcgcgctgctcgcccgtctgcagccccgagccgagcgccgcgtctcgggagttgatggcagcaccactgtgcggccgcccggccgagcgcggagcgcagccactcgccgctgcccagggagcgcccaagatgtggggggaccggggcggcagcggccgtagcagcgccagggacgggggcacgcagcagcctccgctcgcccgcctgtcctgacctgcctcgcttgcccccaaagaatgtcagccaagtccaaggggaacccctcctcgtcctgtccagccgagggaccgccggcagcctccaaaaccaaggtgaaggaacagatcaagatcatcgtggaggatttggaattagtcctgggcgacctgaaggacgtggccaaggaacttaaggaggtgagaggcgcaggggtggggagggagttcggcacccttcgacccctccggggtcccctttccgattttcagcagggacagccagatttccaaactcctgggaaactacagaaaaggcgcctgcagacggactttctttgctcctggagtcctgagaggagttgttgttgcactttttaatttttttttttaatcaggaagaaatcaactagtgttttaatcgatggacctgggctggtgggagggatgaacgcacgcgtgtctctgaatctgtgtgtgtgacgacgggggagagggttagctgggggtgtgtcggcagaggaagtcgtgagcagcccggctggagcgtgcaagatgctcctctcctgccctattgcttccccagagtcctttggcaagtccgctgcctatctgtcagcctccccaagtcagggctgaagaggggccgggttctgggccctgggccagatcagggagggcagcctggaggaagcttggctcagactaccctccctgtctctcgagcctcgctgtagggaaggcgacccgggctgctggcagccttggggctaaggagggggtctgggactttctcactttctcagtttctgaagcatcccctgctctcctccgaacgtcgttaccagtaactctgggccttcccgccaccctacctctgcttccttccttccaccctgtcgccacttggcattgaacccgagaagcaggacgcgcaggagagtgtatgtgtggccggggtcttgccattggcgtcctggctctctgcagctgggactgcttcggttcttccccgcttttcctatcccacttcggttcagccctactcccgcccgcccctagccccaggtgatccagatggaaagaagcagagaaggtgtcagggctgaggctgcgtaactcaggcggcggctccgggcgggggcgggggccgggctgggaggggtggggtctcccgagccaggctggctgccggcggcgtcgcggagctggtagcagagtcccagcgcgccgctcactactgaatggggtcctggtgcggttctcggtgagggagtccgcagctccgctgcgtgagagctaagactagaacttcgaaggtggcggtggctgcagcgggaaaaggggtggggcgtagtctaggtccaaaattgtaatcctgtttctgaagccaac

SEQ ID NO: 23292 - DNA, 1550 bp, Homo sapiens
  chr5:124082318-124083868
  hyper
cgtccgctagtaacgagacagaatgtgctaacatcgggataaattagtgaaagggaagaaagaataagaagaaaggactgaaaatctgggctggattccgcctgttagtcgggaagtggcatttttccgcccgtcctgacagatttgatttcttgaactaacttaagagaaaaggagggggggagtagagggaggaggaggagaagaaagggtgggatgagaaactgggcaagaggagaaaaagaaaggtgtggaggaggagacagcagatgattcagtgagctgataaaccagttataacagcattcgctcggggcggggggcggggggcttggggcggtggggtggggaaaataacggcgtttaaaatgggctcagtcttcgaaacctaaaggatgtgatgttttcctgtcttatgttgttttaagaaaaaggaactgagttcctagtatagctcccgaggggagtggaatcctctgtcgctcaggtcagccagtcatgtggtaattcgataattagagtcaaaataaggtttttgttttctttttttttttttttaaggcgacccttttcgggagtttttccctcttatactcgcagcaaacggtgtgtctcccttttatttattttttctctcctctcccttcgcccagcccctcctgtgtttagtcagatggccccggagcttggcttagtatttttaattagctggcgtttggaagctaaaagcagtaatgaattgttgatggattggaagtggagagtcgctttgctggaaatgtcggggctgggagagggggatgggcgagttagtaacaaccaaccatctaaaaggagcgattttgttacagtgcaagcctttcacatcacgtgaggatcaagggctcaattggttgtcgtgagaacaaaaatggtgacaagcgtatcaagaaaatactgatctggtctttaaaaaaaaaaaagctgaaagtctctcccctccccctgcacacactcccccaacctcctccccccgcccccccgcagtgggcgaagctacaagttatgaatgtgaaacatttctcggagatctaggatctccgaagttcggaaggagcgaaatgtaatgagcacaagagcaaagcagatgttttaaagaaacactttataaacctttcctcaacttatctccaatttgtcggctttcccaaggggccagggacggggacgcctgggggagggagaagggtatctccgagctacttggattttagggacccccacttcatgtattaaacaaagaaaaaccttttgcttgctccccagcctggtcctgtaataaatacaccattgttactatttgtgggtttgtttgggttgggtggggcttttattttttctcttaatggtatttttgttgcttgcttttttaaggagatggcgaatggtaattataaccattacatgtaatgagtgactattcccttgtttaatattaaattatcgggcactgggatctgacaggagacagaaatcggcttgttctgcccttgcccccattttcctggatc

SEQ ID NO: 23293 - DNA, 740 bp, Homo sapiens
  chr5:125930492-125931232
  hyper
cgtcgattctgcatagcacacaaggacctaaaatctaagtttttgttttaaaggcaccctacacgagaaaacttttactgtggagcttcaaaatctcccatgctactaccgcatccagcgccagcggggagtcggtaggtcagtgcccgcccggcctcctcgagcgagccccggcggctgcagagatttcttgagcgcccgcgtacctctccccggcctccccagcttccattatacacgccctcgttttcctcgcggagccccagctctttcagccacgcatactggggctgattgatgaggagagtggacatgaaggcggcaggcctgctccaaggtccagagagcttgctggtctttgcagcgtgcacacacagcgcgcgaggaaggcgccacatactgagcccgggactcgggatgagcccaaggccctgagagctgctgaaatagagccccgccccccgcccgggagaacccattgggcagacccgacccctcccactgggcacgaccccgccaccgccccgtctgcccctggtcttccggaggagcctgcggctgaatcctgcctggaacaatgggagtgctacagggaggagtgggctgctgccatctggtgaaagactccgggagccacagttccagctgggaattcttttcagcaaaatattggcgctgaagtacagtaggctatagcaggggttctgaaactgtaaaatgcgtgtaatgacctggtcgtc

SEQ ID NO: 23294 - DNA, 562 bp, Homo sapiens
  chr5:126626239-126626801
  hyper
cgcgaccaggcctttggcggggtcacccaccaggcggtggaagccgctcaggcaggggcgactcacgatcgaggtgcagcagtcaggccgggaagatcctgcatgttgcgctagggactgcgcgcggcgccaagcgacaaccccccagcggccactgccccggcagcagcagctgcagcagcggcaactgctcgaatcccggccccggctcgggttacccgcccccaccccctccagcatctcgggccagacagagaaaaccttgttcaagtttgcagcaagtactttcccggtgcgcaaaactgggcgactgggaacgcgttgagacgttcctctttcccgcttctccacctttacgcctgaaagaagactcccaaagattgctttcttctgggacgctgcttggacgctaaccgcgttgattggaacagattttgtgtcttggctggctttgggtgaagaccggggagaaaaggttgcgctgcgattctcaagatctctggacctgggtaagagttgggcaaactcaactccggcggctcctggaccttggccggacgcc

SEQ ID NO: 23295 - DNA, 114 bp, Homo sapiens
  chr5:134368716-134368830
  hyper
cggacaaaaaaaggcagcgcggagggagacgcgcaggagccggggcgggggccagagccgggctgctccgggcttcggccgcgcacgtgggccggatcccttgatcggcgttcc

SEQ ID NO: 23296 - DNA, 1290 bp, Homo sapiens
  chr5:140855386-140856676
  hyper
cgctagcgcgtgtcctgctcagagagcccggcgctagctcattcttcgtgcagttattggctgggactctgtgtgccgctgtcggccaatgaagacgctggagatcgggcccctgcccgtcccctttctgcgccccgggatgaggcagagactgaacagccggcgagcaaatcaacggcatccagaaagccatgtcggactcggcgcccagcgcccaagcgctaacccgctgaaagtttctcagcgaaatctcagggacgatctggaccccgctgagaggaactgcttttgagtgagatggtcccagaggcctggaggagcggactggtaagcaccgggagggtagtgggagttttgcttctgcttggtgccttgaacaaggcttccacggtcattcactatgagatcccggaggaaagagagaagggtttcgctgtgggcaacgtggtcgcgaaccttggtttggatctcggtagcctctcagcccgcaggttccgggtggtgtctggagctagccgaagattctttgaggtgaaccgggagaccggagagatgtttgtgaacgaccgtctggatcgagaggagctgtgtgggacactgccctcttgcactgtaactctggagttggtagtggagaacccgctggagctgttcagcgtggaagtggtgatccaggacatcaacgacaacaatcctgctttccctacccaggaaatgaaattggagattagcgaggccgtggctccggggacgcgctttccgctcgagagcgcgcacgatcccgatgtgggaagcaactctttacaaacctatgagctgagccgaaatgaatactttgcgcttcgcgtgcagacgcgggaggacagcaccaagtacgcggagctggtgttggagcgcgccctggaccgagaacgggagcctagtctccagttagtgctgacggcgttggacggagggaccccagctctctccgccagcctgcctattcacatcaaggtgctggacgcgaatgacaatgcgcctgtcttcaaccagtccttgtaccgggcgcgcgtcctggaggatgcaccctccggcacgcgcgtggtacaagtccttgcaacggatctggatgaaggccccaacggtgaaattatttactccttcggcagccacaaccgcgccggcgtgcggcaactattcgccttagaccttgtaaccgggatgctgacaatcaagggtcggctggacttcgaggacaccaaactccatgagatttacatccaggccaaagacaagggcgccaatccc

SEQ ID NO: 23297 - DNA, 760 bp, Homo sapiens
  chr5:160973379-160974139
  hyper
cgtctctttaaccagcgacatattactagggtcattgacactaaagaaagaaatgacaataagcaggcatcaataaggaagcaggcatagcgttttcagcatcggatccctactacatttccctgctcacagaggtatgcagacagaacccttcaaagtgagaacggaaaagagaaacgctgggcacacttacctctgcgcacagacagcggcgattattaaggggaaggaccaaatcccaaagtagccccttttccgcactctccacatccctttagtttttgatggaattgagggtttcactgaagagaggagatccaacttagtctgcccagtgcagtaattctaatgtgaggcgcatgcgcacggcgtaccaaaacatcaaaggggaagcggcggctgccggggaccgagcagatttccttgtttaaaaaaaaaaaaaaaaattaaaagggaaaaaggaaaaacatgtatatgtataatacatacatatttgaataatatagaaaagtcaccccacagcagcatccagaataaaatttttgttgttatcctttcgttaagacaaaataactacagcgtctggtaagtttcggtagttgcaagaggcagttttgcaccgagcgggttgtgggtttttggtgtgtgtgtgtgtccttttaaatatgcaaaaccagattagaaaattagaggagagcaggtgtggcgtgccagcggaagataggtgccggtaagcccacttctggtctcagccggacac

SEQ ID NO: 23298 - DNA, 686 bp, Homo sapiens
  chr5:22852983-22853669
  hyper
cgaagtttcccaaagcaaaaccacgcacaagctcctaattcagctgccagatctgtgtgcagcttcgttcagcttctcactacgctaggcatcactttattaatcatgtatgaatttctgtgcatgcaccctgaagcgatcacacacacgcggtgcaatcccaatcaaaaacggaagccttacctgatggcagaaaaggcagctgcaggagcagcagcaccgacggccgcagcagggtgccaacagctcagccttgcgcggaaggtgagacccttctcttctgtttcccctttccaaatcactgtgccaacacactgctttgcattttgtccgttttcattcaaagaaggttctccaggccgggcagccagtagacaccactttcttcctggaagaggctgcctctcttctcagaaaagcctggacccctctctgtggctccctccacatttacccttcagatcaataatgctctcggagcggctggagctcaactgcagcggcgagcggcgagccaatgggggcccaggattccctcctgtcatctccccgccctcaaaacaaaacacagcgtgcctttgacacatcattgagtagtgaaaagtaattgaatcctatatttgaaatgtattttgtttgttctttttcccccctagcgttcattgtagaatgctttgaatgaatcc

SEQ ID NO: 23299 - DNA, 1488 bp, Homo sapiens
  chr5:37836968-37838456
  hyper
cgtggagatcctcaattagaagtgtggcgaagctggcaaaagactacacagtggaaaactccccgcgtcgccagaggaggctcccggctgcggttcccgccctcggccgagcgccgccagcgcccggatcgagctcccctcttcccccgggacagggagggcgcattcttccctctgagcgccgccgggaccggctccagtccgaggggctctttcgttctcggtatttgctgggcgggggaaaaggggggaggttgggggactcggcacacacagcgtctactaggacgtttttcttagagtccgtgtgggctccacccctcggcttctcagtttgtctctctatcgctttcccaaaacacatctacatctgcccgacgcgcttctcctcaaccatgggcctttgcccgcggtgcaaactgctttacgcgccgccacgtgcgagaaccaagctctgctcctcaagtgacgggggctctgctctgccaggtgaccgcgcaccatttctcgtgcctggcaagctggtccccttctgggtccgggaccaccacgtcccggcagggcaaaagcagcaggccgtgggcgccggcacctgtgggtccccaggcctggggaggcaaggacgcccaggaaagccacagaagtgctcgcagaagcagccgctcgccgcgaggcacttctgagttcccggcagcagggggcaccagaaaccgtctgagccgtgtcgcgcccacgcggcccggaggctgtgttatcattttagttataaaaccggagaaccaccactccctctacgagcctcccgaaatcccattagcccgggaacctgtggaggtccttactggcatctctgcttttcaggctcccacccctccattctcgctggttttcctctccccacttcacctgagcgggtttcttggcaacctgctttcagaccatccctcaccccttccacgcgtcaccgtgacagattcgcaggaggcagcgctcccgccgtcagtgcccccgcaccttcttgtgcctggcaggctgggaggtttgtttgggctttgccttcaagatccaggtctcagagagagaaaaaggaggcggtggggcggggagacgggtttgctataaactcggtttttttttttttttttttggcggggggaggtagagacagaaattgctggaagatctattgcttttcttaactatgcttcgtgtccttgactgacagaggacttattctcccctcaaccccccataactgcggggcccaagatgagggaaggaaaaagaatttgggacacttctcgcaggcaaactgggaaagcggtctgtttaaagggccaggttccaggcccgagagcacccgaattgctagcgggaaagggctagggacacggcggacttcccagagatcggacacttgttacttgttgaaaaggcgccaccttccctgacaaagcgaaggcgcagcgaaacagtacgagtttggtc

SEQ ID NO: 23300 - DNA, 1687 bp, Homo sapiens
  chr5:42950747-42952434
  hyper
cgcattcgctggtacccagatttctacaggagttaaacgtctcctgagcagctaaagcagagcttactagtaagaaacttgcaatgactaaggaacttgaggcagggctaacccggggttgttaggattagaattccgaggctacaggaaacccggaattgctgagatgtgagtcacagggtgactcagcctcgttacgatgaaacagtaacttcctactacctagaaatcgcagccagggccagaccggtgtttgtcctaagtcggaacttgattgggctgagaaatcacattgtgactattccacgacttgaacaaggggtagaaatcgcaggcaccgcgaaatagaaacttcctaggaccaagaagccaacgacgcccgaaaccgtggggtcctgtcacagaaaccccagcagcgcagccaccggactgggttctggaggccgagccgcagtccgtgcggcggcgctgggaagagaaggcgccccggcagctcccctgccaccggccccgaggagcggctggctcccccagcccagcgccgccgccgcccggtaactccaggcgcaactgggcgcaactggggcagctgcgacaccgaatccctcacatctgcaacctgggtgctgcggccactgagaaaatggaggcgcagaccaacgagcggtgccgcgaccgagagacctcggctggcgaaatggtggtgccgggagcctgcgagtgacgccagccggcggggttgtcaaggacaacattcgttttgacgcagccaatggcgccgtcaccaagaaaccatcgactctgagaaaaaagagaggttcggccaccgagaaactccgtacgacaagtgctgtggcagaaaaaccgcctactccgcgccacaggcaaaacagccaatggaaaccccaggtgctgcgaccgtgacaccggcactagagggtctcggatggagaaagcggcgcacggagaccaggaaactatgtgtagcacaactagcagaaaaccgtctggtcggccatccgggagaaagcgcggatcagaaacaagcgacttcgatgcagggaaccgcgcagccactgaagaaagtgacccacgtggcagtggtgccagcgaaacactgcagtttggacggcagctgtggggatgccacagagaaacatgcactgccactgaagtacatccagctccgcggagctagtgttcatatgatcaagaaaccgccagttgggctctgctagaaacttttagtcctcccttaacggctatcctacccacaacagacaatgcctttacccagcacctagcggtgctgagacccgcctgggccagcacagagcgcagagcagtacgggtacggagaaacgccggactcagtgaaaccagccttgcctccagcggattccccggcttcgccggacgccacaggcagagtgccgcggggaaacctctggctccctaaaccgattagattgtgggagtgggggggacactcacaagttgtgtggaagggaaccagcggcaatgggacccggcgagcacttgcccgcagcaaatgcctgcgctgctgcaaaaaaaacaacttttggcgcaaagaatgttgcggccagagagcatccgctgtcgctgacaaaggagtagcaatggcaatgagaaaccgccggcgccacggccgaccgcggcggctcac

SEQ ID NO: 23301 - DNA, 890 bp, Homo sapiens
  chr5:42994313-42995203
  hyper
cggtttagatctaacagggatatcctaatcacagaattgcttcttttggcaatacttgtaatttctgctttgtagggttggttctctctaatttttgcttatttttaaatgctctttttgtgtcttttgctctgagaacaatgctaccggtagtttccagtgtgtttgctttgcctttttatttgaattttagaatttattattttaaaattttatcttatttaaatgttattcatttttcttctactaattttgagtatcacagcttcgtactccttgacttgcattctctcaggagctggggagccaagctcggtctccgcttcggtggtttcaggtcccgggttctgtctggcggctctgcttctaatgcggagctggcggttttgcagcaacgcttttgccagtagcgcccactgagcggtttttcagttgctgcaccgttcttagcgcccaacggaacgtttcccgtacgcggagtccataagttgtctgtgtcgtcactttctcggttctggcaccgctagtatctcctaggaacttcctaaacccgttttacggtgcagaacggtaattgcaccgagcctctgtgccaactagtacttccgtaataccgttagccggctcttttcctgtcacaacacattaaaacgtgttaaaacacattaaacggattaaacacattaaacggattaaaacacattaaaacgtcacaacacatttaaacagagtcggtccattcctccagacagtatgtttcgggatggaagcacccctcctaagaatccgcagtttctttctagcagcaccgttatggcgcctaaacggatatttgtttggcaataccagcgctatccgctaggtgccggcgcttgctgagtctcagcgcc

SEQ ID NO: 23302 - DNA, 814 bp, Homo sapiens
  chr5:50265052-50265866
  hyper
cgaaaagtgaaattttaatatcagtgaaagcatcggagggactcggattgaacgcggcagctccggaactggacaacagctgcgtggtgcagccaatcccggggcctgtgggaacgagcgaccgatctcaggaccacgcgggcgagagcaaggagcctcccggccacacagccacaggcgctgcggaacccagcccggactctccccggctggagtgtgcgaagggcttcccgcccaggggcccagggtggtcttagtgaaaaagggatggcgctgcagcactgaccacgttgccctggtttctccatttctccttcccaagtctctgcctctgtttccccatgacccggaggacgcgcctacggaagagacgtctggtcgagggggtgccggggagcggaagggggaggggaaggtctcatccctgggacgctgacacccccctccccgcggcactccagctccgaagagcgagcttcggttccgcccgccctccagaccatttgcttattctcactattgttttaatttattgtgcagcctgttgcgccgcgggcccggctgagccatttggggccctctagatgccctgcagggcgcctgtctccggacgaccaccacgcaggagcagcgggggcacgcgcgtgttttcttgtggataactgcctcggacttggcggggccggtccccacctgaagctcacctcaggcagtcgctagaagttccaatccaatcgtgagctttcctctgggagggacaggatccccttcaactcctgaggctgctcctctgggcgaatcccacagtaattgc

SEQ ID NO: 23303 - DNA, 1621 bp, Homo sapiens
  chr5:57877796-57879417
  hyper
cggtgcttttgggttccggtgatgaatgtgttcattttatgtggcttgctctgggtaaataacccagtgccctatcagctctgcagcccgcggccagcggcagtgtgtgcgcgctaatgacggcggaaggtgcctgggggagggcctggggaggggctggccagcgctatcgcgcccctggcacttcctaagagactgagccctttctctgcagctgcagcttggattccacgctttccctccagaggaaagaagccctccatctaaatcagctgtcttctccacatccctcctttttctctccgccagacgccacccctaccccttctattgtgttgtgccttttcattttagccccgcttcctacgtagagccctaacctcctttgtagcgagggcacttgagaatttctgaacctcgagttgtaatggagctgtatggaaaggtaagcaggcgaaaggagttccttggggtgcttagccagaaatctcgctttcacgcacttcggtgtgcgggttgtgtgtgtgactatgtacgcgcgcgcgacttctcagtgcaattatgcggataaaccactttccttatgtgtgtaccgttaatcgtctttctcccctacgtttggtgaatgagattgtaaaactgccccactctgcctaaggaaacgtagaaactttcccgattcggatggggaggggtagggcggagagtcccagagaccagctctggcttcgtttgcattggaaattagcacaaggtagtgttgtttcctaatcagaaaatcaccatctacttccgaaggcgatagttagcaaagaaaaatctccagctgagataagctggggtcacattcgcctgcccctggcgaggaaaagagcaggggagactgggagaggtaacccaggagcgtttggaaaggagtagggaggctccgcggccgagcccgactggcggatcgagcctgtttaatggtttgcttgcttgccgggagttgtagttcaccgctcgcccgtttgccgggaacacccggagggcgagactacagctcccaggagtgcacggggctcctcggcagtacgcgtgtgcggcgccaggagaggacagctccagtgctgatgttggagccggttagcgaaccccaagagtgcagagtgtggagcgtggagcgccgggactgtgcacgcttgaccggaagcccagaccagtgcggtcctagccagagagaaaggacatttgccaacaatgagacacgaagcgcccatgcaggtgggtccataaagaaagagtggcctcgggaggaattgaaagagatgcttttccccttgctccgcgcacaagcagttcaacgtaaggaaaggtctaggcggtcacccgcggagatgcggctctgtgacatgaccctgggaacagagttgggtttctttacgctctgtgtggctgtgattggggctgtcttgatgagggatcgggctattcgcaatctttctaggctctgtaaagaggataagagtgtctgtctaaaatgaaaacccaagcaaacaaaagtcagaggagcatgcaatctcgtgttggcattgatctcctctcttggcatccggggtttgagatcgcggtgaaaactcac

SEQ ID NO: 23304 - DNA, 987 bp, Homo sapiens
  chr5:72529324-72530311
  hyper
cgaggggtgtcacggccagggctttgcggccccagacgtcccagcggctcgcagggggcgccaggtccgcgcttccccttgggtcttcgagaggcgtgtgcgcaggacgctgccctctgttgcccaaagcccgcaccaggctcctgggcttccgcgggcttccgcaggcctcaggcgaggggcggggacgccacccgcacgctcccgagcgcagggagggctgtcgccgaagcggtgacccacgcgtggaccccgcccgcgctgggccgggccggtcccctgcccacccgcagccctgctcggccgcgttcccagcagccgggaaagcttcctccctcggtcaccgatccaggccgctggtccagctgtcaaaacagggggtgtctctttcattctggctcacaaagtcccaaaggggaacagggggccttaatgcttgtgtttggacacaagcaattatccctaattattctttttcttttgagcctgcccgtcccgccggcgagcccgccgcggaacaggccccgtaatcctccctggtcggcggatctcagtgggctctgtgcggcccgaggctcgggcgctttcatgtcactgcgggtttagagctgattcaaactcattgcgatgggggaattaaccccggggcccgggctttcaggggcctctgataagagattatacgtgttgatggcaagcttttcttggcaaaatgttttcaaagggcttggagttgttaaatcaaagcgccattgaattgctcgggaccaccccctcccccgcctcttgcccttcccccacctccatctttttcccttcatccctcctcccccatcaccgcccaggactgcccaaggcgagcggcccagcctccgggagtggcgagtcaccttccttggtacgattttcccccggtgcctcgcccgggaaggattgtttttgtaggtgctcctgctgctgggcactttggtaccccttcccttcccc

SEQ ID NO: 23305 - DNA, 1732 bp, Homo sapiens
  chr5:76925469-76927201
  hyper
cgtgtctgtgcgcgcgcgtgtgtagcgtctgagcgtgagcgagagtgcgagtgtgtgtgtttctgcccacaaaccagtccattggtgtctgatttcagatcctgagtcgactccctggtacgtaaaatggcgggaaggatactttttgccgggcgcgggaggagggtcgcgaagtgtggggaaagaggggaccggaggggaggcggcgggcgaggggggtcgtaggcgtcgcgtcgaaggtgtgggtgggaacgccgcccgtcagaaggccaggaggagggcgcgagcacggccagcgcaagcagggaggccagggtggcgggaagggtgggctgaggcgctggagaccgagccgagggcgcagctgggtgggaagggaagaggggcggccgggagacgggggaccgcgggcgatcgaaatcaggcggaggggaggcctcgcgggctggggcttggggtgagcccgagcgagtggaggagagaggcgaggacgaaacgagacggggcgaaggccggggcgggacggggcagggcgccggggtccgggtgcgcgccggaagggcctcggggcggcccccggggcggtgctgggggcggagcgggccggggcgcggctgcattaagtgaagctcatagagactgtgtgctctagcgccttgcggcggagggaggcgatgctggtgccccgccacacgtcgctgctgtccggggagctgcagagctggggcgaaccggagacgttgctggggccggggagggaggcgggcaccatgccggggaaggcgggctggtagaggtgcgactgcagccccgcgccgttggaacccgccaggctgttggacaggcccatggagttgggcggcggaccggccgccaggctgcactgggacagcgactgcgccatggcctgctgcctgcccagcgccggcggcagaggcagctgtgacacgccaggcatggcggccgccgcccagcgggtgtcgttggcgtggaaagagcacaggctgtcgcccatggcggcggcagcggcggcggcagccgacgggaactgaggcaggcctggcgtgggcagcagtgtgccgggcgcacggaacacgttggtcgtctttttgcgcttcttccacttggcgcgtcggttctggaaccagacctggagcgggcggggcgggagacagacagggagctattagccggcccggcggctggggagttggggcttgagccccagaaacccgcctcggatacagccgctctgccctgggaggaacaagtgccgtaggcccgacaagcccccatacccagccggagactgtggctccccaccaactcctggcaactggcgccccctgcacccaccaagcgcggagtcctgcgctcctaagagctcgtgccccgaagagtttacgcactgtgcaaacacaccaaatgtgtgcagtcttcaccacgcccctgcacattctgtgcactgcacagattcacaggtctgcagtcaggcatgtgtcaaagttcgacccacaggtgtacaaatgaagataaacgtgtacccatgtagcttaatagcatgccttataacactgatgtgctatagaattttcagaaacgctggaaatttggaaattgatgacaggctgtggatgacatagtttcaaaatcgaaagacaaaggaaaacccctaacgctacggttgacagagcggagaggttaatacagtgatctgcgtgggaaagtgaac

SEQ ID NO: 23306 - DNA, 1026 bp, Homo sapiens
  chr5:76940861-76941887
  hyper
cgtcccctccccgcaacccgagtgcggctaattccgggcgtctatattcactcaattagagaaatctacagagaagatcgatcttccatctgcagacatgccagcttaacaaattagattcttgtttcgtgcaggtgatttggtgacagttggggaattagaagtaataagttgttgtgtttgagcccgggcccccgccccccgcccgcgcccctccccgcccgggggcccctcggccgcgcccgccgcccgggcaccccctaccgcaccccccagccggcccgcgccgccgccgccgtcgccgcatcccccgccgtaattagtgctgctgccctccatgtgggctcgattaaaccgtgatttagccgaaagaaatataattatggctgcaaataaaataatcagcattgaagagcgatttccttaatgagatggagcggttgcacgtcacggagtaaaggggtctcattaagaggtggtaatgaggcttgggtggatggtgcagttacaaaatagcccaactcctctgcaggccgggcccgtccgcccgaagtggccgccgcgtcgccttccagcggtccggaggtgccgcggtcccagaggggactcgggcccgccccgcccggcccccagggggcgcagcgcccgcagcgcggcctcctcccggcgtctcccgcgccgtcgggccgggcgggggacacaagccgccgcagcggctagggggccccgccagcccggcccgctccgcctcggctgggcggccgggttggcacaagcaactgccaggcccccgaacactggagaagccggcccgagggaggggcccttgcctggggcgggtgccgagggtcagtccaggaaacttctggaacaggtggaagtcctcccgggtagatgtgagctccatcgggaaaagggtgtcacaaaaacaggtgctcagaggcaggggtgccaccgcggcaccccagaaccccgggtcagctcgcgcggacaccgcgtctgggagtcctggcgtggaagggcctc

SEQ ID NO: 23307 - DNA, 835 bp, Homo sapiens
  chr5:77147851-77148686
  hyper
cgcgccgccgccgcgggcaccgccggggcttcagtgacaccaggcacccgccccgggccgcgggaggaggaaattccctgcaaaatagcaatggttccgagaaaaggatcacaacaaaatattgaataaattcccttttaatttatttgatcattccacattacggggctatgaattgctcaaatttgataacaagtactcaattcaactcattatgtaagttaaattagacttcgataaaatttcagtggcgcgcagtggttcctcgaatgaaatgtaatttgtgcaagaatttgttgtatctgtcacaaatatttccaattagcgaccgtaattatttgatagtttctgcaattatggcttaaacgggtgaatttgggactgtggaggaccctaattggcctaaatttgatattttgcatatttgcataatgaggaaattggtagaaaattgtgttcattcatttgtgaaaaatcctatgaattttatgaatttgaaagctctgtttgtgcagactgtgactttgcctgctgatccctgaggagctgacgctgaacgcctgaatgggcagcgcgccaacttcgctgctccaggaggggggtggggagggagaggaggaggaggaggatgaggagagaggggaggtggaaggctgtggtaacggtgggcggaggcgggaccatggcgcatgctccgcgacgtcccgggccgcgggcggaatcccccggctaacctccttgggggtgagactgggtgggatgggggtcggtgggggaagttgcatggggtgttatacccgcccggttacaggccgctgccctgtagcataactgc

SEQ ID NO: 23308 - DNA, 662 bp, Homo sapiens
  chr5:80689558-80690220
  hyper
cgcagaagctctctgggctcctcacttgtttaatggaatgaaggagtcccgagagccacacatttgggaaccaccggtctcggccatgcccagcgcgggcgcactgttgcaacacccctatccctggctgcgcagggttcagctctccgcaagtaccttcctcgccttcctaccccccccagcccccagccgccgccgctcccgcagccccggtcccgcgcctccccgcagccccggcgcccgcctacccgccaggcaggcggtggtgtcgatccacttgagcagctgccccgcgctcagctcgccgcgcgcagtggcgtgcgccggctggatggcttggctcatgaccacctcgccgggcgccggccgctccatggccagggcgagagcgctacgcctgcggcccccgacaccccaccatgcccgctccgcccgccccgccctccccgcccagctccagagggcactggcgccgcccgcccgggccgcgaacccctggccgccaggtggtgggagctgcgagtgagggggcccgcactgtcatcccaggactatcgcgagtgggggaaaaccagcgctctcgggtctcaggagaagtctgggaagtgcgcggggagggggctcccgggtagacaggtctggaaggcggctccccgagagcc

SEQ ID NO: 23309 - DNA, 1107 bp, Homo sapiens
  chr5:87956173-87957280
  hyper
cgctcaccaacgccggccaccgagcaaaacttccccgcccccgccccccacccagcttccccgcagggagaccctttccgttagcagcttttcactaagttaataacggtgtgtgtgtggtggtggcggggaggggggatttgggggttacacaatatctatatcaatgatattgatcacgtccagggaagaagcctgggcaaaactagagacaccgagtgtcagcaaaagaaagcttcttaaccacaagttgcgtgccgcctgaggaaggtgccctgtggcagggggtggccgctgggagatgcctgcctctaaccgacgtccaggcgtgactaaacctcgacgccacccccattcacaagctcaactcagggattcccaagcaaccgcagaccggaggtggcgcagaggcagtgaccgaggtcgctgattaggggccgagaggctggcaaataataattttaaaaaaaaaaaaaaccggaatagccttcgcggacgcagctcagcgtgccaggcaaaggacagtctgacgacccgcccctgccgagccccgcagcgcggcgccggtgtccagcagcctccaaggcgccgagcgcgggcacgggaacttgagctagcgcaaacttgggcggcctcccagcctgctacccgggccgcagcgcgcccccggcctcccagtcgcgcgccaacccgggagcgcgcgcgccggcgcaccagctccatcagctagaggagcccgtctcccgggaaacaccaatcagacgcccgctttcaggcgagggccgcgagccgcagcagctgcaggaggactcgggcagttggcggtcaccgggaggcgtcgtcctgccccgcggcgggccagccgccttcgctgctgccactgcctagcctaaccgcatctgcagccagtcacagagtcggctgtctcctctttgcaccgcccacgccaagtaccttgcaaggcggctgctaagcctggctaattttagatctccagaatgcgctatgcccgcgctcaactaaaaccaagtcaaaccatcaagcacagtgatgtgctgctttttgaacaaatatggctcaaaactccgtatttccctgaataaagtc

SEQ ID NO: 23310 - DNA, 2242 bp, Homo sapiens
  chr5:87969885-87972127
  hyper
cgcgccataggggtcatctatttgaggaggaagaaaaagcgggtgtgtgtgtgtgtgtgtgtgtgtgtgtgtgtgcgcgcgcgcgcgcgcgtctgccttccacggaaagagagacggagagatgtgggagggtgggggtggaagtatgcagacagagaagggtgggggcttcgaggggaaggtgggcttcctgcaacacaagcggagaggctgtcaggggtgtgggcacgggggtgcggggaggcggtgcaggaatccgtcccgccgagtgccgtcggcccctgtgggcctgtttgcgcgcctggggctggccgcattctgggcgcgggtgtctgcgtgccggggtggtagttccgagcctgcgcgcgtgcgaccgggtacgggagggggaagagtgccgtaaaaattcagacgagtggcccgtatgtaaatgcagcccgcggggagcagggaggcggtaatgacagccgctggcgctcagccccgccggcggcccctagctttcccgccaagtgcagccggaggacagacagccatgcgtgtccttggcgggagagcccccacccgccgcgcgcgcccgacccccgcgcacacgcacacactcccctcgcaggcgtggggcccaatggccacgaacatgtcaggaaaacaaagctggggctgcgaggtggaacgatgaaacggcacacttggcggccgagggcagagcggagaagtcgccaccacagccaccggcgcccctttcttgcctgctcgtagatctgccctccggcccagaagaggccgaggaccatttcttagctgccccagaggagggggcgagcagaggagggggcggatgtgcacagggaggtgccagcggtccggtgcgcgggcacgcacacgccggcgcgcagggctgccgcgggcggaaggaggggaatgacaaggcctcggccgcgtctcggagaggcactacctccgcgctgaggccgctgagtttcaagtgcaaaacaccaggccaaatccggcaaggcggcggctacagaatggctcacacttcaagcctccttcctcaaacaatccgatgggaaggacctggctgttcaggggaagcctttgctggcctctctttttacatggggtgaagtcgaaccccaatctaggagccctggcctagatggctccgcagatgagtcccagacgtggccatggaaagactgatctctctctgctcagagcgcctgcctcggtgctcactagcgcaagcacctcccaacacacatacatacatacacacacacacacaacacagcactcccatcacattaaaacgcgcgctcatgatcctgccgttaatgaagccgaggcgcataatgagtgcacaggtaaataggtaccgaaaccagaagacttcaccagtcggctgggcgatttacctctccctacagggagcacttgtagttatcgtgttttaggagtgatttgctgttgtctgtggtctctcgctcctcttcttgtggagagaagccaaaaaatatatatgttccgtggtcagagtcttctttctgataagctacccgagcattggtctaaaacatctgttttatctgttgattttggtttgttgttttggggagtgttgcttttctgagggaagcaaaagaacgtgtgtgtggtggggctggaagctcagggcaagagtctgcgtgtgcggccggaaggctggcgagtctgagagccgcgcggtgcagaaagaaggcggcggcttgtcctcccccggggccggcactggtcccttggcaccccggcctgggctcggctactgccgccgccgcccgcgctctcgggctccgccggctgccgctccgtgttttcccccatcccggcttcacgttcaaggtttagctgcgaggtcacgtccattgacgtcagctccctgtctccctctacgtccggctacatttacatacatcaaggaaattagggcattaaaaaaatatgcaaatcctgcgcgaagaggagcgggtgcattcctggcgcgatcgccttttattgaagcttttaattaaaggggccagttggcgagcccctgaaacaaccgccaaaaccccccaaaagagaaaaataaacgctgtagccttcgagaacggttgtttcggctcctgttctgtgggcggctgaggaccgccggctgcccggctcggagaagaacaggttagaggaggcagctccagcccatgcataatcagggctccgcggc

SEQ ID NO: 23311 - DNA, 915 bp, Homo sapiens
  chr5:87975991-87976906
  hyper
cgaagctgggattttcaacctcttgtttattcgtaaagcccatatggaaccccggttgaatctcccctcttcggattttaccaggaggccctcagtgccccaccgccgcccatggcacgtgaagagaaaggagggagagttgggagccacgagagaagccggctcggagccgcttccgtcggggcccatgtttcgccccaacagacccgtctctcctttctctccccgaaggtacttccttaggccggcagtgtcgctacggtggtagccaggtgagcacgggcacagtcccggggcgggggcgggtagagcggccctctctcgggagctccggtgggtctgcgaacctgccgggagcggaaggctgagtggcgctgggggcccgcgcggggctcctggctcccgccggcaggggaacagcgacacctactggccgcatgggtaccgcgcccgggccgtcagggctgccctgggacggggtgccgggctccgtggacttgggaggccgcgggaaacttcaccgaaggctctgcggactgctctaggactcgtccgccctggagaagacaaagccacgctttctggagacccctgggaggactgtaggatggaactgaacacacaggcacacacgcatgcccattttttctggggaaccggataaaccctcagatgcagttgcccaccgtcccttggttttatgagagagacccaagcagaggtcggagccttgacctcctcaggttcatgacccaggcctcttcaccgcctttcccagttcagcactgactaaagaagatatctttacaaattaggaaaagaaaagagttcattatcctccctgaagcggggaaatgagtgagtcaaagacacagactcacaggcagcggttggcgccgggcacacgaaccggcc

SEQ ID NO: 23312 - DNA, 431 bp, Homo sapiens
  chr5:87986873-87987304
  hyper
cgggtgttaattaacgcgctaatttgagcttcaggagcgggaggcggccggtagcaccgcgagccgcgaggggccagtgacctctagtggacatgaggagatatgcagcgcgagtgagcgtgtagcagagaaaactctttcctgagcagctgctcgcgtgtctcctctgaatccaatgcaagggagggacacaagtccccaatttaagggagaaagagccgtcagcaagtggtgtcgaccaaagaccttagctcttctgatgtatctgaaatctaaacgcaatttaagcgcgcgtgcacacacacattgttacttatcagtttttccagcgagagaagaacatatggaaagggtttgagaagtgagcgtgaataactttggtttctgaacctagagaaaagcagggctttcaaagctccggaggcaccagc

SEQ ID NO: 23313 - DNA, 809 bp, Homo sapiens
  chr5:88184868-88185677
  hyper
cggggttgtggtggaagtggggattaaaaatctcgtcctgcgttttggtgcccacttctttgtttggaaagcagagcgctgggactcaatccggacggccctcaaagacccagacgagggacgcctctagtttgagcaactcactccgctgagttattgattgcaggcagcaacaatccctccggttgatttgtgtgaaaagtgaatccgctctggctgggcgttcagcagaggcgcaacagctgcaacgccatccaattattgccgatcctcccctccaacactgctctcatcacctatatactcttctctctgcccgtctctgcttccccccccttccccccccccttttctcccggccgacggagctgaaggggcgggggttccttccttggagtgtttctagagctcggaggctgctggtagggggtgagtgcgccacgtgcgtgcgccacgggcgagcaggaggcaggctctgggccctcctggggacctgctggacctgctggacctgggtgcgacgagtgggcggccacgctggtttggcgcggggaaggaagggggtgtgccgacttgtatttagttgggggttgtggaagtcacggctgggggaaaagcgtccggtggtttgttggtaaagagggtgcgtgatgggctctggggaatggaggagggcgcaacggctgtgggtggactgtggaaacgggcggtggcagtgccggggtagttgtcctgctggtctggttttgggatcctgggctggagaaatgcgatccaaaagagctcgggatgggctcagagcgacccac

SEQ ID NO: 23314 - DNA, 742 bp, Homo sapiens
  chr5:89854237-89854979
  hyper
cgaagggggcaactagaaagtttagccaaaggagacgattagaaagcactgaccgcgcacttacattgggacgcccaggcagaggcaagactcgcgcgctcctaagccgaggcaggtcagcctaggcgcctggctgctggaagagtccattagggatggccaaggcagggtgttcccgacgccagagcgcggacctggctgcccgctgcggagagcagagtgcgcagcccggggcggccacccccgctccgctggtcaggtgagcgctgccccgggagccatgggtcctattggagcagagcgaggatgcagagggaggaggcaagggagggggagaaaggggaggaggatggagccctcctcctgatcctgtagtggtagtaagaatcagcagcgcgggcaaggagtacggacgggagtcagaggcagagcgagggtgtgtggagggccggcggggaccgccgggagcgcgcggatgtcggtgttcctggggccaggtaggctatggctgaggggtggtgctgcgagcatcgctgagccccaggggagcgcctcagcatcagcacctgttgctgcaggtgggcggcgagggcggcgcggagggcgggccacagccgggcccagggaggctgggcgcgcacccggcgccgcggcctgcgggtaatggggcatagctgcccgcgtcggttctgtccaaggctgcggttttgcagggagcgttaggttcctgcaccccctaccc

SEQ ID NO: 23315 - DNA, 855 bp, Homo sapiens
  chr6:100441296-100442151
  hyper
cgtccggaggcgcgtacaggggacacggggatctacctggaggaagaactgaatttgtcttttctagttcaaaaaagccttcccgaactcttagcaaacaagccagtgatcgcctcctcgccttcgccacttcagttcagcctctttagtccccatggagagccgggatgaactagcccggcgcgctccagcggtctcggtcggggccgctgcttcccggaaagccactccctttttcttttcccacctgtgtttccattttctttgccgagtgtgaaaccagccggccacccacccgccccgctccgtctcgtaggtgcctccacagagccaaactttgtaccttctggggatggagggggatcccccagcaatcagacactaccggcgagccagccccggggaggggcgactggtggaccaggcgccagaccttcccgggcgcgcagcccacgggccctggggcgcgcccacgccagagcccggccctcgcgcggcagcccgcgggacgtcacctgggtgctcgcgtcctccccgcgcggcggacagcccgggcgcccttcctctctgcgggactgcaggtctatccgctaagcgcgcgtgaccaaaaacggctctcagcgggtcccagctgacggaaggtgggggaggagtgcgagggtctctgagacaggttgggagccagccccacctccatttccaaagcgggggtccaggcacaggaacagccaaacgcccgaaccagcggggttacctttgccacttcatccaatccgagcatcgggtgcgtcgtgctcttttctaggagcgtggggtgccttcgcgaataaaatctgaaggcatctctgctctcgc

SEQ ID NO: 23316 - DNA, 1358 bp, Homo sapiens
  chr6:108478324-108479682
  hyper
cgccccatactgaccgcggtccctcacctgctgactgattgacttataaatctgccccccacccacttgtctgtccattgaaggcaaattcgccatcgggaacacagtagtttctcaataactatctaatgcatggccacccttcccaggatttagaatatcaaagggacgtgttctttcctcccaaatcacctgcctgcgcttcccccagccgggtgccccagccttcacctcggtccggccaccacctcatcccgcttcttcgcggcttccaggcctcgggctgggatctcagcccctgcctgtaggtgcggcccagagggtgcgacacgcgtcggagcggggcagcggaggaggggacagggacgcggcagccacacccgcatctctttcccctctcgggcatccccgagggcccttctgcctccagttccttgagcccccgaagccccccatgcggcaagagcgagtcgcaggaacaagtggggaatcttggccgcggccccctcccccgccttataaaaaagaaattgacttttgtttggagtttgtgaaaagtggggctcggggcccagtcaatggggcgccccgcggcgcgggctgagtggagctagcgcgaaccgctcagccgcggccccaattaatccgccctttgtgcggcccgcccggccgcccccgccgcagccgcaccagcggcccattgttcggcctcgccgggccgcgggatttacccttttcaaacagccggttttgtccagggcagttcgagcggaagtttctcactgacaatttgccccaaatagatagatttgtcagaagcgaccttcgggaaggaagcaaaaagccaccggcccgaaggttgggcccaaaacagggactctgcgtcccacccgcggccgcgccgcccccccgcgcccccggccctgcagtcccgaagccccgcgggggtccagaccactgcacctgctgagccagacactccgcggacctgacctccgttttacccatctgtaaaatggagcagctgggcgctggcaagccgtaagtccaagagctttggctccaccagcgtgtacgacgctcatttcctttctctctccccacaccctttccaaaaactgtaagccagaaaacctggccaggcctccgcgacggcgagaaacggtcttgaaggtcggtcggtcgccgtaatgcggtccggatcgtgcacgtgctgtttcgccactgccctccggctcctccttaacaaagatgtcaaccgtgctaaatcacaggtggtgcctttgtaagaccagctattgtcccctcataagtcaagatataaaacgctttgtactgaatggcccatgatctggagc

SEQ ID NO: 23317 - DNA, 751 bp, Homo sapiens
  chr6:143247656-143248407
  hyper
cgtatattctatccgggcaatgacaaacggactcaggcctcctgaggtcagcgctcctgggcaccatcaggccccacttcgggagcccccggtgctccgggcccacctgactgggcgtcctctgagtcagggaggtgccagtgctgtggtccccgcgagcccaactgtcccctgacccccgggcttttccgcaccgtggagtcccccgacacgctggggccagtgaacccgggccggggcgcgcgttctccctcccggaccagctcccggcgctgggcccgcggccgagaaactaggtctgggccggccctgcggcggccgccgggcgcggcgagccccactttctcccggcaggaaggggggaggccgagagcatttcctgttgtgcagctgagccctgcggagacgtcattgcattcatgctccctcgggtgtcagcggacggggggccaaagttcaagccgcgtccagggcaggcagcgcgcggcggcgcggcggcgcggggcgggcggccagggctcccctctcccgctggcgctcccggcgcctccgtccccggccggcccagcgctgctaccggaggccagccctggggctccgcggggaagagctgctcttcctcccggaggaaaccgagctcgcaagcccagcgctcccagccgcagactgcaggctgccctcctccaccgcctggatttcccacggggaggaaaaggcgtgcgtttccaggtgtttggaggacgcactggcc

SEQ ID NO: 23318 - DNA, 186 bp, Homo sapiens
  chr6:166298476-166298662
  hyper
cgcctagactgcggtgcggccttcatgtgcacgcccctgccgccgtttaccgccaggtggcagcgtagaccaagtaaggaagccggcccacccagagctgggaactacaggggtgtgctttgtggctttcagactcacaaagattccagatgaacatgatgtctctttttaaaatcgatttgaaac

SEQ ID NO: 23319 - DNA, 1085 bp, Homo sapiens
  chr6:26216805-26217890
  hyper
cgccttggtcacagccttcttggaacccttcttcggagcaggagctgacttagctggttcaggcatgctgtcagaaaacaataacagcagtgagaatgaacgcacttaaataaaagctcgtgtctagagtctctccttttataggcctttcatgcaaataaagaattcaaaatatccagctctgattgggcaatgtgttagtgacgcatacatgtaaaatagccttcaccttatttcctttctaattggttggctcgtcaaagaacaattttaaccaatcaaattgcgcctttcacaattctaccgatgactataactagcttcttattcctccatcgagcccattctttttctttattcagtggattgttagttcttctgctgttaggaagccactatgtctggacgtggaaagcaaggcggcaaagctcgggcaaaagctaaaacgcgttcttccagggccggtcttcagtttccagttggccgtgtgcaccgcctcctccgcaaaggcaactactccgaacgagtcggggccggcgctccagtgtacctggcagcggtgctggaatatctgacggccgagatcttagagctagctggcaacgcggctcgcgacaataagaagacccgcatcatcccgcgccacctgcagctagccatccgcaacgacgaggagctaaataagcttctaggtcgcgtgaccatcgcgcagggcggtgtcctgcccaacatccaggccgtattgctgcctaagaagacggagagccaccataaggccaagggcaagtgaaatgattactagtcaaatccgtcagtgatcccgagtcccagaaaccaaaggctcttttcagagccacccaccttttctgtaaagtgctggaatacacatacgatgcctgaaatctcaatgttcactgtcctaatttttaacgaacgcttctgacgttactggtcagttctttattgaaatccttgctcacatttcatgcactaatttatcttactggtgtttctttgcagtaaaaatgcgtttataaaggtatacaagaatagaaaccgaggttgtgacaccaaggtttcactgc

SEQ ID NO: 23320 - DNA, 727 bp, Homo sapiens
  chr6:26313163-26313890
  hyper
cgaaactggctgaaagctctccacacctaattagtaggattacagatattgaagcctacaaatgcgcatttccaccaggataccttgtggattcttacacgggtcaggtccgctgacgtttagcacgcctactttaaaacctcttttctgtagggtcctagtcttcaagtaaaatatatgcggccatatagcagaggatggtttcgatccatcgacctctgggttatgggcccagcacgcttccgctgcgccactctgctgtctcgacagtccgctccgccactctgctgtttcaacattactcttgtcaagtatgtattagaggctacaattttcggcatcttcctaattttaaatgatttgttgtcgtttgccaaattatcctggagaatgagaagtgcacactggccatccatatggggctgcacgccacttccaaacaccagcggtttagaattcttcctcgataaattcgaatcagctgaggttgaagttctctaaaacggaagcatgtttcgagttatgggaaaacaaagtgcaggctaattggcataatttataaaggtgaaattataaatgcttgggcaaatttcagccattcctggataccggagggagtcgttattacttccaaacattttttacttgagattttcatcgaaaatgttcacaggaaaaaaaaaattacagttgcagcgaggaggcaacagaacctagaactccgcgc

SEQ ID NO: 23321 - DNA, 322 bp, Homo sapiens
  chr6:26322359-26322681
  hyper
cggagtgccacagtaccaggcctgtaacgatgaggtttcttcacccctccagtagtgggagcactcttgcgagaggcttttgtagccagttgcttcccgggtgctttgccaccggtcgatttgccggtcgatttgcgggcagtcggctttctacgagccgtggtatagagacctccttacttaccccgcttctcctttggctggagctcggcgagcgagaggcggcgctgggctggcgttggagagcgacggcaggacggctgcggctacgaacacaattgcagtattttttttttttgacagagtctcgcactgtagcccc

SEQ ID NO: 23322 - DNA, 147 bp, Homo sapiens
  chr6:26327821-26327968
  hyper
cgtggccgagtggttaaggcgatggactagaaatccattggggtctccccgcgcaggttcgaatcctgccgactacggcagtgggtttttgcatcttcaagcaggtttcatccgaccgatcgatatttcacgtgtaaaaaggctttc

SEQ ID NO: 23323 - DNA, 134 bp, Homo sapiens
  chr6:26328309-26328443
  hyper
cgcggtaatcccaaaacgtttttttctataggtataacgcctgtcttcgttcgtcagagggccagtggcgcaatggataacgcgtctgactacggatcagaagattccaggttcgactcctggctggctcgttc

SEQ ID NO: 23324 - DNA, 893 bp, Homo sapiens
  chr6:26331633-26332526
  hyper
cgccatacagttatctgagccagcgagctaaaaactgttgaccccgacgtgatttgaacacgcaaccttctgatctggagtcagacgcgctaccgttgcgccacgaggtctccgggacacctacgttttatttacctgtcaatctgattcatgaaaataatttcggtactggtgaagaccaggcagctattaacagatacaaaatagtgcctagctgcttccctctcggtaaaattgctgtccgcccaatcactgattttctctgcctctgaattgcttcattttcacctgttcttgtttatatttcattccgtttcttacctagttttccctgtatattccaaatatagacgtcttgggagtttcgttgtttttatctttatagaaatacattctgttgaaggtcagtcgctttggaatggggttgtagagaggaggtagcgaagagggaataatgaggatccttcctctcccaactcctcattaaggaactctgatcaaggtgagttttaaattcgtttccaaagttcactgcaggtcacaaccagtgtttccgttaacgaattcacgcgggggctggcaggttgtttgtgctgcatcttttctgagagataacggcgcctccctgtagcctccgttctcagctgatgagagagttgatttcacaccccgataattcttcaaaatcagatcgctggacctgaaactgaccctaaaaagaacaagaaatcctgtcatcaggagtaagtgggttattctggcactgtgctttgtttggctggttaaagaacctgccttgggtaaccagagatcggagttttctaaagtcagcggggtttgtctggggaccccgaatttacatacagacgatctccgcaaatagtgcaggggcc

SEQ ID NO: 23325 - DNA, 730 bp, Homo sapiens
  chr6:26577146-26577876
  hyper
cggtgtatgagaatactgctttaaagccgatcgtagtttaaaaaatgagcattaatataattaattaaaaccaaatctcctaaatggaacaagacttaaaaacccagaaacttccaggacgcacattattttggggattctagagaacgcagaactacgtgtctaaaaaggacagcgttccgtgtccttcgatagctcagttggtagagcggaggactgtaggctcattaagcaaggtatccttaggtcgctggttcgaatccggctcggaggacggtagttttgacctaccaagctaataattccagacaatacggtctttacaaaaaataaggatccaggcaaaaaaaatgtattagatagctctttatgctcaaacatgcacaagtaaaccatttttggttacatgagtaaaaaattttaggaataaactagaaatgtggtagcttcaccgaagggcacctgcgtagatgaaaagcagcgtttccaggaagtctgaggcttcactttttccttgtgaaatttgtacctcgcaacactcttcacctccactccctccctgagtctcctgctggctggctcttggtttctcgatgccattcttatttccggctactgatcgtcaaatgcagtttttattcccacttcccctctccatccccgacccgagctgacgttcgaccagcaaaccacagccaacgcccgcaacacagttcagttaagaaggcgc

SEQ ID NO: 23326 - DNA, 395 bp, Homo sapiens
  chr6:27059547-27059942
  hyper
cgcttcgggtgtgagaggtcccgggttcaaatcccggacgagcccacttcattttcgcccaataaggtttaaggatatttaaagtatttccccaaatagtcatacccaaaaatatgtactttcaccacatcaacagtagaattgtctaagcaggcgagtactgaatccggacttcttctaagggcagacaccggaatgttgatgcggctgcagctgcgctctcccacctctgtctgtctcttctcaaaccccgaaaggaagaccgtgggcagctcgtgcgcgcgtgcgtgtgcgtgtttaaccgagtgctggaggggaaacgtgagttgcagtcaaccggttatcttcctcttataggaaggaggattttaatttacacttttaactccagcttc

SEQ ID NO: 23327 - DNA, 773 bp, Homo sapiens
  chr6:27356293-27357066
  hyper
cgctatttaaaactctgtgaaccaccggtctaggctatactttgcagtgtattaaggtggtcttcggcacctctcgcagacccccttcctcttgcctctagcgccaacctctcagcctctcgcataccaggggaggggctttgcaaaaccttccacgaaagtgaatcccagcacagccctgctgtagctggctctcaggcgcaagcgcagagctgcgaccgctgctgatacgttgctcagtctcagtgtggtctctgttttgcaactggtcgtccgcgtcaggagacttaggtccaggcgactgcccagacaatgactggtcccgcataccgagcagagcatgatcagcagcagtctgagtggaagagtgcctgtgatcttagggaacctgatgggcgttggagcagcggttcgacgcatgggtttctctttaatccttccgacttccccaagcccagcgcactcaggttccgctccaagtgcgggacccgcccggggtgtgtcgggggtactcggccggaggcggccggtgagtgaggcttacagggccccgggaccaaggtgggtgctcttagaggttctggaaagcggaaacacgggttcttcgaaggaaacgggcgaaagggtcgcgtgtggtttggctgcaggtcgggtcaggaggcacctccacggttgggacgccgcgtggcgtggggtcatgaagcccccagcgctcgtctcactggcgggccagcctagtccctctgcggcagtgacagccagtggttttcccc

SEQ ID NO: 23328 - DNA, 629 bp, Homo sapiens
  chr6:27463044-27463673
  hyper
cgcgggaagcccttgtgtcggccaaaactcaaaccagattctgagcctaaaagacttaatgtcacaacgaagggacacagaggagacttttccacataatttttcgctccctccacctaagacacaaatcagcggaagcgattccgtgcctggaatcccctacgaacaccgtcgttcaccgaggagctttgggctcctggaagtccgaacaccccggatcagaggagagttggccatgactccccgtcggtaccggctgggtttggtgccagctatggcgagtacagaagcctggccggtcccggggcaggcaggcgctcgctggatgttattcgactgactggatatttgctggaaacgttaatgcttgtgcgatgaggactctctctaattgcagggcgctcaattaccaaggatagcctgacttcctttcctagaattctcatttcaccttagcatttccaaaaaaactcaccaaagacagaagtttgcacacgtcacctgacacgtcatttcaccaatctatcaaagggtgaagttccacagctgtagtcgtggccgagtggttaaggcgatggactagaaatccattggggtctccccgcgcaggttcgaatcctgccgactac

SEQ ID NO: 23329 - DNA, 766 bp, Homo sapiens
  chr6:27470822-27471588
  hyper
cgtggccgagtggttaaggcgatggactagaaatccattggggtctccccgcgcaggttcgaatcctgccgactacgagttcgaggttttagataattaacaacagaaaatttagaagaaagaaatttaagccaactcacgtgttgcgaactgaatttgtttggtacttccccgatcctgaaaccccacaacaatggagggtggaagttactgaatacctactattttcataagattatgggtaccttaattagcagatacctagtcattttcccgttagcggtacctttgtacggttcttggggacgcctctcgtttccctgccttccaaaccctcctgaagcctatacctgttacaagtcttgatagtgctttcctcttcatggaaatttagtcctagtcagaggtccaagtctttggtcaattatcagtttctgtggaatcaatggttcaactgctttggtcacccggtctcgctggttgcaaatgactagaaacactgtcagagatctcgacaccaccacaatcgaaagaccaggctgtcctgacagaccccgtcgttttggcttaggcggcagattaaagtgtaaattcgccaagtataatcaatttagtagaatacaaacttacagacttaaaaaagtgggcaagaatacttaagtttattagaggtagtcaaaactcgctgacgcagagttcttcctcgttagtatagtggtgagtatccccgcctgtcacgcgggagaccggggttcgattccccgac

SEQ ID NO: 23330 - DNA, 850 bp, Homo sapiens
  chr6:27512842-27513692
  hyper
cgggctcgggtggctgaaggccttggctcttgggaatggtctcgcgtccttcaccagaactgacgggaattatatttacctgaagagtcagagacctcttcagagtcatcttttccagttaggacagaaacaagctccctcctcagctagcacgcccgctccagtccggttttagccgttccttcggaagagtaagtcagttgaatgtcatcgaagaagctcctgatttagattttaactgtacgtaaacgcagatgaccccccactctcgtgccttcatttaattcccgttgcttctcccatgggtattcagaggcttgaggttgcttggactctcaattcaatactccctttctgcgggttcgtgagaattaggtgtgaacgtggtgtccgcggatttcagcagctagcgggcaagctccagcgcccagaaactttgagtcgcttgtctaggagtcctgtgttgaattgcaacactatgcactatgttctggttattgatgtgctctgaatgagctctttcgttcgtgagcagaggccctgacgagactgaagaccaactatttccgagcgctccactcaaccattataagttcaccccagccgtcagcgatggcgtaggtaggtagtcgtggccgagtggttaaggcgatggacttgaaatccattggggtttccccgcgcaggttcgaatcctgccgactacggttttaccaggtgcagttcccgcctttcctcaaaacttacccaaattcttgtactccatttgctgctctcctacacaatcctcccactgcatattcagataatatcctctttactcagtgaatggagactaccttatgttgcc

SEQ ID NO: 23331 - DNA, 124 bp, Homo sapiens
  chr6:27559870-27559994
  hyper
cgaagaaaatcgggctcagaatagagtgggaccccttcggtagtgaataatcccgcagctcattattgcgaacagcagcccttagagatcgtagctggctggtaaaggcggctttagagcggac

SEQ ID NO: 23332 - DNA, 365 bp, Homo sapiens
  chr6:27560506-27560871
  hyper
cggtcactgtaggtcttcagtcattcatgagaggtgttaaagcacctctaacaagtgcaagatgcagtgttttggaggaaaaaaacaggcacctagcagaggatggtttcgatccatcgacctctgggttatgggcccagcacgcttccgctgcgccactctgctgtccccttcagctgttgtgccttatctccaagtaacttaaacatctcctaacaccgctgtccagctgcgtcaatatttttttcttccttatccatttatcttctctagtctctgtctttcatcctcgagttgtctcacgtttccttctcaacatagtcacctacaacttgttgtttgctcctttgcaacttaagaaaacc

SEQ ID NO: 23333 - DNA, 307 bp, Homo sapiens
  chr6:27636317-27636624
  hyper
cgaatttatatatggtttcctttaaaacagcagcgcattcgtgtggccggttagctcagtcggctagagcgtggtgctaataacgccaaggtcgcgggttcgatccccgtacgggccactggatgccatagtggggcccttcacttacctgaagggaggccttttaatttaagcctgtcgaatcacaggtgctccgaatcgaatcccaggtgctctgaatccgaaattaagacgccctcttattcgtcaagcgagaaggctatttacgttcgtttccctttattgtgaaaaatgaaaagaacaggcc

SEQ ID NO: 23334 - DNA, 357 bp, Homo sapiens
  chr6:27640042-27640399
  hyper
cggggattgcagaagtgagccaccgcgcccggccttcaaatgtacatatttcttgatgtacatttccacaagtgtgcgcgcgctgtaaaagccacagcgatagcactcacaactttctatcctagtgaactaatgaaagctaactgatgaaagtagcaaattggaaatctaaccagaaaatggcgacgctgtgagcaggatttgaacctgcgcggggaacccccattggatttcgagtccaacaccttaaccactcggccatcacagctccgaggacactttttgtttcagaggaagtcgtgttaggctctttgactctctcgctttttaatgttcccacggcaggttaatgcttcc

SEQ ID NO: 23335 - DNA, 599 bp, Homo sapiens
  chr6:28249105-28249704
  hyper
cgaagacagacatttaccactgtgttggttttcaatcgaaatgatgtacataaatttggggcgtgcttgcaccgtccgaatgggcctggggtccggcggcggagagtgacctgggcggggcaggaggtggcagcgggggtcctcccggctcaccagagagacgagcggccgtgctcctagagaggcagggaacccgccagactccgccactccgctgcgggcgcggcgcagggagaagcttttgtacccgcccagctgctggaggcgccggcagcgcccgccagacccgccagcccagcggcccgggctctggggaaaccggcgctcccgacaggggagcaccgggcctctgagctccctcgggagcctttcacgaggtcagctacgtctttgttgtgcgcgttcctgaacttttggtccattaaccaacaattagacacgccggtattcagtgcctggcgcggtgctagatgctgggtgtaatctcagaaaaatacattcaggggcgcgcctgagggtgctggctgctggcatctcaggtgctttacgtgcattcgtgaagaagcccatcagtatttcttgaataccaggtacgtgcc

SEQ ID NO: 23336 - DNA, 795 bp, Homo sapiens
  chr6:28367069-28367864
  hyper
cgtggtctgtgattataatctgaagtgaggaaggcccaggaaagggtccctaggacgccggcgagcgtctgtgacccaccactgtccagaaatgtcggtaagcgctgaacccaaggatacacagcccgaagcaaacgcggaaggtatgggccttacagcctggaattgctgcagagactgggagccaaaccctcatcctaatgtcccaacgcactttggggagggagagcttcccgcggatccgcctgggtttgggaggaccggggtccactctgcaccggccagggcctgaggggcccagcagctggaatacagcaatctcccgcccacctgctcgcagcgtacagagcacaacatcgctcacctgcggcccccagggccagaagagaactccctcctacggagcgaaggcaagaggcctcgaacccttttgggacccggaacccatcaaaagtgacccacaaaggccggaagcggccacggggggtctaagaaccagcccgcgcggggcgcacttccgcggccgctctaggaagggagcgaaaggggctttcaactcggtagtgtttccgcgcgtctacgtgagaggaaggttgatggctttcaggcccgctggtaaatggaacgggtttatcttctcctcttctttacccagccattgtccacacttcccccgacccgatgggtggtcgaggcttgtagaactgatcttaagacagggaaatcccttgcgtctccattcactttgggattctgtgtctctgaggttagagatgcctcaaagggatgttctcc

SEQ ID NO: 23337 - DNA, 575 bp, Homo sapiens
  chr6:28410904-28411479
  hyper
cggagagttcagagtgccatcagtacagggcagagaggttgaagagctcaggaacagacatagggtgggggaaaggggtaggggcaacgacgctgacttttggttaacaaagcccttccaggctgcggagcaacctcctctgcccttcacctgcccggcccatctctggccaagaagaccctgccgccaaatccccacacccagtccaggtcgcagtgcacagactggcccttccgaagcccctcagcggtagcccgactccgaagctcaccgaggcatccgtgagaggagatgccacctagcgcagatcacatctgctctgaatccttgacaaccgcagcccaaagaatgataaactacaaaggccggaaatgcgtcaccgcggcccgctctccgcgaaacagcggttccggctgtgttccttctaggaaggccggaggtttccacacctctgtggtcgtcactctgaatcccgtctgtagtcttaagtgagatactaggtgacacattgtcttccacgcggcaatataataacggccaacatagtgttttaacacgtattaattcattacccc

SEQ ID NO: 23338 - DNA, 926 bp, Homo sapiens
  chr6:28456978-28457904
  hyper
cgaatacacggggaaacgtattcggcagtctacagtgtcaaaggatttttctattaatccaagaaagagcattacagaaagctatacaatacgtgaagacgattaaaaggaatatatctatacataattttaaaaaacctttgaatcttgaaagtcactcacttagggtacgtgaagctgccaaatttatcagagaaggaacaggcatctctcgcatggagccgtgggcctcggcgttaaggcactcttcagctacaggtggcagcccgtttagctcttcttaaggtcttgtgatgtcattttcaagaggccagtaaagttctgtgtcacgtggggcctctcaggaggggtgcggaggtgggggaggggcggggagcaggactccactgctttggcctcaaggagtttggtcgacacttgaagactgaccaagaaaaagtaatttgtcccagttttctcccaccctttgttttcttctgctcctcttgggcttgttttttttttgggggggggggttctttcttttttcttttcttttttttttttttttcccgcagtaagttctgaaaatcgcctcccagaggagataacgcgttctcctctgtaacccgtccttccacgtcccggtggtgggggggggggtcccggttctcattctttcggggacctgcaaggagccccgcccgcaggctttgaaccgatttcggctccgcgtccaggagcaggccctacgtagggccgggggaattcaggtgcgtctgcggggcccagggcacccagggcaggcggggactgagacgactgagggttgagggacaaggaggttgggactggggaggggagacccgggacccgcccagaacgctttcgtggggttggagagggcaggacacagcctctctgggcccggtagtatgcgaagacac

SEQ ID NO: 23339 - DNA, 683 bp, Homo sapiens
  chr6:2903030-2903713
  hyper
cgtgagccactgcgcccggccgagactggtgactgtaaaggacagtgaagaagcaggacagacgtcatcctgcggatcccagagcagagaagagcagtgagaacacagggccggcaggtggggaggaggctgcaggggagggcttcggccagggaagggcagcgaggagacatccgggagggaggcgtccgcggtggctgtgggccgccaaggcggagaccggctgccgctcccaggcaccccccagagaccgttgctgaccccaccgagaaggcaccgcctccccggggctcttggctgagcgacctctcctgtcctccggtcccatcactcggtggcagccggtggacctgaagctcgccactcccgtcccctaccccagccgtgcgcggggacgccctcacctgccacctagtccagcgctgccgccgtctccgtgccgcgctccgagcctggacgccgacccccgaggcgcaggacccggccctgctgctgcgctcgccgcggactcccgctagggcctctgcaggcaccgcttttataccgcagggtcgggcgcctcccacgctttctgcgtttaggcggagcctggcgggaccagcgggggcgccgcgcgtggtggccgaggtcagagctgggagcagggtcaggtcagggtccccccagtccgccccgcccggggc

SEQ ID NO: 23340 - DNA, 698 bp, Homo sapiens
  chr6:46138265-46138963
  hyper
cggggcaccgattaaacggaagagggaaagtgcagaaggagtaggtttgtgtagctcgggtagacgtcaagggcgggggtgtccatcttctccaccaggattccatcctagccacccagaatggtcgcggcgtaggttatgttcccaattcccagtcatcccgcccaccgaggcctgggcttcttagatgtgcagtggcaaggaggggacgttgctttagggacccagaggagcagtgtgggttcccgggagggaagccacccacgcccctggactcaccctcgcagcgatccgttcagtccgtattagtttggagcaacgggagggagggtctggaggagactccctcgggcgcgccgcgggtaacggcgggagggtgactggaggaacgcccccggaacgcgcaggagctcacctgcgctcaactctggagcggagcacctgaccgcgccgcttccccgccccgcctcctggcttctattggctgctgcagagatagtcacttctgcctgggttgcccccgaaagccaggctcccaggagtagctgcacggcctgtcaatcagcgggggcaggggcgggcgctgcctgggtttggagggtggagggggaggggactcccgggggcagggacccatctggtagggcgaaggcgtgggatggccaattgcttggtcacacacaaaaccttccggcaac

SEQ ID NO: 23341 - DNA, 1475 bp, Homo sapiens
  chr6:5996316-5997791
  hyper
cgtgctcacgtgagcgtggtcctcggcttgggacagacaagggagccccagacaggacgataaggtttggagattcccagggcgatctgggactccgtggcgtgggggcttggaagcgcgtggaggggctgagagaggggagagggcgcccttcctctagggcggccccgtctgggaagcagttggaacagcagtaggagccaggggttcctagagaagaaccctgttaggagagcagaccagcccgcgctcccagtccccgccccctcgccccttctgccccgcccttagcctgcctcttcctagatcttccaggacattgatttccgagtaggaagcccgcgctgctaggggaggggcgtcctctgtgggtcgtgggggggtttcccttctctccacagtcggagcagaagggcgcctgccttttattttgacaagcaatgggcttagttgtgagcacttgtttgcccccaatatgtagaggaaaagatactgataggaggcggcgtgctacgatggcaaaaatggagaagaccctccctctttatcctggttctcctccttgttaaatagattcgtatttaagataggcacagacattctaatttgaattccaggggttgaactccagttagaatcatcctatttatacgcagaccgaaaataaccattgaaacgaaaccaacaaaatgcaactattttccaaaaccccgagcgtttgctggtgggtgaccaccccgcgcaggtagcgcggatctgctttggttttgactgagaacccgggttttgactgagacctccgtcgggaggaggggactgggtgggagttagcgggcgaaacgattccccggagtggccccgagcggcgcgtgcgtgaacgcgcggccgtaatatatgctgccattaagaatccgtgcagcttccagcgctccgggcgcagggacgcatgtgttgctggaattcaatccgtggggggaatgcagattgggctgcgactcactgggtttgatttatgaactgttacactagcaattgtttacacattgcatttcagagcccgggcccaccctccccgcagcgggcggcgggcttcgtgcgggaacctgctgcagcccccttggtctctctccatcctcctcccttcccccgtcccccccccccggggcccccgcagcttcctcccacagccaccttctccaagaaatcagatttcgatttctctgaacccagagacctgcatgcagttctttctcccccgcctactccaggcctgcagtccccggacccgggtcgcctctgcccatttactccggaatgtttacttctctttaaggccatgcggggcctataaataggagaggtggaatcagccccactgccagatcaatagggcccgtctcctcgccatttcagctgagctgtcttattaattatgaaaggattcacctgatccctgccagggaacacagcctctc

SEQ ID NO: 23342 - DNA, 1356 bp, Homo sapiens
  chr6:6007079-6008435
  hyper
cgggagcgacagagactttatgcactgggaaggcagagggaggagagaaagagagggagcgaggaagagacagaaagagagagagagagagaaagagagagagagagagaggctgaggggggggggagagctgggaatggttcactccattagaagggggcggaggaagtacagcctcacgcccacgagcaggcctgacgtgggggatgacacggaatgattttttttttaatatagacaccttggtagagaatcgccatttatagtcatcagaagctggaattaatcagatatctccaattaatgtgcgatctgaacgaaattttgcctcccgggggtgagcactttcctattctagcggtcacccctgcctcttcctcgttccgggggccccccagccccgccgcctccctgcgcagaacaggggctccccctcccttccccgccaggagctggggagtcctggcgcgcccactcgattgtttcaacctgctccccctcctccatcagcaccacagagaatccagcccgctctctacgatgcaggggggtttaaaggagcgggagagggaaaaacagctaagctagctcgattaattcgaaagcgctcctcggccgcccgccccctgcgcttgcctaccctctttttctccaacccagcagctgagctctgggcgcagcctggagcgcgtgagcacgcagcccggccccccgcacgagcacacacacacacacacacacacacacacacaaacgcgcgcgcgcacgcccgccagccgcgccgagcgcccccatgcccgcccgcacacaaggcacgcgagcgcgcgcacacgcccaggccccgggggtttggtttgcacacgtggggccccagaaataaacaccgaatgtcctctgaattttacccacctgcgatgccccagcgggccaaaggccgcttcaagggacacagcgacacctgttttagggggcgagtagggcaccggggaaggagcctctgataagacagttttcggatactagtgatttaccaaccaactctcagcgctttaggaaatttccaaggcaagcgctggtgtgcggacttctttctaatcttgatgcgcctcttgggcttatttgttgggctacacacacacgtacccacacgcacacacgtacatcacgtacgcacacgcacacccggacccacacacacctgcactgtcttttgatgctcaggcacagaccctgtgtaggtgtagcctaccctgcaacaaaatacttctgcagctggctttgtgctaggtgcaagctgctatcgacgacagcttgagtcaaaaccgaaaaactaacagggctatttcctttctaaac

SEQ ID NO: 23343 - DNA, 471 bp, Homo sapiens
  chr6:69942728-69943199
  hyper
cgcattttaaaagccagcatttatggtccaaaatatgggacgggaatcagagctggtagaaaaatatgaaaagcctctttacaccctgagtatttgaaacaatccgatgagcataggaagtggctgccaacgctctggcggctgctcgtgctgccgccgctgccgctgctgttcctcgcatagggctggacagagctagtcccggtttcagcacctccggcgctggacagctctctgcacgccgcaccgccgcctgcttgctttttcccactctcgctttgcattactggagatgcatctaaattacatcctgttcaacaacaagtagatttttttttcctgtacaggaattacagtagacgactctctcaattaaactgcattttcttctttacggatttggctatcaggcgtatttatcccgatttcctcccccctcactcccctttgcaggaacgagtctttgggaac

SEQ ID NO: 23344 - DNA, 1034 bp, Homo sapiens
  chr6:72596036-72597070
  hyper
cgaggtgctgtgcacgttggcgactgtaggggtagcggccggggcacgcgtggctcggacccggggagtgggcgggtgggtgcccgtgggcggagcggcgccgggactgagtggctggcagctatgtctgcgagagcagcggcatcaccctggatggaagcctctgagactccgcctaactgacacccaaactctccctctccctcccgcagccccaaattggaggcagcagagcctgggagcagcctccacggcggcagcggccgccccagtcccagccccagccccagccccagccccgcccccgccccgcgccccgccggagacgcccggatcggcggagcctggcgcgagccctcgccccctcgcctctcccgccgcgcctccgcctgcccgcccccgccggccgaggctgggctgcgggaggcggccgggcggccccgagcttcgctagggcgaccaaaacaaaggcagcatccggggctgggtggatgcaaacaaccatgaaagactgggttctcgctctccccggctctgctgctgctgctgctgccgccgccgccgctgctcctcctcctgccgccgccgctagggctccgctgtgagggggaagcaggggcgcagctgctgggcgtgcatccgaaaggtgagagccagagagcgagcagagggggcgggcaggccacgaaaatgtcctcggccgtggggccccgcggtcctcgcccacccacggtgcctccccccatgcaagagctgcccgacctgagccacctgaccgaagaggagaggaacattatcatggcagtgatggaccggcagaaggaagaggaggaaaaagaagaagccatgctcaagtaagccagccccagccgcgccatccatgcctccgtgcctccatccgtccattcaccactcactcccctagtcctcgcggctgagtgtggggaaggggctgccagggtgctgggtgcggacggaggcgcccgccttgggccaggggcgcggggcttgagcagggaagaggtcaggggacc

SEQ ID NO: 23345 - DNA, 829 bp, Homo sapiens
  chr6:87646737-87647566
  hyper
cgcgtagagaaagcgtgcaaacccgtcaactgctcccgccgttcctctccctcctcaacccaggctcgctacagaagaagggagtagggtctgcccccttgttgtatctattttccccttctccgccagggctgtggccggcaaggggctcaggaggtgagtcccttgcccacacctccaaccccgctggcccggtttataacatggacagccctgccctctagtgtctgcaaccgggagccctaaggcgccatcagctccagaatttctcttttataacctaagcaagacctggagtacctcggagctgcgacctccagttcacaataccacctgcctcacacccgggctcatcttttcatcccacacccaccacccccctctccgttcacggtgtcccgggaggctgcgacctgcgtagatgatttagcagactgcccctgcccatgctcctgctcctgctcctcctcctcctcttccccgctctctccctctcgcctcctcttccagtccaggcgcccagactcggcgaagcgcagcgcctgccaccagcggtgcctcgggctgcccggcgcgccgcgctcccaggttctgtctcgccgcaccccggcgggcactggcgcgggcaaggacgctggcggggagaacgccctgggctcaacgtactccagaatcgaatgttgagagaagcagtgctctgatccagctcaggagaaaaaggagcgggttccgagtgagacttctggagccagctggacgtgccggtttgcccagtgcggcgcggctgcacgcaccgtccacaaggtgaggggcgcacaccttccgggac

SEQ ID NO: 23346 - DNA, 974 bp, Homo sapiens
  chr7:103968866-103969840
  hyper
cgggaggcgccccgggcttgcgcgccgcggtgctccacgagggatttgccgccttcagctgcagcagctgcagcggcggcggcgggaagaggggtggagggtggtgaggagggccggagcccgggccaggagggagggaggggagccgggaggctgtgccaggcgagccggaggggtgctccgcgctcccccgccctccttccgggagcgaggatgcagactctgaaactggtgctgctgggctgaggcggaggcaggggagttgcagcgcgcgaggctccgtgagtgtgtctcctgcgcgctgagaggcggggggaggcggaggaccaggaggaggaggaggaggaggaggagggggagaatgcccggagccgccgccgctgccgccgccgccgccgccgcgatgctcccggctcaggaggctgccaagctgtaccacaccaactatgtgcggaactcgcgggccatcggcgtgctgtgggccatcttcaccatctgctttgccatcgtcaacgtggtgtgcttcatccagccctactggataggcgacggcgtggacaccccgcaagccggctatttcgggctcttccactactgcatcggcaacggcttctcccgggagctgacctgcaggggcagcttcacggacttctccacgctgccctcgggcgccttcaaagccgcctccttctttatcggcctctccatgatgctcatcattgcctgcatcatttgctttaccctcttcttcttctgcaacacggccactgtgtacaagatatgtgcctggatgcagctcacctccggtgagtgcgcgctcacctccgcggaggcggaggaccccggggcgcccgagccggggaggggccagagtgggagggacgggggctgtgcgcgccgctgcgagccaagccgcctaatccgctcaggcgtcgaggtgtggggggcgggagcccagcgaggccggaaccccc

SEQ ID NO: 23347 - DNA, 847 bp, Homo sapiens
  chr7:117119463-117120310
  hyper
cgaaaggcacattttccttcccttttcaaaatgcaccttgcaaacgtaacaggaacccgactaggatcatcgggaaaaggaggaggaggaggaaggcaggctccggggaagctggtggcagcgggtcctgggtctggcggaccctgacgcgaaggagggtctaggaagctctccggggagccggttctcccgccggtggcttcttctgtcctccagcgttgccaactggacctaaagagaggccgcgactgtcgcccacctgcgggatgggcctggtgctgggcggtaaggacacggacctggaaggagcgcgcgcgagggagggaggctgggagtcagaatcgggaaagggaggtgcggggcggcgagggagcgaaggaggagaggaggaaggagcgggaggggtgctggcgggggtgcgtagtgggtggagaaagccgctagagcaaatttggggccggaccaggcagcactcggcttttaacctgggcagtgaaggcgggggaaagagcaaaaggaaggggtggtgtgcggagtaggggtgggtggggggaattggaagcaaatgacatcacagcaggtcagagaaaaagggttgagcggcaggcacccagagtagtaggtctttggcattaggagcttgagcccagacggccctagcagggaccccagcgcccgagagaccatgcagaggtcgcctctggaaaaggccagcgttgtctccaaactttttttcaggtgagaaggtggccaaccgagcttcggaaagacacgtgcccacgaaagaggagggcgtgtgtatgggttgggtttggggtaaaggaataagcagtttttaaaaagatgc

SEQ ID NO: 23348 - DNA, 982 bp, Homo sapiens
  chr7:119912404-119913386
  hyper
cgccatccacgccatctagtggcttgtatgtgttacgtttggttttaaggatgattcctaatgactcgggggcggggtacgcgaaaaacaaaaaggttggtagcgacaattttcctgtgtctctctacctcagtaacccctcatacgaacacctttaactcttttaactattttaaatatgcgcagtgatgcgcagagaggatgaaggggacgcaaactttcagagacgcacgccccttgacgatgacatttagaaaagggctccacatccctgttattcgtaaaggacgggaaaaggagttgtgtcaagacctcgatcgaggagagtctctgattttttggcaagttggacagatggcatatcaatccctgcaacgttaacaatctggttttgaaaataaataaaaacagaaagaggaaatgcacttaaaaattccgcgtcggagctttgcgggtcttgccttccagtcgcccccagaagacaaccaattcctgcgcattccgctccgctcaccctccttcccagcttctctcgctctctttccccccattttcccacgctcgccttgaaccgggactcgagaggcagaagcaaggcacgggtcccctttctcctctcctccaccaaaccaccgcagcccagcacgtgaagcttccctttgttcatccgaggctcgcttttctccccagcagatccacctggatgctctccctcggtgacattttgcgccggggttggtgggtggctggggtggagcgagaggagcccgagggggcgggggcggagaaaggtcaagccgagggaaaggcaggagacgcctttcctaacctgcgtggcggggcgtgcgcgcggttatttatttattttctccttatttattgatcgcactagcagagcagcgcggggagcccggggagatgcaggaccacccactggcggggaagcagctagcagccctcccgcgcccccgcgctgccgagc

SEQ ID NO: 23349 - DNA, 277 bp, Homo sapiens
  chr7:121951878-121952155
  hyper
cgcgaagctttaagcgccccgcgcgggtgttgacgctggcagctcgcaaacagcgtcccgcggccacggtgacccgaggggccggccggctgacgtcacgaacgcggccagctgcggggacccgggctgcaaccgcggcctctggcccctgccttctcgttgggtcgagggtgggaagggaagttgaggtctggggtaaaaagccggaaaaagaaaggaacaaggctgagaatcattcaaagattaaatggggtcggctcccgttgcttgcgaagac

SEQ ID NO: 23350 - DNA, 154 bp, Homo sapiens; identical to SEQ ID NO: 6269
  chr7:152591569-152591723
  hyper

SEQ ID NO: 23351 - DNA, 712 bp, Homo sapiens
  chr7:154861705-154862417
  hyper
cgtgtgggggtggctaggggaacgttttgaggaaagttcattggtcaacttgttcaacgtggcaaactcatttcaggcaagagaggcagcaccgtggacagcgccaaccctcctgctcccgggcggggcgaggtggcagcaccgcggacagcaccacatgtggtggcgcacactgggagccgccaggcgcggggagcgcagcagcaccgcggacagccccaaagccgcgcgctctgagccaggaggcggggagagatggccttatcagctgatggcttacgtagggctagatctccacttggataaggcaggtctcggtgggcgcgccagcattcgctctccggagctgcagcctccgaaggggtggcgggggcaacagggacagaaggcaggtcccagaaagcaggttcccccaaaactggcttccctagcacggagttaaggctgcagccggctgcctagagagaagggtgggcagggagacaacgcggtgagagcgactgctctgacgcaccagcccctctcctgcacccacacgctgctggccgcccagcttctccccgatctgggagatgctcggctctgggcggccaaacagcctttccaccaaggcgaggagccctgggctcctgacagcttaggcgggccctggctgcgacacgcagcccctcgcctctgcttccttagcctctgagggcttcagacctgccgc

SEQ ID NO: 23352 - DNA, 967 bp, Homo sapiens
  chr7:155165412-155166379
  hyper
cggggggcaactccacctcccctggggaggcctcgtccccgctgcagggagactaaagcgtgggtccgcgaccagccggtttaggaacgaaaactctggaactaaaaacaaaaaataaaactggtgagtgcgcagcgtggtcagtgtttccctctgggtaatgcttggccaagggggaagatcgagtactcccgcccacatccgcctcccccaggagggaggattccctctctgctcacccaccctgacccacgcctcccgccaggtccactgctcagacaaatctgtaggtttctgagtatccgtatctcgaaaagcttcaatgcacaaacgaggttttaagcccatcgcggcttcgcaaggggaaggggctgcttccctaaaaacaaaacacaacaaaaaaggcaagggggtactcttgcagatggactggaattagtaatttagccagggtctcttccaaactcactgcaaaattcgccagcgtctcattcttcacacacggggcaccacacgagaatcaccccctccccagaattttgcaaagcacgtttgctgagttttctcgcctttccttccgacaagctcgaactggaaccagcgctctcccctctagacctgcctccgcgccccacccttcttcccccacacagtccctccgcagggagaattcaggtgctaaaaatgctcgggcctcgcagcttcctccctcctcctcggttcctcgaatgacccaagctgcctctttccgggcccttggaagacggtgcgaattccgcggcggcccgctctcgccagcgccacagccctgactcccacccggaggcctgagttcaaccgctttcgcttccttgcgggccgttcaaccctctgaatacgcagattcatttatttatgttttttaatgtagtaagtgggcagctaaatgaattgcaatttgtcatttttatggttaatttgaaatctc

SEQ ID NO: 23353 - DNA, 738 bp, Homo sapiens
  chr7:155302323-155303061
  hyper
cggggctgcccttggctgcgcgtcccccacgctgcagccgcgcgatggcccgggctggggtggacgtggggctgggagaggaaggggctcacggacgggcgccccatctcccaggcgggctcctcggctgctttctttgggaacagctggtgcacgtccccgcgcgcccctctccctccggaattcggcgaggattcagctggaccctttggccaccacctccgccccgggcgcgggtcaaagagcacccctcgcccttggtaacggagacaaaacgttcggggccgtctagacaggtcaaggtgcaggatgcggcgtccccgcggctccttccggaagggggcgtggagccgccaagggcgccggaccgcgccgcagcccgggcctttgcgggctttttccctctccaccctctgctgatcaaagtaggaagtttgcatgacaaccgcagtgaaaggggctgaatcacaaatgaactcgatttctgcagtgttgatctatccagcctccattgtcccctttcaggcgcagtatgaacccttccggtgccagcggccgcgctacattcacaggcgcgctcggggcgcacaaagggtctccgcgcttcaccgccatctggccacaaatctcatcagcggcgcggcggcgtccccttgaaagcgcgggcggagggtgcgcttgtgttcttgagacccaggttccattacaaaccacccagcatcgccaccggcgcccccc

SEQ ID NO: 23354 - DNA, 170 bp, Homo sapiens
  chr7:156701747-156701917
  hyper
cggcctgagcgccagcggggctagggggcgctgaggccacacggaacgccggcgactcactgcgccaggccgggccaccgtgcagaacgcgcgcggatctcacaccccaccatgcggaacgcgcgcgggtcacacaccgcaccgtacggaacacaggcggatcatgattc

SEQ ID NO: 23355 - DNA, 706 bp, Homo sapiens
  chr7:15725486-15726192
  hyper
cgagggtgcctggcgcgcccttacctgagctgtcgcttttcctcttgccgccgcttcgcttctccgcctccgcaggtgacagtgcctggcggccgtagtcccccggcgcgcacgcggccccagtcggggtgctggagcccaagctggaagagttggagcacaggacgggcgggctgctccccaactctgggggccctccagagtcgggctggaggcagaggctgtgccgagccgcactcggtggggaagacatctgcgggaggtgccagttggtttgcagagcctggtgctgctgctgctgatggtggtgatggtggtggtggtggtggtggtggtggtgccccctgtgatgctggctggcaaacatgccctcttcgttggggtatcccgcgattatgcaagatgaggaagaagtagagagctcggggtaagacatatggtcagatcttccatggagggcgagagaggattgggagaacgggtgcaagccttgcgccgtggcgtgagggctgcgcaggcagccaaagagcgggtgttccatagcatgcaagtttcgggttccaggcagaagacttcacggcggttccaaaggccaccaccctctgtcactttttcactggaaaccgtgtgattttttttttaacctcccaaagcaatagcggtgcacttctgcagagctcggataatcccggtcctgagccccagc

SEQ ID NO: 23356 - DNA, 756 bp, Homo sapiens
  chr7:15726410-15727166
  hyper
cgctcagcctgcgccacgcgctcccagttccacttcctatctcctgctggacggacgtagagcgtccacgcccgcccagcactgccggctgccaggactacaagcggcacgccaacgtctaagtcccgcccgggagggcagcagctctgccctccagactctggaggcctgggcgcggcgcacaccacccccaacctagcaccctgattcctacctactcactttcctctcggggaaacgtgacttgtcagtgtcatttgggaactgtcacctgcagaaaagctagggatacgcctatcctttcaggaacacgaaagaagtaatagggttaaaggaaaagaccagagctagtttggcgcaccctcgaagtttttcaaactttgcatcttcccgtgccccgggcgccgcagcgcgcctaggttttcgcagctggtttctgtcggtgggttgttaataggctgggacgccagatctgaggttgcggggatgagcaccatggcctggaaaaggcggttctcagtgcagaaagaagacggacctggttgggtgggtgggaggaaggcgtgagtctgaaagggttgcagatgcctgctccctggcatcctcacgtgcgatgccaggtggaggctcccttccccctctttcccggtcccgctcaatttcctagccacttgtccaccaagaagaacttttcctgggtcaagaatatttccaagcgattgtgtcccggtcatatgagatgtgtagattgcacgc

SEQ ID NO: 23357 - DNA, 943 bp, Homo sapiens
  chr7:16460341-16461284
  hyper
cgcgagactatccgcacagcttctcctcaggccccacagctagaaccccaaatcgcctagtcccaacccatgcactctctaatcggcgccacacgacgggccttccccacaacctcatctgcttggggacgtaaagggctctgtgggggagctgcagctttcgtgcccatctgttaaaggccagaacttcccatctctgaaatgcgggagggaacagagctcaagcttgaataactgagcgcggcccggcagtcccccaagtgaaggtgctagcgctagagcagcggcagggcggggagcgggaggccgggccccagggaaccgcggggcgcgcccggcgccgcattacctctccagggcctgtagggtgtagctgatgagcggcctctccaggatggggcagaattgcttcggggtggggacccccatcctctccccgcaccccccggcaggcaacacagctgccacggcttgcgggtggcgcccgggctcggtcccggccacgctctgcagggaggcggaagccgtgtggtccgcgccgcgctgaccactcaggcaaggacccggctccgccggcctggcgctgcccggcggcccggcctccatggctgcgggcggaacggcgagccccgctagcctcgggccgatgcgaccccgcgctgctcccaccctcggccggggtcgcggggcgaagggcagaccacggagagggacgcagagcgcgcaagcagaaggcgcccccctcagccgtcggagccccgctgttgctgccccgcaggggacgatcccgacagctacggcagcagctgaggctgccgatctgccctcgcggctcggctgcggcctccgcacccggtcccagcgcctgcgggagggctgacttgcccgctctgcgcttcccccgggcaggcccagctgtcgccgcaagtggaaatgtcagaac

SEQ ID NO: 23358 - DNA, 313 bp, Homo sapiens
  chr7:20827323-20827636
  hyper
cgtcactacatttttgaagaagatctttaaacccaccttttctttcccggctctccaacgaaatagtagaaaggttgagaggctaagggttatttttagggatgcgttgggacgtggatgcgcgcctgcgcgcccatgagttgtttctttgatgccgtggctttttttttttttttttttttttttttccctgaggtggaattctgctttagaagtgcacgtctcactctaggggaggaggtgtgtgtgtcccgtggtgttgagtaaatttcaatacaaaaggattagatagagaagagagtaagcgagggtc

SEQ ID NO: 23359 - DNA, 778 bp, Homo sapiens
  chr7:22589310-22590088
  hyper
cgacggtcaggcccctttcccaggtggtgccgtggtggccgtggggtgaggaaaatatgtacggctgtagcccgtccatttctcatcctgggatagcgaggggtttccggaggaggcgtcagcggtgggaagtgggagaaagcgagcaaaaggggcgggggcgaaggagcggactcgcctgctgccgcgggggcgggaatccgcaagccagcctgggagaagggacagaacagcggctgatccttccctgggctagggaaggaaaataaactgtgctggcctcggagtgggggatggagaggggcgatggcgctgcatctgcaggacgttgcaagggctaggagcgggcaagactagtgtcggcaggaaggtagtggtggtgatggcgggggtgtgtggcaaacagagcccgagcgaaagcctgagaaggttctggttgccccccagcctactttagtccctaaccctccagcggggcgaggagggagcgcatcggagaggtacctgtgcgatgggcagcggtgcttggcacctgagcgtaggtacgatactcagcaaggcacctgggtgggacataggagaaggaaatctccaccccaaccccccaaaacaccgcccagaagtgggcggtgaggcccagtgccgcagccccagggaaatggcagtgacacaggtggcagccaccttcagagcgccaggcccccgccagcacatctgcaggtagcagctttggccacaggaaggcgcatctgcactgccgggttcgcaaaagcggggc

SEQ ID NO: 23360 - DNA, 290 bp, Homo sapiens; identical to SEQ ID NO: 6277
  chr7:2517249-2517539
  hyper

SEQ ID NO: 23361 - DNA, 848 bp, Homo sapiens
  chr7:42927739-42928587
  hyper
cgcttaaactttcacactgcggttgtgtcactgaagcagtgcctgaaatctaatccctgagtgtgacgccgccccaaagggccccaagcaggtagatcccatgctgatgctcttttatcctggcctctcagctgttgaggagagtaattgccgggctaaactgataaagtttcattccaaacaattagcctagtctgcaggattgcagtcgcggcttggacaccatcccggtgtctgtcccccgcagagggcttgctaccttgctgtatcagctggcccagcaggtctggggccgcgcgctgcttacaggcgctggatctcgctgctcgtcgctgcgcgctactaggtcctgctgtcgtccgagtcgcctccgggactctccggaattgtagcggctgtagccggctccttgcctgcggcgcggagggcaggtcccagtggtaggaggatgtgttccctttgcagaatcagaccccctcctgggactgtggggaccctctgtcgccggcctccattggaggatgcgttgtccctggagctgggtgcgctgttgcgtgacctggggcctgggtggtgggcgggcctgtccatggcaaagggcacggctgcgcgctacttcccgagaacccgccagcaggctcttgggaagcagcgatttctccttagtcacagtcagagagggtgatgcgacacactgggcttcactgtgctcgtgaagcggagccagggtgaaaggatcatatggcctaaccctaaccctaatgggagtaacttcacctgcgtcccacaggccccgcaagagtgacgctgccaggcaggcgccgccctgttcggttcctgctgctgtc

SEQ ID NO: 23362 - DNA, 281 bp, Homo sapiens; identical to SEQ ID NO: 6281
  chr7:5603124-5603405
  hyper

SEQ ID NO: 23363 - DNA, 65 bp, Homo sapiens; identical to SEQ ID NO: 6282
  chr7:63767198-63767263
  hyper

SEQ ID NO: 23364 - DNA, 690 bp, Homo sapiens
  chr7:64734140-64734830
  hyper
cgcactaatgctggggacggtgggtgtgggggagggtcctggagccttattcaatctgtcagagtaggaaccgtcctatcaggcacgcagttggggaggagggcgtggcttccagcgtttggcgcggcctttgtctctggctcaggccggagcctgagatccatctctactgtcccgcgtgttgcccctcgggagcactaggtgactttgtcacatcctctgttgccctgagatctggaggtactgggaaatgcatagctaagatgccaggacatcctggaaaccaggaaatggtgagtacgcggggttgggcatcccaagaggggagagtgggctggttgaaaccagcggaaccggcctccccacggtcagctcccgggtccacagacctgagtccccgttggcgcagctgggccctcagtacccccggagagtggggtggggggcggtgcaagacggcagctgagccagcggactttgacccctcaccgtcctcttcccgcgccgcgacctgcctgaaactctctgggcagcgctgcacccgcagccccgactctctcccagattgttcagggatgacagagggtcattagagcagaatcccgactcggtgggtgcgtgggaggagctgcggccagtggggtccccagtgtctcctgttaaaaaaatttttttttgagatgaagtctc

SEQ ID NO: 23365 - DNA, 939 bp, Homo sapiens
  chr7:8473577-8474516
  hyper
cgtgccaaagtaattgtccgtgtcaggaaggtaggcgtgccaagccgcggctctgcggagaaaccacgaccaccgcggccgccggaaacccaaagcgctccagagcgtccccgggtggccgggcagcaccagggacagcgcccgggactccactggggaccggctcctgggcttcccagcgtcgcgggtagaggtacagctgctccgtgtgccgcaggctccagattctcgccaccccacccctccctcagaaactcggactgctctcgtctgccgtgtggttctcttttcttccgaaaggccagtgtcttatctctccacttcaagtccagaggacttgctcagtctcctccccttaagtcatttccaccatcctcaggcagctgtgggaagccgagagtcctggactgttcgtccgggtgccagcgctggcagtcccagtccgtccggtgcagcagcccggcgcattcccctctctccctccctcttgctctccctccctttctgtcttcctctctttcctcctctactgctccctccctctcttgcctcttaagtttcctgcaccgtgaatccaactgtgccaagccttggctcccgcgaaccaatcctgagcgcgacccgggcactgggacggcgactccgccaaagctggacgaggcagccggacccgtctgcgctcgagcatggagacggagcgcctgggagggcacgtccggggcgctggagacgccaggcccgagtagcttctccatggagcctgcccagagcggtcccttctcgcaggattcgccccaagtcctgtgcggtacgtaccctttgcctccgctgttcccggagggtacacctgggagcggggtggtgggcacgaggaagggacggcagggaggggcgctggttaggaaagagaacaagcctggcaggtgaccctcacagctc

SEQ ID NO: 23366 - DNA, 752 bp, Homo sapiens
  chr7:8476320-8477072
  hyper
cgacccccatagcccatcctgggctgcgggagtgcaccgagggctcgctatgttctgtctaggggtgaggtgcgctaaagcagcccgaactctctgatgggctacacctctgattggaggtgatactggcgctcctcaatcccaagagccttagatagaacccataagcctgaaagaattgccatccctacaattgacagcgtttctcggccgttgccctggtgcatgtggctgcaaagctgcgagttgtgtgaattctgtgtatgtgagtgacacgtatatatatgtgtgtgtgaatgtgtatttaaccgatttcagcttcaatccaagaaccctcaatgttgcctgtctttgcccctttatcgcctgaccgtagcagccgcggacgccagagggcgctgcgcatcagcgtcctcgcccacaggacaccttggggtaaacaggtgaaagccagggcagccaatccaaaagaacagcctttctgactctgtcaccgaagtctgtgcctttacccgctggaacgcaggcggaatgcaaaaagtgtccttcccatttcccatcttcaatcattttcacccccacctgtgttcagtaagcccactgacattgagagaccatggatggagggcagaaagtttggccagaagaaatatagaatttttttattgagagatggggggagggaatgcaaagtgaaagcgacgggggcgggggggaggtaattttaaggattcccttgaccatcgtaaccc

SEQ ID NO: 23367 - DNA, 1117 bp, Homo sapiens
  chr7:87229392-87230509
  hyper
cgcaactatgtaaactatgaaaatgaaacaagctagttaccttttattgttcagtttaaaaaagttcttcttctttgctcctccattgcggtccccttcaagatccattccgacctgaagagaaaccgcagctcattagccaaatgcatgagcctcaggcgcgctggaggtgagactaacctctagtcccccgtcgaagccagagagcagtaagagggagcgcccgccgttgatgccccagctgctctggccgcgatgggcactgcaggggctttcctgtgcgcggggtctccagcatctccacgaaggcagagttgggggtctggcagcgcgttctggactttgcccgccgccagtgcgattctccctcccggttccagtcgccgcggacgatgcttcctcccacccaccgcccgcgggctcagagagcaggtccccgcaccgcgcgggctgtgcgcgctccgggcaacatggtccagtgccactacggtttgggcgctgctccaggagctcctgagtctagatctaaccccacttggtccccatggacttgccagaggacttcacactatccacgcctcaagaagcccttctcccgtgaagaccaagttcaggaaatctgaaagcctgacacttgggaactgtcccatagtagctcccagctttgcgtgcccctacctcgcgctccttggaacggccaccaagacgtgaaattttggaagaagatactccgactttagtggaaagacctaaaggaaacgaacagcggcctctgcttctttgagcttggaagagccgctactcgaatgagctcaggcttcctgtggcaaagagagcgaagcggctgtgctcagcccacgccccggcgctgttcctgcccagccaatcagcctcaccacagatgactgctcccggcccggattgactgaatgctgattcctcgagaaactgcgaaacaggttgaatttccaggaggaatgttctggcttccgttgcacctctctagaaagggcaagtagagaaacgcgcatcagctgaatcattggggacatttcaacttatgtagacacgtctttcaaagttcacataagtcttcatatccatataactacaggac

SEQ ID NO: 23368 - DNA, 907 bp, Homo sapiens
  chr7:94284379-94285286
  hyper
cgcaaatatttgtggccgaatctcggcaacccgctggaaaggattaaacgtgcggttgccgtgactaaacgcattcattcaccctacaagatttaggaaaatgtaacgttgcaagggaagcaaggtctctgtgtaaacctcgtaatcgccaccaaaagtcggtagctgggagccttcaaagcccgccaaacacactggaagcatccacagctgttttaaattggttttggtttctggaaatagcgcactcggtacggcagcatctctggcctccagccggggttaaccctgacctgaacgccctgtttagctcccagcatttcatgattccgcttccctgctccgtaaaaccgaagaaaaccgagatttccgtcaccgagaaatgcacttagcaagagggggaaattcggtgttttaaatgtcacatttttgtgttctctaccactatcaagaaaaggaaaaaagatgtgtttgtgtagcggggacgcagcttgacacccatttcctttggctcgcatcgcggtcgcagagcccaatcgcggggaaacgggccccccagaaaaacaggcaacgacccccagctctttgctacagggatcgggagaggactaccctggggctgggcggggagggggatgttgggaacaggaattggagatggaatttctgcgcccgcagagcagggaggggcccgcgggggcgcggagaggaaaaaaaggccaggggtcaagcctggggagagagaagctgggccggggaaatggggtacagggtgtactgaaggaggggtacggtggggtccgggacagaaagagaggctggtgcccaaagggcgcgctcaggcgcccggaacccgagcgggggagggggaggcggcggcctgttggccccgggacctccacgtcgc

SEQ ID NO: 23369 - DNA, 825 bp, Homo sapiens
  chr7:96645632-96646457
  hyper
cgctgggggttggcgcgggggggaagagacagggctgcgtagaaaatatttaaccaatcccacatgtgccaccgctatttgggctatttttaaggcccagagttcgctgcgactgggctgaggttgaaaaaaaccaagcactgtgtgcaaagaccgcgggcaacctgggagcgcgagccgaggccgagagcaagccgcagcgccccctccccaagctctggagcggcgggagcctccaccggctactgtgggagggggtgcttaagggtggaggagctgggtgaccgcaggcggatccgccggcgtggcgagcttcccagaggtgcccgagggcgtctgccctctgggtgtgcctccgggagggctagagagctctaggttggcaagatcccagtgaccattgggaggcgcgcgatccaaggggttgcagggatggggcggagaggaggggcggttgggtagcctaaaggtccctctcccagaatacaaggaagcgctaagaaggaggatgtgggggcagtgttccagcaggcatcccaggctcttccggctggagagctcaggagactgagcggtgtcaaggctggagtgagctatagggtgcgctgggaggaggtgagcgcagcctggctttggcgcgctgtgggtgactcccaggacggcgcggccaggacgccgcgagccgtggggcgtccggtgggatcaaaggaaccagaggaggccagccgacgcgtctgggattgtgggataaggggcgggagagaggagattgacatgggcggggagatcctggcctggcctgtgtcaccggagggggttgtgtgc

SEQ ID NO: 23370 - DNA, 907 bp, Homo sapiens
  chr8:105235264-105236171
  hyper
cgttaaaaaaaactgtgaacctgaggaaagggaaagtgactaccagaaatttaccggtttacttatctgagatgcctaactcactgcatctaattagtcaccactccctggccttaaccacgcggagggaagaggaaacagcaggagctactcggagcagctgcccgggacctgaggcgcgcgccccggagccaccagcccaccgaggtgcagccgcgccgccacctccccctccggccgctgattggcggggaccgcagcatcagcggcatctccctgcgcggggagggcagcgagactccagcagctccagcctccaggattctcagctccctcccgggcgagacctcggacgttcactgcgagcagccgctccgcccgccaccgcctccatctcctcctctggacccctctccaataaattggaggtcccggcggccaggaaagccacgtctcctccgggctgggtcagggaggcaggggccagagcctcagggtcccgtggcaccaacctggcttctggcccactggtcccggaaccgctgcggacgctgcgccccagccgccaagacgccgcgtatcttgtaccgcgggaaaagcgggtcctcgtccaagatgggccggcagggcttggggggtgccagcgctgcggggcgctccatgcagcgctcccagagccggagtagcctgtctgcctccttcgaggcactggccggctactttccctgcatgaactccctggaggaggaagaaggaggtgagacaccccttcccccgtagttggtgtctctatctgtttagaaagtcggtggctggagggttggccggggcagagagaactccacgtagcagtgtcccagcccctctgctctccgggactgtgccgggggcgacagccctagagcac

SEQ ID NO: 23371 - DNA, 1283 bp, Homo sapiens
  chr8:110986113-110987396
  hyper
cgcgcccgcctccccgcccagccgccgcgtgcctccggggtacctgtccctgcagcaggaatcgatgctgagctcatcgatgccccagtactggatctcctgcaggaaggagagcgcgcacagctgctccatgacatgcaggcggccggtgcggtagtagtgcaggacatatcggaacgcctgcgagctgcggtcgaagaagtactcgttgtccacggggttggcatcgtcgcaaagctccagagggctgggcacggcggccagggccccggggcggcggtaggaagccaccaccacggccagcttgccaaggcgcgtgtgcgggaagcaggacagcgcctgctgcgagagcacgaagcggctgccgcccacgttgaccgtgaagcagtccccgagcgccaagggctccccttcaccctcgctgcagaagacactagagtccagggaggtcagggagccgctgtccagcggcgagtccagcagcgctctgccgctggaaggcatctctaacccagtcgccgcggcctgagggcgccacaaagttggggacacgccggaagctttggtcccgcgagggcggtggcacggcccctggtggcggccgggattccccgggctcccgaaggggttacctctccttggcgcaccctctccacccgctgtgcgccttcctcctcctgccgctagggagccgggagtgcgcggaagcagcgcacaagtggcagaaagaggagacagggagcagaggaagggtcgcgctaagagagaggatcaggtgaggtccaagcccgacacagtccctgtgcacactgccggtcgccctggcccttcccaaacgttgtcaccccgcctcccaacttcgcaattgcgattcccagcccaggaggtgtacagattgaatgactcgctacttggtgggtggaggggttggggaagggaggaaggagggagatgtggggcggaggaggaggaagaggagagaagatgactcttagctgaacgcaagcaagcaagcaagcaagggggatggcgagactcactcctgcccgcaggagaccaaaacaaaaagttcagaaagcaaaggaagtggtaaccgggtcccttccaacttgagaatttatattcctcccttttcttttactgctgcttcataggcctcccccggggtgttcgctgggggtgtgagcaggtgggggagggttctctgggtgagggggccgcaccattttctcccaattcactctcattctagtctgatgatcactgacgctccattttcttcc

SEQ ID NO: 23372 - DNA, 640 bp, Homo sapiens
  chr8:110987616-110988256
  hyper
cggagctctcattttagaaggaaaggcaaaaagacaaggaatagaacaagcgtgggctggggcaggaatttaaatagtaacgacggcctccctcggtaaagggagaagccgaggccagcgcccaggtgagactagaagtgtacccacggggcccctggaagctgcgctccagccaacctgttggactcggggtgaggaggtgggggtgggagggaagagcaagtgactcacctgcagctcccggcacatctggtctgcgcacaaccggcgccgcaggtaacgtactcttcttttgatcctcttagtctacacgtgaggtctgactcgaccggtccaggagggaaactgtgttccagctgagctctacccagcgcctgctgccttgccttgccccgcctccacctccctccgggctcctggcccctgcgcttacgctaagcgtgtccgccccgcccgctctagctctgagagccactcgcccagtgcttccagcaccagcagaggggagtggcaggatctaagggagggaggtgagacggcgggggtggaggcggggggtagtgaggtgcccggtgacactcaatattacattcatcctgaatacacttgcagaattactgcatttgattcccgtttcccc

SEQ ID NO: 23373 - DNA, 925 bp, Homo sapiens
  chr8:114446946-114447871
  hyper
cgattatatcagtccaaagtaaattaacgcgcctttcctttctatcggcgcatctcattcggaaaatacggtaggtgcgggcagccggggctctaattgcaggcggcgcggatcagcgttagtcaggctgtaatgctcgccccgcttcggagacttccctccccctcatctgcccccgaatgtgttttggctcaacaggtatcacatgaaaactcgcacttaaaccctggtcatcttctcacaggagccacccttacatttttctgccagggctgctgctggctattcgcgcctcccccacgcgaagcgcgcgtctagcaggcagccccagggccatccattaaccaccaactcccagtggcaggcgaactaagcataaatgtgtggctcctcacccgtcgagccagcgacaaagaaaccttgtaagcaacctgagccgtgctttgtacatttggcagtgtagttgtgccacttaggacaagcttttcggctcagagctgctctgaggccccagagagaaaagaaaaatcaagcttcaaggagcaggttgggattacaaggcagttgctgccacagagaccggggcgactgacttcctggcattttgggatgtaaattaaaattctagacatgccacccatcattggttatagtagagggaaaggtaacctctccagctccctcctcccaaaacatgaattatcatttccactgaatgcaaatgagctgccttccgtggggggacagccagctgcaagctggacaataaactgtttcatagagacgcggcccgattgcagttcagagaggcactcctttacaaaggaagaagcgtccagtttgtgttgacagccctggcgcgcctgggccaaaacagcaccccctttcccgcgatcccccgcccccccgcgacacacagacaccc

SEQ ID NO: 23374 - DNA, 1366 bp, Homo sapiens
  chr8:114449054-114450420
  hyper
cggctttcccctttgcggatccctttcatattattcgcgagctcctaattcctgctcctcagcccggcgcagtggagttgttgctgttgttggtgcgcggtcacagctcggagtgaatggtgtttctgggataccacagcaaccttgacgaggactcaaccatctctccaacgggggcacaaagtctccgctactctggattctgtcttttcttgtgcgttttttcccctccaccaaaatctaccccaattctggctcgttatagcaaccaccagaaaccactagtgagcctcttaaagcccacctctgctctctgataaactccacacaatatttgaaattaaggggcttgctttttttccccgaatagatcaattctgcctgtaaaagcagcccaagaaataatgttagtgagctctccgttgcaggctgcgaatacagaagcatgtcaaaggaatattttaatcggaggatctgtgttgcttttggggaaaccgtgacgataatgaatcgggctccatcgatgcccacgtcgttataatgggacatgtgttactactgtagttgcagtatatttcaggcaggcttctcccatttattatcctgtgatttaattgaaaaaggaaatcacagagaattttctcaataaattctgccttcacacggaaaagaatgtatttgaacacatgtatttacatactcaaataactacgtgtaaacccttcaccgggtttttatgattcgggaaacggatttcatccgtggcctgggcgggggtggggtggggagggaagtcaatgtcgtttcctcaaatagttctccctttcatcctcccaacccccttttcagtttgtgtgtgccgcagttaaactactttatctgtggtagttatctagaacaaacccatttgtcttaattctgaatcggtaccaaatatgtaaataggaggtttctttcaaaacgaaaaatgtatgtatctatacatctggatctgcttcccccatgcaccacgcaagggttaagattgcacaagggaagagttcttgcgccatctactggccgtctccgagccgcccgttcttccttcgcatgtataagggaccctgtttttgccatcccttggtgtcaggggagctgtgtccccgggaccagtatgtcgtgctccttgatttttttcgaccacggtcctggcccaaatctttcaatgaacaagttccttagattaggcaactgattggtgatctgaccttttcgggaatctggtcccctctcagcagtggggagtgccacagcgctagttctgaaacaggatattgctgttgcgtgtggctccatttaactgcctcaggctatcatgggcgtgagc

SEQ ID NO: 23375 - DNA, 1377 bp, Homo sapiens
  chr8:11561282-11562659
  hyper
cgggcaccccgggtgacccagtgccccacacaagatcgagagttgagcccaagaggtcaccttcttctctactggccccgcccctcgcccgccgctgcgggatgaggaccacaggaagggggggcggggagggagaaagggaactcattaataaagctgaccctgggcaccacagcgaacccaatcgacctccggctgggttgcgggtgattccccgctccctggcggtagcacttgggcattttccgcggagaccccagagcctggactttgcctgctgggggagctttccgcacagtcccgcagcctgcgcccagcggaggtgtagccggggccgcgcacccccgccccgcccttgcacgtgactcccacaggccagtcagcgccctagggccgagttgctgggccggggacccgagccgcgagctggggacttggaggcggccggcgcaggggccgcgagaggcttcgtcgccgctgcagctccgggggctcccaggggagcgtgcgcggaacctccaggcccagcaggtagggcttttttcttccctttctttgctccttcccgcggtcccccaaactcggagcttctccgcctttgcttgtctggaggtagagaggtagctagtgggaggaaaagagacgtgcgctactcacttcaccgaaattgcccaacccctgctctgcttttgactttgccttagcaacttctttaagtcaaagtaagacttgggggcaaaacagagaaatattggaagcgcctttggattctttccgtgtgaacttgaacgctttcaatccctgtccccgtgtgcacattctccaacccttgtttgcatatcgcaggccggggcctgggtggtgatggtggccgcgtgaagttaccgggactgacgggcccgggacaggctgcacggcagctcgcacatggagggaagtagacggaggcttgtcgcccaccagcgactccggggacgcagggtggcagtgccaggcagctccgctgggcctcaggggcccccgggagccgctctgaggtgcggagaggctgctgagtggcggaactattcatgccctttctggccggcctcctcgccctcggggctggggtccagggactgaatgctcctctggaagctcaccaccccacctgcccgcgctgcttctacctgaaactggccaagggcccgagcccggaccggagccgtgacttccctccgccggccacggggctgcccggatccgccgggttatgtcgcttggctttgggctcaggggtcaccgtgggcagaggggggtgccggggtcgcggactgccaccaggttgaggaaaggaggggccttttggctggggaaagagcgtggtgggggacccgc

SEQ ID NO: 23376 - DNA, 624 bp, Homo sapiens
  chr8:117950334-117950958
  hyper
cgtctctgaatggcggggcagttgcagcatcccacttggcaagggtccttgaattacctccgcccccgccctgaccccgccctaaacatcaaacttagaaactcatctttcagcagcagcggtagagcagtgaccaggcgtctccgcgatgggccccggggacttccgccgctgcagagagagaatttcccaggggctccagggactcccaggtagagcggagctttggttcccacctcgtcccgcgtgcgacttcttcggggacggcaggagcacggacatccaggaggaggccctcgccgccagcccgctgctggaggacctcagacgacggctgacgcgcgccttccagtgggcggtgcagcgcgcgatctcgaggcgcgtgcaggaggcggcggcggcggcggcggcgcgggaggagcagagctggacgggcgttgaggccaccctggccaggctgcgggcggagctggtgagagagcgggctaggcggacggctcccagggctccctctcccgggtcctctcctccagctgcagagccgctggccgcgtagcccacccgacgccttggggggcccctcaggtctggacacggcgttgacgcccccgcctccccagcatc

SEQ ID NO: 23377 - DNA, 638 bp, Homo sapiens
  chr8:124172800-124173438
  hyper
cggcgacctcccggctcccagacctggctgagcccggcggccgccaggggacgctgtgcccaggggttgccgccgctgccccgcaggtttcggctttttccaaattagcctagggacacaccgcgccactagccggtacagggtaccaggcccgatccccacgccaaggtggccccatcacccagacctgcccagggaagggaggtagaacaggagttgggggtgggggcggtgcagatatttcgctccgtaaagtgtctccagcttttaaagatgtatgtccccaattttccaagaccttctgagccttcgagtggaatgaaactcgaacggcttcccagctgcggcgatgaggtcccgctcctgcagaatcccggcaggagcggagactcgggaggggaccgctggctgcaggcgccctgctggagtccggaacgagggtggtcagggtcgcctccccacggggtcgcagatgagggagtggggccgcgcagggaggctcctgcaggccgtgacccccaggcctggcccgtagagagtgactgatggcgaggacccgctggggacccgagggcctcagcctgcgcctgcgccggggctccccgaccaagaccttccggcccccaggcctttgcacc

SEQ ID NO: 23378 - DNA, 993 bp, Homo sapiens
  chr8:132053354-132054347
  hyper
cgcagcgctggctctggccagaagcatccctcccggagggggtgtggggactctcgctccagggtcccagcctgagctataagacgaggtcaacgctttcagctgtgctttcgaagggtcgcagcacacagttctcatcccctttatttcgttctttggagtccatttggctcggagctaggaggatcaggagaggcgggggaaggaaaaagtggtgagggctccaaagccaagagctccgagaacgaagagaagccgccggtgcggatatctgaggctgagaaccgaagcttggcggatgaggcgaaggtttggaggagaagggaggcccgaggccgcgtggaagtcgacagagacgcctctggatctagggaagcgccgccgcgtgccaccctggagctctgaaacgcaccgcgggcgccaggcgactgggagaaatttggagacctgtcagagtggtcagacacccgcggtgacttaaacccgcccccgcgccaagccacgcccccggaaccgggccgggggtggcggagggacctgccatccagatctggccaggacgccccaggtcttgtaggcagaggcacgcgcgggccggcgtgggagaggaccactgagggctagggccggcgggcgcccccggccttccctgggcgcactgcgatccagcgttccagctggccgcgccagccggttcctccgctgttcttttttaggcattggctcttgtcctctgcaggtgcggagccaggactcgtaggccgctttgcgcacggactcggagagcccagcgcgacggaatacagggtttccttttcgcccttcctacccgtgcgtcttttggcaaagccaactttcgggctaaacgcaaaatcccccaagaggccgcaatcatagaggcagtcagtttcctacaggagcctctttactacctcgatccgaagggggtggagggtacgggacatcaaaatggggacgtcccctgcctgcctc

SEQ ID NO: 23379 - DNA, 242 bp, Homo sapiens
  chr8:140643192-140643434
  hyper
cgaatggtccgctaggacggagagcctgtgcctcaggggctccgctccctgcaagaggggctctgcgcagcgccggccaccggagaggcaacggcgccctctggcgggcactcgggcgactgcagggacacggccccgggtgcggggtcggccgcccacgttttccggtgactgcgtccagaacgcaggaatcatctgggaaaagtcgctaatctttctttctcatagatgagatgtcatgc

SEQ ID NO: 23380 - DNA, 320 bp, Homo sapiens
  chr8:145747534-145747854
  hyper
cgtcggcactgccggccagtccttgctcttcccacctttcggaggcccaagatcctactgtggccggccagggccagcgagggaccccccccatgcagagctggaggttggggtgatgtcttttcggaagagcttcaagggaggtgttggggcctccccggccaccttccattgctaccccaggattcccgagtgcaacgttcccggctcgcgccccacacacggctcagcgcacactgcgcggcttccacctttactgacggagcatgcgcgaggccgcaccggccaatctccggcgcccacgtcatccgcgcgcccgc

SEQ ID NO: 23381 - DNA, 995 bp, Homo sapiens
  chr8:23559353-23560348
  hyper
cgtggccagaaaagagtgctcctctggattaacggagtcccctggggcgcggccttatggggatgtttaagtcccaaaggaagaggctcaaagcaggttactcttcgtgaacttcccggatcctcaagttcccagctcttcagcccccttcccgccctcccgtcctcttctctttcttccccaacagctgtcattaattggaggatggtaggcccgctagatcaccatctccattcaccgccgatgccccggggctgctgcgtacagatgcaagagcctctcgggcctctggggttgaagccccaaaagtcacgcgccttagtactgctcccacaccccaaactgccagccagccttggtgttcttcagtccctgtgttgcttggtgggtgaccggtggaggggtcttcttttgggggaagaacgtcccaggcggggcctttaactgggtgactgtggtgcagatcgcagtttcagagatccctccggaaagaagcgccgttgggtagcagcttccttccagcgccgcgtcccctccttgtcacgacctgcgggcggaggggaagggaacgagcatctggccctggttggcagagtcaagccgaggagcctcaccaggccctgacaccctgcagcgtggctgccagatggccctgcggggtggcattctggccaccgtgtccgaagcccgcgctggccagtggtgtgtgtggcgcaggacccgagggcgcgcccgcgtagcaggtgccgtagcctgcgccgtagggtgctccgctgtagcctccgtagcaagagtagggcgacactgctgcactgtaggggctggggaaggcaggtgcgccgggcccggggcccaggcagggcttgccatcgcgcaccaggacgggcacagctactcggcgcggcgttagagggtggccagccagttccagcgacttgtcctggcgctgtctcttgcatttgtagcgtcggttctggaaccagatcttgacctgc

SEQ ID NO: 23382 - DNA, 824 bp, Homo sapiens
  chr8:38323132-38323956
  hyper
cggcaaagacggccggcaatagcagaggctgctgaacctcggtcaccgagaggaaggtggatgacccgggcgtgggggtgattacccagaccaaggcgcgtcccacggggccctgctacttcgcttttaaacaagcctcagggaggaaaccgggagcccgggccaagggaggaaaatggccactttctgctaaacagtctcaaggctagatagtattccaaaaaaagcgctggtccggaggtgcaaagggtagggcacatctgcggaggaaacagtcaccttaattaccacgtctagagaaagtgcgatttcattacagcctccaaaactaccgcccaaagaaggaaaccagagaagtgttttcaatttgaaagaggctggaaagaagcgggtaagacaccgactctccccaccctcccggcaactttggaccacaaggcgctttcctgcctcaaagactattaccaaacacaactcgaaaatccaaccccgctttcaaacctgtagccgttatttaaacggtaaaacaccccactttagtttccgggggatgcggcccaaatcagtccttaaaaacacacagagagcgcctctggcagcagccgcccacgcccccggccctgcgcaccgggcttgctccgggaggggcgcgtgacgccaccgcggggcagccgagaggggaccgcgggctccgggcagggcaggcgctcccgcagctccagctataacacaagggagagaaagcaacgctttggttccagaaacttccatcgtcaaggccagttctggccagacgcacagccaaagagcccccctagtctagc

SEQ ID NO: 23383 - DNA, 1647 bp, Homo sapiens
  chr8:4851007-4852654
  hyper
cgcagcctgtaggctacttagaagaaaacattccccaactcattcagggagaaaaccaagctcacagagccccaagcccaggagccacccagagaaactccttcccctgaccagcgtagaaggaggatacccgtgcgcccacagtgaatgtatctgacttggaagccggtccagaactcctagcctgtttcacgcaccttgccaacaccttacaacttgcaaggagcgaagtccgggggagaggaaagcgggggcgaccttctagaggcagctactcctcgccggctgaggacgttggagagggaaggaggagaggaggaatggggtgtatgggtgcgaggaggccgggccggcggagacctttgcctattggtaccaaaacccccgtagagagcccgaactttccaggccggcttcacccgggacgctttcccaggcgcgtcgggtccggggagaaagtcctgggaactgcccctcagccaccccgacccgtggagtccacgtctcggaggaggcaacaccgccccggcggagcacagttccagcccaactcgtattgggttcctttctccttgacaccctgtactgccgagaaaaagagatctctcctgtgagcccaagagagggggaaggaatggcggggtggggcgggggcccaggagggctggggagagcgcgatggaagctccctcccgtgcatcgcgttccccgagcttcggcgatggagcagcgccgggcagaggcggccactccgtaccctgcggtccccaaaacgcacactcgcgtccgcacacggggcctccgagggctctaccgcctccccggccaggagcaagtccgtcttacccttcgctgcagtgaggagcctcgcgcacagcaccagcagcccgagaagcaggagcagcgactggaatctcctccacgcagtcatgtctgcagatactccacacgcacgcgacaccgatggctcctccgaggaaggcagggctatgagcggagccaaataatcacccgagggcaaggcgagccggagagagagcccggtcccaagacccgccgcgcatccgacgcctcctgaaggtctgggcgcccggctcgcttccctctcatagcatcgggtcccgagccactgcagggctgagctgctccgagcgcggagacccgggctggcggggccggggccggggacgagcgccggccgagccgggcaggaaggcaccaaggcggcgaggctgcgggagggggagaagcggggagaggagcgcgcgcagccaggagagacctggagaggaggcagctggagagagagccagcgagtgggagatgcggggaggggggcgcgggggggaggagagatccagtctagagagaaaaggcggagagcgcagaagaagggctgctagtggcacaaggagccgctgccgtggaggctggactcaaccatccttacccacagagaggggaccgaggctgggcacggcgcagtcccagacagacagagcccagcctcggggcctcgggctgcccgcaccgtgctgcgcttcattcggcctcagcgcagcagcgcgcaggctggagaaaggagacttgttgggcgctcgggtgggggaagctcacgccgcacaccggggaggaacaatgtaatcc

SEQ ID NO: 23384 - DNA, 971 bp, Homo sapiens
  chr8:55370128-55371099
  hyper
cggcttctgcaaaaagatgtgctttaaagagaatagaatggacgctcggtatgttcatctaaacgaccttgggcaagtacgtcgattccaaggtacaatcagccctcccagacggcttttcgagtctccctaaccccggtgggagaggacgcggcgccagagcccagctccggctagttttcccgggggcaggtgtagccttgggcgcggggccgggggaggggcaaggggcgggcgtggggttggactgggacgtgggactcggaccacggcctgggcgtgggcctaacgacgcgggaccggcccgccctcgccgctccattggccacatctgtgcagaaaaggccccgcggcccaggggcgcccgcagtgtcactaggccggctgggggccctgggtacgctgtagaccagaccgcgacaggccagaacacgggcggcggcttcgggccgggagacccgcgcagccctcggggcatctcagtgcctcactccccaccccctcccccgggtcgggggaggcggcgcgtccggcggagggttgaggggagcggggcaggcctggagcgccatgagcagcccggatgcgggatacgccagtgacgaccagagccagacccagagcgcgctgcccgcggtgatggccgggctgggcccctgcccctgggccgagtcgctgagccccatcggggacatgaaggtgaagggcgaggcgccggcgaacagcggagcaccggccggggccgcgggccgagccaagggcgagtcccgtatccggcggccgatgaacgctttcatggtgtgggctaaggacgagcgcaagcggctggcgcagcagaatccagacctgcacaacgccgagttgagcaagatgctgggtgagtccgagtcgcagacccaggcggccgggcgcgctggcgcgaatcgctaggccgatttcttaaaccccaaactgttctttgcgagcctgac

SEQ ID NO: 23385 - DNA, 491 bp, Homo sapiens
  chr8:67026485-67026976
  hyper
cgcatcctccagttttccttcctgtcccgtacggtttttctttcgattctcagcccaaactagagctgaaaagtcagacgaagtcaggtgaagagtagggcgagctccagcttaccactctaaaacttcccagacaatgagtggtgggcgctagcagtttatccttctagctttaaatttttagacccatttaattggggggaaattcacgaaactggttatttttgcttcaaaaatggcgacagattgccgtcacatgtattatcactcagaatcctttatgatttgtgataagatgtctgcatttccagggactcatctgaggctaagctgcccatagttcggggagacccacagggaaaacaaaacaagaaacagagaacttggaaacggacgctgattactttgaacgtttgctcaaccgaggaagcaggaactgttcggccccatctcaagtccgcagggcggactgcctggctctgggcagatcc

SEQ ID NO: 23386 - DNA, 736 bp, Homo sapiens
  chr8:73163512-73164248
  hyper
cgctgtgtgggcgcgtcattagcggggtctcctcttggactgtgaacacaccccaaagcttgcaaccccctggccactccacgctttctccaaaccaagggctgcccgcaaggaaacctcgagccgaaccgcggccggacttcagaacccgtcccgacccgcgaacccccagggtaccttaagcggttccttgcagtcctccgtgtcgtcccgcacatcctcatagacaacgccctggggctccttcttttctccagggcgccacatcttcctcgggctgcgcttcattgaccccaccccggacgccatctggtgcatctgctccccacgagcgcgggcacctggggcgagagagcgctgtcagccggccaggcgctggggtccgcgcgagcccgagctctccctcgctgcagctcacaggcagcgaaaatctcgctccgcgagagccctggagaacttctggaaggagttctcaggcccgcgctacttacagtgcaggaagcaagcggggcgtgaagaggaggtagaaacacagacctccctagcaaagagggaggcggcgcagcgtctgccgaggactcgccccttcaggaacaaagtgactcccccgtcccgctgtcctgcagctgcagcagcgcactcccagagtcaagcgtgtcaggtcggtgtggatgcagcgaatttgttgtaatctacacattaagagcccccttgcctcgccctgccccctccaacc

SEQ ID NO: 23387 - DNA, 672 bp, Homo sapiens
  chr8:80695898-80696570
  hyper
cgcccaggctagaagggcccggctcttggccctcgctgtcctgcccgctgtcgccgctctttggcgcccccgcaacagctccctctcagcaggacgcggaaaggtcagggtccctctctctcgtatataccacaaagaaagcgcgttccccgcggcgccccgagagcccttaggcagacgtcccgcagagtcccaagtccctacggtgggcccgcgggctcctgatctgtccaggcccctaaactatcacaaggaggatatttgatgaccgtctttcttccctcgctctctcccaacaaagggtaactgacctctcgcgtgacctggccagcgctgagattccctcaacacgctttccccctattgtgtgcagacccccacagggcggaggcgagcggcgcgacccactggacggacgcggcccggagctccaggcgcccggacctggcgggccctccctgggcgggcgggtggcgcgtcgcccgccgccgatccgggcggggtgaggggggcgctgtaattgcagcgcagctcgggttcccacgctcctattgttggcgactttgtttccaattcccatcacgtgtgctaattagttagcgctgctggctggctgggaggcgtgtggctggcctaaaagcagaaagatcacttcctgtagggagccgggcc

SEQ ID NO: 23388 - DNA, 369 bp, Homo sapiens
  chr8:81478144-81478513
  hyper
cgtgggtgttctcgtctttcctcctatcgtatgttacggttacctgcagaggctggcgtcgaaggagaggtgctatgcgaggatggccccaagttaaacagtgacagcctctgccctcccagaccccaggcgcgcgggggcgggcgcggaacaccggttccaccgccaccttcaggcctcccggtgtggcgcggttcgggacgtcacacaaataccagggcacccatgtttctgccctgggaaactctcacgtcagccggccccccaattctgctaaaggagaaaacaaaatttccctcccatggacgcagctgggcactttgagaactggtcgggcagaaggctgatcgcgcagagcctggtgcaaac

SEQ ID NO: 23389 - DNA, 929 bp, Homo sapiens
  chr8:89339057-89339986
  hyper
cggctacaattgtgtctttgagcgcgcagcatcgtgctttgtgctgccggggataacggattctgggtctcacacgcatccgtcacctaaaacacccttaaactgaaccagggtctccacagctggaagggaaacaacgtgctgggacccaggctgctctgagctacaaggatcccaggagtgaaggaaatgtttcagggagcagcccaggcagcggggggaggaagaaagccctcgcactcttacctccacattgaaatactgctccgttccgcagactgtagcacataaaatccaaagcaaggtttgcaagaaaaacacccccgaatgatgcacgaaatccaaccgtcttccagtgctgaatgtgagtaagatcatagtgaactgtgcttcaatggatggacgagctccccttcgttttctccctctctccctctccctccctccctcgtttcctttcaaaaaaaagtcctccgggtgggtaaggagcctgcaggttcacccacagccgggcaaggggaggagacaggggccccgcgctcggcagcccccgagaggcagcggcgaagacagggtcagcagtagttcctgttcaccatcctccggggtcagtcaccgggaacgtggcgcctaagttcaccggcggttccggctcaaagagcctagtcgcagccgcagcagcagcagccgccgccgccgccgccgcctccagcccgtgcgtcctcctcctgcactgcctactcctcctcctcctccgccgccgccgccgcccccagctcctgcgggaagggcctccgccgctcctcactctctcgcctctgcttctccttccctcctctcctcgctcccctccagaatgttcatccgtaatctacataactcctccttcccggggtctgcctggctctcggggcccttggcgcgcgcgc

SEQ ID NO: 23390 - DNA, 922 bp, Homo sapiens
  chr8:91094269-91095191
  hyper
cgcgcctgctggagctcctggatcaagttctgcagctcctttccttccaggtaaccacttcctgcaaagacaaagaggcacccaggtgtcagatatctcattccaagtgtctttcccgttcactttccaagacagttatctttctggcgacccgagaggctctctcttgcctggacgttgattaaccagcaaagtgtacagacggtgaagcgctcccctcctggggtatcaaactttagatccactgaggacaaaggaggatggttggggtgctaagcgcagccacagaaactttgggggggcagcattccccaatccctgctctctctctcctaccattaccgttcctggaaagacaaaagtttaaggttttgggattacggtggaaacaatataaactttcaggttgacagtttggcggccagtcggggagataagaagataagattaggcagaagggggaagaagtaaagaatagaaaggagggataatgggatcaggaggctcagaaaagggcaaagaatgggaaggggcatggaaacgggtcttgaaacagttaaaaagagaagataatcaccgtcagcgtcgaaatggagccagatctcgaaaaactgtgaggctgtgatgagggatgactgcaggtgggattctgccattgtacagcggggtgtgtgtctgggtgtgtgaatatgcgtgtgtctgtgtccgcgcgagggggagtgagcaaaagctcagcgtgtgcgcgagtcagggctgcggagggagacctgggcgcgggcgctgccgggcgctgtcctcggtgctgctcagctcagcgttcctccagagttctctccctacaccccgcacccagttctcagtatttatcccgacggccccaagccgggccacgcctcctccagcctcccattcctcactcccc

SEQ ID NO: 23391 - DNA, 261 bp, Homo sapiens; identical to SEQ ID NO: 6313
  chr8:95003763-95004024
  hyper

SEQ ID NO: 23392 - DNA, 832 bp, Homo sapiens
  chr9:103790567-103791399
  hyper
cggggcgacctgcagcctgtggttcctcctggacctctggggagacgcatctcggttgcccgcagggtagaaagcaagagaatggcccacaggaacgcccgcgccagcgctaaaaccacaccgggagaggacagccccacgttaccgaggactcgaggcagaagcggtctccaaggatgggtggggatcccaccactggcttccagctctgcatgcgccgcggagtccccgcgcagggcgcacctttgcggcggggtttccccgctgccttctgggaaccccgcggagcgactgccgctggacgcaatctggctggcttgcctctaccccgagctcactctctctgctctgtctgggctctggagccagagctgagtctctcttgagcatgcgcagcccggcaccctccccgcctctcccctcctccgccccctccgcgccagccttttgctctttcctttcattaaacaaacaggagatcctgaaacctggaccctgtgcaagctgcagcgccaggaggaggcagcggaggaagcagagcgcgggatgggcgcccagcggcatctgtgatcccgcgcacctccgccccacgggcgcgcgcacaaacacggacacacacatacacacactcgcgcacacactcgcacaaacacacactcgtacacgcccgcgccgctcgctcgccggcttgctctcccacgcaagcggaatgcagcagcgcctggagagcgtgtctcggaccgccgcctgaatgtacctcgctcccgggagccggacggcccagtagggcgcactggaggacgctccgctgcgggaggtgagtgcggcgccc

SEQ ID NO: 23393 - DNA, 807 bp, Homo sapiens
  chr9:10612635-10613442
  hyper
cgcgctcggaaagccggcttgggtcctgctaattattctgaaggcaaagtacctgcactctccccgccgaggctggctggcggcgccgcgccggaggggaggaggctcgggaggaggaggagaaagagcagcgggaggactcgggctgggaggggagcgcagggttggggaggccgatgagcggctcccggctcctcggagaagcagccgagacggcaaggaggaggcgaggctctgtcggggcgaggcgctgcccccacgcgctccggccgccggctgcgggcgcggctgggcggggagccgaggcggccgctcccgcactcgctcgctcgctcgctggcgctccctcctcgtctcgctcgcactcacaggcacacaccccacgtctccagcagctgccgctcggcctcacgcactcacctgcatttccttaacgagccacttgatggctgccagcggcgtgggccccgctccggcgggcgggggccggggcggggagaacgcggcgcgggatgctccgagcgcccgctggggagagaagcggcggcggcggcggcgctgcgggcgcgccagatggggcgggaggaggggagacccggcacccaccggcccagagctgcctgacgcggcctgggcggaccccgccgcccgggtgcctaggcacgattccagggatccagggtaaagcggttcgcgcgggaacaggaggatatgtcaggcacaggctattccccatcactatagccacagaggactggtccagatgcggatcccgatctgtgcttcttcaggtgttcgcgtgctttc

SEQ ID NO: 23394 - DNA, 392 bp, Homo sapiens; identical to SEQ ID NO: 6319
  chr9:122318421-122318813
  hyper

SEQ ID NO: 23395 - DNA, 224 bp, Homo sapiens; identical to SEQ ID NO: 6320
  chr9:16133902-16134126
  hyper

SEQ ID NO: 23396 - DNA, 430 bp, Homo sapiens
  chr9:19127135-19127565
  hyper
cgatagcaatcgccctaaatctgttggcaggaaagaagcctcaacgcacaaaggcaagggtcgaaagcgcgggttcagcagaccgcccctacccagccaggacctggaagccgcgaggcgagcggggggtctcggaccatcacccccgcgtcccgtccacctttgagccccgcggggagcagagcagcggtcccaaggccccggggagccccccaccccaactgggcgccgctgggggcccgggaccggttcgctggggcacccactgggcgcgcactcaccgacggactgcagcgaaaggcgaagagcaggcgcgtcccgaagacgactccggctgccacgacccggtcaaagcgtggggcccgcgggcgcccgggctataaaccccgcctcgccgcccctccccaagcctccgcagcacgtgacccgc

SEQ ID NO: 23397 - DNA, 435 bp, Homo sapiens
  chr9:21395928-21396363
  hyper
cgcttcctgattgttcatgattttcccctttctccgaattcgggtctttctccgcagaaatggccctgaatctctaacactgactacggcacgatctgattttgagccgtcagtcccctcaatacactggcacattggtaaaacggtctcgctaaaatgttccatgagaaaaatgtctcgggggaggcggcggtagagctctccctctgtagtcagagccgtgaaaggcggcgtttactcgctgctcacgaggcctgcggaccctaatccccaagcgcccgggcctccactctgcggaccccaagcgcgggtctccttgaggaaggggcgaccgcgggttagggtcgctggtgggtccgttaccgctggtccggcgccctctgtcggctgtttgtaacagcaaaggcagctttgtgcgctgttagcagtggtcgc

SEQ ID NO: 23398 - DNA, 875 bp, Homo sapiens
  chr9:29211814-29212689
  hyper
cggagcagcctggcccagaccaaccacccagcgttctccgcaaaaaacttcccttaaagcagccaaatattcaagggaggcgggggaaattgggcattagttcgaatacacatacaacagagcaccacggagcaacactgaaaggcaccttttttagatacagaccctatagactctctctcacccttcactccctcccaccctgagtatctgactgagaatttacagagaaccaagaggcgaaaggagagtggaggagaaagagggcattacctcccggggctgccctcagggtgcgggtcaggatctcatccccgaagtggctccagttcaaggcacagctttccagagctcagccgggttcggacctgcgtccccgcggcgcggtgcggagctcggaagcgcgccgggactgccgctcacgtcccccgcccctgccgcgcgggctccgccaccccgcgagcacgctggctctccgcgctcaccccgccgcctcctggcgcccccacacccacccgctccgcggcgcccgctgggagcctctagcggaggcgaagggaacagcaggcgacctgcggcgcccaggttccgacgccggttgcagggagccggccaagcggcagcgtgggcttcgcgcgcccccgagtccgcaggccgggtgccgccgccgcccccacctgcccacctgcgccaggctcacctgccaccgcgtcctagttgcgttcaccggtgcccacagctctctatggcaattgggggtgggtctgcggtgctaataaaaatttaaaaaaaaaacctctctggtaaaaaaacgaaaacccaaaacccaaatccacgctgtatatcaacctccacagagaacccagtccgaaatc

SEQ ID NO: 23399 - DNA, 964 bp, Homo sapiens
  chr9:34701373-34702337
  hyper
cgaccggggcatgtgtgcggatgtgtgtccgcgcccgtgagcgtgcccatgcatctcccttcctgggcctgcagggggcgccccgagcctgggaagggaggctctggagtggggcgcggctgcggcagaggggtgggcgcatgcggctgtgaccctgcgagctcctcagagaggctgcggtgagcgggcgtccgaagtccctgggcctggaacagcctctggcgccctcccggctccctggccccgccgtccctggggtccccgcgcgcgggccgggcgtatggaggggaggctcgggctgtgggtggtgcccgcgcatccgatgacctgggccgacagttaccccgggccaggacaccgccgtccggccaaacccctgccacccaggcccccgagcctcgggggtcctctgcggggccggcccagcccggtggccgggggaaggcccgtgtttgtcggcgaatatgaagcatttatctttccctcccacgccccaaatagtcccgatttacccagagcccaaggtgcccaatgttgaagtcttgaaataattactgtttggcttaaaggctgaaggagggttcacatcacctctggcacttcgctcgcacccgatagatatcttacaccactcattacggggccaacgctaagaaaggtttccttattccaaggaaatatattaggcgcgaggctggggctggaggatgaagggctatagcctgacatgggcggaaaaggaacttgtcttgcccataagtggacacagggaaacgcgcaacctttggcctagaatgagacacatgtgagaacaaatcgtgaaaataattgaaaacaaattggtcctagaaagatgaaggaaatgagaatggaaaattcaacccccactcctgttttcctgtagcagacagaggactgctgcctcctggtggccgagcggggcagtgagcgcctcccagcaggc

SEQ ID NO: 23400 - DNA, 894 bp, Homo sapiens; identical to SEQ ID NO: 6325
  chr9:35756575-35757469
  hyper

SEQ ID NO: 23401 - DNA, 857 bp, Homo sapiens
  chr9:36036762-36037619
  hyper
cgacacacagttgggccataacaaagagccctggtacggggcacgttcccgcccccgggaggttttggaaacactgtgaggcagggggcggggcttgagcgggccgcagccagtcaccaaagggccgggcgctgggggcggggcctcgcgcgagcggcggcggtagcggcggcagcggctgcggccaagctgggtccgagcatcccgcggctctggagccgcccggcccggacatggcgaccgtccgggcctctctgcgaggtgcgctgctccttctgctggccgtggcgggggtcgcggaggtggcagggggcctggctccgggcagtgcgggtgagtaacctccagagcaacggttcgaagctgtcgggagcggccgccacagcgctccaagatggcgcggggcagggggcgggggtgcgcgcgacccccagaccctgcccacgtccggcgaccccgggaccccaggtctcagcgctccagaggctggtgccgaggcggggcgagtgaggaactctctccgccccaagatcttctgggcggtgactcgggtttgaggccttggtctgtcacccaccgacacgggccccctcttcggcactgaccccttcgcttgcctctgctgcttgtcagaaaagggtgcgatgcccccgcccaggatcgtcgcgaggtttagatgggatttcggatacgcagccgccctaccgcggccctagttagttattgttacttgttacttgacccgcacttggttcataacgaccttggtggcggtgagcactgacggtccccacagcccgcgtggtgggtcctggactcgggcaggagacattaaaaatcagtaaaccctgtccccc

SEQ ID NO: 23402 - DNA, 1848 bp, Homo sapiens
  chr9:6644312-6646160
  hyper
cggtgagagggtgcctgggaagtggggaatctgctacaaaacgcaggggaagctcgcgggggccctaggataaagaccaagaaccgcacaacaccgactctctcctaacacaaaactgtctgctccgagaaccaaatatcccaccttcccgcggctccggaggtacccgccactgttttattttaatccacacattcccagtcctgagcaatccttaccccagagctcgattttcagggaaccacaaaagacaaataggccagaataatctaagtccaagggagccctcccggccacttacaaacagggtcttccattttcaagggtcttttcaaacggatgttggcagggaccgtcttctcgatcaattcatcaatgctctaaaattaaaacgcaaggcagaggaaagtgcctctgagttaaaagagtcacctctgtgttttgcgactacaaagccttgtgggaacctcattgaaatcgcctaattagggttctttttaaaagaaaaggaaaactctgagcaagccagaatgatttggaggaaagaaaatcgtgaagtggggtggagattccgccactcggggttggatttcagttgcaaccggagctaaccggtaagcccactcttaatcagggggtcttcctcctcttgcaaagtttaggtccatccacagggccacttgggctgggggtggtttaaaaatgtacacttttgaggcacgaagactgggtgcaggagaaagtaagctgttaagaagtaagaaggcacgaggaccaaaggcacgaatttgcttccacgccacggcccgggacccagggtgcggggaccacgcggagcgcagcagagctcagggtaggagccgggaggccgcgcaggcagagcccgggcagggcggaggggaggccgcggagggccgggtggaggtccttaccgccagccccaaggtctgcagcatctctctctggtctttgtccccagggccgatgtgcctccgagcgaagtcgtcgtgtctgggcagaaggcgctccaggaggcgcgaggccccagccgcggcgctgtccccgccgccactgctgctgtcccggctccgcggcgcccagcacggccccgatcccccagccaggcggcggccgcccccgaccccgcggcccaggcgcagcccccacgccctggcacaggactgcatggccgcggccaccgtcccctgccccggcccgcaagggtcagccgcgctcttggcccctctcctggcctcggtcccccgggtggcggctgcgcccggcctggagcccctttcgctggacagtcggccggacagatggatggacgctcgcgggcaatgaatgggcgctgcgctcaaccaagacactcgcgcaaagttgtggctccacccaaggcacctgctccgcacactttaagcggcgccctggaggcgggaggtgggttggggccaggaagcccttggccaatgaaagtagacagagggggagggggcggaacagttcccgcccccgccccctcttcctaccctcttcccagcccttccgtggagtcccgcttcccctggaccggaggctgccatctccagtcctacccactccgacgctggctggtgccgggggccgggacgctccgtacgccgcccgccagggtgtggagccgcactggggcaagatcaggtgggacagcccaaagactccgggccaagttcctgggggactcggcggagatggaagatgattctcgaagctctccatttccttaattttgaggtatctttctctgtcacatttcatctcagggaaattaatatgggcagatggcggttcttttatctttgcgggagc

SEQ ID NO: 23403 - DNA, 866 bp, Homo sapiens
  chr9:71788936-71789802
  hyper
cgccgcctcccgcccccggccaggagtcgcgcgtgacgcggttcgccgcaggagcctcgaaggcgcggcgccggcgagcccttccccggcaggcgcgtgggtggtagcggccaatttgacagtttcccgggccgggcggccagcgcggaggcgccacgctcgggtcgggggcgggctgacgccgccgccgccgcgggaggagggacaaaggggtgggtccccgcgggtcggcaccccggcggttgggctgcgggtcagagcactgtccggtggtgcccaggaggagtaggagcaggagcagaagcagaagcggggtccggagctgcgcgcctacgcgggacctgtgtccgaaatgccggtgcgaggagaccgcgggtttccaccccggcgggagctgtcaggttggctccgcgtaagtgcctccttgtgccgcgcggttgggaggagggtcgtgagcgtgagcgtgggagcgctgggggctctgctcgcgtgctgctctgaagttgttccccgatgcgccgtaggaagctgggattctcccatccggacgtgggacgcaggggaggggtaggtttcaccgtccgggctgatgactcgtggcctccggggctcctggaacctttactctgaagtcacttgggctggagattaaggcgcgagtaggggacactgtcttgaacccggtgtcctggatttctgctggcttggaggcatctcgtgtctgttgtgtcgcttgcatgtctttgtgttttccttctctatttcaaaccacactcggtattgatgcaaagttacaggcttgtgtacgtgagagaaactgaaaactcatcacagagcagaatcccttttccctttcaatcagctgc

SEQ ID NO: 23404 - DNA, 512 bp, Homo sapiens
  chr9:79626891-79627403
  hyper
cgctaccccaggaaactcacatctctccacctccatcgctgtgcggagaaaacccgcaccgaaggcggcttcctctctaaggcggcgaccaggggagacagcgccccctgctgactaaaatcacgcaggcctcgttgccaaagtgcagcgggcgcagcgggcgcagcggtctcccggcttccctcccggcgcccgcagcctgcctaaagcctttctggaaactcgtgttttcagcctcagcctggcagactgcggagggcgggccaggaagagtcaaggagccgggggtctcagactttgctcaccccttggaaatcaccttctcgacccgctagcctaggccgagacacagtctgtattctgaaagccgccagtcccaccaggggaggagaaacccaaaacagaaggagcagggccccacggctgggctcgtgacgaagcatttaatgacctttttaaggaaacgagggaggaggtgaggaggccaacagccgcttaggagagcccgaaac

SEQ ID NO: 23405 - DNA, 334 bp, Homo sapiens
  chr9:79636205-79636539
  hyper
cgctggtaaattggaagtcgattctgacccttattcctgggagcagaagctggcagagctaaacctcccgcgaagaatccaacagagagtgacgctgaaacggatctcagccaccacgtttctctctgctggtcgcatcctcggcggtcgcctctcgtgaacattcaagacaaaactgccgtccactaaggaaatttcgttttatttaagaaggaaaagaggaagcgtttgataccgttattttcctagtcagctaaatgggcaaggaaacggtgtcatgaataaagtcgctttggagggggaaggggaggagaggaggcagcgggaaccccac

SEQ ID NO: 23406 - DNA, 561 bp, Homo sapiens
  chr9:88137539-88138100
  hyper
cggcgttctcgtctgtccctacttcatccttcctctctcactgtcttacagcaaaggactacagcaaaggcgcgttcagcgcctgcgcggccaggcccggggtgctgggttgcggcttcccgcgggtaaaccctgtcggtacccgatccccgtccgcggaaggccaggagaacgcggttccccttctcgcgtcctctcccttcccgcatctgtggataactcttcccgcatcggcctctctctgctgacattagaaagacgtccctacgccgcggcgagcttcctttgcccctaaaagcactccctttctgtgtgcaggaaaccgcccccgactccgcgcgatcgccctgtgcgcgcaggagtgacaggcgccccagctcgcgctctccagcccgccagggcccggctttggcagacccgaggctcctcacccgccctgagggacgggttgtacttactgagaactgatgcttagtaagcttaaaagccccagaaaggaagtctgtacaaatccttaatgatccagtcaattgtcgctgcataacaaaccaccccagaacc

SEQ ID NO: 23407 - DNA, 751 bp, Homo sapiens
  chr9:90113280-90114031
  hyper
cgcctcggtgggccgctcccttccctcccttgctcccccgggcggccgcacgccgggtcggccgggtaacggagagggagtcgccaggaatgtggctctggggactgcctcgctcggggaaggggagagggtggccacggtgttaggagaggcgcgggagccgagaggtggcgcgggggtgccaccgttgccgcaggctggagagagattgctcccagtgaggcgcgtaccgtctgggcgagggcttcattcttccgcggcgtccctggaggtgggaaagctgggtgggcatgtgtgcagagaaaggggaggcggggaggccagtcacttccggagccggttctgatcccaacagaccgcccagcgtttggggacgccgacctcggggtgccgtggtgcccggccccacgcgcgcgcggggctgaggggtcgggggcgtccctggccgcccagctttaacaaagggtgctcctctccaccccgcgaggaggggcagctccggagacccggtcttcagcgagcggggtcttagcgccggggaggtctacttccttttggggttgccattttactattattattgccttttttttttcttcaaaaggactggagactgatgcatgagggggctacggaggcgcaggagcggtggtgatggtctgggaagcggagctgaagtgccctgggctttggtgaggcgtgacagtttatcatgaccgtgttcaggcaggaaaacgtggatgattactac

SEQ ID NO: 23408 - DNA, 274 bp, Homo sapiens
  chr9:93404976-93405250
  hyper
cgcccgtgccccaatgcggacgcagcgaagccacggcagaagggggaaatcggttacctggggaagaacacaactccgctcagagcttcttcagagctccactcgcgcaggacagggcagcgcagggtgtgtggatgcggctcctcccggaggcaggcgcagcgcactccctcccgccgccgtgacgatgctgtcagctgctcgcccgccgtgcgccctgcaccgcccaccggccgtgctccctgcgcccagcgccctcgcgctccacccgctc

SEQ ID NO: 23409 - DNA, 1047 bp, Homo sapiens
  chrX:13706949-13707996
  hyper
cgtttgactagtcgtttttatcattgtaatcacgacatcctgtgactgtgctcatgaggtctgtttatttccactttacgtaaacttttcaaaatgacagttatttcgtactcgctgtcgcccgaacgcagacgggaggacacttcaggagcaatcgacccgaaggaaaagcacgatccaggccccgcctgcctcggctccaccttccccgcgcccgtcccccagggtctcggccgcgggaccccgccttccaggccccgccccgctttttccctggccccgccccggcccgtcgccatgttgttccctccgcgctggacgggagcagctggagcgggagcctggctgcgctaccgcggctgcctcctgctgtgcaggtccccgaccctctctctgtcctcattgcgcccagacgggccggcccagagctcccgggtcgtctttcgtgtggccgcgaggtgagcgggactcgggactccttcgggaccgggcggagtgcgcgggtgtcggggtctgagggggcggctcgggcctcgggcagctggggcggggtgcggtgcgcgcggggctagcgcgggtcacaaggccgccccgggagagaggacggctggttgtctccctgcctcctctctgacgcaggaggaaagacggtccccacacccttggggagagggactcacagaaacacacacaaacactggagaaagggagatacaaaagcccggacacccgtgcacatacacacggagaaatacacccggtcacctgggaacacacgtacacgccagcctttcccccaaccactccgggacacacatccacagaccccaaaccaaatcctacacccgaatgattaatgtagggaaaacaaaggcgctcccatgacttgattttggcgacctctgaagttccacctagcagaacgtgtttgctcgatgtcttacgaccactcgggtgaggaattcggaaagtaaagccaatcttagaggctgcaggcgttttgggggcattatctgattcagacgctggctaacgtttcacaatcgc

SEQ ID NO: 23410 - DNA, 861 bp, Homo sapiens
  chrX:13956243-13957104
  hyper
cgtcccgggaaacaggcaagaagcgactctctactggccccttaaaataaagcactagcccgggacgcgccgtctgttctctctgcaacccctcccgggtacccagctcttaggctcccgcgagccgcacgtgcgggggtgcagcctggccgcagccggagcggggaccaccccccccacaggatacaacagggaagcgcacctgggcgttccggacacctgcgccgcgcccctcccacctccagcgtcccggcttcgtcgcagaggtggccgaggaggcgccacctgagcgggggaggggcgggaccctcggaagggcgcgccctcccggggcgggggcgcgagaccgtggccgtggcgcgcagccagcgcgctcgcttacccatggctggagactggcgggaggggtgagggctgcggggcgttcgggctccccggggacgggcagagccggtggcacaagtttgcaggtctcgcgggcacgtgcgctgaccgggcttctgcgggctgcgctgcgctgcgcggggctggccgctggctcctagctcccggccggggtgggagcgcggcgcggctccgcctgcactgggggccggccgcgcggagaggggccctgacgtcagcgccgggggctttgtgcgcccggagctagggcccgattgggggcagcgggcgcgcggagtctgcaggcaaagctcgcggcttcctctgggacccccccgggcgagcgccgagggtcgcgggaaccggaaaagccagcgagggggatgggtagagaggggagtgggcttctaggatcgcggaggcggcgatccgcgtcccagatgaaaactattatggcctggggaggttggggggagc

SEQ ID NO: 23411 - DNA, 373 bp, Homo sapiens
  chrX:15511311-15511684
  hyper
cgctgcggtagcggcacctggagccttagcggcgggggtgacgcgaagagccgccgggagcgagtgcagggagggcaggttaagagagtgtgggtccagtagcctcaccgtgactcagcgcttcgcggccggcggcctagaggaggcgggaggcgggagtctacgggtctcggaggccctggggctccgccctcgggaatgtcactccactctcgctccgccctacgcctctcccaggccagcttggcggccctttggcctccctgcctctcgtgccgggaagagatgctcactcgggtaatttaggcggcacttgctgtgctccaggaggaaatgtgtggcccgggcaggtgctctgatcggcgctccggtc

SEQ ID NO: 23412 - DNA, 219 bp, Homo sapiens; identical to SEQ ID NO: 6333
  chrX:16805209-16805428
  hyper

SEQ ID NO: 23413 - DNA, 839 bp, Homo sapiens
  chrX:16887827-16888666
  hyper
cgcgcgtagaaagagccgcggcgctcgcttcccagcggcgggggccgcctccgccccggggccgagggcgccggagggagcgcagccgctggaggagggaagggaagaggggggcccagccctcggccccgcgcccggctccggaagtgctcggagccctcggcgcggcggtcccgtcccgcgcaggcccctcgaggcgcgcgcccagtctcgcgcccggccccgccccctgctccgcacgccaattcgcgcctttcgccggcgcgtgccgcggcctcgcgcgcccgccgccccccgcggccccggcgcgcgccgccccgcagggcctcttactctctttactcgccatcttgcgtcgggtcgttcgcccctcgccgccgcctcggactcctctcgttagccaagagcagcccgaccgctggcgctcctgcctttcccaagcgcgtcacactccccactgtcgaaagcccgggccccgtcttgctgcctgggtgctccccagacgccgcgtccttctttcctgcctcctccccgctcgcgggtaccgaggtctgaggcgctcttctctctctctccaaacttggaacgagacttttcaacccgcgcctcccagcccgcccaggcagctgagcgcaggcgcatccgccctgggaaaagtgagaggaggcggagaggcgggtctgggagccaacggctccggcgccgagaccaatgacgcgcggcgggcgggtttcacgcggcgttcggaggcgggcttctgggggtgggcggagcgtgccgcggcaggaagttggcgatgcgcaggcgcgagggctcgcccggcgctcccagggccggcc

SEQ ID NO: 23414 - DNA, 811 bp, Homo sapiens; identical to SEQ ID NO: 6335
  chrX:40012149-40012960
  hyper

SEQ ID NO: 23415 - DNA, 170 bp, Homo sapiens
  chrX:40126403-40126573
  hyper
cgggacgcgcagccgcccggcgcagaggaagcccgggacgctggggacaccgcctggagcctccgcgcatagcaccggggcgttttttccttccagctggaggcttcccatttaacctctaaggtgccagaagatccggatccctcgcgggcaggcctttggctggctcc

SEQ ID NO: 23416 - DNA, 205 bp, Homo sapiens; identical to SEQ ID NO: 6337
  chrX:40506434-40506639
  hyper

SEQ ID NO: 23417 - DNA, 203 bp, Homo sapiens; identical to SEQ ID NO: 6338
  chrX:40595088-40595291
  hyper

SEQ ID NO: 23418 - DNA, 898 bp, Homo sapiens
  chrX:71525281-71526179
  hyper
cgttgtttgcggacagctcggctgccctcctcgccgcatcccagatggagccgcggaaccgggggcggccgggagcatcccttgcacggcgggcgcgtgcacccaggccaccggggccctgagcgtccgttcccgcaagtgctgtatcaggaactgatcttagagacaggatggacaggcaggaaggggcacggggtgtcggcctccgcggcgagtccgcactccggcgccggctgctgccactctcgcgcctgatcaacacttactgagcgcccgctgagcatccgacgcggcagcaggctgagcctaccccctagccaagccgcctgcggtcagtgctaaaaccccgctaggagaagagtgagagaggctcggagaggtgcggtaacttgcccaaggtcacagcgctagaaagtggcggagccgggattcgcagccaggtctctctgactccaagtccggtgctctgcgaagcagggactcggcgcgcggctcgccagcccgcgtttatagggagaggggtgtgcgcgtgggtgtgtgtgtgtgggcgtgtgtcgggggaggggagggctgaggtcgactgggcagtagaggcaagttgcccaaattcgctaacttccatcccgcaattccgctgaactcggcccgaaaagccccctcttgcctcaattccccgaagtaaatctgagctttgtgcagctccggagccagagcgtccagatgcggtccgggagattagcaaagtcggtggaagccaagctggagaaagcgcgggcgcagggagaaaaggtgctgccgtctccccgggagaagcgggcacccggccccgctggccggcaggggggcgcgctggcaagcgaacccgagcgctggcgggcgggcgggcgggcggcccctc

SEQ ID NO: 23419 - DNA, 200 bp, Homo sapiens
  chrX:7895407-7895607
  hyper
cgccaccaaggccgcgctacgctctccgcgagccggcccaggaaagtcctgcggcaggggttggtaccgcctcccgcgcaggtatgtgacgtcatcgcgccgacgaaggcgcccgctaggccccgcctgctctatttaaacttctggactcaacctggccgctagaccggagcgtcctccagcgcaggcaaggattcctc

SEQ ID NO: 23420 - DNA, 168 bp, Homo sapiens
  chr1:100928315-100928483
  hypo
cgctggcttcgagcactatgacctcttcttcatagatggcagcacacccagtgacaacatcgtgcgaaggttcctgaacatctgtgagaacaccgaaggggccatcgccgttcactgcaaaggtgtgtgcaaggcctcggtggtggtggctgtgcttatcgaaggggc

SEQ ID NO: 23421 - DNA, 1171 bp, Homo sapiens
  chr1:1168275-1169446
  hypo
cgactactacctgccctacgcgctgggcggcggctacgtgctctcggccgacctggtgcactacctgcgcctcagccgcgactacctgcgcgcctggcacagcgaggacgtgtctctgggcgcctggctggcgccggtggacgtccagcgggagcacgacccgcgcttcgacaccgaataccggtcccgcggctgcagcaaccagtacctggtgacgcacaagcagagcctggaggacatgctggagaagcacgcgacgctggcgcgcgagggccgcctgtgcaagcgcgaggtgcagctgcgcctgtcctacgtgtacgactggtccgcgccgccctcgcagtgctgccagagaagggagggcatcccctgagccgccgcggcccggccctccgggacacctgcttcacccggcggcgccttggggcaggtgccgagcgggcgcactacgcccgggccccaaggcccccgtcccgcagccacgcttgtggtcgctgcgtcccggtctgcgtttgggagacccctgggggttgccggggcagcgcgccgtgtccaggtggaggtgcccgttcctggacctcagcgagcctgagccgggcccggccgcacgctgacccccgtgctgtccccgaccggctcacggggctgggctccgatcttccgtgtctcttatcagtggcgtttctcacgtctgcgtctcagatctaacgtggtttcacatcaatccgctttcatgggattttggtctctgtccagtgacttcgtggtaaatgtaactcagtgtttgcttgcgacttatttataaatattgtaagtttgtgtcgatgagtgtaagttggcagtgcgcacgtctcggtttttttacatgatttaaggaaagacttttatgtcagaacttggtgcctgtaccgtcaaccccgctgctgcccgtgtttaaacgcaggagaactttaaaactggccatctatcttttcagtgtacaagtcactgaacccattgtttctttctgaagagactttcctttcaaggcttcccatgggtccgcgccacacagggccggtgctgctttatttcagactctgccccaggttccaggaatccgaaccccggagtgctgacgcggttccccaacttccgccttaagaaaacaggaccagccggcaccaggccc

SEQ ID NO: 23422 - DNA, 367 bp, Homo sapiens; identical to SEQ ID NO: 6346
  chr1:1194390-1194757
  hypo

SEQ ID NO: 23423 - DNA, 145 bp, Homo sapiens; identical to SEQ ID NO: 6347
  chr1:12030713-12030858
  hypo

SEQ ID NO: 23424 - DNA, 311 bp, Homo sapiens
  chr1:12304451-12304762
  hypo
cgtaagaaagcactacttcaagccctggaggagaaatggaaggcaaggcagagatcttctgggccataagagcagttgtggtgacacgtgtaagatgagcaagaacactagattgagctaatgctgactcttgtctttgtagaatgaccgccagcagaaaggggagtcctattggtattcagttaccgcctccgtagttacaaggattgtggagaatattgaagtaagtcctgctgacttttataaaagtatcaacgtgaaagggatttctcaggtttaaacgtgtttctcctcttagtttctcatttctc

SEQ ID NO: 23425 - DNA, 575 bp, Homo sapiens; identical to SEQ ID NO: 6349
  chr1:1562211-1562786
  hypo

SEQ ID NO: 23426 - DNA, 189 bp, Homo sapiens
  chr1:159931971-159932160
  hypo
cggcaaggggaacagaggatgggaggcaaagggaaaacatggggtagagggataattttattgccaatgatttcgttttaagagtggagatgaggctacaaagatggactgcaggcggctcactgggggtatatagacctactgagtttataagttatgcactcaagaagtttacctttggcccggggc

SEQ ID NO: 23427 - DNA, 295 bp, Homo sapiens; identical to SEQ ID NO: 6352
  chr1:164761703-164761998
  hypo

SEQ ID NO: 23428 - DNA, 248 bp, Homo sapiens
  chr1:167393552-167393800
  hypo
cggggaaagaaagacttccagcttcttacctctgcgtgcatgggcacgtgtgcattgctcagtccgcaggaggtctcactccgcaggaaacgctctcctcccgcataagtctgtacttccatcccctcatctgtggtagtagtgaaggctaggtgagtaagcgtgggctgttctacccaccagaagtccaggagctgttgtatacctcatttctaactcgtgaccgagtgacttgctttaactttctc

SEQ ID NO: 23429 - DNA, 247 bp, Homo sapiens
  chr1:171554936-171555183
  hypo
cggttgagggttgagtgtctcttaccgaaatgcttgggaccagaaatgtctcggatttcagattggtttttttttgtgtgtttgcgtatacataatgaggtgtcttggggcgaggggcctgtctaaacatgaaattcctttgtttcatacatactttatacatataacctgaaggtaattttaagcaacattttaaataactttgtgcatgaaacagaagttctgacctcacttcgactgatccgtc

SEQ ID NO: 23430 - DNA, 487 bp, Homo sapiens
  chr1:19676386-19676873
  hypo
cggctcggtggcaataccaacccaccaaaaacagaaccatttgtgcactgcatatattattacatccttataaaagtggctgccggaaggaaaacattttcatgtgttgtggctgcagatgttccacgaggtggttccaatggcgtctgaagccggagcctggcccgtgtgtccccagcaggcgcctctcctcctccccatggccctaacacaggcaagtgtttggaagctggcagcctttcccccagaggggatgtattacacctcccactgccacgtggcatcttctagcgcgacccgcagggcgtggccctaaggcatgggccccactcaccggcgctgaggccccgcagctcctgtgctgcagcccgagaggaaagggcctgggcttgtctaggcctccatgtctttgccttcacctcgcactaaataaacaaatgtacacaaaaggcctagagcgggacttgccagaatggcagctctcacc

SEQ ID NO: 23431 - DNA, 179 bp, Homo sapiens; identical to SEQ ID NO: 6359
  chr1:21610561-21610740
  hypo

SEQ ID NO: 23432 - DNA, 454 bp, Homo sapiens
  chr1:234724591-234725045
  hypo
cggttatgaggattaaatgacccgacagaggcaaaacagctttgtaaaccataaatcattttgttcggagtcaacaggatgactttttcccctcacacaatttagaattatgtacctgttgaggtagcaacgccctcgtttaatcccagccatgtttggtccccaaatgcctctctcactcgcccagagtgatactgaggccacaaaaagctctgctgttttttttttctcgtggtctttctcaattccaacgtggtacacaggtacctggcgtgtgtctgctcagacagtggatggcccttgttcaaagactgatgggaacacctagtgtacgaggtggcgccggggccgcccacaccaacaggccgtgtgctcccatctcactgtgcacgaggaaccggtgtgcttttcggccaggctgcatcaccctccctcccttggctttctgtgtgac

SEQ ID NO: 23433 - DNA, 185 bp, Homo sapiens
  chr1:23693488-23693673
  hypo
cgatctcaaaaacgtggaggcaaagaaaggtagaatccttacttacctagtgagacaacatttccataattctcctgcataacatcccggtaaaggtccctctgtgcagcgtccagaggtctccattcttcccgggtgagatacatggccatatcttcaaacgtcacaggtgcctgaaatcacac

SEQ ID NO: 23434 - DNA, 186 bp, Homo sapiens; identical to SEQ ID NO: 6363
  chr1:246324319-246324505
  hypo

SEQ ID NO: 23435 - DNA, 95 bp, Homo sapiens; identical to SEQ ID NO: 6364
  chr1:246324810-246324905
  hypo

SEQ ID NO: 23436 - DNA, 182 bp, Homo sapiens
  chr1:246330213-246330395
  hypo
cgatacccactgaaggcagctgctctcgggtgccccttcccacaagccctagcgaccatcaatctgcactccgtctctatggattcatctactttgaacatttcatacaaacggaatcacagagcatgtggcgtcttgtgtctggctcccttcattaagcataatgtattccgggttcaccc

SEQ ID NO: 23437 - DNA, 247 bp, Homo sapiens; identical to SEQ ID NO: 6366
  chr1:27183370-27183617
  hypo

SEQ ID NO: 23438 - DNA, 317 bp, Homo sapiens; identical to SEQ ID NO: 6367
  chr1:32826720-32827037
  hypo

SEQ ID NO: 23439 - DNA, 148 bp, Homo sapiens; identical to SEQ ID NO: 6368
  chr1:44132677-44132825
  hypo

SEQ ID NO: 23440 - DNA, 187 bp, Homo sapiens
  chr1:44351032-44351219
  hypo
cgtctcctccttccccgggtccttctcacgcactcacacacaccctgctgaaacctgatcctgaggctgcctcgcgtgccggggtgctggcggggctggcgggctggggcctgtcttttggagcctgccccaccctcccctgctaccccctaggccagggcaagcaggtcaggcgtcccacaccccc

SEQ ID NO: 23441 - DNA, 71 bp, Homo sapiens; identical to SEQ ID NO: 6370
  chr1:47033326-47033397
  hypo

SEQ ID NO: 23442 - DNA, 211 bp, Homo sapiens; identical to SEQ ID NO: 6371
  chr1:61601555-61601766
  hypo

SEQ ID NO: 23443 - DNA, 619 bp, Homo sapiens
  chr1:898245-898864
  hypo
cgcacacgtccccggcgctgcgagggggccgggcctgtgctttttgctgtgggtatggccccccgcccgtttccctcttgccctgtgccttctactccccaccagcacaagcccaccccacctgtgccggtcaggtcctgacctgcccctccgcccctccattcaggggcctctccaggagcctggggtgtggcccagcagtgggatccactcacgagtcccgtctccacctgccctccccaggcggcgggagcctgtttgccatccacggagactgtgaggcctacgacacgcgcaccgaccgctggcacgtggtggcctccatgtccacgcgccgggcccgggtgggagtggctgcggtggggaaccggctctatgctgtgggcgggtaagcctggaggctggacttgggtcgggtctggcacgtgcccgccaggccagtcttgacctgcagtggcttaattccgctagctatgatgggacctcagacctggctaccgtggagtcctacgaccccgtgactaacacgtggcagccggaggtgtccatgggcacaaggcgaagctgcctgggtgtggccgccttgcatggactcctgtactcggccggcggctatgac

SEQ ID NO: 23444 - DNA, 39 bp, Homo sapiens; identical to SEQ ID NO: 6375
  chr1:9654089-9654128
  hypo

SEQ ID NO: 23445 - DNA, 290 bp, Homo sapiens
  chr10:134794144-134794434
  hypo
cgagtgcccggcgaatgcccagtgagtgcccagtgagtgcccagcaagtgcccggcgaatgcccagcgagtgcccagcgagtgcccggtgaatgcccagcgagtgcccagcgagtgcccggtgagtgcctgcaagtgcccagcgagtgcctggtgaatgcccagtgagtgcccagcgagtgcccggtgaatgcccagcgagtgcccagcgagtgcccggtgagtgcccagcgaatggaggctcctcgggtaacacgcgtggacccaggcacaatacaaagtcaaccgccc

SEQ ID NO: 23446 - DNA, 117 bp, Homo sapiens
  chr10:46009817-46009934
  hypo
cgctcagtgcagcgcttccccgcaacatggtccctgtgcttgatgccggggaacaggcgctgcctgcacagcagctgccaccctacagctgccagcagcagcacatggctggctgtc

SEQ ID NO: 23447 - DNA, 386 bp, Homo sapiens
  chr10:524407-524793
  hypo
cgggcatgccgggggtgcagatgcacccaaattcccatcttattctcactcatccagtgtccaggcatgctgggggtgtagacacatccaaattcctgtcttattcccactcatcccgtgtccgggcgtgctggggctgcagacacatccaaattcccatcttattctcaactcatcccgtgtctgggcatgctaggggtgtagacacatccaagttcccgtcttattctcactcatctcgtgtccgggcgtgctgggggtgtagacacatccaaattcccgtcttattctcactcatcgcgtgtccaggcgtgcagatacatccaaattcccatcttattctcactcatcgcgtgtccgggcgtgctgggggtgcagatagcaac

SEQ ID NO: 23448 - DNA, 70 bp, Homo sapiens
  chr10:5523206-5523276
  hypo
cgggaggagacctgggcagcggcggactcattgcaggtcgctctgcggtgaggacgccacaggcaccagc

SEQ ID NO: 23449 - DNA, 424 bp, Homo sapiens
  chr10:5538706-5539130
  hypo
cgggcaagaaggaacaggtcgcaatgagtgaccgcaagagatcatggtgactcctgaaaacgcccaggccccgcctcagtgccccgggctacccctggccccccaggctttgtgctgaagccgagataaagtggacaggcgcacctcactcctccacaggtgtgccccacccccccacccgcaggtctgcccgagagcacggcaggtgggaaagagacgaatcctgactccaaggccagggccgccacctccccaaagcccgatttcacccaatgctaccataagttggcctgggctgctcctgtacccacctggggcttcagtttccacatctgccaagcaaggtgcctgggtccgaccatctgagacccaggacaaagggagccctgggaacgccaggctgtgatgagcgagcctgggtctc

SEQ ID NO: 23450 - DNA, 1455 bp, Homo sapiens
  chr10:5540271-5541726
  hypo
cgcatacagacacacagacacacacacagatgcacacacagacgtacacgtatattatttgcagccgaagagaggcaggctgcgtgcagaggctggcagctgggctccgtctgtccatgcgaggcgcccgctcctgtttgtgcgggacacgtgcccaggtcctcaccagcagctcaggcagaacctggagccacagacaccgcccagcaccatcctcacacatcctctgcccacctgccctctgctccgcgtcaggggaggcaggagctgcccctggggcctgctccaggcagttctgccaccgcaggtgagaggggtgggctggaaggaaccctggaagcaggtgggggccctcggaggcagccgccccacaaacaccaagcacacatggaactcggcagtcctttatttagatcaatgcggggctgaggggccctcattccactgcagggcaaagggggaccaggcccaaggaggcctccttctgcccaaggtctggaggcagagaggggctcgcaggcggcccgagggcgccgcatccaggccccggagcgcaaagccttcctcccagggggaggcagtttcccatccaccgaccaggtttccccggagagtcccagcacaaaagcagcagcgggcggtggccctgaaggctcagagcgcagccagggggacacaggcggggagcctcactcctgggcgagcatcctcgcgaactcctcgtagttcacccgcccgtcctggtccacgtcggcctcgcggatcatggcgtccagctcctcctgcggcagcggctgccccagccccgccatggcccgcctgagctcgtccacggtgatgtggccgtcgccatcctggtcgaaggcgcggaaggcgacctgcaggtcctccaggccggccctggccttcttcgccgccgtcaggaactcctggaagctgatttcgccgtcgccgtcgctgtcaacctcggagatgagtttccttagctgggcctccgagaggttcttgcccgtggccttcagcgccgcgcccagctcctgggcattgatggtgccgtttccatccgtgtcaaccgcggagaaagcctttttgtactgggcctcctcctcaggagtcagctcaccggccatgcctgcgtctcctgcacctcgcggagcctccgagctgctgcccaccggccctcaacctgctgctctcagagctcgtggtccagagtgcaggcagccgcagggatccgggcagcgtctgtcccagacagttctgccttggcatgggaaccccctccttttctgcaatcggaacaaagggaggagggaggctccccaccctccaaatgccctggggtgagagcctcctcccagggagggccagatcagctgcagacaggaaatgcaggaatgggagttgggagagctgtcaggtgccaggtgggaactgccatggggtcggggtatc

SEQ ID NO: 23451 - DNA, 634 bp, Homo sapiens; identical to SEQ ID NO: 6385
  chr10:71133924-71134558
  hypo

SEQ ID NO: 23452 - DNA, 571 bp, Homo sapiens
  chr10:851108-851679
  hypo
cggctggaggtcgagggcgcgtggggggcctggagggtgcaggggacgccgagggcgcggggcccaacctccggccagccgcctggattctggtctctgctctgagcgaggtgcgtgggtgcctccctgcttttgagcggggatgcaaaggacccccgggctgctgcgcggaaaaaggcggacggggatccagggcgcaagcagggatggagggagaggccgacacagacggcggcaggtgtgcgtggtgaggccgccccacgcagggatgggaggggcgcgcaagccgggacttgaacctgcactggctgagctgtggacgcggcctggcggcctctgcggagcgccctctgcggagctgcctctggcacctgtccacagcgtctggacaccgggcgaggaatggacccggaagcgtcccctgcccagggggtgctgcaggtacccaggggaagagcattcacgggtgccaggcccaaggggctcacgccagaagtagaccaattagacgactacaaacggtgctcagtgctgcagaagcagccggggacaggcggctgtcggagagggc

SEQ ID NO: 23453 - DNA, 66 bp, Homo sapiens
  chr10:98292781-98292847
  hypo
cgcataagatttagcattctctttaccattttttctccggtataggacgaggcacagcattgacac

SEQ ID NO: 23454 - DNA, 227 bp, Homo sapiens; identical to SEQ ID NO: 6389
  chr11:1521171-1521398
  hypo

SEQ ID NO: 23455 - DNA, 433 bp, Homo sapiens
  chr11:47358910-47359343
  hypo
cggggggcaggaccaggccaggcaggctcaccgataggcatgaagggctgggaggcagggctgggcctggacatgccgatggcgttgaccgcgtagacgcgcatctcgtacaccacgccctcgatcatgcgccgcgcttcatgactcagctcctgaatcaggtcgaagttcagccgcatccaccggtagctcttcttcttcttgcgctccaggatgtagcctggctcaggggaggtggcagctctggtctggaacccaggcatccccacaccaccttccctcggatctgtttggcgccctcacacctccatccggtgcccttgcactcacccaggatgggctgcccgccatcgtaggcaggcggctcccactgtactgtgcaggagtcctctcccacgttgctgatcttgggggccgcaggtgcgtctggcac

SEQ ID NO: 23456 - DNA, 738 bp, Homo sapiens
  chr11:64951346-64952084
  hypo
cggaggtcggtctcagttgccccatctgagaaaggagtgttcgctggggaaaacagatcagcacgtgtggccttctccacgtgtcaagcctcctatcccccaactcctcctgcgctttggcaaggtctgactgagcccagcagaaaagaaagactcgggattaagtctacgtaaaccagcttttcctgacggtgtgcccagggcccatttttcaagtcacaccaatcaattctcaatgagctgcctttgggagggacatgcccagcaaccctggatgagactctccagccttggaggccccagccctgcccgaaggactcttgggtgttccctccttctgcctggttagagagccccttaccctactctgtccttgcccgccttgcgcgggtggaggtggccctcggaacccagggtgcggaacccacagtgcggatccactttggcccagcgccacacccacctgctccagtctgcaggggcgcagtctcgcccccttccctcgctcctccaatccgctcctccctggcctccgattggccagttcagtacccgccacccacactctccgcaacctgggctcctagggccgcctccaccccgccccgccccccgttgtcctggccccgacccctcagatggtacctcgagtccttggtcgcttctgaccccagacgccttcggccccgaccctgccctgggaaacgtggcctttgtggcatctcagaaacaaagccc

SEQ ID NO: 23457 - DNA, 295 bp, Homo sapiens
  chr11:71507748-71508043
  hypo
cgacaaagacactaggacacacagaggacaagcaacccccgagctcccacagactgctgcccggccacctggctcttgtgcctccactctacacccaagccccccattgccaccagcctttgccccagctccccctgagcacagcccctcctggcagccatgtgcacagatgtacccgcagcagcctctgcctgcacacagagacacggacaagccagtgcctgtccacgtggggcagcccgttaactacagagccaacaaacaagccaggacacgaagacatactgggttccac

SEQ ID NO: 23458 - DNA, 513 bp, Homo sapiens; identical to SEQ ID NO: 6394
  chr11:993208-993721
  hypo

SEQ ID NO: 23459 - DNA, 674 bp, Homo sapiens
  chr12:110352780-110353454
  hypo
cgaggtacacgccacgcatatgtatagcctctccagctttccatgaggtacacgccacgcatacagcctctccagctttctacgaggtacatgccatgcatacagcctctccagctttctaccaggtacacacaatgcatacagcctctccagctttccacgaggtacacgccacgcatacagcctctccagctttccacgaggtaagcgccacgcatacagcctctccagctttctatgaggtacacaccatgcatacagcctttcaagtcccgcatgctcccttccgttccttggcacgtgcattgctgttgctcagctggattctccagtctgggtagggccgcaggcttaccttcctcatcagaggcagggctctgccctgtgggccttgtcttggggtggtgactttgctcttggcactcaggttgcagagcgccggctgcaggcatgggaagcagaccagcaggaggaggaggaagaggaggaggcccggcgggtcgagcagctctcagatgccctgctgcagcaggaggcggagactatggctgagcagggctaccggcctaaggtaggaagtctgccaggatataggccaacaccggcaagacagactctgcccggcccctgctcccctgggcctgctcatcgccccgcgccggggtctgctctcc

SEQ ID NO: 23460 - DNA, 226 bp, Homo sapiens
  chr12:110983646-110983872
  hypo
cgtcctgctcacacttaatggctgagaggggagattacctgtcgctcaagacgactccctcggcttcagggggagcgattgagagctggaatggagtgttgaagtaatgctgctgctcatctgatcggtgcacgacttcaccacccctgacaaccaggaagcctgaatcgcccaggtttgctgtgtgtaagcggtggctggttctgtccagcaccacaatgcaggc

SEQ ID NO: 23461 - DNA, 432 bp, Homo sapiens
  chr12:113725566-113725998
  hypo
cgcctccgtcccgccccctgccacccttcttcactggtgagctccattgcccccgctccccggggcacatgggcttctccccgctctttcccaggagcaaggccttgctcctgtctgagcctgcagctctactgcaaggagatgtggcctggccctgctcctcttcgtggaaggaccccgcccagccggtgtcctggggctgccaccatcccttccctcatgcatgaatcacctgagcccagctcagggttggtggcgcccaagggagtggacgcaggtggaggagaggccctcacctgtcttcaccgcatggcgtgtggaaggcggggccggcatgttctgagggcgggggctgaggcgtgcacctgtgtgtggaggtgacgggtgtcctcctcgctcaggttgtttaagttgaaggagcgctaccgcaac

SEQ ID NO: 23462 - DNA, 858 bp, Homo sapiens
  chr12:120147746-120148604
  hypo
cggtggtttcgttgcaatcaggacaaagggtttggctttagatagtcttcgaggcttagcactcttcacttggcctaacagtgggatgttctttgggaatgtcagactgtgctaaactggatactggaagggaactgaatctggacagagggggtccattagctgaggcttgggcatctatggggacacagagataagagctacaacggctcctctctactattttgtgttttacgagcatgaaacgtggcttcaacatattggctcccttgaaagtaaagaaaaaacaccatgtccttggcctcacacctgctatcatgagtagcttctccaggtccttgataatataaatttggaagactgctccaattcctgggacatgggttagggagtttttcaagacattcagggcgtagagcccttcctcggtgcccaccaacaccacctgcaagggcagaagtccgaaggcagaacataagcacggtcacgtcaccagaacaatctctagtaagagcaacaaggcctccacagccctttctttcttgatggggtgtggctgtaaccagacaccagctggccgtgcccatgcaagcattacctggtcactgaagggcagcgtgcagttcatgtctagacggtcatcaccttccagtttcagcagggagtttccaagcagtttcttttcataggtgaaagaaaagaaaaacagaagacatcgtgaggctgatctgtttatgaccaaaccatccagagaaaccaagagaaggttaaggccaagttattcctggaaatgctcagaaacgcacatatgctcttagctcagcccgtattttgatctgagctccaaatgcaaaatgc

SEQ ID NO: 23463 - DNA, 972 bp, Homo sapiens
  chr12:121687598-121688570
  hypo
cggcaccacgatcctcgactcggggttcttgtccagcatacgggtgatcaggtccttcaagtcctcagctatgtcgggcctggggatggagaggcgtcagggtggcagacacgggaccgccaagaactcggacaggagagatgcgggacggcgggagatactcactggtctggaaattccagggcctgactcttgatcttactgtgtaaacacatgatccgctcgtccatgaatgggcactgcaaagaggccagggacagagtggcagtcaatggcggccacatctgcccttcgagggccacctgtgctgtgccactccacataggatacagcagagaaatcaacaattgcggcccaggctagggggcaagcagttcccattctccccgagaatggccaagacacaggggtgtggggcctggccgacgcagggcagagccaggaatggccctctcgaagggctagagcctttcccaagcacactgcaggctccctctgtagctgggcctcagtttacctacttacaccaaagcaaacactgctcgtcacctacttgccaggtgaacaacaggaacaacaagaataacacaaaagactttgtgttatttgtggcagcagcagtgattttcaagggcttagcctggatcgcgccacgccctgccctgaggttttcattcactgttccccgtccctggaatgttcttctcaccaacatctacgtggcttggtctctcccaccatgcaggtgtctgactaaagctcaccttctcagggaggacttcctgaagccctgtctaaaacagacaacccccaatgccgccaccgcccacatcactcctcatcgtagcacttatccctgacgttatcgtacagatttgtttattgtttaacccctcccacgggaacgttagctccaagaaggcagggatttctggctgtcttgctcactgcggactctccgtgcctaggagc

SEQ ID NO: 23464 - DNA, 855 bp, Homo sapiens
  chr12:122622048-122622903
  hypo
cgtgtgcatcggagcagagccccagtcctcaatctccccagaacaactgctcagggaaatccgaccccaaaaatgtggctgcactaaaggtaccgcatgtctcctcttggttcccttgggaggaggggagaggagtgcaggacatcaaggatctgtgtcttgtctggaacggagacctcagacccagccagagctgcccaggcaggggtggatcagaaatgggcttctccttgccccatgccacgaaccagccctgtggggatggtgggccccctggaggcttttgggtgagccccaagcctgggagccaacgctgagtccacgtagtgtgcaggtactgctcaggctgcccgcatcagttgcaggaggggtgtggccaccaccagagctgtgctgtggggaggaggcagggctgggtggggaaggcggagcttgcagcacctgggatgcaccggttcagccctgccgttcccagccccagctgtgcaccattctgcagagcgggttttctgtggttcccagtcttgtccctccggctcctcattggagccttcagcttctcgtcgtgccctcctcccacgtagctctctagccctggcccttgggcacccaggatcagcgtagggggtgaggaagggtggacagtgtgcctgcaatgtgcctgtcttagtgaccagcgggttctccagcagaaccggcagatgaagcacatctcagctgagcagaaaaggcgcttcaacatcaagatgtgcttcgacatgctcaacagcctcatctccaacaattccaagctggtgagttgccaagagcgtgggctgtggcagggcaggggagctggcaggacgtgctccctgc

SEQ ID NO: 23465 - DNA, 623 bp, Homo sapiens; identical to SEQ ID NO: 6405
  chr12:132218722-132219345
  hypo

SEQ ID NO: 23466 - DNA, 211 bp, Homo sapiens
  chr12:132333476-132333687
  hypo
cgggaatgctggatcacgtggtaattctatttttgacgttttggggagcctatgttctgtctcccgcagcggctgcacaatttcatactccctccccggcagcgcccggctctgccgtccccatatcctcccgacacaggtgactttccacgttcttgacagtgggggcgagggggcgtctcattgtggttttgagggcgtttctagtgac

SEQ ID NO: 23467 - DNA, 97 bp, Homo sapiens; identical to SEQ ID NO: 6406
  chr12:49065604-49065701
  hypo

SEQ ID NO: 23468 - DNA, 211 bp, Homo sapiens
  chr12:53662999-53663210
  hypo
cgtcctcccctctacctggaacgaattctctttgtcttactgcggaatgctgctgcacaaggaagcccagaggccacactccgccttgctcagcccctccatgcctgcttggtgcagtgctctcgcgaggctgctccccaggactatgaggccgtggctcggggcagcttttctctgctttggaagggggcagaagccctgttggaacggc

SEQ ID NO: 23469 - DNA, 531 bp, Homo sapiens
  chr13:114497796-114498327
  hypo
cgtgtgatgagcacacattagggttgggcacacgccctgccgtctggggttgcttctcagaggcgcgtgccgagggcccggggatggcaacgcccttccgtgcagaaggcgcctgggtgggtcttgcggaatagacgcgtgaggacgacccgcagggtggagtccggcctggccagggctggaagtcataggacgaaaggtagaggtgagaagaggcagttctgtgaaagaagccccgacctcgagctgggactttgaattggtttgcgtttgaaaaccggggttggtaaaagctgggcacccacacctctccttctgttgcagctggtggcagcgatcgtgtttatcagttttggcgtggtggccgccttctgctgcgccatcgtggacggcgtatttgcagcacagcacattgtgagtacattgtcattgtgtgcacagtcgctttccggggctgaaagagtcgacgtgaaaaaagtacaatttcattttgcagatctcagctcagacggcttcaccgtcagtctccac

SEQ ID NO: 23470 - DNA, 440 bp, Homo sapiens
  chr13:114807499-114807939
  hypo
cgcttccagtgaaaatacgtatcagaatatatttgtacaatatacgtttacctagtatggatttatatgtgtaaattcgcatctgcaaccattattatctgcttatacgttcacctcattccagaaacattcccgaggcgcggcaaacgtgtgcccatcccatccccggcaggacagggcttgtcaggcgctgggcaccgagccatctcccatcctgcgtcccttcatggcaccaccatgtcaaccctgccagtggcctccgcacactgcggaccacgccacccaccacggtgagcacccacggcagcacatgcacctctgttgaccgatgcacgtgaactcctagggagtcgcacacacatgtgaagtctgagcccatcacagagcacacacgagagcaggagtgaggaaggaaatgttggcagactcctcacgtcttc

SEQ ID NO: 23471 - DNA, 506 bp, Homo sapiens; identical to SEQ ID NO: 6408
  chr13:20979799-20980305
  hypo

SEQ ID NO: 23472 - DNA, 795 bp, Homo sapiens
  chr14:104048314-104049109
  hypo
cggagcatcagcattagctgtgccacagggtggtatgcgctctgctgaaggtggcaccttcagggaaaggcagtctgccggggaggctagcgagcaccctgggtaggagctgagcgtggcctccgcgcctcctcatgggaagtgctggagatgcaggagcccctgagccagagcccagcgctcttacaagagacctcacttcctgttcggggactggggctgctaagtcagagtgcgcctcctgcacccgccaccctggatgtggttccattccctggtccctgagccatagctggggggcatgagactgtcccctgggctgctttggggaccctacttcagggcagccctgccactccctgtaacgggctgtgggtcctgccctgtggccttcctacctctcttgcgtgtgggtgagcctgagcgtggccaccgccctgggagtgccacagaggcaagcggcactggtcctcatgtgtaaacagccccaccagcacgcggggctggagtagtcaggccgggacctgtcccaggaatgggcaggctgttaacctaggatgcattcaagttaggacacatttcattcccgtgtagcggtggctcccagttcctccgcagaacctgcaggagtgtgcgtgatgaaacccgtcactcgttgtgtatggtagacatacctgcctgggtcgtaatcacttgtgaagaaaatgaattatgctgtgacctttagatacgattcacataccataaaattcaccctgccttttttttttttttttgagatggagtctccttgtc

SEQ ID NO: 23473 - DNA, 351 bp, Homo sapiens; identical to SEQ ID NO: 6411
  chr14:104395215-104395566
  hypo

SEQ ID NO: 23474 - DNA, 290 bp, Homo sapiens
  chr14:23776969-23777259
  hypo
cgcccggatggcgaccccagcctcggccccagacacacgggctctggtggcagactttgtaggttataagctgaggcagaagggttatgtctgtggagctggccccggggagggcccagcagctgacccgctgcaccaagccatgcgggcagctggagatgagttcgagacccgcttccggcgcaccttctctgatctggcggctcagctgcatgtgaccccaggctcagcccaacaacgcttcacccaggtctccgatgaactttttcaagggggccccaactggggcc

SEQ ID NO: 23475 - DNA, 176 bp, Homo sapiens; identical to SEQ ID NO: 6412
  chr14:69470456-69470632
  hypo

SEQ ID NO: 23476 - DNA, 111 bp, Homo sapiens; identical to SEQ ID NO: 6413
  chr14:89875711-89875822
  hypo

SEQ ID NO: 23477 - DNA, 105 bp, Homo sapiens
  chr15:40532806-40532911
  hypo
cgcttcctgggctagagacaagcaccagcctgcagtggagaacgcaggaccccgctgcccagaaggagcagccacggtaaggtccccactgccgctgcgtgctcc

SEQ ID NO: 23478 - DNA, 384 bp, Homo sapiens
  chr15:72581447-72581831
  hypo
cggggggatttgggcggagcggggggcccacctggataaggggagagcccgttattgtagagcgtgtcggagcccggctggccattggtctggggggtcagagggccgaatccattgaccccgatgggcgccggaagacctgggagggtgccagggccgctgccaggcggggagttggctgctgatggcggaaaaggtctgagagtcaggccgccaccccgccccgcccggcccctcccaggcgcgccccagtccctgggggccgtacctgccgcgggcaacagaggcgcagctaccaggctaaaggccgccacgtgttgcatctgggccgccactgccgccaccgggcctaggcctgggccctgtgccgccgccagcagggcc

SEQ ID NO: 23479 - DNA, 107 bp, Homo sapiens; identical to SEQ ID NO: 6415
  chr15:90378787-90378894
  hypo

SEQ ID NO: 23480 - DNA, 548 bp, Homo sapiens
  chr15:90755573-90756121
  hypo
cggggtggagggagagggttcaccctgaatgggaaaaccggccgcagcctcggcgtgccctgctttcttcatactggactaacccactggatagatggatttagaggatgtccgagcagcacaggcagcccaggagagcgagcgagacactctttgacacaagggagagcataaaagcttaagactgaccccaaggtgcgccagcccctcgcaggaagtaaagtgcagaaacacctccacccctgcacaaagagcacctaggagtgagtgcgcaagcgtggacaagccctgcggtaccgtgtacacacacacacacacacacacaccacaggcaagctcaggcagggtccttcacagacgtctgcagtcactctggaggtgacccaagcacctgggcccttagacagtaacaccactcacaccgagcacagaccagctcgcgcccacaacacgagcctgtgacacgcaagtctctgtttctgagctgatgccgtctggctttggccatgagaccctcgtgtgaccaggtgcgtgcctaagttagaatc

SEQ ID NO: 23481 - DNA, 86 bp, Homo sapiens; identical to SEQ ID NO: 6418
  chr15:91423329-91423415
  hypo

SEQ ID NO: 23482 - DNA, 321 bp, Homo sapiens; identical to SEQ ID NO: 6419
  chr16:11151051-11151372
  hypo

SEQ ID NO: 23483 - DNA, 145 bp, Homo sapiens; identical to SEQ ID NO: 6420
  chr16:11770890-11771035
  hypo

SEQ ID NO: 23484 - DNA, 339 bp, Homo sapiens
  chr16:1424307-1424646
  hypo
cgtccctgctggctgcaagttcttggaccctcactgatgcctggtactggacagtgtgctgctgaggcctgctctgagacaggcaaagccacccctgcctgtccctgaagggccctagacccccttcctcctgtcctcacctgggaccgatggtccctccatggccccaggcaaccgcaccccggggaaacctgtcagacccgaccgtgggggtcggcgcgccgggaacctccacagcctggccagcccctgcctggtgctcggttcagacaagctggggcccagcagaagcaaagaggcggtcactgccccacctacccgacatcgagtcccgccctc

SEQ ID NO: 23485 - DNA, 1163 bp, Homo sapiens
  chr16:1424928-1426091
  hypo
cgctgccctagccgcacatgagatttgtcgggaacacagctgtggggcacgtggcctgcacctcacccctctgcccaggcctccgcttctcctccctggaagcagctggcaccagtcagcgccacggggaccatgggagcaaccacagggtggcgggtggcccctcgcccgaggcctggcgctcggcggtcacaccccccgagccccccagggcagccggagtatcctcgtgccgcggtggtggccccagcggagcacaggcagaggctggcgtggacgtggcgcagctggcaggtccgggcctctgaacttcaccccgaatctggccgcgctcagcagccacactgtgtggagaccgtgctccaccacccagagcggcaggcgggagagaagcctggctcgggagtggacggtggactccagaggccgcaaggcagaggccacccccaccccactccaccgcacagcacgacccagactcaaccctcgtccacacgccagccgtgagggaatttccggggcgtggaggccgggctgtggcgccacctggcaacactgtccttccccatcccgtcacagaggcagcagggcccagggcagagaacctgaacccctggggcgtccgggacggcacacggcgcatgcgggagtggcctccactcccacggagacaccgttccaatgaagcttttagggactttcgaaggtcttatccagaaactagagtaacaggttgggggtcggggcagccaggccaagaccccctggggaccaggaacccacagtagcatccgaaaatgcctcagccctcaaggatgctcatcggcggagccaaaggcaggccttgggccagccgcacccagagccattcactcctctccttcccattcacaggacggtggcgtccctgagcggacatccaccctggcctgcagggtgggccagccctcccggtcgctgtcatccacttgacgttctcaggccatggctgaagagggcaagacctcaaagcctgactgaagtcgtgctgagcagcagagccgagacactgcaggcagtggcagaggaccacgcactgagcggccttggacaggtggctccaaggctgaaagtgagatctgtggcgggcagggcctcttccctcctccctccagggctggggc

SEQ ID NO: 23486 - DNA, 131 bp, Homo sapiens; identical to SEQ ID NO: 6426
  chr16:1753650-1753781
  hypo

SEQ ID NO: 23487 - DNA, 228 bp, Homo sapiens; identical to SEQ ID NO: 6427
  chr16:2042997-2043225
  hypo

SEQ ID NO: 23488 - DNA, 835 bp, Homo sapiens
  chr16:2128929-2129764
  hypo
cgaggtcctcagccgtgcatgcgttgagctttggcccttggtgataggtggctcggcccgccctacctggcaccctgaccctggtcacggcctctccctccagcaggatacagacgtccctcaccagtgccagcttggggtctgcagatgagaactccgtggcccaggctgacgatagcctgaaaaacctccacctggagctcacggaaacctgtctggacatgatggctcgatacgtcttctccaacttcacggctgtcccgaagaggtccaggcggcactacagggctgggcgggcctgcgggagctccacgggcaagctgggtttcacgctccctgtcttctaggtctcctgtgggcgagttcctcctagcgggtggcaggaccaaaacctggctggttgggaacaagcttgtcactgtgacgacaagcgtgggaaccgggacccggtcgttactaggcctggactcgggggagctgcagtccggcccggagtcgaggtgactgcaccttcctttcctccgcgcctgccagcctcgacaccggctgtcccgagcccaggcccacgtggcaccctcgtaccagcctggggactaagtccaccctgtgcgtgggattctcttctcagctccagccccggggtgcatgtgagacagaccaaggaggcgccggccaagctggagtcccaggctgggcagcaggtgtcccgtggggcccgggatcgggtccgttccatgtcgggtgagccttggccccagccacctccacacaggcaccggggctccctcagttgctgctggtcccagtgttcaggaaggccccgagcccaggggcc

SEQ ID NO: 23489 - DNA, 735 bp, Homo sapiens
  chr16:2213255-2213990
  hypo
cgggttccaggggcgggctcatctctctcctgtgcttttttccgtgcagtgcggtttgtgtggagttgggctccggtgactcaccctgcaggttctttctctggggtgtggctggtgtctccccgctgcagcctggtgctggctgggtcctgaccgcacctgtcgtggcaggaaacacattcgtcgtgccttggctggtccctgtgtgactgcgtcccgccacgtgggccacaccctgggcctacccaccaaggcccagccttggccccagggacattcagcctggaggtgactggctgtgactcaggacccagaggagtagagggagccaggcaggggtccctccacctcggggaagagctggatgggctcttcgggagctcagaaaggctaagccttgagggacggtgacgcagagccgcctgcctgcccgggcctctgcatacctgggatcggggtgaaggacctttgcctcctagaggcctgcctgagccggggctggtggtggaaggctgctgcggcggccccacggtgccccacagcaggtctgcacacttgcagcagcccgtctgactcacaggggcctgggctccatctctcaagcccctcatttgtgctccacccacaggaggtgcttcccaaggaccgtagatgcctctctagagcatgagctcaggcaagagtgcccgctacaaccgcttctccggggggcccagcaatcttcccaccccagac

SEQ ID NO: 23490 - DNA, 1361 bp, Homo sapiens
  chr16:2230004-2231365
  hypo
cgctggcttccaccttggccaagggcgggccttcgacacccgcctcgcccttggagggaccccgaggccgctgccggccagtgccatcctccacaaaggggcctgggtctgccgactccccaggcccccggcgggcagtggccagaagtccggtgactggcccgctgagcgtgcggcgccggttcaccacctccccgccaggcccgatggcctctttgtgtttcactgaggccagcacggtggccacccggcccggctctgggctggcagggcggggagtggggtggccctcaggaggcctgcgggcagcccggcccccacccccaatggaggacagctccagcatggccgcgatgctcttcacactgccggcactacccgtgtccacgctgccggccaggtcactggcccgccggcactgtgcccggacccccagcaggccatcctcaggctcggcgtcaggcaccggctcatccgccaggttggcactagccagggccgagctggagcgcttgggtgggggcggcgggggccccttctttcggggccgcacggcaaaggactggctgcggttgacgttcttgtcggcacctgcgggcgccctcactgagtggctgcggcccacgcgccgctggaccgtggcataggggccggcagccgcaggcaccagcagctcgtcccgctccggctcgctgtcggacgccgcatagcgattcaggctgtgggcccgcttcttgggccgccccggctccgcgtcggcctcagggggcaggcacagtgtgggcacagccgtcggcacgggtgggggcgcaggccccggggcagccggccccacctcgccctccacgggctggggcagcacgtaggcaaagccgcggtgcgtcggtgactgaggcagggagcggggtgacatggggcgctctgtcggcggcagcagctgcggggtgggcttcaccttggccgtagctggggctggaccatgaggtcccccaagggcctggggagagcctggtcgggttttggtgggcgtctgggggggcgtgaagtggctagtgcctggtgggaggacctgccgtggcttgccaggcacggggggcacgctggccctcttgatgctgtggccgtggcggccgggccgggcctccctgggcggggtgccgggggcggggccctcatccaggaggtactcctggcttcgagacatggggctgctgggcccagggggcccatctcccagcagctcctgcgagctgctcatgtgccgtgcccgaccacccaggctggagtcctgccgcgtggtggccctcggggtgggtggcaggtggctggagggcttctcagtggtgggccccacctcagcc

SEQ ID NO: 23491 - DNA, 728 bp, Homo sapiens
  chr16:22326003-22326731
  hypo
cggggaacacgggcgtaatggacatggaggtggcgcagggagctcatcctgttctctccgtagcttattaggaccttagaaactcccttccgctctggggaacttagaaaaggcatcctgggcctgtctgctttaaggactctgctggctctggcgcctgggactctaatccccctcaagcctctgggctgggcaggcacgagcaagtataagccgttccctggcgtgtgcaggcagctctgggagggacacggttggaacggaatttaaacgacctgtgctaggaaaggaagggagagtggaaaacccctatacggagttctctggtcttctggcaggggctgagacggcagtccagcaagggtcacaggcctgacggtatgacctcttccccttcccaccgcaggtgcggttctcccggccggagtcagagcaggcccgccagcgccgtgtgcagtcctatgagttcctgcagaagaagcacgcagaggagccctgggtccacctgcattactatggcctgagggtgagcggggcttcgtggggtcctgggggaaacacctcggtgcccggaagggtcatggtgtggcctccgtgtctcaccttgaacttaagtcaaattcatgagtcatagccacagatagaggatcgagtcctgtgggcagtttacacttcactccagccgagccacttagcgtgggccccaggagagcaagaggaaaagatgc

SEQ ID NO: 23492 - DNA, 948 bp, Homo sapiens
  chr16:2280815-2281763
  hypo
cgggctctggccttgacctggcgtttggtttctgggatggtggcgtcacctgggagcatgaactccttaggttctggcggggtctctgggctgggtctctggccagccaggcccctttccacccacctaaactctagcagcctccagccctaggctcagcacccctccctgtgcttcagcagcccctcttggcacccctgccactctggcacccctgggattttcccctttgcgggcatcctgggtactctgtgtgtgcccttggccagtcagcaggcccggtgggcttagtccagggctgctagctctcctgttggcctctagtggagatggcagagggtcctgcctgctggtggccaagggctggggcgtgccaggtcctgtctttgcgggtgcaggggtgcggtcagctgtgtgggcagttggaacccacctccaggccctcctgccgcttcgcggaaaaagttcgcgtctcctctggcctcgcagcagccatgttcccccaggtcctccccatcagaggcctctgtcctttggaagatcactcctggggcatcgagcgtgtaagggctcgggcaggagaggctcttaattgtttctgagtcaccacgcttttgtcgtgtttcaagagaacagcttgtcaaaacaagacgccagccggactgaggtggtttctaagcagtggcttcacagctgtttcccacttgtcatctttatgagcagaaaacctgaactgtgtttacaacctagctttgcacattgtcagatttttcccagcatcctccagaagtgcaaaagcccagcttcctcgcctcaggctgtcccgggtgtctggagagcgttcactctcccaggccaagcctgccttgggacggggctctggccaggcctgcctgccctgctgcagtggcccagcccatctcctccgatggaagagtggccccggac

SEQ ID NO: 23493 - DNA, 713 bp, Homo sapiens; identical to SEQ ID NO: 6438
  chr16:24837143-24837856
  hypo

SEQ ID NO: 23494 - DNA, 482 bp, Homo sapiens; identical to SEQ ID NO: 6439
  chr16:2485948-2486430
  hypo

SEQ ID NO: 23495 - DNA, 495 bp, Homo sapiens
  chr16:31500256-31500751
  hypo
cggcacagggcgggcagctcttcgattacatccaggcagtctctagctacctggcaccgcccgtgtccgccgtcttcgtgctggcgctcttcgtgccgcgcgttaatgagcaggtgagcggcacgcgcgtggtgacggcagggctgggcttgcacatcctcagcaggctgacctgtttccttcgcagggcgccttctggggactcatcgggggcctgctgatgggcctggcacgcctgattcccgagttctccttcggctcgggcagctgtgtgcagccctcggcgtgcccagctttcctctgcggcgtgcactacctctacttcgccattgtgctgttcttctgctctggcctcctcaccctcacggtctccctgtgcaccgcgcccatccccagaaagcacgtgagtggccaggtgccccaggcaagcactgtgggacacagcacctaccctctgcttcctggagtgcccagctgggaggacctgaatttctc

SEQ ID NO: 23496 - DNA, 283 bp, Homo sapiens
  chr16:3772855-3773138
  hypo
cggcaaagcactgtcatctactcatcaaagctcctcagaatctactttgctagtctgggcattacactcacttaaatttcttcagtatcttataagggacctatgttttcccacctctgcctatttattatgaagtgtatacaagtaattcatgtggaattaacacataaaatccatacgtccatgaggctgcgatgtcttcatggtctgagatgaagttattctcctgcctacatgcccctgcccgtctgttacggcgctgtgggcgcagcctctgcttccc

SEQ ID NO: 23497 - DNA, 114 bp, Homo sapiens
  chr16:468053-468167
  hypo
cgcactcttttttgtccggcttctctcactgaacctgattgctcccagagtcacctgtgatgtcgtgtgtgtcagtagtgaaatcctcttcagggttgagccgggctccgcgcc

SEQ ID NO: 23498 - DNA, 41 bp, Homo sapiens; identical to SEQ ID NO: 6446
  chr16:56368405-56368446
  hypo

SEQ ID NO: 23499 - DNA, 502 bp, Homo sapiens
  chr16:571590-572092
  hypo
cgggcaggagcctctggggcctccactccgacatcaggacctgagatgaccgctgtgtggcgctctctccctgggcagggtggatgccacaggcccctctggctcccaggtgctgcttctccacaggtgcggcctggcccggcctcctaaaggccacaccctccccacgcacttcccaggccagaatccaaacatcgggaaccctgttttcttctgggtgtgtctcacttagaaatcgtggttcttccccgagggtgcatgttgcaggagggagagggcagggaagactcacagcagagcaggagggggcctgtgcttctcggggtctgcaccccaggcacagcggtgtcaccccgcaggaccgcgggcctgccccaacccccagcattcccgggtgggcccagaccccatcaccaagactggccacccgctgcgtgtgtgtgcgcgcgcgtgtacgtgtggccccacatccgccgccttccacgctaggatgtaagaggtc

SEQ ID NO: 23500 - DNA, 314 bp, Homo sapiens
  chr16:67313759-67314073
  hypo
cgttattccctcttcccaggcctgaattgcagttcctgtgccctggcactaagactggcacctcctgcggcccatgcccttcgcctgcattgcccactgagtcccactcgactgtcttcagcgcggttcacactgagacccagccctctcccgctggccccgagcaggcccacctttaggagggcgtgatggaaaggcccctggagaatggggatgagtccccagactctcagggccatgccaccgactggagatttgctgtgtgcagtttcagggatgcctgggaagaggaggaacctgcttcccagatgcac

SEQ ID NO: 23501 - DNA, 173 bp, Homo sapiens
  chr16:67578540-67578713
  hypo
cgatcctcccgagccctaccctgaggcctgagctacttggccacccatgttctccagaaactgggcacatttgggcccctgcgctgccaggaggcatgggccctggagcggctgctgcgggaagcccgagtactggaggcagtatgcgagttcagcaggcggtgggagatccc

SEQ ID NO: 23502 - DNA, 1204 bp, Homo sapiens
  chr16:734744-735948
  hypo
cgcagaggtggccgcagcctgcgggacagtgggagctgccttccagccacttcatgatgtgctgcaggtggccgccgtggctgcagccctggcaccacacgaagagacccttgactacgtggtggcagacggcacacatgctggcgcagcggtggcacctgggggcgggcgggagggagggtgcctcagcgggggctgctgcgctgcctgcaggcccctgccccacctcccgaccccactgccccacctgtcgcagacccagccccggctgctcatgggccgcttgcagtggctgcagttgacgtgcagggtggtggaggcctggttgaggcagctgacggcgcggctggtgctcagcttgaccacctcgttggacacgttccagaggcggaagcgctgcagcaggtcgatgtaggaagtgtaccagtgctcctgggggagggagcgcccggcagtcaggatctgggtgccaggggcggcgctgcaggggggaggccccgcccaccacacacctgggtctgctcgtcgatgtccttgcgcacccgttcacccaggacgatgagcacagacacagccatctgcacgtcgccctgctcagcgtagaagtgcagcatgtcgcgcaccagcacgccgaagaagtcgggcggcaggcggctgtcgtagagcgcgtgtgagacagacaggagcgagaaggaggagtccacgggggccagggaggccacatccgcctcgctgccgctcacgtgcggggagtcggccttgtcctgcaggtgctcgggcccgggaggcgtgtccacgatctcgtggcgcagcggaaaggcctcctgcggcagcacgcactcagggtcctcggctggaaggcagggaccagcggaggctctgagtctgtcctccatccgcctctgaaccccaccctgcccggacccccactcacggtgcgcgtgttccggatccagcaggtacagctcgtcctcctcaccttccacgtcacccagcaggtagtcggcaggtacgtcgctgccctcggtttcctcgttatctgcccgacaatggggcgggcattcagggtcgtctgggacacccccacccctctcccatcagcacccctacccaccccagcctaccctcattggtgatgagtgtggccgaggagtcgagcagaactgtgtcgctccgtgcatctcctttgctgcggtccagccgc

SEQ ID NO: 23503 - DNA, 794 bp, Homo sapiens
  chr16:75148493-75149287
  hypo
cgttgtcccgcatggtgccgtagcggaccgcgttggtccccgacgccccggtggccgccatgccacagagagaggcgtccgcgcctgggtctggagggcggcgtacagaaggcagcctcagggaccggaggtcctttccctcgggctgggggaggaaggtcccctgaaccccagacacagccctgctcccacggtgccctcagggtcccaggaaaggttcgcgagtcctacccacgggaaaccagaggccgctgtcccgcaggtgggcgttgagggctttgcgggtgacacctggctccaccaccacagagaagtcctcctggttcagctccaggattcggtccatatgcgtcaggttaacgcagacgccgccctggttggggcaggtgctaagaccactgcagacctgggtctctgacctggccacgtccccggaccacaccccgcgggtgtccccccagcagccagaccagacccccagaggcaggcagcccacgggcgggagcagacccaaggtgccgtgtgtggcgggggaggcagccacaggtgtgccaaggtgtgctgggaccatcctcgggccgggcgagggagccccactgtacctgcacagcacagacgccaccctcaagcccggtgccggtgccgaatgggatgatgggcacaccttggcgatagcacagggctgccagccggctgacctgctccacgttctggggccacaccacagcatcaggaggttcgcacctagaaccagaccctcagcgatttagcggggcgtgacaccctctggtccc

SEQ ID NO: 23504 - DNA, 842 bp, Homo sapiens
  chr16:81563939-81564781
  hypo
cggatccctcagggacctaggtgcagttcctgttcctcccgtctcgcctctgttgcgctgcaaggtggggtgtgtagtgagtatcactgtaacctgtacttttctaaagtcaaacagatttctcttggtgggaggacgtgtcttttgtgggatcggtgtagcccgtctgagtcagtgactcacctggcacccctggcagctgactttcctggcagttcactcgagtctcttgcctctgctcacaaaagcctgcgcctttattcagctttcctcaccgcttcccaaggcagagcagagcctctcccgcccgcctcccacatctctcccttagctgggtgcccgcgtggctgctacctccgaggcttctgtgtcaccgggtagtggaaatgtcaccgagtgtcagagcttcgagcctcctccagatccatccaaggtggcatcactaagtggcatttgtgtgctaggcacgtaccctcttttacatacattatcttcgatcagttcagcttcttctgcataaaaaagaaatttctctaccgtcccagggagaataattggaaaagcgagccctgagtactcagcccacccgcccttctcctgctgaactgtcgaacgtagccaccagctagcctgagcttgttctgatgtcttctgggatcgtcattgttatgggttgaactgtagccttcaaaaggcacgtttacgctgtagtctctgtacctgtgagcatgaccttctttggaaatagggactttgcagatgcgaccaagttaagatcatgctggaggtcatgcgggaggtcatgctggaggagagtgggcccaaatccagtgactgtgtcc

SEQ ID NO: 23505 - DNA, 337 bp, Homo sapiens
  chr16:85670994-85671331
  hypo
cgcagctgcctttctgctccgtcctggagttggaccagtgagggcctccccaccttcatcatggcagtggctgtgcccccttgattgcagcagtggctatgtatcgagtccccccttgatcgcggcagtggctatgtattgagtccccccttgatcgcggcagtggctgtgtatcgagcgcctgctgtgcccctggcgggctcgctgtgcttctcacacacccttcgcctctggtggatgagaactgagcctccggcttgcccgggtcccacgttgtaagtggcatggggaattccaatccccagcttgtgcctgagactccatagacccctgcccc

SEQ ID NO: 23506 - DNA, 419 bp, Homo sapiens
  chr16:87356538-87356957
  hypo
cggggcagccccaagagcacgtatcccgggacatgatgtgttgtggtctgtgtggggtcagagccgtcagtgttcactgccgcgtgcccagtgcttagcactgtttgccgcatgggagatgcaggtcacaacccggtagcgcctagtggcccgggggacacctggcttgtctgggcctgttggctgacaggtaggagggactgccatccattgttggggcaaaggatgctgctcaacctcccacaacgcatggagcggcccggcgcacgactcacccggccccaaacaccaactgtgccgaggtgatgccctgccctgaggcgagcgtacaaggcttgagcgtcgagaacactgcaagggtctcagccagtgaggggctgcctgggccccgccgcaggcctgactcctagagccaagcc

SEQ ID NO: 23507 - DNA, 459 bp, Homo sapiens
  chr16:89216581-89217040
  hypo
cgcaccctcctgcctccaccctgacttgccgtctcctgagcactgaagatatttttggcttgtccgatgtgactccacagacagcagaaacgcttgcttgatcagggcagcatcagggcaccacacatgcctgggcttgcacaacacagcgggagcactgccactcagcagcagctgctgctttcattaaacagttaccttgagaagaaaagataggtgtcgagggctgagagctgtgctagagtttcagggtccgagttggcaggaactgaagtcccgatgctcctcagcccttggctgtcctcagggctgccctctgcgtggggacaccaggccgcccctgcccagggacaccaggccgcctgctcctgctctgtgcatctctcacatcaggctcctcacccagcattgtttgggctatgacagtggctgtgacaagaccctaagacgggaagctgc

SEQ ID NO: 23508 - DNA, 179 bp, Homo sapiens; identical to SEQ ID NO: 6461
  chr16:89947451-89947630
  hypo

SEQ ID NO: 23509 - DNA, 470 bp, Homo sapiens
  chr16:90066554-90067024
  hypo
cgacttttcccgacacggcaagaccctggtggagaagctgtacggcgaggcaagcgcccagctccttgatgacgaggtccggcacctcgtcagtgccacctacaggtgcaccctggacctgctgacacggtgccgggagcatgtggagaaggtgagtgtggcctctgcccagacaggtcgtgggtcccatgttgagtcacggtcatgccacacccgaaggccacacccgtccttcagcttgcttaggtttgggctgtgatcatgtcctcagagccgtctgacaggtgggccgttgtttccaggtgggccagcggctcctggagaaggaagtactggagaaggcagacatggtggagctgctgggcccccggcccttctcggagaagtctacctatgaggagtttgtagagggcgtgggcagcctggaggaggacacatcccttcccgaggggctgaagggttggaaccgc

SEQ ID NO: 23510 - DNA, 299 bp, Homo sapiens; identical to SEQ ID NO: 6464
  chr17:1454071-1454370
  hypo

SEQ ID NO: 23511 - DNA, 331 bp, Homo sapiens
  chr17:21104016-21104347
  hypo
cgaatgtgcctgacaggaactagcttcctttcatggctaacgagaagcacagccctcagtgtgcacagacgcgaaggtcccgtccgcccagcctgtcctggcaggcacacctggctgcggtgcagaggagagtcatggggagctgagccacctggccattggccgtaatatgggagtgacgagtgaagacattcataacaagccaccccagaacctcagcccagcatgaaggtaactccctccagcctccttcaaagatgggagcaattccaagtgaaggatggtggaaatcggactgtcgggaaacttcaaggaaaaagaacaggcaatc

SEQ ID NO: 23512 - DNA, 115 bp, Homo sapiens; identical to SEQ ID NO: 6466
  chr17:2326357-2326472
  hypo

SEQ ID NO: 23513 - DNA, 312 bp, Homo sapiens
  chr17:27909050-27909362
  hypo
cgtgcagaggtgtggtgcccttctctgggtggaagaagttggcctgggcacccagggagagcaggcgcagacatgtctccaggttgcctgtccgcacgctcgagtgtagttgctaagaggagcagagtgtgcagtgaatacgcatgtgcgtgaggcgcacctccccacccacaagctgcaccctggctgcccctgggacacctagcagctccaaggaggcctgcccaaaccagactatgtcgggaggacagaggcttcccgctaggggttaatgccaattaataaacgctgccgtcagtcaccatctaccac

SEQ ID NO: 23514 - DNA, 170 bp, Homo sapiens; identical to SEQ ID NO: 6469
  chr17:2805383-2805553
  hypo

SEQ ID NO: 23515 - DNA, 38 bp, Homo sapiens; identical to SEQ ID NO: 6470
  chr17:33351154-33351192
  hypo

SEQ ID NO: 23516 - DNA, 444 bp, Homo sapiens
  chr17:38179119-38179563
  hypo
cgggatctggggctcctacaccctgccaccccagcatggctgtccagtaaggcccgcagagggggccccagatgttgctccgcccctcaggctgaatcccagtctctggccagagctccccaaggaggcaactctgaggcgaggcattccggggaggccacctggctcacggcagcctctcagggaagcctggcagaccaggccaggtgtggggagccaggggacaggacccatgtcggcccacagccactccagcccaagtaccttaatcaggttgttgcagaaccagtagacgccgcccatgtgcagcagggtgtcaaagatgtggatggagcggctgtccacccagcccttctccagcaccttggcaaaaatgtccgtcagcacctctttgatgggccgcttggggggcagcaggttccagtagggcattgtgtccacccc

SEQ ID NO: 23517 - DNA, 213 bp, Homo sapiens; identical to SEQ ID NO: 6474
  chr17:5269074-5269287
  hypo

SEQ ID NO: 23518 - DNA, 132 bp, Homo sapiens; identical to SEQ ID NO: 6475
  chr17:55664904-55665036
  hypo

SEQ ID NO: 23519 - DNA, 348 bp, Homo sapiens; identical to SEQ ID NO: 6476
  chr17:55753412-55753760
  hypo

SEQ ID NO: 23520 - DNA, 425 bp, Homo sapiens; identical to SEQ ID NO: 6477
  chr17:66440125-66440550
  hypo

SEQ ID NO: 23521 - DNA, 400 bp, Homo sapiens
  chr17:692558-692958
  hypo
cgtcagcagctctgaatcctaatgtcattgtgatccgtttcccttagattcccttagcctcagcgtgggtcacatgccccgcacacaaattcgcctcattacatttctgtctcttctcatcagaaatagggattaataggcttggctctaaacagactttcctcacagttggagcacgcctaaaatgtctcttacaccttgggaggtggaggggacagagagtaccattcatcagaaacaccccagccaccattaaaagtaaactaatagtggcacccgttgttgagacttgcctaaattgctgctcgcagctctttctcagtcacgccttgctagaatacgtttctgtgccagtgtgagagctacgtgctggggttctgtgatcagtacccgcttactc

SEQ ID NO: 23522 - DNA, 255 bp, Homo sapiens
  chr17:73124823-73125078
  hypo
cgcaggaggtgtcccactcatcatcaactgcctatccagccccaatgaggagacggtgctgtctgccatcaccacgctcatgcacctgagcccgccgggccgcagctttctcccagagctgaccgccacgcccgtggtgcagtgcatgcttcgcttctccctctcggccagcgccaggctccggaacctggcacagatcttcctggaggacttctgctccccccgccaggtggccgaggcccgcagccggcaggc

SEQ ID NO: 23523 - DNA, 178 bp, Homo sapiens
  chr17:73808646-73808824
  hypo
cgaggagcctcggtggcaaggtacaggcatccacacctcggccgcgccctccctataatcctgctcatagctgccctggggatttggctcaccaccacctactgcctgctctagccgaggccccgacctggcccgcatcccaccctacacccaccattcaaaaggcgcctctaggggc

SEQ ID NO: 23524 - DNA, 185 bp, Homo sapiens; identical to SEQ ID NO: 6483
  chr17:74042063-74042248
  hypo

SEQ ID NO: 23525 - DNA, 73 bp, Homo sapiens; identical to SEQ ID NO: 6484
  chr17:7493149-7493222
  hypo

SEQ ID NO: 23526 - DNA, 124 bp, Homo sapiens; identical to SEQ ID NO: 6485
  chr17:75132773-75132897
  hypo

SEQ ID NO: 23527 - DNA, 148 bp, Homo sapiens; identical to SEQ ID NO: 5760
  chr17:76034983-76035131
  hypo

SEQ ID NO: 23528 - DNA, 478 bp, Homo sapiens; identical to SEQ ID NO: 11267
  chr17:76215753-76216231
  hypo

SEQ ID NO: 23529 - DNA, 221 bp, Homo sapiens
  chr17:80491467-80491688
  hypo
cggctgttcgcgtagtaggttcgttgacaccagcatcaccccagactcatgagtaattcattgcactatgacatcacaatggctaggaataggaatttttcagctccatcataatcttaacgggaccctcatatatgcggcccatcattgacttgaaacgacgtgaattttgttagccgggcatggtggtgcccagctgtaggttagccgggcgtggtgac

SEQ ID NO: 23530 - DNA, 275 bp, Homo sapiens
  chr17:80747037-80747312
  hypo
cgaggtaccccaggccacgctggttcggtctcctcgtggcgttaaggaaagacctggagcagccagctcctaacactcatttcccatcactcagcattttatgtggggcgggcacagtgccgtgagtcttacagaaacctgcatggtgagccgcacgcctttgagtccccatcagccctggcccatccctgctgaggtggcgcgacctgctcacagacgtgtgctcacaggcagcccgtcgcggggtcatgtgctagacggggagggggcttggc

SEQ ID NO: 23531 - DNA, 231 bp, Homo sapiens
  chr17:80747754-80747985
  hypo
cgggagcccagcaacaaatgggagcttctgtgctgctgtccgtgcatacggcccaggagccgggctcatccccgagacgccgtgttccctcccgctgtccgctcacacctgcctgtgtggacgtggctctgacatgtctccttcctggttcattgctcatctgttctcatgtggctgcgccgccaccctgtcctgggggtccttgtcccagcacgtggctctgtgcttcac

SEQ ID NO: 23532 - DNA, 719 bp, Homo sapiens
  chr17:80772735-80773454
  hypo
cgtggcatgggggatgtctggcgctggcagagctgggcaggagaggcctgttgctgccgtctcgactcgtggatggtgagtagctgaggcacggtcaggggggatgtctggcgctggcggagctgggcaggagaggcctgttgctgccatctcgactcgtggatggtgagtagctgaagcacggtcagctgcgtcaccaggctgtccgtggcaggctgcagcccttcgtctgaacccatctccgcggtgtggccctgccgcgggcacgcccagaagagcttgagaacaaggtctgtctacctttttctcgcattggcctttgtaatttcctaattgcctcttttgtctgctgtggaattttaatgccacagattaccctgtgtagctggttttggagggccacgaatccttgtaatgtctgattttcttactccccaaaaccggttttcattcttgagggacattgtcgccccttaaggacacatgcagtggcacctgcttcagttgtagaaccaggtacccctggcagcatcctgggtcacctggagtgacgtggtgctccctggagatgaggctcacgccagcgtgaaaccagggtgggaactggggtggagggccaggggagctctgcagtggccagcagtggggtggggacagagggcacagcatggcagatgcaggggcactgccccagaccagctcttgtgccgtggccacac

SEQ ID NO: 23533 - DNA, 1173 bp, Homo sapiens
  chr17:80797632-80798805
  hypo
cgtggtctgcatcccagccatgcacctgctgggtcctgagtaatcctcggagcccagagcaaggcagagcagacacggagcaaacgctgcgttcagctgggtattttagatacgtctgagaagagttttaaaataaaacttgaatttgaaaagaaatagtgagtacttaccagaggtgggcagtgctgggatgtggccggtcttggtgccggtggctggcggtgctcaggaagcagtacctgttctcacgcttgctgggtgaaactggagcctgctgttccagtgggagggatttaagtgtaggagttgagccctcggggcgtagagatgcacctgatattcctcctgcccgcagctacgattcatgtgtttgcacccaccgagctgctgcgggcagcctccccagcactggacccagcaagcaagttatctcgccgactcccagcgctgtctccagactcaactgtctgtgagtgcggcgtcggtgctgcctggacggccatatgtcagagggctttcgatgtgtccgcagttagaatagagattactatattcatcagaatcacacccgatgaatatttggcgtcatgataaagacatgtgagactttcctttagaacttgagcatgtgtacgcaggaggcaaacacttggattgattctcaagcgcgcataccctgggaggcacagtattcatggcgtccttgccatgaggtccagtgaggcctttgaggatctgtggaccttccaccctctaccctgctcctgagagtctctgtccctggtcctcctcaggagctgagccggcagggagggagcttatcccagagcctggctgcagggacctgccggagcttgcccgacaccaggcaccgcaagagctgcggagcagggtgtgtgggtgcgggggagggggccagctgtgcactcccgcaaaccaccctccccccactttaaattgcagaggcacttaacttgggggccagtttttacctccacacccccccaccaaaactgcttgcttgcttaatcggaggccgcaccccagttgtagcgaaggctggcatgtggtgtcggtttgaggactgggaaaggaggtgggatgagctggtgtcaggcccttggatgagcctgaggctgcagggcagaggctgcagggctgtggcatagggac

SEQ ID NO: 23534 - DNA, 498 bp, Homo sapiens; identical to SEQ ID NO: 6494
  chr18:10725385-10725883
  hypo

SEQ ID NO: 23535 - DNA, 166 bp, Homo sapiens; identical to SEQ ID NO: 6495
  chr18:3986877-3987043
  hypo

SEQ ID NO: 23536 - DNA, 284 bp, Homo sapiens; identical to SEQ ID NO: 5767
  chr18:46418923-46419207
  hypo

SEQ ID NO: 23537 - DNA, 710 bp, Homo sapiens; identical to SEQ ID NO: 6496
  chr18:77474501-77475211
  hypo

SEQ ID NO: 23538 - DNA, 738 bp, Homo sapiens
  chr18:77542640-77543378
  hypo
cgccgactctgcagcccggcgactgcttcccaggtgactgtttccagagtcaggtgttggccgtggtcaggttgacctgcctgtttgttttctataagctgtgtgtgttgtgcccgggtgtagatgccctgaggtttcacggccccccagcaagcagccccaggcccggcaccggatgggcccttcatacccattcactgtaacagacaagcagacggatgaggccatcgtggtccctctgaataaacgatgcttcacagaagtctcccctttcaaaacacgtacagcgaatgactcgggcttcagagccaccctggggtgccgtcggctggtgggtgatggagcggctctgcctggctcctctcggctctggcgcggcaggtcttcctgctttccaagcccgtgtccctggtgccagcacagaactgaactccgcccttgagtcgtgcgggacgagaccccgtgctgcgggcgcagtgccctctgtgggcggcgcgtggtggctgtcctccgtttcccacccggcgtctactgggccttgtccagtatcactgggagctgcaggctcggctagcaggtggctcccgtgccatccccgtgagctccgcctggccctgctgctcccgcccggaaagctcagacccataacccagcccacttggcagcagcgtgccgcctgatcggcaaggtttactccctttgaaaatctctgttgggtggccgggcgcggtggctcac

SEQ ID NO: 23539 - DNA, 131 bp, Homo sapiens; identical to SEQ ID NO: 6499
  chr18:9688396-9688527
  hypo

SEQ ID NO: 23540 - DNA, 140 bp, Homo sapiens; identical to SEQ ID NO: 6500
  chr19:1048876-1049016
  hypo

SEQ ID NO: 23541 - DNA, 316 bp, Homo sapiens
  chr19:10665634-10665950
  hypo
cgaacccaggtctcagagcggggggcgctgcattcccaaagtcatgcaacaagaggttgacggagccaagactcaagcctgggcctgacaggctccccacccacgcttccccagccagcactgcttactcttctcggcagagtgacttgaagacctgccgctttttccatgagttctgggccttctggctgtacgcccgcttgtcccgcagctcctcctgctctgacctgcagacagatgcccctgtgttgggtgctctgggaagtgcccgaggctgcccgccctgccccctgcgcatgtggccccgccgcgcccc

SEQ ID NO: 23542 - DNA, 257 bp, Homo sapiens
  chr19:11003007-11003264
  hypo
cgttcagggccatggctgcagggctcctggacacccagctccggtgctggagtggggttgggattcgcccagaggccagggctgcgccagaggagcccagggtgacctcatggtcctcagatacccggggctgggcagcacagtggaacagctgctccagagcttctccgaggacgacatcggaggatccgactcaggttacggcaggagagggaggccaggccgggttagggttctggggtttgggattctcttcc

SEQ ID NO: 23543 - DNA, 655 bp, Homo sapiens
  chr19:1226490-1227145
  hypo
cgccggggcctccccaaggccgtgtgtatgaacggcacagaggcggcgcagctgagcaccaaatccagggcggagggccgggcccccaaccctgcccgcaaggcctgctccgccagcagcaagatccgccggctgtcggcctgcaagcagcagtgaggctggccgcctgcaggtggggcgcggcggggcccgggtggggcatgtggggacaacgcctggatgccacagccagccgtgagcatagcccgcgctagtcagtcatggtgaccgtcacgtggctgcgcgtggttgccatgtggcctttgggtggcttggccacgtagcgatccccgtggagggtgccgtctcggggcctggtgtctggccagcgtgctggtcatggaggcctacgtgtggcggggctctgggggggcgtgccgtcctcacagccacctctcagagtgggtgcattccgaggaccctgccctgggcctggcgccccctccccatgcccgcgccgcttccaggaaaggcttatgctgggctcagcccagaggcttttgagcaccagtgggtggtgggtggtggggaggggccgcggcctccatggctctgccggggtgccgcaggctctgagccagctgccaagtatggctgaggctgagtcgtgccggac

SEQ ID NO: 23544 - DNA, 298 bp, Homo sapiens
  chr19:12977267-12977565
  hypo
cggggctagacggtgccactgagaatggggcaaggaccttgcctgggagcggagcctaaattaaatacactaatgaggcaggggcgtggcctgacctgaagacttgtaaacccgtcttgaaccaggactgggctcctgtggggatgtgatatgaggaggaaccccgtaccctcagtcacagcccatacccgctccccagcccgctcagacaggtatcaccacgtgaactcctatgacgaggatgacacgacggaggaggagcccgtggaaatccgccagttctcttcctgctctccgc

SEQ ID NO: 23545 - DNA, 263 bp, Homo sapiens; identical to SEQ ID NO: 6507
  chr19:14000130-14000393
  hypo

SEQ ID NO: 23546 - DNA, 131 bp, Homo sapiens; identical to SEQ ID NO: 6508
  chr19:15421594-15421725
  hypo

SEQ ID NO: 23547 - DNA, 882 bp, Homo sapiens
  chr19:16232459-16233341
  hypo
cggtgagaaagccaggcatcccgggtagatgctccttgtctcctactgaggacagttattttcctttaatgttgctaatatcccttctcttcatgtttagggacacagccggtcaggaacggtttcggacgatcacaacggcctactacaggggtgcaatggtagggactttttgtttggttgtttttatctgctttttaagtcaacatgggagcgtcactgtgcattggttaccgaagcctagatgtttctgtggagcccgtgccccaactcctcagggctccttggtcccaagttagtcttaggaacaggctttgtgccccggcctacccccatgtacatacctccccttctggctgcagagacaatgcaaggtttaaataaagtggaaacataattctttgggaatgaagaaagacacaggaagccggttcttccaggtgagctcagtgcagttaaagccggcatgccccgacttttaggagctgtcacatgacctgcatctgtctctgaaatttgctaccaaaagcttgaagatcttccaggagctgacctgccctgggctgtcggccgttatatccgtcacccaggcctgaggcgggatgacgtgatgggaagactcagtcatcatccctcaaaacatttctcaagcaccttctctgggccaggccttaactagatgcagaaggcggccagggatgggacgaggtcctgtgtcaggggccctgtgtgtacatggcagggcattcaggggtagagggagcaggaggtggagcccctggacctgacctgagaccctggcttgcccactgagctccatctcctgacttggaaaagggaacggagcacagcactgtgtctcgggctgtgctgaggataaac

SEQ ID NO: 23548 - DNA, 577 bp, Homo sapiens; identical to SEQ ID NO: 6510
  chr19:16238432-16239009
  hypo

SEQ ID NO: 23549 - DNA, 165 bp, Homo sapiens; identical to SEQ ID NO: 6511
  chr19:18963604-18963769
  hypo

SEQ ID NO: 23550 - DNA, 593 bp, Homo sapiens
  chr19:18989674-18990267
  hypo
cgaacacgcttggacgggtgacactaaaggagggaacgcggggtgcgggcccctccacactcactcggctttgctgggcttcaggctctgggcctcggctgtgtcatactcccgcaggtccttcagctcgtgcacctggcctgtcaacaccttggctgcaaacgccacgatgtactgcgagaggggaggggaggtgccagtgagaagaaagcccccacgccactgccctgctgacagccatgtgctcctgtcccgggccctccacacgggctgtctgccacctaacgtgcccctccccgggactgcctgaggaggggacagggattgggacgaggacgggaccgccactgtggaggagagccggggccgactcaccaggaaccagtagaggttcataagggtgagcagcagcaggagcgcattgaagaagaagtagaaggggatgtcaggcaccgtgcgcagactgcagtgactggtggcatacaggaccttgagcgggaaccagtagaggcggaaccagaacctgcggtgggaggagtcaggaggccgtgggtggagggggacggtgccctacccagtccctgtcctatccc

SEQ ID NO: 23551 - DNA, 1260 bp, Homo sapiens
  chr19:1911845-1913105
  hypo
cgtttttaaaaaccaatggctgtttaaactctgtgcacaccaggggttagcaggacatgagggagtgtagctctgatgcggtgacctgggccggagccctcggactagcctcagctttggtggcagcacgccctgccttgtggagccacggcctcccgggacggactccccggctctcccccagccgcccgcagccgccggatgatcctctgctcccgtctctgtctcccacagtcggcctcgctgaggatggagcccgccccgggcctcgtggagcagcccaagtgcttggaggccgggagcccggagcctgagccggcgccgtggcaggccctccctgtcctgtccgagaagcagtcaggggacgtggagctggtgctggcctacgccgcgcccgtcctggacaagcgccagacctcacgcctcctgaaggaggtgtcggccctgcacccgctccccgcccagcctcacctcaagcgggtgcggcccagccgcgatgccggcagcccccacgccctggagatgctgctttgcctggctgggccggcctcgggcccgcgctcgctggctgagctcctgccacggccggctgtggacccccgcggcctggggcaacccttcctggtgcccgtgcccgcccggccgcctctgaccaggggccagttcgaggaggcccgggcccactggcccacgtccttccacgaggacaagcaggtgaccagcgccctggctgggcggctcttctccacgcaggagcgcgccgccatgcagagccacatggagcgggcggtgtgggcggcccggcgggcagcagcgcggggcttgcgggccgtgggggccgtggtagtggacccggcctcggaccgcgtgctggccaccggccacgactgcagctgcgcggacaaccccctcctgcacgccgtcatggtgtgcgtggacctcgtggcgcgcggccagggccgcggcacctacgacttcagacccttccccgcctgctccttcgccccggccgctgccccccaggccgtccgcgcaggcgccgtgcgtaaactggacgcagacgaggacggcctcccctacctgtgcactggctacgacctgtacgtgacccgcgagccctgcgccatgtgcgccatggccctggtgcacgcacgcatcctgcgcgtcttctacggtgcgccctcgcccgacggcgccctgggcacccgcttccgcatccacgcacggcccgacctcaaccaccgcttccaggtgttccgc

SEQ ID NO: 23552 - DNA, 118 bp, Homo sapiens; identical to SEQ ID NO: 6514
  chr19:19612766-19612884
  hypo

SEQ ID NO: 23553 - DNA, 306 bp, Homo sapiens; identical to SEQ ID NO: 6515
  chr19:1977026-1977332
  hypo

SEQ ID NO: 23554 - DNA, 89 bp, Homo sapiens; identical to SEQ ID NO: 6517
  chr19:2204172-2204261
  hypo

SEQ ID NO: 23555 - DNA, 95 bp, Homo sapiens; identical to SEQ ID NO: 6518
  chr19:2224728-2224823
  hypo

SEQ ID NO: 23556 - DNA, 751 bp, Homo sapiens; identical to SEQ ID NO: 6519
  chr19:3491120-3491871
  hypo

SEQ ID NO: 23557 - DNA, 246 bp, Homo sapiens; identical to SEQ ID NO: 6520
  chr19:39277459-39277705
  hypo

SEQ ID NO: 23558 - DNA, 116 bp, Homo sapiens
  chr19:39329516-39329632
  hypo
cgagcctgagcacctaccagacattcagcttctgcccaaacatgaagttgttgttgaggtgggtaatggcccggtctacagcgtagccatcagccatctccaccatggcggccccc

SEQ ID NO: 23559 - DNA, 168 bp, Homo sapiens; identical to SEQ ID NO: 6522
  chr19:47482472-47482640
  hypo

SEQ ID NO: 23560 - DNA, 41 bp, Homo sapiens; identical to SEQ ID NO: 6523
  chr19:47592724-47592765
  hypo

SEQ ID NO: 23561 - DNA, 513 bp, Homo sapiens
  chr19:49971410-49971923
  hypo
cgtctcaaaaaaaaaaaaaaagaaaggcggttatgcaggatgtttctcaccgcccgaacccccgtggaatgattcactttgaccagcgtctgcgaaatggcaggggcttccacaatggtgcggtttgggccaacaccaagtgttggggagaatgtagaggaactggatctctcatttactgcgggcggggctcccctgccccacacgtgacccacctgtccctgcaggtagccgggctgagaggccctgtgctgcgcctgcgggagccgctgggtgtgctggctgtggtgtgtccggacgagtggcccctgcttgccttcgtgtccctgctggctcccgccctggcctacggcaacactgtggtcatggtgcccagtgcggcctgtcctctgctggccctggaggtctgccaggtatagccccctgccttcctgcctctcctccccgtagcctcagggcagcagaaaaaggcgccccaaagtcggcaggagcttgtctcttaccccaccctcc

SEQ ID NO: 23562 - DNA, 171 bp, Homo sapiens; identical to SEQ ID NO: 6525
  chr19:56807013-56807184
  hypo

SEQ ID NO: 23563 - DNA, 125 bp, Homo sapiens; identical to SEQ ID NO: 6526
  chr19:6425753-6425878
  hypo

SEQ ID NO: 23564 - DNA, 252 bp, Homo sapiens; identical to SEQ ID NO: 6527
  chr19:8554998-8555250
  hypo

SEQ ID NO: 23565 - DNA, 932 bp, Homo sapiens
  chr19:883424-884356
  hypo
cgtggggcggtgcgtgaagagctgggcatggcggggaccaaagcctggcatggtgggcacgtggggcggtagggggagagatgggggagagatgggtgcggtggggactgtcccagtgacccccagctgccagggatgtgagacctgagaaaggctgtggcatgtgtgtgagacgtggctctcgggcgggtaacagctgggccagcaggtgaggacggctgcaggagacgaggaggagtgtcggagcccaggactgcccagtggcttggctgtgggcagatggtagacacagacgtgcccagcgggggcaccgggcagtgaaggtgcaggtctgtgcagccacacggggtggcgccaggtgctgctgcaggagccagcgcagcccaaactgcctggtgactcaccacgaggcccaggggaaggaatgaggcccaacaaggccctggggaccgggcgaaggaacgagccctgggagaaggaatggcagcagccctcttcacctgcctggtgactcactacaagccctgggggaaggaatggcagtggccctcttcacctttactgcctctgcggccacaatgggcagttgacataaccacctgcaggccccgggagccatcggggcctcttgacacgtgctcattagtggcttctgaggagcgcctgccccacctgccccacgtgcccccacgtctggccactccagggtccattagcgctaatcggcaaatgcctgtgctctcatctaccgggaaaacatctcccttctccagagcggaggccagcctaaaaaccaggcccgcagcctccgaggctctgaaaaccaagcggctgttctggtccccggtcatagcaggcgggcgtccctgcttcgctccagccccaggattttgtgccggaggtggggatgacgggcttggctccgtgggtgc

SEQ ID NO: 23566 - DNA, 35 bp, Homo sapiens; identical to SEQ ID NO: 6530
  chr2:106742088-106742123
  hypo

SEQ ID NO: 23567 - DNA, 533 bp, Homo sapiens
  chr2:120005222-120005755
  hypo
cgccgtctgactgccccacttttctcccgcaggtgcccatctgcggtgaccagccagaagccaagcgtgctgtctcggagatggcgctcgccatgggcttcatgcccgtggacatgggatccctggcgtcagcctgggaggtggaggccatgcccctgcgcctcctcccggcctggaaggtgcccaccctgctggccctggggctcttcgtctgcttctatgcctacaacttcgtccgggacgttctgcagccctatgtgcaggaaagccagaacaagttcttcaagctgcccgtgtccgtggtcaacaccacactgccgtgcgtggcctacgtgctgctgtcactcgtgtacttgcccggcgtgctggcggctgccctgcagctgcggcgcggcaccaagtaccagcgcttccccgactggctggaccactggctacagcaccgcaagcagatcgggctgctcagcttcttctgcgccgccctgcacgccctctacagcttctgcttgccgctgcgccgcgcccaccgctac

SEQ ID NO: 23568 - DNA, 590 bp, Homo sapiens
  chr2:120979888-120980478
  hypo
cgacaatcgttatccaactgatagccatggtcacgtgtgttctccgctgctcggcaaccacatccagggaccgcaggaacaggagggaccagacgatgtaatagaggacgaccaggcaaaggaacgacatgaggatccacaggggcacaaacaccaccagccacggccagtgaataatcctgtccagctttagggcgatgaagatgaactgcaggatgttgaccgagcacaggatctccagctccagcgacctatcgtgtcgaaagccccagacgcaggcagccacggacacgggggacacgaagaagagaggcatgaagaccagcagccagaagtgggtgcccctctccaccctgtcgcagaccaggacttcgaacatgagcagcagcaggtggatgcccacagcgatcagcatggctttgaactccacacaggcctctccctcggtgcggtagcgagggttgcgggcccaaacgcccgcgcccacggaggcgcctgcgacgactagaagcttccacagccatatgggggcaaagacggcccagtagctccattggatgatgccgtccaggcggaggggcagcagcacc

SEQ ID NO: 23569 - DNA, 98 bp, Homo sapiens; identical to SEQ ID NO: 6535
  chr2:171815760-171815858
  hypo

SEQ ID NO: 23570 - DNA, 543 bp, Homo sapiens
  chr2:220150664-220151207
  hypo
cgctgacgctctctcctgtcaccccgcccctgctctctccccagatgtgttctgagctggatgccgggttccagaatcgctgcacagttccaacaggacagcgccttcccccatgcgctgggaggggaccctccatttctccccctcacccatgctgagtgtagagccggggcctgggtggcgggtgggggccgggtgggaggtggcagtagtcttagcctgtgcactctcttccttgggtgtttggtgctggctcctggggactacaaatcccagagtgcggtgtgcccggcctcatttctgatagatcccgcttgggggaggtggtgtatggttacggagctgtgcatcttgggacatgtagtagcccaggtcggcttgtcactcgctgtgagatggggagattttgtcttttgatttatccctgtagggctggcagggttgtagatgaagggggaatgatctgagccttggttcccctgacacgtcttgctagccccagggttagagtgggcagggcagagccgcgcagcacctgggagc

SEQ ID NO: 23571 - DNA, 781 bp, Homo sapiens
  chr2:241541936-241542717
  hypo
cgcccttcagccgtgttcatgattgtctcctggcctctgctgtttagaggtctaatgccctccgcccccggcgagccaaacccagtgatggtggttcctgccaccagcttcctgtggcaccgctgccactcccgccaggctcctggggcaccgccaccactcccgccaggctcctggggcaccgccggccactcccgccaggctcctggggcaccgccgcccactccctccaggctcctggggcaccgccgccactcccgccaggctcctggggcaccgccgccactcctgccagcctcctgcggcacagctgccactccctattaaccagcatggcacaggtgagcggtgtgaccttggtcttcccagggaaccagtgcttggcagctcacaccacacacgcctacgcctaccctccaccagccacagcagttgtggcatctctaccctgcccagcaaaagtggaagtgttgcctgtgccgctaggaacctccaggtttgctccacctccaggggccttgccagggtgtcaaacctgtgtctcgggacactgctgttaggtctccagcttccctatcaggcgcctcagcacccagtcctaccagtgctcccgcctcccgtccccagctggctgggcctgcagccccctcctgtgccccgagctggccgggcccgcagcccactccctggtcactggatgttgctgacacttcactcggtcagagccctagcacccaaggggggccagggcctgacgggggtggagcgaggggtgggccgc

SEQ ID NO: 23572 - DNA, 131 bp, Homo sapiens; identical to SEQ ID NO: 6539
  chr2:242277184-242277315
  hypo

SEQ ID NO: 23573 - DNA, 99 bp, Homo sapiens; identical to SEQ ID NO: 6540
  chr2:65251127-65251226
  hypo

SEQ ID NO: 23574 - DNA, 46 bp, Homo sapiens; identical to SEQ ID NO: 6541
  chr2:8868792-8868838
  hypo

SEQ ID NO: 23575 - DNA, 266 bp, Homo sapiens
  chr2:95941644-95941910
  hypo
cgggtcacccctcatgccctgctgcctgcccaggtggtgcggtacgaggcgggctacgtggtatgcgctgtgatcgcgggcctctacctgctgctggtgcccactgccgggctttgcttctgctgctgccgctgccaccggcgctgcgggggacgagtgaagacagagcacaaggcgctggcctgtgagcgcgcggccctcatggtcttcctgctgctgaccaccctcttgctgctgtaaggcgctgcccagggcccgggtagggc

SEQ ID NO: 23576 - DNA, 762 bp, Homo sapiens
  chr20:20376606-20377368
  hypo
cgccttccgcctgtgagcctgggaggtggtgcagcccaggccacacgggacagggttttcagacagccttgccaaggcggctgccatccatcagagcgctctgggcagggcctggaccccagacccaggacagaaaggcaggctggggaggtcacacctgccatggccagcctatcctctgggtcctagaccgcagcccattcctaggtctccaccctctgcgctcccgcagcttttgtccgcttttccttccccagctgttccattcagcagcccccgccacaacctgccctccccgcatggaggtctcagaggcctccattaaggctggcggtcaaaggccggcccagcacgtgccgtgtcttatcggcccatctcaagaccctgctccttcaggcctgggcaacaaaaaagggggcggccccagcgcccgctggctccctgcagccccacacacaaaagggcaggcgacaaagacattttccgggatggcaggtgttggtgtcggattcctccccgagtgcacgggcagaagaaaggcaaggctgggcttccccgggcagcgcagacatgcaggggcaggagtgtgggcagggcccccggggaggggaaggcccaggagggcgaggagcactgatgcagggtccgctaccgagggcagccgattagaaaagtcccaccccctccccaaagcagggtggctggacaaatccactgaagtgtctgtcttaccttgctcaaatattgaaatgagacctttac

SEQ ID NO: 23577 - DNA, 110 bp, Homo sapiens
  chr20:30153955-30154065
  hypo
cggccctgaggcagtgccgtgcccagcatggcttcaccagcctgtgtcctctcatagcctgccctcctatacctggtccccgcctgcatcggttttcctgtcctggtggc

SEQ ID NO: 23578 - DNA, 110 bp, Homo sapiens; identical to SEQ ID NO: 6547
  chr20:37657005-37657115
  hypo

SEQ ID NO: 23579 - DNA, 280 bp, Homo sapiens
  chr20:57268860-57269140
  hypo
cgccaccgtggctgccctgccctgcagggtgagccggcacaacagcccctcggccgcccacttcatcacgcggctggtgcggacctgcctgccgcccggagcgcatcgctgcattgtggtgagtgcttcgagaggaggcagccacggtgctcctagtcgggcagcggtgagctcgggcctggggagctcacagccctgctcagactgcagcgcacgcccagagggctgtggacgttatcatccctgctctgtagacagggaaacaggtccagagagacgc

SEQ ID NO: 23580 - DNA, 409 bp, Homo sapiens; identical to SEQ ID NO: 6550
  chr20:60725146-60725555
  hypo

SEQ ID NO: 23581 - DNA, 716 bp, Homo sapiens; identical to SEQ ID NO: 6551
  chr20:62326157-62326873
  hypo

SEQ ID NO: 23582 - DNA, 307 bp, Homo sapiens; identical to SEQ ID NO: 6552
  chr21:44830965-44831272
  hypo

SEQ ID NO: 23583 - DNA, 155 bp, Homo sapiens
  chr21:45289958-45290113
  hypo
cggcacgggcgggcgggattttggattagttttaggaagcgaaccacagccgtcctccttggactccctgccgtggctggcagtgagctggtgcagggaggcgaagtgctggtgttctgggaattttcaaatgcactacagcgatcaggacacac

SEQ ID NO: 23584 - DNA, 750 bp, Homo sapiens
  chr21:46912072-46912822
  hypo
cgggaggcaggggcagcccgagaggccacagggacctcggcgtgacggtcaagacatcagaacatcagaaaagcctcccgtaggccgagccacctccgccggcaagcaagggagcgtctagcagaggcaggagcattttaaaacaaaatggaagtaaaaaccatggcccttagggcgtctggagtctgcatccagctgctctgagctgaggggcgtctgtgctgcaggagggatgccccaggcccaggaagactggaaagcaacattttccttgaatttcctggtttggtgttttgttgatctgtaagtcgctcgagtccagttgaattttaaacgcggctctttgtttccgatttttccttttgctcgtggacagggatccgtcctgagcgtgccgggacctgaggtatgtgcctgcccagcttctaagagacgggcctgcggggacctgggtacaaggctgggtggggtccgggcaggcgcgagggtgcgtgatgaccccagctgacgccgtccctctttccccagggccggccgggtttcgcaggctttcccgtgagtaacctggtgccagagctgcatgctgcccggctggggaggggtctccacctggtagcacagagcagcccggtcgagctggggtgggccttgtcaggcccgagggatagcgacagtcactgcccccaaggaaatgatgggagtgggatgtgggcgagagccgctggcaggccctgtgctgggtgggcaccc

SEQ ID NO: 23585 - DNA, 731 bp, Homo sapiens; identical to SEQ ID NO: 6556
  chr21:47832850-47833581
  hypo

SEQ ID NO: 23586 - DNA, 145 bp, Homo sapiens; identical to SEQ ID NO: 6557
  chr22:18287371-18287516
  hypo

SEQ ID NO: 23587 - DNA, 568 bp, Homo sapiens
  chr22:18340837-18341405
  hypo
cgtggctggtagaacccggaagtaattgatggagagtcccatccacctggaggcccgcatcccctcccgggcaatgaaacgtgtttctgcgtacaagcctaccaccccctcccgccaaggtaagcggtgaggagacaaggagcaattataaagaaagaggtgttggcagccaacagggtgctgagaattccgggcggtggtgagaggagcccacagtgccatgacctgacctgggcaggagtgccaatgggcctcaccaccccttgtttcattatgactaatctacttgctggcacttgtgaggcgcttggctgggtgagctgcaaggtaagggctggtttttgagtctaaaggaggtttcagggcttcgtgaaaggggctggaattcggaaagacttctcctgaaatctctgcctggctgctgccgttcagagctccacatgggtgtttttatctcggggagcacttgtgggaccgggtcctatacggcatcatcctgccctattttttagcatgaaaataagagtggcccattttcacagccgctctccttccatgtgtgtgccac

SEQ ID NO: 23588 - DNA, 192 bp, Homo sapiens; identical to SEQ ID NO: 6559
  chr22:22324565-22324757
  hypo

SEQ ID NO: 23589 - DNA, 1044 bp, Homo sapiens
  chr22:29445607-29446651
  hypo
cggagcaggaggggcagtccccacctagcctcgcaccccggggcccggcccgtgcctttcctccgagcggcagtggcagcctgctcttccccaccgtggtgcacgtggccccgccctcccacctggagagcggcagcacgtccagcttcagctgctatcacggccaccgctcggtgtgcagtggctacctggccgactgcccaggcagcgacagcagcagcagcagcagctccggccagtgccactgttcctccagtgactctgtggtagactgcactgaggtcagcaaccagggcgtgtacgggagctgctccaccttccgcagctccctcagcagcgactatgaccccttcatctaccgcagccggagcccctgtcgtgccagtgaggcggggggctcgggcagctcgggccggggacctgccctgtgcttcgagggctccccgcctcccgaggagctcccggcggtgcacagtcatggtgctgggcggggcgagccttggccgggccctgcctctccctcgggggatcaggtgtccacctgcagcctggagatgaactacagcagcaactcctccctggagcacagggggcccaatagctctacctcagaagtggggctcgaggcttctcctggggccgcccctgacctcaggaggacctggaaggggggccacgagttgccgtcgtgtgcctgctgctgcgagccccagccctccccagccgggcctagcgccggagcagctggcagcagcaccttgttcctggggccccacctctacgagggctctggcccggcgggtggggagccccagtcaggaagctcccagggcttgtacggccttcaccccgaccatttgcccaggacagatggggtgaaatacgagggtctgccctgctgcttctatgaagagaagcaggtggcccgcgggggcggagggggcagcggctgctacactgaggactactcggtgagtgtgcagtacacgctcaccgaggaaccaccgcccggctgctaccccggggcccgggacctgagccagc

SEQ ID NO: 23590 - DNA, 86 bp, Homo sapiens; identical to SEQ ID NO: 6560
  chr22:29587127-29587213
  hypo

SEQ ID NO: 23591 - DNA, 112 bp, Homo sapiens; identical to SEQ ID NO: 6562
  chr22:36907702-36907814
  hypo

SEQ ID NO: 23592 - DNA, 55 bp, Homo sapiens; identical to SEQ ID NO: 6563
  chr22:39144766-39144821
  hypo

SEQ ID NO: 23593 - DNA, 528 bp, Homo sapiens
  chr22:42095795-42096323
  hypo
cgctccggtgaacccgacgcgaaaccgggcccccgcgctgtgttcactctcctccctgtcagcccgtcccggacccggccgcagcggcctctcgggcccctcagccccaggccggcctgcgggcctccgtggagcccggtccactggctctgcgcctgaaaggacggaaatccggatcccccgggacctcacccagtctcagggacacaccttcccgccttccgccttctggctccttccctttgctgcccctgcctccatttcccggggattcggccttagctcaggctcccgccatttcagcctcccgccatttcagcctccactcacctgcgggccaggggcgcatgcggcggccgctcctcattcccttcagctgtcggggtgtgaatcggaggaggggcagtctgggctccgaggggacaggagtgacaggttacagccgggcagaagtgggggtgaacgggaagactgttccttgggcagagctggccaaagcgggctgcctgggtcctcattgcctaccgc

SEQ ID NO: 23594 - DNA, 197 bp, Homo sapiens
  chr22:42395143-42395340
  hypo
cgcatgtctcctcagggcggggcggggagggggtgcgagacgcgtgtgtccttcgaagagaggccggagctgaccggcggttgtgagcagccgggggccttcggtggcagcgtggctgcccttgggtgcctgcgactttgttggatgaggacaggtactgggtgtgtatctcctcctacttccacgaacaaggtgtc

SEQ ID NO: 23595 - DNA, 281 bp, Homo sapiens
  chr22:42667137-42667418
  hypo
cgccaagagccctctgggccgggggcagcccaagacctagctggtcccgcctgggtccctggcagcccccgcccatgggttccaggtgtccgtggaggaacgacttgggtcctctcagagcctcagtttccaccgcggaaaacgcgaggagggaggcccacctacctcacctgtaaaacggacgctccagctgccttctgctgcggcattaagaagctgcaatgccaggctgactgcgcccagggtcccgaattaatttgccgataaggcggaggatttgc

SEQ ID NO: 23596 - DNA, 551 bp, Homo sapiens
  chr22:43570061-43570612
  hypo
cggtccgtgaagacggccgtgacgttcggggcccacagctcggctcctgcaccacggtttccacagtgggtgctcatggaggagcaggcggacacagacgctgggccggggaaaagggccatggagcacaccgatgccgtgtctgggacttaccacctttcccgctgctggaagtagctgacaaactggggcagctcagtgcgcaggttgaaggttcggggcagccagggtgggccctcggggccacctgcccggcgcgcgatggaggccaggcagtccttgacagtcagcaggttctcgcaggggaactggttcagcagcacgcctggcctctcctggctgagtttcctgcagggcggaggcaggtgcgccagctcaaggggaggccggcagtgcctagaagccctgactgggagggcccctgcggccagaggtgccctcacctgtagtccttgaagtgtgagaagttgaagaggatgtcggcgtccgcctcactctgggtgagggtgaagcgcgggtgggtgaggctgctggccacctgctgcacgtcc

SEQ ID NO: 23597 - DNA, 733 bp, Homo sapiens
  chr22:45593240-45593973
  hypo
cgtgtctccaccatcctcaccctgcagactgggaaatgggctcgcagcaacggcacaccctgcagggcctcaggtgcaagctggtgtgggggccagagccactgcctgtcacagctgctgcaggcctgggtcagcgaggtggcctgagagcctcccctcgcccgtgagtaacacacacctgggcatctgtggccactcaagaggggacagcaggtgcgccagaaaggtgaacaaagggaggacttcagctctgggaaagctacggctccacccaaagtctgagacaaagaggccaagagccctgcaaagaaacccaaccaaccgacaggacagggcgggatgactccgggtggctcacaagtaccaaggccctggaggcagagctggctgtgagaaggtgcggctgcttccccacatccgccagcattacctgttaaaatccgatgcagcggcaacgtgacgtaggttaagtgtgcatagagaaggaagtttccatctgctctgttcagcttcagccaggacccgaccagggaccgtcctgtgcccgacagggaccgagaccgcaggttggttgcattgtgcagatcggctggaggaaagaaggccaggtcaaggcccccacagcatgggacgcggcgggagcagcaggaggccagctcccagtccaggctgaggccaaactctgctgaggccaggacgctccttaccaacacccccacaccagcacccacac

SEQ ID NO: 23598 - DNA, 567 bp, Homo sapiens; identical to SEQ ID NO: 6572
  chr22:45808579-45809146
  hypo

SEQ ID NO: 23599 - DNA, 359 bp, Homo sapiens; identical to SEQ ID NO: 6573
  chr22:46979972-46980331
  hypo

SEQ ID NO: 23600 - DNA, 832 bp, Homo sapiens
  chr22:47022417-47023249
  hypo
cgggggtctctgggtcggggttttctttggaaagctggaccggccgtgccctgcgtgtgggagctggctcgtggggcttggaggtgtgtgtgggagggacggtggcagggcggggtctctgggtcggggttttctttggaaagctggaccggctgtgccctgtgtgtgggagctggctcgtggggcttggaggtggcgagcgggagagtgaccacgcccctctcttgcagggaacccgagcgtcatgttagggtgaagcagaggacctcagtgctgaacatgctaaggaggttggacaaaatcaggttcagaggtcacaagagagatgacttcctcgatctagcggagtctccaaatgcctcggacaccgaatgcagcgacgaaatccccctgaaggtaccgcggacctcgccccgggacagcgaggagctgagggaccctgtgagtacctgtcctcgtcccccggtgtgggctggggtgtcgtccccgtcctctgtggccgggccaagcgtggactcaggcagattcgtgtcctgcccatgctggtcagagatggactgggcctgactctctgtctcacctgctcccgacccctgcagaccttgtggggccggggtgctgccacgccgagccttctgtgttcgcaggtctgattagcggctggattggttttcctcactggcttttctgggtgggtggcagacttctcacgcacatgtgacgcggaagcctcggcctggccctgggagcgttgacatgcggatggagcagggcgggcgttgtctggaagccgctggtgcctggcttgtcttctattcaagccaaggtgcac

SEQ ID NO: 23601 - DNA, 263 bp, Homo sapiens; identical to SEQ ID NO: 9636
  chr22:47054031-47054294
  hypo

SEQ ID NO: 23602 - DNA, 210 bp, Homo sapiens
  chr22:50177139-50177349
  hypo
cgcgcctgggcatggccgtcacacccaaaccaccagtcactatgggacggctccgcacatgctcaggacagcctcagaatgctgtccactgtgtcgtcagctgcagcaggctcccagtcggtgccgggctctcctctgcgtccttcgtgactgtccagagggaaggctgaggtgccacgacatcccgccagctccaggcgtgcaccgggc

SEQ ID NO: 23603 - DNA, 1245 bp, Homo sapiens
  chr22:50899033-50900278
  hypo
cgcaaaggtggccctgatgtccggcgggtaccgcagcttatgcagctgcttacggaagagctcggcgctgtcagaccccacctcctcgtcaaaggccattttcagcagctgtgtcagtaaaagcagcccttaggggtgtgggtggccccccagcccctcccccaactctgacactgccaggctccccttcccctcgcagccatgacagagagagaagcaggccccaggcaaaggcctgtatctgtgtcacacgaaggcaagcgcttgtgtaaactcgaaatctcagtggctgtgagctgaggcctgggtttgcaaggcacacccaagacacggacttgagggccggcgccccaaggaaaggacaaggacccaaagaccgcacatcaaacagtggacatcaactcaagagccacagtgagggccccagacatgcaagcgtaacaacagggccactgctggagactggcctaaaaatggttcatacaagaaagaccggtttgcaggagaaagaccagggcgggggatgagagccccacccgcgcaccgcgccccacctggaatgtgcaggagcgcagctggagcccgtcctgcaggagctggtccacaggggtctggacgctgatgcgcttctccttggtcagcgcagccaccgggaaggagcggaccaccacctgctccccaacttaggacaggccaggcagagtcagaagcaaggaaggtaagggggggggggtcccagaatctcagggtaccacagttatggggaatcccaagtgggtggggaaggagcagacaaaggcccgtttcccacgggcacccagaacccccgagaaaagggagagggaggcagggaaagcccatccatcccaaagacctgggggagagggggcgacagggccagagagtctgcaggctcacccagggggtccgtgggcatccccgtgaagatgacccggtacgtggtgaggaagacggcgccctcagctgggagcaatgctggtcccccagcactgccccccgcgccctcctcacgcccatccggcagcaggtagacgcgcaggccgtccagcacacactcctcacccggcagcaggcgcggccgcagcagcttgggctgctcgaaaacaagagcaggagctcaggatgcagcccgggccttgggcccccgcagccccaacggcccccgcaaaccttctggatgggcggcagcctccggctctcccgctgcacggcctccagggtctc

SEQ ID NO: 23604 - DNA, 1005 bp, Homo sapiens
  chr22:50942715-50943720
  hypo
cggccttacccctgcaccccgggctccacaccccacccggtgcccagccttacccctgctccccaggctgggagaaccagtacttgtagcgctgggctcggacgtaggtgggcggctgcttgtggaagggatacctggccacttggctctggacaaggcggatcactgcagcgagaggcatcagcgtggcccccacagtacccgccctgcccctcccctccccaccccgctccaccccagcccactccacaccccccaagcccgctccgcacctggctccttgccctgcagcaggcgcaagaccaggcttgtgaaccacgggctgtgcgtgtgtgggcccagggctgcaaaccacatctgccagtccaggcgtggctggtggggcaccacaaccgggggcggccggctcaggttcccaggcttgtacatgaactcgatctcctgccaggcaggccgaggtcagctgggcccgctgacctgggccccaccaccctgcccgccctgggagggctcaccgtccagtggtggccgtcgtaactgccctccagcaccacctcaggccgtccaccaagcccagtcatgcggcggaagaggccgtaggagttggccagctgtaggtgctccacggcaccaaacaggcggtgggccccggtccagaggcgcccgtgggtcccgggctccacgtaggagtacggcacctggagacaggtgggaggttctcagggctgccctgcccccagcccatcccccagccctgcagcgctacccaccaggctaatcaggaacaaggccacggtcgcagtgcccacaagggacagttggactacagcactgagcttccgtagccagccccgcacctgggtccacctgtgggcaaggacccaaggtcgtcaggccggccctgcacacctgtgccccctccctgcttcctgggccatgtacctccacagggcactcagcagctcccagaccagggaggccacacccagccacacagtgggcagc

SEQ ID NO: 23605 - DNA, 216 bp, Homo sapiens; identical to SEQ ID NO: 6583
  chr3:148804777-148804993
  hypo

SEQ ID NO: 23606 - DNA, 191 bp, Homo sapiens; identical to SEQ ID NO: 6584
  chr3:171362739-171362930
  hypo

SEQ ID NO: 23607 - DNA, 334 bp, Homo sapiens; identical to SEQ ID NO: 6585
  chr3:187443068-187443402
  hypo

SEQ ID NO: 23608 - DNA, 139 bp, Homo sapiens
  chr3:195834909-195835048
  hypo
cgcgcctgtcatctttttaacattttttaaggaattcttatttgccatgagccaaggaatgcacagagactagattcccatggacagctcactcctaccgaacacatacaatgggacacacctgtgctgggtgaaaggc

SEQ ID NO: 23609 - DNA, 76 bp, Homo sapiens; identical to SEQ ID NO: 6586
  chr3:195855364-195855440
  hypo

SEQ ID NO: 23610 - DNA, 299 bp, Homo sapiens
  chr3:196728433-196728732
  hypo
cggaggccctgcaagagccagagaaccagtccaggtcgaagaagggcgcggggggcctcactgactagaggatgagagtggtccctgactggctcttggagaatggaatctgcccttctcggtggagcaggtaggcctttgagtgcctaacaaaacgaaagaaatcggcagcagaagtttctatcagggtccaagcctctgcatgtgctggcttgtttggctttattttagaaaccaaccaacatgtttcattagcactgacacagcaggggtcccctgctgccacctgacaatccagc

SEQ ID NO: 23611 - DNA, 328 bp, Homo sapiens
  chr3:49755498-49755826
  hypo
cggccattgaggcccctccggcctggctccagaaagactacgtgcttgtggacgctggccttgcggctgggtgcgtctggcggtgtggtgctgagtactgaggactgtgcgctcagctcttggagcgggctgggtgtttggggccagcggcggcagcggcaggcacggcggcagcagcggcagggtggggcgaacaggtagagcagcacgagcacaaggcccacggcacagcccagcagtgtggtgaagcctgtgttgaaagcctcgggctctgggcgcggaaagtgcacgctcacgttgtactcgtgcgtctggttgtggtgcaggc

SEQ ID NO: 23612 - DNA, 464 bp, Homo sapiens; identical to SEQ ID NO: 6590
  chr4:1225310-1225774
  hypo

SEQ ID NO: 23613 - DNA, 116 bp, Homo sapiens; identical to SEQ ID NO: 6592
  chr4:152591291-152591407
  hypo

SEQ ID NO: 23614 - DNA, 222 bp, Homo sapiens
  chr4:1791229-1791451
  hypo
cgcctgccctgggttccaggtctccaagcctcggcctccctgcccacctccctgtcgggaaaggcggcagctgcctgcccggagtgctgtggggaacaggcggtgtggatctgagactgtgctgggaatgtcctctctgccgaaggcgcctctgccattttccgagtacctgcaagggagacgcaggagacgcgggtgtgagcggggccatgggcaacctgc

SEQ ID NO: 23615 - DNA, 50 bp, Homo sapiens; identical to SEQ ID NO: 6595
  chr4:2622600-2622650
  hypo

SEQ ID NO: 23616 - DNA, 885 bp, Homo sapiens
  chr4:513070-513955
  hypo
cgccatgctgtgtctcccctggcacagcgcctggcacagtgcctggcacgtcgtccacgctccatggatatttgtttcgatgcatgcacaggtgcacccccatagctttgtgactctctgataggcggtggggtgtggacacaggcgtccccccatccagggtggtaggtgtagcaatgaaggatgccagccctggaaccagactgcctgagtttcatttgcagcttttacccactggcactgtggcccaggtgcgtgactcaccctctgtgtctcagttgcctcctctggataacagttctgatgctcatccctgcctcatagggtcattagggaggtgaaacgagcgagccgcctagtgttgctggctactggcacttagtgcagagcacctggtgccggcagcagtggggtgggcctgcaggcgtgtgggttcatgcttagggacttggtgcctgcagcagtggggtgggcctgcaggcgtgtgggttcacgctcagggacctggtgccggcagcagtggggtgggcctgcaggcgtgtgggttcatgcttagggacttggtgcctgcagcagtggggtgggcctgcaggcgtgtgggttcacgctcagggacctggtgccggcagcagtggggtgggcctgcaggcgtgtgggttcatgcttagggacttggtgcctgcagcagtcgggtgtgcttgcaggcgtgtgggttcacgctcagggacctggtgccggcagcagtggggcgggcctgcaggcgtatgagttcatgctcagggacttgtgccacagcaccctggacctcagtggcttgagcgcctgtggcagctctttcactgctgtgatagcaggcctggggcatgcagagccacagggtggggc

SEQ ID NO: 23617 - DNA, 987 bp, Homo sapiens
  chr4:955328-956315
  hypo
cgctgtcggagccccacaggtcggcccccgagccccagctgccgcataagagagcgggcacagaggtgtaggtgcaggcaggacgagggctgagcctgcccatggccccgccgggcagagcctctggggagccccgcccgcgagcacctggggatgttgatgaagatgaggccttcaatactgggcagctccacctcctgccgctccacctgcagccggatctgcttgtgcaggctccgagagtgactgatcttctgcagccccacccgcacgtacacacccttgttgtgcagcctgcaggacggggcaggtcacccatcaccaggggaagccctaccccgccttaggcagcctccgggttccggcccctctgcctgttcctgctgggggacctgagggaggtatgccgttgacaggtggtagcccctgcggctccggtacctgcttgtgaacttgccaggctcctcttcccgtgcctggtggaagtccaggctcagctccgcgtcgatgccaatgccacagtagttactcatctgcacgatctggggacagggcgttcatctcccaggacccggccgccctcaccaggccccctgagctccccaacagctctgccggcaggcagagacaagagcaaggaccaccctggcaccaagccgagcacccaggagagggcagcatgggcaggtcctggccaggctctgtcgccagctggctcagcacaatccccagcagtggctactttctgtgtctccctcaactgcccgctttgcagaggggatgatgcgggcgcgtacacccgagtgtggctgggaagaggacgcccgttgtgacgcgtgtagcggggtcatatgcaggagcctggaaggcaccccacgccgggctgccctgtaccttggggggctctgcgtctgccgtgtcgttctctgcactgccagcctcgtgggcatccagcaggatggtccagcggtccatgagcacggcgtc

SEQ ID NO: 23618 - DNA, 236 bp, Homo sapiens; identical to SEQ ID NO: 6599
  chr5:1049758-1049994
  hypo

SEQ ID NO: 23619 - DNA, 1351 bp, Homo sapiens
  chr5:1073469-1074820
  hypo
cggctctggacggggctcacccatggcgggaggaggcggtcccagggttcgcccttggaaagctaatggccctcacacctcccaagcttcccggggtgcggctggtgctcccaggccttagcgcgctgctctgagctcaaagccaccgccacggctaaaacacagcagcgccacgcacagcaccgtgttgacacgctgcgatgaggacatgccagggcacgtttcctgtgcagctggggtgggaaagaggcctggcccccagaccccgcccggcccacctcctcggcccgctgagcctccatgtgcttgtccaggtacgtcccctccagcaccgagcccacgatggtcaggcccttgccggccttcagctgcgacgtgaaggacagcaggcgggggtgcttcacggcctgctccgcgtccaggttcagcatcaccagcacctggggcctgcagccagggtggggcggctgttaccacggcaacgcttaccagggcacggcccatcaacaggcagggcagatgggacgggcggggcacacgacacaggtgggacgggagatacatgacaggcgggacaggggacaaaaggggcaggtgacagatgggatggggaaacgtgacacacgtggggtaagttgaacaggtgacaggtgagacaggccacagaagccaggtgggacaggcagggccgatggacaggtgggcactagccaggcaggacaggagaacaggtaggttagacaggtgggacaggtgacatgctagacaggtgagacaatggcccaggacacacacctgaagcccccaccgaggccctgaggggacaatggcccggggcacacccgaggcccccgccgaggcccctgaggggacaatggcccggggcacacacctgaggcccccgccgaggccctgaggggcagaggcttcccaaagatggcctttgcttcagcaggagccaccctctcccaccccaagcccagggctgtgctggcagaggggccggctccccacacccccaccctgcagcagggacacccccggcccccagctgcgccatccgctctgcaccaggcagtgttcacaccccagaccttgcctgagcggctgaaggtgagaggcccctgagactcaaaggtccccactcaaaggccgacctcagaaacagctcttctgtgcgtctgaggaccacggggcatgggcggtgctcacctccagttcttggtgtgggggggaccgtgctccacgcgcagcagggcgtagcgggcggcgttcagggataggccacggatgccatcgccccactccttctcggccctgtgggaaaggaagtcggggtttgtccagccgc

SEQ ID NO: 23620 - DNA, 65 bp, Homo sapiens; identical to SEQ ID NO: 6601
  chr5:141355864-141355929
  hypo

SEQ ID NO: 23621 - DNA, 225 bp, Homo sapiens
  chr5:154209748-154209973
  hypo
cgagccagactcagggaacagtgggacccacttcccggcgctgtgcaagtcagagttccttgtaagcagggtctgggcctcacttatcatggatttgccctggtgcctttcactattggtcgaattgagtatttcggaaggagaacttgtttaaaagacagccaccgcccacacattcagaatccatactatccgtctattacagtggagttatccattgttttc

SEQ ID NO: 23622 - DNA, 395 bp, Homo sapiens
  chr5:176558657-176559052
  hypo
cgccaaaaatggcctttctcccaggtgggctcaaagttaacagaaggcagtgagtaaacagtccactggggcaataactatgcacatttactaagccatgggaagaatagtagtcacgtggccctcgagggcggtgccctcagcttgagatggagttaactccaaatctaatcacagaaggctttctggaggaggcggaatttttatggcggccggatccggctttctctgaacagcgagaaggcgcttagcgccctagggaccaggtaactcctgaggtgagcttcttggtggggatcaagcccagggggcgacggagtccgggctgggggaagggcccgaggggctggagtcgcaagttcaggcccagcttgggctccctgtcccgcccttcc

SEQ ID NO: 23623 - DNA, 719 bp, Homo sapiens
  chr5:176794807-176795526
  hypo
cgcaagtccttccgccggggtgagggcaggagcgagcaacagagatgtggggaaggcgggagtttggttaaatttggggagtgcccccttcctcctacgtggcccacagtctgtaagtctgtgaaaattgaaacccaggtcccagtgaccaccacactcccctgggtggttcgggtcttgggctagacctcagacgtttggaaatctccaacggtggtgtcgctcccagggatttacacctgggcccctgcaggatggctccaaacaaggcccaccagtggggaacaggcttccgcagaggatgggtgagggcggggggctgttcgcgttcatcgctccctcttcactagagctgggcgggactgcaaacgccgccttgcgccgagagtctcagggctccctcaactcctccgccagcctggaccttggcttcctagccttcgtcagcagcaaatctgaggtgagccgactgttggggaagacaagatgctctatgggctagagtcactactcaggcccatttacgtggtggccctcattccaagttgctgtccttactgcgtctcccagcttgctctgcgtagccaacccttcagcctccttacttgtctcactacattggtccccatatatgtcatgggtacacatcctcagttggcaaatgtgtgcacatgtgcagcacccaggtgtgtatacacagcacgtgtgtgggaatcagc

SEQ ID NO: 23624 - DNA, 331 bp, Homo sapiens; identical to SEQ ID NO: 6604
  chr5:453948-454279
  hypo

SEQ ID NO: 23625 - DNA, 432 bp, Homo sapiens; identical to SEQ ID NO: 6605
  chr5:883821-884253
  hypo

SEQ ID NO: 23626 - DNA, 187 bp, Homo sapiens; identical to SEQ ID NO: 6606
  chr5:913200-913387
  hypo

SEQ ID NO: 23627 - DNA, 223 bp, Homo sapiens; identical to SEQ ID NO: 6607
  chr6:36198250-36198473
  hypo

SEQ ID NO: 23628 - DNA, 205 bp, Homo sapiens
  chr6:36214638-36214843
  hypo
cgtaaaattacatagtactcttaaatatgtcttcttgaacgccatcgccccatcccagactcaggaccagcctccccgcgctcactgctgtcactgctttccgcactccctgcggattttaggattttagctcccatctcgcgtcctctctccagctcctcctgccccctgcctggtggtttcaccatccacttaccagcccgcc

SEQ ID NO: 23629 - DNA, 176 bp, Homo sapiens
  chr6:4951262-4951438
  hypo
cgtgtttgctttgccgcctctgcctgtgtgctctccaagctgcgggtttcacatgcagtaaacggcatcaagacattgacagaaggtgtatgggcagtcttacactgtctcagcgacttcagggccaaaactgtcttttgtgattttgcctcttttggaagtggaagccacctacc

SEQ ID NO: 23630 - DNA, 420 bp, Homo sapiens
  chr7:101475674-101476094
  hypo
cgacatggcacatccagcgagcccactgtgtccccagcacctgcggtgcagggggctggcaccttcaggggcgggcttcgtgcagacgtccacccagtcagtccccacaggtttatcaaacacaagtggggcgacaggacccacacttcggcgttggacgtgactcacgcggggagttggcttggagttcctttattcatccctatttgctttctgtctgtaatcctttgtaattccctggtttcatgatgtaattctaatggaaataaacccgaacctttcaaaattatgtaattaattgcattcagcttcaatgacaatgactaattatagtgatacctggtggcaaggcaggtacctactgctggggggctcctgtctgcttggtactaggactgccacttctgggcgcgtcggagc

SEQ ID NO: 23631 - DNA, 255 bp, Homo sapiens
  chr7:129483371-129483626
  hypo
cgctgccgcaaatttcacgaaggcacaagctccccatgtctctgggtcaaaatcgcataccatcgctggcagggaagctaaatccatggatcagagatgatcaccctcctccccaaagaatccctcacaagtgcaaagaagcatgctaagcaaaggacgttcagatgtttctgtggctattcacagagacggtgtgcttgttttcatgcagctccaccgcaggaggtaacccgcagacacctgcacacagcgaac

SEQ ID NO: 23632 - DNA, 503 bp, Homo sapiens; identical to SEQ ID NO: 6612
  chr7:148480954-148481457
  hypo

SEQ ID NO: 23633 - DNA, 777 bp, Homo sapiens
  chr7:155581242-155582019
  hypo
cgaagtaacaaagcgacaatcggccttggtcctgcgagggcagggagggcagggagggcagggagggcagggagggcagggagggcagggtccactgcccagccggggatgcaaggacggccatggggctccagcacagggaccgggccccgcgggctttgagtgacgcggtaggccaggacgagccccatccacacttggacaatgagcaaccgcagccggccgcgcagcctgggggccgtctccctctccagcccccgtgtcctctggtccacgactggctcttgccctcattccgttggggctgagtcacagccagggaaagggctgaggcagagcaacgctgggtgaaccccgtcttcctgaggccacgtttgcaccgggaagagaacacagtgaaccccctgagcaccaacacgctcccacaccccccacgagcagcccagccctggggaggagcccgtccttctccctgcttgccacaccggccacgtccgtaaccctgcccagcatcccacccaggttgtgtgggtccccacgtggtcaccagcgtcctttcaggacaagagaaaactgagcaggaccagggcttccgcctgccgcattcatctgccccccttcggctgtgccaggtgccttcccatgtggcctcttgctcctcggcatccctgggggagggaaaggcaagtgtctccctgtttcatgcagccgcgcaggcctaaacgcagcctctcctgttccaacaggcctttctggggcctgtcctgcttgccttgc

SEQ ID NO: 23634 - DNA, 312 bp, Homo sapiens
  chr7:157583915-157584227
  hypo
cgtccatttgctgtgataagaaaagatattccacagtttcgtatttgttaagtattttcagcaaatcatggaacacgatgcaacacccgattccatgtttgaaaacagaacagaacaaaattcaacaagaaataagcgcccgcgtccacatattctcgtgcctggcgtgttttacgtgcttgggaagcggagcggccgctgggcttggctctgaggtcgggactggtgcaggcggatgcatgtatgtgcccgggtcccgcctccacacgcctgcctggcgccagcctgcctgtcctccctgcacccgccccc

SEQ ID NO: 23635 - DNA, 777 bp, Homo sapiens
  chr7:157890840-157891617
  hypo
cgcacgcaggcaccagaactcaagacccagcgtggggcagcctctgcctggccaggactggggacctcggagaagcgctggacgcagcaagaatcaggcttcagctccgcaatgtgggcaggggacccgcaaaggatcctgcgggtgaggccaccgggggggctccctggggaggaggtggagaggtccagattcccgaaggctccgagggacgggcggcgggactcaggtttgactctgtaggaaagagggggccgccagtgtcctaaggcgggagatgcccgagggtgacgcttacccaggactgagcctggcaaagcccagccctgctcccggaatgcggagaagccgtccgtgctcagaatccgtcttccgacagcgaaggcggtggccaggagggccaggggcagggagcaggcacgggcgaggcccagctgctctgtgaaaccagaggctccccgaggcacacgcctccctcgcccgccccggcctggcatctgccagtcccaccattttgctgagactctgtgaaggtgaatggggttgcttgggctcggggactggaagaagaaggacgtttatctcgtgaacgcgggacgctccttatgggagaggagtgggagacatgaagcaaagcgtgaccaccgaggagctggggagaaagcgagaaagcaaggaagcagtgggggacggggaacggggccgcggggagggccggagaagatggtagaaggtgacagtgcggggtgcagcgttcctgggtccttgaggggagcc

SEQ ID NO: 23636 - DNA, 548 bp, Homo sapiens; identical to SEQ ID NO: 6616
  chr7:2041390-2041938
  hypo

SEQ ID NO: 23637 - DNA, 591 bp, Homo sapiens
  chr7:2208344-2208935
  hypo
cgcgtggagggcgccacgaggtcaaggtcctgaggccggaacaccaaggagctctgggagggtggaggaagaacacaagcctggagcagggggcagacacacggggcgtggggcccagaggccaccgggaggactcaggttttattccgagtgtgctaaggagccagggattgtggctgaagcgggaggaacacgctaaggagccagggatggcggctgaagcgggaggaacacgcgctcggacttgctgatgggctcttacgtgggcttttccccagctgaagaatgagttactaaatgtgttttaaaatgcaaaaatgtgtacccggtgcttgtcctggcgctgttcagaacaggaagaaccggaaacaacctgaatattcacaggaggcaaacgatccgtgacaggacaagcgtgggatggcctcctgtgtggcagaaaggacattcgggacctatgacgcaaacgcaggcggctacacattcgcctgcaggactgcaccttttaaagtccgcatgtagacagtgaaaatctacaaaggtaaaccggaatctcctaagagcgggtagggatgcgactggtgggattac

SEQ ID NO: 23638 - DNA, 60 bp, Homo sapiens
  chr7:2798471-2798531
  hypo
cgcatgtatcaacatgatgggtctctgctgggcgcggtggctcatgcctataatcccagc

SEQ ID NO: 23639 - DNA, 100 bp, Homo sapiens
  chr7:44097742-44097842
  hypo
cgtcggctggaggaaaagcggcgggccgaggaggcacagcggcagctggagcaggagcgccgggagcgtgagctgcgtgaggctgcacgccgggagcagc

SEQ ID NO: 23640 - DNA, 934 bp, Homo sapiens
  chr7:4802085-4803019
  hypo
cggggagtgaggtcacctgcaacgcgggggagtgggactcacccagcggcgaccccgaagctggacccggcagctcaggcggccgcacccacagacggaggagaacagcccgcggcggcctgtgggcatcggcggcacctggacacacccagccctttccatttgatcgcctgccttcccgtggtttaagacaaaaacacataaacaagttcagacaactgattgtatgattctgggaattctttgctttcctttccttctccctcggcaccacctcctctccccaggcctccctgtcgggcatggggaggaggttggagctcagcatcttgaggaatgtgtcaagacagcccctccgctccgcgctgcacggccagccgcctttgtccgggaggacagacagaaacgcagcaaggcacacaccaaggctgccggggaggcccgggcaccggacagatgcctgttgggaagccaggagctgccgagccacggaccacctaacagcctctccgcccggaacgtgacatagagagtgttggcattaactcggggggtgtccgatttcacttcagaccccaagtttttctttgtttgtttaaacatggaattcagacttcattgtacacctgagacagacacaaaagggatcatgtatttttgaggattttacctgttgacgtctgatgaccggccgtaggtccagggttcccgctgggtttaatcccctcgaagagtaaacctgccgctctgtctgataacttcaagtaagagcagcggcttcctgggttggcgttcgcggtggaaggttcctaggatgaaaggtgagcctggatccgccggccgcagacatcgcgctgctggggacgattggggccgctgctctgcagaccagaccttcccgaattatccgtggctccgatgtcccggtgctgac

SEQ ID NO: 23641 - DNA, 190 bp, Homo sapiens; identical to SEQ ID NO: 6621
  chr7:5396687-5396877
  hypo

SEQ ID NO: 23642 - DNA, 247 bp, Homo sapiens; identical to SEQ ID NO: 6622
  chr7:57706651-57706898
  hypo

SEQ ID NO: 23643 - DNA, 167 bp, Homo sapiens
  chr7:6443294-6443461
  hypo
cgacactgtcacttgaccaatactgaccctctttacctcgcccacgcggacacacgcctcctgtagtcgctttgcctattgatgttcctttgggtctgtgaggttctgtaaactgtgctagtgctgacgatgttctgtacaacttaactcactggcgagaatacagc

SEQ ID NO: 23644 - DNA, 316 bp, Homo sapiens; identical to SEQ ID NO: 6623
  chr7:667329-667645
  hypo

SEQ ID NO: 23645 - DNA, 340 bp, Homo sapiens
  chr8:126044399-126044739
  hypo
cgataagaggaatttggtaatgtgaggtttaagttaggttttgtgacaagaagtcccacgtagtcctggttggtcttctgtaccttgtacactgctccaccgtggagcagataaactggccaatcagcgccaggaactgctcggtgtaccgggaatggaactgcttcagcagagtgagcagtcccaggacaagtggtggccaatcaaccgggtcggtcggttttcggcagaccattcctgcaagggaacaagttgcaacaccatatgaagtacttgccttcagcaacattcattaaataccaacgctgtgaaggtcaaaatgtttggggcccatattctc

SEQ ID NO: 23646 - DNA, 327 bp, Homo sapiens; identical to SEQ ID NO: 6625
  chr8:142227279-142227606
  hypo

SEQ ID NO: 23647 - DNA, 934 bp, Homo sapiens; identical to SEQ ID NO: 6626
  chr8:142235190-142236124
  hypo

SEQ ID NO: 23648 - DNA, 231 bp, Homo sapiens; identical to SEQ ID NO: 6627
  chr8:144351704-144351935
  hypo

SEQ ID NO: 23649 - DNA, 227 bp, Homo sapiens
  chr8:144414263-144414490
  hypo
cgtggcggctacagcccatcctaactctccaggccagtcatcatctatccattgaggcaagcccaagcctgccctgaaccagcactgcgctgggtcctgcggatgcagatcaccaaaacccatacgaagggctcaactgaacctagattctgagatgggcctgggagaagaggagcgagatggggcgtggctggcaggcagtgggcaggctcggtcagcagggctgc

SEQ ID NO: 23650 - DNA, 244 bp, Homo sapiens
  chr8:21959595-21959839
  hypo
cgttcacagtggccaggcaccttgctgggggagtgcaaaaatactcaccagccctgccagccctcggctctgtccaccatgttcctacagccatacagcctgaacctgcaggtgacctcggtcctgtcccggcttgccctcttcccccacccccatattcatgagtacctgctggatccgtacatcagcctggcccccggctgcaggagcctattctccgtgttggtgagggtgaggacgcctc

SEQ ID NO: 23651 - DNA, 334 bp, Homo sapiens
  chr8:23423722-23424056
  hypo
cgaggcgtcaacgtcatgatcatgggtgcagggccggcccatgccatgtattttgcctgctatgaaaacatgaaaaggactttaaatgacgttttccaccaccaaggaaacagccacctagccaacggtattttgaaagcgtttgtctggagttagaaagttctcttcttcaacacgtccctccccagggtgttcctccctgtgacccagccgcctcgacttcggcccgcttgctcacgaataaagaactcagagttgtgtgtgcaatgcacacccagacacacgcacgcacacacacgcgcgcgcacacacatgcttttttctgttcccctcc

SEQ ID NO: 23652 - DNA, 441 bp, Homo sapiens
  chr8:49571728-49572169
  hypo
cgtcgtcctatcacagttaagaaagaattatttcgtgagttttacctagcagtttacataaatcagtttacagcagatttggagaaaaagaacattaaaagcagaccaggtgaacgagtttgaaacggcacacggaattggaagggagaaaaggttgtgatcactgctcaaacaagttcttccttccctccaagaaatgaggcgtgggctgtggaacccattgcggctaatcgtaaacaggtgcatcttaaacataggatgccaacctgctccaacatgctgggcaccgggcttagctgcagctaattacgcgtgcgctctgaccgggcggcccacagcggctctgcaggctcagcggggcgagcgcaggaggcgcgggcccgacacgcgtgtttagacctgcgaggctgtcgggggtgcgcctgggactgagctgggctc

SEQ ID NO: 23653 - DNA, 232 bp, Homo sapiens
  chr8:71447942-71448174
  hypo
cgtggtacaagagcttgggaactgccgaacgcgggtacaagagcttgggaaccgccgaacgtgggtacaagagcttgggaaccgccgaacgcggatagaagctataacacaggcgagctggggcatgccagcgtggctgagcagggcgcgggtggggcatcgctggccggaggtcccggtttgcaaagtgaccgagaagaaaaatcctgcatcaaaagttacagttgctgcc

SEQ ID NO: 23654 - DNA, 126 bp, Homo sapiens; identical to SEQ ID NO: 6637
  chr9:123176142-123176268
  hypo

SEQ ID NO: 23655 - DNA, 259 bp, Homo sapiens
  chr9:126348901-126349160
  hypo
cgtggactcaagggccttcctgaagctcactgttcccaaggaaagaattggagcccagctcgctggacagtgcccggtcccccaaaggatcaaggcaactaggggaatgaagaaaggcaagaaaaactcaaactgggggtggggacaggaagcgcggatgagaagaaagccagaccgtcgccaggtgccggtgcctctcatcttaaccatgccatcagtcagggacactagcatctctgcatgggaaccaagtgggggc

SEQ ID NO: 23656 - DNA, 203 bp, Homo sapiens; identical to SEQ ID NO: 6640
  chr9:135781263-135781466
  hypo

SEQ ID NO: 23657 - DNA, 277 bp, Homo sapiens
  chr9:138743599-138743876
  hypo
cggagagatttccgtcactcatcttgaccgctatatggtcctccacgatttctcacaattatgacaaatgctgccatcacaaagcttgcgtgtgctgtctatgcgtgtacagacgggtgttgcccaggcatactctgagaggggactcgctgggccacgagctaggcacgccctcctgtgtcacctggcaacgcccttctgcctggttgtgcctcgctccagtcccacccacagcactccacagcttgctccttcccacctgcaccgcagcatgacc

SEQ ID NO: 23658 - DNA, 568 bp, Homo sapiens
  chr9:139110897-139111465
  hypo
cgatttctgaattttcttctttgtgtggcttttcaggcaagggaagcgattttttcctcacatccggcaatgacttcaaataagacgaaaagaaggcccgcagaggcttcacgctgtgagagaggggagggcaaaggtgagaagagcctcctttataaaatcctaaagtaggagccgtggcattcaggacagctctgggccacccctttcatcctttgggcatttattggggcatgggagtcagtgggaacagctgacaccccgcctgggctccggctgcgcttccacctgggggataagaggagacacaccaaatccacagatttacaaccagttccagttgtaataagtactatgactcatttatgtttgtggggaccttaaggcgttttgtaaagctgggttgagcatctgccaagatgagctttattctgactgcgatttccaacacgcctaagagccttcaccgacgcgcccacaatctgccagccctgagtgaggcatctggaagtcggggcctggggtggacgtcagcccctccctgatgtcaggcccctgagctccctgc

SEQ ID NO: 23659 - DNA, 821 bp, Homo sapiens
  chr9:139698453-139699274
  hypo
cggggtggagaaggggtggccaggagcaacggagctgagaactcctcaagaggcaaccccactaagcgctggcaacgagagtggcgagggtgagagcagtgtctggggtgcgtgagcaggggttagcagatgacggttttagctgcccaagggcacgctggaagaggccaggttttggggaagaggatgaatctgtcttcaggcaggctgaatgcacttccgtgagttctaggtggacctggccaggaggcagctgggggccagcggctggagggcagcagagcgtctgggctggcacatgctctgaggcatgggcaaggagggccgtgagctgaggggccacgggcacaagtggtttaggaaaagggtgtggccattggccggggatgcagttccaaagtctagtaaggtgagcatggccaaccgcccgctggctttactgccattaggggccttgttgagacagctccccaaccctgtgcccacccgcatgtccccagaggaacatgaggcaaagggaggcgtccttcatcgaggagcgccgggcaagggagaaccggctcaaccagcagaagaagctgatcgacaagatccacacgaaggagaccagcgagaagtaccgccgggtaagccccaggccagggcctggctggctgcccatccccatgacagctgggtggacacaggctcagggccaccactcagggcccactccctgccaaggatgtctcatcccttccccgcccccacctcccatcagggccagatggacttggacttcccctcgaacctgatgagcacggagaccctgaaatgtaagc

SEQ ID NO: 23660 - DNA, 154 bp, Homo sapiens; identical to SEQ ID NO: 6645
  chr9:139833922-139834076
  hypo

SEQ ID NO: 23661 - DNA, 42 bp, Homo sapiens; identical to SEQ ID NO: 6646
  chr9:140166945-140166987
  hypo

SEQ ID NO: 23662 - DNA, 715 bp, Homo sapiens
  chr9:140167020-140167735
  hypo
cgtctaagctggaggcgttgcagaaggccctggagcctacaggccaggtgggtgcccgggggggctgcatctgaaggcacctggtccctaccagcccgtgtgtgcttgccaagctgcccttgtggtgcttgtgtgtggtcggtgggcacccacccctgtgccccctgggcctgcccatgcgcctcgcctgccccatggtgtggttccccgcagagcggagaggcagtgaaggagctttactcccagctcggcgagaagctggaacagctggatcaccggaagcccagcccggcacaggctgcggagacgccggccctggagctgcccctccccagcgtgcccgcccctgccccgctctgagggccctccagacctgctcgggtgctggggccatgccgagtcgcggccctgctcagccggaagaggctcccggacctggatgtacagggcagtctctcttcccggggctatggctgggcctgtcctgccgtcatggccccctgcttcctgctccttggagctggctcccggaccttgcccaccatccatgcagtggctcccagggcagagcctctccttgtactttggcagccatagaaagcgtgctcattttctgttttcctgtgttaggaaaaaaccacctgttttccaaggggagagggcggggcctgagggtgggggcggggcctcttcattggcccagcttggcgaaagc

SEQ ID NO: 23663 - DNA, 947 bp, Homo sapiens
  chr9:140708213-140709160
  hypo
cgacccaaagcagtggcaggcatctttgtgccttttttgtaacctcacactcaggggccccggtgtggcttcgtgctgggggcacaggcgagaggagcccttgcgaggcctgcaggacgacctggatccctgcacctcccagcccccggagagatgggtccagcacatgccagctttcccagcctccgagtgcatgcagcctggtgccctcactgcttgcgccttctcgagcactttccttgtggctctgcttgtgggcagctccctcctcttcccaggccgggcactgcccaggcccccccccccccccgccccccgccccacaaggtgtgtcaggctctgtgttcttgcctttcccatcgagcatctggccacaaatgcagccgccgcccagcccttcacccaccccacgtcacccactgccgcgtcgctgccctgcctgccccctgtccctctgtcagggtcctcagccagagctccctcccacaggcactcgacatgtttctgcctgcacagccttctccctaagaggccacacactcacgtggtgcctttgagaagcacttaccagaatcagggttaacagaactggaagacgtagttgtgactgggaggggaaatggaaggcctgtgcctgcacgtctgaccccccggcgcctctcttctcagtactgcgtgtgcatcgacgactgctcctccagcaactgcatgtgcggccagctcagcatgcgctgctggtacgacaaggtgagggcggcctcgtgtgcgtgggctcaggtggtaagtgccgctggtccgggtctgcaaaaacagtgcaggcgtctgtgaccccagcgctgtcgtggcagcgtcgggaaggagttggaggtgagctgggtgtgacaggcaggggaggcacagcgggcaccagcacccgagtcagggtcgtgagccgaggacatggctgc

SEQ ID NO: 23664 - DNA, 497 bp, Homo sapiens
  chr9:140727446-140727943
  hypo
cgcgcctttggctttgggggctgtggctggtcctgtcctgcggccgtgctcgcctggtttactgtcttgtcactgcccgcgccgtgaaggttgacggagagctgctctcgtccacgcctttacccgcttgttggtttgggttttaacctcttgacctctgagcgtccctggctctctggttaatgttcatgctggggcaggttgtggaccaggtgtctctgccggcaggccccgccctctcggaactcggtcctggaaagccccaggtgcctccttccccgtctgcctggctgtcgtctgtggtgttgcctcttcccgtcgctgggtaacaaaccacgccacccacccgcagctcgccatggcggccacccactcggcccagtgtgcgcagcaggggttgggcgtgccgggcctcgggctgcacaggcagggtgctgctgagcccaggtccctgtggttgcgtgggcagcgtctaggttccttgctagctgccggcc

SEQ ID NO: 23665 - DNA, 665 bp, Homo sapiens; identical to SEQ ID NO: 6651
  chr9:34318282-34318947
  hypo

SEQ ID NO: 23666 - DNA, 392 bp, Homo sapiens
  chr9:95417480-95417872
  hypo
cgctttgcctaactcaccgacacatctgttcttccctcacgtggccctgtgtggccctgcagatgcagcgaccctgaggggtgcatcgtcagcctggaatgggctctgcacctactttcccactgcgccagagcccagcggcgtcctactgggacacgctcacctgcagggcaagcaagctctgcttcactttgtcggtatcttaaggcagaggaaatgcgctcacaggcggccttgtgggttgagccctgtttgctgtgggttcattactgtgacccttcccactgaggacaaacctggagccagactgctcattgctggaaatgctcccctatcctgtcccctcagagcagtccctaacgctcaccccaccaggttgccaatgggacctc

SEQ ID NO: 23667 - DNA, 342 bp, Homo sapiens
  chr9:95484997-95485339
  hypo
cgagtagtcctgcagcagacgagcttcccggaatttgtactccttgatgtcatcccgcaggcggccacgctggatctccacattctggttgatctgttgggggagagggaaaggcaggtatgagcagcctccacagggcacgagaggggctcagtgcagccaggcacgccatggccagccatacagccagaactcaagagccctggcctgcaggtgccagtgtgactgcctggagaggagagggagcccagagcagtatgccagagtgcacagcggactgcagaggttccagagtaaattccctcagcccttctcacctgggaacccgtgactgcctgctcc

SEQ ID NO: 23668 - DNA, 1874 bp, Homo sapiens
  chr1:108506699-108508573
  binary
cgggagcttgccggctggccaccagctcaggggccctgggggcggcctccgggttctgctccctgttcttccctttgaccaatgtcactcctggacagataacgggaccaaacgcccttcacttcctcgagtcctcatgtatgtcatggttcctcttttaggaaaacatgagtacaagacgcaaagcaaaagaagagactaaaggcaaattaccccatcacctcgtttcgtccctccccttcgttattatagaagagcttgatcaaattccctttgtcgcgccacacacacgcagagtaggtgaagggcaccctaagacaacttatttctttcccgcctcacagaaagcctttacgaaatcctcacaccatctccggacgcaaagctttcgcattcagcttgaggagctaaaccatttcaagccaaggtaggaaacgccaaagtggtgccgaagtggtcccaaagcagaaggctgggaagcagggcaagctcagcgcacctagacgtttgcatttacacaaagaaattagccgcatgattaatgggagctgccggctggaggcggggcgcccgtgccggcctcctcacctgggacatctgcggcctcaggttgatctccttcaggttgatggagtgcgcccggaggttgttaagcagctggcagagcaggactccatcgcggagggtctgcgcaaggtcgaacacctgagccgagtcccaggtcacccggtggttggtgggcagcaccttgcaatggatgagccactgcgcgcactgcttccacggctccatgcccgacggctccgggacgcggctgggccggggcgggcggcaaggatgcggccgccgccgccgccgccgcggttcctccgcgccccgccgacgccaacagccgccggccctttccccgcgcgggatcgagggagcaggagccgcggctgacgggtcgcgggcgccgcgctaggctcggctccggtcccggcccgggtgcgccgcgacccggccgccgctgcagcgagtcccgcgcgctctccgtgcgccccggccggctcggcggcggctgccgcgcacaggcttccgactccagcgcccggcccgccactgagcatgcccagcacgccggccggtctcgctgcggtccgcaagtccccagacgcgcgggtgggagcgcgccggcggccggggctggggtctgtggccgagggcggggcgcgggggaggggccggcggaggggggcggcggccagaaaggggatcccgcgcccccgcctgcagccttgcggggctcacgcagcccccggcgtcctggggtcttctctcggggcggcttcccggctttgcggggagtgtggctgaatactgtaatacgatggggtcccccaggaccccctaaacaacaaatgctcaaaggagcgacggattaattggggcacccagactccccagagcaatgaaaaaagtgcctagagcatcagtagagcacggcgctgaaagttttagagatcgtcgccccctcgccccttgcagctctatcccctccattctctatagctgattcctcagcctattcctcctagttgcccctagtggtgttttggcaccctcaaagtgagtgagagtgcgtgtgtggagacgcctgcggaaaccgccccgatccctgagcctatttcctcgcgaggtgattttcacttggagctggtttgcccctgcactgtcaggctcggaactgtttgccgttgctgttctggcccttttgctgaccccacaaaaacctgcttgagaaaggcctgtgccacggtgctagactgcgcatgcgtcggcgactggcggccgggtttgagagcaaagcgcgttagccctgggcagctcctgcc

SEQ ID NO: 23669 - DNA, 1492 bp, Homo sapiens
  chr1:110610659-110612151
  hyper
cgcgagagtggctggcagcgccagcacgcagcctgggttcagagcaaggctgggcgctctcagcaaagggcggcctggggctgcgcgggcggcggactgcaggcgggagaagagcgaggtgcgccaggctctggggcgcgcaactgcccagcctcgtgaaagatcgcgccgcagatggggcgcagctgcgcgctcactcgtgtggactggaaacgctccgagccggttattttaaaaaccgggaaataaggcgggttccctcttcgcccgccacttcccaccaagtaggctgtgcggccctgggggctgactgtcctcaagcagccaggctccaccgcgcgccgcgctgcgccgaggtccgctctgccgcagggacgctggcagcccgttgaacaccggcaagagcgccagaggctagcggccgccaggatctctaccaggctctgctcgcacccgcctgcctccctttcgtttggcctgtcctccgttcaactgaaatcgttaattttcttacccccttgttctcattttgatatattctacgctttaaacatgctccgttttcttttgtttagtctgctccctccctctttgtcctttcccccttctctagttatccgtttcgttcgatcttgctcctgctttttttattcgttcgttcctcatttattcattttagttcatcccagctcgccgactgccatttaccctctcgttctcgccgcgctctccgttgttttgttcaatttcccttccccttttcttggttgtcgctcgctttctttggttttctttctcggtatttcgttgtcaaggccacccttgccgtcggatcccggggtgctgggtttctcccggccgctcgttccgcaccagcgctctctgcagttcgcgcggcaccggtgtggtccgggggcccgagctgtcggtgccggatgcggcgcgcctagcagggacgcgggcctgggggggtggctcctgcccgacgcggagcgctgagccaggccgggtacctgtctctggcggtgctcaccgcactgcgcggcctctgccgtctggctgggatcagaggagccaggccaactgcttctcattaagtcccaactgtggtttttatcaggaaagcctctttcaaagggcacagacacgaagctccgcggactcgttcatttcctccgttgacccacacacacctccccgccctcccctacacattcccaccgccccggctgggcgaaagccggagatgcccggccactccgtggaggcccgcgaggcgccagccgggcggcggcagggggttgaggcggatcttggaggatccagttctgggcctaggctgcgggatatggcagcgcagataaggtgggtgcagtgcggaagccgagacgccttacaggtcatagggtgcggcggacggccgcagagctgccgatcagcctgccaggcccctgccttcaggcgcattctcggatgccggcgcggtccagcc

SEQ ID NO: 23670 - DNA, 1344 bp, Homo sapiens; identical to SEQ ID NO: 22737
  chr1:111216710-111218054
  binary

SEQ ID NO: 23671 - DNA, 818 bp, Homo sapiens; identical to SEQ ID NO: 6654
  chr1:113498720-113499538
  binary

SEQ ID NO: 23672 - DNA, 973 bp, Homo sapiens
  chr1:119548975-119549948
  hyper
cgtcctagctctgtctagtgaagtagagagcagaaaaaaacatctagctctatcaagttgaaaacattttcacattcaccttaaactggtgaagcaaacgggttttccctttactaacatcgctcttgtttttccatttagtctttgggaacgtagcctcaatcttaaccgcgtatgatcgtttccactgcacctgtgcgggagagacaggcgcatatccccgtggcgtcggatctctaaattatctaatctggcggctgcgtacgactcagggaaagccctggccgcgagctttttcaccaggcttgagctcagcagccgggcccgcagtgttgccgccagtggggaggcagggaggctgtcggcgcgccggagccaggcgggaaagggactacagccgcccgccgttgtagcgcaggaagcgggcggtgccaacacacacctcgcagctctgcacgttcttcgtgtcttggaggagagtagagcctccgtgtgaagctccgtccgcacctgacgaagaggagggcgtcttgcgccactccagcgactctgcgatgttaagacgcagacccgctgctgcgcctgcctttgtcggggcgggcgggcagccgccgctcggagcaaggtggggctgcggggagggagagccgcggggcagatccctggccaaggtcctctagaaagcccgctctgcgcccaaacgcgccgctcggtccgtgggccacttcggacctgacgctgccggtgaattcacgcgctccgggacgcgcggggacctttgacgaggtttttgaactggggatcgtcccctgtaacctggccgcgttacctccccaggtgagccggactcgcgggtgggttcggcagccggcgatgtggcaaaaaggcaacctcgccttatttctaggggcttggagatgaagagcggctgagtgtccccgtctaccccaacccgggtattaccctcttttcc

SEQ ID NO: 23673 - DNA, 131 bp, Homo sapiens
  chr1:120321259-120321390
  hypo
cgtagctggttaagtggtggtgccagggactccggactcctactctcgtgaaaactcttgtgcctgaaaattattgtaaaatatctggaattattattattatttatttttattttttgagacggagtctc

SEQ ID NO: 23674 - DNA, 269 bp, Homo sapiens; identical to SEQ ID NO: 6656
  chr1:1246145-1246414
  hypo

SEQ ID NO: 23675 - DNA, 184 bp, Homo sapiens
  chr1:14125492-14125676
  hypo
cgtggtgagtcagagctgctgggtaatgtgacttagtcagctggatcaaagggtaacaaacacaagcactccaggcaaacacagaggtctccgccacttacttcgtcactaagtccggcatgttcaccattgcctaaggaagaacagagaattaagaattgtgaggccgggcgcggtggctcac

SEQ ID NO: 23676 - DNA, 797 bp, Homo sapiens; identical to SEQ ID NO: 6659
  chr1:151020083-151020880
  hyper

SEQ ID NO: 23677 - DNA, 457 bp, Homo sapiens
  chr1:153540038-153540495
  hypo
cgctccagactcggcctgctgctgcgtgtcccttaaacacaccggcacatgcaactagtgtggccaagaccctcggcttgcgctgacccctctgttcagaacgtgcccacacatgcccatgccctctatcctgctgaaatccaacccccccttcaaaggccactgcagggagccttcccagggcccaaccggattcagtgtctacctgttctgtcctgtacaaagcgccccttttgcccttttcgtgtgtacttagagaattctgattttgactgaatcacctgtgtacttgttttctctcagcctcacccccacatggtgagctcaccggtcttactcatttctgcatgaggtaagggtctcgcccacaccaggtgccaaccagtgcttacggctaccacatggcaacaggggtcactggaggagtgcttaggagcaagggagtccttctcacccc

SEQ ID NO: 23678 - DNA, 407 bp, Homo sapiens
  chr1:1566669-1567076
  hyper
cgctcgcgcctggacgccggccgccccgtcgaacctttgggtctccgagctccccgcccccgcccccaatcaggaccggtccagacctccaggcccggcgcttagctccgtttcccgtccctcccgtctccctctcccctttgctggggcctagccggggatttaggagccacacaccctccacctcacgcgctaccctccacggggcttcccgcagccagggcccgccccttcccggctccccgggagaccctggcaagttccctccctccgccccgcaacctggcaccctccgcggcccttgcctacccacgcaccccctccccgcctccccctccaccgccccatactcactgccacgtccccatccggccatcccctcccagctctcggggacactgtcaggc

SEQ ID NO: 23679 - DNA, 147 bp, Homo sapiens
  chr1:157458788-157458935
  hypo
cggacactgattccattcctgcttctaccgctaagctctgtcatccagcagatcctcaatggcctcatctggaaaatgggataatacttcctctgcagggttgctgggaggactaaatagatagaagaaagccccacgcggacgggc

SEQ ID NO: 23680 - DNA, 144 bp, Homo sapiens
  chr1:159869545-159869689
  hypo
cgcgcccggcccaccagtgctttttcccacaccacatccacaatctttggtccacagaggccccgctgtaatggcaacggggagagggttggggcatccctttctccccaactcctccgctcagcgcgctccacatttccaatc

SEQ ID NO: 23681 - DNA, 158 bp, Homo sapiens; identical to SEQ ID NO: 6663
  chr1:161367435-161367593
  hypo

SEQ ID NO: 23682 - DNA, 334 bp, Homo sapiens
  chr1:161367769-161368103
  hypo
cgtgaaacaccgcgcctggccaaaaaatgttttattttaaattcaaaatgctgtaatggaggctgggtgcagtggctttttttactcagcatacttgagattcatgttgttgtatatgtgagcagttccgtcctttttttggctgagtaacattccattgtatggatcggtctttcacttgttgattgacatttggatagtctacagtttggggctattacaaatagagctgctatgaatgtttgtgtacaggcgtttgtatgggcatatgctctatttactcttggtaaatacctaggagtggaatggctgagtcatattgtagtagtttaac

SEQ ID NO: 23683 - DNA, 837 bp, Homo sapiens
  chr1:161409866-161410703
  binary
cgcaagcctccttccccggcgcacaggcacgcagccacaggccaagctgcgacgcgagctccgcgcgcgggatctccgcaaaaggtccgcccgatgcgttgggcgggaatcgagcccgggtcaactgcttggaaggcaactatgctcaccactataccaccaacgccgcacggcgcgggcagccccgccgcgccggcccggggctcccaccagcgcgccgccgacgcccggggcaggccggccccgacgcccggtccgtccgcccgcccgcagctccgcgctgccgcggcctctccaaaggccgccccgcgccccaccggtgcaaggccagcgcggctgacccgttacgcccgcctgcctctgggggcgctctcgctcactcgccgcctcgggcccccagagcccttccccaacaggtgcccgggggggaaacggccggcgccggcagggtccccactcctacgcttcccaccgggcgcagggccccgtgtgtcgcagaaagcctcttccgacaaccactttgagccggcagctcgttgggcgccgtgcagggccagaggaggcctcccggctgccgctaccaagccgcggacgagaagaaaagacaggaggccaaggaggcccagaaggccaaagggccaggcaggccaggcccgagatggcaccctgcgactagctggagggcggaggaaggagaaggagggcccacaggctgggtccgaggcggcggcccaaaaagcacggctgcctccccgtcggggaatcgaaccccggtctcccgcgtgacaggcggggatactcaccactatactaacgaggacgacggcgacggtcgcc

SEQ ID NO: 23684 - DNA, 55 bp, Homo sapiens; identical to SEQ ID NO: 6665
  chr1:163378364-163378419
  binary

SEQ ID NO: 23685 - DNA, 81 bp, Homo sapiens; identical to SEQ ID NO: 6666
  chr1:167221039-167221120
  hypo

SEQ ID NO: 23686 - DNA, 93 bp, Homo sapiens
  chr1:167823354-167823447
  hypo
cgtgagccaccgcgcccggccatagttagacaatctttagccgagtccagtgagtcccaggcaatgttaagttcgcttacaatctggaatatc

SEQ ID NO: 23687 - DNA, 117 bp, Homo sapiens
  chr1:171452991-171453108
  hypo
cgcgcccggccatacgtgtcagtcttatgaccttggttaatgtaatttcatctgattgctgaagttgttctccattgctcaagacagatgatttggctgggcgtggtggctcatgcc

SEQ ID NO: 23688 - DNA, 247 bp, Homo sapiens; identical to SEQ ID NO: 23429
  chr1:171554936-171555183
  hypo

SEQ ID NO: 23689 - DNA, 1563 bp, Homo sapiens
  chr1:171810215-171811778
  binary
cgcggattctggagaagggcgtgacagaggagatttcctttcgggaagtgtagtctggcagcggtgccccggtggtggcggcggcggtgctgctgttgctggtgatcgtgtggtggtgttagcggcgatagtgctttccactgggctttggcttggtagccgctgaaagagaacaacgctgccgctgctgctgatttcatgccatttcctgacccggcgctgtaacttggcctctgagccttggccacagaacgcagaggccgtggcatctggccgcagctgggctgcagtgcgtgcgcgcctggcctggtggtccgatgggaagcccggggcggggcagccgcggggcgggggcggggcgtcgcggagataggccacgcccctgcccgcccgcgcaggcgcgctgcgggtcgttagctgtcagagccaagcggcgggctggcggcgggctccgacgtctgcgccaggacctggctggctgagcccggcgcagcagcagcagccagggcagcgcggcccctactccctgtcaggtcgtagaggcgagcagggaccagctggtcgccggcccctcgggcaagatggggaaccgggagatggaggagctgatcccgctggtgaaccgtctgcaggacgcgttttcggcgctgggacagagctgcctgctggagctgccgcagatcgccgtggtgggcggccagagcgccggcaagagctcggtgctcgagaacttcgtgggcaggtaagcgcgcagggcgcggagtaaggatgcggcagtggggcgaccccgctgcgggccgttggaacgtggacgggcagcgggagccagagggtggatggaccaggcgctgcggtggaatggggggcagagtggaatggggggcagagtggcggtgtccgtggggcgggcggggtcctccagctctgggcatcctccgtcccctgccaccccccgcctggtggccctcctgcctgcctttcatcgtgcgatacaaagccatttcctccctgtcctccagtcggggagtcgggggaggggtccgccccgggctcgacccccaccccctcggtgcgcgccagccccgggcagcctccctgcgtagcgcgccgaaagcttcccagtgcccctctcctgttttcccagctcaacacccccctccttttcctgtcgccctccgtgaggctccctgtgaggctgtggggctttatcccccgagccccctcccttaggtggagatgctttccttctcgccagggttctcgttcctctcagctgtctactgttgcctgcctctagctggggaggcggggtgcgaggagaaagacgtcgtttgttgtggtgaagctttatccagagacgcttccccaccattctcctcccggagagtcgaagaataaaaggtggtgtgtttgcgtgtgcacctattcacagcttcaggcaattgtgagagagcccgaggcacagacttggcagggggtggacgtggacttatgttgtccaggtgccatgtcattcctgcatcatctcggaactgaccagcatctttctcgcactctctctgc

SEQ ID NO: 23690 - DNA, 403 bp, Homo sapiens
  chr1:175372314-175372717
  hypo
cgcagagcccctcctcacattgtcctcgcccactgcaggcattcagacactgccgctggccgcagtcctcaccaacgtagccctcctcgcataaacaggtaccgttggcacatctccccttccccgaacagtccccagggcacctcagttccctgcagtcctcgccagtgtagggctcttcacagacacactccccgtccacgcagagcccccgggagctgcagtctgttgggcaccggagttcggaacagtcatccccgctgtactcgctgtcacagatgcactggccatccacacacaccccccggctggagcaacccagcgggcagtagggctccgagcaattcttgccaaaccagccttcgttgcagatgcagccacaggactcaaagctaaagttgcc

SEQ ID NO: 23691 - DNA, 384 bp, Homo sapiens
  chr1:175375048-175375432
  hypo
cgatgaaccattacctgactcatccccccaaaatcaggttaatgtatttcaaactggctatgcagtgtagaaaatccctgaactgaatccctcggggaagaactgcatttagatcttagagacatattaaccggcagctacagactaggacacttttttcctttgaccgtgtgaagagatgccggggttttgctgggagtgcgttttcgctggaagtgcattggtccttcttgttcactctccctctctgctcagccctctccttcccctcctgagaccacgctgcgagctcccggactctacctgtggcagcactttcttggcagcagttggcgttgcactggtctcgcagcaccgacacctccctctccagcatctcgatcc

SEQ ID NO: 23692 - DNA, 209 bp, Homo sapiens
  chr1:178531640-178531849
  hypo
cgtcagccaccgcacccgacctctactttttagctataatgatttgcaagggcaaaaatttcacggtacaaggagctttcttttgaaacaatgagtaagctcttcacaagtaccaacatgtcgggaaccgtaaacccttgtcgcgggggaaaagctagtctaactgtatcctagaggctctaggttcaggctgaacggaagtacatgtc

SEQ ID NO: 23693 - DNA, 67 bp, Homo sapiens; identical to SEQ ID NO: 6675
  chr1:180478120-180478187
  hypo

SEQ ID NO: 23694 - DNA, 854 bp, Homo sapiens
  chr1:182583799-182584653
  binary
cgtctccaaaaaaaaaataaaataaaataaaaggaaagtgtttgaaaagtgcttaagtgctctgaaaagtctgagatgctgtgcaaatagtgcggcattatccttatttttgttattaaaatgagcgagacttgccctgaccagcgacgaattgactcactcagttttgggggagggggcggaggagtgggaggagcgggaggagaggggccacgcttgtcttctccgagggatgggaatttccacccagctggaagtaataagcgcccgaggctcgggcctcactgtctccacccccgctttccctttcctctgaccaagtgacaactgctcggaaacagacaggacagagaatcttaaaatagagcagcaaatatccgcggctcgccgccccgggctctgtggcaccatcagcagcttgcgcaggacacagacgtcggctcacgcgccgcagccctcggccccggaagagccgcggccgcggagcagcgaacgcgtgcctgccagggaaaagcagtcaccaggaacgcggcgttttggtcggctgcccatcgccagccctgtccgcgcgagatgccctgctccgaagctcttgtgagctccgcggcctgcggctccggaaggcgaagctcttccaggaagcagcggcggccccactggccctctcaggctgcggagaaagggcgggaggccgcggggctctccaggactcagtggtttcggagaaactcgacttcccaggctcggagggccagtttgggattgttatagaacaaaacgtgggcggcataaagtgctccgaagtggagatcaccttgaagactgggcccttggctctgtgacccagcagaccc

SEQ ID NO: 23695 - DNA, 215 bp, Homo sapiens; identical to SEQ ID NO: 6678
  chr1:19659439-19659654
  hypo

SEQ ID NO: 23696 - DNA, 398 bp, Homo sapiens; identical to SEQ ID NO: 22986
  chr1:200009765-200010163
  hyper

SEQ ID NO: 23697 - DNA, 225 bp, Homo sapiens; identical to SEQ ID NO: 6679
  chr1:205245793-205246018
  hypo

SEQ ID NO: 23698 - DNA, 112 bp, Homo sapiens; identical to SEQ ID NO: 6680
  chr1:207936524-207936636
  hypo

SEQ ID NO: 23699 - DNA, 207 bp, Homo sapiens
  chr1:2141579-2141786
  hypo
cggctcacctgcctgcctcgtgcccagacctgcgagtgtgcctgcccgtgtcagacagaggcgagttgggacttcacacctgaaatcaagcgggagggtaggaatgtgagcctcgaaaccaccttctttctgtatcgtttctgggagtggcgatgtcggccagtgggacacctgctgagggtcctcttttcccatccgggtgctggc

SEQ ID NO: 23700 - DNA, 195 bp, Homo sapiens; identical to SEQ ID NO: 6682
  chr1:22003573-22003768
  hypo

SEQ ID NO: 23701 - DNA, 632 bp, Homo sapiens; identical to SEQ ID NO: 22992
  chr1:22140678-22141310
  hyper

SEQ ID NO: 23702 - DNA, 653 bp, Homo sapiens; identical to SEQ ID NO: 22745
  chr1:223936543-223937196
  binary

SEQ ID NO: 23703 - DNA, 180 bp, Homo sapiens
  chr1:226163170-226163350
  hypo
cggaaaacaacagcaaatgattaaagataacgttgtttgttgaggacagaagtaataatgttatgggatattcagcaagactaaatgatttattcaccacctgtacagtgaaaactgaagctaaatctgagaattaaggaatcagaaagaacagggcgccgggcgcggtggctcacgtcc

SEQ ID NO: 23704 - DNA, 841 bp, Homo sapiens
  chr1:2267137-2267978
  hypo
cgggtgggagcggggcgggtgctggtcactctgcgagcaacccagcagctcctccacagtgtgcggggccaggcgagggctggtgggacgggtccccagggcacatcagcgggggcctcctcgcctccatagcccagcccagcccagcgcgcagctgcccccaatttgtagacagagtcccgatttgaggtggcagctgttgctggactccgagccccgagccccagcttcctcctggtagaaccggccggttacggccctgcatgtgctgtgcccgtagcactgccaggcccaggatggtgagatgtgacggccacaaaccccccacggtgtccccgcctgcacgtgccgcggtgtgcacctggtcccactcctgtcctccagctcacagagtcccctcaagccactgccctgaaccctggccaccagccgtcttcctctgagaggccccgcacccctcctgcctctctgcttctgcatgcccacagcctggtccgcccggcgggtctgggagttgtggtgatcgaagcagatggaccggctccagctccacccacttcatgccagcccaggcaagtcgcagggcagctgttagccccgcgagaccctggctggcgggggggctctctggagcgaggcccgtgtaggctcactgtcttcccagaccaggcccttggctcccctgggccttccccgtcctcctggcccagctgatgaggaggccacagctgaccctccgaacacctgcaggtggggtgggctcatcctacctgctgcctccaggaggctcctgtgccgtgggtggtgtccccctggggtgcaggccgcctctggatctgcc

SEQ ID NO: 23705 - DNA, 1373 bp, Homo sapiens
  chr1:226924738-226926111
  hyper
cgttctgcaactcgcgctgcaagatccgcagcttcctcttggcctcctccggccctggcggggagagggtaccggctgccaccacctgctgccggtcccctcgcaggcgaccagcccaacttgggctgctcacgctactgccgctgctgccgctgccactgccgctgctactattcagcctgcgccggccgctccgccagcccccggggctccggggctcctcgggggacagcgactcggctggggggaagaggaaagaggcgcctctcccggggctgaaaacgctgccggggctcagcactgccctcctcgggggcgggggcgtctcgctgccactgggccccgggccgccgccgctcttcatctcgttggcgctattcatgatcaccaggctattgagcgcatagcagtacacagccatagtactgggtcccgcgctgcccgccgccgcggctcccgctcctgctccgccgccggcgcctcctcctcccggcgctcccggctcagccccggaggcccggcagccgcggctccgcgcgcagatggggcggcatggcctgggcagcgggctgggggcacgaccgcgggctcagcccccgcccaaagctccataaacaaccgtgcggctgtggagatacaaggagaaaagtcaggaccctggagggcgcgcggggggagttgggggtcgcctgcagaacccagagagagccccgggaacacaatctatccgggacccagcgccaccggacatctcacctatggggacggcgaggctcggcgagggcatgccccggctgcctcggtcgccagcgcggtttcgggtgtgcttccccgccccccacctcgccccaggctgcgatgcgctttatgaggtcccttcaaatcccaatcctaatactcgtctcgcggaccggcgagaagcgaggtccaagtccttggctcctaagtatgctgtgtgcggggcgcggctgactcagctctcccgggctgaggacaccccagccaccgtctccgggtctccccagcctgagcaaacattggctatccagggcaacccggcagccctcgccctgggcttcagggtctccctgctccaccctctcggggcatcagagaccgaccggctcggagggaacctaagcgggacctgccttgcccgagccgctgccagcgcccggatctgggagggcgcccgcgtgcccgccgtttaccttcctgaccctagccttggggctgtgtctctcggcctacgaaggcctgggcgggcagcggggccgcagccgaagcatttttcagggctagccttgtcgcctatccctagacaagtgttttgtgagtgtgggcgcaccgaggttctacacgttctctttacc

SEQ ID NO: 23706 - DNA, 331 bp, Homo sapiens; identical to SEQ ID NO: 6688
  chr1:228280981-228281312
  hypo

SEQ ID NO: 23707 - DNA, 829 bp, Homo sapiens; identical to SEQ ID NO: 6689
  chr1:228461610-228462439
  hypo

SEQ ID NO: 23708 - DNA, 347 bp, Homo sapiens
  chr1:228504414-228504761
  hypo
cgcctggagatcctggagcctctgaaaaacgcggcggtccgggccggcgcacaggcatgcttcacctgcacgctcagcgaggcggtgcccgtgggagaggcgtcctggtacatcaatggcgcggcagtgcagccggatgacagcgactggactgtcaccgccgacggcagtcaccacgccctactgctgcgcagcgcccagccccaccacgccggggaggtcaccttcgcttgccgcgacgccgtggcctctgcgcggctcaccgtgctgggtgggtggtgggcgagcttttccctcccctgcaggtcgggtctggggcgcgccccgcctccagagcttgcgagtgc

SEQ ID NO: 23709 - DNA, 999 bp, Homo sapiens
  chr1:228528433-228529432
  hypo
cgcaacaaggcgcggaacagacagaactgcgcgctgctggagcaggcctatgccgtggtgtctgccctgccacagcgcgctgagaacaagctgcacgtgtccctcatggagaactacccaggcaccctgcaggccctgggcgagcccatccgccaggttggggagggccaggggccggggccgggagatgcatgtgatgtgggtgggtattggggtgctgggggcttgtatctggggctgccaggaggtggcggtgtgtgcatgagttgggcagagcactgggtacctgggtggctgtggggcctgcaccgctgggcaatctggcccaccacaggctgaccgcagcccacaccctcccccagggccacttcatcgtgtgggagggtgcaccgggggcccgcatgccctggaagggccacaaccgtcacgtgttcctcttccgcaaccacctggtaatctgcaagccccggcgagactcccgcaccgataccgtcagctacgtgttccggaacatgatgaaggtctgcaggctctgggctgctgggcggggctccctgtccctcagcgccggggtggatgccagtggccacacctgcagccgctggtccagggtggcctgaatgtttcctcgtcgggtcccacatctgttgaggatggtcagcccgtgtccccctccctgtgctgacaccctcccccacccacagctgagcagcatcgacctgaacgaccaggtggagggggatgaccgcgccttcgaggtgtggcaggagcgggaggactcggtgcgcaagtacctgctgcaggcacggacagccattatcaagagctcgtgggtgaaggagatctgtggcatccagcagcgtctggccctgcctgtgtggcgtgagtgtccaccttcccgggggcccaggtggctgagccaggatggggcacccggctgcagccgcacaggtccctgcctgggtgggtgtgaggggtgggctcgttcctgggacagac

SEQ ID NO: 23710 - DNA, 128 bp, Homo sapiens; identical to SEQ ID NO: 6693
  chr1:229038524-229038652
  hypo

SEQ ID NO: 23711 - DNA, 185 bp, Homo sapiens; identical to SEQ ID NO: 23433
  chr1:23693488-23693673
  hypo

SEQ ID NO: 23712 - DNA, 807 bp, Homo sapiens; identical to SEQ ID NO: 22748
  chr1:2374848-2375655
  binary

SEQ ID NO: 23713 - DNA, 270 bp, Homo sapiens
  chr1:245254429-245254699
  hypo
cgcgtgccttcaggacagggcggagacggaggaggaaaggagtgtggtgatcctcggaacatcagcagacaggctgttgatgataggaacacattgcagcggggaaggaggatggctgagatatgaaatacccttcaaggtggacgcatacccaggggcatgtcattcggtggcaggggccagcacggacatgcagcactgaggcgtgtgctagcgcccagtgcgtcgacccaggcacggacttgtttggagcatacaggacagctctgc

SEQ ID NO: 23714 - DNA, 182 bp, Homo sapiens; identical to SEQ ID NO: 23436
  chr1:246330213-246330395
  hypo

SEQ ID NO: 23715 - DNA, 298 bp, Homo sapiens; identical to SEQ ID NO: 6697
  chr1:246930862-246931160
  hypo

SEQ ID NO: 23716 - DNA, 265 bp, Homo sapiens
  chr1:248027980-248028245
  hypo
cgatgtgatccacggtgtcacctcaggagaaagtggaaatgcagaggcagcgcttcagattggagtttgagaagcatcgtggctttctggcccaggaggagcaacggcagctgaggcggctggaggcggaggagcgagcgacgctgcagagactgcgggagagcaagagccggctggtccagcagagcaaggccctgaaggagctggcggatgagctgcaggagaggtgccagcgcccggccctgggtctgctggaggtgaggcc

SEQ ID NO: 23717 - DNA, 247 bp, Homo sapiens; identical to SEQ ID NO: 6698
  chr1:25070663-25070910
  hypo

SEQ ID NO: 23718 - DNA, 1775 bp, Homo sapiens
  chr1:25255579-25257354
  binary
cgatcccggcctagcgccgtccggtaaaatttcggaagcccgagggtgtgagcaggaagcttttgcgaagcggcgcgggaggaggggtgctggaggcggagggtaggccctttcaccgttcgcaccccacccgcggtgtccttgcccctgtcccgggatcctcttctccgttacccgcagggctgtatctgagcgatccgggttaggggggcgcaaaaccccatccgcccatttccgcaccaacgtctctacgcaaggcgccccaaaacccaggtggagcggggcaaccccgttaaaagtcattcctgcagggcgcatccaaaacggaacgccgaggtcccggagccgagcgcgcagccagactgaaccgggtgcccgggtgtcgccgcggcgtctcgggcacctcccatccccactgctcccgaggctctggctcccgcagctcagacgcccggagccccagggccggcgccctcccgccccgggtcccgcactcaccttgaaggcgacgggcagcgtcttgttgcagcgccagtgcgagggcagcacggagcagaggaagttggggctgtcggtgcgcacgagctcgcctgcgtggtccgccagcacgtccaccatcgagcgcacctcgggccgggcgcgccctccgggccccacggccgcctgcgcgctcagcgcgccgctgttctcgcccatcttgccgccgccgccgccgcaggggaaggccggggagggaggtgtgaagcggcggctggtgcttgggtctacgggaatacgcataacagcggccgtcagggcgccgggcaggcggagacggcgcggcttcccccgggggcggccggcgcgggcgcctcctcggccgccgctgccgcgagaagcgggaaagcagaagcggcggggcccgggcctcagggcgcagggggcggcgcccggccactactcgccagggcccgcccgctgcgaggcctcgctggcccgacggccgcccgcagcctgcccggctagtcccgcatcctcggcgcgcggccccgcgtgcggccgcccctcgtggctgtcccggctgcctgggccgcggcggggcccgcgcggggctgtgccgctgccgccgcctcccgccccgaagctcgcccgcggccgccccgactccgcggccgcagccccagaacaaatcctccagaatcaagtggcggggccgcggccgcccgcgcggggttagtacccccggggcccgcggggcggggctggcggagcgacgcgtcgcacagccaatcggcggagcccccatcgcgggcacctcggtggcgttcgcggggaggaacggggcctgccggaggccgcccaacggggaggggcggaaggcgccaccccgcggaggaggccccagtgccacagcccagggcccccgagagctctgggagcccggggcaaatgctagaaatttgcttagaacgtccgggtcccacggaaggcgcccttgccgccctctctcgggtcgtagctccctgacgctggggcgcaaccccttcgctcctcctccccgctggccgcggccgggcttccccagctcttgctgcttcgggcctgtgacttctgcaaccccgggctgggggccgcggggtctcagggccggtgacgccgcactgggagccgccccaaagaggttactcacctccctcgtcccgcacattattctgacccaagagcctccaccccacacgggattttgcgcgtcgtccacgcccggccggcggcctttgctgctcccagccctgcgc

SEQ ID NO: 23719 - DNA, 807 bp, Homo sapiens; identical to SEQ ID NO: 6700
  chr1:26662538-26663345
  binary

SEQ ID NO: 23720 - DNA, 134 bp, Homo sapiens; identical to SEQ ID NO: 6701
  chr1:28887889-28888023
  hypo

SEQ ID NO: 23721 - DNA, 41 bp, Homo sapiens
  chr1:29061373-29061414
  hypo
cgcacccggcttttttttttttttttaaagtttatcttcac

SEQ ID NO: 23722 - DNA, 1009 bp, Homo sapiens
  chr1:29585852-29586861
  hyper
cggtgagtcccagcccactgggggcgcaggggtaaggggtgtgggcggccgcggctcctgcctgcagggggtgcaggcccagctcacgatgcagctctaaccccgcagcaaaggccccacacttctcccgcctgggcgacgtggaggtcaacgcgggccagaacgcgtcgttccagtgcatggccgcgggcagagcggccgaggccgaacgcttcctcttgcaagtgagcgggagcggtgatcttggctgggggcggggtgggagggggttggtggctgcttctggccctgactccccccagattgctgagtccctgcttcatactccagcactgcgcacagcgtcccggccctcccctagctctgctctgcgctttcttgggtcccccattcccccaggttagagcgcggctccaggaacctatgtccgcgcggtgtagtagggacggctaaatggggcccgggtcagagcgagatcgggacccctcgctccgaggcgcccctgaccccctcactctcttccctgcagcggcagagcggggcgctggtgccggcggcgggcgtgcggcacatcagccaccggcgcttcctggccactttcccgctggctgccgtgagccgcgccgagcaggacctgtaccgctgtgtgtcccaggccccgcgcggcgcgggcgtctctaacttcgcggagctcatcgtcaagggtcagctggtggacgccggggagcgccgggacctcaccctcgaggggcggggccggcgacgggggcgggctctgcccgggggcgtggccgtggggggtggggccggcagggtgtcgctggggcgctatctgaagatgggcctgtggaaatggcagtggcccagccgggatgagatctgatctaggggtcggggctggcttcgagggggacggacagggtcaaggtgagagcctaaagaggggtggggttctggctgtgtgacttctgtgttgatcctagctggcctgcggtccgctccaggaggc

SEQ ID NO: 23723 - DNA, 671 bp, Homo sapiens
  chr1:3111118-3111789
  hypo
cggcaactggccactgtctccccaccacacgccaccgtctccccaccacacgccaccgtctccccaccacacgccaccgtctccccgccacacgccaccgtctccccgccacatgccaccgtctgatcgccacacgccatcgtctccccgccacacgccaccgtctccccgccacacgccaccgtctgatcgccacacattagggcttggtattctcagtcccacgttttatcatctaaacgccaaaactcgttcctggcctgccctttctctccaaggttcccagatgcacgctccactgcccacaccacccccacggttgagtgggctcggccccgggacgtggcctggctctgggcacctctgctgctccactctgcgtggagagttctgcgtgaggccaggaagctttgccgcgcttccccactcaggagcttctggatgtttctatggaggcctcacgtctaaaaccgtgagcgcaccggccagtggatgctctgaggagtgttcccgtggagccagcaccgggcagctcggcgaggcacacagcgtcgggatttggagagagacggggccctgtgggatggtgcggagcctgaggccaccgtggggacagggatgcagagaaacccatgggcctcggcgttgctccgggagaagccggcagtgcc

SEQ ID NO: 23724 - DNA, 86 bp, Homo sapiens; identical to SEQ ID NO: 6705
  chr1:31474705-31474791
  hypo

SEQ ID NO: 23725 - DNA, 95 bp, Homo sapiens
  chr1:31863040-31863135
  hypo
cggtgtgtgttctgggcacgcagcgggcctcatttatgacttagttcaacattacaaaccttcgggagccccaccctccttctctgagagttgcc

SEQ ID NO: 23726 - DNA, 589 bp, Homo sapiens
  chr1:32410105-32410694
  hyper
cggagggggcagggcgctggctccagctgtttgcatgaatcccccgcccctggcctctctgcctgtgcaggaagccctggtgtcgtaccccgagccgctgcagttcgcactctgcggcctcctcaggcactagagcttcccctgcgtccgcctttgggggaggggagggagtgaagctgtgaattccgggagaagtcaagggtcgctcggggcgtgggtccgcgcgcggaggggctcgctgtcccggtgccagcgggagctggaaagcttcggctggggcctgagtggacgggaaggcggcggcctccgcgggatccttcccggggccgatccacagtcaggatccccagctccaccgccatcaagtgggactggagttcggccagagaagaaaacgacttcgggaactggcaacgagggagagggaaaagttgagaaacgtgactcagcctctttagttcatctttcacgtggggcagcggaggcctggcggggacggggagccgctcggggactgcaggcccgtaggtcgctccctatccgtgagggattggttggttccaggacacctgcggatcccaaaatctgc

SEQ ID NO: 23727 - DNA, 871 bp, Homo sapiens
  chr1:3321510-3322381
  hypo
cgcccccgtgctccctacaccccctggtccaaatgtagatggagtgcggcagagtgggtaggaggcccctgcggtggctcgggcccttccgtgtgactaggaaggaaaggaagtctcagggaagaccgtgtcccccaggtcagaaggatcagggccgagaccagaacccaggcccctccagagcgcggctcctgtcctcccgccggtgtggaaggaagaggctggcggggctgagccgagcctccaccccgagcccgccagggtctcagcaccacagctgaaaacgctttctgcagccctgtctcacgcagcctcagttcaggaattgttcttgaggaaagcagccggggaggctctgcggctcacttaaggccctgcagcgggtccttgctacacagagacctgtcccggcctgcttggtgcagactgcaacgtggcaagagagacaggcagggccctgccccccacagccggttggtccgccagccagaaccaggccaaggcgggtgtccaggcagggcacgcgccaacggcatccgtctccccaggtgttcacggaccccagcaaccttcagcggcacatccgctcgcagcacgtgggcgctcgggcccacgcctgccccgactgcgggaagaccttcgccacgtcctccggcctcaagcagcacaagcatatccacagcacggtgaagcctttcatatgtgagtggtcgcccagcctggccgcctgccctccgggtgcgcggatgccgtggcggtcgggccgaggtgggccatcccccaaggtctcccccgatccgaggggccccagtttgttcataaagcactcatggcaggttctgacatctctgccgcgtgcagcctggtcccc

SEQ ID NO: 23728 - DNA, 588 bp, Homo sapiens
  chr1:3325196-3325784
  binary
cgtgagctggtgcctgtgttggcatgtgtgagagtgtgtgagtgtgagcacgtgagccggtgcatgtgttggcgtgcatgagagtgtgtgagtgtgggcgcgtgagccggtgcatgtgttggcacacgtgagagtgcatgagtgtgggcgcgtgagccggtgcgtgtgtgtgagcgcgtgtgggcgcgtgagctggtgcgtgtgttggaggatgtgagagcacgagggtgggcacgtgagctggtgcgtgtgtgtgtgagagcgcatgagggtgggcgtgtgagccagtgcttgtgttggcacgcatgagagtgaggggcgtgtgagccagtgcatgtgttggcacgtgtgagagcatgtgagggttggcgtgtgagccggggcatgtcagtgtgtgtgagtgtgggcgtgtgggccggtgcgtgtgtcggcgcacgtgacagcgtgagtgtgggcgcgtgtctgtgagtgcgagtgtgggcgtgtgagttgatgcatgtgagtgtgtgagtgtgggtgtgtgtgagtgagtgtgggcacgtgagttggtgcgtgtgtgtgtgagagtgtgggcgcgtgagttggtgc

SEQ ID NO: 23729 - DNA, 1004 bp, Homo sapiens
  chr1:3328265-3329269
  hypo
cggcgcctcccacgttccccgcactcacccccggcttcccgggcatcttccctccatccttgtacccccggccgcctctgctacctcccacatcgctgctcaagagccccctgaaccacacccaggacgccaagctccccagtcccctggggaacccagccctgcccctggtctccgccgtcagcaacagcagccagggcacgacggcagctgcggggcccgaggagaagttcgagagccgcctggaggactcctgtgtggagaagctgaagaccaggagcagcgacatgtcggacggcagtgactttgaggacgtcaacaccaccacggggaccgacctggacacgaccacggggacgggctcggacctggacagcgacgtggacagcgaccctgacaaggacaagggcaagggcaagtccgccgagggccagcccaagtttgggggcggcttggcgcccccgggggccccgaacagcgtggccgaggtgcctgtcttctattcccagcactcattcttcccgccacccgacgagcagctgctgactgcaacgggcgccgccggggactccatcaaggccatcgcatccattgccgagaagtactttggccccggcttcatggggatgcaggagaagaagctgggctcgctcccctaccactcggcgttccccttccagttcctgcccaacttcccccactccctttaccccttcacggaccgagccctcgcccacaacttgctggtcaaggccgagccaaagtcaccccgggacgccctcaaggtgggcggccccagtgccgagtgcccctttgatctcaccaccaagcccaaagacgtgaagcccatcctgcccatgcccaagggcccctcggcccccgcatccggcgaggagcagccgctggacctgagcatcggcagccgggcccgtgccagccaaaacggcggcgggcgggagccccgcaagaaccacgtctatggggaacgcaagctgggcgccggc

SEQ ID NO: 23730 - DNA, 268 bp, Homo sapiens
  chr1:3408504-3408772
  hypo
cggcacacacgcctgtgccccctgccgcacatgcatgcactattgcgcagacgcactggctacattcacacactgatgcacacgtaacacacaggcactggcacgcacaggtgcctgctgcctgtgcaggactgcgtgcgtggactggcacgcacaggtgcctgctgcccgtgcaggactgcgtgcgtggactggcacacactgggtgccacacacatgtactggcacacatgcacacacaccctgctgtacgcactgttgcacgtgc

SEQ ID NO: 23731 - DNA, 168 bp, Homo sapiens
  chr1:35664718-35664886
  hypo
cgtgagccaccggcgctagctattcttaagatttatcaagttactttacctgtatgttttgcctcagggcatttgcacttgctctttactcagcctgcagtgttctccccactcgccccgccccggctctttgcacagatatcttttcttaatctttttttttccttc

SEQ ID NO: 23732 - DNA, 863 bp, Homo sapiens; identical to SEQ ID NO: 22998
  chr1:36042841-36043704
  hyper

SEQ ID NO: 23733 - DNA, 695 bp, Homo sapiens
  chr1:3606857-3607552
  hypo
cggaccaccgagttccccgcgcagggggcaggtgcgccccacctgggtgccaagggaggcgacaccatctctcccccttggggtggcccagccttgcctaccatgatctccagggccggggctcagccctcatgcctgggaacagaggctgctttacggggtgagggcctggggccccccgagccttccccaggcaggcagcatctcggaaggagccctggtgggtttaattatggagccggcgctgaccggcgtccccgccctccccacgcagcctccttggtgcggtccaacacatcaccgggcaagctgaggcctgccccggacttggatgaatactcatgaggaataaaggggtgggccgcgggttttgttgttggattcagccagttgacagaactaagggagatgggaaaagcgaaaatgccaacaaacggcccgcatgttccccagcatcctcggctcctgcctcactagctgcggagcctctcccgctcggtccacgctgccgggcggccacgaccgtgacccttcccctcgggccgcccagatccatgcctcgtcccacgggacaccagttccctggcgtgtgcagaccccccggcgcctaccatgctgtacgtcggtgaccccgcacggcacctcgccacggtaggtgtgacgcgccattcataggatctcttcggggactttgc

SEQ ID NO: 23734 - DNA, 190 bp, Homo sapiens
  chr1:3659512-3659702
  hypo
cgagggaagctactggcgagaagcattggagggttctgggtcacagggaaccacgtgacatggacacagatgccacaacgctgtgcattcccccaaaaacgcagatgcccacctgctctctttagggaagccggagaggccgccgggaacaggcagtgacggcggtgatccagtggatcctccccagggc

SEQ ID NO: 23735 - DNA, 746 bp, Homo sapiens
  chr1:3663338-3664084
  binary
cgacccccgaccgagggacccgtgggatctgcgctcaccgccctgcgagcagaggcgttcgtgtcggagcccccacacctggggagcggggagctgcggtccctggttgtcccacaggagaagggggagggaacggggcaggcggggaggatgagcgcttccgcgtgcagcgggggctggagtgggtccgtccgagctggagtggtctccgaggggcggcggatgctcggagggggcggatcccttagggctgggggccaggacgatcccacccggagaagcctcgcgggcgagaagagggtcccttcctgcgggggcagatggaggcgcgggagccttccccgggaggtgaccgaggccagtcagcggccccggggacccaaggccggggactctcggcggccggtggacgggcagggccggcccgcctgggcaggcggcggggtgaaggtgtccagggcctgaggcggcaaagtgccgccgccgtcagccccgactgccacccaccaggcacccggcccatccccggctcccatctagggatccacacccgggcgccgcggcgccgcggtttaaagcctgtgagatcccgcaacaacccggatccggaagcgcggggtcgcggctgggcgagggcaggggtggggccttcggtgcagacccagggccaagtcgagggaggctccgggcgcggggcggggtcttgggcgtgggggcggagcctgcgcggggcgtagagatctgac

SEQ ID NO: 23736 - DNA, 130 bp, Homo sapiens; identical to SEQ ID NO: 6717
  chr1:40771005-40771135
  hypo

SEQ ID NO: 23737 - DNA, 334 bp, Homo sapiens; identical to SEQ ID NO: 6718
  chr1:41281568-41281902
  hypo

SEQ ID NO: 23738 - DNA, 462 bp, Homo sapiens; identical to SEQ ID NO: 6719
  chr1:41832027-41832489
  binary

SEQ ID NO: 23739 - DNA, 1458 bp, Homo sapiens
  chr1:41847296-41848754
  hyper
cggcacaacctgtcgctgcacacccgtttcatccgcgtgcagaacgagggcaccggcaagagttcgtggtggatgctgaaccccgagggcggaaagacagggaagaccccgcggcgcagggccgtgtccatggacaacggggccaagttcctgcgcatcaagggcaaggcgagcaagaagaagcagctgcaggcgcccgagcgaagcccggacgacagctccccgagtgcgcccgccccggggccggtgcctgccgcagccaagtgggccgccagccccgcctcgcacgccagcgacgactacgaggcttgggccgacttccgcggcggcgggagacccctgctcggggaggcggccgagctggaggacgacgaggccctggaggccctggcgccatcatcgccgctcatgtacccaagccccgccagcgcgctgtcgccggcgctgggctcgcgctgtccgggtgagctgccccgcctggccgagctgggaggcccgctgggcctgcacggcggcggcggcgcggggctgcccgagggcctgctggacggcgcgcaggacgcgtacgggccgcgggcccgcgcccaggcccggcccggtgctgggtgcgccgggggagctggcgctggcgggcgcagccgccgcctaccccggcaaaggggcggccccgtacgcgccgcccgcgccctcgcgcagtgccttagcccaccccatcagccttatgacgctgcccggcgaggcgggcgccgcgggcctggcaccgccgggccacgccgccgccttcgggggcccgcccggcggcctcctgctggacgctctgccggggccctacgctgccgccgccgccgggccgctgggcgccgcgcccgaccgcttcccggccgacctggacctcgacatgttcagcgggagcctcgagtgcgacgtggagtccatcatcctcaacgacttcatggacagcgacgaaatggacttcaacttcgattcggccctgcctccgccgccgccgggcctggccggggccccgccccccaaccagagctgggtgccgggctgagggccgcctcccgcctccgggcgccccgtcccgtccccagggggcctctgtcttcccatcctgattcccgggtccctgcccccgactctagctccccaggaggcggccccagcccagctagggacccctctcggaggccggccgccggggaaggggagggaggggccggggcaccccactgctcctgcccacactcctgagatccacccccttctcctgggcaggaagcctgggagaggaggctgaattccaggctggctgggagtagggaggagcggggtgggccgcctggtgtggacggtggtcggggaagccaactaggagatgggccagggagcgtttacaaatcttcagtttcatttgcggaggcctagccgtgaccccgcgcccaccccaaacac

SEQ ID NO: 23740 - DNA, 166 bp, Homo sapiens
  chr1:41991605-41991771
  hypo
cggcacgtggaggaggcgtggcttctcaacctgtggggcgcaccttccaacgccagccagagttgccctcacatactcacgccgcaccacctgcccctgcctggttccagcacagaggggcaggaggtggctgggaggaggtgagcaagggacagcgtgtcggggc

SEQ ID NO: 23741 - DNA, 169 bp, Homo sapiens
  chr1:42633144-42633313
  hypo
cgtgtgtgtatacactgaggtgcgtgtgtgctgaagtgtgtgtatacactgaggtgtgcgtgagtgctgacgtgtgtgtatacactgaggtgtgtgtgagtgctgacgtgtgtgtgtgcactgacgtgtgtgtgtgctgacgtgtgtgtatacactgaggtgtgtgtgc

SEQ ID NO: 23742 - DNA, 187 bp, Homo sapiens; identical to SEQ ID NO: 23440
  chr1:44351032-44351219
  hypo

SEQ ID NO: 23743 - DNA, 993 bp, Homo sapiens
  chr1:47696310-47697303
  hyper
cggctgtagcggaaaaaaacccgctgctttgttctcccgccaaaggagccaaaagggacaaactgctgcgctctgggatgattattttaattaaaatagatgttaatgatgacgattgtgatggtgatggcattagcaattacaataattgacaaaacaaaattctttcaacccgagctagggccccactaacccggtccctcccagagcccggattcggcctcggtctcggatgcgacgggtatcagacccaagcggcaacgtcgctcacccgaagagggggcgggaaaatcttcccaggaggtgatcccgaatgtccccacccgaggctcgaggcctggtgaatgtgcccattgtcctttcggggcctctcccttggagcccggcggccgcacccacgaaactgaccagaaatggatgaagccggagtgcagcgggaaccgaagcccgcagctaccggctcgaaggcgccggcctcggcgagcgctgctcagcttcaagcctggaggagcctcccactcaccaacgaacccctcaaacacctaggcacaggcgggcctccgggcagagcagccgccgaccgggcgctgtccgcccacccaagccaacaactggctcccgaatacatcataatttggaataaaatgtgaaatcccgctccccgcccccatgccgccgcccccaccagcgcctcgatctctcgctcgccctccccccactcccgcccccagcgatttgcaaacgcacctctaaaggacacaggcacacaggcatacaactcagtgcggacaggaccacacagggtccagccccacagaagggcagcaaacaaacaccacctagcactgccccagaagccgacttggtcagccccgcacactgcccaacaggacacaacgaaatcagtcaaacgcagcggctcacggacacacaatccagcacagtcgggatcacacacgcccgacataacgacgacaccacccaaacacagtc

SEQ ID NO: 23744 - DNA, 911 bp, Homo sapiens; identical to SEQ ID NO: 23001
  chr1:50885965-50886876
  hyper

SEQ ID NO: 23745 - DNA, 108 bp, Homo sapiens; identical to SEQ ID NO: 6724
  chr1:52659468-52659576
  hypo

SEQ ID NO: 23746 - DNA, 238 bp, Homo sapiens; identical to SEQ ID NO: 6725
  chr1:54408693-54408931
  hypo

SEQ ID NO: 23747 - DNA, 938 bp, Homo sapiens
  chr1:63785002-63785940
  hyper
cgcttgttgagactcaaagagtcactcaaactcataattgcgtgtgtgtgtctactcattctccctctatctctccaataaccctttgagactcagaaactttttatccacatacaccctttatcacattttcttccccccactacatgtgtctcactttctctctgtatctgtctcgcttcttccgtctctgtcctacagcttggcggtaactgacgacctgtgagcttttagctgcaaactgcaactacgcggcaaacaatttatttagcccgacatctagccggtctccggcaggaccctgcaccgcgtcgggatcggacccttccgctggggcggcctcctgcgtcaaggccagcaggaaccttcctgtcgccctccccggccgccgcttcgcctccttcccgcccccggaggttgtgcaggcgctatggtccgcctggagggagaaagccggcggccggttcctgagccgagagcggccgcggaaaaatcctctgcctccgctggaaatcgatattaggccggcgcgggcgcgggacgtcggggccgcagccagtaggttgtgcacgtctcatcatttagctaatcgagtcgaaaagtttctgtaagggccggacccagcatcagatggtaacactgattgaacaagagattagcacaatagatctctaaccgaggggaagcgttgcttttcacgctacgcgccgtaattaatggtatgaatcaattaatttgacttttattgtgtcgaaggaaaaaagcgcaacaaatggaaccggcagctgggagttgttcgtcctccacccccttccccagggaggttccaaggagacaccggggaatggacggatcaggctgggccgtggcagagggagggtaggaggcagcgaccagcagcgtggagggagtccagagagctagcctctgcggacggc

SEQ ID NO: 23748 - DNA, 116 bp, Homo sapiens; identical to SEQ ID NO: 6726
  chr1:6623403-6623519
  hypo

SEQ ID NO: 23749 - DNA, 155 bp, Homo sapiens; identical to SEQ ID NO: 6727
  chr1:7842602-7842757
  hypo

SEQ ID NO: 23750 - DNA, 207 bp, Homo sapiens
  chr1:86860814-86861021
  hypo
cgcgcccggcccggtttgtttctttaaccttaactcagttgcacttaaaactccaagaacctcattcattcaaaaacacttgaaaccgtactatgcgttgcgtgatgaggaaactgtcttcgaaatagattttatccccaacagcagccccagtatggttattctcagtaaacaacaagcaccaccactcactaaccacctacattc

SEQ ID NO: 23751 - DNA, 89 bp, Homo sapiens; identical to SEQ ID NO: 6728
  chr1:9725455-9725544
  hypo

SEQ ID NO: 23752 - DNA, 1261 bp, Homo sapiens
  chr10:102899421-102900682
  hyper
cgcgccttcttctcggggtgcgatttctctcctcttttggactcaagatcaatgcttcccggccggcgcagatcacacagcaggaccccaggggagactgtggccttcttcccgcctcccaattccccaagaccgcctctagaggctgctgtgtccggagaactccgagcattttctggacacagattgcctaacagaggaacaggggttaggtggggagcggctggccggcccaaacacagcagccccaagctggctcccaagcctgggctctccacccccgctcccatcctctcttgagcacagttaggcccaacacccctgtcccccaaaacacctcctaccctccctcccccccagcccccatcttcaggaacatcacagggctcacactcactaaccgcggagagcacatgcaggccggagccctcagcccggcagctctcggaccctgcccagctcgacgcggactcatgcagaagaggacattccgcaggtaggtacaatcccagcgctggggcctggggcgtccggggggcggcctttgagcttcccggataccgctcgcctgctcccggagctgttcggccgccggctgcccgggtcgtgcactttcagtagggccccgctgactctcctgcccttgggctaggcctcccggggatgccagactcctggggacgctgggacccgcggcgcggcgggacacgcaggactcccgcctctccgcccggaattcgttgagacggaatctcagcggatcccgcgtccgccgagcgccgcggccagggagaaaggccggtgtggcggctggacccgcaaactccgtcccaagtggggcggaggctggaggggaggggggctgcgagggtcacagtcaaggccaactactcacaacagaaagctcgaaactctccctctacctcccctgccggaaatgacccgtctctgttcaaaaatagaaaaagaacgatcggaataattgttcgcagaggtgccgggagagaaggggaattaacaaacctgcctgcgcggagaggtctgcttccttctttggcttcagaaccgacggcaatcaccaaattcctgcggccagcgagccctgcccctcagatctggccctctggttgagtgggtggcggcctgaggggccccaggaacccaggcagggatggggtcctagaggccctgtgcagtgcggtgggtggcacacagagaatctggctcaacctgttaactataatagcggctttgtgtggcc

SEQ ID NO: 23753 - DNA, 601 bp, Homo sapiens; identical to SEQ ID NO: 23018
  chr10:102998293-102998894
  hyper

SEQ ID NO: 23754 - DNA, 70 bp, Homo sapiens
  chr10:103599547-103599617
  hyper
cgcgctgcctgccccagcgggctccggcacctgcgggggcatcggttcatggtttggcggcgagctcggc

SEQ ID NO: 23755 - DNA, 322 bp, Homo sapiens
  chr10:116045880-116046202
  hypo
cggtgcctgtgggggagtaccaggatgtgcctgacctggtctggagcctcgatggcattcccttccgtggtggccccaccctgacgggcagtgccttgcggcaggcggcagagcgtggcttcgggagcgccaccaggacaggccaggaccggccacgtagagtggtggttttgctcactgagtcacactccgaggatgaggttgcgggcccagcgcgtcacgcaagggcgcgagagctgctcctgctgggtgtaggcagtgaggccgtgcgggcagagctggaggagatcacaggcagcccaaagcatgtgatggtctactc

SEQ ID NO: 23756 - DNA, 975 bp, Homo sapiens
  chr10:118891213-118892188
  hyper
cggccctcctcgcttcccaagatttgtttgcaacgtctacacccgtcaccaccgcataagcaccagggtgaggaggtctctttgcaggaattaatatcgatttcagtctcctgctccttcaaagtttctctttgacgatggcgagacttatattctaagtcagaagaaaataaaaccttgcctattctgggcccatgattgcacaaaatccaaaatgctgccggcatgaagatgcagctggaagactctagaaacctagcattaggaggcagagactttatagtgcccagagatgagttcctaaataaactaagaattacgcagtgggaaattaaggaggagggtctgaggggccgacctcagagggacagatagagaaatcgagagcgaaacactcaaggaagtggaacaaatcgtcgtagccaggcgtctctgcctctccggaaacccgaaatccgcccaaacctcatcccaggcgctcacggtaccagtcgcagggccccgcactataggggctgccaccctctgcccccggagtccccacgccgagactcatcatttgctggctctttcttccttttcttcttttgtttttttatccttcaaatataagacaaaaatacacctcatttatcatcatagatatatatatttcactctcaccacataaatacaaaacatccaaatatccaaaacattcagaacaaagttagtagcctggattcagtgacacctacccgcgtttgaatcgttcattattttcttcactatttgcctagaaaaaaaaaaaagatgaaaaagagggggagagtttccgacgtaaataatttacaataaaattactattttaaaaaagtgtttttcgcttgcttcagatggatgaatacattctagacactgcggcacctcgcagtctgggtctgtgattttggttaaaatgtgggtggccgtggctgtagggacgatcgccgctgc

SEQ ID NO: 23757 - DNA, 149 bp, Homo sapiens
  chr10:121249858-121250007
  hypo
cgtcgatcacgactcgaacgcggggtaacatcgtgtgcatgtgtgtgcgggggactggggggacagtgaaagagtcccaggcaaggatccaggagtcagacccggccgggatctgctacccttccctgcgcaccttaggcagaccacac

SEQ ID NO: 23758 - DNA, 1193 bp, Homo sapiens; identical to SEQ ID NO: 6732
  chr10:126106668-126107861
  binary

SEQ ID NO: 23759 - DNA, 929 bp, Homo sapiens
  chr10:129534419-129535348
  hyper
cgcacaggtgcccgactcggagtccgggaggcgggccctctttccaggtacccagcccagcgtcagcctgggtccatcctccgccaccccacagcgcggggagcaggggaggccgaaagccgggcagcttggggggccgggataacccgggctgcagcaaccccgggcggcagcaggactggagagctggtgtcggacgcactgcagagacgtccctgttttcggcgcgtcctccgacacccagcagagagcttggcgctctccgctctgcgcgcccgaggtcacagcgcggagaaacctggcggggccccggactccccggcttgggaaaagcgatgactgccctgaactgctggggcgttcgaaatttccagggtcccgaccctccgtggggtacgcgcgacttcggcgcagatgtcagtccgctgccttccgggttgagggagcgaggactccagacgaccccagggccgctgtccaggcccagccccgcgttctccacctcgccacctcgctctgcggctccagcctggagatctacggacttcattgcgatctcttgcgcagtgtagtcgccctctatccctagccccgagtcccgggtaacccaggggccccggcgaggcgagtttctttggggcgagatgtcccgagccgagcaaaggggccgcgcattggacggggctcccaagccacagccctgggggccttgaggagtcgtggtacggtccagggcagtcggggctgcggggcccgtgaagccagacgaggctacggacttagggtccctgcaaccaagaccgcgagcgactgtggactcgggacggatcgcacaaaggaggaagggggaatcagaggggcgtccggtccaggacgtgtcaggcctgggcggggcggaaaactgacaccagggcgaggacaaggatttc

SEQ ID NO: 23760 - DNA, 527 bp, Homo sapiens
  chr10:133951484-133952011
  hypo
cgctgtggtgtggggacaagccagcccagacaccgtcttccctgtcatccaaatgatggcacacgggcagtaaaccgtggactgaaaccggtggagctgctctaccacttacacaacctcttcaactggcttccgcaggagcgggacaagctgttaagattccggaagcaaagaaagaaaatggcaaaacttcccaaggtaaggaacagcacaccggcacgtgcggagagtacgccgggtgtgtgcggagaggaccacgcccgcgtgtgtggagagcgctggtgtgtgcggagaggggtgcgccggtgtacgtggagggcgctgggtgtgtgtgccgaggaccgcgcccacgtgtgtggagagtatgccgggtgcgtgtggagaggaccgcgcccgcgtgtgtggagagtacgccgggtgtgtgcggagaggggtgcgccggtgtatgtggagggcgctgggtgtgtgtgccgaggaccgcgcccgcgtgtgtggagagcgctggtgtgtgtggagagcgtgctggc

SEQ ID NO: 23761 - DNA, 163 bp, Homo sapiens
  chr10:13405100-13405263
  hypo
cgaagcaagtctccgtctcaaaaaacaaaaaacaaaaagatctcacaccactgcgcggtggcagaacggaggcaggagacaggacttgaactcagtctagacagcaacgcaagggggcatctatgcgattgaccatggccggaagcacacctccatgcgatgc

SEQ ID NO: 23762 - DNA, 1457 bp, Homo sapiens
  chr10:134732799-134734256
  hypo
cgtgagggcgggtacgaacctcgccgcagcctcaacttcttcaccttgacgttgtcatacaggaggcagaagcggctcgccgtccgacagacgtcccacacgccttgtttccgggccactttggccagctctgcccaaatctgtatcctgctcaccgagaacccaaacgagtgaaaggtgagtagacaagtgtggttgctgaagttagaaaacacctgggctggctgcctgagaaaaggccactgtggctctgcagtttcaaggtggcaaggagcccggcactcgcgctgggtacggcctggcgggtgcatgtcccagggtcgggcgcagctctccgctctccctgccagccagctgtgcgcggcacctcccttccctgtggtgagaagaaaggccacacaatccactccccgggggagtgcacgggacaggcctcccggggatggtaccgaccgcagggtcggtaccaaaaatcagcctgctctggtcacaggcgctgcgtgtcctccgagtgacagcagtgacaggcgggacagggcagccgcacacctcataggccgtggctgtcatcacaggctggggggtcccgtctgtggcgggactcccaggcagggacctcgtcccaccatcctggagcaggtggcctggcgagtccccagacggccacatgcagggtcagctcagccgccacagacactggccctcgggctgagcgacccccgggctgagctgtgcgtggcgctctggccttttcctcactcacctctccttgtcgttttcgttgcccaggcgccgcaggtgcccggcagctttgtccacgctgacggtgtggtgccacgccttcgcacagaggtaggtgaaccggcccctgttcttcccggtggagactgagggcggaaatgcaaaggcaggtgttgcagctgctggccaagggccggggacgtgcccatcagtaaccaatgccctgcgccggcgccggggtggccacccacaggtagcggctccaggggccctagatccccggctcccagaagccgagctcctcacagagctgcagagtggcattgcctgtgtctcctgccggcgatgaggccgagccagtgctcctctgagtgggggaggctccaggaactttggagcagagtctgccaagaccctcctgctgctctgctggctgcgctgtccagctgccctccaagcagaggcacccggcctcagactcccgagctcccacccagcccctgcgtagcaccccaagtcccagcaggtttatccgcatgacgccagatgttccgaatcaccgctccttttcctggcaaataatcacgagcacccggaactcagctccacaccctggggggcctcctgtgcatgggcgaccccgggggctgggcctcccctggctggtgtccaccctctcggccagcacaggggttcaccttcaggagccactcaac

SEQ ID NO: 23763 - DNA, 399 bp, Homo sapiens
  chr10:135035024-135035423
  hypo
cgtctcatctcatcgcctgccgttgtccacacacggtcaggtggaggctgcccaggccacggcggctccaccctcccccacggtagatggcctcacttggggagcaatgctcagcggaccaggtgcccatggatcctcagcctgataggtgaaggtccccttcttagatagccaccaatttaaaaacaataattataatatgccataaatgtatgcttatcgtaagagatcagaaaacccatgtcagcaaaagagaagttaaaaacttaaggtaggccagacgcggcggctcacgcctgtaaccctaggtaggccgggctgggtgcagccactcacgcctgtaaccctaggtgggcagggctgggtgcagccactcacgcctgtaaccctaggtaggcc

SEQ ID NO: 23764 - DNA, 95 bp, Homo sapiens
  chr10:14966103-14966198
  hypo
cgaagcagagaaagatgtttccacacaaggtactgagctgccgcaggctgtgtgctcacgctaacgggagtgcttgctctctctcactcgcgtgc

SEQ ID NO: 23765 - DNA, 2530 bp, Homo sapiens
  chr10:17270086-17272616
  binary
cggacgtcgagtttcctctttcacccagaattttcagatcttgtttaaaaagttgggtgtggtttcatggggggagggggaagagcgagaggagaccagagggacgggggcggggactctgcaagaaaaaccttcccggtgcaatcgtgatctgggaggcccacgtatggcgcctctccaaaggctgcagaagtttcttgctaacaaaaagtccgcacattcgagcaaagacaggctttagcgagttattaaaaacttaggggcgctcttgtcccccacagggcccgaccgcacacagcaaggcgatggcccagctgtaagttggtagcactgagaactagcagcgcgcgcggagcccgctgagacttgaatcaatctggtctaacggtttcccctaaaccgctaggagccctcaatcggcgggacagcagggcgcggtgagtcaccgccggtgactaagcgaccccacccctctccctcgggctttcctctgccaccgccgtctcgcaactcccgccgtccgaagctggactgagcccgttaggtccctcgacagaacctcccctccccccaacatctctccgccaaggcaagtcgatggacagaggcgcgggccggagcagcccccctttccaagcgggcggcgcgcgaggctgcggcgaggcctgagccctgcgttcctgcgctgtgcgcgcccccaccccgcgttccaatctcaggcgctctttgtttctttctccgcgacttcagatctgagggattccttactctttcctcttcccgctcctttgcccgcgggtctccccgcctgaccgcagccccgagaccgccgcgcacctcctcccacgcccctttggcgtggtgccaccggacccctctggttcagtcccaggcggacccccccctcaccgcgcgaccccgcctttttcagcaccccagggtgagcccagctcagactatcatccggaaagcccccaaaagtcccagcccagcgctgaagtaacgggaccatgcccagtcccaggccccggagcaggaaggctcgagggcgcccccaccccacccgcccaccctccccgcttctcgctaggtccctattggctggcgcgctccgcggctgggatggcagtgggaggggaccctctttcctaacggggttataaaaacagcgccctcggcggggtccagtcctctgccactctcgctccgaggtccccgcgccagagacgcagccgcgctcccaccacccacacccaccgcgccctcgttcgcctcttctccgggagccagtccgcgccaccgccgccgcccaggccatcgccaccctccgcagccatgtccaccaggtccgtgtcctcgtcctcctaccgcaggatgttcggcggcccgggcaccgcgagccggccgagctccagccggagctacgtgactacgtccacccgcacctacagcctgggcagcgcgctgcgccccagcaccagccgcagcctctacgcctcgtccccgggcggcgtgtatgccacgcgctcctctgccgtgcgcctgcggagcagcgtgcccggggtgcggctcctgcaggactcggtggacttctcgctggccgacgccatcaacaccgagttcaagaacacccgcaccaacgagaaggtggagctgcaggagctgaatgaccgcttcgccaactacatcgacaaggtgcgcttcctggagcagcagaataagatcctgctggccgagctcgagcagctcaagggccaaggcaagtcgcgcctgggggacctctacgaggaggagatgcgggagctgcgccggcaggtggaccagctaaccaacgacaaagcccgcgtcgaggtggagcgcgacaacctggccgaggacatcatgcgcctccgggagaagtaaggctgcgcccatgcaagtagctgggcctcgggagggggctggagggagaggggaacgcccccccggcccccgcgagagctgccacgcccttggggatgtggccggggggaggcctgccagggagacagcggagagcggggctgtggctgtggtggcgcagccccgcccagaacccagaccttgcagttcgcatttcctcctctgtccccacacattgcccaaggacgctccgtttcaagttacagatttcttaaaactaccactttgtgtgcagttgaaggcccttgggcacaatgagagccagtcctccaaactttcagaaagtttcctgccccttctggcaggctgccaatcaccgggcgggagaaggaaggaggggaaggcggtggagggagcgagacaaagggatggtccctcgggggcggggatggcggggctgtcctgtaggtctgtgcggccaccgtgattgcccctctgcgcggtgcccgaagtcccgctgaaacctgccgagggcagcaggtctgaaagctgcaggcgctagttgcgcggaggtggcgcagctgctctggaggcgcagagcgaatacgtggtgtttgggtgtggccgccccgcccctggcggtttcctc

SEQ ID NO: 23766 - DNA, 779 bp, Homo sapiens
  chr10:1779373-1780152
  hyper
cgcctccctcctgcacctgcacctgcctccttcccggcagccgccgccgccgctgctgcgaagcttgaggttgcaaacccgggagcggctcacttttcaggactgagcaggaaagcgcgctccgtctctctgtctctcgaattgttctctatgacttgctcccactgggctgggggcctcggctgggcgcctggagcgagctgctccctggtcagggagggcggggaagggcgcgcggcgtcctgagtgctccgagcttcccgcgggctctgcctcctgctctgggctcccagcgcagggaggctacttttgcgcctctgctagttgtttggcaccagccactttgaagccaatcacgcagggagcttgtctatttgctgcagcagcgtctaattagatccaatcacaactgctttctggctctgacatcagcagcagcaccagccgcaccgccgcctggccgcttgcaaactcagctcccgtttggacggtgaagctcccaggaccggcggctggagggaggctgctcccggggaacaaggacgcggcgcgggtgcgtctgggagagaccgggggagcctccaggagggaccctgcccgggaggacgaggcctcctgccgcagcctcgcggacagctcagctcgccctgctcagaaagacacagggacgggtttttccaaccaacagtttttaactagtcaattcattaccatgctccttgtgtcaagggggggaaatacctctttcagaaatgcagagaccgcacttcctcagaaac

SEQ ID NO: 23767 - DNA, 605 bp, Homo sapiens
  chr10:22517909-22518514
  hyper
cgcaaacggagatgtttacgctgacagggaacagacaaaagggcggccatgcttcaacaaaatgtaggagttttcagtttgcagcttgaacttgacactgttgaaatacatgcatttcggtggccccgttacatttcacgcgtcacgaagccgagcaagaccagcccgggccgccttccccgtgtacgcgcgggcctccggggacgcgcagagctggagcggcgggcgcgcgcggcaaacgggcccgcgcggcctctgcgcgtccccgctccagcaccctggcgaggcctagaccgccgtgaagaccccggggaaggagtggccgcgctcacctgcagccgggagaggacagcgggggagaggaggccgctctgcaccggccgaaagcgaagggctcgccggctggccgcgtagtgtaagggtcggtggtttctttgcttggtccctggaaatccaccccttcttatcccggaggcctgaactcgatttctgcaaaacttcccgcgaccagctcataaaaggagagcgcgtccctgggtgggctcgaaccaccaacctttcggttaacagccgaacgcgctaaccgattgcgccacagagacttc

SEQ ID NO: 23768 - DNA, 1953 bp, Homo sapiens
  chr10:22540645-22542598
  binary
cgccacagcaacgaatcactgcaaaagcaaggttctaacttaaaacaaaaagagaaagtattcgcttctgcggagaacccgagcctcctcctgggcgggcgacgctcggctgatgggaccgggccgcgcaagcctcggatgcagccgggtggggggcaccaggcgctaggcgaaggagcgcaggaccaaaggagatgcttggctcctaagataacacctttaaaaagaagaagaagaaagaaagaaaaacaaacaaacaaactcgatacttagcctcacgatccttgccaccccctccctgctccgccacccacacacaaaataaagtgagccgggcgggggagtgcgcgccctgaaagggaacaagaagcaaggcgcctgtgacacaaaatggagaaagaggaaccgggagtggaaaggaagaaggaaaaccgagtaaaggaggttattcataagaacaggaaaggggccgaggggtagagaacacccgaaggaaagcgcaggaggccctcgtgagagggcaagggggaaaagatcgacgaagtaagagcgaaaagaggaaaggaaagaaagactttctagatgcggagtctccattttcagcagcgccatattcgcttttcctctcgccgcttttggctgggttttgtgtgcggcggtggacaggcgccagcacatttctgcagcttcagcagctctgctcagacacctggggagggccgcagggcccgggcgggggacgcgcgctcttggcccaggcccgggcgcggccccctccccggcctggcggttcctgcgcagcgccagccccgcgctcctctaggctgcaaagggggcctccgactcgggcccggcccggaggggacacctcactcggggccccgcggcagcccccaggggacgcgggccctctagtttcgcccacggtgtggctgggcatgcgtgccaaggggatgcgtaaccgagaaccgaaaaagacgaacttaaccttcggggaggaggagagggcgcacgctgcgggtaccggggcttgggggcgctcctggaggtgacggggtcacctccacctgcgcggggccactctctgggagccggcgatcgatgcccgccgcggcgcctggcccaggcccccaggcctctcgcggctcccggaaaaacgtccgaggtcggggctcggccgggagccccaagcgggtcccctggcctcgggacgccagtccgggaggcggccggaactccggttttcgcggttctcagcgatattaggcgcggccagtgtctgaaagctcctcggggttacgtcctggggcgactggaggcggctcacgactcagaaagtcggggcttctcgccccggatccccaccgctggcgtctgtcgaatccccacctcggtcctcgggtagaggcgcaagcgcgccccaagaccattctcttcgcgcccacccccgttattcttcactttcacttgacatcgttcttcactcaaggttaggtcctcgctagtgccagagaagcccctgggtccccagtgccctcagccccgcagcgtagggagcagccggcccgggagataaggaggccacagccatggaggccccaggcccggagtccccgcgccgtcgggttttgagccgcgcggctggccaggaccgccggctccttctctgtcccggtcctccgctcgcagccccgcagaggtgacggtacctggaggctggaagcgacggtttcctcgggccggtggagggaaacatgtcagggtcacagcgaaggaaaccgagacccacaggggtccccgggcgtccgggacgcgtcgctggttttgctcctagaaggaaaggccttcccgcttttgttccaccggctcaccaggtcctcccttcctggccaactctaacctcagctttgtgcgtgtcacccggccccgggataatcggatcctcccagaccc

SEQ ID NO: 23769 - DNA, 1786 bp, Homo sapiens
  chr10:22624349-22626135
  hyper
cggcctaaaatgggcgacggcgggcgagtcctctttatcagtgcagcaggctgccggagccgccatttggtggcggatctcggtagttcagtagcacgttgtgctgaacgtcacaactggcttgtctacgtggcatcgtcatttcttaaccgcggttttacgaaatgcaaatttccccctggccttcctcctccgcggccgtcgacccccctcggcgctccgggtggacggctccggggcgcggctcgtccctcgggtggtgcagcccccgcggcccgagacccggggagggccgggggtactttctgcgaggcgccttccccgcggcttctgcccgcgccaaagcctggtggaatccagcgcagacctaaagcacgcttgacaccccgatttttcgagactaggacgactctctgagccagcagctttcctctccctctcggggagaatctcatttccttggggtggtgagggtgacgggcactgtcttttggccccgcgtgtccgttccccggtctcccgcctcacccctctgcgaggtgaggaggggaaacggcgagcttaggcctggcgggaaggagcctacccgacgagagggctccgcggggagggtcggttggaatcccgccctagcgcctcctgctctgcccggtccccaccggggacggggaatgccagtcatttctgttgagtgctagcagggccggtgtcaccacctcgggtggccgaggcttcgaggttttcatgaaaagcccccgaagcgtgaggcgcccgcccagtggagaacaaagggccgagggccgaaggcgaggcgaggcagcgcgcgcggctcccttggctcgacctagctgggagtcgggggcgcgggcagggctcactcccggcctagaaactggagcccgccacccccgccccgcaggcgaccgcagggatcccattcttggagcccgagctgccatgttgccttcgcggaggccgccagtcacttgacgcttccgagacagcgaagcccccaacctgagagcccttcggccgtctttgccgcacagctgcagtcaaggcccggagggactgcgggacgcgggcgggagcgagagccctgtgggctgccaagccggcgcggccgcgccgcggcagccgcttcccttgccaccttcgttccaggggctgcggggctgcgcgctcggcagaggctcggttgccagtagcaaccacacgacggcgatttgcagccagggccgccgccgcagccgctggtacctctgcctcctcctacacctcgggctcgagcatttgaaaccctgggggttgccttcggtgacatctcccgcccccacctccagtcctcagtctccaaaatcctcagctctgctcaaaagccagcgcccccggctgggccctgcccccaccgcagacaataggagcggctgggagcgcacagggcggcgcgcgccgcgagcagcgggcacctgagcccccaaatccgggcgcgtcgctgagtctcagccccaggtgccctcttcgcggagttgatcagcaattctttttcagtggccaattagaaagcttttcttgacatcagaaataagggtggtgccaaagaaagaagtcaaacgcccactccctttctaataacatcgacacaaagaagagctcatggttgcgtctgcgcttggtaacagtggctttcctctgggttagagccacaggcacaagcacccgctgctatctttcttcttcgcctaccatgaatattttgcatgaaatccagaatgtaaccatttgc

SEQ ID NO: 23770 - DNA, 773 bp, Homo sapiens; identical to SEQ ID NO: 22758
  chr10:22634000-22634773
  binary

SEQ ID NO: 23771 - DNA, 1368 bp, Homo sapiens
  chr10:22764575-22765943
  hyper
cgtaaataatactcgattaccatgccacctacatctttttgttaaaaatgcctttatgaaggctataatccttatcaaattaaaccctgcggatcccccttttaatacacagggagtcctcctcatttatgggcgtcggcgctaagcagctctggaaacgggcagacccagctgtgcagcgatgtccagtgtcgccgcatctgccccgcggggtgcagcatgagtcttcctttgtggcgtgcggctccatcggaacgcgcgttgcgacgacaaattccttttttcccccccgcagttaacagttctggggcagaggctggtggagaggtccagagcccactcagaccgagatgaagatgaggaaaagcatgagcaggaagaggctggcggctgcggcggccacagggaagagctcggtgcgcggcgcagcctcccgcgaccgcgactcctgggctgcgtcgaggagccgcgttgccataggaaccgtagcggcgccccagtgaaaccctgcgttcggacaggagaagctaaccgcggccgcccactcccacccgcgcttcctccccgcccccaccggccgtgcgcgaaaagcagagatccgagaaccgcgtgcggtacaaacggcaaaagcttcgcgcgcattttccgggagttgagcgcgcggccgcaggccgggaacctaccgctctcaggctcccagcccgggcgctacgaccctgtgggcgccgcctgtgcagcccctccttccagcccgctcgggcgcatcccccaggccgggccagcgacgcgggcaccgggagcccctcccgccggtccgggctttggcccacacccggggaccgcggagtgggaaaggaaccaaagcgcggcgcctggccgaccgcggacgaaattcgaggccggagggcgttttcttttttgcaaaattgccccaaagccagggccgcatgtacctactgtctcctttgccccacatgctccaagaaaataagacacattctaccccgagtcctaattattgggccatttccttaacgcgcggtctgtccccgtgggcagaaacatactgcgagatgcagtttgggtaattaacaaagagacgagacctaactgggcttccgaaatgctggatactgcggccgggtcgccccgcattcgggcatcgcgcggttcccggccttcgggacgttccggcccggccggactttgaccgctggcgtaattaggagaaacgcagaaggcggacgctccccaatttccccatcgagccttctcctcccgagtctgcgaagcccctggctcaggagacaccggctccgcgcctgggcctgcaaatccgcttccagcgagcgcaggccctgtcgctcc

SEQ ID NO: 23772 - DNA, 223 bp, Homo sapiens; identical to SEQ ID NO: 6743
  chr10:24863037-24863260
  hypo

SEQ ID NO: 23773 - DNA, 566 bp, Homo sapiens
  chr10:3329552-3330118
  hypo
cgaaacaccgtatctacagaaaaatcaaatcgatcaataaataaaatggatgttgtttttcagagcaagtttagatttgcagaaaaattgcagagcaggtacagagagttctgatgtccaaccttcctcctgtgcgttgttctggtttcacatgttcgtgttgtaattgagtgcgtgcacactcagtaaatgcgaaatggtttcatcacaaccgcaccgatgcagttcctaaaagaaacacacgacagccgattttgcttctcaaaatcgctgcattcagggtttccgccgtcaccctgctggcagtgaactagaggacccgtcccaccggagctggtccatggagaggtgccacagcctgtgagccacggcagagcggagaagcctgggacccctgtcacctctcagagcagcgcctcacatggcagaaggagctgctttccgaagagctaaaggttgccataaatatttataagagacctggcattgctgcgctggagggcagtgtgttatgataaaagtcacaaatggagctgaaaaaacagtggcttctacatgacagctac

SEQ ID NO: 23774 - DNA, 764 bp, Homo sapiens
  chr10:43892377-43893141
  hyper
cgggcttccggggccctgagggcgagagcgagggcgacggcaaggtggggtgggggctgctccccggcccgccaagctagcgctgcctaggcgggagctcggggacccgcgggccgagcgcggctgaagggagggaagggaagaggcgctcgtaggtctgcgtccgtctccgagcgaccggggcggcggaaagggacctggggggggcggccgggactggagtggcggggccggggcgcccgcgcggcggctcaccacgccagggactggcccgtcggccccgaggaggcgcggggtccggagtccgggaagcggaggcctcgtgatccaagaccggcagccggacgtgggtcacggggtgcagaggaggaagtgccattgccgggcccgccaagatgtcaccaatgggaaacgcgtgcctgcaggtgcggccccgtggcccgcgcgctgggcccaggcaggaagtgggggaaggagagagtcagggcggcgggaagacatttctccgagttctcccgaagggagccaggcgcgagcgcgacctggggaaagtccagagtgccagccacggggaagggcgggcagtgcagagtggaagagaagccagcaagttagacacagcccctctctgggaggccgcctctaaaatggaactagcggacgtaccttggtttgtacatttgaccatggacacacgtaaagattttgaaaaaaaatctttgaaaaaaaatttttttaacgcaattcctaaacttttaactaac

SEQ ID NO: 23775 - DNA, 70 bp, Homo sapiens; identical to SEQ ID NO: 23448
  chr10:5523206-5523276
  hypo

SEQ ID NO: 23776 - DNA, 424 bp, Homo sapiens; identical to SEQ ID NO: 23449
  chr10:5538706-5539130
  hypo

SEQ ID NO: 23777 - DNA, 552 bp, Homo sapiens
  chr10:5874790-5875342
  hypo
cgtgctgacctgccagtacaagcaggccttgaggtcagtaaaaggtaacattacagacatcaaaagcaaattaaaaacccacagcctcagagaataactcctgatgccagctccttctcatggcaccccctgccccatcccaccagtgtcaggtcacaaagccccacactgcgccgggtggggatttaagattcccgctcccccacccctgccaccctgtagaacaaggcgctgccactcaagccagttccctgagaaccagtcggaccaggacaggcccctgaccacacccggcaaactggagtcctggccaaaggtgctgtgagtccatgaggtgctggcagggaggtgctcagaggagggtgcgcagaggcggagggagccaggatggaggctgcagggagcaggggcaggcaggcacggcagggaccacgagctcctgggatgcagacaagacttgcgggggtgcacggagacagagcaatttccccagtactttgttgccacgtttttgtgctgatggcatcagatgaaagagaaaaggggccgggc

SEQ ID NO: 23778 - DNA, 130 bp, Homo sapiens; identical to SEQ ID NO: 6750
  chr10:6023448-6023578
  hypo

SEQ ID NO: 23779 - DNA, 398 bp, Homo sapiens; identical to SEQ ID NO: 6751
  chr10:70184294-70184692
  hypo

SEQ ID NO: 23780 - DNA, 122 bp, Homo sapiens
  chr10:72784980-72785102
  hypo
cgaactgcatgcagcaacttgtatgaatcgcaaaggcttatgctgagcagaagccactatcacaaggttaccttctgcatgattttatctatactaccttctcgaaaagccgagagtatagc

SEQ ID NO: 23781 - DNA, 172 bp, Homo sapiens
  chr10:74451119-74451291
  hypo
cgtgagccaccgcgcccggccttacatgattttttattacgttattaatgtgttctgtttctgtaaatgcacacaaagtcaaatatgataaaatagtgctgtttctggagagtgtgagaatatccgtataaaggtgctgtaaaaatgaattgggtatttgagatgtatacac

SEQ ID NO: 23782 - DNA, 988 bp, Homo sapiens
  chr10:7450674-7451662
  binary
cgcattccggtggctctcacccgagctcgcgtttgctggctttccctctggctcctctgcctgaccccgattttgtctccgaactccactcccagatcctccccgccctggaacgccgacctttcccccgcacttcgccgcccactcacatcccccggcgactgcccggcctccatgcccgccaagacaagaagatgcccctctccgatgcgccgagagggttcctaagccgagcaagggacaatttcttccccaaacgctgtccccatcccccaccttccctagagcgcgaaacccaaaagtaaggaaggcaacccctcgcctcgaccctacgtgcttgtctcccagagccgcgcgctcccgcccttctgccccaccccaccaccaccaccaccactttggtcttctccaagcttcggtcccggtcccccacctcccaccccagagcggcgtggaggaaagcaggagcccactattaagtgcagcgcgccccctgcacacacgaaatccggctggcgtctgcagcccgattgcacccaatacccgggacagttagtccttttaataagcacctcctcgccccacctactcggggatctacccgcgcaggatccagcacacacaaggcgagagctagctcgtctcctagaaagacaaaataaatcactccctctgccctcatgtactttacaccacgtgtccgcagtttgtcacgtcaaatcatggcagggtctggttccaagacgcacacacacattcggggtggttctctttgacacacacacccaaaaaaactgcgcacacgcaggcctgcacactaatccacaggcacacacgacagttgcgtttcggtgccctggtccgggccaggggcacttctccatccctttcccccctagcaatggacttgacacacagactctaaccacggaaaaaaaaaaccggacagcccattccttctttttttccccacttaattcgctaaagc

SEQ ID NO: 23783 - DNA, 102 bp, Homo sapiens; identical to SEQ ID NO: 6754
  chr10:76287784-76287886
  hypo

SEQ ID NO: 23784 - DNA, 1793 bp, Homo sapiens
  chr10:79396547-79398340
  binary
cgaactcatctccccaacaggttcctaaagtatgggcggatgtgctccctctcgcccaccgccaggagccgagccccggcaggtgagcggtgcaaaacacgcacccagctgcccccagcttcctccgtccccgctgagttggctgtccccaccccgcaccacggcacccgagcctgtgagtccccgaccccggccccagccgcagccgccaacaaccctacaataaacaagaggacaggattgagcgtccgcgtcccggagcgcactggctgggggcaactcctcacccccggcgcgccgcccgctgccccgatccgagagcaccgggagagccgagggaagggaaggcggcgaggggaaggcaggcggggatggagggaggcacggcgcggcgcggagcgaggaggtgggctgcaggggacgccgagaagcggtggggctggcgcagagggcgggcgcccggggcgcgcgttaccttcgtcttgcccccgcagtggcagcacacggtccacaggtacttgagcgtccgccagagcaagatgatgaagaggcccccgaagaaagtcaccatggaggaggccaggaaagcccaccacatgcgttggccccggctgtcgcacggcacctccatggtcaccgggatgatgagcgcatccatcttgggctcgtggaccgaggacgaggaggaagaggaggaggaagaagaagaagaggaagaggaggaggaggaggaggaggacgcgtctaggctgagatggttcgcgtggatattgctactcattctaagactgctgcctccgccgccgccgccgccgccgctgctgccgccgccgccgccgccaccatttgccatagctagcaacgggcagccggcgcaggggctcgggggagctcctcccgccgccagcgccaccccaaacacccatcaacagccatattgctgctactgctgccgccgccgccgccgccgcggagcgcgggaggggggcggggaggcgcctgggctcggggcgctgtgcgcgacctggcggggtgcgccgagatatatacagcgagccgccgccgcccgcccgggggggagggggatggagtgcgcgggcagctccccctccccggcccgcgccccgctcgccccgggctgcgctggccccgagcgccgagagccagggggcgccgcgggccgcccgcgcccggggtctgcgccgcccccgggcccgccccggctccgcgcgcggtcccgggtgtcctcggcgccgcgccgcccgccgtgcgccacgggtgtgcgctgcgctcggccggtgacccccttccccgagcgcctcccgcgcggctaacgagccgctctccgcttattaggtggtaactcgttaataatggataatcggccccctccgcccgggcgcccctgcgccagccctcctcccccggctgcgctcggctccggctcgccgcgccagtgcgcgcccggccgcggcaggttcaccgcgtccggccgccggcccgtggccgcctgctagcccatgttctcgggaccccctagtcctgtcgccacgccgctgagcccctcggcctccgctcgctcttcctccttgccgcctccgactcctcctcgtccccgtcctcgccgcccaagcctcttcggcgcgcgccccgcgctccccgcagccgccagcagcagcagctgcagcaactggagcgggcgcggactcaggacgacccaggcgggaggggaggaggctcgccgcgctggctcgcctgggctccgggctgggcaggggtgggcagggcccctc

SEQ ID NO: 23785 - DNA, 352 bp, Homo sapiens
  chr10:8055498-8055850
  hypo
cgtttttctgtttcttgattctaaaacagtgatgacgctgatcatggcattaatgaagtgctgatctactatattttttagtttaatatgcctgtttattcggttaacagtataaagtaatcattctgatctggcctctttttgttttttttcccattccctccatttttgccgcttccgctttgcaaacatcagatccgagatgagtggggcaatcagatctggatctgccctgggtgtaacaagcctgacgatgggagtcccatgattgggtgtgacgactgcgatgactggtaccactggtgagtgcccagggcgccctgccggccacactcattaggcagcatcagcc

SEQ ID NO: 23786 - DNA, 735 bp, Homo sapiens
  chr10:8075813-8076548
  binary
cgccggcttcctttccctcccaactcccctgctctaggccactgcctctggggtggggcgccgagaaggaggccctggggacctacccccggctcttctgagccaagtgagttcccagctggcagccaacttcgtttctatggcggaactcagggttcccacgctcttggagtaggaccaggatgggatcgccctgggcacgtggtatcccctccgcctgcggggtcacgacagcctaggcgacggacagtcccgggcttagggagggaggctgatcccgggagctctcaggagtccttccacctgccacctaggagcccagttcgcatctctacagcgccacacatctaggccagcccagctccggtcccagtcggtctctgcggagccccagccagctccgcgtcttggtcctggcttgcgggtggcacacagacaagcgaccggggtggcccggagaggtcgtgcccctggctgcgagacgacgcgacagcagggcgctccgggggccgcagcggcgtcgaaggcggtccctgggggcggggctctggcacgagggggaccctcccgggtcaagttcacagaggcggaggggcctgggctgcgccccagagccccagggggtcctctgctcccataaaaaacaaagacgggggcggcggagggtgtggaaggaaagaaattgaaaagggagtgcgggcgactgagggaagctggaggggaaataggggcctc

SEQ ID NO: 23787 - DNA, 226 bp, Homo sapiens; identical to SEQ ID NO: 6759
  chr10:80855265-80855491
  hypo

SEQ ID NO: 23788 - DNA, 571 bp, Homo sapiens; identical to SEQ ID NO: 23452
  chr10:851108-851679
  hypo

SEQ ID NO: 23789 - DNA, 571 bp, Homo sapiens; identical to SEQ ID NO: 22764
  chr10:94448826-94449397
  binary

SEQ ID NO: 23790 - DNA, 577 bp, Homo sapiens
  chr10:98129733-98130310
  hypo
cgggactgaaagccgggcgtgtctgactccacaactcctgctgtgaatcatcacactctgccccggccccagcgtctccgggacttaccccagagccacagaagcggccgagcctgggcgctgagctgtcgtagccgtcgtaggcttccatgtagtcgtagccgcagtcggcctcctcctcaacctcaaaggtccggaatgtcagctccacgccgtagccgtcctctgccacgatcacccagtcacagcgggcctcgctcgggtagttgttgtccccaaactgggcgtgggaatagagctctttggtctgcacttcagccttcagcctgcccccgcactctggagcagagagaagtgagatgtcccctcagcacaagacaccctcgtgcctcccgcctgcgtctgctcggctttctctacagagcctggtgcgtgcctggcaggagaggccaggtagtctcgtcaccccatttgatggaggagtacacagaggcccctggctcccaggtcagggctccctcgggggtgcaaagtggccctcacaagccaaggtcccctgttcccagcttgagaatac

SEQ ID NO: 23791 - DNA, 82 bp, Homo sapiens; identical to SEQ ID NO: 6763
  chr10:98364552-98364634
  hypo

SEQ ID NO: 23792 - DNA, 768 bp, Homo sapiens
  chr11:111169516-111170284
  hyper
cgagttggccgctccggacgtccgcgtaccccaggcccccgcccgccctcccacgtatccactgttgtgtcctgagacacgcggtgcggaccctgcgcgcccagaagctgctacggggggagctagaggctcacagtgagcctgggacgggggcagagcgcaccgactgcactgagccgagctgtggcggtccctgcgcggaccccgaggggcgcccgctgcccgcggagtccggagccgatcggggaacggggtggtggggctgcggtaggctggagcgcggagagggcgcggcgcctgggccctgcgggcggggcacgggattccctgggtccgggctaggaagagcgcaatctcctttcctggggagaccctaactcctggaacccggcttgagggggatccctgctgtccagctgcggtccccgcagtgaccaggcgaggcgctggcatcctggcactatctccaggcgtccaggctgaacgcgcggtcaccctcggccgccgcacccagcgcacttcccggcgcgattcctggacgcacactgcagggtagtggtcagggccggagccgccccggactcctgcggccacctccaccttgaaagctcgcccggctcggcttggcctaacagccagtccccaacctactcactgcggcttttcggggcccggggctgaggctgcccctgctcccagcgctcaggggtccctcccagcgaacccctcttgagcgcgcccgccacctcccgcgagccggggcagtcc

SEQ ID NO: 23793 - DNA, 659 bp, Homo sapiens
  chr11:114112592-114113251
  hypo
cgccttttacataccacccgacacagttgcccactacccttgctgctgcgatgtatttgatcaatgtctatcctttagctttagcttccagagctcgggaacgacgtcgattttgcccatcactggggccacatactgggtgctcagtgttgcatagcctgggcccactctggatttgcccctgagcatggggatttggaggtgtgagtcccgacactggctctcactccagatgggtaaagaatgcaccttgtattcccacctttctgaggcaccccctctcctgtctcccacaggcactgacatggccgtcttctgtctgctgtgtgggaagcgcttccaggcgcagagcgcactgcagcagcacatggaggtccacgcgggcgtgcgcagctacatctgcagtgagtgcaaccgcaccttccccagccacacggctctcaaacgccacctgcgctcacatacaggtaggtcagtccagctgatgggtggatctgggtctctgggagccagcgtctatatttacctccaaggacgtaaagtggaggtggtgggctgagtcagccttcagtccttctgctcaaggcttggacgtgcagaggctgcccgtcgtgcaggtaaatgtggacagttctcccagtcccctcctgtggaccgtc

SEQ ID NO: 23794 - DNA, 59 bp, Homo sapiens; identical to SEQ ID NO: 6767
  chr11:117188555-117188614
  hypo

SEQ ID NO: 23795 - DNA, 685 bp, Homo sapiens
  chr11:120008024-120008709
  hypo
cggtctggcagaagagctccatcgtcttgccatgcacgggacacttgcgggcctcaaagtcccggatgggctcgagcagctggtggtctcggaaggcggcgccctccaggtggggcttgagatgcagctcgcagaaggaggcctggcacaccaggcaggacttgaccgccttctgcttgttgccgatgcaggagtcgcacagcacctcctcggagccggacttggaccgtgaaaaaaggcccgtgtcggcccgggggtagctgttccgccgggtctccccgggctccatgatggacaccgtgggcttccgggactccgagaaaatggacttgcgcagctcgcccttttcggcaaaggtaacgggtggcttcttggcagcccccagctggagccctgcgtacggcgacctcttgccttccatagagtccatgctgaagtagttggagttcttgtcgtccccggactcgacaaactggatgatgggtcgccgccactcattgcccgcgaacagggcgctcctaccttcccctggcttcagggcgctgcccaggctcttgccctcagctgcctccccgccgtgcccgttggtggtcttggcatccttgccgtcagccttggtgccattctccaggctgccactggggcccgacgggctccgggcatccctggcttctgggctcgaccc

SEQ ID NO: 23796 - DNA, 151 bp, Homo sapiens; identical to SEQ ID NO: 6769
  chr11:120338518-120338669
  hypo

SEQ ID NO: 23797 - DNA, 150 bp, Homo sapiens
  chr11:120384000-120384150
  hypo
cgggaaactgcgggcgtggtatctccggggagagaggccgcctgggttggtagtgggcatctgagagacaaatccggtcctgcctgactccctgactgtctgtgctcgcgtggtcaggggcgaggggcttgtcgaggtccactgtgttcc

SEQ ID NO: 23798 - DNA, 346 bp, Homo sapiens
  chr11:121023460-121023806
  hypo
cggcagacctcctggctcctgcctctccccgtgcctttcatctccctgagtaggtgagcaatggccatgagaaaaccctcctcggtgccttgtgatcgtgcgagtcttgacttgtctctcttgttccagctgtcacctgccctccaaacagccattacgagagctgcgtgagtgtctgccagccccgctgcgccgccatccgcctgaagagtgactgcagccactactgcgtggagggctgtcactgcgacgctggctacgtcctcaacggcaagagctgcatcctgccccacagctgcggctgctactccgatggcaaatattacgaggtatgggaggccagccc

SEQ ID NO: 23799 - DNA, 939 bp, Homo sapiens; identical to SEQ ID NO: 22768
  chr11:123228638-123229577
  binary

SEQ ID NO: 23800 - DNA, 1291 bp, Homo sapiens; identical to SEQ ID NO: 22769
  chr11:123300826-123302117
  binary

SEQ ID NO: 23801 - DNA, 172 bp, Homo sapiens; identical to SEQ ID NO: 6771
  chr11:124071504-124071676
  hypo

SEQ ID NO: 23802 - DNA, 1389 bp, Homo sapiens
  chr11:1262498-1263887
  hypo
cgaaaagaccaccctatgggtgaccccgagcatccggtcgacggcggccctcacctcgcagactgggtccagctcaggccccgtgacggtcaccccctcggccccaggtaccaccacctgccagccccggtgtcagtggacagagtggtttgatgaggactaccccaagtctgaacaacttggaggggacgttgagtcctacgataagatcagggccgctggagggcacttatgccagcagcctaaggacatagagtgccaggccgagagcttccccaactggaccctggcacaggtggggcagaaggtgcactgtgacgtccacttcggcctggtgtgcaggaactgggagcaggagggcgtcttcaagatgtgctacaactacaggatccgggtcctctgctgcagtgacgaccactgcaggggacgtgccacaaccccgccaccgaccacagagctggagacggccaccaccaccaccacccaggccctgttctcaacgccgcagcctacgagtagcccggggctgaccagggctcccccggccagcaccacagcagtccccaccctctcagaaggactgacatcccccagatacacaagcacccttggtacagccaccacgggaggccccacgacgcctgcaggctccacagaacccactgtcccaggggtggccacatccacccttccaacacgctcagcccttccagggacgacggggagcttgggcacatggcgcccctcacagccacccacgctggccccaacaacaatggcaacctccagagctcgcccgacaggcacagccagcaccgcttccaaagagccgctgaccacgagcctggcgccaacactcacgagcgagctgtccacctctcaggccgagaccagcacgcccaggacagagacgacaatgagccccttgactaacaccaccaccagccagggcacgacccgctgtcaaccgaagtgtgagtggacagagtggtttgacgtggacttcccaacctcaggggttgcaggcggggacatggaaacttttgaaaacatcagggctgctgggggcaagatgtgctgggcaccaaagagcatagagtgccgggcggagaactaccccgaggtaagcatcgaccaggtcgggcaggtgctgacctgcagcctggagacggggctgacctgcaagaacgaagaccagacaggcaggttcaacatgtgcttcaactacaacgtgcgtgtgctttgctgtgacgactacagccactgccccagtaccccagccaccagctccacggccacgccctcctcaactccggggacgacctggatcctcacaaagccgaccacaacagccactacgactgcgtccactggatccacggccacccc

SEQ ID NO: 23803 - DNA, 973 bp, Homo sapiens
  chr11:1275538-1276511
  hypo
cgtcctcactgtcaccatggtgcatgggaaggaggagggcctggtgagtccaggctgcgggtggcacagtgttggcccagtcccaaccgcacctgggcaggccgactgcaggccggggtgacccaggtgccgcagcgatggcccagtgcccaagacagctcccagggggcagggaaggcctgtggagccgcctaaggccgagcgcaccctgtggcctaaatgcagccagctggagactccaggcccccagggaagatctgggctttggggtgggggatacacaggggggtctctgcacatggaggcagagccccaaagagaagccctgctccccgagcccacctggcactgcctcccagctcagggttcccctggattcccccagatcctgtttgaccaaattccggtgagcagcggtttcagcaagaacggcgtgcttgtgtctgtgctggggaccaccaccatgcgtgtggacattcctgccctgggcgtgagcgtcaccttcaatggccaagtcttccaggcccggctgccctacagcctcttccacaacaacaccgagggccagtgcggtgagtgggcggcgggtcctgccccggccagggctgctgctgggcctgacaacccagtgagcataggggaagcctggggaggggaatgagtgggggaggggggtgggggctgtgaaaggctccccagattccagccccgcggtgacgcccccactcccaggcacctgcaccaacaaccagagggacgactgtctccagcgggacggaaccactgccgccagttgcaaggacatggccaagacgtggctggtccccgacagcagaaaggatggctgctgggccccgactggcacaccccccactgccagccccgcagccccggtgtctagcacacccacccccaccccatgcccaccacagccgctctgtgatctgatgctgagccagtgagtcctcccctc

SEQ ID NO: 23804 - DNA, 1617 bp, Homo sapiens
  chr11:128563902-128565519
  binary
cgattcgcaaagtgaagtcacttcccaaaattagctgaaaaaaaagtttcatccggttaactgtctctttcgctccgctacaacaacaaacgtgcacaggggagtgagggcagggcgctcgcagggggcacgcagggagggcccagggcgccagggaggccgcgccgggctaatccgaaggggctgcgaggtcaggctgtaaccgggtcaatgtgtggaatattggggggctcggctgcagacttggccaaatggacgggactattaaggtaagcggcggggcaacggacgcgggcggcggggaccggccggggaggcgaagcggcgggcgggtaggtgcggggcccgcgtcccggaagacgtggcctctctcccttccctccgcgccccggcttcgcgccggctcctccggcgctcgggtggcgagtcctactcgcgggccagccggccaggcgcccgcattgagggcgaccctcccccgaaatcccagcccccaaagtggagccccggcccccctcccacctcgctgcccgccggggctgcaggaggggacggcgggaaaccgggggaccccagggtacggaacggagtcaagggcgagagacctcggggtccaccactcccaccgacacccggggctcccgtggccccagcgctaggcactgggcttcctctccgcagaggcggaacacggcgggggcgggggctgcagtcgcccgggctcgggtccctgcctggtgggccctggggtgggtaagtggcctcgttgcacgagggtaggggtgcaagtgagtgtgtcgggggatctatctgagcgggctcctccagatggaagcccctgtttacatgtcagcgctttcccttcctctcggcactcagtcgcccggctctaggcgctggagagccgccggctccgcgggactcctgggccggcctcgccgcctctccggcggggaaccttccccagcccccgtccgcacagatccctagcgccccgagcccccgcccttcgcgcctaggcgtgcgccggctccaggaccagggctcctggagctgtcgcctccgaaagggtcctgcgtccttcggagccgcctccgttgcaggggccggctgtgagcccgcgccccgcgcccgcccggccattcccaccccagccgccgccgccaagcctgggtctaggttgcaaagtgcaacccaggcggaaaggtgagggtttgggttcgcgtctcacttcagaaaagttgactgctgtctctgaaagggttcgccaagtagggccaggagcagagaggagggacaccccctaacgtgacgggccttagaggacctaggggaatgaatgggaccaggggttagcttcgaggctgccgcgcaacaccaagcgggagtctgtctggaaaaactattaggctggcgaggtggggactggcagagcccgccattccccagaacccgaaagaatcgactccctgctcagggctcagcaagagaaggctaagatgttgggctcagagaattcaagagatttttatcttctgggtggggtcgtggtttttattttctaagttttttttatgaaagtttgaaatatgctgacttaggtaaaagacaccaacc

SEQ ID NO: 23805 - DNA, 842 bp, Homo sapiens; identical to SEQ ID NO: 22771
  chr11:133938756-133939598
  binary

SEQ ID NO: 23806 - DNA, 1463 bp, Homo sapiens
  chr11:31819792-31821255
  binary
cgtgatccctaaaaccaccaaatcgccggagaattggggctggatagagttgtctcttgttgttgtcagcccacgtcgtcgcgattttattcaccgccgcatggcgttgatcagatggaaaccatatttgtctccctctgagacctaacccccgccttatgcttttggagtatggactctttaaaacccaagaaaggcttcctgggctgggaaagggggctagggagggagggggaccctcttagcaccaaaaagtctgaggattccccgggaacgtgaagcgaagctcaccaccggtgcccgctacccccacgccggcaactctgtgcttcgtttggcccacgtgtcctccccacgcaactaggggcgacggtcctgtgcctgaggtgacaatcaccccccaaaaacctcacttgcgggtgggggggtggtgattgccagttgacccagaattttctagcaactaggcgcgttaaagtgaaaagcccctggactagctccacctccggccccaaccatcacaggcggaccctagctgatttgactctcacttcccgccctcagactgccggcgacgaaaatccgcccgaatcgggcgccacctctggtggaagctgctgtcctcggcttctgcccaactccaagaagcggaaggggggtgtatcctgcgccccaagctcatgggagcccacgcaccggggagagcccggagtggaggctctgggctcagccctcccaggcctaggccaccgtgccctgagtccctccccaagacttctcggactaagtgggccagactcttgtcaggggagggatcaccaggacctcagattgctgggggcggaggggtggacgctcgtgagtgcgaagttcgggtgtcacttgggtgtgtccagtgtctacaagtgggaatcctacggtttcaaaagtcaggcagggatggggttgcctacactcggtggggtcaatcgctagtctcaccagaggcgggagcgggcctgggggccctctgagctcgcggaggcggcgggttcggggcccgtgcgggcggggtcgcccaggggagcccgggccccgcgcgtcaggaggcctccgccggccgagcggccgcgctgggaaacaagaagcgagcgctttgctccctatcttcccagtgtccgtcctatattgttttctgctcttaaaactgacatgtctaattggcaattggtgccgaatcgtgtccagaggtctcttgtggaacatttctacagctgtctccttcaactagacgcttattcatgtcgccttaatgagaaacaaaacgttctctaatgagcaattacagagcgacaggattgttcccataacaaattcttgcgagtgacagaagcatcctttgtaccagatatttcgcatactgttaccgattttcccttccctcgcccgactccatggaggcgccgggcatccggagccggtcc

SEQ ID NO: 23807 - DNA, 1443 bp, Homo sapiens
  chr11:31825604-31827047
  hyper
cgccaggagcctgagcttcttagcaataaataagctccaaatatagaagaggggggaaaatatgatgagcctctctgacatttgtctttaaaataaaactagctgcacgtcaagtttgagcttaatttctggaaataggcggaagtcgctccggatcatgcatggaaggctaattgaaaagatcagtcggggcgcttgtggcagccttgtcactttgtgacagtgctccgctccgggaaattgcatcgtcacgacaaacgggaccgtgataaaacgaccctttccgtccttatttgtagatcactcagacgagattgaactgcacttgtttccccttcgaggggagccgcgttttcagggtagccgaaggcttggggctgagggggggccctcaccaaggcgcgggtgggggccggagcctcaactcgatgagaagtgacaggcgtttgggggatctgggctccggccgggaccagcgcaagcagggactttgcggggacaccgcttctccaacagagcaaggcctggcccacgtttccggtttctcctaacttccttttattgccttcctttgcttcgcaagttccatctacccctccagctacagagccccacctctaggcacaggaagcttcccggaaaaagaaaggctgtcccagaaagagaccgagagagactttccaaacttcgggcatagccacggcaattcccagtctgctaatgccaaggcgggcgcgtaaggccgcctaaatctagacctccctcctcactcatttcaaaaaataacaacgtgccagccacctccgcagataccgccggctggtgcttgcccaggagacgccagggccagagcgccactcccagcatcgaaatggcagagagaaagcgcagctccaaattccccttcagaggttaagcctcaatcattgtgtcccttccctagggactgctggcgctctcgcccactggcgatgattatgcgcctagaactcgaccgcgaagcaactaataggaaaacatatggtgtcaatttggatgctccgcgcctcgcgcacacccgggaacgagcggcacaaagccctgccggccggcccgcgaccccgcgcccctcggggcctgccagccgggccgcagcgacaaacgctcagggctgcgcgccctggctggggcccgcccgagagacagcctgcggctggggagtctgagctccaaggggagagcccagccgccgaaggcgagcctaccggccaagccctggggtccggcaggttctgcacaactactcccgcaaagctcgccacctttgtgccctttcctcagctacgcgcttaccagccccggaagcaccagggggcgaccggcgtttccaaaacagatggataaggtgctggggaccctccttaagcctgtgtggttcggccagggcaggctgctggaagaccc

SEQ ID NO: 23808 - DNA, 274 bp, Homo sapiens
  chr11:34535022-34535296
  hypo
cggcctgcggaggcaagcaggtctctctgaggcaagccgtcacatccgtgtcaaacagctcccggaggccctgggactgcacccagcgcaggtgccggccctggagctggagatggacgagcagacccaggccccaggccgagcctctgagccctgacaccccttacgattcatccaaaaaagcaaagaaaaggcgcttacgtgagggcagcggtggctaggtccaaagaggaggctttcaaggcaagagaaggcaggcgctcccagcaccagc

SEQ ID NO: 23809 - DNA, 1390 bp, Homo sapiens
  chr11:43602408-43603798
  binary
cgattttagtccgcaccaatgagctggcggcctcgtctgtatttatttagtgctctgggggagtttttctctttacgcagcgcctgtagtcacggctggaaccttggctgggggactctgagggataagaggggattcggggggaatccgaactgtacctgttcagagatccgcgaccttgcagccggggctggcggaactctgatagggagatagagggataggacaggcaggcggggaggctccgggtgctggggcgacaggaaaggggtggaggctgggctccgggatccgggtgcccctctgcggtccccttctcgccctccacacacttctctcggggctgagttgggggatcgcggacggtctggagaaatggagacacgagtccaggggcgcggaggggcgggcagcgcgcggagtggtgagactgagccgcgatggaacgcgctggggagacccagcctgttcggctccagggttcggagacatcctgggctgaaggcggcggcgaaccgaagaagccggcatattctgcccttcgcgaatctttttgcggtctgggcttgctgtacataactcaatagccggaagcccttaccccaaaaagcatttgcggagggcgcactcgtcgagaagacggcagccatccagcgatcgccgaagcccgcaccttcccgaagctgctccatccgagccttacccggccctttccccgttttccacggaagattcggccctttcccccgtcctttccgcggtgcccgaggctttggtcacctgtcttccctccgagcgagtcccccgcccccaactttttaacagactttgtatcacagggggaactggagcaggtggggtgtgtgtgttttcggagaagtgagaagaagctaaaatgcaataaaagtttacagaagttgtgtcttccccccaacccccgcccacaccacgaataaccccattcactcaatgcaaagaaaaggatctgagcttaaggccaagtcagaacctggaatatgaatcagtttaggacattttgtggtcatttttgaccgtaatgatccgattctgcaatatgggggtggggaagcccttgagggaggggctggaggcccttagtatcttatgtcctggtgcgggggacccggaggtgaggcgagccgcggtgaattgggtagatccgaaaaagagggaaaacacccaggcaccgcccgatccccggagtctcttcctcccgcgcctgcttccaacctaatttggggcgttttgcagcctcgggtctcccacatctcctctttttcaaaactaagtagcacggaagggggtaaaacaggcgagaactggggaagcccccgcagagaaggagctttggagagatgcggttgtgccc

SEQ ID NO: 23810 - DNA, 771 bp, Homo sapiens
  chr11:47208495-47209266
  hyper
cgtgccctaccgttccacagctgccctgctaatctggggcgccttctaaggcctgagacgaacacgcggtgggggtgggacaaaaaggcctaagctcctcccgctccgagttcttatttccagattttgtaccacgattcattcttacccttcgcccctccaccccctttatcagtctggtacatttttccatatcgccacgatgccaccccacgctaaataaatcccttctccctcctctctccctacttccctctccccgctttcccccgggggtgagattttgcagagcggctccgtctgttatttatatccactggagcggtccaagaatgttccgaagctgacctaatcgccacctgctcggcctctccgcccctcccactctctcctgggcccggtgacccagcggcggtgccctgagccttgaagaccagggggagcgcggaccaacggggtcgaacgcccgggcgcagaaggtcccggacgcagaaggtcccgggcgcgcagaatcgcagcgggtcggagagccccggcgctctcagaggagtgcgcccccagggacgcggctctgagccctgggaagctgaggcgcctggctgcgccctctgaagctcgtacttttcctcccaccctcagctccctgaagagtgtgagtgcgtgcgcgcggagttttaaacggcagctttaaaaatagcaaaattatgttgtttctaaatccaggaggaatcactgacgcgttctttacgcagatgaatccgctcacaaaac

SEQ ID NO: 23811 - DNA, 433 bp, Homo sapiens; identical to SEQ ID NO: 23455
  chr11:47358910-47359343
  hypo

SEQ ID NO: 23812 - DNA, 57 bp, Homo sapiens
  chr11:57500997-57501054
  hypo
cgattacaggcgtgagtcaccgcgcccagcctatagtgaggaatttacagatgaaac

SEQ ID NO: 23813 - DNA, 524 bp, Homo sapiens; identical to SEQ ID NO: 23039
  chr11:59333339-59333863
  hyper

SEQ ID NO: 23814 - DNA, 614 bp, Homo sapiens
  chr11:60718609-60719223
  hyper
cggcgacgcgggcatctctccgcagaaggagctgcggccgtcggggaaggcggtggcgggcagcaggcccgaggcggccaggtagagcagcaggctgagcgcgaccgcgcggtagcggcccaggtacacgtcggccagccagccgcccacgggcgccagcaggtaggaggcgcccaggaataccagcgcggcgcgcgtcgcctgctcgccggtccagttgaagttggtgctgttgaggtacagcacgaggttggcggtgacgccgaagaaggcggcgcgctccagcatctccaccagcagcacggccgcgcccgccgcccgccgccaccgtcgagggccccgcgcaccgcgaggcagcagcggctggcgctccccgggcacgcggggctgctcccgggcgcgcggcgcgggcatcctggctccgggctgggccccccgcggctcttctctcctctcctctccccgcctcagagccctgcactcctgcccccgggcctcggccctctcccccacccaactggctggccctcctttctcaccgctttggcccacccttccctcctgtcccctctccctttcttgccctacccttcctgtccctccgctcactaccc

SEQ ID NO: 23815 - DNA, 99 bp, Homo sapiens; identical to SEQ ID NO: 6781
  chr11:64310467-64310566
  hypo

SEQ ID NO: 23816 - DNA, 573 bp, Homo sapiens
  chr11:64739249-64739822
  binary
cggcggcggagggtggagcccggcccggaaacttccctcagaaataaacagaaacgcaaagacaacttcccgagggcccgggccgtcgtgtgccgttacctcagccccaggtggttcccaggctcggccaggctatgtctcacacactgactaggggtccttcggcctcagaaaagtggccccggacggaatacccactaagaagtgctctctgaaaaaggcgggcgccaacctcgaacgaagtcgttttgagggactggctcgccagctcctaagcaacttcggggctcgtgccgcgcacccaccaggccttctgcgcacgcgcaagtgcgcttcccaccgccccttcgggcgcagctccaaggcctggccgcggtctgcgcgtgcgcatttcattgtcgacaccgagaggacgccttggcgccttcaggtccctcctggatttaccagcccattgtttatttcgcgcctgctttagcgtggtgtcgtcgggaactagcgactgcagagtccttactgtgtgctaggcgttatgcagggtaccttcctttattcctcggcgatatgctctgc

SEQ ID NO: 23817 - DNA, 262 bp, Homo sapiens; identical to SEQ ID NO: 6782
  chr11:65582723-65582985
  binary

SEQ ID NO: 23818 - DNA, 329 bp, Homo sapiens; identical to SEQ ID NO: 6783
  chr11:67078663-67078992
  hypo

SEQ ID NO: 23819 - DNA, 744 bp, Homo sapiens
  chr11:68606653-68607397
  binary
cgatcaaagtgcagaagcagcccttggcccgcgcaggctccggtttccgcctcccgccgccgctgccaccgcccctgcgcctttagatttcgggcagcaagtttaattgctcgcttggaaagcgtcctcggaagggcaccgccagcaactgcggcttcgcgccccgccccttcccccaagccccgggcggcgtcacgtgacggctgagaaaagtaggggaaaggtcagcagcagccccgcccccaggctggcgcgtcccaggcgctcggatcctgttccacccgccgtgcccacagagaccttccggagcgagttggcgcgcgtccctgtggccaccccagcgacagcgggagaaatgcaacgcacctctccgtgggaaggtcgagccctgcggtgcccagctgtggggacagctcggtgctcagtgcttctgatgacagatgctgcatccaacgagccagaaacgcaggcaccgcgctcaagagcccagggcgcgtctaaaaggggctcactgtgaagcctcagtgaaaactgacggtgtttttatgaatgagcactcggggccagggttgggtaagggcaggccctcgttccagggctccccggaggcccaacttgaccgctcggtgaccactggtccggggccggggccaaacgcagcagccgcagcagtatcggaagggacccagtttaattctcttcccctccagggtaggcggcttgtttttagtaccaactcgaaac

SEQ ID NO: 23820 - DNA, 353 bp, Homo sapiens
  chr11:69192459-69192812
  hypo
cggcgtcgcacaaactgtgggattaggtggcagaggctgttccgaggctgctccgatgtgtgggaactgagggggttcccaggatgtgagactttcagtgctgaaactgggaaagtcctgggcgagccgggacaagtcgctcaccctactagagacagttgggcgaaggagacacattgggatcagtctcccatggccttcaagtgtcagggcaggggctggggacctcccatataacgagcagcctcaggagactccaggcaggcaggagcgtcgggggctgcgactccagaatggccaaggcttctaccgtccagcccctttgtaacacagagcacccaacgggcgcagcc

SEQ ID NO: 23821 - DNA, 302 bp, Homo sapiens; identical to SEQ ID NO: 6785
  chr11:71169280-71169582
  hypo

SEQ ID NO: 23822 - DNA, 931 bp, Homo sapiens
  chr11:71192127-71193058
  hypo
cgtgctgtgaccttgggccccaaggtgctgtccgtccattctgtggttcagtgtccccattttaaaatgaggacgatgataatacccacgtcctgggtctgtcttcagaatcacatgtgtcccttctcacgaggtgcctaaagcagagacgggcgtcctgagagcccagcgttgactctggcactgcagcctcctggggcctgcttgggtgggttgttgggtgctgtgggcaggggccaccgcctccgggctccatgttctgattgccctgcagccttggacctgcctgctggctctgggattttttaagacgaagtcaacaggtaagacttccagtttctagtgagcccactttgcttgttctgctggttggtctggttttattctggggcagggtagggatttttttttttttttttagtgcaaacaacaaaaagcatttcatcactctgcctccatggggagcttagtctgtgctagccagaggcaaggtgggcacagtggctggtgggtcagctccacctttggaggctcagcggaacccagcccatcagcattcagggtcacgctcaccatcttgccagcattgtaatcatgcgtatctgcagttcgtcggtggagtcagcctctgacacgccccgcagtgaagtgtcttttttccctctgaaaaatccattcatcctgccacgtgcgggtatttgtcctgaccccatggaaagtgctaacacccacgtgcatttctgtggacgcctccttgaggtctatgggtggagcttggctgatccatgggcatgctgcttctccgaggctctgctcacgctgtctgattggtccattccaggcagggtttttgctgcccttgagtggcggggtggacagcgcagccaccgcctgcctcatctactccatgtgctgccaggtctgcgaggcc

SEQ ID NO: 23823 - DNA, 835 bp, Homo sapiens; identical to SEQ ID NO: 6788
  chr11:71229615-71230450
  hypo

SEQ ID NO: 23824 - DNA, 810 bp, Homo sapiens
  chr11:73072922-73073732
  hypo
cgcgtgtatgtgtacgcgtgtgtagaagggtgtatagggcatccacacacacacacccatgcaggcctgcctccctccattctgccggggtttcccaggagtggggaatgctggcagcagttcctccattcaccttctcctgtccattggcgcctcctgcagttctcctgtgcggctcccaccctgaacagctgcccggagccctcgcctgaggtatgggtctgcaacagcgacggctacgtgggccaggtgtgcctgctgagcctgcgcgccgagccggacgtggaggcctgcatcgccgtctgttccgcccgcatcctctgcatcggggcggtgcccgggctgcagcctcgctgccaccggtgaggcctgggcggcggggtgggcggcaccgcgggcctgggagaaccaacccctgtcccagcacactctcaggccgccccggcgtggttgtgggcggggcccggcgagtgtgggcggggtcggtgggcgtgtccaccaccggggccccgtctggctcgtagctgctgtcatcctcactccgtcttctcgcagggagcctcctccgtcgctgaggagtcctccagagacggcaccggagcccgccgggccggagctggacgtcgaggccgctgcagacgaggaagccgcgacgctcgcggagccggggccgcagccctgccttcacatctccattgcaggctcgggcttggagatgacgccgggcctcggcgagggtgacccccgcccagagctggtgccctttgacagtgactctgacgatgagtcttcgcccagcccctcggggac

SEQ ID NO: 23825 - DNA, 88 bp, Homo sapiens; identical to SEQ ID NO: 6790
  chr11:73491526-73491614
  hypo

SEQ ID NO: 23826 - DNA, 632 bp, Homo sapiens
  chr11:75152263-75152895
  hypo
cggatgggacccccgcacaccacagcagggagaagagccacggtgcgttgactgtgtagaggttcacactcaggttccaggacgcgtagtccctgtggggcaggggagaggcaggtcagcatgcggaccctggcagctccaggcccagtgtcggggctggtaaagcacgtcctgttcacgacctcacagccatgcccggggcaaggaacattggctccagagggccaagctccgggacaagcccgggtctgcccgacacgctcaccctcttgtctttgaaccatgtgtgcctgattcctctgtgtgcccatccctctgcccgaccgtgtgtgtgtgtgtgtgtgtgtgtgttggggggtggtggtggcaggactgggagagactcagtcccaccctctcctggaggagcccagggcagggcaggcacctgagctcctggcgggacacctgagtgtagcgcaggttcagccgctggatgtggcctctccgcaggctggcgactgcctccttggagcctgatgtctgttggaagccgggagccaccttccgcaccaggggcctctgcctgctaggcagccacatgacctgcaggcagaagagaggcagcctcagacttctcttctgcacgatgc

SEQ ID NO: 23827 - DNA, 815 bp, Homo sapiens
  chr11:76371492-76372307
  hypo
cgcccagttccagtgtctccagggcattgtggcttaagtcaaggagcatcaggcagggcagggagcctaagcgccgggcctcaaaggtccgcaagcagtttctgctgaggttcaggaagcacagggaggtcaggtgctcaagaaagctgtcggggatgagctcaatctcattgtagctcaaatccagattcaagagctgggaaagggggcggccgctggcattcccgctgggggctgagaggggcagggctgaccagccctcggaaggtgcgtggatgcccttgctgtcctggggtggccctgtggggagccggatgaggttgttggacaagttcaggtagatgagtctcgggagcgcggccaggtcggggaaatggagcagtttgttctcccgcaggtcaagccaggtgagctggaactcagcctggggctgggaggccgtctgaaaggcctcgatgctgttgcagctcaggtctagcacccgcagctgctggaggctgaagtcggagatgcaggtgagggaattcctggagaggttgagatgggtcaggcggggcagaccctcgaaggcgccatcctcgatgtccatcagcacgttgctatgcaggtcaagctgctccagcgcaggcatgtcccggaaggtgtggcgggtgaggcgagtcagactgttctccgccagtgagagggtatgcaggctgggtgcctcccccagcagccgctccagcaggccgctgtacaggctgttcccagacaggtccagggaggtcacgcgtggcagggggcccaggccaccagcactcagcgcagtggccatc

SEQ ID NO: 23828 - DNA, 1236 bp, Homo sapiens
  chr11:829438-830674
  hyper
cgacgtgcagggcacggcgggctctctggatgaggaggaggaagaggaggagcgattccacactgtgctggagcagctgggggtggccccggtcctgggcaagtgagtcggcgctggccccgctcccactgcccgctctgctgtttctctgcctgcatgctgtctgcccttgtcacccgagtgctggttctgcacagggtctctaggccgggtcaggcccagcctagcgtcagctgcgattccctgggagggacccggcatgatttcccgcagaatttgcatttcatgaggcagcagccagggctgcagggaggaggggcagcgccgggcgcggggccacataccggcactgcccagggtacacacacctcaccgaccacgcacgccgggcaggggcgaaagcgctcacgggagggatgccctgcacgcagcaagtgctcctgtcctgcccaggggcgaagaagtctcctaagggtttgctgctggcggagggaagcctgcttcccgcttctgccagctccagcctcagttcccgcccgccctccaggcagcgggctgtgaggacgctctgggccaggctgcagcgcgagcgccccgagctgctgggctctttcgaggatgttctgatacgcgcgtcggcctgcctggaggaggcggcccgggagcgcgacggcctggagcaggcgctgcggaggtgagggccggggtggggtatgggggccaatggagggcctcagggcagcagcagaggcggtgccagggggctgtagcgctggcaagttctcatccggggtcgcccggtcccccgaaggcgcgagagcgagcacgagagggaggtgcgcgctctgtacgaggagacggagcagcttcgggagcagagccggcgcccgccgagtcaggtgggcctcgggccccgcccctcccgccaggcccaatcccacctcgctggcctccctggctccgccttctctgaattaatccctccccgacggccccacctccgcgggtccaggctgccctcagcccgaggagatcccactgggcctcacgtatcacccccgtccggtcttctccacccgaccccgctccgcccgggcccactcccagcccctggccctccgtgtacctcttttgcatggccgagcggccggcggaggctcagtggtcctccgtgcgtcccagaacttcgcccgcggggagcggagaagccgtctggagctggagctgcagagccgc

SEQ ID NO: 23829 - DNA, 250 bp, Homo sapiens; identical to SEQ ID NO: 6796
  chr11:85989397-85989647
  hypo

SEQ ID NO: 23830 - DNA, 472 bp, Homo sapiens
  chr11:862613-863085
  hypo
cgctgtcctcttccttcccgtccctgtcggctgccaacttgctcatcatcaccggcgcctttgtcatggccatcggcttcgtgggctgcctgggtgccatcaaggagaacaagtgcctcctgctcactgtgagtgccggggcccaagcgatgctccgggtgggaccacgcagggtggggctccggtggcccccaggccttggctgccgcagtgaccccccagacgtgggcaccacctctggggccggacctccaggctggcagtgtggcccggggccctggccactgttgggtcttccaggccacactggggctggggggtgatttgcagagcggtgtgggggtcactcaagagaacgtgctgtaccttgtcaggggcctcccctgacgggacactggccctggtgagtgcaggcacagccccgcacacacgtacacacgcatgcgcagcctttcacgggcttgcggtctcc

SEQ ID NO: 23831 - DNA, 276 bp, Homo sapiens
  chr11:9405271-9405547
  hypo
cgcgcctggcaggaaggtgtattttaatagggattatgcttttactctgcattaagaggtgatttatatgaagtcccaactaaaatttggatactcaataaaaagccatgatttcagtatttggtaattactaatacgtaatgtgataaaaacctttcacacataaagttcatttaatcttccgtgttattgccttaggataaagtctcataagtggaattactgggtcagagtttaaacatttcgtttcgttttgtttttttgagacggagtttc

SEQ ID NO: 23832 - DNA, 117 bp, Homo sapiens; identical to SEQ ID NO: 6798
  chr11:9552484-9552601
  hypo

SEQ ID NO: 23833 - DNA, 311 bp, Homo sapiens; identical to SEQ ID NO: 6799
  chr11:9554670-9554981
  hypo

SEQ ID NO: 23834 - DNA, 981 bp, Homo sapiens
  chr12:103351487-103352468
  binary
cgcaccgacagggatccggccagggagggcgagtgaaagaaggaaatcagaaaggaagggagttaacaaaataataaaaacagcctgagccacggctggagagaccgagacccggcgcaagagagcgcagccttagtaggagaggaacgcgagacgcggcagagcgcgttcagcactgacttttgctgctgcttctgcttttttttttcttagaaacaagaaggcgccagcggcagcctcacacgcgagcgccacgcgaggctcccgaagccaacccgcgaagggaggaggggagggaggaggaggcggcgtgcagggaggagaaaaagcattttcactttttttgctcccactctaagaagtctcccggggattttgtatatattttttaacttccgtcagggctcccgcttcatatttccttttctttccctctctgttcctgcacccaagttctctctgtgtccccctcgcgggccccgcacctcgcgtcccggatcgctctgattccgcgactccttggccgccgctgcgcatggaaagctctgccaagatggagagcggcggcgccggccagcagccccagccgcagccccagcagcccttcctgccgcccgcagcctgtttctttgccacggccgcagccgcggcggccgcagccgccgcagcggcagcgcagagcgcgcagcagcagcagcagcagcagcagcagcagcagcaggcgccgcagctgagaccggcggccgacggccagccctcagggggcggtcacaagtcagcgcccaagcaagtcaagcgacagcgctcgtcttcgcccgaactgatgcgctgcaaacgccggctcaacttcagcggctttggctacagcctgccgcagcagcagccggccgccgtggcgcgccgcaacgagcgcgagcgcaaccgcgtcaagttggtcaacctgggctttgccacccttcgggagcacgtccccaacggcgc

SEQ ID NO: 23835 - DNA, 807 bp, Homo sapiens
  chr12:104609351-104610158
  hyper
cgctcttttctcctttccatttctgcattttccaatttacctttagcgaccgttctttcctgttaaaaaaaaaaaattcacgaccttgaagaagatacacgggctatgacttcgctgttgtcaccgagcgccccgcccaccgcgttctccgacccgcggccggcagggggctcgcggcctccgccaggcgtccttcggctccgtcagttcccacagggccttgtgcgacatgggctgcgccgagggcaaggcagtggcggcggccgccccaacggagctgcagacgaaaggcaagaacggcgatggccgccgtaggtcaggtacgaccgagggcgaaggcctggtccccaggtcgacgggccgaagcgggccttccggccggggttggggataaagtgccccggagccctggccttgaagcccctcactggagtcagtgactgaccgcgcgccacgctggagaccccagaaacgctcccccaggtcaccccgggagacggaggccggcggccggccgagggctgccccgcccgctggctgtgagagaggtgggaggtggaaggaggagcgggcccgccgcgaggacctgcccggaaacctgtcggaaaccgaaccgagatctcggcagcgacccgcctgatttcgctcagggcccgttagggcgtcctcttcctacaagcaccgtgtttccaatgaaaggttacgggggaagcgaccaaaccgacagccgagtccgggggtgccccttcacctctccagaagcccccggcccactcccagcatcctcctccatcgagaatcttgtcc

SEQ ID NO: 23836 - DNA, 686 bp, Homo sapiens; identical to SEQ ID NO: 6800
  chr12:104682348-104683034
  hyper

SEQ ID NO: 23837 - DNA, 149 bp, Homo sapiens; identical to SEQ ID NO: 6801
  chr12:110019861-110020010
  hypo

SEQ ID NO: 23838 - DNA, 114 bp, Homo sapiens; identical to SEQ ID NO: 6802
  chr12:110915439-110915553
  hypo

SEQ ID NO: 23839 - DNA, 226 bp, Homo sapiens; identical to SEQ ID NO: 23460
  chr12:110983646-110983872
  hypo

SEQ ID NO: 23840 - DNA, 799 bp, Homo sapiens
  chr12:112204379-112205178
  hyper
cgcttttgggtttacggccggtctcttcacctggagcatcagccgggaaggtcagggtcgccctggctcgggcctgttcacattggggtcaaaggcacacattgggggctcaaccaaggcgagctgcgttcgcggggccgggtctttccgcacaggcggagggcggtggcgggcgcggaggcgtcgcgcgagccagggggcagccacgggccgggggtacctagcgccacccgcttcgcttgcatcagctgcgcgccccatcccgaggaatggtagaggcagccccgcccccggcccgcccccgcctttccattggctgccgcgcggggcggggagcggggtcggctcagtggccctgagaccctagctctgctctcggtccgctcgctgtccgctagcccgctgcgatgttgcgcgctgccgcccgcttcgggccccgcctgggccgccgcctcttgtcagccgccgccacccaggccgtgcctgcccccaaccagcagcccgaggtcttctgcaaccaggtgagcccaccggccgggctcgcgctttgttttccggcccgagtcccccgcaggcccctaggaaggccccgcgccgccgtgggccttagtgtactcatctggggctcgaggggtttgcagaggctgacctggaagcacatctgccccctcctctcctgcaagcattttagccccttcgccgcctctgacagtccccgtcccatttccccgtgacttgggccccctctccgtcttcgcccagcctcggtctgttttccagggccaactctcggggttcc

SEQ ID NO: 23841 - DNA, 432 bp, Homo sapiens; identical to SEQ ID NO: 23461
  chr12:113725566-113725998
  hypo

SEQ ID NO: 23842 - DNA, 81 bp, Homo sapiens; identical to SEQ ID NO: 6808
  chr12:121328606-121328687
  hypo

SEQ ID NO: 23843 - DNA, 150 bp, Homo sapiens
  chr12:121622475-121622625
  hypo
cgccacctggcgcttcggctcccaggacatggctgactttgccaacctgcccagctgctgccgctggaggatccggaaagagtttccgaagagtgaagggcagtacagtggcttcaagagtccttactgaagccaggcaccgtggctcac

SEQ ID NO: 23844 - DNA, 56 bp, Homo sapiens
  chr12:121667875-121667931
  hypo
cgtaccctttgttgcatttttcacagtccttaaaaaggaagcgctccaggccgggc

SEQ ID NO: 23845 - DNA, 184 bp, Homo sapiens
  chr12:122284984-122285168
  hypo
cgctggctcattgatgggcatcttgatggactcttcatagttggccaccacaatggatcgcagagagctatattccgtgtgcacctgcgtgtcatccacggaccagaagcggtggaactgcaggtttttcaggtacctgtagggtgggcggtggaacacatatgctctgagcgcctccagggac

SEQ ID NO: 23846 - DNA, 303 bp, Homo sapiens; identical to SEQ ID NO: 6811
  chr12:123325625-123325928
  hypo

SEQ ID NO: 23847 - DNA, 253 bp, Homo sapiens
  chr12:125062713-125062966
  hypo
cggggccgagacaagcctgggcagggagaagggaagggagcccgtctgtgcctgtagcctgggcagggagaagggaagggagcccgtctgtgcctggaaaccaatttgctctggcagcgctgtggaagaaaaattccacgcatgtccccgcgagcccttcgaagctcttcgtggaaaggcacacactgcagtcttggagtgcatcctgctcttagggcctctgggggccaagtcaagccgatgaagggtgtgc

SEQ ID NO: 23848 - DNA, 604 bp, Homo sapiens
  chr12:130184247-130184851
  hypo
cggctctacttcggtgagcgataacacagcttttctggtcaaacagcttctggaaaacaccacctgatcgacgggcgggtacagacagacattgggaaacgacttacctcaacgtgaagcgatcttcagtggaatttctggagatggaaacaggaaaagtcagcacgtctcctttcctcacggtctttggtatatagtggatggccacgctgttgtccagacgcagttctctcagggagggtttcctgtgtgtctgataaaggaagatgctcccgatcctctgcaaggggggcccggactcatcgatgtcactgtggcctgtccggatcccattgcttctcctcgcgtcttccctgacgcagtcccctctctcaccccctgggtgcacggtgtagtagagctccacgggggtcccctccggctggtccacggacttcctcctcccggcaaccaccgtgggggggctgaaccagctggacaggagctccagctcggccacgcacagccccaggtccccctgcagccggcagctgccccgcacctctcgggtctctcggaaagcaaagaccctcaggcacggcagcttctccccggcgctgcggtc

SEQ ID NO: 23849 - DNA, 73 bp, Homo sapiens; identical to SEQ ID NO: 6816
  chr12:130663582-130663655
  hypo

SEQ ID NO: 23850 - DNA, 394 bp, Homo sapiens; identical to SEQ ID NO: 6817
  chr12:131265535-131265929
  hypo

SEQ ID NO: 23851 - DNA, 839 bp, Homo sapiens
  chr12:131271740-131272579
  hypo
cggccacccgcgcccagggcagggatctacacttgagtgtttccgcgtctgggtcctaattcctagtgggagcacggaaggacacagggaatgttgggagctgcatgggccatgtcttggtcccatgggacctggccctacttgacccgaggccacaccagcttgtagacatgagcttttgggggggctttgagtcctaagagacccagctgcccacgccacacagggggaaaggaagcagctggagagtccgctgcccacaccaccccgggctccacggcctcacccccaggccgtcacagagctccagtctcccgccacttcagtgcaaccctcgctgtctgcccactcctccggacatgacgcttaggaccttaccttgctctccagctcagagcccggcccccatggccgggccagacctgccccggcctctcccctccgcctgagccacgccccggcttcctgctcaccaggcctgcgttagcatctgcagctgtgcttcttcaggccgccgcaacaccagccttcccgcactgctccaagacactgagcctggtgcatgctcaggaaattcaacaatttcaaaacattgtcactctccccgcctgacgaccagccttgtactctactcacagggcaacctgctttagcaaactcaacgacacattaaaaagtacaatttgcaaaggagagctaccacctggctgggtgttctgcgcctagagactgggccccgggagagcgctccacagtgaacttgcgaaggatggaatttacataaagaaggcaccgtctttagtcctggaaaggcaccctgggattctctacctccgtcc

SEQ ID NO: 23852 - DNA, 662 bp, Homo sapiens; identical to SEQ ID NO: 6821
  chr12:131272765-131273427
  hypo

SEQ ID NO: 23853 - DNA, 322 bp, Homo sapiens; identical to SEQ ID NO: 6822
  chr12:131288908-131289230
  hypo

SEQ ID NO: 23854 - DNA, 742 bp, Homo sapiens
  chr12:132221511-132222253
  hypo
cgtgcctccaacccaggatgtctgctctcatttactagtatatgggtgaacatagccacatagatactcatcatagtacagttttagtagtagcaaaagactgaggcgacgcacatcctcggtggaggactaatggagtccctctggtgtgctctcgcggtgggctgcagagctctgggggtgggccagggcccgagcgctgcagggccacccaccggaatggctcttcctgagggtggaggcgaggtgactcaaggggagggcagcacgaggcagtctgttcacgtcagaaggggagggaagtgtctgtagtgcttctgtatcggcacctaaaagggcaggtaagaaggaccagtggccagcacagagaggggaactggaaggacgaggtcgcagacaggagtggctgactcacctgcccgtttgcgctgcttgcattttttcagcgtgactcgtcaccctctcaaaacatgcagattgacgtggtacttattttgagactaaactggtatcctgagttaattccttacaactctgtattttaataatacgtgcttttatcattttgtttcatcagctcagtgtgtttttgtttaggcggaagtggcccccgtaacatctttcccccgtagagacttgcatacccagtactgctgtgtctcgtgggaggctgctgggtcactaagcttttctggctttcatacgctgggtatttaataatcaccttaggatatactcagtc

SEQ ID NO: 23855 - DNA, 635 bp, Homo sapiens
  chr12:132665953-132666588
  hypo
cgcacagtacacacacccaacacaactcaaaccacacacacactcagtacacacacccaacacaactcacacagcacacacacacacactcggtacacacacccagcacgcacacatagtacacacacccagcacaactcacactcagtacacacacccagcacatgtacccacccagcacacgttcactcgcaccctgcacagcccagcgcgcacacacccagcagacagcacatgctctcacatgctggcatcagccgtcagcctcagctgctggagggtgtggtggaggcgggcggtgagcgctgggtgctggggtccacgtccttccaagcccctgcatagcggccgccttggctggcgatgactggagggggtgaggggtgaggccaccagcacaggtgtgtcccttcactgtttccacctcgtgtgcccgccacgctgtcttcctgccgctggtgaagtctgtctcccccccccccccccccgagtgatggggcgcctccgactgcccggccacggtgcctgcacctccgctcctcctctccctgcaccctccaggcctgggggccccggggctgaccttgaccttcccacccgcccaggtgtggccgggacagcaccgcagttgtggc

SEQ ID NO: 23856 - DNA, 479 bp, Homo sapiens; identical to SEQ ID NO: 6826
  chr12:133286733-133287212
  binary

SEQ ID NO: 23857 - DNA, 358 bp, Homo sapiens; identical to SEQ ID NO: 6827
  chr12:133435596-133435954
  hypo

SEQ ID NO: 23858 - DNA, 154 bp, Homo sapiens
  chr12:14929900-14930054
  hypo
cgaggcattgtaactgccctgtcgccacccgcctctcccaccactacccaaaggattcttagcatcccctcacatactctgcctgcctcaacgttcagtcagcccctcaccatttttgtttttgagagttttttttttaacccgaatagtttac

SEQ ID NO: 23859 - DNA, 784 bp, Homo sapiens
  chr12:1739048-1739832
  hyper
cgggctgggggccggctcacttccgagctggctctgcatgacaaaggggaaggagcaagtgtcttctttgatctgccccctgccggccccacacacctgcctgttggtgcccccgccccagccgaggcttcgagaaggaaaatcaaaagggggcttggggaagggctgtgtcccagctctcctggaccctgctcgggccactgtcctctcctggcggccccaggacaaaaatacttcccgggctgatgacccgaagcacccgccgccccctcccggggagcctggggacgccgacgcgcgagagtggcgcagtgagccggggcgcgcggggctgcgctcgtcaggtccggggccccggggaggccgctgggggcgcgggtcacgcccagacgggggccccggaggaccgcgggggagccgcaggggccgtgtgtcccgaggcgcaggctcgctctagcagcactgacctgctgcgggtcccagggcctggggacaggggctctcgggggcggatagaggaacaggcgtgggttacagcaggcaggaggccaagaggcgggaggcccgggagccagcagggaagggctgtggcatctggaagatgcgtcctcagctcaggcatttgatgccagagctgccgcctggcgtcggcagtgtccccggtgcagctgctgggcaaggtactcggtgccgccctcgaggaccacggtgccgggaggggcaggggccgcctagggaggcaccacctcagccgccagagctttccgggcgggcggttcgcggc

SEQ ID NO: 23860 - DNA, 454 bp, Homo sapiens; identical to SEQ ID NO: 6830
  chr12:1943616-1944070
  hypo

SEQ ID NO: 23861 - DNA, 62 bp, Homo sapiens; identical to SEQ ID NO: 6831
  chr12:27742262-27742324
  hypo

SEQ ID NO: 23862 - DNA, 221 bp, Homo sapiens
  chr12:29373882-29374103
  hypo
cgattcttcccttggggcaggctgtccttatccacattgggctgccagcgcttgggaggggctactggcgcagtgtgtttactggagttgtgcgcatgctcacttgaggcatgaagtgagcgtgcgtacaactccaataactggtaacaacactcccttaccaggggcgtattcctgtaaggtcatatacccgtaaaatcagccgctttacctcttagtgc

SEQ ID NO: 23863 - DNA, 274 bp, Homo sapiens
  chr12:32831303-32831577
  hypo
cgcgctcggtcctgaacacacattttgtttgtttgtttgtttgtttacaaaacccctggagaacccgcgtattctaacctgggctggtttttgtatttttgcaaaataacaccccacacattctcgtatcagcgtgcagatttttttgcacccagtttggttgtttgcggccataagcttttctttaagcctttccaacccgtccttctagagaaagtgtcttcataaggaagtcacactgctcacgcctgtaatcccaacactttgggaggcc

SEQ ID NO: 23864 - DNA, 235 bp, Homo sapiens; identical to SEQ ID NO: 6834
  chr12:417402-417637
  hypo

SEQ ID NO: 23865 - DNA, 1877 bp, Homo sapiens
  chr12:4377809-4379686
  binary
cgtgggctcactctgcagctgcagttttcagcccttgcagtttagaagattctgcatgagcacggatgccacgagggtatccagcgagtgggaagggagtcgccctacatgttttcacatcgatttgtaaaactgttttgaaagggtatttctagatccatttgttccaaatgcagcaaaattcatccgatatcgctcacaatgcatgcacgggttatcttacatgtaatagccatcgtattaaccaacccagctgatactgagatggtgaatggggcgggggagcagggaggaatatgtcgcgcatgaaaaactccgggtgtaaaagtcaatgcagaactcactccccgaggaaccgaaaaagacattcacgactctcaagtggagagaggatagaaagtcaagtggcgggggtcgcgaccagtgatcgggatttcagtctgatctcagtacccagcggaacaggaccataacctaaagaaatgagctttttccggagcaaagagcggccccgatttcaaagtagaaaaaataaactgcttgggggtggaagatggcgaggggcggggggcggggagggaggcgggtcgcggcgctggctccggggtccgcggcacggcctcctctgccgcgctgcccagggcccggaccctgcccggcgctgcgcccaccgcgagggtgccagacccgccgcgccgccgccgcgctctcccagccgcggccccctcccccgccgcttcctcttgctctcccagccccttcccccacgtgtggatgacgtcaaaattccgcgaaaaagccgcgtggtggctccccgagcggaggcgcgattccgccgcccagcggccccctcccgggggcgcctggagggggagaagggcggaggcggccggttccttctcctcccgggaggcaggaccccccgacgccgaccgccggacgccccccgccccaaagcttattggaaaattcacttttgtaaagcaaatgtatttccagagctattttcggccgcgtgaggcgtgtcctaagctgaatcagacaggaagagggggaagttcgggtcttttaattttttttttttccgaagggaggggagtgagatgctaggtgggtgacagacggcaggcgctcgccttcttaactcacgcctgtcgcatctgccgcctcagtaatccagccccgtccaagccgaaattcgccgaagggagtgcggatgcacaggcctggcggactctgcccccctccagaacgcagcggcccagcgccccggcgggcgcggctgcgaccagagggtcccggaagcgagtgaacacctgcaatcgcactgcccgtccccacccaccctgctcccccgtgctctccgcttcccgacgttttcctcttctccttgtccgcatttttctactttgcctgcactccctccttcctcttgatgtgcctcctatgtgtcccctcggatttatgtgtcccctcgcattttgccagtcgggttttcggttttgattgaccgtccatccctccacggagaaacacaaacacagctccactctttgggggagccgaggggaaggcagtggctcccatttctgagcctgaactcagtcactacccgctccccacctggcctaggcgcccctgcgcggagaaggcgggactcgaactcgcgctgctcccgggccttgagccgaccgcggaatcacctggctgggaggcatcctccaggtaagcttgggagtatgtgtgcttagtgctgcaggctcctgcagaaaagtgcctataaacacccaacaccctgctgcaccctccacctccaggctttgtacactttccaaccgaaactccaaaacgctagcgtagagggtggggagccggcc

SEQ ID NO: 23866 - DNA, 975 bp, Homo sapiens
  chr12:4381232-4382207
  binary
cggtaacaatcagcgcgcagtagcaggagccccagagctattggctatgcaaatagagggaggggagacggcgccccaaactcttcctcacccttttaaagcgatatcccctcctttcccccccaccaccccttccgccccaccctcgtttaaagaggctggctccggggcctgagttaatcgcttgcacctctagtttattcgctcccctcctccgccttgcagggaacctagtgtacggctcacccagcccgcgccccaccccgccttgctggctctccgcgcccctgcccgggccccctctctcggtgagggaggcactcagtcggcctcggtgtgcccagagagctcgagccacgccatgcccgctgcacgtgccagcttggccagcacatcagggcgctggtctctccccttcctcctggagtgaaatacaccaaagggcgcggtgggggtggggggtgacgggaggaaggaggtgaagaaacgccaccagatcgtatctcctgtaaagacagccttgactcaagcatgcgttagagcacgtgtcagggccgaccgtgctggcggcgacttcaccgcagtcggctcccagggagaaagcctggcgagtgaggcgcgaaaccggaggggtcggcgaggatgcgggcgaaggaccgagcgtggaggcctcatgcctccggggaaaggaaggggtggtggtgtttgcgcagggggagcgagggggagccggacctaatccctcactcgccccctccccctcccgggccatttcctagaaagctgcatcggtgtggccacgctcagcgcagacacctcgggcggcttgtcagcagatgcaggggcgaggaagcgggtttttcctgcgtggccgctggccgcgggggaaccgctgggagccctgcccccggcctgcggcggccctagacgctgcaccgcgtcgccccacggcgcccgaagagcccccagaaacac

SEQ ID NO: 23867 - DNA, 1299 bp, Homo sapiens
  chr12:4382915-4384214
  hyper
cgtcaccgcttcagagcggagaagagcgagcaggggagagcgagaccagttttaaggggaggaccggtgcgagtgaggcagccccgaggctctgctcgcccaccacccaatcctcgcctcccttctgctccaccttctctctctgccctcacctctcccccgaaaaccccctatttagccaaaggaaggaggtcaggggaacgctctcccctccccttccaaaaaacaaaaacagaaaaacctttttccaggccggggaaagcaggagggagaggggccgccgggctggccatggagctgctgtgccacgaggtggacccggtccgcagggccgtgcgggaccgcaacctgctccgagacgaccgcgtcctgcagaacctgctcaccatcgaggagcgctaccttccgcagtgctcctacttcaagtgcgtgcagaaggacatccaaccctacatgcgcagaatggtggccacctggatgctggaggtaggtcggggggtggcgctcgccaggagccaggacccctccggatgctcgggtccccggccggagccctaaacctgggagagggcaatccccgcgccggcctcccggctcctgtgcgggagtttaccgcgcgccttctggcgagacgcgtggctttatttctgttcctctccagataaactggggaggcagaggggggaggaaaatctgggagaagcgaggctgtcctgggcgggggtaggggagcatcccgcgcgcgtgttcctgcatgtggctgcctcttcttcccacccccctcgcgacctgtcttttgcgaagccgccgcggctgcttgcgctgcggccaggaagagagtcggggcctgaaatcgggaccccgagtagaaaggcaaccccccccaaaaggccagagcaaattcgtcttggcctcaggtccccgcctgtggtcgcgactccgcgctggcacttcaccggggaggtggagggaggagggagaaggagagaaacggggaattcgggagccccggaagtcccattgaagaaacgcgtgtttcaggggaacccaaaagaaccgcttcttgcccctcactccaagtctttgcccagcgagccgtgtgcccacgtatgcacagctctggacctgccgtggtttcgccatgttgctttgcaaactccctttggaaaggctgggaaacgtcgcccgcttaccctcgcaccccattatcccggccaccccacttctaatcgtgccctctcccccaccccccacctcacgaagattacttacagtttggttttccagcttcctcggtgc

SEQ ID NO: 23868 - DNA, 180 bp, Homo sapiens; identical to SEQ ID NO: 6841
  chr12:50037818-50037998
  hypo

SEQ ID NO: 23869 - DNA, 525 bp, Homo sapiens
  chr12:51421158-51421683
  hypo
cgcgcccccagagccacatcatagtatctgctgccccaccaagagcaccccacacctgggaggaaccgagaaacatcagctagtgcagccagtttgaccgccttaggtgtcctcccaagcctccgtagtgaattgttttcctcctcgcccagctgactcgattctccccagacttcatcctacctacccaaaagcaatcccactctatcgccagtttcagcctcacaccgtatcttttgctctgaagatgagactgccaaactggtgaagagggaataaatggcctaacaaattaccgtaattttctgcaatgtcgtttacagccaccaaaaacattagatcctcccgccaccctcactccccgacccctcgcactgcttacagcattaaaggtaattgagcttctttattcacgtaaaaacagctaggagaaaatttcattagtaagagagaccaagaaatgaggaaaggagcgtgaactgcaaagagaaaaatccaaataaagtgcgaagtaaaaacaaactc

SEQ ID NO: 23870 - DNA, 1389 bp, Homo sapiens
  chr12:52400270-52401659
  binary
cgcagccccgctgccgctctccctgccctggagtctcctgcagccccttggatctccgtgactctccctacctccccgactccccaggcttcttacagtgacctcttaccgtgccccactccatgaatcgccagagctattcgtccctaaatttcaaaccttgcgcaatgtcccttcacagacccctccaggtatcacgcagccccgagccccgagccccgccccgggggcctcatcccgccccttcgcgtccgcggctcgttttcccccactgagcgcccagctcccgcagtttccccggccgtcgagcgccgtgggcggggctccagggcggcggcgcctcgcggggagggtcctccgtgctgggggcgaggccacccgaggcagctccccgcccgcccccaaccccgccccgctctcggagcctataaagggaggcgacccgcggcccgcccggctggcatcccccagccgccgccagccccgccgaggggagccagcgccgtctctgaggggcgtccggcgccggagccatgaccctccgccgactcaggaagctgcagcagaaggaggaggcggcggccaccccggaccccgccgcccggactcccgactcggaagtcgcgcccgccgctccggtcccgaccccgggaccccctgccgcagccgccacccctgggcccccagcggacgagctgtacgcggcgctggaggactatcaccctgccgagctgtaccgcgcgctcgccgtgtccgggggcaccctgccccgccgaaaggtgcgtcccccgcccgccttcaggatctgctcagcccctctccgactccctacagggcctgctgactccgcagtgccctctcctcggcgtccgcggagtcccccaccttcttccccggcccgctgggtgcctcgactccccgcgttccccgctgctgcgaaggccgtggccctcgcctgcacaccgcgcccaggctcggtggctcttaactccgcgccccatgcacgccccctctctccctccttgactcctcccagcaccccccttctcctacccgctccatctggctttctgccccccatgccccgcctccccgtggccaggtgtcctgggtccccaggagcccctcgcccgagggacagagacagccccaggcaagttgaaggtccgagagcccccggtgggagaagcgggccggtggctgcgccgcgtgcgttctcactctgaggaagtgcgtggggagccgctgactccggatagcacacccttccgaggggactccccgattcctgggctgggggcctgccgcctggccccacgtctgacgtacggggcgcgagggccactgctccctggacttctgtcggaaccggacgcagtgggaggggtc

SEQ ID NO: 23871 - DNA, 451 bp, Homo sapiens
  chr12:53084880-53085331
  hyper
cgtggaggggaggagtttgaggagagggcggtgaggggcaggcgtgatgtgtggcagaaacgaggcctctactccaagatccgcctgtgggaggtgttggtggaggtctggatgatctgcacgcgcgaggatccgcggccgcttctgccgctccctccgtagctcccgccaccgccgccgcagccgctgccataaccgcctccactcctgcctcgtgccccgcctccgcggtagcttcttccgccgccatagcccccaccgctgccgccgccgtagcctcctgagccgtagctgccgccgcctcccgcgccgccgttgacgctcacctggctgttctgcacggctgtgggtaggggacagtgcacacggggtcagagggaccgggcaaggcccccacctgcacccgcccctgcacctgcagcctcctccatcctcgatcacccgtggcatc

SEQ ID NO: 23872 - DNA, 725 bp, Homo sapiens; identical to SEQ ID NO: 6845
  chr12:53613775-53614500
  hyper

SEQ ID NO: 23873 - DNA, 211 bp, Homo sapiens; identical to SEQ ID NO: 23468
  chr12:53662999-53663210
  hypo

SEQ ID NO: 23874 - DNA, 813 bp, Homo sapiens
  chr12:54145145-54145958
  hyper
cgtgggtgtcctctccttcactctttccccagccctgtcgcctcccaccccccttccggccgcggcagtttccgaaatcgcccggcggccgcgaattcattagtggggggcggatgtaaacgcagcgcggtggaacgttttaattaggcctgaacaataaacaagctaaacgaggcgcgcaggactccctggtgggccctcagcctcctccgcgcggcgcggactcattacggctgcagccaatttcatgccagcgccgagcactggctgggccgggagtggggtcgggggtgcgtgcgggtgcgatccgggcctgcagggtgcggagcgggggcgtcccggggcgagggcagcgggccggttcccgcccgcccggggccgcggcttccgcatttctgcaccatccacctgcctttttcagtgtccttgagatgacgctccctccccacaccagagcggccggctggagagtctagcttgctttttagggtctctctcccgcctcttttcctcccccgctccctctctccttgcggctgactccagctccccctcggtgcccgtaaccctcctttcctctttttgccgcagtctccgtctctcttccacagggtctctccctccccctctccccgtggttgtcagactttctcctggactttctccgccccgcaccgcccgccccggatgccgagcgtggtagactctgcagccgggctcctcgctgcccgctggcgctgcctacacccccttgggctcccctccaaggtcccctccgctcgcccctctctgcccgctgccgccgccgccgcc

SEQ ID NO: 23875 - DNA, 1064 bp, Homo sapiens
  chr12:54338511-54339575
  hyper
cgttttgcttttttaaacattgcattaaaatatcgtcttgattactgagtttttggcgccccctcccttaaacttcgagcccagtggcctcatcatagttgtggtcttgctaaaataacagaaatgaaaagcattagggagcttcactatgcagtgcaatcctctggccccgttgagcccctgccagaactctgtgcctaggcagcctcgggtcctctatctcagtccagccgcttgcctcacttcttcccgcttgccttatctccccgcagacgtggttcccctgcagcccgaggtgagcagctaccggcgcgggcgcaagaaacgcgtgccctacactaaggtgcagctgaaggagctagagaaggaatacgcggctagcaagttcatcaccaaagagaagcgccggcgcatctccgccaccacgaacctctctgagcgccaggtaaccatctggttccagaaccggcgggtcaaagagaagaaggtggtcagcaaatcgaaagcgcctcatctccactccacctgaccacccacccgctgcttgccccatctatttatgtctccgctttgtaccataaccgaacccacggaaagacgctgcgcgggtgcagaagagtatttaatgttaaggaaagagaagaaccgcgccgcccggaggcagagaggctccatggccgtgctgctgggccatccccaactccctatcccatccccagcctccacccccatccagatgggactcacgtggcttcaacagctttggaaatgggtcccgagtgggccgtgcgaggaaggctgtcgacctctactcctccttgcgctcaccttgccagaaagtctggtggcagcgcagagcccaatcattccaaccaaagcagggttggggaatcccgaatggccccaattcttgcctcatcctatgaccaggcttttagaggaccttccctaagggcgcagcttcggagcaggatctgtccagctcatactttccttcgctgtccctcccgcactccttaggcaagatttcccagtaaagattttctgtgcgtattttaaaagtc

SEQ ID NO: 23876 - DNA, 937 bp, Homo sapiens
  chr12:62584692-62585629
  binary
cgaattacaacccacttcaatcctcgacctggtcgtttgctgttattaggagaaatggggcagagagggagggcaccgctcacggagcctcatttcgcatgctccgatcccctctcggcgtccctctactccgcccctaccctgaccgcccgcgagggagacgccggccgatggacccgcatctgccctcacctctcgccttccccgggcgatccctctacagtcccggacccccgagaaaggggaagggagacgtgtgcacacgggggcttccgggaccgcggtcctgcagttgccgctccggtccccagcgctggccggcgacccgaggcgcggctcgcacctacctgcagccccgcttcccggtggcggcaacacctagcgatgctcctgcagcttttgcgggccggcgccagccttatcgctctcgcatcgcttccaagatgccaatccgccgtcaccatccaggggcatagggaaccgaagtctggtgctgtgtgatcgtggagggcggcgtgtgagtgtggccctgagcgtgcgagtgtgcgcgcgcgtgtgtggatgtgtttcctcctccgatggcaaagacggttcaggaatctgacatccaagctggaatccccctgaagcgggtgaaggtgagcctgatccttctccccgcttctttattccacagtgtcaaagtaatcaaaagatttgtttactgaggaaaagccaaagtcccgcagcccttggcagcgcccgcggtcgcctcctgtcctcgccggatgcgcgcggtgcgctcagctccctggactgcaagaatcaaggcggtcttgctgcaattaccgctcttattccatctctgatttgtttgcttttaaggccgactaaagacttttcctctcgcctcacgtcgtctctccctctcacacacacacacactcacacatcctcc

SEQ ID NO: 23877 - DNA, 852 bp, Homo sapiens; identical to SEQ ID NO: 23052
  chr12:63025588-63026440
  hyper

SEQ ID NO: 23878 - DNA, 143 bp, Homo sapiens
  chr12:69999239-69999382
  hypo
cgaataatagaagtcaacaaaatactctgtacaaaaccctttataaaagtctgctgtgtgccgtattagcatattagatcaatagaagatattaagagaacctttttaaaaatcacaattactggccgggcgcggtggctcac

SEQ ID NO: 23879 - DNA, 270 bp, Homo sapiens
  chr12:79842622-79842892
  hypo
cgctcaaggacgctttatagtcgggccttatctctagagctagatgattcatattcatttcatggcttctttcagaaagtgcaggtggtggtaactgttttggactatgacaagattggcaagaacgatgccatcggcaaagtctttgtgggctacaacagcaccggcgcggagctgcgacactggtcagacatgctggccaaccccaggcgacctattgcccagtggcacaccctgcaggtagaggaggaagttgatgccatgctggcc

SEQ ID NO: 23880 - DNA, 563 bp, Homo sapiens; identical to SEQ ID NO: 22786
  chr12:8171309-8171872
  binary

SEQ ID NO: 23881 - DNA, 214 bp, Homo sapiens
  chr12:90313473-90313687
  hypo
cggtgagaggtactgggcgatgaggaagtacagctccaactccatgagaggcaccgggcctcaggtggacaaggcctcctccttggccgggcgctgggcgggaggcgggagcgagcgtgctagccaagcatgtgggccgcgctgaggcttgacgaggccggcgtcccttttcctgaggcacgtgcgccgccgccgccatcatgccgtgcgcgcc

SEQ ID NO: 23882 - DNA, 219 bp, Homo sapiens; identical to SEQ ID NO: 6851
  chr13:101194483-101194702
  hypo

SEQ ID NO: 23883 - DNA, 593 bp, Homo sapiens
  chr13:113098840-113099433
  hypo
cgggggtctgggaccgtgcctcaccacgggatctgtgtacacagcgatgcacccagcgtacgcgggcccttccctctgagccctcggcccctcatctgcaggatgggtgagccctggagaagcgggcagaagcagaggaggcagcgaacgcagagcatgtggcctgtgactgagcctagaaagtccgctcggcaacagaggctgcaatccagaaagccccctcggtgacagaggctacaatctagaaagctcgctcagcgacagaggctaccacctagaaagcctgctcggcgacagacactacaatctagacagcccatttggcgacagtggctacaacccagacagcccgctcagcaacagtgtctatgatctagaaagctccctcggcaacagcagctgtcatctagaaagcccgctcagcgacagaggccacaatctagaaagcctcctcagcgacagcggctgcgacccagaaagccctctcagtgacagtggctatgatcgctcgcaactctggcccctggctctgttggtcaagcctgccacagcccggaagcctctgcagcctccctgttgctgctgaaaaggac

SEQ ID NO: 23884 - DNA, 191 bp, Homo sapiens; identical to SEQ ID NO: 6854
  chr13:113255726-113255917
  hypo

SEQ ID NO: 23885 - DNA, 258 bp, Homo sapiens; identical to SEQ ID NO: 6855
  chr13:113554079-113554337
  hypo

SEQ ID NO: 23886 - DNA, 187 bp, Homo sapiens
  chr13:113984308-113984495
  hypo
cgggtgcgtgcatgggagcccaggtgcgtacatggaaacccaggtgcctgcatggaaacccgggtgcgtgcatggaaacccgggtgcgtgcatggaaacccgggtgtgtgcatggaaacccgggtgtgtgcatggaaacccaggagtgtgcatggaaactcaggtgcgtgcatgggagcccaggtgc

SEQ ID NO: 23887 - DNA, 484 bp, Homo sapiens
  chr13:113985425-113985909
  hypo
cgggtgtgtgcacgaaagcctaggtgtgtgcatgggaacccgggtgtgtgcatggaaaccggtcgcagctctcctgtgaagaagcacctgcccagccccggcttccatccagataggaggaatccacctcttcccaacagacatggtctttgctcctcatctgagccacaggattgaccatggcagagaccaggtgcatgacctgggggttgggggctcaggggcggctgctaccaggatggccttgcctctgtgagtgaccacagctgcggggctgggataccaggaggcacgggctgcagcatgggaggcggcccaggaggagatgccaagaaggcacagcaaggacagccagtgcaggagccacccgggtgcccacccagcagctgcgcacccccactgcccgagccagcctctctgcatctcttttcctgagaagacttcggcgtggcacagcccttacagggcgtgagccttctcagac

SEQ ID NO: 23888 - DNA, 508 bp, Homo sapiens
  chr13:114059960-114060468
  hypo
cgggtggcgggcgagggtcgcaatgtcctctgggtgctggacgagggccacgcctctcaggaggctcctccctgctgctccactcttgggctccaaggatcccccaggggccaggaggccgtggctgtgagggtctcgagggagagcctctcctctggggtggctttcggacaaggctctgcttccccactggcccagcgtctctggctctcccgctgtgcggtctccagggctctgggtgctgcctggcgctggtgcaggcgtggcgcggctcgcaacgctccctgcagctgccatcgccccacaggctttcatacctggtttgggtggttcatttaatgaggacagtgggttctcgcgaacatcatggctggtgatttcctcggcagccttcaggggctgagaagactctattagcagcggccttctgcattcctccagcgcaccgggcactgtcatgcccatcggggtgacaccctcaggccccgtacgccccttggatgatgcc

SEQ ID NO: 23889 - DNA, 715 bp, Homo sapiens
  chr13:114074589-114075304
  hypo
cgatgcttgtggattttgtgtttgtgtgttttaatctataatcagtttgtaaatagactcactttctgattctcacggaggggtttgatttgcggatggagaccgagtccaccctgtttgaatgcagccgcgccctgctcatgcgagctggccttctcttccatacagcagggtggagagggaagcccactttccggtaagcgggcaaaacaggtactacgaccgtgttacttatgctagcaacagttccgacttaccttaattgggtttcttttcctgaaaggtaattctcagttaatttccccacacccacgggtgctgggaccacactccatggacgtgtgtgacgtgaggcccttcgcccccgtgtgcctgtctctctggttcttctgacttaaagcaccagtagcagcacagttagtccagttattcggaagctcagcacggagccacattgctgcagcatagaaggccacggattcctccatcagcatggactacacttcccacaaaacgaacggggcatctctatggaaaaagcaaagcgtgtccctatccctgggacacctctacccctgggacacacctagccccaggacccgcccacccccgggacccgctcaccccgggacaccactacccctgggacatgcccacccctgggacaaccctaccccccccgacacgccctgggacacgcccaccccccaggacc

SEQ ID NO: 23890 - DNA, 110 bp, Homo sapiens
  chr13:114188365-114188475
  hypo
cgtggaagttctccgaatcctggttttgattggtcagattcttttttcactagcggcggtttttcttttatgtcttgttataaagaagtatctcattggaccctattatc

SEQ ID NO: 23891 - DNA, 541 bp, Homo sapiens
  chr13:114304580-114305121
  hypo
cgcagaacgttccagtcaggaccggctaagtcacacctttgtttcatttttctacatgaaggggcttattgctttcctttcgctaagtgtgagaggactcagcagctgtggtgagggaagcgtggaaggaaggaacctacctgggctttcttcccgtaataagggaagtagtgcagactgaaggtgccgttgggagggtagtacttgacctgcagcggctggccgagctcgcggggctggtcctggggaggagaggccactgcctgagtcaggcgggagctggtgtgtgccggtgtctgtgtgttgcgtttgtgtgcgtgtgtgcacacacgcgctgtgtaggtgcttgcataaacactttattgcatacttagcataaatcagatgcaatctttctaatcagtgctgagatctcagcaaggatatgatttgttagcatgcaaaatgcccagtgacccctccgtgtgcctctaacaacttgaaatgttggaaggatgacgcaggtgggtgaagctgggaggcggcttgcttgtctgtactc

SEQ ID NO: 23892 - DNA, 78 bp, Homo sapiens
  chr13:114312326-114312404
  hypo
cggcccgccccccgcacgtaccccacctggacagggtgcggcccagcatctgccccgtgtccgggttccagcagtaac

SEQ ID NO: 23893 - DNA, 531 bp, Homo sapiens; identical to SEQ ID NO: 23469
  chr13:114497796-114498327
  hypo

SEQ ID NO: 23894 - DNA, 218 bp, Homo sapiens; identical to SEQ ID NO: 6860
  chr13:114537027-114537245
  hypo

SEQ ID NO: 23895 - DNA, 936 bp, Homo sapiens
  chr13:114748186-114749122
  hypo
cgaacctcgaaagtggaacagggaggccgcctcccatggctgcctggatggcaggcacagtgggagagtaatgctctgaacctcccaatgtgatgaagccgaaagccgaggcggggccagcaggcctcccgggcacagagccacagagcccagcgtcacacgcaccgtgcacgcaagacagacgtgcacgagactgacgcacacacggccggaggtgcatgtcacagtcgactagacgggccgtggctccctgaggctggctgtggtgtggctagggcacagcccacacttcctgatccttcagctgatccccagatccccacaaacaaggagcaaaaagcacagaatcaaatgacgacacgttccacagggccaggtgggctttctgcggagggcgtggcggtggtggcagcggttctgggagagggaaaccccagcgccacttgtctatgggccgggacggcgtgcatctcactttgccggctctgcgctcttccttctcttctccctcccaaaggctgcggctttgcatgggcagcttgctggcgccactgggcgcgtcccgcagactttaaatggaatgagtggaggtctcggactgctgccggatgtagttctggaagctcttgtctccgatggggtgctccctgaaaagggggatgggagagggaatgaggcacagaccccgttgcctggtgctcacccgtggctgcgggagcttttcctgttcctaaatgtgacacactcacactgcaatccacacaaaaaatagaggagccaaaggaaccacagtgcccccggaagcacccacggtgactctgatgtgtgtgcacaggtgggtcaggcgtgcaagtacatgtgcacgtgtgctctccctgtggcacgtgtgtagcgcatatacatgtgcagatgtggaatatgtagagtgtatggcac

SEQ ID NO: 23896 - DNA, 229 bp, Homo sapiens
  chr13:114776257-114776486
  binary
cgtggggaggagggggccgcgaggggagtagggggctgcgtgacgaggagcctccagcaccgcaacgcccaggaggcgccaggttaggccatctgcctggcctgttcagccgcttcccacacctgacaggtcagatgctgctcctgccacggggccggcgacgagccacaggctcccgaaaaaggcaaggggttcactttaggaggggagaggtgagcgggacggggac

SEQ ID NO: 23897 - DNA, 248 bp, Homo sapiens
  chr13:114776788-114777036
  binary
cgaggggacgaaatgcaggagtcacctcagagctgctgtggcttgtgcatgagctacggagaaacaggggtagcgacgcagatgggactggagggggtgggcgtcccacagtctcaggagctgctgagaccatcccgcaggcaacatccgacggcaccgcggtgacccactctctcggcccagcgtgcagggtgcatctcaaagtcgaaagcatcaggtggggtcatggctctggggcgctgagtctc

SEQ ID NO: 23898 - DNA, 366 bp, Homo sapiens
  chr13:20392340-20392706
  hypo
cggtgggtgatttggggtagatgacattcatgacgccagctcttctggaagtcatagtaaggcaccgaggggtggctcctctccctgcagcggctgtcgcttaccatcctgtagaccgtgacctcctcacacagcgccaggacgaggatcgcggtgagccagcaggtgactgcgatcctggagctggtcgcagcaggccatcctgcacgcggtggaggcgccccctgcaggccgcagcgcatccccagcttctggacgcactgtgagcggttatgcagcagcacgctcatatgagatgccccgcagggtgctatgcaggcccacgtccccacaaagcccatggcaggcgcccgggtgccggagcac

SEQ ID NO: 23899 - DNA, 506 bp, Homo sapiens; identical to SEQ ID NO: 6408
  chr13:20979799-20980305
  hypo

SEQ ID NO: 23900 - DNA, 775 bp, Homo sapiens
  chr13:22243231-22244006
  binary
cgcttttttccccactaagtaaccatcccggcgcactgtacccaactggtcgaggaacgcccctgctgtacccatcactgctggctgcctcggagattaatgcgagcgactcgggtggtttatgagaagtgacacttaatacccagcttcttgtatctgccgccgagcagttaacgttaaagcccgctctgtaccaccgcggatgtgactgctgtaaataccacggggcagggctctcatgcttcagaaacacgtaagcaagacgcaccgagccagccccggacacccaatgaccctggactgcggcaaagggggggtgggaaaggaagaggggaggaccactcgctcttctctccttcctcctcgcccgggccggagcacgccttcctccccggagggcaggggaaggtcgctccaggtcgctggcacctccagcgcccccgaaatctgcaaattcatcgctccctttcgtcttcaggcgaagccctcccgtccggagtagggccagccccagttatgcatctccagcctttagctgactactaaggcggatccgacttctcccccataaccaggttttgattcgcttccccaccgcaggggttcagtctctgctttcgactttgcttctcagttgcacgccccgcagtgtggagctgcgctcaagtctcggcaactttcaccatcttgacccgagagtcgggccgtttctaagacaatgtgaacaaagaggagcagggggagggaaggggggccccgcgggagggctgtgggc

SEQ ID NO: 23901 - DNA, 1051 bp, Homo sapiens; identical to SEQ ID NO: 23056
  chr13:28491488-28492539
  hyper

SEQ ID NO: 23902 - DNA, 1793 bp, Homo sapiens
  chr13:28527202-28528995
  hyper
cgcggcttctgtgtggcagctactgagtgcacgctcgacctttgccaccctccgcgctgatggaaactggaggaggatgtggtttagacacaatgtggcccaagcgtccttgtttcctgaatataccccaaagtacaagtcccatctccagttttgaaagaattccccgaggaaaggggcttgagtggagtgggtggaggtgagaggggaagatgaggtgttggagaagcccggcgcacggggcctctattaatattaacttttattaagagttggcctttccccggggcttcacaaagcaggaagtcaagggcagtggaacagggaagggaactggcaggaagagaagaccttgagtaaattatttagctgtgacacgagattaagagtgaccccaccctcctccctgccccacacaccataaagtgggcccaggttggggagcagcgctccagctgccactaatcatggaagcccagaggcgaaatcagcttcccggggacccagaaaattgctggagtctggcgaggggcaaatcaggaagtgtctttgtcggagatgggacggaacccggcttcggggcgcaaccgggctctgggggagaccgcgtttgtccaggtggcaggccgcgccttctgatggctgtgaagagaaggagcgggggttttaagagccacagcgccaccgagagagtggaaaggagtagattagctcgcgcctgctatgcgaggcgactccccccgagacccacccgcagcccagcgcccttggccaggaggcccggaaagccaccgaggcggccgaaaggggccgcggggcacccctcagcccctcctgcggcggctccggctgcccctgctcagcctcccgctccccgcccggagtcccagctctcagatcggccgcagagctgggaacagaggccgcggggtccaggccgttccgcccgctcagccggagcagcagcgccgcctgccgggggcctcgcgcaggcgagacaggccagacgccggaggccgcgggcggctgcagctttgacgggccgaacacaccagcgctcccgttccgccttttgaaaatcaaatcccttgggcctggtgccaccatcgctcagcccaggtcttcgacgacgggtcgaaggccagtgctccaggccttcttcaccgagtggcttcggcgcttgcggcccaggttccccgcacctccgcgccgtagttgcgcgcaccttttgaaaagcttggcgtcttcaggtataaggacaaaaacaaccgcggacatcacaccattccaaagaagaaaaagaaagtgcccggaatctcagggcgcgacttccggggcgacgggcggcggcggagaggcgctccccgggcttcctacccggcaggaggccgcggcgccgggacctcgcctgccctcaccgcgcgccacctctcgggagacgccgcgaatctctccagggaatcccgggcagcggcgcagacccagcaaggaccggcagcaggccgagaccggccgtcttgggcgagagcagcgggacacgagcccccgggcgcccgctgggagcgcggggaggctctgggctcagggaagctgcgctccgagtggccttggaggacggtcaaggagcccgggccccgcggcggccgggagtggacgcgactggtccgcgccggccgcaggggaaggggcgggtcggcgctgcctgagctctatctgctctaatggctggggtagatccgcggagatacttgaataccaggccgaacgcttccccaaggcgtgttgtagacaac

SEQ ID NO: 23903 - DNA, 1254 bp, Homo sapiens
  chr13:28673915-28675169
  binary
cggagtccttgaaaacccctttggggtttatgccaggataagaagagactagaagaaagggacagctagtattttaatatgtaaatctgtttgcataatatttcctaggtaaactattcgttgatccaaccaaaattcggcggggctggggggtatcgttattgaggatgactcgctctaggggagaacgcggacgcattttcccatcagagttccctccataaatcaaaacctcaaaagaagagttaaagacgacacccaggtgtctacagtatccaagggccgggccaggagaggtccttggccacctggcgccgagttcgcggccgcagactcccacggacggcccagcacccgagcgcgcgggccgagctgccccagacccggcgcagcgcctcggcgaggccgtctgcgaagtccgggccgccactcgggaccgcggcccgagccagaggagagacttcggagaagagggaagaggacgcggggtgggaaacgccggggccgcaggcaagtagtgggcgagtccggagggcgcgaaagaggggaggggcgcgggaggcaatggaaggagcgagcgcggggaggagcgaggcggctgggccggaggaggcgcgcgcccgggtccacactgcggggtgggggctgagggaccgcgaggggctgcgagcgagcgagcggggccttaccgagcagcggcagctggccgccgtcgcgcgccaacgccggcatggcctccggagcccggggtccccaggccgcgccggcccagccctgcgatgccgcctggagcggcgcgcctcgcgctgcaggtggctctcttaaggatgcgcgtcaccgaccgcaaattccctcggactggtgcaaagtggaaggggggaggaaccctctccccagaggcagggaccgaggcgggagcggagaggttgggcagagccgagcagccggtgcctggcgcagcgctgcagccgagcccacgtgcccgccgcggtccgcagcctgtgctcggcggcccccggggctccccgactgcggcggggaagattgggcgcggtcccgccggagaagttgcactggctccgcggctctgccgccttgctgcccctgtgagtccccgaactctgtcgtttggatccggggcgtggggactgcagggagccacaaaccaccctcctagtgcgctgggatctttgaggccctgagaaaggcgctgaatccgctcggcacgctggcaactcccgccagcgcacaggc

SEQ ID NO: 23904 - DNA, 52 bp, Homo sapiens; identical to SEQ ID NO: 6871
  chr13:30910073-30910125
  hypo

SEQ ID NO: 23905 - DNA, 92 bp, Homo sapiens
  chr13:33113933-33114025
  hypo
cgacctttgtctcctcataattaaactcatgcatcctactttgaaacaaccacatttacgtgaggttgtggcgttctcagtgtgttacatcc

SEQ ID NO: 23906 - DNA, 165 bp, Homo sapiens
  chr13:45926327-45926492
  hypo
cgaacgcttccttgtgccagggaaggtggagcagtcatgactcaggcttcgggagcctcaggctcgcagctacaggcttatacacactcacatcaaatgctaatggggcccgagtcagaaagaaattagccagactaagaaaaacaagactttggaaatataaac

SEQ ID NO: 23907 - DNA, 155 bp, Homo sapiens
  chr13:46661291-46661446
  hypo
cgggcagctgcagctgcgcctggggagcatgaggctgccgccctgccatcacagaagggggcgggacttttacctcctcctggcttctgctggctccgtggagcacacagccccagccgtgcctcccgcatggcagcagccgctctagatgggcc

SEQ ID NO: 23908 - DNA, 82 bp, Homo sapiens; identical to SEQ ID NO: 6873
  chr13:52493838-52493920
  hypo

SEQ ID NO: 23909 - DNA, 216 bp, Homo sapiens; identical to SEQ ID NO: 6874
  chr13:74269514-74269730
  hypo

SEQ ID NO: 23910 - DNA, 148 bp, Homo sapiens
  chr13:77553615-77553763
  hypo
cgttttttgtctgaagcccggctgggtcgctggagatccagcggagtgtgcggagggaggcgtgttggataccttttaaaaatgagaagccccaggccgggcgcggtgactcacgactgtaagtcgcggcccaaccctttgggaggcc

SEQ ID NO: 23911 - DNA, 979 bp, Homo sapiens
  chr13:79170171-79171150
  binary
cgcgcgccaatacgcatgtgcgggctctgagcgctcagagcgcgcctcttccttcccggctccccgcggtgcgcacccgctggccactctgcgcacgcgcgccgggtgccccggcctaaggccgttgacctcgggttctccccggcacagtcgaatccacgccagggccctcaggccggtagctgtcctgcagtccgagcggagctgcgacctcgggcagctggaagcctgtgggctgctgcttctccaggcaggcggcggagggatgcaggcaggatgagcggcggtcccttcgccgccacccggagaaccgcggctggtgcccttgaaggccctgggatgcctgggttgggtgggtgagtgaacgagaaccctgagtgagtgaggggagggcgggtcccctcctggcttcaaattcaacccaatcagctctgccgatggtttgaaactgcacacgccgacccacccgccccgaagtctgaaagttatgccctggagacctgcgagctgcggagtgcagctggagagggagctgccccacgaggaggcctccagaataactcccggagtcggaacagcgctgggctgctgaagtttgcagcctccggatccgcgccccgccctgcagatccaccggatttcggggagggaatcggggggctgcccgtcctcccgtaaagctgacttgacaacaattacgaaagtttttaattagctccttgttataattcattttatttccagaactctccgaccataaattattcaaagagtaagccaacccgagcggggcggccgcgcgccttccccacgcgcgccgggctggctctggccgctcagctcacccgatgccccgtgagccagccccgcgccagaagccgcggtggcaggaaggtttgatcaaacattaaataacgtaatgtttgcgacaaggcttatctcacaagtggaaaagaggacctcgcgagaattagaattc

SEQ ID NO: 23912 - DNA, 807 bp, Homo sapiens
  chr13:95201113-95201920
  binary
cgtctagacccgtggcttgtttaaacacccgctgctaggccccactgccagagctgcctatccagggccgagaatgtgcatttctaagtagttctcaggcggtgctgatgctgcggatctggggactgtactttgagaaccaccggtgcagaccctggccaacgttctttagtctgatgcgtcggggagctgtaaagctgccatccttcaccggtgggcaagtaacctggtggcgccaccccagggccagacccagggccggcctcggtgcgcctctagccagaaataaccagcactgggttccgctcaccggcaacgccaggtgggggccatctgaccactcaacagttttgctttttcttcaaattcggatacttagaaggaatgcgatgaaattgggatgaaggtgttttgctggccccgtggacagaccagacctcctcccatcggagcctcgggtctcacaccagccccccaggcggcgcgcggccccgtctcgccaccgcggcccgggtcgttcgcgtcttccggcgccgagggtgcctctgggtcccagcaccaggctccgtggcgcgcacgcgcggcagcttcttctagccccgccaggagacggcccagaagggctatgcggcgcggcctcgctcctgggggtggttaggaacgactgtttcatttcctccttcacccttcaaatctcagtttttgcttgggcttgaaggaatgggccagggtatcgtggacggagagtcttacaaaatttgagtttttgaggtcagaatttaaaagtagctgccgaaacccgggatc

SEQ ID NO: 23913 - DNA, 99 bp, Homo sapiens
  chr13:95888756-95888855
  hypo
cgggatcaggatatttacagaagacattcccatccctcagatgggtcatgatattaaatcccaacaagcctgtctcggcatgtgaacgcgcgcgtgcgc

SEQ ID NO: 23914 - DNA, 76 bp, Homo sapiens
  chr13:96031649-96031725
  hypo
cgtcaggtttttctggactggatactaactgatacagtgtttggtaccagaatggtataaaaagaaatgaccggcc

SEQ ID NO: 23915 - DNA, 124 bp, Homo sapiens
  chr13:96409593-96409717
  hypo
cgtgctttccttcctccgttcttctctgtcctttcacgtgcctacatgtatttgcttcccggtaagtttttgggacccaggtcttctgagtctagatctgttgttcatgctcatggaccatatc

SEQ ID NO: 23916 - DNA, 166 bp, Homo sapiens
  chr13:99851637-99851803
  hypo
cgagactccgtctcaaaacaaacgaacaaaacaagactgtgaaaatgaactttacgaataaagcctaaagaagcaaataaaagtcatacttttgccttctataatcagtgttaacattttggcccactggaacctctctttgagggtagggactgtgttgatctac

SEQ ID NO: 23917 - DNA, 128 bp, Homo sapiens
  chr14:102418541-102418669
  hypo
cgcatgagccaccacgcccagtgtattcagattttcttcgtgtttcttttctcttccgggatcccatgcaggacaccacgtcgcatttagttgtccaccacggtttttttgtttgtttgtttttttcc

SEQ ID NO: 23918 - DNA, 502 bp, Homo sapiens
  chr14:102493497-102493999
  hypo
cgtaatgtttcagaatattccgtcaacctcaaggccacttgcttctgattggtgttagtggagcaggaaaaactaccctgtctcgtttcgtcgcctggatgaacggtttgagtgtgtaccagattaaggtgcgtctggtcggtggcctcttaatcccagcaacagatgtgtgtgcagagctcagtgagtaggaatggacctaacttgcctctgcttctgtaggtccataggaagtacacaggggaagactttgatgaagatctacggacagtgttgagacgttctggctgtaaaaatgaaaagatagcatttataatggatgaatctaatgtgttagattctggattcctggagcgaatgaatacccttctggccaatggagaggtaattaggtgacgtgttgcgttgcattacgtgttaccgggggaccagtaagtcagcactgtgctgtttcccaggtgcctggtctctttgaaggagacgagtatgccaccttgatgac

SEQ ID NO: 23919 - DNA, 127 bp, Homo sapiens
  chr14:102521617-102521744
  hypo
cgccccacccaacagagccgaccaggctgggaacaccgagaccgagagcgcgtggctgtgtctacaaaggcctcctctttgagggagacacgcgaggcacgggtggggcgatgagacaggatcggcc

SEQ ID NO: 23920 - DNA, 421 bp, Homo sapiens
  chr14:103655241-103655662
  hyper
cgatttaaaactcgcgccaacgcggctgcgcgccttgtcctccgcccaggaaccctggaggccacggcctcgcccggctcctgcgctggcactggacgtcccgccggctgtacctggcgccccgtggcctcgctcccgaccgctgccccgcagaggcctcccgaccgccgaggccctcgccacgcccgggtgcccccagggggcgccggcttccacccacagagctccccaggcctgggcgggcgcagggagggcgcgaccggggcgcacccgcgcgggaacttggcagagactcgcgggacgtggcgggggcgcctcaggaaacgcgccgcggggctgcggggtcgaggggaggggactagtgtgcaggggccaccctctccccagccccgccccccgagtccagctccgcccctgatgc

SEQ ID NO: 23921 - DNA, 677 bp, Homo sapiens
  chr14:103745232-103745909
  hyper
cggacccggcaggcacctggcgggcactgtgcgggcagggaaccagggagagcaggagggcgcgggtccgggccaaggctggcgggggtcgccgcggcgcgaccgcctcctccgccccggctccgtgggatgcgcgtccgccctcccaggccccttcctcccgccctcccccgccccccgttttcctcccctcccctcccgacccgccccaggccagacccccgcgcgggtcctcgccctcccaggacccttcctccctcccctcccctccccgccgcgtcccggaccctgcgggctggtcccgcgccccgccagggctgccggggtgtgctgctggggagcgtggagtgggcaggaccacgctggacacgcagttcgcgtgcggccgctccccgagcagtgcgcggcgtgggcggaggagcggctccgcgaggagatcgaggcgaacgcggcgcccgcgttgctggaggtcgtggacgcggcgggcgccgagcacctggtcacgctccaggacctggacatccgccacggcgacggctccgcggtgctcccgggcgtgtgcagcgaggcctcgttccgggccgtgaggccgccgagcaagcgcctgcgccggccgtgggaacccggggccgtcccgcgggtgctggtgggcacccaggccgacccggacgacgggc

SEQ ID NO: 23922 - DNA, 1294 bp, Homo sapiens
  chr14:103988427-103989721
  binary
cgatgatggggtcgaagagatccttgaacacttcgtaggactcctcgtcgcccgccacgcagcccacggtcatgatgtacgggtggcctgggggagggggcgcgggacggggacagtgacgtcactgccgggcccgagcgcgctgctgaggaccctgcggctgcgcggggggagggggggccgggaccccggccccgaggggtcgcgtacccgggttgtccacgcctgtctggatgacgtcgtccagcgtgaagccgctcggcgtgctcttggcgcgcagctccgcgtacagctcgggggtcagcaccttggccatgtggttgttgtgggcgctcaggtcggggaactcgtcctcggccgggaagcgcagcttcagtgcgttgtggctgttggagaagggcatggcggcggcgggctgcggggagacgcggggtcagaggggaccggcacgccggggttcccgggctcccgcgtaccactcaggcccccgccgccgggccccccggcgccccccgggacgcggccaaggtcagcggggtccgcagcgcgcgcggggagcgccatcatcgccggggacccccggccggtccggcgcgcgctccaggcgacgcgccccctttgcacgcagcgcccctagcccgggcgcggacgcccccggcccccgggcccactcaccgggcggccgggcgggggcgggggcgctccgtccgtcggcagctcccggagcgacgcaggcgaacagcggccgctccgcgctcccgcggctcttaaggggcacaacgcgggccgcccattggcggctatttatagcccattcattccattggcccgcgccgcggggtggtgccgccgctttgtccgccgcccgcagcccccaacaccctggccgcccacccgagctgtcccctcgctgggaccccgcgcagcctgcccagtcccccgcccaagacctcgaggccgaaacctcaggtccttggatatctggatcccctcgcacgcccttgcctctgggcgggaaactgaggcggagagcctccgggcactcgaggacgcttgggttcatccgcatcctcgagcctgcccgcctagtccagccagcccccgcggcggcggcgaggggccgggcgaaagctttcggggcttccgcagcaggtacggcccccgccccacccccggccagtgcgagctggcccggagccgccgaccttcctcaaggtgcccgcaggcgtttcctgggcgatcctggtgcaaagcgaaggcgcgcgggaagcgcagtctggctgcggcccagccc

SEQ ID NO: 23923 - DNA, 138 bp, Homo sapiens; identical to SEQ ID NO: 6886
  chr14:104047694-104047832
  hypo

SEQ ID NO: 23924 - DNA, 1190 bp, Homo sapiens
  chr14:104047919-104049109
  hypo
cgggtaactgaaaccatggaaagaaaaaccatggatggaggggacagctgtgctgccgccatctcccttacacagttgagtaaaccgaggcacagaagaaaatgaagtagccccagatgacgtaggaaatggcagaactgaagggaaaagcagagcagggggctgtagagttaaactgttcttcattccggtggcactagacctgcccgggcggccagaggacacgtggctcctgtcctgtctgccgtgtggctaggggacagccgtgcttgtgctgtgccgtctgagtgtttgtttctgtctgtgggaataaaggggttgccagacaccctccctgctctgtggagggagggtggaatcatgcctttggccactttgcccactcccccttgggccggagcatcagcattagctgtgccacagggtggtatgcgctctgctgaaggtggcaccttcagggaaaggcagtctgccggggaggctagcgagcaccctgggtaggagctgagcgtggcctccgcgcctcctcatgggaagtgctggagatgcaggagcccctgagccagagcccagcgctcttacaagagacctcacttcctgttcggggactggggctgctaagtcagagtgcgcctcctgcacccgccaccctggatgtggttccattccctggtccctgagccatagctggggggcatgagactgtcccctgggctgctttggggaccctacttcagggcagccctgccactccctgtaacgggctgtgggtcctgccctgtggccttcctacctctcttgcgtgtgggtgagcctgagcgtggccaccgccctgggagtgccacagaggcaagcggcactggtcctcatgtgtaaacagccccaccagcacgcggggctggagtagtcaggccgggacctgtcccaggaatgggcaggctgttaacctaggatgcattcaagttaggacacatttcattcccgtgtagcggtggctcccagttcctccgcagaacctgcaggagtgtgcgtgatgaaacccgtcactcgttgtgtatggtagacatacctgcctgggtcgtaatcacttgtgaagaaaatgaattatgctgtgacctttagatacgattcacataccataaaattcaccctgccttttttttttttttttgagatggagtctccttgtc

SEQ ID NO: 23925 - DNA, 457 bp, Homo sapiens
  chr14:104202370-104202827
  hypo
cggtctccaaggcgagcccaccaccactcagtctcgctttcgtccttgcgcctcaggatggtgagggcgtccccttcgtggaaggacagctcgtcactgttctgggcctcgtagtcccacagagcatacgccacacctttgttcatcacacccagcttttcctgcacccctggagccagagagcaatggtcaggcctcagcagagggtggcctgcagcaagggaccctgctcgaggaacaggacacagtcgtgctgctgccgaggctgctctcagcaggccccacagaggccagcgagggagatgagacactattgaagactagggcccccacccgatacctcccctgcccggcccagctgctgctcctgctgccggccctttctaagtcctgcaggacagacaggacaaacgagctcctgagccccagggcaagagtgtgctgttcttaaggtgac

SEQ ID NO: 23926 - DNA, 1219 bp, Homo sapiens
  chr14:104617597-104618816
  hypo
cgtttctagaacccagtctcagggttctagagaaacctgtgtgtccccccagttcagggaagggggcagtcaccaaacagggtgcatcccagcgtacagctcagacctgggtgggggagctggtggagtgtgcggcggggggtggggccctgggctgtacccgatcctgcggctcttgcgccccttcggtgagctcatgtgccctctaggagcgtctccgagggaggccttcgcttctgttgacacctttacagcagcactgatttgattttccacctgccccaccggggctggagacctgaagaggaagggagagggtctcctgcccctggctctgccttgagtgagtgtgggtgagggaggccctcgtggctctgaagagacgttgcttttaaggggccctgcttcttgccagtctcctgcgtgtccccggccaggcggccttagctgacagtggtccggttgtccgggagccgcaaacctgccttgttagccgcaggccggggcgcttaatgacggctggggaaggtggacagttaacaaggacattgtgagcctcacgatgaagcccgatcattattttcctgctgggcttgtgtgggtgaaagtgtttgggcttattaatctgttacggatggtgcggtggccaggcgggagctcgcagcgtcatggacggtgagagtgctggtgggctctgggtgccggccctccctccccaggcactgaccctgcctttgtcccttgctgtcctcaggatccttgcctctctgccctgcttctcgacaagctaccagcacctggggccctgccagcctgtcgcccagaggccgagcgccgctgtgacgtctgcgccacacacctgcagcagctcacacgggaggccatgcacctgctgcaggcccctgccagccatgaggaccttgacgccccccatggaggccccagcctcgcaccccccagcaccacgaccagctcgagggacacgccaggaccagcgggtcctgcagggaggcagccaggacgagctgggccagacaggaccaaggggctggcctggtcccccgggcccagtgtccaggtgtctgtagcacctgcgggtcttggaggggcgctgagcacggtcaccatccaggcccagcagtgcctggagggcatgtggagtgtctcgcgggtcaacagcttcctcccgccggcgtgcctggtgagtgtcttgctcagc

SEQ ID NO: 23927 - DNA, 825 bp, Homo sapiens
  chr14:104639065-104639890
  hypo
cggtggttgctggcagcttctgatgggaaaggaggctggtcctacacatgggccgtggtgggcatatggggtgaggggcttgtggagaggaagctgaacccctgccgaactgaaaggcagagggcttaggatggatccaaagaggcccctgagatctcggtgcccctggttggcccccggggacgccagtagccataaaggctccttgcgtggtgtgtggtggggcctgacgcctgcgtggcccccaggcaagtcgtacaccatgatcgggaaggacagctcaccccagagcctgggcatcgtgccctgcgccatctcctggctcttcaggctcatcgaggagcgcagggagaggacgggcacccgcttctccgtccgggtctcagccgtggaggtgtgcgggcgcgaccagagcctgcgggacctgctggccgaggtggcccctggcagcctccaggacacccagtctccgggagtgtacctgcgggaggaccccgtgtgtggggcgcaggtgcgcctgcctactgtcccaccttgggggaggggggctgcacttggccctgagccactgaagacgccgctgcctctgcctttcctgcagctccagaaccaaagcgagctgcgggcacccacggccgagaaggcggctttctacctggatgcggccctggcggcccgcagcaccagccgagcgggctgtggcgaggacgcccgacgcagctcccacatgttgttcacgctgcacgtctaccagtaccgcatggagaagtgcggccggggaggaagtaggtgccacacccgcactcccgggcccctgtgggatgc

SEQ ID NO: 23928 - DNA, 637 bp, Homo sapiens
  chr14:104640046-104640683
  hypo
cggaggccgcagccgcctgcacctcatcgacctgggcagctgtgaggcggcggctggcagggccggggaggctgctgggggtcccctgtgtctgtccctgtcggccctgggcagcgtcatcttggccctggtcaacggagccaagcatgtgccgtatcggtgagtgtagggcctgggcaggtgccgaccagggtggccccttggtgacctggtaaatccgtgtctggtgtgcccggtgctgctgtggcccccagctcctcagggctttgctcctccaccacctgacaggcctcgctgcccgtgggctgcctggggccccacgctgggctggtgccggagctgggtgggaaccagactgatcccagggctgcccttggccagcctgtccccgaagctcccttcccaaggccttggcatctgaaccgcctcgacccgcagggaccacaggctcaccatgctgctgcgtgaatccctggccaccgctggctgccgcaccaccatgatcgcccacgtgtcggatgcgccagcccagcacgcagagacactcagcaccgtgcagctcgccgcccgcatccaccgcctgcgcaggaagaaggccaaggtgctccccacctcctgcccgccccatctcggggcc

SEQ ID NO: 23929 - DNA, 657 bp, Homo sapiens
  chr14:104641166-104641823
  hypo
cgctcccagcgtttggtgggacatggttggtggtgcctgctgtagttttcatcacagtgaccgcagcattggccctgtgctctggggagggtcggggaagcgggggcgtgtaggggagactgggctcggcagctccacttttcttcccccagtacgcctccagctcctctggcggggagagctcctgtgaggaaggccgggcccgtcggcccccgcacctgcggcccttccacccacgcactgtggccctggaccccgaccgcacgcctccctgcctgcccggtgaccccgattactcctccagcagcgagcagtcctgtgacacggtcatctacgtggggcccggtggggcggcgctgtcagaccgggagctcaccgacaacgaaggtccgcctgacttcgtgcccatcatccctgccctgagccgccaccggccctccaagggtccccgagacgcagaccacttccgctgcagcaccttcgcggagctgcaggagcggctggaatgcatggacggcaacgagggtccctcaggaggtccaggtggcaccgacggagctcaggccagccccgcccgagggggccggaagccctcgccaccagaggctgcatcccccaggaaggccgtgggcaccccgatggctgccagcacccctc

SEQ ID NO: 23930 - DNA, 855 bp, Homo sapiens
  chr14:104643415-104644270
  hypo
cgtcttgccggacacgcgtctctggagcggtacgaaggcctggcgcacagcagcagcaagggccgggaagcccctgggcggcctccccgggctgtacccaagctgggtgtgccaccctccagccccacacacggtccagctcccgcctgtaggagcggcgcagccaaggctgtgggggcccccaagccccctgttggtggaggcaagggccgtggcctagtggctggtgggtcgcgggctctggggccttcggtgaagctgtctacggcctctgtgacgggcaggagccctggcggccctgtggccggtcccagagcagccccacgggccgggcccagtgtcggggcgaaggctggccggggtaccgtcatgggcacaaagcaggcgctccgggctgctcacagccgcgtccatgagctgtcagccagtggagccccgggccgaggtggctcctcgtggggctcggcggactcagacagcggccatgacagcggcgtgaacgtgggggaggagcggccacccacgggcccggccctgccctccccctacagcaaggtgaccgccccacggcggccccagcgctacagcagcggccatggcagcgacaacagcagcgtgctgagtggagagctgccgcccgccatgggccgcaccgcccttttccaccacagcggtggcagcagtggctatgagagcctgcggcgcgacagcgaggccaccggcagcgcctcctccgcccctgactccatgagcgagagtggggctgcctccccaggcgcccgcacccgcagcctcaagtcccccaagaagagggccacaggtgggtgcagaggtgcacagccctctacagtttac

SEQ ID NO: 23931 - DNA, 259 bp, Homo sapiens
  chr14:105103493-105103752
  hypo
cgggcaccacccgtcgcccgagacctgtgtcgccacccactgaggaacgggcaccacccgtcgcccgagacctgtgtcgccacccactgaggaacgggcaccacccgtcgcccgagacctgtgtcgccacccactgaggaacgggcaccacccgtcgtccgagacctgtgtcgccacccactgaggaacgggcaccacccgtcgtccgagacctgtgtcgccacccactgaggaacgggtacgacctgtcatccgagac

SEQ ID NO: 23932 - DNA, 39 bp, Homo sapiens; identical to SEQ ID NO: 6895
  chr14:105214099-105214138
  hypo

SEQ ID NO: 23933 - DNA, 85 bp, Homo sapiens; identical to SEQ ID NO: 6896
  chr14:105472075-105472160
  hypo

SEQ ID NO: 23934 - DNA, 492 bp, Homo sapiens
  chr14:105511981-105512473
  binary
cgcgtattttccacgagtgcctgtgcaggcaggtaaggatttaggaaaggtctggaaggatgtgcaaaatgttccgcctgcgaaggttccgcggtggcggggacactgctccggctccgctcccgcccgcccgagcgctcggatggggccgcctctgcactgcgtggccacaggcgcggcccggctgcccacgggcgccctttgcagctgctgccccctggcggccgcgggcggctactagcgggaaagcgaaacccgcccggtccattcaagccccgctgcctggcgccctctagggtcgttcttgggaacgggcggacctttcgtcaacactttgcctgcaagatcccccattgggggaaccgaggaggaagttaaaggaagatgtgtgtttttgagcgctgctttgtgccaggctcatcttaggtgtgggacgtgtactatctgaattaataccccaccaggcctgtgggacagtcactgtcaccattc

SEQ ID NO: 23935 - DNA, 319 bp, Homo sapiens; identical to SEQ ID NO: 6898
  chr14:105546630-105546949
  hypo

SEQ ID NO: 23936 - DNA, 173 bp, Homo sapiens
  chr14:105739475-105739648
  hypo
cgtgtgcggtgtggctgaatgtgcctctctccagggctctgaggtgcggcgtgtctggcaagggcttggtttgggctggctggcaggtgctatgcccctgactgccctgggctacagtgggaatgccccttttcctacagccacatgccccagcgccaccgccttccccaacc

SEQ ID NO: 23937 - DNA, 528 bp, Homo sapiens; identical to SEQ ID NO: 23066
  chr14:21100641-21101169
  hyper

SEQ ID NO: 23938 - DNA, 166 bp, Homo sapiens
  chr14:31027396-31027562
  hypo
cgtgagccaccgcgcccggccctcaaactgtatttttgacaaaggctaaaggtatgctgtcatggtttggtttgtactgatccgtttaggtaattcaatgttattagatgtgaggatgatctggtggcaacatcaatcacagccataaaggtcagagttatttagc

SEQ ID NO: 23939 - DNA, 284 bp, Homo sapiens
  chr14:36789340-36789624
  hyper
cgctaagcgcctcctaaactcgcagtgaagcttttccacattcattctctccaagcctgcctctctcggagccgggttttcacttaggccaacctcacccactcttggggaggacagctgcaaggtaaacgactctgcaaccggtaccgccgtcctcctcactccgaccgaggaggctgggcccgggctccttccacacctcggcttcgggaccgcatcccacacctctgcaggcctagctgcccccggcctctgctagagaaaaagaatggcgaggagggacc

SEQ ID NO: 23940 - DNA, 1091 bp, Homo sapiens
  chr14:36974427-36975518
  hyper
cgtggcttcgcattcatttgaatgctagaaaaaataaacacacattaagacttttgaaggctccatttctgaattcaagagagatgaaacaaattcgcccaaaagatagaaatctttgcctcggaaattatcggagaatattaacggagagggaggggagcgcgcgggtcgccgaggaaggacgcgggtacggccccttgctttggggtggcagagccgggctcaggagccagccaagctgacttcgcgaggtggcgcctgggcctttcgggggaaagccccgacggcggagccgcggctgggcggggactcaaatgctggcggcctctgggctggggccgagcagggggtgccgaccgcgggaagtctgggcggccgccctcccacccagacgagccgatgctgggccgcggtccctctcagctacctcgcttgcccgcctcggggcccctggagaggggtctgtgcctcccaggcagggaagcgtcttgatgtgcaccccggcgttcaccaaccaaataagggcctcgctcacacagtcgatgtcatgctgggtattaaaagggttgtgctgcagctaaaatatctcacagtgtgtgtgaacctcataaaagggaggacccggattccaagcccctcgaagtccccaagcagcctggagggtgggggactcccctctccttctctccacactgagcccccgggcaagcccaggcctcctcctgcgccggggtccccgggctccgaaactgcgagagccctgcggagcccggccagaggggcagagggtgggggctgggggcggggacctggggggtgcagcccagccagaacccgcggcctagcctgatcgcggggagccgggatccgccttccatcctgggaaacgactcgggttagggaagcgggatgggctccgctcggagttcccaggcagctggggcgccctccaagtgacgcctttgtccaggctgcgctcgcggagaataaagggggcgctgtccaacctcaggttcggggaaaaccaaggaaccaagggactctttttctaaaatgccctctccaaactacagggaggaggaatgggacac

SEQ ID NO: 23941 - DNA, 915 bp, Homo sapiens
  chr14:37132453-37133368
  binary
cgtgagctccatcagccgcattctgcgcaacaagatcggcaacttggcccagcagggtcattacgactcatacaagcagcaccagccgacgccgcagccagcgctgccctacaaccacatctactcgtaccccagccctatcacggcggcggccgccaaggtgcccacgccacccggggtgcctgccatccccggttcggtggccatgccgcgcacctggccctcctcgcactccgtcaccgacatcctgggcatccgctccatcaccgaccaaggtaggggctcagaggctgggcgtgtggatgtgcagcgtctgcccccgcactctcgcggaggtcccagtatctgcagcctcagggacactgtctttcccaccacctgaggctttttcctttggaaacgtaaggagtcttcctagggggtgttctgatctcattaacttgaaactcatgcccctggtttccttgccacacacagtcttctgcctcatctcaaactaccagacccataacatccccccatccccaacacatggttcgcattttccaccctcccccgcctctcgcgccgaggcagcctcagcccggcttgctcacttggagagtgcggccggggctggacttggggcgcagcccgggaggcccgagcctgcttggggctgccggctgcagactccgctgtgggcagagcagcttgcttggggatcactacggccgggagaagtctggccgggaggagtccagcacgccttggaaattgaagtattctccgattctggtaatcaggccaaatttgctcaggcaggaagttcaaatgtcacctaattggtttcgttcttatgcttcacttcattttcctcggaaatggaggtcccgaagttactactagtaacttgcatgtaactcattcccagac

SEQ ID NO: 23942 - DNA, 849 bp, Homo sapiens
  chr14:37135434-37136283
  hyper
cgtgggtcagagaatttggaaaggcctactctgaggggagtaaaacttcaccaggccctgggctggaagcacaggaggtcgcggctgggcccagcgccctcgggaggccaagggcagggagccgacccaaggtctaagccctccagctctccgtcgcgggtttgggtcccgtctcaagagtggggcgcgcgggctgggcctccggcctgacaccctctcttctctccatcagtgagcgacagctccccctaccacagccccaaggtggaggagtggagcagcctgggccgcaacaacttccccgccgccgccccgcacgcggtgaacgggttggagaagggagccctggagcaggaagccaagtacggtcaggtgaggaggcgagggtcaggccaggtgggccgcgtggcggcggggatttaggcgatggaacactttgtgatgggtccctttctgagcttcccgcgagagaagcccaggctggcgtccctttgctgctacgagccagatccttcgtggactggggcgaagcagaggcctgagccttggaaggcggagctggggcctcgacccccgccaggggccgggagcgctcgtcagggcgctgggggtctggggcggcagctccccggggcgaggctctgggaagcgcctccaggcctgtcggcctccgggagcttggggaggcggctcccgaagccctttcggcggctctcgttgggggtagagttaaccaaagaaggcgcttctgaagggccgagcggagcagccctggggcctcagagccgcgccttcacgcccgcgaaacgcgcgccccgggtctcggccccacggtgcgactgcggctgc

SEQ ID NO: 23943 - DNA, 142 bp, Homo sapiens
  chr14:58599581-58599723
  hypo
cgtgagccactgcgcccggccaacccttgtccttttaaggctctgccacacctcttcaaacaggacagagctcacacccctttccaggtaaaggtgtgtgtgtgtgtgtacgtgcacgcacgcgcgcgctgatggcaatgtc

SEQ ID NO: 23944 - DNA, 876 bp, Homo sapiens
  chr14:61104155-61105031
  hyper
cggcgaggccccctggcagatggaagctgctgactgatgggggctgccgagcgcgagggagctgagtgaggcccttgcgccctaggcggttgcaccccggacccctgcagctgtggacgccggagctgtgcgcagtcatcctgagccagcccgcggggcccgatcggaagggacgcctctcctaagagctggcctggagtcctggagcctccaagcgggcaagtaggggccgcaaaggctgggctgggcctccgctgaggccctcgggggcctctgggccctcatggcctggaggccgcgcggcccaagcccctagagcagaggccgcgctagcctgcaggggtcgacgcagggccggaggcagcggcttttccttcccactccgggttgaccctaaagacacgatttaacgtggcggcggcagctgcccacgctgtctggaggagcagggcgcctgggatgcggcggcgaaactggcccggaggggggcccaggcctcacgcgcccggctctctcccagctctcctcctcctccttctcgggctcagaaagccttccagccgcggccccagccctccccccagcctgtgctgggctccgctttccctccatcaactccaagccgaattcaatccgagaaggctcctttgagcttttgtgtttgctgggggagatgtgggcgcaggagggatcgcgttacaactttcatttcctgaaatgtttgagggaacatccagggtttttatccccacatcaggccgggcgatgggctcgagtttcaggccttgtcactcagctgtcaccaaacaaacgaagctctcagagcccaggagagggagagctacctgctattcatgacccctggagcaggtgatc

SEQ ID NO: 23945 - DNA, 959 bp, Homo sapiens
  chr14:61109043-61110002
  hyper
cgggcaggaggcgcaacgcgctgccagggcggctttatcctgccgccacagggcggggaccagcccggcagccgggtgtccagcgccgctcacgtgcctcgcctggagcttagctctcagactccgaagagggcgactgagacttgggcctgggagttggcttcggggtacccaaggcgacgacagctgagttgtaccacgaagctcaggccgaggcctcctcccttgtctggccttcgaatccatactggcagcctctcctctcaggcactccgcgggccgggccactaggccccctgctcctggagctgcgctatgatccgggtcttgagatgcgcgcgattctctctgaaccggtggagaggaggctctgccccgcgcggagcgaggacagcggcgcccgagcttcccgcgcctctccagggcccaatggcaagaacagcctccgaagtgcgcggatgacaggaaaagatcttcagttcttctgccgctagagaagtgcgggatacaagcctctattggatccacaacctggagtcctgccttcggactttgccaaagacttgcaggcggtggggaggcagtaggaaatgaagccccctccagcctcagccgccgccgcgttcggtgcagcagcagcagtgccactgccacagagcagaggaaggcccgctccgcgcgagttctgtgccaggtgtcccgttggccctcagcggacaagggagagccgctaataagggtcgctgctcagcaaactcagagctcatccataagtgccaacgccactgcttctttctggaagcttccactccggcccggggtccggccccagccacgctgtcctagcccagagaacaggttcaagaacggtggtgcccagccccagcggtgcccttctccgtccctgtagctcgctgggctcttgagcccctacccactaagccaaaaattcgggaacc

SEQ ID NO: 23946 - DNA, 567 bp, Homo sapiens
  chr14:65239277-65239844
  hypo
cggcagggggctgaaggtacctggacacccagcaggtggagctcccgctcgaaggctgtgtgcacccggtggaaggactcggccgtgctggcgtccagccccacgtcctcgggcagctcgcggtgcttctcgtcgatgaggcccaggatctcggcacccgtgtagaagtagcggtgcaggtcataggaggcggccagcagctgcatgcgcgtgtcaatgagctccaggaggtctgcccacatctcgttcagcccgtccttccactcggcgatggtggccgcctcgctgtggcccgcgtcgatgagtcgctcgatgaaggcattcacattgtccacccgctcctgcccaatcgccccggtctcccgggcaaagtcccggaacttgtcccgcagaagctaggcatggggcagacagaaatgtggttatggggggcacaggggttacaggtgtcaccagcttagccaaagactttcccaggcagcaactgcagctccgggagctgcgctgtcacaccttccccagggcaggcctgcatcggctggtcccgcctcacactggggaggttac

SEQ ID NO: 23947 - DNA, 875 bp, Homo sapiens
  chr14:70654358-70655233
  binary
cgcgcgcgcgtgtgtgttgggggatcgggggagggttagttatatatttcgattctctccaccgagtcccggatcacgcagaccaccaggggctggagagtgcagcactggagaaaccctccttctccctcgcccccttggccccagcggtgggtgctctggggctgcagctcccgacccgcggcggtggagtcccgagattggggtgagcgcgtgcgtgcgtatgtgcacgcgggcgcgcgccgagtggataacgcgcttccctgctagcccccaaacccggcggacactcacagcaccagaagcacaacacgccctggcccaggtggcacacatatgccgacatgcatccagcacacacaacacagcagtcagtctccccaaacagcacccgctaccaacccagcatgctcacgatccaactgtacccacctgcccaggcatctctctctgcccctccccacccggcggcaccctcctgtagacacccactctgccagatctgcccccccaacactgcatacacaatgtacactttccggggcaccctcaccccacttctcctggcactaaatccacaggaaggcggttcatatgaatgatcttgagaaataacttaaccccgttactcacaatcagggatcctcttaggggcatcccaagccccccaacctctacctcccatgtctcggctgcccgctaagggggaagggcaggaggctcaccccattactcaccgtttcctctcggcctcccgagcggagtgggcaagggaggggggtgaggaaggtacgcgatgcccccgccgcccggcgcctcaccggtcgcagcggctcatcgcccccgcgggctgcccgccggccgcagccgcgtcc

SEQ ID NO: 23948 - DNA, 148 bp, Homo sapiens; identical to SEQ ID NO: 6907
  chr14:73238412-73238560
  hypo

SEQ ID NO: 23949 - DNA, 62 bp, Homo sapiens; identical to SEQ ID NO: 6908
  chr14:73390972-73391034
  hypo

SEQ ID NO: 23950 - DNA, 420 bp, Homo sapiens; identical to SEQ ID NO: 6909
  chr14:73391900-73392320
  hypo

SEQ ID NO: 23951 - DNA, 143 bp, Homo sapiens
  chr14:73602342-73602485
  hypo
cggaattacaggcgtgagcgactgcacccggccgcttgggggtggatttttaaagaaactttagaagaatgtaacttgcccagataccatgtaccgttaatttcattttcggttttttgaatacccatgtttgacatttctcc

SEQ ID NO: 23952 - DNA, 167 bp, Homo sapiens
  chr14:75749334-75749501
  hypo
cgtggagggttattctacttcaaagatgagcaaattgaagaatggttagaataaacaactttcttgatattccgttatcggcattagaatcttcctgctcgttatcgtatccagcaggctgaactgcctcttgatacttggttaaaaaaaattttcaggccgggcgc

SEQ ID NO: 23953 - DNA, 809 bp, Homo sapiens
  chr14:77591037-77591846
  binary
cgggagctcaggaatggtcgctattgtgacaaatagaaaacccgccaggagacagagaggaggtgggtccctggaccgcggtggcacatgagggctaagaacctcccaggaggggctgggctcggagcgcgctctcggagacgcggtgatgcgcggggcccgggccgtggacaagactgcagtgtcctgcactacctgccgcccactcatcaggccgattctcctcaccttacgcttagatgagtttcgagtaagaccactgctggcatcaagagtctgggcccatgatctcgccctttcgggctaggcgaggcagacccaggttggctgcggcccgcggtccccgcgcagccaacactggcagccaagcgcggggcgcgcgcgccgggagagtggagcgcggaggcccgacggcgccccctcccggcgggcccgagccacggccgcgggctctggcgggtgccggggaggccacgcgcgacggcgtcgcagccggagcccagacagacgccccacgctgcgcggccttcatcccacggctggggcgatggaaaggtggtcccgacacgcgcaggggtctgaggaatcggcttcgggattctgtggtctttgtggtccgcagccggcaccactgcttcctgtaatttaattttctctcccgaaagcgttgctaattaaatcctttctccggcgagccgtcgccccccgcccctgctagtctgtttattaagtacccggcacctgcgagggaatttttgccctcggcggccggcgggtcaggtggaggggccgcgctgccccttagctgc

SEQ ID NO: 23954 - DNA, 111 bp, Homo sapiens; identical to SEQ ID NO: 6413
  chr14:89875711-89875822
  hypo

SEQ ID NO: 23955 - DNA, 1142 bp, Homo sapiens
  chr14:90849401-90850543
  binary
cgacccgccgtagaggaaaaggaaaccccaaacaaaactcgggcgcagagcctatttctactggccaaagagcgccgccaagaccccttccgtccggggctgtccgcgctgccactagtaaagatggcggccataggcggagccgctcactccgaaggccgcaggctaccctgccggccacgaccattcacgcggagccctccacgcccttcgcggcttgacgcattgcaggtgcagcgcgaccaatcagacggcgcggctcttttcggccaaccactgcagggtcgcgccggcctatcagagcgtccttgtcaaactgaacgaggaaagaagcctcagcagcgccaactaagcaaccggctacagaccgcgttccggtgcgtgtgtgacgacaccgccgtgtgctcctccgctgggagatatagtgccctcgcccttgcctcgccccgcccgcgagcgctccaaaggcttgggcgtgcggcttgctcttcctctccgcttgacgggcggtggttcccccgagacagaaacttgactgaaaaataataccaaatacccgtgctgcggcccgtggccctccatagggccacctgaactagcctcgcctgtccccttgctctttgccgttcgtccttcgcgttttgtgaaaacagttggcgccgcagaaatgagataaacgcccctgagctcgaaacccgcactcgaactgccaccgagccgacccttcctgttttggaactcagggcccggccacccgagaagcaccctcatgggcactttgtttctacaagggcccgtttccatttccttcctaaggtttccttatcccctgcggcaggaggggcccgctgggctcgggttttcagctgcgttggagctgcagaggctgcggagtgaacgcggccaggagcccgcctgggagcgcgcagcgctctaggagccgagagccgctgcttggccctcgctggccgggtaaaccgaggggaagctcctggcctcctttcccttaagccccttattgcttctgtggggaaggccctcctaggtagaggcgaaggaccggggagataacctctcccatgggccacatccgctgccatggtctgtgtcgtgccagaaggtacctctcagccctcagtgcc

SEQ ID NO: 23956 - DNA, 259 bp, Homo sapiens; identical to SEQ ID NO: 6918
  chr14:91757493-91757752
  hypo

SEQ ID NO: 23957 - DNA, 857 bp, Homo sapiens; identical to SEQ ID NO: 6919
  chr14:91805557-91806414
  hypo

SEQ ID NO: 23958 - DNA, 822 bp, Homo sapiens
  chr14:93154446-93155268
  hypo
cgacgcgctgccgcactgcatcaagggctacctgctgcgcagcgagcccaagcgcgacttccactttgtctaccggcccctggacggtggtggcggcggcggcggcgggagcccgccctgcctggtggtgcgggagcccaacttcctgtgaggccctcccggggcgcctcccctcacccccaggcgcacgtctggccccgcctctggctgcgcactcccgaccgcgacgtccacgcagcagagggacatgggccattccatgacgtgcccaggccaacgtcgcaggacagttgtgaaaataacatgacgctcgtccaaggccacttcctgagggcaagtcctaatagccctgagacaccgagacggcatgttcttcattagacggaaagggaaactgaggctcaggagagaggcgctccaggccgctgcagccaacaaaccggcgccctcttcacacgtagctcctcaggccattccccatgagtcccccacacccaccccatcctcggtctttgcaaagaagggcccgagcttagtttccccaggactggcctaggaaggagcaccggccacagctgctccccgtgccactcagggtggacccagcatctcaggagcacctcagggtgtcggttaagagacaggcctccacccctgcaccagagcctgctcttagctcccggtgcccccagaccccgcagctctgtgcccggcaagaagcagctagacacacgccagggcgccaagcacggccagctccgcggacccatggacaagcccagccccgcctcagggaaaacagggcctttccctacaggacac

SEQ ID NO: 23959 - DNA, 381 bp, Homo sapiens
  chr14:93706483-93706864
  hypo
cgaatgcgatgcacagccgacctgcagattagtgttaactctgggagctcgggagcgtgcaccaccaccagtgtcaccgagcgcacccgcacagcagctaaccagtcaggcagcagaacgagtggcggcagtttgccggggcgtgcagacacacgacatgtttcccatcttggagactatctactgttcggcttttctaaaatgtcagattattcctgagtgtatatccacagggtaaaggaggaaaagaccgtaagagaaactatagttttgggagaaatcagcgttgttgacacccaatagaaaacctatttacttcaaagtgcatgtaattcatttacccggtagctcataaacgctccctagccctgcatagttttc

SEQ ID NO: 23960 - DNA, 247 bp, Homo sapiens; identical to SEQ ID NO: 6922
  chr15:101938625-101938872
  hypo

SEQ ID NO: 23961 - DNA, 265 bp, Homo sapiens
  chr15:34634211-34634476
  hypo
cgtttcttgatggtgattcggtgtcgagagtatttgtcatctggggagaaccgagcaggatgggctgagcaggtctgttgtcccatcgggtcaaatttctgctccaggaacacagaatgtatgtcagtacaggagtgatgaaatggggtggggccagcgcgaaaaagggcaaacatgaaaatagaagatgcaatggtcaactcaaaaagttgtacaaataaatagagaaatataaaatttaaaaaggccgagcgcggtggctcac

SEQ ID NO: 23962 - DNA, 375 bp, Homo sapiens; identical to SEQ ID NO: 6923
  chr15:34635788-34636163
  hypo

SEQ ID NO: 23963 - DNA, 105 bp, Homo sapiens; identical to SEQ ID NO: 23477
  chr15:40532806-40532911
  hypo

SEQ ID NO: 23964 - DNA, 520 bp, Homo sapiens
  chr15:45427341-45427861
  hyper
cggctgccccgccgagttcctcaacattcgcatcccgcccggagaccccatgttcgaccccgaccagcgcggggacgtggtgctgcccttccagagaagccgctgggaccccgagaccggacggagtcccagcaatccccgggacccggtgaggcggggaaggcggcgggaagggaccgcaccccagccaggtgggacctgggcttcgggcctggcagggcctggaggggagaggcgcccactccccagccgcggacacccgccgggccccggccttccctagctcgccgccgcccatcgacccgggctcacccgccgcgtgccccgcaggccaaccaggtgacgggctggctggacggcagcgccatctatggttcctcgcattcctggagcgacgcgctgcggagcttctccaggggacagctggcgtcggggcccgaccccgcttttccccgagactcgcagaaccccctgctcatgtgggcggcgcccgaccccgccaccgggcagaacgggcccc

SEQ ID NO: 23965 - DNA, 577 bp, Homo sapiens
  chr15:45479461-45480038
  binary
cgtctcagattagtcggttgagaatctgaacaaaggtgggtgaaggctcggaaccccggggtcaggggctcgcgtctgccagaagctgagacaccgaggggcccgggccaggccacctttgtccctctcgcagcctccagacccctgaccgccttccctcctggccatcccggcccggcgcggcactcaccctatcgctgctggcggggggtccggagatccgctcatcagcaggcggcgccgggggccccggggtctcgacccgaataaggcggtgtgggggagagccgtggcgcgggggcggcgtgggtccgggggcgacaggggtggcgagggcggcggagccggacgaccccccggagtaggggtcttcgaagtcgcgctcccgctgcagcctgtaggcggccaggatgtccgggggcggcgcggggggcgcggccggagagggcgcaggggggcggtagtcgggctcggggggcgccggcttgctgccccctccgccgccgccccccccgcggaagcccaggtgctcccggagccacttggctactccgccgctgccgccccctcctgggcc

SEQ ID NO: 23966 - DNA, 78 bp, Homo sapiens; identical to SEQ ID NO: 6926
  chr15:54191760-54191838
  hypo

SEQ ID NO: 23967 - DNA, 113 bp, Homo sapiens
  chr15:55806773-55806886
  hypo
cgtaagcttataggccgggcagaacagtggggccttgccttgcgttctgctgtctgcaagtaacgcaccgttgtgctactgctttggcaagggctggcaagtgtagaagtacc

SEQ ID NO: 23968 - DNA, 85 bp, Homo sapiens; identical to SEQ ID NO: 6927
  chr15:56363533-56363618
  hypo

SEQ ID NO: 23969 - DNA, 406 bp, Homo sapiens; identical to SEQ ID NO: 22804
  chr15:60289235-60289641
  binary

SEQ ID NO: 23970 - DNA, 66 bp, Homo sapiens; identical to SEQ ID NO: 6929
  chr15:62832519-62832585
  hypo

SEQ ID NO: 23971 - DNA, 141 bp, Homo sapiens
  chr15:65862039-65862180
  hypo
cgtctcgataaaaaagaaaagccatggaattattaacacatgatagtagttatttataggggtcccacgtttgtagtgctctatttcttaacttgggttatataaactcaaatgtttatttggcagtattctttagactgc

SEQ ID NO: 23972 - DNA, 67 bp, Homo sapiens
  chr15:67545420-67545487
  hypo
cggggataagcacaatcttgcgaaaattatccctattttatagatagaaggtgaaggggccgggcgc

SEQ ID NO: 23973 - DNA, 384 bp, Homo sapiens; identical to SEQ ID NO: 23478
  chr15:72581447-72581831
  hypo

SEQ ID NO: 23974 - DNA, 181 bp, Homo sapiens; identical to SEQ ID NO: 6930
  chr15:72992573-72992754
  hypo

SEQ ID NO: 23975 - DNA, 747 bp, Homo sapiens
  chr15:76630248-76630995
  hyper
cgagacgtgcacgtgcttcgtgagagacgggaagacctactgcaagcgggactatgtcaggtgaggccggcgggaacgcgggctgggccaccgcgcgcaggggccggggccgggactggggatggcggcctgcccgcgcgccccggccctgcccagggagaaggccatccgcatcccgcacgggtgccgcagcgctcccccgggcccgggaatgcccgcaggcgggtcaccgcagtctcctggtggccacaaagtgtcctgggcgcgcgccggagccgtagcagccagggagatgagggcggccgcaggcccagcgctgacaccgccgcaccttgggcccgcaggctgttcggcatcaagtgcgccaagtgccaggtgggcttcagcagcagcgacctggtgatgagggcgcgggacagcgtgtaccacatcgagtgcttccgctgctccgtgtgcagccgccagctgctgcctggggacgagttctcgctgcgggagcacgagctgctctgccgcgccgaccacggcctcctgctcgagcgcgccgcggccggcagcccgcgcagccccggcccgcttcccggcgcccgcggcctgcatctgcccggtaagcgcgccggggcctgtgccggggtgagcggggtgtatgtgcgtgcgtgtgtgtaggggtacgcttgtgtccctaacgagaagttgtcagttgtgtgtggttccgtctgccgggatagtgtttttctgtatcagtgc

SEQ ID NO: 23976 - DNA, 1228 bp, Homo sapiens
  chr15:76632136-76633364
  hyper
cgtaggcccccggcatattcgcacctcccacccagtcccctgggcagcgcctcgccctgggtccacgtcggtccctttccctctccagagtcctgggcaagcctctttcctcttcctctgaaactccgacttcttccggagggcttcgctcgttccgagggtcctgcgactggaggaggcacatccctgagcagccactccctccccgcagcggcctgtcgccgagctcccgcgccctgcttgagctcgggagagatcgctgcggggcagtccggcccgggagcgagagaaagaacgaaaatgcacagctctctccgagtaaggcgaacagatggagaggaagacgaacaattaaacgaaacaaacagaataaaacagaaacgaaatcgggccccggggggctgggccacccggaggttgggctcggggcgggtgggtggcggcccctcgctaacctctggcctcaccctgtcctggcagacgctgggtcgggccggcagcccgcgttgcgcccgcacgtgcacaagcagacggagaagacgacccgcgtgcggactgtgctgaacgagaagcagctgcacactctgcggacctgctacgccgccaacccgcggcccgacgctctcatgaaggagcagctggtggagatgaccggcctgagcccgcgggtcatccgcgtctggttccagaacaagcgctgcaaggacaagaagaaatccattctcatgaagcagctgcagcagcagcagcacagcgacaagacggtgagcagccgctgggccggaggctcgagtcgggtgggggctgcgcttccgccgcggtatctgcgtgcccttttctgggcgagccctgggagatccagggagaactgggcgctccagatggtgtatgtctgtaccttcacagcaaggcttcccttggatttgaggcttcctattttgtctgggatcggggtttctccttgtcccagtggcagccccgcgttgcgggttccgggcgctgcgcggagcccaaggctgcatggcagtgtgcagcgcccgccagtcgggctggtgggttgtgcactccgtcggcagctgcagaaaggtgggagtgcaggtcttgcctttcctcaccgggcggttggcttccagcaccgaggctgacctatcgtggcaagtttgcggcccccgcagatccccagtggagaaagagggctcttccgatgcgatcgagtgtgcgcctcccc

SEQ ID NO: 23977 - DNA, 60 bp, Homo sapiens; identical to SEQ ID NO: 6933
  chr15:79208280-79208340
  hypo

SEQ ID NO: 23978 - DNA, 966 bp, Homo sapiens
  chr15:79381742-79382708
  binary
cgcccgggctccctgttagagccaggcctggctcttcagccttgcagctcaggaaaccagagcgcagcgctatagccgcgactgcggcggcggcggcggcgcagggggcgggggaggagagaagcgcccacttcgtcccgctgcctccgcagcagccctggccctagccccggcgcatcagagcggtccttgggaatctttgggcttgttgctccggcggccgccagctgggagcccaccaccgctcgatggtaccgaaccgacccgtgtagccccataaccccagcccaactccgaggagctagcgcagaccgctctccgccctcagctgcggcgaggcaagggctggcagcgctcggacgcctccgtcttgcccttcccatgcctaagcgcggggaattacacgttcccggtgtagaacagacgatcggggctattagggctgggcggtgggagtgggggttgggagcaccatttttggctggacgtgtgtccagactcatcgtctctggtccttaggaccccatcttcctctgcatctccaggtgtcggcccctctgtacccgcctcccacggggctcgtccggcgaagggcagccgcagcccacatctactccccgccctcaatccctgccccctctgcccgccgcagtcactcgcctggctgggagcaagcctcccctctcgctgagggtgcagagagcgcctagggcgccaagagtagaggggccaaagttcaagcgccatcagccagccgaaggccctgagcccccagggccgcggccgggacgcagggaggtcaggacgcgacgctcgcctcacctgtttctccagcggctccttggccgacagcgccggcttgggggagggcgcgcggtcgcagacgcagccctccagcaggtaaagccccgagggccgcgagctcgagtcgctctcgaagtagaagagcaggttctgcagcagcgc

SEQ ID NO: 23979 - DNA, 1218 bp, Homo sapiens; identical to SEQ ID NO: 6934
  chr15:80215312-80216530
  binary

SEQ ID NO: 23980 - DNA, 152 bp, Homo sapiens; identical to SEQ ID NO: 6935
  chr15:80295619-80295771
  hypo

SEQ ID NO: 23981 - DNA, 535 bp, Homo sapiens
  chr15:90319583-90320118
  hyper
cggccatggcccagtcgcctcctccgcagagcctcctcggccacgaccactggatcttcgcccagggctggggctgggccggccactgggactccacgtccccggcctcctcctccgattcgtcgggttcgtgcccctgcgacggcgcccgcggactcccgcagccacagcctccgagctgcagctcccgagccgcagaggcagccgcgacgacgcccagacgagcgcgcaccggaccagcgggcggacagcggcagagcgccagcgagcgggagaaactgcgcatgcgcacgctggcccgcgccctgcacgagttgcgccgctttctgcctccctccttggcgccggccggccagagcctgaccaagatcgagacgctgcgcctggccatccgctacatcggccacctatcggccgtgctgggtctcagcgaggagagtctgcagtgccggcgcaggcagcgcggggacgcggggtccccttggggctgcccgctgtgccccgaccgtggccccgcagaggcgcagacgcaggc

SEQ ID NO: 23982 - DNA, 182 bp, Homo sapiens
  chr15:90501233-90501415
  hypo
cgactgagcgacgtgcagtaatttgaaggaacgcattactggtgcacactcttctacctgtccggagggcctctctgccccttcctcccacatgctctaagcttggaggaggagttgctaagtgttaattgggtcctgtttggcagcggatggggtcactgtgttgaacatacctcatgccc

SEQ ID NO: 23983 - DNA, 106 bp, Homo sapiens; identical to SEQ ID NO: 6938
  chr15:90501638-90501744
  hypo

SEQ ID NO: 23984 - DNA, 57 bp, Homo sapiens
  chr15:90703257-90703314
  hypo
cgggggtgggtggtttgagacggcatctcactctgtcgcccaggctggagtgctgtc

SEQ ID NO: 23985 - DNA, 548 bp, Homo sapiens; identical to SEQ ID NO: 23480
  chr15:90755573-90756121
  hypo

SEQ ID NO: 23986 - DNA, 148 bp, Homo sapiens; identical to SEQ ID NO: 6941
  chr15:93433730-93433878
  hypo

SEQ ID NO: 23987 - DNA, 867 bp, Homo sapiens
  chr15:96883789-96884656
  hyper
cgagcgcgttctgtgtgaaattgacgagatctttaaaaaagctgctaaacatggcgactctttccctttaagtgtctctttttccttgctgggtttttttttttttttttttttcatctgatctgagctcgctttatttcttttcccaaccccgctccccctcctcctcgtggcgctcgggggtgtgagagaacccagttagacgcgaaatgcaacaatagtgcaaggagagagaggggcgctcgctgcttctcgccactttcaaacaaacctgggggaagattgagcccgggggggattccagcctgctcgctcggctcgcggtcgccctgcctcggcctttcaccattagctctccctgggccgcgaggagctggggctcaaagttagcgggcgacgtccgaggcttagcctctagccggctgcagggacgggggcctggagttggcagctgctacgggaaagtgcctgccccccagcccccgcccccacttacgtgcggcagaattccgccagcgccccgggaaagtccggggtgccgggcgcgcggagctgcactcctgggatgtgcattaagcggcgacaggcggggggggcgagggcgggggcggggggcggtcagggggagctcgagcgtgtgaaactctgcctcgaatctcgcttttgacttggtcctatgagctgagccaacatggcgtctcccactgcaccgcgagcgccgggctgccaggctcggcagggccgggtaatagaaaacacattggttaccaaaaagaaaaaaaggagggcggggggcgctaaaggccattccgtctgcaggcagaaaacccttttttaaactcttgctggcaagtgagtccggtcctc

SEQ ID NO: 23988 - DNA, 446 bp, Homo sapiens
  chr16:1250277-1250723
  hypo
cggccgtactaccagacggaggagggcgaggagaacccgttcatctgctcctcacgccgagacaacggcatgcagaagtgctcgcacatccccggccgccgcgagctgcgcatgccctgcaccctgggctgggaggcctacacgcagccgcaggccgagggggtgggcgctgcacgcaacgcctgcatcaactggaaccagtactacaacgtgtgccgctcgggtgactccaacccccacaacggtgccatcaacttcgacaacatcggctacgcctggattgccatcttccaggtgggcggcaagatggtgggacggggaccctggggcacggcaggggagcgggtgcaggactcgccccccccagcccagaccccaggggcacggggaggaggaggaggggtcgtgcgggcccaagtcaagccactgcccccccaggtgatcac

SEQ ID NO: 23989 - DNA, 53 bp, Homo sapiens; identical to SEQ ID NO: 6945
  chr16:1472227-1472280
  hypo

SEQ ID NO: 23990 - DNA, 33 bp, Homo sapiens
  chr16:15738995-15739028
  hypo
cgaactcctagcctcaagtgatcctcccgcctc

SEQ ID NO: 23991 - DNA, 131 bp, Homo sapiens; identical to SEQ ID NO: 6426
  chr16:1753650-1753781
  hypo

SEQ ID NO: 23992 - DNA, 121 bp, Homo sapiens; identical to SEQ ID NO: 6947
  chr16:189550-189671
  hypo

SEQ ID NO: 23993 - DNA, 135 bp, Homo sapiens
  chr16:21566626-21566761
  hypo
cgtgtttcgctgctcttcctgtagacaatacagcatgggggcaggagtggggtctggagtcggacgcacgttcagaggctggggtcacttctcccaaaccgtgtgcagtcggacgcacgttcagaagctggggcc

SEQ ID NO: 23994 - DNA, 64 bp, Homo sapiens; identical to SEQ ID NO: 6948
  chr16:21567027-21567091
  hypo

SEQ ID NO: 23995 - DNA, 590 bp, Homo sapiens
  chr16:21569179-21569769
  hypo
cgtcatcatctcactacagcagagatccgcagttccccgaaacaaataccacgagtctcaaggtaagacctgcacgtaaggatgtcgaaagataaatatgtcttaagaacatgtccatgagaaggggctttgccagccatgcaagcataaaagaagaaaagtccctcattcatccaaaaacacccgctgagtttctcccgcgtgccgggcaccacgctcagtacgggggacagagggaggaggctctaggctctgacttgcccttgcagagcttggaatccaggagtgtcagacggtggtagagataaaaagctgtgtgtctgagaggtgagggcgtgggctttggggccctaaacttgcttgggacgcccgggagggcccccgtggaagcggcgtttcagtggagccctgaagatgggtttctatttgtcaggtgaagataatggcagctccaggcagaaagggacgaccagcggaaaggaccctggtgagagcagccaccacgacggaacaggcagaagcaccagctggcaaaggcactgtcaggggcagcgggagatgggattggaagggcaacagggttggcgccc

SEQ ID NO: 23996 - DNA, 394 bp, Homo sapiens
  chr16:21831549-21831943
  binary
cgctcctctaagcgcggtcctgagctttggtcccagacgcgcagaaggaagcggcctgaatcttacccagtcctcgacgcgcccagcgtcttgactgcagaggacgaagcggccgcatctcccgacaaacaacgtgtgaagcagcggtgccgccattgggccgaactaacgcgaccgctgcgcctcaggccggatgcccagctccttccagccacagcctctgtcccggaagttgcgcgtgccagcgcaaccttcagacaatcaggggccccgtgtggggagggcgtatgctctcggcgggctagagcgccgctaaaacgcgctcttcgttctacttggaggacttgttccagccagcgtgagtgcgcgagtgtaaggagagacgggaaggatc

SEQ ID NO: 23997 - DNA, 460 bp, Homo sapiens
  chr16:2278311-2278771
  hypo
cggagccctggctgcccagcctccgccttcccaggccctgctgacagcaggctcgttgcagatgaggacgatgtgcacagatgcggccgctgccaggcagagttcaccgccttggaggattttgttcagcacaagattcagaaggcctgccagcgggcccctccggaggccctgcctgccacccctgccaccacagcgttgctgggccaggaggtgagccctcacccactcccccatcccctcccgggttcacctgacaggtgggggaggtggccgcgcttcaggatggacctgtgcagccggttccgggggccacgtgggcgggcagagggcaggcacctggctgcggtgtgggagggtccgggtgtgtgagcctgtggtgctctggggcgtcctggagggcctgcggtggcccagccttcttggcagcctctggtcgaagcccgtgctgttgggggcc

SEQ ID NO: 23998 - DNA, 150 bp, Homo sapiens; identical to SEQ ID NO: 6952
  chr16:24739345-24739495
  hypo

SEQ ID NO: 23999 - DNA, 713 bp, Homo sapiens; identical to SEQ ID NO: 6438
  chr16:24837143-24837856
  hypo

SEQ ID NO: 24000 - DNA, 456 bp, Homo sapiens
  chr16:2770043-2770499
  hypo
cggagccccaggcagtgcagcggagcctggtgggggactgcaccaccaggaccctgcaccttcacgactcaccaaaacacagcagcagcaggagcggcaccgccgccggccgcctcatgtcctcaggcctggctggggcgcagggccgtggtcggcggtggcagaagcgttggagcacgagcgaggtgcaggctccatgaagtggagttttatgctggagatgagcacaggcccggctatgcggcccaacccgtcggcccggcctgcccagctcctctcctcaggaaggaagcgcccagagccgactcctccgtgacctagccctgaaccccgagaccccagggcagacccctcaccccagcgcagcacggggtgccgttggcctcggttcctggaccctgagctgacccagaccccccagcagaccccgagctgaccgcggtgcacgcgaagtcc

SEQ ID NO: 24001 - DNA, 331 bp, Homo sapiens
  chr16:2849309-2849640
  hypo
cggtccagctgggcgagctgacttccaggccaactccttggaacctgcgggcctacagcagtcgttacaaagtgcaggacatcattgtgaaccctgacgcacttggggttttacgcaatgacattgccctgctgagactggcctcttctgtcacctacaatgcgtacatccagcccatttgcatcgagtcttccaccttcaacttcgtgcaccggccggactgctgggtgaccggctgggggttaatcagccccagtggcagtgaggctggggatagaccgggtggggtgatgggggtgcggggtgagcattaccctctacccctgttccc

SEQ ID NO: 24002 - DNA, 420 bp, Homo sapiens
  chr16:29169952-29170372
  hypo
cggagatggcgcgccccacctgggagaacacaggcagctggaggacgtcggcggtgttactgtcacggtcacctggactgggcggttgcaggcggccggatgctggacccgcagcgtgagctccacggccgcagcagggaggcgagagccctcaaccagggacggagccgccctgtccacggagcctccagacccaccagaacgcctgggtcaccgcggctcccgggcgggcctcactgcgctgggacacgtcaggacacgtggcagctcccagcgcggtggaaggcctgagccctgggaacactggctggaaaatggaactcggaggacagagcttgtcgacggcgtctcgtatgaatcctggaggagacgcccgtgtcgagggcaattagaatccaggcgtgagccccggctggctgc

SEQ ID NO: 24003 - DNA, 368 bp, Homo sapiens
  chr16:30124512-30124880
  hypo
cgccagcatcttcttcctcgtccacaccctgccctgccacttcgctctccttctctcttggtccctgccccgtttctagcatgcccccttggacctacccctctgtgctgtccactttggcacctgttctcacccctacccggctcacctcctcggtgggcccccaggcggatgcggaaggtgggagccctgggcgtgtgcagcagatgaggccggcgcaggaagaagatggagagcatggcatagctgcccagggcagggagggcatagtacagcaaaaggctcatgaccgtactcccacagaagctcctgcagccacacgctcagccgtccgcgggactgtgctgcctgcctagccagtgtgggcc

SEQ ID NO: 24004 - DNA, 214 bp, Homo sapiens
  chr16:30826349-30826563
  hypo
cggcgggagccaccgctcccgtccaggacagggattttggttggttggttggatggagccttacagtttggatgtggtgagcatgaaatgcatacgttcaagaagctgagccgacaaagggcttactctaggtggactgaaaattcgatgtttccaattcaaaacatctgctctccgaggtgtgggtgaaggtatggggggtccaaaaatgtcc

SEQ ID NO: 24005 - DNA, 303 bp, Homo sapiens
  chr16:30907001-30907304
  hypo
cggcaatacacacacccactcacacgaacacacgcacacacatgcacgcgcacatgcacacacgcgcacacctgcacactcacacgcacacaaatccactcgcacacacgcatgctcacacgcacacacgtccgcatgcacgcacacacgcagacacacgcaagcgcacacacacacgggcctcctcgtcttcattcacaaaccccattagcttctgttgtctatgggcttcctcgacagaccgcgagcccctcgcgggggccagaaaccaagtatggatcatccctatgtgccttcctttcc

SEQ ID NO: 24006 - DNA, 917 bp, Homo sapiens; identical to SEQ ID NO: 22809
  chr16:3232535-3233452
  binary

SEQ ID NO: 24007 - DNA, 937 bp, Homo sapiens; identical to SEQ ID NO: 22810
  chr16:3233501-3234438
  binary

SEQ ID NO: 24008 - DNA, 187 bp, Homo sapiens
  chr16:323421-323608
  hypo
cgctgacccctgcgctggccagcgacccccaccctcaccgcaggtgggctcaccgggggcctgttcaccagccagtaggtctgctcctggcacgcaatgaccagcctgtcccccttgctgcgctgcttggctgccctgggaggaggaggccgagttgagggcacgccctgcacacagcagcccctcc

SEQ ID NO: 24009 - DNA, 370 bp, Homo sapiens; identical to SEQ ID NO: 23096
  chr16:3237723-3238093
  hyper

SEQ ID NO: 24010 - DNA, 1770 bp, Homo sapiens; identical to SEQ ID NO: 23097
  chr16:3238154-3239924
  hyper

SEQ ID NO: 24011 - DNA, 97 bp, Homo sapiens; identical to SEQ ID NO: 6960
  chr16:3537877-3537974
  hypo

SEQ ID NO: 24012 - DNA, 1355 bp, Homo sapiens
  chr16:410362-411717
  hypo
cggattagccacagtggattaaaagatttacgtctcagagtttacctaataacctaacaatcgtgtcaacgggagctttgaacccccagggcgcgcctgccaggccaactgagagctcaaggcctctgtgggcagcaggacgtggtcggggggaggagacgcagccacggctgtcctcacacccagctcggcccctgcgggctcctctgggcagaacctggggaaggcacggcctctagcaggaggtggaggcctttgaaagggtgcaggtgttgggaccaggtacccggcccaggcccccagccgcgtccacacacgtcgcacacggcagcaaggacgcaagcagtgtggaggtggccgcgtcggcgacgtatgggccccgtggtgctgcggtgcacgacctctgtgctgtcaccccacagtgtccgctcctgcacgtacacgcgtgcacgcgcacacacgtgcacacgcacacacacacaagcacgccccgctttgatctctaaaggagagtccattgacaagctcttaatcgcagctgcccttgcagggcctgtccctgaagtcccgagtaatgggatttggcgcttctgatccatcgggctggccgcttcccgtgtcataggtggacattttttttctttatatcgcttctgtttcttttttttttttctcctcgaaaaaatgctgcttaaacggcaccgacttgacatggcttgtctcctaaccttggagtggcggccgggacgccggcctggatcagtcgggggtctttgatgccgcctccatgtgaaacctgacgtggaagacccaccggggcggttttggggtccgaggtccgtcaggattcatcctgcctcaccctgctccctttgtctcttcccctgacccttcctcgggacacccggagagggtctgagggtgagggtgcgggcgctgcgtgtgggcttgcactcgagggtggggtgggccgagggcagggccgcagccgcgagaacaatgggcagaggaggcgcgtccacctgtccgcccggccgcctgcccggcttacctcacctgcctggctccgtgtgcctgctcacgccccaccgtcccgctgtccgccatgatgggcttggccgtccgtccgagcactttcagccactctgggaagcaggtccctgctcttggccactgtgtggctgggaggcagaagcgtgactctgggctgcagctcgggctcctgccgccgattggctgaggcagggaccagatgacgggcctcagaaccctatggtagccatggcaaccagcccctttagacaccgccacccccgagccactcctgactgctgagggagcaggcggcactgccc

SEQ ID NO: 24013 - DNA, 176 bp, Homo sapiens; identical to SEQ ID NO: 6963
  chr16:4478626-4478802
  hypo

SEQ ID NO: 24014 - DNA, 92 bp, Homo sapiens
  chr16:48642057-48642149
  hypo
cgagcgttttattactattaatggtttttttccgattctcaagaacacggttttcaccgtgtgacacaggacagtctcaatctcctgatctc

SEQ ID NO: 24015 - DNA, 997 bp, Homo sapiens
  chr16:49315005-49316002
  binary
cgtccccgcgcctccgcagagcccttggagaggaccgggcatcggtcttccatccatccctccttcaccagcccaatctgcacgccgcgggaggaaggaacactcacctggtcgaagtagatgatcatggtgcgattactcatctcggacggctcgtggttggtgctcctgatggcagagaaagccaccttggcgctgccagagcgcacagagatgcccagggcagtgcccgtggggtcggacgtggggttggagtcgcacaccaccaggcacttgccctccagcacgatgggctccgtctcattctgcccgcgggccgggcccgccagccacgcagcccccagcagcagcagctccaggacgcccagcatcgcgccgccggcgcccaccccgccccccacccccagggctgctcgcgccagccgccccccccgtcccagtcccgctccgaagccccctcctcagctccgtgcgcagctccgccgccgccgctctggacactacacctcttcctcgcactccgggactagcgtcccctccgcgactagcgtcccctccgcgctgtgttcccggagcccctcccgggcctcaggggtgccgcggctgcccagccgcacttggatgcatagccgctgctgctcggtcccgctgctgccgccgcctcctgcccgcacccgccgctgccgccgccgccgccgctctgaattattgatgcagccggcgctgcagccggagcgggcggagagcgcgcgccgggcacaaaggcgcggacctcggcctggccccgcccccgccgcctcccggcccgcctccctccgaggccctgcccccgccccggccgaggccacgccccccagccaatcctgacgcgccgcgctccccaccgagccaatggcggcgctgtccgcgctcggccacctgaccccgggcgccgttgttattaggcgcggcgaggcgggtggcgcgcggcagcagggttgggctctcgccgtgagtc

SEQ ID NO: 24016 - DNA, 1309 bp, Homo sapiens
  chr16:54966113-54967422
  hyper
cgcacggggtacggacgtgcccgggcagatgggggcctacggggtgacaccgaggccgggacagcttcaggggccccagaaggacctgacccagaaattgaggtccccgctgccttctgaggagggggaggagttgctcctaggtctgaaccccgccagccttgccccgtaggaagctggagtgcgggcctcgtccacccacagaccccggggagcgcagggaaaagggtgcttcggtcgttccgatggcagtggagaccacggtccacactcacctctctgcgtctccaccgcagggctctccctacgaccacacacccggcatggcgggctccttggggtaccatccttacgcggcgcccctgggatcgtacccttacggggacccagcgtaccggaagaacgccacaagggacgccacggctaccctcaaggcctggctcaacgagcaccgcaagaacccctaccccaccaagggcgagaagatcatgctggccatcatcaccaagatgaccctcacccaggtgtccacctggttcgccaacgcgcgccggcgcctcaagaaagagaataaaatgacgtggacgccgcggaaccgcagcgaggacgaggaagaggaggagaacattgacctggagaagaacgacgaggacgagccccagaagcccgaggacaagggcgaccccgagggccccgaagcaggttggtggacatgggaaagggcgtgttgggcgggagtaaaaaggaaaagagaggcctggagggggcgcgcacggggcctggaggttgggggcaggggtccctgcctttgcgggcgggaaccgggtcccgccgcgcggcctctgcgcccctgacagcctgggtttcgcccgcaggaggagctgagcagaaggcggcttcgggctgcgaacggcttcagggaccacccacccctgcaggcaaggagacggagggcagcctcagcgactcggattttaaggagccgccctcggagggccgcctcgacgcgctgcagggccccccccgcaccggcgggccctccccggctgggccagcggcggcgcggctggcggaggacccggcccctcactaccccgccggagcgccggcgcccggcccgcatccagccgcgggcgaggtgcctccgggtcccggcgggccctcggttatccattcgccgcctccgccgccgcctcctgcggtgctcgccaagcccaaactgtggtctttggcagagatcgccacatcgtcggacaaggtcaaggacgggggcggcgggaacgagggctctccatgcccaccgtgtccc

SEQ ID NO: 24017 - DNA, 603 bp, Homo sapiens
  chr16:611800-612403
  hypo
cgtgtgtcctggggagtcggtgtgtagggcctgtgtgagcatgtgagtgccgtgttggagtggtttggaaagcccccccacacctggatgggtggtgagtgtgttatcacggacaagcagccgtgttcaccgtgatggagtgtgaggtgtgtgcagccagggccccgcacttggtggcagactccgttctgagcttaggtggcacagaggtggcttctccgggcactgggtgagggctctgtgtgagcctgtgggctgtgtacacacacccaaagcccgtgtgcgcaggcgtgctgtgcaccccacacaggcgcgtgctggggcggtggacagcccaggtggcggcccagatggagtgtggcgcgcataccagcgccgtgtggggcgtggggaggagcgggtcttggctgagtgtggccgctgcaggctcggccgctgacctgcccgaagccacccagatggagctgggctgagcaggtggctgagccgtggggccatgctgggacgtccactccccacagcctggcctggccccacatgagactgaccccctaagagacccccagtgcccacctgacgccctgctagagcaggctctgtgcc

SEQ ID NO: 24018 - DNA, 598 bp, Homo sapiens
  chr16:67189038-67189636
  binary
cggcggcggcggcggcttcacctccgacagagagggcaccgggggctgcaagggggccgaagcgacctccccgtcgccaccccgggcccccgagccgcacttcagatttcgcagcgcatcctccagctcagccagttcttcatcccggagccggtcgggctaggggaatggaacgtgccgtcacgggggacttaaccgcggatccccgccctaccccatcctgaccctagcccggccgcacctgctgggctaggatgcaactcaaacagcgctcctcgtccgccagcaaagcgtccagccgctcggcgccggcgcgcagctccagttgcagcggcaccgagtgctgggcgagcgcggccgccaggctcctctgcagcgcggcgcgcagcgccccctcgcggtaggcgcggaggaagcggccacagggctgccgcccgcagaatcgcagctgcacgatcagctgcgggtcgctgcggtggatcttcagcatctgcagcacgtccgggctcccgccgctctctgcggaggcgggcggtcaggcgccgggcggtccccaagctcggccgttctccaaacggccggaggaggggcgaagccc

SEQ ID NO: 24019 - DNA, 990 bp, Homo sapiens
  chr16:67197713-67198703
  hyper
cgtggcgtgattgggcgacttctctcccccgtccccgtggacgtaagcgctctgagagggaacggggggggtgtccaggcgcgccccgagtgctagtgccttcttttgggattgttgccccccgggtctttaccgagttgggaactgtgatggcatcgggaccagtcctgggcgccctgagaccactcgctgctctcaccctctgcagacgccccacccgctcggtcctggacacactgcccccctctcttgcctccacccctctgcggactctgcagctccgcggccccggcgcagggagagggagggcacgggcgcgggccgggcctcaagggtgagtgtgaaataaacaaatcctgcagtgtttctgcgtcctattaaaggcggggtcggatctgaaagggaaggacagggaacgcgcggggtaccggaggagccatcccggcagaggttgggtttcctcaagagcctctggacgacacagctgcggggggtcagggtcggggcactcacacccttggaatgactacgtcccggggttcggcgggagggggcgtgcttccctgcccccccttcctatctgcttgccctgcctggggcttcactgtgcctctggccattaccttctaggacttgcccagcccacaccaggtcgcgcaccggcgatttctcctgtagaacaaagaaggaaatagagggaccgagaggggtgggactcgaacccaagtctcccactcatctcaccccaccccaccccactccaccccaccccacccctccactccactccactccacacatcccatccagccagccttttctgcctgctggtgcctcggccgctgtccgagccccgccccgcgggcttgcacgtggcccccgcctgacccggcgccccggggcggagtagggcggagcgggcggcaaacgcagcactttccgcggctttgacgagcccgcagcggccgggcccgagcgcagagccgggcc

SEQ ID NO: 24020 - DNA, 784 bp, Homo sapiens; identical to SEQ ID NO: 6970
  chr16:69143292-69144076
  hypo

SEQ ID NO: 24021 - DNA, 262 bp, Homo sapiens; identical to SEQ ID NO: 6971
  chr16:77752668-77752930
  hypo

SEQ ID NO: 24022 - DNA, 739 bp, Homo sapiens
  chr16:77753318-77754057
  hypo
cgatatttccttaatatcatgatgtgtaaacactagatattataaatattgcatcgatatttcattaatatcatggcgtgtaaacactatgtgtgaacactggatattagaaatatcacaacatttcattaatatcacggtgtgcaaacactgtgtgtaaacaatggatattatgaaaatcacagcgatatttcattaatgtcacagtgtgtaagcactgtgtgcaaacactggatattatgaatatcatagcgatattttattaatatcgcagtgtgtaagcactgtgtggaaacactggatattatgaatatcacagcgatatttcgttaatgtcacagtgcgtaagcactgtgtgtaaatactggatattatgaatatcacagtgatatttcattaacgtaacagcgtgtaagcactgtgtaaacactggatattatgagtgtcacagtgatatttcattaatttcacacgggatattataaaaatcacaacgatatttaacatcatagtgtgtaaacactttgtgtaaacatcgggtattataaatatcacagcgatgtttcatcggtatcacagtttgtaaaccttggatattataaacatcacagcgatatttcatttatatcacgatgtgtaaacactggatactataaatatcacagcgatgtttgcttaatatcacggtgtgtaaacactgtatattacaaatatcacagccatattttattaatatcac

SEQ ID NO: 24023 - DNA, 862 bp, Homo sapiens
  chr16:77822069-77822931
  binary
cgacccaatttcccgactatcccgcccagcctcgaagatgggagggagagagggcaaccttgtcgcggtaaggcatcctccaggcccagacattagtctcggtccatttcaaggcacccgagcctgtgccgtatataaccaagtactgggcccacaggaagggggatgacagggtggtctctctaggctcgttttagtcacagatcttcggcaaatttgggtttagggccgcgatcccgaccctaacttgggactatttcaggaactggagttgaggcttcgttgggacaggaaagaagggtggggcgggggtgaagcgcttagggcacggctcttgtgaggattacggcggaggctgtggaccgcggcggcgctcgcagaggctgcagccattgcacagccgagcatcccacattcaacaggaggaacccgcgggagaggagccccactcccccagcgccgcagccaccgcagccaccgcagcccgtgcgccccgcgccctcgagcgccatggccaaggaaggcgtggagaaggcggaggagacggagcaaatgatcgagaaggaggcaggcaaggagccggcggagggcggcggcggcgacggctcgcaccgcctcggggacgcccaggagatgcgcgcggtggtgctggctggcttcggggggctcaacaagctgcggctcttcaggaaggccatgcccgagcctcaggacggcgagctcaagatccgcgtcaaagcctggtccagtatccgcgcctttctcgctttctctctttttgcgcgctgggcgctggggagggggtgggaaagctgcggctgggatgctgcccgggtagaaccgccgcgcgcaccccctccgc

SEQ ID NO: 24024 - DNA, 842 bp, Homo sapiens; identical to SEQ ID NO: 23504
  chr16:81563939-81564781
  hypo

SEQ ID NO: 24025 - DNA, 152 bp, Homo sapiens
  chr16:85033842-85033994
  hypo
cggccggtgtgatagtgcaagggtgcggcacaaggcaagtcccagcgagcagtggagtcacttttcttcctggataacccgcgttcctgagtccagaccctgtcttggatttacttgtatctgtaacttcaagcaagtgtcttaagctcttc

SEQ ID NO: 24026 - DNA, 214 bp, Homo sapiens
  chr16:85083563-85083777
  hypo
cggtctctgtccgagttgaattcagctgtcccggagtcagccgctgtgtccttttgtgaaagaagtacagcccgtcacccagggagggcgcgccttatggcgggttctaacacgcagttgcaatggaaccaactcagtcaatggtgatcgctgatggtaaacaacccctcaccctgcactgtctcggtgcctgaaactcaagggcccagccctc

SEQ ID NO: 24027 - DNA, 992 bp, Homo sapiens
  chr16:85673482-85674474
  hypo
cggccgggggcggaggtacggggagccttgcgtgtcctcagctgctccaggaggcacaggcagcacctgggaccaggcaccccctccctgggaaacagttgggggcgatcgtgctgcgggcctttgctctgggaggccggcgctttgggaacagggtggctccagagccttcccaggtgggctggagagccgccgtctggaggacagttctgagcaggtgctcctggctggcgaggaagccccacctcaccccagcaccacccatggtgcagggagctggggttgggcgcacaagagtctgagcccgttcccaccccgcctccttgtcaccagcccggtggccgggactcatggcttccctgcccacacttcgctcccttaacaccggccgggggctcatggtacctgccctggaagctgccagaggcctctccaagcaggtgttggccgctgtgttacctgcggcaggggtggcccagccacccatagcccggcttgggccacagggacggggccgacaggtggtggcagtggggctggaactgctctcttgtcatcgaggcccgcggggccctgtgccgccttcccctggtggtgtctgctggctgcctgcctcgtcttgtcactggctttgcaggcaagaggggaggcagatccggttactgtcctgtccctggtgccacctgaaaccgagatcccagctgagtgagtggggactacgtgtgcggggaccacggagcagggaccacagacccatcctcatgagctgccgtgggaatgcttccaccgtggagccggcctgggcgggggagaggctccccctttctgccgctgcctcggaaatctgcctctcaaagaaaacagcaaaacaaacacggaggaaggatcccgcctggcaggcgcgcctcgcgtgggtgtcagtctgcggcggcggcggctctgcaggcgtctggagcccgtctgtctcccgcgcaggtgtgagcgccgcgggc

SEQ ID NO: 24028 - DNA, 408 bp, Homo sapiens
  chr16:85679161-85679569
  hypo
cgggatgcctgtggggcctctgcctcctggtcacgccactaaggccactttggctgcctgaggcctctgggcaccccctgtgagcagcagttttctttggtgaatgtgcgcgtgcccactccggacacagtgaaggggagatgaggctgcttctgcccccggaaccaaggccaggtctgaacagaagtcgggcaggatgccgggagctgatgggctggggtcctccttctggaaagggcatctacctgcttctaccacgcattctacctgcttctaccacgcttcctatgcatgcattctacctgcttctaccatgcttcctatgcatgcattctaccatgcttctaccatgctttctatgcatgcattctgcctgcttctaccacgcattctacctgcttctaccac

SEQ ID NO: 24029 - DNA, 910 bp, Homo sapiens; identical to SEQ ID NO: 22812
  chr16:85932121-85933031
  binary

SEQ ID NO: 24030 - DNA, 184 bp, Homo sapiens
  chr16:87311873-87312057
  hypo
cgaagcaggggtgtcccaggcagcaggccaggaccacgccgcatgttcacaggctcagttatagccgtcgaccacgccacggcgcccaaccacgccacggagcccgaccacgcctcgaccatgccacggcgcctgaacttttatctccatttctcaggtgaggacctgaggctcgggtggcccc

SEQ ID NO: 24031 - DNA, 195 bp, Homo sapiens
  chr16:88476105-88476300
  hypo
cgtgtgcagctctgcgtgaggaaaatgcaaacaaagctcggtaaagcaggccggggcccacacatgcgggcagggcatccaggcagcttgggcagagtgatcagaggtcctcgctcagtggcctgtgagcggaggcctgagtgcgacaggtgtggtggccatcttggccggggggggggggggggggcgcggggc

SEQ ID NO: 24032 - DNA, 443 bp, Homo sapiens
  chr16:88512432-88512875
  hypo
cgtgtctcagcgtcaggctcaggcccggggccctgacatttagatagggccaggtgtggctgaggccatcgagtcattcctccggtgaagtatgcccgtgcgtcggggtgcagggcacggggtgtaggacaaatgctaccaatgcccctgtcgggaactgggaggagggtggcacatgtccgtcactgccacaggcggttccgaagcccgggccctgccccgtacagtgactgtgctgttagcccggccacctggggcctggctctgcactggcgtgtcctctcctcgaggcggctgagtctgccgttcggggacctccctcgctcccctgcctggtgtcctctcctcgaggcggccgagtctgccgttcagggacctccctcgctcccctgcctggtgaaggtcatggggtcccgggcctcttcaccctctgtgttgtctcc

SEQ ID NO: 24033 - DNA, 844 bp, Homo sapiens
  chr16:88805817-88806661
  hypo
cggctgtcgtcagatgccctggctctggcctggctgccaccggcccagtgtccccatctgtgactcgggggctctcctggtggctgaggcgccaggtgcccgggctgagaccgcaggctgtggggctggacgataggccccaccccagctctgacagtctccgtgctctgcaggccgaggcaagtcacagcctctcggagcctattccccttctgtcaaatgggatgggggcttgacgggacagatgaaccagaccagtcctgtcctcacaggcctccagggctgcaggggctgctgggaggctccgaggccagggtaacagggagatcagggcaggagaggcccaggccctgagcccacccctctcagagaccacacagcagctgggggcgaggctggatcagaacgcagggcgccatcgctcaccccacccacagcctggccctggccctggccctgggaaatcttctgagcagagccgtgaaaaatgagcatttctgggagtggaaagaacagaggcagctgctgtgagagaacaggtgtgaggccaccgaggggcaggcccggccctgacttggggtatgaggccaccgaggggcaggcccggccctgacttggggtgtgaggccaccgaggggcaggcccggccctgacttgggccccacgtgccgcagccatgctgcagacgcccctcaccctcctctagcggccagcacccctcgggctggctggcacactccgtcgcatgcctgcaaacacgtgtgtgtgttgcccatatgtgggagtgagggtcgcccgggggccctgccaggccgggtcatggggcttctagatctttcggaac

SEQ ID NO: 24034 - DNA, 867 bp, Homo sapiens
  chr16:88882698-88883565
  hypo
cgtagagaaggacccagcagcacggagtgggattgggtgtggaaggcagaaggccagggctcctccacggctggtggccctgggctcctggggccccgagactcaggggtcctgagacagggacctccctgctccaccactgagtccagaggcggggacgccagctgcccaggtccctttgaaggaagggccctgaatatcttcctatgaaacttgccaggcacccccgccccccgccccccaactaacggaggtggccctgccctgcccagtcctaaataaccctgcagggtggactgtccctgggcagggacaaggccatctgccctccatggtcctcactgctggtaggtgctcccgatggccggtgctctcctgttacatccgccggcccacgctgtggctccctggctgttcagagccaccaccttccttcccacggcacggcgggcacccagcggctcccacgctgcagccgggtctggccctggaaagaggcttcagctgggccttttcgcccgcacagcaggagcccaggctgaagtctgcagctgccgaggggccttcttcccgaatcctgcgcggcagatccaggggctgtgggcagccacgcccagcccgtgtaaacaggtgagcgacggcccaggggcctcgaggctgggctcggccatctccactgtgctcggtgggctctgggcacccaggagcgacaccgcagacctgtgtgtggctcgtttttgccgactagagcgagggccgcacgtgtcccatctgaaggagctgtgaagacctgccctgctgggacccacatcagctgtgctgggaaacaggcctttgcggccactgcacacgcgggatggctgggcc

SEQ ID NO: 24035 - DNA, 979 bp, Homo sapiens
  chr16:88943064-88944043
  hypo
cgccgcgcctgcggcatctgctctgctgtctaaagctcagtcgaggcttctgaggatgcttgaagagacgttgtcaggaggtctccgcgcggaatcattaggtagctgaggcaggtgcactgaatgcggttttgttggttctgtgtcttctttcggagaggggcagtagcagcagtgactaattggtcggctcccccaggtcaggcggggcgcagtgtctggcaggccaggcatcggaggccaggcacagcatccggtgggcctggagctgggtggggttggcacggtgctgtgtccggcaggccaggggccagtggggtcagcggggcacggtgtccagtgggccaggtgggctgggggagccggggcgagaaggccccgcagagccggcttcgctggggctggcagcacccacaggcagggaggggcccaggctgtgggcggcttcgggcggtccaggcaccgggtcggccaccacggctgtggggccctgcaggctctggccacacacgtggtgatgcttctcccagtcccgatgctggcagaaggacccgcagtagcgtgccgcgttgcagccgctgcacgtctcactggctttccgcccgcagttccagcagctctgggtgggggcagaggggccagtcagggctgggtctggccacccgaatccccaacacacgcctcaaccaagccattcagacccagccacgtcatcaccaggtgagaagagagaaactccaaagccccacagccctcgggccatgctccagatacagccactcactgggccattttgcgggacggcatcccactaccgtgtctcacgctccagcccacccagataggtctgcgctgtgctaactggacaacgacccctgcctcctctccaggaagccctcctgagctcaccaggctccaaaaccgcaaaaccaaagggcgtggccccggcaggattgaggctgctgagatctcaccatcc

SEQ ID NO: 24036 - DNA, 975 bp, Homo sapiens
  chr16:88945383-88946358
  hypo
cgagtcctggccccaccgcttcccaaggccgtgacctcagacaagctgccaaccctctcgagccctcagtttctggaactacagaacggggacatccataggacgcctcactgaaccatgtgggatctctgtgctgataaagcacagtgtgggcggggatggcgtgcctgctgcaggatgcccgtgacaactgtgctgatgccacgtggaggctcagaatcctcatgggggtggcgtgggaccgcacgggagccgaggcaggggatgggtgtcagcgtggccgggtggccctacctcgctggagtcctcctgctggttgatgaccgtcagggcgtcctcggaggcctgccgcttcgcctcggccagggcccgctccatcttggcacgctccgtggtgatgagctcgtgcgctttgcgctccgcgtccgacacggctttctgcagctccgacatggcctgccgcttcacctcattcacggcctcttctgcaaaggacatgggcagggctggcggtcacatgggccatcccagatgggtctctggacttcctacgcgtggccacaacctggggacaggggctgtgtgcagctgaacacacgtaccatctgtgcacacaaaggcacatgttgatggggctgtaggcagctgaacacacgtagcatctgtgcacacacagacacacgttgatggccctcatgcctgtgcagacaagtgcatgcaaataaacacaggcatcccaggcatgtgtgtgcaaagctgggtcacgtggtgtcacaagtcaaagcttgcactctaccgcagcggctccccaggcactgcacccctgcagggcaagggcgaggcccaccccagggcctggtcagccaggggcgcacccggaatctgcattcctaacgcgagccgggggagctgctgctgacctgaagcacttggataactctgccgttccgccttcacctctggccccacccagac

SEQ ID NO: 24037 - DNA, 629 bp, Homo sapiens
  chr16:88957365-88957994
  hypo
cgttcctcagactggcatctttaaaaatgcaggctctgattcagcaggtttgggccgggccgagagcctgcaaagctgacaagccccgcgtgctgccaccctggtccacggttgatctgggtgtgaccatctgacctgctttcacctgacacctcttcatccatcggcctgcgcagccacagaagccccttcccgcctgtctaccgccctcacctcccgccctcacctctgctctctccaccccacgtattctgttccagtcacactgacccctctgctgttcctcaagcacagcgggcgccccatacctcagggcctctgcacgtgcagttactgctgtctggaaaaccctgcgctggctctgcacctagctccgccctcatcctcagccctcaccaacacgcctccaagcaaaggactttcggaatacttctccaccacgtgcagctgcagatttgagagtggctgtggaccgaacgccttcccaccccagggtgctggctccaggagggacctgctgcatgtcctgggccctatccccgagccttgcccccacactggcacgtcgtcagtgctcaaaaatcacccgtggagtgagcgagcacattcggccaacggcaaccagaggc

SEQ ID NO: 24038 - DNA, 274 bp, Homo sapiens; identical to SEQ ID NO: 6988
  chr16:88959987-88960261
  hypo

SEQ ID NO: 24039 - DNA, 335 bp, Homo sapiens
  chr16:89072478-89072813
  hypo
cgaggtggaggttttaggtgggtgaggagcagaaggccaacgcgggtggctgaggagagggcaaggaagaagaggcaggagtccaccgccagtgccaaccaggggcctcggggcaccgctccaggagcaaccccagagtgcatccacctcctcccgggtgggccacgccttgaggtgctgacggcgccccaaactccactccccggaatcggcccaggctcagccacatcggcccgggctcctacagaagccgacctggagacgaggaactgacctggagacgaggaactgacctggagacaaggaactgactgcaagtggaccatttgcagggc

SEQ ID NO: 24040 - DNA, 378 bp, Homo sapiens
  chr16:89254530-89254908
  hypo
cgtcagcggagtggatgtgggacgcctggaagtggaggacagggacctgccaggctccccaaactgggtggccaggttcaccatcctggaaggcgaccccgatgggcagttcaccatccgcacggaccccaagaccaacgagggtgttctgtccattgtgaaggtgagcggcccccggctggcacacagatgccggcagacgcagatgccgacacacacagatgcccacacacagatgccggcacacacagatgcccacacacagatgccggcacacacacatgccggcacacacagatgcccacacacagatgccggcacacacacatgccggcacacacagatgcccacacacagatgccggcacacacagatgcc

SEQ ID NO: 24041 - DNA, 560 bp, Homo sapiens
  chr16:89650291-89650851
  hypo
cggcagctacacagccccgggggtacacagacacctcctctcaggccccgctgggtggggtcagccagcctggggcctctggtcccccacggtggggtcaggccccacctggccaagcctggagcccgggcgtccccctgccaggtgatcgccgaggacatctcggggaacaacggctacgtggagctctccttccgggccaggaagctggacgacaaggtgagtgcaggtgccgggcacgcctggctcaggctgaggtccgggaaccggttcgaaaacccggtccctgcccagcgctgacctcgcgtggctatgtcccgtgtgagacgtgtgcggagtgtgcctggggctgggcgtgctgccgtcacggtcgccatcatcactgtcaccgccattagctctcccgcccctcctggcagctgggctggggctggggcagctccctcctgtggggaccactcatgaccctgctcagggatggggaaataggcccagcacccccgaggccactgtcgtgacaggaggaactggaacagcgcgcggttctgcgggctcgtcac

SEQ ID NO: 24042 - DNA, 1732 bp, Homo sapiens
  chr16:89899939-89901671
  hypo
cgccctgctgggctcaggggcaggttcagctcaggcctacggcctgctgggcttgagaagcttcgcctttgtgcctcggtttccttctccgtgaaatgggaggtgcagcgtggtgctaacgtctgtgcagccctgggcacgcctggctccggaagcactggccagtggaggtggcagcaagggatctgcacctgtgcactcgctggacctgccttggggagcagcacgtgtgggtccaggctgcgaatcccgaccggattctcagggaggggttctgcaaggtgcacccggtgggggctgggagctcctccggggcgtgtttccctgtgacgtaaaatgacctctatccctgagccctcccatgtagaaagcgggaaggaggctggccgctgtgtgtgggtgtgggtgtgagctgggtgtgtctctgtgtgagctggggtttgtttgtagatggcattcccgatatagtctcacctctgagcaagggttacctcacaggaaggcagtcctgcagcaagactcttctctttacggagacatctgtgaacctgcctgcgctcgcggttggccgtcgtagaagcatggataagcatagcccgtgtgaatctgtgaacctgcctgcgctcgcggttggccgtcgtagaagcctggataagcatagcccgtgtgaatctgtgaacctgcctgtgctcacggttggccgtcgtagaagcatggataagcatagcccgtgtgaatctgtgaacctgcccgcgctcgcggttggccgtcgtagaaggccccataagcatagcccgtgtgaatctgtgaacctgcctgtgctcacggttggccgtcgtagaagcctggataagcatagcccgtgtgaatctgtgaacctgcccgcactcgcggttggccatcgtagaagcctggataagcatagcccgtgtgaatctgtgaacctgcccgcactcgcggttggccatcgtagaagtgtggataagcatagcccatgtgaatctgtgaacctgcccgcattcgcggttggccgtcgtagaaggccccataagcatagcccgtgtgaatctgtgaacctgcccgcactcgcggttggccgttgtagaagcctggataagcatagcccgtgtgaatctgtgaacctgcccgcactcgcggttggccgtcgtagaagcctggataagcatagcccgtgtgaatctgtgaacctgcccgcactcgcggttggccatcgtagaagtgtggataagcatagcccatgtgaatctgtgaacctgcccgcattcgcggttggccgtcgtagaaggccccataagcatagcccgtgtgaatctgtgaacctgcccgcactcgcagctggccgtcgtagaaggccccacaagcatagcccgtgtgaatctgtgaacctgcccgcactcgcggctggccgtcgtagaaggccccataagcatagcccgggtgaatctgtgaacctgcccgcactcgcggttggccgtcgtagaagcgtggataagcatagcccgtgtgaatctgtgaacctgcccgcactcgcagttggccgtcgtagaagcctagataagcatagcccgtgtgaatctgtgaacctgcccgcactcacggttggccgtcgtagaagcgtggataagcatagcccgtgtgaatctgtgaacctgcctgcgctcgcggttggccgtcttagaagcgtggataagcatagcccgtgtgatttttc

SEQ ID NO: 24043 - DNA, 881 bp, Homo sapiens
  chr17:10632714-10633595
  binary
cgactaaaaagtttaatgatgctataaagggttttggtcggcttcgtctcctaggccctgagatatgttcagtgtcgtccgcgggccggacgttaacgcaggagccagggccgcttcttctgaggtcccctgggaagttccacgcgcggaaccagccccttccagggtgtgagccctggtatgggactcgcttccatgaacacatccgcgtctcttagacgggggagaaagtgggggctccccaagcagaaagcccaagtcccgtcctccccactaactgtgcgcccctgcgactctgcccgctagtcagttacacggcccgctaggccagggggcggagctgggagccgggcgggtccccctcccaccgcggccgcctgacctgcaccaaggccgccagcgcgaagaaggcggccatgagtccgttgcaggcccgccacagcgctggcgccatggctcggagaacacggcgcggggcggtgagtcctgccacgtgcggggcggtgagtcctgccacgtacggtccgccttcctccttgcgcggagggaccgagacccccgcctcggtttcggtgccttggggacactgccgtggccgtcgctccgcccgggggcggggagcgaagggcgtgggtgtagcccccactcagcgacccattcagcccgccccgaacgccgcggggtgtaggcggcgccgtcctggtttcgcggatgggaaagcgagtccctcagggagcgcaggtctcggtggtggacggaagtcgaatttgaacccgtataggttcaactccaaaccctgttttcactaaagctaccttcctcacaaaaaaaaaaaaaaagaagaaagaaaaaaaagaaggaaaaaaggaaggaaggcaggc

SEQ ID NO: 24044 - DNA, 299 bp, Homo sapiens; identical to SEQ ID NO: 6464
  chr17:1454071-1454370
  hypo

SEQ ID NO: 24045 - DNA, 405 bp, Homo sapiens
  chr17:16282222-16282627
  hypo
cgtcaatgggagcaggatcagctactttcttgtaggtgaattcccgtttttgaagtggggtttcggctccctaatctgcacttttttttttcctaccagtttggagaaacagctgggaagaactggatttgcaggtattgctggagccagagcgaagcccggccactgtcaccatgggctccagcctcgcctctctgggcctggtggtgagcggcttcagcaacaggtttccggtccccgcagagggtcccactctgaactcccgatttacagactgttctcgggccgtgatgaggattaagacaatgcaactaagagcactctgactacagaagcatgatttaaagctccacaaccctgcaataaccacgaagaaaaataaaaagcggctagtccgccaggcac

SEQ ID NO: 24046 - DNA, 209 bp, Homo sapiens; identical to SEQ ID NO: 6999
  chr17:16923475-16923684
  hypo

SEQ ID NO: 24047 - DNA, 2167 bp, Homo sapiens
  chr17:17685255-17687422
  hyper
cggggccccgggccggccgccccctttttgcggggggagagcaggagccgcctctcgcagccactctgcgcgcggggtgggagggagagagggaggcgaagggacgacagcgccgggctccccgcccccatcccacccggttccaatatttcgcagaaaggcacgcggctcctaatcggtcttttccaggctgagatttagccgtgcgatgcccgcgcaggggcgggggccgcgggccaggggaggcgctcagagtccggagccgccgagcgaggtgaggagcccgcgtcctcggctggtggagcgggcgggcgggcgcgcaaacccgagaggcagatatagaaaggggggcaggttaaaaataaccctctccggctgggaagctcgcgcgcgctctctcgcctcgttcggtgccagaggactccaggggaggtggcgttggggagggcagagcgggattccccctcctccgccgggcggggtgcccgcctgcgcgccgcggttgcacgtgtgcggggccgcgcgcccgggccccctctgcacccggtcggtgggtgccccctccccaggaccgggcgcatctggcagtggccccccgcccgcagccttgcgcggctggagggaagcgctccattattcattatttacgagcgttaataggtttgagccacgggggcggggggttgggggggcgacgaggacccagtggggaccgaagcattagaagaagggatagggagggagggggaagggcgggggcggggctgtgccgcggcctggaggaagaggtctcggcctggggcccggcgagccgggcgcacctctccgtcaggtttctccacaccgccggccgtcgaggctgctcagggcgccaagagggcagcacgggccttagattttgctctcggcctctgtccttcgcgtcctcgcccttaccgaggcgtggggagggagctgcggaggccgtacgccccgccctgcgcgccccttgccgccgccgcgtccccgcggcagccccggcctcatttatcatcatctttggtcaagtggagtgtgcaaggaacagctgcttcactcggctgacttcgagggcggctacgggagaatcagggagatgaatgatgggggctggtggcagccccccgcggtccccgcgcaggcgagagggaggcggggacgtccagggccgcctccgcctcatggcgagtgcagcgcccccttcctctctcctggcgcctgcagcgaccggggaccgggggaccggggcaccgaggaccgggcccgccccgggaggggactgggcgcggggacgggggggcgcccttcgccggcggagaactggcgggcgcgctgccggcagagcccgaggttgccgtgaccttgctggggtcagcgggctgggctgcggaggcggcggcgcggcgtctttggtgcgctttccggattggcgcagaggccgggaaacaaggcgggggcgggcgggggaacacaaatagaaggtgaaattttacctgcccctgagggagtcctgcggattttctccggcagcagcaggcgctctgcctttgtcttacacggctgaaacatctgttgcagaggggcggagaggccgcaacaacccccacacaccctgcgctgctccccgtccccctctgccccagccgggctgcaggactccaggcgccgcgttaaccctgctcgcgctggggcgcgcgcccgcactcgctgccgcagtccagcgcctcgcgtggggctcctcgcccccgccccggatctggtcctggccggggcgcccggtgacccccctccacctcgatggggtgctgaggtgtaggcggggggcgggggcggaaagggttaatggcctagtcgcagaccctaattgtcagagccggccccgcttcgtttcaattaccctaagtagagactgaatgcgcaattaacgaagtcagcttgccaactggaaagccggccccgctttcacgttgagcagaatactccaccagctgacttggacgaagcaatttcctcctctctctctccccttttttctctccttctctcttccaatccccctccctctttttctctctccttaataataaaattataccaagcagtttgcggtgtggcaggcggccagaaaagcgtttctttaaacgccgcc

SEQ ID NO: 24048 - DNA, 112 bp, Homo sapiens; identical to SEQ ID NO: 7002
  chr17:19513145-19513257
  hypo

SEQ ID NO: 24049 - DNA, 71 bp, Homo sapiens
  chr17:2220974-2221045
  hypo
cgggataacggagactccatctcaaaaaaataaaaaataaagatgcacatgagatatttaagaggtaaatc

SEQ ID NO: 24050 - DNA, 115 bp, Homo sapiens; identical to SEQ ID NO: 6466
  chr17:2326357-2326472
  hypo

SEQ ID NO: 24051 - DNA, 119 bp, Homo sapiens; identical to SEQ ID NO: 7004
  chr17:25619839-25619958
  hypo

SEQ ID NO: 24052 - DNA, 437 bp, Homo sapiens
  chr17:25620264-25620701
  hypo
cggctatgcaacactctactctgtcccatgaatatctgccacatatttgaattcccagtcttatacgccccaggcctttgcaatgtttagggtccacacgagaagccattaaaatgcaaatacgtcatctgtgaccgggaaccaagctggcatctagcagatactgacacatttatcagtctgatgtgtggacaactaggtgcctcccagaggccttcaggtaaggtggaggaagggccaattctgagctgacacagtgggatccatcttggccaggacagtgggatccatcttggccaggacaaaggcagtccagagaggccccgcggcgcggtgcggcgcgatcacgcccgagtctccttctcgttcccctcggcccttcctaaaacctgctggctcaggtctgaacaatcgcagctggacaggtggtgcacaac

SEQ ID NO: 24053 - DNA, 166 bp, Homo sapiens
  chr17:25676867-25677033
  hypo
cgagggctgtcacacccccgcctggtgtgcgcatgctaggggcagtgctgacacgctccactggtttcagatcaactttggagaatttggcgatagctagttaaagccgaagatgtgcatgcactgtgatctagcaaccatatgcctcgcaaaacaggccgggcgc

SEQ ID NO: 24054 - DNA, 248 bp, Homo sapiens
  chr17:25931573-25931821
  hypo
cgcggcctttcccctagccaggtgtgagtcagagtaagtacctttgtctcagatctctcccgggagtccccgctagctgagagcagagcggtgttcctcaaggtctccttgacaaaccttgtttactcttaggctcgatgaccagccgaaagcagatgtgttggaagctcacgaagcggaggtgagggtgacacacacgtgtccacagatggccccccctcttttttcccttccccatctcagaatgc

SEQ ID NO: 24055 - DNA, 181 bp, Homo sapiens; identical to SEQ ID NO: 7007
  chr17:27207684-27207865
  hypo

SEQ ID NO: 24056 - DNA, 74 bp, Homo sapiens
  chr17:27716189-27716263
  hypo
cgtgagccaccgggcccggcccagagttaatttttattcatgaaactcatataacaggtttatttatttcagtc

SEQ ID NO: 24057 - DNA, 312 bp, Homo sapiens; identical to SEQ ID NO: 23513
  chr17:27909050-27909362
  hypo

SEQ ID NO: 24058 - DNA, 807 bp, Homo sapiens
  chr17:27940157-27940964
  hyper
cgcggagttcagactctccccaggcattgacggggagaacttggtagggtctgggctccgccacgaccaggtgggggccaggacgccgcgggactgaccgcctccactagagggtggtggccgcgggccgccctggagcctccacgccgtgtcccggccccggccggtgggtgggtgcgcccgggagcccgcgacattccttccccacccccaggagcgccccgcccacgccgcagcgccagcctgcgcccccggcgtcagtgcccagccctcggcccagctcagggccaggttccggcggccacgtgttccggagctacgacgagcagctgcggctggcgatggaactgtcggcgcaggagcaggaggagaggcggcggcgcgcgcgccaggaggaggaggagctggagcgcatcctgaggctctcactgaccgagcagtagcgccccctgccgggaccctcgccagcgccacgcgcgccacgcccagggccaggagccagacaaaccccggcctgcgcgcctgcagagcggcggctggagactggagccaccgcctcgcgggtgcagcagcacagcaggcacggttcggggagggattcggcatggccgcggggtaccttcccaggccagggccctggaggcaactggcacggcctggtccccctgctttgctgtattctgattccccaacccgctcccctgggctcagatctgtcctgtcctagggcggagccaggcggtcctgagggggagatgaatccttagaggagcgctgtccctatcccttgctccttctggccggtcc

SEQ ID NO: 24059 - DNA, 189 bp, Homo sapiens
  chr17:29232077-29232266
  hypo
cgagagatgtctcccgatatttatggatcagtccgaagttttactacctagaaaattgtattttatacccatcaggaagcaagtagttgaaataattattccaactgcttaaagtttctgatatttttaatttagaggaatctttttgtaactaatatttcctgttaaggtttgtcttaggccgggcgc

SEQ ID NO: 24060 - DNA, 76 bp, Homo sapiens
  chr17:30333052-30333128
  hypo
cgcgcccggccaagtatttttgtttaaattactttttggttgtcacttatctcaataaatattaacatatgtttac

SEQ ID NO: 24061 - DNA, 727 bp, Homo sapiens; identical to SEQ ID NO: 23104
  chr17:37321167-37321894
  hyper

SEQ ID NO: 24062 - DNA, 123 bp, Homo sapiens; identical to SEQ ID NO: 7013
  chr17:37583075-37583198
  hypo

SEQ ID NO: 24063 - DNA, 85 bp, Homo sapiens
  chr17:3908060-3908145
  hyper
cgccgggacgcggcggctctggctcggcagcgccacccggtggccggagacagaggcggccgggccgagccgggagagcagccgc

SEQ ID NO: 24064 - DNA, 215 bp, Homo sapiens
  chr17:39682514-39682729
  hypo
cgcgcccggccgattgtgtagttttttaatgcaacagaataggctacaaaatatcagaggggatttctcttagtatggtgagaattgtgtcacccatttgtgtgtgtgcatgtgcacgcacacacacacacagaggtgagaaaaagaatgcgtaagggtgcgtagtaaaatgtacttattgtcgcaatttttttttttttttgatacagggtctc

SEQ ID NO: 24065 - DNA, 111 bp, Homo sapiens; identical to SEQ ID NO: 7015
  chr17:43121686-43121797
  hypo

SEQ ID NO: 24066 - DNA, 735 bp, Homo sapiens
  chr17:4544565-4545300
  hyper
cgcacaggagcatgccctcaattccaaggagatcgggtagcggcaacatttattgagcgcttactgtgtgccaccgactgccctaaagccccccacccccgtggcctccgcgcgctttgagcccaatgcgcgggcccttggcaaagagaatcggccagaggccaacgggggcgcatgtcctccccggtatttgactgactcggagccaggggcgcagcccaccccgcccggctctggggagctcaccttgccccgtgcgggccacagtcgcttcccgagcgccgcctccccgtgctggccgaccagccacagctgcacctggttgttggaaccggcatagagcgaggccccagtggacacgcggatgcggtagagacccatcttgctcaaagatgtttcgctccttctggtggagaagggtggacgagctaaataacccagcctgagaccccgccctctcggaggtcgcttggggtcggaatgtgggtggcaggtctccaatcaactccgcctaccgctggggcccccagctccaaggagcagagcttcaaggggcagaattcagccccagtccaaaaggcggtgtcctggcgagagcagggagtggaaaccactatcttgacgggagggagaaaaagaaaaggatttggaccgaaaacacgcaggaagagggaatcaacgcctggtacagcaggcaggcgaggtgggggtaggagttatgcacgtgtgtaccac

SEQ ID NO: 24067 - DNA, 765 bp, Homo sapiens
  chr17:46670752-46671517
  hyper
cgggcgaggacagggagcagctcgaagccgcttgcctgaagcggggctcctgggcgggcgcggggaaggcgcgcgagctctcgcccaccgccccaaagtggctggaggaggccgaggagcggttgacgctgaggtccatcccattgtaattgtagccgtaagagccggtgtgcatggcagcgggatccctgtaagagccgctcagagagctgccactgccataatttagcaactgatagtccgggccatttggataacgccccgagaaggagtttacaaagtacgagctcatttgggtgattttggagggcttgatttgtggatcgtggtcgttataaccctgtgcttcacgatttatgatgtattaatgaattatagcgatgcactgtacttcgttttgctatgtatgcggccaaatatggggggggggttggaaggggggtggggggcgttagggaatcacgtgcttttgttgaccagtcgtaaattctcgctgatgacctcaagaggtaattcatgctctatggttacaaataatgacgatccgagaatcgttagggccgattcaatgcgagcctccgagagagggggaaaaaaggagaagggggagaaacagagagaaggttggctttggcctctgagcagagcgcgccacctcccggcgaccgacgggagcgcgggcgtgagaccgccatggcggcgggcggctgcctccctgctggctccctgcaggctccctgcagtcgccgggagagaaagaaaccc

SEQ ID NO: 24068 - DNA, 555 bp, Homo sapiens
  chr17:46710955-46711510
  hyper
cgccctcgcccagaagcgagggtccgagtggccacgtgtccggcagggaagtccgaggtagcgagggagtccacctggccgcccgctccccctcccgggtataaatcttggggaccggaaatacaataaaacttcaccgtgttgatgaacttcaaacggtttacatcccctcctgtcctgaaaagaaagacgtccgggggcggattaaaaggaaggggaaacaaatttacgagcggcagaagcacccgcctcggcccctttctttgcccgcacactttgtccgcgtggagagaagcagccccagcccccgggacttggcctccgccgaaccggccgccaggcgcgctcttctctcggaggagtcggcgctgacccagcccgcgcccggcagagactggaagccgccgcctacacggaaaatccacagagccccgcgcagaccctatgatcggctcggcccgccgggcttgggatgaggctccctgcttctcgctagagcagaactgggctccctggcgcttccttgcgaaagcccaggctctcccaaccacgccc

SEQ ID NO: 24069 - DNA, 1190 bp, Homo sapiens
  chr17:46795376-46796566
  hyper
cgttgaaacaatttttttaatttaaaaggggctgtttataaaaaagttttaaaagtagctctgtgttttaagacccgtgttctacttgctgcgatcgggatagtttttttttccactttgaggctctttttttttttttttaaggggcaggaacatcattttgcatcaggccctgtaaaaaaaaaaagggggggggggtgggtaggaaccaggatgttggggaaaattatttcaatgtgttgagtctgaagctttttggaaagcaatgtagatgtgatctcgtttgctctgaatcgaattccacagaaaccgctgtgccgaatactgcaaatccttaactttcataaacgccggcaccgaactcaacgcaaaactacccaagtgccaaagaccatttctgggaagctcattccatgagaccttcgcatttttccaaatcaaaggcttcccttcggatctaattatttctcctctacagggctgcgggagggggaggggatgtgagactagggcaacagattaagattgaaagtcctttctcgcagcttcattttcgcccccacactgtcccaaatgcttagaaccctcctcgtcagaatgggaacggtgcccccgcttgtcctaaaagacacagaccaggtccgtgaacttgacccaggcgcccacgcctcttttccccgaaggtcagacaaaggcagaagggttggctggattctttcccgggccgcgaaggcctggggatcgcaagttgaggaggagaagaccgcaaacccctttggttcaagcaagctctgcggcaggtaaaaggcaaattggtggggacgggtaggacagggagagcattatctggctaactcccgcaggcctcttccgatttgtcggcggggacctgactccctgcggtgtctctggccccaaatacggaggccaggagcttttcgttgtctcgcccgatttggtatcttattagccggtgtcgctgagccgcgggggactcccggctggaaaggaagccctgcgctcgaagcgccccacgccagacggagtggcccctgcgcctccccgcgcgccggcgcgccctgttcaccttcgactggatgttaccgagccagggagagacccggagatcgagtgtttgatcttcccttgctccaggatcctgaattctttaaacacactcgcacgcgctc

SEQ ID NO: 24070 - DNA, 951 bp, Homo sapiens
  chr17:46802321-46803272
  hyper
cgcaccatgccgctccccctcatctatcttgccccctccccacaggcccatctgcgctgaactctcgccagttccgaagtcggcgagggagggggtttacttgcccgatcgttggtgggtttgagcttatagaggcagaggagtaagaacctgcgatattgaaagctacccacatggggcttccttgaaggaggacgtggaaggcagaaagtgacctgctctgagcggcgcatgtaaccgaggaccttaagctggaccacggggcttggacgattttttaaatcaggaaatcgacctcatcttcctcctcctcgtcctcttcccctgaacccccagtccgcatgcactcacactctttggccttttccctcagtcccgggctcctctttggtaaatagatttgtaggtgtctaagtcacgtcccaccctcactccttcccaggagaggagacagggctaggatcccacccgaccgcgggccataaacacttggctgcggcggccgccgcggggtttctaggagagctggctccgggagggaaatgtcctcgaggtagtggcggccgcggcccaccaccaactgctcgccaccgaccccactactcgccaccgacccgctgctcggagcttcggttctgcgggttgtccagacttcaggcctgtgcgctcaatcgtggagaatgcgccggcaggccccccacccccagcctaaggtgcaggaaggaccagcacgaacccgctggctttgctgcgcggccaggagatgagtcccaccgggcactgagcccaggtacaggacatcagagaatgaacacagaggcagaggccctcatgtccctctcagagtcccggctctgcaaagagcccgtctgtctccagcttccagaattccgcactgtgaatctgtctacgtggactgggaaaacagggttggcaccactctgccactcc

SEQ ID NO: 24071 - DNA, 819 bp, Homo sapiens
  chr17:46810263-46811082
  hyper
cggggaagtccctgcacaacccaggcgtcctgatcttccagactgactgggctgagcctggccttcccctaaccccacagatgcctttgtgtcctgctgggagcctcctggcagaccctccgggagcccggagcctcccccagctttctttactgacccagccaaaagcgctgaaagcctcagcgtgctcctttacatacccgccagacacctccaggaaggtaaaggccaagttgaaagttaagagtctgtttacctccaggagcccattcagctcggccccacagacagcctgtgacctttacagcccggcctttgagcgcggccgccgcgcccccgggggttccggcaacggggacttggcacctcggtgtcagctcccgcccccacccaggctagggacccgccaacgaggggtgggggcgggaggcgcccacccgtcgcactagtgggcatttgctaaactacgttttatttttttgtaaagtgagcgcccgctgccttcgttctcccaactggagcaaactctgtggcggcgacgatggcggccgtcaggtcggtggtgatgaatagagaggatttctctgcagcgcgacgctcccctctcccgaaaggttggctccacggtcccgccggccgcgcaggtctggctgaactgcttggggtcgcccggctcctctcgattttatgaaaatggcctaattgaggtgtgctcttttctttccttcctcttttcatcttttccttccgtctgcattttctctcctctgtcttaggcttggtatcttcttttctttttatatttgtgtttttctcacc

SEQ ID NO: 24072 - DNA, 735 bp, Homo sapiens
  chr17:47075546-47076281
  hyper
cgacggggcgggagcccccactggcagtagtggggggttgaatttagggacacggggatgacccctggctgggcgttatttccacgcccagcccctccctatccgccggtggacgcccccccagctggaaaaccccggctcccgttcctcagtcttaggcctttccaggcgtggaaggggtacccggaccgcctgcgatctgtccgcttcgcgtggggaatgcagccctccagcaggacttgcaaggaagggggtcttgcctcccgcccagggcctggggcttgagccattttgatttgaaagtggggcgtgagcggggtggcgcggcggcggcggcgccgggtcgccatgctgcttcccgagacgccgaggctgggccgagaggcgcgcgcggtggcagtgagggaccctccccgccaggccccgctccgctcccccaggtccaccccttcccaaaccagccccgacaggtgaccgctccgtggcccaaagcccgtcttcctggccaacagagaaaaataaagtttcattctgcacactgcctcccgccccgcgccccactttctgaggaacggggagccctttctttcctggctccttcccacatctgggagctgtgtaggcagcgcacccacacaaatggcctcgcacctttcccaaatcgggattccagagcgatccactcaacaagcctcagtgatttaataaagcaaaaattaaaaaatgaataataac

SEQ ID NO: 24073 - DNA, 822 bp, Homo sapiens
  chr17:48619111-48619933
  binary
cgccggaggagcccactcttcttcccaacttccacgacctcccggtgtagggctctgaaccccgggtcactcaaagccactctcgttctgcaggtctcagcgctccgtcccccaccaacccgttcggcgcgggcgagccgggcaggccgacgctaaaccagatgcgcaccggctcgccggcgctgggcctggcaggcgggcctgtgggggcgcccctgggctccatgacctacagcgcctctctgcccctcccgctcagcagcgtgccagctggcttgaccctccccgcctcggttagcgtcttcccgcaggccggagccttcgcaccgcagccgctgctgcccacgccgagctcagccgggccgcggcccccgcccccgcagaccggcaccaaccccttcctctgagccccgccccgtcccataccggcctgcgcctgcgccggacgctccgcggccccgcctccggacccggggctgggcggggcgccggtgctagtggaacgccgagccagtggcggctggtatcccgcggcggctctggaagctggacgcggaccacggcccgggagctagaaactgaacgcccgcataataaagactggaaccctcgttctcagctctcaccaagtggactttttgcggggtgtggcggccgggtctcgaccacagcgtggatcaccggctgtttaggaaactgcagctgcacaacgtggggtgcaaaactgccccgcttcctttacagctcttctcaaccctcacctccatcccccgtcacccaggcaccttcgcttccagatgctgccaggctgtcactcaattc

SEQ ID NO: 24074 - DNA, 104 bp, Homo sapiens
  chr17:49229457-49229561
  hypo
cgcgggaagctgagtcacgagaatcgcttgaacccggatggcggagtttgcaatgaaccgacatcgtgcaactgcgctccggcctgggcgccaaagcgatactc

SEQ ID NO: 24075 - DNA, 144 bp, Homo sapiens
  chr17:57297033-57297177
  hypo
cgtgggccaccgcgcccggctgaatcaggattttaaatattcactctgcttttctagtcctgtgggagatatggtcttctccgtaaaatttctccctcagtcctgggtgatttatttcttttgcattgaagtgtgtggcttttc

SEQ ID NO: 24076 - DNA, 139 bp, Homo sapiens; identical to SEQ ID NO: 7020
  chr17:597508-597647
  hypo

SEQ ID NO: 24077 - DNA, 738 bp, Homo sapiens
  chr17:61777761-61778499
  binary
cggcgtggggaagcaacggtggcagggacaggatggaagggccgcgctccgcatcctactgggaggggacgagttcaggctgcggcggctgcggtcgcgggacactgggcgctcccggcctggctccgggataaccgggcggggcctgggccattcactgcctcggtttcccccggttggcctcgcgcgtaggcgccggcgcccccatccccgcccagagctgtggggccgcagagacccagccggggcgaccccggagcctggcccggggtccctcgggcggccgagtcctcccgccgccaggggccgcccccgcccctttgcggcccacgaggctggcggcggcgtccgggcacgcggtctccaggcccggccgcgaggctgcggggaggagcctgcacgagggcccggcagccccggcagcccccccagccctcggcgcctctgcaaccctgcgacgggctggggaggccggtatgcgtggttcccggagcacccgtcccccgaggctccacgtactcaagcgtttctggggcggaattctgtgggcagcaacgggggccccctctccaacaagcgcacctcatttctcacgtgggagccgcggcccagagagctgaggtgacagagcttgggccgcagagctgctccctccctgcagccgcacagcaggccggaggcacagccggcgagagacggccactcgctttggagcggcggcgaggccggcgccttccc

SEQ ID NO: 24078 - DNA, 523 bp, Homo sapiens
  chr17:61926187-61926710
  hyper
cgccaaatacatctcccagcccgccagggagcagccagcagaggccgcaagctcggccaagcgagccgggatgtccaaggcgggaacgtggcttcgcgcgcaactctctgagacgcgggccggctcacgtgtccgggccgcaccacgaaaacaacagccacaggggagaacaacctcttgttttcctcatacagccgagctttgctgcaaacgatccctttccttttgtttccacattgcgttattcagaagtggttatgcggcgccaaacacgcgctttctgccccacaggtttcagccttccccaccctcatcttccccgcgctcccctcccgtcgttgtagcttcctgctcgcccctctcatctcagccaaccctgctgagctttcgcgtgggcgtcacgagtttctaggcagatcaggaaaaccgctctccggccgcaccctcgcgcgcccccgcctggcggtgtagaacaaacggtctgagcgcttggcgggcgactgagagcggagcgggcgaggcc

SEQ ID NO: 24079 - DNA, 57 bp, Homo sapiens; identical to SEQ ID NO: 7023
  chr17:66913081-66913138
  hypo

SEQ ID NO: 24080 - DNA, 1362 bp, Homo sapiens
  chr17:68164820-68166182
  binary
cgctgaagcgagggcagatctgagtgtctgtaggagttgctattccaaaaaaaatcattactctctaattgttctgattttagatcagcaaagcgtgccgggcggtggtggagagactgagggcggacaaggcgagagggaacgagccgtccacccttcggagaagcctaggcgccttgtaagtaattcgcgaacagtcgggagaacaaacagccaagcggcgctgcagtggccgcacttgcgcgcgtctcaatcctgggggctctgcgcgcccgccccagtccctcgccccattgactcagtggcttctccgggcgctgcagcctccgcggggggcttcgaagggccgaggggctccggcagagagggagtggagagggagacgcgccgggaccgacgaacaatcctgcccctgcggcaaaggtctctacccggcgctggcacctcgcaggcccctcgaggagcacgcagggcaagcggcccaagagcgggggaaccgggaagtgtgtggggctccagacggagtaggaagctttgcccaaggccaggctgcaatcaggcagccgcaacagccgggcgcggagcttcccacctgctgctgtcccagctgggccgcaacttcctcctccccggcccgggcccgactccccggccgggctccgagggtggagggggacgaggcggcggcaggttccctccgctggcaacgcctcgcagcatcctcccctccccgccgcggttcccggggccggccgcgcggccaggcgcgctgcgattggccggcagcggccgggggcggggccaggagagccggtgtcgcacggaccgcctcaaaagagcccaggatattgcagagcgcactggagccctggccagcgcgcagccttcccggcgccggcgggctgggtcttgggaattctggtttgctttggctcactcgctttttacaaaccactggatcttacatgcctctgtaccccccacttccactccatgtccccatgctcctgcgccagcaacaggtaagggctgctgtgttttcttccttttcgctcgctgccggtgtgtcctggggaatggactctggccgccgtcccctaccctaccctgccccgctgctccagaggtgcccagctgtcacactgctgtagcgctcacccacactccggagtcccagatcatgcctatatagtttgtgtgcgcaccagaacatccccagagctaaaaatactgagacatgcttggaacagttgagcaatagaaacagatttctctgcagcatctgtttgtgctcataacttccaatgcaccagctgtagcgagatactgggtttggaggcaagggcgagagcgtctgtgttc

SEQ ID NO: 24081 - DNA, 968 bp, Homo sapiens
  chr17:73584153-73585121
  binary
cgcaaagcgccccagcgcctggagaggcccgggaggccggcctcaggggagcaggagtcggggtcggccagcgcggatggcgcgcccagccgggaacgccgttccgaccgcgggcaggcggacagggcgaaaccggcggccgagcctgccaccgccgggggccagggaacccctggtggccgcaggaagcccactgcagaggggaacggcggctgcagacgcccaggggctgggctgtccccgaaagcccaggagaggcaaagcaacgcgcagcgtcagggacgcgggcccaggggcggccgcggggggcgcctggaggagggaagcctctccggaggagaagagctgggcggccgccgtaggaggaagcggaaagataaggggccctcggctcggcggggccgccggacgcccaggagcctcaatggggacacgtcgggtggggacggaggcagctcctgtccggacagcgaaacccgcgaggcccaggagagcggcagccagcgcggcacagcccgggagctgcggcccacgccggagcctacggacatgggctcggaagggacaaaaaccgggccggagtcagcgctggagccaagcagcgacggcctggacagcgactggccccacgcagatacccggggccgggaagggtcgtcggggacggggcccctgggagccagcgagcattccggcggggactccgactcgagtccgctggggaccggacctggacggggctctcgggcagctatggcctccaggaccttcgaggacagctcgcgggctcctcgggacactgggccggccaaggacgcgagcgacaaccgggcgcagcggggcgccgagccagaaacaatgcaggcctcgacggcccgggctccgcgccaccaggtcggaaaggcggtggggcaggtgccagcggcggcaggcgagggcgaagcgggagccgcagcaggagcggggcc

SEQ ID NO: 24082 - DNA, 959 bp, Homo sapiens
  chr17:73615737-73616696
  hypo
cgagacccaccaccttcctgtagggcgagagtggcagcgacgtgcagctgttagccgtgtcccaccgtgggctgcgactgctcaaggtgacccaaggccccggcctccgccccgaccagctgaagattctctgctcatacaggtgcgctagcccacgaccctgggctagaggtgggggcaggtggcaaggtgacctcagttcatgcccgatccctgcgcagctttgcggaggtgctgggtgtggagtgccggggcggctccaccctggagctgtcactgaagagcgagcagctggtgctgcacacagcccgggcaagggccatcgaggcgctggttgagctattcctgaatgagcttaagaaggtaagtgtggggcacgggttgagaggccgggcagacagccctcaccgatgctgcatctccctgtccgtcttccctgtgggggcaggggctgggagtttgggccaaatccctggaagtctggggtgctaggtggaggggcaggccagcagggggagcaggtgggcaggcaggacagggaggcacaggcagacttgctgctccaggccctcgcctgcttgcccacaggactccggctatgtcatcgccctgcgcagctacatcactgacaactgcagcctcctcagcttccaccgtggggacctcatcaagctgctgccggtggccaccctggagccaggtatcgccagaggccggcaggggctcacacagggagggcatccacttggcagaggctgcccgggggcagagggtccagtgggtgagccacatccctgggtgccttccaggctggcagtttggctctgccgggggccgttccggactctttcctgccgacatagtgcagccggctgccgctcccgacttttccttctccaaggagcagaggagtggctggcacaagggtcagctgtccaacggggaaccagggctggctc

SEQ ID NO: 24083 - DNA, 383 bp, Homo sapiens
  chr17:73635994-73636377
  hypo
cgccgccttggccggcagcccccgaagcaagcccttggtctcactgtcctcaccggcttcctccaccctgagctgtgtcagctgggtggggactgagggccaccactaggtggaagtcaccaggggtgcaatgtgtgagacctgacaaacttgttctgcgggctgcggatgggtgcgagggtggaatctcggtgctgcgacgagtgtggggccagccgtggaggctccaggtgttctctctgccccagcagagcccggcaggagccccaacaggaagccagcgcggcatggctgccaccgacttcgtgcaggagatgcgcgccgtgggcgagaggctgctgctcaagctgcagagactgccccaggctgagcccgtggagatc

SEQ ID NO: 24084 - DNA, 185 bp, Homo sapiens; identical to SEQ ID NO: 6483
  chr17:74042063-74042248
  hypo

SEQ ID NO: 24085 - DNA, 124 bp, Homo sapiens; identical to SEQ ID NO: 6485
  chr17:75132773-75132897
  hypo

SEQ ID NO: 24086 - DNA, 1804 bp, Homo sapiens
  chr17:75368688-75370492
  binary
cgtcgcccgtccctggcttctctgacagccgtgttccatccccgccctgtgccccttctcccggacagtgccttctccagggctcacccaggagggtgcagcggtggcccccggggcggtggtcgtggtgggggtgttagctgcaggggtgccctcggtgggtgggagttggtggcctctcgctggtgccatgggactcgcatgttcgccctgcgcccctcggctcttgagcccacaggccgggatcctgcctgccagccgcgtgcgctgccgtttaacccttgcaggcgcagagcgcgcggcggcggtgacagagaactttgtttggctgcccaaatacagcctcctgcagaaggaccctgcgcccggggaaggggaggaatctcttcccctctgggcgcccgccctcctcgccatggcccggcctccacatccgcccacatctggccgcagcggggcgcccggggggaggggctgaggccgcgtctctcgccgtcccctgggcgcgggccaggcggggaggaggggggcgctccggtcgtgtgcccaggactgtcccccagcggccactcgggccccagccccccaggcctggccttgacaggcgggcggagcagccagtgcgagacagggaggccggtgcgggtgcgggaacctgatccgcccgggaggcgggggcggggcgggggcgcagcgcgcggggaggggccggcgcccgccttcctcccccattcattcagctgagccagggggcctaggggctcctccggcggctagctctgcactgcaggagcgcgggcgcggcgccccagccagcgcgcagggcccgggccccgccgggggcgcttcctcgccgctgccctccgcgcgacccgctgcccaccagccatcatgtcggaccccgcggtcaacgcgcagctggatgggatcatttcggacttcgaaggtgggtgctgggctggctgctgcggccgcggacgtgctggagaggaccctgcgggtgggcctggcgcgggacgggggtgcgctgaggggagacgggagtgcgctgaggggagacgggacccctaatccaggcgccctcccgctgagagcgccgcgcgcccccggccccgtgcccgcgccgcctacgtgggggaccctgttaggggcacccgcgtagaccctgcgcgccctcacaggaccctgtgctcgttctgcgcactgccgcctgggtttccttccttttattgttgtttgtgtttgccaagcgacagcgacctcctcgagggctcgcgaggctgcctcggaactctccaggacgcacagtttcactctgggaaatccatcggtcccctccctttggctctccccggcggctctcgggccccgcttggacccggcaacgggatagggaggtcgttcctcacctccgactgagtggacagccgcgtcctgctcgggtggacagccctcccctcccccacgccagtttcggggccgccaagttgtgcagcccgtgggccgggagcaccgaacggacacagcccaggtcgtggcagggtctagagtgggatgtcccatggcccccatccaggcctggggatatcctcatccgcctcccagaatcgggccgtgggggacagaaggggcctgcgtgcgggcagggagagtattttggctctctcctgtcttcggggtttacaaagtgtgttgggacttgcggggctgctctgtccaagcctgggtctggcgtccgcgtctctgagcctgtgagtgcgtgcgctttcctgcgtcctcttgactgccggtgctggggctctgc

SEQ ID NO: 24087 - DNA, 343 bp, Homo sapiens
  chr17:75447477-75447820
  hyper
cgcgctctgggaggctccttgttccgcgaccacaaagcccctttgatcctctgctcggctctgagccatgtgacccggtgggcgggccgcggctctcggcgcgtccagcgcagcccgacgttccgctgctggggtgagtcctgctcctttgttcttcccagccttgcaccactggctcgggggctctcaggtggcgcggccgcgaggcggaccctgatggccatggtggcggtgccgggagccacgctgtccctgggccccggcccgaggccggcaggaccgagcggggtccccaggagaggggtggcggggagctcgatctccacgcggggaccagattttc

SEQ ID NO: 24088 - DNA, 148 bp, Homo sapiens; identical to SEQ ID NO: 5760
  chr17:76034983-76035131
  hypo

SEQ ID NO: 24089 - DNA, 304 bp, Homo sapiens
  chr17:76137872-76138176
  hypo
cgggaatcctctccgtccagtcttctaacctagcagcctcacgtccacagagctgccttgtgaaactcagcagagccctggcttcctgcagagccgtgttctcccagcctgcttcatggctccctggttgagccaagcttgcggatccgtggggtgaaggtacccgcaccgcctgggccttagtggtatgtacgggcctgcatcgtgagcagcgggcgggggcccaggcaggtgaggcagctggccacaagggcagggcccggcccccctcccaaggctgtgtctgatattcttgagcctgttc

SEQ ID NO: 24090 - DNA, 663 bp, Homo sapiens
  chr17:76395100-76395763
  hypo
cgtcttcacccagagcagaaatgctgcgagtgggtggggtagtgccccaggagaaggttgggtgcagttaccaggagaagggtgaatgggtgctgtgtggcaagaagagcaggcgtctgccacgctgaggacttcaggcctgagacatggccagcatgcaggacagaggttggcctggaagtcctctggctaggagtagccccagctggtgtgactgattcaggtggacggcacaggtgaaggcgaggccacgtggaggtggctcctcattgggggcaggacgccttcctgttgtgagtcaggtgccgttttctctgtccgtgttcaggccggaagaactcccgcacaatgctgctcccactcctgcggaggttcccagagcaggtccgagtctccctctttcacacgccgcacctccgtgggctgcttcggctcctcatccctgagcgcttcaacgagaccatcggcctccagcacattaaggtgtacctcttcgacaacagcgtcatcttgagcgggtgagtgcttcccaccgtcagtgcttttgccctcctgctctgcaggctggagggcagtggaataggaacagtgggaaacccgttcccctcagtcttggagaacctgcttgtaggtctggctgctgtgcacccgcggcacctcccc

SEQ ID NO: 24091 - DNA, 1083 bp, Homo sapiens
  chr17:7760506-7761589
  hyper
cgtccgaatcctgcgcggggtgtaacaagcgctcagaccgcgcagcccaggctgcccgcccgcggaaccacagctcccggcagcccgcggggcactcacacaaagcccagaggctgccgggagctgcagttccccaccccctccatcttgctgcttgactgcccctcagtcccagaaccagagcccgtgctaaccccagcactggagctgctctgacgccgactgcaacagccattctcttctcgtagcagcatggtcggtccagctccggccatttgcccggaggcctcctctgggcctttcaacttcctaagcacctttcaggttgggtggtccgagatctcgcgagcgctcccgacctctttcctttcgcgagatcccctctcctccccctcctagtctcctcggcaacggcacagatctcgcgagcttctcctacttctctagcgctgtggctcactgaagcgtactacgccggatgtcttaagatatcgcgagacctttacctctggtttcttacacatcctttagaaactggaatttagcgagaatacattctttcatactgcctcctcccttgtttttctgtctcagagagatagtctgtcctaaatatcccatgtagcccaggccactgaattaaaacggagcgtattcgttctctgccccaccccgcaactcctgaaagcggcgcaactcaattacttgatccttatatgccccacgcgggactcatactacgtttcccgtgaacacgtgcagtccaaaccccgcccctgatatttatctcagtggacggtggccggaaaaggacaatggtttccatgtcagcggataaacgctctcccctcggctcccggacgcgacggaggtcgtagtagtagtgagtacgtgctgaggagcaaaggagtaaccaagagatccagtgaccgacagagcaagagccatgccgcgccggggcctggtggctgggccagacttggagtattttcagcgtcgctatttcacgccggcggaggtggcccaacataacaggcccgaagacctctgggtatcttacctgggacgcgtgtacgacctaac

SEQ ID NO: 24092 - DNA, 754 bp, Homo sapiens
  chr17:77825246-77826000
  hypo
cggtcccagccctgtccccaccaacactcccaatctccttattcctgcttacatagcaccctcacctccttacagacagtatcctctggatgttgatggtgtttccagcctgcatctcctgttggaacataagagctgcaagcgtcggggcgtgtccacacccttgtccgacgtgtccctggcatctggcacagtgcccagcacgtacctgtcagatgaatgttgaattaataggatttgtgtgaggaccgagtgagctcacacagccagatgaagctggtccacccgtacgggctggcaagagccgttggccacattctcagacattttgtgaacccgttgttgaacccagccatgattacaaattaaatgattggcatttacaattaaattatgtaaagaacaacaataataaatgctcactactgactccttcctagtgatttcctcagattcacatgttcccgggttctttgtgtcccctgtgtgtggtggaaaacgccacgcaggggcagctgctgctgcacatctcggcccaattctgccttcagcgctgtcctaatggtagcttgaagccagctatggctggagcttttactcaacagaaattggtaaacacgacaaatcgtgacttgattttttcttttgttgattgtctatactttagaaagtgatagaaaaaaaaaaaagaaagtgatgaaaaagtgttaatcatgcagattaaacttaaaagtgtgtcctgttggctgggcac

SEQ ID NO: 24093 - DNA, 33 bp, Homo sapiens
  chr17:77827276-77827309
  hypo
cgtgactggcctattttattatttgtgaatggc

SEQ ID NO: 24094 - DNA, 643 bp, Homo sapiens
  chr17:78667873-78668516
  hypo
cgagctgaagatttgcgtttacagctgtagagcaaatacaggcggctctgacatctcagcttttgtttgccactgctgcagcctcaggtgcctcatctggggcttcattcagagtgggtggggaggcgacaggtcgaggcagttgccccgtgctcacgaatccctgacacagctggtgacctctccaggtgacctcttcaagcctggtcccaggggcaggcatgcccgggcatggccctcgcagatggctttgctggcctggtctggcaaccgttgaataaatactgatttcccacccaggtgaggcgcatggtagatgtttgttctgtgcattgcgttggtcggcctccacagtcgcacaatctctcagtggagtgagagtgtcttccatatgtggggccgtggtgctgaaggcttgtgcgttgagtgcctcctttcccgtgaatgtgttggttctggtgaccagggtggagcctccctgcgccccttccttccatccagcatcaggttcccagttctctgcctgccaggcaggcgtgcacatatggagtgtctgggaacctgcagctgttgatcacggctggtggtagctccgcacttaagtaaggaggagtgattttcccgaggagatgtggtattggtc

SEQ ID NO: 24095 - DNA, 212 bp, Homo sapiens; identical to SEQ ID NO: 7039
  chr17:78791780-78791992
  hypo

SEQ ID NO: 24096 - DNA, 197 bp, Homo sapiens
  chr17:79619069-79619266
  hypo
cgtgcatatgtggaggtgtgagcgtgtttgtgcataagagtgtcatgcccgtgtgtgcgcacacgtgtgagtggacactcctcggtgcgttgatgggagcgcggtgcctgtgtgcgcacacgagtgagtggacactcctcggtgcactgatgggagcgagatgcccgtgtgtgcgcatgtgtgagtggacactcctc

SEQ ID NO: 24097 - DNA, 83 bp, Homo sapiens
  chr17:79774975-79775058
  hypo
cgttagaaataaaaatacagagcaaaatttaaaaatgcaaagaatgaggtgaagagttcaaagtggtcacctcggggccgggc

SEQ ID NO: 24098 - DNA, 313 bp, Homo sapiens
  chr17:79913147-79913460
  hypo
cgcccggcctacaagacctctatttttttttgttctggtttttcttcttttgttttctcaggacctctatttttaaataaggagggagctacccggcgtggggctcccggggcccacacactcacggcacgtccttgagtgtgtggcgcagctcgcggccgaggttctggatgtacagccgcaggccctcctgcaccggctgccccgtcaggtgcacgttgtccaccgtcagctgtgcctcgtcaaacagccactgcaccacgaacacagggcctgcgggcggcggggctcagttcggcctcccctgaccccc

SEQ ID NO: 24099 - DNA, 1255 bp, Homo sapiens
  chr17:79988364-79989619
  binary
cgccgcccactggtgggacgtgaggccagccagagagcggggctggccaggtctcccgtgctgaggccgtgccacggtgcgctggggctgcgtccgctcactgcgctccttgccctgcagtgatggcgagcgaccaccgagaggcgctgctggacagggagagcgagaacgcgtctctccgggagaagctgcggctccgggaggcggagatcgcccgcatccgggacgaggaggcccagagggcgagcttcctgcagaacgccgtcctggcttacgtgcaggcgtcccccgtgaggaccctgagccccccaaagtgagacaggccgggaggacccgggcgcagtaggagtgcatcaggcggcgcccgagatggaccaggggctgcgtcccgcccgcgccgcctctttgagacccgggtcgtctgttccacgcggcggttgcggcgactgttggtggtgtcgcggctgcgggggaaccccgtgggaggcgcctgggaagggctccctaccggccccttcttcccggtcgacgccacgtgggagcacaccgggaaggggtcccgcgggcgcgtctccccctcgccttttgcgatgtcaccgtgaacgctgcggccgcctgcgcgcggcggggtttggaaatacagcgcgtttgcactttgtgatacattctggccccgcctctccctccaaacgcgcgaccgtccgtgcctctccaaacgcgcggccctctgcccccagccctgcagggagggcctgccggggtgcggctgttcgcccctcctcgccgctgccttgaagggacgggagggccgcgggggctgtccgtctgggggttcgggcggctgcagaccccggagttcccagctggctcccggcggcagggggcgggtccccgagaaagcgcagcgcgcggagccctccccgccgggtccaggtcgctgggctctctccggcctgcgctgcgccccgagggacccgtaggagacccccgggccggggtcgcgctggaggcgggggcgccgcagctcgcgcagctctgcccgggttcgggcggccccgccccgccagccgcgcggccgggcgccccccgcccgcccccgcccccgccccccgccccccgccggccgcgctcggctgtctccgcgcccggcgctcggcggcgctcggctgtctccggccgatcgctcggcgctcgggtccgcggccgctgcggcgccgggcatttctccgcagctcggctcgcggccgcgcccgcc

SEQ ID NO: 24100 - DNA, 221 bp, Homo sapiens; identical to SEQ ID NO: 23529
  chr17:80491467-80491688
  hypo

SEQ ID NO: 24101 - DNA, 748 bp, Homo sapiens
  chr17:8055144-8055892
  hyper
cgtccaaccacacccctactactgagcattttctgagcgccaggggaaaagggaaggttgtggccaacagcaggaaccagcgctgggaacgggatgttctagtccgaagtgggctgacatcacaggcggcgcagggccagggactggagaacagagacacggggagcgctgaaagcctaatagggtcctggtaccggggcaaacctggggcccctcgagtaacgagcaagaagaccggggcatgcccgctgagagtcggctgtggggccgggaaagctgggacggggaggtggggacaagctggaggtaagatgagtgggtcaggagtgcagactcccggtgcaagatttcgaggaggacttcggtccttgggggcagggagagggtgggtagcggtaaggacgacagtgtgccctctgcctgggccgaaagtagcccatcagattggaagtggcagcggtccggctcagggacggagatcggccccaggatggccgcagagatgcctacctggtcgcaggagtgtcctccgcacgcctgcccgccgccgctccagcccgcagccgagtggaagctccaccgggcgggcggggaggcgggttgcataatgccgggcactgccccctcattggcctcttgccgacggagccgcaggccccgcccccgattggctggggatctcttcccggcgcctgattggctagtggtctccactaaggtcagggctgtgtcacacacacgggcgcac

SEQ ID NO: 24102 - DNA, 275 bp, Homo sapiens; identical to SEQ ID NO: 23530
  chr17:80747037-80747312
  hypo

SEQ ID NO: 24103 - DNA, 52 bp, Homo sapiens; identical to SEQ ID NO: 7047
  chr17:80794418-80794470
  hypo

SEQ ID NO: 24104 - DNA, 1173 bp, Homo sapiens; identical to SEQ ID NO: 23533
  chr17:80797632-80798805
  hypo

SEQ ID NO: 24105 - DNA, 748 bp, Homo sapiens
  chr17:80832134-80832882
  hypo
cgcactgtgggctgcaggcttgaagaaggatgtgagtttctggagtagcctggactgcacagccagggcctccccggcatgtggcggggccagcgttggcctgggtcccacttggctttgatctcgtggggctttggtttttggaggtcctgggtgcgtctccaccatggctcccgggttcccttgcgcacaccgagccagcagctgctggggcctcagggctcgcagctcacaggcttctgacgcctcagcctggagctggcgttgtgcccctcgcccctttacctgtgccatcccggccgcagacccaagggtgcccttggagccgtgcccgccggcctgggtgtcaggcttgtccaacgggttcttagagaacctgggccccatccctccttggcccacgcagactccaggcatccggccgggcgggctgtgagtcaggctgcaccaggtgagcgtgtgggatgctgctggtgcgagcctccctgcccaggagccctgcgcacccgggtatcggttggggtgtgcccttccagatctccctcccttggtttgtcataggtgaccacattttaattaccagcttttatgcccgtcaatttgggaacgtgatacaatcttgatttctctaactttcacaagttcttcggtgggtcctgtaacagtgggtgcttgggatcagagcatcagagtggaattttcgcagggaaatggaaatgcctgatcgagctgggcggtggcagcagcc

SEQ ID NO: 24106 - DNA, 467 bp, Homo sapiens
  chr17:81062114-81062581
  hypo
cgcgaccatgggtacgttggccacctgaaggttgagtcccgcagcctagagactggagcgtggggaccaggaggagcttcttagcggaactgggctggggctcatgcagccctccaggagcccccgacgcgacgccctggctcatcccgggtgaagaggctgctgagtctgaactgatgacagtggacgggtggccgccggttcccaacgcatggttgggcctggaacccaggtgactctgggagatgtggtcacagtcacagccgtctgtgggcctttgggttcaaaacagcgcgagtcacaggagacagaagggaatctgagcttgcgattgctcattcttgtcaccctcctggctctgggacacctctgccatctcctaccaagggtaccccattcctggcgagttggaaagtggcctcatgggcagaaaacgagggcaaagggagctgcgtgctgtgagagac

SEQ ID NO: 24107 - DNA, 161 bp, Homo sapiens
  chr18:13195815-13195976
  hypo
cgcgagccaccgcacccggccaagaagtacatagacatttttaaaaagagataagaggaaaaagataagcagacatgggagacacacggctcctacgtgtacagagaatcaggctgtttgtttacttcacctccgttggtctttggggctccacgctgccc

SEQ ID NO: 24108 - DNA, 1491 bp, Homo sapiens
  chr18:20512643-20514134
  binary
cgattcttttacaaatcaggagaaataggaatacctactatcggtttgaatctcaaacgaacagccacaagaaaaatggactttttaaaaaaaattatctaacagcatgttgtcccaataaataatgctgaaggagattccttctcgtttcaaatttgccagaaacttcccgtttaacctcagcaaaatacagatcgttttgatctatggcgttaccgcacaaccctgtcaggtcacatcactaaactgcagataacagcgacaaggccgaaaactatgttagacggatccgcgtccataccccccatcagttaattttaactcttcattcggtacaggtcactctacacatgcttccctgcaaaatgcttaagctagacacagtgtacagataactttcacagaaccgcaagggcttgatgctcccccaacagaacggcttgagctttccccagcgcaattcagaaatgctgtggcggtcgccagactcttcgggtagctcccggcagctccgaggtagcgctcccctccccaaccatcgccctccgggatgggccgcaccgaagagcccgctcctcagctagggcacgaagtgcgccgccgcgatgggcagctggaggaaggggcgtgacgcaagtggaactcccgcgtgacgtcgcgcgggctcccgggcggggcgggtccggccgcctccgagcccggccggcagcccccggccttaaagcgcgggctgtccggaggggtcggctttcccaccgaggatttggcactctggtgagggaaaagggcgaaagagaaaagcgagcagccgtcctttcacagcctcagaaagtgctcgcttcccttcgggggctttcgcgaatcccgaggcaatctcggaggcggtgagtaaaagcaatctctttaccccacccggagctctgggtcggagcgactgcttctggtctggagctgcgtgcttggcgaagggctcccggggtaggggtggctcccggctctggggttgtgtctgatgaaataggccgggcccgggctacactcggtggtggtggaccggcgggaggacgagcgctacctcagtactacttctgggtctcccgcgcgggctgaggaagcgcctttcgccgccaagcccgccccgcgcatgcgccgactgcggctcgcgcgcgcgcttcggaggttttttggccagacccgcacgcggaaccggcgcgggcacctggggagaaatggatggagaagggacctggctggaaagcctttgccccgctgctctgctccgcccataagaggacccctgaaatgtcccgtgcagtttgttcaagtcccctgtgtgatgaaatgtgcctctcgccttacccgtgtgagaatacctgtggtgtggcagcgagtattttggtgagcacctgcagtgtagtggtttatactaaggaatacacacaaattacaggcctttgagcccagaatgcaacttgggaggtaagacgtgac

SEQ ID NO: 24109 - DNA, 920 bp, Homo sapiens
  chr18:22930420-22931340
  binary
cgagatgacttttttcttcttccaaagaaaaggaaaaaagaagcaccgcacggttttgcatatttattctttgcgaaaacacacaacagaaactttttcctccagcccagatgtagatctcagacgggatatttttttttcctccctctccggataatttcgtttctttctctctctctctctttttttttttcggttgttgttgtcttttctcgcccactttctaccgccgccccattcggggatcctcctcccgtcttcgtctccccccaccccgacacctcaccctcactccacctaggggctcagcggggaggggagcgcgcgcgcccccgcactcacactcacactcacgcgcgcacacgcctcgcagccacgcagccctcgctccgctacccacagtgacactcgcggatgggggaaagcggggagcagggggttcctccttacctttgagggatctcggtttcgcttgcttgcggcgagacatcctaaaagcaaacagctgaagttgtttcaattcagccctgaaagaaactatacttcctcgtggccgcgcgcccctcgggccgcggcgcctcgcgccctccgctcggcctccctcgcgccctcgctccgcgctccgctcctcgctccggctccggctcgcgctcgcgcgcggggctcgcggctgcccgagctccgcgctctgcacgacggcggcggcggcggcggcggctgctgcaccaaactttcccagccttcgacccccacccccaatctccaagaaaaaaaaaaaaaaaggaaaaagaaaaaaggaaaggagggaaaaaaagctaaaaaaaaaaccccaaagacaatgtttgaagagccgtcagctacactaaaaagagaaaatccgttactatttccacctcaatcaaaattcacatagttcatgc

SEQ ID NO: 24110 - DNA, 525 bp, Homo sapiens
  chr18:24127669-24128194
  binary
cggcccggcgccctgctcctcgagcttgcggatgaccgcggccagcgtcaggttggcgctgcgcagctcggggtccttggtgaggtcgagcgtgcggcagtacgggggctcattgaggtagcggttgagggagctgcggatgctgatgagcgacgacttgctgtagagctggccgcttttggagcgggcctcggcatagaaggagcgcagcacgcggcacagcgcccccttgtccatggtctcgaagtccgggctctgcgccttctcgctcaggtactcccggaagatgcgcacggcgtagcgggtggccagccgggtgttctcgctcagccgggcccgctcggggcgctgcagcacgtcggggtccagctcggagccgtccccgggcggcccaccgcgggcccggggcgccagcagtcgcggcggcgcctcgggctccagcgcggcgctctggtccatattgatcatatggaccggctcgggctccagctcctccccggccgagtcctcgggctccaggggctc

SEQ ID NO: 24111 - DNA, 94 bp, Homo sapiens; identical to SEQ ID NO: 7055
  chr18:3119830-3119924
  hypo

SEQ ID NO: 24112 - DNA, 1823 bp, Homo sapiens; identical to SEQ ID NO: 22821
  chr18:32556625-32558448
  binary

SEQ ID NO: 24113 - DNA, 186 bp, Homo sapiens
  chr18:3330588-3330774
  hypo
cggcagctgtgccaatagaaaaggaaaaggactacctgggggcggccatgtccaacatggaggctccatcttctctttttttgttatcacgtgtacagtaataaagaaatgggcaacatggtgcacctcaggcagagacgcgcctggataataaaaaaaggttaggatgggggataccagagattc

SEQ ID NO: 24114 - DNA, 995 bp, Homo sapiens; identical to SEQ ID NO: 7060
  chr18:3879130-3880125
  binary

SEQ ID NO: 24115 - DNA, 800 bp, Homo sapiens; identical to SEQ ID NO: 23121
  chr18:47339411-47340211
  hyper

SEQ ID NO: 24116 - DNA, 1490 bp, Homo sapiens
  chr18:5237294-5238784
  hyper
cgggcctttcccgcctaccgagcctgcccaccacccgaagtttaagctcatcttggaggacctgacactcaggaagccgtctcccgttgttccaccggctttgtggccccaatgtctgtataagctgctgatttgccttgggaaaacaaaccagcatcgatttcagagaaattactggataatttgcgctgtgaggcgcctagatcgcaaggcgcactccgcaaatgacagccgctcccgtgcacttgtccagtcattcgggtggcatactgtccgggtggaagcccgccaaaataatccatttggaagggacggagggcttcgtcagaaattgccttcttgtagctatgagacattgagcaaaacagataagaactggggcaatggaggcataaacattaaggctaggatgtatttttggggagaaagcggcggctagcagggacgaagctcaacttcatgcgccgcgccccggaatgctttgcctttagccactagcggagccgcccgcctgagggagccctccgggagtgagcgcacgcaaccgtgcagtcagattcctccgccgaccgcggccctctctcctcgggctttgccttcgctctctagcttttcttctttcactcccgctcgccgactccagcccgctgggctcacgctctgccggacaccaatcccggcggccctgcccgacggagctcaaggctaggcctggccttgtccgcggagtccgcccctcgccgccaccgggatccgcccccgcgccgacacgcacttccggcagcgccgcggccgggagggaccgagcggggagcaaggcctgcggggaggcgcaggatggacgcgttggctgtcatgatgtaggacctcctgacctagaaccatgcccggcgcagggagaacaacgagcttacggaccgggtgcgggggctgctgtgcgagaaagcctacctgctggcccgggagcgttcgccggcccacctggtggctttccctggacgtttaacggcgactccgcccggcctcccgactttttgatgcaggcgttctcttacatgactttcttcgaggctagattctcgaaagacatcctgaaggtggctttcttaattagctgcctcaccggctggcggagcagttcgtagtcgcctacatcgagagggagagccccgtcctggctcagtactggggcttcgtggacgcgctgtagcgggtcttcgccgtcgtgggtaggaaacagtcgggccggatccccggtgtctggggagcggctgccggccgggcccgcgcgagccgcttcactcctacaagcccggctcactagttccaagctgctggactttgaccctcgctgggaagcttgatcgccgcctgttctcgccaatctctatgcctttgcactgcccagcaacccggtcactgcccaggacctgttaaaagttgaatggacctcccagaatcacgccgctgccaccgccgtttctagagac

SEQ ID NO: 24117 - DNA, 116 bp, Homo sapiens
  chr18:54483280-54483396
  hypo
cgcgcagactatcaccacggctcctgatgcctcagggcctgaagcaaaagtccaggaggaagagcatgaccttgttgacgatgacatcaccactggtaagcacagacatctttaac

SEQ ID NO: 24118 - DNA, 128 bp, Homo sapiens; identical to SEQ ID NO: 7066
  chr18:60609821-60609949
  hypo

SEQ ID NO: 24119 - DNA, 650 bp, Homo sapiens
  chr18:60985398-60986048
  hyper
cgacatctcccggttgacgctctccacacacatgaccccaccgaactcaaagaaggccacaatcctcccccagttcaccccgtccctgaagagctcctccaccaccgtggcaaagcgtccccgcgcggtgaagggcgtcaggtgcagctggctggacatctcggcgaagtcgcggcggtagcggcgggagaagtcgtcgccggcctggcggagggtcaggtggaccacaggtggcaccgggctgagcgcaggccccgcggcggcgccgggggcagccggggtctgcagcggcgaggtcctggcgaccgggtcccgggatgcggctggatggggcgtgtgcccgggctgggaggagaagatgcccggtgcgggggcggcccccgggggcgcggcgcccacatctcccgcatcccactcgtagcccctctgcgacagcttataatggatgtacttcatcactatctcccggttatcgtaccctgttctcccagcgtgcgccatccttcccagaggaaaagcaacgggggccaacggcacctctcgccccagctcccaccccacggcccccagagaaagaagaggagttataatccagctattttattggatgtgctttgcattcttggacgagggggtgtcttcaatcacgc

SEQ ID NO: 24120 - DNA, 418 bp, Homo sapiens
  chr18:74113780-74114198
  hypo
cgcgctccatctctccaccaaccacacccccgcgccgcacccctccactactgtttataggctctcaagagggacagggaaaaccagtattgtttgagtgccaactctgcataaacaatttccacagaatgactgcacatgcatgtgcgtgcctatgtgcatgtgtgtacgcgcgtgtgtacacgtttgtgtgtacacgtgcgcgcatgtgtgcacgtgaacgtgaccagtggtctctgcatcccacagggaggggagggcttctctgaaaagaaattgtatatgcacaagccttagccccgcgccttctatttgctgaagacatcgcctcggtcaacaccaatgaattcatttactctgtgaatacaaatcccgccagtggccacaacaatccctcttgctgagttcagcagtgaac

SEQ ID NO: 24121 - DNA, 79 bp, Homo sapiens; identical to SEQ ID NO: 7071
  chr18:74518710-74518789
  hypo

SEQ ID NO: 24122 - DNA, 196 bp, Homo sapiens
  chr18:9333421-9333617
  hypo
cgatttaccagcataagggtttgacactaggtcatcatttccaagggaaggtgccccgcggacggtctggtctagcgggctctaacttaatcaccctggaatcttctttaaaaagcaaattccggccgggcactatggttcacacctgtcatcccaacgatttaggagaccgcggtgggaggatcgcttgagcccc

SEQ ID NO: 24123 - DNA, 467 bp, Homo sapiens; identical to SEQ ID NO: 7072
  chr18:9478452-9478919
  hypo

SEQ ID NO: 24124 - DNA, 81 bp, Homo sapiens; identical to SEQ ID NO: 7073
  chr18:9514129-9514210
  hypo

SEQ ID NO: 24125 - DNA, 652 bp, Homo sapiens
  chr19:1003171-1003823
  hypo
cgctgctggatgtgctggtggcggtgctgcaggcgcacgcctgggaagacgtcggcctggccctgtgccgcactcaggaccccggcggcctggtggccctctggacaagccgggctggccggcccccacagctggtcctggacctaagccggcgggacacgggagatgcaggactgcgggcacgcctggccccgatggcggcgccagtggggggtgaagcaccggtacccgcggcggtcctcctcggctgtgacatcgcccgtgcccgtcgggtgctggaggccgtacctcccggcccccactggctgttggggacaccactgccgcccaaggccctgcccaccgcggggctgccaccagggctgctggcgctgggcgaggtggcacgacccccgctggaggccgccatccatgacattgtgcaactggtggcccgggcgctgggcagtgcggcccaggtgcagccgaagcgagccctcctccccgccccggtcaactgcggggacctgcagccggccgggcccgagtccccggggcgcttcttggcacggtgagtggggaccctgcttcccttaggagggtgtccaggccactgagtctgcactgctcatggatcacaaaaggcaacgtgaggccagacgcggtggctcac

SEQ ID NO: 24126 - DNA, 836 bp, Homo sapiens
  chr19:1004884-1005720
  hypo
cgctggccaacggctcagcgccccgtgccctgcgcaagtgctgctacggctactgcattgacctgctggagcggctggcggaggacacgcccttcgacttcgagctgtacctcgtgggtgacggcaagtacggcgccctgcgggacggccgctggaccggcctggtcggggacctgctggccggccgggcccacatggcggtcaccagcttcagtatcaactccgcccgctcacaggtggtggacttcaccagccccttcttctccaccagcctgggcatcatggtgcgggcacgggacacggcctcacccatcggtgcctttatgtggcccctgcactggtccacgtggctgggcgtctttgcggccctgcacctcaccgcgctcttcctcaccgtgtacgagtggcgtagcccctacggcctcacgccacgtggccgcaaccgcagcaccgtcttctcctactcctcagccctcaacctgtgctacgccatcctcttcagacgcaccgtgtccagcaagacgcccaagtgccccacgggccgcctgctcatgaacctctgggccatcttctgcctgctggtgctgtccagctacacggccaacctggctgccgtcatggtcggggacaagaccttcgaggagctgtcggggatccacgaccccaaggtgggcggcctcggggggctgcgggtggccttggggggctagcggtggccccgggctgggctgtgtggggcaggggtggtcagctggacgtggaggacgtccactaggccaactctggtcccaagagacatttattcaattaatttatttatttaaagaaaaatagcc

SEQ ID NO: 24127 - DNA, 865 bp, Homo sapiens
  chr19:10397603-10398468
  hyper
cgaggaggcggggctgcgggcctccttatctctagagccggccctggctctctggcgcggggccccttagtccgggctttttgccatggggtctctgttccctctgtcgctgctgttttttttggcggccgcctacccgggagttgggagcgcgctgggacgccggactaagcgggcgcaaagccccaagggtagccctctcgcgccctccgggacctcagtgcccttctgggtgcgcatgagcccggagttcgtggctgtgcagccggggaagtcagtgcagctcaattgcagcaacagctgtccccagccgcagaattccagcctccgcaccccgctgcggcaaggcaagacgctcagagggccgggttgggtgtcttaccagctgctcgacgtgagggcctggagctccctcgcgcactgcctcgtgacctgcgcaggaaaaacacgctgggccacctccaggatcaccgcctacagtgagggacaggggctcggtcccggctggggtgaggggagggggctggaagaggtgggggaagggtagttgacagtcgctctatagggagcgcccgcggacctcactcagaggctcccccttgccttagaaccgccccacagcgtgattttggagcctccggtcttaaagggcaggaaatacactttgcgctgccacgtgacgcaggtgttcccggtgggctacttggtggtgaccctgaggcatggaagccgggtcatctattccgaaagcctggagcgcttcaccggcctggatctggccaacgtgaccttgacctacgagtttgctgctggaccccgcgacttctggcagcccgtgatctgccacgcgcgcctcaatctcgac

SEQ ID NO: 24128 - DNA, 1137 bp, Homo sapiens
  chr19:10624638-10625775
  binary
cggcgcaggcccccggaagcctcagccgcgctcgccgactgctgggagccactcgggtctctgccgcaggagtggcgtccgcagcagaccaggcgcaggagcgcgtggcgcaggtcgcggttggtgagcgtgtagatgatggggttcagaagtgagttggccatggccagtcccaggaagggatcggcctgcaggagtacaggacaggtgcgcgccgggcacgccacgtcgagcaacagcagcaggaagagggggccccaacatgccacaaaggccaggagcaccacgctgagcgtgcgcagcaaggccagcgagcgcggcttgcgacgcgcccgggtcgaggtggtccccgcagtcccgggccgtgccggcaggcgccgcgcgttggcgcgtacctggcagtagatgcgcgcgtagagtgcacagatagcggccaggatgcccacgaaggcgagcacgcagaagagcacgtaggccttggcgtagagcggcaagacagtggagcaagcgtccaggcgacccaggcaattccagcccagcgctggcaggagcccgaggagcagcgacacgccccaggccgcggctgccatcgccagcgtgcgcccccgactggagacgggcgcgggccccctgcgcgccatggtgaggctgcgctccagcgcgatggccaggaggctcagcacggacgcagtgagtgccacgaagacgcctccctcccgtgcgaaccagagcgcgggggacagtttcagcgtgagcggccccgacagtaggatgttggcggcgtaggcggcgcctgccagcagatccgacaacgtgaggctgcccaggagcaggaacatgggagcgtggaagcgcgggtggcgtccgagcaccaacaacacggctagattctctagcacgatgaaggcgcacaccgccaggcacaccacggcgtcggcgcgcaggccggcacccggctggtagcgcgcaccgcggagcttgccggtgtagttgtaatgcaggacgatgacctcgctcaccggcgccggccgcagcagccccgactccatgggccgcgcgccccaaggctgttggagaggcaagatacggtgtcaggccgcggtccccgtaagcacgctcgcagcagccggctaagtc

SEQ ID NO: 24129 - DNA, 730 bp, Homo sapiens
  chr19:1080033-1080763
  hypo
cgcctcccacgtgcgccagctgcagcgggaccaggagcccgatgtgcactacgactttgagccccacgtctccgccaacgcctggtaccgccacccagctgccctgtccccggcgcacaaggccctgcctgggagccgggcttccctctgtcgggggcatgaagatgaagctgtcttgccccccatcacctcccctccttttcccggtttcttccactaggtcccccgtcatgcgtgcccggaagagcagcttcaacgtgagtgatgtggcgcggccggaggctgccgggagccccccagaagaaggcgggtgcactgagggcacacctgccaaggaccacaggggtgagtgtccggcggggcccaggggcggacgctggctccctgcgacccaccctggcccttcaccagagacgcctctttctccagccgggcgaggacaccaggttcacaagtcatggccgctctcgatctcagactcggacagtgggctggaccccggccctggcgcaggtgagggaggctctctggcgggctggggtgtggagctgcctcctctcctgagcctcagggtttcatcacccaccggggtgatggagggggcccccctggctgggggagtctgaacagtcctgattcccgcccaggggactttaagaagttcgagcggacgtcatccagtggtaccatgtcgtccacggaggagctggtggacccagacggtggagcc

SEQ ID NO: 24130 - DNA, 1052 bp, Homo sapiens
  chr19:12995814-12996866
  binary
cgtccgagcgcgcgaatctccagccgcagccttcccacgtgcaggcgtatggcttctcccctaggggacaaggaagccataagcgccactgtctgcccagtcatgtccccgggtcccctgcatctggccacacccctttactcagcctgggctgggactaggatgaacaaagtgaggcccctagggcacaaaatttaaggaggcactcactctcagaggccagccaagtccaagtcccgccctctgcaacccttcttcccctgtaactacagcgggcgccgcgccctttctcatgtccggggccccgccccctcacctgtgtgcgtgcgcagatgcgccttcaggtgggagctcttggtgtagctcttgccgcaacccgggtgcgcgcacgtgtgcgctgcctgcctcttgcgcgcccacgaacgtcggcctcgcttggatggcgcggtctcggctatcacacctggatcctctgcagtccccccgagtccagtgcccaccgtcccgggtcccaaacaactcaggaaggagggggacgtggcgggaccgggcgcgggtccctggagcccgcggaagagctggaagtgcccttggtactgaggcgccgggtacatcgcggggtacccggacagtagcccgtagggggcgcccgacgccgcaggcactgaaagcccggtccgcgggaagtagccacccgaggagccggcgccgggccccgggtacaccggttgcagcgccagcgccttgggctcgggggccggggctggagccagggctgggcccacgaaggcgtcgggagcccgggctcgcagggcagggcgcacccaacccgagtgatcctccgaacccaaaagcccagccaccagccccgggccgccagcatatgcgcccagagtctcgggcggcggcggatattgcgccccggaggcctcgctgggcgccagagcgcaggtctggggcgcgccaccgggctccgggcccgagaagttggtgaggaggagatccaggtcccaggtggcgtccgcgcccctctcatcgtcctcttcctcccc

SEQ ID NO: 24131 - DNA, 576 bp, Homo sapiens; identical to SEQ ID NO: 7077
  chr19:1333769-1334345
  hypo

SEQ ID NO: 24132 - DNA, 731 bp, Homo sapiens
  chr19:15288179-15288910
  binary
cggacagacacgtgggacacaccgatgggcagatagagtgcacagagaaacagacggggcaagtggatgggcaggtggaaagagaggcagggcccacggacaaacagactgggatggatgcatagacagacggatcgatcgggtggatgggctcacttgcaagtgcgctcgcggccaccggcgtggcagtcgaagttgtcgtagaggcaggcgggcgagctgcaggcggggtcgcagcggctgttgttgaagaggcgccagcactgcagcgcctcgcattgccgccaggggtcgcccacgctcagcgagcagtcgccgccgtcccagccgcagcctgggctgttgcactcgcggtcgcagcgctggtccccgcgcttggcctggcaggcggcgcgcgggcaccgcggctcctccgagacctcgggtgccgcggcgggcgcctcgcagcgcggcccggtccagccctgcgcgcaagcgcagcggaagaagggcgcgagcggcgcggggcggcaggagcccccgtggagacagggggcggccgcgcagctggcgttgctggcccccggcggcgaccccgggaagctgcggcaggagggtcccgacaaccctggggggcaggcgcagcgcggcccgcggggcgtctgctggcatgggacgcccaccgggcactgcagctcccggcaggagcgcgccacccgctcgcaacgcggaccccagaacggctgggggtc

SEQ ID NO: 24133 - DNA, 477 bp, Homo sapiens
  chr19:15695298-15695775
  binary
cgaggttcccggcgcgatggggccgggatgggggtcctgggcacagtcagagtccccaccccctcccccgggaactgcatcggccagacgttcgccatggctgagatgaaggtggtcctggcgctcacgctgctgcgcttccgcgtcctgccggaccacgcggagccccgcaggaagctggagctgatcgtgcgcgcggaggatggactttggctacgggtggagcccctgagcgcggatctgcagtgacccaccactgtcaggtctcagagccacccgcgccctcctcaggcacctttgcagattccggggaatcaatctgtgcctgagtcccacagacagccagcagggggcgtcggagaactgcagggatccagggcctggcgaggggaaggcggagtatttctgagccaagaccctgacagcctctctggttgagcacagtggccccgtgctgagggcgggttgtcccagagc

SEQ ID NO: 24134 - DNA, 1472 bp, Homo sapiens
  chr19:16186802-16188274
  binary
cggggacgtgaccccccccccaggctgacccgttcctcgctctgtcgtccccaggtggaggaggagctgacgcacctccagaagaaactaaaagggacagaggacgagctggataaatattccgaggacctgaaggacgcgcaggagaagctggagctcacggagaagaaggcctccgacgtacgtgtgcagggatgcgggagcccgcggcggggccaggccggagccccggggccgggaaggcggggagagccgcagggggaggaggaagaggaggaggagaaggcggcgcctcccagcgctttctccaaataagtcccgaaaaggggcactttccagcagctgtggccagcggtgccgacgtcaggccctcccccagcggtgctgacgtcggcggtccggccgggtgacctcatcgccccgacggcagccggcccggggggcggggagaggcgggggcggcccccgcgcaggcaaaggcttggggggccggggcgcggctgtgcagctctcgccggagccgagcccagccgagcgtccgccgctgcccgtgcgcctctgcgcctccgcgccatggccggcctcaactccctggaggcggtgaaacgcaagatccaggccctgcagcagcaggcggacgaggcggaagaccgcgcgcagggcctgcagcgggagctggacggcgagcgcgagcggcgcgagaaagtgagcgccccggcctcgggccccgcacccgcagcctcctcccccgcgcgccctcctttcttcccggcttcccgcgctgcccgcccgcgcgcagtcctcgggccgcctttttacgccctcggacgccgatcgccgacccacatccctgcgcccgcagccaggaccccctacttcctccgccgtcctccttcctgggcctgggacaggggagggggcgccgcctccgggtcgggcggggccggccaagcgggaaatggggggatggggcggagggggtgagcgatctccgggtggagaagtggagcggcgggagggggcgtatcgtgcaggctccgactccggggctggcgccggggtcccgggccgaggggaacccgcgaccggacttgtgggggagaatgaggatgaaaacgtggagcttccattgtctagggtttgaccggccgacagggatttcgacgggggaccggggatctggggagggggtcgcactttctcgcctctttcgcggcttcccggcttctgcttgcttccctgaccgttcccaggggcgcggcggcgacgtgtctgctccaggcggcgggggggatggggggtggaggaagttcagccccaagccgcccgcctttctccagctgattcctgcgggaaccggggcggcgggaccctgcctctctccagaaggccccgggaacgctggcgcggggccctgaacccacgatcgtttgagcgcctgctgtgcgcctccgccgcgagtcgcagggccc

SEQ ID NO: 24135 - DNA, 376 bp, Homo sapiens; identical to SEQ ID NO: 7082
  chr19:17172577-17172953
  hypo

SEQ ID NO: 24136 - DNA, 666 bp, Homo sapiens
  chr19:17759152-17759818
  hypo
cgccttgcccttcagcctttccccgccatgcaagccccggggctccccacgccaacccgtggccctgcgctcaggccctgcgctcacgctgcaggcagtcggcgttgagcaggtcctggcacttctcgtggcacttgacaccgcactcggtgcagcgcatgccctgcctcgcgatgccccacagcagcccctcgcactcgtagcagtaggtgggcgtggtggccgtccacacttcgaagttgtgtggcgtcgtgcacgagatggggtagattaaggcttgcagggtcttcttgtaaacgtggtttttctgcagggagggatggggtgcggtttgggggcgcctaacctggcgctgtccctgtcctgccccattccgccccatcactgagcgcggtaaagtcccaggccctcccctgcctccacgctgtcggaatccacgctgccttctgccagtctgtgtcacacacacacccttcctcttcccggggacccacagaggcttggacaattccagaagctcctagcccagtccatccctgacccggggaaaaagaggtgccccacgcaccagctcctcgttgttcaacgtgctggaggccaaggccgaggtgatgcccgctttcctggactggaccagggactggggaggtcacagaagagggagtc

SEQ ID NO: 24137 - DNA, 608 bp, Homo sapiens
  chr19:1807818-1808426
  hypo
cgggaagtggctccacaggtcctgagaacatgctctgggctcctccttccccctcgcctctgaggtcagctgggagggcgggggccaggggagctgcgtggccgaggccgtttaggctggggaacagctatgcctcccgatgcccagccctgcccagcaggaaccagcggggcgtggagagggtgccgtcatcagacctggagggtgcatccatccacctttgtcattcaacatgtactgagcgcctcttgtgtgccaggccctgggcagggtagtagggactcagcgctgagggtcccagtctgtggggagtgggacgtgaacccacccatcacacagacaaacacatcgatgctgccaggtggctaggggggacttcctggaggaggcaacacgcctcacctgcaggatgatgatgatgaggaagaacaggttggacacgcggtggaactgctcgtacaggttcagcggcaggaacgagtagaagttgtacttggccgtgcggatgacattggtctggaacgagagccgcgggctgcctggcagaggggtgccatccaggccaggggatgggggtgcccgaggccagacctgcctcacttggcctc

SEQ ID NO: 24138 - DNA, 546 bp, Homo sapiens
  chr19:18092401-18092947
  hypo
cgagcctgtggggtttcaggccaggctgacgtcactctctgggggcgcggtggggctgggcagggagcgcggcgcgtgtctgacacccatggctggttccctcccgccctccacagctgttcatggtggacaacggggctgatgactggcgcatcgccatgacctgcgagcgcgtgttcctcatctcgctagagctggcagtgtgcgccattcacccggtgcccggccactaccgcttcacgtggacggcgcggctggccttcacgtacgcgccctcggtggccgaggccgacgtggacgtgctgctgtccatccccatgttcctgcgcctctacctgctgggccgggtgatgctactgcacagcaaaatcttcacggacgcctcgagccgcagcatcggggccctcaacaagatcaccttcaacacgcgcttcgtcatgaagacactcatgaccatctgccccggcaccgtgctgctggtcttcagcatctcctcctggatcatcgcagcctggaccgtgcgcgtctgcgagaggtgcgaccgcc

SEQ ID NO: 24139 - DNA, 500 bp, Homo sapiens
  chr19:18117804-18118304
  binary
cgatccccatcacgggctgagggtgaccgtgtttgtttatgaccgccccctccacccacacacctcactgaggtggtggaagtctcctgagccaggctcagaggcggacagtcacggcaggggatgggttcagcggcagcgcattacgctgccacgagagggcgccagcgtcccgcagacgacgcagaggcaactcccgctggagaaactccatgcgacttttctttggggaaactgaagcccagagagaggtcacgccgtcccgtggccacaccgcagctgtggacctgggggtgcccgagcgtcccctgcattcagctctgtggcgggacgggggctgaggatgactggagcaggcacaagggctgcggggaaggtagggtttgccagaggctgaaaattgggaagggaacatcatttcgtaggtaccgctcctgggcgaatgcgccgaggcgcgaccgagtgacggtatgtcaagagcaggttgatgacccgggagc

SEQ ID NO: 24140 - DNA, 605 bp, Homo sapiens
  chr19:18118537-18119142
  binary
cgggggaaacaggcctggaacagtcataggctctctggccctcaactggggcgagagtcccccgccccaaatcgggctggacatgcctcgagtcacgtcaacgaggggcggctggtgagtgattaagccgagaggctgaaggctctgctaggtgacctcaggcctgggccctgcctctgcacctctttttttcctctttacccccggggtccgcgagagaccagctctggcagcctaagggcttcagtttctccccggggtccgcgagggaagggggcagccggcggtgagcaggggcgtttgttattttgctccacgcctgggcagagccacgccccttgtcgcgctattggtggagtcccttcccggggcggggaagagacggtgaccccacccccccccgccctgccgtataaaagcggcgccgacgcacggcgcggggattttctgctccggttggtgagcgcgcctgcgcgttgacggcgattttgcgttctgaggctgcagcgtcggcatcttgagctgccggttcgcgagttcgaggccaggttccgcctgtcgtgggttcgcaccccggacgcgatgctattcgacaaggtgaaagc

SEQ ID NO: 24141 - DNA, 215 bp, Homo sapiens
  chr19:18241264-18241479
  hypo
cgatctccggtcccagcaagcctggccctctgtccccagggccgtctacctggtgcggcaccgtgacacacggcagcgctttgccatcaagaagatcaacaaacagaacttgatcctgcgtaaccagatccagcaggtctttgtggagcgtgacattctcacctttgccgagaacccctttgtggtcagcatgttctgctcctttgagacccggc

SEQ ID NO: 24142 - DNA, 617 bp, Homo sapiens
  chr19:1856948-1857565
  hyper
cggggtggggggggcgaccggggcaggggcgcgcagccgctgggaacacagctgccgcacgtagctcggcggcggcggcggggacatccgcagccccagccggccccgctcacgtggtcccactcccgccggggccagggggcccgggccagggtcgcctctccggcctgggtgcctgccagccccgccccgcgcttggagactgaggcgcgcacatgcgcacgtgggtggcggggcagggggtgcacgggctacccacccacgctgcgctgggcgaagcgcctctgcgaaatgccaggccctgcctcgcacacaatccactcgcagggaggagggtggggtgaacttgtgggggcccagagcgcgctgctcctagccagccgggcccccaggtgcacagccacccagctgctccgcgctacctggccgagacgcagcgccctgaggatgcggtgggtggggacaacgcgggagggcagtgtgggcggggccgcggtggacttgaccctctgactcaggctgggcccgggtgagctcaggacagcctcggaaacaggcaggctcagaaaaatggagtccaggaagtcctggaaacctggcccggccccgtctgagcc

SEQ ID NO: 24143 - DNA, 276 bp, Homo sapiens; identical to SEQ ID NO: 7092
  chr19:18867553-18867829
  hypo

SEQ ID NO: 24144 - DNA, 165 bp, Homo sapiens; identical to SEQ ID NO: 6511
  chr19:18963604-18963769
  hypo

SEQ ID NO: 24145 - DNA, 593 bp, Homo sapiens; identical to SEQ ID NO: 23550
  chr19:18989674-18990267
  hypo

SEQ ID NO: 24146 - DNA, 306 bp, Homo sapiens; identical to SEQ ID NO: 6515
  chr19:1977026-1977332
  hypo

SEQ ID NO: 24147 - DNA, 1111 bp, Homo sapiens; identical to SEQ ID NO: 22826
  chr19:1978023-1979134
  binary

SEQ ID NO: 24148 - DNA, 89 bp, Homo sapiens; identical to SEQ ID NO: 6517
  chr19:2204172-2204261
  hypo

SEQ ID NO: 24149 - DNA, 273 bp, Homo sapiens
  chr19:2524648-2524921
  hypo
cgtgtgtgcgtctgcatatgagtgtgtgcataggtgcatttgcatacgtgcatgtgtgtggacatgcatgccagtgtgcacgtgtgtatgtgcacgtgtgtggacacggcactgcatgtgcgtgtgcgcacacgtgtgtgggcatgcatgtcactatgggtgtgtgcatgcgtgttggcgtgtgtgtacgtcactgtaggtgcgtggatatgtgcgtgcgtgggtgtgtacatgtgtctgcatgtgtacatgcgtgtgcgtgtgtgtgcgcac

SEQ ID NO: 24150 - DNA, 199 bp, Homo sapiens
  chr19:3219527-3219726
  hypo
cgccgcgccctgccactcccacgcgctttacttcctcagtaacatccatggcacgggcatcctgcagtgaccgatgcccaccagactgcatccgctaacaagacagggagaccggcctgtggtacccagatgtgcccaagctcacagcctcactattctccgtgctcacagcctcgctattctccaggctcacagcctc

SEQ ID NO: 24151 - DNA, 114 bp, Homo sapiens
  chr19:32835126-32835240
  hypo
cgaaaaaaaaattactcaacattttattttttcacagctatttggtctaattggcaaaggattctgtggaatagcagaattctaactttgcagccgggcgcggtggctcacgcc

SEQ ID NO: 24152 - DNA, 267 bp, Homo sapiens; identical to SEQ ID NO: 7100
  chr19:32845502-32845769
  hypo

SEQ ID NO: 24153 - DNA, 158 bp, Homo sapiens; identical to SEQ ID NO: 7101
  chr19:32850587-32850745
  hypo

SEQ ID NO: 24154 - DNA, 78 bp, Homo sapiens; identical to SEQ ID NO: 7102
  chr19:33209597-33209675
  hypo

SEQ ID NO: 24155 - DNA, 109 bp, Homo sapiens
  chr19:33557659-33557768
  hypo
cgccctcagcggtcgcgatagatgccacaggtggaacagaatgcaatgtgctgcaaaaccagcccagcgttaacatatctttaaaaaaaaaaaaaaaaagtccgggcgc

SEQ ID NO: 24156 - DNA, 761 bp, Homo sapiens
  chr19:3360723-3361484
  binary
cgactgtgcgcgcgtccctgcgggacggtgttgtgaaactatggctgggctgcgtgtccgcggagccgcgtgtccctgggtgaccgtggggtgtccccgtgtgggtgtgtggcggttggggggggtcgccagggagtggagaactgtcgagtggccgcgttccaggggacagttgggtgccgcttgctgtgtgcgagtgactggcgctgagcctccccctagggaagggtctgccttccactcccggcctcgcctcccccagttccttttttcctgtaactggggactgcctgggcggcggaggaagagcgctccctccaccttttcaaaactctgtccctttatctttcccctacgtcccctccacttcccccagccttcggggtcccccatccgcttggcccgagggggtcctggctggaggttcgggcgcgaggtggcgccgggacgcgatcactcggcacgcagacgtcgctcgccaggggttgcgcttgcgcggggacctgccccgagaggggcggggcggcaggggttccccctccctgagaggccgtggaagtcccgaggggtgggtggttacagcagcacaggggttaggacgggcccgggaggtggctaaggagacccctattatcctatgctggggagagcgtaggggcaccgggactggtcccgcagtcccgcctccagcacttgcccccaatggaccagaggccgtgggcacagagagctgttttgtcacctccagggaaatccccgcc

SEQ ID NO: 24157 - DNA, 522 bp, Homo sapiens
  chr19:35615970-35616492
  hypo
cgtgtggctgatgaacgtggcccacggtcagcagctcacaggcgggccatcaccccaagtagggccaggagccagccaaggggccgtccaggggccccagccatgcccagagtcccgttggtggtctcaggcactgaggtcgatctcgtgatgctggtagatctgtgtggggcccttaaagcaagcagcaaagaggaagcgtctgccggccatagtgatgtgggcaaaggcacggggggccaccagggccggaggccccagctcctgcagtggctccaggagccccttgtcaggctcaaggcggaggacctggctgaaggcgaagtcgctgcctaggatggccagctggtccctggcgatgagcagtggctggaagacgtgggcaccgcgcgagggaagttgctgcagcagacgaaacatggagccgtcccagcgcatgacctgtgggggtgtggccagtgagggcctggggtcccgggggtctctgggggccgtggaacagcttggaagcagaagcctgtc

SEQ ID NO: 24158 - DNA, 77 bp, Homo sapiens
  chr19:37702078-37702155
  hypo
cgtgagccaccgcctccggctgttatatttacaatacctaagttaccccttggttacggcacactgcagaaaacaac

SEQ ID NO: 24159 - DNA, 384 bp, Homo sapiens
  chr19:38873767-38874151
  hypo
cgttgggcagagtacgattggtgagaaaagagagcataggacacgtgggcaagtgctggccccatagggtggggatggagcctttgtgatcactctactcgtctctaatccctcctttcctgcagcgagggtgggtcctgggccccaacaactactacagttttgccagccagcagcagaagccggaagacaccaccattccctccacagaactggccaaacaggtcatcgagtatgcccggcagctggagatgatcgtctgagccccccgggcactgggtggggcagggcacgagttatttaaaacagttacactgcagggtttcgcccaataaaggtggactgacattccctcttccaggcccttgtctccccagttgggac

SEQ ID NO: 24160 - DNA, 72 bp, Homo sapiens; identical to SEQ ID NO: 7106
  chr19:39094650-39094722
  hypo

SEQ ID NO: 24161 - DNA, 86 bp, Homo sapiens; identical to SEQ ID NO: 7107
  chr19:39289891-39289977
  hypo

SEQ ID NO: 24162 - DNA, 116 bp, Homo sapiens; identical to SEQ ID NO: 23558
  chr19:39329516-39329632
  hypo

SEQ ID NO: 24163 - DNA, 137 bp, Homo sapiens; identical to SEQ ID NO: 7109
  chr19:3978022-3978159
  hypo

SEQ ID NO: 24164 - DNA, 359 bp, Homo sapiens; identical to SEQ ID NO: 5776
  chr19:41190162-41190521
  binary

SEQ ID NO: 24165 - DNA, 125 bp, Homo sapiens
  chr19:41881461-41881586
  hypo
cgtgagccactgcgcccggcccgtgagcccgtttctttatctgcaaaacagggattaaaaacaagccaacaccccttcagcactcctccgcaaaaaaacaccccaaaacaaaataggccaggcgc

SEQ ID NO: 24166 - DNA, 441 bp, Homo sapiens; identical to SEQ ID NO: 22838
  chr19:42028298-42028739
  binary

SEQ ID NO: 24167 - DNA, 575 bp, Homo sapiens; identical to SEQ ID NO: 7111
  chr19:42424093-42424668
  hypo

SEQ ID NO: 24168 - DNA, 387 bp, Homo sapiens; identical to SEQ ID NO: 7112
  chr19:44099002-44099389
  hyper

SEQ ID NO: 24169 - DNA, 501 bp, Homo sapiens; identical to SEQ ID NO: 23159
  chr19:44711530-44712031
  hyper

SEQ ID NO: 24170 - DNA, 369 bp, Homo sapiens
  chr19:4548007-4548376
  hypo
cgcccacggctggcctggggtggacactcacttcatacaccccgagtactgctggcagcgagccacaggcactcggaccacgcagcgggggaaggcagccagcaggccccccgaagctgcgtccagctccaagctcagcagccgctgccctgtctcgccaccgccgggccgtccacacctggggacaagcagagtggtgaggctgagcgcatctcagcccatctcccctcctgctggcgaccccttcccacctttgcccagacttacctgtccggccggtaggtctcaaactcctccaggaagacactgagcccagacgtccctgaggtgctggcattgggccggacgaggaacttgaggaccgtcccc

SEQ ID NO: 24171 - DNA, 499 bp, Homo sapiens
  chr19:45603745-45604244
  hypo
cgtttgccccaatttgtagatgaggaaatggagcccatagaggtaaagtaattttcctgaggtcacacagtgggtaagtggtggagctgggattcaaatccaggcagccagcctggcgccgaagcctgcgcagtaataacccctgtgcggcggctgagtgcttggacgcattcggtgcaacgtgccatacggtctcttcatctataacccagaatcgtttataaaatagaggcaacagtgctggctttgcggtgttgtggcagggaggagaaacagaaacaggtggggtaagggcccagccttggtgggcacgcaggagggggtcactgtggttcgtggacagcttgagtccctggagatttgtgctgctcctctgtcctcagcattgcctgctgttctgacccttggcctctgggacgtgttcttcctgtgctactcagtgtctggtatgtgataggcgctcaatatattcttgctgcgtgagtgacttggtgacccc

SEQ ID NO: 24172 - DNA, 2071 bp, Homo sapiens
  chr19:45655296-45657367
  hyper
cggcttgccctgaggcacggcccgacgggggcgccctggaggcgctgttggcccggtgggcagcgtggggggtatcgcgggtaggggacttgggcgggctgggcggcttgagcgcgctgacggctcggatgagacccatgcgccggcggatggagtggtccaggttgaccgtgcagcgcagcaggctctgcgcctcggccacggtgaaggggaagtcggcgcccaggaagcgctcgaagagctcggggtcgccgtccaggtcgagcacgttctgcaacgccttggtcatggtgtgcagctcgcggctgttgtcgcggaaaacgtcccagaggcgcgcgcggccctcgggcgcgcccccggtctgctgccggtcctccaggcactgcagcgcccagctcaggcggcacggccactggttggcgagcaccacccacgccaccgcctggcgcggcgtggggcccccaaagtccccctgctgctgctgctgctgcagcaggcgcacggtgatgggcacggtgttgacgatgcgccgcatggacaccacgttgtcgggcacgtactcgtagaggcagtcgcgctcgtcgtgaaggcagaagagcgcctcctggattcgccgcgccgcctcgtcgtcgatgcggccctgcccgcgctccgtccccgcctgcgcctgcaccgccagcagctgcgcgctctcgcccccggcgtcccccggcagccacggcttgcgcgtcatctcgcggtacaacaggtcgtcgcggctctgcaccgcatcgtgcaggaactgcagcttggtgcggcggcccataatgggcacagagaagggcagcgtgacagtgcggttgaggaagaggtagccgttatcggccgtgcccttcatgttgcccgcgctctctaggcacgcggccaggatgctggggtccacgaccaggatgaagatgaagggcgcgtggctgtcggacagcagcgtgttgatggcgttgagcacgcccaccacgcgctccgggtagcacgtgtccagcccggtgacctccagcaccacgcgcagcctgcgccgctggtagatctccaggaagcacaggaagtcggtgagcagctccacctccttcttcacctcgcacatgaaacccagctggctgccgaacttttcacgcgacaccagccgctcgatcttcttgcgctggcttacgaacaggtgcttgcccaccgagtacacggccatgagcagccccgagcccgacagtgtggtggccgcgccgccaaacaccttgagcaggctgccgctcgggctgccgtggcccagcgcgtggccgcccagtgacaagtagagcagccccacacccaggcccagcgccgccagcagcgccagcagccccaggcacacgcggcgccgacaatgccactcgctctggcagcagtcctgcctggtggccggcttgttgcccagcaccgagtacacgctgaagggcagtgcgccatagtggcggcggatgccctcgcacaacgtggtcaccaggccggcccacagcttgtcggtgcccgcgtactgccaggcgctaaagcggatgaaaaggaactgcacgttcctgcgccgcaggtgcacctcggtgatgatgggctgcaggaacaccaggtaccacagtagctgcgggacgccccagccgctcacggcacgcggccgccactgcacgtgctgcagctcctcgctctcgcgctgcgcggcctcctgctgcatcagcgctgcgggaagggagcccgggagccgcgtgagccgcagacccgccggggtgggcggggcctagtacgggcagggcggagcgctcctggagaggcgaggggcgcccagcagaggcgaggggctggaagcgagccgcggccgctccttaaagagctggaagccggtgcagaagcgggggcgtggagaggcctggagccgggcttggaccggaagcggtctgaaggccaggctgtggggtcgggatgggcagaggtagagccggcagaggagagatgggaggaggcaaaaagagatacgaggaagagccagggatgggcaagaggctggaggcggagc

SEQ ID NO: 24173 - DNA, 621 bp, Homo sapiens
  chr19:45888782-45889403
  hyper
cgccaggtacccaggcgccagcagccctgcctcgcacctgccaggtaggtggcgcagtcagcataaccctcgcggtaagggtcgcacttctcgaaggcggtggcgccgtcgctgagcgtggtggcgaagattgcagcgccgtgctgcaccagcgccatgcagatgactgtgtcgttgcacgacgccgcgcagtgcaagggtgtcctaggcgtgggggtggggggttgcggggaacgatgcgtgagaggctgcgcgtccgcccacgggggacccagcccaccgcgcgggtcggggctcaccagccgtggctgtcgggggagttgacattggcacccgcggtgatgaggaaatccacgatagagtagttggcgccgcagatggcgttgtgcaaggcagtgatgccctcctcgttgggctggctcgggtcgttcatctgagtgcaccgggggagggggaagactcagtcccgcggctggcatctgcgatgcccccgccgtgcccacctcccgctcagcagcgctcacctccttcaccgcctgctgcaccacctccagctccccggtcagcgccgcgtccaggaggagcaccagagggttgaggcgcgcgcggcgggccttgcgc

SEQ ID NO: 24174 - DNA, 951 bp, Homo sapiens
  chr19:46001734-46002685
  binary
cggtcctggcccgccagctgcagcgtctcctctggaccgcttgcaagaaaaaggagagggagaaggaggggagggaggaagaggaggaggaggaggcggggcgcagggcccccgaagggcctcggtctctgttgacagcgccgcgccgcgcccagcggccgcacgggggtgccgaggcgtctgggggcctgcgcttcggggcgagcgcagcgcaaggctggcgcgcgcgcatggaggatgctcactgcacttggctttcgttacctggtctgcccccgggctgggccttgtttgccgtcctcgacggccacggtggggctcgagctgcccgcttcggtgcacgccatttgccaggccatgtgctccaggagctgggcccggagcctagcgagcccgagggcgtgcgcgaggcgctgcgccgagccttcttgagcgccgacgagcgcctgcgctccctctggccccgcgtggaaacgggcggctgcacggccgtggtgttgctggtctccccgcggtttctgtacctggcgcactgcggtgactcccgcgcggtgctgagccgcgctggcgccgtggccttcagcacagaggaccaccggccccttcgaccccgggaacgcgagcgcatccacgccgctggcggcaccatccgccgccgccgcgtcgagggctctctggccgtgtcgcgagcgttgggcgactttacctacaaggaggctccggggaggccccccgagctacagctcgtttctgcggagccagaggtggccgcactggcacgccaggctgaggacgagttcatgctcctggcctctgatggcgtctgggacactgtgtctggtgctgccctggcgggactggtggcttcacgcctccgcttgggcctggccccagagcttctctgcgcgcagctgttggacacgtgtctgtgcaaggtcctgggggcgtggc

SEQ ID NO: 24175 - DNA, 836 bp, Homo sapiens
  chr19:46519167-46520003
  binary
cgagagggtcatgggcccaggagtgcacgtctaggagttgatggggtaggcctgagggttcggagaaggtgcggtcggggaggagtctcgcgattgagtttgtcggggcgggcgggaagctgacagctgcctctgtggtctcaggaggcggactccgccggtgcagccgcccccgacgcgggaggaccgggcctcatcgtcccgggagcgctccgcgtcgcgaggccgcggcgccgcgcgctcctcatcccgggagagcggccgcgggagccggggtcggggccgccctgcgcgcccctcgccctcgcccacaggtctgtgcccctgccctgcggtagggaggggacgcactggcgctgccaaggcccgtctccggacctagccgcctcctctcccacgccgtcctaggtggtcgcgcgctccgcttcgaccccacggcctttgtgaaagccaaggaaaggaagcagagagagatccagatgaagtcagtgccccttcctccctcacctgcccctgtccctggcccgtgcccgctcccgggctctcatctctccacgccaccatcagtctccatcccctgccacctgctcgcttctcgccggataccccgcctgctctcccttccgtccgtcctacctcctcgtctgtgtttctgcgtgctttccgctcgtaggcctgtcacctcaggctttcgctggcgtggctgtgacctttaggggcgcagtgacccccttgcctgcaggagttgggcgtacagaccggcgtctcctttcttttttcccaggcagcagcagcggaaccgcttaggcagtgggggaagcggggacggtccgtcc

SEQ ID NO: 24176 - DNA, 277 bp, Homo sapiens
  chr19:47116867-47117144
  hypo
cgtgagccaccgcgcccggccgtgccaaactttatagacatcatttcacttagttcatacccaggctggatggactgattaaaacgcagcacccgctcaaggtgtgcggaccctgcccaggcttgccggcaggagtcactagagaaatctggcagtagaggagtggaggccgggcaggtgaagcctcttgcaccacacttactggaagcagctgagcggggtctcaaagcccagcgcactcggatcccaacgcccacgccttctcccaccgcatccc

SEQ ID NO: 24177 - DNA, 126 bp, Homo sapiens; identical to SEQ ID NO: 7121
  chr19:47335926-47336052
  hypo

SEQ ID NO: 24178 - DNA, 168 bp, Homo sapiens; identical to SEQ ID NO: 6522
  chr19:47482472-47482640
  hypo

SEQ ID NO: 24179 - DNA, 476 bp, Homo sapiens
  chr19:48150921-48151397
  hypo
cgggtgaggattggaagccatgatcgcctgcctctgttgctggttttagtctttaacccttgctctgtggacttgagaaatgtgcttttccatggtgcctgtgaccaagatgtccgcatcgttagtgaagaccctgctatgtccttgaccacactgcacggggatcctgtccacgatggggggtgtcctgttgggcttgagtgtctagatatggagaccgtagttcgcggggggagtggggggccgtttggcatatttgccctggcatttggggttgtttattgggggtgggagtgctcctggcatttcctgggcgggaactactggtgtagacctactggattaacttgctcctgggtcggtgtgcgggatagggggagggtgcatcagtctttgtggagcgtctgccttctctccgtctccctgttttcctgttaccgtctccccgtccctctctctgtctctctgaactgctc

SEQ ID NO: 24180 - DNA, 242 bp, Homo sapiens; identical to SEQ ID NO: 7124
  chr19:48229040-48229282
  binary

SEQ ID NO: 24181 - DNA, 246 bp, Homo sapiens
  chr19:485134-485380
  hypo
cggaggaccctgctgacctgcttagttgtttatggagggtcattgccgtgctctaccacgtaacacacgtacacacacacacacaggtgcacgtttacaccacgtgggtgcgcacgatgaggcacacacaggcaggcgcgcacacacacgcgtgctcacataggaacacgaagaggcaggagccgggcgtgcccgagccccgtggcgccctgggcatcccaaacaccgcctgcccagaacaggtgc

SEQ ID NO: 24182 - DNA, 513 bp, Homo sapiens; identical to SEQ ID NO: 23561
  chr19:49971410-49971923
  hypo

SEQ ID NO: 24183 - DNA, 450 bp, Homo sapiens
  chr19:50028330-50028780
  hypo
cgggtcttcctggaatctgaccattcgttgtctgctatgcccgtcctcaccaagactgactgcctgctgctttgctactgcccgggcccatgagactgacttcccactgctctgcctgcctctccccactgcactggcacagccccgccttgccgctgctgatccattgccggtgtgaccgcggccgctcgtgctgtagctggttcttacgtccaacctgggggcagtctgcccagatcgcctgcctggcctcgcctctgcccatcagacacttggtgctggaatctccgaggctgggagggactgggagcgccccagttctgtgtcctgactgggtggggtggaggggctgctccacatctcacagcgttctctggctgcagaatctccagccaagtcctccgtgctcgtggtgggaatcgtcatcggtgtcttgctactcacggcagc

SEQ ID NO: 24184 - DNA, 181 bp, Homo sapiens
  chr19:50320022-50320203
  hypo
cgtgagccacggcgtccggccctggtcaggtttctttctattaaaacaaatataaagtggcagggcacgatggctaacacctgggatcgctttagccgaggagtttgagacacgccagagcaacacagtgagaccccatctctacaaaaaatttaaaaattagctggaagtggtagtgcgc

SEQ ID NO: 24185 - DNA, 100 bp, Homo sapiens; identical to SEQ ID NO: 7127
  chr19:52479250-52479350
  hypo

SEQ ID NO: 24186 - DNA, 119 bp, Homo sapiens; identical to SEQ ID NO: 7128
  chr19:52715152-52715271
  binary

SEQ ID NO: 24187 - DNA, 74 bp, Homo sapiens; identical to SEQ ID NO: 7129
  chr19:53463668-53463742
  hypo

SEQ ID NO: 24188 - DNA, 372 bp, Homo sapiens
  chr19:54313999-54314371
  hypo
cgtggaaagaaggcttgagctcatcgaagccgtcgatgatgaaaaggaggcgctcgggaactcggatgagctcctggagaggcgcgctgggctcaggccagcagctgaagatgaggtcttgcatgctgcattccgtggcactctggttcatctccctgcagttgatgtagaagagataatcaaatctgccttggaagagcttcccgtccgcccagtccagcatcaccttgtgtgccagcatggacttgcctatccctgccgcgccttgcatgaccacggtgcgcggtggctcggggcgctcctcgtctggctcaaagagggtctctatcttgatggggctagcctggtgtcccacggtcctcgcgtgtcccc

SEQ ID NO: 24189 - DNA, 837 bp, Homo sapiens
  chr19:549193-550030
  hypo
cgcccgggtggggctgggggaatgaggctggcgggagggccggggccagggcagccgccgggcaggttcctggctctcccgttctctggggagtcctgtcaggggctggggggcggggaagcactggcaggggtcccgtttctcaggtgcagaaactgaggctcagacaggtttagcaacctgcgcaagaccacacagccgggaagcggcagagctgtgacttctgctccagccaagacggtccggcgggggaagaaggagcagggttcacagggccagcgggagatggggaggggacacgcgtgggccgggagcagcccctgtgtctccttgagcctggggataacaggcctggccctgctcccctcggcgggccctgctcccctcgtcccctcagcaggtgcagaggctgagctgcggtgtgtcgtccctgcagggtgactcgggcgggcccctggtgtgtggcaaaggccgggtgttggccagagtcctgtccttcagctccagggtctgcactgacatcttcaagcctcccgtggccaccgctgtggcgccttacgtgtcctggatcaggaaggtcaccggccgatcggcctgatgccctggggtgatggggaccccctcgctgtctccacaggacccttcccctccaggggtgcagtggggtgggtgaggacgggtgggagggacagggagggaccaataaatcataatgaagaaacgctcagagcccgcctgagtcccagcccacctctgtccatgctggctgtggggcttccgacaaacctgtttccctcagcctcccgagtaactgggtctacaggcgcccgccaccac

SEQ ID NO: 24190 - DNA, 809 bp, Homo sapiens
  chr19:55690531-55691340
  hyper
cgcgaacagccgcgcagaaaccggacagccaccgcgagtcatgctgggagttgtagtatcagcctccccgcacttgagagggggtgtccaggacctagttccatcctaaagggataccctcttcctccacggccccacaggcatcccgctgacttctgcctcgtcctcgcccctccgcagggtctgaaccggaagcgggcgaaggcagacgtgggaaccagcagaccgcgttgcccagagcaacagccgggctcctctcaagcggggtgagagcaaagctggttgcccgggcaacgggttgttgccaggacaacgggcggggctgacgcacagacgcggagtcccggcggggcaggctcgctccggggcccaccggtgcctgggaaccccccaatagcccgactgggatcctgaggtcccgcgaggtggggagcgggcagcctgtggtccgagcgcccacagccgactgctccctccgcacctggtcctgggagctgagacgcaggttccctcttccctctccccaattttgctggagggcgggtcgggggctgcccggtgcctgtgctgagccccctcatccttcttggcctgttggtctctccacgcatccgtgctgctctcgtgaccgcctcggtctccacgctgcctcttgaccccacataggcgtcttccctgtgtctgcctccccaacccgcctgtctctcttccctatcgcctggcctctgtctccagggtctctccctctcccctccgcctgcgccccactccccgccctcggctctttgtcttctccatacctgtctcgc

SEQ ID NO: 24191 - DNA, 134 bp, Homo sapiens; identical to SEQ ID NO: 6067
  chr19:56112791-56112925
  binary

SEQ ID NO: 24192 - DNA, 269 bp, Homo sapiens
  chr19:56688223-56688492
  hypo
cgctgggggaccaggtcggcctgatccgatgatgggggaaggagaggcttaattgcttgcacacgtccaaactcctcaagatgtgtacattaaatgtgcgccatttttgtatctcgatgatgcctccataaagctaaaaaataaattcctctgtccttatcggaaatgcacctggcccccgcttcggaaaatgactggccgctctctccttgcagcgtgttccgcagctgtaggcacctgtcgtcctgccttcgatggctcctccctcc

SEQ ID NO: 24193 - DNA, 171 bp, Homo sapiens; identical to SEQ ID NO: 6525
  chr19:56807013-56807184
  hypo

SEQ ID NO: 24194 - DNA, 846 bp, Homo sapiens
  chr19:58219927-58220773
  hyper
cgaaactccgtctcaaagaaaaaaaaactaacataaatggcgtccctcctttgttcagaactctccgtggcttctagcatcctcacaatgacagtacaaccctaggagtaactccgcctcatattcttcgttccctgcagaaaacagctttccgaattctcctggctcagtcgcgcctcaacctttgcacgcgccggttcctccgcctgtcacgctctcccacacctcgtcacacgcagtgtcaaaaaaagggccccacccacgaacgcctcagtgtccccgaccctgggcagcggggactcgagcaggcgcccctcactgatggctttagaacgtgggtgggggaaggtgtgtgaggacgggaagacgccgcactcacctgagttggcgtcctcagagtggccgctgccatcagactctgcgggtagagctgggccgggagcgacgggcgacattggtagggacccggggacagcggtccctatcccaggcctgacgtgggtcccccagggcggcgtcgccaaggcttagacgctttcgtgcaggagggacgacgactcccctcacgccttcgtggccccaactcggcgctctgctatctctgatccggtgaacacacctcagagaagctaaaatggccgccacgaagaggcccccccaaaagtcccgtcctttctttttgtgactctcaaggaaagtcggttttctgagctcttactggcttagtagcgtggcgttcaacgcagagcattctaggtaatgtagttttcatagatcccgaggtgggtgccggggaccctttgcaccaacctcttggagtaaaagcgaagctccagggcgctgggc

SEQ ID NO: 24195 - DNA, 881 bp, Homo sapiens; identical to SEQ ID NO: 22852
  chr19:58238341-58239222
  binary

SEQ ID NO: 24196 - DNA, 605 bp, Homo sapiens
  chr19:5825278-5825883
  hypo
cgcaggtgctgtggggtgagggtggtgcgtgggccctgacccctgtgcccacgcacatgtccatgcgtgcgcctgcgcgggcatctgaggcgtggatgccggcagggtgcgtgtgcagcgcctttgggtgtgggccacgagtacgcccatgtgcgcgtctgcgcccgcccctgccagcccacacaatcctcttttcttgtccttacaatgcacaagggtggcctccagcacgagctccacttctgtcctcccaccacttccctctctgcaagcggcgtgaagtccttcctaggactctgggacagagacccgggcgggacccccaaaatccagtgctccaggacttggggtgcggggggcaaagcacgaatggaggaatttcaggcactgcggagggtcagggcccatgggcgggtgcctgtctgccctactgcaaaaagcgagtggccactgactccccaagtccccatgttctaggctcctggtggaatttcaggctggggaccttgtgttctagcccctgtgcaagcagccagccccgctgcagggaggcagggacagacatcctaaaagatgattcattgttgccaggtgcggtggctcac

SEQ ID NO: 24197 - DNA, 594 bp, Homo sapiens
  chr19:603411-604005
  binary
cgcaggctcctcggaggaggcactggctcgaggtgtgggcgcccctcgtcccccaaggaagagtgcccggggctggtcccgcaggtgccccggggaggcaccggcctgaggtgtgggcaccctcgcccccaggttctactgggacttcaccatgctgctgttcatggtgggaaacctcatcatcatcccagtgggcatcaccttcttcaaggatgagaccactgccccgtggatcgtgttcaacgtggtctcggacaccttcttcctcatggacctggtgttgaacttccgcaccggcattgtgatcgaggacaacacggagatcatcctggaccccgagaagatcaagaagaagtatctgcgcacgtggttcgtggtggacttcgtgtcctccatccccgtggactacatcttccttatcgtggagaagggcattgactccgaggtctacaagacggcacgcgccctgcgcatcgtgcgcttcaccaagatcctcagcctcctgcggctgctgcgcctctcacgcctgatccgctacatccatcagtgggaggaggtgaggtggggcgggggcggggccaaggcagcaggggc

SEQ ID NO: 24198 - DNA, 297 bp, Homo sapiens
  chr19:640789-641086
  hypo
cggtgtccccgccgggcggggggcactgggaagggggcccgggcccgctggctgccgcctgaatcaccaccatcagggcaggtaatcaccccctgtccttcccaccgctttcatctgggcgccaaggccctcattaggccgcacgtgacgagggcggacaggggactggctgggccggtccatccatggcgggcatggccaggcggggtggcctcgggccggggcagaggcctggctccgctgcctgacctggaacagtctctgcctctctccaagcctcggtttccccagctggac

SEQ ID NO: 24199 - DNA, 634 bp, Homo sapiens
  chr19:7267319-7267953
  hypo
cgagacactgcttagaaccctgtatccccggcgtacctttctggcagtgactatgagtccaacatcgttcgacaaactgcccgttgatgacggtggcggggcagttggtcttgcccttcgcggtacccggacagatgtctccacactcctcgttgtcatctttgttcaacacgatgtaattatcctccacggaatccaggatacgggaccagtcgatagtggccaagtaacagagctcattgttcttctcgatgcggacagaaccccgggtgatgttcatcaggttgtagaggccgagttccttgaggtgaaccatctcgaagatgaccagcgcgtagttaaagaacagtcgtgatccccggatgaccgtgaggttggggaacaggtccttcaggctctcgagcccatagacccggaagagcagcaagtaatcagtgatcatgatgagtttggggaaactgaggtctcggaaatcttcgggcctcgttttgaacatcaagagtatctgcaagtgtccttcgatgacagagcaattctccagctcatgcaacctagtgaggttgttccggatatccatgccgggacacactacaagagaaaatgaacagaaagcaagacaggtgagcagacgcac

SEQ ID NO: 24200 - DNA, 86 bp, Homo sapiens; identical to SEQ ID NO: 7145
  chr19:7838387-7838473
  hypo

SEQ ID NO: 24201 - DNA, 337 bp, Homo sapiens; identical to SEQ ID NO: 7146
  chr19:7972050-7972387
  hypo

SEQ ID NO: 24202 - DNA, 746 bp, Homo sapiens
  chr19:813406-814152
  binary
cgccatgggttcggcgggcgcgcgcaggtgcccggggctggcgtcgtcgggcagccccaggccgcggccctccaggctcttctgcttccactcgctgatgagctgcttggagcgcgaggcgtccagcggcacgtggatggtcatgtggcggcgcgcggggtcgtccagcgagggcgcgctggccctgggcagcgtgtggctgaaggtcaccatgttctccttggccatggggctgcgcggggccagcaggtccacgtccacgctggcgcgcttcaggctgcccagcgaggtcttctcgcgggccacgggccggggcgcgccctccagccgccctgggggccccagctcgtcggtgctcaccgacttattctgctgataaaccgagtcgtggccccgctgcgtcagggcccgcagcgcgtccttggcgggggccggggccgcgggcttctctgcaggtggggcctggaagttgcccaccgcgtggcaggcctgtcggggagaggggtctgggggtgaggcctggggctcagagggctcctcccctgtgatcgttggacttgccgcggggggctctggaccgggggtgggggctggcaagctcttgtccagtgggaccggttcccaccccaaggttgctgacccagcacatcgggcaggtctgagcccacgggattctgactccagcattccaagggcgagacacttcagcacccatgccttccccctaagaccccttcgggacccac

SEQ ID NO: 24203 - DNA, 437 bp, Homo sapiens
  chr19:814406-814843
  binary
cgacccccatcagaacctgccactcaccaggtaggcagcgatgcccgccccgatgaggaagccggcatacacgtccacagggtggctgcggtactgcgtgatctgcgtgagcccgcatacgcccgcggcgatggcaaaggcgaagaccaggatgggcttcagcagcttggtggtgtccgagatgaccgagttgaagtacatctggggcatgggggttggggtcagggagggctccccacgggtcagcaagagggcctgggaagggcagtgaggggccggactcaccgacacatagaccgcggcgaaggctgacagcgtggcgtgctgggacgggaaggtcttcctgtaagaggcgtccagcgtgagccccgcccacctggggaccccagctccagtggcctctctgtgtctctgtttccccgcatgttcaccggggc

SEQ ID NO: 24204 - DNA, 689 bp, Homo sapiens; identical to SEQ ID NO: 7152
  chr19:8372877-8373566
  hyper

SEQ ID NO: 24205 - DNA, 1431 bp, Homo sapiens
  chr19:883424-884855
  hypo
cgtggggcggtgcgtgaagagctgggcatggcggggaccaaagcctggcatggtgggcacgtggggcggtagggggagagatgggggagagatgggtgcggtggggactgtcccagtgacccccagctgccagggatgtgagacctgagaaaggctgtggcatgtgtgtgagacgtggctctcgggcgggtaacagctgggccagcaggtgaggacggctgcaggagacgaggaggagtgtcggagcccaggactgcccagtggcttggctgtgggcagatggtagacacagacgtgcccagcgggggcaccgggcagtgaaggtgcaggtctgtgcagccacacggggtggcgccaggtgctgctgcaggagccagcgcagcccaaactgcctggtgactcaccacgaggcccaggggaaggaatgaggcccaacaaggccctggggaccgggcgaaggaacgagccctgggagaaggaatggcagcagccctcttcacctgcctggtgactcactacaagccctgggggaaggaatggcagtggccctcttcacctttactgcctctgcggccacaatgggcagttgacataaccacctgcaggccccgggagccatcggggcctcttgacacgtgctcattagtggcttctgaggagcgcctgccccacctgccccacgtgcccccacgtctggccactccagggtccattagcgctaatcggcaaatgcctgtgctctcatctaccgggaaaacatctcccttctccagagcggaggccagcctaaaaaccaggcccgcagcctccgaggctctgaaaaccaagcggctgttctggtccccggtcatagcaggcgggcgtccctgcttcgctccagccccaggattttgtgccggaggtggggatgacgggcttggctccgtgggtgcggggggcccatcgggcggatagagatgggaatgggggccccagaagaggctgctggagaggtggggtggggtggggggcgtgttctcagcagcctcagctgacccgctgagccttggcttcctctccctgaaccaggttccggaggattccgtgcaccgcccctgcccggtctggcctgtcccctgctgcccgacggccccacccacagacccacgctccacagccgcccacacgcctgcagcccctcacggtgtccccgctggctgagcaacgacacctctcagcctcggcctcgcacagaatggtggcagccgccgcagcgggcgtggaaggatggaggagtctatacgcctaacacactcagaatgctggcaggcgcgcggtcacacccgagatcctagcactactggagatcgaggcgagacgatcgcttagggccggggttcaggaccaccctgggtgacacagcaagacctgcctccaaaataaaaaccaacc

SEQ ID NO: 24206 - DNA, 314 bp, Homo sapiens
  chr19:9129007-9129321
  hypo
cgcccgcccagccaacagagtgacctttcaaaaatgcaacaccggccatgccccgccccggtccgaattcttcagtgccttctcaccgccctcgggaccaagtccaaacgctgcagcctggcgttgaaggcccaccttgagccgggacccggcctgcattggactaacgtatgacttcgcttctcaccccgaagcctttgcctcggccgttccctgtgccggaattaccctccttccctttacctgattctgtgtcccctaattctctccaggcctcccctacctccctccccagacagaaagcagagctcccc

SEQ ID NO: 24207 - DNA, 430 bp, Homo sapiens
  chr19:945745-946175
  hypo
cggcgtcgacatggccggggcaggcgtgttctggccccttgcactgcccggctcctgctgctggtgctgggctgcgtttctgttcagagaacctgggctgggagtgatgggaccgcagtctcccaccaggtgcctctttccaaatggacactcctgctgggcatgacacttctgaggctttctgggaccgtccaggtcccgtctgcagggaaccccaggacggagttaattgctgagtgcccagctctgggcaaagtgcttggaccctgcggttactccgagcccatttctcagcagggaaaaatgaggctcgcggaggcaggggcccggcgtccaggtgggagcatgagggcgtattgtgggtgggctggccggtctggggggcggggaccctgtacagaacgccccggccgcgtggagtggcaggttc

SEQ ID NO: 24208 - DNA, 972 bp, Homo sapiens
  chr19:955734-956706
  hypo
cgtaataccgggtcagaatctcagaggagaggaccttccgctcgccctggaagggcccaaggtgtgctggcctctacgtgcggttcttagccggggggctgcgtaacgaaggacctcaaaccgcgggcgtaaaacaaacgaaacctgttctccctccgtcctggagcccagagtccaaaatcgaggcgtccgcagggctgcgctccctccaggggctgcaggaggagccttccgcctctcccagctcctgggggctccaggagtcccttgacatgtggccggcctctgtctctgtgcgaccgtctccagtgcccaccggccttcactgtgactttttctcaatttgatcacgtctgcaaaggccctttttccaaataacgtctcgttctgaggttctgggccgatgtgaatttgggtgggggatggcgttcaccccaggacagccccagcggtgaagtcctccccattccagtacctgctgcctcaggcgtttccctggcaagctcgtcctgtccccctctccgccctgtccccctctccgccctgcccggctcacttttgcagctgagaaaatcaaggttcaagtaacgagcatttattaggcaactgctgtgtgctcggctgattccagactctgggaacaaaacagactaaaccccagatacactcctagatccgtgactcggtgatggacggggtctcggaggaagaacgtggaggggagggggcggcagccgggccggggtcagaggacgaggccgggcgtgtggccatgtgtgcgtgcctgtgctcatgggacccaccggcccggccagccgggtctacctgagggccccacacccctcaggcagctgaaggggaaagggcctccccggccaccataaatcagcgcaggaatgcaggctggccagtctggcgctggccgggttggggcggagacaaagaccaggcagctggacctcgggcagcctc

SEQ ID NO: 24209 - DNA, 400 bp, Homo sapiens
  chr19:9903614-9904014
  hyper
cgcaaaggctggtgcaggggaaaccgttggttcagctgcggttcctgggaagggggtgccgctctgatcacgcgcacttctgattcccctctcggggctcggaagcggctgagggctctggacccggtctccgaggcgtgaggcggtgggagggtcggcggccgcgtcctccacgaccctggggagaagtcccagtttccgcgcagccgacaacggttggaccccgtccctccggcttcactgggcaccgtgggggcagaacccggcggcggcttggggtgggggcgggaccacgatggagggagtctgttgggcgggacctcgaaatgcctctgctcgctttcctctgcattcatgcggcttgtacgaggatgcgctgtttcctggtggtttgttatac

SEQ ID NO: 24210 - DNA, 123 bp, Homo sapiens; identical to SEQ ID NO: 7160
  chr2:10047588-10047711
  hypo

SEQ ID NO: 24211 - DNA, 125 bp, Homo sapiens
  chr2:10151899-10152024
  binary
cgtacaggcgggtcaggtgggcaggcatgtgtgtgggagagtcaggtggacaggattgagtacgggccggtcaggtggacaggattgcgtacgggcgggtcaggtgagcaggcgtgcgtactggc

SEQ ID NO: 24212 - DNA, 166 bp, Homo sapiens; identical to SEQ ID NO: 7161
  chr2:10152421-10152587
  binary

SEQ ID NO: 24213 - DNA, 530 bp, Homo sapiens
  chr2:10152958-10153488
  hypo
cgtgtgtatgggcaggtcaggtggacaggactgaatatgggggggtcaggtgggcaggcgtgcgtatggtcgggtcatgtgggcaggcgtgcttatgggcaggtcaggtgggcaggtgtgcatgtgggagagtcaggtggacaggattgaatatgggcgggtcaggtgcgcagacatgcgtatggccgggtcacgtgggcaggcgtgcgtttgggcgggtcaggtgggcaggggtgcatatgggcgggtcaggtggacaggcgcacgtatgggtgagtaagatggacaggcatgtgtgtgggagagtcaggtgaacaggattgcttatgggctagtcaggtggacaggtgtgcgtatgggtgtgcctatgggagagtcaggtggacaggattgcgtatagccggatcaggtgggcaggcatgcgtatgagcgagtcaggtgggcagacatgcgtatgggcgggtcaggtggacaggcgtgtgtataggcaggtcaggtggacaggcgtgcatatgggtatgtgtatgggc

SEQ ID NO: 24214 - DNA, 645 bp, Homo sapiens
  chr2:10153562-10154207
  hypo
cgtttgtatgggcgggtcaggtgggcaggagttcttatggtcgggtcaggtgggcaggcgtgcatatggtcggtttaggtggacaggcgtgtgtatgggtgtgcgtatggacgagtcaggtgggcaggcatcctacaggcgggtcaggtgggcaggcgtttgtatgggtgggtcaggtgggcaggtgttcttatggtcgggtcaggtgggcagacgtgcatatggtcgggtcaggtggacaggcatgtgtatgggtgtgcgtatggacgagtcaggtggacaggcgtgcgtatgggagagtcaggtggacaggcatgtgtatgggcgagtcaggtggacacgcgtgcgtatgggcaagtcaggtgggcaggcatgcgtatgggagagtcaggtggacagccctgcgtatgagcgagtcaggtggacaggattgcgtatgggcaagtcaggtggacaggcgtgcgtatgagtgagtcaggtggacaggattgcgtatgggagagtcaggtggacagccctgcgtatgagcgagtcaggtggacaggattgcttatgggcaagtcaggtggacaggcgtgcgtatgagcgagtcaggtggacaggattgcgtatgggagagtcaggtggacaggcgtgcatatgagc

SEQ ID NO: 24215 - DNA, 146 bp, Homo sapiens
  chr2:10154879-10155025
  hypo
cgtacgggcaggtcaggtgggcaggcgtgcatacgggcaggtcaggtgtgcaggtgtttgtatgggcgggtcaggtgggcaggcgttcgtatggtcaggtcaggtgggcaggtgttcctatggtcaggtcaggtggacaggcgtgc

SEQ ID NO: 24216 - DNA, 228 bp, Homo sapiens
  chr2:10155172-10155400
  hypo
cgtgcgtatgggcgagttaggtggacaggcatgtgtatggacgagtcagatgggcaggtgtgcgtatgggtgtgcgtatgggcgagtcaggtggacaggattgcgtatgatcgggtcaggtgggcaggcatgtgtatgggcaggtcaggtggacaggattgaatatgggggggtcaggtgggcaggcgtgcgtatggtcgggtcatgtgggcaggcgtgcttatgggc

SEQ ID NO: 24217 - DNA, 384 bp, Homo sapiens
  chr2:10156251-10156635
  hypo
cgtatggctgtgcgtttgggcgagtcaggtgggcagacgtgcgtatgggcagtcaggtggacaggcgtgtgtatgggtgagtcaggtggaccactgtgtgtacgggcgagtcaggtggaccggcgtgcatatgggcaggtcaggtgggtaggcgtgtgtatggatgtgcatatgggcgggtcaggtggacaggtgtgtatatgggtgtacatgtgtgcacaggtgctactttactctgtgttcaacacgtgttcgtggacgtgctccaggcccaaggcgaaggaataggatgtagcaggggcagggtctccgccccatactcagagtccttgggctccgggaagacacaaccgataagtggttacggggatgcctgggagctac

SEQ ID NO: 24218 - DNA, 255 bp, Homo sapiens
  chr2:10306818-10307073
  hypo
cgccctgttccctatggcgcaccagctgcttggatgctcccacgcagcagtgccttgtcatcacattctatttgctgagcggcgatggaacaggccctgcgtccccgcctgtgtcctaagcactccacaagcatgagcgtgtctagatggtgatggtttgctcatggtctctctctcagagcttttaccctggcggggttgggagcgtggcaatgggtcaccactgaccctgttaggaaacaagtgtgtctgtac

SEQ ID NO: 24219 - DNA, 188 bp, Homo sapiens
  chr2:10344656-10344844
  hypo
cgccagccctgctcagcgctgtgcccagccctgggtgcagggaggtgcggtttgctctcagaggagcagctagctgggagcatccgaggccattagggacaggacgctaatgcatcggcgccccattgattctgcctggcttttgtgaacacgtctgcgctgactaatttgtttaattactcattgcc

SEQ ID NO: 24220 - DNA, 212 bp, Homo sapiens
  chr2:10600656-10600868
  hypo
cgggtcagattccctcagactggattgtggtctgagggcgccccaggcactggagctaacgtgggaggctggggatggaaaccagtcgttggagtcagccacgatgaacggcgtgcgggctgatgcgggagccacacaagcccgtatgcacagaaaagaatgacatccacagccgagacagcagcaatgagggcacatgggaaggatagggc

SEQ ID NO: 24221 - DNA, 291 bp, Homo sapiens; identical to SEQ ID NO: 7168
  chr2:10666473-10666764
  hypo

SEQ ID NO: 24222 - DNA, 1127 bp, Homo sapiens
  chr2:111874622-111875749
  hyper
cgccgtctcactgtactgaatttcaagaatcatggcctactgccagccaggtcaggaccgaaggcgctagtctggggagactggagcaggtctctagtggttcacctgttcggaggctcttcctgttcagttccctctgcgcgccagagggtggcaccccaggcactccagaggtggagaggaggggacgacaggggaggcaaagagagaggagcggagggaaggaccagggaggaaggaccaaggagggagctttaataaattctcagaccttggtctcgagttcccggctaatttgggggcaaagccgaccgaccccacgtccacgcccacccccttacgggaaaagccggggtttccactgggctaggtgtcagagttgggaatgtctaaaacaaaaaaggcttccgagggttattcatggccaacagtttccacaggagaatccaaagggaaactagtttccggggccgctgtgtgtgcgggtgcttggtgggctgaaagctgctgtcactagatggctgtaagtgtgccaacatctgacctgtcccattgtgttgtgttttgcagttgctggatttgtgcgactcggtgaaggatgatgcccggagggtgatctcgacctttaacattccacacacctacctccacgcaccaatcgccggaatctccaacccgcgggccgcgtgggctttctaccctgcaccgctgcagccgcggccacgggaagaggcgcgctcccggcggcccaagctgggagccaagctctaacgggtgtggcgggaagtgtggtggcccgccagcagctgccacgacgctcgctccaccgacgcccagagctgtggccgaggccgggggctggcacccgctgggccgccactctcggggattttggtggcaaagcggaggtcccgccgaggctggcgaggtgcgcggctggctgctaggaaagagatccagacggtcgcctggtgcgctggatccctgtgccctttccctgaaacccagcctggcctgactgcaacctctcccaacttcagtgccggatcccctagacaatcagggtgggctccccgctgcgagcgcgccccacagccgggtgccgccaaaggtctcctgctgttagc

SEQ ID NO: 24223 - DNA, 482 bp, Homo sapiens
  chr2:113103038-113103520
  hypo
cgcccgttttcgaatccatttggcacctccttcgcctaagaatttgcttttccaggcgtcccctttctgttccgtctctgtactgcactaacttcacctatacacaggtctgtatcctcctgttaaaaccactgaccaggactgccgcttctgggtgcgatacagtaacaggcattggattcctcctcttccctcaaacaactagaaagctggaggaaataaacgacgttactgttaggcattggataataggccatgaaagatacggatctattaaaaaaagaaaactaatcaggtaagctctgcaatcgccccagctttttccctgtagttccattcttgaccacagagcagggcatcccgggcagagcgcagctgcgcagcaatcttgctaaatggagcagaggtggagatgagaggagcaagggcagctgcgtgggagcactgccgaggagagcgctggcaggcacagaactccagac

SEQ ID NO: 24224 - DNA, 1446 bp, Homo sapiens; identical to SEQ ID NO: 23182
  chr2:118981062-118982508
  hyper

SEQ ID NO: 24225 - DNA, 733 bp, Homo sapiens
  chr2:119615014-119615747
  hyper
cgagacctgagggttccgctggggcctcgccctgacacccgggccctccgtgtggtcgagagtttgcgcccgctcccgctagggcagcgaggtcccacttgcggccggctggggcatggtggcaccggttgtctactccccacttgtgacaccgacagcttccaactcctcagacccaccccgtggaattctggactttgtgagggccgccggggtcctggccctggggtcagctgccatctgactaagccaggacggcggagctccaggccttgctccagcactgccggtgcgtcggggcccgcggagagcccagggcgggagctgtgggctgagccgggtggccgcgtggacacagatgcccggccggactgagcggcagccaagactctccgtccatcccgccgctggactcgactctcccagacccgccacggaacccagatttgagcacgcaagataaagacgccagaggcgagtgcgcggcggagaactggccgcgacacgggaagcttctggggcgcagaacgctggctccgactcgcgcggcgcagaccagcttctgtggttgcactcaattgaacaacaggcggatttacgttaaactttgttttcacctttcactaagatgtttccaatttaccaaggggatagaatgagagacagagatgtgagagatacagagagagagatagagagtgcagggtcgggggaggaggcagagagcggaagc

SEQ ID NO: 24226 - DNA, 291 bp, Homo sapiens
  chr2:127428888-127429179
  hypo
cggagggagagccagagcaggtgcaagcatgcgaggcaggcttccctgagcccgacagccagggacaaccagctaacacccaagttcagaaaacagtgctttatcacaggcacgagcacaggggagcaacctctccacgcacggggccaggtgtcagctgtgcacttgcatgcttccttattggaacctctccctaccgggaggccatcattagatttggagatggagcctcgggggtcaatgtgtgtccgtattcttccagtcataacctggtagctccagagctcaacc

SEQ ID NO: 24227 - DNA, 74 bp, Homo sapiens; identical to SEQ ID NO: 7177
  chr2:135293582-135293656
  hypo

SEQ ID NO: 24228 - DNA, 1494 bp, Homo sapiens
  chr2:168149213-168150707
  binary
cgcggcgccctttcctgccaagccgcgggctcctggcggtcagaaagcgccccaggcccacccctgcgggcccggctttccctcctcacctaaggctccggggccacgagtcccccatcctgcgcccctcccgcgcctcccccatcccaaaccccagcagcgtcgctgcctctcccggaaacaagcccgctgagcaaaggcggaggaaaaccttgggccttccgctctgattggtctccccccgccgagcggggcgaggcagcgattggctgccgggcgttgtcagtcgccgaggccagagccatcgccggggaagcgcagccgggctcgggtgcttcggctgccgccgcggctgctcggctagtgcagctgggcgagctcgcgcgggcgccgccgccgcctctgctgctgcccaccccgccgcgccgccggcgctgccggtcttgcaggcggccgccggggaggggcggccgagagagcggagcacgaggaggcgggggcggcagagaagtgatgctggcgccggggatcggggcagcggcagcggagcagcagcatcttcgggaccctggctgcagcgtccctgtggcccgcgcgccagcccagcggccggagaccacgcgccccgcgggtaaggttctgtccggcagcgcccgcgacgcccccgggacggctggcgtggtctttgggggttacgaggcgcgtggtggccggggcatcccgacgaaggtgttgggacccggactgcgtgtcccgacgctgggctgtgctactgcccgcgcccgtgcggctccagctggtgcgttctcccttccgcgctcacagactttgacagcgcggggatggcattgtgtgagtgtggatgtggatgcgtgtgtgcgcgcgcgcggcttggggcactttgcagcgagaacagtgggtcccctctgcgtggcccgacgtccttcaaggacccaagctgggctggagtgagtaggatgctgttggctcggcgggaggtagaacgcacggagcgcacgggaaagtccaccgtggctcgtaaagagccgagcaaattgaactttattgcggtgattaaaaggagctgtggacctggcgcgccaggggagaggcgcgttccacgaggctccccaaagtcccactttgccccggggacttcggaggggaagggaagagagggaaaagtaactgttggtccacattgctgaagaaaaggaggaaagagaagttgggggtgggggtgggggtggaggttactcttgggggagtggcgacttttaggtgtctgaagccccgcgtgggaggcttgctacacttttctggagcgcagacttgaggatggagagtcccactctgaggtactggtagcggctcctcctgcctggtggcggcgtagggcgcagcgggacagcttggtggaggcagagcggggctccgacgcccgacggcccggcgtccaggtggggccactgcctccccaggccgctttggccc

SEQ ID NO: 24229 - DNA, 140 bp, Homo sapiens
  chr2:170551744-170551884
  hypo
cgtaataatgctggtaagtatggaataattaagaaaatatttgaagacagaaattagtttgtgcacatacagcgctggtaggtttttggaactataccttaaaaagtgtcaagaactgggggccaggcgcggtggctcac

SEQ ID NO: 24230 - DNA, 181 bp, Homo sapiens
  chr2:170681727-170681908
  hypo
cggctcaaaaagtagcgatctccattcacctttacctccttctccattctcatgccttattttattgtaactttgtttcccaatttttaggtcatttgtgtcacttgcaattctcacaggagtggtgatgtcaaagaaacccaaagaagagatagtggagaggcagggcgcggcggctcac

SEQ ID NO: 24231 - DNA, 98 bp, Homo sapiens; identical to SEQ ID NO: 6535
  chr2:171815760-171815858
  hypo

SEQ ID NO: 24232 - DNA, 820 bp, Homo sapiens; identical to SEQ ID NO: 23189
  chr2:173099596-173100416
  hyper

SEQ ID NO: 24233 - DNA, 855 bp, Homo sapiens
  chr2:175190730-175191585
  hyper
cgtccgacttgtccgggaatggagcagagaaagaggaaccagaagaaagagaaactcgcgacaacagagttgccgaaagagaagtgttggcgcctcaaacttgaggatcagcttcttgggccccactccagggtgtcgcgggggtcgggttctttccgccgccccccgaaagattctcagctaaccctttccccgccgagaccaagaggccctcactctgacaccactccgggagccaagctactgtaaggagctgataccacccctcgccggcgcgaaccgcccatctccccagacccgcccaccccctgctgcgaatccctgacgttctagcccggcgaaggtcctcttaaattaggaaacaatagctatttaagaagaagcgcaaataacccgcgctctgcgcgcccaatcgtgggattcttgggagttccccgcgggcaaggaagtctgctgctccccgcagctgcggaggagaggagggagcctgcgtgctggggcagggtgtcgcgaacttggggcaacccacctccagagccccgcccccgctttcccgcctgccggggacctgccgaacgcggaaccaccctccttcctgaggcaaatttgggaggggagaggtccagaagctgtagagtcggggcgccaagcgccagattctgccgctcggaagttgggggcagtccccagtcccgcctcaggcccccgcgctcacagggcgctccgccgagggcgcgggccaggcgcgcggtgtcacctccacgaagtcatttacttgccctgaaggagctggccctcgaccccttggaggatggagattcctcccattccctcctccgcctcccccaggtcggc

SEQ ID NO: 24234 - DNA, 993 bp, Homo sapiens
  chr2:175198845-175199838
  hyper
cgtacaaagggtgccctcaattaccaccagaagcctctagcgtgagtggcacttgtattaccccccgggtcagaggccagagcgacaattaggaagtcacttacaccgctggggggaaatggcgggatgcagcaggctccaggccctcccaacaaatctgtggatgtagatctgtacagagaggcctatttcgctcctctcggaggagctgtcccttcgcgccccctccccagtataactgtgagagtgaaattgaatctagtggaataaggaattgggtagaagacacacgaaaatgataaaaatcacaagcaagaatgatagatacaagctgaagttgtgttctgtaggcaaaagcctggacacacaaagtgagggctcacatttccgtctccacttgggccctgctggtgcgggctgtgtctgggtgtctcctcccctcctgcctcctttcctacaagtggggagtcgagtaggactgtcagccctaacttgcaacatctcggggtggtttgtgtgtgggggggtgcttgtggctcggtttcattggtacttaaacctggcttggtgcgtgagtgtaaatttttaattgcactgtaatttcttcagtccccagcccgccctcgccccccccccgcaagtatcccccactactcccccccacccccgcggccctagctagctgacttgactggcacgcgccgggagcccgggctcgggcccctcggagcgtctgattggctgcggggcagctccggtctgctctgcctgcgccctcattgggcgagaggcgcagccagcggcacttcaaagcgggtgctcctcgcacttaggctgagtttagccggcgggagcctggagtccgctcggcacgagcgcggggacgcgggagccgcgcgggacccaagcagtttttccgagcagccgccaggctcagccccgctcccagcctcgctgcgcagccagagacctgctatggccacgtctatactc

SEQ ID NO: 24235 - DNA, 2356 bp, Homo sapiens
  chr2:175200341-175202697
  binary
cgttttctattaaaaaagaaaagtcaagtcgtagccaccctgggagagctgcaagtttcgcccgtccctggcagctgtttcggccgcctccgccctcacccggtgtttgttgtctctggtctctgtgtttaccttcgcgcttcaccccgaagggcgacttggggtcttctgggagatgagccggtttacggcgacaacccaagtccggttgtaggcagggttgcagcggggaacacggaggcatctttgatttatagcctcagcgaagtgcaactttccggcgcctggaccttcgcccgggtgatcgcccctgctccgcgcccggtgcggcgactcctccgcgggcgcgtggggaggaggcgcgaggcggggagccaggaccccccgggagcagccgcaggggacgaggctgctcacgggtgcactttgtttcttcccccacttcctcttgccctcctccttcttgctccctcccccatcccacccactctaggaagagccgcgcttcggaacgaccccgttggccatgctggcggcgacctgcaacaagatcggcaacacgagcccgctgacgacgctgccagagtcgagcgccttcgccaaaggcggctttcacccctggaagcgctcctcgtccagctgcaacctcggctccagcctctcgggcttcgcggtggccaccgggggccgtggctcgggcggcctggcgggcggctcgggcgccgccaacagcgccttctgcctggcctccacgtcgcccacgtcgtccgccttcagcagcgactacggcggcctcttctccaactcggcggctgccgcggcggcagcggccggggtgtccccgcaggaggcgggtggccagtcggccttcatttccaaggtgcacacgacggcagccgacgggctgtacccgcgcgtgggcatggcgcacccgtacgagtcctggtacaagtcgggcttccattcgacgctggcggccggcgaggtgaccaacggcgcggcgtcgtcgtggtgggacgtgcacagcagcccgggctcgtggctggaagtgcagaaccccgctggggggctccagagctcgctgcactcgggcgccccccaggcctcgctgcactcgcagctgggcacctacaaccccgacttcagctcgctcacgcactccgccttcagctccacgggcctcggctcctccgccgccgccgcctcccacctgctctccaccagccagcacctgctggcccaggacggcttcaagccggtgttgccctcctattcggactccagcgccgccgtggcagccgccgccgccagcgccatgatatcgggcgccgcggctgccgccgccggggggagctcggcacgctctgcccgccgctactcgggccgcgccacctgcgactgccccaactgccaggaggcggagcggctgggcccggccggggcgagcctgcggcgcaagggcctgcacagctgccacattccgggctgcggcaaggtgtacgggaagacgtcgcacctgaaggcgcacctgcgctggcacacgggcgagcggcccttcgtgtgcaactggctcttctgcggcaagcgcttcacgcgctcggacgagctgcagcggcatctgcggactcacacgggcgagaagcgcttcgcctgtccggtgtgcaacaagcgcttcatgcgcagcgaccacctgagcaaacacattaagacgcacaacgggggcggcgggggcaaaaagggcagcgacagtgacacggacgccagcaacctggagacgccccgttccgaatcccccgacctcatcctgcatgactccggcgtcagtgccgcccgggcggcggcagcggcggcggcggcagcggcggcggcggcggcggcggcctccgcgggaggcaaggaagcagcgtctggccccaacgactcttagaggccgggcgagaggcgcgagcacacaagcgagtagagacaccgagaacgaacgagaggttcggagggcgagcgagcgggaggcgggagggcaggggcttcagtgacgcccccagggcccgggctgggcgcgaggtggagccgctcagggctcccgggctgcggttcgcccgctgtgcgaggagctcccctctgccttccgcgcccggataagaatcgaacgcgtggtccggaaacaaaagcgaaccatcctccgacacaaacactttaaaaactgtactcccagacgtacacatacaccggagacctacaaccacaagcacgcacactcgcgcgcgcacacacataccactcgcccaaacttctcgagcgaagagcaatacatagaaaggctccctctttgcccactctccacctccctccaacaccc

SEQ ID NO: 24236 - DNA, 963 bp, Homo sapiens
  chr2:176944646-176945609
  binary
cgccaggcttttgcgcctgctccttctcccccaattcggagcaggttcccttcggcctcccgcgccccggggcgccccctggcggcagcggcagcagcgggcaacgcgcggagggctcagggggcgcacaggggactcccgggcacactcagagaggcgggcgcggccccctggcggtggcgacgtagttatctggtgagcggagcctcgtccctctggtccggcgggctcacggccgtcttactaagcaccgcggccgagtagggcaggaagccgctctcggaacgcggcgccgccgcgctgcagccgaagtccgagcctcccccggccccggcgcccccgccgccgccgccaccaccaccaccgccgccgccaccgccaccccgggaacccagggctgcggcagctgctgccgcggctgccgccgccgactgactgctgtggcaactgaggcacgagcagggtgcagagccgccgctggggggcgcgccggccgccgccgccgaggaggccgcagccgctgcggctgccgcggctgccgcggcagaggccgcgctgttgagccccgcggcggccgcgggagcctggtagagaccagggtggcggaagctacacagcagctccggccgagagtaggggtgcgagagggcgcggaaggtgtccagtggccggatggaagtagcgaagggcgacgaagccgcggccgccgcgcctgaggctgcagccgcggccgccgccgccgtgacgcccacgtgcgggtagtagtgcagcggcacgtgcgagtggaaggggtagggcaggcttccggtggcggccgcgtgcgtcatcatgtaggtgtagaagctggggtcggctgggtgcggccaggacatggccaggcgctgccgcttgtccttcatgcgccggttctggaaccacacctgcggggagagacgcgccgcagcctgggttagggagcgcccc

SEQ ID NO: 24237 - DNA, 336 bp, Homo sapiens
  chr2:180886599-180886935
  hypo
cgcggggtcggtgtataataccccccgccgcgatgtggggagtgatatcaccctctctcaccctggatattacgaacaacctcgcggggggtggtggtccataatatccgggtggggggagaggctgatatcactccccacatcgcgagggaggggatgtacaccgcccgccgccacgcgaggtggttcgtaatatccagtgggggagagggtgatatcacacccacatcgcggggggtgggagggcatgtacacaggatattatgttggttgaggttactgactctgaggcaaggcggccagaatatgtaccttggctctgccacttactgcccc

SEQ ID NO: 24238 - DNA, 1776 bp, Homo sapiens; identical to SEQ ID NO: 22868
  chr2:182321353-182323129
  binary

SEQ ID NO: 24239 - DNA, 121 bp, Homo sapiens
  chr2:198456572-198456693
  hypo
cgagcccacgcccatctggaactcgccctggcttgcaagcactgtgcgcagaactggttcctgccccgtgcctctccctccacgcctctccctccacccctccctgcaagccgagggagcc

SEQ ID NO: 24240 - DNA, 1281 bp, Homo sapiens
  chr2:207139040-207140321
  binary
cggaaacgactagctctcttagccccgttttcttttctacattcatacgttgctttgaattggcaagcagtttttatttggaccctcaaacgctaaaaccttggtctctacttcgcgtcccaactgtgcttatgagtctagtcatttttgttggaacgcgatagatttcccaagctccggagtggggccctgaccagggaggaagtgtccgctttaagagcttctggaggggaggaaggggctcctccgcccgggtgggagagtgagtgagtgggtgggcgggcagggggcggtcccgccgctcctgcgtcagaaggggtctggttttcgcaccttccctgacgtcaaacctccatcagggttgcaacgccacgttgccttggatgcctgcgtgagtggagtcgcgactcggggcccgcgtcctgagagacgcgctcccgcgccgcttctcgcctccggaccgcaggggccgaagtcgcctatttctggctccgcgggcagcggggccgtggcgctcggacggtctgggattcgggcgccgccgcggaaccggaataagaagggagagcgcccggctcggtcctcggtctccaccgcggcccggaaggaatccgggcagcctccgcggaggtgagtgccgcggcgggggcggggcgcggccggggcgacgcccgcgggcggggcctgctcgccgggcgcccggggcgccttcttcccgagggacgccaggaccgctcgctgggctcccgcggccgcctcgcaggtcctcggcttccccccaccccgcgtccctttctgcccctgctgcgtgagaggtgtcggcggctccgggccgggatcgaggtggcggggcgagggaaggaggtggggcgcaggctgcattgcgcttctgtccggggccctgggtcagaggggccggcggacgaggcctcgggtccgggcttggggagggggcggtctgcggggtcggattgagggccgggaacccgcggagtcttgcccctgggcacctgtggggccgagatcccgagccacctgtccacacacccccttcccccagtgccctgcgttgggtccagctggccccagacctaggcctttcccagcctcgggcgattatagtttatttgaaaacgtttgatttttgtgttaatgattcttttactaccgccgtgcaacagttgtgtaaatgtggtcgtgttacgccatcgtttttacttgctcctaagaagggccttaccagctcctgcgattatctcacgcgatgattcttggtagctc

SEQ ID NO: 24241 - DNA, 1753 bp, Homo sapiens; identical to SEQ ID NO: 22870
  chr2:20865462-20867215
  binary

SEQ ID NO: 24242 - DNA, 312 bp, Homo sapiens
  chr2:219255979-219256291
  hypo
cgccaccgtggccgtggacatttaccagggggtgagcgcgggtgggtggggagggcgtgacccagagaggctccccgcctcgggcagggccaccggtcctaccacactcgtccctgcagggcgtgatcctgggctgcctgttcggccccgcggccctctacatctgggccataggtctcctggcggctgggcagagctccaccatgacgggcacctacgcgggacagttcgtgatggaggtagggcagggggcgggcccaggagggcaaggggtccaaggacagcaggcacactactgggggctagaactcc

SEQ ID NO: 24243 - DNA, 149 bp, Homo sapiens
  chr2:219294031-219294180
  hypo
cgagaccaggagcggggagggcgcacctatgtaggcgtggtggacggagagaatgaattggcatccccgaagctgatggaggtgatgaaccacgtgctgggcaagcgcagggagctgaaggcggccgtgcccgacacggtggtggagcc

SEQ ID NO: 24244 - DNA, 707 bp, Homo sapiens
  chr2:219757371-219758078
  binary
cgctcccggcctcagcgtttgcctctgtataatgggagtgggtttcagaagcaggccaggctaagcgctgggaggggagtggggctgcgcgccgtgtcacccctcacggtgcctccctccgcaggcagtgatggagaacatgcggcggaagtgcaagtgccacggcacgtcaggcagctgccagctcaagacgtgctggcaggtgacgcccgagttccgcaccgtgggggcgctgctgcgcagccgcttccaccgcgccacgctcatccggccgcacaaccgcaacggcggccagctggagccgggcccagcgggggcaccctcgccggctccgggcgctcccgggccgcgccgacgggccagccccgccgacctggtctacttcgaaaagtctcccgacttctgcgagcgcgagccgcgcctggactcggcgggcaccgtgggccgcctgtgcaacaagagcagcgccggctcggatggctgcggcagcatgtgctgcggccgcggccacaacatcctgcgccagacgcgcagcgagcgctgccactgccgcttccactggtgctgtttcgtggtctgcgaagagtgccgcatcaccgagtgggtcagcgtctgcaagtgagcggcccggggtcccctgggccctgatcgaggtcccctcctggagcctggccctctgaggcttacggtcttggcaaggcagcatc

SEQ ID NO: 24245 - DNA, 153 bp, Homo sapiens
  chr2:223753488-223753641
  hypo
cgctttgtttgcgacgctttgtttgcgtatccaagattgccatcttttaatgaagtagatgtgatggaaaaaggaatatactttgtccactttaatagtacgcctcactttgttttagacatgtctgtgcctgcgtctctttgagggatatac

SEQ ID NO: 24246 - DNA, 62 bp, Homo sapiens
  chr2:225394299-225394361
  hypo
cgtgccactgtactccgagactccctctcaaaaagaaaaaaaaaagaatgaatcaaattaac

SEQ ID NO: 24247 - DNA, 1278 bp, Homo sapiens
  chr2:225906328-225907606
  binary
cgctggagacctaatgacccacgtctcctccagcctgtgttcctcagccctttctggaggagtattaagtggtttgtgggtttttaccctgcggtgggagggctgttccaagtacatctatttctgcgatagttaacgtcggggggccccagctctaaccagggcgaggaccacggactgcatccctctctctcagcgcactggtctgtttactggagggtgagagggacgcgcagacctccggactcaggggttctgttctgtagatccccccaccccacccggggtctctggcactcgtatcacttagcaccagtgtgactggcggtgcattccggccccctcgcgccccattaaagcccctgcacatcctctcccacgctgcgcttctgctacccacgcagctgctcctctgagcgtcccgcgtgcacaaacgcgcccccggtccttacgcgtcggtggcgctgcctcgctgaggtggcgccgggggagcccgcagaggcggcgggggagggagtgcggaggagaggacccgtgagctgcggggacctgggcccgccgagcttttggggaagctgggctccgttccccccgggcgcctggggcgcgcgggaaggcgcggaggacgcgccgcactcacccgctgctgctgccggctgctgactgccaccgcggcggcggacgcggcgctgtgccggagctcggccgcctgcccaggtctcaacaggctccgggtgaacctgcgggtccgctcaccggccatcgccggtcacgccaatcgcgccgcgggcccggggcgcgcctcccgccggtcttccccgcgccaaccttctctatccacccgccgttcaggaagcggaactcggagccttcccccccctcttcctcgctcaactcgcaagaggcgggtttttctctcttgcacccccactcttcccacccccttccctcctctgaagcttctcgaagactttccaaactctgcgctcccccgggcgcgcgcggccaactcggctggcggccgggccctgcagcggcgcatctggagcgggcgtcgcgggacgcgtgtggggcggctcctgcccgcgccgcccacacgggctcagctggccggccggggctgtccacgccgcccgggggaactgcaggctgcgggggagggcggggggcggccgccgaggggctccgggcggggcctgtccaaggccgtcgcctgtccaaggccgtcagcctcatttggaggttgctgggagagttggagccctggatgcatttgcc

SEQ ID NO: 24248 - DNA, 688 bp, Homo sapiens
  chr2:232526666-232527354
  binary
cgcttcatccgcccgctttaagcacgcgcaccgacgaaagagtttggggagcgagcgcctcgggcttccccggaggggaattttcacccccgccagaggaagagggcccagctgcgccattagcgcgtgcgagggaaaatggaggctcctggtcccacccgcgcaccggcgcctgcgccctgggcgcccaccccggcccgcgaggcggccacggccggagagagagggcaagggaaccagtgccgtgtcgcgccccaccctgcgcccgagcgcagtgccggcgagcccggctccggcccttgagagtccgctccaggccgctccacaccacgagccgctccgcaagtttgcagcgctccgtgctttccctccagccctttgtgttctagcgcgcgtcggaaggaacgcgggaacgcgcgccgtgctgtgcgcctgcgcaagggttcaggcggtgcgccaagcctggagtcaagagtgggcgaggctctcggccgctccgccccgggccgccttcgctccgcccctcgcccgccatttcgtgctccgccgcgtctcccgcgtctggggcgcggcttccgcgtgatggacgcccggaagccggcacaacaaatgcccaagcgccagggcttcgctgtctgcaggtccttccgctgcccgcggagcgaagatggcgcctagagcttgcagc

SEQ ID NO: 24249 - DNA, 257 bp, Homo sapiens
  chr2:233198455-233198712
  hypo
cgctgccgacggtgaggctgtgggtggtgccagccttccaggcctggctgggcagctctgggcttgtcaggctctgacccatcccgtcccgcagatggcactgtacttctgctcggggctgctgcaggacccagcgcagttccggcactacgcgctcaatgtgcccctgtacacacacttcacctcgcccatccgccgctttgccgacgtcctggtgcaccgcctcctggctgccgcgttaggtgaggggtgcagtc

SEQ ID NO: 24250 - DNA, 321 bp, Homo sapiens; identical to SEQ ID NO: 7198
  chr2:234751574-234751895
  hypo

SEQ ID NO: 24251 - DNA, 788 bp, Homo sapiens; identical to SEQ ID NO: 7199
  chr2:241380563-241381351
  hypo

SEQ ID NO: 24252 - DNA, 755 bp, Homo sapiens
  chr2:242004407-242005162
  hypo
cgagggggtcccctctccctagagggcccaacggtctccaagggcagagcgtctggccgctgcttgcccaggccccttccctgaggaacagggaggggataaaatcccccggtgggcttgaaacacggtcacacattcaaaagtgtgaccctcctggaggtacgtggccagggacaaagaaggactctgccagcgatggctgtgtcaggcccaagagccagacccggctgagccgccgacgggagccaggcatgcatagctaacggctgaccagtcccctccccttgttttgacccaaaccctgaagagctcttcccaccgacggccctcaagatggagagagtggaggagagtggggtctctatctcctggaacccgcccaatggtccagccgccaggcagatgcttgatggctacgcggtcacctacgtctcctccgacggctcctaccgccgcacagactttgtggacaggacccgctcctcgcaccagctccaggccctggcggccggcagggcctacaacatctccgtcttctcagtgaagcgaaacagtaacaacaagaatgacatcagcaggcctgccgtgctgctggcccgcacgcgtgagtgtccccgagcctggccgtccctgcccagcccctgcccctcgagggcagcgctggccccggcacctgcagggcggctgtcatgccgtccaccctcctagttcttgcagcagcaagacagacagctgagctgggggttggaggcacc

SEQ ID NO: 24253 - DNA, 783 bp, Homo sapiens
  chr2:24272450-24273233
  hyper
cgtcaggcggggccaggctcgctaacagccgggcggggtcccttcccccgggccccgccccggccgaccccacctttccgcgcggctccgccccgccgcccccttgccagtggcccctccccgcgcaggtcccgactccagccgcacctcctccggctctgcagtggcggcgaggaggcgagccggagcgacggcggggctggggccggagccgagccggggtcgggcagcagcagggaccccccagaggcggggcctgtgggaccgctatgggcgtggagatcgagaccatctcccccggagacggtaccgggctccctccggagccaggggaggggaggggtcccggggcggagcccggagggcgggggtctgattcggaggtggcgtggagggtgctgaagggtcggggggctggatggggaaggcaggcggagacgccggacgggattcttgggggtctaggagaccatcctccgccatcctcttccgcgctcacctaggggaatgtaggcggcagctcggaggcgggggtctgcggcccggaggcgggggtctgcggcccgccaccgccccgggcttctcctgtcgcggctgcagtcgttcggttatccgctgctgctgataccccagcctgggtttcggcttcgctttccctgccctactcggcgagctctggaaagcaggacctgctctcggatacccgctgctcggggacctcctcctagcgcgtcccccgccgggcctcccctcggtcgcttccctgcgggccgggctgtgagc

SEQ ID NO: 24254 - DNA, 356 bp, Homo sapiens
  chr2:242833493-242833849
  hypo
cggtttctgtcttcctgatggcacctctgtgacaggagctcagaccccggcatcagaccggcctccgcagggaggagctgcggtgcccaggccaggccaggaagcaccatggcccactgcctgggcctcacctcacgaacgccaagcactgtggcgggcacaggcggagcctggcggcttcacgcccacaccggcagctcctccctcagcccctcgcccgccgctcccaagtccggcagttctggagcacgggaagctctctgggggttgctgggcagcaggacctggtctgagatgactgagtctgcccaggtcttcacgcgcctaactgagcgtgagcgtgtctgagtcttacc

SEQ ID NO: 24255 - DNA, 324 bp, Homo sapiens
  chr2:24584022-24584346
  hypo
cgctagtcacactccgccgagcagtaggaagactctgtccccatagagcatagcacgacgaagctaaactttcctccccacccctcgccaagggacaggcgaagctcctactcagaatttgtctcttttctcccctcccggttcctggtctcctcacaaaagaccagacttcaactcaagccgccaccgtatcccaaaaccccaaaggtttgcccttgacaagaagcttcttcaaggggaaaggctttcttttgattggggtgagggaggagttagtgtttcctaatgaacgtaaccaaatgtcggcctggcacagtggctcac

SEQ ID NO: 24256 - DNA, 496 bp, Homo sapiens; identical to SEQ ID NO: 7203
  chr2:25044264-25044760
  hypo

SEQ ID NO: 24257 - DNA, 211 bp, Homo sapiens
  chr2:25047277-25047488
  hypo
cgtgccacgtgctcaggcaacatgttggtgaccaaggcctcgttccagcgtcgcatctcatagacacgttccttctggtcgtggacctcaatcttccacaagaaaagtgtccgtgccagtttttctacctacagacacagacaaggcgaggcatgtgctctaagctggccactggatagaaggatgaaaaacaggaatggccaggcgtggc

SEQ ID NO: 24258 - DNA, 99 bp, Homo sapiens; identical to SEQ ID NO: 7205
  chr2:27007597-27007696
  hypo

SEQ ID NO: 24259 - DNA, 855 bp, Homo sapiens
  chr2:30453530-30454385
  binary
cgttcggctaaagctctttgtttctgctgtcatgagcgactcctcggagaagacgtgggagtcaaggatggggggcggcgtgcacaccgcccgcccacaccttctgcccccgctgcagaccgggcgtatgtgtgtctccaatggaaaaatcctacccaggacgacaccacatccttgctcccacaaataaaaccttccacggaactcagggctgcagaccagcccttcgcaagccaacgcgccccgtgggcactcggtcccccggctccgcgtctctgccaccttcccaccgcttcttctttaaccatgctcttgtttcccctcgctgatcgcaaggctgcgggcgaggattccagagagaggcctagtatggggaacaaacgcttcagaggggtccgaggtgggctggggacagccagtggatgggaaggagggcgctggcgccgggcggctggggtggaggagtggcgggtgccctaccccggcgcagagcagccgccgagctgtcatgtcccgagcggcccccgcgccctccttgcgcccacctccgccgcgctggagttcggggtgtgcgtggagggggctgtgagcgggaagcggcgcggacgcggagtccgggccggtgcgagtgagcgcgtgtgcgcgtgggagagcggcgggagggggccgggctcgcagccgcagcgaaccacggccccgggagcagagccgagcgcgcccccgagccgccgcccgccggagctgcgagcgctgaagccattcatgattttggtgacgttattccaggagtgggcgagggagggcggggcctctcggggccaagccccgcccccgcccctataaatacggcttccc

SEQ ID NO: 24260 - DNA, 75 bp, Homo sapiens; identical to SEQ ID NO: 7207
  chr2:31550134-31550209
  hypo

SEQ ID NO: 24261 - DNA, 248 bp, Homo sapiens; identical to SEQ ID NO: 7208
  chr2:318873-319121
  hypo

SEQ ID NO: 24262 - DNA, 425 bp, Homo sapiens; identical to SEQ ID NO: 7209
  chr2:319186-319611
  hypo

SEQ ID NO: 24263 - DNA, 36 bp, Homo sapiens
  chr2:32504328-32504364
  hypo
cgcgccccggccattttcaaatttttattacacttc

SEQ ID NO: 24264 - DNA, 831 bp, Homo sapiens
  chr2:38303013-38303844
  hyper
cgcagcccggcctggacacctgctgccctcactggaagctttaactcccactcgagtctcttggcgtcgtcagtgccaggagcgcttggattgggatggggacggagaagggtgcctcgctcgccgagccccgctgcccttggggacctggcaaagtcgaggtttcctcacagcgttgagattgagactgggggtcggtgagtggcgtcaattcccatgcccttgcggctctcacaactggagtcgcagaagcgctcgctcccactcccactccagagtcaaagcgcgccatcccgctcctccgggttttaaggactgggtagaaggagggcagcgcgacctggcagggcggggcctgcggggggcggggcgcgccgcacaccaggccgctttgacccggactcccgtccaggcgcaccggccggcctcggagctctaccagcaggctttcatgggagcggaggtgcccacgtttccattgtgcggtaaccgcgcttcatcacagccacctccaatcgaggccgcacggtgtccccagaaccacgctcggtacaacctgccccggccgctgcgctcgacttgggagcgcgccccgccccgagcgcacgacctcccttccctctccgcgacttgagcttgcttcccggaaagccagtgtagtggcagcggtttgcctcacagcgcccctggttggttgtttaaattttatcttaggttctcgcaaacaaattgccacctcagtggaggctctttggcatgctaaattttttccagttcttgcggcgagatcaggaatccctaaaagtagccgctcccccgccccggggcccc

SEQ ID NO: 24265 - DNA, 914 bp, Homo sapiens
  chr2:42720186-42721100
  binary
cgcctggagggagccgcctcggccccgccggggcgcgcctcgtcgcggcccagcacgcccggctcgtcggccgagtagaaggtgtaggtgtcggacatgcggtcgtcgaggcggcgctggcagcagtactcgaggtgcgcgccctccaggccccagtagatcatctcgttgtagaaggagagctcgcacatccgcggcgcgaagcgcagcttgccgtggccgcgcacgtagagcaggatgaagccgaaggcctccgagtgccggtcgaagaagtactcgttgcgctcgcggtcgtagtcgtcgcacacctcgagcacgtcgcgctcggagcggcagccgtgcagccggctcacgcggcgcagcgggaagtccttcagcagctcccgggacagcgaataccgggcgccgcccacgttcagcaccaccgaggccgccccgctgcgcccgaaggtcatggctggccgcccgggggactttcggcccgagggccccgctgcagccccccaccccaagccgccacgcggggcctgcctgcccgtggctgacgggggagcgcgccgtcggggcccgcgctccctcggggctccgctcctgccctccgctggcccgggggtccctgggctcgagtatctccggcgctgctagtagcgcgccctccgcccggcggtacctgcgggtggccggggagtcctcgccggcgccagcgctgagccccaccggctgggaacgcggctgtgtccgcgccgccgaccctcgcgcccgagggctgcgcacaccgaggccgcggtgccctctcccaagccgcggggccgaccccctgagggctgcgggcgccgaatggagccgccggggcggaatagctccccgtctccggcgctccctgcggccgcgaatccggcggccgccccgccgcc

SEQ ID NO: 24266 - DNA, 745 bp, Homo sapiens
  chr2:43019535-43020280
  hyper
cgcagatggaggagggggaggaggcgagggcagggggcggccatgggggtgctggactcacatgagcttgttgcagaccgggggctggaaggagccccggttctccttcacccaggccctcactcccaggcggcgctccatgactgtcccgggcgcctcctcgcagcgctgtcctcccgccgtcggaggcccgcagctccgcccagccgcctttttaaccagaatcccaagctcacgaggcggagcaaacccccgcgaccccgtggtgggggcttggggcccgcggactttgccccctggtggactttggtctgagcccgccgccctccgcgccactccaggccctggcgagcgcggcggcggcagcgctggggaacggcgtcccgcgccctctgcttctccgcggggcaggggctcggtccccgccaccgtctccggggcgccccacacactggcgcctgcggtggggcctgctcccggcggaggacaaagaatccagacccttcctggacgcttgtccccagacgttccttccctctacgccccgaggggaatcccagggaaggttcccagaaatactacagtgaggagatcgcgggttggaagtcccagcacctgagaacacggtgctggcgctgggctcaagatttggctttcccatctggaaaaggggaatgactgccccgccactcagggctgcggcgctcacccagcgggaagccgcacggcggtccccgcaggtccc

SEQ ID NO: 24267 - DNA, 160 bp, Homo sapiens
  chr2:43408183-43408343
  hypo
cgctgggtgccgcaggtacaatggtgaacgacacagacccaatccctgccctgggagagtgaatcatctagcaacggagacaaatattcaatacacacccaacgcatagttagtgagtattgcagagagtgaagggtgcgatgggatcagatttcccagc

SEQ ID NO: 24268 - DNA, 1780 bp, Homo sapiens
  chr2:45161096-45162876
  hyper
cggggagcagcggcttttcaccctgctatagggaggtgcgtttggctgagctgtccccccaccaaataaagctaatgatgtagtaatttaggagggggagaggggctgggcaaaaggagagaggggagaggatggggaaacgcgcgccccaagagcaaaagcaaacagctgtggaggcgctgcccgcggctcaggcttcccaacaggttagctatactgggatccacccggcatttcgcaggaaggggtggggggaagacagagcgagagggggagagaggctcacaagaggacagagggagggagggaaagagagataggagccagagagcgcaccgcgcggcttaaaaggagagacttactaatgaatatttatccgccgctgctccgtgctcccggcttcccttacctttcggcaggtaagatcctccctgtgccccagccccgggggccctcctagctccccagtcggggagcctgtggctgggcgggagggctctccgttggtgggggtgggagggcggctctactctgcgttcactttgggtgcccaggcatgcgaccctgcacgactaggaaccgcgtgcgtgggctccatgtgtggaatgagtgtgagcatgtaagagtgtgtttgtgtgtgtgcgagagagagacagagagactatgcgcccgcaagcgcgcgcgcgcgcctgtttgtggcgcgctctggaaacattttccgacttttcactcggacgccctggatttctcgcctttgcctttctctgcttcccctccctcttctctcgccctcccctcccccacccaggtctaccccaccctaccccactcctaccccggctgctgaggcgctcttctgccggctattgtacggctggcgcgggctccccctggccacatcccgggcctctcacacaagaagaatagttctgtttccgccgtaaacccccacacaaaggctgcccggccaccgggtcccctgtcccccttcccggggacttcggcttttgaggtgctgctgcgcgttctttctccctccccctctcagggcgccagggcccagaccaaggagctaagagtgatcgggacttgggggtaccgggtggaactccttgggggccgcccgccaggcttcctgggctgcaactcggagcccagagacccccaggggaagggcgcctcttcccccaccaccaccccagccgtcgcctgcgggaggagcacggggaacccggcccagccaaagggggaagagggaggggaaaaggaagaaggtcggggaggggctgaccatataaccagaattctttaaacggacttacccggccacctgttgagaatccatgtggggtcggctggctccggagttgcgcaaggtggacacacaaaaccaaaagccggagttgggaaaagaaaattctttctctgaccatgccagacgcggccggtcaggctcgcagctccgcgctaggatcgggcggctgtacaaccaagatcgactttgccctgtcccccaacgcccccctcatcccacggctccacggctgggaggctccggactcagagctcgcggactcggcgctcagggtcagcaccagcagctcggcttaagccggggcaggctctctaagccctgctcagaagtcaagagcagcagtgctgcctctcctcgccgcctttcatgccgcggccgctccttattcttgtgtctcggcctctcccggccccctcggacaaaacccccagagcccggccactctcttcccgctaaatccccttc

SEQ ID NO: 24269 - DNA, 42 bp, Homo sapiens; identical to SEQ ID NO: 7214
  chr2:54343989-54344031
  hypo

SEQ ID NO: 24270 - DNA, 428 bp, Homo sapiens; identical to SEQ ID NO: 7215
  chr2:61175657-61176085
  binary

SEQ ID NO: 24271 - DNA, 66 bp, Homo sapiens; identical to SEQ ID NO: 7216
  chr2:62116634-62116700
  hypo

SEQ ID NO: 24272 - DNA, 1493 bp, Homo sapiens
  chr2:63274985-63276478
  hyper
cgcagaggagcaggggcgttggcagcgggcttgcttgggcacagtctgcgggccggagcagaacttccgcccctggtcagatccctcggcctcagatccaaagccctccccttgtcccaagtgtcctccagagcctggccgggcctggaggtcacctggatgctggatccttgtctccacacccagctccctcgccccttcccggctcgagggccttgagctggacggcttcacctcctccagtggtgtccccacttccccttcccgcaccgcggccgatgctggaacggtcatggcttctggcccagcatctcccacctggacatttgcctagcgacggccgcctcaatcctctgcgctgctttcaagaaactttcatcccagtctctctccctctccactctcctccctctccccctctcctctttcttttcttaatcctggggttttatgggctgagcgttaagaaaattcgcctgcaatttgggattagataaatactctaattaggaaaaaaaaaatccgtgctacttgatacctcccaacttccccgagaatggtggcagcatctggaaccgagagcgccggcctcccgcgaggcgtaccccggggaccgcgctggcacattccagagcgcactgccgtcccacctcgctgcgccggacccaggtcaggtgctgaggctgcaggcgaaacagggcctggtggagggaggaatgagttaaggtggaggaatggggcaaggtcacgcgccccggcactggagggccaaccccggcacacagcggactggccgggactagggcagcgccgggctatggacgcggacgccggcgaagcgcaccccgggacgtccgcatattctttcccccaaaactagtgcgctccagccggcgcctttcctcggaacctaaggaaggggtatatttcgttgctttctttaaacctcagcacgatcacagtggctccgagccgcgggcggctgaccgcgggcctcgcgggctactcctggtaggggcctgcgcgagcctaaggtgtgtccccgcctgggttagcgctgcgctctgcactgtttcttttcctcttaaagcttctttctcactcactctctccctccttctctctctcattttttccccatttctctcgttcttttattcagctttctctctttctctcccttttgtgaatgggccgcggtgtctttgttctgtagagaagcgcccgtgtcgctgacttttgtgaaccagagaaggatcttgtaaaacctccttttctccttcgtacgcccccactcccacccctcctcccctgcctctttgattagatgttccctcatcgtcaaaaaaaaaatgtaatttcgttggtctggcggccactttctttgaacattagctcgctttcagctccaacttcaattagaaggagttgattttgagagatcaacaaaagaaccgaccaaagccttattaaaggtcctaagaagatctccc

SEQ ID NO: 24273 - DNA, 670 bp, Homo sapiens
  chr2:63280967-63281637
  hyper
cgaatcttggagacactggcttctagtcgcacatctgcactttctcccacctgtggcctctcaggctcggccgcccgagggagtttcttttattcccagttcggctttcttttgcgaaggccgagatctgggcctgccaggggcctgcccgagtcctctatcgcgggtccacgtggccaccaatgacccgcggcgcccccgcgtgtccccgcagccactccgcggaagcagcggcgggagcgcaccaccttcacgcgttcacagctggacgtgctcgaggcgctcttcgccaagactcgctaccctgacatcttcatgcgggaggaggtggcgctcaagatcaacctgccggagtctagagtccaggtgcgcactccccgggctccagggtctgggtaggggagctgaggctgctcggggaaggtctaggaaggctcttgagtagttcttgaggagaccatcctgtgggggtgggcttacagactgggcagccgctctcggactccccctagcgctgggccccagccaggaaagggggcaaaagttaaaggaaatggcttagagccctggattccgcctttagccctagggcgccttcggtgtcggtatcgaaagtactttttagaattgccggaggactagggaagctcccgaatgtaaagcgccctgc

SEQ ID NO: 24274 - DNA, 126 bp, Homo sapiens
  chr2:67626117-67626243
  hypo
cgaagtgccgcgtggatttttatgtgaaacaagcatttctgttacggttcaggtaattatctctgggaaaaaaaattatcttggactataaaagttagtctcagctatttgaccttggggtcttac

SEQ ID NO: 24275 - DNA, 546 bp, Homo sapiens
  chr2:68672378-68672924
  hypo
cgaaaacccacaccaaaatcatcaccagcgtgcacatctgttcccttgttgagatttaatcactgaagagcaggtggaagccgtcctgaacgaattaccccatgtacctagaagcctcttcccaaatcaagcagtgatcacctcactcataaacagagcacgcacccaaaggttttgcttgatgtattttgagactagtttcacgtgttgctgctaaacgtttccagggagttgcaaaagttaatccttatggatcggtgattgaaatacagtgacatccctgctgctctgcagtgtgcgcaaaggtcaaatcaaaataacaaacacgcacgacgtcttcgatcaccttcctgtaaaaccgggtttctagccggacccatgtcctcacagttcctgaatcaagttcaccgtctgtgcaagcgccacctgacagagctccctgcgacactgaaacgcgtttgggcacttcccacgtgggaaccactcgccacgggcacctcctgagtacaaggtgcagtgctggggctggggcaggctgaagcgttc

SEQ ID NO: 24276 - DNA, 123 bp, Homo sapiens; identical to SEQ ID NO: 7218
  chr2:69928507-69928630
  hypo

SEQ ID NO: 24277 - DNA, 620 bp, Homo sapiens
  chr2:70351179-70351799
  binary
cggctctttttttcatcaggatgtggagagtgggcgccttgggaagacgaaattgagtatgtgcgggggaggggtcatatgaaacaaggtcgggaagggggcggggagagctggggctctggaggagcttggggctcgcgctgcgggggaggaagcgccttccgcggtcgctggggggaagtggttaggaggaagcacgggcagtggaggggactgctggagggtcccatctgggaaagcaggcacggatgcggggacatttccgcccgtcaccctggcaaagcgctcgcagggctggagggacagagttctcagatccaagtagagaaaaccgggaacggttccggctctggggactgacattcatcgcggcagtttctggtggcaaaacagaggaaacaaaggaatgatgaaatgaactgagctgccttcatgccccggatgaatgttcagccattagaaaagagtgaatcccagctgggatttggggttccacggtgtactagaaaagcaaaacaaagagaagcgcctactagatgccatcttggaaaacaaaagcaaacgtgtgtgtgtgtgtgtgtgtgtgtgtgtgtgatgttacatgggcatggggaaattac

SEQ ID NO: 24278 - DNA, 346 bp, Homo sapiens; identical to SEQ ID NO: 7221
  chr2:72359340-72359686
  hypo

SEQ ID NO: 24279 - DNA, 1230 bp, Homo sapiens
  chr2:73147029-73148259
  hyper
cgtgggctcgatccgaagcctgggtctcgaaacctggcgcccaggggccgagttgtagttggggcggtgtgtgagcccgcgggccgccgcggccgaggggctggcgggttggaggcttgtggagggataggggctcggaggagagggcggggtcgttcctaagtcctgtggcctccagccgttcagcttgtccggagtcggcatcctgggccgcaccctcggcttcgaatccagcccctgacgccctccgcaccgcggttcctgcctccgggcgccgagggccgggggcgcctggagagaaatccagctccggctctgagcgtctccagtcaggcgaggcggataaatccttcgcaaaaccctcttggaaattgccgccgcttcctgagccatcagtcccagcgggtacgttatcgagtagcacaaacagttggatttttccctcaagaaccgagtctggacgcggagatggagccaagtgtggctgcattttcggacccggaaatccgttgggcactgaaggacttttcgaaccctgtagcgctgttgcttcgcggtccatcgtcgccgctgcagacggatgcgctccccggcggctctacgccctccagtcccggccaggcctctgggctgggagccgagccgtctcgggccctccggcgccgcgttttctagagaaccgggtctcagcgatgctcatttcagccccgtcttaatgcaacaaacgaaaccccacacgaacgaaaaggaacatgtctgcgctctctgcgcagcgcttgggcggcgcggtcccggcgcgcggggaagcggcgtctccgctaaccgaggcgctggaaggggaaaagcgaatgcggaatcgtccaggactccgaaggtcggggccgctcgcgagcaccgaaggggaggagccgacgaagaccaggagtgggccgcatttcggtactgtttccccgagatcaggaactttccgggtctaggagcaacgcctggagggggctgtagagacccagccccccgggacccgcaactacaatgggccggagcttctaaggtcgcctttgttctggcaggaggacggggaatgaggttatctccgccgcctgtcctgcctctccctctcctagccctagggccctccgcccagccgtccggccctgagcccctggccggcggcggcctctccagcgaagactgcggctcgaagactgcagctcggaccccgggtgcttc

SEQ ID NO: 24280 - DNA, 477 bp, Homo sapiens
  chr2:74152840-74153317
  hypo
cgctccagtagccattaacgccccaccctggttatccttaaaaaattcgattaaaaaaaaagttcttaatatataaacatgacctcagccatcctatatatacatcaacataagaaaaaggtcccgtgctttttatgggaacagcttcaagacaggtatcccagcccccggcccctccccagcccccttgcaatcagatccttgtcttctaaaacctgccacacctaagagcgctgcctgaaggccggtttggcctgttgactcctggttttgactgttggtgatttaagcgattggaactggaagcaccatttgacaacattttgtaaatcattacttctgaggttgttatgacgacggggtgtggcagtccggcttcacctgtggcagcagcttaggtccctgccctcctgcagagcacacttcaccgacagcaggactcaggttttatacaagtctctactcgccattgcttac

SEQ ID NO: 24281 - DNA, 595 bp, Homo sapiens
  chr2:74726177-74726772
  hyper
cgcgattgccccgcctacaaggaacagagcaacaggtcgctcagttggcgacggtctgcccttttcccttggcactggcggccttccggagccgccgcggaacctagggactaacggaggagaggtgagaagtcgcaggtgcgagtcctggcacgtgggctgaggacaggggaggattagggtgggtggcctgggctgggacaaaggtttgagacggggaaccaggaggagagaggtgaggaaaaggctaagtcagagtccgcgaccttgccggctctataccttcagagggctgcagagcgcgcgcgtcaagtccgcggaaagttttactagtcagctcctccagcgcgcacagcggcgacgttggacccggacccgactctggaagctgcggcgcagagggtgctcgggggaccatgcgcggggctaggatgtctgcgatgcttaagagtgtccggggtgttcggggctcgcgtcccgagttcatggtcggccgggctggggcggtccggctgtccgttgcgctaggctccgcaaacgcctgggccccagtgctcggctcccaatccgggcccccagcctcggacccgccccc

SEQ ID NO: 24282 - DNA, 1488 bp, Homo sapiens
  chr2:74741301-74742789
  binary
cggaggcagcccaaaggcggaggccgcccaaaggcggaggccagcaaggatggaggcgcggtgagcatctccgctgactcagcggcccatgctcgggcccctcccgcgctgagcctggctcctaacaccctggccccctgtccccctccccgcacatctccgccagccagccttccccctgcgcttggcgcaaacaggcgtcccttcccctttaactgctgggccccgcccctgccctacccccagcccccactacccacccgggccgatccgtcagtcactgccccagccggagctggccaaccctctccacccgggacttgggcagcggcgccggcagcccagcgtctatttgcgcttaagagccagcaaggaagctccaggggccccagctggccgtgctcccccgggatgcaagtccctgcgctgacgcccggcagcggctggcacgggcgcggctgctccgggtgcacagggatgctgctgtttcggggaccccggcgccctgccttggccagccccgcgggcccctgaggccactctccggagcgcgccgccgctgggcttctggcgctgcctgaggcatcctccccaaccaccgaacctccggcggttctcctcggcccagaccgatggagccggggatgctgggtccacacaacctcccacaccacgagccaatcagcttcggcatcgatcagatcctgagcggccccgaaaccccagggggcggtctaggcctgggtcgcgggggccagggtcatggggagaatggggcgttctcgggtggataccacggagcctcgggctacggtcccgccggctcacttgccccgctgcccggcagctccggagtgggcccaggcggcgtgatccgcgtccctgcgcaccgcccgctgcctgtgccgccgcccgctgggggggcgcctgcagtgcctgggccctcgggtttgggcggcgccggaggcctagcgggactcaccttcccctggatggacagcggccgccgctttgccaaggaccggctcacgggtgaggttgtctgacccctccagcgtcacgcccgactctgaccccgtctcctcatttcttagctttctgctccaactcaaggacccctttcacacctcccactagatcctcccaggggatcctcccccaactcaaatctctgggtcctgcctccgagaggtgatggggagggagctgccgtcggtgcccgcgccctcctctgtagtcccactgtccacgcgtggggaggggagggtgaagttacaggggacgtctccctcgcatcccaggggaagggcctttcttggctatagggctcggctgatgcttagggcccgggtaaggacagggcgcgggagttctgcggcctggacagccgcgcggccttctcagtggcacctcgggccaccctgcaaatcctgccctggtctttcttcctcccggtagctgcgctctcgcccttctctgggacgcgcc

SEQ ID NO: 24283 - DNA, 955 bp, Homo sapiens
  chr2:74742812-74743767
  hyper
cggacccctccgaagcggaagaagccgcgcacgtccttctcccgctcacaggtgctggagttggagcggcgcttcctgcgccagaagtacctggcctctgcggagagggcggcgctggccaaggccttgcgcatgaccgacgcacaggtcaaaacgtggttccagaaccgacgcaccaagtggcggtgaggcgcggcgcgggcgagggcggactggggttcccgagcagggcctggtgagaagcgacgcggcgggcgccccgctgaccccgcgtctccctcccttaggcgccagacggcggaggagcgcgaggccgagcggcaccgcgcgggccggctgctcctgcatctgcagcaggacgcgttgccacggccgctgcggccgccgctgcccccggaccctctctgcctgcacaactcgtcgctcttcgcgctgcagaacctgcagccctgggccgaggacaacaaagtggcttcagtgtccgggctcgcctcggtggtgtgagcgacgcccgtccgatcggcgtggagcgccgggcccggagcggtggagcgcgcggctgcctgcgtccatggtctagtggcagccgggcgcgtgaggagcggcaggccttgaggctgtcgtcgagggctcctccaccaccggccggctcccaagccagcgttgcgcagatgcacggccagctcagaggcggcctttcccgccatttttcacttcactgccgttacgccctcgctggaacctgaggcgccgagagggcgggacctgcaggacagtagccaatgaggtgcggggagggggccgggctggccaatgggagctgctttcctgagggactcgaaattctccggcgggtggtcgggagctggggctctgaggggctctagcggcgttgcgcgcggtgccggctgggtctgtaccaaaggtgtgaaggaaagaagacaccgaccacggc

SEQ ID NO: 24284 - DNA, 788 bp, Homo sapiens; identical to SEQ ID NO: 22878
  chr2:74781700-74782488
  binary

SEQ ID NO: 24285 - DNA, 75 bp, Homo sapiens; identical to SEQ ID NO: 7227
  chr2:85819578-85819653
  hypo

SEQ ID NO: 24286 - DNA, 84 bp, Homo sapiens; identical to SEQ ID NO: 7228
  chr2:8647920-8648004
  hypo

SEQ ID NO: 24287 - DNA, 549 bp, Homo sapiens
  chr2:8834468-8835017
  hypo
cggagcaaggcagccaggggcccagtgcgaggagaggagaacggacaggatgggggaggcccatcacacccagcctcacaggccgcgctaagagctttggcctttactttgtgtaaactgggaccttggagagctttgcgcaggagagtgatggaaccaaactatttagcagccacatttcttttaatgtttctcgtttataggttacacatttgttgttattattattgatttaataatactgtgtcaagataaagttgtcaaaatcacggcacccaaacttcacattataaaattttaatcacaacctgttttatcacaatcgctttgcagcaacggaaattattcgtagtaattattaagttggtgcaaaattatttgtggtttttgccatcacttttaatggcaaacgccgcaaataattttgcaccaacctaaatattataactaaggaaacgaatagaatggtgtgcatcagaggtacctccgccagtgcttaccccgtttgttatagagggacgggttgtccctgctgcttttttatggagc

SEQ ID NO: 24288 - DNA, 87 bp, Homo sapiens; identical to SEQ ID NO: 7231
  chr2:88591077-88591164
  hypo

SEQ ID NO: 24289 - DNA, 210 bp, Homo sapiens; identical to SEQ ID NO: 7232
  chr2:8860527-8860737
  hypo

SEQ ID NO: 24290 - DNA, 486 bp, Homo sapiens
  chr2:96990889-96991375
  hyper
cgagcagcggagagtgtgtggccacggcccctccactctcccagcaaacccacgggggcctcggtgcggacagagacccggtgtggggaggccgctgcccctgcacgctgggccacgggggtttgggcggggaggagcttgtactgggtgggcggggaggagcccggacggcgggagcggctgcggcgcgcgggcgccctcggagccgcgtgctgggggtcgtaggggcccaccgcgctcagccagacgttcagacgctcggacaagcatggtctataacccaggaaaggggagcagggccactcccgcgggcggccccagcgatgaaccggacgcccccaccctgccgggaaaaaagcagtggcggtcaggccgcgctgtctctttaagatcgtgttcctactaacactgacggtgagtaacctggccctgggtcccgggagacatcccgaggtaggatgggcccttggcctcctacggataggc

SEQ ID NO: 24291 - DNA, 662 bp, Homo sapiens
  chr2:99438949-99439611
  hyper
cgctggcccgttccagcgggcgggagacgcccggacgaggccgcgctcggcacgaggacaccgagaacttcttcgcgcctcgcagctcggcaccgcccctctccgccttccgctctggcgccgccctctcggcgcccgccggtggcgcctcggctcgctcggccttggggcgctccggggcggcggcctctgcgtcgagggaaccggggccgggctccaccgggggagactccgcagcggcaagcggcggggacgcggcggggccctcgctggcggccgcgggccggtgtttcaggcagctcttgggcgccggcgggctcggggcgggcgccgtggagggctcggtcccaattctctcgggctcggtccccgctcctctctcgggctccgtctccgcttctctctcgggctcaggcgccggccctgggggccccttctcctcatccgggagcacgggcggcgtcggctccgcttccttcgggacactgcgttctggcccgtcgcgagcagagggcgcctctgaggtggcggcggggtcagtctcggggggagtcgtgtccccctcagggatggcggtgggaaacgggctcgcgacgtcttcgggagcacagaccacctcctccgccttgtccgtggccggggcacacgggcctgcggggggc

SEQ ID NO: 24292 - DNA, 1211 bp, Homo sapiens
  chr20:1783336-1784547
  binary
cgccagccattgcttgtgcgtcttcgcggagagagaggggggagatgccccggcgctccttacccggctggataagaccctttggggaacttgctgcttcgcaagtcttacttgtgaggacccggagggtttgcctttgaccccgcctgtgaccttaagaaaacccctttctaccctgcgcctgtcccacagctggaagtgataattttaagaatgaattaagcactcggtgtgtgacactgcggcactaagcactttctggactgtgttaggccccattttacagacggggaagctgaggcctccagaggcggagtaacctgctcatggttacaaagctggtcagcggcgggcaggatttgaatccagggttcccggttcctaatcctctgcttttaccacttaatttatcctgcctccaagggctgctgggaaaaaggcggatttcaaaggagaagcagctaaggaaaagctctggaaagggccaacggagcggatattcccggagcccctctgcgagccacgcgcccctctgggaagcccgcttccccctgcagacaggcgctgtgacacgcttgcgccccggtcgaacaggcgaagaggccgaggcccagagcggcgcagggcgagcctggaggctgcgccccagacctggaccagccacggacgccgctcccgccgctccctccgctccgctgcgctccgcacgctggcgccggctccccgaggccccgggcgccccggccgcacgcctgggtaaaaggtcccgaggagtccgcagaagcgcgcccacgcccgagacggccgtttccgccggcctgggaaaggggcggagaagggggtcgcccgggccgcagcgtgccggtccccgccggccgagccgtgtttggggccagtccccgcaccccgcttcttccccacctggggagcggggcgccgcggtaggggcactggagcgcacgatgcaccccgccaacgagtcctttctgcagacggggttcctgttttcatgcaaatgcctttgttagcgcaccgggaaccagggggacggaactgcagctgacgcgggctgcgcgccgcttttccgccttcgcttgattcggcctcaacgacttaaacgcgccgggaacaaaaacgccggcgccgcggaaaccctcaggagcggcacgagaagcgcggctccgctggggtccgcgagaagcggtgcgggc

SEQ ID NO: 24293 - DNA, 979 bp, Homo sapiens
  chr20:20348052-20349031
  binary
cggggaacccttttgcttggcctcttgggtccagcggcccatccgtccaaggtccgggcggaggccgtccggaccctgctgctctctcggattcttgtttatttcccaaacaccacgcggagccactgcgcctccgcaacgatctcccccgcaccgccccggcgcgcccccgcccccacccaatcagcgcgcacaacttccccctcggctccggctcgcggattgaaccctcctgacatatttggggccattcttctcctttgttgctattttgctagcgacccgcgggtaatccccgcgcgggaggggggcgtgcattgtcgcgctgatggacgggcccatttggcggctccgcgccccccggaggagagacacaaagcccaggcacgtgcgcctccccatagagaagcagcagaccgtgaagggaggcggggccgggcgtgtgcctggaccgggcggggcggcggcgccgggcggggcgaccaggggcgcgcgcgggggccccgcgccctcaggtacatctgccgcacctaccgggcgacccccgagtcccggcccccttttggccgccccatcgccctcccaccctgccaggctgaggagctgcggacgcgctgattggctccaggggaagcgggaggcgagaacaatggccccctccccccgttaaaagggagcggctgccgggcccggggacagggacgcgcgtgcagggcgcagagctgggccgagccgtcgccggcgccacgcgagtcccgcagccgccgcgcccgggcaatgggccgggggcactgagggccgccggggccgagcgcggaggggggaccgagccagtgccgtgccctcgggccgcgccaacatgccccgcggcttcctggtgaagcgcagcaagaagtccacgcccgtttcctaccgggtccgcggcggcgaggacggcgaccgcgcactgctgctctcgcccagctgcgggggcgcccgc

SEQ ID NO: 24294 - DNA, 1796 bp, Homo sapiens
  chr20:20349033-20350829
  binary
cgagcccccggcgccgagcccggtccccgggccgctgccgccgccgccgcccgcggagcgcgcccatgcagcgctcgccgccgcgcttgcctgcgcgcctgggccgcagccacccccgcagggcccgcgggccgcgcacttcggcaaccccgaggctgcgcaccccgcgccgctctacagtcccacgcggcccgtgagccgcgagcacgagaagcacaagtacttcgaacgcagcttcaacctgggctcgccggtctcggccgagtccttccccacgcccgccgcgctgctcggagggggcggcggcggcggcgcgagcggagctggcggaggcggcacctgcggcggcgacccgctgctcttcgcgcccgccgagctcaagatgggcacggcgttctcggctggcgccgaggcggcccgcggcccgggccccggccccccactgccccctgccgccgccctgcggcccccgggaaagcggcccccgccccctaccgccgcggagccgcccgccaaggcagtcaaggccccgggcgccaagaagcccaaggccatccgcaagctgcacttcgaggacgaggtgaccacgtcgcccgtgctggggctcaagatcaaggagggcccggtggaggcgccgcggggccgcgcggggggcgcggcgcggccgctgggcgagttcatctgccagctgtgcaaggaggagtacgccgacccgttcgcgctggcgcagcacaaatgctcgcgcatcgtgcgtgtggagtaccgctgtcccgagtgcgccaaggtcttcagctgcccggccaacctggcctcgcaccgccgctggcacaaaccgcggcccgcgcccgccgccgcccgcgcgccggagccagaagcagcagccagggctgaggcgcgggaggcacccggcggcggcagcgaccgggacacgccgagccccggcggcgtgtccgagtcgggctccgaggacgggctctacgagtgccatcactgcgccaagaagttccgccgccaggcctacctacgcaagcacctgctggcgcaccaccaggcgctgcaggccaagggcgcgccgctagcgcccccggccgaggacctactggccttgtaccccgggcccgacgagaaggcgccccaggaggcggccggcgacggcgagggggccggcgtgctgggcctgagtgcgtccgccgagtgccacctgtgcccagtgtgcggagagtcgttcgccagcaagggcgctcaggagcgccacctgcgcctgctgcacgccgcccaggtgttcccctgcaagtactgcccggccaccttctacagctcgcccggccttacgcggcacatcaacaagtgccacccatccgaaaacagacaggtgatcctcctgcaggtgcccgtgcgcccggcctgctagagcgcgccctccaccccggcccccgaactgtgccttcgcttggagacccacaaagagagtgcgccctgcactccccgaacccgagtccgcgctgggggagcctcgcccccgcccccaccgggtgaaagtgtcgtctccgcttctctcggtgtggcgtgacggtaaccccatactctccttttgactccttttggaacccccacttttacgttgtgtccctccgcctcccccatggcgcaacaggagtcagtctctttctgtacaagggagaaaagctgtacgcgtttgtctcgtggttggaagcctccccttggcggggagaagctttttttcttgctagtattcgctgtgttcatggtctagaaatgcggtctggtctcgcctc

SEQ ID NO: 24295 - DNA, 859 bp, Homo sapiens; identical to SEQ ID NO: 23203
  chr20:21080357-21081216
  hyper

SEQ ID NO: 24296 - DNA, 635 bp, Homo sapiens
  chr20:21372082-21372717
  hyper
cgggccgggtgaggccggggtccctgcactcctttgctgggcgcgcctggaccgaactgaagggcccgggcgccgcgacctcgcagccgggggcgggatggtggcggcgcccgggccccgcgtgctactcagagctcaggtcctaggtgcttggctcaactttctcccagcggggtcgggaagcgccaggccctcggtgcacgtggggcacgcgcccggcgcctgggtctcccctgcggctcgctagtcgcccggcccagcccgcagaccccgcggctggccctcccgggagccccgcgagccggccgcacgcacaggatgggcgcggaaagccccttcctctaccctcgggcgcaccctccttcctcgtccgcggcgccgcagcttctcaacctgccgctgcatctcaactccctgcaagcagcagagctgtagaataccagaaatggtcttccttccgaggctgccgttttaagttccaagtgtgaaagtaaccgaattttgctatgcttagaaatctaaaatctggacattccctgaagagtcaacttagagtccccagtttctcgatctggctccgtcccactgactgacgcctcctgcccaccccgaaaggatcctggagctgcgatctc

SEQ ID NO: 24297 - DNA, 976 bp, Homo sapiens
  chr20:21377197-21378173
  hyper
cgagtgagctccaggcccgccgggagccggtccagccgccgctctcttcacgccgcggccgcgacgccgccgggccctcgctgaatcccaagaccccctgaccgccgcggcctccggccccagcacgccccgcgcgccctcggcgggtcccagagcaccacgccctcaacgggtcccaggacgccgcgcgcgttcccggtcaggtcccaggaccccccgcgcgcccagggtccccagaaaccccgcgcgtcccgggccgcgtcccaggacgccccgcgcgcccgctcggccccaggacctcctaagccgcgcgcaccccgtcccgcgcccccgcgcccctcggctgtggcgggaaacgcctgagccgcccgcagccccgcgctcctggcccctctcacttgacgagtagcgtgggtccgggttggcgccgtaccagccggtggccgcgccgccccgcatgccgtccgtgtaggcgggcagctcgcccatgttgcccaggccgccgttgcagtagctgcccatggcgccgtgcgggaactgcgagacgccgggcggcatgtggtaggtggcggccgccgccgccgcagctgctgccgccgccgccgcggccgccgcgttgtgacccgccatggcgtgagaaggctgcatgcccgccacggtcgccgcctgcgaggagggcccaggtggcggcgcgcggtaggcggccgcggcccccaggggcgcccccaggccgggtggcgcgccgtccatggcgccgctgaacttcttgtaggtctcctcgatggggctcaggatgtcggacacggagaagggcgtcgtgtgctttgggctcaacgacatggctcggcgggcagccaggtaggggggcctggggcgcgcgccggcaggacgcggcggccgctcgtcgccgccacctcggccgcggcagctgagcctgtgacgaggagtcggcggctcggcgagccccccgggctgc

SEQ ID NO: 24298 - DNA, 762 bp, Homo sapiens
  chr20:3073252-3074014
  binary
cgtgttccaagtgacgtggcctgtcgcacccgccggggacaatgactgcggccctggggtcccacagacgttccctttgctagacttaaggaagagctaggcctgtccgcgctcccagcccccacgcagccagacacccgcgggtgctgagatgaagagtgaagtcaccaggagagacaggaaacagcgcgggcctcggggacccgagggcgcggaagctcgggggccggggtcgagcacagattgggaggcgcagcgctgggcgcacgtccccgtcggcccggcggcccctaatgaggcgcgctgtgcgcagactgctaagagcagcatgagcacggctccggcggcccccagggccccgcgggtcggcgccaccccggagcgcggtgcccggaatcacttagcgccatcagccgggcggctgggagggggaagcggccgatccgggcggctgggagggggaagcggccgatccaggcggcagcggagggggctgcagcggaggcggccccggcttgcacgctcgcccttccgcctgcccggcagggccccgtctgagccccaggccccaggcccagcggcgccgctcgccggtgaaggaaaccagcgcagagaggccgcgctgccaggcgcgtggtggtccgggggtccacgtgtgagcctcgccctaggctgccaattgagagttccacctccgcccagagagaccccacctcacccctccaacctggggcgcgcgggccggcggaggggtcctggggc

SEQ ID NO: 24299 - DNA, 35 bp, Homo sapiens; identical to SEQ ID NO: 7236
  chr20:30996055-30996090
  hypo

SEQ ID NO: 24300 - DNA, 615 bp, Homo sapiens
  chr20:33879796-33880411
  hypo
cggtctggcccggaggcctcctgcccctgagcctcgctgagctcagggcccccgcgcacatggctggtcatgtagtccacatccagggcgctcaggaagggcagctcccgctcctcggagatgacccgcaggtaggcagcctcaccccgctccaggagggcgtcggccgccagccgagccgcctcgctgtgccgcagcaccagcggtgagctctcccgccaccacggcagcttcagctcttccacccggccccgcaggggtcccgccatgccctgggctcccaggaccccaggccccgggcctccgaacatgcctgccacgcggctgcctcacccgccggcagggcccatggcccgcacgctgggctggctgcagcaggaagaggagaccagcagaaccgccttctgcccgcccgctcgctgtgtgtgtggcagggcccccaaactgttgccaccctaaatcagagccacgctccaccctattgcccctggcctctggaacctgtcaggtcagccccacctgtctgcctgtgttgggactcgcctgcccagggaagcggcagtgccaggccctcggtgcacactcctgcctccctctcttcctcccagcaacgcc

SEQ ID NO: 24301 - DNA, 1585 bp, Homo sapiens
  chr20:34188561-34190146
  hyper
cgtccaagtgctgcggaaccgcctttggggtctgatcccttctggctttctttttcttctttcgggtgagccgggacaacgtggacccctgctgggcctggggaggctcaggttcagctctcccttccaacacctgcatggacacagccagcagaaggcggccgcggaaccaaatgccttggccaacgccttcgttgagaccttgaagactatcccggagccccgcgccggggggcgagccatagaggggcacccaggccgggccgaaggtagggttaaaccccgctgtggggaacaagagaagcgtgttggaggggagcgtggggagggcgagtgctggtaaatctctgcacctcaccctgatctcctccaagtattcgggggtgagggcaggggaggggggctaagccgctctgaaacggaagaagttggccagcagctgcggacgcgccgctgtggaacacgacctggggcgcctccaaaacagctcagcgccccaaggagctggaaatcgcgggagcccggcctcgggggacgcagcctgagccctgggggcggggtcgggattggggcggagctacgggcgatcggccaggcctgggggtcggggaaaggagtggaccggcagtgtcagcgtgtgcacagctgtagaagggtgggactgggctggttactggacaggcggttgtggtcagaattttgccaacggagccaaaccgatggtggggttcacagtctgggggcggcttgaagcagtttgttttgcgggcggaccagccctcctaggcggagcggggtcgcgaggatggggcttgcggttgggaatgggccctatggagccctatggaccgaggcgagtgaggccagatttgccgcggccagaagcgctcacccgcgcggcccggatgggagatccgcctcaggtccggcacgtgcgtagcgagtgccgcgtcgaccaggggcgcgtcgtcccgcagctgcaggcggaggctgcgcgtcagcggcgggaagagctccacgaagctcagctgctcgttccattcgggcgccgccgcctcggcgctcaccgacgtctcgccctgaaggtggcgttaaagacaggagaagggagatcagcgcggagtcggggccggagccgcggcgccgtgggccccggagggacttacctcctgccccaggaaagacacccgcacatagggctccaccaggacgcgctggtcgtgcagggcgcggaccaggctgcccagcagccccaggcgcagcgcgggaagcccctcggcgcggtacaggcgcacgcggagccgcgcccatggcctctcggcgggcaccccgcgcggcaggagcaggttcctaggggagggggcaccgagcggggggggagaaactgggatctcggcccctccccttatccgcgccccacggccacccccggatccatgtcctcctccccacctcaccccggctcacttctcgatgtccgaacagtgccctggggccgggggtagcattggagggggcaggtccccgcgcgccctcacggacaaggtgaccttaatgaaacccttggtcccggcgcgggtgtctc

SEQ ID NO: 24302 - DNA, 336 bp, Homo sapiens
  chr20:36767690-36768026
  hypo
cggggccattgctgtacgtaggctaccaattaaaacacacgcacacacatacacgagcctgccgggctgggaaaactggatgcttatcttcaaggctgcattaaagactctgagggcacataccctctgggtatttgtaggtgtgggtgatatcctcccgctcgtctcggcccacgctcttagtgctgatcttcagcccaacgatcagggaacggttgatggatttgtgcacagacccatcgtcctgctggatccagtctaccacgtcggcattgacctccgcaaagacaaagggcgcatcgtacttggtgctcaggtcgccctccttgatggcac

SEQ ID NO: 24303 - DNA, 161 bp, Homo sapiens; identical to SEQ ID NO: 7242
  chr20:36802873-36803034
  hypo

SEQ ID NO: 24304 - DNA, 148 bp, Homo sapiens; identical to SEQ ID NO: 7243
  chr20:37145099-37145247
  hypo

SEQ ID NO: 24305 - DNA, 313 bp, Homo sapiens
  chr20:42088459-42088772
  hypo
cggaccacctgttcgtacagaatacaggcttattgtagaaaatctttctagtcggtgcagttggcaagatttaaaggtatgttttgtaattcaagatagaaatgatatgactaatgctttaaagtaaactccttttatattcttatttctgggaatttattatggtatatagatgttttaagatttccgagtctgaccaatcttgtctttcaggattttatgcgacaagcaggtgaagtaacctatgcggatgcccacaaggaacgaacaaatgagggtgtaattgagtttcgctcctactctgacatgaagc

SEQ ID NO: 24306 - DNA, 88 bp, Homo sapiens
  chr20:42218592-42218680
  hypo
cgcccggcccgtctccacttttaaaatttccagtgacagaaattgtggaaagcaacacgagttgtatgtgttttaatatcctagattc

SEQ ID NO: 24307 - DNA, 55 bp, Homo sapiens; identical to SEQ ID NO: 7245
  chr20:42833281-42833336
  hypo

SEQ ID NO: 24308 - DNA, 387 bp, Homo sapiens
  chr20:45337620-45338007
  hypo
cgtagtttaactttctgcctagtctttatcactagctgatatttctcaggatcctttagttacttctttttcgtcttcccctcctagaatgtaaactcttcccctcctagaaggtaaacaaaagacctgttctgttttgttcttcggcccatcccaagcctagcgtagtgcctggtatgtggtggtgtccaaacccaagcgtggagtgaatgagggatgaatccatgagagagtgagcggctccagtgggtatgcgcgagtgtctcactcggtgtagatgtgtgtgttgtgtgtgttgtgtgtgtgcgcacgctggggaggccagacaagtgtggaccagtgattggggcacctcttccctgcaaagaggccaggggaagacagtgc

SEQ ID NO: 24309 - DNA, 243 bp, Homo sapiens
  chr20:45833348-45833591
  hypo
cgaaggattacagcatggaaagcctcagcacagagccccacgtggggcaggcccacatcagcgacacttggaggaatataggtgacctttgcttctctagactaaagaaaataaataagaatatagatggggtcctgatgtaccctgatatgaaggtggcagctaaatgctgacctttggaaaactcaactctgattatcgccactcgactgtatagtttaaaatggacggtcggccgggcgc

SEQ ID NO: 24310 - DNA, 327 bp, Homo sapiens
  chr20:46365433-46365760
  hypo
cgtccctgctcacctgtccggtagccagtgctattgaggtacacggcaaaggtgcggctctcgtgctgtgcctgccaggagggcgaggagcagttctcattgttggtgtaggtgttgtggttgtggacgtacttgccagtgaggatggaggagcgtgaggggcagcacatgggtgtggtcacgaaggcgttgatgaagtgcgccccgccctgctccatgatgcgccgggtcttgttcatcacctgcatggaacctgcaagtcaagggtggaagtaaggcgcagggcaggagacccgggcggcaccggcaccagggggctctcagcac

SEQ ID NO: 24311 - DNA, 313 bp, Homo sapiens
  chr20:47296037-47296350
  hypo
cggggcagggcagggtaatgggggcaggggtgagttgtgggcagtggagaaggcaaacaagccaaggggcacaggcctgctctgaggcgaacccagggtggaggtgaacgaggccagctgagtcagagtcacaggggcggagggcccctaccttggacatgatgtcctccagctcacttcgggccttgtaggtgccatcgtcgtagcggaagcgatacatcacctgctcattcttgaactggtgcttgtcggaaactggagagacaggaggacctgtgacgctgggcacgccccctcagcccctcccagccac

SEQ ID NO: 24312 - DNA, 1252 bp, Homo sapiens
  chr20:47443693-47444945
  binary
cgcccctcctctgagcttcaggttttatcctactccatcaacgcgcagggacgttgggctctggggctcctacggtatgtcctagatgagtggtgcaccgggcgcgtagttattcctgggaaaaagacgcaggagcgccagctcccggcgccgccggggtccccaagcccctgcatcgcggatgtaactaattttaaaactatttgaaaggcggggacggggaagaaaagacaaaagggcagcgcgcgccgcggggaagtggagtgcgggagagccccggtcggagcaggaccgtgcgccggccagggagggaggcgacgcgacagctctggaggagctcggatcccccccgctttccgcgcgccctgcggggcgcccccgaggcaattctccacccacggggaccacggccacaggttgtggggaccgcagcggggcgagcggctggagggaaagctgtccccaagctcccgagcgacactcaccgactgcaagaagcgcaaggtgcccacgtagtccctctcggtgcccaagatctcgttgaggacgcagaggcggaggcgcagctggcgctcggactcccgggcggccgcgcacgggccggggccggagctgggcgccgcggcgccaggggcccgggggtccgggtgggcgcagtccccggccccgtcgccgccgggctcgctgccgctgggcgcctccattctagcgcggccgcgcggcgccggctccttccgtcgcgccgagcggcaactcaggcgtccaggcgccccatcccggacggggcgcgccggcgggccgggctcagcggcgggccgggctcccggcgcggcgggcgggactgggggccgggcggctgggccgggggcggaggcagcgcgcgggggccgggcgaggggcgggagggggcggccctcggggctcccagacggctggccccccgcccccgcgccagggaccgtctgccaagtgccacgccgcgctcggccgcagaggcgctctgcgcgtgcacggggcccctggggacgcggcgcggcgctcggcgcctccgtcggaagctcgggggtcgggcgggagcctccggaagggccccgcggagccgggagtccgaggccgcgcgcacgccgaaccgagcgtaccaactccgcgcccggacgcgtggcgcccccccaacccgcagtcaccgcgggctacgccactcccacccggcacacgcgacacccgccgcgcgcaggctcctgcttgcaggtcc

SEQ ID NO: 24313 - DNA, 224 bp, Homo sapiens
  chr20:47905365-47905589
  hypo
cgcaggtacaatatgggattcaataaaagtacagaattaaagttgtcttattagagattgggaagtttcccagctccgtttatcggtacttggccgtaccgataaaggggatggacttggagtgaccaggtcttagtcacatgtattttcataccctaaacaagaagcggtatagaccagaatggagcactgattgtaatccaccttctttcttagaaactggc

SEQ ID NO: 24314 - DNA, 1195 bp, Homo sapiens
  chr20:4981322-4982517
  hyper
cgacatcctatcagccacccatccaagggggggcatctaggaccaaacgaaggagaaaatcctgcgccttaaagtagtcacactcgaaatgtcattttttccccccgaaaggtggcaaggagggggactcgcgaccccccagggaacaggccagaaaggccccggggtcggaggagctgcttctaaaattacttcgcgcagtctttgtagaagggaagaaagcaagaatgtaaaaggcaccctcttgccgcccctcctgatgcccctgaattccagggggcgagacgatgcccgtgcgcaccaccgggggaggggcgagggaagcgaccccaggacgcgcgggcgcagagcccgggaggaggcggcggcagccagtggggttctgggggcgccccatttgcctccccgctgcgcggcctgagggcccgagcgcgctgtggctcccgtggcgggaaggggtgggtaccccgggggcccggcccggccggcagaacggcaggagctgagggccgccgggcatcttgggccccggggccagggtggccggcgggcgcggggtcccgggagatgggtcggggtgggggcgcgcaggccgcgccgcggggccggtgggtgacagcgcgcgggggccgtgccaggccggcctcgtgggcgcggcgagcacctcgcggccccgccggcaggtgcggcccgcaggccgggcagggggcgcggcggccgggctctcacctggctgcagctcgcgtggttcccgtcctgccgccgcgcctcggcgccgcagtgcccgctgcagcctccgcctccggtccccgcgacagccgcctgcaaaatggcgccgcggaggggcgggccgggggcggggtgcagcggagccgcccgcccccgcgccggtctggggcccacctccctccccgcccccgacccctgccctcgggcctccccccggggaggggctgctccctggcacccggcagcgctccccggaacatcccgggcctcgcacccagccgtccccttcccgttcctttcatttccctcccctgcgcagaaagatcgccccccttcgcgacccttcccaccagtcacacctgttcctggggacccacctggcaagcagagcgctggtccctgagtgtcctggtccaggtcccccctttttaccccgcctgccaccgagccctgtcattgctcgagc

SEQ ID NO: 24315 - DNA, 162 bp, Homo sapiens; identical to SEQ ID NO: 7250
  chr20:52214819-52214981
  hypo

SEQ ID NO: 24316 - DNA, 174 bp, Homo sapiens; identical to SEQ ID NO: 7251
  chr20:52374073-52374247
  hypo

SEQ ID NO: 24317 - DNA, 62 bp, Homo sapiens; identical to SEQ ID NO: 7252
  chr20:55026786-55026848
  hypo

SEQ ID NO: 24318 - DNA, 198 bp, Homo sapiens
  chr20:55693345-55693543
  hypo
cgcccacccccacctaagcaccacccaccccaccccaccccacctaagcaccgctcaccccactacacccgcagcactgcccgcctcacagagcagggccccacctgcctcagagtaagaaaccagcagctccaccacccctggaggctgccttggcgcagcactggaaacattcataagaacacagctgccttttcc

SEQ ID NO: 24319 - DNA, 489 bp, Homo sapiens
  chr20:60281418-60281907
  hypo
cgaggcaccgacaactgacagaaaactgcagccggcctcatttgccgcagacccccttctctcaacaataacatgtggggcacggtcttaacaaacatgatgagagaaaaggctgtagccaaaggcagctgttcaggaacggagaaagtttagctacgacgaagactccggggaggaagaacggatggaaaggccagcccaaatggaagttggagtttgctgagctgaggacagggcctgtgggatctgctggaagagaggcgaaccaagaccaaagggatcggtttctcccgagctgcacacagtggcaccgactccctgatccccgatgtgtagaaaccaccttggctgaattctcccgagcccgctgcaggccagtgggaacagtggttgggaatctcaccggaactggctcgggcaggacgttcatggtgaggttccaaccggaatgagtcatgtgaccgtcagcatccgacctccacattagcc

SEQ ID NO: 24320 - DNA, 410 bp, Homo sapiens
  chr20:60448652-60449062
  hypo
cgagaggaagggggttccgctacgccagactcacggagagctctgtggtcggggggctctgcccaggtgtgtgcgggggtggcagcctgtgtggcaggccatccccatctgagctgctgtctccgttccaggcacctacgtgatgaccgtcacggccaacgatgctgacgacagcaccacggccaacgggatggtgcggtaccggatcgtgacccagaccccacagagcccgtcccagaatatgttcaccatcaacagcgagactggagatatcgtcacagtggcggctggcctggaccgagaggtgaggcggggtggggtctgcgtgcaggcgggtgagctcctggtccccgcaggacacccacaggaccctcggggagcctctccagtggcgccgtcggggagtgatc

SEQ ID NO: 24321 - DNA, 205 bp, Homo sapiens
  chr20:60470129-60470334
  hypo
cgcatggcccgtgcagggcaggaatgcactggcgtgcggcacagcctcctctctctctgcggctctgcctgacgggcacttggcagatagcgtgtaagaaaggccctgggcagcggaggctgctgtgtggagtggctcgattcctgatgtgcgcagtaggagagaggccggggctcagtcagggaggggaccggcggcggaggtc

SEQ ID NO: 24322 - DNA, 496 bp, Homo sapiens
  chr20:60502550-60503046
  hypo
cggccgcgcctgcttttctcacagacacttccaaaagcagcagttcttccacgcgatcatgcgtctgggctcagggcttccagcaccctggggctctgctgggcagggccagcaaaactcagggaggcaaggaaaggttttgccctaagaagtcccagatgggggcaagatgtggtgggcggatcccagccctcaggggccagtgcagagcccagcacccgcagaacccctccctggctccccagtgggagtgagtccccggtgcgtggctgtgacctccgtggctgtgagtttccacgtgaatgccacaccccgctgtgtgcgtgtgtgcaggtgtgggtgtggccgtgtgctctgccgtgtctgttgaggtgccgtgcgcagtggctgtgtgcgtgtgtgcagctgcgggtgtgggtgtggccgtgtgctttgccgtgtctgttgaggtgccgtacgcagtggtgtggctgcccatggcgtgtggcagggtgtc

SEQ ID NO: 24323 - DNA, 381 bp, Homo sapiens
  chr20:60662693-60663074
  hypo
cgcactcacacatgctcctatacgctcacctgcacacgcacacgctcctgtacacccacctgcacacgcactcacacgcactcctgtacactcacctgcacgcttacccacacatgctctgtacactcacctgcatgcactcacacgcgctcctatacactcacctgcacacgcactcacacaagctcttgtacactcacctgcacacgcactcacacaagctcttgtacactcactgcagactcacccacacacgctcctgtacactcacctgcatgcactcacatgtactcctgtacactcacctgcacactcacctgcacacgcacgcacacgtgctcctgtacactcacctgcatgcacacacatgcgctcctgtac

SEQ ID NO: 24324 - DNA, 64 bp, Homo sapiens; identical to SEQ ID NO: 7258
  chr20:60842033-60842097
  hypo

SEQ ID NO: 24325 - DNA, 368 bp, Homo sapiens; identical to SEQ ID NO: 7259
  chr20:60842477-60842845
  hypo

SEQ ID NO: 24326 - DNA, 871 bp, Homo sapiens
  chr20:61287746-61288617
  hypo
cgctgaggccactcccactgcgtggctgaagcctcgaggtcaccaggcggaggcgcggagatgcccctgcatcagctgggggacaagccgctcaccttccccagccccaactcagccatggaaaacgggcttgaccacaccccacccagcaggagggcatccccgggcacacccctgagccccggctccctccgctccgctgcccatagccccctggacaccagcaagcagcccctctgccagctctgggccgagaagcatggcgcccgggggacccatgaggtgcggtacgtctcggccgggcagagcgtggcgtgcggctggtgggccttcgcaccgccgtgcctgcaggtcctcaacacgcccaagggcatcctgttcttcctgtgtgcggccgcattcctgcaggggatgactgtgaatggcttcatcaacacagtcatcacctccctggagcgccgctatgacctgcacagctaccagagcgggctcatcgccagctcctacgacattgccgcctgcctctgcctcaccttcgtcagctacttcgggggctcagggcacaagccgcgctggctgggctggggcgtgctgcttatgggcacggggtcgctggtgttcgcgctgccccacttcacggctggccgctatgaggtggagttggacgcgggtgtcaggacgtgccctgccaaccccggcgcggtgtgtgcggacagcacctcgggcctgtcccgctaccagctggtcttcatgctgggccagttcctgcatggcgtgggtgccacacccctctacacgctgggcgtcacctacctggatgagaacgtcaagtccagctgctcgcccgtctacattggtgagtggggctggc

SEQ ID NO: 24327 - DNA, 488 bp, Homo sapiens
  chr20:61318648-61319136
  hypo
cgccacacagccacgggagacacagtggccaccctggggcgtctacactgaaggccaagggcatgtggaggaagagccatctgagccgaggcccggggaggagccagcaggccaaggaggcggaagaaaccacgcagtggcgtccagggcagggcaggtgcgtcatccgggcgggatgcagagacacgtccttccaccaaccatctgaggagcacttggcacccacacaatgagcccggcaagggccacgccaggaggcagcgcacggggcagagcctctgagccagagagggggaggtcccttgggaggcccctgccatcccccgctctgggtgggcctctccagccagactctgcgccccaagggcagggctgggcctaagccacacctcggggtgcacgggctgtggggggccgctcctggacacggaaggacgacaccggcttccctgtacctctgctggggccgcgggtcccatgtcgtcagc

SEQ ID NO: 24328 - DNA, 566 bp, Homo sapiens; identical to SEQ ID NO: 7263
  chr20:61488430-61488996
  hypo

SEQ ID NO: 24329 - DNA, 453 bp, Homo sapiens
  chr20:62031988-62032441
  hypo
cggcgcaaatggggaagctgcagccaccgtcacggccagaggatggcagactgcaatggcgtggggcgcgggcatggcgggcacacgtgggccgtgtggatcccgggcagagggatggcgtccagcgggaccaccagctctgggcgcctcagtgcgagacccctccgtgagacccctcctgccctgcgcgtgtctctggagcccgtcccttgggcccctcgcccgccccacctgttcgcagggtccagggcgtccgtacctggcacagccagggggcatggggcgacctcagggagttcctgtccacatgcattaaggcaacgactttgtaaaacccaggcggagttggcgtgtggcgatggcgatgtgcacgtgcctgcctggtagccccggggaccggcccctccttgctggcgcctggccgagagtcagacgctgaggacctctcaggac

SEQ ID NO: 24330 - DNA, 387 bp, Homo sapiens
  chr20:62046195-62046582
  hypo
cgtggccaccacatccatccccggagaggatggaccaggagaggatgcggccacacccaccttctgagttctgccgtgacgcggcacccttgatgcggaaagcctggcgtgcccggctgcggtccccgaagctccagctcttgggcaccttgctggggctgtcctcgaggctctggtcggcgctgggtgaccgcctcacagtctgggcctgcggggaccccttccccttggcagccacgcctcgggggctggagaagacacgatctttcaaactgaccttctggctgctcccacgggaaccgacagacagacagaaaaacagggagagaagtcactctgcaaagaacacaggccgtgtctgctcatggccgacgccgcccatgcgcc

SEQ ID NO: 24331 - DNA, 243 bp, Homo sapiens
  chr20:62167569-62167812
  hypo
cgagttctcaggactcagggtctttgcacctgggagctgaccagcctccggccagaccccacccctgcacccctgctcactaacgaggtcgtgggtctgcgcgtgaccctgctaacgaggtcgtgggtctgcacgtaatagaggggtctccaccatgggcccctgcccgacggcctctttacagcctcccctgcttgttgcttgggtcccccgggagctaaccctacacagcctgtgactcac

SEQ ID NO: 24332 - DNA, 163 bp, Homo sapiens
  chr20:62331769-62331932
  hypo
cgtcccgacggcagcgcggctgcgcctacgtgatgtccctctgccgcggcggccggtgcacattccgcacgacacacttcaccatccactcgatgccctcgcgcacccctttgctgtgaagacagcgggtgtgaggcggggggtctcggtccccaaagccccc

SEQ ID NO: 24333 - DNA, 765 bp, Homo sapiens
  chr20:62383436-62384201
  binary
cgaacccttggggccgccccgctctgggctgcctgtgccccacccgcctcactggttgatctcacccacttgagatgccctcgccaggccttttttggcaaatctgcctccctgttcccaggctgcctttttctattatttcctccccaagcaaatccatccactccacacctgctacctgacaacgacctgccagtgctgagctccagggtgggcgcggtgggtgcagacaggtcggcaggcacaaggacagggttctccctcccgaggcagggcgggggcgggggggcgcagaggtggctgagggttgggggctccaagcagagcgagctgagtttgccgaggcctggctgccttggcggccagcaggtgagcagggtgggccgaagcctctgcaggggccatgtggcccagccacacccaggaggccggggcagagcagacaggggcccggggcggatctccctgccctgctgtcgtcccccctgtgcagagtggacccggtgtggggtccggggcggtctgcgccctcatcaggacccgcctgcccggacatcgtggccacgcgcagcgcgcggcacgcggaccctccccgcactcaccagcgtgtggcgcttcatgtgctcgcgccgcgtgaacttcttcccgcagatctcgcaggggtagggccgctctcccgtgtgcgagcgcatgtgtcgcttgaggatgcactggtgcatggccgagaagctgcagtacggacacttgaacttcttcctgatcacc

SEQ ID NO: 24334 - DNA, 139 bp, Homo sapiens
  chr21:19274771-19274910
  hypo
cgtgagccaccgcgcccagcctggagtgtttaattttatgtgtcaacttgtctgggctgtagtactcagttacgtaaccaaacaccaatccaggtgtcactgtgaaggtatttcgtagatgcaattaacatctacggtc

SEQ ID NO: 24335 - DNA, 389 bp, Homo sapiens
  chr21:33954154-33954543
  hypo
cgtcatagagagtaagaccgtaaagctccgtacctagcccatgtaaagtccacagtaagggtttgctgctgttgtcctgagacatcatgagatgtcttagaattctggacttgagacacacggcctgggggcggcaatgcttctgtctgctggagtgccaggtgagaggcctgatgtatccagttcttattaatcattacttacgggaaatggagttgatggaaagatagcaacccctcccaccacccggagcgtgagtgataccgcgtcattcagcaataaagcccacatctttatggggacgctatttttacataacgcaaacggtacaaaaacataaatgcgcttttggtaccagagtgtgcgattcttgccccgcgtgtggggac

SEQ ID NO: 24336 - DNA, 42 bp, Homo sapiens; identical to SEQ ID NO: 7266
  chr21:35286360-35286402
  hypo

SEQ ID NO: 24337 - DNA, 1903 bp, Homo sapiens
  chr21:36041402-36043305
  binary
cggtgggaagcagacgcgcaatcggggagaagctccagcagtggaggaagagtccagggagtttcagctgggcagaaggggcgcagaggcttggggccaagcggagtttgccctgcgggtcctgcgcaaggccccagtgccccggctaaacctttgccgcaggatcccggagccggcgtccttcaaggagcacagagggccccgtagcacgccccttgcccagcgccaccgacccttaagcagcgtcaaggaaggagtcccgatcaaggacagggatctgcggccatggccgaggccgcggagccggagggggttgccccgggtccccaggggccgccggaggtccccgcgcctctggctgagagacccggagagccaggagccgcgggcggggaggcagaagggccggaggggagcgagggcgcagaggaggcgccgaggggcgccgccgctgtgaaggaggcaggaggcggcgggccagacaggggcccggaggccgaggcgcggggcacgaggggggcgcacggcgagactgaggccgaggagggagccccggagggtgccgaggtgccccaaggaggggaggagacaagcggcgcgcagcaggtggagggggcgagcccgggacgcggcgcgcagggcgagccccgcggggaggctcagagggagcccgaggactctgcggcccccgagaggcaggaggaggcggagcagaggcctgaggtcccggaaggtagcgcgtccggggaggcgggggacagcgtagacgcggagggcccgctgggggacaacatagaagcggagggcccggcgggcgacagcgtagaggcggagggccgggtgggggacagcgtagacgcggaaggtccggcgggggacagcgtagacgcggagggcccgctgggggacaacatacaagccgagggcccggcgggggacagcgtagacgcggagggccgggtgggggacagcgtagacgcggaaggtccggcgggggacagcgtagacgcggagggccgggtgggggacagcgtagaggcgggggacccggcgggggacggcgtagaagcgggggtcccggcgggggacagcgtagaagccgaaggcccggcgggggacagcatggacgccgagggtccggcaggaagggcgcgccgggtctcgggtgagccgcagcaatcgggggacggcagcctctcgccccaggccgaggcaattgaggtcgcagccggggagagtgcggggcgcagccccggtgagctcgcctgggacgcagcggaggaggcggaggtcccgggggtaaaggggtccgaagaagcggcccccggggacgcaagggcagacgctggcgaggacagggtaggggatgggccacagcaggagccgggggaggacgaagagagacgagagcggagcccggaggggccaagggaggaggaagcagcggggggcgaagaggaatcccccgacagcagcccacatggggaggcctccaggggcgccgcggagcctgaggcccagctcagcaaccacctggccgaggagggccccgccgagggtagcggcgaggccgcgcgcgtgaacggccgccgggaggacggagaggcgtccgagccccgggccctggggcaggagcacgacatcaccctcttcgtcaaggtaaagctcgcttccctcaattcttaggacgacccccttccattcgaggtcttggtcatctcagatcccagagggacgcgcagggaggaacccttggtggtatcctgattgtcatcaggcgcttccatgcgcgggcggtaggcgggacagccgggatttcccggagaagagtttccagggcatttgcgggaggactcaatggtttggaagcaaagactttgggggtgggggcgacggggagtgc

SEQ ID NO: 24338 - DNA, 195 bp, Homo sapiens
  chr21:38362965-38363160
  hypo
cggggtgcccagaatgcccgcatttctaccctgcccactagaaactgagggattgccacagctcccgtgaggttcagcaattccctgggacgacacagaactcagggagacactttactgttagaagattattgtaaagaacacaactcggtaacagccgagtgcaagagatgcgcagcacggggggtgaagggc

SEQ ID NO: 24339 - DNA, 903 bp, Homo sapiens
  chr21:38592864-38593767
  hyper
cgctataacgaggtaacatacagcacttagaagacggcctgacccagaataacactaatgttcacatggctgcgagtctcagaccaaaatcaatagccggtatctactgaaactgcagcaaggcgaaaccacgggaatggcgctccgttgagtagagcaacgcacagcacatcacatcgcatcctccgtagcgggaggctctggcctcaccgcagcggcacttcccggaagagcccaggatattcggggacccgcaccggacaggcggcccaggccccctggcgcccagctggccgccctgttgcagctctcatgccaagacctgcgcctaacggcagggattccggcggtcatcatttattcttggcgctaagctgccgcttctcttttttatcaccacagagtaacgcagaccccaccgtttccttccattctgagccaaccactccagcagccaccggggcgccaggttatgctggggctgcaccacccggcccgaggcttttgaagccacgcctgagcgcggaggatgggcaggatttgccccgtgaactcccgcgcacgcaggctccgcgcgaggcccgggcgcccgagcggcgattccctcccctatcaccagctccagggtggtgccccccggctgtggagcccagaccccggccgtccagcagcgtatagacgagcccatgtctgcgatgtaactgcaccgcgctggggatccacctcccgccagggtgagggcgccgtcctccagcgtatgctaggcaggcgcgccccgccctcctggtcacgtgaccacgcctacagccgaagaggatgggaaaatgcggccctgttcctgaacaggaagcggaagcaggaaggaactgagaacaccagcatctgctgccgccctgaatcagc

SEQ ID NO: 24340 - DNA, 579 bp, Homo sapiens
  chr21:44482534-44483113
  hypo
cgtgggagccgctcccacgtgaccaagagggtgaacagcctcatggtggaccccgtgtctaggcggtaggaccccagaggtctcaccccagcctctccccctgggatcggcacgtctgcagactttccagttccaacacgttttgcagacagcaaaactgcccgccagccccactgagcatccgtgtgacccacaccggcccttcggtctctgctctccctcaggccaaagtcagctttttggctcttaacagacttttccggggccttaattttcacacgttttccctgctccctgcctgtgccacctgggctacatcccttggtgaggtcaggccacgtgtgcggacatcgtcccccagtctactttgtctcgaccttcgagaccagcttctcaccatgcgtgcggggcttgcccttctgtttcagtggagaagctggttggggcccagggtcagccaggctccccagtgtgagggtgagttacaggctgcaccggcactgtggccgggctctggactcgacctaccgtcctgtccagcaccgtggggatgaagtcgtagccgatcccttccacctc

SEQ ID NO: 24341 - DNA, 320 bp, Homo sapiens; identical to SEQ ID NO: 7274
  chr21:44840079-44840399
  hypo

SEQ ID NO: 24342 - DNA, 867 bp, Homo sapiens
  chr21:45148293-45149160
  hyper
cggcttctgtgcagcgctcaccctgctctcccctggaacgcctggaactagggtggtcaggctggggtggaggagctcccctggaatgttccagagcttcccccactcctgccgttctgagtcaccctgcctccccggaggaggaggaggatcagctgagccgccgcgctcacgtagtgtctggctgtctgcctgtctgcctcgctgtgagcagagtgggatgctgccgataaggcgcgcacgtgggccctgggaggagcccgaggcagccactcccgcacgtgggcaggaggagggctgctcacaccaccggccgagggaggaggactgcgggctgcgcctgggcaggggatgagcttgtgtcgcgggcggcagggggaagggagtcggagagctcctgcggtccagccggatgactgatgaggttgaaagcacttccgctgcggcccccgcaggaagttcccaggaggaagttgcgaccctttctaagccatcccactggcctggactctgctgggattattttgaccccccagggcagagtgtagccatctgactggctttctctctcggcaggagacggggcgcacgcctgcaggtgggggagccccaatacgtcacacggatgagcggggcaaagcccagccccccaccccgcacccgcccgcccgcaatcctgccccctggctgcggcctccgcggctcttcccaccccggctccgctgggtgcttggcgcttgtttacggagttacaccttgcggtagaggctgagcaggagcttgtccttcagacttcccagcggagacagccaggctgtcctgtggcagcagtgggtttgtcagaggccgggggctttggccagggcc

SEQ ID NO: 24343 - DNA, 402 bp, Homo sapiens; identical to SEQ ID NO: 7275
  chr21:45167210-45167612
  hypo

SEQ ID NO: 24344 - DNA, 216 bp, Homo sapiens
  chr21:45195134-45195350
  hypo
cgcctggacctgttcttgcttggggcatcccgtcggtcaccaaccatgacagcgaggcgggcctggcctgtgctccaccggagggggcttcttgcacagatgacctgctcatttcagcccctccagaatcttctggcaggcgcagagcaacaggacgtccattttacagacgaggaaaccgagacacagggaaggttgccatctgcaacccagccc

SEQ ID NO: 24345 - DNA, 192 bp, Homo sapiens
  chr21:45268743-45268935
  hypo
cggcacctcgccctgcattctagcgggatcagctgggctccgctaggcagttcttcctctggttttgtctgaagtcagctggaggccggtggcctcactctcgtgcccggtggctggctggcagtcacctggtcacagggtaggctgtgcctctcgtcacccagcaggttagcctaggcttgttcacagggc

SEQ ID NO: 24346 - DNA, 165 bp, Homo sapiens
  chr21:45583689-45583854
  hypo
cgcgttcccgagcgtgcactgaaggtgttagcgcgtggcaccggagacaccaggctggatgaggctggacaagcgcctccgccagaagcagcacaggcctgacacaggcaaacctcccggagaccaccccacggaccccagcccctgctgaccctcccaggaggc

SEQ ID NO: 24347 - DNA, 697 bp, Homo sapiens
  chr21:45749945-45750642
  hypo
cggccgatgtggcaaaccggggaggcttttgtgtggggccggggctgcggccatggcagccaccctccagctcccgggggctggggaagacgctggggtccccgtggaggctggagcggcgttcaggtcctgcggtcactcggcgtgctcctgcacctcttccccacgcagggcctgcagccggctgcccacagtctgctgcacggcctccagcccctctgcatccagctcccgcagcagcagcaggatggcagtcaggacgttctgagggcagaggggtgcggactaagcccacccggcacggcgaggctgcttccctccacaagggctggggcctggccagcggtgccccaccacggagcgactggtcccgggggtgtgggccgtccaagtgactgaccggcacactcggagaatctgagcagaggagccccgcctgtggacgcgtgtgtggcacctcttccacgtgactcctgttgccctcagcccagcagggcccgggcccacattccacagaccaggacagcaggagaggctgaggggccaggacggctccgtgcggggcacgtgttacacgtgtgtgcgcattcacagacccgcacacgcagctccccctggggcacagctcttcaaggccctgtgaggctccatgctccctccccacggggccctgtgaggctccatgctccctccccac

SEQ ID NO: 24348 - DNA, 255 bp, Homo sapiens
  chr21:46036558-46036813
  hypo
cgagaccctgccctggtcagcacccaattcgagagctctgctcagcagtgagaatgagacaccgtgacaatgcggctgcgcaccggacacctggctcagcgcaggcagcgcacggacagagtctgcggtgtgaccacaccaagcagccctaaggcagcacgtgcccgcacaagcctcagcctctgctccggtcacgcctgcccacttgggtgtattttttgtctgacttttgcttctggggccgaacaacccagc

SEQ ID NO: 24349 - DNA, 738 bp, Homo sapiens
  chr21:46308440-46309178
  hypo
cggcctctggcctccttgcaatgccaagggcatcccgcatggctcatccaccctgctgggcccacaacactggaggtgagatcctccttccgcaccaccctcgcctctgcggagaccccgcagccggagctctggagccggtccccgctgcaccccagcggcctcacctcggctctcatccacatagatgaggtagcggtccatcccgtcctgctgctccagcgtgtaggccacccagcagccctctgagtccctctccttgcaggtcctgcccttcacggggttgttcgacagctgcaggcccggacacgccgcgctgcagttcttcccaaaggggcccttttcgaacttcaggcactcggcgcaggagctgcggggagccaggtgtgagcatcggtgccagggtgtgcgggggctccggcaacgggggctcgggcttgggtgtgtgtccaccagggggggcaggtggggttggggcgccctcaggccaaggagggggcccaagtggggcagatgcgggtgcagcgggtgaactggaagcctgatcccagggcccgcggcaggtgcgcacaggagggaggagggacacaggggcacggcggccgcggagggcccctcagtccagacgcacccgcagagaaccccgcggtgcagaggtgctcactggggtccccgagtgagcccggctgctgggtaggtggccggggagtggggatccctgcccgccctgcctgctcc

SEQ ID NO: 24350 - DNA, 177 bp, Homo sapiens
  chr21:46311711-46311888
  hypo
cgcccgcctcacctgcagatgccgcactccaagaagcccttgccatggcagaggctgcggtctctgctctggtcccggcaccggcactcacactggggaagaacctgcacggtcactatgtccgtgaagcccagcgcccggatgacaaacgactgctcctggatgcactctgtggcc

SEQ ID NO: 24351 - DNA, 776 bp, Homo sapiens
  chr21:46318789-46319565
  hypo
cgacacgcaggcgtcctgtccccgacgggaagcctcgggctcctcacctagggggatccaggacctgggccggctggttgctcacgtgcccagcatgcagaggtggcgctcagacctgcagtggcgctgggtctggcctgtggctgaaacatgcccccacccaatggatgctcgggacccaacagcactcacctcgtaggtcttcaccatcctactggtcaccgcgaagatgggctggatgttgttttcagccagcttgtgcgccagctggcccaccgatgggtagtcctggagagaggaggtcctgctcagttggccccgagtccaggacaaggcttccaggtacccgcccctgtctgccccgctcagcgtcagccctgcccgtgcttcgaaccctctctggggaaggctggagaggcagaggctgccacgcaggagtgcagggcagagagctgccacgccctctgggcaatgtgtgcatagactcgggctttcagagtccaggcatgagcagcatttgaggcgtctcaccgtgggactggggatgtccacgggggcagaatcccagccttccccacacggtggacctgctttcgcactgagggacactcagtttcggtagaggccatgagtgtcaggtgcggctctccctacccgagttccgggacccgagggccgtccctcccgtctgtggctcccggcggaggacctgagtcttgtatctctaaagtcctttgcggcccccagagcctacaacgtcaggctgcaagagcgtc

SEQ ID NO: 24352 - DNA, 663 bp, Homo sapiens; identical to SEQ ID NO: 7280
  chr21:46323288-46323951
  hypo

SEQ ID NO: 24353 - DNA, 278 bp, Homo sapiens; identical to SEQ ID NO: 7281
  chr21:46397986-46398264
  hypo

SEQ ID NO: 24354 - DNA, 479 bp, Homo sapiens
  chr21:46424401-46424880
  hypo
cggtccacccccactgcggtgcagtgccagggtgagccagccacccccggcgggagaaacaccatccccacagccggcgctcctgtgccccctcctcccagccccgggcaggcctcgcctctgtgcgtttcccatggatgaggtcatagagcgcgtggccttccgtgcctgcctcttccgggcagcagcatggtgggtgtttctgaggctcctccgtgtcgctccacccgtcagcacttcatgcctctcggggctgggccacatttcgttgcagggatgggccacgtttttaacctgtccatcagcggacggacgtttgggctgattttatcttttggctatgatgaataacgcggtgatcaacattgattcacaagttttgtgcggacccgttttcagttgtcctgagtatcagcccgggcctagacttcccgggttatatggtgatacagtttaaacgcatgtccttgccaagcctc

SEQ ID NO: 24355 - DNA, 811 bp, Homo sapiens
  chr21:46492399-46493210
  hypo
cggtgcctcacgtccactcaggccccggccatctcaccctcctggggagatggagggaagcaccatggggatttgctttttcttgctgccgacggagcccagccaccacgggagggaggcccggccagcctgcggtgggtgggtgacatgtggcccggatctgcccggggcgcctgcctgtaagtgggcccagcagacaccccatggagccgaggcaagccgtcccagctgaaccggcttaagctgcaggcccacagagtcatgagcagtgaagagaggttttcgccctctgaggtttggggtggcctgttacacagaaatacacacaacgtcctcaggcacgtatctctttaagaatgtgtcccgagaaggcgtcccaggagtcttgatttttatttagccgtccacggttgcccctttgggtgcttcgccttcagatggggtgaagggctcacttgttagctggctggccccaaagacaggcttgttttccaccaggcagtgactgaagccggcagcctgctgcataccgcgggccttcccctgacctgtccgggactgcgggctggcggctgacacctgcggagtgcttaccgcataccaggctcccaaacttccatctgtgttcgtcttttaagttttgttgttttccagagtcggagtctcagtgttgcccgggccagagcgcagcggccatttataggcgcggacctcggcctcgcacaccacagctccagctctgagacacaagcgacccgcacccccccaccgcccagccccagcctccagactggctgagatcacagtgtgc

SEQ ID NO: 24356 - DNA, 303 bp, Homo sapiens
  chr21:46812995-46813298
  hypo
cggcacgaggccgcccgcctgcagcaggcccgcaggggcacggtgggtccccgcccgctcctcatgccttgagcgcgtcatccttcccggggttcacggcctctgacagccagacctcaacacggccagcacggtgtgcatggtgtgcacgcctcctgcgccggggccaccagagtgggctctcaccggaggagaaagacagtcggggagagcagcgctgtctgtcacgctttgtcacgctttgccggtgtcatctgagaagtggtgcaggggacaaggggggcgtgacaggactggtcctgc

SEQ ID NO: 24357 - DNA, 456 bp, Homo sapiens
  chr21:46839054-46839510
  hypo
cgatgccgtgtgtagtgacatgcaattccatgtagtgacgtgattccgtgtagtaaggcgatgccgtgtgtggtgacgtgcagttccgtgtagtgacgtgatgccgtgtgtggtgacatgcagttccgtgtagtgacgtgatgccgggtagtgacgtgatgccgtgtagtgacgcaatgccgtgtagttacatgatgctgtgtgtagtgatgcgcgatgccgtgtgtggtgacacgatgccgtgtgtggtgacacttaatgtcatgtagtgacacgctcgcaggatcgccaaggccaggctggctccaaaggcttgggtctggcttcctggggccactgggtgctctctgaggccgcccatcactgttcgggccctggggtgggagctgggctgcaaagtggcctggactttatgtcctgccaggtacagtgtttccctcagcagatttatcaggc

SEQ ID NO: 24358 - DNA, 947 bp, Homo sapiens
  chr21:46844304-46845251
  hypo
cgcctggagcgcagctctgctgtgggttagccgtgggtctctgggcgagggttcccgggatacagacacctgccccaaggtgccccacagaggatgacccccagggcagccgtgcctgagcctgcgtggtcacctcccacagtgccaaggcgctcccccaaggcccctgcggcccacctgaccagtggagaactcgcgagcactcggccagtggtgcctccaatttgcagcctccaatccctggtcagaggtgtgacctgaccctggaccagagcgctgggccaggtcctggtggcttctgcccttcagcttggaagctcctgaaaaccggctcccttccggggcagcccttggcccccactgaccctccctcagtcctaggtgtgcagtggcgtggggaccctgggaggcccgtggcgcagccccttcccgcctcctgcccgtcggtttccattgctcaggcactgcctcgcccgcgcctctttctcccagacctgagccaccgctgccaggatccttccccagctggttttccttctctttgatgtgtttccactgagggtccaaaccggtccaggcgcgggttccagaactttcttcagatctctcgcacctgaaaatttcctctgtagccattcgcaggaggtttctcagatgccccgggctcgggggccagtcagtctcatgaggacggggtgggtctgacttgtggcatcgcggcctctccatcggtgctgctgggcctgtgagccaatgggtgggcagcaccacccaccgcctccttcctcacaccagtcttgggctgcgcagagccccagccatgtgtgtgctgagtgcagtgtgaccgcgtccgcccgtctccccggacacgcctgttggagccccggccgtgtgtgtgtgtgtgctgtgagtgcagtgtgaccgcgtccacctgtctccctggacac

SEQ ID NO: 24359 - DNA, 361 bp, Homo sapiens
  chr21:46864076-46864437
  hypo
cgctccatggtacctcctgcctcccgaaatcacctctaagttcactttgtgccaggttttgttctccagcgcatcttcagtgctgcgagcaggctgggcttgcagcaggagcacgggtgtgcgtgtggagtgaatgaagggccgtgtgcccgagtaggtggcgtgcaggggtgtagtgaggtgcgtgcaggggtgtagtgaggtgtgggatgtgcagagtgaatgaaggacgttgtgctcgtgtgggtgatgtgcggggttgtggtgaggcgtagggctggggtcagctggtcgtccggacttttggttttctggctgtaaaatgcacatgccaggatagttgtgaggtgcacgctcactc

SEQ ID NO: 24360 - DNA, 1374 bp, Homo sapiens
  chr21:46894937-46896311
  hypo
cggtccctgaggatgtttctcctccgggttttcctgaagtttaaaacatccagccgccttggcgcgtgttcggcccagccgggcgtgcgctggggaaacctgtgcggggagcatctgcggtgcggcctcctccagggcagggctctggccagaagagaggagcgcgttccccctcccgcctccgcatgtctgaccaccggccgaggcaggttcagaagcgtcactgtcctcgacccgattggacacgacttactgaagctcagatggtgcctgggcagggaaggccagcgtgcccaccccagcggccccccggagagcaccagagagggctggacgaggcgagagggggcctggaggaggcgagagcagcgtcctttgcttcccaggcctgccgggctcggggcctggcctggctgccatctctccagcctttcccttttcaaactcctcaggcatccggagactctggcagcgggctcggggacgcccgggagcttctcagggaggagacggtgagtagccggacggggcccagcccacgctgcagggtcccgggagagcccctcccagcagtggggtgacacatgtgcacacgcaggtgtggctccaagagctccctctatgccacgaagacatattcctggctggggacagggatgctgggctgggcagacgctcggagcctgggcacaggccccgctccggccctgcctggccgccgcgtgtctctggtgagaggatattcctttaaaacgaggtcctgccctgcacactccttggtcttcgaggcaaccttggccttcccttcgccccatccctccgttagctcgtgcgtggccatcagggaatgaacgcgtgtgtgagcctgacgaccaggaggagaaggcggcgcagggagcgcgcggaaggctttccccagctcgggccacctgagaaaacacaggaggggcggggagtggggaggccccagccgcgggactgaggcgcggtgctgtccgtgagagacgggtgcgggaacgtgttccctgcggggaccctctgcagattcacatcagcttcccagcatggcctgtcgggcgccgggaggcctctgtggtgacggcaggcgcggtcctgggtcctggggagccggggagcccacaggcggccacacccctgcggcccacggaaggaagcccctcgcgcacggccctggagcaccctcctgtttcagaggatttttctttatctttcttgcgatcttaagtatttcatttcacaaaccaagcaagtctccaccgggcatctgccggccgaataacaggccacctcccctctcgtcctccagggcgcggccctaaaacccaggctccccgcgccaccccccgtcaccac

SEQ ID NO: 24361 - DNA, 828 bp, Homo sapiens; identical to SEQ ID NO: 7294
  chr21:46906455-46907283
  hypo

SEQ ID NO: 24362 - DNA, 1274 bp, Homo sapiens
  chr21:46912072-46913346
  hypo
cgggaggcaggggcagcccgagaggccacagggacctcggcgtgacggtcaagacatcagaacatcagaaaagcctcccgtaggccgagccacctccgccggcaagcaagggagcgtctagcagaggcaggagcattttaaaacaaaatggaagtaaaaaccatggcccttagggcgtctggagtctgcatccagctgctctgagctgaggggcgtctgtgctgcaggagggatgccccaggcccaggaagactggaaagcaacattttccttgaatttcctggtttggtgttttgttgatctgtaagtcgctcgagtccagttgaattttaaacgcggctctttgtttccgatttttccttttgctcgtggacagggatccgtcctgagcgtgccgggacctgaggtatgtgcctgcccagcttctaagagacgggcctgcggggacctgggtacaaggctgggtggggtccgggcaggcgcgagggtgcgtgatgaccccagctgacgccgtccctctttccccagggccggccgggtttcgcaggctttcccgtgagtaacctggtgccagagctgcatgctgcccggctggggaggggtctccacctggtagcacagagcagcccggtcgagctggggtgggccttgtcaggcccgagggatagcgacagtcactgcccccaaggaaatgatgggagtgggatgtgggcgagagccgctggcaggccctgtgctgggtgggcacccgtgagggtgaggcagctccttgcacctgcagaggcctgcagtgtccagagtgaggctggggccgggaggtgtcctggtgggggtcacctgcggaggcctgcagtgtccagagtgaggctggggccgcgaggggccctggtcgggctgtcgaggcaggcatattgcggggggcagctgtcgggggagatggagcagccgtcggggatgggggagatgccagccgctcgggcctcacggcctggcctccattccagggacctgcaggacccaagggcaacctgggctctaagggcgaacgaggctccccgggacccaaggtaaggggctcaggtgctgtccctcaaccccctttgtgacccaggggtggctccagcctgcccagatgaccactgttgggagggacctgggaccccccggctgctgctgtgacacgtgaggggtacatccctgctcgggccgtccctgtggtcacctcccgtgaaaggacccagcctgcgaggcccagtcacagcggccctgccttc

SEQ ID NO: 24363 - DNA, 300 bp, Homo sapiens; identical to SEQ ID NO: 7296
  chr21:46924382-46924682
  hypo

SEQ ID NO: 24364 - DNA, 213 bp, Homo sapiens
  chr21:47328415-47328628
  hypo
cgtggagagcaaatcctgttgccctgaatcgtaactcaggcataatggatccagagctgggggtgtcctgggggtgctgccctgtcactgcctctgccgcgctgtccgccacgctctgcagcgagctccggagctgccctgtcactgcctctgccgcgctgtctgccacgctctgcagcgagctccgggccacagcctggacacgccccatgc

SEQ ID NO: 24365 - DNA, 323 bp, Homo sapiens
  chr21:47425511-47425834
  hypo
cggggtgcacggctgttctgggggccgctaggggactaagaggatcggccgagggctgggctggaggagggcagcagggatgggcggcgagggtgagggtggggcttcctgaaggccttcacctgcggggaccccggcgagcccctcaggtgccacaggcagggacacgcctcgctcgatgcgtcacaccatgtggccaccagagctgcgggaaaatgctggggaccctgcatttccgtttcaggtggcgaacaagcgcccctcacagaactgcaggtagagacgggcccggggcagacgcagtgaggcggtgggcggggccc

SEQ ID NO: 24366 - DNA, 262 bp, Homo sapiens
  chr21:47531923-47532185
  hypo
cgtgctggacacctcggagagcgtcaccatgcagtcccccacggacatcctgctcttccacatgaagcagttcgtgccgcagttcatcagccagctgcagaacgagttctacctggaccaggtggcgctgagctggcgctacggcggcctgcacttctctgaccaggtggaggtgttcagcccaccgggcagcgaccgggcctccttcatcaagaacctgcagggcatcagctccttccgccgcggcaccttcaccgactgc

SEQ ID NO: 24367 - DNA, 526 bp, Homo sapiens
  chr21:47565081-47565607
  hypo
cggctgccatggcctgtgaatgtggggtcaccctggccgaaccctcaaaccctgctgggcccaagcacttgccggggtgagggcggtgctggtggtcaaggtccagacagcggccagtggtgacgccctcaggcccctcctggtccccagcccctccccagccggaggctgacccgcttctcactggggccccagctgggggttcgctgttggtggggcccggggagccctgctgtggccgccactcaccaggtaggcggtgaaggcctcggcgtcggcatccaccagcgtggttagcttggccgaagcctcgcggaagggcgggatcaggcgccgcatcgtcgtgtccagggactggaattggcgccgcccgtaggtcatgaggcccaccatggagcccagcgccgcaccctgcgagaggggtggatgtgggggtcgcagggaccccagacggcccgggaccgaccccaggaagagccaggggcccgggtgatccctgcgggggtcccacccgtgtggcccccac

SEQ ID NO: 24368 - DNA, 648 bp, Homo sapiens
  chr21:47602441-47603089
  hypo
cgcatcagggagctggccgccaccctcgactcccggggagcaggcgtcccgcgaccccctcatctaccaggccatctgagctgggcggcgcctcacctccgctcccgggggagccggcctcagggtaggcatgcgccctgggtgggagcaggtcgtggccgccgccctcctggcagctctggctgagcagccgccgcagcatctgattctccttcaggaggcgcacctgcttcttcaggtccgcgttctcgctcaggagccggctcatcagctcgccgccttcagccatggcgggtgcgtccctccttgtccctcacggctcctgcagccccatggaggtgggagcccagagcccgcaggcaccacagaaacagcccaggcacggagttccgtagccaccaccgccttccacgccttgtgatgtcactgccctagtgatgaggtgcccagcaccctgcctgcccccgcgatggctcatggccccgttgaggcagtgaagctggaggcccgtggcgtgcacaggcagccactcccacattatgaccagggcccgagaatgccaaggacattaggcagctacgggatgtagcgactgtactccaagaggggcgtccaagccactccccattgagcggcccagccagggtc

SEQ ID NO: 24369 - DNA, 271 bp, Homo sapiens
  chr21:47746193-47746464
  hypo
cgggcctcatggtccccaccagtctgttgactttgtggttctgttatttttttctcacttacctttgcctttactacttatctacatttttgcgcagcttgctcacttccgacagagaaaaacaaaaggtgacagttcgcattcggagaaaaagacggcgaagaggaagggctcggctgtcgatgcgtctgtccaggaggagagtccggtaaccaaggaggacagcgcactctgtggaggaggggacatttgcaaaagcacatcatgtgac

SEQ ID NO: 24370 - DNA, 106 bp, Homo sapiens; identical to SEQ ID NO: 7301
  chr22:18084157-18084263
  hypo

SEQ ID NO: 24371 - DNA, 651 bp, Homo sapiens
  chr22:19706042-19706693
  binary
cgcccagtcagggggatggctcggtcggcctcgggggtcgacgatcccccgggtaggcgacgtgccctgtccaggcctcacttcccgcgtccgcaaaacggggtggacaacgcagcctaaggcagagccgcgccaaggtccctcgctgtcgccgggctctggcggcctgaccgggcctggggtccgagcgtgcccccgggcctgggggggtcgccgcgatggactcgctggcagcgccccaggaccgcctggtggagcagctgctgtcgccgcggacccaggcccagaggcggctcaaggtgcgtgtgtggagagggcggaacgtgggtctgtgaccccgcgggctccgggactcggcatggggtccccgtccccgcgcgccacggcccgccagcgcctaggctcagcccttccctccgcagcggcctcgcaggtccgcggccccacggtggggcgacgtgccctgtccaggcctcacctcacgcgactccaaaacgcggcggagaatgcggccgtgggacccctccaggggccccaagggtctgcgggggctgggcgcctgggcgcgcgggcgggggaggctcggcgccgcggtctataaataggcgctgctccgccaccgccgctgccgccgcccccgcggctggatcc

SEQ ID NO: 24372 - DNA, 91 bp, Homo sapiens; identical to SEQ ID NO: 7303
  chr22:19924393-19924484
  hypo

SEQ ID NO: 24373 - DNA, 733 bp, Homo sapiens
  chr22:21319178-21319911
  hyper
cgcgccccagctgggcatccctgggaggtcgcgaggatccccggagacccagactcgggcccggggcgcccccggccagagcggcccctggctgcctccctacgccccgcgactccggtccggacgccgagggcctcggcctgcccctgtcccccggccgccccccacctgctccggcccggcggggcggtgctgggcccgcgggctccccggccgcagtgcaaacgcagcgccagacacgccccgcccgcgcctccccgcccccccgcgcccgcggccccaagcggttcccgagcccaggcccgcgccgagcccaggtgagcgcccgccccggggaccctggtccccggaaccccggtccccgcccgccgccccgcctcttcgccccggcgccgggggccagcgcttgcgctcccaagtctcggaccccggcccggcacgttaggggctgggggttggcaagcggggccagaggcactggccggggtccgaagctcacctcgtccttctctcgtcccacaacggccccttcccggctcgccgcggggccccactgtgtgccagtcccccttctcgggctgcaaggtctggcgggggcaacgggacggagccggcgaggctgctggcatcggcttcccagagagagggaactgcacgtgcagaggcggggagagtggacagaggcttgccctgagctccgtgggggaggggagagcgcggagcccccacactc

SEQ ID NO: 24374 - DNA, 821 bp, Homo sapiens; identical to SEQ ID NO: 22889
  chr22:22862472-22863293
  binary

SEQ ID NO: 24375 - DNA, 86 bp, Homo sapiens; identical to SEQ ID NO: 6560
  chr22:29587127-29587213
  hypo

SEQ ID NO: 24376 - DNA, 229 bp, Homo sapiens
  chr22:30084279-30084508
  hypo
cggcccctcggcactgaagatgtgtttcagtgcagctctcctcggcaccggattcgttgctgcaacagtgggagggaagagccagatgcaaactcgttctgcgagcccgaggttctgttctcatgatccttgctgtgatttctcttttgatgttggcaattttaaaatgacatcagtctatctggacctttttcctaaggctcttgctcagaccactcagtagatagcc

SEQ ID NO: 24377 - DNA, 821 bp, Homo sapiens; identical to SEQ ID NO: 7310
  chr22:30950922-30951743
  hypo

SEQ ID NO: 24378 - DNA, 851 bp, Homo sapiens
  chr22:31480666-31481517
  hyper
cgccacctccctctcttaagcgaggctcgggcggcgctggaaaagagttttggagagaagctggagcagtggttgaatctctgggaaaggacagatgagaacctgccccggtctcgggatcggtgcctctcgaagtctttccgaccccgggagcggctcctccagcacccggcgcccgccattactgcgccccgcgcgccggcccggcccccgctggcctcgtggcaagaacgggggcgtcccgagccgggctcctccccgcggggccgggccatataaggaaaagctaggcccgctccgcccgccctgcgccccagcgtctggccgatttggggacgcgggcagtcgcttccggccccggctcccgcacattcttgaggattgggccggggatgggaggaatggggacgcctggggacttgcacgccgcgtgcccctccaccacccgccgggacgccctctgcctcggtcccgagttcgagttcgacctccgccactcagctgggtgtcctggggaccttggtttcttccctttagatccggacactgaagcaggcggtagcgggtgtcttcctacctggctaccccttcggcgcctagcgcgaggcagggtgggcgaggcgagggcggcgccctgcgagggagggcggtcgcagaacctgcgggccttcagcgccccctggcgaggcttccctccaccgccggcgggacccccatgggcaaccgggggagctgggactgaaagcctggagagccccctccgttgtgctgttggggagactgaggcccagtgagacctcagggcctgccaggcgttcccaacagcgagggcagagagtacacggagagcc

SEQ ID NO: 24379 - DNA, 77 bp, Homo sapiens
  chr22:32019694-32019771
  hypo
cggctgagcggtctgagggcgccgaagggcaggaggtagtagaggacggtcaagggccaggagcgcagtttcagagc

SEQ ID NO: 24380 - DNA, 147 bp, Homo sapiens
  chr22:38520291-38520438
  hypo
cgcctactctctgtgcatatttttgagtgacggagggagtgtagctcagaggttaggtgacgggaaccaagtcatatggatgcggactggacctggacccaggtctgccgcctcctgagtcacatgctctccagcgcgccctgacac

SEQ ID NO: 24381 - DNA, 181 bp, Homo sapiens
  chr22:39877241-39877422
  hypo
cgccctctcctgcgtggagtctgctcacgtcgcctcctcggtgagcctgccctgcccactccattcatcactggacataatgacgcactcgctcctgcccgttacccgctttgtctttctccagagcacagcctctttgggcgcgcagttttctgagctgactagtgtgtttgtagtttac

SEQ ID NO: 24382 - DNA, 553 bp, Homo sapiens
  chr22:41634408-41634961
  hypo
cgggcagagcctggagctcgttgtggtgtaggctgagccgtctcagggcgggcaggccagccagggcctcgggggccagcacgctgagcgcgttgtgcgacagccgcagccagcggacgcgcagtagcccctggaaggccatggcgggcaggtaaaccagggcgttgtgggccaggtttagcgtggccagcgcacccagtgccccgaacgtccccggccgcagctcctccagtgcgttcccctccagctccagccgccgcaacgagcccagcccgtccagcgcctcctggggcagctcacgcaggtggttggaggccaggttgagcaggagcaggcggcccaggccacggaaggcgccctcggccaccagctccacctcgcagtggcgcaggtccaggtgtgtgaggtgaggcacgccctggaaggcggctgcggggatcaccttcagcaaattgccctgcaggtccagccgctgggtcagctggggacagcgaggagaaagtggggctgagccaggcagggaccccgcctttgcaagtgctgcttcttcccc

SEQ ID NO: 24383 - DNA, 32 bp, Homo sapiens
  chr22:42109076-42109108
  hypo
cgctgggattacatgcgtgagccaccgcgccc

SEQ ID NO: 24384 - DNA, 141 bp, Homo sapiens; identical to SEQ ID NO: 7312
  chr22:43351254-43351395
  hypo

SEQ ID NO: 24385 - DNA, 193 bp, Homo sapiens
  chr22:43434424-43434617
  hypo
cgggctaccgggagactgcatgggaacaaccacgctcgcgcagcctgtcccgcagccatcgctcctcccacagctcctggctgcccacggcgcttccctgtagcaaacccagctgctgacgtcataaaaggcacacagccggacctgtctgtgctcatctagttccatttacaacagactcatccacaaaacc

SEQ ID NO: 24386 - DNA, 547 bp, Homo sapiens
  chr22:44208017-44208564
  hyper
cgcgcgtggccaccccgaatacagccttaccgggaacccctcctcgattctccgcctagctgggccggcacccgcgtgcgcggaccccaagccgcggggtctcagaggggctgcccattcggcgtctctaggacgctgttgcccgagagacgacggcagtcgctgactggagaatgagcctacgcgcctggcaagaagctgagctgtgattggtcaattggagataaacgaggagggggcggggccaggtcagtcccgcgcctccgctcccggaagaaatttccgccggaagtcccgttctctggggagcgggaaccctggcgacccgtgtcatgggagcgggtttctgttacgtgggctttagcgcgagctgggcggtcggcccggtcccaccgaactgcatagggccgtgtagccgggggaagtcagccccctgctctgagaagcagactctgcatctgtaaaaggctaagcgtgcccactggggcctgtggtcaggattggctgcagtgaggtccgcaaagcccctaccgcatcctgcgccttc

SEQ ID NO: 24387 - DNA, 108 bp, Homo sapiens; identical to SEQ ID NO: 7316
  chr22:49857262-49857370
  hypo

SEQ ID NO: 24388 - DNA, 741 bp, Homo sapiens
  chr22:49911038-49911779
  hypo
cgccatctgagggacaaagtccccgagccccgatgcctgggcgcagagctggagactcggcttcttcttcgacctccccggccacttcccaacaccacatcacctcaacgcaggtataaggcacgtcccgtcattgcccccgttttagagctgagaaacatgaggaccagagaatcaaggctgtctgagccagagggcgcctcgctggcccctaccccaaaacagcacccgccctgccctggtcattactgccccccaaccttaaccaccctccccactgccctacagaagacccttagaagggggctgactgatggaccatggtgaaggccagcctggcctccttcagccacagtgtgaagcgcagttcaccaaaactggaaactgccatgcatcccggtgtcatcaaacaccacagcaaaagagccaggtgaacgcacggaacatcaagccgcaaccctccacacctctctgtataaccttcgcggccactgcccccgtgcctgcagagcgggtttgcaggagacgtcatccgaatggataaatgtccgtcggagctggggatcatcctcccagagtttcagcagctcagagaaggccagcaactcaccgagccatgccacagcgtgcaagcacagcggcccggccctcctgcattctgtcatgcactgcgtgtcatcttattaaaggatccaacgcaggctcataaaatacttaatgaaaacatgccaccaggtgcac

SEQ ID NO: 24389 - DNA, 828 bp, Homo sapiens
  chr22:50899033-50899861
  hypo
cgcaaaggtggccctgatgtccggcgggtaccgcagcttatgcagctgcttacggaagagctcggcgctgtcagaccccacctcctcgtcaaaggccattttcagcagctgtgtcagtaaaagcagcccttaggggtgtgggtggccccccagcccctcccccaactctgacactgccaggctccccttcccctcgcagccatgacagagagagaagcaggccccaggcaaaggcctgtatctgtgtcacacgaaggcaagcgcttgtgtaaactcgaaatctcagtggctgtgagctgaggcctgggtttgcaaggcacacccaagacacggacttgagggccggcgccccaaggaaaggacaaggacccaaagaccgcacatcaaacagtggacatcaactcaagagccacagtgagggccccagacatgcaagcgtaacaacagggccactgctggagactggcctaaaaatggttcatacaagaaagaccggtttgcaggagaaagaccagggcgggggatgagagccccacccgcgcaccgcgccccacctggaatgtgcaggagcgcagctggagcccgtcctgcaggagctggtccacaggggtctggacgctgatgcgcttctccttggtcagcgcagccaccgggaaggagcggaccaccacctgctccccaacttaggacaggccaggcagagtcagaagcaaggaaggtaagggggggggggtcccagaatctcagggtaccacagttatggggaatcccaagtgggtggggaaggagcagacaaaggcccgtttcccacgggcacccagaaccccc

SEQ ID NO: 24390 - DNA, 148 bp, Homo sapiens
  chr3:101230942-101231090
  hypo
cgtgagccaccgcgcccggccaataaatctgtaattgttaactgtctctgcagaaaccaacggtaccatcagaaacagaaaaatgaaatgaaataattgattcattgggcgttcgtttgtgtactggactgtaagcatatgagtcctc

SEQ ID NO: 24391 - DNA, 97 bp, Homo sapiens; identical to SEQ ID NO: 7320
  chr3:10638636-10638733
  hypo

SEQ ID NO: 24392 - DNA, 762 bp, Homo sapiens; identical to SEQ ID NO: 7321
  chr3:111578054-111578816
  hyper

SEQ ID NO: 24393 - DNA, 250 bp, Homo sapiens
  chr3:11581157-11581407
  hypo
cgtcttaagctatattcgttttctcttatgaatttaaaaaataaaatctattgatgcgcatacaatcaaatatatgtaaaagtgcacatttctgagctttgagaaacgtactcgcttgtggaaccagcacagttcggcgacatcgagcaggtctgtctggcctgtcctgccctgcacagccgcctggaggttcacctgcatcattgcgtgtgtcagcgcttggtgcctttctgtcgctgagtagcgtctc

SEQ ID NO: 24394 - DNA, 326 bp, Homo sapiens
  chr3:121637776-121638102
  hypo
cgcctctgtctgggccttgctctggcccactgggctcgctcagcctgcgactggactgggcatgtagcgagcagcttctgtgttgggtgcggcatctagacaaggggaacacggtggcgcccaaaaactcggagatgctagcaattgcagagtcctaagaggtgttatagctcctgctcagggagtcccaaggtctgagcccccagaaatgttacagctgttcactcctgtagttcaacgagcaggagcatgttacaactctctcctgtagtctagcgagcgggagcgtgttacggctcttttattcccgctgcccatagcttggc

SEQ ID NO: 24395 - DNA, 79 bp, Homo sapiens
  chr3:12586164-12586243
  hypo
cgaaactctgtctcggggaaaaaaaaaaggtataatcctttcttttgctttctaattcatcctttttgtttatgctagc

SEQ ID NO: 24396 - DNA, 775 bp, Homo sapiens
  chr3:127394412-127395187
  hypo
cgcccaggcttgtttttcttaatagtccctgccatcgttaggtagtgggttgattgtcctgcctcactagagtataagttcagcaggacagggacctgtgtctcgttcactgctgtgctccagtgtgtgggacaagcccagccaccaagtcagctctccgttctgtgttgtctgtcttccgtgtgagtgagtatgtgcctgtgtgagtgcacacagacgtgcccattcgcctagcccttgactgggagggtgttggggtcagagtgggcccagggtaatttgggaaggcatcgccagagattcggagccccatgtgtgggaaggtggggaggagggacagggagattagaatttcccccaggccccttccctgctaactggtgagccctgcctcccccaggagcccgctgcgaggccaacaccttcgatggtgagcgctgcctctatggggcactgagtgaccccatccgccgggctctacgcgattacaagcaggtcacggcttcctgcaggaggcgggattactatgacgacttcttgcagcggtgagccagggcacacgaggggtgcagcatggggtgcggtggccctggtgggtgtggcgagtctgctctgactgtggcctgcactgggttctgagtgctccgaggaatggggtggggctgtgccaagtatcctccctcctggcttgtccctccccaggcttctagagcagggcatccacagtgacgtggtctttgtagtacacgggaagccattccgggtgcatcgctgc

SEQ ID NO: 24397 - DNA, 33 bp, Homo sapiens; identical to SEQ ID NO: 7327
  chr3:12743274-12743307
  hypo

SEQ ID NO: 24398 - DNA, 217 bp, Homo sapiens
  chr3:128056326-128056543
  hypo
cgccctctctcacaggaaggctcataaacacaaggatctcgctcaagccccggcacgtctggaatctcagctcggtgctttgccaggtatgattttgccacaaggggcatttcttttccagaatctgatgcagtcactctcttcagagcggctgggcgtttatctggacctgtcacaaccaggtttctcagcagctcctgtgctgggcactgaggac

SEQ ID NO: 24399 - DNA, 778 bp, Homo sapiens
  chr3:128216313-128217091
  hyper
cgtgtgccagcgtgggtggactccgggctggggaagcgacagggaatggtgtgtgccggtgtgacagacgccagagcggcggggtggaacgtgctgtgtcacgggagactttcttgaccaaaacggaatgtgcgagtgtggaaggaagaggggccgtccgcggagtttggggacacccgggcgtccgagccccagagcctctgcagctgggacaaggaagcccgagcccgccgcctgaggtccccgcgccgttagtgacacgcgccgccgacaaaggctgtatttttccaggctcgcgccccgcccgcgcgcgcgcgatggtccccatggcgacgcagatagcgccgcagccattttccctatctccccagagtctattatacggcgggattagctcatctccaggcaggtcaaacccaaagtcacacaacctgcgacgcgggccccgcccccactccccggccgcccctcccctgccccggccccggccccggccccagcccggcgacccccggctgctgcccaagcgcaggcgcagagcgccacctggcggcggcggggtctcgggtggggtccgcggagccggtgcccgtgcagaagaggtggggtgagggtctctacctccagaaggcgggctctctgggagcaggggctttgctttgtcactgctgttccccagggccagactaacacacagtaggtgctccataagtgtttcttgaaaggatgtttggagggatggatggatggatggatggatgggcaggaaattatagac

SEQ ID NO: 24400 - DNA, 185 bp, Homo sapiens; identical to SEQ ID NO: 7332
  chr3:128737561-128737746
  hypo

SEQ ID NO: 24401 - DNA, 334 bp, Homo sapiens; identical to SEQ ID NO: 7333
  chr3:129290351-129290685
  hypo

SEQ ID NO: 24402 - DNA, 216 bp, Homo sapiens; identical to SEQ ID NO: 7334
  chr3:130424529-130424745
  hypo

SEQ ID NO: 24403 - DNA, 788 bp, Homo sapiens
  chr3:13611739-13612527
  hypo
cgcgtgcgtgccggtgtgcaccgtgtctgtgtgtgcacacccagtactgacaggcttcctttctgattcccccagggtcttacaggagaggggaccgtcctgggctggcctggaccatggtgctgctctgggagcctgcaggagcctggcttgctctgggcctggccctggccctgggccccagcgtggccgcagctgcccctcggcaggactgcacgggcgtggagtgcccgccgctggagaactgcattgaggaggcgctggagccgggtgcctgctgtgccacgtgtgtgcagcagggctgcgcctgcgagggctaccagtactatgactgcctacagggtggcttcgtgcgcggccgcgtgcccgccggtcagtcctattttgtggacttcgggagcactgagtgctcctgcccaccaggcggcggcaagatcagctgccagttcatgctgtgcccggagctgccgcccaactgcatcgaggctgtagtggtggctgacagctgcccacagtgcggccaggtgggctgcgtccacgcgggccacaagtacgccgctggccacactgttcacctgccgccctgccgggcctgccactgccctgacgccggtggagagctcatctgctaccagctccccggttgccacgggaacttctcagatgccgaggagggtgaccccgagcgacactacgaagacccctacagctatgaccaggaggtggccgaggtggaagcagcaacagccctggggggtgaggtccaggcgggtgcagtccaggcaggc

SEQ ID NO: 24404 - DNA, 333 bp, Homo sapiens
  chr3:13679108-13679441
  hypo
cgccagcgcgcatcacgcactaccagctcaacttccagacgggcctcctggtgcctgcgcatatcttccgcattggccccgcgccagccttcacgggggacaccatcgccctgaacatcatcaagggcaatgaggagggctactttggcacgcgcaggctcaatgcctacacgggtgtggtctacctgcagcgggccgtgctggagccccgggactttgccctggacgtggagatgaagctctggaggcagggctccgtcaccaccttcctggccaagatgcacatcttcttcaccacctttgccctgtgaggtgccagcacgggccacctgc

SEQ ID NO: 24405 - DNA, 506 bp, Homo sapiens
  chr3:141174173-141174679
  hypo
cgtgctcgacatctgcgtgagtgtggtgagtggaagagcatcaggccatgtcccaggtctttccaaatcagactccattatttctgacattcctcttcctaaagaccagaggtaggaattcagggccgccattttcgtcgtctcttatcacgatgggaatcagcgttctctgctgctgctcctgctgaacacgacgacattccagccaccgggaactgctcgggactcagtatcattctcagacctaggcaggagcgttccgtgcttgccctcctccacaggtgccccgccgcacggggcaaagagtctgcagggccaacagggatgtgcccccgcaatgtccacgccatccccagagaccgcattctggtacccagaacctgagaattccctgcagactttcaaggcctgttctggccgcttccttgccagtgccacacccctggggcagccaaagggcagctgtttgcaggggttgtggaccgagtttgtgatggagtttcagc

SEQ ID NO: 24406 - DNA, 152 bp, Homo sapiens
  chr3:142537613-142537765
  hypo
cggcaaaaagccaaattcaactagtaaggtatttcagctacgctaacaccaggaagctggactgagtggttagatcagccatgtcccgctctgcagtgctgtaggtctgttgtggtttcaaatgcctgctatgaagaatgcaccgcgttaac

SEQ ID NO: 24407 - DNA, 744 bp, Homo sapiens
  chr3:142895557-142896301
  hypo
cgagaaagggggcggctcagcagcagcagctgcagccgctgcagcctctggtggtggcgtgtcccctgacaactccatcgaacactcggactatcgcagcaaacttgcccagatccgtcacatataccactcggaactggagaagtatgagcaggcatgtaatgagttcacgacccatgtcatgaacctgctgagggagcagagccgcaccaggcccgtggcccccaaagagatggaacgcatggtgagcatcatccatcgaaagttcagcgccatccagatgcagctgaagcagagcacctgcgaggctatgatgatgctgcgctcccgtttcctggatgccagacgaaagcgccgtaacttcagcagacaggccactgaggtcctaaatgagtatttctactcccacctgagtaacccatatcctagtgaggaggccaaggaggagcttgccaagaagtgtggcatcaccgtgtctcaggtctccaaccggtttggcaacaagaagattcgctataagaaaaacatcggaaagttccaagaggaggcaaacatctatgctgtcaagacagccgtgtcagtcacccaggggggccacagcagcaccagctccccgacacccccttcctctgcaggctctggcggctctttcaatatctcaggatctggagacatgtttctggggatgcctgggctcaacggagattcctattctgcttcccaggtggcatcactccgacgctc

SEQ ID NO: 24408 - DNA, 322 bp, Homo sapiens; identical to SEQ ID NO: 7339
  chr3:143316169-143316491
  hypo

SEQ ID NO: 24409 - DNA, 203 bp, Homo sapiens
  chr3:148705325-148705528
  hypo
cgggagatttcctctttgaactccttgaccgaggctcgatcgcagatcacaatttcctccttgtccttgggggtcttgacggtgacccgaatggggggcctcgtctcggccccgctcggctccgccatgccgccgccgccacccggccgcccgccagcccgcccggctcctcctcctccccgctcgcccggccggcccggctc

SEQ ID NO: 24410 - DNA, 77 bp, Homo sapiens; identical to SEQ ID NO: 7342
  chr3:150187009-150187086
  hypo

SEQ ID NO: 24411 - DNA, 124 bp, Homo sapiens; identical to SEQ ID NO: 7343
  chr3:151112517-151112641
  hypo

SEQ ID NO: 24412 - DNA, 838 bp, Homo sapiens
  chr3:157812151-157812989
  hyper
cgcaagaggaggcaagggcgccgcgagctccccggatgcactggtcccacaggccgtgcccgagtggagcactgcgaatggggccaagaaattttggcctttctcgccggacctggctgcctccgcgggcctctccgcctaccgcgctcccgccgcggcccgactcccgcgggtctccgcgccgaacccacctggctcctatcgcacgggacattcccgacccacccacgccgcgtcactgagcctctgtaccgatacccggcgcctccgccagcagggcctggacgcaccgcctcctttgacctcgggcttcccccgcgctccgctgcttggggcagactggccccgagagggagccaccatctcccctgctccagggtctccagggtccgaacccgtgttgggatctgggttaggattagggtttggagcttggagcctgcctgttaggacccccggccccggcgccgactggagctcgctggaggccacaggaccacggcggatggcctggctgcttcagggcgtaccatgcccgcaggcagatgtttattattaaaaactaccgacgttcatcaaccaggagacccgcaaggcctgcgcactgaatacggcccaaatcctgttcagtggtctttgaaagttaaaagaaagaaacctatcgcccacgtctatgctgaggaacagctttgaatacgagctaagacctgggagagggccaagtgggggtggtggggaacactgctggaggatgtggggctttggcaggggttttacgcaccctccagcacgagggtggggggtcccaggggacgctcaggactctttcagtctttgc

SEQ ID NO: 24413 - DNA, 929 bp, Homo sapiens
  chr3:16925425-16926354
  binary
cgagatcctgagccccgggacccttgttccgggccccgaggcctacttggtagttgcccctcggggttccgggtgggtgactgacagttgcagcagctctggggaggcgaaggataggcaatgacttggggctcccgtccactcggctttgaggtccccgcggcccgatgacccggcctcggtgacagcagccgcgacggcggcaatctcgacagggagctaggcggctcatggtgggtcagggggcgaccgaggagggaccacgcggcctgtagggggcagcgccgagctcgggaggagacagcagccggcgggtggggtgggtctgggctgccccctccgggagctgccccggggccgcacggcgattgtcatacccggccgcccctgcccgccgtgggcttcctctcggcgccgcgggccttaacggggctctgaggggacgtgacagagctcggcacgcggcagcctctggggagttagggtccggagagacccacgcgtcgccccccgcccgcccggggccgggagatcctcgggagccgcctccgcgtgtccagagagtgtcggggcggccgccacttcccctcgcccttcgccggaggtgggcgccttttcctgcgtggcgggtgctccgaccccagttgctctgagccccggggaagcgcgccccgagcccctgacgtgggcgccccgttacctcggggtgggtgcctggggcccctgaggtgggcgcgggttgccccggggtgggcgcccggcccgcgcgggttatttttggcgcccgcagaggcgcgtgtgttggggcgtgttttccttccccaggtgccgagagccggggctccgccggcgccggagctgactcgtctctctcttctttcccctgcaggaatcttccgataattctgccgccgcgactttaaccgtgc

SEQ ID NO: 24414 - DNA, 820 bp, Homo sapiens
  chr3:169539913-169540733
  hypo
cgtttaaagaacatcagggtcctctacctggataagaacaacctgaggagcctgtgcccggcgctggggctgctgagcagcctggagagcctggacctgagctacaaccccatcttctcctcctcccttgtcgttgtcagcttcctccacgccctgcgcgagctccggctctaccagaccgacctgaaggaaattcccgtcgtcatctttaaaaacctccaccatctcgagctgctcggactgaccggaaaccacctgaaatgtctgcccaaggaaatagtgaaccagaccaagctgagggagatctacctgaagcgaaaccagtttgaagttttcccccaggagctctgtgttctctacaccctggaaatcattgacctggacgagaacaaaataggtgccatcccagaagagatcggacacctgacggggctgcagaagttctatatggcttctaacaaccttcccgttctgcccgcgtccttgtgccagtgtagccaactgtcggtgctcgatttatcccacaacctcctccactccatcccgaagagcttcgccgagctcaggaagatgacggaaatcgggctgagcgggaaccgcctggagaaggtgccacgcctcatttgcaggtggacctcgctgcacctgctctacctgggaaacaccggcctgcacaggctgcggggctccttcaggtgcctggtcaacttgcgcttcctggacctaagccagaaccatctgcaccactgcccgctgcagatctgtgcactgaagaaccttgaagtcctgggactggatgacaataaaataggacaggtac

SEQ ID NO: 24415 - DNA, 1387 bp, Homo sapiens; identical to SEQ ID NO: 22897
  chr3:170625831-170627218
  binary

SEQ ID NO: 24416 - DNA, 102 bp, Homo sapiens; identical to SEQ ID NO: 7352
  chr3:177238890-177238992
  hypo

SEQ ID NO: 24417 - DNA, 481 bp, Homo sapiens
  chr3:181437081-181437562
  hyper
cgttttattaccctagtctgcctgcgtgtacagaatgaagggtgcactgttttatatagagttcggcgctttgaactatcatttgcctagctctcccagcttccgcgcgggccacggctccgggctgtgagcgcgccggcctcccgccggctgccctggggagcgcgcagtgcccagtgctgagagccgacgcgcgggcaaattgaggccgagctgacgagctccggcgggtggacctgacgtcaccgcggcccgggtcacctcacccatggggctccccaagaaggtgctgtgtggggctcgagttctctctgcccgggctctgctcaaacggtcgcattccctctccctcaggcaccgacccgcgtcagacaagtctagaaagtctcccgaggcgttggggccctcaccactccagagtcctctgcctcctgcgccccagcccaagccctctccatgttgacctcgtgacacgggagac

SEQ ID NO: 24418 - DNA, 909 bp, Homo sapiens
  chr3:181444664-181445573
  hyper
cgggacggtggcagcaagggagaaaggacgggatggaggagggggcttcgcggtaaccacaccccttcctaatgagttaatttccatatttgcgcctcccgcatctagcgccctctttttttttttttttttttttttttttttgcctgacgccactgtgctgttgcgtcttgcgcagcgcagacacctccactctggattgaaacgaaaaagctcgcggtaagagcagaaaattggtctattgatacattcgctccgagtgttgatcttggcatcaccgatagccggttaattcccccaccccgcccccgccagtgggtcgcacgcggattgccgagggcttgcaggcactcaggcagacgcagacagaaacccacatcgaccccccccctttccccgcctccagctgtccgaccctcaagtctctttctttttcttttttacccaactccggattattttccccctcaaggtgagggcagtgagagcagcgagggcacagtccgcacaaaaagggggaaaataatcgcaaaccaaggaaccaaaagtgaaagtttcaaactagataccaaccctgatggaggttgggtgctgacccgactgtgggtacttaagagaaggaaggagggaaactgaggtggtgagattatgtccacagtatgggtcggttaaaagttgtagtaaagaagttttgggagggccctcactagaaactcaaggcgggtttcagctgatttaacctggtttcctacacatttttgcggtgattctgctctggaaattggcgaaagagacagacctttgcaattgctcacccctccctgcccccaaccaccctgcttactttcgcgaagcgcattaggatgtgggctctggcttgagctccaaaatagcttgcttgtcaattgc

SEQ ID NO: 24419 - DNA, 130 bp, Homo sapiens
  chr3:182815985-182816115
  hypo
cgattacaggcgtgagctaccgcgccccgccaacttccaacaactttcttatgtttctctggggcactcctacaattaagtaactaaaaagggcatctacaatatttctggaaaataaaagcaagcaaac

SEQ ID NO: 24420 - DNA, 134 bp, Homo sapiens
  chr3:183728804-183728938
  hypo
cgggcgtgagccaccgtgcccggcccaaactcattcttaatatctccccaatctccttttcttatgtccacgaataggtttaaatccttaccatcaatcccagacaccccaatgcctccctatcttctagaaac

SEQ ID NO: 24421 - DNA, 784 bp, Homo sapiens
  chr3:186079497-186080281
  binary
cgcagagagagccgagccccaccctgtgcgttccccaagcctgcacccctcgagcggggcatcccttcctgcagggctttgtggcaggtggaactgtcggggtgggcgccgtggctttggctgcagccccttccctggccgcgggaccggctcccgctttgccctcctttaccaagttgctgcaccgggtgctccctgagccggggaccccctccgccgcgccggccgccgtcttacctcaccaggcaacacttggttgcgcggtggcccggggcgctccttcttcgcggtttattcccttacttgggaggaaagaggaaccgagagacagaagggggaccgaagctggcctctgggcgtcttcccgcctgcgcagccctctcgggggagggggatgcagccccagtgggtgccgcggagaccaggctgccaggctgtggttggtagcgccggggtcttcaccctgtgctcggagttcagcagctccaaagctgtctatctccgtggcccgctactacggcactgcggctctgtgccctgcccctcgcagcctggcaagtccagctgccactctcactgcggagccctgcccccgggcgcagagcccgcccccgccacacacaccggcgcgcgcgcgtacacacacggcacacacagacacgcgcttccacacatgcacacgcgtgcgcacacacgaatgtggatccgctcgatgggaacctgaccccctttggtgcaactagggcgcgggcatcattaggacgctttttactgacagggcttc

SEQ ID NO: 24422 - DNA, 301 bp, Homo sapiens; identical to SEQ ID NO: 7355
  chr3:186648488-186648789
  hyper

SEQ ID NO: 24423 - DNA, 635 bp, Homo sapiens
  chr3:186857065-186857700
  hyper
cgcgggcggaaaaggcgggcccagctccctcaggtctgcgtgtcaccgacccgaacccgctccgtcgtcctgacgcccccggcctagctgcagccaccttgtcgcaggggccttggtgtctctgagactccgagacgcctcgcccccacctggcgttcggaggcggttgcctcgctgggcgcagcaattcaaccgccgcgcgccggatgctaagaccgcgatttccccggatgctagggcggtgatttcccccgtgacaggccccgccccggccccgcccaggcccgggcggtcccgccccactgagctgtggctcggggagccgtgggtccgactcctgcgtgtgatgtgtcaccaagttgactttggggtcccccattcttccttagttctctattttacctcagcgcgttgtctagctgctgcctggccacggtacttagcacacagcgtgacttaatactggataaacgaggaaaggattcgtacgccctggcggggccagaggctcacagcttgggttcccgcgagcacacgagccaggaaccgccaatgcctccagggggcgctctccctcccatcgagccaccgccgggccattggagaccaggaggacctctcagctccatccctgc

SEQ ID NO: 24424 - DNA, 2866 bp, Homo sapiens
  chr3:187455297-187458163
  binary
cgctcacacataagagcacaaacaccagccctgcgcgccggggcaagcctaggcagacttcgctaccccaccccgaccactccgtacctgtcttccagggactgcccgcccctgggcgatccacctcgaagccccccgcaaggcgcgacggaggctttgtggtatgaccgtggcggcccttaatttagttacattcaaataaaacttttggtgcacctcggtagctaacattgtgtgtatgcctttttttttttttttttttttttcctgttacgccgtcaatgcagcaggcaatgaggggaatgacacagccctctcattcccggaacgtagtcaatctcggctctgcggatttcacagaacacactttgcctattgccggctccaacaagaagtaactttccaggaagctgccggccccggcagccgccaggatcgctgcctgcgctgcgctggccgccggggattcacccagggaggcggggccgctggggaaggctcgcggggaatacagcacactttcccctaaatccctcgtccgcgccgagtgcagggctctcagagttcacctagtcccacctctcacccacaacagtttataaatggggaaggtcagacaagttagtagcagagctgggtctagaacccaggagttcgaatacaatccgaggctcatatcgagactttaagttgtccgattccgaagtttatttgcttttttccctctttttgccttccattctccctcacccccgttcttttaggggaatgtttgagcgagacttcaaggtcaaaagatggagtccctaggggctgagggtctccatcataggcgccccaggcaaggttggagaaaaactaaacagaaagccccttccgcctacgttggcaagaacgggaacccagctccacttggtttccgcccaaagtctttagaacaggagctgccaagccgtaaggatttccgaatccgatttccccgaaaccgtagagacacagcttggactcggcaaaggccggggccccgacccctgcgcgcgcactggcactctccaaagttgcctcgccttcctgtggccctcccgggaattataacccccgggtgccatgtcctaattggtctcggtagcaggctccggggtgcgctttcgggggctaggggacagcgaaagactcagccacaaaggccgcagtctggtcctaaaactagccagtggcgtcacactgcgccgctcatcccttctgcggcaagcggaagggtcagagtcggtctgcaaagaacgagcctttggcctcaaaatcctacattgaggctttctcaccccttcgcccggtgggataaaggtgaaagagacggttgggatttaataaggggtagggatgagaatctgggaagttaaaatgaagtaagtgcatttattggaaattaggagtcccgtggttccgggagctcaaaccgaatggtgtttttaccgctgcctaacgctagagagagccctccatcaaggtttgaaaccgtcaacccctttctcgcccctcccctccttcccattgacctagtttggccagagcctcccgatttggagaatgccttccgcccttcccccctcctctccagccagagaggctacagaggctgttggattattggtaatctaataactccaataacccgctgaaaaatccaaagggaaatctgaaagtgtaaagcactgtttagggacaaggacaaggaattttaataaggctgcaactgccgtagtgaaccccgcatcaggggccctgccgtggggctcccggtctcagcagtgtttcagccaactagctgcacggctgcagacaccaccgtggtccggcggcagggggtgaggtcaaatcgcggagctgtttttattcttgggggaaaacactcttcgccctcttggctggggaacgggagggtgcaggagacgacagtaaataaaagcgaatttgataacgcgatggcctcgacagccgctttggataaccgaggtgttcggggacattgtgtcctgactttcatttctatcacgtttcctgccaacagtgctcttgcaagcctgcaagcttctaggaaatgcaataaaacagagggatgtgttttatcatcaagatctgaagaggagttgcagaagggacgttccccatacgctcagcgcgagacagccttccagaagggcccgaagacaatgccagcaaatcgcgtcccggagcagagatccctcggccgtcctggctggactgggctcagcctttgcaaaaaggctggcgggggaggggagaagcatgatctcctcaagcaaacaatgcctttaaaaatccgatctggaaagaagtcagccaaggtccttattcacgttaatgaagatggaaggcactaactgtccttggaaagcgatgagtcaaacttgaccgcgcttcaaactcgttcccagattcgtttccagtccgaacagaggcgcgtttctccgacgcggcctccgacggctcccgcagtgggaggggccgaactcgatccccgccgacccgggcgggggcgacggcgctgtctccccctgcagagcgcgcctgctgccgctaggggccgccagcatgcggacgcgcgtttgccatcttaagtcacgagctcggagaaagaaaactttacggaggaactgttgtggcacaaattctggcctatccacatgacccccaccccctcacacacacacacccggtttctcgccaggctactatgcagaggatgttaggaaggggaagagagcgatttcagaatcgaggctcgccctgcaagtctttggtccaggccttaacccccctcttaacacgcaaacccccgagctcc

SEQ ID NO: 24425 - DNA, 1066 bp, Homo sapiens; identical to SEQ ID NO: 7359
  chr3:187458583-187459649
  hyper

SEQ ID NO: 24426 - DNA, 175 bp, Homo sapiens
  chr3:193922622-193922797
  hypo
cgaaactcgcctggacaagtccaacttcattcttttcagtacgactagctcctgtgcgctgcagaagactcgggctgatctgaaagcgcctctcctattcgagactctcaggttttaagtaggtcttccgcacctgcagatgaaaaaagatgtggctattattttcctcgattac

SEQ ID NO: 24427 - DNA, 485 bp, Homo sapiens; identical to SEQ ID NO: 22904
  chr3:194208086-194208571
  binary

SEQ ID NO: 24428 - DNA, 296 bp, Homo sapiens; identical to SEQ ID NO: 7361
  chr3:194786359-194786655
  hypo

SEQ ID NO: 24429 - DNA, 1053 bp, Homo sapiens
  chr3:195621979-195623032
  hyper
cgctctctgtcccctggcccaggagcagacactctcactcctgaggccgccgcagggggcagggctgagcccggctcacagcagacgaaggggtctggggcccaggtatctggctatcccctagccttccccattacctgcggtccctcctcgcccccagccaggcgctggtaagcagatctctcccccatggagccccaaatcccagcggctgcggtcagggagagaagcagcgcccgcagcccccgccccgcagcggcaccggcagcgtcactgccctgcgtcctggggggccgggcctcgagcatcctccagaagtgcagggccgctactgcgtctcagcccccatagcctcatccgccatcggccggcggccgggtggtcgcgcccctcctcctgccggcctgcggccattccctcctgcagcccgtcccagctccgttcctcctctccggggcgcggctcccaccctctcccagtgagccagctgtgccagccccgggctgacccccaccgagagccggggctctgccttcgccggccgcggaaccgggctccactcagccctcagcccgcctccagggccccagagccaccaactggggccttggggattcacgagtcccccgtattcacggtaaggggccatccgagaagcccacagcagaggggcctccgtccgactccatctgagaccccctcctccgaggcatcccggggctgcagcccaccccgcccccagcctgccccggcggccactctgctcccagaacgccgggcgcccacctgccccgcagctcggccctgcgctcagccggctccgcgccgcctcccagcgcccgcctcccgcgcaggccacgcccccgccccgaggcccccgcggccggttccccgcgcgccactcccgcaacgccgcacgcgctgtgcgctgggcacgcactgacctccttgacttcagagcggtgacacgagggcccggactcctgctcaaaagccgcccaacacaggcccacgcgggggtgccgcgcccagcactggcgcgaggccatcgcc

SEQ ID NO: 24430 - DNA, 277 bp, Homo sapiens
  chr3:195637231-195637508
  hypo
cgctcggattcccagcggcggggcagcctgcaggccctgttcccagcccacagacccatgtcccagcccaaacggaggcagccctgggcagcgggcgcgtggagcccaagggctcagggccactcagcccttgttactgtccctcatctagaaaatggatgtaataacaaaacagttcacggtaggtggcaagatcagacacatcggaaactgtgtagggctggctctttctgcgctcacactgtccagcaatgggccccagggacttggccagagc

SEQ ID NO: 24431 - DNA, 254 bp, Homo sapiens; identical to SEQ ID NO: 7364
  chr3:195640380-195640634
  hypo

SEQ ID NO: 24432 - DNA, 464 bp, Homo sapiens
  chr3:196754412-196754876
  hypo
cgccctctgagcagcgggtcctcctgaggctcccacctcctggcctgggcccggcgggaggcaagctggcctcgtggccagggagactcgggagatcctatcggccgggcctggcagggcgaggtcggctcctttcctggtgaatggggctgttgtgtgctccctcctgagtcacagccctcttgtctggcagggtggaagggagaggactcaccgcgatgagctggacgcagtggtcggcggaggtgccccggacgcagaggagggagggctggatgcccgcttcccggaaggcctcgctcatgttgccgcacttgtgctgctctgggtccgaggtggcgcaccaccgcacctccatgccaccgagcactgcgggcaggggaccgtgaggcccggctcccccgccctgcccagccccggcccaccatggagggtggctccagcagttctgtgtgagcccattc

SEQ ID NO: 24433 - DNA, 332 bp, Homo sapiens
  chr3:197327021-197327353
  hypo
cgcgcccggcccaattcaacattctttacttttctagtcataacctattttcagctggaaaccagaaaggctggttctatgtgcagatggcaatgctgaggtttagaggtaaaacacccacctgaagtgaatagaggctggactggaacccaggatggctcacctggaggcggcgctcccatacggcacccggcagcctgttttgtacaggaacaatacttgccttcctccgcaaaaaacaaacaaacaaacaaaaaatgcaggggttgaaaagaaaactgcctgagctgaaaagttttgttgttgttgttctgagacagggtttccctgtc

SEQ ID NO: 24434 - DNA, 295 bp, Homo sapiens; identical to SEQ ID NO: 7367
  chr3:25728355-25728650
  hypo

SEQ ID NO: 24435 - DNA, 81 bp, Homo sapiens
  chr3:3167655-3167736
  hypo
cggcaaaagtaatcccggcacttttgggggccgaggcctggggaacacgaggtcaggagttcgagaccagttggccaacac

SEQ ID NO: 24436 - DNA, 419 bp, Homo sapiens
  chr3:38035641-38036060
  hyper
cgcggaagcccctgcctagcgtctccccatggcccttggtacatcctccccttctccacccgcacctccgtcttccccgcaacacatatacacaaacacccggaccctaggtcccccagagcccgaaggccacgcagggggcgtccagcgacctgcactactgggtcgggaagcaggcgggtgcggaagcgcagggcgctgcggaggccttccagcagcgcctacaggacgagctggggggccagaccgtgctgcaccgcgaggcgcagggccacgagtccgactgcttctgcagctacttccgcccgggaatcatgtgagtgcgggggcgaccggggcaggagggagccgtggaggcggtgccttggctggggcagtcttgggatggccatcgtccacatccctgaatggggcaagcc

SEQ ID NO: 24437 - DNA, 831 bp, Homo sapiens
  chr3:42814273-42815104
  binary
cggaagtgcacgccgtcgggtcgcatctttcagtgcggtgcgagagggcccagtggcagaggcccagcaaacagcgcttgtcaggcggacctgagttcgagttctgactgtgccatctacgctatgactttggggcaggcgacccaccctctgcgcctcattaacccatgtactgcatggaaaataagcgtctgcctgggttagaagagggctgtgtgtgaagattcaaaggacgaaggggaagagtcctcgctgggcgcccagcacgcggtgagcgcccggccagtggcagcgcgctcgggctggggttgcgctcgggctcggttccgcgcccccggcagctgcgggctttcccagctccggcccgggcccttccgctctccccggcacttacagcggtctctctccacttctcccttctaggaccgcggcggctaggtcacctcctccggacgccgacacgcgctgccctggcaaccgtcaccagggaaacaagcgacgtcacttgcgcgttttcaacgctactctacgggggccgagggggcgccaagagttctgaaagtgacagaggcgctgatggcgcgctgggctggatccaagcgagcacgatctcgagtgcgctggagattttaaatcttctggagtatatttttaaaaaagttttgtggaccaaacgttctgcacagagatgcccattccgctctcctgttggggagttaaaaagcgaacgatctcaccatgaaatttaaagtagccattcagatatatttgaaaaatgtaaaacagtgtggggaaaggccatgttatgatggtgagtgaaggaagcaggac

SEQ ID NO: 24438 - DNA, 191 bp, Homo sapiens; identical to SEQ ID NO: 7368
  chr3:4347767-4347958
  hypo

SEQ ID NO: 24439 - DNA, 972 bp, Homo sapiens
  chr3:48693261-48694233
  binary
cgctctgctgcactgtcgcgaacctgggcggggtgggagggggttgcgggggtgggagcgtcaggagcagggtaccacttcacacccaccatccctgcgaggagaaggggctggggcgagagaggaagcgacgagggacggcgggaccgaccggggggacgcgggtgcagcgaggtcaggagaccccgggcggggcgtcaggggaggggcggtgtctcatggggatgccaggacggggcagtcaggaatctgagtcagggcgggtaggtgggggcggcggggaggcgctcagacacggggcgggcacctacgagagggacagcgtaaggtggaatcgctgccgcaggccgcgaaacatgacgaacgaactgggcgggaaggagcgcgcagccacctcgcagcgcgggccctcgaaggcgccgcctgccgggcactggcagcgaaagccgccgttgggcgcgtcggtgcaggtgcccccgttgcggcagacgcccggcacgcagcggccggcctcggtgtccagctcgcagtcctctcctgggggccaagccgcggtcagaggcggtcacgcccacgcccgcccctgctccggccccttcaaagaccgcgcgcccagaggccgggtgccaagacccccgaaaggtcgccctcttcggtggacacgccccttccgtctggccccgccccctccccagtctcatcgctgcctcggcggcggccccttccggccacgctctacggcttctggcctaagcgcgtccataccaggccgtggcctcagaagtgactcccagtactcactcgcattgtggtcccgcccccagccttggcccgtgcttcccccagctctggcccggcgccctgctcaccggtgaagcgcgggcggcagacgcacgtgtagcctccctcgcgccgcgcgcaggctccgccgttgcgacatgggttggagtagcagaggtcgagctcggtctc

SEQ ID NO: 24440 - DNA, 1429 bp, Homo sapiens
  chr3:48698806-48700235
  binary
cggccaccatcgtggtggccgagaggcgcggcgacccgtggtcctgcgcggtcacacgcaggtagtgacgctccatgctctcgcggtccagagctgccgccgtacggataaggccgctctgcgggtcgatgctgaacagctccagcgagcggctgttcatgagtgccgccagcgagtagactaggcgcccggcctcgccggcgtccgggtcctgagcaaccacgcgtagcaccgcggtgcctgctgcctcattctccggcaccagcgtctggtagttgtactgcggaaactgcgggtggcggtttgcggcgcgacgaaagcgtgcccggttcgccgaggttactttcctggcttcaggacgggccgggagtcccgggggacgcggcccggggcgctgcgggaggaagcggcagcggaagagaccccgggagcgcatgcgcttgggcgccggctcgggagctgtccgagactcgcggggtgctgaacctgatgcaggagctgtcctcgccgtgcgtggtgctgaatccagctcggggccagatcccgaggcccctggaagacagttccgccggggggctgtcctttctgctccggatgtcgtggctctctcgccctgacccttgctccctgttgcccataattccccacagcagcgcgcggtgcccactcttttgcgggagcctgtcccagcgttccgctgggaggacaccggcttgggaccgtggtgccgaatcaaaaagtctgaagggaggggcgagctgttccccgagcccgggacccctgaggacagagcccctggtgacagactacctctttgcaaaggtcctgtccgcccgcaagaggagacctctgggcgccagtataacacagaccctggtccctgtcctgtctctcgttcgcggctgcccaatggctggacgccgtgttcaatccccagctcctcattcggctgctcagggggccctcgactattccgggcgctttgccttctccctcggagccccacgaagataggctccctgacccccaggccaggccccccatcctcccggaccccggaagactccggacaaagagctaaggctccgccaccgatatgcgcccttggccccgtagtggcagctaagcctgggtcccagccctggtgcccaccgccccccagctcctcctggctgagggggaacaaagagaggagaaggagcaggagtatgggggtcgaccgtcccccgaggccccgccacggcggccgcctcgccatcatcccccgcctccctgcacggcctccaccgccccccgccccggtccgggccttgggctggccccgccgctcgggccccctcccgggcccctgccgccgccccgggcccccgcccctccgcctgtctctccgcacccccgccgccctctgggcaccatctactccgcggcc

SEQ ID NO: 24441 - DNA, 277 bp, Homo sapiens
  chr3:50377892-50378169
  hyper
cgccgaccccctctgccgcgacttgacccgcggcgactgcgctgccccttggctgccccttccgctctcgtaggcgcgcggggccactactcacgcgcgcactgcaggcctttgcgcacgacgccccagatgaagtcgccacagaggtcgcaccacgtgtgcgtggcgggccccgcgggctggaagcggtggccacggccagggaccagctgccgtgtggggttgcacgcggtgccccgcgcgatgcgcagcgcgttggcacgctccagccgggtgc

SEQ ID NO: 24442 - DNA, 59 bp, Homo sapiens; identical to SEQ ID NO: 7371
  chr3:5165842-5165901
  hypo

SEQ ID NO: 24443 - DNA, 1220 bp, Homo sapiens
  chr3:53032401-53033621
  hypo
cgtctcaaaaaaaagaaaagaaaagaaaaaatgtagatcaataatattattttgctgacgcattggagaaagtaaaggctgggtgcagcttcaagctgaggaccacccaccatgcccccatcatggtggttcccctaggtgctgaagggcccagccatagctctcgccctcgcagggtccctccagggtctctgctgtttcctacctaggggtgactgcagccatggctaagaaagcgccagcgcccacccacctgggccaatggactggttctgctcgtgccacgctggttctgctcctcgccatctcggcagttcagaaagaaccccaacgagcttgtgatctcccgggtcctgtgggcgtatcaacagggggccagccctgtccctcaaccctggggagctggtgctgccgatcgacctgactggcccacaacgtcttcagctaccactgcaagggcctgcggggtgacggctgtgcagcgctgctcgcctagctgttgatcgcctggctgttgatgggctggcacccgcagagctgccctgccggccaccgaccaccatggagggagcattcagctggtgcgcgagctgggtactaaactggctctactgtgagccgccctcggcccctccatctcctcttaccccttgtcatccatgcgtaagccggggacgcccgaggacatgctcttcacccaaggcctgcgccggcgtctgctgatcaagggcccagtacaaaggccgtcatggagatccaggccttcgccaacagcggcctgttctggtgcaagggccagccgggcagcccaaggacctcacgactggctgctgggtcaaggcgttcccggggtgaaggtggataagcagaccaccaagggctcctggaaccctacgtgaaggaggccaagcacagccgtggacaccggcctgaaggctgggaaaggagccgacgccccacctcctctgaccaggcctgcggggaggagccacccacgcgccacagcaagtcctggacctggccctgcattccagggtggggcagggaggctggattctgagagagctgcttccggattgcgttggggtagtcaaggagctcgggacatcgcaggggaggcaaaaagccttggccagtgctcttttggtgtatcccttcagcttccagaggggaagccacaccctgatgctatgttcaaacgctccagaagacaggagttc

SEQ ID NO: 24444 - DNA, 261 bp, Homo sapiens; identical to SEQ ID NO: 7373
  chr3:57679351-57679612
  hypo

SEQ ID NO: 24445 - DNA, 1484 bp, Homo sapiens
  chr3:61546692-61548176
  binary
cgctcggctttgtttcccggcgggggaatgcgctgtgttggaggcgcgaacaggagccgcagacggtgagcctcaccgctgcaaatgccagggcagtgaagccgaacagaaaaccccatcgctttaaaaaggcagctgtccgccctccccctttcccctcgccagggcgaggggcccctcaagtccgggatccgcgagctgcgcggaggatctcgccaaacccgagcaccgtgcggcgtcttttaagagctcgaacaacgggaatccagcaaaaaacaagccggccccagaaggcagcctccctcctctctccgcgcacgggctacaatcgcccccagtccccaaactgtcccagtagaggccgcgcggagagagcagagccgagggacccagcgcaaggcgggagccaagcgcggctgctttaagaacgcggagagcgcgcgcccgccgccagctggcccgggctgcgcgcccccgccgccaccgcgcgccccctgttcgctcgctccttcgctcgccggctttaaagtctctgccaggatccatgctcacatgttacttcctgtatggaggcatggccagtttccagccccgcgctcttcgttccttcccagcctgcgccggagccacaactttcaggagcatggactgaaggcgccctcgccccagcgcccctctgagatcctttgtgttttcctccgtttcctccggccgtttctattttggggggctctccgctccccctgcctctcccctccccttcccctctcgcaaacatgcctccttccttcccggggccctggaaggagctgcctgcctgaagcccggagacgccgcgccgcgctcagccccgccgccgcccgccggctctcgggctgtgctgcgctgccgactcaagttggggatcctcggctgctcgccgccgccgcccgcggtccctgcctgccccaggcccggggcatcgccgccggccgccgactccgcgccctgcccgatcggctctctcctttttaaacggaaagcagcctttctccgccgagaggatcgtccccagcgtggctctgcgttcccggtcactttttgagattttccggggggcgctcggcggcttcccggattccaaggggactcgggccgccgagcgcggggggcccgtggagcgggcgagccggggaagcgccccggcttagcggaggctcgcacggaggcaagaacttattcaacaagtttacctccctgctttcctcttttcgatgtgcgttttcggacatgcggaggttactggaaccgtgttggtggattttgttcctgaaaatcaccagttccgtgctccattatgtcgtgtgcttccccggtgagtgccggccgccgaggggatgcggccccggccggcgcgcgttggggatgcggagttgtcgcctgggcgcggagctccggcgcccgtccgggagaccctggagagggtggagggtggcccggcgccc

SEQ ID NO: 24446 - DNA, 1570 bp, Homo sapiens; identical to SEQ ID NO: 7375
  chr3:66550318-66551888
  binary

SEQ ID NO: 24447 - DNA, 768 bp, Homo sapiens; identical to SEQ ID NO: 7376
  chr3:67048599-67049367
  binary

SEQ ID NO: 24448 - DNA, 63 bp, Homo sapiens; identical to SEQ ID NO: 7377
  chr3:72703941-72704004
  hypo

SEQ ID NO: 24449 - DNA, 113 bp, Homo sapiens; identical to SEQ ID NO: 7378
  chr4:100555198-100555311
  hypo

SEQ ID NO: 24450 - DNA, 207 bp, Homo sapiens; identical to SEQ ID NO: 7379
  chr4:10090148-10090355
  binary

SEQ ID NO: 24451 - DNA, 733 bp, Homo sapiens
  chr4:10462790-10463523
  hyper
cgttttctcaactgcaaaacaggagtaactggagcaacctttcgtggagggtgccaggcgctggagcgtggctaaggcagggaccacgtcccagccgccctttcccgccctgcggcgcaggcccactctcttggctctcctggcccgcacactcagctcggccgccgcggctgccgcggaagcgcgcagtgaggctagtggggccacgagcggcgcgctgagcatgcgcgcccgatagagcctcgagatgcgccgggccgcgctgcgctgcagtaccgcccgcggcctgcagtgtcgctgcgagcccggctggcccagctcggcgtgtagagctctaccccgcgcggcgggcggtgcagccccgcgctcacctgggcgtcttcgctcccgctcgccccgcgcttccgaaaatcgggaatgtaatgttttgtttttacattccaatttgctccctccccaggctggcgtggaatccgagggttcctgatgactgcagctcctcgcccctcccgctgtgttcccgccgcctctgggctgaaagcgccatcaggacccgtggcgcgtgggctttgttaagtcattaactgcttgggacatagcaggagcatggtgcgcggcacagaacaggcttggcttccacggcccatccaggcggagccgtcagcgtcccttgcctagaccagagctctggaaagcggagaggcggacaggggccgttccccagatctgttcc

SEQ ID NO: 24452 - DNA, 60 bp, Homo sapiens; identical to SEQ ID NO: 7380
  chr4:104854506-104854566
  hypo

SEQ ID NO: 24453 - DNA, 442 bp, Homo sapiens; identical to SEQ ID NO: 23257
  chr4:113443992-113444434
  hyper

SEQ ID NO: 24454 - DNA, 695 bp, Homo sapiens
  chr4:113444864-113445559
  hyper
cgaggtgtcagcagtaatttaaagaaggtattcagtccgccagcgtctcttttctccgtttcccccttccacccctcccacccctccctcatttacgccttcaagcagtatgggggcggagaagacttttaaaacaaaacacaaaacaagatcttttgcgagagcggtgtccgagggagccggagcgctgacaggtgtgcaggaggcgccccctacagcctgctgcccctctcggggttacactcccttcctgccgcacctgagcgttttcaggacgcgctctggtcctggagggccgggcccgcccgagggcagccgattcacggcgggcgcgctgcgaagtcggggcgccccctggtggggcacggaggtcgagggggtatcctgagagcaccgcggggcttcggggccgcgggggagctcccaagacagccggccaccgggggacagtggatttggggtctcctcgaggtcggtccggggacgccctctgggaagcttcacctgcggctcaggttacaaacgcacagtgcccagccacgtcctcacctgcagtttcaaaagccgaaagaaacaaacacaaaacacctcccctagggttctgatagttgccaagtttaagaacaaccggatttaagccccacgggtttcgttttcttttgttttgaggatttagcaaatcagctagaagtgac

SEQ ID NO: 24455 - DNA, 50 bp, Homo sapiens
  chr4:113559139-113559189
  hypo
cgtgcatgtacctattaaaacattttgcgaggctgggcacggtggctcac

SEQ ID NO: 24456 - DNA, 978 bp, Homo sapiens
  chr4:122871204-122872182
  binary
cggggaagtgagctggtggcgctttcatcccaaaggatataccttccctccatttcctgggccgtttccattccacgcttatcttcagcaataactgaaccacatcgggatgcgtcgctcatttaaaatcagaactcttccctatgggatctactcccagccactgattgtgttcctgtgttctaccggcaggtccagcctgaccaggcgcagactctgcgcgcgcggagcagcgcgcgatcctggggatgcaggggtcatcccggaggtctcggcctcgggcggtgggcctctcgccggcagcagggggcgctgcagaacctcggtccccatcctggagaaccacctccccggctcagccggtctgcgccgcccgccaccatccgaccccaagttctctacctagttctgagcgttcttcctaaaaaagacagtaaaccctgcggcactcccagtgttacgtgacagaaaaaatacagagcatctcaccctgtgaaaccgatcaccctctttttatcttctctgcgtctcgcactgattaaaagctgtctccaagattggaaattaagaaaagttgctctttctcatgcattagcgcgccgaccgctccttcgtttagaaagagagagagggaaagaaagaaagagaaaaagagagcccgcgcgccggggcgcgagccgctgaccctgcaccgcctgggaaccgcagtcaaagttatcactaaagcggttccccggctgcccgatgcccactctctccctcaggggaccctatagggcttcggttccagttttaccccaaatgtgactgaaccacagagagacgaggcgcctgggcaaaccttcaacccacaccctgtatcgcactgtcccctccctactccccacttctctgcccccgcccccgacgtcccagagcgtcggaggggacccaagtccacgctgggacgcccgggaggagttcagggttcaagtgcgc

SEQ ID NO: 24457 - DNA, 950 bp, Homo sapiens
  chr4:123747967-123748917
  binary
cgccgcggcccggcgggtgccagattagcggacgcggtgcccgcggttgcaacgggatcccgggcgctgcagcttgggaggcggctctccccaggcggcgtccgcggagacacccatccgtgaaccccaggtcccgggccgccggctcgccgcgcaccaggggccggcggacagaagagcggccgagcggctcgaggctgggggaccgcgggcgcggccgcgcgctgccgggcgggaggctggggggccggggccggggccgtgccccggagcgggtcggaggccggggccggggccgggggacggcggctccccgcgcggctccagcggctcggggatcccggccgggccccgcagggaccatggcagccgggagcatcaccacgctgcccgccttgcccgaggatggcggcagcggcgccttcccgcccggccacttcaaggaccccaagcggctgtactgcaaaaacgggggcttcttcctgcgcatccaccccgacggccgagttgacggggtccgggagaagagcgaccctcacagtgagtgccgacccgctctctccgcctcatttccatttcgtgggttctcgcccgctctctcccctccagcctgcaccctcctcccggatcttcactgcgaccctagcgctccgtgtggtttctggccgcgcggccctcggcggtttcgggttcaccactcaccccctcctttccgggctgcggcgtaggcccgggtgtcccctgggctttggggtgtgccaatttgccctgtaaaccagtacccccggcccggagccgcggcgcgccggggcctcgcggactggctgtcttcccgcggacaacctgtcgcgtcggggatgcccgcggccccgccatgcagctctggccgcttctatctgctgcgtgctgtcccggggacaaagacaggaaggaccgcagcagaacgaaac

SEQ ID NO: 24458 - DNA, 125 bp, Homo sapiens
  chr4:123866914-123867039
  hypo
cggagctgttcctgttcggccatcttggctcctccccgaactttttgttttttactgtctagtggcagaaagtaaatatgtgaaaataatataaaggtttggcactaagtcacttatatactaac

SEQ ID NO: 24459 - DNA, 443 bp, Homo sapiens
  chr4:1290581-1291024
  hypo
cggaccccactgcctcgagacgctcccatcactcggctcccgtgacaccatcctctgggctctccccacccctcgctgcatgtcctcacttgcctatgctgtcttctctagtcttggaggccttttgttttatgtcaccagccagccctccagaggttgtgtggcttcacagacggtctccaagctcctgtccccacactgctgccctccccaggcctctctccctgaggccatcccgtgtagtcacctcccggagctctcttcgcatgtctggaaggcagttcaaagatacgataccaggcgcaaaaccaaatgccgcatctcggccttggggccccagacgagccccagacctgccttactaagccacccttcccaagtcagttgacagcgatgtcccccggcacttgttcagtgacagccgagaactcggaggttttctc

SEQ ID NO: 24460 - DNA, 167 bp, Homo sapiens; identical to SEQ ID NO: 7385
  chr4:1326509-1326676
  hypo

SEQ ID NO: 24461 - DNA, 878 bp, Homo sapiens
  chr4:140655885-140656763
  hyper
cgtagggaagctttatttttctgaagtgttttcaagaacatgcatagtgtttgggtgagaggggccagccttgctggcggcgaaccaaagagcagggaatcacaaaagacggccggcggcgagcaggctggggtgacggggaccccgtggataacgggcttgaggacgcccagggcttcagccttttccaggcgtccctcgccggggcaacgcagagcagctgccgttcttcccgcgccccagcagatggtggtgtcagcccggcctcgtgcccggccgccgctgcgcccgcgccccctcccctcgcagatggcttaatcagggctcccgcccgcccctccgcggcccccgccccgcgcgtctgggcgagcgctgcgaacgtggagccaggcagtcaagtgttactgcgtacagcaggtagcctggcaactgagagcacaataccgagcagatggtgttcgcacggcgtgatggacatcacacacgacagcctgagacaatccaggaattccctggtgactcgaggccctctttgcacaaaatgagttctctctccattgccgtgtatctctggggttatctgcccccctcctccgactgacactgaactggtttctcattaccgacttttcttccagccggaggggaggaagaattcaagtgggggagggcgcgggaaggggacgtggagggaaacggaagggctgggagtggggtaggggggcagtggcgacctccggggggggagggtggcggacaccagaccccagggccgacagcccgggagggaccgggttccaggaccccagctgcacaaagccggcccggggagggggcgataaggagcgagcctcgggtcggcccggcaccgctgcttc

SEQ ID NO: 24462 - DNA, 116 bp, Homo sapiens; identical to SEQ ID NO: 6592
  chr4:152591291-152591407
  hypo

SEQ ID NO: 24463 - DNA, 64 bp, Homo sapiens
  chr4:153247365-153247429
  hypo
cgagaaccgctaacaactctgcagagggagaaacagaaaaacaaaacaaaacaaaaaaacccac

SEQ ID NO: 24464 - DNA, 111 bp, Homo sapiens; identical to SEQ ID NO: 7388
  chr4:154421947-154422058
  hypo

SEQ ID NO: 24465 - DNA, 1047 bp, Homo sapiens
  chr4:15780048-15781095
  hyper
cgagttcagcccggtgtccggggacaaaccctgctgccggctctctaggagagcccaactctgtcttggcgtcagtatcctggtcctgatcctcgtcgtggtgctcgcggtggtcgtcccgaggtggcgccagcagtggagcggtccgggcaccaccaagcgctttcccgagaccgtcctggcgcgatgcgtcaagtacactgaaattcatcctgagatgaggtgggttggcgactaaggcgcaccggtgggcactgcggggacagcagggccccgcgcgcagggaagccgcccggatcgcccggaaccgggcatcttccgtggcgggtcagccgagagcccgccgggtggtgctgagtagggagtcccgggctcggggctccgcgggccgctttcaggagcagctggccttggcaccgagcgtgcccgcgggaggcgggggggggcgctgctcggtggctctgctgcgtagccggtgaacacttggcaccgatgcccgccttctgggcaaggtgccctgagcccagcccctcgccgggctgcagcccaccctcggcgcgctcagcccgcttcaccgcttcagggacggaatagaactcgcagatgcagggtgtcgctgacattttcaactttttctgcggtttccgcccgctgtctctgacccgaaagtgcccccggacggttacagaggacacttaagtggtttgcaaagcctgtggtaggggaggagggtgtagaagggccaaaccacggaacttagttttattcatttatataaagcagcactccgattctttttgcgcggcctgaaatgcatgtgaccagagaagtaattaacaaaacaatgtcaacttctaaaaccgagacattacttagatgataaggcgcagcaactcggtgaatctgtacaaaccttggaaaaaaaacacattagtctatgggaccttccagttttctcatgctcctttccagctactaacctctcctaaagggaacaaccactttttggatttgattcccaggcctcgctttcaccgggaaattatc

SEQ ID NO: 24466 - DNA, 222 bp, Homo sapiens; identical to SEQ ID NO: 23614
  chr4:1791229-1791451
  hypo

SEQ ID NO: 24467 - DNA, 140 bp, Homo sapiens; identical to SEQ ID NO: 7392
  chr4:185765461-185765601
  hypo

SEQ ID NO: 24468 - DNA, 89 bp, Homo sapiens
  chr4:186347822-186347911
  hypo
cgaaggggattgcagaatatctgttaaataagtgaatgaataattttgtaaatgttgctcaataagagttaagtagtggcgggccgggc

SEQ ID NO: 24469 - DNA, 128 bp, Homo sapiens; identical to SEQ ID NO: 7393
  chr4:186348212-186348340
  hypo

SEQ ID NO: 24470 - DNA, 169 bp, Homo sapiens
  chr4:186348482-186348651
  hypo
cgttgtatttagttatgtttcagtttaaaatgaatcttcacttgcccctttggtgttacgtattagcaatgattcatgctcaggtgagccagtttcaggcaggcttgcagagaggcactcaaacagcttgctttaaatttaaggtaaaaggccgggcgcggtggctcac

SEQ ID NO: 24471 - DNA, 58 bp, Homo sapiens; identical to SEQ ID NO: 7394
  chr4:1911667-1911725
  hypo

SEQ ID NO: 24472 - DNA, 127 bp, Homo sapiens; identical to SEQ ID NO: 7395
  chr4:2524742-2524869
  hypo

SEQ ID NO: 24473 - DNA, 124 bp, Homo sapiens; identical to SEQ ID NO: 7396
  chr4:2907414-2907538
  hypo

SEQ ID NO: 24474 - DNA, 1337 bp, Homo sapiens
  chr4:3445901-3447238
  hypo
cggaggtccgcaggggtccaggggccggagcaagtccccggaggatgggagaacaggtggctcccgagtgcagggcaggggccctgcacggggacagcaggtggcagggtgtgagggcttactgtgcacccctcagagaaatgctttgatgagacccgctacgagtacctggaggggggcgaccgctgggcccgcgtgcgccagggccacgtggaacagtgcgagtgcttcgggggccggacctggtgcgaaggcacccgacatacaggtgcgccacggggtgtgagccgtgccactgacccctgacgggtgtccctgtccacacccgagtgggaggaatggcctgaggtcacccagaaacaagggacaaggggtggaccccggccccgactccgctgtcgtggggcactgcgcggcccctggcccagctcctcggccctgcccccagcttgtctgagcagcccttgcctgaacgggggcacctgccacctgatcgtggccaccgggaccaccgtgtgtgcctgcccaccaggcttcgctggacggctctgcaacatcggtgagtgggtcagccccccggggtgccctggggcagtgccgggtggacccaccgtgggccggcctcactgcccctctgcccgcagagcctgatgagcgctgcttcttggggaacggcactgggtaccgtggcgtggccagcacctcagcctcgggcctcagctgcctggcctggaactccgatctgctctaccaggagctgcacgtggactccgtgggcgccgcggccctgctgggcctgggcccccatgcctactgccggtcagcaccacgccgctccaggccgccgcatgcggggcaggcaggatttgtcctggggagaggccccccggctccctaggacccaggcggggccagctccgtccagacaggccccggaacctctgcctgggaggctgcccgagggagggccactctcttcccactgctccaggtgcggggaaccgccctgctgggggttccgatgccccctccccatgccctcttcgaggggcagtgtgactccctgccagcccccacttatgcaccgcaggaatccggacaatgacgagaggccctggtgctacgtggtgaaggacagcgcgctctcctgggagtactgccgcctggaggcctgcggtgcgcggctggcggggggtgctgccttgggccccaccgaggtcacagcagttttccccgtgatcctcctagcccctccgcacacctggctactgcatctctgacaaatggggaaactggagctcacgggatcaggctggtccaaggtcacgcagtgggtc

SEQ ID NO: 24475 - DNA, 528 bp, Homo sapiens
  chr4:39447953-39448481
  hypo
cgagtctgtggcttcgtccccacagttcagcgatcctcatctgtacgtgtggaacgccactggcaacagactgttgcaccgagtggaaggggtgaggctgaaaacacgacccgctcaatgcacagattttgtaaacatcaaaaaacaacttgagatgttggcaagaatgaaagtcacccactaccggtttgctctggattgggcctcggtccttcccactggcaacctgtccgcggtgaaccgacaggccctgaggtactacaggtgcgtggtcagtgaggggctgaagcttggcatctccgcgatggtcaccctgtattatccgacccacgcccacctaggcctccccgagcctctgttgcatgccgacgggtggctgaacccatcgacggccgaggccttccaggcctacgctgggctgtgcttccaggagctgggggacctggtgaagctctggatcaccatcaacgagcctaaccggctaagtgacatctacaaccgctctggcaacgacacctacggggcggc

SEQ ID NO: 24476 - DNA, 1936 bp, Homo sapiens
  chr4:42152717-42154653
  binary
cgcaaccagcccatctcgctccctgcaggcaggcagtgggctgctttgccgggcagcgcccgcagactcgagataaaggagaggagtcgcggaccccagagtgggtgcctcccacgaggcgtttctgtaaggctcgggccgagatgctcgggaggggcaggaccccgcggcgcggcagcgtgccacggacggggacgaggggatggcggggacgacgacgtgggcggtgggagcagagtgcctgcgactcccggggcaggaaggaggggcgggatggttccccgcgcccgaaatccacggcgtggcggacgcggaggagccccgagtctcacaaccaaggggtgggaaggaaaagggacagagcgagacagagcgcccccgagaaacacaggcgcacaaaaaaagacagaaggaaaaacggaactgagagccagccagcatggactgcgacagcgtgagagtgcatcaaagaggtggcgaagaaagcactagaaggcaaaggagaagtggagagaagaagaaacaaatggaggaagaaggagaaagggaaaaagcagacggaaaaagtgaagtagtacgagggcgtcccagcggggcggcccgagaagctccagcttcttcccgagcggccgccgctatcccccgggggggcgtctggccccactccggaccacgcccgagcgatcctggtcgccgactgccacagccgtgcttcccggcgcgggatccaagccgcggagccacctgttaggcgcgcgccgtcggaagcccaggcgcggcggcgctggagaatcctctcgaagtttccgggtgcgcggggaggccccaggtgcgccccgacatcccgacacggcccagcacgggtaagtgtcggcggccccccgcttctccttcctgggtcccctcccgctgcccccggccgtggcgggaaggaaagttgtgcggagagttggtacctgcgctgagctccaggctggcgctgtcgctacccgtgccgccggtgccggcggccgccgccgcgcctgggccatacctgacgacagcggcgaacgaagacgacgaggaggcggcgggggacgcgggcggcggctgcgccggagtcctcaagtggccctgggatgtggcgggcgtgcaggacggcgacgacgacgaagcggcggcggcggcccggccgggcccgggggggtaggagctctgcgcctggaactgctgcggcggcggctcgctgctgctgatggagacggcggcgtgcggcgcgaagggcggcgggggcggcgggggcgcccgcacgtgcggcagctccaccagggtgggtcgctcgtagcgcttggccagcgccggtctcttgctggggaacgtcttgaggacgctgtaggggctgcgctgcttgtagattttggggacgctgggcccctcctctgccggctgcatctcttcctccatccggcgcctcggggccggtccctcggagcacgtcccctccccgccgggcgccgggctccgagggtgcctccgccgcctgcccgccgggtctgccctggtgcgcgcgtgtgggagggtgtgtgtctgtgccgtggccgccgccgccgccgcctgtcgctgaggctggcatcgccgagcccccgcgcggggggctgccgcccgagctcctgattgacaggctgcctcgccaatgcctggagggagaaaggaggtaaagagcaagtgtttagggtaatatctgctaatgataatgggggcggggcggggcctggcgccgcagccgcccgcggggtctgcctggcggctccgcgcctccgacggggagcgggggaagggggaaagcgaggacctggaggacgcccgggaactggtgaagaaggtggggatccgggatctggctacggcgagactttagagacccagatgtggactcgaggcttctgcggctgcgggc

SEQ ID NO: 24477 - DNA, 1371 bp, Homo sapiens
  chr4:42398819-42400190
  binary
cgggcgtgaacggagaagtcgtgctctttgaggttttgcgagctggccttggctggcagaggtgaccggcaatccttcagccggcggaaaaagtgcgagtgtgtgtgtgtgtgtgcttgtgaaaatgtgccgttcctcccagaaaaagtggaaacgtaggtggaaagctcagcacatgttggcgacacctaaaaaccatgttctcggtcctgaacctttagaagcggtatcccaggaacgagtctgagtctgtgcaacagggcacagatgattcgacaaacttcaatgactgcaccgcattcatgcattatatccattgaaaagtaaatccagcgtctccactcgcgcgcccacgtgcgtggataaacgcgggaattcggcagccctcaacgtcactctgcagagatttccgggctgtgagagagttggggtgtgcggcgggggaggggagggtctgatatcttcaggttgagagtcaagtcctgggggagcggcatgggcgggggtggccggggggaggcggaggatggagcgcgaaccagaaagcgcagaggaccctcggcccgcgccgcacccgctgtgattagctccagaggcgcgatccgggagggcggactctttcttaaccctcattgtctcctcctccctcttcctttttaaaagacgccttgcgggcagagctgtcagcaaccccgcggccgtttgtacttggccgcggcggagctgactcctgctcctgtgacagataggggctggggctgagcggccgcctgtctggggtactcgcacgtggggaacaaattcttttcctccggctcctctcgggacccggcgatcgccacaggttgggactctgtgcggcgctggagttggcagccccgggcgctatggctcccttgaggagtggggagggaggtggccggggggttggcgcgcccctcgcgcggggagcgctatgagccgggcgaagggcggcagcgacagccccagcaactgcctctgccggcgcctcccgcaggccctcgccaactcgccccgcgcaccatgctgactcccggcctgcggaactcgtagtgcagcccctgtcgcctccccggcccctgctatcccacgcaggactggcttcggccgccggggccagcagcttgcgacgtgtccctggggaggcggaatcgctgtgcgccctgagcccgggctcagcccttcgctttccagctgcgtcctgctcccggccgcccagggagcccagtggcgatgagggcactgctggcgctttgccttctccttggctggctgcgctggggcccggcgggcgcccagcagtccggagagtactgccacggctgggtggacgtgcagggcaactaccac

SEQ ID NO: 24478 - DNA, 866 bp, Homo sapiens
  chr4:42400216-42401082
  binary
cgacacgctggacgctaccatctgctgcggctcctgcgcgctccgctactgttgcgccgcggccgacgccaggctggagcagggcggctgcaccaacgaccgccgcgaactggagcacccaggcatcactgcgcgtaagtgcggggccctcggggacatatccccgcccgcctaacggcggcggctgcatgtgtgcgcgggaggatgcacagacccaggcaggtctatgcgccttcctgggtctgtgcgccagggggacgcggccgggtgggggaatcaagggatgagtgggtggtcgcgtttcagatcatggtcctctattcatttgcagtcccgcttcccgccacttgcggtctctgcgggtcggcccgcagggaaagtttgccagggacagtgaggagcgcggggcttgtgcctggtagccggggggaagacagctggagctcccgggagaagggtagtgcgggtaaagccagggtagacttgggttttggtggaggggccgagggtgtcccattgctcgcccttgtcacttcgggagcttcgggaagtgccgaatgcagggaatcgcgactcttgtcgcgcgctcatttgcagcccttcagggctaagaaaccccagtcactttttttttctgtcttaatgatagcgtttctaagccacggccccgttctgcagacttcctttcaattctctgcatcgaattaccctctccggcccaccccctattgtcacgcctttcagaaatgcccaggtcttcgaggtggagatttagaaacaagggtcgaaggggcttccccgccccctattctcacttcggaaaacacgggtcaaatttccgctgacttcagagcggaataaatcac

SEQ ID NO: 24479 - DNA, 885 bp, Homo sapiens; identical to SEQ ID NO: 23616
  chr4:513070-513955
  hypo

SEQ ID NO: 24480 - DNA, 76 bp, Homo sapiens; identical to SEQ ID NO: 7402
  chr4:56222936-56223012
  hypo

SEQ ID NO: 24481 - DNA, 1425 bp, Homo sapiens
  chr4:57521376-57522801
  binary
cggggaattttttaaaaaatcggaaccaaatctccgtggcttcgtgcagcgtgagttctgcagctcgggggacgctgcagtgtgatgtggtggagagagcatgcttcaccgctcctgccatcctgacagcgccctccctcccggcctcagcctcctggttcgccaaaccggaggactgaatttatggctagctggtctctggggcgccttccagctctgacattcccgcctagaatagatcttcccgaaggtttcgcagacagaccagaggggaccgagccgggaaggcgagacagggacaggcgagagacgctgctcccaactcgcagagggagaaagcgtgtatcccgggctgccggggagagtggaaaagaaaggactggtgaccgaggggtttctgcgcagctcccggggaaccacggctggatgggggtggcggggagaccgggcgcccatgggagcggggaagcggggaggcggcggcgggagccatgcagggtctgggcccctgggatgcgggcagaagcgatgggagatcatggggagggcagcccggcgggaggcgcggacgaacaggaccgcccagccgcgagaaggctcagcccaggcaggggtcggggcgcgctgggcgcgtgtggggacgcacctgggtctcctcctcggaaaggcctgcctcggccgcgatgaggcacagcgtggtggaatccgggtgcttgtcgaccttgttgaagttgtactccaggatttccacctggtcctctgtggggccgctcgcggtctccgccgacatggtccctgcgcgctgcggggcagggagaagcggcggcggtgagcgaggcgtggagcgggcgggacgcagcgaaggaaggcggtcgcggcgccgccgggcagccccagccccaggccgccccctccagcggtgccacggccgcgcaagtccccggtggctgcacgctgagcgggggcttacggctgccccccacccgggcctccctccctggactgagcgctgttgcgggctgacggcagagcctagcgtcctgcgcctcccgcgccccccgggaccccttgcaggaactgtatccctgcctgcgacgggggcgagatagatgattccgcgggccctcaccgacctccggctctaaggaaggagtgaaggaagcgcgggggtgattttgagaaatccccttaaaaacttcctcccgaaagggggacctcccctggggacagacttgacagatcgcgagggtgggttcgcccgagtccgcgactagccggcctccggcctccccggtaggcggccttctgtctccgcagtgggttggcgctttggggccctctccaggcagggctgcacaccccacccttcctccaaaaaagttccccgcaagacaagttacttctcaaagttggggagacggaggc

SEQ ID NO: 24482 - DNA, 201 bp, Homo sapiens
  chr4:617098-617299
  hypo
cgccctgaacctactcacctacaatcacgacgggctcctggggcaggacaaagccacaggtgaggaacgcggtgctgcgggtggaagctgctgtcacagtcgtgttagggtgagtggactatggccgcagactgtgggctcctcccagccaaccctcactcccgctagcgccccaaatcttcagtccagcaccccttcccc

SEQ ID NO: 24483 - DNA, 883 bp, Homo sapiens
  chr4:628551-629434
  hypo
cgtcgtggcggtgatcatggcagtgaacaagctcaacggcccattcttcaccagcgaagacgaagatgtgagtgtggggggcacctgggcagccgcgcgtctgcctccctgcctgcctgcccgcccgcctgttctgtgctgcgcatccacctctttacctgcctgcccgcctgcccgtgtgttctctgctgcgtgtctgcctccttacctgcctgcccgcgtgttctgtgctgcgtgtctgcctccttacctgcctgcccgcgtgttctgtgctgcgcgtccacctccttacctgcctgcccgcctgcccgtgtgttctctgctgcgtgtctgcctccttacctgcctgcccgcgtgttctgtgctgcgtgtctgcctccttacctgcctgcccgcgtgttctgtgctgcgcgtccacctccttacctgcctgcccgcctgcccgcgtgttctgtgctgcgtgtccacctccttacctgcctgcccgcctgcctgcgtgttctgtgctgcgcgtctgcctccctgcctgcctccctgcccgcctgcccgcgtgttctgtgctgtgcgtccacctccttacctgcctgcctgcctgcccgcgtgttctgtgccacgcgtctgcctccctgcctgcctgcccgtgtgttctgtgctgtgcgtccacctccttacctgcctgcctgcctgcctgcgtgttctgtgccacgcgtctgcctccctgcctgcctgcccgtgtgttctgtgctgtgcgtccacctccttacctgcctgcctgcctgcccgcgtgttctgtgccacgcgtctgcctccctgcctgcctgcccgcgtgttctgtgctgcgcgtctgctgggctgctgggctccacgtgctcatctgcacatc

SEQ ID NO: 24484 - DNA, 37 bp, Homo sapiens; identical to SEQ ID NO: 7406
  chr4:71566942-71566979
  hypo

SEQ ID NO: 24485 - DNA, 115 bp, Homo sapiens; identical to SEQ ID NO: 7407
  chr4:71706531-71706646
  hypo

SEQ ID NO: 24486 - DNA, 161 bp, Homo sapiens; identical to SEQ ID NO: 7408
  chr4:8466231-8466392
  hypo

SEQ ID NO: 24487 - DNA, 477 bp, Homo sapiens; identical to SEQ ID NO: 23278
  chr4:87281183-87281660
  hyper

SEQ ID NO: 24488 - DNA, 76 bp, Homo sapiens
  chr4:95127605-95127681
  hypo
cgtatgagaaacggtagaacgatggctaccagaggctgggaagggtagtgtggggcgggggaggaccccggtggtc

SEQ ID NO: 24489 - DNA, 1420 bp, Homo sapiens
  chr5:114514898-114516318
  hyper
cggcaatttctcggatgcagcgcggagcccagcctcccgcactgactcaggcccggcaccaccccgcctgctgagggcgtcgtcgcgggcgccaccgacggcgccagcctgcgttcctaaaggctccaggacaggtgtggggctgaaatcccgctcctccagcatcttcccctccctaccaaaagaaggctgctttaaatattcccggcctggagcagcagcagctaaggacctggaaagaggcccgaaaaggccagggcagggcgaacgaacgtgctgtccctatttaccggccacacgctctgactgcgggctgaccctgatcgcacacttcgagcctgttcactcgctgggcggaccctccctccacgctccgcgcccaggcaggcgaggtcacccactcgaagtcaccacgtttgagtagccctggttggtggggcagcgcccccttggccaacgccccgccctcctctccatcttccgacgctgggctctcgcccttcggcgtccgagagcccctattgctgcccagctggccccaaaagcgtccgaaagtcccctcttggcttatttcagagatgccacgcaataaagaaaaggcggctactttgcattccgcagctgctgggacgcccgggctgcgagcgcggctcctggattccagcctcccgcccttcccaggcgctggaatggacacggacgcccacagtggcgggccaggtagtgccggagtcgggggcccaggccgcggcgccccgcgcctcatcacttaccttgcctttagctatcaattccatgatgtagccaaattcactcatctccccagactccgacatgtttacaccccttcacaaactctggaggaccgacgcgggtgtatcgaatttgtcctttcttttctctttttctgtttttagtctgagttttgccgagctccccgcccataagctgttaaccaggaaaagaggggaagcgccggggaaagcaagaagcgggcttgggtgaaatgaaggccatcgagggctcccgggcagcctcgcccggcttgctaggatccgggtgcagcggtcggggctgcgcgatctaacggaacaaacgagggcggcggcggcggcagcagaggccgtgaaaccctcaccaggcggagccgggcgcgcggaggccccgcctcctcgggggtcgcggcagcggttcggaccgcagcggagacaaacaaacgcgcacacaaagcgggtccgcactcggctcagcgcggccccagctagacattccccggcctttatcgcatgccggcaggttggccgtccccggctctcggcgcgaagatctggaaaaaagccccatctcactgtctggaggtgcgagggcagacagaaacgaatacagaggaggcgcaacaaaggggctggctgccagcgcc

SEQ ID NO: 24490 - DNA, 740 bp, Homo sapiens; identical to SEQ ID NO: 23293
  chr5:125930492-125931232
  hyper

SEQ ID NO: 24491 - DNA, 1157 bp, Homo sapiens
  chr5:1294558-1295715
  binary
cgtcgtcgcccacgcggcgcagcagcagcccccacgccccgctcccccgcagtgcgtcggtcaccgtgttgggcaggtagctgcgcacgctggtggtgaaggcctcgggggggcccccgcgggccccgtccagcagcgcgaagccgaaggccagcacgttcttcgcgccgcgctcgcacagcctctgcagcactcgggccaccagctccttcaggcaggacacctgcgggggaagcgccctgagtcgcctgcgctgctctccgcatgtcgctggttccccccggccgccctcaaccccagccggacgccgaccccggggaggcccacctggcggaaggagggggcggcggggggcggccgtgcgtcccagggcacgcacaccaggcactgggccaccagcgcgcggaaagccgccgggtccccgcgctgcaccagccgccagccctggggccccaggcgccgcacgaacgtggccagcggcagcacctcgcggtagtggctgcgcagcagggagcgcacggctcggcagcggggagcgcgcggcatcgcgggggtggccggggccagggcttcccacgtgcgcagcaggacgcagcgctgcctgaaactcgcgccgcgaggagagggcggggccgcggaaaggaaggggaggggctgggagggcccggagggggctgggccggggacccgggaggggtcgggacggggcggggtccgcgcggaggaggcggagctggaaggtgaaggggcaggacgggtgcccgggtccccagtccctccgccacgtgggaagcgcggtcctgggcgtctgtgcccgcgaatccactgggagcccggcctggccccgacagcgcagctgctccgggcggacccgggggtctgggccgcgcttccccgcccgcgcgccgctcgcgctcccagggtgcagggacgccagcgagggccccagcggagagaggtcgaatcggcctaggctgtggggtaacccgagggaggggccatgatgtggaggccctgggaacaggtgcgtgcggcgaccctttggccgctggcctgatccggagacccagggctgcctccaggtccggacgcggggcgtcgggctccgggcaccacgaatgccggacgtgaaggggaggacggaggcgcgtagacgc

SEQ ID NO: 24492 - DNA, 709 bp, Homo sapiens
  chr5:132082800-132083509
  hyper
cgggagtcctggcccaaggcgggcgcagtctccagccgccccacccctggctgggggctctgctcagggagcacggccggcaggggggaggaggcgtgcgctaggcagcagcggggatggagggaagggagggggtccgccacccgcctgtgcgcgcccagtcctgccgcatcctgggtgcgcgccgcccacccgcggggcgagtgcccaggaggcgaggcgcggcccggtgcgccagaggtagctccaccgcgagcgttgtgggtggggcccgccgagcccgcctccccacctcccccggcggcgccccaggctgcagtgttccgggagctgggttataaaatgccgggttaagcggcaactcagactcaggatcccgctcacgacatggcctcgggcgctcagctcccgccgcagccgtcgagctcagaggtcagcgccgtccagagcccaggcgggcgtcccggcgccggtctggaggaaacagccctgggcgttcctctcccgccgtctccgggggaggcccctctgccccgaagcaaccggagcaggtgccctgggacccgccagcccggagcggcctccctccacgcggcgtccgcagcagtccccgtgcggccccggcgcggtacggcgccagccgggaaaaccgcagacgcggtccccgccgccgccccagagcaagctccgcggccggctccacagtccc

SEQ ID NO: 24493 - DNA, 541 bp, Homo sapiens
  chr5:134880146-134880687
  hyper
cgccgctccggaagagctgggatggagaataaggatgaattctggagggaaatccggcaaaacgggcattggcactaaaataggacattcgttaaggaaacaacaaagatggctgaagaatggagtatggctgaaaaaagcccactggagaggtgcagatagtcccctctgggcgccttccgaggttgggagggcattctggcccccgcccctccccgccgcaatctgtcgggacccgccgggtttccatatgaagggtcgagccggcgccttgggagcgctgaatggccgctcgcggtccggcgggcgcgcacgccccgcggcccgggctggatttggccgcatttgcatagcaggtgctgatgcttgtccattcttacttaaagaagttttaatatgggataaattaccaggaactaggagctgacgtgggcgggaaaaaaggaatcgtgtcgccagccagtcttcttaccgctgcctggcctggaaggataggaggggcaaggagagaaatgcgaagtaagattcgattttaaaagtc

SEQ ID NO: 24494 - DNA, 391 bp, Homo sapiens; identical to SEQ ID NO: 7416
  chr5:135091190-135091581
  hypo

SEQ ID NO: 24495 - DNA, 121 bp, Homo sapiens; identical to SEQ ID NO: 7417
  chr5:137912553-137912674
  hypo

SEQ ID NO: 24496 - DNA, 744 bp, Homo sapiens
  chr5:139227513-139228257
  hyper
cgagtcctgcttggcccgcgggggcggcccgcggctgtgtctgctgctggcccgcgtgctgtggctgtccagtgagtagtaagtcctgctgtcggccgccgggcacagtggcggcgagtccgagcgcagcgcgtcgtgcgccccacgcaggcccaggaaaggtgtgctctcggccgccagcgccccgtccgcgtcgtccgcgtcgtcgtccgacgccgaggctgagccgccgcccgagccgctgctcagcgacagcgagtccctcgccgcccgtgcgcgctgcgccgccagcccgttgaggcgcgagcggcgccagcgccggggccccgccgacgtcctgcgggacgcaccgcgcgcgcgcggccgcggcggcggcgggggcgcgcactcctgcgtggtctcgtactcgtcgtcctcggggatgcggaaggggctggcaggcaggctgcccaggctgccgccgagcgcgcaggtcccgcgccgcggtccgggccccgccgcggggtaatagtagctgtcatagctgcgctgcatgtctgcgccgggcccgggcccgggcccgggtccgggtcccgggccggggggcgccgggtgccgcagtaacggctgctgctcggccaggcggtaactgatgggcgccgccggcggcagcgacacggcgtgcgccgagttgggggacgtgatctcgaaagttggcacctgcgtggccagcgagtagtggaagtccacgggcgagaggcgcgc

SEQ ID NO: 24497 - DNA, 399 bp, Homo sapiens
  chr5:141931151-141931550
  hyper
cgcagctcattgcagccccgaggaaatcaccgggggagggctcgggagtgcggcgcggcagccccataatttccagggcccttctcctacactgacacgtaattgtcagattgttttatgagagcagcttcctgcccgcttcctgcctggcttccaaatgtgctcattcccgaggaagcctcacttctccttctcgcccttaatcgctcctttcctgcccgccccagcccccaggctgggcgatttcctaaatcactcggaattggcttccagcgccggcgccccgggtgggctcccggagcgcgcgggcctgtgacccggaggtcagagatgcctccgtcctgtttgatgtcttgccctgggggccttccctcgcccaccccctttcccctcccctcc

SEQ ID NO: 24498 - DNA, 1346 bp, Homo sapiens
  chr5:142783958-142785304
  binary
cgcgtgccggcaggtcccccaccaccgcatcatctgggcggccgggtcttcagctgccgccgccgcgctctcgcactgggagagaagttgcaaagcagaacccaccctcccccgcgccccgaccgtcccccaccctcttccccgagtctgcgaggcggcggcggcggcagaaggaggcgccgcctgccaagttcaacccccacccctcccgcccaatgtgctcacactcgaaggaagttgcacgccaaatgcaaaacctccagcgagctggatttctttgcactttttttttattattatgattaaggaaagcagggggcggcaggcttaaaagcaagttgcaggcgaaatagtaagttgctggcgaaatatagccccccttccgaaactcctgacctcttcttccaccccggccagggcccgcgtccaagttcccggtgcaggccccacccccgaatcttgacatttgctgccctcgactctgtgcgttgctcaccctatcacgttcataggacccctgcccctacaaataaaacaaaatacaggcagctttaaaatgccagcgttcaactccctacagatgttcctgttaggagcttccccctcagtccaaggggaagggaactcgtggtccgtcctgagaaaggagagggccgtggggcgaggggtgcccgtgcgggaagcccccgccccagctcccttccccagctcgccgcgtcgggaaggcttggacgatgccgggaccgagcctcctaccttgtgcggcacagattatgatttttgtgactctgggaaaggttgtgctgtgtgggtttagggtttggggaggtaacttttgcgcccccacaggtgacatcgcttgccagctcctgacacgggcgggggctgccgcagctccacctaatcctgctcgggcgctcggccacagccactctctcacctcccgccgcgctcagactgacggcggctccccctgctctgacatcttgaagacgattggggaagcgcgtcccggaagccgcccgccgccatcttggtagggtacagtgtcgccagcccgtccccgcggccaccatcttggcaaaggttcgcgatcgcgggtagcctaagccgtccttccttggttctcaagggtaaacggttccctgtgcattgtctgatgtgaaaggaaagaagtaggctttcagcaagcctcttgtccggagacgatctacgggggccgcctccagaggattctggagccgccatcttggcaaaggaagagatactcgccacctcggaaaagaagagggaaccaaccgtatgccaacgtagaaccctcagccagaagaatttttatgaagggc

SEQ ID NO: 24499 - DNA, 210 bp, Homo sapiens
  chr5:149810718-149810928
  hypo
cgcagaggaaagcccggtggacttgggcacgtgaggtcgccggcgaagctgacaagagcaggcttgtgaactgcttgaggatgggtggagcagcactgggagcagcggcaggaggtgaggcagtggctggacaagatgcagccccgggtgcgagcatgcttgtccgcagagggagtgactccgtggggagggagagccaatgatgctgac

SEQ ID NO: 24500 - DNA, 706 bp, Homo sapiens
  chr5:151150204-151150910
  binary
cggctccccagaggccgaggccggcgcccgtgctccttcagctcggcctctctcccccgacataggcgctccacatgcttcatttccaaaattctcagcaaaactccgcgggagaccctggtcacatgcctggaacgagaacaaaccggggcgtgtctgtgccggacggctgggaaccaaagctatttccatagaaatagggccggccagccttgagttgtagccccgccagtgcctgaaacgccaggaggaggggacgagttgccttttaaaggcgtagcgacgagaataagcccccacccgcggcaattcgaggctgaacaatagtggtgcagctcgggacgtggtgcgagggcccacactccactggagcacgcgcggaccaccgtgcctcagctgccacaaagggagcctcgccacacgcccgcggccgcctcgcagcgcccgccaagaagcgcctggcggaagggcgcactctcaggccttccaccggcgaccttccggcgggagcctgcgggcggcgcaggaacgaccctccttcctctgccccgcagcagtgctgagtaatggtgagagcagcaaggcccttggccgccgcacgtaagaaaaaagttgtaataaaaagaaaacaacccgggaaactttactagttggttcgccaggtacaaacctatgcggaaaaggcggggtacaggcctcggaggcc

SEQ ID NO: 24501 - DNA, 108 bp, Homo sapiens
  chr5:153785974-153786082
  hypo
cgcagaaccacagagatgcctgaatcaggtgcggccttttattatggtgactaacaaccctcaattacttgcagaccacatttaaaatatttgttcagtgggccgggc

SEQ ID NO: 24502 - DNA, 77 bp, Homo sapiens
  chr5:156558383-156558460
  hypo
cgctatgcggagatgtgtattatgtttaccattgttaaggaaattgagttttatggaagttttttcttttttgagac

SEQ ID NO: 24503 - DNA, 750 bp, Homo sapiens; identical to SEQ ID NO: 22920
  chr5:158527374-158528124
  binary

SEQ ID NO: 24504 - DNA, 585 bp, Homo sapiens
  chr5:159343215-159343800
  binary
cggaagagtgactagcggggaaaataaccccagcgggccgcctaggggtgggtgacccgcgatctccacgcccaggtcccgccctcgcggcccctgcccccgccccgccccccgcagagggcgcgccctgggagcggcgggggacgcggctggcttcccggcttgcggggtggcggcgtcggggctgcgggcgccttggctggacccgcattgccccctagtgccgcgcggagtcagggcgccgggctcccccgcctgatgtcaccgccgtgcagtcagcccagaagcggctcattgaaagcagaccctcttcggcgctcgctgggcggaggacgcgccgcggtccgcagacccgagcgagctgggcaccgccgggcgcccccggccctgccgccccctcctccccgccgctcccccgcgagcccggccaggcgcgcctgacgtggaccattaaacttggagctgccgcctcgtcccctctcctcctcctcctccctctgacaggcgagcgagcgactcggtgcaggcaggagacgtgctgccgggctgggctgcccgggggagatgactcctcgccaggagggc

SEQ ID NO: 24505 - DNA, 571 bp, Homo sapiens
  chr5:159776164-159776735
  hypo
cgtggcatgtctatacctcgttggggtcatcctggtcggcatagattaggaagcccgtaaagaggctgtctgtccagtaagggtcatagaagagcccgttctgctctgagtagaagatctgcagccaaacttcgtcaccctgcttgagagccaggatggtggagcctgaggccacatcgtggttgccggtgttggcatcaaaggtccggatgcggtactggccgttgtgcaccaggccgatggccaggtgcttgttggccagcgtgatgtcgtaggtgaagtagtagatcccaggcacgccgcagacgaacttgccgctggaagcattgtagtggccaccctcgttcatcagaatcttgtcaaacttgatgggcagccgctcccgtgggtagctcttggtcactgccaccgagaaagctgacttggtatggccactgccacagctgcaggggcctgggaggcctggctcccccttcttgcccttgggccccttcttgcctggtgtgccatgcttcccgggggtaccgttgacccccttggggccacgggggccagcccgcccaatggcccc

SEQ ID NO: 24506 - DNA, 70 bp, Homo sapiens
  chr5:171382146-171382216
  hypo
cgatggtagaaacttccggaatgggtaaattatgcctaagggcaactactatcttccctccggctttttc

SEQ ID NO: 24507 - DNA, 534 bp, Homo sapiens
  chr5:1729774-1730308
  hypo
cgcggctgtgttagaggaggcgccggggcctgggtgcagaacgagtctccaagtgccgcgtgagcgagggtgggtggctggagctcccgggccagcccgggcggaggcgctgcctccagacccagcctgtgtgcagaggggctggcggagctcggacgccgggctcgctggcctttgccgatggacctcgggtgtgtccaggccgggcgagggccggcagctccagtgaggcgggacctcactctatctgtgttgtgcatcctgttcgagtttctgggtcccgatcttgagcaagccaactgacctctctgatgttggtttgctcagatgtaacgtgcggttgacagcgtctatgctggagcacgtggcggcttaagagcaataggtgaaaggggtatctcagaagacgccctcaggacacggggatgccataggcctcgggtggtggagggtgccccggctccgaagggctcctgagcctggcaggctggcacccgcgcgtgggctggggctcactctagctgttcccttggc

SEQ ID NO: 24508 - DNA, 158 bp, Homo sapiens; identical to SEQ ID NO: 7432
  chr5:177310267-177310425
  hypo

SEQ ID NO: 24509 - DNA, 596 bp, Homo sapiens; identical to SEQ ID NO: 7433
  chr5:180218508-180219104
  hypo

SEQ ID NO: 24510 - DNA, 988 bp, Homo sapiens
  chr5:1875468-1876456
  binary
cgcctaaggcaaaccggctggactgtgccccaagggaagggtgtgggggaagcgcccagcgaggggatgccatttcctgcgcgtccccttagaatgtggctgaatccgcctccccacccgacgtctttatttaacacaatctcgcagcttattcaaataagccagctttgtcagccagttccaccaagatccgggggctccagcgagatggaattcctatggccagggccacggggaggggctggggtcccgagggcagcaagcttggctggcggcaggagccctgggtcctccccaggagagggacccagagcccagaccaagtccaacccgccaacctgcgccacccatgcgcgcactgggggctgcagagccccgccaggctgcccgcggccgggagcgtaaggccggggtccacgcctcgattttcagtgtccgcagcccctaccccgcctatctgcgacgcaaggcgaaaccttgtttttgcggaaaatgcctggctttgtctagggctggggtgggggcgtctgggcagccaccctcggccacattaaaattcctggcgccccagcctcgggcctcaacgctgtcccccgagacgccactttcgctattactgtcaagtacccttgactctttatttttgcccttttatctattacaactaattcgagttcttttgcccttttcagtctaagacgtgggctttctgcaaagcctccccctgccagcgagctctcggagcgcggagcctttagaaattgaggggtttactgtcaaaatgaaaatttcacttcaaattaccttggctgatgctcgctcgccaggccgggggctcccgccgcagccttttgacaggcacatgagccgcgagcttccgaacctcgataatatcatctcgagcgcgaaagtcaatacggtgacagcgcgcggccggatacaatccaattacgctcggctgcccgggcgctcctggggctcggggtcc

SEQ ID NO: 24511 - DNA, 491 bp, Homo sapiens
  chr5:192159-192650
  hypo
cgaggcggtggtgcaggctctgaggccagcgggcccggcccctctgcgggtgcactgcccctcgttccgggcggacagcctgagccccagccagctcctgcacgtgctgcgtctggctggcccgggtgccctgcgcaagctggaggtggtgcacaacgtgcggctgcatgcgggccacgtgcagcagcttctggcccaggtgggcttcccccggctggcctcgctcaccctgcccaccaaggcctttgatgcaccccccacctacgcctccactcccgacggcgaggaccccctcctcgcctccatcgcccgggagctcagcaagatggcgcagctcactgagctcagtgtggccttctccacgctgaccgggaagatcccgacgctgcttgggtgagtcttggggaggggactgagggcgggctggtggctgcagaggcaaggagagatcgtccaggggcctgctcatgtccaaggccatgaggctacac

SEQ ID NO: 24512 - DNA, 550 bp, Homo sapiens; identical to SEQ ID NO: 22922
  chr5:2038439-2038989
  binary

SEQ ID NO: 24513 - DNA, 137 bp, Homo sapiens
  chr5:40775162-40775299
  hypo
cgattaattacattaagatacatattcaaagtatttgtataccctggaagcataagtctgaggattatgagttctgggggctcaagccaattccgtcattaataaatcacgttactgtgagcaatcatataagccgc

SEQ ID NO: 24514 - DNA, 1687 bp, Homo sapiens; identical to SEQ ID NO: 23300
  chr5:42950747-42952434
  hyper

SEQ ID NO: 24515 - DNA, 1290 bp, Homo sapiens
  chr5:42994313-42995603
  hyper
cggtttagatctaacagggatatcctaatcacagaattgcttcttttggcaatacttgtaatttctgctttgtagggttggttctctctaatttttgcttatttttaaatgctctttttgtgtcttttgctctgagaacaatgctaccggtagtttccagtgtgtttgctttgcctttttatttgaattttagaatttattattttaaaattttatcttatttaaatgttattcatttttcttctactaattttgagtatcacagcttcgtactccttgacttgcattctctcaggagctggggagccaagctcggtctccgcttcggtggtttcaggtcccgggttctgtctggcggctctgcttctaatgcggagctggcggttttgcagcaacgcttttgccagtagcgcccactgagcggtttttcagttgctgcaccgttcttagcgcccaacggaacgtttcccgtacgcggagtccataagttgtctgtgtcgtcactttctcggttctggcaccgctagtatctcctaggaacttcctaaacccgttttacggtgcagaacggtaattgcaccgagcctctgtgccaactagtacttccgtaataccgttagccggctcttttcctgtcacaacacattaaaacgtgttaaaacacattaaacggattaaacacattaaacggattaaaacacattaaaacgtcacaacacatttaaacagagtcggtccattcctccagacagtatgtttcgggatggaagcacccctcctaagaatccgcagtttctttctagcagcaccgttatggcgcctaaacggatatttgtttggcaataccagcgctatccgctaggtgccggcgcttgctgagtctcagcgccgccagattcttgctagcgaggtccagagcagtgcagagacctagcggacagttttccggtggcagcaatgctcatttcccggacacagatggtttttggcccctgaagaactctttaatccctgcgttttgtagcgctcgttctctgtaaggtttgcttagtatccgtttcatttcgacttcttttctcgctgtttttctgtcggaattacgatttgttttgtttctatgtgctctctagaattttaccggttttcatttgtctactaattttcgtgcattcgttactattgagtttcataatatctgggtgccctctgcccacgagctccggagagcataaatacccaggctgatggtagtgctaaaggttctgcttcatctcgtcaatcagcgcaaac

SEQ ID NO: 24516 - DNA, 811 bp, Homo sapiens
  chr5:54516349-54517160
  hyper
cgcgctccggctgcagtctgtgcgcagcccccggaaggcgccatgcaggttcccgggcctggtgtcagtattcgcgggctctggcagcagtcggggccgcttgggatcgcggctctgaagggcttcatcgcagcgctcggaaatctccctcaggatggcgtccacttccgcgcaatcctgccccgcagcgctgaccaactcctccaggctccttttggccttcgccttgagcaggaagggctcggccgccgccccacaatcccgggactgtgtgatcatcagcttctacgaaagacagggaagagcgccgccctggggcctgccggaccctccgggttcggagcgtgcaaaaggtgacctaggcgcgctacgcaccacgcactcagcggtactctcctctcccgggcccccacgggtcccgatgctgggcggggatgcactgaactgttcagttccgacgtgctgcagttcccacacgcccgcgccccacttacatccagcaccgaggccaggtgccgggttcggctggcgagttccttcagctgcacgttccgctccttgagcgaggcgatctcctcctgtttctgggtcaatgtcacgtgcagctgcaggaggagacccaaacattcaggggtaggtactgtgctgggtctcgtctgcatatctggcatgaatcaaacccagatcctgacgtctcatcaggaactggggacgcacaggcatttacgctagtgagaataataatcaatttactttttttttaaaacaaagcacttggacaaaatttatctccattaatcctcggtgtagc

SEQ ID NO: 24517 - DNA, 1069 bp, Homo sapiens
  chr5:54518558-54519627
  hyper
cgatcccagataaagcgctatgtagatccagcggttcgacttctccacgggggagagaaatgtcctaaatatggaaaaggctgactctttgatgagttgctggagagtcgttgacagttggctgggtttaccaccttcacgaccacgaaatctgaactagtctgatttgggagtgggggacacccccgctgttatttaactgccaggagactgcacttgcctgaaatgagatcatccaccgtgtctctgaaatcttgcagattgaagtctgcttccgtttggtgggaatggttctgaaaaaaaccagaggtgtacactggttaacgagtctggcgttagaaagccttcaataaatattggcgtccctgttaaaaatctggcaggcactatgcaatatatgcacgtaacacaactgcacttgtacccctaagtccccccaaataaaacaatttttgtggcgggtccggaaccctttctagaccaacagacctcctcccgggctcggcggcggtctgctcgcacttacgtcgccagcccagtctcgtacccgaaaattcaagccccatccgagacagggaacccagcaggcttgcactgccacggtggggagcgggacgcacggagcacgacactgactgggggaagggggcagcagttcgcggctcctgcagagcagctgcgtggcgggaatgggtccttccaccggcggtgcggcggccctgcgccggctccgggcagccgagtagcccgccacccaccaactagctaagcagccgcctctgtgaagctcggcggttccctgtgcgcctgcgaaattttgactccgactcaccagcgaccggccaccgagccgccgctgtaggagctgagagcacgtcttgaacaccggatctttccacccaagacccgacagcgtgcaggggcctcgagcagtaatttgaggccgcgtttcccgccaaggtttggccccagctaaccgccccacccatgcaaccgagcgggaagaaagctgtgattcgaggggccaggagaatacgggaaaagcttctgttctgcgcacagccagtgc

SEQ ID NO: 24518 - DNA, 120 bp, Homo sapiens
  chr5:72236790-72236910
  hypo
cgacatagcgagattccatctcaaacaaacaaaacaaacttgaagacgtatttttcttcctgttgacgaaacatgagacagcagggcctagagagaagtgaaaagaatgttaaaattagc

SEQ ID NO: 24519 - DNA, 62 bp, Homo sapiens; identical to SEQ ID NO: 7438
  chr5:74753672-74753734
  hypo

SEQ ID NO: 24520 - DNA, 1107 bp, Homo sapiens; identical to SEQ ID NO: 23309
  chr5:87956173-87957280
  hyper

SEQ ID NO: 24521 - DNA, 1866 bp, Homo sapiens
  chr5:87969885-87971751
  hyper
cgcgccataggggtcatctatttgaggaggaagaaaaagcgggtgtgtgtgtgtgtgtgtgtgtgtgtgtgtgtgcgcgcgcgcgcgcgcgtctgccttccacggaaagagagacggagagatgtgggagggtgggggtggaagtatgcagacagagaagggtgggggcttcgaggggaaggtgggcttcctgcaacacaagcggagaggctgtcaggggtgtgggcacgggggtgcggggaggcggtgcaggaatccgtcccgccgagtgccgtcggcccctgtgggcctgtttgcgcgcctggggctggccgcattctgggcgcgggtgtctgcgtgccggggtggtagttccgagcctgcgcgcgtgcgaccgggtacgggagggggaagagtgccgtaaaaattcagacgagtggcccgtatgtaaatgcagcccgcggggagcagggaggcggtaatgacagccgctggcgctcagccccgccggcggcccctagctttcccgccaagtgcagccggaggacagacagccatgcgtgtccttggcgggagagcccccacccgccgcgcgcgcccgacccccgcgcacacgcacacactcccctcgcaggcgtggggcccaatggccacgaacatgtcaggaaaacaaagctggggctgcgaggtggaacgatgaaacggcacacttggcggccgagggcagagcggagaagtcgccaccacagccaccggcgcccctttcttgcctgctcgtagatctgccctccggcccagaagaggccgaggaccatttcttagctgccccagaggagggggcgagcagaggagggggcggatgtgcacagggaggtgccagcggtccggtgcgcgggcacgcacacgccggcgcgcagggctgccgcgggcggaaggaggggaatgacaaggcctcggccgcgtctcggagaggcactacctccgcgctgaggccgctgagtttcaagtgcaaaacaccaggccaaatccggcaaggcggcggctacagaatggctcacacttcaagcctccttcctcaaacaatccgatgggaaggacctggctgttcaggggaagcctttgctggcctctctttttacatggggtgaagtcgaaccccaatctaggagccctggcctagatggctccgcagatgagtcccagacgtggccatggaaagactgatctctctctgctcagagcgcctgcctcggtgctcactagcgcaagcacctcccaacacacatacatacatacacacacacacacaacacagcactcccatcacattaaaacgcgcgctcatgatcctgccgttaatgaagccgaggcgcataatgagtgcacaggtaaataggtaccgaaaccagaagacttcaccagtcggctgggcgatttacctctccctacagggagcacttgtagttatcgtgttttaggagtgatttgctgttgtctgtggtctctcgctcctcttcttgtggagagaagccaaaaaatatatatgttccgtggtcagagtcttctttctgataagctacccgagcattggtctaaaacatctgttttatctgttgattttggtttgttgttttggggagtgttgcttttctgagggaagcaaaagaacgtgtgtgtggtggggctggaagctcagggcaagagtctgcgtgtgcggccggaaggctggcgagtctgagagccgcgcggtgcagaaagaaggcggcggcttgtcctcccccggggccggcactggtcccttggcaccccggcctgggctcggctactgccgccgccgcccgcgctctcgggctccgccggctgccgctccgtgttttcccccatccc

SEQ ID NO: 24522 - DNA, 109 bp, Homo sapiens
  chr5:94982109-94982218
  hypo
cgtgaaccaccgcgcccggccttaacatccttatacatgggttaccagcatcgcgacgaccttctgcaaatatttttatagggtaaataactgaatgaagtcgctgggc

SEQ ID NO: 24523 - DNA, 1333 bp, Homo sapiens
  chr6:10389924-10391257
  hyper
cgatttctgtggtttcaaagaaaaaaaaaaaaaagatgaaacatgtcttctctttgagggtgacctttgacctttctttccaatacacctgacacaaagggcttagaaaagacccgtttcgggtgcggggtgctgatgctgcttttttgttgttcgtttgcgctcgcgctcgctctcgctctctctctgcatccccctcaccccctttctcggagactgaactaagtgaaaagttgtttcaataatcgcagctctctgctccgccagggccgagggaggcgggcggaacacggagggtgttttgttaaatgctcccgtcgttcgcaggggctgggacttgataaaaggagacagttttctgaaaagatttgattgaaatggcgtgtgccagggctgatgggagccagcgagggacaaagcgccgagaatccatggacactcgagcaattatgcctccacgctgaaggtggattagcgcgctggaaagaagcatatgtttggcccggggcgacacttccccccggctgagcttagagaatgggagcgcggagagcggctggacccggaatatcaactatctgcgaagcccccccttctagcccaactccgccagcctccccgcccccgccggggaaaagtcggagtgcatttttacaaagatgagaggagaagagagggctaggggaggagcgggcagggaggggagtaggtgcctagaggtgcaaatggccctgggatcccccaggagcggccctccaggctctcctctctggcgatcccgagggcgcgtccgtccttgggtgtggaaacccagagggggtcaaataaatgctcccctatggaatttcccactgctaaggtagttcggtccaggatgcccgctcaacgcgtattggaaggtcagccgaattgttgcaatgaaacaaggttttaatgactaaagatgcaagtgcctaaaaggttgcgttgggcaggaggcgcttggagggcagcgcgggttcccagccattccttgggtccaggtcgaggaaggcctcgggagacgagtcccacagtgagatatttgatgaaatgggtcggggctggaaagctcggacaggccgcatgggagagaaagggtgcgggtgcggcagtcggatccccacgcagctctatctgcttagacacccgggcgagggatgctttgggagtttggagccagaaagtttcccagaccctgcctccagtcattaattaaagcgcccttcccgtggaaaaaaaaaaggcccttaaaactctgacctggagcctcccggctcttcctcactgcacccgcaagcgcgctaagggagac

SEQ ID NO: 24524 - DNA, 896 bp, Homo sapiens
  chr6:10417173-10418069
  hyper
cggctgaaccgggctggaggcttggcgccgccctccgtccagaaaatggtcgactttccagggctagaccctgcagggctgtcccagcctgtcgccagtgcagtggtttgaagtcaggatctgggctgccaggagcaccgacaccctcccagcagcggccatagcctgagcaggccaaaccctaggcctgagagcatgggtttttacactccgtagacgtcgccgcggtgtgcttaagggaactccaagtttcgctttcttgccctctgcgggcttggaaaggccgccctccatcctctgccaccccatttcaacccccgtttccacctccccgctgccccgcgcccaacagatctccggctccgcacccgctggggctgctaaactgttgttgtattcccgccgagggcgccattgaggtgcagattgggacctgccggctctggactgccgcccccggtgtaggcgctgatgaaaggcccgggcgagcgccagggtcgcctctggagccagccgagctgcatttatgccagcgtcattaccacgctaagtcgcttcattgcatgtcaatgctccggcggggccagaaccccgggacagcagcgccaggcctggggttggaggtcggagatccaggcctgacgtggggggcataaaaagggcgtcgcggggaagagggagtatttgtgtgagagacagagtcacaaagagaaagagacagtgaggggccagaacgactctcttttctccgattgtcaatgcccagtgggagccgggagcccaacaggcccagcccatcagattcggcccctccgggccccaaatccgctcgccccacccgagatccaggcctccagccacttgcctaactgtgagcccgcaagagccaggcccgc

SEQ ID NO: 24525 - DNA, 974 bp, Homo sapiens
  chr6:10425683-10426657
  hyper
cggcatagggtgtctctacatcttagaaatcaagacagcctctaggttagaataaagtttactctggactgggcataactccactccacctctgcgattcttcttctcgtttcccgtcttctgtcttttctttcctcccttcccaactcctagcgcgctactttaacgtctcagtctcgttcgctaagcccatgcgcctgggacttgttctttgaatctcaagtccgaaaagccaggaatcctcgatcatggacttcctcctgctaaattagagggagtgaaatttcgctctcctctccatcctacttccccatcccaaactcgctagattaagttcgctgaccaggcgcgcacccaatggcagcaccctctccaacattttccccaccagagaggcaagtgtcctacatttgtacgtaaaggtccctgagtggctaggtggagaggctcggatgtcttttcctggagcgggcctcggggagctgcagcagccccagcctcaggcaccacagccaagcgagcgcgccttgggctcgctgctctgcacgcagctggaggtctgggccgctgaccctctggccacgtagtcaacccgaggatgtgtgccccggggctcggccttgcctcgggtgagaaggctagtcaccattcagggtgcaggtgtcatggcctggaaatggcaatatctgagcaaacaggtgggcgtcgcttcccggcggtgcggtggccgctggctcgcagcgcgctccagctttcggcgccgccgccgcccctttgctctgcggactcagccagttcccgggtggcccagctgggtggctccgaggcctgcccccttgggctgcggcgggaggcggggactgcagtgccgagtgtagggcgccccagccgggctggcggttcacgctgcgctcgggcctctgccgggagggcgccctggcgccaaacccgggcgggcaggggggtggagagcc

SEQ ID NO: 24526 - DNA, 605 bp, Homo sapiens
  chr6:106958136-106958741
  hyper
cgccgcccctgctcccccgctttcccaggctcgcctcctcctcttcctgcccacctctatgccccgcacctacccagtccccactctggcaaaccccggagcgccaccgcgcccattggcgggtttgcttttattggtttgttctgcgctccctcccgccttctggcgcgggcactggatgctagccgttttgctccaggagatataagaagcccaggttttcccccttcctgggagcgctgcggatcattcgcaggcggcccggcaccctcgcataggtgggccggcccctggggctccagccgtgcgaccccggaaccacacgtgtggcgaggaacgggtcccggggcggagtaggcagagtcccaagcgcatccttcagccacacctcctcggctctagggggcggtgagcaaaggcggtcacccctgcaacctcgcccgctacccccacgcactcctccgtgttcacatggtaggaactcccacaggcaaaagcctttccgatgcgctctgcagccgcgggatcactcgggtgtttgaacgctcgcgcgctcctcccattggagctccggctaaggcggggcccaggtgcttgcttcctcc

SEQ ID NO: 24527 - DNA, 1654 bp, Homo sapiens
  chr6:106959524-106961178
  binary
cggacacaagcgaggagggctccccgcgggagaatccccgagaggcagagggcgagctccccgagagcggtggccccgcagccccccctgacgccgagctgtcacctcgctggagcagcagtgcagcggctgtggctgtgcagcagtgccatgaaaatgattcaccccaattagaacctctggaggcagagggagagcctttcccagatgccaccaccactgccaagcagctgcattcctcgccgggaaattcctccaggcaagagaacgcagagacgcccgcccgcagtccgggggaggacgcttcaccaggtgctggccacgaacaggaggctttcctgggtgtgaggggtgcgccagggtcgcccacccaggagcggcccgcgggaggactaggcgaggcccctaacggagcccccagtgtgtgtgccgaagaaggctccctggggccccgcaacgcccgcagccagccccccaagggcgcgtctgatttgccaggtgagcctccggccgagggcgcagcgcacacggccagctccgcgcaggcagactgcacagcccgccccaagggtcacgcccaccctgctaaggtgctaactttggacatctacttgagtaagactgagggggcacaagtggacgagccggtcgtgattactcccagagcggaagattgcggtgactgggacgacatggagaagaggtccagcggccgtaggtcggggaggcggagggggtcgcagaaatccaccgactcccccggcgcggacgccgagctccctgagagcgctgccagggacgacgcggtgttcgacgacgaggtggcgccaaacgcggccagcgataacgcctcggcggaaaagaaagtgaaatctccgcgggcagccctcgacgggggcgttgcctccgctgcgagcccagagtccaagcccagccccggtaccaaagggcagctccgaggggagtcggaccggagcaaacagccacccccggcttcgtcccccacgaagaggaagggcaggagccgtgccctcgaggccgtgcccgccccgcccgccagcggcccccgggctcccgccaaggagtccccacccaagagggtgcccgatcccagcccagtcaccaagggcactgcggccgagagcggggaggaggcggcgcgggccatcccccgcgagctcccggtcaagagcagctcgctgctgccggagatcaagcccgagcacaagaggggcccgctccccaaccacttcaacggccgggcagagggaggtcgaagcagagagctgggcagagcggccggagcgcctggagcttctgacgccgacggcttgaagcccaggaaccatttcggcgtgggcaggtcgacagtgaccactaaagtgaccctgtaagtagccgcgcaagtcccggccgagttgctgtccgcacacgtgctgggggtccgctctgagaggctcggggtatctgcattgtggaagaaacgtctggtcactgaactttcccctccatgctgaacttaagatagtgaagggccagtttacacagtcaagatttaagatgacacctgtggcagcctcctcagttaattccctttttaacacaagatttaagtttaacgaatgtaaaaataggatatccgttgaagctcaac

SEQ ID NO: 24528 - DNA, 543 bp, Homo sapiens; identical to SEQ ID NO: 7448
  chr6:1080648-1081191
  hypo

SEQ ID NO: 24529 - DNA, 1650 bp, Homo sapiens
  chr6:108439510-108441160
  hyper
cgaggcccccgtccataatcgcaggtgtcggcgtggaaaggagccacgcgtgcacactcatgggtctcaccgcgcgggcttccgcggcccggcaagccgctgcgcctgcctcgccggcggcccacggagcccgtccgcgcttgccctgcacacctgcgcccgcgcgaggacccagccgccgaggccgtgcgcccgccgggctgcgggggccgtgggcagggggcgcagggggcgcagggggcggccggcgcggcggctgaacccgggctgacgaggcccagccgcctgcggggcccggagcgggaggtaccggctaggggcgcgtttctttcgcatccacaccccgcccccacccctctctccagggattttttttttttttttttttgtatccaggcacagctgggggctccctcaccacccacccctggcctccccatacagaataaagtcagtctgtatttaatggttatggcggatgtgagggggatttggcagaggcagaagagaggcctttcgctctcaaatatcgtcccttacgtcgtgtgagtctaccaacccaccacgacctcatattcttgtgcgggtgtctgactcgaatgacaagcgagctgattttttcagtacatagctgggaaatgtagtgagtgataatagagatttctctttcattttttacgcttgacttggttattgttgcttttcttttcccgtgattccttctgaggattagctctgacttccccactattggcggtcaaagtggccccgactcgggatgacaattgacggggatcaagggattgcccattctgtgcctgtaagaaccgattcgtgccagagaaactcatcaagtggaggcggagaataaagaccgttcgggggtaaatgtattcattgagaagggttctcccaaattgcttctaagtttttttaatgaaaagtaacgattgcggcaatcagcggctttttggcggattacaaatctggagggagctgcggcgctgcattgaaaagtgcccccgccttcgcaccgggcagccggttcacaggagcagcgcgaggggcgggggtccgatagcgggacaaaggcggggagggggcgagcggaggagggcggctcggggcgcccgggcgcgcatcgggcaggagacgcggaggtgcccaccccagcgcaggcgtggcagggcgccccccaccgaggaaggcgtggggcagggtgcaggaaggggaccgagggaggtctaccgcagcaccaccagcactggggagattccgggcatctggagcgaggaaggtgtgctataggggttgagtccatcaccgtggaagtccggggaatgggaggtgcgactcggtcccccacctctaccccgggcacggtggtgtcttcttttaaagacgtctcacttcgcaattggaatcgaagcgtgggccggtgtcgggtcttcctggtgttacaggcaggaggagggaaaactgagtccttcctgggatggggcaggaccctcacacgcaagaccccactgagctggactggcgcgggggcggatcccttctcccaaatgcttctgaatggcgcgcgacctggtcccctctgccacacggaccctgcgcgcacgccctggccctggcggcctctggggacac

SEQ ID NO: 24530 - DNA, 915 bp, Homo sapiens
  chr6:108478767-108479682
  hyper
cgaagccccccatgcggcaagagcgagtcgcaggaacaagtggggaatcttggccgcggccccctcccccgccttataaaaaagaaattgacttttgtttggagtttgtgaaaagtggggctcggggcccagtcaatggggcgccccgcggcgcgggctgagtggagctagcgcgaaccgctcagccgcggccccaattaatccgccctttgtgcggcccgcccggccgcccccgccgcagccgcaccagcggcccattgttcggcctcgccgggccgcgggatttacccttttcaaacagccggttttgtccagggcagttcgagcggaagtttctcactgacaatttgccccaaatagatagatttgtcagaagcgaccttcgggaaggaagcaaaaagccaccggcccgaaggttgggcccaaaacagggactctgcgtcccacccgcggccgcgccgcccccccgcgcccccggccctgcagtcccgaagccccgcgggggtccagaccactgcacctgctgagccagacactccgcggacctgacctccgttttacccatctgtaaaatggagcagctgggcgctggcaagccgtaagtccaagagctttggctccaccagcgtgtacgacgctcatttcctttctctctccccacaccctttccaaaaactgtaagccagaaaacctggccaggcctccgcgacggcgagaaacggtcttgaaggtcggtcggtcgccgtaatgcggtccggatcgtgcacgtgctgtttcgccactgccctccggctcctccttaacaaagatgtcaaccgtgctaaatcacaggtggtgcctttgtaagaccagctattgtcccctcataagtcaagatataaaacgctttgtactgaatggcccatgatctggagc

SEQ ID NO: 24531 - DNA, 1803 bp, Homo sapiens
  chr6:108489327-108491130
  hyper
cgggcctaccctggccctcgctgttggaatctccaggaggtaaagcgacctcgatttttgttgcccgcattcccgggcgtgagtgtccttcccaggaggctcaggaggccgtttctgttgcattctgagcctccgttgcaaaaactgaagcccgtgggtctcggcaggcctcctagctcgctcgccccgggacaggccctcgcctacacccctggaagtaaggagccccgggctctttcgtccttttcggggtgtggagcccctggggcccttgaaaggtgaggcctcagaggcgagggaggggtgagcggggagctctgcccgcctgcggctgcgcccccgctgtggactaggaggcaggccaaccctccggactttgggggaaaaaccacagcgggctccttgcggaaactttggccgttctaacttgccaagagcctgagtgaggccttggaagcctccagccccggctcaggtcgggacgcggctgctgagctttctcaggcccgcaggacagcggcccccgccggtggcgccgctgcatttaggccctttccagaccggtggcggcagccaacccgagacttgcgtccctcgggcccggggcagctaggaggtcggcgcgcagcgggccgggtcaggactgggtcgagcagacagagctgcagcccccgccttgcccggcttctcgcggctggagagcagagcgatgtcacccggagccccgcctgggtggtaacgagaccctggccagtcacccctgcagcccagactaacttctttcaacagcctctgatggtaattacagtaatcgaagctgccatatatctttaggcaattatgacacacaaaaagccccgaggggaccccctggcgagggaagttaagaacggttttccagcttcaggaaactccggctcgcctcacgtcggagctcgctcggcttgctaaatgagaggagctttgcaacggggtcaaccagcttgtctcgtgaccccaagtcaccttaacgtggctgggtggcggagtctgaggcacaggcccgctatgccccggaattttcgcgtccctccctcctgggccccgccccagcccggttgcctgtttctaatctgccccgggagccgcggctcagaggtctgctcagaggcaggactcgcactggtggtggcctagagggcaacagtccggaagctcgggcgggggaatccgaggaggggcccccaccctgcactggtcttccctccaccctcatcgggttctccagagatgttgtcatgggcctcctgtccggatgggaagtggggaaaaagagaccccaccactgctcctcccactcactcatcttggcatcttcaacagtgccacagggaagaggacagctggggtgacagtactgctgggccccaaacgtggaccctggagcggtcagagggcgcgtgttaagcagaggatggttgtaagatatggaaaccaagtttaccgcttccagagtgagtgcagtgcagcggagctccagacccggttcctgagcgaccaggaactcccttgggcgcagtgacaggcccgaaggagtggaggacaagacccgctgtgcccttgcctggccctctccagcccctccctcccacagcacaatctcccctcccgccctgtgggaggggggcgccgagccggtggccgccgcgccgcgcgcctcccctgcccgcctttgtcgccgtccgaattcccatgctactctttttgacgggtcactggtggctctataggcaggtgctgccgcggggttgtaattacccggcc

SEQ ID NO: 24532 - DNA, 121 bp, Homo sapiens; identical to SEQ ID NO: 7450
  chr6:109058656-109058777
  hypo

SEQ ID NO: 24533 - DNA, 114 bp, Homo sapiens; identical to SEQ ID NO: 7451
  chr6:109059982-109060096
  hypo

SEQ ID NO: 24534 - DNA, 94 bp, Homo sapiens; identical to SEQ ID NO: 7452
  chr6:110768091-110768185
  hypo

SEQ ID NO: 24535 - DNA, 430 bp, Homo sapiens; identical to SEQ ID NO: 7453
  chr6:11273720-11274150
  hypo

SEQ ID NO: 24536 - DNA, 135 bp, Homo sapiens; identical to SEQ ID NO: 7454
  chr6:136901469-136901604
  hypo

SEQ ID NO: 24537 - DNA, 970 bp, Homo sapiens
  chr6:137809033-137810003
  hyper
cggacagaactccaaaacttacgaggacagctatccaacactgcctcacagacccttaggcgctgccccctctttgcccctgtcctcctgcggtgcgagaaacccgaccactctgcttctacccgaaccccaggacgcaacagtaaaatcaaggcccgtcgttgaactcccaggtctgcgcatccctccctcctggctccctggggtcttggccccagcaggtccagtacccatccccagagggacccactaccctgggcgtcccagggtgccaggcacgatggcctgcaatgggggctgcaatttaaccgaggcgagttaaattccttttgccggtgcctggctgcgaggacaaacgtccgtactttcgttcgggagccacgggcagtccaggggcttgggttagaagcaacggctctcttccaggggctgtgatccgggtcggccagggagagcgaggccccggggtcctctgtgaggtccccagcgaagagacgcagctggggaaggcgccgcccccgggccccctgcgccaccctaaccgggcctctccttagcaaagttgacaaattcttgagagtgtcagcccagggctgcgcgtgagggcgctgggaccggggaggaaagagcacctgccgcgctcagcccgactttgaatttgtttgttgttaccgtttttgtttttcctcccagtttccataaacgcttagtatttcgaggcactttgcaggtgttggcgcaggtgatgatgggcctcgttggactctgcctcccacgcatccttttgttttctgcgcgccagcctgtctgactgtgtcctgcggggaccccgagacagtccggggtcagggcgtagagactcatgcttgccacttgacccatccgcaacccggggaccccctagcccgtcgcggagctggagtttgggcttccggctcccagctctccgccctggatacaggaagagggc

SEQ ID NO: 24538 - DNA, 923 bp, Homo sapiens
  chr6:1383727-1384650
  hyper
cgcgaacgagctcccctccccgactgggtcggcctcgggcgcctttcgccttcgcaggccgccggggttccgcggagggcttgtgtccctccctcccgccgccgcagcccgcccgaaggtcaggccgcatccggggcccggggcctttggccaggctgcggggaggggtggggttggggggctccccaaagcagcttctcggaggcggcgtcggggcgccctgaggtccctagtcggcctctgggcgccgagcacgttttatttatccccacagaggatgctggaggacaaaagaaatatttggacgtcagagctgatttatatttttggaagagctacgtttccttttctgaagagaagcgagcgcgccccatatcctgagctcggcggggaggacgagaggggagttttgatgcgccaggaagttcatctatcgcccaggcgctcaggacccggcgccccgccgagttcgccgccctcggaaatatttatttatttgggggaagggagggcagcggggaggagaccagccagacgggagaagaaagccctgcccgggctgggttgggacctccagggcgcttccccgcgcggccgcagccggccagcctctggtctcggttggagggcatcgcaggcgcggcctggcgacctccgggcgcctttggctggtgtcttccgtagccctcggcgcgcaccctcccgcgtgcagtgcccggagtgacctcttcaggccccgcgggcgcctcctgggtgggccccgcggcccctccaaccctgcccagcgtgtgtgcgcggcctagccatctttctccccagcctgggaaggcgggcgggaggaggggatccgaggccgggggccgcggagcaaaaggcacgcggacccctaaacgacccccgagcgttgccacagccgggagggc

SEQ ID NO: 24539 - DNA, 974 bp, Homo sapiens
  chr6:150285366-150286340
  hyper
cggcgcgatctccctgaacgaacatcgcggtctccccgaacgtcgcggtccctccgaacgtcgcggtctccccgaacatcgcggtgcccccgaacatcgctgtctccccgaacatcgcgatctccccgaacatcgtgatctccccagacatgcccagctgaaggcactcagttcccctcggtggctcctttccgccgggtccgcttcctgcggctgctgcttgcccctcaggccaggaggtttctggaaggaccggtgctgtctccccgaacatcgtggtctccccgaacatcgcggcctctccgaacatcgccctctctccgagcaacgcgatctccccgaacatcgcggtctccccgaaaatcgcgatctccccgaacattgccatctcaccgaacatcgcgatctcgccgaacatgcccggctgaaggcactcagttcccctccgcggctcctttccgccgggtctgattcctgcggctgctgcttgccccgcaggccaggaggcttctggtagcaccggcgcgatgcccccgaacatcgcgttctaccccaacatcgcgatccctccgaacatcgtgatcccccccgaacatcgccgtccccccgagtaacgcggtctccccgaacatcgcggtccccccgaacatcgcggtacccccgaacatcgccgtctccccgtacattgcgatcccccgaaacattgcgatctccccgaacatcgcgatctcgccgaacatgcccggctgaaggcactcagttcccctccgcggctcctttcctccgggtccgcttcctgcggctgctgcttgccccataggccaggaggcttctgggtggaccagcgcgatctccccgaatatcgcggtctacccgaacatcgcggcctccccgaacatcgcggtctccccgaacatcgcgatcccccagaacatcgcggcctccccgaacatcgcggtctccccgaacatcgc

SEQ ID NO: 24540 - DNA, 1304 bp, Homo sapiens
  chr6:155316022-155317326
  binary
cgactgggtcttggagtgccgactcgattgccatctccgctgcgaagccatctcctctcagaaggggaaggagatggaaagtctctgcggccgctgacctcagttttgcgtgcctttcctcggtgggacccgggaagagccgtctttaaattccttggggaagggacggggtcgcactggcgcatcgcatccccggtagcgggcagagcccccagctcacagtgagcgcgtgctcgatgtttcttgaattgttttatttgtgttgttccaaagaaagcgcgagggacatggtccgggaccagccgggagctggcgcgggggtcctgggcctgacgctgggcggggctggggcgtgtccggggcggggcggggcgggaggtgcggtcgcggctcgggcctggcaggcgctgcgcgcggggctggggcagcggtaaccgtaactgtggccgcggccgccgcaggcgcacagcgcgcgtccaagtggagaacaaagtgacccccagaacttctccaactcctcccggcgttcccgcgagggccacgcgccgagggtagcggagggcggcgcgcgaccggccccaccgagcccggcgcgcgacccgaggtaaggggcgcccgggtgagggcgcaggagggcgacgacccgcgctggttggcggcggctccaggtcccctgcgggcggggcggcgcgcggccggcggtcccctcccttcccctttgttggccgcccctctctgcccccgctttcctgggagtcccgcggaaggtcgcggctgcggggcgcggcctggcaccctctccccggagggcggcagcgtccgggcacagcctggcacgggggacgaagcactttccagaaggctctgaaactaggtcccctggtcccctcgcgctgcgcgacacgccaggacccactttcagccccggtcccatcccggatgggaggaggcggcgccccggcctcctgataccgaggttctcgcccaaagccgagccgtgggtgcccggaggggagcgcccgctgcgcccacgcccgcccggcgacctcggagcctcagaaaggcgctgcggcgaagcaggatcccaggcggtcggctcagcgagtgtagaccgtgcggtccctgctcagcccctccggcctttccgagcgcgggagccatcccggacgggcgcggctcctgggggggctgaggtgccaagtttctgtgaaagccgacacgttgtgcccctaatggatcctatttaccaaaaacagttcagaaagaaaagagtccattcttccagccattcgttgctgacagcc

SEQ ID NO: 24541 - DNA, 617 bp, Homo sapiens
  chr6:158093637-158094254
  hypo
cggtttctctcttctcgcaccccaccctccccgcccgtgccctgtccccatccctgtccctccccacctctgccccctcctctccaccttctctttgctggcgcctcccgctctccagtgcgaccaagaccagtgcattcagagcaccaaattcgttttgcaggctgcagccacgcccctgctgcagagcgagcccagcctcaccagcgacgagctgcacctgcccgggaagcctggcctgggcacgccctgcgccagcctcacactgggcccgcccacaccgcccgcctccatgcccaacctcgccgaggccacgctcgcggacgtgatgccccggaaagatgagcacatgggccaccagttcctgacgcccgatgaggcgccctcgccccccaggctactggcggcgggcagccccctggcgcacagccgcaccatgcacgtgctgggcctggccagccaggactccctgcatgaggactctgtgcgcggcctggtgaagctcagctccgtgtgacccacatggccccaggccgggggacaccagaggctcctccatgggcagcaggagtgagcggaggggtgtgtcccacagcgactttcccagccaatgccac

SEQ ID NO: 24542 - DNA, 56 bp, Homo sapiens; identical to SEQ ID NO: 7457
  chr6:158321417-158321473
  hypo

SEQ ID NO: 24543 - DNA, 263 bp, Homo sapiens
  chr6:16197024-16197287
  hypo
cgggctgaaccaagccgaggccgctccacagagaaagcatttagaccacccctagccaaagggaaatcagaatcgcccatcccagcagttcagaattgagttctgatgtgtccggaattgatgggttgtctcactgacttcaaggaaaaagccgcagatctccgtggtgggtgctaaaattcttaaaggtggtgtgtctggagtatgttccttttcatgttcagacgtgtgcagtttacgggggtggggaggttctaggtctc

SEQ ID NO: 24544 - DNA, 279 bp, Homo sapiens
  chr6:167139157-167139436
  hypo
cggggagaccctcactccacctgccttctcttcagatgctggggacgagagtgaagctccgagtttctgcttgcacagcttcctcgggccagcgtggacgttcccgacctgccccacagcacagagactggctccaggtatgccgggcagggaggctcctggcggcgcaggcccagagggaaagcagtgtcagctgaggggtggggaggaggcagagggcgcatcacttgtgattccccagctttgagaggagctcacagaggcagcttttggggaacc

SEQ ID NO: 24545 - DNA, 408 bp, Homo sapiens
  chr6:167140099-167140507
  hypo
cgtgatcaccttaaatcacataaacatgatcaccttaaacagagaactggatctcgtgtactgatgctgctggcagcattggaaagtgactcttacaacttcagttgcgataccggtttccataagcttctgtgaattcttgtcaaagctttaaaactgaacacggcaacaactctaggtgaggagtgtttggcagatgaaacccctccaccagggaggtgacgggtctcagggagtgtgtctggcgggtggggaggaatcccaggcctggaatctaccgtcctgggtgctgtctcctccaccacgtaagccaaacctgatttccgtgaagaatttcccacttgcactcatgaagacatggccattcccaggtatctaggtgttcctccactgatcagaaacttacac

SEQ ID NO: 24546 - DNA, 365 bp, Homo sapiens; identical to SEQ ID NO: 7459
  chr6:168672446-168672811
  hypo

SEQ ID NO: 24547 - DNA, 235 bp, Homo sapiens; identical to SEQ ID NO: 7460
  chr6:18368676-18368911
  hypo

SEQ ID NO: 24548 - DNA, 1263 bp, Homo sapiens
  chr6:26271217-26272480
  hyper
cgaatgcggcgagcgagctgaatgtccttgggcatgatagtcactcgcttagcatggatggcacacaggttggtatcctcaaagagccccaccaagtaggcctcgcaggcctcctgcagggccatcaccgcggaactctgaaagcgcagatctgtcttgaagtcctgagcgatttctcgcaccaggcgttggaaaggcaacttgcggatcagcagctcagtcgacttctgatagcggcgaatctcgcgcagagccacggtgccgggacggtagcgatgaggtttcttcacgccgccggtggccggcgcgcttttccgagccgccttagtggccagctgcttgcgcggcgctttgccaccggtggacttgcgtgcagtctgcttggtgcgggccatctcagactacctgaaagaaaaactcagccacttggcagagtggaaactgcccttatatatactcagaaacattctaattggccttgttgattttcaaaagacccgcgcaacaaaaccattggctgaagagtccaacgatgtgattggtgaattactggaaaatctgattggatgaatcacttcatttttgaatcctctcttctcggttagtctgcgatccaagaacgttaacttcttaaagttctaattctgcgcttctcaagctgtagtccgtaaacgactactttaagacttggaagacgctaattctcattcagtagatgtgttgtggggccagattcggaggaccacgttttgagaagtttatcttgtgccgttttcttgagtcacctggactgctgctagctggaaacctttgaccattataaggcaggattcctgggtgatgtacctgggaaatcacgagccaagaagtcaccgacatacaacagtgagcaacaaatgttaactgaattctattttgtcccaaatggtgttttgcttcggttgagaatttttaaggcacaggctaattttaggttttccaacgactcttatcatttacttttcgttgggtcctattgatgatattccaggataccacccccactagcctcttctgcaggataacttgaacactgcagtggccctgtccatctaaactttacaaggttttgtaaacgttactgaacttgcttcttcccgactacattaaagcacttacttgagatattaaacattttctcattagtcctgtttgcctagtcagtcacttgtatagacagggcaacagcacggcctgaatattgggcaggacaccgccctgcgc

SEQ ID NO: 24549 - DNA, 322 bp, Homo sapiens; identical to SEQ ID NO: 23321
  chr6:26322359-26322681
  hyper

SEQ ID NO: 24550 - DNA, 730 bp, Homo sapiens; identical to SEQ ID NO: 23325
  chr6:26577146-26577876
  hyper

SEQ ID NO: 24551 - DNA, 629 bp, Homo sapiens; identical to SEQ ID NO: 23328
  chr6:27463044-27463673
  hyper

SEQ ID NO: 24552 - DNA, 850 bp, Homo sapiens; identical to SEQ ID NO: 23330
  chr6:27512842-27513692
  hyper

SEQ ID NO: 24553 - DNA, 1073 bp, Homo sapiens; identical to SEQ ID NO: 7465
  chr6:27655169-27656242
  hyper

SEQ ID NO: 24554 - DNA, 615 bp, Homo sapiens
  chr6:27774739-27775354
  hyper
cggaaagattaaaaacgccagccttgttttcctagtgctgtttttggtttttacctcgggtcttttgtcgtgccttaaaatcatgtctggttgcgcaagtgagggaaaggattgggtaaagggggcgccaccgcaagttgctgtgcaacatccagacatcaccagacccaccacctggagcctggcctggcggtgtcaaacgcattctggtctcatctttttagaaacccgtggatgctcaaggaatttccggataacgtgatcccggatgcgcttgactgacttacacggaacgagcaaagcgcaaagcagtccctgctaaggacttagtttatgccctcaagcgcaaaggtcggaccctctatggtgttggtagctatatgcacgtacctcatgtacatttcaccttaaatggctttcaaagagctagattaatttagtggatagatcaaaatgatttatgacccctcgccccccagtgataggaagagcgaaccagctcttctttagataatagtgagtggctctgaaaagagcctttgggttggacaagagcttgagaatttacttggagctggtgtacttggtgacggccttggtgccctccgacaccgc

SEQ ID NO: 24555 - DNA, 910 bp, Homo sapiens
  chr6:27777648-27778558
  hyper
cgaaaatagaaaataaaatatggagaccatgaactgctaagtctgtcagaggaataggtgaacaacaaaaatttgagtccttcgccaatccggttactgttgggtaggccttcagcatacttttgtccaatcagcttcagactctcactataaataagcggctagctttctctttctcctgaagtgaatctagctctgaaggcatggcgcgtacgaagcagactgctcgcaagtccaccggcggcaaggctccgcgcaagcagctggccaccaaggcggctcggaagagcgctccggccaccggcggtgtcaagaagccccatcgctatcggcctggtacagtggctctccgcgagattcgccgctaccagaagtccaccgagctgctgatcagaaagctgccttttcagcgtctggtgcgtgagatcgcgcaggacttcaagaccgacttgcgcttccagagctccgcggtgatggcgctgcaagaggcatgcgaggcctacctggtggggctctttgaggacaccaacctgtgcgccatccacgccaagcgggtgactatcatgcccaaggacatccagctcgcacgtcgtatccgcggcgagagggcttgagtctcaaggactcactgattacatacccaaaggctcttttcagagccacccacatgcgcgctgaaaagatctgtttctctcaggaattcttcctggtacttgttttgcctgtagtagatagggcccatttccagacgttatacaatctgtttcgtaagactcagcctatccctttttgaatgctaattttgggagtcttaacatctaataatgtccggcatttttccgtaagcattgagtgtagccaaaagttccttcgtgtattgctctcccatctccgcagcccggttttgacc

SEQ ID NO: 24556 - DNA, 697 bp, Homo sapiens
  chr6:27805774-27806471
  binary
cggcctggatattgggcaggacaccaccctgggcgatggtcactttaccaagcagcttgttgagctcctcgtcgttgcggatggccagctgcaagtggcgcgggatgatgcgggtcttcttgttgtcgcgggccgcgttgccagccagttccaggatctcggcggttaggtactccaacaccgccgccaggtacaccggcgctccggcaccgacccgctcagcgtagttgcccttgcggagcagtcggtgcactcggcccactgggaactgaagacccgcccttgaagaacgggtcttagccttggcgcgagctttgccgccctgcttgccacgtcccgacatgacgtaaaaaattcaatcagtaacgttcctgagactgacgtaacgctaaagctccgctacttatagtcaacagaggcacgaaaactaagctgtgctattggctaacattacagtttcgctttaaccaatgggattgcggttttgaaaaacacttattttgattggacaaagttaatatacgtttccaggactcaccactggttaaacgcacaacttcattctctaccccacttgcgttaagaagcagtgaataagcggtaggttgacagagctaccgtcttcctgtttttttcctccaattttccggcagttactcccagtcatgcccgagccctcaaagtccgctcctgcccc

SEQ ID NO: 24557 - DNA, 496 bp, Homo sapiens
  chr6:27832868-27833364
  hyper
cgtcctgttcacgaattcttatgcaaatgaggtgattaataaaatagtgtgtaggactggtggcgattctagatgacgtcatatacacgtttgtccaatccaaagaagcatgtttcataacagcgattccattggttgaaataaaactgtaatttgagccaatggcacagctttattttcgcgcccagtattgactataagtagtggagctctggtgaacttctctcggctgttctcagttcctccatttatcgtttcttcgtcatgtcgggacgcggcaagcagggaggcaaagctcgcgccaaagccaagacccgctcttctcgtgccggtctccagttccccgtgggccgagtgcaccgactgctccgcaagggcaactatgctgagcgggtcggggccggcgcgccggtgtacctggcggcggtgctggagtacctgactgccgagatcctggagctggcgggcaacgccgcccgcgacaacaagaagaccc

SEQ ID NO: 24558 - DNA, 513 bp, Homo sapiens
  chr6:27858278-27858791
  hyper
cgcacgcctcttgcagcgccatcaccgccgagctctggaaacgaaggtcggttttgaaatcctgcgcgatttctcgcaccaggcgctgaaatggcagtttgcggatgagcagctcagtcgacttctgataacggcggatctcacgcaaggccacggtgcctggcctgtagcggtggggcttcttcacaccgccagtcgctggagcgcttttgcgcgctgccttggtggccagctgcttccgcggtgccttgccgccggtagacttgcgagctgtctgcttcgtccgggccatagttgagaaagctatgctctgaaagcaagcagctgaatgagcagtggcttctaccagaatttataacgatgatctgatcctgattggtcagaactgttgtaggaaaaacctggttggttgttaatactatcttcatttggttcctgccacttttttttttttttttttttttttacctgacggcttctaattctgtcgcctaggctggagtgtggtggcgc

SEQ ID NO: 24559 - DNA, 795 bp, Homo sapiens; identical to SEQ ID NO: 23336
  chr6:28367069-28367864
  hyper

SEQ ID NO: 24560 - DNA, 1357 bp, Homo sapiens
  chr6:28456978-28458335
  hyper
cgaatacacggggaaacgtattcggcagtctacagtgtcaaaggatttttctattaatccaagaaagagcattacagaaagctatacaatacgtgaagacgattaaaaggaatatatctatacataattttaaaaaacctttgaatcttgaaagtcactcacttagggtacgtgaagctgccaaatttatcagagaaggaacaggcatctctcgcatggagccgtgggcctcggcgttaaggcactcttcagctacaggtggcagcccgtttagctcttcttaaggtcttgtgatgtcattttcaagaggccagtaaagttctgtgtcacgtggggcctctcaggaggggtgcggaggtgggggaggggcggggagcaggactccactgctttggcctcaaggagtttggtcgacacttgaagactgaccaagaaaaagtaatttgtcccagttttctcccaccctttgttttcttctgctcctcttgggcttgttttttttttgggggggggggttctttcttttttcttttcttttttttttttttttcccgcagtaagttctgaaaatcgcctcccagaggagataacgcgttctcctctgtaacccgtccttccacgtcccggtggtgggggggggggtcccggttctcattctttcggggacctgcaaggagccccgcccgcaggctttgaaccgatttcggctccgcgtccaggagcaggccctacgtagggccgggggaattcaggtgcgtctgcggggcccagggcacccagggcaggcggggactgagacgactgagggttgagggacaaggaggttgggactggggaggggagacccgggacccgcccagaacgctttcgtggggttggagagggcaggacacagcctctctgggcccggtagtatgcgaagacacgcataacgcaaaaggattcccgtcctggactttgggaattaaggccctgaacacattgagcaaaaagtagatctgtctgtacagacgtttctttccacgtctttcatagtaaggactttattaaaaagcaggcactcgaatcctaggtgggtagatgggaggctggggctggggatggggacgtcctctgttttctggttgtgcacattaaaaataactctctgctgcctactcctaaacgcagccggcaaaaatgagacgtcaactaagcgccgtttcagtcccagagccaggtcgtccatgggggttttcaagcgttttctcgatgactgatttttctagaagcgaatggattttattctcccaggtgtaaaggctacctcctgcttcacacccgggtaacataaaagacagcgctgggaccgaaactc

SEQ ID NO: 24561 - DNA, 367 bp, Homo sapiens
  chr6:2920768-2921135
  hypo
cgtcccgctcccccaaaccatcctggcgcaaactagtctttcaggtaaactttggaatgtccttggcaagaggggacgtccattcagatggttgggaagcttagaattttacttttggtttacaaacgtgagacggttgctgtagatgcgggcggcgagcatgtcaggacttcccctcctcctatccggtgactccttggaccacatcaacccagagcaacaagacccattgcccctgctacctggggcccgcatggcatgtctgagcaatgaccccatcctcgctgcccgctgcccagctggcggaccctgccaggttcttactgcgatggccactccccaaccaccacacccgcagcacctccac

SEQ ID NO: 24562 - DNA, 138 bp, Homo sapiens; identical to SEQ ID NO: 7476
  chr6:3263649-3263787
  hypo

SEQ ID NO: 24563 - DNA, 277 bp, Homo sapiens
  chr6:33995852-33996129
  hypo
cggggcctggggcccgagagggcagaacggggccaggcactcacctggggcctcaaggttctcgcagagctcagacttggcctctccgttgggccggaagttgcccttctgcgtgaacttgttggacatggtggccgccgtaacgacggctttgaggctgcgcttgcgcttgggcacgttctgctccgggtggaagaggatgatgtagactttgggcatgtagagcattcccagggacaccgaggcgctcagactcaccgagaccgtcagcgtcgtc

SEQ ID NO: 24564 - DNA, 54 bp, Homo sapiens; identical to SEQ ID NO: 7478
  chr6:34219827-34219881
  hypo

SEQ ID NO: 24565 - DNA, 1248 bp, Homo sapiens; identical to SEQ ID NO: 7479
  chr6:35655519-35656767
  binary

SEQ ID NO: 24566 - DNA, 223 bp, Homo sapiens; identical to SEQ ID NO: 6607
  chr6:36198250-36198473
  hypo

SEQ ID NO: 24567 - DNA, 293 bp, Homo sapiens
  chr6:36238212-36238505
  hypo
cgcagaaagtcagaggccgaggagatggaagaacaggtgttcaagggggacccggacacccctcactccatctccttctcgggcagtggattcctctccttctaccaggcgggggctgtggacgccctgcgggacctggccccccggatgctggaaacagcccaccgctttgcggggacatcggcaggtgctgtgatcgccgccctggccatctgcgggattgaaatgggtgaggcctgtgttctgggtcccctgggaagtctcttgggggattccacagagacagaaggagc

SEQ ID NO: 24568 - DNA, 809 bp, Homo sapiens
  chr6:37023826-37024635
  hypo
cggccacatcttctgagctgcggggtggaggcctggctgcccacctgcattccttactctgcgtacccatgatctcatcccggccctcagccacccacagggcaggaggctttgccccattgtgcagatgagacagccatgccctgccctgggatggtcatttggcctgggctcagggcactctagtgggccccaggctccggcggggtgagtggaatgtggtcacggaggccaccccacgctgtcttgttgggtttaatgagccccattggtctgtccataccctgaataagctctggtctaccgaccctcctatgggctgctggggcgggggaggtcccagggttttccagattcagctgtcctccctctgcagtctcagggacccagacagggctggctgacaaacaggtcctgcccgggatgggcgtggggctgagcgagcgaaactccttttaggaaggaaatctcggccaggttgagaaaccagcatcttgccaaggcctagggggtgggggagcccaggtgagccgactcagtcctcaggaatgggtggggtctccaggagaggcgggcacttcctccgccccagcccagggtcctgttcaatccttattgaggagtttcctggcgacaggcagtgacctgtcggctgcctgtgtgggaagccgcttggcgtggccctccccatctcattagtggtgattcacctggactcacctggctgtcagggacctgtcccactgcccgctggaaccagctcagcaggcaccctctgaggggcagagacctcgttccctcagctcccc

SEQ ID NO: 24569 - DNA, 49 bp, Homo sapiens; identical to SEQ ID NO: 7483
  chr6:38020529-38020578
  hypo

SEQ ID NO: 24570 - DNA, 132 bp, Homo sapiens; identical to SEQ ID NO: 7484
  chr6:38084382-38084514
  hypo

SEQ ID NO: 24571 - DNA, 1851 bp, Homo sapiens
  chr6:391113-392964
  binary
cgcagagacagtatttgaatcaagcttaatagctcaagggagctgggccatttcctattttctttttagtgagtgcgatgttctctaaacaccgcggagaggcagggttcccggtgatggccttgccgagggtgctcccgcaacctccacctccagttctctttggaccattcctccgtcttccgttacacgctctgcaaagcgaagtccccttcgcaccagattcccgctactacacgccccccatttcccgccctggccacatcgctgcagtttagtgattgactggcctcctgaggtcctggcgcaaaggcgagattcgcatttcgcacctcgcccttcgcgggaaacggccccagtgacagtccccgaagcggcgcgcgcccggctggaggtgcgctctccgggcgcggcgcgcggagggtcgccaagggcgcgggaaccccaccccggccgcggcagcccccagccttcacgccggccctgaggctcgcccgcccggccggccccggctctcggcttgcaaagtccctctccccagtccaacccccggcccccacaggcctcggcgccccgccccgccccaggccccgccccagagagttctataaagttcctctttcccacctcgcactctcagtttcaccgctcgatcttgggacccaccgctgccctcagctccgagtccagggcgaggtaagggctggagtcgggcaggaggaggggtgtgaggctgataccagagaggacccggagcgcgaaccagaggttcgacctccagggcagcgcagggtaccccggcttcggagcgggaagggagcgcgccccgtcctggagctccgactcccaccccatctgcgctgagccggaggcgctggtttgggctccaaggcccgcctccttggctctgcccgagcctccccgcctgccctccgcgctcctgcgacggggtcgccacaagctggacgggatgagctaaccggactgtcggggccccaggagtggctgaggcggggccgtccaaggcacccacacaagacggcacaactgcctgcgagaaacaggcccggccctgtggaccccaatccgaggctccttcccctgctcttcgttcctaaggggcccaagctcacggcggcctccggcgcggtgctcacccgctggcgcaggaggaggaggagctccacatttgggtcgctccgagccttgcgtgcggtggcctagccggcctggcgcggtccctgcctcccaggctccgcagctgtcgtcgccctctcccgcgccctccccgcctccgctctcccgggcctgctccggggtccggcggacgctctgcgcgcggaatcccccgtactggggctgcagcccccgcgtctgcgccacttgtcgtttgcagagcccacttagtgcgcgctagctgggcagggataggggtcctattcggggcgaagggtctggatgcgagcagagaaagcggagggtggaggaacccggggctgcgcccctggaacgcccggccgcaggcgaggtcctccgcgcgtggaggccgccaggggagtggaaactgacagagtcgcggggaaggggcgagaagcgggttgggagtgagcgaaggcaagcgagagctgcgagtgagtgcggaaggagggccaggaggggtggcggctgggtggggagagagggtgcaagacgagcggcgcgtgtcgggagcctttgggctgcgggtgcgttacaggagagcaggcgggtaggagccttcgcgggggccgagctcggaaggcggacggctgtgcccgcccaggggatgcgcccgggccggccgcgaaggtgccttcttccgggggcccggac

SEQ ID NO: 24572 - DNA, 118 bp, Homo sapiens
  chr6:42762779-42762897
  hypo
cgcatgaacgacagtcaaggtaactgaaaagatctacatctattgttagaaagttgtctaacttgttttccaaaactttctgctattagatttaaaaacgtgacaaaaagtcgggtgc

SEQ ID NO: 24573 - DNA, 605 bp, Homo sapiens
  chr6:47202003-47202608
  hypo
cgcacggcctaaaacctgtacttctgactctcaagataagttcaactttaaatctttggatacagcaagcttggtaaataattttcaaaaatcttgccagactacattttatcaggccttccccgaaacacacatttgatagcatcatgaggataaagggtggccgatagctctccaccgggcagtgcgagctgcaaagattttggaggcgtgtcttcgccagccaatggcgaggttactctcgggccagcgtatcttgaagttttggactggtcttcctgggcaggtaattcagatgactcaactctcagctacaactggactgtggacggggagggacgaatcccaggggctctttggggggtttaagtgcgtgtgtgaggtctgctgcgatgcccgtacctttggtaataaaggaaccgttcctgctcagcgcggaggagccgctggatgtagagtcacagcggagaaggggctccgactcatccacgaagaagcccttgttcttgtcctgtggggaaggctccaccgtcaggagagcggaattctcaagtttcgcgttggggctggggatggggctcgggctaagcgggctggggctcatc

SEQ ID NO: 24574 - DNA, 261 bp, Homo sapiens
  chr6:52344303-52344564
  hypo
cgtttaaagaaagctcattagtttctgtcataaatgcatacctgtgaatttatcattggagggttaatactattttactcctgattgcgtgagagaacatcaccaagctaagtgtgttgctaccttctctccagtgtttggtcaccggttcatcatccttgatacagacgagtatgttttgaaatacatggagagcaacgctgcccagtattcaccagaagcactcgcgtcaattcagaaccatgtccgaaagcgagaagc

SEQ ID NO: 24575 - DNA, 126 bp, Homo sapiens; identical to SEQ ID NO: 7491
  chr6:56894243-56894369
  hypo

SEQ ID NO: 24576 - DNA, 968 bp, Homo sapiens
  chr6:5996316-5997284
  hyper
cgtgctcacgtgagcgtggtcctcggcttgggacagacaagggagccccagacaggacgataaggtttggagattcccagggcgatctgggactccgtggcgtgggggcttggaagcgcgtggaggggctgagagaggggagagggcgcccttcctctagggcggccccgtctgggaagcagttggaacagcagtaggagccaggggttcctagagaagaaccctgttaggagagcagaccagcccgcgctcccagtccccgccccctcgccccttctgccccgcccttagcctgcctcttcctagatcttccaggacattgatttccgagtaggaagcccgcgctgctaggggaggggcgtcctctgtgggtcgtgggggggtttcccttctctccacagtcggagcagaagggcgcctgccttttattttgacaagcaatgggcttagttgtgagcacttgtttgcccccaatatgtagaggaaaagatactgataggaggcggcgtgctacgatggcaaaaatggagaagaccctccctctttatcctggttctcctccttgttaaatagattcgtatttaagataggcacagacattctaatttgaattccaggggttgaactccagttagaatcatcctatttatacgcagaccgaaaataaccattgaaacgaaaccaacaaaatgcaactattttccaaaaccccgagcgtttgctggtgggtgaccaccccgcgcaggtagcgcggatctgctttggttttgactgagaacccgggttttgactgagacctccgtcgggaggaggggactgggtgggagttagcgggcgaaacgattccccggagtggccccgagcggcgcgtgcgtgaacgcgcggccgtaatatatgctgccattaagaatccgtgcagcttccagcgctccgggcgcagggacgcatgtgttgctggaattcaatcc

SEQ ID NO: 24577 - DNA, 928 bp, Homo sapiens; identical to SEQ ID NO: 22937
  chr6:6008704-6009632
  binary

SEQ ID NO: 24578 - DNA, 975 bp, Homo sapiens; identical to SEQ ID NO: 7493
  chr6:71998106-71999081
  hyper

SEQ ID NO: 24579 - DNA, 1971 bp, Homo sapiens
  chr6:73331137-73333108
  binary
cgcggacttggcagccgcgtcctgcgggtctgtccactgaactgctgaggactcgcccgtgtgcggggacccgagtgccacttcccggagcgttaccttgcgctccagcctccaggctagataatacctggaaggcagggcagggctgttcccgctctcaccccttgcggaaggatggcaggatccggcgcagcgacgtagcagcgggagggcacagcgacctgcatctccagtttctcctcaggacacaaggctgacttcaccttccggacagctgcaaagcccctgccagaaccaaaccgaactcgcgcctcggagaggggcttctggggccgtttcgctgcagggcgtggggagtggagagagggaaggggaagcctggggctgggtgtgcgcgcgtgggagcgcgcctcggagcgccccgcactcccccactctatccccgggggcagtttgggaaggagggagtggtagtcgcgggaatgagggagcaagagaaaccctctcaaagtgacgccccaaacaggtccggatttagaattcgaagctaaaggctgttagaaattgggactcctcggcctcctctgcagcccctcctttcccgccccgaagcccgggcggtttgctggctgcctgcttccccgcccccggctcagaggtctctggctggcgggcgccccgtcggccgccggcttcctccttgaaacccgccggcgcacatgaggccgctgcccccgccgcaggcgctggcggccccctcgcggtgcccgtggtgatgccatgccccgccaccacgcgggaggagaggagggcggcgccgccgggctctgggtgaagagcggcgcagcggcggcggcggcgggcggggggcgcttgggcagcggcatgaaggatgtggagtccggccggggcagggtgctgctgaactcggcagccgccaggggcgacggcctgctactgctgggcacccgcgcggccacgctcggtggcggcggcggtggcctgagggagagccgccggggcaagcagggggcccggatgagcctgctggggaagccgctctcttacacgagtagccagagctgccggcgcaacgtcaagtaccggcgggtgcagaactacctgtacaacgtgctggagagaccccgcggctgggcgttcatctaccacgctttcgtgtgagtacccgcgccccctgctatgcccgctgcaggggaccactgtccctggccccctggggcgtgctccgcgctcgcgcccttgggcccccgcgcgcgtgcacacgtggtggcttttatttcttcgcacgtgttcgtggtcttccttctggagcctctcccctcccccagccccacttctctcatctctacagcttgaaccttttccccgaggacacccaatgaactgcccggtagcttcaggctcccggggcgagagccaggcagacgcgggacttaggctgcgcggataattgggagcaattaggtcccaagatacgtaaacttcaaccgaacggggcgcccgggagctagggaatgcaaagggaggacaggcgcccgtgtgaggcttgagagtatactggagaggttaggaggtgatggcggggtaggacggggagaagtgagggggcatcgagggctaggtcctcagtcctaggggcggagtaggggaagctgctacttggagagagctgctaggttttaagcgcgcccggaaacacgcctcgccaccacccagccaccaccaacggaaaatctgtcagtgcatgtagcccttcctgccacggagaaggtggccaaggtctagaggaggccagcaggccaggcgaagcaacgctcccgcgctgcagggggcggggaggcagcggggaacctggggcgcaggaacgcgggcggaggtgcgatagcagaagcgcaaatgggtcgcctctgacagagatcgggcagtgggttaagtccccgtttgtggcgc

SEQ ID NO: 24580 - DNA, 823 bp, Homo sapiens
  chr6:74019373-74020196
  binary
cgtattctgagactgtttcaatcacaaataagactcggaacagcctctggaaggccgacagcatttcgcgtttctggcctgggaaagtaagggtgcgctaaggcacgagtagtacagctcctcccgccaccgcagagcccgccggcgggaagagaccagacaccgacggagaagcgaagttcaggacgcgaaggaaagggccacttcgggtcggggtcaacccagactggaccaatgcacagtctaggtggattaacgcgccaccgcgagaagtgggcacgggaccacatgcggctggcaagacgtcccagggctcaagctccaggctcggtcaccaaacaacggtgataacatccacaacgccacgtaaaccatctttgggccttgatcgttttccaataaccgactgaactgagggcgtgaccaaacgacaagaaccggaggagaggacccggagaacggagcagcatcccgccgcccgcctccaggaaagcccgaggcactgtagcaggagggtctgggctccgcgccttaattacaccgccctggacccgcctcttccgccgctcgctcctctgaccggcacccgaaggtgctgtcccgcccacggactcgctcacactccgtttcttcgatcctttagacgactttttaccgttcagggatgctctccgttaccgcctctgccatttggttgccctccctgcggtccaagggcctggaacactccccagggctgccaggccagcgctttccaggggctccagcctacagcgccgccacctggggctggagccagaaacgcaggggccgggggctcacc

SEQ ID NO: 24581 - DNA, 813 bp, Homo sapiens
  chr6:88876714-88877527
  binary
cgccctcggggcgccgcccagcttcgcgccaggcgccttctccagcgcccgccgccctttcccggcgagaccactcgggcgcgccccgcccgccggtccccgatgcaaacagttgggctccgtaggcggctggctccgcgcctcccggcccggcgcgccccctccccggccacccggggccccgctcctcgcaccttttcgctggaggaggacgccccactccagggccggactgggggctctgggactcgggggcggcagcggcgggcgcctggggagccgcggtgtgctcagcagccgcggcaggaattaggggacatgctcgttaattgtttccactatcagccgccgtctgcctcctgtgtgcacggatcaaaccttaattggtctttacatttatcatggtgaattgcgaacctccaaacaagcctgggccgccgcttctgccgaggaggcgctcccctcccctccgcccccggggccctgcagggtgtgcggcggcggtcgtggttatttagacatctttatctctcgtgagttggatcgggagaggatcgcacggtttccacctgacggagccacgtcacgtcggccacaagggccccgtgctgggcgctgggttcggttcccggccgtcctcttgtggccgccttggcgttcattttatgacaccttgccggtgttcccagacatcatcccgcaccgctccgttttaccgacctccaggtcttcccgcccctgatcagaccccaacagcaaccgtactatatctggaccctatatttgaactacgtggtgagaatctgtgaaagc

SEQ ID NO: 24582 - DNA, 79 bp, Homo sapiens; identical to SEQ ID NO: 7496
  chr6:90359827-90359906
  hypo

SEQ ID NO: 24583 - DNA, 89 bp, Homo sapiens
  chr7:128097604-128097693
  hypo
cgttgtaaccagagaactattactaggccttgaagaacctgtctaactggatgctcattgcctgggcaaggcctgtttaggccggttgc

SEQ ID NO: 24584 - DNA, 188 bp, Homo sapiens; identical to SEQ ID NO: 7497
  chr7:128597312-128597500
  hypo

SEQ ID NO: 24585 - DNA, 56 bp, Homo sapiens; identical to SEQ ID NO: 7498
  chr7:128602091-128602147
  hypo

SEQ ID NO: 24586 - DNA, 357 bp, Homo sapiens
  chr7:1308164-1308521
  hypo
cgcgaccctggcaggaggtctcagagaagacggctcgccacaggccctcagaacaccctcctggtctacagaggggacgctgaggctgggagcgggaatgtggctggtccctgctgctccctcgctcgcccctgtccccgaagccccaggacacccagtggccctctttgggctggacccaccctggccaccctggcccttccggctgccggctggggacgcgggcgtggtgcggcaggcctgccttgattgtgtcgatgggagatgattttcaaggtgaaatttctagttcactagagtcactttcgttcaaggcgacgcacaaaatgtcatcccggcctgttccgcgtgcaacgc

SEQ ID NO: 24587 - DNA, 268 bp, Homo sapiens
  chr7:1315705-1315973
  hypo
cgggtgacccgcctcggcccgctgagcagccgaacgcgctgacggatccattaggccgctcccggccccggccccctctccctccattcctggccggcgctgtaaatctccgccaatttcggtcctaatcatcattataaacccttcctctgcccgctcccgcgcctcacctcgctggcaaaacagcccctggcatgatcatcgcaccggcctgcggggtcagcagccccactggctcgccggggcctgggcctgggcctggggggcc

SEQ ID NO: 24588 - DNA, 177 bp, Homo sapiens; identical to SEQ ID NO: 7501
  chr7:134898284-134898461
  hypo

SEQ ID NO: 24589 - DNA, 77 bp, Homo sapiens; identical to SEQ ID NO: 7502
  chr7:138993466-138993543
  hypo

SEQ ID NO: 24590 - DNA, 316 bp, Homo sapiens
  chr7:1460672-1460988
  hypo
cgtaacacgcatcccatgggcgtcccgtgccaggaattgagggggccacaccctactcaacgcgggggacagtctccgggctccgtggctcacggatggtggagcgtgtcatttcccgcatgtgacacagagtgcggactgtgcagaaggcggctctgtgcctcggaaggcagggtgcagaggcgtgcagcgctcaccacggggatgcggccggctcctgggacgggacctggaacgcggatgtggccggatgtttagtgggtgccgtgcacggtgtctgacacatcagatgtgatgtatacctcgcacgaaagac

SEQ ID NO: 24591 - DNA, 208 bp, Homo sapiens
  chr7:148841969-148842177
  hypo
cgtgcccggcttctcggctactacattttaaataataaaattatacaacagaattttctttccaagaaaattcagattattatttttttgtaatctactcatattgtgagtcagagaatggcaattttcattattaagcattcaccatctgacaaatatgtatattcaggtaaatcccaaattacggactgcatatgtagccacaggc

SEQ ID NO: 24592 - DNA, 202 bp, Homo sapiens
  chr7:148851195-148851397
  hypo
cggcgactcctacacctggaaggtcggacagggacagcagagaagaaactagccagctgtgaaaagacagttaccgagcttgggaaccagctggagggcaagtgggccgtgctgggaaccctgctgcaggagtacgggctgctgcagaggcggctggagaacttggagaacctgctgcgcaacaggaacttctggatcctgc

SEQ ID NO: 24593 - DNA, 151 bp, Homo sapiens
  chr7:148883996-148884147
  hypo
cgcgcccggcccgcgtaaagcatttttaatgtttttgtaagaataaggattattgtcatgaaaaaggtcctggaaaacaagtcaggaggccagagttttaaccttgctttcagttttctcattcataatgtgaggataatacctagtttac

SEQ ID NO: 24594 - DNA, 771 bp, Homo sapiens
  chr7:149024-149795
  binary
cgggagaacacggtcaggcccgcaggagacgccgcggcacctgccagaaagagagccgcaggccaagaccaggagacgcgagagaggtgggcagggctgcccgagagacccaggcggccattgcccgccctgcgtctgcgcctgcgccggagcctcctccacactgcgccagcgccgagtccggccgcctcctcattgcgccggcgccggggcttcctccacaccgcgcctgcgccgatgacaacccgcctctacaggacgcctgcgcaacgccatagtcacctcatcagctccgtgcacttacgagtctctctctgatcgaccacgtgttcctgtcggctcacagaggccgcctcagggtcctcccccattgtcttcctcgcaccctccactgttcccggcccttcactctgcgcttgcgcaggagtcgctcgctcctctctgcgcctgcgcagaggccacctcctccccgcccgtccgctcccttggcgtcgtcttgggccgcgccccgaccccttctgtttacgcatgcgcaggagccgccctgcgcgggtggggggctgagcccctgtggcttcaggtttaaaggcgcgagcgccacccacgcaggcacaagggctcctagtcgttttatttttagcgtaaggttttcctctttaacaaggaagtaaaaaaaaaagttgtgcaataaatattaatcgtccttatatgtactcgggaacgttcgtcctttaggttttctcctggcgcatgggcgccgccaatcatttc

SEQ ID NO: 24595 - DNA, 219 bp, Homo sapiens; identical to SEQ ID NO: 7508
  chr7:152569939-152570158
  hypo

SEQ ID NO: 24596 - DNA, 201 bp, Homo sapiens
  chr7:1547261-1547462
  hypo
cgggcaggaccacaggcgttccgtcatcctgggggggtgtgcagggtctgccctgtgctcttcatcggcgtctccctgatgagtaatgatgagcgttttctcatctttttttgtcatccgtgtatctgcattattggtgtctgttcaaattgtttgctcactttttgaaaatattttttatggccaggcgcgatggctcac

SEQ ID NO: 24597 - DNA, 1956 bp, Homo sapiens
  chr7:155164423-155166379
  hyper
cgtgacccgctccatcccctctttccctgttgcaaggcgagcggaccgcgctgcacgggtccaggctgggtgcccctctcccctggggtaaagaggcagcacaggttgggacagctagatgggggcaatccaggcgtcctgcccacggtttcctgggagccaacaaaggcgccgagacctcacccgtgtgaggcaaccgccccgtggtcccacagagcttctggaagtctgcgtcccggccttcccgatgcaaggcgccctctccacctgcctcggccgtgagcaggttcaggagggcgagaaaggttaggccgagcggaaccgcgcggccagcgttacgcagggtgccctggacacccctaggcgcccacctggacttgttcccacctcctctcgccccttgccttcttaacccgcattacccgtgtaggcctggggtggaatcggactacttgttcgggatttgctcgagaacattctagggagaaggcacgcccggctttgggcttggccgagagtttagggcaggagcgccggcggggagctccccgggtgctggagaatgcgtgtccggaaagaagtagggcgcgcttcgtggatgcaaccagggccgtctcgcgcactttcttcctaccctgggacagcgcctgaactggagctgggcgcacacactttacggagccagctcgggttcttacgccctggctcacccccgcccgccgccccaggatgcaggtgctgcggcgctccctggtagcctcccgcgctccctgggggcgcgctttcctccatttcagggaagtccccggacaggtgcccacgttttacgctgtccggtagaagcccgcgggctcaggccgacttgcgcggccgcttctccccagggagagaagctggagcttcccccacgcggccctaaggcggggccggctgggccggagtgggcgcggccagggtgtcccagcgcgccccctgccgaccgcgcgctgcggggggcaactccacctcccctggggaggcctcgtccccgctgcagggagactaaagcgtgggtccgcgaccagccggtttaggaacgaaaactctggaactaaaaacaaaaaataaaactggtgagtgcgcagcgtggtcagtgtttccctctgggtaatgcttggccaagggggaagatcgagtactcccgcccacatccgcctcccccaggagggaggattccctctctgctcacccaccctgacccacgcctcccgccaggtccactgctcagacaaatctgtaggtttctgagtatccgtatctcgaaaagcttcaatgcacaaacgaggttttaagcccatcgcggcttcgcaaggggaaggggctgcttccctaaaaacaaaacacaacaaaaaaggcaagggggtactcttgcagatggactggaattagtaatttagccagggtctcttccaaactcactgcaaaattcgccagcgtctcattcttcacacacggggcaccacacgagaatcaccccctccccagaattttgcaaagcacgtttgctgagttttctcgcctttccttccgacaagctcgaactggaaccagcgctctcccctctagacctgcctccgcgccccacccttcttcccccacacagtccctccgcagggagaattcaggtgctaaaaatgctcgggcctcgcagcttcctccctcctcctcggttcctcgaatgacccaagctgcctctttccgggcccttggaagacggtgcgaattccgcggcggcccgctctcgccagcgccacagccctgactcccacccggaggcctgagttcaaccgctttcgcttccttgcgggccgttcaaccctctgaatacgcagattcatttatttatgttttttaatgtagtaagtgggcagctaaatgaattgcaatttgtcatttttatggttaatttgaaatctc

SEQ ID NO: 24598 - DNA, 982 bp, Homo sapiens
  chr7:155166913-155167895
  binary
cgatgccccttcttccccttctctggtcccctccccagcctccggctccccaaggtgcagggctccggcgggggctgggccgggcgggtgggtttctgagccgcagcgcttggagctgggggagcgggagcaggggcggcccggcgggcgggccgggacccggcttttccggctacccgtgggccaggtgcgggtttcagcacgcggggcgcgtgtgggcggaggcgccggggcccgcggctccgcttgttcgcgcgttgtcgctggcgaggcgtttcttgtccccggcgcccgctcggtgccgtctcagtgagtttgattgaaacgcggctgcgggaaggggtcgacagaggcaagctgcgagcaaggcgggggtgggggcgaggaaggggacccggagagctcccggagggcttggccggccaccgccgcgcggcgctgctcggggactgctactttgcaaggcggcggctgcccctgcggggttcgggttgcagggtcaagtgtcacgtcctccgcaatctccaatattcctgtaatgtatttaaatggacgaattcattacgcggggccgtgtgaatggggcgaggccgcgagcgcggcgcgatcagtagcgcccactaacagttcgttctgcacggcggagcgcgagaccgcggacccacggaagccccctcaatggtgtttgcgtcctcgccgccaccggcttggtagggtcctttagggaaggaggaagagttcaggcacccggacagatcctaatggtctttctgatttttctttcccttcggtccgctttccccgcgacctcctccaccctcagtccgcctttcaaacgtcgtccgcggggatggctgcgcgatggagaaattggtctcgtccagagacgcgcgcacagccgtccccgcgcacacgcgacacgcccagggccggcgtccacgtgagggcagcaccctaggtcgggtcagtcaaaccccacagc

SEQ ID NO: 24599 - DNA, 738 bp, Homo sapiens; identical to SEQ ID NO: 23353
  chr7:155302323-155303061
  hyper

SEQ ID NO: 24600 - DNA, 180 bp, Homo sapiens
  chr7:155580730-155580910
  binary
cgggcctggaccgtcaatgccggctccgctcacaccatctgtgtccacgcagagggtcgggccgtgggagccgcgagtgtctggcccacacttctgttcttaacctcgcaatgtattcaggtttccccaggcggagcgctcagcatatcgacagctaaaaatccaaccaaggccgggcgc

SEQ ID NO: 24601 - DNA, 1084 bp, Homo sapiens
  chr7:155581242-155582326
  hypo
cgaagtaacaaagcgacaatcggccttggtcctgcgagggcagggagggcagggagggcagggagggcagggagggcagggagggcagggtccactgcccagccggggatgcaaggacggccatggggctccagcacagggaccgggccccgcgggctttgagtgacgcggtaggccaggacgagccccatccacacttggacaatgagcaaccgcagccggccgcgcagcctgggggccgtctccctctccagcccccgtgtcctctggtccacgactggctcttgccctcattccgttggggctgagtcacagccagggaaagggctgaggcagagcaacgctgggtgaaccccgtcttcctgaggccacgtttgcaccgggaagagaacacagtgaaccccctgagcaccaacacgctcccacaccccccacgagcagcccagccctggggaggagcccgtccttctccctgcttgccacaccggccacgtccgtaaccctgcccagcatcccacccaggttgtgtgggtccccacgtggtcaccagcgtcctttcaggacaagagaaaactgagcaggaccagggcttccgcctgccgcattcatctgccccccttcggctgtgccaggtgccttcccatgtggcctcttgctcctcggcatccctgggggagggaaaggcaagtgtctccctgtttcatgcagccgcgcaggcctaaacgcagcctctcctgttccaacaggcctttctggggcctgtcctgcttgccttgcggcagccaagggatataatgggtgccggccagcctcccctcccatgaccccgaggaagtccctccagcccctccctgagtctgctcctggcagaatccctctgtaagtggatgcggggtccagagatgccaccggctgggccagaccccatgaggagaagctgtgccggagcctgcaggactgggtccaggtcagggctctcacacccgctgggcggcctttgcttcccggtgctggctgtgcccagacgcctgggcttgtgcgtgtttaacccgcccagagactggtgctgccgcatttgttcatc

SEQ ID NO: 24602 - DNA, 265 bp, Homo sapiens; identical to SEQ ID NO: 7510
  chr7:156347383-156347648
  hypo

SEQ ID NO: 24603 - DNA, 1047 bp, Homo sapiens
  chr7:156432933-156433980
  hyper
cgactaacagcgcagcgaaggggcggtgcgctcgagaccctggaacgggaacgaccacagccaccgcagggaaacaaccggggcccaggcccaggtgggcgggcggctgaggagcgtggctgcgcccacaaagccgccgggggctgcggactacagcgaagccggcgcggggctcggccctcactacacgaggcctgggcgcctgcacgcccccgtgcttcagcccgcggctcccgaacacccccgccaggcgatccccaaaaacgcccgctgcgcgagcctcgacgggaacgcacctgcgtctagacgctgacgccgtgcgcggggcgggggccggcgagcatgcgcagtgtggtgtggacagggcgtggttggcaagcatgcgcaatgtgggccgggcggggctggcgagcatgcgcagtatggggcggggcggggcagggctggtgagcaagcccgcggggagcgagcgcggaggcgggcgttgctacggcaacggtgggcggccagggagttgcctgagggaaaaggggcagacgtccctgggttccggtgttcgcggaggagtcgaggcacggagaggcttcgggggagggacggaaagaagggtggcccgccaggcgggcggggtccatggattcggggtgagggccgtccgcggcctcgctttcgcctcctccgagccgggccggcgatggccgcagctgtgaggcgaggtcgggtcccgtagcggcgcgcagcctccttgggggactcggggtcctggttagtttccacagctccttctatctgaggggtacgaatttacggctgcctaaagccttagaacagtgatcccacgtcggtaattttagaacccggtaggaccggctgccatcaggggccccaggtgcagggtggtgtcagctttgagaggaattggagcctcgtcaccgcgcgcttcctgcatgagtggaacctcagaaaacggtcagcggggttcagaaggcaggagataacaccaagaccctacgtaggattgcatctttacgtcgtaggcttggtctc

SEQ ID NO: 24604 - DNA, 155 bp, Homo sapiens
  chr7:156744694-156744849
  hypo
cggccggttttgatttttatcatataaacttagatattacttttaaacaagtttgaaattgtttttaggacactttccctccaaaattagcggtttgtttaatttaggttcttgtatgctactgtgcctgcagtaagttaaggccgagcaaaagc

SEQ ID NO: 24605 - DNA, 823 bp, Homo sapiens
  chr7:156798783-156799606
  hyper
cgtgggagctaggactatgtccccaacgacccaggccggggacttttctacccgcgccctccgtctgcggaggaagggtcagggcagctggctacgtcgcggtaaatctcaggatgttccctcctctctttctggaacaaaatttctcgaatgcggcctggggatcaccttcttcagaatgaaaggaggggtggttaagtgctgattcttgggccccacccgaagctactgaatcggcgctctgggcaccttagatgaacccgtgcgcccgccgtctgaaccgtcgaggcgcagcgctagatgcctcagaccgcccgtgggtcacaagtgcaaaggtaacagtgtcccctgggaggccgggatgcgtcgggggcggggagggcgcgcacctgggtctcggtgagcatgagcgaggtggccacctcgaagcgcttgggccgcgacaggtacttgttgagcttgaactggtgctccagctccagcagctgctggctggtgaaggcggtgcgcggccggcggcacttccccaggaggttcgactgcgcctgggctggggaccaaagggcagtgaggcccacagccggctccggtcctcgccccagcccctcccgttgctgcttgtaccactacactcaaggccccagcgccaaggcctggccctgcagagggcggggctgttccctcactatcagtgcccactccccaaggaatgcggactcaggaccaccaagtggaaatggatagtttggagttaatgagaccaatttttttttttttttttgtctaggagacgtctgagtgtccctgttaaacagggcccatc

SEQ ID NO: 24606 - DNA, 356 bp, Homo sapiens
  chr7:157085941-157086297
  hypo
cggccgagcctctgctcccacggtctcaggccctccccgccctgatgagtctccgctcccaacacaagggccacgtggtctggagggaccttttgcccagctgcaggggccatctcagggagaccccgccttggaggacttgttctccggatctccagacgtttaggctgaaagtgcagagatttagaagtcggacagggagttggggagcagcgctgtgcacgttccactcacctgaacggcatcgtctgagtcgcgtttgataaaattcgtaggaggccactggtctggcctgagctcctgcaggaggcctggcagaacagaccaaaacgcagccactcgtgctagagctccac

SEQ ID NO: 24607 - DNA, 226 bp, Homo sapiens
  chr7:157129089-157129315
  binary
cgaagtctccacgcgctcccgttcgccggggaacttagggtatccgggcttccctaaattgacaagcgggggccggcgccttcgcccgccttcgctggccgccgcttggtttgttcttcttctccttcggggacttctccgcccgcgcccgcgcccgcgccccagctttcgtcccgctgtgcggagatgccacccagctccaccgcaggaccgcggagcgagaggc

SEQ ID NO: 24608 - DNA, 1200 bp, Homo sapiens
  chr7:157262486-157263686
  hypo
cggcggcgcctaattccaccttgtgtgccagtgcagttcatagcccagcagtcacccggggtggggtcaactctggaaggcccctgtgtgttgactccagggtgaacccgggactcctgagtgggcgcccaggcccctctagtgctggccgcctctgcttccctctccaggcccacctgccggccaccacagtggcccccagcgcccagcccaggtcccccacgccggcttctctcggcccaggtcactctcttcacactgtcatctgccagtcacttgcacactctgattcccaaggcgactctgctgcaggcacacgccctcagcaagacctggctgagtgccgtctgtgcccgtggatgcacgcgcagctctcctggggacactggccctggctccactccctggacagatctgtgcccggcactgggtctgctccctgcacagacccacacctggtgctggcgccactccccggacacacctgcccctggcgctggcctgggttgggtgtgtccgtgtgtccagcgctggcctggattgggtgtgtccgtgtgtccggcactggcctgcgttgggtgtgtccgtgtgtccggcgctggcctgggttgggtgtgtccgtgtgtccggcgctggcctgggttgggtgtgtccatgtgtccggcgctggcctgggttgggtgtgtccgtgtgtccggcgctggcctgggttgggtgtgtccgtgtgtccggcgctggcctgggttgggtgtgtccgtgtgtccggcgctggcctgggttgggtgtgtccgtgtgtccggcgctggcctgggttgggtgtgtccgtgtgtccggtgttggcctgtgttgggtgtgtccggcgctggcctgcattgggtgtgtctgtgtgtccggcgctggcctgggttgggtgtgtccgtgtgcccggtgctggcctgcgttgggtgtgtctgtgtgtctggcgctccagcggggagtctgtggggggcatgttgctgaggtgctgggagctgggcctgacacttctgtgttttattgaatctcccaacatccaacatcccatttccatttaacagatgaggaaatgaaaacacagagaggagaaggcactcgcctgaggtaccctgccagacgctggggacgggctcacacgcagcggcccaaagcctgctgcctctcggagcagcgggggtctgggac

SEQ ID NO: 24609 - DNA, 218 bp, Homo sapiens; identical to SEQ ID NO: 7517
  chr7:157916520-157916738
  hypo

SEQ ID NO: 24610 - DNA, 721 bp, Homo sapiens
  chr7:158349387-158350108
  hypo
cgcgcaggtcagacggctcccgggcaggtcaggcggctcccgggcaggtcaggcggctcccgagcaggttgctcccacgcaggtcgctcccacgcaggtcaggcggctcccgcgcaggtcgctcccacgcaggtcaggcagctcccgcgcaggtcagacagctcccgggcaggtcaggcggctcccgtgaaggtcagggggctcccgtgcaggtcgctcccacgcaggtcaggcggctcccgcgcaggtcactcccacgcaggtcaggtggctcccgcacaggtcaggcggctcccacgcaggtcgctcccacgcaggtcgctcccacgcaggtcagagggctcccgcgcaggtcactcccaggcaggtggctcccgcgcaggtcaggcggctcctgtgcaggtcgctcctgggcaggtcgctcccgcgcagggcaggcggctcccgggcagggcaggcggctcccacgcaggtcaggcggctcccgcgcaggtcaggcggctcccacgcaggtcgctcccacgcaggtcagagggctcccgtgcaggtcactcccaggcaggtggctcccgcgcaggtcaggcggctcctgtgcaggtcgctcctgggcaggtcgctcccgcgcagggcaggcggctcccgcgcaggtcagacggctcccacgcaggtcaggcggctcccacgcagtttaggcagctcccgcgcaggtcaggcagctccc

SEQ ID NO: 24611 - DNA, 840 bp, Homo sapiens
  chr7:1598548-1599388
  hypo
cggctgagccagatgcgccagctcgggaaccgtggaccaagtgtactggtctggggatgtcaggagcagggcctggtccccagggaggggcagtcgggaggttgaccgctctgccacctgctcacagggctcgccggctgatcgaggcctcacccggtgctggtgtcacagcctctgcgcccggtcacaggaggcggcagggccggctgggcctgatttttctggcgggggcgggacactgaccaagcccattgcaggacagacctgtctgcccagatccaggcgacggggccctctgaccattgttcactgcgtccaggtgcccagagctgtggggaggctgagaagccgcccagccagtcccacaccctggccctggcacagccacctcctcctgctctcatgagaaacccggctgagggcccatgagctgttgcctggttccaggccggctgccctgctagtgcccaccccgaccccctgcctgcccgtctctctgcagatgcggacaggcatggtgtacccccctgcctgcctccttcactgctgggtggaactcggggcgcccaggagccgcctcctcagggctggctcatttgatgtcccaggctgagctgcacactagggggatgaggtgaccggtgggcacccatctcagacacccggcttcccaggtcccgcggccctcccctgggggccctggccagcagttcaccaaggcagcagccccgggtgtgagcagggggtgacagggatggggctccacatcctcccggctctgcttctgggattcccccggctcctgtccacgggcacggcctcctgagagccgcgtggggc

SEQ ID NO: 24612 - DNA, 714 bp, Homo sapiens
  chr7:1641685-1642399
  hypo
cggtgccaagattcttcaacgtcctcgggatgcacctccgcactgtggggccatctgggtcagcccggacgcaccggcctctgtctgggtcccagtcttctcaccgccaggcgggcaggtcagcagaccaggcaggaccgagcccgtcgcccggggctcttgttgtctgtgccatttcggtgccttttgtccttgcttcccgccgctccttgaggatgtttaccggctgctggggccgtgccttccaggtgaggcctcggtcattccaggtgcagcctcggatcagggatgacggcccaggctgaagtatcatgatgaagagcttggaccgagggcagttaaggtgtgtgagtattcagatcccccacgtgcccttctctggaaggtgccagcgacctgtcctctctgggcctctgtcttctcctctgtggaatgggaatgatggcgtccgcacctcatagggctgctggaaaatgggtctgggtctcggctggaatttcagccagcgccgaggaccagaggccctggttcctgtccacgtggcctgggacccccgcggccccgcacctgggctccgggggcaagtgtgttcgctttgaggacccagccttggaggtcagatggcatccgttatgggttaaattttgtccccctaaattcatatgttgaagtcttaacccacagggcctcagaatgggatggtatttggagccc

SEQ ID NO: 24613 - DNA, 404 bp, Homo sapiens
  chr7:1694568-1694972
  hypo
cgaagggggtgcccagcctcgccccgcccagcgcacccctgcagcagcccgggagggcaggccgtggctcctgggaacacggcgcccagctgcaatccacattgctgctagtgaatatggacaattcagagacatgaaataaggcagacagagaaaaagcatcggtgactctgccaggctacatatgtgtgtgcgtgtctgcatatatatacacacacgtgtatacgcacacacagagccacacatcactcaacgacagggacacgttctgagaaatacatggttccgtgattttgtcatcgcgcgtacatcctagagtgactcacacgaacgcagatggcggagcctaccccacgcctgggcctcgcggtacagcctgtggctccggggctacacacccgcac

SEQ ID NO: 24614 - DNA, 748 bp, Homo sapiens
  chr7:19147137-19147885
  hyper
cggaaacctgattgcaaaccgctgttccttcgaaacttgcaaaacccggaacagaaaactcccgcccagccaattttagctctcgctgaactctcccgcctgcgttacgtttgcacagcaactctttgtaaatgtccgagtcctctcggaggaaagatcgttagggcgacgagaacattaagaggggacctggagggcagatatcctcgatcccaagagagcaactttgtcgcctcagaaaacacgccaacttccctcctgctctttccttggtcaactcagaatcaaccgattgtattgaaatctcctgaaatcccgaacagggattggcccagtcggcttctgaaaccgaggccggggaatggcaggaatggggggcagagaggatcggaaagaagagtccttcccccacagacattcccagctgggacacgagctcgctcgcagcgcgtttatggaaagagggggcgctgggaaccgcgctggcggcgagcagactccagggtcgagattattcgacacgtgtcttttattcctcacaatccatttcttacgggtgatttatgaacgaatctctttgatcagggacggttttatctgtccactgctacagatgacagatgcggctgctaaaatgcctggtccccgctgcctaaaaggttgctcccccccttcccaaatgctgttgctttttctctggcggtccccaccccctgcttcttcgttctccttccctacccccaacccc

SEQ ID NO: 24615 - DNA, 1861 bp, Homo sapiens
  chr7:19155978-19157839
  binary
cgaaagaaagggtggcgctgacaaaacggtccttacccgtgaccctgggtgtctctgtctcccctcctgtcacgcacactcacgcgcacacacacccctcaccagggcgcatccccctggagactgctctccctagcggggtcagaccggccttccggggacgctgggggcgcgaggcaacggtgccaagtgaggtgggaaggctgagcggagagtgggagaggggaggaaatcgaggtggactgggaaccgcggcctggccggcctgccgtctgccacctgagaggcgaaggggtgcagcggcgcggtccttacctaggtctccggccctgctgagggggtggggggctccgcctgctagtgggacgcggacatggaccaggccccctccatcctccagaccgagaaggcgtagctgagccgctcgtgagccacatagctgcagcttgccatcttggagtccagctcgtcgctctggaggacctggtagaggaagtcgatgtacctggccgccagcttgagggtctgaatcttgctcagcttgtccgagggcagcgtggggatgatcttccgcagcgcggcgaacgcctcgttcagcgactgggtgcgctggcgctcccgcacgttggccatgacccgctgcgtctgcagctcctcgtaagactgcggactcccgccgccgctgctgctgccgccgccgccgcccgcgccgccgccgccgccacagcccgcagacttcttgccgcgcttgccctgggccgggctgcccggctcgtcgccgcctccgacgcccccacccgcggctccgccgggccccgcgccgccgcccgcgctgcgcctgctgctgcgccgcttgcgtcccccgcgcttgccgctcggcggctgctgccggtctggctcttcctcgctgttgctcaggctgtcgtcggccggcgagactggcgagctggacacgtcctgcatcatctctcgagcggcgacgcgtggcctcgcgggcccggggcagaggagaagagcggggcgcctcagcccgccagcttcccccgcgcgcggcgccggcccgggcgatgcggcccgcggaggagagagcaggaggacggacgggagggacctccgcggggagggcgcgcgggggaggcggggagggaggcgggagggggaggggacggtgtggatggccccgaggtccaaaaagaaagcgcccaacggctggacgcacaccccgccaggcctcctggaaacggtgccggtgctgcagagcccgcgaggtgtctgggagttgggcgagagctgcagacttggaggctcttatacctccgtgcaggcggaaagtttgggggcagcagtgtcattggcctgacgtgaggaggagggacttttcgaagttttataggaaagtttccgctttccagtccccctcccccgtcccacctcccttcctcggggtctaacaattcgtcctcccaaaccattcaaaaacgacctggcccgggcggccggcccctccacccgcctcctagccgccctcccccttccctccccgtcgccttcctccggcgggcgcggggcgatttccttccccgccggagcgtgcgggcagcgcccccgaaccctagcgcagcccaggaagcggtcggaggagactgtcctggccgcggtggcagccccatccggagtggctgtgacagcagcaatggcaacagcttctacacagtgggtgatgtctcatctcgcccaagagccctctaggtccgtggggccgatttgggattgctggggctgggggggtggtgtggcgcggggtgggggggcatgccaagaaaagtgtcaaccgcggagcccacccaatggtcaggtagac

SEQ ID NO: 24616 - DNA, 296 bp, Homo sapiens
  chr7:1931663-1931959
  hypo
cgccagccctgcgagctccgttcacggtgagcaccctacgcaggtgcaccgtcttccacccttcatacatcatgtttatggcaccttttccatatttaaacacgtacagacacgcagatgcttagcactgcgccacggtggtctactgcattcagcacagtcacgcactgcacacttttgcagcttggcagcagccggctaaaccatgcggcccaagggtgcgggaggctgcacggcccaggctcgtacaagtcattctaggaagttcccgcaaagacaacactgcccaccagcac

SEQ ID NO: 24617 - DNA, 212 bp, Homo sapiens; identical to SEQ ID NO: 7524
  chr7:1932177-1932389
  hypo

SEQ ID NO: 24618 - DNA, 163 bp, Homo sapiens
  chr7:1962376-1962539
  hypo
cggtgagctgcacggtttctgcagatgctctttggcaaacttgggggttctcggcttctcctggtttgccgagtttccccatgaacgtgtgttgggcctcgctgactgcatttgtgcatccgttggtttggccatgtaatttttccttttggcgagctgacgc

SEQ ID NO: 24619 - DNA, 1116 bp, Homo sapiens; identical to SEQ ID NO: 7525
  chr7:21984770-21985886
  binary

SEQ ID NO: 24620 - DNA, 1467 bp, Homo sapiens
  chr7:23507981-23509448
  binary
cggaacaccacgccacacggcagggggtaagcaccagaggacaagaagttctcagctgagtctctccacccaataacggagtgagaacagaatcggggcaaacagaagcagcagctcacctttgcctttttgggaccgagtgctcaacttctatgggtttcccgtgcagttctattttacctgcggacacacaagaagtgagacggtcggccgagttcagcggctctccctgcccgaagacccgcacagcccaagcggcgacacaaatggcctcctgaggccctcgaagggcccccgaggcccggacgcggctccaggcggagggagaagccgaccccctcgagcggcgtgggcatttaactcgcagatggttggggagcagggtccgctggcgggcccactacttgggtatcagtccagtctccaagcctcccccacccacccctgggggccaccaacaccacgaggcccgcaagagggacgcggcccaccctctcaccgccctggacacgctccacagggcagactcggggcagggggctcccctggctttcttcaggagggggcgccctggccctgccctctgcttcagcccagacccgccgggaacactcagcggtgggcttgaggaagacagggagtggcgagaaagggtcggggacggcaggggagaccacgaacgggagaactggcagaggcgcagctcggcacaggctgaaccaggcgcgaaggacggcgaggcgcccgcaccacgtctgaattgattaaaagggaagccgaaaggcacggggctcccatggggaccccaacgcagccttccccctgggcgtcctgctccgcccggcaccgtccctcgccctggcggagccatacccggaggccgcagccccgcgccagggcccggagagcggcgggcggccggtgcgtggcggcgactcccttccaggcgaccagccgcccccgcccacctgcccctatcgctcgtcggaccaggggaggtggaacggggaaaccgggcacacactctctcctcccacagggtggggaggaagcgcggggccgcctgtgcgaggcaccagcctcgcggtctcactcggcagcacggtcgaggccactttccgttctccacggccgggggtttcggggcgcagcacagacagcgccgtaaataacgaccgaggaaagcaggaaggaacgaggcacaggcgggcattctagctcggcccccgaggcccagcgtgccggggcctggagcacgcgcctgggcccgggcggggcgccgggggagcgcgcctcccccagccccgcgccccccttagccagcgccggggctttcttgacagcgcgttcgccctcacccagcaaaccccggccggggaagcagagccgcgggccggagtgggagccggagctgaggagagccccggcccccacgcgcgtgggtgtgggcgctcaggcctcaccccc

SEQ ID NO: 24621 - DNA, 929 bp, Homo sapiens
  chr7:23510081-23511010
  binary
cggccagcggactgtgaaaatatcacactacgtgaggcaggcgccgcctccccataaaaaacccagaagggtgactggcaggagggaggggagaggaggaggaggaggagggaggaaggcgcaggaggcggaaaaaatccgctccgagtgtccggctttttgaatgagccacgtgttcaaactacaaatcaacgtctcacgtgaggaatcccagagcctcaattagagtgggtttcggagaaaaaagcgagcgagaggaagagggggaggggaaacgagattgggagagggactctgagaagggggaggaggaagaaggaaaatgctaaaggaaccgcagccggcaccaagcggggcgctgacggtcacaactcgagtttgtaaagggttatctggtctgggcggatcctgggagggagggctggaatattgatttttttttttttaatgaggaaatgggcagaggtactaacaggcagttcctcagcgctagttaccgtagttttaatcattcgatttttcaaaataggttattaacaacaaaaccagagtcacaatcccgaactcgcctggtggctttaatggcattagaagtgtaaccccagcaaagccgcaggcacgtttctaaggctggcatggacggaaatgctgcgaggaggggtgggggagtgggtgaggggggcagggggtgggggcaagacaggcgggcgacgcgccccaccccgtgcgcccttctcgggccctgggcaccgcgcgagtgggggcggcccggccccggagtggtgggggatgggatcccgcagcgtcctgggcgggtgtctgggcgacacctcctccgcctccgcctgcgctcgcggtggctctcggcttcgcgtttgccattggttgcgcgattcagaaaaggctccaggataaatgaggccgggggc

SEQ ID NO: 24622 - DNA, 1232 bp, Homo sapiens
  chr7:23513246-23514478
  binary
cgcccggcttgggaccagcctggagtctcaagccgaaacccctcacgcgggtgggcacacaatgcccggcgtgtcgcctgggcctcctcggaggtgctttaacaggctcttgcgcttttgaacggccctcctggactctgatctgtttaaactagaggcgttaataagtgataacctggatctgccctccttggaagctgcctgcctatattttattgtttaaaataaataaaaatggtgccccgggagagaagatggggttgtttcctttttcctctggctctgccccgagaaagagggcgggatcctcacggctcacagtggggagggtctttcgtcggccgccggctcgcctcggagggcctggaccactggaccgcccttccccggggccctgccgcgggaccgcgggcttctggctcctcctggggctgcgtccgtatgcgcggagcgtgtggccgggccgtcgccgcgccaccccacctgagtccgccggccagcgcggggacgcaccgggcagcgtgtgtttggcgaccctcccgcacctctggtctcagttgcgtgtgtgcacgaggggttccatagggcccagggatgcttggtacccacgggggagaatccctcgccgaaccctgcgggtctgcggggcgggccgcgagactggcgcgcaaaagcggctccaaggcggggctcccgcgctccccggggccggcttgccgagtccaagttgagcaaccggcgtcgagagagacaccgcccctgctgcgggcgggggcctctcctcgcttccgattggctgacggggggaacctatcgccgtcggccgcctccgccagagcggtttgctggttttcattcattggccccggagccgcccctggatttccatcttttgtggcgcgaaaataaccctttgctccctcgttggttttgttgaggttgaggggtgggactgtgttcccctctgctcgctctcgtttttcctgccctttaacagctcgcccccagccccaacccccaaggaagaaagagggaggtaacgctgaggaagggtggaaagcagttctgcgtccgtgggtggagcccgccccttggctgaccgcatggtgcccgcacggtcccttcccttcccccagcgtccagcgcccggaggttctggatttgcgccatgctcagcagctggagtcacatcttcgtttccctgcccatttccaacatcttagagttgatgc

SEQ ID NO: 24623 - DNA, 941 bp, Homo sapiens
  chr7:27195477-27196418
  hyper
cgaacaaacttaatgttaaaattccaagacaaatggagttaaataaatttacgaggatcgaacccattaattgggccataaaaagttttatgagcctcatttacatacaatgctatgggctccacgcaatggcgcctccgctccaattaaaaccagaaaggctgcgccgggagtcacggggctaccggctcgcaacagcctggctccgctcttccggccccgcgccccgcgctccgcgctccccagcgctgcgctccccgctcccggtcccgctccgccagcctggcccgcctagcgactgcgcctacctgaagaccgcatccaggggtagatgcggaaattggcctcagccgcgccatgcagcgcgccctcgtccgtcttgtcgcaggcgcctttggcgaggtcactgcagagcccggggatgttttggtcgtaggaggcgcagggcaggttgccgtaggcgtcggcgcccaggccgtagccggacgcaaaggggctctgataaagggggctgttgacattgtataagcccggaacggtcgaggcgaaggcgccggcgcccgccccgtagccgcttctctgtgagttgggagcaaaggagcaagaagtcggctcggcattttggaacagagaagcccccgccgtatatttgctaaaaagcgcgttcacataatacgaagaactcataattttgacctgtgatttgttgtccggcagctttcagtgtcggttttacgaggtagagtgatatatgataacattacacccccagatttacaccaaaccccattttcttttggacggagctcgccgcagcacgtgaccgcccacatgaccgcctccgccaatctcagcagtcctcacaggtggtctcgctccgcagggcccgcagccgcctagaatggaagggcaagaggctcaaatatgcggccaaagaatcc

SEQ ID NO: 24624 - DNA, 985 bp, Homo sapiens
  chr7:27204281-27205266
  hyper
cgcctcctctcccgtagccctgcgggccgctcttcactgctctccagacttggggccctatctgaggcgtcccaaacaccaacttctggctcctggccccaactcgagaggcttccagcgaggacgaaggcaggctcgagagaaacctggcgggccagcagatccgggaggccggcgtggaggcggcggcggatttgaagggaggagacacttactgggatcgatggggggcttgtctccgccgctctcattctcagcattgttttcagagaaggcgccttcgctgggttgtttttctctatcaactggaggagaaccacaagcatagtcagtcagggacaaagtgtgagtgtcaagcgtgggacagtcaccccttctggccgacagcggttcaggtttaatgccataaggccggctggagggcaagcccgcgaaggagagcgcaccgggcgtgggctccagccaggagcgcatgtacctgccgtccggcgccgccgccgccacgggcgcctgggggtgcacgtaggggtggtggtgatggtggtggtacaccgcagcgggtacagcgttggcgcccgccgcgtgcactgggttccacgaggcgccaaacaccgtcgccttggactggaagctgcacgggctgaagtcggggtgctcggccagcgtcgccgcctgccggggaggctggcccagggtccccggcgcatagcggccaacgctcagctcatccgcggcgtcggcgcccagcaggaacgagtccacgtagtagttgcccagggccccagtggtggccatcaccgtgcccagcgcctggcccgcccggcccgacccacggaaattatgaaactgcagatttcatgtaacaacttggtggcaccgggggggaagtacagtcacctaataagttgccggcgcccgcgcccccattggccgtgcgcgtcacgtgcccgtccagcagaacaataacgcgtaaatcactccgcac

SEQ ID NO: 24625 - DNA, 833 bp, Homo sapiens
  chr7:27205279-27206112
  hyper
cgatgttttgcagtcataatttttatagcaaaagccatatgtttttatgtaaagggatcgtgccgctctacgatggggtttgttttaattgtggccaacgacgattaaaagatcaaatctagccttgtctctgtactctcccgtctccccccccatacacacacttcttaagcggactattttatatcacaattaatcacgccatcaagaaggcgcgggtcccgcgtgcgagtgcggccagcggagcccctcacataaaattagacaataattgaagccataaaaaagcagccaaatcgcattgtcgctctactgtatttaaatctatatttatgatatttcataaggagttattgtttcagaagccacacaggctggcgggaagtcggaaacgaccaacagattcgtttgcctcgccgtggctcccagctgtaaaaatttacgaggacttggaaaggttagactgttgtgtttggttggcgagctccctgtaaataatccctgcggtccccgggagaggcgagtttacccgcggccgccctcgaaaagtcaaattcaacgcaggatccgtcccaaacggagccgccgccggccctaccagggcactccaggcagggaccggccgctcagggagtaccgcgggtgtaggtccccacagctacccgcctggagcgaggggcgcccgggcaacccttaaattcgcctttgctacgaggaccccacggaggagctggccaggagggagcggccagccgccaccagggcgaaggttttgagggcctggttggttgtgcggcgcgctcggtccccggccctcgaccccacgcacacgc

SEQ ID NO: 24626 - DNA, 1770 bp, Homo sapiens
  chr7:27212356-27214126
  binary
cgattccgaggtccaggggaagggaaatggcccttctctggctctcagctcagggccccccgcttccaggccggatttgccttttcttcttcccgcaacgaagattcccgcccctcagcaactttgaaaaaagcatgggggatcgtaaactcgaacttcgccggttaatgggcttatttattggcgctggcggctgcttattttggatgccttacaaacatccgcgctatctgcgggcgagctactttccctccctccccctccccccgcgtgggccgcgccgcgcaggctgggcagggaccagggctctgggtcctcccggccacaggaaagagcgcacaggagggggcctgctcgctggtgtcctcgtccctagtcagggggagctgaggccagcgccgaggacgtcttgctgtggggcgctaagccggacatgaattttactgcgtccccacgcccaaatattaaaaagcaagttcacaaggtcagcctgcctgcagcttgggccaaggccggccggctgctgcgcgggctcctagttttctgatccttctcctccttgtgtctgcctgtctgcccgcctgactgcagccctctgcagccctgcttacccagggaatccttctccggcgaggctttgctgctctcggaaggggccggggagagctcctccgcggccgaggacgacgcgtgcgcctcctcgtcgccctgcgagcccccgccgctgccgcaagccagcgtggggggcggcggcgaatcgagggctcgctccttccgggccgcatcggccgagccggaggctagcgcgggcgggagatcgaaaccgcgccccgggggctgcgcggggaacgggccagccccgagttgctgcgcgccgccgccgccgctgccatagcccttggcggtgccgtaggcctgagaaaggcggaagtagccaggcactggcaccccgctggaggtgcccagggcgcagccgtcgggcggcgggccccgcgggaagggagccagttcggcggcggtggccgagactttggggcatttgtccgccgagtcgtagaggcagtaggagctctcttctttgatgttctgcgcgaaagagcacgaggtggcctgcggcgctggctggggtggttgcggcgggggcggcggctgctgctggggcggcggcggcggcccgtcaggcggctccatccggcaagaccggggcgcgtctagccacaggtctatgggcgagggcccgtagccgtgcgccccgggacctagacccccgccaccgccaccgctgcccggcgacgctgcctcattgcgcttgccgcccagcgtggggaagagcccgcagctctgcagcccgtagggcaggtcggcggcgggcggcaggtagaccccgccgtgggcgtagtaaccgccaccgccgccgccccccgcgccaccaccaccgccgcctgcctcgcctctgcccgagctgatgagcgagtcgaccaaaaaagagttcgcggcggggctctccgagcatgacattgttgtgggataatttggcgaagggagcagatagccctttctggctgacatttcttgtgcaaaacatgctgaatacgattagcaatccccccgcaccgcggcgggcgcccgcagccaatcccgagccagagtttccgcgcgaccactcccagtttggtttcgtaggcgcggggccgctctccgagggcgccctcagagcccgcgattgatataaatatgtaatctgtattgatgggccaggagacgcacccc

SEQ ID NO: 24627 - DNA, 941 bp, Homo sapiens
  chr7:27232216-27233157
  hyper
cgggacctgccggtgccacggtcccgtgcgccgggtcccggcctcgggctgcgggcggcttcggggcctacagcccagcggcgcggagcgtggcagaggcgcggggcgcagcgcagcccgaggctgcctcccgcccgggcggacggcgcggccgctggggtgcacagcgtagccccgcgtgcccggctcgctctccgttccctcggatagctcccaccgctcggctccgggctcagaaagcggaagtatttggtagagaaaaacacggtttcttttcagctcgtctcaaaatcccttttagagaaaatgctcctgtcaagttttatttcccgttgcaaaccaccttccacgctgccaagaattaagaccgggagagattaaatacccgattattctcctggggagggcggggcggggccgggaagtgggcacccacaccaaacattccttgaagtaggcttgtcctgatccagccgcgcccggggagccccacgaaggcccgcgcggcctgcggtgacgtcagcctgcagttgcggggccactcacccgcacagacacggcccttgctgttccgcgccgggacctccgccagccgtcctgccgcagccccgactggcccgcgtgccgtcagagggaggcccgctttacaccggcctgagcctccattttgagtagggggttcttgtagaagcgtggagggtttggggccgcgcctctgtccccgaggggcgcgacatcaggtagctctccgagttcacaccccagtacctgggggaggacctatgtcgccgcataaccgcccgcagaggtttggaaatctctgagacccgttgtaattatttctgcccagtggatccggctcttcagcgtcacgagagccgggcagaaatgaaatcaactgtggcaaggccttggctgctttcacggaggagtttttctgc

SEQ ID NO: 24628 - DNA, 838 bp, Homo sapiens
  chr7:27278957-27279795
  binary
cgacaagccagctcctggcccccggctcaggactcctcgctctctcccttctcggggccctgtcgccgttgaaaggcccgctgcaggctggggagggtgatcggggccgcgggccatctcccccgagccgggcgggcagactgcggaggcaggccccacacgcgccgcttttccgagcccggttttcttcaggagcgaagctgttccagctgacccgcgcgtctgggggcctatgcccggcttccgattccatttaaaacgacccgcgcatcttatctccgtcgcctccccggggttcccacccacccccctccggcccgggccaggccagcccagccccggcggaagccaagctgggagcttttgaagtccggagaatttcaatccgagaggagccggctggaccggagcccgtcgccccagcgggggaagggacggggggcctgccgtgtggcaggtgggggatgggtgtcccccgccgcgagaaatgagaagccgccgggcctggagcggcctccacctcagctgctatcaccccctctccgctgtcatgggattgcccaggcttaatggggttgtgcagggcttcacttgctctcggaatttaccttccttctcgagccgtgccgcgaataaccttcacgacacagtgataacgatgttattaaatactccccccacattcaccgcccaaaaaaccaaaacagtgttcttatccagtcctctctttttttgtcttctttcctttaaaaacccaaccgctcttaatgtgaggttgatgaaaggatgcttttggaagaagtgacatttggttaaaacgttttccccctaatgcgcc

SEQ ID NO: 24629 - DNA, 1308 bp, Homo sapiens
  chr7:27284928-27286236
  hyper
cggggtccaggctggggaggcgggtgtgcacctatttagcgggaagtaaatgccaactgccaactccctgaaacgcaggccaggaatctgggcctggggtctccctgcccggcgcgtgcagattgaccctcgtgacagctcctaggcaggcattgctgccatgtggctgactctgtccctttcctggttaaatagacaaggggtgggcgtgggggaaggggatagagtgcctgtgcgggtgacaaggaagtttctggggacacgctctctgcggccgcagaccaattgagtccatgtcctttcactgctcctcccatacacacactggcctctggcaccccgggggcctggccacctgggcagaaggaaggagggagcgggctggagtcactccccaaacctctctcggagggattccagctccaggtggtggtggtggggtcggtctctacccggctggtgtctgctttggctgttcctgccctgcgaacactgtccccggagcgggaccagactactggcctctgagcatcgggccaagtccagctactgaacctgctccgctcctctccccaggtgtggttccagaaccggcgcatgaaggacaagcggcagcgcctggccatgacgtggccgcacccggcggaccccgccttctacacttacatgatgagccatgcggcggccgcgggcggcctgccctaccccttcccatcgcacctgcccctgccctactactcgccggtgggcctgggcgccgcatccgccgcctccgccgccgcctcgcccttcagcggctcgctgcgcccgctcgacacgttccgcgtgctgtcgcagccctacccgcggcccgaactgctgtgcgccttccgccacccgccgctctaccccgggcccgcgcacggactgggcgcctctgccggcggcccctgctcctgcctcgcctgtcacagcggcccggccaacgggctggcgccccgggctgccgccgcctcggacttcacctgtgcctccacctcccgctcggactccttcctcaccttcgcgccctcggtgctcagcaaggcctcctccgtcgcgctggaccagagggaggaggtgcccctcactagataaggggccgccggctggctgccggctccatgacgcccgtggggtcaccccccggccccgggactcagccagcctcgctcctcgctcctcgctcctcgcccctaggacgccaagggggaaaggagagggcggaaaaggaccagcgggatccggccgcaagaattggaaagcctaggaagtggcggtggctggcgc

SEQ ID NO: 24630 - DNA, 1216 bp, Homo sapiens
  chr7:27290961-27292177
  hyper
cgtcttcatcgagattatttatagcgcagtgagcgctgctgaaaggtatacgctgttaacagggacaattacttaaagggaagcgtttgtaaaatggaaaacaaatgccggggttggtaacaaatgggatcaaaagcagccattccaatctggctccccgagggaaaggagcgggcgtggccctgtaggattaggggcgcttctgacctccccaagacccaggtgaggccgagggtccccggcgcgccagcctgcgccgtggctgtggctgcggtggcgactcgggccgggcctcgctctcgccggcttcaggttcccgcctccctcgcgcaggcagcgggcgcgtgtggcccgggctgggcaagccgaggaacagcgagcccccggacgctgactgcaggacgtcccagtttgtgcccgggtctccgtccctccccgtacggggctcgtacccccgggcctgggtctgacccacagggcgctgaggcctttgtagctgaagtcggaaggcctcgttgcgagcgcggcacaggttgctggtagcttctggactctggaggcttggccttccttctaagccgatggcggggaaagaacctcgtttccacagcttccccgacccccgccgcttgccatttggggacgggaagcgcgcccgggtcgcttcacgtccctctgggccggagccctttccatggctggctcctctgggggcccttgggcctgtgagcagcgtctacttccctcagagaagaatcctttccttcccccatcgaagtgtccctttctgtatcctgaaataacccctcctgggtgaggccagttcccctctgtcgccctcctcccgcaggcgtccgggagcctcgtgaggaccccgtgcagttgagtccaggcgacaggtgcctccccaggtgtctacttgccctccctcaacctgtttagggaaagaccagaacgatgtgcgcggggaggtggttttgtttctcccgaaactggcgctcttgggtaaaaccgcgtgccgcgtctacgcgggctctgttagtgtgcgtgtcccagaagagtgggccttctaggcggcactctttggagaagtaagtgaggtgaactcagaacagagaagcgggaacgatcgtttgatgtgccgagccggaaaaagagaggagagggagaggctcccagcgagcgcggagacagaggagcccacgcggcacagcac

SEQ ID NO: 24631 - DNA, 125 bp, Homo sapiens
  chr7:27686735-27686860
  hypo
cgctttggaccattatgaaataaaataagggttacctgaaaataagcacgcgatatcacaacacccgatcactgaggcggctagtaagtgactaatgggccagggagtgtctgcagcatggagac

SEQ ID NO: 24632 - DNA, 414 bp, Homo sapiens
  chr7:2770625-2771039
  hypo
cgtgacagtttccatgtccttttgcctagagctcgctggctggctggtctgacagcattcctgagccaggtattccagggcacggatccgagaaacccactcaaggaccacacagacaacacacacccaagagtctgaccgacagccgtgggggctgctcaacgacgacaaaccccggggcttcctcgctcactgcagcatgatgtccttcaggttctcctgcaggatggtgtctttcacagcatggaacacgaagcggacgttctcggtgtcgatggcggtggtgaagtggtggaagagtggcttgctgcggttccgtctcttcctgtcgaagcactggaccaggtagcgctggacgtcctccagcctgtgcgggtcgcccctgaagtccgggaagtgcttcttgatgctcac

SEQ ID NO: 24633 - DNA, 126 bp, Homo sapiens; identical to SEQ ID NO: 7538
  chr7:27831654-27831780
  hypo

SEQ ID NO: 24634 - DNA, 60 bp, Homo sapiens; identical to SEQ ID NO: 23638
  chr7:2798471-2798531
  hypo

SEQ ID NO: 24635 - DNA, 1068 bp, Homo sapiens
  chr7:287728-288796
  hypo
cgagccgtctgacaggtggagggggagggtgctccacgcagaggcgtggtcgggccttgggtcccgggtcggccctggcagacggcccacgtccctccacacctggtcacctcgcctcacaggacaatcaccacgtcctccgtcagcaagaaaagctctcgccctgcattctccatttaattaagcgagtgggagcctgtggtgtggttcagaaggagttccattaaaagtggctcctttaatttaattttgttttaaatttagccctggaatgagggcaggctttagctatgcaggcagttggtgctgtgtgcccatcagtgaggcatcgccagccccagtccctcaggggcctctcccacccccatcaccgtggggccaggcagagccaccggacctagggctgggtttattcggaggcagggacacagaggcccgctgagccgcacagagcacagaccctcccctgccccgttcttatttggaggcagggacacagaggcccgctgagccgcacagagcacagaccattccccgcccgtttcttgccaggatcctggacttccgccgggtccctcccgtggccggcaggatggtcaacatgaccaaggagatccgggacgtcacacgggacaagaagctctggaggaccttcttcatctctccaggtagcctggcacgggggcccgcattcatctctccaggtagcctggcacgggggcccgcattcatctctccaggtagcctggcacggggagcccacattcatctcgccaggtagcctggcacgggggcccacattcacctctccaggtagcctggcacggggggccgcattcatctcttcaggtagcctggcacggggagcccacattcatctcgccaggtagcctggcacgggggcccacattcacctctccaggtagcctggcacgggggcccgcattcatctctccaggtagcctggcatggggagcccacattcacctccccaggtagcctggcacggggagaccacattcatctcgccaggtagcctggcacaggggcccgcattcatctctccac

SEQ ID NO: 24636 - DNA, 166 bp, Homo sapiens
  chr7:28989198-28989364
  hypo
cgagagtgagacaccgtctcaaaaaaaaaaaaaaaagtacagctgaccttcctgagtctcggattatgtatctgtgaattcattttctcaccaaaatttgtttgtgaccctagaatcaacactccatagcactgtcatggtcattcgctgacatgcttagggcagc

SEQ ID NO: 24637 - DNA, 1325 bp, Homo sapiens
  chr7:293618-294943
  hypo
cgcttcccgggcgaggggctgggcacagagcagggaggcacttgcctgaggtcacacagctccaagccctcctaaccccgcccgggaggcccctttaatacccgatttggatctgcaaagagaaatggctgtgggcccgagaaatgcctttctcttttaacacgataccatctgaaaccggcttaggcgaggacgggaggctgttaacagcagacgaattttaagcctccagccaatgagcgctcagatgaagattttcctcctgaaatggagctcctgccccggtgggggctgcctcgtccgactgtgggctgccgactaatctgtatcagcacgagacaggattgcagctggtctttccttgatcgttcgttcttacaataatgacccagcgttggcagtggggtgagggggcgcgggaaggagggggcaggcaggtgatcggggcgttggaaccagaccagccgggacctgccgggtgcgtggggtgtggtgggggccaggtcggcctggcacccaccccgtttcctctccgaacctcagcttgttcagctaagaaagggcagccgggaccggccaccctcctgttcactccgctgggaagcgccctgccgaacctgccttctgatcccacggggagcctgccctgcagccaggagagacccctggaatcactcagcctggctgcataggaatgctgggactgggggagctgtgagtgaggttcggggctccggccccaacaaaaccacgttctcaccagttctacagccccaggctttccagagtttctccacaaacaaataaagcaagaaaaactagatttaatcagcaaataaatacaggaatagcgccgtcggccgggcctccagcatcagagcagtgaacccgcactgctagcgggcctggacagcgcttgcatttttctgattattctttctttattaaggtataattcatgtaccacaaaatttaccatttaaaagcgtacagttccgtggtttttagtatatccacaatggtgtgcaaccatcaccactgtctaaatccagaatgtcctgctgaccccaaaaaggagccccgtaccatgagcaggcggtcaccgttcctcaccccgcagccctcgacgagcagcgtcccacccccagtctatctggatttgcctgttctgggcgtttcatattaagagggtcatacgacgtgtggcctcctctgtctggcctccttcgcggagcacagggttctcgggttcagtgagggcttcattcctcttcttgtttcatttcgtttcgtgtcatcgcacggatggaccatgttcacctggc

SEQ ID NO: 24638 - DNA, 396 bp, Homo sapiens; identical to SEQ ID NO: 7543
  chr7:3018114-3018510
  hyper

SEQ ID NO: 24639 - DNA, 34 bp, Homo sapiens; identical to SEQ ID NO: 7544
  chr7:30341584-30341618
  hypo

SEQ ID NO: 24640 - DNA, 277 bp, Homo sapiens; identical to SEQ ID NO: 7545
  chr7:31032061-31032338
  hypo

SEQ ID NO: 24641 - DNA, 1809 bp, Homo sapiens; identical to SEQ ID NO: 22945
  chr7:37487365-37489174
  binary

SEQ ID NO: 24642 - DNA, 929 bp, Homo sapiens
  chr7:409502-410431
  hypo
cgccgtggccagacgcccggcgatcgtccactgtgccgaggccccgggccccaggctggctgcagaggcgaacgacgcggccggccccgcgctgcagacgggccgcctaccccagcggtgccaccaaggccgctctcaggctgccccacagctgcgtgccaagcccctgacgggcactttatggcacgttatctcgcctgtgccccacaacaacccggccgggtgggaattccgctcccattaaacagataaggaaccgggattcggagaggcgagggcggccccaggtcccgcgggttataaagcaagggctggacccagcccgggcccacctgactccgagcccacctgatgctccggcacgggcccacgccccgttaataaaatgtaataaatagactctttgtttcaaagaaaatgtttttaaaagcaaggcagccaagccgggcccaggtaacaagcagagggaggaggcctcagagggaggaggcctcagcttcggactcagcccaggcctggcctcccgactcccaccaccaggggcctggctgtacctgtgggggctggagccccagggcagacacttcgcagactctgtgcagggccaggtgagccccagggcggagctggcagctgagggtgctccgtggctcggtgcactggccctgactcacgaatgccgcagcgcgtcctacgggaagccatgtcacagcctccgtcctgcagggcaaagggggctgctgcgggcaaagatggccagtgatcttctaggttactgggtgcaggaagcaggaaaaggcccagagacactctcagttcttccagaaagccctgggggatttgactttgaccacagtgcgtgcgtccaggtattacctcattccttggcttttcgctacagacagactgacctggctggccgggttgcc

SEQ ID NO: 24643 - DNA, 434 bp, Homo sapiens
  chr7:431401-431835
  hypo
cgggctcacccaggccagctctggatgctgaagccaccaggcacggggctgtgtgtgcagaagcagccaggcagggcggcccagcagacgcagggagcggccgccagccgctaggatcccgatgccgccgcaagtaaggacaggcccgggtgctgccgcaggaggccaggcctgcgctcgccgctgtggaatgtgtgtttgtctgatgagcatccctgcagggccccagatggagggtgtgacaaggatgggggctgagtctccagggcccgggggcacctgcacgctgcccctggcaggggcccgggcatcccacctgagctggcagccctgagcctgagaccagggctctgactcacttctgggccgccctcctcacagagatctgagaggggctttcccggagccaggcagggaggcggccgtgcacctgc

SEQ ID NO: 24644 - DNA, 58 bp, Homo sapiens; identical to SEQ ID NO: 7550
  chr7:47639927-47639985
  hypo

SEQ ID NO: 24645 - DNA, 1629 bp, Homo sapiens
  chr7:50343211-50344840
  binary
cgggtgggcactcgcatcctggggccggagcctgaacccgggagccaaggggccccagttccagggacgtgaagctgagcgtacagcgggcgctcccagacactggggaaagtgctttacgatgtcccgagtccctccagtctcgccagcggggcgagcgtgagggtgccccgaccgaccagcggccccgggtgcagggtggcgggcccggcggcgcgcgtccccctccccctcctggcggcccgcacgtgtcgcccgcgccgcgcccccacgggttacgcgcgggtcccgcagcgccgcggccgagccgggctgcccggcccgcggacacagcgccggccgccgcatcccgtgcggggccgcggcgcgatgctgcgctggaatgaggaagcgcggcggcgaggggagggcccgggcgcggtgcgcgcgggggtggcggcggcgcgccgagcgggcccggcgcgggcgagcgggctgcagccggcggcggcgccagcaggtacggcccgcacccgccgccgccccggcggcctttgggggctgagccggagcccggcgcgattgcaaagttttcgtgcgcggcccctctggcccggagttgcggctgagacgcgcgccgcgcgagccgggggactcggcgacggggcggggacgggacgacgcaccctctccgtgtcccgctctgcgcccttctgcgcgccccgctccctgtaccggagcagcgatccgggaggcggccgagaggtgcgcgcggggccgagccggctgcggggcaggtcgagcagggaccgccagcgtgcgtcaccccaaagtttgcggggtggcagggcgcgcgctctggccacccgccgctctgggcggcagctggtggcaacgcaagggcgcggcgggggcggccggcgcggagggggccaggtacggggcccgcgggcggcgctgtgcgcgcggggcagccggtcggccgggagcgcgaaagcctggtctgagccggctgggggcggggagtgtggcggagaaatggggaacaatgcgagtgagcaacttcaggaagtcattgtgaaagaaagctgggaagagctccgcggccaagttagcaggacactctaacaagtgactgcgcggcccgcgcccggggcggtgactgcggcaagccccctgggtccccgcgcggcgcatcccagcctgggcgggacgctcggccgcggcgaggcgggcaagcctggcagggcagagggagccccggctccgaggttgctcttcgcacccgaggatcagtcttggccccaaagcgcgacgcacaaatccacgtgagtgttttcaaattgaatttcaataggaaaacttggggtaactggtgaatttaaaaaaaaaaaaacacagtaaagaaaagcggtaaggttggtagaccctggtgtcgctcaggtccgcctctcttttctgaggacagtgagagagttcacttctgtcaagcgtctgttgctctgcactgtgccagcaggtgcaggaccaggccgacatgggacacttctgagcagccccgctgtcaccaggagaggagttctagctcccaaccatatttaaatttatgtagacctacatatacccacggaagtcagcctttataaagtc

SEQ ID NO: 24646 - DNA, 552 bp, Homo sapiens
  chr7:5647853-5648405
  hypo
cgggggcatctctggggtcccaggtgagatgcgggtcgagggagccaggccacggttctccagactcgcgtggaggccacgagcgtcttctggaggagcgggcactgcgcggaccggcagactctggggcgctcaggctccccatctcctgaccttttcctaccttcagttccctcctgtcaggacaggttctggggctcgccggggcagggagccagggcagagggtgcagtttccgctcctgcctgagtcaccttcgctttctcagcgattcttcattcacaagggcgtggcccatcacacgcactcacacacttgtgaacttgcacgcacacacacatatggacctgtgcaaagagccccatgcacaggcaggtacacgtgcatgtaggcgtgcacacagacacgcacagatgcaggcagaccaactcccaggaatctgtctccagcctacagggattcagcactcagggtaccagcctctgtcccgtgcacccccattcccggcagttctcccaggtgggtcgggggccactagggaccccatacccc

SEQ ID NO: 24647 - DNA, 209 bp, Homo sapiens
  chr7:6442423-6442632
  hypo
cgagaacaccgagcactgaactttgcaaagaccttcgtctttgagaagacggtagcttctgcagttaggaggtgcagacacttgctctcctatgtagttctcagatgcgtaaagcagaacagcctcccgaatgaagcgttgccattgaactcaccagtgagttagcagcacgtgttcccgacataacattgtactgtaatggagtgagc

SEQ ID NO: 24648 - DNA, 167 bp, Homo sapiens; identical to SEQ ID NO: 23643
  chr7:6443294-6443461
  hypo

SEQ ID NO: 24649 - DNA, 425 bp, Homo sapiens
  chr7:6443704-6444129
  hypo
cgtgtctccacacaggagggacagggagtgccacctccaggggagaactgggtgagcccaaatacggcaggagtggaggtgacattcatgtttggacctgtcgaacagtggcgaagctctgagggagaagcgcctatcggggtgtgtgtgcacatcctggcccagagctaggggctgaagatggagatgttgggaccctagactggccctggaagagtagaggttggtgaaccacatgcccttaagatcctttccagaggctgagtgcgtggcttacgcctctaagcccgacgctttgggaggctgacacaggaggagcgcttaagcccaggagttctagaccagcctggacaagaaagagacctacccaaaaaaaaaatgcaagagcctgaacttgtactacataaaggttcatgttagaattc

SEQ ID NO: 24650 - DNA, 170 bp, Homo sapiens
  chr7:6524924-6525094
  hypo
cgggatggggacgtcacaagaaattgcaaacaaaaaaagctgacaaacaggatctgctacataatttgcgggacggagtgcaaaacaaaaacgcacagttcgcagttcaaaaagcagggcgggggcgaggacctggtgcggtggctcatgcctgtagtcccaacactttc

SEQ ID NO: 24651 - DNA, 274 bp, Homo sapiens; identical to SEQ ID NO: 7555
  chr7:653522-653796
  hypo

SEQ ID NO: 24652 - DNA, 107 bp, Homo sapiens
  chr7:66293261-66293368
  hypo
cgcgcctggcttccacggtgttttctaacgccgcagcgaaacccatccgtgtgccacgtcaattccttagccgccatgccatgctgtcatctcagcctgagcttggc

SEQ ID NO: 24653 - DNA, 118 bp, Homo sapiens; identical to SEQ ID NO: 7557
  chr7:67353388-67353506
  hypo

SEQ ID NO: 24654 - DNA, 31 bp, Homo sapiens; identical to SEQ ID NO: 7558
  chr7:7839208-7839239
  hypo

SEQ ID NO: 24655 - DNA, 251 bp, Homo sapiens; identical to SEQ ID NO: 7559
  chr8:102450881-102451132
  hypo

SEQ ID NO: 24656 - DNA, 126 bp, Homo sapiens; identical to SEQ ID NO: 7560
  chr8:103572766-103572892
  hypo

SEQ ID NO: 24657 - DNA, 221 bp, Homo sapiens; identical to SEQ ID NO: 7561
  chr8:118531602-118531823
  hypo

SEQ ID NO: 24658 - DNA, 596 bp, Homo sapiens
  chr8:121823361-121823957
  binary
cgccacccttcccccccccccaacacacacacacccggccccctggggtgtgtccgcatgtggccgagtgagtgtgagtgtgagcgtgcgggtgggaagccgagcaggtgtgtgcgcgcccggcgcggcccgcgcgctgttaaccccttaccttccagcagcacttccttgcccgcgcgcttcaacgcctgcaccgcctcgtcgtgggtggcgtcccgcaggtcggctccgttcacggacaggatggcgtcgcccacgtacagggcttgggtctggtccgccgccagccccttgaagatcttgctgatgaggatgggcatcttgttctccttgccccccttgatgctgatccccagcccgcccagctcctgcttcagcaccttcacgccacgcttctggttcgagatggactcgggcacctgctcgggcaggtcggtgaaagcggtgcggaccccggcgggcgagtccgggggctgcgcgccgcccgcgcccgggtgcccagccccggcgcccctgcagaacgagccattggtggcggtcccgatgccgttgtacgccgcagcgccctcctcgctgctcagaaccagggcgtcctc

SEQ ID NO: 24659 - DNA, 318 bp, Homo sapiens
  chr8:123966060-123966378
  hypo
cggtcagagggcagcagccgggacggccagggtagcgacgagaacgaggagtcgagcgttgtggattacgtggaggtgacggtcggggaggaggatgcgatctcagatagatcagatagctggagtcaggctgcggcagaaggtgtgtcggaactggctgaatcagactccgactgcgtccctgcagaggctggccaggcctagacaggtaattccacctgctcacccaggcagcaggggagaacgcagcttgctttcttttcgttgccagggttaatatagattgtagggtacagagatgttgacacagatggtggc

SEQ ID NO: 24660 - DNA, 638 bp, Homo sapiens; identical to SEQ ID NO: 23377
  chr8:124172800-124173438
  hyper

SEQ ID NO: 24661 - DNA, 340 bp, Homo sapiens; identical to SEQ ID NO: 23645
  chr8:126044399-126044739
  hypo

SEQ ID NO: 24662 - DNA, 997 bp, Homo sapiens
  chr8:128871653-128872650
  hypo
cgccgtggctgactccaaacttgaactctggtctctgtttttggagcttgcttccttcctacgaccctagactgctcctcctaaataattaagtggcaaacatggcacagacagtaacctcacataagaagctatgaggttaggacagaaatatccactgctggcctgcgaactattcacacaggtctgactccccgccagagtcctggctgccctggtcctgtggaatcccgtcatggcttctgtctaaacggagcaggctcagggccatgctgaacttggagaaatctgtgcaggagtcagatttgggctttagagtcacctggggttgaatctcgggcctgctatttattgaacctgtcctagcctcaatcgccttatctgtaccatggggatgataccatctaggtcgaaggtagttgcaggagattctcatgcacggaggcccttggccgtcatttgtttctttgtctctacaagcagagaggctgagtcatacagatcctgaggggagatcactttctcttccctcctttcgtgtgtcatctccacctgggtgtggtgagccccaggaataatgctgtgacatcaagccccgtgaacacctcctttcacacggaccccgtgactggctgcggctgccagcggtgatgagaactgatgacactccagggctaccaggaacggtgtgtgtgcctctgggcagggccacttcctagaaccatggggctgctctgtgaagagaaccggctcccagtgagctccaggagacgaggagcaggtcctggtggcggaggtgctggcgcaggaggccggctcctggcagaatcggcttccagctctgggcactggggtgcggtgtgggaccagcaacaggctgctcctctgccaggaaccgccagaaccaaagtcttctcgaaggcatcttcagaaggcaagcacagggctgagcactccggagaggagcctttgggggaaaactttttctcggagcttc

SEQ ID NO: 24663 - DNA, 171 bp, Homo sapiens; identical to SEQ ID NO: 7566
  chr8:134335659-134335830
  hypo

SEQ ID NO: 24664 - DNA, 368 bp, Homo sapiens; identical to SEQ ID NO: 7567
  chr8:140785341-140785709
  hypo

SEQ ID NO: 24665 - DNA, 327 bp, Homo sapiens; identical to SEQ ID NO: 6625
  chr8:142227279-142227606
  hypo

SEQ ID NO: 24666 - DNA, 965 bp, Homo sapiens
  chr8:142367176-142368141
  hypo
cggccacgtggtagaccacgaggctcgtgtggtgtggcatgtcgggccacagcgccacggccacttggcgggcgtggaagggcgtgaagcagacgagaaagatgatgagcaccgtgagcaggagctgcatggcccgcacgcggcgctggcgaccctggtggagcagacccggccgcgacagtgcacacatgatgcggccggtaaacacgctgatgaccagcaggggcagcaggaactccaggacagtcagcgcaaagacacggcagcagggccggctgcctgtcacgcccagcaccgacagggtgacggcaccggcggccagccacacgaaggcgcacacggccctggcacaggcaggctggcggcagcggcgggagccttcgggccgcacgatggccaggtagcggtccacgcagatgcaggtgaggaagaggatggagcagtgcatgttgaggaagtaaccgaggacgtgcgggaaggcacagcgcaggcagcccctggcgccgtagtacacagcgaagcgcgtgggcagggacagccctaccagtagatcggtcaccaccaggttgatggtgtagatgactgagggtgtcttggcccgggtgcggcagcagaagacgtacagcgccagcccgttgagcaccagccctgccaggaagatggctccgtgcaccgccatcagcgccagccacaggcctgggaaggtgccatgcagctcctcgtccagccgggcaaacaggtggaacaggggcacctccagcccgctggcattggtccgcactgttgtcactgcggtggcattggggactgccccggccgagggccccgctggagacacagagggcatgacggcagccagcacaccccaggcctggaagcaaggagaccaggtcaccccaggcgccagcctggccttaagccctgccctgaggcccagaactcagctggcccgtctgcccctgcac

SEQ ID NO: 24667 - DNA, 245 bp, Homo sapiens
  chr8:142439127-142439372
  hypo
cgcacctgaggctgcgctggtcaggacaggttgggccatgctgcggaaacagccaggcctgaaccccaacgactcagaacagcacgggcgtttcttgcccctgttgcgtgtctgttggtgggggccctacccggaggcgtggctgagggctgcgccttccccagtgtgccggctgctgggcgaggaaacgagcacggtggagccacacggggcacctgcagctttgctgggcagagactcctcgc

SEQ ID NO: 24668 - DNA, 305 bp, Homo sapiens
  chr8:143089014-143089319
  hypo
cgagcgcctcagggtcggcttcccaggccttcgcagcccgtgtgaagctagagcgtctgggtgccctggaccgccacccatgccatcctcagtgaaggagctgggctcagacaggatgcccaagagaagaatgacctgaaatgacatctccgctgatgcccagctcagtgtgcagaggctattgtctccccgtccacccacccctgaggaagccagcctgtagctatcccctcaggcccttccctgacctgctgggctctgctgttagcccctgagcagccaccactcgcacctggacacaccgc

SEQ ID NO: 24669 - DNA, 387 bp, Homo sapiens
  chr8:143333267-143333654
  hypo
cgcccgcgttctctgtctgcagggcccgggcaccatgtacccgccgcccatgttctctgtcttcagggcccgggcaccatgtacccgccactcgcgttctctatctgcagggcccgggcaccatgtacccgccgcccacgttctctatctgcagggcccgggcaccatgtacccaccgctcgcgttctctatctgcagggcccgggcaccatgtacccgccgcccgcgttctctgtctgcagggcacgcacgttgagagagagcttgtttgatatctgggcggtttgtttggtttaattttgttgttttccctttctgctgtcaagaggtaaacagacggctgcttcatcttcttaagcaggcctacattcgtaatgcatgggttgc

SEQ ID NO: 24670 - DNA, 943 bp, Homo sapiens
  chr8:144343416-144344359
  hypo
cgctgagatgtgatcgtttctttcctgagaatgagctgaggtaaaaacatgctggggaggaagatgggccctgggggcagcgagctgcgcctctgcaccgggagaaaggccgtgtccccagagctgaggcggtggtgggcagggctcctgagaagccggggcagggcagggtgtctctgaggtcaatgaggaacagctgaggtccagggacgcaggaaggatggggtgaactccgggatggggccggcagggagcctcacgcttacagagcctggtgttggcactctcctggcttcctccgcaaacctagccacgtggtcagggagcccgggcctagcagacggcccccaccttgacagaatccccagggtcgtgcgtggcggtgggggcgacttcacagccgagaccgggcctaacgctgctgtctcgcagtcacccctgcaggccgctcagggcagggctctggcctgacgggggttcctggacacgcctctgagccggcagcccctacccgcacccgtgcaccttccacgcccgtctccagcagcccctgcccccacccgcacccctgcacctgccacgcctgtctccggcagcccctgcccgcacccgcacccctgcacctgccacgcccgtctccggcagcacctgccacgcccgtctccggcagcacctgccacgcccgtctccggcagcacctgccacgcccgtctccggcagcccctgcccgcacccgcacccctgcacctgccacgcccgtctccggcagcccctgcctgcacccgcacccctcacggctgtctccggcagcccctgcccgcgcccgcacctctgcacctcccacgcccctctccggcagcccctgcccacacccgcacccctgcacctcccacgcccgtcttgccctggggcccaggtgcaggtctgtgaggagggcagcccc

SEQ ID NO: 24671 - DNA, 231 bp, Homo sapiens; identical to SEQ ID NO: 6627
  chr8:144351704-144351935
  hypo

SEQ ID NO: 24672 - DNA, 942 bp, Homo sapiens
  chr8:144359694-144360636
  hypo
cgaagctctgggagagctcagctgggggtggctccaagtgctgagtgccagtgattctgccagtgccttctccctgccctgcctgtgccctccgggacagctggcagaccccggaccccagcctggctcctccgaggctgtccctctccaggtctcacctcccctcctactgtgactcatccagaaccccgggcctggcccccagatgtgcctgtggcgggcctctgaggtcactgtcctggtgaagacgaaggctaccgtccccgctttctggcagtgtctgcgagggcctgcgcagcgcgcatctgatgtcatcagcccccagcaagcccgttttccagaagagaacccggaggctccgaggtgacgtgtggcttgctcgagatcacacgatcagtgacggcaccagatgaatccctgagctccctgaccagccatccacccaggcccctgctgagacagcgggacctcgtttccaactcagaagcccccggaacgcggctgcccggcttgggagcctgcggcacagggccctgtgcagccccttggggaagacggccccaggctctgccagcccccgccaccctctccagaccatgctctgggggccctatggccaccagcgctctggacgccccactctgccaggtgagaacgagtttaggggtgcgggctggaggtcagtgtgtctgtccgaagtcagctgggaggcaggcgcctacttgaggcgtccttgctggtgtgcggtgggcctggggttcagactgtctgcctgaaaggtaagggtgaggacgcctgcattctccttgttcagtaacacgcgtgggcagccaggccgaggtgctggctctactaggggattcatctggtgccgtcactgatcgtgtgacctcgagcaagccacgagtcacctcggagcctccgggttcttctctggaaaac

SEQ ID NO: 24673 - DNA, 227 bp, Homo sapiens; identical to SEQ ID NO: 23649
  chr8:144414263-144414490
  hypo

SEQ ID NO: 24674 - DNA, 425 bp, Homo sapiens
  chr8:144636447-144636872
  binary
cgtgcctgcatcaacgagcgggagcacattgggcaaatgcacgtgtacatgccctacgtgaacacaaacccgtggacacaacacgcacgtgcatgcacccgcacacagacacgcgcacaaacgcgcacacgtacgtgtatgcacacgcgcacaaacatgcacaaaacacggacgtgcatgcacacgcgcacatgtacacaacacgcacgtgcatacacatacgcacaatacgcacgtgtgtgctcacgtgcacaaacgcacacaacacgcacgtgcatacacgcgcgcaaacgcacacaacacgcacgtgcatacacgcgcacaacgcgcacacaacactcaggtgcataaacgcgcgcaaacgcacaacacacacgtgcatacacacgtgcacaaacacgctcaacacgcacgtgcaagcaccc

SEQ ID NO: 24675 - DNA, 349 bp, Homo sapiens
  chr8:144668627-144668976
  hypo
cgacaggcaaaggcgcccatgtctgcgggggaaggagtgccaggcctggccccacaccaagtgcacaggcgccggcaggagggccctgagcagacccggcccgggggcccggccaaggccgcctgccccgagaccccactcccagcacccacagcagagccactgggccagggtgcctctgccttcctggcctggctgaatccgctttgtgtgccccggccactcctgtcgggcagcagagccgcccagccgccccacgtgcagctctcacctggcgggaggcacctgccacaggcccgttcatctgctcgtagaatctcctttctgcgtcgtcatatttgaacttgtc

SEQ ID NO: 24676 - DNA, 945 bp, Homo sapiens
  chr8:145697806-145698751
  binary
cgggatccaggtggctggcctcacccactgggacgtgcccaacctggagacattgcaccaggtagggctgcaccgctctccgagaccccgccccgtgcttccacttgggggcggggaccctgcacctgaccagcccttcgccccgccttccagatgctgaaactggggaggagcaaccgggccaccgccgccaccgccatgaaccagcgcagctcccgctcgcatgccctggtcacgctgacgctgcgcgcggcgtctccaccgcgcgctccaggcaccgcaggtaccacggccggtgcctgagccctgcggagtctccagagcacccgaggcccggccttcccccatgtcgggctcgctcgcccctctaggcacgctgcacctggtggacctggcgggatccgaacgcgcacggaaggcaggggcggccggcccgccgcggggagacccagacggcgcccggcgcctgcgggaggcccagaccataaaccgctcgctgctggcgctaggaggcgtgatggccgcactgcgggcccaccggccgcacgtgcccttccgcgactcgcagctcacgcgactgctgcagccggcgctgggcccaggcaccaccgcggtgctgctgctgcaggtgggcgccggggcggggcaggtgtgtgcgtgccggtcgccgcccacccgggcccgcccacccgcgcctcttgcccgcagatctccacgcggccggaggatctcggggagacagtctgctccctcaagttcgccgaccgagtgggtcaagtggagctggggccagcccggcgccgcagggtcccgcgctcctccgggacgccttcttccctcagcaccgacactccgctcaccgggaccccctgcacccctacgccgtcccctggcagtcctccatgccccagtcccgacaacggctcgggctcggctctcgcgccc

SEQ ID NO: 24677 - DNA, 135 bp, Homo sapiens
  chr8:146079230-146079365
  hypo
cggcattgttggctattagagaaatgcgaatggaagccacggggaggtgccatttcataccattagaagggttataataaaaatgacaggttgggtgcggtggctcacgcctgtaatcccagcactttgggaggc

SEQ ID NO: 24678 - DNA, 81 bp, Homo sapiens; identical to SEQ ID NO: 7583
  chr8:146176654-146176735
  hypo

SEQ ID NO: 24679 - DNA, 334 bp, Homo sapiens; identical to SEQ ID NO: 23651
  chr8:23423722-23424056
  hypo

SEQ ID NO: 24680 - DNA, 576 bp, Homo sapiens; identical to SEQ ID NO: 7585
  chr8:26436208-26436784
  binary

SEQ ID NO: 24681 - DNA, 367 bp, Homo sapiens
  chr8:27779460-27779827
  hypo
cgccgtgtcgctctgctggcccgtgcggtcccgcagcagggccaccgcctgctcggtctgcaccgcctgcgcctgcagcccccacagcgcgccctccagccgctgcactgcgcccgccagcgccagcaacgagtctgactggttctgcagcgcgtcctgcaccttccacacctgctccgtcaggtccgcttgcagcggagcctgcagcagccgcagctgcaagtcccggaagctctcattcagccggttcacattgcgagtcagggccttcaggtcgtcaggggagctgcgcggcctggacactgcggaggaggaagaggggagacttgagcaccgctggggaggaaggccccgggtgacaagaggc

SEQ ID NO: 24682 - DNA, 55 bp, Homo sapiens
  chr8:27914751-27914806
  hypo
cgattcatcttgtaaacagatgaagtaaacttatgctattgataaatacggtgcc

SEQ ID NO: 24683 - DNA, 824 bp, Homo sapiens; identical to SEQ ID NO: 23382
  chr8:38323132-38323956
  hyper

SEQ ID NO: 24684 - DNA, 182 bp, Homo sapiens
  chr8:41668165-41668347
  hypo
cgggccttccagagcaacgtgccgccgaagcgtaatagcccgatgggttcatcttgcccgctgcccagaaagccaaaagcgcggagaacaggcactgccccaaagtaagggcctcatgaccacagggccgggagagccaggagaacaggagaaacttcccacacctgtctccccgggaattc

SEQ ID NO: 24685 - DNA, 209 bp, Homo sapiens
  chr8:42749975-42750184
  hypo
cgcgagacaccgcgcctggccacgtatgtgtaatttctaaaggtttctctgcccttggtgtagggaagaatgtttgaaaaaaagaccattgagaatacttcaggtaagtttttttttttttacacttacaaaatgctaaatgatcaggggtcaactatcaagtggtactctgtaaggcaaccttaaaaactcactgctgacccaggctc

SEQ ID NO: 24686 - DNA, 494 bp, Homo sapiens
  chr8:49468683-49469177
  binary
cggtcggtcattagcgcgcgctctccccgcgcccagggtgcccccgtgcccagggtgcccccgcccggcgcctccgcggtcccctcccgcgcgcacctttccgagtgccagtggggcggccccgagaccgcaattgctctggcccggattgacgagcctccgatgcccatttactgcgcgcggcagccactctggagccgcggcacatctggatggagtcagctgcctagcgccaggggccagcacggcccagccagcggagcgcggcggtgagcgctagggaggccggcgcccgggccgcctccgcggccgaccccctgtccccacccgagcaggatttcctgatgtaaacacagcggctctgcgagaacagagctgctctcctgaatgtgtcatttagtgttctttatctgcttggggtcagcatagcgacttagaaaaacagcagtcttgctttgaatttaaacagcgaagaagccagagggtcctgttcc

SEQ ID NO: 24687 - DNA, 441 bp, Homo sapiens; identical to SEQ ID NO: 23652
  chr8:49571728-49572169
  hypo

SEQ ID NO: 24688 - DNA, 864 bp, Homo sapiens
  chr8:54789114-54789978
  hyper
cgggcagctgaaggtctttctgcagataacttttctcagatcgaattttttggctacattgatactcttcggctctgtccttgccagaagttcggaaggattccagcgccccacaccttgcttgattcaccctcatcccctcccctaactggagaagccgctgggtcccgcgccaggctcgcggtggcttcagagtagcaggggagcaggcggctgatccggaggccagtgtggggccggcaagcggtgactgtctccagaggagcaaaggagccgagtcttgtttttcttggatcaggtttgggacttttattctgtctgaccatttccaccacttgcctcacaagagtctctgtctcgaagcacaggaccgaagcaaaatgcctaatgaagcgtgcctgaggaaggggcaggggcttgcaagtgacttgggaagaaggactggggcgaagggagaaaggaggttacgagttcgcacgttctcacaaaaccatttgaaaacatgagctggagacgccaaattctgggacccacgaaaggctttggagctcgctcgggctcctcgaagttgggcgtgcgtcgcagaacagtgctgggcgctctctttcagcattttcggcttttttcaagcccttgcgtagggtcgggaaggccgtgggtgggctcagtcaggctttaggtcgccaggaacccggctggtcctctctcgacttcttagcgtggggtcccgccggccctgccgcccgtggccgccgaagttcccgccctcgccgagggccctcgctccggagtggggcgcagacgcggccgccggcccgcagtcccccgcaggtgccgcccaggactagctgcccggcggaggcc

SEQ ID NO: 24689 - DNA, 971 bp, Homo sapiens; identical to SEQ ID NO: 23384
  chr8:55370128-55371099
  hyper

SEQ ID NO: 24690 - DNA, 1491 bp, Homo sapiens
  chr8:60030415-60031906
  binary
cgggactgcttagacacgtccaactagccctaggcgtgggcagtcgtgcccctgcgaccactctgggggaccggtccctgcgtgtcctccctctctgggatgagagagttcgagaagccgggagagtaaccccctccctcgtaccccctgactgtcctataggtggacccagccgaactccgcagcagcccaggccagcgccccacctccgggtcaccggcatgatccgcctctccccgggcccccgcggccctggcacccgaggtcagcgggccgtgggtacagctcagccgcggaccctgctccgcgagtgcgggagctttggacttgaacgcgacgtgctcgcccggctcccaacaaacttgcaatttccgcgcgcaccccttaaacaggaactgttccccaaaccttgacccagctaccccgctgtgctctggcccgcggacctgtgtccgaacccgggctcggctgccggaaccggtttgagaaaacaaaagagttgtggggcagttttccctgtggggggcaggggcgcctcccaggtccctgcaccccgactcccggctgctcccctggcaactaatccggagaagggaagtggtgccacgagcccccactgcccggggagggagggagagagaagggggaactgggaaataaactgaattctcttactctgcctccgttcctggaccccagacacacccccaaagtattccacggttttctcttattatttttttaaacgccccccggcaaacctaggcagggatccttagccgcgaacagcaggaaggaaagaatccgagcaaatcgtgtcactttccgcacaatcgcggtgtttggcaagcccccggagctactccacaatatttactacccaagcgcacgcaggctgcagcgggctgcgagccgagcgcgcccgggaccggcctccgccaagccggccccgccgcggcccggccaccgccgctcccctcccaggatcaagcagcaagaacacggtggaaacaaaagcagagcgttcaccttgttgcaatagtaggggtccaggcagggagaaggtcccagacagggagcgtcgggcgcagcggcgggctgggctggaggtggataaaatcttacgtccatttcactctcacatcaagcaactccttttctttttccttttttaaaaaaaagtgttcagcaaaacaagcttagacggaacagagtgaggtgtctgggctcaggagtaaaagaaacaccttccttccctcacatccgtttgtggtttgtttaagaagaagaggaaaaaaaaaaaaaagaggggggaaaagcgctcaactctcccccaagccgcggcgcgcacccgtcggcgccgagcgcgcagcctgctccaccgccgcctcttggtcccgccgccgccgctgccgccgccgccgggcaggtaacttcatgcgctcattgtcccccccgcccgcccccccatccccgcctcccgcgcccctc

SEQ ID NO: 24691 - DNA, 833 bp, Homo sapiens
  chr8:60031912-60032745
  hyper
cggcacacgcgctcgggctctaggtactgggcgttttattggagattctgagttgttctgcttgtagtttattttctccaccttggaggcccgggatgtggggggtgggggggtggggcggggatccagaagggacagggcgggaggggggcgagcgtcccgggccgggcggggtagggagcgcggccggacgcgggctcgtcaaggcccaatggctgctgttcggaaccagaggccggggaccggagaaaggaggagcggagaaggagaaggaggagagcacggcctggctgggacagaagcggtgggaccctgggaggcctccgctgtgcccgtgccgcgctcctcgggaccagcgcgtcgcacacaaaggggctgccgagccagagccaccagcggcctcagggcaccgtggggagcgcgcagctagggggcgctgtggcgcaccccgccccgcagccccgcccccggccctccccggccccaccccactcccaccgccctctccgcggccgtccccacccctatctccgcgacccccactcctcctcggctgttccccaaccctgtcactgtgctcccctccctactcccggcccgtagtggaggtgactttcctgcgcagcgccgcttctgagggcggagaacccacagggagtgcgacccctttgcacgctgtgagtgggcaactgtccgagggactcgagccgatcgaagggtgaggaccagctcgcctgggggtggacggcctggaaaagccgcccctctttggcttccctctgccgcctgcagcccgcacccctccgagattcgtgccccactggacggtttgc

SEQ ID NO: 24692 - DNA, 313 bp, Homo sapiens; identical to SEQ ID NO: 7594
  chr8:6414561-6414874
  hypo

SEQ ID NO: 24693 - DNA, 69 bp, Homo sapiens; identical to SEQ ID NO: 7595
  chr8:66877733-66877802
  hypo

SEQ ID NO: 24694 - DNA, 1501 bp, Homo sapiens; identical to SEQ ID NO: 22963
  chr8:67024920-67026421
  binary

SEQ ID NO: 24695 - DNA, 491 bp, Homo sapiens; identical to SEQ ID NO: 23385
  chr8:67026485-67026976
  hyper

SEQ ID NO: 24696 - DNA, 913 bp, Homo sapiens
  chr8:67874755-67875668
  binary
cgaccggctaaggcaggtcgggcggaggacctggcccaccggagaggctacgccgggggctgaggcggcttagagggtcattaatcaaaccctccggcggggcgggctcgggggcggggcgtcctcctggccccgcccctcggctcactgcctcacgctgctttccccgaggcgcctcgctgagggcggcgtgtggagagtttggggtgtctgccgccggctgcggtggggccgggctggaggccgcgggtgaggcctgtggttaacctcgcgctgccgaggtcttacctcctcgagtccagtctgattccaggccgcttccaggccggtgcccagctgaggcgggaacgctgcagtttggttgagcgtgacttttaggctctgtgaggaaaagtcgagcgcgccacatcgaggcgctagccgtttattctaccacaaggtaaaagattcatgctgtcctagttaccctaaagctgggagatacactgcacttcctaccagaccccgaatgctctcagtgtctgtaattctttaagaagttcctagagcagacagcccttggatcgtgggcacttctccccggggacggggaccctgctgaccgcctccgctgcccccgcgggggccaccgctctttaattatttgggcgaaacattcttttctggttttgcacttgtggactcacgggaagcgtgacttgcagcgaggcaggacccgatcccaggcttctttagaaagcggacgctgcgccccaaggcctgttcagagccgccccaggaagccgtgggtccccgaccgccccaaaccgcagcggtttctgcaggtcctggacccgtcgccttcgtaggtgaaatctaagtacttttcagcaacataattagaacacactcgaaacaatgcctgcagttctcc

SEQ ID NO: 24697 - DNA, 349 bp, Homo sapiens; identical to SEQ ID NO: 7598
  chr8:68115303-68115652
  hypo

SEQ ID NO: 24698 - DNA, 1465 bp, Homo sapiens; identical to SEQ ID NO: 22965
  chr8:70744818-70746283
  binary

SEQ ID NO: 24699 - DNA, 226 bp, Homo sapiens; identical to SEQ ID NO: 7600
  chr8:71447632-71447858
  hypo

SEQ ID NO: 24700 - DNA, 232 bp, Homo sapiens; identical to SEQ ID NO: 23653
  chr8:71447942-71448174
  hypo

SEQ ID NO: 24701 - DNA, 1631 bp, Homo sapiens; identical to SEQ ID NO: 22967
  chr8:72755373-72757004
  binary

SEQ ID NO: 24702 - DNA, 369 bp, Homo sapiens; identical to SEQ ID NO: 23388
  chr8:81478144-81478513
  hyper

SEQ ID NO: 24703 - DNA, 75 bp, Homo sapiens
  chr8:86544713-86544788
  hypo
cgggcacctccatgttaattagcaatagaagttagaaaaattcacaagaatttatggccgggtgcggtgactcac

SEQ ID NO: 24704 - DNA, 84 bp, Homo sapiens
  chr8:90768494-90768578
  hypo
cgcgcgttaacagaatgaatggatagaaaagtcttctgagtactttttaagaaaaaagcttattggccgggcgcggtggctcac

SEQ ID NO: 24705 - DNA, 124 bp, Homo sapiens
  chr8:90913515-90913639
  hypo
cgtccgcctcggccttccaaaaggaatttaggtactttaaaatgctgttatgtatgttaacggaaaagtaactacatgcttcattttcagaaccaacattcaaatgaaatgaacgtgtcaaatc

SEQ ID NO: 24706 - DNA, 107 bp, Homo sapiens; identical to SEQ ID NO: 7604
  chr8:94684099-94684206
  hypo

SEQ ID NO: 24707 - DNA, 137 bp, Homo sapiens; identical to SEQ ID NO: 7605
  chr8:94685461-94685598
  hypo

SEQ ID NO: 24708 - DNA, 648 bp, Homo sapiens
  chr9:100503340-100503988
  hyper
cgtttccggttctgatgcgctggatcttgaagctcttctccaccactagcgccctgcttgtaaccttagcacacgcaactctgaacaggaatagtcctgggagaagggcggaaggttccaggagggcgcctgcctgcctagagtccccttgccggtctcaccctggaaaggtaggcggaactagaacaggcgggccccactgcctgcagcctgcgaggagacgccagggctgcaagcccccccgccctcctccgcccctgccgggacagtcagccgctaggggattaggaacgggcccagcgcccattcaagccattcagcgagacaggaagccaagcgcgctcctgcccgcccgcctctgccgggcaggtctgcgggatgacgcgcattgtgctggggactcgcccaaagggaggcccagccgtggggaaaaccgcgtcccgcgggaatccgacgcccggtgacgggggcacctgcaaggcttcagggcgaatccctgactcccagcccggggctgagtcctcgtggggccgcctccgcgctgcccagtgctgccggttatctgctcacagcgggtggctccgggccttcaggagcgcgacgggcgccatcccttccagtgcctcccgggacaaggccagggtcatc

SEQ ID NO: 24709 - DNA, 78 bp, Homo sapiens; identical to SEQ ID NO: 7607
  chr9:125126554-125126632
  hypo

SEQ ID NO: 24710 - DNA, 109 bp, Homo sapiens
  chr9:128118022-128118131
  hypo
cgcgagtgaagaacagcttcaagatgcacagctggccattgagcgaagcgtgatgaaccggattttcaagctcgccttctaccctaatcaagatggggacatacttcgc

SEQ ID NO: 24711 - DNA, 39 bp, Homo sapiens; identical to SEQ ID NO: 7610
  chr9:131461561-131461600
  hypo

SEQ ID NO: 24712 - DNA, 495 bp, Homo sapiens; identical to SEQ ID NO: 7611
  chr9:133761121-133761616
  hypo

SEQ ID NO: 24713 - DNA, 610 bp, Homo sapiens
  chr9:133779351-133779961
  hypo
cgccaggcacaggtgggtggagaacattcacgaaagagtgaggtggggtcggggatggggcgacagggaccagcagggccaaggacaaggtgcaccagtctagcggtcctcccggaccggccggatcttcatctcagagaacttgagtgagtactgccagccggtccaggaggaccactccacgccgtcggcataggaggcgtgcgcaccgcgcaggtactgcccattgaggttggacgtgtggcagttgcggtaccaccaggcaccgcggtagaaggcggcacagttgttctctgaatggtcgctgtcacggtccttggtggtgaacctcatgccgctgtgcttcaggagggagtcgcctgcgcaggggtgcacacaggtgtgggcacggggggcacgggtacacccactggtgttgcatgtgtgagcagacaccgagacactgcacgtgcacctggacgtgagtgcatacacgtacgcacgtgctctcacacatactgctgtgcacgcgtgcaagcgcacctgcccctccacacccgggtgtgtccatgcagctcacacgcacgcagtcccttctcgggcgtgcctggggctgcccctgggtctaggc

SEQ ID NO: 24714 - DNA, 794 bp, Homo sapiens
  chr9:135462358-135463152
  binary
cgctggcaggctgggtccggttccatcgtcgcggctccgtttatccctccagggagcgcgggcagagcgccgagcgcggcgcagggactggagttctcgccagcttcgggttctttctccccggagctgcccggggggtctcggcctcgggcgctcccgccgccgtcctgttcccctcagggttcatgtcctgttcccggggccccagaggtcccgtctgagagcggcccccgcgagcttgggtgtcgcggaaccaccgctgtcggaagccgaggttacacaaacgccacgggcaggagcgggagggcaccggcggcggctgcgaggccgggccctgacatgccgctgtgtccgcagtgaaggaggagggcgaccgcgagatctccagctccagggacagtcccccggtgcgcctgaaaaagccacgcaaggcgcgcacggccttcaccgaccatcagctggcgcagctggagcgcagcttcgagcggcagaagtacctgagcgtgcaggaccgcatggagctcgccgcctcgctcaacctcaccgacacgcaggtcaagacctggtaccagaaccgcaggtgaggcctggctgcgggggtagaggcagaaagggaacttcccctttcctcacagctcctggaggggaccaggagtctacaggttggtgctaagggagggccccagagcctcccccattctgtaaaagtgggaaactgagtccctaaggggacaaggccttgcccaaagtccccacagcgagggacagagatgagactagacttggtgtccagc

SEQ ID NO: 24715 - DNA, 697 bp, Homo sapiens
  chr9:135645005-135645702
  hyper
cggtcatgagcttgcctctaacccagcaaagcgtgtggaagaaacatcggcagtgagggctcccatctctcatttctcaaagagccgagactttcagcgaggccacttgccattcctggtaggtaatcagatcgctgttaattaataaagctgtcaggtggctcgtcctctctggtcattagtatcctttcagaaagagaatcctgccatcaccgccttgtccgcccctccgcttgccagcaattaacttaatgctatgcaaatgagaggctcttctcatcattagcttatagccacgaatgttaatcgcataattgggtcttcaacagggtaattagacacgatttcctccattagtcttacaaggctaattattgttgagcggagagggggactgctcccagggctccaggcgaagaggggcatctggttaaagcgaattcgggcgcatcgtccgccaggtaaaaacagcagtcgcgatccattgtcacagcccactgtccccacccatcgtggggaccgggctagggagggaaacggaaccaggggaaggcctgggggggtcacactcgtgccccttgcctgggtcctgggatgcagacaacgtggcatttaaaagtgaaagcggaaacaaacagcagccccgccagcccgggcccggaggcccagccccgcgccaagggccacccctcggcgc

SEQ ID NO: 24716 - DNA, 1254 bp, Homo sapiens
  chr9:138660497-138661751
  hypo
cgaggtggaccgcacggctgcagtgagtgaggctgaggccctgcccaggcgggaggggcaccgtggggccggggagcgggggtccctgagggaagagacctgccccaggctgccggtgccgcccagcagcccacagaggccagcccgtctgcactgaccaaccacccaccccgccaggaccaccagaccatcctgcgcgcctgggccgtgaaggacttcgcccccaactgccccctctacgtccagatcctcaaacctgaaaacaagtttcacgtcaagtttgctggtgcgtctggggcacacgtgggtgatggtgtatctggggcagggcacgtgtgcacacgtgggtgatggtgcatctggggcagggcgcatgtgcacatgtgtgacggtgcgtctggggcaggacgcgtgtgcacacgtgggtgacggtgcgtctggggcaggatgcgtgtgcacacgtgggtgtcggtgcgtctggggcagggcgcatgtgcacacgtgggtgacggtgcgtctggggcagggcgcgtgtgcacacgtgggtgacagtgcatctggggcagggcacgtgtgcacgtgtgtgtcggtgtgtctggggcagggcgcgtgtgcatgctgttgggtgatggtgcgtctggggcagggcgcgtgtgcacacgtgggtgacggtgtgtctggggcagggcgcatgtgcacgcagttaggcgagctgtgtggggcagcgggaggggctggccctggagctcctcacacaagcacaccaggaggtgctggaggggacggcagacccccatcctcaccgcatccgagaagggacctagggggtccaaactcttcagatgaagtcttatgctgggatcctggggtcagtgaaggcagggtcagaggtcaggtgggggcaggagcaccgtctgatgagcacctctatgggcagggaccatgccgggtgcccggggaacggggggcaggccccatgccaggtgcccaggggacaggggtcagggcccacatggagtgcccaaggcacaggggccagggcctgccccgccctggaactcctcgctgagctgggagagaagcacaggagcgatggaaggtccaccgaggctcagaccaagtagggggttgaggtccacagactctcggggcagagatgctgaagccggacagcagacacgggggtgccaggcaagggtgcatctgcatagcaccttcaggaagtgagcaggtactgtgggggaggagagagcc

SEQ ID NO: 24717 - DNA, 246 bp, Homo sapiens
  chr9:139000411-139000657
  hypo
cgagggaggcagatcctggctggagctggcggagacttacggccacaccctgccaaggtgtgcccactgggacccgggcccagcctgtcacggcgcctctccctgtgccatccgccagcccaggcttgattgagctccatatgaatattcatacagcattctgctgggaccgtcgttaatattctgaggaagcggcaagaatgcccgtccccatgtcgtgagccatggtcaacgtgctgctgacac

SEQ ID NO: 24718 - DNA, 252 bp, Homo sapiens; identical to SEQ ID NO: 7615
  chr9:139611146-139611398
  hypo

SEQ ID NO: 24719 - DNA, 821 bp, Homo sapiens; identical to SEQ ID NO: 23659
  chr9:139698453-139699274
  hypo

SEQ ID NO: 24720 - DNA, 342 bp, Homo sapiens
  chr9:34664955-34665297
  hyper
cgtgtggggaggggcgctcggctcgaatggcgacagcggcggcagagtcaggaggtcagtacggtgggcttcggtttaaatctttaatgcactggctggctgggcagcggcggtggggctgcggcgggggaagccacgacccgagcgctggggagtaggacccaggccgctggacagacagctcatcaggcctcgcagaggctccagcttctgctccccggggtgcgccgagctgtggggcgacccgacactggcatgaggcggggcgggagctaccggattccccccgatgggtcctcagagactgagtcccgtccatgcccggggcgggtccgcggtatc

SEQ ID NO: 24721 - DNA, 1147 bp, Homo sapiens
  chr9:36257857-36259004
  binary
cgtttctcaaatatacaaggaagcccagactcagaatgtagactcagagcagggaggggaccttttagcccagccttttcacgccaggacagctcgcctgccaggcagttctccaccctctctcgccccgccccgctcctaacgggacagtcagcatcccccctgattggacagcactgttccaggggacaagtcaacctgggcctccctctacatcccctcccctgctcatcagggcccaccccgagccacacggcggagccctgaattgggccaaagaggtgccctatggtgaggcctgcaggacattgggcgagagccgggtccagtgtgggcctcggggcgcggtggggtggaaagcggccggggaggggaggcctggggcaggaggccgggggaggcggccctgggggtgggcaggatgctctcccggagtcccacgccgccgcgcggctctcaccagacgccgtcagaggctccctcccacgccgccaccgcgctcctcgggcgagggacgaaccaagcgccacgaagcaggcagagcgcgagcctgcccctcggtttccgcgctcgggcgcgcgggtagacgactcgtcgctcgaccttgtccccactcctcgctcgcccagccacgcccacccggagtgccgaatccgcgatcgcgccctgacgccacccgagagagctcgcgtgattggctgctcccgtccccgtcccccaccttcccggcggtattttgaggcgcaggcagggtgctgaccagcggaccatcttccatggcctctgccgcgctggagctgctgcggggctgtcctgccagcttgtgctcccgccccgaagcgtcctcctccactggcgacacacgcactgaagcccgagtcttcccgctgggtagttgttttggtcttgcacccaaggagggatttcttgcgcctcttgttccctcagttatttcataaaccaggaccgcaactatactgtcgtgtagcgcggccaccccacagcggtccctgacgttaacccttgccgtgactgctagaagacactggtggagtgtgaattgatgaccaaggcatggcagagcctctctcatctttataatcagttcagcggcggcctccactacagggaactcccagccagtccc

SEQ ID NO: 24722 - DNA, 167 bp, Homo sapiens; identical to SEQ ID NO: 7619
  chr9:4864421-4864588
  hypo

SEQ ID NO: 24723 - DNA, 1232 bp, Homo sapiens
  chr9:71788570-71789802
  binary
cgtgtatgtgttggttagccgggcaggcctctagacaggacctaaaactttgaggttttcccagttcgactcttcgtaggagaactgaagctgcctgtgtgaggccctgcgaacctcgccaaaaagtcttcctacaggatgcccccgcgacctcaccggggaaacaccgcggacagtcgggccagcagcgcccggagctcactccaggtctccaaacttgcagcacttcccagagcgcgcgcgctcggagcgggacctgcttgctccagtgcacgccgcggagcgaaccatcgggctggcgggggtggaggggtgcaggcgtgggggctgcgggccgctcgggccttgggcttctcctgccgccgccgccgcctcccgcccccggccaggagtcgcgcgtgacgcggttcgccgcaggagcctcgaaggcgcggcgccggcgagcccttccccggcaggcgcgtgggtggtagcggccaatttgacagtttcccgggccgggcggccagcgcggaggcgccacgctcgggtcgggggcgggctgacgccgccgccgccgcgggaggagggacaaaggggtgggtccccgcgggtcggcaccccggcggttgggctgcgggtcagagcactgtccggtggtgcccaggaggagtaggagcaggagcagaagcagaagcggggtccggagctgcgcgcctacgcgggacctgtgtccgaaatgccggtgcgaggagaccgcgggtttccaccccggcgggagctgtcaggttggctccgcgtaagtgcctccttgtgccgcgcggttgggaggagggtcgtgagcgtgagcgtgggagcgctgggggctctgctcgcgtgctgctctgaagttgttccccgatgcgccgtaggaagctgggattctcccatccggacgtgggacgcaggggaggggtaggtttcaccgtccgggctgatgactcgtggcctccggggctcctggaacctttactctgaagtcacttgggctggagattaaggcgcgagtaggggacactgtcttgaacccggtgtcctggatttctgctggcttggaggcatctcgtgtctgttgtgtcgcttgcatgtctttgtgttttccttctctatttcaaaccacactcggtattgatgcaaagttacaggcttgtgtacgtgagagaaactgaaaactcatcacagagcagaatcccttttccctttcaatcagctgc

SEQ ID NO: 24724 - DNA, 512 bp, Homo sapiens; identical to SEQ ID NO: 23404
  chr9:79626891-79627403
  hyper

SEQ ID NO: 24725 - DNA, 334 bp, Homo sapiens; identical to SEQ ID NO: 23405
  chr9:79636205-79636539
  hyper

SEQ ID NO: 24726 - DNA, 295 bp, Homo sapiens
  chr9:80833898-80834193
  hypo
cgtctgtggggatccgcaaagatatgggatccagttagtctctggtgagtcgttaccttggccggatggggacatgttgcctgctgcacccccctcttcgcgctctctcatttcatttcctgcagtgtgccagcaggatggcccacaagccatctactactcggacaagtacttcgacgagcactacaagtaccggcatgttatgttacccagagaactttccaaacaagcacctgaaactcatctgatgtctgaagaggagtggaggagacttatgtccaatggcgtctaggcc

SEQ ID NO: 24727 - DNA, 130 bp, Homo sapiens; identical to SEQ ID NO: 7624
  chr9:85843821-85843951
  hypo

SEQ ID NO: 24728 - DNA, 142 bp, Homo sapiens
  chrX:44922889-44923031
  hypo
cgctgggaagtacagacactattttgataggcaataatcatataacaggaagtggaagtaatggaaacgtgccttacctgcagcgaaacgcactcactctacctcataaccgcacaaacctgaccagcagcgcagaggagcc

SEQ ID NO: 24729 - DNA, 85 bp, Homo sapiens; identical to SEQ ID NO: 7626
  chrY:14532154-14532239
  hypo

SEQ ID NO: 24730 - DNA, 1398 bp, Homo sapiens
  chrY:16635744-16637142
  binary
cgcgctggaaaccccgcgtgaagatgaaatgactgtagctccgtgctgctcctccaaactcgggagcggtatccatgcacccctttcccgtgtgtgtgggttacgacgtgggtgggagtggtgaggcaagccgcaaaagtggggtagagctggtggttttgcttcttcggaagcctttgagtgtggcctggaccttagatgggggtgcagggcggtttgccgctgccaccctcggcaccatctctgaactgcccgcttttccggaggagcggaaaagttggaagccgaaaagacaggcgcccggagccctggtctaggtatcaggtgatccggagccctagtcggtgcccactaagaacaccccttctcccatcgggggttcggaggagtgttaagcctgcgggtctgccagtccctaaggtagggatgggggaggggtctgaggaatccgttccaataggcacaccatccccacagccctagaaaaggcaaccaccacccgctccttcctcccgcaccatcccatctcaaggctctctgctgacccgggccgatttcatctggtctcttctcccccgcttcccacctcccaattcccgcgcagctcggctccgttccctcccactcccctaggcggaactgaaagcgaagatcagccaagagcacagtcggaggcggcagagacggtggcgggtgagctaggggctgtgagacgaagcagggagagagtgaacttcagccccgtcccctccccactgccacggctggggcaacccaacccgcgcctgaagcggcttggcttgacctgcggaagcgcgggccgggatggcgtggggagagggaggtaggtgccactgggctgcagatgacgagtgggttgggggcttgctgtgggacaagaggttcaggttccggcctgcgccttccactccgcggtggcgctctctgcctgcggttttccaggaggccgatctaccccagggacactctcatccttcaggcggtctcctggacgccctttcctccccttgcctcccagcctgacctggctctttcgcccctcggagaaccggtaggttggggtccctcggcgggggtctagtgagccgagtcgcgagctttgcgcccccggtatctaggccccgtgccgcgcgcaaatccgggcccaggcgtacagttctggagcctagtcgccgccagacacagggccctttgtacccggaggagcgggagcgggagcgggggcgtcagggcaacccttgcaccccagaggcctgcctaggaccaccctgggaacaaatgtctcgctcggaaaacgaggtgaacccggaggatgtcctacgcatcatacccctccccttcttgagaaggctttttctttttttctttttttttccc

SEQ ID NO: 24731 - DNA, 715 bp, Homo sapiens
  chrY:2655227-2655942
  hyper
cggcagcatcttcgccttccgacgaggtcgatacttataattcgggtatttctctctgtgcatggcctgtaatttctgtgcctcctggaagaatggccatttttcggcttcagtaagcattttccactggtatcccagctgcttgctgatctctgagtttcgcattctgggattctctagagccatcttgcgcctctgatcgcgagaccacacgatgaatgcgttcatgggtcgcttcactctatcctggacgttgcctttactgttttctcccgtttcacactgatacttagagttacagctttcagtgcaaaggaaggaagagcttctccggagagcgggaatattctcttgcacagctggactgtaatcatcgctgttgaatacgcttaacatagcagaagcatatgattgcattgtcaaaaacaaggagagtgcgacaaaattgaaaggtgccagagttcgaaacttattttactatccaaaactcacttctaccagattctttgttacgttaacttttgtaatgaaacttgcatttctccgccctcaacaccccctcaaccccgcccaaccagcctaccccctagtaccctgacaatgtattcattctcaagcaaaacatggtaattcagtaacgttgactacttgccctgctgatctgcctccctgactgctctactgctgtcctgaaaaatgcgaatttgacttaatc

SEQ ID NO: 24732 - DNA, 200 bp, Homo sapiens
  JH636052.4:5118715-5118915
  hyper
cgcctgcgagggtcaggacggggcgaaggccattccgctgcccttccagcttcggaatcacccaatgcacgggtttcaaccgtagccagcaagatgcgcctctcaggttttccgaggctttggagcctgcacaattgttctacaaaaggcagtagctccgccgaacgttggatcgtcccttggtctggtgataccagaac

SEQ ID NO: 24733 - DNA, 444 bp, Homo sapiens
  NW_001838014.1_249000-295694:13508-13952
  hypo
cgacggcccctcggcagtgcggcccctcagcagtggggccaaagcgccattgccggcagccggtcgggaggagggtgaaagagaaatcctggctgcacacagaaggcaccaactgtttgctcatcgcagagcagggcagtggtgcccaggagggcggggcatcggatactgaaacacgagcaggtttccggcatcgagactggggctggagacttcaggaaacctcattttcttccccaaacatccacccttttctttaaagtaggccaaaggcctccgtttcacgctgtgtgagccaggcgtgtcaagccacagcggtcgaggcgggtgtttctcagggcaggctttaaaggtgctcgggcccttcggccggcgccctctgcaggcagggcaaagggtggggccatggggtccctgcaaagatcaggctaaggcgactccacc

SEQ ID NO: 24734 - DNA, 129 bp, Homo sapiens
  AEKP01153556.1_1-5252:392-521
  hypo
cgtcatcaccgtcatcaccattatctccaccactgttgctgtgaacgcatactgcactattatcacctgaggtacagtgacaacgttgtgtgatgctaaaatgtgagcttttctatctgccgatgattc

SEQ ID NO: 24735 - DNA, 122 bp, Homo sapiens; identical to SEQ ID NO: 7631
  AEKP01184864.1_3582-5885:491-613
  hypo

SEQ ID NO: 24736 - DNA, 1247 bp, Homo sapiens; identical to SEQ ID NO: 22735
  chr1:101702006-101703253
  binary

SEQ ID NO: 24737 - DNA, 603 bp, Homo sapiens
  chr1:101774910-101775513
  hyper
cgcagcaaacgggaaaataccaatttagctctgtttgctgcagcttcgcagctttaccaggagagggcgccgacggacctgacttttgccttgcctcgcagtagagcccaactagagggtaaacagcagccacagtaagttctagctgttgcagaaataaattacaaatacatgtaggaaaaaggacttcaaaaggctgcggtatcaaagtggcagttaaagagaaggcaacgctcagagttgcaggtggagcagcggcggctgcatcagcgtctcaaattgcgaaaacattttgggctgaagtatttctttgtagcatttcgtggagcccctttcctttgatatacactagccttccgacttccctttgttcttttttcacacgtcaggttttatcgctgacaagctccaacgcgtcaaaggcgttagatctgagggctgcagcagccttcgcggttccgcattgagctccttcctgcagccctctgcggaggtcacggccacgtgtgggcagggaaggccccctacccacttcctcattcggacccgtcacctttagccggcgaccaccttttgatctcttgtgttgcacttgtgtccccc

SEQ ID NO: 24738 - DNA, 993 bp, Homo sapiens; identical to SEQ ID NO: 22981
  chr1:103573419-103574412
  hyper

SEQ ID NO: 24739 - DNA, 1186 bp, Homo sapiens
  chr1:1047017-1048203
  hypo
cggctggggcagtgggtagaccacacccacgctcaccgtaactccagccgcccaggcagcagtaactgaaaaggggaggcgggagggtccactggcgggtttctcacgctgctgaacctcggtaaacacagccccgagggctggctggagcttccactgcatccgtgtagctaatgctggtcatcttcgtagcaagcaaaggaagccaacgtgaaacgtagctttaagggcccaataagaactgtctggggcctctctacctaaagatccctctcgtgctttgatagaaaacaaataccgcaaaccccttgatggggtgtaaaggagacatccccctttgttgacatgcatggtagtcgctgcccacctacccgtgggctcagcacaccggagtcgggcggttgccgtaggtggctcagcagacgtgagcagggcaggatcgggcccatccccccaccgggaatgtcaggccaccatcaggtgatggtcaggtggctgttaactgtctaaaagaactggttgcacccagcgccagggaaagacaggctcccaatagctagaaaacacatgaaatccggtgatgggcagcttcccgatacgatctcaggaactgggcgagttggctcaagcgtgtgcactgagaggcaaaatggcggcgtgtaaccgttctatgaccttctagggacgtttgacaggtaacggaagaacgcctcaggtgagcatgggcactactccagtgaacacacggcgcacggtccctccctccagtgaacacaacgcacacgctccctccctccagtgaacacacagcgcatgctccctccttccagtgaacacacggcacatgctacctccctccagtgaacacacggcacatgctccctccctccagtgaacacaacgcgcacgctccctccctccagtgaacacacagcgcatgctccctccccccagtgaatacacggggcatgctccctccctccagtgaacacaccgggcatgctccctccctccagggaacacatggcgcatgctcccgcccaagtactagcaagatgctgcatgggtggacagcccaccctgaagaaggatcaggggagaaggggtgcaagaccccagaagcctgccaggctataaaaccccaagtcaaaaggtgaaaccgcacacctgatctctcacatcgccc

SEQ ID NO: 24740 - DNA, 308 bp, Homo sapiens
  chr1:1049863-1050171
  hypo
cgcaaggcagggagcagctgggaggtatctcaggggttcccgggatgctgcctgtgcaccccagggctgaggtgactgcgtgtggaaacacctgcctgactggcttttaggaggagtactgggggcgggatgtgtgtcaggaaaacaacgtttctgtataattcataaacatgtatgttaaaaacaacgtggccatgacggatcctggctgaatgcaaacggggaacataaacctgagtaatcaggcgcatcactgaacatcccaggcggccgcccctaccctggggctcaaaaccggctccctctgc

SEQ ID NO: 24741 - DNA, 627 bp, Homo sapiens
  chr1:10948454-10949081
  hyper
cgcgccctacccaggtccccgcccaggatcacaggatttgtgaccctggccttggccttgtccctaaaaccgtcacccgggtctcccaggcgagaggggcgggaggctccagacgcccagagcccacagcttcccgcccggggcggctgagcggtcccggggagagccctggagagagacagagaaggggaggcgtggagcggggcccccacagcagaagaggggcaggagggaggcgagagggggccggagtctggcccgagacagaaggggcggaggggcgcggggtggacgcggcccgggggtcccagacggggcgcccctccccacccggcccgccctgccccaccccccggcgcgggaggcccctgctccgcagtcggcggcgcccgggggagggggcgctgtgggggctcccggccgcccgccgcctgatgcgtatcgatcgcagcccggggtcgacgcgggggcaccagctgccggcgggcggggcgaccgcacattagcgcggccgggaccactccccggaacgcgggccgggcagcccattagacgcccccgggcggccgggcgaccactgcacgggcggggcgaggctggctccaagcaggcggcccctgggcggcc

SEQ ID NO: 24742 - DNA, 259 bp, Homo sapiens; identical to SEQ ID NO: 7638
  chr1:11020521-11020780
  hypo

SEQ ID NO: 24743 - DNA, 1303 bp, Homo sapiens
  chr1:110610350-110611653
  hyper
cgacctgcagaactcgctgaggcccaggctcctgcagctcccgccgaagactcaaagccagagtggacataaacgccgtgggcaggaccccggtgaggcctcggtgcccttcttgggggttctcagcgttggcccagaagcctcagcccgggtctaagaacttgggactctcctcgactttggcgatcggccgggtcatccggctcagggcctcagcggcagcgggcaaaactctagtaggagtctcttgccgagggcgtgtttcgacgtcagagccaaactcgggacagactagccaagcgcggacggcgcgagagtggctggcagcgccagcacgcagcctgggttcagagcaaggctgggcgctctcagcaaagggcggcctggggctgcgcgggcggcggactgcaggcgggagaagagcgaggtgcgccaggctctggggcgcgcaactgcccagcctcgtgaaagatcgcgccgcagatggggcgcagctgcgcgctcactcgtgtggactggaaacgctccgagccggttattttaaaaaccgggaaataaggcgggttccctcttcgcccgccacttcccaccaagtaggctgtgcggccctgggggctgactgtcctcaagcagccaggctccaccgcgcgccgcgctgcgccgaggtccgctctgccgcagggacgctggcagcccgttgaacaccggcaagagcgccagaggctagcggccgccaggatctctaccaggctctgctcgcacccgcctgcctccctttcgtttggcctgtcctccgttcaactgaaatcgttaattttcttacccccttgttctcattttgatatattctacgctttaaacatgctccgttttcttttgtttagtctgctccctccctctttgtcctttcccccttctctagttatccgtttcgttcgatcttgctcctgctttttttattcgttcgttcctcatttattcattttagttcatcccagctcgccgactgccatttaccctctcgttctcgccgcgctctccgttgttttgttcaatttcccttccccttttcttggttgtcgctcgctttctttggttttctttctcggtatttcgttgtcaaggccacccttgccgtcggatcccggggtgctgggtttctcccggccgctcgttccgcaccagcgctctctgcagttcgcgcggcaccggtgtggtccgggggcccgagctgtcggtgccggatgcggcgcgcctagcagggacgcgggcctgggggggtggctcctgcccgacgcggagc

SEQ ID NO: 24744 - DNA, 882 bp, Homo sapiens
  chr1:110626770-110627652
  binary
cgtcctgcgtcgcccccgcaccctcgcgtggccgggcgcagatccccgtgcacgggtcctccgcacacccttgccagcccgcagggattgttcgccgcgttggtgactccttcccaaaatgggaataaaagatcgaaatagctagtaagcatgcaaagtttattgtcaacctcaagtctctataaaaccagatcaaagggaacaggcgtttggtttcttcccagatcgctggggggcctcggggctcaggaagccccaggagtccagcccgctgccgctcactgcgctcttctctccagccgggtccaagggctcgagcatcgcaacctgcggcctgagttggccccgggcgcacgcgagggaaatggatgcagtgcccgtgaacttggggcctgaataattgataacaacccgctgggtgcccgtcgcgcggccaggcctgcggggagcggagccggaggcagcaagcaaaggaaacgcacgagccgggagcgcgggcgcgcggggccacgaaagaccgaccgactgtccgacgggcggtgggacaagaggacggatgctgtgggggggccccggaacccgccgccacaactcgcggcccacgcgggtcgcagccgccagccgtagggagctgccgagcagcgacgttccgcattccatcgggttcccgcgccctactgggcttgtgcggcgcagtgcctgcgtgtgctttcgttttctcaaggccattctgataaaacatacgtgctggttccctttcttttctcagaatgattcttcaaggcgaatgactcgaaatggagatttcttctaacaccgcgtgatcaccgacaacttttgcaggacgggatgaaactcctctgggtttccagtcagatgtgc

SEQ ID NO: 24745 - DNA, 570 bp, Homo sapiens
  chr1:110672768-110673338
  hyper
cggctcccacgcctcttgctggggagggtggctcatttttcacgggtgccgcgtgactttccagactgtattttcagcctcggtttgacgtcaggctctcacggtcccaaaggatgggctttgtacatttccaggccgcagaccggagcctcccatccctttgggcctcttgggcggtccctacggccacctcccgcagctccctgggggcgggggaccgctggatgagggaggaggggaggtactggggggaaagggcggttggcgggaaggaagtccaggtgagacaggcccgcgttgggactatcgtgcgcggtatgtcggccggcaggtggggctggtccgggcgcaggaggcggtagagcaggagcagcagggggagccaggctggccgagctggggggtgagcacgtttgtctcaggcagctcatcgcctgacacccccgggaacgggctctgccccaaggcctaaaatgagggaagatgaggaaatgggggtggggacgatggagaggatggaaggggcggcgggggggtgcggtggtctgcgcggtacagcagcgtccctgc

SEQ ID NO: 24746 - DNA, 348 bp, Homo sapiens
  chr1:11131713-11132061
  hypo
cgtcatcccgtgggcctctgctggctccttccccatctcctgctcttctctacccgctctgctcatgcaggcccacttgctgctgctcagcatgcccagtgaactagccccagggcctctgggctcgctgtgctgtggctccagaactcttctctaggtcactgcaggtctcgtcaatgtcgcattcattagactgccttctccaaccaccaacgagacagctacagcacctccagcactccccaccaatctctctgcacagcacctgctgccatctgccaggatagatactgattgcccaccatccctcagcagaagggaagccccacaggggcttcattcatcgcc

SEQ ID NO: 24747 - DNA, 267 bp, Homo sapiens
  chr1:11141000-11141267
  hypo
cgggaatcaaaattgtgccctgggctctggaaaatgtttggctcttttcatgaatgtaaggagcaaacctaagaactagaacctggccagacacagagcccaagtgtcgcggtctgtgtgactgcggctgaggtgtaccttgaggcagatgtccctgctccgttgccacaccacctgcagctgcaccggctgcccgttgccgcgctcccacatctccagcctcattttgtcatagatatatagcaggtaatgggtgtcatcccgggc

SEQ ID NO: 24748 - DNA, 818 bp, Homo sapiens; identical to SEQ ID NO: 6654
  chr1:113498720-113499538
  binary

SEQ ID NO: 24749 - DNA, 365 bp, Homo sapiens
  chr1:1181916-1182281
  binary
cgcgggaggacgcgctggcggtggcgttggggggatctgcgcgctggccaggctgctgcgtcctctgtgcctcccgccgggccccgacgcccccgaggagcacgagctgcggcccgaggaggaccacgaccgcggcccaggcccagcgccgcatggctccgtcccgaggcggctcagcgcggcgagtctcggcgccagggcgcagtcatggggacggccggcgctcagagcccccgcgcgggggcgaggcccaggggcgcgcccggcctccgccgctgcatgtctgcgcggacctgcccggaacggcggcgcgacggcgctcaggtccccccggggtcccgctccagcccccgctcccagccccc

SEQ ID NO: 24750 - DNA, 877 bp, Homo sapiens; identical to SEQ ID NO: 22738
  chr1:12123137-12124014
  binary

SEQ ID NO: 24751 - DNA, 1035 bp, Homo sapiens
  chr1:12226892-12227927
  binary
cgctggaggtatcggcccagcgatgctggagtggtcgggtcggaggcccagcagcgtctggggaggggcgtgggggaggcgtgtccaaggccggctggccccgccccgccccgccgcctggcctctggcccgctggggcgcgggctttcgctttcagtcgagggctagcgagcgcagcggagcctggagagaaggcgctgggctgcgagggcgcgagggcgcgagggcagggggcaaccggaccccgcccgcacccatggcgcccgtcgccgtctgggccgcgctggccgtcggactggagctctgggctgcggcgcacgccttgcccgcccaggtgggtgactcgcgcggcccacgggggacagccgccccgcatgtccacccggctggtgcgcagccttcgggtgcccgggccgcgctctcccggggcgctgtcacgggctgggaggctgggagtcccagtcgccgccccccatccgcatcagacacgcgcgcctctggggacccgctggggactccgggcccggcacacgtgcgctcggggcacaactctggcccccgaagcccctcttacccgcgtcgtgacaggggcgcaccctggttcctccgcgagcgcaggccggggcatttggggctgagcagcgggtcctgggcagacccccgctagacccgggacccctcttccctcaccccggcgactgccgcgacagcccttccctcccacgcggtggagaaggggctgtgccggggcgctgccccactgcccacgccgggcaccctcttcaaaagacttccttttcctctgggcgacggttttccgatttcttagaaataccagggtcctgtgtctgaagagcaggaccaggtgtgtgtcaggtccactgagggcacagctggagggcgagctgcctgtctgcttcctccgatgcgtccgggggctactgcagagtctgttttctgcggcctctggggacagggcaagcgagggaggtctgggctggtaatcgagcaaggcaaatgaagtctccgggggcc

SEQ ID NO: 24752 - DNA, 311 bp, Homo sapiens; identical to SEQ ID NO: 23424
  chr1:12304451-12304762
  hypo

SEQ ID NO: 24753 - DNA, 236 bp, Homo sapiens
  chr1:1309082-1309318
  hypo
cggcaaatggagctccagacccgcaggaaaggctgagtcctctgagaatttattactacggatcacagcagcaacgggcgggaagggcggcgccagactcatttgccccgcaggtagatcttgggggtctgccagccttcgggggcttcctttagccccgccttcagccagatgcgcctcaggtctttctcgaacttgatctgcaagacgcagagagagggaccgccaagtaattc

SEQ ID NO: 24754 - DNA, 1087 bp, Homo sapiens
  chr1:1475244-1476331
  hyper
cggggtcggggcagcgcaagcggggagcgagagcgcaggccggggtgaggggagcgtaggccttggtagggggagcgcagcgggtatggggatcgcaggctggggaggggagcgcaggccggggtggggggagcgcaggcccgggaggggaccgcgggccggggagggggaagcgcaggccggggtggggggagcgtaggccggagagaggagcgtagggagtgtggggatcgcaggttggggaggggagcggaggccggggtgggggagcgcaggccggggaggggagcgcaggccggggaggggagcgcaggccggggaggggagcgcaggccgcacgggcggtaaacaaggcgcgggaggtgggccaggcggcgcgcgcgggcggggagcagggggcgcgcgcgggaagcccctccgctcaccatcacgaccgacgcccccagaatcatgaagatcatggtgttcgcgctcatggacatcgggcggggccgggccgggccggagcgccgccccccggccccggcgcccccccggccccggcccgatgctgagcccccgccgcctccgcagaggtcagcgcttccctggatcgtccgccgccgctcgctgcaaccccggcaccggccggggggaggaggcgcgggggggggggcgccggggagggacgcggggcctttctggggtctctcggcccggcccgccgcgctccgctccgccctcgggtcctccctgcgatgcgctcggctcggctcgactcggctccgctcggctccggccccctccctgcctcctcctccctcctcccccctccctccccgccgccttcctccgcctctcgggagggaccgcgcagaccgcaggccgccccgtgccagcgccgggaggagaccgccatcccccggacgccggccgggacccctccccgggagcctcggcttcgcgtcccgccccagtctggtcagacccagccccggtggcctgtccggtgaccctggacgccagtcctccggtcctggaggggcgccgaggcccttcccgccccactgctccgccctacgtcctggactcccaggtcgccgggtgc

SEQ ID NO: 24755 - DNA, 251 bp, Homo sapiens
  chr1:147775358-147775609
  hyper
cggctcaggcccagggagtcgcggacccgggcgtttcctgggatgctgggtctgacgcctgcgagggtcaggacggggcgaaggccattccgctgcccttccagcttcggaatcacccaatgcacggcaagatgtgccggcaagatgtgcctctcaggttttccgaggctttggagcctgcacaattgttctacaaaaggcagtagctccgccgaacgttggatcgtcccttggtctggtgataccagaac

SEQ ID NO: 24756 - DNA, 279 bp, Homo sapiens
  chr1:1502406-1502685
  hypo
cgccctacggacatacacgtgcctctgcaacatggctgcctgcaggatgcccactgccggccttccacagccacaaaagaacagacaagtagaataatccatccatggggcaggacaggccatgcggctccacgcgcacctccgaagatgagtagaggaagcaaaagagcccaagggcaccctgctgcgccaccacacacgtcacccacacacacagagaagatgtgctcatctagtgtacgtgaaacacctgagtcccctgaggctgatgacagctgc

SEQ ID NO: 24757 - DNA, 84 bp, Homo sapiens; identical to SEQ ID NO: 7651
  chr1:150586185-150586269
  hyper

SEQ ID NO: 24758 - DNA, 369 bp, Homo sapiens
  chr1:150941408-150941777
  hypo
cgaacgatgaggaagagcaaggccaggggcagcgtgatatagagatctgaggctttggcgtagacacgtccatctcggtcttctagatcggcccaggtcaagttcacaggcagccacagacgttcccaccagaagtaatcatacaaggtctggagcatcctgagtgaggggcaaaggggagggcatcaagagggagtagctatggaggaagagatagatgaataaaagttttcaggatgtatcaaaaggagaagggggcagagagtcgaactctagatccctatcctggctatgtagccttgggcaaatcagtttcctcatctgtaatacggtggctttccagttttaacatttactgttaggccggcc

SEQ ID NO: 24759 - DNA, 68 bp, Homo sapiens; identical to SEQ ID NO: 7652
  chr1:151373761-151373829
  hypo

SEQ ID NO: 24760 - DNA, 77 bp, Homo sapiens; identical to SEQ ID NO: 7653
  chr1:151597643-151597720
  hypo

SEQ ID NO: 24761 - DNA, 648 bp, Homo sapiens
  chr1:151693837-151694485
  binary
cgggaaaggcgatcctttagagacccaccccccaagcccccgccccggagctcacccctcagttccctcagcccctagcccctgcttcgctgaaggggccgggcttgggggcagggcggggccgggggcggggcctcgccggctcgcggccggtcgccttgacgaccgcagcaagatggagacgctgccaggcttgctgcagcggcccgaccccggggcgcttagcgcagcgcagctggagcagctgcgaaaattcaaggtgggtgcgcccgcgcccccatccagcgtccaccaaagtgtagctgccccaggactggggccccagactgggaagagagccgccgagagaaggggagcgggagcctgttccctgataaagtggggagggcgcaggggagacccccggcggacctctaggcgtctgatcccagcacagagcgcgacgggcatctgagagtgcaggaagaactaactcagggactcggccagagaaatgggccgaaattactgccagacacatccgaccttagtaaaggcccctcatcctgaacaagcggcagaatgatattttatctgtaagaagatgggtggcttaaactttcaagcatcctggggaaagacttgggttaaatgcgcacgccgtttccc

SEQ ID NO: 24762 - DNA, 976 bp, Homo sapiens
  chr1:153651442-153652418
  binary
cgagccccggggtgagcgtccccgtcccgctcctgctccttcccatagggacgcgcctgatgcctgggaccggccgctgagcccaaggggaccgaggaggccatggtaggagcgctcgcctgctgcggtgcccgctgaggccatgccggggccccggcgccccgctggctcccgcctgcgcctgctcctgctcctgctgctgccgccgctgctgctgctgctccggggcagccacgcgggcaacctgacggtagccgtggtactgccgctggccaatacctcgtacccctggtcgtgggcgcgcgtgggacccgccgtggagctggccctggcccaggtgaaggcgcgccccgacttgctgccgggctggacggtccgcacggtgctgggcagcagcgaaaacgcgctgggcgtctgctccgacaccgcagcgcccctggccgcggtggacctcaagtgggagcacaaccccgctgtgttcctgggccccggctgcgtgtacgccgccgccccagtggggcgcttcaccgcgcactggcgggtcccgctgctgaccgccggcgccccggcgctgggcttcggtgtcaaggacgagtatgcgctgaccacccgcgcggggcccagctacgccaagctgggggacttcgtggcggcgctgcaccgacggctgggctgggagcgccaagcgctcatgctctacgcctaccggccgggtgacgaagagcactgcttcttcctcgtggaggggctgttcatgcgggtccgcgaccgcctcaatattacggtggaccacctggagttcgccgaggacgacctcagccactacaccaggctgctgcggaccatgccgcgcaaaggccgaggtgagacgctggcacaccccgtcccgccgcttagccgcagggcctcccctctgacctgccggaggcatcgggactttctctctcatctgggggcactcttctttctcctcgcc

SEQ ID NO: 24763 - DNA, 71 bp, Homo sapiens
  chr1:153937085-153937156
  hypo
cgaagcccagtaattccttaagtaaaagaggaatgtgaagacttcttaaggggccgggcgcggtggttcac

SEQ ID NO: 24764 - DNA, 207 bp, Homo sapiens; identical to SEQ ID NO: 7655
  chr1:155012870-155013077
  hypo

SEQ ID NO: 24765 - DNA, 515 bp, Homo sapiens
  chr1:155043346-155043861
  hyper
cggagtagactgggagcgactagttagcagccctttccctggattgagaactgtgggggtctcacccggctcccagcggccccaggccagcctccttttcgcagaaccaggcgggcgcgctcgctcccgcggctggggctggcgcgcggacgcgccgctgataacgcatgtgcgaaagagacgcggggcccagtcagctttctccgcactcagacgcacgccctaactgtcgggcgctcccacttgacacggacacacgcccctgccggccgcccagccccttgcaggtgcaagggcggatgcctcagcgaccacgggagccgggctggggaggttggtggggggcggggggagtcttaaacttaggcccgcccagccacaggcgctcaggcccagccggccttccctatacaactttcctcatagcatgcgcgggcggctgattcagtcccggggcgcgtccccatggaaagccagggctgagtccactcatggggccgagacgggctgcaggc

SEQ ID NO: 24766 - DNA, 665 bp, Homo sapiens
  chr1:156215233-156215898
  hyper
cgatgcctccagtgctgttcgagagcagtgaggtgtgtcctctcctgtgcctccgccttccccgtccccactggaggggcctgggaacccaccgggagtagcaggagaggccggtgcacaggaaggagttgagtgcggcggcaggcacaaagaactggtgcaggtggccgtgcagccaggaggccggcatggagtaggcggcataggggaaggcgcagcctgcggtgaggtgggggcgtgcagctgaggcctgaggggcgcgcccctatgtcccgcgtcccacccctcgccccgctccgggacgcccagaccccgcgctcccgcgcctgtccggctcacccagactgtagaggctgagcgcgccgtagtcgaggaagtagcagatgtggcgcatgcggggcgacatggagctgaaggtgtgcgcgcagcacgacgcgaaggggtagaggcaggcgggcagcaggaagaccagcagcggccagtggtacggctccgcacggaagccggggccgcccgccagcgccaggagccgccacaggaagtacctgcggcgggcgcgtgctcaggccgccgcggacccccgcgactgccgctgcagcccgtgggcctggacggtccctgcccgcctgggtaccccctctgagctcaaggccgcggcctggggc

SEQ ID NO: 24767 - DNA, 1256 bp, Homo sapiens
  chr1:156390054-156391310
  binary
cgcggctctagcccctcgctcaagcctctccctcccgcccgtgaggccggctttccccgggcccctctgcgcagtgtatggggttatttttactttcggttatctagctttatgaagactccacaccactcatacagctagataaccaaagataacaaccaaccccgcctcctggctgctgtcgccgcctcttccacgcagcctcccggccgccgccgccgccagcacctccgcagcttcccggtcgcccgtcagcgggagtaggagggaagggacacgagtggagttgagggggagggtgaagagagaaatgaagtccgagacaaaacaacaacaaaaacctcagacacggagatacagacacgacagagaccgaaaaaggcgtggaaaggacgcgatgacccgtggcgtcgaagtcggggagttgaccccgatccagacccaaaaagtttctggtgccccatttcccgctctcccattcgggccaggagcaggagttccgctggtcccaggtggaagggacgcgcgggcttttcgtgccacccgggaagaccgcagcgacccaggcagaggcctccccagcctcgccgggtctccactgcccttctctggaagatcgagggcgcatccgacagccagagccctgccttcggcggagcccgagcctggcgcgggatggaaatggggagccgcggtgccggcccggccacgtcgccaactcagaaaggcgttggaagcgaagcggagcccttgtgggggaaagagccggattcaagaggccgactaaaaggggaaatgggcagccaaaccccggaggtaaaaaccccagagatgtcctaataggaagcagggaaatcccggcgacccaaagagagaggaaaggctgtggggggcgggtgggggcgacccagagactcccaagcgagtctctcaaggagagaaggaaacagcagagaccccacccgggaagagatccgggagagtacccatgagaggggcggaggggaggaaagcagagggcgacagggcaggtgaccagagtcccaggccctgcagagccccggataaacggctttgttcaaagaggaccagagatcacccagggttgtgaaaatggccgggggttcgaggcgagcggtgctctaggggtgggaaaggggtgcgatcaggaacgggaaaccgcagccccgaagagggtgggggctcggccggcccctcgtggcggacgcgcgggcacgccggattccgaggcgctc

SEQ ID NO: 24768 - DNA, 265 bp, Homo sapiens
  chr1:156432033-156432298
  hypo
cggcattttgcagatgaggaaacccaaggcatgaagcctgactcctgtgtgctcccacaactaaggctagcacccacagccttaaccatgcttcatggattttaggcgttcataggcctgtctctgccatcgtatatggcccctcacactccgcgttcgcctctgcagcacctgggctaggtacagagaagcagccacaccctgttcggaggaagccaagccggatctgctttcctccacagccgctccatctgccccagggcac

SEQ ID NO: 24769 - DNA, 721 bp, Homo sapiens
  chr1:156862989-156863710
  hyper
cgcagtgcgattaggggcggcaggaggagaggggggcctcgccctgtcagcctctccgagactagtgggatgcggtgcccgggaggggtcttaataagatcacggttgctgggcagcactggacagtgcccgacgtaggcgatctcattgattccttcccacaaccccactttgcagataggaaagctgaggcacgagagggtaagtaacccaggccgcacaacgaggggaagctagggagggactggggccctgggcccctgcgctgacctcccctcctcatccccttcttatccccctctgctcctggcccaggccgcgcagagtcggcctctgtgatcccacccagaatacagttttccctcccgggcgcctggatctcccctcccccggctcctgtttccttgtcaaaacttcctgccttggcgagggcccgagttcccacccccttcctgccccccgcccctcggcgcccctcccggccctgcgatcagcagcgtcccgcctccccgccgctcccgcagtcaggctggggctcgaagtggggaccctcgccccgtcctcggctgtccagtcctcctcctcgcagaccccggcggttcctaccccaggccgcaggggagacggggccccaaggcaggtgagtgactgcgcgccccctggcaggggaggcccggtggtgcggccccggagaccaccctgccccggggaaagggcttgc

SEQ ID NO: 24770 - DNA, 619 bp, Homo sapiens
  chr1:158083079-158083698
  hyper
cgggcaaaggcaccgagctcttggtgtggttctcctgggataagcccacagtcacaaacttgtgcaggaatgggggtaccgggaagcagcccggtgttccaagccttttgagattctccggacctgcgcgccgcccgctcggcagggggctcggcaggcgcgggcggcgggtgggggcgggaggctctgcccgctcggtggctgccgcggcctcctccgcgctgctctccacgcctggcttattatgcacgaggcaggcaatttgccttcctccccggggacccatctcggagacaagaaggtagtttgttctctgtaatggcttctgctggagtgcggcggggcccaggcgcgagcgggggcacgggcggggagttggcagcgaaggatgcgcccggcgccccccggcggccgcccggagcccgaggtcggcgcgggaggagcgctgactccgcgggccgagccctcccctgccctcctctgctcctccgtaactcctgagctgtggcctgcctttctgctgcctccacgtccctactcttcctttctgccaccccgtttgcttcttaaaggttgtcctttgtttctgccatttcccctgtctttcagcttcatattc

SEQ ID NO: 24771 - DNA, 379 bp, Homo sapiens
  chr1:160040177-160040556
  hyper
cgtgcggggcaaggaagcggagacccagacagctgcaggcgcagagagaaatatccaaagacagagacccagacagacccggggagaaagagagatgaagagacgatatgcgaaacgataggagctgagctggcagggtgacaggggaagggagaaggaagaaaagggaggcggtcctgtcagcgatgggttacgagagctggagccggggggcgggactgggaccgagttaacgaagtggaaatgaattcaggaccggcccagtggccctgcaggcagcgccgaaggcggcgcctggaagtgagattggggcggagtaggcctgggctccctgagccacaggactgtatctttgggcacaattcccgtgttgttcacc

SEQ ID NO: 24772 - DNA, 75 bp, Homo sapiens; identical to SEQ ID NO: 7663
  chr1:160040592-160040667
  hyper

SEQ ID NO: 24773 - DNA, 86 bp, Homo sapiens; identical to SEQ ID NO: 7664
  chr1:160878353-160878439
  hypo

SEQ ID NO: 24774 - DNA, 146 bp, Homo sapiens
  chr1:161007602-161007748
  hypo
cgtagttgcgagccctgtggagacaaagaagcgtgagagactgacaggaatgacaggcagtccccatcacctcccagctagcagccacacctccccgtacccagtgtatccaagactccgggccagctgcgtggcctggaggcccc

SEQ ID NO: 24775 - DNA, 746 bp, Homo sapiens
  chr1:161275470-161276216
  hyper
cgatcacttgtccgagttcaggcccatcatgttcttgagggcgtttttgaggctggttctgctgggggacttgacagcaggccggagctccgggctctgctcatcctttcgtagctccatctcgatgaccatcacctttgggcctttggcggactccacccctaacccccgatcccccgcccggcccgctaaccgctatttcttatccttgcgagactcccccagccccttggccttcttctcactgacagctttggtgcttctgctgtggtccagcattgcatacagcactggcgtctgggggaggggcgcacacatcagtcaccgagcgactggggcttgactgttcccatcccacccctcactgctgcccggcggctcccagggttctccttcccatcttgtctaggccccaagtcccgctaacctgccgcccgcgcttcgacgcgtcctttcctggcttgtgcaatttccccttctccatagcactgcaagaagagagactgctgtacgtttggcctcgccggaaccccttgcaccgcggacacagcttcctcttccccttggccctcccacccactggagtagtctccgcccagatgggggatagtggggagagggggaggggagctaggctccgccccttacctgagcctcctctgcagggccgcctgcctgcgtagccagcagtaccgaaccacgtagaaaagcagcagcagcaacagcaccaccccgaggacaccccc

SEQ ID NO: 24776 - DNA, 334 bp, Homo sapiens; identical to SEQ ID NO: 23682
  chr1:161367769-161368103
  hypo

SEQ ID NO: 24777 - DNA, 93 bp, Homo sapiens; identical to SEQ ID NO: 23686
  chr1:167823354-167823447
  hypo

SEQ ID NO: 24778 - DNA, 608 bp, Homo sapiens
  chr1:169396301-169396909
  hyper
cgagtatccttcatacatagtgaagaaaggtgttaccagacttccccaccagtgccagactcggtggacctcggactccagaggataaggcgccaccagaaagcttcttccctcactacctaccctccctcccagctataccagacgtttatacctttaccctctatcccaccattaacatctccgcatcgtccttcccttctctccctctatatccctcttgcctgtgtaaaatgcggcggctgggatcacagagatggccgggggagttctcctctcctcctctttctaagctcttcacattgaggcaaaggagaccccggcacctgcctccgcggcagccaggaccacactgccatggcaacagcgtgcctctgcgtcctccatccgggcctctctaactacgagagcgacaaaaatctgcgcaggcgcatgcaatatcctcagaccaccgacccctcccggcacccatcccggtgcttgcgaagggccagtgaagctgaggtttctaaggggacgactaaggaatccacgcatcactaacgttatagagactcgcgaagtgccgctgtgttggttgtgaaatttccctcttgtagctgtctctc

SEQ ID NO: 24779 - DNA, 142 bp, Homo sapiens
  chr1:169838031-169838173
  hypo
cggaagcagctggcgtcaccacaccagatgccctcacctgaagaagtcatgagatagtaaggtgcagagcgctggccgacattttggaatgggattcagcaaagttgagtgcaaggtctgttgaaagctggagagaacatcc

SEQ ID NO: 24780 - DNA, 346 bp, Homo sapiens; identical to SEQ ID NO: 7666
  chr1:171220542-171220888
  hyper

SEQ ID NO: 24781 - DNA, 1262 bp, Homo sapiens
  chr1:171810215-171811477
  binary
cgcggattctggagaagggcgtgacagaggagatttcctttcgggaagtgtagtctggcagcggtgccccggtggtggcggcggcggtgctgctgttgctggtgatcgtgtggtggtgttagcggcgatagtgctttccactgggctttggcttggtagccgctgaaagagaacaacgctgccgctgctgctgatttcatgccatttcctgacccggcgctgtaacttggcctctgagccttggccacagaacgcagaggccgtggcatctggccgcagctgggctgcagtgcgtgcgcgcctggcctggtggtccgatgggaagcccggggcggggcagccgcggggcgggggcggggcgtcgcggagataggccacgcccctgcccgcccgcgcaggcgcgctgcgggtcgttagctgtcagagccaagcggcgggctggcggcgggctccgacgtctgcgccaggacctggctggctgagcccggcgcagcagcagcagccagggcagcgcggcccctactccctgtcaggtcgtagaggcgagcagggaccagctggtcgccggcccctcgggcaagatggggaaccgggagatggaggagctgatcccgctggtgaaccgtctgcaggacgcgttttcggcgctgggacagagctgcctgctggagctgccgcagatcgccgtggtgggcggccagagcgccggcaagagctcggtgctcgagaacttcgtgggcaggtaagcgcgcagggcgcggagtaaggatgcggcagtggggcgaccccgctgcgggccgttggaacgtggacgggcagcgggagccagagggtggatggaccaggcgctgcggtggaatggggggcagagtggaatggggggcagagtggcggtgtccgtggggcgggcggggtcctccagctctgggcatcctccgtcccctgccaccccccgcctggtggccctcctgcctgcctttcatcgtgcgatacaaagccatttcctccctgtcctccagtcggggagtcgggggaggggtccgccccgggctcgacccccaccccctcggtgcgcgccagccccgggcagcctccctgcgtagcgcgccgaaagcttcccagtgcccctctcctgttttcccagctcaacacccccctccttttcctgtcgccctccgtgaggctccctgtgaggctgtggggctttatcccccgagccccctcccttaggtggagatgctttccttctcgccagggttctc

SEQ ID NO: 24782 - DNA, 492 bp, Homo sapiens; identical to SEQ ID NO: 7667
  chr1:17736188-17736680
  hypo

SEQ ID NO: 24783 - DNA, 62 bp, Homo sapiens; identical to SEQ ID NO: 7668
  chr1:179333937-179333999
  hypo

SEQ ID NO: 24784 - DNA, 43 bp, Homo sapiens; identical to SEQ ID NO: 7669
  chr1:179835828-179835871
  hypo

SEQ ID NO: 24785 - DNA, 211 bp, Homo sapiens
  chr1:180919554-180919765
  hypo
cgaggtgaacggggccaaggtggcagggctgggcttggctcacattaaggagctcctggcccactcagagagcttgtcaatccgtgtcctgaggcagagacctgtcccacggtgacccagaagtgccgctgccctcactgtcacggcctcggaagccctgaagcactcagggtggttggcaggaacgtgctgcacagagctgctctgtggc

SEQ ID NO: 24786 - DNA, 161 bp, Homo sapiens
  chr1:180925259-180925420
  hypo
cgctctctggctgtgggttggccaggtcggagtgctggaccctgaggaaaggggctgcggggactggcgctgatatgtgcccatggagccagggcttaacagctgccctgccagtcctggagggtatccggagctctcctgtggctgccaggctgcctgcc

SEQ ID NO: 24787 - DNA, 886 bp, Homo sapiens
  chr1:183385886-183386772
  hyper
cgagcccagttcagcgcaccttttaagtttaaagatgaatatttttagcctaagccacctcgccctgtctttaccgctgtggtgtggttttcactaaacctccctaggagggctcgcgcagtcctcaggctccggataaacacgtgtgcccgcatccagctccggcgcgccctgcatttcagcaccgccgcctctggagagcgccttgctggcgggccaggtcagggcctcccacacgctctctcatccatcccagcccactcgcttttccctactcctcgcttctctcagtttcaagaaaaagcacccccaacttctaacttctcaattcctgcttctaaagtgacctccgcgtccctctttccgtgtctaaacgctcatgccccacgcctttgagtcctacgagcagctgcgaagccgcgtggcttcccaccggtggcgcgagacctccaataggcatctatcgatcacctttcccctaccgctgctggaccccgaaccagccagccggatgcccccgctcgctctctctgactccacgccccaaagcttctaagaaacaaacgcgcgataagtcccctccccccaacacgcacacgcatatactcacacacagtcattcgcacattcgtacacacactagacgcctcaagccttccgagtgccatcgccaccctgggcagagcctcagccaacttgggccccgatccttcggctccggctcgcgcagggcctcccgcagcctccgcccggccccctccccgtcctaggcagcgggtccctgaggccgaacctaggcggaaaagggccccctccctattcactcagcatccacctcgcgcgggcaatacacggcccacaattcccaaacactggtccctgggcc

SEQ ID NO: 24788 - DNA, 826 bp, Homo sapiens
  chr1:19043067-19043893
  binary
cgcgccccatttcccttcgccccctgtgccaccacccccttgctcaccgtctccctgatcgcgtcataaccctgagaatacctccagcctgggtcctctctccacccactccattctctcaaaccctcatttccctctttgcctgcctcctcccatagctggcctcgcctctacccattctcttccccctaatctctctcattctcctctcctctctcattccgcacccaacaaacacctcttccccctccatcttcagcccctgcgcgccccccttgcccttgccctctcccccacccccgtgtcccctttccgaattcctccgctgctggtgggctccgaggcagggaccgggcgcgggctcccgaggccgggcggacccaagtccagggcgggggttggggcggcggccggagcggggatcgggtctggggggatccgcgcggccgcccctccccgcgctccgccgccgccgccgtcgccgccgcgcctttgatccatggcccgaggccgcctgacagtggaaaatgcggggagacaaaaccactcagtcaaagtgattcccaacaactgtctccccgagataaggacgccctcgggctcggcggcctgcttaattcccgctgcccgggcctgggatcccgagcagccgcgcgcctggccgccccccggactgcggagccgccgctcgctcgtccagtcttggtcgcggggcctcggccgtctcgggacggggcaggcggcgaagggacgggcagccggtaagcaagacccttgctgcctgctggagagagaggctccctcgggagcgccccgttccccaccc

SEQ ID NO: 24789 - DNA, 146 bp, Homo sapiens; identical to SEQ ID NO: 7673
  chr1:197191306-197191452
  hypo

SEQ ID NO: 24790 - DNA, 289 bp, Homo sapiens
  chr1:1986115-1986404
  hypo
cgccacttcaccgctggcaccgtcgaggtctgggggcaggtctgactggtttcctttaccttagtgaagccggcggcctgcaccgacccggctcgcgcccatcccggggtcacccacatttgggtgaacttgaacgagtgcccgaccaggtaacgttgccggacctcccacaagagggcactttcttttctcccattttgtcctcattctttccagccaggtaggtcgcgcttttttctctgtgcaaggaagttgatggtggtcatttttttttttttttttttaatac

SEQ ID NO: 24791 - DNA, 398 bp, Homo sapiens; identical to SEQ ID NO: 22986
  chr1:200009765-200010163
  hyper

SEQ ID NO: 24792 - DNA, 779 bp, Homo sapiens
  chr1:2013420-2014199
  hypo
cggaaatgtgttcagttctcttgcattgcataatttgttcatattaaagcaggcttgatccgggctgccgtggttccgatcgactccgaataggacaccacacagtcgtgccaagaaggcgcctaagtgtctttccacacggccatccgagggcggacgtggtcaggggtgctggacgcgtcagacgggttctttgcagcccttggcagcgtcgcccgctctgtcccgcctgttgtgtgcgccttttccctgctccagggctgtgtatttggcaagagggaggctccgtggcacgatcacacgtgcaggagctgggggctgccagagcggctgttcaagatggacttggcaaatcacctctttcaagttgccggctacccggctgccgtagacagagtgaagtctggtagtttgtgtttatttatttatcttggccagcagagagaattgagtttgcatggagactgtaatttcattctgtgagtgtaagatcacgtccgcgttcctagcgaccggttttgtgatgtgggcagtgccgtgctggtaaatgctctgtgaggaaggaacgatggtgggatttgtcactcagtcgatttccctggtgtaaatgctcccaccacggccgatttcaggctgccgaagtggaggggttcagtgaaggtggagttgggcaagggcgtacacggtcggcttctgagagttggtccccccgcccaaccctcccctggagatgggatgtcaggagacctggttccatttgtttttttgcctgagcgtcc

SEQ ID NO: 24793 - DNA, 387 bp, Homo sapiens
  chr1:201915641-201916028
  hyper
cgcagcagcctccctgaagcccagggctagtggaccccggctggtctaatcagcggccaataagacccgacaactgccaggcccggagaggagaagccaatccccaagctgggggcgggcctacctcgctgtcagagctgtttgaaacttgaggacattccagggaatcttggagcgctgcgtgaccaaatttagtacagagcagtttagccttttaaagacaaggggccacgcaatgagaaaaagatacaaaaatgcgtaggctggcagaagcagatcacagccacggagagccagacaagcagggacgaggccatgagggccggtgaactcgccagcccggggcacgttcaagagcgtattttactactccatcaccgggtggac

SEQ ID NO: 24794 - DNA, 126 bp, Homo sapiens
  chr1:202933745-202933871
  hypo
cgccggcaatcattcccagtttcttcgccactcggggttctggtggagatttcttgttgggctgaatgttaaaatgccctgagaggtcaggtgaagagagcagtggaagaataaagtcaatacagc

SEQ ID NO: 24795 - DNA, 244 bp, Homo sapiens; identical to SEQ ID NO: 22987
  chr1:203086951-203087195
  hyper

SEQ ID NO: 24796 - DNA, 588 bp, Homo sapiens
  chr1:204530924-204531512
  hypo
cgtgatgaagatgaacatggttcctgttctcctgtctagggaaactggttaagcatgtaaatattagcatagtgaatgttttgttgtgagactacatgctgctatgagaaatacagaagggggacgtaatgtagccaagagcttctgaacaacctccgggaagagatgagctgagattaaaggaaggttaggagttaggagaggaagggaaaagtgccgtagttaggaggaaacatgccaaggtcttgaggtgagaaaacagtggcatctgggaagaactagaaagtttagtgtcgctgaaagcatggacagagagagatgagtgaattgaattgcctgggcatcctgggaacgggaagacaccctgatggcagggaacccgcgcctgcgctttcggggtcaggtccaggtctgccccgccagggctgaagccagctcctggtggggctgcagtgaggcggaagaggtgggatgctgctgcctggcggtgctgcggcggcagacctccacgaggaggtcctgggctaccgcggggtacacaggcgggcggaaaagggggagcagagtcagggggcagttgggaagctc

SEQ ID NO: 24797 - DNA, 241 bp, Homo sapiens
  chr1:204531595-204531836
  hypo
cgaccctgcttagtttccgagatctggcgtgttcagggtggtatggccgtagacactaatggtggtgcctggctgcctcttcaagagcccggcccagccacgcccgcccgactccaggcgtcactgccaccccagggtcgtggggctcggactggggacccctgagctgctcgcctgcggtcggactgctctccccttctacgcccaagcaccgccggtctgccctgctgcgccttccacc

SEQ ID NO: 24798 - DNA, 137 bp, Homo sapiens; identical to SEQ ID NO: 7680
  chr1:204537877-204538014
  hypo

SEQ ID NO: 24799 - DNA, 80 bp, Homo sapiens; identical to SEQ ID NO: 7681
  chr1:204540741-204540821
  hypo

SEQ ID NO: 24800 - DNA, 384 bp, Homo sapiens
  chr1:20618155-20618539
  hyper
cggcagccgggctcatgcctgctgcccttcggatgccccgcagcttgtgaccatccccagagccaccggccaagggcacaccctttcctgagccccgtgtctcctgcaaggtaagaggggaaggagaaaaggtcctcgggcagaaggaggcggctagtggagaggaactcagcagcgggtgcagtgtggcgcctgctaacgcatcaagcctccgctggaagttccaccataacgtctgcggcagccccaacagttccaccccatgctcccgccgccggcaccacagcagcagaaggaggcctgtggggcgggggccagaacctttccctcctcccttctgaagagcaacaggcgtcacaccatcctgcctctcccactaacccc

SEQ ID NO: 24801 - DNA, 157 bp, Homo sapiens; identical to SEQ ID NO: 7682
  chr1:214809726-214809883
  hypo

SEQ ID NO: 24802 - DNA, 342 bp, Homo sapiens; identical to SEQ ID NO: 7683
  chr1:21563161-21563503
  binary

SEQ ID NO: 24803 - DNA, 120 bp, Homo sapiens
  chr1:21568244-21568364
  hypo
cggctccaatgtcttccttcaaagaggccacgctctctgcctacaggtcacgaagtcctggaagtactacaggatggtgagaaaatctccaaaaggagcgagggtctgatcgatctgacc

SEQ ID NO: 24804 - DNA, 842 bp, Homo sapiens
  chr1:21573347-21574189
  hypo
cgccatgttgcccaggctggtctcaaacgcagggactcaagggatcctcctgcctctgtctcccaaaagtcccgcaattacgggcgttcatgcccggccacaggtgatatttgtatcaccattttatgaaggaggagaatgaacttaagaaaggttacgaaatttgcccaaggctacaaagctggtagtttgaaagaggctgggatttaaacctgtgcctgtaaccaggatgtcctgctgcctctcgtaaaagcccgcccaggtcccactctcctgagtcagactgtcatccccacccctgcccacctgcccaagaagagggctgtctgtgagaggcgtgccccaggccactgggggtcctcttaccatctgtcggtggtgttgatgagagtggagatctgctcaaggtattccttgtcatagaccacaataggctcggattcattgatctccacggggtagaagatggtgttgagaaaaggcaaccagttgatggcgggtgccaaggtctgcaagggaaaaggacagtgtgaccctgtggggctgctcctcctcacagcccagggctctaggacgggcttctacaggaagcaaaggaaagagcttgggcttggcgccatctgacagcgcaccgggcagagagtcaagcggagcctggcgggcttttgtcagagatgctgtaggtagaattctaaggagtccaacaccaaaatttaacctgaaatggaatgaggatgcaatgagaagatgcagcagctgccgctaccattcagcaagcgtctcctgtgtgccaggagccgtggcaaatgattgatgcatatgattccacctggtcctcacgc

SEQ ID NO: 24805 - DNA, 320 bp, Homo sapiens
  chr1:220700617-220700937
  hyper
cgcgggtgcctacaggatgtcttgaggcaggtgggtggaagtgtgaggaagccacctggaagagggaggacagggcccaaatcagacacagctctccatcctccctaaacaggctcgcctaagtgacacttccttgtgtcccaggaagtgacgatcagccagtgtagatgttgtgactcgcgggtctcacccactccgagggtgctgcagggcgcccagagcgagacgtcttccgccggccccattcccgaagaggccgcgccgtcgggggctgagacccacttgtactgagtctccagccgcctccctaggctgctggc

SEQ ID NO: 24806 - DNA, 632 bp, Homo sapiens; identical to SEQ ID NO: 22992
  chr1:22140678-22141310
  hyper

SEQ ID NO: 24807 - DNA, 574 bp, Homo sapiens; identical to SEQ ID NO: 7687
  chr1:2239631-2240205
  hypo

SEQ ID NO: 24808 - DNA, 984 bp, Homo sapiens
  chr1:224804868-224805852
  hyper
cgccggccatggccttcactttcgctgcgttctgctacatgctgtctctggtgctgtgcgctgcgctcatcttcttcgccatctggcacgtgagtaacacgctttggtctctcttctttcgccccaatttcgctaaatttccccgatttcaccccactttttccaccttgcgggcgtgggcgaaccggaaggttggaccttctgccgctccactgtcccggggcaggaggcagttcgctgcatcccgccgggcgcgccttcggtgccctggctggaggcgaggggccgctggtgcccaggtaggacaccctctgcagggcccgactgggcgtcccgggtcccgggcgccggggagtggcggctacaaccacaactaaccccttcctctcccgccccgtcctctcctgccggcgggaggcgaaggagaagcgccgccgtcggtcccggcaattagtcaagtagctataataactaaacatttaaaatgtcagcatctgtggtgggttgcatttagatataattggagacaaagtggaaacacgacgggagcgccttgtaagaggtagggagaagccgagcccacggagaggaaggagaccaggcgatgggggtcgaagtggaaggcggtgggggaaaggcgagaaggagaagagcaaggaggcgagggagactgggaagggcaggcatcattaaggccatggaggaaagtcacgaagagagaccgtggagagcgacgacggtgtcctccatctgccctcttggcgtctgaagtccgactcctgaagaccccctgcaggtggcgaacctccgctaggcccccagcgtccccagcccacacaagcttcctgtcacccttcccggggctacgccaggtggagggcagccgtggatcccagttctttaggtgtgggtgggaatagaggagcgcaagcttctgaataggggaagagaagtactgagagagcgcgcaggagtgcgtacgcc

SEQ ID NO: 24809 - DNA, 936 bp, Homo sapiens; identical to SEQ ID NO: 7688
  chr1:225614356-225615292
  binary

SEQ ID NO: 24810 - DNA, 476 bp, Homo sapiens; identical to SEQ ID NO: 7689
  chr1:2257929-2258405
  hypo

SEQ ID NO: 24811 - DNA, 191 bp, Homo sapiens
  chr1:226062794-226062985
  hypo
cggtcagttttttcctctgagtttgattcccctgaaggcaggccccgcaggccctgcaatcccccagcagagagcatgcatgcaggcagcaaggcaccacgagaacctgtgctcgggctggcttggcctccgtaagctgggacacctcagcaagcttgtgtccaatggcaacctcagggctggactaagcc

SEQ ID NO: 24812 - DNA, 180 bp, Homo sapiens; identical to SEQ ID NO: 23703
  chr1:226163170-226163350
  hypo

SEQ ID NO: 24813 - DNA, 983 bp, Homo sapiens
  chr1:226411007-226411990
  binary
cgccgctcttaacggggatttgacccggagaagagagttctgtcgcctgcggcccgcgcacccgggcccctccgggctgcccctcccaggcaaatagtccttcggggatgtggattgcgccgtccgggcgggtgggcggggaagaacacggagggggccgggacccaagttcacgcctccctcctgcatcccgcagccggcggaagcgattattccccggcgtctggcggggccgggggcgggctcgcacccggaggagacacgggtctccccgagcccacctttgatcgcaccgccccgccttcccagcccctggcccgggagggtataagtgcggcccgcgcccctccgagcggcgcgctgggttccggagcgatggccacagccgagtcccgtgcgctccagtttgccgagggcgccgcgtttccagcgtaccgggccccccacgccggcggggcgctcctgccgcccccgagccctgcggcagccctgctccctgcgccgcccgcgggccccggcccagcgacctttgcgggcttcctcggccgggaccccgggccggccccgccgccccccgccagcctgggctcgcctgcgccccccaaaggcgcggccgccccgtcggcgtcgcagcgccgcaagcgcacgtctttcagcgccgaacagctgcagctgctggagctcgtcttccgccggacccggtaccccgacatccacttgcgcgagcgcctggccgcgctcaccctgctccccgagtccaggatccaggtgagggcccgctgcgttcgcaagtgcgcgctggagcggaggcgctgcggactctaggtctggactgcgggctcctgaggccacacccgggacgttgcaggcacggtgcttcccctgaggctctgcgtactagactgaaatagggggtgatatcggcacctgctgcatagggtggttgcgaggcctgtgtgaaataatttaggcctgcactgaac

SEQ ID NO: 24814 - DNA, 335 bp, Homo sapiens
  chr1:226826337-226826672
  hypo
cgagccgctgcagcagcaacacacaagacagaactttgtcatgaacttgtacaacccacactcctggactcggagacagctcgccagctcttgctggcagggagcagcgtgacctcgggcacacaagatggggacaagcaggtctacccacagcaggtctgctgtgaagatttgctgcacgcttggcatgacacctggcagacggcgggcactgttctctctctcagggcatgggaaatgctctctggagctatggggccgatggctaagggagagtcagtgagtgtccgccaagcttccccgcctacccgccgcacgccagggacaagcacatc

SEQ ID NO: 24815 - DNA, 252 bp, Homo sapiens
  chr1:228083414-228083666
  hypo
cggaagtgcaaaggtcagtcctggaggcggcgagttggcagtagcctgagggtaggacttgcgtctccctgtgtacctgccgcctccaagttcagatgcactggccgttctcgctggggccatgagccaggcagcacccggggcccggcaccccaggcctggactcctgggcctctgctcgctccagtttccggcacctttcccaggaggggctctgggtgagtgctggccctgtaggtccctcggcctgtc

SEQ ID NO: 24816 - DNA, 203 bp, Homo sapiens; identical to SEQ ID NO: 7694
  chr1:228361379-228361582
  hypo

SEQ ID NO: 24817 - DNA, 128 bp, Homo sapiens; identical to SEQ ID NO: 6693
  chr1:229038524-229038652
  hypo

SEQ ID NO: 24818 - DNA, 916 bp, Homo sapiens
  chr1:229542790-229543706
  hyper
cgccctggtctctcggtttagttcatgctgaggttggtcgcttgtttcattcactgtctcctacgcagtccatgccacgggggataagtttttcacaagtggctttttttccccacagtgaagagacgtggcctgggtctggagttcctcaaccggcaaaatacgacgtgaacagctcctgcacccaaaaaggccccgagttaactctgctgcataggcgaggcaggcaccgcgccgccagtcggggacgcagagcgagcgcgtcctctgggatttgaaggccgcccccgtcaaagttggcattcgggggcctgcgtgttccggagctacggagcggcaactgaggcaggagctcaggactggggggagaaagagagaccctggaagcgattaacgtgccccttgctttacagatgtggcagataagacacgagagggagctctggtccccgaggggctgtcccgggagggagcgaggtggggagggggagcaggccctgccccgagcaccccgcggactgagcgtctggcgtgcacggcggaggggttaccgcggggaggtgacaccccagggtggtgagggcacgcagatgaggctggcctgaggggtgcctgctttggggaaagcagtctgtggagggagggaaggagggcgatcgcggccccacgcgggttgtgctgctgaggctccgcgccgcaggaaaggcaccctagccggattcgccctcggacgccccagctgggcacactcacgcggctctcccgcggcttctcgggaattcgcctccagggcaatcagctcttcgcacaaacgttcaaaccaaggtaagagctatcagatccagccagatctgcttcctaagcctggccagggccctaagcacccccacccacacgctcagaggcgggcgacgcc

SEQ ID NO: 24819 - DNA, 219 bp, Homo sapiens; identical to SEQ ID NO: 7697
  chr1:230308302-230308521
  hypo

SEQ ID NO: 24820 - DNA, 464 bp, Homo sapiens; identical to SEQ ID NO: 7698
  chr1:231038126-231038590
  hypo

SEQ ID NO: 24821 - DNA, 1339 bp, Homo sapiens
  chr1:231175062-231176401
  binary
cgcggggctgagggacccggccgcctccctcgcccggggtgcgcgtctgctttcgcagccatctgtgcgccggggccatcccgcggtaatcggatcacggacgcgcggcctggggcgccggaaagggggccgggctgttccaatctgctgtctacactggcggcggacaaaagttgtcctcttcgtggtaggaaaacgcaatcgcgttaatccgttgggccgctgtgaaagcctttcccccaccgggaaggtctgtttcactcggggagaggtgacaaggccgcccccgcccccaggccaggcacgaaccccgcacagcgcttccgggcgcccaggtttccgagccagcggggccggactgagggcgccgggcataagaaagccgccctctgcgcgcggggctctcccgcgggggttccaatcgtgggcacggagcacgcgagaaaaatgggggtcgttgggaggacggcgccggcgcctggggcggaggagcccgaaagggcgggtgggcgcggggacttccggacagagcgcggtccccgcgaactttcccgggacggcgagcccggccgggaagagccccagctcgcggagccccactcaccatctctttgcggagcagcgccagagcggcgtccaggttgggaggcttggcgggcagcgctgccgcccgggccccgccgccgcccgggcccccgcggctcagctcgtcctggatgcgcgacttctgcgcgtacagccgctccaggtgccgccagcccccagacgcgccgccgcccgacgccgagtgcagcagcccgctcaagctctttggcagcgggggcagcccgtccacccgcagcccccggaccgcgccgttgcccgcggccccgggcgccgcccgggccccactcatcgcgccgcggcccggccacgcgcctgccccgctgcagcgaaccaaggctttcccccggcccgcccccttcccggcggtgccccgcccacttcccctcccgcgccacgcccccccggccccgccccctctcctcgaggcccctgcgcgggccccgggtccgggtggcgtccgcgtccagcagccgggctcgcctccacccgggtctcctcctccctcgcgcccctccagcgccctaattcatctccaactccgcgtgactaccctctaaccccccgactcacctccagccccgtcacgaacccttctgtgccactccctagctccgaacctactaagccccccgcgacccgcagcttcccggttcacccccatctctgtccccacctcctctgaaccacctcccagcttcccggctcacccctagctccgaaccctctcacccgc

SEQ ID NO: 24822 - DNA, 93 bp, Homo sapiens; identical to SEQ ID NO: 7701
  chr1:2330473-2330566
  hypo

SEQ ID NO: 24823 - DNA, 146 bp, Homo sapiens
  chr1:234881099-234881245
  hypo
cgcgtattgtattcctgttgtatattgtacatgtaatgcatgctagctgccatttagaatggaaaagcatgccctcaccacagtcaggcccacattttgctttccgtgttaaagagagaaatggcgtaacgtgctcgtgaagaggc

SEQ ID NO: 24824 - DNA, 89 bp, Homo sapiens
  chr1:235325391-235325480
  hypo
cgatctagcgagacttattctctacagaaaagaaattagacgggcaccttcgcgctcggcgcctgtagtcccagcactttgagaggctc

SEQ ID NO: 24825 - DNA, 185 bp, Homo sapiens; identical to SEQ ID NO: 23433
  chr1:23693488-23693673
  hypo

SEQ ID NO: 24826 - DNA, 715 bp, Homo sapiens
  chr1:23884853-23885568
  hyper
cggcaggagaggttcccggggtcccaggcagaacgggcgccagcacctgcgttctgggcgggggaggaaagaagaccaaggagcagtcagtttccgccgagcgtgccgaggcgggggccgtccgcagactggccggcgccagggaggaaacttggtctgtacctccagctgataactccgcgccccacgctgcccccacccagttggcgccaaagaccacaggcggagcttgcgctacccctcctacttggaattgacactagctgggagggggctgccgaagacagctccctatacaacatggaacagaaagacttgtatttagtcggacccatgtctactttgccagaccctcggccactgcgggagggcagggcccaggcgcatttaaggcttaaatgcacatcacatggaaactgactctgccattcatttgatgcaaccatgggcaagtcacttgtccctctctggcctcagtttccctaaaccgagtgagtggcaatttttcaaaacgtctgccaactccaggacttgccgtttaaacctccctctccaagagaggagatactcacctggaggtgtcaggacacggccgagtcagtggcaaaagctccttttgtcgttggagatgacaagttccggagtgagctcggctgtctgattagaggaaaagagggaagagttacgcgaggcaatcgggagctccgagggtccc

SEQ ID NO: 24827 - DNA, 31 bp, Homo sapiens; identical to SEQ ID NO: 7707
  chr1:245281788-245281819
  hypo

SEQ ID NO: 24828 - DNA, 907 bp, Homo sapiens
  chr1:2461524-2462431
  binary
cgcgccgggcgagtctggtacttactcggtttttctctttggggctgagcagctccacggccacagtgctgggggccatgcctggcgcggaacaggcgacgaggcgacgcggggaggccgggcgagacgaggcgagcgggcgcgggcaaggccaagcgcgtcccgggctggcgcggacaccggccccgcgcgccgacgccctatataggcgcgggcggcggcctggcgcctggagtccgggcgccgcggccgttcccacactccgcggccaatggccgggcgggccgcacaaaggcgccggcccattagcgcacgctaaattgcctgtgaattggcgcgggcacaatgggcgctccccaaggagcaggtgggccgcgcggcacaatgtccgggctgtgggaacgcgctcgccctcattagcatcccggggcctgatgccgggagccccgcgcctcaatatgctgccttttcccaggccgccaaacgggaggggggcaggaaggagggccccctcccccgccctcccctccgctcccctcccctgcctctccccagcggcttcccactgctggctggcagaggccgtaggagcagataagggaaaaactgtagaatgaacaagtgccacggcttcctgggggatgggcaccttccctgactgggacctgctgcccctccaggggagggggacagagggggcgacgctcttaggatcagtcctacgtgcctatattacaagccccctgactgtcacctgggactcctgacttctccagacctagaaaatgggccttgtgccttcctggctgggctccgggcagctccaggaagctggggcccgtgctccacgtggagcccggcacccggcagctctccccgcggagccgggcacccggcagctctcccc

SEQ ID NO: 24829 - DNA, 88 bp, Homo sapiens; identical to SEQ ID NO: 7709
  chr1:246655176-246655264
  hypo

SEQ ID NO: 24830 - DNA, 265 bp, Homo sapiens; identical to SEQ ID NO: 23716
  chr1:248027980-248028245
  hypo

SEQ ID NO: 24831 - DNA, 247 bp, Homo sapiens; identical to SEQ ID NO: 6698
  chr1:25070663-25070910
  hypo

SEQ ID NO: 24832 - DNA, 255 bp, Homo sapiens; identical to SEQ ID NO: 7711
  chr1:2520320-2520575
  hypo

SEQ ID NO: 24833 - DNA, 152 bp, Homo sapiens
  chr1:2520950-2521102
  hypo
cggaggcgctgggtcgggatgccgaacctctcctgatccgccggcagcaacgagccattaaaactgcagttcctgaccacgcactgcttcgcaggctccgagccctgcatcctccacagcccccgccttgctcactgttgggccctcagggc

SEQ ID NO: 24834 - DNA, 574 bp, Homo sapiens; identical to SEQ ID NO: 22996
  chr1:26551673-26552247
  hyper

SEQ ID NO: 24835 - DNA, 427 bp, Homo sapiens
  chr1:30815417-30815844
  hyper
cgggcgctggcgacagcagcgcaggctggttaagctgcggcaggtccttgcagaggaggggctcttcccaggagggcgctccagccgaggcccctctgccttcacctgcgccatgaccacttccctcggccctctcccctcctccacgcctcctggggccgctctccagggtcctgggacgagaccagccccgggcagggcagcgcggggagccaggggtcccacacccaggagggcccctcaccgcaagggacgggcttaggcggataaatgtccggctcccctcgaggggcagagtcagcaccccccacacggtccctgagatggccctgggaccgagccgccgcccccgacttgtgattcagcctcttcctgcctggctttcccctccccactgtgcctcctgggatcgcctcccaaatcagcc

SEQ ID NO: 24836 - DNA, 95 bp, Homo sapiens; identical to SEQ ID NO: 23725
  chr1:31863040-31863135
  hypo

SEQ ID NO: 24837 - DNA, 1508 bp, Homo sapiens
  chr1:32180009-32181517
  hyper
cgctaatatccaggtcgggactttgtgttgctgcgagcccaggtccccaccctgaagtctaggacagacccatgagcttgggtgggagagaagagcaatgcagacgtgactgtcctgccaggcgggggcgccgccgccagacgcacgaaaacaaccaaataaatcaggcccaggaactcctaatccttcccggctgtggctgctaccgcttgccccgccggcaccgccctgccaagggcgcagagtcgggccagcagagccggagtgatgccgggccatcgaggcgtcctcagcccccgaggtgggaggtggtgggggggcggggaggagaagaagaaggctctcccgacacggtgactcaggcctccttgacccgctcctgggtgggcacgttcctgcgccccggtctatttttagagccggctctgggcctgagcgcagactgaagggaaggggggcctcgtggggggcgcaggcgcctgaccagctcctccagctcggggctcaagccccaggccctccagctgtctacttggaaaagggtggaagcacatggagggtgggtgtcagggtgtgcggcgcaggcccagagaatgcgccccccttccccacaaggcctggcagttccagagaactgggcgcggcctcccaaataacgacctctgttaagtgggaccaggagcctcccgatggtcgctgtgtctgcccattggaccaggggccagggcgggcggggctttgggcgacagaactggctagggtgggagaggagaggaagctgccaggttctggggatcccgaccccaccccgccgacagccacgcctccagcccactctggccacgccactggtctgcctttggaccacactcatggccgggtgccttccctgactccgccctaggccctgcctcctatctggctccgcccagccctggccaaccttagaacctgtcccaaggtccagagaggcctagatgaggggtagcctgcctctgagaggcatggagccctcctcccgcgtggggtcagggaatagaagggcgtcgagggtggcgggtgagggaacgttcctggcgccgcgaacgggaagcctccaggctgcaggacgtagctgcggggacccggcagtctgcgaggctggagtggccgaggccgccccgagcatagaaacagccctgtatacgtgggcacagaaaggcccagggaggcgcctgggcagaagtgtctaggacgatgcctctgccacggagccctggagtgggggcagctgatggctcaagacacatgagctctggtggcgagtacagggacgcggggtttggggaggcccaagtcaaggtccatccttctgggatgaggggcggaggatgggaggcggagcccggtctccagggcaccagccctccacctagcgggaagcttgggaatcgcggagtgcagaggtggggtgcggaaagggttccaccgcgcctgggctcctttttctccttggaggtcccactggc

SEQ ID NO: 24838 - DNA, 1181 bp, Homo sapiens
  chr1:32237536-32238717
  hyper
cgccggaagccgcccgcgctcccacaccttgtgcaggtctcccctgaaatgaattttaatttccgctgagggcaggcggcgtcgtgagtcctgagcccgtggcggcggcggcggcgcgggtgtggggccgcgcggccgggagcgggcggaagagagcgcgaatttgaatttcaaaggcatctggaacccaagtgcttctgcgttgcccgattgtgtgtgtggcgcttttgtgtgtccgcgaatgcgcgcgtgcgtgtgtggcgtgtgtctgggtgttttatgactgtcctccgtgaggccgtgtgtgagcccttgcgtgggccgtgagtgcggcagggagcgcggtgtccgggggccgcctgtcggtgtgtctgtgcgtgcttgtgcgctagcctttgcctctgcgagtgcgtatttttaggaccgagtctgtctatatgagcctgtgtctgtgtgtgtgcgctcccggccctgcgtgtgtctgtgagcgtctgccggggcgcgtgtgtgctcggaaccccgcggtggtgtgcgggtgtgtccgtgtgtctgtgcacgtgcaggcgagcgttcccatctgtgtgtgtgcatctgagtctgggctatgtgtgactcagggaccagtctatgagcctgcctgtgcctttgagccgatacctgtgtgtgactcagggacgagtctatgagccgatacctgtgtgtgcttgggtgtctgtgtcgtggtgtgtccctgcaagcgtttgtgcctgcaggtgctggagtgtgtagctgtgggaatgagtgcgtgtgagtgtgcggaaggggcaccgcgcgagggagcgccggtgcggaaggctaagcgagcccgcgccctccacggacggtgccgccaccccctccctccgccccgcgctatgtgcccctgtgtgcccgcgccgccggggccgtctctgggctccgggagggggctgagcgagcggccctttcctcccagggaccccgggcccgccgccagccctgggcacacccgccccttcctccagcggccccgctcgctgacccacgggcactcgatgggcactcgggaggcaatggccggagaggatgggcagttagcgggagggactgagtggcgccggcttcacgctcattctgctgagggcttgggggcagctcatcagtcttccgcaatgggcctgctc

SEQ ID NO: 24839 - DNA, 589 bp, Homo sapiens; identical to SEQ ID NO: 23726
  chr1:32410105-32410694
  hyper

SEQ ID NO: 24840 - DNA, 1004 bp, Homo sapiens; identical to SEQ ID NO: 23729
  chr1:3328265-3329269
  hypo

SEQ ID NO: 24841 - DNA, 766 bp, Homo sapiens
  chr1:3342039-3342805
  hypo
cggggcacggggcaggggcgcgggctcccttccccccaccctctgtggcccggcctgccatgcagagccggggcctgcactgaggagcgcgtgtgccccttccaggtgtaagtactgcgaccgctccttcagcatctcttcgaacctccagcggcacgtccggaacatccacaacaaggagaagcctttcaagtgccacctgtgcaaccgctgcttcgggcagcagaccaacctggaccggcacctcaagaagcacgagcacgagaacgcaccaggtgggccacgcggggtggggcagcccccagagcacccacacgggcaggccccacagagggggagggggaacagcaggggagtgggcgccgggcagggaagagggccacagactacccctcaggaagccaacaggcacccctcaaaccgtggtcattaaagagaacctcgtgctctccggtgtccctaagaaacctgcctccctaacagcaccccaggtgtaccccgttcgcggttggtttgccccacggagggaggggtccagcgagaggccgccccctgatgctcccgcccctccgcagtgagccagcaccccggggtcctcacgaaccacctggggaccagcgcgtcctctcccacctcagagtcggacaaccacgcacttttagacgagaaagaagactcttatttctcggaaatcagaaactttattgccaatagtgagatgaaccaagcatcaacgcgaacagagaaacggtaagaaaactatcgc

SEQ ID NO: 24842 - DNA, 362 bp, Homo sapiens
  chr1:35258495-35258857
  hyper
cgcccccgccctctctccagcgcccgccgccctccccgtcgcgtttcctgcccccaccccgcccctctgcgctatttaaggcgcccccgccgctcgtgcggtccagcagggctcccgcgggcgtcactccggccatcgtccccacctccacctgggccgcccggcaggcaggcggtgagtcgggggctaggaagggaccaggggcgccacctgctcgcgggaggccgggaggagtcttgggtcctccgatgccgggacgggggttgctgcggaacgcccgccgcgacagagccgcgctcacccaggtggccttggccaggctcccaccctctttccatggaatccttgtaacaacccgaggc

SEQ ID NO: 24843 - DNA, 864 bp, Homo sapiens
  chr1:35350989-35351853
  hyper
cgatatatccagaaggccgcttccagcccctcaccccagccccgaccgaccagggtcagagccctcgtgggcgcctccccgttccatacctgcaccccaatggacggccgccacttccgctgccgcgccaggctccgcagctcctccctgccagggatggtcttgatgatgagtgtggggggcttggggctggcccggggcggcaccggcgccaactccagtgtgcgcgcacccatggcggggccgtccagcccgtcggcggagctgcagcgccgggcggggccctcggccgccgtgaagctctcgtgcgcggagtcggtgctgctctgggcggtgatggagatgcggggcggggcctggcttcccggcgggatggggggcggggcctttctgaagttgaaggctgtggccggcgagcgcagagacgcagtgggtgaggctcgcggccctgcctgggtcctgggcccgcgcccgactcccaccctcaagaggccctacgggaccctgcagcggcgcgcactccacatgctgctgcacacacgccaacggacgctctccccgtcatccgaccccgggagcgagcgatctgcgcgggtcacagcacagtcgagggggaggccagaacccggacccagggcgctctcctgcctagggccgggccaggggcaggaaggtgtactcacaggagccgggcctccctgagacagcggcaggggtagcgaggaggggcaggcagtcgtcgtcttgagagcagccggcctggatggcccggaggtagctgtggctccgcatgcggaaacagccgggcaggtccagggcgtccacggcctgggactccagctccccaaacaccgacccgcacac

SEQ ID NO: 24844 - DNA, 168 bp, Homo sapiens; identical to SEQ ID NO: 23731
  chr1:35664718-35664886
  hypo

SEQ ID NO: 24845 - DNA, 229 bp, Homo sapiens; identical to SEQ ID NO: 7721
  chr1:36025968-36026197
  hypo

SEQ ID NO: 24846 - DNA, 1246 bp, Homo sapiens
  chr1:36042458-36043704
  hyper
cgggacgcggccgcgcggactcacgtgcacaaccgcgcgggacggggccacgcggactcacgtgcacaaccgcgggaccccagcgccagcgggaccccagcgccagcgggaccccagcgccagcgggaccccagcgccagcgggaccccagcgccagcgggaccccagcgccagcgggaccccagcgccagcgggtctgtggcccagtggagcgagtggagcgctggcgacctgagcggagactgcgccctggacgccccagcctagacgtcaagttacagcccgcgcagcagcagcaaaggggaaggggcaggagccgggcacagttggatccggaggtcgtgacccaggggaaagcgtgggcggtcgacccagggcagctgcggcggcgaggcaggtgggctccttgctccctggagccgcccctccccacacctgccctcggcgcccccagcagttttcaccttggccctccgcggtcactgcgggattcggcgttgccgccagcccagtggggagtgaattagcgccctccttcgtcctcggcccttccgacggcacgaggaactcctgtcctgccccacagaccttcggcctccgccgagtgcggtactggagcctgccccgccagggccctggaatcagagaaagtcgctctttggccacctgaagcgtcggatccctacagtgcctcccagcctgggcgggagcggcggctgcgtcgctgaaggttggggtccttggtgcgaaagggaggcagctgcagcctcagccccaccccagaagcggccttcgcatcgctgcggtgggcgttctcgggcttcgacttcgccagcgccgcggggcagaggcacctggagctcgcagggcccagacctgggttggaaaagcttcgctgactgcaggcaagcgtccgggaggggcggccaggcgaagccccggcgctttaccacacacttccgggtcccatgccagttgcatccgcggtattgggcaggaaatggcagggctgaggccgaccctaggagtataagggagccctccatttcctgcccacatttgtcacctccagttttgcaacctatcccagacacacagaaagcaagcaggactggtggggagacggagcttaacaggaatattttccagcagtgagcaggggctgtatgggacgcgggaggagctcagaggaggcgcggagagtgcccgaggttgggtgagtgcctagaggggagatagttgaacc

SEQ ID NO: 24847 - DNA, 125 bp, Homo sapiens; identical to SEQ ID NO: 7722
  chr1:3697578-3697703
  hypo

SEQ ID NO: 24848 - DNA, 307 bp, Homo sapiens; identical to SEQ ID NO: 7723
  chr1:3705404-3705711
  hypo

SEQ ID NO: 24849 - DNA, 123 bp, Homo sapiens
  chr1:38412695-38412818
  hyper
cgctgccccaggttccgggacagtgactacatttcccaacagcccctgcgccacatggtggtcagtcagcctgcaagtcccagcatgcccgagtcaatcgtggggtggggagtctctccatcc

SEQ ID NO: 24850 - DNA, 130 bp, Homo sapiens; identical to SEQ ID NO: 6717
  chr1:40771005-40771135
  hypo

SEQ ID NO: 24851 - DNA, 796 bp, Homo sapiens
  chr1:40781406-40782202
  hyper
cgaccctgggagcggggtcctaggggcgcagctcttccgcgaactcccacgtattgagaatcttctgtatagcaggcactgtgtgccattacatgcattcattatcttacagaatactcagaaccgggaggcgggcgctattacgggccccagtttgcagtcgaagaaactggctcagaacgtgaagggtccatggtcactgagagtgggcggcggcgccaggagtccgccctggatctgcccgactccttccactgtgccagtttgcccttgcgcggtcgcggtggggaatagatggagacgtggacagctcaaataaatcacagatggaatgtaaggttgtgcctagcaggctgccggccctcagtgagcggtggctcgggttgttgttcttacgtgaacgacaggcagagacagcgcctcctcctctccccatggtgcgggaaaacccgacgggaaagtgggggaggcgcagagaaaggaggtgtagggaggtgaagcgggtactatcttcccactcggagcgccccttcggcagcacagctgcccggtcctccctctgctaagccctgactgctgcaggggagcaggaggagccggcacctcccagaaagcagaccctctctctggatcccgtttgcctgcaattcaatgcccctgggtgggtgtgaggtttcagggaggtcacaagtcatatcaagatgaggcgagctcacagctggagagtctccatcctgctgcccatctctgaacagatcagagatcttaaaaggcggcccttttaagaggccagctc

SEQ ID NO: 24852 - DNA, 418 bp, Homo sapiens
  chr1:41267865-41268283
  hyper
cgtgaaactacctactccaagagccctttaggatggtgctgtgaggtggaagggcgaggccgaggcggcggtggcgtcgcgtcccccctctccgcccctggcctcggggacgcggcggcaccttcacactttccgcttggcccgctgctcgcctttcaggccgccgcgttttcaattgttaatttggaaacggaaaaagtagccggccgggcgggggaggccgcggggaggtaatcggagccgcagcaccgccccggcccctcccgctctcggggcctggcattggcaaagccccgcccctcccagggacgcaagagccccgcccaccattccccgcccccggcatgccccgcccatttccgtaagccccgccctcgccgaggcgggctgggggcacctgggagtgccgagcagtggc

SEQ ID NO: 24853 - DNA, 738 bp, Homo sapiens
  chr1:41284015-41284753
  hyper
cgcctttactcccaatcccgactctgaccctggagacccgcacagattcagcggaccctccccctccctccccagtcccctgccacatccccagaagtccccgcctccgggtccgtgcgcggggtaggctggctgtgatctcgccgcccccgcccctgcagacttcatcgtgttcgtggcctcggtggccgtcatcgccgcgggtacccagggcaacatcttcgccacgtccgcgctgcgcagcatgcgcttcctgcagatcctgcgcatggtgcgcatggaccgccgcggcggcacctggaagctgctgggctcagtggtctacgcgcatagcaaggtgaggcctgcaagccgcgcgcggagacccgagggcgtgtctggggcacgaccagagcgggcagggcggagagggcgaggtcagaggggctgtctccgtgctgggaaggggtgtggcctgcgggggttggagccctagcaggaggcgaggtctaagcgggtggggcgaagtggattctgaattaggtaggggcgggcctaggagtccggaccggatcagggggcggggccggagaggcggggcttgagggtttcccctggatgcttctgggtttgaagggaccactcgtaccacaaagtgggcagctgaggtgggacttgagggtggggctggagcggggctagggtgggccccaggtggaagcctgaaagtgggacttgggggacggggcaaggtaggcc

SEQ ID NO: 24854 - DNA, 130 bp, Homo sapiens
  chr1:42128212-42128342
  hyper
cgggatgccttcgcggccggggtcgcagatgggcccgggcgcggctggcggctgccaggggagggtctcctcgcccggggaatccctggctgccggcggccgcggggagggtctgcgcgccggcctcctc

SEQ ID NO: 24855 - DNA, 110 bp, Homo sapiens
  chr1:46744609-46744719
  hypo
cggagccgccggatggcttccctggctgtgactgcatcctggtccagccagttttggaagaggcgcaggtgaccaaaggctccacggccccagcgctccagccgcttggc

SEQ ID NO: 24856 - DNA, 854 bp, Homo sapiens
  chr1:46913674-46914528
  binary
cgttacgggaagggggtcttgaattctgatctcgtttctgcctaagacctatcgcctttttgaacctcagtttcccctttggctgcatagggaaggggtgcccacatgcccccgcccgcattcagttcgaaggaccagccagtaggccctgcgccgcccagggaccgcccggcctttgcgtccggcccagctcaagccccttccgccgcgcgcggcctcgggagcgctgggcaggcagcccgggtgggagcgcccacgtctcccgcggacacggacggacggatggacgggcggccgcgcaggcccgcgccccgctcccgccccgcctgccgcgcctcccggggcgcccgcattaaagcgcatatgcaagccatgaattatcaactgaaaggagtcaattaccggctctaaaaacgagtgtctgcgctcgcagcgccccgggccatccgcctatttacggagcgatctaccccgcccggctggggagggggcctcgggagggagagagacggagaaacggagcccgagaccgggagagagccggagaggcagggactggagagtctgggacacgaaggagaggcggggagagaccgagattcagcgagacgcgcggagggccggacgggagccaaggcggctcagttcctcttctcccccgagcaggcgaggagaggtggggtctcaggacctccaaggccctgttccccttccattggcatttgtgtaaggacgcaggccctccgcactgctgactgtggcactgggcagggagtcccctagactaggggtttggggttagatctggggctcaggcagcgctgggctgggcgtagtttgcagagggaccggcc

SEQ ID NO: 24857 - DNA, 593 bp, Homo sapiens
  chr1:46951168-46951761
  hyper
cgggggtatctctgagcggtgaaggggagtagccgtcggagggcggggacagagcggtagctgccttgcgctgggattgggggtgggggtgggagtggggagggctctttaagcggcggccgcgctaataacctgtccaggagatggctcgtggcaaattgctttgttagtcttgtcagcgcggccggggccgccgtcagcgcgcgccatggatcaagatgatgaatcgctgcggacggcgcagatgcgggcggcccgcggccgggcccccgggtaggggtgggaggtggagggggccgcggggggcccggccgccgccattaactccggaattaggtctaagccgcccaccacccagccactgccccggggagcgccagccgttggggcgggagcgggcccaggatggggactgagacccgcgtcccccacccgaacctggacctagcctcctctgaacgcagagggcagtgggccgcccggaaggggcggggaggggccccggccctcaagccgcacagccaggtgttcccgctcttcgaggacatcccctgcccgcctggaggttgagagggcggccgcatggggcattc

SEQ ID NO: 24858 - DNA, 957 bp, Homo sapiens
  chr1:46956469-46957426
  hyper
cgcagtggccctagttccctagaattcgttttgcctcccgcggcctcagccggcgtgggtcaggcgagctccggcgaggaacggcaggctggggccagtccccggagcggctctcggggcgcttctaggggagcagtcaaagggttgcgaggactgccagggtctttcctccctaggcttcccacactggatggccgtaactcagtcgttgacggcgacaggccaggggccctgatggactgtgcagggtcccgggcaccaccggctgaactttctggcggtcacaaattcccggaacctgcgcaggggcttcgttggcactggtggttcacttaaggagcttgagggaaacctcctcttccccaaattcgcaccaaatctggggccccgacttttcctggattccagccacactcggtttgggaggcagtgggctcctcaggcttgtgatttgcggcaggaaggagtcccggaatggaagaacggggaggacgagatccgaggccttttcaccctctttgcaagcatgcagttcaccaaagccgagaacccaccgggcctggagcgcagcctcagcgctggttccgacccgggccccagaaggtctttttcgtttgagaaaagtcctcggaggccggggcagggtgcgccgatattggtttactaagggcgcctccagtttgagggcgttggggaaagaggagggctttattgacttgatggaccttggaggaaaggggctgtctgtaccgcaagggttgtgtgctccacagccgaggaaattgtgcaagttcctacctggctgtggcgatggcagggcgaccagagtcctttcccctctctagtgctagggattctgtgcgctgcaggcgggtcagctctgtccaacccctttctagaaagttctatggtctgttagttttaggtgggtgtagtgggggttgttttcaatttttc

SEQ ID NO: 24859 - DNA, 840 bp, Homo sapiens
  chr1:47697356-47698196
  hyper
cggagcacaatcgtacgcaacgaagaaaacgcagaagggcctcgaagggtccacatctacacaccccaaccgcgcaggcacaccacactcggacacagagcctgtcgccaagaagaccacacttagaagcagccaacgccgcccacagttctcatgaacgcactctcacaatcccaccgcatgcacacaaccacgaagaagaaatgaaaaccaaccacagcctcgcgcatttctgtatattgcgtaaggaaaagggggaaggaaggaagagagtctccgaggcgggaggggcggcggcagccggggcgggggcgtccgtggaaaatgcccccccaccgccccccccggccatcgaaaggaaccgagggaaagggagcgaagacctcttttgcggacgtggggaaaaagaggaggaaattgatgaagaattcggtgggaggccgcgggttgcttttcccctagaaaaaggccagaatgctcacgtttttccgctacgggggtacgcgtgtggccattttgaggcccggtcctgagcggcggcggcccggcccctcccgcggcccccgctcccccgcccgccccgcgcccgcccggcccctccaccgacgcgctgtaatcccactcacgttccaggcctcgttagcatgggccgaggcgcgccggggccgtgtgcgccgcagagataaggcactgccgcgggtccgcccgcccccgataagcgcctcggccattatgggccaaatgattcattttaatttggcaatttcaccggagggagtggggactggttgagcggcgctaggaccggctccggaacgcgctgcggggagcgttggacgc

SEQ ID NO: 24860 - DNA, 404 bp, Homo sapiens
  chr1:51763181-51763585
  hypo
cgtctggccccggtcccatctttaacctcccgggtcacccttgtcctctccctttcccctgcccctgacgtggagacaccaagtcccggtgactttacctcccgtctcactctaggatcctgctggccttgccctacggctctcattatcggactgccaccatctccacaccgtctccctgttccaggctacccgggatgtctttctgctgtcctggtacacattgtctcctatctccctgctcccactcctgtcccctgcaagccatttcgcacactgacctttttaagtcagatcatgtcagttccttctggaaatctggttatattccatcacactcaggagacatctcctacaatttccttgacacctgcagcactccagccacacgacggcctcagggc

SEQ ID NO: 24861 - DNA, 888 bp, Homo sapiens
  chr1:52194847-52195735
  binary
cgatgtctcaccggattaataaaaatataggcgctcacgcttttgtttaccgatatagtatctcctcctcccctcactccatcaacccccacgcgacacaactttccggaagtaagcaaaatccgttatcaaggtgaaactccggggaccaggctccacagctgccataaactggatggcacgttagaagccggtgggtgtaggtgaggcacgctggcgcccgcgggcccttctccagccgctacccagtgggaatccgcggggctgaagccccgaaaccaggctgagcgtcccagagcgcaacctccctttcccccagcagcgccggcgccgcagaagccgcgtgtccccaggcgcactcccccaaggtgaacccccgccccccacggaggcggctgggtcgcgggtctgggcggggcgctccggacgccctcccgccgctgcgcacccctcccgcgagctgccagctccctcggcctctccacccaaaactggcccaaccgccaatcgtctgcctctcacctcctacagcaggtgacccatggccaatcgccaggggtctctttgccaggagccgccagggccagccaatcggggcgacccctccgccggggaggggacgggaaaggggtggggggtgaagggggtgaagggggtgtcccgggggacgggctgaacctcagtcaggaccgcctgcaccgcagtccggggatcgggtcgaggggagaagaaaaaggggtgctcgggagcagcccccggctacctcccctggaggcacagagggcgggggccttggcgaatggctttcttgctggccacttgcggagtgagtagaccccgagggtctgggagaggggccggcccctacccctgagtccccggggtccc

SEQ ID NO: 24862 - DNA, 490 bp, Homo sapiens; identical to SEQ ID NO: 23004
  chr1:53168691-53169181
  hyper

SEQ ID NO: 24863 - DNA, 356 bp, Homo sapiens
  chr1:54940346-54940702
  hyper
cgcggagggttgagtggcttttgccccacatcctgcggccagcagccggccatggctaggagaggcgcccgacgcctggcgctccccgtccgggtctccggccgctgcggggctgtgagggcccccggcggtaccggccgggggtggcccagctggggtgggcttggggccagatgggctgcgcagcggcggggaggcagggccggcaggcaggggccgcgcgttgccatggggacgggggtgggggcggcagccccgcccgggcgcagggggagcaggtggcgggtcggtgagcaggctgggggaggggccggaaggggcccgcggggtcggggcgcgcccccggctcctccgcc

SEQ ID NO: 24864 - DNA, 212 bp, Homo sapiens
  chr1:6046186-6046398
  hypo
cgcatttgctaacagcacattttgttacctgcctaattaccggtccgtccagccacttgaggacacactggaatgccgtggattccttccaaggctggcgcgctctctgtgggtggggagggacaagcacgttttgggtgaagatcctgtgccagtcgttcatcctgcccgcctgagggtcccgtgggcttcccggatgatctgtgccagtc

SEQ ID NO: 24865 - DNA, 266 bp, Homo sapiens
  chr1:60539349-60539615
  hyper
cggggggcttaccgctagggcagcgtccccaccctggcagctcagaggtgcgcggtccgtgcttctccccaggaagctgacactctcagacccggggacgggacggggcgtggggaccgagcccaggaatccggccaatcacagggcccgcatcgcgggcggcgcctgttccgccctggtcgctaaggacgctgaaggctgtttctgggcggggaccaggtttttctccactgcctaggcaatggacccaggctctggctgccaac

SEQ ID NO: 24866 - DNA, 92 bp, Homo sapiens; identical to SEQ ID NO: 7735
  chr1:61833628-61833720
  hypo

SEQ ID NO: 24867 - DNA, 1379 bp, Homo sapiens
  chr1:63785002-63786381
  hyper
cgcttgttgagactcaaagagtcactcaaactcataattgcgtgtgtgtgtctactcattctccctctatctctccaataaccctttgagactcagaaactttttatccacatacaccctttatcacattttcttccccccactacatgtgtctcactttctctctgtatctgtctcgcttcttccgtctctgtcctacagcttggcggtaactgacgacctgtgagcttttagctgcaaactgcaactacgcggcaaacaatttatttagcccgacatctagccggtctccggcaggaccctgcaccgcgtcgggatcggacccttccgctggggcggcctcctgcgtcaaggccagcaggaaccttcctgtcgccctccccggccgccgcttcgcctccttcccgcccccggaggttgtgcaggcgctatggtccgcctggagggagaaagccggcggccggttcctgagccgagagcggccgcggaaaaatcctctgcctccgctggaaatcgatattaggccggcgcgggcgcgggacgtcggggccgcagccagtaggttgtgcacgtctcatcatttagctaatcgagtcgaaaagtttctgtaagggccggacccagcatcagatggtaacactgattgaacaagagattagcacaatagatctctaaccgaggggaagcgttgcttttcacgctacgcgccgtaattaatggtatgaatcaattaatttgacttttattgtgtcgaaggaaaaaagcgcaacaaatggaaccggcagctgggagttgttcgtcctccacccccttccccagggaggttccaaggagacaccggggaatggacggatcaggctgggccgtggcagagggagggtaggaggcagcgaccagcagcgtggagggagtccagagagctagcctctgcggacggcggaatcgaaattaggctcatttggagactacttcgagaccggtgaggggagccctgtagccaccatcctccggcgcgcatccacacatactagtccacgcgggcccagccaccaaggccgcggcagggccagcgctgcgccccgggcccctgcctttagggctgggcaacccaagcagagcaaaggaggttcctgaatgtgtaaatttccgctttttagctttttttttttttttttttggaccttccgacacttcggttgctgaggcagttgcagacgcgacctctgcagtcctgggcgatggccagccagctcagctcgggtcggtttcgcggaaagctgtctagacggcattgtaaacggttcggagcctgcgggccacaaagctgtggagctacggaaatcaactctgagatgcgttttagggccgtgtgcaacctc
